United States Patent Application Publication US 2004/0031072 A1 - sequence listing, part 22

SEQ ID NO: 100214 - DNA, 1440 bp, Glycine max
  unsure (1)..(1440): unsure at all n locations
  Clone ID: PAT_MRT3847_61508C.1
aaaaaagacaaggaaaggagggaagaagggcaaactcatcagatcaaaacaacttccttaagaactaagaaggacaatctcatttcattggttagttttcacatcctccaacaaaagtctgagtttgaaacacagcataaacaaagcaaaatatgagtgccactctccctttttaaatggaaacaaagctgaagacaccacaagaagaaaccaatagataacaaactagagatagagtgagagtgagagtgagagtgagagacatgtataggttcagcaacacagtgatcgggttcttgaacttgttcacacttttagcatccataccaataattggagcaggtctatggatggcaaggagcagcacaacctgtgaaaattttctccaaacccctcttttggttataggatttgttgtgcttgtggtgtcactagcaggcttcattggtgcatgctttcatgtggcatgtgcactatggttgtacttggtggtcatgttgttcctcatagcagcactgatgggtttgactatatttggttttggggtgactagcaagggtggcggtgtggaagtgcctggaagggtttacaaggagtatcatcttcaggattattcaccatggttgaggaagagaattcaggatcctcgctattggaacactattagaggctgtattttggggtccaaaacttgtgaaaagcttgcctcttggacccctcttgattatatgcaaagggatatgtctccaatacagtctggatgttgtaagccaccaactgcttgcacttacaacgtggcaacaatgatgatgacccaagaccctgattgctacaggtggaacaatgcccctaatttgctctgctatgagtgtgattcttgcaaagctggtgtgcttgaagacataagagggaattggcacaagctctcagttctcactgtcaccatgcttgtgcttcttatagggatttattccattgggtgctgtgctttcagaaacacaagaagagctgaaacggactatccctatggtgaaaaccggatgaccaaagtccgacccagatgggattaccattgttggaggtggttacatgacaggagagaacagctttattagcttaccatccatccatgcttgggttgggtgctccatagaaggcatcaaggtctttgtttctaccagctttcctaaatggctgctttttgtataaggcataaatttgctttatcgtaaaacaccgatacttctttttttttgccttttctcattagtggatggttttgaattttaatacatcaagtacactgaattatatgcaacgtgggggatataatagaataagcactctaatcccacttgcttttctgttctttttcagcccaattgactcttttaaagtaanaataaatggaagatggaattatcgaataagttctaaaaa

SEQ ID NO: 100215 - DNA, 1401 bp, Glycine max
  unsure (1)..(1401): unsure at all n locations
  Clone ID: PAT_MRT3847_61509C.1
tgcggattgttccttcctatgagttggtgcggaggttccttgaatccgataagaaaacgatggattgcattcgtggttgcggacatttctttggttccgatcgtgcgtcgcagaatgtgaagttgttgattgatgagggagccacggactccgtcatcgcctttttgttacagagaanggttttctgtgatcttgtgttctggttttaaggagaccttggatgaaattaaggaaatggggtttgagcctttcaagaagaagtttggggtggcgctgattgcaaaaaagatcgttccgaaatcgcactgggaggctaaagttgatgtctttaagagatggggttggtctgaagaattggttattggtatgttcaagaggcagcccctctttatgttagtgtcccaagataagattgatcgggttatgagattttgggttaagcagttaggttgggattctttggcccttgccaaaaagccagagatttttggatttagtttggagagaaggatcattccaagggctcttgttgtccagtatttagtcgctaaaggcttgaggaaaaagagtgccagcatgattgtcccatttgctgtttctgataaggagtttcttgaaaagtatgtgatgcgatttaaggaggaagaagcggaactattaaagctgtaccagggaaaaatgagtggtcatggaaataaggaggatggtgcagctcctttaaccgtagtgtaatttaaaaaatatctaggtccatatttaatttattccatgttagtggaaataatgtcaagtgaaggctaagtttgagtgattgatatgtttttcagacgtttagctgggaaatatatcatataacagctttcggatacagcattataggctagagctttttacttttgttgtttgtatggtcatggtcacttgagatggataattgtggctgagaggatactaaggatttcctgcttcagttttgcagttcctttatataaggtttgatctagaaaatggtgctttgaagtaagcttctgacctttgggggagaagcttcaattatgattcaattgaagttatgcccttatttgcagcatagtggtcaactggtcatgtcaatatgttagggcagatgtaagacaagttctttggttggagaaacttgaaaatatgtgaatgtccaaatgttgcaatatgatgaaatcatatcaagctgcaagaacttgttaatatttaactttatgtgattagtttttttctttcttcatggattgtattggtttagtttatttataaaatataagcttttagatgtaggtggctgtaaactgaattgtattcaggttgaaaaatattcccaagttaggatttattctagcctgcttttcagaattctgtaatgtattt

SEQ ID NO: 100216 - DNA, 193 bp, Glycine max
  Clone ID: PAT_MRT3847_6150C.1
ggcaggacaacggagactatatttctgtcacaatattgacagtaggtggcaatgtacgtagcatttgctactttatagccaagaggcttaaagaatggaaacacttcgcaattataacaatcagtaactaattcaaatttagaactgccggaacaactggactaacgaaaattgacgtaactcaccggaccat

SEQ ID NO: 100217 - DNA, 167 bp, Glycine max
  Clone ID: PAT_MRT3847_61510C.1
acccgtcgagccgtcggaaacagactaaggcactacaccatggccctcttcttacctacaaactcacaaccttttccttccgaggtacataacctactactatgtgtcattgtcattccatcgcaacgccgctcggcattcgatcctcgaccttcgaggcggcagcc

SEQ ID NO: 100218 - DNA, 1218 bp, Glycine max
  Clone ID: PAT_MRT3847_61511C.1
cggctgcgagaagacactgaaggggatgtgaaagatgagataatatcgggagtgggtggttgggtctgaagtctgaacaaacagcctgaaacgacgactttccaacacgtccggaaaagaaaataggacagaacatattgtataataataataataaaaaacaacagacaagtttgttgttcctgttctaatctctggaccatgtcatacaactgaatctaattgcaattcctgtgagccgtggcaaagcttttgaatttagtgcctctcctctctgtttacccttccagatattgcagatacagcaagatcatgagtgggacttcggaaaagaaacttgtaagaatcgatgttagttctgatactgtatgcccatggtgctttgttggcaaaaaaaatctagacaaggccatagctgcctccaaggataaatacaactttgagataatatggcatccctttcaacttagccctgatgcccctaaagaaggcattgacaagagggagtattacagaagaaaatttggatctcaatcagaacggatggaagctcggatgtcagaggtgttcaagaatgttggcttggaatatagcttgtctggactcacgggaaacactattgacagccacaggcttatatattttgctaggcagcagggtcttgacaagcaacatgatctagttgaagaacttaacattggctatttcacacagggaaaatacattggtgaccataagtttcttctggaatctgctgcaaaggttggtatagaaggagcagaagagtttcttaaggaccccaacaatggtttgaaggaggttgaggaggagctcaaaacttactcaggaaacatttcaggggttccatattacgtgattaatgggaatcacaagttgagtggtggacaaccccctgaagtcttcttgagagcttttcaagttgctacaaattagaatttcaccttctcacattttctgcttccctctataagaatgaaaccttggaaataaaaagttggccattcactgctttataatactctatcaaatgtgaaacttgtatggatataatgtaagacaatattcataattcatgtcttatataattatatcaccgtttgtgtctttgaacgtgcaccggatgcaaccataataaattgaatgacttactgattaattggcattgcagtcaatcatcattgtttatatattgcaagt

SEQ ID NO: 100219 - DNA, 494 bp, Glycine max
  Clone ID: PAT_MRT3847_61512C.1
gggggggcaaaagatttatattttttaataattaaaaactagtcccagaggactagagaagaacaaagactagatgggtccctccaaaaaccccttcctaaaccctgggattaaggaaacccatcaaatctatccaaaaaacttcgaaatattggaaaacccgggggggaagctagttttgaaatctttatctttagccttggccccggacccaagaagggaaagggcgtgacccatgactttatgggggccgaacgggcttccttggaaaatcagattgtttttatggggcccatttgaactagtgagggccccgccccccccccccctattatcctggtttaccgggtcccccaagcccttcgcagaattggggaaaggggggcctggtggatgaccttggggggcggggcctcctgcccggggcccctgctgctgggttggcgccccgttggccttgtgggggcggttgggggggggggggagaggggggg

SEQ ID NO: 100220 - DNA, 718 bp, Glycine max
  Clone ID: PAT_MRT3847_61513C.1
tcgacccacgctttcgcccacgcgtccgcaagtttgtttgttgtccctcgcgtaatctctgaaccatgtcatacaactgaatctgatagcaaagcttttgaatttcgtgcctctcctctttgtttaccctaccagatattgcaaatacagcaagatcatcatgagtgggatttcggaaaagaaactcatcagaatcgatgctagtgctgatactgtgtgcccatggtgctttgttggcaaaaagaatctagacaaggccatagcttcctccaaggataaatacaactttgagataatatggcatccctttcaacttaaccctgatgcccctaaagaaggcattgacaagagggagttttacagaagtaagtttggatcacaatcagaacggatggaagctcggatgtcagaggtgttcaagaatgttggtctggaatatagcttgtctggactcacgggaaacactattgacagccacaggcttatatattttgctagacagcagggtcttgacaagcaacatgatctagttgaagaactgaacattggctatttcacacagggaaaatacatcggtgaccataagtttcttctggaatctgctgcaaggttggtatagaaagagcagaagagtttcttaaggaccccaacatggttttgaagggagtttgaggaggaactaaaaaaataattcccggaaaacattttcaggggggtt

SEQ ID NO: 100221 - DNA, 1939 bp, Glycine max
  Clone ID: PAT_MRT3847_61514C.1
cctcgaccgattcggctcagagtgcctggcgtcgcggacacagaccagagcttgcagaagcgatttctcatttctcattcttaacaacacacttcaacaatggccaaaaccttcaaatacatcatcctcggaggaggagtttccgctggttatgcggcgagggagtttgccaaacagggcgttaagccaggggagttggctatcatttccaaagaagcggtagcaccttatgaacgtcctgctctgagcaaggcttacctttttccagagtcccctgctagacttcctgggttccatgtctgtgttggaagtggaggggaaaggttgcttcctgagtggtacacagagaaagggatagagttaatacttagcacagaaatagtaaaggtggaccttgcggcaaaatctctgatcagtgcgggaggagaaacattcagttatcagattttgattgttgcaactggctcaacagttataaggctgacagattttggtgtagaaggagctgatgcgaaaaacatcttttatttgagggaggttgatgatgctgacaaattgtatgaggcaatcaaggcaaagaagaatgggaaagctgtggttgttgggggaggatacattggtctggagcttagtgcagtgttgaaactcaacaatattgatgttaccatggtctacccggagccttggtgtatgccacgactttttacggctggtatagctgaattctatgaggagtattacaaaaataagggtgtcaatatcattaaaggaactgttgctgttggattcacttctaattctgatggagaggtaaaagaagtcaaactaaaggatggcagggtcctggaagctgatattgttgtcgttggtgttggaggaaggcctcaaacagccttagtcaaagggcaggttgaagaggagaagggtggaatcaagaccgatgctttcttcaaaactaatctttccgatgtatatgctgttggtgatgttgctactttccctttgaaattatacggtgaattgagaagagttgaacatgttgatcattctcgcaaatcagctgaacaggctgtgaaggccatcaaggcagctgaggaaggaagaacagttgaggagtatgattaccttccatacttctattcccgttcatttgatctgtcttggcaattctatggcgacaatgtcggcgacacagtactattcggagacaacaatcctgcgtcgtcaaagcctaagtttgggacatactggattaaagatgggaaagttgttggggtctttctggaaggtggaactcctgaagagaaccaggctattgctaaagttgctaaggtccagcctccggttgcagatgtagatcaacttgctaaggaaggcctttcctttgctagtaaaatataatggttttaatagggaaggataaaaatgcttggtggtttgcatagaagattgtatctgatctggctttattttactctgaattatgctttgacgacgcaggattgttgtctccgaatagtactgtgtcgccgacattgtactattcggagacaacaatcctgtcgtcgtcaaagcctaagtttgggacatactggattaaagatgggaaagttgttggggtctttctggaaggtggaactcctgaagagaaccaggctattgctaaagttgctaaggtccagcctccggttgcagatgtagatcaacttgctaaggaaggcctttcctttgctagtaaaatataatggttttaatagggaaggataaaaatgcttggtggtttgcatagaagattgtatctgatctggctatattttactctgaattatgcattacagaagctttattttgtgttattcgtttgatgtggttgcacgggatatatatatatatatatattgccgtatctatttcaaaaaaaaaaaaaaaaagggcgggc

SEQ ID NO: 100222 - DNA, 672 bp, Glycine max
  unsure (1)..(672): unsure at all n locations
  Clone ID: PAT_MRT3847_61515C.1
ccacgcgtccgctctaggattgggtgtttccctttctcttgcatatgtatgggtagaccttggttctagatatattgcttgtactttccagtcattagttttatattatatgtatttttggacatatccacactctgatatatctaatgatttgacactacttattgtataagcattctttctctctctctctctctctctctctctctctctctctctatatatatatatatatatatatatatatatatatatatatatatatatatgatggtgtaccttcattcaaaagtgtacaatttatattcgaaacgcatttgtttttaccaagcgatctatatttctgccaccactcatatgtataaaggaataaaaagaaaaaaaaaactacccacattttcttaatgtaaagtgtttccaaaattggattaatgaacacaattacattaaaaatgagttttgatataatggaaaaagtttgtgtttattcacaatagatttaagggtgtcacatctagtagtgggactttgttttgggctagagcccattgctagcccaacccctataaagggggggggagtagttgacttttaacccttgtaatttttcttgcttttagccaaatagctntttttttctttgttgcttgncaagcgcatttgtaaattata

SEQ ID NO: 100223 - DNA, 340 bp, Glycine max
  Clone ID: PAT_MRT3847_61516C.1
catttgatgcgcttcctatatatgtgggataggatcaatttacatgggatgtcaaacttttacacttatacgacttaataactttttatagatattataaaatcaatcaattcaaaccattcgatcatatttcatattctctttacaattatgtatatataaagcttcaaacaagttaggcatttgtttatatgttatctaacaatggacatttaattaattatattttaaatagcatattatccataatttatgtagtgtcatgaagtagcaattggtttttgatttataaaaaatttataagcttgatctactttatattatttgtgtgtgtgatgat

SEQ ID NO: 100224 - DNA, 982 bp, Glycine max
  unsure (1)..(982): unsure at all n locations
  Clone ID: PAT_MRT3847_61517C.1
acaaggagcccaaaaacnaaaacttttttcttccnntaaataattttgaatttaattataaatttactgacaaaatgaggagaatcaagattcctcttcctcccgtggatgagaagaaaaaagtaattgaggatgttgacaaggacagaagatatgctattgatgcctcaattgtgcgtattatgaagagtagaaaagttttgggctaccaacaattagtcgttgagtgtgttgagcagttaggtcgcatgtttaagcctgacgtcaaggctattaaaaagcggattgaagatttgatttctcgtgactacttggaaagagacaaagataatgctaatatgttcaagtacttggcttgacatggtatgaataattgtgcaaatgaagtggttactgcaaaatcaaaacaaaaggatcatgcttgaacttctgaaaaaaaaagagaggagtttttcctaaaaaatccttgaaggaggagctgtcagtgcttgtatattttgcctccatgtagatgtgtgatcatgttgggaaattgtaatcaaaattccataatcctgctcactgatactttcaccatctttttgggttctgattgctgcaattccttctcacaatgcccgttggttatatgattcccttccctccctccccccaaaattgtgtaagcgcttcaaggaaattgtattttgattatcagcttagaaatcatcaggtgattgggtatgccttttaaatctaaacccaactgctatggctcgacattaatttgcctacgataatatttcacaacgacatttctatattttgtagtgtctgatattttataactgttagaggatcgaattatcccaaggattaatggtattgctgcgtggatatggaatggatctttactatctaatgccattcttgttcgtgattcgtacaaatgttcgtagaagtcactttttacgtcaataataaaatatttattattctaatt

SEQ ID NO: 100225 - DNA, 694 bp, Glycine max
  Clone ID: PAT_MRT3847_61518C.1
gtcgtaaggcttttgggctaccaccaattagtcatggagtgtgttgagcagttaggtcgcatgtttaagcctgacgtcaaggctattaaaaagcggattgaagatttgatttctcgtgactacttggaaagagacaaagataatgctaatatgttcaagtacttggcttgacatgatctaagtaattgtgcaaatgaagtggttactgcaaaatcaaaacaaaaggatcatgcttgaacttgtgcaaaagaaatgagtttttcctaaaaattttcttgaaggagctgtgagtgcttgtatattttgcctccatgtagatgtgtgatcatgttgggaaattgtaatcaattccataatccagctcactgatactttcaccatctttttggcttcaattccttctcgcaacatatttgatgcccgtctgttatctgcttcccttccctccctccccccagaattgtgtaagcgctccaaggaaattgtattttgattatcagcttagaaatcatcaggtgaatgggtatgccttttaaatctaaacccaactgctacggcctatggatcgacattatttgtctatgaatatatttcgcggcgacatctctactctatatttggtagtggctatgctattttaaaactattcgaagatgagattatcccaaggattaatttatggtattgctgcatg

SEQ ID NO: 100226 - DNA, 349 bp, Glycine max
  Clone ID: PAT_MRT3847_61519C.1
gatcactggttcttgtgaatctgatatttacaggtatggtagagactctcgaacatgctctgctttcattcacccttgttgtgaaacagattattagctgctgttacaaaatggatgctactacacccaagtattccaaggtctggtttgatgaaattgtgaaggaactctcttactacttcaagatagtacgatacaaccctgacaagatcccttatgttactatctctggttttgacggttacaacataattgaaaagtccacaaacctttactgacacaagggtccaaccctgcttgatgcactttacctgattattgatcccaagaagtcctctgacaagcccct

SEQ ID NO: 100227 - DNA, 519 bp, Glycine max
  Clone ID: PAT_MRT3847_6151C.1
ccctcaaaaccaaaacctttttggggttctctttctcgttggaaaggttagaaaaaaaaaaaaatccaggttttcccaacccccccctatttttaaactagtggaaatcaattttgggggagacaactccaatggtctttactcccattggcaacagtttttttttatagaggaattccccctttaagggccaagttcaaaaaacattttctgaatgcaacaaaattgggccttccccctccccatggagggattctccactctcatcccagctaaaaaaaagctcaaagtctggggctaataacccctttcgaatgtttacaatttcctcaggtaaacaacccaagactggcggggattaaggcccttctcaaagataggcatcatatgtcaaaaccattttgaatttttcattaccgacaaaccaagggctccgaaaaatgcaatttggggggggttgtttttcaaaaggcagctctccttggggggcattaccataaaactcttccaaattgaaaa

SEQ ID NO: 100228 - DNA, 469 bp, Glycine max
  Clone ID: PAT_MRT3847_61520C.1
aaaaatacgatatttattgttgtaaaccatatttttttttaagagaatgtaaacgatatggttaatcatcaattcagtctctaccaaattgatctcctgaaaaaaaaagtcatttatattgtaaactgacaaataaaataatggcgatgttaaatacttgggtgacacaacaaataatcattttttcctttcgtctctatttacacgcattaaattctcaggttgatttcaaaaatcattttcctatataatttagttttggaatcaacctgaacaatttaatgcctgtttgcttccgcataaaaaacgtacataattatctatttctaggtccgatttgaataaggacgaatataaaggagagcgttagtttaaacgtggatacaattgctttggcgtatatctaaacacgctattagtccctagtatcctgaaatggactatgcatatccaattgaactaccaaaga

SEQ ID NO: 100229 - DNA, 347 bp, Glycine max
  Clone ID: PAT_MRT3847_61521C.1
tgagtgtgtgagagagcgagcgtgcaagcagtttccaagagaggattcgtgattatcaactcgagggattgatcctggtttcttgctcttatatgtctatttatcccttattcataatcttactatacagcatcgtgattctcacactcacacatacacacatattaaactcatatagatcctacgatggctttaaagcacatacttgaggagctcatggactagcagaacgtcccatcaacttcttgcaacgctattaccgtaattctagacatgttccattggcaagcaactattataggtactgctgatagtccttatgctggaagtctattccgtagtactat

SEQ ID NO: 100230 - DNA, 469 bp, Glycine max
  Clone ID: PAT_MRT3847_61522C.1
aagagcaaaaaatctcttttttattgaccaccacaagagattttgcaattttgcgcatttttgcctggccattttttccagtcctccccaactagaaaaccgacgacactctaccccaagattttaaaaaaccacacaaaagaaaaaaaaccttctctaactttttgaaacagccccttttacttgacttgaggaaaaaccattataatggtttgaaaaaacaaaatcagcttgaccatgagccgggattcttctactaccccaattggaagaaaaactaacccaaaattcaacaaaaagaattcttatcctataaccaccttcctcctaccttttattcccccaataaagctccttcacaggcatctaatacctacccacaggggaagacccatgcttccccaaccacttgtcaatacaattaccaagaaacctatgcttacatggcaatgtcctttgccaccccacc

SEQ ID NO: 100231 - DNA, 271 bp, Glycine max
  Clone ID: PAT_MRT3847_61523C.1
gaaggtctgccttccctttaaatggtgggtaatactggtgcgcttacatgaaaaccagctattccaagcagcccgtgccaacacccccttgaaatctaagtccacattaaggggcgttaaggttccaatgcttctattcccagacacaaatttgggaaaaaaatattttaaatggagatgggatgggaacttaaaaaaacagaattacattaaggtttacaaccattcaatggccattattggccacacttcccctatattaaaatataaa

SEQ ID NO: 100232 - DNA, 538 bp, Glycine max
  Clone ID: PAT_MRT3847_61524C.1
ccccttaaatttcaattaggcctattgagtcttcaattatcacaattatattaacaattgtcttatccaaaacttctgttcattcttaaaaataatcactgactaattatcatttccaattttttgacgatgatcagttttagttaatttgacatgtcttcacaatcaatgttaatgacttacttttgcttcttcgcaaacttttagaatatttagttagcagggaaaataatactattcatcttttaactttaattagcagggaaaataatgctattcatcttttagctttattttaaggtttagcttaatcattaatcttttccccccgctgagcttgattctctagttaagtttttcaaccaagcctttgccatatcatgttctaattgacaattatttacttcaaaggttgccctttaaagtaacaaaggaaaataatactattcatcttttagctttatttagcaggtaaaataatcatgttcatcttttagctctattttaagggttaacttaatcattaatcttttccccc

SEQ ID NO: 100233 - DNA, 311 bp, Glycine max
  Clone ID: PAT_MRT3847_61525C.1
tgcgtaccatttttcctatagtgaggggcggaaaatctcgttttaaaacggttataggtgtccccagtgtccattagaaatccccaaatttttttgggagggttcctttccctaacctaaaaaacttgtttttttacccccaaaaaaaaaaatttgaaaccctttgtgcaaattttttccccgggggttcaaagggaaatacccctgtattttcccccccgtaaatgtgtgccccttcgcgcggggggttgcccaaaacaaaaaaaacaaattttctttttacccgaccccggggtgaacccgggaatttc

SEQ ID NO: 100234 - DNA, 298 bp, Glycine max
  Clone ID: PAT_MRT3847_61526C.1
cagctcggaattcggctcgaggtgaactgagatggctggcggtggcatttttcatttatttaagaggaaactccaatctcagcctccgagttcttcttttactccatccattaccacaaagaatgatcgatatgactctactggcagcgactacttaagagtgcttgctatggctggagctgctgctaacaggcttctcaggtttgctgcaacagcatttgctgatgaagatgcacatggcctgacatgaccaagctttccacggactaacaagggcgttcctactgcacttgatcat

SEQ ID NO: 100235 - DNA, 188 bp, Glycine max
  Clone ID: PAT_MRT3847_61527C.1
gccccacgctttcgtttttgaatttatgagcgaacggtctttggccgaacgggccaccgtagcaaaaatgtctcctgcgtgtgcagcaaccatggccttaattgctgtggatcctgttactttgcaaaagcagagactgactggcagaagtaatgagactgttcctatgatggaatcgcacttacctg

SEQ ID NO: 100236 - DNA, 337 bp, Glycine max
  Clone ID: PAT_MRT3847_61528C.1
caacttcaacgcgtacgaacatcgtctaccgcgctttcttttggaccagagctatgattaagctttataaaggcaaggaatagcagagagaacgtgctgaaaatgcaagtggcggaccacctgtttagaagcaaagtgctggacagttgggactctacaaagatataagcgagctgtacactacgatatttatgaaccgtgcaattctgcattggcatacatgatctgaggaacgttgaaagttcaattcgacctcgtgatgagatattacttaggtggaacattaatggtatccttacaagtgtctaccatttattcacacgaagcaccactggtt

SEQ ID NO: 100237 - DNA, 234 bp, Glycine max
  unsure (1)..(234): unsure at all n locations
  Clone ID: PAT_MRT3847_61529C.1
gttcaaaccnaacacaaacccgagcacagattctctttgtattcccttttgcttctttcttctcccccctgttcattttttcaaacactgaaaacgcatgcaccagcaccagcagcaagcacgtaaggncgtcgtcgagagaagctcgtttctctcactcgctacaaccctcgaatatctctgggatatgtgaaacttggcaacaagcagtatgggaaacaacgtatttgaggg

SEQ ID NO: 100238 - DNA, 269 bp, Glycine max
  Clone ID: PAT_MRT3847_6152C.1
gcaattcaaacttcacggcgtgcatcatcatggctcgtctcgcgatcgctgtcgccgacgtgctcctggtggccatatacgcctgcaccgatacggcgcgtccctgcaggaccttcataatcttcatctactagatccgcatccctaaatccaacaccttctgcactagcaccgtgatacgatcctttacccctatgtacatcaacgactaacccaacggtaaaaccttgtactactacgaacatttatttcaccaaggcacttaactt

SEQ ID NO: 100239 - DNA, 616 bp, Glycine max
  Clone ID: PAT_MRT3847_61530C.1
ccacgcgtccgtacggctgcgagaagacgacagaagggcacgactgatgttgcgacccaggtcatctcgggtgacacttgacctcttgtccatcatggaggagcctgtgacaacaatccgaattttgggtattgagattcaaccttacctcccaccaccacctgggtctgtccgaattttgggtgttgagcttcgaccttaccttccaccacctgggccattgtgggaacctgacgctcctgtatccaacacaaacatgaagccacaaccctcataattggtctaccctgttccgagaaggaagcaattcggatggcagagctggatttgagtttgaagatttagggaatttcgtgtctaaggttttcaatcgagtttgcttgagacttaattgagtttctacattttgtttgtttttctaatttatgtttcacaaggccttgtgaatttagtccaagctaattcaagttggtgataggtcgtggttagtctggtagttggtcgtggattttcaataataattatgtcctttgaaatgaatttcaatcgattaattaatatggtttggcaaaaaaaaaaaaaaaaaaaaaaaaaaaaaagcggccgctttagagga

SEQ ID NO: 100240 - DNA, 849 bp, Glycine max
  Clone ID: PAT_MRT3847_61531C.1
gataaatctcaccaaattttgctgagactaattagtaaaatagaggcaaaaaatggaatctaaagagtccatctttgtgaagcttttgctgattctgcatttgtccgttctctgtgtttcacaggattttgatttctactactttgttcagcagtggccaggatcatattgtgacacgacacagaacagctgttgctaccctacaactggaaaacccgctgcagattttggcattcatgggctttggcctaattacaaagatggttcatacccatctaactgtgattcaaacaatcgttttcagccatctcagatatcagacctcactagtagcttgcagaggaactggcccacactagcatgcccaagtgggaatggggttcaattctggacccacgaatgggagaaacacggcacttgctctcagtcagtccttaaacaacatgactattttgaaacagctctcgatctcaagcagagagccaacctcctccaagctcttacaaatgctggaatacaaccagatggagggttttacagcctaagcagcatcaagggagctataaagaatgcaattgggtatactccatatattgagtgcaatgtggacacatcacgtaacaaccagctttaccaagtttacttgtgtgtggacacctcgggctctaacttcattgaatgccctgtgttccctagagggaaatgtggctcccaagttgagttcccaactttctaatactaggaaccaataaaggtgtcaagtgcatcttacccttcatgtttgttaatttgcagttatctgtgtatgtatttgcaattatattatagtctttagtattctcatgagct

SEQ ID NO: 100241 - DNA, 1254 bp, Glycine max
  Clone ID: PAT_MRT3847_61532C.1
gacggctgcgagaagacgacagaaggggagaggaaacatttgcaatggctaacaacgtcgttgttgttcttaaggtagctcctgtttctctgcctccatttcccataacaaacaatgctctcactttcaagagccaaagacacacacttcatctgaattgcttccaaaccaaaaacagaacaacctcattcccttcttcctcgtcaatcctcagaaacaaagctagttgctctgtgttggcgtgtctccctcctgaatcctcaacctcatcttccactgctaaaccctcttttccttctcctcaaactaagctttatgtcagtgggctatcatttcgtaccactgaagagagtttgcgaaatgcatttaagaattttggtcaacttgtggaagtcaagctggtgatggatagaattgctaatagaccaagagggtttgcttttcttcgttatgcaactgaagaagagtcgcagaaggctattgagggaatgcatggaaagttcttggatggaagggtcatatttgtggaagttgccaaaccgagatcagagttagcgccaaggaaacaggaagacactagattgtaatgaagatccaatcaaaggatacagtagccatatgttcatcttggattcttggtgtgcaataggaagaatcattgcagcattgtacttgacattttataaaagacccctacttgattaaagttttttgcctcccttattttccaccccactgacactcttaggattcagcaatgaaaactcttttaagcaccacggccatttctgcaatatattgccaaatttatgccatttgtgcataatgtactcgttgacaatgttacaaatgtcaatggcgtttcttgaagtagttgttatcagaaatcagaattttgttgctgacttgccccaaaaaaaaaaaaaaaaaaaaaaaaaaaaaaaaaaaaaaaaaaaaaaaaaaaaaaaaaaaaaaaaaaaaaaaaaaaaaaaaaaaaaaaaaaaaaaaaaaaaaagggggggccccttaaaagaacccaattttacgacccggggtttggaacgccaaacctcttcaaaagggcccccaaaattcattccccgggccgccttttaaaaacgccgggatgggaaaaacccgggggtacccaaattaaatcccttggaacaaaacccccctttccccagttggggaaaaaaaaaaaaggccccccccaatcccccttcccaaaatttgcccaccctaaagggcaat

SEQ ID NO: 100242 - DNA, 536 bp, Glycine max
  Clone ID: PAT_MRT3847_61533C.1
gattctttgactgctgttctcactgtgggcggctgttgactccagctgccgacgatcaaggcgaatgccatagtgtggagggcgttggcgtgtaatgcaccgagtacagtctccgatctcccgaaagagtgcctggcattatgcgttcgagtatcgtaacttcgtcgatcggaaccgctgttgcgtgcgggcgggcggtggcttcagatcgaaggacagagcaacacaggctctctcgtgaactaccgaactggatctggttcctgcgattgcgccgctgctctctcagttcgatgctgagacgaagctagcgctgagatgcgaccggacatccgtgagcctacgcgacgacgcactcgtgctgatctagcatatggcgccctagcctgacgcacctgaagcttcacgcgtgtcgcgatgctcaccgacgcatgaatggaagcgttcgcgagaaactgtacaggattgaaaaagctctcgtgtggatcgcagcacgtttggatccaaaggcatgatcgcggagctcgacaactgcg

SEQ ID NO: 100243 - DNA, 467 bp, Glycine max
  Clone ID: PAT_MRT3847_61534C.1
cgctttcttggactcaaaatctagcagcttccttgctgatggtccctcttatcttggataagtcaatcccagaggggcgagccaaagctcagagcgtagcaaccatcactgagagacatgttatcatgactgaaacccccaagcaagcagatcgccattaagcaggagggtcatgctgaatcagctactaggctctgggtaggcaaacgctttatggcgctctgaagctcggtgaactagattgaaatatccacagcttgtgctagaatgtagagactgtggaggacaagaccatcacatctaagtgtgtcacatgttatggttaaggagacagatcggtgaggttatcaggacctactgccataccactctatgatccttaatagaggctgaggctcatgatacctatcaagtgtgttaagcaattgctcagctcaactaaacgtgaaatgaagaagatctcacca

SEQ ID NO: 100244 - DNA, 205 bp, Glycine max
  Clone ID: PAT_MRT3847_61535C.1
ggactgcgtatgtcgtgagagaaaggtgaagaactcggtggagggaatgaaaggggtgacagatgtggtggcgtatagaatggccagcaaggtatctgtttccggctatgtggaaccctcaatggtggctcctcgcattgctcaccgtactggtcagagagctcagctatggccatactttccgtacgacgctgttgctgcaccc

SEQ ID NO: 100245 - DNA, 401 bp, Glycine max
  Clone ID: PAT_MRT3847_61536C.1
tcataagaaaatgtcttttattgcgcgacatgaaacatccgttatttgcagtgctcaagaatagaagggcctccctttctcaagagtctgaagtctagccaccctcgcaacctgagaaggggaggggggcacatcttgccggaagggccccttgggaggggcgtaactggggtcctggactttcttatacaagtcatagttgctgggcccctaggaaagaggctgcttcttcatctgctgctccttccagctctgttcctgagaaaagagctcctaagtttccagcatgaccctggcgttgaagccctgtcctcccaggtagccgttcctggagccttggtagctggagtacctagggttctctttggcactctggaagccttccccaggggagtagttct

SEQ ID NO: 100246 - DNA, 612 bp, Glycine max
  unsure (1)..(612): unsure at all n locations
  Clone ID: PAT_MRT3847_61537C.1
tttgccgctgctacatgtgtagtagtaccgccttcttgggggggggggggggcccacgcaactagactggtgttaggacagctaaatggtagataggtggaaggcaggcacggagttcacaaaggcgaccaatagcgacaacagttagcgcacattataggtggaccaacgccgccgcaatgagcgctgcggaaattgtttggtaagataggacccgtgctttggcaccgtgtaaccccgtgaagggttgggactaggctaataatagttggtaggcggccttgtgtagtactgggaggctggatatagacaaagcatatgctgacacgggcgactagggtagctagccgcccagtactttgtttgtgaactgggcgcgtaacaagcgtacaacccgtgttgggctgacataacgccggttgaatttatgcaattaacgcgctatttttgccgacacggcccgtgaagcccgcttggttgcgcacaatttgtacgacaattagcttaaaatgcgatatagtatgtggggtacggagacctgctacgcagctagctgtancacttagcgagttagagcaattactaccgacgcgtgggcaagcctggccagta

SEQ ID NO: 100247 - DNA, 157 bp, Glycine max
  Clone ID: PAT_MRT3847_61538C.1
agccgtatggttcatggactagcgccagatcattagcgaggatggtctcgactacatgtgcaacccaagtctgatccacgcccagagtatgctcgccatctggcccacactagttactctaatgggtggacgatgacgttaccgtattgctgatggc

SEQ ID NO: 100248 - DNA, 374 bp, Glycine max
  Clone ID: PAT_MRT3847_61539C.1
acgaccacgcgtccgaccacgcgtccggaaattttgataaaccgagatcacaggttgtcgcaccttaaaaccggaaacaaaagcactagttactggatttcaagaatcttgcaataagttactacttcttggtgtacgatttcttacgggaaggaaaatcactctctgagctggacacagacttcgtgaaacattttcttttccactcttaggttatttgctgaacactctcctatctgatataggacttggtgtcagatttaaactttttctggctctttatacagttctctgctgaatttcaagtttaagctgtggaaatcgcgtattagggctgacactcttatatctgggataggacttactgggtagac

SEQ ID NO: 100249 - DNA, 280 bp, Glycine max
  Clone ID: PAT_MRT3847_6153C.1
cccacgcgtccgcccacgcgtccgatgaaaaaattagcaagcctataacaaaaaaatgagcgtgttattaaccattaaagcggaggcagacctacggtaaaccttaacaacatgcgtttgcatggtctacaaacatggaaagcgcattaaagggggggcgcgctctgggggtactaagtttacgaagcggggaggttgtagatattgcttatccaatagaaggccagagctcatgttaagatcaccgcccatttaaaatcaatctacacgtgacgaaaca

SEQ ID NO: 100250 - DNA, 238 bp, Glycine max
  Clone ID: PAT_MRT3847_61540C.1
ccggggcgacccacgcggccgggggccccccggcacgagcactcaaggacgcgggcaaaggaccaaagcaccccagacccagagggggaacggccgagcggggcagccgcagaagcagccggacccgggagcacaggggcaccccagggaaaggcaccacacgccaaccccagccacggcagcagcgagggaccggcacaaccaacagagagaccacagcagagcccggcccaaagag

SEQ ID NO: 100251 - DNA, 1054 bp, Glycine max
  unsure (1)..(1054): unsure at all n locations
  Clone ID: PAT_MRT3847_61541C.1
ggaacttcaaggatgagaatgtgctcttattgggttttctctttctattattctatataaggttgcttctcctcccttgatgactccaaattagcagagcacaaaaatattctgcaattttttttctttttgttttttaaggaaaagactaaccttctgactttccaaagaagagagtctagtaatacaccaatggatggaattttcgcttacatcattctcattttggttaccatattttcatttatgttcttaccaaaaccaaacagaagaagacctcagaaccagacacttgcaaagctccctccaggctcaatggggtggccgtacataggagaaacccttcaactctactcccaagacccaaatgcctacttttccaccaaacacaaaaggtatggtgaaattttcaagaccaacatcttgggttgtccctgtgtgatgctgaccagccctgaggctgcacgcttcgtgctagtgactcaagctcacttgttcagaccaacatacccgaaaagcaaagagcgtttgattggtccctttgctctgtttttccaccaaggtgaataccacacacgtttgaggaagcttgttcagaggtcactgtctttagaagcacttcgcaacttggtgcctcatattgaagccttagccttatctgccatgaactcttggggtggtgatggccaagtcattaacacatttaaggaaatgaaaatgttttctgtttaagttggaatcctcacaatttttggctatctagagccgcgtttgagggaggagctgaagaagaattaccggattgtggacaatggttacaattcctttccaacgtgcatcccgggaacacaataccaaaaggcactattggctagaaggagacttggcaagattataggtgacataatttgtgagaggaaggagaagaggttgcttgaaagggatctattgagctgcttattgaattggaaaggtgaagggggagaagtgttatctgattaccanattgcagataacattattggggtgctttttgctgctcaggacaccacag

SEQ ID NO: 100252 - DNA, 421 bp, Glycine max
  Clone ID: PAT_MRT3847_61542C.1
caccccacagacgaggagctcgtggttcattacctcaagaagaaagtagattctgttcctctccctgtttcaatcatcgctgatgttgatctctacaagtttgatccatgggaattaccagctggatgattgggtgttgtgccgaatctacaagaagggcaacacacaaaggtcacatgagagggacgattccattgatgacatgattggagaagtacctccttccatcaacgtgggccacatgagtgcgaggtttcacctttcaaggatgtccacgagctacagtggtgcattgttggaaaatgacagaaacacgttagaaggggtggttataggcaatggtagtgtgaatgggatcagcaatactaataatattacaagtgtcatatcatcatctcaataggtttgcaccctcaaactc

SEQ ID NO: 100253 - DNA, 1902 bp, Glycine max
  Clone ID: PAT_MRT3847_61543C.1
gagccactggtcgtgcttggcggagatctgtgttgttctctccttctcgcgcggaccctcacaattcggcacgagggccttcaccttgactttggatgggtaaataaagctacatatcatacatagcgaagatgtgtgttgttctcttcttcttgtgtgaagccaaagccacaacaacaaccattggaacaacccaacaacatagtgaacaacaaccttggtaataataaccatggagagcaccgaagactcatccacgagttcacagcaacaaccgaacctgccacccgggtttcggttccaccccacagacgaggagctcgtggttcattacctcaagaagaaagtagattctgttcctctccctgtttcaatcatcgctgatgttgatctctacaagtttgatccatgggaattaccagccatggcatcgtttggggcggaagagtggtactttttcagcccgagagaaaggaagtacccgaatggcgcgaggccaaacagggctgcaacttcagggtattggaaagccacgggtacagataagcctatatgtagtggaactcaaaaggttggggtgaagaaatctttggttttctatggagggaagccaccaaaaggggtcaaaactgattggatcatgcatgagtaccgtgttactgaaaacaagcctaacaataggcctcctgggtgtgacttgggccacaagaaaaactccctaaggctggatgattgggtgttgtgccggatctacaagaagggcaacacacaaaggtcacatgagagggatgattccatggatgacatgattggagaagtacctccttccatcaacgtgggccacatgagtgcgaggtttcacctttcaaagatgtccacgagctacagtggtgcattgttggaaaatgacagaaacacgttagaaggggtggttataggcaatggtagtgtgaatgggatcagcaatactaataatattacaagtgtcatatcatcatctcatcagtttggcacctcaaactccaaggcagagcttcttccttttgtcccttcaaacaacacttctaattcggcctccaaaagaacactctcatcactctattggaatgttgatgatgataatgatgatgatgatcacaaacacttcaatttggacagtaatgggaatgtgagtgttttgaggactgaagagaataataataatactaatggtacttctggctcctttgccactctgcttaaccagcttccacaaacaccttcattgccccaaatagatgggttacttcgaacaccatatcaaatacaagggaccaattggtatggttaactccattttgggggatacgtacgatatgatatgataatttcataattataatgcacaaggagatccaattgaactaaggtgtggcaagggatatcttcaacttgtgctagatcgcaaggattttaaaagggtcattgagattgtggtttaattgttaggagaatggaagaatgttagagcacactaatcaatgttttctttcaaccatttgcaggtagctaagggcaattaataccacatgaggtgagggtgtaagaccttggaacttttagtttaattattatatagatcggtatagtaacatagataaagatagatatatagaagcatatttgcttgttttattagtgtgtaaagaaacaaaatgagggtaaaaactttcgagagaggataaaagaaagagttagccacagttctatatatatatactttgctttatgatacagaatgaagagtatagaaaatatacttcagaacgatataaattgatgcaagattttaaaatatgtatattgattgtatttatggtttgtctatctataacttgttcatgaagagcttgatattaatct

SEQ ID NO: 100254 - DNA, 245 bp, Glycine max
  unsure (1)..(245): unsure at all n locations
  Clone ID: PAT_MRT3847_61544C.1
ttctagatttaaggaagatgggtagggaaaaggtnntacataagcattgtggttattggccatgttgcctctgggaagtccactaccactggccacctgatctacaggcttggaggcattgtcttttttgttattgagagatctgagagggaggctgctgatatggctggttttctttncacgatgcctgggcgcttgataagcgggggggggagggtgaccccccccccccccttgatattgcc

SEQ ID NO: 100255 - DNA, 1192 bp, Glycine max
  Clone ID: PAT_MRT3847_61545C.1
gcgagacgatggatggctgtggcgatgattgacagcacgaatggcgactgcgcgaggagaagaagaagagaaatgggcaacacgttgggacatgaagagggagaggagaactttttaaaatttgaagtgaaagataattttccggcttcacttaaaatattggtgcatctagcaaatacccaagccttcctagcaacaactgcattattgcattacaaaaagggaaaaaaactacggtagaggaaaagggtattatagtaaaatcaaagaacacgatctgatctctcacactgcaatctgtctctatctgtgaccaatccaaataataataatttttcttttttaccgaaatcgaaattcattcccacatttcactttgatctgatctcatttccattcattcattcgttggtcttctttccaccaacaagaaagaaaacagagagaaactttcatttcatagattttcatcatctcaagcaaaggaatcaatcaatcaaaaaccatggcaggcttcagtggcgacgaaaccgctcctttcttcggcttcctcggtgccgctgcggccctcgtcttctcctgtatgggagcggcgtacggaacggcaaagagtggggtgggggtggcgtcgatgggcgtgatgaggccggagctggtgatgaagtcgatcgtgccggtggttatggcgggagtgttggggatttacgggttgattattgcggttattatcagcactgggataaacccaaaggctaagtcttactatctctttgatggatatgctcatttgtcctctggccttgcctgtggcctcgctggcctctctgctggaatggccattgggattgttggtgatgctggtgtcagggctaatgcccagcaaccgaagctgtttgttggtatgattcttatcttgattttcgctgaagctcttgctctgtatggcctcattgtgggtatcatcctctcatctcgggcaggccaatctcgtgctgattaaaaggagtcaacttggtggtacttcgtagttccgtaaattttatatcaggcttgtatttgaaatgggagatacttgtcttttatatattactattatttcatttgttttcgtacacaaaccctgtatccaaactccatcagttttatgaagcattttcctttggattacataaaaaaaaaaaaccgatgtaga

SEQ ID NO: 100256 - DNA, 426 bp, Glycine max
  Clone ID: PAT_MRT3847_61546C.1
aatcaatggtaaacaatctcccagcaaacctgtgaaacgtgcatcaaaaaataagttgcatcaagaggataccaaagagacttcaaatatatcaaatcctgaagagaccacaacctctaaagcgtataaaatgtactcaggtggatcagatgaggaatttaatggaggattcaatgaaatcacaacaaaggagaagaaatctaacaaaaacacaaaatcagttttcagaggaaagaggctaaagaaagagaaaaacttttattatagaaaagaaacaaatgaagagaagcacgattattttgaaaggctttcttataatagagaaagtgtcccacaatgtagttcttaaaagaaagaagttgatgaatcaagtggagcttttatgcaaaatatttattggagaagaaataatttgatttcttgaag

SEQ ID NO: 100257 - DNA, 410 bp, Glycine max
  Clone ID: PAT_MRT3847_61547C.1
attattcacctccacaataatattcaatacatgactcagatcacccatggggtgggaatttgattattaaacattgtaatgtctcatcatggtcttaatcactctttcattccattttcaaattcacactcttacattttaaatatgccaatcctaccctatgttcctacctaggatcccaaccaaaattcactaagaaattaatttcctttaacaaatgattaccataattggatcacctccattatcatcttatccaatttaatcattctccaaggtttttaccaatagttcccactcctcctttgtaaattatgaaagccttttaagatattttttcaagatggtagtttagctatcaaattttgtatgttatccaatatgtacactcgggtatttgttattaaaac

SEQ ID NO: 100258 - DNA, 376 bp, Glycine max
  Clone ID: PAT_MRT3847_61548C.1
tcggctcgagccggtggactttttgactaatggattggtaggctaaattttatttacaggatatctgtttatattgcaatttgactgtactttttgactaatgaattgctataatttaactttttattagaaaagaataggggaggcaaggattgaactctagaccatctgatcatagagactgataatatgccatgaagcaactatctgggaaaaaagcttaagctattatgtgaaagacagaaatagttttatattataaatcagataaattagttattttggggccggagaggactgacaattattattaaactttaacagcttgctttcctagttgttattggccactttctttagagcgaatgaataatct

SEQ ID NO: 100259 - DNA, 105 bp, Glycine max
  Clone ID: PAT_MRT3847_61549C.1
cccacgcgtccgttcagtttgctctttagcgaggtgtgcctgccatggtagcggtatttgctaatgaccgtgtggttggaggtatcgaaagcatttctaattgtc

SEQ ID NO: 100260 - DNA, 106 bp, Glycine max
  Clone ID: PAT_MRT3847_6154C.1
caataacaccaccggaaaggaatatcgtttgatacctatcggcgacaccggtccagcgatcaacgtcggcggcatctttgcctatgccagaaaaaccggcatgatt

SEQ ID NO: 100261 - DNA, 105 bp, Glycine max
  Clone ID: PAT_MRT3847_61550C.1
cacaacgcaactaccaacgttgtccccttctacgttcccttcctagtcggcacatgacgatgccttctacagatgcttcctctcagcacaaaggcgtccacgggg

SEQ ID NO: 100262 - DNA, 386 bp, Glycine max
  Clone ID: PAT_MRT3847_61551C.1
aaaagggaagagcaatttattgttttggaaaaaaatggggaatcaaaaaagttgaagggaagccccagcaaaaaaatttcaatttttataatgttttgggaaaaataaatgcaaatttttttaggagtggggccataaaaccttttccttggtccaaaaaaccaaaaaagcagaaaatccctgttttatttatactttaaaagtgtagcaaccaaagcactgtaagtgggggggaggacaaatttttatcctcagtttgatttcccacaatgttttaagcttcccgcccccaaaaaaagaccaaaaattgccgcctttccaagtgtagtttggccaatttgcctaattttaaatagtccaggccccttgtacctaatagctttatt

SEQ ID NO: 100263 - DNA, 174 bp, Glycine max
  Clone ID: PAT_MRT3847_61552C.1
acattctctgaaagaatttgaagatatgagttggaatgagaaatgtgcatgtcttttgggtgactctgaggaggtgtggagtttcaatgatgcttccacctctaaatacattgtaagatttcaaagaccctgatattccctttccttgattatcaagtgatgtgtacctttgct

SEQ ID NO: 100264 - DNA, 271 bp, Glycine max
  Clone ID: PAT_MRT3847_61553C.1
acggtgcgagaagacgacagaaggggtgtccaccaattccacatttgggaggttgtctgtttcttgtcagcagtcgacatactcgttcgtattcttgtggttgaagttgttcatcaggaacaagttgctattcttggacaaagtcattagtgaaagaactcccaataatactttgatgaaaggatgcaaagaaaggtataaatatacattgcatgtacacataagcatactctagtgtttgaagatttgtacctatgaggttgctcataaa

SEQ ID NO: 100265 - DNA, 508 bp, Glycine max
  Clone ID: PAT_MRT3847_61554C.1
taaaactgctgactttatagtttataatgaccaagaaacttagtcttacaattgaatcacggagattctgtagttttattgtgtaaaccgaaggagcagggaaaggaaaagaaggtagtgatggagatgaacacagtgcaagttgtgttggtagcagttgttgtggtgttgatacatgttttcaatgttttattgttgaggtcaagatcactgagagcaaagcttcataggcaagggattcatggtccttcacctcacttctactttggcaacatcccagaaatgaagacccttttgcttcaagttcagtcagcaccaatcactcaagtcaaagacaaagatgatcatgattctctttctcacaaatggcctttcaccctcttccctcatattcaaaagtggatcagccaatatggtcccatatacttgttttcttctgggactatacagtggctaatggtgtcagatatagagatggtgaaggaaatcatcatgtacacctctttga

SEQ ID NO: 100266 - DNA, 126 bp, Glycine max
  unsure (1)..(126): unsure at all n locations
  Clone ID: PAT_MRT3847_61555C.1
cttccgaccggttgcaaaagacacccaaangggcccctaagccaggtttatttaccttttaattggggggcgttttttaaggttgggggggcttaccttcatatccttttaaacattgggggtttt

SEQ ID NO: 100267 - DNA, 178 bp, Glycine max
  Clone ID: PAT_MRT3847_61556C.1
ggaggtaaagctatggaatgacaagcgcgagagagaaatgaatgacaactgcggggagctttatgtttttttcaaagccgctgataggattgagaaggcccatgttagagacatcatctcaccccaggaatatgagttagagtgcccgaagctcatagctcgccgaaaaaccttaggc

SEQ ID NO: 100268 - DNA, 398 bp, Glycine max
  Clone ID: PAT_MRT3847_61557C.1
ctgctatctggaatgaacaaccctgatgcctctaatagatgaaaaacctccgttaacgaatgaaggactacggaatttgaactctgtgaagaaattacgcactacttaccttgaaaatattgcaaggttactgctcgatgaaatataacaagcttaaaccaactgatcttccacatctgataacattaccaacaaaataaattaggacaataagagaattctggtatctgcatgttgaacaattctctgaacatatttatggctactgattgaataaaaaacagttcataaaaatggcatgcagagagtggaattatgctttattatgcatgtttgtacttggccgtctaaaaacaacagcacataaatctttttctttatccctttctcctcagaga

SEQ ID NO: 100269 - DNA, 380 bp, Glycine max
  Clone ID: PAT_MRT3847_61558C.1
ccattctttcttttaaatgctaaacaggattgaatcaatataccacctgttctgacgttgggtcgttcacttatactgaacaagcactacatagctttctccttacaactactactgggtactattataacattacatcacatgaagctaaagacttccacagatacataaaccaatttgcacatggactcaatacatgtctgcttaatgtgcatcacgtatcatttcatcctcctccacctcatgataacaagctcatctccaatatatatacgccacaaatcctaacctttactaacaggcttacaatcacatggtgtgttgagatcatttgcaacttaaccttggcaaagccaaattaatgcctatggtggtctaca

SEQ ID NO: 100270 - DNA, 170 bp, Glycine max
  Clone ID: PAT_MRT3847_61559C.1
cctttttcgtttgttagaacggccgatacctaaaatgcctaatcagaaaaaaaaaaccctattactgcctccaatggggaggaagttaacggttccacccaatatttctctatccactgtgccactttttaagcataaactaccaaaacctgtatatcctcctcatgaat

SEQ ID NO: 100271 - DNA, 1096 bp, Glycine max
  Clone ID: PAT_MRT3847_6155C.1
ggttttcaggaggaattgagatttatctttcagtgcttaccagaaaatcgacaaaacctgttcttttctgcaacaactacaagtaatctgcaaaagttgcgtgggcgttaccaagataagatgtatgtctatgaggcttatgaaggctttaaaacagttgaaacacttaagcaacaggctatattcatccctaaaaaggtgaaggatgtatatttgatgcatattttggataaaatggaagatatgggaattcggtctgccatcgtatttatctcaacatgcagagattgtcatcgtttgagtttaatgctggaagtgcttgatcaagaagcagcagctctatattcattcaaatcacaagctcagaggcttgaagcacttcatcaatttaaatcgggaaaggtttctatacttcttgcaactgatgttgccagccgtggtttggatattcgtacagttgaccttgttatcaattatgatgttccaaggtttccacgagattatattcatcgtgtaggccgtacagcaagagctggtagagggggactggctttgagccttgtcacccagaatgatgttgatctcattcatgaaattgaagcacttattgagaagcaacttgaaatgattgaatacaaagaaaatgaggtgctttctctcatgaaaaaggttttcagtgctaagaacgtagcagaaatgaagatgatagatgatggctttgaggagaaagctaaagagcggaaaaaacagaagctgaaaatgctagcagataaaggattgttaaataaaagaagtaaaaagagaaaacgaaataaagaatttgcagaggaaggggaagaacaaaaaaatgaggttttcactgttaggaatgtgacggaaatgaagaggatggatgaggatggcattgaggagaaagcagaagaggggggaatacaaaaacttaaaatgcgaacacagaaaggtttgtcaaagaaaaaaaagttaaaagaaagaaataacgaatttgcagatgaagggaaaaaacagagaaaagaggaagtagaaccattagcagatatagcaactccaaagaaaaggagtaagaagagacagtaaa

SEQ ID NO: 100272 - DNA, 160 bp, Glycine max
  Clone ID: PAT_MRT3847_61560C.1
ccatctttgttatactgttcttgcccgagaccaaaggtattcctttggatttaatgtgtgcaatatggggcaaacactggtattggagccggtttactgttagaggacaagttaaccaagataattgatcttttaatgaattagtatatactttatagta

SEQ ID NO: 100273 - DNA, 393 bp, Glycine max
  Clone ID: PAT_MRT3847_61561C.1
ggggttgggttttttttttttttgaaaaacaagagtttgattggaggggaaaaaaaatggacagtttttttctggccccccataacccccttgggttccatatacttttttggacaaagcttttaaacgtgaacaaaaatcataattcgggggggggatatgattcttaaacgaacttcctaattttggagcatcacaaatcctttttgaacttttcgctggcctttaagcataaggaaaccaattttagctccttggtctggtttaaccctggcccataaaaaaaaaaaggggggtctttctcattggctttccatgattgaccaaagggcaaagaggtgtttttcatgccccgatcttcaattttcaccttttgggcttgctctttaaggg

SEQ ID NO: 100274 - DNA, 365 bp, Glycine max
  Clone ID: PAT_MRT3847_61562C.1
aagagttcttgcttactttaccaagcactaaaagtatgcggcttcggttgatttccagggtggtgtatacgtgtcctatctatctttgctttactcaatcttgcagtggtggcaacaccatgcaaaaaccttgcccgggggacgtttactggaagtataaactttctactactccaatgccgaaagccattacagatattcttgacccaaatttggcataagacgaacgcgcctttacagccgtaggaaaggaaaacctctacgttaacccaagtaaatcaaattcaggatgtacatcatttaacatatgaaaaggatgagtgaacgcccacacacggaacggttagcccaacaaaggcacatct

SEQ ID NO: 100275 - DNA, 341 bp, Glycine max
  Clone ID: PAT_MRT3847_61563C.1
ttgccattgggtttgcatcatagagaaggccatgtgagatgtgtcatcttaaacagtggcagtagcgtggccatgctttcaggctcatgaaaagtgtcattgacaaatgatgaggaataatggtgtgcaaaaatgatgtagagacaaatgttaagaagaattcattgtcaaattctcttgttttagaaggaatttaaaattcttaagttgtagttatttaaaatttctcattaaaatttccaaattttaaattcttcctaacaaactattcaaacagtaaattttataacaaatttttttcaatccctttcaaaattactttcctagctttaaaccccata

SEQ ID NO: 100276 - DNA, 541 bp, Glycine max
  Clone ID: PAT_MRT3847_61564C.1
ggtttcctgtcatcactgtatgacgtcctccttctttgggggggggggggggcaaagcagcaaggaataaaagaggtcggataaatacgtaataaggtaagagaataatactaattgagtgggaaagctaagataacagggagaagcaaaagcaactaattgtgagaggtataataagaagcaaagaatgccggaatagcgcacgttgagcgggggagagaaagatgtgttcgtgagagagcaagtgatatgttaatactaattgtagaggagataagtgtacaccccagcacggtaacattaccgtaataggtgcagtaacggtagggggccaggtgagtgttagcgtaggggccgaggtacaaggcggaatgcagccagtaccctaggtggtaggcgggttgcgcttgctggggctagtggccggcatgggacgccctggtatacaagttggggacgggggtgcaggctatgggttgcacatgcgtattggcctgcaagggggtgcagccgggtggcaaagtatggtggaggatgattt

SEQ ID NO: 100277 - DNA, 1349 bp, Glycine max
  Clone ID: PAT_MRT3847_61565C.1
cggaagttcggttcgagcacaagtgcacaaccaatgaaaccacataaacttccttctccggcactctcacgtgcgttcgcacgtgccctaggatccgccaccaccgccacgcaatgtggagtggcgtttccttcgaagaccgttaccaccgcgaacttcgaaccgtcgctggcggagctccggcgccatgtccggacgtcggacttcgtggccatcgacctcgagatgaccggcgtgacgagcgctccgtggcgcgagttgtttgagttcgaccgctccgacgtgcggtacctgaaggtccgagactccgccaccaagttcgccgtcgttcaattcggcgtttgccccttccgttgggatccctccaaccactccttcgtcgcgtatccgcacaatttctatgtttttcctcgacagcagctcgcaggcttgggtccatgtgatgaattcctctgccagaccacatcaatggatttcttggctaaataccagtttgattttaatgcttgcatacatgaaggaatatcttatttatccagagaacaagaaaggaaagcattaaggagtttgaattctacatatgatagtgagtggtcagacattggtaaattaaaagatgttagggatataccattgctcagcgcggccgacattttgttcactgcacggatgaaaaataaattcagtgaatggcgtgatgggttatttcaggagcaaaatcaagaagaccaaattcaaggaatttcaaatgactcaaaatttcaagtgactttttttgagatgcatccagctcttaggcttaatagattcacatctcaccagcttaaattgattcagttgctcatcagaaaacacttcaaagatctttcatatgtcagtgtgaacagtgaggcttctggttcacaacaattagtcgtatatacagacttaaaggatgaattaaacttacttctgaagaaggtgaaagaagaaaatcacagagcagaagagatgaagatccaagctgccgttggattccgccatgttattgatctcctttcatcagaacagaagttgatagttggatacaattgttttttagatattgcacatgtctacagcaaatttataggccctcttccggggactcctgaagagtttgttgcctctgttagcaagtgctttcctcacattgttgacaccaagatactcctgagcactaatttgatgttccaagaaaagatgaaaaggtccagaaaatcactggcctctgcattcacttcattttgtccacaaattgcagctggctccagaagcacagatctaggttcactctctcatgtgaaagtgaacgttgaggttgatgattc

SEQ ID NO: 100278 - DNA, 391 bp, Glycine max
  Clone ID: PAT_MRT3847_61566C.1
ctcgagccgctcgagccgctcgagccgattcggctcgagctcacccgcctcgttctgtacctgcaacccccaagacttgccgcatctgccgctacgcctccttttcttccccagccgaccgtcttcttactccgccgccttgctcctcgtcgctccctacgcatctccttgtgcacgccagctccttaacgcgaccgtcggccgccagcagccgcagtcatgcctcagcagcgctacgagcgggtgtccgcacacgatgaagacgaccatgtctcgtccgccgacaatcacgctgccccgggcccgcaatacccgattccctcctcgccacccccatccttcagatcgcgcgcttcttcgcccacgcagcaacgtctgctcaacgaacatg

SEQ ID NO: 100279 - DNA, 1309 bp, Glycine max
  Clone ID: PAT_MRT3847_61567C.1
cccacgcgtccgcccacgcgtccgcccacgcgtccgcccacgcgtccgggtgagttgaccgaattaaccaactgttctgtgaagaagaccttctcctctatgatgttaatcatgcatgagctgcaaagtcatgccttgcaaacaagggagagcctgtgtggtgaaaacttgcaaggtgtcatgaccaagctagagagagagatggatgcttcatttgtttggctcttccagcaggttttctggaagaccccagctctcatggtctatgtgatggtcctcttagctaactttttagtgttctctatgaatgataacactgtcaaggtaatcactccttcttccatgatcacaaaggctctaaccttgaccagcaatgagagtaaagtacagcattcgcatgttgatgttgatcaaggtgagtatgtgaatagggagttgacagaagaggagcacatgttgtggaactcctttctagaggaggcttcaatgttgcaaaaggaattgagtggtgaggttttggaccatgagacaaggcaaaggttagttgccccagtgtctgtggagcttgaaggggatcagtacgaggaatatgtcaaaactgagccttattacaaaaagcatttgttccggacacctcattgttcccttctgctgtctaactatgcacagtttctcttccttgtccttcatgatattgatggggcagaagagtactacaagcgatcagtgctagcggaatcaccggaagctgaggcattcagtcgctatgccgacttcttgttgatggtaagaaaggatgtttgggcagcagaactgagatatctgcaagcattggaagcagatcctggcaacacttattatttatcaaagtacgccagtttcctttggaacaccggtggacaagatgctaatagctttcctatagaagaattggacaacttgcagctatgacatatgattcatcatggctgagtgatggtactttttggtgacatgttacaaccaagttttacatcccacttgcatttaagttttattccttgatttttgtttttttgctggatagttgttactacagttttttttgttcttttttccattgtagtaagtcattcgtggaacaactatctttgttcatatttaaatatgatgtgtttagcctgaatggctaaaaaatatatatagctcaaagttcagttcatgaaggaaaaaggcttgagtttccaactctaactttgagacctgaatgctgttccgtcctatcaacaacctgtgtacagtttacaaagaaaaaatattgctttttgtt

SEQ ID NO: 100280 - DNA, 220 bp, Glycine max
  Clone ID: PAT_MRT3847_61568C.1
gcttgttggattgcaaaatcttcttgttcaggggtctccggactgggagtagagcctatgtgaggttctacgcacttccagatgttcaggcgatggacgatgatatagccagttaacctgtgccgccttgtggacaaatatattattggccaggatgaatcacactgacttgtgaaacagtcctattggcagcgggataaggtatgactgtttattatca

SEQ ID NO: 100281 - DNA, 410 bp, Glycine max
  unsure (1)..(410): unsure at all n locations
  Clone ID: PAT_MRT3847_61569C.1
cgggggttcaatcacaatggcttccgcagtgagggtggctttgagatccttcggtagtcgggctagaagcttcgtcaagagctcaaccacgccgtttgtgttcacttcgtcttccgcatcgtgcatctctcgtgcttcgagggttttgtcggttatgataagcgttgattcgttgatgcctcttcacagtgctgtcgctaatgctaggctcacctccaatatcgccttcgattccacctgctggagctcgctttctcgaggtactacttctctccttgttattttactcgttttgagttatctntttgcgcaataatcgcaattaacaatgatcttatggatgatggatatgttctagaacacacacacgcatgcttgcgtaattgcttctttttttttataaaaataat

SEQ ID NO: 100282 - DNA, 218 bp, Glycine max
  Clone ID: PAT_MRT3847_6156C.1
tttcgtttttccagcaccaatttgcttggattggaattagggttttgaaattgatgggtgccgcgagacagaggaaggtgagcttgttccatgttgtagacgattccgcggcatagatggcgaacactactggttgagctgttaataatctgatcaatcactggacctcaggggcttactaccaaaggtgcttcgcgactctggagaagagaaagacc

SEQ ID NO: 100283 - DNA, 357 bp, Glycine max
  Clone ID: PAT_MRT3847_61570C.1
gccggatctattaatgactctctgcgtatgcctgtgaggatttctaacgagtcaaccttcttggggtctggaaaagattaatgaatcatggtaccacgactatgacctcatcaacatctcctaatcattggacatgaggactctggcaaaccaactaccaatggaaacaatacctactagcccatatgtattgacatacgtgaaagagcaacggttattaaagactctggcgtccataacactaagctatgcaggtatacatgtgagatcgactagctataatgtgactgtgatgaatgcattaccatggatagtgcttatgagaagacctgaaccaccagatgctactgcaacgtc

SEQ ID NO: 100284 - DNA, 569 bp, Glycine max
  unsure (1)..(569): unsure at all n locations
  Clone ID: PAT_MRT3847_61571C.1
tctcgtcgttcttctctaagaatcccagaattgcttcttccgccattgcttcgccgcaaagcacaacacgcagcgtttagaaacancttggaattaagatagataggttcgcttaaattgggccacataaagccgggttgggccggcnncaaaataccaaaataccagttagttagttagtgagttttatagtgtagggttttagtactatcagtttagcgagagcgggggttcaatcacaatggcttccgcagtgagggtggctttgagatccttcggtaatcgttctagaagcttcgtcaagagctcaaccacgccgtttgtgttcacttcgtcttccgcatcgtgcatctctcgtgcttcgaggtacagtgtgattcagcttctctactttgaactattcttatcgatctgcattgcgtttttgggtttaactttgtggatttcgtgtttgatagggttttgtcggttatgataagcgttgattcgttgatgcctcttcacagtgctgtcgctaatgctaggctcacctccaatatcgccttcgattccacctgccggacgtctgg

SEQ ID NO: 100285 - DNA, 455 bp, Glycine max
  Clone ID: PAT_MRT3847_61572C.1
acgaagcccatttcatgtttttgtagcgtctctgtcattctgcacgcactctgcaacaaaccactcaacaatggcttccaattccaaatcggagacttttctgcaacgaaatggttacgattttctgttgggatcaatcgctgctttctacgtactcaccgtgccttacactaaggtcgaagagagtttcaacgttcaggcaatgcacgatattctctatcaccggctgaatttagacaatgtgctttgcttgtgtcattaattgcagcaccgtttgtgttaactgcaaatttgctgcatttgccgaagttttatgctcttctcatagtttggatggccctagggtgcataatactatacacactaagattttttcgacatcagataaggaataaatttgggcatcaagtagaagccttctttgtgatattaactgcaactcaatttcattttct

SEQ ID NO: 100286 - DNA, 443 bp, Glycine max
  Clone ID: PAT_MRT3847_61573C.1
gtttgtccgtgtacgcaactttttactctcaatttatttcttccaatcccaatgatcccgccgaacagaaaaagagaaggtgagagaattgttgctctaataaagtttcgttaaactgcctgtaattctcttcctctttcaatcccctttctcaacacaatcaaaatttcttctggtttcttcgaatccgagatccgcttccaatctcgttaatgggtccattttattttggaacattttaatgggttctttcgcattgcaaacaatttagtcctcaaaagggtgttgtttcagatcctaggtttttctacatttcttcacatcccaacaatttattaaccaggtgaagcataagaatggatgatgcgatgggtcctgacttgatcagtgatcttcctcaaagcattatagagagcattctggtacagcttccaattagagat

SEQ ID NO: 100287 - DNA, 697 bp, Glycine max
  unsure (1)..(697): unsure at all n locations
  Clone ID: PAT_MRT3847_61574C.1
tccaaatcgagcatttttctacagcgatacggttacgattttctgttgggatcaatcgctgctgtctacgtaatcactgtgccttacactaaggtcgaagagagtttcaacgttcaggcaatgcacgatattctccatcacaggctgaacttagacaattatgatcatctggaatttcctggggtggttcctcgaactttcctcggtgctttgcttgtgtccataattgcatcaccgtttgtgttaactgcaagtttgctgcatttgccaaagttttatgctcttctcatagttcggatggccctagggggcatagtactatacacgctaagattctttcgacatcagataaggaataagtttggacatcaagtagaagccttctttgtgatattaactgccactcagtttcattttctaatctattgtacccgtccgcttcccaacattcttgctctgagccttgtgaatttagcatatggatactggttcgagggacgtttttatgcggctctaaactctctgatctttgctacagctgtactcagatgtgacatgctgttacttctttgccccattgggctgcaacttcttttgggaagacaaaaaaaatttcagtgtggggtgctctaaaacactgcactgggatggctctcttctgcataggtctaaccatatggnttgattcaattatgtg

SEQ ID NO: 100288 - DNA, 644 bp, Glycine max
  Clone ID: PAT_MRT3847_61575C.1
ggctcgagcatttttaaaaggacaaaacttagatacaagttcattgggtattgtttgtattgttctccaattagaaatggagtttcaccttggtaatttgtgtaatcctttaatatagacctttattacacggattacttggtaaaatttcaattctaattggagagcaacctaaggaactatcttggtttggtcctttttcaaaaccctggttctgttctgtgatagatatgtttgctagttagctatttatctttcaaatttttgttaccacagtttcatttgcaattcttcatgcttcatggatacagttattgtattggaatttggatctatgtgtttcttttagttatggtctaaatctatggagaactttgtgcattgacagaggcaggattctttagcactgctttccagattatggaccccacttaggccggtacctttgagatgtaatgctttgccgtggcaatgttccctaataccagctggagggtgtgaggccccacttatagtggcttctgtttctctgtcaaggtcatataatgctatagcaggaaaaccaagtgtgattcaatttatccctgccctttggtatcattgggcttttgctgtttttgggccttgagccgctcctacgcctg

SEQ ID NO: 100289 - DNA, 246 bp, Glycine max
  Clone ID: PAT_MRT3847_61576C.1
agctgcagaagtcacagaagtatcaaccaaagcagtcctagaagccggtggttgatgctccggcagcttcacggacaacaagtccagtttccgggtagcttgtagcaaccttggcatccggggtgagtcttggcactcgagagtagatcatggatgagtttgtcgggacacacccagagcatttatctctgatacttgatactggtagtgagattaataggattcagtgtgatccatgcaatgcat

SEQ ID NO: 100290 - DNA, 187 bp, Glycine max
  unsure (1)..(187): unsure at all n locations
  Clone ID: PAT_MRT3847_61577C.1
cccttcccaatctatcttctacaanccacaagccactccaccctctcgtcaatttcaaaaccctttacgtacaacccacatcttccttattaatctatttaccacaagcaacaacccttacatacattatcaaaccaatttaattctccactttaactccatcatccttatattacctatattatct

SEQ ID NO: 100291 - DNA, 125 bp, Glycine max
  Clone ID: PAT_MRT3847_61578C.1
aaccgccgcgccattactgcctggacccaccaggccgccgttttttcggacgattctttcataatggatccttgagggaaattgtggatttattggcggggctggtcccatacccaattgaggct

SEQ ID NO: 100292 - DNA, 449 bp, Glycine max
  Clone ID: PAT_MRT3847_61579C.1
acgcaagctttttattcggctcgaggcataatcaacagccctatcttttcgaccctatcttcctcttcctctgagggaatgggtggcagatggcgaaccctttcttcgagcgagaaccgcataaacacttcttcttcttccaaaccccactttccctccgtctaccgctgcctctgtctgagcggcgcaacttctgaaatacccgacccggatccaaccgggagcggagccacagcactcgacccctgcgtcaaaatccccgccaaagctcatgacctctacaccagtctaaatccgaagggcatacacgctgagaaacacacagatgctgacacttcatcttcccgcccagtcttaaactatggtgctctccgtagctgagactgcaatcaggactccaatggacatgggtatcatgagaaagcaagcaacacgatcgtacatggtgc

SEQ ID NO: 100293 - DNA, 174 bp, Glycine max
  Clone ID: PAT_MRT3847_6157C.1
cgaagcactaaaagggatggagcaggcgacttaataaaaggcaagacgtaagtgcattcgcttactgcataatactacatgaaaagctggctcgaacatcacaaagaatctttcgatctatctggatagcagcaatgagaattgcatacggggggcacttgactttgtataaca

SEQ ID NO: 100294 - DNA, 436 bp, Glycine max
  unsure (1)..(436): unsure at all n locations
  Clone ID: PAT_MRT3847_61580C.1
cccacgcgtccgtccaactcatttcttcactctgattcttgccccaagctgtaactgtaactgatccgcggaccgtaaaccacaagagagaaatgggatctgctggagcccttaggaacattgttcgctctctctcagtcgcatcatcaagagctttattgcctcgaatctccaccaatgcttcgatggctccaatttgttttgctctgccatctccctgcaaacctcctcaacggcttcttcccctttggagtcacttccacagcttgacagacactcgcttccccaagagacgcccctctgaaagacctcgtcgaaagagggccagcttgagaccctctgggccttatgcttgggttcaatatacacctggccaaccgatacttncaaacaagcctaatgaaaggagtgtcaaaaggagaaatgagaagaaacg

SEQ ID NO: 100295 - DNA, 115 bp, Glycine max
  Clone ID: PAT_MRT3847_61581C.1
tcggctcgagctcaacaaaaatagataagcttaactgtaaaaggcagaggatttctggggataaagatagcgacagagccagttcaagttaccagtataagattggttctggttg

SEQ ID NO: 100296 - DNA, 1621 bp, Glycine max
  Clone ID: PAT_MRT3847_61582C.1
cacgcgtccgcttacacttgcacgctcagcacactatcctcttaacaaaaccagtgttcacacttcacagacacaagaatcctacacaacaagggaaaccaaaccaggcacatcattaacccacgacacaaacaacctcactactcttccacctcttctaagttaagtccttgtgggtcagagagcattcaagcagcgaggcccaactaattgacctgtttctctttactggatagaaggcaattaagccatgcagacaccaaagacaagaagtgggtcctctgaagtgcctcagaaggtgtctccacgtgccgtgcgcaaactcaagcctactactctggacatcgactctgcatcttctttaagtcaggctactaaatcatcaaaggaaagaagccccaaagtcactgaccgcagatcacccagaagcccagttgttgagaggaagcgccccagcaaaatatctgagttggaatctcaaatttctcaactccaaaatgacttgaagaaggtaaaggaccagcttattttgtctgaatcatgcaagaagcaagctcagcaagaagctgaggagtccaaggagcaactactagccctatctgcaaaacttgaagagtcacaaaaacaagttctggatctttgttctactggagaagctcgcgttcttgagctccagaatatcgtagaagaacgtgatatggcatgccaatctgagcttgagtcttccaaaaagcagctctcagttgagtctgctgccctggcctctgcaacgaacgaaattcagatgctcaaggcgcaacttgaattggtagctaattgtgagagtgtgcaatctcaacacgcagaatcagcagacattgagcttcttaacctgaagcagaacttgtccgaaacgctttctcttgtggatgccttgaaaaaccaagtaagggattgcaaagagtctgaagctcaggcccaagcattggtcaatgaaactacggtgcaacttgaggccgcaaaaggaactgttgagttcctaagggctgatgttgcaagagctgttgatggctacaactccgttgctttagagttagaccagtctaaagctcgggtgaactcactagaggcacttgttagcaaaattgagaaagaccccatcaataataaatgcatcccttctgaaaatgttgcagatgaccataaatctgagcaccaacctgaaatattgaaagagggagaggatcctaatcagctggaagcagaagttgtttctttgaagtccgaggttgaacaattgagatctgctatagagactgctgagactaaataccaagaggaacagattcgaagcatggtgcagatcaggaatgcatatgagttagtagagcagataaaatctgaatcaggtaagagggaatgtgagctagaggctgagttgaaaaagaagaaagctgatattgaagagttgaaggctaacctaatggacaaggaaactgagttgcaaggcattgtggaggagaatgacaacttgaacctaaagcttgaagagagcatgtcatcctgcccctatctgaaactgtttgtgaactgtacttgaaacattggcgtttaattattgaatgaactaagctcttaacat

SEQ ID NO: 100297 - DNA, 1289 bp, Glycine max
  unsure (1)..(1289): unsure at all n locations
  Clone ID: PAT_MRT3847_61583C.1
atagaatgagtactccatcctaactgccacactcttggaaatcatcatctctatccaactacagttaaaaacaacacacattttaaattaatgaaacaaaccgtgagacgttataaaataatgacgaaagaatcataacaggaacaccatcaaacaaaccaccttccttgctagagtttctaggaaaaggcgttatttaaaagaggaagttataacttcctccattattaattaatcttttctcatcacccactctcttcataaaccctcaattctctcggagaaacctaagtccaaaccaaaaacacccacacaccaagaggtcgtggaacagattggaaccagaaaccttcctatcccacggagttaatcaacgttaatcaacttgttctcgttaattagtactgaaaaatgacttccaagatacaaatattatcaatcctaggcatgttggccatgttctttcttatctccacggaggtgttagccactggattacatggtgttggtgttggtggtggattacctggtgttggtgttagcgctggattacctggtgttggcactggattacatggtgttggcggcgctggattatctggtgctggtggcgttggattatctgccgacgcgggattatctcgtgctggtgacgctggattatctggtgctggtggcggccgtcgtggtcgtgctggctccccttctttgtgttttttctctgtcattttctcgaacaggtgaaaggcgacgacaacgatgaccggtggccacgatcgcgtgaagggttcatggagtcctcaggaggatgcgacgttgctgaaactcgtgaacgagcacggggcacgcaactggtccgtcataagcgccggaatttccgggcgttccggcaagtcgtgccgtctgcggtggtgcaaccagctgagtccggaggtgcagcaccgtccgttcactccggcggaggacaagatgatcataaaggcgcacgccattcacggaaacaaatgggccaccatctcgcgcctcctccccggccgcaccgacaacgccatcaagaaccactggaactccactctccgccgccgtcgcgcggtggagtcatcctcctcctcatcggcgtctccgccggcgaaacgtcactcttccttgtttgacacgcttcaccctttcaagaaacagtgcatcgagaaggaaaacgaagaagagcgagtgctgagtcccgttacgacgtcgttgagtcttttnctcgagcgcgaattnccgaggcttagcgtnacggcgtgccatgc

SEQ ID NO: 100298 - DNA, 132 bp, Glycine max
  Clone ID: PAT_MRT3847_61584C.1
cctcaaccatatttcgttcttcttatgaatatacccaaaacagttgctgcacacatgggtacagtggccggcaatctcatatttaaaccccctaacattcatcacccatagcagaaactttctgcccaccgc

SEQ ID NO: 100299 - DNA, 519 bp, Glycine max
  Clone ID: PAT_MRT3847_61585C.1
tggaaccccaattgcagaagagcattccctgcttctggtcgctaaggttgttgaaaggggagtgattggcctaagattgtttacatggccacagttcatattagtggccatgtttttaaggggtttctgtatgatcatggtgctgatgccagaaatgatgtgcctagtgtctcagaactgcaattgggaaacaatggaagtggaaagaataataatagggaatgctcttctgcaattggggttccaactagtgcttaccctgcttctgtttgctgaggttgctgaaaggtgatggatcggttctgtgacactctgagggcagttcattctgctgttttgcagggaaaattgacaatatattctctttggttattatgtaaatttctcttctacagaatgtttatatgcatacataggggacctagtttcaatttcttgcatcagaatagagacattgatatgttgcgaaatttcatattcagtgcttaatcaaagttttatttgatcctaattcttaac

SEQ ID NO: 100300 - DNA, 353 bp, Glycine max
  unsure (1)..(353): unsure at all n locations
  Clone ID: PAT_MRT3847_61586C.1
anatnnnnannnnannncnnantnnanncacnataacngancctntncaactngncnncannnnggatnnnnnnnannnannananaacatnnnannatngtnacananannnnantgangananannnagtncnngnntatancacnnncaannaangacncnnattcnnananacntangnagagntcaatnaancaagtagattgntaagtnanannnnaanatgannttngnaaanncngttatcanganctatganaannatntctnnncancatnnacganaatgagnttnctacagttatacaanaagngatnntgaantnagnanatnangnncnntgnntgttt

SEQ ID NO: 100301 - DNA, 415 bp, Glycine max
  Clone ID: PAT_MRT3847_61587C.1
aatattgcgtaatttaataatacaaaccattggtggcgcctattcgacatcatatattgtgtatagttcagagacaacatagactttttttaagccttgtaatttaaaggttaactccatcttacacaaagtttgataaaatgtggtagtagaaaattagtcttcaaaagcttaagaaaaattctctaaaaaacacataaatgataaaatatcaactataatcattgattaacgagcgcgtaaagcacaaagtctacatttcttccactagaacccatgtcacatcttgggttttcttttcccacccgagtcaaacgaaccatataattccaattttacttttagattctataccattaccagtagcacgtccatccagtgattcaaatgcaaacatagtagatatgattgattt

SEQ ID NO: 100302 - DNA, 308 bp, Glycine max
  Clone ID: PAT_MRT3847_61588C.1
tttttttttctctttaaaaatatgggtttttacgtaatttgtttttgaattttttttttttaggaggccaaaagggtatacagggcttttttttatttatttcagaaatgcggggggaaaccaaaaaaaacatttaaaacctgccctaaaaacctttggaaaagcatatccattctaagggaatctcttacatattttttttgaagaggacaaaaatattcgtttcaaacacaagctaaaaaacctgggatgaaacaaaaaagcatttttctgcccaaaaggtgttttaatataaaacttgtttgggg

SEQ ID NO: 100303 - DNA, 433 bp, Glycine max
  Clone ID: PAT_MRT3847_61589C.1
aggtggacccctgccggaaccggcgcggaaatccagggcggacctttcgatcgtgtttcggtgtctcagagaaaagatcaaagaccgtgatgttggcgtgacacaggcaaatggtgaaaatacaggcaaggcagagcacactgcatggtaaacaagaacacttggtgatatagaaagacctcaaggaggccttatctgaaccatgaatgactgatgacatgtaaaacaataatgagatgctatactgctgaggcaccaagacacatggagtgtagaaaatttcttctgggagaggggtctgagccagttgactatagaataaagcagtgggaatagtgtgccagatcttattgcaagaaatggttatgaggaggctgataatgaccatgtgagcaaaggaccaagattgcaaggcgacatgataaaaaggggc

SEQ ID NO: 100304 - DNA, 423 bp, Glycine max
  Clone ID: PAT_MRT3847_6158C.1
gggcagggcttgatgcctgcaagtttcaaagttagaactgttgctcttgatgaagataatcatgaggaagttttagatcctgattttggggaatcagctattggtcgtgttgcacctgtagattcaggattgtggtggatcatcctcttgcgggcttacgggaagctcactggtgactgcagcttgcaagaaagggcggatgttcaaacaggcttaaaaatgatccttaacttgtgtttaacagatgggttcgatatgtttccttctctgttagtcactgatgggtcttgcatgatagacaggcggatgggcattcatggtcacccccttgagatccaagcattattttactcagctcttcgctgctcacgtgagatgcttgttgcaactgatggaaccagctattgatttaaaaaaaaaaaa

SEQ ID NO: 100305 - DNA, 296 bp, Glycine max
  Clone ID: PAT_MRT3847_61590C.1
tgatattgctaggggcatgaactatcttcacgaatgcatatccatatccggctattcactgtgattgggagccaaaaaatattgtgctggatagtggtagtcaattgtagatagctggatttggctctgtgagatgttcactaattttacctgatgatgcacagttgttacagctctgagcctaacattgatctttaaagcttgtatgtggcaatctgatatttacaaataaaagttgcttgatagatttgtgtgttcatattcattgtggtctcattttatactataagatttga

SEQ ID NO: 100306 - DNA, 1324 bp, Glycine max
  Clone ID: PAT_MRT3847_61591C.1
acgcacttacagagcagaggaagaatggcagatggatcatcaacaccagcaacaccttctgccaaagtttcatccatcttcgtgaactctttcccgacagagtatttattaattaacagctcagactccagacgattcccctggaatggggtctgcagtattatcacaaacaataccagcagtcaaagtttcaaggctcttcatataccctatcaagtcatgccgtggaatttctgtttcctatgcccccctcactcctgctggacttcgatgggatcgagaatgggtggtggtgaattcccaagggagggcatgcactcaaagagttgatccaaagcttgctttggttgaggttgaattgccaaatgatgcacttgttgaagactttgaacctacaagcgattcttacatggtgttgaaagcacctgggatgaaacctctcaatatttgtttgagtaaacaacatgaagtaacagatgctgtcacagtctgggaatggactgggtctgcgtgggatgaaggagctgaagcatctcagtggttctcagattttttaggaaagccctgtcaactagtccgcttcaattctgcttcagaagttagacaagtggatcctgattatgttcgaggacagcatcggacctatttctctgacggttatccattcttacttttatctcaggaatcattggatgcactaaacgagcttctaaaggaacgcatacctattaatcgtttcagacccaatatccttgttgaaggttgtgatccatattctgaggacttgtggacagagatcaagataagcaggttttcatttcttggtgtcaaactgtgctcccgttgtaaggtacctacaatcaatcaagagactgggatagctggatctgagccaactgagactcttatgaaaactaggtctggcaaagtcataagaccaaatgcgaaaaataaaaacaaggtctactttggtcagaatttggtatggaactggatggattcttctgttaaagggagtggcaaaaccattaaagttggagatcctgtttatattcttggaaacgtctcttctgcagaagaagctgctgcttgaactgtgtgtgtagaatatgcaggattcaataccagcaatccaaatggttcaatcgcaaactttattaaacattctcttaaaataataatatattaaaactgtctgtttctttttcccttctaattttatttgtttacatgtttgatttcatcactgtggaaattaaattctgcaacaatgaaaaactcctgaatttaaaaatttaaatactgagaaaacaaattgttccag

SEQ ID NO: 100307 - DNA, 437 bp, Glycine max
  Clone ID: PAT_MRT3847_61592C.1
tacggctgcgagaagacgacagaagggaatcgttgttgaggtcctattcgtcttggatattcacgagtgaggaagtcatagtaatagatccacaagaaagatatagaagaaactatagtgggttgtgtgaaaatgcggagagatgtcgaacaatgattctgtgatgctaaagggacctagaaaaacagagaaacaaaaatattgaaaccacacgcagtagcgacgtcgttttttactttttaaaaaaaaaaaaaaatcttatgtgtaatcttagtcagacaaaaatcacacatgacaccacacgtaacatgtctgtgtggctaattaatgaccacataagcaaataacgaataccgattaacggtagggatctcgaacaaaacttttctaatattagagacccatcacaaagcaaaaatttattaaagaccaaacat

SEQ ID NO: 100308 - DNA, 662 bp, Glycine max
  unsure (1)..(662): unsure at all n locations
  Clone ID: PAT_MRT3847_61593C.1
gaagatggattcattggtatgttcaacagcggtttgtggcgaggaactggcagcagccctctgtgcgtttgaacaatgcactcatacacatgtatgctagttgtggaatccttcacgaagcttatcaagtgtttgtcaagatgcctcggaaaagcaccgtatcttggactagcatgatcatggcttttgcgaaacagggactcgggaaggaggcccttgatctgtttaagactatgctcagtgatggtgtaaaagtagatggagtaaggcctgatgaaataaccttcattggagttctttgtgcttgtagccatgcagggtttgtagacgaaggacaccaaatttttgcatccatgaagcatacctggggaatcagcccgagtattgaacactacggatgcatggttgatctcttgagtcgcgctggattattagacgaagcacgaggacttattgaaactatgcccttaaatcctaatgatgcgatatggggtgcccttctcggtggttgtcgaattcacaggaattcggagctagcatcacaagtggaaaacaagttagtacctgagctcaatggtgatcaagctgcgggctatcttgtgctcttgtcaaacatatatgctnttggtcaaaggtggcaggatgtcattacagtgagacag

SEQ ID NO: 100309 - DNA, 592 bp, Glycine max
  unsure (1)..(592): unsure at all n locations
  Clone ID: PAT_MRT3847_61594C.1
gcatatacttttcttggcttgaagaatctactttgatcatgtccttgtttatgaaattgaacagtttgcccctaagatacctctataactgcccttcttattcttctatctatttggtaagccagctaattccagattcgtaagtatgtcctcgtagttcgaattaaatattccgctgattagtataattatgctgttgcaaagtatacgaattacacatcatgatgaagcataccttcatananntattccnnngttgcaaagtattacccaaaggtcacattttcatcttaaagcatttacacaatcaaacanngaggagtttcacttttttttaactttgccacttgaannagtgattctggtttggaaaatgcctacaaaaacatatnggaatatgtaaaaatgtggttttcagacaagaatttctgtgattattaatatctctacacnttgcacttggaaaccactgtgttcaactttaagatcaactatgctttagaagatatattgcttttgtgatcagctttaggttagttattttgagcataaatcaaagaatgtgttacttatgatatttctttctttaaac

SEQ ID NO: 100310 - DNA, 378 bp, Glycine max
  Clone ID: PAT_MRT3847_61595C.1
acggctgcgagaagacgacagaagggcaaggacaagccagttcattgttagtgtgaacaagtatttagaggctatcaaccaaaaatgtaatgttggtatgagattcaagatgaggtttgaaggggatgaatcccctgaaaatgacaaaagattttcgggcacaatacttggagtagaggatatttcccctcactgggtgaattcaaattggcgatctcttaaggttcaatgggatgaacctgcatcttttccaagacctgatagagtttcatcatgggagatagaacacattctggcttgtgttcctactacgtcatctcaacctgctgttataaagaataaaaggcctcgacaagcaagtgaagttcccgatctttg

SEQ ID NO: 100311 - DNA, 227 bp, Glycine max
  unsure (1)..(227): unsure at all n locations
  Clone ID: PAT_MRT3847_61596C.1
taccaatagttctcccaactctatctttctctcaaccnncccaatttatcaaagaccctttttaaacaccggaaccccatcaacctcctcttccttcatctagacccacctactagattcccactccttatctcttcaaatacactcccaattctaattattcactaacaaatcctccacaccccaataaactttacatcaattcttctctaactcccatacacccc

SEQ ID NO: 100312 - DNA, 514 bp, Glycine max
  Clone ID: PAT_MRT3847_61597C.1
gctagtctcgagttttttttttttttttttagggttcatagaaaaattaaatcattcttggagaattataaatttcatagcacatgctctgataccacatgtaaaaattcttaagaggtatcctagactatcaattataggaaataacaggatcttgaaacctatgattctcacaaacaatgaaagcccaattacaatttagtccttaatcattaattatttatttattagtctctactaagtcatatgcctctcacgtgagacattaattctaacattatcatccccaaacaaatggccaagcagaagtttcaaataaagagataaagcgagtacttgagaatattgttgggtcatcaagaaaagattggcctttgaagttggatgatgctttcctgggcttacaggatggcattcaagaactcccataggcctggccccccttcaattggtctatggtaaagcatgccacctatcggtggagttggagcacaaagcctattgggccctcaag

SEQ ID NO: 100313 - DNA, 241 bp, Glycine max
  Clone ID: PAT_MRT3847_61598C.1
cccatcgtgcgtcttttataaaattttgacacacactttagggtgataggggcttgatgctgacagaatatgatcaaggatataaacaagaatatgtatgatattgacaccaagtaagtgaacaccttaatcatgtgagtctttatgtagagatgctttagaatttgttgatgatttatattgctaatgactatggcatgcttgcaactaatactattactgagacatacatgtaatgtgc

SEQ ID NO: 100314 - DNA, 572 bp, Glycine max
  Clone ID: PAT_MRT3847_61599C.1
gaactaactgaacctctcagtcgagatatgcgattgcggtggcgtcggcggtggtccgggttgttgagtccccgatcgacggccaatgcagcggttcgttgcggcggcgtgcggcgtcgttgatggccctgcagatgacttggcagccgagtctcctgagtcagaaacgcaaaaccggaaccggtcctcccttagggctccgtaacctaggcaactcgtgctacctcaacagcgtcctccagtgcctcacctacactcctcctctcgccaatttctgcctccgtctccaacactcttctctctgtgattcttctgggtcttcgtgtccgttctgcatactggagaagcagattgcacggtcgctgcgattggatctcacgcacgacgcgccgtccaagatccagagctgcatccggatcttcgccgagaacttccgctgcggccgccaggaggacgcgcacgagttcctccgctacgtcatcgacgcctgccacagcacctgccttccgctcaagaagctccgccgcaaaggcgcagaagccagtgggcggggcgacgtaactggtggccgt

SEQ ID NO: 100315 - DNA, 690 bp, Glycine max
  Clone ID: PAT_MRT3847_6159C.1
ctgactgtaaccagattaaaatttgtataccctatgctacataatagtgcatattagatgaaattcatatagagataagacaatttttggcctctcttatgtgaatttctaggagtctgaaattatgtatcattgatgcaaagcttgttatgtcaatgtcatgaatggtttcccatccactgtgtcacagaataaagggagaaaaaataatatagtcatcaaaatccttagttataagcaattcatttcactgttttttgaatgtaactatgggaggagacttttgctattgtgagtatctttaggaaggctttttttgcaagggaaggtatctgagatgcttatttccaatccaatgagaataggaaaccatgtacagagcgtggtaacttgaaaccattggaaaaattgcatcttttttaagcattgtctgctctcccgcgtgcccaaagaacaaagagtgttcccttattttgatgtttaagtttggtattttataccctattctattcttcttctagatgggaataaatcctggttaatttccattttatgcatggtgcatagtgatcgattttgtactgcccctgagctgtaaccctttccctcccccagttttgggttagattttggtaatgcttttaattaattgagttggtggaggcccccaatttatgaaattgacccccc

SEQ ID NO: 100316 - DNA, 433 bp, Glycine max
  Clone ID: PAT_MRT3847_615C.1
tctgggtgttactgcctttgccccacggctcttcccgaagtgtctaatgaatgcctctctctatagggggaggagccggtgcaaagaacgctattctcatgaatatgccaaatgctgttctttcaatgcggagatatcttgttggagatctcgcctttgaagttcctaagatgacttctgcctacattaaatgtacagtgtgtttcttcatagcatttggaagcttcggctgatgacaccatttattgtgaggcttttacccacaagctggtgcagtttgaagagatccacgttaaagttgtcttgaaagtttcacaagaggaatttcttacagttcggtcaactaaagcgcgttctgcatcaactctgctggctgatgggggtccatatttgtttgctctagtgcatgatatgttcattgtctacaatacca

SEQ ID NO: 100317 - DNA, 1796 bp, Glycine max
  Clone ID: PAT_MRT3847_61600C.1
ttccctccatgagcaccatggattcctcttccatctatggtgtctcacacagacacttcctcaccctcttcccacgcttttcccacgcgtccgcccacgcgtccgcattaattcacatagtttgtttcttgtcccattaccgatattcaaaagatgggcatccaacatgtgctggttttgccatttcctgctcaagggcatgtcaatcctctgatgctcttgtcaaaaaaactagctgaacatggcttcaaagtcacttttgtcaacacagatttcaaccacaagagagtgttgagtgcaacaaatgaggagggatcagcagtgagattaatctcaatcccagatggtttaggccctgaggatgacagaaataacgtggtcaatttatgttcggaatccttaagcagtaccatgacttctgcccttgagaaggtcataaaggatattgatgcacttgatagtgctagtgagaaaatcacaggtatagtggctgatgtgaacatggcatgggccttggaactcacagataagctaggaatcaaaggtgctgtcttctgccctgcttcagcagctgttttagtcttgggtgagaacattccaaacctcattcaagatgggatcataaataccgaagggttcccgattataaaagggaaatttcaactatccccagaaatgccaattatggacacagctgacattccatggtgcagcttaggtgacccaaccatgcacaaggttatatataatcatgcgtcaaagattatacgatattcacatttaacagattggtggcttggaaacaccacaagtgaccttgaacctggtgctatatctttgtctccaaagatcctaccaattggtccactcatagggagtggtgatgacattagatcattggggcaattctgggaagaagacgtctcttgcttgacctggcttgatcaacaaccaccttgttctgtcatatacgttgcctttggtagctctactatttttgaccctcatcaactcaaggaactagctcttggacttgacctcacaaacaggccttttctgtgggttgttcgtgaggatgccagtggaagcaccaaaatcacatacccagatgaattccaaggcacttgtggtaaaattgttaaatgggcacctcaacaaaaggtgttaagccaccctgcaatagcttgttttattagtcactgtggttggaattctaccttggaaggtgtgtccaatggggtacctttcttgtgttggccatattatactgaccaattagttgacaaggcttacatttgtgatatgtggaaggtgggtttgggattcgatttggatgacaaagggctgatatcacgttgggagataaagaagaaagtagaccaaatccttggagatgagaacataaggggaaggtctcaaaaactgaaggaaatggttctaagtaacattgcagaagggggacaatcctatgagaattttaacaagtttgtggagtggctcaaggaataaaaatgtatttgttgatgctctgatgttgtgaacaatgtttatgatgttcctgaaaaatattgaacatttaaatttagctacctgatataggcaataaattagaattcatgttatcaaaacctccttaattagtattaggtgacaaccataacaaaactaaacaatcaaataatttgttgttgttgagcaacaatttgtatctagtttgaattatttcacatggaaggagaagaatgagttttcagagcaaataatttgaaagccagttattgggagattaacatatt

SEQ ID NO: 100318 - DNA, 446 bp, Glycine max
  Clone ID: PAT_MRT3847_61601C.1
aaaaattgcagctacaagtgttaccatcttgaagcagtccacttccattcaattttttttttttaattttagaataacagtgtccccataccaaaggaagcctgctagctcatttcatgtataaatttcccatcttcaaacagtttaggtgtatttgttgctctggtcacattctgcataaaagaaatcctcttaagcctatggttaagaaaagccttgaagtttatattcagttaaaatatatgtcggtggagatagccagtgcttctaattttgacttagtttcatacagtaaagcctaaatgtgaaacgcacacgctggaagatattgttcctatcaatattttgctttttataacaagggtttgttcatattgatgccatttttgcaggatttcttcgtgattctgtccatatgaaaatgctgacattaacattaacacatg

SEQ ID NO: 100319 - DNA, 488 bp, Glycine max
  Clone ID: PAT_MRT3847_61602C.1
ggtttttggctctatgcagaatctctgtgtgacacatacctaggtatcaccttaatggcttactattttgaaacccttatttctaacccttattaccattactctgccgtagtgaacatggcatctccctcctcctgagacatgtaatctgattatctcgtgccggaagatgctcttgcaggcgagcatcatgcaaccagattggatcacatagcgactgacactgtatgatgggagacagcaacctccagcgatgcaagtcatgggttcggggatgcaacctccaccaacaccaacatgcatataaagtgccaatctagagggattgagggcaagaatgcacacagtgagccactggatcacggtgagacccagaacgcaacttgtggttatggatgatggatataaatggtggagatactgcaagacaacagtgaagagccgacccagcccacggaactactacatgtgttcaggtgaaggatgct

SEQ ID NO: 100320 - DNA, 265 bp, Glycine max
  Clone ID: PAT_MRT3847_61603C.1
gtgacaagttgctaatatgcagaagggatgggtgatacttcttgcttctcatgatgcatgtttctgtatgttaatgacttgttgggtagctattaaggtactagagttgataaatgtgtacagggtccttttgcaataaaactggttatgacttgatccaagtgtttaacaattggggctgttaagtcgaccatacatcactgtgatagaatgtgggctttttcaagggtgaagatacgagtcttaaccacagtgtaacttacag

SEQ ID NO: 100321 - DNA, 296 bp, Glycine max
  unsure (1)..(296): unsure at all n locations
  Clone ID: PAT_MRT3847_61604C.1
caacnaagaacgagaagaggacgaagcggggaaaggcaccgnngcgngcggccacaangggagggncgcgagnncaagncaacaaaccncacaagncccgnnnnncanccaaancnncncgcaacccccataaaaccggggggaaggacagactcttgtgtgtnaaancagagcgcaangncggcaaaggagcgcgggcagcncgaagncagagaaacaaaacganacgcgancagaaaagagcngcngnnnngaaagaaaaaagagaacccagngggncgagaagnccnccccga

SEQ ID NO: 100322 - DNA, 201 bp, Glycine max
  unsure (1)..(201): unsure at all n locations
  Clone ID: PAT_MRT3847_61605C.1
gggggggggggggnnnnnnnggcggaaaaacnacaggacagcnaggggaacannaacanaaanngggagcgggccgagcannggagnaacaggaancaccnccggaaccccaggaaacnagaagggaggcccaaaacgcggggaccagacagggggaagaaggggagggggaagggcnaaagcagaagcagggaaaagccg

SEQ ID NO: 100323 - DNA, 276 bp, Glycine max
  unsure (1)..(276): unsure at all n locations
  Clone ID: PAT_MRT3847_61606C.1
tcaactctcgcgactgcaaacctaacctcganacctattcgctcttgttcaattcgctcctnagaannttaaatangttgantgtcngttatgtgtatctgcaggcggttaggtctttgactaaacanatgaaggcttccggtgtattcctgnnngtatcgtgttgnatatgataatcanggcnnatntcaagtgcttggaggtngnngaggcgattcgggtgttccgcgaaatngggttgnnncnntntggcctaatgcctntagtnanggcaac

SEQ ID NO: 100324 - DNA, 357 bp, Glycine max
  Clone ID: PAT_MRT3847_61607C.1
gcggccgtcctttttttttttttttttttttttttttttttctttttttatttttttttttttttttttttttttttttggggcccaaccccaattttttccagggggggggaagcacaaatgcaccaaaaggggaaagggggggttaaaagccaaacaaacaaagggggggaatgggtcccagcttgggcccccccaaaggtttaaaataatattattataaggaggggccaaaggacccccgggaaggatggtttaaaaggagaaaacaaaagctaaagggttcccccaaacaagggagaaacccctttggggatgaaacaagaataaactgggacccgttcccggactttggcg

SEQ ID NO: 100325 - DNA, 386 bp, Glycine max
  unsure (1)..(386): unsure at all n locations
  Clone ID: PAT_MRT3847_61608C.1
gaantcctcnnaggagtgacgacctaaagttggagctacttcggggcgcttttttttttatggaacaaattcattttcctttatgaacgagtcaagatccatatctggatcagaccaccggccttggatttacaacgacttagtccagacgaccaggtcaccttagaaagaacccctaatattgacttgacggtctctgggggagcacgattgatatggctcaagggaaaatataggaggacggcatgcaggagactgcagcctctgacattcctttgactttgtccattcttttaactagcttttttaacattagaaaaggcttgtactttttcagccatcattagtcatctactggcatgcgttgacctgtattagagggagat

SEQ ID NO: 100326 - DNA, 135 bp, Glycine max
  Clone ID: PAT_MRT3847_61609C.1
gatacacaattagggacaccctttggattactttgcttgtttaattagttatccaatgcccaatctgccaatcatgtgattatatggagcaggtcccaattaaaaaaaatccaatatgagaaattgggattcaac

SEQ ID NO: 100327 - DNA, 272 bp, Glycine max
  Clone ID: PAT_MRT3847_6160C.1
actaacgatagaaccccccctagttatagtaccaattgtgccgatcttcatcctgattcccagaagattctccctcaaatccaggagcgtatattgtattttatggatgaaagccaaacactacatcagtgtattcctctttatgattcttcaacttccaacgtatgatttgagctttatgcaagtcatatagttcatgaacttgctgaaattaacacttctattgaacaacagaaaacatttcttcatgaaccgatgtccacctttaatga

SEQ ID NO: 100328 - DNA, 482 bp, Glycine max
  Clone ID: PAT_MRT3847_61610C.1
gccggaaaaaacccggtcgactcacgcgtccgaaaatttaaaaaaaaaaaaaaaaaaaaaaaaaaaaggggggaaagaaaaaaaaaaaaaaaaaaagaaaaaaaaaaaaaaaaaaaaaaaaaaaaaaaaaaaaaaaaaaaaaaaaaaaaaaaaaaaaaagaaaaaaaaaaaaaaaaaaaaaaaaaaaggggagaagcttttttttataaaagttatgagggtgggggggggtgggcctttggctggttggtgtaagaggccagcaggcgatgggggtggggcgcttgttaacaggtgtggagggctgaatggaacaatgggatggcgccctgtaattagggcgtgagggcgcggtgggttgtggcggatgaggggcaggtgactggtgaggtgtctagggccctattgttggttttttggctttgtttggtgtgttgggcgcgacgttttgtggggttttttctgttggggggggggggggg

SEQ ID NO: 100329 - DNA, 603 bp, Glycine max
  Clone ID: PAT_MRT3847_61611C.1
ttttttttttgatcaattaattgatattgagatctatttaatgaaaggatatctctggactaatattttttcatacgtaaagacttaaaaaatctatggcatggtgatgtgttggacttgttcatattcattgaaaaaacatcttaacccaacctaaatacatttatttaagttgaatttctatcttagtcctagccaacaccacccaagcccctaatcagccaaattgtataaaagacagcagtgtttcgtgggggccgatagcataacagatatgaagaaacagctggatgcttttctagtaaactcttcactaacataaaaggacaagccacggcacatcacgggcttcagtgctctatattgtgaaaggaaaaagcatatatccttattcgttcgtgaatcctggggctgagtaatgattttctgacccaacagaatggatgcacaattgcatatcttttgtttagagaatgaaaaatacccatacatacccatactaaatacaaagcaccgctaaataaaaacacgattcaatcacccaattccgcttgaagacagtgtcgtgttacctaaggaaccatgcaacttttcgctcgcccg

SEQ ID NO: 100330 - DNA, 420 bp, Glycine max
  unsure (1)..(420): unsure at all n locations
  Clone ID: PAT_MRT3847_61612C.1
agaataccaaaaaaccaatatttcctgggcccttgcctagataagacgggatcatttaactcncccaaaatttaacaacactatgtgaccctgaaaatgatcacaacttatttcactcttttcattatgagcaacctactcttttacccatcccaaccactaaaagttaaccatttttcgaaatccctatcaaaatttgcacctacagcacgaacccatttaaaattcttaccaacgccgcaattccactaccaaaaaagatactttcaacaacgcacttaacacttgaacttctcaaagctacccacgtttgctaaacgctaccttatcattaccgaacacttggagagtccacatcaacttggccccattttttttttatatggaaactaaagctacatcgaatggttctgccaaaac

SEQ ID NO: 100331 - DNA, 242 bp, Glycine max
  Clone ID: PAT_MRT3847_61613C.1
ctcccaactcaatttttcttacaacctgccctttttagcataagcccagcattgccacagaaactgcaccctccacctagtccttcatggggacgcgcctcctggaggcccactccgtggcggcgcgggtgcacgcacgtttcgggtttggcaagaagaaagccgccgctccgaagaaagtttccagggcgtctgcctatacatcgacagtctgtgtcgtcacaagctccacgcgccccttc

SEQ ID NO: 100332 - DNA, 545 bp, Glycine max
  unsure (1)..(545): unsure at all n locations
  Clone ID: PAT_MRT3847_61614C.1
ggctcgagtgcctacccagtaagtactaatggaatttttgttggctctgctgctaactacagcacctgaaacagtgaaatttgaaagctctctttctttaaaaaagtcttctttctttctttctttgtagtactatggagactagagagagagaagactgaagttcttgccagccaggcctcaatacattgtgttcagtttttcacctcctttgttttctgttcctttttccttctgtttcatcatcttcatggatccacagtaattcaccacaaatcttgcttcttcttcttctccttcttcttcatctcctactcgattatcttcttgatgaaaagctttcagaatttaattttcggactcaattttcagtttctaaaaagctccttaatttctcttcttattcttctgaagaactggtacctgttcatgtttatgtcctaagttgttaaattgctaaattcctccctaagaggtttaggttctgggtcttattcttctcattntttccaagcaagaaaaaaagncctttttttcttctttgt

SEQ ID NO: 100333 - DNA, 206 bp, Glycine max
  unsure (1)..(206): unsure at all n locations
  Clone ID: PAT_MRT3847_61615C.1
tcngcatngncaccgccgtcaccgtcanagcctccgcgggcccgcacttaagctgcacnattcgnttcggaccccgggngnaattttaaatttcccgggnacccgggttaaccttggcaagggcggttaaccaaggctttttcccccnaattaggtgnaagttcggtaatttaagaagcctttgnggcggtaaattcaantgggtt

SEQ ID NO: 100334 - DNA, 694 bp, Glycine max
  unsure (1)..(694): unsure at all n locations
  Clone ID: PAT_MRT3847_61616C.1
cttagatgctgtgttcgtggagatctctgggaagagttagaagaaatcttaaatcagaccatgccaaatgccactctttataacgcagctgttcaagggctgggcttacgtaaaaaatggtgacatggcaaataagatctacacaaaaatgctaaaaagtggttttcaacctgatgtcaaaacgcaagtacctatgcttcgtatgataaggaaaaggaggtagctagtagtctattaattgctataactaacaccagtttaaaaacgatgcccaagagaaggagaatatcatagtcacctgaatcagggaacaaatccaatagtaaatatttttttgggtctttggagagaaaatagcagccaaaaatgttactgtaagtctgtaaagctgtatagttatcatcccccctcttttctttctttctttctttggggctgagggttgtaaaaaagcttcttgtttgatatgtatttaaatgatgtaagtgctcaagtcttgtactattttttcctgttatattcaagagttcttgtaaagtgttggacttagcagttgtctctcttgctactagtttgcgagtattgttccccagtgttgattctgtataacttctggtgctcttaaacccaagttctgatattatcctgaaagtatttcctgtttgnaaaaaaatataaaaaaaataaaataaaa

SEQ ID NO: 100335 - DNA, 254 bp, Glycine max
  Clone ID: PAT_MRT3847_61617C.1
atgttagaaacaaataatcatactaatgcttggcaagtatttaaaacaggtcgttggaataaaaatatagacgtgagagaattcatacaattgaactattcattatatgaaggtgacgatgaatttttagaaggtcctacaaaagcaactgaaactttatgggatcaagtaatgcaattatcaaaagaagaacgtgagcgcggtggcatgtgggatatggatactaaagtggcatcgacaatcacttctcatga

SEQ ID NO: 100336 - DNA, 232 bp, Glycine max
  Clone ID: PAT_MRT3847_61618C.1
ccacgcgtccgaggacacgtgggcagatatgccctgattatacatactacagctgcttaacagacgcgtaaaccctgacatggtttggaatggcgattataagctaatttatgtttttgttcttgttgacttccttagtgttgccacaccttaggcacaacaagtacctactataattggccaggaatgccccagctgaggtaacacactctgcatttacttgcaaataaac

SEQ ID NO: 100337 - DNA, 368 bp, Glycine max
  Clone ID: PAT_MRT3847_61619C.1
cgaaggacaccgaatgctgctgatcgactcatacctacgtatgcattctctccataaacaagccaactgtggactcgaggcgtttctgactgcgtcggtagtcatacgcgcatatacatatagcacgccattgacctgttgcagagtgaagcattgtatcgacgacgtgcgccgaaaaaagcaggctccatggcctgcttaatgactcacaagctgtgttgctctgtttttttgtttccgattacattccatgcttgaggtggatagataaactcaccacgatggctactcgtctcgaaaagactttcgaagctctggatggtgttatctgcatgaagtgcgatgactaagcaccattgtatactaat

SEQ ID NO: 100338 - DNA, 247 bp, Glycine max
  Clone ID: PAT_MRT3847_6161C.1
gaagctcgacaccggctctgaaaggaaccagacaagaataaaacagaccacggcagcgaagcaaaagaaagagtgaaacagcacagcccgaaggcacccccagaaggcaaaggaatcagactcaaggaaaagaccctctcatgccgacgccaaggacgacacaacggaagcagaaaaaccccatagaggcagagccactgacgaaaccagccggcaaagggagcacgcaccggcacagggggaacac

SEQ ID NO: 100339 - DNA, 413 bp, Glycine max
  Clone ID: PAT_MRT3847_61620C.1
ggatactctcgagtcgacctgcagctaatattatacgaaagaaaattgcatttgggcatccatcaatggtacagcgcctacaagtgggaggaggatatccggcatgggcataatagaaggaaagtcgattagacatgtcttctcaacgcgaaacgctcctagaggaggggtcctatgtcatctctgttttggaggaaaggagggcccttgtatgtttctttctacttggtactggtattaggagagaatttggatgtgtcgttcaaataatcgccgcgattgctttttgaaaaattgaaacagaatactttgctggtgattgagatcactgtcggagaacctgactcactgactattaggcaccgatactccagtttggcttatgtatccgtatccgaattcagatactgaaa

SEQ ID NO: 100340 - DNA, 609 bp, Glycine max
  Clone ID: PAT_MRT3847_61621C.1
ttatgagaactgacgacggagtgatcatgcatcaagggaggtatgcaagagatgtactgaagaagttcaaaatggttgactgcaattctgcaaacacacccattgccactggtgtgaacttggtgaaagatcctaatgaagaagaagtagatgcaactttgtatagacaaatggtgggctcactgaggtatctttgttgtactagacctgacttattgtatgttgttggcttaattagtagatatatggagaatcctaaactttctcacttccgtgctgccaagagaataatgaggtatgtgaaaggtactctcgattatggtattctattttccagtgctgccaaaaaatgtaatgttctgggatatagtgattctgattggtgtggagataagagtgataggaagagcaaagtaggttatgtgttcttctatggtgatgccccaatctcgtggagttcaaagaaggaacaagtggtggctctctcttatgtgaggcagaatacattgcagctgctatggcagcatgtcaagctcaatggcttgataattttttggtgaatcgaagatgaggaaaagggtgctttacactatggtggacaacaatttg

SEQ ID NO: 100341 - DNA, 181 bp, Glycine max
  Clone ID: PAT_MRT3847_61622C.1
tcgctaatattggataaattgaggcacactagcctgtgaggctgaaaattactgatcctgggacggcatatcatcctatgatggatgatgactgttctacatccgttgatcgacgaagctttaatgcatgtattgatgatcaaaattacactagcgcatgctcaagcaatatggattgctc

SEQ ID NO: 100342 - DNA, 285 bp, Glycine max
  Clone ID: PAT_MRT3847_61623C.1
atttatacgaactagcaacatacatagtgaagtacactagcaacatcttagcaccaatggcagccaagatttttgccatccttgccctccttgctctttcagcaagcgttgctaccgcgactattattccacaatgctcacaacattacctctctccggtgacagccgcgagatttgaatacccaactatacaatcctacaggctacaagaggccatcgcagcaagcatcttacggtcgttagcattgaccgtccaacaaccatatgccctattgcaacaccatc

SEQ ID NO: 100343 - DNA, 221 bp, Glycine max
  Clone ID: PAT_MRT3847_61624C.1
cagaaacatcaaagacagagttgagatcaatatacagtcagttatatcaggatggtatgtgtatggataggcggtcgggtgcatcacatcgctcggcctttgctgcacctggcggctatgctcatttgaatgctcagctcatgtcaatgtcagacgatcttctcctatgtgatctagacacttcatgatgtctaacggtagatggctatgtggccttggca

SEQ ID NO: 100344 - DNA, 255 bp, Glycine max
  Clone ID: PAT_MRT3847_61625C.1
acgatgatgtcgatgctttgcaaggaagatttagagactgtagcaacataagccatgcttaacacgtagcatgcctctctgctcgcatcaaactagtgtggttctagcgttgtgcactcagtatatgcagccttacctctcgtatggtccctcataaagcgctttgagtatccacagtggctcaagctcgcttgtgatgaactgtatccttcatgatggcggatggtggcattggaagcgtgcgtgaggtcatga

SEQ ID NO: 100345 - DNA, 224 bp, Glycine max
  Clone ID: PAT_MRT3847_61626C.1
aattcggctcgagggatttgatatgctggaagagagggaaatgacgcgagaatgctacgtggcgatctctcattggctaatatcacgtggcagctagtatgattggtggaaacaggtagcagaggagatctaggaagagaaaaagcaacaaagcgcaagtgctgtgtcacattctcacttctcgttaccaaagagcgagaaatctaattaaaatctctgaaaaa

SEQ ID NO: 100346 - DNA, 902 bp, Glycine max
  Clone ID: PAT_MRT3847_61627C.1
gtcgcatgcacgcgtacgtaagctcggaattcggctcgaggtcatttaaagattgagaccaagattgaaagcatggctgacctcaagcagctcatggacaacgaggtgttgatggcctttacctcctatgcaacgatcattcttgccaagatgatgttcctgagctccgcgactgcattccagaggctaaccaacaaggtttttgccaacccggaagactgtgctggcttcggcaagggggagaatgccaagaagttccttcggactgacgagaaggtggaacgcgtgcgaagagcccacctgaatgaccttgaaaacatcgttccctttctcggtatcggcctcctgtactccctgagcggaccggatctctctacagccctcattcacttcagaatctttgtgggcgctcggatctaccacaccattgcttacttgactccccttcctcagccaaacaggggcttggcattttttgttggctacggagttactttgtcaatggcttacaggctgctcaggagcagactgtacttgtaaagagatttgtgactgtcaccctctgattgatttaaaaaaataaaggattctatatttctagtgtattaaaaaactttctaaggttttatgtatgaaaggagcagagaaatcaggaatcagggaaaattctgtttgaagactaccatccacaggctctacccttttgtacctgggttagacatttaacatgaccggccttagctatgctgtctaactcctaaagtactttgtcctaagtcttgagtgccttataaattgtaacattccttctacatttcctgtggtgcatctataaaagagtgctcacacctgtgtgaagcctgggtttcattggcacctgaattaaaaacattacaaatgaa

SEQ ID NO: 100347 - DNA, 542 bp, Glycine max
  unsure (1)..(542): unsure at all n locations
  Clone ID: PAT_MRT3847_61628C.1
attacccctaccagcagcagtcaaaaggaatattgatcagataccctaccacaatgtcttccagcaagggtcaattcgagcagggctaccagcccccagtccagcagcaaagtagcattcccgggaaagagtccgagctagaccctcagcctgagtacgaccatctgcccactccagatggaggcaaggagctctacaaggctgctggcaagcttaagggcaagaaagccatcatcacaggtggtgattctgggattggccgcgcatccgcaattctctacgctatggagggtgccgatagctttatcgcatacttacctgaagaggaagaagatgctcagcatacaaagaagctggttgaagcgaatggagccaagtgctatacctttgccacagacctgacggatcgcgcanattgcaagaaggttgtcgatgaggctattaagcaaatgggtggtatcgacattctcttcaacaatgctgcgtaccagaacatggtcgaggacattaaggatctcgatgaggatcagtgggtgcacacg

SEQ ID NO: 100348 - DNA, 209 bp, Glycine max
  Clone ID: PAT_MRT3847_61629C.1
ttctattcaattttctcttacttgtattatccaaactacaccttatggttctcaagcataacattcatggaatcaccaatccctctattctccgtactgtccatacttgatgtcgtcaagcgtatcaatgttcttatctattaataaactctctgtgttctcaatatctttctatagaacgtccattctctaactctttcaccctacac

SEQ ID NO: 100349 - DNA, 314 bp, Glycine max
  Clone ID: PAT_MRT3847_6162C.1
cttgtgaattcggctcgaggttgggttcttcttgttttcaaccttaattatcaattttatttacttcttattttttttatttattttttgctaataatttgattgttggaattgtcaatggtggaccctttgagccaaagtgttcatatttgaagttaaatctttccaccaattggactgagactgcttacagtttcagaatttgtcagaaaaagcttgtcccgattgcatttttgttcctgtacgtactcttattgatacggatggcagcaccattggcatgtgttgttgggagtggttcatccatacagagt

SEQ ID NO: 100350 - DNA, 482 bp, Glycine max
  Clone ID: PAT_MRT3847_61630C.1
ctttttcttttagttggttggtatgcttccacgtttttttttatggacaaatgttagttgttaatattgttagtttttgttagaggggatttgaatctgtgtgtaatgctgagaatgacatgatgtggttgcttagtgtgtgtgtgtgtgtgagtgttgctgctacttgctagatagttccacatcttcttgaggaaaaaaaaaaaagtgaaatgggatctgggaatgaggttcactcagttggcgacttcaatttagattcctagtggctggtagatccgaaacaactatttattggtccaaaaattggggagggtgctcatgccaaagtatatgaaggaaagtaagtcaaacctgttttggattcaattttggtttttcaatccttttatgctaaaatttctcattatttttttcttgtaagatttagtgcaaagtttgtttcgatttcttagtcagaattattatgcttctcctttcca

SEQ ID NO: 100351 - DNA, 505 bp, Glycine max
  Clone ID: PAT_MRT3847_61631C.1
gagagagagagagaactagtctcgagtttttttttttttttttttaaacttagaaaggaagcaataatattgaaatagcattaaatgaatagtaaagatcattacatcaaagagtgttggtatccaagcccccaacaatgggtaatttagcctctcatagtcatcaaagactcaaaaacaaaagataaaacaagaaaaatggaagaagagctcccaaagtggaagtttttgctttagagcatgccctaaacgaactccctccaaaaagcatagtgtagccttttataattttcaaaacgatgcacagtcatgcttcctggaaatgactgtgcgctaagcctacaagtgcgtattgagcgcacatgcaaagtacagctagcttaagtgaccatgtgctaagcctaccaacgcacgcttagcatccatactcgatacaattggcttccagcttggcttcacacgctgattgcgctgctctaattcttcatacatcttccattctttg

SEQ ID NO: 100352 - DNA, 252 bp, Glycine max
  Clone ID: PAT_MRT3847_61632C.1
tggggagcttcagtctcaattttatagccatcaaagtttttttattaatcgggggtgcagggctatcattggcaggataaaaagcccaggagtttgtctaaaagtgatgccggatctaccaaaattgagatacaagacttttttctttttcagaattgaaggatgaaggatgggttgagtttttgcttttgtcactgactcaggtggtagtttatgtattcctttgaattatacccatcaagaaatttgttt

SEQ ID NO: 100353 - DNA, 259 bp, Glycine max
  unsure (1)..(259): unsure at all n locations
  Clone ID: PAT_MRT3847_61633C.1
gcaaaatgacacaggacatgttggatgantgtgacttgacatcaagtcacatattatttgttctcttttatcttggtattttattggggaggggtaggatactctatgaataacatgatcaaaattttcttcataaganttttattnagttaatatttnngtttncttanggttgancagcaaaagtgggcttgggatacattcnggnataaaggnggcgcagaanttgncnccancatncntncagggncnngtgtcc

SEQ ID NO: 100354 - DNA, 1152 bp, Glycine max
  Clone ID: PAT_MRT3847_61634C.1
aatgcacaaccaaattattagatgtttatatgacaaatcaactacacacttaacgaatgcatcgattcaaaaaatttgatgccagaccaaagacacctccaaacaacatagacatttacataacctcgcccactcatacttaacacgccaaaaccccaaaattaaacatttatatgccgtacttggtgctaagaggaaacaacttataatttcaaattttcaccaattcagattatcgcacttcccattacacactcaactaattgacttttgttataccaccaccttagatgcacgttaatggtatgatgaggccttgaaaaacaccattcataaacggggaggaacaatgagaaaaagcttatttatgacgagcgaaacaaaaacttatctatgtatttagaccatcaaataaaacaaccaacaaattttaatagtctgaattgtttctcttccaacacaaaaaaggcttaataatccccaaacaaaaaactacgcagaccaacaacgagaatgaaactaataacctcccttgaggtcattgacgacatcatagggaataggggtaactgtctccaacgttgccccctcgaccatgaaaccaggtttgggaccctgaggctgtctcttggtgctgatcttctcacccttggccttggcctcagccttgagctgatcattcttgatcttcctaaggcggaactcctcagtgcaccttgatggcataacatgctccacacgcacgtgaatcctcttccttatgattctgttgccgacctgcttgttgacttcgaccccaacagcacgtttggtgacattccagacgcgaccggtgcggccatggtagaacttgtgaggcattcccttgtggacggcgccgttaaccttgacgtcgacataatcgccgacgtggtaggttctgaggtatgtggtgagggcgatggtacccttcttcctgaagggacgagagaaggaatctctggtgcgggatctcaaaccgtgaccagccggcatttttgctagggtttctctctctcgctgctcggctttagttagtgtagaaggatcactcccccttctgtcgtcttctcgcagccgtacccttctgtcgtcttctcgcagccgtacccttctgtcgtcttctcgcagccg

SEQ ID NO: 100355 - DNA, 742 bp, Glycine max
  Clone ID: PAT_MRT3847_61635C.1
ccacgcgtccgcgagttttctttcacaaaacaaatcttgagttttctctctactacacacctttcaaattcaacaactatataatcgatcacactttaaaagccttctcttctcttcttgtgctcctattccaatactctcttctgtctgtcttttgctcttccaattataagcacaacccaatcttttaattcgttacccgatctccatttccactgtgtccacgtgactcaagaaacacaagtttttgagcacaatggaatctgaaaacggggttgctgtggaggaagagaaacgtgttattggggtaacaaccaaggtggagaatgtaaagaaagaagttgaaaatgactgcaatggtgcagaaattatgaccaagaatgaagtatctaaacccacagtagtggctaaacgccccatttctgctggtgacaaagttgcagttgaagcctccaaaacttatgcaaataaaaattcaaaaggtgctactactaaggaaactgttggtagagcaagtgttgcttccaagaacaacaaatatgccaaagataaacccattttgaagggtccaagttcaatatctcaaaaacaaaggccatccctttcccaaagcctttctttcccagccaaatcagctggtgaagatgccatgcagaaaagcattgatggatatcttgtgaagcctaaagttagaaataatcaaggtaatgggattagaggtgaagcccccattcgtcattta

SEQ ID NO: 100356 - DNA, 1740 bp, Glycine max
  unsure (1)..(1740): unsure at all n locations
  Clone ID: PAT_MRT3847_61636C.1
aatgcaacaaccaaattataagatgtttataagacaaatcaactacacacttaacgaatgcatagattcaaaaaatttgatgccagaccaaagacacctccaaacaacatagacatttacataacctcgcccactcatacttcacacgccaaaaccccaaaatcaaacatttatatgccgtatttggtgctaagatgaaacaacttataatttcaaattttcaccaattcagattatcgcacttcccattacacacacaaccaatcgactctcgttctaccaccaccttagatgcaagttattggtatgatgaggccttgaaaaaaaccattcataaaaggggaggaacaatgagaaaaagcacatttatgacgagcgaaacaaaaacatatccatgtatttagaacatcaaataaaacaacaaaaatattttaatagtctgaattgtttctcttccaacacaaaaaaggactaataatccccaaacaaaaaactacgcagaccaacaacgagaatgaaactaataacctcccttgaggtcattgacgacatcatagggaataggggtaactgtctncaacgttgccccctcgaccatganaccaggtttgggaccctgaggctgtctctttgtcctgcatattttaaccctctattaatgaataagaggactccacttttgctatgagaaaattgatgttgatttttcaggtgttaatattttatacgccttttgagcatcatctacatgagataagcataaattaggtgcgtgttgtgaatcccaatctcttggtgtccgcgaacagagagagaaaaaaaaagaaaggtatcgtataggaagaagaagaagctctggattccacctcttcccgtccttcgagacggttgttaggctgcttgctcttcaggttggcctgggtttcaatctaaaggatcttgatttacattttgagacatggagggtgtttgtttctggacaaattgctaccagtatcggttttttgcattccaagaagtgcttgattggcgagttttcatccttggagattttcttcgggtttcctttgttaattgtacttagtgttctgctcccctttaaagatcagcacagggtacgtgatgctacattcttctgatacaggtgctgcatcttaagtgcacttgtacaagtaagcgcttattcttattcttctttgcaaaacaccaatccaaaaagaagtttcttgataagtgttcctttggcagtgcattgctgacccaacattcagttaaaacttttggtaaatcttcttcttggggctgaagcatatagatttgtgactgaatattggattctgcctgcatctttgagtgaagcatttgcattgaatatcagtgcggactgtagttattgaaatttgtctccttgttgctctcgatgggtattgttgctgacatacatcagttaccggatgtttctgaaataaatcctacatagattagatgaagtagaccttactatagttctgaagtctttggtcacggtgattttagctagagagtgatgctatcgctttgatcagccattttagtgggacctgagaagtgtcagtatgatctctggttcttgttcatttctaccacctttgtcctgccactatttcaaagccgggggtttattaatgaataaggctgagcagcccatccatctgaaagtttctgcttccatgccttcttttgctatgacagaaaattgat

SEQ ID NO: 100357 - DNA, 463 bp, Glycine max
  Clone ID: PAT_MRT3847_61637C.1
gccggggctcgaattcggctcggtgttggaattgaacgttttttttgaacaggctctcaaccttgattcgagggattttttcagatcaaaatgggttatggcagaagcagagctatctttcaaagaggaaaagttcaggacccaggttgctgattcgcggcgtggtgaacgcaaaaagaagtgcattgactgcctaacatctggtgcgattatgatgcaaccctcacttttgtatggtggctctgtttattcctactgagcaggtagagatagctgctgaatcatgtacaccatcaacccatagaatcttgccaccgttggacttacacatcaacgtgcttattcaatacaaagttgcatattttgcggagccaagatgaaaatatgagccaaatggtgtatgagatctcaaacatcattggtgagtgatacccggaatgtagagtgtgaaaccacaacatta

SEQ ID NO: 100358 - DNA, 554 bp, Glycine max
  Clone ID: PAT_MRT3847_61638C.1
ggaaacggaaggccaggaccctctgatcctgtaggctcctggcgcctgaaccctcctaggtcttccgggaggaaaaacatcgagtttctgacactcttttctgtcttattaatagccgggttctctgttactggaactgccttgctttctgtgctccaaatataccgaatgggactgaactattctcggggagtgcacactggccatttcacgcacgtgcggccagactcgctttaacatggagggcatgaaatcatgactggacttacccttatctcaaggaaccatgcgagaaggaccttgaacacatttacttgaatgatacgctgcatcacattattcaaggcgctctactacttacggcaccatctcctacaccgagcatggatgacccgcgttcgcagccggctaccacgaactgcctcaagctcctagacgactccagacgacacgctagcccgctcccttaacacagtcttcgtcggggccgtcctactggccaacgactacgagctgacgtgggtcaccgctgtgctcaccaaccattacacctg

SEQ ID NO: 100359 - DNA, 1205 bp, Glycine max
  unsure (1)..(1205): unsure at all n locations
  Clone ID: PAT_MRT3847_61639C.1
ccacgcgtccgattcccaagtctggcctcacgcgagccgtgctcgacaggattcaccgtcactggagcaactgcgagctggtgaggctcaagtttcacgagtttcttgctcagaacatgaagttggctcatcaaattgtcgagcatagaactagagggttagttatatggaggtcggggagttatatgtgggtttaccgtggtaagaattatcaatttccggtggagagtgatgcgacatctatggaaaagagtgaggcagtttggtggaagggggagaacatgacgccagaggaagcagaattcaacaggatgctggatggctttggtcctcgatttgttgaatggtggggtactggaatacttcccgttgatgctgattcacttccccctatggttcctggttacaaaacgcctcttaggcttcttcctgccggaatgcgtccgcaactgaccaatgatgaactcacgaatatgcggaagcttgctaaatctcttccttgtcactttgccttcgggagaaatagaaatcttcaaggtctggcatctgctattcttaggctttgggagaaaagtttagttgcaaagattggtgtcaagcgtggtattgtgaatacaaacaatgaactgatggctcaggaactgaaggcattaacaggaggtaccttactgctaaggaataaatattacattgtaatatatcgtgggaaggactttgttccaaccagtgtggctgctgttattgctgaaagacaggaattgacaaaacaggtgcaggatgttgaggagaaggtgcggtgcaaagctctcgactcaactccatccggggaagatgaatcaacagcacaagcaggatcgttggcagagttctacgtggcacaggcatgctggggaagggatatatctactgaagaacgtgagaggatgatgcaagaggttgccaaagccaaaaatgctaagcttgtcaaaaaaattgaatgtaaactagctgttgcccaggccaaaaggcttagagcagaaaagctattagcaaaaatagaagcatctttgcttccagttggtcctgattatganncaggaaacatcacagatgaagaaacgtgttatgtttccgttcaagttggtttaagaatgaaagcatacttgccacttggtatacgtggtgtttttgatggtgttattgagaatatgcatttgcattgggaa

SEQ ID NO: 100360 - DNA, 700 bp, Glycine max
  unsure (1)..(700): unsure at all n locations
  Clone ID: PAT_MRT3847_6163C.1
gagttcctagtagctacacattgggagcaactgagttgaaagctgtaacaaagtacaagtatagtgacttgaaagctgcaacaaaaaattttagtgagaaaaataagctaggagaaggaggctttgtgctgtatacaaggtaaacttgagttgttcctcctcacatttcaatcgtgactctaagagttctgtttttaatgtgaagttgtcaacgaagatatctccataagctaagaaggcaatattacttatatgctacacatctagtgatagaaaactaagtttcaagcagaatttttaatgatgatgttatacaataggggacaatgaaaaatgggaaagatgttgcagtaaaaaagttactttcaggaaaatccagcaagatcgatgatgaatttgagagtgaagtaacgcttataagtaatgttcatcacaaaaatctggttcgacttcttggttgttgtagtaaaggccaagaaagaattcttgtttacgaatacatggcaaacaacagccttgacaaattcttatttggtaactagttaatttccaatggaagcattttgtgagttatcctttatttagctctgtttttacctctgaagttttgaacatatacacatgggaaataggtaaaaagaaaggggtcactncactggagacnnacgtatgatataatttttgggcacggctaggggga

SEQ ID NO: 100361 - DNA, 283 bp, Glycine max
  Clone ID: PAT_MRT3847_61640C.1
ccacccgtcagaccacgcctgcatttttacctccgcacggcttcgaaaaaacgagagatggcgggtttggcctctggcaatgactaaagagagaaacagagactgaattttaattgaacactaccaattagccagcatgtagacctagtaaaacctgtaacgttcgttaactaacgattctcatggctttttcgtgccctgatcatgatctcactctcatttctctctcctttcaagtcaaggtgctagcccattacctgggcatcactctgttttatcgtga

SEQ ID NO: 100362 - DNA, 330 bp, Glycine max
  Clone ID: PAT_MRT3847_61641C.1
ctgccttcatcagataagactcctatttctacaacccatacatctaatcgggaggctcaccatcccgccgtgcagctaccacacacctcaatactccatatgataatcaacccaactctagaccttgatctgttggaaatcatatccacaactctccctgctgtaaacctttccctctccgacatttcttctcgtattccaacacacaacacctgatgcacctgttatgaagcacccaatattgcgcccctcggattgctacaagatcctctcataaactattcgtactctacctaatggcaaggttgataggatctatctaccctcccc

SEQ ID NO: 100363 - DNA, 538 bp, Glycine max
  Clone ID: PAT_MRT3847_61642C.1
ggtgctccacctccacattgctgaaactctgaacagagagagtttcattgatcaaggactaccaaatatttacctacggagctgcacgaaatcaccaccatatccggctcggattccgactgggacgattcggaagaagaccccggtttccacttgctagaagaaactcatagcacgttcttaaacctctcacttaagcacatagcagaagcgggtgggacggctagagaaattgaaagtggacgaatgcacgttgtatccgaggaagaatggcctgaggctaactggaaacaacgacacacttatacaacgcataaagaagcatttagagtaatcaatatttttgctaaagaaaattgtacgatttctctgattctccttgggatttcacgattttaaatggaagggtgaagaagtatccaccttcaagctctgtgttgaattgtaaagaattggagttctcagcaagtggtccaccttagtgcaaaaggattggcgcaggccacataatgcatgacagtgatggtgctactaaaca

SEQ ID NO: 100364 - DNA, 625 bp, Glycine max
  Clone ID: PAT_MRT3847_61643C.1
ggctacctcagaaaaaaagggacttgaagattacagacctgaagatatatcgctctctcttctacgaatgatttcatacaatattgcccagatagcctacttaaatgcattgcggtttgggttgaagcgtatcttttttggaggattttttataaggggtcatgcctataccatggatgctatttcttttgcaattcatttctggtctaatggggctgcacaagcaatgttcttgcgacatgaaggatttcttggagcattaggtgcatttatgagttatgaaaagcatggtttagatgacctaatggtgcatcagttagttgaaagattcccaatgggtgctccatatacaggaggcaagattcatggccccccacttagggatttgaatgagaagatttcatggatggagaagtttttgcagaagggaactgagattactgcacctgtgccaatgactccacttgctggaactactgggcttgggggttttgaagttcctttgtcaaaaggaagtactctgcgatctgatgcaagtgctctaaatgttggtgttctccatctattaccaacgttggaggtgctgccattactagcagacccataattgtgtgatcccaatacg

SEQ ID NO: 100365 - DNA, 1343 bp, Glycine max
  Clone ID: PAT_MRT3847_61644C.1
gagttaaatttaaatttacaaaggcaattcaattcttccttttacaaaactgagtagtaacacaaaattttcattgcaaacacatttttggtagtaaccaaacattttaccaaaatgaatttattttccaaaaatatattcaccatttaaaagtacttcttcaattcaactgataaccaaagatgttcatagtaggtccaatatacatgccagtaaattggatttgatgatggtatccgcatctatgccatgaattgtttttccatcaaacaaggaaagcatgacgtccacgaagtcttgaattccatcaacgttgttctcaccaaaagccctattttgtttgtgctcctctaaccactcaccaaaaatctcatccaaatccttggcagtttccttcatggccttctcatagccaccaaaatcaaaccatctcaagaaaggaatagcatctgccaccgtgaacacccccatcagacgcatgaactccttcacagccttcacacatctctgagccttctcatcatccatagttctagcaccgaaaagtcgctttccgacgaccattcgaagaaccatgttgtatgtcaattgagaaaaccattgcttcagctccagcaacgcatagccagactcattattcttgttgcttgaccaaacattgaagagctctttgatcgaactttgaacttcggagacacgaacattctctagttgctccactcggcgagatgtaaggatctctaacgttgtaatctttctttgctcgcgccaataaggaccatagggtgcaaacccaaacatggcttggttgtagcacatgagttcaatggcaagaagcttggggcgagacgaaacgacgatgtcgtttttggtgaagcattccttagcaatttcccagttgctgattaccaaagcctttttgacactaatcttgatggtgaatatgggtccatacttatcagccaaagcacccaaaaccctatggggtgtctctgaaccactcaatagtggaaggtgaccaagtattggccatgcacctgcaactgtgggagcatcttttttacctaatgcaattttgaagggattatacaaaaacaaaaagaagagggttagagaaagaactccagtgacagtggcatttaggtaatttagagcaaactccattttggagagagaagattatattgtttattgtaggggctgcttctacagagatgtgtgtatcatcctcaaatagattattcattgttaaatagaccattcattgttggatggagaaaggagtgtgataattttggtttgatgacgttattttctattattcagcaaatgcggaaaatttt

SEQ ID NO: 100366 - DNA, 116 bp, Glycine max
  Clone ID: PAT_MRT3847_61645C.1
tcgatttttttggaggtagagagctctgacacaattgacaatgtgatggcaaagatccacgacaaggagggtataccttcagaccatcaaatgttgatttttgcttttatgcattt

SEQ ID NO: 100367 - DNA, 576 bp, Glycine max
  unsure (1)..(576): unsure at all n locations
  Clone ID: PAT_MRT3847_61646C.1
gttatcatatgaaccatgaaagatattattaacaaatcacaaaaatgattttcaatgtcaagaaattgtacaatattaggccctccacaaccaattatatcacataattaataaaattagataaacaagtgtcacagtccataacaacgatgcatgttcagtcttcatttaggtcaacatagtctcttttcaacatcatcaagtttttgtactgttgcattctactaatatatggagttggtcactgctttacctgaggataagaattcctagaccataacaatgctagtggtggtaaaggacaacggtctttcaaataaacctgaacaaaataatttccaaacacgtgaccgacatatataatgcggtgcacagaagaaactggtggtggttgacttctaagaggaaaaaatgtcatgttttgttgtcgggacaacgatacaagaattacattataccttgatgcaatgacatatcccatctccgttatattcatccacttatccacactaaccttggaaaacccatcaacaagtagggacagccttaattcatcanatctgtttgtgccaccga

SEQ ID NO: 100368 - DNA, 548 bp, Glycine max
  unsure (1)..(548): unsure at all n locations
  Clone ID: PAT_MRT3847_61647C.1
aatgacaaacaacttgtattattagaggctcatcttttattcaccacattatttggctcaggctatgaatttttttttagaggaactgagaaataaataaccgtaaaatgttacaaaacaatctatgcaaacgaaacaacattatctacttgttgactccaatttaacagcattttgatataatcttactcgttcataagcctgtgtaatgtattttaatggtactctttgatggtaatttgtttgggaatcttttgacacgaggcatgaaaataatctgctctagatttggcacagcgttttgtagcttgagaaatcagccctaccttttgcattttattgaggagagaaactagtaagacatgaacactagtgactctgaaacttaagtcactgaagattttagcttaacaagtactaaacaatggtgccaacatagccaaatcctacgattgagaaggttantggtctgaaggaagaggtacaaaaagtagttgtttttgccgtgcacatagtcatagcatccacaaaggaagaagaaggcagcg

SEQ ID NO: 100369 - DNA, 590 bp, Glycine max
  unsure (1)..(590): unsure at all n locations
  Clone ID: PAT_MRT3847_61648C.1
cccggngtcgacccacgcgtccgcgcgtccggtgtgaaagctcgcacttttacggcgaattttttgtgggcttgttggattctgaaagaaggggcaaaagggtgtctgaagatagtgttgaattgcaatttggttaagtgggggtgtcattatggagtgggaagacgagtgcagaacgccgaggttggtgcagaatcagattccagcggttttcatctgcccgccgccgccgccgcggaagaagccggtggccggaaagcgacgaccgccgccgaaggaggggtacttccagccaccggatcttgattccttgttttcagttccagcaagaaaagaagcatgcgtctaacaaagtagcaactttttaaatttttggggggagtgtctgaatttggtttttgttatttttaaaagggagtatttaattaactattttattagtttattgatataaagaataattatatctagtgttgttttgtgggcattcctattttggtatgtcgtagaggtgttagctgatgatctctatgaaagaaaattgttatatagaatgatgattatatttatatgctttgagacttggagtt

SEQ ID NO: 100370 - DNA, 469 bp, Glycine max
  unsure (1)..(469): unsure at all n locations
  Clone ID: PAT_MRT3847_61649C.1
acaagagctaggacgtccggatgcgcgcatacgtaagctcggtcgctcgacgccattagcgtatctggtagtatttacaagtatacaggttgtctatgggattcatagaaatctagaacttgagaagcattacatggcgctgacgatgatggcggcgatcggcatcggcatgaaccaagagaagaagatgccggcgacgccggcgccggagaacgagctgaagaagcggactgaggagctcgagatggagctcagagagagcatggcgagggagcagcatatgaagcgcgaactgcagagcgcgtagtagaggctgcgcgttgncgaggatgctgaggagaggctctgctcccagctcggagagctagaaggcagagccgtttaccacgcgcgtgactaccacgcgcgcatcgtctacctcatggaccagctctcactcgcccagagcctgctcctgaagaccggtgcc

SEQ ID NO: 100371 - DNA, 1472 bp, Glycine max
  Clone ID: PAT_MRT3847_6164C.1
cacgcgtccgctcaaaactacacacaacctttctctctcttttacacacacacccctaagctataaaccagatcaaccctacctctctccacttcttactactgtgaagtttgagtttgtggtgcgcgagagatgagggatttgagcatttaagagatcaacttgttaggtatatggagaagaaagagatggctgtgaaaactgaggatgcgattgggtcctcttctttcccttgttataattcaaacctttatccattctcgaacgcgtttgatttctctgaggttgacaaaagctctttagggtttatggagttactgggtgtgcaggactatagtcctctgcctgagttaccacagctttcaactgtgtccgtgcaacctcatcactctacagttaaggttccgtctgataacgggaaagagtgttctgaggtgttgaatcaccaacctgccactccaaactcttcttccatttcatccgcgtccagtgatgcagtcaatgatgaacagaataagactcttctagaccaagcagaagaagatgatgatgaagaagaaggacaacaaaagactaagaaacagttgaagcctaagaagacaaatcagaagagacagagagaaccaagattcgcattcatgacgaaaagcgaggtcgatcatctggaagatggatacagatggagaaagtacggtcaaaaggccgtgaaaaacagcccctttcccaggagctactatcgttgcaccagtgtttcatgtaatgtgaagaagcgtgtggagcgatctttcactgatccaagcgttgtagtgacaacctatgaaggccaacacacacatccaagcccagttatgcctcgttcaggtgtctccgctggatacgccaacaacttcggttcagttttgccaccgggaaactacttatcccagtatcagcactaccaccaccaacaacaacaacagcatcttgtcaacacattgtcctctttgggttttccttacaatgattcttcatctccaaagaacgctgtttttactcaagagagacggctttgcagtaatcacgggacgaatgcgtttctgagggaccatgggcttcttcaagatgttgttccttcacacatgttgaaagaagagtagagctgatataactccagtaattattagtcatcatgcttctatgtgatttattttttgctgactttttcctatgagacttaggtgagaactctagtactggtacatgtaatttttcttcctgaccggaggtaatattagtgatcatgatcatatatacttgtaaaacccactttatctttttccacatagccccatcatgattatggctgtatagcatgatggattatgatttaatgcagggactacttctagttctagttctaattaaagaacatatggactacttctagttctaaaaaaaaaaaaaaaaaaacccctgccgcctcgctctctctc

SEQ ID NO: 100372 - DNA, 437 bp, Glycine max
  Clone ID: PAT_MRT3847_61650C.1
attggattaactgcaatttagatgtaaacgcatcatggcaagacatttcaaaagaagaaactatagagtagtttccaaaggctaatgaacacatacatcaaatttcaaagccgattccactcttttttccatgagactagaatgccctatgatggaaaataatagtttgagagaatccaagaaggtctttctcttatgagcccgtagatggtgcatccaatcaccactcccatctctgcagcatgttggaacatcattggccttagaaacactccccacaaacctatcaccaccatcaccatctctgtcactaaacacatgcttgatctctggctaatatcaaaatatgtgcctttttcttttgtgttgattttgccttgcttctgagaaatctatgatcatttgttctacctaatgtatatgcacggacgcgtggg

SEQ ID NO: 100373 - DNA, 685 bp, Glycine max
  Clone ID: PAT_MRT3847_61651C.1
acttagttcttaatacgttatgatgtattcaaatccaagtaaaaatgttaccgaaagtctacaactcagcattaaaccagcaagatgtcagaaagtattgtctattcccccacattaaacatcatcaaacctggggcattcctttcttttaggacatcaacggtgttaacacaaattttgtgtcatattacaattttatatcagctaagagcatcataatttcaggatctttaccacttacaatccacaatactaaaaagcttcttggagaaatgttaaagacacggagtaataaaccaaatcctaataactccattgtccattgtaaaatactcagtccatccatcccatgaactgccatggtcacaattatccattttaaaccattggtttggcttcaagcattcataggggattccggccgtttcatgttgataacactagagaacagtagaggtctatacactcttggcagatatatcctagacaaaagttgtcatccaagctttgagatgcggcgataccaaagattactaactcctatacaaatactttgataatgggaactttaagctccttgcaaccttcagagcaaagatttttcagagtatggtctgatccccttgctgtcgtcttctcgcagtactcgagcggctcgagcgctcgagatcgagcagattccgag

SEQ ID NO: 100374 - DNA, 313 bp, Glycine max
  Clone ID: PAT_MRT3847_61652C.1
ggaatttcgatgctcagtcatctcttttaccattctcttctctcttgctctggcaggagagagccatgtgcatgcatcgctacctgaggaagattattgggaaggtgttaggccaaacactcccattcccactgcactgagagagcttctaaagcctctccctgcgagtgatgaaatcaatgaccaccctaagcaggttgatgatacacagtacccagaagcattctcctgtgacaaagacgttactgcagacagcccggaggagaagcagtgcagcacacgaccgtatgcacaacattatggagtctataca

SEQ ID NO: 100375 - DNA, 214 bp, Glycine max
  Clone ID: PAT_MRT3847_61653C.1
tatattaggacaataaacggggcaaggggctgtagcataagcaatatgtggtattttgtacaaacgagtgtaattacaaatgtgcatttaagatctatgaatttgagcaaagaactgcattttatgacgcacattaacagctttttgggatgtaacacgtagcaggaggttttttttagggatggcgggggtttaccctatactaggctaggtt

SEQ ID NO: 100376 - DNA, 312 bp, Glycine max
  Clone ID: PAT_MRT3847_61654C.1
ttgaattatagtgaaatatcgcaatacttgaaagtgatggctgatagtagccgtcttgagatattagatttgttatcttgcggtgaattatgcgcttgtgatttattacagcatttttctttttctcaacccacattaagtcatcatatgaaagtattaaaagacaataatttaattacatctagaaaggatggtaataaaaatttatataaattgaatcatgctgtattagatgacattacatcacgactcactctattgagttccagtactgtcccatgtatatgtgaaactgtagagaaaggtgaatgt

SEQ ID NO: 100377 - DNA, 344 bp, Glycine max
  Clone ID: PAT_MRT3847_61655C.1
ccgcgagattagagacatgagacacacccccctgtttcacaacagaggacatctcattcttcaatgcttcaacggcagaacctttcataggttatcactccttcttcctgtgtcagtgtgctcttcttctgggggcaattccactttgcttctttagctacaactacaaccgcgcttttggcatgacaagctacgccgggatcactgtggtgtgtgtgagagatagggattacggctcagcgggttttctgtaacttagacagagctactataaatgggacacggggctgggagcacacatggttaagagacttgtggtggtgatgctatgattagaatctggg

SEQ ID NO: 100378 - DNA, 331 bp, Glycine max
  Clone ID: PAT_MRT3847_61656C.1
aattatactactactatagtctatagagatatcaaatggtactgcccaattaaggttgtttttgcttgcttgattttcttttccaatttggttggtgagctgaccctgctgcaacaagccgtgcagagacctctattgaagactttctctttgttctctttttttatgcaatggcttaagtggtggtgggtcttctcttctcagaatcttggtacaaaaacagaagagaaaaacgggatttttggttttgttgaactaagagaagctgacgctttttgggatcaaactatatgtgtttgaacttgagtctatttaaagtcttgttgcaatg

SEQ ID NO: 100379 - DNA, 176 bp, Glycine max
  unsure (1)..(176): unsure at all n locations
  Clone ID: PAT_MRT3847_61657C.1
gtacangctgggnatttncncntccagnnatctgctcctcanccagntggtggtgttntctccaggacgnacagattncnacctaaatattnntntagaaaatcagaaaaatgtcctgtagcaactaaaacagaagcaagtatcttccacacaacataaaaaagtaaaanaaaaaa

SEQ ID NO: 100380 - DNA, 127 bp, Glycine max
  Clone ID: PAT_MRT3847_61658C.1
tctcaaatccaatgaccctgttggattcaacattgatgatgttttggctagtggcttcataggccatgtagttgcttactatatcttgtccaacactagcaatggctatgaccctgctttctttgga

SEQ ID NO: 100381 - DNA, 343 bp, Glycine max
  Clone ID: PAT_MRT3847_61659C.1
ttgctgtcgcgtgggcggacacatagacgtctagctattctttttcgcctgggagatagaaaaggtacaggaaaatccaaagaaagaatggaacctgcctagtttaatacccctctcgatttgtaactaaccatggctgcgcttcgatggacaaaccttgcggcagaacgaggatcgcccagccaagacctacgtattgatggtgtcacacggattaaaaggccccactgcactcttttctcccacaaccttctccaggatattttggaatctatgggagactatcacgatgggttaaaggttgctggagggtatgacagcatgatgccaaaggctactatca

SEQ ID NO: 100382 - DNA, 932 bp, Glycine max
  unsure (1)..(932): unsure at all n locations
  Clone ID: PAT_MRT3847_6165C.1
aaccaaggaagatattcttagccttccctgcttccagaatcaagaaattattgcaatcaaggctccaaaagctagttgcatcgaggtccctgatcctgatgaggaattaggttttcggcaaaggcagtacaaaatgattgttcgaagtgccattggaccaataaatttgtatctcttgagcaaggacgacagcaagtttgaggatgatagtgccaaacggatgaaattaatggatccatcatggaatagtgatcccatcagaaagaggggtgtgggattattagaaagccaacatgatgaaaaaaatccttctgagcatttcagtttgcagggttcacaagcatttggaattcaagaaattactcccacggattttgaaatggaagatgactattggtttcaatcagatcctggagtgagccaaacagaattgtggggtagcaatatcttctaaccaatctttattatatgaatttgattcttggattcccaagaataagaatttaaagctcataaatcttttttctctttcttttctgttcaggaaatgagtagttggttctgatagatgtgcttcaagacgattaatccaataaaaggtgcgggatttgcttgaacacaagcttcactaacagatacgattaataagagatagactgttaattgttccagacggcacacaggatacatttcaaactgtaaattttagctcttttttttggctttttttctatcagcagttgccttaactaggataattgtgtcctagttcaacaatgtaacttacgaatgaataagattgagatataacttctaaaatagaattgtttcaacccccttatagctttacatggacaaagccataaatcctctcccaataaagtttcaaactatctaggatannngangaaaannaaaanagggnggccgcc

SEQ ID NO: 100383 - DNA, 500 bp, Glycine max
  Clone ID: PAT_MRT3847_61660C.1
aaagaagaaagcacacagaaccgggcaggaatacccggaacgacacacgcgaccggcagagagagagagagagggagagcagacagaacagaaaggcggaagagaacggcaaaaagaagcacgtgaaaaagaaaggagaaagagcagagggagaagaaaagcacggcgtacaagaaccagggtacaaaaggcgccacgagaatagagagaagagaacctacggccagcgcgcagaggaacaagataagcgggcaaacagaggaagagaggcacgacaatgaaaaagaaaaaaataaaaccacggggagggcagagaacaataaaaacaggacacgaaccaaaaataaggtaaaacgcaaggaggggaccaaaaagcaaaggagctatgcgataggaataccaaggagcggccataaagtatgcaaaaaaaaaagccgcaactacgccaaacaggaaaaggagcgatatcaaagaaataataaaggaggcaaaaaccaaac

SEQ ID NO: 100384 - DNA, 374 bp, Glycine max
  Clone ID: PAT_MRT3847_61661C.1
acgcgtgcgacgacgcgtgcgtgcgggtcccagatgacgaccgatggggacttctctgtacagaaacagcgatatatatatacccttagccaacacaaccatcatggcctcctttgctattaaacaatcagcattcactggtcaaactgctctgaagcagatattgatgttgtccgcaagaccgatggcgccgcgcaaaggtcgcactaacatgcgccgcaccatccagagtgctgctcagagcatttggtatggccctgaccgtcccaagtacttgggtccattctctgagcagattccatcatacatgaccggagaattccctggtgactacgcatgggacactgctggattatcagctgacccggaaacct

SEQ ID NO: 100385 - DNA, 506 bp, Glycine max
  Clone ID: PAT_MRT3847_61662C.1
aacaaaatggtcaacctttcccaacaaaagcgacttgccgctgctgtggctggtgtcggccagaggaagatctggctcgacccccaggaggctgccgagatcggacaggccaactctcgatcgggtgtcaggaagctgctcaaggatggtcacatcatcatcaagccgaccaccatccactcgcgagcccgaaccagggagctgcacgccgccaagcgactgggccgacacaccggtaccggtaagcgaaagggtaccgccgaggcccgaatgcccaccaaggtgcaatggctccgacgaatgcgagtcctccgacgactgctgaagaagtaccgagagggcggcaagatcgacaagcacttgtaccacacgctctacctcgaggccaagggtaaccgattcaagaacaagcgagtcttgatggagcacatccacaaggccaagtcggagaagctccgaaccaagaacctccaggagcaggccgaggcccgacgagtcaagaacaa

SEQ ID NO: 100386 - DNA, 399 bp, Glycine max
  Clone ID: PAT_MRT3847_61663C.1
accgtcaagagtgctcctcagagcatttggtatggccctgaccgtcccaagtacttgggtccattctcggagcagattccatcatacctgaccggagaattccctggtgactacggatgggacactgctggattatcagctgacccggaaaccttgtgcaggaaccgggagctggagggagttacaaacaaatgggcaaggcttggtagcccctggaggggccttcgcagaaatgcgggaaaaaatgggggaaaaatcggggaggcggggggtgggagacggtgcacgagaagtatcacaaggggccttgactacttgggcacccaaacctgatgcatgctcaagcatgcttgtatctgggctgctcaagatgtgctcatgggtttgttgaggtacaga

SEQ ID NO: 100387 - DNA, 614 bp, Glycine max
  Clone ID: PAT_MRT3847_61664C.1
aagatattggtgcaacttcaacaaatgaaaatgtatcttaaatcaaggcaaaccttgaggtgtaagaaatcaaaacacattccatgattcacttttgtatagctaattgctctgttggtcagaacaatcccccatcaaatagctattccgagtatgcaatcatgttataatctgcttacacttcgatttttcttcaaatattattattacatcaaatgttcaaacacttattacataaaaatttcaaactctcctcaacactagtaaaaacggcaaattgttgctttggtcagaaacagtgatcaaaacagcttgaagagggaggaccttgaagttttctgatttccaagccagtgttgcatgtggaccccaatggcatccaagtacaagctgctcctcccatggaaacccaccaccttgccttctgtagtggttgaagtgaagaatttacctacttcttcaccaaatggaccatacttgccacgactggtgttgaaagtcagtgacttcatgattacatgctgctcatccttagcaattggcccgtaatagccagatatgcaagtcagcacctcatttggatactccagttgtatcctatgcatggtgtctcc

SEQ ID NO: 100388 - DNA, 732 bp, Glycine max
  unsure (1)..(732): unsure at all n locations
  Clone ID: PAT_MRT3847_61665C.1
agcgcggggttgggctcgagttgaggggtgtggtgtttcctgcatcaatgtatatgaggatgctgcagttctgaaactttctggggacaaaatattgtcatcacgtcttataattgatgccatgggaaacttctcccctgttgtaaaacagataagaggtgggaggaagcctgatggtgtttgccttgtcgttggaacatgtgcacgtggctttgaaacaaactccactagtgatgtcatattcagcagttcatcaataaagaaagttggagattcaaaagcacaattattttgggaggtaacttccactgtatcaatagaaacacagtatccccatctctatttttaagaactttaactaaaatcttcacaggcatttccagcaggctcaggtcctttggaccgtactacttatttgttcacttatgtggaacctcaacctggatccccaaaattggaagaattattagaagcgtactgggatttgatgccagaatatcaggctagttttcttttcttcattgggttctctgatggctcattttttcattttttcattttggaggacattntatcctcccctttgtctgtgcttncttcttttctctaataaaatttctttttctatganaaactaagatttgaagtaaggagatctttttattcaatttcatgttcttaacagccaaactagaagcttgaaaatggcagtctgtgtatgaattatcaagt

SEQ ID NO: 100389 - DNA, 189 bp, Glycine max
  Clone ID: PAT_MRT3847_61666C.1
gggaatctgaagaagatcacgtccgaggtcgatgaggtatcccggtctaatgggcgccgcgtagtgaaggataagctgtcccgttgcaccgaagacggataactttccgtcagcacagacgctcttctcgcattctccgaaagcggtatgatcttcatgcacgacgttttagcagctgctaacggggaa

SEQ ID NO: 100390 - DNA, 471 bp, Glycine max
  Clone ID: PAT_MRT3847_61667C.1
ctggacgctaaaaatggcacgaccaactgttggtcttgcaaaacgcataatgcccatcacttatggcttggcacatttgctactgaagctacctattcaagccccccgactaatttgccctttcaactgttgttaacggggacttcaaatactcacagggctcaacttgccttattgcaaaaaaaaaactttgcttgatctttcgcggtgcaaccgagctataatatccaaatttaacaattgctttacataacaccccgacaactgcatgccaactctagacaccttgactccatttcgagttatctcaacccgtaatggggacgggaccatcacatccctgccctggggaggcgaaaaagacaaccctcttacccagctcttctattcacagaaattcatacccattctacggaaagactggaatccaacctttcatgtgatcaagacttaaccctaacagttccaagc

SEQ ID NO: 100391 - DNA, 616 bp, Glycine max
  Clone ID: PAT_MRT3847_61668C.1
gaccggaacacctgaacgttttgggtgcatgataagtgagaaattgaagcaccccttgacagggttactgaagtttgtgttatggctgttgtctacgtggtttgggacattaattttctgtggcatgggatgcttctctacccaattccccttcattcacacctatcctgatttgcctcttcagaaacgccaacagattatgcgttcatggtctctcagttaccttcgtcactttagaatgctgttcaggaccatcaaacttctcactctcctaatcttctttactcagatagatgaatcagaagacaacgttgcatggaaagcaattggatactgcggacctgatccagaattcaaagctcggttgaagagccactttttagatggaacatctaaaggaggacaagaggataaggaagatgaagatgctgaagaggtgataggaccactttacaaaggtctagtccatctcaattacccacgagacatcactgcagatgctctaaaacgactcggattccctgtatcggtcatccgtcagaagcataaagctgctgcaaacttatcatctccttctttggtgatacaatgtgatgcagtggtggttggttctggc

SEQ ID NO: 100392 - DNA, 479 bp, Glycine max
  Clone ID: PAT_MRT3847_61669C.1
acggctgcgagaagacgacagaagggggttgaatcctgatccgtaaaaaaactaggctccataaaacttaccagattttgacaaacatagtgcatgagaccaataatcccttgacaacagcaccctataattctgcttgtgttaatatccctccaagagcaatgaacccataccagtgaccaatgtacacttgtgtctttgtaaaaaccaggcattaaataagcacactgtttcccgtgctgctcaaacgcccaccagctgtttgacgcaagtccatgccaccagttacctcaagaaaccacatctaccagttgtgggattattaagttgcactttacttgatttacagttagtgagggaccacatcagggccttgttttgttgatttgaacccttgcaagaatgctcgtaagaaatttacattgtcacaaagtccattctctgagcctaaggtgctttacttcaggaactcctaatgt

SEQ ID NO: 100393 - DNA, 185 bp, Glycine max
  Clone ID: PAT_MRT3847_6166C.1
tcttttatgcgtgcggcgtgacaacgagtgaaccacacaggcggagagaggctaacaaatcgggtactgacgactcaatggatgcaattgctgaaggactaagcatgtgagaagtgctataaagataaatctaagcccgcgaatgcttggtggcgatgacataaatcctacatctcaaaactcca

SEQ ID NO: 100394 - DNA, 502 bp, Glycine max
  Clone ID: PAT_MRT3847_61670C.1
atgaatgtgattgatctctcaaataacatcttgtctggaagtgtgcctctagagatatatatgctcactggactacagtccttgaatttgtcccataatcaattactgggaacaataccacaagagataggcaacttgaaacaattggaggccattgatctctcaagaaatcaattctcgggagaaattcctgtgtccatggctgtcttgcattatctttcggccttgaatctgtcattaaacaattttgtgggggaaatcccaacagggacccaacttggttccacaaaccttagctatatcggcaatcctcacctctgtggagctccacttacaaagatatgcccacaagacgaaaagtccaacaacacaaaacatgcaggagaagaagatgatgatgataaatctgaactatactcctggttctatatgggcctgggaattggatttgccgtgggatttttgggagttttgggcgccattttcttcaaccggagatgca

SEQ ID NO: 100395 - DNA, 457 bp, Glycine max
  unsure (1)..(457): unsure at all n locations
  Clone ID: PAT_MRT3847_61671C.1
gaattcggcacgagatcaagactattttagtttcaatagaaacatttaagttccattcttaatttaaaaatagaatcataataaaaatttagaaaacaatgacattattatattcagaatgattttattatctgaaataatcaaatattcaatgccgcatccatactgatagttttacgggtggaaaaatcaaggggactagtataattttcttacttgaaactggcaaattgattcgcttatgaaaaatatttgatgaagatctattaatctatccaacacttagaaaaagagataaaagtaagagaaaaatataggtataatagaatttgtgacgtgataggaagagaaagataaaaaaacaaaaaaatgtatcgaaatgtttaaaattaaaacatgtttatgtatcattactctttcacttgtaaatannntcatcatgcannnntaatttatc

SEQ ID NO: 100396 - DNA, 710 bp, Glycine max
  Clone ID: PAT_MRT3847_61672C.1
gtccggaattcccgggctcgacccacgcgtccgaattactattaccaagctccctttgaattcggctcgagcttcaatcctctccttcctcttctctttctcataagccatctatagccataaacattacctttatctccaaaggctttcttgtgttcatggtaatcgaaaccaaagtacattttcttaactcatctctttaatttctctctctctctctctctgctatgaagaagctctgtcccaatcttactcgcgaggatgggctcgaaacggtgctggaggttcccatccctgaggagattttcaccatcaagagtggaaccagcagagcttggcataacatgaagtcatggatgaagccaaatgttgaatcttcaagatcatcatcactctttggaggccaaaacacagatatccaactattgcttggtgttgttggagcgccattgatccctctccctgtcacctctcacaaccaacctatcaccattaaatcccataacattgaggcttcgatggcgaaatacatagtgaaacaatacgtggcggccgtgggaggagagagtggtttgaattcggtggaaagcatgtatgcgatgggtgaggtgagagtagggtcagagttttcagaaggggaagaatgtgtgagtagcatgaagacgaagaaggtacagatgaaagaagaagtgggagggttcgttgtgtgg

SEQ ID NO: 100397 - DNA, 440 bp, Glycine max
  Clone ID: PAT_MRT3847_61673C.1
ttttgctcataacaaaatcaactctcgccgaggggggggcttttaaaggttccctgggggatcttaaaattcctcaatttaaaattgcacttcccaaaatcccacctgtagtaacccttctccgtatcgcacctattgtaaacatttgacccaggccacttttagaaaccgtgttgatctcccactcactcatcgttttaaaggaatcattaaaatggtggccacatctgctactccctgacaatacatgtatagcattagcccgtgctatgaatacctcctttaggtggcgtcccatttctgatattaacaccctctgctcttaacactcttaattatggaatcccgcttgcacaaaaaccatgactatttcatttaatccaaacctacgtttttaatacaagaattttgtaattttttgaccgcaccctattccattg

SEQ ID NO: 100398 - DNA, 149 bp, Glycine max
  Clone ID: PAT_MRT3847_61674C.1
atctaactcaatatagcatagatgttattttcttcccccgaattattgtattttcataattaaaactcataaatgaaatttgctaatgaataataatataaatgaatgagagaagagcctatgcactccaatctcaaatatatatatat

SEQ ID NO: 100399 - DNA, 477 bp, Glycine max
  Clone ID: PAT_MRT3847_61675C.1
ggggaatttgacggagttacctcccccactcaactccgttggaggctcaaccatggatcccttcatccacaagctccgtcgccaccttctcgcatggttccaccgatctcgctccggtgcggtgttttttgtgcggagaatttcgtataaggacgttagaagagcgacggacggtttccacagagtcctttacagcaattccgaggtttctgcgtacgctgccaagttcggagacggcggcggcgcttgtttggtgagagaagtgaaaggcttcgatgaaggaaacgacgatttctacagacacgtgcagttcttggggcgcttgcgtcatcgccaccttctctcgctcagaggcttctccgtcggacgcaatcacaagagattgctcatatttgacaacataaaaaatggaagcttgaaggatcatctaaatggtaaatttagaaagccgaataaaaacaatggttagaggatctt

SEQ ID NO: 100400 - DNA, 425 bp, Glycine max
  Clone ID: PAT_MRT3847_61676C.1
cgaaaaggaaggcaaagaaaaaaaacgattaccaaaatccttatctttagtttaaaatacatacatctgctgggcataaaaaaaagggttcattcctacaccatcaggcggatccccttgtgggttttttttttccaaaacttgaggataaagaatctgcccttgttttggataaagtaagaggtccagaggcagaaggttttgcttatggaaatacaaaattgggtgctcctgttggggggtaaccgaaattaattgggggccctgacccaacttgaccttttccaggttgcatgtctcctgggtccataggaaagggagcctttggaacccctccaaaacgaaatggggattggccagttttaccttttggggaaccagcaaattttacaacttttttcctttccccgagcattttttttacc

SEQ ID NO: 100401 - DNA, 270 bp, Glycine max
  Clone ID: PAT_MRT3847_61677C.1
gtaaaaagcatttttttttatgttggattcggatacccaagataaatcacattatctgaggttctttacccaccacaaaaggggtgactttcaaaagccaaattgttctttgacgctcactatcccgagacgatatttgtgtaatatgcccacgcgttgttgttgacagggtcagcaaggtgatcggccacgttctacaatggaccctttccggtgacaatggcctgaacatagaagccaaacatatagaaaatcgggggtaaaacgggg

SEQ ID NO: 100402 - DNA, 408 bp, Glycine max
  Clone ID: PAT_MRT3847_61678C.1
gaagggtttcccgtcatcactgtatgacgtcctccttctttggggggggggggggggggggggaaaaacaaaacaatgataggggagtgggggagttgacgcctacagaggcaatagttgggacgagggcggcgaccacactgataagtataggggtggtggtagggctaacttaaatataagagcaactaggcatgctattggtgtgggggagaacaacagatacaaaacccccaaacaagaggaccggccaacaccgccaaaaagcaataaaaaaacacactgcggaatagttaaaataaaagaccggtgcttgatttacaagggcaaatacgtttggggcagtggggggtgaaactgttgctgacaggaaaaggtatggcgaccgcacggaacgacttgttatga

SEQ ID NO: 100403 - DNA, 295 bp, Glycine max
  Clone ID: PAT_MRT3847_61679C.1
tgatcctaccaaggttgatatgagccgggcctaccttgcgaggtcagctgcatggaccatcgttgcccatggacttgctatgagggcgattgtgcaactttcctatgccattgctgtgcctgaacccttgtctgcgttcgttgacacttatagccctgttaacacccctgacgaggtaatcctctacatcgtacaggagaggtttgactgcaagactgacatgatctccatcttccttgatctctcgagggatggaaatgggaagttcttgaagactgctgcatatgaacacttt

SEQ ID NO: 100404 - DNA, 717 bp, Glycine max
  Clone ID: PAT_MRT3847_6167C.1
ctactgaaatagattttaactttaatcgaaaaacaatcaaaacgcttattttattgtacctaaattttgggaaaataaattaaagaatataaatatttcaaaaaaaaaagccaaaagatgtgagaaactatattaaaaaaatcataaattgttatattttggaggttcaaagatttctccattcacaaagagaaaaagatgaaaatgaaacatcggctagtgtttttcaaacaggtgtgtttgcaaggaaaacaaatagtttaatttgcacctaaattgtgctatttatagtcttgtggtggatctcaaaacatacgaactggtttaaaaccaaaattatatatatatatatatatatatatatatatatatatatatatatatataaacaattttacttataccatgaacaaatttttcaataaatacgtataaaatgaattaagtctctttcttaaaataaaattataagttaattttttttaataaaagttctttcatttaactttttcgtaacctaattttgacttatgtatgagttaatttcaacatataagaaaaagttgttggaacagggttaacactattatttatattattttttatccaaaatcttttacagttcttatagttagaaactataaacataagttttttcaggaaattcaattggtattatgatattataaaaggtaataatcatttgagacattttct

SEQ ID NO: 100405 - DNA, 409 bp, Glycine max
  Clone ID: PAT_MRT3847_61680C.1
gcgagaagacgacagaagggcaccaagagtaattataaacattaacatattataaacaaaaatttacaaattgataaaatattagagtagtaatgtactttaattgcaaacaaagtcagaataaaacaaagttagaagttgcatctaatttgatttccaagaagcaaattctgtgtttgtgcaaaagtccttcatccatttctaatttttgcagtcttcctatgatgattataaactattctacactttatccttccaagttcagatggattaattctgcagcttttattaataaattcatgggtccttgacatattccagtttggtgaaaaaaagttatatttcattaccgtattgatttaaaaattttcctacagggtggatggtttttatttactttcaagttttt

SEQ ID NO: 100406 - DNA, 467 bp, Glycine max
  Clone ID: PAT_MRT3847_61681C.1
tggcttggaacctttgggctgatttatgtgcttgcatggtcgtgagaagatcatagaaggggacttaacttaaccgaacctcttagagagaagaagaaatccaactgactactatcctatcctatcaacatactacggtagatgagatttagaataagcacgagagtctcgaggccgaggcttaggactgcggcgcccccgatccctctggcaagaaaaaggacgaagaagataagttctacttctaggaggaggctactgttattgagccctaaaaagctatcgctctagattaaggagagaataagtatagttctccagaaaagtcctattgactcgatagtagtctcagtctcctaagcgaggaggaaggagaagacggagagaaaaggaagaagaagaagaaagaaaagaaagggtcgaaagagaagactgaggagaaaacagaaggcgactactactactat

SEQ ID NO: 100407 - DNA, 253 bp, Glycine max
  Clone ID: PAT_MRT3847_61682C.1
aagagagaaagagaaccctgccaaaaaggattcaaaaaaggatctgctttttaaggcttttccttttaaaaaaaattcaaaggatgatgaaaatggaaaaaaaaaaaaccaaaaaaaaaaaaaggacccaattgcccccaaaggggcaatgtccggtttcttgttcttttttaatttgaaaaaagagattctaaagaaaactaatcctgaaatttcctttaccggttgtggaaaaagtccttggaaagaattg

SEQ ID NO: 100408 - DNA, 388 bp, Glycine max
  Clone ID: PAT_MRT3847_61683C.1
agcttaaagcttgttgtaaagtacttacgtaaagccccaaaagttgaggggtttcaacatccttaaaatacgttcgtaaagttaagaatagttcttgtctaagttcggtgttagaggaaaaaggtattgatttcatgtgttagaatacttctagtagaacacagggtcttgcttacatattaaaaagaaaattgtggaatgagagatgggtgacaaaggagttatggaagaatggattcttgacccaccgttcgttgaagtgatgcatcagcaaggaattgcaacaagtctttgaagaaataacctttgaatcgaaagcaaacgttgttgtgtttggcaactcatacttcaatttcaaaagttggactattaattgaaagaatgaaat

SEQ ID NO: 100409 - DNA, 391 bp, Glycine max
  unsure (1)..(391): unsure at all n locations
  Clone ID: PAT_MRT3847_61684C.1
tcgagggcccaaattgccccgaaacctggaccctacctcctnnagaataaanntttcatttttaaattttttttggttcaagggccaatgatattcaatcggnncaggtattggcatctggatatcacgcacccccttgtccattggcgtcagagtgaatgcctcngnnacggcgtcccagcatcatagcccccaatccacgtgcccatacacttaacgactatacacaatacacctatacagnctaacacttnncttcttctaccgcccatcnnatctgagnagggttcaacttaaatttataattctgcccaagcaaagaatatannaagggtcttaccccaaccccagacttggatacccgttaaagggcaacccgctaatggggggt

SEQ ID NO: 100410 - DNA, 670 bp, Glycine max
  unsure (1)..(670): unsure at all n locations
  Clone ID: PAT_MRT3847_61685C.1
cacggtggtcttatcgacccaacacgacccagacgtttccttggaacaaatccaagcagacgttaaggaacaggttatcaaggccgtgattccagctgaatacctggacgatcaaaccaagtacttcattaacccgaccggccgcttcgtgattggtggtccgcaaggggacgccgggttaactggacgtaagattatcgtcgatacttacggtggggccgctcaccacggtgggggggccttctccggtaaggacgccaccaaggtggaccgttcggctagttacgccgcccgctacatcgccaagaacttggttgccgctggctacgcaaagaagctggaaatccaagttgcctacgcgattggggtggccaagccggtttcaatttcgattgacgactttggtaccggaaccaagagtgaagaagaaatgatcgccgccgttcgtcaagtctttgacctccgaccggctgngattatcaagatgctcgacttacaacggccaatctacaagcaaaccgctgcctacggtcattttggccggaccgacatcgacttgccttgggaaaagttagancaggttgcgggattaaagaanatttntgggctaataaccaatgaaaaacgtggcgggggtcatttgtgaccttccccacgttttttttctttg

SEQ ID NO: 100411 - DNA, 475 bp, Glycine max
  Clone ID: PAT_MRT3847_61686C.1
acaacaaattctatactagcgtgctttattgacatcaagtacaagaagtagcagcttcactctaataattgcccccaccttattacctcaaatatataatacaagtaaaaaaaaaaaaaaaactgttggtaatgggatcaaaatttcatccataataaaaactttcaacataacccaggaaaaaaatgtcagcttaaactcactttaaaaaaaaataaaacaagtttgatatgaatcaagtgtgcatggaatcagcactaacccaagtccaatgatgctttttaacagaaacagctttatccgcaacaattttgtcttgaaaaacccctccatactcatcgacctcgtagggggaaaaatccccctggggcaaacccttcacgggggcactgagcgtgtgcaaaacgtatcaaccgggcaaacccgggtacgaacccgaatcccggttctaacccttattttatacgaattggga

SEQ ID NO: 100412 - DNA, 1136 bp, Glycine max
  unsure (1)..(1136): unsure at all n locations
  Clone ID: PAT_MRT3847_61687C.1
cacgcgtccggtcgagcacaaacgaaaagacctaaatccaaatataaccttgaagtttcagtttcagtgcttcacgcaagaagctatccataacactctctcctctttccaattctaatcctcaatttctcctttttcttacttactattacaaacagcaatccctaaattacccactcaaacactggctatgattcttcatcttgtctctgcgtcgatgcaacttcgcgcttctccccaaaagctcgtcgaaagaattcatggacactcaacgcctagtaactcatgcttttatgtcccataagactgggttgagagcaaagcacttgggtcttcacaaagcaatttgtgttttgatgggatgggatactgttgttcctcaagatacagtaacttgggttccccaggtcttgcctcaggcagaagctctggctcaaaaggaggatttgattctttggcctcctattgttatcatccataacatatcgatgtctgatgacaatccgcaaaactggaaggtntgtaagcatggaaacaattgaggcttttctaagaggcaaaggttntgtgagaggaagaatcaaattatgcttagggaagcctgcagatcaaagtgttgtattggtgaaattccttggcacgtttggtgggctgggagatgcagagaggcttcataaatatctttctgataataatcacggtagagctgaatatgagagagtaaagtctgaaggtattaaaagctgtaacattagcgagacagatgagggagacaaagtggagaatattctttatggctatgtgggaattgcggaggacttggacaaactagatttcaatagtaagaaatggagtatggtaaagagtaggaaggagattgatgacctggataaagctcctgttaaaaccgatgagaagcgatagttacagtgtcattgtcattgaagatcgattcaggagtttcatggtccctgacgcttaatattgagtgttctaattgcataatctctttttctctatgcttttgctagtagtttatgttatttatatagttcaggaactggaatttgatttaaaagtccttgtaagagatatattntcagtttctgaatgttttgactgaacttgaccaaagc

SEQ ID NO: 100413 - DNA, 271 bp, Glycine max
  Clone ID: PAT_MRT3847_61688C.1
gggggttattttgagcctgttttaataatgactcttgctacggcacaagccatggaccacaattttttttacagacaacggacctcattacatacacaataaatacacatggccggggagggggacaccctaagttaactctccatacagagagtgccagtccagctgttgtaataacgaaaaaaaactctgtttgaaaaagtaatttattaaaatgaacaagctgataaaatatatttaaaatggtttatataaagaaaagaaagaaagg

SEQ ID NO: 100414 - DNA, 1908 bp, Glycine max
  Clone ID: PAT_MRT3847_61689C.1
ttccggtccggattcccgggtcgacccacgcgtccgaacgaaaagaccataaatccaaaatatcaaccttgaagtttcagtttcagtgcttcacgcaagaagctatccataacactctctcctctttccaattctaatcctcaatttctcctttttcttacttactattacaaacagcaatccctaaattacccactcaaacactggctatgattcttcatcttgtctctgcgtcgatgcaacttcgcgcttctccccaaaaggtttggcaacaacaataaatctcatctcattcattggtcgcttcatagatttttgcttgatctctatctgcaataatctcaggtcaacatatttctagggttagggtttgtgcatcggtagggtttctcgcttctcctaagacccgtttgggaattacctaattcgaccaagagggtatttagggtttacgtttgtttattgatttaagcatgcaatataataggcggcgcgaggaagagcacggtgcaccgcaccgattcgaatcgggacccgacccgtttcggagaaatcgtcgagatgggtcggacccggtgcagcagaggaaggtgagtcctttgaaggtggatggggtgagaagggtcatggatatgatgagaataaacatgcagctaatgatgaatcatctgaagaatggataagtgctgcaaaatctcacccaactgagggctccgaggaggtaaagcaaatggtacatgaaaatttcttaatgttcctgaagaagttaaatctgaacttatatgtgcaaagaaggtaccaggaccagggaaaagcgggtagtttgtactgcatcgtatgtggcagaagctcgtcgaaagaattcatggacactcaacgcctagtaactcatgcttttatgtcccataagactgggttgagagcaaagcacttgggtcttcacaaagcaatttgtgttttgatgggatgggatactgttgttcctcaagatacagtaacttgggttccccaggtcttgcctcaggcagaagctctggctcaaaaggaggatttgattctttggcctcctattgttatcatccataacatatcgatgtctgatgacaatccgcaaaactggaaggttgtaagcatggaaacaattgaacgtttgctagaaggcaaaggaggggtgagaggaagaattaaattatgcttagggaaacctgcagatcaaagtattgtattggtgaaattccttggcacgtttggtgggctgggagatgcagagaggcttcataaatatctttcagataataattgcagtagagctgaatatgagagagtaaaatctgaaggtattaaaagctgcaacacgggagagacagatgagggagacaaagtggagaatattctttatggttacgtggggatcgcagaggacttggacaaactagatttcaatagtaagaaatggagtatggtaaagagtaggaaggagatcgacgacctagataaagctcctgttaaaaccgatgaaaagcgatagttacagtatcgtttcaggagtttcatggtcccttgatgcttaatattcagtgttctaattgcataatctctttttccctatgcttttgctactagtttatgttatgtatatagttcaggaactggaattttatttaaaagtcctttgtaagagatatattttcagtttctgaatgttttgactgaatttgactcaaagctgatgcagaatcctgagcttttgtaatgagcaatgtaggcttttgttataatgattgctcaggatgaatgtcaccaatgttctgaaatactaatattttatcgaactataaaggtgaaggtaagctgtcaaagttatttggcatttacattaaaaaaaaaaaaaaaaaaattttttttata

SEQ ID NO: 100415 - DNA, 339 bp, Glycine max
  Clone ID: PAT_MRT3847_6168C.1
gcggatgccaccccaaaagtgcccccgacggggagacaaagctccacagccaaaacggaaactaccgcattcctggaacaccaaaacacaattcacctgtgacggactagacaagagacatgctccaagctagaccagagaacagaccagataccacgcaggcctggcagcgcgtaatgagcaactacctattaattgacagaagtcaagacctgacagaccacctgaattgcccacatccaacgatcatgaaagtgtgtcaatgccctcaaacagaacacccgcaaagcccacgaggaacccacccccgccacccgcatcaggagaacccaaaacctc

SEQ ID NO: 100416 - DNA, 436 bp, Glycine max
  Clone ID: PAT_MRT3847_61690C.1
aacttatgtgtgtaatatgcaatttagttcaatatatgcaaattcagatgcagaagtctttcgatataaaggagatgagattaaatcaatatatggttgtattatgtgtttccaacagataccaaaaaacattttattagaggtgcttggaccttccaaagttttcaatgaagttatcaagaaaataatcaactcaactgtagctgaatacgtggagaaggagtgtttgatagttagcaaggaccttagagttgagcaaagctttgaagatcttgaaactacttttgaggaaggagaaaaattcagctttgatgttgtacttgagcttcaaaaataaattgaattacatttgtttgttcaaattttatcttatattttgctgtttcaatgtgatagttttcaataccatatataactcttgcaagaaaatatttac

SEQ ID NO: 100417 - DNA, 144 bp, Glycine max
  Clone ID: PAT_MRT3847_61691C.1
gccccactgattgataggcccatatttgtgcgggcattcatcaacacagacgcgtggccggacccatggttttacccaaaaattacggactgccacttgtgtgcattccaaataaaaatatattgagttggattataactgggt

SEQ ID NO: 100418 - DNA, 369 bp, Glycine max
  Clone ID: PAT_MRT3847_61692C.1
ctcgagccgaatcgcctcgagggggaagtaggtccagttttacagtaacaatggcgtacgtcatggctcagaaatcataagccttcttcatgagatctcaagtcaagttcaatgagaagaagagagggaaaaacctattacccgcccacgattcgcttgattcatcaggacaagaacatatataacactccgcaataccggtttgttgatcgctctatcaacatggacattgttgcacaaataatatctgctagcattgctggcgatcttgatgttgctgcctcatatgcacatgagcttgcacactacgggctcgacagttggctcacaaattatgctgcagatcattgcactggactcctgttggcc

SEQ ID NO: 100419 - DNA, 571 bp, Glycine max
  Clone ID: PAT_MRT3847_61693C.1
gaaacctggagaacctaccaaaaagactaaagagctcaatagaggtcccaaaaacatcgaggaatgctaaatcaaggaaaaattcaaaatctgcttcaactagcaacgatgaagatgatagaagcttgagcctccaagtccaaaggaataatagctgtttttcacagagtgactctaatgcttatcttgagccaaatggaggggcatcaaaagatcctgcacctcctaatttggatagaaaatcaagagcaactaccagtgccgccgctgatccacagagcctctatgcaagaaagagaagagaaagaataaatgaaaggctgagaatactgcaaaatcttgtccccaacggaactaaggtggatatcagcaccatgcttgaagaagctgtccaatacgttaagtttttacagctccaaattaagcttctgagctctgaagatttgtggatgtatgctccaattgtttacaatggaataaacattggactagacctcggtatttctccaaccaaaggaagatcaatgtgatagcatagcaattaaagaggatataatatttcattaactta

SEQ ID NO: 100420 - DNA, 549 bp, Glycine max
  Clone ID: PAT_MRT3847_61694C.1
acaaaaaatttaaattatattattgaaatgaaaaaagataacattaataatatatttgaaggacaactaaaataacaacaacacactcaacattaaattaaaactgatcaaactaccaaagaaatacacactggtttatttttaactcaaaaaacccaaaaaatacacttgaagttaaaatgtattttaaaaaaaaaaagaaacttgctaaaccaacaaagggaaaacaaaaactcatattagaattatctattgggttattaattaattctaaaaaaacaaattattagggaatcaatcaaaccccacacataaaaagctacaccataagcagaatggattctacttgtcaaagaataaaaccgatatcaaataatggcggagaaagaaacaataataaactccaaaaaaggaaccaagcgaagaaagaccaccaggtaccgaaatgaattatgatgacggacgaacagaaaaaatgaaaacaaagaggaggccctgaaaacggatgtagaaaaaaaaagtgggagaaaaaaaacgagaggggaatgg

SEQ ID NO: 100421 - DNA, 416 bp, Glycine max
  Clone ID: PAT_MRT3847_61695C.1
tcggtgaaaaaattgaatatgcgtgaaatcgtccatattcaagctggccaatgcggaaaccaaattgggtcaaagttctgggaggttatttctgacgaacatggaattcaaccagacggaacttacaaaggcgaatccgaccttcaactcgagcgaatcaatgtctattacaatgaagcacatggtggcaaatacgtgccccgtgctgttcttgtcgatcttgagcctggcactatggattcaatccgagctggagcgtacggacaactctttcggccggacaatttcgtttttggacagagtggcgcgggaaacaattgggcaaaaggccattacacggagggtgctgagttggtggacaatgtgctggatgttgtgcggaaagaaacggaaggctgtgactgtctgcagggctt

SEQ ID NO: 100422 - DNA, 295 bp, Glycine max
  Clone ID: PAT_MRT3847_61696C.1
aaagaaacttaataagatgacctagaattctagagcaaaaaaattaaaacaacgtgtcagattatcatatctagcggtcaaaaaggccacccaaacttgaatggagttcaattcgggatacaccttaaacccaaacttggaacactaactagatactacttaatactttacacgagcaagggttttaatttgggaaccaagctttttctttgcaaacttcttagatttcaccctcaatatggccgaggtgcttctttctttcataacaccaaagggctcctctccttccttttct

SEQ ID NO: 100423 - DNA, 678 bp, Glycine max
  Clone ID: PAT_MRT3847_61697C.1
gaataataaaatcacaatgacattattataaaatgaagagtgtgcttataatattcgcactcaccaacatggccaatcccactcggcctaatctctcttcattacacattgatgttattttttttttctcttttcttcctttttgcttgttctaacccgaaagagaaatgtaacaaagcgaaaaatccacacaatcttaccaaatttcttctctaggaggaccctccctcattggactctcaatccgtacacttgcaacaatgttgttgtcaaggatgggccccatctcaagtcatctccatataaaaaaaaattaactttctaaaagatagcacaacatatataataaatcacacaaagtagtgattagagagagcttggttcttctgctctaaaattatgcaacacttcaagtgaaaaatcacttatagttccatatataagtaaaaaacaatcatgcaccttttatacgccaaatccgatctgactttcaaatttactttaccacaaacacatcacattacttggatttagtgtaacaaaaaacataattattctatttatatgaaccaacaaatgatttagcataccaaatattgcataactttatagtagaaattcactttttggacgtgttacccccaacacttcagtgttagtcctgtgatctcttttggg

SEQ ID NO: 100424 - DNA, 690 bp, Glycine max
  Clone ID: PAT_MRT3847_61698C.1
gggggccggcccttttttttgggtttcattaaacactctttatcatttattgaaataatagtaagagtacttactagcactcccctaaaacataacacaaggacaaacagtttgcaccaaactacgaatgaatagatttataagttacaactcagtatatgccatcttaaaattaattgaaattcataaatattagctgtattagaggaattcagtgatgtgatacttttcagcagcctcattggccttcttcccccgatgttgatctagttgtatactcgattgttgccccggaattaaactctggtaattgtgcactatcatcataatatgcaggttctaaaggtactgggagagtttgagaatggctattaaacacggttacaacgaaagccatggtgggtctggcagctacattttcttgaacacagagtaacccaatgtggatgcatctcactatttcattttgtgaaccattgatcaaggtggcatctacaatatttgcagctgttccttccctccagtttcgccatgcaatacttagtagatcctccttcttctctccgttccaaatgccactatttttctggccgcttataacctcaagaaccaatacgccaaaactaaaaacatctgacttctctgaaaactttccatttacatggcacctgagtatgtaaatctcgagcc

SEQ ID NO: 100425 - DNA, 239 bp, Glycine max
  unsure (1)..(239): unsure at all n locations
  Clone ID: PAT_MRT3847_61699C.1
aaganggttcagtaatcaaganccacaccctttgtggtggagaagaaacaaaaaatgatgaagcaaagttagcaagagaaaaaaagattgaaaaggttatggaggaagaagttgatccatcgataaagagggagaagcacaaganaagcggagtgacgaatgtgggctgcaaagacgattttcttgataacccaattacagatttgatcaagaaggaagtcgaagctggtgattccacc

SEQ ID NO: 100426 - DNA, 2719 bp, Glycine max
  unsure (1)..(2719): unsure at all n locations
  Clone ID: PAT_MRT3847_6169C.1
ccacgcgtccgtaacacgccaaagctcagacgtaaacgggagactagagaactctttcattcatcaccaatatccttcaattctcattcatttttcctttacttttcaagtttagttccaccaatctattggagatcatgggttatgagtatcttttgggagggattatagcttctagcttggtgcttgtgtttgttgtatatggttctgtctcaaagaagatgaccaaaggttcagtagtacatgcagaaagtaatggtggtagtattatacggacatcatcagaaaatagaaaccaccatcaagaaatctcagaaactacggacatcatcattgtcggtgctggggttgctggtgcagcccttgcttacacacttggcaaggaaggaaggcgagtgcatgttattgaaagggacttgactgaaccagacaggattgtgggggaattgctacaacctgnggggtatcttaagttaattgaattgggtctccaagattgtgtgggtgagattgatgctcagccagtctttggctatgctctttacaaggacgggaaaaatactaagctttcttaccccttggaaaattttgcctctgatgtttctggaagaagctttcacagccaggtgacatgtaaacaggaacaaagaggtgttccaagaaactaaaaaactagtactcaatcccatgatctgcaatcctagtttcaaagatttatcatttcaaatggatcatgtgaacaggataaaagaggtgttgccaagtaattttgcattttttgttcgttctgaacttttttggagcccagtttcaccgatcttctaggtgagtatgtattatcagtaaagtctatgaaagattatcgcttatagttttgattttttgtatgttgtgaacagttttggagcaaaggtaacagattcaagttcaatacatgtacagattcatgaatgtgtaaagatatcttcacagaaagccggaggatgaattgatggaggcaggatttgccttgttctttcacgagagtgggtgagttgctgtgatcgtttggctttagtgtcttcttttagttgggactttgaatcattgtacatgctaagcaagtctgtagcttcttctgtaaacaccctaggcgtccgggcaaaaataccaagctttcttatcctttggaaaaatttagctctgatatttctgggagaagctttcacaatggccgtttcatacagagaatgcgagaaaaggcttcgtctcttccaaatgtaaaattagaacaaggaactgtcacatctctacttgaagagaaaggaaccatcactggggtgcactacaaaatcaaaagtggtcaagagttcacagcaaaggctcccctcaccatagtatgtgatggttgtttttccaacttgaggcgttctctttgcaatcctaaggttgacgttccctctcattttgttggtctggtcttggagaattgtaatcttccatatgcaaatcatggtcacgtcatcttaggtgatccttcacccgttttgttttatcccatcagtagcactgagattcgctgtttggttgatgtgcccggccaaaaattaccttccctaggtggtggtgaaatggcctgttatttgaaaactgtggtggctcctcaggttcctccagagctgtatgattcttttatagcagctattgacaaaggaaacataagaaccatgccaaatagaagcatgcctgcctcaccttatcccacaccaggtgcacttctaatgggagacgccttcaatatgcgtcaccctttaactggaggaggaatgactgtggctttatctgacattgttgtgctaagggatttacttaaacctcttcatgatctgcatgatgcttctgctctttgcagataccttgaatcattctacaccctacgcaagccagtggcatctacaataaacacactagctggggcattgtacaaggtcttttgtgcatctcctgatccagctagaaaggaaatgcgccaagcatgtttcgattacttgagccttggaggtgttttctcagatggaccaatagctctactctctggtctaaatcctcgtccattgagtttggttctccatttcttcgcagtcgctatatacggtgttggccgcctgctcataccatttccttctccaaaacggatgtggattggagctagattgatttcaggtgcatcaggcatcattttccccattattaaggctgaaggggtgagacaaatgttcttcccagcaactgtgccagcatattacagaacccctcctgtccattgaacacacatgaaggaaatacatggaatatataaaattcccttttcccacattcttttcacctgttgtattccacttttgccaagaagaataagagagggaactcattccataattaggatactcattttgtgcaactgcaaccaatattatagtattaaaaaaacattttttaatttgggacccgagaaagaagttccaaaactaatcgtgcaattattcgagttaaaaaatgctaaggtttgtcttcaatgcaaattggtgttattatatggctactattatggtatattggtattgtatgcataatcacttagatgaggggcaaggtaagtacacagtgcagaaagaagttgttgtaatgtgacaattgaagcaacccccaaaaggaagatagtattgcatttgtcccttcc

SEQ ID NO: 100427 - DNA, 781 bp, Glycine max
  Clone ID: PAT_MRT3847_616C.1
cggccgctcgagccggcgggccgggttaagcgctggccagaaactgcaccaaatctgtctacagaaacattaattaggagaagcctgcgatggataacactactaccacccactcaacaagttccacctattcaattactctcctccttttgagggtcttaacctttatcttccttgttatggcgctcattttcatttctataaacaagctaacatttgatgaaattgatgcagaaatcaagtttcatgatgtctatgcttatcgatatatgctctctacgatagtcattgggtttgcgtataacctcttgcaaatgggcttttcaatcttcacagtggtctcaggaaagcgtgtattaagcagtaatggtggttatctatttgatttctttggtgacaagatcatagcataccttctgatttccggttcagctgctggacttggtttcaccgtagagctgctgcaacatattccctcagattccttcactcaaaaggcaaatgtttcggccagccttcttctagttgggtttttgttcactgccatagcatcaattttcacttcctttgctttgccaaagaaagatattaattaatgagttgtataattcattacaacaatttctacaacaatacccattttctctttctcattgttgtaaaaactgttgtacgaattatatttctcttaactaattagcttgatgcagaaataatgaacatggattatattatgatagtactttttgattcccttctctagttaatttgctttagtctc

SEQ ID NO: 100428 - DNA, 311 bp, Glycine max
  Clone ID: PAT_MRT3847_61700C.1
ccatactcaaacacgcatatactgtgcgaagagaatggaggatggaagtgagaactggaattgtcaagggcaacaagaagctgaatgcttcatccatgtgtgtgagaggcgtctataacatgttgatggagagagtcaacagtagcctaaacaagaaaccgttcgctgctctctgtcgcgtagatcccaccgagtacctattggttgggactacctcagaagctactgatgctgtgtaaactgctggtaactcctatagctataactggtacactcgcatcgttggattacctgatgcatagacggctatt

SEQ ID NO: 100429 - DNA, 530 bp, Glycine max
  unsure (1)..(530): unsure at all n locations
  Clone ID: PAT_MRT3847_61701C.1
aaaaaaatctttctctttttttttttttttttttttttttttgttttttttttttttttttttttttttttttttttttttttnnggggttgggggggtngttttttggggggtttggggggggtttttttgggttttttttaaggttgttatggggtgtgaaggggggaaaaattttttatatttttttaaaaaaaaagggataaaaaagggggggggggggggggggaaaagaccccccccgggctctccaaaattgaaaaacttgggatcccccaccacccggggaaaaaaaaaaaaaaacccccaaggggcccccactcccccctttaggggccccggggcacttgcctggtcctaaggggcccaaaagggccccttttcgggtggaacccccttcaagggcaccccagggaaccactttaacccaaggatcccccaggaccctgggcaaggggggggcgagggggggggaaaactcaaagcacacgaagcggaaggacaaaagggggacaacaaaaacggccaaa

SEQ ID NO: 100430 - DNA, 150 bp, Glycine max
  Clone ID: PAT_MRT3847_61702C.1
ggataaaggaaaacatcctgggcaaatgctttcccagttgtccgtttttgttaaatccaaaattttcacctttgactatgaaatacaaatgcccccgactgcccttgtaaataataactccgatcccgagggccaccacaataggatcag

SEQ ID NO: 100431 - DNA, 437 bp, Glycine max
  Clone ID: PAT_MRT3847_61703C.1
gggctcgagtgagagcggatggaatgacggttcacactaccagttacctttccaagtggaagaaaggaaagcttgttggtcggagaacattggggcatgtttacctgcgaatcaatagagttagaggccaagcgagtgcactgaatgaaggtaagagatgcctgtgatgacagctcataaatggagtgccgacgacaatttatggaggggatccatgagctcgatgcgcgtggacggtcatacatcgatgagtgcattgggagtgacgttgagcgcataaacactttgcgttcatttggaatacgtctttggtggttgtattcgtggcttacttgaggaatatggcgccttgacggaacctagtattcagggatataccaggcatacagggtgtgtgctgtactatattcatagcagaaatacagtacatagggata

SEQ ID NO: 100432 - DNA, 559 bp, Glycine max
  Clone ID: PAT_MRT3847_61704C.1
atttgttgaggaagtttggtcgtgtcatgtcctaggttgtcctatagttgttttgcaacaaaagctgaaaatgtaaaagtgttaattaaaaacctggattaaaaatgtgtttgggaatgtccaccagcttgtgctttaagctaccaatgaggtggacagtatccaacaacagattgtgaatgtgggatactcggatgcattatttaatcaagaagttctggcacaaaaggagctgcaaacagttttgcgttttcaggaatgcttatggcgagaaaaatcaagaatctaagggcatgctcaaggagagcagaatacttcttttttcataaaatagcactccatcattttgtatctaagggtctatcttagctacgtaaagggaattgattactagagtctcaagaggagttcgaagcagaggtgtgggatttctttcccaatatttatgcgggcagcgactcttgtatccctaacagctttgtagatatatcgtaccattccaagcttggtatcaggtgaagatgatgcttttttatccaacatccctttaaatgaggag

SEQ ID NO: 100433 - DNA, 473 bp, Glycine max
  Clone ID: PAT_MRT3847_61705C.1
aggaaatcctgtacgaagagacctggaagagcgacaaggagggaatgtgatcttaacggacatgaagaggagcagacctgtgcagatgagatcacagataaatactgcctacgaagagttggctccgctggttatagtcaaacctgaaggatgtcatacgattgcacacatccccacaaagcctttcctatctctatgctactgggttctacctgttattgatcagataggaccaaccatcgctgttgtgagacaagcacgctcccataatattaccaggttgggagtgatgcatgaattgcctccctcaatgaatacaaatttggttgaaatattgatatcacaatctcccagaggcaaagctaggaatacgcctagtcgtggttgagtctttctgtggctcactaggtccctggatttctcctcagcattgttacaatcactagaaagcgctcctcacaaggatttggagc

SEQ ID NO: 100434 - DNA, 330 bp, Glycine max
  Clone ID: PAT_MRT3847_61706C.1
cacgaatcataatataaaaagttttattaatattaatgtcttctaattcagtttagctaaaatgatctatgcggactctgcctcatgacacaattcgatcgtctcagtgtacgtagtacgtacacaaaagtatatacggcttcgtccaaactcgaatgtgagggagagaaagtagtttacaatgaaacaagcaacacagcaaaccttgcaccagggaattgaagtaacgaacagaaaacaaaaaatgtcactttgtcaaatgataaaccagaactataagggagagcatacaaccgcccaatcaagaagaactcatacatctctcaatct

SEQ ID NO: 100435 - DNA, 307 bp, Glycine max
  Clone ID: PAT_MRT3847_61707C.1
tgcttcttggcgtgatgggtgctccaatcgcccgtccacgtgtgcaccactgacccctttcctcacctcagcataaaagacatccccattattagtcccctcttgttgtttagagatcatatagagctaggttcagaaattgtttcatttctcttaattattaagttatgttgtctaagatcagtagatattatcattattatgtcatgttaagcattatgttagggaaaatgtgtgtgaatgagtattatcactttttttatcttgcaagagacttcttctgctcggtacatattgcagcattaca

SEQ ID NO: 100436 - DNA, 899 bp, Glycine max
  Clone ID: PAT_MRT3847_61708C.1
ctatttgcttcaatgggagataacaatgtcaaccttccacccgggtttcgattttatcccacagatgaagagcttgtggtccatttccttcacagaaaggcatctcttttaccttgccacccagatgtcatccctgatcttgaggtctacccatatgatccatgggaacttgatggtagagctttagcagaggggaaccaatggtactactacagcagaaggacacaaaatagggtcactggaaatgggtattggaaaccaacgggaatagaagaaccagtggtttcaagcacaagcaacaagagagttggcatgaagaaatattttgtgttccatgtgggagaagcccctgctgctggtatcaaaaccaattggataatgcaagaatatcgtctatcagattcttcttcctctaccagatcatccaaaagaaaatcacaaccaaaaatagtcagtatacatattttcatacataatcaggaagcacatcaaacatgaactcttcttatagtaagaaatgagaattaaaaatataaactattagctaatacataagtgattaaaattaaaaaaatacatataacttttttaaaatagctagtcgtgtgaacagttaccactgacgtatattcgagttggaaaactattgtacaacacattgatttgattgctgattttatttttccttttgtgtttgattcaggaatacaataaatgggtgatatgtcgtgtttatgagcgcaatggcgacgatgataatggaacagagctgtcgtgcttggatgaagtattcttgtcattggatgatgatcttgatgaaattagcttaccaaattattagctattaatgcaagtgatctagctagctagccgcagtatacaactggataattaattaa

SEQ ID NO: 100437 - DNA, 433 bp, Glycine max
  Clone ID: PAT_MRT3847_61709C.1
gtagaacatataatatatgctaattatataaaatgaagggagcaacccacataattatgaaaaactgaaacccaaaagaagaaaagtagacactagggcaattcgactagacaggcgattacaagcatatgtctatgtgaaatagggtatataagaggtcaccctttcatatattttgaagactttcacattgaactctccccatcatgttcaatagcagaggctgcttcatcttcttcttgcaagcaatcaatgccaaaagatccatggccaaagccaaaggccttgatgtgggctttcaaggaccttttgtggttgaaatcggacccacataaacagttccatatttggccacaggtcttctcatgtgtggcccaatgacctttcactgaaaatgctgtggcacattttctgcacatgtagggctttatgc

SEQ ID NO: 100438 - DNA, 664 bp, Glycine max
  Clone ID: PAT_MRT3847_6170C.1
ccctgttttaccggtccgaaatccccgggtcgacccacgcgtccgtagagctgtatgattcatttattgcagctgttgacaaaggaaacataagaaccatgccaaatagaagcatgcctgcctcaccttatcccacaccaggtgcccttctaatgggagatgccttcaatatgcgtcaccctttaaccggaggaggaatgactgtggctttatctgacattgttgtgctaagggacttacttaaaccccttcatgatctccatgatgcttctgctctttgcagataccttgaatcattctacaccctacgcaaggtaaacaataacttgagcttttgagatgaatgtttccttgtagtaacttagtgcaaatccttaaagccaaacaaaattacacataaacttagtgcaatgcatgattctatatgcagcctgtagcatctacaataaacacactagccggggcattgtacaaagttttttgtgcatctcctgatccagctagaaaggaaatgcgccaagcatgtttcgattacttgagccttggaggtgttttctcagatggaccaatagctctactctctggtctaaatcctcgtccattgagtttggttctccatttcttcgccgtcgctatatatggtgttggccgcttgctcatacca

SEQ ID NO: 100439 - DNA, 399 bp, Glycine max
  Clone ID: PAT_MRT3847_61710C.1
gataaaacaacacaaagggaaattaaatatttaaattaataaaattaatcatccgcgattctattttatgaatccctttttttttacaatacctaatcctaatcaccgaacttacacaatcagctagaatgggttataaagatatctatagatatatatagatttatttatctatcgatatctctaaaaaaaaaaaaactaaaataaacaaataacacctctcattttatttatactaaaggggaattatgagacaaaaaataaatccgcttggtttcaaactttgtacaactcaaactcatgattctatttagaatgctcaaccaacaaaatattccgacaatatacaaaaagataaaaaaatacgatattgtatcaaaaattatatacaaaaaaata

SEQ ID NO: 100440 - DNA, 548 bp, Glycine max
  Clone ID: PAT_MRT3847_61711C.1
ggcttctttttatctcttctttatggacattttctttgattcccagtcctcagactcgagactttgcttaagagggttgaatctagtatgactcatactttgctggtaactatccttattaaatggtttgtccttttttttgagagaaaaaaataaaagtacatggggggcaaagtagtatgatctttggcataataaataacgtcccaagataaccggggtgagctcaagaacaggagcagatgctcctcctcccccggtgcatatggcagcaacaccatacaaccctctcttctgtctcattacccctattaatgcgaccaatatgcgagctgcactgcaacccaagggatgccccgctgacacagttccaccatacacggtaactttttcaggattaagagcaaaaaactcctgatttgcaagatctcctgctgaaaaagcgtcattggtttcataagattcaatttgagaagcttaatgaccagcatctgatactatcctttggtattccaagggaaggagcagtggtaaataattcacgcgcc

SEQ ID NO: 100441 - DNA, 331 bp, Glycine max
  Clone ID: PAT_MRT3847_61712C.1
gggtaggtcggcgagcgcaaccctgatcttctgtgaagggtgtgacaagaatgctctactcgaccctctaagaagatccgggtacggcaagggagaaacccacactgaccagaaagatggagaactataacctagcggggggataacacaagaaactatggtggaggccctcaccgattctgacgtgctgattgtccgtccgacttgggtataggggacaaagactaaataaaccggctagtatattgtgtcctccccaatttctctcacgataattggagccctctgtcgatttttgtatgggcaagccaatgggtatgaggcatggggg

SEQ ID NO: 100442 - DNA, 409 bp, Glycine max
  Clone ID: PAT_MRT3847_61713C.1
aaaaactgattctcttgttcgtactttgctaactattataggacaatttttggccactagatatcgacatgtcaaatctggagccataacccaataatcctgttatgtccgaaaaatacttgtggttaccacttaattacatacggatagggtaattactatgacatccacccaaggatacgaacaaatgcataaaggtctttacaggtaaaaacggtatgactacgtattatgacggggactataaatattctctagaggaactcttgatttcctcgttcaaattcaacatcaccggaaggaccttgtataccttacaggggctagacttgttagcgtacttaaccatggacattcctaggggactggagtctctacggcttgagttttatcaaccaaccattgtttg

SEQ ID NO: 100443 - DNA, 1521 bp, Glycine max
  unsure (1)..(1521): unsure at all n locations
  Clone ID: PAT_MRT3847_61714C.1
atatgaactatgaagagtatgggcttgggaggctagaagaaactttgtatagcaaaaatgataaaaaacaatagctcacaagattggcctgagccaataatccgtgttcagtccttatccgaaaggtgcacagattcaatccctgagaggtatatcaaacccctcagtgagcgtccatctgatgatgttgttgctgttgatgatgatgatgatgtcaacatcccaatcattgaccttgcagggctttatggtggtgaccctgatgctcgagcctccacacttaagcaaatctcagaggcttgtaatgagtggggtttcttccaaatcgtgaaccatggtgttagccctgagctgatggacatggctagggaaacttggcgccagttctttcacatgcctttggaggtgaagcagcactatgcaaactcgcccaaaacctatgaagggtatggtagcaggcttgggattgagaaaggtgccattcttgactggagtgattactattatcttcattaccttcccttgtctttgaaggaccacaataaatggcccactcagcctccctcttgcagggaagtgtgtgatgagtatgggagagaggtggtgaagctatgtgggaggttgatgaaggttctgtccataaacctaggattggaagaggatgttctcgagaaagcttttggaggagaagatgttggagcatgcctgagagtgaatttttacccaaagtgtccaaggccagagttgacactgngtttgtcttctcactcagatccaggaggcatgacactcttactttcggatgaccaagtcccaggtcttcaagtccgaaaaggcaacaattggattacggtgaagccccttcgccatgcttttattgtcaatattggagaccaaattcaggttctaagcaatgcaaactacaagagtgtggagcacagggtgctagtaaattcaaacaaagagagagtttccctagctttcttctacaatcccaaaagtgacatacccatagagccagcaaaggagttggtaaagccagaccaacctgcactctacacgcccatgacctttgatgaatataggctcttcattagattgagaggaccatgcggaaaatctcacgtggaatcgttaaaatctccaagatgatccatatatcgtcatcattaattgcttgcaatattgtataattaattaataatgtaaatcctgtacctagatatgtacttctgtcttaacaatttgcctattagttaaacttaaacaacaaagcgagggaggataattcgataatatagatgtgaaattgatgtgaaaaactgtttatgttaatggatgaatttgggaggtccacaaagatcattcatatagctgtgtaataattagagatttgtgtccccacattcccaacagatgacggtgataagtgcaccataatcttaggggcaatatttgtatcatatagtaatagtatgtactgtattaattgtatgatgcaatgcttgacaagcctgcttc

SEQ ID NO: 100444 - DNA, 321 bp, Glycine max
  unsure (1)..(321): unsure at all n locations
  Clone ID: PAT_MRT3847_61715C.1
bcacccgnagtnagcngtgnnntcggcnccnggncggnncccnncgtagccgttctcngccccccggcgncacccgnccacgctctnccnccgcccccgancgntcaaccntcncctccntgccncnncctcccncacnncnncctgctngccgctctcngnnccncgccnccngtcatccgcntcncccnctncnncncncnctncncnccgngcnccnncgnncncncnngnnccnnccccnggtcntcgnnggtgccgnnnnnngcnnnnctccngntcnnngnncncnnnnnnnnnggntccnnngcncnnnnnnnc

SEQ ID NO: 100445 - DNA, 640 bp, Glycine max
  Clone ID: PAT_MRT3847_61716C.1
ggctcgaggttctaagcaatgcaaactacaagagtgtggagcacagggtgctagtaaattcaaacaaagagagagtttccctagccttcttctacaatcccaaaagtgacatacccattgaaccagtaaaggaattggtaaagccagacaaacctgcactctacacgcccatgacctttgatgaatacaggctcttcattagattgagaggaccatgcggaaaatctcatgtggaatcgttaaaatctccaagatgatcgatatatcgttatcaacaaggacattgcttgcaatattatataattaatagtattgtaaatcctgttcctagatatgtacttgtctgaacaaattgcctaatagttaaaccacaaaagcaattggataatatagatatgaaattgatgtggaaaaactgtttatgttaatggatgaatttgggaggtccgcaaagatcattcctatagctttgtaattattagagatttgtgtccccacattcccaacagatgacggtgataagtgcaccataatcttaggggcaatatttgtatcatatagtaatagtatgtactgtattaattgatgatgcaatgcttgacaagcctgcttcaaattcaatgcactatattaattattg

SEQ ID NO: 100446 - DNA, 648 bp, Glycine max
  unsure (1)..(648): unsure at all n locations
  Clone ID: PAT_MRT3847_61717C.1
caacaggtacttatttcctggtgcttcttttgacccattagatttcaattgagaaatgatttcaanatacatttgcacttttcgttgtgactaaatatttattaaaaatcgcagtatttttagagaccttcttacttaatgagtctttctcataattntatagcctttaatttttaataaatagtaacttttctttggtagaaattaaataaatgttaactaaaaataaaaataaaaacatattagaagaagtctattaaacaatgtgttgttaatagtccgatcctcttttcagttttactccactaccatgcatttccccttcttgtttgcatgttgaatgttatggagctatatcatattgatattattatttagtgtttttttcttggctgcaggttgcaccatacaagaaaataaggcgtgtagcatttgttgattcaataccgaagaatgccttaggaaagatactaaggaaggacttaaataaacttgctctctctaggctataatgcttcatttttattttattttcgttgggggtggtgtggaatcagttcggtatatttaaataatgagtgttgctaggtgcacctagcattattgttggtacacccagcattttataaaaatgacgaaattgcccta

SEQ ID NO: 100447 - DNA, 376 bp, Glycine max
  Clone ID: PAT_MRT3847_61718C.1
cttgagaaacgtgggggagctacttggcgttgcaataagaaagggttgggtgctaaccctcacaagttacaggaatttagtgcgattggtttgtatgaaaggtagagtccaattcacgctgagcttaaagaaccttatgcttgcactatgtccacttgattggcttatcatatataacattcttatgttctatcttttgtctgctggaaacagtttggatgttaataagatactaactgaaattgaagagaagaaagttgacttgatgaagttggtcataattttcttgtctatggtttcttgcattgtaaagatttgtctagttttctgcattatctaactaccatgatttcaaagggactcaaaccaagttacc

SEQ ID NO: 100448 - DNA, 597 bp, Glycine max
  unsure (1)..(597): unsure at all n locations
  Clone ID: PAT_MRT3847_61719C.1
gtgcgagaagacgacagaaggggggaggaaatagggagatggcaccacacgttttcatctcatctttctaacaaaatgggaaacacttaacaaaaagagggcaagctacatctataatgattgaagaggtgtatagatgaatgtttctgggtaagaggctagtaattggaagaatgtttctcaagttttggggcttcagccattccaagcacacaagttcctctcagagaaagtatccaacaataatagaagagctgtgtcatcaattttctctggccgatcttaggaaatcaacgaacaactttgatccaaagagacaaattgaccttagagcatttggtatcaaagtatacaaaggttgtcttcaacatgatgatggttctgattatacagtcgccgtaaagcgatttaatgtgaaagacagtcaagcacgggaagagttcaagaacgaaatagagttgctctgccagcttcatcaccctaattgtgtctctcttataggattctgcaaccacaaagatgagaagattattgtgtacgagtacatgtccaatggatctctatatgaacggctacaangtggggaactgtcatgga

SEQ ID NO: 100449 - DNA, 767 bp, Glycine max
  Clone ID: PAT_MRT3847_6171C.1
ccacgcgtccgattaagttgcacatttaagttaacacgccaaagctcagacgtaaacgggagactagagaactctttcattcatcaccaatatccttcaattctcattcatttttcctttacttttcaagtttagttccaccaatctattggagatcatgggttatgagtatcttttgggagggattatagcttctagcttggtgcttgtgtttgttgtatatggttctgtctcaaagaagatgaccaaaggttcagtagtacatgcagaaagtaatggtggtagtattatacggacatcatcagaaaatagaaaccaccatcaagaaatctcagaaactacggacatcatcattgtcggtgctggggttgctggtgcagcccttgcttacacacttggcaaggaaggaaggcgagtgcatgttattgaaagggacttgactgaaccagacaggattgtgggggaattgctacaacctgggggttatctcaagttaattgagttgggtctccaaggtaagcaagcaagaaacgtgtcacattttatgacacataagtagatggatggaagattgtgtgagaattgaagtaatcaatcttagattgtgtggatgagattgatgctcagcaagtctttggctatgctctttacaaggatgggaaaaatactaagctttcttaccccttggaaaaatttgcctctgatgtttctggaagaagctttcacaatggccgtttcatacagaggatgcgagaaaaagcttcatc

SEQ ID NO: 100450 - DNA, 618 bp, Glycine max
  Clone ID: PAT_MRT3847_61720C.1
agaatggctaccatgggtttaaccttactggctgggttaatatgcgtctgatcactggcactgcgtccttctgttgctgaggaagggcaaaataatggccttgatatgaactactacctggaatcatgccctcaggctgaacacatcctcacagaacacgtccagcttctatacaggcgccacaagaacactgctttctgctgcctcaggaacatcttacatgactgtgctgttcacagtagagacgcttaactgttgctggactccacaagaaggagcttgtctgaaagcgaaacagatagaagctctgggatgagatatttcaggttcatagataccatcaaagaagcttaggatagagaaagccctggagttgtttcatgtgctgaaatcctcggtctctctgccagagatggcattgcttcgctaggaggtccccatatccctctcacgactggaagaagggatggtagaaggagcagagctgatgtgggtgagcagttcctaccagaccacattgagtacatatctgcagctcttgacacagtttggtgccatggcaattgacacccctggcgtcgatgcactgcttggagcacacaatgttggtcgaaccca

SEQ ID NO: 100451 - DNA, 777 bp, Glycine max
  Clone ID: PAT_MRT3847_61721C.1
aggtccggtgacctgggtgattcctaccaacacctcgcttcctttttcttctcttcgaagtgaatcaatagtagtaattttagttaattaagatgaacctgaacacgagcagtaacttggagactcggtcactgcttgatgagctttgtaacttccacaagaagggactcttcgaccttggacatcctcttcttaatcgcatccttgagaccttcgtcaaagctgctggaattggagcagttcaagctgtgtcccgtgaggcttatttcacagccattgaaggtaccgggactgacaatagtggaggtttgccaccagaaatttcaagtgccaagaaaaatcgtttgccaagtcttaaaggagagaccaataacaaatctcttgaggccatggtgaagaacacgggcaaagagtccttacaatggggagtggcagcaggattgtatgcaggtctcacatatggactaaaggaagctcgtggagctcatgactggaaaaacagtgcagttgcaggagcaatcactggggcaaccctggcacttacattggaagattccactcacgaacagattgtgcaatgtgctatcactggagctgctatctccactgccgcaaatcttctcactggaattttctaaatggatgccctgttcttattggctttagttataaatggatgccctcttctgaactgtgacagttatttatagatatttaagatgttgaatttttagtcatcagtgattagtttctaaaaaaaaaaaaaaaaaaacaaag

SEQ ID NO: 100452 - DNA, 540 bp, Glycine max
  Clone ID: PAT_MRT3847_61722C.1
cagaattacgccttgcaataacaatgccttttatattagagacccgcgtgttattctcaggtgcttccactttgagctgcactgcttaacaggggctcttcccctaatgtctttcactgggtactaggttttcgcctaaagggctcaattttccatgggtttgacccgcctccccttctcgttctgcgctgccttgtgagactttgctagtttgccaactgctgtccgtcctgctttattggtgcgtatgtgtctcttggtccgttactcaaagggcaccctctttggccctcaacattgctttaagtggccccgggtctcttctcaccccttgttgggggttgcaaagtttagggagagctggtctacatccatgcttactttgccaaatatggaggggatcctacacgcgagatgaactttcttggggtgggctctttttttggggtgggcttccttttaaaaggtgccccctgggtcccttccaagcctattgtgcccatcttcaaaagcgaaaagtctgttggtttgtgccccacc

SEQ ID NO: 100453 - DNA, 651 bp, Glycine max
  Clone ID: PAT_MRT3847_61723C.1
ccacgcgttcgggattttcatttttcactacatgcaatcttctcaactcagcaggttcctttcttctacttcaggttcttgagatataggagcggttcaagctgtgtcccgtgaggcttatttcacagccattgacggtaccggggctgataatagtggaggtttgccaccagaaatttcaagcgccaagaaaaatcgtttgccaggtcttaaaggagagaccagtaacaaatctcttgaggccatggtgaagagcacgggcaaagagtccttacagtggggagtggctgcaggattgtattcaggtctcacatatgggctaaaggaagctcgtggagctcatgactggaaaaacagtgcagttgctggagcaatcactggggcgacccttgcacttacattggaagactccactcatgagcagattgtgcaatgtgccatcactggagcagctatctccactgctgcaaatcttctcactggaattttctaaatggatgccctgttcttattggcttttagtgacctttttctcttttgaactgtgacagttatttatagatatttaagatggacttgcaagcatttccttttggatttttagtcatcagtgatgagtttcttgtcaaaggattttgagttctttttttt

SEQ ID NO: 100454 - DNA, 433 bp, Glycine max
  unsure (1)..(433): unsure at all n locations
  Clone ID: PAT_MRT3847_61724C.1
gtttttctcagtctgcactttatatgagaacatattttgatggtatagaacatatgaaaagacttaacaccatctgttaaaataatgactcaatgccgacttcgacttacgaggatagtttcagtgacaaaaaataagaagaaaaaaatatatcattgtttgtaatataatgttaacctcccaccattttctggcccccagtgtgcttttcaagtcaaacaagaaaaatgtatatattttatttgaagttttttgttgcttccatttgttctggagaataaagaaaacaagtagtccaacaaatagcacgaggtcaaacaagaatgcgctttgtgggggcgaccaanatctgaacttctattatttctagtttgctaattgtatgtcaagtactttcattcttttctctctgggtataagaatttaatacata

SEQ ID NO: 100455 - DNA, 555 bp, Glycine max
  unsure (1)..(555): unsure at all n locations
  Clone ID: PAT_MRT3847_61725C.1
attcgagctctttacccggggatcctctagagtcgacctgcagaaacttaaaatttcttaaagnaacatgtatttgcaccaatcatatgaaactgaattataataaagacttaaatcagacatatcaaggaaaaaaaaaaaattagtagtacctgctgtgcacgtttgtaatatgcatcatagtaaccagctgaaagggcatatgttcccatcaaaattctcattttaacctgagacatatttaaaattgaaagctagcttaaaaaccaatattgacgcataaggaccatttcttttaaacatgtatatgctaccataggagtgttcacagtgcggtttagtgcagtttttacttaaaattagtttgaaccaaacaaaagaattaagtgcggtgtagtttggttccgtttaaattatttataaaattcaaactaaaccaaaccaatattttggcggtttggtttgattcggtttttgcagtttgaaaattctgctagtaagtaataaaaaaatgcttaaaaagtttgttattaattggacaaaacttaaaataaa

SEQ ID NO: 100456 - DNA, 755 bp, Glycine max
  unsure (1)..(755): unsure at all n locations
  Clone ID: PAT_MRT3847_61726C.1
ggatgtaaaaaatgaaaaagaaactgaacaaacacaagaaaaacaacacatttacagaatatgattatatgccaatgtgcagtttgtaccgttcagaatggccaggaaccaagcaactgcacaaacaccatgcattctagaaagaccttttttatctttacaaatgaatgatgttatcaatacagcttgattacttcaattagaaactcaacaccagaaaaatgaaatggaaaagaaagctgttaaagtcatgttttggctcctcaaaatgaaggaatgcctattcttcatatacccaaatatgccaccaatcaagtctcaagatttatagaagatatagagcagccagcccaacctataccaacaagaccaatcacgatatgctcgtttcatggaatgcactaaccattccccaaaccaattgttcaaggaatacaaatgcatgagcatcagagattaaatattgactttccacccaaaagtccaagcattgcaatgagaaacacgttaagatgaagagttttcatttctgaaattgtacccagtttaaaagcctagcccgttccatcgatttcctttccatgatcatcttcgtgaatatttcgcctcaaccttctcagccatatgtcatagtcaatgggatatggtgtcccacagagactgtcaacataatcagcaaaagctttcagcacagtggagatatcaccgagcttctgctgaattnntctcntngannannnnnnnncncnnnactg

SEQ ID NO: 100457 - DNA, 423 bp, Glycine max
  Clone ID: PAT_MRT3847_61727C.1
cccgaaccccatcgcctcctcgccgagctccattccacaacgacgccgtttgaaagttccacttccaccaccaattacaacgccttcgacatcaacaccatcttggtcgacgaaacagaagacgagaaccgcgagaaagttaacccacacgaggcgtatcgtctcggccccaaaatatcgatctgggacgaacagagatctcgctggcttcgcgagaatcccaatttctcgaatttccttcgacccaacaagccccgcgtgcttctcgtaactgggtcgtcgccgaaaccgtgcgaaaatcccgttggggatcattacttgttaaaggctattaagaacaaaattgattattgtcgtttgcatgggattgaggtgttctacaacatggctctcctcgacgctgaaatggcagggttttgggcg

SEQ ID NO: 100458 - DNA, 263 bp, Glycine max
  Clone ID: PAT_MRT3847_61728C.1
ccctcgcacaggcttcaggcgagtttgctgtaatttgaatccccggtattggcggcaatggtagctatttgtagcccccaaaattctgcacctgtcaaacaatacccccattaatcctcttatctttttcggggctatttccataaaaacacccgccatgctctttttagatggattgtcactctggagacttcatacatatacgattttgctggtgtttattcccggatatacaacattgtagactactggatcaccctcta

SEQ ID NO: 100459 - DNA, 198 bp, Glycine max
  Clone ID: PAT_MRT3847_61729C.1
ccacgcgtccgcactcaccccaacttgttctcttgtccatccttagggttttctctgctgcttcgattttctgtgtttcacacttaccatcatgcatatgcactttttgaattagggctgctccctgcagagctttggcttttgcctacgaccctttgtgggagcttgcctttgcggtttattggggagtggcacttt

SEQ ID NO: 100460 - DNA, 390 bp, Glycine max
  Clone ID: PAT_MRT3847_6172C.1
gttttgttgttggtatgggcatgggaggctatggaggaggcatgaatgcatcaatgggtatgggaatgggggggatggggggaatgggtatgtgacatcggagtcccgatgcaaccgcgaactggaccgccaaccggctccaacatgccagggggttataataactccatgacgggatcaggccgccaaggtgagcatcctcatcgttgaaaaggtcagccaccaccaagacgctaccgatcagtaaccacactatgcctagatggcacggagaacgacaatactgcttaccacgctacaagtggatatcaagaaaaggcaccaccgtacttctaaagcaagtgtgtaactgtactacatagacaggtcttattaaacctgcagattact

SEQ ID NO: 100461 - DNA, 469 bp, Glycine max
  Clone ID: PAT_MRT3847_61730C.1
aagctaccgacacggcaaccatcaaaacttgaacaatactgttttcttccattccagatccccatcaaaaaggagaaagagaattgatatcagtgactgaaggaaaatgaagcagaacatgatggctcttttgattggattaattggtgcagccctcactttatttgcttactcacaaaccttcgtatcaccaggtcaatgcatcacacttggtcttattgtcctcatgttgggcttgcttgtaggagaaggtctgatatctttctaatttcttcttgtttttcttttccctttcagtctttccctcatctatgtatatcccttgtgtatgtgcaataataagtctttgattaagaactttttctactctttttgttttatccatattttgattgcaaattgaatcttagtctatgaagggttgaaggaacaataaaaaaatttctcaggcaacaatatttttttcttt

SEQ ID NO: 100462 - DNA, 251 bp, Glycine max
  unsure (1)..(251): unsure at all n locations
  Clone ID: PAT_MRT3847_61731C.1
atgggttgtgtaattgcgcctctcaaattctggatgtgttggactgcccttgatattggctcacctgatggcccttancaagcaccacacgctgttaaattcatggaaattgtcatacatggcgtacagggattctcagagcttccgaagtactgcctgcaaaggtgtggtggtttcgttttggcacccatagttatcagccttctaacggatgtcactcctaagaaattctcacagtatatagctaaccc

SEQ ID NO: 100463 - DNA, 272 bp, Glycine max
  Clone ID: PAT_MRT3847_61732C.1
gaagctggaccccatgcgcgaacgcgttacggcactttgcgggttgcacccaagcgttgcgtgaccactgcggatacggtgcgtaagggaccatgattcaaattcttctcgagtgaagctgatgggtgaccatgattagttctggggtctagacgaccttggcatagatcatgcgtccttgttgtgccatgaatctctctgcggaggaattcatgatgaatgatgacctgttggctgggctacggtcgctgagagaacaactgagctgggat

SEQ ID NO: 100464 - DNA, 288 bp, Glycine max
  Clone ID: PAT_MRT3847_61733C.1
gtatgaacaagatggaaagccactacctaagttcggggaatgggatgtgaatgatcctgcctcagctgaaggattcactgttatattcaacaaggccagagatgagaaaaaaactggcagaggaggatcagggcgcgctacatcacagcgaagaaataattcgtgcaaagatgatgatagacccttgtagggacttattaatactatagagttatatgctatttaatatgagaaacaatggtataaatttctcaccaatggatgtacaatgtgttcattggacatttg

SEQ ID NO: 100465 - DNA, 146 bp, Glycine max
  Clone ID: PAT_MRT3847_61734C.1
ctggcaattcggctcgaggaagcattgaataagcggttagggactgttggtttgtatttgcatgatattttagtagaggctgacatgggtgtgataccttccgatgaattactcaccattccagaacatgatgaatgggtatacag

SEQ ID NO: 100466 - DNA, 597 bp, Glycine max
  Clone ID: PAT_MRT3847_61735C.1
cggaaatccgcctggagctcttctctttccgagtttataaacttaacctaaacccaacgtttttgtttcgtccccctaattatcatcgtctcgcgaaccaccgcgtcaatgtcggccagtggtggcgccgccatctccggcggaagccgcaaccgcaatcggcatctcggtgagaaccgcttctacagcccgccgccgctgaggaaacacaaagagaagcaggagcagcagcggtcgtcactgtcgagagcttcctcggagaacaggcctggttcctcttccgattgttcgatttcttcgcgcgccacatcggacatgtccaatttggatcgattgttggagcacatcacgccccttgttcccgcccaatattttcccaagacgaactcgaggaggtggaaatcgagggaagcggaattgcatccttactttgtgcttggggacttgtgggagtcttttaaggaatggagtgcttatggggcaagtgttcctatagtgttgcatgggaatgaatcctggactcaatattataacgtcttcttgtctgccattcagctatatatcgatccgtacaagcccttcacacgacttaggaaa

SEQ ID NO: 100467 - DNA, 349 bp, Glycine max
  Clone ID: PAT_MRT3847_61736C.1
actgctgcgagaagactacagatgggatgttctcaaacagcctgttgatgttattacttgcctgcgatcagtgcactcccaagccctgaaggaaacaactctaacaaacaaacacaacaatgtaagcttctctttcacaagtactgattgaaggaaacaactctaacaacttacacaaaacaagcacatcattccctcttcatgacaaaaaaattacaacttggacaatcactaccattttatgagcaattcaccaacttcttatctttgaatggaatttttttaaaactaagattcaaatccaaatacctaaattcagtaaggtatcaattctttaaaaatgaaatta

SEQ ID NO: 100468 - DNA, 1039 bp, Glycine max
  Clone ID: PAT_MRT3847_61737C.1
atccattccaccaaagttgaaagcaaatcatacctgggcgaagcatcatggtggtgaaggcagagaaagccatgtcagtgagggaggaaagtggtgattcaagaggaacaattgatcccttgaagctgcactttgtgctggtgcatggcgttggtggaggaggttggtgctggtacaaaatcaggtgcctaatggagaactctggcttcaaggtctcatgcatagacctcaagagtgcaggaattgatcaatctgatgttgattctgttctttctttcgatgactacaatcaacccctcatggatttgttgtctgctttgcctgaaaatgaacaggtgatattggtggggcacagtgcaggagggttgagtgttacccaggcttgtcacaagttcgccaagaagattcgtttagcagtgtatgtggcagcaactatgctcaagttgggattcttgacagatgaagatctaaaacatggtgtacctgacctatccgagtttggagatgtataccggctaggatttggattgggacaggataagcctccaaccagtgctttggtgaagaaagagtttcaacgcaaaatcatctatcctttaagcccacatgaggattcaaccttagctgccatgctgctgaggccagggccaattctagcattgacaagtgcaatgttcgtagaggatggtgaagtggaagaggtgccgagggtgtacataaggacaaggcaggacaaggtggtgaagccagagcaacaggaagccatgataaagaggtggccaccatctacttcgtatgaacttgacagcgaccatagccctttcttctccaccccattcctccttttgggcttgcttttcaaagctgcagctttggatgttggattgaatgcaattaactagttgaggacatggggcctccatgcatatgtttttttttttttgggttaattaagtttttagttctcagagaaattttgaatttttggttcttaaattatatatatatttttaaattaatccttaaagaatttgtcccc

SEQ ID NO: 100469 - DNA, 408 bp, Glycine max
  Clone ID: PAT_MRT3847_61738C.1
aattggttgttacattctaatatagcaactattggcaataccagggcaaaatactgatgctggggtgggagattcatcaggtaaatgaaacaattttcctgtaacattctaaagagattatgggccagacgacctccaataattgcatcaacttacttatttctataagtaaaagaacacaaatggcgagctcctttacgtctgccaaccaattaatgaatgggggtatgttcaatatcgagctttcttacactcgcctctggaaaagcaagagatgctggacgcctcactctaaaaaaaaacttaacgtgacctatatagataggtattaacactgttggccatccttcggcttcttgggacgaatggctcctccaggcattcttgcacgtgcctctgaacacattc

SEQ ID NO: 100470 - DNA, 438 bp, Glycine max
  unsure (1)..(438): unsure at all n locations
  Clone ID: PAT_MRT3847_61739C.1
taccgcccctgcaggntaccccggtgccggnnaattcccggngtcgacccacgccgtccgaaaaaaaaaaaaaaaaaaaaaaaaaaaaaaaaaaaaaaaaaaaaaaaggaaaaaaaaataaaaaagaaaaaaaaaaaaaaaaagcaaaaaaaaaaaaaaaaaaaaaaataaaaaaaaaaaaaaaaaaggggggggcgctttttaggggatccaaccttccgtccccgggaaagccctgtcttatcttttttttggggcccccaaaatcaattcccttgccccggttttcaaaatagggaaaagggaaaacccgtggggtctcccaattaattggccttgctgaaattccccttttccccactttggaaaatagcaaaaagcccggcccctgtcccctttccacacagtgggcccgcttgattggcaaggggccccccc

SEQ ID NO: 100471 - DNA, 323 bp, Glycine max
  Clone ID: PAT_MRT3847_6173C.1
actcattcgagacgctactcctagttccttcatctgctcgctggcaacatcagacagactaccattagccgagttcttcacatgggattctcgagaatcatcgatgggaattgaaagaggaggcttcacgggattcacgatcgcctggagcgagtcgctcattcagcgcgattactgcaagccggcctcggcggcgctgttatgccgacccgattacacgtgtctctgcatcagctgtgattccaacactgactgctcgatcaaactctcgttgcaccacaagcacctgtagatgtgtgaggagttcaagctggcacccgctg

SEQ ID NO: 100472 - DNA, 500 bp, Glycine max
  Clone ID: PAT_MRT3847_61740C.1
cccacgcgtccgaaaaaaatttaaaaaaaaaaaaaaaaaaaaaaaaaaaaaaaaaaaaaaaaaaaaaaaaaaatataaaaaaaaaaaaaaaaaaaaaaaaaaaaaaaaaggggggccgtttttaagataccaggcttaccaacccatgcttgcgaacgttatagtttttttatagggtcaccaaaatcaacttcattgcccgaagttttacaacttggggactggaaaaattttggcgttaccaaatttaatggcttggccccacatcctctttttttcaattagattaatacccaaaaggccggaacgaatagcctttctaaagatttgttaaacgtgaatggctattgggatcccccttttatgggcgctttaattgcggggggtgtaggggttacgcccagggtgctctttacttttgtcacggccttatcgccggtttttttagttttattcctttatttgggggccactttagggagtttttcctattgaagttt

SEQ ID NO: 100473 - DNA, 410 bp, Glycine max
  Clone ID: PAT_MRT3847_61741C.1
aagatggagtatcaacgattgtttttgtcatccattaacttttgttctagtaaatcataaccctcatgagacaacacatgaggggcaatgtttagtttctggatggcgtaagactcctttctagcatcctatcataattagacagaaacttgtcaacaaaatgtgcttgaaaataatgcataactgtcaaattcataaacaatgcaagtcaattaacctcccttgagtggtttctacgactctgacaaaaatgttgccccttttctttgctaatatcatacttctcatagacagtgtcatcctcctcctcattgccttgagccagagcccagttggaggttaaatctgacttaaactgccttcatcgctatcctaccatcttcaagatttccttattcgcctttggttgg

SEQ ID NO: 100474 - DNA, 507 bp, Glycine max
  Clone ID: PAT_MRT3847_61742C.1
gccggcctctaacctagggggccattttttttgtcttgtacacattttaccctgattctgattattccccaatttaatcagaaccacccataaaaatatacacattttttgtttaattttggatgccgataaaaaatgccgccgaagcaaaaacaaaaaaaagctgatttagcgaaggaggcggaggattgtaaaggacaaaaccttgggtctcaaaaacaggaacaatgagcaaaaatgtgcagaagtatgtacagaacctcaagcaatccgtgcagcccaggcccaatgccgccaaagtcaatgccaagaaaaagaaggaggaagataaggccaattttaaggagctgaatgaattgttcaaaatcgctgatactcaaaccaaagtgccagaaggcgttgaccccaagtccatattatgtgagtttattaaaggggggcagtgggccaagggcttcaaatgcaagctctcgcatgatttgaatcgtcataggaaaggggagaaga

SEQ ID NO: 100475 - DNA, 474 bp, Glycine max
  Clone ID: PAT_MRT3847_61743C.1
ctaaaacatcaagcttctatgcccctttgtatgttggacctgggtttcattgagctgtccaagtattgttcgtccaagtgctgagaactaattcccttatcactgctagaacctgtgtcaccttgaggcccactcaacaacgagtaaaggaattggcaaaatttggaaagtcacacaatgattcccatcaccttagtcttaactcagctcgctattctctccattcaataatcaatacgccataaatgcacaatttgtataaaaccaaagaggctgggcaaggaaggcatattcaccttttggtctctcaggctaggctggtattgattcattcccaccccttgtctatgctagctcagccttctggagtcatacatgaacaatatgtactgtagcattttggggccagccactacacacttgactccactatttgagattgatagctatgcttaaagtcatgaaaattcctta

SEQ ID NO: 100476 - DNA, 1233 bp, Glycine max
  unsure (1)..(1233): unsure at all n locations
  Clone ID: PAT_MRT3847_61744C.1
gccacttttcgctgagttgcgtcgtctctctaacaaaacaaacaaacaaaaaaaatgatttctgcgatttcgtgggtgcccaaaggggtttcgaagtcggaacttgtcgtggctgaacctcctcccgaagaggaaattcaagagataatatcattattccagcatttccactctgcacagcttggctcgattgcccccttaaaggaggagaaagagggaacttcatagctgttggttcaatggaaccatccatagaaatttgggaccttgatgttattgatgaggtgcagccatgtgtggttttgggtggatttgaagagagaaagaaaaagggaaaaaagaaatcaatcaaatacaaagatgacagccacactgactcagtacttggtcttgcttggaacaaggagtacaggaacatactagcaagtgccagtgctgataagcaagtgaagatttgggatgtggttgctgggaagtgtgatattacaatggagcatcactcggacaaggttcaagcagttgcttggaatcatcatgcaccacaggttcttcttagtggttcatttgatcatactgtcgtcttgagggatggaaggatgccatcacattctggctancagtggtcagtcacagctgatgtagagagcttggcatgggatccgcacactgagcactcttttgtggtgagtcttgaagatggtattgtcaagggttttgatatacggactgccaactctgattcctcgtcagatccgagttctacttttacacttcatgcacatgacaaagctgttacctcagtatcctataatccatcggcacccaatcttcttgccactggatccatggacaaaacggtaaaactctgggatttgtcgaacaaccaaccctcttgtgtagcatctaaatctccgagagcaggggctatctttaaaatttctttctctgaggacaaccccttcttgttggctataggaggctcaaagggtaaattgcaagtatgggacaccttatctgattctggcatctctagaagatacgggaactacaacaagaatagatcgcaatctgggtcttgatataattgagttgtgctgctgaagttgtgttgcacaaatcaaaattttgggattcactgcaaaaatgtttttttattttttttgttgcatcctaataacctaatttgaaatacagatctgaatggattgaacataaattgttttatgtgattcc

SEQ ID NO: 100477 - DNA, 1890 bp, Glycine max
  Clone ID: PAT_MRT3847_61745C.1
gtccggacccacgcgtcgacccacgcgtccgctctgcttgctgctgctgccacttttcgctgagttgcgtcgtctctctaacaaaacaaacaaacaaaaaaaatgatttctgcgatttcgtgggtgcccaaaggggtttcgaagtcggaacctgtcgtggctgaacctcctcccgaagaggaaattcaagagataatcgccaaccacgcaaccaaaagtggagacagtgacaatgaagacgctaacaacgatgacgttgtggcacaagcattaaacgtagcagacgcagttggcaaggcctccactggaacctgtgacgaaataacccttgcgttgaaggaccttgacatggacctttatgatgacgaagatgaaggaattgaggtgttcagttctggaattggcgatctttattatcccagtaacgacatggatccctatatcaaagataaaaacgatgatgattctgaagaactcgaagacatgatcattaacccaactgattctgtcgttgtttatgcatgtactgaggatgaagtcagttatcttgaggtttgggttatcgaggatgccgattctagtgaaatgaacatgtatcctcaccataatatcattattccagcatttccactctgcacagcttggctcgattgcccccttaaaggaggagaaagagggaacttcatagctgttggttcaatggaaccttccatagaaatttgggaccttgatgttattgatgaggtgcagccatgtgtggttttgggtggatttgaagagaaaaagaaaaaggggaaaaagaaatcaatcaaatacaaagatgacagtcacactgactcagtacttggtcttgcttggaacaaggagtacaggaatatactagcaagtgccggtgctgacaagcgagtgaagatttgggatgtggttgccgggaagtgtgatattacaatggagcatcactcggacaaggttcaagcagttgcttggaatcatcatgcaccacaggttcttcttagtggttcatttgatcatactgttgtcttgaaggatggaaggatgccatcacattctggctataagtggtcagtcacagctgatgtagagagcttggcatgggatctacatactgagcactcgtttgtggtgagtcttgaagatggtattgtcaagggttttgatattcggactgccaactctgattcctcatcagatctgagttctacatttacacttcatgcacatgacaaagctgttacctcagtatcctataatccatcggcacccaatctccttgccactggatccatggacaaaacggtaaaactttgggatttgtcgaacaaccaaccctcttgtgtagcatctaaatctccgagagcaggggttatctttaaaatttctttctcagaggacaaccccttcttgttggctataggaggctcaaagggaaaattgcaagtttgggataccttatctgatgctggcatttctcgaagatatgggaattacaagaatagatcgcaatctgggtcttgaagttgtagtcttccttcccgtactgctcaagttgtgttgcataaatcaaaattttgggattcactgcaaaaatatgttcttgatttattctttttttgcatcctaataacctttatttgaaatagcataaatttgaattggttgaacgtaaattgttgtgattccaatttccaacactttatagtttagtttggacatcttttgggggggcaaggcccaatgaaaactacaaagacatgctccctctgttttatgttatttgccgtttaagataatgtatatatccatggtcttaacacttcattttgattcctgaatgtaattttgaatttttaaaaaaaaaaaaggaaaaag

SEQ ID NO: 100478 - DNA, 355 bp, Glycine max
  Clone ID: PAT_MRT3847_61746C.1
acgcatttgagaatttatcctcaatataacgaggtcgaggggcagaaggaggcataagaggctcaacgggctctagataaagagtgtactgctagaggttccatgttggatctttaactctgtcaatctaaaatttgtctttccaaaaacacagattggcggaaccatattgggtacagaactaaggaccaattttttgacagaggataatttgtgagcaagcggtcgatttgcatcgcacatcatcgtataaaaggaatgattaaaatggtggccacagttggtactcctgagaacacatgtatagcattggctctgtgctatgaaaaggtacttttagggggccgtaccaccc

SEQ ID NO: 100479 - DNA, 177 bp, Glycine max
  Clone ID: PAT_MRT3847_61747C.1
ttcacgatgaaataaatgggcatatcattcaaagattagtcggtgatgatgttaattttgggcatgatgttgctagggataaggtgaaagtagtaaatgcaatattgtcataattgtactggtgctatcacatcaatgtagtgtgggaaataacgttgcttaattattgagatgaac

SEQ ID NO: 100480 - DNA, 734 bp, Glycine max
  Clone ID: PAT_MRT3847_61748C.1
ccggtccggaatcccgggtcgacccacgcgtccggagttttgattctgaatggagtcttcttctgctcagaaactgtgtttacatttaatatcttcatcgtatcagagatgccgattatcggagcagatttgcagactcgctgttattctcactcgctcttcatcttcgcacccttctcttcgaatctcaagcatttaggagctgcctagaggaatttcgggacttgaggttttcttccacggatgttgcagacaattgggatggaatgcttcctctcaaaaccaccagtaagtgtaataatgttctcatgttagttgggctttgatctcattgtgcatatagatatcccacatgcacaaagtagaaaagagataacaattcttgtagccgcgtcaactctattgctcttgcattgatgtgggaggtaatatgccaggccagccattttgcctaaggaaaatggttttaatctctctcttcatattatttcaatagtaggtataggtacttttgatatgaagtcatttttcaccagccatgtggaaatttgtcaagttttatgtttccttggtgcccgtgtaattatactatgtcactgttcaagagtgaagcaggttttcaactgtatattatattaccacgtttagtttagttactgtcatgattcttattgcagtctatggacattgtaggcatcagcgataccgagatacataattatcagataaacctg

SEQ ID NO: 100481 - DNA, 460 bp, Glycine max
  Clone ID: PAT_MRT3847_61749C.1
accatgttttgtttgccgggaacaaggagtccagagtggtttgagcaacaaagtataggtccatcattatctttctggtttcgtaacaagttccctgtcatggatctctgttttgttattggaccaatgggtaaggactctattttgtttagacccatcatgaccatcaatggcaacacaatggagacacagttaactgaaaagaggtgttgtttagacttccgagcattagattatcatatacttatcattggtacaaaatacatgaagttcggagagtgtctagataaacctctcacaaaaaatgaatggaatcatgtggtggtttccattggtattgaaccaacccctaaggatgtgattgtcaagcaaactggactccatgtaatcaaaccagaaagtagcatggatgatgtccaattcaccaatccttataagcaaccatcctttaaagagaagc

SEQ ID NO: 100482 - DNA, 280 bp, Glycine max
  unsure (1)..(280): unsure at all n locations
  Clone ID: PAT_MRT3847_6174C.1
gncttggcaatttgacatcacttcactctcttgatctctgctttaacttcttaagtgggaacccggcaccttttattgggcaccttgtctctatcgagaatctttgcatatctttcaatgaatttgagggcatattctcattaagcatttttagcaaccattcaaggctcaagagtttgctaattggcaatatgaaagttgacactgaaaatccgccttggatcgcaccatttcagttggagcaactagcaattacctcttgcaagttaaacttacccac

SEQ ID NO: 100483 - DNA, 359 bp, Glycine max
  Clone ID: PAT_MRT3847_61750C.1
caacctccatggctgatgccaccaagtatgttcccatcgctggtaccaacgggtcttccgttctcaaaaccagaaaaacggtggctgctgcatactctttcatactcgccttcgtcgctttcactgttttcttagccttttccccttcttcaaacgcttcttcaccttggttcaccaacatattctctcccacatccaccaccgacggctcctacaagcctcaaattcctaacattttctctctccttttcccaaacactacttcaccctccaattcttctgatcccctgcataacaacactcactcttttagatctaccaatgccacttctttatctccttatccaaaaacagcctta

SEQ ID NO: 100484 - DNA, 560 bp, Glycine max
  Clone ID: PAT_MRT3847_61751C.1
cctcgtgccgctttcattcactttacttccaaattggaatggcttccacagtgttctcatatccttctcctcttcatcttaaaacctatccacacaaaacatcatcaaacccttcagagttttccattcacatccaacccaaaaagcacttttccattagatgcacatctttggactccattcctgaggctgagtttccaactccagatccttcctcaagcacagtgaacagtgcagagtcctttcccattgagaagagaaggaggtcagagatagtgaggaagagaaggggagaaaaacttgtgcagccagagccaccaaactttgaaataggttggaagacgaccaaggagatcaacctagagaggccaatagggcatgtcatagctgattttttggagaagttggagaccctcatggggaaggagtttggatccacagaactgctggctaaggttggggagattgtggctgagagggcaagagaggaggctgagattctcatggatgaaggaaaagttgaagagagaatggtaactgagctctttagagtgttgaag

SEQ ID NO: 100485 - DNA, 418 bp, Glycine max
  Clone ID: PAT_MRT3847_61752C.1
ggctgaggagtactatgtgatcgtgttgggcacggctctcacggaatgcattctcaccggtcttctgtgcgtgcatggcctcatcgttctgcatatggataggaacgactatctcggaggagaatccacttcactcaatcttattcagctttggaggacattcaggggagatgacaagcctgctcccattaggcgctgcagggactcaacatcattattaaccctaagttatcctggatgatggcaatttgtgcgggttctcatacataccgatgttactatgtatctctatatcaaagatgtgcatgggagctctgtgtttgatataagaaaggttcataaagtgcctgctcacgacatgtaggccttgatgtgcccacttatggcgctattagaacgacgccgaccactcaagtat

SEQ ID NO: 100486 - DNA, 415 bp, Glycine max
  Clone ID: PAT_MRT3847_61753C.1
gaagttggaggatagtaaagaagagaagggtctggaaaggaatccccacacaacgaaaccaacgcttcccacactccaatttcctattctcaatctctgtgatttcactccaaatttcaccctcagcttgaagataacgtgtgagatggatttggtgaaaatgatgatcatatagtgccccatgccagtgacaaacataataatcagtttgtaatacaagaagatagctgtaagaaatcacgtcatgaattacatggtatcagaaatagtgattatgtgaatagctatggtactcagggtaaagaggaattgtacttagaaaatatgacccaaaaagaaagaatgcaggaaaaggattcatggcctcacacacctgaagatgtgttttcttcatgtggtagtgactcaagcaaag

SEQ ID NO: 100487 - DNA, 515 bp, Glycine max
  unsure (1)..(515): unsure at all n locations
  Clone ID: PAT_MRT3847_61754C.1
cacacaacgaaaccaacgcttcccacactccaatttcctattctcaatctctgtgatttcactccaaatttcaccctcagcataatcttattagcaggctgttgtgcaatccgatctcaaaagagctagaggtgaagaagtagtggcttggtagttattaataagactcctgaaacactacccttgaaaagctaattgtggattggtggtgggggtagctgatgttacagttaatttgaagtgtacagtacttgttaatgcttgaagataacgtgtgagatggatttggtgaaaatgatgatcatatagtgccccatgccagtgacaaacataataatcagtttgtaatacaagaagatagctgtaagaaatcacgtcatgaattacatggtatcagaaatagtgattatgtgaatagctatggtactcagggtaaagaggaattgtacttagaaaatatgacccanaaagaaagaatgcaggaaaaggattcatggcctcacacacctgaagat

SEQ ID NO: 100488 - DNA, 199 bp, Glycine max
  Clone ID: PAT_MRT3847_61755C.1
caatcttaaaggggaaagggaacccccccgggaggggggcataaagcgggggggggggggtggttacccgaaaggggacgggtacactggcaagggccctagacccggctcctttcgtttggttcccttcttttggggaaacggtggccggttttccccgaaaggctttaaatggggggctcccttaagggttcggatt

SEQ ID NO: 100489 - DNA, 340 bp, Glycine max
  Clone ID: PAT_MRT3847_61756C.1
agaatagatagtagacacgtttgcaaacagcatgcccactgaggatcgcttgacctacagaatgatcctgtgtggcagatcacttcataaagcactctgacacgagtttaccccatgtgaatttgactagcgctctatttagaagctagaaccaggtagtcgcgattgtagcagaaatatctgtgagctggatcaatggaaggcaaatcactgtcatgttagaggaccacttaagcgcatacaaagatgattagtcgcttgccaagtgtttaactagggtaatgcacatctgcagcctaagcacccacaactgttgcacagccgcagatccagcatagct

SEQ ID NO: 100490 - DNA, 555 bp, Glycine max
  Clone ID: PAT_MRT3847_61757C.1
cctcgtgccgaattcggcacgaggctagtctcgagtttttttttttcatttcaggcgtcgatcaggatggcgtctaaggctgctgccaagcccaaggctaagccggctcccaaggagaagaaggagcgccgcctcggcgttaccgttaaggatgtctctgcggaggctttcatcagagagtacgctgctcacctcaagaaggctggcaagctccgcctccccaagtgggtcgactacgccaagaccgctgtctccaaggagctgccgcctcttgaccccaactggctctacgtccgtgccgcctctattgcccgcaagctctacctgcgctcgggcatcggtcttggcactttcaagagaatctatggcttccgtgagcgccgtggtgtcatgccccgccgctctcgcgacggctctggctctatcccccgctggattctgaaggagctcgagcgcttgaaggttgtggagaaggacaagaatggcggccggaagctcaccaccactggtcagcgcgatcttgaccgcattgctggcactgtcgccagcaagaac

SEQ ID NO: 100491 - DNA, 490 bp, Glycine max
  Clone ID: PAT_MRT3847_61758C.1
aagacgacagaaggggagaatgaatgaaaggcattagaaatcagttaccttcgtgagagagcaaagatggtggtgctgggcaccatctcacctttggtgtgctgctcaccatcttctactcatacctactacttgcgcgtcgatacttttctttttctcaactcccactcccacactcactcacttcactttctttttcttatcttcttttttccttaattccttcccatctcttttttcttcttttacttactatactctttgtgttttttttttcctttattctccctcttatttttgttttttaaatcaatccacaacttccttataatttttatcttcctttcctattaatttctctttactcccaattttttctctctttctttgttgcagcccttaatttttttttattcattaatttttttagcaaatttacgttaccattttttctttttccttctttttattaatacatttttttttaatc

SEQ ID NO: 100492 - DNA, 301 bp, Glycine max
  Clone ID: PAT_MRT3847_61759C.1
caggtgctcgcttggtctagtgcccatttactctggactccggatggctgccgcacgcctctgcctctccctgctgctcctgtccacctgcgtggctctgttactacagccactgctgggtgcccagggagccccactggagccagtgtacccaggggacaatgccacaccagagcagatggcccagtatgcagctgatctccgtagatacatcaacatgctgaccaggcctaggtatgggaaaagacacaaagaggacacgctggccttctcggagtgggggtccccgcatgctgctgtc

SEQ ID NO: 100493 - DNA, 299 bp, Glycine max
  Clone ID: PAT_MRT3847_6175C.1
gtttttctaccttgagaccgaattactagtgtggttactacccttgaagacagagccttagggaccgaacatgaggtatacaacccttgtcttgtttgcattcaacaagttgaccctctcatgaccaccctcacgaagaaatggcttcctccctgcgcgcaaacaatggttgatgactggcttgattgcactgatgagtgccgaccccttccaggcgcgtgctttgacagtatcactgaccggcttcacaccactcgcctatacgccgagaaactcaaatgcctcaacagtgtgcacaa

SEQ ID NO: 100494 - DNA, 318 bp, Glycine max
  Clone ID: PAT_MRT3847_61760C.1
gggaaacaaaaacattgtttggtccttgaaaattggcaaacctccaaaacaaaccaattccattggtctgacgcagagccactaaatcctgaaccttaactctaaacaacatgctcttgaaaacagactttccaatagtgaaaggagcgaaagtaatttactctgtcgaagtcacatttatcggcttcaaaggatgtatttttacaactgaacatacacaaataggggtgacattctgaaccaccattttgaaatacatgtccccatcctgcggacaaagagggaacttttttgaagctgactagtagctagaggtaa

SEQ ID NO: 100495 - DNA, 468 bp, Glycine max
  Clone ID: PAT_MRT3847_61761C.1
acgagatttcataggcacataagttttatatttttttggctcaggttgttttgtggaacattctgtcatttatatttctttgtgtaatatttgttaccctatgtttaggttcacttgtgcatgtcaaagggggagacttttccaaattttcatggacaacttgatgttagagggttggatttccaactgttggatgctccatcatctttttctgtatgacttcctatgctctccttcttatgacacttgaagtttccatttccacatatttggtattccttctttagtatgattaggcttggtgtattttgaaaggtaactcaactgttgcacactcgttgcattttatattgtttgtccaacatatgttttgtttcagtgtgaaacctgagtgatgaacttatgtacatttagtatcttatccatcctgaaataatgaatcacatcacatattgaaagtgctattta

SEQ ID NO: 100496 - DNA, 590 bp, Glycine max
  Clone ID: PAT_MRT3847_61762C.1
taattatttgtacaaactgaagcatctaaagcatttatttattgaataagataagggcactaataattgctatattctacaagaaatgaggctggaaaggaggaagagaaaaataaatcagccatttaataatagtttaattatggcagcagccacatccaccagcttctgcataatgtcatttctatcacttaagggtgcttgagttgagcccgagaatttcttgtcgcaagcatttacttccttctgagcatcaactatgcagtaactggcaaacccaaatcgaccttggtttatggcatcagctgcttgtgggagaatgtacttcacaactgggatgtatgactcagcacagaaagccaactgttgctctaattgttcatctgaggtctgcttgataagctcttcaatgtaactgagtgtgtcagtagcatttgtcagaattccattgaccattatgagggccataccctttggatcacttttgggggctaagggatttgagtgtaagatggagctgcaaaggtcataaaagggtgtttttttgcatatttggtctaccaaatccccatccccatccccactggtgc

SEQ ID NO: 100497 - DNA, 187 bp, Glycine max
  unsure (1)..(187): unsure at all n locations
  Clone ID: PAT_MRT3847_61763C.1
gttcttcttcttaactttctctctcttctctgttctccgtgccggtgctgtaactgcacgcgtgtnttctgtnttcgtttgtngtntttntttgctcncatttgcganggtgagaaccctaaatttgagagagagaggtttgatttggccggaggtgattctccggtgagattttgcggcggatcag

SEQ ID NO: 100498 - DNA, 354 bp, Glycine max
  Clone ID: PAT_MRT3847_61764C.1
tggagaaagattcagagtgcatcagctagtttttctaaaacaattattgttcacaaacagttgcatctttcttacagatgaatttgttttatgaaatgtctagctaaaaacaaaaaaagagggagaagatatttctgtagaagggtacccttgatgttcaaacatcaaaggattgtaaagttagcgttttttaagttgtattagtacttttcaacttaccatactttcatgtgtgtgattctataatgatgcttatgtccttagttcccattgaatatatcccttgtcaccttctaaattctaatcactaattccatctaccacaaaattaatttgcaaacccataatgattta

SEQ ID NO: 100499 - DNA, 346 bp, Glycine max
  Clone ID: PAT_MRT3847_61765C.1
tgttattctgttgcacatgttatgttcttacctgagtggttgactactgatactatagtagaagtagaacatctgcatcattaggtatcttaagattctcacggattgaaaaaggcataatgtatccccctataatgaaaacaccttttcttgattcagagcaatggagatgtttgacattgacaataaagtgaaatgttattttacatatgtgaatcactctgaagttgtggaggggccaaaaaaagtgattgatacttttccatgatatctggtgataccgtatctagtagagtatatggtggtccagatattatgtcctttacttaattttttcttttcctat

SEQ ID NO: 100500 - DNA, 339 bp, Glycine max
  Clone ID: PAT_MRT3847_61766C.1
gtcgaccacgcgtccgggaaaaaacatcgatagaggaaaattaattgaagggtgctactactacgaccttctatatattaatgattgaaattcgtgttgcacttgctctcttgtgtgctccctgccgttccctaccgttccctctctacgcttcgtcgggttcgttcccttcgctttcgtcggcgccgccggggcgcggcggggtcaggagccggaggttcaggttctggacccttgccatggtgctggtggtgtgggcggccgcgccggtgctagtgagggtggtggtgctggtgcggcgttggcttggcctttcttactgttgcttgcgtcctgcgg

SEQ ID NO: 100501 - DNA, 529 bp, Glycine max
  Clone ID: PAT_MRT3847_61767C.1
ggctcgagttctgacttttataatatgtttcactgttgctaactggagaattttgtttccagcaaaataggttccagacaatgtccgactccattgttacaaagaatatccttttgttttggtttgcccttcaagttcttaaaatatgttaatggtaatttgtgtgtgtttttttttatcccctccaaaaataatatttgattaaaagtgttagtatggttggatgataggagatctaagggggtatttggtttgagaaaatgctttttgtttctattttccaaagtttgaataagaaacagtgaaaacaatttttaattgttttattttctattctcataatttcctgatcatatttttgaatacatgagacagagggaatataagatagatcttgtaactaaaagtgagaagaaaacctttcttaaaacaaaatgccctaagctcacttgcattctgttaacctgtattttacttaacggttgtgctaggaatcaatttggacatttagttaaggaatgaaatggaa

SEQ ID NO: 100502 - DNA, 411 bp, Glycine max
  Clone ID: PAT_MRT3847_61768C.1
cggacgcgaccgtagccactctaccggcgttacgatgcagagcttcgcgaaaaccctaacgggtaaaacgatcacgtcggaggaggagtcttggcacaccatcgacgacgtgtgggctaagatccaggacatggaaggtatccatccggaccagcaccgtttaattttggtcgggagggatttgtaggacggacgtaccacttgacgctacaacattcataacgcgtccatgcttgacatcggcctgcgcctccgtggctgcgccaagagatgacagaagaatacctacaccatgcgcactaagatcaatcataagctcaagaacgttaagctcagtatactacagttgtacaagtgcagacgattctggaacgagtccgaggctctcgtaggagtgccccaacgccgagt

SEQ ID NO: 100503 - DNA, 438 bp, Glycine max
  Clone ID: PAT_MRT3847_61769C.1
ttcttgtggcaagacgacaacaggggggggcggagagagcagactgtgtagtatgggtacttgagacagaaccgaccactgccagtcaagtctgcacaaggagccgctgccggatccctcctcctatgcgtggctcttcatctgtttcacatttatgcctcctgagatccctaccggctcttcaagtgtaatgacacttatggtgacacttaccctctggctgttcgacaaacggggatattgaccaacggccaattacctggtccagatattcatattgtcaccaacgaccccctaattataactgccttgaacagctcggatgagccctagcttctctcttggaatgggatccatcagagaaggaactcactcgaagatggtgtttgttgaacatcctgccccatcccaccagggaagacttgtacttacatactt

SEQ ID NO: 100504 - DNA, 359 bp, Glycine max
  Clone ID: PAT_MRT3847_6176C.1
taatcaagcattagttcaaccaccttccccttgcttgatcagggtttacaaaaacacgatccatactgtacatgtttcacacactgctatcaagctaaactgatggactatgcataaagctacggcgtgtaacaagattcaacttgaatgttagagctagaccgagccgaatatgaagaaaccaccttattatattggcttgagctttcggacccaattcaacagaggggaagtgctctgccagattgaaaggacgggatttgaccccctcactcattgtgccaccctggaaggacttgcactcgtcacaacaaagacaacctgtggcgttactaatagcagctattatcttaaacaaa

SEQ ID NO: 100505 - DNA, 370 bp, Glycine max
  Clone ID: PAT_MRT3847_61770C.1
gcgaaattaaaattgtatcaaaagaaattactactaagcattaactttataactttcgttaatgggttatttctattattacaatgtatataataatttgtataaaataagcaactaaagagaatattatttaaagtacaattcacgttcattaataaagtacaattgatatgtctggtgtcaaatatcaaaagtgcgttggtacaggaaataaaaatttgtgtacgatttacggttgatatgaaagtttaatttaatatagcattacactaccttttttaatctaccacaatattgctaacaaacaccaaccggttttttcttttgatcatatattgtttatcatagtatgctagattcaaatattaac

SEQ ID NO: 100506 - DNA, 347 bp, Glycine max
  Clone ID: PAT_MRT3847_61771C.1
gaacacaaccataaggcataatacatatcatttcataaatcagcattccgcaggcaatttatggatccaaatggcgtttccaaaaaagtttaatgttgttaagcaaacacggggaataaagacacagagtagcagagtcggttttgcaccagacgagaagagacacccatctggataacgtactcacagaaaattgctgaagaaaacgaacatttttttctgaactatatgctatttgtagctgatgatgcggtggccccattgatagctgccatccaccaaccagagcatacctatattgggcataatcttggacaccgtactccatagggtacccaccataacca

SEQ ID NO: 100507 - DNA, 471 bp, Glycine max
  Clone ID: PAT_MRT3847_61772C.1
tgagacttcctattgaaaggttcaaaaatataaaaagtaatgaaaaagagaagaaaaacctaggataattaaccacactataactgttgaatttaaagggagaggaagagatagagggagatagggtgggattgcttaagtgaaattgattgattgtacagtacttaggttatgctgaacaactatatatattatatactcttattatgctatgggaactatttcctaggcaaagagtaaatgggtgctacttcctaaaaactaattcctattaaaactaaatgcatttgacatgtgatgagggaacttgttcaatatatgatacatgaactgcacctaattctaacattgtttacttgatgaattagtgctctgtgcttacttttctccaatctccattcttttgtcctctgttcagctcttctcgtgcacaatatttgagtaagagcatgtctagcacaaatattaatt

SEQ ID NO: 100508 - DNA, 312 bp, Glycine max
  Clone ID: PAT_MRT3847_61773C.1
agtgactcttagcaattagaaagaaaaaaggaaacaagttttccttactacaatttccacataaacaaccactacatttttttatgcttcttttctcacaacagtgttccattgcactggaatgaatcttcctcacagcacttgataatcacaatctttgttcccatctccaatctcaatgccacctagaaaatccaatcaagagcatcacttaattttcagaatatccatatgctaaaatccactaggatcagcatgagatcttaggttcaaactcgttcttctacaacaacaacaacaaaaaaaaaaaaa

SEQ ID NO: 100509 - DNA, 727 bp, Glycine max
  unsure (1)..(727): unsure at all n locations
  Clone ID: PAT_MRT3847_61774C.1
aggtgttgagggagcatgagnaggctagggctaaggaagatgctgactctgataggaagaaggatctttttgatattttgttgaacctcattgaagctgatggtgctgacaataagctcactagagagagtgccaaagcctttgctctggacatgttcatcgccggcacaaacggccccgcaagcgtcctagagtggtcactggcggagctggtgagaaacccccacgttttcaagaaggcaagagaagagattgagtcagtggtaggcaaagaaaggctggtcaaagaatcagacattcccaacctaccatacctacaagcagtgctgaaggaaaccctaaggctgcacccgccaaccccaatattcgcaagagaagccatgcgaacatgccaggttgaaggctacgacattccggaaaattccactattttgatcagcacatgggccattggtagggatccaaattactgggatgacgcactcgagtacaagccggagaggttcttgttctccgacgacccgggcaagagcaagattgacgctagcgagtttgatccagtgcttcgactggatcgttaatgatggtaaaaaccatcatgttgacatgtctgaggaagggagggtgactgtgtttttggccaagccactcaagtgcaagcctgttccgcgtttcactccgttcgctgcctgaagactgtgaatggaatggtttctctagatcgcga

SEQ ID NO: 100510 - DNA, 2278 bp, Glycine max
  unsure (1)..(2278): unsure at all n locations
  Clone ID: PAT_MRT3847_61775C.1
tagcaactctctctctctgcgtccatggagttttcggggtgttgaggcgacaaatggagactctctcaaggttgatccacgagatgacacgatgatccacctttcacatgcatgcatgggggatgtcactaaggatataggaggtggaccagcaaccctgtatttgagctatcccataactggagatatggaagcgatttctttactgaatgctacgctcagcctcagtcggagtctgactatgatgagttcttcatcataaatttggctctagcacaatcacacacggtcctaagtgtacctattgtgattccaacacctctatttatgttccaaacattattactcaagcgggttcatgttagcataggaggttgagtagttcttcatcatagtcttaaacattaaaccttagcaaaactcaacaatgctagacatcaaaggctacctcgtactcttcttcctatggttcatatcaaccattctgatacgttccatcttcaagaaaccacagcgtctaagactcccaccgggtcctccaatttcaatacccttgctgggacacgcgccatatctccgttcactgctccaccaagcattgtacaagctatcactgcgctatggacccttgatccacgtcatgatcggttcgaagcacgtggtggtggcgtcgtcggcggagacggccaagcagatcctcaaaacctcggaggaggcattctgcaaccgtcccttaatgatagcgagcgagagcctaacctacggcgcggcggactacttcttcatcccctacggcacatactggcggttcctgaagaagctctgcatgacggagcttctgagcgggaagaccctggagcatttcgtgagaatccgcgagagcgaggtggaggcgttcctcaagagaatgatggagatttcaggcaatggaaattacgaggtggtgatgaggaaggagctcataacgcacacgaataacatcatcacgaggatgataatggggaagaagagtaatgcggaaaacgatgaggtggccaggttgaggaaggtggtgagggaggtcggggagttgcttggggcgtttaacttgggggatgttattgggttcatgaggcctttggatctgcaagggtttgggaagaagaacatggaaactcaccacaaggtggatgcgatgatggagaaggtgttgagggagcatgaggaggctagggctaaggaagatgctgactctgataggaagaaggatctttttgatattttgttgaacctcattgaagctgatggtgctgacaataagctcactagagagagtgccaaagcctttgctctggacatgttcatcgccggcacaaacggccccgcaagcgtcctagagtggtcactggcggagctggtgagaaacccccacgttttcaagaaggcaagagaagagattgagtcagtggtaggcaaagaaaggctggtcaaagaatcagacattcccaacctaccatacctacaagcagtgctgaaggaaaccctaaggctgcacccgccaaccccaatattcgcaagagaagccatgcgaacatgccaggttgaaggctacgacattccggaaaattccactattttgatcagcacatgggccattggtagggatccaaattactgggatgacgcactcgagtacaagccggagaggttcttgttctccgacgacccgggcaagagcaagattgacgtgagggggcagtactatcagctcctgccctttgggagcgggagaagaagctgccccggagcctcgctagcgttgcttgtcatgcaagcaacgctagcgagtttgatccagtgcttcgactggatcgttaatgatggtaaaaaccatcatgttgacatgtctgaggaagggagggtgactgtgtttttggccaagccactcaagtgcaagcctgttccgcgtttcactccgttcgctgcctgaagactgtgaatggaatggtttctctagttgtgtgtgctttacctactctatatttttaccttatttttgcttactttgtggcactagtatttgttttgggaagtagcgttgcttctgtaaacttggtggcaggggtatattatttatggaaataagtggtggcttggtagttattcccgtccatttctctaatgctgcctaataatttaaaggagttaatcaggccaatgaatacagaatgctgcctactatttctttttgttttttattacaaaactaatcacttttttctttaaaaaaaaaanaaaa

SEQ ID NO: 100511 - DNA, 210 bp, Glycine max
  Clone ID: PAT_MRT3847_61776C.1
ggaccgagaaagatattaggggttttgagtgcggtgcggggatcctagcactctcttctgcagctttcgccgacagcttcattcaccatggctgagcgaaacgaaaaggcttttttgaaacaaccaaaagtgtttctcaacctccaagaaaactgggaaaggaaagagacccggaaaaggtgggaaccgcttttgggaaatccattgggc

SEQ ID NO: 100512 - DNA, 496 bp, Glycine max
  Clone ID: PAT_MRT3847_61777C.1
cttggatatttggcgccagagtatgctatgtgggggaaggtttctgggagctgtgatgtttacagttttgggattttgcttttggagattgtgagtgccaagaaaccaattgagaaactccctggtggagtgaaaagggacatagttcaatgggtcacaccacatgtccaaaagggtaacttcattcatattgctgatccaaagttgaaggggcattttgatttagagcaattgaaatctgtggtcatgatagctatgaggtgcacagataatagcccagagaagaggcctaccatgcaagaggtggtggagtggctcaagggtggtatagggagaagaaaaaaagagattccatatttgagttacaagactgaagatgacaaatatgaggaaaactatggagagattagaacaacgcagtccaaattcaaaatagcaagtgataatgataaacttaaaataagataaattcctatcgtgtaagtaaaatttataa

SEQ ID NO: 100513 - DNA, 487 bp, Glycine max
  unsure (1)..(487): unsure at all n locations
  Clone ID: PAT_MRT3847_61778C.1
gcaaaagaaagccctggaggaagatccatctgtatttgattatgatggagtctatgaccaaatgaaagagaaagttgctcgtccattggtacaagatcgtgaagagagaaaggtatggttgcagttctaataatcttttcttaattacaatcaaacaaccattgtgttgtttttacaactgtatagaatcatataaatataatgagaaactgagaatctctgccaacttacatcataattatgatgactctgggattagcaacatatagatacactgtcgtacctttcttttcttttgtttttttggataaaaaattccttttatttatttaaaatttaaaatagttggtttgtgctaagatagcgatgaaatccttatacattttgttatcagataactttctgttgggttgtcttcgatatatcatgagtaatctatgtgttttatgttacaaaaaattgcaagtacccttntgttggtttgata

SEQ ID NO: 100514 - DNA, 176 bp, Glycine max
  Clone ID: PAT_MRT3847_61779C.1
acgagcacagtttgagttctcaagaatatggaaccaagcacaaaaaagtatttcgaagttccaggtatgaataattgattggagtgtccttgttgaacataggctatttgcattaaaaaattatattggtatatcatcattatatgatcttttgtacaataaaaaaatgaaagaga

SEQ ID NO: 100515 - DNA, 391 bp, Glycine max
  Clone ID: PAT_MRT3847_6177C.1
ccaaccaaaggttacttgggccgggtaaaaaaaaaccggggggccggtttttgggaaccattgggaaaaaaaaaaaacaaaaaacccccctccttttttttggccctaaaaaaatcccaagttttaaggtttccattttggaaacccttaaaaccaaaaggggaccctcagaaaaaacaaaaaagctggcaaaccccgggccaaaatccccaagcggggggcaagcaaccaaattttcccatcccggggggccaaaaaaacggaggccccacaaattggagcaggcgggaaccctcccaaaaacaaccaatttcggaaaaataaatggcagtcgggaaaagaaagtccctcagtataaattaaggattccgggaacccatggaaatcttcc

SEQ ID NO: 100516 - DNA, 430 bp, Glycine max
  unsure (1)..(430): unsure at all n locations
  Clone ID: PAT_MRT3847_61780C.1
caagaggggcaaaggaaaagggaacaagcagagaanngcnnngacagacaacncnannanngaacagacnnnggggaagcangggaacaagagcgaggaagaacagaaccaagagaacaggacngnnggaccncacggcaaggaggccaacaannnncaggggccaaagaagcggaaagcaccccaggggggacaggagaagaaaagaaagcannangnngaaggaggagangcgggcaacagggaggaggacanaaangagcnnannagaaggangaangagngggggnnaccccagaccgagaggggaaagaaaagacgcgaaaacacaacaagaaaaggcggaaaaaaagggaagaaggagggaaccggcgagacggagaaaaaaaaaaaggagaaaggccaaacaaggaaagagaaccgggagacg

SEQ ID NO: 100517 - DNA, 1652 bp, Glycine max
  Clone ID: PAT_MRT3847_61781C.1
gggcgtgggcggtgatggtgatggtgatggtgatggtgatggtgatggtgatgatgatgttgatggtgatgttggtggtgatgatgaagtggagaagaaggaagggagaaacagtggtggtactcaccactaccctttgagatctgaagatgaggagtgtgcattttggatgtgattggggtatggatggtgatgttgatgtgagagggacagtcaccgtgagaagtggagaagagaggctgtaagaagggaggaacagtggtggaactcaacactaccctttgaggcctgaagctgaggattgtgcattttatatgaaaactgggaattgcaagtttgggtttaattgcaagttcaatcaccccattaggaggaaaactcaggctgttaaagagaaggcaggagaaagagaagaaaccacagaaagatcaggcatgacagaatgcaagtattatcaaaggtctgggggttgtaagtttggtaaatcttgtaaatataaccacacaagaggaaaaatttcaacagcaccatgtcagcaccacttttggaacttaactttcttggcctgcctattcgtcgggggaaagagactactacatgagtttttcaatacaaagtgtatcactattgatctgttccctgaactggtctgtctacaagaacattaaatgttcttaaaacctttggatgtgcaattgatgctttcttatctacttcaaggtacgtttatacgggctaaatttctgattggaggataccacagtcaggacatctgtctatttacctgagaggagcattcatcccaccttctacatctgtcatgaacaacccagcaattgatacaaatgtttacatgcaccatcaaaagcagatgcctgttgatgagtttccagaaaggcctggtgaacctgaatgcagctgcttcttaaaaactggggattgcaagttcaaatctaattgtaaatttcaccatcccaagaatcgggttacaagattacctccatgcaacctcagtgacaagggtctacctttgagacctgaccaaagtgtctgctcacattacagtcgctatggaatttgcaaatttggaccagcttgtaagtttgaccaccccgataaacttgcagcccgtgatgattcctggacttgagcaacaatcctactcaaactcagctagtgctggggtggctgggataggtggaagtacaggcgtaactgatgcgacaattcagcaatctgtgtaaacatgtttgtctgaggatcttcttgctttgaggatgcatatcaccccaaattgttttcttcttaaacatgataaatttattttacttttcctagccctgtccaatgcagcacaagctttgcaaggaatagctgacatataatatatatcaaacagtttttatgtatttattacaagtaacatctgcatctgtagattatctcttgtttatggtttgttttctgtcagttggatcagtgttggataataattagactgttttgtttcactagttatgctaatgtggcacaagccttacagaatagcaatatatacggctaatagaagttttattacagtaacatgtagattatttttttgcttctggtgtgatttctttcacttggatcattattaaaaaaaaaaaaaa

SEQ ID NO: 100518 - DNA, 603 bp, Glycine max
  Clone ID: PAT_MRT3847_61782C.1
ctggggcccccgtcgcaggctcccggccgccacgcgcgcgtacggctgcgagaagacgacggaagggggtatttggggtttaggaaaaaggtgaagggcgaagacacgttcttctctcaagtgctgaaaaaaaggaaatagcagaaagttatatggataacaaatcaccgagcaataaggcatctgaggagctggcacgtgagttgcttattgctatctctgattctttaccagataaaactctggattccgattttgtgcccgaaagcaaggacgcagacagctttgcaagaccaaacggtgattgggatgacaagtttaggtctgaattgatttcaatctcctatgttgaatctcccgatgtcaaaatctgatatattacgagtctagactgttagtaacttatgctacccttctggtttgttatgtggatgaatttccgctgtgccaattgttgtgaattgattatactatgtgggctatcttgcaacccacatgtagatactctcaccagtcacatgcttggttttgtattctaaaaatgactgataaatacttaattagtactctgttatatttttgttcatagaaaattcaatctgg

SEQ ID NO: 100519 - DNA, 1527 bp, Glycine max
  Clone ID: PAT_MRT3847_61783C.1
ggctgaagggcaaaatcccaaatggaatgagaaaaaatttctataattagagtctcactctcatactcgttgtatgtatggctacgctctctctcactctcaactgttggagtaccgtggaacttgctcacaccagattttcttctaccttcacctccctcggtcgcaggagtagatatagcatatgttcttttgccaagaagtcattgaagaaatccagaagagatgtaacagaggcagctggagatctcttagatgataagtttgttcagaatgacaacttggacacttctcttaatccagctgccccgaattctaaccctttaccttccaggagtgctgtgcttcaagcttgcataataacttgtggtctcatagctgctttgggaatagtgattcggcaggtgtctcatgttgcgtcagtggaaggattgccagtctttgactgctctacagaagtatcatttggctttgaaatgtggcatcttgagttgattacaggacttgtagtattaatatcatcatgtcgctatttgctattgaagacgtggccagattttgccaagtctagcgaagcagccaatcaacaggtccttagctcacttcagcctttggattatattgttgttgcatttttgcctggtattagtgaggaactacttttccgaggagcgattcttccacttttgggaatgaactggaatagtattgggattgctgccttgatttttggtgttttacacctaggcaacggtcgaaagtattcctttgccatctgggcaacctttgttggtcttgcttatggatatgctacaattttatcctctagtgttgcggttcccatggcttctcatgcagtgaacaacctgattggagggcttttatggcggtacacatcaaatacaccaaaccagaaactaaatgagtgatttccatcttcatggataagtcaccacatctctatacatctaaccctccctgccccgagtttaatgttgtataagaattgtgatacagaagtcatagagttagagaccaatccaagaagtatgtttgcaaatgcagcaactaatggcagcactgctctctcctccattgtttaaggaaaaaaaatcaagtttgtatattacacattatatatagatttctcttgtagttctctgaaaattgaaaaaaacgtgctatgtaatttatttaccgtaaatagataactgtaatttataacgtggacggcgtatcttggtttgcttgttaccaatttggttttattagtctcccatttttggaatatggtctcattggattgggactaaccttttgaaggaatattcccctaaaaataaagcggaaaataaacagaaaaccaaatcacccgcgttttggacgagtgtggcacgcaggaaggttggaccccatcgagcgccgcttcctctcctcgggctatgccttgcccctgttcctgccgctgctgttcgcttccctgcttttttcaacacggcccgagtcgtgtcaacaactggcagagga

SEQ ID NO: 100520 - DNA, 405 bp, Glycine max
  Clone ID: PAT_MRT3847_61784C.1
taccggtaacgaattcccggctcaacccacgcgtcagaccgctgctacataacgacacaaggggacatcaacttgagacaaacacttaaatacctatcatgggaagaaataaactacagaataagaagtggcttcaatctccgaaatctccatgtacacgtgagcaacttatgctaaccagattacggtgctgtctaactcggattcattcctcaagctactgacactacagtcttccaccgtagtgacaccatcacactcaatgtaatgtttcaactaagagcctccataatggagaaagtatgtcacggagtgcaccgcaacttcattgatagcttcaatgatgctaccggatgttgatgacgctgccattaaagcttctcacaacaacttcgtgctcatgat

SEQ ID NO: 100521 - DNA, 247 bp, Glycine max
  Clone ID: PAT_MRT3847_61785C.1
ctgcttcaaaaataatggattttgggcgtcaattgacggttcgagaaggaagaacaggtgggaatgctgttgatgctgagacttttggtggtattgcagaggtcatgcttattgtgcaggtttctactgcaagctttgatgatgcaaaagtagctgctgaattcaagaggcttgctcaggcatttgttgtcggagctacttcgcattgttcgacattaccccttactgctctggttgttcaggatca

SEQ ID NO: 100522 - DNA, 192 bp, Glycine max
  unsure (1)..(192): unsure at all n locations
  Clone ID: PAT_MRT3847_61786C.1
gtagggccctaggtaccttctggggcaagtagcatgaataaccaatatctatttcattctttgngaatgtttggttttagcataactaaaaagttttccccatggacctggggggcttctgattgagaagtacaaggataatttagtgggactttttgatagttgactttggnnttttntntgggggggggg

SEQ ID NO: 100523 - DNA, 533 bp, Glycine max
  Clone ID: PAT_MRT3847_61787C.1
gtgcattattattcattcggtaataaataaaacttgtacatgtttgtggttcatttttattttaattattattaaataattaattagtttaatttttctgctttggtttaagggtgttgaacttgagctcaggaaacttgaaggagcagtggaggccatccacggctatctagtttatttgaaggataagtaaatactatctcgttacactttatgtttgattttaatttgatcagagtcttagtttctcatagttgatgtgaggcatttatgaacttaggctcttctttatacctataaagtaaggctcttcaaagttacaaccacttaaatatgtatcattactcctaaaaaatatgtaaccagtccatatgagaaaatgtttcttcattgaagttgagtagtttggtctcttccttaaaaacaaaagggccatttgtttgtgctacccttagcaaacaagaaataactattttgcatctagtcctgcacaataactgctacaaatatgcttgaatgttgattagagcatt

SEQ ID NO: 100524 - DNA, 278 bp, Glycine max
  unsure (1)..(278): unsure at all n locations
  Clone ID: PAT_MRT3847_61788C.1
cactgacatgacacgcaagaatctcttgacatgacaagtttcctgcacatgacgctattaccaattggagggccagaaacacggtcagggaggcatgaccatgctcccatcgaactaagaccggaaagagggacagggagcgtgaacgatggccaagacagaggggagctgcnagacatccacacaaggctcagggaactggggcgcgggcccttaaaatgcaagaacctggcaacccaacaggccacaaacaagcagctaacgagcatgaaaataac

SEQ ID NO: 100525 - DNA, 591 bp, Glycine max
  Clone ID: PAT_MRT3847_61789C.1
acggctgcgagaagacgacagaaggggatacttgtaattcataggcagatatctaccgagggttaaacatttagcatatttgctgagggggtacctttgtagacactacatactatccataatatggtcgaaaacaatccagcaagggtttttggttcttctatgtttctatgtttgcttgtgttgatcacttggaacaacattgttgttgttgttccacaagctgaggctcgagcattctttgtttttggtgattcgctagttgacaatggcaacaataactacctattcaccactgctcgtgccgactcatatccttatggaattgactatcccactcacagggccactggccgtttctctaatggcctcaatatcccggacattatcagtgagaaaattgggtcagaacccacattgccgtatctaagtcgcgagctcgatggagagaggctactcgttggcgccaattttgcttctgctgggataggaattctcaatgacactggaattcagtttataaacataatccgaatcagcaggcaattacagtactttgagcagtatcaacaaaaggtgagtgcactaatt

SEQ ID NO: 100526 - DNA, 336 bp, Glycine max
  Clone ID: PAT_MRT3847_6178C.1
cccacgcgtcctgaaaaagtagacgttggacagaaaattggttgtttataggaagtacatcatccagaaaacatgtgaaattgattgttaattatttactttgcaaaaaaaaaaaaaaaaaaaaaaaaaaaaaaaaaaaaaaaaaaaaaaaaaaaaaaaaaaaaaaaaaaaaaaaaaaaaaaaaaaaaaaaaaaaaaaaaaaaaaaaaaaaaaaaaaaaaagggggggggcctttttaaaggacccaattttacttccccgggcttgcaagggaatagtttttttttggggcccccaaaatcaatttcctggcccgggttttaaaaccgggggggg

SEQ ID NO: 100527 - DNA, 499 bp, Glycine max
  Clone ID: PAT_MRT3847_61790C.1
ctaagaacattatgggatgctatagcctataatgggagtggagtttgtctatctaatacagggagggagaatgctcccttaagcttaaacacctctggggatcactcacccccatgcacatgagacttggttattgctacaaaacctttacactctcacatatcctgggtgatataagacaaaccaccataactcactccaaggggctcattaggacaagaagtgctaaacctgatgtgctacatgcctcttgccaaacacaacaaatcttgcacataggaaaggaacataatccttgagcttgtacagcaagtgtattaatcttttcaccaaggtaactagaccttgctgaaaccagaacaggcctgatcatactggggctaggaagtgtacccaacagcttcccacttgacactatggcacacaggatgttctcgaacagggcggacatgaaatcctacaatgtcaccaactgaaggacagcaaagtgttgaacgtg

SEQ ID NO: 100528 - DNA, 536 bp, Glycine max
  unsure (1)..(536): unsure at all n locations
  Clone ID: PAT_MRT3847_61791C.1
ctcgagccgcgcgcgcaaaggattaggggccgagcgtcagtgaatttggccaccataccataccatgagcataagggcgcgcgcgcgcaaaggattagggtttcgaacgtagcgattttggagcttccatttcgatttatacttgcgcacgatctgttcccctgcaagtttgcttttctagatgcaaaaaatgccagggacaaagcagagagatacatcccaaaatccagactcaccagaggggaacagtgagcctgagaaacctacagattctgatgagcgagtagactttgatggggataatgatcaagaggagacaatggaggaagaagttgagtatgaagaagtaaaggaggaggaagaagaggaggaggaggaggaggaaaaanaagaagaagaagagactaagctctcagataagacaagagtggcagacactaaggatgaagttgagaaaaagaagcatgctgagcttcttgcacttccacctcatgggtctgaggtttacattgggggcattcctaaaaaggtttttg

SEQ ID NO: 100529 - DNA, 212 bp, Glycine max
  Clone ID: PAT_MRT3847_61792C.1
tgattgcccattaatgaatttcgctccaatttcatgtttcctttcactccattttgtagtgacagaaaattcatttcatccttttccttttctttttttttttccatgttctcttttattcatttagtttaagtttttttcattcatagccaaattattctacttcagtggttctataattttattaaatacctattcatctattttcactt

SEQ ID NO: 100530 - DNA, 254 bp, Glycine max
  unsure (1)..(254): unsure at all n locations
  Clone ID: PAT_MRT3847_61793C.1
aaagagaaancaaagcagagggcctatgtcatttggggggcttcttttgacaaggccagcttatggtcacaacttcataatgattcgcgtaataatctggaaatgcaagaagcttatcttgtcaatcttcgacaatgtgctacgagaattgtatttgcacagtccagaggaagctcgccaaatgagaaggaaagcctctctctacgccattgaaatggcgtgcaaaaaagcttgatgttgcctacccatagaca

SEQ ID NO: 100531 - DNA, 354 bp, Glycine max
  Clone ID: PAT_MRT3847_61794C.1
acgtaagctcggctttcggctcgagaaaattcagatttctaaattttgcatatcaaactgcggtcaagcatagaacggacgccctattgagtaaaacaaaacttagaagaagattattgaaacgcccatcataaagcaacccgcagcttgatatgcaaaattcagatttctaaattcaaattatttgcagatctacaaaatgagagcttgtacttttgatttcattggagcccctgaaatcatagagttagctatctattttttttcgttgttgaaacgaattggagtttttgccattaatccccaagtttattacatggaattcgaatttctagctaaagaacaaagcaccgg

SEQ ID NO: 100532 - DNA, 310 bp, Glycine max
  unsure (1)..(310): unsure at all n locations
  Clone ID: PAT_MRT3847_61795C.1
ggnncngcacaaaccttggttttttaaaagaaggggtataattggacttaccaaaaaaattntccaaggggaccaaaagtcaacacttaattaaccccccccttttaaatttcctccccctttttccaccccccccgcgaaaaaaaaaaaaaaactttgggccccaaacataagaccccaatattccaacatacacaaaattccatattccccttgctttttttgaaacaaagcaccctgtgaacaaaatttacaggtgcaggcggaaggttgctccaaagaatggggggtctcatttttttaaatcccc

SEQ ID NO: 100533 - DNA, 941 bp, Glycine max
  unsure (1)..(941): unsure at all n locations
  Clone ID: PAT_MRT3847_61796C.1
ggctcgagccgaatcggctcgagcttctcttctcacaccacttactttctctctcctctccatgtcttcttcacgtcaaacgtagaatatctttttctttttccccttttttaatcttaacccaatttttactctcgcaaagtggtgtatttgaggaagtttgatttgggaaatgaacaaaggacagtcaccggagcctcttgatttcttcatctggactgttgaggatgttggcttgtggctggagactataaatcttggtagttacagccaaatttttaaagaaaatggtgttaatggagaatacctggaaggcatgtccatgtttacgactgaacagatcctacgttttataagacgttgccacatgaagtggggagacttcatcacattatgcaaggaattaagacggattaaagtggcttgtctgaaaggggagcagaaggtgcggcggccatggtgggcaccggcttgcctatctacagtgttcttaaaggttgcaaaatccaacagacaatcaagagttgtttccttgaagctggaaccatgataatacaataagttaaacctctgcatatgtgtaccagtgtacgtatagcaaatttctttttgcctagaaaacaaaagataggaaagaactttttctagcccccttttttattttattttatttttcttttgattccaaaacctggttgtttcttctcctctggagaactgaactgttatgcagtagaaagtccttgtgcactaatttccggtgctgtgtaattatgtattctcttatatgtgaacgaaaatacgatatatgccgtttctcttcaagttcctccgcagccccccccccgagggccgcggccctttttgggggttgggggggttttttaaaaaaaaaatttttnttttttaaaaattttttggggggggtttggaaaaaattt

SEQ ID NO: 100534 - DNA, 348 bp, Glycine max
  Clone ID: PAT_MRT3847_61797C.1
accagacgtacgcaggaaaccgggcaaaaaggatcgggttagtcattgtattgtagcgttgtcccatccttatgacagaaatgtgcaactctgtgacgagtgacgtatctctttatctgaatattgctaaggtggttgacacgatacgggcccaccaagagacagagatctagctgtaactttcttcagcattttttcgtatatgatcagattcgggaccgagtatcggatcaagggggagatattattgtggtgggcttgaccaaaccaaatggttggcctgctacataatgagctatatcagcgtgcacctcttaaccaacacctacaccgtcatgtgcatgcaaa

SEQ ID NO: 100535 - DNA, 804 bp, Glycine max
  unsure (1)..(804): unsure at all n locations
  Clone ID: PAT_MRT3847_61798C.1
ccacgcgtccgaatgatggcgatgtttctgaatctgcaggggttagttcctttgttcttcttcttcatccttcccgtcctcttcttcttcttgctcggacactcttctgcagggttgaagaagaagaaagagacagattctagaagaaccatcactctgccaaaaacatacccattaattgggtcttacctagccatccaagccgtcggcaaccgccgtattcagtgggtgtgcgatatgggcaaaatctgctgcggggctaccttgaccttgcaccgccccttgggccgctcgcacgtgttgaccggcgaccctggcaccgggggatacattgtgaagacccgtgtgtgcaattgccaaaggggcaggaccggtgttgacattgtgtggggtttgctgggggcagggatgttggacggcggcgaggacactggggaggtgggggggcaagggggcaaggacggatctgacacggggggtgtgcgggaatgggggggggcacggggggggtggccggactgtggaaccagggtggggggctgtgggggggttgggggngggggggcggggggagaacggtggggagggggaggcatgtggggagcggggggggggggggcaacctgggggggggaggggggggggggtgggagggcgggatgccggggggggcggggggggggacgggggggggggggggggggggtggggggggaggggggggggaggggggggggacgggggggggaggcgggggcgcgggggagcgggggaggggggcgggggggtggagtaggggggggg

SEQ ID NO: 100536 - DNA, 2508 bp, Glycine max
  Clone ID: PAT_MRT3847_61799C.1
gttcccggaatagacccacgcgtccgctaaaaagtaggtaattcgagcaaggcgcaacccaaagagggtgaccacaacctttaattcaatccatttcccctctctctctgttcaaagccacaatctaattaatttcccattcttctccaacaacttagggtttcccttttcccaacaacaatgccacccattccctaattagtaattacgctttttcttttcctattaaattcatttccccgacatggacggcggcgggtccactccggcggcgccgattccgaacgcgaacgcgccgccgccttttctgagcaagacctacgacatggtggaggacccttccaccgacgcgatcgtgtcgtggagcgcaacgaacaacagcttcatcgtgtgggaccctccgcagtttgccagagaccttttgcccaaatacttcaaacacaacaacttctccagcttcgttagacagttaaacacttacggtttcaggaaggttgatccagatcgctgggaatttgcaaatgagggttttttgaagggtcaaaagcacttgcttaggagtattacacgacgaaaacctgcccatggtcaaaatcatcaacagcctcagcaaccgcatggacagagttcatcggtaggggcatgtgtagaagttgggaagtttgggcttgaggaagaggttgagaggcttaaaagagataagaatgtgctcatgcaagagcttgtgaggttgaggcagcagcaacagaccactgataaccagctgcaaacaatggttcagcgccttcagggaatggagcaacgacagcagcaaatgatgtcattccttgccaaagctgtccagagccctggcttctttgctcagtttgtacaacagcaaaatgacagcaataggcgcataactgaagtcaacaaaaagcgtcggcttaaacaggaaggtatggctgaaacagagcatgctgctactccagatggacaaattattaaatatcaacctatggtgaatgaagcagcaaaagcaatgcttaggcagatcatgaaatgggatacttcttgtgtagaatctttgaataaaaattctgataactacgtgattggtgatgcttcatcatcttccagtggaatggacagtagcagctcttcaggctggacttctggagtaactcttaaagaggtctctccagcttcggtgcagtcttcacatgttccagctgcaactgggactcaagggcatgtcccctcaaccgttaaacctgaaattttatctgtaccacaagcagtagcttctgaaaaagttatgaaagatggagcacatgatccaccttctatccctgtgtctcaagcagatgtaatgatccctgatcttcctccaataacagagatggtgacaggaaatattcttgatattcctgaagaaaattatatggcaactgagacagatgagggatacatggattcttcattgggggctggtgggtcatttcccattgatttcgaaggtatttcacctgatgcagacattgatgatttgttagccaatcctatttgggatgaaattttgcaaacttcagttccagaggatatcgataccaatgtggctgaagcatccaaagggaatgaggtccaaccaatggaaaatggatggggcaaaactcaacatatggatcaccttacagagcagatgggtcttctttcttccgatgcaaaaagagtttgatatctatgatatatgattaatcttcatattgtctgaggtagtccctgacccaaacaatacatgactgaagtgatgtctataatatataattagtaattacactcccacttggtcactgaaaaagacaatgtttttcatttggtcttcaatggctttttttagtttgttgtgcataccaaggctaaatccaactttctcacacgtgcatttacattgatttttcattcgacttcgtgttgaaaacaagttatgaacttatggccttgtcatggcatcctcaggaagtgtttgtgatcacaagatcagtttttccaatgttataggcaatctgtcaagttgagttatatgtgaacgattcggttctttcccaattttcaagtttccttgatgaggggaaaaagagaacatgttgggtgatgattgactgctcaaggcgtctgaaaaatgcacattggaagatttgctttttgaacaagggcggcaacaatggacagcagtggtacgatgttaagctgcaggctgtttgcttcttcgtcaattttattttgtcctttccgaggttatgtttcaactgatggaaaatagaaggaaatgaaattgaatgatattagtccccattgttgaaattgttcataacatgatggaattgaacttgatggaatttattccatttctttttatccaatgctcttaccccctaatttgggtatatggtagaactattttattgtttgtcaagcaatctccttaccattctgtttgctttaatgaaatgaaaagttctattacgc

SEQ ID NO: 100537 - DNA, 307 bp, Glycine max
  unsure (1)..(307): unsure at all n locations
  Clone ID: PAT_MRT3847_6179C.1
cagtacttaaacacacattactctctcagtttctctctcttcttactctctcnccaaaccttacatgcacaaagttgtgttgtgttctaatggaaactgcttgcttagactaatcaaccaagtttgcattccagtaaccaaaactctcttcttttttttcccccttcttctgggtggcaagtcaacatgcaaaacaaattttttnggtggtggtggttgagtccaaaaaactgcttttgtgatattgggcgtgaaggggtagagacgaganagcngagttgttggatnccatcctgnagncagatgc

SEQ ID NO: 100538 - DNA, 497 bp, Glycine max
  Clone ID: PAT_MRT3847_617C.1
atcgtaataaacatgatcttttttcacattgaataatatttgtcgggagtggggtttgtaacaaaagaaacaaccattaccatcatttaccggttgcggacggaattgagattgggaacaacaataataataaataaatcatgcttgaaaaggattcgataacaaaaatctcagtccatatttattgcttccacgctttctttccacggaactgtttgccagatcgctgatttttcctctttttctctatccgagttcttgataccttatctctaaccaatgccaacctttcatccttgttcaactttttccttatgtgagcttcaagcatggtaccatccactcgctttagatttagttgaccagagcttggaaccttagttgcagctgacttcgctagcccttgctgagccaacgcattttttgcctcactttttgccttcagtcttttgatcctcttgaagtccttcgtagaaagatttccgtcgttagattct

SEQ ID NO: 100539 - DNA, 263 bp, Glycine max
  Clone ID: PAT_MRT3847_61800C.1
tagggaattctgatccacattctgtccctggtggactcaagaagagtctttcacaggacagttaaaactatagcttgcaaaaagggttcactagcaaccattgcaatggcctcaacctcttctgctctcacgatatcctcttcttccatccttcttgatggtaaggttccaagacagtcacgagctggttcctctcaatgcgtgagcctctcccctccccctttggactctcagaaccgttcatgcgagaccactgcttattg

SEQ ID NO: 100540 - DNA, 649 bp, Glycine max
  Clone ID: PAT_MRT3847_61801C.1
atcggctcgtttattttattgaagttatttatttggttatgaacattatttaactccatttgtctgtcactgcggtttgaggcaggtgaagtaggttggtcttaccaagttgtaatgtcttggaacaaaattgaggtgacaaaagtaaacagtccttcattttggtatcaaagcgatgagtacaatggaaaaaactagcagctcacatacagggaccaataggtacggggataaactaaccgccccactaaatccatttttaaaggctatatatagcctttggcttccaatttttcttcacattcaccatcgaaagcgtcgctattgggctgtagtgaaccgcaatacaatgaaaggagaggcttagacaaaggtggtaaaaaaaaatacttgatggctcaaaccaccctcctataccctccaaatgcccatatctttatgtttgtatcccaacttcctgtacacaaggcacttccatcagctgacaaacctaaacagctgatcctgtcctcgtgagtgttttgaagagatcctaaattcaagaccacctttgccaacaaagtgtcccaaacatagcaatcaccatttgtatatccagcaaaaagaagtcttccagatatggagaatgcaatggaggtcacatgtgcag

SEQ ID NO: 100541 - DNA, 292 bp, Glycine max
  unsure (1)..(292): unsure at all n locations
  Clone ID: PAT_MRT3847_61802C.1
gtcttcttcttgatacccattacacggttgttgcttttgaatagcgctcgtcctctgtcgtcatatcgnaaaagccgaggttttgaccacgcgctgtagctcccatttcaaaactagggtaaagctcaggattgctccttcagcgtcataacttcgtgtaaccccacgtgctcaagttctcggtcctcttggtctccatctcgcgcaactccgatcttcctgatctcttgagctacaacactacacagcatgtctgcaaagtcggtgcaagggcctggcggcaagaagcccg

SEQ ID NO: 100542 - DNA, 496 bp, Glycine max
  Clone ID: PAT_MRT3847_61803C.1
ccacgcgtccgaaagttaagggtgttttgtattatattgtcttttggtggttatggcttcgttttggttgggtagatgaacaactctagacggagaaaacaaagtcacattcgtttttgagttttatattttttttcttctggtctttaggcttgtgcaatgccaaaaaatatacacatttttattagtaatggtatgacatattcatgcatttctctatttcaactaaagtttggagccggagaagcttttcagtcagaaaatttggaaatgaagacctcaaacataagttagttcagtttttggttcagcgagatccaccaaaaaaaagatttgattttgcagttcatgttacatcttattgttaggacaaacctctgatcaaaagagtcaaatttggtaattgaattagaggaatttgcaaggcctaagaaggggggggggtgtgggtgttaaaatacacattttcctctacattttatatccttatatttat

SEQ ID NO: 100543 - DNA, 398 bp, Glycine max
  Clone ID: PAT_MRT3847_61804C.1
ggggggccaaccaaaaataaatttttgaaccgcccttaactgggttttgggtgggttttaaagaccttaccggacattggacataacaataaattatttggctttaatgggggccccagggacccttttatgagtgggggaacagccccattcccatgtgttttttctggaaaacaccctaaaatttttgggaaaccaagtttttcctttcatgggtgtggctttcaaaatattcccctggcttttttccaccgcttggtttggttcttttggtctttcccaaactttggttataaagggttgggttaacccacttcaaacaagggcttgtttgggtggccacacacttttcacattcttgataataagagttttgaaacccgaaaaggcttttttgg

SEQ ID NO: 100544 - DNA, 430 bp, Glycine max
  Clone ID: PAT_MRT3847_61805C.1
cgtaagctcattcggcggcacggtgaatcttataggggtctgaaggtgctaacagagtcggattctctccatatttagtggaatttgcttactctttatcagcaacttaagttactcattgctgtcacgaaaaaaagaaaagaaaaggaaaacatcactttggaaatgtgtcaatccaatgaaggtatgatgcatggccatataagtagggagttatacgcctgcaacttgaaattgtttgttctctactttgactatgcatcaattataccacaaaagattgagaaggtagatattctctattgcaaatcaatctttagcttcaacacaatgtaagctacttccccaactgaaaaataatgatgatagttttattcatgaatcgagatcaaatactgttgctgagttcctctgtgaagatgtgtccgta

SEQ ID NO: 100545 - DNA, 882 bp, Glycine max
  Clone ID: PAT_MRT3847_61806C.1
ctcgattttacaatcagaaattggagagcagaaagaaagggccttggcagcagcagctaccgaacttgaaagatttttcaagaaggaagacttcagcagaatgaaggtgattgggcaattcaatcttggatttatcatttgtaaattggatcaagatttattcattgtggaccagcatgctgctgatgagaagtataattttgagcgtttatcacagtcaaccatcttgaaccaacaacctcttcttaggccaataaaattggagttatcccctgaagaagaaatagttgcttcgatgcacatggacataatcaggaagaatggatttaccttggaagaggatccaaatgcaccgcctggatgccgttttaaattaaagtctgtccccttcagtaaaaacactatgtttggaattgaagatgttaaggagctgatctctatcttgtctgatggtgatggtcatgtggaatgttccatagttggtagctataaactggacacctcagattctgtttgcccttcaagagttcgtgcaatgttggcatcacgagcatgtcgatcatctattatggttggtgatgcacttggaagaaatgaaatgcagaagatacttgagcatatggctgagctgaaatccccatggaattgtccccatggcagaccaaccatgcgccatttagtcgacttaacaaaaattcacaagagctatgaacttacaatgcagatgtaattaataatggacttttttccctaatccccatcgttaacttagaagttcagggaattatgtaacttttttgtacgaatgcctgtaaaaatatttgttctcaaatgttactataaatttaatttaatgagcctagatatcttgactgtctttcc

SEQ ID NO: 100546 - DNA, 361 bp, Glycine max
  Clone ID: PAT_MRT3847_61807C.1
ctcacgcgtccgttgaaaccaaaatctccaatactagacatgtcaactctaatccggagatggcaatcatatcatacacactatactacttctatgattctggttgaatcctacatactgttaacactcatgaataaccattctgtagagccacgaatccggtctagattctcaactatcagaagagcatgagaaccttctacagcagcgataatgggaattccaattccaattcccattttatctccggtcatgtcgccgtttattgctgctgcggatgagaacaccaacacaaataacatcaacaacaatgggaagacaaagtcaccgaatttgcgcggtagcaacgacgacggaatgc

SEQ ID NO: 100547 - DNA, 166 bp, Glycine max
  Clone ID: PAT_MRT3847_61808C.1
tcggtaccgagggaatcctaattatttgtctatctcgaaccacctgcgattctatctgcctgagatctttccaaatctcaacaaagtgttgtttttgtatgatgatatatttgtgcagaatgatcttgctgatctgtggtcaattgatttgcaaggcaccctaaat

SEQ ID NO: 100548 - DNA, 734 bp, Glycine max
  Clone ID: PAT_MRT3847_61809C.1
attcaaaaacgcataatttataattaatatatattcattaaagttttatctcactaatttacctaataaaaacttactaattagataaaactttctaactagataacatcaccaagaatcccctaaaatggttacatctaaattttgtagtagtaaggcactgctattttctttgaatggaaatgaggattacgaatataatttgactattttaatgatattcggtgcattgactattgttaaggaaaagtttgggttgaccaaaccattgattttttgcgactgtaattttattcgtgcgtgtgtcattgatgacgtgagtttcattgttgctgtctaatttgtcgtctagcgtaaactcaagaaacttcttggttcttaatatttgcgcgttacgtgcccaacttgttagtgtgcaaattatgcatgagaattatatttgctggatatcacaaaacaacttagttgcttgaaacagtggtgactgacgccgaagttatattagcttattgtatattcacaatttggtgttggctttttattcggtattaattattatattaccaacaagtagtatttagaaagttgagatgtcaaatgtgtgataattaggtattcagtagctatgtcaagaaggaagtagatgtaaaatatggtattagctagtattaagtattaaccatccatatcatgacacaaggtttagtgcgtttgtttattagataaaaagtaga

SEQ ID NO: 100549 - DNA, 411 bp, Glycine max
  Clone ID: PAT_MRT3847_6180C.1
gctcatgctagtatgcaacgaagcatgatatttcattgtgtacagtaccacttgattaccgccttagcgcgtaatgagcactctatctacactgagatggcatatcacctcaatcctagcatatcagatcactcgttatagaacaccttctctcaggccatgggacgagtaaaatgagactaatcagatggccccagggccaacacccttgaattgagagtttaccatgcaaactttttaatagcgtcgtatagaccttctcagacgaggaatctgaatgcacaatactgaacaccggatcacacttatagcaagagtatcacattctctactcgctctgagaagatgctcggaacaaaggctgtgcattggcttacagtgggatgcatcagagcgcacattgcagacgga

SEQ ID NO: 100550 - DNA, 312 bp, Glycine max
  Clone ID: PAT_MRT3847_61810C.1
ggggcggctttccatttttttggccggcgctttccccaaatttaaaaaccctggttttttttggctttctccccccccggtggaggcctctcccccctctttttgtgggggcgcgccccacaaattttgccccccttgtgggtttgttttctcacaaccggggtgcccctgggggttttttttcactaaaatgggttttttccccctaattttttttaagactaaaaccttccccctttttttttttaaagggggtgatttttaattccccttttcctcccttgggtataaaaaattttttttcccttgggg

SEQ ID NO: 100551 - DNA, 407 bp, Glycine max
  Clone ID: PAT_MRT3847_61811C.1
gttgttgataaaattaatgtatgaagttattttccctaataatgaactggggctaatgtctgaaggtagtataagtatgttttctatcgaccacagttgaagggcttttggagcaagcgaaaatgtccaagggaacaccttctgctggggggtaaagtggatagaagcttttttggttaataatatggtttgctattctactcaagcgatctatgggtttttcatttgctgcagtttatgattttctctccccaatatatttgttttataatatataactgtggagtatccaaacctaacctttttttggcttaatgaattcaggattacttgaaattgaatatttgagaattcatgtacaaatggaggttagagaaaaacaaaattatgggttggtatcttcgttt

SEQ ID NO: 100552 - DNA, 243 bp, Glycine max
  Clone ID: PAT_MRT3847_61812C.1
ctgccggttcttcaatcttctagagagagagagagagagagagagagagatggcgttgaatcctcaactgtttccatatggaatgcccgttcctctcgtgaacgagatgtttgtgttggactgagacggtgtcgaattcgctgtctataagattcctgcctctggcactcatgggggtaatctcaaaacaaagggcatcgtgtatgtgtcgtatattcggctggtcttcgttgcgaaaagtcc

SEQ ID NO: 100553 - DNA, 251 bp, Glycine max
  Clone ID: PAT_MRT3847_61813C.1
gagagctcgaggaccaaagctctcacagacgtactgtgctagctgtccgatgtccacaccaacggcgtttacatgcgatgggaactctctcacaccttacggctgatagttcgtgacaactactgtgtgtgaacacaccttgacctcacatgcgttttgacacacccttggtcgtccaccaagatcatagacttgatgattattcttcgctagggaaactggtatcaattcacgatggattgtgtcctgat

SEQ ID NO: 100554 - DNA, 224 bp, Glycine max
  Clone ID: PAT_MRT3847_61814C.1
tttttacaaggcccacgaagcagtgtgtcagtacgtaaaattgaaacatttataaaatcctgacggctctaatattgaaacacatgccgcgtgacaataaacgccttactggaccttagattacagaatccatggtaacacacccaacaccgctaatggaggtagcccaacacactaaatggctggaagaaacccttagagaaaatcacgaaggcaccaggcct

SEQ ID NO: 100555 - DNA, 1202 bp, Glycine max
  Clone ID: PAT_MRT3847_61815C.1
tacggctgcgagaagacgacagaaggatagtcatcatacttatgatgattataactcctctctttctttctcaactctcacaacacaagaagatggcttctatctcacagggccttcttctcaccactgccatgcttctctccaccaccctgctttatgttgctttctccaggccttcatttcaaattcaccactctaacaaacccaccttgcgctcttgcttgtattcagaggaaaagaaaagggagagaaagaagaagaaaaagaagaaagtgaaatttgcagatagtgtgaaggatggaagagaaaggaatgagcaaagaagcaactgcagaagacaaagtggtggaatgccattgccagcaaacagaatggctttgtataacgggattctgagggaccgagtgcatagaatggagtgctcttactaattaaggataaaacgtagaacatagaaccctgttctgttctgttctgttacgtacgtgctgtagtgtacatttgtgttaggactgagctgatcaagctctctcattctctctctctctctctctctctctgaattttcaaatataattttgtgttggctgttaatacttcttacaatgcaaaaaaaaatgaaaaagaaaagatatatgtggtattcttgtggttgtagatacacaatggattttgtccaactccttaatatgaaatattgggcaaagttttgttttcttcctaaacaatccacttccacccactttcaacatatgtattgcagattgataaattttgcttgagatatattgattaatcagttagttaccaagacaagaaaattagatatgtctgttttttctatcaccccattcagcaaacaacatcaataaaataccctataaaaacaataattaattaacttcaaatttatatatatatatatttttataaaaataagatttaaatgttatagaaaaaaaatagtaattaattaagagtattatagaaaaaaatgagcaaattccttctcctatatatagtgtaattatgcaagcaaatcttacttttttaaccattacttttgtctttcttataggaagtgttaacataaggtttgagggcgcgattcaggaaaacaaaaggtttgacaggtatcttagggtatgttgttatttgcttaaaagttattaatgtaccaaataatacaaatagagtattat

SEQ ID NO: 100556 - DNA, 864 bp, Glycine max
  unsure (1)..(864): unsure at all n locations
  Clone ID: PAT_MRT3847_61816C.1
tttttttttttttttttttttttttttttttttttttttttttttttttttttttttttttttttttaatgaaagctataactattaacttctcactcgaaaaagctcttctggaatgtggtacaaaacgcactaataataaaacaggtcaatcaaacaagttcttttatttttataattttttgagaactgaagttttttaaaatagtaagaacactcccttnaattcttttctgattcagaaaactagcaatccagcacagtaaatcacgcgtaaaaggataaaggtgatagatagaacctgtgaaagcatatcgataacacatacaagaatcagcgagcaatgcatcaaatacatctatattcagccactgaaatgatgcttttagtaaagcctcaagaaaagatttaaactcccaaccatgatttagctgcatgtgaactgttaatcgaactctaagccggaaaggaccatccacccacaccattaattgaagcatgtaataagtaatttgtagcctaaaccctacaagaacagaagtcacatttgtgttgaggcttgacatctgaaaaacagcgtaaaattaacaagcttctgctgccaccaccaaagttcacagcttagactcttttccttcaactttgttggtttgctgtagaaaaagatttctatgtatgcacagtagacagcataaagaaaagtctttgcactgaatttcaaacctgcaccaaagaaagattcacacaggagccaaatattgatcattattcagaaaaacactctttacatattaggaaaacattaaatagatagactgaagaaatgttcacattgggttttcaccaaatgtgacaaaatatttg

SEQ ID NO: 100557 - DNA, 414 bp, Glycine max
  unsure (1)..(414): unsure at all n locations
  Clone ID: PAT_MRT3847_61817C.1
ggggggtttttttttttttttttttttttttttttttttttttttttttttttttttgttttttttttttttttatactttttgcctggctgtatgtgttcaaaaaaggacacaggggaaaacaaacaaggattttaaaaaaaaacggacagcggctacgggggggggccccaaaaaagccccaacaacgccaaaaaaaggagaaaagggcacggaggaccaaaaaagaaccaaccagttccgaaaaataaaaaacctttcacacccggaacccacnggccgcccaaggccaaaccaacccggggaaggcccacgagggaggcctccgccgcccttccggtcaccggggcggggggccggccggccaaggaaggaaaaaggggggcccgggaggccacgagcggaccccccaat

SEQ ID NO: 100558 - DNA, 879 bp, Glycine max
  Clone ID: PAT_MRT3847_61818C.1
tttcagtatgaatcaaaaaaatcatcaatcatctttgaatcatctatctttcaatcttttttttcaacatcatttttcaaacatctttcaatcaatctttcaatatctttctacaaaattttttgattcatttctcttaatctttctaaaagttttttatcaacactttctcttccaagaaaagttctttgttcaaaaacttatgctattcatctttttcattctcttctcccttttccaaaagaacgaagaactaaccgcctgaattcttttgtgtctctcttctccctttgccaaaagaacgaaggactaaccgcctaaattattttgtgtctctcttatcccttacaaaagattcaaaggactaaccgcctaagaattcttttgattattcccttccccttaagcaaaatatttcaaaggactaaccgcctgagatatcttttgtttccccttacgaagattcaaaggactaaccgcctgagaattctttgtcccaacacattagagggtacatcctttgtggtacaagtagagggtacatctacttggggattgttatactgagaacaagagagggtacatctcttgtggatcagttcaagtggagggtacatccacttggttattcaaagagaacaagggagggtacatcccttgtggatctttggcttgtaaaggattttacaaggttgaaagaaatctcaagaaccacaggttgcatggggactgaatgtaggcacggtttgttgctgaaccagtataaatcttgagtttttcttcttcttccctactcttttagtttccgctgtgcactttaatttcccgcatttacttttggttagtattgttttctactccttatttacttaacaacat

SEQ ID NO: 100559 - DNA, 208 bp, Glycine max
  Clone ID: PAT_MRT3847_61819C.1
ctagtcttcggccgcgcgttttttttctttttttttcgatataacccttctgtagaacttaagagtaacaaggtgtgcccctgctgcaagttacatggcatgaaacagatgatgtcagggatgcgggcgactactgccacgccaataagttgcatgatgattcaggtgtgccctatccgtaaataaaataatgatgtctcctctcata

SEQ ID NO: 100560 - DNA, 590 bp, Glycine max
  Clone ID: PAT_MRT3847_6181C.1
ggctcgagatatcatcgaatagtatcttccacattatacacatgaaaatttaaatagaaagttggaaggttggaaggccagcaaggattcaaagcttacctccctgcataaaaggaactgcagctcaatttcgtcagggaagaaaattccctgacacatatcttacaaaggtgaatcatgccaagaatatttgaaattacgcaacaagatctcccttcaatcatcaaaagttgtaattcatccaactacggcatctgagaagtcaaaatcaactagaatgaatattaacaactctcagctcctttgcaagaccttttatgggttattacaatatcaggcaaaatgtgtaatccagattcactttccaaccttaattggagagagagagactgagcgatgatatacccaaagtagcacagcagctggattatatctggagcaaggcagacaacaatcagttgaccacattcacatcagtatcaagtttttcttgaaaacctcatacaataatgtggataatacctggatgaagccactggagaaaaccacttgactaaacccattgaagtacatatctgaaaacacaaaat

SEQ ID NO: 100561 - DNA, 319 bp, Glycine max
  Clone ID: PAT_MRT3847_61820C.1
acttaaataaaaccctgaatttcacactaccacaacaaagaaggcaaaacaacaacgctaagatcccaaagggacagccgcaactcgcaacaccggaagagtataaaaggaaagaggaaaacagaaaaaaccatgggcaacataaaaaagccagaccaacaaaggccaggacaaaccaaagccgaaaccagcaaggaggggaaaccgaataatggcccccggccacttaaaagggctagcatggccccagagacaagcatggacgaaaatacatggacagagccccgggaatcctgaacagaggtgaccacagtgacat

SEQ ID NO: 100562 - DNA, 538 bp, Glycine max
  unsure (1)..(538): unsure at all n locations
  Clone ID: PAT_MRT3847_61821C.1
tacggctgcgagaagacgacagaagggatacggctgcgagaagacgacagaagggtacggctgcgagagacgacagaagggcgatagaacattgcttttggactgcttaccctcagtgccactccttgcatcccttttccaccagccgatgcaatcactgagttctgcaaccatgcacccaaagattggcatttgacatagtccaaaatgcacatgtcttgtgttggaattggatttagtgcattcacctttccacatattcagtaaatttataaccattgaatgaaaattggactgacttagatttttaaatgtgttttaagttgattgactgagagaaaatgagtcgtctaaggctgaatggtcattttggtatctgaaagtgtatagtgattctaagtaagtccctgaattcaagtaagttttaaaaaaaatccctgaaaataacttcttacatttacataatttgttagtttcaaatgttatcattaaaatgcagtttatcccttatatgtagggactttgcattntaatgata

SEQ ID NO: 100563 - DNA, 638 bp, Glycine max
  Clone ID: PAT_MRT3847_61822C.1
acgagcccgaaccttctcaccttcctatctctcctcccaatttttccgaatcaggaaacggcgaagaacacttgacgcagtcaaacggcagatctgggccctgaaattggaacttttacccacaaccccgaccccaaccccaacctttaattttgcccttcgaaaggtgtaactgtcgacgacgatggtttggtcgcgaaaaagggctcctgaagtttgattctttgagtgaggaacacgggaagattgccgaggagagtgaagaagttagggatctgaagaccaacgaagaaatcggtgatttgaataccggcgaagtagagaggaaacgacgtagtttatatgacttaccagagaagaacggaaagaagaagaagagaatcgaccacgacggtgatggtagtgagaagaagcctaacgaatctgccaccaataagagaaagaccgagaaggaacgacgagatactctgaaacagcttcgagcggagtctcataggcttcttcgagaaactagagatgcagcttttaaacctgctcctctggttcagaagccaatttcttcgatcttggagaaaattcggcagaggaaattggagattttacagaaatctgctgataatgtagaaaaggctgggcca

SEQ ID NO: 100564 - DNA, 607 bp, Glycine max
  unsure (1)..(607): unsure at all n locations
  Clone ID: PAT_MRT3847_61823C.1
aggaatcggccagacaaaattggtcttttggccctctttcactaaaaataaccctgggaaaccggaatcaaaaaggttaataatatgcctgaaaccataaaaacgagggcccaaggatttattaccaaaggtggaacaaccaagggaaagttcttttaaaaagataagccttcggtaaaagggcaaattttcctaaaacaaccctttttggaatttaatccaaggaagtttaacaaaggtctccccatttttggagaagggaaatctcccattacggggaacacatatttttggaaaggttttaacggtaccggtgaaggcatcaataaaaaccctaagctcaaaggcaccctcaacataaaccggaaaagttttaaagaagtggtggaccggataaggccctaagatatcattatgcccaggaatcctaaggccttgggcaaggtttgggaaaacccttgggccctggaatctctgggcaaacatggcccctgnnncaactggaaagaagggtatattttntcgggcccaaattctggaagccgggggaacncctaagnnnaaaacgggcgnnnnnnnnnnnnngctccngcttttggttccttta

SEQ ID NO: 100565 - DNA, 805 bp, Glycine max
  Clone ID: PAT_MRT3847_61824C.1
tacggctgcgagaagacgacagaaggggaggtttgtgatagtgattgcctccctctgctgccgtccctaatctgaaggctcccgccatctgcgatcggatttcatggctcctaagaaagacaaggctcccccaccttcatccaagcccgccaagtctggtggtgggaagcagaagaagaagaagtggagcaagggaaagcaaaaggagaaggtgaataaccaggtgctgttcgatcaggctacctatgacaagctcctctccgaggcacccaaatacaaactcattactccttccattctctctgaccgtttgaggattaatggatcacttgcaaggaaggctattagggaattgatggccagaggttcaataaggatggtgtctgcccatgctagtcagcagatttacactagagcgacaaacacctagatgtactggttataatttatgtagtattgatgcaccgctgaagtgaaattttgttttttctgtttgagacatacctcatgctagattgcatcagtttgacggttgctaaattcatgggttatttccttttgcatccttggtaatatatttgacacaaggctttcatatttgttgtttttggcgttatgcaagcatgttattccgttaggtgaagctagccttcacagatagatttggatattttaactgcatgtctggtaacctataatccgtttgaaacgtgatgttccgctacactgaaaaaaaacattaagcgcaaagagtgtggagaatacacacaaaagagaccgatacactagccaacgcaataacacg

SEQ ID NO: 100566 - DNA, 249 bp, Glycine max
  Clone ID: PAT_MRT3847_61825C.1
gtcgatttgctgtagcgttgcctctggtttaagttgtcataacacagccgctaaagtcgcagctgatcgttagatctgaaggattcttgataatggttcacgttatgatgacgcctgaatcggcgggcatctatctcatggtggcagtagtgttggcatacttcaaggcaagtttgatactaattttgacatatacataatctgccaacttcgaccaccagtactctgagttcagcatcagaagtttcg

SEQ ID NO: 100567 - DNA, 2390 bp, Glycine max
  Clone ID: PAT_MRT3847_61826C.1
ttcccacgcgtccgcccacgcgtccgtacggctgcgagaagacgacagaaggggccactcactctgtttactctatcacaatcttattatactactatcttcttctttctctctttttttcttctaatatttaattatcaaaatttgtttttatagatgatataaaaattcgttttttgtgttgacgacttgcattattgcatatacataggcagcacaaaatccttttgttgagtcagtgagagaaagagagagagagggtgtcagtgatgcccttttgcttgatccctcatttgtcaagataataagaagagggtacatatcttggtggtgatttgatacacaagaagaatgttgggtcgggctgcattttcccgaactgggagtttcaggcctgagaatttaggtcagaatgccatggccatgattgggaacgtttgcttctcattttttgttattggggttttggttttcaccattatggctgccacttatgaacctgaggatcccttatttcacccttcaaccaagatcaccacattcctcacttccaaatccaatgcaactttcaagtctgataacagtgttgtgagaactggggaggatttcatggctgctaatgaaactgcgtttggctccattatcaactcaactgatgttgacaacttggctagtgcggaaattattgatgccggcgatgcagctgcggctactcagtgtgatgtgagtggccctattgattgtaaggaccctgaggtatttcatttgatgatgagggcaacaattgacaagtttcaggacatccatttttaccgatttgggaagccggctcccggttccaatgacagcacttgtgatatggcgtggcggtttaggccgaatcaaggaaaggctgctgcatttgacggttcgtggttccaatgaaagcatttttgatctggcgtggcggtttagagtgatgttagggaaggctgctgcgttttataaggataataggagatttgtgattgataggtctgcgaattgttcacttagtgttgttagcattggggagtaccatactggtgtcaatgcaaggaagaggaagaagcatcagaaagctgggttagagaagacgccactggatatgtaccaggcgaacacgttacctgttgttggagagattgttaatgacagcctccctgtggttgagtctgaaagttcgtttagtcatggcaaatacttgctttatgagggcggcggatacaggtgcaagagcatgaatcattacttgtggagtttcttgtgtgctcttggggaagctcagtacctgaaccgaacattgattatggatttgagcatatgtctgtcttcgatatacacatcatcgaagcaggatgaggagggaaaagatttcaggttctactttgattttgagcatttaaaggaggcggcgtctgtattggacaaggagcagttttgggcagattggaaccaatggcaacaaaaagatgggatgagtcttcatcttgtggaggatttcagggtcacgcccatgaagcttatggatgtgaaggatgccttgatcatgaggaagtttggatctgtcgagccggataactactggtatagagtctgtgaaggagagacagaatctgttgtgcaaaggccgtggcatttgttatggaaatcaaggcggttgatggatatagtgtctgcaatatcttcaaagttgaactgggactatgattctgttcatgttgtgaggggggaaaaggcaaggaacaaggagctttggccaaatcttgatgcacacacctcccctgatgcgcttctctcaaccttgcgcgacaagattgacgaaggaaggaacctctacattgcaacaaatgaacctgatacatctttctttgaccctctgaaagataagtataccactcattttcttgatgagtacacggagctttgggatgaaaatagtgaatggtactctgagacaacaaaactcaataatggcattccagttgaattcgatggttacatgagagtgtccattgatacagaagtgttctttagaggtaaaaagcagcttgaaactttcaatgatttgaccagtgattgcaaggatggtattaatacctgtaatgttgcagcaaactaatgtgagatttggaactgcaatgcttgatatattgaaatatactctcatagtctcatgtacttttagctgttatatgtgttgcatttgagaatttgtatcctttagccttagcagtgaggagtaaaattgttatacttttgtattgtaagagtagtgactacttggaagttttgatgttcttaatttaaatttggttcgttcataaaaaaattatcccttgtggacgactgaaacaaaactgcttattctg

SEQ ID NO: 100568 - DNA, 484 bp, Glycine max
  Clone ID: PAT_MRT3847_61827C.1
ttcggtaagagcaacaacaattaacatacatttagtgagagaatcaaacatcaaccaaccatgtctgatattgccatgttggtagccgaagaatatgagagaaggacaaagcattataggaagggtggtgctggcgctgtacaagagaggaatttgaacgtggtttcttgtgctaattcttttttggttctgaaggagaagattgaggtgcagaagaaggagcttgtcaagtgggttttggaacccaaaacccaatttgcaattgctgcttctaacagtttattctctgcttgatcgaacaagttcagctttctggttgcaatagttattggctgttggcaccttattgttttattatttttccttttgtaatctatatttagttatattttgaattaaaggtaactttgttccacgttcaaaatcttcggtgactcttttatatgtacttggatgcttataaatatcgaaaatgtttgatatt

SEQ ID NO: 100569 - DNA, 205 bp, Glycine max
  Clone ID: PAT_MRT3847_61828C.1
ccacgcgtccgatcacttgacaaggagaaatactatgcttgaactgggttggctttactcgtcttcactcgcgtagcataaaacaactatcaagtatctgatttgcctgctggctctgcgtgcgacgaacacaacagctgagatactgcattgatggagcacgtgagggtggtagtgcaaagaaacaagggtttctgcaccgtga

SEQ ID NO: 100570 - DNA, 967 bp, Glycine max
  Clone ID: PAT_MRT3847_61829C.1
agcacgcgtcagcctcatctcttgcataggttccctgtgaaaatacctagagcatctgagtcaccttcttggatcaaaccgaattgatccttaccgaactacctttcagtcaagctgacattatcactttcaaacagctatgataaatgctcactgtatcatttgataccacactgatcggaacacaccaagccccaacagcaactacaagatctagttcaaccacaatcatcatcatccaagaacttcaacatccctccaatgaaaacaacaccaaagaagcagcaagggttcaagctctatgagaggaggaacaacaacaaccatctcaagaacaccctcatgatcaacaccttggtccccaattttgcacacagctcaggattctcctcctccccatcatcaccctgcaacaagccagagatcctctctccaagcttgcttgacttcccttccctcactctcagcagcccagtcactcctttgaatgatgacccttttgacaagtcctcctcattaccttcattgggaagcacttcttcagaggaagagagagccatagctgaaaaagggttctacttgcatccctctcccatgtctactccaagagactttgagcctcagctcttgcctttgttccctgtgacttcacctagagtttctgagtcaactacttgatgaaattcaaacccgaaccggaaaacatattggtttgtatcatcatcagcatcaagctatgattttagagaatgattatcatttgattttcaattaaaagttaacatagcttgctcaaattgtaaactttgtttccttccatgaaaatgaatatgattccctctttttcttccttccaccttagaatagtgctactattacagtctctttctcctcttaactagatgagttctttttgtttttaattttgtatttgtctcttcatgttccaatttctgttactaaacca

SEQ ID NO: 100571 - DNA, 940 bp, Glycine max
  Clone ID: PAT_MRT3847_6182C.1
ttgatgttgaagctgggatctttgctctccatgcatggatgttaccaacatcttaaaaaagctagtggtgataaggttggaaatgtagatggagatgcagaacaaggaatttatgatgcttctacacccccacagggttctaatccatcaaaccatgagaaaggtttaggagctccacaagaacatcttgttcgccaacctgcaagcacctggggttatatctttcaaatattattccagatgattgcaggcgctgtaatgctcacagattgtgtgttttggttcataattgttccgttcctaaccatcaaagattacaacataaatttgctaataatcagtatgcacaccatcaatgctgttttcctaataggcgatacggctttaaactccttgaggttcccttggtttcgaataggatacttttgcatgtggacaatcacatacgtcatattccagtggattgttcatgctatagttaaactctggtggccatatccatttcttgatttgtcatccccttatgctccattatgttacttttccatggcattactgcatattccgtgctatggcatattcgctttgataatgaagctgaaacacagcgtgttgtcgacgcggtaccctgactcgtacctatgtgacacataaacgggcttcaattttcagaagaacaacaattttctggtagaaaaagggaaggggagtagtagtaagaaaatagtaaaaaaatattatattgagaagtttggattcatatattgaggtgcacaaatatacagcaaaccaaagtatatagttttcttttttctttcttttttggaaaattaatggttgaacaggcaaggagaatttttgtcgttactttctgtcggcatgtatgtaatgtaatagaccatgaattctaagaactataatccgagtgcattgatttatt

SEQ ID NO: 100572 - DNA, 560 bp, Glycine max
  Clone ID: PAT_MRT3847_61830C.1
ctgcttcatacattcatatggtgcagcacatgattgagaagtgtttgatctttcacatgtcaaaggaagaatgcatggaagctctctccaagcatgcaaatattaagcctgtcataacatccactgtgtggaacgagctagagaaagaaaacaaggagttttttgaggagtatgccaaagccaagagtaaggacgaacgaatgtcggaggaagagacaagccaaatgatacagaagatgatctcagattcctctaaaggtgctggcaacgactaatcaatcacagccattgaaaacgatctcacctctgtgtgtgtgtgtgtgtgtgttttgctcgctacaccttcactaccatgcatggggttcattttcctcacactcccatttgcaataagccaaaacacacacttgtacaccttctctttcactctagctacgttactatcataagtggtccttaattcaagtttccaatgcatgcatggatatttcttatatattgttaaattaatatatgttgttaaatactataatgtctataatatattcagtaacgttctc

SEQ ID NO: 100573 - DNA, 429 bp, Glycine max
  Clone ID: PAT_MRT3847_61831C.1
ggaaaacaggggattaataaacctgggggcatttttattcccattataatcatgattaacctttttaatacatttttatttcgttcccccttagataaagaactagaagatccttttgccccaacaacgttcaccccataatagggggtactaccgggatcttgagggggatcttaaccaccatattgggggggggtttaaaaaacctgggcatcacccccatttgcttcattttcaggagaaaattttttttcagggggaaaattaagatcattgctgggaacaattttattggtatcctttttggaaaaggggtttttggggttatgcatccaaaccttgaaaacgcttttatcaacgccaactttggggcaaatttcgggaaaaaaaacctcggggggcttttgaattttccaccctactttcctt

SEQ ID NO: 100574 - DNA, 318 bp, Glycine max
  Clone ID: PAT_MRT3847_61832C.1
gcggccacacctaccttcatatgaaactccatatcgacttttgcgacatgaccactaatcttggggtcagcagcacataacagagaggactacactaaaacgccatgaactatcatcatgtcatttatcttcatacccctactataaccctcgacacctatcctgctctaagactgaagccttacaatgacacccgtcatcttacatccctctttatagaccatatctgtcactatcatcaatctcatgataatatttattgacaacatgccatcaataacttctatcatcctagctacacttctcatggatttattc

SEQ ID NO: 100575 - DNA, 471 bp, Glycine max
  Clone ID: PAT_MRT3847_61833C.1
tctcattctcacagggcatcatgttgaagttctttagtgttaaaaaactaaatgagtagttgggaatcaaaaccttcatctgtagataagacttgcttgtgaagaaatatgcatgctatctccaaaaactatgaatctttttatgtagtttgaggccatttttggtataaaattgtttgcctatgaacaaagatgttatactaaccctcacactagcatggtttttattatgtgcttaacttctgagatcaggggaggcgccatgtgcgccaagggttgttggtcagaggaagtagtactataagatgcgagaggcaaatgaagattccttttaaaagatgtcaatctaaattttgtattttattggaaaattgacacacttattactctttcaggagtttaagtaagtcctctcagcagaagaaacttgatgcctatgctgccatgatggtactggagagatatttctcc

SEQ ID NO: 100576 - DNA, 296 bp, Glycine max
  Clone ID: PAT_MRT3847_61834C.1
tcctgcggggagttacattttattagttctacatggtgaaacagaaacactcaggaggacacaatgagacgcgggggaggaaagatgcaagagtatactaccctctcatgcctcaggtgaaaaaacaatagctgaaggacgactactccaagttcgagctaccgaacaccgactcgagcatagtcaacgcactgcagaacacgatgatcaccgaggagccaacggtctccaaagaacccttggagatcaaggtcaaatgccctgaactcaataacgaggatatcgctcacaggctg

SEQ ID NO: 100577 - DNA, 400 bp, Glycine max
  unsure (1)..(400): unsure at all n locations
  Clone ID: PAT_MRT3847_61835C.1
gccttgggaagcttttttttttgaacaagcacacaaccaatagcttattcattagttctaaccattaatttccattgaagnccgaanncnnnnnccnnnnnnncnggaggannaaancnnaaaaagcagaaacaaatgggaatgttttttaanncggggggacaaagcggggaggcggctacaaangctaaagaaatttttcacactgagaagggtgggggcttgtaggcgatgaanctgatgcactgcacttggcgaacgttggcgaatccgatgatacggatgaagccggtgggggatgcaggcttagcctnttgaagctccttcaacacctgagaagcatcagtgcaaccaaacataggcagcttccacatggtccaggagcggccatcgtagtatc

SEQ ID NO: 100578 - DNA, 288 bp, Glycine max
  Clone ID: PAT_MRT3847_61836C.1
cttcgcataaagggggccttaaaaaagatttttaattttaaaaaaaataatgcaaacaattttcctgcccaaagaaaggtggttaagatgaacaaatgaaacatcctccgggggttttttttatttagccctattttattggcaaagaatcctaaaacgggctcccaaggggtatcaaacaaagtgcattgggaaagggggtcctttcaaagccaaaaaactgccctgggcaaccaatatttgaaaccccgccccttccttgggtttggggggaaaaaggcacacaaa

SEQ ID NO: 100579 - DNA, 272 bp, Glycine max
  Clone ID: PAT_MRT3847_61837C.1
gtataaggtggccaataagctgaaatctgaaggtcacaatgtcacaactctagacatggctgcttgtggtgtcaatccaaagcaaaggcaagaggttcattcagtttcagagtacaatgagcctttgatgacattcatggcctctcttcctccagaggaaaaggtgattctgttggtcacagtcttggtgggctatcagcatctattgccatggaaaattaccctgagaaaatctctgttgcagttttcatcactgccactgttgtctctca

SEQ ID NO: 100580 - DNA, 318 bp, Glycine max
  Clone ID: PAT_MRT3847_61838C.1
aacaccatgcactaccctaggcctcactagaggagcacgagaaaagatccactacgaccagacaatgatgacaactgatagaagggaggctaggccgcggatcagagcatgcgagatggttgtgagtctcacattgtctctccatactcaaagcagcgatagtattactaacaacaacaacactgctagcagctctcctattgcacttgcactgagcacatcacaactttggaactagacagggtctcaggcgtcttcttcctcgtgcaaacgatttcatggtgatccttaatcagggatgcaagcatgctgaagaca

SEQ ID NO: 100581 - DNA, 157 bp, Glycine max
  Clone ID: PAT_MRT3847_61839C.1
cggatacgcaaatctctctctccaatgcgcgtggtcttttcagctttccatttacggcccacactttgctccctgtgtaaagcccaacaacgacctgggcctctacctattgttcatcaacgtttctaccctatatcctttaaccgttaccaaccct

SEQ ID NO: 100582 - DNA, 195 bp, Glycine max
  Clone ID: PAT_MRT3847_6183C.1
ggcctgttttttaccatctggtgattggtgccactgcatatctgtctggaatacagaaacttgcttaatactctttttaactgtgaatgaactgaaataaatacttaccctttctggaccctgctatatcggaaaccacctaccatactgctctgtctatctaggtcgaagtggtacaccttgggggggctgtca

SEQ ID NO: 100583 - DNA, 320 bp, Glycine max
  unsure (1)..(320): unsure at all n locations
  Clone ID: PAT_MRT3847_61840C.1
actactcgctagccgcccttctttctttttttttttttncaaacataaaaacacgatcttttctgttgaggggaaaaaattacacaatcaccaaccttcatacatacatacttaccaccataaacgacttttccctaattattttcaccgctccataaaacgacatttgcgattacttataaacgtacaattaatttaattcaaaggactctccaattctgcaaataataaaaagactatactatagatgcagatcgtcttacttaaatgaacccaaaacccaaattcattggttaaacaatagtccacttttgtgcacc

SEQ ID NO: 100584 - DNA, 445 bp, Glycine max
  unsure (1)..(445): unsure at all n locations
  Clone ID: PAT_MRT3847_61841C.1
acattactgagcatcgtctagctatctcgatcgaactgtccaaggtcctgtcactgtcacttcaagtcctgtcactcctgtcactcctgtcacgggatacgaatacgacgcaaagggtccaaaaaagcctcagccgtgggtaacagcctcatcatgccaagcgcccggatacagcacgctaacaatgtcggtagccagagcaaagccaacaaccactatacagataggcggggtaacagtcatcaaccagtaacgtgtcgtattcggcagaaatgtccgccgttttattcaccatgagcagcnagtgtattcttgttggctttattcagcaggcttcagattctcaggggcatggtcatggtcgtattcggcagaatgcttctacactaccagtggtggaggctagccgtggttatactagtaaacaggacactgaacaggtgag

SEQ ID NO: 100585 - DNA, 300 bp, Glycine max
  Clone ID: PAT_MRT3847_61842C.1
gattgtgcgacacgtttttacaagtgattggtatccatacacatcatcaccactacagattactccatatttccttccacaaccctgtaatcacctgcctcattgtcacaccaccacctacaagaagactgttggctcgtcaaaaaaacagtggtcacaatatgctccaaacctacatactgcgtgtcttaaactcattgtacatcgacaatcgttgctatattccattcacgtgacatctggtaagagattttcgactgagaaactcctggcatcacggaatctcaacaagcttgcacc

SEQ ID NO: 100586 - DNA, 255 bp, Glycine max
  Clone ID: PAT_MRT3847_61843C.1
ggctcgaggtgggctcctcttggggatggaacctggaatttaaaccatcgtcacagctgtgaagatctagcacaagatagaatggtaaaacacaaaaaaaattttaagtgacagtgccatagtttggacagtacctttcaatgattaattttaatagcctgtgagtccaagtaaatgatcactttatttgctagggagggaagccctagggtggtttcagtttctcccagacatacctaaatttttacatcaatc

SEQ ID NO: 100587 - DNA, 215 bp, Glycine max
  Clone ID: PAT_MRT3847_61844C.1
atgtatccagtactgtaaagcataacacatacgctcttcaccctctcttcatacaattgataaacactgctaggcagtgacatacactaccctagctagacatactttcttactgcccatggatcggacaagcttatccttctgattgacatctccatcctgccgctggacgttaacaacaacctcatgctgctgctcacgttcatgaataagac

SEQ ID NO: 100588 - DNA, 575 bp, Glycine max
  Clone ID: PAT_MRT3847_61845C.1
accagatgttattgaagatggcatgccacaatcgggttcacaacatgttcttgagaagtatgtgtcgattgctgtgctttgttctcatccgcagttgtatgctaggccaacaatggatcaggttgttaaaatgatggagactgatgaatcggttccttcaatacctgaaaggccaatccctcttgttgctggaaggcttgatattgagagatctgtgagtagtagtggctctggtcagctctctagtccaacgggttatcgatcatatactatagaaagtgatcgccaatcttctaattctagggatgaaagaagctcaagctctaggattttgagtacagattgagattgagtgtcaggaaagtaatttgtttgtacatttagtttatagaatgctgtttttttcttgtagtgttttccgttactaaatccaaattggatgtacaaattttgattcttgctagagtttatatgatggcaagcaagagagtatgatcaagttttgctgaattaagtgtcacagtactgttgtatcagaagcaattcttcaattcattttaagaatcttcttttgc

SEQ ID NO: 100589 - DNA, 1131 bp, Glycine max
  unsure (1)..(1131): unsure at all n locations
  Clone ID: PAT_MRT3847_61846C.1
tacggctgcgagaagacgacagaaggggaaatgcgaaattgaatttaaccttaatagatggcttgtttttggagaatgttgagttcagaatcttagaattattataacattaatggttgttttagcacatgactttctgatagaaggctcgttcttttttccttagagatatagagatggtgaaaaaaggaaacattgtgcagtatcgggaaaggttggacaacacccttgccttacctgatctgacaaatgaacagatactcaaaacgcttgtcaaaagtcaactccaacgttcttcagaagtggaaattgaaggatgtaatgagaaagaagttgaaaccaagactacagagttatgcaaccttcttgatatgttgagaagtgcttctggagacaatggtggaggatctagtagtacatcacacgctgattggaaattaaaacaggataatgaagagtttcgtgttatgtatcgtgaaggaccagagggaactcccattcatacattgctagttgaaggctatgtagatgggcctctagatctttctttatgcctttcatgggagacccccctctacaagaaatggtggcctcagtttactcttcccagtttcaaagttttagtatctgatcgtttgcaaagggtccaaattggggaacaaatatcactagttataaagggatgaaggtttccatgggcactatctacaagggaggctatagtgcattattatctgtttgagtactttcaagatgacttagtagttattcttttgaatacggtctctgagtcaaaaactgataatttaaacaaggatgcaattcctgaagcaaaggatgtggtgagaattgatttagtgggaggctatgctatgcaaaaggtgacatcagaaagaagttattttcggataatagcaaatttggatttaaagctggattttctacctccaaccctcctaaatttcatttcaaggcagctcatcgngcagtggtttcaggctttatcagaaggcagtaacttctatgatgggcaatgataaagacaaagacttcagcaaggctttggaggacacgttgtatgtttagatacacgaagctctattaagcactanggaatcaaaggctatggct

SEQ ID NO: 100590 - DNA, 388 bp, Glycine max
  unsure (1)..(388): unsure at all n locations
  Clone ID: PAT_MRT3847_61847C.1
agcgcgtcggaacctgtttccctgagtggttgtttgggtaggnatccccccccccccccccctcccccgtagagtgcagtaacgaccacctaagaacaaaatacagtaaacccaatagattacagtttaaagccccaaatgataatacaaaataatatatctaaaggccccgctcaatacaaataacgccagtaaatccatgaatatatgagaccgtacccaggacaaccttcccaaaacatgaagggactcaagcagagaccccaccactacgtcgtactaactaaatggcaatagagataaactcggttactctaaatagtttacttctaactataatactatatgatcttactccattttcaacccccttcttccggggttccct

SEQ ID NO: 100591 - DNA, 1462 bp, Glycine max
  Clone ID: PAT_MRT3847_61848C.1
ccttgcttatgagtacttgtctaatggctccttggataaatggatattcaagaaaaacaaaggtgagtttctgttggattgggatactaggttcaatatagctctgggaacagcaaaaggacttgcttaccttcatgaagattgcgactctaagattgttcattgtgacatcaagccggaaaacgtgcttctggatgaccacttcatggccaaggtttcggatttcggactggctaagctcatgaaccgagaacaaagccatgttttcacaacactgaggggcaccaggggctatcttgcaccggagtggataacaaactatgctatatcagagaaaagtgatgtctatagctatggcatggtgctactagagatcattgggggaaggaaaaactatgatcctagagagagttcagagaaatcccatttcccaacttatgcatttaagatgatggaagaagggaagctgagagatatttttgactcggagttggaaattgatgagaatgatgataggtttcaatgtgctatcaaagttgcattgtggtgcattcaggaagacatgtcaatgaggccatctatgaccagggttgtccaaatgttggagggtatttgtattgttcctaagccaccaactagttcttccttgggttctcgcctttatgccactatgttcaaatcctccagtgaagaaggggccacctcttctgctccctcagactgtaacagtgatgcttatctctccgcggttcgcctttcaggacctagataacgatacctgtctcttttgtgtgttgtattgttgagtaaattagtatgtaatacagcagagctactctggattgtgtggggttttcattcttccccccgctcttgtacattttgttcaagttcctcaaattttgtaatataaatagctattcatacccgtaagtcttcagagaagtcccatttcccaacttatgcttataagatgatggaagaagggaagctgagagatatttttgactcggagttgaaaattgatgagaatgatgataggtttcaatgtgctataaaagttgcattgtggtgcatacaggaagacatgtcaatgaggccatctatgaccagagttgtccaaatgttggagggtatttgtattgttcctaacccaccaaccagtttttcgttgggttctcgcctttatgccactgtgttcaaatcctccagtgaaggggccacctcttctggtccctcagactgtaacagtgatgcttatctctccgcggttcgcctttcagggcctagataacaatacctgtctcttttgtttattttctgtgtgttgtattgttgagtaaattagtttgtgtaatacagcagagctactctggattgtgtgggctttgcatgcttccagctcttgtacattttgttcaagttcctcaaattttgtaatataaatagctattcataatcc

SEQ ID NO: 100592 - DNA, 497 bp, Glycine max
  Clone ID: PAT_MRT3847_61849C.1
gtgtttaattattgtatagaaagtgcattgtgctgttagtgagttcagtttccatgggttcggtgcctcttttttcttctcctaatgctggttcagttacaactggtacctatttttctccttgagtatttggtcaattatttgttataaagttatttattgcctaatatgagagaaaccaatggtaattaattgtaggtggaaatctctggaggagtaaacattccacaaagaatatttactatgcaagtatgtgtctctcatcctctattcctttattctaatttgttatcattacgttaactatttgagtatgccgcattttatctgttcatttgctgcgataaacacaaaatgtttcaaactgaattttccattacaagatcgctcgatcaagatagcctgtttattatatctttaatcataaaatattataataataaattagaaaaaccatttgtcatttgtcaatataagagcacaagttggactgcgta

SEQ ID NO: 100593 - DNA, 469 bp, Glycine max
  Clone ID: PAT_MRT3847_6184C.1
ggtcttaacaacacaaatactaaatagtcaagttgatgtctccaaggaacaataataatgaaatggatgctggagtcatgatttatatgtagactatggaagtagaaaaggaaaatctgacatcaatgtagatatagattgattgaaagtgatccatcatttggcaacaaatgatgttgctatagcaacttttcatggaaactaaaaagattttggcttaattgagaaaatgtttgttacgctctacatttttatgagctcttcgttacaagtaatgaaggctgcagaataaattatgcatgttaatatccctttgaatatttgttccttcagatttttgatgaaatgtattcttgtatgcttttgttttcctagactggcaaacacttctaagttcatgtatgtttttactgcacactggatgtaccatgaatctttaggtgattttttattggtaaaataggcaaga

SEQ ID NO: 100594 - DNA, 732 bp, Glycine max
  Clone ID: PAT_MRT3847_61850C.1
tatattaatattgttcggctacaatttaactagatatgttaaactttaaaacaaaaatataaatatatatatatatatataaagtttttaatattataaaattatgatattattatatttatttaatatcatttctatattatttaattattaacattattattatatattaatattgttcggctacaatttaactagatatgttaaactttaaaacaaaaatataaatatataaataattaataatatatatatgttcaaaaacaaaaatatatatatatatatataagtttttaatattataaaattatgatattattatatttatttaatattatttctatattatttaattattaacattattattatatattaatattgtttgcctctacataggccaacccttgtggtttttttgttttttttttgctgaatcccctaatggtatattaaaacgtgaatttactgtatacacatgatgctagataattgttaaggcaggacaattttgggagacgtggagataaatagttggtggagcgcgcgggtgcaacttcgtcaagtgagatctgagatcgagggtttcttagcaacacagaacagagcagaagaagcaacacaaagccctccctccctctctctctctctctctaggaagaacaaagcagaagaagcaacatagaatagaaccactgaacccactcagaaccaccagtgcttcaaagtagc

SEQ ID NO: 100595 - DNA, 299 bp, Glycine max
  Clone ID: PAT_MRT3847_61851C.1
gttgaaaaacgacagctctagaaggtactgagagggtttgcgctgcgtgatttccggtgtcgcgagtcgctgcgcaatgaagaatggcaggtctatgaagtccatacccactatgggtgagcttgggggctaacgatagggtttgtcagaggaagctgtccgggttctggatcttagaagcgattcatggggattttgcgtcgcaaggtgtgcaggtagaatagggtactacggctgttaacactggaacatgccaggacgctggggacacagggactgtgctcacattatgaggggac

SEQ ID NO: 100596 - DNA, 660 bp, Glycine max
  Clone ID: PAT_MRT3847_61852C.1
aacaaatcgtcggtagcaaaaataactaataattagccaagtaataggataaccagcaggagttaaaaggaaaactacaacatatatgtacaaaaaatccttacatatgatataataatataataatatatacaagggcagatttcattacttagtttcatattattggccgtttccttccacttttttttttcatccaagctctttaaggggccttttcatttacaacctgactcttgaaaaatgtttcttcaatcctcaacttcatattcttttgattcctgctatatttctgagcaggcactgaaaaccttctaagaggagccctctgctgcagacggaggggatttttcaatgtccaactcattttcttgtctttcctggttgctaacaccagcttcagattccttggtgtcaagttttgctgcagtgttgccaaccaaatccttctcggacaagtactcatgttccatatcttccatggcattttcttgcactacttgattttcctggtcagaaacacctgcttcagattctttagtgtaaagttctgcaacagagttgccaactaaatccttctcagacaagctgtccacatgttcacttcctgctgctgagcacagatggccccatcagttcacttcagattctttagtgtaa

SEQ ID NO: 100597 - DNA, 145 bp, Glycine max
  Clone ID: PAT_MRT3847_61853C.1
ctgcagcaattgaaacggcactccttcttatatcaaattgcttctgattatgcacagcttcctgagcagctctaacagctcgattattcatacactgattataacagactcgcactatgacatcctctgcatgtattcgacctat

SEQ ID NO: 100598 - DNA, 309 bp, Glycine max
  Clone ID: PAT_MRT3847_61854C.1
gccactcttgccaaacctgcatacacacattctttcgccatcaggattgtgcatgggcgggggaatgtatggaaaaggctacgtgacaggtgctacggcaagatctactggtgcataggcttgtgaccaggagactgaccactggacgagaaactggcggatgattccacgtgtgtatgcatctgttaatgcgcctgctcatgcacctgcacttgatgaccaggtggatgaccaggagcatgcaaccgaccatgtgaccaacattgacagggaatgtgacaccggaagggacacctgaagggaatcagg

SEQ ID NO: 100599 - DNA, 681 bp, Glycine max
  Clone ID: PAT_MRT3847_61855C.1
cgaggttgtctatacttccaaaacatcattttattgaaattctcatgtgttacaggaagaaaaggaaaggataaatttagtcaccaagaccgacacaatatttttcatcttctcatacaatgcaaactataaatcactagtattaggtatggtaaaagcagtgttcaggcgacaggatacactataacttgatcaataacagggccacaaagagatccgtagtcatgaattcttgtatggtaaaaggagctataaaatgggattcttggtctgttttcaatcgctctgaacttgaaactcacagtcttgaattcgccctttccctcaaatttgaagggaactttgagggtattttttgctgcaaacgcttcaatcatcattgatccatgacaaccatttctggcgtctccaattgggaacttcatgttgtaaattttgttgggaactgttctgagaatttgggcaatgacactttccctgcctgcaataagttctactgctccctgtccaaatggtacattgaaatgttttgcatctatgaacttcacggctttgagggattcaatcatccaaccagggagtggagacacatgatcttcttgttcgggaggaagtagaacaccgtttgtagagttgaaaaaagggaatggacccacctcaaaccccggatttttaaccaaa

SEQ ID NO: 100600 - DNA, 383 bp, Glycine max
  Clone ID: PAT_MRT3847_61856C.1
agcccaagcgtccggccaggcgttcagagaccccttggcgggctgcaaaatgccgaaagacgggaaaaaagcccggctttcaaaccctagcaaccttcatcaacccccgaactccgaaccccttcatcatccaggtcaaggataaaggttagggagcccaaggaggaaaatgtcaccctttggtcaaaaccgttatagacggtgaacatgtttccggcgtggctcgcatctttgcctctttcaatgaggaccttcatccatgtcacggaatttgtctgggatgcgaaacccttgttcgcatcactggtgggatcacagttaaagctgacatagatgaatcatctccatatgctgctatgcatgcagcacaggatgttgctgcc

SEQ ID NO: 100601 - DNA, 2374 bp, Glycine max
  unsure (1)..(2374): unsure at all n locations
  Clone ID: PAT_MRT3847_61857C.1
gctcgaccgtgttgaaagtgttctcgtatcatcttttccatacacaaagcttacacataaaggatttaggctccatcggcatccactgaggtctgaggccaatacacatgtaggtaaaataaagtctaatttaaaagtacactacgatatccataaatttggaaagacatagcaaattataacttgagaaggctccctatggaaattactcaaattagttactaataaagctgataaatataatattccgtaccaataatatgataataaaaaaaaacttgaaaaggtgttgcccgcatctagctatgctttggtggagtattagcaaacttccacgagcagcgcataaaagtatcaacagtccgatcccctaccacctcagatattggtattgcctctgtaatttccctcaaatcatcgttgctcaacttcacttttaatgagcctatgttgttgtcaagattttttatttttgttgttccagggatgggtaccacatcgttcccttgatgaagaagccgtgcaagtgcaagttaaagttttcaccatgcatgccacaaatgaagatgctgcaggagagtcctcaactcagtcccaagtcccaaatgatgctactgtgagcagcaattaaaactcaactccgtttatcttcctcatctcaaaatacttggcccattccagtatttggccgtgtgcgactattgaattggaaaatttttatttgaagggtctgttaagattggttgatttctatcttcagtgactgagatccatttggatcccgttaattccaaatccgcaaataaataagcaatttgtgatgttatcattggttctactcctgcaatgaactatcgtatggctaatcgacaaagatctttaaagcagtgtgtagggtctaaatggctataatgttttgggtctggtcctgttaagaacaacttctccggtgctacccagaatcttcctccaccgccaccaccgcccccctttcctgtgcttccgatgcttccaagaatattttcccacaagggcatcagtggactcaactttcacaatcccaaattttgaggcaatctgaatttgatctcgtggcaactccttcagtgcctttcctacgagaacttcattagtgtagggaccgtaaaaatcggaagtatcaaagaaagtgattccattactgaatgcatacttgattagagagatgacaacctcgtcaggaacagggccgtcaaacactccactaagccccgcacaaccaaatcccaacttggaaacctccaggccttgggttccaagtttcagacgaggtatatccattttcgcttttcaacgatgaacgccggcgcctatttcacgcgtcaaaaataacttcagccaatatgttttcctcacttcaatttgaaccctttgggggcatgccatttttcacacatgcacctcctcctgcgatgttctacccggttgcagaaactcctctcaccaatacaatagccaaccaaattgattattactttagtgatgctaatttagtgaaggatgagtatttaaggtccaacatggatgaacagggatgggttcctatttctttgattgcaagcttcccacgtgttagaagtttgacaagcaacattaagttgatattggattcattgagaacttccacttttgtggaagtgcagggggacaagttgaggaggcgcactgagtggatgaagtggcttccgtctgttcagcttctggccaagtctggctcaatatcccctagcgaatcaagttctaataacctagcagctgattttgaaaagatcacagtggatgatgctaaagttaacgccaagcctacggcaaatgatgatgctgcaggagagtcctcaactcagtcccaagtcccaaatgatgctactactgtgagcagcaattaaaactcaactcagtttatatctacctcatcccagaatacttggcccatatctggccctgtgcgactcttgattttaaagggtttttttttggaggggatggtaaggataggttgtttggaagtttcattcctttctacggtgacagattgattttggtagcaattgaatcaaagagggaaagaaataagaattcttcggaattattatattggcctaaagaaaagaaagttagcctagaattttgatggaggtgaatttgaagagtttttggttttgtatagttttatatctgctgcggatgatttattctttattttctggtggcttatggtggtatgtgtgggtaaaaatattttttatgaattgaattcagcacttgagctttgcttgtgccaagctgccnctgcccttttaacgcggtaggttatgttgtttgttctgtcaaaaaa

SEQ ID NO: 100602 - DNA, 174 bp, Glycine max
  Clone ID: PAT_MRT3847_61858C.1
tcccgctgctaaaaaacaacaaaaaggggcgggttggaaaaaaccaccgaagggtaccgctgccaaaaaacaacacaaaggtacggcttccaaaagaccacaaaaaggtactgctgggctaagaccacagaaaggtacagcttcgaaaaaaccacaaaaaggtaccgctgcgag

SEQ ID NO: 100603 - DNA, 572 bp, Glycine max
  Clone ID: PAT_MRT3847_61859C.1
gtcagctcggaattcggctcgagtacatgttgggcaccaacttttatgaaagatatttcctttgctggcttgtctactagttcacgctctgaaagtttaaattcattgtttgacaactatatccaaattgatacttcattgagagcatttatagaacagtatagaatgattcttgaagataggcatgaagaggaagccaaagcaaattttgatgcttggcatgaaacacctgacctgaagtctccttccccttttgaaaagcaaatgttgtcagtttacacacatgaaatttttagaaagttccaggttgaggttttgggtgcagctgcttgccatcttaagaaagaaaatgatggtgtgactagtgcttatactgtgaaagactttgaaaataatcaaaactatatggtagaatggaacacatcaacctcagatatatgttgttcatgtcatttgtttgaatataaaggttatctctgtagacatgctattgtgtctacaaatgtctggtgttttcagcattccaccaaagtactgatgaatcagatggacaaatgctgctatgagcaggc

SEQ ID NO: 100604 - DNA, 610 bp, Glycine max
  Clone ID: PAT_MRT3847_6185C.1
aatatccacaaccaactgaaccaagcgttctacaatataatacttggaatcaaattttgcatcttagaccagcaccgtaaaaattgggagcttcgctatgccaaagcatttcgctttttgctacctgtagagaagatagcatcaaatatcaaatatagagaattcatggtacattagcattggtagtaggagaccgttgaaccaaacaaaatattttatcatacacgtcaaaaggaagattatcactgctctcatagcagtgtaaatcatgataaacaaaatgaccttggaaatattagaagctttgaatcacacagttcaggttatcaaatggtgttcaacttagtctaatactcgtttctctccacgacaaaggaatgacatgccatatccagaccttgatactgccctttcttgaccctttctattctctcctgtcaaaagcatatctttcttttgactctgtttgattgctatagtttctatacgatcttttatcttgcttcctatcataatcttctcttggctttggtgcagattcaccttcactgtgctttcgtgatttcctgtcttcactgtatccatgaagttctcttgacttgcttacaat

SEQ ID NO: 100605 - DNA, 156 bp, Glycine max
  Clone ID: PAT_MRT3847_61860C.1
attatatcccctttttataacctttctgttgcgataatggatccttgtttaatcaatataccgttgaagggtcccactacaatcgaaaattctaaatttaagcaaactacttgtcacaacatttccaacctagtcagttgtcaatgaactttaaat

SEQ ID NO: 100606 - DNA, 162 bp, Glycine max
  Clone ID: PAT_MRT3847_61861C.1
acgatagctgggaaggttcctagacatcccttcttgcaaataacctatggctttcaaaaactagtgcggtcttactatctgagtctcccttgcgcttcccttttttgcaccgaattccatagctgataaccaacagagcagaggttcctgcagaaaccattg

SEQ ID NO: 100607 - DNA, 319 bp, Glycine max
  Clone ID: PAT_MRT3847_61862C.1
gaggcgaggtagccatagagtgatactgtacagagtgcgttgttgctccttcgccataactccctgccaatatgggtatctctagagattctatgcacaagaggcgtacgactggtggcaataacaaggcatgggcgaagaagagaaagtatgagcttggtcgccatcctgctaatactaagctgtcaatcaccagcacagtcaggatgatcagggttagaggtggaaatgtaaatttgaagtcactgacattggaaactggaaattactcctggggaagtgaaactgtaactctcaagactcgtatactaaatgtggt

SEQ ID NO: 100608 - DNA, 591 bp, Glycine max
  Clone ID: PAT_MRT3847_61863C.1
ttttttttttttttttttttttttttttttttttttttttttttttttttttttttttttttttttttttttaacgggggggtaaggaaagggtagggaaaaaaaaaggcggtttatttggggccaatttgggaattttactatgatgggaattgggaaaacgggaaagtttttttttttaagcccaatggggttttattaaaggggggggtggggggggaagaaccccttgacggggatttcaaaggataaagcagggggggccgcttgccaccaaatggaaggaggcaatttcggcagaaagaggggttcctatgagcaaagctcacaaaagcgggggggggtactaagaggggctttgaaagcatttgattaggggccttcaggaagcaatgggggtctacaagggaccaccccggccataaaatctattaaccgggccatatcctatatggggggaaaaaacagggggccagaggttaccttatgggggagggtgggccggaaaattttctcgggcctggaaaataaagccacagattagcggccctttcattattattattattattgggaaaaaatttgggaatt

SEQ ID NO: 100609 - DNA, 351 bp, Glycine max
  Clone ID: PAT_MRT3847_61864C.1
gggggaaaaaaatcccgaccttgttttttaaacatgtttttgctctccctaaaaaaaaaaaaaagggtccggctacctatgggcctcctacccatagttcccgcccccccttacgttgattttccaatctcaatcccatggcgaaacaaagtggagtaccctaaataagggaattgtctttcccaaggaataattaaacacccaattttaaagggccccattttttacacggggctaatttaactttccacgctccactttttatccaaaagggtgaagctaagctttgactggaaaacttggttactttgttcctcactgaattcaaggggcaccaaaccctcaactttt

SEQ ID NO: 100610 - DNA, 606 bp, Glycine max
  unsure (1)..(606): unsure at all n locations
  Clone ID: PAT_MRT3847_61865C.1
agtctatgcacncgtangtaagctcngaattcggctcgagaagagatcagagagtgaaagaaagatggcgggggattcaagcctgctggctgcagtctcccttctctctgcctgtcagcaaagttattttgctttgcaagtcggacgagtaagattaaaatacaagatcgcacctccagcagtcacgggctctctggagtttgagagaatatttcgcgcacagcaaaactctttggagttttattccgtattcatcatatcgctgtggatggctggatggtatttcaatcaagtttttgcaacctgtctgggtctcctgtacatatacgcccgtcacaagtatttctggggctatgcagaagccgctgaaaaaaggatcattggtttccggctgagcctgggcattttggccttgctgactgtcctcgctgtcctgggggtagcaagcagattcctggacgaatacctggactttcatgttgccaagaaactgaagcggcccttctaagtttttcttccctttcatgcttgtagaggcctcggcaccactctgaaaacaatatgatgtcatgtgtgaaataaaaacttttatttgtcttgctgaaa

SEQ ID NO: 100611 - DNA, 388 bp, Glycine max
  Clone ID: PAT_MRT3847_61866C.1
aaaagcatctccatcattccttttgcaaacttcatttttcaccatatgttggttcgtagaatacccaaacacgcattatatattggttaatgagtaaatatctcttttatttgatgtatctgggaacacggaatactcttagcttgtaatacattagttattgtgataaagtactgcgtgcgttgtcttaaatgtcaatgcgacatggcatgatcaaaagataaaaaaaatatggacggccgatatctaaagagctctaaagaccgcgaatttatttcgatcaaatgccggagagctgccaagctctcctattgtgagagcaataatagcttgctgtaacatatgacacatatgatatctgtgctgaatagttaaattctcacaatta

SEQ ID NO: 100612 - DNA, 427 bp, Glycine max
  Clone ID: PAT_MRT3847_61867C.1
ggagcagactagatcttcataaactatactgcaaatcacaactaaagggttaatgattcttggacgggagcttgctggcgcaaactaacagtatataataaaccacttcttgagctatgccaccatcgttctgataagatgactggttacatgacactccaatggctctttcacctctagtaacatcacacctataggcatagattgtaagataagatcccttgagcttgatggcgaacagctcaagcttcaaatttgagatactggaagggatgagccagttccgacatttacaactggttactaccgtggtgctatggacatattgctagactatgatgttacagatgaaacataatttaacaatatcaggaatgggatactgactaatgctcaacatgcttcagacaatgtcaacaaaatactg

SEQ ID NO: 100613 - DNA, 181 bp, Glycine max
  Clone ID: PAT_MRT3847_61868C.1
aaacaaaatcctgtcgaatttaatcttatttgctctgttttttcctctgtttctcacaagacataattgggtacaaagcgaaaaccacagagctgaacaccttctgcaccaatcccaatccatcttcccactatgctctcaaactctcccccatcttcatcttcttcacctacttcacaat

SEQ ID NO: 100614 - DNA, 217 bp, Glycine max
  Clone ID: PAT_MRT3847_61869C.1
tgcgactgctgattctcatctctgcaactatgcctacgccgaatgacgtcgtcgatatgaccatcggcggtcaatctgttggctgcatcgtgatggagttctacgccgacgtgactccgctcatcgtcgagaacttctgcgagcattgcaccggtgataagggcgccgggcttggttgcaagttcctccagtaataaggctcgtactgtccaccgcg

SEQ ID NO: 100615 - DNA, 292 bp, Glycine max
  Clone ID: PAT_MRT3847_6186C.1
gcttgactgtatcttgtctcttgtatcttgtcaccctattccttctgatcgtattctacgtgtatgtgcccccggacttgaccgtaccgaactaaactcgacaattacctctaccgtttgctcgcaactacgctatgacagcacactaccctcgtcacctccggactacccgaaaccgtacgttcccaacaccacctcgcgctacagaaaaacatctccctaagcctcatttaccctatcaccatcaataacccgtccatacaaaagatccatcccccaccgtccgtaccgc

SEQ ID NO: 100616 - DNA, 436 bp, Glycine max
  Clone ID: PAT_MRT3847_61870C.1
tacggctgcgagaagacgacagaagggggctgtcgctctctgataaaaacagatagtgtgggagagagaagagcggaagagaaaatgactaccaggttcaagaagaacaggaagaagagaggtcacgtaagcgcctgtcacgggcgtatcggtatgcaccgcaagcatcccgtaggtggcggtaacgccggtggcatgcatcaacaccgtattctctttgacaagtaccatcctggattctttgggaagggtggtatgcgcttatttcacaaaattccgaacaaattgttcaatccgatcatcaacatcgacaagctacgggccctcctgccacatgtggacaatgacaaggccaccgacggcaatggacccttgcttgatgttaaccaattcggtttcttttatgttttgggttaaggggtttctgcttaaaacc

SEQ ID NO: 100617 - DNA, 385 bp, Glycine max
  Clone ID: PAT_MRT3847_61871C.1
gacaagtttgttgagatagctagaagcaataagatgaaaatgaaagtgcttgttttgtttgttgccacagttttgggaccaaaagaatggcaatggcccaaacaacaaaagtttcctccccaaattaaaaccgggttttggtgggcattacaccattaaggtgcaatttgcaatttgaaggcttgccttgaaaccaaccaccttatccaattgcaaaatggtcccggcaccttgcggaaattacataccagactattttctaggacaccaatatatatcagatcccaacacatttacccaacacccatatctctacgcaaaatctctcactctcaccaacagagatctctttgtcgtggacgttgacgacactactctctctaat

SEQ ID NO: 100618 - DNA, 264 bp, Glycine max
  Clone ID: PAT_MRT3847_61872C.1
gattctatatttcacgttttcacactcttatacatcattctcaacacattcacaacacaatcattattgccattctatctggtcgtggaaagggtggaaagggtttgcggacgcgcaagtaggatccaagcatacgtacgctcttatgcaacgtatcaacggctaccatagtgtcagctaatctcaagtcactgaccgtcggtttagtgcatcggatcagtgaattgcttgacgatgcccaccttagacttcttgcaatatacc

SEQ ID NO: 100619 - DNA, 609 bp, Glycine max
  unsure (1)..(609): unsure at all n locations
  Clone ID: PAT_MRT3847_61873C.1
tcggctcgggacgaggaagagggcgaggacctgtgcaacattgagcagttcaacttggcctacggtgccaagatcctcttgcaccacgccaacatgcgtctcaagcgtggccaccgctacggtctctgtggccgtaacggttcgggcaagtcgaccctgatgaacgccatcatcaactcgcaggtcgagggcttcccgccacccaccgaggtccgtaccttctacgtccagcacgacattgacggttccgaggccgagatttccatcatcgactgggttctcagcgacaagcgtctcttggccaccgagcaagagatccgcgacacgctcgagtcggtcggtttcgacgagaagaagcagaagcactctatcggctcgctctcgggcggttggaagatgaagctcgncctcgcgcgcgccatcctgttcaagggcgacattctcttgctcgacgagcccaccaaccacttggacgtcctcaacgtcgactggctcatcaactacctgacgtcgctcacgacctgtacctcgatcattgtctcgcacgactcggactttttgaaccgcaccatcacccgagtcttgcacttgaaccacttcaagctcaag

SEQ ID NO: 100620 - DNA, 291 bp, Glycine max
  unsure (1)..(291): unsure at all n locations
  Clone ID: PAT_MRT3847_61874C.1
gtgaaacccactcagttgaagaatcaatctctccctttcacctttctccatagcctancacttntntncctnnctactgctttcntcnatctactctcacttctcttcacnctctnnnnnnnnnnnnnnnnnnnnacaataaaagaaagggagtgatgggtgtgagactcagtgtttnctttttatantgcaacaaagtactacacatcctcttctncactgaagaagttggnattcagcaccacaatgcaacantaggagnagantganngtgtctcatctgtcctgang

SEQ ID NO: 100621 - DNA, 389 bp, Glycine max
  Clone ID: PAT_MRT3847_61875C.1
ggctcgagcttcgtggttttttttttgttgttcgcactcaaggagggtatatcttgggcttgcttatcagtccgtagggtgccttggtaccgaacacgctatacattggacgtgatagagcgaaaatgactgaacactatctatgcggcaatggctgaagctgtttttttaatgactgaagtactatgtactgtaataaatgcggactccaatcctttaaagagactttagcaaattaagctttagactgtacaggaactacgagtccatgcggtgcttaatatattatcatgaggacacaacacgtttggagcaacaagcgtgaggaacctgctcgaaacttttaatgacactatggtgacccctatgcatgtgatcgacatgtacat

SEQ ID NO: 100622 - DNA, 260 bp, Glycine max
  Clone ID: PAT_MRT3847_61876C.1
cttgttccagtttcaaccgttgccacattaattatcttccaaaattgcaattgcaattcatcaaagcaaacaagcattgaaggacccagaaggttcaccaacacaaagaagcaatcttttgggtttgtttgatcttggggggccttgtttcatcgcttttggcatcagggagagaagggcagtgtagtggaattggtttttggcaaaagggtgtttttttggtaggaatttaagacaagtatcagaagtttataccatct

SEQ ID NO: 100623 - DNA, 493 bp, Glycine max
  Clone ID: PAT_MRT3847_61877C.1
tcgaattcggtcgatacggctgcgagaagacgacagaagggatagcaggaggtatttctcgtacagcaactgctcctcttgatcgtctgaaggtggtcttacaagttcaaagcgaacctgcttccatcatgccagcagtaacgaagatatggaagcaagatggtctgttaggatttttccgagaacctggtcctctagtacaactaggatgtgggacaatttctggggctgttggagctacttgtgtctatccattgcaggttattcgaacaaggtacaatgctgtcagtattactgttgtttctctgttcttccccaaagaaatgatggagtgaaggatgactgcaggcacaaccttccaacacttccgatgcttacaagggaatgtttgatgcctttcggagaacttttcagcttgaaggctttataggtttctacaagggactctttccaaatcttctcaaagtgtgccagctgcaagcattacttatgt

SEQ ID NO: 100624 - DNA, 721 bp, Glycine max
  Clone ID: PAT_MRT3847_61878C.1
cacttacttttccacttccaattttggctgctactcatctacaacttattcatggagtttcacttgttggtagcgaagatgatcttacagcaataatcaaggtttgggaaaaggtttatggggttaaaatttcagatgctgcaaatgctgatgtgtataaccctgagcaattggcatctgaatttactactgattccaagagtgggagaagggttggttttattggccttggagctatgggatttggcatggcaactcatttactgagttcaaaattctgcgttgttggttttgatgtgtataaaccaactctaacgcgattttcaaatgctggtggcttgattggaaattctccagctgaagtgagtaaagatgctgatgttctcataattatggtcacgaatgaagctcaagcagaaagtgtgctatatggagaatatggtgcagtttcagctcttccaccaggagcaactattattctctcttctactgtttctcctgcatatgtgagtcagctggagcacagattgcacaatgagggtaagaatttgaagttggtggatgcccccgtttctggtggtgttgtgagggcctcaatgggaacgcttacgataatggcttcaggaactgatgatgctcttaagagtgctggtttagtcttagcagccttgagtgagaaacttatattatcaaaggtggttgtggtgctggaagtggtgta

SEQ ID NO: 100625 - DNA, 1141 bp, Glycine max
  unsure (1)..(1141): unsure at all n locations
  Clone ID: PAT_MRT3847_61879C.1
cccgggtcgnacccacgcttttttttcgattgtacatataatcgattattgaaataatctaatcttctaaacttgatgtttttatttgtaataacagcttcgactttttcttcttttttttttatactatagattgactcttaaatttttggtccttggagtgagaccttttactcttttttctccttcatagaacctggtcctctagtacaactaggatgtgggacaatttctggggctgttggagctacttgtgtctatccattgcaggttattcgaacaaggtacaatgctgtcagtattactgttgtttctctgttcttccccaaagaaatgatggagtgaaggatggtatcagttgtgtaccttaaagctggttttctagttatgttatggttgttctttgctgacaatattatattacattaccatccttctcagactgcaggcacaaccttccaacacttccgatgcttacaagggaatgtttgatgcctttcggagaacttttcagcttgaaggctttataggtttctacaagggactctttccaaatctcctcaaagttgtgccagctgcaagcattacttatgtggtctatgactgtttgaggtgctcttggagctacatgtgtctatccgctgcaggttattcgtacaagactgcaggcacaacctgccaacagtactagtgcttacaagggaatgtctgatgttttctggaaaactcttaaggatgaaggttttagaggtttctacaagggactcattcctaatctcctcaaagttgtgccagctgcaagcattacttatatggtttatgaaagtatgaagaagagtctagatcttgaatagagtgtcatagagattactagctaagttcaaatattataaagtcttgaattgttgatggtgatgaaaaaagaacagagattactagtcctgtaggaactattacaaaatagtcattcttctgaggatatcttaaaacacgattttgtagtcagaaagtttttccccatgcttatctgaactaaaatgttgagaaattaggttgtattctagatataccaaggtaataggtgttatccttttcaatctgtacttttcccactatttcctatagtcaaaagtgaagacac

SEQ ID NO: 100626 - DNA, 188 bp, Glycine max
  unsure (1)..(188): unsure at all n locations
  Clone ID: PAT_MRT3847_6187C.1
aagaaccgggnncgagccggcgcggacaatttacacttcacagttgtttggtgcagcgattaaacaaaccatgggggtgtattatgagttgggaagccattgccagatgaaatcatcaaagatgtatgtaagtacagctcgtaccaagaggtgatgagacagtctaaacgaacgctgggatgtatagt

SEQ ID NO: 100627 - DNA, 1164 bp, Glycine max
  unsure (1)..(1164): unsure at all n locations
  Clone ID: PAT_MRT3847_61880C.1
ggctcgagtgcttccatcatgccagcagtaacgaagatatggaagcaagatggtctgttaggatttttccgaggtaatggattgaatgttgtgaaggtatcaccagaaagtgccatcaaattttatgcttttgaaatgctgaaaaaagttattggagaagcccacggcaacaagtcagatattggtacagctggtaggcttgttgcaggtggtacggctggtgcaattgcacaggctgctatctatccaatggatctcattaaaactaggttacagacttgtccctctgaaggtggaaaggttcctaagctgggaacacttacaatgaatatatgggttcaagagggacctcgagctttctacagagggcttgttccatctctgcttggcatgattccttatgctgccattgatctcactgcttatgataccatgaaagatatatccaagagatatattcttcaggatagtgaacctggtcctctagtacaactaggatgtgggacaatttcaggtgctcttggagctacatgtgtctatccgttgcaggttattcgaacaagactgcaggcacaacctgccaacagtactagtgcttacaagggaatgtttgatgttttctggaaaactcttaaggatgaaggttttagaggtttctacaagggactcattcctaatctcctcaaagttgtgccagctgcaagcattacttatatggtttatgaaagtatgaagaagagtctagatcttgaatagagtgtcatagagattactagctaagttcaaatattataaagtcttgaattgttgatggtgatgaaaaaagaacagagattactagtcctgtaggaactattacaaaatagtcattcttctgaggatatcttaaaacacgattttgtagtcagaaagtttttccccatgcttatctgaactaaaatgttgagaaattagaagaattctagatataccaaggtaataggtgttatccttttcaatctgtacttttcccactatttcctatagtcaaaagtgaagacacataattgtgtttctcctctatgttcatgtcactagaaataccatttacttagaaattgacgtatggatttgtgtgaataaaaaaagggaaaaataaagggcgnngccgctctcgcaagttcn

SEQ ID NO: 100628 - DNA, 1486 bp, Glycine max
  unsure (1)..(1486): unsure at all n locations
  Clone ID: PAT_MRT3847_61881C.1
atcgattattgaaataatctaatcttctaaacttgatgtttttatttgttttttttgcttcgactttttcttcttttttttttatactatagattgactcttaaatttttggtccttggagtgagacacttttanctctttttctctccttcatnaatgaaagataacaggataggaacctggtcctctagtacaactaggatgtgggacaatttctggggctgttggagctacttgtgtctatccattgcaggttattcgaacaaggtacaatgctgtcagtattactgttgtttctctgttcttccccaaagaaatgatggagtgaaggatggtatcagttgtgtaccttaaagctggttttctagttatgttatggttgttctttgctgacaatattatattacattaccatccttctctacggcataaaaatgacgacagaaggatcgattatcggtatagcttgatcttcactgctcccactgcttcgacttcctaccatcttacccttttcaatcttcactgtttccatcacttcaagcttcatcaatatgtggtttctagatattcccttctctacttttttacgaccccgtcctacgtaaccactggtatactagtcgctctctgggtatgagagacctcgtttcgttggatcacacttgggtctagttctggcgatcgttgctgtgggggtgagggaagactgcaggcacaaccttccaacacttccgatgcttacaagggaatgtttgatgcctttcggagaacttttcagcttgaaggctttataggtttctacaagggactctttccaaatctcctcaaagttgtgccagctgcaagcattacttatgtggtctatgaaagtttgaagaagactctggatctggattagagtttttatctaccgtacaatcacaagatgttccagacaacaaagaagtcgtttcaagtatgcttagttctaggcacaaccgcacaaggtacttgcagagttgtgaaaattcacattgttagtaaaattcgttcactggatagaccatacctcagggttgagcttgattattatttttattgctgaagcaattatgctgatgatactttattaagtcattaattgctgatggtggcgataagagggctatattagaaatcattcgttatatatcttaaaacacgattttgtagtcagaaagtttttccccatgcccccatgattatgtgaactacatgttgagaattagggttttatcatagatggcaaaattacttttccactatataattgactcagtgaagacggttggaaaaaaaaaaaggccatcaacccacaccagtagcagaaagctttgtcaagtaaggtgaggaaataaataagtcgacaatcatgaagggacaaggaagaagctgtggcttcgaatttttcattaataaaaactaacatttattgataaaaaaaagaaagttgacaataaaaaaa

SEQ ID NO: 100629 - DNA, 275 bp, Glycine max
  unsure (1)..(275): unsure at all n locations
  Clone ID: PAT_MRT3847_61882C.1
tcggctgcgcgacagacagaagggcctaggctatttcaaatagtgaataagagtgggaatagacatattaaagtatcaataaccctaccttgtacaatgacataataaattatttaaacgggctatttcaaatagtgaatagagtgggactagacatattaaagtatcaataaccctaccttgtactatngactaataaattatttaaacatagaaacaataagggaaagctaccactagggtaagcaatgaaagctcaaaagaaggcccgcgag

SEQ ID NO: 100630 - DNA, 266 bp, Glycine max
  unsure (1)..(266): unsure at all n locations
  Clone ID: PAT_MRT3847_61883C.1
ccaaataatgtctgacatgaacagtctgatcctattagagtgtttcttccactgaataaaaaaganaagtcacntaggaccagattttgaagataccaaaaaatatacagataacaaatttgncngtttganaggcctttttttggggaatattaaggtttgatcanttctgctagttaacatatnnaattttgacnttgtataggacactatataccgccatttctatctgaaacaatttncgttgtttacanaacattttattt

SEQ ID NO: 100631 - DNA, 2075 bp, Glycine max
  Clone ID: PAT_MRT3847_61884C.1
ctttgcgtttagcaagagcggttttctgctatctgcaacactaggaagaagcagcagcatcagagttgaatcgcgttttcccagcagaagaagaacggagcgcacgcacatcttctcagctgtgagtgagaatttggagagtagaagaagacgcagctgattgtggaaatgtcagtgcaagattacctggacaagcacatgctttcccgaaaactcgaagatgccgtcaatgccgccgttagggccaaaacctccgatcccgttctcttcatctcgaatcacatgcgaaaagcagtgcaatcggtgataacaaaaatcaaggcgaggcagatcctagatagcagaggaattccaaccgtcgaagtcgacttgcacactaacaaaggcgtgttccgcgcttccgttcccagcggcaactccaccagcatgtatgaagctgttgagttacgcgacggtgacaaaggagtgtgtctcggaaatggcgtggccaaagctgttaaaaatatcaatgacaagatatctgaggcgttgattggtatggatcctacgcttcagtcgcagattgatcaggccatgattgacctcgacaaaactgagaagaagggggaacttggagccaatgctatattagctgtgtccattgctgcctgtaaagctggtgctgcagaaaaggaggttccactttacaagcacattgctgacctgtctggaaaaaccagcccaacacttcctgttcctgcctttactgtcataagtggtggaaaacatgctgggagtaatctggccattcaggaaatcatgattctcccaattggagcaagcaaatttgaggaagcattgcgaatgggcactgagacctatcatcacttaaaggctgtcattacagaaaaatatggtgcacataactgtaatgtgggtgaagatggtggctttgctcctaatatatccagctttagagaagccctggatcttgtgaaggaggccattagcagagctggttatgatgagaaaataaagatagctcttgatgttgctgctacagatttttgcataggtaaaagatatgatctggactttcaatctcctcaaaagtctggacagaattttaagtcagcagaggatatgatagacttgtacaaggaactatgctctgaataccctattgtgtcaatagaagatccatttgacaaggaagattgggaacatatcaagcatatctcaagtctggggatttgtcaggtagttggggatgatctcttgatgtcaaatgcaaaacgcattgagagagcaataactgagtctgcttgtaatgcccttcttctgaaggtcaaccaagttggaactattacagaggtcattgaagtggtgaagctggcaaaagaagcacattggggggtggtaacgtctcatagatgtggagaaactatagactctttcattgctgatttatctgttggccttgcttctggtgtaattaaagcaggagctccttgcagaggagagcggctagaaaagtacaaccagttacttcggattgaggaggagctcggagatcaagcagtttatgccggtgaagattggaggcaataagaatgaaaaaattcttcatattggtctgtgatatgcttttcttctttaagtttgatacgtgtggttgaagttcatcactgtaccatattcatcaactgctgatgttctattgccattacgtcaactttgatcatttcgtgctattgggctttggagaatgtttcaacgagtattcaacaatctgtacaagatagtgcggcttgtttatttgtctattgttataggggataccaaattacactaattcaatgctttagttaaaattgttctgggcaagtgatattgattatagttatccaattcttcgcattgcttatgttccagcgcacctccttttacagacctgatatatcattagatagattttatcatttttaccttcttttttgtacttaatactttcttgtgcctttataatttaaattgatatgtgatgagcaatggagaaagggaggctgtttggtttcctcgcattaatgtttttc

SEQ ID NO: 100632 - DNA, 312 bp, Glycine max
  Clone ID: PAT_MRT3847_61885C.1
ctcctacgacgttcttattttcacgaccagcgttggtggtctcggactcaacctgacgggggctgacaccgtcatcttagaagagcgtgactggaacccacaaaaggacattcacgccatggaccgtgcgcatcgaatcggccaaaagaaggtcgttaacgtataccgcatcgttacgcgctggactctggaggagaagaacctcaatctccaacgctttaggatcgacgtcgcatgctccgccctcaatcaacacaacgcctgtcttgggttcatgccgactgaccaaatcctggatctgatcaacattaa

SEQ ID NO: 100633 - DNA, 400 bp, Glycine max
  Clone ID: PAT_MRT3847_61886C.1
caaaaccaaggaagctaattagcagcattaaccccaaaaacctaaaactaagtcccaaacgcgtgtttgggaaaaagggaccgatctttagtttaacgctccgaccaaccttaattgggatccggattttcttccgccgcctccaccacaaataacaggctttccgttggtaaccaaactccgaccggggtcctcccgggcgtttccggggacgggtccgacgtcgccgccgtcaacgtgcggggggacctcgcccaggctttccgcttaatgaaccgggacaacaacggcgttttaacgcgccaggacctgggggcctttttaacgtgcttgggggcgtttcctggccttaccgacttgggggtttgctctgtgatggtttcttggccggttttctttt

SEQ ID NO: 100634 - DNA, 444 bp, Glycine max
  unsure (1)..(444): unsure at all n locations
  Clone ID: PAT_MRT3847_61887C.1
gcttncntttttttttttttttttctgccttcgcccaaaagaactttggaacattacctaagtactgcataactctaacatccatacttaatctcagggccatatagtagcctcgcacaccttcaacagcgatattgatcataataaccataccctggctaatacaaatggaaaaacaaactcctactcccgacttgcgcttttcaacagctccatgtgcgaagggtcatctctctgcaaaggagcaagatccttgtggaaaattctgacacagctgggtcttgaacttgcttgcagggggggcaggggctccaggaacacctggggtggattttggtggggcaaacatggacacgggctaagagaaatgttttaccatgttgctagctctcttaatgtggacaaaaaaagcctcgagttcaatggttctaatattgggatcgg

SEQ ID NO: 100635 - DNA, 249 bp, Glycine max
  Clone ID: PAT_MRT3847_61888C.1
taatggggagggaaaaagattccacggttctcgagttcggtgcgtcgatgctagcattctcttctgcaactttcgcggggagcttcattcaccatggatgtccgtgccgaggatgctttgttgtttgaaccgtcagtgtttcgcatctctaggaaaactggtaatggaaagcgtcccggaaggggtgcgaaatgcgtttggaaatgtcttgcgcttggtcatcatactcccacggaagccatcgaacga

SEQ ID NO: 100636 - DNA, 872 bp, Glycine max
  Clone ID: PAT_MRT3847_61889C.1
ggctcgaggaaaatggggtctctaatgttctctcttactctcactcttgtattggcattagtgtctctgagcttgccatctcaaacctcagctgacaagtacgagtattcatctcctccaccaccggagaagccttacaactaccactctccaccaccaccaccacccaagaagccatacaaatacccttctcctccaccacctgtttataagtacaagtccccaccaccaccgtacaaatattcatctcctccaccaccacctaaaaagccctacaagtacccatcacccccacctccagtttacaaatacaaatcaccaccaccaccggtttacaagtacaagtccccaccaccaccaccacctaagaagccctacaaatacccatctcctccaccaccggtttacaagtacaagtcacctcctcctccttacaagtacccttctccaccaccaccaccatacaagtacccatctcctccaccacccccagcttattactacaaatcacctccaccaccacctaagaaaccatacaagtatccatctccacctccaccacactatgtctatgcatcaccacctcccccataccacaactagatagtgattttagtgtagcaccccatggatctgaagaacttgtgcaaataaagggagagggaagaagcaccatacagtttatgcagtgaagagtgtgtggaacgcgttttgtgaaagtagtgtttatttggtttcactttattatttttatttgtactttgtactttatgtatttaaagttttaaggcactgtttagatctggtccatgtgttgttactccagttatattactatataataaataaataccctgatttttttaaaaatg

SEQ ID NO: 100637 - DNA, 261 bp, Glycine max
  Clone ID: PAT_MRT3847_6188C.1
acagcatgattcactcatactatgaagcatcagcacttatgcaatggatctgctgcttctggaacagaccctgattagtctctacatcgctgctgtggtctgcatgatcgaatatcaactacggaagctgtaattcgtgctaccacacatgagaattcgcgtcccaatcttcggcatctgactcctagtttgtgacgatctcgagcacacgtatcctgaatgatttgaactaaaaactcggtgacatattgctacttcata

SEQ ID NO: 100638 - DNA, 482 bp, Glycine max
  Clone ID: PAT_MRT3847_61890C.1
aaaaacatctaaaagccttttttttatgcaaaaattaaatagggttatgggcccaaaaatactggccacagtttttatgctgaacaatgaaggccaaggaatacaattttggaacagggggctggaaaaaaaaaataaaaactgggccccaattttcaaacaaaaataaaaggcctatttcccaacaacacggggccaaacgtcgaaagcatatttttgtccctcacaaagctgccaggggccatttactggtagttccaaaaaaacaaaacaaaccctaaaaacaaaaccaacctttttttacattaaaaaaaaaaatcgggggacaattataaaaccaaatcctggacaggttttactccctgaaaacccaatttttccctcataatcccagggggaaaaaccattctaaactgatatgccttatgaaacaatatgtccatttatggcgaattattttaaactaaaaggggagaaatcat

SEQ ID NO: 100639 - DNA, 323 bp, Glycine max
  Clone ID: PAT_MRT3847_61891C.1
gatatgtcagcatttaaggcagcaaatccagatgctatctttgaagattttattcggtgggattcacctggggattgggaagaggatgatggccctgagggaagtaaatcatcatcatccagtgctcatgacattaagaagtcaaaagatagttggcctccacaagggcggctttctaagagaatgtctgaacatggaaatctatggagaaagctttggaataatgcacctgctcttcctgcttctgaacagaagcctcttcttgatccaaatagggaaggaggaaaagttcttcattatcttgaaactctaccaccacatga

SEQ ID NO: 100640 - DNA, 532 bp, Glycine max
  Clone ID: PAT_MRT3847_61892C.1
gagaagactacagaacggaacacattactcattctattcatctttagcattttggattgaagataattgcgaatgtgctgaagcttgatgaagaccatcctgatgtgcaccagttgtatcctactatatacagaaacgttgtggaggcaattgatgctgtggataacggagtcaatcaatatgaccttgatgtccctccgaaatatgaaattaacacgatcctgtcctctagaataaaacgcttgaatttgagctggatggattctgaccagtcttctgatagagaaaacgaggcttttcttcatgcaatcgtgctggccggtgctgaatttttggagaatgtgaactattatgcaaagtcatggttaccggcacggtctactgttatggagagtcttgcagcaaggggaagtgctgattcaagtggagaaattatactgtaaagctgaaccgatcttgtcctgtaagacacagcccatgaggcattttaattaatttcacgagttattagtgatttttgtgagagttttct

SEQ ID NO: 100641 - DNA, 166 bp, Glycine max
  Clone ID: PAT_MRT3847_61893C.1
ggggccaaaggactaatcaactacaagctttatgaaacattgggcttcaaatttggaaccacccgtcataaaaaacaaaccggagccaaaacgggacaaagacattaaaaagagccctatatgaaaaacataccgaggatttaagtcttaaaagggaatcaaacgt

SEQ ID NO: 100642 - DNA, 577 bp, Glycine max
  unsure (1)..(577): unsure at all n locations
  Clone ID: PAT_MRT3847_61894C.1
ccacgcgtccgcggacgcgtgggtttggatcttcttaaaaataagaatatagttctccttttgtattctcttactcttattttttcagaatgaatgcatatgtcaaaaatgtccaaactactcacaaagtataagttgcagttggaatagattcattcttttgaattgtggttaagttttgcaaaacttttccttgtaaatcatttgtgccccaaataacctgcagaggcatggaatgatggaaggattggcgtgtaacatatggtttgttacctgtgattatctttcttccactagaaaacccagcatacaggacctgtcacaatgatgatttttgtaatttcagatcagaagcattataagcctcagtatccttttgatctttttatccttgcttatttaaatttcaaaggaaattgtgtagcctagtttatcattcatcattgtattgattcctagtttgagttgctagcattactgtaatagttgatttttttcttctcgttnttaggactttgaggtcaatttgacaattttgacttgtcatatttgntttctcatctgaagagcttgagaa

SEQ ID NO: 100643 - DNA, 388 bp, Glycine max
  Clone ID: PAT_MRT3847_61895C.1
gccgacgtgcgttgaattgtgcttggcttgactgcaggcatggggagagttatctttgcggggactagattaaagagaattactggatattctcgccaaaactcaaggatataccgtcccacaacaagaaacgtttgggctatactctgtctgccatcaatttgctgattggacttgggaggagttctaaaggcacagacttacacctagcgcgaattggtctgtgcttcttaatagctaccacatgctcaccgatatttttcttcctacgactaaggactggctaaaaacacgtctagagagaataagtaaacatcaatggtgctgcggctcattctattcgttgagcagaactacggctaattgagcaagctatttgcaaacattt

SEQ ID NO: 100644 - DNA, 600 bp, Glycine max
  unsure (1)..(600): unsure at all n locations
  Clone ID: PAT_MRT3847_61896C.1
tattcatgatctactttggatttgggagagaagacatcattaaagtgatatgctaacggttggagttaagacaccattacaccacagtaactgttttttgtgagattttcttcaaaatctcattggttgcttgctgttacagtaattagtagtataatgaaagtaagtgtgcacatagttgggggggggggtcaagaactttttttatgntctctatgtggaataggtgccaacttatcaattttcacatttaatgtaaaataactacaagtctacaagatatatataccttttatggtaaggccctggggggagaatttcaattatgtcacgtgcaaaaatcatcaaaataaatagctggtaatattttgtatacatttgaagaacatgaagcccaattgttaaatcaaccttactggtgatagtaaattgtaaaatgtttatngataaattaaagccacaggcgttcaatcaaaaggttttatttttattgttatctttttttcatttggttgaaacaggttgataaaatagaagagagctttgacgtaataaattcaggatcaaagnctttggctgcatatatatttacaaatacca

SEQ ID NO: 100645 - DNA, 303 bp, Glycine max
  unsure (1)..(303): unsure at all n locations
  Clone ID: PAT_MRT3847_61897C.1
agtcgcatgcacgcgtacgtaagctcggaattnggntcgagtgagagtnnggnttcntttgttggtgttgctgggaantgttttnntggcatnagtttgtgtntcattaaaggnganccgnggatgagaataacncnttntagttgagaagctctaanagnttncaaantctctttgagaacnaaaacggtcgnattngtntcctncagagattcaacaaacgntccacacaagatagnnnaaannnnnnnngannnngangnagnnnggnnagnnangnnnnngnanggggnncntgnnnnn

SEQ ID NO: 100646 - DNA, 378 bp, Glycine max
  Clone ID: PAT_MRT3847_61898C.1
cctttgttcactctactgctcttgcggctagggtgatagcgcagcttctcgtagatctaaggaagatgggtccggaaaaggttcacatcaatattgtgggcattggccatgtcgactctgtgaaatccactaccactggtcacctgatttacaagcttggaggcattgacaagcgcgttattgaaagggttgagaaggaagctgctgacatgaacaagagggctttcaagtatagcctgggtgctggacaaacttaaggcgtggcgtgcaagatgaatcaccattgatattgctgtgaggaagtttgcaacaacaaagtattattgcacaattatcgatgcgccttgacatacggatttcattcagaatatgattact

SEQ ID NO: 100647 - DNA, 546 bp, Glycine max
  Clone ID: PAT_MRT3847_61899C.1
cccacgcgtccgcccacgcgttcgcccacgcgtgcgcccacgcgtccgcaactccaaaagtccccaaccccaaccacgatctgctcacgccgcatctggagcactttacgatggtaattcgaacgtagtaattgcttttgatgtgaactatgaagactataacaaaggctagggagtttcgatgcattgagtacttatcttcattgcggagaagtttttccttttcctcttcctcttcctcccattctcgtcactttcaatttcgcaatgataaacggaatcatctgaaccccaaagaccttgtcagcgaggataacaaatttgaagaagccgttgatgttttatgtcagcaaaagcgcgtcaaggaatcgggtgaattgctccatcgtactgatcatcgaccctccgcgcgcgtgtactccaccctcattgccgcttgcgttcgtcaccgcgctcttgaactgggtaggagggtccatgcccacactaaagcttttaactttgttccaggggttttcatttttaaccgtttgcttgatatgtatg

SEQ ID NO: 100648 - DNA, 225 bp, Glycine max
  Clone ID: PAT_MRT3847_6189C.1
cattaatactagcattttcagctatctgtacataattgataatctagttcttagtcttgttagtttttgtttctggtttgaaatagaatgtaataatgcatttgtaggttctgatgtttgtatggtgcattttttgtcagtattgaattctgatgcatcatttatcatctatattattctgtaatgcttttaagctttttcactatacttcttttagagatattc

SEQ ID NO: 100649 - DNA, 309 bp, Glycine max
  Clone ID: PAT_MRT3847_618C.1
cccccgggcccccgcccgagcccactgtggttccattgtatatcagcaaccttaatactgccttctaacaaacagaaaagacattcaacttcttagaaggcagtactgtggttccattgtatatcagcaaccttaatactcatgcttcgatttttgtactatatataagatgtaattatgttagggagatgcacaaaacaaccgaataggtttgtactaaatttctaacgaaatgcatgtaaaattttcagttccattggtttataaaaaaaaaaaaaaaaaaaaaaaaaaaaaaaaaaaccgcacacc

SEQ ID NO: 100650 - DNA, 495 bp, Glycine max
  Clone ID: PAT_MRT3847_61900C.1
gctcgaggtctttcgccgcaatttcgaagatccaatttctttcattgctttcattgttcttttgtctgtgattcgaaggaaagggactgtgacgatttctgtgattaggtctcgttcgtcgtaattggcctaaccggccttgccgaccatcctgctatatcaccacccatattctgagtccctttttcatccaattctttttcttttatcttttttaattttaaattgttcttcgctgtcagtattggttgtgtggtatcagattcgtacacttttgatcggccgatgattaaatcacaaataatagacaagcatatgtctgaactattttgtgtggaaaaatctaatcttctctatgaggccaactatttttctgttttctttaagatttttttctaggttagtcttccaaggaagtgtttttcttttgcgattggagtgtttcaagtttttcgaatcttctgtgcattgttttgccaatgatgagagaaatag

SEQ ID NO: 100651 - DNA, 967 bp, Glycine max
  Clone ID: PAT_MRT3847_61901C.1
tgaattttgtgacagcatataagagcgccaacgtcgagtgcaaacgtacatgcactcggaagtcagctcgagattcggatcaagctaatccttagaaagtagtcacaccacgcgtccgcatgcgatgccaatttccagttgaaacttgaaagagaaggatttgcgaaaacagtgtattattttgcgttgctaaaaccctgtaacccgacttccgtttgggtttttcactgtgcctatggcggcggcagcggtggcggaggtgaggaaggccccacggccgggcaagggcggttacgaagcgcacggcctgagcgaggaggaggctcgtgtacgcgccatcgcggagatcgtcagttccatggtggacctctcccacaaaggccagaacgtggacctgaacgcgctcaagtccgcggcgtgccgcaagtaccggctctcacgcgcgccgaagctcgtggagatgatcgcggcgctccccgacgccgagcgcgagacgctcctccccaagctccgcgccaagcccgtccgcaccgcctccggaatcgccgtcgtcgccgtcatgtcgaagccgcaccggtgcccacacatcgccaccaccgggaacatctgcgtctactgccccgggggacctgactccgacttcgagtacagtacccagtcttacaccggttatgaaccaaccagcatgcgtgcagttcgtgcgaggtataatccatatgtccaagcgaggtgcaggatagatcagcttaagcgtttgggtcatagtgtagacagggttgaatttatcttaatgggcggtaccttcatgtcactttccggttgattaccgtgattactttataagaaatcttcatgatgctttgtctggacacacatctgccaatgtggaagagggagtggcttactctgagcatggggccacccaagtgtattggactgacaattgaaccgaggccagattattggc

SEQ ID NO: 100652 - DNA, 319 bp, Glycine max
  Clone ID: PAT_MRT3847_61902C.1
gtttggcgtttgggacactgtgagttattaccagaaatatctactactgtgagtgacacttctgtcacaagggacaataatgcaaagattcggacacggactgctggcttgatgcatctatagcgctgtcttgttggtgaacatattgactgtcgctaccacacgtataatcctccagttgcttccaactatatttgagccagctagggttgattacattcacgagatatactgtgactatgagacccggttataggtgactagttagcaactcatcaaaagcatgctttactcaagaaaaaatagtgaaggtaattat

SEQ ID NO: 100653 - DNA, 342 bp, Glycine max
  Clone ID: PAT_MRT3847_61903C.1
cgaacctagtccgttcggacacaaggtgatactcttactcactcacacaggggtgggattaatttatctgaggagaaacactccgacgctgtttgctgatgcaaacaccgtttcatggcacacttaacaaactgattcaattggttctccacacgctcactcgtcgcacacttcattctctgatcttatatgactcttctgatgtcttgtcctcatctctgagatacccggataagtcatgaagcagattacaccatcttcaccaaccactgtaagaaatgcgctgaacatgcaaggatactagcccctgttatgagctggagcaccatcaccaccacgcct

SEQ ID NO: 100654 - DNA, 427 bp, Glycine max
  Clone ID: PAT_MRT3847_61904C.1
gaacattttagagttcaagaattatttgttttaaagatctattcttattcatgtcccgattcgaatagaatagaataatagaattaccttaagtgaaaaatacttgtagactagataagaaaaaaaatctattcctgtcaacaaatgaattttgtgcaaaaaacttaatgccaataacaatacattttacaaacaatattaattgttaattgaagcattacatcaaggtacttatggtgcataatgcaaaccctgccaatttatttttaggttaatttgtagcctttacctgtagtcctaacaattttttttagcagagagagtgtgttggagcgtgttcagttgaagttaaaaagttggcttccaggatcttgtgtttgatttagtgaagggtttggtctcatgtgtggatatttttattttgaga

SEQ ID NO: 100655 - DNA, 1058 bp, Glycine max
  unsure (1)..(1058): unsure at all n locations
  Clone ID: PAT_MRT3847_61905C.1
gcctgcttgttacccggtccggnaattcccgggtcgaccaagacaccctgcaatttgctctgtactccaaccatggatgagttattttcaaatagggagggctcatcagcacagaagggccttctcaaaagtccagcactccttaagtacatctttgaaaggagtggctatcccaaagagcacgagcaattgaagcaactccgagagataacagtgcagaaatacggggttaaggagtacgatgagtgtaccggtggatgaggcccaattcctatccattcttctaaaaatcatgaacgcaaagaaaacacttgaaattggagtattcacgggttattctcttctttctacagctctcgctcttccttctgatggcaagataataggaattgatgtcgacagacaagcgtacgagactggattgcccttcattcagaaggcaggagtggagcacaaaattgactttatccaaacggatgcattatctgccctccatgatcttataaatggcaaacatgaagaaacatttgattacgtgtttgtggacgctgacaagaaaaattttataaagtatcacgagctgctgttaaaattggtgaagaaaggtggaataattgcatatgacaacactttatggcttggtacggtggctatgtctgagaacaaggataaaattgaagatagcttatggcaaaatagggagcctacactcgaattcaacaactatatagcaaatgatactcgcattgaatcaacaattctgtcgatcgcggatggtgtaactctttgccgatgtctttaatctctttaaagggaagggagacataacaacaataatgaagatgcatggttcaaatacacaaatattatataaataaatttgtcattaaatttatagctaagcaaaccatagagcgaaggcaggattgttgagaacatagcaaataaattagtttgtaatgctttgcatgttttatacctctactcataagaaagagtactacaagaaatatgaagatgtttaataatgacccaataatgggtggtcgaataagttc

SEQ ID NO: 100656 - DNA, 592 bp, Glycine max
  Clone ID: PAT_MRT3847_61906C.1
tatacgaaatcaagtttattgaaaatgaatataacaagctccaattcgcacacataatgtatgtttgatttgcaattcgaattgttgtaacacacattctaatgcaaatccaacaaataaaaataaaataaaagcacaaataaggatcctgatgcattgacaaaatgacttatgcctcaaacgtaattttataacagaaaatcaaacatgcacaataattgtgcttaaagcctgtttgcatctgactcaaatcaaaattttagttgcagctaaaaattttgctttggaaaatttgtgtcttctccgtttgagatatttcaaaacagggtataaattgccagacactgtccttttcctcatcaaccattcccataacagtcgattataagcagttttgacagaacagccatgcatcacaccattccacaaaacaaggcccctctcagcagaagcaccgttaggtagcagtaccacatcacaccatgcagaaggaatccttcatccttttgaatcaagagcttcttccaaagcaatgatgttggaaaaataatttgcattttcacaataaatggaacaaagcaacaggcaatca

SEQ ID NO: 100657 - DNA, 418 bp, Glycine max
  unsure (1)..(418): unsure at all n locations
  Clone ID: PAT_MRT3847_61907C.1
ggattggtactgaaagattcttattaattttgtcattttatttactgtctggccttactgctgcatttgataacacctggtaatttagcaactggagttgtttgtgaaaacttgctgtccccaaaactagcttattttggtttgactttgaacattatttttgtttatatatggcctacttgctctttgtagtttgtactattaatgttaaagtattaatagtttaatttttcttagattctttagaatgtgagtctaggcctaactcaaccccaacagctagctcaaggggtggtgagggttgcccctcacttgtatactctatcagatttanagaactgagagaacaaagagaataagagaaaacattgaggatagaaaaaggaaaaactgatattattgattctgacaaagttag

SEQ ID NO: 100658 - DNA, 241 bp, Glycine max
  Clone ID: PAT_MRT3847_61908C.1
gggaaacaaaattctgctggattacataaaacaaacgtatattgggcacatgtacttcagcagcgctgtttacacctttttctttttacattctttctccgcacccttttgtccccccctccctaacgatgcaccaatcctatcagacgcggatttctgaccaactatctactctagcggtactgtgacatataatacactctttactataacattatatgctaggataccctcctcatat

SEQ ID NO: 100659 - DNA, 1135 bp, Glycine max
  Clone ID: PAT_MRT3847_61909C.1
agtaaatacaagtagtaatctaaatctctatccttatagttttctgtgagacacttttggaacaaatttctcaatatcatttgtttctcatcaagagcagtttttcaattgagcaatatttctttgatcttccaatttttcacttcaattgccatggcaaattatggaaccacacagagaattcccacctcctcaacaccacaatccaccgctgacacttatgaaccagaaccaaaagcaccccatgaaaagttctacagtgatttcagaatctactgccccattaacataccctcaacatcagaagctgcaggggtacgtatcatgagaaacatgtgcaatttcggattgtactacacactctttgtgtggatcatactcttcataaccctcatccctcagcgtaaggtgtcattgattctgtttgtcatcatgacctatgtgacaaccctttattttttactcttgagggcatttccaaactctgttgtgcttcacagaatcatagacaaaagagttgtgctggctttgctagcaattgcaactgcagtgcagctgattttgactaaaggcaggtatacatcttgcagtgactttggctagcagtgtgcctgtgcttttgggtcatgctggtctgtgggctagttatgatgcctttgaggttgaggattcttctgctaaaggggaactggctcctcttgctggccatagtgaaagtgttctcgagccgattcggctcgagtaaaattttgggggctcactatgttgtcctttctgagttttgtttcttacatcgacattgatatcattaaaataatgcaaaagaaaaaatatatatatgatataataagaagatgcaaatgcatacatgtagtggtttttttaatactaagaagtttagatgagttaaattctggtaattcactaaggacacacgtatttattagatatgagtttgatctttatcaattagatcaatctttgttggccataaataatacaggtacaaagtatatgtacaactatcttgaataaaagtctagatacaaaagtgtgaattccattttccttcttttttactgaaatttgtttactctaataacattttgatcaatcacatttgtttttcaaaacc

SEQ ID NO: 100660 - DNA, 289 bp, Glycine max
  Clone ID: PAT_MRT3847_6190C.1
atgcggctcgagtatattcggtcactctcttactctttctctctacttctctctcctattgcggctatgggttaggtggggtctttctccgtcttcgttccttcaatcttcttattctctttcatctctgatggatacgttgcttgttttagcttctaaagagtggttctggccttgggtttttggtacgtacggtgccgtttttgtgttgggaaaacaaattctgagagatggcatcttactaacccttttgatttgttgggtgactactcttatgacccttatcagc

SEQ ID NO: 100661 - DNA, 454 bp, Glycine max
  Clone ID: PAT_MRT3847_61910C.1
cccacgcgtccgcccacgcgtccgcccacgcgtccgtacggctgcgagaagacgacagaaggggaatcacaaacgatcttgtctctgtctctggttcgcttcgtctccggcgtctcatttacggtccctgcctctgtctctgtctccgttcgttctgattatacgctgaacatatcttcggggggatctgtgttttggaggattaatttgtagcagttagccttgtcactgtagagaatgcctctgcaactttttgatggcagtgattccgaaaatgaggacatttcaaagatcaagatagacgagaagtatgctcgtaggtttgagcacaacaagaagcgggaggacctccagcgttttgaggaattaaaaaagaagggtgttattgattcaccttcaccctcacattctgaaggtgaggaggaatctgagtctgagtcatcatcagatgatg

SEQ ID NO: 100662 - DNA, 769 bp, Glycine max
  unsure (1)..(769): unsure at all n locations
  Clone ID: PAT_MRT3847_61911C.1
gtgcggaggttttaactagagcgcgggcttccaacactgggaaacatcaatttagagcgggaactcaattaacatttaacagcaacataacacaacacaaccctgtctccacttcatcatgcgttctcagcttgtgaaatcgaatatcaaaacccctccaaggccaaaacggcgtcgtcaaccactcaaatcatggcctgttactttctccccctttgctcgcgctctcgctctctctcgcatcacctctctctctccaccaaaccctaccccaaccctctctgctaagaaaccgcaaccctctcatggatctgtccatgcagatttatcccaaccggaacactccgagtcttccgacgaggacttcgatggagttgtccaagcagatttttcatttttcgatcccaaacctaatgattttcacggagccaagaccttgctgcaaacctacctcgacgaccaggaatgggatttgagtgcctttgtagacttgattttggcacagaccaccgtaggctctgttgttaagatagaggacgacgaggatgaagggctcttcgctcttgttactgctcttaatttatatagatacagggagcataagtgtattgcgacagttaaaggatttctnctncataaagtgcgccaagagaagagtgtncatgaccagttgaaatttgctgtggggagcaagcgcatgatgtggtctcctggatcgcagcgcatggtgaaccttcctcccagattctgcaactcttatgatgccctt

SEQ ID NO: 100663 - DNA, 3076 bp, Glycine max
  Clone ID: PAT_MRT3847_61912C.1
cctcaggcgccgcttgccatggggagctcaaggtgggaagagtaatgtattctttgcaaaaactttggatgatcgatttatcatcaaacaagttaccaaaacagagcttgagtcattcattaaatttggtcctgaatacttcaagtacctttctgaatccataggcactggaagtccgacttgcctggcaaagattcttggcatataccaggttacatcaaagcatcttaaaggagggaaggaatcaaggatggatgttttggttatggagaatcttctgtttaggaggactgtgacacgactttatgatcttaaaggatcttccaggtctcggtataatgcagatagtaccgggaaaaacaaagttctactggaccagaacttaattgaagcaatgccaacttctcctattttcgtgggaaacaaagcgaaaagattgttagagagagctgtctggaatgacactggttttcttgcttcagttgctgtgatggactattctttactggttggagtggatgaagagaagcatgagttggttattggaatcattgatttcatgaggcagtatacctgggacaagcatcttgaaacatgggtaaaagcttcaggcatccttggaggaccaaagaacacatctcctacagttatatcacccaagcaatacaagaaaaggttcaggaaagcaatgaccacttactttctcatgcttcctgatcagtggtctccttctattattcctagtcattctccggcggattagggggaacccaccgctcaacctcggacgagcattaactctatttatggtgatctaatgcttaacgatagccccagccatggaggaggaagtgttgtatttgatggaaaattttcacttgatgcagtgcatcaagaaattgacatggccaaaaataaaaatcttgagaaagatgacgaatataatctttcaaatagcaaaagcaagaatgatcaatccaaccttttagaacctgactgccgtggtggctgggctcgcgctgatggacctgttcccctctggccgagttcgtcggacacaagccatgcaaaatggactggtgaaaaccactcaggatatggaattcaaaaggataacagttctgtaaatcctgatatacttatggcagatgctttgacaaccagtgcacaaaaagaaatatattatctaggggatcgtacagaagatcaaaaaggtcatgatattatggaaaactcttcaacctggttgggaatgcccttcttgaacttctatcgccaatttaacaaaaacctttttgctagtacacagaagtttgataccctagttgactacaatcctgtttatgtctcatgtttccggaagcaagaactccagggtggggcaaggctgcttctaccaattggtgtcaatgacactgtaattccagtatatgatgatgaaccctcaagtattatagcttatgccttaatgtcaccagaatatcatttccaattaaatgatgaaggagaaaggccaagagaaggaaatgagttcacttcatcatatttttctgactcaggcaccttgcagtcattctcatctgttgacgaaacagcttttgattctcaaaaaagttttggatcgatagaggaaatgatattttccatgtctgggtctcgtaattcatcaatattggacccaatgttatatactaaggctatgcatgctagagtttcctttggagtagatggtccccttggcaaggtaaaatattctgtgacttgttactatgccaagcgatttgaagccttaagaagggtctgttgtccttcagagctagactatataaggtctctgagtcgctgtaagaaatggggagctcaaggtgggaaaagtaatgtattctttgcaaaaactttggatgatcgatttatcatcaaacaagttaccaaaacagagcttgagtcattcattaaatttggtcctgaatacttcaagtacctttctgaatccataggcaccggaagtccaacttgcctggcaaagattcttggcatataccaggttacatcaaagcatcttaaaggagggaaggaatcaaggatggatgttttggttatggagaatcttctgtttaggaggactgtgacccgactttatgatcttaaaggatcttccaggtctcggtataatgcagatagtaccgggaaaaacaaagttctactggaccagaacttaattgaagcaatgccaacttctcctattttcgtgggaaacaaagctaaacgattgttagagagagctgtctggaatgacactggttttcttgcttcagttgatgtgatggactattctttactggttggagtggatgaagaaaagcatgagttggttattggaatcattgatttcatgaggcagtatacttgggacaagcatcttgaaacatgggtaaaagcttcaggtatccttggaggaccaaagaacacacctccaacagtaatatctcccaaacaatacaagaaaaggttcaggaaagcaatgaccacttactttctcatgcttccagatcagtggtctcccccttctattattcctagtcattctcagtctgattttggtgaagacagcacacaacctaggactccagctgaatgattctttgttttgtgtttctgtaaattttactttcaatttggggaattaactcccccaaattttatattaacttcttttttgtttttccctcttaaatgatataggaattcttttggttcatttgtaattttgtcaactagatattatcaattatttgttagaagatgccaaagaagggctgctagcactttagcagccaaggatgtttgtctggggtaaaagtatttgatgacctctggatgaaatctttgtacaaaaacctacagtaacgttctaggaacacgttctatacatgtatatgacttaaatttctcaaatttctttgccattaccaaaaaaaaaaaaactttttttcttttaaaaaaaaaaaaaaaaaaaaaaaaaaaaaaaaaaaaaaaaaaaaaaaaaaaaaaaaaaaaaaaaaaaaaaaggaaacac

SEQ ID NO: 100664 - DNA, 673 bp, Glycine max
  Clone ID: PAT_MRT3847_61913C.1
aaatctgaagtaaagcacaacatggtaattgcaaagaaatttgagaaattcaagagcatgtctgagaaatttaagtcatatacatgtatagaacgtgttgctagaacgttactataggcttttgtacaaagatttcatccagaggtcatcaaatacttttaccccagacaaacctccttggctgctaaagtgctaacagcccttctttggcatcttctaacaaataattgataatatctagttgacaaaactacaaatgaaccaaaagaattcctatatcatttaagagggaaaaaccaaaaaaaaaaataatataaaatttgagggagttaattccccaaattgaaagtaaaatttacagaaacacaaaacaaagaatcattcagctggagtcctaggttgtgtgttgtcttcaccaaaatcagactgagaatgactaggaataatagaaggagaccactgatcaggaagcatgagaaagtaagtggtcattgctttcctgaaccttttcttgtattgcttgggtgatataactgtaggagatgtgttctttggtcctccaaggatgcctgaagcttttacccatgtttcaagatgcttgtcccaggtatactgcctcatgaaatcaatgattccaaataccaactcatgcttctcttcatccactccaacc

SEQ ID NO: 100665 - DNA, 780 bp, Glycine max
  unsure (1)..(780): unsure at all n locations
  Clone ID: PAT_MRT3847_61914C.1
ccacgcgtccgctgaaacacttgatgcaaaatggactggtgaaaaccactcaggatatggaattcaaaaggataacagttctgtaaatcctgatatacttatggcagatgctttgacgaccagtgcacaaaaagaaacatattatctaggggatcgtacagaagatcaaaatggttccaagagtttctattcttcttttaaaggtcatgataatatggaagactcttcaaactggttaggaatgcccttcttgaacttctatcgccaatttaacaggaacctttttgctagtacacagaagtttgataccctagttgactacaatcctgtttatgtgtcatctttccggaagcaagaactccagggtggggcaaggctgcttctaccaattggtgtcaatgacactgtaattccagtatatgatgatgaaccctcaagtattatagcttatgccttaatgtcaccagaatatcatttccaattaaatgatgaaggagaaaggccaagagaaggaaatgagttcacttcatcatatttttctgactcaggcaccttgcagtcattctcatctgttgacgaaacagcttttgattctcaaaaaagttttggatcgatagaggaaatgatattttccatgtctgggtctcgtaattcatcaatattggacccaatgttatatactaaggctatgcatgctagagtttnctttggagtagatggtccccttggcaaggtaaaatattctgtgacttgttactatgccaagcgatttgaagcctt

SEQ ID NO: 100666 - DNA, 677 bp, Glycine max
  Clone ID: PAT_MRT3847_61915C.1
tatcgatactccaatatagactacaacataactggcggtagaaggtatcccatacctgacaaatcagcacctatttacataacaatcggagatggaggaaatctagaaggtcttgcctcaagttatttggatccacagccagaatattctgcattcagagaagcgagctatggacacgccacactggagataaaaaacaggacccatgctatctaccactggtatcgcaatgatgacggaaagaaagtcccagctgactctctcgtattgcataaccagtattggggaagcaatggaagaaaacagaatgaggttattgatgaagttgtcaatgttaaatgaagttggagcactcgtaaatcgtaaatatggtgttttgaaaagaataaaaatgtgcctatatattgtaatgtatgtagttcaatagtctccgagcgtgcgaaaaggttccattccatgtacttggcttgtattatacagctagcgctaagaaatattaaataaacgcgcttttagcaaggagaaaacaatcgagaccaagatattatctgttcacatctgtgtataatttttgaagcgtggattattttgctgctatttgagtgctttagtgggtattattatatcatgtcaaccttcagcaaaaatatataataataaattatatatatcatgtc

SEQ ID NO: 100667 - DNA, 306 bp, Glycine max
  Clone ID: PAT_MRT3847_61916C.1
gaaggggaaaaaaaaaaaaacatgcttaaaccttccaggggcaaaaacagtttgttggggcccccccagtttcagggggtgcaaactttttttgggccaaaattttaacaacccaaacttcctatttttttaaaaaaaaaaagcccttttgtcctttggggcccctattaaaggtgttaaaaacacacttatcctccctttaaaaaaaaaccttcttttccccggcttttgttttttctggaaagcccctaaaaaaagggggttttggcctttcaccatttcccctttttaaaaaaatttgaaaat

SEQ ID NO: 100668 - DNA, 665 bp, Glycine max
  unsure (1)..(665): unsure at all n locations
  Clone ID: PAT_MRT3847_61917C.1
ctggaattgaggtctattttgatatgatgagaagctttcggacagagtttgatgacctgtttgcagaaggtttgatttctgctgtggaggttggacttggagcatctggagagctaaaatatccttctttctcagaaagaatgggatggaggtatcctggtatcggtgagtttcagtgctatgataaatacctgcagcatagtctgcgcagagcagccaaattacgtggtcactctttctgggctagaggacctgataatgctggacattacaattctatgccacatgaaactggattcttttgtgagcgaggtgattatgacaactattatggacgcttcttcttacattggtactcccagacattaatagaccatgcagataatgttttgtctcttgcaacacttgctttcgaggaaacaaagataactgtcaaggttcccgctgtatactggtggtataagactcctagtcatgctgcagagttgacagcaggatatcacaatccaacaaatcaggatggatattctcctgtgtttgaggttctgagaaaacatgctgtcaccatgaaatttgtctgcttacgatntcatctgtccagccaggaagcttatgaatcattgattgatccagaggggttgagtttgcatgtgctaaactcagct

SEQ ID NO: 100669 - DNA, 277 bp, Glycine max
  Clone ID: PAT_MRT3847_61918C.1
aataaattaatgacataaaaaggaaattaataattaacatgtttttgatatttaggaaaaaaatgtacatatttattttgtgtaaaaagcactaaaggtggtaatagttaatgtaaagtaaatttttaaaagtttatttctttaagggaaataaaacaattacacgatgcgtgtgtttatctatatacacccacacgccgggttccacaaaaactacctatgcgtaatggtcgcttatatatttaccttgctttttcttacaccaccttttgtgcct

SEQ ID NO: 100670 - DNA, 210 bp, Glycine max
  unsure (1)..(210): unsure at all n locations
  Clone ID: PAT_MRT3847_61919C.1
ctctctctccttctcgctctttcagctttgacttttgttggaaataaggcctaatcaaaatggtgaagttcacagctgaagagctacgtcgtattatggatataagcataatatcgaattgttgctgccagtgacaggaatcacctangtcctgtgtcgtgatatgnagagtcgtagcgantnncgnatantnnggtcanantngtncnt

SEQ ID NO: 100671 - DNA, 469 bp, Glycine max
  Clone ID: PAT_MRT3847_6191C.1
acggctgcgagaagacgacagaaggggatgttagtcgctcatgcagactccttaggattccttttgaatccaacggtggtgtttgttgtataaattcttttgggatcaacccatgccatcatgttttagtgggattgatagacccatggtatcacttataatctgaagtcaggaaagtttcatttggtcatacaccaaagtgtaaccatccattgccatccttcaatggtacatgcaatcggtcccaaaggcttatatgttcttactgtgcaaaattgtcaaagttttaaacgaaaggacaggggaaatccctaggatcaatatttcggttaatttattaaatgtcaaatggctccatcatcgtcactccaaaattgtcaagtgactaaatcaaacaaaacatacactctgagggagtccccaaagagatttgcgaaaaagataggatgaggtctcatgactaatcacg

SEQ ID NO: 100672 - DNA, 764 bp, Glycine max
  Clone ID: PAT_MRT3847_61920C.1
ttgatttatttttttttgcaaaagataaaatatattatttccccacgctaggacgagagctgtcgcttctcaaaggcttgtaaaataagagtgtgcaaacaagatttttgcatgcttgaacttttgttgaaatggttatgatcttcgttccaatgtatggtagttctcaaaagcaaaaccaaaataaaagcaagagtcctgatccttttgcaaaaatgattttgcctcaaacatacttttccatctgatttctaaacatgcactaagagtgttggtagttctcactagaatgaggacgattcaccattacttaaaaaaaagtgcgttgagcaaaagcaaggcaattgcttcctgcacctccttattttgaaatcttccgagattattcttccatcttttaagtttgtacgacccacaaatgcttctctgcacctccttatcttgtgtattcgtgtctccagagtggatcttcttgacccaccgtcaaaatctaaataggtggggtacgagtaaacccgtagagataaaagaccaagtatgtgcctccggagtttatcaacaatcttgccaaacatttgcacttcaggatatgactttggacagcgtacaaacagaaaattgcaacacaggatccatgttattttcaaattcttttgcagacatgcaataataaatgggacaagtaaaaggatcccccatcagcaatatttctctcaagttcctctgccacgtgtttaattatctgagaaagtaactcagcatta

SEQ ID NO: 100673 - DNA, 1552 bp, Glycine max
  Clone ID: PAT_MRT3847_61921C.1
tttacaccatccgtactattttgtttcattttttatttaatttttccgcagtcataacgacaagccttattttaattattattattttttatttttatggtgtgcttgccttgttggttattgtgagaaaggaagagggtttgtttccgttttgtttgtgaattgtaaagaaggaaataaaacattttgggaaggatttgaagtgggttattgttgtttgtggatttcttcattgttttgctctaaaaatggagagagattttctgggtctgagctcaaaagaaccattggctatgatgaaggaagagatgaatattgatattggaagcaaagacacaggtttcacaaatggagcagtggtaaaatggcccttcatgaacaaagtatatgtccatcctcttttgatgtcattcaatcctcctcaggtgaattctgtgaaccatcctcatggtatgaagatgttttcagttcccaatcaagcaatttcagtttccatgggacatccatccctaaagaatcattttgcaactgttggtcagaatatgaatgttgctactgtgaagcaaccactactcggaggaatacctgttacggtgcctcattcagttcatcccattgttggtgctgttgctggaatgaccgaaacacgcgtgaaaccatccgtacctgctcctaaacttacaatcttctatgcgggcactgtgaatgtctttgaagatatctcccctgagaaggcacaagctatcatgttgttggctgggaatggcttatcagctggttctaatgaggcatcacccaatgttcaggcgccctgcttgaagttggcagtaggtgatggtgtgcctgttagtcaacccataccaccctgctccggtctttcaagtccttcatctgtttcttcacatactggttcaccgtcagggagtggttcaagtagcaatgatgagtttctcgcagctaaaacatctggaggtaccacttcctctgttaacaaagtggagactccgaaagtagtcaacacaactaccatgctaacatcagctgtgccacaggctcgcaaggcatcattagctcgatttttggagaagcgcaaggaaagggtgatgaatgcagcaccatataacctcaacaagaagtctgagaatgtgccacagcagaatacaatggtttctaacatcactgcaagcgcaggagattacttcagataaagaatatttgttgtaacttgtaagttgtaatatatttatgttgcatgcatatgattttattttatttatcagaacttatgctgagattcttaagtgtaaaactatgttcagtccattggtaggtccttaccttaattatttctagtgtaggggctttaccttattacttgaaagttggattttaccttccaacagtatagcattagcatatagaccactatgtaactgtatctgacaatttgttacattgtggaaattaaaagcaagtttagatatataaaaaaaaaaaaaaaaaaaaaaaaaacgaccgatctatatatatatatatatagtactatatatat

SEQ ID NO: 100674 - DNA, 434 bp, Glycine max
  Clone ID: PAT_MRT3847_61922C.1
ggaaagctgctgctcctagaggtaccgctgctccataactgccgcgacgcacgcgtccttcctgctgctgcgagacgacaacacggggggggaaggagctgttgtcgttattggacattctggcgatctaggtgatggcggtacggcggatccaggagcttctcacgacgagattcccgccggagagttttccagtgaaggttgcgatcccttgtggtcctcactgtaagggtggtggtcacctttaccaagttcgtgtaactgtaacctgtgtagaagttctacacgccgatattgagtcctacgcatttgctcaaagcagatgatgatgatccttctggggagatccactatacctggagaagagacctatctctagcacattctttggggtgaggcggagtaagcatccatcaacgaaattcttcttcttc

SEQ ID NO: 100675 - DNA, 185 bp, Glycine max
  Clone ID: PAT_MRT3847_61923C.1
gtttggattctacccaccttggattccctggtaaaaggcctggccaattccaatttggttggtttttgccttttagaattccaataggttaaatgaggtgggttttttaattggagagaaccctcgattggatttttggaaattccgattcaggtttgaccggggggtatacaaaacaacttttt

SEQ ID NO: 100676 - DNA, 457 bp, Glycine max
  unsure (1)..(457): unsure at all n locations
  Clone ID: PAT_MRT3847_61924C.1
gggccgggattccgggggggcggacgcgtccgtacggtgncaaaaagacaacaaagggggggggcgggagagcatcaaattaacaactgggggggggggaataagggtgggggcgggatactctgacgaggaacacgtggtggtggcgggggcgggaactattcactcattaatcaacccatgtggtgggcctatctttctcaaaatgcccaaatcaacttttccccgaattttcaataaccggtcggttggtgggcacctccaacctcggcaatggggtctcaccggattcttcagggggggggggggacaggcaggtcggaggacaaggagaagggggggggggggggggcacgtgcggggggggttccgacacgggggggaggggggtacgtgttctccaaaccaggggtggagggggccttggggcgggggtgggtggcatggatttggcact

SEQ ID NO: 100677 - DNA, 184 bp, Glycine max
  Clone ID: PAT_MRT3847_61925C.1
atatgcgccggccgataatgtagagaatctctaaaatttaatctccaatcattaggacgacgaacccgacccacatactgagggtctaggacgaataacaccggccagcatgcgcagaacgctgcacgagtggcaaccgtggaaaaggaaccgggggcgtaaccatacgccgaaaacaataaag

SEQ ID NO: 100678 - DNA, 317 bp, Glycine max
  Clone ID: PAT_MRT3847_61926C.1
ttttaaagaagtgcattcgatccaagttcaactaaatgacattccacatttgatgacgcatctggtaaatgacacatcagattctcgaaccaactaattccccacggaacctgcaccttggctgatgcagaaattactcaaatggggcatcacactggcaacaccgacgattgctcaaactaccctacaaccatggggcatgtggccgcaaaaagtatgtgagatgaatgtgaacactgcgtgtgacatcacacaggttaccagtagccagacaagaatttaagaaagccaaagtgtcttcatccccgcatcacttt

SEQ ID NO: 100679 - DNA, 354 bp, Glycine max
  Clone ID: PAT_MRT3847_61927C.1
gtagggcattttgccctataaattatgaattgtatattcttgtttaaggccgaacaaatttgaggggcaaaaaaaaggataagaagtgaagactttcccaaaacatggatacaacccccagacacgataccgtgggagataattttttaattacgggtttcaatcttaaaagacaggacccaaatccaggggccccccccctattggggatcccttatggaaaatagggaagggaccgggacctggcccttttagagcgtccccccttaggggggggggggcgccttggagaaaaatgtataccccccccacctggggggggggggcttggaccaccgggggggggcccacccc

SEQ ID NO: 100680 - DNA, 426 bp, Glycine max
  Clone ID: PAT_MRT3847_61928C.1
tatacaagggggcaagactaacgggggtgcagctacccccattttgagcataagtctcacaacttattaaaactctagtccatttgcacaacatttacatgacaaaaaaactggcgggtgtgatattttaacatgcccacatccccagataaacaaccgatggaggactctttgctgtccacatactaccaaatacagtagcacctggaaagctggatgcgccatgtgtgcattgcccatgaacacattttagcctaaccactgcctattgaacgacggtgcactgttttattaccattattgctttagagatccgttcacttattagcggaagtatcgattctgtaaactaccatggacagagctcagcatcttttcttcactaatcatctgccatctgaatattatgttattaactcccacttt

SEQ ID NO: 100681 - DNA, 336 bp, Glycine max
  Clone ID: PAT_MRT3847_61929C.1
gggccgggacctggagggggaccaagttttccttatagggagccgaataaaacctgggggaaacaagggcaaaagtggttcccgggggaaaatggtaatccgttaaaatttccacacaaaatacaacccgaagccaaaaggggaaaacccgggggggccaaaggagggaccaacctaacataattggggtgggcctaattgcccgttttcaagcgggaaaaccggccggcccagttgattaaaggaatcgcccaccccccgggaaaaggcggttggcgaatgggcccccaggggggttttttttttaaccagggaaacggccaacagttgatggcc

SEQ ID NO: 100682 - DNA, 416 bp, Glycine max
  Clone ID: PAT_MRT3847_6192C.1
gttttggtgtggatattaaaaaccagaaaccctttttaaaagaaatgggcctaccaaattaattttttggccaaagttgcaggaaaaaattattggcctccaaattaaggaaggggaaccaaaaaccctccactggtcaaatcaatttggttgttatttgagggcagcccctttggaggcctttgggcctgggcaagtaccaaatctcctccaaaaccatggattctaaaaaagaaaataaatctcctaaatgggaactttcttggtttcgggcaaaaggaagaagacaaagaagctcatgaagataattaaggaagcaaagagcaagaagatcccaaatttgagggggcaaagggacatgaggaacaattgagcaacaagtgcagggaagatcatgttgacacagaccacaatac

SEQ ID NO: 100683 - DNA, 369 bp, Glycine max
  Clone ID: PAT_MRT3847_61930C.1
gttaaaagagttctctacaaccgcacaatctggtagaggagaaacctttacttgtgatataaatggtgccggttcacatctatcagatgagtttcctgaaacggaagagcaagaaaaaccctcaatgagcggtgcccaaacgagacaaagaattgattctcactccatcgaggttcaagctgacacgtgtactaatgtgctaagactgcctgttgaagatgaagaaacttcttaaaggttccatgctcgatcttaaaatttctgaacataaaagtgcacttaccaagaacacatgcggctgtactattacatgtagggctctatggggagacttcttgatcgcgggcattttttgactaaggttttgat

SEQ ID NO: 100684 - DNA, 280 bp, Glycine max
  Clone ID: PAT_MRT3847_61931C.1
aaaaaaaacccaaaagggccccccccatacttattggtttgctataaaaataatcttacatactttgctgtaataaaacggcataattcttaactttggcaagcattacatgttctaaaaaacccctcaaaaaaattcaagaaatataggccttcttgatattacctgcattgctgacataaagaataaggaagctcttttaccaaacaataatttgactttaaagggaggaaaaattgtctaaaaaagctaagggtgattcaaaacccaactagaaccc

SEQ ID NO: 100685 - DNA, 202 bp, Glycine max
  Clone ID: PAT_MRT3847_61932C.1
ggaatccggctcgagctcttcaaaaggtagaagaaacggaatgaaaactctcaaaaaactattacagcaatggcagaacaaaacctaaaccaaacaactggagctggaaggcatcaaaatgttggtaacaagagccttctacacagtgatgcactttaccagtatatgctggcgactcgtgtctacccaagagaacctgaat

SEQ ID NO: 100686 - DNA, 1833 bp, Glycine max
  Clone ID: PAT_MRT3847_61933C.1
ctgggccataccattcaggtcaaggagatgcaatcaaaccgttcatgctcaatcaagttccacgcgtccgagatgattattccagtatgcaggactgatttgacaatgtggatttgccccctggggtggaggcatcactgccttggttgaaggacatttcttctagtgaatgcaagcaggctattgctttttcccgtacagaatctagttccaaggcaaaagtggatgaaactgatgatatagtcatgcaaaagtttcaacaatttaagcaatttgatactgttgactcttttcctgatcatcactatgataaagagggaactaaagatgcacagaagcctaaaaattgggccaaaaagatccaggaggaatggaaaattttagaggaaaatctgccagagacaatctttgtgagagtttgtgaatcaaggatggagcttctaagggctgttataattggacctcaaggcaccccataccatgatggtcttttctttttcgattgcctctttccttctacctaccctgcaggtccaccgaaagttcactaccattcaggtggcctaaggctaaatccaaatttatataattgtggaaaagtctgccttagtctcttgggcacttggcatggtagtaatagtgaaaattggataccagaaaaatcaaccatgctacaagtgttggtttcgatacaagctctaattctaaatgagaagcctttttttaatgagcctgggtatacgtcaacatatcctggtgctgaggggcaaagaagatctaaggagtacaacgagagtacatttattttatccttaaagacaatgatgtatactctgcgtaaacccccaaagcactttgaggagctggttgcgggacatttccgtacccgagcatttgaaatactgagagcatgtaaatcatacacagagggggctccggtcgggtcggttctacataatctagctccaagttgtggcaatagttctacggctaacgcccagaaagaattcgagtcagctgtgagtaggatgatgaatactatgattgcatttttcaccaagaatggctccacagactgtgatgagtttcgatctcccgagatttatagtctgtctgctgtggctacttcaaacttagaggtttacaagatagagtctggtacaacaacatcaacatcaacatcattgacccaggtgtgaaggtcctaggttgtttatgctgatgatgagaacaagtgtagtgggtggtatatttttcttatacttattgtggtgattttttatgtcccacatgacatgacaaacctctttgctggttatataacccctagttgtaaagatttacacgacagattgtgatgagtttcgatctcctgagatttatagtttgtctgctgtggctacttcaaacttagagatttacaagatagagtctggtacaacaacaacaacaacattgacccaggtgtgaaggtcctagtttgtttatgctgatgatgagaacattgtagtgggtggtatatttttcttatacttttttgtggtgatttttatgtcccacatgacatgacaaccctcgttgctgattatataacccctagttgaaagatttacatgctagttctagctcctcgaaagatggttactgacttcctataatttgcatgtttctttaataaaatgttaatagttttatgagatcatattatcatgtagatgctagttttcccaaaatatcattttccgttggacatcacagaaaacttcctctgtaaagcattggatgatatatttagttctttgatgaaatgtatgtaaatatactatttctgcc

SEQ ID NO: 100687 - DNA, 1110 bp, Glycine max
  Clone ID: PAT_MRT3847_61934C.1
tttttttttaatgaaagtatgaaagctgaattgcttttttttaaaaaaactacagaaaaatacaacaaaacctgatttaaaaaaaaataaaaatagttgtttacaaggctagggagtagggactacggtttctaaatctacaagtcatacactactatacatgaaattagtcaacaagtttcactaaaacagcatgagaaaaacctattgactttcatcttcaaattcaacgccatcaccgttatcttcatcagaactacaagtattgtccatcaaattgacttgagactgttgaaacttattgatagcatcgcgtgcttcagaaaccaaggcaacttttgctcctttaactacatcccttttctgaatgctggttccttcaccaattattttcgtagcggctgctcttctcctagattccctacagcgcaattgattgatatatttctcatgcattaccctgttctttactttctttagtactgggggactaacaagttctgtaacacacgagccactcaatcttgaaggtggcttcttatggcttgaagatgatgtttcagtgcaattttgcgggaaccctttgttttccttttgctgcttcggagtagaaagtgcttcactaggctgtaaagcattagtagaaaaatcagtgtttggttcaagaacagaaaatatgtccccttcacgatctagatctactttaagatggcgctgtaacagcttgtcaacagacttctgggtaataatgttctttggttttagaacattagatcttctagctgttttatccataggtttgagaagtttacttgcagatatagaaaattggtgaatgggtgatgacttcaatgtctttgccctcgaatcgaggctgagtttcaggtggtgtcatatagtcacagtgaattctatcaaagcaatcttgttgagactttcctggcacctgcttcggatcgtgcttcccgatgtggcaaccaatacaaggataaaacatatctataagctagtcccatccgcatgtatctgacaagcaattgactgccaacagactataaaactgcatttgttctttaagaaatatatacatacagaaaactaaaactttct

SEQ ID NO: 100688 - DNA, 896 bp, Glycine max
  unsure (1)..(896): unsure at all n locations
  Clone ID: PAT_MRT3847_61935C.1
ggctagaggttctaaatcgggaattcccgttctgaataaacttcaaagttcacacacacaaaagaatcagcatggctttcaatcaagagttagaagctgtaacccaagctttctcagggcatggagtggatgagaaatcattggtaacattactgggaaaatgggatcctctggagagagaatctttcaggaagaagacaccacatttgttcagtgaagatcatgaacgccattttcagaggtgggatgatcaatatgtccgtcttctcaagcatgaattcgtgcgttttaagaatgctgtggtgctttggtccatgcacccttgggaaagagatgcccgtttagtaaaagaggccctaaagaagggtccaaatgcatatggagtgctgattgagggtttcatgcactagatcctcagaagagctattgggagctaggaaggcataccattccctctttgaccactccattgaagaagatgttgcctctcacatccatggcattgaaagaaagctattggttgccctactaagtgcctatagatacgaaggaaaaatggatagggatctagagggagctacaaggatttcttgctaaacttgattgttagaggaggctaattgaagaaattgaaaagagaacaaaaacttggaagatcaaataaaaaaggaaaattttttcctcccagttttccttgatttgttgctgatccttttcattgcatgatatttcttcatcttgtattactgtcgtcacaaaaacaaaaaaggaaaagtgtaatcaaataaaaatgttcaggtaatttcttccaactcgactatgtccaagtttagaaatgagatgcaagattgtatntgataaaataagtaaatgctagatatattacaaagaatgct

SEQ ID NO: 100689 - DNA, 235 bp, Glycine max
  unsure (1)..(235): unsure at all n locations
  Clone ID: PAT_MRT3847_61936C.1
cacatttccacacaagacgtcagccgcggtggtgtcgcagacacttctcatcgacaccaacaccccagctatcaacgctgcgcccgtagagctagacggtgtacccatggcgggcatcaccaacccaggggatganggggacaaggaancgagatttctgagtggagaggcgagagtcggggcgggcgaggcacgttccatgcatcccgtgcacaccaaactcttcattatattg

SEQ ID NO: 100690 - DNA, 1773 bp, Glycine max
  Clone ID: PAT_MRT3847_61937C.1
tacggctgcgagaagacgacagaaggggatccttgaatagatcacataacatggcatcattggcatgcaacacgtttattgttagcagcacgttaagatcagttgttactcgtgcggaaccacctaaacctggtcctcttttcgatcttagttcattcaatcgccacagctttccggcaggcttcactttcggggcatcatcttccgcgtaccagtttgaaggtgcggcaaaagaatatggtagaggaccaagtatatgggatactttcatcaatcaacatccaggtaagatagcagatggaacgaatggagatcgcgcacttgaccaatatcaccgctacaaggaagacgttcagatcatgaaaggtatgaatttggatgcatataggttctctatctcttggtcaagaatcctcccaaatggaaaacttagtggaggtataaatcgagaaggaataaattattacaacaatctcatccatgaattgcagactaaaggtttaaaaccttttgtgaccctttttcattgggatctcccccaagctttagaaaatgagtataaaggcttcttatccgagtccattatagatgattttggagactatgcgaaattttgtttcgaagaatttggagatagggtgaagcattggattacttttaatgaaccgcatatttttagctcgcatggctatgcatatgggacgaaggcaccgggtcgtaagtctcaggggctccgtccagacagtggagggacagagccttatcgtgtttcacataacatacttcttgctcatgcaaaagctgtccaattgtataggaattcctataaggaatctcaaaatggagagataggcataaccctcgattctagatggttcgtgccctattcagatgcttcttcagacatagaagctaccgaacgagcacttgacttcgagattggatggttcatggaaccattgacatcaggaaagtatccagaaagcatgcagctttatgttggtagacgattgccagagttctctaaagaggaagccgagcttgtccgtggatcatttgattttattggactaaactattacaccaccaataccgcgcgcgttgccactggctatacggactcagtgcatcatcatccagatctatctactgatcctaatgtcgaacttggattaactcgtctcaacgggtcgtctcctataggtccagtgccaggtttaggatggttatgtgtttatcccaaaggaattagagaattgctgctccgtatcaaaaacctgtacaacaatcccttgatttatataactgaaaatggaataaatgaattagatgatccaacactatcacctgaggaatctcttatggatttttacagaattgattatcattatcgtcatctattgaatgttgattatgcaataagggatggcgtgagagtaaagggatattttgtctggtcactgctggactgctttgaatggagtaatggttatatacctcgatttggattgatttttgtggatcacaaaaataatttgaaccgatctccaaaactctctgcaaaatggttccggaaatttttacaaaatcgactgctttgaatggagtaactcttaacaatgtaataaatttaactatgaattattatatgtttgtattttctccaaaaggaaaatatattccttaaattattcgtcctctatatatcatatttgtccatgttaaaatgaatagtgtatccaaagattaaagtataagttataatttccaatt

SEQ ID NO: 100691 - DNA, 280 bp, Glycine max
  Clone ID: PAT_MRT3847_61938C.1
ctctagtatcctccacagtttcatacaaattcgtaatcatttttgctacgatctaccgcctcttcgaagctccaccgtacttgcaaagttgggtggcatggtatttggcctaagtctctccatacacacatcaactctcagtttttaactaaccggcgacatatttagcatccatcgcattcagttccaagctaacttcagtcaatgtttcgcatctaacatagcccatgtcactcactacagatttgctctctcgaactggtggccttcaccatgcatt

SEQ ID NO: 100692 - DNA, 417 bp, Glycine max
  unsure (1)..(417): unsure at all n locations
  Clone ID: PAT_MRT3847_61939C.1
gatttcctcatgcatgaacctcttgatgtaatcggcatgattctacctcaatacattatttcatttcctaatttccctccttaaataaggacaatatcattcaaattttcctaattaaataaggatcatatcttcccaaattttccaaaatcagaagcaaaaaatatatagaaaattcctaaaataaaacaaaaaatatttttaaaattaccgtaaaagataagattgtcatttttgacaccctaatttattaaatgaagtgatgatgttatggcatttgtaccttgttttaagtaggggctgatatcagtagtttggttatcagcaaaaaaaggtgtctccgagtatctcataaagcacacnaggggattgactcccctaccgtctgtatttggaagacaatcttgtatgccgctc

SEQ ID NO: 100693 - DNA, 352 bp, Glycine max
  Clone ID: PAT_MRT3847_6193C.1
gcgtaaatgataataccattaggcgagcactcaagggcctattaggctcatgaccttgccatattttgttgctgctacaaacatcatcacatcttgcttttgagaattctatacgcgaaaggaaaattctacatttaacaccaaggagcatgaatgccttcttccgctttgatacaaatcacactaattattatataggcctatatagtgctgagatcaattgcagacttatttgcaactgcctcaagagcattcttctctatcgccttcaatgccttatgtgacaaacgaagctttacgtaacgctaacctggttgccaccaaagtatcttgtactgaaggttcacaaact

SEQ ID NO: 100694 - DNA, 352 bp, Glycine max
  Clone ID: PAT_MRT3847_61940C.1
aaatggttgtgtttcacaggtctgtatgaactcccctcatatatcagcactctctatgaggtccgacatacaaatactatgggttatttgatagcctcgacggtcgattctaaagcgtccgcggagaaatacaacattttaatgccgacgatggcgacttggcagtgatgtgcctgactgtaaaaaatgcgaagagccgactcttgcactggcaatgatcgttccccatcttcagcctaacccatagtactaccatggtcacttcatgcttcaccgctgctaacagcccttggcgaccacaggactccactggctgtccgctctggtgaaacatgagccgacttggaaatta

SEQ ID NO: 100695 - DNA, 299 bp, Glycine max
  unsure (1)..(299): unsure at all n locations
  Clone ID: PAT_MRT3847_61941C.1
ctctatcctattctgctcgagtttaatcttacagtgtaacctaantaccaggttggaatgaattttggaggtgacaaaaatcacttttaaagatacccaaaactttcatcattatggttcaaggattttctcaaaactaaaatcaaactttattaagattacatgcaataatactattttctatttgatactcctttattaagtaaatacatatttatatatatccctttatatatatatacatatacttttcgtgttaaattatccattatgtctttcattatttattttttcttttt

SEQ ID NO: 100696 - DNA, 352 bp, Glycine max
  Clone ID: PAT_MRT3847_61942C.1
ctgttcttatattattctctaacaggcggggtggattcaaaagaaataaatatgatacaactttttgcaataaaaattgcaagatatatatcaaagagaaaaatctcttctaaatttagtgccaaagaaacaatcatgaatgtcctgagtactgtgaattccctatataaacccttttgatgacccaacagtctcttcaaatcatcaaagcccccagaagaatccacacaacacatgaaacaccttcaattcctagcttctccctaacctttattctcactaacatcatatcactatacttttaccttaacatgactaggtaccaccatccctactactactacttgtggga

SEQ ID NO: 100697 - DNA, 280 bp, Glycine max
  unsure (1)..(280): unsure at all n locations
  Clone ID: PAT_MRT3847_61943C.1
atcccgtgttctggtcaacttttctcttttctcccttctcccccatttgttcattctccgacaccgcacagcgaccaaatccaccattcattcttttttccctttttgcaacagcgcaatggcacgaagatccctccctctcctaaagcactcctcatctaggggcggntcccggcccgatcggtnacgtanatgcnacggncgggcnacgggtcctcctcggctgtgncgcgnnccggggnaaggggatcnggcccnantgacnggggctntnagaaaa

SEQ ID NO: 100698 - DNA, 730 bp, Glycine max
  unsure (1)..(730): unsure at all n locations
  Clone ID: PAT_MRT3847_61944C.1
ccggtccggattcccgggtcgacccacgcgtccggccctgcccagctgtaaccgtccaacctcaattcattcattctatgttgttgcctctcttcttctgttcgtcttcttccctctcaccctttcaactttcaagtaacaccacactcttcttttcttactcttactcttatgcttttcaccttcttcacttcactaccctctacccttttctgagacacaaacactctcttcctgttccacgcttccaatggcttcatgtagtatagggaccccaaatattaaagcattgaacttgcactttggtggaaaaaaagttggcctttcacgacaatttggtacaagaagctggatcagtaagctgcagtatactagtttggttatgtcacgacagacagttaggtttttagcatcatccaatggcccatcgacagagatccaatttgctgcaaggtcagaaggttctgaagagattagatcttcaggtctgacaagtgagcttattcctaatattattgaggtggagttcctgctcacaaaattatgcgacacaagttcaattggggagttagatttaaaacttgctggatttcacctgcatgtagtgagggatttgactgaaaaaactaaaactctacctcctctgattcctgcttctgtaagtataattaatgtcacagaaacacctnanacanatggatcagttcctacaacttcgttggctgtctcg

SEQ ID NO: 100699 - DNA, 619 bp, Glycine max
  Clone ID: PAT_MRT3847_61945C.1
caattcattattcattctatgttgtctctcttcttctgtctgtcgtcttcttccctctcaccctttcaactttcaagtaacaccacactcttcttttcttactcttactcttatgcttttcaccttcttcacttcactaccctctacccttttctgagacacaaacactctcttcctgttccacgcttccaatggcttcatgtagtatagggaccccaaatattaaagcattgaacttgcactttggtggaaaaaaagttggcctttcacaacaatttggtacaagaagctggatcagtaagcagtcactgcagtacactagtttggttatgtcacgacagaaagttaggttttcaccgacagagatccaatttgttacaaggtcagaaggttctgaagaggttaaatcttcaggtttgacaagtgagcttattcctaatcttattgaggtggagttcctgctcacaaaattatgcgacacaagttcaattggggagttagatttaaaacttgctgggtttcacctgcatgtagtgagggatttgactgaaaaaactaaaactctacctcctccaattcctgcttctgaaagtataattaatgtcacagaaacacctaa

SEQ ID NO: 100700 - DNA, 1000 bp, Glycine max
  Clone ID: PAT_MRT3847_61946C.1
aaaaaggccatgtagttgctgtcactggggatggaacaaacgatgcaccggctctcaaagaagctgatattggactctctatgggaattcaaggtactgaagtggcgaaagagagctcagatattgttatattggatgacaattttgcatctgtggtcactgtcttaaggtggggaaggtgtgtttacaacaacatccagaagttcattcagtttcaattgacagtgaatgtggcagcacttgcaatcaactttgtggcagcagtgtcagctgggaaagtgccactaacagcagtgcaattattatgggtgaacttgatcatggacacattaggtgctttggctcttgcaacagaaaaacctacaatggaattgatgcacaaaccaccagtgggtagaacaaaacctctcatcaccaatgtcatgtggaggaacctattggctcaagctttgtaccaaatagcaattttgctgacccttcaatttaaaggtgagtctatctttggtgtgacatcaggagtaaatgacacattgattttcaacacatttgttctttgtcaagtgttcaatgaattcaatgcaaggaagatggagaagaggaatgtcttcaaaggcatacacaggagcaagttgtttttaggcattattggcataacaataatccttcaggtggtgatggttgagtttctcaagaaatttgctgacacagagaggctaaattggggacaatggggtatctgcattggtttagccgcagtttcctggccaattggttgggttgtgaagttaatacctgtcccagataaaccattcctcagttttttgagtaagaagaaatgaagacatagccatgtatgagtggtgtcttgtttgatccattcaatctctcattaatcatttagaattctgttgggagatattgtaaagaaagattgctagagtcaaatcatcgtgtagacccgatgtgatcattcttatttgtatgatatatattcttttct

SEQ ID NO: 100701 - DNA, 313 bp, Glycine max
  Clone ID: PAT_MRT3847_61947C.1
aggatccatgcaagactctcatgacgacaggaacagatgtttatgtttgacaactgatagaagagcgttaagtacaggaaggagtaacacactcttaataatatggacgttgggcgggcataggaggactacttagaggcattgacagaaacgcctaatagtagacgaagtgcgtacaactctccattatagcctggcaactaaagcaccatgttcctatatgctcacgtaccggatgtccatgcggagcatgtaactatactatggccatcgaagtacgcactgagctcactatacgattctcttatcactg

SEQ ID NO: 100702 - DNA, 254 bp, Glycine max
  Clone ID: PAT_MRT3847_61948C.1
cacagtacaatgagcggaacacattctatggattcagggaaaccaaggcaggaatcttatcaaagtcatgcaataccatgagatcctctgaatccacagtacaatgagcggaacacattctatggaccctttgaagaggattttttagaagattttgtaagacaaaacctgattcctttggctgtgcctgtatcctatgaaacactcaagttgatgaaagcagatggaaggaaaatagttttgacaattgttga

SEQ ID NO: 100703 - DNA, 368 bp, Glycine max
  Clone ID: PAT_MRT3847_61949C.1
ctttgtttagattttgtccctacttcatcagttgtcaaatcatctacaaaaaaaaatggaccaaaggcttattgtcagtacaaatactcatggtacttatggacttaaaataactatgctttgtccagcgggtccactctcttgtctgctcaggtgtgcttctgttttgcctggccttccttgagcctgggctctttcttgccgttcgttggccccttccacttcaatacttccaaatttcaaatagttctcaagattctttgttttcgattattctaagtggatgaatttgtgctgaactgtagaattgttgggtgatgtgattctattaccagcctaatcccttctgtcgtcttctcgcagccgta

SEQ ID NO: 100704 - DNA, 223 bp, Glycine max
  Clone ID: PAT_MRT3847_6194C.1
acgctcacgcgttcgtacagctggatcataaccgtatttgactcactgcatctgactgatccgaatgtacacctctaggaagttaattcacatcaataacgatgcctatcccactgacttttatgagacagtcgcacagtacttgttctactcgcataacaccaatcatcaatctatattgagactcgtaagatctctacataaatcatgcaattcaaatgga

SEQ ID NO: 100705 - DNA, 315 bp, Glycine max
  Clone ID: PAT_MRT3847_61950C.1
atgatatcagggtccttctcacatctcaaggcacagaaacctagagggcgtggccaggggactgtggacgtatcccttatcgctaggtgagatcctgatgccaaaccttgctgaatgctaggactggtatatagatggtgtgatgtaccgaggggacacccatgtagggatgcgtgatatctggactcaagattatgctgaagaaacctagtgcgatgtatagacatgtgtcctgtatacagagtactcttgccggatagatttcagatactgtcacatccagacacttgtatgacactcatcgcgagacacacg

SEQ ID NO: 100706 - DNA, 551 bp, Glycine max
  Clone ID: PAT_MRT3847_61951C.1
ttttttttttctcgtgtattctcaacagagacaatcctgtttgagaattgagacacttgtctctttttttaagagattcgaattttagttcactacatgattatgatgatgcccatgatcactcatcacccgcacattcaagattctatatagtacttattttaccacctgaaaccaaggttcactcaagtcaattgcatgggctgtgggaagacaacgtcactcatggggctcctgctagtactgttctacctgaatgcaacatctattactaagggggtctaactcggtggaatagagtatgtgagttgttgtaaattctctattatttgtctttgattcctgcacacgaaaaaaaaaatgcagcatctattatattgtcacacttcctgtctggcacagcctctttcccttataattaccacacagaagatgttacataaatatggtgtacttaaaatcaaacttgaattatcatcatgtaccatgtgacatatatatgttgtgacttgtgcaacaaacacagttgcacttgcaaataggtggctcta

SEQ ID NO: 100707 - DNA, 249 bp, Glycine max
  Clone ID: PAT_MRT3847_61952C.1
ctcattcgccattcagtcatgcatcgttgtggtgctgggattcggcttatcactgccttcacggggctgtatgtcggactttgagttggacttaatgggcctgatgctgctaatctggttaccagcactgcctgtatagttgtggacccagagactggggcttacttcggtgggaaacttcaaagctcatagttctggttcggtcttgtaggttttctagtcacaagttatgggctgatgtgaaatgtc

SEQ ID NO: 100708 - DNA, 500 bp, Glycine max
  Clone ID: PAT_MRT3847_61953C.1
aaaccaatggccaaaggggaggggaaatggggctaaaaaaaacaaaacaaacgggggctaaaaacggaaataattaaacatttaacattcactggccaaaaaaaaaaccccctagaaaaatatattgggggcaacaacagaacaataaattccccacccaaaaggggaggaggaaataaaaacggggggggggcttaacaaaaaacgacaatttttaccggcccccccggggtttttaaactaatcctttaaggggggccggttttgggcccccccacgggacacccagtcgaaaacagggggagggggggaaaggggtttgaaaaacatttgacccccgagggtttttgggggggagttgcccccagaagggaaaacccccccccaaacgggggaagttttacccccggaccccggggtcgtgggaaccggggaaaacatcggggttggcggggaaaacggaataaacaacgttttcgggaggtgggaacgggcccctt

SEQ ID NO: 100709 - DNA, 217 bp, Glycine max
  Clone ID: PAT_MRT3847_61954C.1
tacggctgcgagaagacgacagaaggggaaatttcaatagaatgaaaatggggaaaatccaatgataaaatgaattaagaaaccgggcctccgtctgtgtgccccagcaaccgggggtattatccgggccctgtcccggccggtcaatcagttttccctaatctggctcgtttgaggccttgccgataaacggctaacagctttcccctccggtaat

SEQ ID NO: 100710 - DNA, 155 bp, Glycine max
  unsure (1)..(155): unsure at all n locations
  Clone ID: PAT_MRT3847_61955C.1
aaaatctgcagtttccccaaaccagcttcccggacaattcaattcaggaacttggagaaccattaagaatcagtcctcaggaaacctcttggatgagtccaaggaaagctctgcaccacacacagggcgaacacacatcncagagacacacagac

SEQ ID NO: 100711 - DNA, 1789 bp, Glycine max
  Clone ID: PAT_MRT3847_61956C.1
ctcgagccgcgaaaccgaaacaaaaggcagagcggtagcatttaaagggagaaccggtgccgtgaagcgttatcttatcactcaaatttagcttcggcaccgtctgtgtttctctcatctcagccatttcactttccctgtgatggacgccgatcctcctcaacttgatgatcatttggaacctttcagggtttctgtgaatcaaattctcaccacagtcaacaagcttgagaagcaagtgactgaggttgaacagttctatgaatccactgataatgttcaaggtaataactctaaaggtggctcacttgcaaaagagaagggcagggagaagcatattactggtaccaaaaagccactgcaagatgcatcacatacagaagcttcttctgcaaagagaatgcaagagcttatgcgccaattttccacaatattgcgtcagataactcagcataaatgggcttggccattcatggatcctgtagatgtagaaggtcttgggcttcatgactattatgagattattgataagcctatggattttggtacaataaaaagcaaaatggaagctaaggatggcacaggatataataatgtccgggagatctatgcggatgtaaggttgatattcaagggaaaaatggctgcaacttttacctaaaatgatgtccatgttatggcaaagaccttgctggaaaaatttgaggaaaaatggctgcaacttttacctaaagttgctgaggaggaaaagagacaattagaggaagaagcacaggcacaactagacattcagcttgctctggagaccacttatgccaataaggccaaggatataagtactgagctttgtgagattgatatgcatttgaagagtctcaaagaaatggtgattcaacagtgcagggcgttggatataattgccgagactaacccaatgttccaaccttcttctactgaagatgtggtccttgacttagatgctcagagtgactacactctatggaggttaaaggcttttgtaaaagattcactagaagagcaagtaaaggtcaatgcaggcgcaggtattaatcctaatgataaccctgatgacaagaaaaacaagaagaggcgagattctggtgattcttcgggcaagacaaacccaaaaaggaagaaactatctacattgtgattcattagttgcaacataagagacattagtttagtgtgattgagttaaagttgctgaagacaatgagttggacaataatgcaattggaacaatctggaaatccttctatagatattcactgctatgttgatgatgccaataaaattccttaatttacaacattgtttggcctcaagtgtgctttgtaggaactaggaagcgaaacctttgcaattccatgaacataatggaaatcgtttacccgttgggtctagttagtgttatcttgttctgaggatattctctaattctcaagatttgagacatctatgcctgcaaatggttagttactatatgcgtagaaagaaaatccacgtcgtggccattaaatgtgcagaagcataggaaaaactgaaaaagcttgcacaagcacaagtaccttaatggagcagcttagatcactaaattgtagggacctcaatatcattttttatttgttggcaacatatttgtatttgttaagagttgtgatgagatataaactcgacttgtacatgtgattctggatgctttttatttttgttatccgtatgaatggaagataatgtgtggaggtttataataatttatacaccc

SEQ ID NO: 100712 - DNA, 177 bp, Glycine max
  Clone ID: PAT_MRT3847_61957C.1
ccttctctttctctctcttttttctcatacacaggtcgggacactcctttttcatgtttggggactctcttctgggctttcttcgggttaagccctataagaccgagattatttaaacatgggttggtttcgttgcgcaggccaatcaagccaaaaaacccacacccattaccttta

SEQ ID NO: 100713 - DNA, 253 bp, Glycine max
  unsure (1)..(253): unsure at all n locations
  Clone ID: PAT_MRT3847_61958C.1
catctgatgctctctcactagaagagtactactgacatgagttgctataccccnatcggagaacatgatgaatacatggaacctgagatccgccaagtttctctgtaaacatcttgctgatcctacttattggttggtcgaagagatttcatacatgggagatcgcatttgtgtgagcaaagagcctatatgttcacagatgacactccttcatggtggccaagctcttgtcttgaatgatattctcgctgac

SEQ ID NO: 100714 - DNA, 246 bp, Glycine max
  Clone ID: PAT_MRT3847_61959C.1
gtgatttggttcaattaaccaagttttggatcaaggagattcaaattgtggattttttcttcttctccctgttgagtagttgaaaattataaaaaagaaagaattaagttaattaatgctaataaatttccattgtggcatctaatacgtgattatgaatttgtggcacggggatctggattagtaattgagtgcaactctgacttctgcatatgctgctgatagatggttatgaatttgaaattg

SEQ ID NO: 100715 - DNA, 521 bp, Glycine max
  unsure (1)..(521): unsure at all n locations
  Clone ID: PAT_MRT3847_6195C.1
cactgagcatcgtctagctatctcgatcgaactgtccaaggtcctgtcaccgcattgtccagaggccatcagcaaaaaaggaaccatcgtaagctagccatcgggctagccagccacagaacgtcgcccatagtgagtagagggggcgatgtaaaccaaaccataataaacaagaaaaccaagtaaacccagccaaagaaaacggcggtttgggcataactatggtggactgtctgagtgtgttatggggtgggaggctgtttgtttgttgtgtgtttatatgtggtggtggagttgtcggtttaaaggggtttggtaaggttagggtatagttgattggtaatggttatgaggacaaaacgtatcgagcgtaataacgtggtgggattanttatgtaaacaacaccgacaaattattagtagcagcaaccgtcataatcggggccagtgcaaaataggaaggcaccactggcacgtagtaataaggcaacgtttggttcggggtagtgctttaagggtat

SEQ ID NO: 100716 - DNA, 351 bp, Glycine max
  Clone ID: PAT_MRT3847_61960C.1
tgatttgagctttttatggtttatgatctctctgtttaggcgcctctgtcggacgcttttctttagtttctggagaccaacgggctcgaccctttcatttacactgcttttgaggggccgcccgatacaatcggttgaaacccggtttcgaatcatgaattgaagagggtgaagcagaggtgaaatgcaacctcaaaaaaatagagtggttaccgggatggaactgtcttacacctaaagttcaaatagctgggtctagggcgtaccaaaaaaagaagacccttcccaatggatgaaagttctggagccgcccctatggctttaaatattttacctggggatcatgttctc

SEQ ID NO: 100717 - DNA, 417 bp, Glycine max
  unsure (1)..(417): unsure at all n locations
  Clone ID: PAT_MRT3847_61961C.1
cagtctgactaggaatgtcggcctccaccattttgtattgctttgttagtggacaaaaacaaaaccacattcctgggaattgatcttcccaataaagggttgtggtcctcataatggctgagaaacgtcagaaatatgagtgggccaaaaaacctttttggatttgagcttccttattgacaatcccattcaatctacagtttttggcattgtgttgggaatctctcacaatatttgaaatgctgctgatactctctatgccagctttctatgattcacacgctactgccagaacttctganagagcggaatactattcatgatccggcatatgggtttggtttcgcttgttcgattctcaaatccactaaaggaaattattgcaccgaccctatcgttgcgtttgctatgcctatt

SEQ ID NO: 100718 - DNA, 2030 bp, Glycine max
  Clone ID: PAT_MRT3847_61962C.1
cggggcttacccttttgcttcacaacctcctcaagagattccaccaaggaaacaaaaccaacccttttgagcttgcaccaccatgaggaaacaaaacaacccattgagctgtctctctctgagtgcctcgtacacagattcttactaattccaacggaggccctcaatgctgccggcttgccccctctatctgtacttatataccaatgaaaaacctgaactcaacacccttctgtttctgcatgcaagctctctgacttcaaaaacaacaagaactaaacacccttctggttgtgaaggtgcatactcaaacttttgcacggggaggctgattcttgcagcttcggctgataatggtggagctgccacagccttaacgtacgatgaggcactgggacaacctttgagcggtggagctgccacagatttagcgtagaatgaagccctgggacaacctcgctggctttgcggcgctggggcctgcaatgggaacggtggttggggagagtgtcactggctttgcagctgaaaaccctgcaattcttgctgggggagtagctgttttggcagtgccattggttttgtctatgcttcttttcaagctgactaaggctctcagctgcttgacataagcgcactggtggagatcaaacaagtggggtccccagatgttgggggtctcttgataaaagggctctggataccttataagggtgatgataagccagggttcttgaagaagcttgcattgaagtttaaggagccagagaataccacattgtttattcttgacaaatttgatgggaactctgaactggttgcagagttggttaccattaatggatttaaagcagcttatgcaattaaggatggtgcagaaggaccgcgaggatggaagagtagtggtcttccttggatagcaccacggaaaacattgagtttggacaatctgacagatgctatatctgaagcaataggagatacctctgatggtgtggcagttactcttgggattgctgcagctgctgctggacttagtatattagctttttctgagatagaatcaatcctccaagttgtaggatcagctgcgctcattcagtttgcaagcaagaagcttttgtttgctgaggaccgaaagcaaaccgtgaaacaacttgatgagttcttgaacaccaaggttgcccctaaagaacttgttgatgaaataaaggatattggaaaggctcttctaccatcctctaccaataataaggctcttcctgctccagaagagaaaagttcagagcttgctacagctgatagcactgtacagaatgcagtagctactcccgagcccaaagcggatgcagtagctcctgaagtaaactcagtgcccaaaactgaagtgaaggcagaagaatcatttcctgcacaaccaaggccactttcaccatacccatattatccagatttcaagcctccaacatctcctaccccttcacagccctagaccttcacttcttttaatcttgaacataattccatagaaggcaaatcaattgtccaaatatccagcatgtatcaagaggtgtacaatactacaatctataatcctatcagaaaaagtcatgcatcttaatttgcagataagatccgtgacataagttgtataattttaaagtttgttatgattatccatccacttgtgctactgggtacactttttgtaattgatggatgtgttgttgcggtaggtgtcaagttaacattgtagttattttaacatttagtataacattcaatctttcacactttgtgctactcggtacactttttgtaattgatggatgtgttgtagaggtaggtgtcaagttaacattgtagttattttgagatttagtataacatttaatctttcagttttggagcaagcaaataaggtttatgtatgaaattctgctttgtacggattcatcaactcaaattgactatgccattgtgtaaagatgcatgtcgatgtctgataggattatagattgtagagttgt

SEQ ID NO: 100719 - DNA, 749 bp, Glycine max
  Clone ID: PAT_MRT3847_61963C.1
tgcccccaaagaacttgttgatgaaataaaggatatggaaaggctcttctaccatcctctaccgataataaggctcttcctgctccggcagagaaaagttcagagcttgctacagctgatagcactgtacagagagcagtagctactcccgagtccaaagctgaagcagtagcaactcccgagcccaaagtggatgcagtagctcctgaagtaaactctgtgcccaaaactgaagtcaaggcagaagaatcacttcctgtgcaaccaaggccactttcaccatacccatattatccagatttcaagcctccaacatctcctaccccttcacagccctagaccttcacttcttttaatcttgaacagaattccatggaaggcaaatcaattatccaaatatccagcatgtatcaagaggtgtacaactctacaatctataatcctatcagaaatagtcatgcatcttaatttgcagataagatccgtgacataagttgtataattttgaagttgttatgattatccttccactttgtgctactcggtacactttttgtaattgatggatgtgttgtagaggtaggtgtcaagttaacattgtagttattttgagatttagtataacatttaatctttcagttttggagcaagcaaataaggtttatgtatgaaattctgctttgtactgattcatcaacacaaattgactatgcaattgtgaaaagaaaaatgttgatggtagacgtttt

SEQ ID NO: 100720 - DNA, 1037 bp, Glycine max
  Clone ID: PAT_MRT3847_61964C.1
caacctccaaaacacaacaccacaaggaaacaaaacaacccattgagagcttgcacaactctcatggtagtagtagcactactacttcacacactctctctctgagtgcctcacaccacagattctgtgatatatataccaatggaggccctcaatgctgctggcttgacccctctatctgtgctctctgatacaaaaacaacaagaactaaacacccttctgtttctgtatgcaaagtctcaaacttttccacctcaaccaacaaaaaacaaaccttgctgcaaagttgcatatcaaaaactttgcatggggggctgattcttgcagcttccgttgtaaatggtggagctgccacagctttaacgtacgatgaagccctgggacaacctttgagcctccctggtgctggggactttgatgtgaacggttttgtggagagtgtcactggctttgcagctgaaaaccctgcaattcttgctgggggagtagctgttttggcagtgccattggttttgtctcaggttcttttcaagaagcctaaggcttggggtgttgagtctgccaagaatgcttatgcaaaacttggtgctgatgggaatgctcagttgcttgatataagggcactggtggagattaggcaagtggggtccccagatgttgggggtctgaagaagaaagcagtgtcaataccttataagggtgatgataagccagggttcttgaagaagcttgctttgaagtttaaggagccagagaataccacattgtttattctggacaaatttgatgggaactctgaactggttgcagagttggttaccgttaatgggtttaaagcagcttatgcgattaaggatggtgcagaaggaccgcgaggatggaagagtagtggtcttccttggatagaaccacggaaaacattgagttttgacaatctgacagatgctatatctgaagcaataggagataccactgatggcgtgcagatactcttggggatgctgcagctgctgcatgacttagtctattagctttt

SEQ ID NO: 100721 - DNA, 534 bp, Glycine max
  Clone ID: PAT_MRT3847_61965C.1
cgctatgtatattagatcacgcgcggcaatagaatgatcactcgaccaccatggtctctccatcgaacctacctatatcctgccaataaagcgcttccgccgccgtcacctattagttccagatctacaatcgggacgccagggtcccgtgccttcatctccataatgtcctgttctctccaccacgccttacaacaaagccgaccgaagacggaactcatctacaaaagatacatgtccagacccaacaccatagccgaagcatactctttgatccataaaaacttcgcctacttccacgtcaattacctaaccctaatcgtgatggcgctcgcggtctagctcatcacgcatacggactcgctattcgtactcttcgagtctcctcgcgtcgtggtcattcctttatctctttcgacctttggatcagcctgacgatctctacggacgcaccttccccgatcacgaaaccctaaggatcctcgtagtgctcacagagttcgcaattctcctcaccagcgttggatccttgat

SEQ ID NO: 100722 - DNA, 397 bp, Glycine max
  Clone ID: PAT_MRT3847_61966C.1
gttacgcgtacgaaaatttggataaagcaatacaaagacagagaggactggtcgctcatattgaacccattgtcttcaagtgcaaatttttcttctcaaacgcagtaatctacggatctctgagcttcattatggtatgccaagaattcttagcacggtctaatatgtggatcagatgactacttggtgattgtagctgcatatagtactgccatctgcaaagcacagcgtgggggctctaaggataccctatcagatgacctgcttgccacagggctaaaggctgtaattgagaaaacatatgtgtacccagcctaagttggagacattgttgtgggcactgtactgacacctgcatcagataaaggaatcgagtgcagaaggactgacttttatg

SEQ ID NO: 100723 - DNA, 205 bp, Glycine max
  unsure (1)..(205): unsure at all n locations
  Clone ID: PAT_MRT3847_61967C.1
cgtgagatatatgatcagtatggtgaagatgcgcttaaagaaagaatgggtggtggcggtggccatgatccatttgatatcttttcatctttctttggcaagtgggagtccctttggatcaagtggaantattctaagtaagatgcataagcgctaaaaatacgtaattcaccctctcaaagtctctttaaaaaacctttatctt

SEQ ID NO: 100724 - DNA, 514 bp, Glycine max
  unsure (1)..(514): unsure at all n locations
  Clone ID: PAT_MRT3847_61968C.1
ttttttctgttaagtagtgttgttgaggaatctgaggagtttgttgttgttgttgtgaatatagaaaagtagcaattatagccttagaaaaaaaaaaaaagaaagacagaaaacaaaaaccattccttaaagtaataagaagcagtagcacgaacagaatcatgagtgcacgagtgttttcattgatgggtttttagaagaacaaaaacagcttcttttccagccttaagcctttcttaaccgtttctttttctcctctctctcacactctcatacttgtctttggattctgtgttttgattttttttttttatagtattttgttttgtatttgggattttggggggttgcttgcttctgttgggaagttctngttacctgtttaatgtctcaacaaatgcaaactcagatggtgggtggttacaaccctgacaaatataatgacacaactttcaccatgatctttgttggagggtttgcttggaagactcagagggacacattgtgaaggttt

SEQ ID NO: 100725 - DNA, 395 bp, Glycine max
  Clone ID: PAT_MRT3847_61969C.1
ttttgactgatctgtgaatgaggtctattcggaactcaccctttgataataagcgtcgaccatactcatttcatggggatttaaggtttacacctctgtatacaaagaacacaaaatgcaagtgtatcgatgttgtaacctctttgcattaccttatttcccttcatacacacacacgtgtacactcgttctgataacatctagactgcattatccctgacgattactaatggtaacgcagcataatttgatataaaccggtgggtcatgctgacaaaccatgatcgtcgtcctgatctaagctacctgacatgataattcatgcgtgcatacccactaacatatagatggctgctgctatcaccaggtgtacagacgctagatgagcccttttg

SEQ ID NO: 100726 - DNA, 137 bp, Glycine max
  Clone ID: PAT_MRT3847_6196C.1
attacatcatgccataggaaaaatatattgttcgaacaaaacagcaattggatcagtatacgtgactgtttcacacctcttgagtaacgagttaccaaattttctggttgatttatctgggctagtaaaaaaacaga

SEQ ID NO: 100727 - DNA, 1566 bp, Glycine max
  Clone ID: PAT_MRT3847_61970C.1
atcttgaataacccaacatgattaattcagctaataaccaagctttacgaagagtttgatcctgaactagcaaggtggttgtcaactaacaacatccatttaaatctaaaagtgcatgaggctaacatttctattaagagaaaagctacatctgctagctacatgagaacagatacaaaccagaatagacaaagaagagagagggttatcagatactttgcatgggagacatacagtactagaggctagtcatcatagcactagtacgtacttactctgctactgttaccatgagcttccagcagagttaatcccccaaagtgtatgttatttacccttcctcgtcataatcttcttcgtcctcttctagtcgactacctaggtttgcaagctgcatagtgtcaatgcccatcttgtccacatcagatagggaccagcctggaatttcttcatgtttaatctccatggcagtgtccatggaagtgggctcaggcaatgaagccggaacagctgtgccagcatttttgtcttcgttttcatttaagttagcattcagatcaatgttgcggaaagattgagtactttcctcagaaatcacaaagttctcctttggtaactccttggattgtggaccattatctattggcacactagtgttaggaatatcattgctactttgcagaatagaggtgcaaggctcggattcaacctgctgatgatagatatctctttcaaaagttcgagcccctcggccacggcctcttcctctacctcggcctcttcccctaccaggactgccagtgtggcccaactcatgcatcttgctcctcttagcctcttcatcactgtcattaccatcatcaccaacagctttccttctttttgcaatggcccgatcatcaggaccagcctcagcatggccatggccatggctgtagtcaggaaccctgctaacaacgtccctcagaaagtcaaagacattatagctttgtacacaatgttttaaatgcaatgaattcatggtctttgctcctctttgaagagttatttcataagtgcggtcacaaagatcttgcaaaaatagttctagagctttagaaactaaaacaggcacagcgagtgctatctttccaacatcctcatcagcttgcattatcttctttatccgagcagcagggaaacgggtatcgagcttcttcctcatggcagcagattagggttttgaaagctgaagaattgggggaatcaaaagaagcagaagaaggagacccagaaagtaaaatcgaaagctttgaacagaaagagcgaccctatcatcaacaggatgaaatcgaagaaactcatttcagatccaaaggccactcactctctctaagattcattcaacgaaatatgcctcagtggcgggtttgttaggctgacgcgtcggtgatggacaacgcgtcacggcccaatacttgcagagcatctaggcagagtggttccaaaagaaggagtcaaaacggtgacgtgttgagatatcattgggacattttctttccttcgttttaaagtacgaaggcaaac

SEQ ID NO: 100728 - DNA, 286 bp, Glycine max
  Clone ID: PAT_MRT3847_61971C.1
cccacgcgtgcgcccacacatactttcacttttcatatcttacttcactatttcgtcaaggttcattttatcctaaatcaacattacacactattacattaacgtcaagaatagttgtgtttttaactttttgcgtaatcaaaaatgactaatgaacacaacccatatccttatgtaagacgccatatcacacccacttttaataagtcacttgtctagaccaaagataaaactagctcaaccttttacaaaagctttacctatctgacagaaaatttatctctta

SEQ ID NO: 100729 - DNA, 1915 bp, Glycine max
  Clone ID: PAT_MRT3847_61972C.1
cttcagccaggcaacaagcctggtgccacctataagttcacaaacgctaggggacatggtggattccttcactgggacaaccttgtttaatgtcagaagagaagaactgagacgaagcaaaagctgaaaagcttaaactggcgaaatataaagacccatccaaaagcactatacgaaatccaatcccaccactctcttttttcttcttccttttcgtgctctctctcaaattcaacacgagagacacaaaacaaaacattctcgggaagcgtaaccgcccagaattccgaccattttcacagaccttgttttctgctcttgatgtttttcaccccccaaatgtggcaataaaaaacgggtggcttaatttgacacaatcggtggttattgcaaagttgagatggcaggtaatagtggttcagaggggttgggcgatgatttcttcgaacagatcttagcagtgcctgaagccggcacagtgggaatgttgcaattggggtccacaactggtggtttcagaggagcttctgggttaatgcctctgggcttgaatttggaacaagctgccttcctaagacaccaagttaacgttgacgacgacgttgttcatgttaatgttgatgatgccaccatccaccaacatcacctcactctccataacaacaacacctcctcatcaccctcttccactgcaccaatcaccgatagggattctatgcatatgaggggcttattttccgcgtttggacaactgcatactcctatccgccccacgctgccattgcctccaccacctcgtcagccacaactccacctccaccatcataaccaacagtttcagggccaggcagctgcagctccagcgtcaatggctgctatgccacaaccacctgggatccgccctcgtgtgagagcaagaagagggcaagctacagatcctcacagtattgctgagcggttgcgtcgtgaaagaatcgctgaaagaatgaaggcattgcaggaattagttcccagcatcaataagacggacagagcggcgatgcttgatgaaattgtggactatgtgaagttccttaggctccaggttaaggtcctgagcatgagtagactgggaggagctggtgcagttgctcagcttgttgctgatgttcccctttctgcagtggagggggatcaggacatagaaggtgtatccaatgagcaagcctgggacaagtggtccaatgatggcacagaacaacaggtggctaagcttatggaagaagatgttggagcagctatgcaatttcttcagtccaaggcactttgtatcatgcccatatctctagcctcatccatttttcgcatgcctcaatcggaagcatcaacaggcatcaaacctgaatctaacagtcactgatattagcgatagaaccgaaacaaaaagtatcatgacagacactagataattaaatttcttcatccttaatttatgacaagggtaatattctactttcttgtataatttaattttcctgattggatggagaaggatctagtcggtgcagcagctggttcactcttctcaagttttgtcaaagaaggagtaattgttattcctattaagtaaaatcggaggagccaagcaaatgtccttttcatggtgaagattaatattttcaatggccttattcaagtttttcttgcaaatatctgtggtggggttggtggtggatgaccaaaatatttgtagtggaacctcttttcttggtttagtatttttagtcagtggggagtgggaccatttaaaaggaaaggatggttacgaatgatgtatcgggagaaaactttaatacaagttgaattataatatggttagttaccttgtaaagatgttttggaagcatctgacaattggaaaagctaaagatatttt

SEQ ID NO: 100730 - DNA, 311 bp, Glycine max
  unsure (1)..(311): unsure at all n locations
  Clone ID: PAT_MRT3847_61973C.1
cagacagtgtggagactcttggtctcctggtctctgaagaatacctctgggctactagacgcaatcaatatccgcttgaattaggacctgatgtgcttgtcacctncnnancctcggtctcaggatgtatttcatacttattacatgtctcatgttagaagacaactcntnttttcgagggaatttttctactacaaccttagctttacacatataatcttnctagtgcagatattcacggaagaaaaaatagccggattgcataaacatcgtactgatttggagtgtaaggacaagaacccctttatata

SEQ ID NO: 100731 - DNA, 283 bp, Glycine max
  unsure (1)..(283): unsure at all n locations
  Clone ID: PAT_MRT3847_61974C.1
gaantatagcatttcgcgatttattggtaatccactttngatntctctattaaccantaatttncggactattaccatggttagagtgaatngtttgangtcangncgnngtgtagtacgctttctaccactangtnaatacagngatgaaatggttncnatngaatnatgagantanngtggcggtatannnnactcangncgagaaantggcntgaatnctatttgctgacggcaagaaatggggaacgggttaagtaacccgccctngnagtanaatgcg

SEQ ID NO: 100732 - DNA, 355 bp, Glycine max
  Clone ID: PAT_MRT3847_61975C.1
gggggaaaaaaggggacccccccccctgcccaaaattttttgactggggggttgtctccccaagggggggaggggcgggccccctttttcccccctaatcggaagatacaacccccgcgaattcccccgggtgggtcccaccgcgggtcctccaggggaaaccctccgggtttggggcaaatggccttgaggcccgccacgctcttggcaaaatctttctcaaaacccctttgggtggaaccccccaggggggatttccccgccccaaagttcccggggcccccccgtacccccccccagggggtttctggtttttggtccaaagctaccgggggttcacccaaccttgcccgct

SEQ ID NO: 100733 - DNA, 3248 bp, Glycine max
  Clone ID: PAT_MRT3847_61976C.1
ttttctctaactcaaaaaaaggcaaatacgttattgagtattgacaccgaacgaaagaaacgcaacagcgtctatctgtgagctatggcggaggaggaggaagacgacgagagcttcggcgacttcacgttcgcgtcgtttccgagtcaaccgacctcaaacgacaccaatcccgtcgacgacgacgacgattggggcgacttcatgaaccattccaatcagatcaacggcaaacccttcgacgcgttcggggttcccacggatcccacgaacaaacacgtgaacgacaacaacggcgttgccgttcaggccgaggcggcgaaaaagcctaaaggagctatcccgctttcgatcttcggcgaggaggaagaagaagaggaagagcaacaggagaaacccgcttctgccaatgttttctccaagggtggtgcggtgaaaaggggatccgattcgataggatccgttggaattaacgagttgatttctagtttgtatgaccatcagcgtacccaggtggagtgtcacatcaacagatcggtttaggtatccaatgttgatgctcccaattcgacgaactcgaacggaagcaaattgaattcggatgaggtggatgaggatgatgatggatgggaattcaagtctgcggaatgggaaactggaaccaagagccaggatgttaaggctgaaacgccaaaacatgatagtggtgctcttgatgtcggtactgtgttggattcatccaatgggatttcagacaaagctggtggatggcacatggagtttgagttcagtccacgttttgcatcgcaagatcatattaacccacaaccaagtccaaaaaatgaatcaaatgacattggaactgggtttgccatgtttaatcaaaattttggggagtttagttcagggtcagggccagggccaaatcaaaatttggaagcaccgaagaaggctggcatttgtgccactaatatggaattactcaaattcaatggtgcaactccccatggtactattgattcatctctcacgtcagaatctcatcaatctgatgaatggaacttcggatttaatttcaattctagttatgtgggtgaagacaatcatagttcagattcatatttcaaaaccaaaaacaaccaggatgataacaacagaaacaatgcttccccaactaatatagatgttgattcacatgtcaatttctttgactcagagagtgatgttacacaacatgagaagcccctaacaagcccagagaatcgtagggaagccttacctctgtcaatttttggtgatgagacaccagatactgatgaacatcctgtgtctcaagatttatctccctatacaccctcatccccaataaggaacagcttcactagccctggttccaacttttctatcaatgacatatggaatttatataatcaagctgaaaaccaaagttcttctaatgtgacaccaaaagcaagtgaaaatcagattcatgccccccctgaagtatcgggctccagtttggttaccggtaatgatgatttagatgatgacttctgggactataaggatgccgcaactgaaacaagatttaccaatgaatctgcacagaaaacttcttcaccacaagtcaatgagaatgggttgcagtcttccccaacatttttaaattctgatttgaccaacggtgatgatgattttgaggatgattcatgggaatttaaggaagctacctctggaacaattaatcaagatcacacatctactcttgatcacagaggtttaccacagttatcaacaaaactagagcaggttgattatgcagagttttatagcaaagtgaaggatgaattgtgcaattatgttctgttccatcttcagaatctgaagaaaactcaaaatgttgctgctctctcgggtgaagatgccaaagcaaaagctcttcaggaggaaatatcggaattctccaagatactgcatcaggatactatgagcatccccaatgaatatctctctgaggattattgcccaagaaatgtccgctttaatgagcttcttgaagttttgaaggaacctaagttccaacctgttgagtcagaatatcaactagcatcaaggttgtcgatggctgagaaggatattaaatatggtatggaacttttgaaagatacagtatcaacattaagaattctcaagctgggatcaagagaagaacaatctagttatcttaccatatggtccaaaatagcctttgtttgttctcaagagctgaaacatggtgcttatgtttggaagcaagctgtactacagaatgttcatgaccagatattatctagccagaaaggtgttcagtatatccttgcacttggagaaatttatagagtggcagaaattattgaagcttcagccaaacttcataaaccttggatgttgtcaggtgccatagatcataaaagtttatgtgcccttttgaatgaatgttatagcatatggttggcttcaggacttgaagaagcccttttgagtatagcaaatcagaataattttgagctagatggcatttcaagggaattagttgaatccattaagtatattcatgagcttgatgaacatgcacttcagagctttgtcatctctggagaacaaactacttgccagttgtcagccttgccagctggtttcataccagggttaaatttggtgaaatggaatgggaagcattacattgtcaaacttgcaaacttgtggatcaatctaataagttcagatccacccaagaagtgacacctgcaaattcaattgtctctcacaacaagtggagttttcagtctgttgttgagttgttttctccccaagaaaaaccagtgtgagattgtggcgggatccattgtttagttagtggggtgaggcctttggcgcactggcagcagttgtagtgataggagattgtgtatgggatgaaaatcattctattgagtcgggtcaggcaaagtcaccaattgagttcattctttcttcaataggttaccattctttcgggggaagctttagaacaataaccggatgttacaggtgtctggattcgatccagttctctgcagagggagtgatattgcgtagttatcaactgattctggtgttgtaaagtaactgggattcttcccttaacaattttacagagttttttttggcatgatttaaattatgaatatttttatttaaatttgaaaaaaaaaaaaaaaaaactcgag

SEQ ID NO: 100734 - DNA, 134 bp, Glycine max
  Clone ID: PAT_MRT3847_61977C.1
cccactcgtcctgaagtttttaaattgtgcgagggtcattatgttgaaaagggtcatgcttagttgcctagtcggtatcaaacgataatggacgcaatgtaccggtatgtccaagactacaccaattctggcga

SEQ ID NO: 100735 - DNA, 287 bp, Glycine max
  Clone ID: PAT_MRT3847_61978C.1
aggggaacttctcaagttcatttctacaaatccctagctctgtcggatccgtcattagaaatggggtttcgggtaggagaccctgacctccgctctcactatcgtcactctctcgtggacatcacttccgctaatgtcatcttataagatgttatcaataatgggtgggaaaagctattgattaagtcagattgccaaaatgatgacaacattgctggggaatgtcatcagactgccgggcagtggaatggtgactctgatgacatatgtagtcacagcagtgaaga

SEQ ID NO: 100736 - DNA, 170 bp, Glycine max
  unsure (1)..(170): unsure at all n locations
  Clone ID: PAT_MRT3847_61979C.1
cccattcctgntnccacctgtggttaaccggngataattttccgtttccgnggaactcctaacaccacgnacggaatncgggtaccggattnncncnnacgtggtcatttctaagcacngcactggacacaaaaatngacctncgnganaaattgcagggnggcttanng

SEQ ID NO: 100737 - DNA, 409 bp, Glycine max
  Clone ID: PAT_MRT3847_6197C.1
caccaataccacctccgtcatcaccaccaccatcaccaccgacattactactaccatcaacatcaccaataccatctttgtcattgccaccaccaacgttgccgcgaccaccaccactagttgccaccactatcaccactgatattaccaccttaccactaccactacccgttactgccaccaccaacgttgctacaaatacccatctcctccaccaccggtttacaagtacaagtgacctcgtcctccttacaagtacccttgtccaccaccaccaccatacaagtacccatttgctccaccacccccagcttattactacaaatcaccttcaccaccacctaagaaaccatacaagtattcatttacaccttcaccacactatgtctatgcattaacacctccccca

SEQ ID NO: 100738 - DNA, 308 bp, Glycine max
  Clone ID: PAT_MRT3847_61980C.1
ctataaacaatctgtggggccttgggcaaaatcaagggctttcaggttatccgatttaggaccccagacctcactgtagttcacagccgaccgaatggcgacacctggcgacactgagaacaccatagacatactcgtctcgcgagcagagctgccgtgcagaaactatggaccctttgggcggcagaaacacagtgctcgcccatcgagctaggaacacacaactgctaccatgggaaaacagaatcttgaagagagaagtggctcgaaggacaagctcgataacggtcgtaactggactgcgtggg

SEQ ID NO: 100739 - DNA, 667 bp, Glycine max
  Clone ID: PAT_MRT3847_61981C.1
cacaaaacgaacggttcccggtgagagcagtgattcaggtgctactctccgagcagagcaagctgaaccgccatgtggattggagcggctcgctggtgagtggaacaagaagccctggagggttggacttaccaacacggtgtctgtcgaagcgcgaggcgaatgctcaacaactcgagataaagaggctgaaggaagacgtgtacaggctgcaaagccagtgcagtgccatgcatgcacagatggagagaatggttgagaagaagaaaggcttcttcaagtggaagaagtttgcatttggtaaaagtgagcatgacaaaatggaacaagagcttgaaggaaatggaatgtacactcctgcggacctgaaaactagattggtcaatgccaaaggtagtagtaagaatactcacaagtggaggaaatccatgtcatgaaaaccacagcttagtttcttatgtcctgcaaatcaatatagtgtgtatgttcgtttattggtgcatgcaataatgtaagatcagcttttgtatttggaataaactcaataaggatgtgagtaatagtatgccatactactcacctaatggctgatgttgaaatgttactgcagagtagcaggtttttaagttgattttgtttaggcattgtaaagtagaatattattcaa

SEQ ID NO: 100740 - DNA, 274 bp, Glycine max
  Clone ID: PAT_MRT3847_61982C.1
ctatcattcaaaaggccgcgacatttctacaccccttcttatatctctatgcctcgatacaaactataattattccactctactacaaatacctaataaccttcatgaatccaccacttacacccattcctacattccttccataataggtaatcttcataaactagatattccttctcttcatgatcaactatggcatctaccatagaaatatggtcctttatttccccttcaatttaaattaacgccagccatagtcgtttcctctccaaaa

SEQ ID NO: 100741 - DNA, 433 bp, Glycine max
  Clone ID: PAT_MRT3847_61983C.1
tttttccttttttttttttttttttttttttttttttttttttttttttttttttttttttttttttttttttttaaacaaaaaaacgcccccatatttccttataaaaatttctttaaaaaccaacaataaaaaacgggttaacgaacgaatatccaggggaaaattttaaattcttcttaaaaaaacaaaaacactttttattcggaacggggggggaaaggtttccccaccaacacataaggggagtttttcaaacggcattggccctttaaagcagctaagcttttagaagctatttaaaacacattttccgaaaggccattagaaaacaagaacctctccaacggggccttcgaaagtttttggttgttttaataataacgccttcattttgagaagggtgacaccattttggagggaacctgaggat

SEQ ID NO: 100742 - DNA, 412 bp, Glycine max
  Clone ID: PAT_MRT3847_61984C.1
ggaggaatagcgctaagaggccatggggccgggaggcatagtaatcaatcgtggtgacgaatagcttccttacgcgaattcaaagggtgactctttactcgctttccagccctacctgaatgtaggaaaaactacctataggtcttagtggacgaaaacctgggagaaagcaatgattagatattagaccagttgatgttgaagtaggcgggaaggcttccctatcgccaatgggtatatctcggtgatgacctgaacttaacgaaaatagaaattcaataccaaactggtctgaatgaagtccctattatattcaagttgagttggaacttctctcgcttaggtcgcattactaattcttttttttactccagactttccgttacacgaataaaaattctctttggtttgt

SEQ ID NO: 100743 - DNA, 594 bp, Glycine max
  Clone ID: PAT_MRT3847_61985C.1
attttatgaaaaaaaaaaaaaaaaaaaaaaaaaaaaaaaaaaaaaaaaaaaaaaaaaagaaataaaaaaaaaaaaaaaaaaaaaaaaaaaaaaaaaaaaaaaaaaaaaaataaaataaaaaaaaaaaaaaaaaaaaggggggggccttttaaaaaaaacaaattttactaccccgtatttcaaagttaaaaatttttttatgggggcactaaattaaaattattggcccgggttttaaaaacgtggaaatgggaaaaacctggggttccccaaattaattccctttgaaaaaaatccctttttcgcactttggctaaaaaaaaaaaaggcccgaccaaatgccttttcaaaaaatttcccctccttaatgggaaatgggaacccccctttaaggggctattaaacccggggggttgtggggtttacccccagtggacccttaaattttgaaaggccctaacccccagttttttgagttttttcccttttttttctgcccattttcggggtttttcccgagaaagtttaaaaaggggggttcttttaggggtcccaatatagggtttaagggaccttgaccccaaaaaaatttaa

SEQ ID NO: 100744 - DNA, 388 bp, Glycine max
  Clone ID: PAT_MRT3847_61986C.1
ccttccttcagtattaattaattaattaattcctatgtgaaggggacatggtttggtatctctaattatttacctgttcccataattacttttttttttcctactgactagtgactgctccaagttttaggggatgaacatgcatggccctatgttcatggaaagaattgaagcccaagttaccttctcatgagtccaaggttttttgggggtctctcaccacattcttgtttttggaagttgttggtccacccgacttgacttcttgtctgcgtttttttctattgcgagggtttatggtttgtttttggtcagtggcttttcttgtttgagtttgagttattcaacgtgggtaataatgtattctggtattttcaatctcattatg

SEQ ID NO: 100745 - DNA, 409 bp, Glycine max
  unsure (1)..(409): unsure at all n locations
  Clone ID: PAT_MRT3847_61987C.1
aaggcaggaacgcccgcaggaaccggnccggaacacccggggcgataacgccgcagtacacgcgcccggaaaccgggcacaagacaggcacggagcgcaggaagacagagaaccaccaccanaccanagcgnacaaagaaagcaccgcccacggacaagagcaagagaacccagggcagccaaaggccagaagggcagaaaggaagggacgacgacgncacaggcgaacccagaaggcaaggcagagaaggagacgagagcagagaaggaggaacagcgacagcagcacaacacccagggaagggcgacagggacagggggcaagaaagccaagaaggaccacgaagacaccaaccccagggcccaacagcgcagacggaaggaccccgccgggggccagaaagaaaga

SEQ ID NO: 100746 - DNA, 662 bp, Glycine max
  Clone ID: PAT_MRT3847_61988C.1
gacaataaatatcagcgcatattattgaacagatttttctttttctataaaaattaaactgatgttctttttacagtgagcagttacagatacattctttacaagaatatggtgattataccctgtctccccccacccccaccccacttttctttttctcacttgcagaattgtaataaaaaggaattctgcaagtattaaactacaaattccctgtaaaaattgaaaaagaaaaaacccaagacgtgttatatacttggagacatcatactcaatggaaaacttgagtagcgtagtattcgctttcattaaaagcaggtcttagactttcctgacacatgaattccaagggaaaggaaacgagatgacccttcactgatgctaatctctccaagggatcggtgtttgtaatgcctccgtcataataggattctaatttttctggggctattcctaaatcaatggtcgtgtgaccaattctttctttccagaaagccacactttgtctgaaagcaagtctggtgtgtatcagatcattaggtacgcaagaaaagacatcctggtaaattgtagtatttgtctttgctgttgccatccaaatatacctgtaagtagattcaacgactgggtccattatttgattgacctctcctatagggaga

SEQ ID NO: 100747 - DNA, 491 bp, Glycine max
  Clone ID: PAT_MRT3847_61989C.1
ggctcgagggcattctgtgttctcttttattctaaactcgaaacactcttagacaaagaggcggaggaaaatgccgattgctctaattgccattgggaatacttcagaggtcaaccaatctgatgcacttaaggctgcactagctgagttcatgacaatgctcatctttgattctgccggggaaggctctgggatggcttataataagctgccaaacaatggttcagcaacaccagcatggttagtggcaggatcactgtcacatgccttagcgctttttgttgcggtctctgtcggagccaacatttctggcagtcatgtaaaccctgctgtcactgtgcgcgcctttgatggtggccacattaccctctttagaagcatcttgtactggattgctcacgtactcagctctatcgttgcttgctggctccttaaatttgacactggtggactggaaacatctgcattttgactatctcctgaggtggaag

SEQ ID NO: 100748 - DNA, 390 bp, Glycine max
  Clone ID: PAT_MRT3847_6198C.1
ctccacgcgtccgtccatgcgtaccttatcttatgagcagagaagatactccggcaatggggcatgatgaagaccgtgattatggttcctacagtgttgagaatgtcgatttagaatctcatgctccaattactctccacaaggatcatggcttgtgaacctgtcgtgtgcgccaacgtaccgaatctgatgaatctgcagatgccgcactataatttttgggcatcattccaggttcagaaatgtcgtcaaccactgcggaagggggatctgatggtcgtggcgatagaattcccgaaaatacatctcttgacagaaataatgagaaaaatgctggtatggcggaatttgtaagccctactggggacgctttcatttatgtaaaccgat

SEQ ID NO: 100749 - DNA, 377 bp, Glycine max
  Clone ID: PAT_MRT3847_61990C.1
gcgggcagcaccgttcgggcagcttcatttttcctttctctctatctacacaccaggctcactccacgccttactcaaaaaagataacgatcttacagtctcaccagctgacagagaaagagagagaaacagtatctgtgttttttcttcgaatatagctagagagaaagtgaaaaaggaagaaaaaaaaggttttttttttttttcatttcttgaagagagaaaaaaaattaaaaatgggggaaaatgttttgattctttttggtgtttgagaacagtttgttttgtatttttgggtttgagtttctggtgttgttcaaaagagttattttttggtgagatcgggttgtgggtgtgggtggtgggtggtaatgggg

SEQ ID NO: 100750 - DNA, 328 bp, Glycine max
  unsure (1)..(328): unsure at all n locations
  Clone ID: PAT_MRT3847_61991C.1
gtcgcangcacgcgtacgtnagctcggaattcggctcnagnaagcctaaaaattcttanattagatatatattncatttctcttcattattcatattttatgtcctaggncatagatattctagatacccattatgaatcgcccgccaaagtcttcctacttctccaatgttccnattagatccgaaganaaatcaatcaaaagtcagtggacctgaattgaatcatgactatataagctattctgatattcagatttgatatagatgaaatcgtggaagcggaccttttattgatttccttggaccacgtaaganttcgtcgtccga

SEQ ID NO: 100751 - DNA, 353 bp, Glycine max
  unsure (1)..(353): unsure at all n locations
  Clone ID: PAT_MRT3847_61992C.1
tcccttctacgacaataaagaagaccaggaattaaaacacttaattccttatttgaagtcattcttgaatgttaaagattgcagagatgtaaataaacaaacattcagacttcaccaatatacaatgcatgacagccttgataaagtattgaacaaggttgttcttgtcaattaaaacaaggagtagaaagtcaatttttttatcaatggattgggcgtatgagagatatcttaaaattttatggattacttttttacataaaatgtatttgctcccccaatggctttttttcattttgggataagctatatgtttggttactaacttttaatannaaaaaaaaaaaaaaaaa

SEQ ID NO: 100752 - DNA, 134 bp, Glycine max
  Clone ID: PAT_MRT3847_61993C.1
aattaatgttctgttgctttcgaatcagcgctacctcaattgcggatgatatctttaaaccagaggccggcgaactcaacaataaaatctatcatctccttctcaccaatcttctcttcaccatcatctcctta

SEQ ID NO: 100753 - DNA, 496 bp, Glycine max
  Clone ID: PAT_MRT3847_61994C.1
gattcttattcattcactctgctccctcactccaactttcaaaaccctaatttcttcctcgaaatcttctcctcccttccccgatttcatttccactgctttttccttcgcttggccgtagtcgcttcaattgcgaattccgtcacattctttgtgcagatggcaggggcggataatggtgacggcaacgggagtgaaagggaattagcgggaaatagcgataacggttctgtggaagttgcagaggcttctgttagtgatagtggttgtgaagggaacgacagcgtttcttacgcgaacgtcttgcgttcgaggaacaagtttgttgatgctcttgctatctacgagcgcgtgttggacagtgatggtgcagatgtagaggggctcattggaaaaggaatatgccttcagatgcagaataagggaaggcttgcgtacgagagtttttctgaggctatcaaggtggatcctcaaaatgcttgtgctctaacgcatt

SEQ ID NO: 100754 - DNA, 2206 bp, Glycine max
  unsure (1)..(2206): unsure at all n locations
  Clone ID: PAT_MRT3847_61995C.1
acaatttcacaaatttagaaagaaaaaagaattattcaccattatttcattcatctttctttactcactttccttgtcgcaaccacacacccaccgctgaatctcccgaaatatcttcaaaacacaagaaattcaatttgtgctttcttttccttctcttctttctatctatccaaatccaattccacgctccttaatttatttattttttttctcttcggatccaaattcaataccataaccgtttcagtttcagtttcagtttcacatatatatccctgtctctgtttgggttagggacatagaagagtgtgtgagagacggttatatatatatatatatatatatattttttttttttacggttacaactaacccgcgcgaatgcggcacgagagacgagcgagtacgacgaagagcgcgtgatggagtgggaggcgggtctcccaactgccaacgatctcacgcctctctctcagccgctgatcccgccggaactcgcgtcggccttcagcatcttgccggagccccaccgcaccctcctcgacgtcaaccgcgcctctcgcaacacgctctccacgctccgcggcggcggagggagcgtgcaccaggccttctcctcctccaacaacaaccacaactacgacggcgacggcgacggaggcgtcgaggaggaggaggaggaggacgacgatcgcgacggctcggggccggattcacggaagcagcggaagatcgactgcggcgcggccgaggaggcggactcggcggttcagacggagacctcggcggagcggacggcggtgaagcggccgcggctggtgtggaccccacagcttcacaagaggttcgttgacgtggtggcgcacctcgggatcaagaacgcggtgccgaagacgattatgcaattgatgaacgtggaagggttgacccgcgagaatgtcgcaagccatctccagaagtatcgtctctacctgaaacggatgcagggtctctccaacgagggtccttctgcttcggatcagttatttgcgtcgacacctgtgcctcagagcttgcatgactctgctcctcccagtaaccatagcaatggtcatgggcatgggcatggccatagcaatggccgtggtcatggtcatggtcatggtcatggtcatctctctgttccgatgatgtccatgccatatccacctcccctgatgtccatgccatatccacctcccatgatgtcgggcatgccccatggccacatgggcatccccatgcctaattcctccgccacctcagcttaccatccttataatatgttgcatcaaagggattggcctcaccttgctcctaatgataaatgaacctataaggtcagccatcaccatcatatgcaaaagattcaaaggcttgattattggtagtatagctttctgagaagggaggagctgcattgatgattaccctgtaattcactcaaaaggattattgaggaagtatatgaagaagagtatatggagctagattacaatcttagtcagtagtgtgtatcctgtgggagatttacaaacttattggtacacatctctaattcctgtcacctaattgtatgacgagaattctggcttatttcttctggtctgcctagacagctgattctaaagtaaattcttaactggttctctgattcataaattatagattcctattatattgtgtaatcctgaatgtgttaactctctttttcagaaccattgaataaaagaaagactgaacaacagacagcaaacatttataccaatgctctggcattaaatgtttttctttatcttatagccttgatcattatttatttcctttgaaagagatgttccatttttttgaattgggtgctgtaggctctcatgttaaagaaatggtacactgggagtggaacgggagaatttttaccttgtgtaacacacgcatacacacattccgacctggggaattcttgtttaacccataacgcaattcacttgtctcctttttcctgtgagaatttcaactggacttgctgtctttttggtggtaatgaacaaaacctccaccattctatggtttaatcgattaaaagagtatgcactcttacgagaaaggcaaaaatctattttgagcaaaataaataggagtttggggaagatcgatattctgagtttttnnncttcnnnnnccatta

SEQ ID NO: 100755 - DNA, 810 bp, Glycine max
  Clone ID: PAT_MRT3847_61996C.1
ggctggtgtggaccccgcagcttcacaagaggttcgtggacgtggtggcgcacctcgggatcaagaacgcggtgccgaagacgattatgcaattgatgaacgtggaagggttgacccgcgagaatgtcgcgagccatctccagaagtatcgtctctacctgaaacggatgcagggcctttcgaacgagggcccttcttcttcggatcagttattcgcttccacagctgtgcctcagagtttgcatgactctgctcctcccagtgcccatagcaatggccatggtcatctccctgttcccatgatgtccatgccatatccccctcccatgatgtccatgccatacccccctcccatgatgtccggcatgccccatgcccatggccacatgggcatccccatgcctaattcctccgccacctcagcttaccatccttataacatgttgcatcaaagggattggcctcaccttgctcctaatgataaatgaacctccaagattcaaaggcttgattattggtggtgtgtaattcacaccctgtaattcacattgatgattaccttgtaattcacacaaatggattattgaggaagtatatgaacaatactatatggagctagattacaatctgaatcagtagtgtgtaaccctgtgggagatttacaaacatattggtacacatctctaattcctgtcacctaattgtatgacgagaattctggcttatttcttctggtctgcctagacagctgattctaaagttaattcttaactagttctctgattcataaaaaaaaaaaaaaagggcggc

SEQ ID NO: 100756 - DNA, 565 bp, Glycine max
  Clone ID: PAT_MRT3847_61997C.1
ggattcccggctcgacccacgcgttcggggaaagcagaaagcatggaagtggtgcggcgggtggttccgaaggtgttggaaaagggcgtcgtaatgagtcggagggagatgagctcaggttcgggttggttggcgggaaagttggcgaaaatagtgaaagccggagaggctgttctgcactcgcgagccgaagaagttgaggccattgaaatcaagtcagagagagtgcagaagatcatcgacgacatggtccgcgttatgagaaaagcacctggagttggcctcgctgccccacagattggaatccccttaaggattattgttttggaagacaaaatccaatatatggcttattattcaaaccaagagctcaaggcacaagatagaacaccttttgatcttttggtcatcctcaatcccaagctaaagaacaccaccaccaggactgccctattctttgaaggctgcttgagtgttccctgatatagtgctgtggtagagcggtaccttgatgtgaggttgcaggttttgatcgttaccgtgaacccatcaaaataatgcaact

SEQ ID NO: 100757 - DNA, 288 bp, Glycine max
  Clone ID: PAT_MRT3847_61998C.1
ggaccctaaccaatagtcatgaacaagattcattttaaaagggcccagttccatcaacatatggtctctttcaaaatttccatcctagggaaaacaacgacacctaaataacacactgttgaacccatccaaattaacccaagaaatattccctaccaattgtccatccggttcattatccggggacttcattttcccttggaaattaaaacggacgatattttgatctaaagcctccttcattttctttttaacttaactctggtcgttagttttaggaagcttttt

SEQ ID NO: 100758 - DNA, 167 bp, Glycine max
  Clone ID: PAT_MRT3847_61999C.1
tcggatatgcgtcttacaaacatatctcttttattactcacaacgggacactactgtgtgggggtgacattgaaggatgatcgagcacgaggtgttcatctctcgttatgattaaatttaaaattcgtaattaacatcttttttgtatgatatgacaagagtacttt

SEQ ID NO: 100759 - DNA, 365 bp, Glycine max
  Clone ID: PAT_MRT3847_6199C.1
gggaagaaacttattaaactgtaacttggggggactatgaagtcgacccaaccaaacaaaacaccaatttgtaacctccgtacagcgccaaatacaaagaagggctgggaaccataaaaatattcgctaccaaaggtcaatatttgatgaaatcacttgcctttacattatacctgcatcatgcgacatactagcgcttcctaccacacaccctacattgttgcccaaagccataatggaaccaaagtgggatatccaaggccagttttattgatctcgggagatacaatattgacattcactggctaaggtttcgatggctcagcagattaagatggactatctgctgagggatgagcattttt

SEQ ID NO: 100760 - DNA, 198 bp, Glycine max
  Clone ID: PAT_MRT3847_619C.1
tcggcttacacgaacacgtattctctctctgtgaagtgaagtaatgaaggtccatcttcagatcacgtgctgaattaccgagctatgtgagagagagaggagacggataatggatacaaggaaacgcgcagatgaagagctacaaatcaacgaaggggaataagagagtgaaaataacgcactgctatggagagggat

SEQ ID NO: 100761 - DNA, 456 bp, Glycine max
  unsure (1)..(456): unsure at all n locations
  Clone ID: PAT_MRT3847_61C.1
cactgagcatgcgtctagctatctcgatcgaactgtccaaggtcctgtcaccttatggctgcagccaagtgtgaataagcaacgtaagcagcaacgtatacggtgggctaatgcaagccagcggtaaccggctacacccggctaatgctatgggatagacacgtacggctcgcccaggtacgatagggtacagtcgccacntatantagtgagtacggcagaggcacgagtggacgaagcgctgggtgctgtgtgtaagcttaagtttgttacggtgcctgataggttaaacgcagtgggtgatgttaacaaattagtgaaaacagtggggcacgatacaggtaccaaattaatggcagagcttaatagtaaattgtcgtgcgacagctcatcagcaatggccaggtacaagcggttgaatgaatggcacgtaattgaatttggttatttgtgtgt

SEQ ID NO: 100762 - DNA, 314 bp, Glycine max
  Clone ID: PAT_MRT3847_62000C.1
ggccgcccacgcggtcgactagctagcttttgcaaaaggcccctcgccaaagatcgcctaaccgccaatgccactggagctcctgcgctaaccgtggcatctacgttggcgtggagattcccttgagacaggctctggggaaaaacgaggccacgactgtgcaggtgcacggccaatagttgggcacactaccactattgaggggcccagagacacccgataggggtttgggggcttgggttaattggtcaggtcccaatttagacttcaacaatcgggataaacaggttttgggggtccgcaactgggaaagt

SEQ ID NO: 100763 - DNA, 562 bp, Glycine max
  Clone ID: PAT_MRT3847_62001C.1
gcgtcgatgaagcgttcttgactgcgctgaaggtttgatcctccagtgtagtcgaactggttcttgattgatttcttcattatcctgccgaccccagccaccaccaattcgcgcttgtcgcgcgacacaactcacgtacgtgttgacaacgtactgcggccccattgttgaagctctttgtatctacagcctgccctaggctgtctctatatgaaaaggaaatctgcaaatgaaacttttggaagatacagaacgggctggtatcatggggtataaaaatgcccttggacgccgttgaaacacttgttgaaaaggctctttacccgcctcccaaagatatgcaaatctttctcattcgcgatccatgtcgtcgttaaatcttgatgtgccatgaatttgattcatgcccactgtatgcaaaaggcattaaaatgacagcttgagctccttgcgcttctcccacgagaactcctgcttaatgaacagaccgttcttaacggtctggaagtacatggggctgttgaggttaagctccttgacaatgacaccggggcagaagtct

SEQ ID NO: 100764 - DNA, 414 bp, Glycine max
  Clone ID: PAT_MRT3847_62002C.1
acggctgcgagaagacgacagaagggtggacttatgaaggtaatacattataaaaactgacaaccagtatgatatatgtcacatcttaatttgaacaaaaagaaagatataaaataaaataataacttcaatttagttattaaaataatatcaaataatattaaaaaactcattatacaaccatttattttttaatttttaaggccctttttagtcatggaccttgtgtggttacacctccaaataggacctaaaatcgacactagatccaatttgatgtaaatggtgttcctcaacatattcatggatatctcatgagaaaaatcttaaaggtggcaacccatggcactttttccatcctgggggagaagataatataatggagaatgcataatgcacatgatattgaatttg

SEQ ID NO: 100765 - DNA, 1999 bp, Glycine max
  Clone ID: PAT_MRT3847_62003C.1
cgacagaaggggacatggaaaacagagatggatgactccattcatgaagaaaatattcgaaaaccggagggatgtcaaggccctattgctgacgcaactgattggaaagacagaaactgactgcaaagttggtgaaaagaaattggaaaaggtgtgtgtggaaaatccaagggataacaggggaaaaggagcttctgaaatgtcccaaggagaagcagagcattcagcaaaggtggcttgcactgcaacaaatttcaatggtgatgagcatagttttagttgtgaacagacctgcactgagaaaactaagactgcccctcaaatggaatatgatgttcaaagtgaattgaggaaaattggtgagagagaaaatactaaaaacgaggtgaatgttgcactaaaccccgtagagagcggctgccgaatgctcgcaaaacaggggggctaaagaaggaaccttgtggcggatgaaacttccgcgacctaagaagtcaggagtagccagctgcgttctatatgagagcatagatcaaggacattaatcagcgcagagggacaaatggataaaacagaggcctccgtggagtaccttctcgcgaggataagaatcttgggagagttggagaaagatcgtctctgaaagataggggaggagatggagagagaaagggaaagacagaaagacagaatggctgttgacagtgcaatgctagaggctgagagggaaagggagcgagaattagatacgatgacggttgataaagcaactttggaggctcgtgatagaacatatgctgatgctcgtgagagagcagagagggctgcatttgagagagcaactgcagaagctcgacaaagagcactggctgaggccagagaaagacttgaaaaggcatgcgctgaggccagggacaaaacatatgctgataaggcagctgcagaagccagattgaaagcagagcgaactgctgtagaaagagcaactgctgaggctcgagagcgtgcaatggaaaaagtaaaggttgatagagctgcattcgagtccagagaacgattagagagatctgtctctgacaaatttagtgtttctttcagaaatggtggaacacagggctcttcatcctcagatatgctggatccacgttgtcagaactctacctccttcactcattccagatatccatattcctcagtttatggtgcttcctctttttctgaaagatcagaacgagaaggtgaatcagctcagaggtgtagagctagactggagaggtatcgccgaacagctgagcgtgcagcaaaagctttggaagaaaagaacatgcgtgaccttgtagctcagaaggagcaagctgagagaaatagattagcagaaactctggatactgaagtcaggaggtggtcaagtggaaaagaaggaaacttgcgtgcattactttcaaccttgcaatatattcttgggcctgatagtggctggcagccaatcccactcacagacgtcattacttctgctgctgtaaagaaagcttacaggaaggccaccctttgtgtccatcctgacaagttacagcaacgtggagcgagtattcaaaacaaatacatatgtgagaaggtctttgatctcctaaaggaagcttggaacaaattcaactcagaagagcgatagcacacactgttctgtttttgaacatgtccctttgcaagagagcagctcccttccctagcaatgtgggatcctgcttatacctcgttatttttatcattttccgcgttctgtagtattattattccctaactatttgtatgtaagtattcatcctacctatagcaaaaattaaaaagtaaatacatacaaacaaaagcatataggggcttgcatttatatggccaacaaacttttggaattcgtgttataaatcttagatcataatttattttaagaatataaaacactatggaatgcttatggatttcagctaagtttagtaagacgaaaatt

SEQ ID NO: 100766 - DNA, 208 bp, Glycine max
  Clone ID: PAT_MRT3847_62004C.1
attttctgaatgcgacaactaacactacaatttaatattaaggtgatgttggaatcgggtgccataagggaactggatacatcgctccatgcgctgacccgagcccaaaaccctcacatgttatgagttgcgttctccagtcacaatgaacatagcaacctagtgacatgtcttcacaaagctaacctgacacttcacgagatggact

SEQ ID NO: 100767 - DNA, 222 bp, Glycine max
  Clone ID: PAT_MRT3847_62005C.1
tctaactacttcaaatcctctcaccttatctacacattaacactacttaaaccctaaccaagcatggcttttttcaccttcaccgcaatgtccacttacaatctttactcctcctactccatctcctactttcccacccaccatctcaccaactcctaacttatttacaaacacaacctctccttctcaatctacaccataaccaattaatatcactttaac

SEQ ID NO: 100768 - DNA, 171 bp, Glycine max
  Clone ID: PAT_MRT3847_62006C.1
ctgtttgtgtttctcttagaacccataagacccttgcctttgcatgggcataagataatggggggctataatcctagatagtaaatgataccgacggagaatttgctgagacgcagactactagcatgaacatacgagagaaaccggctatactacaacaagaggaggggt

SEQ ID NO: 100769 - DNA, 1291 bp, Glycine max
  Clone ID: PAT_MRT3847_62007C.1
gtatccaatacctcttactttcccccatcttttcttcttctcccttccattggacgctttacttatcttttcttaccaatgcagacttcttcatctctttacccacccttgcacgagctgcaataagaacgccaaaacaaaactccttcattttattctcttcttctctccccactcccactttgctcattcttcgcccctcttctctctctctcacttccactccactcttctctctctctcacacacaccatgaactcttcttattatatgctgcaagctggtgcttcttcctcttgaacagtgaaatgggtttgtgttcttctgtccaccgaaacgagcaaacaaacatgaagcatctaacgctctcttttgagtccaaaactgaaagccttgtgattcctccatcacccttcaaagacaaagacaaagccataaacggaaactttgtggtggttgatgatgatgctgcgtttaaggctcagcagtggtcaccctctcggtcaaccacaaccttctcggtcacagactgtggggataacgatggcaaagaggaatcattttttgattcaaaggcctggttagactcagattgtgacgatgatttctatagtgtaaagggtgagtttaccccatctcgtggcagcactccggtgcaccacatttttctcaataaaaccactccttctgagcctggttctgttccggaaccatctccaacaacacaaaagaaaaagttgttggatctttttcgtgaaagtgtcagagaaaaccaaagtgatgctgagaacacttctgaaattgaaaagaaagaagtgaaaccaacaactgtacatgatcctaaatctgcacacagtactccttatgtctcaggaggaaactctgcatgtagcagtgaaagaacaatgaatgatgatcatgcccccattagagagaaacctgttaaatctgtgcagtgctgccttccaagcttggcttcgtgtcgtagcttcagcgagaggaagaggaagacaagtcctgcaataacagataatggaaaagcatgactcagatgagcaatgtaccttagacataatcatgatggaagttaaaggtctatgaattgaatatgataatgtacatctttaacgttatcctgctcaatcaattgagctaaacttcctttaagttaaaacattttaatgcgtcaacattctattaaaagagagtataaaatctttatattatgtacatctttacagggataactttaagatgtacattatcatattcaaagttatccctgtaaaga

SEQ ID NO: 100770 - DNA, 352 bp, Glycine max
  Clone ID: PAT_MRT3847_62008C.1
gtggaaaacagcatggaagtgtgttgcagcttgcattaggtgcttttgtactttaattgaaaattagtgatttcagttcacaccagtgaatgcatccacctgcaattggagaactcaacgctgccgccagtgagtaagtaaatactaaacgactcaatttcggttattgcaacatccggttgattgagttggggatttggagtgatgggtgaatggtgaagatgggtttgtgaaaagaaaatgaatcagaaccagagatgaagttggaacgggttaccctcaacggaatggtgttcacggcttcgcaatctcagcagtgtcagcataattgcaaaggtagcagtattgtatg

SEQ ID NO: 100771 - DNA, 555 bp, Glycine max
  Clone ID: PAT_MRT3847_62009C.1
ttcccaacatcattcgtctgaagattgctactccagtgaccacctgctgttcttatagccttcccatctcaacatgaatttacaaagatgtctccatacaaagctcaaatgctctgagcgacgggtttctctgcggaccctgatgatcgatcatgatcatcgtcctgaaaaagccagtggtgccaaaggtaaatccaaggaatgatatatgagaatgtgtgcggagaaacacactagcactgcatatgactacgagaaccaaatatcacttgtgaccgctagatgaatccacgtgcatcttgcagttggatcatatgtattctagtgttagatgatgagaactttttttccaatgacaggcttatcgagaatgaactttctaatgaattgcttacctctgagaatcatgtgtgctacatatctactgagttaacaaagattcgtggagttgccactacggccgcttccgatgctgacactagctgatacaccgaaattgacaggtcttacatcctgacttgatttaaacggtctatcgctattgggattccctaa

SEQ ID NO: 100772 - DNA, 913 bp, Glycine max
  Clone ID: PAT_MRT3847_6200C.1
agcaacccatttgcttatgcagatgaggatgagattgcatttttacgttcgcttgggtgggaggaaagtgctggagaatatgatgaaggcctcactgaagaggagatacaagacttctatgagaagtacatgaaattgaaactgtgatcaaatattctccaacatatacgtcaaaaacattattcattactcagccacttgacttgaatgctgggggatgtgttggagctccatgagttatgtttagaattaagaattatgatattgcaggatttggaatatgaaagtgatgagacaaaaaatgtgctttaaatatatctctttaggggcatgagtgttaaaattaggcgaaggtggctgttagataaggagattttccttttggttaattggaaagctctatcagaaaaaagctactaatatacaggcaaagcatagactctttactaagaactagtgaaataatcatgctggatataatttctgagcatgaggagaaaatgaagataccaaagatgaacttcctgttgtttaataggaccctgctagtagaatagtatacagtgaaacaaaaaagaagaaatagagtatgagagttcttttttctcttactctctgatcttttactttgttttccttttattattactgattattgatatttgttttaagatatacactgtgctacagtttcaagtaggaccatagaaatgactcccatacttcattatcattagaaaaggaaaaaggtcaataaattcggtggttttgttctttcctagcctttagtctcctttattgttgttttcttctgaaatactcttggtaatccatcaccttatccatatctggaagacttttatggtgaaaaaaaaaaaaaaaaaaacgcgagactagttctctctctctctcc

SEQ ID NO: 100773 - DNA, 301 bp, Glycine max
  Clone ID: PAT_MRT3847_62010C.1
gtgggccagttaaactaaacggaacttggggttgcttattctcaatgccgaacagtctacagttattgatattgtatagggaatctgtgaagaggatgtaatcgctgccaatactaatatgccagctatatgtggtccacaggctactggccgatcttatcaacatgcggtgtgccatgcatgatcaggaatcatggagttctatcgcttgcaccagagacaaatgccaataaggagactgggcacgaccctataggtgagtggctctggctatgtgaaagtgagcacacctattttaatt

SEQ ID NO: 100774 - DNA, 1503 bp, Glycine max
  Clone ID: PAT_MRT3847_62011C.1
tacggctgcgagaagacgacagaagggggtggtgatgggtgggtgagtccgaattgtgaaagtaagcaaagatggctttcacggaatcgtctctcctccttccttcggtttcaggaaccaacaagaacaagaacaaggttccagaagacaaatggtatttagcctacattgtgtattttaccctgggtctcggttaccttctcccatggaacgctttcatcaccgccgttgattacttctcctttctctaccctgacgccagcgttgaccgcatcttcgccgtggtttacatgatagtcgggctggtggggatctccctcataatcctctacagccacaagtctgacgcctatgtgaggatcaacgttggattggccctattcgtcgtttcgcttctcgtcgttcccctccttgatgccttttacataaagggtcgggtcgggttttatagcgggttctacgtcaccgccggcgccgttggactttccggcgtggccgatgcgttggtgcagggctccattgttggctccgcgggcgagctgcccgataggtatatgcaagctgtcatcgccggcactgctgcttctggagtgcttgtttctgccctgaggatatttacaaaagctgtttacccacaagatgcctctggcctgcaaaagagtgcaaatctctacttctctgtatcaatcgtgattgtgttcttatgcatggttttctacaacatggtgcacaaacttcctgtgatgaagtactataaggaacttaaggttgaggcagtcactgcaaatgaagacaatggtcccctgactggacctgtctggaggtcaactgtatggaatattgtgcggagaatcaggtggtacgggtttggcattgtgctcatttatgttgtgactctggcaatatttcctggttacattacagaggatgttcactctcaaattcttaaggattggtatccaattctcctaattgctggctataatgtgtttgatcttgttggcaagtgtctgactgcagtttacctcctacagaatgcaaaagttgccataggtggttgcatagcaagattgttgtttttccctctcttcttaggttgcttgcatggtcccaaattcttccggactgagattcccgtgacaatactgacttgcctgttagggcttactaatggctacctaaccagtgcattgatgattctgattcctaaaattgtaatgttgcagcatgcagagactgcagggattgtgagtgtattattcttagtttttggtctagctgctgggtctgttatagcttggttttgggtcatctgaccaagcaatttgtgttaatttgggaacttcgatacgtgtcttgtggcttcactcaatcagaagtcaaaactgggatgaatttccttcatttgtttcctgaaaatgtggaaatttgtaagcttatatgttgatataataatgttatttgtcaattctaatgaaaaaaaaaaaaaaaaggggggccccc

SEQ ID NO: 100775 - DNA, 207 bp, Glycine max
  Clone ID: PAT_MRT3847_62012C.1
agctattatccgaggtatgggagcacatcacgcacacaatgataaacctaccacaggtaaacattggtgtttatcacaaaagttcaatcactataggcaacaacatattaactcataacccatccatgttttactaactctaaatccgatctgaaatcaagcaaactgaccccataaccgattgatagttttaaaagcaaactggct

SEQ ID NO: 100776 - DNA, 436 bp, Glycine max
  Clone ID: PAT_MRT3847_62013C.1
aaccatcaagagagatatgcctacctgggggataataataaaaagcctagttagctttttccttaataggtccttaaaatggggccccggaccaaccccgtgggtgccattttttaaaatggcctgccttaagattaatatacccttttggttatatttggttgggaatattggcgtactatggacattcccgtgttgggccttccgcatatgcattatgcgtagggttcggctttgatccccttaatttaacaaaccaaccaagggtccgggttaacggtttaaatacataccttggggcactttggttcccctaagccttggatttaaaaaggaaataagttcttgggcttccggattcctaaaatggatttggggcataatcattttttcatgcattcatccattccacccatgatagatgtcggagttttga

SEQ ID NO: 100777 - DNA, 589 bp, Glycine max
  unsure (1)..(589): unsure at all n locations
  Clone ID: PAT_MRT3847_62014C.1
atttttttccccacatgtagttagttagcacttagcaataaaacttcataaataagagtaattatgtttttagtccttgcaaataagtaaatttttatttttattctctcaaataaattgtctgatgttggtccctcatttatgagaacaagtcagatatgatccttatcctttacaaaaacaaaaattatctgataatttaggtcttttgttttatgaaaataaggatcacaaatgacacattttcataaatgtggaaccaaaattagacaatttatattttgagagactaaaaatgaatgttgtcctatttgcagacgctaaaagcatatttaactcatataacataaaccttgtcttcttgtgctacagggaagtataggaaaatggtatcgatgtaccttccatatatacctaacaaggaggatatcccaatcagctttgagtatcatgtcaatcttagtagaaaaggctatcgttcactgatatacagtggcgatcatggcctgaatgttcttttcttgngaactgaagcatggataagatctttanactactccattgtggatgattggaggccatggcttac

SEQ ID NO: 100778 - DNA, 326 bp, Glycine max
  Clone ID: PAT_MRT3847_62015C.1
accgccttcaaactttgtttggggggttgggtttcaagaaaaaccaacaggggtccactttcctccttttggggaaaaaaacccccgacataaaaatctttttttacagccgaaaacggaaatttttccattttcccccccccaaaatgaaaggggggggtttcctcctttttgccacctgggatggaaagagttccattttgggggtttgggatattaaaaactttttggatggggtttaaaaaaaaaaccagggcgttttacatttgggaagaggggtttaaatttaggggggcccccctttccactatttgctgggtttttgt

SEQ ID NO: 100779 - DNA, 429 bp, Glycine max
  unsure (1)..(429): unsure at all n locations
  Clone ID: PAT_MRT3847_62016C.1
aaaaaattaagagcctttatttcctgggnggataaaactttataaaaaacaacacgaggaaaaaaaaaaggaggaaaaaagccaagaaaaacccccaaaaaaaaaaccccaaaaaaaaaaggccctcctggggggacccccggggaggggggaagaaaaaaaaagcccccaaaaaaaacccccgcaaaggaaaatctgcgcggggcagggggtccccgacaggaaaaaagccgctgtaaaaaagaatcccgggtgtataaaaaaaacaggggtggggacgccccggaggccccccccaaaaaagccgggcccgggcagtgggggccgggggtttggggaaaagtttgaccggaaagaccaaatccggaaaacccactcagggccacttgcccctgggaagccgcggccccgtgggcccccccgggaagg

SEQ ID NO: 100780 - DNA, 425 bp, Glycine max
  Clone ID: PAT_MRT3847_62017C.1
gttgtttcctctgcatgatctggaattcgtgttttcagaagatctggcagcagcctgctttttctctcgatctctttgtccccccctctctcttcttgctcttgagttgtatctccttctctcttacgcgtcttcatttccactcacacacacaaaaacacaaatacactctctctatctatattgttggcgttctcagcactttctctctctaaaagattaggaccagccgacggtggctgccttctgaaggaatcaaagtgcacacacactgcacgcacaaccccccaacactgtcttctcctctttcactttctctctctttaaagaagggaaatttggtgtttttattgtttttgcccgcaattgggaattgcgtttgtgggggtggggaaaaaaaaaaaagagtgattttggatcttttg

SEQ ID NO: 100781 - DNA, 332 bp, Glycine max
  unsure (1)..(332): unsure at all n locations
  Clone ID: PAT_MRT3847_62018C.1
acgtatagcttgaatcccctagagcggccgcttnnnngnnnnnnnnnnntttttttttttttgttttaaccccacaacccataccaaacctttcggggatttataaatttttaatggtcgctgacatatatttattanccgaacccctgccttcaaccctaccccccccccctaaagttattcgtgttacaacttccccaaatcaccccccccccccatttcaaattaaaattctcctcctataacaaccccacccctcaaaacccccttaaacatacctattgaaaccccccccccctaccgaagtaaccttctccccataattccgcttt

SEQ ID NO: 100782 - DNA, 224 bp, Glycine max
  unsure (1)..(224): unsure at all n locations
  Clone ID: PAT_MRT3847_62019C.1
accaaacacatttctagattcacgcttccaccattccacacactctantactctcgnanagnanatggnanntantancancgtanntatttgtanacttcnctnngatttcgtcaccggacgactagctccgtcagcaatgaggacccctaagacgcgcgtggaccacacgctccctctcacctccgtcctcaagcatcccttcaccattctcgacggtcctc

SEQ ID NO: 100783 - DNA, 304 bp, Glycine max
  Clone ID: PAT_MRT3847_6201C.1
ggctcgagggaacatggcgcagactgcgacgagttctgcgagagatggcaacctttatatcctggagacatcttttatgttctggcctgtggacggtcactctagtcaacaatcgctctctgctcctgcgctggtatactgatgacatcattcggcgtagaccggtcgctactaatggacatcgacaccgtgcggggtatgcggctaacatagcctggacccataacaaatgctgtgattgcactttagctgctgagtccgcttgtgctcggaatgttaaaggcatcactgcaaagatgacatc

SEQ ID NO: 100784 - DNA, 284 bp, Glycine max
  Clone ID: PAT_MRT3847_62020C.1
cccgacgtctggaggccgcccagtccagacgatgccagaaggcccaccaggcccactgctcgcagcaaagatggggcttgggctgcccgaggttcaaccaggcccgcccctcgtgccgcaaagcccaacagcagggtcagcacaggaacaggaaagaaaggaaaggataataataagtatgaaagccctgatggtgagttggcggaaatgctagaaagggatgtgttggaaacgtcccctgctgtcagatgggatgatgttgcaggcctcactcaagccaaaag

SEQ ID NO: 100785 - DNA, 151 bp, Glycine max
  Clone ID: PAT_MRT3847_62021C.1
tggaggcccttgccaaaaaatggagggcctcatataacaaccacaaccttcaattgtgtgaaaccaccaagggaggacccccataaggacaaggtaagttaattctcgggccgagggttaaaaagacgggccttggaaaaaactggggggt

SEQ ID NO: 100786 - DNA, 1045 bp, Glycine max
  Clone ID: PAT_MRT3847_62022C.1
tttggggaacctacacctttggaaactcacacaccaccaccaccgttttcatcaatttcttatcttttctcattcccttctcttcttcctcaacacacacaaaatatctcttccaatttcaatttctcgtcgtccctcatcatggctcgtctcgcgatcgctgtcgccgccgtgctcctcgtggccctctccgcctccaccgcgacggcgcgtccctgcaggaccttcataatctcctcctactcgttccgcaaccctaactccaacaccttcgccaccatcaccgagatccgatccttcacccctctctacatcaccgacaaacccaccggcaaaccctcctcctcctacgacctcttcttcccccacgcgactcacctccctgagcccgagcgcgtgaacccacgcgctcccctagggttcgcctccgcgtacgatttctcctccctccgcgaccgcaccaaggacatcctcagcgtcgccctcgccctcctcttcggtgtcggctgcggcgccctcaccgccgccaccatgtacctcgtctggtccgtcttctccacgcgccaccccaccgccgccttcgacgacttctcctccgacgaagacgagatcgagagccccaagaagctaggctacgtcaagattcctgccaccgagaccaccgctgctgtctccaccgctccggcgccggccaagggctcggtatgagaatgtgtcctccgtaaccgtatggttttctatgttgattgttaataattattataggtgaattgaatagtgaaagtgtcaaatggtgcaaactttggccctgtatctgcgtttatgtttactttttaatttgatgtatttgcgttttttagttctaattggcaactcttggtgtttattatggtgttggtttcctgtgttgattgtttgcaatgctgaaaccttggatatggaattgatcgtgatatatatagtatcatttattttattgtttcaaaaaaaaaaaaaaaaaaaaaaaaaacaaaccgctccgctgtatacgcgagctagcgtacgg

SEQ ID NO: 100787 - DNA, 1024 bp, Glycine max
  Clone ID: PAT_MRT3847_62023C.1
caatcatacaaacctttattctaagttctgatggctgtgcgatcattctcctacgatgtgttcctcagcttccgagggggaagatactcgttatggtttcactggctatctctacaatgtcctccgggaaagggaaattgacaccttcattgatgaccaggagctcaataaaggggacgaaatcacttttatcttttgaggaggcaattgagaagtccaagattttcatcatcgtgctctctgacaactacgcatattcctccttttgcttaaacgaactcactcacatccttaactttactgaggggaagaatgatctgtcggttttgccagttttttacaaagtggatccttcagatgtccgaaaacacacaggtagttttggagaagcactggctaatcatgaaaagaagttgaagtctaataggctcgaggaagcttcagatctggaagatggctctgcaacaagtttctaacttttctggccatcatttccaacctgatgggtacgtacccttcctcacttactttattttaaattctttaattttgacttgtctaatcacactttaatgttcaattttaaagagatcaaattataatcatgtacaaccggtacactatttaaatttataatatgttctaatgtataaattaataagctgccaacaaaattttaattcatataaaatatttgaagtggtaatattactgacaattggacttaatgttatttatttgtgatagtttatttgaactttatgatatatttttttattaatataatttatcagttacactttaatcgatagatttattatcattttaagtttatttaaaaaataatattgtcttttgtacctagatataagactaaggaaagataataattattattgtttttaaaatattattggttatttgatcttactaacgagcctcttttaggacaaaattatattttctataactttttttatataaaaatcttcataatatatactttcttatactggaaatagta

SEQ ID NO: 100788 - DNA, 331 bp, Glycine max
  unsure (1)..(331): unsure at all n locations
  Clone ID: PAT_MRT3847_62024C.1
atagtntncacgtcacgcnntgncgganggtnacgtnagtncccgncttgcagcctcgtagcgcgnantgnagaattcnttnagnnncncagcccaancgananaggtcgcgtctgcanntcatcnngnnnncccgtgcanatctgttagaagccntattcttctgaacntggtggtgtnacagtgcaaangntttctancaaattgtgcggggccctgnagttgtncctctagtnntgtgnangaatatgaccctnnaatagnggggccaaaaaggcnangcggantcnncatgtancccgctgagcttgaantgtgngngnccancttc

SEQ ID NO: 100789 - DNA, 272 bp, Glycine max
  unsure (1)..(272): unsure at all n locations
  Clone ID: PAT_MRT3847_62025C.1
ttgtcgttccacccctcccgggtancttctacatcaccttcaatcctataggtgaggcctttacaagggctaatggattcccattccctctcccgggtccatgtctcccaccctaaaaaacctatcaaagcaccacaacggggtcatgctttggaagtagcatgcaatggtaaccctataaaaatggggggcatactgatctggctcttgggagactatatggcgctacaacaagtctcacaagacaccactgggtctctgcattgggggct

SEQ ID NO: 100790 - DNA, 429 bp, Glycine max
  Clone ID: PAT_MRT3847_62026C.1
tgcgagaagacgacagaagggtttaacttaaaaacaactacacaatgcttctttatttttttttatatagaagttttatttaaatttaaaaaatacttgtgcattttatttaaaacttggtaatttaatagatgtaatattaattttcacaaatgggattaaaaaaaccacttgattaagttgattctcctataaatttattttagtttttcataccacaaataatgttattaggacatagttttgcttttcataccacttgaatttgagacttttggttaaacgagaataaccttttttgggttgatccaaacttatttattattgggatatacttttaattttttaatgggggcaaaggaaaaaaaaattacctggtgataatggacattaaaagggtggttgggataggaaacttaactttttttt

SEQ ID NO: 100791 - DNA, 247 bp, Glycine max
  Clone ID: PAT_MRT3847_62027C.1
cccacgcgtccgggaggagcagcggttttcggatacgggggaggcggtggtggaggaagtggaatttgtattttttctacacagtacctctacaccattaacacctacacctgcaaatactgcaacacaatcatttgattttataactgcaattttattcactcatacttctactttttatcccctttcaccagatatttctactatgtgcctcaatctaattccaagaaaacatcatattgacatt

SEQ ID NO: 100792 - DNA, 387 bp, Glycine max
  Clone ID: PAT_MRT3847_62028C.1
ttttttttttttttttttttttttttttttttttttttttttttgggggggggcccaacaaatcactgaattctttgttttcaatcacaagggcttggggaaagaatttcattttacataacaaaaaataaaatgtttgaaataaaatttagacctgatctttttttttggggctttttttaataattaaaattagaaccttggggcgtttatttttgttgttttgatacaaattgccccaacttatttttgggctagcaaattttatctgccccaaagaatggaagaatatttttggttgtggcacttttccctacctacaaaaaatactcttttttattcttttttcccctgaaccctaaccttttttgggggtgggcgggtaat

SEQ ID NO: 100793 - DNA, 365 bp, Glycine max
  unsure (1)..(365): unsure at all n locations
  Clone ID: PAT_MRT3847_62029C.1
tcatagcgaccggaacccaagggacaggcccgagggcgaactagagcggaagcgggggacgaacgccgacganggcgaaacagcngacacacccgacgccagcgggcgcggaaccccgcacaccaccaaaccnacagaaaacacgcgaagagaaggacacgaacccacggccgggccacccacaagcaacaacaagaaggcggaggaaaaacagccggaaccgcacgagacngcaaccgaggagggaccagaagagcacaagggagccgccgccgaaccccccggcacgagacgaggacaaacgcccgacacgcaaggcgccggaccggaaggaaccacaccacccaaaaanaagaaccccaacc

SEQ ID NO: 100794 - DNA, 443 bp, Glycine max
  Clone ID: PAT_MRT3847_6202C.1
ttaacggcgagcaataggactagatgaccatggggacctgaatattcataacctgcagatcattcaaaagcgtgcccaatattcatgccaggcccaagcatgtatagacaagcattcagtctctgtgagaaagttaaagggaagttgagcaaaccaaatgattaccaaacaatcttgaagagccttcatatcctgagcaatggaataattaaacggaatgatctgcagaagttggtaactgatttactaggcaagaaatctgatcttatggaggaatacaatgatctcttgggacgccgggaaaaaaatgagggattacctgctggcgacatgaggaaaaagtcaccatctacggaggctcatttatcaagatcatcccacttggtggagaaagacaaatagcacaagcctgacttggatggcgctagacagaacgaaagaca

SEQ ID NO: 100795 - DNA, 364 bp, Glycine max
  unsure (1)..(364): unsure at all n locations
  Clone ID: PAT_MRT3847_62030C.1
nnnnnnnnttttngtttnngttttttntttttnnnnnggaaaacacaancncancaagggggagggctcaaaaaaaaaaaggggggccaaccacccccggaaacgcaggacagggatagaaattgggggggcgaccccacgccaaaggaaacagagcgcaggccggcctggagcacccaaacctccccaaagaaacagccccggaggccccacccggccaggaaaggacaggagcccaccgcccgcaaaagggacaagcccaccggcgcacaccggaggcggaccgaccgacccaacccaagggccaaccacgagactctaaaccggaacaacctaaagaccccccacgggagcgggaaccacc

SEQ ID NO: 100796 - DNA, 792 bp, Glycine max
  unsure (1)..(792): unsure at all n locations
  Clone ID: PAT_MRT3847_62031C.1
ctttttttttttttgtagaatagcagaagatttaattgttatctattcctaataattttaaggatgtacatgtatgcatgcattatatacagttacacggaactcatcaaccacgaaatcgatagatcgtttttttctgttttttgtagaatacttagctgaattgatcatctaggattgggtaatggaatttaaacttgtgagtgtgaaaccttttgacttagtgaaattagtgtgcatgatcagttgtcgactaatttccctttcttcctaagaaccttcgtttaaaagagaataatgtactttgataataaaaatgaagaaataaataactgtctaactgtgtatgctttcgtgatattgtaaaaaaattgataaaaagccaatggtgatattctcacgtcaaatctaaaccatatcatatatatgtaaaaaatgaaatcatctttatgcggatagtttattctaatccattaaaaaggtgtgggtttacattacaaaatgtacataactgtttacgaagaaaccgatcatgtattgcgttgcngcattagtaaagtctgccaagaaattcaattttatttaagtagaaactttttatttaaattttgttttgnnggaaggacccagaagggggtttaattcggtgctctcctgagccctcgtaaactgaccccttaaattttgaggaccttggataaagagtttttttaaggggaaggggccctgggtggcttttttgattatcggggtgggtggccttgttggggagggctgggatggttggatggg

SEQ ID NO: 100797 - DNA, 246 bp, Glycine max
  Clone ID: PAT_MRT3847_62032C.1
ctgatggagtgcagagaggcctggtaaagtgaaaacttcatttcttgcacttctttatcatttgtttgtgaaacaacgggaacatgctagtgcaaattgtctgcacattttgcaatatggtccccactatataaattattacatagggtccttatattttcaagtctcaactaatctccacatgatgatacctaatgatttgttattaattcttttttaaattaaaaaactcaactatgtgtaaca

SEQ ID NO: 100798 - DNA, 355 bp, Glycine max
  unsure (1)..(355): unsure at all n locations
  Clone ID: PAT_MRT3847_62033C.1
ttttacaaagagtgctttaaataccttttctttaatatnaacataagaagtttcttgcgtgacttttacaatccnctactcttttaaattgcctgggaggttgccaataaagtccgtggtatctataccgttctcaagaccaaagttccagtcaccgttcacgaatatggcgaccgctactgtcttattggtcccctttcctacaagacggcccccatggaggttgaaagcccaaaattttgggggtaaaagtccccccccccaaaacaaaaagggggaaaaaaaaaattttttttctttttccccgtaaaaaaagggaaaaaaccccgtggcccccctttttttttttttgggt

SEQ ID NO: 100799 - DNA, 728 bp, Glycine max
  Clone ID: PAT_MRT3847_62034C.1
caaaggggatgccatgtggtgtttgctcatgagtgatcttcatgtcgggagggccagtgctatggagattccggtgccggacaatgggagcactgtgccggctaccggtgacggtggtgccaattcggctggtgttatggcgccggctttgtgtaggtttcatggggggtggggatttggaaatgggggaggcttggaatttcctgtgaatgggatattctcttgtggtgcagagatgaatttgcagctgcaacgagacattgagtttccgaagaggtttaatctttctccttcaatgaagtccttgttgaagagaaatgttgctatgtttgctgctggttttagggcaaactccaagcaattgcaggcacaggtgaaggtcgttcccggccggagtacagtgcctagtttggattcttcggctgtatctgggacagaagtcccggctgagcagtccggaggaaattcacagaatcttgatagccaagatgctgtgaattcggtgcagagtaaatttggtgatttgaatcttgatgagaatttggagttagtggcggaggatcagaaggatgaggtgatagttactttatttcatcagattaaggatcttgagaaacaggtcagtgagcgaaaagattgggctcatcagaaggcaatgcaggcagcaagaaagctaagcagtgatctgactgagctcaaaatgttgcggatggaaagagaggagactc

SEQ ID NO: 100800 - DNA, 188 bp, Glycine max
  unsure (1)..(188): unsure at all n locations
  Clone ID: PAT_MRT3847_62035C.1
ctcacaaattggaggcccctnnnntggcctcactcgcgttncttgcgcttgctctggctatccgccaacacagngcatggccaagggcacgcgctgccgggccctatcccagcgcatgtccacttgctgagtccatngntaagtccacacccccaacccacgtcaactctgccagccctccgcctgcc

SEQ ID NO: 100801 - DNA, 411 bp, Glycine max
  Clone ID: PAT_MRT3847_62036C.1
atacctcctcttcccactgacccagagaaactgtttcgttacttggacctagtactcacccctctccctctttcaaaaaccagccaaggtaatttgagaagatgggttcccctcattctcataacggtttaaatgtttcagcctcagccttcggcaaaaggggataaacttctgcatcaccttctttggtcagtcctgtctcctctaacattgagatttcaaagtagttccagaaggttgtctgaatttctgtcaaagaccttgctgaaaaggcattgagatttgtttgagcgaccttttctctacttctattagcttaccatctaaagtttcctcggcaaaaaacatcactgtaatactgttgcaggacgcagaacacgcgttaagcattaaaatacatgaaagacaaag

SEQ ID NO: 100802 - DNA, 365 bp, Glycine max
  Clone ID: PAT_MRT3847_62037C.1
tcccaggaaaagagacgagctgttaactcaaaatttatgttgaccgcgtttgaccagccgcgccccggggtttgttcggtgccaagggagcgcggaaggggcaagcggaaaccgccctcgagtcctgatctggcgcgccaaggagccaatccaaaccctcccaagatggatcgcttttcgccgcgcctgcagggcccgaaaccggcctcgcgccattaaaaaatcgcccgccagtaacggttttccggcgcctcgatagcgccgaccgagcgaggatattgttcggcatcgtccggaaggcgcggggggtcatgggtcgcgacaaaaaaccttccaatctcgattcccgggtgttttttttgggg

SEQ ID NO: 100803 - DNA, 378 bp, Glycine max
  Clone ID: PAT_MRT3847_62038C.1
actcgccccacctcacatcgtccaagtggtggattggatcgcttggtcgcactgccaaccatgctgtggtgatggcacagctgatcattgagggcaagccttatggccctcacccgttcgttgtccaaatccgcgatctcaagacacaccagccactggagaatatccacattggtgacatcggtcccaagttcggctacaacaccatggacaacggtttcctcttgttcaaccacgtcaaggtcccccacatcagcatgcttgccaagttctcctccatcgaccccaagaccaaccgctacacacgccctgcgtcgcccgcgctcgtctacggcaccctgacttgggtccgctccaacattgtcatgcaagcaggtg

SEQ ID NO: 100804 - DNA, 374 bp, Glycine max
  Clone ID: PAT_MRT3847_62039C.1
ttggggggggggggggggggatttgggaatggagctaagggacaatgcaggcagatgtcataaggcgtaaagaacggttacgtcatagaagaaatggggtagaaaactcgtaagttacacaagggataaggaactgcatggcggtataggccgtaaggggaccaacgatgaggtacagccggattacgtatccaggagggtacaatataactttgaagcgcggtgtgttatgcgaacgtagcgagacaaagttagtggtagctggcggggttgtagaaaggctacatagcaggcttctacggccgcctaaaagaggcggaatgcaaagcaacagccctggtgtcccatgtactggcaggcgtggttccattata

SEQ ID NO: 100805 - DNA, 185 bp, Glycine max
  Clone ID: PAT_MRT3847_6203C.1
gctaccaggagctccctatctacagtgtttgcctctctttctctctctctctctgcaaaagctacgaagctgcgttctgatccttcaaattaggtactctattgatctcttcctactttgccctcttgcaattcttcccttaccaacctgtgttctgtccataacccttcaagtttaactctttt

SEQ ID NO: 100806 - DNA, 1302 bp, Glycine max
  Clone ID: PAT_MRT3847_62040C.1
cccacgcgtccgaccacgcgtacgcggacgcgtgggcaaatttgcaaccttctgaataaacctgacatagtgaaccaagcagggcaagaacacaaacccttacaatcgaaaattgtgttgcagaaaagccatgacgggggaagagactaccgggaagaagagggtggtgacagaatccctaggatggctaacggaatcgtcgataatgccaaagaagcaccgagccatagcgggcgttggcgcatcctcaatcctcgaattgaaggctgaactatacaagtctcaggaagattccaaaaagtctcgcgaattggcaggccccgatgccgagtaccaacgcgccaagaacaaaatcgcccccaaagacaaattctccgtcaaaaaccgcggcgtcgatgcccgcgctcacaaggacaagcttgagttgaaggcggtgagtgatggaacggcgagctatgtggcgctcgagaggaaggctgagttgtatgataagttggtgaagggagatttgtctgatgaggaggatcaagagaagtattgtgtggactttttccgtaagggaattgagcacgatgagttgccaccgctcctgcagccactgagccataatgtgttggtggaaaatgaagatggtgctgttaatgatgatgattctttgatgtttaacatgaagcctgttgggcctgggcgaacagctggagctgttgacaatgctgattataaacgcaatattagggaagttcatgaagaagttaatcgagcaagagagaaggcttctgaaattaaacttcgaaggcaggagcaggtggctgctcatcgcgagaaacttaaacaagcctatcttcgaaagaggctggagcaactaaaagccacatctattgtatctggatctgagaataaacaaacctgatcactgcaccagttggtatgcataacttaccaaggttaatgttggtgaaaccaagacttcattgaagaaaggcacgaggagttgaaagctggcaaaaaaaaaaactgcattatcctctaatgctgtgtttggttgagggggaggagagaaatagaaaagttgtgagggttccatgtggatttctcgcttcctacaatatacttaaatttgaatatatcgcttatatttttatcctctattttcattctctggtccaaacacattgcttcaaaagatgaagggaaaagaataaaaaaaaaaaagatggaggcagaagaaacatttttttcctgttgtaaatagtgtgtaacttgaacaatgctgattacatgaaatattgatttgagctttgg

SEQ ID NO: 100807 - DNA, 385 bp, Glycine max
  Clone ID: PAT_MRT3847_62041C.1
ggattatggaaaggggttattcaggttttatttttggattggaaaccgttccttggtttcaagggaaagcctgaattaggccgccattgaaaattggtccaaagaagggaaggaatttcaaaaccaccattgtataaggcgttaaagggaatgaatctatttttttttaagggggataaaaagccttttggtaatacccgaaaattccttggggttttcaaatgttcctcctaattctaatgatccctttctcccccaactagaatcccatgatttttcactatgatataatcacaccttcgcagttcgtatccacagctgcacaccatgtctaagtacttcgcatgcccgcgaaacaccccactgtaaattggaatcttgctga

SEQ ID NO: 100808 - DNA, 1514 bp, Glycine max
  Clone ID: PAT_MRT3847_62042C.1
tcgaaattaggctcaagattgtttacttaacttagcggtggcgttgagagttgagagtgaggggtttaggtttaaagttgaagaaggagcgagcctggggaaggaaggagatctatgggacgattcatctctcatcaatgccttcgaccaagctatttctactttcaacgttctcttcataaccctatttttcccacgcgtccgaaacaattctgaacctgaaaaaattaatggctcagaaacagatcttgctgctgttttgaatgcttggtattctgctggcttctatactggaaagtaagtgttaatccaggttttatttatgataaacgttagttcatttttcatacaagagcatatttctaacatgctatagtgggtgattgataagattttttttgtttattttaacaaaatatatttatttggattattatggtattattgaacttcggctggcctaatgctttaatcaccactttagtcaaaatcaaatttaatctctgctgaaccattttttttttgttaatacaaaggtttggcaatataacctcttgatatattgcactggcaaataaaatttatttgtacacttctctatccattatatgtgttatttcagtactcaatatcgccacacagtacacagtcacacacacatccgtggtgtaaaaagcttgagttttgtttgctgtgcgctatacacaattgtgcatttaattgaagcacatattattggagcaaatgattattggcacttagaattatagtagtttagcttcaaaaactgtcaggtttgcgtgattaggtagctgtttggatcatctgaaacaaacctctacatatattctctccttgccctttgtataatgttggggttatgattatgatgataacaggtatcttgctgaacaatccattcaaaacggaagacagaattgaactcttacatctttatgggagtcaaaagggttctcatacaactatacaagcccttgtgattatactcaacagttgggcaactgatctactcttcacatctttgggaaatcaaaagaactttggtatattctgatctgattggataggctggctcatcataatttttttatgccccggtgctagttttgttagcaagattttactggacatatttagggaatgttttcgctctctgctgcagacatgaatatgttgccccatttggtgttgaatgccgaactataaaatgcataaatcattttgttttgttgtttatgtctgtatttaatagttggcactagcgagagaggagtgatggcatcacccgttgctcttttccttggtttaacattaacattacaaggggtgttgaaatgttgttgttagtggtttatatgcggacgtatagaagcgcaatcatgcttgcgtacttgcgtcaatgccaaagttgaagatcacccaaggtctagttttgtacgtgctatagactaatttgtttaaacttatttgttgaaataaatgtttattttaat

SEQ ID NO: 100809 - DNA, 352 bp, Glycine max
  unsure (1)..(352): unsure at all n locations
  Clone ID: PAT_MRT3847_62043C.1
gggttattcttttattatttttttttttttattttttttttttttttttttttttttttaattaaattttttttgggccagggccgaaaatttatttgccaaggcccatatttttttaaataaaaaaattccggggggaaaggatttttanttgggcaagggttggcccaaaaaaggcggttttcaaatggaaggggctcccaaaaccagggttttttagggggaattttttttggttaaaccccacccaggacaagccttggttaattggttaacttgaacaagggcgggggcttaagaacttccttcccttaacattggctggcaaaaggaatggaccgtccaaaatggg

SEQ ID NO: 100810 - DNA, 200 bp, Glycine max
  Clone ID: PAT_MRT3847_62044C.1
cccacgcgtccggccacacgtacgttgagcttaaatcataaccgctcttgtatgggttcttcacttgggctacaatcatcatggcgtaatgacatcaggttggaaatgtcttgaggcaaggtgctattcgcagcacacataccactgttgcgtccatgcttaattacatccgacgcatggattgatgcctgctactcatt

SEQ ID NO: 100811 - DNA, 330 bp, Glycine max
  Clone ID: PAT_MRT3847_62045C.1
gttcgttcttttttttttttttttttttctctatctttttgttgtttcttttttggttttaacaggaaggtggtaaaattagtcccaaaacgatcaaccatcttcgaaagggattccccgcaagagtttggtgcgcctttccattggataattcaaacaaaaaaggggggccgccctgtttaccggggcaatagccacctttgaaaacaaaaaaggacgccttgctgtccatagatgaatgatatgaaaatcaccaaccccagggtacgaccccgtatccagccagaggggccgcattaggggggttagggaacctttctttgatttttg

SEQ ID NO: 100812 - DNA, 353 bp, Glycine max
  Clone ID: PAT_MRT3847_62046C.1
gcaatttcttacttaattattactttgtcgttaattcctaattgctaaatgctgataaatagtcctaacactttttccttgcaaaatcttatggttttggacaagtattaagaaaatcatagcatttggctcactggctagttatattccgttcttacctatgccataacttcaccatattgactaaatataagttgaaatatatcttagtttgctctaccattactcaatcataggatataactattttgctttttgtttaaaattgtgtcaacaaggagagaatagaagaagaaaaaaaaaaagagacctgattggtaggattgtatacttgatctaagatctgtttcttt

SEQ ID NO: 100813 - DNA, 479 bp, Glycine max
  unsure (1)..(479): unsure at all n locations
  Clone ID: PAT_MRT3847_62047C.1
ggctcgaggttagataatcagtttcaggtgcaatcagaggatgatactcatggaatatttggcacatctgtgaagtacgaccaagacactaacagacttactgataagacacaacgacgtctagcacaaaatcgagaggctgctcgcaagagtcgattgaggaaaaaggcatacgtgcagcagttagaatcatgtcgtgtgaagctcttgcagttagagcaagaggtagatcatgcaaaacaacagggattgtatattggcaacggattgggttctaataatttgggttttgctggctctgtaaattcaagaataacccttttcaagatggagtatggaaactgggtggaggaacaaaatagacaaattttggaactgagaactgctntaagttctcatatcggtgacatacagctcgggacacttgtacaaggcataatgaaccactacaccanactctttggcatgaaatctgctgc

SEQ ID NO: 100814 - DNA, 1215 bp, Glycine max
  Clone ID: PAT_MRT3847_62048C.1
acatgaccttaataaacacgtatttacaacttctcaatgctggaaaaatgcgagcagccggaagaggatgaggagtttaagggtgttttgctagaattaatgctaatgtttgatgactgacttagtaagttcttgaggacgattagcccaaagtttgctcaaagcccgcaggcgttgaaaatattcacccaaatcaagcagaaatcgaccagtctgacgtgtggtaagtattcgatacatttgcctcaatgtttcttgtcgtagatgatcagcctggttcacaaagctcacaagtgcttctagtctctccattgcagtatccatttggggaatgtgagttccttcaactagttgtcctggtcctacagagtcagcgagcatttgctgaagtttttccataccttgtgaaagagcatcttctgcttgctggcatgatttttcaaggccataagcatcaaaccgttgttgctctgtcaaaggttcacttagagggaccagaacctttagaagttcagaggggcgaaatcctccaatccacaagaaaaatcgttcagctgttgtcttccacataccagacataacatagaaaacatctgcttttgctgcagcagatttcatgctaaagagtttggtgtagtggttcattatgccctgtacaagtgtcccgagctgtatgtcacctatatgagaacttaaagcagttctcagttctaaaatttgtctattttgctcctccagccagtttccatactccatagagccagcaaaacccaaattattagaacccaatccgtcgccaatatacaatccctgcagttttgttgcctgttgttttgcatgatctacctcttgctctagctgcacgagcttcaaacgacatgattctaactgctgcacgtatgcctttttcctcaaacgactcttgcgagcggcctctcgattttgtgcaagacgtctttgtgtcttatcagtaagcctgttggcatcttggtcgtacttcacagatgttccaaatattccatgagaagcatcctctgattgcacatgaacctgattatctaacttcatctccacctccccaattatggatgtggatacagttaaattattagtatcattacttttgaaagtttcttcccacatgctaatttggtggataggatcatatacacccattcttcttgaggaaacaaactgtgaggatgtagcatccat

SEQ ID NO: 100815 - DNA, 944 bp, Glycine max
  Clone ID: PAT_MRT3847_62049C.1
gaaaattgtgcaaggaaataagggagagagacagagatgataagtatcagcacaattgccatcaagcttttgatgctactatcttttggcaacatttggatttcacgggattttgattttttttacttcgtacaacagtggccaggttcattctgtgacacaaaaaaaagttgctgctttcctctaacagggaaaccagtatcaaacttcagcattcatggattgtggcctaatttcagcaatggatcatttccatccaattgcaatattgctgaaaatccatttaaccaatctaagatcactgacctgattccaagagctgaaaaaggctgggcatcactctcttgtgcaggcagcaaaaagacagagaacaacaaaacaagcagtgataatacaaggttctggaaacatgaatgggacaaacatggcacttgctctgacttaatccttgatcaacatgcatattttgaagctactttgaacctcaaggaccgtgtagacctccttcaaatccttcaatataatggaatcaaaccagatggaaacctttacagcattgtcaacataacaaaagcaataacacaagcaattgggttagaacctggcataacatgcaacactgatccatctggtaatcgccagcttaatgagatatatctttgtgccgataaatatgcctccagcttcattgaatgtccaatactaccaagtagaaaaagttgtacagacatggtggagtttcccatcttctagttgtgtgtgttgcactttacaatatcatcgtgatgtagcaaattaaatcaccccaacttagcaatttgaacattatttgctttgttatcaaatattgtaatatattggtaatattacaactgaatgttgcccaataatgagtaatgtattcaaattttcatcaatggcaataaagggtttgtttgtgctat

SEQ ID NO: 100816 - DNA, 260 bp, Glycine max
  Clone ID: PAT_MRT3847_6204C.1
caaagaagtaccatgatggttttttacgcctggttcttcatggatccagcggggcgcaggttatgctgtttgacacaagcaggaaactcttagatagtagattccttaagaaagatgatgtaattaaatctggtgaatcaattgcatttgattcatatttgattgacattggcaagcagcaaggaagttgtaccccagattccaatgttctagcagacaagtgtactgatgttaaggcaatgaagatggtcagacagaag

SEQ ID NO: 100817 - DNA, 452 bp, Glycine max
  Clone ID: PAT_MRT3847_62050C.1
aaaaccaagggggggcatattttattaagtttctaaaaaagggctcaactcaatacacccagttggtcaaccccagctttaaaattctctcaggacctttttaaaaacggctactttaaaattgttaaaatgaccaaaacgggaaatgagtttttttccttcccagccccccacattctttgttacaaaaactaaaacaactcaggttaaatgcttcggctgcatcaaaactttttaccgaaggagggattgtcatacaaacccagcccctaaatggggaaaaccccgaggcaaaccccccgaagaagggacatacttgaccctttcatttagcccaaccacaaaaatccgagagagggactttggcctcattatgccatcaacatcaacatcaccatcaccagcctttttgggatcaacagggactgaaaccaccatagaagacttgttac

SEQ ID NO: 100818 - DNA, 375 bp, Glycine max
  unsure (1)..(375): unsure at all n locations
  Clone ID: PAT_MRT3847_62051C.1
tctcgaggacgntcacacctccccantccatatgttttgtccggcgcgaggtgctggacgcttactcagggtatcgacccttgnngagtanagtncgaaactcctggtntgctgntccntnaanctgnatttcccaaaagatnattaacnccccctacatactncataantcnatcnaccaangcaaaaacaaangggctggncatcaacctttccttcnnnatttaaacantctttancactnaaaggnctatttctcccaatcccccnctcgtttnatttccacgtgaaatatacaattgtacccccccttttcnggaantngggtcttccatcccaggatgattacatggtgtttactcgacaaccttgcnn

SEQ ID NO: 100819 - DNA, 178 bp, Glycine max
  unsure (1)..(178): unsure at all n locations
  Clone ID: PAT_MRT3847_62052C.1
gttgcaggnaanatggnttcgctgaaactgcagaagcggctcgcagccagcgtnctcaagtgtggcagaggnaacgtntggnttgacnccantgaagtcaacgaaatctcgatggntaattctcgccannacnttaggaagctggttaaggatgggtttantatcaggaacccaccag

SEQ ID NO: 100820 - DNA, 525 bp, Glycine max
  Clone ID: PAT_MRT3847_62053C.1
atactgttcatcgtctagctatctcgatcgaactgtccaaggtcctgtcactcgcgggcacacaaaccggcactgagacttgaaacccacacatatagaaagacgggtgatgggtgaggtagacagacagccatgcctttaaggagcaccattgtacaggcgcgtgagggccatgttgttagaaggctaaagcactggtcataagccgccagccccagctgaggtgactgaatggcgatctgaccaacatccatagtagtggaacaccagatgtgccggccaaggtaccacccatgggccaccggggccagcaaaggggttttaccacgtggactcgtaattagtaggccgaaggcgcgaggggccccgtaagcaggtgaggcagttgtatttagtccattggccgttgtagcgattttggcaacaagagcggcaaaatagcaccaaaaggctgaagtagtggaacacttgtgctcattagaggtctaggagagggtgtatggtgttgttcagtaagcaacaatg

SEQ ID NO: 100821 - DNA, 711 bp, Glycine max
  unsure (1)..(711): unsure at all n locations
  Clone ID: PAT_MRT3847_62054C.1
tttctctctctcactcaccggtctttctaaaaactctaataagaaccattgtagccaagcagagcggtgaattggtgttcccaaaatgggttggttaaacctaaacacactcttggttgaaagcccttaaatttttcatctttcttcctctccatcgcctccacaaggttttctggccttgaatctttggtgggaatgttggcttttcttggaaggagcttcctgtcataatgggctgaatgccctttggaatttaacggttcgaacttcaaactggcattcttctctatgctccaaccttggtgaccggggaaaatggttgccgcttcctcaatataaaggttgcaatttctgttgctcgttttgctaatgcaacaggcaacctaggggtcccttaaaatgcgtctgacacgtgcctccaaacctttttcaaaccttgcaacttaatggagttgcacaaaatgcaacagctttctgtggttttgggacaaaaattcctgttaattatgaatgcagggggagaactagtgttgcccaaatgctgcaatcccncagatttacngaggtcacanaaaattgcaaagcaccacttggaaaggaaagtaaatgtaagaaatgcttaaatgcncgctttggnntatctgcatcatattggaattngagaatatatatcactaagtacatggccgtgatgcccacttttgctgcact

SEQ ID NO: 100822 - DNA, 1046 bp, Glycine max
  Clone ID: PAT_MRT3847_62055C.1
ggtccggattcccgggtcgaccacgcgtccgccattttaccctcgctctgcatctccacccccaaatttctttttggtcgcgacctcgtcgaaactccgaaagcagaaccaacacacacatcctctctgatcagtgcacctggtttctgttcttgagccatggctcctactacctcccagcgagccacgctagccaggctctgcagctccaaggactggtccaaggccattcgagtcctcgattcgctcgtttctcagtctggtgcaatccaagacatctgtaacagggccttctgttacagccgattggagctgcacaagcacgtaattaaggattgcaacaaagcgcttcagcttgacccctcgcgacttcaagcctacattctcaaaggtcacgccctttctgcattgggaaggaaaacagatgctctgttagtatgggagcaaggttatgaacacgcccagcatcagtctgcagatttgaagctgttgctagaactggaagagcttttgacgacaacaaaacaaggcaacagtgcattgtatgaaacaaatgggtcgcccgtttcacaatccgaatcagattctccgagtgatgggaacttgactgaaatttgtgagaatcaagataggttgagtgttcaagatgaattatgtgacaacgcaagtgataaatcattgatcttgctgaagtctgctgataattttgacttgcgaaatgaattaaatattgaagatagggagtctaataaatctgacagccaagtgaatggaagccctgacgttattgataaactgagttataattctgaatcatgtaatgactcaagtgacacttcagaatcatgtgataaagataaagtatttaccaatagtggggagtctagtagtgactcacttgatgttgctgaaattcttagaaagctaagtagtaagtttaattttccccatgaaaaaaattggtgaagcaaggaaaaataagttttgtgttgctccgatttcaaagactaagtcttaaagtgtagatttttcgctctcacggggaa

SEQ ID NO: 100823 - DNA, 679 bp, Glycine max
  Clone ID: PAT_MRT3847_62056C.1
cccacgcgtccgcagtaatctcctatggttaggatgcctgtgaagatcccaacaattcaaatcaaaatctttgcgaaagctcgtggaaaccagtgggagtgagtagcagttcagaaaatactcaaaatagagtcagaggtatcagagaacagataatggataatatataagatgatcagaagaggaaaagtcaagaaagatatggatctataacatcaactatttcagaggaaaaaggagacaccacagaaaacgaagagtggagcacttaacgaaatgcttttgagaatttgaaacctgctcctgatattttcttagctgcatcaagaatattgaatgtgcccccaatgaggatgcagtgaaaccgaataaacaaccagttattgtttctgtaccaatatgccattatgatgataccgaatcagccaaagtatcaagacaacagcttaaagaagcaatttatgcttccttgtttgacattaatgtccctgttgtttgtgctatcaaccaggtggtcattagagtggcggaaaatggggaaaacactttgatctggcttgacagtggatggatgggtgtctaactgtgtattaaaggagaagtatccaaggttgttccaaatcgcagaaaataaattagcacagattgctgaagtggttctcatggtaaatggagggag

SEQ ID NO: 100824 - DNA, 874 bp, Glycine max
  Clone ID: PAT_MRT3847_62057C.1
acggctgcgagaagacgacagaagggggcttgaagggaattgtgagagcgtgtgccttttgcattctctctctaaatccacgtttggagtgtttctctctcactcctctctgcaagatccgcaccccaaaccctagcaaacccctaccgcagagggagccgagaagaacaacaacaacacgcaccttcacaaccaccaccctcgcttcttccgatccagttcgactagcttttggaaacaattataatgacaacttcagagcagcaagtccctcccaaaactcctgcagctgatattgttggcaatgcttttgttgatcaatactaccatatgttgcatgaaagccctgagctggtgcataggttttaccaagatgtcagcaaacttggccgtcctgagcagaatggcataatgggtattacaaccacaatgcttgatattaacaagaaaatactatcattgggttatggggaactcagtgcagagatcgtatcagtggatgcacaagaatcttatgacgggggagtcattgtcttggtcactgggtttatgataggaaaggatgacattaagcagaaatttactcaatgttttttccttgctcctcaagagaaaggctactttgttttgaatgatgtttttagatatgttgatgaaaatggaatccaagggtctgctcatgatattggatctcctgcccctccggacactgtttccaatccttctgtgctggagacacaagtttccgagcaaatatctgtgacagctgaggatggtgatgaagaggtagtctacaatccagaaaatggtcaagctgcaattgaagaagaggaagcacctgtacctgaggttcttgatgaaattcctgatgatt

SEQ ID NO: 100825 - DNA, 1048 bp, Glycine max
  Clone ID: PAT_MRT3847_62058C.1
gctgcacctccaccatctagcatatcagagacaaatggttctgttataaatactaatgaagttggaaacattcaagaagctgaagccgagggctattctatttatgtgaaaggtctgccaccaactgctacgcctgcagtcttggagaatgagtttaagaagtttggacctattaagagtggtggcatccaagttaggagccaaaagggattttcctatggctttgtggagtttgaagtggcaagtgctgcgcaaagtgcacttgaggcttctccaatttcgatcaatggccgtctcgtcgttgtagaagagaagagatcaactaatcgaggtagaggacgtttctcatctggcagggctcctagcttcaggggtgaaggtgcaagagggcgtggaaattatggaaatggccgaagctatggccgtggtggtgactttaatggcaggggagaatatggttataggaatggcaatcggggagggttttctagccgtggaggtgatgggtatcagagaaatgatcatatgggtaccggcggtggccgcatgaatcgagcaggtgggtcggctgttaatccagcagtcaagactgccggtgtttgagttcctgcctctgcttgaggaactagcttaaggagtctggctgaactctgattgaaagtgtatttcaatttgctgtgaatcaagcagttggagaattaaggggcgagcctttttttggaagagctactctcaagtttcataaggtctttttttaaaaatcattttttgatattggtggtcttgtttaaggtagttttacaatttctgttcattataatgtcttagtggtagtttttgtgtttccccatttttttatgaatataaatatatatatttggggatacctcatttattttttgggtactttgactagttaatagttgcgacatgagaggttgttatcagcatgaatttgcggaaatgattttgtaaaatctagagttagtgttaaatctggttttaaaaaagagggggggggggggggggggggggggggggggggggg

SEQ ID NO: 100826 - DNA, 2025 bp, Glycine max
  Clone ID: PAT_MRT3847_62059C.1
cccacgcgtccgtacggctgcgagaagacgacagaaggggaaggaattgtgagagcgtgtgctttttgcgttctctctctaaatccaacgtttggagtgtttctctctcactcctctctgcaagatccgcaccccaaaccctagcaaacccctaccacagagggagctgtgaagaacaacaacacgcaccgtcaccaccaccctcgctcgctccttctgatccagttggactagcttttggaaacaattacaatggcaacttcagagcagcaagtccctccccaaactcctgcagctgatattgttggcaatgcttttgtggatcaatactaccatatgttgcatgaaagccctgagcttgtgcataggttttaccaagatgtcagtaagcttggccgtcctgagcagaatggcataatgggtattacaaccacaatgtttgatattaacaagaagatactatcattgggttatggcgaactcagtgcagagattgtatctgtggatgcacaagaatcttatggtgggggagtcattgtcttggtcactgggtttatgataggaaaggacgacattaagcagaaatttactcaatgtttcttccttgctcctcaagagaaaggctactttgttttgaatgacgttttcagatatgttgatgaaaatggaatccaagggtctgctcatgatattggaactcctgcccctcctgacactgttgccgatccttctgtgctggagacacaagtttccgagcaaatatctgtgacagctgaggatggtggagaggaggtctacaacccagaaaatggtcaagctgcaattgaagaagaggaagcacctgtacctgaggttcttgatgaaattcctgatgattctcagatggtagctggattggcatctcaaattgaagaagttccaaagaagtcttatgcttatattgtgaaggtcatgaaagagggtgctgcgccctcttccactgtgacacctgtttctgtgaaatctgcccacaagagccaagaacagcagggtattgctgcacctccaccatctagcatatcagagacaaatggttctattataaacactaatgaagttggaaacaatcaagaaactgaagccgagggctattctatttatgtgaaaggtctgccaccaactgctacgcctgccgtcttggagaatgagtttaagaagtttggacctattaagagtggtggtatccaagttaggagccaaaagggattttcctttggctttgcggagtttgaagtggcaagtgctgtgcaaagtgcacttgaggcttctccaattttgattaatggccgccaagttgttgttgaggaaaagagatcaactaatcgaggtagaggacgtttctcatctggcagggctcctagcttcaggggtgaaggtgcaagagggcgtggaaattacggaaatggccgaagctatggccgtggtgactttaatggcaggggagaatatggttataggaatggcaatcggggagggttttcaagaggtgatgggtatcagagaaatgatcatatgggtaccggcggtggtcgcatgaatcgagcaggtgggtcggctgttaatccagcagtcaaaaccgcgggggttcgagttcctgcctctgcttgaggaactagctcaaggagtttggctggctgattgaaagtatatttcaatttgctgtgaatcaagcagttggagaattaaggggcgagccttttcttttttttggaagagctactttaagtttcataaggtccttttttttttttaattattttttgatattggtggtcttgctaaaggtagttttacaatttctgttcattataatgtcttagcggtagtttctgtgcttcccccctttttatgaatataaatatatatttggggtacctcatttaattttttgggtacttgactagttgatagttgcgacatgactcatgagaggttgttatcagcatgaatttgcagaaaaaaaaaaaaaaaaaaaaaaaccccaaa

SEQ ID NO: 100827 - DNA, 330 bp, Glycine max
  Clone ID: PAT_MRT3847_6205C.1
gctcactagcctactgccggcctgccgtccttttttttttggatcgaactcaaattgccctggccatggtccatgaggaacagttgctgattttttaacagttaagcacgcaaaccactggaccggaaagtcaaagaagctcaccctcttgcacttttacccttgctcaataccacaccttaaaatcaggggggcagtttggccactgactttgaccggggtgcattttccactagggaaccttcaaatgtgttgaaggaataacctgactcatttccatattccacaaatggcaaaattcgaagcttcgccttgccaagagttgctaaa

SEQ ID NO: 100828 - DNA, 1390 bp, Glycine max
  Clone ID: PAT_MRT3847_62060C.1
ggaccgacccgtcctctcatccgtaggtatgtgcctttcctttcaaccattaaaactcctcatcattcttttaatttccacaattcatgattctggtggctttgtttgagttagacacccaataaaatcaagtaatcttttaggttgccatgtggtggaatctgtaattcgggtaatgcccctgtcgagatttgctgccggtgcattcagtgtggtcacaatttgtttagtagccatattgcttcttctgggcttcgtgtgcattgcatactcatattactttcggtcacgcatccatcatgatcagttcagctattttagtggtccctggatcatcagaatcgcgttcatactgattgcaatctggtggggtcttggtgagattattcggttaagtctgctaaggcgcggccttcacttgcagtggcaatggcaggaggaaagtatatgcaaatggtacattgtatcaaatctggggtttgcagaaccgtgtctcttcctcacaattgtctttctcctccgtgcacccttacacttacagactggcggcattatcaatacaaaatggaatgtgaagacggccggatacattctgctttactgcttcccactttttgttcttcaactgtttgttatttttgttggaggagagttcaagtcatcatcatcatcgtcatgtacttaccctttactaagcactcttctccttggcctttttgcccttattctgacctcgtacctcttctggcttggaagccggattttgaaattagttattaataagggtttgcagaagagggtatacacattggtactctcagtctcaggcttccttccattaagggttgttttccttggtttgtccgtattatctggacctgaggattttatgtttgaggcctttgctttcttggctttccttgcccttgcgtcttgtgctggggtgtgcatgtgcatgcttgtgtaccgtccacttgcagattgtttagcgctcgatattaatgataccacgtctcttataaaaggagatagggatgccacgtttcttcaactaagcctcttctctcccactccaaactgatttctttcttttctggtaaagtaaatcacaaagccttttattcttcttttcacactcctaattctaggcataactctttttctttgcaatttgtagccagtcctttcctgtaccatctccacactttttcttttaccggtttctatttgaaatcattgaatacattttgcttaattacacttttcttttattattgtcatttcttaactttagtttcttcatttattttgcaaatttggttttgtattattttaattatgtaattttgatttattcgttaacatttaaaatttagtcaaaaaaaaaaaa

SEQ ID NO: 100829 - DNA, 723 bp, Glycine max
  Clone ID: PAT_MRT3847_62061C.1
ctcaggatgaaggaatgaggtaataaaattttaatgattgaaatccggagtctagttcgtcggattttttgttgcggactgaaaattctggaagcattaacctcgtacagaaaaatacattcgacaatcaaagaaatgtccattctctaagatacaacctactactgtccaaagcattcaaataaaagctagtccttggataaagttaaatctccatgaaaggccacaagcataactccataagcagttggcactacctaattatcatcatatcagctagtcaccacataggtaaaaggggtgatgtgataactaacttagtaatcatgaaaatcagaaacagctactacaattccccagttcttgaacaatgccttccatggatggcctctcaaaaggagactcatgggagcaaagcaaagctatctttgccagtttagctgcttcatattcgaagtatcttccatggagatttgggtccataaattcttggaacttggaggactctgcagcaagtcttattgagctagtaatctcgtgcttccctgaaaggatctggaaaagcatcaccccaaaagcataaacatcgcttgtctcagaaaagcggccagttgtggcgtattcaggcgccaagtaaccctttgctgcacttcccttgagtgcagagaagacaatatcgttagtgagaagcttgtacaggccagaatctgctagcaatggatt

SEQ ID NO: 100830 - DNA, 386 bp, Glycine max
  Clone ID: PAT_MRT3847_62062C.1
gatcccaaaaccaaagataaactttattttggccttgcggctttcttatgtatccttaactacttagttgaacgcataattacaacctaatgaggactttccctcgtgtgagtattgaaaacccaataacaaaatgaaaagaactcaatactatctgctcaggctgtaaaacctactttatatacacttaacatctactgttccgttgcttaatcatcaaaaatacccatcaacgctccttttgaccaaagaataaaggaaaggcggctccccctctgcgtggccttccaactgcatgacggactgcacctttatcattcctagctgaaaccattttcgaaaggtattaaccacctctttccttatttacaaagctactataattc

SEQ ID NO: 100831 - DNA, 212 bp, Glycine max
  Clone ID: PAT_MRT3847_62063C.1
tccttttttatttttatacacatagaaaagaatccttttcaaatattttagtttggctttcctcaacacttacagaagcttttgtccaagtatgtacatcagattaattctgatttgagagaaatttcagattctcgtttgtttggggtattcgtatttcttatgtgatgatgttaacaaaaaaaaaaaaaaaaaaaaaaaaaaaaaaaaaa

SEQ ID NO: 100832 - DNA, 331 bp, Glycine max
  unsure (1)..(331): unsure at all n locations
  Clone ID: PAT_MRT3847_62064C.1
ctaagagaccgcctggcgcttagatgacattttcctgcatgcgactgcatggaccagcattcgttgctgcgaccgaacacgttctctgatagacagtccatcgggacggaatggcataggcaccaggacagaaaggactaccaggagccggcgccagcgccactgattgaccagacggagttgacgtcaaggtcctttcacagagcatgactagctaattttgtaaccaacttttctgttgtatccatcactaccttaaccggcatgggaggcgncggggctaaggctaaggagggcaccgtttggattaaaagcttcggtagagccttcg

SEQ ID NO: 100833 - DNA, 292 bp, Glycine max
  Clone ID: PAT_MRT3847_62065C.1
aatcttaaaaatgaacattatattagatgagaagaggagttctttcctacaaataaatatgctccctgttattacctaaaaagaaaacacgggtatcgtatgactgacaaacaaaaaatgggttctcggaactcacatttattgggccgggggatttttaatggaagctggaacaattgcagggaaaaacatttgacggacttcttctgccttaaatattggcaagaagattccccatgccctaaaaattaattggtcctccattcacatctctttaggggaaggaaaaggg

SEQ ID NO: 100834 - DNA, 252 bp, Glycine max
  Clone ID: PAT_MRT3847_62066C.1
ttcttattcatttctcttataagtgcttctaaaaaatttacccaaacaagcccctagtatagttgagttctgtgcaaataattgagtgaatttgaatattaaacacaacaaagagagagaaataagataaattaatatattttagagtctgaattgagatatgcttattaagggttgcatcaaaattttctcttgtctaccatttctgtgtctttctagacgataacagacagcaaatctatttcactattt

SEQ ID NO: 100835 - DNA, 183 bp, Glycine max
  unsure (1)..(183): unsure at all n locations
  Clone ID: PAT_MRT3847_62067C.1
gtggtgtagtgcaaaaaaaaggttgaggttttccatttttactttgtatgggggccattttggagaattttgttccgaaacttaggttttgtgggnggaccggaggggggaatggcgttggggtattattaggggggggagtggagaagggaggggtgtcagttgtgagaggtgagaactcct

SEQ ID NO: 100836 - DNA, 244 bp, Glycine max
  Clone ID: PAT_MRT3847_62068C.1
ttatgttgtttggcagaacacgcatactccaaacctatatatgataatttttttctttatcatcatatatgtttatgcattattatattgaattaccatatagtggttcaagagttttgtgtttaattactgaataaatatcgcacttaactaattagccggatatctctttactgttggctgagtttctcaatgtgtaccaccttgattttatttgtggagcttgtaaggctttcttcatgaa

SEQ ID NO: 100837 - DNA, 387 bp, Glycine max
  Clone ID: PAT_MRT3847_62069C.1
tcgtcccaactggctggctcgcaagctaaagaggtggctgttctgctctctctcatcggtgcccgcccgaatgctgtcggaccgggtctggcaatgaacgctattgaccatgcaggccggagaaaagagggcctatctaactaatggggggagatagcatgtatgatcatcggaggcttgatatggatgaaccaaatatatgaaagtggattggatggatggctgagaatggtatgggaggccctgcccattgctctacttctccccagggaagggacctgtgccttggacagtgaactcagaagtataccctgccgaataccgaggaatatgagcaggcaagtctgcaactgcgaatagagaccaaaatctcattgtgggacaggc

SEQ ID NO: 100838 - DNA, 407 bp, Glycine max
  Clone ID: PAT_MRT3847_6206C.1
ggtctttcaagaaaaggagattcacagggcagtcaacatgattaacttgaggccaatgaggcgtatcctgagcagctgcatgcttgaaaatggtgggaacaaagcaacaacaaccactgaaagggattgaagaaacatctgtgaaatgcactgggaacttaggactgatggcatgcttgattataaaagggagagctacccactctcatgggagggattgaacacaattatagagtcaactgtttcacagtcgcctgaaaattttatcgaggccacatcaacttttggagaagagaaaatgattctgtcgctggcacacatgctatgagccccgagagcaaaggcttatacttaagggtaaagagagagaggatgactaatatctacatacggatggcgatagagac

SEQ ID NO: 100839 - DNA, 178 bp, Glycine max
  Clone ID: PAT_MRT3847_62070C.1
aaaaaaaggggtggccggtctataggttcaagtaaactaactcctgtgtgcgacgtataaatcttatatattggaaaaaacctcaattaactgacctttgttgcccagcttcaaaactgggaaaagccagaagtcttcaaatttaaaagttttgcaccatatgccctttccaacattt

SEQ ID NO: 100840 - DNA, 560 bp, Glycine max
  Clone ID: PAT_MRT3847_62071C.1
aggaacggcaaaacaggcaaactttactaatttcagaaaggggaaaggggcccccggccacccattgaaaaaaaacaagggggagctaaaataaagggaccctatttcccataaacgggatcccgaacaaggacaaacccttaaaaaagggcgaactttcaaaacccttaattacccccttatcaggggggctgacaggggaaaaaaacaagaaacccttacatacaagctgacaaaagagccccatggttcacctttcaaggccctaaaacattgggagcccaagggttatggaattcactatcatcggggggaaaaaatggaaccaccaaggggggggggggctatggccccaagcaaaagccctaagctctttccttcccatttcttttgggggaaaaagaataaaaaaaccgctttaaaggaggaatttgtattttaatgggacaggaattttaaaattgcaagggctcacggggcgactatagttttttcttacgggggggattttggacctaccattattactaaattttttgaaaaagatagacaagggcccc

SEQ ID NO: 100841 - DNA, 400 bp, Glycine max
  Clone ID: PAT_MRT3847_62072C.1
gtacagtagtggctataaaaatggggaatgccctacctttgagtgcggatggaactgttgatttacggaattggaagccaccgactgcgtttaccgcgaaacctagagataaatcactgatccgggcggagcacctttactgggtagacctaaggacagaactttggagtgacggatgagctcgatagattgcattcatttctgatctaaaatgagggagtctagggatacactgatctggatatgacaaacccgtaggggcgcctacaggacgggaagcaccctttgattgcagagaaatagacgcgggggcggtctactcacattgaataacttggttagaggctaattgaaagcatagccgtggggaaattgacgactttctgcagcataaatggag

SEQ ID NO: 100842 - DNA, 364 bp, Glycine max
  unsure (1)..(364): unsure at all n locations
  Clone ID: PAT_MRT3847_62073C.1
tnnnaaaaaaaaatttttttttttttttttaggaaatgaatagactaattgtaagggaaaccagaaataatgatcattttttatatatgactccttaacattctcaaaaacaaaaaggggacaaaaaccggttccccaaattaaaaaagacccaaccccataaacataagggtccccacggcccccctttaaaaaacccaaaaccattttcctaaaaaacaaaatccaaacctacccccataaaaaaaaaaaattttaaggccaatctcccataaaaccaaaaaaaaaccctaaaaaccgacccccacaaaccccaatattccccacaaaacaaaaaaatgaacctcaattttaaacaattaaa

SEQ ID NO: 100843 - DNA, 365 bp, Glycine max
  Clone ID: PAT_MRT3847_62074C.1
ctgttataagatttgggggatagagatactattgaataaagggtcgctgttgttctttaccaatagttattcagactatccagagatagtgagcctgctagcaccaactgtgctgcatgagagagtcaacaacgtagttactgacctgtcactggggctctaatatccacagctgcactgtaatgtgccgtagaagatcagccagttttggatgatgatgtggacttgatgccatgctaaggggaacgtcttcatcggaattcgggtacgctcacggtgatgacgatatggttagagcaggcacacatgtgttttccaatgcggcaggcctacattcaagtactacccactgggtcctatgaact

SEQ ID NO: 100844 - DNA, 220 bp, Glycine max
  Clone ID: PAT_MRT3847_62075C.1
ggggcggatcaaaaccacaagggcttaatcttaatggatccttgcatcaaagccacttttccacttacaataccccgtgtggtttttaaatcttctccaaagggttctacccccccgtctattggaattttgcttcaaggcgtcttaattggcttatcccacttacgatgggtaccaactgcgacttcctttagggggcctccctcattatttttctata

SEQ ID NO: 100845 - DNA, 3130 bp, Glycine max
  unsure (1)..(3130): unsure at all n locations
  Clone ID: PAT_MRT3847_62076C.1
aacgattttcaaccacgcttcccactccaatttctctgaattttctttcgcttcttattcccaaactctgtgatttagcacgaaatttcatcttcagcttgaagattagataacgtgtgggatggatttggtgaaaatgatgatcatagagtgccccatgctagtgacaaacataataatcaatttgtaatacaaggagagagtggnaagaaaacacgtcttgaattacatggtatcagaaatagtgattatgtgaatagctacggtactcagggtaaagaggaattgtacttagaaaatatgattcaaaaagaaagaatgctggaaaaggattcatggtctcacacacctgaaggtgtgttttcttcatgtggtagtgactcaagcaaagaagccaaaaggctaacatcagatgacacgggcatgcccgatcactgcttcaagagcagtaatttagattctggtggttgtgagctctgtgaagatgatattatcttgggagacaagtgtgtggtggaaaatgatagtgtctgtcaatatccaaccagtcacatatcccaagttgacaatgaactcagttntcttgataatgatgggtggctggatataggagactttgaagatgttgacaggatgttaagttgtgatttaacatttggagcgggaagtctcaataacgaagaggagttttgctggctctcatcttctcatggtgctgaaggttctgatgatgcatttaagtctgacttcaagttttcatatgcagaaatgtgccactcgaaaaatttatcattttataatatggattccacggaaagtattgtaggtcttccaatcaatgattccaagaaaagatcatctcctgttgatgaaaaaatcaggtctcaaatggatgttattgatgattgtgtccctgctccattatcaatgttcagtgagagtgattcagacatgaaatccgttaatatagatgacttgctgcccaaagaaaagctgcagaggaagctaccaaagccatcagtgggaaggcgaaaaaacggttacctacaaaatggtggttctgttcatccttatgctgctccagagcaatatgcagatacaaagcaatcctttggatcctcttccagtggggttacttctcttgatagcatccagaaacataagctgaacatagattctgattctttagtctgtatacagacacaaattcctatgacacgcccagactatagtcatgctccaaatcacactcccctctttccgactttgtctggatcaagatctgagcatgatggacatctgtctcctcttaaagaatcatcttatgcatcaaacatggagagttctaatggtcattctttggagcctgcggccttgaaaacaaatgagaatagagaaaagttgtatcattgctgtgatggaaccctgttaagtagtaatttcaaaaatgaaaatatgccaaatcaaatgccatttcacagtctgggctcagctcagcaagtaggtcatcagtttgaaaatgaaaatgaaggtcatagtgaagttcaaggagttggcctaggcttttcaccagaaatagattcatcaacagtgcaggaaagctcatccatgggcgaaaaaatcaggtctcaattggatgttattgacaatggtgtccctgctccattatcaatgttcagtgagagtgattcagacatgaaatctgttaatatagatgacttgctgcccaaagaaaagctgcagaggaagttgccaaagccatcagcgggaaggcgaaaaaatggttacctacaaaatggtggttctgtgcatccttatgctgatccagagcaatgtgcagatacaaagcaatcctttggagcctcttccagtggggttacttctcttgatagcatccagaaacataagttgaacatagattctgattctttaggctgtatacagacacaaattcctatgacacgccctgactatagtcatgctcgaatcaacacttccctctttccgacattgtctggatacaggtctgtcagggatatacaactgtcgtgttctcttaaagaatcatcttatgcatcaaacatggagagttcccatggtcattctttggaggctgcggccttgaaaacaaaagagaatagagaaaagttgtataattgctgtgatggacccctaaatagtagtttcaaaaatgaaaatacaccaaatcaaatgccattttgcagtccgggttcagctcagcaagtaggtcatcattttgaaaatgaaaatgaaggtcatagtgaattccgaggagttggcctaggcttttcaccagaaatagattcatcaacagtgcaggaaagctcatccatgggctctgctctggaccaagcttcacttgaagcaactagcttttgccacctgcaacagatcatggatcagttggatattaaaaccaaaatgtgcataagggacagtctataccgcttggctaagagtgctgagcatagacacaataattcaaatgcaaatggttgcattggaggcgatgaaacatgcaaagcaatgatggcgcaggatgcaaacaggtgtgccggattaatggatatggaaactgacacaaaccccattgatcggtctgtagcacacttactgtttcacaggccctcagatccatcagtgttgcttcctaacgaaactttacctttcaaatccagtgccacgatgcatcatggatcagtgatcaatccaccagtgaagactgagaaacaggtctgtcaggaagattctactggagtggaaaaaaaggttttacggggtaacacctaatgaaagtgaaaccagcgttggcgcatttcgttgtacaatttatacttttccggtcattgtcgtatatgatgatgtataattatttcgggctaactcggatccctttgttaatttctgaagcatttttgcataggatgccataatactaatgtaactttgtgctaatcaaatcatcaaaaggtagcatacgatgatttagtgtaatgctacgctcgcaactattttcacccgaaagatcacaattatcctgcgcaacacatgatcactcatccaattaatttgaaactagcgtcacttgattgtaccatttattttctgg

SEQ ID NO: 100846 - DNA, 599 bp, Glycine max
  Clone ID: PAT_MRT3847_62077C.1
ttcttttatttaagctctctaaaacatatgtttatttccttgtctacatctctaagaaaaactcaaccttggctagtgtttcttcagttttaactccctttacaaggctagatgggaacgtggcaatcatcactgatggtgcgagtggcctaggtgcaaccactgcgagactcttctctaacttggagcatatcttgccttacctgatattcaagacaactagggtctctctgaagccaaaacactacaatccgctccctatgtgccattgcgatgggacacacgaatacgactttgactgctgctggaccaccacggtttccactgctggcacattagatgtcctgttcatctatgcaggagtgtgtcctgaaacctactcggacttcttgcactgccacaagtctgactttgacagactcataagtgtgcacttgatgggcccttttctgggaacaatacatgctgcaagggtcatgattcctgctatagagggatgccttacctacccgggtgacgtcgctagatgcatacgagcaggtgctcctcatgcctactcgagctaactgcacccactagttggactgacaaacaacact

SEQ ID NO: 100847 - DNA, 761 bp, Glycine max
  unsure (1)..(761): unsure at all n locations
  Clone ID: PAT_MRT3847_62078C.1
cgaaatcaaaccaacgcttcccactccaatttctctgaattttctttcgcttcttattcccaaactctgtgatttagcacgaaatttcatcttcaggtttgatgccatatgtttatcagtttgttacactatgtgatgctaggttattcaagttattttcttattatgtgtctttgtgttacagcttgaagattagataacttgtgggatggatttggtgaaaatgatgatcatagagtgccccatgctagtgacaaacataataatcaatttgtaatacaaggagatagctgtaagaaaacacgtcttgaattacatggtatcagaaatagtgattatgtgaatagctacggtactcagggtaaagaggaattgtacttagaaaatatgattcaaaaagaaagaatgctggaaaaggattcatggtctcacacacctgaaggtgtgttttcttcatgtggtagtgactcaagcaaagaagccaaaaggctaacatcagatgacacgggcatgcccgatcactgcttcaagagcagtaatttagattctggtggttgtgagctctgtgaagatgatattatcttgggagacaagtgtgtggtggaaaatgatagtgtctgtcaatatccaaccagtcacatatcccaagttgacaatgaactcagttttcttgataatgatnggtggctggatataggagactttgaagatgttgacaggatgttaagttgtgatttaacatttggagcgggaagtctcat

SEQ ID NO: 100848 - DNA, 1254 bp, Glycine max
  Clone ID: PAT_MRT3847_62079C.1
gatcaggaatgctcaaaagaggttggtgtggctgcagttctgtgtgcatcaacagagaaacagggtgataaagttgcagtttcttttaccaaggatgacaaggaggcaatacaagagaaccatgacaagccgtcggcaaaagtatcaggtgatgatttatctgcaaatgaaggctccaattctttacctgattcttgcaccaagttgcatgaaactggaagcagtcctgccaatcagtctgataatacttgtggtgtcaatgttacatttggaagccaacctgaaactgaaaaggatgtgaatcaagttaaggcttctgctaatcggaaccctccagtttctgagtgcataaataaggatgcattgaacacatctactgatcgtgatcctaaggggaatgatgcatctaaagatgagaaaagctcagctcctgtggtcaatcttgtgccaaatttgtccaaaaaagatgtttcagaaaagaccaccaaaagatcaaatttgggaaagaggcaacgagctgcagccaaaaaagctccaatggttgtagaggaacctccactgccttctgcactaggtactcccaaaactaaagttccaggaaatatctcccttgggagtcgacaaatatctgatggtgttatagcacatagtgtttctcaaggtacacctgaacgcaaaactaggcgagcctctaataagacagctggaaaggaaacttctcgaaaaggaaataaaggaaaaacaccaggaagacagtctgaaagaggggatagatcaactagtgtgtctgtgagcccatcacctggtttccaggtccaatcgaatgagatgcagcagtttgggcactttgattgcatcagtacaaagccatttgctattttaagtgcttcaacatctagccttccagatttgaactcttctgcttctccacctgttctgtttcaacagccttttggcgcgatgcagcaagtacaattgcgtgcacagatctttgtctatggggctttgattcaaggcaccgtacctgatgaggcgtatatgatatcagcttttgggggcccagatggtggaaggagcatttggcagaatgcctggtcttcctgcatggaaaagcagcatggtaaaaagtctcatcctatgaacctggaaacgcctctgcaatcacgatctggtcctagaaccactgatgtggcagttaagcaaaatgcacttcagggaaaaggaatctgttcacctcttatgctagccagcagc

SEQ ID NO: 100849 - DNA, 555 bp, Glycine max
  Clone ID: PAT_MRT3847_6207C.1
ggctcgagaatgcactcaaatgaaagagagggaggtcggtggcgatgtgatggtggtcgcaaagtgtctggcacgacggtagcgtccaaatgcctcggaaatgtgatcatgccgccatgttctgctgcgatcgtgggcatgggcatgacaaccgcaccattgaaatgctccacaactgattttgacaacataggtttacaccagtaagcatttccactcatccttcttagcagggggagtgtggccattagttgtgcttaacctgtatatgtcttgtagaatcaatacaaaattttcagttgagttcagttggtaaatatttgtgtgacctcgtgtgagcccatcaattgagctgggtatgtatccttagttaatcctggtgactggtgtgttcttgatctgtagtcaaaggtgccgtctaccttaaaaaggaggtgatgatattagatgttaagtattaatattgcattaggttgccaagtgtatctagtttgcctgtgaggtgagccaacctatggcattgaatattagtatagatgcctggcagcaactatc

SEQ ID NO: 100850 - DNA, 524 bp, Glycine max
  Clone ID: PAT_MRT3847_62080C.1
taagaatcaagatcaagattcaagactcaagattcaagaatcaagagaaggcttaatcaagataagtatgaaaagtttttctcaaaaattgagtagcacattatttttctcaaaacatgtttaccaaagagtttttactctctggtaatcgattaccagattgtcgtaatcaattaccagtagcaaaattgttttgaaaaagttttcaaattgaatttacaacgttccaattaatttcaaaaagctttatgtaattgattacacttatttggtaatcgattaccagtgattgtttctgaataaatcaaaagatgtaactcttcaaaaaggttttgactttttcaaattggttttaagtttttctaaaagttttaactcttctaaatggtcatcttgatcagacatgaagagtctataaaagcaaggctttgttttgcattttaaattaattcattctttcaatctagaatacttttccaatcaatctcttacaatcctttacaagccttgaatctctttgaact

SEQ ID NO: 100851 - DNA, 260 bp, Glycine max
  Clone ID: PAT_MRT3847_62081C.1
ataaactgttaatactttttaaaaacattttttagtgcaaaaaggacttgaagtttcgaaaaaaagagaaaataggtttcacaagttccttctaccctgaaaatttttttaaactcaaaccgtttggattttttaaaaaaatgagcataaacaaaagtttggtcatcttaaggggggaaaaaacttactactgggggatccattatgtgaaaacagaaaaccctacaatatgtttataagatatggggaccgaattaaaa

SEQ ID NO: 100852 - DNA, 778 bp, Glycine max
  Clone ID: PAT_MRT3847_62082C.1
attcggcgtcgagaaattcacaataaacactcaaaattaaacacacaacactttgtgtttgttcttacttcttattcttcttcaattggtacacttgtgttgtgcctctaattaaatctaagaagaaatgtctggggtttgggttttcaagaacggtgtggtgaggctagtggagaaccatggctcagatcgcaaggtgttggttcacactgcaagcaacgaaatcatcacttcctatgcagttttggagcacaagcttagctcactggggtgggagcgttactatgatgaccctgatcttctacaattccacaaacgctccaccgtgcatctaatttctcttcccacgcgtccgaacaagttcaggtccatgcacatgtatgacatagtcgtcaagaacaagaactacttcgaagttagggacatttaataagggggtgtgtaaaaaaaactatccatgacccaaattgggcagggtaaccctacaaaattgaattcttgggagtgatttatatctacaagtaatgttggtttgatgattttggatttctggccttggggggtgagtgtctgtgtctacatgatggggacattaatttgtgtaatttgtatatgatcgagtttgtggtatgattaatatttatgtatagagttacggtctgatcgatcggagaagcgtgatcaaagcctgaggaggggatgtgatcatttgtgtgtcgtgatgtaaatctttataatcatcattctaatttcaaagttgagttttcctaaaaacccc

SEQ ID NO: 100853 - DNA, 1952 bp, Glycine max
  Clone ID: PAT_MRT3847_62083C.1
ccacgcgtccgcgcttgtgtctgccgagctagaagccactttggtttctttgcctttctcaatacattttcttttccatggaggtaggaagtgttcttaactttcttcaggacaagaccattttaattgttggagccactggctttctagccaaaatttttctggagaaaatattgagggttcaaccaaatgttaagaagctttttcttcttttaagagcttcggatgccaaatcagctaattatcgattgcaaaatgagatcatagcgaaggacttatttattgtgctaaaggaaaaattgggtgcaaattttaagtcctttatttcggaaaaagtgactctggtgccgggggacatttcttacgaggacttgggtttaactgattccattctaagggaagagatttgcaaccagacagatgttattgtcaatttggcagctacaactaagtttgatgaaaggtacgatttagcgttgggtctaaatatctttggagttaagcatgtcatgaagtttgctaaacaatgtgctaaactcaaaattcttcttcatgtatcaacagcttatgtatgtggtgagagaggtggactcatactagaagacccctatcacttttggtgattcactaaatggaatgagtcttgactcgagattggagcagaaaggacaatagtgtgtgacaaagtggatgttctatgagatctagggactgcggagcgcgaaaaagaaatagttaagaggaactgaaggattagtaaggcagtagggtatagttagttaaacacttaagtatttacgaattcaataagggataagcaagtgaaacagtgaaaaggaagcatatccaatgttattatacgtgatagtagcgaccagtccacttaccatgacttttaccctatccgttctccggttgtccgaacggtctaaagttcaaatattacttatgtgaaaggaaaatgaaaatgcttctttggaaatatcaacggagttgtggatgtggtaccagctgacatggtggagaatgcaatgctagtggccatggtggctcatgcaaagcatcctagtgatattgttatatcatatgggttcctctcttagaaatccactcacatatgtcaaactccaagagtatggattaaaatatttcacggcaaaaccatggataaacaaggatggaacaccggtcaaggttggcagagtaacagtattaaccgacatggatagctttcagagatatatgttcattcgctacctacttccactaaagggacttgagctggccaatactgcactttgccagtattttcgaggaacttatcttgagctccacaggaagatccaggttgtgatgcggatggttgaactttacaggccttacatgttcttcgatggcgtatttgatgatatgaacacagagaagttgcgaatggcagcaaaacaaagtgggacagagacagatttgttttactttgatacgaaagaggttaattgggatgattactttatgaagacccatctccctggtattgtcaagtacattttcaagtgatatatgctatacttttaagtgatttgagaaactagtaactttattaagatcttgtttatataaactgaaaggaaaataagaaaataaaatgaattgagtttctatttaagataaaatcaatttatgtattttagcttttgaaaaaaaaagttaaaagagagaagttttgtaaaagctaaacacctaaattgattttagctttatagaagaaactgatcaattcatctaagttcaaatttgtgcagtatgcattacagtagctagcggtgttctttatttctcaacatcagtgtaatcggtattggctagctgctaattaagtttaataaagtgtaccaaataccatatattttgctttctcttacaatcaactttgattttttttcgttctcggacaa

SEQ ID NO: 100854 - DNA, 248 bp, Glycine max
  Clone ID: PAT_MRT3847_62084C.1
gcacaatccttgattttgaaattggaggagggaggcgaatatcagaatttagtactgtaaggatgatgtataacataggcattcagggcgtatcttggaagtttgagttacatcgtgctggtcaaaagttaatcatcccagtcttgctttcaactgatttaaatgccatatttgttaccagtgcatttgctattccttcaacactgtattttctacttcagacatatgttgtaaagcctactacctta

SEQ ID NO: 100855 - DNA, 390 bp, Glycine max
  Clone ID: PAT_MRT3847_62085C.1
tctgaaggcatatccaatgcaggtgtggaagcttttggtgaaaaaataccctcaggagtgccgcaaccattaacattgccttcaatagcattatgtgttgtcttctgccgtttgctcttttcattctctgttgaatattctacaattatttggcaacttaagaaattaggtaaagcaggggactcatgtaatgggtgctttatagtagcatctgtcttcggtgaagacttatccagtgaaaaatcaggaccttcacactcaacagatttaccttgtgtcttctttctcactattttctgcttctgcgatgaatttacatcatctgtactagtggaacctcccaaattgttgttgctggaggccccatatgcaaatcatttacaacatcca

SEQ ID NO: 100856 - DNA, 366 bp, Glycine max
  unsure (1)..(366): unsure at all n locations
  Clone ID: PAT_MRT3847_62086C.1
gctagaatcaggcanaatcagaactcttctaaaagaacacatgcccatctcaaggaacttgctacttgcactttttacattatccaccctcctccatggctcatcatcccaaaccagacacatcatccttaataccacagtctggatcatccctactaactacacttccacctacaccgcctgatctaccaacaaaacctataccgttaactacactctctttttcaacatcgtcaactaccaacacaacttatccaaagtaactaaatcctcctatctacaccttcaaccacctaaacacccttttcacccttacctactatccatcaaccttgaccctgaaccaaacactgtaacaatactaca

SEQ ID NO: 100857 - DNA, 654 bp, Glycine max
  Clone ID: PAT_MRT3847_62087C.1
tttgccagtattttcggggaacttatcttgagctccacaggaaagatccaggttgtgatgcggatggttgaactttacaggccttacatgtttttcaatggcgtatttgatgatataaacacagagaagttgcgaatagcagcaaaacaaagtggaacagagacagatttgttttactttgatacgaaagaggttaattgggaggattactttatgaagacccatctccccggtattgtcaagcacgttttcaagtgatgataaatgctatacttttaagtgatttgtgaaactagtaactctattaatatcttgtttagataaactgaaaggaaaataagaaagtaaaatgaattgagtttctcctttaagcattttagcttttgaaaaaggttaaatgagagaagttttataaaagctaaatatctaaattgatttcagcttatagaagaaaccagtcaattcatcttaccttctgccttctcccttctcctattatccaaacgggcttgagttcaaatttgtgcagtatgcattacagtagctagtgatgttctttatttctcaacatcagtggaattggtattggctagctgctaattaagtttgataaagtgtaccaaatatcatatattttaatttgctttcttttgc

SEQ ID NO: 100858 - DNA, 351 bp, Glycine max
  Clone ID: PAT_MRT3847_62088C.1
ttttggggttttttttttttttttttttttataaaaacagagccaattataattaaattatttcacattcaatcctttattaatatacactaacaacaagtggcttattatggggcatggggcataacactgcaactggaatcaccttttttgaatacatcagcttaacgactcctgcagtgacccctcccaacatgaacttcattagtttggaagcgcttaactctaggactgactcattattggaaccaaagttacctaatccttagcaataaatgaagccaaatttgtttctcatggccttcccatctacccctattgtggtcttcttccaatcgacctacgcgtgtg

SEQ ID NO: 100859 - DNA, 555 bp, Glycine max
  Clone ID: PAT_MRT3847_62089C.1
cttttcaaaaccctctcgtatttcctctttctgaacattactgtactttgttgtcatcatggagaagaatagctactaacgttgttcagactttggagcttcctttgtttgtttgttgtctctttctgtgtttcaggtttggattttgaaattgtttacgcattgccgataggtttgctcaaagtaaactaaagggaaataaaaaaaggaaaatgatcggaaacttcatcgacgacattgactgcggcaacttcttcgaccacatcgacgacctcctcgaattccccgacgacgccgccgccgctgacacctccgccgccgctcctgtccctccaccggcgaacttctggtccgccgagtccgactcgctccccgccaccgacacggtgttttccgacaactccgtgacggacctctcggccgagctctctgttccgtatgaagacattatgcaattggaatggctgtccaattttgttgaggactctttctctggtgggagcatgaccatgaagaaagaggagccacaatgcaccaccaccaccaaagaggaca

SEQ ID NO: 100860 - DNA, 570 bp, Glycine max
  unsure (1)..(570): unsure at all n locations
  Clone ID: PAT_MRT3847_6208C.1
ggctcgagcaattatttacaacttttctgttttcaaatcccttgacaacaaataatagtgcaactgttctagtctcttaggatctgttcaatggccaaccaagggcatgacctccctctctatgaaaaagtttggctcaagcgcagattacaaagagtgatagacaccttgattctattcctcctactcttgcttctaaattaccgtgttttatcatccaatagcttcacttttccatggttccttgctttgttatgcgaatcttggttcaccttcacttggatagtgattctcaactccaagtggagtcctgcagtaaccataacccacccagatcgtctcttgcaatgggtatctgagcttccaccagtggacttgcttgtgacaacagcaaatcctatactagaaccaccaatcatcacagtcaacactgttttgtctcttctagcgcttgattatccagctaacaagttagcttgctatgtttctgatgatggctgttcccctcttactttntatgcccttgtggaagcctccaaattcgctaagttttgggtacctttctgtaga

SEQ ID NO: 100861 - DNA, 476 bp, Glycine max
  Clone ID: PAT_MRT3847_62090C.1
tggtttttagtatattttttgggtcttttcataaacaaagctaaacaggaaataaagagcactaacggtattgcacataaaagcaatctttggacagaaaccttgggtatcttgattaggtatcgaaataacctaggcctattttttgtgacttacgagggccccaacagtgagtgaggggcttgctataccttaaaggacctagcggaacgtaaccttaagcttgggaagatcgcactgagcgtttacagtaaatattggaagaattgccttgggcgagagctctttgatccggcctattgccgcctggctttagcgcagctcgcggaacttgggtgcctgtgctgaaagggaccagagcctgggaagaaacggttccaagggttgctaccgttagctgcctggctctggttcctgacgacggaggcacggtttaacacgagtgcttgggctgaagctggcgccaacctggccgg

SEQ ID NO: 100862 - DNA, 432 bp, Glycine max
  Clone ID: PAT_MRT3847_62091C.1
gaaatcttgatttaccgcgatcatagggtgccgcaccttaaagccggaaacaaaagcaatcgtgacttgattcacaagaattttttaatttcttcctacttttttgcgtacgatttctgaagggaaagaaaatcactctatgtgctggccacagactacgtgaatcattttctttgacatacttagtgtatttgctgaacactctcctattggatataggactacgtgacagatgtaaacttgatctggtgctttttcagttctctgggtaatagcaagatcaagctggcgaaatcttggattagtgctcccactctcctatgtggcataggacttcgagggcagacttttctatttctatcctttctttcactatatacttctcactgatccagattgccgttcaaagtggtcttatttgaaaaacacttg

SEQ ID NO: 100863 - DNA, 149 bp, Glycine max
  unsure (1)..(149): unsure at all n locations
  Clone ID: PAT_MRT3847_62092C.1
aaaactatagatatcaataganaganatttcacttgccaaaggnngcaaacttgctacattggcaagtgaaatttctttctattgatatcnataggnaggaattcnctngccaangtagcangttngcaactnnngcattngaatanng

SEQ ID NO: 100864 - DNA, 431 bp, Glycine max
  Clone ID: PAT_MRT3847_62093C.1
aattgcttattgttttttccttttagagaaaaaggctaaaaaatgttttgtaatttatccaaggcaaaacattactgcaagatctggaaagaatttgacgatggaagggaataacttccagaggacaaccgtcctttttgaaataaaggtaaatcctcttgggggcatccggccaaaggggggggatgttgtcttgtaatgcggcgaacagggaaaaacgcacacacctggtctaattatgccctcaaaatttttttaaagatactcccgggaaaaaaagccccccccaagatgttagaggcccccgtgagtgaagagagaatttctgatgagatttttaccccaactcacggtaaaaaaaattttggttgagaattgaaaggaaatacccggtttctctggctctgaccgaaaaaaaaaaagaggggccc

SEQ ID NO: 100865 - DNA, 219 bp, Glycine max
  Clone ID: PAT_MRT3847_62094C.1
gatgagattatctaacaaagcattgaattagaaaactgaagttcattccttgtgttttgctttcttcctcaaaaccaaacatgtcgaacacatgcggcaactgcgactgtgctgacaagactagctgtatcaagggaaacagctatggagtgtattgtatatactgacaagagttacattgatactgttgtcatgtgatgtccagcagctgagcatgat

SEQ ID NO: 100866 - DNA, 559 bp, Glycine max
  Clone ID: PAT_MRT3847_62095C.1
accgtatctttgttgacttgtcgtttattatattaatgacaaatgctgtttcagcatctgtgatttatactttatatttgtaaaatttccttccttgtctgttttttaaaggacacactgaatctaaattttgatgtacctgattctttgacccattttatgctgatgctgcttaattatgaactgacattttccccattacttttgtgtaatctgaagttcatttaaactgatatttctctgctctttcatcagcctgctagcgccagcagtttgaggaggcatgttgcagcacccctgatgcagcatcatcgggcaattgagagaaacaatcatgcactgcaacctttatctcctgcaagttatggtagttccatggaggtgagtatcaaccttgccccagacctttctttttcttttctactggctaacacctttaaaacttaactataatgaggcacatgatagtatccttccaagtaaacatgtttcttttgcgggatttaccaatttggcatcttgtataatgtggatacatcgtagtcacaatttcaatgta

SEQ ID NO: 100867 - DNA, 326 bp, Glycine max
  Clone ID: PAT_MRT3847_62096C.1
gctggattatcaggtttcctggataccttttcccagatccgctagctccaggcgatccggtggccattgtcaatgcttggtgcccttgcctgcacccttccatagatccttgacaagaatgacctacaatctcatgacgtcgattgcttgcaggcctgctcgactacaatccttacatggagtcctcacctactcgggcaacccatacctgacccatgctctacatcatccatgctatctatgctgatcaggttgtgctcatggaatacgctgtacgtgacagaattagtccttgaccacttttcgaatgacttgacccaatctac

SEQ ID NO: 100868 - DNA, 340 bp, Glycine max
  Clone ID: PAT_MRT3847_62097C.1
ggctcgagcgccgcctctgcatctttaactattttgctcgacggcaccataacctgagtacggcgttcatcttggactcgctgccaataataactctccttctagatccaatcctcaagcacacgctgagaatctcatttgccggcgctaatacgcactctaatgcccaaaatacagccggagttataacaatggcccgggaaggcgttcgagactttgacacccctaccaaggaactgagcccgatcttagcctgcaagcccgggctaaatataaggggcgagaccaacctagcgtctggcattcaggctgctcaacaggctatcaagtctctgcgaaa

SEQ ID NO: 100869 - DNA, 218 bp, Glycine max
  Clone ID: PAT_MRT3847_62098C.1
aatttgcaattatatatcagtagttaaagctcatgacatttttttaccaaataattatttacagagttttttattttccacattttaaaattatttaattttaagtattatttagacttaggcatccaaaattttgcaatttttatatgtaaaaattaacaactaggacagtagaccgtacatttccgcatgcaatgaatattattagctgctttgat

SEQ ID NO: 100870 - DNA, 709 bp, Glycine max
  Clone ID: PAT_MRT3847_62099C.1
ggaacactttagtcccctcccccattgctttgtttttctagctactagaagattactttgcccattttcattattataagaaatacttggtgccattagaaaacctgtttacaaaacaaactccctgataatgttgttttttttggccagaaaagaaaattctttttttttaatgctaatttaatgttttggcttggcttatctatgtaaggaaactgctgtccgctctgttaataatactgatggtgcttggtagaattgaaaataggagttctggttttaatgctattttaactcttagatatctaataagataacatcaagatataatgcacaaatgacaagcgaaggaaatttcaggtttctggtttcataatagtttaatttgactttgaattatcttaacttttaggatccaggttcatggtgataaacaaagttgcaaaccattggttccagaattttccattcttgtgccaccaggaagacaattaagatctcttaaaatgttaagtcttccctgctacattgaaatttttgcttatataaaaaaaaaaaagtcttccatgctacatttgctctgtatgtgatttaaatgtttaaattcattagtcaataagtaagtttagctttgatagctgttaacttatttaattagtcatagtgcaaagtagatttttaaagtgtaataatctagcttatttgttat

SEQ ID NO: 100871 - DNA, 613 bp, Glycine max
  unsure (1)..(613): unsure at all n locations
  Clone ID: PAT_MRT3847_6209C.1
aagcncgaatcggctcgagagaactaactaggtgaacatggcagcagggtacgcatccggttattctctagaacacactccaacatgggcaattgccctagtttctttcattcttatctccgtctcaatcatcttggagcatctcattcatctaataatcaaatggttaaagaaacatcggaggagcgatttggttgaagcaattgagaggcttaaatcagagttgatgatcttaggattcatgtcgcttttgttgacagtaactcaagacgctataatagaaatctgcataccagtgatggctgcagatactatgcttccatgtcgtaaacgaactaacaatgctacttcaattttggattcttgcagtgccaaaaatgccagtaaagttgctttagtatcaaaacatggaatccatcaacttcacatgttcatttttgtcctagctctcatgcaaattgtgtacagttttctcaccgtgtctctggcaagggctaagatgaggcactggaaagcttgggatgaagagactcaaacagttgaatatgaaattgccaacgaccctaatagattcagatatacaaggcaaacaacanttcggtagacggcacat

SEQ ID NO: 100872 - DNA, 1489 bp, Glycine max
  Clone ID: PAT_MRT3847_620C.1
gcttgcagcagtggttcaggcttgccatgatatggttcctcctgatgcagttgaacccttgttcaaacatatagtaaatcaatttgtacatgaccgttcacgtccagaggctattactgttggaataaatgcagtcagggagatatgcatgcgcatgccattgttaatgaatgaagacttgctacaagaccttgcgctatataagaagtcacgtgagaaggcagtttcaatagcagctcgatctctgattgggttattcagagaggtttgcccctcactgctagttaagaaggaccgtgggcggcctattgaccctaaggcaagaccaaaggcctatggagagcagaatgttgcgactgacgttcctgatgttgagttattgcagacggctattgacaatgatgatgagcaggagagtgatcattctgatggttctgcatgcagtgtctctgacaatgaccaggaaaatgatttgatgagtataaatgatgacgatgacaatgatgatgagaaccagttatgcagtgatgatcctgaaagtgatgatgaagccaaagatagtgatgttatatcagacgatgacgacgagagaagttctgatgacgaagctgatgttagtgatgctgatgaagttaagggggatgacattgaagacaatgaacaagctgatggagaggatagtgatgtttcagaacatgaagaagatggtgatctgcattctttaagtgatgatggacttgtgacaaaaagtacaatgaaagactcagcaaaaaagaggaagtttactgattttaatggtcaactgatagctgctgatacaagtctccgggctctgaagaaattagctgggagacaaatgggggatgtcataccagaatctaacgacggaattctttctaacgaagacttcaagaggatcaaagaactgaaggcaaaaagtgaggcaaaaaatgcgttggctcagcaagggctagcgaagtcagctgcaactaaggttccaagctctggtcaactaaatctaaagcgagtggatggtaccatgcttgaagctcacataaggaaaaagttgaacaaggatgaaaggttggcattggttagagcaggaagggaggaaagaggaaaataccaagctcgaactgctgtgaaacagaataagacgggtgggttaagcaacagacaaaaggaacacaagaagaaaatgcccttggctgcaaagagagataaggtatcaagaactcggatagagaaaaagaggaaaaatcagcgatctggcaaacagttccgtggaaagaaagcgtggaagcaataaatatggactgagatttttgttaacgaatccttttcaagcattatttatttattattattgttgttcccaatctcatttccgtccgcaaccggtagatgatggtaatggttgtttcttttgttacaagaaaactcccgacaaatattattcaatgtgaaaaatgatcatgtttattacgat

SEQ ID NO: 100873 - DNA, 196 bp, Glycine max
  Clone ID: PAT_MRT3847_62100C.1
gagcctaaaccaaattagatggcaactgaatggtgcccaaagggggtgcccccatcccggaaaaacataaacattttgaccgaccgacccctttggccaaaaatcaattacctgccaattttttgaaaggaaaaaaacccaggcatgggcccttaacagtttttgcccggatcaaaattaatacctactccctaac

SEQ ID NO: 100874 - DNA, 376 bp, Glycine max
  Clone ID: PAT_MRT3847_62101C.1
ggttgtagagttaggaatacagatcaaaagttacgaacacgaagacgaacttaagttggttaattaatgttaggaaaaggaccccgtttaaagttacgtacacgaagacgaacttcttaacgataattaactgtaattttaagaaatagcctattaataatttccgtatttattatatatattcgtttgccttggttgcattttatttacgacttttttcgttgggttttacgtaaatagtcttttattcaactaatatattaaggtgtcaagaaaatttaacttaattagttgaatagaacttgtgaataattataaatcatttaatactaatttcaattttaatgataaaaaaattaaagttcatgttatttaa

SEQ ID NO: 100875 - DNA, 460 bp, Glycine max
  Clone ID: PAT_MRT3847_62102C.1
actagcagagctatcaccgtcattctcttccttcatttccaaggtattccaaggcagcgcatttccaataagaagccgcagcagtacacaagccaatgaccatacatccgagccatacccagttggatatctcgaatgcccactatccggagcagtgcccctcttgtgcaacaacccatacaaaacctcattttttgcaaaaacctcattttccaagcaatccttacacattgcttcttcttcgtgttcaacggaaacaacattcacaaacttccttgccagcatcaatgcctcattcaaatcaacacaaatcccaccaagctcatcaaaagagaaacaagaaagccccaaacagccagcaaccaacccttccaaatgcaaagcaaccacagcttcacatatacccttcccaatcattaaaaaactaaaaatcccacctttatccaactccaaaccaccc

SEQ ID NO: 100876 - DNA, 459 bp, Glycine max
  Clone ID: PAT_MRT3847_62103C.1
ctcgagccgaatcggctcgagaaccgaacaacattctctgtttttatggtttagccatatcttattcagaatttgttttctttatcagtttgagatcaacattagattcttatggcttcagagtctggaaaggacggtgccggcgtcccaaggaagcttaaatttaaaccaagagctccacctcgtcgagtgataaagcaagaagttaaagctgaagtggctgatgatgttgatgttgatgctgatgcagaacatgctgctaaggagaatctgctgaagcgtttccatgagagggagagtgcggtgaaggcaaagtacaagggtgagaaaaaagtgttagcttctcaaattgcttttggttatggtggcgaatcaacttctatgaaatcatatggtattcccaggggtgggagcagtatcaacatcaatcagagttcagcatctaatggggcgaaagag

SEQ ID NO: 100877 - DNA, 996 bp, Glycine max
  Clone ID: PAT_MRT3847_62104C.1
ggcggaagaatccatttatagctctcacaagccaagaaaaaaaaaaattaagttagtatgtatggatgtatgtgttcttagtaatcataaagtgctaagtcaaatacaaatattgtttgtgtgtggtggtttgatcaacaacacacagaaggggtatctcaaaaacacaacaacattggagattatggagctagcgcaaaagaaaggatttctggttcatcatgagtacgatgatcttgttggttctttttattcttcctcgacatcttcttctgtttctggaatttcaagtgggtcatcgttggaatctgattcttttgaagaagtaacatcccctgcctcttcttctccctcatcatcagttgatgatcaacttgtagttgttgctgatccattgagtgacatgtcttctctctttcaacaacttcccatcaagagggggctatcaaaattctaccagggaaagtcacaatcttttacttcactaacaaatgtgaggagcttggaagatcttgtaaagccagagaaccctcacaacaaaagattgaagtcttacaagagctatgcaggagggttggcagagagccattcaacaagggttgtttctaaggggggaatgatgcattcaacaagttcaagaggttcatgttcttctttgggaaggggcagtgtcactaacttcatgggtagtaatagtaggccatcaattccttctcatagatctaccagcactaacaccatccctaatcaaactgtgttgtttgcttaaaagggattctgtgatgtttcttttttttgttcaaccaaggtttttgtttttgatgatgtgtagattaagtagtttcattcgaagagaaatgttggagattggaggaaaaaaatagtactttgggtacacctaatctgattttttttttttctttttaaatggaagtgccattcacatgtgcaattttgattcacaattttaatgcaattgagttaatttttctaaaa

SEQ ID NO: 100878 - DNA, 540 bp, Glycine max
  Clone ID: PAT_MRT3847_62105C.1
atttctcttaaaccgcgatcataggttgccgcaccttaaaaccggaaacaaaagcaatcgttacttgattccaagaatctgtcaatttcttactacttttttgtgtacgatttcttaagggatggaaaaacactctctgtgctgaccacagacttggtgaatcattctcttttacattcttagcttatttgctgaacactctactatttgatattggacttcgggtcagatgcaaacttcttatgtttctttgtcagctgtctgtttaatctcaagttcaagctggcgaaatctgggattagtgctcccactctcctatctggtataggactgcgcgggcagactcttctattgctgtactttctttcactctcttgttctgactgatccgcattgccgctcaaagtggtcttattagaaaaacacttgtgcgttggtgcagatgtttgcttcgatagacctctatggagacaacatgttgactgagacaactattcttaattgcacagatttggacatctggctgtttttatacaatag

SEQ ID NO: 100879 - DNA, 173 bp, Glycine max
  Clone ID: PAT_MRT3847_62106C.1
gcgacgcgttcgtgtaggcattcggttagaatctgtggtaatagtgggttttggaggggcattataactcacggatgatggctagcttcaatattaatctgggcacagagtagtacatgacagtgcagtgaccactgatgacgctgtaagatgtaccctgactagagctacac

SEQ ID NO: 100880 - DNA, 514 bp, Glycine max
  Clone ID: PAT_MRT3847_62107C.1
cattgcttattattggactttgggtttcaaaaaatacatacctggtgcaagaactagatttttaaatttgggtgataacgatgacggaaaataaaaaccctataaacattgcaagcatagggagtttgttggagtgaacacaccagcaaatatgccttatccatctcgaggctgaaagaaaaccaaattgttagactgttctgttaataaaaacaatccgactgaatcgtgcagaaccccctgaaaggaggataatgttcaaataagcgcccaacgagggctgcaacacttctgtgcccattaccaaagatggagaccttgctggtggaataaaattcggggaataattcacactattcctgaaccaactaaggttgaaaaacattataaaatagggggacatacctccaaaactgaaccggtaccactgaaattgaaagggaccgctgctttatcgtaaaagagacacccaactgtttggaaatggtaaaaacagcccagaagattggttcat

SEQ ID NO: 100881 - DNA, 419 bp, Glycine max
  Clone ID: PAT_MRT3847_62108C.1
gcagtggctgagatggcagttcccacagctgcacactggtcagaaaaatacaacaatgtagtcaaacacggcataacccttctcacttgttcccttgaccacattgttgacattgctaaggcgtttaaacacggagaaggcaatgtgaatgaagatgaagcatgttccgtgggagactgttcttagagcactactaataaggtagctattttcttcataaaatctgcttctggttaggatttgttttgtgtttgagggcaatgtgggtgagaatggaagtgtaagaaatgggttcggagtgtgtggatggtgtaagttaaccaagttcgtagaacgttatgggattatgtcaatggttgcgctaaatgtcaccaaagtgaagttgtttcggccttttcttgcattaaaaattatcttga

SEQ ID NO: 100882 - DNA, 380 bp, Glycine max
  Clone ID: PAT_MRT3847_62109C.1
tggctcggaacctttgggctgatttatgtgcttgatggtcgtcagaagatgatagaagggggccgccaaaccaagtaagcaaggccgggacggagggaatcaacagcagtggcgacaatgcgcgcgtgggcgcggcgtacagcaggacgaggacgaaggcgacggcggtcacagatgagagcgaaggaagtcctcacgtctccaagcgggtttccgacaattctcctattattacggttatcgcgggagaagtactactattcgaaaacgacggtacggcgcctccggcctacgccgagtttaaagcctataatcacgcgcactttactggatttggcggagtagttccccacttcgtaatcgcagcagcggacctggcg

SEQ ID NO: 100883 - DNA, 1179 bp, Glycine max
  Clone ID: PAT_MRT3847_6210C.1
tttttacattacttatacgaaattttataagtttctttttttagttagtatttcattaggttttaaaacaattaattggtcaaaagcaggcttttagataggctcgtaggtcaagccagacttttatgtaagtcgagccgagcctttaaacaaagcctatgatagataatgagccaagctcaagtcttgcgtattcaactcaaaccaagctcaagcctagtaaagcttgacttggcttggctcaattccaccccaagctgtatgcctatcaatgctatcaatggcggaatatggtggaaggccaaaattccgccatatagacacacaattgcggccaatggcgctgccatagtgggccttccttcacaaattgcctatggggggttggcaaaaaaatccaccacaccattctgctatagcggccatggcaccgccacttaacaacactgatgcctgtatatatagacaattgaattgatagttctattattattattattattattattattgttatttacagaagagatagatggtactcagtttcaaaatttctgttgttttcaatgttgttaatggcggatggcggttcatggcggaaagtcaaaaatccgccataaaaatatggcggatggcgtagcggaaaatggcggatgtcatagcggacacatctgagattgacattgaaataaatgaagagtatcgtgttatccctggattgggggaatttggtgatcgtacttcggcaccgatgattagtgtgtcttaaagtggatacacctcttaggtagcagctgccttgattaagaatatgagaagcagctggctacattgtattgagatactaaagattcagcaaaaatcagcatgattgtgatttgaggccaggcagattgcaataatcaatgcaaacctactccaacgttgatttgcatgaatgattgtcatatcgaatgtagagatcattcttagcaagatgatgataccacacacaattcacaattctaccaatcttgttctccaaagtttgttatgtggaaaatatttcctagttatcaatgcaatctataactaaccagatcaatcgtcaatatatgcaaactgtgttaatagtgttattgtatttcatacatagtatctgataatctgaagcaaataagctgtgaagtttatgttttt

SEQ ID NO: 100884 - DNA, 1307 bp, Glycine max
  Clone ID: PAT_MRT3847_62110C.1
gcactcgcgggtagagcgagtcctccgactgtacggctgccagaataccacacggggcttatgatttgcgctaacaacaactaacgtgcaagttccaaggcggagaaaacaataatggccaccaacgaggagagggatatggagaacaagaagagtgaggaagaactgaagcatctcgggtttgtgaagattgcggcaatgaaagccttagtgtgtgtgtcgaatctctacggcttcgcaaagcaaaactcgggacttttgagatctgctgttggaaccgtggaagacactgtaaccaccgttctgggtcccgtctaccacaaattcaacgctgttcccaaccacatcctcctttttgtcgacaacaaggtggatgaagctgctcacaaattcgatgagcatgcaccttctttggccaagcaggttgcaagccaagtcacttgtttggttcaggaagtgacacacaaagctgagaaagtagtgagtgaagctcaatctggaggggcacgagcagcagcaaattatgtagccactgagtccaagcaaattgtgctctttggttcagtgaaattgtggactggtctcaaccaatatccaccattccatgcagtggcagagatggcagttcccagagctgcacactggtcagaaaaatacaacaatgtggtaaagggaacgagtgaaaagggttttgccgtgtttgactatttgcctctgattccaattgatgacattgcaaaggcgtttaaacagggagaaggcaatgtgaatgaagatgaagcatgttccgtgggagactgttcttagagcactactaatagggtagctattttcttcataaaatctgcttctggttaggatttgttttgtgtttgagggcaatgtgggtgtgaatggaagtgtaagaaatgggttcggagtgtgtggatggtgtaagttaaccaagttcgtagaacgttatgggattatgtcaatggttgcgctaaatgtcaccaagttgatgttgtttcgtccttttcttgcataaaaattatctttattgtcgtcttgggcggattgagggcggtcactaactcactattggaacttggagtgcccacctaacactccacgacatttcaagagcatttcttccttggacgccacaatcaatcacttacacttaataatagattaagaaattaagaatatgatttaaatactaactgataaagcagaagatctttttgtgtgtgaatcagggactgttattagctgattatgtgaatcagcctgtttctgcagtataatcttttgtttttgttaag

SEQ ID NO: 100885 - DNA, 164 bp, Glycine max
  Clone ID: PAT_MRT3847_62111C.1
gcaccccccccctcactcctaacttcagagactctcgtggcaagcaacagcgacctcactgggcatcacctttcgggaggtcaccaactctccacgttcccctgcgctcgcatctggcctcaccacggcaccatcttccacaaaaacgcatattgcaactcctg

SEQ ID NO: 100886 - DNA, 1061 bp, Glycine max
  Clone ID: PAT_MRT3847_62112C.1
atttgggcatataagaattattatatatctgaggaaagctagaatcaggattctattctgactagtttgatgttggaagatttcttcctttatcacttccgataacttttcatgtcacagagaaaaccaataagtaatatacacattagtgaaaaatgttcttacaggaataagaaaatatgaaagatcaattttaaaagagaaaaaagaaaaacttgaatgaaggaaagaggatcaaacccaaccccttttgtaacggcggaagaggtcttctgtttgagcatttttgaaggcactgcatgcaatgagatagacccagatgagtacaacaactgccaccgtcaaaatgatattggctttcctccactcttctctgaggtttcctagtagacctgccttgcatgcattgcagttgtagcagagctggctctggtcattgctccacaagtagcaatctgggtctaccattggattcacaggatttatccacagtataggattcacataattgtatccgcaagaagttggaggtttacaacatcctgactgtaaaggagagatattactagagttgaagaagtgatcagcagaagcgtagtcctgggtgagtttaatgcagacataagaatgagccaaacaagtggttatcttgttccaactagtggtagaagaagcggtgaagacatggttcctgagccagggggagaagccaacgagcatggactccttgaagcctcttccagggacatgataggttccatcgggtctagtgacgacgaaagagaagacaagaaggaaaaggagaagagaaatgaggatggccatgcagcaaaggtaaaaggccaagagccccacaagtacagtaagcacccacaaagcctgcaagagagatgaggagtacgaggaggccaagtacgaggacgtgccagcggaagttgtggatgcactcgttgtctggtttggaggctagccacacaccagcacttattatgggtattgaggccaacagggctatgaagttcaacactgcactcatgttgttgcctacccccataggatcg

SEQ ID NO: 100887 - DNA, 375 bp, Glycine max
  Clone ID: PAT_MRT3847_62113C.1
agctctatggtctattgaatggggcatagctgaacttgtgaaccacccatagatccagcaaaagttaacggatgaaattgacacagtccttggaacaggacaccaattgactgagtcagacatccaaaagctcccatacctccaagctttggtcaaggaaactctttattttagaatggtattccatttgcttgtaccacacatgaacctgcacgacgcaaagtttgggggctatgatctcccagctgagaccatgatctcggtgaatgcatggaggctagccaacaactctgcatactgtaagaatccataagagctccggcctatgacgtttttcatcgatgagtcccttgtggaagccattggcgatgactt

SEQ ID NO: 100888 - DNA, 614 bp, Glycine max
  unsure (1)..(614): unsure at all n locations
  Clone ID: PAT_MRT3847_62114C.1
cgacccacgcgtccgaactgcacgcgtgttttctgttttcgtttgttgtttttttttgctctcatttgcgaaggtgagaaccctaaatttgagagagagaggtttgatttggccggaggtgattctccggtgagattttgcggcggatcagggtggggccggtcacttttctagagagagaaagaaagtgtggttttgagagttagagagagagacagtgcgagagtggggaaaatgtataagaaccagctgcaggagctggcacagcggagctgcttcaacctgccttcgtacacgtgcattcgggaaggtcccgatcacgcgccgcgcttcaaggccaccgtgaactttaacggcgagatcttcgagagtcctcactactgttcaacgctccgtcaggcggagcactccgccgccgaggtcgctctcaattccctctccaatcgtgctccctctcactccctcgccgccaggatcctctagagttagctggaatcatgtttactggtgaacctgccaagaataagaaacaagcggagaaaaatgcagctatggcagcttggtcttctctaaagcnattggcaaagaaactgcagggtcttttcactgacccc

SEQ ID NO: 100889 - DNA, 2059 bp, Glycine max
  Clone ID: PAT_MRT3847_62115C.1
gttgggttttttttttttttttttttttttttttttggctcagatagggccattgatatatcaagcacagtgacctaagatgcatatagatgacctgagtctaatgtatttcatcactgagacttatggcaataaatgaggcttttttgtaaacgaactaacaagcaagggggggagggtccaccttttcatttcaacaaaacaaactgatctcaaatgatgcccaaaaaaaacacagaaagccccaattgccttggtggaataagattgatgggtgatgaatatgtataatacgataatatatatgactaacattcataaaaattaaaaagggcaaattatatggtaagccgctcttgaatttcacagatatttggactgcagatgctataaccggcaccaacagtcgcattttcacaggacaaaaggaagggatgacattacatcactcattataacatgagaagcaaactccacatcatcataaaatcatgaccacattctcatggattcagacctctactccaatgaaacatcagattttcagctgctccaagctctgcactgtctcaggttcaggtggaatgttctcagtcttggtctctgtctcgggagttttagttggcagtttgtcttccaagctaggggcactaatggttggtgagtcgtctttagggacggcgacaggttcgtcttttgggatgggaacaggttcatcttttcggactggtggaggtggagcagcaaataccggaacagcttgccgaatagtgaccggaggagcaactcgtacatgaggagctcgtagtacttgatgggacactgcagctgctgctggcggtggtggtggggagaatacaggtattgcagtccttatcgtcactggaggtgccatcccctgacaaggcctcatttgtctaatgggaacataaggtgctgctccggctgcagggaacttagggcgacggattcctcggctatctggtgtagctggaagttgtggcatcacagaattgtcgctggaagctggtgccggagatgctgctactagatgcctgcttcgatgagctcccttttggcaaattaaaggaagaatctttgatgtggtggcaggtggaggctgaggactggttggcctgggattttgaatctgaaacttctttggaaatggaactggagcatttgaatttgacattgaaatcttttccttcagtctgtagttcagcaaggcccgtgctatagtgatctgttctagttcgtcattgttctcgggttcagttgaagaccttgcagtttcttttgccaattgctttagagaagaccaagctgccatagctgcatttttctccgcttgtttcttattcttggcaggttcaccagtaaacatgattccagctaactccactgtccccgtaaaaacaggtaaatgtcctaaccctgacctgaatgtaaaatactgcggcaacggcgcccctaccctctgcgcaatttcctgcaagaggttcttgtacacccccgtttcatcgaggatcctggcggcgagggagtgagagggagcacggttagagagggaattgagcgccacctcggaggcggagtgctccgcctgacggagcgttgaacagtaatgagggctctcgaagatctcgccgttaaagttaacggtggccttgaagcggggcgcgtgatcaggaccttcccgaatgcacgtgtacgaaggcaggttgaagcagctccgctgtgccagctcctgcagctggttcttatacattttcccctctctctctctataactctcaaaaccgcactttctctctctctctctctcttcaagaaagtgaccggccccaccctgatccaccgcaaaatctcaccggagaatcacctccggccaaatcgaacctctctctctcaaatttagggttctcaccttcgcaaatgagaggcggaggaaaaaaaacaaaaagacagaaaaacacgcgtgcagttacagcaccggcacggagaacagagaagagagagaaagttaagaagaagaagaagaaggtggaaaagaaag

SEQ ID NO: 100890 - DNA, 260 bp, Glycine max
  unsure (1)..(260): unsure at all n locations
  Clone ID: PAT_MRT3847_62116C.1
gaggtttcctaacttattccaaagggatgagatggtattgtaaattgagtttagtataatgttttcagttatttcagtgtattacagtgcaaaacatcaacctcttcaaggacctttgaatggaatattgatattcttctgtctcctctnattctatattttnaatataattgtnaatattatagagttcttttttttgccgttccatgatttaattcccagcnaataatgtgtggnaaacaattatactgcagcncaat

SEQ ID NO: 100891 - DNA, 140 bp, Glycine max
  unsure (1)..(140): unsure at all n locations
  Clone ID: PAT_MRT3847_62117C.1
ggngcgcccggaaaactattattactacactcccaaatggactcaaagtggctctgaaacatcaccgactccactggtggtggctatatgtaatgggtcaatatacagactcgatagtttggggtcacattgtaaacaat

SEQ ID NO: 100892 - DNA, 367 bp, Glycine max
  Clone ID: PAT_MRT3847_62118C.1
ctcgaattccgctagagcagtcgtttacctttaacaattcttgctgaatggcatttgaatattatcctaattgactctcaaacacgatcaggtgcttctctcttacactggggggatgataaagcttcaattatgcctaaacatttatcactacacagcactcatatcactaatattctaaccgaagctgacgcacatccttcttatcattaaactaaagaagaacaatgaagccatactagcttttgctcattactctgttcaacagcattgcctctcaacactaaaaactatacagattcactaatcaccccaatcttgaagatgacattactcattcttacctactttggaatctaatcgacta

SEQ ID NO: 100893 - DNA, 792 bp, Glycine max
  unsure (1)..(792): unsure at all n locations
  Clone ID: PAT_MRT3847_62119C.1
cggtccggattcccgggtcgacccacgcgtccggaaggatttgttttgaagagggagggggggtcatgtgttccctttccttttcccatcaatgcttctgccttcttcctcttctcttcttcgctctttcttttggaccctttcttttccctccttctccttcacctaccatttttagggttctctctccgatttcactctctcaatctacctaccccgatcgcttctgtttttcttctccacatttcaaatctatttcgctctggataattattgcttccttcctcgtgatcttctccatacctatcaattttgaattagcgtgtgcgaatattcatcgtttgagtgcagatttcggtgggttttaggttagcaacatgtcaatgagtgagcggaagactattgacctagaacagggatgggatttcatgcagaagggcatcaccaagctcaagaacattctagaaggcttgcccgagcctcaattcagctccgaggactacatgatgctttacacgaccatctacaacatgtgcactcaaaagcctcctcatgactattcccaacaactttatgacaagtataaggagtcttttgaagagtacatcgtatcgacggtattgccttctttgagagagaagcacgatgaatttatgttgagagaacttgtgaagagatgggcaaaccataaaattatggttcggtggctttctcggttctttcattatttggatcgatactttattgctcggaggtcacttncgncccttnatgaagttgggttgacttgct

SEQ ID NO: 100894 - DNA, 264 bp, Glycine max
  unsure (1)..(264): unsure at all n locations
  Clone ID: PAT_MRT3847_6211C.1
gtatctgaaggcgattagcaaattgatnagtggttaatagaatantgcagtggttgaaacctcaangttcttgnttctttttaatatgatgacgtcattctcagcagccatacgtcaattctttatgttattttatgaataagaatataaaaaatcagtgtcaatggaaaatgcgagaatttcctccaacgtgatgtaagacttcttattgccacctgctcagaaaatgcatgctgagatacgaaaattgggcctggaaaaatt

SEQ ID NO: 100895 - DNA, 476 bp, Glycine max
  Clone ID: PAT_MRT3847_62120C.1
ctttgtgtcacactgttcacacgaacagaaacacaaacactgaaagaaaagaaaattgtttggcgcgtgatggcggcggcggcggtcaccagaaaagtcattggaaaaagagaaagggtcgctggaagatgggcagcgagcagaaaggtccactagggacagtaggtccttgatggagaaccacttttgttattccactgtgaagagtaaccgctgtgatcatggttatcaaactctcgagttaactcgctgacccttacgagtttacgagttgactcttgagtaaactctttttttagtagactctgcataaactttataaactctaagtaaactcggtagactctcgagtttaccatcgagtcaacgagttagctagttaaaaaaattaggccaaaatgtaggtaattttttttattggtttctggctatttagcattcaacataccttcatttagcgcattattctcaaatac

SEQ ID NO: 100896 - DNA, 350 bp, Glycine max
  Clone ID: PAT_MRT3847_62121C.1
ctcaaacgtttgaagaaaggggcaaggatgggacccagaatgtgtcctaaattcaatgctgtttacgctgaggtggaagctgatatggttacaatcgtcgattgaagagcctgtagctgatgaaggaaccatgctgggttttaagatggatcttaaaaatattgaacttacaatggacacagctgggagcaccattgttagaactgttctattcatagatctattggcagatttttttactaaaggaagtgttagatcgcatggcgctcatcggattaatcatctgattaaaaggatgatcaaaatgggggtcactgatagtactcctgtaacaacagcctgtgctgtga

SEQ ID NO: 100897 - DNA, 508 bp, Glycine max
  Clone ID: PAT_MRT3847_62122C.1
caaacaaactggcataaatcttcataaaaaaaaaacatttatgcaattatctggttttcttctttgcttacaggaaagggttaaatcgcccatcaccaccaaatccatggtcttaggcaaaataccccttatttttttggggtttccaacccctatgacgacttaatattgaaaatctggacggtattttttgcccattcaaaaaaactattacaggtttttcaagggaacaaaaacagccctttgggtgggtatgagtggagttcctatgtacctagctaggacctcccaacataggccatttaaggtttctccatctaatgaactgggggtcccctgtccttgtatctatgccccgaatatacaaaaatggcaaagttgatgatgctcaaagctgggaaaagccagtaaaagtaatcaaccctgccagggttgatgttttgagacagccaaaagggtgggcctttgtctaagttgccaggggcaaatttgatgatgttgtttatga

SEQ ID NO: 100898 - DNA, 584 bp, Glycine max
  Clone ID: PAT_MRT3847_62123C.1
tgaatttccatattctctttctgaacttcttctccttgttgttgtgcgtctctctctctctctctctctgttgttctttttccatggagtcggcgacgattgctggcttccctcgtcaaaccctaattcgggcgtgaaaggcgtgcgaggcaacctcatcggtggagaatggagattgtgaccggagatcggtacctggagaagctggcgcagttcgtggagaaccaggcgggtcctctgatcgaaggagccttggtgtcgaagctaaatccggcgggtctccactacgtgcaatcccggctggaggcgctgcacgagctcgaaagcctcctcgccggcgctccggtggactacctccgagcctacgtgtcggacctcggcgaccaccgcgccctggagcagctccggcggatcctgcgcctcctcacatcgctgaaaatcggttcggttctgcctcatcccatcagggaccccacgcccttgtccttcttgccgtttgggcgcttgaaggttctggagctcaggggttgcgacttgtcaacttccgccgccaaaggcttgctcgagctcaggcacacactcga

SEQ ID NO: 100899 - DNA, 232 bp, Glycine max
  Clone ID: PAT_MRT3847_62124C.1
gattagtgctcccactttcctatctggtataggacttcgtgggtagacttttctatttctctcctttctttcactctctactttccactaatccgcattaccgttcaaagtggtcttatatgaaacactcttgggcgttagtgcatatgtaagcttcgtaaattttctctggtgacaacaggtttactgttacaacactttcaacgtattaagagtatgacttcaatggtgg

SEQ ID NO: 100900 - DNA, 456 bp, Glycine max
  Clone ID: PAT_MRT3847_62125C.1
ggctcgagagaagcaacaactatactctcattgaaagactgagagagtaaagaaaaccctaaaaccctagaaattcagaattcagctgaagaagaaggaggaaccaatggacttcgacgagtacgaatacctggagaagacagtggaggaagacatagattcctccaagaagaagaaggacgtcacctcctccggctcagtctccaccaccagcttccactcccccaccagccccactcagctctcctcccactgcctcccctcctccttcatctccaccacccgcatctcctccccctgcctctcctcctgcggcatcttcaccacccgcatctcctccccctgcctcccctccttcggcatctcctgccccagccactgctcctgctgcttctactactcccttttcaccaccaccaggcaactcctgcaccagcaacgcctgcacccgcattg

SEQ ID NO: 100901 - DNA, 238 bp, Glycine max
  Clone ID: PAT_MRT3847_62126C.1
attccattggaaagttcaagaaaacgggacctgaaagtgaagcaagccatacagcatacccagcaccattgctatggcaaaaaaaaagccaccccaaataacaaaacagaacgcgacatgggctgctcccccccacggcgcgattaaaaacatgtgctgataaacaaaaaaaaattgtctcaccgaagggcccccttacccaaaattcgatgcaacgcaagggcccagctaaagaaaa

SEQ ID NO: 100902 - DNA, 320 bp, Glycine max
  Clone ID: PAT_MRT3847_62127C.1
ggctcgagcaagtatgttgttttcttcctcaaggtgcatggcacggacttatataatgaaggtcatgcgagcggcactgttccgaggaagacggtgcttatagctaatcacacgtgcttgtatccatgtcattggaaaaccgacgactagggtatatgcagcgatactaagcccagaatgatgcgtgtgagactgttatgcacgtggcctatacatgactaactatgggaatgcacgtgtagaagtggggcaagatgtctcttgctcattggggatgacgattaatgatcttggacggacttttgatgcacacctgccac

SEQ ID NO: 100903 - DNA, 270 bp, Glycine max
  Clone ID: PAT_MRT3847_62128C.1
aaacgaatcgagcgaatcggtgagtcggagttttcattttgatttagggtcgtgacaatcagtttgtagcccatgagaaattaaatgagtgaacatttacattttggaatctggaatgaactttccaaaatataatggaaggtgtaagatgcaacaatggaggtgcagggtacaattccgttagttcccattttgatgttagttatgcgttcacgagccattcgtccaagtttgaaataaaaaaaggcgcatcttatttttgttctgtga

SEQ ID NO: 100904 - DNA, 131 bp, Glycine max
  Clone ID: PAT_MRT3847_62129C.1
cttttgcttgttctcgctctccagcagtgccttgaattagagtcgctctcatgggctttctccggcgactcttcgtcggcaagaagcaccacaacaaggccccaccctcctcgtgcggcgcctccagaccc

SEQ ID NO: 100905 - DNA, 2196 bp, Glycine max
  Clone ID: PAT_MRT3847_6212C.1
ccctttcgttctattttcacaaaggaataaaccatgtgatgaaagaagttgaaattggtccctgcaagttgacacttcaaaagcttgaagctaatcgttcaaccctgtctgagatttctcatcactattgtgatcttattgagcggcaattgagtgttcctgggttatcttccactactcgtttgggtttgacacaccaagtaatgacctgggagttaattagagttcttttttctgacagagaacaaaaaggtcaagtagaatctttgggtgctgacaatgaggaagatatgatgcaggatataaaggaaatttgtcaagatgttgaccgagaagcactccctctaatgaggagggcagagtttagttattggttgcgagagagtgtttcctatcatgttcaaaatcaaataagctctctaaatgattctgattatctgcagcatatatttgtactcctgactgggcggcaactagatgaagcagtgcagctggctgtgtccaaaggagatgtgaggttggcttgtttgttaagtcaggctggtggttctactgtgaatcgctctgatattgcaaggcaacttgatatttggagaaataaaggcctggattttagtttcattgaaaaggacagattgagactctatgaattgcttgcaggaaatattcatgatgcattgcatgacgtcaaaattgactggaggaggttcttaggtttattaatgtggtacaaattaccaccaaacacttcattacccattgcttttcagacttataaacattttgttgatgagggaacagctccatatcctgttcccctttttattgatgaaggaacatcagaggaggttatcagttggaacacggataaccactttgacatttcattttatttaatgcttcttcatgccaacgaagagacaaaattcagcttctgaaggctatgtttagtgcattctcttctacccctgatccacttgattatcatatgatttggcatcaacgagcagtcttggaagctgtgggtgttatcaattctaatgatcttcatattctagacatgtcatttgtgtctcagctgttgtgtgtagggaaatgtcattgggccctatatgtggtccttcacttgccccttcgtgaagattatccatatcttcatgtaaatctgattcgggaaatattgttccaatactgtgaaacttggagttcagatgaatctcagcaacagttcattgaggatttaggcattcccacagattggatgcatgaggctttggcaatttattataattataatggggatcactcaaaagcccttgaccaatttcttcagtgtgcaaattggcagaaagctcatgctatttttataacttcagttgctcataggttattcttgcaagcaaaacatgctgagatatggaggatagcaacttccatggaggaccataaatctgaaattgaaaactgggagttgggagctggaatttatatttcattttatttgatgaggaactcacttcaggatgataccaatgctatgaccgaattggattctcttgaaagtaaaaatgctgcttgtcaggattttgtcagtcagctaaatgaatccctagctgtttggggttgcagattacctgttgatgcaagggtggtgtattcaagaatggcaggcgagatatgtgatttgctactatcaggtgtaggtgagggtgctacccgtgatgagcagtttaactgctttgacactgctttcagtgctcccattccagaagaccaacgctctggtcacttgcaggatgcagtgtatctttttaccagctatctctcagagattgctacgtaattccacaatctgccatttactgtcatatgaagtcaaatagaatagaacttcaatttgtttgcaaggcaggattttgatctgcatacgattcgtgagatttgtggctgtttttttttttttttttttgtatcttggacttgtatgaaaagtatgagatgccgctaaataacattcattaattttgcctgtatgccaactgataagtatgggataaggctttgtttgttgttgtagttaactgaatttttacatgacttgataaaagggaactgagttttgaaattgaataaattgggaattggatattccaaatttccagggggggggggggggggggggggggggtggcggcc

SEQ ID NO: 100906 - DNA, 1223 bp, Glycine max
  Clone ID: PAT_MRT3847_62130C.1
tcgtctctttcttcttctctctctctctctcacaatctcgagattggtgtgtgtgtgtgttgggggagataaagaccactgttgcccactcaggtttctcttccaagtttggattttgagggaacttacagcatctaatgaaggagagtggaggctctcttggagaagagagcacccccaccaccaacagcagtgaagaagaagaaccaattaactagttcctttccttctttctctcacccattcccatttttaacctaatagtagtgtaggtttaaagaaatatagtgtgttagagtgatggcactttctatgcacaaggactcagccaacaaccagatggactcgagcaagtatgtgaggtacacaccagagcaggttgaggctttggagagggtatatgctgaatgccctaagccgagttccttaagaaggcagcaactcatcagagagtgccccatactttccaacattgaacccaaacagatcaaagtttggtttcagaatagaaggtgtcgtgagaagcagaggaaggaagcttctcggctgcagacagtgaacagaaagctgactgcaatgaacaagcttttaatggaggaaaatgaccgtttgcagaagcaggtttctcatctggtttatgagaatggttacatgaagcaacagatacacactgcttctgctggtactaccacagacaatagctgtgagtctgtggtaatgagtggtcaaaaccaacagcaaaacccaacacctcagcatcccaatagggatgctaacaacccagctggtcttctcgatagctgaggagaccctcagagttccactggaactgctgtcgactgggtccagatgattgggatgaagcctggtccggattcttcgtacccgcacgtggcgtggcagagagcctgcagcctaagcttagagccctctacttgatagactacactctgttagctgttggagttagtactggattatgtatgctttagaaatgagtaacatctatttctaaacatatagatgtgtattttgaaaagcatgatgagttttaaatctaggatacatctattccaattttataccctttcctatatattcttaacattctctttgtgggctgcatatctctcagtatatgattatgagccttcgatgatgattcatcatcatgactaaagttgctgagatactaaaagatcgacagtcgtggtatcgtgact

SEQ ID NO: 100907 - DNA, 677 bp, Glycine max
  Clone ID: PAT_MRT3847_62131C.1
gacctacacgtacgcccacgcgtcccaatttttcgcttttgtgtttttctgcagatgtctcggtgggaagtagttgatgttcttgttcttgttcttgattcgtgaaagaagaactgaaagcatgaagctctccttctccgtcccatcatccaaaccccactcgaagcccaaagccgtctccaacaccttcgacgacaattccacctcccaaaacgacaccggcggaaccaaatacctcatcaccgaattcgacccttccaaacccgctcccacctccgtccccaaaaccctaattcccccaatccaaaaccaatggcaacccttcaagaagatgaagaatctccacctccccaccgccgccgacgtcgaatccctcgccttcgaactccacaccgacggggaccaacccgaatccgacatctcctacggcctcaacgttcgtgccgacaataatccagaaggaaacaacaaagacgacagtgatggtgctgccccacggcgtcgagttccgctggaggccacggcactgctcgccggctatggctggaaggaaggaatggggattgggaggaacgccaaggaggacgtgaaggtggtggagatcaaacggagaactgccaaggaaggattaaggtttgtctgtgatgctcctgcggcgctcggtctgagcaacaatg

SEQ ID NO: 100908 - DNA, 288 bp, Glycine max
  Clone ID: PAT_MRT3847_62132C.1
ggaataaaccccatttccatctccggtggatatggtggaaaacattctgaattccagagtaaaaatcatggaatagacaaagcacataaacacactaccaaaactgagtattcactcacacacacacacacatgcctctaaataaaactcaactggtacgaggaccgactctgagaagagagtactggggcattcactctggcaccctctgaggcaactgttggaccagataaagactgggggctgggagatacacactatgtgcacgcacgctgtgccacatgcatg

SEQ ID NO: 100909 - DNA, 211 bp, Glycine max
  Clone ID: PAT_MRT3847_62133C.1
ggagtcctcaaagatctatgcttaactcttactctgcatgatatttcactcttccgccaatcccattctctactagtggctactgtggcaaacaccccaaaaagcacaagcctggtaaaacaccaaagacacccaaaacacccgttgttaagccaccagtcaccatccctcccattaatgttcctcccgttgttcttccacacatcgtgcg

SEQ ID NO: 100910 - DNA, 131 bp, Glycine max
  Clone ID: PAT_MRT3847_62134C.1
ctctttccaatgaaattatagaattttccaatgttgtcacccttgtattcgcagctgctctaaaggatccaaccttacctactctttcatgccacgtcacagctcttccacaatctcacttcaattcaatt

SEQ ID NO: 100911 - DNA, 4228 bp, Glycine max
  unsure (1)..(4228): unsure at all n locations
  Clone ID: PAT_MRT3847_62135C.1
actcagagcacaagacagcactgtgtgtcaatggaacaaatgggtataattatagggtccaccaggtgtaaggcaaagtggcatcagacaccctggattttttgctccggaattccacttatatgagtttggttgttaaaactaagaacattttgtgttggaatatttgttcacttatatgcagtgtatttaggacactcccggtagcctagagtctggtccagagattccgcctctgcctacatagttggtgttgctgggtggggaactggtctcaaactcggaagtgactcggttggtattaagtataacacccatagagcactcgggatcaccaaaaactgccttggaacccttcaggtttttgctctgctcttgaggcccaacaaagaccacaaaatcagaatctactggaacatttaccactacgccgttggatactccaccataatcatcagcatcatcaacgtctttaaagggtttgatgcattggagacttctgtaggggatcgctacaatgactggaagcatgcttacattggcatcattgcagctntgggtggcattgctgtgcttttggaggcctacacatggatcgctgtgttgaagaggaggaactcagagaacaagacagcacatggcgtcaatggaacaaatgggtatgattctaggggacagcaggtgtaaccacgcgtccgatccacccttataataaccccccctcaccccggcttctcctcgggctcaccgcagttcattaaactcgttttttgctagaagcaggaagagaagagaaacaaacaaaccacaaaataatcaattgagctacttactataagatttagatctcccaacagagagtttcacaaaattgccaagtacccttttcaggatcaaggaagagaatcaagaaccaacaaaaggtgttgttcattgttgtagttgtttgtaactgtagcaacaggaagatggttggaaagttggttgtggtgaggcttgtgttggccatatctgtgttgagctctctccttctgacaacctcggcacagacagcatgcaagggccaggccttcaccgaaaacaaggttttcaccacatgccgtgatcttcctcacctatcctcgtacctccactggacctttgaccaggccacagggaagttggacatagccttcagacacacaggaatctctggaacagacaagtgggttgcatgggctatcaatcccagcaacaacctcaattcagctatgacgggagcacaagctctggtggctatcataccatctagcggtgccccaaatgcatatacttcttccattgcaaatcccggaaccacactggcagagggagccatctcttataatcactcaggattgacggctacccatcagagcactgaggtcaccatctatgctaccctcactcttcccagtggtaccaccactttggtccacctttggaacgatggtcctgtgtcttctggtacccctgcaatgcattctatgacttcttctaacacccaatccaaggaaagcttggatcttctttctggctccagtcaagcaggaagtgggaattcacttaggagaagaagaaatgtccatggagtcctgaatgcactgagctgggggattttgatgcccgttggtgccataatagcaaggtatttgaaggtgttcaaatctgcagaccctgcttggttttaccttcatgttacatgccaaacctctgcctacatagttggtgttgctgggtggggaactggtctcaaactcggaagtgactcggttggtattaagtataacacccatagagcactcgggatcaccctcttctgccttggaacccttcaggtttttgctctgcttttgaggcccaacaaagaccacaaaatcagaatctactggaacatttaccactatgccgttggatactccaccataatcatcagcatcatcaacgtctttaaagggtttgatgcattggagacttctgtaggggatcgctacaatgactggaagcatgcttacattggcatcattgcagctttgggtggcattgcccccaaaatcagaatcaacaggaacatttaccactacgccgttggatactccaccataatcatcagcatcatcaacgtctttaaagggtttgatgcattggagacttctgtaggggatcgctacaatgactggaagcatgcttacattggcatcattgcagctttgggtggcattgctgtgcttttggaggcctacacatggatcgttgtgttgaagaggaggaactcagagaacaagacagcacatggtgtcaatggaacaaatgggtatggttctagaggacagcaggtgtaagggaaagtggcctcatagatactggatttttggcttctgaattctacttatatgagtttggttgttaaaacttaaacactttctgtttgtatatttgttcacttatatggagtgtatttaggacactcccagtagcttagagtctggttttgatataaaattctttcataggatagacagtgagttcctgggacatggttttcggaggataccttgtatcgattttcttcatatttgtatttattgtttacgtttgtcttactctttctccataccttccagtttctaacatcttggcttgtattggtgaccttgtctcaagtttcgacgtctactggctggtattcagcttaccacttcttcactccccccatccaccccagcctcccctccgccttttcaggcctttgatgcactcgggaggccctcccttggccgcagaagcagtgtccacggggtcctgtaccccctcgccggggggttctcctccccgttcgtccccttcttccacggcttttgaggggttcatgcctgcgggccctctgggttttaccttcatgttacatgccaaacctctgcctacatagttggtgttgctgggtcggggtcgggtctcgtgcgccgtggggtcgccgttgctgtgttgagctctccccttctgccctccgcggcaccctctgctgcctggggcccggccagccccgtgcgctgcgtttgctccccatcccagcacccacctcaactatcctctgacccccgcaccaccactccccgggatactcccaccctagccctcagcatcatccacacactgctttctttcgaactcccagcaggacgccaggcgagacaaacaccccccacaatcaccaatcagccacggcgccaccacaggcacctctcgctcacaaactatgctcacggtgcccgccttccccgtacctcctccttgcacaacctctggtccccatgctctgagctccccctcccttcactggaccttcactggaaccacacccagaggaccacagaggttgtccatctcaggtcactctccgccacatctctgtagcagccctgtgcttcccatcccctcaccatcctcacctctcctttggcagggcgatcagggcaagaaacgaatcaaactaatcacataacaaaaacttgaatagagctaaaaacaacaaaaaaaaaaataaaaaaaaaaaaacaaacaaacaaataaatcacttactaaaagatagagaaacaaaaacacaaagaaccataaaattgctaaataaataattatagtaccaacaataaggtgaagaactttgtaatggtggttttttttgtttacatcttttgtttgtttgtctagttgtttatggttagctagatgtttagcttgttggtgatgttggtcttgtctgtgaaaatgggcaagaatctagagctagcagcagtaaggaggggggggtggctttgaactgacgtgtttgtgcgcatattgtgcttccaagagcttggttgttaaaacttataacattttctgtttgaatatttgttcacttatatggagtgtatttaggacactcccggtagcttagagtctggttttgaaataaaattctttcataggataaccagtgagttcctggggcatggtctccccaggatcccttgtattgattttcttcatatttgcatttattgtttacgtttatcttactctttctccaaaccttccagtttcaaatatcttggcttgttatgttatctctctggattagatgaaggtattcgattcttctttgttcctttcggctgggggcaacaacctagtggattttattgcatgtacaatttggtaaagttcttcc

SEQ ID NO: 100912 - DNA, 426 bp, Glycine max
  Clone ID: PAT_MRT3847_62136C.1
cccacgcgtccgtaaaattgatgtgaagtaaatattgtggggaaaaagtatgggcttggtttaagtggcccaataatgttatgctctgaaaccaaaaattggaggcccaacaatgacctggttttgcatcgttcctgttctgttcttcaccgcgcctcggtttccattccttcttcttcctttgtgtttctttgcgttcattataccattcccatggctcaataatcgttgctttgttcgttgggttcaagaaaaacgctcaaaatttcaaccatggctgcaacccttacttcaagatgttctcttctgggccgttctttgcttggtggattaaggaataataacttgtctggttcattaacatcgcatgagataaaatgcaccaatttcttatcctagcaacatcacgttcatacagattatgac

SEQ ID NO: 100913 - DNA, 1249 bp, Glycine max
  unsure (1)..(1249): unsure at all n locations
  Clone ID: PAT_MRT3847_62137C.1
cggctacccatcagaacactgaggtcaccatctatgctaccctcactcttcccagtggtaccaccactttggtccacctttggaacgatggtcctgtgtcttctggtacccctgcaatgcatgctatgacttcttctaacacccaatccaaggaaagcttggatcttctttctggctccagtcaagcaggaagtgggaattcacttaggagaagaagaaatgtaagtacctgttattctacttgcttttttttttcgacaaatgttggttttgttagagaggggattgaacccaccacctttcccttcccccttaaccatccaatccaccttatatctccctgcatggtttccttggcatcaaaccataagggatgtttggaaattcgttttcttcttttttagggagattgattgaagagtgtatgttgatttgttcaggtccatggagtcctgaatgcactgagctgggggattttgatgcccgttggtgccataatagcaaggtatttgaaggtgttcaaatctgcagaccctgcttggttttaccttcatgttacatgccaaacctctgcctacatagttggtgttgctgggtggggaactggtctcaaactcggaagtgactcggttggtattaagtataacacccatagagcactcgggatcaccctcttctgccttggaacccttcaggtttttgctctgcttttgaggcccaacaaagaccacaaaatcagaatctactggaacatttaccactacgccgttggatactccaccataatcatcagtatcatcaacgtctttaaagggtttgatgcattggagacttctgtaggggatcgctacaatgactggaagcatgcttacattggcatcattgcagctttgggtggcattgctgtgcttttggaggcctacacatggattgttgtgttgaagaggaggaactcagagaacaagacagcacatggtgtcaatggaacaaatgggtatggttctagaggacagcaggtgtaagggaaagtggcctcatagatactggatttttggcttctgaattctacttatatgagtttggttgttaaaacttaaacactttctgtttgtatatttgttcacttatatggagtgtatttaggacactcccagtagcttagagtctggttttgatataaaattctttcataggatagacagtgagttcctgggacatggttttcagaggatacctntgatcgattttc

SEQ ID NO: 100914 - DNA, 402 bp, Glycine max
  Clone ID: PAT_MRT3847_62138C.1
ggagttaacccccaaaaaaaaacgcaggaattaccctttcctaaattttggggaaccgggcagaaccccccctaaaaaaaaccatgaaaaaaccaggggggaaaaaaaaaccagggtttaaatttttgggaggcccaaaaaaaaaaaaaaattaaacaaaaaaaaaaaaaaaaaaagggaggaaatacccccaaaagggggggaagggggttaaagccccaggcaaaaaaaaccctcccggtttaaaagcaagttaaaggctttcaattcaagaagcagaaaaaaatggcccattttttccaaaaaaaagacttaccctcttttcccaccaggcgtacccccccccttttggcactgcatgcccctgggcaaaaaaaaaccgcaacaaattccgggaaaaac

SEQ ID NO: 100915 - DNA, 1276 bp, Glycine max
  unsure (1)..(1276): unsure at all n locations
  Clone ID: PAT_MRT3847_62139C.1
ctcaggtgaagaaaccagagacaatcacatgaaccctaacctaaacccctgagaaattattgaaattgatgcatggcggaactgaacactctggtggtgcgaaagccatgttttggccttccaaccggttgcactcaatccctctctgcctacatttatctcaaattcgcccaaattcccttccaattggacttccacctcaacaaccctcattctgatcaaattccttactttgaggttggtgactctgtggcttataataatgagaaggaggggatcattgagtgtttgaagaaagatgttggggttgttgatttggatagtggggtttcttcactccctgagtggatttcaactaaagcaattctcaccacttggcttgctgatgcacttacctatgaactctggctgggatgtgaaggctcctctgcttatagtatctattaccctgatcttccttggccattggggaagattctctcttggaagaaagctctttgggtgaagctgaaacatgggataactaatgacaatgctgaagtgaaaaaagaagagatttatgagagagcaaagtctgcatatgatgcgctgtcaagttgcttaggtgaacagaattacttatttgagaacaggccatcaagcttggatgctatttttcttgcacatggactagttgttcttcatgctttacctgaatcttcaatgttgcgaatcaagttttcagagcatgctaatttagttagatatgtgcaacaatgtaagacagaacttatagatgcagctccatctccttcctctgccccacaatttcatactgatgcaacatcatctgcatctaaaagtcattcaagttcaaagccgaagagtaggcccagaaggccgtcaacacgggggcagaataccttctggtggcacgcctggttgctggtggtggctccctcgctcgcaggtcttctgttcctcacgctgatgtcgtctttggtggtggcggtggtggtgtttgctgatgatgatggtagttatgattacgatgaatgaaattgcattcatttgtccatcctcctcaattcaaggtcctcccggcctccgtcccgatgcaaacttgggtctcttgctctctgtctctatgcttcattggtgtattgtcgtgctttctactgtttgctggttcgtgaggcaaatcatggattcacgtgtgtggatcagtttcgggttgtcacgtgaggcacatcatggaatgagttctttgaatcannnncngatttttgatnnnacg

SEQ ID NO: 100916 - DNA, 311 bp, Glycine max
  Clone ID: PAT_MRT3847_6213C.1
gctgatatgagatcgttgctctcagttatatgtttcatgtggcactttctttctttctttcttgtcatctgccatgatctaatatcatatgttttatgcacttcttgctgtattctctcatcaagttgagaatgtgctcaaattcattgagaagtggactgcttacttcatgagggcttggggcttaatgccactaccatattggccatggacagtagtcattgcaacaaacatattgtagttatcagaattaaaaggtatttgcttcatacatctacctagtaattgtcccgatgagattccttacatcc

SEQ ID NO: 100917 - DNA, 245 bp, Glycine max
  Clone ID: PAT_MRT3847_62140C.1
cttcaactgctccattctcaccttcggtccccacgccgtctactatcctgccacgcgctcatctgaatatgatacactcggaacctctatcaaagtcgctgctgcttatctagcaacggcattagtgaagattatttggctagctacttctatcaaggtttcggagagagatagatatgatccggatcaggagtttgtgaaggcattaacaggctgaatagatgtcgttgggctttataccgtct

SEQ ID NO: 100918 - DNA, 188 bp, Glycine max
  Clone ID: PAT_MRT3847_62141C.1
aatactccttgaaaaacacaaattttcagattacaactgaagtgcagaagtttgagtagggcgaagcttacgctcgctatcacgctacctcataagaatctaatattgtcacctgacatgagtgaattcatcgaaaggtaccaactttccaaacttataaaaccatctcgttgcatatcttaatacac

SEQ ID NO: 100919 - DNA, 992 bp, Glycine max
  Clone ID: PAT_MRT3847_62142C.1
tagggaatttggccctcgaggccaagaattcaagccctggatttatgaacagtgattactctgaagctcactctgtgacatctgaagtgtcccaccttgcctacacagacccactactgggtgaaatgtcgataatagaaaacatgaatgaagaagctttcatagatctactaccaatagaaatggagagaattgaaaaggagaaagaagaagccttcaagatacatgagcaaaagatattgcagctccaatctgactatgaaaaggaggttgaaaagttaagtgtaaagtacaagatgttgcttcagaatgttaatactgaagtagctctaaaaagaacggaacttgagacacaatgtgaattagtgttaaggaacaaggtattagctcaagtttggacccataatcttgatagttgtgaaggagatgttgtacagtgctcagaacaagaggcaatgcctagttctcataagactgctcaagactaaattcaccgaacgtcctctcctacggtgatgattaatccttggaccaccattccagaaatcaaccccgttagagcatgctttgatccacatgattcagttgtgcaacaatcatgatggctatgatttactagccctgtctccaccgagagactctgctgctgcttcatcttattcagtacctctcattccaaatcaatggagtgggatatcagaccagcatttgccacccggttaaactttttttttaaaggcacttgactgatgtacttatataccaaattctgaaccatggtggtgaaatgaatgtaaatagttaccttaaagacagtgaaagagaaaaacaaaatgaaagatagtgtagtctataagtgaacaagattgaaaaaaaagtttctattgtgtgctcaagtacatgataagaaatagaaagtagatagttattattagaaaatgattttattatattaaaaatataaaaatatttgaatggatgctttgttaagt

SEQ ID NO: 100920 - DNA, 276 bp, Glycine max
  Clone ID: PAT_MRT3847_62143C.1
cgctgtgcgaggagatgggattttccccgatgaggtgtctattcagattcttgcaaggatgcctgtgaagtggcttttgagggtcatatccgtgagcaaactgtgagataagtcggctctgaataactattctatacaactctacatgagtctaagatgtaccgcacgatcctagaggagatttcagattctttcgagtccaaaactaacttaatctgtggagaccattcgaggcgggtatacgactgctcactgaattgatcgaatgacagagtc

SEQ ID NO: 100921 - DNA, 530 bp, Glycine max
  unsure (1)..(530): unsure at all n locations
  Clone ID: PAT_MRT3847_62144C.1
tgggggacatagcataattgaaattaaagttacaatattgaaccaggtatggcctctcactacagttgcatcatcttggcttttgtcattgctatttccttttcaagcattgacatggcattagcatcacgcaatctccttcagacaacattgccaactttgcctcagggaaatgtccctcctttgcctgttttcccaaatcttccactgccacctttttccttccccaatattcctattcctaagatccccaacattcctaacattccctcaaaccccataattccaaccattcctaccatccctttcctctctccaccaccttcaaccaccaccaccccctgaatctcccctgcttcacttggacacattcataagcaataattgtctctactttggacttggatgctaccttccagtgatgtttaagccatatactatacacagattattttacttatatgttgnttatcttctgttggagtctttttttcttttcaatggacttcttcttggcctttaaaaaaaaa

SEQ ID NO: 100922 - DNA, 662 bp, Glycine max
  Clone ID: PAT_MRT3847_62145C.1
aggacattgaattgttcatcactgtccttactttcatcaggaattccttttgttttatagttcacccaacaattatgtatatatccatgttggttttggtacataattacaggaagaaatctttacctcagtcccatttacaattactgagatctagaactgcagcatgtcactactcactaatcttgagatatttacggtatctctaactcaacattgtgtttcttttttttaaagtattctaaagatgagactgagagtctctataaaataaacctcttttggtgagagattaatcagtcatttaactgtagctttttgaaatgcatggcttctcaattggagtatactttcttattttcaattttcagaattgtgctttattaaaattgcccgactcaagaaagggtgaagggggaaccaaaaaccattatacaaataggttctaaatggtaatccatacaatagaaagtgtgatgtgtacagttttggcatatgcttatgggagatatactgctgtgacatgccatatcctgaccttaatttctcagaagtgacatcagccgttgtacgacagaatttgaggccagagattccgcgatgttgtcctagcgctctggcaaaagtgatgaaaagatgctgggatgcgaatcctgacaaga

SEQ ID NO: 100923 - DNA, 929 bp, Glycine max
  Clone ID: PAT_MRT3847_62146C.1
gatattacctttttttgaagtttcaggtgaacataatattatctttggcattcggttaggaaaattcatatatatttagaggatgtctaaaatatttaagcctatttaattttagtattttgattcgttcttgttaaaaacgcccccatccccttcgtttcccatttccgaggttgttgccggccacccaaacccaattcacatcattatcttttttctttcttttttcttgtgtttgtgtgtttcttcaaaattcacaattacaatcctcacaatcctcctcccttcatttctcaaattcccaatatttcaccaattcaaaacccttcatcattgatcttttcactcttttcttctttgctcgcaacattcattcacaatttgggtgctccttctgtttcttctcctcaccattggattggataatctgcaatttcttcaattgacaaaagcaacgggagttgggttccaacggaattatggttttcctcattgcgatgtttagggaagccagctatgtcatttgtctttttgtttgagaaagctaatttgtgatttttaatggaaaagaaaagattagatgactatgaaccaggtcctgttccttcaccaagagcattagatagatttgggtttgtaaaacaggatgttaatacttctgaaggcttattcaagaatagagcagcctatgagtatgagagatatagggaggagagaagggttagaaaatggaggaggggccttgttaggtggtggcagtgactagaagcattatttaaggagaaaactcatgttgttaaaggcgtataaggaaaggaagtcctgatgcttaagactgcatatatctgcatgtatgctcagacctgctacatctgctactcttcctcattgcgatgtttagggaagccagctatgtcatttgtcttttg

SEQ ID NO: 100924 - DNA, 2563 bp, Glycine max
  Clone ID: PAT_MRT3847_62147C.1
cccacgcgtccggccaaaaattggaatgaggagaaatgaggctcgaagaaaaaaccaaatttgcttaacctaagcgaccatgctataaggagcaaacatctaaggtgtgtgtcttaattgcatttgcatagcatggacatcaaaacctttgctttcgccccatcttctccgccgttaccggtaatcgccgccgccaagctcgccggaatctctccctcgattgatacctctctctctcctgactcacctcccgcatttatcttctccgatgggctcaagttgcatggagcatatgctcttctacgttatatcggccgagttgccagccttcccaatttctatgggcaaaatgcattagaatctagccagattgatgaatggctggactatgctcctatcctctcatctggccctgcttttgagaatgcatgcaaatatatagatgagtacctggagaagtgtactctgttgggtgggtattcactgtcaattgcagacctagcaatctgggcaggtcttgcaggttctggaaagagatgggaaagtctaaggaagtcaaagaaatatccaaatcttgcacgatggttcaattcaatagtggcagaacatggtactgtgttaaatgaagtcacatcagtgtatgctggcaaaaaaggattgggagaaccaacagcaaccaagtcaaaagaccagtcagtaaacactgataaagtgaagaaggtgaatggggatgtatctgagaacaacaaaggaggaagcaaaccatcagcagaaatagatcttccagatgctgaagttggaaaagttcgcttgcgatttgcccctgaaccaagtggttatcttcatattggacactcaaaagcagctttgttgaacaaatattttgctgagcgatacaagggtcaggttattgtgcgttttgatgataccaatcctgctaaagaaagcaatgaatttgtggacaaccttattaaagatattgatacattgggtatcaaatatgaacaaattacatatacgtcagattacttccctgagttgatggagatggctgaaaaattaattcgccagggtaaagcatatgttgatgacacaccacgtgaacaaatgcaaaaagagagaatggatggcatagattctaaatgcagaaataatagtgtagaggagaatctaaaattgtggaaggaaatgattgcaggaacagagaggggcttgcagtgttgtgtccgtggcaagttggatatgcaggacccaaacaaatcacttagagatcctgtttattatcgttgcaatccaatgccccatcatagaattggatccaagtataaagtgtatccaacttatgattttgcttgtccatatgttgattctatagaaggaatcacgcatgcccttcgatctagtgaataccatgatcgcaatgcccagtattactggattcaagaggacatgggtcttagaaaagttcttatctacgaatttagccggttgaatatggtctacactcttctgagcaaacgaaagcttttgtggtttgtacaaaatgggaaagttgatggatgggatgatgcacgatttcctacagtgcaaggaattgtgcgtagaggtttgaaaattgaagccctgatacagtttattgttgagcagggggcgtccaaaaatctcaatctcatggaatgggacaagctctggaccattaataagaagattattgaccctgtctgtcctagacacactgctgtcattgcagacagacgtgttttgttgactctcactgatggtcctgagaaaccttttgtccgcatcatacctcggcacaagaaatatgaagctgccggagataaagctacaacatatactaaaaggatatggcttgaccttgctgatgcagtgtctttatcagcaggtgaggaagtaacattgatggattggggaaatgccatagtgaaggaaatagagaaggaccaagatggaaatatcatagggttgagtggtgttttgcatcttgaaggatctgtgaagaccacaaaattgaaactcacttggctacctgagatagatgaactagttagcctgacattagtggagtttgattatctaattacaaagaaaaagcttgaagaaggggaggatttcattgatgtggttaacccatgtaccaaaaaggagactttagcttatggagactccaacatgcgaaatcttcagcgtggagatttattgcaactggagagaaagggatatttcaggtgtgatttacccttcattcgcccctcacaaccaatcgtgctatatgcaatccctgatggcaggcaacagacaagtttgaagtaatctttttggtcttgaaactgtttgggccacattcacactcagaatagttggtaatggtgataacaagtttgtggaactacttttatgtttaccatcacattgtactgtttatatgcaaaccattatatctggattttttactagtaattggaaaattcgtctttgttatttttgggacaaaaaaaaataaccttaacgaaaatgctattgattttatgtttccttgagc

SEQ ID NO: 100925 - DNA, 772 bp, Glycine max
  Clone ID: PAT_MRT3847_62148C.1
ccacgcgtccgataaatcaagtccggaactcccctctctccccctctctccgctgaaaacgagcaacaacaccttgcatgcattctacttctcttagttctccccttaaccaaaccaaaaccacttgatctattctttttcatttaatcgaaaaataatagtaactataatatcaccaccacaccgacatggagaagaagtagctgtccgttcaaagagactagttcttcattttgcaccatttcattcatatatctcaatggctcgtgctactaactggctttcgttctctctctccccaatggaaatgctccgaacctccgaacctcagttccttcaatacgacgccgcttccgctacttcctcacatcactactacctcgacaacttgtacaccaacgggtggggcaacgggagcctcaagtttgagcagaatctcaaccacagtgacgtgagttttgttgaatcttcgtcgcagagcgtcggccacgtgccgccgccgccgccgaagctggaggattttctcggcgactcctccgccgtgatgcgttactccgacagccagacggagacgcaggactcgtcgctgacgcacatctacgaccaccaccaccaccaccaccaccaccacggttctacttcgtacttcggcggtgaccagcaggatctcaaggccattactggatttcaagctttttcgaccaactccgggtcccgagttgatgattctgcattcatcggaaaagcgcaggccagcgagttcgggactcac

SEQ ID NO: 100926 - DNA, 162 bp, Glycine max
  Clone ID: PAT_MRT3847_62149C.1
gtgatggcttacttatgccgaattcaccaaatctcgtttgtattcgaacggcacataatttttgttccacattagctaggatttgaaaacttgctatgggaaaattgaactacttaaaaagaaaaaaaaaataaaaacatagcaagatataaactggccgtg

SEQ ID NO: 100927 - DNA, 470 bp, Glycine max
  Clone ID: PAT_MRT3847_6214C.1
aattcggctcgagcggctgcgagaagacgacagaaggggacccgcgaatcagacatggacctagatttgcggaaaagtggccatggcattggcagcaatgcatcactgcaatccaatcttgtgctgtattcttactgtcatagctcttgctcatggcgtattcgatttgctttatccctcaaagggatcccatatgagtacaaagcagtggatctttcaaaaggagagcagtacagtccagaattcgagagattgaatcctctgcactatgttccagtattggttgatgataatgtggtggtttcagactcttatgcaatatttctgcatttggaggaaaaatatactcagaagccactgttgccagttgatcctcagcttaaagctctcaatcttcaggtagctagtattattcactccagtatacagcctcttcatatgcttaatgttctgaaagatatggagaaaat

SEQ ID NO: 100928 - DNA, 389 bp, Glycine max
  unsure (1)..(389): unsure at all n locations
  Clone ID: PAT_MRT3847_62150C.1
aaaaaacgggagnnanannangnaaaaaaaaagcgnnaannnnacanccacacccccaaaagcaacaaaaagggaaanaaaaccccaagcnaaaaaggcgaaacaaancgggggcaacagaaaacccggggggaaacacatttttttttttcgaancaagagcgggggaaccgggggacggccggggggccgncagagaccgcccccccggccaaccccccaggggggaccaaacgcaccggcggngggancccccgggaagaaaagggaggccncnggggagaccnagccaancgcgacgacgccggggggagcnncncgaagagggcggggaggaaacggggcaggaaccccagggcccngcnggggannccganggcggggggaac

SEQ ID NO: 100929 - DNA, 1745 bp, Glycine max
  Clone ID: PAT_MRT3847_62151C.1
ccacgcgtccggggactttggtgcatttctggctgtcattaaactttttgactcttctacagtttatttgggtggatatgataaggaagaaaaggccgctagatcttatgatttggcagctctgaagtactggggtcccactgctaccaccaacttccctgtttccaattattcaaaggaagtggaggagatgaaacatgtaacaaagcaggaatttatcgcatcattgcgaaggaaaagtagtggtttctccaggggagcttccatatacagaggtgttacaaggcatcatcaacagggtaggtggcaagcaagaattggccgtgtagctggaaacaaagatctttacttgggaacattcgcaaccgaggaggaagcagcagaggcatatgatattgcagccattaagttcagaggtgcaaacgcggtaaccaactttgagatgaatagatatgatgtggaagctataatgaagagttctcttccagtgggtggggcagcaaagcgcttgaagctttcccttgaatcagagcagaaagctcttcctgtgagcagcagcagcagcagcaatcaacagcagaatccacagtgtggaaacgtgagtgccagcatcaatttctcatccattcatcagccaattgcttctatcccttgtggaattccctttgattcaacaacagcatattatcatcacaaccttttccaacattttcaccctaccaacgctggcacagcagcgtctgctgttacttctgccaatgcaaatgcactaactgcactgccaccaacagcagcagctgagttctttatttggcctcatcagtcttattgatctaatcaaaactagaaatcatcttttgttaatttcctggttatgctaacaaatcaaaagctatagtctctggcacagtttagctgacccccctcctctattattaacccctttaggctgctaaaaaagaaaaaaaatgaggtttttgagttggctagtcttagttactgtaggaagctggatatgtaactaactgctcaagaaatgagaaatatttcgtgcatcataattttgcacaagaatttccttaatggcttatagcttgcagtggagtatgaccgcttttgtttaaaaataaaaaaaaaaaaaagttttaaattacagtttataacattcgcttgacactttcccttgaatcagagcagaaagctcctcctgtgaacagcagcagtcagcagcagaatccacagtgtggtaacgtgagtggcagcatcaatttctcagccattcatcagccaattgcttcaatcccttgtggaattccgtttgattcaacaacagcatattatcctcacaaccttttccaacattttcaccctaccaacgctggtgcagcagcgtctgctgttacttctgccaatgcaaccgcactaactgcactgccagcatcagcagcaactgagttctttatttggcctcatcagtcttattgatctaatcaaaactagaatcaaaatctttttctaatttcctggttatgctaacaaatcaaacgccatagtctctggcacagtttagctgaccccccctcctctattattaacctaaactaaaaaaggaaaaagaaaaagaaaaaaaagaggaggtttttgagttggctagtcttggttacagtaggaagctggatatgtaactaactgcttaagaaatgagaaatatttcgtgcatcataattttgcacaagaatttcctc

SEQ ID NO: 100930 - DNA, 2116 bp, Glycine max
  Clone ID: PAT_MRT3847_62152C.1
ccacgcgtccgtataaatcaactcatcaccttctctttctctctctcccacgcgcccgctcaaaaccagcaaccccaccttgcatgcattcaagtacttcttctttgtaaccaaactaaaacctcttgatttattgtttcatttaatcaaatagtagtaataatatcaccaccgcaccgacatggagtagaagtagctcttcattcaaagagtaacgcctctccagagactagtacttcattttgcaccattgatatctcaaatggctcgtgcttcgactaactggctatcgttctctctctcccccatggaaatgctccgaacccccgaacctcagttcgttcaatacgacgccgcttccgacacttcctcgcatcactactacctcgacaacttgtacaccaacgggtgggggaacgggagcctcaagtttgagcagaatctgaaccacagcgacgtgagtttcgttgaatcgtcgtcgcagagcgtcagccacgcgccgccgaagctggaggattttctcggcgactcctccgctgttatgcgttactccgacagccagacggagacgcaggactcgtcgctgacgcacatctacgaccaccaccaccaccaccaccaccaccaccaccacggttcttctgcgtacttcggcggtgaccaccaggatctcaaggccattactggattccaagctttttcgactaactctggctccgaggttgatgattctgcatccatcggaaaagcgcaggccagcgagttcgggactcactctattgagtcctccggcaacgagttcgccgcgttctccggtggcacaaccggaaccttgtcgctcgccgttgcactgagctccgagaaggccgttgtcgcggcggagtccaatagctcgaagaagatcgtggataccttcggccagcggacttctatttacagaggtgttactaggcaccgatggacaggaagatatgaagcgcatctatgggacaatagttgcagaagggagggtcaagccagaaaagggcgtcaagtttatttgggtggatatgataaggaagaaaaggccgcgagagcttatgatttggcagctctaaagtactggggtcccactgctaccaccaacttccctgtttccaattattcgaaggaagtggaggagatgaaacatgtaacaaagcaagaatttatcgcatcattgcggaggaaaagtagtggtttctccaggggagcttccatatacagaggtgttacaaggcatcatcaacagggtaggtggcaagcaagaattggccgtgtagctggaaacaaagatttatacttgggaacattcgcaaccgaggaggaagcagcagaggcatatgatattgcagccataaagttcagaggtgcaaacgcggtaaccaactttgagatgaatagatatgatgtggaagctataatgaagagttctcttccagtgggtggggcagcaaaacgcttgaggctttcccttgaatcagagcagaaagctcctcctgtgaacagcagcagtcagcagcagaatccacagtgtggtaacgtgagtggtagcatcaatttctcagccattcatcagccaattgcttcaatcccttgtggaattccgtttgattcaacaacagcatattatcctcacaaccttttccaacattttcaccctaccaacgctggtgcagcagcgtctgctgttacttctgccaatgcaaccgcactaactgcactgccagcatcagcagcaactgagttctttatttggcctcatcagtcttattgatctaatcaaaactagaatcaaaatctttttctaatttcctggttatgctaacaaatcaaacgccatagtctctggcacagtttagctgaccccccctcctctattattaacctaaactaaaaaaggaaaaagaaaaagaaaaaaaagaggaggtttttgagttggctagtcttggttacagtaggaagctggatatgtaactaactgcttaagaaatgagaaatatttcgtgcatcataattttgcacaagaatttcctcaatggcttagcttgcagcattagtatgatcgcttttgtttaaaaaaaaaaaaaaaaaaaaa

SEQ ID NO: 100931 - DNA, 386 bp, Glycine max
  unsure (1)..(386): unsure at all n locations
  Clone ID: PAT_MRT3847_62153C.1
gagtgtccttaacaggagtagttgtcattgtataatagtaataataaatctaattaattaaaaaaataaaagacatattaaaaaatcataatattttttatgaaatttaaaatattaattgtatttgttaatacttgtatcaaaatcttaaactatcttataaaattgaatagagagagtatactactccaaacttaaatttaattaaanaaatttaatcaatttttatgttaattaaacaaatcggtttatatcgttaattttactatttgcatttaagaaatttttttcttctaaattagtaactttcattaaaatctgatattaataataaaaaaatgacacattaaaaatagaatctcaaataatanaaaatatttttttta

SEQ ID NO: 100932 - DNA, 371 bp, Glycine max
  unsure (1)..(371): unsure at all n locations
  Clone ID: PAT_MRT3847_62154C.1
gattctgccagaagatgtgaactggctgggcactttattgttaatgactaaattctggcattagaacttgattatgagtatttttgatgaaccacaagaggttcttgcccaacatggtattgtcagaagaggctttcattataaaatcgcgcatgaaacaccccttactatctctactattanaaaacacatacattttcattgccagagtttctcctctcaagtgagggcacgaaagaacaaacttactcctgcggaggaatgtcagttctttaagnccttaattacaaataacaattgtccggaccttgctcaccatttctgtggagatcactctttactctggtgacgacaatgatggtgaaattctt

SEQ ID NO: 100933 - DNA, 196 bp, Glycine max
  Clone ID: PAT_MRT3847_62155C.1
caataaccaacctacctaacaccatctcaacttattgccttcctctctcatctccatgcgcttagtctacttttacatacactgcagctccctccttccaccctacgatcacccatcccaccactctcacaacaccaaacccatactccaacatgacaacctttcctactaccacaataaccacctccatcaacac

SEQ ID NO: 100934 - DNA, 1059 bp, Glycine max
  Clone ID: PAT_MRT3847_62156C.1
tttggccatcaaccaaaaacaaagcacaatgattctgagatttgcagcagctgcagcttctgcttctgcttctgtctcacgcatatcaaaaccccataacccaccattcctttcacttccacaccccaacactctcaaattccataaccaaccttctcataatccacgcaacaacgttcttctgccacttccctcacggtctcaacgctgctacattcgagccataagtgacgcaactgtggaacctgaaatttctaagaaagaacaaaacgagtcacctaaagattggaagattaaaatgctctatgacggagattgccccctctgcatgcgcgaggtgaatatgctaagagagaggaataagagttacggcacaatcaagttcgttgatataggttctgatgattactctcccgaggagaatcaaggccttgactacgaaactgttatgggaagaattcatgctattctctcagatggatctgtggttacagatgttgaagcatttaggagattatacgaacatgttggtcttgggtgggtttatgccattacaaaatatgaaccaattgcaaaaattgctgattccatatatggtgtttgggctaaataccgtcttcaaataacagggtgaagtattataaaacagcaatgcttacaacatgtaaatttccttaatatctgactccaaaaggctcgttatgtgatttgtttccatatttgatccccatcctttgaagcaggtcttttatggtctcatttacaaaaagaatccaacatagattagtgtcacattttacgtctttgtccgcaatagcatatgcatttgattaccgttttccaattttgctgcaatgcatctggcataaaaatgtgtgtaaataaaatatatttgtatttaaccctgtagtctccatgaagtcttagctgacccttcaagattgtacaagttacatgacaccagcatctgctgaattaccagcatttatgctttggtacttatcacaactgagatggcagggacatattaagaagcttatttttcaaatacatatattt

SEQ ID NO: 100935 - DNA, 508 bp, Glycine max
  Clone ID: PAT_MRT3847_62157C.1
gacctatacctgctgatctgctcttgctcgaccgatgtactcgtacataggctacagtatgtctccaacagaaatagttatccgcatgcacacactctacatggtaacatacccatggatgatcaaggtcggcgctaattggttatgcttaaggttaccgataattattaagctaatattgatggactttgactctgtgcgcaattgactattactgccgttatgcagcaacagcaataggactcgttgcggaggtagggataagctacaggctaatagcgaacaatcttactacacaacacgacgccgacgcttaggtgagatccatcttagcgactatggtgaatctctacgacccagatgcacgcgttacgaaagcgttcgagaacaccgcagagaagtaaacggtaggtctgagaaacaagtacttgtctatagtgaaagacccgaagcaagcacaggcttggattaaagacaacctgctgccctacctgagagccgccaaaat

SEQ ID NO: 100936 - DNA, 480 bp, Glycine max
  Clone ID: PAT_MRT3847_62158C.1
ggctcgagttcataatctcagttctcccaatccaaacattaaaatagtttcagctccaaggcctcgcactctctaaacataatggccaattcgaagcttgggttcatggtcagtgctatttttctttccttaatgatttttcatggaaccttttcagcttcagggaaggccactgaaattggacataaaggagcaagagtcacaacccacaaaaacattatcgaagaaatagctaaagtggcagaatatactgccacgtggcatcgtcacaccttagaattcgaagcttcgacagcacctgaaaccaggaatccacaatatgacatggttacaaacgatttccaaccaacggatccagggcacagtcccggtgccggccattcctccccacacgctaacatagtttcaatttcaaagccataaacctatattattcttatatgtccatactcaataaccagtaatatgcattttttactt

SEQ ID NO: 100937 - DNA, 259 bp, Glycine max
  Clone ID: PAT_MRT3847_62159C.1
atataaaagtagtttcactagttacacggttcttgctagttgggcagcgcttgtaacctgtaatgttggcacacacacacatggacggagatagcaatgattaatcacttccaacaggggctgacagcattgaagtgaccattctgaacctaacagaatccaaacgtatcctttattcatgtaaattaggttatcaaccccataacaaaaccaccccaatgggtccagcaaaacagtgcctcatttccatgacttgcac

SEQ ID NO: 100938 - DNA, 408 bp, Glycine max
  Clone ID: PAT_MRT3847_6215C.1
gcacgagggggagggttgctcgtcggaattcgccgcaccacgctcttctctcctgggaagggtggcgatgtcggaacgaggatcaaggtggatgaggaggaggaagaggaagaggaggtgagagaggttttctcgagggacgggagggggaagctgtcggcgaaggtggttgcggaggcggcggaactggcggcgaggagcatgccgttcgaggttgtttattatccgaaaggtgggtggtcggagtttgtggtgaagactgaggctgtgaatgaagcaatgagtgttgagtggagccacggaatgaaagtgaagatcgctacggagacagatgattcgtccagggtgtcgtggtgtcagggtacggttggcaaccaggaaaatgtgtgtctatttcatttcaactgt

SEQ ID NO: 100939 - DNA, 379 bp, Glycine max
  Clone ID: PAT_MRT3847_62160C.1
ctcaaaactttgcgatggcttccaataagcgggaatttaaatcccaagggatgggatagccccctcttccttttaaaaaaaaaataaacactttctatggatcctaaaactttgggggaaacaagtttttttgcacaatgaaaaacaaaaacctgtgtcagggaaaaaattctttaaaaattgaactcaaggttttttggtaccctaggatccctcctggggaagctcgaatttaggattttgctccacaaaacctcggagccgttggtacacaattgatgcgccctaataaaaaccccagcggttaaaccccctatgattttttttttatccccgatcgccttttcaaaaaaaagcaccaagttcttcttttcccccc

SEQ ID NO: 100940 - DNA, 353 bp, Glycine max
  Clone ID: PAT_MRT3847_62161C.1
gctgaatgaatgtttgctttattcacgctatgaaacgtgtctttccactgatgatgctgggccgatcgctgaaaagttatgactaacgaaccttttttgggattgagacttgcctaggactagagaagggttctacacgttcaaaggatcattgatgtgcatcacatgttataaggcgtgctttcgctccacatgctgagtgtgatatggatggaaactggacgccctaatgtgattgactgcacacagctttctgaaggagatatgtcatagctccctgagatgatgctgacgtacaacctctctacatttttcaactgagatgcttttgtcatgagtgatgaacaaatgat

SEQ ID NO: 100941 - DNA, 1050 bp, Glycine max
  Clone ID: PAT_MRT3847_62162C.1
atcaaatcctcttttcatcattcatttctttcgatcaaaaacaatcaatcttcattcaggatgcaacgttttgttgacaacgtcctcgctgttactaaagagtcggtgaagacgtttacttatgaatcgttgaacaatgttgccacagtgataaatggtgtgtcagctcttgtgttgacattgctgcctgggaaagtttctatacttgaaggtattcagggttgggagctcaggccaactcttcgtggaccacgctttccacgttggatggataaaggtgtgtcctctttcaaccactttattcatgagctttctgtggattccgatgtatcaagcctggaatattcatctgcagaagacagtgatgatggatatgaagaatatcctgaatctccctcatctcaatgttctagagcctccaaacctaattggattttggctcctattcacttcttgctggggattccatttcgcctttttcacttagcttattctggctctcggctgtcagaaccgccggttatctgtggcaatgaacatccttcacaaccacatttttctaatagagtgcaaagcctcaaggaccaaattattcatcgcactactgacaggagacgtgggatcattgaggatctccatttggccacggagatatttatagaagctgtttttgatgttgttcacaaggcaatccatcttcttctttccccatcagaagcttttggaacattgtccaggttgttttcatctcatgaaagacgcattttagttgataatgatgttgttgaggaagcctctacttcttcagatacacttggagagaatgagccaacacctacagacaggaataccagttatcgttcatctctgaacacagatgcccggacatgtcaagacgttataacagagctagggtatccatatgaagctattcatgtgatcactgccgatggatatgttcttcttttagaaagaattcctaggcgagatgcacgtaaagctgtttatcttcagcatggagtcttcgattcatcaatgggttgggtatct

SEQ ID NO: 100942 - DNA, 308 bp, Glycine max
  Clone ID: PAT_MRT3847_62163C.1
ggccctcttcagaccactcgtgtcggaggcgtcttagcactgatcctaagtcggtttacgtaccatggttatgcattccacttcatgagacggtgcatgtttgcgcaatctaaacactatctcacactatcctccatccaatagcatagggtacacgaaccctcataatcatatgggataagattgtctgttcatgactataccgaaaccactactgaacataacaatgtcactcatagacaaactacacctttcgtgacacaggcaaccagctagaacatctttgttactcgtactaaggaaaccga

SEQ ID NO: 100943 - DNA, 300 bp, Glycine max
  unsure (1)..(300): unsure at all n locations
  Clone ID: PAT_MRT3847_62164C.1
cntnngcnnncggncgcgcnngngnttnnnntnntnaannngnaacnnnnnctggncnnattnnngtnngngnnnngannntngcngnnnngnnnanngnnnntgcnccgagtgctggntgnnngcgtgncgttnnngggccnangtcgntcagnnngnngnnncngtgtgngngtggnggggctngccnnnncctnggggtngcggnngannccgtgggngttgtgtggggncggntnaccnncctgcnttgcggngggnggcggtggggtnngngnnngngccggtgtgggtncggtc

SEQ ID NO: 100944 - DNA, 384 bp, Glycine max
  Clone ID: PAT_MRT3847_62165C.1
tagataaggcaacgtgaaatttaaataatttgtgcgatcatacacaattgttatgtctgcgactccagcatcgaacttctgccatgtacaaattatagctaggttgaggtataatcaataaggggcaagataaaaaacttaatgtgtaacatgtaataaaaaactaaataaacaaaggaaagaagaattatgagcaaaacacaccatggacttggttgtttgcaataggtccagcaagggcgccatagttttctagggggacgaattcgtatgatactgagaaaggcaatgccttcaagacctgctaaaacacatcaacaacaaacccagaaacctttgggggcgtaaataatggttccactcttacaaattcagggaaaccct

SEQ ID NO: 100945 - DNA, 393 bp, Glycine max
  Clone ID: PAT_MRT3847_62166C.1
actactcgtgcggccacgcgtccgcccacacgggcggaaaattctgacatatagtgcaagcgattgtagaactgcgatggtgagtaaaaatatcaagctctatgctactgcaatgcaggcgggagctatagaaataatgatcgaaagtttactaagtcttgactgcaacagaggtggagcaatgctattggttgactcttatcataccaatccagaaaaggcgatttgttgaattgtcgttgcgccttacagaggcggaaggcccattcggatggatacattttctaacactattgtgcagattgaaccagacatgaattcatggtttaagattttgagtcccactaccaatggtgaatttgttcaaggaaaagaatcacccaatggttaaag

SEQ ID NO: 100946 - DNA, 260 bp, Glycine max
  Clone ID: PAT_MRT3847_62167C.1
gcaaaacttgttctattgtgtttctgtgttaaactgcaggtggggattgtgctaatgtgtaaagtcacccaatacgtttcaatatacctcatgtacttgatcttgacatgttgtgatcattgcaagaaggtgaatccaagtttgtttctagcgcctcaagcgttagcagctcggcaactacagaatcaaggcctggaccaaagctagacctgagacgttttgtcttgcatcttgaaggtgaggaagagttagttgaggtg

SEQ ID NO: 100947 - DNA, 836 bp, Glycine max
  Clone ID: PAT_MRT3847_62168C.1
gcctcttggtatacacgggttcctaaagtcgctttctcctgtttctgcagcttctctgtctcttttcttcactttctccttattcttcattagatcctcagtgggatcgaccctcatttcttgtgaactgagatggctggaggtgttattcgtgcagttatttacggaggaaactccaatctcattgctcctaattcttcttttaagtcatccattatcgcaaagaaagatggtgctgactctactggcagcaactccttaagagtgcttgcttttgttggagctggtgtgtcagggtttttaggttttgcaacaacagcatttgctgatgaagctgagcatggcctggcatgtccaagctatccatggcctcacaagggcattcttagttcatatgatcatgcttcgattcgtcgtggtcatcaagtttatcaagaagtctgtgcttcttgtcattctatgtctttgatatcataccgtgatttggttggtgttgcttatacagaagaagaggtaaaggctatggcagctgagattgaggtggttgatggccctaatgatgagggcgagatgtttacacgccctggtaaactcagtgatcgctttccccagccatatgcaaatgaagcagcagctaggtttgctaatggaggagcctatcctccagatctaagtcttgttaccaaagctcgccacaatggtcagaactatgtgttttcccttctaaccgattatcgtgaccctcggcgctgctgtttcgattagagaaaggattgcgctatattccttagtttttctggatgggctacttgctatgcctaaaaatgcttaatgat

SEQ ID NO: 100948 - DNA, 424 bp, Glycine max
  Clone ID: PAT_MRT3847_62169C.1
cacgacaccaccagcctcttccttttccgtcgcacttactctcattcatgaccatggccgacgacgcgcagcatgagcacaccttcgagagcgccgacgccggtgcctcgcagaccttccccatgcagtgctctgccctgaggaagaacggcttcgtcgtcatcaagaaccgtccctgcaagatcgtcgaaatgaccacctcgaagaccggcaagcacggtcacgccaaggtccacttggtcgccattgacatcttcacctccaagaagctcgaagaactgtgcccctccacccacaacatgaacgtccccaacgtccgccgccaggagtaccagctcctcgacgtgaccgacgacggtttcctttccttcatgtccgacgacggcaccacccaagacgacgtcaagctgcccgacggtgaagt

SEQ ID NO: 100949 - DNA, 314 bp, Glycine max
  Clone ID: PAT_MRT3847_6216C.1
ggcggatgaccgcagccctcgctgctgcccgtgccgctgcgaccatggcctctggcagcagcggcctcgccgccgcccgcctcctgtcccgcgccttcctcttgcaacagaatggaattcggcattgctcttatacaacttccaggaagcatctctatgttgatagaaatacgaagattatttgccagggtttcactggtaagcagggcacctttcatagccagcaagcactggaatatggcaccaaactagttggaagaaccactccagggaaaggaggaaagacgcacctgggcttaccagtctttaacact

SEQ ID NO: 100950 - DNA, 683 bp, Glycine max
  Clone ID: PAT_MRT3847_62170C.1
gaaaattcaggtgagactgacgacaatcaatacaagcatgatggcaacatggtgaacacgagcccaaaaatgttgtctctgtggaagcgtgcaatccagtcaagcaaagctttgttgctggatgagtttaatctcggtcctgatgctctcttggagaaggtagaggaatttgacactgtttcacagggccttggagcactcccatccagcatttagtttgtcaagtaaagaaaatgatgctgaaggttcatctgcaaactttgaaaatagttattctagtgatggcttacatactgaagaggattatgcaaagttcgaagatagttattctagtgatgccttacaaactgaagaggaagaggaagaggaagaggatgaggatgaggatgaggatgaggactactatgatgatgaagacgatgacttgtatgcggtggacacatcggctcaacccggatcattacctgttgatatgattgtcaaaaagctaaaacaaagaccattggagtaaaaactatttaaaaataaaaatgacaacttgaagagcttttgtattgaccaaaatagcaggcatgaaatgtaaaattaccaataaaagaaataaattagttatctgtaaattacgaattggacattttctcatgcactatatgccttggtttcatgaatgacacgtatttgtg

SEQ ID NO: 100951 - DNA, 357 bp, Glycine max
  Clone ID: PAT_MRT3847_62171C.1
ggaatgaaaaaaaggaagagttgaagtcgaaataataaagaaaagcaacaaaatatacagaggattccgatcatgacaagagtgtcaaggatattaattaagtcatgttatttttattaattcattaaattagatctttcaaactaatagctttggggggagggggaaactccataattaaacatctctagtaatttcttttatcaaataagttaattgacgaacttataaattacttgaagggttaattgtaagatgtttgaatcaataaatgatgcatttgcacatgtacaaccaacttgttaaaaatttccttctctgttcaggaatagtttgtacgtttagattttattttat

SEQ ID NO: 100952 - DNA, 454 bp, Glycine max
  unsure (1)..(454): unsure at all n locations
  Clone ID: PAT_MRT3847_62172C.1
cccacgcgtcctgtgaagcagcagattgattttcggtttttataatgcagatctncganaaaaccctggctgatttgaccatggccctggaatactaaagcatcaacaccattgacaatgtcaaggctatgattcaagacaaggaatgcattcctccggatcagcaatgtatgatttttgccggaaagcaacttgtaaatggaaggaccttggcctattacaacatctataatgaattaaccctttattttgtcctcaagctttgttgttgtcattaaataacctttctctattgttttggctttgcaaattcaatcattacaagatgatttgccgaatatgcgtattctcctcttcacccaattgcttttaattgttttactaagaatttctgtaatattaattatttaaggtcttataattaatattatgtaaatttgtgtgttatattttt

SEQ ID NO: 100953 - DNA, 575 bp, Glycine max
  Clone ID: PAT_MRT3847_62173C.1
gcgtccgcgtgaattgaggagagagagagagaggatgagatgggtgaagagagcaatgtttgtaggcagagccctgagaagcaattccaacagcggcgtgtgttcccatggccatggctgcttgaccccatcaaatccaaatccaaatccaaatccttctgtttctgatactgggtttagatacctttctgcttatgctgctgacacgtatcttgtccaagacgctctgaccaaggccttcaaacccaaagaacttgcctctttcaatactaggcctgtccattctgcaacaagcgtttctggactattatgatattccattcaaagcgggtgaggtgaatcccatcaacaagaaggagatcaagtggtccgactacaagaaggtgcctattctcaccgttgatggtcaacaaatggtcgactcttcagacataattgataaattgatcaaaaggatacatccagattatgacctatatgcacaagatgagaacaagttgcgatactatgttttgcttattatacttcgactacttggttgcatacacacatcgggttacatctgatgtcattat

SEQ ID NO: 100954 - DNA, 1496 bp, Glycine max
  unsure (1)..(1496): unsure at all n locations
  Clone ID: PAT_MRT3847_62174C.1
ctttcaattatccaacagaactgaagatatcgtagctggaaacgtctagcacccacaaatgggtaactcccatggacaccggcatcgcaaacacggtaactccgttcctcccaacacggttcctcctccctataaatacaatcctcacccaaccacctccaattccaccatgctttctcttccttacacccacgtcgacaccaccctccgctccctcgccgcccaagccgagggcttcggtcgcttcgctatcggcggcctccacggtccccttcaccccgtcacatctctcgcagatgatggaccggggtcactgcgtgacgcgtgtcgcagaaaagaacctttgtggattgtgttcgaagtttccggcaccattcaactctcctcgtacttgaacgtgtcgtctcacaagaccatcgatggtcgtggccagaggatcaaactcagcggaaaaggcttgcggctgaaggaatgcgagcacgtgataatttgcaatctggagttcgaaggaggcagagggcatgatgttgatgccattcagatcaaacctaattccaagcacatatggatcgatcgttgcacgctcagtgattttgatgatgggctcatagatatcacccgagaaagcacagacattactatttcaaggtgccacttctctcagcatgacaaagccatgctcattggggctgatcccacgcatgttggagataggtgcatgagggtgaccatacaccattgttttttcaatgggactcgacagaggcaacctcgtgttaggtttgcaaaagtgcatctgtacaataactatatcagaaactggggcatatatgctgtttgtgctagtgtggaatcccagatattctcgcaacataatatctatgaagcaggacagaagaaagtggcatttaagtaccttactgagaaggcagcagacaaggaagtgggagcaactggtaccataaggtctgaaggagacatattcttaaatggtgctcaaaaagggttaatgactgaggatgttgggtgcaacatgtttcaccccagtgaacactatccctcttggacagtggaagcccctacagacgatctgaaacagattcttcatcactgcactggatggcaatctcttgctaagccagcagatcaaacactatgagcacaatagaagcttaagctgttgcataaatgcaggggtaacagaactaacatcattgatctcctgcccccccaaagtctattctagcaagttactttcctgtgtatataaaatatagattagtagcggattattaaatattaataagtactacacgtttgttaaactattatggctattgacaagagagtaaattacaaattaacccatcccctatgtttttctacaagagaatgcgcacactanaacttgtttcaaaattacatagtccataaataaaacgtttttgtccgtgttccctctaccgtagaataggcaaaaagaaatgttcgaaaaa

SEQ ID NO: 100955 - DNA, 552 bp, Glycine max
  unsure (1)..(552): unsure at all n locations
  Clone ID: PAT_MRT3847_62175C.1
tctagnnaactagtggnatnncccccgggnnnctgcaggcttnnggatagacccatcctctttatcccctccaggaaaaatcatgcacatnntgtccctgaaaataataattcaaaccgcaagtatcctgataagaaacgcatctacttatatgaaacacctacacaattttatggaaagctcagattttcaagagggattattctggatcatctcacgaagaagtatttgaagaagttacagcaattaatcaatcaactagagaaagagcagtccaaatttggcggattatgagccaaagaattaatagcaatggaatgatataatagctactagctaactggcttgaggagccttaccatcaactggacctcttgattctggtagtcatgtttgttgtgtgtatttgaattctaattattgaaaatatgcctgctgcttgaaatggattctaaagattcagtttttcgagtgtcttttaggagtttgttatttcttgtaacagttgtaagtctttttttaagttttgaatgtttgtttctgtttttttca

SEQ ID NO: 100956 - DNA, 1708 bp, Glycine max
  unsure (1)..(1708): unsure at all n locations
  Clone ID: PAT_MRT3847_62176C.1
ggggaaccgatgcatttataactaacaggatggtcaagtcatgttgcgttatgtgcttgtgtttgatcttacttcacattttcctgcgctttgtgccaatacagtcagcacctgaaagtgccattgtgacacagattcctggcttcagtggcactctaccttccaagcactatgctgggtatgtgacggtggataagagtcatgggaggaacttgtactactattttgttgaatcagagggtaaaccttccgaggaccctgtggttctgtggcttaatgggggacctggctgctctagcttcgatggattcatatatgagcatggtccttttaattttgaggcagcaaagacaagggggggtcttcccacactgcacctcaatccatacagctggtcaaaggtttccagtgttatatatttggattctcctgctggtgtggggttttcatactcagagaataaaactgattacataactggagacataaagactgccactgattctcatgcctttctccttaagtggtttgaactataccccgagttcctttccaacccgttcttcattgctggagagtcatatgcaggagtttatgtgcctactctcgcttctgaagtagtgaaaggaattgatgccggggtggagcccaaactgaatttcaagggttacatggttggaaatggtgtcacagatgaacaaattgatggcaatgctcttgttccatttgtacatgggatgggacttatcccagatgaactgtttgaggaggttaaccgtgagtgcaatgggaatttttatgatccaacaagtgctaattgttctagcaagctttcaaaagttgatgagttggttgatgagataaacatatataacattctagaaccatgctatcacggcacagaagcagagaagattacagaatcctatattaggatgccatctaccttccggaagttgggtgagaccgaaagaccttttcctgtgaggaaaagaatgttcggtcgtgcttggcccctaagagctcctgtgagagatggaattgtaccaacttggccacaactgatgaatagtaaatctgctccaccatgcacggacgatgaggttgcaaattcatggttaaacaatgaagcagtcaggacagcaattcatactgcacagaaaagtgtggtcagtagttgggatttatgcactgacagaatttacttcgatcatgatgctgggagcatgatcaagtaccacaagaacttaacttccaaaggttatcgtgcacttatattcagcggcgatcatgacatgtgtgttccatacacggggagtcaagtgtggacgagatcagttggatacaagattgttgatgaatggaggccttggtcatccaatggtcaagttgctgggtatacacaaggatacgacaaaaatcttacttttctgaccgtaaagggatctgggcatactgttccggaatataaaccacgagaggcattggacttttacaaacgctttctcgctggattgccaatatgatatagaggaaaagagaagatggagtaacgctgcttcttattttgtttgtactttgttaataataatgatttaaggatgtatgaagacacattttatatttgtgttctatgtttaccttattaatttattaccatattaatattaaactagatgtcaacctagtttgcacaaaaaaanaaaaa

SEQ ID NO: 100957 - DNA, 478 bp, Glycine max
  Clone ID: PAT_MRT3847_62177C.1
ttgtattatagggatatgtttcttttttatacgagtaggaacgcggaaaataaatttttgaaccatttcaattttttttttcaaataaaaggttgatttgatgtcgttaggatgaagacaacatgctccactcacatacttattattaccaagattgcaagacaacaatatttgaatatccattagtcgatcacattcaatgtttcccaccgtatccaaccatcattttttttccttcttaaagaaaacaagtgcacaaattaaacatgacaaaatattagagattcttttaatatttgaaattatttaagagctctatctatcttattattactttggttaaattatttggttgtaactaattaattgtctttataaaaaccccttacatgagtagacttactttggggatttttcattcatgatgtaacgtgacatcggtttggtataaattttttttcattcataactgtccttt

SEQ ID NO: 100958 - DNA, 527 bp, Glycine max
  Clone ID: PAT_MRT3847_62178C.1
gttagtgcaatgggaatttttatgatccaacaagtgctaattgttctagcaagctttcaaaagttgatgagttggttgatgagataaacatatataacattctagaaccatgctatcacggcacagaagcagagaagattactgaatcctatattaggatgccatctaccttccggaagttgggtgagaccgaaagaccttttcctgtgaggaaaagaatgttcggtcgtgcttggcccctaagagctcctgtgagagatggaattgtaccaacttggccacaactgatgaatagtaaatctgctccaccatgcacggacgatgaggttgcaaattcatggttaaacaatgaagcagtcaagacagcaattcatactgcacaggtaaggtttctagtaagattcctgtactttggatataaaaacactaaattgtgatctttctgatgaaacagaaaagtggggtcagtagttgggatttatgcactgacagaatttacttcgatcattgatgcttggagcatgatc

SEQ ID NO: 100959 - DNA, 164 bp, Glycine max
  Clone ID: PAT_MRT3847_62179C.1
gcttaccttacagggtacatctgaatgggtgtgagggcggcgcactcaagcttctgagttccgtacttatcacacaccagttaatagacaacgcgactatggtaatgcatatcgagctgcagggacttttcggaagatgtcttaatctttaagatggatatttt

SEQ ID NO: 100960 - DNA, 452 bp, Glycine max
  unsure (1)..(452): unsure at all n locations
  Clone ID: PAT_MRT3847_6217C.1
ggatttccaatccttggagttgagtggcagaagatggaaaatcctgagttacgaatgtcaatgggcatgggaccagatcaaaaaggtgtgcgtatcagaagaattgaacccactgctccagaatctcatgttctgaagccatctgatgtaattctcagctttgatggggtcaatatttcgaatgatggaacagttccattcaggcatggggagcgcattggtttcagttaccttgtctctcaaaagtacactggggatagagctctagtaaaggttttccggaatttacagatacttgaatttaacgtaaaacttgcaactcataagcggcttgttccagcacacatcaaaggcaggcctncttcttattacatcattgctggattntgttttactgcttgttctgtcccctatcttcgttctgagtatggtaaagattattgaattgatgc

SEQ ID NO: 100961 - DNA, 407 bp, Glycine max
  Clone ID: PAT_MRT3847_62180C.1
cagtctactctagacgatcccctcggggaattctagttccacattttcaagaaataaggaggcaatcatgttcatatatgaattggaatgatttgttttcatatcaggcctatcctgaaaccaaaggaaatgagatcggaattcctcggggaattccaattccacatttgcaagaaataaggaagcagaattgttcatagaggacttgcaattacttgttttcttataaggcctatcctgaagccaaaggaaatgagatcggaattcctcggggaattctaattccagattttcacgaaatatcgaagcaatcatgttcacatatcaacttggattagttgttttcttatgatgcctatcctgaagccatacgacatgagatccgaattcctcggggggtacaagct

SEQ ID NO: 100962 - DNA, 1529 bp, Glycine max
  Clone ID: PAT_MRT3847_62181C.1
ggctcgagcttttcactttgtctagtcatgctttgactgtatatcactgatatataaacgatgctttggcttgttagtcccccggtcccccctccccctctgttgtgagtaaataattgtgactgatgatcagtgtccatttctggaaatgatttatctgagtttgcataatgacaatttgttacttttgaatgaggttgtttaccataatgttactgaactctgtgctgtaaagtgtatttgttatttatcattgattgttattatctgttatattcaatgtttcattggttgcatattgactcttattttgtcaaagtttttcattagagacaacattgttattgtgaatcttctcttggtaggatgcccacgagttcttgaactttttgctgaatgaacttgttgacattctggagaaagaggctcaggctgcaaaaactgatcaggagacatctccaccttctgaaaaggctgttaacgggcccaagaatggtcaagctaatggtgttcacaaagagcctttagttacttggggaatactcaccaatgagacaaggtgcttgcaatgtgagacagtgacagctagagatgaaacatttttggacttgagtcttgatattgagcaaaacagttcaattacaagctgtttgaaaaatttcagttccactgagacactgaatgctgaagacaaatttttttgcgacaaatgctgcagtttgcaagaagctcagaagaggatgaagataaagaaaccacctcacatcttggtcatccatcttaagcggtttaagtacatggaacagctaggccgctacaagaagctgtcctaccgggttgttttcccccttgagctgaagttgagtaacacagttgaagatgcggatatcgagtattctctatttgcagtagttgttcatgttgggagtgggcccaaccacgggcattatgtcagtcttgtgaaaagccataaccactggttattttttgatgacgaaaatgtagagatgattgacgagtctgctgtgcagacgttctttggatcatcacaggagtattcaagtaatacagaccatgggtacattttattctatgagagcattggctctggtaacaggagttaggcggaggatttctacaactctcttaaatcatttggacttctttttaacatggtttccatatttattttccttttaccgttttccctttattcaacctgttggaggagctgttacatactctagaggatacgggttgtgaaaaggtatacttaggtggttggcatgtacagtggatagtgctaggcactgtccttttttctttttcctctttctcacaataagaacagtatatatatatcaggtgaaaatttcaccaacgatgtgtattcatggttgcaagcgttcaaccaacattagaaacacaatgaaatggaaattggtcccaaataatgtcggattgcaagcaaccccatagttcaccaaaagagcaacccaatggccattgattggccccggttaactgcg

SEQ ID NO: 100963 - DNA, 310 bp, Glycine max
  unsure (1)..(310): unsure at all n locations
  Clone ID: PAT_MRT3847_62182C.1
gggaaaggagagacgccngccgggaccggaccggaacgcccgggccgacccacgccaccgattaactaaagcccgcaccaccaggccaacggggagagagacaaggggaccaccgagccagcacgaacacggggccangaaggaacacacgccggaaggaaggacgcaccagaagacacgcaagaagacgcaagagacagagccggcacaaacgcacaaacaggaccggagagcgccaaagaccgcaccacaaaggcgaggaccgccaagacaaacgggcagacacgcgaccaagggaagagacagggag

SEQ ID NO: 100964 - DNA, 439 bp, Glycine max
  unsure (1)..(439): unsure at all n locations
  Clone ID: PAT_MRT3847_62183C.1
ggacacatggcgtagggaaagaaactctagatctcttcaatgagatgcagaagggagctgttaagccaaatgatataacatttttgtctgtaatttcagcttgtagtcactcaggttttgtggaagaaggtctcttgctcttcaaaagcatgcaggaagattattacttggagcctactatggatcactatagtgccatggttgatctccttggtcgtgctggccagctagatgatgcttggaatttcatccaaagagatgcccatcaaaccagggatttctgttctaggtgcaatgttgggtgcttgcaaaatccataaaaatgtagaattgggagagaaggctgcacanaaactatttaagttagaccccgatgagggagggtatcatgtgttgcttgccaatatttatgcctctaattcaatgtgggataaagtag

SEQ ID NO: 100965 - DNA, 237 bp, Glycine max
  unsure (1)..(237): unsure at all n locations
  Clone ID: PAT_MRT3847_62184C.1
cccccccccgtttttttttttttttttctttccttttttctctccncccnnntttttttttttttnattcactccatccaaggaagaacatcaactattagagtaatataccggctataggagaacttatagtaatactagattatacccacaagtagcacattttattaggatatttataccagtctcagcatccagcaacgttaacataaagaagaaatactggaatagatacgc

SEQ ID NO: 100966 - DNA, 705 bp, Glycine max
  unsure (1)..(705): unsure at all n locations
  Clone ID: PAT_MRT3847_62185C.1
cnacaattnnnngtatgggccttttggccctcccacacaccaataaaataaaatagaaaatctaacaccacaattcacaagtagaccaagtcttctccatctgaattacacatgtatgctgtatcacgtattatataacacgtcccactttttgtgctactgtcaagaacccaacacccctgcactaaaattgtcacaaaaagtggcaaatcatcgcggtagaatatcagaaaatatcatctctttcactgaaggattggttgttgttgatggatcggcacgaagcaccctacccaaagaaagtggtggttgtcttggttggggaagaaccattgattcgcttcccaggagcaccaccacatttgacatggtgggcctgtgttccggattttcttgcacgcacagcagcccgatgtgcacacaccttacaatttccgaggcatcacatgattccaatagcattggatccacaaagtccaattcttttccttcattccacagtctccatgcatatgccagcagtgtcggggcaagttcggtcatgtaaaagccactatttcttttcccgatgatgatttcaagcatgataacaccaaagctgaagacatcagatttcacagagaacaaccctnnnattgcatactctnnnnnnatatatccatannttcccacaacnnntttcgtgnntgctgcannnnnnttctc

SEQ ID NO: 100967 - DNA, 380 bp, Glycine max
  Clone ID: PAT_MRT3847_62186C.1
ggttgaatgtataacgctgctgccgaaacccttcccaatccctaaagtaagtgagtcctcggtggctgcgaatcgtggagaatgctaacggtacgaaggaagacgtggttaccatacagtccaccattaacctccacaaacgcctccactggctgcacatttaagaatacagctcctaaagctatgcaggagatacagaaatttgcccataacgccatggggaccaatgatgttacggtggatgtgaagttgaacacatttgtctggagccatagaatcaagactcttccacagatgattaaggtactaactgctcgcccgaggaatgacaattacaatgccaaggaagatctatactcacttgtcaccgttgttgagac

SEQ ID NO: 100968 - DNA, 1022 bp, Glycine max
  Clone ID: PAT_MRT3847_62187C.1
cccctgaacgtagtgctaggggagctgaaatgccagcgacagctgaagcaccacccctggttgccgttgtaaataatgaattatatgctgctgattatgctgacacggaggtaaaaaaatacgacaaggagcgaagagtgtgggttaccattgggagactacctgagcgagcagtgtcaatgaatggttggggtcttgcattcagggcatgtggagatatgcttattgtcatcagtggaccaaggactcatggtgagggttttattgaactcaattcatgggtgcccagtgaaggacctccacagtggaatctactcgccagaaaacggtctggcaactttgtctataattgtgctgtgatgggatgttgaagaattgaattgtgaaaggtatcacacattttgatgcttcaaatccaatgagttgcacaacattgattcatccattgacacaggattcttgctaattggtactttcccccttctttttcgatgatattttcctttcaaaggcgggggaggatggggtagattcagatatttctcaggattggctgaaaagttttccaagaaggaggctcttcagtcttttatttttatgtttaaaatttcagtttccattttgttccattgaaattggtatcttcccccatttacatttacatgaaaattttcaaagcttgctatcatgtagcacaggaataggttaaataattgaagtctcaacactaatgtaggttattggtgttgtttattttaagtttttctttttttcaagaacacacaactagatatttgattttcatgatcataaattttcttagcttgaaggatgggaataatttccgatagttgtttattaattttggattatttagcaatccaattttcatttcaattcaattcttggactatgtattttgagctttccctagcatggagaaagtagtatatagcctgataaacattccatttattacttgttgcaaatatcaatttccaccataatatattttctacttc

SEQ ID NO: 100969 - DNA, 780 bp, Glycine max
  Clone ID: PAT_MRT3847_62188C.1
ggctcgaggttaattaacttgttctcgttcattactactaaaaaatgacttccaagatacaaatattaccaatcctaggcgtgttggccatgttacttctgatctcctcggaggtgttagccactggattacatggtgttggtgttggtattggtggtggattacctggtgttggtgttagcgctggattacctggtgttggtgctggattacatggtgttggtggcgctggattacctggtgttggtgctggattacatggtgttggtggcgctggattacctggtgttggcgctggattatctgccaacgctggattatctggtgctggtggcgctggattacctggtgttggcgctggtgctggtggcggccgtcgtggtcgtgctggctccccattcttatcatgcaagttcccctagtggtggtgacagctccccttcttattcttatcatgcaagttccccgagtggtggtgtcgactactatggttgatcccaggcaaaagaggataagacttgtaaatgataataagttctacgtgtactatgtatcgtgaataattcttgttgtgagagccatggttatagtcagcaaagaggcctttctcctcacctttctaaattaccactagctagctagagttatctcccaatacgaaaatgttaaataatacgtgtcagcatgtacctatatatgtgaccaagttgtaaatagcaacttttaaaatgatgataatatacttttaagttgtcctaaacagtgagttttgcacttttt

SEQ ID NO: 100970 - DNA, 309 bp, Glycine max
  Clone ID: PAT_MRT3847_62189C.1
gtggtgggttttacatttcttggaaaatatgtacattttatacccgtagtgagagcaaaaaaccacggaaacccaaaaaagacaaagccacagggagaacggagaaaccaaaaagcaaccaccccaccaagccaaaaaaaaaaaacaccaaccccaagaacaaaaaaagccaggagacagcggagacagaaaacaaagccaagaaaacaagaggggaagaaaaaaaaaaaacttaacccaagggaaggaaagggcaaggccaaggcccgacacaaacaaaatagaatcactggctacccaaccttacta

SEQ ID NO: 100971 - DNA, 2057 bp, Glycine max
  Clone ID: PAT_MRT3847_6218C.1
ccaagagatcactggtggcgtcgcctggagcgctgcagctctcggctggccgattcgaaaggcgattgcacggcggcggtgaaggtggtgccgtcgatggaagcagtggtgaaggtcttctgcgtccacacggaaccgaatttctcgctgccgtggcagcggaagaggcagtatagctcgagcagcagcgggctcatcgttgggggacggagggttctcacaaacgcgcattctgttgagcatcacacacaagtcaaactcaagaaacgcggctctgataccaaatacttggccaccgtcgcctgttatccttatggtgatggttcagcaatgttgacggtgagtgatgatgaattctgggagggagtttcgcctgtggaatttggcgatttgcctgctctgcaagatgctgtaactgttgtgggatatccaattgggggtgacacaatctctgtgacaagtggtgttgtttcacgcatggagatactctcttatgttcatggttcaacggaacttctgggactgcagatagatgctgcgataaattctgggaattctggtggacctgctttcaatgataagggaaaatgcgttgggattgcattccagtctcttaaacatgaagatgtggagaatataggatatgtaatacccaccccagttatcctacattttatccgagactatgaaaagaatggggcatatacaggatttccaatccttggagttgagtggcagaagatggaaaatcctgatttacgaatgtcaatgggcatgggaccagatcaaaaaggtgtgcgtatcagaagaattgaacccactgctccagaatctcatgttctgaagccatctgatgtaattctcagctttgatggggtcaatatttcgaatgatggaacagtgataatacattacatagcagcaacgtttgatctggtaagggaaaatattcaaggtggtggtccaattaggcatggggagcgcattggtttcagttaccttgtctctcaaaagtacactggggatagagctctagtaaaggttttccggaatttacagatacttgaatttaacgtaaaacttgcaactcataagcggcttgttccagcacacatcaaaggcaggcctccttcttattacatcattgctggatttgtttttactgctgtttctgtcccctatcttcgttctgagtatggtaaagattatgaatttgatgctccggttaagcttctggaaaaacatctacattctatggcacagtctgttgatgagcagcttgttgttgtttctcaggttcttgtgtctgacatcaatattggatatgaggagatagttaacacccaggttcttgctttcaacgataaacctgtgaagaatctgaagagcttggccaacatagttgagagctgtgatgatgattatctaaagtttgatctggaataccaacagaaggtagtgttgaagactagcactgctaaggccgcaaccttagacatcctcaccacacattgtataccttctgcgatgtctgatgacctgaagacataaaaagttttggtgaaagttatttaaattactcccattggcctcatcttaatttttttttaagtgttattacacctagttcactataagattgcggtactattggatctgcactagtcaatgagataaaaaggcttcacatacagatgattagagaatcagaggatggggaaggaattagcaaaatacaacttacgcttcattaaattatcattaagtttatctctttcgagttggggtgttctgtactctatttatatcaattattgtgtcccccccttcccccctttttgatacaaaattgacattcatatgtatttttcttaagatgggagaggcatgtaaaattttatgttgaggatattaatgctgttattttgaagtaccctacttacatggagcagatgattctactgctcacaatgataaaagtgtttttctttgaaacgcaaaattgatctggaataccaacagaaggtagtgttgaagactagcactgctaaggccgc

SEQ ID NO: 100972 - DNA, 387 bp, Glycine max
  Clone ID: PAT_MRT3847_62190C.1
aaagaataataatagggaatgctcttctgcaattggaaccccaattgcagaagagcattccctgcttctgtttgctgaggttgctgaaaggtacaaaattggcctagctttaatttaagtaacattcagcaccctccttagtatgctgttaaattgttttagtattgcattttaaaagctatgattttagtcttcatttctttacagtttctgagtttgttcctcactcttacccccatgtaaatatcataaagggtgatgaaattcaccaattataaaaaaaaaaaatacaaggaccaaaatcatgttagaaccaattttaattgaaaattaatagacttaaaacaagtttcattttaccctaagaaaaatagctgaattttactc

SEQ ID NO: 100973 - DNA, 278 bp, Glycine max
  Clone ID: PAT_MRT3847_62191C.1
ggcttgaaaaaggagttttccgttttgtttacaggacagctactccttggttgaccgttctgatgcatggacctgggaggaataagtacagtcatcgctatatggatggggaaacaacgagagtcatgcaagagccctgtcctgcgcagctcacggatgatgtagagcctgctggtcatgttcatgcctatgaacgatctgagccatgcaccacaagctcatgcaatattgctaatgggagttgtgctcctgtaaatgataaataagcatgagcatat

SEQ ID NO: 100974 - DNA, 184 bp, Glycine max
  Clone ID: PAT_MRT3847_62192C.1
aattcccgcgccgatcaactaacacaatcggcggcggccgttcttttttttttttttttggacgtgaattgaaaacatctctatacaacttcaggttcaaactcgtttttttacaggaacaaatcacctcacaagaggaatgattgggaacccattatcagtttcaaactgccatttcaaggga

SEQ ID NO: 100975 - DNA, 837 bp, Glycine max
  unsure (1)..(837): unsure at all n locations
  Clone ID: PAT_MRT3847_62193C.1
atatgatgctgtacactgttacctcntgagctcattaacattgcaacacagtccgctctctctctcaccacctgctacttcatattcagcataactctatgatattgttgttattattattccaactgcatgtccttaacttctaagctagttattccaaaaatgggaactccaactcttggccttgtacttgtactccttctttcgttcttaacatggcctgcttctgtttcttcttctcttcccatgtctttgagaaggcaagcctctatcttggtttctctcaaacaagattttgaggcaaacactgattctttgagaacctggaacatgtctaactacatgtccctttgcagtggtacttgggagggtattcagtgtgacgaaaagaacaggtctgtggtgtcattggacatatcaaacttcaacctttctggcacactttcaccttccatcacaggactaaggagccttgtgagtgtttcacttgctggcaatggcttctcaggagtgttccctagtgatattcacaagctaggagggttgagattcctcaacatatccggcaacgcgttcagcggagacatgagatgggaattttctcagttgaatgagcttgaagtgcttgatgcttatgacaatgagttcaattgctccctccctcttggtgtaactcagctccacaagcttaatagcttgaattttggcgggaactatttctttggtgaaatccctccaagctatggagacatggttcagctcaactttctgtctcttgcaggaaatgatttgaggggtctcataccacctgagcttgggaacctcactaacctgaca

SEQ ID NO: 100976 - DNA, 236 bp, Glycine max
  Clone ID: PAT_MRT3847_62194C.1
cgggtgattccttatgggttttcctggaccatctgaaaaaaagggggcatttattctaaacctttggggggccaaaattgtgggcctatcctactgcacagagggcaattttacaaaaaaatactattgaaggaaataggcgaggccttttaaatagggcgtcacacatgacaatacgcgcatgtatacatatctaaacaatttaccaccaataatacgggtacccgtagaaaaga

SEQ ID NO: 100977 - DNA, 120 bp, Glycine max
  Clone ID: PAT_MRT3847_62195C.1
caaacacaaccttatcctacaacaaagcaaaggaaagttttggaatgcatggtttctctgtggtggcgaaaggggaataaaacccatggccaacctgtatctatgtctatcgtcgcttac

SEQ ID NO: 100978 - DNA, 192 bp, Glycine max
  Clone ID: PAT_MRT3847_62196C.1
gcttcctctaagatatatagactgtggcaacaaaacgtcctttgcattcatgggatgcatctcttcagtcaaataattatgttcacttttcagcttgcttttttggatgacattataatgtttatgtactagcttgtgatcgctgatcattatggtatagttatcctaccagtactatgttagtatttagct

SEQ ID NO: 100979 - DNA, 164 bp, Glycine max
  unsure (1)..(164): unsure at all n locations
  Clone ID: PAT_MRT3847_62197C.1
gagaaggaggaggagggtggttttacgcgacttgcctcantcttctgcgattgcgagcctttgacggatgatgagctgggagccatcgaagcctggtgttgcagttacaaaaaacggccattcaacgatcacacttacactccttgtcgtcgcttgcccaaatc

SEQ ID NO: 100980 - DNA, 2131 bp, Glycine max
  Clone ID: PAT_MRT3847_62198C.1
aattcggctcgagtcgccgttcaattgcttcgtctttggtcttcgaccgtttcaataacctgcccccacctcagctataaggacaaaatctctaacgattttttttccttactttaaaataattgatctattgcgataaaccgagtagaggaataatggtgtagtagtagtggagagaaatcgcgatctggaacagagtttagctgaaagaaaaagaatcgagttgaaatgggtttctttggtaccattttggggtttttgggatttggggttgggatttcgattggtctcgtggctggctactttctcttcatctacttccaacccaccaatgttgaggatcctgaaatcaagccattggcggagcaagagcaagagactctgcaacgaatgtttcccgagattcctctttggataaaaaatcccgattttgatcggcttgattggctgaacaagtttgtagaatatatgtggccgtatcttgataaggcaatttgtaagactgcgaaaaacattgcaaaacccataattgctgaacagattcctaaatacaaaattgattctgttgagtttgaaacactcacattggggtcgctgccaccaacatttcaagggatgaaagtttttgtgactgatgagaaggagttaattatggagccttctgtaaaatgggctgcaaatcctaatgtcactgtttctgttaaggcatttgggttgaaagcaactgtgcaggttgtggatttgcaagttttcctcttgcctcgcattactttgaagcctttggttcctagctttccgtgctttgcgaacatatacgtctctctcatggaaaagccacatgttgactttgctatagctccaataggggctgatcttatgtctattccgggggtctacaggattgttcaggagcttattaaagatcaggttgcaaacatgtatctatggcccaaaaccttggaagttcaagtgttagatatgtcaaaagccttgaagaggcctgttggtattttacatgtaaaggttctgcaagcaattaagttaaagaagaaagatcttcttggtgcatctgacccttatgtgaagctaaagcttactgaggataaattgccatcgaaaaagactactgtgaagcacaagaacttaaatcctgaatggaatgaagaattcaatatggttgttaaagatccagactcccaggttttagagattaatgtttatgactgggagcaggttgggaagcatgacaagatgggtatgaatgtgatccctttaaaagaagtttcccctgaagagactaaacgtttttctcttgacctcctaaaaaatatggatcctaatgatgtccaaaatgagaagtcacgagggcagattgttgtggaattgacttataaacccttcaaggaggaggatttgggcaaggggtttgaggagacacagacagtaccgaaagctcctgaaggtactccagctggtggaggtttgcttgtagttatagtccatgaagctcaagacgttgaaggaaagtatcacactaatccacatgtacgtcttattttcagaggggaggagaaaaaaactaagcgcattaaaaagaacagagatccaagatgggaagatgagttccaatttatggtggaggagcctcccaccaatgatagattgcatgtggaggttgtcagtacttcatcaagaaacctgctccaccaaaaggaaccattgggttatatcgacatcaatcttggggatgttgttgccaacaaaagaatcaatgagaagtaccatcttatagactccaagaatggtcgcctccagatagagttgcagtggagaaccttggaagcatgatgattaaattctccatagatttgtacttctgtttctttctccccttctttcctttttaaaaatttgttttccatgcagtgtaaggaaaaggtgagaagggtatttcatgtgttcctgggatatatattggttttatttgtcaatcatgtacatgtttgagataaaaaggtttgaaatagcaaaagcatagatatgatttggtttggattatatacatttaccttaattggtatcattgaagaacgacctataaaaaacgtatccagctttcagcttgacccat

SEQ ID NO: 100981 - DNA, 252 bp, Glycine max
  unsure (1)..(252): unsure at all n locations
  Clone ID: PAT_MRT3847_62199C.1
aagaaactgccctgtaaacacatttcagttattaaccattaatcatgaattatttttattattgcagattgttttgaagataatatctttaaaaatgttacttgattgcttgagtgttcacattttatattatgtatgaaatttgttttcttcctttttttgtttaaactctagtttttgtttataattatattcgtttggtataaaaaaaaaaaaaaaaaaaaaaaaagacaananaaaaaaanngggggg

SEQ ID NO: 100982 - DNA, 285 bp, Glycine max
  unsure (1)..(285): unsure at all n locations
  Clone ID: PAT_MRT3847_6219C.1
ccaacccatgcttgatagttagtacataaatcatcacacgctcggtcaatagtttcatctggccttgtgcaattgaagaagagtggatggagattcagttagagcagcagcaggagtcatggtcggagacgtcgagcacggggagcaggagcacgcgagtnggcttcancgggcccatgagcggcccgctggtgacgcccaacaacaagaagagcagcaagaaaagcacgaggttcaaggaccaagaggaggaggacttcgtggagataacgctggactgcgcga

SEQ ID NO: 100983 - DNA, 256 bp, Glycine max
  Clone ID: PAT_MRT3847_621C.1
acacgcacaacctccgacaaatcatactaacagtgcctcatcatcagggcttcgcagaacacagatcaaaccatctctagagagacaaactcgcagtcgcagacatgtcttccttcgatgccttcgccgaagacttgaacgtcgactctacttccagtcgttagcacgatgatgacgaggacaaattctcaggctacggcggctactcctccttcacgggaggattctccgcagtcggatatatcgccgtcgatca

SEQ ID NO: 100984 - DNA, 499 bp, Glycine max
  Clone ID: PAT_MRT3847_62200C.1
ttcaagaagttttggacctatgccctgacaccaccggggacgcctgagcgggagacaaaaaacgggcatcacttattgtaacgatacagcatgaccgaacttgctctggcatggacgaagccatcactaggtgaacgctgacctggaactgctggcaaacaatatacctggatacatgacaagaggattacagacgaagagagcgtgaatgaaaatactgaaacgagagatctttgctttaaaagccctcagatgtttaaagaatattgcaaactttctgaggcaacacaggagtcatttacggaggatggatccttcaacactggagatgcagacgctacaaataacgaaggatattaacttactctaagacgtcacaatgctgatataatcaatgctgagggaaataagctctttgcagtagaaattgaagagggtataataaagcatccgggtgtttaacaatgctgcggaataagcctaccagacaaacactatg

SEQ ID NO: 100985 - DNA, 422 bp, Glycine max
  Clone ID: PAT_MRT3847_62201C.1
atttttatttttttttttttttttttactaaaacaaatacaaaaactaatgtggggcggggaactcattatacaagaagggcagaggacaccccaactagcaaaaaaggtaaaacctgattccctcaattataggtacattaaggggaggcaataaaagtcataaggacaagcaaaaacccaaaaattagtattattctggggtgaaccattcaccccaccctctccttttttcccaacaaaaaattaaaccgcgggagggggaaatttccttgcaaaaacaaacaagaaataactataaacaggggcctcagtgaggagaacaccatcccaattgatgaactgagaagggcttgagcacacagaggcattaggggggccaaatgtggcaaacacaaagaagaagtaaggggggtctcccga

SEQ ID NO: 100986 - DNA, 233 bp, Glycine max
  Clone ID: PAT_MRT3847_62202C.1
tgcaatttgggaattgccatggggacgatggaggatcttccagcttcggtgttggcggaaattctgagtcgttttacggacacgacggatgtggcgcggtgcagggtggtttcgaagagctaaacgcggcgtcgtacgaggttcactcgttgaacctggtgtgttccatgtcccgctacctcaagtctcgttcgccggagaccaagcacctcgtcacccccttcaagaccgtc

SEQ ID NO: 100987 - DNA, 144 bp, Glycine max
  unsure (1)..(144): unsure at all n locations
  Clone ID: PAT_MRT3847_62203C.1
gtggtgagttatggaganggaggaggaataatagcttgattctgctagtggggagattccaaagagtggtggtgtgagtagtactcctagtatgaggggaactgtgtgctatgttgctccngagtgtggcnatggtgggggant

SEQ ID NO: 100988 - DNA, 158 bp, Glycine max
  Clone ID: PAT_MRT3847_62204C.1
taaacataatacatacatacatagaagaataacataataacaagtatgcaatcctcaaacgataggatgaatcacatgtccattcctaccaaagaacaagtccacatctataaatccaaaataaactagaacgcagacaaatcaactgcaataacata

SEQ ID NO: 100989 - DNA, 1778 bp, Glycine max
  Clone ID: PAT_MRT3847_62205C.1
cccacgcgtccggaaaaacaaaacgataagtgtgttaaaattgttccatgagtcgttttgaggttctgtgtccatcaagcgacacgtcgttttgaagcaggaaccgaaccgtgcacccctttgtagtttgaagcgatcaacacgcgcaaccacggcgatgatgatgcaaatcaacatcacctccaccacctcaatcgtcacggcgttctcttcggatcattccccgaatgttctaccttgagccatgtccaacctcgttcagattcgcgtcgccgccgacgctagcgatggcttcgactctccggcgaagcagaaagcagccaaccgcagctcctacagcaatcgcccctttctctccctccgccgcgccaaacagttcctcggcgccgccaagttcaagctcttcttagttctttttgctctctccatcgtcgtttttgtctcctccagactcagttcgtggatgggatggaaccctcaccactcctcttcggtttcctccacttcaaggggtggctatactgtgcttataaacacttggaggcataaatctcttctgaaacaaactgttgctcattatgcatcctgtcgaagtgctgaagcaatacatgtggtgtggagtgaaagtgaacaaccatccgagaggcttaaaacatatctgaataagattgtggttttgaagtctcagaaagctcataaaccaaactttagatttgacatcaatgcagatggtgagccaaacagcaggtttaagccaataaagaacctcaagacagatgcaattttctcagttgatgatgatgtggttgttccatgctctactctagattttgctttctctgtctggcggtctgtttggtggatgggcacttatagcatggttcgaactcactggctatattttcaccggaaatacttggatttatatactcatgagatgtctccatcaattcaggactatgtttccagggagagaacttgtgaagacattgcaatgtccctttatgttgctaatgctacaagtggtcctccaatatgggtgaaaggcaaaatctatgagattggtgcatcgggtattagcagtctgagagggcatagcaacaggagaaacaaatgtctcaatgacttgatatcactatacggaactcttccacttgtgtcaactaatgtgaaagcagttagtgctagaaaagaatggttatggtagtgttgttatttcattaatcaggaaccgatccattcctctcacctaggaaaaatatgaacagaacttaattgcctgcatatgtgttgtggttatggtagttttgctatttcattaatcagttagcgctaatgattaaaaatcattggtcaaggaatttatcggcatattgtgtgtatacaatagttcacacttcttaagtgtctcactaagttttgattcattgatgtctgatgcaaaaatgtaatttgcatcttagttttttgcttatactaattctgcaaaatgcctagtgctgatgctccactgattattctgcaaaaccaagatgctccacttccctctttaattgttctgtaagtattaagaatgactatacaaatatattacgcaaaagacctaggtttgttcttgttatgaacgtggtcctgcccagttatcaacataataatgcttttgtggacatgcatgtctattctagctattctccatgtattgcaaaatcaagtaccatattagaaatggctacgggttgtgttgctgcagataacagtgttttttattaaaacaaaaa

SEQ ID NO: 100990 - DNA, 1333 bp, Glycine max
  Clone ID: PAT_MRT3847_62206C.1
ggctcgagctttgtagtttgaagcgctcaacacgcgcaacgacgatgatgcaaaccaatatcaccaccacaatcctcatcgcgttctcttcggtcaattcctcgaatgttctaccttgagccatgtccaacctcgttcagattcgcgtcgccgccgacgcaggcgacggcttcgactctccggcgaagcagaaagccgccaaccgcagcgcctacagcattcgcccctttctctacctccgccgcgccaaacagttcctcggcgccgccaagttcaagctcttcttagttctatttgctctctccgtcatcgttttcgtctcctccagactcagttcgtggaggggatggaaccctcaccaatcctcttcggtttcttccacttcaaggggtggttatactgtgcttataaacacttggaggcaaaaatctcttctgaagcaaactgttgctcattattcatcatgtcaaagtgtggatgcaatacatttggtgtggagtgaaagtgaacaaccatccgagaagctgaaaacatatctgaataagattgtggttttgaagtctcagaaagctcacaagccaaactttagatttgacatcaatgcagatggtgagccaaacagcaggtttaagccaataaaggacctcaagacagacgcaattttctcagttgatgatgatgtggttgttccatgttctactctagattttgctttctctgtctggcaaagtgcaccatttacgatggttggatttgttcctcgaatgcactggctggataaggagcaaaataatgctgcatattacaggtatggaggatggtggtctgtttggtggatgggcacttatagcatggttctctcaaaggctgcattctttcacaggaaatacttggatttatatactcatgagatgtctccatcaattcaggactatgtttccagggagagaacttgtgaagacattgcaatgtccctttatgttgctaatgctacaagtggtcctccaatatgggtgaaaggcaaaatctatgagattggtgcatcgggtattagcagtctgagagggcatagcaacaggagaaacaaatgtctcaatgacttgatatcactatacggaactcttccacttgtgtcaactaatgtgaaagcagttagtgctagaaatgaatggttatggtagtgttgtatttcattaatcaggaaccgatccatagaaaaatatgacagaacgttctgctatctcattaatcagttagcgctaatgattaaaaatcattggtcaaggaatttatcggcataatgtgtgtatacaatagttcacacttcttaagt

SEQ ID NO: 100991 - DNA, 624 bp, Glycine max
  Clone ID: PAT_MRT3847_62207C.1
ccatcaattcaggactatgtttccagggagagaacttgtgaagacattgcaatgtccctttttgttgctaatgccacaagtggtcctccaatatgggtgaaaggcaaaatctatgagattggcgcatcagctattagcagtctgagagggcatagccacaggagaagcaaatgtctcaatgacttgatatcactttacggaactcttccacttgtatcaactaatgtgaaagcagttagcgctagaaatgaatggttatggtagttttgctatttcattaatcagttagcgctaatgattaaaaatcattggtcaaggaatttatcggcatattgtgtgtatacaatagttcacacttcttaagtgtctcactaagttttgattcattgatgtctgatgcaaaaatgtaatttgcatcttagttttttgcttatactaattctgcaaaatgcctagtgctgatgctccactgattattctgcaaaaccaagatgctccacttccctctttaattgttctgtaagtattaagaatgactatacaaatatattacgcaaaagacctaggtttgttcttgttatgaacgtggtcctgcccagttatcaacataataatgcttttggg

SEQ ID NO: 100992 - DNA, 102 bp, Glycine max
  Clone ID: PAT_MRT3847_62208C.1
caaagtttcatcaaatgtactctcaattaagagaaatttgatgaatgctgaggcaagctatgataattttgggcgggaagcccgaatgcaaccatattgtac

SEQ ID NO: 100993 - DNA, 124 bp, Glycine max
  Clone ID: PAT_MRT3847_62209C.1
ataaagggcactcatgtttgataatatactcagtgttagtaggaaatcagcatgctccctgtggccacgctagctatctattccatataaagccctgactgagatgaagtgtctcccaggtagc

SEQ ID NO: 100994 - DNA, 535 bp, Glycine max
  Clone ID: PAT_MRT3847_62210C.1
ccacgcgtccggagaccagatgggtgacaggggcctaaacggtggggctgtggtttagcgtcacactgctcgctaatgccgccgtcgccggtggaggagaacgtactcgctatgaactattacaccgaatcatgctctgaggctgaaaacatcgtcaaagaacaagattagcttctctacaagcgccgcggaacactgcttgctccaggctcagaaacatcttccatgcactgtgctggggacagctgcgatgctaaactgatgctgggctgcgcggtatagagctagtctgataaggaaacagacagaagctatgggatgagaaattacaggaacagcgagaccatccacgaagcttgagaaggggaatgcccaagagctgaactctgtgctgacatgcgagatctatctgacgaagatggccttggttcgctacgacgaccacatatccctatccactcaaggagaaaggatggctgaaggagcatatacagggtggactatcacttcctaccagaccactgagaatccattg

SEQ ID NO: 100995 - DNA, 208 bp, Glycine max
  Clone ID: PAT_MRT3847_62211C.1
acatacccttcacctgatcatacctaaattacctatattaccacttaaacgcacacaaacaaaaaattttcccactttacatttcccaaccccagtgaccaccacccttcaccaaacacgattaaccctatccccccttaaccatacacccccccatacacccaagtaatccctaccatgtcatactcccctttcaagatcacccccc

SEQ ID NO: 100996 - DNA, 363 bp, Glycine max
  Clone ID: PAT_MRT3847_62212C.1
ggctcgagggttagagtaatttgtctccgaattttgcgaacgcgctgcccccactttcgtccttagaaacagatggaagaatcacttagtatagatggttgcagatcactattctccttctctgtttagtgtggctccaatgatggactggacagattatcactataggactttggcacgccttatatcgaaacatgcttggctctacacggacatgcttgcagctgaaacaattgtttatcaaaagggaaacctggacagaatcttggcgtattctctcgatcatcatcctattgtgccttaaattggagggagtattttagattattggcatatgctactgtacttgccattgcttactgc

SEQ ID NO: 100997 - DNA, 385 bp, Glycine max
  Clone ID: PAT_MRT3847_62213C.1
ggatagctggcttctgttatgttagagatttaatagtttaataattaaagaaaagaagaaaaggaacagcttagttctggattgtgcttgttttattgattctccattttagggttcgttgaaagatactgcagaaactgtcggttttattagtaattcagcacaaattcttcggtggagttttttttttttcttctgtttttggctgcgtttacgctgtgtttgtttagtttcctggaaattgttcaaattggttaaaggatctttataagtggacatttcagttggagttaattgcgcaattgaaagttaaggcataaatgtctctatttagggaagtatttgaatgcaatgctgcttcattatgttctggtaaatctggata

SEQ ID NO: 100998 - DNA, 297 bp, Glycine max
  Clone ID: PAT_MRT3847_62214C.1
ttttattgaaataaggagaaaacaacttacggacataccataagctttctaggataaatggtgctactcacagaagggctgatatgcccaagtgaacattaaatgagctcttctaaacataccttaatcggagcaatgcacgcgaatgttaatgcgcatgttctaccacgaatatatctaaaatgctgagaaaggtcattattgtaatagggatccaaattttcatatcaatagcacctatgactttgccgttgccatttacgaatctaggggacaaagaatttatttaatcgacat

SEQ ID NO: 100999 - DNA, 281 bp, Glycine max
  Clone ID: PAT_MRT3847_62215C.1
agggaaaattggcagccttcaagaacatcatcggcttggaatactatcattcacgctctagcaatttttccattcaaacaacacaagaaatttgctggcgaccactaatagttcaaactattgggacattctcaaacaaaaacttgttcttgggaatagaaaaaacatttatacccttgggtggacaaaagggccctgcccagtaaaaggggcgttaatcagattgggggaaggtggtccccccaacttaagggggggattcaaagcaattgaaatccttc

SEQ ID NO: 101000 - DNA, 352 bp, Glycine max
  Clone ID: PAT_MRT3847_62216C.1
cttaacaagaacccatccttgcgtgtaaaagaaatgttaagtaacaagggttgactggttaaggcttacctggcacacatggggcaaccaaatttgttttttttttgaccgggctaccatacctgtgtaggataggtgtattatgtttcattctgctgagggtgcgttgttcttgaggttcaaaagttctcccgaagaaggttgttggatcataacactcggataagattgtcatgacgaaacaagcgtgctcccggataggcctcggcaattcctttggggccattttcaaaaacctggaagatatttaaggatagaatgaccttctcaaacaatctcttgcttggcccaa

SEQ ID NO: 101001 - DNA, 380 bp, Glycine max
  Clone ID: PAT_MRT3847_62217C.1
ggttatgcaatgtttccattgcatcaaaacggtaacattgcataaccaaaaaataaattgtgagtaaaaggagaaacggaaggcttatcagaattttgcacctactatacctaactcatacaatcacacaattcctacctaagggcggccacccatctaccagccaatcccccccccaattaattctggaccggctcctatacgcttaccagcctttcctttcgtctaccccattacagcccccaccatccacgttcatagctgctccctgcgtgacattgctatcccctcccaattcctcacaacataccagccgcaaccatataatgcaaagcccgccgtgcccaatgagcgagctaactcccactacttgcttctcc

SEQ ID NO: 101002 - DNA, 1141 bp, Glycine max
  Clone ID: PAT_MRT3847_62218C.1
ccacgcgtccgctggaaccagagctgccatacgcctatgaccgcttctctaactcccttaaagtagtgacctctcttctcttctcttctcatctcatctcttgtcttcaccacccctccccaacttcacgtgatcctttcaaatccaaaacggtgcgtattatcaccgccgcgagagacccttttcgtactacaatcacggaaacgttcgaggttcatgacggggtttcataaaatcacacgctttttcttttaattcggttgtttaagctcttcctaaagacccctttaatcagaatccaaattaaagataaagaaaaaggtggtggtggtggtgtcggaatcacaatgccagaggttagaatcattgccaagaatttcatggacatggtggcttccatgcccgccatgaagctcgataagctctatgaaaacggattcatctgtgaagctattctcaggtctcttctgcctcttgcgaagaaatacgtcatacagatgctgcatattgatgtgtcagtggcagctaaattgttggaggaatgggtgcttccgggtggagtttcaaagcacagagtggccattgataggttggttcaattgagagttttccttgaagctgttgacagaatgaaaagacttacaaagttaatccaacatttcagagaagtctccaaaaacttttagtacaaggtggaactttgccaagggaatcaatgccttctaatattactgtgaggctcccaaccttagagaatcttgaggcttatgctctagaacaatgggagtgtttcttattgcaacttataagcccaagtcaggttgaaaagcccttaaatattagctcttccttgatgaaggttttccagcggcgtatcctgagtcacagagacaaagaagctccaaaattaactgaaagtggtttccagtttttgctgatggatacaaatgcacagctttggtacatcatcagggaatatatctctaattctgaggatagaggtgttgatgcagctgatttgatctcattcatgctggaacttagttttcatgtcattggggaggcttatagtgttgacacattgactagttttcagaggaccataattaatgacctagcagaccttggattggtaaaaatt

SEQ ID NO: 101003 - DNA, 283 bp, Glycine max
  unsure (1)..(283): unsure at all n locations
  Clone ID: PAT_MRT3847_62219C.1
gtaaacagtaaatatttattgctcagctactctgatcactatgtaatgacaagcaacgattggaaaaagttaaaacaaataaatgaaagcctgttttcttgaattaaaaaaaaaaaaaagatcacgttttctccaaacctttcacaaaccctcccgtgtgagttcttatttcttggntccttctatttttttcgccaaatacttccccatttttttttttttccaatccatataaaccaccatttttttggggtcctatttttttgccagggggtagcaatca

SEQ ID NO: 101004 - DNA, 375 bp, Glycine max
  Clone ID: PAT_MRT3847_6221C.1
ggctcgagcgattcggtattaattgcaatttgaagccgtcatcagagtcacagccaagcgtatcaactgaagcttgtgatgaaacagataatgtattagcacaactgaacaatgagacctctgacaatatggatgagagtagtatacccaatggaatccatgaatgttctcctcgtgaggatcatacactcccaatattgaagaaaatccttgacttgagtactaaaattcagaatttgaagaaacaacatgtagccctatctaatcaagtgaaactcacaactgagtcatttccaagcctaaatgttttaaagatctgttcagcttcttggtgctgaatatgaacgtgtctgaaagaaagtacgtagaggagtc

SEQ ID NO: 101005 - DNA, 1167 bp, Glycine max
  Clone ID: PAT_MRT3847_62220C.1
aataattactaaattatttaattataatacattactaactttttggaaaagataagaaaaataaaaataaaacggagaacaagcgttgtgagcgtgaaacgcgattcaaagatacaaagagatttgctacttgctagcaagaaaaagaacgaatttgtcacacatgcttctcttgtcttcctttccgtgtaacatcaccatggtaatggaggtagtgtaatatatgtatcgcactcgcagatagtctccaagtgaaggcgcgtgtactttcctctccctttcaccgtcatttccctgcctcaacaaatagacacttctttcaataaacagatcgacgcttattcacatggcaacgcaccggaaattcaaattccggtcaccgccgccacctgcttttcccgactaaatgcacataacctgattgatacctttgaacatgtaatcaaataaaactattcattcccattaaagaaatcgtcactgcttcttcttctcacttgtaatggcgagcaccacaccctctgctgactcagcttcagcagatgaagttaccgcaaaagccgttaacaagcgctacgaagggctggtcacggttcgaaccaaagctataaagggcaaaggggcttggtattggccgcacctggaacccatgttgctgcacaacaccgaaacggggctccccaaagcggtcaaactcaggtgctccctatgcgacgccgttttctccgcttccaatccttcacgcactgcttctgagcatctaaagcgcggaacctgccccaatttcaattccgccgccaaaccaatctcctccgtgtcttcctcctccgccgtcgccgccatggccttgtcgcctccatcctctccgaccaaccacaaccaccgcaagagaatttcttcttcctacgacgcgccgtcgcagcaacaacagccgaatttggtgttatccggtggaaaggacgatttgggagctttggctatgttggaagacagtgtgaagaaattaaagagtccgaaaacttcagccggtccaactctaaccaaaagtcaagtcgatagcgcctttgattatctcgctgattgggtctacgagtcttgtggctctgtctctttttccgctcttgagcaccccaagttcagagcgtttctcaaccaggtcgggttgcc

SEQ ID NO: 101006 - DNA, 323 bp, Glycine max
  Clone ID: PAT_MRT3847_62221C.1
cctaaaattggctttcaaaaaattaattcccaattagggaattttgccttcccaatttaagtttttgggattcttaccagaatttcttgatccaattccctggagggaagaaccccctttttttaccaccccccatttttatttttccccaggttattccttcttaagtccaaaacccaaggccttcaaaatggcttacttaaatccctttggtaaggaacccccttaaaattttaccttcttaacttccaatgggaccacaattaacttggttgggttggccaaacctatcccttaattcttaccacttaaaccattgccac

SEQ ID NO: 101007 - DNA, 490 bp, Glycine max
  Clone ID: PAT_MRT3847_62222C.1
ggacccttggttttactctgtaattttcggcccgcgggggccgccccggaaattccccccgggaaccgggagggaaacccgggcccccaaaagggaatccaaaaaaacggggggaaaataaaggccaaaaacaatccccgaagaaaaaacgacccggaaaaaaaaatccccaaaccaaacgcccccaaagaaaaaacgaaaaaccctggggggccaaaggggggcgccccccaaaaaaaatgggaaaccggtcagggcccctttaaaaaggaaaaaaccaacccgccaaaagaggtaaataaattgtccaacccccgggggaaggcgctttgcaaaaggggccccgggagaggtttactttcccccacggaaaggcccaaaaagagatggcccaacccggcctgcccctaaaaaaggggcaggaaaaaatcccccctgaggggccccaacgggggaaaaacccggagaaggtgccaaacggggggaaaaa

SEQ ID NO: 101008 - DNA, 329 bp, Glycine max
  Clone ID: PAT_MRT3847_62223C.1
gtttttgctcaagataaagatttgatacttaattcaagttcctttaaggattccttctctgacaatgagggttagtcccatccctatgctgctttgcgttttctgcgggaccattttcccacatcagatcactctccatgaggcaattaccctcattactcatataaaagacgtagaaaatcctgtatacaatgacacactgcctcatcacatattaaccatcactactatgttcaataccatttacatttacaattattagaagctgcagattatgcaagaaagaagggagtgatactaaagggagatcttcctattggggttgacag

SEQ ID NO: 101009 - DNA, 375 bp, Glycine max
  Clone ID: PAT_MRT3847_62224C.1
cgaacatctcactaggatttcggcccgccttttaattggggggctgtgtacttaatgcgaagaggggccttccatgggcccccaacaaacttctctaaaacattggatggggctgatgagactgaggtcagtgtattctactgaagacaaaagtgatctgaatgacctgagtactctatatccagaaaatgatgacgagaggaatgatggctctgttccaaatgacggaatgcctgtatttcagattgtcctgaaagattgatcccgggggtaaaggcgataggctttcatggtgaaaactccccagaacagctaccatcgctttatctgctgcgatagaacactatcttgtggagcactaccacgacgatcatg

SEQ ID NO: 101010 - DNA, 549 bp, Glycine max
  Clone ID: PAT_MRT3847_62225C.1
ttttagttttggggttccaagttgtcctcatttcaagtctgtgttggttatagaaaagcgcccaagttagagctgagtgtgagataataacaatggcatttctcagagcagcttctgaagttttggcaatctatacccttgtctttaccattttttcacctgctgttcttgaagcacagtctctttcccttgcagctgctcctgctccttccagagatggtacttcaatagaccaaggaattgcatacgtattgatggttgtggcgctggtgctcacgtacctcatccacccctttgacgcgtcttcccatcacttctgaattatctgtactaagaattttgaacatagtattagtagggactggctggggttgaatttattacgtggataaatatcttctattttttttttttgctttattctcttcttatccccctcccaattttacatctttcgtttacttgttaacgatagatgattgctagcggaggaaataatgtattaatataaatattttatttatttaaaggtcatgatctattttagac

SEQ ID NO: 101011 - DNA, 487 bp, Glycine max
  Clone ID: PAT_MRT3847_62226C.1
cgaccatgttttgataaacttctctcataagttaaaaacaactactgcacctcagcttttgaataagtttgatgagagcttctataaaagttgaagtgcataagttgacctcaacttatggaaaaattatgtttttccattttattttcttctcctataagtatgatgtagaatttaggtgggaatcaaagtatatatggagaactttatccaaacaaggcttaaaaggacttggatctatatggcttcttgagagacctggtttttgacattacacaacggcatctatgtagttagtcctacctagagtgaagtggttttggtgttggtgttgatatgtgactaatgtttcaatattggccatgtcatgagcctgcctcccaaaagtttctatcataattgggagatatagaggaattctgatgtatatttggattgaaatattaatgcagctggattatatatgttcacttatttagttgcttac

SEQ ID NO: 101012 - DNA, 529 bp, Glycine max
  Clone ID: PAT_MRT3847_62227C.1
aattcggctcgagaagtagtatttgcctacaacgttagagagtccagccctagccgcgtcacactccttggccaccattcttttttatgtggtgcttctgattccccttcacgcccattggctcttccaaaacacacttatccctttccatccaccaaaccaatactcccaaatctcacaaacaccacctccattggcgctatcacgctacgccgtcgtttagcacctccttctccacccttcgtctctcaatccacacaccctcttatcgtttttgtccttctctccctctcgtttttcgccaaatttgtcttctttttgcaccttctccctgatttttcctcgcctcaaataatattctgcggctccttccccccccccccctttaacttttctgaggagctgaacagattttgggggttcctttcttcttctttatcttttattattttttctttttaagttttttttttttattattcttcaccttgcaatctctcctagttgttctgttcttcttggttttatg

SEQ ID NO: 101013 - DNA, 515 bp, Glycine max
  Clone ID: PAT_MRT3847_62228C.1
agacagagctacaacaccccatggcatcagctctaaagcagctcactttcacagacagcaggaactgaaaatggcgggtgtctgtcatgtctaaaataggagaatttggtgtaacacaaatcaagaaccataagattttaatataaaattatgaaaaaattacccgaacaacaccaccaaatccacgagaacttggctgcagaaaggtgtgtaattcatgtatctttgaccagggatgtattaactttgtgctctgggcatcccagagctcgacatctgcatctgtgcttccagttaaaaacaagctggcatttgggatggtaactacttttgtgacactccctatgatcataaaatttaagcagaaaccgttaggaaaagaataaaccattactacaagtgcaaataaactttcttcacctgagtgagcctttggaatgttccaaagcatcccatctacatttcgatccttattacgagttaaagatgagacagagctttgcccaatgttatca

SEQ ID NO: 101014 - DNA, 166 bp, Glycine max
  Clone ID: PAT_MRT3847_62229C.1
aatagatcgctgctgtgtttgtcttagtgtgtttgttattcactatcgtcattcctgttcctcaagctttgtagggagcagatataatggctgttgaaaagtctggaattccaaagatgtacgaaggagttgtgtaccatgagcccatttgcatgctttatttggt

SEQ ID NO: 101015 - DNA, 463 bp, Glycine max
  Clone ID: PAT_MRT3847_6222C.1
tcgatgatgaaaaacgtatcatggttttggacccggtttggccgtggatcatcctccaatttcagcacagtaagtatagcatccagttcttccaatgactccgtcgacagtagcatccaaaaccaaaactacagatacgatgtatttatcagtttcagaggtcctgacacccgcaacactttcgttgatcatctttatgcccatctcctccgaaagggtattttcgtctttaaggatgacgaaaagctccagaaaggagaatccatatcagcacagcttctacaagcaattcaagattcacgcctttcaatcattgtcttttccaaacaatacgcttcctccacatggtgtttagacgaaatggccgctatagctgattgcaaacaacaatcaaaccaaactgtgttccctgttttctatgatgtagatccatctcatgtaagacatcaaaacggggcatacg

SEQ ID NO: 101016 - DNA, 337 bp, Glycine max
  Clone ID: PAT_MRT3847_62230C.1
tggtcatggaccttatggccacagagttgcaaagaaagttagggattcttttcctttaaagcttaatgcccaatgggatgtgcatcataaaaatagagacagactcagtgatcattgcagtgccacaggaagttataaatctgaagggaatggatttagactggtggatgagaaaactagtccctttgatcatgaacatgaggaaacagatactatgttgacattacgagaatctttgttgaaggcttgtaagattatggacaaagaactgaaacttcatcctgatattgactgcttttgtagtgggactacagcagttaccttggtcaagcaaggg

SEQ ID NO: 101017 - DNA, 408 bp, Glycine max
  Clone ID: PAT_MRT3847_62231C.1
gcccacgctccgacggtgcagaaactcaaaggggggtgttgtctattccaaccaaaagggacgtggagcggttttttgtgagtgtgtgacacagacagcgatctgttccagacacatagagaggggtttgggattggagggattgacgctgcgtctcttccttttctcttttgatccatccctcattcctaatcctgcaatccaaccacctgatccttacacttacatatacacatatttgaacgcgtatcttccctcctatggctttaaagcacatactctaggagctcatggacttgcataaagacccaccaacttcttgcagcgctgttccattatctgctgacatgttccattgtcatgctacaataatgggtcctgactgttaatcctattgctggaggtgtt

SEQ ID NO: 101018 - DNA, 322 bp, Glycine max
  Clone ID: PAT_MRT3847_62232C.1
aattcggctcgagcgcatgacctagatccaccaacttccaatggtcttctcgcatggttctcgtgagcaggaggggcccttaccattgatggcttgattaagattttagtatgaaaaaccgcggcgggtaaacacgtaggaatcccgtgctgacatactggactgtgcggcggacgattatgtattggccgaggtagtgctgggtctgtatctgcgtatcggaacgttgggtgcattagattcatataatgacgactgctcacaatattggcctttggacatccgtatttcaaatgccactgctgctgtagctcaggagggg

SEQ ID NO: 101019 - DNA, 228 bp, Glycine max
  unsure (1)..(228): unsure at all n locations
  Clone ID: PAT_MRT3847_62233C.1
atcctgtatagcgggcgcgactccacgcgttcgtttcattacaatattgcgctcaaagctgagataattattaacagataccctcacaacactcangcattgatgagcgtctggtgatctgatcggatatggagcacatgaaccacacagcataacttgagtggctgatgcttgataaagaagatactgtgtctccactaagcactgatcttgcaaacacatgagggc

SEQ ID NO: 101020 - DNA, 462 bp, Glycine max
  unsure (1)..(462): unsure at all n locations
  Clone ID: PAT_MRT3847_62234C.1
tacggctgcgagaagacgacagaagggggatctggctgttatttggcttttgtgatggtcttgttggagggtagcaccttggtgctttgtatttataatctctggtaccactggtactggttttttttattaataatatatatattttcagccttccaaaaaaaaagtgatatctggtcctatttatactaatattcttgatcaattactagtgtgatactatgaattaatgcacactgaagcccaatatcactcctaacataacactactatcttggatgcgaaattattttggaaactagaaatgaacaataaactggatgacaatttttctttcaaagggcttgcatgctcaaggatcatgatcaagctagatcctggatttgaacattcatagttcatcctaatctcctttaaattttgatctgatgtactaagcctttactggtactattgnctatg

SEQ ID NO: 101021 - DNA, 237 bp, Glycine max
  Clone ID: PAT_MRT3847_62235C.1
ggaccgggattaatcccgcgcgcgaccatctcctaggcttcggccgccctatctattgtgctgagcttttgtcatttaaacatatcgccctcttcggcggaggaaccacaatggaaaaacgggagatagtttcacacttggccaaacttacgcaacaagaagctcatgcatagttgccgtttgggataaaggcttttaacaggcgaaattgtcacggctgccaaatcatccgtcgga

SEQ ID NO: 101022 - DNA, 244 bp, Glycine max
  Clone ID: PAT_MRT3847_62236C.1
cacaaccacaagaagctgattcttgttaacagttacagaatgaatgctcactggactcgttctcccatatttacagttgagaaaaacttgtccgttaagttttaaatctaagcgatggctcttccatggttcgtcatctgcttcaagatctgcatttcattcacacaccataccattatgttactcataacacaccctttccttaaacttaggctcacactcttctcaatccataaccctttaa

SEQ ID NO: 101023 - DNA, 378 bp, Glycine max
  Clone ID: PAT_MRT3847_62237C.1
ttttcgagaagaaatttattttcacgagctcgagaatgatgacgaagcccgctatgagtgcatttttggtggtagcactcccactactggcggaggtggggcccatggctgaggctgtgacatgcaccccaacagagttgattccgtgtcttccaacaaacacttccggtgctaaaccttccaaagcttgttgcaccaagcttaagcaacaaaaaccatgcttatgtggctaccttaaaaacccctgctagaagcaatattgtaacttttcttatgcccgaaaaaccgtagctttttgtgggatttcctttccaacttgttaattaattaaaccttttttaaaaaaaagggggggataattttaaatttatagataaa

SEQ ID NO: 101024 - DNA, 252 bp, Glycine max
  Clone ID: PAT_MRT3847_62238C.1
tcggcattcggctcgcgctcgagcgaatcggctcgagcgacggcgctctctcgaagacaggcgcaggcgctatgacgacgatgtagactattaacacgatatgagcgttgaccggcgcccgcaaccgccaccgccacgtcgacgtcgtcgccctcagcgtcgagacagcactcagtctgcatcagactaccagcccaaacctgagaccaaagaccttggtcctacgctaatgacgagtgctgctggtgcgtt

SEQ ID NO: 101025 - DNA, 408 bp, Glycine max
  Clone ID: PAT_MRT3847_62239C.1
cttgctgagctacaacctgccatgtccactcactgcagaaagaaagcataagcggaatcagagacatcatcaaagacacgggtcattttacgaccacagaaacacaacatggactaaacacgagaaagattttgctcagacagacgatgaaactatgggagagattagaaagagaggcaccactcctaatgctcatgaacagggagctcatgaatatgaccaacatgttgctaatgaaattttaatggaccaaaatacagctgctgacaagacatgatctactatggttaataagagagaagatgttatgatgccttaaacacagggaagctaggagatcttaaacatatttactgatgggaccgagtctgacaatatgcatacatctgcgtctaacattaatgcacg

SEQ ID NO: 101026 - DNA, 362 bp, Glycine max
  Clone ID: PAT_MRT3847_6223C.1
aatcgggtgtttttcatttttttaattttgtttattttcattttgggggaaaaaaggccaaaggccttaatatttattccaaaaaaaaaatatcgggttgcccaggtccataataatttggactaaaaaaaaccttcaaattttcccagggaggagaaacccttttaccaccccaactcaccaaaaaatttttccctttggaagggggcaaattgtcccccaaacaaattgctgcccatttttaaataatatactgtgggagacttttttcccatttacccttggtaccaagaaaagggtttcatttttcccctcctaaaaatttggttaacccaaggtacaaccaaagggctttttttttt

SEQ ID NO: 101027 - DNA, 247 bp, Glycine max
  Clone ID: PAT_MRT3847_62240C.1
gttaaaaacaactctgcaagtatactccatctcttatgatctctccaaggtaagagcctcttctgctccacacccacttgtccaccgtttgtaagctcctttaatgcagactgtggctggctacgatttgagggtccagtacaagagtcttagcatcggttaacccaactgcacaggtagtctccaaataatggagcctcatgatgagactggatgcatagcaatggaacgcgccattctttgcatt

SEQ ID NO: 101028 - DNA, 449 bp, Glycine max
  Clone ID: PAT_MRT3847_62241C.1
gctcgtataggccattcatctcacataggaccactagacaatctttagatcaaagcgctattgaacatgcatgtgggaacaacaacatactgcagggtgtgacatacatatgttccatgaaaagaataaacgtcgcaagaactgaccactaggaatcttatctatgtgcataggtactggaaagagtacagctgactgatttgagagtactgattgcactgatgaactatgcaatgcccctaaagtgtataaccttaatttatccaatgacgctcgcttgaaatagatacttcatactcactatatatggtcatcaaattagaaatcacaataaaatctttctctatggaagtgacaatggcaaccactactcaagcgattaatcctttctacacattagacttgcattcatttctgatatatccatgacaattgcaaacatacactta

SEQ ID NO: 101029 - DNA, 211 bp, Glycine max
  Clone ID: PAT_MRT3847_62242C.1
cttatttactactctaaaatcttctacttattcattaccaatttaaaccttcagcacgatcgactacatcgtggctacaaatcatcctacaatataaacaaccacatattaacacatactcatcatctactactatcacttttcctcctaacacaccttatctatatacaccatacaatcacaactaacaatactcttgattttatttata

SEQ ID NO: 101030 - DNA, 476 bp, Glycine max
  unsure (1)..(476): unsure at all n locations
  Clone ID: PAT_MRT3847_62244C.1
gaagaggagcaggtataagtctatttaatagtagctcttaccttgtattcctctcggactcatacaatgagataaatataatgtaatggtattttctctccacaagatagacttattattattgcttaaacaaaaattcataaagatgaagagaagataattacaaagagtttggagagtaaagaatcctccctattgctaagaagaattgccaatattaactattggaagtgccaaaatggctattatgcgttgcaactgtataactattagaattaaaattatattaggtttttatgtttggtgaatagtgattgacttattatcatttatgcttttgctcacttgatgggttaagtattcnttctggagtagttttaatgcgaccatctgggctttgtttagtgattcaactagagaaataatcagtagtatgtcctggaatgatcaattaagttgattagggttttatatgt

SEQ ID NO: 101031 - DNA, 155 bp, Glycine max
  Clone ID: PAT_MRT3847_62245C.1
catgcaaccaccattcttaggattaaaattggttaaaactaatacatcaaagggggttgtttaagaaacgaaaatccaaactaaacatatccacaaattaaaaaatatttccctcttgcattcatctttagaaacgaagatacaacactaaccct

SEQ ID NO: 101032 - DNA, 372 bp, Glycine max
  Clone ID: PAT_MRT3847_62246C.1
ctccattttttttttggggctttttatggcatttttcttttaatttattaatacttcaaattttccccagaggcccaaagattagatacattttaaataacaaaaagaagagatgccctgctccccaagacaattaaaaatgcctccaaaggagcctcctaaaaaccacccccctagggctaaaatgacccaagttaccatttttttaaaactttgacacacatctcagtctgttgaaaaggctgcaccaaaaatattttttaagaatctgaccccccaaaaacgggtttaggggggtttttgaagctcaagcccccctcccccgaaaaagaaaaacgaaacccggactggcgctagtgaaaaaagaaaatg

SEQ ID NO: 101033 - DNA, 1980 bp, Glycine max
  unsure (1)..(1980): unsure at all n locations
  Clone ID: PAT_MRT3847_62247C.1
aacattcataacaaccaacgtctaaatttgggcttggaaaccaaatttacaagattgaacataaatgagaaactaaattcatgaataaatttaaagggagactaaaatgaaaattgaagacaactaggatgaccaaatttacaattttgtcattctaaatctaattctaattctagggacaacaatgacatgctgataatttgttagagaaatggtaagatatatattagtcattatttatgagccaagaaaaaacaaaaactagtcattgacttttcaacaaatgcaattcatttgaaaactaagggcaatgtgttgcaaacaagtccaaagtcattttttatttgctgtacacctttgacacattcgttcatcctcttgccaacacaatggaaatctccaacctcctcgttgctcatcttcaccgaaccaaccacctcaacaattttccaaaccaaaacctcaatagagagaaacaaatttttcagaggccatcatggacagagaacaagaagagatgcaatttcttgggttctttgacatatacaaagaagcctctaagatcatactttcatggaggaaaatcttcacccaaatcacctcaacactaatcctgcctctctccttcatcttcctaatccacatggaaatctccaacctccttttcaggaagatcctcatcaacgaaatagtcatggacgaaacaaggcgtaacacaccccaatacaacaagcttgaccgcatgatctcttctgaattgatcactcttgtgctcttcaaaatcgcatacttcactcttcttctcatattctccctcctttctacctcggcagtagtctacaccatcgcatcaatctacaccgcaaaagaagtgacattcaagagggtcatgagtgttgtccctaaggtgtggaaaaggttaatgttgacctttctatgtgcctttgctgcttttttcatttacaatatcgtgaccatgttggttatgttcttgtcaatagtcacaatagggataagtagtggtggggttgtggttttggttttgataacggttttgtacttcattgggtttgtgtaccttaccgtggtgtgtcaccaagcaagtgttgtgaccgtgttggaggactcgtgggggattcgagccatgtccaagagcaaggagttgataaaggggaagatggttttatcactattcagcgtttttactgtgttggaggacttgtgtttccattagggttttgttcaaggtgatggtggttgatggatggagggtgagttctgtggacaaaacagcatatggggttctctgtttcttgctcttgtcttgtttgttcctctttgggcttgttcttcaaactgtgctctactttgtttgcaagtcctatcaccatgagaatattgacaaatcggctttggcagatcatcttgaagggtatagaggagagtatgttccattgacagctaaggatgttcagctggagcaataccaagtttgattaataatttataatatagcttggataaattatattggtgatgtggttaattatatctgctatggtttcttgatgtcatgagaaatatcttttgtgtgtgaaattaaggcaggtatgatgatgtgaatttgattactccatctctatatgattatgtatttaatttaaagtttgaaaataggaatcttttgcgcaggtgtgaagtgattttcattactctctatatgattggttatatgtatttaattttctgtttaaaaataggactcttttgcaaaggtgtattaattaatgctatgagatgactttatttcacatcaaanaaaaaaaaaaaaaactcgagctcgtgccgaattcggcacgagtggcctcagacccagagaagaaagccacccttcaattggcggagatcaagcacgcccgtcttgncatggtgggcttctagggctttgcagtccaagccgacgcatcggcaagggccgct

SEQ ID NO: 101034 - DNA, 287 bp, Glycine max
  Clone ID: PAT_MRT3847_62248C.1
ctcgagccgaatcggctcgagtacggctgcgagaagacgacagacgggcatcatattatgcgtgacatgctacaccatttgaatgacagttttgagcaaaagataaagtgtgtttagaaacgtggtggaccatcttgagaaaacgtaaccttaaaagttactacattcaattttcacacaatttaaattaaattaaattccgcaaacaaggttacactgcagtgcaaggaattgctgatcgtgaccataatacaagcatatgttaaaatttctctagaagctgacca

SEQ ID NO: 101035 - DNA, 1018 bp, Glycine max
  Clone ID: PAT_MRT3847_62249C.1
aattcggctcgaggtcgcattctattcacctaacctctttcagtctgtgggtatgggacacgatgctgctttactttcaactgtaatacttggaattgtcaaccttgcttctctcatcttatccactgctgttgttgatcgctttggtcgaaggttcttgttcattactggtggcattctcatgcttttctgtcagattgcggtgtctgctttgctagctatggtgactggtgttcatggtacaaaggacatatcaaagggtaacgcaatgttggtattggtcctactgtgcttttatgatgcaggttttggttggtcatggggccctctcacctggctaattccaagtgaaattttccccttgaaaatcagaaccaccgggcaaagcatagcagttggggtgcagtttatagcactatttgcgttatcccagacatttttgacaatgctatgccactttaagttcggcgccttcttgttctatgggggttggattgtaatcatgactctctttgttatatttttcgtgccagagactaaaggaattcctttggagtcaatggacaccatatggggtaaacactggttttggcgccggtttgttaaaggagaagttgcccaagaaaatcttccctgaactaaataacaagttaggtgctgttgtttgtaagaaatagtacgttgaaaaatactagctttcccctcctatataccctacaagtttttctgtatatgtagaaaaattaacatgttatctatatagtacttataactatttgtatggcagtggcctagtcagcgaagcttaatgtatctgttctttactgcaacaacttctttgaaggtacagggatatgaccatttcattaatccactagatctcttaataagtagtggtgggggattgatataaatgtataattaattaggacttagattttatgactctcattatatttgtgtgtgaacttcacaatgtaattctatagctgtcggggaatacattacatcattaatt

SEQ ID NO: 101036 - DNA, 250 bp, Glycine max
  Clone ID: PAT_MRT3847_6224C.1
acttatttagaataactttaccatttggggccatgggactctttacaatgaattaatctaaacataacctaaggggcttacacacatttggctctgcggtacggttcattatttacattaacactttattcaatactaaacagtgacttcttcacacaccaaggatgctatccctcgcccaaattgcttgtgcgttaccggacaccttactgagaaattaatccatgcctgattgttaggttgctggcct

SEQ ID NO: 101037 - DNA, 413 bp, Glycine max
  Clone ID: PAT_MRT3847_62250C.1
caagcattggagaggcattaaaccaaggacaggggcaccatattcctgtgatattggctatgaacgatttctaggccctgagattttctttaatcccgagatatatggcagtgactttaccacccctttgccagttgtaatagacaagtgtattcagtctgcgccaattgacacaaggagatcattatacaagaatgtagtgttgtctggaggttcaaccatgttcaaggattttcacaggaggttgcaacgtgatctaaaaaaaatagtggatgctcgtgtacttttatctgaatcacgcttgaatggggagataaaatcgcagccagtggaggtaaatgtactcagcaatccaatccagagatttgcatgttggtttggaggatcagtgcttgcattaacacctgaatttt

SEQ ID NO: 101038 - DNA, 322 bp, Glycine max
  Clone ID: PAT_MRT3847_62251C.1
cggccgccctttttttttttttttaattgaagacacacaactacattatgtttaattatctaaaaaggcagcagatcacaacacaaatgccaaatgaaaaaccaatattagatgtccaagtccaggtggacaaaaagcatcaaacgtctctaaagatgcagcattcaagctttcaaatatggaccatatggatggcagcaactacagttttctttgtaatgatcacaccgagctttaatccatggaaaaactaccaataccgggggagcaagaattaaaaggaaatgctccaaatgacgaactcttaccaattaaagttgag

SEQ ID NO: 101039 - DNA, 130 bp, Glycine max
  Clone ID: PAT_MRT3847_62252C.1
aagtgcaaagtcttcatttttattattggggtaatgtgaatgagaggggcaaaaccattaatgtggggggcgcactccaagcatggcaaatttcacatgccatgtttgaaatacccacgcctttatgttc

SEQ ID NO: 101040 - DNA, 374 bp, Glycine max
  Clone ID: PAT_MRT3847_62253C.1
gcgtcccgtggtcggacgcgtgggccgacgcctgggccaagacctaacttgccgtttgtgctcaacgcactagccgatgatgaggatgctgccgtggtgtatgatgatgtacactccatcgctctacgtctctgacgatgatcgcgcaacgatgattgcaaaatactgatttaagttatcaccatgcacttgattgttgaggattgctacgagggtaagaatatattaatggcttgatgatcagatgtgggattcatggagtatgatcttactactgtcacaggcagagtgcgtgttgggtgtattaagctctttggtgctataagtttctaaagcattttatgaggagggaaatattgaatgggaagagaaaa

SEQ ID NO: 101041 - DNA, 307 bp, Glycine max
  Clone ID: PAT_MRT3847_62254C.1
acgcgtgggcaaagtttttatgcgtcaagatgaaatccaggagaaacaaagaaaaatttacactcttttttttttcagttttttgtcccctctttttgtaaattaagatcatgggaggcttacgtggtggtattacttgcaatatgtcgatctgtaaaaagcacttgcttatctcacatacataccaaagaataattagctagtaatgatcttcttaactctttcatatgttattttattgacttttgagggtaaatgaaaaatgacttttttatttttagtgatataaaaataaatatttcgatga

SEQ ID NO: 101042 - DNA, 252 bp, Glycine max
  unsure (1)..(252): unsure at all n locations
  Clone ID: PAT_MRT3847_62255C.1
ttgcactcttctagtttgtctggcaacacccaacaaatatctaaagtataatgaggttaggggctttcaattttggcggaaataaaaatgagggggaaacattctcatatagatgtgtgtagaaaatattggttgttcgatgatatgacagctgtgcatcatannncggctttgtgaagggggtgttgttctcccttctccgatgcttatcccataaagggtttgatggatgggagatatagtggggattga

SEQ ID NO: 101043 - DNA, 280 bp, Glycine max
  unsure (1)..(280): unsure at all n locations
  Clone ID: PAT_MRT3847_62256C.1
ctaatnncccatacagatgcanacgcgganatgattntngcanatggtntcactctccttngcaatanacatccaggcggaaccctcaagatatagtaatggtacggatangttttaaacaatatttcaattctgaatcatgcatnattncngggttatttatnctttccttcattaatatgatcctatgtgtaaggctatatttaaaaaactgctatttaaacaatgatnacataagttacaaacacctattaaatgtganaactaaagatacaggtgc

SEQ ID NO: 101044 - DNA, 364 bp, Glycine max
  Clone ID: PAT_MRT3847_62257C.1
gtgatgtggcatggaaacatggggtttcagttgaagaaactagaaggattcaatgcaaatattgtccgaaggtagtaaaaggaggtgcttataagttgaagcatcacttatttcaaacaaataaggatgttgaaccttgcaaaactgttattgatgatgtaaggaaggaagtgtgggacattgtctaaggtgtgaaagcaaaactgaacaaaagataaagttcaacataacaggaatcttgaaactagtgagaaaagaaaaaaagagtaatgaagtggttgatgttgagaagtctggaaacatttgcagaattaagggtatgagcacccaaaccacaatcaatatcttgtataagaggaatata

SEQ ID NO: 101045 - DNA, 418 bp, Glycine max
  unsure (1)..(418): unsure at all n locations
  Clone ID: PAT_MRT3847_62258C.1
cccantnnttcnnngactcattggcagacgcttgggcaaaccatttacaattcaaaaacagggctcttaatatttgtcttgtgctcaccttatactccattattattctcttaacaacagtactaccctacactgtttcatccacctcaacactgaaaaaacaccaagttccacgcataatgtgcgatgagtgcaagcttccacctacacctactgctgctaaaccaatatagtgtccaccaccacccgtggttgttgaatgtacaccgacggcaaaaccacctatcagaggcggaggtattgactgcttactgcccaacttttcggaaacaccagacggaccccattacctactatcgacaccgggccttacgtcgacaggaacgctagaacttgatgacattacaacagctcaaca

SEQ ID NO: 101046 - DNA, 326 bp, Glycine max
  Clone ID: PAT_MRT3847_62259C.1
ggttccataaaatacatttgactacttttgtacaaaaggagaaaaaaaaaaggtcaaagggcttgacattaagggacccaccaaaagaagaaaggacataaggcccaaaaaagctgggcagtcaaaagatacaaagttattttcttcatcttcgaaaacagggaaaacaatacaaacacctttagagaggggggaaaaaaaaatgaaaagtcctacgagctaattagccacatgccttaaaaaacctgtttttggaaaaaaaagaaggacttttttagctttccgaccgggaggaaatccacctcactccttttccttaaaccaag

SEQ ID NO: 101047 - DNA, 209 bp, Glycine max
  Clone ID: PAT_MRT3847_6225C.1
acacaccaacaccactgacggaaaccggcaggcaaaaagacagagggtcaaccgaggaaaacaacggaaggaagcctaacccagcacacaacgataaacagcccaaagagaaagcaaagcaggagggaaacaccccccacgataaaaaatcacgctctagaacggaaaaagcatcccctactaaagcacatccagccagcgcaaaaacc

SEQ ID NO: 101048 - DNA, 501 bp, Glycine max
  Clone ID: PAT_MRT3847_62260C.1
gatgtgatcgatgcggagatcgggggtgcccttgagcatcgagatcgtgttgaacgaacccgagtgcgagtagccggtcagattgaaggtcatgttcgtgaactgaacgtgactgacgccaccttcgatggtggctcggccgcggatgaccacgccggttcgcgactcgcccacgaacacgcggggatggctcgcgtcgctgccgcccttcaacacgtagatgaggatggagctgccctcagcgtacgttccgttgcgcaggaagtatcaggtattcgctggatccgaggcgtacgctccgttagcgcgcgttgcgtccgctagctgggaggcagtcgtgatgtctttaacgcgtggtccctgccgggcacgcaccatgcgcatcggaccagttcgcaatcgcggtcgttgtgaccgcctgtgtggtcgcaccaccggagccggtaggcaccgggccttcagctgttcgatgagcgccgtcagtagcggattaccggagcg

SEQ ID NO: 101049 - DNA, 676 bp, Glycine max
  Clone ID: PAT_MRT3847_62261C.1
cttttttttttttttttttttttttgttttttttttttttttttttttttttttttttttttttttttttttttttttttttttttttttaaaaaatatggggtaaaacccgtgggggggggggggaaaaaaatgtaaatttttccaaaaaaaaagggttccttaaagggttaccagcccccaaaaatccaaatttttattggggcttttaatagaatttaccgggggaaaaaaataaacacgggccctggaaaaattttggggggcttgaaaaaaaaaaagggggaggggggtaaaccccccaaggccgggattcaagcaataacctttggttttcccaatccggggggacccaaaaaaaaacctttgtttaaaaaaaaaagaaaacccgggacccccaaaacccggttttaaaattttccaagggcccggggggtaaaacaaagggcttaaaaccccttaaaatttttaaccttttggaaggtttaaagaaaaattcccaagggaaaatccctaaaaagaatcaaatcccaatttttattttaaaaggggaaaacatcctaaaacccttgcaaaaaacccctaagttggcttaaactaaaaattttttttccgggacctcctgggaacccacactgccctagggaaaaacagttaagaacctttttctaagggg

SEQ ID NO: 101050 - DNA, 425 bp, Glycine max
  Clone ID: PAT_MRT3847_62262C.1
ccacacttttgattccccccaaattccgctctctcattcacaggtaatcacattctcttcattttcctccaataccatgcagtggcttgtgtttctctccttcagtgatggctcctaatttcattttattccattcatataaaaaagataattgtcaactaatccatgaccatgcaatccatttcaattggaatataatatagtatacacaaacagagtctgctgatttgatcattaaggccttagacgatagatctagatactactactactagttctgcactgtgctctagattacttgcatattgcaactgaaacctgtctctcaatccttcgcattgaccatgatgcaacttatccgcctaacccatatggttatggttatcagaaatctctatatctcaccccagttgatactgaatatg

SEQ ID NO: 101051 - DNA, 942 bp, Glycine max
  Clone ID: PAT_MRT3847_62263C.1
agtgataagcgcgtccgtacggctgcgagaagacgacagaaggggtaataattccttgtcaacatcaaaagaggacaaaaaagaggaaaatggagtctcaagagtcaacagcatagatgcaaatgatgattcagtaagcaataatatctcaacaaatcaatcggaggaatcagcgaatgctcggaaagacgagatgcctagttctttcaggttttgggtgatattcttgtgggcattttctggagtaggtttcttggttgttatttttgtggtgtattcaggtcatagaagaagaggaacaaggttaaaacacggtagaaggagaagaagcttgcatacaggattcatggaaacgaatagccgtgaccggcatagccgtggtgtcgatgttcctctgtagacagtgctccttttcttttttaatggtgtaaagctgatggtcagaattttaagactttcatgcgaagatcacaaattgaaggttaaaaggcatggaaacttgagtgagcctgtgtgacatcatttatgcaaagcaagttattctgaccctcaaagagacttcccattttttgatattgtcaatgaacatttaatgattgagaaatttgcaaagggaaaataatcttctgttctttaatttgagattgtttgtagtattttgtacccagagaacataagatctcagcaatgtataacaagggatttgattatcctgcagcataggtgagggaaattctgtatacttctcattttcatttttttaccttgtgatagcaaagacaatatctgagtgctgacatatttagtctttgatgtaacttttttatggatcttatccctctcaacacttgctgtaaagactcacttatatattaaaatcaggttatgaaacttgtgttgaatttaaaaaaataaaaaaaaaaaaaaaaaaaaaacacaaaa

SEQ ID NO: 101052 - DNA, 513 bp, Glycine max
  Clone ID: PAT_MRT3847_62264C.1
aggccagcacctccagaattaagaggaagaagatgatgaagaggatgaagaaaggaaaagataagtatcgaaaattctcattgcctgcttgtttattacatagctttatttatagtgcttgttaggctgtcccctgaggatagacaacactaaggcaagcgaggaccctcaagctttgtccgtttcttcacacgtagtcactgaggtatgcaggttttgtgaacttccttttggacttttcttctatttgcaccttcatttttgtctttgcggctgttgtctctgttgttgtagttgagtctgcttctgtatcatccacggtagagccgtcatatttttaactgtcttattatatatctactaattctaacaattaaaacaattcgacaaagaggtacatacatttactcctaacttttaagggtatatctaacctttaaaaaaataaaaataattgtcttattttaaaaatatatgactgattatgatattggtatacataaataaaagaaa

SEQ ID NO: 101053 - DNA, 217 bp, Glycine max
  Clone ID: PAT_MRT3847_62265C.1
cgggccggaaccgccggggagacccacgcgtgcgccaacttgcattcttgggagagttaaaattccaagcacaaaaaatggcggagaagaaagtggtgatcctaggacgtggtgttgccaagaaccaacctgccaaaaactgtacagcatccagcggactttacccttattgatcccaaggagcattgcgagacaccgtgggcaattgcgtggggat

SEQ ID NO: 101054 - DNA, 256 bp, Glycine max
  Clone ID: PAT_MRT3847_62266C.1
aataagctggggttcttcccttccaactccacacgttccatcaattgcattgttcctacccaaagccttcaacgccaaatgagccgccttctgcggacactgaggaaattgttgatgcttaaattaagtttcaaattatataccttttcttttctgttttgtctctgcttatgatttgaattttagaataaatttttaaaaatgtgaatgatgaaggagacaatacctgttgttacttctttgaatttggactcac

SEQ ID NO: 101055 - DNA, 345 bp, Glycine max
  Clone ID: PAT_MRT3847_62267C.1
cggggttctaatgtgtaattgtttgttattgtaactcgttcttcttcttttgttgctcagtgtttgagtttgttttttctcacaactgaaaatgtcttgctgcagtggtaactgtggttgcagaaactcctgcaagtgctgcaacggctgcagaagctacatgatgtagccagacttaagctacactgagtcaaccaccatcgacaccatggtcataggagtaggacctgctaaggctcaatttgaaggtgctaaaatgggtgtgctcactgataacgatcgctacaaatgtggaccaaaatgctcatgcaactcctgcacatgcaagtgaggtgttaggatagc

SEQ ID NO: 101056 - DNA, 1345 bp, Glycine max
  Clone ID: PAT_MRT3847_62268C.1
cgtgcaggcacgatgcgatgtggtgagtgaattgcagagtcggcaatggtaagtgtatgagcgtactcacacttcagttacttactcctcacactttctctatcgttttcatctctgtttcagatctgagctctcgtatattccccagccatggccgaaaaggtcaccataatgaggctcaaggttgatcttcagtgccacaaatgctacaagaaggtcaagaagattctctgcaaattccctcaaaatccgagaccaggtgtacgacgagaagaataacatcgtgaccatcgcggtggtttgctgtaaccctgagaagctcagggacaaaatttgctgcaaaggttgtggtacgatcaaaagcattgaaattgttgagcctcccaagcccaaaccaccacctcaaccagaaaagcccaaggaaccagagaagccaaaagagccacagaagccgaaagagccagagaagccgaaagagccagagaaaccgaaggagccaccgaagcctaaggaacctgaaaaaccaaaggaaccagagaagcccaaagagcctgagaagcccaaggagccagagaagcccaaagagcccgagaagcccaaggacccgagaagcccaaggagcccgagaagcccaagcctgaatgccctcctccggtgccggtttgtccggcaccggtgccagtgtgtccgccacagccaacacctccgccaccggtggtggttccgattggggtgtgctgtgttccatgctatgaaggtcggcccggtgggccatgctttgatgggtacggcggtgggcccccaccatgttatgacgcttattatggaaggcctgtttatgatagttacggtgggagcaggccttgttacgtgagccgttgcgatgaatatttctgtgaagaaaacacctctgcttgcacaattatgtgatcgatcgcattattacttacttacttcattcatcgaatctctctctcttgtgccgcccatgcatgcaagttgttgcaacggcgcgttcttccatcttattgttggagcgatcatcaccctcatcaatccaaggaataatgatctttgtttttttgtgtttgggagtacaaaatgtttcgtacgtgaaacaaatatagataatatgatatgataccagaggctagctagctaaagaataaatgtttttactgtaatgtatgtaactgatactatatactgtgatatcttacattttcacaagttaataaagtttcttaatttgtgtacgaaaaaaaaaaaaaaaaaaaaaaaaaaaaaaaaaaaaaaagggcggacaatataaaagaataaaaaataacaaacaaatacatgcaaa

SEQ ID NO: 101057 - DNA, 252 bp, Glycine max
  unsure (1)..(252): unsure at all n locations
  Clone ID: PAT_MRT3847_62269C.1
atanttcccttgcggcaggcaaaagagcctgaggggtcattttaaaagtgtctttggcgacttccttcaacagaaacatgcaaggtgcggtaactggcactaagggtcgggctctttggacgccccataaacataatatcaggatgaggtggaagggccgtaaaatcaaaacccggctggtgaacaataataagcaagaggggtttccgggaaaattggatggcaaaaatgggactacaatcgaccaaaaag

SEQ ID NO: 101058 - DNA, 636 bp, Glycine max
  unsure (1)..(636): unsure at all n locations
  Clone ID: PAT_MRT3847_6226C.1
agtgagtattgtacatggcatacttatcaccatgttctttgtgaatgaattcaactaaacctgttttattcttactttaattctttcctttttttcaattgcacccataagcataactagcttcaggataatgataacatcctccttgtggttctcaggggtggcacgtggaggtggatatggtggtggtgaaggtgctggacaaggagctggtggaggatatggtggtggagcagttggtggtggtggaggcggcggcggcggctctggtggtggaggtgcacgtgggggtggatatggagctggtggtgggagtggtgaaggtggtggccacggtggtggatactacccttgagattaattgataaattacccaagaaaataacctagctagctccttgtggctatagtaacaataataacaaatgtatgggtacgagtacgtggatggttaaaactatttatgtattgtattttacttttttatttttatgtcttacatatatgtcgaatggattgaagacttacatcgatgtaaacgtattaatatagtaatacatattttgcaatatttttagattccaaaaaaaaaaaaaaaaaaaannnnnaaaaaaaaaaaaaaaaaaaaaaaaaaaa

SEQ ID NO: 101059 - DNA, 537 bp, Glycine max
  Clone ID: PAT_MRT3847_62270C.1
attcggctcgagatgcgatgtggtgagtgaattgcagagtcggcaatggtatgtgtatgagcgtagtcacacttgaattgaattgaagctctgttccttcatgtgacgacaatctccaacgtcatctgagctctcgtatattccccagccatggccgaaaaggtcaccataatgaggctcaaggttgatcttcagtgccacaaatgctacaagaaggtcaagaagattctctgcaaattccctcaaatccgagaccaggtgtacgacgagaagaataacatcgtgaccatcgcggtggtttgctgtaaccctgagaagctcagggacaaaatttgctgcaaaggttgtggtacgatcaaaagcattgaaattgttgagcctcccaagcccaaaccaccacctcaaccagaaaagcccaaggaaccagagaagccaaaagagccacagaagccgaaagagccagagaagccgaaagagccagagaaaccgaaggagccaccgaagcctaaggaacctgaaaaaccaaaggaaccagag

SEQ ID NO: 101060 - DNA, 1041 bp, Glycine max
  Clone ID: PAT_MRT3847_62271C.1
ttcggctcgagcgaatagccactttgcgcaccacgatgaggtgatgcttctgggacacgacgataagtatttgccagataggggcatgcaggttacaatcgcgtttaatcacttcggtgagggtctggtgcagcgtatgccacgatgcaaaattgggctcatgcacgtcgttaataatgacttcacgcagtggaagatgtatgctatcggcggtagcgctaaccccaccatcaacagccagggtaaccgttacaccgctcccgcagaccctgatgccaaagaggtgacgaagcgcgtggacacagacgatagagagtggagtggttggaattggaggacggaaggggacataatggtaaatggagcgttctttgtaccctcaggggcggggcagagtgcacagtacgcagaggccaccagtgtgcaagccaaatccgctgttcaaattgaccagctcactatgtactccggtgtcttcggtgatcccagggataatggagatttatatcccggtttcaacggcggtgggaccgtgaccggagccaccagcaaaggcaacacagaggggtccagcagtgacgatggggacttctttgggatgatattcagaggcagcagcagcagccaagcagcgccaccatcaccttcttcgtccattgtatttgtttcaacctttttgtctcttttaataatttttattttggacactaccaccaaccatgccattctattatcattactatgatcacacaatttgggagtgggaaaagaaaacaactaactcccttgatgcccaaaaaattatcaaaagcaaaagaatgatcaaagtttctaaatacttgtttttacatttagaagctaggaatcatgtttaggtatgtacacagctcttcaaagttattattaaactctaaatagagctaggtgcaatatgatttggtcattgcctcaaatgtatagtttaatgtatttaattcagtttgcttcctttttattgatagtgtatactcactccaaaaaaaaaaaaaaaaaaaaaaaaaa

SEQ ID NO: 101061 - DNA, 639 bp, Glycine max
  unsure (1)..(639): unsure at all n locations
  Clone ID: PAT_MRT3847_62272C.1
ttaattaaggaacaaagaaaaacttgagacaacagagaaaaagggtcacaacaatggcttccttagactctctcgatttctccctcttccgtctcagcactgacttctgctctccttttgccattttcgttcaggcgcagggatgtataataaacctaatccttgcttttgggtgggcttgtgctgcatttgtcaggaaccgagaaataaatagaataaagaagagtatgcggaatggcaataactttgcattcctttgtcatgatattagtgaacttgagcactccaatcaggctgatcttccaagtgtaacagtaattatgcccctaaaaggatttggagaacacaatctccataactggaagactcagttaacatcgctttatggtggccctcaagaatatcttttagtagttgaaagtacagaggatcctgcataccatgctgtagcaaaactaataacagaattagaggattctgttaaagctaggattataatagctggtttatcaacaacttgtagtcaaaaaattcacaatcaattggttggagtggaggcaatgcataaagatagcaagtatgtattatttttagatgatgatgttaggctacatcctggatcaatnggagcactcgttc

SEQ ID NO: 101062 - DNA, 647 bp, Glycine max
  Clone ID: PAT_MRT3847_62273C.1
atgattcttatggaaaaattgatctttcaatacaaagatctttcatttttccgtagatcttcactaaaatttgagatgaaaatcctaccataaagttgctcaaacaaaatataagaattcttctgctctgcacggcctacaggcatggcaaaggaagtaaaaaaaaaaaacagtggacccatggttgttagtagcacctgaacagcaagcaaaccatgcttcttccttggtacaaacttcccttgaacagtgtcatcagggttgtacaagttgaggcactggagttcaacctctgccacagcttcaacaaaatccgccccacgattactgcaaaagagctcaggctcacccatggtgttggccaccatttcacctgcaaaagggtaatagtaaaccagtgcctgtgctagggcatttttcagtgaccccaccatggttccgaagcaataatatttttcaggcaaaggttttttgtagcagaagaatacactaacatccattgggggaatgagtagatcaaggttagatagtggcagccagtgctcatgcattggaatctctggtaccaccaccttctgcttggtcacactcacaatgaattctccttctccaaccttaacactcatttaatttcagaaatttaaaac

SEQ ID NO: 101063 - DNA, 309 bp, Glycine max
  unsure (1)..(309): unsure at all n locations
  Clone ID: PAT_MRT3847_62274C.1
gttganctaagtagccgaccccacctagtgggataaggcgatgttgatgttgttgttgttgttgtttggctttctatgctactttctttcttctcctacgagatttctagttagagagaaagatccttccttggccagagacaggcatcgagcagctgatatgagaccagaaagatgcaaaaggcggtgccagagttgctaattgtgttcgatctaccaataggaatcttttctcgtggtggcacaaactatggaattcatggagaaacaggaaagcctggtggttacattcctccagtatgggaaggt

SEQ ID NO: 101064 - DNA, 313 bp, Glycine max
  Clone ID: PAT_MRT3847_62275C.1
ggtggagaaactgtaaccgaccgtggcagacaaatggaggaacaagggtaatgaatcggctctgccgcggactctcacaaattactagaagtgggagtgtctaggcttgaagagtatatgctgagaaggaagaacactggacaaacaggccgaaggaaaagcaaacgatatgaaggcggggtgccaagcaggggagaagagagggctgatggatctacaggatcctagcacatctgaatgcggtgcgaacaagacatgagcgagagagtaactgagaaggcagggattcgacatggatgggatcgaaggagac

SEQ ID NO: 101065 - DNA, 331 bp, Glycine max
  Clone ID: PAT_MRT3847_62276C.1
ggctgaagctgatccaaccataattgctttgctgtttgaaacacgaataccatattttgctgaaagcatgacctatgtatccagagatagagagataactgatcctatgtccagaccattcagttttggcaaagaatctcattgtggtttacttctaaaagcacatgcttgatgatccacatcttatagacatgatgataaatgccatatacgagctctgatagaaatggctatgctgtttaagagtgggtgacaaatactcaggattggcccgacagatggttagtatcgccaagatccccacacccaaaaatgatcgcctgcacccttc

SEQ ID NO: 101066 - DNA, 533 bp, Glycine max
  Clone ID: PAT_MRT3847_62277C.1
atgttttctaaaattatatttaatctttttatgaggacattttttttttattgtaatgggttgactttatcttgtaaatcattgcatgttttatggtttattcaatataatgacatttaaaattaattttaaattttaaattagacaaaaaaatattcataaatttattattttaatgttatagtcatttttgtttcttggggtacttccgataaaattagaagtaatagtcactctgagtgaaacagaatggacatgggacatatatatataaacccgagagatcgggtgtataaatttttttacctttgatagagatgcagggcgaagataagagtgaggatggagatgaaaacgtgggatgagatatttatcatcatgctctattatgcatattgataattattacttataaaaacagctgaaacaattataaaaaccaaaacaattaaaatgactgaaacaaaataacaattgctgttcaaggtagtttctaatttctctatataaattaatgccctttatcttacact

SEQ ID NO: 101067 - DNA, 279 bp, Glycine max
  Clone ID: PAT_MRT3847_62278C.1
cggcctcctttccttgatctttataattgaaaatttttcatttttaaacagaccaaacttaatacggataatggtaaaacacaataattattgcccaaataacccccaatatactcatccgacacaatttgtatcgcctaaactactttccactccatcaatataaataaaaaaaatgtgcccgcgcctaacccttcacaaacactaaccctataatccatgcgccaatcattcaacactttagcctgacttttctatctacattacactcatcctttg

SEQ ID NO: 101068 - DNA, 206 bp, Glycine max
  Clone ID: PAT_MRT3847_62279C.1
ctcttagaacacttaatagactattgaccatcaaatgaaaaaccgaacacgatactggacaaatggcaattacatatctgttcacccaagactcaactgcgctggggtatacctgcaggtgtgtgtacactttgacagctatttacgatgcggatagcgaaacccccagccaagcggatgcgcctgggcaatagcatcgtcggcaa

SEQ ID NO: 101069 - DNA, 891 bp, Glycine max
  Clone ID: PAT_MRT3847_6227C.1
aggaataaaatagtcataaactatagaagttaatataatacatatcacctggacctgaattagaacacaatttaatgtactactatataaataaaagaaaatatttattgcgtcctttcactttttttgcattagtacaatatttctggtctatcatgaatcatggatttcatggttacagttacacttacaaaatttacttagccacgggctgaatagtaggtttgcataatggtaagagcaagcagagcagcagctaccacaatccctatcaatttccacacatttgggatatgatctctaatcaagattttatagctgtgtttgcaagagtatctgatgcattctacacaaaggttgcaacaatgcaacatcagtatagggaacttcctcaaggggttcactgctgagtaagcattcaagtcctcacaaagtttgctgtaactattgtccatttggtccactccctttgtgattgtgccaaacaaagtgagcaaatctctgttgctgatcttagtacctttcaccaaaacaccattttccacaagcagctcaatatcttgcacagaacacatcaagcctctaagaaacaaagcataagaagtgaattgcctgttgatgccaattctactttgctcccatgcaatgaagttcctcaaatagacctcagttgtgtcaactacatgaagtggtggaatttcaagcacccctttggaaaatcttatgtcaaagccaaaccagttaaccaacttgctgtgtctctcaactttcctaattgttacaccagcagctctaagccttgtcgcgcaacgcttaagctcttgctgagcttgtttcaccttttgtccctcatcaacaatggaggacaagtgcatgaggtgaagaaaatgc

SEQ ID NO: 101070 - DNA, 379 bp, Glycine max
  Clone ID: PAT_MRT3847_62280C.1
ctctaatgctagctcacaggtgatatatgcgaaaagacatgcatattattcatcggtgttataaattgtctttctggggggcgcgccagtgcatgtatttacaccatcttatgccaagcactgctgatggaggaatcctgcttgcccataggctttctctatgtcattgtgcctaaacccgtggtctgatccatgcagtttggtatctctgaatcgtactggatttcctggcgatatcatttgtgtccctggatgggctgtcaccccaatgcaggatgttcatgtttcaattgattggttaatttcctttcatgaatgtgttcccaggacctattgttgtttaaattcacaaaattctttttgtgttaaataggttgta

SEQ ID NO: 101071 - DNA, 674 bp, Glycine max
  Clone ID: PAT_MRT3847_62281C.1
aacaatcaatttgtttatgcataaaacggattagtttagttatcatcattgtattttgtggttcgaaatttatatattataaagatacaacattggtagacatcttgatgctacttgacacctagaaagaaaaagatatacaagaaagaaatataatgttgcacttttgcgtttgtatttctattttgttacggtatttttttattgttttaaaattgacaaaaaaaaaataggaaataggtaacttgccaagtggcgttgaaatcacaggccaatagagaaaggtcattgctgaaggtctaaaaagcataggcaacaagtatcagacaggacatgatagcattcttcgtagcaaagacctcagcttaacattaacagcaagttttgttttacgcgatgagaatcgatccaagttaatccggaagcaacaaactccagcttctgtcgttttctatgttttgatgtttgacctgaaaatctccatgcatgcaagtcttattagacgtgtaaacaaacacgcactaaatttgttgaaatctcaatcacaattctcaagtcaccagaagtcattgcaagaacaattcccatccttaaaatggtgatatcttttggcatcttggacataaaatttcctatttggtatagcgctgatgagtttcagaacagtatgacag

SEQ ID NO: 101072 - DNA, 614 bp, Glycine max
  Clone ID: PAT_MRT3847_62282C.1
ccgcgtgccgcctagtgaccacccactactagttttgtgcatttgcctcctcttctcaagtctctttaatttctcaaaggaaaaagaagaagaaacaaaattttattttgagaaaaaaatggaggcattgaagatgaatcttttcttttttgtcatggccatgctgatcatggcagcatcagctgcagattcaccagctccaagtcccacatcggatgctaccaccttattcgtgccaacagcggttgcttcactcgttgctcttgcttttgggattctcttctgagtttctcaacaatgaagcaaacaactaattgtattgtatgggattcattgtgttttcatcattattatgatccatattattttatgacacattcattccccactgtacttctttacttgttatgtttatatgggctttaatttgaatttgatgatgtaatattaatgtgatttggttggtttcagttgaatttgttcatgatgcccttcttcttttggttagattattgagcactcttcttattctttatgaagttatgaggcttattttaatttctttgctatcatccacaatttctcgcccgaaagaaaatctagttataaaaaaa

SEQ ID NO: 101073 - DNA, 260 bp, Glycine max
  unsure (1)..(260): unsure at all n locations
  Clone ID: PAT_MRT3847_62283C.1
tttctctctctttctaaaaaccagaaacaacaaacacaaaccgaaaaggcgaaaggggttttccgantgagatctagggtttccattcgattcggagagaggatattnatagcaaganccttcaacgagcaaggttcagggaggnggagtatcgcaacatggattcggtgnccttcgaattcgcatggaaaccttcgatgagcngattttctcanntcatgncagtggcaaacccttgtccgagcnagaggtcaaggtct

SEQ ID NO: 101074 - DNA, 326 bp, Glycine max
  Clone ID: PAT_MRT3847_62284C.1
aatttggtacaatccatagttgtggtctttttatgttattctagtattttattcattcaactttgttagtaacatgaggcaatgcctgtttgacacaagtggttttgttttggcactaatgacgatctccatcaagaatttctcagcttaatggtctaaagtttaaactaataggatacctagcaatcagcgatgtgtttctttaatgttgtttcttctaaatccaacgttaatgccattaataatgtgtctggtagtcaatccatatataacaaagcatagcaattctggaatatctttagggtggctctcacttctcagacatt

SEQ ID NO: 101075 - DNA, 293 bp, Glycine max
  Clone ID: PAT_MRT3847_62285C.1
agcttgcatgcctgcatgttctctcaataggactctagtgcatgggtttgtgctttgcgtgttcctgttatgagggggaagatgtgatttttggctttggcaagttctgtggtggtgttgcctgtctccgctgctgaggatagtgagattttggatgctccatatgagagtattatccattatttgtttggtgtgttgttggcttataattgatggtgaaaatgtttagtgtttccttcgttgtaccctattgttgttttattaaaagtatttgtttttttattattttccta

SEQ ID NO: 101076 - DNA, 1264 bp, Glycine max
  Clone ID: PAT_MRT3847_62286C.1
ggctcgagctggtaatggtttctgcgaaagaagagccagattgcagcataccgcctgctgttgatggtttgttaagggttcataaacaagttgtcaacgtggaccctcatcctgccgatagtgcatcaggtgcaggacgcccagttgttacaaggcttctagtggcagatactcaagcaggaagcttgattgggaagcaggggtccactataaaatcctttcaagatgccacagggtgcaatatacgcattcttggttcagaacacctgccagtttttgctctgcgagatgatagtgttgttgaaatacaaggggaatcttctggggttcacaaggcggttgaacttgttgcaattcatctacgtaaattcttggttgatcgcagcatagttgtagtatttgaaacacaaatgcaaaggccagatgttcgagtaaaccagaatgtgccaccaggcccaccacaccaaccttggggtcctcctcaaggttttcaagctcctggacctggtagtggtggtggacctgcttttccacccaatcctcagtatatgccgccttcacataactatgataattactacccacctgctgacctatctcctatggacaagcatcttcatcagggtccagcacctgcctatgtaagggatgcttctatgggaattcattcatccagtgcacagccacaacaatctgttgtgactaaggtcacacaagacatgcaaattcttcttacatatgcagatgctgttataggagcatcaggcacaaatatcagctatatacgtcgtgctagtggagcaagtattacaattcaggaaacaaggggtgtgccaggtgagatgactgttgagataagcgggacttcttctcaaatacaggcagcccagcagctggttcagaatttcatggctgaagctgcaagtgctacacaggatcctatggggggatcagtcagccaaggttacagtgcctatccaacaactgctccagtttatgctccacccactagtgctggtggtggtggtcatacaggccatgcgccttctgcagattatggccccctatatggtaccaattatgggtattaagatgcttaatttaatttttgtcaaggagcgctgtgtaaactatatactgtaaactttacgttcagtttatttgtttttcattttttatttttggctattaggttatcatactgttggtactcttgctttggctttcatcatttcacattaatgtatccagcgattcgattttt

SEQ ID NO: 101077 - DNA, 687 bp, Glycine max
  Clone ID: PAT_MRT3847_62287C.1
cattaaagagaaacttaaaaataatgatcaatatgggtctgtcagcaaagcaggaggaggataataggtttcaacagataaagaaggaagttgttgatttgattaagatgcaggccccaactctggaatccaagcagcagctgaaaggtgaagcatctggtgattttcaagaatttggtcctgatggaaaaccaataactaaaaggaagtttactatggatgctgcattggaggacaagatttgtgatctctatgatctttttgtagatgggttggatgaaaatgcaggtccacagattagaaagttgtatgctgagcttgcacagttatggcccagtggttacatggacaaccatgggatcaaacgtggaatttgcagggcgaaagagaggcgcagagcactatacaacaaacataaggatcaggagaaaattaagaggaaaaagttgctggcacctaagcaacaggagaacgttcgatttgatactaatacaattacttcacagcagaacctacgagagagatcagctccagagtctagcagtcatgcttatacttcagggaacaagcaagcttctaacacaagcacgactggccgggtcccttgtccaatgaatggtctaaaacaagaaaaagcaaagggaagttcaagcagttccgtggatgatgtcagggctgcagatggtg

SEQ ID NO: 101078 - DNA, 316 bp, Glycine max
  Clone ID: PAT_MRT3847_62288C.1
ctattgcactagcgtttgagttgtgccgcgttatgcacatatgatatggttgatgggcaatattatgcaaatgtaatctgagtctatgaatgatcctcgggttagacatgtacgtgactaccgacaacaggatcagggtcagtggcgcactcgttttgagtgagccttagcgccgacgttatctagcttatcgtagtacatgagatgaatgatttattagaggatgcaatgactaacgaggattctatgcattacgatatcataggctatagcacttgttcatatggatgcgcttattgtcgactgaactggatga

SEQ ID NO: 101079 - DNA, 205 bp, Glycine max
  Clone ID: PAT_MRT3847_62289C.1
aaatggtgtcgctgaaagtgcagaagcggctaaccgcatgactggtcatctactgcagagttaaagtgtagcgtgatgccaatgcagtctacgaaatctccatggcgaattctcggcaaaatatcaggaagttggttaacgattggtcgatcatcacgatgccaagcaagcatcactcacgatcgcgtgctcccaggatgaagga

SEQ ID NO: 101080 - DNA, 732 bp, Glycine max
  Clone ID: PAT_MRT3847_6228C.1
catatgcaaaagcaagaatacttttggaaagacaacacttggaagagtcactatccaaattgataaagttgtatcagagggggtttatagtggattattcagtcttaatcatgatggtaataaagatggttcttcccgaacacttgaaattgagattatatggtccaacaggatttccaatgatgacatttgaaaagtatagcaagctacttttcgggtggaagcatagaaaggtaatctgcaacatgcatgagatgttggaaatggttttgcttgtaattatccgcacattttggatgatccaattttgtagtctggcagattaagttgcttcagttgtaactgtaaattaaaattataaatgtctagaggcagcaagcgtttgaaaaggatggtcccacggtaaagtcaaaaaatgtttgcaattgtacaggtcagtccacaggtatattagaaacttgaatcatagggaaaaaatggcattttaattaaatttgtcaaaagttttttttttttggtataagtctttgatgttgggatgtacactagcttctgctgtaaagtggctttgttttatgtttgtaagccacaagagatgataaactgacaatatgtcattgtccccttgtgtcgggaacatgcttttcaccaccttggcccccacccaataaacaattccctttttatgtaaaaaaaaaaaaaaaactaaaaaaaaaaaagaacaaaaatatg

SEQ ID NO: 101081 - DNA, 328 bp, Glycine max
  Clone ID: PAT_MRT3847_62290C.1
ataacacgagcgggcggcgctgatagacctcctagacccgaaaaaaaaatccggaccggcgcctaagggcgcgccatctttctttataatgaggaatataagagctagggcggaaacggccaaagctgggacctgagaaaaaattttttcctatcaaaatcccccaccataacccagacggagctataaaatgtatagccggggggggctctaaagcagataaactaacttgacttgggtggcgcgccctccccccttcacaaaaaagaaaaaatgctgccggatctattaaaaaaaaacccccaacaccacggggagaggagggttg

SEQ ID NO: 101082 - DNA, 260 bp, Glycine max
  Clone ID: PAT_MRT3847_62291C.1
taatatatgatgttccttgctatgcggtggcagcaccataagggtggtacatgcagaggtttattccgccttacaggaaaagtcatggctggtgggtggcgaatgaccctcaatgatgagggagaacatggcttatgacatcatgatggaagtggtgatggaggatcactacggatgaattttaaccaagtgatgcatcacggtgagggggcgaagcacggcggaacatagatttcatggcataacctgtgtgatctcac

SEQ ID NO: 101083 - DNA, 676 bp, Glycine max
  unsure (1)..(676): unsure at all n locations
  Clone ID: PAT_MRT3847_62292C.1
cattgttaggatatatatatttctgtaatttttttattaattgaattatgatgttttattattccttgattcatgtttagaataattctatttcctgttttttttttaattcatgctataagatgcttgctagagttttggaatttagttgtttggaggatttagttttcactcaagttaggattttaacagttagtacctggattctctgctttattattgtgatttggcattgttttacaaagacaacaataagctttgaacttgagacctcatttaaactacataaaccccaccaccacttggccaaccttggtgggatcattggttcttatatcacaatttactagctgtaaaatatgaatactttgtaaggatatggcagttatacagttctgactgaaaatttcttttttcatatttatttcggtgcttgtagattttacaaagtggcagtaaacgataccacactttggtttcaggttggctccatcaggtcacacttatttctttggtttcttgctagtagagtttccatccattagtattattttttagctgtctatggtcattgacctaattcataaatacagagtataatctgtaattttttttgggctttagcactctaactctngacanacaagtaaatttccaaattagtcattctaccatt

SEQ ID NO: 101084 - DNA, 708 bp, Glycine max
  Clone ID: PAT_MRT3847_62293C.1
gaaaaccctaaccattccaatgtgctatcgcaattacctctctgcactccaatgacgcgctgctgcggcattcggattccgtgatctgattggcgattgggatccaatcttcatcaatccgattttgttgaaatggagcaccggctgcgagaagacgacagaagggagatgaaaaataaaggaaggaatgttgtgtggtcaattgcgatggataagtgtctaattgaagccctggcagctcaggcaaaacgtggaaacaaaattgacaaatgtttcaatgaaaatgcatacacggctgcctgtgtagcagtaaacacttgcttcagcttgaatttgagtaatcagaaagttatcaaccgtttgaaaacaattaagaagaggtatagagtaataaaagatatcctaagtcaggatggtttctggtggaacccaaatacaaagatgattgagtgtgacagtgatgagctttggaagaattatgttgctgtaagtaatgtttcatttttctccactcttgaatgtgtatgaatttgtgtacaatacctattatggtgttctttgatttaatgaataggcacattccaatgcgagaggattgcgcggaaagcagatagagatgtatgatgaacttaaaatcgtttgtggaaattatcaagccccaagtcattgggctaagaggaagagtggaactcatctaatggacatgaa

SEQ ID NO: 101085 - DNA, 1767 bp, Glycine max
  Clone ID: PAT_MRT3847_62294C.1
atggcttttgttctgctaatattactttcggcgttacgctactcaagcgccgaacaagctttcgatgttcgcaaacatctttccactgtctccagatatggagttgtgaaagacatcgctgacactaacttcgtgccttctaaaatccccgagggatgtgttccgatccatttgaatctcgtggcgaggcatggaactcgatctcctacaaagaaaaggataaaggagttagataatttgtcagagcgtctggaagttcttgtaagggattcaaaagagcgaaatttgcctttccagagagttccttcctggctaaatggatggaaatctccttggcatggaaggcgtaagggcggtgaactaattaccaaaggagaggaagaattatatgatcttggaatcagaattagagaaaactttccaaatttgtttgatgaggaataccatccagacatatatcctattaaggcaactcaggttccccgggcatctgctagtgcagtcgcatttggaatggggcttttcagtggaaatggaagtcttggacctgggcatcaccgagcctttgctgttacaagcgaaagccgtgctagcgacattgtgctgagatttcatgattgctgtcataattacaaggcttatcggaaaagccaggaatctgcagttagtaaacttaaggaacctatcttggatgagattacatctgccttaattgggcgccatgggctgaattttacgaggcaggatacatcttctctctggtttttgtgtaagcaggaagcatccttgttggatataactaatcaagcgtgtagtcttttcagccctcttgagattgaattgctggagtggacagatgatttggaggtgtttattttgaagggttatggtaaatcactaaactatagaatgggactgccattacttgaagatgttgttcaatccatggaacaggctatcatggctgaagaagaaagacatgttcctggaagctttgaaaaggcaagacttcggtttgcgcacgctgaaactgtagttccattctcatgcctgcttggtttatttcttgaaggatctgagttaaaaaaaattcagaaggagcaacctttgcagcaccctccgaagcctccacagaaaagaaaatggcggggtagcactgtggccccttttgctggtaacaacatgttgatcttgtatagttgtcctgctccagacaaatctaccagcaagcactttgtacaagtgttacacaacgaacaccctgttccattgccaggttgtgatggctccgatttctgtccatttgaagtattcaaggaaaaaatagttgcacctcatcagaagcatgattaccatacagtctgtaatgaaaagctagagcaggagccctcgggcaacaaggaaaggagcctcaaatcttacgctcttaataattcagacatgagcgcttattccttctagcagagaatcagttttacttagattgtgctgccagtacaggaatgcctttgttttctcaagcttggtgcccgagtcctcctcgtctgtagcttctaacatcaagagaatttgggggtggaaagtttagttctaatttattttttttccttagtagcgttactcttagtactcggctgatacctcagataatgtagcttgatgtgtcatactgtgcacactcttagtttcattaactgtctcttgaactccatttttgttctttttgaatagtagataatggaccaggtaacctttgacttctgctaa

SEQ ID NO: 101086 - DNA, 2184 bp, Glycine max
  Clone ID: PAT_MRT3847_62295C.1
attggatctagggtaccagatgagactgcttaacgcaacctcgtgtttcgttcttctctggtgactggtgagtgcgtccgcgctggcctgcagtggtgcgacttttcaccgacgacgctcgttgtgcaagcagctaagtaccacgacgctcttgtgcgagcagcttctattcgctggacggatggtggttctacgattaagtactagggttcagacttcatgagttttaaacaccgtgtataattgattttggtggtgattccaattcggaagtgcagcgcagaaagaagaatgagcaactctattatggcttttgttctgctaatattactttcggcgttacgttactcaagcgccgaacaagctttcgatgttcgcaaacatctttccactgtctccagatatggagttgtgaaagacatcgctgacaataacttcgtgccttctaaaatccccgagggatgtgttccgatccatttgaatctcgtggcgaggcatggaactcgatctcctacaaagaaaaggataaaggagttagataatttgtcagagcgtctggaagttcttgtaagggattcaaaagagcgaaatttgcctttccagagagttccttcctggctaaatggatggaaatctccttggcatggaaggcgtaagggcggtgaactaattaccaaaggagaggaagaattatatgatcttggaatcagaattagagaaaactttccaaatttgtttgatgaggaataccatccagacatatatcctattaaggcaactcaggttccccgggcatctgctagtgcagtcgcatttggaatggggcttttcagtggaaatggaagtcttggacctgggcatcaccgagcctttgctgttacaagcgaaagccgtgctagcgacattgtgctgagatttcatgattgctgtcataattacaaggcttatcggaaaagccaggaatctgcagttagtaaacttaaggaacctatcttggatgagattacatctgccttaattgggcgccatgggctgaattttacgaggcaggatacatcttctctctggtttttgtgtaagcaggaagcatccttgttggatataactaatcaagcgtgtagtcttttcagccctcttgagattgaattgctggagtggacagatgatttggaggtgtttattttgaagggttatggtaaatcactaaactatagaatgggactgccattacttgaagatgttgttcaatccatggaacaggctatcatggctgaagaagaaagacatgttcctggaagctttgaaaaggcaagacttcggtttgcgcacgctgaaactgtagttccattctcatgcctgcttggtttatttcttgaaggatctgagttaaaaaaaattcagaaggagcaacctttgcagcaccctccgaagcctccacagaaaagaaaatggcggggtagcactgtggccccttttgctggtaacaacatgttgatcttgtatagttgtcctgctccagacaaatctaccagcaagcactttgtacaagtgttacacaacgaacaccctgttccattgccaggttgtgatggctccgatttctgtccatttgaagtattcaaggaaaaaatagttgcacctcatcagaagcatgattaccatacagtctgtaatgaaaagctagagcaggagccctcgggcaacaagataatggaccagctgttgataaatgtttgtcaacatgaggtgttaccgctggaggctgattcacattggtcgttttgcgatggggatcttgttttgggggacttggcctccatggaagctggaggaaggatgcaacctcctccttgttgcagtggtgacgacactcgatttgcagtcttcaccattggtgtgaaacttgagaaactacggaggcgtaggacctcaacttcaaatgatgctaggcttcacgatagtttcacaaattacaagaataaatttctcttgcagtaaggtggaaagtttagttctaatttattttttttccttagtagcgttactcttagtactcggctgatacctcagataatgtagcttgatgtgtcatactgtgcacactcttagtttcattaactgtctcttgaactccatttttgttctttttgaatagtagataatggaccaggtaacctttgacta

SEQ ID NO: 101087 - DNA, 327 bp, Glycine max
  Clone ID: PAT_MRT3847_62296C.1
tttttttttttttttagatcaatattttacttcttcttatatggcaatgacatttattaactaagcattaaatttttcatgctttagggagtggtttcccttgaagaaacgcattaaacaaaacaaaagatctctttggttgagtagctggagtgccatgtgaagctcctcttattgtggtgtacgtgaggtgattgccataaacttttgtccatcctccaacctacgtgtaaaaaataaagcaaatgtgcaaagaaaaaaaaaaaaaaaaaaaaaaaaaaaaaaaaaaaaaaaaaaaaaaaaaaaaaaaaaaaaaaaaaaaaaaaa

SEQ ID NO: 101088 - DNA, 3825 bp, Glycine max
  Clone ID: PAT_MRT3847_62297C.1
ggcggtgaaagtgacagaggaggcatattcacccatcacaattacgcacatcccaagcggagaccagcacgaagaacaaaactagctcggttggaccaattcgaagcgaacttagacggagagagtgacagagaatgatgttggacggaaccgaagacgaagagaaagtttctcgccgccggaatcgccggccttcagcagaattccttctacatgcaccgtgcattggactcgaacaatctcagggatgctttgaagtattcggctcagatgctctccgcgctccggacttcctagccttctgcgcccaagctttaagcactatagctgcgctcctctgaaaagttagtctggctggaggtgtgcagtgaccgacacattcgttgcgatcttgccctgactggtcgtcttgtaaacgcccatcctgcctccaaccttgtgcccgccctgcaccgctgctgtcctcaggcagcagtcgacacatttccgcgcccgctcctgcgtacaaggatatcaaggttgccaagcctgtgacccgtggcggtccgcgcccttttccctctctatttctcatccctgcctccaagctttcgcctcacaagtactacgaactatacatgcgcgcctttgatcagttaaggaagctggagatgttcttcgaggaagagactcgtcgcggttgctccattattgatctttatgccgtcgcggaaaaccgaaaaggagggatgtacagtaagatttttttttgaagcggcgggcaattacctgcaaatggattgtcaaattatagggatgcagtggacttgtaaatgtccagcccgccggcaactttgtgccccggctggcccgccgctgtccgcttgcagcagctgacacggttccacagtacggctgcgagaagacgacagaagggcatcacctataagaatttcaaatgcagataagtttacaaacaaggaaattattgggaaagatgatcctcatgatattgctgctgtggatagtccaagaagatgctcagatcatgaggatgatggtgggagtgatcgatctggaacagctaagaaggataaatctttcaccattgcccataggtcagattttcaggacaggggtgttaatcacatgtcagatactaaacttaaagctcaaacaaccagctattgtaccaatgggggtgtggacactatagtcctagatgggacacatccaggcacagagcagattaatcatcctggtgaagacaagattgatgtttattatgctactacatctcaagcaaggaaaaatggcatagaatcaggtttggaggacaacaatgtcaatgacagctgtaagtcagagtcccatgcagataaggtcaagagtactagttctccatgtcaactgaaagatcagtctcctctacatgaggcaaaacataaggatggaaaaattaagttgcaggagaagtttgggttcaagcctgaccaaaatgagattatacatgctggcaagaaagattatacaggaaaaaatgagagcaggaaaaaggagaatcactcgaatcggggtcacgactttcaagatgttagtacagatgccccatgcaaacaggaggtatttcatgctcctattcagaatcagtttccggactgtgatactgaaagatccacaaagagatctcttttggaaagaactgatcaagaagtacatggaaaagggaagccattgtcatcattgccatatgaaggatctcaagttgagatattaggtcgttgcccacgaccagttggcttacttaaaggaaatggagatatggaagttgatccttccaaagttgatgatgtgtcaaagttacaaaagaagcaattgaaaaagactgaccatcaaaatggaaatctgcaaattggttcaagaaatcccatacttaatggtcacaagtccaaggagcttgatgcccctagtccagctagaagggattcttcctcccatgctgctaacaatgctctgaaagaagctaaagatctaaaacatctggctgatcgtcttaagaatactggatccagcgttgagggcactagtctttacttcgaggcagccctcaaatttcttcatggagcctctctgttagaatctggcaacaatgataatgctaaacacaatgagatgattcaatggctgcaaatttatagtagtacagcaaaattgtgcgagttttgtgctcatgaatacgagaaatcaaaagacatggcttcagctgctcttgcctacaaatgcatggaggtagcatatatgagggtagtatattcttcacacactagtgcaagcagagatcggcatgagttgcagacagcactgcaaatggctcctcttggcgagtctccatcatcatctgcctctgatgtagacaatgctaacaactctacagcggccgacaaggtcaccatatctaagagtgtcaattcgccccaagtagctggaaaccatgttatttctgcacgaaatcgtcccaattttgtgcgattgctcaattttgctcaggatgttaattttgccatggaagccgcaaggaaatcacggaatgcttttgcagctgctaattcaagcctggctgtggacaagaatgcagatggtatctcctctatcaagaaggctcttgattttagctttcaagatgtggaggagttactacgtttggtaaaagttgctgtggaggccattaatcgttaaaggatccatttaatcaaaagatgatcctagcccgttaagaacatgtgtttcttggtcatgtataatatcttcactttgacaaaaagacggtctgaattaaattatgaagggaaagattcattttgttggatcttgatctggtcttgccaactggtgaaagctactgtctttatcatatgtttgccttacacagatggaagtctcagtttacagtcagaggaattcagttgctctctgttgtgtacaagaataagctctttgcaaaccttgagatacgtgggaggcacttggaagtaaacttctgtaatgcagattctgagctacttttttgtgcggaaagatgctacatccagattatgaattgaagatataataggtgaatgtgggtagacttagaagtttgaaactatttgctatctttgtcctcttctcattctggagggtttattattttgtcaatgtgtaaatgtataaagttgtaatttctggtgagaggtagttgtggattttgcattactgcaatcatgcttctaccagtgggtactgcactttctcctcttgtccaatctctgcagaaaggaaagtcaaagagagccaggctaatgttgtcttgtacaatgtcaggattagtggtagaacaatactctttactcattttattgttgatagaggccaagctgaaaacagaaaaggagggatgtacagcaagcatttttttaaagtggcaggcaattagctgcaaatggattgtcaacttatagggatgcagtggacgtgtaaataaacattatagattcaagttagagacagtgcaagctggttgctgtcttcttgcagaatctgacaggtttgagcaactgaggtaaattccagatagagctacaattgagctggccaaatctgtctgtaactgaccttggtggagttctttttatctattttttccccctgcttttcccttagtcaacagtattacatgtatttttttatacagttgatagtattgggcatttaattttaaaatttgactttacttacctgttcttataatgtacatactacattgctttattcatctaccttttagtaaacgaaaatctttcatccttt

SEQ ID NO: 101089 - DNA, 245 bp, Glycine max
  Clone ID: PAT_MRT3847_62298C.1
ctaggccgcgctcgtccttttttttttttttttttacttccctctgctggtccttagtcaggaactcttgcgaaatattttcaaatcaagtacaatttttcatggtggactgcaccaaataattaccttttgggggcggttcacagaaccaaggaaacctaacaagtggaagcggataaaaaaaaaagggaggattactgacaacacatgctccttttggggattccttgtgcagaaccaggaac

SEQ ID NO: 101090 - DNA, 865 bp, Glycine max
  Clone ID: PAT_MRT3847_62299C.1
ggggggtgaaagtgaaagaggaggcatattctcccttcaaaattacgtacatcccaagcggagaccagcacgaagaacaaaactagctcggttggaccaattcgaagcgaacttagacggagagagtgacagagaatgatgttggacggaaccgaagacgaagagaagtttctcgccgccggaatcgccggccttcagcagaattccttctacatgcaccgtgcattggactcgaacaatctcagggatgctttgaagtattcggctcagatgctctccgagctcaggacttccaagctttctcctcacaagtactacgaactatacatgcgcgcctttgatcagttaaggaagctggagatgttctttgaggaagagactcgtcgcggttgctccattattgatctttatgaactcgtccagcacgccggcaacattttgccccgattgtacctcctctgtacagtaggatcagtatacatcaaatccaaggaagctcctgcaaaggatgttcttaaggatcttgtggagatgtgccgtggcattcagcaccctgttcgcggactctttctcagaagttacctttctcaagttagcagggacaaattgccagatattggttcagagtacgaaggggatgcagatactgtagcagatgctgtagagttcgtgctccaaaatttcactgaaatgaacaaactttgggtgcgaatgcaacatcaggggcctgcccgggagaaggagaaacgggaaaaggaaaggagcgagttgcgcgatcttgttggcaagaatcttcatgttctcagtcagatagagggtgttgacctagatatgtacaaagatgttgtgcttcccagagtactgg

SEQ ID NO: 101091 - DNA, 517 bp, Glycine max
  Clone ID: PAT_MRT3847_6229C.1
caactgtagcggcacttgccatccacgtgaccagatcacattcctgttgtgccagtgtcaccggaaaaaaaaacttgaaatttctcccttcggcacaaagtttagggtttttcactttcttccttccttccttcattctcgttccgttccgtcactatccaagtatggaagaaacacccgaacacgtctcatactgtccgttgtcgctgccgccggaagacgaaaacaacagcggcgccaaattggcgaaatcggtgaacgaactcaacgacctcgccgttgcaatacaagccttcaagaacaggtatgacgaattgcagaaacacctcgaattcatcgaacaagccatccacacgagaaccaaggagctccgagcattaggcgccaattctgcgcaaggaaccgccgaaaacggcgtcgttcaattggattcaaatccggaggcagaagtacccctcccggagaggagagaagagaagaagaagaagacgagcttcttacgctttggaaaacgatg

SEQ ID NO: 101092 - DNA, 872 bp, Glycine max
  Clone ID: PAT_MRT3847_622C.1
cgctttcgttcacacctgcaaatctcatcgtctccgtctcaatcctctttcgatcaaaaacccttagctcttctctctctcatacatacacacactctcaattcttgcacatcttccatcggcgttggcgtcttcattgaattggttaaaattgacatgaacggtggaaaaattggtgaatgaatctcgcagagttttgaaaaatgccgggattagcgcaaaggaatgaacaccaacttactaatggctcatccacgccgacgtgttcgctctctgcgaatagattctggtcgaagaattcggacgaggtttgctacaatcagctccagaagttctggattgagctgtcgctgcaagctcggcaaaaactcttgaggatagacaaacaatccctttttgagcaagctcgtaaaaatatgtactgctctaggtgcaatgggttgcttcttgagggttttctgcagattgctatgtatgggaaatctttgcaacaagaaggggtggatgctcactttccttgcaacagatccggaggtttgaaaaagctaaataatgacgaatcaagcattatcaatggatgccaagatgaaattcaagatccatctatccatccttggggaggtctgactacatcacgtgatggctcattaacacttatgagctgctacttgtattcaaagtctttgaaaggactgcaaattgtctttgatggtgcacgtgctagggagagggaaagggaactgctttatcctgatgcttgtggcggaggaggccgtggttggataagtcaacgaatagttagttatggcagaggacatgggacaagagaaacgtgtgccctgcatactgccagactttcatgcgatacacta

SEQ ID NO: 101093 - DNA, 328 bp, Glycine max
  Clone ID: PAT_MRT3847_62300C.1
cttcatctaaacttcagggcaacttcaaaatgggccacttctttggccaaaattttgagggacccctggccccggccccttggatgggcaaattcccttaaaagcggcccccagggtcccctgggggacattcaattctttacggggcccgggaaaaaattaaggggggggaaccatcccacctctaaaacgggaaagcgggccaaaggcaaaccccgttttttggttctctaaaaccaaagcaacgggggcccctgggaaaaacttttcctttccccccaccacgggattcaacaaaagcctttcatatttataggggccctttccc

SEQ ID NO: 101094 - DNA, 1416 bp, Glycine max
  unsure (1)..(1416): unsure at all n locations
  Clone ID: PAT_MRT3847_62301C.1
acaaaatggatcgtttgtgaaaactgagaagattcttaaatgattcagtttccgggtgtaaacaaaatcgaaaaaagaaagtaactttggaggtttggtgtaaagggttcttcatctgctccatccttacgaacccgtcgcggaggaccttaatagcacccaccatctctggcaccgcaatccctcttcacaccgccacttggcaccatcccaaggggaggagggctgtagaaaaacttattagacgatgtcgtatggtgctgttgtgacacaccagtcgggatcttgcacctcgctcattcaatcaaatcagcgcgtggcactaccatctgttgacggtagaggaagaataatgagaagtggtgaggcagtcagagaaatggaaatgggttcagtggtggttgaaaaagtgggaggcagatcatctgtcacaagttgcttctcaagataccccctcaagttcgtcatacccaaaaaggtgggttcttccaaaacagatgctgtatgggtttatgccctcaactatggaggtggaattgtatctggtgacaacatttcatgcaaattttctgtgggagatacttgtaccatggtgttaaccacccaaggttccactaaggtttacaaatctgtgggatccaagtgttctcaacaaatattagaggctagagttggaagcaatgcacttttagctatcattcctgatccagtaacatgcttttccactgcaagatactgtcagaaacaagtcttctgtgtgttgccagactcaaatttggtcatggtcgattggattacaagtgggcgccatgaaagtggagaaaaatgggattttgatctatatagaagcagtaataatatattcttagaagatggtcaacctttatttctggatacgatgttattagacaaagaaaaaattggatgtgtacaagaacacatgcacaactaccaagtaattgcaatgattgtactcttggggccaaaggtgcagtatgtccagaatcttgtgcaagatcacgtgaaaaaagttatgtctgagcaattacagcatccttctgctgcttggagtcaccaaagagacaaggccgatcattttattacaaaaccaagcttcatagcttcttgcagtgcctttggtcctaagaaaattggtcttcttgttcgagtggctgctgagacaactgaatcagtttacaagtttctacggcatcaattggctcccttggagccaatgataggggtgccaccatacagataaagtgaagtgttctctgaaataatattagttttaattgcagagcnnntatgtattataattttacattccttttattcatgtatattttatttttagttatcaatctaccatatatataaggacccaggtttttaatttctgttaaaggatcaaac

SEQ ID NO: 101095 - DNA, 199 bp, Glycine max
  Clone ID: PAT_MRT3847_62302C.1
gagaatggtttgattactccatagatggatgtttttgcgtttggggttgtgcctttggagcttctttcggggatagaacctcgtcgtttgttgacaccaggtaggatgcggggacactctccaggctcctgccggttagaacctcatggagcccccgaatccttcttatcacaccactagtcatcagccatctcacttt

SEQ ID NO: 101096 - DNA, 557 bp, Glycine max
  Clone ID: PAT_MRT3847_62303C.1
ggaaaacactaattcccttttccttattaaaaaaagcaggggggggggcctactttgccccaacatcttatagaaaaacccttttacaggggataaaaacttaacttatttttgacggaggaaaaacaaaagtcgttctccgtaaagaccctagggccccgggaaaacctttctttgccttttttaaagggaacatttttttttttaaaaacgggggggaagaactgcacacctttgttaatgttgggaagccgttttgacatccttttggggacaaccaccaacaaccattggggcctctcccttcagggaaaccgaaatttttttggacttcccttttgcaaggaaattaaccaaggcccctcccacaaattctttttgggcccaactttttttgggggggaacagacccaccctcactgtggggcctgtttggcacccagggccccccattttggggggttggcataaacaacctttaaaaaatggcatgctgtgccacgggcacagccaacttaacacaccaccgaaacaaccccacgcaagggccctttttc

SEQ ID NO: 101097 - DNA, 460 bp, Glycine max
  Clone ID: PAT_MRT3847_62304C.1
ggttggcttttttcccaaaaacgtttttgttattccccttgaaaacctaaccacccttgcttttaccaagggttcaaaaaaccttagggtccccagggaacttttaaaaatttccttttccccccttcctaccacccttggttttttaaccttggggaatgtggtggtctaacttatggtccgccctggacaacctttctcttgccatcaaaggctgttttgggggcttcaagaactttttttgctcttcttggggaacctggacaactttgtccttcttaaccagccatttggattggcaaaaaattccttgataagcccatgttggtattgaagctaccagaaccttcctggaccgggtcccttcccttgaaataaagttgcaaagggacttggatgcagtttttgctttgttggcctatgacgcaaaggtggcagtgtcatttcaaccctgggtctc

SEQ ID NO: 101098 - DNA, 345 bp, Glycine max
  unsure (1)..(345): unsure at all n locations
  Clone ID: PAT_MRT3847_62305C.1
nagggacagctgctcggtactctacgcgataatatcaggtcacgagctactactactcggccggcgctcgtccttttttttttttttttgggattctgatgttattaagggagcaaaaaactctaaaaaacgcatggccggttatcaccaaaattaatgttggcgcaagatctctggacacacatcttgtccaaagagtaagctcctgagagtgattattgaacaactccaatgagagagtggaacgttgcaaacacctatttttatggcaccttaattgtcagtactgccaacacatacgcagcaaggatgatcatactcgtgtggaaacccgggaaccataat

SEQ ID NO: 101099 - DNA, 444 bp, Glycine max
  Clone ID: PAT_MRT3847_62306C.1
tcaggtgaagaagaagaagataacagaaagaaagggtttgtgaagatgggaagaagaaacggtggtaggtcccttcaagaaaccctccgtcgccgacttgagtcatgcaaatccaaatactccaccgccgaagaattcgccaaccatctccgttcaacttatcccgattaccaccgaaccaagcaccaaaccctaattcgatttgttcaggaagctcttcattccaccgccaagcttaatcacactcccacacccaagcactgcgacggcgacgacgatgacgacgaagaaggagaggctcaaagcgcgtctcgaaagcggcggaagaaaatcgatgggagtgaagagagattgcagaggatggaagcgttacacgtccgaagcaaggtgcagagatcttcctcatcgtcctctgcttcggagagcgacgatgaagatgaagaa

SEQ ID NO: 101100 - DNA, 460 bp, Glycine max
  Clone ID: PAT_MRT3847_62307C.1
atgtaatctaactttgcacatttaaaattgttgtttccttttccttttgtgataaaacataccaaactcttatttatctaccttctacttctcgcaattgttcttttccttggtttttcagaaactaaacacggagtcatgttgatgtttacttgactttgcaaattgacttcacttgaatttaaatatcctagtcattggtggctatacttttgtaaattgtaacttaattaatttataatattgctaaacaaatcattgatccttgcctttcctacttacataacgtcaggaggaggaaaataagtttcttatttgatgttggattttgcaggctttaatcttctgtttctgcgaagcttacctgttctcactggatgctcatgtagcttaatcataaatgcaaacggacacaaatttgtgagggtcggatgttcgatcctggtgtactgcatatttt

SEQ ID NO: 101101 - DNA, 275 bp, Glycine max
  Clone ID: PAT_MRT3847_62308C.1
cgtaactcttcatcatggctgtgtatccggtatacagtaatcagagacctgataatccagatttgaagacaatggagctgcaagcacaatttgatttgagagttaagccaatccactgggtcctgtgagtcggatattagaagtgtacatctaaatccataacctcttcaattgattatgaagatgacattagcattcagtgggacacattatacagatgacggatcaacttcatgtagttagaaaccagggattgctttgacatctgctaagac

SEQ ID NO: 101102 - DNA, 369 bp, Glycine max
  Clone ID: PAT_MRT3847_62309C.1
ttttgaaacgaaacgagggcgcttctaaataaaaatgatcaaacgggccacttcattacaaaaaatcgccatcaccattaccaactaaaagctaaccttcccaacaaaaaaagcccgaataaaacaatcatggaacaactgaacactcgaatctgcaacaactttataccctgaaaccacaccaaacaccgaaacaacctctggatttccctacacaacaccgggcttaatttcttctaattttccccggtaaaaggaaaccaaggaatctccggctcaaaccgggaacaattttattcggggcaattcccttgggaaccttaggagtatgaaaaatcaggggagccccccataaggcatcaccggggg

SEQ ID NO: 101103 - DNA, 598 bp, Glycine max
  Clone ID: PAT_MRT3847_6230C.1
agatagatggggttcttgcgagtgtgcgtgacggttagggcaaggctcttaaagttatagataggtgccactcactagggtttactctctcttcctttcggcatctttaatatttccttctccatactcgcacattttgaagacgtaaaacgattgaaccctaaatatgcgccgattgcaaacattgaaacaagtttcatgggcctccgatttagatctttgtcaggttaggctattcttatcagaggaatctccttcacaggttgggttaaattctcaagataacctccaagcaaaaacatcattgtcgttgcgtccaggtggagcacgttctgatgacattctgcctcctggatttgagggaactcatgcttcaagtcagtttgagattaagccatcccagataccagttattaagtggattactcctcaaaagattgttctaaatgtcacatggcgggtagtgtctggggaagaaagcaaagaagcagaggatcaatgtcagagggagatgagagtactggaagctatttatcctcgcatatcttccattcctctaaacccttctgtttcaatggatgttgaagagtccattgca

SEQ ID NO: 101104 - DNA, 537 bp, Glycine max
  Clone ID: PAT_MRT3847_62310C.1
aaaaaaaagggtacggggggggggacaaattccagggtaaacaaatcacaggattttttcctataaccacattttttttaccaggggcaaaataagagaaggggctcgcaacaaattcggactggcaagatatgggggggaaaatcaatttaagaaacattaaaaaacaacatgaaacccactttcacattgggacattttggaacaccaacaaaactcaactacataaaggacatttgggataaatacttttacggggggttggactgggggggggggtcaccctggggggcataaccaagggggggtcttccactttttttagggggggaagacttcttttgggggttggtcttttcctcatcatgatggggatcatcatcatggggatggggcttttaattttcataatgggcctcttaaatattttgatgatgctcatgggcctccagatcttcaaacttgtgcccctgaatgggctccccaggaaaccatgatacaggggggggaataatcttggctcttattggggaccct

SEQ ID NO: 101105 - DNA, 386 bp, Glycine max
  Clone ID: PAT_MRT3847_62311C.1
gggaaaacaaagggggcaacggctgaaattatgggctttgacaggttaacgggtcggataccctgaaagaaattgcgctgtggatcttaaaaaacgatcagtgaaccgtgtaggagcatttatgttaaacgctcttttaaaccatgggaaagcttttgaaaaatttgttttcaaaacagaccctggtgacgctaacgagacgtatgccgttgaggtactcgaatgggtggtgggtgacagggaggctcttaagggccattcgggggatgctttttgtgacttgccttataaggtgcaaaaaatgcacaattgcgtttgcgaacttggtggctaaaacccccctatatattttactgctgggaaggaagggataaactggggcaagg

SEQ ID NO: 101106 - DNA, 239 bp, Glycine max
  Clone ID: PAT_MRT3847_62312C.1
aatagcatcatcaatggcacttccttcattgcaaccccgcaacaccaacctttcaaaagtttcaattttccaacgcttaacacccccaacaaccttaattccctcatgggcatgttcctccaaacccaataactccaccaccctctctccaatctcctcaaagtttccatctttcctacgctgctccacaaaaccagacaccagcgccaacagcgagacacagcacaccaataatccca

SEQ ID NO: 101107 - DNA, 144 bp, Glycine max
  unsure (1)..(144): unsure at all n locations
  Clone ID: PAT_MRT3847_62313C.1
acatgggacttacactttcactgattatgctggcttngtctcttaccccaaaaccaatgactacggggatgggggagcttaatgaccgtgggtagaatgaaacatattaatgagattttgggtataggagtgctgatttttata

SEQ ID NO: 101108 - DNA, 286 bp, Glycine max
  Clone ID: PAT_MRT3847_62314C.1
cctagcaaaatacaaataacttaataaaggtcaagactgaataaaataacaagaacttcagtttccatttttttttttacatatatacattaaaatgcaaaagtacgataaatactcccccaaatgtggggtctgagacaatcttaaaatctaaggtaatggccacacggtaaagaatataatatatagaaacataatatctatatatgtataaagtaggtcttcacaaatcataagatatggcgaacacacaagctagtagtatttgagaagagcaaatccaaat

SEQ ID NO: 101109 - DNA, 259 bp, Glycine max
  Clone ID: PAT_MRT3847_62315C.1
gttggatcggtcggcgcaactcaaatgtgatggtaagcaatggattctgcaacctttttgtcttgcttgcaaagcctcctccaaccacactcctaaccacaaccataactaaaaccagctggtgtttgcggatacggagccattggacgaaaccctaggccactctgtctgctacgttagatcttccgctcgctttctctctccctcccattccgatcgcatcctctgctccctccaactccctccgcttctccccttc

SEQ ID NO: 101110 - DNA, 377 bp, Glycine max
  Clone ID: PAT_MRT3847_62316C.1
attaaaccttaatttctttaaattaaaataagcccataggtggtacaaatccaaagagaattgacagtcactttaacaggggtttaagcctttatttcaactaacaaaatgctaataaaatcactcaacaaaagtggcaccctctactcttcttggaacatggtgcaattgacaattcgaaacttctccacttgtaacgtggacctaaatttaaatagcatagttaacacttgttgaaaagcttccttgaccttctttattttagcccttgccataagtcctccaagtccttctaaaggttccttactcttattcattaccttgtcatcatcaacatggcaacatagatattatcctttgcatcactagctgaatat

SEQ ID NO: 101111 - DNA, 511 bp, Glycine max
  Clone ID: PAT_MRT3847_62317C.1
gttgatgtcatgacgatatcatttgttcgtgatagtagacgtctagcttcgctaccaaatgaccatgcttcattaactaatgcgatcaacactgcaaaggcacttattgctgccgtcatcacgacccgttctaaaagcaatttctcttcatcatcccgctgcgcagctcgaataacgtcattctattgctcatgctgtgaacggcagccacactcgatcatcagcttgcgttcttgtttcgccttcgctggcagcatttgcagatgcatacgtcgatcaagagattgcctgatacacacaatattgctgcgtggatcgtcgtatttgctccggcacgcgagcagatctgctgcgcctgcagtccgtgcctagcatataacgatcggcaaagcccgccacaacatggatcttcatctcactggctcaagttataagggaagggtgtccaagctagagcccgccatgtatagagtggcttcgtcgttaattggcaatcactgatccatgagcg

SEQ ID NO: 101112 - DNA, 217 bp, Glycine max
  Clone ID: PAT_MRT3847_62318C.1
ggagtacagcgccacgggtgctccagtctatcgcggagtcctgcatggacgtagtctcgtcatcgctccccaagcttactccaccacgtaacgttaccagtttcctccatctgatacataccacacactctctattatcgctactcttactccctagtgagatgccggatgtggtagcatgatcaatctgagtgctgccaaatcacaacgctgggac

SEQ ID NO: 101113 - DNA, 281 bp, Glycine max
  unsure (1)..(281): unsure at all n locations
  Clone ID: PAT_MRT3847_62319C.1
atagattatcctaagtctttggggaatagtgctncaatggcttcaagtcaggangaggtgacccttttgggagctactggaagcccatttntgtgcagggttcatnntgccctcaagttgaagggagttncaatacaaatatgtcgnagaaatttgaggaacaagngtggactgctttctcaaatccnacccagttcncaaganggttccagtgtttattcacaatgagaagcccatagcagngtctcntgtgattgttgaatacttgatgnagacntggg

SEQ ID NO: 101114 - DNA, 428 bp, Glycine max
  Clone ID: PAT_MRT3847_6231C.1
gaggtgggagaaaaggaaggaaaaacaaatgaattatttatctgaatgatgattgtttgacgcataactaaatgcgatcggggaggggatgacgtgcacagcagtgagagagctaaaaggaataaaaaaacaatagtaaagaaagaaagaaggagagagctccccccgccaatgttgcagcgagtgacccatgtccttttctgcatctgagatacttgaaagaaacagaaacactcaccctccaagccaagccaaggtgatataattaggctgattgattacgaaactaactgaaacgatgagtggagctgttcttgttgctgttgctgctgccatcggtaacttactacaaggatgggataatgcgactattgcaggatctatcttgtacataaaaagggagtttcaattacaaagtgaacccacag

SEQ ID NO: 101115 - DNA, 318 bp, Glycine max
  Clone ID: PAT_MRT3847_62320C.1
cggaaaacaggatttggctcaggattgccctttgtgaattccagggtttctctgaatttgaaagttctcacttggtaagtttccataccaagactcaatccaattaagtccgtagcgtctaccaatttcgccatatcccttttttattatcactttatgaacttttctttgttttcggaaaacaggatttggctcaggattgccctttgtgaattccagggtttctctgaatttgaaagttctcacttggtaagtttccataccaagactcaatccaattaagtccgtagcgtctaccaatttcgccggacgcgtggg

SEQ ID NO: 101116 - DNA, 243 bp, Glycine max
  unsure (1)..(243): unsure at all n locations
  Clone ID: PAT_MRT3847_62321C.1
atgacagttcttcatcatcccgctaactttataaagataacacgcactcnanatcacantaaatatattcgattattaatactacaacaaaataataatcgcaacataaaatatgcggcaaaaaatattttttacgcattcatttactaaaaacacaaagccacactccttaggacaaaaatgcttatatctctcaacaaatcattccattcctattctttctccagatcttaatcctcttca

SEQ ID NO: 101117 - DNA, 495 bp, Glycine max
  Clone ID: PAT_MRT3847_62322C.1
agagaggcgtgtaagggaacaaggccttcaaggaaacccctacaggatattggttggggacttaaaggagattgtgaagttgcaaatggaagcaagatccaaacccatgaatctctcccatgatattgtgccacgtgtgtttgcacatctgcatcagagtgtcctcaaacatggtatgcttttgtttcttagagcatctccaaccggaggtgctttgtttgcaactatcatctactgtttgcctctttagtgttatctattttgttactatataattcaatctatctatgttttttaactttgactttttataatccatgtaacctccactcttttttttccttgatagtatctcttctactgttccttatacagtttgttaagtttttttttatgcaaatgcgaatatatgttttagagattttataaaatcaaagataagctgtcagctgtgtatatggtgtgcagctatacccacccaatttgatttatgag

SEQ ID NO: 101118 - DNA, 417 bp, Glycine max
  Clone ID: PAT_MRT3847_62323C.1
gggacgcgtgggctgactcctggcacgacgcgtgggttatggccgaacaagccggtcgatctcaactcatcagtcgattgatgagggtgctggcgtcagaggggaggatctacgctgcattgcgctatgtctgtgacgatgatcgtgcgatgatgatttccaattgctgaatttagaagcatcttcgcgcgcgttattaagtatagctatgagggaaaaatgatgaagtggaatgatgagcaaaggtaagattatggccatgtgagcttgattcggtaccatgcagattgctggatgggaacattatgttgtttttgctaacgatcatgcaaaacatgatatatggcaggaaatagtgaaagggaagagaaaaagaaaaacaagtggtcagctgatcgtatgagaaatctaatgaat

SEQ ID NO: 101119 - DNA, 1710 bp, Glycine max
  Clone ID: PAT_MRT3847_62324C.1
atcacagcctagtcttcccagtctctcctttgctctttgcacctcagcacagtttcccatcgaaaactagcccatctttttccctcgtaccttttgcttcagcaacaacaacatcgtcgtcacaaatctagagacagagagagagagagaaaaaaaaaaaactgttgaattgaagatgaagatcactgtcatgactgctgatgaacaaatcatcacgttggatgtggatccccacgaatctgtggaaaacgtcaaagcattgctcgaggttgagacaagtgtggctcttcaacaacagcagcttctgtttaatgggaaggaagttaggaattctgagaagttgagcgctcttggtgttaaggatgatgatttgctgatgatggtatctggtgctggcgctggtgctgctgcttctagtggatctaccaatgatttgagcttaaatactgatggatctgctgtcaaccctggtgctttccagcagcacattagacgtgattctaatttgatgggtcagctctttcagagtgatccagagttggcacaagctattttagggaatgatttgaacaaattgcaggaagttttacgattgcgtcatcaccaaagagatgaattaaagcgtcagaaggaagaagagcttgctcttctttatgctgatccttttgatgttgaagcacaaaagaagattgaagctgccatccgccagaaagggattgatgaaaattgggctgctgcattagaacataatcctgaagcttttgctagagtggtcatgttgtatgttgatatggaggttaatggtgtcccattgaaggcatttgtggatagtggagctcagtctaccattatatcaaaaagctgtgctgagcgtcttggattgttgagacttttagatcagcgttacagaggaattgctcatggagttggccaatcagaaatattgggtcgtatacatgtagctccaatcaagattgggagtatattttacccttgctcattcttggtgctggattctcccaatatggagtttctcttcggactggatatgctccgaaagcaccagtgtataattgatttgaaagaaaatgttttgcgagttggtggaggagaagtttctgtgccatttttgcaagagaaagacataccatctcggtttctagacgaggaaaagtatgctaaggaagcttcaggctctggtggtcaaatttcatcaggcagcaataatccatcaacaggaggccactcttctggtggagcttctggtgataaggctaaggattctgagtttgaagccaaagttgcaaagcttggttgaattgggatttgaaagaaatgcagttatacaagctcttcaattattcaatggaaatgaagaacagaggcagctgggtttctttttgggggctagaaacatttgttttggaaattgattggatttattacttgaaactatttttacttttaggcaattccattacaaattctgaattacagacgtgatggcatttattgtgagttgttcatactgtaaggaatgtttttatttaattgaaaaactaacttattggtactcaaaaactatcatgtaacctctcgtggcgggtgctctctccctctcggctcgacggcagatttgtgccctgaaggatattgggccaaagaactagcctcaattgcttgtagtttgttgttttcatttaagcaaag

SEQ ID NO: 101120 - DNA, 254 bp, Glycine max
  Clone ID: PAT_MRT3847_62325C.1
tcgggttctcgtacgaacacgtgataaaacaggctaagtcacaaatccatggatttagagatctaacataatagtagaggagatttcttcaaattactctttctttcaaactttaacatagtatattttaacttagtcaacataagaattggcaaaaattcctccaatttaactactagatgactcactacggacatttgttcagattcgtaaattggccgggatactagattacacttcgtcacctcatcctt

SEQ ID NO: 101121 - DNA, 234 bp, Glycine max
  Clone ID: PAT_MRT3847_62326C.1
aaaaaaaaaaacgtttgacagaagctcccatataatgggctgaagctgtacagatttcggggctcgttacccgtgccatcgtgaggcacacatctgatgatagagatctataagatgcatagacatggacgccgtccaacaccattatgacaggtaataccatgactatgcggaacttaacaagatgaccatacaaactgccttaattatgtagagtgcttgcacaagtacttc

SEQ ID NO: 101122 - DNA, 439 bp, Glycine max
  Clone ID: PAT_MRT3847_62327C.1
gtggtgtttttttttttttttttttttcccattaaacctttttcttttatatacaagggggagatgaacaattattttacaaacaaactcaagcttataataaaacacattaagtttgcaaatacaacattttttattgccaacaaaaaaatttttgggggggataatatgaaaatagttatctaattaaaacaatcgttctagcaaaaaagagatgtggcttctaccttacgtacggttttttatcctgccagggaagccccccacccttaaagaagttagatacacaaagaactctggttcggccacctccggcagccccttgaagcttttgaaaattccggccacaaattttttcatttgaaaaaacgccatttccctttccaaacacaccctttggccaccctgaaaaaccggataagtaaaagcatcccccccc

SEQ ID NO: 101123 - DNA, 308 bp, Glycine max
  Clone ID: PAT_MRT3847_62328C.1
ggaactgggcccaacagacagggaaaaaaaatcctcaaaactggcttccaagattgaccacaaaactaccttaaggggggtaaatacttcctacatagatgatctaaccaccttaccttaaaaggctaaatttcccacaagtccttaaaaaaaaaaaaaaagctccttttttacttttttcggcccattttaaaacgagatgaggagggggtattccccatgccctgacaaggaggggctgaattttgcaatgtttgtttcaagctttccactatctgactcagggagggtgtatattctggtttttt

SEQ ID NO: 101124 - DNA, 437 bp, Glycine max
  Clone ID: PAT_MRT3847_62329C.1
aataaaaaaccggttttcttcctacggcagtaataaaatattcggggcaaggggccctaatggacaagttattgctattacaaaaatattttggttgggaaaaaatgggaatggaaataaaaaaaaaaaaatccctccaaaaaccaaataaaacctttgaagaaataccaccttttaaaagttttttgggaaaggctttatcccaaaaagttaacttgcaaaaaaaaaaatttgtccttaaaaaaaacctttttgggtttcattgggggggggaaacctattaaggttaaaaaaactaacgggtggctccgggagccggggctgaacatgcaattttttgattttttaacaaaacccttaggggggggcaaatgaaaaccccaacctaaaccatttgccttagttggaattttagcagcatggggggctgttatttt

SEQ ID NO: 101125 - DNA, 237 bp, Glycine max
  unsure (1)..(237): unsure at all n locations
  Clone ID: PAT_MRT3847_6232C.1
agtngtatctnnancanagcgaggaataacaccattgcaatgttttatttaacggatggaattttgcctcccacgggatgctagaataacgtggaatttgtattatggggaaaaaattgaactttattggaatacaatttcacaacatattgacaactattatatgcgatatacatttaaccacccatttactggttaacagttgtagaaaacatataaattttactgtatctataa

SEQ ID NO: 101126 - DNA, 426 bp, Glycine max
  Clone ID: PAT_MRT3847_62330C.1
ttcgaccaggtgctgcaacacgcccgggtcattctgttgtctctgcacggtgggatcggttactggcgctacggtatcgagcggttggtgcaactggccgagcgcggggtgaccctgatcctggtaccgggggacgaccgtccggacccggaactgagcgacctgagcacggtgcccgccgaggaaggccggcggctttggcattttctgcgccagggcggcatgggcaatgccctggacctgtatcgctgtctcgccaacctttggttggggcgcgactactcctgggccgagccgcaacccttgccgcgcacggcgatctatcatcctcgccatggcagcgtcggactgcctgcctggcgtgccgactggcaggccgggcaaccggtcgcggcggtgctgttctaccgctcgcacttgcaggcg

SEQ ID NO: 101127 - DNA, 313 bp, Glycine max
  Clone ID: PAT_MRT3847_62331C.1
gattaatagtatatttgtttaatttattgttatttttgttaccagaaaaaaaagttatccgcaaagaattacaaaaaaaaatgagacaaaaacataaagttttaagggtgaggagcataatgaaaaagctaactgagaaaaattgtttagaggtcactgccaaaaaagcgggcgtaaaaagaggggatctatgtgcaaaaatgaatcccaaaaacgcggagagaggaattttgcggggggggcaaaaaggaaacaattatatacaccagtgggacggacaacattagagtgcccaaaaccgccagaaacacac

SEQ ID NO: 101128 - DNA, 1167 bp, Glycine max
  Clone ID: PAT_MRT3847_62332C.1
agcacaccgcgcttacttgctcacccgatcaactcaacacaaaccaaaacctcagctaaaattctcacttctctctctcagctccgggaaccaagaatcaactcgatcaactcaacacaaaccaaaactcaagctaaaattctcactctctctctcatctcgagatcatagtatcatattcaatatcatttcataccaaacacatggctttggaagctctcaactcaccaacaacaaccgctccatcttttccctttgacgacccaactattccatgggcgaaacgaaaacgttcaaagcgttctcgcgaccatccttctgaagaagagtacctcgccctctgcctcatcatgctcgctcgcggcggcaccaccaccgtcaacaaccgccacgtcagccctccaccgccacagccacagccacagccgacaccagatccttccaccaagctcagttacaaatgctccgtttgcgacaagagcttcccctcttaccaagcgctcggtggacacaaggccagtcaccggaaactcgccgccgccgccgaagaccaaccccccagcaccaccacttcctccgccgccgccaccagctccgcctccggaggtaaggcccatgagtgctccatttgccacaaatccttccccaccggacaggcccttggcggacacaaacgttgtcactacgaaggtaacggtaacggaaataacaacaacagtaacagcgttgtcaccgtcgcctcggaaggcgtggggtccacccacactgtcagtcacggccaccaccgcgacttcgatctcaacatcccggcctttccggatttttcgaccaaggtcggagaagacgaggttgagagccctcaccctgtcatgaagaagcctcgcctcttcgtcattcccaagatcgaaatcccccaatttcaatgaactcgttgaatttttagtttatttttcgactatatattttggagaattttgagagttactataatttgattttgtacatagtacttggaagttttgttggaccgtaccggacccagttctctggttgaggttgtactttcacaacagtggcagatttgcaattcaattcaatttatttgtttattttaattagtaaaaaaaataatttgatcttaaaaaaaaaaaaaaaaaaactcgagac

SEQ ID NO: 101129 - DNA, 226 bp, Glycine max
  Clone ID: PAT_MRT3847_62333C.1
atttattggcatcgataagaaacgcgatgtctttaaccaagcccgaaaatctctcattacgtatcatggacacatcatggggtgacaggattgccatagcaaacaatggttagggatcaaagaggtgcaaaatacgcaaatgaaatgctgcactgtctgggaatgctacaaattacaagtgctaaaacttaagaagattttaacgcacgccttctaatacagttca

SEQ ID NO: 101130 - DNA, 775 bp, Glycine max
  unsure (1)..(775): unsure at all n locations
  Clone ID: PAT_MRT3847_62334C.1
tacgaattcgagctctgtacccggggatcctctagagtcgacctgcagaatggagatattcacaaattcatttaaagttaaaaaaataaaaaaattaaacaatataaaaaatttaatccccatcaagttaaactaaggtttaaatatcttttgttgtttgaaaaaatatcacattttttttagtcttcatcaaaattttattcttttttaatctctacatgacaaaatgatgttgttttcatcccttgtcatgtactaaaaacatatttagtaagagactcaactacattaacaaaatgtagagataaaaacatgagtagtaagagacatgttatttcttttaaatgtagagataaagaatattaaagattttatagaagctaaaactaaaaaccgtgatgttttttttttcatggatcaaaagcacatatttcaacttaaaaaaganaaatatgtgggtcaatggactcaccaacaagtactactaatgataaagaaaaaacatagaattgaaaaggtaaccaaaacacctcaagatgagtaagggaagcaagaaggtggaaagggacaaaggaagctttcttcatgttgactgagaggaggcttgtgcagtggccgcatctcactgtcaccaccgttgacaaaatgctgcatggaacactcacctgcacgtacacctcacaacattggaaaatggaagcaaaaaagtgaaagtgtggaanaagaagaaatcaataccaacacatgnaaacttcagtacagcatgcattattac

SEQ ID NO: 101131 - DNA, 593 bp, Glycine max
  Clone ID: PAT_MRT3847_62335C.1
acggctgcggacgacagaaggggaaggcaagaaaaaaataaataaaacactaagatccttataagtttccctcgatcggcgaaaatatgtctggtttccttagcaacctctttggtttcaacggaaacaacaatggcactgaggatgcctttaaaaactcaggaggaggaggacaagacttcaaggacgcggagttcaacactggtgtgcaagttgccaaggggagacacgctccttgcagtggtaacagtgggactaaaagtgcttttaacaactctggttcgggaaaacaggatttcggaaatgctatgtttaacactggtgctaggtactactaatttatataagaccttcctcttggaggggctgggcttccaaaacatacatattaatcataggtatggggaataaaaatcacaagtgctcatttgtgggtcatgtgtaagatgtgtatacgtatgttgttatatgctaataattatgatactggagctagagttctgtgtactgtaactgtaatggtgatgtaatccaatccaatcatatacgcttttataattagtagtgccttctagaagacaaacagaaataaa

SEQ ID NO: 101132 - DNA, 217 bp, Glycine max
  Clone ID: PAT_MRT3847_62336C.1
ggaaaacccacaggcacgctgagcatggaacacacaatcctagaacgtgaactctggctacaggaggggggtcagacactggaatatataactaaaaatggaagcctatcctgttctttaactctacggacatcaagtgaccaggcctgcgctccacggaagcggtggcgcacagccatccttggattttcctgacaagcacgctcttaagcaatcg

SEQ ID NO: 101133 - DNA, 490 bp, Glycine max
  Clone ID: PAT_MRT3847_62337C.1
tttttcgcctctaatgtcaagccttttttcatccttattttggtctgctcttaatgtcaagcggtgctgtgccctcttaacggaccttgcgcgcacagcactttttggcgctcgtgctccgttaacagggcactgccctcttttgtcttagcactgcgattactcgtttgtggcatctactttctcttcttcgtgttggttcgtgttgggcactgactcctccttctgcgggttgggtagaggagagctcgcatcccacccccggtggggtttgttattgagatcttgctaccccctcctctgctgttgggccctccccgcagccttttttctcttgcgcaggtgcctttcggtttcgttgttctactcctgtttggcccgcggcccccccctcctcctcctgcacttgaccctttggtgttcgttgttctcctctgggttaccttgaggcctccaccaccacctgcagcatttaactaattattgttat

SEQ ID NO: 101134 - DNA, 557 bp, Glycine max
  unsure (1)..(557): unsure at all n locations
  Clone ID: PAT_MRT3847_62338C.1
gatataaataagttcattatcatgtaaaagcttccactacaatagcagtaattagtgtgcgaaagctacattcatctcatgattcattccatttttgcatcattatactacctagagcataataaaactcttagcatagatatacttttcacctattagtttaacaaactaataacaacactataaaaacaactaacaatactataattttgaagtctcagataaatatgttaaaagtcccttgaaaaatgactgaattttattataagtcccaaataaatttttctttattttaaattctcgatatattaaaatctttgttttaaatctctatcatcagttaagtgatgacatattaccttacaaactaattttctaaatatcatcaatgattataatagtgtcacgtcatcacataactaacaagaaagactcaaaacaaaagttttaataaattaagaattcaacacaacccanaaatttattaagaatccaaaataaaaattcgatcatttatgaggactttaaacatattaaatcttacatcattatactac

SEQ ID NO: 101135 - DNA, 235 bp, Glycine max
  Clone ID: PAT_MRT3847_62339C.1
tctaaaccaaaattatccaaaaccatgtccagcttcactcatgttaccacactcatccatgctcacatcaaaaccaagcacaataaaccctccaccaccaccaccatcaccaacccattaccccataaccattcccccaacatcaggaagctatcgataacctttctagccacttcaacagcagtactactagtgcatggagtcaccagcactccacaagcacttgctcagagct

SEQ ID NO: 101136 - DNA, 1259 bp, Glycine max
  Clone ID: PAT_MRT3847_6233C.1
gcaagttcattggctggaccaattatatagtcttctatggctgtatcacccccaactccaagaccctcaaccagtaaagccatttcaccggaaacatcttcccttccacgaaggcgctgcaaaaccttcttggcctcaagcattcggcccttactgacgagccatctgggagactcaggcaagaacaacagtgtgagtgcaaagtaaataagagaagggattgaaagaacacccaacatgattctccagcttggcgccttcatcagtgacatcccaaaccccatacagtaggagaaaaacattcccgcagaaccagtgaactgtggaagtgtattgagtaatcccctaatctcagaaggagctgtctcagatatggtaaagagggtaccaagggtaactgccaaaccaattcccagaccatctaaaaggtctagcaaagacagaagggaggatataaaccatttggagaccatagcatgacaagagaactaacaaaataaagcatagaggagataatcaacattggacgtcggccaagcaagtctgatagggcaccagagcatgtagtaaccacggtggctccaataagtgacatagccacaattagaccttcaactgtgggttcactttgtaattgaaactccctttttatgtacaagatagatcctgcaatagtcgcattatcccatccttgtagtaagttaccgatggcagcagcaacagcaacaagaacagctccactcatcgtttcagttagtttcgtaatcaatcagcctaattatatcaccttggcttggcttggagggtgagtgtttctgtttctttcaagtatctcagatgcagaaaaggacatgggtcactcgctgcaacattggcggggggagctctctccttctttctttctttactattgtttttttattcttaaaatataaaaaaaaaaaaattaagtctactggagtgcagtactaagacaacgaaaggcatatagaaaacagcaaaagtagcgatcctattcgtcgggttgaaaagtaaagcaggtaatgaaatgaaattgagccccctgtttttttggcaacagaggctcgttggtggacacctgcccttttagctctctcactgctctgcacgtcatcccctccccgatcggatttagttatgcgtcaaacaatcatcattcagataaataattcatttgtttttccttccttttctcccaccatcgatcacgaaaaggtaataagctgcggacgcgtggg

SEQ ID NO: 101137 - DNA, 527 bp, Glycine max
  Clone ID: PAT_MRT3847_62340C.1
ggctcgaggggtgatgcaaaacttttttgcggcaatggtgtgaagactggctgccaggaggacacttcaagatctgagcagtctttaaggagaagaaatggtttggctgacttaaatgaacctgttccggtggaagaaacatataattctccatatgttcacctactgaatcgtaatccctgtcaaggggcaactgaatgctctgatatctcttctgatgctcccaaacaaaagtctgacttttttgctctgtctagggagcaattgctcaactctgatcatggaactgaaagttggactcgaagtcatgaatatttggagagctatgggggcggaaaagggcggtatcaatcagtggctgagtcagggctagctaaaagcaacacgcaccctgttccacaactgctcatatcagtatcttcccagacaatacatgatgcacttagcatagttcgtgaacctgcatctgattatctacatggtcgaaacatggctgacatgtggagggacaagacagttagtgatta

SEQ ID NO: 101138 - DNA, 184 bp, Glycine max
  Clone ID: PAT_MRT3847_62341C.1
gataagaacggacaggctgttgtggtattttcataggagaggggtaacacagcatatacattggggcatctcgatttgagcttacacaggcccaacccgctgtcttgttctagagcaacaaggcgtacatgcctatgtgactagcgctcatttgttcttatgcccaaacacgaatggcctcatc

SEQ ID NO: 101139 - DNA, 211 bp, Glycine max
  unsure (1)..(211): unsure at all n locations
  Clone ID: PAT_MRT3847_62342C.1
ctntggnnatagactggattnctggcttgaagaacatnacttntaagggaatgtcctcggcatctatccgtatcanagatccaaatgatataccntttggnactttgaggtggaacaaattgnagcactcccnaaangtttcggctatcnattgggncccnttttgatggctngngnggatnatgtgctgaatggangcntgccaanaatg

SEQ ID NO: 101140 - DNA, 422 bp, Glycine max
  Clone ID: PAT_MRT3847_62343C.1
gaaaccccgggggaaaaacttttttcctaaatttggccaccttaacaaaatttaaaaaaaaaatcccccttattgaaactaaatcctttacaaaaagtttttttcccttttttccccaaaattgtttttcccccaacatttttattttcccccctgcctttttgggccaaaaacttgggtgggggatcccataggcccacctaaaaaagggggccaccctgggggggttgccctgcgggtgggaaaaaaaaagcttatttttacaaatgttcccgttgaaaaaacccccttttccaatggccaaaaaaaaattgaccccccctttggcggtgccttaaaatttttaccaggaataaaccgagcttttttttccaaaaaacttttttttgcaatggaaaacacagttttttttttatcttttt

SEQ ID NO: 101141 - DNA, 314 bp, Glycine max
  Clone ID: PAT_MRT3847_62344C.1
aagacacatccagactcgaagccgaagaagacgatcctcataatactgccaacagcaccggatgcagcaatgagcatgacattccagatccctcccttcagccgagtcaaggatcacatgttcaaacaccatggtggcaaagggttcgtctctggccctatgacgtcagttaaagccagaagaaaatcatcagatggtctgtgttgatacgcaagatctcacatctcacatgatcgcctgcatgtgacagatcttgcccacgacgatcaagtagcaaatcaataatgcggaacagatcatgtctatccctacat

SEQ ID NO: 101142 - DNA, 450 bp, Glycine max
  Clone ID: PAT_MRT3847_62345C.1
aaaagaaaaaaaactatttaaataaatcccgcgggggaacccaaaaattcagatcggggccaaaacaaatgggaaaaacggggtaaaaaaaaccccccttatttgttattaccctgggggggaaaaggggggggccctaaactggattttttatcctttttttccgcaaaacccaaatttaaaatactttgaaaccctttattttccccacaaaaaaaaattcgccccaaaccctaaaaaattaggtgtaagggcttccttatttttaaaataaggagggcccgaccttctttttgtaaaaacacagggaaaaaaagggaaagtcctgaatgcaacagcccaccccaagaaccacacattttgggggaaatccccaaaccgaaggccaaaacccatagaagggcaacctcaacataatatcgggccccaagaaggggaagcccccctttg

SEQ ID NO: 101143 - DNA, 128 bp, Glycine max
  Clone ID: PAT_MRT3847_62346C.1
tttttgaacaatacagcttgctaaggctaggggggtatgcgaattcgcataattggaatctgggtgttcacgtggccaaacaccaaaaataggcgggagtgaagagtgttatattcccaatgaaaaga

SEQ ID NO: 101144 - DNA, 338 bp, Glycine max
  Clone ID: PAT_MRT3847_62347C.1
gtggtgggtttttttttttttttttttttttttttttttttaattcatttatacgatgaaccggtttataaatttgtttaattggaaccgttcgaaaaaaggacgaggggcccactaaacatatctctgcttcaataggaaacgattcatttttttttttaaaaaaaaaaaccccctaaaaatggggggtgggaaaaaaaaaaaaaaaaaaaaaggggggggttccctttaaaacccaacccccggtctttggggagaagaattgtagcacatttaagataaagaataatatatttttctttatttaaaaaaatatccaaacctttgatcccttaaaa

SEQ ID NO: 101145 - DNA, 136 bp, Glycine max
  unsure (1)..(136): unsure at all n locations
  Clone ID: PAT_MRT3847_62348C.1
gggagggactcatantgcggcattcntgtcccagttatngttcaagnnatttcaantggaaacgaaggtggtatgcannnntggatatacatccagggatnccctgctgggaaatnncagannacatacgacggga

SEQ ID NO: 101146 - DNA, 1881 bp, Glycine max
  Clone ID: PAT_MRT3847_62349C.1
aaatcaatatgtccctcgagccggtttgatggctgggggaattccttatggatacagatcaaatagcctaccacctccacctccacctcctttgccgccacacatggcaataggtttatcaatgcctggcactcaaccagcacagcagcaacagcagtctccaccgggattttacaggccacctggcatagggttttatgggaaaagccacccatcaacaccaccaccagtacctaggcagtgagcattatttcaagatcatctgactactttgttgcaaaaccttcttgtagcatgttcctctgggaaattgctgtgaaagttgaggattttccagcaggggctgtgtaataatgtgaattgttagagaattagatgtgggcagaattcatctgtagccttgtacaaccctgcctttttatttttatttttattttgcctactgcctaaactcgaagtggtaggttttgacatcatactgatacttgagatctacttcagcagtgtcaactgttaaaagaaagcacctccttggcccttaactaattattctgaaacatcacgaagcccttgttatggtgcatgtggacatcttgtttctatgaagctgtctgtggagataaacattagcagatcgtgttattccccctcttgatgaattttcagagcttcaccttgctcacaatctcggaggttgggtgttaatgtagattaataccaactgacaaaatgttgatatttttgacgttgcctgctagtgtctgggtggtgtgttaggatctttattcatgcaagagaaatgcactgtaatacactcttttaatattctctgtatgataccctctgccttattaggtgaaattcatgtgaatctgcctgaatatgttagtcaattttccattcctcctttcccttttcacgtgacaataggtttatcaatgcctggccctcaaccagcgcagcagcaacagcagtctccaccgggattttacaggccacctggcatagggttttatgggcaaagccacctatcaacaccaccaccagtacctaggcagtgagcattatttcaagatcatcagccaacattgttgcaaaaccttgtagcatgttcctctgggaaattgctgtgaaagctgaggattttccagcaggctgtgtaataatgtaaattgttatagaattagatgtgaccagaattcatctgtagccttgtacaaccctgccctttttttttgcctactgcctaaagtctgagtggtaggttttgacatcataatgatacttgagatctacttcagcagtgtcaactgttaaaagaaagcacctcgttggcccttaaataattctgaaacatcacggagcctttgttatggtgcatgtggacatcttgtttctatgaagctgcctgtggggataaacattagcagatggtgttattcccctcttgatgaattttcagagcttcaccttgctcacaatctgggaggttgaatgttaatgtagattaataccaattgacaaaatattgatattttttacctgctagtgtctggatagtgtgttaggatctttattcatgcaagagaaatgcaatgtaatacactcttttaatattctctgcatgataccctctgtcttattaggtgaaattcatgtgaatctcactaaatatgttagtcaattttccatttggtggatcccatttctaaactcgtgagactcatgaatttcaactaatagaatagaatgtgttaaaaagagaatgttagatagtgtgcttgtagtcctcttttttatacagaggcttttgaggttttcttttgacggaaaaacacttaacctccgggacataacatctgttagttcttttaaataaac

SEQ ID NO: 101147 - DNA, 773 bp, Glycine max
  unsure (1)..(773): unsure at all n locations
  Clone ID: PAT_MRT3847_6234C.1
tagattaatttattaattatatatgtaactctctccatcgatcagaattcattcagagaagtgagagttaaagatggaagggatagagcaccaaacactgaacgtgaatggcataaacatgcacatagccgagaagggtgaaggcccattgatcctcttcatccatggcttccccgacctatggtactcctggcgccaccagatcacagctcttgcctccctaggttaccgctgcgtggcgccggaccttcgtgggtacggcgacactgacgtgccggccaaccccacagcctacaccagcctccacgtcgtcggcgacctcgttgggcttctcgacgcgatcgtcggcgacgaggagaaggtgtttgtggtgggtcatgactggggtgcaatgactgcatggtctctttccctctatcgccccgaacgaatcagggctcttgttaacttgagcgttgttttcactccccgaaaccccaagagaaaaccccttgacactttaagagcagtgtacggaaatgactactatatctgcagatttcaggagcctggggaaatagaagctgagtttgcacagatcggcactgcaagagttctgaaggaattcctgacataccgcaaccctggtccactttatctaccaaagggtaaagcgtttgcacatccaactgattctnccatagcgttgccctcatggctatctgaagaaagatgtgactactatgcccagtaatatgacaagactggcttcacagggggattgaactactaca

SEQ ID NO: 101148 - DNA, 252 bp, Glycine max
  Clone ID: PAT_MRT3847_62350C.1
ccttagatgagacggacacagcctcattcatgtgttcacaagatcgctttatagcatatgctattgcactaggatcttgtgaatacaaggctgacggttgagtccttagatgagaacgaaagtggactgatggcaacattgaacttgggtcatacatctggtcatgcaatagaaactggggttcgctagggcagttgcttcatcgagatgctgttgcagctggcactgtaatggctgttgacatgtcatatc

SEQ ID NO: 101149 - DNA, 445 bp, Glycine max
  Clone ID: PAT_MRT3847_62351C.1
ttggggggggggggggggggaccaaaaacaataatcgtataaagcgggaaggggcttcccagggttatcggtggccaatgactcaaataaaagggcgtgttagttatagctagaagttagtaaaagggtgaaagcgttatcaagatagaaaaacaaactacatgtgtcaaaggacagcaagggttagccgcgggagcagggctgcgtgagagggagccctgcactagttggtcatctgccgggatgaggcgtaacacaagtgactggcgctacgggcagcaatagagggttagaaaaggggcttgtgggtggcgacgatgttggtagtggggttggtaaacgtatcgatgtaactggcatagtttgcggcggaccggtaactgtaacactgggtggaagagtaaaggtacttaaagtgaaagtacttaatgccagagagcttgcc

SEQ ID NO: 101150 - DNA, 308 bp, Glycine max
  Clone ID: PAT_MRT3847_62352C.1
gttcttcttattgttgatatgccacttttttttttgttgtttttttttttttttttttttggttttgttgtttgttttcagagaaatatggtcctttattgttataggtagtgccgcccccccccgaaggacgaaaaactgactgggaacgcagagaggggtcctgtagataacatcgataacaggggggaagttgctaaactggtttgagaagaagcccatccaagcgggtcttaggcctattagggggaaaaaaaaaaccgcttgggccaaaccttaatgaagcaagcctttcccccccctggact

SEQ ID NO: 101151 - DNA, 1552 bp, Glycine max
  Clone ID: PAT_MRT3847_62353C.1
ggattcccttattgctgttcagttgaccgttgaccttaagccaaatcttccaagggaagaagagaggatcaagcttcgtagaggaagggttttttcccttcagaatgaacctgatgtggctcgagtttggctgcctaactctgatttccctggtcttgctatggctcgggcatttggagatttttgccttaaggactttggattgattgctgttccagatatctcatatcaccgccttaccgagaaggatgaatttgttgtgttagcaacagatgggatttgggatgttctatcaaatgaagaagttgtggacattgtagcatctgctccacagtctactgctgctagagcactggttgagtcagctgttcaggcatggaagacaaaatttcctttttgtaaggttgatgattgtgctgccgtatgcctcttctttgattctgattcagatttcaagtcaacagataccaaagacaagttgataccggaggcatctattgaccaatctgagcagttatctttacttggtgaaaagggagttggaattgaagctgaaaaaaagcagcaatagctcaagttttgtaccatgtctctcccaagccttgctggttttatcgaaaaggttgggtaaattgtgctgcaacaacagtcaacagagaaaggatcattattttgatgatttttcggtagttttctgccaatattcttttcattatttatcttccatttccttcgacagcattttaggggggggggggggggcgcgtaatatatattttttatctggaggaaaaggggtaccgggctttttttttttgttgctggaggtcattttccttctctgtatatttggtagatttggagtttttgtagatccaagtctttagattaatattatatagtctgttttgaaatctgccgtttttcatttgcatcattcttaggttatagtttccaatttagtcagtagtgaaaactgaaaagaattggatttattttttatggacctgagtcaggtttttgtacctccatgttgtgttgctgtcagagattaatgatattgttgtctgtgtgatcctattgtgggttttgtgtggaaaatttactctgacggaaatgtgtctttaagctatacgagtaaaactgtatttaccttttgatttaaattttattatttcatgattttaacttaattttgagaaggataaattattttaaaaaaaggcttatttgtcaagggaaggtttactaagtactaacccacgaaggaatgagggaagtgaggatggtaacatgtcaaataaatttggaatttagttcccgaaatttttaagtgttaattattgtaggaatttactcaacttgacatggagtaccggacttgaagaagaaaaacatgacatgaagtggagttggagtcaagttttcactcaaggcaaactggatttattctccgtactcacttattaaacaaggttaaaacaattagggttgattgacattttggcctttaaggttggctttataattttttcatatacgaaaaaactta

SEQ ID NO: 101152 - DNA, 212 bp, Glycine max
  Clone ID: PAT_MRT3847_62354C.1
ccatatattttactctttatgatttttctaagaatgtgctgctgaaagataatagatttgtacaaaatcctgattgtataaacgttcttagtgcgatcagtgctggtgctgtttcttctaccataacttgtccattatgggtcgttaaaacacgcatgcaagcaagtaaatcgttaaaatacaagaacacattcgacgcaattcggcaattg

SEQ ID NO: 101153 - DNA, 347 bp, Glycine max
  Clone ID: PAT_MRT3847_62355C.1
ggggaaagggaacttttgcccggaacccaattgggaaaagcaaataaaagcgttttttttttgggaacggggcccatttttacttcccccgggttaagaaaattttagttttaagtccaaacaagtcaagcaaactgaaatttgtttgtggctttgcttggaaactaaaactttaaaggggtaaatggggaacaagacccccctttcttaataaaattgtgaaaacaaataaaggaaatttttttgggcccaaaacctttgaaaaaaaaagcggggcccccccccttttgggtaaaaacccttaaatgctccccattttaataaaacccctcacccttgaaaataaa

SEQ ID NO: 101154 - DNA, 562 bp, Glycine max
  Clone ID: PAT_MRT3847_62356C.1
acgggcacctgacaactacgaagcgaagagactcaactcaacaatggcttcttctattcagtgttcagtttgggttccttcccttcccaacactaacaccattcgctttctttctgttaacccaaactctgttactttctcttcttcttcccttaccagaatcagagcctcctcttcctccccaaccgtcgaagaagccgctatgaacatcgacaacctccgacgtttcatcaaccttaactccggaaagtggaacggctctttctatcaatttgattcatgtgggaatatgttgcaacaactgagtaccaagctttctgctagctcttatggggaagatgaactcatgagtctcattcaaacgctgtatattaaacaaccttcatcaagtacttcaatttctggagatgacaatgatgcagaatgggcagagtacaaaattaaggaaaccaatatgtttactgttgacaaatatcaacaatttgccgataggctttttcccatctgagaaagcatttgcactgaggtatcaaacagctggcatgttggaaacagtattaag

SEQ ID NO: 101155 - DNA, 276 bp, Glycine max
  Clone ID: PAT_MRT3847_62357C.1
gtcccttttcttgctggtattgccaaccccggaagacgattactatgtggtgtccaaattgcggaatcggtgcaacctagttagctggcacacttgttacccggaggaaacctcggaactaataatcgctcggttcaagaggggggcaagtaccgaccaagtcccccccctggaatgttgataggcatgcccactttaattatccttgcccatggacggcacccctttgccacctcacggctctcaatttccacacagcttgtgagaacactttcc

SEQ ID NO: 101156 - DNA, 135 bp, Glycine max
  Clone ID: PAT_MRT3847_62358C.1
cccactctcatgttcgggccaaaaaatatcccagagtgggtttatgggacatcttttgggctccagaaatgaaatgcactcatattgaggcagcgcccaatttccatggaactgcgaagagattatagcctcggt

SEQ ID NO: 101157 - DNA, 332 bp, Glycine max
  Clone ID: PAT_MRT3847_62359C.1
tgctcctattacgagcctttcctttcattccattgattcctatcatacacttgcaagggtaaccttctaaacccttatggacgtattcacaccttcagagaacaatatcaatttctacatcaccaatcatctttcaccataacaatccgatctacatacaaaactttacctacgcccaatatactctaaaacttcaccacaatactcattgctccctccatatatactaacaatctattgaacaatcctaaaaaaatcttgccctatactttaataaaagtttttctgacttctttatcccatctaaaacctacaaattatattcatatctt

SEQ ID NO: 101158 - DNA, 463 bp, Glycine max
  Clone ID: PAT_MRT3847_6235C.1
gttctagatcgcgatggccatcatttcatgtactagtaactaagattattttgattcataacggtagggagcgtccatgctaaaaaaaaaaaaaaaaaaaaaaaaaaaaaaaaaaaaaaaaaaaaaaaaaaaaaaaaaaaaaaaaaaaaaaaaaaaaaaaaaaaaaaaaaaaaaaaaaaaaaaaaaaaaaaaaaaaaaaaaaaaaaaaaaaaaaaaaaaaaaaaaaaggggggggcctttttaaagaaacaaatttaacccaccggggatgcaaatatataaaatttttttatggggcacccaaattaaaaaaaaggggcgggggtttaaaaaactttaaactggaaaaaaccctgggttccccaaaataaatagccttgaaaaaaaaccccctttgccaagtgggtattaaataaaaaaggcccaaacctatgtcctttaaaaaaatttgccaccctaaaag

SEQ ID NO: 101159 - DNA, 1525 bp, Glycine max
  Clone ID: PAT_MRT3847_62360C.1
tttttttttttttttttttttttttttttttttttttttttttttttttttttttgaggcaaaaactttttgaatgcattgccataactcattcttgcaaactaaattagactaccaattcaactttcattttgcagtttgtattctctgatagaaacatgtactgctgaatctatgtcttctatatctggtgccatcatatatgaaaattctatgcactaaagaatttggtatacagcttctgaaggcaatctttacttgccagagcataatattccagaagcaaattgatttaagggcacatatttacaacatagacacaaactatattcatatttcataacatgcaatgtggattaaacaaagaattaccatgtcaacatgtagtcaaaatttcggctccagtcttagttatcaaaatggtatgctcaaactgtgcagccggactaccatcagctgttagtgttgtccagttgtctggccatgtaatggaatcaatgcttcccattgaaagaatcggctcaattgtaaatgtttgaccttcaaccatgcggcctgccttctcattgcgattgtgtataataattggttcagaatgaaacactgttcccacaccatgcccaacaaaacgctccactacaccatagccatacttttcagcatgctcactgattctctttccaattttcctaaagagagcaccgtccttgcacgcagctattcccttctccaggcattcttcagttaccttgacaagatttttcagttcatcactgacttccccacaaaaaaatgtctttgacgtgtctccgtgatatccatccaggtagactgtcacatcaatgttaataatatcaccattctgtaactgccgagaatcaggtattccatggcacatgcactcattaactgatgtgcacacgcttttcggaaatccaccatagccaaggggtgagggataagcaccagcatcaattatcatctggtgcactgctttatcaatctcattagttgttatggaaggcctaaccatagttcctgcaaagtttaagacacgcgctgcaagctcacctgcagccctcattttagctataccttcagaatcatgaatttgatgctcacttgcaatttctggaagtatatctgaacctacataaggaggccttggtatgtggtcaggaacagggagatgtggtgatactctcccacgccttaatggaggccttttcttaaactttggcacaactcgaacttcacgttctcttctgatattcatggcctcctccaaccccgaaatcttcctcgcgaaaaccacgaattgctttctcgaaagcaattggttcccttgaagagtagaagagcgcgagagtgtgagccgagaaccgatgaaggatgacgaagacagtgagcattcgccatgatggagtgttgggattttcagaaatgcgttgttagcgagcgaagcagtgagcgcccggacggaagaagaagagtatgtccccttctgtcgtcttctcgcagccgt

SEQ ID NO: 101160 - DNA, 436 bp, Glycine max
  Clone ID: PAT_MRT3847_62361C.1
tatcggggctttcttattgttgctataatagcttggcttgtgttttgtttttggtatctacaaattctagaacacactcaccttttaggacatgatctctaagacaatgatgcctaatttctatgtgcttggttctagagtggaggactggtttcttagatagatttatggcgcttgtgttgacacattttatgggaatatggtctaatacaatcccatagttagatagtcgttgtttcatccacaagatctgtgcacaacacctaccagtagagatgtactctggttcggctgtggataatgctacactattttgcttcttgttgagccaagagacaagagcagaccctatgaactgacatgtgccactagtacttttcctatctgttttagatccagcaaaatctgaatctgagtttcctattaaattgcataa

SEQ ID NO: 101161 - DNA, 2479 bp, Glycine max
  Clone ID: PAT_MRT3847_62362C.1
ttatgactcctctgttattgaggcttatcccagaaaattaagggatgttgagaatatgggtgtgtgtgaaagggtgagagctgtagccacagccgccttgctgcaaaaggtagatgctgttgcttacccacaaaatattatgggtgaaaaatgcatgcatacttcatatactaatggtgccaaccaatattatgaaacaggaaaggagaatccttgtaatgtttcaacacactttcttgagagaattgaagaacctgattattcttgtagtgatcccacgcgtccgagttcggttggcagttgtagtgtgataagtagtaactcaaataaattttccagtgatactttagcaggttcttgccaggatgaagattccctttgcagtgatgcagaatctctagatgttgaacctgtgaatgaaggatgctccacttcttttgaagaggttgtagcagaaagaattcatagggccagtgtaggaggcttgcatgccttgcttccaatggctaagtatgatgctaggtttgcttcttttctctctgtaaattaattggtgatgtctaccaataattttctttcagagataagaaattttttaccactgttttctcactgtcattcatggcagaatatgaactttcttataagctgtggacgtaatcctcttatggaagatcttcctatagtacaatacagataatggtttaattcatatatatgttatcctgtcaattgaaaaaataagtgatgctaggatgtttcagtatgtgttatatcagggtagttaatcacactggatttctgtcacatggcctccccatgatgcataagcagatgtgtggtgtgttgacatggcagcaaattgcagctgcaatagtgctttgcggccgttactccagaccgttttggtagtggagcctgtgtctcattataatgctactactgctgggttgattaatcagttgactagcatatcaaagcgtttgtggaaataatgcacttatccgatgctgatagatggccttaatcagaaattcagcgcaagctggacaatgttggaataggcgttgaccgatttttcttctcgagccgaatcggctcgagcagaaaccctaatttcctcgttatttcgatactctctccctttggaaaaaatcaaaggtgctcgcagtcgcagcgattagttcaaagattgtaagcgatcgtgaatcgtcgacaaaggttcgtgtctgaattgaagtagtgtcatcaccatgagattgagaaagggaaataaggtggagatccgtggcaatgctgatggacttagtgtggaatggtgttgtgctcgtataatttctggtgatggacacacctacagtgtccagtatgactgttctagcacaacaagcgaggccagcatagagagagtttcaaggaaggccatcagaccatgcccccctcttattaaaggtattgagagttgggcagcaaatgatcatgtggaggtttacattgccggttcttggagagcagccactgttttgaaagtcattggtggagatttctacttggttaggttgtgggtatcttgcaaggagtttaatgttctcaaagtaaacatgagggcacgccaatctttggcaaaatggacaatgggttgtcatgtcaaagggatcaggaatgtctggagatgtgatgtctagttggtatttgatttcaaacagttacaaggatcaacctgaaaatcagtgcagaaatattttttctccaggattagataccagtggtcttcaggaatttcgtctggcttcattttcagtatcgataataatgcccccttttgactcctttgtttttgcggcttatatcagaaaattaagggatgttttgaatgtctgtatctggcaatggttcaaggttgttgctacggtcactctgaacggtccagcactgcctgcaaactaccctccctgcatcatgggtgcgtgatgcgtgctgccttccccttctcacggtcccctcttttctctgctccaggcacgccgctgccctgccttgtgtcagcacaccttccctttgcagtgatgcagaatccctagatgttgaacctgtgaatgaaatttgtcccacttcttttgaagaggttgtagcagaaagaattcataggttagagttgcatgcctatcacagtaccatagaagttttgtatgcttcaggtcctttaagttgggaacaagaagaattattgactaatcttcgtatttcactccatatttcaaatgatgaacatttgatggagataaagaacttagtttcatctggtctgaatttttaaatgtttacatgtgaattcgtcatttgcacagccttattgggttctgaacaagagtacatagttttgaataattcttttttcttaatatttctatattgggaaaattatgttgctatactcattatgaatatatccagttatgacgctctatttatttgccct

SEQ ID NO: 101162 - DNA, 985 bp, Glycine max
  Clone ID: PAT_MRT3847_62363C.1
gacatttgtgccatttttgaaatttgattcttagaaaccctaatttcgtcgttgtttcaatactctcttccttggaaaaatcaaaaggtgctcgcaggtgcagcgtttagttcaaagattgtaagcgatcttacatcgtgaatcattgataaagtaacatttatttgtgaaacgtcactggttcgtgtctgaattgaagaagtgtcatcaccatgagattgagaaagggaaataaagtggagatccgtggcaatgctgatgggcttactgtggaatggcgttgtgctcgtataatttctggtgatgggcacacctacagtgtccagtatgactgttctagcacaacaagcggggctagcactgagagagtttcaaggaaggccatcagaccatgcccccctcttattaaaggtattgagagtcaggcagcaaatgatcatgtggaggtttacaatgctggttcttggagagtagccactgtcttgaaagttattggtggagacttctacttggtaaggttgtgggtatcttgcaaggagttaaaggttcgcaaagtaaacatgaggccacgtcaatcttggcaaaatggtcaatgggttgtcgtgccaaagggatcaggcaagtctagctggtgtttgatttcaaacagttacaaggatcaacctgaaaatcagtgcagaaatattttttccccaggattagatgccagtggtctccaggaatctcgtctgccctcatcttcaacattgttaagtatactggcttggcctccccgcataagatggaccaggcttatgtgttgtgcaatcccattaaccactcctctgttgtgccttaagaaagaacaccactgttttgcactttgttgtcctacagccagtgacttgttaattatgccttaaatatacagcaaatgtgccctacaaattacttattttgaatgtacataatttttgttatacagatcatcccattatttgctccg

SEQ ID NO: 101163 - DNA, 309 bp, Glycine max
  Clone ID: PAT_MRT3847_62364C.1
attaatattatggttcatattcattaattgtaatgtttgtttttaatttacatttgaaaaaaaaaaacggaaattattggcaaacaaaaaatggggaaccctatttttggaaaactcacccccacccaaaaaacttttaaaaaaaggacctacccaccccacctgacctgtttgcaaatgatggacaaaacaaagggggagaaaaacggcttaaatacaggccccccgcattatttggttggggtcataaccccacctaaagggataaaaagaaagcgcacactggggaaatttggaatgattgtgaaa

SEQ ID NO: 101164 - DNA, 430 bp, Glycine max
  Clone ID: PAT_MRT3847_62365C.1
ggcctatctatagaaggtattttgaaggataaagatattgagactccagtagtatgcaatatatttgatgttaatggtgaggtagcagctggtgttgctagtgtggaagcttttgaaaaatatctgacacctgactggatctttcgcttcaaaaacactttactatctgctccagtgttaatggttgatgcaaatctgagtcatccttctcttgaagctgcttgtaaaatggcgattgacatggagtgtcctgtatggtttgagccagtatcagttactaaatcccgaagaatcagttctattgtcgagtatgtaacttttgcttctccaaatgaagatgaacttattgcgatggcgaatgctttatctggcagtgatgagtttcatccacttaaagaaagtcagaagaaaaatatttcagtattatctt

SEQ ID NO: 101165 - DNA, 488 bp, Glycine max
  Clone ID: PAT_MRT3847_62366C.1
atcctactatctcttaggcgcttacggttcttttttttttttccccttttctttttctttttcctttgtttaatttcatcaaaaaaaaaacactctctccctccaattccaccccgcaactcgaacagaaaaaaccgggggggcggccacatcataaccccctctcaaaaaaaaaaaacccaactgtgttgcctccatgctctcctcctctaggaaaacaacattatgcggaaaaaaaaaaaaaaccaccccgggatcaaaaccctctctcctctttaaaaaaggtggcgagaaaataccaatgtagacccccctgccaaaaaattaattccattgtacccccaaaaaggtgcccgggggccacactaatgggagcggcccttttacaaaagggggggactctaaaaaaaaccaaaactttcttcaaggtgcccctctactttcggagacaaaaaaaacagaaaaatccccaaaaaaaaaatctccct

SEQ ID NO: 101166 - DNA, 255 bp, Glycine max
  Clone ID: PAT_MRT3847_62367C.1
cgtgtgccttgaaatttatcgtcttgtacaatatatttcattagcttgaaaaaccaagcatttaatgattttttccttctaaacccctgatttagggattctttctcttaaaagtatgacaattgaaaacgccttaaatattcatttgattctatcaatgcaatatggatattttcccgagtcatgcactttaataggaaagagcatatgctttaaaagtatagcatcttcaaatctatatttgcatatgtgaaa

SEQ ID NO: 101167 - DNA, 134 bp, Glycine max
  Clone ID: PAT_MRT3847_62368C.1
gggccgccctttttctttttttttgaagcggtaaaacatattgattaataggcgatatgaaacgagcggcaacatggtgtgttatactacaaatgttgcttactcggtgaaatacaggttgtaacgtctctaac

SEQ ID NO: 101168 - DNA, 389 bp, Glycine max
  Clone ID: PAT_MRT3847_62369C.1
gttcgatgctgatatggggtttcgaagaaaagtccatgccgttttgtgcagtcacatgtgcaatatgacatgccaaacatttactttgggatgaaatatagtattatatatatgtttacctcatcaatgatgcaaaatgtgaattacccgctgataaatgcgtgtatctgctttttttttttttcaatttagaatacagtcacaaatcacgttagccttttctggtaagccttttttttcattttggtaacttaggctatatttattcatttcttttaagtactaaatactaccaatttgagtagttgaagtagtgaatgccatgctggctttgcgtgttctttttcacactacccaattgtagctttcacaattttttaaaatgtttt

SEQ ID NO: 101169 - DNA, 374 bp, Glycine max
  Clone ID: PAT_MRT3847_6236C.1
ccaaccggtatgattcaaaaggatgagcataaccgatgcaacatataacccagacaacttaaaatcggagtaccttactcataagccgacgacacctacacatacaagaggctccacataagaacaagcaaagctagcaccatgggcaagtacgcaaaggcccaaaccaggatacgagcgacgatgccatgaaaaaatgcagaatgacccgaagtgtgaaaacattacctaccccggacacagacaggggaatgaccacacctttcaccgccaaacaaatacacaaccacactgaatcctaaacaaacgccactttggacaacgcgcgagccagaactaacagtactgctcgtggcaagaagacagcctgaaac

SEQ ID NO: 101170 - DNA, 226 bp, Glycine max
  Clone ID: PAT_MRT3847_62370C.1
gactttactgatatcctgagcttccattgtgctcactcaacccgtaaaaagaaaccctcttcatcttgttctatcagtgacgagcatcattgtctcaacagcaatgttactgttggctatgtgtgtgcttccggcgatggttgtggccagtcgtctagcatagaaccctttctgcgtgaatggtcatgtctaatgtgacccttgccgtgctggttctgagacctca

SEQ ID NO: 101171 - DNA, 545 bp, Glycine max
  Clone ID: PAT_MRT3847_62371C.1
tgatgccggtattgtgttaaaatcagtcaaaggggttgtaagtggtctcaatattgttgacaacatgttctctggcttaaataaaggggttgatatagtcaagttggaccaatcaaatagtcattttaatcaaattgatcaagtttttgtggcaagaaatgttgtgaggggtatgaacttaaaggccacagctgcaaagatgtctttgcttggtaatggaacctcatggactgctgattttaacaaagttttgcttttccctaatcttatcaagcatgtttggacttctttatttaccaatgttttgcttttccctaaccatgcccaacatgttgtgtactccttaagcgccaatggcaacaccttcccaaatcatgctctcagaaacgtttctcagaatcgtgttgtgatcgaaacggatgaggctgtgaatgcaaatgtttttgtcacagtggatcaaggtaatgcaagttgaagaaagttagaacttagaaggtggtggccaaaaagttgttggatcaagaaattctgattgaagagggaat

SEQ ID NO: 101172 - DNA, 502 bp, Glycine max
  Clone ID: PAT_MRT3847_62372C.1
ctcgagccgctcgagtacggctgcgagagacgacagaagggcctgttaccttacatacaacaaaatgattaacacaaaattatatctttattttcatcaaaaccttaagagatgtgtgaatcgtccaatttctaacaaccaacatctcagctaaatgaaacaaaatctccaaaggttccccttaagggaatagatacatcaaggtatataaagtcacatgtattccctaagttggtcctcatatgacaataaacgagaaaaaaagggctaagagggttaggtctcttccctaaacccaccaatgagatccaacaccaagcaagagtgacatactcttctgaagccttatcacttttattattaatgtccttttagcaaaatggagatggaaactttttcatcataagggggtgagaatttggagtctaaatatggggagtggagacgacttcttgaggggaaatgttgtagaaatttatctttatggtggaaggatttatgt

SEQ ID NO: 101173 - DNA, 336 bp, Glycine max
  Clone ID: PAT_MRT3847_62373C.1
gaaacattcttgcagcgtttatctcataggtctgcttttggatttggagatgaaattaagaggccctgaggttgcatctaaaaccttctacaatactctgggaaactgcagtgttcttatatccaacatgtttgggccattagagcaaatggctttagcacaatcatcctgtaagaggtgtctattccgccatgtctggtggacctcagaatgtaaacgtagcaattatgagctatggtgggagaattaagaatcaccttgaaaactctaaagggattcatagataaacagaattccaagttttgcattgagaaagcctttgatgaaatattcaat

SEQ ID NO: 101174 - DNA, 540 bp, Glycine max
  unsure (1)..(540): unsure at all n locations
  Clone ID: PAT_MRT3847_62374C.1
cgcanncgcnngttcttcnatctgatcaaaatgtattttccgatggggtatgatatcaagcacctgatgaagttctgcagcagcctccatgggggggggaacaagctcncggagttgttggaggtggagaggggtggcgtctgccatcaggcggggtctgataggggaggggcttcttgtacatttanaaagtggagggatacgttcttcagggggtccacggagaaatatgctggggtcttgtatgggttanggggtgagagtgggcagactaattgaaattgagagagaaaaagaaaaaaggagagaagaatataatgtgggtgtggagggacgttttaagtggtgagggctctttttacgttcgtgtacactgtctgccgaaaaatgggggggtgggtacttgggacattttcatcatcatccttgcgtgagctgggactcaaaccctanctgggtttgtgagcttgagttctttgggaatcatcacctcaggttagtgggtcaaatttaaataataacttatatgatgagtccccc

SEQ ID NO: 101175 - DNA, 270 bp, Glycine max
  Clone ID: PAT_MRT3847_62375C.1
gccacccaaagcgctcgttcaaacctatcagtataactggccatcgcagactgtcaacgagagagacttcgaccaagcgcttgctcaagaggagctggaatccggtttcgataatagcgcactggagcctactgatcccgacaatcttgataattggtctgcagatcccgaagctgcctctgccaacgacacaactatggctgttgatatcggcgatgcatgggatcttgatgaaccagacctcgttgcagccgatactcaagaagagca

SEQ ID NO: 101176 - DNA, 226 bp, Glycine max
  unsure (1)..(226): unsure at all n locations
  Clone ID: PAT_MRT3847_62376C.1
atctctaaanntccagtacaattcctactaacaaaaaaatatattttgtttgttatgntgttggggttggaatctcgactgcgagattgacgaacaacatgagaacgcagaagttcatagataactgtcaaaagcaaaaattcactatatagtaatccaatcctttttcttcctatagtatcaataagtcagcaaaaagaatggcccaggccaggaagaagctcga

SEQ ID NO: 101177 - DNA, 265 bp, Glycine max
  Clone ID: PAT_MRT3847_62377C.1
tgtagtgtaaggcgagaaatgtgtggaattgataaggagaacacttttaagcagcccggattagagataccgatcttgggcatctgacagggatgattgattaattgactatgggttgaagctttttctgtcccacgggttacccatgaaatccgtagtgtgtggatatcttacttggtctcaggttgaccgttttctacgtctaaagacatgcattttttctgagcatgaagtctaataatttattgttgattccaactcctat

SEQ ID NO: 101178 - DNA, 318 bp, Glycine max
  Clone ID: PAT_MRT3847_62378C.1
cacgcgtcaactcaatcgtacgctccttctcaatcaaattatacatacaattcatcatacattccacactaaaggtttcatcaagggtgttgtaacattcaacgatccaagtagctctgctatgggttatgctaccctttttaaaggtccagttaacgttagcgaaaacgttgtttcaaacggtatggatgccttcaagatttttggaaatgtttacggaagtagtagccccaggatcattttccatatcgattgtcatgacgaatttgaaatccaatttgttgtagcccattgttgaagctaatgttgaagctaact

SEQ ID NO: 101179 - DNA, 256 bp, Glycine max
  Clone ID: PAT_MRT3847_62379C.1
gggaggattgttctaccatagggaaaatggtcgtaacctctcccaaattaacctttcctgacatggatcatcttcaactagaaaaggaccttgttcaattggattttgatccctctgacaaggcacctgggtcaaagtcttactacttaaaaattaaacccttttatttaaaaaagcatcttttaaattcgcactttgtttaatcaataaaataagctttaactccattaacactacctgaacttttccaaccctc

SEQ ID NO: 101180 - DNA, 504 bp, Glycine max
  unsure (1)..(504): unsure at all n locations
  Clone ID: PAT_MRT3847_6237C.1
gggcaccttcaggagcaatggcacacatattacacaccaccatatgcatgctaattaaggtgttcttaaatttagtaaaaggggcttactctaaacacactagttaaggaatcaataatatttttttatattaaaaactgcattaggaatgtattaaaaattaaggtgaaagtgtatcaattaacaacattttaatgaaaacttcttattttgattctttaattagtgttttaaagaccatttattggctaatgtgaaaagaaatacataaacaaaaatgacacaaatattaatttattacttaaataagaaatttttgtgggaatgtacacacgtttaattatgacttatatcgtgttttgcttttgctttttgatgtaagggatccacatgcatcacaagttattatgagtaactntgcagtatggttaaatgtgatgaaagaatacttgatctacattaacaaatncatttcaaacatgcacttaacttgtttagaaaagt

SEQ ID NO: 101181 - DNA, 467 bp, Glycine max
  Clone ID: PAT_MRT3847_62380C.1
ggggaaaaaagccaattttattcccaaggaaggttaaaccttttaccaactttttccccaaaaattggggggggattttaaaagggggaaaccccccattttaaacccccggcttgaaacttggggaaaggtgaccccccccataccttgggctaaaacccccattagttttttccccctaacccttacccaaaaaaaaacccccccccttatcccaatttattccctttaaaaaaaaaagggggaaaaaaaaaaaaaggggaaaaaaaaaccttgccaaaaaaggggatcctttaaaaatttccttccggtaaaaacccggtcccaaaagctggaagggaacccctttttttctaaacttgccaaaaccatttttccaaattatttttttggaaacacccccaaaaaaacctcctaaaatttttttggaagaaactgggcccttttttgaaaaaaccccctttggg

SEQ ID NO: 101182 - DNA, 344 bp, Glycine max
  Clone ID: PAT_MRT3847_62381C.1
gaagctgggcgcctgcccgtgccggaccggtcctgccgggtcggcccaggccacccctcgattggtgttgctgataagcttgagccggctaacacacacaaattatctcatggaggtcctccaagcgattcttggatccacatggtgtgaacagactgtatacatggagacaactacctgaacatgcatccaggtgagaccgaggcatgtgaccatcagtcgtagaggcgtgcccacatatggtcctggagagccctttgtggcggaaaatttttttgatcatactactcagatactggcagttctggtcaagagcctgtacactgcaattggtaacaccgatc

SEQ ID NO: 101183 - DNA, 1363 bp, Glycine max
  Clone ID: PAT_MRT3847_62382C.1
gaaggctcccatacccggtcacagcggtgactcttttggttttcccccctctccttgctccttgctccaaaaccccttattcagggtcaccgctgtcagggttagggtttttccaccttctttatttaccaatcttcttctactaccacttttccctcgttccctctcttagtctcttcaattgtaagctttttgcgctagggtttcctctgcaatctcttgtacttgaagctcgttccttcttccggatctcgatctatggatacccgcaagaggggaagacccgaacccggcttcagcttaaatggcggattcaagaaatccaagcaagaaatggagtccttatcaactggtgtaggaagcaaatcgaagccatgtaccaagtttttcagcactgctggttgcccatttggtgagggctgccacttcttgcactatgttcccggtggttataatgcagttgcccatatgatgaatctaacacctgcagcacctccagcatcaagaaatgttgcagctctgcctcctgtaccaaatggttccgcaccacctgccgttaagacccgcatatgcaacaagtttaatactgcctgaaggttgcaaatttggtgacaaatgccattttgctcatggtgaatgggagcttggcaagcatattgctccatcatttgatgaccatcgcaccatgggacccactggagtaggtcgtcttgctggtcgaatggagccccctcctggccctgctgcaagttttggggccaatgccacagccaagatcagcgtagaagcttccctggctggagctatcattgggaagggtggcgtgaactcaaaacagatctgccgccaaactggagccaaactttcaattcgagagcatgaatctgacccaaatcttagaaacattgaacttgagggaagttttgagcaaatcaaagaagcaagtaacatggtaaaggatttacttttgaccctgcaaatgtctgcaccacctaaaacaaccccaggtgttcctggcgcacctgcctctcatggaagcaattttaagacgaagctgtgtgagaattttacaaaagggtcttgcacgtttggagatagatgtcactttgcacatggagctgctgaattgcgtaaatcaggagtatgaactttcttagtcaggcacattagctagggttatgattattgttgttgtgcattgctactgacaggacttctgatgttagttttgttgttgagttgctttacataacttgttttatttccgatttcaactctcgcttatatcatgaaactggtgttttctctaggctaccccatttggtcccaaataatgctatgaaaatagtgtgattttagttcc

SEQ ID NO: 101184 - DNA, 920 bp, Glycine max
  Clone ID: PAT_MRT3847_62383C.1
gtttaatactgctgaaggttgcaaatttggtgacaaatgccattttgctcatggtgaatgggaacttggcaaacacattgctccatcatttgatgatcatcatgccatgggaccccctggagcaggtcgtcttgctggtcgaatggagcctccgggtcctgccgcaagttttggtgccaattccacagcgaagatcagcgtagaagcttccctggctggagctatcattgggaagggtggtgtgaactcaaaacagatctgccgccaaactggagccaaactttcaattcgagagcatgaatctgacccaaatcttagaaacattgaacttgagggaagttttgagcaaatcaaggaagcaagtaacatggtaaaggatttacttttgaccctgcaaatgtctgcaccacctaaaacaaccccgggtgttcctggtgcacctgcctctcatggaagcaattttaagacgaagctgtgtgagaattttgcaaaagggtcttgcacgtttggagatagatgtcactttgcacatggagcttctgaattgcgtaaatcaggagtatgaactttcttagtgaggcacattagccagggttattattattgttgtgcattgctactttagcagtactgacagtactttcgatgttagttttgttgttgagttgttttaggtcccaattgggatgtttgggatgatttttttttttcagttttgaaattattaaaaaccaaacttagtttatgttttgaaaaaaaaaaaaaaaaaaaaaaaaaaaaaaaaaaaaaaaaaaaaaaaaaaaaaaaaaaaaaaaaaaaaaaaaaaaaaaaaaaaaaaaaaaaaaaaaaaaaaaaaaaaaaaaaaaaaaaaaaaaaaaggggggggggccgttttaggggaccaaattttacttcccggg

SEQ ID NO: 101185 - DNA, 452 bp, Glycine max
  Clone ID: PAT_MRT3847_62384C.1
aaaaccccttattcagggtcaccgctgttagggttagggttagggttagggtttttccgcacattctttctctagcaatcttcttctaccactttcccctcattctctctcttagtctcttcaattgtaagttttttgcgctagggtttcctctgctatctcttgtactcgaagctcgtccctttttccggatctcgatctatggatatccgcaagaggggaagacccgaacccggcttcagcttaaatggtggattcaagaaatccaagcaagaaatggagtccttatcaactggtgtaggaagcaaatcgaagccatgtaccaagtttttcagcactgctggttgcccattcggtgagggctgccactttctgcactatgttcccggaggttataatgcagttgcccatatgatgaatctaacacctgcagcacctcttccaccaacaag

SEQ ID NO: 101186 - DNA, 172 bp, Glycine max
  Clone ID: PAT_MRT3847_62385C.1
ctggggagggggagggggaacattgaagaggatagagggcagcatcgccatgggattgagtattctgataagcacttccatttccactcggtaacgcttcctccgagtccaaacgcatgtttctcaagtcttgttcgttcatctttcgcctccatttcccccacagggtgtg

SEQ ID NO: 101187 - DNA, 571 bp, Glycine max
  Clone ID: PAT_MRT3847_62386C.1
tttttttttttttttttttaatgttgtaattttcaacactccttccttcgattagcaaaacaaatatactatttacatttgtatgggaaattcaaaagcacaaatctccattttagcaaaagaaaacaaaattagtcacagatttgggttttctggaagggtagtgtagcatctttacaagtgtcttatatttcaacacagcaccccgattggacaaacccagagaaaccctcaggcacatttatctttgtcaatttacggttgtccaccaaatagaacccatgcggtgcaccttcgtaatcggatccactcaacacaaccctggacccaaccgcaaccccacataccccaaccctcagccccggatcccaacctctccaattcaccagcacgacatcttttccaaccccaacacatgaccgcggacactgaccctcttcccaaaacccgttttgtttccttcacccacccgacccggtgttcaacacctccggcgacccattgaacatcccttgcctctccgtgggataaccactctcaaaccaaaaaatttgtcccaattaccaccccc

SEQ ID NO: 101188 - DNA, 291 bp, Glycine max
  Clone ID: PAT_MRT3847_62387C.1
ttttatgtgttcgcccacgcgtccggaaatggccaccacttctgcttcattcgcgagcttctccgtcatcttgcgaccttcttcgtccaatccccaattcttcctcttctcctctattggaacctcgccgacaccgatcgggtcctccacgaactcgaagaggctcttttagtgtctgattttggtccaagaatcactattaaaatagtggagaatttgcgcgaggatatattttcagggaagctttaatcagggaatgagataaaggaagcactgaagaggaatgttttg

SEQ ID NO: 101189 - DNA, 564 bp, Glycine max
  Clone ID: PAT_MRT3847_62388C.1
ccctgcgtccgccacattaaatatgcgcattgcgcacgaagcaccagcagcactacttctccgcttcttgctagtgtgcaccattgtcgccttgcgtgcgccggttgcctatcctgctatgttctgcatttcccacctaccgtgaagtttatcataatagaccagaagactgaattgaataagagagttagatggtcaaattgaaacctaaattaaactaagaggacaaaaattataattgttttatcttttctcatgtttgattaattagttaatttgtttatttttaagctatgtgcactaactttttactgtcatcttggtgtgtgtcccgcaggcacatccatatttctctcaggtaagggcagctgaaagtagcagaatgaggacacagtaacttgatcacatatggatccataaacttgagttaatatatttgggatttgttttatgataccctaacacgcaccttcgttaccgtctgtttattacagagattagttttcctgtggagtgtaccgacattatgttaaagttccgccataatgttattgccagttattg

SEQ ID NO: 101190 - DNA, 139 bp, Glycine max
  Clone ID: PAT_MRT3847_62389C.1
ggggctgtcgatcaccaagttgttcacccggctgttagccaagaaagagatgcgtattctaatggtgggtctcaatgctgcgggtaagaccactcatctgtacaaccttaaacttgtacagatagcaccaccattccca

SEQ ID NO: 101191 - DNA, 408 bp, Glycine max
  Clone ID: PAT_MRT3847_6238C.1
ctgatttccaacaatctggcagttgcccctttatttgattgtgtggcacatctaaagtgcccaaatttgaagctgtgctttggtcacataagaatgaaaacaaatctgaaaaattattttcagagagcatcagctcggaagcttgtagtaaaaatgaccgaattttaccctcaaactgatttgaattcagaagtatagactgtctgagaggaagcttcaacgatatatttggaattgcaccaatgagataattggaagacatatttaacaatcccatattttgcaacttattccaaaaccagtctggtacagagtcattaatcccgttatcagaaatatcaaggatatacaaagaactttgagtcttgagccaactttgaaaagtggggcccaacttgcaagatctgt

SEQ ID NO: 101192 - DNA, 387 bp, Glycine max
  Clone ID: PAT_MRT3847_62390C.1
aaaaagttcaacctcttgctagattgcatttattatttgggtttccattacacaaacggggtttattaaggacaaaaacaagcacattcagcaaccccaaaaacataactaaaacacccccaagggaggaaggaatcaaatcccttctattccacattaattaaaagccagggacagttcttcaaaaaccaaagagcccttaaaaaaaaacacggggggaaattcctgggaaagacaacccctcctcactaaaaggatagagcaaaggggagggcattttacccggcccataggggtttcaaaggggcccattagggcccttctctaaaagcttctttaaaaactctacaagattctttccaaaccttaaaaaggcctctaggggcc

SEQ ID NO: 101193 - DNA, 2121 bp, Glycine max
  Clone ID: PAT_MRT3847_62391C.1
tctttcacgcgtccgcggacgcgtgggttcacccacaacaaaaaagtaaccccctttggtttcacactttgctcattctcgttttctgatttttcccacataaataaatcccatcccttcttctcttacactcttctttgtttcagcaatcaatcaatttccccaccattagggtttttcatttgaaatgtggaagggcaacaatggagcccattgaatccgaatcagttagttcctccgccaaagaccagcaactgggtgaaccttcttccactgttcaccccctcgatcacgatcctcaaccttcagatctcaatcgcgttacccctgttgatgatgcacttggtgaggagtttcagaacaagttggatttgaaggatgggggtgagagtgagaataatggttcgaacttggaagatgggggtgaaaaattgagcgaggataaaggttcaaacttggaagatgcgagtgaaaaattgggtgatgaaggtgctgctgccccagaaggtggcaagggagaagggtgtgatggtgatgttggtggtgttgctaatgattatggtgttatcggtgatgatgtagttgttgctgaggatggggggtgttgttcgtgatgatttagttgttgttgatgaggatgatgatgacggtgttgctgttcgtgatgatttagttgttgttgatgaggatgatgatgatgactggtgttgttcgtaatgatgtagtagttgttgttgatgttgatggttggaatggtagtgatgaggggtgtgattggattgagaatgagaatgtgaatgagagtgtttttgataaggtgggagtggaatataaagatgagaggagcagtggtagagctcaacaataccctttgaggccagaggctgaagactgtgcattttatctcaaaactgggacttgcaaatttggattcaattgcaaattcaatcatccgcttaggaggaaaaaccaggctaaaaaagagaatgcgggagaaagagaagaacaggcagaaagatcaggccagatggaatgcaagtattatttaaggtctggggggtgtaagttcggaaaggcttgtaagtttaatcacacaagaggaaagagttcatcagcatccgctaccgagcttaacttccttggcctgcctattcgtgtgggagagaaagagtgcctctattacgcgcactggctcttgtaagtttggagcaaactgcaggtttaatcatcccgatcctacaactgttggaggaggtgattctccttctggttatggtaatggaagttctatttcgttacaaggtgtatcacaatcatctatatcctcatggtcttctactagaccattaaatgaatctgctccttttgtgccggtgatactttcacctaatccaggggtttctccccaaagttctgaatggaatggataccaggcacctgtctatctctctgagaggagtctgcatccaccttcaacatatgtcatgaacaacccagctatggaatcaaatgtttatatgcaccatcaaaaacaaatgcaggttgaagagtttccagaaaggcctggtgaacccgaatgcagctatttcttaaaaactggggattgcaagtttaaatctaattgtaaatttcatcatccaaagaatcggattgcaagattacctccatgcaacctcagtgacaagggtctacctttgagaccggagcagactgtttgcacatattaccgccgttatggaatttgcaaatttggaccagcttgtaagttcgatcacccaccaccctcaactatggctggacttgatcaacaatcctcgtatacaaactcagctggtgttgatgtggctgaaaatggagatgccgatgatgggaatcagcagtctgtgtaaaacactgactttgagtatgcacatcacccataatttgtaattttcttatccaaaaacatgataaattatgtaatttcactagttatgcccaatgtggcacaagccttgcagaatagcattatatacctaatagaatttttattactgtaacatgtagattatttttttgcttctggtttgatttctttcacttggatcattattagattatgattttgtgctggtgtaaacc

SEQ ID NO: 101194 - DNA, 579 bp, Glycine max
  Clone ID: PAT_MRT3847_62392C.1
ggctcgagcaagagttcaatagttcaatttaaaaaccaaagatgaaattttgaaattagttaggtattttcttgacaccattgaactctttttgtatcctttccttgggtcggtccattgcctcataaatgaaacccatggctagtttctcatcccaatcaattattcgaagcacctacaatataggaaatgaaccccaaaaacaaatgatattattcttcaaaaagtccttgttcaaaaccacatcctctaccaatctcctaaacagtcggctattcttccatgtcacttgtaaacattctaatcaatggtcccttgttctcattaaggatccctagggttttaaatagcggcgtgtagcatagtgaagtcgttcctggccgatacaggaccactgcagcgcctatcatgggtgaaatagtggtcgcaaaggtcgaagtggcaggactatctcttgattaaaaaaaaaagcctctgaacactaacgttagggcttgtttggtgagggttatttttgagatttcaaatttcaaaacaatatttttcttataaaatcaattaaatagctgtcgtttctca

SEQ ID NO: 101195 - DNA, 396 bp, Glycine max
  Clone ID: PAT_MRT3847_62393C.1
gaatacggctcgagcactgacactgcttattatatgaacttatcacgtacagtgtcggtgtcagagtccatataaaatgcagtgtcagcgccagccgagtctaccggactgagccggattttgagtgcttggtgaaccgtagtgtgcagccttacatatcttcaactaacatcttatgttcacggtaaatgtgtccgataccattgggtggattcttcggataaaccctacctgtggatctcttacacttatactattatgtggaattatcatgatattgtattctaccgttgatagactttcccattagagtgctcaagaacagtgagggaaagggaatttccatactcaacaatgccaacccaatgggagtgcctttcccattagcgggaaagc

SEQ ID NO: 101196 - DNA, 240 bp, Glycine max
  Clone ID: PAT_MRT3847_62394C.1
gctcggaatttgtctcgtgagatttcattacaaagtttgttgtgttcatatgtatcatcttttgttcggtgtgatttttgaaaaaaggagttggtttctgggagcaagttcacccatttgtgcaaagctcctgatgtaaattgcactggttaatatttaggttttattatttaatttaaggttttaattacgttttaaaaaaaaaaaaaaaataactggcggtcgccaactagtgagctt

SEQ ID NO: 101197 - DNA, 403 bp, Glycine max
  Clone ID: PAT_MRT3847_62395C.1
ggtcgagagaagctacatttacacagacactctcttatattttattgtaaagtatctacaagtgagctggtacacttattggggcgggggggtaaaacaaaaactaaatgatgcaatttgcaagtaactatctttcatcaaaatgatattgtgtcaactgaaacgattcatatctatatgatccaaaggcatgaaaactattattatgggcattgacacccaatgaaaccttatatactctaatgacacatgctcttttactccactaactattgctaaaacacatcacactcctgaattctactttttataaagataggtacctttacaactccatgctcattattatgtggactttttgataggcatcatcactgaaacacatcaagatcatattatacaa

SEQ ID NO: 101198 - DNA, 338 bp, Glycine max
  Clone ID: PAT_MRT3847_62396C.1
gtggtttgccctattttctttattcctttaaatccacaatacaatcttggtacacaccaggttctttgagtctcatcccttctgtctgaggaagagaacctaccgaacttagattgggaaagaaaagaaagacctttcgcggtctatttttaacaatggggattattttactcgagaggtttgccgtggagagtagccacaattggatacataccgggtgacaaaattttctatccaggatggccaatggctcctggtatatgccgggcgtgggtcccgggccaaccgggaattgatgagatataaatgaacatgtcggtgcccaagaaggctaaaaa

SEQ ID NO: 101199 - DNA, 537 bp, Glycine max
  Clone ID: PAT_MRT3847_62397C.1
cttttttttttttttttttttttttttttttttttttttttattttttttatttttttttttttattttttttttttggggggaaaaaaaagccacaaaaaatggaattaacaaaaaccaacccagaggggggcctaagaaacattaaagggtagggtcaacccctagacttaaaaaaatcatgagggggggggaaaaaaattgggggtccgcccaagggcaaaacctaagcccaagggagcattggcattttggggtttgccaggggtattaataagggtacaagggggaaaaagaacaagaccatgatttgttttggagggggaactgggggaattggaattcacattaaaaacaggagggccatttccattgccccttggaaattcggaaggggtatgcgaggctccatttggtaagttcgagctttttgccatgggcaaaattcctaaaccctcctttgggctacctaatttttcaagggacccaaaattttcgggggaaccattggtcaaaaaatcaaaacaggtttttttg

SEQ ID NO: 101200 - DNA, 185 bp, Glycine max
  Clone ID: PAT_MRT3847_62398C.1
cttggacctttgtgattatctggtgagagtatgagggggtttttaagatccaaaggagagagagaggagagcgtgtcacaagccccgggactagttagaggtacgggtgaaaaagcgaaagaaagccatcggtcagttataagacagttagataacagagactgcaaggtacgcaacggagtccg

SEQ ID NO: 101201 - DNA, 2059 bp, Glycine max
  unsure (1)..(2059): unsure at all n locations
  Clone ID: PAT_MRT3847_62399C.1
nagacgacagaaggggaccggcggtggaagagagatagaccaataatctgaatctgaaacctccgtgttggtgttgcatatccaaaccctaatttggaaattgaattgttgaagggaagaagacaagatggttctggcggagttaggtgggagcatttcgcgtgctctccagctgatgagcaatgcgacagtaatcgacgagaaggtgctcaacgattgcctcaacgacatcactcgcgctcttcttcaatccgatgttcaattcaagcttgtccgcgacatgcagaccaacatcaagaacattgtcaacctcgacgatctcgctgccggtcacaacaaacgcaggatcatccaacaagctgtgtttaacgaactctgcaaaattctggaccctgggaagccctctttcactcccaaaaagggcaaaacaagtgttgtcatgtttgttggtttgcaaggttctggaaaaaccacaacgtgtacaaagtatgcatattatcatcagaagaaaggctggaagccggctctagtatgtgcagatacattcagagctggtgcatttgatcaattgaagcaaaatgcaactaaagctaagatccctttctatggaagctatatggaatccgatcctgtaaaaattgctgtggaaggtgtggagcgattcaagcaagaaaactgtgatcttataattgttgacactagtgggcggcacaaacaagaagctgctctttttgaagaaatgcgccaagtttcagaagcaacgaaaccagatcttgttatatttgttatggatagcagtatcggtcaggctgcttttgatcaagctcaagcatttaaacagagtgttgcagttggagctgtcattgtcactaaaatggatggccatgcaaaaggtggggggctcttagtgctgttgcagcaacaaagagtcctgtcatattcattggaactggagaacacatggatgaatttgaagtttttgatgttaaaccatttgtcagtcgtctactaggcatgggagactggtctgggttcatggataaaattcatgaagttgttcctatggatcaacaacctgaactgcttcaaaagctgtcagaaggaaacttcaccttgaggattatgtatgagcagtttcagaacttacttaaaatgggtcccatcagccaggtcttttctatgctaccaggatttagtgctgaattaatgccaaaaggccgtgagaaagaaagccaggcaaaaattaagcgttacatgacaatgatggactcgatgacaaatgaagagttggatagttcaaaccccaagctcatgaatgagtcacgaatgatgcggatagctcgaggtgcaggtcgtcaaattagggaagtgatggagatgttggaagagtacaaacgtcttgcaaagatatggagcaaaatgaaagggcttaaaataccaaaaaaaggtgatatgagtgccctatcccgaaatatgaatgcccaacacatgagcaaagtcctccctcctcagatgctgaagcaaatcggtggcatgggcgggttacaaaacttgatgaagcagatgggatctgccaaagacatgatgggaatgggaggaatgtttggtggtggtggtggtgattagttgattggcttatgagctgaggattattccagaccatagtcactgtcattattgtgttttactactagattcgactgagcaggttatgcagttcaattggcgttagagtgccatctgaaatagccgcaatgggtgcaagtgtctctttttgtaaaattaaattctttttccctttttgtgtatatttacttatttagtattcagagaaatcaagtgatcaagtaatcttattagaaattttcatagtctaggaacattaaaaacaaaagctatattcctcggatcatgcttgtctcgttttggattcagctccagctagaatgtttcatttaattctagcagacagcttaagcactgttactgctaggagctagttctatttctgtttgtttctttttctacatgataaaaaacaaaattgctttttttttat

SEQ ID NO: 101202 - DNA, 818 bp, Glycine max
  Clone ID: PAT_MRT3847_6239C.1
cttgcatgcctgcagattgttgatcttctcagaagttctttcatgtaatcaatagtgtctccaagtatagatgttctatccatctgtgatatgcattcaacacaacaaattagatctacacattatgtaagtacagctctcattgaatgaatggctctcactcactgcatagtgcataccttactaatcttggggacaattgctcttagcatcgagagccggtcgtttaacctctttcttcttctcctctccgccattagattcttggagggttgcccctgaagcttctttgatcggttctttctttccagacccgttcccatgttgaaaaccggcatttcagaggattgggttggctccattttacatgtggtttgcagctccaaattcttaagctcttccccaagcaaaccctgctcctcttcttccatcatagacaatattggataatcctcttgaccaagaaatggaggggtattgagtggagtatcaagggtgctatagaatgaatccataatctgtggtgatgattcatcaagtaaggagccatagatttcactgaaggggtagtcgttattgtaagtttgaggaacttcttgaccacaagaagagtttggaaggtaaggtagagagttttgatcaaagcagtcaaaactcccaccatcaaagaactggttttcttctgttcttggattggtgtcccatgtttctcttcttagtgtcattaattcctccaagaaatcctggtcataaaactccatatctctctctttctttctctaaatgcctgtgtgtgtgtgttgtgacaaacgcgtcca

SEQ ID NO: 101203 - DNA, 258 bp, Glycine max
  Clone ID: PAT_MRT3847_623C.1
acacagaacttccattttatatttgttgggatttttttgaattatctttgggttttcacacaccggaatttccctctaaattccaatcatatctcctttagctcccggataggtccaattagaaaacaaattatctcaattcatctacgaacatttttggcgtctcagttcttgaatatgtgaaattggaattcccccagataatcctaacccatttcctttggaatcacgcatgccctttctatggacacaaaacca

SEQ ID NO: 101204 - DNA, 463 bp, Glycine max
  Clone ID: PAT_MRT3847_62400C.1
ctttttttttttttttttttttttttttttttttttttttttttttttttttttttttttttttttttttttttttttttttttttttttaaaaaagaaaaacggcataaacaatctttggcattaaaaaaatcgacccacccaggaaacccccgaaaacgtgggggaacagagagctttaactacttatttcccattaccgcatccgagaagaggccaaaatttaagggaaaacccaggcagctttacttaaaagggcattaaaaagggaacggataactatatagccggaaataaaaagtattatcctcttagggaggtgaaatggggttggaaatgggcaaggggggaaaaaagggtttctggaatttagggggaaagggcatttaagaaaaagggttttgaaaaaagggcttgggttaaaaaaattccccccacccaacagggaagcgccttttccact

SEQ ID NO: 101205 - DNA, 971 bp, Glycine max
  Clone ID: PAT_MRT3847_62401C.1
catacaaccgaaaccagctaaggaaggagcgatccataagaatcgcctcgaatagccataacctcatctcgccttccaccgcaccagcaagaggaaaccgaattagagctgaaagaatactagagccatcgtaggagaaccggattcttgaccgatcgacttttgcccgaggtcgttaggtcgaataggctaggtttacgaaaaagagactaaggatggacatgacatgggggatgaaatccaccgcttctaaaggaaaacccttgtccgttacccattgacttcaacacttcaattacgaaaaacctttaaattaaattccctttgacttcgacttaaccaaccgcaagtaaaagagctagctgaaaagcctgcttggcttgccctactggcaccgtccctacaagaatccctaacccgttttagctcctaatacagagctctaagttattgttattctggcttgtgttccttggtccgttgcttgctattcctattatagatagaaaagctcctattccgcttcctcttgcgcctgatcctcttccgcagttcttgcttccttcacttacttactttactaccttagaaaggaagaagcttaactcatacgagcctccttgcattgtcgctctactcttttctcgctgtctgggagctccattcatcacccctattcacttacgaagcaaccggactcgcctcaacaagagaagctgcatcccgtaggggcagaaagagaaccgctgctttgacttgactctcccctgtaaccctttgccctcctgcctgcagattgccacaaaagacgtgtgagtacgcccctcatgctttgcgttgccagctttgctttgtccaacccctttgactccctgcacctataaaataactataccccacttaaagcttctttcgaggcagttaaagacggtggaaggacagcattcaaacaatttaacaattgcctggtg

SEQ ID NO: 101206 - DNA, 178 bp, Glycine max
  Clone ID: PAT_MRT3847_62402C.1
gggggggtacttataatttgtcttttgttttcgaatccttacattttttaagtagcttttattgttttagctagtcttgcttgacgacaagcaatactctaagcttggcgagccgataaatgttaaatttattggatttttctatgtattccgtgaccactatttaccattttatgtt

SEQ ID NO: 101207 - DNA, 1436 bp, Glycine max
  Clone ID: PAT_MRT3847_62403C.1
aaaacattacctcactcagttcggcagtgtccttattccataagctcccaaaaaatgagttcaaagccattcaccaatttcttggtaatttttactcttgtattgctttgcctggtcggttcaagtcacaccaattgtcatttttgggcaattttcaactttggagactcaaattcagatactggtggcttctgggctgcttttcctggacaatccggcccttatggaatgacttactttaagaaaccaacaggcagggcttcagacggaagactcattattgattttcttgctcaagctcttggattgccatttttgagtccatatctgcaatcaattggatctgattataaacatggggccaattatgctacaatggcatccaccgtgcttatgcctaatacttctttgtttgtcactggtatcagtcctttttcccttgctatccaactcaaccaaatgaagcaattcaaaaccaaagttgaggaaaaagttgagcaaggaatcaaacttccttcatcagacatatttggaaaatctctttacacattctacattggccaaaatgattttacttccaacttagcagccattggcattggtggagtgcaacaatacctccctcaagttgtttcacaaattgcttccaccattaaggagatatataatcttggagggcgtacatttttggttcttaatcttgctcctgtgggatgctaccctgcattcttggtggaacttcctcataatagttcagacattgacgaatttggatgcttggtttcatacaacaatgcagtagtggaatacaacaacatgttgaaagagacattgaggcaaactagagaaagtctttctgatgcttctgtcatttatgtggatgtttattctgttctgttagagctcttccggcatcccacttctcatgggcttaagtatggtataaaagcatgttgtggatatggagggggtgactacaacttcgatccaaaagcttactgtggcaattccaaagtgataaacggcagcagagtgacatcaactgcatgcattgacccctacaactatgtgagttgggatgggattcatgccacagaagctgcaaacaagcttactacctttgccattcttaatggatctttctctgatcccccttttccatttcatgaacgttgtgatcttcaacctataggttgattcatttcttaattaacaaatgatgaaggtcaaactagctcaagatgttaaataattttcaccaagaaatcaaatttcttatcatccacaagattttttttgtctaaattaccggtatcctctgatggagataattttgtttgaaccgaataagattgttatggaccacaaagttctccctccaggtgtttgtcagatagttttgcaccaatacataatataagagaaaaagtttgtac

SEQ ID NO: 101208 - DNA, 377 bp, Glycine max
  Clone ID: PAT_MRT3847_62404C.1
gacaagttacaactcatcaattcggcagataaaggtagtagtagtgttacgttcgaattcgaattgttccatttgcttcgcaaaagttgcaactacttccacagaaagaaaaaaagtttctaagttaaggaaatccagagtgaaaaaaaaaaaaatggccggtgacggtgcagctacatgcatagacatccttcttgccattattctccctcctcttggtgtctttctcaaatatggttgccaggtggagttctggatttgtttggtgctgaccctttttggttatatacctggaattatctatgctgtctattctatcaccaagtgatcgtcaccctttaacttttgtggacaataaacaaatgtcatgggcgttt

SEQ ID NO: 101209 - DNA, 155 bp, Glycine max
  unsure (1)..(155): unsure at all n locations
  Clone ID: PAT_MRT3847_62405C.1
acgtaangcacgcaagttcgggctcgagaggcacgtgcanttggaaacttgtaagcccactgtgtctactccttgtagctatctctgagcgcggatggtgcctatcggtacaatgacgtgcggcgaggactcccactcttgctgtaacagaacat

SEQ ID NO: 101210 - DNA, 456 bp, Glycine max
  Clone ID: PAT_MRT3847_62406C.1
aaagcttgtggatatcagcgactaaatcccaatgagctccgtgcagtgatggaaattttgaatttcatttgtgatcagattgtcgaggggaacacattagatgggttaaactggaaatcagaagccatagttcctgatgatggctgcagactagttcattcagcgtcctgtgtctatgttgattcttatgggttctcgatatggtcaaatgtattgatacttccagaattagatttgtccatgcagatcttccagagggagtctgtattatgctttgcataaaaaagttgtctgacattgtcttagaggaactggatgagaatcacacactacagactttaggttctctggggtctgtttcactagtgaccatcaaacagaagttatcaagcaagtctcttcaaactgctgtctggactattggtaatagcatgggcagctacattcctgcattca

SEQ ID NO: 101211 - DNA, 358 bp, Glycine max
  unsure (1)..(358): unsure at all n locations
  Clone ID: PAT_MRT3847_62407C.1
ggtctcgcggcactgatgttcaagtacaaaaaacatgacatcatctcactctcgcaatacagttaacactatcgtctcccccgctgcttccgttctccttctcgcaaggaatcgatctgcttttgctcaatacgacgactgcatcaagagatgtacttgttgcacacgtcgacatgcacagttgcaactttcacgctgctgttatcatgggcctagatgctcatgttctggatcatgctgcagatgctaaggtgccaganatgactagtcccagatccacagatcctatggcaaataaggctaaagttaataatgttaagaaagtcaacgatcctaacatgcctaagcgtcctcccac

SEQ ID NO: 101212 - DNA, 904 bp, Glycine max
  unsure (1)..(904): unsure at all n locations
  Clone ID: PAT_MRT3847_62408C.1
gtggcattctgagcatcaggcatggggtcgtaggttaaagataaccggagaaaaaggggcccttaatacgcaccgttttgttcagattgttctcagcacaatcgagtgagtagtagaaaggaatcaaggattggggaattctagtttcagattcttatatgccaacaatgcgctccagaaaactcttcaattccttttaccgaaccatttcctcttcaagttttcctcctcctccggttgtttcttcccgaagagtagttgtcactgggctaggcatggtgacgccacttggttgtggagtggacacaacgtggaagcgcctcgttggtggggaatgtggggtaagggctttgtctttggaagacctcaagatgaatgcttttgatagggaaacccagttgagtacgtttgatcagttgacatccaaggttgctgctgttgttcctaccggaaccaatccgggcgaattcgaccaccaaatctggctcaattctaaggaccatcgatcaatagcaaggtttatagcatatgcattatgtgctgctgatgaagctctcaaggattctaattggtttcccattgagcaacaagataaggaaagaacgggggtgtctattggtgggggaactggaagcgttagtgacatcttggattctgcacaactgatctgcgagaagcgccttcgtcggcttagtccattttttatcccacggatattgatcaacatggcatcaggtcatgtgagcatgaaatatgggttccagggaccaaatcatgctgcagtcactgcctgcgccactggttcacattctattggtgatgncatgagaatgattcaatttggngatgcagatgttatggtagctggaggcacagagtccagcattgatgcattatcaattgc

SEQ ID NO: 101213 - DNA, 117 bp, Glycine max
  unsure (1)..(117): unsure at all n locations
  Clone ID: PAT_MRT3847_62409C.1
gatttttataccatcaacaagataggattatcaaagcggtatatcgtggggagctggtgcttttctttangatgttcacatccttaacacaaaattcatacgtctttctacaatgtg

SEQ ID NO: 101214 - DNA, 138 bp, Glycine max
  Clone ID: PAT_MRT3847_6240C.1
ctaagaagcacttatacatgcatctccattttacactcacaattcaactttagcgggcactgttaaggaagaggctcttcatctcctgaattttacccatatgtttctaggtatgagaactgaccctaagactacaac

SEQ ID NO: 101215 - DNA, 792 bp, Glycine max
  Clone ID: PAT_MRT3847_62410C.1
gaggccaaatgatgaaattgggatcttcctcgactagaatcttctagtaataacgctgaatattacttgattggtgatcattcatcatcatcggggcaacggacaggggaaactctttgagccggacttctggagtaacacttcaagtggtccctctgactacaatccagtcttctcacattccatctgcaacagggataggggatgacccttcaacaggaaaatctgagattctatctactcctcaagttgtagcctgtgatgaagttacgaaagctcagtactctaatgtaaatgtttcggttggagaatctaatgcacctgctatccctgttactcaaacagatgaaatcatgcgggacctctctacaataccagacatagtggcaggaaatattcttgatattcctcaagaaaattatatggcacctgagacaggcggtgaaggatatatggatcctacttcatttggagtgaatgtgtcattgcccattgattttgatagtatttcacctgaagcagacattgatgatttgttgaacaatcctcacttttgggatgatattttgcgaactccagtgtcagaggagattgatacgaatgatgctgaagtattcaaggagaatgaggtgcagccaatggaaaatggattggacaaatcacaaaatatggaccaacttactgagcagatgggcctactttcttctgatgccaaaagaatttgagtgtattatgaaagtgtacattattaatatttcatattgtgcaaggtaaccttagcctagacaaacc

SEQ ID NO: 101216 - DNA, 167 bp, Glycine max
  Clone ID: PAT_MRT3847_62411C.1
atctgaagagaagcctctgctgtgccctggttgagccctgggggcctttatgggtgcttcttcaggccttccttaccccgtcattttactttatgccttaacgctgaaaaatgttctaggggctaataataaagctctcatttctcctgcaaacaataaaagaaaat

SEQ ID NO: 101217 - DNA, 1051 bp, Glycine max
  Clone ID: PAT_MRT3847_62412C.1
ctgcgagaagacgacagaagggggaagctgtttgtatgacaacaaaaatcctcacgaagagagagagagagagagaggaactgtgtctgaattctgaaaaaactggaacatgtcttcaactactgtggtaggctctatttctacaacagcagctttgacacccttgttgccatcatcacgtacaagtagaagtagaaccacatttggcgccaattccacctccacaagcttccccgctactccactctcctccaatctcctcttcttcaagctcaatcacacttcttcttcttcttccaaacgaacctcaaccttccatgccttcaagcgcttttcccccgtcatggagtggcaggattgcacggttaagatggagattgatgtgcccatctctgtagcctatacttgttattctgatcgcgaagccatcccaaactggatgccctttatttcttctgttaagatattgccagacaaacctgacctgtcacggtggtccttgaagtataaagcatttggtcgtgatattgaattctcttggcttgctcgtaatatgcagcccattccaaatcagaaaattcactggcgatctatggaaggtcttccaaacagaggtgctgtgcgattctatccaaaaggtccttcatcatgtgtagtagaactgacagtctcatatgaggttcctcaacttttagctccagtggcatcggcactgcagcctttccttgaaggtttacttcaacgtggtttggaaagatttgctaaattcgccaaaagctacacctaaatttttattatgattgtcctgatttttatagcagggctacatttctaaaagtgaacattcctgattattttcatggcgatctcattctgtctgaacattgattgaattactgttatcatgccaatttttggttgcatgaatggttatcccattttgaagtgttaattaattatgtataactctgatagacggtcttaatgcaaaatgaacacatccgccataatgttaaaaaaaaaaaaaaaaaaactcgagactagttctctc

SEQ ID NO: 101218 - DNA, 460 bp, Glycine max
  Clone ID: PAT_MRT3847_62413C.1
cagtctcctagtcttcggccgccctaacttttttaatgtttttatcctattgaatttttaattttgactgggataaacttaccaattcaattactgaaattgaataactaaacaatctaattgaatcggtccaatggtctcaaaaaaacggagtactaactcccatttcttatttatgattgaagcctccgaccaacttgctttgttatctaacatttcttttggatttcagagcttttccggaaaaaagtcgactcatttttatatgcgaatcactcctactacttctggtcctgaggtttctgcgcttgaacaaaaaaatctggcacctatcgcccatataattgctccggccctagatgcaactttccccccacgtcagatgcctcacattgacaccgctctgataattaagggtcgagatactgttggtcaacaaattaatgtgactcgagtaccc

SEQ ID NO: 101219 - DNA, 1335 bp, Glycine max
  Clone ID: PAT_MRT3847_62414C.1
gtgttaccaaagatagtgctggtgactatcaagactgtggtgcttcttcaatgcttctcatgggagaacctccctggtgtcctccttgccctgagagttctctgcattctgctaaccgaagcaatgctgtcatgcgctacaaggaaaaaaagaagacccggaagttcgagaagaaagtaagatatgcctctcgcaaggctagggctgatgtcagaaagcgtgtgaagggccgatttgtcaaagctggtgatgtctatgactatgaccctttgaaccaaaccagaagctactgagtgggcataaattttcttcacggggaagaaggttgtaagcaggcccttgtccaatgaaattgacagtgtaaaagctcaggagcaaagattgtgtgtccttcactgcaatggacattctcagttgcaatttcagccgacatgacagcatcatcacaaactgccccccttcaggcaatgtgtcatgaattttggttgcccttctgtttaacttggcaaaatcctgcttcttaatactaatctaatgcaaaattcttttttaagccctttggccttgatcttgctcatagtttgtcatattttatgtcaactcctcactgatcccgagtcacatgtacaagtgtgcctatgatggcatgataagtggctcaatttgataagttctagacaatcttctacactgttgtaggaatattttgtccctctctcttttgccatgtatagtgcagaatatacataaatgcagttagaggtgtaatgacccaacagttccttaggtatgacaaattgtaaatttgaaggttatttatgtatagaataggatgctgctattgctatttattttgatgacacaacattctatatttttggacatgtatccataaaagttttgtttgtattttatttgatttgattgccatggatacacttcaattgcatggcatatttacttcaattgtaattgtgagtcacttctaagaaaaagaaaccctattactgaagaacattgtgcattgtgtataagaaatcgatgagtaaaagctcactgatcctaagtcacatatacaagtgcctatgatggcatgataagtggctcaatttgataagttctagacaatcttctacactgttgtaggctgtaatattttgtccctctctccttgccatgtatagtgcagaatatacataaatgcagttagaggcgtaatggcccaacagtttcttaggtatgacaaattgtaaattcgaaggttatttatgtatagaataggatgctgctatttattttgatgacacgaaacattctatattttggacatgtgtc

SEQ ID NO: 101220 - DNA, 716 bp, Glycine max
  Clone ID: PAT_MRT3847_62415C.1
cagaaagcgtgtgaagggtcgatttgtcaaagccggtgatgtctatgactatgaccctgtgaggctgctgagtcagtagctagtgaccatgttctataaaaggggcataaattttcttcaaggggaagaaggttgtaagcaggcccttgtccaatgaaattgacagtgtaaaagctcaggagcagattgtgtccttcactgcaatgggcaatcccagttgcaatttcagctgacatgacagcagcatcacaaactgcccccttcatgcaatgtgtcatgaattttggttgcctttctgtttaacttggcaaatcctgcttcttaattctaatctaatgcaaaattctttttaagccctttagccttgattttgctcatagtttgtcatattttatgtcaactcctcactgatcctaagtcacatatacaagtgcctatgatggcatgataagtggctcaatttgataagttctagacaatcttctacactgttgtaggctgtaatattttgtccctctctccttgccatgtatagtgcagaatatacataaatgcagttagaggcgtaatggcccaacagtttcttaggtatgacaaattgtaaattcgaaggttatttatgtatagaataggatgctgctatttattttgatgacacgaaacattctatattttggacatgtgtcatgtatccataaaaattttgtttgtatttt

SEQ ID NO: 101221 - DNA, 355 bp, Glycine max
  Clone ID: PAT_MRT3847_62416C.1
ccacgcgtccgagggtgggaacggacaagacactgagtcaccttccaaggacaccaggactgagagggtggaatcttatgctgcaaagccaagcacgaagaaatggttttgttgtgtgacagccagccctacgcaatcctgaggaagacaactgcatgcgctttggaaatactgtccctttaattttctatacatactatccataagacaatgtaggggtacccaggcctctccgggctccaggatgggctatctcgtaaaactcttgcgtgcgtgtatgtatggtgtgagagaattcgcaaagtggacttctggttgtaaaaaaaaaaaaaaaaagggcggccgctctagagga

SEQ ID NO: 101222 - DNA, 263 bp, Glycine max
  unsure (1)..(263): unsure at all n locations
  Clone ID: PAT_MRT3847_62417C.1
atgtntttggagtcgctcgcatctntgcntncttcaatganacctnncagtcangtcantganctgtctgggagggaaacacntgtccgcatnactggcgggatgaaggttaaagctgaaggagatgaatcatctccatatgcggcnatgcntgctgcgcaggatgttgctgcnagatgcaaggaantgggcanaactgctctnaanataaagnnccgggccanagggggaaagngggnanaananggggccgggggnnaang

SEQ ID NO: 101223 - DNA, 265 bp, Glycine max
  Clone ID: PAT_MRT3847_62418C.1
cagccctaacgcgtgcagatcagagagatacgccgccatggggcgaagaccgcgaggtcttatatgcagattcaagagcaaaccataccccaagtcacggttttgccgtggtgttcctgatcccaagatcaggatttacgatgttggtatgaagaagaagggtgttgatgaatttcctttctgtgtcgatctggttagttcggagaaggaaaacgtttctagtgaggccctggaagctgctcgtattgcttgcaacaagtacatg

SEQ ID NO: 101224 - DNA, 375 bp, Glycine max
  Clone ID: PAT_MRT3847_62419C.1
gcctgatgtcaacaatgctcactagagcaattaattttctggctgtaaatgttatgctggtagggtacaattcacgcattcttgtgattcaatgaagtatcaattcatgttaaatgaaaaaaagtcttaatgtatattgatcaaggttagagtaagtgcataatgaaaaataaacaaaacacaacatggaaagcttaagccagcctgtagatgtagaattatattgatcataaaacatgcaagtgataacctgatttccatggcatgattttgttgttttttttattagatatctaattatagaaggggaaaaagatggagttggaaggggaaggtgccaatttgctcatataagatatggtaaaagtaaacaag

SEQ ID NO: 101225 - DNA, 717 bp, Glycine max
  Clone ID: PAT_MRT3847_6241C.1
caagtgaagccagagaagggtgagaacaatgctatcacagcacatggcagaacagaccctgcacaacccacaggttttgttttccagaactgcttgattaatggcactgaggaatatatgacattgtaccacagcaagcctcaggtgcataagaactatttgggtaggccttggaaggagtattctagaacagttttcattaattcgttcttggaggtccttgtgacaccccagggttggatgccatggagtggtgactttgctctcaagacactttactatggggagtttgagagcaagggtcctggctcttatttgtctcagagggtgccctggagtagcaagatccctgctgaacacgtgttaacgtattcagtgcagaatttcattcaaggaaatgattggattccatctattggtagcccatcgtcgtaaattttgaggcatcagtagatggggagttttatttagggtacccccttgtaaattaccaataactaatgcaataccaatatatcaatccagattaggaagaaatttcaaatcaatttgagtcgtgctggtaaataccaagggttgatcccccccccctttattggggtgacacttgtttggataatttacaacgtttatttcaagattataatatcttatttttccgttctcatgtttttcatttcttagaatgttttttcggaaacgaaaatggatcatttg

SEQ ID NO: 101226 - DNA, 116 bp, Glycine max
  Clone ID: PAT_MRT3847_62420C.1
ttcggctcgagctagagccgatcgaatattcactatggcagatgaggtggatctgctagatttctgtccaagtacatatgcgatgaggctcaggattgcacttgctgaatagggta

SEQ ID NO: 101227 - DNA, 305 bp, Glycine max
  unsure (1)..(305): unsure at all n locations
  Clone ID: PAT_MRT3847_62421C.1
gtatgtacgcgtacgtaagctcggaattcggctcgagngnngngttattgngggtagaanngatcagnnntggananagctantangancgtggtacaccncctnggctcncnngtctcacncgattcgngtntngnnctntannctncganntctctnggnnggcangttnggannctnnntngcancggcacncctnaaatngcagcgannatgnnaagctctnancgtaaanntnancaacncgcttantcgggtcgtaccaggagnnnatnaatttgccatcnctggnncngtcatcagcc

SEQ ID NO: 101228 - DNA, 336 bp, Glycine max
  Clone ID: PAT_MRT3847_62422C.1
cgggctcactaaactacgcccggccttccttttttttttagtcaacaaaacaataatattttgacaaatgggggtgcttccatgaccgggcccccccccccctccgaaatttgtatctttacaaatatgaaacaataacagacattgagcacttcccctttggttgagtatcgatatcacgagcacaacatattcgaacataacatgtctgggggtgagatgaataaaaaaggggcgatcaccactaaaatttaccggcctctttctcaagcctaaaattttaaaacctggctattaatcttgaggcccaatcccgtgtattttcaatgtaataaa

SEQ ID NO: 101229 - DNA, 1957 bp, Glycine max
  Clone ID: PAT_MRT3847_62423C.1
gggactcggcagaaagcagaaaccaaagaaccatgaagtctctgaggtccatcttagcaacttttgtggttcttcattatcaatttcactcactatctcacttccaattgaagaagctttcaaccattgtctcacacaacactctcagactccaaaccaatttccctcatcaatctacacttacaccaatggttccttcacttcaatccttgagtccacagctcaaaatctaaggtacttgttgccctcagtgccaaaacctgatttcatattcaccccactggatgactctcaagtccaagcagcagtgatttgtgcaaaaaagcttggtattcacatgagagtgcgaagtggagggcatgactatgaagggctctcttatgtttcccttattgagaagccattcatgatcctagacttggccaaacttcgtgcagtgaatgttgatattgcgcgaaacacggcttggatccaagccggtgccactattggtgaagtttactacagaatttcagagaaaagtgcagttcatggcttccctgcaagcctttgcacaaccttgggtgattggagggcacatcacaggaggtgcatatggttccatgatgagaaagtatggccttggtgctgacaatgttctagatgctagaattgttgatgctaaagggagggttcttgatagaaaagccatgggagaggatctattttgggctataagagcaggtggtggaggcagctttggagttattctgtggtggaagatcaagctagttcctgtgccacaaaccgtgactgttttcacagtgaccaagaccttagaacaaggagggagcaagcttcttcatagatggcagcaagtggctccaaaaattgatgagaatctcttcattagagtcattattcaaccagggaatggcacagttcctggtaagagaacattaaccacttcctacaatgctctctttcttggtggtgctgataggcttctccaagttatgaagcatggttttcctgagttaggtttgacaataaaggattgtgtggagactagttggatcaaatctgtgctttatattgccggctaccctgatggaacagccccagaagttttgctccaagggaagtccacaacaaaggcttacttcaaagccaaatcagactttgtgagggaagtaatcccagaaaagtccctcgatgcactatggaaaatttttgtgcaggatgatggtcctctaatgatatggaacccttatggaggcaagatgagtaggattgcagaatctgccacccctttccctcatagaaagggagttctctacaaaattcagtatgtgactggatggcttgatggagagaagagtatggcaaagcacatgaactggatgaggaaattttatttctacatggctccctatgtttctaagtatccaagggaaacttatgtgaattatagagacttggatatagggatgaaccagaagaataacacaagtttattgaaggcttggtcatggggctataggtatttcaagggtaacttcaataggttagtgaaggtgaaaactaaagttgatccatctaatttctttaggcatgagcagagtatccctctattgccaactggtaagaaagagtagaaggcaagaagagaagaagctaggtcaaagggttacatgcagcattgtattatggctagaatgctagatcaatatgacaacactatggttaaatcggtttacaagtttgattattagctgaagaataaagattctcttacatatatttgtgttctttattttctacttctattgataatgtgaagtattcacaatttaagttcatttgccattagtttctttttttgtgtgtactcgtggcactaagctgggaatagcatgggaaattcttgagtttggtattgaagtgacttttgatatgatatatcatgttacttttc

SEQ ID NO: 101230 - DNA, 496 bp, Glycine max
  Clone ID: PAT_MRT3847_62424C.1
atactacacaattcacaatcccaacacccattttggagaatcagaatctaactagccaatagccatgaagagacagagagagaacgaagtaacaacgttggaaagctgggacatgcaaatttgttcaacttcaatcacacccgacacaagtgtttccagttccaccatatctccggaagatgtatttgagtgcaaaacgtgcaaccgcaagttcaactcttttcaagcgctgggtggccatagggcttgtcacaacaagagggtgaagatggaaggtgaagaacaacaactcaaaacaagggcaaaatatctgggtttgggaaaacacagtgagcccaaaatgcataattgctccatttgtggtcaaggtttctctctgggccaggccttgggaggacacatgagaagacacagagcttcgaccaacgatgttttctcttccataaaacaggttgttgcaaaagtttcggttttaaaaagatcgtgtaatgacaag

SEQ ID NO: 101231 - DNA, 328 bp, Glycine max
  Clone ID: PAT_MRT3847_62425C.1
ttccgatcatcactgtatgacgtcctcctatctttgggggggggggggggggggggggggggggggggggggggggggggggggggggggggggggggggggggggggggggggggggggggggcccccaaaattccgcggggaggcggccaaagtagtttaagtttaagggggggttatggtccagattttgacagggaacgggttgtaaaggccctttgaaaaaaatttgggtggccccccgtaaaattaaacgggagaaatatggccaaccccttgccgttttgtccaaaaggccgctaaaaaaaatataaaatttgggccgggg

SEQ ID NO: 101232 - DNA, 335 bp, Glycine max
  Clone ID: PAT_MRT3847_62426C.1
gcagatccagcgcgtgacgtgtttatttcgatttaccgcgagcacaggttgccgcaccttataagcggaaacaaaagctgtctttgctagtaaccaagaaactctcaagttctactctacttctttgctgacgacttgttaacggaaagaaaatcactctatgtgctggccacagacttaatgaatgatgctcttttccactcttagtttattgggtgaacactctacgatttgatataggactccgggtcagatataaacgactggtgggtctgtatcaggtctatgcataatttcaatggaaggctgccgaaatattggattagtactcccac

SEQ ID NO: 101233 - DNA, 502 bp, Glycine max
  unsure (1)..(502): unsure at all n locations
  Clone ID: PAT_MRT3847_62427C.1
gggagcctacaggtgtgtttcagagctctggcgcatgacgcaggctgatgtgatgcgctgattgcaatggttgaggagctgggaggatatgctgtatccttacgttgtgcgcttgacgaggtgngcctcgcctgacaaggctcagtgtttgggcttgaaggctaaacaaggctatgtgatataccgtgttcgcgttaggaggggtggccgaatgaggccagatcccataggtattgtttatgggaagcccgcagaccagggtgtgtcccaactgaaattacagcgtgacaggaggtcagtcgctgaggagcgagctggacggtagctgtctggactaagggtcctcatttcttactgggtgaatgaggactatacttattaatactatgaggtgaatctggtagatgtagctcatgctgctattatagctgatcacggagtcaattgtctcgcccatccattgcgctagcacagataggtgcgtggactcacctctgctgca

SEQ ID NO: 101234 - DNA, 312 bp, Glycine max
  Clone ID: PAT_MRT3847_62428C.1
atgtctagctatgtcgatcgaactgtccaaggtcctgtcactctggtcggaaaggtgtggggtggtggtgctttttggggttatggtaaggaccgagagtcttcaggtcaggattaagggctggaaatgtaagtaactggtctactcgtaagtaggtgaggacacgggtccagcgtgagagggaacgacggcgacgcgacggacaggccgaaagcctagttgttcaccgacacggatcgaggtggtatgagtgacgtgacaaaatgacaagatttaggggcctgatcagcagagcaagtagtagccacaagt

SEQ ID NO: 101235 - DNA, 645 bp, Glycine max
  Clone ID: PAT_MRT3847_62429C.1
taaggtttggcttgattttagggtatgatggcatctacatccacatttcgttggcgatttggtgtgatggcatctacgtcgtcgtgggctccgatgtgggatctctcaaccgtgtcgtcgtggccactggcgtcgtacataagtcctcggtggtccccacggaggttgctaaggtggtcggggatgatgagtgtctccattgttgacgagttggtgtggagagtcgtgacggcgttcgagtccgtggctctcgtttccatgctctgcttcttcttcttgttctgtggctgcacattctgatcttgtgactgcaccttgccacacccaatcttccttccccttttctcccattttcaattttgctatgcttctttttttcgggaatgtaaagtttgcctgatgctattagaaatagtagaactagaaagacagtgcctgaacaaggttatagtttttccagctattgttaatggttctctcaaaattcatatctttacctttctgggctttccaatgttatatcgcgatgcatttggcgttagctctaaattgagcgtgtgtttaagctcttttattctgtgtgtatttatagaaaaagagtagagaagaaaatggaatgggatttgaatttgtctcagcaaatgg

SEQ ID NO: 101236 - DNA, 782 bp, Glycine max
  unsure (1)..(782): unsure at all n locations
  Clone ID: PAT_MRT3847_6242C.1
tgacaaccttagcttgaaggatgcttccattgctaagcagaagctgtggagagcgtgttaaaggatctaattcaaatatgtttgggttacaccgaacgaagctcttgcttttctctacatgtgttgcacgaggcttcacaaattttccaaatggtcatgaatttggcagtgagtttgctatgatgagcagagatcaagtccaactcggaagaatcccagtgtctgacaagctcgtttattggtttgtcacaaggccacggacttctaaagattcaacaatttggaaagacccagttcttattagacagtcattaatagaatcaatgaaaggtttcccagaaggggcggtggagataatacgaaattgcaagttgagcttcttgcatctgactgagttgaagtatagggcaccgtgggacttggtctttaacaagttcaggaaaggtacagtaacaattgctggtgacgcaatgcatgccacaggcccattcattgcacagggtggctcagcctccatagaagatgcactagttcttgctagatgcctggcacaaaagaaagctgaagaaactgcagagataaacatcgcagaggcagaggaagcatttgatcaatatgtcaaagaaaggaagatgagaaacttttggctctctttgcattctttccttgttgggaagaagcttgacaccaaatcatccatagtcagattcattatccttgcaatcatgggcattctgtttagagaccccgattggcattcccgctatcattgtggangtcta

SEQ ID NO: 101237 - DNA, 137 bp, Glycine max
  unsure (1)..(137): unsure at all n locations
  Clone ID: PAT_MRT3847_62430C.1
ggggcaacagcaacaggcgccagggcncgcnctccaaacatnctccaaacttttccccttncngatctccattnctnaaggtgttggtttgaaagctttccctgtgtttgggcttggtatcncctgacaagtnnctg

SEQ ID NO: 101238 - DNA, 278 bp, Glycine max
  Clone ID: PAT_MRT3847_62431C.1
agtttgatggccgagtggtggcgaaggctctgtttgaagggcaactagttggaggccgactttactctatctttctttattgctatactcggcgttaaggcccataccaggatatcgaagcgcgcgatcctgataactatacgaaatcgaaatggatgctgaagattgatgcgagtgcccttacagacttgacatctcccctggattatttagaggaaaaccacatattttatcagaacaatgacgtcactgattaaaagctgaaacctgcaggaagg

SEQ ID NO: 101239 - DNA, 546 bp, Glycine max
  unsure (1)..(546): unsure at all n locations
  Clone ID: PAT_MRT3847_62432C.1
acccactggagcgtacatcctttgtgctacagctagagcgtacatctacttttgttgtgatactgagaacaagagagggtacatctcttgtggatcagttcaagtggagcatacatccacttggtggttcaaagagaacaagggagggtacatcccttgtggatcttttcttgtaaaggtttttacaacgttattggaaatctcaagaaccggtggttgcttggggactggatgtaggcacgggttgttgccgaaccagtataaatcttgtctttgtcttctttttctctacactttttacttttccactgtgtacttttatttccactttacttttgtctaaattattgtttttgttctttactttctcataacttagtagtaaagcctaattgaatctagtaacattaagaaggataaatttttaattagtcaagacacgttcataattaattcaacccccctcccttcttaattattctgaggctacttgatccaacaaacaagtcaaaacaanacatgtttctaaatctaaaaatttgaaat

SEQ ID NO: 101240 - DNA, 362 bp, Glycine max
  unsure (1)..(362): unsure at all n locations
  Clone ID: PAT_MRT3847_62433C.1
acgcccacgcgtttgttatattatacanaaaaaaaaagaaaaaaaaaaaaaaaaaaaaaaaaaaaaaaaaaaaaaaaaaaaaaaaaaaaaaaaaaaaaaaaaaaaaaaaaaaaaaaaaaaggggggggggttttaaaggatcaaagtttatttacgggtgtttggaaggtaatagtttttttatagggtaacttaaattaaattaattggcggtggttttaaaaagtggtgattgggaaaaccttggggttaccaaatttaatggttttgaagaaaattccttttttgcaagttggggtaatagaaaaaaggcccgaacggatggcttttttaaaaatttgggaactttgaatgggaaatgg

SEQ ID NO: 101241 - DNA, 820 bp, Glycine max
  Clone ID: PAT_MRT3847_62434C.1
agttctactttttagttctagaaagtacagtatgaattatgtggcttgggcttatccataacatgaaattagttgttgttttcccacctcaaccatactgtggtcaaggatcaattgtattttaatatacattttcaatttgatttgtttgtttgtttaagcttttggggaaatgattcaaaatctggaccacgtctagggtggagtcgaccatgaaggtaagtggtctttgatggaccactatctctggccttcagattaatctatgtgcacaattttattgtgcaccttcccacatcagatccaccacccacacctgctcgacttcaccgcgccataccaccgcacgaccaaaacccacgcacaaaaccaccgcaccgccgcagatctgcgacctttcccaaatcacaaccaatctgcttcatcacccatacccatctcgcctgcaatcggactaactgccctcactgcgccctcaacatctcacgctccctctgttgccgtcgctcctccggcgcagtctcgcttccgcaacagtcgctcctccgcagtttgttctctttttcactttttctccgacagccacaccgcactagattccgtaaatctctccgcgttaccacggccgatctctgttagtcgatgatttccaaaaacccaaaagttgttctactggtttggagttcgagatttgattcgacgcaccaccaacaagaggaagaggatccgtgcttcagatctgatttttttaactctatttttttctagatttgtgatcatttcatcattgaatccatattttcatttcaggttcttgatt

SEQ ID NO: 101242 - DNA, 283 bp, Glycine max
  Clone ID: PAT_MRT3847_62435C.1
atataccttactttaaatttcctttattatccacaacaaatcatagttaatttgatctaaagaacatgctaggaaatagatcaagtgataagtaccatgaaatttaacaaattaatttcttgattacataataaaatggggggtgtttagtttcttacacaagtttatttgtctgaaatgtaaaaaaattcttctgtttaattatgttatagggccaaactccattgtttgctcgtatatttggtcatgaagctcgagggatttgtggagagcgcacgtgagg

SEQ ID NO: 101243 - DNA, 516 bp, Glycine max
  Clone ID: PAT_MRT3847_62436C.1
caatatgttctttgataattatgcagacttcatgaagattgatatgcaaaggatcaactactatgcttgtcaatgcagggtggcagtggagtacggaatgaatttagatgggaggttttgattttttcttttaaaattaaaatatgcttcggtggataaaaataataattttatcagtgaatttttaatggtcaactcattaatttggatagtggaatcaaaatcactgattttataaaataaaagaattaaatgttttaattttaaattagaagaccaaaattacaaaatagaaaaactaaaattacatgttatcctaataacaaattcctatataaatttgatagactaagacattttcacttcacttaactccattgtaccatgtgctacttgtggaaaagaaataattttttgaattaatcaatgatataaatacataagtaaatactaatgccttaggaaaaagaattcccataatttaaaagactggtgtattaattcatgaaatattga

SEQ ID NO: 101244 - DNA, 628 bp, Glycine max
  unsure (1)..(628): unsure at all n locations
  Clone ID: PAT_MRT3847_62437C.1
tggcctagnnnnaaaatccgggttaatggttccagattataagctcaatttttataaaaggggggttaaccccgggttggttcaaaaaaagggccttacccgnncaacatataacccatttacttaaaaacaaaggancnntttcatttcctgagggtaccttactttccaaaaactttacctttataccaaccagggtaacttccttaaccaaacccgtatgggtggaacccagataaaaaccgtgatgctatttaaatatgccgaaataccccaagggggaaaactttacctaacccggacactgggaggggaatgaacacattttttactggccaaatcaacaactaccccactggtatctaaaccaaaggcattttgggttaccctcaagtcaaaactaacattactggttgggggatgaagagaacccggaacacttaatggtcgggccggaagagaacccaaccncacgctttaccaaaaaaaagctggaatatttggcatcaaaaggccgaaaatggcnagaaagggtctccggatattcctatgcccannnaccctattccaaggccnnnttgaaaggggtctttccaaaaccgggcnnnnnggnnnagaaactgacttg

SEQ ID NO: 101245 - DNA, 2073 bp, Glycine max
  Clone ID: PAT_MRT3847_62438C.1
ccgcgacctctcccctccccccgttgcctccttcaaccgctcctaccccgtcacctcccccaacgaatactccctcttcttcgccaactgcgcccccgaaacctccgtcaccatgtccgtccacaccgaagcctacaatctcgacgctgacggttcacgcgactacctctccgccggccaaaccctcctcccttccctctactttctcttctttttaacctacctctccttcttctccttctggctctacatctgctacaccaacaaactctccgttcaccgcattcacctcttaatgtctctccttcttggcatgaaggctttgaatctaatctgcgccgctgaggataagcattacgtcaaggccaccggcactccccacggctgggatgttctcttctacatcttccagtttatccgcgtcgtcttgctctttactgtcatcgttctcgtcgggacaggatggtcctttctcaaaccctttctgcaggagagggaaaagaaggtcctcatgatcgtcatccctttacaggtcctcgccaatgtggcttccgtcgtcatcggcgaaacggggcccttcatcaaggattgggttacttggaatcaggttttcttgcttgtcgacattatctgctgctgcgccatcattttccctattgtctggtccatcagatctctcagggaaacctccaagaccgatgggaaggccgcgagaaacctggccaagttgaccctcttcaggcaattctacattgttgtcattgggtacttgtatttcacccgcattgtggtctttgctttgaagaccattgccgcttataagtaccagtgggtgagtaatctagctgaggaggccgcgagcctcgcgttttatgttgtcatgttttatatgtttaggcctgtggagaggaatgagtactttgtgctcgatgaggtttaataagaggccgcgtagattgcgctcagggatgaataatttgagctttgatttgatgttattttttcatttttactgatgtttagtgcagtatagctataattgtgactttcttgtcagatgtgatggctacgaggaattgaggcaagttaattaacagtacacagtccgactttattgtttttttgtactagtatttccctagaacattggagtgagtcttgaggacgattgcggcttataattaccaatgggtgagcaatgctgcagaggagaccgcgagtcttgcgttttatgttgtcatgttctacatgttcagacctgtggagaagaacgagtactttgtgcttgatgaggaggaagaggaggccgcggaaatggcgctcaaggatgaagagtttgagctttgattttgaagactcccactacgctacttaattacatttcaccccccctttatacccttctgctgttagagaagaaaagtgtgtcacaagggaattcggcctctatggtttgctactgctgcgtcttctgcgggataggaaagaggttttctacttctctttcttgttcattttttgaatttgagaagatttactagtgaaatgttcttttattgatcgatcattcattcttctttggattttctctgcttgagtcggtcatgctggcgtctgggggctgtcacaaaaaaaaaaagaggagtcaacaggttcattgaccggagccaaggcattatgagcatctttaataatgcatcttattttgggatcttggagcagtttatggtggatttctggcttcttcttggctaccttttgttccattgactgggaattcgtgatggtgtatcggtgtctggactgatgacgagtaattcttggaagcagaaacctttgttcttttttgaacaaatttttgtgcattgttgtaaccatttaagcttatcttttagcagctgtcacacatgctaaagtaaaattgctttccttatttttcttccaaatgacatatgcatgtatcatgacatcatttttcgtgtaactcaatctcttcaaatcaatagtttgcttgtaatgatcattaaacttttgaacaccaacattaattttttgccatcgagattttacttg

SEQ ID NO: 101246 - DNA, 402 bp, Glycine max
  Clone ID: PAT_MRT3847_62439C.1
gaaccaaatttttatacgtaactatccaaatacatcaaaacaactgaacaggtttgaaaccaaaatcctttggtactatttaatgtacttgcaagtcaaattgtgcttaagcgtaatacattcaaacgattcaataattttcaccggccatttaacgaggtaatggttaattcttcattcgaagacatatgattaggaattgtgcttaaatttccttcatctgaaaacctccttggaaagaaaccaggctcttttggctcaatcaggaccgtctcactccctaacatttgaattaccaaggtcatagatggcctatcctctgggtattgttgcacacacaagagactaacatggatgcatcggagttacttttggaatgacacaccgagtcctttatgcttg

SEQ ID NO: 101247 - DNA, 427 bp, Glycine max
  Clone ID: PAT_MRT3847_6243C.1
gtactcaatcattgtgtccctcaataaatggcttagcattttcacatggggccgtttctaagaggaatcatagcagtacaatgggtcaaggagcataggcgctatattgtgtacacagattaccacgctgagatcgcacttgagacataactgcctttcagactcgatctctgtttatgacgcgtaatgtagtgaggggaaatggctcccttcatgcagtaaacatcactggtcacaccaacctggttaagtgatagtctgttcagtattgctgaatatgcccattagagaggagaaactgctcaatggtagcagacaactgctctgcccattgccaaggatgtcctagtgggacacatgctgctaccatctctgccaggggcgcatgtgggattgccactactactgcactggctattcccggatg

SEQ ID NO: 101248 - DNA, 1621 bp, Glycine max
  Clone ID: PAT_MRT3847_62440C.1
gtcacgcgtccggcgtgttggccattccgtgggttgctatttggtgaggtgaactcacacgtgtggagggtgttaggtagaaggaacgagcaagagaggcgccgtacgagtttcttttcattcatggttctttttcttcattaacttacacttgaacttgttgcatttggaactcatgcttgaacttgctgcatttggatctcatggcagaagaagcactactgcaaaacaagcaggttctattcaaagggtacatagatggtgttcctaaagaaaccgatatggaactcaaggtcgactcacatattgcgctcaagcctcccccacaaggctcatcagctattctcgttaagaacctttatctctcttgcgatccatacatgcgcggtcgcatgcgtgatttccacggatcttatatccctccttttcttccagcccaggcacttgaaggatttggtgtgtctaaagttatacactctgataatccaaattacaagcctggtgatttcattaccggcttcactggctgggaagaatatagcctcatccaaagaactgaacagctccgaaaaattcaccccgatgatgccattcctctctccttccacgtcggtcttcttggaatgccaggttttactgcttatgcaggattttatgaggtcagcaccccaagcaagggagaatatgtttttgtatctgcagcatctggtgccgtaggtcagcttgtaggccaacttgctaagttgcatggctgctatgtagttggaagtgctgggtcaaaggaaaaggttgaccttctaaagaacaagcttgggttcgatgaagcttttaattacaaggaagaattagacttgaatgcagctctacaaagatatttcccgcaaggcattgacatctactttgacaatgtgggtggggatatgctcgatgctgcactccttaacatgaggattcatggtagaattgcagtttgtgggatggtatctcagcaaagcctttccaagcccatagggatatacaatttattcaacctcattacaaagcgcatcaaaatgcagggttttttgcaaagtgattacttgcacctatacccgcgctttttggaagatgtttcaagttactacaagcaaggaaagattgtgtatattgaagacatgaatgaaggcttggaaagtgctccagctgctttcgttggacttttccatggcaagaacgttggtaagcaagtcattcgtgttgcccatgaatgattttttcagtatttggttagctgaagcttgatatgttttaaacatattcaattgagaatttttggatgttcttgaactgtgtcagctggcaaggccttattctcaccttctgccttgagcagaaaatgtaaacttttcagtatgccttaattatgtagaaaataaagtagctgcattaggtggatattggatcttctaaaataatgagatatgtaaaatgagaaaatcaacagtagatacgttcatgcgatctcagtttgtaatcctcacttaagagacaaagctaaatttgcatctggtttggttgaattacaaagaaaatgattgaaactgtgaaagaaatgagaggtatagacctaccaatttcaagg

SEQ ID NO: 101249 - DNA, 401 bp, Glycine max
  Clone ID: PAT_MRT3847_62441C.1
attacccaaacaacagggggaaaaaacattaacttcaaaaaaatcacattacaaacattagcttaacattttccatacaaaaaaaacccattcaaagggccctgaaacgggaccaagttccacaaaaggggaaataaacaaggggggggataccgctccattttccctgaaaaaacagggggggggaaagtttgaaaatgggggttacccccttggggggggcaacggacaaaaaaaaaaaaaaatttggggaaggacccccaggggcccattaaaggggaataaaaaggaaaaagaaaacgggaggactaagaaaagggggaaatcaccaaagctggcaggcaaaaagagggcctatgagggaaatttttgcacaatcccaggcgggggaagggaaggaa

SEQ ID NO: 101250 - DNA, 253 bp, Glycine max
  Clone ID: PAT_MRT3847_62442C.1
ctcatgtcatctacatgatctaccagacttgcatatactatcactaaattaaaatgcattttggttaattcattcataccagccaatcctcgtatattttagttagtcactactcgatctctatctatcttattggatttcacatttcacgtctttagctataggatataggaaacaacatatatcaaacatggttaccgcagatattgcgcgaacagtagtcggtatcataggaaacatcatctcgggctgc

SEQ ID NO: 101251 - DNA, 822 bp, Glycine max
  Clone ID: PAT_MRT3847_62443C.1
ggctcgagggtgaggtgaactcacacgtgtggagggtgttaggtagaaggaactaggaagagaggcagcgcacgaggtggtagcactacatgtttcttttcattcattgttgaacttcaacttcaacttcaacttgaacttgttgcatttggatctcatggcagaagaagcactactgcaaaacaagcaggttctattcaaagggtacatagatggtgttcctaaagaaaccgatatggaactcaaggtcgactcacatattgcgctcaagcctcccccacaaggctcatcagctattctcgttaagaacctttatctctcttgcgatccatacatgcgcggccgcatgcgtgatttgaacggatcctagttctcctctttcatttggatcccaccacgtaactaactaactaattaactcttttcacattctttatatatacactatgcaccaactgtaaaattgtgtgttattttgatgatgaaggcacttgaatgattcggtgtgataatccaaattacaagcctgggaagaatatagccacatccgaagaattcacccagatcatgccattcctctctccttccatgtcggtcttcttggaatgccaggttttactgcttatgcaggattttatgaggtctgcaccccaagcaaaggagaatatgtttttgtatctgcagcatctgatgccgtaggtcagcttgtaggccaacttgctaagttgcatggttgctatgtagttggaagtgctggatcaaaggaaaagattgaccttctacagaacaagcttggattcgatgaagcttttaattacaagg

SEQ ID NO: 101252 - DNA, 341 bp, Glycine max
  Clone ID: PAT_MRT3847_62444C.1
gggtggcctaaaaggagtcatataaacctaacaattcatcagacttaagcagaacattattagtcctaaacgggggacttaagctacacgtaggactatgaggccctttagtcccttaaactcaactggggttattattatatcccaccaaagttttaagttttatattataagtggtgggatctcgactacatgggagtctattaggtcctttatttccttagcctcaatgggggttactattatactatgacatcccacataaaatctcacattgtaagtttagaaacatgtctagtaatcttttttaaggattgttatttttacaagggcaacaacaa

SEQ ID NO: 101253 - DNA, 371 bp, Glycine max
  Clone ID: PAT_MRT3847_62445C.1
attgccaagctgacctctgctaacatggtgacatatcattggtctcactagtaacatatatttttaagatttcactaaggctaacacagagggattgaataaaaacccaatcctgtctgcttcgtactgtatcacctgtgacatgccacaacaggacgggggcaccactcccattttaaatttatatcccttctgatgaagatagcctgaccctttaaacagtccttttgtcctaaaggtgtattctgaacacaattaacctctaaagaccacggagggagagggttaaggtgtctacctgccacatgaacgctgaaacttaccgcctgttataacaaacccttttgctttcaaaaaatcaacctaagaac

SEQ ID NO: 101254 - DNA, 367 bp, Glycine max
  unsure (1)..(367): unsure at all n locations
  Clone ID: PAT_MRT3847_62446C.1
gaagcgtggtcgtggtggttcggcggggaacaagttccacatgtcactgggtcttccagtggcagcaacagtgaactgcgccaacaacacaggggcaaagaacctctacatcatttcggtaaaagggatcaaaagccatttaaaccatcttccctcaacctacattaacaacataatgatggccaccgtgaagaaaggaaaacccaatctaaagaagaaagtcttgccanctatcatcgttcaccagcacaacccatagcaccgaaaggacagcgtctacatatacttcaaagataatactaatattattatcaatcccaaagaagaaataaaaagttctactatcactaatcccattagaaaagag

SEQ ID NO: 101255 - DNA, 425 bp, Glycine max
  unsure (1)..(425): unsure at all n locations
  Clone ID: PAT_MRT3847_62447C.1
gaatatccttttgctgttaaatcaggtcggatggggagaaacgttgactttctccccaggtgcagcttcgccagaagttgtgtaagaggaatgctctctatttgtattgagggggaggggagctgcgtgccaaagcaatcgctnnattctcaaatgaagtatgcnncaaatgccctgttcttttcatatggtggagtatcatttttgttgcgagatcctctgtctttgaagttttctaatgatgacgttctctcctaccattataatgtcacacgtcttctttctctcattagcatcttggaaaatttggcttgatgacactcatcaatttttgaggcttttttcccacatgcttggtgcagttttggagatgttcaaggaaaaagttgtattgaaactttcacatgaggaattttttacagctt

SEQ ID NO: 101256 - DNA, 283 bp, Glycine max
  Clone ID: PAT_MRT3847_62448C.1
gatctatatctttattcaccgttttattggtgctttttccatttttgccggaaactgtgccgctcacacaaataacttggcaattaaccactatcaatacaagggataaatctttaaaaatgttaaataaaataaacacatgtgcgagagcccttaagacacaagcctttgtcatgggtttttatgtcaggcaaaattgtttctcaagagagagcctcatcaaagaacgaaacttccttctccctaaggggccatgaatccctcaattgccaaagaaagagac

SEQ ID NO: 101257 - DNA, 680 bp, Glycine max
  unsure (1)..(680): unsure at all n locations
  Clone ID: PAT_MRT3847_62449C.1
ccggaccgnaatccgggtcgacccagcgtccggtccatggcacatgcatcccacaatgggaagaaacagcatcaaccatgatcatggctgcactctccaccctcacaccttcccaactctcagatctcactcgcttcattatctccggcaccaaccaccaccatagacgcctctcctgcctcctgtactccccaacgctcttctatttaacccttcaccatctccacactctcacactcccccacaagacccttctcatagaccgccacctactctcctccctccacctcctcaccggcacgtcgccggctatgtccaccaccacacggcagagcaacctcgacgccgcgctgatacttcttctgctctgagaaacgcacaaccacaacccacatgccctagcaggcaccgttctgcgaatggagaaaaaacttgagcagagtgttctctgattcgatgataactgtatctcttgcaccccttgggacggtgatgattacctgcgatgagaccgtgtcgaggtgctggaggcttgagggtgcgctgaattgcggaggagggaaggaggcggctccagcggcgataatggtggcgctgccgaaggtggacgtgagtgacagagagaaggagaccgtgatatgcaaggaggagatgggaataggaagggacgtgtgccagtt

SEQ ID NO: 101258 - DNA, 497 bp, Glycine max
  Clone ID: PAT_MRT3847_6244C.1
gtagtcccaaaggagcgactccatatgcaaataggacatgattttgctgattatttcaattgaaagattgatttttattgtgattggagtgtcgatgcattcatgagatccatattccgatgtctgctaccaaaatttcatttttttgctaggattatttcaaagaaattgaaaaggtgagtatatcaatgcataacaaaatcaaagtagcatagaggcaattggtgtctagatgaaaacatacttctatgagaaggatatttttggaatttagcaaaaacccatcataggttgtgataatagtaatttcggcggtgagaatagaaactctaacgatggctgtaggctcaagaagaagcccaactaagaccctgggacaaatcaaaatcgcatcgcaaactcgaaaatccctacagagagagagaaagatgcagaagagagagcagggcaagtccggcggatccgccggaggaggggcggcgccacctgcgaagaga

SEQ ID NO: 101259 - DNA, 571 bp, Glycine max
  Clone ID: PAT_MRT3847_62450C.1
ttttttttttttttttttttttttttttttttttttttttttttttttttttttttttttttttttttttttttttttttttttttttaaaagaaaattcccggggtcaaaacccaaaaaggactaaaatttctaaacccggggggaagggaagggaaaagggcccccctttagggtgcaattccacaaaattggccccattattttaaacaaggaagggggttcataacgggggcaaaacgggggggggggaatttttttttaccccaggggaaacaaaggacttttaaccgggggaaaaccccccaacaaaaacaaagggggccaaaaaaaaaaacttgacttgaaccccgcaaacccccctttattcagtcccagaaattttctttttaaaggaaacaagggggggagcaagccccttccggctaaactaaaacaaaagggatcgggaaacaaaccctccaggggatccaacccccacccaccccaaaaaatttggaaccaggggaactgagttgagggcccccacaaaaatgggcgatggccaaaaagcacctatcccccctccacc

SEQ ID NO: 101260 - DNA, 480 bp, Glycine max
  Clone ID: PAT_MRT3847_62451C.1
aaggctcctgcaagcgagatagttttggattatacattctggctctggtttctagatgtcaaatctccttataatgcacacttattgaaagttgaatcatccatacgctggatgatgttatggaatctgaagtttggctaaatttatggaacttattacttatttcttaaatttttgtatacctgtgtcaatgcaagaacatttttatgacaatgatactacttcttgctctattttggttgttcagctttatgagacagttccaaatgtcattctagtttccagcagatggtttgtgtttgtgcatgctcactcatattgcaagattactgtaatattgatttgccagtcttatttgcagcagattactttgtcatttatctctttatgtttcctcatttggtctttcatctatgataatatgggcaaggggggagccatggattgggttgggtggattagaaaccagaaccattgcaa

SEQ ID NO: 101261 - DNA, 912 bp, Glycine max
  Clone ID: PAT_MRT3847_62452C.1
ggtcagccaccgcgtccgctttctctctctgaaaaaagcactcacaaaaatggggacacggtgaatgagagagagaaagagacaaagaagaagaagaagttttagagagagatagaaaaaagcgaggaaggtgaatgcaccgcaatgcttcttcgatttcttcagctatggattatgctccgctttgcttgtgtttcatgtgcagcacggcaagacccatttgctatgcacataagctgcggggctcgtcaaaatgttcaaacaaaaccaaccaacaccctttggcgtgaagattttgggtttacaggagggatagctgccaatgcaactcgtccaagtttcattaccccaccactcaacactcttcgctatttccccttgtctgaaggtccacaaaattgctacaacattaacaaagtgccaaagggtcactactcaatcaggatcttctttggacttgttggtcggtctaaagataccagtgagcctctatttgacatttctattgaaggcacgcaaatatattctctgaaaccgggttggaacaagcagaatgatcaagtatttgttgaggcgctagtgtttcttacaaatgattcagtatcaatctgtttccacagcactggtcatggggatccagcaatcctttctattgagattcagcaaattgatgacaaggcttattattttggcccctggtggagtcaagggataatacttagaacagttaaaagactgagttgtggttttgggcagtcaaagtttgatgtagattatggaggggattccaggggaggggaccgattttggcaacggattaaaacttttggcgatgaatctgatcaacctagatcagttgaaacaagaatcaaacaagcttcacatccaccaaacttctatccagaaaccctt

SEQ ID NO: 101262 - DNA, 310 bp, Glycine max
  Clone ID: PAT_MRT3847_62453C.1
aagacaataccaccattgctcgcaacggtggacgagtgcactgcatgcaggtgcggccaccatttggcaagaagaagttagacactctttcctacctgccagaccttgatgatgcacatctgacctaggaagtagaattttttctcaagaagggatggacaacttgcttggaataagagttggagcacagcatacagtaccttgagcacaacaggacaccagcatactaatatggacgcttctggaccatgctgaatctgcctatgtatgactgtactgatgcttctgaggtgttggaggatctccaaga

SEQ ID NO: 101263 - DNA, 614 bp, Glycine max
  Clone ID: PAT_MRT3847_62454C.1
ttaaaaagaataaaaaatctattaatttaccaagattctatcaaggtttttcgcatggatcaaacaactctatgatgttccatggtgaatcaaggattcaagattctatctatgaaccaaaattttattacataatcttcgctcatgaaatttttaaaattacataagttaatccactatccattggtcgataatgtccactataagctgagatagattgaaaaatcaaagccattgtgccattgataatcaaacatttgcaattcacataaattaggcatgtcacatttgcaatccactatctccttgtcactataaaagctagcagacaaatatcataagaagttccattagcacaatagtttagtcatgcaacctatgaagttaattcaccttaagaattccattctcttccaccagccttctagcagctaatgtagctcctccagccaaaacactagaatgatgaaataatgtttctttttctacaagattaatgcaatgtaatagtggtacaagaaagacatggtaattgtctttaaagaaaataagtaactttaaaatgtaactacccttgaattgttaccttgacaacataaagtttcttgctcatt

SEQ ID NO: 101264 - DNA, 280 bp, Glycine max
  Clone ID: PAT_MRT3847_62455C.1
ggaacaagggcgcatattttatttagggctcggttgacaaaacaccatattcgcaccccttacatgggttggaaacaccattgagggccacttctcgtggacctagtgcccttaaaagaacgcatgccataacatgattgtcgattgcgcttccgccttattcaaagagaggttgaaggtacttcaagagtgtgctcagcttattgggaagcaaagaggctcccctttcccctatgattccctaaaagagagcgctccattgggcttcattgagccaaac

SEQ ID NO: 101265 - DNA, 274 bp, Glycine max
  Clone ID: PAT_MRT3847_62456C.1
aaaaaccaagggaaatttactgcctcattgaatttggcgtcctatacatgattgatgaaatggggtaaaaaaaacttgtttaaaatccccaagcccatttttggcccccttttttttaccaatacaaaacttgccaaatttttttgataaaaccccctccgatttattttctccacttatttgtccaagggacaatgcagcatccctcaaattaattgtccaaaaatccaaaggccggtcgccctttttggatgattggaaccttacaagggct

SEQ ID NO: 101266 - DNA, 1140 bp, Glycine max
  Clone ID: PAT_MRT3847_62457C.1
cttcaccttcttccctcaacgtgtcttctttctaaggttccaggatcagatctcgttccctcgccactcatcctcggccgcgcgtcgctcgccacgcgccaccatcaaccgcacctctcgccgtgaatgatcaataatatattcaatattttattgcaacttggaactagcaatggcatctgaagaagttctgaaggctgttttccctttcctggacggtgttgatcttgcttcttgtatggctgttgataagcagtggaaagacatagctagcgatgatttcctttggaaatgtctgtgtgccaagagatggccttcgatctgcaagcaacctaatccttctactttaacctactacaagttttacaaaacctttcataaacgccagcaccgtagaactcttctccctccgagaatttcttttgatgatttggagttcttcattgacatttgggctgaaaacacattactcttctcggaagtggtgcctggctctgtccttcaagcaggttttaaagctccagcatctggagtttgtgacatgctcaaatttcaattggaaggttctgaatacaagatgacttttcccgtggaacccaggttcactatcccttcaggacaaaaccagaatgttagtgtctctgtgatggttgggaggaaggattcaaataaggttgctcgtgtaataaacaagtccatgtttgattacatcgatcgttcatcatatagagccttggcttttgattacctagacatatcccctggctacccatttttgtctggcatccgtgcatggatctctttgctattcatggaagatagaaatgaagatctcatggatgtatttgggatccaaatggatttctgtgatgtagcaaattctaaggaagaagtcttgtggctgttggacatgcttgactggaagtaaatgttcaagaaaagtgtggtgccccatcattacaacaaaaagtaattggacattgtgattttatgttaacttgtttgttgatacggggtgcattacaaagtttaccatattatcagcaccaataatttgcgtaatttggtattaatatctcgtgtgtttggagtatgtaaatactcgtataatctattatcatcaataaaaagcctttgttt

SEQ ID NO: 101267 - DNA, 524 bp, Glycine max
  Clone ID: PAT_MRT3847_62458C.1
ctttttttttttttttttttttttttttttttttttttttttttttttttttttttttttttttttttttttttttttttttttttttttttttttaaaaaaaaaaattaaacattttccaaaaatttttttgggggcccgagatgaccgcggaagagaataacttaaaagaaaaaaagggccccctaagggggagaaccccccaggggaaagggcaaaggggcccccctggcatgaaagaaactttaatctacccttatccccaatttggaaaacataatcggggggggaaaaaaaacgggggaaaacacaagccaaaagccttcccaatttttattaaactgggcaaaaaaacccccatttttccaattattttttttcccctggggccctcttaggggaaaaaaagacacccccattagggggggtaccccggaaagaaccaaaagccttaactgcccccggttttaaaaaaaaccgaggggaaaagggtgcaatggctgccccaaaaaaggggcctaccc

SEQ ID NO: 101268 - DNA, 822 bp, Glycine max
  Clone ID: PAT_MRT3847_62459C.1
cccacgcgtccgctctcaatctcaaacctctccattccttactcagtttatcattgcctgtgtgtagtggagcttttctaccttaaaaagattgcaccttcacccttcttcaggtttgcttaatttctcaagcaaactttgtttcatttccttcacaacttgtgattttcaaccttgcttacccaccatcacaatacgctgctatcttttgctttatttctcattcaatttcaaggacaatcaacaattggggtcatacatatatacatgcataccatctttcattgccctcatttttcttaaaacaaaattggaaccaattccatccaattttaatgatgtaatctttttttgtgcttccctcttgcttatttcatttttcttttctaaacattgaaggatttgaattgtcaaattacttactcaccctgcttgacaattgaacaaggtttgctggctggccttattcaactttgcctcaattttccaaatgtttccatttccattcaattttttctttggaaaatgaggaagccaaaaatatggggttccgtatcttcaaattgattacttcaaaggaaaaaaaagagaaagtaaaggtctttctggataaaatcaaaatgccatattcatattatgatattgggaccaactctcactaacatgcgccgcagcactcattgcgttcacatgcgaatcttcaatttccgattttcatttcataaattatgtaaattagtaataataataaaagacgcgtcttttacctttgttactcccccccccccccccctttattttttccttaaaaaaaacttttta

SEQ ID NO: 101269 - DNA, 170 bp, Glycine max
  Clone ID: PAT_MRT3847_6245C.1
tgcgagctggtgtgttgcctacattgtcattgcggcgggggatgactatttgtgcgtgatgcacaccctgtagacagtattaccttgctcactacttgagaagttgatatatgttaccaagtctgggtcatttttactaccatgatcttcgatcgaatgggcgccgcaca

SEQ ID NO: 101270 - DNA, 333 bp, Glycine max
  unsure (1)..(333): unsure at all n locations
  Clone ID: PAT_MRT3847_62460C.1
cggactcgagtgccgagagngaaagaaagggngagaaaagttttattaagancacacgccgcaccccccacancggcaaacaaanagnggaagcaagcgcaaaggcnggaaaacccaccnacgcnaaggagagggaanccacacncncngacccccccaaggcacaacacaaccacaannnngaggcagngggcgaaaaacaggaccgcggggaacngnacgaacaagagaaganggngaaagcgancaagcanagagaagacgncaaaaccacgccgggacacccgcagcgggccgagcagcacaagaacaacgcngccannaaggaagccg

SEQ ID NO: 101271 - DNA, 376 bp, Glycine max
  Clone ID: PAT_MRT3847_62461C.1
caatcaaatagggggggtgattctatattgggagcgcggccctatatattaaaactctctgactgtttcatgcctatcaatccagaccactccgttgcattgctgtgctgtaccattatttacacatctacccaaatcaacttattccaccttgaatattcaacgaaataagactcttcactctagccttaaatatatattctacaacaacaattcaccagccttatatcatcactaggttcagttatgcctataaccactttatgcaattaaactatacttaccactatttcctattgaaaatgatgccatgctactcaatcataaatcatagcttccaatgtcctttgataacaaaaacttttccttctttaat

SEQ ID NO: 101272 - DNA, 207 bp, Glycine max
  Clone ID: PAT_MRT3847_62462C.1
ccttggacatgggggccaattctattaccattccagatgcctttacccaaaaagctatggctaaaaaaaccttctggtgggggaatcaccacatggggaaaaacctggaatttacataagccaagtcagccctgaccccaaatctggacacaaatggggggtccatggtggtatcccatttactctcataatgccaaacacccccgg

SEQ ID NO: 101273 - DNA, 1242 bp, Glycine max
  Clone ID: PAT_MRT3847_62463C.1
gtctcgagttttttttttttttttttttccacagttagattctgcaaatatttactctttcgttcaggtattttattacatggagtcatggaatactcatatacttttgcttcttacagagacggtaagacccaaaaaaaaaaagtcttgttcttatcctaatatttttggttatattttaattaccgattttttcagaaaagaaaaaagaaagaaggaaagtgcaaaattttttctatggcttgtccttgagaagagaagctaatccggtgaccaccttaacccctttataaacactcctaactctcaccgccagtggatgattttttgtcacgcttccgttggcaattttttttaaaaagaaaaaaaaaaaaaaagtgcaaaattttttttctatggcttgtccctgagaagagaggctaatccggtgaccaccttcgcacctctctcaacactcctcaccctcaccgccggtggctgccacgtcggcatcacaaccgatggcaagctgttctcaccgccgggaaaagtctccggcttcggcgacgatgctttttcgccgaagatcagttccaattcaccacactcactctcccggccgtcgatcaagttctccgtcgagtcattgacggcggaggacgatggcggattcgccctggtgcaggagctggataaccacttggccagaatgtactccgccttcctccacggcggaacgtgcatccccttcttcttcaagctctgcttcgccgcctccgacacggcggcgacgatctggcagagtcgatccgattttccaacgaaaatgaacggcagagactgaaggatcgccttgtaggttcccgtcgatcgagctatctcgaactccgatcgaaaatcgatatcaattatcaacctctcaccttccacaaccacatcgatgtattcatattcaccggcagggtaggttggggttttgtcccatttcgatgtgcaaatggaagaatcgtaaccgagagaggaaaggctttcggtgacgatctttctcaaatcgccttttcgcttataaaccttgctgttcttgtcaacgatcttcgatgtgtcagctaagaggtttctctccccttctgtcgtcttctcgcagccgcccacgcgtccgtcactggcgtcgctgaaggagccagaggaattttttttgccgaagatatcgagttcctcgtcggagctgtcgttgctgttgccgttgaagcagttgcagcggtt

SEQ ID NO: 101274 - DNA, 346 bp, Glycine max
  Clone ID: PAT_MRT3847_62464C.1
tcttttttacggaaacaaaaaagtttataccgcatctcgttgagggggaaacgcctaccgggtccatctagaatctcccatcttttcacactgataaaagccttcccaaacgcacagtgggagacaccattcttcgcggctaactatacgacggctgtttcacattggggactaatcacgaaagagatgttgctctgaccactcaggaaatgatgggagtgattaaaaagggaggcactgctggtgttgctgttactacaggagcatctgaagcctgtgctcaggatgctcactaaaggcggcaggcccaaattgctgccgacaccatgtggtatcatacctggga

SEQ ID NO: 101275 - DNA, 1702 bp, Glycine max
  Clone ID: PAT_MRT3847_62465C.1
ttacggctgcgagaagacgacagaagggggctcctcctcctccttcttcttctgccttacatcacatacttcactctcttgtttttccctttcctctcctcaaaatttcttctgattcatttaatctttactcatcaatggctctgagactgaaccctatccccacccaaaccttctccctcccccaaatgcccagtctcagatctcccaggttccgcatggcctccaccctccgctccggttccaaagaggttgaaaatattaagaagccattcactcctcccagagaagtgcatgttcaagtaacccactctatgcctcctcagaagattgagattttcaaatctttggaggattgggctgagcagaacatcttgactcatcttaaacctgttgaaaaatgttggcaaccacaagattttttacccgatccttcctctgatggatttgaagagcaagtgaaggaactgagagagagggcaaaggagcttccagatgattactttgttgttctggtcggagacatgatcacagaggaagccctgcctacttaccaaacaatgttaaatactttggatggagttcgtgatgaaacaggtgcgctgcagacaaccgacacaatttggacaagggcatggactgctgaagaaaacagacacggtgatcttcttaacaagtatctttacttgagtggtcgagttgacatgaaacaaattgaaaagacaattcagtaccttattgggtctggaatggatcctcgaaccgagaacagcccctaccttggtttcatttacacttcatttcaagagagggcaaccttcatatcccacggaaacacagccaggcttgctaaggagcatggcgatataaagttggcccagatctgcggcatgattgcctcagatgagaaacgccatgagactgcatacacgaagatagtggaaaagctatttgaggtcgatcctgacggtacagttatggcgtttgccgacatgatgaggaagaagattgccatgccagcacacctcatgtatgacggccgtgatgacaacctgtttgatagctactcttcggtcgcgcagcgcattggggtctacaccgccaaggactatgctgacatacttgagtttctggtggggaggtggaaggtggagcagctaactggactttcaggcgagggaagaaaggctcaagaatacatttgcgggctgccgccaagaatcagaaggttggaggagagagctcaagcaagagtcaaggagtcgtcaacacttaaattcagttggattcatgacagggaacgtactactctaaatgcaccaagggaggagcatggtgaaatcttccggcaataccgttctgagaaatgttgaatagttgaaaattcagtttgtcatttttatcttttatttttcctccttttttggtctttgttatatgtccctgtaaggtgaagcagttgttcttgcatggttcgcaagttaagcagttaggggcagctgtagtattagaaatggtattttttttttttgtttcgcttttctctgtggtagtgatgtctgtcgaagtataagtaaacgtttttttttctctggcaattttgatgataaagaaaatttagttcttctgtggttggttccattttgccatcgggtaactgaaatatatgctttactaggtaattttgttgtgtatccttctg

SEQ ID NO: 101276 - DNA, 256 bp, Glycine max
  Clone ID: PAT_MRT3847_62466C.1
acattgaaaaagaccttattttttagatctgtaaactctttttttgaatttcaaggagagacagaaactttcattccctcccattagttatttgccctttaaataaattaaaaggggctttcccacggaggctttaaaaattttggtttttttttgggatgacccccattactacaacacattttcccgggaattaaccgcgtttttttttttaacccgacaccctggggaccgtacccaattttttttttttttt

SEQ ID NO: 101277 - DNA, 330 bp, Glycine max
  Clone ID: PAT_MRT3847_62467C.1
gacccacgcgtacgtacagccgtcagtacagcaccgaaaggggaacagagcggacaatggctccctcgggttcaaactttctgtctgccttactatgcgtttcaccactgtcactaggtggatctgttcccgcggaatggcataatcatggccttgttatgcacttctacagggaatctttccctctggccgaagacatcatcatcttaccagtcactcttcgctacacgctccacatgaccactgcttgtctcgtggctcacgaacatcttccatcactgtgctgttcacacttgtgacgcttcactgttgccccactccacaatacgg

SEQ ID NO: 101278 - DNA, 2110 bp, Glycine max
  Clone ID: PAT_MRT3847_62468C.1
ccctttcgtccgcttgctcctcctctctccttctacattactctctcttctcctaaaaatttctaatgcttccattgcttcatctgactcactcatcaatggctctgagactgaaccctatccccacccaaaccttctccctcccccaaatgcccagcctcagatctccccgcttccgcatggcttccaccctccgctccggttccaaagaggttgaaaatattaagaagccattcactcctcccagagaagtgcatgttcaagtaacccactctatgcctccccagaagattgagattttcaaatctttggaggattgggctgaccagaacatcttgactcatcttaaacctgtagaaaaatgttggcaaccacaggattttttacccgacccctcctcagatggatttgaagagcaagtgaaggaactgagagagagagcaaaggagattccagatgattactttgttgttctggtcggagacatgatcacagaggaagccctgcctacttaccaaacaatgttaaatactttggatggagttcgtgatgaaacaggtgccagccttacttcctgggcaatttggacaagggcatggactgctgaagaaaacagacacggtgatcttcttaacaaatatctttacttgagtggtcgagttgacatgaaacaaattgaaaagacaattcagtaccttattgggtctggaatggtaagatcctatacaactgtagtctattttggtcttccgcaatggtagttttattaatgaatcacacaatcatgcaatgtcaaagaaactcttgctacccatttatggatactttatttgtttgagagggtggggggataactgcctgaaatataaattttattgattaattcctctggatgcattaatgtgtcactgtcagcaactttcatattcacatgaatgtctttaaactattgaaggatcttcacagaatgaagggctagatttcaaagaatacgatgacactttcctgaaattcattattaaaatagattattatgttgctctgaagttattacactaattgattcttcatagctgctgcttttgtcactttttgagtattgacctttcttgactgattgaaattgatggataggatcctcgaaccgagaacagcccctaccttggtttcatttacacttcatttcaagagagggcaaccttcatatcccacggaaacacagccaggcttgctaaggagcacggcgatataaagttggcccagatctgcggcatgattgcctcagatgagaaacgccatgagactgcatacacgaagatagtggaaaagctatttgaggtcgatcctgacggtacagttatggcgtttgccgacatgatgaggaagaagattgccatgccagcacacctcatgtatgacggccgtgatgacaacctgtttgatagctactcttcggtcgcgcagcgcattggggtctacaccgccaaggactatgctgacatacttgagtttctggtggggaggtggaaggtggagcagctaactggactttcaggcgagggaagaaaggctcaagaatacatttgcgggctgccgccaagaatcagaaggttggaggagagagctcaagcaagagtcaaggagtcgtcaacacttaaattcagttggattcatgacagggaagtactactctaaatgcaccaagggaggagcatggtgaaatcttccggcaataccgttctgagaaatgttgaatagttgaaaattcagtttgtcatttttatcttttatttttcctccttttttggtctttgttatatgtcactgtaaggtgaagcagttgttcttgcatggttcgcaagttaagcagttaggggcagctgtagtattagaaatggtatttttttttttttttgtttcgcttttctctgtggtagtgatgtctgtcgaagtataagtaaacgtttttttttctctggcaattttgatgataaagaaaatttagttcttctgtggttggttcaattttgccatcgggtaactgaaatatatgctttactaggtaattttgttgtgtatcattctgaaatatatggtttgttactatgtt

SEQ ID NO: 101279 - DNA, 296 bp, Glycine max
  Clone ID: PAT_MRT3847_62469C.1
tcacctattactctcttcatccttgacgcttccgctgctctctttcaaattgcaaaaacgtcactattcacacacagcatccgatacctgccaagatatagcaaaaaatatctgccgtttgctataaaaaagccaaaaccatgtcctaatgcaatacttacacttattcgacaaaaacaaagcgaacggacacacatgctccctttgggagcagctaaagcaacttcaaccttctaggaatcccctggcgacgaaggcaaccacccttcaaaggcctgtctaagcacctccttgcc

SEQ ID NO: 101280 - DNA, 1074 bp, Glycine max
  Clone ID: PAT_MRT3847_6246C.1
gttgtaaagttgctctcaaccaattggttctcaattaggatcacattctacattagttccaaacaaaaaaccatttaaatgatcatcaagaccatgttatcaccattttaatgaatgttgttgttttgcagattcaatggtgaagatttcctaacaagacttagagggaagagtatcatgtttgtgggagactctttgggtttgaaccaatggcaatcactcacttgcatgcttcacatagctgtgccacaagccccatacagcttagcaaggaatggagatgtctccattttcacctttccgacctatgatgttaaggtaatgttgtcgcgcaatgcattacttgtggacattgttggtgagagtatcggtcgagtattgaaactagattcaattcaagctggccaaacgtggaaaggaatagatgtaatgatatttgactcttggcattggtggattcacacaggaagaaaacaaccatgggatttgattcaagtagggaatcgtacatatagagacatggatcgcttgggttcatatgagattgcattgaatacatgggccaaatgggttgattacaatattgatcctaccagaacaagggttttattccaaggagtctctccagatcatcaaaatccagcgcaatggggtgagccaagagcaaacttttgtgcagggcaaaataagccaatatcgggattaaggtatcctggaggaccaaacccagcagaggtggtattagagaaagtgctaaaggccatgcaaaagcctgtgtatttgctggacattacaaccctatcccagctaaggatagatggccacccttctgtttatggacatggtgggcatttggacatggattgcagccactggtgccttgctggtgttcctgatacttggaatgagcttctatatgttagtctctttcaaaattaagatcctattcttattgttattgctgattataaataaaatgtgtcccaagaaaatatatatctcaaattaattcagacaataaaatacagcaagatatgtataggtctatcaaataaggtgtttcatctctaaaaa

SEQ ID NO: 101281 - DNA, 152 bp, Glycine max
  Clone ID: PAT_MRT3847_62470C.1
cgggacctcacccacttgcagacagaacagacgatcggcgtttcacttcagccttatccggtttagggtttcggtttttgacgcaacctttgacgtatccagaccttacgtttccgatcaggtctgatcgtctctggttggtagaacctttg

SEQ ID NO: 101282 - DNA, 1015 bp, Glycine max
  Clone ID: PAT_MRT3847_62471C.1
tgattcttctctaccatttccaaagcacaaagatgaaaatgcctccttttcttcattcttttcctcctcgttcattcttcttctgttgcttccttctccttccactcttgctcttgctcttgctcttggtggcaccttcttcttcaggtgctccaaatgaaaaggtaaccgtgtcactctattatgaaagtttatgtccctattgtgctgatttcatagtgaaccatcttgtgaggctcttccaaacgggtctcatctccattgttaacctcagattggtcccttggggcaatgcttggattgcacctgatggaactgttgtttgtcagcatggagatgatgaatgctttctaaacacgatcgaggcctgcgctattacaatctatccagacgtggttcaacatttcagatttgtacggtgcttggagaatctcaccttagaggggagacataaccaatgggttaactgcttccaaatgactgggttgggcacatctcctattgattgctacacaaatggaaatgggaaagctattgaccaaaagtatgcaaaggaaactgctcagcttaatcctccccatagatttgttccatggggggttgtaaacaaccaagcactccaagaggactaccaaaattttgtaacctatatttgtagggcttacaaaggcaatgtgataccaaatgcttgtagatcactctcaacaaaaacttatgactcaaatgaaaaagtcaattcctttcaacctgtttgctatgttgatgaagctagaaatcttagctttccactggtcactagattaagtaataaatccccgtgaaaatgaagttggaatatacttcatgtggttgtataaaaacttccactttggaaaaacaagctaaacctcttgactagtctataacttcagatgctcatgacttggtttagactttggacgtgtaatttattcttccattttaattctctctcttaatacacacatatgggacaaaagaaaattatagttaaaaa

SEQ ID NO: 101283 - DNA, 616 bp, Glycine max
  Clone ID: PAT_MRT3847_62472C.1
tttttttttttttttttttttttttttttttttttttttttttttttttttttttttttttttttttttttttttttttgtttttggggaaaaggttaaaacaaaaaaaaaggggggccaaattttttaaaacgggaaaacaaccaaggtaatggggaaaaaaacccccaaaaaaattccaaggggtaaacaaaacccaaaggggttggaaacaaaaaaaaaaaaaaaacgggggggaccccggaataaaataaaaaaaccaccccgaccctaaaaaaaaatccccctaaaaaagcaaaacaaaaaaaaaaaaaagggaacggctttaaaaagggaaaccaaaggcccatggggcccaggaaaaaaaattttggggcccgggacaactggatttcgaaaaaaaaaatggcccccccttaaaaaggaagggaccaaattggcccccaagggaaaaaaaaaaccgacaaaaggggggggggttttgccaaaaaaccaaaaggtggaaaacaaatatgtttttttaggggattggacaggctagggggagggaaaaaaaagggagggcaaaaggcaaacgggacattaaaaaaaaaacaaaaagccgggctattttatt

SEQ ID NO: 101284 - DNA, 259 bp, Glycine max
  unsure (1)..(259): unsure at all n locations
  Clone ID: PAT_MRT3847_62473C.1
catacattttaatatgtgcagtcacgttctcaaagtagttgctgacatgacatgtttagatgataacacctcatcacccaccaatttgtgtagtagataatcattatatgtaattgatgttccaaaatgcaagnnggtatgtctatgaatatatggagtatggactagtaatttggaatggnnttaaagaactacaactttagttatgctaatttgttggggggaaaaggtttttattaatgaagttatgaatttccat

SEQ ID NO: 101285 - DNA, 526 bp, Glycine max
  Clone ID: PAT_MRT3847_62474C.1
aattcggctcgagcaagagccaatggcagtgtgctcgatcttttcactactttcaccaatatctccattgcccatcaaaggtggaacttaattgtgtgtcatcgactactgtgaaccatcttcattcgatttcggagcctaaattaggtcataaatcaaacccaaaaacaccatgaaaggaaacaagaagccttatctagttgcgatcctcatagaagccatctatgctggcatgtttcttctctcaaaagctgcatttgaccatggcatgaacaatttcatctttgtcttctatagacaaaccgcagccaccatattccttattcctttcgctttcttctttgaatggaaaactgcaccccctttgtccttcgtgaccttctgcaagatcttcttcctttctttcctggggattactgcgagcttggacatatatggtattggacttatttacacttctgctactttagctgctgctaccacaaactgccttccagtcatcaccttcttcttggcgctcatactc

SEQ ID NO: 101286 - DNA, 272 bp, Glycine max
  Clone ID: PAT_MRT3847_62475C.1
ctcgagccgtgcatgtagccaaaaatccaagatcagaatagttatttagtggtcaacttcaacttttatttgttcacatacaattctcaatatccatggctgcagattccaactcaaaccttagaatcaccattgaaagaaacccttcccagtcacgccttgctgagttgaacatcaagtgctggcctaagtacatcctcttctctctctttctttctcttcttgttccattcttttgctatgtattatatgaaaaaaataaaacttagata

SEQ ID NO: 101287 - DNA, 2332 bp, Glycine max
  Clone ID: PAT_MRT3847_62476C.1
ggccattggtaccggcatttttgactatgtctgggtacaattctataacaacccttcgtgcagttatagccaaaacaatttagataactttctaaaatcatggagagagtgggccacatcattgaaagtaggtaaactgtttctggggttaccagcagatgaagctgcagctccggccggaggttatgttccggctgatgtattaatgtctaagatcttacctgaaataaacaagtcaacaaattatggaggtctcatgttgtggtcaaggtactacgataaaattagtggatacagtacccgcattcaaaatcctctaagaaatgggacagcaaaccctctatgcacacggaaaagtcaagcatgtaggagccatgagggcggtttcgcggagcttcttggttacatgtccacgctcggtatcaaagtttatgaagacgacaacaatggaacacagtgctgtgagatcatatgtaggaacaactgttcctgcgacgcgtttgctcccttaaatcacattaacaatactagtactggatgtcagatatggctcaaaggaaccaaatttgttagagcttctggaaatatagctctgccaatcaacgtttctgttgcattgctggaacacaaagtaaacagctggtggatttggctcatcgttggggtgggagcagcttttgtaatacctgtgatattctatttatcgcgtgccttcctgagaaaatacaaagcaaaagtggagagaaaaaagatgcagaagaagttattacatgacattggaggtaatgcaatgcttgcaatggtgtacggcaaaaccataaaaagtaataacaagggaaagactaacaatgaagttgaactatttgcttttgataccatcgttgttgccacaaacaatttctcagctgcaaataagttaggagagggtggttttggtcctgtttataagggaaatctaagtgatcagcaagaagtagcaataaagcgactttctaaaagttcgggacaggggctaatagagtttacgaatgaagccaaactcatggccaaactccagcacactaatctggtaaagcttttagggttctgcatccagagagatgaaagaatattggtctatgagtacatgtctaacaagagcttagacttctacctatttgattcggctagaaaggatttgctagactgggaaaaacggttgaacatcattggaggaattgctcaaggacttctataccttcataagtattcaagactaaaggtgatacatcgggacctaaaggcaagcaatatattgcttgatcacgagatgaatgctaaaatatctgactttggcatggctcgaatatttggagtaagagtatcagaagaaaacacaaatagagttgttggtacatatggatatatggctccagagtatgcaatgaaaggtgttgtgtccatcaaaacagatgtgttcagctttggtgtgttgctactagagatacttagtagcaaaaagaataatagtcgctatcattcggatcacccactcaacctcataggatacgcgtggcagctctggaatgcaggcagagctctggagcttatagactcaacgttaaatggattgtgttctcagaatgaagttttcagatgtattcatattggcctcttgtgtgtacaagatcaagcaacggatagacctacaatggtagatattgtttcatttctatcaaatgatacaatccaacttccccaaccaatgcagccagcatacttcatcaatgaggttgtggaagagtcagagcttccttacaaccagcaagaatttcattccgaaaatgacgtaacaatttctagtacgcgtgcaagataattggacaattgtgtacaccaaatttcactttttaatactgcatcactctggcggtgggagttcttggtattattgtttgtgccaattttacttcttttagataactgaccattttagttagtaataataaatatatctggaacgttttattttcaaaattttggtctattttttttttttgttcggtggaaaaataacaagaagatcacccatgaggccatgactatcattcagaaggagataatccagaggtgtgggaaaatcatccgaaatacaatacaaatacaaggagaataaaaaagggtcacaggttgtgaaaatcatgtaaaaaataacaattgaaaaagattctaaaaaaaatattattttttatgcaattttcaccttttctaaatcaaacataatccattggagaaccgggcactcaactaacattaagaactttttatattggcaaagtattcactggagatg

SEQ ID NO: 101288 - DNA, 330 bp, Glycine max
  unsure (1)..(330): unsure at all n locations
  Clone ID: PAT_MRT3847_62477C.1
aactcgctggcttactctagtgaggccggctgtgtaccatcctttttctccggaagaccttttgccggaatatctttattcgaagcgtggggtgcttcgccatcttggtgcgtggccacttttccttttcccttgacgtttgcnggttggactggtangtccggaggcgctaacacatgaccgctacgggtcacaccactcagtctcgggatatttggtactttagctgacaacgagctgacgtcngtngcttcttcttccttctccctcggacgtgtatatctccatganactgcgtngctattttngtatgggaaaggagcaggtcta

SEQ ID NO: 101289 - DNA, 1736 bp, Glycine max
  unsure (1)..(1736): unsure at all n locations
  Clone ID: PAT_MRT3847_62478C.1
ctaaacatcatatttngaataaggtgacgtaaagtttttaattttatttctaaagattttaaggttaataataaatatttaatttttttatcaataatattaaaacccaatactcactaaacaaaaatacccttaaaatatttttttaatcgagtcaactaaaatataatatagatcctcaattatcaattatagtgcgatgcaatttaatatatatatttttagtagaaatagttatttagcagacgaaaaaaataaagatatgatgcaagtggaagaaaaataccaaaactaggctgcaagcaagtaataattatcaaataaatggtcatcgtcagattttggagtattataatacggggaagttgatcattgatcaatagtcgataaaacgagacatatatcattttcgggtgtcctactcgtaggacataggacaaaatttgatgagtaaattaaagggtttttggcacaaccaaagatgacgcaattaaaaaactaatcttccttaattaatccacagcccgagatgatgagtgtgattagcgagacaaattaataatgagaggctttggggatataaaaaccaaggttacgacgaaatatcgataacagaacggagcacccaaagaggataacataacacccaaactaacttttctgggctacaaagtcatcaccctttctgtctcctttcttttttttttttttttttttacctctcttaattttattttattttttttctctctctctctctccaaacactccttttctgacacaccgtctacctatctgcacaaactttccttgtctttccctctcagttttgtcacttttcccccaaaactttcctccaaagctttcgattctctctctcgacccgcaccgatcatgcttcaaagcttggtcccccgatcccctcgcacttcaaaccccaacgctatgaaaactaagcgcgccgttgacgccggaggcgattcccccgccgacgaaccttccttcaagcggaccaacttctccggcgagaaaactacggccgaagctgaggaggagcaagccttcgatcccgagcctcacggcggcgattccaccggtctcaaactcctcggtctgctcctccaatgcgcggagtgcgtcgccatggacaacctcgacttcgccaacgacctcctcccggagatcgcggaactctcttcgccgtacgggacctcgccggagcgcgtcggtgcgtacttcgcccaggcgctgcaggcgcgcgtggtgagctcctgcatcggctcctactctccgctgaccgcgaaatcggtaaccctaactcagtcgcagaaaatcttcaacgcgttccaatcctacaactcggtgtcgccactggtgaagttctcgcacttcaccgcgaaccaggcgatcttccaggccttagacggcgaggatcgagtccacatcatcgacctcgacatcatgcaaggcctccaatggccaggattgtttcacatcctcgcctctcgctccaaaaaaatccgctccgtgagaatcaccggattcggatcctcctcggagctcctcgactccaccggccggagactcgccgattttgcgagctcgctcggtcttcccttcgagttcttccccgtggaaggcaaaatcggaagcgtgacggaactgagtcaactcggcgttcgacctaacgaggcaatcgtggtgcactggatgcaccactgcttatacnacataac

SEQ ID NO: 101290 - DNA, 164 bp, Glycine max
  Clone ID: PAT_MRT3847_62479C.1
tacggctgcaagaaaacaacaaaagggtcatactatagttaagacaataattatgagttatgtgtaatgaatgggtcaagtgcccacaaacacttatactattacctgttaactttctactgttagattcctgcagacctgaacctttcatctcaggtatattt

SEQ ID NO: 101291 - DNA, 241 bp, Glycine max
  Clone ID: PAT_MRT3847_6247C.1
catgaattctctatcactcttcagcttcgtatgagcaatttgaacgtaatccgtagtagtcacctgcgtggaatattattacatcgtcgggacggaaaccggagaatgctcactaccgaggcgtattcgtcggagcaggagttattcgtcacatcgaggagtctagtgtacgaagatgcttccaatctttaacataatcgagaagtatatcaccgagatgccggagtgggatactaattat

SEQ ID NO: 101292 - DNA, 473 bp, Glycine max
  Clone ID: PAT_MRT3847_62480C.1
gggcttgctcacataaagcacaaaaaaaaaaagctgtcttccttttgttcacccccctctgatatcacggcgacaagtcagttttctcaactttggtcctgcagacatcaccaccttgttaccttaatcctcacgaagtgtagttactagtgtcccattttcttccttttccattttggttaattctctggggttgctcatgagtattatggtgccttgaaggttttggcttcttggacatcctcagcttcatttgttttaagctacaaggttcttgctttttttggggttttggaggaattccattgcgtcctttgatgttgggggagtgaattgcagaaattggaggctaaggcaacagttagtggcatttctgggaaaaggggtgtgcttttttgttgattctgctccatgttattggacaactttgtgatggcaccaaaggggtttctgcatcttcttgtttgtttctg

SEQ ID NO: 101293 - DNA, 233 bp, Glycine max
  Clone ID: PAT_MRT3847_62481C.1
caacattattacggcatgtatgccagttatgggaacaatcacaggatctggagagctcggtgctttgaatctacattgctgggggctaactggtagaccaaactccaaggctgttgtaccctctggggaaattgtgaatgccgaagaagcctttgaattgcccaacattagagctgaaacctttgagctgcaacataaagaaggccttgccctggagaatggcagctgctatt

SEQ ID NO: 101294 - DNA, 460 bp, Glycine max
  Clone ID: PAT_MRT3847_62482C.1
aggaagcaaagccgaaaccaggtcggttcggtcggagaacgtgaaccctaaccctagtcccactcctccattgaagaaacggtggtcagacatatggacgaaatcgaaacccctaaaccaaatggtaatggcgatgaagctccactccctctcttcttctcctcgcatcagcaccaccgacaaaaccaaccctattctctccccattccccatcaccgatcgaacccttctcttatccgacgcacttctcctcaaaatcattgcactagtctccgattcctccactcagcgaaactcaaactctctggtctgcaagcggtggctcaacctccaaggccgcctcgtccgctccctcagaatctccgactggaacttcctactctccggcagactcatgcaccgcttccccaatctcaaccacgtcgatttgctctccgacgccttaatctcccccaaaaat

SEQ ID NO: 101295 - DNA, 359 bp, Glycine max
  unsure (1)..(359): unsure at all n locations
  Clone ID: PAT_MRT3847_62483C.1
ttcttttataaaacacatacatgatattaataaccactcgcattaaaggccaactaggcctaaggaggatccaccaaagtacataaaaacatatatcgtgtagtgccaccaaaaggggagcatgtgtataggacgggtaaaatagttttggaaagttagctagcgcattaaatcggcccaagggagatgatgaagatatagagaaaagcagcaatttgatgaacttcaagatcaagggcacttgggtcctccttcctagatcttccagccgangaagcaggggcacacaactttattaccataataccccgagggcacacacaggcatttgctagagcacttctgacagaaaaacatgc

SEQ ID NO: 101296 - DNA, 278 bp, Glycine max
  Clone ID: PAT_MRT3847_62484C.1
gggaaaataaaaatcaggcatacttttaattcattcctttggttttacatttctatgactttcaaaatgtttttatttggcccaaactcccggttggttaagtccaaaaacaaatttttactttgaaacttttaataacagggctttttacatgttgggggtttggttcactcataaatgggacccgaaattctgaaaataaatgtaatttccaaaaccaactccaattttaattcccatttgcacccccaacattggttctcccccaaaaattaaaa

SEQ ID NO: 101297 - DNA, 747 bp, Glycine max
  Clone ID: PAT_MRT3847_62485C.1
atgggtgtcctagtgtttggagctgtgatttacgaagtctgggcacacaacttggcttccccagctaaacccctcaagccccagggccctaatataggcttccctcctggggggccgggacaccaactctttcttaggtatgctggtatccagcctcaacacgtcgagcctacatcccaggggggcaagtatgagctactcgacatcagcagggtcacgctgaaagcgcgtgaccgtcggtcgctacgacatcttgttcaaccccctgggcgatgttttcaatatcggcaactgaaccagcgatcactaccaccgcccgtgggcatcctccctcagcgctatcgtggcgcagctgccgccgcgaccgccgggcgcagacctaccgctcaccctgaacacggcggtggccccctcggtgacgtcaaggccattaaagccaaagagatggaggcacggcagcacacggtgctcgacggcctagccgctgagacggagccggagctcgaccagttcatggaggcgtaccacgaggtgctggtgaagctcagggaggagctgacgaggctgctgcaggaggcaatgaagttcatgcagaagatggagctgcagctcagtctgctttccatctctggaaggtcgctgcacaacaccctttcgtccgaacgctggaggaagaagcgtcgcccccacgaacatctcgcagaggtgggagaagatggccgcctgaaggatggagtggagcgtaag

SEQ ID NO: 101298 - DNA, 342 bp, Glycine max
  Clone ID: PAT_MRT3847_62486C.1
ttccgggtcgccccacgctccgccccccgtccgtagaccccagagcctgggtgtggcttatgctcttgcaaccaagtcagggctgagcatctctggctcgctgaggaatcaattctggaactggatgattgaccgatgaagctttctcttcacattgtgtgagaaacagcgcgttactgcttcagccagattggccatagcctaggaggtaaatctgagttcagaacctgtggcaacgctgctgacattgacatactctcaatctattaagcaagatttgcaatagtgctctggatctggctccaggcaggactactatcgcgcaattggtaactagggatc

SEQ ID NO: 101299 - DNA, 365 bp, Glycine max
  unsure (1)..(365): unsure at all n locations
  Clone ID: PAT_MRT3847_62487C.1
gnntccggagctnggcctcggacatgcccatggatnannattcttccctnggtgaacaacttcaacncggccttctagtnctgnngncnttntagcatgtntgaaccctncatttnaacnacaaagntaaancaaggttgctggaaatgagncttgggagattagcaaatttgtttnattgncttaanaangattcaggtnggaaggtgaatttcgggctaacgcaaaaaaaggggggttttcaaatttcncagttggacaactcaaaaagttactcggaagtttgagaaccttttcccaacttactcgtgcccaaattcccaaagnaaaatgaggcttcccaaagttatatgcatttggcaagg

SEQ ID NO: 101300 - DNA, 275 bp, Glycine max
  Clone ID: PAT_MRT3847_62488C.1
tagcatgcatgctcatatatggatgctaatcgaggccatgccctcatgtgcttggcacgtgtttcactctttctcttcactctaaccctatacgctgtttacggaagctccactgtttaagacatttctagaaagttgaaactcggggacaacgagcttttgcgcacggagaaaaagttcaaggttttcatggagaattacgggaggagctactccacagaggaggagtattttcgccgtttggggattttttcccagaacatggttagagcggc

SEQ ID NO: 101301 - DNA, 341 bp, Glycine max
  Clone ID: PAT_MRT3847_62489C.1
aaaccgtccaagtctgatatttattacacatcactgggcaatactttttccgactttaataaacttgtgtccattcctggataaattcaagttactgataaattactctcatcccgaaatgttggcgccaccaaatatgttagcaccaccataaatgtaagctagaatttgcgattatagccaaaaaacagaccttaaatggcaatcctttgtctccaaaatgatggcattatgcggcaacaggcatcctacagcggccacttttacatattagacctcaataggttagatcctgattcgccaccacctatattactggtaccaccccccacacccctttc

SEQ ID NO: 101302 - DNA, 268 bp, Glycine max
  unsure (1)..(268): unsure at all n locations
  Clone ID: PAT_MRT3847_6248C.1
gaacctacttggaacctctggtgtatttgctgtgttgctgttctattaaactcttgcactcttgctttaaaactatttggttcgattggaaattcttctaccatggctacttcttatatgactgttctcgtcaattactagtgcttgctttaatgatatgaatgacggggggtcacccattgatcttatctctcaatctgttttttcncagaacatacaatagcctatccttcaactcttgcatatttaatagagtgaattcccaaaa

SEQ ID NO: 101303 - DNA, 364 bp, Glycine max
  Clone ID: PAT_MRT3847_62490C.1
cccacgcgtccgcccatgcgtccgttttttcatccggcaaatgaaggtgtttaagcgggcgatactgaatgggcactacggtattaccacttttcttataatcaacatattctatgttgttccttacaattttttgatgcctatcattgcggaagctgcggttacttatctttctggactacataaaagacgtaataacctttcattctttatctacgattatttgctaccgctacttgacttgacagccttatgatggttgatggagagcgttatacaaactatatcatagggcatgatcgtttgtagccgacttgcaacagtactgcttttaacaactgtatactattgacttccaaatgat

SEQ ID NO: 101304 - DNA, 433 bp, Glycine max
  Clone ID: PAT_MRT3847_62491C.1
aaaaaaaaaaagaaacttttttggaaaaaaaaccccctttttttatgggaggggggggggttttttttttttttacaagggtcccccccattggtggggggggaaccacattacctaatcccgttccccccgaaaagtaaaaaaaaaaaaaaccccccttttacccgggggactttttaatggttggaaaacgatttacccctaaggaggggggaccaatgtttattattggtttaggacccacggggaatttaccccttgggaaaaaatgggttcggaggaagggcttccaaaccaatatcccggcgaaagaagcccccaaaccaattaatttttttaaaagttgtataaagctcaaacacgtgccttttaaaaaacttttcccttggggggaaccccaaaaacccccccccctatggcaaaaaatttttct

SEQ ID NO: 101305 - DNA, 733 bp, Glycine max
  Clone ID: PAT_MRT3847_62492C.1
tggaaacataatactacaataatatatagggatcaaccacgattccataaagaagctcaaggttgtgttcttatctattgagaagaaggctacatgcagagacttgaacgctctcaagatcttggtgtatgttacatctgcgtctgctggttataatctgcttctattgtgcaaacactccatttggtctagaaaaaacttcaaagggtcttatctatgcatggcttggatttgtttcttgttggatcagatcgccgtgtacatgacatttgctgcaaacactgcagcaatgggagccgcgatgctagcaataactggatcagatgcctttcagtggctaaaggtatgtgacaaattcacaagattctgcgtccaaataggaggggctttgttatgcggctatgcagcgtccatcataatggctctaatatccactatctcagcctaccaagtgttcaggatgtactcgccaaagtggttcttgcgtttgaagaacatgtgatcattatctatcttttcagcaaggagcaaaaatatgaagaaaagctcgtcaaagggtagtatagttttgcctttgttctcaactgctattaggctgatgtattattttccttctcttttttacttgtgtgtttccccccgcctaaagtacttactctttgtccagtgaaagaaattaagcaaaaaagaaataacaaaaatagaatgaaaaaaaaattgtattatttttatc

SEQ ID NO: 101306 - DNA, 558 bp, Glycine max
  Clone ID: PAT_MRT3847_62493C.1
cgtccttttttttgtcgttccccttttgacccccttaacagtctgacaggaattattctttattgctattaaaaattcttacctactacaacatattaaaaatactttttgtatgggttgcggggagaaggagaaagcactagcattgatcatatttatcagctccgtagtttgtcgcactgactggtttcaatcgcaaagcgctgtttaaattccccacctgaactgaaactataagaagtattttttgaattctccatccttcttggatgtacagggtgggtgatttaagccggatacttttctaggtatcatgcataggatgcacccccccggaacgggcgggttgcagaattgcacggggccacaatgccccttggtgagagtcggtaggcaagcccgaccgtacgcctgcatgcggtacactgtacccacaaaaaatatacgacttagaacacccacccctcctgccccgtaccaaaagtgtatctgcgtatgaccaaatcttgtccatgtcggcaaggcctgctcacgccgcgtgcttgttggctcaatgtc

SEQ ID NO: 101307 - DNA, 983 bp, Glycine max
  Clone ID: PAT_MRT3847_62494C.1
caatgattttggaaacataatactacaataatatatagggatcaaccacgattccatagagaagacgacagaaggggagctcaaggtggagctaaaattaagagcccgggaaagaaaggatcaattcatctggtcgaaaaaaatgaagttgggaatggcgagaggggaagtttgtctaagggtctcagcaatactggttttggtattaacagcatgtttggttgctttagatacccaaaccaaggttgtgttcgtatctattgagaagaaggctacatacaaagacttgaacgctctcaagatcttggtgtatgttacatgtgcggctgctggttataatctgcttctattgtgcaaacactccatttggtctagaaaaaaacttcaaagggtcttatctatgcatggcttggatttgtttctcgttggatcagatcgctgtgtacatgacatttgctgcaaacactgcaacaatgggagccgcggtgctagcaatatctggatcagaggcctttcagtggctaaaggtatgtgacaaattcacaagattctgcgtcgaaataggaggagctttgttatgcggctatgcagcgtccatgttaatggctctaatatcaactatctcagcctacaaagtgttcaggatgtactcaccaaagtggttcttgcgtttgaagagcgcgtgatcattatctatctttcaagtcatgcttaatttgtattctgtgaagtttgcaacaaggagcaaaatatatatgaagaaaagctagtcaaagggtggtatatatagtttgcctttttttttgttctcaaatgctattaggctgatgtattttccttctcttttttacttgtgtgtagttttccctgcctaaagtacgtacttagtctttttccagtgaaagaaataagcaaaaaagaaataacaaaaatagaatgaaaaaaaaattgtattatttttatcaaaaaaaaaaaaaaaaaaa

SEQ ID NO: 101308 - DNA, 776 bp, Glycine max
  unsure (1)..(776): unsure at all n locations
  Clone ID: PAT_MRT3847_62495C.1
ccacgcgtccgtatgaagtcaatgattttggaaacataatactacaataatatatagggatcaaccacgattccataaagaagctcaaggtggagctaaaattaagagcaccggaaaaaaaggatcaattcatctgataaaaaaaatgaagttgcgaatggcgagaggggaagtttatctaagggtctcagcaatactggttttggtattaacagcatgtttggttgctttagatactcaaaccaaggttgtgttcttatctattgagaagaaggctacatgcagagacttgaacgctctcaagatcttggtgtatgttacatctgcgtctgctggttataatctgcttctattgtgcaaacactccatttggtctagaaaaaacttcaaagggtcttatctatgcatggcttggatttgtttcttgttggatcagatcgccgtgtacatgacatttgctgcaaacactgcagcaatgggagccgcgatgctagcaataactggatcagatgcctttcagtggctaaaggtatgtgacaaattcacaagattctgcgtccaaataggaggggctttgttatgcggctatgcagcgtccatcataatggctctaatatccactatctcagcctaccaagtgttcaggatgtactcgccaaagtggttcttgcgtttgaagaacatgtgatcattatctatcttttcagcaaggagcaaaaatatgaagaaaagctcgtcaaagggtagtatagttntgcctttgttctcaactgcta

SEQ ID NO: 101309 - DNA, 1887 bp, Glycine max
  Clone ID: PAT_MRT3847_62496C.1
cccgggtcgacccacgcgtcgcaacgagttcatctctcttctctccaggtatgttgctgggggcaaaggaatactacaaccacatgacctgctgtacgaggtagaaaagcttcttgaagaggatgaagggatgcagaaactcaaagatagcccttttgtcaaagagctagaatctgcaaaggaagcaatagttctgcctccttttgtgtctatagctttgcgtccaagacctggtgtttgggagtatgttcgtgttgatgcatttgaactcagtgtggataatctgagtgttgcagaatatctccgactcaaagaagaacttgtagatggacagtgcactgacaaatatgtgcttgaactagactttgagccatttaatgttacgctccctagaccaactcgatcatcctccattggtgacggggttcaatttctcaaccgacatctgtcatcgttcatgtttcgtagcaaagaaagtttggaacctctccttgcatttcttcgcacacacagatatgatggtcatgcaatgatgctaaatgaccgcatttataacttatccaagctccagtcttccttggcaaaggcagaagaattactttctagactactacccaatgcaccatattctgactttgaatatgaactacaaggattgggatttgagagaggttggggtgatacagcagagagggtgtcagaaatggtgcatcttctcctagaaatccttcaagctcctgatccaaacaccttagagtcatttctaggaagaattcctatggtgttcaatgtcgtagttgtatcaccccatggttactttggccaagcaaatatcctgggtttgcctgatactggaggacagcttgtttatatacttgatcaagtacgtgctttggaaaatgaaatgctgatcaaaattcaaaaacaaggacttgatgtgtctccaaaaattctaatcgttactagattgataccagaggcaaaagggacaacatgcaatcagagactggaaagagttagtggaactgcacactcatacatactgcgagtaccttttagaactaagaatgggattttgagaaaatggatttcaaggtttgacatgtggccttatctagagacatttgcagaggatgcatcacacgaaattgcgggtgagttacaaggaattccagatctgataattggcaactgcagtgatggaaatcttgttgcaaccttgttatcttataagctaggaatcacacagtgcaacatagctcatgccttggagaagactaagcatcctgattctgatatatattggaaaaaatatgaagacaagtaccattttacttgtcaattcacagctgaccttattgcaatgaacaatgcagattttataatcactagtacataccaagaaattgcaggaagcaagaataatgttggacaatatgagagctacactgccttcactcttccaggactgtatcgtgttgttcatggcattgatgtttttgatcccaagtttaatatcgtgtctcctggtgcggacatgtgcatatattttccatactcggacagagaaaggagactaacttctctacatggttcaattgaaaaactggtatatggtgctgaacagaatgaagagcacatgtgaggatttatcaataagataaatgtttgcatgatgagagcttgtgaatcttgtggtagttggtggctacattgatgtacagaagtctacggacatagaagaaatgagggagatagagaaaatgcacaatctcatagaagaatacaacttacatggccaattccgttggataaaggcccaaatgaatcgcgctcgtaatggagagctctaccgttatattgctgatgtgaaaggtgcttttgtgc

SEQ ID NO: 101310 - DNA, 357 bp, Glycine max
  Clone ID: PAT_MRT3847_62497C.1
agtaaaggagctttggtcctttaagaataccgtagttggcaaaagagaatgtgttacaattcaaagtatagataactgaatactgtaacctacatacaactctcccactaataatctttctaactagagtgatcacataagaacagaaacaaccataacaatctaattgccccaaacattcttttttgggtacaaaggaaagaaatcccaaaattggaagatgtggacaaaactgaaaacaaaaggcaggagcaaatactttcaaatgtaaccccaaaaatagacaaagaaaagcaaaacattaaggttgtcgatcttttcaacatttgggaagatcagagggtggaggtggcagct

SEQ ID NO: 101311 - DNA, 269 bp, Glycine max
  Clone ID: PAT_MRT3847_62498C.1
gattatgggtgccaccttgtggcatacaacacaagatggaggaccaaaatggtagtggtaagtcgagccaaaggctcttcagggtgaatccttaccttgctatattgttccttcagattggctactcaaggatggatatcatcactatggcttctttcaagcatggtatgagtgattggatactctcaatgtaccgccatgtacatgctgctattataatacaacatttcgcacttgtgcttgtaagcaataatagaccctatatgact

SEQ ID NO: 101312 - DNA, 270 bp, Glycine max
  unsure (1)..(270): unsure at all n locations
  Clone ID: PAT_MRT3847_62499C.1
cgtttacacatctctcnaacctttnantttcggttctcagttttattcgnntccctctgntcaatctcctttccaaatggccanccgttgnggttgcacagcaaacaccaacaacagttccagaaaatgaaacaaccgaggtaagcaagacccaggnaacaancccagtcactgaggctcctgcaacagancaaccagnagctgaggttcctgnaacagaanaaccngccgctgaggctcctgcnccagaatnanccacngaagcacnaa

SEQ ID NO: 101313 - DNA, 676 bp, Glycine max
  Clone ID: PAT_MRT3847_6249C.1
aagcttttctgatacaatatagagacattttataaaattttcataggagtgaagcaatggggtgattcattctgcagccaaaaagtcacttccatgttctataccatcaactcccagttgaaatggagctaatttcattcatctttattttatttctcagctagactgttgtatcttaaccacacattgaagatttctttactagtgggagaaagagagatcaagatttctttacacagaaacagtgaaaaaggaataagagcaaatgagctggaatagaaagcccaataaaagcatgagttcaaattattcagagcagtttcctattctacaaccaacaaactaccaatagcggccaacttgttctccctacaagtcaccagctatttttacatagaaactgtaaatgtaatatgtatataaacatccaagtaaatgagcaatcagaatatgaagtagcatgaaaaaaggaatgtgaagaaggttcataatcagtggagtttgccttttttgtctctagcagcttggatctgttctgcaagtgatacttctttctgcattttttctctcttgataagctctagatccaatttattgtgagttggaaaaatggaattaaagacgtcttgttctctaggtacttcaccattgaagttcttacttatatgaatcttag

SEQ ID NO: 101314 - DNA, 321 bp, Glycine max
  Clone ID: PAT_MRT3847_624C.1
ggaccggctatttctattctagctggtactgacgtaaggttatatgtgtagggtatggatgcatgttttaagatgcctgtaatagcacaattctttgtcttttgacagtgcttactgtgaactgtacttgcatgtatatatgtaaaataaagctaatgctaaaaataatggaacatgttgaaattgataaatttaatatagatacttttagtattcaaacaaaacacagagtggaagacattaatgtatttgtttgtttgggtctttgtggatggagattaattcaagctaagctttatgaataaactgacttttgaagga

SEQ ID NO: 101315 - DNA, 353 bp, Glycine max
  Clone ID: PAT_MRT3847_62500C.1
ggctcgaggtccacttgtgtccgtaaaagtttcttcataaaattacacactccaatggctagcaaacacagaaaactcttccctgatgaaacaacaacaaccacaaaccaaacccaagattgctatggcttttgtgaccctgcatgcccttacaattgttacaataaccctgattacttcttctctccaccaccaccttctatttcacattcaagccaagttaatcacatatcctcctacttgatcattctggttactctattcacggccattttggtggtggttggttctacgtgatcaaagtgaattgctatgctgcatggtgccggtggagattcacaacggttccgttc

SEQ ID NO: 101316 - DNA, 283 bp, Glycine max
  Clone ID: PAT_MRT3847_62501C.1
gggaaaaatcattttaaaaacttggcatatggacctgaaaaccttttttaccaaaaatttcccttggaaaaaaaactggacatttaaattggccatttacatttaaaccaccggttttaaaaaccctggaaaaaaacaaaaaatgggtttccaggatttttttggccctgagcccattttatttttttaaccaaaaaataaggggattttctagggtacccataaacacgttctaccccatattggctttaaaaaaaaggcatgggactccccacattttggg

SEQ ID NO: 101317 - DNA, 714 bp, Glycine max
  unsure (1)..(714): unsure at all n locations
  Clone ID: PAT_MRT3847_62502C.1
tcgacccagcgtccgggatttaggagnagtagtagccactataaacggagagagagagagagtgagagagagcgcgtagattactagattgtagtgtcactcaccaagtctaatagagaatagtgcacaacagtccggtgaagtgactggcacatagagagacttaaaagaagtaaggggaaccccacttttccattctgactttcctgttttttaccctttattcactgtacttacacagtacattttatgtcggtttgtgtgtgtgtgtgagagagagtgagataagggtcttaatttctttcatcagtttcagaaaagaaagaaaaaaatgagaagaagaagaagaaacatgaaggaaaatctcccttcttactagttctggtttttgtatatctggtttgtgaggttgaggaaaatcttaaaatcctctcagaattttttcccttgctgggaaaaggaaaagaaaaagattatctttgcttgccctttgttttcatttttgtttttggaaatagtgcttttactgctttgccagatttgggtggatgtgagatcttcaatggggggggcctttctgactcttatgaaggccatgactactctttgctacttctttaacacgggtttctcttccgtggatttctgcttcggactctttactcttttttggtttgggttttcttttcaatnttctttcggttggtatttttt

SEQ ID NO: 101318 - DNA, 604 bp, Glycine max
  Clone ID: PAT_MRT3847_62503C.1
ccacgcgttcgtttatttttggttaaataatacggagttaggatactgaaaaaatcttcgctggtatccatcatgcaagagtgcaagtacaatgtagccccaagggatgtaaattattattctcaagggcccaaaaagaattataaaaaaaaacggtttcacaatatgttatttaacaaaaattactatgatatgaacaatgatatataaaacgccaatggggggattatattacacgcatgcaggcaatactttactcgctggaatctgctaagcctaccattttgagcatgtggcgatcttgcttgaacctgtgcaaaatagggccctagacagcatcatacttgtgttgtgacggatactgagtgactccccagcattgtataacttctggtgatatacagttaggcttggagaggcacaggttaccaaacgtggttcacgagcatgtgtgatcttgaacacagtgtgctgatatgaacaaacccaagatgatcactacgtccccagaaccaatgccattgggaacgtcctctgaactgaagctgatagcgccccattgaaggatattgaacagctccaggggcctgaatatacatgccac

SEQ ID NO: 101319 - DNA, 725 bp, Glycine max
  Clone ID: PAT_MRT3847_62504C.1
tgctcgagccttcaaactgagagccgagaaaccttcatctgaaatgtggaaggttgcaggtttaactattgtctctgtaatatgcttcacatcaagttcctgtgtagaacttttaaccgacatccctatgcagtataactggcatcagcggcgtctgaatgatgtttactcctctcttttactcattttgtattattttgtgggttcatcaataccttcagcagtggtactgtgggtaatgagagaattaccacctgaagaagctgctagcatacccgaagaatcaagtacaatagcttttgttgctgatagttcaattgcaatccatcatcctcaacgctgggctacagcaacaagcatgcagaatcagacatcaagagcgagtcctatatgattatgcattaacctttgcaaatatatcttggtctgctggagtttggacagcttaatggaatttcctcaggatgtttaaccctagagcgcagaagagagaaaatgataatgatggatgcaagttctcaagggacttgaggtttcccttcccactgtatttacaatctaaatctaaatgtatatagcagcaatttgatatatgaaaagttcttttccttctatacaaattttggtacactactgtttcaatgctggttgggtatttttctgagtttgaatgattcccttctgatgtgaatatgactgttgccaagtgaaaaaaaaaaaaaaaa

SEQ ID NO: 101320 - DNA, 501 bp, Glycine max
  Clone ID: PAT_MRT3847_62505C.1
cgctcgagccgttcagcattggtactgtgggtaatgagagaattaccacctgaagaagctgctagcatatctgaagaatcaagtacaatagcttttgttgctgatagttcaattgcaatccatcatcctcaacgctggactacagcaacaagcatgcagaatcagaaaattattttttaatatgaacatggaatgcttaactttgacaggcagcactttaagattcacattcatattgttcctacaagtgtcatcgtacaagacatcaagagcgagtcctatatgattatgcgttaacatttgcaaatatatcttgttctgctggagtttggacggcttaatgaaattttctcagaatgtttaaaccctagagtgcagatgggagaaaatgatgatgatgatggatgcaagtgcttatggaggtttcccttccaactgtatttacaatctaaatctaaatgtatatagcagcaatttgatatatgaaaaattcttttcttt

SEQ ID NO: 101321 - DNA, 1147 bp, Glycine max
  Clone ID: PAT_MRT3847_62506C.1
acggctgcgagaagacgacagaaggggaaagaagggcacaaccaacataaggcatggccttatcctctccctccctcttttcagctgtaaacgccacatattcagtaccccatttccatgcactgccactttcactttcttcttcttactttccaattaatgttagaccctccacccatcatgtccttgtctctgatcataatcacaaatggagaacaaaagtttcatttttcacttccttcttgaagcagaaaggtaaagatgccaagatcatcaaggaagaactccttgaggccattgcaccacttgatcgaggggctgatgccactccccaagaccagcaaacagttgatcagattgcgcgcgaacttgaggcagttactccaataaaggagcccctcaaatctaacctactcgatggaaaatgggagcttatatacactacctcgcagtcaatcttacaaaccaagagaccaaagttgttgagatcagttgcaaattatcaagcaatcaatgtcgatactctaagggcccaaaatatggaatcttggccattcttcaaccaggtgacagcagatttaacacctttaaatccaaggaaagtagctgtaaaatttgatactttcaaaattggaggcattatacctattaaagcacctggaagagctcgtggggaactggaaataacatatttggacgaagaactgcggttatcaagaggtgataaaggaaacttgttcatcttgaaaatggtggatccgtcttacagggttcctatatgatggcattgtcagcattgcaatgcagtacttgtgttcttcctctctagggattcaaactaccatcatagctcactgaaaatacacgttggagcttatactagcactgcactattattcaagttgacttgaagcattttgggaccgttcttccagacttccagtacaaaagataaactgaaatagtataatcttaatctctgtaatgagttctactctttatctcctcaaggtcggtgaataaaataaaaaaaaataatcattaatattaatgagggcgagtcctggtgcagcggtaaagttgtgccttggtgacttgtgacaattatgtgagcttatcaattttttccctacttatttcgttaatc

SEQ ID NO: 101322 - DNA, 540 bp, Glycine max
  Clone ID: PAT_MRT3847_62507C.1
ttttttttttttttaccacaatgtccaatcttatttcaagtagttgtcaatttacggcaatatatataactaacaaatatgtgtgggaaatgtcaagacaggaaaaaaaatactacccctacaaagaaccctttatgcataaatgtaatgaaattcaccaataatctttacatgagcaagttccatctttgaaatggtggaagcgattacggtctctcacagtaatttcccgttcatagatcacggaaatgaacttagtgtaagtatgacagtcattacacatcctaagatttcttgatattcttatgggagatccctccgatgtctgtattagtgcaaaagcaattgccaacttctgactatgatgtttcagtctctgcctcttttcatcttcatccacatcaagcaacacctgtgacatgtctggtgtatagccttcaaatttcaactgccattccatttgttgaatcatatcatagatggtttcacatattggttgagacttgtcctgcgaaacaaacttgtatacattcctatttg

SEQ ID NO: 101323 - DNA, 180 bp, Glycine max
  Clone ID: PAT_MRT3847_62508C.1
cacacgccaccgaaaagtaaacgctggtattacaagagcatccaaaccgcatatggaaatgggagagtttatgacacgttactcactgcttacctaggttcatggatcatgaacagacttcttgactattgatatgctggtcctacctctattcgctctcacccaagatgcaagcgtgat

SEQ ID NO: 101324 - DNA, 368 bp, Glycine max
  unsure (1)..(368): unsure at all n locations
  Clone ID: PAT_MRT3847_62509C.1
gacccacgcgtcagggggatttttgactttcaagtttcaatagtctcccactcttcttcgagcgggaactcaacattttcctttcctctctctgcatgtctctgcaattctagggtttcaatttcgctctccccttcgaaattcgcagttgtgtaaccgacgccatgagtctgcgccacggctccaaggtttggcttgaggaccgcgattcggcttggctcgccgccgaagtgctcgattccgacggtaaccgcctcttgctcgtcaccgattccggcaagaaagtttatgcttcgccggagaagctgcttccganggatgcggatgaagaggagcatggaggattcgaagatatgacgaagctggcg

SEQ ID NO: 101325 - DNA, 183 bp, Glycine max
  unsure (1)..(183): unsure at all n locations
  Clone ID: PAT_MRT3847_6250C.1
tctcccttcgagcacggtgaggtttnnntnctcgnacnacggcggnnaggttgatttngattgggaaattacgagcgcttcctcgatgtcacgcttaaccanaanannaacancatcactactggaataatttacccagnctgttcttnngaaggaacgnaaaaggngtttatntcgggnaaa

SEQ ID NO: 101326 - DNA, 140 bp, Glycine max
  Clone ID: PAT_MRT3847_62510C.1
tccacgcgtgagagaacacataaggcgacccctgtcgtacggatatgaccacacgacgggacagcgtcgccaatcataatagagagtttacagagtaactgcgtttaaggttacagagatttgtcaatgatgaattttag

SEQ ID NO: 101327 - DNA, 235 bp, Glycine max
  Clone ID: PAT_MRT3847_62511C.1
gacgcctggcggctaccggctccgggaattcccgggctcgacccacgcgctccgccccaaagccttgagggctcgtcaaactccagtgcgcctctctctatctcttctcttctctctctttcattacctagtatctaataaccgccaccattacgatattctcaatgcacagacttgcggctaccacgctagatatatatgcacttccggagatagagctaccgtagcgctagtt

SEQ ID NO: 101328 - DNA, 171 bp, Glycine max
  Clone ID: PAT_MRT3847_62512C.1
ttcacgcgtgagaagacgtcagaaagggatacatattggacgcacaacaggagtatcctgttagtatggcactcccttgtaaaagcacgaaagatgagggccatgtaagacctccgtaggaccgaaagcttcctgtaccctaacgtaaacggatacctaaaccgttctttt

SEQ ID NO: 101329 - DNA, 318 bp, Glycine max
  Clone ID: PAT_MRT3847_62513C.1
gcattcgaacaagtccattattttagtctcaatgaataaaatgtagatttgttacggggtttcaatcaaaaaattacatgttaatcttccatagcacctcctgtaattatattgggaatccataacattgcccaatatataatcaaaacagggtgtcctaaaaccacaaaattttattatcaatcaacgggaagatacttcatctccgggagaagacagtcactcttgtctttttcgtttccttgaatcatcatgttggatgcgaaaatctgggtgttttttggacaatagtggattggaaaatgggatatcctccaa

SEQ ID NO: 101330 - DNA, 433 bp, Glycine max
  Clone ID: PAT_MRT3847_62514C.1
aaattaagacatttattaacaagtgcttgcactttgttaactttttgaaaaaagtcattataaaattttattacatattaaaaatgttcttaaaaatctcaacttagactggatataaaacatttaaaaatctttaaaggcatattcagtgaaaccaagcctccattcatggcatttaaaaaaataattagtgagcaggaattggtttattttccaactttcccactgatcttcaaatacgtcacttttgttcaaataatgcaaggtttctaacagtccaattgtaaagatttttactaaagtggatttgaaatttagcctctaatctattgagaatgatgaggattttgctggacaaagatgactaataattatcaggaactgcaacagctaggctgatgcaattggcagggggatccactagttctagagc

SEQ ID NO: 101331 - DNA, 335 bp, Glycine max
  Clone ID: PAT_MRT3847_62515C.1
atagattctcaactaatgagaacactctcacccttggttcccactcttctcaaaccctaattcctcatcttgagcatgatagaaatcttgcacatcgaaggagggcagtgcgggaaccagattggagcgaagttctgggaggtgatatgctacgagcactgcatcgaccataccggaaagtatagtggcgactctgaactccatttgggacgcatcaatgtttagtacaaggatgcgattggcggaaggataattccacgctccgtcctcattgatctagaccccggaaccatggactccgtcagatccggcccctacggccatatcttccgctc

SEQ ID NO: 101332 - DNA, 355 bp, Glycine max
  Clone ID: PAT_MRT3847_62516C.1
atcgttggctaggaaaccagggtaaacatgacaggagtagaactggtccagccttctgagggtaaattccctgttaaacatgtgatcacggtatcactaaactatggacaaataggtccgtaaatatgtcaaaagtttgttctctgaaaataagtttttttctttctttctttggttgaatgcattcaaatagtgagatttgaatgggtctgaagaactgaaggattgttgattgattaaagagtatatgcctttccccatagctttgctcctagaaaaccacagatgaatggtctacttgaagtgctgctgagcatttatgtatcaactttgcatcgatgctttggaattgtac

SEQ ID NO: 101333 - DNA, 534 bp, Glycine max
  Clone ID: PAT_MRT3847_62517C.1
tgctaattcagcaaaatctgttccagttagcccagctattaaaaagcaggcggaagcgattcaacagagggttagcattgtagtgtcagagcttctgtcccagctgcaagattggaacaacagacgacaatttacatcccctactgacttccatgctgatggggtgaatgacttatttatctcacaggctgttatggaaaatacacaagcaaatgaaattttgaagcaggctgctttcttgataccatttactagcagggttaaaattgtgacttctcaactagctgctgcaaggcaaagacatgggtctcaggctgtttatactagaaaccgggtcagaatacggcggagtcatattttggaagatgcttataatcaaatgagtcagttgtcagaagatgaccttcgaggattgattcgtgtggctcttgtcaatgaattgtgagttgaagaggctggaatagatggaggtggaatattcaaagaatttatggagaacatcacacgtgctgcccttgatggcagtatggatta

SEQ ID NO: 101334 - DNA, 2361 bp, Glycine max
  Clone ID: PAT_MRT3847_62518C.1
tgtcgtccggtttctggctcctgtggaaacttataaggaccgtattgcatctgcacttgaaacacttagaccaacaacttcatgggagagaaccacgacagcaggtcaagggctggatggtgttctgataggtgggcgtggttttgggatggcaatggaagctctctgcaattaccttggttctgaatatgggaacacttttgctttagctagagtctttgccttcttgtctggtccccctgattatggagctggacaattggacacgagacgatatggtgaacaatatgcaagcaaaggagaggatgcagatcgtgctttactcccagagcagacacccttttataaagatctggctgctgttgctgttcaagcaggtgtatgtgttgacatatttgccgtaacaaatgagtacactgatttggcatccctccattctctgagtgcgattgataaccagtggcggttccttatttttccttgatgcatacacaatactgatagtgttttattcttcattcattgagtcgaccagcactgattaccagtggcagtccgatatttttccttgatgcattcacaagttctgattgtgttttattcttcgactgcagacccgacacttccttttcctccaccccatgattgtttgttaaggactacaatcaacaaattgaagcaagagagatgcatcactcccaagctcatttttattcgaggagggcatgatgatgcctcaatttttgagaactttctgatcgaagagcaggatgttgatggaagtggtcttaccagtgtgatgggttttgtttctttccttgaagatattacacagaaagttttggaattcatgaaatagggatcccttttgggtacaatttctacttacagatacaggaattatatacattataggtgcttccattttgtaaggatgggttctagttcgttcagaaccaaccatggagtcaagcttttggttggttgcctttgttgtacctgttttatgtcatttatacccttttttttgaagtgctagttaatgtacattataatactatctttatttacactggctgatcttctagatttacgttaatggagaaatggattatattaatgtgcattttcaagaagtaaatcagatgttcctacaattcagattgcattccagtactcagttgtagttcctcctcaggaactttctgattctaattcaggaggggtttctacaaatagaaccaagcactcccttcagcgtcggctaaggatccgaacattgcaatttggtgttgctcagaacattcatgaactttatgatagctgtgatcccgaagttgttctatctttgcttgttcacaaggttatattagcctctttggaggaaggagttagggagggtagaattttgcttcaagaatggctagtgatcctgacagctcagtacaatgatgcatataagcttattcagtatgataatggaagttccataagatctcagattgatgttgcattctctcaatgtcctcaattgcagcccctaccacgcctaatttttgctctccttcgaaatcctcttctccgctttcatgaagagggtgttcatcctgaccatcgcatctatcttcaatgccttttcagcatgttggaacccagttcccttcatcgtgctgtgtatcccgtgttgacatcatatgctactccagataaacaagcatatcctcgccattctttgagccgtgcagcattgattaccagtggcagtccgatatttttccttgatgcattcacaattctgatagtgttttattcttcgacagcagacccgacgcttccttttcctccaccccatgattgtttgttaaggactacaatcaacaaattgaagcaggagagatgcatcactcccaagctgatttttattcgaggagggcatgatgatgcctcaatttttgagaactttctgatcgaagagcaggatgttgatggaagtggtcttaccagtgttatgggttttgtttccttccttgaagatactacacagaaagttttagaattcatgaaatagggatcccttttgggtactatgtctacttacagatacaggagttatatacattataggtacttccattttgtaaggatgagttctagttcgtttagaaccaaccatggagtcaagctggtggttggttgcctttgttgtacctgttttatatcatttataccctttttttgaagtgctagttaatgtacgttataacactctatttattgacactggcaaattttctagatttacgttaatggagaaatggattatattgttcagcaataaaaaaaaaagaaatggattatatt

SEQ ID NO: 101335 - DNA, 335 bp, Glycine max
  unsure (1)..(335): unsure at all n locations
  Clone ID: PAT_MRT3847_62519C.1
acaaaggcagangagggaacaaaggagggaaacacatttttttttgnngnggcaggccaaagccggacagagggacaaaggtgggggagnngggcaaggcaangaaaggggggccaacgggaagaagaaacgcgggtgtggttgctgtccaaaacactggtgcaactaggagaggggggtgccaaaggggtgaggggaggtgggttgggcacagcagatgggggggtgatggggtgatggagattggctggtgatggaggacctgattgctcaggggctgggggcatggagggggggccgctggtggttgggggcgctggtgggatggggggggg

SEQ ID NO: 101336 - DNA, 362 bp, Glycine max
  Clone ID: PAT_MRT3847_6251C.1
aaacacattaaaatatttttcttggggttttatatcacaacaatattattttttttcccagtaagggaacctaggataataagggtgtgctttattattctaatacatgtctcaaacttattttataggaaatacactatttttttttccgcctgggtgacctgcggcatttgaaattctttaaggaaccatgcgggcattactaccttataggcaaacacacatttgaagggtataaacaatttaatttcaatctgaaacaaaatctatcttgatgcccctgatggtaactcgccctttcccctacttgggaaccaatgtttctagaacaccatcatcatcttttgggcccaaatgttcca

SEQ ID NO: 101337 - DNA, 615 bp, Glycine max
  unsure (1)..(615): unsure at all n locations
  Clone ID: PAT_MRT3847_62520C.1
attctcttatgtgagcaccatatctcatcatacgttgctgatccgaacaatataaataaaaagtacaagagaaagttttagtgtgttgaagctcaaatgttcctgtaaagtgggaatcaaggatatgtagctaagttccgaatgacaactgaggatgcatgacctaattgcatacataaattcaggtcaagaaaggaggcaggcattcgatcaaagaaaggttgagccacagtctaatggaatgtagaaataaattggttggctccatgcaacctgttattcaatgtatcacattcatgtatttaaagtaattggctcttaagttcacccacagtccatgtaatttaaatttgttctctaccaccaccctagctcattaactaaagtaatattaacattaacactaccgatatatatgtattgtcctgagtaaaatggactttaattctttcagcatagggtattggcttaattttgaaatttatgtggatgaaaaatacctattgagagaccagtcatttactggnatgactttacccaggtatacattacctactcctttgacggttaatatacttaatttcacagtttctcttatcataaaaaattgaaata

SEQ ID NO: 101338 - DNA, 770 bp, Glycine max
  unsure (1)..(770): unsure at all n locations
  Clone ID: PAT_MRT3847_62521C.1
gacccacgcgnncgnggnatgtgaatgctcttcaaggcatgccctcccacctccccatataatcctcatgcagcaaggtttgagccaagtattcctcctcaacatggcaacagccacctagttgccacagctccttctgccccaagttccacttatgacaatcaagtacgaatttttctaatagaatatataatatgttattttcatgagtatatctctttttgggagcaatatcctttaggaatttacttatgaattgcatgaaattgtgtgagtatatttgtttcttatttcatttattaagattttagaaattagattactcatgtatcacttatccacatttttttttattagagttccttttattgattagttgataataaaagaaaatggacaagattcaaggcaaggctaggttaaccagtatgttagcacttaatatatcatatgctgattatggtagcaggcagtaggtgtaccatcattaataggtattgtaaagtagctgccgaatttaaaatatttggaatgctacatattctagctggttctcttttttgtctattaaaatggtaataaggataagttacgccaacaccaacataaaggcacccgaactatttcatgttttcttgctcaccttatttttaaaatcttttaaataaaagaattgattcaacatataaatgaatttttgtataaaacttgcttggatgatatgtattttgagaaatcaatttatttgtaaaaataaatgggtacttttt

SEQ ID NO: 101339 - DNA, 560 bp, Glycine max
  Clone ID: PAT_MRT3847_62522C.1
ggcagtaacccgcttgaataagggtacaagcaggttgatcatttcaacccactccttatcaatggcacttggtgctcacacagagtatatatcaaagtagaagagaagcaagatgtatcataaataagtgcagcatctagtattagcactctagttaatgattgaatgcaataccctagactaaattcttatgaaagcattttcatcggctactcctaaaaaagaagtgtcattagccgcaagaagaaaaataaaaagaaattacaaaattttatcaagtggttgtaattctctaggtagaccatcaaaatgtcccgcatctatgtcggattttagcataggtcgcttccctgctttccagacaatgccctttgctaagtgttccttgctttgcgtgagcattacataattgggatcagctctttgataactggcttccctgagactctcactttggatgccaaatccgtattgcattttaccatcagcacgatccgtggtggctgaaatgctgaaagtgaaagaggtttccaccatgacttgaatgctaatgccattga

SEQ ID NO: 101340 - DNA, 459 bp, Glycine max
  Clone ID: PAT_MRT3847_62523C.1
ggggcatggaatttttcatttaaacacacacttttcccacaaaccacgaaagtgcatgagttttgcataagctacgttaagaaaagagaagtcatgaatgccgaagcatgatcatggactaatctatttcttgccggccttctgagcggccttggtgaccttgccagcgccagccttgtcggacttctcgacggacttgatgacaccgacggcaacggtctggcgcatgtcacggacggggaaacgtccgagaggggggtagtcggtgaaggcctcaacgcacatgggcttggagggaaccatcttgacgatggcggcgtcaccagacttgatgaacttggggccagactcgatggacttgccggaacggcgggcgatcttctcgaggagctcagagaacttgcaggcaatgtgagcagtgtggcaatcgaggacgggcgcgtatccggggccaacctg

SEQ ID NO: 101341 - DNA, 714 bp, Glycine max
  unsure (1)..(714): unsure at all n locations
  Clone ID: PAT_MRT3847_62524C.1
gccactgaaacatttaattaattagaagagtatttgcaaacgccaaataagaaatgggagagttatgtttactcaaagaaataggtttccaccggcacacagttagattaattatttgaaaaacatgacaaagaaataaggagaacggatttccctagccaatacctctagagggagtaaaatcttccaaagccttggcattccataaaactttcatggacccaaatattctctggaatgcccacatcatgcaaggtatcacggactaaatcctcataagctttctcaaagtcaattttgatcgtcatccatcctttcctctccttcttgcttctcatagagtagaaaatctctcaagtcacaataatattgtcaccactttgacgaccaaacatataagcataacaggtccctcctcctcacctaatgcaggtgaacatatattctgacttagatacaaaagaatccacatgaccaattgtgtttatgatggaccatgtacatgatgagaatcaaatagaaatcatcgcggtaattaatggagaatttggacagatcatattcaaccctcaataanaatataatgaatgaaatgagacaagagaatgagaggacacacctcaagatgtggggcatcattttccttggacatcacccatggcattcctggtccccacccaacagccattcttgcagttgaagcccattttacgt

SEQ ID NO: 101342 - DNA, 585 bp, Glycine max
  Clone ID: PAT_MRT3847_62525C.1
ggcaaccttccctacttgaattatctttacctcattgacacaaacttcttcggcgcaatcccctcttccatcgctaatctcaccaacctcaattatctcaacatcacatacaccaatgtctctggcacaataccagatttcttgtcccatatcaaaaccctagtcagcattgacttctcttacaacaacctctccggcaacctccctgcctcgctctcctcgctccccaacctcggcgaaatgatcttcaccggcaaccgaatctccggcgccatccccgactccttcggctccttctccgaggagctcatattgatgaggctctcccgcaaccgcctcaccgggaagattccggcgacgctggcgaagctgaatctgcggttcttggacttgtctcggaacatgctggagggtgacgcgtccgtgctgtttgggtcggagaaagacacggtgcaataaatcctggggaagaccaatcttgcttttgaccctggggaaggtggagttttcaaaaaaatgggccctcttggaacttagggcttacccggatctatggaaacgttaccccaaggacttaccggcctt

SEQ ID NO: 101343 - DNA, 502 bp, Glycine max
  Clone ID: PAT_MRT3847_62526C.1
tattccttacgaccttctcggttctgccgactcggaagatgctgtgggacgggtctactgcgcctcaccatagcaggggaatggaccctctcgggaataaaggcgccacgcaattatggctctggccaccgaaggggccagttactttggaggccaccttgtggaccgtctgcttggaagaggccacatcttgatccaccataataatttcttcacgggacggaaatagcacatgcttcaccacagggggaaccctgactaaaagcacattccgcacgactatggttaacccatccttctggagggtgaccagatctaccactaggcttgccccgcttcccctgtccattacaagttcaaaaacgggtggaccatccagacaaaggtctggggcacgctcaacatagttgggatggcatacaggcatgtgcccgctttctgattagtggcccaatgaaggctacggtgaatcacttctacaccctaaggctgtgacctactg

SEQ ID NO: 101344 - DNA, 395 bp, Glycine max
  Clone ID: PAT_MRT3847_62527C.1
cctcgagccgaatcggctcgagataaccttctttgttcaccaatgactatagttcttagtgtataagttgttccttcttaatcaggtctctaatgttactaccaacctgcaatctattaaacttcatgcttaatgcagtcagagacacattcaaattcaagttttaaacttctctatcaagttcatctcttgcaccatcgaactagacatgtgcaaggacttcctattgagagcatcaaccactacattgactttccctacgtggttctttaactcgaaatcataattcttgagaaactctatccaccttttttgtttgatattcaatccctctggtcaaacaaatatttaaggcttttatggtccctgaaaacctcaaattttgcaccataaaa

SEQ ID NO: 101345 - DNA, 596 bp, Glycine max
  Clone ID: PAT_MRT3847_62528C.1
tccgcccattgaaagtttgggggacttatcatttttgaggtacttaagcttcagaagtcacaagatagtccatcttccaaaattaattggtgagctgcacaacctagaaacattggatctaagagaaacttatgtgcgtgtgatgccaagggagatctacaagcttaaaaagttaagacaccttctgagagattttgaagggtttgaaatggatggtggcattggagatctaacatccctacaaacactacgtagagtgaacatcagccataatacagaagaagtagtaaaagggttggaaaaacttacacaattaagggtgttgggcttgacacaagttgagccaagattcaaaagttttctgtgctccttgataaacaagatgcaacacctggagaagttatatattactgcaagtcatagtgggaacatggatttgcattttgatgtatttgcacctgtacttcagaaggttcgtcttatggggcggttaaagaagttcccaaactgggttgccaagctccaaaatcttgttacgttgtccttgtcattcaccgagttgacacatgatccattgccactacttaaagatctac

SEQ ID NO: 101346 - DNA, 873 bp, Glycine max
  Clone ID: PAT_MRT3847_62529C.1
ccataggaaaccccatttgactactaacaccttggaaaagaaaaacaaattcattgagaacataattgattaacagtacttgttagttaggttaagtcctagttttcttacaagctttagggttttgctagctccctatgctggccattagacactctccacatattcctaattacacacatttggcaaaattgtaacctaaaaaggcctccttagttatgtaagtagcttcatcaagaccaactagagtgaaaacaggttatattctcttcaccatgtttatggattaaccggcaattgcttgttgtgtatgggacgtcgtcttctcactcgggtataatccatagtaaagtattgtgaagggtcatccacctccatccattcttgtcttgttccctttttgccaagcaccatgttttgctttctatgatattgcttccctgcagcagcaaaggaattctcctgtttgtgtgatgcaagatctctggctccgtcatcttcttcaaccttctcagtaaatcttagctttctaggaactgttgggagagaaagctgcaggtttgtattgactcctatattatcatcttcaagctggagtgaaggttccaattgaatttgggaagaagaacaagttggtattagataagagaaggaaaaactaagaagagtgatgatgattatcagctccattaatttcttttcttcagagggtattgcacaagaagatactttcttcagctgaaggtaggttaagcttatatacaaacctaagaaggaaacctcacactaacaagggcatgagagagagagcgagcaaacacaaagcacaaaattcagcggacgcgtgggtcgacccgggaggtccggaccggt

SEQ ID NO: 101347 - DNA, 1731 bp, Glycine max
  Clone ID: PAT_MRT3847_6252C.1
ggagaaggcaacaggacaggagtatgcctgtaaatatattgcaaagaggaagctcgtcaccgatgatgatgtcgaggatgtgagaagagaaattcagataatgcaccacttggctgggcatcctaatgttatatccatcaagggtgcatatgaggatgccatggctgtccacgttgtgatggaactatgtgcaggtggagagcttttcgataggattattcagcgtgggcattataccgagagacaggcagcggagcttactaggactatagttggggttgtggaagcttgccattgcgttgtggaagcttgccattctcttggtgtgatgcacagagaccttaaacctgagaattttctctttgtcaatcagcacgaggattcccttctcaaaaccattgactttggattatctgtcttctttaagccagctttgttcaagttgaagaagtaatttgattccatggagaaaaaccgatgatctttcacttccaggtgatatatttaatgatgtggtgggcagcccatactatgttgccccggatgttttgcgaaagcgttatggtcctgaggcagatgtttggagtgctggtgttatcctttacattcttttgagtggagtacctccattttgggctgaaaacgaacaaggaatatttgaacaagttctgcgtggtgatcttgacttttcttctgatccctggccttcaatttctgaaagtgcaaaagatttagtaagaaaaatgcttgttcgcgaccctagaaggcggttgactgcacatcaagtattatgtcatccttggattcaagttgatggtgtagctcctgacaagccacttgattctgccgtattaagtcgcttgaagcaattttctgctatgaacaagctcaaaaaaatggcccttataattattgcagagagcttatctgaagaagaaatagctggcttaaaagaaatgttcaagatgatagatgcagataacagtggtcaaatcacttttgaagaacttaaagctggtttgaaaagagtcggcgctaatcttaaggagtctgaaatttatgatttaatgcaagcagctgatgttgataacagtgggacaattgattacggcgagttccttgctgcaacgttgcaccgcaacaaaattgaaagagaagataatctatttgcagccttttcttactttgataaagatggaagtggctatattactcaggaagaacttcaacaggcttgtgatgagtttggcataaaagatgtccgtttggaagagataatcaaggaaattgatgaagataatgatggacgcatagattacaatgagtttgtggctatgatgcagaaaggaaatcttccagcggttggtaagaagggcctagaaaatagcttcagcattaaattcagggaagcattaaaattgtagtgttcattgtcagcattgagatttttttttttgtgttctttattaccacacatccctccttttcactttgaaggttcaagattttttattcatagtgcaaagtgtttgcatggggatttaggtgggccttttcatctctgcagttattttgtttgcgtccaatttaaatggatttttgtaattacgagaatatattgaaaagagatatctggtggagtattactgttagaaaggaaattgattatttgtcaatggaattgacacataataatgccaacgcctgttattatggtttcacaaaacttac

SEQ ID NO: 101348 - DNA, 1132 bp, Glycine max
  Clone ID: PAT_MRT3847_62530C.1
atcacggttaaggagctcactagttgtgtgaggtggtcaatagaggagacgaagactaaaaggtcatcaaataagctacttaacctaatacaagttgcttggatgtaagtcagactaaaagtcctgattcaattttaagtttgaggaaatagtttatttaaactgattgcccattgaactagacctgattttgagtggattcaagttgttgctgacagctgactcatgttgagaccagggtgagagaacattaatgggatagaagctaactatagaacaatatttgcctcaaaacaagtcatttggatgagaattacttcaacatatatggcatactgtatagtatatgatggcattcattggaattattgaatgcaaatagttaggactctgtaattaagttaataaaggcaacactactgacgtctctggatacaatgatgcaggccatgttgcttaatttagttcttgtttcctttgtcctcttgagttctatcagagatgggagtgcagggatcaccagctctttcgttcggccacagtggccaggagttgacattcccgtggatcatgaagtatttgcagttccaaagggttataatgcacctcaacaagtgcacatcacgcaaggtgactatgatggaaaagcagtaatagtctcatgggtgaccccagatgaaccagggactcgccatgtgcaatatggcacatcaaaggataagtttaaaactagtgcagaaggcacagttgcaaactacactttctataactacaagtctggctacattcatcattgtcttattgaaggccttgagtataagacaaaatactactatagaattggaagtggtgattctgctcgagacttttggttcgaaacaccccctaaagttgggccagatactccctacaaatttgggatcattggtgatttggggcaaacgtttaattctctttcgacccttgagcattatttggagagtggaggagaggctgtgttatatgttggagatctttcttattctgatgaacatgactacaaagatatggggtttacgggtgggatacatggggcccgatttgctgaaaggagtgcagcatatcagccatggatgtgggatgtgggaaacca

SEQ ID NO: 101349 - DNA, 259 bp, Glycine max
  Clone ID: PAT_MRT3847_62531C.1
aatgagtatatctgtctactgttgagccttgatttgtggggtttacaaggagccagttcagcttttgcaaacacgattgtttttgatgataagccttggggggctaacacacaataagtctttgatggagattttccagtgggttcttggtgaccaatacttgcgaatagtctttatcctgtcagacaattaccttcagaagctgtgggtgtaaatgattcatgctggagtggacctggtcggtaaacccaccacttct

SEQ ID NO: 101350 - DNA, 298 bp, Glycine max
  Clone ID: PAT_MRT3847_62532C.1
tctctcgttgtgtgttctgcctcttttcctggagggggttacagctgcacgcatggaactgagctgtttcaaaagtgatcagtcatcaagttatgatgatgatgagtattcaaaaccatgctgtgagctgtgcatgtgcacacgctcaatgccctctcaatgcggctgcgaggatatcaggctgaattcatgtcactcagattgtaagagctgatcgtgcacacgctcacaggcagtacagtgtcgttgccttgacaccaacgacttctgctacaaaccttgcaagtccagagatgac

SEQ ID NO: 101351 - DNA, 626 bp, Glycine max
  Clone ID: PAT_MRT3847_62533C.1
ctcgatccgcgtccccgtactccgttctgttctggttttaactaagagtcgcccgtcaccatctgccccgtactctcttctcaattctctttcgatggtttctgcgtggcgtcgttgtctttcttttgtttccaaatcagattcttgtgctatcttgttctggattttccatttgagtaaaaagcaagaactgttttcaattgttggtgcagtgtgttgttagttctgcatttgcctgttaaatttgaggaatcggtgttataccaagacagaaagagggaaacttagataaaaataagagctttctggggagcatagacacttcacataccagtttccataagagaaatcacatcaattctatgtaaaaacgtgggaatttaagttatttgcttccaccacgacgtttaaaaatcacgtctctaccactatatcaacacactagtagtagtagtagcgtatcatagatgtgatgaatgggggcacaccatttgtgacaaccaattattgaatgggtttggtgggaattctgtgttcttccatatttctttttatttcagttgagtctactagcagagcagagaatatgtgggcacccaaacttaagtgtggatttccacggaact

SEQ ID NO: 101352 - DNA, 566 bp, Glycine max
  Clone ID: PAT_MRT3847_62534C.1
attattattgttttttgtgggcaaaacggaaaataccctttaattaattgtcattgaccctatccggaaccgggggaagggaatgaaaaaaacacaaggacccccccttcccagtttgttgccccaaccaacagggccccacccttactccccctcaaagggtaaaaaaagagtagagaccctttcctactaaaaaaagcatagctgctcctttccctccaaagggaaaaaacacgccggttttgctcatggcttccacaaaatggttgggttcccattcatgggagtaaccccgtttgggtccttggtgaaagctggccttctgccctaaaaacatccctcccctgctttatgtgggcttctcccaaccctaacaaaacctccagggtttgcaactccccataaaaaggggtggatggaacaggtttcggggtgtcctgacaaacgacgttaggggccttttccataagcagaaaggggctcctttggctttttccccaactagtaaagtggtgtttggaccacttaagagccaccatcttttttcatggacttggagctgaaat

SEQ ID NO: 101353 - DNA, 355 bp, Glycine max
  Clone ID: PAT_MRT3847_62535C.1
ggaacctttgggctgatttatgtgcttgcatggtcgtgagaatgatagaagagcatgcgagaccgccgagtagagccggatcgtcgatgcaactactacagacaagacagggtcctcgcgataactaaaaggccgctaaaaggacacacgaccgaacaattagtagatcctaaaaagaattaccacgacccctcagcttccgatatcgcgtccgtctaaatctcacgagccaacgccttattccacccctcttaaaaaaaaaaaaatacaaaaaataaaagaaagtacaaacaaaaaaaaaagaaacaaaataaggagataaaaaaagaaagaaaaaaaaaaaaaaagtgtttcc

SEQ ID NO: 101354 - DNA, 289 bp, Glycine max
  Clone ID: PAT_MRT3847_62536C.1
ggcgcgcgtatttacttttgcctagaaaggaaccagttcgggcacttgccggcattgcaaaaatgtgagtgaaagtctcacgagaacgtcttagtaactatctttcgataggccgggtacacacaaacaccaaacatgaaccttggaatttacgtgagggcgaacaacctaaaggaaccagaccatcccaggcttgcggaatgccttcgtttatataagttgaaggtaaatagaatttatgtggccggcggggggctccccaaatgggtggcaggaatccgcccggttt

SEQ ID NO: 101355 - DNA, 292 bp, Glycine max
  unsure (1)..(292): unsure at all n locations
  Clone ID: PAT_MRT3847_62537C.1
caagtcacaancacttagntcaaggaggctcgacgctaggtnaagagttaactatcccacaaaattgtnatgtgaatgctcataaatanactttgttacatcaacagtctccctaaaaaaaactttattacatgaataacatgctctaaaatatatttgagggaaaatggcacatgattttgactaattgacctttaaacttgtagcagatagaattcattcaaccttttacagtnaggtagtgactacctgagtctggtacatagatgcangantaaatannagaacatcc

SEQ ID NO: 101356 - DNA, 206 bp, Glycine max
  Clone ID: PAT_MRT3847_62538C.1
acagttggaaaaaaaaaaaaagttgttcgaggttagtttttcttctgggatttggaaatttagggcttatatctttgtctttttaatttctgttgatttccaaatcgcgtatcttagtttagaccgttgaattttttttcttggttgatttttctctagttacagcgttctaattcttgcgcctccaagtcaatattttccatcta

SEQ ID NO: 101357 - DNA, 188 bp, Glycine max
  Clone ID: PAT_MRT3847_62539C.1
ttttcttaccatcaattcttgttctgtgtgtgtaggtgtgttcttttctgtatttaaatcaagttatcttgtttattttgcagagtatggatatatcaaatcctgcagccttagtcaatgcggaactgttgcaattctatgttggaagaagggtaggatcgtgggggaggttgtgcgatctgatgggg

SEQ ID NO: 101358 - DNA, 176 bp, Glycine max
  Clone ID: PAT_MRT3847_6253C.1
gtcagcatacatatacttttaaatgttatgactcaatattcagggtaacattgggaaattctaaatagatatgatcatcaactatgatatcaagagacaagattaacatacttacaatgtaaaatatagttttaaacttatactactggttcaatatgaaacatatgctcttcatt

SEQ ID NO: 101359 - DNA, 262 bp, Glycine max
  Clone ID: PAT_MRT3847_62540C.1
ggcatgtgggctcccgattcgagccgtattgaaacacggaccaagggagtctgcacatcgtgtgcagagtcaacggggcgcactagaccccgtaagggggcaggaagctggttggtaggattcccctgtggggtgcaccgccgaccgaacctgatcttctgtgaagggttcgagtgagagcatacctgtcgggacccgaaagatggtgaactatgcctgagcgagggcgaacaagagggaactctggtggaggccgcagcga

SEQ ID NO: 101360 - DNA, 998 bp, Glycine max
  Clone ID: PAT_MRT3847_62541C.1
tatcatgcacatttagcatcgataacttttgttttctatatatacgaggttcttggcccttatatatttctctttctcgtgtgtacaccacacaccacaggagttgtacaacatggagatatctgattttgttcctgtgtgtggaagcatgaagaagtacaggagaaaaatatcaacatatcataagcttaagagcggcacagaggtaagtgatgattgcagtgttgagaatggttgtatgttaaggccaaaagtgaaaatggttgaagaagagatacagaaagctcatcaaccgaagattaggttatccataaatctttggaaaaggttgagaaatgcttatgtacagcgtatgcttggcttggctgaacatgttgcccatttgaacaatggggaaatttgctttctcaagaagattcatgatgatgaagttcagcttttgttagcttcatgaaacttgagcttttgaaacacttatgcaagaagttaattaaggaagcacttatgtgaaattattatgtaaattatgcagtctttctttctttctttttttttttggggggtttttgtgtacacaaatagagagaggtcaatcctttaaaataaatctcggtccttttaagagagtaatccttaattctcagttaggagatatctcttgtttaaaaaacgtgttaccatgcatctaccatggaataaaagaaatatcatgttcttggttgagctaatatcccttttttattttttaattggggactaatctttccttataaacatgacagaggtactatatgaatattttgatgttcctggttggtatagatcaagcttgaagacaagaaggagaatcgataaagtcatggcggacacatttatgagtgtatgagtaccatcgttaaattctgtgtgctgtctacgttatagtatgggaacttgaaagtgttgagaaatgatatgtattacatcctgaaggactcgtcattatcgctgtgtttttg

SEQ ID NO: 101361 - DNA, 156 bp, Glycine max
  unsure (1)..(156): unsure at all n locations
  Clone ID: PAT_MRT3847_62542C.1
ggatcactctagttttcgatctgtactttggncgntcggacatagccatgaatgctatagatccgagtgtctgctacaacattcgtcgcanngtaatnggcntnaagctcngntntatcttcgaacttnggatantaagcgcatctnncacannnc

SEQ ID NO: 101362 - DNA, 240 bp, Glycine max
  Clone ID: PAT_MRT3847_62543C.1
tgtaaatcacatcgacactgtgccagcctatgctgcgggggcaaccaaggttggggatatgtctccaagacgagacgatctcagagggctcaggaaatcactttcggcttctgctctactttgggcatcagtccttccagctcatggtcattcttggaatgccaacgttgtcaacgaccatgctgcagggatacattggtgaacatagtggagactagaccgagacagcctgcactgggc

SEQ ID NO: 101363 - DNA, 276 bp, Glycine max
  Clone ID: PAT_MRT3847_62544C.1
ctcattaccaccatttcaccttctcaatctaggaatctgctacactaatgaggaccaagtcacaaccatattgtgcttctgcgcaaccggaccagagattggacgcacaaactggagggcgagacagatgccaagaacatggaatggccaatgggaaggctgcggatgaactcgggagaaggaagtgggcagctacaggcgtaaggctactctgctgagaggtgtctgcatgagtatgatgagcttcgaacacatggtgaaacaaccagagcttct

SEQ ID NO: 101364 - DNA, 158 bp, Glycine max
  Clone ID: PAT_MRT3847_62545C.1
cacacactgacggtgatctgatagtggaaccactcctatcggatgttaacagagagaatgatatccttatatagcgtgagagcgttgacatcagatccagcttcaactaatatgtttattgacagtatactgcgatgcatttttgcacttactatgac

SEQ ID NO: 101365 - DNA, 422 bp, Glycine max
  Clone ID: PAT_MRT3847_62546C.1
tgttggttttttttttttttttttcccttttttttttttttcttttttttttttttctgtttttcttctctttcttttttcctccaaaaagggggttctccccccggcaaaacccccgtccaaggccctacacttcactgttgtcaaaaaaacccacccgggggggggggggggggggcccttccttgggggaccccccccccccttggggggggccccttcggctcccaggggggggggggggcccttttttcctttggggcccccagggggggcccttgcaatgggggggggtcccccccgcaaaggggggccccgggcccacctgggggcccccagtccaaaaggcccccctcaaacggccatgggctcccccttcgggcgcctggggtggttcccccgcccttctttaccaagggggg

SEQ ID NO: 101366 - DNA, 934 bp, Glycine max
  Clone ID: PAT_MRT3847_62547C.1
cttgtataaacttttcatttttttttctcaatcaatcattaggtgtaatcgttgaaggttcgactcatactaaaaataggattaagatcacgtcactgctgctactgctctattatttttgtccgatacattgcaacattaacccaacaggcaccccgtttatatagtctctctgaagaggacgtggaataccagattctcaaatatatgcttcacgaacttcctcactcaaaacaaaagtcaccccagattctcacttgaacgtgacaccacgtaaaacacacagttttataggaacttgactcctgaaaaaaatacagaaaaacttatttctattttcctttccgagtgacgaaaaaaaaacttcaaacttatttttttatcccttcatttttcattgtttaagacaaatttttaacaaatttcgtaaatatgatgtaaatgtaaacttatccgaaaacaaaatgcattgaattacaaatcaggcaaattgtcaattatggcgtctatatccggggttatagaaacatgcttgctgatctccccaatcgtgcaacaatgtttttgagcagtattgatagcaaccaaatcttgggcacatgcacaattcatacccgaggaaacatcataaagggtattgccaagcttaagcttgattgcaccacttttgtatacaagcattttacccatgaagccagatgataactcgttcagctcacagagctcctccacgttttttgaacccccatgaggtatagatttctcattaacatctttgtctccagcagtagctgattgtttaatcataggcaattttgtaggcaaattaatcaagaacatacttgcctctggggttttcctccaaaggccaagatccattgttgaatttgatgcgttttcttcataagttctggactgtgcagcctccgcaaat

SEQ ID NO: 101367 - DNA, 1689 bp, Glycine max
  Clone ID: PAT_MRT3847_62548C.1
acggtctttttcttctaagctatttgattggatgataaaaagatccaagtatcaatatcaattgatttgattagtggcagttccaacaatggaggttgtggtaactccaactctagagaatgacacaataacaacactctatgaagcatcactaaatggctctgtaagtaccttaaacaccctgatccaaaggaaccctctgattctgcatagagtttcactctctccattcagtgaaaccccattacacatagcctctttgctaggacatttggaattctgtgaggcacttcttaaaaggaaaccaagtctagcaagtgaagttgactctgaaagacgttcccctcttcatttggcttgtgctgaagggcacactgaggttgtgaaagctcttttgcatacaaaccctgatgtttgcttggctatggacaaagatgaaatgcttcctctccacttggctgtgatgagaggacacactggagttattaaggagttgaccagagccagaccaggctcaattcaacagaacactattgatgatggttctgttttgcacttgtgtgttaggtataatcatttggaggccttgatattccttgtgcaatcagcaacaaggaaccaacaacagttcctgcttgccaaagacaaagagggtgacacagttctgcatttagcagtgaggctcaaacaaattaagaccataaaacacctacttatgctacctgaaatgagaacagcgattagtgctttaaacaaggcaggtttaacagctttggagatgttggagcgctgtccaagagattttataagcctaaaaattgaaaagatgctacttgaagctgaagttcaaactggcactgcacaacaagggtcaccatcaccaagaatagctactcaaccatcaaatcaatccaagaggagcaagatatgggaaacattatggttaaaatacttacaataccaaagtaattggatagaagagaaaagaggaacattgatggtagtagccactgtaattgccaccatgacttttcagtcagcaataagtccaccaggtggggtttggcaagaagatacaataactggtggacacaactgcactacttatggcatttgtaaagcaggcactgcagttttagcatatgattggccacatgggtttctgaaattcatgaccttcaacaccacctctttcttctcctctcttgctgtggtgctgcttctcataagcggttttcgccttgagaacaagctcatgatgtggatcttgaccatgggtatgactttggcactcacattcatgggactcacatacttttgggcacagagcttggtcacccctgatcacattgttgataaagttaataggatgggaattcctttgtccatagtttgggtgatcatgcttctagtggctgttttggttcatggggttaacttgttcttgtgggtaaagaagtatgtaaagaagtggaagaagcagaagctgctgcagagctaaaagtcattgctcgcgagagttagtccagtgaatgagaattacaattacccctttgaagtttgcaatataaaataataattcttgcatatccagttgttagttagagaaataggattgtgacaacaactaagataaaataattgtgattggatataatcatcacatggaatctaaaaaaattatgtgtt

SEQ ID NO: 101368 - DNA, 744 bp, Glycine max
  unsure (1)..(744): unsure at all n locations
  Clone ID: PAT_MRT3847_62549C.1
cttttcaaagaaaaatcatttttttcaaatacaaacaatagtattttcatatctagagttgacaaaatggatgaactgacccaaccgtgtccactagattagacctaatggcctaccaatactctacctggatcatattttttaaagtcgagttagatttaatgaccgtcatgttaattcattttagcccattttatttttttgtctaaatgactagcaaaatgaacggaccaatccaacccaatccatcagatcaagtgtgaaaaatgggttaggtcgagcctacccatactttatgttgatcttatattttaaagttcaattaggtctagaggaccatcagcttgattcatattaactcattttatttttttgtatgaatttatataaattcaaaagaaaaaataaaagttaaaaaacattggaccaaaataagtttgactgaattggaacccatgttttttgagtccaacctagtccaatgggtcaatccaaataggtacaattttatttgggtcaatattttttcagttcaattcaacggactagcttgacaagcttggttcattttatcatctctcttaaaaaataaaanctatatatatatatatatatatataaaagaaaaattagacccatcaagccaaaaagaaattcttaaaaaattgttccatttagctaaaaaaaactagctaattttcttttaattatctatatttttcaaaatacaaaataatgtaataa

SEQ ID NO: 101369 - DNA, 144 bp, Glycine max
  Clone ID: PAT_MRT3847_6254C.1
cgcgctagtagtagtccttctcaaagtggaatttgaccctcatgagcatcatctacctaacgttatgattcccattcccatgagcaggagtggggatgggaaagtcaaagtatcaactacggataacgttaggtagatgatgct

SEQ ID NO: 101370 - DNA, 709 bp, Glycine max
  unsure (1)..(709): unsure at all n locations
  Clone ID: PAT_MRT3847_62550C.1
ccaaaacagtgttggcaatgccaattacaacaatccaatgtttcctcctgttcagggacaagtcatgcagaatcaagctcaattcaatttgtctccactccagggacaatttttagcacaaagtattctcaacatgcttcagcagcccaacatgaatatgagtatgccaaatggccagttttgtggcccttaccttatgcagaatatgaatccgcagttacctatgcaaatgccaaacccttctcagggggttccgtatggtatgcatcctggttcctgccccatgttcgggtttccaaaccaagtgcctcaggctatggtccctcagaattcaatgttttccacaaatccccagttaggttttgtgcccggaaatcaggtccggccacagattgacccaaacgagaaaaaccttaatccaccaaacgttagtgcaaattcttttgtatcatcatcccctttttcgtctcagcagttacaagggaatacttctggatcacttaatcctaatttggctcacacaaataactctcaacctcctgcatttatgaaacaggaaaaacctaatagcaatattaaaactaatgttccaaactctaattggnaagggatcacctagcanaaacttcaaaaataaaccaaatcgaggnggggtttcaagcaggattccagaagtcgaaatttcatgatgtcaacaatggaagaaggg

SEQ ID NO: 101371 - DNA, 1196 bp, Glycine max
  unsure (1)..(1196): unsure at all n locations
  Clone ID: PAT_MRT3847_62551C.1
aaaatgtgttactagcaagtactagggtgcgacttggcacaaaaagaagcacccatagttttgggctaacacgtgaggcctccccatactcttcattcttcactcttcactcttcactcccaaccctagccaaacgcaaaccattcattcattcagttcagtaactcacctcaccatggccgcatccattacattgtccaggctcgtctcttccaccctcaccactgcctctttcttcccacccataaccctgccttccaaactctcctctctccgactccccacccgccgccaccccaagccactcagattctcctcctccaccatcaccgccaccatctccgtcggcgacaagctcccggaggccaccttctcctacctggactcgtccggcgaggtgcagacgacgacggtgtcggaactgacgaaggggaagaaggcggtgctgttcgcggtccccggcgctttcacccccacgtgctcgcagaagcacgtgccgggcttcgtggagaaatcgggggagctgagggcgaaggggatcgacacaatcgcatgcatttcggtcaacgacgccttcgtcatgaaggcatggaaggaggacctcaaggtcaacgaggaagtcctcctgttatctgacggtaacggaaccttcaccaaagccattggggtcgaacttgatctcagcgacaagcccgttggtttgggcgttaggtctaggcgttacgcgcttttggccgaggatggggttgtcaagctcttcaatttggaggaagggggtgccttcactttcagcggcgctcaggacatccttgatgttctttgaattattcttcctctttcgtttattccacactccagttactactcttttcaatccggttagggtttctttcctctcataataacgtggatggattaattggacctcagtgctgttactgttacctgtgcctataataatgaaactcatgtgctggtgttgagcttttgtggccatttgtttggcattttcaggaccttgtgtaaagtttatcaattttggacttcctagatcctcttctgttggacaggtaggatttactctgcagtgacgcctttaatgatcgttatgctttgacttgtctgatgtgttttaatcaatatgtttttcacttggttgattgtcccaaaaaaaaaaaaaaaaaaaaaaaanataa

SEQ ID NO: 101372 - DNA, 442 bp, Glycine max
  Clone ID: PAT_MRT3847_62552C.1
tcggcgacttttttctggactacgcgtcctgggagtttatcctcagagtacatgttcatcgcacgactagtgtgtgagaataagcgtcaacaccgtggagagtagtgtcttcgtggcggtatcggtcgagagagaatgacatgtgctcttcaggaatccagtgtttgtagaggggaacaacacgttactaattgatctttggaagagtgccccctctctgtgtgggatcgaatgtcccaaggatgaaaagcttcctcgacgcaaaaatattggaaactcaagacgcgctgcttgactattgtttcctatggacgtttaagtcttagaggttgtgtaatgaagcgttttaattttagcgagggtcatgatgaaaaacagggactagcttagttgtcaagttggaattaattcacactttcatggaatggactgatttgggaaa

SEQ ID NO: 101373 - DNA, 317 bp, Glycine max
  Clone ID: PAT_MRT3847_62553C.1
gatctatttgtgtatctgcaaaaaggaatcctacccttcattattttgttgtaccttaagcttggttcggacttgtggacagctccaatttgatcactccattacaaataagatatcaatccaatccaatccatctaaatggctctcacaattcacattatttcccctttcttctcaatcacgaccacctccaccgctgatctctccaaccgtcgaatctcctgcactgctgcctgtgattgacgcatcagctatgccgcactcgcatcagacttggcggcgaaggtcgccataatgatcacacatacggcgaatgc

SEQ ID NO: 101374 - DNA, 2617 bp, Glycine max
  Clone ID: PAT_MRT3847_62554C.1
cggccgattcccgggtcgcgggctcgtaagcgccgcctgcacaaggaggagacaacacaaagtgcaaaaaaaacagaaattaaacactactagtagctagctagggtgagaaaatgggtgaagctaaggaaatatggtctgcaccaataacccctagaacagcttcagtagtaggaacacctgttgtggcatctccacctgtgtcatgtccaccctctcagcttcactcaccatctctaacaaggtcacctctacttcaccctgaggatggagatgcaccacgtcgtaaaacatctaagactccaaagactccaagaacccctagaacccctagaaccccacttagaatctctaatttgactccaaagttcatcacccctttgggaagccctatgagaaaagctctgaggttcaccaagcttgatcctcaggatgcttggcttccaatcactgagtcaaggaatggtaacaagtactatgctgcttttcacaccctttgttctggtattggaattcaggcccttgttctccctgtggccttcactattcttggttggacgtggggaatcataactatgactctggctttcatatggcaactttacaccttatggctgctggtcaaccttcatgagtcggtagagcaaggtgtacgctactgtcgataccttcaactctgcggagctaccttcggggagaaacttgggaaaatcctagccttgttcccaatactgtacctatcagcagggacatgcaccacattgatcatcataggaggatccacagcaaggacattttaccaagtggtgtgtggtgaaacatgcactgccaaacctatgaccactgtggaatggtacttggtgttcacctgtgtagctgtggtgctatcacagttgccaaacttgaattccattgctggggtgtcactcattggagctgtcactgctgtagggtattgtactgccatttgggtaacctctgtggcacggggtgccctaccggatgtgagctataaccctgtgaggactggaaacagtgttgaagatgcctttagtgtgctcaatgcattgggtatcattgcctttgctttcaggggccacaatctcatccttgaaattcagtctactatgccttcaagcgagaagcatccatcacacgtgccaatgtggaaaggggtcaaggtttcttacacgatcattgcagcatgcttatttcccatggccattggaggctattgggcctatggccaattgattcctgcaaatggaggaatgctcactgccctataccaattccactctcgcgatgtgtcaagattcgtgctagggttaacaagtttttttgtagtggtgaatggtttgtgctcgtttcaaatctatggcatgccagcattcgatgacatggaatcagggtacactacaaggatgaagaagccatgcccgtggtggctgcgtgcatttattagggtgttctttgggttcttgtgcttcttcataggagtggctgttccgtttttgtctcaaatggctggtttgattggaggagtggcgttgccagtgacattcgcgtacccatgtttcatgtggcttaagacaaagaagccaaagaagtatagtgccatgtggtggctcaattggttcttggggacattgggagtggctttgagtgccatattggttgcggctagtttatatgtcatcattgatactggtgttaatgtgagctttttcaatcctcagtagtctcacatatagagtgggaaaatgtactaggaaaatgatgttgggaggtaattaattagtaagagaattgctaaggttttctttctttctttttttgagaaattcaaatttgtgaccccactttgtagttctaggttgattttgcctaatagtgatatttgtataaatatcattaactgcataaggggaggggaaggtaaatcaagattgtataaattttcttgttctgcaaattgaaaaatacttaagagtttatttagtcatacatgatatgatgaagtaggatatagtataaaatttaataatatttagacaatgtttcttttgcattgtataaaatactatactatgcattatataatataataaatattatcttacgtcagttaatccactgttaatattgaatatgataagattgttctatattaaaaaagcacgtaattgaaaatattattcatttgaagttgttatgttatactaaattaggaaaaataaaagcttacaaggcataagagaagaaaactcgaccactatatacattatatttaatattaaaaaaaaacaaatgaaagctgcgtaaaataattacaattcaaaactataagagttcaatcgataagttgtagtttttaattgagtagatttaatttctaaattacctaatcattgtctttagttcaaatagaaaaaaatagtgcaaattaataattgaatagcaatcttcattgagaacaactattatattcgctgcagtctactctattatttatacaattcacacactcaaaagtcttaataccaaaaaaaaatatttttggacactcaagacattatttgacatatagtgagaggaagagaaaaaaaatataagc

SEQ ID NO: 101375 - DNA, 417 bp, Glycine max
  unsure (1)..(417): unsure at all n locations
  Clone ID: PAT_MRT3847_62555C.1
attggtctgaaatatctattaattttgttattggtaattaatttttgttaaaaaatttaattgattatttttgttgaaatatttcttattaattatatttttttatttacagaacttaaatctcttgtttaaaaagaagattaagatccaacaccttgtttaaagagattaaaaaatttgatatcactaccaattgactttttggtaaatatgtaggatgtataataatgataattagagtttttatgaaaaatcttttaggggcaaaaattatttttaagaaatatatatacgacttttctagaatacgtggaggcacagctaacaagaagctggagtaaggtccaccatgtcttgngctaatacaacataaaccccttcactttctttaaattgcaataatcacatgcatcgcat

SEQ ID NO: 101376 - DNA, 573 bp, Glycine max
  unsure (1)..(573): unsure at all n locations
  Clone ID: PAT_MRT3847_62556C.1
tgtgttttatatatctcttttaaccaagtttttttttctgacatatatgatagcgagtaaaactttgatcaactatgctcaaggaattcaattatttgcaactgtatataagattttgtttgtgttcttcccaatgcattttaactagcactaatctatctccagccaaaaagaaaataaaaacaagcaaaaacggttctgaacatagtgcatggctagcttgcctatactactgcgcccttgcatgtaatatgtgatgagttcaagcttctagggtacattctgcttatcggtaactagtagtttaaatagatatatagagtaataatatagtatctatagcgataccttgtattcccagaattgctttagataatttttcttgaaacaatttggcgtagagagagtttagttacttttcatatatattgctttcagtttatcacaaagtgatgaacaccagcgcagaatattttgataattaagtcagaattatagcatagagatataccgcttagaagaagacaatatttaaatagcgnaacgaatctgcttatgcttcgctagcttaat

SEQ ID NO: 101377 - DNA, 329 bp, Glycine max
  unsure (1)..(329): unsure at all n locations
  Clone ID: PAT_MRT3847_62557C.1
ccaaagacagcacgaagaggggagacccaaaacacacccaaaggctctatacttggggaatctttctctcacttaagaacaaaagcttggngtaacttgcatgggagaattgttcttcccaaaaccttcacgggcaggctttgggaagctgggatggaaatgaaaacctcacctttaacacaaggctttgagtctgcaagacaggctgattggctaagatatggctactctgagcctgaagattaagatctttatgccactggagacttgtatgaaaatgaatttgtcaaacccgctatggatcgcagatcctcgcagaaaggcaaaag

SEQ ID NO: 101378 - DNA, 252 bp, Glycine max
  Clone ID: PAT_MRT3847_62558C.1
tcgcacgcgtacgtaagctcggaatgcggctcgaggacggcgaacttttttagacagagcacctgcaccagcaccagcagcagaaccaccactcggaggaacagcgaatgctttatgctggtggtaacagtggccacggcggtggcttttgggacaacacgccggcgccagtgcaagtgcctgcgttttgccagtattctgctcacaggggaccccttcagttcagtaacaccccttcgattcgtgcttgga

SEQ ID NO: 101379 - DNA, 247 bp, Glycine max
  Clone ID: PAT_MRT3847_62559C.1
attgattccgaagagaaaagaaaagatgtttgagccacaacagctatgcactctcgcgaaaacgcgggaattcgacctcggatcaagagaaaccctctacccagggctgaacgtcggcgaaaaccaacttcgatggggtttcatcccgaaggtctacggcatcctcttcgggcaaatcggccttaccaaccttgtcttcgtcaccaccggtttctatacctcaatcaatgaccttctcaaaggcaat

SEQ ID NO: 101380 - DNA, 3011 bp, Glycine max
  Clone ID: PAT_MRT3847_6255C.1
agttttttgttcatatatcagatgccactgaagtcatgaactttgatattacaaataaaatttaccatattcaataaaatatgttgggtagctaatataaaatcatagaaaaaactgaatcaaaattgggtgaagaagggttatgatgtctcttagaacatttactttatcatagattcatagtaataatgcatttggtttattaggctaactcaaatctctccatattgccatgacttgaaattgtagcccggggacccacgccggggcctagggataaagcgagctgggggcgttactaacttagcaccttttccttttttttcctgcttttttttttgttaatatcaatcattagctattaaatattatttaaccttctcttgaagataaaaagattgtctttctgccttgcccaagtcactcctttggggggagggggatgaatctttggatttttgctgattgtggcaaaacttcggctcagtatagggggtttgacttcccactaacaaggactggaatatccagatcttggatcttgtgtttattgcaccctttccgggtcttccttttttatgtactgctaccttaaacctcattatttattctgatttaaaggagatgagcataccattctataaacttctatatttggattgtctctctaattttgaactgatctaggctacttaaaacgatgccttggctgtccacattgtgatggaactatgtgcaggtggagagcttatcgataggattattcagcgtgggcattagaacagggtaaactcaaacaaaaccaaccaaagtaccaaacaagaccagaaggctttgtatatctacctatctgtctaagccattcatcaaagctcaactggaccagatgatgtaggctcttagatccgagtgatgaaagttggatatttgatatcagtatcacaaaattattcagtgtgaagcaatatggggaacacgtgtgttggtcctagcatttcaaaaaatggttttgttcaatcagtttctgcggcgatttggcggtcccaattgcctgaaggttcagtgtctaatagagaatctgtaaaagaggaagcaactagtgtgcccgaatcgcccttgcctgtccaaaacaagcctcctgagcagataactatgccgaaacaagaagccaaacaagagggaaaatcagaaatagaaccggaaaaggaacaggataagaagaaacagaagaaacgtggttcagtgaagagagtttctagcgcagggcttcgtgttgattctgtgttgcaaagagagaccgataatttcaaggagttcttcactcttgggagaaaacttggacagggtcagttcgggacaacgttcttgtgcgtggaaaagacaacagggctggagtgcgcctgcaaatctattgcaaagaggaagctcggcagacaacagtggtcaaatcatttgtgaagaaaaaataacttgatgcaccacttggggtggtaatcttaaggaatctgaaatttatgatttaatgcaagcggctgatgttgataacagtgggacgattgattacggcgagttccttgctgcaacattgcaccgcaacaaaattgaaagagaagataatctatttgcagccttttcttactttgataaagatggaagtggctatattactcacgaagaacttcaacaagcttgcgatgagtttggcattaaagatgtccgcctggaggagataatccagttctcaaaaccattgactttggattatctgtcttctttaagccaggtgatatatttaatgatgtggtgggcagcccatactatgttgccccggatgttttgcgaaagcgttatggtcctgaggcagatgtttggagtgctggtgttatcctttacattcttttgagtggagtacctccattttgggctgaaaacgaacaaggaatatttgaacaagttctgcgtggtgatcttgacttttcttctgatccctggccttcaatttctgaaagtgcaaaagatttagtaagaaaaatgcttgttcgcgaccctagaaggcggctgactgcacatcaagtattatgtcatccttggattcaagttgatggtgtagctcctgacaaaccacttgattctgctgtattaagtcgcttaaagcaattttctgctatgaacaagctcaagaaaatggcccttataattatcgcagagagcttatctgaagaagaaatagctggcttaaaagaaatgttcaagatgatagatgcagacaacagtggtcaaatcacttttgaagaacttaaagctggtttgaaaagagtgggtgctaatcttaaggagtctgaaatttatgatttaatgcaagcggctgatgttgataacagtgggacaattgattacggcgagttccttgctgcaacattgcaccgcaacaaaattgaaagagaagataatctatttgcagccttttcttactttgataaagatggaagtggctatattactcaggaagaacttcaacaggcttgtgatgagtttggcataaaagatgtccgtttggaagagataatcaaggaaattgatgaagataatgatggacgcatagattacaatgagtttgtggctatgatgcagaaaggaaatcttccagcggttggtaagaagggcctagaaaatagcttcagcgttaagttcagggaagcattaaaattgtagttttcattgtcatcattgagttttttttttttttggtgctctttattaccacacatccctccttttcactttgaaggttcaagattttattcatagtgcaaagtgtttgcatggggatatttaggtgggccttttcatctctgcagttattttgtttgcgtccaatttaaaatggatttttgtaattacgagaatatattaaaaagagatatctttttttattattatattaaaaagagatatctggtggagtattactattagagaggaaatagattatttgaattgaattgacccat

SEQ ID NO: 101381 - DNA, 533 bp, Glycine max
  Clone ID: PAT_MRT3847_62560C.1
ggagactcttaaaaattacaacaagctgttgtctcttggcttcaagattgtattcttgtcaggaagatatcttgacaaaatggccgtaacagaagcaaacctaaagaaggctggcttccacacatgggagcagttaattctcaaggatccacatcttatcactccaaatgcactttcatacaaatcagcaatgagagagaatctgttgaggcagggatacagaattgttggaatcattggagaccaatggagcgatctgcttggagaccacagaggcgaaaacaggacctttaagcttcctaatcccatgtactacattgagtagtaccttcacctctctcaacaatctaactaaagtttgctcctatctatatgtaataacgtatgctgatatgcactattcaaaataaaaacatttaactatattttagtaatatcacttttatgttatttaaactaagtcaccctaaaacactccacataccgtactatttagctcttaccccacgtttgagtaaagcctcctcccctta

SEQ ID NO: 101382 - DNA, 339 bp, Glycine max
  Clone ID: PAT_MRT3847_62561C.1
agtaagaaaaatgttttagcagttgcatccgtccagaacatgaatatactaatgggaaatcccgataaattcgggcagagacaaaaaaagacacacgctcgctgaaattgaatgacggcatttccggtcaagaaaacagacggatacaacacgtatacaattgccgcaacctacgcacttacaatcgcccgaaatcatgcgcatttatcccattatcatccagggcctctaatattgtcagaatacccacgcactccagcatccatggcatagtcattaaatactgggtcgcgaggacacccaatgcacagtctcacacttgggaaacaattgaaattt

SEQ ID NO: 101383 - DNA, 480 bp, Glycine max
  Clone ID: PAT_MRT3847_62562C.1
ctgacaacaaagaaattgcgagaactcaagtcgcatctccaggagcttcagaatgagaagatcttgcgccagcagaaagtgaagagtcatattagtactattagtgagcttacagtagtaatgtcaatggattttagggagacactaaatgaaattcacccaagcttgggagattcatcgaaaggtacgctacagagcatcagcaatgacactcttgccagattaactggggttattcattcattaaagagggagaagcaaaaaaggctacaaaagatacaagagcttgctaaattgctggtagagctatgggaacttatggagacaccaattgaagatcagcaggcctttagccatgttactagattaatttcagcatcagttgatgaagtgtctacagaatgttgcctttctgcagaagtcattgagcaggttgaagttgaagtccagcgactaaatgttgtgaaagccagtaagatg

SEQ ID NO: 101384 - DNA, 410 bp, Glycine max
  Clone ID: PAT_MRT3847_62563C.1
ggacgcgtacggagttaatatcctaagtcctaccattttcccttttcataatatcttactcggcgcaggattattttacttccgcgtcattgttggtgtgattgttgacgaatctgcctcaccagacactggttcattacgccacatcatacgcatgtcgggatctgacatggcaagcacgggagcaattcacggttgggatgcacaaaccctaacttcaaccctaacaactacaacgtcatcttcatgaaaacaacatgcttatggactatgctgctgctgacggcaccgatgcttttgcccctgctaccgttaccgttaacatttacggctgagaatcctcttcggcggtgccttctgtcctgggcctagcccatccccaggcttagtcccagcccatgatggttaac

SEQ ID NO: 101385 - DNA, 279 bp, Glycine max
  unsure (1)..(279): unsure at all n locations
  Clone ID: PAT_MRT3847_62564C.1
acaaggattgagtgttggatctagtcatctagatactcgtactaccgatgatgatcattgagaaagtacgtgcaggttctgctgatctaaacatggtggtgctcacaagtgagtgcttccatcataatactgaggatggtgtggatatctggttgtgaggttagaatgtctggtggcatacgacccctcgnttgnganatcanttggggcgctggaggganaacgggtgatcttacattggaaattgncaacaagatgcagaacattgtctgtgtgaga

SEQ ID NO: 101386 - DNA, 434 bp, Glycine max
  unsure (1)..(434): unsure at all n locations
  Clone ID: PAT_MRT3847_62565C.1
aaattgaaagggattaaaagnaaaattaaagggtttttgtgtgtaaattttgttattggggtgtaaaataagtgttgttgatttattgtttttttttntgaannnttnttagttgggggggggtttnaanngaatttnttntttgtntttgtgnnnaatgttagaaaggaatagatttagggagtatttattggtttggtgggttgnaagtnntggagtgagtgagaagtaagangatntgatgnattgggnattangaagaaagggaatttgatatgtgtaagataatgaggaggtttttgatgtagattaggataagggtgnaggagtttatgatttagagatttgagtaaagnaaaangaggtgttttgtgttggaaaggggttggagagaagggaatgatgggaaagttntgggttatttagtgaaaatg

SEQ ID NO: 101387 - DNA, 239 bp, Glycine max
  Clone ID: PAT_MRT3847_62566C.1
cttcgaaccctgtttttatcctttttttgcatccttgcaccctactttggactacaactgcggacggcgcggatcaatctcactataaaattaattatacatatcactactcaacctttggcgtgcttctcattcatatataccttctcaacttcaccaatggagtttcaacttaaaaatctgatcgcactcgcatgtagaaatcaacaattattttctccttctttttaccattcctt

SEQ ID NO: 101388 - DNA, 349 bp, Glycine max
  Clone ID: PAT_MRT3847_62567C.1
ggctcgaggaccaaggcctctatctacctttatggaagaggcgttagacctatggaatctatgcattaagcgggggtccgttactccttggcagtcattgatcattcgaccccactgagtttagctgcactgtctcctgtgctgtgagaagcgagcactcttacagtggaaatctagacgcagaggactacgaacattacgattgttatctcacacacaattcgacaggtgtcgctctatgtatgacatggatctacacggagagcctaatgcagatccccagcacccggcatttcttcagctgagagctttttatgccgtgaggactcatgtccaaatacagtactga

SEQ ID NO: 101389 - DNA, 262 bp, Glycine max
  Clone ID: PAT_MRT3847_62568C.1
agcatcttcaacagacttgagaagattatagttcaatccactagtgttgggcacccggggcaagagccgagagggctcactctacctcaccttctacctttcctagggtattgataagcgcccctctgtctgctgacctacacacgaagtacaacgtgctatctcatcccattccgcatggagtacgaggtgcagttggtgcgctaatcatacaactatttcgagaacaacgtgacccacgtttaccgtcgcacgtgggtca

SEQ ID NO: 101390 - DNA, 1178 bp, Glycine max
  Clone ID: PAT_MRT3847_62569C.1
atagaatcatatacacatatattaaactgaacgaagttgtcctagaagagaagaaccaatggctgctggcgtgggtttccgcagtcacaaatctttgttaataattcttttgggttttcttggcttgttctcctttacagttgaagcagacacaaagaaataccaatttgatattcaagtaaagaatgtgagtagactatgtcatgcaaaacccattgtaacagtaaatgggaggttcccagggtcaacgatttatgtgagagaaggagacagagtactagtcaacgtaaccaaccatgcaaaatataacatgacaattcactggcatggaattaaacaatatcgcaatggttgggcagatggaccagcttacattacacaatgtccaatccagactggtaatagctacacttatgacttcaacgtcacagggcaaagaggaactttgtggtggcatgctcatattttttggttgagagcaactgtgtatggtgcaattgttatcatgcctaaacctgggaccccatttccgttcccacagccagccagagaatttgaaattctgctaggagaatggtggcacaaagacgtggaagagattgaaacgcaagggaatcaaatggggttgccaccaaatatgtcagatgctcatacaatcaatgggaagccaggaccactctttccttgctcagagaaacatacatttgcaatggaggttgaacaagggaagacttacctacttagaatcatcaatgctgccctcgatgacgagcttttctttgccattggtggtcacaacttgacagtagtggaggttgatgcagtttacacaaaaccattcaccactcaaaccattctaattgcacctggtcaaaccacaaatgttctagtcaaggccaaccaagtagcaggaagatacttcatggctacaaggacctttatggatgcaccaataccagttgatagcaaagccgcaacagctatattccaatacaaaggcattccaaacactgtccttccttctcttccttctcttcctgctgccaatgacacacgttttgctttgagttacaacaagaaattaagaagcctaaacactcctcattaccctgctaatgttccactccacgttgatcggaccctcttctaccccatctgctcgtccccaaattcttgcc

SEQ ID NO: 101391 - DNA, 274 bp, Glycine max
  unsure (1)..(274): unsure at all n locations
  Clone ID: PAT_MRT3847_6256C.1
tantcacgctctctnaaatactgctgtcttctatcgngtgggaggcanacaggntgggaacagccaagtgttnagtgnncttgnggcggggaggtgatctggtcaanccaggcngntgtacatnntctnncgtgatctactcacctgatccaccggagacatattcgccnnnggcnctcntctttatatcttacnggncntntgtccagttgagcgattttcaggtgnnttcngagctctncgagatacntaccagagtgcaatatatttngtg

SEQ ID NO: 101392 - DNA, 397 bp, Glycine max
  Clone ID: PAT_MRT3847_62570C.1
gtttgtacttctttctttgatacttaattcatctttaccatcatattctactattttctggattttatattgttaatacaaacaagttgagtttactgagctgatattttggtagtcagaccttaaagaactaagctgatctggattgcaaaagcaaaatccatatatcactaccatatataagtatttctaggcattagtacctgcatcccaaacaacttttataggaaattttgcagttatctattctatcatagtaacccctccccttctaaaatatactaaataaataaattaaatatgatttagtgtttcaatgctttcttgttttaaatgcatttaacttaaattagacttaaaatttaaacaacattttattaggtgggggggggggggg

SEQ ID NO: 101393 - DNA, 540 bp, Glycine max
  Clone ID: PAT_MRT3847_62571C.1
gaacaaactggttaaaaacaacccgcgtggttttaaccgaaacaaagggaaagtaaaacaaacacggggaaaaaccgaaaaggaccgggaattccccaaaaaaggggaaaaacccccaagaaagcccaaaaaaaagcaaacaagggcggaaacccccttttaccaaaaaaaaaaggaaaaagggggaaaaaacccaaaaaacgaggccaaaggggaaaacaaaaaaaacccgccaaaagggttccaaaccgggaaaaatttctcccggggggctgagaggaaaaaccccgaaaaaaccaaaacagggcccaaaagaaaccccccccggaaaaaaaaaaaccggcccccaaagaaaaaaacggggaaaagggaaaaaaaaaccccttaaaaataaaaaaaggaagcgggaggaaaagaggcctaacaaaaacaaaaatgggcacagaaaaaaaagttatagggccccctaaaacgcccctaaggggtttaaaaaccccaaaaaaaggttttaaaaaccaggggcccaaaaccccccaaaaa

SEQ ID NO: 101394 - DNA, 357 bp, Glycine max
  Clone ID: PAT_MRT3847_62572C.1
cgatttataaccgttcgtttttttggacaccccaattttggaccggatcttgctagcgtgccatctttcccaataatgagacctcttaaaacttgaaagactgacgcgcatatcggcctgctgtgtgaaaacgggaaccggtcacaattccacacttcattatagcgggaagcattaaaggttaaccctggcgtgcccaaagagggatccagcgcacaatagttgcgcggtgccaactgcccacaatatacgagccaaaaccgtaaagccagatgcctgaagggactaatcaacgagcggacagacgctaattgcgtattgctcactggggcgttttcagttgtgaaaactgagacg

SEQ ID NO: 101395 - DNA, 162 bp, Glycine max
  Clone ID: PAT_MRT3847_62573C.1
tacttttttttttcccttgtgtcgggcgaccaagggggggaacttattttgccgttaatttattagcaactcctcattcggactgcgtgtaacatataggcccaatctaccggtacgcttggtcccaaaatgtttgaaccctacgtgggttacgtgttaaag

SEQ ID NO: 101396 - DNA, 120 bp, Glycine max
  Clone ID: PAT_MRT3847_62574C.1
gcgatctatagccggctgggttgtttctcgcaagggcggacgggtgcctgcacgcgtaaaatctggacctatagagagaggcattccagcttgccatatacagagtcatagcagagcttg

SEQ ID NO: 101397 - DNA, 1874 bp, Glycine max
  Clone ID: PAT_MRT3847_62575C.1
gtccggaattcccggggcgacccacgcgaaaaaaatttcctagtgtcctcatgttgtgcttccttgcttgtttcaccaaagattatagcgaaatcatttcctccttccttcttccttcctgcttgttcttcatggtgcttgagaactgatatcatcatcattcattagctgggcggtttgaaaaggctaaattctaataacaccaacgtcttcatcttgtaagctccgtctcttgacaaaatcaacgtcccatttatgcaagctttgattaacctttcattccctttttccttcgcaccttttcttcttcttcgctccgtgccatgtcttcctctctcgctcttccttccactcccttcttcgccaatggaacaagaatcttcgctctcaagcactctctccctcgctctagggtttccatgagcgtctccgctggatctcaggcttccgttcaccaggctttgttcgccgattacaaggcctccacttcattcctcttcccgggccagggtgctcaagctgttggaatggggaaagaagctcaaaatgtgcctgctgctgcggttttgttcaacaaggcaaatgacattttggggtttgatcttcttgatatatgcatcaatgggccaaaagaaaagttagattccaccgttattagccagcctgctatttatgtcacaagtcttgctgctatagagctacttcgtgcacgtgaaggaggtcagcagattattgactcagttgatgttacatgtggtttaagcctgggagaatatactgctctggcatttgctggggctttcagctttgaagatggactcaagttggtcaaactgaggggagaggccatgcaggatgccgctgatgctgctagaagtgctatggttagtgtgataggactggactcagagaaggtccaacaattgtgtgatgcagccaatcaggaagttcctgaagctgagaaggttcagattgccaattacctgtgcccaggaaactatgctgtctctgggggattaaaaggagttgaagtgctagaatccaaggcaaagtctttcaaggctcgaatgacggtgcgcctagctgttgctggtgctttccacactagttttatggaaccagctgtgtcaagattggaagcagcattggcaacaacagaaatcagaaccccaagaataccagtcatctccaatgtgaatgcacagccacatacagatcctaacacaataaagaagatattggcacgccaggttacttcacctgttcaatgggaaacaacagtgcagactcttctaaccaagggtctgaagaaaagctatgaactgggacccggaaaggttattgctggaatcatcaaaagaacggacaaaggtgctgatattgaaaatatcggggcttaatgtggggaccttgctccttcttcgggttggaatgaacaaaactaaattttttccaagagagaatgttagctataaatcaggagaatgcgtggaacttgaagctttgaaagcaaggagcagctacagtcatatttgaatgccagttttgaagttaaaatgttataaattataattcacgagttagataagtgattgtacttggcactagaattttttagtttttctaatcttatattcaatctgtctcggagttaattatgcctatgcttctttgtaccaaatatagtttttttagccttttacacaggcttaataataattagaagaaacgttttactctattcagaatttaactgtttttgtaatcttagacaatgtgtctcggagttaattatgtttatgcttctttgtaacaaatatagtttttttagccttttacacaggcttaataataattagaaaaaaaaaaaaaaa

SEQ ID NO: 101398 - DNA, 1206 bp, Glycine max
  Clone ID: PAT_MRT3847_62576C.1
gtacatacagtggggttttatcagatggttcaaagctcgagccggctgagacgacagaagggggtcaaactttcagaggaaaaaggagttctattctgaaattggcagggtcgctaggcttcgtcatcctaatctagtggctgtgatgggatgctgctatgatcatggtgaccgctacattgtttatgagtttgtagctaatgggcccttagataaatggttacatcatataccaaggggaggtcgcagcttagattgggctatgaggatgaaaattgcaacaacacttgctcaaggaattgcgtttctccatgacaaggttaagccacaagttgtgcatcgagatatacgcactagcaacgtactgctggatgaggaatttggagcacgccttatgggggttggtctgtccaagttcgtgccatatgaggtaatgcatgagaggactgtgatggcaggtggaacttatggatatcttgctccggagtttgtgtacagaaacgagctcacaacaaagagtgacgtatatagtttcggtgtgctactacttgaaatagtaagtggacgtagacctgcacaggcagtggattctgtgggttggcagagtatatttgaatgggcgacacctcttgtgcaagctcatcgctatcatgaactcttggatcttcatataacttcctcctcttctagtatcatcccagaggctagtaccatccaaaaggtggttgacctcgtttattcttgcacgcagcatgtcccgtctatgcgccctagaatgtctcatgtctttcaccagctgcaacagattacccagccacatgcaaagtaaagctaatcactactagtcttgaccttaagtttctgtataactacaaagtggagggagtttttgtttttacatataacagatatttatgtaatttaacctgcccttttttagggtcgagactaaatcaagtgggaattagagttagcccaggcaggcatattctgccagacaatatttgatgtcatacatgtaatgtaggtgtaattgtactattgatggaattgtaaccccatttgtcattcttagaaaaattaaaaaatggataacataaaaaggaaactgaagtgtgaaggcaacgtctgttctatggttatgtttatgtaagcagcttaattgtttatttaatataaaagagtttatgtcacaaattaaattat

SEQ ID NO: 101399 - DNA, 351 bp, Glycine max
  Clone ID: PAT_MRT3847_62577C.1
tacaggtgtgagaagacgtcagaagggcctccaggccgacttcctactctccgcgaacgaggagacgatcttcaaggtcgacaatcacatcggctgtcgcatcgttggcctcaccgtcgatggtcgcgtcctattccgttgcatgagatccgactgcatcaactataagtacacctacgagtcgccgctccccgtgtggagactagtcgttcacctccccgataatgctcagggttgcacacagccgtctcctaaacttccttattgggcttagactccgggtaattggagtagatcaatcaggagctcacctctattacaactggcccagagggaactattttcaatatc

SEQ ID NO: 101400 - DNA, 423 bp, Glycine max
  Clone ID: PAT_MRT3847_62578C.1
cggacgcgtggggcgcccgacacgcaccggatacgtgttggacacgcactcgctgtgtgcaggttgttgccggtggcatattgggatgcattatagcatttttgatgagaagatcaagttaagatgccatgtgatgtgactgatactaatcctctaccttgtctcaaatgtcggtgcatgaccgaaatgagagcatcatggaaagggcaaaaaagccttctgttgcaagtatgcaagtaagtaaagtgcgttgaaggttcacctggaagatcctgtgtcctgacttttggaaattcagatttctcttgtacacagtaattaatcggtttgttgattctgcttaattgattgttcaaaacaatttgagatcacactggctattctttgacttattttttcacctattggtgcaaatcaaaactt

SEQ ID NO: 101401 - DNA, 353 bp, Glycine max
  Clone ID: PAT_MRT3847_62579C.1
ggaaaaaaccttcttttaaaaagcccaaccaatttttaaaaaaccaattaaaccaaaccttaaaaaaaccaaccaaaaatggggggggggccttccccaaaccatctttaaattcccaaaaaaaacccccaaatcttgggcaaaaaggtaaacaattaccccctttttgggggcttaaaaaaaacaaaccctggggctggcccaaggcaaaccacacccttattaaaagggaatggcttccccagacccctttggcccctggaatctttgaaactttttttttgggaaacgggcccctttttaaaaacaaatctttttttttttaactggacctgggtgggcccgcccaaacc

SEQ ID NO: 101402 - DNA, 265 bp, Glycine max
  Clone ID: PAT_MRT3847_6257C.1
ttcaaacgcacgtccaggattaggcggtgcttggactagttcctctagggggcgtgccagttctaatgtaaacaccatacggtgataagactgggagttactaaagcctgctgagcacaaaagcaatgacgatggcatataatccagaccgcgagactgatgcatggagcagagagatcctgataacgcccggatccatgtgaatggcatgcacgacaccaggatggactgccactccatgccatgatgttcaggttacaatagc

SEQ ID NO: 101403 - DNA, 301 bp, Glycine max
  Clone ID: PAT_MRT3847_62580C.1
aaacgttttgggggggccctttctgagaatcccattttagttacccatcttatgcaacttgaagttttttttttagtgccccaaatgttgtattatcgggcgggcgtttacaaaactgtgaatggaaaaaccccggcgttccccaaactaattgggttgcgcccagtacccctttatacaacggggcgtatgagaaaaaggcccccaccgtgaccccttcccaaacatgggccctaccgaaggggcaatgggccccccccccttaattgcaaatacgccgggggggtgggggggtcacccc

SEQ ID NO: 101404 - DNA, 249 bp, Glycine max
  Clone ID: PAT_MRT3847_62581C.1
gttctacctcatcaccttcaccctcctctccctcctcttacccctctcgtttcttctcctagccaaattctccgatgcgcaatactatctccaaaccctcgcttggtaccattcaccacaacactttccatatgttttaactctcgcccttcacatcaaccctctcattctctacgttcttgtgtcattattagcatggcttccttaatccacggcttaacgggaaaaatcatcattttgagtgactcg

SEQ ID NO: 101405 - DNA, 421 bp, Glycine max
  Clone ID: PAT_MRT3847_62582C.1
gagaaaacaagaagtagtgagaagaagggagagaatggaggaaaaggcaaaagctgagcagaagaagataggtatgaccgagacttggttgaagaagcaccgtcttctttacaatggagccactagacaccctcttattattagcattcgcgatggcaccatcaacactgcttccttcaaaacatggctcgcacaggattacttgttcgttcgggcgtttgtcccatttgtggctagtgtgctgataaaagcgtggaaggaatcagattgcagtggtgacatggaagtcatattggggggcatggcttctctggaggatgagatttcatggttcaagacagaagccaacaagttgctggaaagtttaatgagtccagacgcggaatatactgtggctattacagcattttgggctattgaa

SEQ ID NO: 101406 - DNA, 1120 bp, Glycine max
  Clone ID: PAT_MRT3847_62583C.1
gaagaaagaaagcgagaaaacaacggaaagggggaagagcgagaaaacaagaagtagtgagaagaagggagagaatggaggaaaaggcaaaagctgagcagaagaagataggtatgaccgagacttggttgaagaagcaccgtcttctttacaatggagccactagacaccctcttattattagcattcgcgatggcaccatcaacactgcttccttcaaaacatggctcgcacaggattacttgttcgttcgggcgtttgtcccatttgtggctagtgtgctgataaaagcgtggaaggaatcagattgcagtggtgacatggaagtcatattggggggcatggcttctctggaggatgagatttcatggttcaagacagaagccaacaagtggggtatttcactttctgacgttgttcctcagcaggctaacaaaaactattgtgggttgctggaaagtttaatgagtccagacgcggaatatactgtggctattacagcattttgggctattgaaacggtgtatcaagagagctttgcccactgcattgaagaaggctccaaaaccccaccagaactgaaggagacttgtgtaagatggggcaatgaggcctttggtaagtattgccaatctctgcagaacattgccaatagatgcttgcaaaaggcttctgatgaagaactcaaaaaggctgaagttatgttgctaagtgtccttgagcatgaagttgaattctggaacatgagccgtggaaatgtctgatatggttcaagaagccttcaatgtatgaatataataaaatcatctaagcctagggaaatactgcatatgttattgttcggttggatcattcacagcgtaatgtactgcgtgaaatgtttactttcctagaaaaaatagagtaaattagaactgagaaaattaaagaaataataaaggaattctactagtttgaaaaagctcaaatgagtttgaacctttttttttttcaagtctacgttccatttgcctttcagtgaaaagaagtaaagaaacttgtttttctgaattctgaagttggaaaactaatatactctattttttctaggaaagtaaacatttcacgcagtacattacgc

SEQ ID NO: 101407 - DNA, 600 bp, Glycine max
  Clone ID: PAT_MRT3847_62584C.1
ggctccagaatctctcttcacctcgaaaattgaataaatgcttatacaccctctcttttttatcttcttatatctgaaagattatgaaaagatttttttctgttcctttgtcttcaaaacttctgaatcaaaagcaacctcatattttcaatccttaaagccatattatttttctgttcacctttgaattctttcattttcccacttttgttttcatccttttgtgtctgtggaaggaacctgtgtggttatgtgctcagaaacaggtcctccccgtctctctttctcccatgatctctctgaactacaagttttaccaatgaaacaaggtgttccttgtagtgacacactgttgcatgactcaaattctgactttgagttcagcacaagcacctgccttgagttcgaatcatcttcagcagatgaactcttctctaatggggtgatccttccaattcagatgcaagacaaaaccacagctagaaaactcactcatcatgtgaaatatcctcacccaaaacttactcctgtccgtgtgcctcagtgttgacaagtgaagaaagaaccattagagaactccagatgtgaatctgatatgag

SEQ ID NO: 101408 - DNA, 151 bp, Glycine max
  Clone ID: PAT_MRT3847_62585C.1
ttcgacccactcttcctcttaaaagccatagtcttccctacaactccatacacaaactcatcagcacacatttaaacctgcgtctgcactctcctaacattcaacaaagctctaattaaccttacatattcttaatctatatcttcacctc

SEQ ID NO: 101409 - DNA, 443 bp, Glycine max
  Clone ID: PAT_MRT3847_62586C.1
aacctttgggctgatttatgtgcttgtttatgtgcttgcatggtcgtgaaaaaatgcatagagggggaatttattgtgccctggagagagagatgctgtaacggggaggaggttcgtaaggcgccattggtagacaaaaaataagttacatcttaaactatgccctcgttgcggcgccttcgacttcaagactagaacccacgacgccggcacgaagaacaaaggcgccgacgagccctttcctcgtgcctactcggcgagtcgggaaaaagaaaacgccctaagcccagtaccggaagtcgtcagaaccgtacgtaataaacacacggcgaaacccgtcggaaaggaccgtccctatccgagagctagagcatacttaccttacgcctccaagactaataaaacgtccctacgcgtcggaatcgacacgtcctagatcggaa

SEQ ID NO: 101410 - DNA, 384 bp, Glycine max
  Clone ID: PAT_MRT3847_62587C.1
aaataaaattcttggtttattgatttatgaaaaatggaatattacaactagcttacaaaactcggcaagcgattttgttcttttgtgcctgcacctttggaaagggggccatttttctgatgtttctagtagccggttgacccttcaaatctgcaccacccttttgaaattttggaacattaacccacaatttttgtttttcaatgaagattttgtccaatttgagggtcataactcatacatcatgcacccctacgaatcttacaaagccaaaacgttcacctattttatcccttttcctaggaataactacctcagagacttttccatacgagtaaaataattccacaaatccttagcagacaagtttggtgcaaagtttgt

SEQ ID NO: 101411 - DNA, 303 bp, Glycine max
  unsure (1)..(303): unsure at all n locations
  Clone ID: PAT_MRT3847_62588C.1
tgtgcatctacttctgctccgttnntgggnctngggggggcggggggcgggnnnccnnggggtgccggggtgcgggcccgggggttcggttnnccccgnncnccccgcgccggccgggccttgggcnnncnnnncggnnnnnnntggcggctccccctgccttgcnnntttttcccccttnnaaccctgggggcttggcggcgctggacgtggtgccctgcgcttggcgaacgttggccgctccccggtccggatgaagccgntggggtttggcggntttgcctcttgaagctccttcccccc

SEQ ID NO: 101412 - DNA, 784 bp, Glycine max
  unsure (1)..(784): unsure at all n locations
  Clone ID: PAT_MRT3847_62589C.1
cctgcccaatgttattttnnacanncaaacaccagtcagcatcagcaatgatgagatacacactagcttatgtacccatcaaccaaatgatacaatcaaacacagttccaataacctttttttttttgtgaacctgtggtatccttttgctgaaaattaaggactaatcactcaaagtactaagatccatttaagggactggcctctcctaacaaattctcttccaagaactattagttctctttatttttcccttgtttttatggacctattattactcttaaaaaattaaactttttattactaatcaaacaatgtctcttttacttcattgaaaatatattaatgaatttgcatcttgaatacattgcactttcctgtacatcaataaatatctacatgagatttgagaagttgcctatgcaccagatgtaattacaggcacacaatttttatgcatatactacaattttccttaaaataaataatttgattttaacattattagaatggtttcgttcatacaaatgctgttattgcaattagtggagtctgaaaaagcattaacttaatatctgaattctacttgtgattgctattgcctatgatgaaaatattttgggataagcctcttttttatttggtgagaaaacataaagattgtgatnngnctcttattcantaataggagatcgagaaacttaattaatggtagnnnttnnnatggtttcttttnnnnnntnnattactatgctttcatcaatnnnnnncaaaanatcccccc

SEQ ID NO: 101413 - DNA, 138 bp, Glycine max
  Clone ID: PAT_MRT3847_6258C.1
atcagttgtgtatgcttaaggaatctggttccttcagtttcacatttatttaaaaccaggaactgtagttaagcaacaaaggggtcgttagatagagataatgttgggaattcctctggaagtacattgcttgtcact

SEQ ID NO: 101414 - DNA, 352 bp, Glycine max
  Clone ID: PAT_MRT3847_62590C.1
cacaaactcagcgtgctaaaagaatctcgttctcgcggtctcaaggaaccctagatcggatcatgtctggagcgtacggtcaagacggcggcggttccgcgccaccgtcttatggagccagcggcggatacggttccaccggcggtggtgccggtggaggtggtagttatggtggcggaggctatggaggaggaggaggtggtggcggatatggtggtagtgatggcggtggaggtggaagttacggagccaaaggcagcggaaacggctgcggatatggtggtaacgatggtggaggttatggcggaagaagcggctacagtggaaaccgtggcggaggctatggaggaag

SEQ ID NO: 101415 - DNA, 521 bp, Glycine max
  unsure (1)..(521): unsure at all n locations
  Clone ID: PAT_MRT3847_62591C.1
aacaaaaggaatgaggactgttatgaaaaatcagcaatgtcacaacacgtgtggcaataagattaaaaagatacagaatgataagaaccagtacacgttatcatgatagatttagtaagactataacaaaactcagcaatgtcagaaaaaaggacaaacccacttgcattgccattattccagcagttatgagaagcactaaatgattatgagcttaaaacctttcatcaacacaactttttggagtttgtcagccaagtattccgggggcgacttaatatgcactagtagtaagcaagtcactaaccagacttgttgagtaagaaacaagtcaggtcattggataatgaacagatgtcgaaattgggacattgcatctttctctaatatccaatatttgactcttattcctcttatatgaaacacttggagtagcaggaagtttcccttgcagaaaacaatattaagcacaacatantcgtgttgtgcaattagtttcatataattaattagcttataat

SEQ ID NO: 101416 - DNA, 975 bp, Glycine max
  Clone ID: PAT_MRT3847_62592C.1
ccacccgtccgctttctccctcctctttttctcatccaccaacaccaattcacttttcttcttcttcttcttcttcttccttcattttcttctctgcatctcacactgatcataccccaaacaacccttttgagatatgtttatggttatggattcagcagaaaggtgcttagattctcaactatggcatgcctgtgccggtgccatggttcagatgccacccctcaacacaaaagtcttctactttccccagggccacgctgaacacgctcatgggaaggtggaatatttcgggaaaaaccatcaaacccgtgttccaccactcatcccttgcagactctctgccatgaaatacatggcagaccctgacaccgacgaggtttatgtcaaaatgagactcacccctttgagggaacatgaattattggattcacaagatgattgtttcttgggaaacacaaacagtggaggagttgagaatcaagagaagcctccaacttcttttgctaagactctcacacaatctgatgcaaacaatggtggaggcttctcagtgcctcgttactgtgctgaaaccattttcccaaggttggattattcggctgagcctcctgttcagaccatcattgccaaggatatgcatggacagtgctggaagtttaggcacatctatagagggacaccaaggaggcatcttttgaccactggatggagcaatatcgtgaaccagacgaggcttgtcgctggcgactctattgtgtttctgagggcagaaaatggggatctctggtgttgggataacgcgggctaagatggggattgacggagggactgagtgaccttacggtggatggtataaccctctgtttggtggtggctccttgtgtgagagtgagaacaatgtgatgagcggcgctgatcatgagatgttcgagggaagagtggctgctgaatatgatgtcgaggctgagacta

SEQ ID NO: 101417 - DNA, 631 bp, Glycine max
  unsure (1)..(631): unsure at all n locations
  Clone ID: PAT_MRT3847_62593C.1
ccggggggagccacgcgtncgggattcgagcgattcggctcgagcggaagtgcgaagaaattgacactgagcatgttgctcttcttctgcacgcagcaggttgcaaaatgagaaaaggaaagagacaagtaggtgataatagtcaacctgtaagagagatgttgaggtggacggatgagatggacaaccgtgtactaaatgcaatggttgaagaagctcgagcaggtaataggatagatggaagttggacaccacaagcttacacaaaaattgtccaaaccttgagagattcaggattaacggatgttacaaaaaaatcatgtaaaaaatagacaaaaaacaatgaaagatagatggcgtgaaattcatgacctattcaatggtcttagtggatttgcgtggagtccagtgacgaagagatttgaggctgaagatgaggtttgggatgaactaataaagactaaaccatcggctgcaaaatggagagcttctcaagtgaggcattatgatcttcttgaagaactttatggttcaaatcatgccacagaacacatgggatgtactccaaggcanactcatcgaactatggacaaggagaatgtcaccattgactccaangaaacgttgagtt

SEQ ID NO: 101418 - DNA, 483 bp, Glycine max
  unsure (1)..(483): unsure at all n locations
  Clone ID: PAT_MRT3847_62594C.1
tggacaataggatttattttttttccaagcatttggacggttcattcttgaaanaggacctcactcgtcaaagagatcaaaggctgcccctctgggagtgtcttgtgggcttaagactaatgaagggacatggtgggactacacctcaggaaaccactctctattggaaattgctgttctaagatttatcataatggggtttttacaaatttgctaaaactaagatgtgagtaggcgccgcaaaccatcaaaatggccacaactttcgagaattgaccctttgaagaatgccctgaatttttagatgggggcccacccgaaccccgagtgccgatactccgatattaacatctggtttggccgaattaacatgcttcccggcgttttgaagaagaggtttggagagccctgggggtatacccgcggctttaaccattgttggtggaaacaccaccaggactgacctgggtgtgtaaccttgga

SEQ ID NO: 101419 - DNA, 616 bp, Glycine max
  unsure (1)..(616): unsure at all n locations
  Clone ID: PAT_MRT3847_62595C.1
gcttcactcactcactcatgggctgcgtctcctcaaaacacatcaagaaagacctcaagcaagaagaagaagtcactgtcaccaatggcggcagttacgtgaaccacgtggtatccctgacttcctccacctatggagcactaatgctggacaaggagaaggagcaacttcaacttcaacccaccgtcgaagaagaatccaaaacatcccctcctcggattcgcgaagaacccgaagtcatcaacgcttgggaactcatggagggtctcgaagagggagtgcccatttcaaataaccccatgaaaagccccaagtccacacctttccttcgcggattcatctccaccgacccaaaacccaaaattacccccttcaaattccttaaccaattcgggtcccccaagagtctcaggaagttcacagggaaagagaacacagttcaagttcaaccacccaatgctggtgttagacgcttggactacaatttcagccctcccgctatgccctgtccctccctggtttgctctccgcccaaagggtccccgacccgccctcgtgggctccgtttcgggtcccgcttctgcccgaggagtcctagtcctctgttngatccaga

SEQ ID NO: 101420 - DNA, 605 bp, Glycine max
  Clone ID: PAT_MRT3847_62596C.1
ttcctttttttttttattcgcaaaacaaaacacaaagcctctttcacagcacggaggtgtctttcaagagaccaaagccacattcacttccctgtcgcacaggtttgaccaagtcccctgagtaactgaaattgacgttgatggaacactaggaaaaccaaaagcaaaatcgccaaacgattattctgggaagagacaaaccacactaatacttaacaacaaaaaattcggctgttgaccccataagaccgattcctactcgcactaggctcttcaaacaacaccgactcccattgaccagcacctgtagttccaaacatggaggctctgtgaggcaccatcatcaagctgtgactgacccttggggggacccagactcgcctctgagtgagccttggatcttaccaaaagggcttcctgagccttattgcacatgctcttctttgccgccccatgccttaagggggctctgttgaagcgcccttccaaacgagaaagagaatgaccatggcttctccccattgacctggttaatggcgtagaggctgacggatgcctcctcctcctctggccaccagacaagagaactacagccggaactggag

SEQ ID NO: 101421 - DNA, 182 bp, Glycine max
  Clone ID: PAT_MRT3847_62597C.1
caaagaatgtacggccattttatgaaactatagtgccccatgtcgaaaaactcatgctttatacataccaagcaaaacacacgtcacctgtagttgaatcttatctaccgcgcacagagaaaccagatgctcacatagctctctatatagaatattaacagctttttaacgtgacatagaaa

SEQ ID NO: 101422 - DNA, 547 bp, Glycine max
  Clone ID: PAT_MRT3847_62598C.1
aaaggcccgaggaacaaacttttttaaaactggaaacacccaaccccaggaaaaaaaaaacctaggacagattggcaaaaaattatcaaaaaaaacccttcgggggccaaagatatataaaaaccaggaccccccaacccccttaggaaggaggaccccgccctaaacaaaaaaaaaaataaaaacccccagctttggaggccacaaagagggctatctatttggggggacggcccccaaacaaaaattctaccacccttgggcagggaggggcaaaaatcccaccccacagctaaaaaggcttggggaaaatacccggagaaaattttggagcaacactaaaacttcccttaattttaatcccccccctaaaaaaagaaatcgggggattcattttccctaaggcaacctaaacaaagccctcatccttaaacaaaaaaaaggcataaggctttcctccttaaaaaaacccttgggggaccccccctttttggaaacaagggggaaaacaacctcggcaaatcaagttttttaggagcaaggggaa

SEQ ID NO: 101423 - DNA, 562 bp, Glycine max
  Clone ID: PAT_MRT3847_62599C.1
ctccttcttgggggggggggggggggggggggggggggggggaagaagaatatactcgcagaggggaagtgagtaaaaaatgtgtatcagatgaaagatatggaggggtagagccaataaaaacaaggtgtgtgcagtttatagtagaaaaaaaatgaagaagaatacgatagccaccttgaaagccaaggaaaaataaagcctttgttgggaggccaaaaagcacggggaatgagtacagaccataacgtattggctgcatccagatgcacagagtatggcactagaaacggtagtaagtttaccaagcgtagattaggtgcaagtatgcttgagggcagcggttgaaccagggtggccctggtggctgtcgccaaagtggccgcgaaagaggtggccggtgcaggcataatacaagcgtgaacaacaagttaataagctagctgttacgtagcataagaaacatgacttgcgaataagcattgttaatatagcgcggcttgttgtttgtgcggcgacggcttgttagagtagacacgagcttactaactacattacacaa

SEQ ID NO: 101424 - DNA, 571 bp, Glycine max
  Clone ID: PAT_MRT3847_6259C.1
caatcaatgaatgtcgcaaactcgataacaagttctgcattaactcaattctttacatctatctgcccttttcacgagcattaaatacttgtttgatggagctttcatttagatttaaattatacatagcatttatgcaaagtgaaaagggcagatagatgtaaagaattgagtcaatgatgaacgcaaaatagataacaagttcatcctggatgatattttacaatggaactaaatcaaacagaaatttgatatatgcaactagattcctaagagctaagtatgtgtggtattgcctttagtttagccgtggtgctatctgagatatcctttcgtcttctaggagtgcgtaagggtccacatattggggaggtgatatagccatcttgcttgcatcatggacaaatgttggtccaaaataaaagtaaagagcagaaaagggtgcaacaattatgaggatcaacggcccaaatcccaaaaagaatgttcctccaattgtcaaaagaattttagcacaaggtatcaagcccttaagacctcttactgttcattgccaataaatcgttccctt

SEQ ID NO: 101425 - DNA, 314 bp, Glycine max
  Clone ID: PAT_MRT3847_625C.1
aaaaaaaacaacttaaaagatgccctttttttttttttaaaaacccaatttgggcttcctcatttgttaattacaaaagctaaagttttttggcttgattcaagaaaaattaccctttggagggtttatttcctaaaaaatataaataccctttgaacactgtaattgaaaaggtgctttttgttttgttcaatccaaacttttcaataaataaaaaacttggacttcctttggcaatggggtgatccaatccctgtttaaatcagcaaccaagcttggtttttttttgtaaacagggtcagttcgatgttcct

SEQ ID NO: 101426 - DNA, 283 bp, Glycine max
  Clone ID: PAT_MRT3847_62600C.1
tgatggcccttggaccgacgaccctctgtagtttgatatcttatactttgtggaactttctaaagaacattctgttgggctgcttaaacttccagcagacaaagctttattggatgatgctgaatttctctgttatgttcagctatatgctaacgattaggatgcatcttttcgagattgtgctaattcacataagaccctttcatatctatgctttgtgccaacttcatagcctatttctattaccgattggaccattctggctcaatgtgctgtaagagtt

SEQ ID NO: 101427 - DNA, 402 bp, Glycine max
  Clone ID: PAT_MRT3847_62601C.1
ggcttttcaaaaataaggaacatgggaagactagtgctgcagctagtctgggtatgattttactctgggatgttgactcgggacttgctcaaattgacaagtacttccatagtaatgataatcatgtcattgctggtgcattactgggtgttggaattgtgaattgtagtatcaagaatgactgtgatcctgcaatggcacttctaggtgactatatagataaagaagacacttcaacaaggattggtgcaattatgggtttgggaattgcatatgctggttcccagaatgagcagttacgtgagaaattgacaggtgtactgaatgattctaaagcttcacttgaggtgcttgctttttgctgctatttctttgggcttgatctatgtgggttcttgcaat

SEQ ID NO: 101428 - DNA, 260 bp, Glycine max
  Clone ID: PAT_MRT3847_62602C.1
tcgtcctttttttttggaaatttaacaaccagcgacgcatgggtattctccaatctgggaccatatgatgcataattaatatcttgttacttactgctaatatataaactttacatagtgaacacatttcagccacccttcattcctataaccaactgtgaggaccaatatctatcatgaatactgtttacagccaactcctattctgtttggatcttgggaagaacatatgcgacattacattactgcacaagatttac

SEQ ID NO: 101429 - DNA, 327 bp, Glycine max
  unsure (1)..(327): unsure at all n locations
  Clone ID: PAT_MRT3847_62603C.1
agaggcttgaggttcaaacagaatatctatctccacataaatgggnttttcactgggagaagaggctttcaaacgattcttatccaactaatccgacagtgcataaggtttttggtgatgcatcacttttcagtccactgtttttgggaagttctttgaccttctgatgccttccctctatgggagtatgagtcagatgtgtttgtatctaatttaaggagctccagcctaaacactgtgtattggtgtcatacattttaaggctatttattaaaatcatttaataccagtgtagactaccatttttttcatcttccttttatttgt

SEQ ID NO: 101430 - DNA, 484 bp, Glycine max
  Clone ID: PAT_MRT3847_62604C.1
ctcgagccgcaaaaccaaagatatgggaaatagacccatagagtctcctgtttttgtaagtactccacaaaatgttagtagtcactcagggacttaatagccatgcttcttttttttttttttaactctggtctggacgacaatggtatttcacctatgtttccaagctaagcagacagctttcaacaatggagattaagctatggtatttcaaggagaagaaggtcagtgaatgagtggtattggctggttctaacaagcttgtaatgtcagaaaaggcaaaacagaaatatgaagcgtgaaagattacaagaagcatttcagaaaatattagagaataatgctgcaatttagtttcttgtaatttttttattttattttccctttaacaatttctatgagcagatgatttttatgtgaaattgtgaatagctaatactctgaagttggtcttcattaatatgagatcacaatccttgaaaaa

SEQ ID NO: 101431 - DNA, 1195 bp, Glycine max
  Clone ID: PAT_MRT3847_62605C.1
attttgtggccgtatgtggtcaacagattaggtcatttgaagcactgcatagacttttgagtagtttcctagagcttttatggacacacttcatgttcctctacccaataggtgctgcttgttaaatgttctttttcctgttttatgattttcattctgtatttggaagatagttgtatgtgtatgtgtcctatctctgttgtagctctctgagaatatatgctctctactttcatattttccccttaaatagtattattactctataagcttatttagttcttctcgatattttttatttacaggagttcccatcaaaattctgttcaggttgtggagaaaaacaaggttgatactgctcggttttgcccccttttggcatgagatcataaggaatctaatggaggaggattacctaaccaactttgaaatggagttgcttttaaagcctaggaattttggggatcttcctttggttcaatggccactttttatacttgcaagcaagaattgaaaagaagatttcaagtgatttagaagaaatttgacgaaaaattgaagaagaaaaagaagacagtttgcttaacgcacactgtaggcccaacacacatctcacttggcgcgtaggtcttgcttagcacgtgtactcgcttagggcgcagatctggcttagcgcgagaaggcctacaaagaaaagtccagtacacgcttagcgcacagatgcacgctcagcatacagtcagcgtgaaaagtaaattaccttaagcctataaaaggagtagaaagctgacggaaaagacacattgactctcaaagctttccaatgcagaaatccaaaacttgagtctctcccttaggagaaacctctcttccttagttgttcccctcttcttgtattattcatttatcaccttctttcattaacccctggagtgtaaagtctctcatgatcatgagaggctaaatccccactattgggtacttggaggccaaaacacttgaaatgtaattctatttccattattcttctctgtgcttatttgttattatggtctgattacccatatactgtttggaaggttatgcattaaaaatgtttattttataaagaactggggaagggtatcttaataaaattcacttctagaaatagattgatatttattttgcccaaaaaaaaaaaaaaaaaaagcga

SEQ ID NO: 101432 - DNA, 580 bp, Glycine max
  Clone ID: PAT_MRT3847_62606C.1
gagaaatgaggccaataaacagtgtatcaccatcatcaccaatgcgtgccagtggggttaatatatggaagtctccaattccttacttgtttggaggcttagctgtgatgctggctatcatatctatggcattggtgatccttgtttgctcatacagaaaacgtgattctcagtcatcatctgaagttaatgaagacgtgaaatcacaagcaatggccaacaatttagagacaaactcagaacctgaggttcttgtcataatggctggtgatcacaaccccacataccttgcaaaaccaatcacttcttcaattttctgcacgtgtggggctcaaccaagtgaaccaaacccttcatcaacctcaacacccgagtgaagactaaccaattatcaacatgccaagttcaacaaaattttgctctacacttttcttccttctcaattttcatattcttgtggttttgtgtgagcacagaatgtgactactgaagatgagtgctttctttttttgagaattttgcttttccataatgaaattatctgacggcttattagactttatggcgaataattaattaa

SEQ ID NO: 101433 - DNA, 1342 bp, Glycine max
  Clone ID: PAT_MRT3847_62607C.1
ccgaattcccggtcgccttacgcgccaagttttagaatcaatcaaacaaacctcagtaccaagaaccctatgccttgacaaaccctaacgttgatttaaatcgtttgttcgcacttcaatctccaagtcataaatacactcttctctccccattcactcgcattggcttttggtagttgaagtctttcattgttgtcaaattcagatcaggactactcaggcaagtgatagcagctctgggcttcgagggctagaatcctccgaagaattcaagagaagagggaaacaattgagagaaaagcataatcctaacagaaaggaatctacggcactaatggcagacaaagctaagggaatggccagctcagcgcatcacacgaaatcctttagtccatctgcagtttagtttgttcccggtggggcaattcacacgctacccatgaatcccattttgatttgcttgttggaggcggagaattgagaagaaaatgagagcagtgtccctttggcttcggcgcaaacaccaattgccgttggcattggcatttcgcagattctcgacatctaattcgaaggtgaaaatctttgatcgcgagttgaagcgcacacaacgtgaccgagccgcatggttgactccctcacacgaccctcttcttcacaccgtcgctcaaaatctcttggaccgcttgcaggttcctttagttacttagcttcccttcccttctaaattccaacttcaattctctttgttgttgtttaggactgtaagaagacttttccaactgcgctatgcttaggaggctcattacaacctatcacgcgctctctttctgctcctcctggtggcgtggaaaagcttattgtcatggatgcctcctatgatatgcttcaagcctgtaaaaatgctcaccacaatgccaccgttgagacccactttcttgttgctgacgaagagtttcttcctatcaaagaaagctctgtggatttggttgttagttgcttgggactacactggactaatgatctgcctggagcaatgatacagtctagattggcattgaagcctgatggcttatttttagcagctattcttggtggagaaacattaaagtgacaatgtttatttttatttcttgaaatttctttggaacagaaatggatgggggcattctaattaatgatatttgtgctgctaccagggagctcagaatagcttgtacgttggcacaaatggagcgtgaaggagggatcagtccccgagtatcacctttggcacaggttcgagatgctgggaatcttttgactagggcaggtttcacccttccaggggttgatgttgatg

SEQ ID NO: 101434 - DNA, 766 bp, Glycine max
  Clone ID: PAT_MRT3847_62608C.1
caaaccctaacgttgatttaaatcgtttgttcgcacttcaatctccaagtcataaatacactcttctctccccattcactcgcattggcttttggtagttgaagtctttcattgttgtcaaattcagatcagtccatctgcagtttagtttgttcccggtggggcaattcacacgctacccatgaatcccattttgatttgcttgttggaggcggagaattgagaagaaaatgagagcagtgtccctttggcttcggcgcaaacaccaattgtcgttggcattggcatttcgcagattctcgacatctaattcgaaggtgaaaatctttgatcgcgagttgaagcgcacacaacgtgaccgagccgcatggttgactccctcacacgaccctcttcttcacaccgtcgctcaaaatctcttggaccgcttgcaggactgtaagaagacttttccaactgcgctatgcttaggaggctcattacaacctatcacgcgctctctttctgttcctcctgccccaggtggcgtggaaaagcttattgtcatggatgcctcctatgatatgcttcaagcctgtaaaaatgctcaccacaatgccaccgttgagacccactttcttgttgctgacgaagagtttcttcctatcaaagaaagctctgtggatttggttgttagttgcttgggactacactggactaatgatctgcctggagcaatgatacagtctagattggcattgaagcctgatggcttatttttagcagc

SEQ ID NO: 101435 - DNA, 377 bp, Glycine max
  Clone ID: PAT_MRT3847_62609C.1
tcttccgttgacgcgtgggagcatcccaagttttagaatcaatcaaacaaacctcagtaccaagaaccctatgccttgacaaaccctaacgttgatttaaatcgtttgttcgcacttcaatctccaagtcataaatacactcttctctccccattcactcgcattggcttttggtagttgaagtctttcattgttgtcaaattcagatcagtcttgaaaactttcattccgccaccagcattctttatcttggtccaaaaccttttaattcactcaggactactcaggcaagtgatagcagctctgggctttgagggctagaatcctccgaagaatttaagagaagagggaaacaattgagagaaaagaaaggaatc

SEQ ID NO: 101436 - DNA, 266 bp, Glycine max
  Clone ID: PAT_MRT3847_6260C.1
tctccgcgggcgaataaatatttatttatttattttttttttggattgcaaaatatacattatatttattccacgaaggctcaaacattataggtgatactctcactaaacattataacacccattttaaacatacataccattttcatatttccctatatcaaacacttactactacatacatacctatccactcaaacaaaatttttatattttttcaactactattatttacaaataattattattctttttataccttcttt

SEQ ID NO: 101437 - DNA, 2249 bp, Glycine max
  Clone ID: PAT_MRT3847_62610C.1
gaaaaccaacgacaacaacaacaacaacaacttctcttcttccctctcagactctctctctccttaccactgtttcatgcaaaaccatttctagggttttcggttttctcgccattcttcaattctcgcactccggcaccgcttcgccatggcatttccgaacaagaagctcatcgacgaccccaatgatgttgtgactgaattcattgaaggtcttgtggagacatattctggactacagtatttagatggctttcctctggtgaaggttgtcttcacgtgtagatgtttcagctgcaacatatgatgaagttgcaatcataccacggggtaggaagaggccatgagcactgcccatgctggattttgatattcaggcctgtatatgtgggggattttcatattctgcagcaaattttgtccagttaaacaaactatgttccgataactcgaggagaaagagtggtccttatgttctatgggttgggtggcactcctacaatggaactaatgattacagctggaaaaacagttccaaaattacaactggaacatggattggactgttattgttggggatgattgtgcactacctccacctcgagggattgcgggaagaagaggtttggcagggactattctggttcacaaggttgcaggagctgctgctgctggtggtctttctcttgctgatgttgctgctgaagcaaaacatgcatctgaaatagtgggaacaatgggtgttgctttgactgtgtgctcaattcctggtcaagttgcatcagatcgtttggggccaggaaagatggaacttggtcttggaattcatggagaacctggggcagctgtggctgatattcagcccgtaaatgtggtggtttctcatgttctacagcaaatattgtccacggaaacaaactatgtaccgataactcgaggagaaagagtggtccttatggtcaatgggttaggtgccactcctacaatggaactaatgattatagctggaaaaacagttccaaaattacagctagaacatggattggctgttgatagagtttatacagggtcatttatgacttctcttgatatggcaggtttctcaatttctattatgaaggctgatccagttattcttcaacgattagatgctccaactaaagctccttattggcctgttgctgctgatggtaatcacccgcctgctaagattcctgttccaattccagcatctcgatcagcaaagactgatgagccacgaagtcagccattacaactaaatgagcaaggccaaattcttgaggtagccattgaagctgctgcaaatgcaattataaatctgaaggacaatttaaatgaatgggatggtaaagttggtgatggtgactgtggatcaactatgtatagaggtgcaaaagcaattcttgaggacatcaaaaattaccctctaaatgatgctgcagaaactgtcggtgaaattggttcatcaattggaagatccatgggaggaacaagtgggatcatatatactatattttttaaggcagcacattcggtgctaaaagcaagttcccattctggtgtcacttcaaaacaatgggctgaagcactcgcagtttccattgctgctgtaagtaaatatgggggggctagtgctggatatagaacattgttagatgcccttatcccagcatcgttggttcttgaagagaaattaaattctggagttgatccttgcatcgcatttgttctctcctctgaagctgcattggctggagctcagtcaacggtagacatgcaagcacaggctggacgttcgacttacttttctggagagattctttcaacagttcctgatcctggtgctatggctgccgctacatggtacagagccgcggccttagctgtgaaggccaaataccagagctaagctatatacttgaaatgtcctgtttgtgcggatatacccaagttttgttccaaattttgtactctcctgtaaccatttaaggctctccgcttatgtctttcatgcataaagctgagagagcaattcccagtcactttcatatacgccaaaaatttaaaagtggatgtaaatttgaaactttattactacaatcgacaataatgtcagtctcaatttgagctcataattgtaatcttcgtggctgctttattcatttttatcagtttacagcatgcccttaagttgaaaacaataaatttcgttggtcatttctcccaaa

SEQ ID NO: 101438 - DNA, 1820 bp, Glycine max
  Clone ID: PAT_MRT3847_62611C.1
acgattacacgtgtgcccacgcgtccgtgcgaccccactctccctggcaaccctagctcccactctcttgcccgcgaccctagctctcccactctcgctcgacgctggttccgcttgcaacccttgctcgcggtggttcagagcaatctctctcgcacgcacggtggtcataattgtccatctgcagtttagtttgttcccggtggggcaattcacacgctacccatgaatcccatgatattgggaacactctaaatcacactccctacactaactctcactctaattcaaatcccaagaaccctactcgcggtcaacacctgcaggggtgaagatagggatggtgggcatgtctggatgtagttcccagttggcagtgagcgcaggccaaataccatgcgagtgggcggttggttcccttcctctacttccaaaaggcgtttccggcctgtgaatgtttctgtttctgctttctccgataaatacttttaatccggagaattgagaagaaaatgagagcggtgtacctttggcttcggcgcaaacaccaattgccgttggcattggcatttcgcagattctcgacatactaattcgaaggtgaaaatctttgatcgcgagttgaagcgcacacaacgtgagccgagccgcatggttgactgcctcacacgaccctcttcttcacatctggtcgctcaaaatctcatggaccacttgcaggactgtaagaagacttttccaactgcgctatgcttaggaggctcattaccaacctatcacgcgctctctttctgctcctcctgccccaggtggcgtggaaaagcttattgtcatggatgcctcctatgatatgcttcaagcctgtaaaaatgctcaccacaatgccaccgttgagacccacgttctgtgtttcggaggaggacgtttctctctctcagagaattttctctggtgtgacgaaagtatttaacttcacactacccatgatggccgaccgtttcctctccaattctctacatttatctgttgtcatatctgctaattggcccattttcaccttcttgaggaggtctagaaacgtcagaagagctcagaatagcttgtacgttggcacaaatggagcgtgaaggtgggatcagtccccgagtatcacctttggcacaggttcgagatgctgggaatcttttgactagggcaggtttcacccttccaggggttgatgttgatgagtatgtagttaaatatgaaagtgctctggagcttatagaacatctccgtgcaatgggtgaaacaaatgctctttatcaaatgaacaatatcctaaagagggacacagcgttagcaactgcagctatttatgattcaatgttttctgcagaagacggcactgtacctgcaacattccaggttatatacatgacggggtggagagaacatccttctcagcagaaagcaaaaagaaggggatcagccactatatctttcaacgatattcagaagcaatttggaagccaaaattgattgtccttccccttatttttcactctgcatattttagtttaattaatatacttggcgcattgtatgtgtgggtatactcttaaatggttgacttcatgtaaaatatgagtttgacattatgaaatattattttcttttgatttaattactatatagtttagatattaagaaatagaaatgtgtcccaatggatttacagacattcttcagtatccagatcgattttcacatgggacatgtatgcggatataattcaaatggcaacacgatacagccatgaatgtctggctcctttgtct

SEQ ID NO: 101439 - DNA, 808 bp, Glycine max
  unsure (1)..(808): unsure at all n locations
  Clone ID: PAT_MRT3847_62612C.1
cttacgtgcagatgtttcagctgcaacatatgataaagttgctttcatatcagggggaggaattggccatgagcctgcccatgctggatttgtgggagaaggaatgcttactgcagcaatttgtggggatacgagctgtgactggtcctaagggatgtcttttggttgtaaagtgttcgaatttgggtgttgatagaactatactcgtgatcgtttgaactttggcttggctgccaagatagcaaaatctgaagggtataaagtagagactgttattgttggtgacgattgtgcactacctccacctcgagggattgctggaagaagaggtttggcaggaactattctggttcacaaggttgcaggagctgctgctgctggtggtctttctcttgctgatgttgctgcagaagctaaacatgcatctgaaatagtgggaacaatgggtgttgctctgactgtgtgcacaattcctggtcaagttgcatcagatcgtttgggaccaggaaagatggaacttggtcttggaattcatggagaacctggggcagctgtggctgatattcagcccgtaaatgtggtggtttctcatgttctgcagcaaattttgtccacggaaacaaactatgttccgataactcgaggagaaagagtggtccttatggtcaatgggttgggtggcactcctacaatggaactaatgattacagctgganaaacagttccaaagttacagctagaacatggattggctgntgatagagtttatacagggtcatttatgacttctcttgatatggcaggtttc

SEQ ID NO: 101440 - DNA, 506 bp, Glycine max
  Clone ID: PAT_MRT3847_62613C.1
gacgacagaaggggtgggaaaaggataataccttagtcaacacaaccttgctaaaagactatacaagtaaatatacattgttgatggattaggatggagggaactaccccaaatgggtcaacctccttgagtagacaactcaatgttttacatgtcagaggacacttgatatttccctttccatgggacacacgatgtttctcttcccaaaggacataagatgcccaccatgctaaaggacaaataatgttcgaatatagacaatctcattgcttgccatcctccagataccaactaaattgatgttcaaaatatggcacatgattccaagacattagatcaaaagtcccaccacctttttaagttgatgagatcagaaacaccaccaactcctagattggtgaggtttgaagcactaccacatctatagattggtgtgattagaaagtcattaaaatattgattccacctcgtatcaacacaagactttgacttaaggttaatag

SEQ ID NO: 101441 - DNA, 277 bp, Glycine max
  Clone ID: PAT_MRT3847_62614C.1
cggaaccggaatgaacgcccagctcactaagctgactgccgccctgtcgtccttttttttttttttttttagagcaaaacttatattaggagcaggaggggttgcaaaaggattccctacataaacttattccctactccttagtctttttattaggaaaaactggtcccctgactaaaacattgttggaaccattcacacaaaaccaagaaataacatctatccaaagacactctagtaataatgcacggaccaccatccaaatgcttattacaaa

SEQ ID NO: 101442 - DNA, 380 bp, Glycine max
  unsure (1)..(380): unsure at all n locations
  Clone ID: PAT_MRT3847_62615C.1
gcaacagaaacaaatgtggtagtattaggtggcatgaccgaaatgacaggagcggccagcagcgttgagatcaacaatctcgctagctttgctgtanaggaacaaaacaaaagatagaattcagctctggactttgtgatggtgattagcgcacagcatcaaatggcttctggtgtgaattactacataacattggaagcaaaagatggtgggatgaaaaatgactattatgcgaaagggtgggacagggaataccaatagttgatagaattcatgcctacatttggcacatgaagcgagatcgaccatctcgctagctaagctgggagggccctatacataagatagaatgcagatattgagtttgtggggctgaatag

SEQ ID NO: 101443 - DNA, 339 bp, Glycine max
  Clone ID: PAT_MRT3847_62616C.1
aaaaaaaaaaaaaaacccccctctgaaaaggggtaaataactttcctttcaaaaaacccggaaatttccctagaggcccttccaaaaactgggggggtcatggcccctccccctgaaaataaaataaaaatccgcctttcaaacaaaaagtaacccgggttaaaggggaaaaaaagggccgccctttcccccacggggatttgggggccctcctaaaaaacccccccgggccaatttaactttgggttttccctacccccccgggaaaagggagtggaaaaccgtttttttttgggtttgggaaaccctttggagggaagggggccttcctttccactt

SEQ ID NO: 101444 - DNA, 367 bp, Glycine max
  Clone ID: PAT_MRT3847_62617C.1
cgcttctaacgtttaaacccatgaggtcgagccgcccactagggcacaggaggaaattgtggcttctagggcaagcgcttggatacctgccctgtcgagtggccatcgtaaggctcaggctagtgggccgccagttgcccctcgggcgtttctcctggatagtttcggacgtactgaccgcaccgtgcgtggtgccctgctcctggttgatccttatcgtcccactcctgtatatgcctgctgaagtatttttgctgcgcctttccgcggcggtaggccccttggagtggttacatgttcgactaccatcgcgcatggttgtgcagacctgcccacaggggttcacgctttgagcaccactacccat

SEQ ID NO: 101445 - DNA, 400 bp, Glycine max
  Clone ID: PAT_MRT3847_62618C.1
ttttgttcatcgaaaatttgcatggtgaaaagatgaatcagggaaacatgatgattccgcacgttccaagtggaggcgcgctctctgcgctactgaagcttgggctgcttggtggaatagctttatatgcagatgctaacagtctatacaacgttgaaggaggtcaccgagccattgttttcaaccgcctagttggtgtaaaagacaaggtctatcctgcaggaacacactttatgattccgtggtttgagaggcctgatatctatgatgtccgcgcactaccccatctaagtgagagtacatctggtggtcgtgacctacaaatggcgaaaattggacttctagttcttactggtgctttgaccaaccaaatacctacggcttatcggacccttggaga

SEQ ID NO: 101446 - DNA, 902 bp, Glycine max
  Clone ID: PAT_MRT3847_62619C.1
tcgtcccacgcgtccgtacggctgcgagaagacgacagaaggggacgcaactcaacaacaaaagcctttttttttaaaaaaaaaattcctttaaaaaatgaagaatactatcttcttcgctctctttcttgtttgtgccttcacctcatacctaccttcagccaccgctgatactatcttcgacataaatggtgattttgtccgaaacggtggcacatactacatcttgccagttataagaggagacggaggtggaatagaattcgccgcaacaggaaacgaaacatgccctctcactgtagtgcaatctccccttgaggtctctaagggtctaccactaatcatttcatcaccattcgaaatccttagcatccaagaaggccttattttgaacattgggttcacttttgtgcccccctgtgccctaattccttctgagtggactactgttaagggtttaccagaaggactcgctgttaaacttactgggtatgaaaataaagtgcctggttggtttaaaattgagagagtttcccttgaattcaatgactataagcttgtgttctgtgcaactgaagatagcacgtgtgtggatattggggtttatattgatggtgaaggaaacaggcgtttggtggtgactgagaataatgatccgttattggttcactttaagaaagttgaagttgaatcatcagctactgcttgaggtggccttaaaaaatcatgtggtttctcgtagtgtaagactgaataaatgctttgattgtaatgattaattcaagactgaataaaatatgaatagtgcctttacgaatttctgtaacaaaaaatatgtaatacgtgtaaagatggagctatattcaatgtccgttaattccgtataacttttttctaaagtc

SEQ ID NO: 101447 - DNA, 331 bp, Glycine max
  Clone ID: PAT_MRT3847_6261C.1
atcactcgtgcgagtcattctatatttggtgttctatgttataccaatcttagctgcgtaaggtcaattgaaaattactgataaaacacgtgccagagccagacgttcgttgagtctatttttatagtatgtttcactctactctatagccattctaagattctcttctagttctatcttgcttctatgtgcttaacattgctataattgttgaataatccttgtaaaatttgcttgataaaactctattggtttagctatcatttcatcactgtttagtcattgggtattgattgtctttgtgtgtccttgtttgtgagttgtcacatat

SEQ ID NO: 101448 - DNA, 1458 bp, Glycine max
  Clone ID: PAT_MRT3847_62620C.1
ggctcgagagagaacgagaaaaagacatcgagaaagcaatgctggaggctgagagggaaagggaaagagaaaaggataggatggctgttgatagagcaactttagaggctcgtgatagggcatatgctgaatcttgtgaaagggctgcatttgaaagagcaactgtggaagcacggtacaaggcactggctgaggccagggaaagacttgagaaggcatgtgctgaggccagggataagtcaaacattgataaagaaactatagaggcaagactgaaagcagagcgtgctgcagtagaaagagcaactgcagaggctcaagaccaagctatggaaaaattaaagaatgaaaggactgcatttgagtccagagaacagttagagagatctgtatctgacaagttttgtagaagacaagactcttcatcctccgatatgctggatccacagtttcagaacttaagctcttccacaggttccagacatccatattcactttatggtgctgcctctttttctgagagatcagaaagagaaggtgaatcagctcagaggtgtagagctagactggagaggcatcgccgaacagctgagcgtgcagcgaaagctttggcagaaaagaacatgcgtgaccttctagctcagaaagaacaggctgaaagaaataggctatccgagactctggatgctgaagtaaggagatggtcaggtggaaaagaaggaaacttgcgtgccttactttttcccttccaatatacccttgggcctgattttgggtggcaactaatcccattgaccgaggtcattacttctgctgctgtgaaaaaagcttacaggaaggccaccctgtgtgttcatcctggcaaattacagcaacgtggagcaagtattcaacccaaatacatatgtgaaaaggttttcgatcttttgaaggaagcttggaacaaattcaactcagaggagcggtaacatgcctggcagccaaggtctgtttttttctccctccctgtctcttgcaagtgtgtatagaagcttcttcaccttggccgggtaattccttcccaaagtgacacacagtccaaacttccaaaaccgtaataattattttgtcatagtgtatgttctgttgtaatagtctcataagtgtttgtatttatgaagaaattttttgcccatggtatagcaagaaattaagaaatacaaaagtaaatagatataaagcatggggctaagactggctttctgttagcaaaattgggaattattgttacaataactttttaatcaattttaagaataaaaggaccaagaaactgaacaaattaggtgggtgctgtcaaagtcaatgtttagcaagaaaatatgttagatcatacattaactacttgaacattgttttggtggtgcaacatttgctgctgttcatgttatatatcttatatcaacatcgttaattgtt

SEQ ID NO: 101449 - DNA, 554 bp, Glycine max
  unsure (1)..(554): unsure at all n locations
  Clone ID: PAT_MRT3847_62621C.1
gaccattcctcttccatnacntnncaatcttnccntcctaatttactctaccaatctccttcaacaatatccgcagctagatgcttccttgtttctcgacatagaggttggtcaatccttaatcatcgatgatcccgccgccggggcattcaccgtctccgctttcgacgccaatcactgccctggtaatattcacttctctaatttatttggtatatttgtattttgattcaactatgtgtgcgtgtgttttgattcacgttgagtcattcataatcatgttgagataacagctactgtaattttagataaatgttcacatgtttggtttcaccgtaaagaattaattccagatctaaatttgattttgaattgaggtaaatttatatagcttctgcgtttgttaaatttttttataacgagttttactactaccttgctgttagaataaaaacttccaaacataaatcacatcaggtcaaaattaattttaaccaaaatcaatttcattcgaacacacactccattatgcttgaattctgtcctggagttca

SEQ ID NO: 101450 - DNA, 371 bp, Glycine max
  Clone ID: PAT_MRT3847_62622C.1
ttttcacaataaacaaccatttccaaagaagaaaatttttttaaacacattttcatagttccccctttttaaatatctttatatgcaaaaccacttccatctaaattcattatttataccctttttactcaaaacttcatttcagaaattaacattaatttccaatgccaaatttatatttaacttattctatatctcatttttagatgtaccaatccaaaaaagaaaaaattcttggactttttcaatacccacattatcttcctttaaagggatagaatatttctttttattctattttttaaccaatttaccttttctttaaactatctcaaacctaaaccttctttttaaaattttaaactttttaa

SEQ ID NO: 101451 - DNA, 143 bp, Glycine max
  Clone ID: PAT_MRT3847_62623C.1
gggtcctacacctttaagagtgagggcacagggggcttgaaatctaatcaaactatctactattttaccggcgtcttagccgttgctccctttgagcaattttgactaaatgccgaacttggtactatttctgcacttttttc

SEQ ID NO: 101452 - DNA, 716 bp, Glycine max
  Clone ID: PAT_MRT3847_62624C.1
tcttgctcttgttcaagattggcctatcaaattatgtaccagcgtcttttgttttcggggattccctgctcgatgtagggaacaacaactatattgtttcactggccaaagcaaaccatgacccttatggaattgattttggaatggccactggtcgtttcagcaatggaagaacagttgcagatgttataaatcagaaactgggtcttggcttttctcctccttacttggctcccactactactggatcagtggttctaaagggtgtcaattatgcctctggtgcaggtggaattcttaacaactctggccaaatttttgggggacgaatcaacttcgatgcacagatagataactttgcaaatacgagggaagaaatcatctccttaattggtgttcctgcagctctcaatttgtttaagaaggccctctttacagtagcattaggctcaaatgatttcttggataactatttgacacccatactctcaattccagagagggtgttggtatctccggaatcatttgtggccacattggtatcaagactcagactacaactcactcggctattcaatctaggggccagaaaaattgttgtggtaaatgtagggcctattgggtgtataccatatgtgagggattttaccccatttgctggagatgaatgtgtcacgttaccaaatgagctggctcagttatttaacacccaattg

SEQ ID NO: 101453 - DNA, 477 bp, Glycine max
  unsure (1)..(477): unsure at all n locations
  Clone ID: PAT_MRT3847_62625C.1
ggttntttttttttttttttatgttttttttttgtttttttttctttttccttttattttttcttaaaagggaaaattctttttttttaagacaaaccaaattcaaggggggacaaaaaaaaccacgatttttccccactcctgtattttaggcctccccgattcaactagagggcccaattttttttttttttttaaatccccaaccccgtttttattgggggggaaaaatttattccctttccaagagggaaggattcaaaggtttagaattaaattcattccctgggaaaaataacaaaaaggggcttttgggcttccccttggagttttttatttttttgtagaaggggcccttgtgttttttcccaaaagccccaagggggacacccctacctttgttggagtaaatcccgaaaaacctggggcccctgtcttttttcccaagcttaaaacactttttnttccatttggagg

SEQ ID NO: 101454 - DNA, 385 bp, Glycine max
  Clone ID: PAT_MRT3847_62626C.1
cggcacgaggcctcgtgccgaattcggcacgaggctcacaacttatacgaggctgactttggggatgcggacgcgccggtggagccgtgggcgaaggagttcgccgcttgggttcacaagagtgcggcgctgcccgccccggagcgcgaggcagccctgctgcagtatgcgaagcagccgacattccgccgtgcgcacccccgcgaggaacattggatgccgattttctttgcgctcggcgcggccgactcgcaggagaaggttcaaatcctggccgatcgcatcctctgcggttccctcgccgtgtccacgttgctgtgggaatgagagcgcaactatgtatataatgccacaatagactttaagccaaactaaaaaaaaaaaa

SEQ ID NO: 101455 - DNA, 343 bp, Glycine max
  Clone ID: PAT_MRT3847_62627C.1
atgaaaataagaaaattaaccatacaaactatatatgaatgaccaaaattgttttaaataattctaatcttaaccataaattgaaattatatgattaaattcactcctctcatgctttcatctaacctgaataataaactagatctgaggataaaaaaaatgtgtcttaatcagattattgaataatctttttcctcatagcaaatcaaacacattaactttgcttgactcttagaagtataaatgatacatagagtttttgtccctcgtcatataaattcaatacatgaaaaatgaatctcatcccaggttttcagcaacacaacatcatgttggggctttg

SEQ ID NO: 101456 - DNA, 248 bp, Glycine max
  Clone ID: PAT_MRT3847_62628C.1
attaaaaaacaatcctggaagattgggaaacagcacataaaccattgggtcactgaaacacctttccataatgaaactgaatacggctgaatcatccctccctttgatcatttgaccccccccatttgacaatcaatattcctaaccaacagctgcctctatctctgccatccccccaaataaagacgcggagcaatgatccggttgtaagatataagggccaatttgtcctaaaaccatcggataat

SEQ ID NO: 101457 - DNA, 359 bp, Glycine max
  Clone ID: PAT_MRT3847_62629C.1
acgctgacgctatcgaatcaactatcatgtcagccgacgagcaccacttcgagcaccatgccgaggccagagcctacaaaagatactctcaaaaagacggtaccataggcaagaacagctacatgaacatctacggccggatctgcagggttgcctacgttgctactgacaaaactgctaagcacagtgacgctcactgtcactctgagggaaacgatattggcactgacaagaaaactgacgatatactggccgatattgacaactgtgatgacacccatgagaatcgtactgagtaccggactaatgaccatgccaatgatagagcttagagtcgacttactggaaatggtaacgct

SEQ ID NO: 101458 - DNA, 212 bp, Glycine max
  Clone ID: PAT_MRT3847_6262C.1
tgagctggggacgtagacccccatgctcatgacctggaagcagacgaagagatcctgggcctcgaggccgtaaattgcgtcgattatgtcgagagcacaagccttatggccagcctgtgctcgatcaattataaaaaaatcacgttgataagaaaagcctctatgagaggggtggccactagaattctccttttttatattaattaaacaca

SEQ ID NO: 101459 - DNA, 328 bp, Glycine max
  Clone ID: PAT_MRT3847_62630C.1
aaaaaaaaagactccgatttatttcaacaaatataagagccccacattgaagtttttctcgacatggtaaaaatggaatatcaacaaaaagttatgatggtggtagttatggttatagtaaaaatacttgtgtcacagtaattaaattaattaacgaaataaaatttagccaatagggtgtttagggataaagaggaattctgattgaagtatgagtgtggtagcaatgtttgatgatagcaatgatcaaatcatgggtagaaaaggagggtttgaagactgtgatgtggggctgagaaataatttgaggtttctgtggcactaacaa

SEQ ID NO: 101460 - DNA, 145 bp, Glycine max
  Clone ID: PAT_MRT3847_62631C.1
gttgcttgacaagttatacgctggaggagtaattcatattagcagccaaaactggagcaggctggatgtattcttcttcctcctttggagaatggatctctctccctctttctcgtcactagctctgtgcattcttctctcctct

SEQ ID NO: 101461 - DNA, 209 bp, Glycine max
  Clone ID: PAT_MRT3847_62632C.1
ggtttgcacactaaaatgcgtgaaattaatttatgcggataaaattcaccaaagaaaaatactaaaaatcgcaggtaaagactacaatgaaacctattgagaatgtaaagcttcattcttgcttgttcaacctaatttaccaagccacatattttaggaggctattgcttctaaaattttcttaacattaccaactactgatagatccc

SEQ ID NO: 101462 - DNA, 582 bp, Glycine max
  Clone ID: PAT_MRT3847_62633C.1
cgcaatgaagagacagcagaggggaatcaccagggtaccatcaccagaccgaacaagcactgggcatgatgacaattacagctaaagggagtggtaacaacaacttcaaacagtctgaaggaaatcatggatgtgttcatgaggccaccaaatgcaaatggcaggcacaaagggatggatagcctttaaggcaagaaaaaatgagaagaggctacaacgagatggaccggaagcaaaccatgtgaggcttcggaaatgaaaggttaatgatggacccaagatggagggagagggaatgaacaaataaggattagaaaaaaaagttagggctgataaaaaagatgctctaatcactgctcttctaaacaagctcagaagaaaaaagatgtagttagctaagtttgcttgagctagatagattcatagctacctacctagctagctattatgcgtctttcttcttctcatgaagcaaagcttgatttaagaggtttgttataacttaaaagaactaccacaatgtatatatcctcggtcaatattaatacatatatacatacattctacccaaaacagactatt

SEQ ID NO: 101463 - DNA, 430 bp, Glycine max
  unsure (1)..(430): unsure at all n locations
  Clone ID: PAT_MRT3847_62634C.1
gtctagcaaagctagcatttnattaccttactattgttgggttgtggccattnttnatgtanagncaattntattgnctnnttgnattttgaacntnttngttgtttnaaatntnnnaaaaganagacnnttgggaatgtanttganntncaaannagcnnngtgggttannngggtttaattgctttgcaaatttttnacacttannaagttgggggcttgtaggcgatgaaactgatgcattgnacttggnnaacgttttnnaattcnttgattcggntgaanncgttggggtatgcantcttaaccttttgaagtttctttaacacctgaaaagcttcngtgcaaccaaacatagggggttttccatggtccattagggtccatcgtagtttcctggggacctggtgtgctcacggtacacgaaacc

SEQ ID NO: 101464 - DNA, 482 bp, Glycine max
  Clone ID: PAT_MRT3847_62635C.1
ggaagccagaattgccttgccagaagactatcattcacactgcattgccctgccaacaaaaaagtagaatcacaacactgggagagtgcagcagaaaaacagggttcaggagcctttgaaaaatttattaaaattaaataactagctctgaacacattacatcacaaggaaacatttcaacttaaagctctaaatcctttcatataacctcaacctcaagctgtagtactaaattaattggaaatatcaaaaaaaatggattcatgttatctgtatggacttccaaaatgacatcatattctaagtttatgagcaacaaatatgaggatgatgatgatgatgttaaagatcacagggcttggcatgcatttatggaaaaaaatcttttgggaggtaaagaatctgtgatgctgcccaattactctggaagataaaatcagttgtatctagggggagcataagaggagctaaccttgaccatt

SEQ ID NO: 101465 - DNA, 237 bp, Glycine max
  Clone ID: PAT_MRT3847_62636C.1
ataagatgtaccagacatataaaggtctcaagcgcttcagcaagccaaaactttcccgaacaaatttcacgattaaccattatgctggagatgttacatatcaagcagattattttcttgataaaaacaaagatttgttgtagcagagcatcaagctcttttatgcgcttccaagtgtccatttgttgctaatgtcttccctcctttaccagaggagacatcaaagcaatcaaaatt

SEQ ID NO: 101466 - DNA, 363 bp, Glycine max
  Clone ID: PAT_MRT3847_62637C.1
taagcatcttatcaacatcaacttgaatctagggtctacaattaatttgtcttgaaattaagaccagcctgggtcattgatcacaatctcatcaagggaaagtagtgaaaaaataaaggattattgatcatcagggatggcaactcgaagatatgagtttggaaggatgaatgaggctagccacctagactccatcagagttgccttggttgaattcctctccactagcatttttgtctttgcttggagaaggctctgcccttgctttgtgacaaatttacatggaactcagggtatcagcggccgagatatgtggtaattgcactagcttatgccctttggtctatattgctgcttattttt

SEQ ID NO: 101467 - DNA, 540 bp, Glycine max
  unsure (1)..(540): unsure at all n locations
  Clone ID: PAT_MRT3847_62638C.1
cattgccttaactaataaatagacacggaaggaaactcaaaaaaccacccaaaaaaaaattcaaaaaacacaaacaacaacctttgacacaacatagtggagcaagaagaatcgaagttgtttggtttctgttttttttttttttctttttctcctatgtaatgcatcagaagaaatccgaagtccagatcggaaaagaaagcagtggcgtctcttccgatttcaaccaccacccactcccaatcctaactccgaacccaaaccaagatgctctccaatcactaacctccaccgcaccctacaaaagaccttccctcaccacccaaccccatctttccaaatccccaaccctccacaaattcccaaccctaaaaccacgccacgttaccaccaccaccgtcgtcgncaccaccaccaccaccgttctctccctcctccgacggcgcctccgacaccgtcttcgcctctttctcttcctcttgctccccttcttctacttcctcgtctcccaccccacaaactccttcctcctcgatttcc

SEQ ID NO: 101468 - DNA, 1584 bp, Glycine max
  unsure (1)..(1584): unsure at all n locations
  Clone ID: PAT_MRT3847_62639C.1
ggtccggaattcccgcgtcgacccacgcgtccgctggtggtggaggagctggtgggtatggtgaaggaggagcacatagtggtggatatggaagtggtggaggagctggtgatggtggtggtgcaggaggagagcatggtggtggttatggtggtggccaaggaggtggggttggagcgggtggagggtatggtgatggtggagcacatggaggtggttatggtggcggccaaggaggtggagcaggtggagggtatggtgctggtggggagcatggtggtggatatggcggtggtgaaggaggtggagcaggtggagggtatggtgcaagtggagaacatggtggtggttatggtggtggtcaaggaggaggaagtggaggagggtatggtgctggtggagatcatggtgctgctggctatggtggtggagctggaggtggagctggtggaggctatggtgccggtggagaacatggcattggctatggaggaggtggtggaagtggtggagggagtggaggaggttatggtgatggaggagctcatggaggtggatacggtggcggcgcgggtgccggtggaggaggagggtatggggctggtggagcacatggtggtggttttggaggaggtggtggaagtggtggtggccatggtggctatgttccctaagaactactcttcaatgcacaatagatgtgcaagtgtcccctttcgcgtatcaagaataataagtatgctattaataacaggatcataataattaataacgtaacaatcatatcatcaccattaattctaagcacgttgttatcaactcgtgatttttatgtaacaaaagtatttccataattattatttgcattatcgtgaaactactatcatcttgtaattgctcttctgattatatatatttgcataaaagaaatatgtttagagtttgagaaactctttttgccgtcatattttctgacgttgctcagcctgatcaggctaggattttggggctgaatgcttcatattatctaaaaacagggggtcattttgttatttcaatcaaggctaactgcatagactccacagtccctgctgaggcagtgtttgaaagcgaagtgaacaagttaaaggctgatcaattcaaaccattcgagcaagtcacccttgaaccatttgagagggaccatgcctgtgtggttggtggatacagaatgcccaagaagaaaaaagatgctgctgagtagattgttttccagtagcccgtaggcgtgtaccaatgtcatttcatgagatttcgtgttaattttgttttgaaaccttggttatcaaaattactttgtaccttttatagtaaagtagtcaagttatttgcccccaatatttaccgtgtttgctgtaaaaaattcacatataatctgcccaaaattacttccttagcagaacgagatgagatcaacagcaatgcttgtacgttctacatgtgaatctagtttatttaagtattgaaaatctatgatctattattattaaaagaaaaaagaaaagagggcggtgccgctnctagaggatcccaaggcttagcgta

SEQ ID NO: 101469 - DNA, 251 bp, Glycine max
  Clone ID: PAT_MRT3847_6263C.1
cttacgccaatcacctcaacgaaactcccatattcaatcacaaacaacaatgtcttctaccaacaacaacatcgaggctgtcgccaaccagatgcccactgggggctctggagagttcaaccccaagcctgctggcgctgcccgtgagaaccacgatggccacaaacccggtgtcctcgtaggcaacgatgccgcccccgagttccacgcacaggtcctccctgccggctccgccccatccaacgcatcct

SEQ ID NO: 101470 - DNA, 632 bp, Glycine max
  Clone ID: PAT_MRT3847_62640C.1
tattagcctctcttttttccacgcaattttgtataatcaaatatgagtggaggtgttagcctgggtcttttttattttttaattttttatctgctgttagcatgggtctgagttaacatgtgagagagatatagaaaaaaccatgcccaaatttttctcttttttattttattttcaaatatttttttctcaggcaactagctcatttggtgtgtaaatccaatgaggaaggctaggtgtttagttctgacaagtaagaaatttgatgggaaagtaggtaatctatgttatatcttgtgaaaatcatgtatttattttatgaaaaaggttaccaaaatgcagcctgtacaaggactattgtaccagtgggtttccagttgaatttgaaagaaattgtgggcttctgcccaaaaccaagatacgaaattatataaaaacaatactaaattcagtgttggacttggatgtgagaactttctttgatgctcttaacgtaagtagcaaaaagtcttcctgataaatgtgaatattgggctttatgctgaggagggagtttgttaaattattagttaaaatgtgcactgcttcattaatgaaatgccaagatgctaatttgggcattgtttgatttg

SEQ ID NO: 101471 - DNA, 338 bp, Glycine max
  Clone ID: PAT_MRT3847_62641C.1
aggaaaaggaataacttttttcctttgtgccagtttcctacaccttgaaaattattagcatttgcaaggaaagtagaaagctaaattcacatgtcacaaatcaaaaagggatgatgtggaaatggctggtggagttggagtataaaactcatcatcagtccaattggtctctccccaatgcttcaacatgttttcccatgagcacaagttatcaatgcatttcttcaaccttttatctttaactttaatttgccaatgcccatttgtgtagttagctatttcaacttggctacgatcccatttcaactgggccttttgctttgactttaacatgcaaa

SEQ ID NO: 101472 - DNA, 1442 bp, Glycine max
  unsure (1)..(1442): unsure at all n locations
  Clone ID: PAT_MRT3847_62642C.1
gttttcatttacagtaacttctaaaaggaaaaaacattaaaacaagaattaatcaaacaaaaggacatttgctgaactattatccaaactataagtatagtaattctttatctcaattaaccttcatctctctcacacactcctctcactagctctggtcactgtcttaggaaccctagaacagcaacccagataaactattccaagacacacaccacagaaagagagaatcaaaacaattaagccttggatctgcatagcaaaggcaagcacaagggtcatggattcaaatattcaagactttatagacacatgtaactctgacaacacctgcaatctcatcaccaatagcaccaccaccaacttaaccgcagctagtgctgcctcttcctctcctgcttccacctccatcaccagcagcagccgctacgagaaccagaagcgccgtgactggaacaccttcggtcaatacctcaagaaccaccgtccccctctctccctctccaggtgcagcggtgcacacgtccttgaatttctaaggtacctggatcaatttgggaagaccaaagtgcacacaccgatctgccccttttacgggcacccgaaccctccggcgccatgtccatgtcctcttaggcaagcttgggggagccttgacgcactcatagggcgtttgcgtgcagcttttgaggagaatggagggaagcctgaggcaaacccttttggagcacgagctgtgagactctggagccgtgagtgtgagtcatctgcagtccaaagccagtggacttaagtccgagaagaagaaaaggaagcgtccaccacctcagcaacaacccatgccaataccccatcaccctcttcctcctccaggtgcaagtgcaactcattagaggaattaattctcacactccatgccaatttctaccccccctctctctcaatctatcttttcccgtcaaaactcgaaaaaccgtcatctccaagtgggatcttctcttttaatcccaatatgcttttagagttatgatctaatttagtatcataatatttagggtttttttctttgttaatttttttccttttgttggtgaaagctgctatatctctggtccatatagactgtttgtctttggatcctgtttggtcagggagaagcaaaagtttaaaattaaattctgggatatcatgcaatatctctgctttaaaagcagacagtgcggtactggtagtagactgatagtgcgtgggaagtactgaaaagtggaagtgagactgtgagagagtgaatggatatacatggaagtcatgatccttgtgatgaggaaacctaaagtatggtattatcattcatagtgttctatatatatgtacttttccttttcgttaaatcgtatcaatgtatgtacttctatattctatatatcgtctttnnntctcaa

SEQ ID NO: 101473 - DNA, 264 bp, Glycine max
  Clone ID: PAT_MRT3847_62643C.1
aatgttaaacccattattataatgattgatagggatatcagggacagaactctacaatttaagatatttattctatctaactcacgatctactacaaattacttctttcagcttgtcaccccctctaatggaggaagcttctagaatatacaaaggcatactctagtggtaacaggacttataaatactggactagtgcgaggccatttttttgctaacgcataatataagggatatacctgctgtttagacaataccaatgta

SEQ ID NO: 101474 - DNA, 250 bp, Glycine max
  unsure (1)..(250): unsure at all n locations
  Clone ID: PAT_MRT3847_62644C.1
ctnccttttttttttgtttgtttttacaaacagagagcacatgtttgtagatgatcacgtaaaaaattccaatataacatacaaataacaaaattggagggagaggagagaaacacacatagtcagagacgtgtgaagacttggatattggacatattataagggcaacgctaaacaaactttcatcttagagcagttgaatgaatcccttcagggttcgccgactcgcggggattgaccacttgccagg

SEQ ID NO: 101475 - DNA, 211 bp, Glycine max
  Clone ID: PAT_MRT3847_62645C.1
aaaaacgggaaagagccccgggaaatttatagtttaagcatgttgaaacaacaagcctggagccgggtctaattttacataccacacccaattttgccacaaaactgggcaggtaaaaattgggggatcccccccccccgttccataaataaagggcccaccaaagggcgggggcaaacaatctgtttaaaaagggatttgtcctttaata

SEQ ID NO: 101476 - DNA, 557 bp, Glycine max
  Clone ID: PAT_MRT3847_62646C.1
agacgaaggctcgctttaattcagatatgcacatgttcttttgcacggatttataactcctccacttcttacctgataactgccggagcaagtatttgagtcacagtttgtatactgcttgccccgtttcccagcaggaggccaattaacaaatgaaaattgactgcacattgttgatgaatcatcaagggcttctgattcgaactatttacactccatgcgcagtcaccatacacttttcaatgactttgaacaaaacgcttgtttgaatctggggcagctacttcgctgcttactgcaattcttgaagttgacaagattatctatgccttctgtacggacaaaccatgagggatggcccatggttaccctgtactcagactcgcatttgcatgtggcacgaaaacagtttcaataggcgtgcacacttctggctgaatcgagggcatccagccattgccaatgtggccccctttgaatgacctttgttggtctttccatctgatagaacctgcgaggctgctccctttgatctagaccagagctggaccttgaat

SEQ ID NO: 101477 - DNA, 557 bp, Glycine max
  unsure (1)..(557): unsure at all n locations
  Clone ID: PAT_MRT3847_62647C.1
gtctgactccagattgtgttacatataactctgtaatgaacacatatttcatacaaggtaaaacagaaaatgctttggatctgttgaatgagatgaagagctatggggtaatgccaaatatggtcacttataacattcttattggtgggctttgtaaaactggtgcaattgaaaaagtaataagtgttttgcatgaaatgttagctgtggggtatgttcctacacccattattcacaagtttctgcttaaagcatattcaagaagtagaaaagcagatgcaattttgcaaattcacaagaagcttgtggatatgggcctcaatctcaaccagatggtgtataacacactaatcactgtattatgcagattagggatgactaaaaaagcaaatgtggtgcttacggaaatggtgataaaaggaatttcagctgacattgttacttataatgctcttattcgtggttattgtacaggcagtcatgtggagaaggctnttaatacttattcacagatgttggtgagtggaatctctccaaatattactacttacaatgcc

SEQ ID NO: 101478 - DNA, 272 bp, Glycine max
  Clone ID: PAT_MRT3847_62648C.1
accgaatataaattgattactagtactagaacaaagaaaagagaagagaactatgcatataaaaagaataaaaaaatggaaagtgtgtcagatttagatgcttcaaactatgtaacaaatatgacgttagaagttataattcagtaataatgtcaatgtgtttacagctcaaaaaaaaaaaaaaaaaaaaaaaaaaaaaaaaaaaaaaaaaaaaaaaaaaaaaaaaaaaaaaaaaaaaaaaaaaaaaatttggggggggggccgggccccaa

SEQ ID NO: 101479 - DNA, 245 bp, Glycine max
  Clone ID: PAT_MRT3847_62649C.1
gtggttggattatagagcatgatgaatatcgtcaccaagctagtttcctaagaagggcatggggcaggccaaaccgagtcaagtacttgggcccattctatggcgagcccccgttctacctaaccggtgagatcccacgcgaatacggctggaacactgatgggctttccgcagacccaggaacctttgccaagaaccgtgaacttggactgatccactgcaggcgggccatgctcggagccttg

SEQ ID NO: 101480 - DNA, 357 bp, Glycine max
  Clone ID: PAT_MRT3847_6264C.1
gagatctagctagaatcttgccgtcttctgctctctcgatagttcttttctcgcgcagaggataagcaacctttacctcataaccttgctgaatcgcatcaaatgaaaccctttttcaacgctcacagatgagtttctgccaccaaatcattgcgactctcctcaagtctagtcatcgcaactcaacaatgtctcagatccgtgatagagagactaaaagaatcaattggaaaaccctagttctatatatatatgatggaaaaaatgctttttgctggttttgaggcaatgcattaaattggattttggagatgcagggctgaagaagcattggaacgtagccaacctgtggattta

SEQ ID NO: 101481 - DNA, 725 bp, Glycine max
  Clone ID: PAT_MRT3847_62650C.1
gtttcattcagcactcattagcagacatcaatctcgtttccattgcgtgtggaggcctctctgccgagatggcaaataatccgcaatatccaggcttacagcctcttcggcctcctattgctggttcactggatcctccgcgcaattttgttccacctatgcctgttcaatttcgccctgttgttcctacacaacagtctcagcagttcatttccatgccttctcaacattaccaacatcaacctgttggtcctggtggtgttcccctgattggtgttggaatgcctccccaaaatcaacggtcgcaattttctcaaccgattcaacagttgcccccgagacctagtccgcagttaccacccccatcacaggcaattccaatgccggttgctcgtccaaacatgcacatcccatctgaatcgatgatgcatcagcctgattctcaagttcattctcaagctcccaatgggtacacaccaggtttaggtggtccggcaatgccactctctgcgtcatatacgtttgcaccatccgcttatggtcaagtgcagactaattttagttctactggccaattccaacctgttcctcaaattcatgctctcacgggttcttcatcccagagcattactacaggagcaactcttcaaagcaatggtgggcaaccttcagttacaactgttatgccttccggtaccattgccccaccccagctcgctaagaat

SEQ ID NO: 101482 - DNA, 278 bp, Glycine max
  Clone ID: PAT_MRT3847_62651C.1
aacacacgttcgcatggtcttgcattaggattgatcattttatcttgtatggtatatggggactcaggggcttcatcacctgatacataactttagccaccactacgtacaatactgacggtgatattcatcaaaatctgggcacatactttagctcgaacggctgtcgacaattgccgacgaatctaactcagatgcagtgctaactatactggcctcatgtgtcatcacacggactctctataggagtggatattgagcaagattacaaggcatca

SEQ ID NO: 101483 - DNA, 670 bp, Glycine max
  unsure (1)..(670): unsure at all n locations
  Clone ID: PAT_MRT3847_62652C.1
aaagaagatcgaataacaaacgaatataatatgcatggcttctattccctctttatcctgcttccctctccgatttctctgcantacccattcccatttattcctcatcttccacccaccaaacgtagcataccaaaaggccatcatgtttccgaagtgtcatgccacagtaaccaaaacaccaccccaacaccaaacccagaagaagaaaaaccatcacacaacattccaggaaaacataggagggatgttctccttggcattgggggactttacggtgcttctactcttatcaacaccaaccaaagccatggctgcagcccctattctccatcccttaatggttattaacttatgctgatcttaatagaatttgataatacaacagccctaaaattgtaattttcaaataaattaattattctaactttagaatttagacagttgtagattggataaattaaatgtgtccaactcttatgtgtgtccacaaaaaattcctaattgngtgagataaatactcctttcttagaaggggcctagcaggtttttatcggcctttttttnttggggtgagtttgggtctgagtagtctagtttctcccccttccctacttgccccttgtgtattttttttaacagtgctttctctcttatcttatggaattcc

SEQ ID NO: 101484 - DNA, 114 bp, Glycine max
  unsure (1)..(114): unsure at all n locations
  Clone ID: PAT_MRT3847_62653C.1
gggaaaggcanccattgcatnttntntgcaacccattggggaaatctggaggagctntgatttcagccacnttccatgatcttaacttttggttcactcagctaacctccaacc

SEQ ID NO: 101485 - DNA, 359 bp, Glycine max
  Clone ID: PAT_MRT3847_62654C.1
tactgctgctagaagactacagaagggttcacaccaaacaaacaaaaccaatccgaaccgaacccacccttcacatattccctattttcacctttatcttaaacttccaactccactctctttttttttctctctatttactcactcattactctctctctgacacctacctgtgtctctacattatttttcttcttccctcaaacaaagttataaaacatgttacagttgatgcttaaacatgagcaccactaattgttcaagatttttgaaaaaaaaccacttttatttcatacatacacatcaatcccattaaaattttctattctaaatatccttataatgtttacacttattta

SEQ ID NO: 101486 - DNA, 293 bp, Glycine max
  Clone ID: PAT_MRT3847_62655C.1
tagtcgatttcataatctataagtatgagcacatgtatattaccggctactacagaccgcagcctttgtggggatcctgactctaaaatctgttcgttgccacacagcaacagcacacaaccttaaccatccgaggcatcattccacagttgctaccaacttgatgtcacactctcagggatgggctacgctctactgacgtgccacttacgatgaagtagacactcacactgtggatgatgaactttgacaggagaataaggaggaagaaaacaccaacgatgactacacat

SEQ ID NO: 101487 - DNA, 497 bp, Glycine max
  Clone ID: PAT_MRT3847_62656C.1
gttaatcgagcaagagagaaggcttcgaaaataaacttcgaaggcaggagcaggtggctgctcatcgcgagaaacttagacaagcatatcttcgaaagaagctggagcaactgaaagccacatctattgtatctggatctgaaaataaacaaacatgatcactgcaccagtgttgtgcataacttaatgttggtgaaaccaagacttcattaaagaaaggcacgaggagttaaaagctgccaagaaaaaaactgcatcattattctctaatgctgtgttgggggaggagagaaatagagaggttgtgtgggtctcacatctcctacaatatgcttcagttcaaatatatctcttatatttctatcctctgaaccaaacacaactgccttaaaagatgaagggaaaaaagatggaggaattctttttctttttgctgttgtaaataatgtaacatgaccattgttgattacatgaaatattgatttgagctttggaaa

SEQ ID NO: 101488 - DNA, 278 bp, Glycine max
  Clone ID: PAT_MRT3847_62657C.1
cgcactcacgagcaagggaagcgacttgtgagcgagtatagtctatgcttatactttacaagagtacaatatacaagtaacatttcaacaagacagaatgtcctgcacaaagtagctcgtgtcatggatataatggctgcagcacaagaacaagtcaatttgatagcacatttcgattttaatacatcagggacatctgcaaaggaatgccatactaatcgagtgaagccaattatgctgaaatacctgctcatgctacacaagatgggttagatttt

SEQ ID NO: 101489 - DNA, 345 bp, Glycine max
  Clone ID: PAT_MRT3847_62658C.1
attcgcgcaaatagcacacgagactggtttcataccatttatcattttccaatcctcatagatcctggtttgatatttgcaggagaaacgggtaagaatatcctcagatagaggtttcatttccaacactgcctcacaagatacataacctccaaatcagagaccatttctcttagcacgattccaacagatgattcgactatcaacattcaattggatctgcctgatgtgatgacaaaccaacagctcgcttatgagagaaaaaaccttgggtgaatcaggaaaactgtctatacagcttccagagcttgcggcgacatgagcccccaaatcctcaaaatcttc

SEQ ID NO: 101490 - DNA, 245 bp, Glycine max
  Clone ID: PAT_MRT3847_62659C.1
cccaggcgtccggtcttttaagttgcaaggcaaaccaaagctcaccacagaatggcgatgcttagtccaaaacagatgcatttctgaaactctgaaaggtatcttgtgaatgaatctttcgcgagtggcgatgagactgagtccatgatgcagatgatggatcagtttgtggatgatttcgacgcttcttgcaccgcctctattactttaccaagaaccatgataagttctctgatgattacttt

SEQ ID NO: 101491 - DNA, 237 bp, Glycine max
  Clone ID: PAT_MRT3847_6265C.1
ggctaatgttattgatgttaccaaacactatttgatttcaccgaaacacccacttcccgtggtccaggaagatttaatgagtgccctgaaattcgtcactattcacatattccaaaaccgtcttgaatagtgtcttaaaaaccattcacaccatgaaaaaatgttcttctccaccaacagctccgacgccaacatttcaagctatatgtgcattctcttcggcgttacaatatttac

SEQ ID NO: 101492 - DNA, 261 bp, Glycine max
  Clone ID: PAT_MRT3847_62660C.1
gtgacggataatcgtaagtggcctatcgtccatgttgccaccatccacggatattaagcacgcgtcattacgatctgccggcaaaggatcctaccacactcttgatggtaattgctcttcatggcctatcgtactcttattcaggataaccagggtcattcatcgccactgtgcctatcatcacccgagctgtgatactggttatggccaaacaatccgagtacgctctcgaagatcttcgcacattgtctaacttgaaga

SEQ ID NO: 101493 - DNA, 1008 bp, Glycine max
  Clone ID: PAT_MRT3847_62661C.1
gaagcattatgctcgcggtcatggagatgttgatcttgaagactatactgaagagttgattgttagtcttgacccatcaaaagctgttgccaataagatccccacgccgcctccgaagaagtatactgcaataaacatgcttgatggcaggaacagaattattgaatataagaatcctactctttacaaggatgatgaaaagttgaaggccttgagtgggatgaaagaaacagggtatgttcctgacacaagatatgttcttcatgacattgatcaggaagcaaaagagcaagccttgctttaccacagtgaacgtctagcaattgcctatggtcttattagtactccaccaagaacacctcttagaatcatcaagaaccttcgagtctgtggtgactgtcacaatgccatcaagatcatgtccaggattgtagggagggaattaattgtcagagataacaaaaggtttcatcatttcaaggatggaaaatgctcttgtggggattactggtgaaagaatcattacttgaaatcctacagtagcatggacatatcattttctacccggcgtctccttataccgggaaaacaaatgtgcgtggaagctttaacactactaggataggagatgaaatatgtagtatgcactgatttagaatgtatttgcttcttgttcagagatattcacttaatctctctctctctactcagggctaatacctgtgatcccattaaaatttgctcttaacatggtttttgtatattggttttttggttccagcaacataacactagctgtattgattgatccatgaaaatttgtagaacaagttagattgtttgaagtttggttttgaaaagatgtttacaaggatatcttcgatcttcatagttaaagacggtgtattgggggaataaattcttttaggcccatggggtatgtgattgcttgtaacatagatcatattttttatagtgtgtttgaataacacttaagaatcaattcta

SEQ ID NO: 101494 - DNA, 427 bp, Glycine max
  Clone ID: PAT_MRT3847_62662C.1
tggttccttgcagaagaagatggagaacaacagcaggagtccgcgagagggttgcatggattttgcagttcacagccaagtgataaagattaaggaagaaattgagaaaataaagcacccttcacttcagctacacatgaggcgtgcccttctcagagatgtcaaccgcctccgctctcgctcacccctcggatttgcagacagagagagagctatccttacttagatgttacaaacttacacacacatgtacatataaaaatacagagacttccctttcaaggaagtttcaactatgatattttgtgtttcttcttcctagctttctatgtgtttctgtacttccttgtacatgtttttggtggtaacgtttacgacgtggtttctctcaagtctataagactataactcccttttttactcataa

SEQ ID NO: 101495 - DNA, 553 bp, Glycine max
  unsure (1)..(553): unsure at all n locations
  Clone ID: PAT_MRT3847_62663C.1
ggctcgagaaacgatcgtccaactgcagctcagctatttggtcatccatttctaagaagaacattgctatctcccttaagttttgcttctccacacaggaatatctatcggctataacttgacaagtttaatgggtttgcagatatctgctggagttggaccttatttcaatgacttcatcttgtcctgccatcccaccacgttgatcccatgcggaaggttggttcattgaaaggggagaatgcattatcaagtgtttcacaaagataaactttcacctttatgctaaatgagagagcagtgccttttttggatcccagtgtggatctaagtatgactggattgagggaatggaaaattaggaaggagatggaccttttcatttccaactggttgctctttaaggcagaagcatccaccaggagattgccatggtgaacagttgtcagtcatctggcacaaagttgtcgggccacgttgcttgtactcatttgatcctatcaagagctcatgttcttgcttacannaatgtaatcaggagctcatgctcatg

SEQ ID NO: 101496 - DNA, 3041 bp, Glycine max
  unsure (1)..(3041): unsure at all n locations
  Clone ID: PAT_MRT3847_62664C.1
acctaagctccttttcggctcgaggggagagggcttgtttggctcctaattctgcacccgctgatgagttggttattccgtttaactcctccggcgagtggttcagacagaccttcacctcgtggcagaaaggtgacgtcttgggaaatgggtccttcggaactgtctatgaaggcttcactgatgatggattcttttttgcggtaaaggaggtgtctttgctggatgaaggtagccagggaaagcagagttttttccaacttcagcaggaaatatctcttttgagtaagtttgagcataaaaacatagttcgatattatggctcagacaaggacaaaagtaaactatatatcttccttgagcttatgtcaaaagggtccttagcaagtctctatcaaaagtaccgtttaaatgattcacaagtttctgcatacacaaggcagatttttaagtggcttgaagtatcttcatgaaattattcaattttaaagggatatcaagtgtgctaatatactggttgatgtaagtgggcaagtcaagcttgcagattttgggttggcaaaggcaacgaaatttaatgatgttaaatcaagcaaaggttctccatactggatggcccctgaggtttctccctgctcttgtatcatttgcttggagtaattcctgcaaaggaatgaaatcatatggctgtctaatttagttttagtctgtagtacatattccaaatgttgctgtaagaacataaagtataaccatccataaattagtttactgcagtatatgcttccattgatttcttgtgatggagtgcagattcagaatcttgaaactttagtttttccacccacttgtgatttatgagagttgttttagtaaactggcaaatgaatttttatacttgtgagctttttattgtgactggtttaactttgaattgttggtttataggttgttaacttaaagaaccaaggtggttatgggctagcagctgatatatggagcttagggtgtaccgttttggagatgttgacaaggcagcctccttattctgatttggaaggaatgcaagcattatttcgaattggcaggggtgaacctccacctattcctgaatatttatctaaggaagcccgagatttcattcttgaatgcttacaagttaacctaaacgatcgtccaactgcagctcagctatttggtcatccatttctaagaagaacatttctatctcccttaagttttgcttctccacacaggaatatctatcggctataacttgtaagagttctaaatcacctcttagaattggcactgagaacttccaagtttatcctctatttttctgaagtttatccatacacatcttgggtttactggtggaatgcccaggacaagtttaatgggtttgcagatatctgctggagttggaccttatttcaatgacttcatcttgtcctgccatcccaccacgttgatcccatgcggaaggttggttcattgaaaggggagaatgcattatcaagtgtttcacaaagataaactttcacctttatgctaaatgagagagcagtgccttttttggatcccagtgtggatctaagtatgactggattgagggaatggaaaattaggaaggagatggaccttttcatttccaactggttgctctttaaggcagaagcatccaccaggagattgccatggtgaacagttgtcagtcatctggcacaaagttgtcgggccacgttgcttgtactcatttgatcctatcaagagctcatgttcttgcttaaaaaattgtaaatcaggagctcatgctcatgttctgtcgatcctatcagcaggctgctgatacctggtctcagctgtgacccgcccaacaggtaaatactcaggaaaggggcgcgggtgcaagcaatgtgctatcagagcaacaaagcaagtacaagttttggatttttttttattccccttagcacaattaaccaggatataattgtaatactttttttttttctttttcaaggaattaccatttgtatttatttttcattttctgtaaaatgatggcacttgtataatttctttattacatgaaaattgttgatttattgataaaaagtaaacagtctattaagttcttgttcctaacctagtaattataaattcagtccattccctatatctataatacatttatactgggtgaggtctttgcctctttggcgtgtaatcaaatggtgaacatttgatattagtgggaaatgcttcactttatgaagtcgtaacattgtttgttactgaagaaattctagccacgcgtccgggattctcctgttttccctgttatatatgacagtaagagaactgtgttatccttacccccaattattaatggtgcacattcagccatcactctggagacaaagaatgtatttattgaatgtactgcaactgatctgacaaaggcgaagattgttttaaatacaatggtgacagccttctctgaatattgtgaaaacaaatttgtcattgaaccagttgaagtgatttcttctgatggcaagtcaaacatataccctgatttatctgtctacaatatggaagtttctctatcttacattaatggattgattggggtatcattggaggcagaagaggtcactaagtacttaaatcggatgcaattgcatgccaagcagtctgcatctcataataagcagtgtaacattgtggtatctgtacctccttctagaagtgatgttcttcacccatgtgatgttatggaggatgtggcaattgcttatggattcaatgctattaaggataaagcagtagtagataataagggctcanagaggttggctgcttccttgactctacttcctctgaatgagctcagtgatcttatcagaaaagaggttgctttaattggtttcacagaaggtcttgacatttatacttctgcttctaaaaggaaaactttgccatgcttaaccgcaaagaagataaatctaaagcagttattattgggaaaccct

SEQ ID NO: 101497 - DNA, 432 bp, Glycine max
  unsure (1)..(432): unsure at all n locations
  Clone ID: PAT_MRT3847_62665C.1
ttaaccaaacaaatatcttgtttttttaaccaaaccaaaaaaaactctcttcgcttgtttttttaccaggacctccttacaaataatgagcttctctctgactccttcctttacaaagaaattgataatggaatgctgtaggaagttgacgggaagtcggttattaaactaacagtttatgtaaacattaatgcaaacccttctactaagcgtttaagaaaaaattaagcaattgatcattcatctagaaacgttgttgacattgttgacacattcacacttcantatcaacccccattcgataaaaaacaatttgctaccttcatgaaaaagattatcaaaaattttactccccatctttatgcaaaacaacaagaagtttttaaaaaacacantcacgtaacaactaaataccctctctctaagattaaa

SEQ ID NO: 101498 - DNA, 241 bp, Glycine max
  unsure (1)..(241): unsure at all n locations
  Clone ID: PAT_MRT3847_62666C.1
tgtaaggagtcgactagtcttgttgttacgagctgctgagcgtaagccgtcgttgcctagatttgtcgtctgcaaaggatttatccctacgcattgtgaaattgcaattcgtcagctcgaccccgggacttctacccggagccggtcgccaacctgctaaggttcagggccaaaggctattcgtactctagccgaatcggatcangtggtggcgctgttgctgttgctgttgatgttgtgg

SEQ ID NO: 101499 - DNA, 351 bp, Glycine max
  Clone ID: PAT_MRT3847_62667C.1
aaagagtttggcgcattgctttctgtacatttaaatttaatttgtttgggttgctgagtaaaaactaaaatgaaagtagatacaaattgttttttttttctttaaaaaaaaataaatataaatcatagggaggtaatttatttttaagaagaaaaaaaccacaatcttattttacaaaaatatagaatttaataattaaaatagaatataaatatgggggggcgtgcaatttttgaggtcttcaaccagggattttatttctaaccggtacatggagggggacgagttttcctttaagagaagggttttaaaatttggggtatttattgaattagcattttccttggtaaa

SEQ ID NO: 101500 - DNA, 263 bp, Glycine max
  unsure (1)..(263): unsure at all n locations
  Clone ID: PAT_MRT3847_62668C.1
gatttgaggccaggcaagccccactcaancaccacantagngcntcgttnacgctacccctttntncntcttctnntacctttcaagttttaaaagtataaagatggcagagacattcctatttacctcagagtcggtgaacgagggacacctgacaagctctgcgaccaaatctccgatgctgtcctcgangcttgcctngagcaggacccagacagcaagttgcntgcgaaacatgcacaaaaacnaattggtnaggtntg

SEQ ID NO: 101501 - DNA, 376 bp, Glycine max
  Clone ID: PAT_MRT3847_62669C.1
catcttctctctctctcatacagattaaggtgctctcctcttttttgctgcccgtactcgatggcaacaactggccctacgtcgatgtcgggaagggaatacttgtctcccttgtaatagaagcagatgaaaataggattgaatcatctctgtctaaagttaaaggcaaagatatagttaaacttattgctgccggtagggaaaagattgccacggctcctattcgtggtggtctagccgtgccttcccctaatctcctgtggtacgtgctaatcctgatgctcctgctgcttaggcaaataaagaagattaggtcatggtgtatgcagaatcctacaatgatatgggagtaagtctagtatattaattggtgtaa

SEQ ID NO: 101502 - DNA, 354 bp, Glycine max
  Clone ID: PAT_MRT3847_6266C.1
ggctcgagcactgaggacaagagaagtccattcactcagcaatccaatattaggaatgatgagtactatggaaagaaagtggcaggttccaacaaggacccttttgtggaatctgaggtagctgttagtgatgatgtgatggaaccaagcttgcacaagtatgtgacagtgaaaagaggtggtggtgtagtagtagaagacatggaggaccaagagtcttcaggaagcaacagcttcactgtgagtagtatcagtggccaacattactgggggaacaacattttttgttcttcatcatgggaaccaaattcttgtgactccaccgattggctggactttttcaaaattgagctt

SEQ ID NO: 101503 - DNA, 254 bp, Glycine max
  Clone ID: PAT_MRT3847_62670C.1
gtcacgatttgctttcacagggtacaagagtgacacgccatcttcttcgaaatgatcaccacttataggagttcgatctgtacctcatggaggaagtgatattggaagacaatcacatgttgatataagctgggaagtggcccgtggatctgctgagtttatgcagaacgtgaggttgaataccgagatcataaaatctcatgatgacaacaacaataacaacgctttttctctgagtgttgcttctatcatta

SEQ ID NO: 101504 - DNA, 166 bp, Glycine max
  Clone ID: PAT_MRT3847_62671C.1
gccaacagcctcctccatcgctctcacttccgcatccatgactggcaaggccatgaagctgggcccatcaacccccgaagtctggagggtcatcatgaggaagaccgtcaccaagcaggcctacttcggaagcccatggttcagactcaaccgcgataagtacttg

SEQ ID NO: 101505 - DNA, 742 bp, Glycine max
  unsure (1)..(742): unsure at all n locations
  Clone ID: PAT_MRT3847_62672C.1
ccacgcgtccgatattttctcctcacacagcaggaacacaatggattcttcttcatcagcaagtgtttgtcagcatgccaaggttgttccaaaacaatatgacatcttccatgcaggaagattctcaggtgttccattttcttgggaatacttgcctggaattcccaagaagcagaattccaaaaagaagctgcaggagtcctccttgaaactactaccattgcctcctccaactaccacgcactcttctagaaagcacactcatgaagaaacaaggattagaaagaagaattcaatacaaagtgttttccaaagggatcctttctttgctgcactggttgaatgctcaaaggatgatagtgaagaaacaagtagaaatttgtggaatggagctaaggtgccaaggagtgttagtgatcgttttgggtttattagcctctatgcttcttgcaagagaacttgtgctgtttctgaatctttagtctaccttccaagctcaagaagaagcacctgcgaacatgttagtcccaggtccctctaagcttgtgatgatgatgcatgcctagctgtcaatgtccttgtgttcatgttgttataagaaaaacccagaaagaggtatttctttccctcttttcttanaatttttaaaccttgatctgtttttagtttctaaatatgggatgtgaggacanagtatgtctttggaaacccagttattgtatatgntaatacaagataggaa

SEQ ID NO: 101506 - DNA, 364 bp, Glycine max
  Clone ID: PAT_MRT3847_62673C.1
acggctgcgaagacgacagaagggacccaatacacaccgttacaacctgaatccaatccaacccaacccaaggttcaaacggaggactgtgaactttaattttcagcgtaatttattgtagattaaacttttgagacttgaatctaaatgaacatatccaacacccacccctaagactctaattctactagtcttttgagagtcaaacttgaatcacgtatgcaaattaagtgtttttggttaagtgttgaaacctacgttcaatggaaaaacaaatgttccaaggcacaaaaactaaagcaatgcaacaaaagctttttctatatgcacaacgcaactgattggcaaacacgccttaaatcct

SEQ ID NO: 101507 - DNA, 351 bp, Glycine max
  Clone ID: PAT_MRT3847_62674C.1
tcgcgcgaagattacaggaggggggccctaatgggagcgagtgcgctacaacataagaaagcgtataagtggaaaaagaggatgacaccgcctcctttggataatatcattcacatgcttaggtgtgcctggactacaaattttttcatgagcggtaataataattaatggtattattattagaagattactgttggggtcacctaccaaaatatcatctttgggtgggggggcgcccatataagagacggtgatctcttcggcttatctcaaaatgttcttgtttggtgccagccaccaaaagataaaagatgcatactcacaaaaacatttttctgctttgtttttttt

SEQ ID NO: 101508 - DNA, 485 bp, Glycine max
  Clone ID: PAT_MRT3847_62675C.1
aattcggctcgagattttctcctcacacagcaagaacacaatggattcttcttcatcagcaagtgtttgtcagcatgccaaggttgttccaaaacaatatgacatcttccatgcaggaaggtacccttcatctcgcaggactcattcctcttcctcctcttgttcatcactttcaccctcctcttcctcctttgaatcattctttttccctgaggatccacttcttagtcctgcatcccctcttagattctcaggtgttccattttcttgggaatacttgcctggaattcccaagaagctgaattccaaaaagaagctgcaggagtcctcctcgaaactactaccattgcctgctccaactaccacgcactcttctagaaagcacactcatgaagaaacaaggattagaaagaagaattcaatacaaagtgttttccaaagggatcctttctttgctgcactggttgaatgctcaaaggatgata

SEQ ID NO: 101509 - DNA, 1250 bp, Glycine max
  Clone ID: PAT_MRT3847_62676C.1
cctcgagccgattcggctcgagataaaatgtgcaatgagacctagagagagagagagagagagagaaagttttgagtgacacatcttttctcctcctcacacagcaggaacacaatggattcttcttcatcagcaagtgttagtcagcatgccaaggttgttccaaaacaatttgacatcttcttccatgcaggaaggtacccttcatctcgcaggactcattcctcttcctcctcttcctcctttgaatcattctatttcccagaggatcctcttcttagtcctgcatcccctcttagattctctggtgttccattttcttgggaacacttgcctggaattcccaagaaacaaaattctaaaaagaagctgcaagagtcttccttgaaactactaccattgccccctccaactaccacacactgttcttctaaaaagcactctcatgaagaaacaaggattaggaaaaagaattcaatacaaagtgttttccaaagggatcctttctttgctgcacttgttgaatgctcaaaggatgataatgaagaaattacaagtagaaatttgtggaatggagctaaggtgccaataaggagtattagtgatcgttttgggtttattagcctttatgcctcttgcaagagaacttgtgctgtttctgaatctttagtctaccttccaagctcaagaagaagcacctgtgagcatgttagtcccaggtccctctaagcttgtgatgatgcatgcatagctgtcaatgtacttgtgttcatgtttttctaagaaaaacccagaaagaggtatttctttccctcttttcttaaaatatttcaaaccttgatctttgtttttagtttctaaaatatggtatgtgaagacaaagtatgtctttggaaacccaagttattgtaatatgttaatacaagtatataggaagtagtgctggtctccttttgttcagagatcactgatgactgatatttttctaatgtatttttttatccttttggtttttatttttttagcatcaaacaccaaaatctttaaatacaatatacgctctttgctgtatttcatgtgataacaacacattatgagtgaaaattacatgatcccatgaggaaacaatgtaccggaccatagtggaaagagactgccaaattattaatttgacttttttttttttaattttccaagtcctatattgtatttgcaagtgtatgaattgattccctaatttttcagtgaac

SEQ ID NO: 101510 - DNA, 732 bp, Glycine max
  Clone ID: PAT_MRT3847_62677C.1
ttttttattagcaaagacaaaatgaattccattaacagctttaacaagtccaaacaatccgaaactcagctacagaaattttaaaataatgtaaaaccaaaactcaacgcatgacaaattagtgctctagttgacaacacgacaaaaactggaagctcgaaggaggcggacagttagtacctccttccagggccgccacggccgaagccgaggggcgcctggacggcaacaggatccacctgaacgatgccaggaacctcggacatcccgagggcggcgagcatgtcgagcgtctccttgtcgacctcgatctggtcggtcctgatggcggagacatcggggacgaagtccatgcgacgctcgcgttcctcctcctgcagcttcagggagattccacgcacgggacccttctggatccgcttcatgagatgggtggagaaccccgcgatcttgttgcggagcctcttggagggaatgatggccacctcttccagaaccttcttgttcgtgtggaagtccagcgtcatgcgggagtagtacctctctatcacttgccgcgaggatttcttcaccgtcttcgtgcgaacacgccccattctcaatgtgactgcaaaagtgtgtgtctctgtgcgtgtgtggaggagaagcaatgacagaagagaacagagaggttaagggtgaggattaggcgagggagggaaactagggttttgtagaagtgttatgagaggg

SEQ ID NO: 101511 - DNA, 951 bp, Glycine max
  Clone ID: PAT_MRT3847_62678C.1
gcgatttcatcgcatttgttgataactgtttgttgatatggtggcaaatcacagacaaatacaaccaatgtggtcccaattgtggttgcaaacacttaaaaaggaccaaatcacgggtcccggaccattttatcaaaaacttacatgtgcaaaactcatcatagattataataggcacgacacaaccaaatcctaaacatcctagacggtgttacagcgcaggaatcaaactatgctactagttccattactccaaacaattctaaccatatcacgcaacaagaattataagcaaaacaaaacaaattccattaacaactttaacgagtccaacaatccaaaactaatgtaaaaccaaacttcaacgcataacaaattagtgctctagtaaacaacacggccaaaactctcaaaggcggcaactagtacctccttccggcgccgcggccgaagccgagcggtgcctggacagcaacaggatccacctgaacaaccccgggaacctcggacattccgagggcggcgagcatgtcgagcgtctccttgtcgacctcgatctggtcggttctgatggcggagacatcggggacgaagtccatgcggcgctcgcgctcctcctcctgcagcttgagggagattccacgtacgggacccttctggatccgcttcatgaggtgggtggagaatcccgcgatcttgttgcggagcctcttggagggaatgatggccacctcttccagaaccttcttgttcgtgtggaagtccagcgtcatgcgagagtagtacctctcgatcacttgccgcgaggacttcttcactgtctttgtgcgaacacgccccattctcaatcaaagtgtgtgttcgtttgtggatgggtggaggagaagcaaacgcagcagagaggttaagggtccccttctgtcgtcttctcgcagccgtcggacgcgtggg

SEQ ID NO: 101512 - DNA, 414 bp, Glycine max
  Clone ID: PAT_MRT3847_62679C.1
aaccaaaaaaaagggggggagttttataatccaagaaaaaacggggaatggggggggaaaaaaaattaatgggtttaaaacctaaaaaagggattgggacatggaaatttaaaattagggaggaaaaaaaaaggagccattttaaaaggtttaaaaaaaaaaaaccctcccaccaaaaaccatttaaggggtaaaacttaataaaaaagggtggccaaggtttcccaaagggtggaaaaaaaaaagggggcccaaaacttttcactggggggggaaagccgcaaaaatagtaccggggccagaatctggagggggagaaaaaagggttgaaaaaggaccagggccagggaaaaggggctgaaaccatgcccccaaaaaaagaaaaaggggcaaccccccattttggaacccctt

SEQ ID NO: 101513 - DNA, 241 bp, Glycine max
  Clone ID: PAT_MRT3847_6267C.1
gctgaattcctcgatctcttgatcacactcgtgttgctgcatctaagcgagtatcatagggtgggttcaagatgcaaatttataatgattgtgacattgcaatatttgcttttagtttttttccacttccatatttgctattaacttttgtgacgtgaaaagtttaaatttgctcacaaatgatccaaagggaaataaagaatgagccactgatcttgttaataatcaagtataatatcaa

SEQ ID NO: 101514 - DNA, 395 bp, Glycine max
  unsure (1)..(395): unsure at all n locations
  Clone ID: PAT_MRT3847_62680C.1
gggacccacgccgtgcgtgatttcagtgagggatgcggggttgcactctntgctcatcataatcgtgagcgtgaattgaggaagatgccgatcagaaacatcgccgtcggaaggggtgaagaggggactcaccccgacacgtggaaggggggtttggctgagttcatctcaaccttcatcttcgtgtgcgcgcggtcagggcgccggggtcgcctacaacaaggtcaccgagcacggcgctgccacccctgccgggctcatctccggctccatcgggcatgcattcggcctcttcggggccggctccggcggggccaacatctccggggggcacgtgaaccccgcgcggaccttcggggccttcggggggggggacatcaccttccttcgggggg

SEQ ID NO: 101515 - DNA, 333 bp, Glycine max
  unsure (1)..(333): unsure at all n locations
  Clone ID: PAT_MRT3847_62681C.1
nanacatgcnnncgtaagctnngnnttcnactcgannatgagcnagcgntncnagatccaagacgangaggntcgtngtacatcancnaagccaggacgtaagcncngagagttcgctagagaggangatngtgnanatcatananaagggttcngntgncngtgnagcaacnatgatgtggaccnatgnagagacagtaacatganntcagctcnaattacaatgtacgngactgtgcannncaatggangnnngnnggctcaacannnnnatgctacnnnnnnnnagaagatgntgncaannttncccaggncnncggaaanngntnanac

SEQ ID NO: 101516 - DNA, 412 bp, Glycine max
  Clone ID: PAT_MRT3847_62682C.1
aaaaaaaaaaaaaccctccctttcccccaaggaaggggggggaccccgccatttttacgcgcaaaccctccccagaggggaacggaaaaccttataccaacccgaaaagccctcccggaaaaaccccccccctaaacaaaaagggggttttgaaaacccccaaaaaggaaccccccttctttaaaccacccccgggtgggaacaccgcccctttctccgggggggggcccgggaaattttttggggaaacaaaaaattttgttttggggaagacccccacccccccccccggggaaacaaagtcagaccccccccagaagcggtgtgatgtgctcccccttttgatggagctcccccccccaggcccgggccttgcgtggataaaccccctaaattcccccaaagccccccc

SEQ ID NO: 101517 - DNA, 437 bp, Glycine max
  Clone ID: PAT_MRT3847_62683C.1
gcgtgacttgtacagatgacattctttcattaattcaggagtgatttttccccttttcttttcttttttttaatgtgatttttgttgtcattgttttatttatgcatggttgaatgctcatattcaataatatcagaagcccaagttatacttttttaatatttttcttaatgattgcaagtacatgcatcatgggttttcgtgaccagatttcatgtgaaatcttcttgcagctcctgttccctccaaattccatccaataaagcaaaataaaagaacttaataaagaattattatgtcatgtctactttttcattacttggtttctgtgcttttttaatcgtcatttggaggctgatgtatgcttttaaagtacagtttttgttttcctcgcctatttggaaatcctcttatctatgcctattaaccatctggtg

SEQ ID NO: 101518 - DNA, 153 bp, Glycine max
  Clone ID: PAT_MRT3847_62684C.1
atgaggtgtagctttagagcaataatgttaaggaggtcattatttgaggttagcatatatagaagtcaattttgaatgcattgccgcatcatgttcaagactaaaaaagaccattcatttttaaacaggatgaatattgtgacatttaaacat

SEQ ID NO: 101519 - DNA, 306 bp, Glycine max
  Clone ID: PAT_MRT3847_62685C.1
ccccagcgtcgaccctaacgcgtgcagagcaaagagactcacctggggcgaagacccggagggtatggcaattagacaacatcccaagtacggtttgcggggttctgatcccaagatcagattacgatgtgtttaaaaaaggtgtgatgaattcttttggtcattggtagtgggaaaggaaacgttttaggggcctgaagctgctcgattgttgcacagtcatggcaaattgctggaaggatctttcacttagagtagggtgcacccattcatgtcttagatcaacagatgctttctgtgccggac

SEQ ID NO: 101520 - DNA, 498 bp, Glycine max
  unsure (1)..(498): unsure at all n locations
  Clone ID: PAT_MRT3847_62686C.1
gcacgagggtcaattcagctgtttccggtgggaaaacaattaccaacaacgcccataacagaggcaaagggttttggagattccaacaaaaggggcaaagaaaaactggccctgtttgtattctgtaacaggctaacagccgctagctaaagagataaattccgtggcagttgagttagaagcgaaaagaaggaaactactcactgtctgggttccgctttctctctccttacctgccgtggggtactaatctaatcagtaatcactctaccacctgctttcagcttttgcctctctgtcttcctcaatggcaggtgtgggagatggcgatttgtacacgcaactatggaagctatgcgcgggacctttggtggatgttcctcgccaaggggagagagttttctacttcccgcagggtcacatggaacaattgcaagcttcgactaatcagggactgaaccaggaaattgaatgggttgttctaaanaaaaaaaaaaa

SEQ ID NO: 101521 - DNA, 444 bp, Glycine max
  Clone ID: PAT_MRT3847_62687C.1
aaaaaaaaaaaattttccatatgaatggggcaaacatacaaaaagacccccattaggtaaataattcaaacacagagaggggggagggattggttaaccctttgttttaaaaggaattgctcgaataacttttgggggataaacagcagcaggggcagttccaatgaagggcccaacccaaaaaatccaagggtcatcccaagcatggtctgggttgttttttatagcagcaccaaaactcctaggtgggttaaggccatttcctgggataggaatggtacccaaggggaccaaaaacacagaaaacccgattggaaaaggggccaaaatcggaacgggaaagtttttagcgttttttttggcatcagggggggaaaaaacggtgtaaacaaaaaaaaaggggccaacaatctcagttccaaggccatcacccttggggtatcc

SEQ ID NO: 101522 - DNA, 499 bp, Glycine max
  Clone ID: PAT_MRT3847_62688C.1
ggctcgagtctttctatacatagagtggataagccaatgtaagtatgacttaagtacaagagaatactccagaaaagcacaaataactcttgttttgttccaatttttgttcagttttttcttccttttctcttctgttttctcttaaagaatggtgtcattaaagaaattttgggcaaagtgacataagagctggtccatctggaaatggtgttttgttctcaagcaagatggtgaatgtccttaaacgagccatcctgtcctggcccttttgcttctaaaattttgcagaacaaacttaggcctcactaatttcttttagaagattctggaacataaatgttttcattaattatctgatcttggatttgtttgtcaaccaacttcttgagtaattcttcgttagttttgggcttcaacaatagctctcatctaaggatggttttttgaatcatttgatttacatgaggacttcttcattgattaaactttagaaatc

SEQ ID NO: 101523 - DNA, 213 bp, Glycine max
  Clone ID: PAT_MRT3847_62689C.1
atgttgcagcaaattactggccagaaatgcttattgcacaaaatggaacgcaaggagcggcaggagatctactcgtgataaacgtgcggggggaaaaaagaatactaagcccaccttttaacacagccttgacattctgaacatcctcaaaattgaaaggtccaagcctaccggacctgaattgagggggggactttttggataccacacacc

SEQ ID NO: 101524 - DNA, 428 bp, Glycine max
  Clone ID: PAT_MRT3847_6268C.1
ggagaattacaaatgcttgaatcatccttttatattgccgtaaatgagttagtgagtggagacatgaatatacataggctgtatatctaaccggataagctataaaacctttttggctaaaaattaacgtaacaatgacatggctcaaaaaaaaccatctctttgcataaatcacacatttagacttctgtggtgctacctgaaaagcctgaatctttagtcacatacgggcttctttgtaaacattggaaatatgagactctggtatcactttaggagcttggttatcaagctgtgactagcgtccacgttgtctaaaccatagatcaacatgatactctaaataagaagggctatcacctgcataaacctgaatagtgccatctttaatctctatgacactataaactaattgctaaataaagtat

SEQ ID NO: 101525 - DNA, 538 bp, Glycine max
  Clone ID: PAT_MRT3847_62690C.1
gaaaccccgcggcgacccacgcgtccgcccacgcgtccgataacatgatgttttttctggccacagcacagttaggagaggggggtattgacctggagtctatagcaaacatagaagttacttcagatggtgccgctttgtttgatgatggagaagataaccacaatgattctgaagccaccaattgaaaaaatgagcttaacaaaaaaagtccatgatctaataattgatgtttttggtgggggggttaagtggataactcctaattgtgggaggagcaaataatgcaatgtttcaaggaagtttgctagtcaattggttgaggaattctcaattctacgtggtctatgtgattttctattgcatgccaacttgacagtgtatttatgtcttaactgaatttgtttccagcttgtggctattttatgttattgtattaggtgcacaagcaattctgttacgccttgatggtaagaatcttgtacttaacctggttatttgaacatattcggggaatgtatatttgaacatattcggg

SEQ ID NO: 101526 - DNA, 1049 bp, Glycine max
  unsure (1)..(1049): unsure at all n locations
  Clone ID: PAT_MRT3847_62691C.1
caaggatggtttgaagaataatttgaaagggtactagctagtagagctagtacttctactactgtgagagtaacatcatcatgaggaagcgccaagtggttgtgagaagagacgagcctcagaggagtggcggttatttgaagaatctgaaaggtactagctagctagctagtacttctacactgtgaggtagcatcatgaggaagcgccaagtagttgtgagaagagaggagcctcaaaggagcgctaggacggtgaaatacggcgagtgccagaagaatcacgccgcgaatgtgggagggtatgctgttgatggctgcagggagttcatggcgagtggcgccaccggagaaggaacaagtgctgctctcacttgtgccgcctgtggttgccacaggaacttccacaagagacaggaaaccgaagtggtgagtgagtgctcctcgcctacctccaatggaacttaatcagagctagcttcgtcataatgtttatacctcaacaattatgctgctacactccatatcatatcccttgtaatatattttgtggaatttgcttttgcttgttattaattaagaattggggttttaattaattaagcatactactgaactagtatgaatgaatattctagaattgttatatatagtaattctagagtggtaatgtatggtgatgattttgaggttgatgtgtgtaaagagaaaaagggcaatcacaagttgtttttgtgatgatgagtgtgcaaagttttgaccatcttctcttcttacatgtttggtttaattaacttgttttgaagaaataattgcttgttttttttgtaaaaagaaaaattaattatttctgagaaatagtgtttccaaacatgtaagtaattactcggttaaactaggcttttattgttgctttgtttatttatgagcttatgtatgtaagttgtgttatggattttgctttgtagctacacaatgtagcaattgtgatcagtttgaaatttgatgaggggagtaagtataaaataaggttttgccccaattantttc

SEQ ID NO: 101527 - DNA, 1200 bp, Glycine max
  Clone ID: PAT_MRT3847_62692C.1
caaataatgggctaatggcaatgcaattactcttgtctgtgaaatgtgtacaaccccgaaacattctaaaattcaaaaaaaaataaaaaaatacttgctgaggcaccaccaaatcttattgtgatcgcaatcaatgccgaacttatataccgtatttaagagataatgtgaatttacctttcctaaacgtcacacaagaagttaccagtgaatcagaatcaacaaactagattgatccagacctgcctatttagtgtctccaaaaaaatattttactcaacattttgctgcctctgggcttaacatccttacctgtgaaaacatcaagtgacatcataactagatgtagttggtttagtaggatggagagatatcttcatatgaaatagacacatcagaagcaaccaacgaatgataatactagaaatcatgtaaggcatgccattcagaaatgcctgtcttaagcaagagtcacagtgccacgttttaatctgccagctcgggacaaagcttcttctgcgaagggtctccactgttctgcacaagagtaattgattccaagtccaatgctaagtcccctcagtagatgcactgtccgaagtacagaaaacagttcttctggaaaagactatcataaacaggcacagaaagaatttaaaatttagtgagtaaaaagtagcagcataaattaacaagttattgccttcttattccatcactataaataccattaactagcacgcatcaatagttactgcattatttaataatttgattcagagtgccaacatactttcttctaccgagtcgtcataaaaaggtttgccaccaccaaccttggacataaaagagactagacttttttatttctttcacattttagttactgtagcattcagaagcaccagactatctgtacacagattcaccaaaacaatcaaaatatgatattaaactgttgggacatttctcaaaggttatgatgaggggagttaaaaacttagatttgtttcagtatagttgggcttcttcccttcgtattcaacccgccctccacccctctcttttttctcaccttaacctctggttttttactttcaatgaccaacagaataacaagacaaaatttatacactgatctgtcccctactcccctgtaactgtgttctccaagagcaattaggaaatggaaagttggat

SEQ ID NO: 101528 - DNA, 574 bp, Glycine max
  Clone ID: PAT_MRT3847_62693C.1
ggcaagggaatagcattttccattcttgggagttgtgagaatatataataacaaaagaattggcatattaacttttaatgaaagaaaccatattttacattctgttagaagcaaaagaattgtcaccagatggaaaaggaatatggattttcctactgtcaaatatacggtaaaacccatatcattagcattaagcactaactgctgagtttacttgtatagattctctatttggtccccgtattgagccacaactttatcccttcgaattttcatagtgggtgtcattagcccattatcaatcgtgaaggggtcatttacgagaaggactggcccaatttgaaacggagattctgaagtccatgtcctcaaatatttatataagaggggggtcacttttacgagactggcaggtaaactgttcgaatctttaattgaagattcccttgccgcctttaagacatcttctttgttagccacaattacagcccccacacgtcgcttatcctgctcactaacatagcttcgcagaggttctagttttgcgttgtctatgacgtgtagctgctcgtgc

SEQ ID NO: 101529 - DNA, 420 bp, Glycine max
  Clone ID: PAT_MRT3847_62694C.1
ggttgttgggggttttttttttttttttttttttttttttttttttttttttttttgtccggtggtgctctttcccccgcggcagagtcccggtcggagaaacccaaggggggcgggccctccgggcgccccctttttgggggggggcccgcaccctttgggggggggaaacaggttcttttaaaaacagggggctccacttggaggggggcaaacaggggccccacattccaaccccccccccctggaatcacccccgcgtccgccataaccctggctgccccaagggcccccgggaacccccccccccccatcacaggcacagccccccaaaaccccccgcccccgggggacacccctgggggtgtcaggggggaaatcttcattgggcgcacggtgtgccgcgggggcccgcccccc

SEQ ID NO: 101530 - DNA, 411 bp, Glycine max
  Clone ID: PAT_MRT3847_62695C.1
ggaattcccgggtcgacccacgcgttcggccacacttgcccattctgatgctcatctatttcgctattttactcactatttatcaatattgcgggatttttttctgagactcatggatgcacttaacctatatatattcattcttatatatatccgaacgcctaccgacgacgatcgtatctgatatgaactgagacagcctaaaggaagtactagaacgctacacacggatgctcatattcaagtcttacagcaccatagtcatcatgatatacaatgacttagtcagtcgcgtgtagtaagcttaagtagctttgctgccttacaaagtatctgtgatcactgagagacgccctatatctattccaaccggctataatgacctttatgaaagtatgcattctcacaaac

SEQ ID NO: 101531 - DNA, 231 bp, Glycine max
  Clone ID: PAT_MRT3847_62696C.1
atatacccaaaaagtactagtctctcttgtgatcatgtgctgttcaaaggttttgtggcctgggcacatacaacttgcacattcttcatatgcacctaatgcactttctcctcacggtatggttactacactaataacctgggtccaaatgctattcactaaaagattatgaacagtgcaatcattgctgagatacaggaccttcccgattggaggacctttgatttaaac

SEQ ID NO: 101532 - DNA, 295 bp, Glycine max
  Clone ID: PAT_MRT3847_62697C.1
aaaacaaaacccagaactggggaaaaaaaaaatattctgggaacacaattggccccgaaaaacccccaggggaaactagaaaaaaaaacaaactttccgggggatttccggggggcccttttgggccacttttaaaaacccaggccccgggtgaggaggatttatccccccaggggaaccctgggaaaaaaaaggggttaaaggggaaaaccccggccaaaaccaaatagcccccccacatttaacccttttccggggggaccctccccttcccccttaaacttgttcctcattt

SEQ ID NO: 101533 - DNA, 886 bp, Glycine max
  Clone ID: PAT_MRT3847_62698C.1
tcccgggtcgttctcgcccacgcgtccgattcaacatattatcgataattaaggcaattcttgtagcctggttgggttacattacagcgtaggtagacatggcaaaatcaatagccagaagcagtgaagcgcattgatcctggtgcatcctcgcacaccctatcttatcattattcaattttgttgtctgaatgaaagggaagaaggggtgaatccgtaggggatgggggcctcgctgtcgaacctgggaagcaacggttcggccgccgctccgggcctcggcgacatcccggagaattgcgtcgctcgcgtctttctccacctcactcctccggagatttgcaacctcgcgcgcctcaaccgcgcctttcgcggcgccgcctccgcggattccgtgtggcagacgaagctgcctcgcaactaccaagatctgctcgatttaatgcctcccgagaggcaccggaatctctccaagaaggacatcttcgcgctgctctctcgcgcagtgccctttgatgacggcaacaaggaagtgtggctggatagggttaccggaagagtttgcatgtcaatttcggcgaaggcgatgtctattactggaattgatgaccgcagatactggacttgggttcctactgaagaatctaggttaggttttcaggaccttttgcagactttgaattatgttgtggtgatgttgggttaggtaatttgtggcattgcttttagtttacatgagatgaatgtgatttgagaacttacggcctgctaactttagaggaatcgtgattctactgatatttgaggtcgaggttttgaaaacccatgctacatgcttctgctgagcatattgtaagatggtagtcttatatggattattggatgg

SEQ ID NO: 101534 - DNA, 1897 bp, Glycine max
  Clone ID: PAT_MRT3847_62699C.1
tggggcccacccccttgtgtctgcctcttctgaaacgccactatttctgctttctctctcattaataataatattattgccttacactttttctacaatggagttgggaagcatactccattttcttcaggacaagaacattttgatcactggagccactggctttcttgccaaagttttgttggagaagatattgagggtccaaccaaatgttaagaagctttaccttcttttaagagctgaagatgccaaatctgccactcatcgcttgaacaatgagatcatagggaaggatttgtttagggtactaaaggagaaattgggtgcaaattttaattcctttgtctcgaaaaagttgactctggtacctggggacatctctcgtgaagacttgggattggaggattccattctaagggaagagatttatgatcaaacagatgtcattattaacttagctgcaacaactaactttgatgaaaggtatgatatatcgttgggtctaaatacctttggtgttaagtatgtcatcaacttcgccaaaaaatgtaccaaactcaaggttcttgtgcatgtatcaacagcctatgtatgtggtgagggaggccgagaagggctcatattagagaaaccatatcatttgggtgattcactgaatggagtgtctggattagacattaatgcagaagagaaagttgtgcgtgacaaattaagtgagttacaacaactgggggccacagaaaaggaaattaaagaggttatgaaggacttgggcattagcagggcaaagttatatggatggccaaacacatatgtattcaccaaggcaatgggagagatgcttgtggagcaactaaaaggaaacttatccgttgtgaccattcgtcccaccattgttaccagcacattcaaagaacctttccctggttgggctgaaggtgtaagaaccattgacagtttagctgtagcttatgggaaaggaaaattaacatgcttccttggagatctcaaagcaattgttgatgcgataccagctgacatggtggtgaatgcaatacttgtggccatggtggctcatgcaaatcgtcctagtgatgatgttatatatcatattggttcctctgttagaagaccactaagatatggcaaacttcaagagtatggatttagatatttcacagcaaaaccatgcataagtaaggatggaaggccagttaaggttggaaaagttacagtactgagcaatatggatagcttcagaagatatatgttcattcgctacctgcttgtgttaaagggacttgagcttgccaatactgcattttgccagtatttccaaggaacatatcttgatctcaataggaagatccagattgtgatgcggttggtggacctttacaaaccttacttgttcttcaaagctgcatttgatgatatgaacacagagaagttgagaatggcaggaagacaaggtggggtggagacagatttgttttattttgaccccgaactgattgattgggaagattactttctgaacatccatcttcctggtatggtgaagtacatattgaagtgatattataattgaagtgatatatagagctttgaaactagtaattttattatgttcaaatttgtactagctagaagagtcacattatagtttgttatttgtttcttaagggcagtatgattgtgttagatagctgccaaatatgtttcaaaactttgatcaagtgtatccaatatcatatgttttaattttattttacttgtccctcagtctcttacaacaagtaccattccaaatagtactttttagcatggtttgttggataaaatcaatttttcacttttccctaaaaaaaaaaaaaaaaaaaaaaaaagggcggcc

SEQ ID NO: 101535 - DNA, 883 bp, Glycine max
  Clone ID: PAT_MRT3847_6269C.1
gcatcacctagtgaccagaggcctctgcctcatagggtgaatgtcacagttgctggtgtgttaccaccttttcatgttcttaacaaggtgtcacaacttggatttgatgtgaacattggatatggcatgacagagactttaggtcctgtgattgtaagaccatggaaccccaattcggatggcgaacacacaaagctgaattatggtgtttcggagtttaggcaagatgttgatgtgaaggatcctgaaactggtgaaagtactcctcatgatgggaaaaccataggtgaaatcatgttcaaagggaatgctttgatgctggggtaccttaagaattcacaagcaaatgataaggcttttaggggtggatggtataggactggagaccttgctgttagagaaccaaatggttctataactatgaaggatagagcaaaggatgtcatatattctaagggagaggttgtgagttcactagaggtggaagcagtgttgttgaatcatccaaaggttttgaaagctgctgttgttgggagatgtgatgaatgcttggtggaatctctatgtgcaattgtcaaattgaaagatggatgtagtgccactgttgaagaaattatcaagttctgtgaagatcatttggctactcacatggttcctagtaccgtggtatttggagatttacctgttaattcaactgggaaggttcagaaatttcgcatcagggagaagatcaaaggcagtgagtggtatgactcaaagaattaggttgtgctttgtaggattttataaataaaagatgtgaatgaaaatttgcaaatgtaatcatctattaatcttgaactcatttgttactttattctaaacgcatgactttcccgaaaaa

SEQ ID NO: 101536 - DNA, 682 bp, Glycine max
  Clone ID: PAT_MRT3847_626C.1
acaagacatcacatttagaaacactgccggtgcaacaaaccaccaagctgttgcattgcgttctggatcagacctatcagtattttacagatgcagttttgaaggttaccaagacacactatatgtgtactccgatagacaattctatagagagtgtgacatatacggcacagttgacttcatctttggtaatgctgctgttgtgttccaaaactgtaacatttatgcaagaaaccctccaaacaaagttaacacaatcactgctcaaggaagaaccgatccaaaccagaacactggcatttccattcacaattcaaaggttactgctgcctcggacttgatgggggttaggacttaccttggaaggccttggcaacagtattcaagaacagttttcatgaagacttatcttgatagtttgatcaatccagagggttggttggagtggagtggtaactttgcattaagtactttgtactatggagaatacatgaacacaggaccaggttcctcaacagcaaaccgtgttaattggttgggttatcatgtcattacaagtgcttctgaagcctcaaaattcactgttgggaattttattgctggaaactcatggttgcctgccaccagtgtgcctttcacctctggtctttgaattttattatttgtcatctcttgatttgta

SEQ ID NO: 101537 - DNA, 234 bp, Glycine max
  Clone ID: PAT_MRT3847_62700C.1
ccaaaggcaattaaaatgagcacggcataaagtctatgttgatgtgcatgaaatataagaatctactgatacaacaacccaaaacaatgaaatatggccaatgactcaggttatggatggccctgctatccctgaccatggcgtgcactagagctaccacctgacgcttttttaaaagagctatgcagtaaaatcctgacacacaaaatacataatctaaactggaacgaacta

SEQ ID NO: 101538 - DNA, 463 bp, Glycine max
  Clone ID: PAT_MRT3847_62701C.1
cacaaacccctttcccttttctcggaactttttattttgttttgtaaggaagaaaaaaagcccaattttcgccgttctttcccatttcaaccacacgcacacgcacacgcactcaaatccatttcaaccaatgtaatgtgtctgtctgggtgctaatttttttgcctgaaaggaaattgagatctcaaataaaatcctccattccaaaccaaatgcatggttacagccgcctgggcggagcagcgcgatcgcctccgtcgtctcctcggttccggcacggccggagcaagagcagcagctggtgttcgtcgaaggagagcaattccatggagaagttggtctttattcttatgtcggcagtttttagaaggcgtggtttgcttctcttcgctcctttgttgtacatttcgggaatgctgttgtatatgggttccttgagcatcgatgtcgtcagtataaagaa

SEQ ID NO: 101539 - DNA, 237 bp, Glycine max
  Clone ID: PAT_MRT3847_62702C.1
atacaatttataaattgcatttattggtgtaatgtctattgagactttgcctaaattgtgagcttgaaatggggctatcgcattacttggccagagactatcattggtgactgctgcaaactcgtgacggcacttgaaaggctggttgtgatatgtatctttggactaagcacatggttaataaatgatatcggcaatgaccaacatcggtgtcaaactaacctgtgataaaccaac

SEQ ID NO: 101540 - DNA, 286 bp, Glycine max
  Clone ID: PAT_MRT3847_62703C.1
ctccaccatcagcatcacatgatctagacaacccattgcgtcttgggcacctattactcccttctgccaatggccaattcaacaacttcacccacaatcactgttgtcctcatctccagcgttcccaaaccacactgaaagcataggactctgcactccataacaggtcctaaactcacccacaggatctactgctcagaacctttcaacatcactagatccaccagccttcactaaacagttgtatctatcaaacgctctcaccaacaactatcaaacattaact

SEQ ID NO: 101541 - DNA, 720 bp, Glycine max
  unsure (1)..(720): unsure at all n locations
  Clone ID: PAT_MRT3847_62704C.1
cccacgcgtccgcctcattccagccacacgcttcagaagacatggcctcattgggtgggttacaaaatgtgagcggcatcaattttcttatcaaagagggtccaaaagtcaatgcaaagttcgagctgaagccgccaccatatccactggtaataagacctagagtttgcatgtttacaagagaattcattgtgattttctagtggagctatatttctaatgcacattgaagaaagaatacttagcttttatagttttcaaatttacattctattgaaactttggttagtcttgttttaataaagaaacttaaaaatgaaacgatacatggacataggcatctcaatacatgcatggactaagtactttggttactcttattttctgctcatcatggatccgatgctataatctaactaaacacacacacatatatatagatgaagattcccaaaactcataagaatcacacaaggcttccagggagaaaaattaagttacctgttcggctggtcatcctatttataaaaccaaacctaccagaaaataaaaaaaccaaaagtagagagttgaaaaaatatattgtgataatgcaatgtttcagaatggnttggagccggggatgaaccagcagacacttgagtttcactgggggaaagcaccacaagaccttatgtgggaaaatctgaaaaaacaaggtttggtgggacagaactttga

SEQ ID NO: 101542 - DNA, 1779 bp, Glycine max
  Clone ID: PAT_MRT3847_62705C.1
cgcctcattccagccacacgcttcagaagacatggcctcattgggtgggttacaaaatgtgagcggcatcaattttcttatccatgcctctttctgtctttactcgttacaccccatgagagccaaaaaacgaaactcactccgaagcaaagcataatagatgaatttgttatcgcaatccactgccccttctacttctctatcaccttcctgttttcttacactccaccctcatgggttctcttgcaaattctcccacgcgtccgcttacgagtacgcccacgcgtccgcccacgcgtccgtacggctgcgagaagacgacagaagggggtcctaaatcctcattccagccacacgcttcagaagacatggcctcattgggtgggttacaaaatgtgagcggcatcaattttcttatcaaagagggtccaaaagtcaatgcaaagttcgagctgaagccgccaccatatccactgaatggtttggagccggtgatgagccagcagacacttgagtttcactgggggaagcaccacaagacttatgtggaaaatctgaaaaaacaagttgttgggacagagcttgatgggaagtcactagaagagattattgtcacatcatacaataagggtgacattcttccagctttcaacaatgcagcacaggtatggaaccatgacttcttctgggagtgcatgaaaccaggtggaggtggaaagccatccggggagcttctagaactgattgaaagagactttggttcatttgtaaaattccttgatgagttcaaggctgctgctgcaacacaatttggttcagggtgggcttggctagcatatagagcaagaaaatttgatggggaaaatgtagcaaatcctccttcacccgatgaggacaacaagctagtggtgctcaagagtcccaatgctgtgaacccccttgtttggggaggttactacccacttcttaccattgatgtttgggagcatgcttactaccttgattttcagaaccggcgtcctgattatatatcagtgttcatggataagcttgtttcctgggatgcagtgagctctagacttgaacaagctaaggctttaattaccagtgcatgatgctgaattaaatgcagaataagtgatttatcctgatagtgatgatgaattggatggcgtcatgcggaatagtgaattatttttatctagaaagtgtaagcaggcacatcttttgtactttaaataggtgttgtggtatcagggctaaatctcagattattatgttctatggttagaaatcttagttatggttctctttgtgtgacaatgtgaacaataagattgcttatgcatgaataatcaacaaaataatactatggtgtagagccttttcatataaaaaaaaaaaaaaaaaaaataaattaaaaaaaaaaaaactgaaattatagattgaattggatgacctcaattcatttgacatggcgattgcatgtttacaagagaatgcattgtgattttctagtggagctatatttctaatgcacattgaagaaagaatacttagcttttatagttttcaaatttacattctattgaaactttggttagtcttgttttaataaagaaacttaaaaatgaaacgatacatggacataggcatctcaatacatgcatggactaagtactttggttactcttattttctgctcatcatggatccgatgctataatctaactaaacacacacacatatatatagatgaagattcccaaaactcataag

SEQ ID NO: 101543 - DNA, 450 bp, Glycine max
  unsure (1)..(450): unsure at all n locations
  Clone ID: PAT_MRT3847_62706C.1
ggaacctttgggctgatttatgtgcttgtttatgtgcttgtttatgtgcttgcatggtcgtgagaagatgatagaaggggaacttctctcttgatctaagaggtgatttatcctgtcgtatgttaaataccgtatcgtgtgaaaagctctagagcacggatatctagaaagggttgctcctactggtcgtagtcgccatcctacgctgaaagaagaagaatgaagaagttatccccccggaggatccgaaggactataccgatgagcccaccaacgtcctcacggacgaatacaagatccgtcctaagaaaatagcctagaagacgcctggaacgcttaaggtcgccgtagagagggatattaacgtcgttaaagaagccgagagcctctcgttctcctagataatcccgtaagatcagcactacgtcngtctctaggaaaaacaacggc

SEQ ID NO: 101544 - DNA, 476 bp, Glycine max
  Clone ID: PAT_MRT3847_62707C.1
cgggctgcacagaactcttcatcattcactagctacgaaactcttttctctcgcctcttgctccactccccctgctccccatcaccagcttcgacatcctccgcccccctcatcaccagccagatactataaaacacagtcttgtatatagcgatcacctcatctcgtctctttcatctccaccctgacaccccgctttagagctccttcttggcgctcttgctcgcctgcgcactcacactgctcagactggcagagtacgagctcgcgctgctcgccgcgctcaccgcgctcttgctcgcgacagagtacgccgacacgaggctcttgctcgccgacaccgacgtcaccgacgcggcgctcgcagccgacgaggccgaagccgcgagcgacttgctcaggctcgacgcagacagcgaggccgagtgcgcgagcaccgacgcggccgacgaggccgacgaagcgagcgacgaggc

SEQ ID NO: 101545 - DNA, 213 bp, Glycine max
  Clone ID: PAT_MRT3847_62708C.1
caaattcctactgccttcgatccttttgctgatgcaaatgctgatgactcgggtgctgggtcaaaggagtatgtgcatattcgcgttcagtagcgaaatggtaggtgaagcctgacaaccgatcagggattgcaaaaagcgttcgagctaactcactacggtgtcaacgctatggtcgagttcagctgcattagctcagttgttaaggaccca

SEQ ID NO: 101546 - DNA, 173 bp, Glycine max
  Clone ID: PAT_MRT3847_62709C.1
cacccgcgcggagacgacacaggggggggcgcaatggcaaacgaatccccggacaccccccgcaagaggacacgagacggggaccccccagccggccgaaaaaaggcgcgcaaaacggacccccaagagcccagggaggaccgcgcaaacgacccacgggccacccagggcgc

SEQ ID NO: 101547 - DNA, 121 bp, Glycine max
  Clone ID: PAT_MRT3847_6270C.1
ctaagcctggcatggaataacacagctagcactacttatatatcctgtgtgagcagattagggtcccgcatggattactcggtcatagtgggatctaagaacaggactagactagcatatg

SEQ ID NO: 101548 - DNA, 199 bp, Glycine max
  Clone ID: PAT_MRT3847_62710C.1
gggggaggcgtgcgtatataccagtataatgagcttttcagagttatatgagttatcaagagcacttattaagcgagggggtaagaggggtttgaggcgattccacataagcctttcttggggcgtgtgggtcgcttgagcctcatgtgccctttctcaccccatgcggtgctccacccacgcggccgcggacgcgtgg

SEQ ID NO: 101549 - DNA, 158 bp, Glycine max
  Clone ID: PAT_MRT3847_62712C.1
cccacgcgtctcgataaaaaaaaaaaaaaaaaaaaaaattatctacccttcctcctagataaacaataacaaccatattttgctctgtggggggaggggatacgtccggtcaggtcgcagactcctgcagctacaccacttattgtcaggatcttggg

SEQ ID NO: 101550 - DNA, 484 bp, Glycine max
  Clone ID: PAT_MRT3847_62713C.1
caaacataaataattttcttaacactacacttaattcagttcttccaaatatgagacttcttactcgagagacttcctcatatgagacctcacatctatactattaccacaccttacaaccaaactaaacctttttatcatatattttaacagactacattaccacattatattcttcgtcaattccatcacctcttatcaaaaattcttcaccattcccctactccaattattaaaactaaacacttcaccctctaaaatatattttaataacttacccacaattttcccaaatacattctaatccacatattcatccctacttcttgaccaaccttagcatattactacctttatacatatttccaaatcttaaattcaaccttactaactacttacatatttaccttaattaactcttcctataatatcttgtttaaatcaatacgagccttaattcaacttcttaaaatcaacataaaat

SEQ ID NO: 101551 - DNA, 741 bp, Glycine max
  Clone ID: PAT_MRT3847_62714C.1
gaaaataaccaactctctccttctctacatcttttacttcgttctttgtgagttgaaaatccgtgcttgctttgagtcttttctgtgttgatcctaaattcttcttcaaaacagttcccttttttttattttacttactttttacttttgagtttatggtttacgctacatgaatcatgggaaatgtttcttcagtattacagtttcattataacgcgtgttccaacttgctccattgcatgtctcgaggttaaggggttcaagtccaatctatagtaatgaaaatgcctgttcctaatggagaagagcagattctgttacctgaaactgaaaatgcaagtgaggtttcgaaatcaccctcattggatttgaacccagattcagttgatgggtccccacctgtttccaccgtttacactgatgtgggtgtcgtcccagaacaccaaaagaacgagcttgagcacttgatatccaatttagaaggtgaaattgaggagctgaggctcaagcagaagaaattggataaaaagcggagagaagaattaagcaagatattggacatcaaagggagcattcgagtattttgtagaattcgaccgaatctggttacagagaagagaaaattttctgaaccggtatcggctggaccagagaaaatttcggttaagttcggggggacgaggaaagattttgagtttgataaggttttaccccaagaagcagccaagagagtgtttttgt

SEQ ID NO: 101552 - DNA, 443 bp, Glycine max
  Clone ID: PAT_MRT3847_62715C.1
catttctgtactactgaaaaggtcaagcagtagcaaaggacatgtaattcagggcaggacttttactgccacgacgctatcttatgatgatctgtcttttgcaagaagcagcattaacagtattagaagctcaactggacgtagcagttattctaccacttcatctgccgatttcagctcagcaagacattctgattttcgtgtccaaaggcagtcaagtggcaggaaattggatgtagactatggatatgatgttaggatcaggcctccaagccctggtttatctttttctggaatgtcaaaccattcttaccatggattaggttttgctacacaagaaacttcctctggcaatacagaatgcagcatcctggaagagataccccaagatctacgagaaatgcaagcttcagaaaatgcagtaacagatgtaattgattctt

SEQ ID NO: 101553 - DNA, 466 bp, Glycine max
  Clone ID: PAT_MRT3847_62716C.1
aggtttcctgtcatcactgtatgacgtcctccttctttgggggggggggggggaaggccggtatatgcgaagtataggaacagagatgacgaaccaacagatagcaatgcgagattaagagagagacctaagtactataggaagttagcgttatagcgagctaagaaagaggacagaaatatatggaggtgaggcaaaaaacttcaggctgccggattacgaaacgtaagatatattaggtagatgtgacataatattaaatgatgtaaagacaaccgttaagacgttgtgtaatggaacgtagtggtaacgttatgtataaagtttcgtaaggggatgtacgaaccgaacagtggttattcggccggagtattgggcggttacgtttacacgatgaggcgacgcgttagtatctatattgttacaaggtggagtcttagcaaacgtagttataggaacagcaata

SEQ ID NO: 101554 - DNA, 264 bp, Glycine max
  Clone ID: PAT_MRT3847_62717C.1
gtcagacatgtaagacgcatggctcaaggtttttacgcataccgtttcgccggaatattaaggtacattactagcattgtgagatacatttgttctggtgcaaagccatatgattgctaagactcaaatatttactaacggcaatggttactcatacaggatcgttactcaattgagcataacttctagatgctagcactgccttattatgatgacgactagttaccactactcatgatcacgatgaatggatgcatccacatt

SEQ ID NO: 101555 - DNA, 160 bp, Glycine max
  Clone ID: PAT_MRT3847_62718C.1
caatggaccgggactgtttaccgtggtcatggaaaaatccaaagatcttttgactaacgactacaactgcgaacagaaactcaccatttcctcatacatcaattacggaatggccctcacttcaacatttgacaagaaaggaggactatacactggagat

SEQ ID NO: 101556 - DNA, 154 bp, Glycine max
  Clone ID: PAT_MRT3847_62719C.1
ggctcgaggtgcagagactatgggatcgaatagcagaaagcgagctttctgactgtgttatgttgtctgtcgttaccaccagcaacgcggttgacatgaagctaaccgaacagggatcatacataaacctgactgttttgggcatgatggaaat

SEQ ID NO: 101557 - DNA, 250 bp, Glycine max
  Clone ID: PAT_MRT3847_6271C.1
cagtgatatatgaacagagacttttgcatggagagagctcttaagttgacatgtgcacgtgtctctatcacctatcttacctcaatgacaatacttcaactgtaatgtaaccgattgggtgaattaagacaccaccttacaacataagagaaggcctagaaggagcaatgcgtgacatggactaagccggacttggtgacatgttcactgaatcattgcatcaagcaggtgatgttctggatgcatgccc

SEQ ID NO: 101558 - DNA, 1293 bp, Glycine max
  Clone ID: PAT_MRT3847_62720C.1
aagagatttaataacttgatctgaacattcttctgtgtacttattctctttcatggggcaacggattgaaaagtcggtaacatagtcccaccattgccaaggctttccactttcatttgccactttatagaagcaagcttggcgtaagttttgaacaacaacatctttaccatcataccctctactgaaatcttgctcaggatcaggagcacagtaccttccattgtttatgcactgagatttgcactgtctgctcaagagaaatgcttcaggacaaaaccaagttatatagcgaggggtaaattgagtgaaccctctcttctccagctgctgagctacccctttaaagtccttcagaaaattaattagactgtcacactttggcccacactcatcgttgctattggtccatagctcgtactcaactctatcatcaggatgcggaagagactccctccaatcaagatttatattaaccatctccccgtcagagagagcctgcttgatgctatcccccagggatttgctgataagagcagaaggaatactaatcttgtccacataatcatcatttgctttcccttcttcaggagtgtccatagtgatcaacgtttctgccttgtcatcagctacaagaatagctgctgctccaccattctgtgcattccacgccttcaaagtgaagtagcaatctccacgatcaacaagaagaaaagtgggaaaccctcctggcttggactgaaaattgacatcactgaagttggtgcaccctttctgattcacctttgggtacagaacagaaccaaccaacgttcctccatacttgggaaccccaaaattcccaattgcacattcatacgtacccttcaacgatttcggagaagtcaccttcaaactgttcttctccaccacaaacctaccgacacaacaccccaacagcaaaaccccaacacacaacaaaagactcagctttgttgtgcccatcgtcttcttcttcttcccaaagcttgattgtgtctcggaaagggaagaagatcgaaattaacgggaaaaaaaactgaaattcaaagtgcaattaatgcaagtgtgatttgatcaaagggagaagacccagatgaggaaaatgagaagtgaggccaaaaaaagaggctttttgagtttgggtcagcagaagagtgatgcgtgagaaaggaaaaaagcatagaaatcttaaaggtgtcgaaatgatggaggagacgtgtgagttaagttcaactgtaaattggaaccgtcgccgtcggagcggacgcgtgg

SEQ ID NO: 101559 - DNA, 679 bp, Glycine max
  Clone ID: PAT_MRT3847_62721C.1
ctgctccaccattctgtgcattccacgccttcaaagtgaagtagcaatctccccgatcaacaagaagaaaagtgggaagccctcctggcttggactgaaaattgacatcactgaagttcgtgcaccctttctgattcaccttcgggtacaaaacggaaccaaccaatgttcctccatacttgggaaccccaaaattcccaattgcacattcatatgtacccttcaacgacttgggcgaagtcaccttcaaactgttcttctccaccacaaatctaccgacacaacaccccaacagcaaaacacaaacacacaacaaaagacccagctttgcacccatcatcttcttcttcttcttcttcttcttcttcctcccaacgcttaatgagaaaaactgaaagggaagaagatcaaaattaacgggaaaaactgaaattcaaagtacaattaatgcaaagtgtgaatgatcgaaaaggttgaagacccagatgaggaaaatgagaagtgaggctaaaaaaagaggctttctgagtttgaagaagctcgatcgcgatcagagtgggtaaggaaaaaaagcaaagaaatcttaattaaaggtgtcgaaatgaatgagggagacgtgtcagttaagttcaactgtaaattagaatcgtcgccgtcggagatcaaaacggacgcgtgg

SEQ ID NO: 101560 - DNA, 999 bp, Glycine max
  Clone ID: PAT_MRT3847_62722C.1
caaaccttccattccatttatagctctcacaaaaaatagaaaaattggtatgtatgaatgaatgtgctcgtagcagtcataaagtgctaagtcaaatataaattgtttgcgtgtggtggttcatcaaatacacaaaagggtatctaaagaacacaacattggagattatggagctagaaccaaagaaaggaccggttcatgatcaatacgatgatcttgttggttctttttcttcttcttcttcttcaacatcatcttctgtttctggaatttcaagtgggtcatcattggaatctgattcttttgaagaagtaacatcctctgcctcctcttcttcatcatcagcagctgatgatcaacttgtagttgtagctgatccattgggtgacatgacttctctctttcaacaacttcccatcaagagggggctatcaaaattctaccagggaaagtcacaatctttcacttcgctgacaaatgtgaggagcttggaggaccttgcaaagccagagaacccttacaacaagaggttgaagtcttgcaagagctatgcaggagggttggcagagagccattcaacaagggctgtttctaagaggggaatggtgcattcaacaagttcaagaggttcatgttcttcttttagaaggggcagtgctactactaatttcatgggtagtaggccaccaattcctcctcatagatctaccagcaccaacaccatccctaatcaaactgtgttgtttgcttgaaagggattgtgtcatgtttcttttttgttgaactaagtttttgttttttacttttttgggggtatcatgtgatgatgtagattaagtagtttcattcgaggaacactctgagtgttggagattggggggaaaagagtatttgggttacacctaatctgattttttctttcttttttaaatggaagtgcaattcacttgtgcaattttgatccaatattttaatgcaaattgattttatttttctggc

SEQ ID NO: 101561 - DNA, 1379 bp, Glycine max
  Clone ID: PAT_MRT3847_62723C.1
gcaaaacagaaaatggcatcattacttttgagtttactcgtcccttggacccgtcttgtaggcgggaaaagagggtagaatgtaaaaatatcgttgatcccacaactcctctcaaagttgtttgggcaatgggtgctaaatggactgatgatcatcttactgacaggaatatgcattctagtacaagtaatagggctattcttgtacacctgatgcgtggttcagcagaggcggagcaggatttacttcctgttttggctgtgcatggatttatgatgtttgttgcatggggtatcctgtttcctggagggatattggcagccaggtacttaaaacatctcaagggcgatggatggtaccggattcatgtttacttgcaatactcagggttagtaattgttctgcttgcccttctttttgctgtggctgagcttaggggattttatttcagctcaactcatgttaaatttggatttgctactatattgttggcttgcatacagccagcaaatgctttcctaaggcctccaaaaccagccaatggggagcaggcatcctccaagagggttatttgggagtgttttcacacaattgttggtagatgtgccattgttgttggcattgctgcactttttactgggatgaagcatctaggagacagatacgatgtggaaaatgtccatggactcagatgggctatggcaatttggtttttaattggtgcattgattgttatttatttggaataccatgaaaggcagcgaatagggcggcagatatctggaagaggcaattgggtgcttggtaatcttgaggaagatgattcagttgatctcttgaggtcaaccagaacaactgcagataaagagttgcaacactctgcgagaatggaagtccaattagaacctttgaacagataaatttgcattcattaagttctaatagatagttgccgttctggtcaattttgcatttaatcattgagctggcattcttctttatttgttatgaggcattttctgaggtgaaaagggaggcagttgcttatcaatctctattttcaacatatattgctttctaatttctatgaagagtagctttcctgcagcatatatttcctatagtgatacatcttcaactgagtaggttatatcaattcatcactccagcagcttcactatttcttttactacttcatcccaaaatagaagaaatcaaattttacgaggtgaaagctttcttgtggatcaatgtaggttctgtatggttagtttttataacagatgattccagacatggaatgctatctggccaaaggcattgttgtaaattatgagatgcagaaaattaatacatcattttttattgtcgataaaaaa

SEQ ID NO: 101562 - DNA, 389 bp, Glycine max
  Clone ID: PAT_MRT3847_62724C.1
ggttcgtctttttttttttttttttttttttttttttggcgagcaaacaaacaggaatccaaatttcaaaaaactgaccattggtttttactccatttttcatggcctgatgttatcccaaacattaaccctggccggggtgactcttttgggccaccaggggaaacagatcaatggttgtcctcagtctatgaccaatactttcatactctgagggaaactcgtaaagtgatgtctttctcgcctgcggtgaaagctgaaccttgcaaacacaccttggtaccgcagctgcccgtgaaattcatcacggggtgaaacttgaacatgggttaatgcctcgtgagggcgctgttttccaccccttaggctcaaccttgacatcaaatgcc

SEQ ID NO: 101563 - DNA, 608 bp, Glycine max
  Clone ID: PAT_MRT3847_62725C.1
tcagatttttcttagagatgaaaactggatttcagtcccacctgatcacaaatctttcttcataaatgttggtgattctcttcaggttatgaccaatggaagatttcggagtgtgagacatagagttttggcaaatggatttaagtctaggctctcaatgatttactttggaggtccacctttgagtgaaaaaatagcgccattaccttctctcatgaaaggaaaagaaagcttatataaagaatttacgtggtttgagtacaagaattcaacctatggttcaagattggctgataataggcttggacattttgagagaattgttgcttgataatatgtagagaattatgggggcacttgtcaatacaaaatgggggttacaatagtctatatactataaatgttttttctttttcttttttctactttaaggttatttatcaattagaatgcctcacagatataggacaacgcatacaccccttttgcttcaacactagtgaatgcatctgatgtagttaacaatggagatttgataatggtcaaaagcttgatacaaattgcaataaagctttataagaataaaatatatattccagacataaaaa

SEQ ID NO: 101564 - DNA, 858 bp, Glycine max
  Clone ID: PAT_MRT3847_62726C.1
gcaccagaaaacaatgagcctaagaagtccacagcagatgctatagctcctaaagcaccaaacaaggaatctaccgagcaacattcaaaaggatggcaaacaattccaaaaccaaaaggacattcagctctagactacgcacggtgggacagtgttgaagatgattccagtgatgatgacgatgaagatgaagatgaagagtctctgcctcagtaccgatttcgtgtaagaacagttggtgtccgtcctgtaaagtgagacgattctactgtacagtacatataaatggctttttttatcccatagactatagtgaacatgtaagtaacatttgatgggcaagaacgagcctgttacaacagctcaatcatgttgtctgccttgaagatatatgaatcctttagagaaatgcactggcctgtactgagttggtttgatagtcaatgatgatgagctatttgaactctgaatttttacctggaatccatccgttcaaagctgctatcatcctgatgtcctgtcaatcacattcctttgtgatagaaagtttaagggttcatgtttctgtattggaccaaaagtgtggggattggggagagttcttcagctgcagaggctcattcagcgtgactaaaaccattgcagctgggagcaggctgattacttttcttggggatactataaatagaagtcaaatttcctgatgattaattattgtagaaaaacaattataaggtttcagctgcatgaacctgtgttttatgctcttctttttgtatttttatgtaatatgattcattattcatcaatagtttaatgttcatgtcttcttaaacgctatttttttgaaaataacaa

SEQ ID NO: 101565 - DNA, 2144 bp, Glycine max
  Clone ID: PAT_MRT3847_62727C.1
cccagtgtcatggttaggatgtcaaggacaacatcaacatttttatataaatttcaacatattcgattccagttgattccaattttcatacgcttattcttttctttatactttaatgatttacaccttgtcccaatgatgaatatcatagaacagacacgtagcttcaacagttcctaattatcaatatcttcatcccaatcctgagttatctgcatgttgctatcatctttttgtttttgaaaagtaagaagcatggttatactgaaattacctttgaaaaagaagactttagctgattgacatataaaataatgaaatcgtctttcatatgacatttttttcatttaagaaagaatataaaaataaagtcatctttacaacaacgatgattccttcacatatgaaatcgtgttcctaaacacaaatcactcatttctcgtaactcatttgaaatttacatacttatgtgattaattagaaaaattgcacaaatgtggtaaaaaaaagactcattattttcaatttgacccacactaacaagagggactacaaaacaaccttaaaaacctagagactaaaaaaataaatttaaatttgaaagacaaaaaaaatgacctaaatttgagaaattaaaaacatgtttaagcttacaaaacactttatttctatctatttatttttaattcctcaatggaaagtttaataataacatgaaaagtttacctaatgtgaaacacatgaccattattaattcatcacaacttttcgaggtctcacattgcaagtcaagtcgagtgaatgtcactattctaattcattttttattcatattatatttgattgtactctcagagagtccgtttatattaaaaaataattatttatatatcaaatcaattattttttttattcaaacaaattgaagacacgttatgagctagaccttgacattttttatcatttatatacacatgcaactctcacacacacattcctacataatgttattgatttcctaaggataaataccaattcggatctttttatcctcattccatatacttgttaacttgaatataacacactacacataataacaatgaactaagtctggatattgtattgtatcattcccgtaataacttaatttgtaataaactaaataatttatttttttcaatcaatagttgaggattgtgttcaattactagtgaaaaataactttcatagcaagtaaaaacagtaataagaattaacatataagaaagcttaaagttatttttacaaatcatgcaattgatttccccaattcgtcccaattgcatatccaaccgtccttggccattgacttctcttaaattagctggtaggttctcatcaaactctatcccccatctttcacttagttttccattcttacctggtcaattagaaattaaactgagagaaagtataatatcaggaagaatagtggtaagtaactaaactatgttagaaatccctaaaacatgtttggtcattagttgtttgaagggatctaattatgctatagttcaattgttcatatgaggaagttttaccatacatcttatgcttttgagctttgcttgtgttcactttagttaagttttaaataaaagtttattttatttgggatttttagtttattccttttgtgcttgatccttggattgtttgcttatgatttgtaagaactttgttgaattctaatcaagtggaaaagagttcacaagtaactacactagggaaatcttagaagctttgaagctaagaacaaaaggggttcaatccgaagaagtcaaacatatcacacgtcgatcagaagcaaccaatgatatttatgcctacgggagtgcatgattctattcatttgattgtaatggggaaattcaatcggattctgaatgaagagaacaaccaatgatatttatgcctaggggtaaattgttagacactcaagtcaattaattatacttatcaaggggcatgatcaagggactttcttgcttaagttttctattttaggaatgattagtgatgcatgttaggttggtccaatgaaatctaagtcaaaacaattttcataaagctttcttcctttgaattcattacttttatgc

SEQ ID NO: 101566 - DNA, 357 bp, Glycine max
  Clone ID: PAT_MRT3847_62728C.1
tggcttggaacctttgggctgatttatgtgcttgcatggtcgtaataatatgatagagagcgatcccgagctagcgcggtcatcataacaccgcgagcccctactccgacttaagaggactctacttcatcttaacctacattacagtcgaacctctcactaatcaacgacgcactactcacacggaacacaatattagaaccccccaccgggaactcaatagaaacaatttacatcaaagaccacagatttaaacaccaccgtacttaccgtcatcgattcgcctacgacagtcatcatcgacccgtcatccacaacgcatgcaaaaattgctattgaaagcgatcaaccctaaca

SEQ ID NO: 101567 - DNA, 412 bp, Glycine max
  Clone ID: PAT_MRT3847_62729C.1
gcccggcctgcccggctcgacccacgcacgcggtctgagtttcgaggccatgacacaaacaacaggctctgggttcaatcagggtcaggctgggatggaaacaacgtgcgccaaatcgaatctcgatgaacagcaaactgctaaaggttccatggcggctctgaaaacacctctgtgtatacctgctcgcacgacaaacacaggtggaggatccattctgcgtctagatctatgggcaattttggtgacagcgggcaattggagagcacgtattcatgagcatcccactcatggcctgaacagaatgactaactggctggccccaggtgggatgcctgagaatccaggtatatcataggcctgcgctatgaagagctctcgaggcgagctgcccatttgatatcacaccatc

SEQ ID NO: 101568 - DNA, 239 bp, Glycine max
  Clone ID: PAT_MRT3847_6272C.1
caagtttcaaaaatagcatccctgataacagtctaacatttgttccttttccaccctgtgtgcaaggttaggaatctgatgcatttgaaaattcaggtgctagattttctcattttcaggagaagatggccttgccgaatctgccatttgatgaaaggttgctggccagatttcctcttacaaccaagagcatgccaaattcacatctggacctcttgcccagtttgtctataggagga

SEQ ID NO: 101569 - DNA, 1940 bp, Glycine max
  Clone ID: PAT_MRT3847_62730C.1
aaggaagcgaagctccgacgtcaatagatcaaaataaaggggcagtatggattattatgatgatcttctctctacacctttgttttctcgaagtctcaacttgccttgtcggatttcccacctgttccggtcaccaaacctccttctctggtcactccctcagattcaccctctctagtctctagttcccaacaacaaactcaaaggttccacactacataatacactttaatggggaaacaaaccagaaaaaagtgtcgtgtaggtaaacacattatggggcatttttcctcgatgttcaatgggttggcacggtctttttcaatgaagaaaggaagaaggaatgggaaatgtggggggagaggtcaaagctgctgaagcaatggcaaaggaagctaagaagaatgacatgatgttgtgtagctctggcattgttcatgtagatggttcaaacaactttgtctccgttttctccaaaataggccagaaaggagtgaaccaagattgctgcatggtgtgggaggaatttggatgccaagaggacatgatattttgtgggatatttgatgggcatggaccatggggtcactttgtggccaaaagaataagagagtcaatgccaccatctttgctatgcaactggcaggagacattagcccaaacttcaattgatcatccggctattgatgtagaggaagagaaaagtaaacattacagattcaacatatggaagcattcgtaattgatgacgcctgcggtcattgatcaagaaatagagcaatatcgaaagatatacccgagttaaagcagagcaacttaactagtaaagattagacagtgttaccagccactgatggggtatggtagctaatctctagtaaagatggagtggacatcgtatcatcaacagctgataaaagttaggcagctaatcgtttggtagagtatttgatgcacaggtggcagagagaataattcagtgccaggggcgtgtgttctgcttagaggacgagccaggggtgcatagggtgtggtcaccggatgaagagtctccgggactagccatgtctagggcctttggtgactactgcatcaaagggcatggtcttatttctgtgcctgaggtaacacacagaaatataactagtagagaccagtttgttgtgctagccactgatggggtttgggatgtaatctctaataaagaagcagtggatattgtatcttcagcagcagataaagctaaggcagctaaacgtttggtggagtgtgcggtgcatgcatggaaacgcaagagacggggcattgccgtggatgacatttcagctatttgtctcttctttcactcttcttccctttcaacagggcaagttagccaggttgccacattaaaatagattattatcgtgtaaaatgggctggtcgatcatgtcatacttgatgatgttggcttgatgtacctttggtccaattaacataagttgattaaaagtgcatggtaaatttgtttcttccttagttattacacttatagcttgtttgggtaaatcatatctaccatcaaaatcacgtcaaacaacctaaattacacacaagctataatagcttctgcaggaatgtggatcgagatgaacctgagtgatgctaaagcaaacatgtacttatttgattagtatctatttatttggtgctgaacctgaaggtggatacgaatacggcagaaggtgatttttggtaagtggaaaactcggactagaatgaagagtatggtgttaagaaatagggtgtgtttagattaacgttgaaattacgtcaaatgaaaaaattgtgcaaaataactatgttgtaattttcatttgaaagtccgttgtcataagattcaactgattctcaaaacacacacactgtaccgttcaagttagtaagaatatgaggagttc

SEQ ID NO: 101570 - DNA, 442 bp, Glycine max
  Clone ID: PAT_MRT3847_62731C.1
ccacgcgtccgctatgaagcactttgtggatactagacgacgcgaggtgtcatatcaactaggggattaggtattactcaaactcagaccttaccgccaactctcggtcaaggattcctaggaggtgcaaggccaattggccaaacgattttatgggcccttccaagtggttgaacgcattggaccagtagcgtatcatttgtaacttccagatggtgcccacatacatccggttttccattgctcagtattgaaaccattttgtggatcaccgaagctcgatgaagcggttcaattgcccaataaagtttttcaagatcagcccgtcatctcccctttggccattctgggtcaccagaagtcatcgccgacaggcccatgggaagtgttggtgcaatggcaagggttatcccttgatgatacatcatgggaagactaggac

SEQ ID NO: 101571 - DNA, 546 bp, Glycine max
  unsure (1)..(546): unsure at all n locations
  Clone ID: PAT_MRT3847_62732C.1
tttcttttcatgactccctcttttccgtttccctttctcccaaaaaagtgaaaatccaaaaatcctcccacatttctctgtgaaagtgaaaccaacccaacaacaggtcagaacttagacccacccattctcattcattccgagtcctaaccatttgatggaggccaagaaggaatatgaagtggaccatctgaccacactcacagggaccagtttctctcagttactattcggagatgacgacgacgattatgatgaaagtgcattgggactcgctgtggaccagtcttacacccgttcacctcttttctccattcacaaggcaccccaaatgctttgttttgccaaccatcaaaaccaaggttgacgttttgcttcctgaaaccaacgtaacccctcagaaatctgtcatcacttctagtgactcctcttctgtagcgcttnctcctgcaccacaccaacaccgcttcaattcttacctaagtctaatagttgcagaaaaagcgaatgggatggggcaagatcagtgaccaaggtggtgttgga

SEQ ID NO: 101572 - DNA, 631 bp, Glycine max
  unsure (1)..(631): unsure at all n locations
  Clone ID: PAT_MRT3847_62733C.1
ccacgcgtccgcttgtttctctcttttcatgactccctttctcccaaaaagtgaaacaccaaaatcctcccacaacaacaacaaacaggttaggacttagagagccactcattcccatttgatggaggcgaagaaggaatatgaagtggaccatctgagcacacccacagggaccagtttctctcagttactattcggagatgacgacgacgacgttgatgaaagtgcattgggtctcgctgtggaccagtcttactcttacaattacaacaaccttacccgttcacctcttttctccattcacaaggcaccccaaatgctttgttttggcaaccatcaaaacgaagaaggtggcgttttgcttcctgaaaccaacgtaacccctcagaaatctgtcatcacttctagtgactcctcttctgctagcgcttcctcctgcaaccacaccaacaccgccttcaattccttacctaagtctaataatagtttgcagaaaaagcgacaagaaggagttgccaaggttgggtgttggaagccagagacanactaaaaagaacaaagcagagaaccccacctcaaccggacatgcaaagaggaaggagaagctcggagaacgaattgcaacgttaca

SEQ ID NO: 101573 - DNA, 163 bp, Glycine max
  Clone ID: PAT_MRT3847_62734C.1
tgtcgaatatgggaaactcatctttgaagcgagtactagctaactcctcagtctcttcattatatactgactccagagccccatactgtttgtatgggaatgccagaataatcaagtccttgtactttgattctttatacaattggctaagttttgtgtagga

SEQ ID NO: 101574 - DNA, 210 bp, Glycine max
  Clone ID: PAT_MRT3847_62735C.1
ggctcgagggaatcatggctccagcaagaagcgaagaagaaccaccattctccattattctcatcttcttcatatctgggaagtcaatccaattggatggaatgggaccaacattagcttagaaataaaaaccttaggataatgtaaaataaaaaagtgccatctatgtatgttcctttcctaacttaccattctgaatttgttttgttt

SEQ ID NO: 101575 - DNA, 790 bp, Glycine max
  Clone ID: PAT_MRT3847_62736C.1
gaagaatatttgctgtgttttggatattgacaggtactattactttagctcagcttttcgtctacattgctgaactaaacactgaaatcagacaaaaggaacttgtcaagtgggtacttacaaggaaagtgaccaatttagatttggaggctgcagatcttgatgaggatgggactgttggggctgcggaattcgttatttataagctcaaagagatggggaagattagtcaagaagatatatcacttgtgatgcaggagtttgaacagcttgatgttgatgattctggcacactatcaacttcggatataacacttgctcagtcatcttagaccaacacattaacattgcaccaagttggtaccgagtgttcctatttttcactttgatcacgtaatgcacaccatagcagaactttgatgagcatggaaagtctgaaatttcttgaagggattggcgtttattggtcagtctcatactatcgatttgttgactacttgatcaaggagcttcttatgcatatcatgtaagtatataagcttaaaagtttaagcttcagagtcttttgtatttaactgcttaaaatacatagatgaaatcggaacattcagttcaaagcacattacttgagtttaggatgagtcacacatggtttttgcattgaccaagatgcttggaatccttggatgtgtgttggaaacatgattttaaattgtggactcaagtctcattgaagcatttggaagtagtttttcatcaaaaaaaaaaaaaaaaaaaaaaaaaaaaaaaa

SEQ ID NO: 101576 - DNA, 457 bp, Glycine max
  Clone ID: PAT_MRT3847_62737C.1
atttgctgtgttttggatattgacaggtactattactttagctcagcttttcgtctacattgctgaactaaacactgaaatcagacaaaaggaacttgtcaagtgggtacttacaaggaaagtgaccaatttagatttggaggctgcagatcttgatgaggatgggactgttgggtttgttgagcattctttcaaagtcatatatattgttatactaccaatgataaacatggctttattcatttttatctcttttcttttgtttctcatagggctgcggaattcgttatttataagctcaaagagatggggaagattagtcaagaagatatatcacttgtgatgcaggagtttgaacagcttgatgttgatgattctggcacactatcaacttcggatataacacttgctcagtcatattagaccaacacattaacatttgaccaaggtggtaccg

SEQ ID NO: 101577 - DNA, 343 bp, Glycine max
  Clone ID: PAT_MRT3847_62738C.1
gaagagcaccatctgctttgctctctttctctttcgtgcctacaccacctcatacctaccttcagccgtcactgatttcaggcacgataatgaaggtaaccctcttgaaaggggtggcacatattatatcgtggcagacatgacagcagttgatggaatatcagcatccccgaccgtgaaatgagaaaagccctgtcactggggtgcagtctctgcgatgagctcgacgagaggattgtgaacaaacaataagggcgcatatataatccggttgatcgactagcggcgtcctttgagccttagataacagacaggtggatatatagagctgggtgtgggaata

SEQ ID NO: 101578 - DNA, 492 bp, Glycine max
  Clone ID: PAT_MRT3847_62739C.1
aaattaaataaaaagatgcatatttgatttgttggtcaacagcgaacacatatggggagatttttttaaggtcatgggaaatgtgctggggcaattttaaaaaacaccccactgatattgttggggcacaacacaaaacgtggcttctaaaacaccaaaataggtgctctgggcaaacggaattcttgggctttttttggggaataaatactggaaaatctacacatgatcaaggggctaagaaaccgaagggggtacacattgcacagattctttggggggtttaaaaatggaccatccttggggggtaggaaagaaccattcggagtttatgggaatgttcctaattacaatcagtcgggaaaggggtgaatgcgcccttccgttggaccgtgcctggaaagagacaccattcatgatcccaaaactgtccggggagggcctgaaactaacccatttactattttgggggatgacctcaaaaccctccat

SEQ ID NO: 101579 - DNA, 276 bp, Glycine max
  Clone ID: PAT_MRT3847_6273C.1
caatcacgcgtgaaaagggatcctaaagcagtaaaaacaacttaaaataaacgatggaatacaggaaagatgacctcagcagaaatgactcagagaccgctacaaagatagagaagagactggatgagccggctgaacttgagcaggaaacttgaaaaataaagatctagaagacactttgggaaagcagacagacaacgcaagcagaaaagcgggagaatggtgcctcaggcattggaagctacaaaaaaaaaattacccgaatcaactgggggg

SEQ ID NO: 101580 - DNA, 654 bp, Glycine max
  Clone ID: PAT_MRT3847_62740C.1
gagaattgaaatgattctaagtttcttaattattacatcaaaataaagacaataataactttatgtcgaagcataagaaagaaaggggaaagaactagggagttcaattctatatttgacatattttaaaaataaaatagtatagaatatgagttaaaaaagagggactactacatgttgattcccataacgaggatggaaacaaagatagcgttcattaaattgttagaaccggtagggacataacattcttttctatatttgatatttttacattataaaaagactaaaattttaattctcatcatcgtatttaactcctcatgtcaaggaaagaaaacaaaaaccaacgttttaaaattagcaaaaagattaaactatagtttggagcaacaatgggaaaaggaaaaaacgtaaccacccctaccgttaaaccacataatagaaacatggtttagttgtctcaaaaaaagaaaaatggttttgtttaaatgcctttttacgttttcataacgaaaactctaaaaacaaaaggtttggacgtgacaagaatcatgaatcaaattttgttttttaaagactaaaaacaaatatgtgtgaagaaaaaaaatgagtaaataatctgtgtagtgtgtactgaatgcgtaaatttta

SEQ ID NO: 101581 - DNA, 578 bp, Glycine max
  Clone ID: PAT_MRT3847_62741C.1
caaaaataattaattataaaaatcaacaacataatcatacatgcatgataattctatgattgattaacattataaacgttggtgcttaaatcattctcctcttttacaaaaaataaaaataaaacaagagagaagttcacgtgtttgctaacaaaacatacactttttttttgggtaaataacagaacatacactacattattaatatctttagtgcactgcactgatatgccagaatgtagaacaaattcgactatagtttattttgtggtaaagtgaatgaagactcaccccaatttgagggaagtatctgagctttcaaagtcttgggggggtccagtggaattgcaaacgtacgtaacagactctgaagactgaccttcatccataacaaagttctcagattcggcaccaccatgcctttggccattaattatgcccgccacgtgacgtttaagtcgctcgttctcttccatcaatagcatcccctttctttggagatcagggatctcactcataatcttctcacccttcttttttattacacggcccaatccagtttcaaagagaccttccaa

SEQ ID NO: 101582 - DNA, 320 bp, Glycine max
  Clone ID: PAT_MRT3847_62742C.1
caacttcttctaaattgggggaatatgagttattaaaaggttcacatgactattgtagtcattggccatgtccactcttggaaatccactaccactggtcacctgatttacaagcttggatgcattgacaagcctgttattgaaaagtttgagaaggaagcttctgaaatgaacaagaagtctttcaagtattcctgggtgcttgacaaacttaaggcttaacgtgaaagacgaatcaccattgatattgctttgtggaaatttgaaacaacaaaatattattgcacatttattgatgcccctggacataaggatttcat

SEQ ID NO: 101583 - DNA, 764 bp, Glycine max
  unsure (1)..(764): unsure at all n locations
  Clone ID: PAT_MRT3847_62743C.1
agttancagaaaggcacactcacacatacacacacctacttaattcgtttcagaggaaaacgcacactatttcggaacttctgttgaatcattttccacactcggaaccccaaaacgaagaaagttgatcatttccacgttcggaacctcaaacaaatcagagagagactcctcattctagataaatagatgaatttccgttgacaacgttgtgaagttatgaaaatgttgtttctccaaaccactttcttacctagacccttctcacctttttgtgatgctagtttgcatccattgtcatcacttaacattcaaaatcctatgttggaatgtgctcacagcttttctcattattcccctgtatctagccaccgcattgtaaagtccatatcatgctctgtttctagtaagtctcattcaaaacccgatcctgaacctccggaacctgaagctaattcgaaccaaagagcaaggcctaaggcaagaagcagaagtggccaatctaaagatgtggtatccagcaatggtgataaaagttcagcagagacattccccactacgattcccaggaagccgaggcgtggtcgcagaagtgaagccgtggcagtggaagattttgtacgcggttcgctcgagcgcacgtttgctgncattcgggaaccanaacaggatgctttggagaatcatgagaaacatatgaaggagagggatgatgacagttctaaatctgaaagtggtgatanggacgatgancatgatgatga

SEQ ID NO: 101584 - DNA, 487 bp, Glycine max
  unsure (1)..(487): unsure at all n locations
  Clone ID: PAT_MRT3847_62744C.1
cnatgcgtttgtttatgtgtttttttttttttttttttttttttttatttgtttgtggatatttgggggtttttttttttttnttgnccaaaaaggacccaaaaacctccaaaaggctttaagttaaaatttggggggcattttttgggcgggggggggcccccggggaatacggggcgggacccggaaggggtcccagctgccctataggggggccctttaagggctggggggaaccctgggcaaaccgggtcccgggggggaaatgggtgccccctcgaataccacccccattcccaccgggaacgcaaaattgaaaagctgggggggccaaagggggggcctaattaacattaatgggggggggctaactgcccgttttaaagggggaaaaccggggggaaagttgtattaatgaatgggccaacggccgggaaaaggcggttagcaattggggccccagggtttttttttttttcccccgggg

SEQ ID NO: 101585 - DNA, 207 bp, Glycine max
  unsure (1)..(207): unsure at all n locations
  Clone ID: PAT_MRT3847_62745C.1
tctccgtaccagtttcactgtttaaatntgttagaaaactctgcaaacatggtggtttatgataacctccttgcatgtgatgagcttctctcggactccttccgttacaatgaaattgagaatggaatgctgtgggaagtttgatgggaagtgtgttgttaaggtagcaggtgatgttgacattggtgcaaacccttcttctgaagg

SEQ ID NO: 101586 - DNA, 433 bp, Glycine max
  Clone ID: PAT_MRT3847_62746C.1
gccacacgtgccttggataatagggttcttactgtgaacagcggtagagatatgctgcaacgggggaggctcctgagcgtggtcaggaagaacatgcacaagaagtgcattggcattttctacgaaacgggggaacacaagggaggctttcacaaggcctatggaggcttctctaaaaatatgatacgcgtgattacatgaggagttgtgagcagcaagacaaaacttgagtgagttgctcagggatcactccaccaagaggggggaggagacgccccgcctgagggactatgctaccagtatgaaagatgggcagattgacatttactacattactggacaaagcaagatagctgttagtaattagagtttgcttggaacgcttatgaagaagggagtcgagaggctctacattggtgatgctattgactag

SEQ ID NO: 101587 - DNA, 277 bp, Glycine max
  unsure (1)..(277): unsure at all n locations
  Clone ID: PAT_MRT3847_62747C.1
gtcgcacgcacgcgtacgtaagctcggaattcggctcgagnaaaatgcttgttgtgaaagacacggatacccagtatgcttaatgtgaaaagaaaatatgttcngttttgtaaaggaactttcaagtattgttgtaaatacttggacagaggttgctgaacttaaaaaaaattaatttattattataatgacctaattataatctgaagattaaccattttnttgtctggantatcaaaagaaaaagggtctagcgtttcacanggaagattatacg

SEQ ID NO: 101588 - DNA, 1189 bp, Glycine max
  Clone ID: PAT_MRT3847_62748C.1
gaccgtcgccgccgtctcgtgcgggtcccgtgctagccgatcctggcctcctctttctcctttgcgttctgtgctatctccaaattctcagcacacgcatttccgttctttgtccttgatgggtttagtgtttggaaagattagcgttgagacagcaaaatataagtctctatatataagatccatgtacgaatcatcatccaaatcactcgttgctatctccaaagtcccagcacacccatttccgttctttgtccttgatgggtttagtctttggaaaaataaccgttgagacagcaaaatatgaagtgatcaaatccacaagtgagtacgaaatccgtaagtatgcaccatcagtagtggctgaagtcacatatgacccttcacagttcaagggaaacaaagatggtggctttatgattttggccaattacattggcgctgtggggaagccccagaacaccaagcctgaaaagattgccatgactgcaccggtcataacaaaggacagtgttggtggtggtggcagtgatggtgagaagattgctatgaccgctccagttgtgacgaaggagggtggcggtgaaggtgaagaagggaagaggaacaagatggtgactatgcagtttgttttgcctgctgtgtatgggaaggctgaggaggcgcctaagccgaccgatgagagggttgtgatcagagaagagggtttgaggaagtatggggtggtgaagttcggaggagtggcgtcggagcaggtggtgagggagagggtggagaagctgagggagagtttggagaaagatgggtttaaggttgttggagatttcttgttggggaggtacaaccctccttggacaattcctgcgttcaggaccaacgaggttatgatcccagtcgaatgaactcgaagggtgttacttaatgaataatgatatacagatttcagtgctttctgttacttctgcatgatgttaagttttattgttgttaagaagttgttgtagtgctgcttcttcttgttatgtttaaattaaatacacataatgaatgtttttgatgtgccaggtttttgttcatgttttgttgtctgcttggttatgattttggtgatcgttattgcgctttaagatacaaatttgatagaagcaaaatttttctcccatgggaaaaaggagaggtgtaccaaccc

SEQ ID NO: 101589 - DNA, 247 bp, Glycine max
  Clone ID: PAT_MRT3847_62749C.1
aaaacgggggcttttaaatccatttaaaaacattttccttttaccagggaaataaaacctttttttttaccccaagggggggttattttaaaggggaagttccaaacaataaataaccccgatcttgggggttccatgctttggccttggggggaaaccctaaaatctccctgccggtttgaccacgtcagccctggcggttgtttttttttaatcccaaaacagttcatttttgttaatccaaaaa

SEQ ID NO: 101590 - DNA, 628 bp, Glycine max
  Clone ID: PAT_MRT3847_6274C.1
aggcaattgagttttttcgttacatgcacacagaaggggttgagtctaatcagtttacatttcctagcatattgacagcgtgctcttcagtttcagctcattgttttggagaacaggtgcatggttgcattgtacggaatggttttggatgcaatgcatatgttcagagtgcgttggttgatatgtatgccaaatgtggagatttaggtagtgcaaaaagggtattagaaaatatggaggatgatgatgttgtttcatggaactccatgatagttgggtgtgtaagacatggatttgaagaggaagctattctcttgtttaaaaaaatgcatgcaagaaatatgaagattgatcattatacatttccatctgttctgaattgttgcatagtaggtagaattgatggtaaatctgttcactgtttggtaatcaaaactggatttgagaactataagcttgttagcaatgctcttgttgatatgtatgccaaaactgaagacttgaattgtgcatatgctgtgtttgaaaagatgtttgagaaagatgtcatctcatggacctcccttgtcacaagttatacacaaaatggcttccatgaagaatccctgaagactttttgtgacatgag

SEQ ID NO: 101591 - DNA, 552 bp, Glycine max
  Clone ID: PAT_MRT3847_62750C.1
ccacaaaaaaaatccaaaaaataggttaaaactaaaaaaataatcggccctaaaaaagggcatatggaacccaggtccctaacaaaccaagggcgtaggcttaagggggggggacaaaacttttttttttgatccaagccagggatcgaaagcccttcaaatggaaagggccgggtcaacccctgggccttggaaaaaaaggccgggattaaaaaataaaacaataccggatttatcatcaggaaaagggggtcaaacctttttggaaatcttacggggggcggaaaatcgaatttctcgttttcttgcggcttcgggaaaagcacccttgaaaagtctttgggccctacccgcagggggatgggggttaacaaaatccacggttttctaattactaaggggctcccataacccatcagaggcgaatataaggaaggaatctttgggtgggagaggatgaaaaaaaatagggggattagcactcaaaaggggcatgttcatgggttcaggaagcctgaattttgcataaaggggttcccggttaaacggggc

SEQ ID NO: 101592 - DNA, 478 bp, Glycine max
  Clone ID: PAT_MRT3847_62751C.1
gctcgtacccgtggggttacgtggcagactgggagcatatttgaagttatctggattaacccgggctaggagcatacttattagtatacctaaatggcatcttttaaatagtcaaaaatcaaaatcgtaaatcataacactacaattacacccaattgtgtcttttatgtttctgccatatgtttactctgttatgttgggggctctttgccattctgatcaatctgcttattgtaccttttgtagtgtacagacgtccgactgctttacaagataggatgagggatagtgatgatgatgaccttcatgacagggactatgatgttgcagctctagcacataatttgagccaggcttttagatataaaatttatgggaatgaggataatgaagaggaacgtggcaaccttgatcgagatgatgaggatgtctactttgatgatgactctgctcaagtaggcatattatccctaagact

SEQ ID NO: 101593 - DNA, 1299 bp, Glycine max
  Clone ID: PAT_MRT3847_62752C.1
caaatagcaatagcagcaatgtcaatgttgagatcagtttgtcagttgagagtgggagtggcaactccaaaaccttgcctccatccctcaatcttcttattctccctttctctctctcacaacactcacactctcacctctttccccagaaccttccgtttccacccactttcactccctctttcaccctttgtgctcttcatgcctcccaaagcaacagcttcgtatggcactggggctagtggtgctgctgaaggtgataggccaagggagatattggtgcagcatttgttggtaaaagaagatgaccagaagcttctgttgtatcttcagcagaaaatctcttcaggtgaagatttgagtgatcttgctgtggaatattcactatgcccatccaaagaagaaggagggatgcttgggtgggtcagaaaggggcaaatggttcctgaatttgaagaggctgcatttactgcacctttaaaccaagttgtaaggtgcaaaacgaaatttggatggcacctgctgcaggttttatctgaaagggaagaatcaattcttcaagacattcaacctgatgagctgcatatgaaaattcaagatcccagctttttggatgaggcacaattaattgatgtgcgagagcctgatgaagtggccaaagcatctttgccaggatttactgttcttcccctccgacaatttggaagctgggggcctgaaataactaccaaatttgaccctcaaaaggatacatatgtcatgtgtcatcatggcatgcggtcattacaagttgctaagtggttgcagtcacagggttttaggaaagtatacaatctttctgggggaatccatgcctatgctgtccaggttgatccatcagtccccacatattgatttacattattctgccataaatgtagtcctttacttttctactttccatctttgtacatgagagcaagattttgtgggatgtccatgttacctttaggaattggaattctcttggtatgaacatgtatttattttggatcaagagtatgaggctacatatcaagtgctagtttttgtgaagcttgcctcggctgtgaggtgatttatgattttcttagcaagtaattgctacttggttttatcggtttctttccgaagctggccttggctgtgaggtggtttatgattttctcagcaagtaattgttacttgttttatcatatttttttctgtgtaattcccttccaagtttcaatactatggctctctattcctggctggaatcatagctgggttaagggttcc

SEQ ID NO: 101594 - DNA, 331 bp, Glycine max
  Clone ID: PAT_MRT3847_62753C.1
tacgtaagcttggatcctctatagcggaacgcttttgggatgggacacataatggttttttaagaacaaaaaataaaaagattttggatttaaaaacttgggacaagacctggcccatgggacattgcgctttcttttaaaaaagaaagaaaaaattctatttgggggtaccccaatgcttttttcaccccaatctgcgaaagtttgagaggtccttccttgaaaaaacttaaattacccttgcccctgataccccccaaaaaggaaaaaacaaaaacttcttgttacaaaaaagaaactgggggcaattccttttttgcacacccccccc

SEQ ID NO: 101595 - DNA, 1282 bp, Glycine max
  Clone ID: PAT_MRT3847_62754C.1
cggctgcgagaagacgacagaaggggacgagacgatgtttatataatttatctgtcaaaaccacttgtgtgtattgtttgtgccaggcaaatatcaatagcggtagcagcaatgtcaatgttgagatcagtttgtcagttaagggtgggagtcacaacccaaaaaccttgcctccatccctcaatcttattctccttttccctctctcacaacactcacactctcactctcacatctttgcccagaaccttccgtttgcacccaccttcactggctctttcaccctcgtccgcggacgcgtgggcggacgcgtgggcggacgcgtgggctggggctagtgctgctgctgaaggtgataggccaagggagatattggtgcagcatttgttggtcaaagaagatgaccagaagcttctgttagatattcagcaaagaatctcttcaggtgaagatttgagtgatcttgctgtggaatattcactgtgcccatccaaagaagaaggagggatgcttgggtgggtcagaaagggacaaatggttcctgaatttgaggaggctgcatttactgcacctttaaacaaagtggtaagttgcaaaacgaaatttggatggcacctgcttcaggttttatctgaaagggaagaatcaattcttcaagacattcaacctgatgagctgcatgtgaaaattcaagatcccagcttttttgacggggcacagttaattgatgtgcgagagcctgaagaagtggccaaagcatctttgccaggatttaccgttcttcccctccgacaatttggaagctgggggcctgaaataactaccaaatttgaccctcaaaaggatacttatgttctgtgtcatcatggcatgcggtcattacaagttgccaagtggttgcagtcacagggttttaggaaagtatacaatctttctgggggaatccatgcctatgctgtccaggttgatccatcagttcccacatattgatttacaatgtagtcctttacttgtcctctttctatctttgaacatgagagcaagattttgtgggatgtccatgttacctttaggaattggaattctcttggtacggacatgtatttattttggattaagagtaagaggctacatatcaagtgctagattttttgtgaagctggccttggctgtgaggtggtttatgattttctcagcaagtaattgttacttgttttatcatatttttttctgtgtaattcccttccaagtttcaatactatggctctctattcctggctcc

SEQ ID NO: 101596 - DNA, 256 bp, Glycine max
  unsure (1)..(256): unsure at all n locations
  Clone ID: PAT_MRT3847_62755C.1
cgtagatagccgatgtgcttgtnttaangtgtcagtnattcctgttacctcaanncagctttgtagtgancagatataatggctgtngaaaggtccggaattgncananatgttacggaattgnttggtaaanccccattagtatntctnaatanacttgcggatggntgtgttgcccgggtngctgctanactggngtngatggagcnatgctctagtgtgaaggacaggnttgggtatagtatgattgctgatg

SEQ ID NO: 101597 - DNA, 473 bp, Glycine max
  Clone ID: PAT_MRT3847_62756C.1
tgatgatgtgtctggacacaaccaaaaaaagacagcttgtggcgttgttgccagggcattatgacctctctcttccgtacgattgttatactgttataccgccaacatcgacaagttcaacactccagagctagacttcaatgagattcgccaacacctctatgccactcatgcccaccactctatgcctttaacaaacaccactgtcgaagttcaagccgacgatgcatagttatgatgcaagtagcttagtttccagatctgtcgagattgtggtgtggagggtgcactgttgccaaaaatcatcttcgttcggggcgaacggtggcaggtgacagagtcacgggaaagaaaacaggtggtggtaaggtgtgaataaataagaggacatgtttaaaaatatggggttgaagaacttaaacaagggatgtctttttttaaaaaaaaatcaaacatccatcagagtcatattc

SEQ ID NO: 101598 - DNA, 388 bp, Glycine max
  Clone ID: PAT_MRT3847_62757C.1
gttggacaacaaaattgataggggtagtaatggcttggaatgggcatactgagcctggaggccttatcatgtactactttaatggataaacaccatattgcgaaaacgaaaacgacgtaaatggggcatactatgctccccactgttcaagtgttgatggctacatccgtccacgctcctaaaacttgccccttctcacaaacttaaacccttaccacttgctccccataggcatggaagccaagaccatacctgatagcaaaaagaaaagagcagatcccgctttaactcacactcgccagagggcgcagacgcattatccatgcctactatatgtgaccattactgagtatgaacttcataccataccaaagtcagaagttcttga

SEQ ID NO: 101599 - DNA, 335 bp, Glycine max
  Clone ID: PAT_MRT3847_62758C.1
aaaaaaataaaaaaaaaaaaaaaaaaaaaaaaaaaaaaaaaaaaaaaggaaaaaaaaaaaaaaaaaaaaggaaaaaaaaaaaaaaggggaacacagactaaagaaaaaaaagcttcaaaacacataaaataaaatgtaatgggcggctggtctgttttaagggaaccttctttttttgcgcggggttctggaatatccttgttgttatagggctgcctttcccggtctcattgcccgcggtgtacaaccggcgtaacggcgaggacgcccgcgttaacagcctttttcgactggccctttcccccttttcgcaggctgagtgaaaagtggaaagg

SEQ ID NO: 101600 - DNA, 588 bp, Glycine max
  unsure (1)..(588): unsure at all n locations
  Clone ID: PAT_MRT3847_62759C.1
aatcttaaccttctggttcatcagaggaaagggaccctaactaatctagagtttgaccaggaggtaagtaaactctggccaacaattgttccctccaaggatcgaattcgggtagtacccgaacgattcaaccttaacttcaacacattaatcacttatgcccaatcacatacatgaatatagtttacatacaatacttatatcttctatcatccaaaaaccaaatgatgactactagaaaaacagctctaatttcttctttcagaaactacaaggaaattaatgattgtttgggttatcaatttgaatatataaaacacgtaatcttcattctctcattcaactactgatcttttgcagcatttagagctggatgttcaaacttatatctaaattttgcagtgatattagtcatcaaatgaaagttaaagcttcctacaatcaaatgaaaggtaaatctgtctacaatagacctacaatggatccaatccctccctagaccctccctggtgggagctntatagcattagcaataatattttgtttttgcctatccaaaaataaaaaattaaaaccaagtatgttgac

SEQ ID NO: 101601 - DNA, 279 bp, Glycine max
  Clone ID: PAT_MRT3847_6275C.1
ggctcgagcaacactgaccctatgtttgccaacaacatgctcacaggtactgatgctgggtgacccaggtgggctttggatcgatccactaggctggggaagtggttctcctgtgaagatcatggcgctgagaacataggacatcatcaatggtaggttggccatgtcggctgtgatagcggcctggcttctgcacatttacactggttctggtcctatcgactgcctctgtggtcaccttgactaggctgtccatgctactatgtatggtggtttcac

SEQ ID NO: 101602 - DNA, 428 bp, Glycine max
  Clone ID: PAT_MRT3847_62760C.1
aaggccttaatagcgatttcaaattgatttgggataaaaacttgcgcctaatgactaatgtaagtacaagtaggaacatacccagaagattttagaaataaaattacacagaaaagggggtgattcactgcatgtttttttttcatgatggaccacacagtagcaatcaaaacccactctcacttcatttggctaccagaagcatcataagaacattggattcataaacaaaatggcactcccaataaccagctattttccacattttttaagattttccaccataacatgagggaggtaagttaacaaggattgagaatccagcatgcaatgcaagtcaggacactaaaactgcagggtttccagttactggccttaaactggctgcatgctctagttggttccatgcctcctttcgcttctcccct

SEQ ID NO: 101603 - DNA, 497 bp, Glycine max
  unsure (1)..(497): unsure at all n locations
  Clone ID: PAT_MRT3847_62761C.1
ggctcgagttttaacagatgatacagcaatgctttggggagttaagttctacaatgattttctcatgcaagctggccctcttggtaatgtacaatcagaactactattcagaaaggataaatcaactttcacttttgacaagggttgggccttccctcggagagtctatttcaatggcgacgtttgtgtgatgccgccacccgattcttatccatggttacctaatgctggttccaagcaagaggtttccctgcttgctttggtgatgtcctctttggtagccttggtattatatgcatatgcttaaagtttctaataatgccacactcatcaaaagtcttcagtgtgacaagttttgactcaattttgggacaccaatttggaatttgaaccaagccagggtaggatatccagtgacaattcaagagtagctcagttctcctatgattntgtttttctaattttcagcatacgaggaaattgaatctgctaatata

SEQ ID NO: 101604 - DNA, 235 bp, Glycine max
  Clone ID: PAT_MRT3847_62762C.1
gttaagggctgcactataccagactgtctcagggaattaggcagtgcatctatacctattgtggtcactggggtctcactactgtgccttttggaacgtgctaacgccgcaacttactccgttgaatgcccgggggatagacctcaacactaatgcatggcccaatggaaaaagatcacagctggtgatatctaatctacactatgactcaagaccacaatgtggttgctgtgga

SEQ ID NO: 101605 - DNA, 2525 bp, Glycine max
  Clone ID: PAT_MRT3847_62763C.1
ccaccctttcccacgtgcactgcgagagcgtgggagccagaaaactgctgcttctcgacccacttttgaagttcaaaacttaaaccctagttctctctctctttctttctcctgcatcttcaaccatgtcagcgatgctgcaacctcagatcattctgctcaaggaaggcacggacacttcgcaagggaagccacagctggtgagcaacatcaatgcctgcaccgccgtcgccgacgtcgtccgcaccaccctcggccctcgcggcatggacaagctcatccacgacgacaagggaaccgtcaccatctccaacgacggcgccaccatcatgaagctcctcgacatcgtccaccccgctgcaaaaatcctcgccgacatcgccaagtctcaggactccgaggttggcgatggaaccaccactgtggtgttgcttgcagctgagtttttaagggaggccaagccattcattgaagacggtgttcactctcaaaacttgatacggagctataggacggcctgctccttggctattgagaagattaaagatctagctgttagcatagaggggaaaagtctggaagaaaagaaaagcttgcttgcaaagtgtgcttctaccactctttcttcgaagcttattggtggagagaaagaattttttgcacccatggttgtggatgctgtaatttcaattggaaatgaagacaggttgaacatgattggaaatcttaaagtgtggtggtagcaatcaaaagggactaatttctagtaaatggtgttgccttcaaaaagactttttcatatgctgggtttgagcatcaatccaggaagtttctcaatcgaaaaatactattactaaatgttgagttggagcgttaatctgagaaacgaaaatgctgaaatcgggtgatcagatcctgcgcaatatcagtcaatagttgatgcagaatggaatattatttatgacaagttggataaatgtgtcagcagtggtgccaaagttgttctttcacgactggctattggtgatctagctacacagtattttgcagatcgagatattttctgtgctggtcgtgtagctgaagaagatctgaaaagggttgctgctgcgactggtggaaccgtacaaacatctgtgaataacattattgatgaggtccttggaacttgtgaaatttttgaggaaaggcaggttggaaatgagaggttcaatattttcaatggatgtccatctggccaaacagccaccatagttcttcgtggtggagctgatcagttcatagaggaagcagagcgaagtttgcatgatgcaatcatgattgttaggagggctttgaagaattcaacagtggttgctgggggaggtgcaatagatatggagataagccggtacctgaggcagcatgcacgtacaatagctggaaagtctcagcttttcattaactcctatgcaaaagctcttgaggttatacctagacaattatgtgacaatgccggatttgatgcaactgatgtgctgaataagctaaggcagaaacatgcgcttccttctggtgagggggcaccatatggggtggacatagcaactggtggaattgctgactcatttgctaactttgtctgggagcctgcagttgtgaagatcaatgctataaatgctgcaacagaggctgcctgccttatcttaagtgtggatgaaacaattaaaaatcccaagtctgagagtgcacaaggagatgctgctgcaagtgccatgggcagaggtcgtggaggtggattccgtggtcgtggacgaggaatgcgaagatgatgatgagaagtgtattctacgggttgagtgtctgttcattgtctgtctaattcgtgaggccaatgcatgcttgtgtcttctacttggtgttgctggaagcatgccgatttttggacctacaaatcatgaaatgaaaatgtaatggagattctgggaacatcatctgatcaacctaggatagcaattttcaagcattgtctttctgacgatcgtttcgacttgagcttcgtgtgaaattttgaatcttgttctacaattttcaactatttatttattacttggtatgcgtatagtataaaaaaaaaaaaaaaaaaaaaaaaaaaaaaaaaaaaaaaaaaaaaaaaaaaaaaaaaaaaaaaaaaaaaaaaaaaaaaaaaaaaaaaaaaaaaaaaaaaaaaaaaaaaaaaaaaaaaaaaaaaaaaaaaaaaaaaaaaaaaaaaaaaaaaaaaaaaaaaaaaaaaaaggggggggggcccttttaaagaaaccaagtttaccccccgggggggggaaagttttttttttttttttgggcccccaaaaaaaaattcccgggcccggttttaaaccggggggggggaaaaaacccggggggaccccaattaaaaagcttgggaaaaattcccctttttgccggggggggaaaaaaaaaaaaggcccccccccccccccttcccaaaaagggcccccactgggaggggaaaggggcccccc

SEQ ID NO: 101606 - DNA, 1257 bp, Glycine max
  Clone ID: PAT_MRT3847_62764C.1
gcgcgtggaggaggtagaataattattaaaatcgtttttctttatttctcttattacgccaacgccatgctcattactcgtaaccctgttttgttgaattccacttttgtccccactctcatttcagattcagagcatcgttgcgcatctccacgctctctttgcttctcttctcgcacggacatggatactgctgcaggtcaaagtctttacccattacaccgttgcaaaactcttcacctggtaagacatgcccaaggatttcacaatgtagaaggtgagaagaactttgaagcatacaagtcttatgatctttttgatgcaaacttgacccctctcggctggaaacaggttgataatctgagacaacatgttaaggccagtggtctttccaaaagaattgaactagttattgtttcccccttgttaaggactatgcaaacagcagttggagtctttggtgggcaaccatatactgatgggattaatgtacctcccctgatgaatgacaatgtgggagatagtggtcgccctgcaatttccagtctaaatgccccaccatttatagcagtagagctttgccgagaacatttgggggtgcatccttgtgataagagaagaaacatcactgactaccgacatatgtttccagctattgatttttcattgatagaaaatgatgaggacattttgtggaaacctgacattagagagaagaatgaagaagttgctgccaggggactgaaatttttggaatggttgtggacacgtaaagaaaaggagatagctgtcgttacccacagcggttttctgtttcattctctaagtgcttttggaaatgattgtcatccaaacgtgaagaatgaaatctgcacacactttgctaactgtgagctacgttcaatggttatcattgacagaggtatgattggttcagatgagtcctctaccaactatcctggcaaagttccagatggccttgaccttcctagtgacgttgctgaccagaagcatccagagaatgggcaggcaaactgatagtggaattttcttcatttttatgatttcctaattacatttatgataccaactacgattacttttaagcattaattaaatggacatcaatttcatgtgtgaaaagtagaagtaacgttaattcttattcaaggttattggcttgtgtagctattaaataaatttctctataaacatatacaggagagaaaaaaaaaaaaaaaaaattaaaaaaaaaaa

SEQ ID NO: 101607 - DNA, 672 bp, Glycine max
  Clone ID: PAT_MRT3847_62765C.1
ctagacaattatgtgacaatgccggatttgatgcaactgatgttctgaataaactaaggcagaaacatgcgctcccttctggtgaggggggaccatatggggtggacatagccactggtggaattgctgactcgtttgctaactttgtctgggagcctgcaattgtgaagatcaatgctataaatgctgcaacagaggctgcttgccttatcttaagtgtggatgaaacaattaaaaatcccaagtctgagagtgcacaaggagatgctgctgcaagtgccatgggcagaggtcgtggaggtgcattccgtggtcgaggacgaggaatgcgaagatgatgagaagtgcattctatgggttgagtgtctgttcattgtctgtctaattcgtgaggccaatgcatgcttgtttctgctacttgatgttgctagaagcatgccgatttttgaacttacaaatcatgaaatgaaaatgtaatggagactctgggaacatcatcttatcaacctaagatttgcagatagcaattttcaagcattgtctttctgacgatcattttatacatttggaggggttaaaactatcgcatggctgtggaggacttgagcttcgtgtgaaattttgcatcttgttctacaatttttaactatatatttattgcttagtttgcgt

SEQ ID NO: 101608 - DNA, 747 bp, Glycine max
  Clone ID: PAT_MRT3847_62766C.1
catcaatattggaatcagatgtcgaaaagtcctccaaaagaggtgtggatccaccacctggttcatatactgcctgggacatgcttgctgatgatggtgaagccatagatgcatcatctcctattcctttggatgatggcacgccagtagactttggtgcaattgaggttgttcagttgctcatagaacatcataatgcaattttcacagatgcaaatgagacagtctggaaatgaattgctttattccttgtcctgtatttattggttgacttggatatattggacttggaataatttttttaccaatccagtcatgaagatcattattagcagctatatttgaagttatccacaatcatcacgctgcagaaagatgttggatattattggtccagttttagtgataatccctatctgattttggatgtcttgtgcttatagggaagcgaccaatttacttcataaagggggtaaaaacagtgacagtattgtacagctattagccgattatgtattgcttacagaaatacttgtcactaatgtgctgtgttattgtggtctttcgcttggattgataatgcgatctttgtttatagtttacgtagagtcatgtattcatattcatataagggtcacttggtacacctactagtagaatttgtcatttatatctaaaaaaaaaaaaaaaagggcggcagacgacatagtgagcaagtaaacccgggaattaattaagaaccggtcc

SEQ ID NO: 101609 - DNA, 325 bp, Glycine max
  Clone ID: PAT_MRT3847_62767C.1
ggcaaaaaggaacccaaatctattttttttccaatttaccttcctgcccggaaaacctctaattaattactttcaaaaccggaggtttttttaatgaaaattattttcaaagttttttttttttgaagcaaacccaatttccttaaaaccacccttatttttttaccagccagccttttaaaaatccggggccgtgtttggcttccttggttcaaaactttcacccctttttttggttgacccacccttaatttgggaagaattgttgccagatttattcctggtttattatttcctggtttggcctttttaaaggatttccatt

SEQ ID NO: 101610 - DNA, 541 bp, Glycine max
  Clone ID: PAT_MRT3847_62768C.1
gaaccaagagacgataagtactaaacaatactggcgttcctatataaacaatgcatcttgccacttcaatacacaaaaggaccaacccaacaccattcgttcaatcacaaaccctatcaaacaaaacaaagcctactactgaaaaaaaattcaatgggtgacaaaaaagagacttagaaacgcaataaaatagctaatacacgagctaatgaccttggcgacagccttggaaccctgagaaacggtgggctcggtcaaaaaaccgggcattacaaacctgaccggggactgaattcccctccaagggatgaagggtcctttgatggagcgggcaattctagaagattcctgcacaagcttaacaaacatggccaagctgaagctagacatgattcccaaagccttgcttgagataccaatgccagggtgaaactgcttcagaaccttgaacatgcataacaagcttgaatacacacacttcgtgtgtctctactttttcttaccttctccgccggcgcctaccttcttcggaagcttcttt

SEQ ID NO: 101611 - DNA, 346 bp, Glycine max
  Clone ID: PAT_MRT3847_62769C.1
aaataatttaagatactatgatgagagcacggttccgggtactgttgctgggacttgttttcctggcttcagttattgtctcatttgacattgcttactgggaaaaagagaaccccatacactacaagtgtattcagagttgcaatagcgagagagactcgtacaggaaccaagcatgcctcgctcgttgcaacctacttaaggtggagaataatagatcaatgtgatgaaagtgaaactccatgaccacatatcacgaccacatacatctgtacagggaacctcagcaacccttctagaatgatgactacgattatgagctgccacgtacaatcccattctgacg

SEQ ID NO: 101612 - DNA, 303 bp, Glycine max
  Clone ID: PAT_MRT3847_6276C.1
gacccacaagtccaaccagctgccaaaagacgggggtaagcggtagcactacggtttgctctcctcaattgcctgcagcccgtagtctcagcttccatacacctactgttctgtgtcaggccaggggaatagttgctggtatctttgccgcagaaggatactttgtcctattattgctgcttagtgcgttagtggtgtagatccccacatgagttaggcttgtactgccgtttgtctccgagacaagcaattttgattgtctattatcttgctgcttaacttttgattttgacccccagtgct

SEQ ID NO: 101613 - DNA, 598 bp, Glycine max
  unsure (1)..(598): unsure at all n locations
  Clone ID: PAT_MRT3847_62770C.1
gagtaaataatttatgaccattttggtgttatcaaagaaacacactcatttcttaaactacaaccaactctacatttaaatgtagctcaagtaaaataagaaattatagaacaaattgagacagtcctcatacatgaaaacattgacaggattaacaatccatgcacatacttaacctttattccctaactcatgtctacctctagacaacatcaaggaatgttttcaacatttagtactcatatagcactaacatgacaagacacatatatatatatatacaaaagatagatcatcactcattagtcattacaattgactgcttaagactatcatccaattccaccttcacctcattgagtcacccattgacaccactactcatccctcaacattctgatgagcagattaatgcttgatcatccttggtctccacactttgaattggagaacaattatcctcttccgccaccttcatgcatggcttctcttcaagtggttcctgttgtgttcctcccagttccctgaccaaagactngatccacacaaacatggaacttcccagctaacccaagaaatagccttaccaacctataac

SEQ ID NO: 101614 - DNA, 320 bp, Glycine max
  Clone ID: PAT_MRT3847_62771C.1
tgcagcgcaagtaggtctacaagacgctacttcccctatcatagaagagcttatcaccttgcatgatcacgccctcataatcattgtccttatctgcttcctagtcctgtatgcccttttcctaacactcacaacaaaactaactaatactaacatctcagacgctcaggaaatagaaaccgtctgaactatcctgcccgccatcatcctagtcctcatcgccctcccatccctacgcatcctttacataacagacgaggccaacgatccctcccttaccatcaaatcaattggccaccaatggtactgaagctacgagt

SEQ ID NO: 101615 - DNA, 510 bp, Glycine max
  unsure (1)..(510): unsure at all n locations
  Clone ID: PAT_MRT3847_62772C.1
taaaagcaggaaaggatgacatacagagctccattcccgggttaacttgatcctaagaaacataacaaaaagaaagagacagtttcaccgagagtccctaacatgagcccacttttaccaatttctacaccaagatcaattcttcaaacccgagaaaccgcatgcttaaaccaacccatgctccaacaaccaaccaagctcagttcgaaaactcagagaaattattatttatgaaaaccaaggtttgttccgatcatannntgtataaaaggaagagagtgattctcgggtattcctgacagcatcagttcgaaaattccccttctgcatacttgacatcttcccctgctacaacacccttgagaaactttaacagtgaatgcggtggtacttcaagctctctcgggtattgctttaattggttaattggttaatgaaaccgtgagagtttcaagtgttttaatttccatccttgagattagtttaacaggacatctgattttaaaactc

SEQ ID NO: 101616 - DNA, 364 bp, Glycine max
  Clone ID: PAT_MRT3847_62773C.1
tagggataaaccgtaatcccacggtggacgatctttaacaccgagatcgagaccttttttgctgggacagagagaaaacttcgccaactaactactctgcagaatcgctctcttgcaaggagggtactgctcctggccaacattatactgagtgggctccaaataattgtcgagaccatcgacaaccaagctacacaactgaaggaaattatgtcagaaagcaagatgacagcatcgaatatgatgcatgtacaattccaaatgatagtggcacattgaatgttgccaaggttggaaatcacaaacaacacgctggtatccatgataggtggatgcaaaggaagactgggatatgctccattga

SEQ ID NO: 101617 - DNA, 464 bp, Glycine max
  Clone ID: PAT_MRT3847_62774C.1
cccaaaaaaaaaaagcaacaggggctaaacccaaggggaccggggaaaaagggcccttttgccattaaaaaacccccggggggaattaaagccgccggaaaagaatccccccccccccccaagggaaatggccctaaagggggtctggaagggcaaacccccccaaagagggccaccaacggcccgtcctttggggggcccgagccccccaacggggggcggaaaaagggacgggggccccccccttttttttaacccgggattttaactaaaaggggttaagcaaaaacccaccccccggaaccttccccccacgggttttaaacccaagcccaagaaccaatggggaaaaaaaagggtccctctggaccaaggggaaataactatggcaaccctgtcataaggggggaaaaacaaacctgtccaagaagggtaaaaccccacttacggtccctaaggggggg

SEQ ID NO: 101618 - DNA, 401 bp, Glycine max
  Clone ID: PAT_MRT3847_62775C.1
agacccaacactgaaatcttctcggccaaaagggaatttccaccagttcaatgcatgataagagaataaccagcccccacaaggattacaaaaaataacactatagatcacaaaaatcttcctttcatgttaaggaatataatgcgaggataaacagaactacagcctatatcatataaagcaattcacatcacaagctgctgcaaagcttgagttaccaccaactaaaatgaaccatttcatgatgtataaaatcaatctttccacatatctgcaaactcatcaggctccagaggattggacatctcgtgcattttcctccttgtctttgctttgaccttctttgcaaactttccggccttcttctttttctccaaagctcgaatctgattcggtgacac

SEQ ID NO: 101619 - DNA, 725 bp, Glycine max
  Clone ID: PAT_MRT3847_62776C.1
gtcaggttcgctgcgcatccttccgtttccaccaccgactctggggaagggaagcagggaaggggaggaaaacaacaacacccaacccaacacccatgagaacctagttgttcgacgttggaatcatgtcttacctgatcctcactatctcacccgcgtttttggtctttggaggaggggaggaggaagagaagaagagagcagacgatgagactgctcgcctgtatgccgaatttatagagtgatttcaaggagatactactcctgggtcaaagacttttgttcgaggaggaacaattaatcccaatgataaatttaaagacgattctgagggtgaaaagtccaaagatggggtatctggtccaaagaagggaagtaggtatgtaccatcttttattccacctccaatggcaaccaaagggaaagaatctgaaaggaaaaaagaggaggaaaagccaaaggagaaagagaaagggaagtcaagaaacattgatcattttatggaggagctaaagcatgagcaagagatgagggagaggcgaaatcaagaacgtgaacattggcgtgacgggcgtcatacagaacattctatttccagtcgctttgacgagctgcctgatgactttgacccaagtggaaaacttccaggatcatttgatgatggtgatcctcaaactacaaatctttatgttggaaatctctcaccccaggttgatgaaaatttt

SEQ ID NO: 101620 - DNA, 384 bp, Glycine max
  Clone ID: PAT_MRT3847_62777C.1
caggccacacgtcagtacaggtgtgagtagaggagagaaagggaaaagtgaagagggaacagaatggttcccagaggtttaatcattatggctgtgttctgcatctcatcactgtcaatgagtctctgtcgtgtcgcggataagggacgtgttatgaacttctaggcggtatcatgccctcaggttgcaggcatcattccgtatcaagtcccacttctccaggagtgcaattcgaagacagccttctcctgacgtacatacatcttcgatgacagtcgcgttcacagttatcaggcctcacagttactggactccacattcacgatcttgtctgacaaggatatagatacaagctttgagttgagaacgttcacgtacatttga

SEQ ID NO: 101621 - DNA, 157 bp, Glycine max
  Clone ID: PAT_MRT3847_62778C.1
cacgcatttcctcgtttttttcttcccttttctctatctccggcgacgatctcagattccggacactcctctacgccggcgaacccttactcttccctcctccgtcgaaccatctcagattagaatcgttcaccagcctcacgcctagcttacatcc

SEQ ID NO: 101622 - DNA, 366 bp, Glycine max
  Clone ID: PAT_MRT3847_62779C.1
gtaagtgcaggcgtactgctacagaacgatgaagaccatggccaactcgcagaagccggacgagacgcaaattgccaaacacgtcaaatcgtcactgaaacagttggcaaatgccgtggtcgagcagcagttgcgtaccagcggaaagtggcagttcgagcagttgtacaacaatgcgcagcgccggccgtggacggagctcatcgaccggagctccatgtcccgacccgacaccctcgccgaagcatactcttggatccgtaagaacttcgcctactttcgcgtcaattacctaaccctaatcgtgttggcgctcgcggtctcgctcatcacgcatccgttctcgctattcgtcctcttcggtct

SEQ ID NO: 101623 - DNA, 529 bp, Glycine max
  Clone ID: PAT_MRT3847_6277C.1
tgcttgggggggggggggggcactgaaaggcgtcgggtggatgaactaagggctgggcgcggtaacagaataaacaaatacggatttagtgggacagcagcccaagccccaaacctagaaggatgatttagcggtaaacgcatagatgacgaagaggacaatgatacaagccgacaggttaatttagctacggaacaaaatagggcccgcgccagtgtagtaagaacttgaaaggatataaataaggatagaaatgctaagcgaacggattagctattgggaaaaagagaaccgaaggactggtgctgctgctgttgtacgttgtactagtgttaacgacaaatgcacagcacggtgggtggtgcttactagacaataacgcagcaaactgggtgtgttatagcaaagttttgtatagcgctttgtgcaatgacatatgtactggcactggtgcgcaacagctgaaagcgcaagccacacaagttacaggctagaaacaccggttggtagcccccgaagggggtgcaaa

SEQ ID NO: 101624 - DNA, 145 bp, Glycine max
  Clone ID: PAT_MRT3847_62780C.1
agagacgccacgccttcggaaacttagagagaaacaggttttgaattttaaccaggccccggagggaatgaaaatgactgtgatggggaaaaaaccactcctaagaaaaaggcaccaacacctaaaaaacccccaggcctcatga

SEQ ID NO: 101625 - DNA, 283 bp, Glycine max
  Clone ID: PAT_MRT3847_62781C.1
gatggggctaatcacgggcctgtggaattctaaagcggggggtaataatgacattatatgctacatactttgtgataaatacgatccggataattattgacttgattttagcaacttttaattttatcaaggaacttaataattcagggctccaatgctttaaacctttcaattattttcataagcttcttttttattatggcgcctttgtttatggatactgattttgtctctttgtgataaacaattctaattttctttcccagtgtctgggctcaatttt

SEQ ID NO: 101626 - DNA, 573 bp, Glycine max
  Clone ID: PAT_MRT3847_62782C.1
tagtaaagtttcgtctaaagcggaaagagatatgtttcgagaaaaaggttatatatcaaacccgaaaaagactgacagaacagcgccctcgggtgaagggacagtttgtacgacaacataatcatccattcgctgaggctggtggtgattcatgaacattgttctctttaggtttcctgtagtattaaattacagttgactgtaacaccgattgtgtcaacaaggattagctgtagggtggtatctgtgtgttgttggaatctgtttatccattaggcaaaagaagagtaggccagtagggagatagctaaagggtagtgctaaacattcttaggtgttttcttctgggtttacatttggactgccacttacaactttagaattgtaattatttagtgggattggtttgggttttgcctgtgtatatgttttcttggttgaatactaatatgggtctgtaattacataggttttaggtttcagtctgtaatatgggtctgtaattacatgggttttgcaactgattgatctttctttgcattcggcatttaagcattgttttaaactcacacc

SEQ ID NO: 101627 - DNA, 319 bp, Glycine max
  Clone ID: PAT_MRT3847_62783C.1
cccacgcgtccggatctctatatatgatattgttgttggggatgttataccccttaatattggtaaccaggtccctgctgatggaattctgatcactggccactctcttgcaattgatgaatcaagtatgactggggagagcaaaattgtaagtatttatttctatctcctgggaaattggattttttttcccctttcctgctacctattatgttttttgcaggtccataaggattctaaggatccttttttgatgtctggatgaaagttgcagatggcagaggcactatgctggtcactggtgttagttataaatact

SEQ ID NO: 101628 - DNA, 173 bp, Glycine max
  unsure (1)..(173): unsure at all n locations
  Clone ID: PAT_MRT3847_62784C.1
tanttattgncgctgacgtaanctcgnaattcggctcgagngcatntgncgangnnnnaacaggtgaggagtatgatnacctgccntactggctnttccctttcattcgaggcnntnctggcanctctatgggcgacaatttcggnnacacagtnctatncggngacannnnt

SEQ ID NO: 101629 - DNA, 210 bp, Glycine max
  Clone ID: PAT_MRT3847_62785C.1
ggaaagggaaacaaatggcttggcctttattgatcattatttcaacgggtaacctaaagggatcccaaataatattcgcacttttttctcactgcattaaaaaattcctttttcaagcagaacatgtgtttgataaaatgggaatacaactttaaacatgacatgttgcttgcatctatagaaaaaaaaacaatgctgaacgaacccccc

SEQ ID NO: 101630 - DNA, 285 bp, Glycine max
  Clone ID: PAT_MRT3847_62786C.1
caaaaattagccaggcatggtggcgcatgcctatagtcccagctactcgggaggctaaggcaggagaatcacttgaacccgggaggtggaggttgcggtggacggagattgcgccactgtactccagcctggttgtcttcaggcagagtgagaagctgcagcaatgtctgattttgtggaaagcgaggctgaggagtcagaggaagaatacaatgatgaaggcgaggtggtaccccgagtcaccaagaaatttgtggacgaggaggatgatgatgaggaggagga

SEQ ID NO: 101631 - DNA, 507 bp, Glycine max
  Clone ID: PAT_MRT3847_62787C.1
aaaaaaaaaaactggggcatatttaatgggctttgattaaacataatttcccatgaaactttgaggggctttggatttttctttaaagaaacattaatccgtcccccggtgttcacaatttgatttttagggaaacccaatatttttacgtacgaacgaaacatgggtgctcagtcttcaaaagttttgccctcaagggtctccgggttggccttgcaaaaattttcgaggggggggggaaccttttccttttgcttgcccctgggggggtttggcgccccgcttaatttctccaacttgttccacggcgacacgcattttgggtttgggggatcgccggggcacccctccggggcgttctttatgctctccccccccttctccaaaatgcgctcaggcccaacgcgaacgggttggatccttattaccccgcccaatttggttctacccggccgcactgtttgggtggggggaaggaaaaactttccaacttgccctttttgccgt

SEQ ID NO: 101632 - DNA, 401 bp, Glycine max
  Clone ID: PAT_MRT3847_62788C.1
aaatatagataaaacacaattaagcgcagacatgaatgacccatgagccacactaatgaatatgcaaacatattaataatttccctaacatagaatcaacattatccacgagcgcaacagctcgcagtacatgtacacgattgatcatggacaacaactcttcgatggacatttggggtcaatactgccttcgacagttcaacaattcccattgcggggtgaaagacgacacaccctagaggccaaagcatgacagacaatcaagctactgacttagatctctgacgcctgagaccggaattagcacaatcaccttcaaatgtactacagtgcgcatgggagcattggttgttattaaagcgagtgtaagaatctctgcaagagaagtactccacacgata

SEQ ID NO: 101633 - DNA, 3321 bp, Glycine max
  Clone ID: PAT_MRT3847_62789C.1
ggctcgagatccacccaatctcgtactccaactacaaagccctcctctcttttctgttctgttgacgaaccattcttctttttcttcttctctgtttgcaacaaacttgagtggtgcactcgcatcagtgcagaggcacctgcagagttgagattgtgctcctttccagatctcgtagattccgcaccatggctcagccactcgtgaagaaggacgatgaccgcgacgacgaagctgagtattctccctttttgggaattgaaaagggagctgttcttcaggaggccagggtttttaatgacccacagctagatgctaggagatgttcacaggttatcacaaaacttttatacctattgaatcagggagagacatttacaaagaccgaagccacagaagttttcttttctgtgactaagcttttccagtctcgagatcttgggttaaggagaatggtctacctgatcataaaggagctctccccttctgcagatgaggttatcatcgttacaagctctctcatgaaggacatgaatagtaagactgatatgtacagggctaatgctattcgtgtcctttgtcgtatcacagatggaacctctccttactcaaattgagcgatatctgaaacaagctattgtagacaagaatccagttgttgcaagtgcagccctagttagcggcattcatatactccagacaaatcctgagattgtaaaaagatggagcaatgaggttcaggaagctgttcaatcaagggcagctcttgtgcaatttcatgccctggctttgctgcatcagatacggcagaatgatcgactagctgttagcaagctggttaccgagcttaaccaggggaaatgttcgctctcctttggctcaatgccttttggtccgttatacaagtcaggtaattcgggagtcaggaaataatacacaatcaggggaccgccccttctatgattatcttgagagttgccttcgtcacaagtcagagatggtgatttttgaagctgccagggcaattacagagctcaatggagtaactagccgagaattaacaccggcaattactgttcttcagcttttcttaagttcatctaagccattcttgagatttgccgctgtccgcaccttgaacaaggtggcaatgacacatccgatggcagtcactaactgcaatattgatattggaaagtttaatctctgaccagaacagaagcattgccacacttgccataactacgtctattgaagacaggaaatgaatcaagtgtggaccgtcttatgaagcagattacaaatttcatgtctgatattgctgatgagttcaaaattgttgttgttgaagcaataagatcactatgcttgaaattccctttaaaatatagatctctgatgaatttcctaagtaacattcttagggaagaaggtggctttgattacaagaaagcaattgtagattcaattgtgattcttattagagatatccctgatgctaaggaaagtgggttgcttcatctttgtgagtttattggaagattgtgaattcacttatttgtccacacagatactgcacttcctgggagttgaaggaccaaaaacttctgaccccagcaaatatattcgttatatttataacagagtacatcttgagaatgcgactgttagggctggtgctgtgagcacattggcaaagtttggtgctgctgttgatgaattaaagccccgcatattcatactgctaaggcggtgtctttttgatagtgatgatgaggttcgtgacagagcaacgctttatctgaacacacttggaggtgatggttcagttgttgagacagataaagatgtcaaagatttcctctttgggtcatttgatatcccacttgtcaatctggagactagtttgaaaaactacgagccttcagaagaggcttttgacattgattcagtccccagggaggtcaagtctcaacctcttgcagagaagaaagcccctggtaaaaagcctactggtttgggtgctcctcctagtggtcccccatctaccgcagatgcatatgaaaggctgcttctatccattcctgagtttgcaaactttgggaagctttttaagtcttcagaacctgtggagcttactgaagcagagacagaatatgcagttaatgttgttaaacacatttttgatcggcatgttgtgtttcaatacaactgcacaaacacgataccagagcaattattggaagatgttattgtgattgtggatgcatcggaagcagaagagttctctgaagtgttctcaaagcctctcagatctcttccttatgattcgcctgggcaaacatttgtgggttttgagaagcctgagggattgtcaattgctggaaaattttctaacgttctgaaatttattgttaaagaggttgacccaaccactggtgagacagaagatgatggcgttgaagatgaataccaactagaggatttagaggttgtcaccgcagactacatgttgaaagtgggagtgtctaatttcaggagtgcatgggaaagcattggccctgactgtgagcgagtggatgaatatggtcttggccccagggagagtttggctgaagctgtaaataccgtcattaatcttcttgggatgcagccttgtgagggaactgaggtagtcccgcccaattcaaggtcacacacatgcttgttgtcaggtgtattcataggaaatgtgaaggttcttgtgcggttgtcttttggacttgatggtccaaaggatgttgcgatgaaactttctgtcagatccgaggatgaaactgtcagcgatacaatccatgagattgtggctagtggctagtgcactcgatcaagaaatgttggctcaactcggcctttctttttgttactgagattggagtttagcagcctcatagatagccgtgtgtaaaaagtattgcaaaactgtacacttcttaatatatgcaatttattggtcgcccattgcatgctttgttagactagcaacaatacttaccagtattacgttgggtttgttggagtaaacttcaatggtgatgattatacttcttttatttgtagcaactgtaatacgaattttggggatttgcataaatatttgttttttcaatgatttggatatttgttaaaaataacaattgtttagtgcaaaagatgtcactattttgtgctttaaaaaaaaaaaaaaaataagaataataaataaaaaataaaaaaaaataaaaaaaaaaaaaaaataatataaattataatataatataaaaaaaaaaataggggcggccc

SEQ ID NO: 101634 - DNA, 3878 bp, Glycine max
  Clone ID: PAT_MRT3847_6278C.1
cgaccctactggagttgatcacattgaatgaaacggccgtgaaatattatggacgcgatcttggggggtggtattacattgctgaaagccccaacacagtttattgatttgtgcacgcttgtgattactacagcttgatatagagaaatgactactctatgtgccacaaacgcggctcgccattctcatttctctctccagaagataaaaaacccttttatatttttatatttttatcactagaaaaatcaaacaaataaaattttcattttcattttcttttcttttctcgctctgtttttttcggggatatttattgcgaaataataggtgccagtaaaaacaaacaagaaaaattccgaacccgtgaactcttttacctgctacaaatgcatttctctctcttttctcacactttttctctcttaaactcgcaaacacgaacactctatctctctctctgaagtgaaataatgaagcttcatcttcagatctcgagctgaatcaacgatcccgatagatagaaatagagttggattattgaattattgaaaggaaccgatgaggtgaagttctacaatatcgacgagagggataatgagaatgacgaaatcgaacagaaagggaaaggcaaagacgacggcggtggcggccggcgccggtcgccgtatatcggctcggacggtgtttccggtggtggtggtgctcgggatcgtgctgccgtttatgttcgtgaggatcgcgatcttgatgctggaatctgctgcggcgtgttcctcattggaatgtgctgggtggaggtttctaagtggagtcatcaccttcctggaactcagagaagagctgaccagaatgtacatagtggcaattgatggtaatgttaatgagggagcagagtcggtgatggaacttgtgaaagagttgaccgccaagcaagaccatgacgttattgctgttttgaccagagccatggtatctcggttagaaccgtaggtacctctagcaagaataatagagtctgtagaattgcatgtagatgcatctaggttttctcaacgtccacatttatttagattgaaaatgtctaaagttagctgaataaattgtttagaaggatctggcctaatcctctcttactttctctcgaatctgtttgacgccatgttgaccctaccatttcccactaatttctcttaactgacaatctccttggtgctacccttgttgaaacatctttaattgaaagtacaaacaacagagtaaaacatgtttttcatatagaaaactacaaataaacttatgctccaatgcatgcttggttcgctaaaaatactattaaaagttagggggttacaccaatatgactggtctatagaagttaagaagaagtgaatgctggtgttaaagagatgctggaaactaatcacttaatttggaagcaatactataataaggaaaaggaccttgactatactcaagagcatagtagatatttggaggctttaaggcccagcagcctatccttgatgaatcaactccgcatttatttgcccgagctctttccagatctcaaaaagatagtattcttggatgatgatgtagtagtacaacatgacatatcttctttgtgggaactagatcttaatggcaaagtcattggctctgtattgaagtcgtggtgtggagacggctgctgccctggaagtaaatacacaaactatttgaacttttcacatcctcccatatcatcaaagtttaacggtgatcagtgtgtatggctctatggcatgaatatatttgatcttgaaacttggaggagaacaaacattacggagacctaccatcaatggttgaaacttaacctcaagtccgggatgacaatgtggaatccaggagtgcttccacctgccttgatgacatttgagggtcaagtgcatcctataagttcatcaatgcttgtgactgatttaggttatcgccatcaatcagcagaaattagcaaagagaaattagaagctgcagctgttattcatttcagtggccctgcaaagccatggcttgaaattggtttcccagaggttcgaagtttatggagtagatacgtaaatatctctaataaatttattgggagatgtagaattacagggtgaaggaacaaagttttttcacctcccatatttattgagattgaacagtgatactgtatgggatttcagagggaagaaggttctgccttcagtctctgactcatacgctctgcacagtttgatatgagttacgctatgccatgtccatataatatagtaaatagatgaagctaccacacaataccctactagaagcatatttgtggttaagaaagatataagcatcattgatctagctgcctgacaatactgtaaatttctttttcaaattactttttgaagtggagaaattgtattgcatgatttgaaatttcagttagtggattctcaagtcttggtacataaaactctcaggtaaagacgtgaaataggttatcatgcagctttgagagttcatgcgtgtttggaaacacgttccctacccaacaaatcatgtcaaatgggttaaagacgtgaaagctagaactaggaacttctattcagatgtgagaatccatgttcgtgatgtatgaccaaacacgctattcatccctttggttttttaaatgcttattctaggagccagtcaaattagtttgtgcattgctttacatcacttccacttgtgtgtacgtggagcttgttacaaagaagactaaatgacacacgagtttaacatctgtccaaactcaagatgtaaatgacgtaaaacaaatgcggtgttcaactcaactcatgtggaaaaagatctcatgctgcttttccttattttggtctaggggctggctcacaaaaggcaatttctgtgttgacccttgtgcagtttatcactatgaatgaaatggccgtggaatattatgcaatacgctgccgaaattgttgagtatttagtacgttgctaaaaggccccaacacaacttttgatttgtgcacttataattactaaaacttttatatataacatgatccggtaactatatataccaaatttggtcactgttgcaagaagtcaagaactggagaaagcaacatttatatctatctgcttgggaccatattatgcaaaatttttgaacttgctcaaatcaaccacgtggagttatttgctcaaggctttcaagtttcaacatagaatgaaacaagatttgaatttgcaagtacggaatttgtcttttgtggaacgagaattttgacttctagagaatacgacagaagggggttaaaagaaattaatgaagaaagaaaagaatccccactctagctccacttacacagactgtataggttgccacatgtgatcttctgtttctcttgcttgttccaggaacgttgggttaactttccatgcatgccagttgttttctccaaatttgttgcttctcttacatttcatgatgaggtgaaaacttatgataattgttgggtccaattgtccatgtttactattaggacaaaatttagatacattatttatttatttatttttggtgaatttctccttaaaaagtgatgattcaagagctaggcttatcaggctatatggaccaagctgtaatccctccactgtcaagagccaggggtggtcgctgctatgcgaagctagcctccactgtcaagatacattatttttgcttgttaagaagttattcgtaactttatcgagagacaatcctattttaactttacaggattactataagaacaaaatattttttcttagtatttaatacaattatatatttagagcaaaaa

SEQ ID NO: 101635 - DNA, 293 bp, Glycine max
  unsure (1)..(293): unsure at all n locations
  Clone ID: PAT_MRT3847_62790C.1
gtacgttacttgacaaccaancngccaccnncgcaaacggtaaaggcagagacccgggagcacgccnggaccacanggggcaaanagaacngngccccggccaangaaagangnnggaacgcaaagacagcccccncaagcaaaggcagcncacaancncccaacncaggcagccaagggagacggaacgaacccnggggacaccccaaagcancgaggggcaccacaggcccaacagccacaacaggcgagaaggaaggagcacaaggagacgccgaccccccccacacaac

SEQ ID NO: 101636 - DNA, 1305 bp, Glycine max
  Clone ID: PAT_MRT3847_62791C.1
tacaatgaattaacagaatattaagttagttagcgaacttaaactaatatcatgtattaaaggtaaaagtttgagatgtcggataaaatgaaaaaataaataaataacaaactaaaaaaaatattataaatatgaaaattatatttaagtcataaaaaaatatttttttttaaagaataaatcatgttttttaaattagccggcgtttatttttctactggataaactcccaatcaaaatggacactttggacttttcacttccctcaccagtgtttgagtcctgggagggcctggctccctgtctctcccttcccccacgtgtctgcccctatgttcctgcaacagatgatcaactccaatttccgcgaacgataaatcaaaatggcacctttctttgttctgtttctattagcctcttcattgactcaagggtatgctcaatttcaaccaaaaaacgaagcttttatatccttgttgattacccaaaatggccttgactttgtgaaggagttgctggtgaacaaggcaatttcctcactggtctcacttcgattgccgaatattgaaaagactgcgaaaatcccagttgtgggtaatgtctacatggtgctctccaacatcacaatttatcatattgatgttccttcctcgcatgtcaagccaggggagacaggaatttccattatagcttctggggttacttgtaatttgagtatgaattggtattactcttatagtacatggcttgtgcctgttaagatctctgacagaggtagagcagaagttcaggttgaaggcatggaagtaggacttacattgggtttggagaaccaggaagggtctttgaagctgaaactcaaggactgcgggtctaatgttaaagatatttcaataaaattggatggaggtgcatcttggctttatcaagggtttggtgatgcccgtgttggtttctctggttcgaccgtggagaatgcggtcgccgagaagcccacctttgggattcctgccctggacccgtattttgttgagacccccatgggggccccacttcatctccgcgcttcttcctttgtccctttcggcaatgtggtcatgcagtacccaaatcatgacatgaactggaatttatctttatcttctcctccagttgtggagatttcaaaatcagaaagcaggtgccaacatatttgcatacatgacaattgatgttttggaagaagatgaagtaataccaatggcatgcatatcattggtaattcaaggtactggcctggtcaaaatcaaaggaaacaacttcgta

SEQ ID NO: 101637 - DNA, 412 bp, Glycine max
  unsure (1)..(412): unsure at all n locations
  Clone ID: PAT_MRT3847_62792C.1
ctgttctcttgataaaccctattctttctgggtncagcgctcaagncttactagactaagtcgacacannctgagacgacnnaccgtttcttgaattanaagatganagacaancttctggaggaaggaggaggagtnnaggagcagcanaaaggtgatanacagaactgccaaccgtggggaattgagatttacccaaagacaacgaatggaatatcccctactcatgtcttcgaaaacccaccgtggagccttcagcaagctggttagttttgcagcggaggcccaggtgctttccctgcaaaacagaaacttggtgaggaattactcttcataagtaacaagttaatcttttagtcctcccaaagcagtgcgtgtaggaattccaatttgttttccacagtttgggaat

SEQ ID NO: 101638 - DNA, 484 bp, Glycine max
  unsure (1)..(484): unsure at all n locations
  Clone ID: PAT_MRT3847_62793C.1
cgttcgcgtgggaactgctactcgctcatcccgtggaggtttcgctctctcagtttcttttccccaaattggtttttcatctaacaatttactttgcagaaccgtaaccctaaccccttcccctaccttgtaaccttcctttcgatccttcacctcgcaggtctgattttagttgattcggtgattcccagataatgggagaaacaaaggacgaagcatacgaggaagagcttctcgattacgaggaggaagacgaaaaggcccccgactccgccggagctaaagtcaacggcgaagctaccaagaagggctatgttggaattcacagttcgggattcagggacttccttctgaagcccgagcttcttcgggctattggggacctcggattngagcatccatctgaagtgcaacatgagtgcataccacaagcanttctcgggatggatgtaatttgcaagcacaatctggaatgggaaagact

SEQ ID NO: 101639 - DNA, 490 bp, Glycine max
  Clone ID: PAT_MRT3847_62794C.1
atgcaacactgtaaaaattgcaggagtgccagatgaggctattagactcagccagttttcattttccttggcaggagaagccaagaggtggctctacttatgtaagggtaacagtctgaaaacctgggaagaagttgtagaaaagtttctgaagaaatatttcccatagtcaaagaatgcggaagggaaggctgcaatctcttcatttcatcagttccctaacgagtccttgagtgaagcgttggagaggtttagagttttattgagaaagaatcccatccatgggttctctgagccaattcaattgaatatgtttatagatgggctgagactataaaccaagcaactgctagatgcttcaacaaggggaaaaataaagctgaagactcctgaagaggcaactgagctaattgagaatatgtcagccagcgatcatgccattctgcgtgacagagttcatcaacccacaaagaaaagcttgttagaacta

SEQ ID NO: 101640 - DNA, 134 bp, Glycine max
  Clone ID: PAT_MRT3847_62795C.1
gcgccaaagcgtccaatcattctaatctgatcgcggagtcttgcgcttccttattacaccttcctcggtttctatatgagccaatgtcttttctctcgagaaagataccgcttcctatctaacgccttcaattt

SEQ ID NO: 101641 - DNA, 882 bp, Glycine max
  Clone ID: PAT_MRT3847_62796C.1
tttacttacactcggttccttgggccctgttttatttgcttcatcaccagtgcaacatgagtgcatacctcaagcaattctcgggatggatgtaatttgtcaagcaaaatctgggatgggaaagactgctgtttttgttctgtcgactctgcagcagattgatcctgttcctggccaagtttctgcacttgttctttgtcatacaagagaattagcataccagatatgccatgagttcgagaggtttagcacctacttgccagatctcaagggtccggttttcttagggtgtgagtgtcaagtgtcagtggcacttgcttggcgtgactaaaaaatgtttctgcaaggggacaaaacagatggaccagaactgtcgttcaagggatctacatccttcattcatttcgttgtggattccattagcttgaggaaggaccctaatcccctaatatgatttactgtgaaatttgttcctttcagcctatggaaatttatgttgatgatgaggccaagttgacccttcacgggcttgtgcagcactacatcaaattgaaagaggaagaaaaaaaccggaagttgaatgatcttcttgatgcactggactttaatcaagttgtgatctttgtgaaaagtgttagcagagcagctgagctggacaaactactcgtggagtgcaactttccatctatatgcattcattctggcatgtcccaggaagaaaggttaaagcgctataaaggtttcaaggaggggcatacaaggattcttgttgcaacagatttggttggaagagggattgatattgaacgtgtcaacattgttataaactatgacatgcctgattctgctgacacatacttacacagggttggtcgagctgga

SEQ ID NO: 101642 - DNA, 2334 bp, Glycine max
  unsure (1)..(2334): unsure at all n locations
  Clone ID: PAT_MRT3847_62797C.1
ctttctggactttcacattcagtatgttggtgttttgcaataaatcattagtgggtgttttatgtagttacatgtacttgtttttttacgttgatttttttttaaaaattcaaataggaattatacattgtcgatttttcgtaagatttttactcaatttttccgaaatgcttggattgtgtttccttaaagttcctttagaatctttctgaagcataaaatttagatcaacacttgattcgttgttcttctttcccagtattcatttctgaattgcatgtgatgtatgttcaggtatttatgaaaacaataatttctttttaatactattgaaataccgacatttctcgtccattaaaattttactattttgccgtcgtataaatctatatcaatttgtgtaaagatctcatcttcggttttttttgtcgttcgtgagattcttttccttctcagtgggtttttaatctcttcttttaataaaataattcagtttactgatacgcgaaacatccggactggggcttgaactaactgctactcgctcatcccgtggaggtttcgctctctcagtttcttttccccaaattgtttttcatctaacaatttactttgcagaaccctaaccctagccccttcgcctaccttgtaaccttcctttcgatccttcatctcgcagataatgggtgaaacaaaggacgaagcatacgaggaagagcttctcgattacgaggaggaagacgaaaaggcccccgactccgccggagctaaagtcaacggcgaagctaccaagaagggctatgttggaattcacagttcgggatttagggacttccttctgaagccagagcttcttcgggctattgtggactcgggatttgagcatccatctgaagtgcaacatgagtgcataccacaagcaattctcgggatggatgtaatttgtcaagcaaaatctggaatgggaaagactgctgtttttgttctgtctactctgcagcagattgatcctgttcctggccaagtttctgcacttgttctttgtcatacaagagaattagcataccagatatgccatgagttcgagaggtttagcacctacttaccagatctcaaggttgctgtcttttatggtggggtcaacatcaaagttcacaaggatctgctgaaaaatgagtgccctcatattgttgttggaacaccgggaagaatactagcattgaccagggataaggacctttctttaaagaatgttagacatttcatattggatgaatgcgacaagatgctggaatcattggatatgaggaaagatgttcaagacattttcaagatgactccccatgataagccaagttatgatgttctcagcaacactcagcaaggaaattcgcccagtctgcaagaaatttatgcaagatcctatggaaatttatgtggatgatgaggccaagttgacccttcacgggccttgtgcagcactacatcaaattgaaagaggaggaaaaaaatcggaagttgaatgatcttcttgatgcactggactttaatcaagttgtgatcttcgtgaaaagtgttagcagagcagctgagctggacaaactacttgtggagtgcaactttccatctatatgcattcattctggcatgtcccaggaagaaaggttaaagcgctataaaggtttcaaggaggggcatacaaggattcttgttgcaacagatttggttggaagagggattgatattgaacgtgtcaacattgttataaactatgacatgcctgattccgcagacacatacttgcacagggttggtcgagctggaagatttggcaccaaaggccttgcaatcacatttgtttcttgttctactgatgtcgatgttctcaacaatgttcagtctaggtttgaggtggatataaagcagcttcctgagcagattgatacctctacctatatgccatcgtagatttttttgggagcaatgttagatgcttggtggcatgagtaatagtgacgcatggtaatttgaacggtgcagctggatgattaaccgtgctgatagacaccagagtctgtttacagactgccattttaccattggatatttatcggtattattagtagcagcagtgtaatggcttatgcatttatgggttttcacttactgtattttgtgtggcagctacgctgttttcatgaacgtcatgttttgagttggtcttactgcgactttgatatttgtgctttatacttttgttgaattcgatacgtggtcttcgatttaaatttcatagtttttacttctcaaaaaaaaaacaactttttnnnnaaa

SEQ ID NO: 101643 - DNA, 294 bp, Glycine max
  Clone ID: PAT_MRT3847_62798C.1
cctgttgaacacaaaaacagaactcatattgcccatgggatgaaaagccacacatgatccctatttgtgtagaaacatagaacgccatacaccacacaaaacacaaaattaaccctgtgccaaccacatataacctgacgttctctctttttttcccctccggggaaaaaacgagaacaaactgcggagccttttgtgccaactcccccaaatgttgtgcagcatactgactagaccagctagagagcgttgatagtaacctgcgcaacagtgaccattatagccctaatcgcc

SEQ ID NO: 101644 - DNA, 1555 bp, Glycine max
  Clone ID: PAT_MRT3847_62799C.1
gtcggttgggttgagagacatacatggtctctaacctaagtaaaaaaaataaaaactaattcactcttattattaacgttagtttcagttctaggcggagagccttgtaggagggtcaatgtataatgtaaggtactaaggtcaccctcaactttttcccccctacccacacattgcattaactctcttgtgctattccaacacttgtttaaaaccaaaccttctctcccaattctctctcagaacacagaatctctttctcttccgaaccaaaaaaggagagagattctaatttctaaaatctaaaccatcatgaagaacacaaacaccaacacgaaactgatcctcctccatccttatatccaaaaacaaggaagctccaatcgcttgtggcttctagcattggtatcaatcctcaccctcgcttttcttgttaccctcatttccacaagagaatccaccttcatcaccactgcaacttcttctgtgactccctcttcaaataatgctccagtttctggttttggaagtgctcctttgccagccacagtgatcaacactctcctccactatgcatcaaaatccaatgacaccttccacatgccacactcagacctcaaacccatctccgatgtgcttcgaaaatgctcctccccatgcaactttctcatcttcggcctcacacccgaaacccttctctggaaagccctcaaccacaacggaagaacggttttcatcgacgaaaaccgctactacgccgcgtattacgaagaactgcacccagaaattgatgcctatgatgttcaatacaccaccaaaaggagcgagatgaaggagctcatagcctccgcgaaagaacaagtagccaatgagtgcaagccggtgcagaatcttcttttctccgagtgcaagctgggcctcaatgacctccccaaccatgtgtacgaggttgactgggacgtcatattggttgacgggccacgcggggactggcccgatgctcctggcagaatgtcagcgatattcaccgttggtgttctcgccaggagcaaaaagggtgggaaccctaagactcatgtcttcttgcatgacttctctggggaagtggagaaggtttgtgggagtgagtttctgtgcaatgagaatttattggaggcaaatgggaatttggggcactatgtgttggaaaggatggatgagaatagtgtgcagtattgtaagaatcactcgtcttctgggtcaggggctgcttcatcagcataattagttattgctcctctcttcattcagatgcctacaagcttctcagaatcgcgttagtcgcaattgtttcgttgtccctctgggtatttatcttcctttttttttccattgctacattttgtttgcctctggctggagcctgtaaaaaataattcttttttgcttttgctttttcattttgttgctctgaaaattgtaatttcttctgtgaattcgaatttccaaatttcaattgaggatatacattggcaaaaaaaaaaaaattgatcccaattcagggaaagacatactg

SEQ ID NO: 101645 - DNA, 200 bp, Glycine max
  Clone ID: PAT_MRT3847_6279C.1
atatcaatgatgatcatgtgtggctatttttaactagaggattaactgctatcttaatttactttaaaatggactcaaataatcaaattttaattgtcattcatcctactgatcatttgtttaatcatcaccaatgtctatcacttataacaaatcttatttcatttgattttaaacatttcctattttatcattaccat

SEQ ID NO: 101646 - DNA, 496 bp, Glycine max
  unsure (1)..(496): unsure at all n locations
  Clone ID: PAT_MRT3847_627C.1
gatgcttggggagacccaccgcccgaatgcaaccgtacacatgccagcatgggcgccagaaatcttctcaccatacaccaacgatgccgattactctccgtactccgtgcgaaaaacgcttagtgcacttgaggactgcgaatccaccgatgctaagtcagactcagaggttccgtgctcgaaagccgaaggcccggtagacacttactcctacgaccattgccgcatgttcgaatgcaaagtgtcaagatgcacacnttacagatcgcataagtaagaccgctgtccgtacgcccgcccgcacgataaagcgcgcggccaggatccccgagattaccattactccggcagangtgagcccggttggccggaagagagtggcaagagaagtaacgcatgcgagtagtcggcacagagtgtcgaatgactggtggacccgagacacggccggactgaggcttgcgagaagtagaccgagggaggccagcacgtgtgt

SEQ ID NO: 101647 - DNA, 239 bp, Glycine max
  unsure (1)..(239): unsure at all n locations
  Clone ID: PAT_MRT3847_62800C.1
ctcgagccgaaaaattccactgcaccaccaccctccccatttgtacttttcttctcattctcattccactcccctgcattctccacacaatctagctttacnggcttctggggaaccgcataaggttaaactgttaaggcatggattacgtggatccaaaaaggaaaggccaattttgttgaaaaattttttcctgctgcagaatcagcggcattatgcatcatctggagcaagatccc

SEQ ID NO: 101648 - DNA, 566 bp, Glycine max
  Clone ID: PAT_MRT3847_62801C.1
gggcacctaaaagggaaatttcaaactttaaacccaaaaaggaaaaaccacaaaccccttcatgggaaaaagggggttaaaccacattgacccctcaaagggcccaaaacccaaaaaaaccccaaaccctaaaaaaaaccttttaagaaaaacccatttaaccgaaaagcaaagccaaaaccttttttaaaaccaccccctaagggccaacccaaaaaaaaattccaactaaataaaaaaaaaaaaaaaccaggggttcaaaaaaccaaatttcatattttaaaggaacattgggaaccccaaccccccccccaaaaggaaaaaaaacttcacaaaactaaccctaaaacccctttaccccccaaattttcacttcccacccccttttttaaccggaacctttttcgggggaaaactaacccctttggggttaacacccttaacgggggctttttaaaaaggggctattttttttggtggcgggttccaaaaaggagctggttttttccctggggaaacccggggcaacccccttaaaaccctggggggcttccctttgggctttg

SEQ ID NO: 101649 - DNA, 290 bp, Glycine max
  Clone ID: PAT_MRT3847_62802C.1
ttttcttttcaaaatataggactacaagagtcttggattaaacttctctggagaatgtagtatgatattaaaaaaatatcaaatttaaaataaatcaatttaatcctctttttttttttttttactttttcttctctctttcctattacaaatattcctcttaaaagcattatgctataaatgattgagtcagaaaaattgaacttcaacctttatcagaataaataatgctaattttccttaattaaccacaatttacacccgcccgtccattatatttcttgtttgat

SEQ ID NO: 101650 - DNA, 359 bp, Glycine max
  Clone ID: PAT_MRT3847_62803C.1
ttacgcccctcttttactctttttcttccttttgcgtgtactcattgttgttttgtttcactcttaaaaagcatgttgctttgtcgagttttttggttctttggaatagactggttttgaggaattgggttgtttctctgtttcgtagtggaattttttttttttaaaaaatgttgctttgctgtttgcctgatcatggtttctgacgcttggctttcagcgtgttttgatttgaagggagtacgcaattgatggatggatattctggtaaaagagccattgatggggtggtagtccctagaaaggggatgggccttgcatttagagatactgctaatgctagagatcgaaatggtcag

SEQ ID NO: 101651 - DNA, 352 bp, Glycine max
  Clone ID: PAT_MRT3847_62804C.1
gatatgaagctctccttttcaagggggggcaccagaaacaaaaaaagccccccagaaaaaaaaaaattccaaagattccttcttttcgaccagggaaacccaacccccaaaaaaaacggcctgagccccaataaaaaccacccccccggggcaaaagacctatgacagccaaaaaggggcccccccaacaaggttatccacccccccccgccccgcgaaggcctcccaccccaaaaaataacccgagcgcatgttacgggcgggaaaaaccggaaccatccggaccggaaaatgagatttccaaacccccccccaactagaaaaaacaaaaacttggtcgccccccccccac

SEQ ID NO: 101652 - DNA, 398 bp, Glycine max
  Clone ID: PAT_MRT3847_62805C.1
ggggggggggggagcaaaaaataagggctttttatgaccctgaaccctgtttacaaacaaaaaaaattccttattatcaacaacatggggggaaaagaaaataaaataaaaaaccttttttggggtttattaccggcccaaaaaaaaattatttgggcaaattggtttggtttaaactttaaactttgaaccaaaatttttaaagggggctacagggggaggggatcaacttacgttgataacccaggggggaacccccctccgggagggggcaaccaggacgagccccatataaactggccccccgggaatttaaacccttccaccctcaaattgagggccccaaagccggcccaattaaccccttggcccaaagctgaacccggcccataatttat

SEQ ID NO: 101653 - DNA, 457 bp, Glycine max
  unsure (1)..(457): unsure at all n locations
  Clone ID: PAT_MRT3847_62806C.1
tacggctgcgagaagacgacagaagggccataagcaaatcattattattagatatttaagtgtcattttttactattatngtcggccttatcttattttcatgtattcaatttttaaaattttattttagtatttatatttttttatgtttttcaaaagttttattttgacaggattcattttgattttttatattttcaaaagttttattttgattttttttaatttctgaaataattaatttaaaataataacaactaaaaccatcattttctttataacatttgaatacctactttcctaatcttcattctctttttatgcaaactccatgatcaccaccacaacctaaataatacaaccaccttccactaagatttacaaccttctcagcattacaacagcaaaccaatcagatccacgacatccatctaccaaacaacacaatagccatact

SEQ ID NO: 101654 - DNA, 632 bp, Glycine max
  unsure (1)..(632): unsure at all n locations
  Clone ID: PAT_MRT3847_62807C.1
cgtcatcactgctatctcgatcgaactgtccaaggatcctgtcacgtgtcactatcaagtccgtgtcaccataaaaagagcagatcgaccatgcgaataccaagtgaaccaaccaccgcagaggatcngaggatgctcagntgcgaagccagatcggcaactgccagagtgtgggatttagtgaagtgngtcgaacatccaccaaccgcgtattacgtggggcgggttagttgatagccgagcgtgcgaaatgcgtgaaccattaagtggctgagcgcaaacaaagagggccatcacacagttagcgggggcaaatagtacggcgggtgggagtggtaaccgtgataggagttaagccacaccacatgcagcatggtgagcacgggatgcgtgcaacaggaggatacctggggcctgatgaaaaaccaacagaaaggtggcaacatgtcaaaaagttcacaactacaacacgtactgtcgatcgtaacaagaattaaantgcgaaggacacggtctggttttcagagtatatcggccacggattggttatttagttcaaataagttacacgggaaggcagtgttgtatgaaacggaggctatactttcactaattggggagagagatatgat

SEQ ID NO: 101655 - DNA, 1853 bp, Glycine max
  Clone ID: PAT_MRT3847_62808C.1
ctcgagccgaatcggctcgagctcccaatttcagagcctattctattattcttattcttcttttcgtcaattcaggaagcgcccacaattaccaggaggcattgtccaaggcaatcctattcttcgagggccaacgttcgggtttcttgccgcaagaccagagacagaactggcgcgccaattcgggcctcggcgacggctggacctacaacgtcgacctcaccggcggctactacgacgccggcgacaacatcaaattcgggtttccgatggcattcaccaccacaatgctgtcctggagcgtcatcgaattcggagacatgatgcctcccaacgagcaccggaacgccttggtcgcaatccgttgggcaaccgattatttgctcaaaactgtttctcagccaaaccgcattttcgttcaggtgggtgatccaatctctgaccacaattgttgggaaaggcctgaggacatggacacaagcaggacagtgtatgctgttgatgcaccaaacccagcttcagatgtagctggtgaaactgctgcggcactagctgctgcatcaatggcttttcgttcatcggatcctggttattcagacactttgcttcgaaatgctgctaaggcctttcaatttgcagatacctataggggtgcctacagtgacaatgctgatgttaggagtggtgtttgcccatattattgtgacttcgatggttatcaggacgaattgttatggggagccgcatggctaaggagggccactcaggatgaaaatttcctcaactacattcaaagcaatggtaaaacccttggtgctgaagacaatataaatgagttcggttgggacaacaagcatgctggccttaatgttcttgtctccaaggaagttctagatggaaacgtaatgtctcttgaatcctacaagacttcagcagagagctttctgtgcacgctcatacccgaaacatcaagttcacatatagagtacactcccggtggactcatatacaggcctgggggcagcaacttgcaacatgcaacttcaattgctttccttgaattggtttacgccaattacctatctcgcacttcgcaaaccatcaattgtgggaacgtctatgttaacgcacaaacacttcgccagcatgctaagaagcaagttgattacattttgggagataacccaatgcgtatgtcctacatggttggctacagcaacaagtatccgcagcatattcaccaccgtggctcctctttaccctctatcaaggaccatcctcagttcattgcctgcaaagaaggctcaatctacttcaactcaagcaatcctaatcctaatgttctcgtgggagccattgtgggaggacccggtgaagatgatgtgtatgaggatgatagggctgattttaggaagtccgaaccaaccacatacattaatgcaccatttgttgggattttagcatactttgttgccaatcccaacccttgattagttactataattgccgtacagatctttttgtaaataaaaaacatatgtatactgcagaaaagatgtctctcatcttgagaaaaaagcaagagcgaagaggcttgctctgtgttggatacatatataggaggaatgctacagagcattttcaagtcccagatgttgttcgtgtctttttcactgggaagcctgaagagcaaaaagctcgattactgcaaggttttttttttttttttttacttgctttggccaagaaatatgagtgagattgccatactgtggttttttctttctttctttttttcttttttactcaacacatcatattgtgtgtatcattcttgatcataattatttggg

SEQ ID NO: 101656 - DNA, 311 bp, Glycine max
  Clone ID: PAT_MRT3847_62809C.1
gaaaaaccgggcgagcgcacgcgttcgctctctcaatttttttcttaaaatgagttattttttggtgctcagtcaccaaactggcgcgcgcggttttttggttgtggcgtgattccaacaaattcacttttgatccacacacactttgtcttctggctttgttttctttttcccaattcctatcccaaaccttttttttgcttcttagattcaattcccccttttcgtttttacttctttaaaactttcctccccttaacctttcccatccatttcatttcactcaccccaaaaaaacaccctcacttttt

SEQ ID NO: 101657 - DNA, 423 bp, Glycine max
  Clone ID: PAT_MRT3847_6280C.1
ggggggggataaatatttatgggaaaaaaagacatatattgcatatgcataggacgcttctcaaggtcagatcgggagtgataaagcagttccaaagcagggcatgacagatggggggcgacctggaaccatggagaattattgggcatgtgtgagcgatccaatccgatgttgtgcatttatgcgcgccattggtcagccccagctgaaactaactctctgggcctcaccacccttctgggtccaaacctctgtctgttactgtgatgtcccaaaccattctcaacgtcagtataattaccagggcattctttgtccatgacttgaagagccgccaagtcattgcccatggctgtttttccccttagaggatacaatggggccatcacaatgttaagaataatgccggtacgctgacaccat

SEQ ID NO: 101658 - DNA, 402 bp, Glycine max
  Clone ID: PAT_MRT3847_62810C.1
gttatatgcttcttatatccttgcttagacgccctgggggcccgttcattttaaaagcctgaaaggaaagctccaaaacctgaacataacgacaggacgggttaatatttagacgttagagggggcggttgaaaaacaagatcaccccatgagagtgggtctgcttaatagactacctgaatgttgggttcagggccgattccactgcctgacccaagaccattctgattcatggcttcacccgtatgcaccagcaggtccttggtacatctttgctatggtggggatacaaatgcgtgttcaactgcgtcatcttgtgcctgaagatcgttgcttctgaaagtcgggtggcatcaggcccctggctcgactgaccatcgcatcctcaattttctatttatc

SEQ ID NO: 101659 - DNA, 505 bp, Glycine max
  Clone ID: PAT_MRT3847_62811C.1
gcacgaggttttccccattctctcaaccagaacatgggcttcaaaagataagatgtagcatgaactatctggctgataacagaaatacaatactataagatggctattggtgcttcagaataattttgaagttattttagaggacggaataatttttaataatttttttcggtgctagataagctagttttgcttgcatagcttataccataattagctttcagttttgtaaagtcggagttcaaaatgtgttaggcatgaacaactgtgcagctaagatgatctgtgatcctcttgcattattgtccatatataccttgggatcaaagtcatttcctgtctggaactctatgtgagaagtatagtctctatttgagctctgttgccaaatttcaatttttaatttgagtgaagacttctttttgttgccatataagtttcacacagttaacagttaaaaattgtctgcaaccaactatagtcgctgaagagtccaaggttttct

SEQ ID NO: 101660 - DNA, 168 bp, Glycine max
  Clone ID: PAT_MRT3847_62812C.1
tcggcattgttcattacactccgtggaggccgtgctgtcacgttgggggaaaagcccaacatgtgaatcatgaagaaaaacttgagcctaagtttacccgatccgcggttgcttctgaagaccaagcccttttctcgtgccacctgccagaggttttgggctttcaat

SEQ ID NO: 101661 - DNA, 336 bp, Glycine max
  Clone ID: PAT_MRT3847_62813C.1
cagaccggctggactgtcagccctggcaacggcttcggcatcctctccaactccaacggtcctttcattgcctgccctgccgagaacgactcctaccaggtcttcattggcctcgagtgcgttgacttcgacgatgcttgcctgagcttcgacgccctcaccagcaacgtcaccgaggccggcgcctggcagtactcttagacgattgcgagaatcttcgaacgaagatgggagatggaggagaaggggatagatgcatgaaagaacaatgctttccttactctgtctactgttaataatgatacataattatgaaagtcttagaatgttcacata

SEQ ID NO: 101662 - DNA, 204 bp, Glycine max
  Clone ID: PAT_MRT3847_62814C.1
acaataaaacgggggcatggaacagcacaaacccacacatgaggaacctcccacaagccctggccacgggccatcacaatcccacacaacacgagcatggaaatgcgctactgacaaatcaccacaactatcaagacaactgaccctcgccggacactcaaccaaacccccaaaacaccgaaacctgagacatgaaaacacaaa

SEQ ID NO: 101663 - DNA, 165 bp, Glycine max
  Clone ID: PAT_MRT3847_62815C.1
gtcaaggtctattcgggcaggcactatatggatcaactgctatgccatacttggcattgttagcactcttaattgcttccccagtgatggcactggagaagttcaagcgcactgaggcctcaattaagagtgctaactataccctgtatggcctaccagtaggca

SEQ ID NO: 101664 - DNA, 400 bp, Glycine max
  Clone ID: PAT_MRT3847_62816C.1
attataggaaagaaaataaccgtgttgcatttgggcttggggcttggggagtaatgaacttcaagacggatttacattacgaccatgcgaatcaaaacaaacccttcttaacttacctctactgctgagacggaaaaatatgcacacgcctcatgaatgaaactgatggaaatatctagaggctagcaataaacacagataaaccagacagtgacgtgcgcctgagaccaacaatgatgactttggagcctctcaacgaccagactcatgctaggtatcacatatttctcttcctgcacacattccaaagccactgtcgtcaatatctgcatctgctgcacatcataatgtgatcccaacgcagggtcaacaatttggcccacccagcattccccttctc

SEQ ID NO: 101665 - DNA, 222 bp, Glycine max
  Clone ID: PAT_MRT3847_62817C.1
tatacatctcgcaacaccagaagtctgttgtcaatctcgactgccgttgtagccaatcttacatcatgatcttccttcgctccatgtcgatgctgcgctcggcactctacggccgcgcactttcggcgggcctccgtggccgtggacaagtccgcttcgacgagctcagattacgcgcttccggtaactggcaaggcagctggagagtgatgacagtggcaa

SEQ ID NO: 101666 - DNA, 380 bp, Glycine max
  Clone ID: PAT_MRT3847_62818C.1
tttttgacaatatgtcactgtaaaacataagaatttgtcagttgatataactttttaacaatgatgccttggatacaacacgtatactagtgtatacaccatattcaaagatagctacatgcatacttgtctgtttaagtgatatcagacaaccgtaaagcggcattatatccgaggaacatctctaagcttaataacacgcagaaaccatgagtataaagcacctttcttcaaaatattaacacaggaattcactttattaccacatcattatagcaaaatgtcacgatagagaggtgaaattctatcgaaagcgtgagacgagatgttactataggatcaaacggtgtatataaaataaactataattcataatcaat

SEQ ID NO: 101667 - DNA, 1044 bp, Glycine max
  Clone ID: PAT_MRT3847_62819C.1
ggtggcaacgagcaaaggcgccattaacagtaacgcctaaacgcaacgaaacgcaagtctcgtccgcttctctctctgcggaccaaaacacagacacgttccaattcccccttctttctttcacatgcagactcttcaaattccacttcaacaaaccctaaaccctaatgctctgaaactcacattcccataaagttgagaaatatgagaattccaagcaattgcgagttcacacgaatcacgccctctgctttcagctaccaccgtctcaaatcctacgtttccgactgcagagccgtgcttctcccctcattcggcggcccgcacgtgctccagcttcgctcgcacgtgccagtccctccgctcaagcctcacgatgtcctcgttcgtgcgcgcgccgtctccgtcaaccccttggacacccgaatgcgtgctggctacgggcgttccatcttcgagccgctgttgcctctcattttggggcgcgacgtcagcggcgaggtttcggcggtcggagataaggtgaggtcggtgagtgtgggagaacaggttttcggggcactgcatcccactgccgtgagaggcacttactcggattacgcgattctctccgaagaggggaggttactccgaaaccggattcacttactcatgtggaagccattgccattccttttgctgcattgacagatttgcgtgctctaaaaagtacagctagaataagcgagggacaggggtttataaggagttgctttaaaagaatgggtggtctggtgttgcggaagtggtggagacgaaggatgaggaccatgtttttcatttgttcaaaccgaattgtgagaatgctcaggttttgatcgaccagattgtttcctttctcaaacaggattgaacattattatgtgcgtatgctttattttgtttgtgtttaaattgtcctttttagttctcagttgtatgatagtttatgcattctaccttttatatattatatattgtatcctattaaagaaaaaaatatttaactactttttttttgtctat

SEQ ID NO: 101668 - DNA, 779 bp, Glycine max
  unsure (1)..(779): unsure at all n locations
  Clone ID: PAT_MRT3847_6281C.1
cacctgcatatttattgagattgaaacagtgataccgtatgggatttcagagggaagaaggttctgccttcagtctctgactcattcgctctgcacagtttgatatcagttacgctatgccatgtccatataatatagtaaatagatgaagctgccacgcaataccctactagaagcagtatttatggttaagaaagatataagcatcattgatctagctgcctgacaatactgtgaatttcttcatcaaaattactttttgaagtggagaaattgttttgcattatttgaaatttcagttcgttcaagtcttggaatgtaaactcagataaatcacttaccatgcagcttgagtttatcatgtttggaaacacgttccccacccaacaaatcacgtcaaatgggttaaagacgtgaaagctagaactaaacttctatgcagatgtgaaaaatccatgttcatgatgtgtgaccaaacacacttcccttagtcttgtaaatgcttattctacgagccagtcaaattagtttgtgcattgctttacatcacttccactcgttattcactttttgtgtatatggagctcgttacacaaaagactaaataaaacaagtttagcatctatccatactccagatgtaanctggtgtaaaatcagaggcagtgttcaaataaactcatttgaaaaaagatctcatgctgttcttccctattttggtccagggattggctcacaaatacaatttctgtggtttggctcttttaatgtctgctgtag

SEQ ID NO: 101669 - DNA, 1045 bp, Glycine max
  unsure (1)..(1045): unsure at all n locations
  Clone ID: PAT_MRT3847_62820C.1
ccggattcccgggtcgacccacgcgtccgggtcgtctcaaatgaaaaaaccttaaacctctctaaaaaccgaacacacaacacaacacaaaacactgagcatagtcttcagtgttatccttcttccttatctcaataatcaaacaatgtcgtcaacactttcaatcccactcggattctgcttccctccaaccgttgctacctccttccctcactcccaaaccaaaccccaaaacgttactttccaacgcagaaaaacaacaacgaaggcttgtgctgcctcagagaaccccaaccaacgccaaaacccgaagcagaaccagaaagaggccaaaaccaagaacgctggcgacgatgatggcgaaaagggtatcaaccccgctggctttctcgccaaacgcggcatttcccacaaagcctttgcgcagttcctccgtgaaaggtataaagtattgaaggacatgaaggatgaaattttgaaacggcatgagaacttcatgattttggcttctgggtttgagttactgggtatgcatcgtcatccagaacatcgggtggattatatggaatgggctccaggggcccgctattgtgcaattattggtgacttcaatgggtggtcacctacagaagattgtgcaagagagcattactttggtcatgatgattgtggatactggtttatcattcttcaagataagctgagagagggagaagagccagataaatattattttcaaatgtataactatgtagatgattatgataaaggggatagtggtgtctctgttgaagagctcataaagaaagcaaatgaaaagtactggcaaccaggagaagaccgatttgtaaataatcgttttgaagggccagtaaagttatatgagcagatatttggtcctaatggacctcaaaccatagaggacataccggacataccagatccagaaacaagatacaaagcatgggctgcagagcatggaccttcccctactgctgcgattgatagtggcanggagtatgacatatataatgtgatagttgat

SEQ ID NO: 101670 - DNA, 502 bp, Glycine max
  Clone ID: PAT_MRT3847_62821C.1
gcgtggaaatgttatcagtatggttcagaaatttgtattaataacttcaaaaatatagaaaggacaatcaataaaaagaatatgcatgtgcttttctagtatttatctataactattgttatgttacaaaaaagaatgcctgtgaagaattgattaagcaaaaccaaaaggaaaaaatggttagtttgtaaaactgtaattttcaagaagatattagtgtaaccataccaaagttttcagaagatcacaccctaaaccttcactatgtgtgtctcggccaatgaagaattcaggtcttctcgagattgagatctcctactctgcagacgcatctgacttctgtggggtgaccggaatgcccctatactactgctgtcgaactgcatctgccctaaattgttcgaggaataactatgtgagacactactagctgatgggtaaaaggaagattccatcagctggatgttgccactggtatcaccaagaccatgccccaggcgaa

SEQ ID NO: 101671 - DNA, 1461 bp, Glycine max
  Clone ID: PAT_MRT3847_62822C.1
gctcactatttatgttaactttccattccaaaacttaagttttttcacaagcgtaaagtgatatagtattatttgcatccagtgtggtagtgcaaaatgagaagccatctggtattgtagtgattcatctataaacttcattttcttcttattcatgtaaaaaaaatgcaattttgaggttccgagatgatacattctgcaactgtatagtatatacagatgcatgttacacgtctttattttttctcagggagcttctccattagctctggtatcacctcaaacagatctcctacaagtccataatcagctacctgaaatataggagcatcagcatcattgttcacagcaacaatgaccttggaatccctcatccctgccaagtgttgaatagctccagatacaccaaaagccatatagagttcaggagcaacgatctttccagtttgccctacctggagatcattaggaacatatcctgcatcaacagcagcacgagtcgcaccaaccgcagcaccaagtttattggctagatcttctatcaatttaaagttctcagcactctttagggctcggcccccagtaactacaattcgtgcattcccaagatctggtcgttcatcatcctgggaagtctgagatatatatctagacttgtccagatcttcatcaaaggttgaaaggtcaacctgagatattggagcctcattagattttgagtcaactgaattctgaggaacaggaaaagatgtggatctaatcgttaatatacaaggattggcaccagtatatcggacagtacagagtgcatttccagcatatattggcctcacaaaagtattggaatcagaaattccagtaacgtcagtaattggagaaacatctaaaagggcagccgcacgtggcacgacatttttcccaaaagaacttgcagcagcaattatatgagagtaaccaccactctggtgaaccaaatggactaatttagcccagggctctgccagagggttcttgaatttatctgaatctgccacaagcaccttggagattgaagggtggcacgaagcagcatgtgaagcagcttgatgaagagaaggacccgaaccggccaagagcacagaaacggaagagtcaggatcgggaagacacgtggcagcagccagtgctgagagagaagggggtttgataaaaccaccttcgtgttccgccaccacaagcgtgctaccgtgtcgataaatggaatggccgcggaatgcggggaacgaaacggtgcgtttcttgattgctccgagcaacgcacgagtcgccattgattcttgggaaccgaagggaaatggtggcgctgacgattgttatgcgttgcgcttgatggcgaaggaaaacggcgccgtattggaatcgatgacgaagtgctgattcggcagcttagggaaggagtgggagaattgctcgagccgaatt

SEQ ID NO: 101672 - DNA, 216 bp, Glycine max
  Clone ID: PAT_MRT3847_62823C.1
agaaagaaggtttttttagtatagttaacagcatggagatgtatgcaagatgttaatgttggggcggataaattctcgaataggcaatctctgggtacaggatcttataattacaaggactacaaggatgcaccaccaacacccttgtttgatccaagggagttttagtcatggtcattttacacatcttggattttcatcattttgttactattt

SEQ ID NO: 101673 - DNA, 941 bp, Glycine max
  Clone ID: PAT_MRT3847_62824C.1
ctctggtacttggcccaagaggaatgttgaagcctatcacaacaaaagcagcagcatgaagccaaacattgttcccaactgcatccggacagagaattacatgattacttttgaagttgaagaagaaaagtttccgttatttggaaagaaataccagctaaaatttgctaatgatgtctctgctgaaacccattgcttggttcattttccaagtttcatcaggttggccagggaagctggtcttgagtacgtggagattcaaaatttgaccgagttttatgatgacaacagagcacaattagcaggcctgctaacgcacctgttaacacactatgttccaaacctcttggatcctagggggagacttcttcctcgttcatatgatgcactaggtctctacaccacgtttatatttcaaaaacctgacccggaaattgcacccccgattcctactccgttattgccagatgttagttataatcttgatgaggtaaccatttggcgagatgatgaagtgataaatgggcatgtagtagaacctgctattgggctgggcaaaataagcgaacaaaaagggatattgggcccaggtcctgcagatttacgttttccggaagcactttgaaagttctactgaagctatatgtttagccgtttaggtaatgatgcattgcaattagtattttattggcaaatgacaagcaaaaaaacagaatgcagttaggtgtgtttacatcttttttaaacggtaaaggttagggtaggtgtttttcttttgacatgtagtcaatgtgaacggattagttaactttaccatatgtttttacacattgtacttgttagcttttcttcgagtcttctgttaaaaggagtctcaaaaacagtataattaaatttaaaatgtaatgatcaacaagttttaaacaatttcaccttcttcg

SEQ ID NO: 101674 - DNA, 757 bp, Glycine max
  unsure (1)..(757): unsure at all n locations
  Clone ID: PAT_MRT3847_62825C.1
tctgctgaaacctattgcttggttcattttccaagtttcatcaggttggccagggaagctggtcttgagtacgtggagattcaaaatttgaccgagttttatgatgacaacaggttagttttgcattctctgtagggcactgatcctcccaaatccttaaaatatattgtttgttattagcagttttggagtttgaaatactatttattgaatttaattttttgtgattgtttccgtaagagcacaattagcaggcctgttaacacactatgttccaaacctcttggatcctagggggagacttcttcctcgttcatatgatgcactaggtgatgtgctaatattttttttatatcatgttattgtttataagtttcttggtttcactatcacctattatttatgaagatactctgatactgtactttccactccaacacaggtctctacaccacgtttatatttcaaaaacctgacccggaaattgcacccccgattcctactccgttattgccagatgttagttataatcttgatgaggtaaccatttggcgagatgatgaagtgataaatgggcatgtagtagaacctgctattgggctgggcaaaataagcgaacaaaagggatattgggccccagtcctgcagattttacgttttccgaagcactttgaaaagtctactgaagctatatngttagccgtttaaggtatgatgcattgcaattagtattttattgggcaatgacaagcaaaaa

SEQ ID NO: 101675 - DNA, 861 bp, Glycine max
  Clone ID: PAT_MRT3847_62826C.1
gcacagctggtgtttgggtgtaggtaaacctcacttttccagctaatcctggtgcatttggtcgcatgcataatcttcttgcttcgtgcattgtttgcacttggacgaatactgacttttggtcatacatggatgtgataaatcgtgcgggacttagtcctgtgcagattcttacttttggtgatagttaaatgcaattaagttttctgttccaagtcctttggctacagacaatgtctcaagataagggatgatcagctttcaatgtggtatgtttcaactctttttgttcaatgtttttttcctgcccactgcgcattgtttgccatacccggatcaagttactttattttatgtgtgtctaaactcctaagtttgtcttccatcgattccagtttgacctcataaattgctgttagtttggttttgtttgcaggtgtatcaatttgctttagtttactcttcttttaacctgtcagagcagtgtgagagcattttggttctgtaagcactcttgaccaggttatgttaccctcaaaatctcatttttcttactcttgtgtacaatatgtattaatttttgtaaatcagatgatcatagactcagtagatttacaggctttagtgttgtaagatatgagtagtaaatgtcaattttagaactgagtttctatttaattctggctattactttatgtaaatcagatgatcatagactcatagtagatttacaggctttagtgttgtaagatatgagtagtaaacgtcaattttagaattgagtttcaatttaattttggttatattgacaaatagcagaattgtgtgtgtttctgactctggcattgatgcatgccttgt

SEQ ID NO: 101676 - DNA, 419 bp, Glycine max
  Clone ID: PAT_MRT3847_62827C.1
gttgaattgccattgatgtccattcatccagaagaagataaagcattcaagggagatacaagtgatggtagaaagagaagtgcagcaactgattctgatcattgtgttgatcaaccttgtggaaacaagttgaggaaatctgaagtgtcagaaatgcttgacttgaactgccaataccagagagacattgactcaagtgtgaaagaaatagatttaaatttcagttcaagcttttagggacaataaagatgtgtctggttatatcaaagagacattgactcaagtgtgaaagaaatagatttaaatttcagttcaagcttttagggacaataaagatgtgtctggttatatcaaaagcatataaaaagtcattctcagaagaaaatatgtttataaacaatgtatatttttattacgag

SEQ ID NO: 101677 - DNA, 468 bp, Glycine max
  Clone ID: PAT_MRT3847_62828C.1
ggctcgagcttttgcaatatccaacacactccaaccatgggctaccaagacaatccgtatcgggacgaggacggagagccctggatggactacgactacgttcaatccgatggcgtgccatcttccgagcctaggcaccagctcgacgacttcaaggatgatgtcgactagtggcgcggtcaagagcggccgaagacgccggtctacgacactgatccgtgatggccgaagccgggggtaaggctgatcaagaagagcgatcccgggaagccctctgtggatccggcgcttgccgacgatgacatggtggggtctgttccgtagggggggttagactacggggactctcggacgttgaagaagaaggcgtccgtgcggggatgtttacctgcctgatcagagagctccatgggacgattacattggtggatctggatcacctgcaggcatgactcactatgacccgtc

SEQ ID NO: 101678 - DNA, 616 bp, Glycine max
  Clone ID: PAT_MRT3847_62829C.1
aacttggaagatatggatttttgtgaaaagaaaatgtcagtttgaaggctgaagcattgcctgccctgggatttaaagttacttttgtcccactgtagttgaagtcctattgttctttctcactcatacaggaattatcctcatcctttaaccccgtaataattatgtgcaagggaatggtagagaagggtagttggttgaaaacaaaaacttcaacactttgttcatgtttttgctcaacccaagttgaccatccatactacttgccactcatcaccaaccttgtttttgtccattttgactatgagcagaaatataattgctgcatgttttgtacatggaaaattgtagataaccacatttgttttgccataatgtatgacttgaatagttgaatgcttatttactcttggatggatgattgatcactgccacttcattgtatccaacaaccaccaattcctgggtaacttttttggccacgcagaactaaattttgcagattacattttcacccaccttagtcattatttacttcttgaaatatgcttagttttcagatttaatgtttgagagcttatagctttgttgaacaatttatcttaggcattcctga

SEQ ID NO: 101679 - DNA, 1115 bp, Glycine max
  Clone ID: PAT_MRT3847_6282C.1
ctcaaggttcctcatcttccattgccattctgaatttggtatcatctgcatgcaccagaaaggggaaaaagtatcgtgaagcagcactttcctctctcgaacaggttataaaagccttggggaatccagagttctttaatatggtttttcccttgttgtttgatctatgcaattcagagcccctaaagtccgggcaagcacctttggccagtgatgctgctggatagttgaacagtgttgaagagatttctgttccacataacaaaatagttgactgtttaacctcttgtatccatgtggcacatataaatgatattcttgaaaagcaaaagggcttagcacacatgtatacagcattcttgttacctgaacataaatggactgtcaaaactacagcctttgtatccatcagagaactttgctcaaggcttcaaaatgttgtgaaggactcccagggaagtaacgaacttgctggagcaacttcctttgttcaggagatatttcattctctgtcaccaaaaatactacattgcataagcacaataaagattgcccaggttcatgtttcagcttcagaatgtcttctggaagtcatgaaccttgccatggacgtcccttcagttggcaccatcaatgaaggattcaaggacgagctgcttcatcagtacgagatagagaagaacgaaggtgcaaagtcaatattaaaaaagtgtgtcaacattcttcaagactggaaatagtaaattgtacgagctatagctgtaaccctcatttatcaaattttgggtagatgaagcatttaatatgtatagctcgtgcttggtgtagtaggtccacatatagcgatgacaagaaaactactagtacccttaggtgaaatccgttacggattgaatttttaacacgatgagggtggatagcaaggtatctatattttatgaatattcataatttgaaattacttaaatgtctttcattatattttataattatctagtttttttttttttacctgattcgtgtaaacaggtaatatgggcaattgtaatgatatacttagatggcagatgctctgctttatgttgtctttcaaggagatatgcattgtttttaag

SEQ ID NO: 101680 - DNA, 502 bp, Glycine max
  Clone ID: PAT_MRT3847_62830C.1
acgagactgcataattgctggcgttatatttccctgtggtgccatacaacctgtctaatcatggtggatggcctactaactgtgatgattattatgcattcatattcactaatttacgtaattgatgtaaacaatatgagggagcgtaaaaaaaatcattaaaagcactattaatatctattggttgtgagtgttcggaactgaggtctgcagcaacctttgaggagtctcgaattaatctgcggttttaaagaagtaactgctccaccagttacaaacgcaaaacatacatccatttattatatatatattgtgattggtgacaaaatggttttcaactcctttgtgtaactcattttacgttcacacacaaacatgaggccttccaaattccactgaactgctgtaagtttctttcacacatttctccttctgatgtttgttcttttcagttttcatctagtttatcattattgtttcctattttcttctttcacaccct

SEQ ID NO: 101681 - DNA, 530 bp, Glycine max
  Clone ID: PAT_MRT3847_62831C.1
acatgtgtagcagtcctcccggcttggggggggggggggggggggggggggggggggaaaactagtgtaagggaagtatgggataaacaatcgaagatgataactacgtcaattgtaataaaagtgcgtgataacactataatgctagttagccgcttaagaatcctaaaaagcctacgacgcaaagatacttacccataataaaacgtaagccaggggggggggttaaagaacagagaatatattgcgttaccagagggagtaaagaggtgaataaaaataagagagaaataaaaatgaaaacaaaaaataaaagggaaaatatagggatttagcacaacacgtgtaagcctggtcaaaaaaacgctacatagggtaccctggccacgtggcaggctatagggcatcttacccgggttacgtaatcgccgaacggtaaggaacaagccgagtttgtgacccacgggactgcacaacgaaaatatcgttgccgggctaggtggctctgggctaagaaacaatagcgggca

SEQ ID NO: 101682 - DNA, 350 bp, Glycine max
  Clone ID: PAT_MRT3847_62832C.1
aaaaacaccgatatccgcccttaattacgttttaaaattatctcctttggaaattttatcgccctaccgcctacctggaaatgaatttgaattttttcccaggggcgaagtcaaacccccccgatcggcgtacccagaaagggctggccgcttttgctttttcaccttaggccgaaaaataacccttgggcctttaagccccattttagaaaccagagtttcccccggggggacatgtaaaaaaaatttgccccctttgctttttaccaaggggggatctcctttgcgtatgcctttggagaatggcccaaccggaaaaccttatgggccccgaccctgccattttgggc

SEQ ID NO: 101683 - DNA, 455 bp, Glycine max
  Clone ID: PAT_MRT3847_62833C.1
ctcttactctttcactctacttctatctcctattgcggctatggtacaagtttttattttaccgcatccgctccttcaatcgatactattctctaacatgtttgatggagaccatgctgcttcaccaactaaggggcgtgaatggccttgggtatgcggaacgtacgatgcctataggttgaccgaaacacaaactccgacagatggcaactacgaaccctgatggatttgtggccgacgaccctgccgaccctcttcagctaatcgacgccgagcaactcaaggcggagactactgacttggctgccaacgatgagtccaagaaagcacgggctcagcataacaagcactttcagctccatactaagccggcttctacggataaggctgtgatggatgccagaaaccagccacctcgtgaagctcataaactacgacgctgtgttgcacaagca

SEQ ID NO: 101684 - DNA, 535 bp, Glycine max
  Clone ID: PAT_MRT3847_62834C.1
gaatttaattttttaaaaaaaaaaaaaaaaaaaaaaaaaaaaaaaaaaaaaaaaaaaaaaaaaaaaaaaaggggctatctttataaaggagtccaagttaacatacacttgcattgcaaaaatattaactattttattgaataacctaaattgggggggcctttttttgggttcccaactttctgtgcctgggctttgccactggctttatctttttttttttggcctcgcattccatttcctttggcccggtttttccccctttgtggctgggcacaccctttgggtcctcccttttttttctttggcctgatttccctttttgccctgttgtgtttcttcgaattagccccgcccgttgcgctttttccacctttcggcccccttattttggcatgggccccccccttttttggtttcttttcctcgggtgggtttgtggtctcccccgctgtttttccttttttttgttttagggccttggcccccgttttttaggtttttttccttcttttcggcccctttttcccgtttt

SEQ ID NO: 101685 - DNA, 564 bp, Glycine max
  Clone ID: PAT_MRT3847_62835C.1
gtgtaactcagtgctcaaacaatattagcacgaaagttacaattatctttttgtctttttggtatattacttgttttatgaatctattacaaacccagaattgtgtcaaatctacttcatatcatatatataagtctactataagaatctctctttctccccttatcctgccttgggattagtgttggagatgattacttttatccttagcaagagggagcttgataaatggctgcacctgcaaagagtttttggcttaattggtaggaatttaaatgttcccactgtacattgttattgatttgttttggattaggagatcaaagattttatctgaatcttggcgtaggaaacatgtatgttacacgttttgaccaatgtaatttaataatatgtataactgtataacaaactgatcttaatattctttttgaaacttctatcaatcgtcgtttcatcaatgattaatacaacttgattaagatgctttctgtatgttgtatcaatatgttatatgttataatgcaataatttattgctggattttattaatccatttttttc

SEQ ID NO: 101686 - DNA, 230 bp, Glycine max
  Clone ID: PAT_MRT3847_62836C.1
tggagctgctcatacaacactgcactgtagagcaagtgctgcgataaatctaggaagagactgtaaagatttcgaatccataatcctaagaaagggcaccaccgtatcaacaagtatacgcagacgctcgatatcagtccctgtctgtaacactaatgcctattacaatgccttactagaagtaaaacgcccctgcataaaaagcagtcactctatgtactcgactattc

SEQ ID NO: 101687 - DNA, 444 bp, Glycine max
  Clone ID: PAT_MRT3847_62837C.1
caggattgcctatttaagctgaaatctcgaatttggagagaggatggtgagttttttttaggttgtttttagtttttagttttggctgtggagagactgagagatatctgagcttgatgaggaagccatcttgcggagctttggatgaaattttgagtgattgtgaggtttctagaggtggaggagacacctccactacttgtatatcttcagtctttcattttctcttttcattgttgtaaaaggagcttccctgttatggagagctaaatccttagttggttcttcctatggggtacttgatgtaaatactttcatatttatctaatgatgttttatgtgttcactgtgctatcagtacttaattctagtgtgcctttgccttgatcacgcaactccatgcttagttagggtcactcaacattgggaaatggtttgatcctt

SEQ ID NO: 101688 - DNA, 432 bp, Glycine max
  Clone ID: PAT_MRT3847_62838C.1
ggagattaaagaggaagaagtggagtgtgttcttgttctgggcttggcatgttgccatccaaacccacaccataggccatccatgagaactgttcttcaggttctgaatggggaagcacccccacctgaggtgcctaaggaaagaccagtttttatgtggcctgctatgcctccatccttcaaagaagctgaagataactccctcatccagggtacactcactccattcactgaaatcactggcagatgatgaaattgaatgtggtgaacaaagctgggaactaatcaagattatcctggttgtagttggagatttgaaatcattattgcattcgttgattttagcttttcaatgtaaatgcgtgtgcataggtgataattatgtgttgtagcttgatatatatttgcacgcatcggtcctgttggtgtatg

SEQ ID NO: 101689 - DNA, 242 bp, Glycine max
  unsure (1)..(242): unsure at all n locations
  Clone ID: PAT_MRT3847_62839C.1
gatatataaactaacgtattgttttttaggtaattttgaggagaaaganatatatganaaagaagtgagagagaatgaacttttttgttgtataggacagaggaggggagagaaacggtacaagtttagtgaaactcgtattaaaaaaatctctccacaaatgaccaaaattacatgggaggnagacccgttaaaaaagatgaaatgatgaatctaacctttttgttttggactaagcttat

SEQ ID NO: 101690 - DNA, 1940 bp, Glycine max
  unsure (1)..(1940): unsure at all n locations
  Clone ID: PAT_MRT3847_6283C.1
ccacgcgtccgcggacgcgtcggcgcggcttcgcccattctcatttctctctctccagaaaaaaatatacatttatattatattttttatcaataaaaaatcaaacgaataaaattttcattttcttttgtttttcttgctcttgtttctcgggaaaattgatttcaccgtagtaggagccaagaaaaattccgaacccgtgaactctttttcctactacaaatgcaatttctctctctctctctcccacactctctctgctaaagtcgcaaacacaaccacgacacactgtttctgaagtgaagcaatgaagtttcagcctcagatctcgtgctgaatcatcgatccgagagagagagatagagaggagttggattattgattcatggaaccgcggagatgaagttctacatatcgacgagggggataaagagagtgacgatatcgaacagtgagggaaagggatcggcgaagacgacggcggtggcggccggctccggtcgccggatatcggctcggacggtgtttccggtggtgctggtgctcgggatcgtgctgccgtttctgttcgtgaggatcgcgatcttgatgctggaatctgctgcggcgtgttcctcattggaatgtgctgggtggaggtttttcagtggagtcgacacgtccctggaactcagagatgagctgaccagagcgctaatagaggcaaatgatggtaataattcggctcgagcagggtcgttcaatgaacttgtgaaagagatgacctcaaaacaagaccttaaggcttttgctttcaagaccaaagccatgctatcacagttggaacgcaaggtacaattagcgagacaacaggagtcagtttattggcatctagcttctcatggtgttcccaaaagtctacattgtctatgcctaaagttggctgaagaatatgctgtaaatgctatggccagatctcgtctaccccctcctgaatttgtatcgcgccttgttgaccctacctttcaccacttagttctcctaactgacaatgtccttgctgcctctgttgttgtaacctctacagttgaaagttcaatcaacccagaaaaactagtttttcatattgttactgacaaaaaaacttatgctccaatgcatgcttggtttgctaccaattctattaaatcagttgtggaagttaggggattacaccaatatgactggtctgaagaagtgaatgctggggttaaagagatgctggaaactaatcacttaatttggaagcaatactataataaggaaaaggaccttgactatactcaagagcatagtagatatttggaggctttaaggcccagcagcctatccttgatgaatcaactccgcatttatttgcccgaggtaattagttatttttggtagccctctgattgagtaataattgacaaaaagtctaaataatgcggctcgaggattgtttcatcatctgatttttgtggaccacaacagctctttccagatctcaaaaagatagtattcttggatgatgatgtagtagtacaacatgacatatcttctttgtgggaactagatcttaatggcaaagtcattggctctgtattgaagtcgtggtgtggagacggctgctgccctggaagtaaatacacaaactatttgaacttttcacatcctcccatatcatcaaagtttaacggtgatcagtgtgtatggctctatggcatgaatatatttgatcttgaagcttggaggagaacaaacataacggagacctaccatcaatggttggaaattaacctcaagtccgggatgacgatgtggaatccaggagtgcttccacctgccttcattgcatctgagggtcatgtgcatcctatangttcatcaatgcttgtgactgatttaggttatcgccatcaatcagcagaaatagcaaagag

SEQ ID NO: 101691 - DNA, 407 bp, Glycine max
  Clone ID: PAT_MRT3847_62840C.1
tctcgtgacgcgtgggcgtatgcgaagtttctaagatgacttctcccttcattaaatgtacagtgtatctcttcatagaattaggcaatatggctgatgacaccactaattgggaggcttttccccacaaactggcgcagtttggagagattcaggaaaaacttgtattgcaactgtcacaagaggaatttcttacagctcggtcaactcaggtgcttcctgcaacaactctgctggctgatgggtgtccatatttggatgctatggtgcatgatagtacagagtctacaataccagatgataaggccattggcgtgaaaatggcaaccataaacaatatgtgtgcatatgacctcaatcctggtatttcaggatctcgtatattgagcaccattacccattccatt

SEQ ID NO: 101692 - DNA, 379 bp, Glycine max
  unsure (1)..(379): unsure at all n locations
  Clone ID: PAT_MRT3847_62841C.1
cttaaagcctggaatggtgataacttttagaccaactaaactgacaactaaagtcaagtgtntggagatgcaccatgaatgtgtgacaggaacacatgcgtgtgacaatatgaaatggaatgttaagaatgttgcgtgtgaaaatttgaancatgattatattgcgtgaaactgaagagatgacgcggcaaaaaagactgctgactgtacgaggggaatgatgatcatgaaccaccctggtcagattggaaatagctatgccgctgtgctcgactgcgacacttgtgacattgctgtgaagtggggtgaactgatgaccgagatggacgagcgatgcggggaagagcttgaggaaaacgccggtgtttggaagaacggg

SEQ ID NO: 101693 - DNA, 424 bp, Glycine max
  Clone ID: PAT_MRT3847_62842C.1
aaagggaaagcccagcctatttataaggggagcaaactaatacttgttcaaagcaatttcacgggaaacgctttttttaatttccccccaggggaaaaacccactttggcattaaaaattttaaaagcatttaaaacattctaaatccaagggggggatccccaacaaaaaatttctgaaaagcattaatctttccttagggccatgtattcacaaaaaaaaccactggcttttaggacgacaatttcaaccttatctccaggggatatatctttctcaggggcaaaagcaaaaacagttttgaccaaaaaaactggttttggttaaaacaagggagaaacaacatcctgcgcaggaaacaggagggggctaggaaacttcagctggttatcaaaaaagggcataaaaaggggggacccaaaac

SEQ ID NO: 101694 - DNA, 423 bp, Glycine max
  unsure (1)..(423): unsure at all n locations
  Clone ID: PAT_MRT3847_62843C.1
aattcggctcgagattttcttcgtcgtgccccatacggtcaatacatcgaatctaatagcctacaccaaactatttagtgctgtaattatatcaagtttaaagtcaattattgcattattgtgttgaaagcccgtgaatgaaacttttacacttaaaatcataacattttaatccgtcagtcgaagtggatacatcgaagccaaattgtgcgcatcatttggtgtgttgacagaaaacattatcaacgttaaaaatgtcatcgcgaaaaaaagttctgctcaaagtcattattcttggagactctggtgtaggcaaaacctcacttatgaaccagtacgttaataaaaaatntagcaatcaatataaagctacgattggagcggactttttaacaaaaaaagttatggtgatgatagatggta

SEQ ID NO: 101695 - DNA, 655 bp, Glycine max
  unsure (1)..(655): unsure at all n locations
  Clone ID: PAT_MRT3847_62844C.1
aaacgaacactatttctccaaattaaaacccaatgaagaaacaaacttcacaattcacattgaaaatctttgaccctcttgtccctacacatgaactgatttgacattttacagaaaaagaaaatatatataaaaaagagatgttacatggaacaattttccaaattaaaaaccccatgaaaattcaaataaaggacgaacaaacttcatccgtaattagcagaatcttctccccttcttttcttgaacaaccccttcattcccagccagcatcatatatttatccctccttgtaaggttggtgcactcaaaccctaaagcatcagccaactgtctctgaatgtaatttgccacttcatgactagacctacctccagcacatgtgagttctctaggaacctttccaaggacttgaatgtcatatcttggccaagggttcatgaagaagaaaatagggtccaagacctttagtccactggctgtggtcccataaaacatggtcacatgagcattcatagccacaggcacaatctcatcagcaagttcagcaaacaaggaactgaaccttagtaaatatggctccctacaaagttgntccttcagggaacaccaccaaatccccttcacaaagtaaccttttcataggttccccatc

SEQ ID NO: 101696 - DNA, 174 bp, Glycine max
  Clone ID: PAT_MRT3847_62845C.1
ctacgtaagctcggaattcggcttgaggatgctctcggtgactgcctttgaacatccaagttcacctttggttgactgtaaatgccaccaacttagttatgcctaaaacgccgattggtgccgtccaagggccgacaatttcaacggcgacaggatcgccaatttcaaggaggc

SEQ ID NO: 101697 - DNA, 340 bp, Glycine max
  Clone ID: PAT_MRT3847_62846C.1
gaattctgttttgcacaaaagcgaagactatgtcatctaatccaaacccgagtgctgatgcatggagcttgcaattcctgaagcgtaccggattacatagtgagatcattagtgacactggatggactgccaccccaatgcaggatgttcaggtatacaactgataggttcatatcctctcaggaaagtgtccaccaggacccatggagttatgaaaccacaaatatcttttgagttaaataggtggaagggaaaaatgactattccccagggcaatctccgaagtgtataaagaatgcctctttctttagggggaggagcttggtgcaaagaatgctat

SEQ ID NO: 101698 - DNA, 1073 bp, Glycine max
  Clone ID: PAT_MRT3847_62847C.1
ctttatcgagtccgggctcttccaaactcgaacgaccatctcctcaccgtcgtgtctctccgccgctgccaccacacctccggcatccccaacagagtgatggaagaaaaagtgaaattggctcattacaaagtcgggtctttgccaactctattttatgttcctgacttcatcacagacagtgaccaaagccttctactcaacaacatttatggagcccctgcatcaaagtggaagatattgaagaatagaaggctacaaaattggggtggtgttgtccatgagaagggccttctacctcaaattttgcctccatggttaacaaatctcacgcaaaaaatatatgaagaatctgggctattcccatcagcactcaatcatgttcttatcaatgaatacctacctaaccaaggcataatgccacaccaggatggacctgcctattttccagtggtagctattctatcacttggatctcctgttgtcatggacttcactccccatgcaagattcaaacaggattcccaagatgatgtttgcaaagattcagatggaggaacttttgagattgggaaagataagtggcttgatgataaccatccattctccattttattgatgcctcgcagcttactgatattcaaggacaaggcatactcagattacttgcatggtataaaagattgtgcagtacattgctatgatggggctgtaaatgaagctgaagctttgaaacacaaggaatcagatggaaacttgtttagctcagaggatgatgaattggaaacaataggaaagggggaatataagaatatatcaagaaaatccactagaatttcattgacttgtcgattggtaccgaaagttcacaaaaatttgtttaggttttgaaattatatattttgttccatccccatcccatctaaagttcaactgtaacctcttctgtgtttttttctctccttgggggctttcttacattatcatctttaggctatgtttagatatctaatgctgagtggaatgaaatgaattgagatggaatggaataaagttattattttattgtttgt

SEQ ID NO: 101699 - DNA, 293 bp, Glycine max
  Clone ID: PAT_MRT3847_62848C.1
cgtttcatatttctatatccttttactctcttttttttttttctaagcttgctactcatggggagtgcccactttgctattagtttcaccctgcttcattgtctgctcatcttaacattcctcatcacgtctgtactcctaccacctcgttgagtcccaattatgcttgatctcatatttggaactttcaacaccctgagctgaattgcgccggtatcactgtttttcaaactcactcctcaccgcatcggtcttcacttgccatcttacttaccttattcccggatgttcat

SEQ ID NO: 101700 - DNA, 345 bp, Glycine max
  Clone ID: PAT_MRT3847_62849C.1
actttttcagccttctccacattttttttagaccttattccaatacatcgggaagatttccttaattcgaaggagttccctaaaacacttcctaaagaaaactcacgaaataaaattgatttacttctaaagtacaaccctgttcacatcataattcctgtacttgtatcataatggaaaggccattgcttaatccatggtgatccttaagtatattgatgaaacttgtaaagatattcctaaactccttacaagtgattcttacttacgatcccaatctctatttctgttttcatttcatacattatcatttaatgtagatcatctttctagtactcaaaactt

SEQ ID NO: 101701 - DNA, 307 bp, Glycine max
  Clone ID: PAT_MRT3847_6284C.1
acgaagctatgagactcttttctacctgccagaccttgatgatgcacaattgtcacaggaagcagaataccttcttaggaagggatggattccttgcttggaattcgagttggagcacggcttcttgtaccgtgagcacaactggtcaccagtatactacgacggacgctactggaccatgtgtatgctgcctatgttctggtgcactgatgcttttcaggtgtcgaatgagcttcaagaggctatgactgcataccccaacggcttcttgcgtatcatcgatatcgacatcgttcgacctgtgcag

SEQ ID NO: 101702 - DNA, 341 bp, Glycine max
  Clone ID: PAT_MRT3847_62850C.1
ctacgcccgccatcggtgtatggacaaaacggccttacccggcttaggactgccctcgtttactctcactcgcgccgacgacaaccccgttcccactaattagtatcgtacctatctatgtctcatattccctacgtcgattctgtgcgcgaacctaagcctatctgcgattccgacgattccgctataggattctccaaaatctccgttgtctggggccaaaccgaccactcatgctctggagaacactcggcacgcaggataggattgaatgagtcttagtgttaatgggccctggatgactattatgagagcataggagcggagaaaggagacatgaa

SEQ ID NO: 101703 - DNA, 797 bp, Glycine max
  unsure (1)..(797): unsure at all n locations
  Clone ID: PAT_MRT3847_62851C.1
tacggctgcgagaagacgacagaagggatccttcattttaattgtgtcaaaccattaataatataaattgtaaggatgataggctctatgtgatgattaacattctcaagtatttcaatgttaaacttattaagaagtagacatgttcatgaagtgacaaatatatcacaagaaggaggattgaattaaaatttaaaactttttatactccctttgaaaataaaaaggtttctagtgatagttaagaataaatcaaataaattaatgaacttcaaaatttaaattattactattactattactccctcttgtttattatagttgttgtcttagattgttttactatgataaaaaaaatcaatgaataaaagagaataataattttataaattaatattgtaattttacataatccaagaaaatttattagtttatttttttaatacaattcttgtcgngatgttggaacctatggcttcacgcattcaaatctctctatgctagtccaaccatagtgagttaaaaaaacttttgaaggaattttgcatagtgagttaaattttgcaacttttatcaattttacaaagaaatatatagtgactaaagtgtagcgnnnnnnnnnnnnnnnnnnnnnnnnnnnnnnnnnnnnnnnnnnnnnnnnnnnnnnnnnnnnnnnnnnnnnnnnnnnnnnnnnnnnnnnnnnnnnnnnnnnnnnnnnnnnnnnnnnnnnnnnnnnnnnnnnnnnnnnnnnnnnnnnnnnnnnnnnnnnnnnnnnnnnnnnnnnnnnnnnnnnnnnn

SEQ ID NO: 101704 - DNA, 364 bp, Glycine max
  Clone ID: PAT_MRT3847_62852C.1
ggctcgaggttttgccagccacatccttaggttcctcagcaagtaaaacaattagaagctatatttttcactcagcaaaagcaccaacagcttcaatttccttcctagggacaacatatggagacactgcaccagttatggcagcattttcttctagaggaccaagttctgtgggccctgatgtgatcaagccagatgtaactgcacctggtgtgaacatcttggctgcttggcctcccacaactagtccaagcatgctcaagagtgacaaaagaagtgtactatttaacatagtctcaggtacctcaatgtcttgtcctcatgttagtggcatagctgcactcattaaatctgtgcacaagga

SEQ ID NO: 101705 - DNA, 295 bp, Glycine max
  unsure (1)..(295): unsure at all n locations
  Clone ID: PAT_MRT3847_62853C.1
ggccaggacaaancaccactcnaccaacacacatnctcctcgntcacgctagncnnttctgntnttannnctaccttnaagttttaaaagtataaagntggcagagacattcctatttacctcanagtcggtgaacgagggacaccctgaacaancnnctgcgaccaaatgntccgntgctgtacctacgacgcttgcatcgaggaggacccngacaggcnaagttnctgcgccaacntnngagcanaaccnanttggttcatggtcttcggagaantcacgaanaangcnaacg

SEQ ID NO: 101706 - DNA, 136 bp, Glycine max
  Clone ID: PAT_MRT3847_62854C.1
accgttttgagcggctatcttttttctcacgaagcctcggctgcaggggaggtgcctcaagctggagtgtgactcattacacacaccagcgttgcttaatacaaacaccttcaaacttctacattgtcccacaaaa

SEQ ID NO: 101707 - DNA, 311 bp, Glycine max
  unsure (1)..(311): unsure at all n locations
  Clone ID: PAT_MRT3847_62855C.1
aattcggctcgagcgagagcgcaagcccttaccacatagtgctgttcttggagccaatgatttgcccataactattcttacagatcacatagaacacccattatttaagcgggggaaacacaaaatactanaaagggcatagcttcaatgaaaaacctatgatcagattcctggcgcttatactctcattgaaacactttttcattcttttgccaaaagttcttaagcaaacccctgtttctggagattttttaggaaaaaaattaccccacaaaatattccataaaaatcaaaggggattttgttgtctc

SEQ ID NO: 101708 - DNA, 599 bp, Glycine max
  Clone ID: PAT_MRT3847_62856C.1
aaaaaggggaaaatggggaaaaaaaaaattaatcccctcacaggaacattttttccccgccaaaaaatgggggggttggactaggggcccccccggaaagaagggaaaaaaatccctggttccccgttttacccccgggggggggggggaaaaggccaaaaaaggaccttcaggccaacataatggcccccccaacattttttggccacaaaggggggcaaccccgtttcttaaaaaaaccctaaaccccaaatttccggacccggggggggacccgggggtccccccggaaattcgggacggggcccgggggggggcccacttttccttaaggggggggggataaaaggggggggaaaacaggggcaaaggggtttccgggggaaaaaggtttgcccctaaaaattccaaaaaaaaaaaaggccgggaaaataaagggaaaagcggggggggccaaaaggggggcccaacccccttttttgggggggggccccccggcccgttttcaaagggggaaacctggcgggcccctccggtttaaaaaaaacgccccccgccggggggggggaggggggctcctgattcggggccccgggggg

SEQ ID NO: 101709 - DNA, 272 bp, Glycine max
  unsure (1)..(272): unsure at all n locations
  Clone ID: PAT_MRT3847_62857C.1
agcaactcctataccaaagcttattcctcaaacaaaaacttctaatgcggattcaaatttatcagaatttcctatttatctttctcataattgcacaaacaataccttctatgncaacaacagtgctttccaaacacacctcaccatactcttatttaacctagcttctaatgccacaaccgggaataagttttataaggctgatgtggctaacacagtgtttggtctcttcttgtgccgagaccaagaggatcttccttcagggctttgtg

SEQ ID NO: 101710 - DNA, 426 bp, Glycine max
  Clone ID: PAT_MRT3847_62858C.1
gccctactaactggaccttaacggccgcctttttttttttttttcgatcaaaaatacactggtggttatataatgggaattgatttgtttaaacaaaagtctacaaatatactttttataaataagggaatcacaaattatgacacacacaaaaggttcctaaagcctaaaccctcctggacacccgcaagtggaatggcttatgataactcacttttattattttgggccaacaagaaactaataaatgtggcacatgactgggttgaatattaattggaatgattgtgttttcaactaatctctgcagtctttgatcttcccttgaattcgcagagagatatgtccatcttgatcatggactggcaaagtaaaaaaatgtgtttttagcatacacttactagttcacaatcttggttattggaa

SEQ ID NO: 101711 - DNA, 626 bp, Glycine max
  Clone ID: PAT_MRT3847_62859C.1
ttagtaaatagcaaatgcatctctgtttattataacaacaacaacaacagaaaagaaatttctcagtacgtacacatagacgaccaaacaatattttggaaaaaagaaaagaaaagaaaaggataataaacaaccataacattgatacatgagttactaatttccaggtgagttcatcagagggtgcttgaaaaaaaaattcaaataaccaactgattctgcacttggaggattgtcttagctgagtccctaagcctctgtgtctcttcttcagtcaagtgcacattggttacacccaaaacccctcctcttcctagttgtgcaggcaagctgagaaacacttccccatcatcaatgccataaaaaccctttgcaagaaccgagacagggtggaccctcctttggtccctgagaatggttcgtgccaagtttgccaccgagtatcctattgcccaagaagtgtaccctttcagattgataacttcataagcaccctgtataacttccttgtgtatgttctccaacatttccttctcatacgcaatttcttgcttctccaaaaacttagcaccggaacacccccaacactaatactagaccacagagccactgagctgtcaccatgt

SEQ ID NO: 101712 - DNA, 600 bp, Glycine max
  Clone ID: PAT_MRT3847_6285C.1
gaccgagtatagttggtctcttcccgtgtcaatgtttgtattgttaaacatgattttatttaaaataatactattaaaaatctgcattttaataatttcttattccaattattaacttaggggcaagtcagtcgagtaaagaaaattcgccaaatactttgtgaaaggtgaaaggggggaaaagaagaaaaaatattaaaaacttgttaaaatagaaataaaacaaaaagggtgatttggtaaatgagatacttaccagggacgtgtcgactccactgaaaaacctccacccagcacattccaatgaggaacacgccgcagcagattccagcatcaagatcgcgatcctcacgaacagaaacggcagcacgatcccgagcaccagccccaccggaaacaccgtccgagccgatttccggcgaccggagccggccgccaccgccgtcgtcttcgccgatccctttccctcactgttcgatatcgtcactctctttatccccctcgtcgatatgtagaacttcatctccgcggttccatgactcactaatccaactcctctctatctctctctctcggatcgatgattccgcccgagatctg

SEQ ID NO: 101713 - DNA, 1701 bp, Glycine max
  Clone ID: PAT_MRT3847_62860C.1
aattcggctcgagctgcgagaagacgacagacggggacgtactcaaattccaaatgcaaattggtttctttttcgtggctccaaaggcatgtgattttatttgtgaactcctttgctacaaccccttataaacatatacatacattatatataatatatgagggtagcataaatcatattttgattttaaagggagagaaaaaaggggaacttggtgggagagagcacagaccacaggggcatgtctcaaaatttgttgcaaagtgtatagttgagggtttggtactttggtttcatttagttaaatttgtttgtgtctggaattgccgcttgtttgaaaatgtttctctttgctgcattttccatttgtaaagttgccaaggatgcagctggagttgcaggaaatgtgtttgcttttgcgttgtttgtgtctcccatacccacatttatgaggattatcagaaatgggtcaacaagaatgttctcacggtggctcgagatttattcccttctaaactgcttgatctgcatgtggtatggcacacctctgatatctgctgataatttgttggttacaactgttaattcaattggagctgtctttcaatttgtgtacataatcatcttcctgatgtatgctgagaaagccaaaaaggtgagaatgattggattatcgctggcagttcttggcattgtttgcaattgtcatatatcggagcttgcagatagatgacggttataatggtggtcggtttctttgtgcagttttttgatctttatttctctcctttctatgtttggatctcgatttgcaataattaaattggtcattcaagcaaagagtgtggaattttatctatggtctgtacatactttccaccttcctaaagagcaactctttcttactttatgggattattcaacgatgatgcatttatttttttctgaaatgggatatggacttttttgggaatgttacttttgatattatacttctacttcgagagtaaagttaacgagagctccagagaacctctgatagtatcatatgcatgatgagttctgctgaaaaggctgaaggataagagtcaggaacgaccttttgctgctggttgctggctgagactggagttggcaacatctgtcaatttataggaggaattactgttgcatccttgagagtgaccagaagttgtgatagtgaataacttgaaattgtttatatcatagttaccagatatatggtacgagtactggtatgcggtacttgtaggtacagatggtcaatttttacattattattacaagactttctttaaagagaacccggcatgcagttcttagtacggtgaattcagtacacaatatgcagggttaactatgatctgtatatgaatgaaagccttgaggaggtgaaccatgcttcgaaatgggactatttcaagaaaggcaggcacattgcacattgcttctcttgcagtgaagtcatttccaagttattagatgttgagagacaaatatgtacacattatttgagtgacatatattatttggatgttccgtcttgaattcttgatcctcatttctctatgttgatcaccaaatagatactgagtcattgtctccctttgtcattagctgctttatttaatgccgtagataggaagagtcaatttatatgcaaaaaatgaatttcgctat

SEQ ID NO: 101714 - DNA, 240 bp, Glycine max
  Clone ID: PAT_MRT3847_62861C.1
ataaaataaacactttggtgaaactttatattttgcatgtcgtattcttaaaagaataccttataaacaaaaaaaaaaatctttatgaattatggggaaaaagagaaccaaatctgaaatatcttaaagtgtgggggtgtgtagtaaatgttaatatccctatttttaaaaacaaatactaacttaaagtatgtgaagggggatattggaagagctgaatattgaaaaataccttataat

SEQ ID NO: 101715 - DNA, 120 bp, Glycine max
  Clone ID: PAT_MRT3847_62862C.1
aggtgtgaggacaagctaaggggtctgtatgcgagactgctcgtgaaggacacaacatttttttggtagatgaagctgcaatgatcaaagtggattatccaaataacaacgttttgacct

SEQ ID NO: 101716 - DNA, 274 bp, Glycine max
  Clone ID: PAT_MRT3847_62863C.1
gttatatgctatctgaagatagagacgatgatgtagctgttgaattgcattctaagcttctaaaggagttcccaagagatctgctttctctaaagagagcacaagtcttatgcttctacatgggtctgcctggtctttctttatctcttattcagcagattctgcctcacaatgaaggagaaaattatatataacgcatgcttgcttttcctttgttggagcttggacggatggaggaagctgaggaagctgccaaaaggggatttgaaatcaa

SEQ ID NO: 101717 - DNA, 224 bp, Glycine max
  unsure (1)..(224): unsure at all n locations
  Clone ID: PAT_MRT3847_62864C.1
gccatgacccaaaccatgtcaggcccaaatgacagctggctccaattctacaaccaaaattccacaccttcaatccctganctcaccgtgagtactgctaatgttaccactactactatcgttgcggccacgagtccttcacaggacatgttgaattcgagttcatcaggcccgacccatttaagcccggaaggcgcgtggcgaagccacccgccgtcgctccc

SEQ ID NO: 101718 - DNA, 378 bp, Glycine max
  Clone ID: PAT_MRT3847_62865C.1
gcacgcgtacctcgcctccgaattcggctcgtggctggcgcgaggctcaccttggttcgccgctgatatgcactcgatggtctgactatggggggaactatggccaatgacgcacgttcgctcggacacgctatgcactacgacatatgctgggagcactgatagtatgacgacgagtgctaccaagcggacatacgatcaccacgatgaccccagtggacctagctacggacatgcagtcgattcgctggcatacataggactgttccttggccaaccactgatcctgacagtgtatgcccttgaggatacagctcaattgagtgcgctaaatcagctggccgccaaagtagaataccatgacccgttgcaagcggc

SEQ ID NO: 101719 - DNA, 287 bp, Glycine max
  Clone ID: PAT_MRT3847_62866C.1
gcacgctcgcaaactagctggtatcggcgaagacattatagcctggaattttggagggccaaaaaactggtttaattatggctatcaacgatcatggcgcaacattaggttctgctgtgatggtcaagggtcctgaggacagaaatgttgaagggaagtgaccaaaacttgaagaatctggcattgtaatgatctattgctggtgcaagatcgatcttctacaaggaaatgctttttttcggggagagggatcaggagacagtgtcatcaaggtgtttgtgctggtg

SEQ ID NO: 101720 - DNA, 177 bp, Glycine max
  unsure (1)..(177): unsure at all n locations
  Clone ID: PAT_MRT3847_62867C.1
gaagatcattatttagggagggcttttcctaataaagccgattaaaataaaggtaacttattatagctacaaataatttttctgaatcaacatctacatgaagttggcaagaaaggatcacttanancttattcttttgaacaacaacataatattcatcttccatttttataaatt

SEQ ID NO: 101721 - DNA, 275 bp, Glycine max
  unsure (1)..(275): unsure at all n locations
  Clone ID: PAT_MRT3847_62868C.1
gtctcttggacgtcttggatcaactatgttaactatgtaaaagaaattaataagtgtacaaagttaacatagttgatccaagacgtccaagagactgaaatcaactatgttaactttgtacacttattaatttctttacatttttttgcaananancnacccanggggnggncccngnttagtnannnggtngcnccggggaattattncgggacggnactgcaggggtncccannnccccccagaggnatncgttncaanactgggggnaannc

SEQ ID NO: 101722 - DNA, 266 bp, Glycine max
  Clone ID: PAT_MRT3847_62869C.1
tttttgttttttcttattttcttttttggttggggcttattactaacacgttgttgttctttttttaattactgggggaaaacaaacccacacgccgaattgttttttaaattctccaattttggtttccccccaaaggaaatgccaaagccagggtttaaaaaagtttactcccttaaaatcctgctttttttcccaaagggaactctattcaaaacacaaaatcgtgttctacccaagtttctgtgtttaaagggcccccccct

SEQ ID NO: 101723 - DNA, 384 bp, Glycine max
  Clone ID: PAT_MRT3847_6286C.1
tcggggaccggttgtttggagcgactgcaccaaccattcataagaacaacgagacgaagcgagaggccccatggctggataagagatatgtcttgagacacggcgcccgaaacaagcctatcgacattcgaatctggccgcgaaggaaacacccctctggatgcgctaaccgatcaccgacgctaaacaagaagcgtgccaatgaacaggacgcctcgacaggagccgttgaaccgtgcgacatgcaccaggaccagcaaggacatggcgttcctagagaacacagacaacgccttcgtaaacaaggagaagattgagcgatacacacgccggaagatcggattcaactgtcatgatggtgatctagatgctaagacacgccct

SEQ ID NO: 101724 - DNA, 278 bp, Glycine max
  Clone ID: PAT_MRT3847_62870C.1
ggaagggagctgtttgaacatgaacccaagcattgacattcagacatatactatgctcatgtcccgacaagtccatcatgctgtatgaggatcgatccaaacgcacattttctttaaatctgatcaaccttgttcagtcctcactcacggtgtgcaccactctcattgcccgtatgcagaagcaattgaagccaaactggactactgtgttgcctctagaggtggaaacattctcgtcgctgacagttatgttgatgatgataaacacgtcttctact

SEQ ID NO: 101725 - DNA, 251 bp, Glycine max
  unsure (1)..(251): unsure at all n locations
  Clone ID: PAT_MRT3847_62871C.1
caacaataagaacagaacaagagttaagaaacagagcatagagtgatttcgttggtgnnttnatgggcgggacacccccccatctgccacacgacaaagcgccagatatacacttcttctgctcctatctcaggccgatgcttaatggcacgtgtaagctcgtgaaatatcgccttggtgctctcacccatctatctcgtatgcgacttggtgacgtagactgttacatttctctgctttctctcactctc

SEQ ID NO: 101726 - DNA, 148 bp, Glycine max
  Clone ID: PAT_MRT3847_62872C.1
tactaataagtgctagtggtatgattgaaaatgcatgtattttcttgtaatttctaatatacggtgatttattggtattcaacctagttatggctattttgggacgagtaagttattgttatgacttgttttaacttcttgtatttcc

SEQ ID NO: 101727 - DNA, 270 bp, Glycine max
  Clone ID: PAT_MRT3847_62873C.1
ggaactttatattcagctgcaagagaccccattttttattctcatcattcaaacattaataatatggggtccgtatacaaaacactcgggggcaggaaaaaagattttactcattcaaatcaattaaaatctgcgtttctcttctacgataaaaacaagaaccttgtgcgtgtgaatgtcaaggattctcttgacactataaaactatggtatgtttaccaaaatcttgacattccattagtaaattctaaccccactccgcttaaatca

SEQ ID NO: 101728 - DNA, 332 bp, Glycine max
  Clone ID: PAT_MRT3847_62874C.1
acagctactatcggggccgccctttttttttttttttttttttttttttttttttttcccactttttggtttgtaacctatatcattagccgggggatacctttttgaaataaaatgccattttatttttccccaatccgggcggttatcctcagcccctgagaaggggtaatccccccacccttccagggatacacaaggttggccctttgcccaaacgaccccctacaatgatccattagaattggggcttttttttacttaaaaaaccccttggttggtgtgcccttacacagtagaggggggcccagaatttctccaaaaaattttaa

SEQ ID NO: 101729 - DNA, 492 bp, Glycine max
  Clone ID: PAT_MRT3847_62875C.1
aaggacaaaatatcgatgtaattattggtgtacaactaacactgcccaagcaaccacgaaaagatactttcactgatacaattaaaaaaactgttttgaagggttccttcacacaggttttacaacttttaaatctctaataattatattaattacattttattgatacaacattcatgagcataattttacgggattttgaaaaactaagcaaaccgcccctgaaagcttgaaggagtcaaatcaaaccccctttttggggcatttattacatgccatcaaacactgaagttccatttttccttacaacttttttttgggttcagtctagggatatggccaaccccaaccacaagattttgacccacaacataaatttgacaatcacaagctttcacagaaaaaggcttgcgtttttgctcgggcaaaggaagcccttttatggcttcccaggaatcggtttcaggggcataaacctttagcttcattttt

SEQ ID NO: 101730 - DNA, 435 bp, Glycine max
  Clone ID: PAT_MRT3847_62876C.1
ttttttttttttttttttttttttttttttttttttttttttttttttttttttgcaaccaacatacatacacattgggctacgagggaaagtacattccaaaagacatattctatcatggaaatattttttcccccaaaaaaagtaccgccgagggaaggcctttagcttcctttggttgctctcctcgggaattcctttttacttcccctttggaatttttttgggggcccagctttatttcaagggtggattccctgggcaaaagcctgggtaaaaacctaaaaaaaaaccccttatgaaagctgacaagggggccctggatggaccctttttaaaggttggccctttacctggttgggaattaaacccaagggggaaaaaggggatgaaggataaaccaattttttaaaccaaagggcgaaggacttcctt

SEQ ID NO: 101731 - DNA, 214 bp, Glycine max
  Clone ID: PAT_MRT3847_62877C.1
ggggtacggaaactctttataactttaaggtatgtgctgtcaaaaaaacttaatgtcactcttgctaaactaatgcaatgcacgggaggatgattttgtatttcaatgacagaccaataacttgtggtcgcatagaaaaaggctgtgtcaggtttactattgctcgaaggagccttgattcaaagaagaatgctattctcactaatctgcatat

SEQ ID NO: 101732 - DNA, 237 bp, Glycine max
  unsure (1)..(237): unsure at all n locations
  Clone ID: PAT_MRT3847_62878C.1
ctttaaagttacatagtttttcattgttttacttaatctacaatggctgcttcaacaatgactctctcttcatcatcattggctggccagctatcaagctgccccctccacccctgagcttgagatggaagggtagctgaggaaacagctccanactgtttctcaggaagccatggtacggccagaccgtgtcaagtactggagccatctctggtgagccccatctatctcactgtg

SEQ ID NO: 101733 - DNA, 523 bp, Glycine max
  Clone ID: PAT_MRT3847_62879C.1
tcctctagacggccgctttttttttttttttttttttttttttttggaacacaaccccaagctttaattaaggtaaaacttaaacaaaaaagaaagcgtacatttcaaaaccaaaaaactttaaaaatgccttgatactacaaactgaactacaaccatatttactcaaacattcctaaaaaatcctaaaaaaaaaactattctaagcaacctccacaagtgacccattaacaacattaacatccttaacaccattagaagggacttcattacatgcttcgggagtaatcccaacaaggttaacattttggaaatataccagaaggtgactttaaccacccccactgttataactgaaattatacgaacgagtaccatttccataacttgcaccataaactcttgggaaacccccatatgaaggaggaccttacaaataaatgttttttgccatctgagccacattaacaaactaccagacaacatcattttgagccaacatattaaacataacgggggggac

SEQ ID NO: 101734 - DNA, 847 bp, Glycine max
  Clone ID: PAT_MRT3847_6287C.1
tccccacgcgtccggtaaacttgtagagattcacactggtggcattattgtagttttattagattttggtgatttcaattcttggttcattgaatgatgagatgtgaatgactgcacttgcattaaccaaatcctgtcatatttgcacaggtctttttccttagggtgtagtccctttttttttctgaatgataaaataagactaacatttttttgtcatcagtggctgagttctctgctgcttttatctgtaaatgcgatgactcgctagagagaattaagtccatgcctttctatctataggttgaaacttgcttacttagggttgtccatggttggattatctgggcaatggaatgccacatatactctgtgaattagtagggcaaatctgtactaatgcatgttaatgtgacaattttcctttaaggctgcgaactacttgaacatcaagagcctgctggaccttacaggccagactgtgtgcgacatgatcaaggggaaaactcccgaggaaattcgcaagacctttaacattaataatgacttcacccctgaggaagaagaggaagttcgtcgggaaaatcaatgggcatttgaatgattttgttgagctcataaaatatgaatcaaagatctgccatgtggatttatgctatgcttgtttgtttatcaaagatcttccttgtagatttgcctatgctatatacttgcttgttttatatttaagactatttctgttgtcagaattatcttccttcatgaacttaagagcactttgaactgtaagtaatagttatgatgaggggtgcgttgattcaaaaaaaaaaaaaggacgagcgctgct

SEQ ID NO: 101735 - DNA, 361 bp, Glycine max
  Clone ID: PAT_MRT3847_62880C.1
actctctaactgtagctcgtgtatcggctcgaggagaatacgacagaatgtgatccaaacagttgtttttgtattttgaaacaagggggctttatacccttggtagctttccacacatatattagatgattttgggactttgtgaataacttcccttcatttatctttttacacaataattttgaacttcactctatcatggatgatggggttgattcatattaatttgtttggtcattgagcagcttgaggatgaacatatggtctttgagcatgaggagttggttctcagatactgttccagatatgtggggttctggttcttgacatgtgtgtttatgtttttgtgagatgctcttaa

SEQ ID NO: 101736 - DNA, 494 bp, Glycine max
  Clone ID: PAT_MRT3847_62881C.1
ttccaggaaggtttcccgtcatcactgtatgacgtcctccttctttggggggggggggggggaatatctaaaaaccaaacaggaggaggaccaggaaaggaatgataagaagcatactaggggggaaaaacccagcataacgttaacggcgtaagttgaggcgggacggggtggtagtatcaccaacgccaatagcacagtccgtaagcaacaaacgtgtagagagcgaattactaccgttattattaagcacacctttaatttacgaaatttaagtagtccgttatgggttagtcattaacgtacctttaaaacattggatgcccggtagacaagtactacacgacgttttattggtcacgagcggccgttttaattataaatttgattactcggcctttaagtttaatacggctgtttggtggcccagttattagccgtctagatatacgcaataatatgcaaaatcgtaatataagtgtttaaatgatgtt

SEQ ID NO: 101737 - DNA, 619 bp, Glycine max
  Clone ID: PAT_MRT3847_62882C.1
tccggggtgtctctatctcttgactctctctctctctctctctgtctcaattctatgtatgatgaagatgaagctcaaacttctcaaatgctgcataagggaattttataaattcattagaaaggtcagtgctaattttcccaattatgcaatattggttacatgttgttcctcgcatgaaaagtcacactcatacgtacccaaagatgtcccaaaaggtcacctagttgtctatgttggtgaggattgcaagagatttgtgatcaaagtaggtatgctcaaccatccactcttccaagccttgctggaccatgcagaggatgtgtttggattcaccaatgattctaaactccgtatcccttgcaatgagaacattttccttcttgttcttcacaatgctggtgatcttgtctaggatctgaggctagctcttcaactgtttgtagctagctagtatactagcaattttccattctgagtcatatagacaaattatgatatatagctattggaagctagacgtaactagctttccaggaaaagtttaatttgtacattttgtacggtgatttcacattattaataaatgaatggtgatatttggacacgtctattatgg

SEQ ID NO: 101738 - DNA, 894 bp, Glycine max
  Clone ID: PAT_MRT3847_62883C.1
ctaaagtaggaaataatcgtaggcctacatatcgctgtaagaagtgtcgacgacttgttgcattgcaagaacatgtcatagaccatgttcctggtgagggtgagagagcctttgagttccacaaacggagaggtggcaaccctttcaacaaatctgatgaatttgagtgttcatccatatttattgagcctctacggtggatgaaagctgttgaggaaggtgcaatggagggaaaactgtcctgtgcacattgtgatgcccgtttgggatacttcaattggtcaggcatacaatgcagctgtggaagctggatcactcctgcttttcaactccacaaaggccggatagacataagccccatgtaatcatttttgcgtcattttatgcataagggatgcctcctatatttttgtcattgttctaggacttgtattctgcccgaattctccaagctggtccactgccaacaatgaaattgtgtaaggaaggattggagtcttgctctttggacatgctcaacttttccaagctgaactaatgcagttatatggaagggaggactattatagttttacaatttttgtgcatcttccagaatgactttttcgagctatgattggagattattactggtttctagtaaatggtgaggcatgagttgggattccaatattagggcttgttccctcgatgattttaccgtaagcaaggataatgcttttttctacaaaagaaaatgagtgttctccattgtacgtttttctattattttcaatatacaaatttttttcttcgctgtgaagaaattggttacaagttgaaacagacacaagaatataaatccaatgtggatgaatacatccacttgacctgaatgaagatatatttcttgcc

SEQ ID NO: 101739 - DNA, 681 bp, Glycine max
  Clone ID: PAT_MRT3847_62884C.1
cttgagtttcttcctcattcactgaactttttgtgaatatttttgcatttttatcgtattatgtttgccaagtttttgtttttgttttgttttaacgtgtttgtgagttttctaacatttttcccttccttaatggtgttttattttgtctgcagaacaagatgcaaggtatcatgcgcatggatgctgccctggacgcaatgcgtccacttggatttaggacacaactgattctacgaacggttaatgagcttctcgatgttggtatggtatcaatctggctaaaggtattctggaacatcactcgaaagggatcctagattttgacaaaccaaggaaattgctcgcagattttcgaattggcaagctcatcacaggcaatatacataggttgcaggacatttattggttgcaggttatgtgtttgatcaaatgtcaagatgatatttttgggcatgtcatcaggaaaaagttcagtgacacgtttccagggatcacctgtacctgcacgactaatggagggtggtctgattgatgttcaacaatttttactcaaagctttgcttctataagaattccgacaagaaataattcactctcataatatccggctgcaccaacggggaatgacatgccgcaatggttcttggcatgccaagaacagcaatcactttaaacaaa

SEQ ID NO: 101740 - DNA, 389 bp, Glycine max
  unsure (1)..(389): unsure at all n locations
  Clone ID: PAT_MRT3847_62885C.1
cggctcgagaaggattgttagttctgagctatctgtctttcaaacaaaatgaaggattggtaattgcggtaagaaggtataatgaagtaatgaaccatacttgtaaattgtcaatgaatccggaacaacgatatgtccattttgtgtggaatattataaatctgcctccaaaggtacctgataaataatatctctgaatatttgttctttaaccgtgtcaaatagcgtcacatggtctgatccatgtagggtaaggctcttgtagttgttgttagtgaaaagattttacactataaaaaaatggatagaaatcatcagatatgattnttaaaataattgtatagaaggcaacaatatttaattatatgtcattctattattggatgaca

SEQ ID NO: 101741 - DNA, 643 bp, Glycine max
  Clone ID: PAT_MRT3847_62886C.1
ccacgcgtccgtttctcccccctattttgttaccctcttgagtttcttcctcattcactgaactttttatgaatatttttgcatttttatcgtattatgtttgccaagtttttgtttttgttttgttttaacgtgtttgtgagttttctaacatttttcccttccttaatggtgttttattttgtctgcagaacaagatgcagggtatcaggcgcatggatgctgccctggacgcaatgcgtccacttggatttaggacacaactgattctacgaacggttaatgagcttctcgatgttgggtggagggaaaaaaaactagtcaatactaaaggcatgttaagggctgcaggtatggtatcaatctggctaaaggtattctggaacatcactcgaaagggatcctagattttgacaaaccaaggaaattgctcgcagattttcgaattggcaagctcatcacaggcaatatacataggacatttattggttgcaggttatgtgtttgatcaaatgtcaagatgatatttttgggcatgtcatcaggaaaaagttcagtgacaagtttccagggatcacctgtacctgcaggactaatggagggtggtctgattgatgttcaacattttcactcaaagctttgc

SEQ ID NO: 101742 - DNA, 202 bp, Glycine max
  Clone ID: PAT_MRT3847_62887C.1
aaaaaccgggtgcacccacgcgtacgataacacaaaataatttaactctggcttttaaatgattcttcaccagaagaacaaggggggtgtgtatatgggtgccgcgggctaaccataccatataatgtgatttcaagcatttgtcatattcctcactagctttcacacacaacatgtttgataatacatgctcgagatattt

SEQ ID NO: 101743 - DNA, 1543 bp, Glycine max
  Clone ID: PAT_MRT3847_62888C.1
gtcccacgcgtccgcccacgagtcccaaaacgcgtccggtaccctgaaactgaacacaagctttttgttgggaacctgtcatggtcagtaactaatgagatattgacacaagcctttcaagaatatggaacagtggttggagcaagggtcttgtatgatggagaaactggaagatcacgtggctatggtttcgtttgctattcaacacaagcagagatggaagctgctgttgcagccttgaatgatgtggaactagaaggacgggctatgcgtgtaagcttggctcaaggaaaacgtgcataaggttaatagaaatttgggaaggcttagatgttcaacaatggtgccatagaaatgagaagaggatgcacttgatgtaattttctgaggaattccttttcatttcttgtggtttataaattatttactcccactttcgaaggatctgctgacccgaatgttatattttgtgcatttttgctgatactaacattggcctatttattgcctccttcttggctcaccgagccatacattgaatcacatactctattctgtgtaacatttgctatgaaataatcagcaaaggtgtaaagtttgtaccatattgaatacaaacttcaaaatacattttctttttgctgcaattttataaatgggtaacttgaacatactgcagaatctataatgctagtatgctgaaataattgtttatttgattcaatatataccacattttaaacaaattagtgtactattgtgcatgcacagcttttaacatcatgtggttacatttaaatctccagctatggacaatgaaattgtgaattgtattgatgtggaatctgcaaaccaatgtatccaaactccatgtgattgccagcacaaatatatttttttgtttaaagtgattgctgttcttggcatgccaagaaccattgctgcatgtccttccccgttggtgcagccggatattatgagagtgaattatttcttgtcggaattcttatagaagcaaagctttgagtgaaaattgttgaacatcaatcagaccaccctccattagtcctgcaggtacaggtgatccctggaaacttgtcactgaactttttcctgatgacatgcctgtaaagagaacacaataaaaattaagaccacatggagtgcattgttctcatgtaatttgaatccctccttacatagtaggcaactctaccaaaaacatttgatgatgaaataccataaaacacaatcatgatcagtgaatgtgaattatcaatctgaatgattttaattaatcaaaaatgggaaaaaaaaagttatcctaaaatgctaattagaaacctgcaacctatgtatattgcctgtgatgagcttgccaattcgaaaatctgcgagcaatttccttggtttgtcaaaatctaggatccctttcgagtgatgttccagaatacctttagccagattgataccatacctgcagcccttaacatgcctttagtattgactagttttttttcggacgcgtgggcggacgcgtgaa

SEQ ID NO: 101744 - DNA, 2808 bp, Glycine max
  Clone ID: PAT_MRT3847_62889C.1
cgaggcggctgcgagaagacaacagaagggggatcaaaatcacttgtaatgtaacactttgagtggcattacatcacaaccaccgattcttttacggctgcgagaagacgacagaaggggatcatcatatcatgtcttatacaactgatgaagtgatcaaattacattgttgcacttttgagttgcattgttgcatcaccgcaagtccacaacatggctgccactgccgctgcaggcatagcttccttgttttcttcttctattaacagtgtcaaatgtcttcgttcctccaagaactgctccattatagacccccttataaccacagtgccctcaaaccgtggcatgtttgtgtcacacttggtggaacctttgtccattgggggtgccattaattcgcacaagttgtgggggcctagaatttctgctgctgttgcacaagaagaggctgttgttgtggctgatgatgaggtagatgatggtgctggtttagttgaagaagagaaagtggaggagaatgaaggagaagtagttgcagaacaagactctgattcctctgccaccaagctttattttgggaatttgccttatagtgttgatagtgccaaacttgcagggctaattcaggattttggtagcgcagaactaattgaggttctttacgacagggatactggaaaaagtagaggctttgcatttgttacaatgagttgtattgaagactgtaatgcagtaatagaaaatcttgatggaaaagagttcctgggcagaaccttgagggtgaacttctctagcaaaccaaaaccaaaagaacccttgtaccctgaaactgaacacaagctttttgttgggaacctgtcatggtcagtaactaatgagatattgacgcaagcctttcaagaatatggaacagtggttggagctagggtcttgtatgatggagaaactggaagatcacgtggctatggtttcgtttgctattcaacaaaagctgagatggaagctgcccttgcagcattgaatgatgtggaactagaaggacgggctatgcgtgtaagcttggctcaaggaaaacgtgcataaggttaataaaaatttgggaaggcttagatgttcaacaatggtgccatagaaatgagaagtggatgctagtatacctaccatgatgcagttgatgtactttgctgaggatttccttttcatttcttgtggtgtataaattatttattcccactttcaaaagatctgctgaccagaatgttgtattttgtgtttaacatttttgctgatactaacattggcctatctattgcttccttcttggctcaccgaatcatacattgaatcacatactctattctatgtagatatcacaatataaaaaaagtgatacgcaggaatggactgacccttgcttgaagggaagagaaagaaggcgagatccgatgagggacaaaaaagcatgagaaacggagttcacaacgttacagggaaactacgtcactgcctgcaatcttaagtgttcaattaaaattcaaaatctttttttttcttgtctcaatatatacctttttttaaacaaagtagtgtactattgtgcatgcacagcttttaacatcatgtgtctacactcaaatctccagctatgtacaatgaaagtgagaattttattgatgtggaatctgtaaacccaaagctccaagctcaaattgtttaccatcacaaatacctttttccattagaagtgatggctgtggtgatcatgccaagcttgtctgttgcatttccttcgatgatgtggcagtaaagagttaagaataaaaattaattcttgcatggagtgcattgtagccatgaatttgaatccaactgttcatagtaggtaactccaccaaaaatatttgatgatgaaatacgataatcctgaataatgttcattgagattttaattaatcaaaaatgggaaaaaataagttagcctatagtgctaactagaaacctgcaacctatgtatattgcctgtgatgagcttgccaattcgaaaatctgcgagcaatttccttggtttgtcaaaatctaggatccctttcgagtgatgttccagaatacctttagccagattgataccatacctgcagcccttaacatgcctttagtattgactagttttttttccctccaccctatggtataaaaataatcaggtaaacataagctcatcaaacacgcgattctaaccaaaaactttgcccaaatccacacacttaatccaatttccatagaacattgcatcataaatagtgcatgcacgacaatcatatagagtatgcaaacctaggctttttggtccctcaatccctaacaacagaaattaacttaaaatcacaatgaattaagaaaagacttaaccaacatcgagaagctcattaaccgttcgtagaatcagttgtgtcctaaatccaagtggacgcattgcgtccagggcagcatccatgcgcctgataccctgcatcttgttctgcagacaaaataaaacaccattaaggaagggaaaaatgttagaaaactcacaaacacgttaaaacaaaacaaaaacaaaaacttggcaaacataatacgataaaaatgcaaaaatattcataaaaagttcagtgaatgaggaagaaactcaagagggtaacaaaataggggggagaaagtgcacgaaagtgtgaaatgaaggaattaaaagctgttttagtgctttaagaaagagaagacgtgttgttgttttggaaaaaaagcaaaacacgtgttgctgctcgagcc

SEQ ID NO: 101745 - DNA, 463 bp, Glycine max
  Clone ID: PAT_MRT3847_6288C.1
aaacaccaaaaaaaaaaacttgttttattgaattgattaacaaactttaccgggggattgctcaaagcgggcctttttttccgtttttatttacaagcccctgccccaaaatttttttcctgaaacaccaaagcctattttaaacgtggaaacagagcttgataaactttcctgggggaaaaaggagcttcccaaaccccattaggatttggggtacaaaaaattttttggggagggggtggggtataaaagaccggcccactaggaataaaacaatgcttgattacggggacaaccccactttttaagaaaaccccatgtggttcccttgcggtttctgggacatagtccctgtgaaaaaccttgacattttccccaatctgagcaatcttggaaaaaaatgcccttttgaaaaaaaaagccccgcccttaccaatgggaaccctgcctttggcagccaaaa

SEQ ID NO: 101746 - DNA, 765 bp, Glycine max
  Clone ID: PAT_MRT3847_62890C.1
aattcggctcgagatcggcggtagcgctaaccccaccatcaacagccagggcaaccgttacacggctcccggagaccctgatgccaaggaggtgacgaagcgcgtggacacagacgatagagagtggagtggttggaattggaggacggaaggggacataatggtaaatggagcgttctttgtaccatcgggtgctgcggggcagagtggccagtaccaagaggccaccagtgtgcaagccaaatccgccgtgcaaattgaccagctcactatgtactccggtgtcttgggtgatcccagggataatggggatttatatcccggcttcaacggcggtgggaccgtgaccggagccaccagcaaaggcaacactgacgggtccagcagtgacgatgggggggacttcttcgggatgatattcagaggtggcagcagcagcagcagcagcagccaagcagcgccaccatcgtccgttctatttgtttcaatctttttgtctcttttaattatttttgttttggacactaccaccaaccatgcctttttattatcattactatgatcacacaattgggaaaggggaaaaacaaaaaaactcccttgatgcccaaaaaattatcaaaagcaaaagaatgatcaaaagtttctaaaattcgtttttaaatttagaaactaggaatcgtgtttaggtatgtacacagctcttcaaagttattattaaaatctaaatagagctaggtgcactatgattggtcattgtctctc

SEQ ID NO: 101747 - DNA, 1098 bp, Glycine max
  Clone ID: PAT_MRT3847_62891C.1
gacgcattaacgtgggttgtcaccaacatagtaacatttaaccacacctgtggccaaatgacatcctccaccttattgctttgctctattgctcttctctactctgcatcatttggagctgaagcatggacctcgccctacatacccgtctcttcgctcatcagcaaaagtctttatgacaaatttttccttcacaaagatgacactgcatgcccagccaaagacttctacccctacgacgccttcattcgtgcatccaaatccttccctgcatttggtaccaccggatgtttagcaacacgcaagcgtgagattgctgcgtttctcgctcagatttcccacgaaaccactggcggctgggccaccgcacccgacggcccatttgcatggggtctctgcttcaaggaagaaattagtcctcagagtaattactgtgattctactaacacccaatggccttgtttcccaggcaaaagctacaagggtagaggacccattcaactttcttggaactacaactatggtccagcagggaaggctttgggatttgatgggctgaggaacccagagattgtggcgaacaattctgtgatagccttcaaaactgctatgtggttttggatgacagagcaaaagccaaaaccttcatgccacaatgtgatggttgggatatatgtgccgacagaagatgacatagcagcaaaccgaacagcgggttatggtttggtgactaacataatcaatggtggactggaatgtgggattcctggtgatgcaagagtgaatgatcggattgggtttttcgaaaggtatacgaagttgttcaacgtggacactggacctaacttggattgtgcatatcagaaacccttctaactctttcgttatgtttttgttttgtgtttttcttttcctttaatttaatttttttttctctgccaagactttaataatgtattgaaagaaagcaaatactacctgcttcatggaattttcctaatgtactcaaaacagaagttgacaaacaaagttttatattattcttgatcgtgtagtgccaccattgccggaggatattctatacacgttctcagatgg

SEQ ID NO: 101748 - DNA, 206 bp, Glycine max
  Clone ID: PAT_MRT3847_62892C.1
cggacgcgtgggcggacgcgtgggtaatttttgacgtgaatctttcaattgaaagggtagctatttgaaaggtatagctgatgttaaggtgcaaagtctgatgttaggtttatctcaagatttaagacagaatttctcaaaaagtgaacatttttcatgttttgtacaagttttgaaaatatatttttaggaattgttgactcgta

SEQ ID NO: 101749 - DNA, 417 bp, Glycine max
  Clone ID: PAT_MRT3847_62893C.1
aaaacaaaaacttggggcctttttttttttttaaggaaaagggtttgggcaaaaatccatgacaattgttttaccccttcggaaagaattttgtttcaccgggaaaaaaatggaaacccggctttctgaaaccccaaaagggccgttttttaaaaccaagttgattttccctttcaaaatttttttggaaccaacgccccccgtttaaaagaaaaccggaaaaattcttttaaaaaagggggggaaaacaaacccgggtgcccattgggggcccggcccccataaaagttttcccccccccctttgtggcaaaaatgggtcagctttttttcccggtggagcaaaccaaaattttgttgttgaaggcccccaccattcaatttttcccagggcaaaaaattccccaaaaaaaccaaa

SEQ ID NO: 101750 - DNA, 172 bp, Glycine max
  Clone ID: PAT_MRT3847_62894C.1
cctacgcgttcgcccacgcgtccgtctgtcacgaatgaagcaccatacatatttgtcatccaaatcctgtgctggaacgccggagtggatggcgccagaagtcttgagaaatgaaccagccaatgagaagtgtgatgtgtatagatttggtgtgatcttgggggagtcgatt

SEQ ID NO: 101751 - DNA, 378 bp, Glycine max
  unsure (1)..(378): unsure at all n locations
  Clone ID: PAT_MRT3847_62895C.1
attcggtggccccaaatatatatctatggcagttgtatattcngtggccgcgaaatgtacaattgccatggatatggggacaactcaatatataatggctgaattacttgtaggacagccctcgtttcctggagagagtggagttgatcaactagctgaaatcatcaacgttttgggaactccaaccagggcagagacaaagtgcatgaacccaaattatactgaatttaagtttacacatataaaaccttatccctggcacaaggtctttcataaacgtttacccccagatgcagtggaccttgtctgtaggctctttcaagtacttccccaatttgagatgcacctgattgccagcttgcattaattcattttttg

SEQ ID NO: 101752 - DNA, 468 bp, Glycine max
  Clone ID: PAT_MRT3847_62896C.1
taaacttcatgtttctccatttctatgattttccaagctgaagtattttttttcactcttttttaattcaatccttttggaacccttgtttttacttttttacaatatggttgcatggtgaaagttgtgatcagctgagcacttctaattttccttgttagtgtcataattaattttcagcgaaatttacgaagtatccaatccaaaactaaatataataaatattcaaatattgtaaaatatagattttcctctgtgtaaccacacacaaaaaaatagtagaaatgtgaatgatttactgtttgaggaatacctttttaagtttgatttttaaaaaaatgggtacttggaattttatgatacaatttttatcatctgtttgggcctgttcttcaactgcctctgaaaaggatttttgataggaggatattgattaaatatgtgactttcctattgtcaataatatag

SEQ ID NO: 101753 - DNA, 219 bp, Glycine max
  unsure (1)..(219): unsure at all n locations
  Clone ID: PAT_MRT3847_62897C.1
ttattttttttttngaccccatgcaaaagacggggaacttccattgataataataagcatattctccacgggctaaaagaaggttttgctcacatttttggatgtaacatcaaggaaaggcttggtccaaggatgcatccaaacaggagttaaatagaatgaatcacatgccattctatttccaggggaaaataaaaattgttccttctactatggtct

SEQ ID NO: 101754 - DNA, 289 bp, Glycine max
  Clone ID: PAT_MRT3847_62898C.1
atctactgtctttcttagcataataagctattacctccggctacctacgttgaaataggactggatccagcatatatacgtgtagtatctatagctacagtgacacaataaggcactgcttctgtatagggtgatagatgctcaattgatgaacacccatgacaccgtgtttataaacaaactctcgatgttggcagcaactactgagagtgagactcccctgatgactagtgctgagctcactgaggctgaaggtgatatgttactttattctaccacacttgtatat

SEQ ID NO: 101755 - DNA, 329 bp, Glycine max
  unsure (1)..(329): unsure at all n locations
  Clone ID: PAT_MRT3847_62899C.1
tagatgcacgcgtacgtaagctcggaattcggctcgagagcaagttgttttttttttagagaaganaagcaataaatcaatcaatcaaatnattcntacattgttgttacnatnggaatcaacgttncagaacanagattctgaanggaaangttgcncnaannaacggtggnnncnccggnanngggnttccgaatttncaacccnaatnnggaaaaantggagcctggntcngnntaangggccgnngaaancaagttnttcantccngcngctntcngttccccnantcccctggnaattcccgnggttgggtttganggggatgc

SEQ ID NO: 101756 - DNA, 397 bp, Glycine max
  Clone ID: PAT_MRT3847_6289C.1
tctttcatgctcacacacctttggattttcccactgcccctagtcacccactagattctactgcaccccaccggacccaacattgaactaccaatccgcttcctacttgccacaaatgtgccctacacacgtggatcctaagatcgccattactattgccccatcacctcatcaccattcccatcatgtctattaccatatcattacacgaggactgggcctcttgacctatgaccaaatcctctttactgacccaaggtctcagatcaccgataattattttgattacactactactgctacaagctacctctttgaggatgctctgaccacctagtgtctacttcgacttaacactgccagaaacgggaaaattcgcaccgactgcttagtacta

SEQ ID NO: 101757 - DNA, 747 bp, Glycine max
  Clone ID: PAT_MRT3847_628C.1
gatggaagttgagaatgcaaaactgaaagctgaacttgctggtagaatagctttaatatgttctctctgtcctgagttagagtacgagtcattggatgatgaaagggtgaataatatattgaggaatgccgcagagaagacacaagaagccttgcatttgaaagatgaatatattaaacatgttcaatccatgcttaagatgaagcagatgctatgcgtgtcctatgagaaacgtattcaagaattggagcagaaattgtcagatcagtatgtgcaggggcagaagatgtccagtgtaaatgatgcagctgaccttccccttgtggctgggaagacagataattacaagtcagaatctatcagtggtgaagccaacatgccttgcatatctacttctgagcccatggatgaggtttcatgcatctcaagttccttggatgcaaaacttggtttgttcatgttcacagagcatactggtaaagcattagatggggtggatgaaaacatgttggattcctctggagttcagaacccacagttggattcatctatgatggagcctcatcgcgaagaagcacagagtggtgataaagataaaaaaggcaagataatagtacaattgggcatgtcactgacaaacagttctactggtgagacatgcctgtgtacatgatcttgtaccctgtgactcggcaagtttgcaagacttggaatccaaagtaaatgatgaaaaagtgttggaactac

SEQ ID NO: 101758 - DNA, 463 bp, Glycine max
  Clone ID: PAT_MRT3847_62900C.1
cttggaggagccttccaaaacataaacctttccctctcttacctcgcaaatttcttctatcacatacaagtaccttatgggtatggatattatgaccaggggggatctccaaagttttccatcaaataatcacgcgatgagtttcaatacagcacatggatgtatcctctatgttacattctgccgggtgctatcaataccctgtgagtcaattccatgtggggtgtggcccttttgcatgaaagatcaaatcttgaagttcaactgataaataatgcacttcaattctgagttgttgttgttgctttgatcaatggacaattatggttcttcacaacatgcatatgggtatcccaacccttattcataccctcctcatgatccatatgctcaaccaccatatccatatccatatccatatccatatccatatacccatgcgacaaaccctccttataatatc

SEQ ID NO: 101759 - DNA, 735 bp, Glycine max
  Clone ID: PAT_MRT3847_62901C.1
gacgataatctgacacgtatgctagagctcagggctcaatgaagttgtgatcctatgcctagtaacagttgcagcttgttttcaatcagcaagactagcaaatattaaagcacaaattctaaatgcaataatgaaaacacaatttggtcaaaactgaattgctggtccaattgacagtttgtgtactgacaaattccacggactaatcataggagaaaacacaaagacaaacaaaacttctccataaaaacagtttggccaaaacatccaccacccagtattttgcaatattaagctccaatcctcttttcagatcctaagttctttggttagtaggttccttctgcataaataattgatagctttcagtgctttcctccatgcttagattttgagggtatctttccatatgctttaagcctcgattgcgataattgcaaattagctacttgtcgccttctcttggctttccttgatagataatccgtattaatatttgattcttctgtgtttggtttttgttctccacaacactttttgatgaagttatcttgccagaatcaacctttgacttctttttcttcttatcccaacttgatgcacaaaggagctccttaaccctcatcttcaacatgtatcttttttgtttgcttagtttccattcctcctcccagaaggagcaagctttttaaggaaacatactgattgaagccttgtcattcatcaatagtatct

SEQ ID NO: 101760 - DNA, 401 bp, Glycine max
  Clone ID: PAT_MRT3847_62902C.1
ctatgattaggacctgcaagtcactaggtcataaccctacagctttactgttgtaccaaggcacaccctgcagctacagcaaaaatcaagtctgaattttgttgtcactaggtcataaccctacatctttactgttgtatcgaggctcaccctccagctacagcaaaatccaaggtttaacgttttagtttattaaggtcctgattgaggataatcatgtcatttattttgaaattattgtgatctgtagacctttctgttgtggaatacttcaattccaatagcccctgcagttattgcttcagtttaggaagtttaatttatgcatttttttcaagaaaaattatgttaatctctagttttcttaatctgtgtttgttaatttaggacaatttaaacaa

SEQ ID NO: 101761 - DNA, 222 bp, Glycine max
  Clone ID: PAT_MRT3847_62903C.1
ttgtttttaaacgaagatcaacatctgtgtgggattaattcaaatagaagcattcttttcctcttttactacttaacaaaggatttaattactttatctaccgaatcaagatgaattaataaaactgattgtttccggatacgacaaccacttattcggcgcgcaagaagagcaatagaactctgtcgttgcgactgagcaggttttaaaatgggaaaattt

SEQ ID NO: 101762 - DNA, 524 bp, Glycine max
  unsure (1)..(524): unsure at all n locations
  Clone ID: PAT_MRT3847_62904C.1
cactgagcatcgtctagctatctcgatcgaactgtccaaggtcctgtcacccgacaactaatatggcctacgctatacgggtacattgagcaaatctacaataataacccagcgacaaaaggcaccaaccagaagagttgagccnagcttgcatgattattggccgcggcattagttacccgtgaagataaacagcgcataaacaagaagggcccgtcataagcacacagaatgaacgtgaaacccgcgaagcgaaagaacgggcgttgcatcggcagaagtggtagtgcccataaacgtggtggagacnggtgagacaggatgaacccatgggatgaaaaaacagcaggcatccgaggccgatggagctggcgaagcatggacaagggcaaccgtggaagaaaacacggaggttgggagtacgcgtagaagcaaaaaaaaaaaaaaaccgtccttgtcatgaagcactgtcgtcatttccaaggaaggtctcattcgattgctactcgattattgggtttgag

SEQ ID NO: 101763 - DNA, 284 bp, Glycine max
  Clone ID: PAT_MRT3847_62905C.1
acacggaaaaaagagcggggtggagggttttttttatttaaacttagtttacaacacaatgaattggttccaaaagtattggttttgttgatacaaaatcatgtggtcgaaattcaaggttaaaatcagtttatcaccaccggggtttcaaagaatttaaggccagctttggtccttaactgttttgtaaattggataaacccaaaggaccaaaacaacccttccatgatttattgaaacctggagtttttgccaagacaaaggaaaaagtccttttaaaaatt

SEQ ID NO: 101764 - DNA, 199 bp, Glycine max
  unsure (1)..(199): unsure at all n locations
  Clone ID: PAT_MRT3847_62906C.1
nggagacgcgtagcnnagctcggaatgcggctcgngcaaagttcancatcntacttngntgtcgnctngtgancgcgtnnttcncggnnagaaatcaaagatgccaattccganancgnctnccaaaanctctaaaacgantcgtattcgagcttggcgtcctcatggnnnatagctgttatcctgtntgaacangtaa

SEQ ID NO: 101765 - DNA, 450 bp, Glycine max
  Clone ID: PAT_MRT3847_62907C.1
ccgccttttaccgcaaagaaacccaatgccccccccctccacacacacacacacacggcgacgcagtagctttgctttctctgtcaagtgctacccaccttgctgccggagcctcctttcacgtgttgtcgtaccagtgatttagggtcgcaactccaaacgcacttagttatcataatcatcagttgatcaccaaagaaaaaaaattaaaatttgcaaaagtttggagtagaacaaaaaacccatcaaacaaaaagccacaaatcggataaaaatgtgtgaaccattttggtgtgcagacatcttagggttttaatttttgtccctaattggggcttgagaaatgcgtgatattcaacttcaaaaactgaagattctttttcactatgtttaagaaattccaatttgaataccacagtaaacaatggttattatttgtttggtttgttg

SEQ ID NO: 101766 - DNA, 523 bp, Glycine max
  unsure (1)..(523): unsure at all n locations
  Clone ID: PAT_MRT3847_62908C.1
cttcnntgcgggtgtntattgcnaaagcnctngacctcnnccanaagccgcctgatggctcacatcccattcacanccaaggtcctctacnnnctcggagnggnnaaaaaaagaaagacctcccttctgcgnactggcccccgtggggcataccatacaaatcggcgctggttaaatatactgcncacccgcggccttttttacgctcgataccccgaaagggacggggagggggattctgaaccttggttgtcctacgtagaacggccgaacactctatagccggtatttgacccgcctccctgtttctgcgcttcccctcagccgcacgactggttagcgtctggctatgccagccgtcattcccacgcgctcttggggggcccgctgtgcggcctcttgcgcctgctgtgggggccccgattggctcctgctcgtgcatggggaatgcctccttgccggctttggcgccctgccgaatcaccttctccctggnccctgctcggagcctccctctgttggg

SEQ ID NO: 101767 - DNA, 1375 bp, Glycine max
  Clone ID: PAT_MRT3847_62909C.1
catcccactttgttaaaaatttcacgaaaaaaaataaaataaaaattggaaaaattccaattccgctctcgattttcgatttcggagtttgatagcaacgttggaaggaaaggtgagagcaaaatcgttggaagaatctggtttttgtgtcgtggttgttgttttcgcgatcaaaacgatgtcttcgccggacattgtctcgatattggagaactcgaaggagttcgatcgggtgaggaaagaacaagaggatattctgtcggagatcaacaaacttcacaagaagcttcaagcaactcctgaagtagttgagaagcctggggataactcattggctaggctgaaatttttgtacactcaagcaaaagatctttcagaaagtgaagcaagtatttccaacttactgataaaccaaattgatgccctactgcctacgggtccacaagggcaaacacgaagaagaataggaaaagaaggtaatgagcagaaaaggaaacgagtgaagactgagtcagacatttcaaggctaactcctaatatgcgaagtcaacttgaggcttgtgccagtcttaaaggcgaacaggtagcggctagggtcacaccacgaaatgctgataaggacgagtggtttgtcgtaaaagtgattcattttgataaggaatcaaaggaatttgaagtactggatgaggaaccaggcgatgatgaagaaagcagtggccaaagacaatacaagcttcccatggcaaatatcattcctttccccaagagtaatgatccttctagcgctcctgatttccctcctggaaaacatgttttggcggtctatccaggaactactgcactttgtaaagcgatcgttattcaagaccctcgcagaaggaagaccgaggagtaagtatactctgttaaggctccatgggaatgcttgctcagttctaaatattattaatcacagccatagaaaatcaaatggcatcatgatttgtttttactttctaaacctttggtttaatggaaataaaggggagggaagttaattttctttttatttttgttttcttaaattttaaatagatttttttaacttaaaaaagtaaataaacaataatatatgttaagaaaagtaatttagtaaattctgaattttaagttggtataaaaactttgtatataatttatttatttattttgacacccactcatccaagtaagcaaaaataaatttcattacttaccttattttcatgtatccaaacagcacatcttttctattatattttcttctatcctttttatttccgtgtttctttcctccacaagtattttcctttgttctttgatagaacactgaaatttgagatttaggcacactaat

SEQ ID NO: 101768 - DNA, 718 bp, Glycine max
  unsure (1)..(718): unsure at all n locations
  Clone ID: PAT_MRT3847_6290C.1
gcatggcaccgccgtacccgtaagcccttggnnatcctnctagnnaggcggcccgccctcttttcttnntttttttttctttttttttttttttttttttttttttttttttttttttttttttttttttttttttttttttttttttttttttttgggaaaacaaaaaagggggccaatttttttttttaaaaaaaaaggggggggggggggccaaattccggggggggccccggccccttttacagaacccgcccccaaaaaccccctccgttttacgaacccccttttttttttttttcccttaccccccaggggggggggttccattttttcaccggccccccccctaaaaaaaaaaaaaaaaacccttttaaaatttcaaccccaaagcccgggggtcccaatccgggaattttcccccaaaacccctaagggggggggtaaaaccccccattttcagggggggggaaaaccttttttttttattgggcccaccaaaggggctttttgttgttgtttttccaaacccccccccgggggggggtttcaacccggaaacgttttttttaaggggctttacccggggaaaaagccccccccccgggcccctaagccccgggttttcccccccacccctcaggtcctgtggggggggggaaggttcccccctgggaaaattttggggggttttttttttggggcgggccccctgggg

SEQ ID NO: 101769 - DNA, 311 bp, Glycine max
  Clone ID: PAT_MRT3847_62910C.1
gcctatgatgtattttaataatttgtgggtagttgcttatttttttttttttggttgtggttcaggagataaaaattgagctttatgtgggcgcacagtggatcaaaccatccattatccaagtcggccaacttagtgtccaatatctagcttaaaactgggatgccgagcttaggaacttgcaaaatttttttgcacgagcgctgcgctttacctttgggatatgattaagcttggcgtttgaggcgcttaagccaacgattccctaatcgagctctgatggggccaaggcatcctgtttcatgcctaaa

SEQ ID NO: 101770 - DNA, 807 bp, Glycine max
  Clone ID: PAT_MRT3847_62911C.1
aattcggctcgagaagacgacagaagggggaggggatgagattttctcttttaggttgctttcaataggaatgagatttaactttagccagctgttaagagctttgatgtaatgtttctgttgagttacaagcttctcaaattgtaaatgccattcctggatgactttctcaagttgcacagtgcgatcgtaatgatgcttggttgtttccttaggagcttgaaaaatatcaagagatttgaggtctgttactattttcagctggctgtcatgatgtatgcacatattttcccacatatttgccatcctaataataagagcaacaagatcatgtttcggatacaactgggcgtctcgaatatggttcacttctgaaactgttgaatccattgactgcatgtcaacaatatatcttgtatgcaaatgactaacagctgctttagtcttttctaaggattcagcactggcaccacgcttcttctgcttgtttagaattgcaacttttctctgatattcaaacttcataagctcaccttgcttgacctcttcataaagtttcttctcccatgccaacaacttatccaaaacagtggcatgagtttcatactcctcagaatcaatgtcatctttggcggcatccccattggacacacctctgaaggacctattccacgttatgacacgcataaccctagcagaatgatcaatgtgcccgcgattatccgcgaaattggaatgataatgcaacctagtggcctcaagcatcttggtaacttcctgagcaccctcggaggccttcaagaagtg

SEQ ID NO: 101771 - DNA, 271 bp, Glycine max
  Clone ID: PAT_MRT3847_62912C.1
cctcgtgccgaattcggcacgaggcaaaggtgggtaattgaaagcaccggtccatatgctgaggtgaaagtgataaaggattcagatcatatggtcatgttttccaaaccaaaaaagcttagctttgaactattaaagattgcttacaaatattgatctttaaatgttaatgtgtcttgcgtcatcataaaaagaaaaaaaaacatgtttatggaccatgtatcataaaaataagtaaccaataacttttaatcattcttacaaaaaaaaa

SEQ ID NO: 101772 - DNA, 372 bp, Glycine max
  unsure (1)..(372): unsure at all n locations
  Clone ID: PAT_MRT3847_62913C.1
aacaacctctgtttttnaccactcctacccnaccgctgctatggaaatttaagggactatcgattggatcggtgtaccggattttggattatgtggctgntggcggagcggcgcgggtaagtgcaatgcacgaagtccaacagcgttgccgatgacaccccttttgttgccccggttcattaccagcatgggttattagggcggtgccaatggccaccggtcgaatcactgtgtcatctgggaagacgccagcattcgaaaggtttgagcacttaaccgcttctatttttggatgctgggcacgtgagaataggatcatctcgcgcaacnnnnnnntncctctttggtgagaaagccggacctgttgttgct

SEQ ID NO: 101773 - DNA, 672 bp, Glycine max
  Clone ID: PAT_MRT3847_62914C.1
gccaaagtcaacaataataacattttaaaacttgcccggcacaaatatattaaactacaacactgttcaaataatatctataaataagaaaagtttgcattcaatacaaacaaaatgacagatctcagcattgcaaaaaatagaaacttaaaaaacatctaagcaaacttgccaatgacacgatcaaagaggttcacaagctcatttaaatgatcctcaaacacctctattttatcccgctgattatcaccctcaagcaaatcagtcacctttgtaattacagatttgattttcttcctttcttgaaaacaaagctttgaactgatattcttattattcaatgcattcctcatcttgtaaacatagggatccaaagcattcattggattagccttcttcatgaacttcatatcattaacctgatatttctcagcttaatgaatcattcttttaatctgctcagctgaaagccttttttggtcattggttatggtaatctcattcctataaccagtggttgtttcctccgcagaaacagatagaatgccatttacatctattgtaaagcatacatccacaggatggccacgaggagcaggaaccaaacccaaaagactaaagaaaccaagcaaattgttatcatttgctctggttctctcgccttcataaacc

SEQ ID NO: 101774 - DNA, 404 bp, Glycine max
  Clone ID: PAT_MRT3847_62915C.1
ctcaggacaatattggacttataattgtgagagtagtcatggaggggatggctcccaattcatgtgcaaggccagttgtagagaagaaagcaaggccacaagagcaactgaattgtccaaggtgcaattcaaccaatacaaagttctgctactacaacaactacagcctcacacagccaagatacttctgcaagacttgtagaaggtattggacagaaggagggtctctgagaaacgttccagttggaggtggttcaagaaagaacaagaaggtctctgtgacagcttcatcatcaccaaaggttccagacctaaacccaccaaaccactcagctatctcatcacacaaccctaaaataatgcatggtggccaagatctcaatcttgctttccagccatggaaa

SEQ ID NO: 101775 - DNA, 432 bp, Glycine max
  Clone ID: PAT_MRT3847_62916C.1
aggccgggccgaaaaccgggtccccccagcgtttttcaaaagggttatttatttaggggttgggcccggagatgagaggggtatcgtagcaaactacctacaaggggccctgaataggggggccttggggaaaaaagcaccgaggcggccggacgcactaagagctgtggaagcttcatgcgggttatacatgaccatcaattaggaatgaactaccataaactagatatcaactcggctggaagcaccctagaaatgaagctgcacaaataacgccatttgatgccaaagagaaagttgctggctaaatgggaccaaagtgcttattacaagattgcctgctgatggatggaccttacatgacagttgcattgctaaacatttaaatcccacatgatcaaatcataagatattattccaagtctaaagaaa

SEQ ID NO: 101776 - DNA, 452 bp, Glycine max
  Clone ID: PAT_MRT3847_62917C.1
aaaaaaaaaaggggcccttaaaaaacaacacaatacattagggggcatagtttcacaagcccctttttgaaaactataatgaaaacccgggccatagtggttccaaaaagcttttttacaacacactaacaagctttttaaaacacgccctataaaatcccctaaaagttttggtggggaactttgggaaaaccaacttggggggtcccataaaaaaagacggggggatatcccctcaagaaaacatccccaaaaatccaaagaggacctcggggggggggaatgttaaaagcaaaaaaccccctaggggaaacttttggaaggccttttccagttttaaaaaaaaactgctcaggggggagggggaaaggtttttctccaacaaaaaacgggatgtttggcaatccaaaaatggttttacaggttactactggctttccatttggacttgg

SEQ ID NO: 101777 - DNA, 245 bp, Glycine max
  Clone ID: PAT_MRT3847_62918C.1
ttcaatagtaactgaagatcaagagccacctggtggttaaggttgtcggtttgtttttttatcccctcctaaaatttgtgtgtatatccttagccatttggtcagaaactagagagagagagaccacagtggactcttttatggatgatgttacattataagtactatgtacttaggtttcattattagtcaccacatgttaatggctcatttctcgtaaaaacaaaaaatcatttgcagacttc

SEQ ID NO: 101778 - DNA, 190 bp, Glycine max
  Clone ID: PAT_MRT3847_62919C.1
cttggcgtaagaaccgaaggttagggcttgacttaacctcgcgtgtccgattacaattaaacagagactgtactatatgaaaccaggcccaaacacctatcgtgtaatggtggcgacaccaacaacctctggtaaaaaaccggggttcgcgatggtgaaataaataaaatctggaaccacctgcaccacg

SEQ ID NO: 101779 - DNA, 310 bp, Glycine max
  Clone ID: PAT_MRT3847_6291C.1
ttcttatctaataaaaacccaatctgctgacgctgtgccaacaggtactggacaactaaatggaaatcctgaaggtattggaactaagcattttcgggttatgggggccagtatgacatccgcaggaagccacaaaatcccccgttaggaagaatatgctactaatcaacttttacctctaattcttatatgtgcatccacaggagcgctcatgcaagaaccaaatttgaacttgatccaaatggctaaaatcccttctgcttcatatgattatccaaagaataaaaaaatattctatgtatccatacta

SEQ ID NO: 101780 - DNA, 394 bp, Glycine max
  Clone ID: PAT_MRT3847_62920C.1
atctatatactagagcggaaatttcaattttatctcattcatttcaatggcaactcaagggcaaggggttacctgctaaaatgcgggggcctgagaacccaacaagcccttagctgaacaagacgttcacgtggctccgtctcaggccggcgagggccgtgtacaaattctcttcaccgatctttgccacaccgatgcttacacttggggcggccaggatccctaacgcctttacctgtgaattcttgcccatgaaactgtagggattgtgaacagtgttgaaaaaggtcatactaatgatcaccctggggatcatgataatacctgttatcacgctgattattgggagtgcaagacttgcaattcatgggagacaaacctatgccgcaaggat

SEQ ID NO: 101781 - DNA, 397 bp, Glycine max
  Clone ID: PAT_MRT3847_62921C.1
gctactcttgcaggttcttattactgctatacatactacggtacatacattggaagatactcaggttgatgttattgttggaagcctatttgtaagcacatttcagatcacccttcagataaacctaaatgtaaacaaattttattaaaaaaatttggacaaaaaaatggattccttagtaaattgcaccctcaatacaaaaaagtttccaaaaatggttccaaagatcatcccaatgaacaatcccttgcgaagagtatattcattggtgaaaacatcgataacaaaccgaaaaaacattctgattcttaccataaagccttcgcaagaacctcgactagattcatggataaatttattgatggtgctatattcgaaactgtattcacgattgatt

SEQ ID NO: 101782 - DNA, 242 bp, Glycine max
  Clone ID: PAT_MRT3847_62922C.1
gtcggttgcaaataaagaaacccataatcgattcctttcttttctctctattttccattttcctggtttgcttgggttctccgaatccaaaatgttggcacttacactattcattctcataaacgctacactctcttttttgccacattagacctctcactatacctctttcactctctagagccctcctttttctctataaacctcttcccgaccttctccgaatggcgatccgtgcgcgc

SEQ ID NO: 101783 - DNA, 440 bp, Glycine max
  Clone ID: PAT_MRT3847_62923C.1
ggaaacaactagcgagcatggtagagaaagcctcaatcgacgatgtgatgaaagtgctgatagcgtctcgaaagcaagagatgcagcagctgtggagcacgtgttcccacctggtggcgaagtcgggtctccctccggaggtgttggcaaagcacctccccatcgatgtggtggcgaagatcgaagagctccgtctcaaatcctccctcgcgcgccgctctctgctgcccggccaccaccagcaccaccacgacctcaccccaggcatggaggaccagaaaatccagcgaatgcggcgcgccctcgactcctccgacgtcgaactcgtcaagctcatggtcatgggcgagggtctcaacctggacgaggcgctcgcgttgcactacgcagtggaaaattgcagcagggaagtcgtgaaagcgctgctcgaattgggggcg

SEQ ID NO: 101784 - DNA, 395 bp, Glycine max
  Clone ID: PAT_MRT3847_62924C.1
aaagaacagaagccttttcttatttatcccattttgaaaaaattagaatggccactaataaggtaaccgaaaaattaaaccggatgaggcccaattaaaggaatccttttggccattaggccattcctggattggaagggttaaaaaaaaaaccattgcccaaaccagtaaaaggggctaaattaaaatgaaatcggccttttaaaaactggcttggggacaccttattttgattggtttcttatacccaatagttaagggaacaggaccttggaggaatccaccaggagacttccaccattaaaaacctggatggtccaaaaggctttgttagatattgatggacccttatgacttgctttccacttaaatatccatggagtttgtaaccaaat

SEQ ID NO: 101785 - DNA, 714 bp, Glycine max
  Clone ID: PAT_MRT3847_62925C.1
attgaagtacttcaagtactcgcaaacaccttgatttaacccatatggtgtgcccaaatacaattttacataatgatgcttttgatataccataagagtaaatccctaacacaatacaagtattaggggaaaaaattgtatttaacccatatacaaattgactagttttgttgaatcttttcaaatgagccaacaaatcaaaccatatcctcataattaccaaatttattaagccagtatatgccacgctgacacgacgagggtaggatacccaaaggaaatagcataatctcaaacttcatgtggcaaaacgtatctgttgatggagctcatttacaatctactttttgtctccgaagcaagtcaagcttgagcaacttggtgaactgagatgtcttgagttctagctcatcccactccaagtaaggattgcttccttccactatccctgtcccagcatatataaaagcaccaagatccttttccaccaatgctgacctgatgccaaccgcaaactcgctctctcctcctccaaaccaaccaacaggtccagcatacatcccctcgatcaaatacttctgcatctgcaattaaaagttgtgcctcttctgttggaaacccacaaactgctggactcgggtgaagagatgacaaaatttcaaactcatcttcttcacttcttaacctgccagataattgagaatataaatgttg

SEQ ID NO: 101786 - DNA, 345 bp, Glycine max
  Clone ID: PAT_MRT3847_62926C.1
gcatggagagatgcatgcattacatgagaaaggaacaaacctagacattgtaatgtacaataaatgttaaactagtataaagaattaatatccattagaactatagatgccctagcataataattgaagaaaacataactaaagcattgtctgttctgaaattccacgacaatattacctcaataatcagcagtctttgtatgttggactgtaatcttgtgttcagttatcacattcaaaacatgagaaaatgatcatcatcttctttggctttgccaaaaccaagtcaaaaacatgggcctaaacttggaagcaaatgttcctgggattcattgtgcgggaaaa

SEQ ID NO: 101787 - DNA, 240 bp, Glycine max
  unsure (1)..(240): unsure at all n locations
  Clone ID: PAT_MRT3847_62927C.1
caatntgtccaaccactacctgtttgacacattgttcctctaacacaaaattnggattttnagtgtctcttccaattgcttacactccataggaagcctctagagcatcataatttttggctcagtctttatacatctgtaataccaaaaactgtctacacataccaccacacagaattgatagagtgtgcaatcttcagagtctcttttataacagataccaaaacatggttagtaatt

SEQ ID NO: 101788 - DNA, 263 bp, Glycine max
  unsure (1)..(263): unsure at all n locations
  Clone ID: PAT_MRT3847_62928C.1
agaaaggngggtagggggaaatacagtgaggtgttcgaaggtgttcactagnaccgacggtgaganatntgtcattaagatcctgaaacccgtnnnnnnnnnnnnnnnnnnnnnngaaatcaaaatattancggatctttgtggacgggctcatgntgtnaagttgcttgacattgttagagaccancaatcgangacccnaagtcttatatntgaatagtcaataacactggatttaaagtgctctatccnacattgtcaga

SEQ ID NO: 101789 - DNA, 467 bp, Glycine max
  Clone ID: PAT_MRT3847_62929C.1
tcaaccaaattaatccagaattgcattaattcccagtcaatgaccagcaatattggatccaagtcatttcctctaccacttgaaagtaccaatttgaatgataatcacaaaaaattcttcagtgtgctaccctactttggtgtcatcaacatgataatcactagtggcaccacaatctaccgtgcttacaacaacggtgacattcaaatgatagcattcgtcacttttatgttctttggcaccttcctcttggactattggatccgcttgtacaacaagatgcctccacatgatcaatcctatgagaagctaaagctgaaaattcggatatgggtgttggtcagttccataatgtttggatttgcctgcgaattctcaacgtttatgggcttctatgggtctataaccttttttggggttgtgattagtggcaacactttcctcttctatgtgtatttcatttggga

SEQ ID NO: 101790 - DNA, 388 bp, Glycine max
  Clone ID: PAT_MRT3847_6292C.1
aggggaaaaatccgggtttcattcatgaaatttaaccctaacccttaagagaaaatggtaaaacaaattttgggactttttttaaacttggagggggtcaaatttaaaaattttttcccttgtttagaaagggcaaaaagggggaaaaggttttttttagttttttacaaaaaacttcggggttgatccccccatttttttgggaacaaaacccttttattttttttacttcaaaggggggggggccccctaaggttccggtttcaagccatttagggggggggacccccaaaaaaagattttttttttatttgaaaaaggggtttaggggaatacaatttttcacctcaaacccttttgggttgggttttggaaaattttataaaac

SEQ ID NO: 101791 - DNA, 1558 bp, Glycine max
  Clone ID: PAT_MRT3847_62930C.1
cgaattggtaatggatcaagtgggcctcaaaatgtgaatgttgcccttagtgttgacaaccagtgggtcaacggaggacaagttgaggttgctgatgacaggtggcatgaaattggtgggtcctttagaattgaaaagcagccatctaaggttatggtttatattcaaggtcctgcttctggtgttgacttaatgcttgctggacttcaaatttttgctgttgatagacatgcaaggtttaaatatttaaggagacagacagacaagatccgtaagcgggagatcatcctaaaattctctggtctggattcaattggaaatcttggaaccctggtgagagttaaacaagtacaaaacgatttccccattggatcgtgcattagtagaagcaacattgacaacgaagattttgttgacttctttgtgaaacattttaactgggctgttttcgggaatgagctgaagtggtattggactgagccacatcaagggaatctgaattacaaggatgccgatgaaatgttagacttatgtcagaagaacaagatagacactcggggtcattgcatcttctgggatgtggacaacaccgttcaacaatggatcaaatcactgaataaaactgatttgatgacagctgtccaaaaccgcttaaatggcttattaactcgctacaagggcaagttcaagcactatgatgttaacaatgaaatgttgcatggttcattttatcaagatagactaggcaaagatataagggcaaacatgttcaagaccgcacaccaaatagatccatctgctaccctttttgtgaatgattatcatgttgaagatggatgtgacacaagatcatcaccagaaaagtacattcaacacattcttgatttgaaagagcaaggtgccccagttagtggaataggaattcaaggtcacatagatagccctgtggggcccattgtttgttctgcccttgataaaatgggaactcttggcataccaatatggttcactgagcttgatgtgtcttccactaatgaatatgtgagagctgatgatcttgaagttatgctgcgggaatctttggcacaccctgctatagatggtgttatgctctggggattttgggagttgtttatgagtagggaaaattcacacttggtgaatgcagaaggggaactcaacgaagctgggaaaagataccttgctcttaaacaagagtggttgtctcacagccatggttatgttgatgagcaagggcaattcagcttcagaggcttcagtggaacatacaacgttgaagttgtgaccttagcaaagaaagttaccaagacattcgttgttgacaagggtgactcatctctcgtggtatcaatcgatttataagcgtccctgaagtcgcatttcttggttgtgttgccatgcattcgtgtttttaaacattttcttaattctttgtgtggtttgctgcatacaaacttggttatgtaatgttatgattgtttgctggacactgccatcctggaaaagaaatcaaataagatttactgattttgttctt

SEQ ID NO: 101792 - DNA, 474 bp, Glycine max
  unsure (1)..(474): unsure at all n locations
  Clone ID: PAT_MRT3847_62931C.1
gtggtggtcctttctggaaaaaaggggagacccttaaccatccacttccactgttggaaatactaaataatgaaaaagggcaccctactcaatgtaatagttgctgatgctaccaaaggaaatggaacctaaactaccaaagctctttgcacaaatgaaagtcccttccctttgagagtgagagggctgaatgccaatcagaaaaatattggaccctgacttacctaaattgcggatgcaaagctacatgactatggaattagatctacctgaaggacatttgtaaacacaaatgtacccaacgtaataataatacgcagcctacacactactgcgactaaaaatatcgggaacaataggtaccggatgaagagagttaaccgacacctctaccccaccttgnttaacacatcaggcaggtcaattgctatgaaaaaagctancaagctatgcttggacaaaaacaacccaata

SEQ ID NO: 101793 - DNA, 277 bp, Glycine max
  Clone ID: PAT_MRT3847_62932C.1
ccagttacttgcttatggcaaaaagggagctttgaatgtggggggtgctattgttttaccgaaaggttatgaatgggcaccccccgatagtatttcgcctgatattagagagaagataggttctctgtcttttcaaaactatcgtcctacaaatagaaacattcgtgtgtgaggccctgctcctggcctaaaatattatgatataacctttcctattcgttacccagattccactactaccagaaatgttcatttcttaaaatatcctatgttcgtg

SEQ ID NO: 101794 - DNA, 253 bp, Glycine max
  Clone ID: PAT_MRT3847_62933C.1
ttacaaacaaagaaaaccaagacgccaaactattgtctaatacagatctcattgatcatcacagcattttttttctcattgagaacattttaggccatttattactctcgggatatgaagcaaattgaggccgcgcatgcgtataaggttaatcatgctctccctgtgaactaaacgtcatatgaaaagccatatttgcaagaaagataggaggctcttgacccacatgaatctgatgacctactgattgctg

SEQ ID NO: 101795 - DNA, 553 bp, Glycine max
  Clone ID: PAT_MRT3847_62934C.1
ggctcgagctcagtctctgcgcgtgccgctgaggattgcgaacgagagacctatctcgtatactcgcagagtttaagatatcatgggcaatgaaaaggtatcacatcaacattgtcatgattggacatgtctactttgggaatgtaactaccactgtgaacttgatctacaagcttggaggtactgacaagcgtgtgattgagaggcccgagaaggaggctgccgttatgaacacgaagtcattcaagtatgcctgggtgctcgacaagctcaaagctgagcgtgaaagatgaatcaccattgatatgtgctttgcggaagtttgaaaccaccatgaactactgcacggtcattgatgctcctggacatcgtgactttatcaagaacatgattactggtacagccaagacgacttgggctgtccttattattgactccaccactggtggttttgaagctggtatttctaaggatggacagacccgtgagcatgctcttcttgctttcaccctaggtgtgaagcaaatgatctgttgctgtaacaagatggatg

SEQ ID NO: 101796 - DNA, 315 bp, Glycine max
  unsure (1)..(315): unsure at all n locations
  Clone ID: PAT_MRT3847_62935C.1
ccactcntccntacaacttcacaagactacanaanangacacgcacctctttcttatcgccgctttatatcacacgctctcttcaatttctatgagttttnctattactttacctccgttccccctttctcacaaaaacaacaccttttctcttctccttcctatctatttttttcctttaatttttaaaaaataaaatccattcacagcttaattcaattcttcattttaatccatctatctaaccatcacttaattacctaatccaatctaaaagttcaaaaaaaaactccactattaaaattactaaatcaa

SEQ ID NO: 101797 - DNA, 368 bp, Glycine max
  Clone ID: PAT_MRT3847_62936C.1
ttacatcctatcacaagacaggaggatatagtaccagggatagagaatcacacagccggacgagacaaagatgcttacaacttatggcgaaattggggggagggatacaaacgacaaccgactatgaaatatgctgcttccacaaagccaaaaacaccctccttaccggataaacaccgccaaatcggtacgagattgcttgatgcatataagactttcagtgtcttctactttggtgcctagtaggtcggtctatgcactattgttcacgtataggttccgacctcgtaccgacagaacagcctaacattcctttgaagacacgaactgcacttctattggggggagcctttgtattacaactgacc

SEQ ID NO: 101798 - DNA, 421 bp, Glycine max
  unsure (1)..(421): unsure at all n locations
  Clone ID: PAT_MRT3847_62937C.1
agttaaataaaatagaaatacacacaagggaaaattaaatacagtcacaagcccacgacatcaaatgtaaaggactaacaccaatcatgatacattcctattaaccctctatccattataatcgaaacactatctagcagatcaatggtactcaatgagaggtgcggcaaatctgcaaataacagacttcaatgtctgatgaactagctcctggctgctttgaatactagaaacctctctgataagaaaagcaaatctaccacatggctagataactcggcagaagtttcatcactcttccaaacagaaccatcccttgtatactccttccccattgtcatcagtagacatcacaatgaaaacatanttgaagagaccaataatggtaaatgtccagaagataaatgaaagcaccccaaaa

SEQ ID NO: 101799 - DNA, 1539 bp, Glycine max
  unsure (1)..(1539): unsure at all n locations
  Clone ID: PAT_MRT3847_62938C.1
aaaaaacttgagagagagaatattgataatgaggctaggttgnttcnctgacccggttcctcttactacagtcacccccaatttcccgagcctcagcttctggacacccgaaccttattactacggacgcgagagacgacagaagggggtcccaaccctactctcaacacactgcagcgagaaccaaagaaaaaaaaagcttcttccattttccgaaatcgaagcattagggttagggttttttccgatctgagaaattcgcggcccaatggcggaggaaccggagagcaccgtcaccaccggcgccgccgacgaatcgctgctcgataagatcaccgagaagcttcacggccacgattcttcgtcctcttcatctcccgactccgactccgactccgaaaaaaccgttacttcctccgttaaggataaggtttttcgcctcttcggaagggagagacccgttcactccgttttcggcgccggaaaacctgctgatgtgttattgtggaggaacaagaaaatttctgctggcatgcttggcggagccactgctgtttgggttctttttgagttgcttgagtatcaccttcttactctggtgtgtcacattttgatactgttgcttgcagttctgttcttgtggtccaatgcccatactttcatccacaaatctccacctcgcattccggaatttcatcttccagaggagccattcctgcaagttgcgtctgcattgagaattgaagtcaaccggggatttgctgttttgcatagtattggctctggaagggacttgaagaaattcctagtggttattgctagcgtatggattctgtcaattgtggggaactggtgcaatttcttgaccctgttctacataacttttatcttgttgcacacggttcctgtgctatatgagaagtacgatgataagatagatccacttgcagagaaggcagttattgagattaaaaagcagtatgttgtgtttgatgctaaggtcttgagtaagatcccattgggtccattgaaagccaagttatcttagttgttaatctttgtaacatctgaaagaaagagctccacttgtttgctcaaggaagttgccagggccagtgtcttttatcgaatgtcgatctttgctatgtttgggttggttttaggctgggtatggtgtcaatggcaatgggtttggtttatcttcaaatagtagtttctaactgttcaagcatatggattttactggtttttttttaaggtttgtatgagttgttcaatcaaattgttgttgtatgataaaaatacttgcatgcttctttttatttttatttatttatttatttttatttttaagtagcattcgttaccgtctgtgttttagtgttgggttcatatgataaaatacttgcgtctttttttttttcttttaatttttcggtagcattcgttaccgtctgtgttttagtgttaggttcataggcttgtaaatgtagatcaatgtttaaaatatcggtttggttatgaaaataacttaagttt

SEQ ID NO: 101800 - DNA, 296 bp, Glycine max
  Clone ID: PAT_MRT3847_62939C.1
cttacgtcgtttcgcctggcatcatgttgccggcatcgtcctacaacaagctcaccgacaacggagccgccactcccgccggcctcatctccgcttccatcgtccatgctttcgacctcttcgtcgtcggctccgtcggagccaacatctccgggggccacgtcaaccccgccgtcaccttctgcgccttcgtgtacgggatcatcagcttactccgtagaatcgtgtacggaatctgccagctcctcgcctacatcgagggctgcctactcctcgacttatatactgcctaccct

SEQ ID NO: 101801 - DNA, 419 bp, Glycine max
  unsure (1)..(419): unsure at all n locations
  Clone ID: PAT_MRT3847_6293C.1
acctccgcgcccgaccacgacgnccgnaagggggcaagggaaagcacaaagaaaccggatcccggacaccgcccccganaaggagnaganagagagagggacccccccccgaggcaagcccacccaaaaggagccagcaaccgcaagaggcgggagagggacccggaccacaaaggaaagaaggcacccgagccacacggcgacggaaaaaatcacgggccgacacgcaaaaaaggagaaaaaggcaaaaggagaccagcgcccggagaaggggaaaagaggacaccgagcccgggaaccagcgcggaagaggcccacaacaagccaagagccgaaccagagaaaagagcccccacacaggccggcacagaaggacccacggaagagaaacccccgggccacaaaagaaccgacaaacc

SEQ ID NO: 101802 - DNA, 1483 bp, Glycine max
  unsure (1)..(1483): unsure at all n locations
  Clone ID: PAT_MRT3847_62940C.1
cggnnaattccacgcgtccgctctcacacactgcaacaacgaaaaccaaagaagaaaaaagagtttcttctttccgaaatccaagcagtagggttagggtttttttccgatctcaatggcggaggaaccggagagcaccgtcaccaccggcgcccccgacgaatcgctgctcgataagatcaccgagaagcttcacggccacgattcttcctcttcttcctcttcggattccgattccgaaaaaaccgttacttcgtccgttaaggatagggtttttcgcctcttcggaagggagagacccgttcactccgttttcggcgccggaaaacctgctgatgtgttattgtggaggaacaagaaaatatctgctggcgtgcttggcggagccactgctgtttgggtcctttttgagttgcttgagtatcaccttcttactctggtgtgtcacattctgatactgttgctcgcagttctgttcttgtggtctaatgcccatacttttatccacaaatctccgcctcgcattccggaagttcatcttcctgaggagccattccagcaagttgcgtctgcattgagaattgaaatcaaccggggatttgctattttgcatagtattggctctggaagggacttaaagaaattcctagtgattattgctggcgtatggattctgtcaattgtggggaactggtgcaatttcttgaccctgttctacataacttttgtcttgtcgcacacggttcctgtgctatatgagaagtacgatgataagatagatccacttgcagagaaggcagttattgagattaaaaagcagtatgctgtgtttgatgctaaggtcttgagtaagatcccattgggtccattgaaagccaagttatcttagttgttaatctttgtaacatcagaaagaaagagctccacttgtttgctcaaggaagttgccaaggccagtgtcttttatcgaatgtcgatcttcgccatgtttgggttggttttaggctgggtatggtgtcaatggcaatcagtttggattatcttcaaatagtaatttctcagtagtttctaactgtgcaagcatatgggttttactggtttcttttgaaggtttgtatgagttcaatcaaattgttcttgtaagataaaaatacttgcatgcttctttttatttttatttatttattttttttatttttaagtagcattcgttaccgtctgtgttttggtgttgggttcattatgtagaacaatgttcaaaatatcggtttggttatgaaattttgccaaaaaacacggttcctgtggttgaaccggtaaatatcaggatgtttgcaagaattaaaaaacggccgcttaaaaaaaaatatatagaaatggatagatctttaacgagcgatctgaatactgattctaagaatgatgatgataatgtacttgtatgatactaaataaactcataacaataataagtggggggggc

SEQ ID NO: 101803 - DNA, 484 bp, Glycine max
  Clone ID: PAT_MRT3847_62941C.1
accgccccccttccctctctctgccccgggactcgcttgcatatcgccagcatcgcttcagtgaccctcttcgccgtccaatcatccgccacgaccgtcgcgtacattgcgcaccgtcttcaccgccttgtttaataggaccatccgtcagcgccgccacgtgtttgtccaccgcgttacaatggcgtcctttgccgagaccgtccgtttctgcttcccagcgacaggcgcttcatcgtcaccggtcgacctgcccctgcaatccggaccaggcgcacgcgatcggcccgtgagacgccccgacgcggtcaactggggcgagcaggaagaggatgacctctctcgcaatgtcgtcaaacccactctggcagccatggcgcgcagctatgcaccggactggatcctcgcagctgtgctgtggggtgtgctcgccgtgctcaaccgctcgggaggacataaacgcgagttcagtctgaacgacatt

SEQ ID NO: 101804 - DNA, 623 bp, Glycine max
  unsure (1)..(623): unsure at all n locations
  Clone ID: PAT_MRT3847_62942C.1
gggacacaacttttgcttgggcacgtgggtaatttttgcctatacaaatcaggagacttacatgattatggactagacagattaaatcgaatatcactgaccctcaagtgtacagatcccctactattacattcataaatatatggcctccntatgcctaaacttttgctattaacaaattcgaggaaattcaaaatgtcagtagcttcctgcagatgattgattggccaggtatcaagagtgtaaacggtgtcccaagaagacacagataagtgccaccatacagacatatagaagtgggaagccgacttgaacttttcttggacctttattaataagatctgcctgcncaaaaataacacaacccaaacagtacaaaattgcacaagttcaagcctgtaaatggggaagaattcaaaagcagcaaacaacatttatacgcatccccaacaaagaaaaaagtgaaattgccaatctaaattaaaattttgattaatactttctcaattttggcattgtgatcaaaatataagggtgcccccgaccccgttttctctcgggcaccatttataaattgacaatacttcaaattctagaatgacagacaatttatgttaagcctc

SEQ ID NO: 101805 - DNA, 342 bp, Glycine max
  Clone ID: PAT_MRT3847_62943C.1
ttcacaatcactttttgcgcttctctcactcactcactcttcttcttcctcttcgggggggtttctttctcgaactcgaaccaaaattcctgagattcttcacattcaaggagggcaatgccggaaccaaatcggaacccaattcttggaagtggtgttccccgaacaccggatccattcaaccgggaggtaccaaagggaccaccaggtggaacttgagccaattaacctttactacaatgaaaccaggtgcggaaaggtcctgccttaggccgggcttattgatcttgaaccagggaccattgaccgggttagatcttgtcccttacggcaaaattttcc

SEQ ID NO: 101806 - DNA, 335 bp, Glycine max
  Clone ID: PAT_MRT3847_62944C.1
gtggaagtagcttgtcacttgtgttgggaataagcaacatgttttggatcggctgatcggatactatgtggatattgatacattgttttacataacatccatctactcaccatatgacctgtcgcggcactgtgactgtaatgtcactggaatagacggatgtgctgaaccggcatactcaatccaataggttataaggtcatcctcatgatcttgcttaactaggtctataatgccaatctgctgatgctaggacctaatgcaaaaactgtgagcggtcatggatgcggacagaactatggcaactctactaacagaggagtatcataattcag

SEQ ID NO: 101807 - DNA, 351 bp, Glycine max
  Clone ID: PAT_MRT3847_62945C.1
ggggggtaagaaaaaaatctattttttctatggatttccaatgctttccctcaaattattatacaaaacttgcatttgcataaatatattcccctcccactttccccttgtaattttccaatgccgggccaaaaaaattaaaaacccccaaaaaggggtccaaaaaaagaacccgaaaaacatttataaattgagttttaaaaaaataaaaatggccttttttataccgggcgacgtttaactaaccaagctccagttttatacaattttcgggggtttggctttacttgaaaacttgttttttttggccctttttaactgggatcaaaagatcacaacctctgttttctt

SEQ ID NO: 101808 - DNA, 346 bp, Glycine max
  Clone ID: PAT_MRT3847_62946C.1
tacggctgcgagaagacgacagaaggggggaggagattgggcaatgacgtcacgtcgaatggggtcccgcaacccactaataaaacaatcaagcaaggccggttcagtcaatccctcgacccgattagcaagtgtcatgaatttggtgtagtaatccgccacagaattggtttgggataatttgaacaactgggcccttgggctatcaaattgggatgggccaaattgtttctcaattgcttgcgcaagagcggcccatgtaggaatcagattggctttttgcaacatctggaaccacggcaccacttgaccttcaaaatgcaaccgaacaattgtgagcttttgc

SEQ ID NO: 101809 - DNA, 297 bp, Glycine max
  Clone ID: PAT_MRT3847_62947C.1
aacataaatgacattttataaaagaatcaatatactaccagtacatgagatgagagcaatggcaatgaacataaaccttaatcagctacatgttaaaccctcccaaataccatttggcttcccatcatcatggtatttctattaccactacacagtatttcctactatacactggtggagaaggatggagccatgttgttggggtggaaggacagaaatttgatatcagcttcagcatggcattgctaaaaacatagatagtaggaaatactgtgttttcagcatggcattgctaaa

SEQ ID NO: 101810 - DNA, 332 bp, Glycine max
  Clone ID: PAT_MRT3847_62948C.1
gggtacacccgcaggccccggtccggacctcccgggtcgaccccgcgtccgaaaaatccctagaaccacgttgtctctcggagccttcattttaacataggttgttctgttatttttgttgttgttcttgtcatccacaatatccggggtacccatttcaccgaatcatactttgcttaacaatcctgataccctttggtgaaaaatcgtttctggggtcttaaaggaccaaacttggattcagggtcgtgatggaacagaagcacgttctgttgtcagcattgagtgttggggttgggttgggtgtggggcttgggttgagctcaggccag

SEQ ID NO: 101811 - DNA, 2111 bp, Glycine max
  Clone ID: PAT_MRT3847_62949C.1
ctcccgcgtccgccgacctgctcccacgaccatcacatactcccggatattgggttgtgtccggggcaaggagacatatttttccctgctcgacgtcaattcccataaaagatacattcaataatcgaattgatgataaaaatttctatatttaaaaattgaatcacttgaaattttttaatttaattgctagatataactttgctaacttgtgcaacaagaaggctgttgttagtgacatatttaaaatcattgcagttttacatgctacaatatttgcattataaggtgttacaagtgcaactcaagtatcaagcatcaagaattttgagttaatttgctagttataacttttgtaactcaagcataaaaaatgcagttaatgaaaaatttataaccattgcaactttacatgttaaaatatttgcatcataaggtgctacaagtgcaaataaatttcttacttgcatatagcatgtatcttacattacatatgaaattgcccccccagcatagaaattttcttgtatcaaagaatgataattcaatttatacatgtccagccggccagacagaatggttggatcttcctttagtaccatactaccattaattttcttttatcttacactaaaataactcatcttgaacttctaaattctgtttagaatgctactatgtcaatgtcccctccatgaagaacttgacgcgtgggttagcatcacaatattaatgtttaatgtccaatataatgaagaaaggcttgttctgtaattctctgttaatatatttactgcatttttgcctggctcgaggtcatgcaatgcaacagatgttacaaacacaaaagctttttaaatttcctaactgcattgatactccataaattttctcaattgggtttgcagaatctttttgtgatacatagtaggagaggtggaagcattcaaaagatgtatcatagtgaatggttggatactattgactcggaacctgatgtaatatcaatgcttcttctccctctgacatccctttggaatagaagcggcagaaatggatttgtgagccatgccataaatctctatcaccgttacaaacctccaattgaagaccttcatcaatttttggagtttcagctaccaagacattgggcacctgtagctagtgagataagccttggttctcatcataagcatcaagtgaacacctggatacgatttagtatcttgggtcccaggctttacataaatacaattccagtggatgtaggtaatagaccagtggttgggctaagattacaattggaagggagaagcagcaatcggttggccattcatctgcagcatctggcttctctacccaagtccttatcagtttctgacaactcaaatgcttacttgtcttgtgactcatataactgcaatttgcataagaaagttaaatggaactccttatcatatgtttgtactgctcctgttgaatcggatgatagtgtttccattgtgacaggagctcaattacaggttgaaaacaagtgtctctttttaaggctatgtttctctaaagtcattggtgtcactttacggaaggcacctgagtgggatcaatcccccagtcttggccagttcagcatcaagacttggggcatcttaacaacatttatttccaaagcggaacaaagggatcatccaaagccgggtgatgtaaccattggttccagtatatattctgctgcacgccttgcaccagtgcgcacgcctaagcttctaaggtttgttgacacaacggaaattatgcgaggaccggtagatactcccggacattgggttgtatccggagcaaggttgcatgttcaggatgccaaaatatatttgcatgttaagtattcactattttcctttgctatgcaaactgaaactggagcttcacaagtactttaatcatcacttcaccttccttttctatcaaaggtgcttcactgtcttgttgcttgcatagctaattatatgaagctttcagtttcactggaaaatagtgaatacttaacaaggagatatatttttccatgctcgacaggaagacttgctctcgattcaccaatgcgaaattag

SEQ ID NO: 101812 - DNA, 180 bp, Glycine max
  Clone ID: PAT_MRT3847_6294C.1
gtgcctataccagaattttacctttaaattaccaaatcgaagaaggtccccaaccaaatttaagttaatggaatgggcctgccaaattacttaaattcacttttgccaaacttatggtattccaaagtcttatattttcctttttaaagaccgacttagaacttgtgccggattccaaaa

SEQ ID NO: 101813 - DNA, 929 bp, Glycine max
  Clone ID: PAT_MRT3847_62950C.1
taattataaaagcatatataattgaaatggattacatcgccattacagttacagtacacagagctctagctccagtatgatatataattattagcatataacaacatacatacacacatcttacgcatgagtcacaaatgagcacttgtgttttttattccccatacctatgattattatgtatgttttggaagcccagcccctccaagaggaaggtcttatataaattagttgtaattagcaccagtgttaaacttagcttttccgaaatcctgtttttaaatacttcaaggaggcggagttcaacactggtgtgcaagttgccaaggggagacacgctccttgcagtggtaacaatgggactaaaagttccttgaagtattgatgtccgcctcctgagtttataaaggcatcctcagtaccattgttaacgctactagagtgcttttcagttccagcagaacgaagaatttggtcgtcagaagtgttggttgtaacagcagaggtgttgggtaagctttgatcccctttgtgcatgttgtgtatgttggtagtgccttctttatggctcagatgatctcttccctgcttgctgctgttgactttcttcttacctgatcctccataagctgttagagcaacaccgatgatcttgacaagacgagttgcgactgcaagcagcaagagtagcacctcacagacaaatgatagagctctgataatgaagcgcaccactgacataggagaaatgctattgacgagtggccggtaagctttccaatttggtgcgtcttggcgtttgaacttggcggttgaagatacatgtcggaaatcgtcgcaatttggtgcctgaaccgaatcctgcttcatattttcctctcttgcaatgaattagatcaaagagatcgaagaagaaaaggcttcaagag

SEQ ID NO: 101814 - DNA, 332 bp, Glycine max
  Clone ID: PAT_MRT3847_62951C.1
gaggccgatgaaatggcactcacatgattgtacatagtatatatgcatcctttttcaccgtggtatatattgcatccagagttttttcggaagctaatagaagagttcagaacgtgagaagacttacaatataaagatggccttcacatgattcctacaagagacaaactgttagctctgctaaatactccacaggatagccgagagaacttttagctatgactgtatatagaacattattgtggcgttctagtatgatccaaaggttgcttgtgttcaacatcatagcgaatattgaaaggttcatctctatcttactgaggcgagaccta

SEQ ID NO: 101815 - DNA, 1218 bp, Glycine max
  Clone ID: PAT_MRT3847_62952C.1
aattaatgtgtgttctgcacaggagaggttagaatacttgttgagtattggtgttaaacaaagagatgtaagaagaatccttttgaggcaaccacaaattcttgagtatacagtggagaacaatttgaagtctcatgttgctttcttgaggggcctgggcatacctaattctagaatagggcaaatcattgctgctgcaccatccttgttttcttatagtgttgagaattcgttaaaacctacagttagttatttaattgaggaagttggcatcaaggaaaaagatttgggtaaggtcattcagcttagtccccagattcttgtgcagagaattgacatttcatggaatactcgttgtatgtttcttaccaaagagttgggtgcacccagagatagcattgtgaaaatggtgacaaaacatccccaacttctccattacagcatagatgatggattacttccaagaataaatttcctaaggagcataggaatgaaaaattcagacatcgtgaaagttttgacaagcctaacacaggtgctttctctgtccttggaggagaatctaaagcccaaatatttgtacttggttaatgaacttaacaatgaagtgcaatccttgaccaaatacccgatgtatcttagcttatctttagaccagagaattcgtcctcgtcataggttcttggtttccctaaagaaagctccaaaaggaccatttccacttggatctctagttccaactgatgaatgtttttgccaacagtgggctggaactagtttggatagatatttggcatttcgtcagagattattacttaaaaagtttgctgagaaatatgaaagaaaaatgtgacagatcagaatcaagtttgtatcagtcaacttgcatgaatactggaagaagaatctgttgtaatattattgtcatgcaacatgttgctataaagttttcttgatggtctgcattgggctgaagctcaataattagagtttagttggctatttggcactgtctgcacatgatttcatgacacactcaagcatcagtgtctgattctcagcagaagctgcccaactacttttgtgaagtttattattgctgtgcttgtggctgaaaagcagaacacatcacagtgcaatttgtcaccctaaggttgtggacaatgttacaaacttttattgatataaattgaaaaaactatatcaattttaactctt

SEQ ID NO: 101816 - DNA, 361 bp, Glycine max
  Clone ID: PAT_MRT3847_62953C.1
gctaaaaacaatttctgaattaaaaagtttataaaattaaaaggtacattcatgtttcaatgtttttaaaggatacccgtattgtaattggaaatcctgctatagaaaacagcctgacaaagaatttggcactatagctcatgctaggcaatccttcaagcttttctcaccttaagtggaataaacctcaaaatgcttggacttagatagaatccttagtacacaggtagaggtcttcctagcatttctcattgatcaaattatgtgcattagaccacagtgtaaaaattgacaatgataaccgcttcataacccccgatattgtaaaagggcaaatgaagcttctacttccatggacttg

SEQ ID NO: 101817 - DNA, 779 bp, Glycine max
  Clone ID: PAT_MRT3847_62954C.1
aacttatagtctcgtaaaaacatcactgggatggttctaccagttttaatgaaaagaaagcaaacagtatcaagactataaaatcagcacaatcccaaccaaggtctaaacaacttccaaaagaaaatagcccaagttcggtgaagaattcaggatctgttagcccgagaatgcaacagaagaatttagagtcggagaagcaatctcgcctgcctaccccaccatcagattcaaataatcccagaaggcagtcctgcaagcagacaacagaatcaggttctcccagtcgaaaactaagacctaaagttgctaattcatggtatagtgatgaccgacttagtgagactagcaatgaattgagaagtctaagtagtcagtgggatgaaatatctttgcaatcagacagtatcactgttgactcaaagatggatattgaagtcaccagcagtttacaatctgatgatactattgatagccaattccgttctatgaaggctaacgagcatttggtttcaggatcaacgcataagaaatcaactctgaggtgggatgaggatgagtcaattgcagaacctgcaacagatgcctcagatcatccaagtcttgattcagttgatgatgtctcagtgtacaaatatgatatgccatccccagtaaagaatggcttcttcgttaacaacacgatcaaccgcaagagattccaaagcgtagattgccttattcaaaagcttaggcagctaaactcgagtcatgatgaaactagaatcgactacatagct

SEQ ID NO: 101818 - DNA, 326 bp, Glycine max
  unsure (1)..(326): unsure at all n locations
  Clone ID: PAT_MRT3847_62955C.1
ntnaaaaagngtattaanntcggaattcngctcgaganattannaaattangngaatatgatgcanaaaacnctagncgnattgccaaagatagcanaatatcannaaaanangagntacaannaaatnagatatgnnnanatnaaannggtcaatattatagcanaatcnttcaacnagnnactttccangataagntgnaaacaagnannatnatnatgatgatgtntnngttgangnananaaagnanacaaatatntanncatgatgagatcaatnaganttctgnggnnnnatanttaaganantatatngtttnnnagat

SEQ ID NO: 101819 - DNA, 470 bp, Glycine max
  Clone ID: PAT_MRT3847_62956C.1
gcccgttcttaagaacaggacgtgacgggaccaaccctcgtgcagcagccatttcccaaatcttgtaggacttttcgccgagtcgacgatggcttcccactacggcggcggcactgtgctgactgctgtgtgatgtgcaaatgtcaaaaagcttgaagaagttcgtgccatcttgggcaattctatggcttttcagtccctcaaacttgacttgccagagttacaaggagagcctgaagatatatccaaagagaaggctcggatggctgctgctcaggtgaatggacctgtgttggttgaagacacttgcctctgtttcaatgccttgaagggtcttccagggccttacatgtaagttatctttcacccttaaccatttgagctcagcaaatgggtgctgcataagcttggtcatgaaggtctcaacagtgcgctggggggatatcatgataaatcagctgatcccttat

SEQ ID NO: 101820 - DNA, 244 bp, Glycine max
  Clone ID: PAT_MRT3847_62957C.1
tacagctgcgagaatactacacaaaggactacacccacactaccatccagggtcttagatgggtgggggagtccttatgaggagtgggggtccttggaaggataggaactgcaacagaaactctttctccgagacacaattaggggatgcttgggtggatcttccatagtgagaagaaagggaatgagaggaccatatgttcacagaggggaacggcgagagaaaggagaaagaagatcactaa

SEQ ID NO: 101821 - DNA, 831 bp, Glycine max
  Clone ID: PAT_MRT3847_62958C.1
ggccgggccggggatgtgttacccctctagaggaaaacccatcatttctcccaacaatccttttcaaccttagaaacctgagcttccaagatattccattcttccattcttttcactttttgggtcctcttcttctctctctcaatttaaatatcactctcctctcccctccaccacgactagtaaataaatggatccctcgtccgtgaacggcttctactcgttcctgacgctgggaatcgacgatctagagagagtgttcctgagcacaaacttcatgtcaatccaattcctccaaagagtggtctctgttctaagatcgttccacacccaattgaccctcctggtccagaaactccagctcccagtgggcgacaagtggctggacgagtacatggacgaaagctccaaactctgggacgcctgccacctcatcaagtccggcatttcggccatggatagctactactctgccgccctcaacatcacctcctccctcgactcccatcgccacatcaccccccaagtctctcgccaggtaataagggccattgccgggtgccgtcgggaggcggtggggctggaggaggagaacagggcgctgatggaggcgcggattgaggccttgtcgcttcggttccaagagaggctgtccatcgagtccaagctgaacggcttcaacggcttcagaggggtgctgtacgcaatgaggaacgtgagttcgttgctgctcatggtacttctgtacggactcgtgtactgctatggggactcctcggacttcgtgttgggcgggtgcgggtacgaggggtgcctgttcctgggatcggc

SEQ ID NO: 101822 - DNA, 1290 bp, Glycine max
  Clone ID: PAT_MRT3847_62959C.1
gcaccaggttaatgtcactgtcatagctgctacaaataggccagacaagatagaccctgcccttttaaggccaggacgctttgaccgtctgctatatgttggacctccaaatgaggtggacagggaagagatatttcgcatacatctgtgtaaaatcccgtgtgattctgatgttagccttaaagaacttgctcgactcacagatggttgtacaggggctgacatatcattgatatgtcgggaggcagctgttgcagcaattgaggtttgtctgtcaacatgacttctgatggatgtgttgtcacttgtcacagagtaaaatttcttgtgatattatgttaccaggagagacttgatgcttcagtcggctcgagggagcatttaaagatggcaatcaaacagatccagccatcagaagttcactcctacccaaagctgtcaacaaaatttcaaagggcagtccactgctgtgatataaaggatgaattcaatgatatgcagtgcgacagtagatctactcagttcaacatttggaagttcataaaatcttgcacatcgttcctctatcagattccatttgtcatctttaatttgagaactgctcaaagtagttaaccacagtcctcagagaaactattatgtgtgtcgtattccagtgactgggctcatgtgcattacatgggatcatctgcactgcaaactggctagattgaacctttatttaaaatgagtgcagtatctatgaagcaccagtaatggggatcaatgtcttcaccaacagaggagttaactaagagaaaaaagtgtaattgccaaaatttgtgctgaaaacccccctgactgaatcatgattagcctttccattggaagatgaacataatttgagaatgattacaaacgtggtctcacgtggaagttttgcttgcttgttacttttgaaggtgtgagaggtagcaatgttgtatgaggaactcggccactcatacctgtgcgtcattctcaacgtgccaattttctgtaggcctcgaccacactagtttgtacacaaaatcataagttatcaagtttgttgataaaacttacgtaccgtgaggaatattacagtatattagctgagagcaatgcatatacagattacaaatgttttggcaaattcaatgcgttatgttgtactccttgagtattttgaaacactcaacttgtaaagtcccagaaattgtagaagaaatttattgagtagttactgcactattgacacatcattagattattattattagtctacctttg

SEQ ID NO: 101823 - DNA, 512 bp, Glycine max
  Clone ID: PAT_MRT3847_6295C.1
tgttgagtttgggatgtaagaaatatgaatttctcacagttgatgactactcaagatatacatgggtttacttccttgcacataaacatgagtctttgagatattttataagagggttcaaaatgaaaaaggtttttgtctttcttttattagaagtgaccatggaactaagtttgagaatactaagttaaaaccatttttgtgaaaggaatggtatttttcataacttgtcttaaccgagaacccctcaagaaaatagggtagttgaaaggaaaaatagaactttgcaagaaaaggctaggaccattcttttcacaacttgctttgttcaaaacaaaatattgataagaccaatgataaaaaagactccttatgaactatggaaaggaagaagacacattatttcatactttcatccatttggatgtaagtgttttatccttaacactatagatcaactcacaaagtttgattcaatggtggataaagggatcttcttagggtattctgac

SEQ ID NO: 101824 - DNA, 512 bp, Glycine max
  Clone ID: PAT_MRT3847_62960C.1
ccagagaccagcttcgtgaagacctggcgcttcagaaatgaaggcgactgcgcttggcccgaaggctgccaactgatcttcgtgtccaagctcaacggcgatcagatgggtgctcccgctgccgttcccgtggcttccgcaggcgtgggccaggaagttgacgtgtcagtgcccatggtcgctccggctactccaggcagatacgttggattctggcgtctctgcactgctgacggccagaagttcggccaaagggtcagagtcctcgtccaagtgacctctacctcctcgtcctcttccgatagctcttcttcatctgaggatgaagctgccgcgatggcaccgttgctcctgcagatggagcagatgggcttcaccaacaaggagaagaatgcccgtgtgctcaagaagcaccaaggcaatcttgcatctgctgtggcgtgcctcagaaaaaagcagcagatgaaagccgagaaggctgctcaaaaggctgctgagaaagctgagaagaa

SEQ ID NO: 101825 - DNA, 492 bp, Glycine max
  unsure (1)..(492): unsure at all n locations
  Clone ID: PAT_MRT3847_62961C.1
gtcaaccaaattaagttttattaggtatggatacaagaggaacccttttacatgacaacatatcaacatccaaccaatttcctaataccttaacacctccctgcccaccttaatgccttagcacttgtccacccttcnaaaaggaaaaaaatgagttggtgcatacatcaaatgctgcttacttaaaaaggcatgacagaaacatgcatcgactactacaacctatattacatacttctctgttcagatcacacacctacaagcacttgaaacactccaagggttcgataattgaccattcataaaagaaaaaaggaaaagcctttcattttattggacagttaagaccaagctctaaattcaatcaaaacaaacacaagtacgttcaccgttaggaccctcattttttgaagataacgcaatttctatgcagccaatagggaccaaattgaggcaaaccagataaacaatcaagctgtcttaactttctta

SEQ ID NO: 101826 - DNA, 273 bp, Glycine max
  Clone ID: PAT_MRT3847_62962C.1
ttctcttttttgtatcacccacttttgtttttttttttagggagcgctcgttagggagccccacccttttattccaaaaaaaaaacacggccccaccaagagaatcccaacccccaaagggaacaaggccaacccacaaaaaattgctcccaagtccaaagaaagaaaggggacaagtaaaggaccccacgggaaaccaaaacgggggaaccgagggatcaacccggacagcacaggcacggatccccccagacccgcgggcggacccggggg

SEQ ID NO: 101827 - DNA, 281 bp, Glycine max
  Clone ID: PAT_MRT3847_62963C.1
gttcgtacatcaacaccactttccgcgtgctcgcccgttgaagtttgcccctcccactcccgagccggaagtccgcctagctcctcgcgtcattctattcggcgtccagacctagttgaacaggtgccttgcctgcagcctgtcctgtatccgagggtacctatcgtttggtgtaagtctgcgcaaacaaatgtcgctccgtcgcccccaattaactctgcccttcagatccgccattccctccacgtctgtcacgtactacgcgccgacactattcctgc

SEQ ID NO: 101828 - DNA, 705 bp, Glycine max
  Clone ID: PAT_MRT3847_62964C.1
gtgctttgaaacaaaactaaagaagaaatgctgagacaagtgttgcgacaatgttactcacttcatcgtcccgcagtgaatgtgtacgcagtgccgcggttttatcggagaaggctttgttcttcttcttcttcttcagagtccactgccgctacaatctccatcgaccgttcttccctttacaatccacctgagcattctcaccaccccacttctgattccgaactcgtcaaacacctcaaaggcataatcaagtttcgtggaggccctatttcgctaggtgagtacatgtccgaggttttgacaaatcctaaagctggttattacatcaatcgagatgtttttggagcagaaggtgattttatcacctcacctgaagttagccagatgtttggtgagatggttggtgtctgggtgatgtgtctttgggagcaaatgggccaaccacaaggagtaaatctagttgagcttggcccggggcgaggaactctcatggccgatctccttcgcggtgcttcaaagtttaagaacttcattgagtcattgcatgtacacttggtggagtgtagtccagcactacagaagcttcagcaccagaacttgaaatgcactgatgaagagaatgcttctcaagatactgatacaagaacagccaggtcccttgtttggaactcctgtatcatggcatgctacactggagcaggt

SEQ ID NO: 101829 - DNA, 143 bp, Glycine max
  Clone ID: PAT_MRT3847_62965C.1
aaaagagcaaacattcatactaattctcactgcatgccttaatcatacataggttacagaagtaatgaaatacattatctactctaacaaacagaacgtaggtaattcggacccgtgggcggacccgtgggcggacccgtggg

SEQ ID NO: 101830 - DNA, 2939 bp, Glycine max
  Clone ID: PAT_MRT3847_62966C.1
cccacgcgttttttttttttgggagataaaagagaaagggtcaatccatttttttaaagtcttttgtgcgggtctgagggttgcagtgtgggggtgcaagagttacgactgatatttatttctcaatccattccctgttcaatgcaaaattcatcatgcttcttgtgctcaactcaaaggaaaatggagggccccagtgagataggtctcattggagaaaattttgatgctggtttgatggggaggatgagggacgatgagtatgaaagccgttctggaagtgataactttgaaggcgcatctggtgatgatcaggatggtggtgatgatcagccacagaggaagaagagataccacagacacacccctcaccaaattcaagagcttgaggctttcttcaaggagtgtcctcatcctgatgagaagcaaaggttggatctcagtaagaggcttggcttggagaataagcaagtcaagttctggtttcagaatcgacgaacccaaatgaagacccaactggaacgccatgagaacataatgcttaggcaggagaatgataagctcagagctgagaacagtttgatcaaggaagccatgtcaaatccagtgtgtaacaactgcggtggccctgcaattcctggccaaatttcatttgaggagcaccagattagaattgagaatgccagactaaaggatgaattgaaccgtatatgtgtcctagcaaacaagttccttggcaagccaatctcatcattgaccagtcccatggccctcacaacctcaaattctggtcttgaacttggtattggaaggaatgggattggtggttcaagcactcttggcactcccttgccaatggggcttgatttgggagatggagtgttaggcacccaacctgcaatgcctggggttagaccagcattgggtttgatgggaaatgaagttcagcttgagagatctatgcttatagatcttgcattggctgccatggaggaattactgaagatgactcaggcagagagccctctttggatcaagagtttggatggtgagaaggaaatctttaaccatgaggagtatgcaaggttgttttctccttgcattggtccaaaacccgctggctatataactgaagctacaagagaaactggaatagtaatcatcaacagtttagcccttgtggaaactttgatggacgcgaatcgatgggcagagatgtttccgtctatgattgctagagctatcaacctcgatgttatatctaatggcatgggtggaacaagaaatggtgctctacaagtgatgcatgctgaggttcaattgctttctccactagtccccgttcgtcaagtatacggctgcaagaagacgacagaaggggcagaaggtgtatgggctgtagttgatgtttccattgagataggtcacgatgctgctaatgcacagccatccattagctgtagaaggcttccttctggctgtattgtgcaggatatgccgaatggttactccaaggttacttggcttgagcattgggagtacgatgagaatgttgtccaccaactttatcgcccgttgctaagttctggtgttggattcggtgctcatagatggattgccaccctccaaaggcagtgtgaatgcttggctatcctaatgtcctcttccatttcaagtgatagtcacacagcattgagccaagctggtaggagaagcatgttgaaattggcacaacgcatgactagcaacttctgttccggggtttgtgcttcgtcagctcgcaagtgggacagccttcacattgggactcttggtgatgacatgaaagtgatgacaaggaaaaacgtggatgaccctggtgagcctcctgggattgtgctcagtgctgcaacttctgtttggatgccagtgtcacggcaaaggctgttcgactttctgcgtgatgaacggctgagaagtgagtgggacatcttgtccaatggtggaccaatgcaggagatggtacatattgccaaaggacaaggacatggaaactgtgtttctcttctccgtgctaatgctgttaacgccaacgatagcagcatgctgattctgcaagagacatggatggacgcgtcatgctcagtggtggtatatgcacctgttgacgtgcaatcactgaacgtggtgatgagtggtggagattctgcatacgttgcactcttgccttcaggctttgcaattcttcccgatggccactgcaacgacaacggctgcaacgggagtctgcagaagggccgcggcagcgacgacggcagtggcggaagccttctcacagtcggtttccaaattctggtgaatagtctcccaacagcaaagctcacagtggagtcagtggacactgtgaataacctcatctcctgcaccattcagaagatcaaagctgcactcagagttgcatgatgccaacaacaacaacaacaacaaccattttgttaatgcagtaataatatgcaaaagttaagttaccttaaaattattattttgtggtcttttttaattttttggtttctaagatgaatattattcggagaggggttatataattcggttgggtgtataggatttataattatatagagtagtggaagaggctgaggcagaaagggtcgcgtaaggaaggtttcgagtcaagaacgaaccgcgatggaggaacttgaattgtgctgtttgcatttgcatgcagcttttctctgctcatagtggttcgggtattgactcgttgacctgcgagttagtctcagtgctcttgtttagataagatgacagaaaaaaaaaaaacaaatgtgcgtgtgttactacttaaattattactagtgcccatccatccgatacagttgcaaattgctgaactaatgtattttggaattatgcatttttcatattttagtagtcttttt

SEQ ID NO: 101831 - DNA, 1710 bp, Glycine max
  Clone ID: PAT_MRT3847_62967C.1
gggcagagatgtttccctctatgattgctagagctatcaacctcgatgttatatctaatggcatgggtggaacaagaaatggtgctctacaagtgatgcatgctgaggttcaattgctttcgccactagttcctgtccgtcaagtaagattcatccgattctgtaagcagcatgcagaaggtgtttgggctgtggttgatgtttctattgagattggtcatgatgctgctaatgcacagccagtcatgagctgtaggaggcttccttctggctgtattgtgcaggatatgcccaatggttactccaaggttacttggcttgaacactgggagtatgatgagaatgttgtacaccaactttatcgcccattgcttagttctggtgttggatttggtgctcatagatggatcgctaccctccaaaggcaatgtgaatgcttggctatcctcatgtcctcttccatttcaagtgatgatcacacagcattgagccaagctggtaggagaagcatgttgaaattggcacaacgcatgactagtaacttctgttccggggtttgtgcttcgtccgctcggaagtgggacagccttcacatagggactcttggtgatgacatgaaagtgatgactaggaaaaacgtggatgaccctggtgagcctcctgggattgtactcagtgctgccacttctgtttgggtgccagtgtcacggcaaaggctgttcgactttctacgtgatgaacgcttgagaagtgagtgggacatcttgtccaatggtggaccaatgcaggagatggtacatattgccaaaggacaaggacatggaaactgcgtttctcttcttcgtgctaatgccgttaacgccaacgatagcagcatgctgattctgcaggaaacatggatggacgcgtcgtgctcagtggtggtatatgcaccagttgacgtgcaatcactgaacgtggtgatgagtggtggagattctgcatacgttgcactcttgccttcaggctttgcaattctccccgatggccactgcaacgacaacggctgcaacgggactttacagaagggtggcggtggcaatgacggcggcggaagccttctcacagtcgggttccaaatactggtgaacagtctcccaacagcaaagctcacagtggagtcagtggacactgtgaacaacctcatctcctgcaccattcagaagatcaaagcttctctcagagttgcatgatgatgacaacaacaaccattttgttaatgcagtaataataatgcaagttaagttaccttaaattattattttgtggtctttatatttttggtttctaagatgaatatttattcggagaggggttatataatttggctgggtgtataggaattataattatatagagagtagtggaagaggaggctgaggcagaaaggatcgcgtaagaaaggtttcgagtcaagaacgaaccgcgatggaggaacttgtttgcatgcagtttttctgctcatagtggttcgggtattgactcgttcacctgcgagttagtctctgtgctcttgtttggataacattagaaaaaacaacacatgtgcctgtgttactacttaaattattactagtgcccatcctatcatacacatttgcaaattgctcaactaatgtattttcgaattatgcattttcatcataaaaattcgctcaagattaacttttc

SEQ ID NO: 101832 - DNA, 471 bp, Glycine max
  Clone ID: PAT_MRT3847_62968C.1
aattcggcaccaggtttgtgattggttttagtttgtaatccagaaagtaataaccttttgaattttgaaattattaattttaggttatgactcttgtgatcatctgttgttatgcatcaatcacaaccgtaattttgatgaaaggcttgttgatgtaggagaagtttgacatattttccttttcatcaatgtttcaaatctcaatatcttaattatgttctgaagaattatctatgatttttttatactgatgtaactatatatatttacaatcatatattatggctttaataatatattctaaacaataaccagcaaccaaaagtctttatccaactaagttgaagcctcaaagtttcaatgggaatcccacccccctttttaacaaatgtctttaggcttaaattattagacccattatctttttaaagatatttaaattaattcaacttattaaaggggttttttcct

SEQ ID NO: 101833 - DNA, 621 bp, Glycine max
  Clone ID: PAT_MRT3847_62969C.1
cctctctctcgcgctctctactttttttcttcttctgtgaatttactaaataccaattgctccaagatccgtgtttgaaatttggctttgcttaattagtatacctattcttctatttatgtatctcttactcttccaattttccgtagcgtgatttcttgctctttctgcttctagtacttcgtttgcttttgtttttattctttaattagtttattctttcgttcttaagagctagctggtaaatagaaaataaatactagataaaatcctttggtgaatgataaaatatttcgatggaatctgaattggtttgtttataattattgcttgctgaggaaagcaacttttttgtgtatgtctgtgtgtctgtggcattctctaaaagaaaatcaaggttattaaaaggacttgcttggtgctaatgcttattatgctttctgcgattttcaccaattttaccaagacttatctttgatatatggggttaaaaagttttggtttgatttattttggtttgtggatttaaaagtggaagggaattaccatgtggtgtaaaaatataacattatcttttgggataagaatcctaggcgttaaagggggaatttttggcctttg

SEQ ID NO: 101834 - DNA, 496 bp, Glycine max
  Clone ID: PAT_MRT3847_6296C.1
taataatttttttttttttttttttttttttggtgtgttttttttttttttgttggttaaaaaaaactttttactcaattgaatcaggggtttttaaagaagaaaaaaggggaaaagaaaatcccctcttttgacccccgaataatcaacggggggaaataccaaagataccttcaacatagtggaggctccgaaggataaaaaacccccttcctaattaaacagcttagatccccaaaataagagggggaaagaaagcccggggaatgggactttgcctgctcctcctttggcacctccaggggggactggggggggccctgaacccggagctggagctgacccgtttgggcagctggggatcccattggggaccccccagcggcaactgaaagcgagagcctgatcaacaaaaacgttgaacctttgaaccaagccggggctgaaaaaaatttttcaacggacccgtgggcggacccttgggcggacccgtggg

SEQ ID NO: 101835 - DNA, 465 bp, Glycine max
  Clone ID: PAT_MRT3847_62970C.1
tcgggcttcccttttttttttttttattttaaagtttcacacacttgacacatgagttctacaattaaaagacgtgtggcatacacacaagtcctgaatgcctacctgtcagcaggctaatccgtctggtacaggccgaacgcaaagaggtggtcgttgagcaggctgaggttgtatggcgtgacgtacatgtttgtgtcggtcagtccgataaacatggtgccgttgacgatgccgtcgttggtgttgttgaaaacaacgccaccgggctggatggttgtgccggtgttgttgccagtcacgttgagcggggtgtaggtgacgttgagctggctgatccacgcgacgtacgccggggcggtggtgttgatggcgccgccaatggacgagttgtaggcaccgttggcggaaaggttgccgcgcggcgacttccaggacagctggacctggcggacgggctgggtg

SEQ ID NO: 101836 - DNA, 146 bp, Glycine max
  Clone ID: PAT_MRT3847_62971C.1
tttgcgtttccctgcctgctggacgtcaaaggtaatagatctctggtgtctaacacagcatcctggaacatcgactattgactgataccttataaaaatgcactaatacaatgccgatatactattggctttctttcccgagtatt

SEQ ID NO: 101837 - DNA, 339 bp, Glycine max
  Clone ID: PAT_MRT3847_62972C.1
gccgacccacgcatccttaacctccattgctgatgccatcaattatcttcccatctctagttccaacgtgtcttccattctcaaagggagaaaaacggcgtctacttcatactctttcatactcgccttcgactctttcactgttttcttaaccttttccccttcttcaaacgcttctttaccttgattcaccaacatattctctcccacatacaccaccgacgagctcctacaagcctcaaattcctaacattttctctcttctttttccaaacactacttcacccctccaattcttttgatccccttcttaacaacactcactctttaatatctacc

SEQ ID NO: 101838 - DNA, 476 bp, Glycine max
  Clone ID: PAT_MRT3847_62973C.1
tgaaaacagtaacattaacatgtgtgtttgagtggccgtaattaaaacacaagactgcagaaacaaagaaaagcatagagtatgtgttcaatgttgaaggtttttgcagttatagaattagtattgctgatagtgtaccctggtgctcatggtttgagcagagatgattttcctcctggttttgggtttggggcatcaacttcagcttaccaggttgaaggtgcagcaaatgaagatggaaggaagccaagcatatgggacaccttctaccaagctggaaatgggaatatgtatgctggtaagtaagatgctgtttgtgatcaatattacaaatataaggaagatgttcagttcatggctgacacgggcttataggtctatagatctgccatatattggccaagggtgattccatatgggagaggcccagggaattccatggggcctcagtgtttcaacaatctttttaatgaaca

SEQ ID NO: 101839 - DNA, 707 bp, Glycine max
  Clone ID: PAT_MRT3847_62974C.1
gaaatctcagcttaaactctttccaataacttccaagcacattagacaattggtaacaaacaataaccaagctattcttgcaaactaaattagactaccaattcaactttcattttgacagtttgtattctctgatagaaacatgtactgctgaattttttttttctatatctggtgccatcatataccacgcgtccgtgcactagagaatttggtatacagcttctgaaggcaatctttactagccagagcataatattccagaagcaaattaatttcagggcacatatttacaacttagacacaaacccttccatttccattatcctctccgacgtctccgtcagtcacatacacatactcttcttcttcttctgcttccatggcgctcactgcttcgctcgctcacaactcatttctgaaaatcccaacagccattcatagcgaagcctctccgttatgttcatccttcatgggttctccgcctacactctcgcgctcttctactcttcccgggaaccagtcgctttcgaggaaccaattcgtggtttttgcgaggaagatttcgggattggaggaggccatgaatatcagaagagatcgtgaacttcaagttgtgacaaagtttaagaaaaggcctccattaaggtgtgggagagtatcaccacgcctccctgtccctgatcacataccaaggcctcttatgt

SEQ ID NO: 101840 - DNA, 412 bp, Glycine max
  Clone ID: PAT_MRT3847_62975C.1
ggcggaagttgcaactgaagtgaagctctttaacaagtggtcgtacgatgacatcagcgttgcagcggatatctcattggaagactacattgccgtgaagggtaaagccgccacgtttctgccgcatacggcgcagcgctaccagaagaagcgctttcgtaaggcgcagtgccccattacagagcgtctggtgaatgcgttgatgcgcaaaggtcgtaactcgggcaaaaagctcaaggccacgcgtattgtcaagcacacgctggagattatccacttgctgacggacaagaatccgttgcaggtcgtagtggaggccctcatcaagtcgggcccgcgtgaggactctacccgcgtcggttcggccggtgtggtgcgtcgccagggtgtggatgtgtcgcccttccgtcgt

SEQ ID NO: 101841 - DNA, 1674 bp, Glycine max
  Clone ID: PAT_MRT3847_62976C.1
gtccgtgatagaaataatggatcggtacggctgcgagaagacgacagaaggggatacacaatacttcctttcacagtgtcttccatcctcttccaactttcacactttcacttgctctctctttgctcttatcccttttcttttttcttcttttcctttgggttttctattctcagtttgcggtgtttgatagaaataatggatcggaacgggccaaagatcaaaagtacaattcttcaccatctctatgagaagcagagacagagcccttactatgacaatctctgtcgccctgtttcagatttgcttccatttattgccaatgggatcagaggtgtcactaccaacccagcgatttttgaaagagctatttcatcctcaaatgcctacgatgatcagttgagggaattggtaggggcagggaaggacatagaaagtgcttattgggaattggttgtgaaggacatacaggatacttgcaaacttctggagccaatttacaatgaaacagatggggaagatggacatgtatctcttgcagtttccccaaagctagcaaatgacaccaaggggacaattgaggcagcaaaatggcttcataatatggttggaagtccgtgtgtttacatgaaaattcctgccactgatgaatccatctcttccatgaaggaggtcatttctttggggataagtgtaaatgccactctcatattctgcctccctaaatatgaagcagtgattgatgcttacttggatggccttgagtcttgtggcatgactgatctctctaaggtttcaagtgcagcagcattctacatcagtagagtggatgttacacttgacaagaaacttgagcaaattggtactactgaggctcttgatctcaaaggaaagggtgcggttgctcaagcagtcttagcataccaactttaccagaaaaaattttctggtccaagatgggaacgcttggagaatagaggtgccaagaagcagaggttgatgtgggcttcaacaaatgtgaaaaatccatcttaccctgacacattttatgttaattctcttattggaccagatacaatttcaaccttaccagtacaagctcttcaagcattcatggaccatggtattctttcaagaactcttgatgcaaaagtatcagaggctcaagacatttacaatgcaattgagaagttggggattgattggagttctgttggatcagaactggaacatgaggtgctggattctttcacaaaaagctttgacaatgtgcttgaatgcatgcaaaagaaggctaagcttagggatttcagcagagcatatgaaccgtgctttcaggataactagtacaagtctaagacaaaaatattcggaacttgtttttttctgcgacacttgttgcatatgcagcatgcaactgatgcggttgaagcttagaactttggcgtgtaactaaaataatattatggagtatggactataaataaaattaaagcgattatagtatttacgcaatccctttgtagtagtggtaagcgtgggatgtgttgggatgagtttatctttgttcttatctgacccagaactttgttaggtcagtttcttgaatctgaactggtcccaatcaaggcccgaaaaatttagaataaaatcaggtcccccggtttccctatt

SEQ ID NO: 101842 - DNA, 803 bp, Glycine max
  unsure (1)..(803): unsure at all n locations
  Clone ID: PAT_MRT3847_62977C.1
tggtttgatagaaataatggatcggaacgggccaaagatcaaaagtacaattcttcaccatctctatgagaagcagagacagagcccttactatgacaatctctgtcgccctgtttcagatttgcttccatttattgccaatgggatcagaggtgtcactaccaacccagcggtactcactactcagttttttcttcacctgaaaacattactcttctccatttggttttatttttatctagtttctgtgtgttggttataataacttttcagtgttctcacatcgcagatttttgaaagagctatttcatcctcaaatgcctacgatgatcagttgagggaattggtaggggcagggaaggacatagaaagtgcttattgggaattggttgtgaaggacatacaggatacttgcaaacttctggagccaatttacaatgaaacagatggggaagatggacatgtatctcttgcagtttccccaaagctagcaaatgacaccaaggggacaattgaggcagcaaaatggcttcataatatggttggaagtccgtgtgtttacatgaaaattcctgccactgatgaatccatctcttccatgaaggaggtcatttctttggggataagtgtaaatgccactgtaagtttgttatgtgcattctgatgtcacaaattatgatccttattggctgtaacagcaataggctcatagtttgcgtatttgaacagctcatattctgccttcctaatatgaagcagngattgatgcttacttgnatggccttgagtcttgtgcatgactg

SEQ ID NO: 101843 - DNA, 584 bp, Glycine max
  Clone ID: PAT_MRT3847_62978C.1
ccctttcgttcgatccattacaaattagttgctaatgaaggaaacaacacacttcattgtacgtacacttgttttaacatatatttcttgaacacaatttttctataattgcattgactgtgtggcccatatatatgatgctgggcaatgcttgtgcaaatccacaattgcaatttaaaatctttacacatatctcatatatatgtttgctttaccagatatctcatatagaaatactaacacacacacatatatgtttgctttaccagatatctgatgtagaaatactaacacacacacatatatgtttgctttaccacatatctgatatagaaatactaaaactcatgctttctgattgaccttagctggacccaaagcattcagtgatgttctttggaaagtgacaaggcatataaaagatggtgaaaaacccagaatcaccttcagttaccacagttatgatggtgaaggaggcaagtaattaagcattggcattaacttcatttctttaatggtgctaaactatgaagcctatatttatatttagagagaatactgtgtggtatttaaaaagaatttac

SEQ ID NO: 101844 - DNA, 284 bp, Glycine max
  Clone ID: PAT_MRT3847_62979C.1
ctccagcgccaaattaatgccacttactagcacaagtaagccagtgctgtcacggatcaatcgctcacagagcgggatctagcaagacaccattcttatgcataaacattccaaacacttccaacatttttgattgcaacaagctacacagtttctgtgatcacccgaaactgccgaaccctagaaacatgcctggggcttgcccagaaccggggaccgcagcggcccatcctggctaccagaatgaagctgaatgacggaaacccatatggccagagctccca

SEQ ID NO: 101845 - DNA, 296 bp, Glycine max
  Clone ID: PAT_MRT3847_6297C.1
ggatacggagacatactgacagtgacttggattgcatcgctctctgtgtgttggaataggggaatcgtcaatatgagctccttcattcgttctaatacgcttgtgatgtgagctacttcgccgaacccaaacatggggattgtgggaagcgtttccacattggctacgcacccttttttttcacgcatgaaattgacttatccctcagaagacttcagtatgctgggaatacatgacttggtaatgtagttgctactggtggatatcatgaggacatgattccatctgttggattc

SEQ ID NO: 101846 - DNA, 383 bp, Glycine max
  Clone ID: PAT_MRT3847_62980C.1
gagaatgtactaaaccgattgatgtctcatcagtttggttgggtttttaacactccagttgatgttgttaaattgaacattccggattattttactgtcatcaagcatccaatggatttgggtactgtgaagaagagaataacctctggcgaatattcaaatcccatggattttgctgctgatgtgcggctgactttcgaaaatgcaatgttttataatccagctggcaatgatgtacacacatggcagagacccttagtaaattttttgaaacaaggtggaaggccatagagaagaaaattcctgctattgatagtgtcgcatctgagccttcaagacctactcacgtggaaacagaaatttctgatcgagttcctcccccc

SEQ ID NO: 101847 - DNA, 757 bp, Glycine max
  Clone ID: PAT_MRT3847_62981C.1
tttttaaaacaacttgaatggatatcatttccggaccaaatagtccctagagagacatcgtgtaataacttgggttaatgttcttacacttcgactcttctgtttttacaatctaaattaaaacgagaaaacgaaatcagatggacaaattgaatgaatcaaggaatctattacatcaattcacctaagtaatttacactttatcctcgggatcatttcccccgaacatatatactatctattttactgaagaagatcttgttttgactgaatgtcaaacatgacttgatgcgtttcttgtgctctacccagaatagggaagtggagaactggctccatccggctgaagagaaacttggctctgattggatgggctagcatagccactaaacattgaatgatgtatcattgttctcagcaagttctcttagcctgtttagttcaggcagcacttccttgccaagatcaggtctgtctctcctcctcagttcggcacaccggataccgatctttgccaagctcaaggcatcctctaccggccagccagacacttttggatccaacatatcagcaaatgtgcccttctcaatggctctcccaacatgatgagtcaaacccattggagggcttgctgtcaaaagttgcaagaaaatgatcccaagagagtatatgtcagatttcactccaagcattcctgtctgctggtactcagggtctatgtaacagaatgttccagctgcggatgtcatcctatact

SEQ ID NO: 101848 - DNA, 608 bp, Glycine max
  Clone ID: PAT_MRT3847_62982C.1
ccagcgtccgctcctctcgatctctcagaacagaggatatagttagttcacttcaaatagagaaaagaaagtaaagattaatataacatgcacaacatgagcactctcgttttctttatccttctttcaacgctactaagtgtttgttacggtggtcgcgacttagtagataaaaacccgttcaccgagcaggcttacgtggcacgctactgggacaaacatgttggcaacaacttgccaaagccatcgtttcttctctccaaagcctctccaatgagcgcttccgacacggcgtcgttcgcgaacctcgccgccaccaactccctctccacgcggctgccggagttctgctccgcggcgcaccttctctgcttcccggagggccggcccagcctcgagaaaccaccggagactccgatttccagacctacaacgacgggcagaacttcaccaactacggcgccgagttcgccgggggcctcgacaccttcaagaactactccaacgagctctttagcactccggtggacgacttccgccgctacaaccgcgggggcgccggccacgaggaaagaatttctcgctacaccggcgacaccaacgtcgcc

SEQ ID NO: 101849 - DNA, 295 bp, Glycine max
  Clone ID: PAT_MRT3847_62983C.1
ggaattggggaaaatcataaaccctcatcaaaggggttttttttgagtatccctcagttcaaaaaaaaaacaaatagggggtttgacccctttttttttttcaacttatgggttaaaccacaaatttcatgctgggaattacttcccccccaatatatgcaagccttttcccatttatttgaagtttttatatccatatgtccaattgtttttaatatccccccaaaattgattccaaaggcttttgcttctaaattttcacctttgcccgggaattaaaaataaaccggcccgg

SEQ ID NO: 101850 - DNA, 125 bp, Glycine max
  Clone ID: PAT_MRT3847_62984C.1
cactgccattgattaacgggggcaagcttcctagtaacatctgaatagttgtgacttacctcgtggatggttgaaccaccaggcgacatacaagtttgagtagccaatgcttctaccctggaaaa

SEQ ID NO: 101851 - DNA, 240 bp, Glycine max
  Clone ID: PAT_MRT3847_62985C.1
ctacatatgtccttgcatgtttttctcagcatgccttcacatgtgctagccctgcgggcagtgcattttagcgcgttgtttctaacctggcactgtaagagagaagtgccctcgaaaatagcgccatatgccactgctaaatgcccttaaaccgacttaccggttccagtttgacagtcgccgcattgatacatggaaccctaacatcaagccattcccctgtgcctgggtgcccctttg

SEQ ID NO: 101852 - DNA, 1779 bp, Glycine max
  unsure (1)..(1779): unsure at all n locations
  Clone ID: PAT_MRT3847_62986C.1
ggctcgagtatttttggtatacctgcttctggtgagtaagacagtgaagccagaaacaggagataaggtaaggcaaggcacgcaactccaatcttgaatcactctgcactctgcactctgcacaatgctttccctctccgtccctcctctcaacctcaaacccataacacccaatgacctctttctctcatcagcctctccctcacctcaccgtcgctacttcgtgaaacccatctccgccgtcctcaactcatcttccttcaagaaacctgagcagcctctgctgccgcagcatcaagtctaccagcccttccgccctcccccgtctcccctcccctcgcaattcggcaccctcgacatcgccggccgaatcgacatcctcgccaaccgcctcggcctctggtacgagtacgcgcccttaatcaattccctaatccgcgaaggcttctcccctccgacaatcgaagaaaccaccggcatctccggcgtcgagcagaaccgcctcatcgtcggggcgcaggtccgcgactccctcgtccactccaaggccgaccccgacctcctcgctgccttcgagaccggcggcgccgagctcctctacgagatccgtctcctcagcgcctcgcagcgcgtcgccgccgcgcgcttcctcgtcgagaatcgctgcgacgggaaggccgcgcaggagctcgcacgttccatgaaggatttcccgagccggcgcggggataaaggatgggcgaggttcgactacactctccccggggactgtctttcttttatgtattacaggcagagcagggagcataggaacccgtcggagcagaggacttcggcgctggagcaggcgctgcgcgtggcggagacggaggcggccaggaatatgattttggaggagttggaggggaatggtgaagagggggataaggtggatgcaggggagggtgctgtgcgtgttccggtggtgaggctgaggattggggaggtggcggaggcgagttcggtggtggtgttgccggtctccgcggcggaggagagggagattttggaggcgccgtatgagagtaggagccagggggtgtttggtgtggtggtggcggagaagggatggggaaaatgggtggtgttgccttcgtgggacccagtggttggtttaggaaaagggggtgttgtggtatcgtttcccgatgctagggttttgccgtggaaggtgaataggtggtataaggaggagcctatattggtggtggctgacaggagtaaaaaagaggtgggtgccgatgatgggttttatcttgtgaatgctgatggtgagggtttgaaggtcgagaggggttcgggattgaaggaaaagggtttcactcagagtttaggaactgtgttattggttgttagacctcccaaagaagaaaatgatgaattgagtgacgaagactgggagtgaactcaaatcaaagggaagggaatgattgagttgctaaagaatagcgataacaccacattatatatatatatatatggttttctcaattcaagaattgctagttaactcagctcaatcccctgcctttgttttttgtgtcatgcaaaataaggttctattaatttgggattacatgcaactttcttttgttttccatacttaatagaaggatttaatcgtttttgttttctctttgtacgttatattcatgtggttaatacagtgagtggtttctttttganaacaanggggaattttcgcggaaaatcccggtacggngntttcccaggggggtt

SEQ ID NO: 101853 - DNA, 437 bp, Glycine max
  Clone ID: PAT_MRT3847_62987C.1
caacaaaaaagccgggggcccggttttttattaacccccaaccccccgaaatccccggggcctcaacaattttaacccaaaaggaaaagtcccctaaaaaaaaggtaaaaaaaaaatccgggggggttattcctaataggcccggcccaaatcccgagcttacggccccgggcaggcaaagaaaaaccccttctttggggcccccaaaatccattccacgggccggggtttaacaccggggggaggggaaaaccccgggggtcccccaattaaaggcccgggaaaaaaacccccctttcccccgggggggaataaaaaaaagggccccccccggtgcccctcccaacaaggggcccctcccaaagggaaaggggcaccccccctggaccgccccataaaccgcggggggggggggggttcccccccagggccccctt

SEQ ID NO: 101854 - DNA, 239 bp, Glycine max
  Clone ID: PAT_MRT3847_62988C.1
gtccatagatgaactgtgatcagcagggggcatgatgatcctacctcgcggcatatggactgtatgggaccacacaagataagatgggatacaccaacgtatagaaatagacatagagggttacaactcaaaaactgctgattttggagctttagactgcaaagatgctctaacatattaaaccaatcacaaggcctagactatggactaaggttagaatcattgttctggcacgtgac

SEQ ID NO: 101855 - DNA, 398 bp, Glycine max
  Clone ID: PAT_MRT3847_62989C.1
gttcttttttttttttttttttttttttttttttttgtcaggataaacaccccatgcacatgcttttgctttaatgcctaactaatgcacaacctctggacacagtaagtgctgtttaaaacaataactactcataaaatacaaaggtgtcaagtctcagacttctatatatacaagcgtggcgacataatttcattgttactaacatccagaatgcttaagactaccctccattaacccaaatttctccttgaaaaaccctttgacaccgctaatgatacttaaacactcggatgagcacagtaacggctggagacacagtaggtgctgacaaacgcctgtgtgcgacaaaaaagatgtattatagagccccctggtcttacttcaaacccggccaa

SEQ ID NO: 101856 - DNA, 359 bp, Glycine max
  Clone ID: PAT_MRT3847_6298C.1
tcctttcgttcgtccacgcgtgcgtctacaacgtgagaaacatggcttacttaagctccttagtgctgctccttgcacctataatcctaaccccttaagaggtagcctactatgacaacccccccagtgcccaagcctgccacagacaaaccaccggtgtataagcgcccaattgagaagcctgctgtcaacaaacctatagtgagaaaccccaccagcataagcctgcagtagagaagccaccttagttcaagtccgcagttgagaaatctccagcgttcgagcccccagttgaaaaagcaccataggtcaagcccgcagttgctaaaccaccaacggacaagcctccagctgagaag

SEQ ID NO: 101857 - DNA, 399 bp, Glycine max
  Clone ID: PAT_MRT3847_62990C.1
cccacgcgtacgacaacttgtcggaacgtttttaataaaacacaaaaaggatggatggtagggggattcttaatgctgactgggaccacccaaacatgataataaaaaatagtgctattaataataattaagtggaaacctagcttgaccatataaaagaagaaccttacctgaaggatctgggtcttgtgttccaatattagaaccaacaactccaagagcaacgacgtctctgtagaaacgactttactcatacatcaaagtgcagcttggatatagaaacatcgcacactttccaagacatcatataggaatatttctcataatatcacacaaacacttactgcagtttttgctggatagatcctgcgtgcactgaactagagtatacaaactcct

SEQ ID NO: 101858 - DNA, 374 bp, Glycine max
  Clone ID: PAT_MRT3847_62991C.1
tgacatcatatcaaatataatagtgcgaggtggaaacggttgttactagcttctattaaaaacaatccgcaatgttatgattatagtagtgaagtgaggataaatcataaacaacacatgctgcaaataggagtacgactgaagcttcttatatcacaaaagtattcgtttggataataatataaaagataaagtcacatgctcaaatattaagacaatttaaataggtgaaaaaatgaataagaaaattatatgtatatatatattgagagtacctttatatagaggtaatgaacgagaggtaaagaatatagtaacacgaactaatattgcatttacaggacaagaacaaaagtgttttatgagcctaataa

SEQ ID NO: 101859 - DNA, 1331 bp, Glycine max
  Clone ID: PAT_MRT3847_62992C.1
aacttaccaaagcagggtaatagccagcacaacacaatggcttctaatattcaaactctgcttgtgcttgttctggcaacattgggaacatttatgatcccttccaatgcacagcttactcctaatttctataagaaagtttgtccccaggcattgccaatcataaggtctgtcgttcaccgagcaattattcgtgaacgacgcattggagcctccttgctgcgtttgcatttccatgactgctttgttaatggttgtgatggatcagttctactggatgacacgcacaacttcactggcgagaaaacagccctacctaatctgaattcaataagaggtttggaagtggttgatgagattaaggcagcggttgacaaagcttgcaaccgtcctgctgtatcatgtgcagatatcttagctatagctgctcgtgattctgtggccatattagggggtccacacctatggtacggcgtgttactaggcagaagagacgcgagaacagcaagcaaggatgctgcaaacgccaatctccctcctccatttttcaacttctcacagcttctctccaacttcaactctcacggattagacctcaaagatcttgtggcactctctggtggccacaccatagggtttgcaaggtgcactaccttcagggaccgcatctacaacgacaccatggccaacataaaccctacttttgcagcctctttgaggaaaacatgccctagagttggcggtgacaacaacttggcaccgttggatccaactcctgcaacggttgacacttcatacttcaaggaattgctgtgcaaaaagggtctccttcattcggatcaagaactctacaagggaaatggcagtgaaagtgacaagttggtggagctttatagcaggaacccttttgcatttgctagagatttcaaggcttctatgatcaagatgggtaacatgaagcctctcacagggaacaaaggagagatcagacgcaactgcagaagagttaattaattaatgctgttgggatggaccacaataaagattgaaaaattaagagattaagagtattattattatatgtcaagtgaatcaagccatgcttgccatgtattattttttaactgtgtgtgattgttattttatattttcttgtactaaaatattaatgtgttaggttcaaataatgttgaaccaaaagtttcaaaaagaaatcagctaaagaataaaggtcacatgttaattagactggctgtgcaacaatttgtactttttgaatgcatgcaccaaggcaatccccgcagaaatttataattttgttattaaaaaaa

SEQ ID NO: 101860 - DNA, 841 bp, Glycine max
  Clone ID: PAT_MRT3847_62993C.1
gtcgacctcatctaaagttccgtcgatggttgttcatgtgtccagcacccccgatgaggtcggcctcgccgtcagtcagctcatctttgacctgagcaagcaggctattgccaccaacggtcgatttaccgtggcgctctcgggtggctccttaccgaagatcctgaacaagggcctgcaaaccgttaaaaacgatgtggatttctccaagtggtttgtgtactttgctgacgaacgctgcgtgtcgctggaccatgatgacagcaactacaaggcttgcaaggcggcgctcttcgacttcatttctgtaccagaaagtcagatctactcgatcaatgcgtcgctgaccccggtggccatggctgtagattacaccaagaagctggcaaaagtgtggggcaacaatattctgcctcgcttcgatctgatcttgttgggcatgggcccagacggccacacatgctcgctcttcccaggccacccgcttctggaggagaagacattgttcgtggcgtccatcgaggactcgcctaagccgcccccgcagcgtatcacgctcacctatccggtcgtgaacaatgccgcgaatgtcgcgttcgtcgccactggtgctggcaaggccgatctggtcccacacatggtcggcattgagaagcgcacgcctccgcttcccgctgccagtgtcaatcctacagatggagtaatctactggtttatcgatgaggacgccgccatcaagctctcggaagaggcgaggatgtagacatctaatacagatgtcttcgtcgtccgcccaactatgtcccactttgtaaactttgtgtatggcataaaagaattc

SEQ ID NO: 101861 - DNA, 466 bp, Glycine max
  Clone ID: PAT_MRT3847_62994C.1
cggacgcgtgggcaaggatttaaaggttccccaaagacccagcttctgatgtcttatgctcctcatgtgctgcaattcttggatagtttgtatatggagaaggacatggatgatgttgtgactaagacagcaattggcgtgcttggagatttagctgatgaccaatctttcttctgctaacttggcagaaaagatgtggtttttacgtacaggaggagaaacagggtgaaatgggggaaggagcaagaaaggagatagatgatatcccatgatatctgctgataccgtaactataggagtctatggtggtccagatattatgtcctttacttttttttttcttttcctattactattggctgtagagtgaaacaatcatcttagtccatccatccatgtgtttgggataggtaatgcaacatattttagccgttccttgaaattattcaaataattttttgtctcc

SEQ ID NO: 101862 - DNA, 1065 bp, Glycine max
  Clone ID: PAT_MRT3847_62995C.1
cacgcgtccgctgctttttccacactctgctagggtttcagagtcgccgcgctccctcacttggcttcgactcgctctctcaatcgctgattccactcgttatctcgtcgtcactaagttcagatggccatggaggttactcaaatccttttaaacgcgcaagcagtcgatggcacattaaggaaacaagccgaggaaagcttgaaacaatttcaggaacagaatcttccaagtttcttgttttctcttgctggggaactggcaaatgacgacaagcctgcagagagtcgcaagctagcaggtttaattctgaagaatgctctggatgctaaagagcagcacagaaaaatagaatttgttcaaagatggttgtcattggacccaactttgaaatcccagattaaggcattcttgttaaggacaccttcttctccttctcttgatgcccggtcaactgcatcacaggttattgctaaagttgctggcattgagttgcctcataaacagtggcctgaattgataggatccctcttgtctaatgctcatcagcttcctgcccctacaagacaggcaacacttgagacccttggttacatctgtgaagaagtttcccctgatgtagtagaccaggatcatgtaaataagatactcactgctgttgttcaagggatgaattcaacagaagaaaacaatgatgtcaggcttgctgccataaaagcattgtacaatgcattgggttttgctcaggcgaatttttctaatgacatggagcgggattatatcatgagaattgtgtgtgagacaacacaatctcctgaattgaagattcgacgagcagcttttgagtgcttggtagctatttcttcgacatactatgaaaagttagctccttatatccaagatatcttcaacatcactgccaaggctgtgagggaagatgaggagccggttgcacttcaggcaattgagttttggagttcaatatgtgacgaagaaattgatatactagaagaatatggtggtgattttagtggggattcagaggttccctgcttttattttatt

SEQ ID NO: 101863 - DNA, 3696 bp, Glycine max
  Clone ID: PAT_MRT3847_62996C.1
gcccggtcgtccgcgcacgcccggccgcgcgcccgccctgctttttcccacactctgctagggtttcagagtcgccgcgctccctcacttcagtttcaactcgctttctcaatcgccgattccactcgttaactcgccgtccctgagttcagagatggccatggaggttactcaaatccttttaaatgcccaagcagtggatggaacattaaggaaacaagccgaggaaagcctgaaacaatttcaggaacagaatcttccaagtttcttattttctcttgctggggaactggcaaatgacgagaagcctgcagagagtcggaagctagcaggtttaattctcaagaatgctctggatgctaaagagcagcacagaaaaatagaatttgtccaaagatggctgtcattggacccaaccttgaaagctcagattaaggcattcttgttgaggacactttcttccccttctcttgatgcccgatcaactgcatcacaggttattgctaaagttgctggcattgagttgcctcataaacagtggcctgaattgataggatccctagatgtctaatgctcatcagacttcctgcccctacaagacaggcaacacttgggtcctgttgacacatatgacagaatacactaattctttgagaaatggaattctagaggcatactcagggctcttccaagggtttaaaggatgaccaaagacccagcttctgatgccatatgctcctcatgtgctgcaattcttggatagtttgtataatgagaaggacatggatgatgttgtgactaagacagcaattggcgtgcttggagatttagctgatactttgggtagtaacgctggcccgttgattcagcaatctgtgtccagcaaagacttccttaaagagtgtttatcatctgatgatcatttgattaaggaatcggcatcactgccaaggctggcagggaagatgaggagccggttgcacttcaggcaattgagttttggagttcaatatgtgacgaagaaattgatatactagaagaatatggtggtgattttagtggggattcagaggttccctgcttttattttattaaacaggcactttcatttcttgtccccatgttattggagacactgctgaagcaagaagaagatcaagaccaggatgaaggagcatggaacattgctatggctggaggtacctgcttgggattagttgcacggacagttggtgatgacattgtacctttggttatgccgtttaatgaagagtgtattgcgggacaggagcaagaaaggagatatcccatgatatctgcctttaccgtaactatagaaggtccctcccctgataaacttgtgccactggtgaatatggctttgaatttcatgctcactgctttgatgaaagatccaaataatcacgtgaaggacacaactgcatggactctagggcgaatgttcgaatttttgcatggatcagctctggatactccgattattactccagcaaactgccaacagattattactgtgctgcttcagagcatgaaggatgttccaaatgttgctgagaaggcttgtggtgctctttattttcttgcccaaggctatgaggatgctgcatctgcgtcctctccattgacccccttctttcaagatattgttcatgctcttctcactgtaactcacagagaggatgctggagaatcccgccttagaacagcagcctatgaagccttaaatgaagtagtgaggtgttctaatgatgaaacagctcctatggtggtacaacttgttcctctcatcatgatggagctccatcagactcttgagaatcagaaggtttcatctgacgagaggcagaatgagttacaaggccttctatgtggttgcttgcaggttatcatacagaagttaggatcatctgaaccaacaaagtatcatttcatgcagtatgctgaccaaataatgggtttatttttgagagtgtttgcttctcgaagtgcaacagctcatgaggaggctatgcttgccattggagctttggcctatgcaactggtgctgattttgcgaaatacatgacagaattttacaagtacttggagatgggtctccaaaattttgaggactaccaggtatgtgctatcacagtgggtgtggttggtgatgtatgcagagccttggaggagaaagtactgccttattgtgatgggataatgacccaacttcttaaggatttgtccagcaatcagctgcataggtctgttaagcctcctattttttcatgttttggagacatagccttggcaattggagaaaactttgagaagtacttgttatatgcaatgcctatgcttcagagtgctgcagaactctctgctcatacatctggtgctgatgatgatatgacagaatacacaaattctttgagaaatggaattctagaggcatactcagggatcttccaaggatttaaaggttccccaaagacccagcttctgatgtcttatgctcctcatgtgctgcaattcttggatagtttgtatatggagaaggacatggatgatgttgtgactaagacagcaattggcgtgcttggagatttagctgatactttgggcagtagtgctggccccttgattcagcaatctgtgtctagcaaagacttcctcaaagagtgtttatcatctgatgaccatttgattaaggaatctgccgaatgggccaagttggcaatcagtcgagcaatttcattttgaggctattgctatttcatggcttctagttcttgcatacatctgcatttgttgcgtgggggtctcaactgcatacatgagtcgggtcatcaccatttttgggaacaggtgttcggtcatttgggtctgcatttcatgtcagcaacaacataacatggtcatggagtctgctttttcatttttatttttaaaaatttattgttctgcattgctatggaggaagtcggtgggtgatgaccaatctttcttctgctaacttggcagaaaagatgtggtttttacgtacaggaggagaaacagggtgaaatgggggaaggagcaagaaaggagatagatgatatcccatgatatctgctgataccgtaactataggagtctatggtggtccagatattatgtcctttacttttttttttcttttcctattactattggctgtagagtgaaacaatcatcttagtccatccatccatgtgtttgggataggtaatgcaacatattttagccgttccttgaaattattcaaataattttttgtctcccgcatcaaagtttatatttattcatgagttgtttcttaaagtcgcatatatgagtaacgtgtcatggtagtttctttttcgctgccgtagttttgaatgtcgtatgtcgtgtatgtgcatgatttagattcgtgtcagtgagataactaacatgatttttagatgcccttagtggtaggtagcccacgccaagcaaattgttatagcgtgtttatgtggcattcaatagagttgtaccaagttggttcccaccccagcatgcaatttgaagcgggttcggcaagtgttacaagatgtcaaatgtcataattgtatttcttgggatattggtcggtgtcccgaacagaagaacactcaactgattgtgcataattaatggatattcgaattatt

SEQ ID NO: 101864 - DNA, 488 bp, Glycine max
  Clone ID: PAT_MRT3847_62997C.1
ttgttgttcctctgtaaaacaaataaggacaagagagaagatattcaaggcactgaggtaatgaattctgtatattttcatttcagcaaaaaggtacaattttatatacacgtattaccctaaagggataaggtaaagaatgtcctttttgcctcacaaattacagctcatactattctagaatttactctaggatcataacagaaaaatattcacataaagagatatttacaagaatgagagctattgggctgtacgggttttgagccattgttctgttactctggagccactaaaatcccgcttagaggttagtttagtagccgcgacagcaattgggtaaaattgcttgtaatttatgtctgtgcagtaatcctctgcgtgaactacactgcccctcttgatagatattaatacatgctacgtttttttgctacttcaactagtcttaggaacagttttctttttactctctacatcaatagcag

SEQ ID NO: 101865 - DNA, 565 bp, Glycine max
  Clone ID: PAT_MRT3847_62998C.1
ggttgggtacgcaaaaaattaatgtatcaccggacggggagccccggaccggaaagaacggcccggggcaggaaagcggacccccgaaaagagaggggaaccgaaacaaggggagaggaaaacaaaagacaacacccgaccgcaaacgaaacccaaaccggaaaccaaaaaacaaaagagccgaaacggaaaagaaaaaaaaaagaggggccgagagaaaaaggggacccaaccaaaaggaagggcgggaaggcccccgcccccaatcaagaaagcaacccccccggcccagcggaaaaaaggaacccccccccgcacggggagaggcggaacaacgaaccgccgcacagcggcttttccctcacgcccaggagaaaggggaaaagggggggccccgccaggccgggccaaggcagaaggaagccagccaacccgggggggccgcaccagcaaaaaaaaaaaccggcgggggggaggggagcgaaatacaaaaaaaagagcagcgaagcccagggaagcccccccaaaggaatgaaacccacccaaaccccggcccagagaaggg

SEQ ID NO: 101866 - DNA, 305 bp, Glycine max
  Clone ID: PAT_MRT3847_62999C.1
tacaactgcgagaacacgatcctacggtatctaaacaacacacactaagttctgttccttttcccacccaattcaattttcgcaattggctcataacgatacatactgatcacaggtcgaccttcggcatagcgttatatcagcagctttccactaaagcggatcgtaagtcttgctccagctaccggccgctttaagaagcctcacagattctgtcccagaaccgtagcgctccgatagatccaggatctacagactagcacggaacttcagattcttaatctcccgttccatcgattggtccc

SEQ ID NO: 101867 - DNA, 2093 bp, Glycine max
  Clone ID: PAT_MRT3847_6299C.1
gctttcgatgaggcatgctaccaggaaaaacgccccgttggcaaagataaaatctccgactcttgagttgagagtatctgctcagcatagccttggccatgggattgacccaccatctcctccttttttttgttcaacagtacccttcttcttcttcttccctcttccctatcacaatctaatcagtattgtgggaagcgaaaacttcatccaagctgttgttaaaaggcgggtccgttgtgtatgctctccaccaaaagggatgcctatttctatgtcgtagaaggtatcattggttgctatcaatcccactattacggttggagatgaggtgacggtcatagatgccactggcaagtttgtcttgccaggaaccatgaattgttaagcccctttaacctgccatttaaagcttaagtttacggctagtgaaacctgatatgactgccttaaatttcacgctaaaagcttgtcgaatcgatgacttacggaaaatgcctaatggtgtcaatggtattgaagtatgaatgcatttgttatgggatatcatggtggaaatctggccaaaatttcggtacactgtttatataaggctaataacaactgggtttactctgagtctcgagaaatggagctcatagtcaaggagaaaggcatcaactcttttaagtttttcatggcatacaaaggagctcttatgatcaatgatgagcttcttctggaaggatttaaaaagtgcaagtctcttggtgccttagctatggtccatgcagaaaatggagatgctgtgtacgaaggtcaggaaaaaatgatagaacttggaataactggtcctgagggacatgctctttcacggcctgcagtgttggaaggagaggcaactgcccgtgctattcgtttagctgattttgtgaacactcctttatatgtggttcatgtaatgagcattgatgcaatggaagaaattgctaaagcccggaaatcaggacaaagggtaattggagagcccgttgcctctgggttagcccttgatgaatcttggctttggcatcctgactttgagactgctgcaaagtatgtcatgagtccccctattaggaaacgaggacatgataaggcccttcaagctgccctttcaacaggagttttgcagctggtaggaactgatcattgtgcctttaattccacccagaaagctcttggaattgatgacttccggaaaattcctaatggtgtcaatggtattgaagaaaggatgcatttggtatgggatatcatggtggaatctggccaaatatctgtcactgactatgtccggttgacaagcactgaatgtgctagaatcttcaatatatatccaaggaaaggagctattcttccaggatctgatgcagatattatcatcctcaatccaaattcaacctttgagataactgcaaagtcccaccactccaaactggacacaaatgtctatgagggaaggagtggaaagggaaaaatcgaagtgactattgcaggaggaagagttgtttgggaaaataatgaactgaaggttgctcctggtactggcagatatataaaaatgccaccctttagttatctgtttaacggaattgacaaaaaggatgccttttatctaaattccctccaagccccagtaaagcgagccaaatctaacacttaaaagtttctgatatcctttggtcaaagttcaacattttaaggagcgggggagacaaagatgtgtgttaatccagttttttgcttaaataaaatagtatatatatatatatacacacacatatgtatattacaatagataataggtatgcttcgtgttaccttttccactcatgtaatgttcattagttacagtctaaatctgttagagaagtcacagtagctttaataagatactgtacactacagtatgtagcacattcagatgatgggagctgctgttcaggtttctattgaacttgtcatctacatacatattttgagtcatagatccatgctttaatagcatgtcattggtttgaaaatcaaggagtgcctatcgtagttataaccatatatagcatcttctcaaa

SEQ ID NO: 101868 - DNA, 280 bp, Glycine max
  Clone ID: PAT_MRT3847_629C.1
acgcttagaaaccgaggaaggaggaactctcaactctcaactctcaactctcatcgtaccaaatcaggaatacctaagtaacatcaaattaaataccaaacaaaccgtcctaaggttttaatttggatgtaaatagtttgtgctttgtagcataatctatggttttctgaatttcttggtagaagattaaaaatcagatattggtgttagttttggaatttaggaggagtggagggattgagatttggatttggatcaggttgagactgctcatatttcc

SEQ ID NO: 101869 - DNA, 358 bp, Glycine max
  Clone ID: PAT_MRT3847_62C.1
ggggcagccaaaatttgtatatgtatcctagcttagtacgagaggtactataatgacatggttagattctagtctagttcaccaccatatcacgaagcagaatatttcacaatcaccggccgaagttttacaggtattcaaaattagttaacatgggccggaactctatctataccaacttagcaagctattgctgcatcaaagataacaccacgtttacaccatagaacattactgtattttacacgtggatcaaactaatgaccaggaaacacagaggaactgtaaatcgttacatgtcaactccacatttccattaatcaggtacaggggccacacacaccattctgttggcaca

SEQ ID NO: 101870 - DNA, 323 bp, Glycine max
  Clone ID: PAT_MRT3847_63000C.1
cttacttgtgtttttaccggcaccataactgcttctctaagataaagaacaaggtgatgactttgcacttacagtgaaccacattgatcaagaggatggcctgaagtgatatcgtaaatcctaatttggagggtgcaaaaatacagaaaaatagtttacaagatgaacatcctccgctctttttggaacagtaccaccggtctaaaaacaactcatttttgggggcctgccttcaatagaagcctcccttttgcggcagcaaaggacacaaagaaaccacccgaaacaatatctctcactataaccggagggtaattaattaa

SEQ ID NO: 101871 - DNA, 511 bp, Glycine max
  unsure (1)..(511): unsure at all n locations
  Clone ID: PAT_MRT3847_63001C.1
gtgttttttgcggacacagccaagagcgccccaaagaaggcggcccccgccaccaaaggggcgaaacccccaacatccaagttgcctgccgttcccgaaactgttctgaaacgcaggaagcgccgtgatgcagccaaggcctcccttgttcaggccgctctgaagctgcgtgcccgtcgtctccaaaagaagaaggttatcttcaagcgggcggagctctaccagaaagagtatttgaagaaggagcgcgacgaaatccgtctgaaaagggccactgtgaagaagggtgactattacgtcccatcagaggccaagctcgcctttgttgttaggatccggggtgtcaacaaagttgcaccgaaagtgcgcatggtgctgcagctgttcaggctgaagcagatcaacaatggtgtcttcgttcagttgaacaaagccacagtgaacatgctccgtatctgtgagccttacattacctgnggttaccccaatttgaagagtgtgagggaactgg

SEQ ID NO: 101872 - DNA, 361 bp, Glycine max
  Clone ID: PAT_MRT3847_63002C.1
gaaggccaataaggggggtcatcaccatgcacaatgtttggtaccacatatttacaggaaatttgtctaatgattagaatgtgaaaaattgacagcagatagttctttgtgtgaattatgctatcaatggtgttgtacctagcataatggaactgagctacttacgggaactgactgaaaagtactttcaaggccaaggctgttgcgaatgttccaaacgagacagatggatatttgcatgactgccatatcctttcatagaggatattcgaagagcacgttcaaagtaccgagcatatatactactaatacgaagagcatatacctatacagccattgatacattatcaactattccaag

SEQ ID NO: 101873 - DNA, 318 bp, Glycine max
  Clone ID: PAT_MRT3847_63003C.1
ggaattcggcacgagggtaaaccaccatttgctgccaccgctccggcacacaaccacttttcagcctctccaaacacgccgcttgcgacaagatctcaactgttccaacaaccttgccatcaccgcttcagccaccgtcaaacgctccgaatgcacccacgctttcattgcagagtctacgacggtcgcggagcagctcaagaaggagagcagtggcttgacggatctgaaatttcattttaattggttctcaaattctcctctttttttatttctcttgatgtttttgttatggttatgaaatttcattttaattct

SEQ ID NO: 101874 - DNA, 641 bp, Glycine max
  unsure (1)..(641): unsure at all n locations
  Clone ID: PAT_MRT3847_63004C.1
atcatcaaaatcatactccataaaatggttgtgcttgtttacaaattaatattagaataaagaatgaaaagtcttacaaatgctaagtattactacaaaacaaaacagctcaagaacccttaccaccagttactgacccatctcgtttcacttttactaaactaacaatgtcaaatggttaaacacaattcagtggacattgcaaattcatgtcttcaaacaagggcttcacaatcacaaccggaatatcatcatgaaactggtcattatcatcatcgtacagccaacgagctgtcttgcttcatttttatgagattgctttcaatgttgcgcagcactggcctatagaagcgtgcgagaccatcatatgcttgtttaacttgttcaagttgagcagaaagctgcatgacttctgcagatagcacctctgctctgctctgttctgacacaagttggcccttcatagatgccaaggaagcaatctcatgttccccatttttagaagagtctggcaaacccctagcctgttccattctcaaattatctagaataccacgaagctcttcattntgcttaagacactccattacctgggttttcccatcttgctgctgccccaactgcctcttggtacgaatttg

SEQ ID NO: 101875 - DNA, 1695 bp, Glycine max
  Clone ID: PAT_MRT3847_63005C.1
tacggctgcgagaagacgacagaaggggggagaggtgaattcgcagacgaacattccgctcccatcgcatctgtaacaatggaagcgcgccatgcaactcttggtcgacgaacgttggaggaaattcggcaaaagagggccgcggagagattgagtaaaacctcttcgggaccagatctcacgcaggttcccagcacctccgagattgcgggaatgagcaagtccgagagcgcaaataagctctctgagacagatcttagtgctctattgtctcaattgaaaggactgcaaaagaagaacacggagttggaggaagaaaacacaaaaattagtttaaagcttcaaacgatggaaattgataatgagacaatgcacaagcaattaaatgatgtggaacaaaatacagtgccatctctaaggaaagctctgagggatgtcgcaatggagaaagatgctgcagttgttgcacgggaggacctttcagcacagcttcgtaccctgaagaaacgtctcaaggaagcagaagatgagcaatatcgtgccgaggaagatgcagcagcattgagagcagaattgaactcaattcagcaacaagcaatgactaatacagttagcacaatttcatcatttggtaatccacccgatcattttcaaattcaaagattacaaaaggagctagatgatttaaaactggaactgcagcgagaatcacttttgaggcaccaggagcaggaacaattagcaaaagagcaagcctgcattgcctcactgatatctgaaaagcaggagttggaagagaaactcatgtccatatctagagagcctgcagaagcctcagataaagctgctcacaaagcattttctttggaagacaagcagaaacttgataggcagttgtatgatatggctttagccattgagaggttggaaagcagtaggcagaaacttctaatggagattgactcacaatctacagaaatagagaggctttttgaggaaaattctagtctctcaaattcataccaagaggcaattggagcagcagcgagatgggaaaaccaggtgatggattgtcttaagcaaaatgaagagcttcgtgggattctagataatttgagaatggaacaggctaggggtttgccagactcttctaaaaatggggcacatgagattgcttccttggcatctatgaagggccaacttgtgacagaacagagcagagcagaggcgctatctgcagaagtcatgcagctttctgctcaacttgaacaagtcaaacaagcatatgatggtcttgcacgcttctataggccagtgctgcgcaacattgaaagcaatctcataaaaatgaagcaagacaactcgttggctgtacgatgatggtaatgagcagtttcatgatgatattccggttgtaattgtgaagcccttctttgaagacatttccaatgcccacagaattgtttttaaccatttgatgttattagtttggtaaaagtggaacgagatggctcagtaactggtggtaatggttcttcattcttgagctgttttgttttgtggtaatactctgcataagaagcccttgttatacccaaacgtgaatttgtaaaacttgtcattctttatactaatattaatttgtaaacaagcacaaccattttatggagtatgattttgatgatagttttgtac

SEQ ID NO: 101876 - DNA, 175 bp, Glycine max
  Clone ID: PAT_MRT3847_63006C.1
tatggattacatggcccctcatgttacaactgctgcacggggcactattgggcatatagctcctgagtaccttaccactgggaaatctctcagaaacactgacgcttttgcttatggtatcatgctactggagcatgtcattgcacaaagagcttttgaccttcatcgactcgct

SEQ ID NO: 101877 - DNA, 388 bp, Glycine max
  Clone ID: PAT_MRT3847_63007C.1
catataagtcattggattaaaattccaagtgggaatcgtttattttgtcaggaaagtagacatagactaacctattaacacatccaagctaaagggctcctttgtcacagcaaattttaccatcaatgactcattacggagtcctggggacatactgaaaggcttaaaagtgccatggacttgctgatacgatcatcctcatggtgatgcattgtccatatggcctgtgtatgtcactatgcttgatgggtcgattttatgcaagctttgaggctttgaatcattgacatagttcagagacgtaatcgagtcaacccgtgtcgagcgaaaactttgggagatactttgcggatgactgatctgtaagaccagattctatactgattac

SEQ ID NO: 101878 - DNA, 467 bp, Glycine max
  Clone ID: PAT_MRT3847_63008C.1
tcgccccctggtcaatcaacgcaaccaaaagctcccctgggaggctcctcttacactttcccgggggaaattaacgcagcgaacaagaacagaacaaacatctctattgggaaagaaagccacaaacaaaggcatccttgcacaccacagcttttacattcctagcgatgagagttccctcatccccacaacccaacaacaaccattcccctacctcaaacctcgtcctccacacaaacaacaaccctactacaaccttcacctacgaacccacctcggtccttgacctctgccggagcccgagccccgaaaaaaaactcactgttcccaagccagaaccacaacacaacaacaacaacaacaacctaaacctagacctggatgatcatgtcttgcctaattcggagtggtgggagtccatcatgaaagacttagccctacccgaagactcttccacaccccttttg

SEQ ID NO: 101879 - DNA, 228 bp, Glycine max
  Clone ID: PAT_MRT3847_63009C.1
ctcaagccctgtcgcctctaggtgattagagcagcagcaatgaactaacatagcatcgctatgtacaaggtcgatggcgttaccgtaaccagcgttgccatcctatcatgggcggtcatactcctacttcagcgtggctacaccgcccatgccaccgtgcacaatgtcaaggatgtatatgtgactaatcattcggaggaaactgaaggagcaatgagtcatgtagat

SEQ ID NO: 101880 - DNA, 942 bp, Glycine max
  Clone ID: PAT_MRT3847_6300C.1
gtgacatttatggtaccattgattacatatttggaaatgcagcagtgattctacaagaatgtaacatgatatggagaaaaccaatgcctggtcaattcacagtaatcactgcacaatctagagatagcccagatgaggacactggtatctcattccaaaattgctcaatcatagcaactcttgatctctattccaactctagcagcttcaagagctaccttgggaggccatggagggtgtattctcgcactgtttaccttgagtcctacattgatgacttcattgacgcaaagggttggacaaagtggtctaatgagcctggattgaacacttattcccctggagagtatgacagcttttcaatccaaaactgttcaattctagctacccaagatttgtactccaattctggtagtttcaagagctaccttggaaggccatggagggtctattctcgtactgttttccttgagtcctacattgatcaatttattgacccaatggggtggaaagagtggtctggtgatcaaggcttggacactttgtattacggagagtatgctaattatgggcctggttcagggactgataaccgagtcaattgggctgggttccatgtaatggattatgacagtgcctacaacttcacagtttcggagtttattattggtgatgcttggcttgggtctacttcattcccttatgatgatgggatttaattataagtgtgagagagattaaataggtgagctagcttgttgtaaaattagccacttggcctttgctattgtaaaataaaaaggtgagtggctaatttaaatatgattacgatggataagtgcagtgaaaagttgaaaagatgttaagaaatatgctgaaccaatcagttgttttgacgaatcaaacaataagagaggatcaaacaacatccaattggtagat

SEQ ID NO: 101881 - DNA, 265 bp, Glycine max
  Clone ID: PAT_MRT3847_63010C.1
ggcacaagtgtgtttagcggctcgaccaagggaggagcagtgtgctgaaaatgaaggcccttgttggcttcgctgccacaattgtggtagcatggcagtgccatgcgaacgatatgtcccctctccgaaagaacactgtctatggtgcccgcactccgtaggagaaacgcgcaaggtggaggctcgctgggggagcacacaacatctttggctttgagaccatttctgaagagtgcggtgaagcatcaggagaacacctccatgg

SEQ ID NO: 101882 - DNA, 417 bp, Glycine max
  Clone ID: PAT_MRT3847_63011C.1
tttttgaatacaaaatttagagagtagagtgtcactctcttaattgaatattggtaatagtatctttcttgtcttgttaatttagacgtgtatttcacaattcacacgttatcttacaactagtagtacagtatatgataataatagggcggcgcattttgcgttcattcttgagcaagaaggtttctcgagtcagagttgttgccccaagctctctccttccatatgagttctacttcatcgaaggtcaatcctttggtctctggaacatatataaggacaaacacaaaggcaagcactgatatagctgcaagaatcaagaaagtggaacctatccctatagcttcaacaatcgaaagaaagctctgagacacaaccaaatttgaaacccaacacacagtagctgacatgccccca

SEQ ID NO: 101883 - DNA, 316 bp, Glycine max
  Clone ID: PAT_MRT3847_63012C.1
gaaaaggtgcctctggtcatccgcgcggagttaatcttggtggtgcaatcctctgtggcgttacacggcacaaacagaatcatgaaggtccaccctgtttctcgaaaacgcaccatctgtatccaattccgcggcgacggggggactccgatggcagaggctcacgcgctgctggggatcgccaggacaaagctccggcgactccctcacgtgtttatctgcgggctggatctttccttacggtccaacgccgacgaggcggaggaagaggctcctaacttcttccggttcgtggcggacactgacggaatcggcg

SEQ ID NO: 101884 - DNA, 614 bp, Glycine max
  unsure (1)..(614): unsure at all n locations
  Clone ID: PAT_MRT3847_63013C.1
ccacgcgtccgcggacgcgtgggtcctactctatttttccaccttgtgtgtctctgacgttggaaacccaagctcttcttcagttcaagaatcatttgaaggattcctcgaattcattggcttcatggaatgaatcagactctccatgcaagttttatggaattacatgtgatccggtttctggaagagtcacagaaatctcactggacaataagtccctctctggtgacattttcccatccctctcgattctgcagagcctgcaagttctgtcactcccatccaatttaatttctggaaagcttccatcagaaataagcaggtgtaccagcctgagagtgttgaatctaacaggaaatcaattggttggagcaatcccagacttgtctgggctgagaagcctgcaggttcttgacctttcagcaaactacttttctggcagcatccccagctcggtggggaatctaactggactggtttcactgggtcttgnggaaaatgaatacaatgagggtgagattccagggactcttggaaatctcaagaacttggcctggctctatcttggtggctcccacttgataggagacattccagaatcactatatgaaatg

SEQ ID NO: 101885 - DNA, 882 bp, Glycine max
  unsure (1)..(882): unsure at all n locations
  Clone ID: PAT_MRT3847_63014C.1
cggtccggattcccgggtcgacccacgcgtccgaaaactcagggtgggcgtgtatacggctgcgagaagacgatagaaggggaccggcggcgaaggtaaggtggtgcaaacaaacaaaaaaccctaattctcgaatatcagatcggcgatcggaggaagaatctgaagttgggcgaagatggttctcgcggagttaggagggagcatttcgcgtgctcttcagcagatgagcaatgcgacgatcatcgacgagaaagtcctcaacgattgcctcaacgacatcacgcgcgcgcttctccaatccgatgttcagttcaagctcgtccgcgacatgcagaccaacatcaagaacattgtcaacctcgaagacctcgccgcaggtcacaacaagcgcaggatcatccagcaggccgtcttcaacgagctctgcaagatcctcgatcccggaaaaccctcttttacccctaaaaagggcaaacccagcgtcgtcatgttcgttggcctgcaaggatctggcaaaacgacgacgtgtacgaaatacgcgttttatcatcagaagaaagggtggaagcctgctctggtgtgtgcggatacgttcagagctggtgcttttgatcagttgaagcaaaacgctactaaagcgaagatccctttctatggaagcntatatggagtcagatcctgtgaaaattgctgtggaaggngttgaacgattcaagcaagaaaactgtgatcttataattgttgacactagtgggcggcacaagcaagaagctgctcttttttgagaaaatgcgccagtttcagaagcacganaccagatcttgttatattcgttatggatagcagtatcggtcaggctgctttttgatcaggctcagc

SEQ ID NO: 101886 - DNA, 384 bp, Glycine max
  Clone ID: PAT_MRT3847_63015C.1
ttcctttcgtccgatttaatccaaacccgtgtactgatgcatggcgtttggaatatctgaagcgtaccggattatattgtgatatcatttgagtcactggatggactgccactccaatgcaagatgttcagcttgcaaatgattggagtattaactatcacgaatgtcttcccaggacctattgtgtcctaaatccacaaaatccttgtgagctaaataggtggatggggaaactgtctttcccctagggcacttaccgaactgtttaaagaatgcctctctctattgatgaacaagctggtgcgaagaatgctattatcattgctatgccagacgcatctcttgtaatgtggagatatattgatggagatcttgacattgatg

SEQ ID NO: 101887 - DNA, 257 bp, Glycine max
  Clone ID: PAT_MRT3847_63016C.1
ctaacaaacccatgatgataaatctacatctgctccaagactaactgctttttgcaattcatccacacccataaattctgaatatgcctaaaacacttccttgcttgaaactacttccctgatctgctgtgcaatgtgctctatctgccagagttcccattatcattggggataatactaaagcgttcaaattactagacgaaatgtttattcattagattcacaacgatgcggtgattaggttttataaacaaagg

SEQ ID NO: 101888 - DNA, 690 bp, Glycine max
  unsure (1)..(690): unsure at all n locations
  Clone ID: PAT_MRT3847_63017C.1
ggcacccgatcagtcctactcctcaccctcccctgactcttagtatctgagcaacttccaagaacaaaccatcacttgcactgcactttgctcattagtcattacccatatcatgcctcgcctattgggaaaccttacacctcaaatccttgttcaggcacttagatccatgcctcgccaagctacatcctcgctcaaagtgagaacgcacggaggaacaagagggtcaggccccagccatggaagcgttggagggaaaagagggtcacccatcagccaggggaaaggtggacaacataatgaggtggttcaaaaaatgccgaatggtaacaacggaagcaaaagaaatgacgaggctagggttgaagctaacgcggcaaagaaattgggcaattagagaattagaaattgcaaagtttcagaaaacatatttgatagatgttttaattaagactagtgattttgagtgttcgtcattgttagtgattgtatgagtgctttggtagcataagacattaattagtaagatgtgtagattaattaattccagttctgtcctgtcatggcatattgattgtgcttcattacgtacatcagtgtggttccaggcccatttatttattcttgcttggcaatattattctattcttgagttctaaataaagctgtattaattttcnntgttgnaaa

SEQ ID NO: 101889 - DNA, 356 bp, Glycine max
  Clone ID: PAT_MRT3847_63018C.1
gtaaagcgtgggttctttaaagttgttaaccgaaagataacgttgttattttttaccttgactttcacttgcgaccgaggctagagagccgccttataaccctttcttcctctgatctgcaaattgaaacggcctcttgccacacaaagcttgtaagatccaaagggtcaatgttactgttaccgtgtggcaaatgggcagctaaagaccaggaaaggacgtcgtgccattccccacgtttgttgtggcccgtggcctctaataaccctatcttcacccattggggaaaaaaacccttcaaatcgaccacatcggagaggatattgctggttctttgtgaggggttgacccaaaaa

SEQ ID NO: 101890 - DNA, 389 bp, Glycine max
  Clone ID: PAT_MRT3847_63019C.1
cttgagctgtgattcactgatattagggcacgtatttacatggaactacatcgatgctggagctttcgcttacgcctatcacttcggtgatcggaaccgaatcaacgacgtcaatccataagcacttgggacgaacctatagtttcacttgccgtcacatcagcaccgccttacgaattatcaacctacgggatgaagaatctggtactgagagtgtataccctgatgttgatggctctgagggtgatgacacctataggatctaatggttctgatatctatataggcgctgagcgcttgcgtgaagtggatgaagactccatacaggatgacagtaacctttgaggatagagcagtcaagtgctatacttggataatgcactggatct

SEQ ID NO: 101891 - DNA, 415 bp, Glycine max
  Clone ID: PAT_MRT3847_6301C.1
atcatctagctatctcgatcgaactgtccaaggtcctgtcactagggcgtaagtgttagtgtgaccgctgagaaacatgtgcggatgtacagtggcctggcttttatggttagggtggcatgctgcaggcggcggttttgtggtagaaccattagacgagaagataaaggtggtaggtggtaggcaagcatactgagggactagcatgatatccagcgcagcggacgtgtgatgtgggaggccaacgttaagacgacacacacacggaccaggaggaattgatcacatcacatggagggttagccggtaggtcgcgcgtgagtgattgaagggcgctgcagtgaatgggccttgacgacttttattaagcccgcgcctcgcctgtgtaggcaattaaggtaaaatttagtgggaa

SEQ ID NO: 101892 - DNA, 136 bp, Glycine max
  Clone ID: PAT_MRT3847_63020C.1
gtctcttttgtgcctgaacgacgtcactctctactgtggagccatcgctgattgagcgctccatagtgatgggaaccctcttgtagatggcgtctcatatcctatctagcgacacatgacatcctttgaggcatta

SEQ ID NO: 101893 - DNA, 385 bp, Glycine max
  Clone ID: PAT_MRT3847_63021C.1
tgcatgctctagctgtaagttttgccaaagttgacttatcaaagagattatttattgagtctgacctattacccactgagttgtgtgtggaggagttggcagtgagcagcaatgaagagcacaaggaactgaaaactaaagaggacagtgaactagccaataggatgtctaaagaattagatttagatgatctagctgcagatcagcttacatcatctaggtccagtagcatgtgccatgctgtttctacattccccttgtgcaacaatgtgtttcacattcctgtaaactatgtcaatgctgaagctcagcaaactagctgttctagtaaaaataaagcatttgttccatgttcagatgctagtctacattctactgaagatgc

SEQ ID NO: 101894 - DNA, 329 bp, Glycine max
  Clone ID: PAT_MRT3847_63022C.1
gagcacaaacgttaaccaccgattccatttactgctgctacaactgcccaaaagttagcttccgcaaattccacactttcgattcagattctctctctcaaacctgctttcacaaacactcatgtggaaagggtgaggagcacaagaaacccttcatatggaaaaactctgaaattagggttttggtttcccccatagggagataatgaccgtagaaataatgaaagagggacgggatgatgaaacagctgttgggtaggcccgggacgattagcgggttcctgttgatgttcagccaatgcaccttcggtgccgcttcgattgccatt

SEQ ID NO: 101895 - DNA, 442 bp, Glycine max
  Clone ID: PAT_MRT3847_63023C.1
atcaaaaactttataaaagttattctattaacgattatttgtttcagcttttaaaatattttttttattaaaggatacgttagaaaagttaaaatatatgattgtataaataaaatgaaaattaagaatttttttcggtagaataatttttttttttaaaatataatcttattactttcttaaagttaaaaaaaattgtcttgaatagttgaatgtgtaaaattgaaggtatacaagcaccgaagacttacaaagttactagtaagataatttaattaaggaataaccttttagataatatgagaatggaccttacaattgtttctgattaattgaatctggacgtgacaggacggtaataatctagaagtatggtagagataatgagttctgaacaataattaatcggacctaacctagataataggcatttaattgggag

SEQ ID NO: 101896 - DNA, 517 bp, Glycine max
  unsure (1)..(517): unsure at all n locations
  Clone ID: PAT_MRT3847_63024C.1
gctgcgagaagacgacagaaggggtgcctcctatgagatgcaaagaaaaatgtggaggagaataagaggtggaggagaaatgcacaacacatagcatcactgcgagatgcaaatagaaacgcagaggatacaacaagacacgacggcgacgagggagaagagcttacctatcaccactgcagagcatgatgctttttgcaccacccagaggagacacacaaaggaaacttaacatcattacaataggggatactaatgtaatgattttaaaaggagaagagacatgtataaatagagcaaaccttagggaaggtttctataatttgctataaaaaaaactataaaaattgaatttaacacccaaacaagtcattttgatatatgggattttaagttctcttaaaaattgaattcttacctcanaatcctccatatctaaacacacttaatggttagcatccaacataatttttttttctctcctcacaaattgagttaaatactggtttatagcaaa

SEQ ID NO: 101897 - DNA, 532 bp, Glycine max
  unsure (1)..(532): unsure at all n locations
  Clone ID: PAT_MRT3847_63025C.1
gcgttcgcccacgcgtccgctctattcctctgacttcccatagaccacaatacactcaccccaggcaaaaaatttcgtttcaaaattgtgatatggacggaagagcgagcagcagcgtgggcggagaagcatcgccagctccagcaccggtgccgataacgaatgcgaacgcgccgccgcctttcttgagcaagacatacgagatggtagaggacccttcgacggactcgatagtgtcgtggagtccaacgaacaacagtttcgtggtttggaaccctcccgagttcgccagagatctcttgcccaaacacttcaagcacaacaacttctccagcttcgttcgccaattaaacacctacggatttaggaaggtagatccagatcgctgggaatttgcaaatgagggatttttgaggggtcaaaagcacttgcttaagactataactcggcggaaacctgcccatggtcataatcaacaggcacagcaagcacatggacangagtcatctgttngggcttgtgttgaaagttg

SEQ ID NO: 101898 - DNA, 279 bp, Glycine max
  unsure (1)..(279): unsure at all n locations
  Clone ID: PAT_MRT3847_63026C.1
gttagggttagggttatttcccaattcgtcttgtccggttctcgtaacgatctaggttattctataatccaaaacatttcggcaccgtcatacacatcatggagtatgaatttaactattaantatttatttatttcgtgttaaacnatttgcaggaaagacaaccttcgtgaagaggcatctcactggtgaattcgagaagaaatatgaacgtgagattcttgaactantattttatattattaatcttttatttgggttatctcattcttttgtcga

SEQ ID NO: 101899 - DNA, 2225 bp, Glycine max
  Clone ID: PAT_MRT3847_63027C.1
aggatagcattagcatcgtttgcgtttgctctgctgttccacagatttgcaagtgctggttttcatgggcactcgataaataacttggacaaggaagttggtcatgacagaggagctctcgttgagttctatgctccttggtgaggaacatgtaaactgctcgctccagaatattactcactaaccatcgtcactaacaccagtgaggagaaaaatggagatagagaagagcactaagggcagtgcggaaataggagagaaagaagagaagaagaagaagcagcatcgacgaggaggcatcagaacattacctttcattcttgcaaatgaagtgtgtgacagatttgcaagtgctggttttcatggtaacttgataagttacttgacccaagagctgaacatgccattggtagctgcctcaaacacactgacaaactttggaggaacatctagcttcacccctctcattggggctattatagcagattcctttgctggacgtttttggaccattaccgttgcttctctcatttatgaactgggattgattagcatcactgtatcagctatactgccacaatttcgtcccccaccatgcccaacacaagctaattgccaagaagccacatcctcacaactgtggatactctacatctccctcctcctcacatctgttggatcaggtggcattagaccatgtgttgtgcccttttcagcagaccaaattgacatgaccaaaagtggtgtggcatcaagaaagtggaacatcttcaattggtactttttcagcatgggcttcgcttctcttaagtgctttgaccattgtggtttacatccaagacaacatgggctggggttggggccttggaattccatgcattgccatgttgatatccatcgttgcctttgtgttgggctcaccactttataagaccgtaaaaccagaagggagccctttggttcgtttggcccaagtaaccgtggcagctataaagaaaaggaaggaggctttgccagaagatcccaagcttttgtaccataattgggaacttgatgcttcaatttctttagaagggaggcttctacactctgatcaatataaatggttggacaaagctgcaattgtcacagaggaggaggccaaagatccaactacaacaccaaaattatggaaattagccactgtccacagagttgaggagctaaaatccatcatcagaatgcttccaatttgggcatcaggaatcctgctcataacttcttcatcacatctgcacagttttgtgattcaacaagctcgcacgatggaccgtcacctctctccctcgttccaaatttccccagccagcatgtccattttcagcgtgctaaccatgatgtcaggagttgttctatatgaacgcctctttgttccctttgcgcgcagattcacagggaacccttctggaatcacatgtttgcaaagaatgggaataggcttcataatcaatatcatagccactgtgattgctggcctaatggaaatgaaaaggaaatctgttgctgctaagtaccacttattggatgatccaaaagccactattcctataagtgtgttctggttggtacctcagtattgccttcatggggtggctgaaattttcatgtctgttgggcatttggaatttctctttgagcaatcacctgaaagcatgagaagcagtgctacagcactgtactgcataaccacagccattgggaactacatgggtacattgctggtgtcattggtgcataagtacactggcaaggagaataattggcttccggataggaacctcaataggggtggattggactactattattttcttgttagtgggattcaagttgtgaatctcgtttattattttatatgtgcttggttttacacttacaagtccgtggaagaaattagtgaaaagaacaaggaagaggatttggaacaagccaacgaacatgtctcatctgatgacaagttaaatgatggtaaggaggaagaaaagagaggattaacgaaagatgaatgaattgatggggttgatattagtttttagcattgttgattgttgaactttaaggaatgttcttttcctcatcaaatggcatatgtaagcacatggtagatcgtgtctactgttttatacagtttatgtttagttgtgcttctaaacaaaaaaaaaaaaaaaaaaaaaaaaaaaacaccc

SEQ ID NO: 101900 - DNA, 592 bp, Glycine max
  Clone ID: PAT_MRT3847_63028C.1
ataattcacaatgatgacagagattgtatttagacttgttttgatatgcattgatatcccagaggacgaaatattgcctggaaagtgaaccaaataacgcatatttattaggacaattaatttgacctcaaggttataatgggtttacgaagaaacaaaacaaaggttgcggaaggggttttctcacaaccatagtgcgcccaggccaaacccaccctggcctcttttttaaggggaaaggaatcctacacctttacaccactaattattttgaaccccaacaaaaaatattattcaatgctggccaaaacctttcccaaacccttataagaaagaaccctggcaagaaacaaaacgggggcgcatggaatcccttggcaacactttgaggtatctcgacaggcatcttgcaaggaaccaggtcctatatttttttaaaacccttttaataagaaaaatttatcattccttaactggggactacaatcatataagcttggctggcactgaaacctccccaacacttggttggatttttctcacccactgcatccttgggggatactttatcatctttaccacaaccagaggg

SEQ ID NO: 101901 - DNA, 905 bp, Glycine max
  unsure (1)..(905): unsure at all n locations
  Clone ID: PAT_MRT3847_63029C.1
gacccacgcgtcagcccacgcgtccgaagacgacagaagggggatcgctctcacacctgtgattattcctcttttaacaatccacatccaaattctagggttccgaaatggaccccacgcgtccgcccacgcgtccgcccacgcgtccgcccacgcgtccggcttaatctctctcattccccatttcctcacctccttcaaccgctgctaaattctagggttccgaaatggacgctggcggaaagatcaagaagggcgccggaggtagaaagggcggcggcccaaagaagaagccggtttcaagggattctccnggttccaataataagcnccncccggnggggtttctccaattccccgtcggaagaattggccgttatttgaagaaaggaaggtacgctcagcgtgtcggtaccggtgctcccgtatacttggctgcagttctcgaatacctagctgccgaggtgcttgagttggctgggaatgccgcacgtgacaacaagaagaacaggattattccaagacacgtgcttttggcagtgaggaacgatgaagagttggggaaattgcttgctggagtgacaattgcacatggtggcgtgcttccaaacattaaccctgttttgttgcctaagaaaacggagagggctgccaaggagcctaagtctccatccaaggctaccaaatctcctaagaaggcttagatttttttttttttttttttaaatctagtgttgtatatcggtgcttagatgcttttggtgtaacaggaaatttgatgtgttttttaaacattgtaattcttgtcccattgtgttgcttgtaggagtgagtttgctttattaatgaaaagtggaaacctcttgttttcaaaaaaaaaaaaaaaaaaaaaaaaaggcttaccc

SEQ ID NO: 101902 - DNA, 519 bp, Glycine max
  Clone ID: PAT_MRT3847_6302C.1
gcttttcttgtggccgttatcttggacaaaactgtgcctggcagcaagcaggaacgtggagtctacgtttggtcagaacctgaggttgctagaagggagcctgctgttgctaatgactatgagttgcccttgagagttggtaagattttcagatgggtgaagtgggttggtctgtgaatgacaaaagggttttgttggttgaatgaacattttcagtttattgaatgttatcaaccgcccaagataccgttctaagtctggattcacatcttcttgggctcaatcatgagtagtatatagttggtcatgttacagagatcatttgtgtaaattgaaaatccggaggggtctatttgtgttataatttattagattagcaatgtatttagttttgattaattcaaaatctccacatggaggtttttcttccttgctttaaggcggcctttgacaaatcttcgtggttatgtatatatatatatatacacccattaaattcccggaaaaaaaaagggcggc

SEQ ID NO: 101903 - DNA, 853 bp, Glycine max
  Clone ID: PAT_MRT3847_63032C.1
cccccttccttaacctcgaatttcggttcaagtctcgctgcttgcaattagtcctcttccaacaatccgcacctaaactctagggttctgacatggacactggtggaaagatcaagaagggcgccggagaagaaagggcggcggcccaaagaagaagccggtttcaaggtccgtcaaggccggtctccaattccccgtcggaagaattggccgttatttgaagaaaggaaggtacgcccagcgtgtcggtaccggtgctcccgtttacttggccgcagttctcgagtacctagctgctgaggtaacatatcactaatttgcatcacttaatcttgattgactatgattaattatgtgttgtgaaattgaattgtcttgattggattgtgaaggtgcttgagttggctgggaatgctgcacgtgacaacaagaagaacaggattattccgagacatgtgctattggctgtgaggaacgatgaggagttggggaaattgcttgctggtgtcaccattgctcatggtggtgttcttccgaacattaaccctgttttgttgcctaagaagactgagagggcttccaaggagcctaagtctccatccaaggctactaaatctcctaaaaagtcttaactgacttagtttattgtttctctatttagtgtgcacaaaatgtaaatctgtgtttaggttccttcttgtatcaccattatttgtagttctcaagtcgctgtttctttttcacattttcattcaatctgttgagacagcaagctctcagtaatggattgatttaattttcttatattcgtataattgtatcccgccttctctctatcgaaagattgcgcaat

SEQ ID NO: 101904 - DNA, 447 bp, Glycine max
  Clone ID: PAT_MRT3847_63033C.1
ggctcgagatcatgccgaccatgcggcagggagcagaactaaagcataggaatgggcgctaacgatcgcactattggcagacaataatgggtggctctatggcgaactgaaacgaacttgcgatactgacctaggctcaacaagaccatgcctgcgtgacgacgcatgccttcacaatcgctatacagtacctgactaatgcgtctatgaagaccaatgcgcagacgagagcgtcgacacactgtactcgtagatgctgacacgctgcagaataccactgggctactgacatgaccaaccatacagatgtggagcgatacgttacccacccataaggatggagaagactggagccctcaagtagcagctggacaagcacaatacgactgtctcgaagtgacacaatatgccagcttggtatgcgcccaagctcataagcgggaactt

SEQ ID NO: 101905 - DNA, 737 bp, Glycine max
  Clone ID: PAT_MRT3847_63034C.1
aagcgggacaaaacattaacataattttttctcaaaagttaaattggtcaaaacaaaatatgttcattttcctctgcccctttcccaatttaataaaaaactaaaaacagctaaaagcttactttttttgagcccccaaaatcaatgccttggaactcttcaaattcttccaagactgcattatcttcaactttaatcatttgctcttttcctctaagggaagaaaatcctctcacttggcctttttttgtcttagggggagcatcttcaacaccaagggattctggttcctttttttttttagtcttttgcctggtatacgtcattggctgtctattcctcaaaaactacgtcccaaggaaggccatcatcattttcgtcatcaccatccatttgccccacaagccacttgggaatatcaatatcattgagggaaattggatcaatttcatctctataattgtatcttttaaccaatgcttgattacattcgacatacaccaagttgtgtagtcttttgtgttcatgcctattccttttcttggaatgaatatgtaacaaatatgagaaaaaaaaattatgagcaactaagaaaagaaaatattaactagtaactattaatataattactaattaataaattactagctcaaagaaactccaattgcattcacatcccgacgcactacatgtcaatcaaaatcttaattgccaagtgttgcaaatttggagttgac

SEQ ID NO: 101906 - DNA, 144 bp, Glycine max
  Clone ID: PAT_MRT3847_63036C.1
catctatacgccaatctttttttaggcctctaatttcatacatccgttgcctattacttaacatctaggggaccaaaacacaacataaaatcgattactagaacacaaatatcccgttacttccaaacaaccacatgtcttccc

SEQ ID NO: 101907 - DNA, 616 bp, Glycine max
  Clone ID: PAT_MRT3847_63037C.1
cgaggccggccggttcggggcatctcaccatcactctcgctcttgcattattcctcttctcgcaatccgcactaaaattctagggttccgaaatggacgctgacggaaagatcaagaagggcgccggcggaagaaagggcggcggcccaaagaagaagccggtttcaaggtccgtcaaagccggtctccaattccccgtcggaagaattggccgttatttgaagaaaggaaggtacgctcagcgtgtcggtaccggtgctcccgtatacttggctgcagttctcgaatacctagctgccgaggtaacgtaacatatcactacatcaattaaattaatttgcttcacttaatgttgattaattatggttaatttttgtgttatgaaattgaaatgtggatatggattgtgaaggtgcttgagttggctgggaatgcagcacgtgactacaagaagaacaggattattccaagacacgtgcttttggcagtgaggaacgatgaggagttggggaaattgcttgctggagtgacaattgcacatggtggcgtgcttccaaacattaaccctgttttgttgcctaagaagtctgacagggcttccaaggaacctaaatct

SEQ ID NO: 101908 - DNA, 665 bp, Glycine max
  Clone ID: PAT_MRT3847_63038C.1
ttcttcgcgtccgcccacgcgtccgcccacgcgtccgcttttaacaatccacacccaaattctagggttccgaaatggacgctggcggaaagatcaagaagggcgccggaggtagaaagggcggcggcccaaagaagaagccggtttcaaggtccgtcaaagccggtctccaattccccgtcggaagaattggccgttatttgaagaaaggaaggtacgctcagcgtgtcggtacggctgcgcccgtatacttggctgcagttctcgaatacctagctgccgaggtgcttgagttggctgggaatgcccgtgacaacaagaagacacaggagtattccaagacacgtgcttttggcagtgaggaacgatgaggagttggggaaattgcttgctggtgtgacaattgcacatggtggtgtgcttccaaacattaaccctgttttgttgcctaagaagacggagagggctgccaaggagcctaagtctccatccaagggtactaaatctcctaagaaggcctagattatccctttttttttttttttttttaaatctagtgttgtatatcggtgcttagatgcttttggtgtaacaggaaatttgatgtgtttcttaaacaaaaaaaaaaaaaaaaaaaaaaaaaaaaaagcggccgctttagagga

SEQ ID NO: 101909 - DNA, 531 bp, Glycine max
  unsure (1)..(531): unsure at all n locations
  Clone ID: PAT_MRT3847_6303C.1
tatagacgttccatcagtgtatnngttctcgnntctctctcaccgcgagcgcggttacacaacctcttctgttactgcttttatcatgtaaacattttgtttaactccgtgcaaaaaaaaaaaaaataatttctatattgataagtcagcttttgtttcttatcaaaacttacaggtttttttgtttttctttaacattaaagtgctctttccaatatttattacctttttaattccatttatttgctgcttcttgaactttaactagcggcaatgctttctatttccagcnnntttagcatcaaatgctttaaaatgaatgtttgtgcaactgctctagtgttttagaattaaannncttttcccaaaaaccatttgtggtnnataagatgcatnnnnnttttgttcccacctttttccaccaactattcaacacaagttccagtaagtgttagtttcatcttcataatagtgaaatttacaccagcaagctttgagttcttttncatcnnttccccaaacttatccttt

SEQ ID NO: 101910 - DNA, 247 bp, Glycine max
  unsure (1)..(247): unsure at all n locations
  Clone ID: PAT_MRT3847_63040C.1
caagcaccccaaccttgttcctttaactggatattgtgtatctggggaccaaataattgccatatatgattacatggaaaatggtaacttacaaaacctgctttatcacttaccacttatagtacaaaacacanataatagtaccacaaacgcatgacaagaatccaacaacaattgtattcaaaatgctggctctaaaaggctactcacatctttaacatttcaccacaaaatctcccttaccaca

SEQ ID NO: 101911 - DNA, 444 bp, Glycine max
  Clone ID: PAT_MRT3847_63041C.1
atgttctattgttttttttaccgcccacagctcggggaaaaaaaagcaagactttgttaaccgatcaccccgtaaaagaaagaaataaaaagccaacccctgaaagaattgaaaaggaattacatttcccatgaattctttatgaagtagagacttccaatgtttccctcactggtttataattatcaacctatttctctataataatattatgaaatatggggggatgactgggtgaggcttcaccgaaggaactcacatgggggacaacctacaaattaaacacaaaatttttgaagcaaaagggagacttgtttgaatcaaatctcctacaagcccaacagaaaagagtctccaaatgtgattttaacatcttggggaaaccaaacttttatgataaaaatgcagataattgaacccaaatttttccccgatcctaggaaa

SEQ ID NO: 101912 - DNA, 322 bp, Glycine max
  Clone ID: PAT_MRT3847_63042C.1
tttttggttttttttttttgttttttttttttttttttcgttcggaaggaaaaagtttcatctatttactgggggcaatgggtacatgggacaacttaaaaaacactaattccctgcgttgtattcccaaatctttaacgaggctttcctaggatttcatcacatttcactctcctttctggccgccaaaatgttttgatgattaatttggctcccgaaatcatttgtgcaaattttttacaccaccgttccttgagcatggttccccgtgccccaatgcaaacaggttcttccaaccccaacccacaacaaaaccaccaac

SEQ ID NO: 101913 - DNA, 326 bp, Glycine max
  Clone ID: PAT_MRT3847_63043C.1
actcctacggaaaggcacaagaactatattattagatgtagatgctgatgaattgatatgaacggtcgagggacatataacatggcaaatactgttattcaccaccattcctaattttgtgcaaaagtttttttttttaaaaggaactacatacattactttggaagtgttaccaacggtttaacgaaattaggaacaaaggatgactaacattcttgatctgaaagcattgagataagctagttgtaaatgccactgatacccatgaacttctaagaccccaaatatcttgatgtctctctaaaatacagcattaaccagtactt

SEQ ID NO: 101914 - DNA, 496 bp, Glycine max
  Clone ID: PAT_MRT3847_63044C.1
catcccataaccaaactattcaatcccatctgatgaaccacatccaaggctttgtgaccgagaccgacccagagatgttcaacctcaccacaggcatggagatgatagggttttccaagaaccttgagcaaaacagtgaaagcaacggtgtcatgtggaaaagtttcttctgcaaaccaggtcaacacgcgggtccttcctcttccaaaacgatgaacgagtcttgtagcaatttttataaccaccagcatgatcataagtataataagcaagacttcacatcagggattaattctgagacaagtaccgataacttagttgtcggtggtgcccatgattctgccccgtggcaagagaacaggctaatggttgatgattcttctttaaggtgcgtgttcccttgtgaaggtaacgaaaggccgagtcaaggcctttcactctctcttagttcaaccaatccttcaggtattggcttgcaatcttttgagctaagaca

SEQ ID NO: 101915 - DNA, 153 bp, Glycine max
  Clone ID: PAT_MRT3847_63045C.1
agagacagatattcagatttctttaaaccccgggagaatgtatgaatgagtgcctataaaccttaggcagggacctttgcccctgcagcccttggctactttggaacaaagactagggaattgtggctcgttttcccatctgaggacatacgg

SEQ ID NO: 101916 - DNA, 718 bp, Glycine max
  unsure (1)..(718): unsure at all n locations
  Clone ID: PAT_MRT3847_63046C.1
cacgcgtccgaaaaaaaaaaccctaagctaatgatgatggatcagcgacagcgagagaagctgcttcacaaaaccgaggcctgtgctttcgtggcaggtgttgttccggagctttcccttgtcaccgttccagggaacaacaccaacaacgttaacaacaacaacaacgttgtttctcattctcaatctaacgggtcgggtcggatccaggaaaacaaccaccaccttggactcgttgctgctgtcacctccgccttcggtaccgttcaaaggaagaaaaggatggcgagacaaagaagatccactaaacccacttcgttgatgaaccatctcaacaaccataagcacaacaagcctcgttctcttccttctcccagtgcatcctcctcgtacgtgccactctcctccgcaactctccagcccgcacgtgaaatcgatcaaagaaggttgagattccttttccagaaggagttaaagaacagtgatgttagctcccttaggagaatgatattgccaaagaaagcagcagaggctttcctttcagctcttgaatcccaagaaggaattgtaatcagcatggatgatatagatggcttcatgtatggaggttcagtacagggctgggctacatatacagcggatgtatgcacttgaaaatctggagaatttgncaacacacatggcctcgtttggagattcattatggttaccaagatag

SEQ ID NO: 101917 - DNA, 125 bp, Glycine max
  Clone ID: PAT_MRT3847_63047C.1
gtgcagggttgcgatccgaaatgggtcctggctgcccatagctgaagctatacaagctgcataatggcaagtccctcggaaaggaatgatcggatgcaattgccattgtgtccaactccacacag

SEQ ID NO: 101918 - DNA, 347 bp, Glycine max
  Clone ID: PAT_MRT3847_63048C.1
ctaggattaatattcatgttggcggtgtcacctttgaggagcacaagagatgaaggagggcaaggagagatattggagagtgtctcaattggaaccgatgattttgctgacctttccgaagggaacttgcttgaaagcatcaacttcgatgatttcttcatgggaatcaatgatgatggagatgtcttgccggatctggagatggaccctgagatgcttgctgagttctccctcagtaccgaggattccgagatagcctcatcgtcagtttcagtggcaaataacaacaatgatgggaataatatagttactactactgaaaaacaagatgatgaggttattattat

SEQ ID NO: 101919 - DNA, 303 bp, Glycine max
  Clone ID: PAT_MRT3847_63049C.1
tcggctcgaggaaatcctcttattcatgaatttggatacactgttgatatagaaaagtaagatataccattggccaaggaatatacggcgttttctatggtgttcattgttagcaacattatactgcctgtcagttcatcatttgccaaaactgctactcatcgctcactgattccaaatccatcacgttcccctgaagtcgactatttcaacctcaccgtagttgctcaatgttgctgggtcattttcatccttccttgggtatcttgagtcgatcaatctgatttacactttccataaccc

SEQ ID NO: 101920 - DNA, 165 bp, Glycine max
  unsure (1)..(165): unsure at all n locations
  Clone ID: PAT_MRT3847_6304C.1
gngcggcctctnaattctccggcagtttcctttgaatctgctcccttctcaaaggatggcaagaatatntcngtggaaanacttttggaccggggcnaggacncatccanacgctntggaggatnggaatnccctgccgancanccaatgtgaancaagcggtaa

SEQ ID NO: 101921 - DNA, 313 bp, Glycine max
  Clone ID: PAT_MRT3847_63050C.1
accacgcgttctgagatgcctcaactctcaattggagttccggaagcccctattcctggtagggtcttctttctatctatctaatcctggcgaccagagtgcgaaatcgctatgtgtgctgcagattagcaagttcaagatccagcttcaccatccgaagcatgcaatgcacccactcgtaagaagagcagtacctgccaaactccttcccacggatcacgacgccaacgcctaccggtccaacgtgctagccgaccgatagagttccgccgacgacttcgacgaagcacccgttatatccacgagaaatcgt

SEQ ID NO: 101922 - DNA, 1299 bp, Glycine max
  Clone ID: PAT_MRT3847_63051C.1
ctgtatggggataatgtggaggtagactatcgtggctatgaagtgacagtggaaaattttttacgggtacttactggacgtcatgagacatctgttccaaggtccaagcgacttcttagtgatgaaggaagtcatattcttctgtatatgacagggcatggaggtgatgagtttttgaagtttcaggattcggaagagcttcaaagtcatgatttagctgatgctgtgaagcaaatgaaagaaaagcgcaggtttaaggagcttctgataatggtggacacctgccaagcctctactctgttctcccagcttcattcaccaggtgttttggcaattggaagtagtaagaaaggagaaaattcatattcacatcatttggactcagatgttggcgtttcagttgttgatcgttttacattttacactcttgctttctttgagaggctgaatatgtatgacaatgcttctttgagcagccttttcacttcatataatccaaatttgttgatgtcaagcgcatattacagaatgcatctataccaatgccatttagaggaggtacctgtgacaaacttccttggttctctaatgaagacgatacatactgattcagcctacagatccccggccaaataaaaaaattcggggcagcaaaaacccaaatgtctccggatggaatcaatatctgacagtgaactcagatgaggaggatcagtttaataatttaactgctgagaaatatctccagtatagtgttggacaactatggagtgttattctcagcaatgcgaatacttttgaaagcatcgatagtttggtgtgctatggactgcttttaatgcttcctttgttgatattttccacatggctatcaaagtatgattggggaaacattccataattttttagcagtgccgagacatttcttgatttctttgatgctgctatgtgccacttttgcttgaaatgcaatttcacccaaaaaagaagattattggctgcataatatggggggcaaactactgagagagcagcttcatagttgttgcctatcagctgtattattctgttagccattgttttttgccatggtgcagttcattctggtagccattggtatttgcctgctgctgctgtcatgtttcgctttgtattttgatgattatgattatggtggttgtaaactgtatgatttttgtaaaaccgttctctcttttgtttagatattacgttgatgtccaacattggaacattgctcttttaagaactcggaaatgaatatgtttgatcattttatct

SEQ ID NO: 101923 - DNA, 1520 bp, Glycine max
  Clone ID: PAT_MRT3847_63052C.1
cccccggccggtactcccacgcgtccggctccctctcctctcttctcttctgttcaaacaatgtcgcaaacaacgctgcacgctttcgtcgccaaaaatcttggctgtggaatggcagaaggcaagtgtctcccatgttcaggtgtttctggaagaactgctgctgtatattcctactcttctctaggtcatcacagaattcattcccgtgtccaagttagaggactaaagtgtggctttaggggtgcatcttttgtatgtgaagcaaagaggaacccagatttctcaaggcaaaacaagcatgggtcctccagaagcagaaatcggaatagtgatgggagagacagctttgagagctttgacgacgatatgttttctttaaaaaatggaccacctgtgtctctttcaacctcaggaaaattccaggccacttcagcccctggtcctagggagaaggagattgttgagctatttacgaaggtccaggctcggttgcgtgagagggcgtcgctcaacatgaaaaagtaagttgaagcctcccgagcacaaagcaaagagaacagtactgtggattcccttctcaaactactgaagaaacattcagttgagcaagtgaagagaagtagtggaggcagaggaaaagattttagttcagaccagttgcaagaaagtaaccaatacaatggaggacggaactctaaaatttctgatttagatagttctccaaaggatgagccccaagaggacattgtcttctcttcctcggtagccaggcctcggtcaaatttccaaagaaggtctcccgttcctcgtttaaaataccagcatgtctctaacgatgagaatgaaatgactgtagtgccagtaggtagtgaggatacagagaacaatcaggatcagatagatttgaagcttgatgacgaagctgaatctgactttgaatcggatgttgattcaaaggatgagtttttcttcccaaacatagggatggctgaattgtctgaggatgatgattctgagcaaacctataatgatgagagtgtggaggagcagccggcagctcaacacaaggatttgagtgcactgaagctgtctgaattgagggcacttgcaaagactcgtggcctgaaaggattctcaaaaatgaagaagagtgacctcgtggagttgctaactgagagctgattctgatggaatgatatacgagaagaaaaagggacaaaacaacacatgccatagtaaaatagattttttttttcttttcttgcttttgacttgacattctatccgatgtttctttgtgttcttttttttttgtcacactctaatttaatttttccaagtacttgaggttgagagtttgtggaacattatactattagagtaattatgatatctttgcctcggagaatttttgaacttgtagttatattcccgggatgatatcttgtggcatttggttattatgtgatccaatgacctatctggctagtgagagattacatcattgtcgtagtaaa

SEQ ID NO: 101924 - DNA, 1359 bp, Glycine max
  Clone ID: PAT_MRT3847_63053C.1
cagataactacaataggagcaagtttcctgggcaaggtggctatggcacagtgtacaaaggaatgttaccagatggaaccatagttgcagttaaaaagtcaaaagagattgaaaggaaccagataaagacttttgtcaatgaagtagtcattttatctcagatcaaccacaggaacattgtaaaactattaggttgttgtcttgagacagaaactccaatactagtctatgaattcattcctaatgaaacactttcccatcacatacataggagagacaatgaaccctccctttcatgggttagtcgccttagaatcgcatgtgaggttgcaggagcagtgacatatatgcatttttcagcttctattcccattttccatagagacatcaaacccaccaacatacttttagacagtaagtacagtgggggtcgagctgattttggaacatctagatcagttccactagataagactcacttaaccacagctgttggaggaacttttgggtacatagaccctgagtattttcagtctagtcaattttcagataagagtgatgtgtatagttttggggttgtgcttgtagagctcataactgggagaaagcctatttcattcttatatgaagatgagggtcaaaatctggttgctcaattcatttctttgatgaagaagaaccaagtttctgaaatttttgatgccagggtgctcaaggacgcaaggaaagatgacattcttgctgttgcaaatcttgcaatgagatgcttgagacttaatgggaagaaaagaccgacaatgaaagaggtttcagcagaattagaagcattgagaaaggcacaaagttcattacagatgaaccatgatcatgagcacacaactagtgacatagttcaagagtgcacagaggaaagcatatcactgtccttacatctagagtccacatccttttaggaagccatattttttttaataagcttttaggaagtcagattgatatccgattcttttattaaatatgctttagtgccttatttttacttttcagtacaagtataaaagtgtatccccttagataaatgacaatattgatatttctccacaagaatatcagtttaaactttgaaatactcgagcttggtagacaattgaaaaatcttcattcatacttgtcaactttgttgtttgttgttgacttgaaaaatctccaatcattttcaacttcatgcttgtggaagattgccgttgtgatgatgtgagattgtaatgttagaaaatattagttgagaattgtgacagtggaagacaataattaataggcccttctgtcgtcttctcgcagccgtactcgagccgaatt

SEQ ID NO: 101925 - DNA, 412 bp, Glycine max
  Clone ID: PAT_MRT3847_63054C.1
ggaagggtgcatggaatattgccataaatttttttggggagataaaattctgccattaaattctgaacaaggttattccgccacgtttttaaaatacttccacacttactaaccgcgcatactttttttttttttaaaccaaaaaggattctgcttaaccacttcctttttaaactgggattgatagcccgaactaattaaaaaccatttgggggatgctttttccttcagatttctttcccattggggtaaatacttacgctccaaggttattttccacatttcctttataaagagggcccgcaaagcaacatttttacttaatgaaatactgggggggggacaaaaactcgcttccaaaacaagtggcctaaaaactttcccccgcctgaaccccaggggaaaggaaaaa

SEQ ID NO: 101926 - DNA, 161 bp, Glycine max
  Clone ID: PAT_MRT3847_63055C.1
gtttaattacataataataataacaatggtttctattcgctaaagatcagcgacacattcacccgcacagcaaagtacatcacagtgcaggggctcaattatggagatagcagttcagagccagagagttctgcgtgtacatcttcaaccgatatcttcga

SEQ ID NO: 101927 - DNA, 496 bp, Glycine max
  Clone ID: PAT_MRT3847_63056C.1
cactgcttcgaaatccctctttaaccatttctacgacttgcattctcagaatcattataaaaataaatatggtcgctgcaagtgaggagaatgtcacgtattatctaaaccaagcagaaaggtcctgagggcggtattcatgtatttcaggggctgagacaggctgagtggacatgactgacctggatatgactataattgagaatgttgatgcttgattagtagcttggtaagcttagaaaaagtttggaccatgctgatatactatcaattggtccagcctaagatgtgaatactgaggaaccaaccaaagatgatatgaagcctatatacatgaactaaccaaaggaggactatgctggactcctgaacgccttttataatcaagaccagacagcatcattaccccccttattattacagaaatatgaaagaggatccatctacctgtgttatttgctaagtaccggaatatcctatggagtgtgaaatgatg

SEQ ID NO: 101928 - DNA, 748 bp, Glycine max
  Clone ID: PAT_MRT3847_63057C.1
tattaagcaccaaagatattagagaagttcgtcacagatcgatggtgaaggccgtgaagctgagtatgttgtttatgatattgtatgcacactggtgtcctctacgactcttactataaaccttcgagattcaggcttacttgtactttctctaattctataatttgaaagtgaaacaaggatattggtgatgaaggaaatggagttacaagagaatggttcaattgaaagagaaaataaaaataaagatttgataattcaaatggaagacatgttagaaagtgtggagcttcccttagtgtcacgttgttgtatctacaaagtacctcagaaaattcgcaaggtgaatgaagcagcttatactcctaccattgtttccattggcccatttcactatggagacaagagattgcaatcaatggaagagctcaaattgagatacctcaagagttttcttgaaaggactcaaaaggggttaaggagattgcattaaataaccattaaaagagtctgaagaagttattaaaagttgttattcagaaaaccttgaacaaaagcagtgatgatttaagtgaggactgttttgacagatgcttgcttcataattgagtattttctaagaatctctaaatggacacaagaaaatctttattatccaaccatggttgagatgtgatgtgaagcttgatctgatattacttgaaaatcagcttccatggtttgttcttgaagaaatattcaacctgac

SEQ ID NO: 101929 - DNA, 707 bp, Glycine max
  unsure (1)..(707): unsure at all n locations
  Clone ID: PAT_MRT3847_63058C.1
gcaatatgttctttgataattatgccgacctcatgaagtttgatatgcaaaggttcacctactatgccttgtcaatgcagggtggcagtggagtccggaatgaatttagtgggaggttttggattttttcttttaaaattaaaaaatccttcggtggggtaaaaataataattttatcagtgaatttttaatggtccacctcattaatttggataagtggaatcaaaatccccggttttataaaataaaagaattaaatggttttaaattttaaattaagaaagacccaaaattaccaaaataagaaaaaacctaaaattccttggttatcctaataacaaattcctatataaatttgatagaccaaagcctttttcacttcacctttaacctccattgtacccattgtgccacttgtggaaaagtaaataattttttgaattaatcaatgatattaatccattagtaaatacctaatgccttaagaaaaaagatttcacccataattaaaaaaaacctgttgtattaaattcatgaaaatattgattgagggtaattctggaaaaaaaatatttaaatgaaaagtattaattnntgtaaaaatgctttttggaaatganattttttttccccctaaaaaccaacttaaaaatttggaaacagaagtaangtgttttggtaaaatgggtatttgttgatgtaaattg

SEQ ID NO: 101930 - DNA, 688 bp, Glycine max
  unsure (1)..(688): unsure at all n locations
  Clone ID: PAT_MRT3847_63059C.1
cttttaaaggcctttaacttgatgggaaatttgacattttaagggccctacccaaagttcattaaggggtaaaaacccccacctcaagggcaaaatttaagcttaaccccccaagggggaaggggtttaaaaaaccccctactgggatccctttaaatttttaaaattttttaaaaaaaaagggtttttaacttggattccaggctccattaattaacaaccttttcctttgaacaatcaaactccttgaaacttaattttaacccaaccccaaaggggggataaaaaccaaggaagcttagtttatacccaggccccaatctttggaccgaaacctcctccagtttggagggcaggaacccgattccctccacacattgggaaccaattgttggaaccacctcctaattggggggtcttcacaaaggcaagggctgaaagtaacattttttaacagggctgggaaanngctttttaagggattacaagcccttggattatttgataggcaaaaanngcannnnaggaattgcttcaataaaccaaatgagggttgtttaagnnaagttgccaccttgttccccaaaacnnnncctaatggaaaaaacccctccgtnggagannaaaannngnccaagcccnnatcgtccaaaaaaattttttgaacaaaaaaggttgcaacggtttt

SEQ ID NO: 101931 - DNA, 574 bp, Glycine max
  Clone ID: PAT_MRT3847_6305C.1
ttttcctttttttttttttttttttttttttttttttttttttttttttttttttttttttttttttttttttttttcacgggcaaggggaaattatttttaacaaaaaaaacccaccccatccttggccaggggagaaaggaccccggaaaaccttcccaaaaaaaccccgccctttttttccaactttggccaaaaaaaaaaggggaaaaatgcccccccccacttaaaaatttaatgggcggtccctttcccagctttttaaaaaggggaaaaaaaccctaggcccataaaacgggggggggggagaataaaaaccccacctaaaattttgccctaaaaaaaaaccattttggaaagccccttgttgacggaaaaacgtctcccagtttaagggaaaaaagggccccttttttaaggggcgattcccaaaaaagcgggggaaaccctgtcaaaaatttcataaaaatctaccggggaaaaggggcccccctcgggaggttaaaattaccccatggcccggaaggaataaaaaaaagccttcaaaaaaactttttaaaacattttttcaaaa

SEQ ID NO: 101932 - DNA, 354 bp, Glycine max
  Clone ID: PAT_MRT3847_63060C.1
gctaattcccacagattgggttcttcctacggcggcgctgccccttaccgatcaagagatgggcttagcacccgtcccgttggtgcctcggaggagatccaattgcgaattgatcccctggacttggacgatgagatcaccggtcttcatcgccaagttagaaggttgaaacatgtatgtatctattcactttgtacttgttaattctttgtttttgttggtgggcatgtatgaaatttcaaaaaggtgttactttttttatgaagatgagaccttttagtatctgaaatatgtttatcacgggagtggagtggatgcatttgaagaaatgaggtttcgttgattagacaagac

SEQ ID NO: 101933 - DNA, 766 bp, Glycine max
  Clone ID: PAT_MRT3847_63061C.1
cttgttgtatgtatgctttgtagcttttctcccccttttccatagaacaatatttactagaatatttgataattgatgcatgtatgtttgatcctgtcgccagtgataaaaaatgaattatatcctgcttattattccttttattggagctagttggatgaaattatatcatgtttcaaaactcatcttccactctatttgttcttttcctttccatcttccttttttctcatgctacttccaatatttctggtgcaggttgctgaggagataggaacagaagtgaagtatcagaaaaattttcttgaagaactgcaaatgacaatgataaaggctcaagctggagtaaaaaataacttgagaagattgaacaagagcatcatccaaagtggttcaaaccatattattcatgtcattctttttgcgttagtttgtttctttgtagtgtacctttggtccaagatgatcagaaagtgattcacagcccagcttcctggttgagagaactctactaaagggctgaatccgtcaaatcacatgatagcagattttgttgtaaagaaaaggctccataattctttggagttttctattaaaatgtatctgacttttgagaaatgatgaatgatttgcgtgctcaagagtttgcggtgttatttttctctatgaatgtcgtgataaattatgtaatgacctttaaatagaatagtcttaaatatgtttttcatatttgtaatatatatatatatatatattctcttttttc

SEQ ID NO: 101934 - DNA, 1693 bp, Glycine max
  unsure (1)..(1693): unsure at all n locations
  Clone ID: PAT_MRT3847_63062C.1
cgtaattcggctcgaggtttggaaagaaagcgataaacccagttgccatgaatccatgatcccctttccttccttcttcctctaattttcttgtatgctaagacttcctcgtcattgattattattcgcatccaacgccgtcagcataatttgtgtattcccctttgaatgttgaaagaaacaaaaacccacagaacctgcgatttcaacacaattaggttttcccttcaatggccgctaattcccacagattgggttcttcctacggcggcgctgccccttaccgatcaagagatgggcttagcacccgtcccgttggtgcctcggaggagatccaattgcgaattgatcccctggacttggacgatgagatcaccggtcttcatcgccaagttagaaggttgaaacatgttgctgaggagataggaacagaagtgaagtatcagaaaacttttcttgaagaactgcaaatgacaatgataaaggctcaagctggagtgaagaataacttaagaagattgaacaagagcatcgtccaaagtggttcaaaccatattattcatgttattatttttgctttagtctgtttctttgtagtatacctttggtccaagatgttcagaaagtgattcacaacccagcagcttctagattgaaagaactctactaaagggcttaatccgtcaaatcacatgatagcagattttgttataaagaaatggccccataatcctttggagttttctattaaaatgtatctgacttttgagatatgtttattggatatattgcgtagttaaagtagtaactctttttacccacccgtcgcgatgaatccatgataccctttctttccttcttcctcccattttcttgtctgctaagagttcctcgtcattgattattcgaaaagggaggaagaaggaaagaaagggtatcatggattattcaacatctaaacgccgtcgtcggcataatttgtgtgtctgtagaatacaactcattccccttcgaaacttgaaataaacaaaaacccacacaacctgcgatcatcaacacaattaggttttcccctcaatggtcgccaattcccacagagtgggttcttcctacggtggcgctgccccttaccgatcaagagatgggcttagcccccgacccgttggtgcctcagaggagatccaattacgaattgatcccttggacttggacgatgagatcactggtcttcatcgccaagttagaagattgaaacatgtatgtatctgaagacctttttttcttaatttcttttttctatctattcactttgtacttgttatttctttgtttttgttggtgggcatgtatgaaatttaaaaaatgtgttacttttttttttaattgagattttagtatctgaaatacgtttatcactggagtagagtggatgcatttaaagaaatgcggtttagttaattagagtcctacccaattcattgtttaagggaattttgaactctttgctattgaaacaagtagatgttggttgaaaacttggaggttttacattgtatgatgtatgaaaacttaatcgagagcgaggttntaaaaaacgatctacagccgcaattttgatttcacctccaggtctttgccaattntatgcattttatttttatttgcatacgattttttttatcatatataattg

SEQ ID NO: 101935 - DNA, 160 bp, Glycine max
  Clone ID: PAT_MRT3847_63063C.1
gtgttttttttttttttttttttttgattttgtgccattttaggttctagcggaagatcctaaacagcaagggctgaggctattataagagaggcgtgttaggcactaaggtaaacccctacaaaggtcatgcactcatagggggggggggataacatca

SEQ ID NO: 101936 - DNA, 2280 bp, Glycine max
  Clone ID: PAT_MRT3847_63064C.1
ctcgcgattcggctcgacctagttctagagcgtcatcccacgcgtccgcaacctcaaaaactcaatattctcaacaacacactactttccttcttccaataatgtcttcttcattctctgttcgttttcttgctcctccatcatcatgcttccccagctctcggcccaagacatggctctgcgccgccaccaccccaacggtggctccggcaactgcctcctcggaggtggaggcttcaaggttggagcctagagtggaggagagagatgggttctgggttttgaaggaagagtacaggggaggcatcagccctcaggaaaaagtgaagcttgagaaagaccccatgaagctctttatggaaggtgggattgaggacttggctaagatgtcccttgaggaaattgagagctccaagcacaccaaggatgatattgatgttagactcaagtggcttggcctttttcataggagaaagcagcattatggtagatttatgatgaggctgaagcttccaaatggggtgacaacaagtgcccaaacacgatatttggctagtgtgatcaggaagtacggaaaagatgggtgtgctgatgtaacaacgaggcagaattggcaaattcgtggtgtggtgctacctgatgtgccagaaattctcaagggcctcgatgaggttggattgactagtcttcagagtggaatggacaatgtgagaaaccctgttggtaaccctcttgcaggcattgacccagatgagattgttgatacacgaccttacaacaacttgttatctcaattcatcactgccaattcacgcggcaacccagccatgtcaaacttgcctaggaagtggaatgtgtgcgtggttggatcccatgatctgtttgagcatccccacattaatgatctggcttacatgcctgcaaacaaggatgggcgttttggattcaacttacttgttggtggtttcttcagtgccaagagatgtgctgaagcaattccacttgatgcatgggtctccgcagatgatgtaatcccactatgtaaagctgtccttgaggcctatagggaccttggcttcagagggaacagacagaaaacaagaatgatgtggttgattgacgaattgcatggtctatttccactgtcattaagtgtatctgcttggcaagtaagtgataaaagtgtttggcaaatgaaggggatagaagtattcaggtcagaggtggaaaaaagaatgccagggaagcagctggagagagcatctgaggaagaactggttaagaaaaaatgggctagaagagactacttaggtgttcatccacagaaacaagatggcctaagctatgttgggattcacattccagttggtagagtccaagcagatgacatggatgagttggcgcgattagccgacgaatacggaactggtgagctcaggctcacagtggagcagaacattataatcccaaatgtggacaataacaaaattgatgccttgctcaatgagcctctcttgaaggggagattctcacccgaaccttctctattgatgaagacactggtggcatgcactggcaatcagttttgtgggcaagccataattgagacaaaggaaagagcattgaaagtgactgaggaagtggagaggcaagtggctgtgactaggcctgtgagaatgcattggactggctgccccaacacttgtggccaggtgcaagttgctgacattggtttcatggggtgcatggctagggatgagaatggtaaggccactgaaggtgtggatattttcctgggagggagaattggaagtgattcacatctagctgaggtgtataagaagggtgtgccttgcaagaacttggtgcctattgtggtagacatactagtaaagcattttggtgctgtccaaaggaatagagaggaaggggaagattaaactttatggccattggcaattttagtttctttactaaatctaccattgtccctgaacaaaagtatcagtgtcctctacataaaagaaaaagggatgatcatgagacatgcattatatcatatgcatgtacacttttggataagacatgtacattctttgctagtccctaagttacactttatttcttcaaagatgtatgctatatatttctcattttcttgtggcaaatgcttaagaattattttaacattataaactaattttagaggcaaaatggtttatatttaaattttttttatgtataacaaaatactaaggatttagatgaatcttccactcc

SEQ ID NO: 101937 - DNA, 216 bp, Glycine max
  Clone ID: PAT_MRT3847_63065C.1
cccactcttcctctccatcaaaaataattttataccctatgttaatccacatctctgcgcgtgtttttcccaatccgaggaagacaacacatctcagaatctctaccttatcatacaccttcatccacaactctatctaatatataacataacctcacattctcctaaccttaattgttaaccctatcatcaactcatttactacttgtgccccta

SEQ ID NO: 101938 - DNA, 768 bp, Glycine max
  unsure (1)..(768): unsure at all n locations
  Clone ID: PAT_MRT3847_63066C.1
ccacgcgtccgatgatgtgtgcattaacttcataccaaaaaatcagcacattgtattgcttttgtttttctaaatcatagagtaatgtctcccctatctcatttgcaattccaatcccacgagggtttgtttctaaacttcgccaatccctcaaactcgagaaagttttctgctttgcttcagacccatttgcagaagcgaaatcaaaacacataaaagattcaaacttgtgcagaaaaaaaatgctcgctgctgctgcttcagcttctcggcaccttcttcaacgcgatgccagcatcggtgcttgcagtggcagtggcaatcgagttcgctctcttttgactgcttctgccatcaccacaacctacccaattcgcattagaaaatgttacagtaacggttatggaattagtttcaataaccccaaacacagaacgtgcccaagtttgctttttgctgtaaaagggttcctctctgattcatcaaattctaattccccacatggcagagttaccagaccttacttaccacaccctgttaatagttcaaatgtggatgggcgagcgttgttctcaacttcaactaanactgatgatggaagtcagagccaaaaggctgctgcttccaccattggtaaatcatcaccaccaccgncacctggtgggcaagctgctgatgtgaagatccttggcacgcttgccagttacttgtggatgaaagataatcttgaatttcgggttcggnattggtgctgcattgggtttgctt

SEQ ID NO: 101939 - DNA, 2200 bp, Glycine max
  Clone ID: PAT_MRT3847_63067C.1
cacgcgtccgctcttctcttaaaccgccacaacacatgtacacgttccttcttcttcttccaataatgtcttcttcattctctgttcgttttcttgctcctcttcctccatcatcatcatcatgcttccccaccagctctctgccgaagacatggctctgcgccgccgccaccccaacggtggctccgtcaaccaccacctcctcctcggaggtggaggcttccaggttggagcctagagtggaggagagagatgggttctgggttttaaaggaagagtacaggggaggcatcagccctcaggagaaagtgaagcttgagaaagatcccatgaagcttttcatggaaggtgggattgaggaattggctaagatgtcccttgaagaaattgagagctccaagcacaccaaggatgatattgatgttagactcaagtggcttggcctttttcataggagaaagcagcatcatggtagatttatgatgaggctgaagcttccaaatggggtgacaacaagtgcccaaacacgatacttggctagtgtgataaggaaatacggaaaagatgggtgtgctgatgtaacaacgaggcagaattggcaaattcgtggtgtggtgctacctgatgtgccagaaattctaaagggcctcgacgaggttggattgactagtcttcagagtggaatggacaatgtgagaaatcctgttggtaaccctcttgcaggcattgaccctgatgagattgttgacactcgaccatacaacaacttgttatctcaattcatcactgccaattcacgtggcaaccccgccatgtcaaacttgcctaggaagtggaatgtgtgcgtggttggatcccatgatctgtttgagcatccccacatcaatgatctggcttacatgcctgcaaacaaggatgggcgttttggattcaacttacttgttggtggtttcttcagtgccaagagatgtgctgaagcaattccacttgatgcatgggtctccgcagatgatgtaatcccactatgtaaagctgtccttgaggcctatagggaccttggcttcagagggaacagacagaaaacaagaatgatgtggttgattgacgaattggggatagaagtattcaggtcagaggtggaaaaaagaatgccagggaagcagctggagagagcatctgaggaagaactggttaagaaaaaatgggaaagaagagactacttaggtgttcatccacagaaacaagagggcctaagctatgttgggattcacattccagttggtagagtccaagcagatgacatggatgagttggctcgtttagccgacgaatacgccaccggtgagctcaggctcacagtggagcagaacattataatcccaaatgtggacaataacaaaattgatggcttgctcaatgagcctctcttgaaggggagattctcacccgaaccttctctattgatgaagactctggtggcatgcactggtaatcaattttgtggacaagccataattgagacaaaggaaagggcattgaaagtgactgaggaagtggagaggcaagtggctgtgactaggcctgtgagaatgcattggactggctgccctaacacttgtggacaggttcaagttgctgacattggtttcatggggtgcatggctagggatgacaatggtaaggccactgaaggtgtggatattttccttggagggagaattggaagtgattcacatctggctcaagtgtataagaagggtgtgccttgcaaggacttggtgcctgttgtggtagacatactagtaaaacactttggagctgtcctaaggaatagagaggaaggggaagattaagtgcatgtttggatagttattacaaacagacatttgcatcaaaatgagttttgcaaaaggatcctcaccctttcttttgcaaaatgagttttgaagatcattgatttgatctcggaatttgtgcataagttgaattaaaaaccaaatatgcattaaattttaatggccattggtaattttagtttctttattaaatccaccattgtcccttggacaaaattattagtgtcctctacatagaagaagggatgatatatgcatgtacacttttggtttagacgtgttcattctttgctagtccctaatttacactttatttctttatttaaggcataaaaaaaacaaaa

SEQ ID NO: 101940 - DNA, 353 bp, Glycine max
  Clone ID: PAT_MRT3847_63068C.1
gattctcaagttccatcaccgaaaaaaaaaaaaaaaaaaaaaaaaagcgaacggtctagactatccaagctaacctaccctaccctgccacgccatagcttatctatagtgtcacgtaaattaaattcactggactggcctttacaacacaacgactggaaaaacaaatacccttacccaactcaacttaattgcattacatcacattttcgtcaggtcacctaatatcgaagaggacaggaccgaacggatttcccaacagaacagcagcccgaattgcaaatggaacgcgacctgtactcgagcattaaattcagcgcgtgtggtggttacgctacacgcagaccgtacac

SEQ ID NO: 101941 - DNA, 254 bp, Glycine max
  Clone ID: PAT_MRT3847_63069C.1
aaacccccttcgggaaactcaacttcgtgagagttcggattcgaccaagaacatagctgaattggagagcaacagaagcttctcgaactcttcaattaccgagatgaactcgacggcagcatccttgacccaaacagttctcaggaacgagagctgatgcaaaatgatgtcatcgttgtcgttgtagtcctcgacagaaagggaaaatagggttccgaagtctacgattcagcaaaggaggacttcagtggcag

SEQ ID NO: 101942 - DNA, 187 bp, Glycine max
  Clone ID: PAT_MRT3847_6306C.1
cttactctcagaattaattactcacctttatcaacaatcgatccatctggccctattttgagtcttatcatatcttcctattatcattatcctatctgctctcctctttaaactaattataacttcacaatctcacacaacctactatccatatacataatcacaatttaaccatactcctaataca

SEQ ID NO: 101943 - DNA, 456 bp, Glycine max
  Clone ID: PAT_MRT3847_63070C.1
ctctatacgactcctatagggtaagctgctacgcctgctggtaccgactccgtaattggcgggggcgacccccgcgtgcgacggctgcgagaagacaacagaggggcaggcctttcgatgtgcggtgcggcgatcctagcactgctgtgtatgcagcctttcgcggtcacgtatcattcaccaggggtgacctaaccgagagggcttttttgagacaaccaagagtgtttctcacctcaaagaatactgggacgggaaagagacccgtaaagggtgacaaccgcttttggagatcccttgtgcttggattcaagactcccagggaagccatctaatgaacctacattgacaagaagtgccccttcactgacaatgctcccatccgaggccggatcttgcctgccacttgtcacagcgctaacatgaacagcgcttctattcgtacgcggaattatc

SEQ ID NO: 101944 - DNA, 207 bp, Glycine max
  Clone ID: PAT_MRT3847_63071C.1
agtccatcaagatcagaaatttcctcggcgagaagaagtgttaggctgataaattcggtgaatgctttgcaatttgcggagtggctcttggatggacttgctggtttcttgatagatttttttattaagaaacatttgggaaataatgaggcacggtacaggagatacaatgtttgttttcctttcttggtttatttgatctgtgaa

SEQ ID NO: 101945 - DNA, 445 bp, Glycine max
  Clone ID: PAT_MRT3847_63072C.1
gttcaattactccttcaaataaagtttgtgcgctctctatctctcttggttagctggaaaattttgttgtgcatgctttttggtgatgtatggaacctgaaagagagttcaagacttattattggaagagtttctttctatcgaggaaaggtatttattgctctctacttaggtaacataagccaacaattttagtagtaattaatggctggagaattgggagttctgaatgcacttgatgtggcaaagacacaatggtaccacttcactgctattgtgatcgctggaaagggtttcttcaccgatgcctatgacctcttctgcatttgcctagtcaccaagctcttagggtggctatattacacagaaccaggtgcaccaaagccaggttcacttcctccaagagttcaagcttctgtgactggtgtagcactatgtggcacat

SEQ ID NO: 101946 - DNA, 531 bp, Glycine max
  Clone ID: PAT_MRT3847_63073C.1
aatcttgaaccattaggaggaaattatcttattaagcatcatcatcatacaaaaatcttcccatgcaaagggaagaagacaggattacactgtaaagcgaaaatcaaatattatacagataacgattgattcaggaaattcataaccactcaagtacgtagggattatgtccgaaatttacataaacctttattttctttaccacctcaatgctttacctgaggatgtgcactagcaggtcctccaagtgttaaaaccaaccccccttgaaggtcactattgattttatgctctttggaaacaacatttgaagtgcctcgcatgattggaaatggtaatgccactggggtttgccgtgaaccatgacatggctctgcacgcaaacgaataggtgcttgttgggaagcccttgaattacccacatgattagagttcaaaaatgcttgagaggaagaaggaaaagaacttgttagagaacaatttggtttgacattggccacttttgagacaactcctgctccgggtgaaaat

SEQ ID NO: 101947 - DNA, 374 bp, Glycine max
  Clone ID: PAT_MRT3847_63074C.1
cccacgcgtgcgtacgagctgcgagaaggacaacagaaggggcagccacacttgcaatgatcaaagccaaaagcacaacaaaacatattattctatatataaggagccatgaaggatgcaattcctttaagacaggtgttccatgctacatactcttatagcaatccaccttcttcctccccctgattttctccactatccgatcttgatttgttgaatacttcctatttgaataatgaaaaaagaggctagagccatgggggctaaaatacatattgcacacaaaaagaacctccaattcaaccactaacttacggtagtacactctgaaaatatgggtgtttgtcatgtatggctagagaactctgggaaaa

SEQ ID NO: 101948 - DNA, 194 bp, Glycine max
  Clone ID: PAT_MRT3847_63075C.1
ggggttttgctttttttgttttttttttgttttttttttaggtttgtttgtttgcggccttgggcaagcctggtatcgcccacacccgggggcggcaacagaatacaaaaacctgaggttaaatgcctcatgtttgagttgcacataacacttggggtggggaacccaggggatatctgcgcaccacacggggg

SEQ ID NO: 101949 - DNA, 332 bp, Glycine max
  Clone ID: PAT_MRT3847_63076C.1
agcatcactacggacgttgattatatcacatgttcctgaaactcaagcggcgccaagatcggaccctttcaaagtctgaggctcattatacttatcacgacacttaatatctctacaaggactacctgatctcgtcgtcttaatccacagttgacgaacgcacatggctaatattccacatgagcttacagagcagcatacggtcaattacaacgacgaccatcacattcaccacattcgcaaccgattgcaccacttacaagctagacgatctgtcgattattgatactctcttaaccattacatggctcggactctccattaacgccctt

SEQ ID NO: 101950 - DNA, 320 bp, Glycine max
  Clone ID: PAT_MRT3847_63077C.1
aaaacagatttctttttctacacaataaaaaaacttacggatcgttttttttcaccattgctccaccgaatcaaatatatatttctttcttaaactacttttaataaagaacttgttctccaatttatgtgctcttctttaatactacactctcttcccacgaggaaacaacacaacaatattatcatcacttaacccaactactcaactagtattctcataatgaatcctcatcattatactacatgcctaccttctgaacaccccattcttttcattaataataattgcttcttttttataacaactaccatcaacat

SEQ ID NO: 101951 - DNA, 2076 bp, Glycine max
  Clone ID: PAT_MRT3847_63078C.1
ggctcgaggcgctttactcgtcttggtggtaagcttccgaaaggagttttacttgttgcgtccgctggcactgggaaaacaatgttagctagagctattgctggagaggctggggttccattcttctcctgcagtggaagtgaatttgaagagatgtatgttggtgttggtgcacgaagggtgagggatcttttttctgctgcaaggaagcgagcacctgctataatattcattgatgagatagatgctattggaggaaaacgaaatgcaaaggaccaaatgtacatgaagatgacattaaatcagttactggttgagctagatggattcaagcaaaatgagggcataattgtgattggcgctactaattttccacaatcattggataacgcattggtgagacctgggcggtttgatcgccatgttgttgttcccaatcctgatgtaaaaggaagacagcagattttggaatcacacatgtcaaaggttctgaaggctgatgatgttgatctaatgatcattgcccgagtaacacctgggttctctggtgctgaccttgcaaacttgattaacattgctgctatcaaggcggcaatggatggtgctaaagctgtgagcatggctgatttagagcatgcaagagacaagatcctgatgggaagtgaacgcaagtcagctgtcatatctgaggagtcacggaagttgactgctttccacgagggtggccatgcccttgtggccatacatactgatggggccctccctgttcacaaggcaactatagttccccgtggaatggctcttggcatggttactcaattgcctgacaaggacgagaccagcatttcccgtaaacagatgcttgctaggcttgatgttctcatgggaggtcgtgtcgctgaagagctaattttcggagagaacaaagtcacatctggtgcatcctcagatctcaagaaagcaactagtctggcaagggagatggttaccgagtatggcatgggcaatgaagttggactagtcactcacgactacgaagatgatggtaggagcatgagctcagagactaggcttcttattgagaaagaggtgaagcaattcctggagagggcctacaacaatgcaaaaactattctgaccactcacaacaaggagcttcctgcacttgcaaatgcccttctggagcatgaaacccaatcaggaactcagataaaggcattgcttgcccaagttagatctcagatgcagcagcagcagccccaaacacttgaagcttacaactgttcacaatgaaacccagtaagcaactcatctagcaacggaacttgttccgatatatggccaggggcaggaagttggaccacacactcacgattacaaagatgatggtaggagcatgagctcagagactaggcttcttattgagaaagaggtgaagcaattcctggagagggcctacaacaatgcaaaaactattctgaccactcacaacaaggagcttcatgcacttgcaaatgcccttctggagcacgagacactttcaggaactcagataaagacattgcttgcccaagttagatctcagatgctgcagcagcagcagcagcagccaccccaaacaattgaagctcagagcagtttacaatccaacacggtgcctccatcatccagcaacccggcatctgctgctgccgctgctgctgccgccacagctgcagcaacagctactgctgccgccgccaaggctaacagtgctccagtgggatcttagcaggacaagatgccggagatgggtagcaaacataactttgtacggccagattgaaatgtgcttatagtatttttttttttttcaggtttttttcacttggaggaactcaactcatgcaccttggagtctagttgacataaaagtatatacattttcgtttctcattgtttgtagggtacaatgataaattaaagagattatcagttgcctccaactcaatctggtactctcactcgatctttttcagacaataaattataacaaattaccttgttccaaaaaaaaaaaaaaaaaaaaccccaaat

SEQ ID NO: 101952 - DNA, 308 bp, Glycine max
  Clone ID: PAT_MRT3847_63079C.1
acaaaagcccaaaaattttattaatacccaaaacccggccatgtttaaaaaacccgaaaaccaaacggaaatagtataaaccgccccaaaaaaaggaaaaaaaacaaaccggcttaaaaaccatatccaaaaattttcaacaatttaattagggcctttagggaggaaaaatcttagccccaatcccaagcttactaacccgggcatgccaatgaaaacaccttttactggggcaccaaaatataagtaaacgggccggggtataaaacaccgggctcgggaaaaccccggagggccccaaactaaaa

SEQ ID NO: 101953 - DNA, 258 bp, Glycine max
  Clone ID: PAT_MRT3847_6307C.1
taaggatttgatctccacaacacacattatttgagagcaaggaggagtcttaagtgtcataaagtcacagtagaattatctacctacaaggaatgatttaatatatttatttcttttgttgattttcgtttggtttagagttttacagaatttttttaatggaattaattttgaattgttggatgtaattgcaagatatgtttaaattacttaagtcatatatttacattagtgccgggattaatttttcaaataaat

SEQ ID NO: 101954 - DNA, 1352 bp, Glycine max
  Clone ID: PAT_MRT3847_63080C.1
gggaatccaattctctctctctctctcttttcttgattcattttgttgtctcaattaaacctttgttttggtctgaattgaaaagggttgtgaattaatagtgatgtttatctctagatcaattctctttgtgtttgtgttctcagcttgcttgcttctatttccagccaatggaattcgatacatttgccacaacaaatggttatgaaactgaggttgaagaagttgagccttttgtgagattcagagagatacagaaaccagcgaaagtgcactctaattgacacaaccaatgcgcaattagtatgtgatccttcacttgttcatgttgccatgaccattgattggcactacttaagagggtctattgctgcagtgcattctgtcgtgaaacacacttcctgcccgctgaatctgttctttcatttcattgcatcggatgcaagattggatagcaaggatgtgtttgaaaggattgttcacacctccttcccttcattgagattcaaagtttatgtgtttagggaaagtcttgttgacaatctcatatctccttcaattagggaggcacttgacaaccctcttaactatgcaagaagttaccttcctgatttgcttgatcaatgcattgaaagggtcatatacttggactctgatgttatagttgttgatgatgttcaagagctttggaaggtttcattgacagggtcaagagtcattggtgctcctgaatactgtcatgcaaacttcaccagatatttctcctatgagttttggtcaagtgctgagttttctgaggtcttccaagggaaaaggccttgttatttcaacactggggtgatggtgatggatttggtgagatggagagcgggcgactacacaaggaagattgagaagtggatggagattcaaaaggagagaaggatctacaagttggggtcactccctccctttttgctggctttcggtggtaatgttgaggccattgaacatagatggaaccaacatggtcttggaggggataatgtaagaaatagttgtaggactctgcatcctggtccagttagtttgctacattggagtggtaaagggaaaccatggactaggcttgatgccaagatgccttgctcagtggattttctttgggcaccttatgatctctacataccccatcaccatacataccatcattaccaccaccatcaaagaattgctattggctcaacacattcatcattttaggacataattttatattggttgattctgattcatttgttctgaatattatttttttgtatagacagaacaattaaaagattttgtaatgtttgttgatacatcttcaatag

SEQ ID NO: 101955 - DNA, 925 bp, Glycine max
  Clone ID: PAT_MRT3847_63081C.1
ccaagcccccgtcggagtggacccagcgtcgagaagcttcagatcctcccggggttactgttagatgtcacagggaagaaagagcgtcgagaaggttcagttcagatcctccgtctccaccatggcaactcccaaggcatcgtcgaaatggaccgagaacatttcctcaatagcagctcgcatcttcttccttctcatcatctttcagatccctcttttcagggtgacttgcagatctggcatgtgtacaacccctttgcatgtcacgtcgtcacaattaattgcaagtgagatctttcctgttgttgttgtgaagggccttctgtacccaggggctgcagtgaacggcctcatccacaacatgactgttccaagttgggataatttgttggacttgtataacttgaccagtgtgaaggaagcttctgcggtaactgatcttcagcgcttggaggttcttgcagggagctacttcaccgtggccggagcacttgtgggtattctaaaacccgggagaatgagcatgtttgggtccctacttataatttgggggctggtcaaagaagggattttaggaaagccagtaaatactgatcctgcaaaagctgtgtacgtttacccaacaatggtgatcgccatgatatgtgctttctcatctgttaagtatgatgtgaagaaggtggtcaggtcagcccctatcaggtcatctgcaagaccactaaagaactcatccaagtctaagctgaaataagtgatactcatgttgacaagttaaaattgtatgccttcctcccaaattcattttggaacatatagttcagtttttccagaattattaccatctcattttactatgttccttttaattgattgagagcttgttgatttgtagatgggaaagaggcttaccaaattattttttacc

SEQ ID NO: 101956 - DNA, 256 bp, Glycine max
  Clone ID: PAT_MRT3847_63082C.1
tttggttgcctcttttctttttttttgttagtggtttttgttttgtttttacagtgcctttttttttctcactttttaattcccaatactacctttcgttttagagccatgtggccgcacagcacgcaaaaagaactgcaatttttccgccgaggtcaggaaaaaagccgccgatgctgccggagaagaaatccgcaaaaactggagaagaaacttcgacgttattcacaaccaggaacaaaaacccgtaaccaaa

SEQ ID NO: 101957 - DNA, 1203 bp, Glycine max
  Clone ID: PAT_MRT3847_63083C.1
ccggttcctgtcgaaatcctcgacgaccacaccatctcctgcgccgacatcggcatcgttgccggagtccaagaaaccaaaaagcggagaataaaccaaacacaaacacaaaaacctcccaggaaaaacgacaactatgtcaactccgaacactccgattcggattgtcccacgttgccaaccgccaccaccccgacaacctcggagccgaagaaaagagggagaaaaccgattctcggacgcgagactccggtaaaccacgtggaggcagagagacaacgtagggagaagctcaatcatcgattctatgcgcttcgtgctgttgttccgaatgtttcgaggatggacaaggcttcgctgttgtcggacgctgtcgcctacatcagcgagctgaaggcgaagattgagtacttagagtcgcagcagccgagagacagtagtaaaaaagtgaagacagaaatgacggatactctagataaccatagcaccacgacaatatcgacagtggtggatcaaagcgggcctgaacctagattgggcccaagcccgcttggtctcgaggtcgatgtgaaaatcgtggggcccgatgccatggttagggtacaatcagaaaatgtgaaccaccctggggcgaggctaatgggtgctttgagagacctagaatttcaggttcatcacgctagcatgtcttgtgttaacgatctcatgcttcaagatgtggttgttaagcttcccaatggaatgaggagtgaagagggtcttaaatctgcgattctgatgaggttggatcagtgacactggtgaggttattagctgtaatgtaactgtgagatgttgttgctgttcatagtagtcggtttttggtgtacgttatagataatttgtatttatcttttttgtttttttggggggtctttgtcttgcgtggtgcttgatgacggtggggttggctccaacctgcaattatgtgagggaatctaagaagcctgtcgtttatgttttgtatatataataatccttttggattttgaagttgatcaagaactagactagaagaaaaagtggtcgccatcttgttttaacattcctcaaaatacaaatattataatccaaaccctataatctagtatcactagatttagattttgtatgaataaataatataattaagcatgtgtttactataattttattatataaaaa

SEQ ID NO: 101958 - DNA, 112 bp, Glycine max
  unsure (1)..(112): unsure at all n locations
  Clone ID: PAT_MRT3847_63084C.1
aagccgtggatggatttggggtatgtgactctgcntgacntaagggaccaanaacggtttgatgggtnttaccataaccagttcatggtggtgaatgattgcttgcatangt

SEQ ID NO: 101959 - DNA, 804 bp, Glycine max
  Clone ID: PAT_MRT3847_63085C.1
gaaacaaaacctcaaaatctatatattaaattaatcgcagaaacttgatatattattacgcaaccaaactttcacacctttgaattttagttgtcaacaccctctttttaaagctttgaagcatctctgtcttctagttagcttccaataacaaatggtacttttgatagagaaacttacaaaacattacttcaagctggagaatcaccaccatgccatcacacaccttcaaccagaggagttatcatcctcactgcttgcatttaaatcccatatgtccaaatcaattgaccaactagcatcggatttgaaacccggatcagagacccccctgtccttaacatggtttggaaagtgtttcggcctcttgcccttcatcaacaaggcttttggaaagcttgttgtggatattgactacccaatgagtaaattggagatcttttccattgaagagtacctcagctacaccttgagtttgctagagcttctgaattccgtttcttctcgtctttctaatcttggccaagctaggctttctctggtccatggtttgaccctggtggagaactcaccttctttggctacaaaacatctgaaagcgattcaatttcaacaagggtactctttcaccaccaactttggtaaagatcatgatgatgaagtaagggttttctctggcaaggagtggaatgttcaggaggctgtcaatgaaaaggggagtattggattctgggctggcggggttatgtggtcttgtggattcggggttggtgggcctttcttggcgcggtgaaaaattgctgg

SEQ ID NO: 101960 - DNA, 314 bp, Glycine max
  Clone ID: PAT_MRT3847_63086C.1
agcttttgatcatctcatcctggttctggatcaaaagcggaggacgttcaatgggagggggtcgccatgacctacccggaaactatacttcagctgccctccactacttaaaacaaacaccagcttctggggcaccctgtgggcccgccctctcgcctggtccaatggttactgtaattacagacaacacgctgacgtttggcacgcctatccaatattaaagaaaggaagtctggaagaagaaaaaattattggttttatttatgatgacattgcattcaatggggaaaacccaacgcctggaatcatcatta

SEQ ID NO: 101961 - DNA, 1340 bp, Glycine max
  Clone ID: PAT_MRT3847_63087C.1
caaaatctatataatataataaccgcagaaacttgataacataatcatttagtctagcgtgcacaaggaaactttttgaaacatttcttctgaattttagttgtcaacaccacccatttttaaagctttgaagcatcatcatcgctgtgttctagttagcttccaataactaatggtacttttgacagagaaacttgcaaaacgttacttcaacttcaagctggagaatcgccaccatgccattacacatcctcaaccagaggagttatcatcttcacttcttgcgtttaaatcctatgtgtcctttttttttttttttttttttttttttgacaaaaaatatgaagaaccataatttttattattcattacatatgttcctaagtgtgcaaataaccactggaactgtgtattactatttacatgacttgatacaatttataaacaatacaaaagtaattaaaaactattgatctatacataatatatatgatcagacacttgatttttgtggttgtttctgtagtcgaaaaccgtcaattaattcagatctctgagtcattacgttggcaaacagattatccacctccttgcttatatcatcagatagcttctccaacacacgaagctttgtctgcaattcgttggctgcatcatgtctcacttcatcagaagcaacaagaaggttagaaacaacattatttacctctttgatctcgctgaagagtggccttttctctatcaactgttcattgattttgaaatcaagcgtggcaactagagaaccatcaaaccctccagcaatttttctcagctccatgtatggcctaccatcaccatataaacaagacaacataaccccgcatacccagaatccaatactcctcatttcctttacagcctcatgaacaatccactccttgccagagaaaacccttacttcatcatcatgatctttaccaaagttggtggtgaaagagtacccttgttgaaattgaatcgctttcagatgttttgtagccaaagaaggtgagttctccaccagggtcaaaccatggaccagagaaagcctagcttggccaagattagaaagacgagaagaaacggaattcagaagctctagcaaactcaaggtgtagctgaggtactcttcaatggaaaagatctccaatttactcattgggtaatcaattgaccaactagcatcggatttgaaacccggatcagagacccccctgtccttaacatggtttggaaagtgtttcggcctcttgcccttcatcaacaaggcttttgcaaagcttgttgcggatattgactaccccatgagtaaatgggag

SEQ ID NO: 101962 - DNA, 1155 bp, Glycine max
  Clone ID: PAT_MRT3847_63088C.1
ggctctcggtcagttcgaaaaactgattcctccaccacacacaacaaaccactacaagtcactttgttctttgcattctcacacaacaacaatttcctccctgcagaattcaccaacgcttcaccgaactatgctccacaactctttccctcagaagcatgccactcgttcatctcgaagagatgccatttccttcattgtcaaagctgcccaagaaccctctgcttctttagcttctcaagatagacaaagaagggatcaatgaattcccttttagacaatttccaaattcgtctcacacaacaacaatgatgtccctgctgcagaattccccaacgcttcacaactcctctttccctcagaagcatgtcactcgttcatctagaagagatgctatttccttcattgtcaaagcagtccaagaaccctctgcttctttaacttctcaagatagacaaagaaggcgccaagtgattgccgttggaaccactgccccattagtttttttgttcaaccaacactcgaactcttttgctgcagaaaataagaaaggatttttgccggttttggacaagaaagatggatattcatttctctacccttttggttggcaggaagtagtaattgaaggtcaagataaggtgttcaaagatgtcattgaaccactggagaatgtcagtgtaaatgtgataccaactggcaaacaggatattacagaatttgggtcccctcaagaggttgccgaaactctaataaaaaaggttttggcccctccaaaccagaaaaccaagatagtagaagcaaaagagctagatgttgaaggaaaaaaatactatcaatttgagttcattgctcaggctccgaactatactcgtcatgctctcagcacagtctccattggcaatggtaagttttacaccttgacgacaggagcaaacgaaagaagatgggtgaagatgaaagacaggctgcagacggtcatagaatccttcaaaattttcgacgtttgataatgatcattactattaccaccatattagagatattaaactcttcagcgagaatgttcatttgaattttgagctttatagtatcaagttaaaaaaatttttttaaaaaaaaagaaaaaaaaaaaaaaaaaaaactcgagggggg

SEQ ID NO: 101963 - DNA, 283 bp, Glycine max
  Clone ID: PAT_MRT3847_63089C.1
ttgtttttgaaattgctggcaatactctaaggcgggctttatatgctgcaccggggtgttccccagcatctatggcacaccgatcttttgagagccctggaagccgagtcaccttactgttgcctcgcggtgtagtgcagctgccatgtgagtctgcatgaccctctagatgagtatgctctgcctatttgaaaagatccacacctctgtcaagtgacataccgatgagtgaagggtgtgttgatagtaaatgtccagaaaaatagccaaagacctaagaatt

SEQ ID NO: 101964 - DNA, 347 bp, Glycine max
  Clone ID: PAT_MRT3847_6308C.1
gtgttgttccaactttgtggacggcagtgcgtgttaaaggatgttgattgtaacagcagattttaagatttttttttatgaatcaactaaaataaaaaaaaaaaaaaaaaaaaaaaaaaaaaaaaaaaaaaaaaaaaaaaaaaaaaaataaaaaataaataaaaaaaaaaaaaaaaaaaaaaaaataaaaaaaaaataaaaaaaaaacaaacataaaataaaaaaaaaaaaaaaggggaatcctataaagaagtccaaactttaaagcacttgatatatatgttataagtcattaatatgagaccatataaataatgaattacccttttaataaaaacatttgattg

SEQ ID NO: 101965 - DNA, 568 bp, Glycine max
  Clone ID: PAT_MRT3847_63090C.1
gatgctcccaactatacaatatcaggatggcaaacgattttgctttgttttagggaagaaaaaggaaggagataataagaagagaaaggatatattttctggttgtttgacaagagaaaatgagaatgaaagttaaaagttttctttctcttatttggttatatggaaagttgaaggaaagaaaaaagtgtaaaaataagggtaattagttttcaaatatatatgatcccctttccatcttctctctcctaatggacagaacacaacacaattagtcatgggtctcacatgtttcacattgtggaagaaagcaaaaaattactcttttctatccttccatatataatctatccattttgtgcctactaaatggatgcttagggattatcattgtaaaaattttcatgcaagataaatttttgtcaagtaaaaaaacattcttatttctaatgttagaaagaatagaaacagatgacacatatgtaagtttgattgggaaagtgtacacgtataagttgacatatatgaaaataagattaaaaaaactttggatagatttttatttttg

SEQ ID NO: 101966 - DNA, 825 bp, Glycine max
  unsure (1)..(825): unsure at all n locations
  Clone ID: PAT_MRT3847_63091C.1
tacgnaagctcggaattcggctcgagccaatacaagtcactttgttctttgcattctcacacaacaacaatgacgtccctgcagaattcaccaacgcttcaccgaactatgctccacaactctttccctcagcatgccactcgttcatctcgaagagatgccatttccttcattgtcaaagctgcccaagaaccctctgcttctttagcttctcaagatagacaaagaaggcgccaagtgattgcctttggaaccactgccccattagtttttctgttcaaccaacactcgaactcttttgctgcagaaaataagaagggatttttgcctgttttggacaagaaagatggatattcatttctctaccctttcgggtggcagggaagtagtaattgaaggtcaagataaggtgttcaaagatgtcattgaaccactggagaacgtcagtgtaaatgtgataccaactggcaaacaggatattacagaattcgggtcccctcaagaggttgctgaaactctaataaaaaaggttttggcacctccaaaccagaaaaccaagatagtagaagcaaaagaggtttgatgtcttacatttatttttcttgtttgtagtaattttttttgttatttggactctgcacatttaatgcattgatatttgttctgcagacataagtgcatgtgtgttttgtgacccccatgcaattctattctgctaatcttatttgattttgatctcaagctttacacaggatatagttacttgaagaaagtaaatgttattctcctatgccaccattgaaaatgttgatatcatttatctat

SEQ ID NO: 101967 - DNA, 385 bp, Glycine max
  Clone ID: PAT_MRT3847_63092C.1
ctccaaaccagaaaaccaagatagtagaagcaaaagagcaagatgttgaaggaaaaaagtactatcaatttgaattcattgctaaggctccaaactatactcgtcatgctctcagcacagtctccattggcaatggtaagttttacaccttaacaacaggagcaaacgagagaagatgggacaagatgaaagacaggctgcagacagtcatagaatccttcaaaattttcgatgtttgataatgatccttactattaccatttaccatattagagatattaaactcttcagcgagaatgttcatttgagctttatagtcccaagtttaatctgtttgcttataactttatccaaatatatgtacaataaatgagtaatgcattgt

SEQ ID NO: 101968 - DNA, 1906 bp, Glycine max
  unsure (1)..(1906): unsure at all n locations
  Clone ID: PAT_MRT3847_63093C.1
gaattcgcggccgcttgaatggtcagactcggaggatttctatttagtaaaaatctttcttagtttctttcatatgcactccatagttgggcgcgggagctaaggtattattatggcttatcaagtgttggtgatttgtgtggtctccagcatagtgtttgcatacatagtatggagaaaagaaaggaagaaaaagcttccaccgagtccaaagggccttcccatcattgggcacctccaccttgtgtccccaataccccaccaagatttttacaagctctcactccgccatggacccatcatgcaacttttcctcggctcagtcccttgtgtggtggcttccaccgcggaagccgccaaagagttcctcaaaacccacgaaatcaacttctccaaccgccccggccaaaacgtcgccgttcagttcttaacctacgtgtttggcccttacggaccctccgtgaagttcatcaagaaactttgcatgtccgaactcctcggtgggcgcatgctggaccagttccttcctgtgagacagcaagagacaaaaaaattcatcaaacgcgtcctccaaaagggtatcgctggtgaagccgttgacttcggaggagagttcatgagactctccaacaacatcatttcgagaatgaccatgaaccagacgagttccgaggacgagaaacaggccgaagagatgaggatgctggtggcggatgtcgcagaactcatgggcacgttcaacgtgtcggacttcatttggttcttgaagccttttgatttgcaggggttcaacaagaggatcaggaaaacgaggatcagattcgacgctgtcttggacagaatcatcaagcagcgtgaagaggaaagaaggaacaacaaggaaatcggtggaacgcgtcagtttaaggatatacttgatgttttgttggacataggcgaagatgacagttctgaaatcaaattaaccaaagagaacattaaggccttcatcatggatatatttgttgccgggactgacacgtcagctgcaaccatggaatgggctatggcagagttaatcaacaatccatgtgtgttggagaaggcaaggcaagagatagatgcagtggttggaaatagtagaataatagaagaatcagacattgtcaaccttccttacctacaagccattgttagagaaacacttaggattcacccaggtggtccattgattgttagagagtcatcaaaaagtgttgtggtttgtgggtatgaaattccagccaagacccgattatttgtcaatgtttgggctattggaagggaccccaatcattgggagaacccatttgagtttaggccggagaggttttttgaaaatggacaaagtcaattggatgttaggggacaacattatcattttattccattcgggagtggaagaagatcatgccctggtacttctctggcattgcagattgtgcatgtgaatctggctattatgattcagtgttttcagtggaagtttgataatggcaataacaaggtggacatggaagagaagtctggcatcactcttccgagggctcaccccataatttgtgtccctgttccaaggcttaacccattccctgttatgtgattgacgctccaaatgacattaaacaccttgtgagagagtgaaaaaagagagaatataaatattatgaatggtgaaaatgttgtgatacaaagagaaataaataacaggtgttaacaatgtgtcaataaacttggatgatgtttaaaaatcattactcttattttaaaatatctatttttttttgctcatacgatgtcatgatgaaattttatgcacccatgagtttccaataaaaatatgtcacatagtaagagaatcaaaaaaaaaaaaaaaaaaaaantataa

SEQ ID NO: 101969 - DNA, 293 bp, Glycine max
  unsure (1)..(293): unsure at all n locations
  Clone ID: PAT_MRT3847_63094C.1
atgcttgagagggtaaataataaatgccagtcttaaatgattttgctgacaaacggtttttgaacttctataccccactgttttcaaattatatttgtttgactatgtttacatttggattttgttcattttttccccaaatctgtaaggtttacttcagtgtaacggnatgattgaacatccaaggctttgttgtccactttgagtntattgggactttattcgttggatcttactgtgaaagctgcttgtgatatctactgattgagtgtttatgcaggcattcatactac

SEQ ID NO: 101970 - DNA, 311 bp, Glycine max
  unsure (1)..(311): unsure at all n locations
  Clone ID: PAT_MRT3847_63095C.1
tagnaagccacgttattgatcttcgctattgggcttgttatattgtgttgtgaaacgaggancacattacacacataacaactgtgtttcacatataatagccgcatgcagtccattcctgtgctatgggttatccggattgcctgttgtgtgtacccacggtgtgaaaatcctttatccagcctaggccctagcacgatgtaccgtctcgtgaaaacaccatgttagcacctaactattggcgacccgccattgcttatggcggtggatgatttcgcttttgcccacttgacaagcttttgttagaactt

SEQ ID NO: 101971 - DNA, 285 bp, Glycine max
  unsure (1)..(285): unsure at all n locations
  Clone ID: PAT_MRT3847_63096C.1
gtcgcacgcacncgtacgtaagctcggaattcggctcgagncaggttagcactggcactgggtttgttgatggggaaaagatgtcaacattaaatctatattctgattgtgctgggagttatacttagtgttttaaaactgggggctggaggggcggctcaggagttgggtctcaatttcaaggccagttttgatgctgtcccccagtcccaaaaggagaggttaatgttggtcgttgagactgtctcctttacagctctgactagctttgtactgagctatcan

SEQ ID NO: 101972 - DNA, 394 bp, Glycine max
  Clone ID: PAT_MRT3847_63097C.1
tatagcccaacccctatacaaccaaaccctaacacacacccattttattcagcttccatggctagcctcaagggggcatttttgactgcagtgcgctgcatcgttcatcatgagtgcacccatggcacatgcacctatcacgtgctggcacgtgaccaatatcctcatcaattgcatcacttacctccataaccgaagaacaccatcgtctgtatactacaactgaatgaagagcctcaatgccaacgccaagaccacccccaacctacatactgcgtgcaactgccttaactcggccaccagccaaatctcctgcttcaaaaccaacaacgtcgccttgctacccggcaaatgccgagtctccattccctacaagatcaacaccttcaccaac

SEQ ID NO: 101973 - DNA, 201 bp, Glycine max
  Clone ID: PAT_MRT3847_63098C.1
ggctatcgctgacttcaaaacatatagctatctaacacctcactgtcacatgaattgacaaagctgggccaatttgcttacagtgcacagagacgggagctgactcatcagatgacagagctatttatcaacttgacgacgagtgccttagatgggtttacaccgaggcgttcaactcagtggcgtacatatgctttggag

SEQ ID NO: 101974 - DNA, 385 bp, Glycine max
  Clone ID: PAT_MRT3847_63099C.1
gaacagaatttgcaaattaatacatcgtgcacttaaaaccccagaccaccggcacgctttttaccaacccctgcggctggatatttaaggactaacaccacattgaaaaaaacacgacccttgtgaaattaacggtttgaaacaaatgcaaaacgccactcttaactattactctagctacaccgatgcagagaaggctttgctgaagttaaggggtggctgcatggacttatacccagggtaagacccaacagggcaatactcaatcagggtgctcctgcacatacggtaaggccagaagagacatgtttgtattggcaccactgggaccaagcgccaggttgaaaatggtagaaggctgggtagccctttccttgacaatagc

SEQ ID NO: 101975 - DNA, 1417 bp, Glycine max
  Clone ID: PAT_MRT3847_6309C.1
aagcagcacaacactagttcccaacgcagttccccccgtctagccagcacaacactagttcccaacgccgtcacccccgtttgtgcagtgaagaagaagaagatggccgtaaaatcgaagaaagagaaagaacacctgaatcttctcctaggttcccaccttactactatccatgaaaccctccaggttttggatcaaacaccgccatcttcttcttccgccaaagtcacctgggacgatgtcattaagatggctgaacaagtctcaaaacaagctaccacggtgggaatgctgtggactggagagaagccagatgccaaagcagttgaggaaaatatggcatcatatttcaacaccctgcaaggtttccttttactttcccatggcagtacagtaggtgcagggcctaccttgtcttctgctgttcatgcatccgtcaagcaagtcgttgattccagcttcagattgatgaaggaaactgtctctttatacgggtaccattctaaagacctgaaaatatcagtaccacaattggttggtgctgtctgggaagcctgttctgcccttaaaaagactccttccacaaatattacagcaattgggagaggaatgacacaggttgctgtttcagtgaaggacgttcttcgtgagatgaaagaattgaaacctgtttcatgtgatgatcaagttgacgaagctgctggtgagagttgtgcagaagcagcgtctgagccacatgatgataattcaagtgaaggtgatctagggaatgacctgtcacctgaagagatgaaagtggctgaaagagcaattgaggttgtctctaatacgctttcatttataaaaatacttattcactccatcataggcttgcttaagctggaaaaaccaaatgacaacagcagttttgtaaattctctggagaagttgttgcagctgtgtcatgaacttggtcgacagatcgatgagattggagcttgcctttatcccccacaagagattcctgccataaatgcagctttggagaaaattcacagcattattgatgctgtgcaagtggaggtaggagaacttctaggcgcatcagatgtatttctggagccatgcaatgatttgaggagttcactgagacagcttgcatctgaactaagtaactctagtactgctgatatagaagccagggttgaaaatataacattaaaccaataagtagactccaatatgtgtacttaattattatttttttttggcaggggggttggccggttgggaatatgtgcaatgaatttgacattgtagaacttacgaaaatgatccttttttatttataattttatatacacctgtatccagtgtactttatgttactggtcaactgcttgtttgaatacaaggagtctaacttaattggttgacc

SEQ ID NO: 101976 - DNA, 646 bp, Glycine max
  unsure (1)..(646): unsure at all n locations
  Clone ID: PAT_MRT3847_630C.1
tacggctgcgagaagacgacagaaggggaagtgaggtggtgattgaaacgaggctcgaggggccatcggcgatgggagacgacagtggcagcaaccggtcaaagccggagtggctgcagcagtatgatctaatagggaagattggagaaggcacctacggtctcgtcttcctcgctcgcatcaagtcttccaccaatcgcggaaaatccatcgccataaaaaaattcaagcaatccaaggatggcgatggtgtctctcccaccgccatacgtgaaatcatgttactcagggagataacgcacgagaatgttgtgaagcttgtgaatgttcacattaatcatatggacatgtctctctatctggcttttgattatgcagaacacgacctttttgaaataataagacatcatagggacaaagtcaatcaatccattaaccagtatactgttaaatcgttactctggcagttgctcaatggactaaactatctacacagtaattggataatacatcgggacttaaagccatcaaatatattgggtatgggtgaaggagaggaacatggagttgttaaaattgctgactntggacttngcaggatatatcaagcacctttgaagccattatctgaaaatgggggttgtgt

SEQ ID NO: 101977 - DNA, 554 bp, Glycine max
  Clone ID: PAT_MRT3847_63100C.1
caaatcaaatcagaagatataaaatttctcatgtcaaaacctcaataaagagtgccaatccccattcaagaaaagaggcttgctaagctttgggcatttaaaagtaacatttggtttatggaaagcctatttatttttacaaggttgaattgctcaaatgcaacgaaaactccatgaaaacttcttacccatgaagagaaccaacttcaaggaaataatttagtctgacagactatacggttcctaacacctccaggatggatcaaaatcaaactcaatccaaccttagcactcttttcaatggccttggtgtctacctcaccagaaatggtaaagaacgatttgggacgccactcgtgctggatcagagcacttgtccttccaaagttgttcacacgtgccttcaatgtggtcaatggatccaactgatgctgggtaccaagggtgagagtgttctcattagttgagaatctatgggtcacttcagcaccaacagcagtgttggtcaaggggttaactacatggtaatatgcagcattcaaagcatcaccttt

SEQ ID NO: 101978 - DNA, 452 bp, Glycine max
  Clone ID: PAT_MRT3847_63101C.1
gggcaaaagacagtgtttgggtttcacaaacagacacacagtcggttcttccttctcaaatattcttgagatccccattttctccgaagcaaagccatggctaagggtcctggtctctactctgacatcggcaagaaagctagggatctgctgttcaaggactaccacagtgaccagaagttcaccatcaccacctactcaccgactggagtggctattacagcatcaggaaccaggaaaagtgaactgtttctggctgatgtcaacacccagttgaagaacaaaaacatcactactgatatcaaagttgatacagattctaatctcttcacaactatcactgtcaatgaacctgctcctggtctgaaggctatttttagcttcaaagttcctgaccaaaggtctggaaaggtggaagttcagcacttgcatgactatgctggaataagcac

SEQ ID NO: 101979 - DNA, 1554 bp, Glycine max
  Clone ID: PAT_MRT3847_63102C.1
atgccttctagaagcggcgcgccgtttttttttttttttttttttttttttgtttttttttttttttttttatatttttttttttttttttttttttctttttttttttttttttttttgcagaaaacatcccaataattaaacattggtcgcatcagaagatttaagggaatattgcagaaaatatccatcaaatcaaatcagaagatataaaatttctcatgtcaaaacctcaataaagagtgccaatcctcattcaacaaaagaggcttgctaagctttgggcatttaaaaagtcacatgtggtttatagaaagcctatttatttttacaaggttgaattgctcaaatgcaacgaaaactccatgaacacttcttacccaagaagagaaccaacttcaaggaaataatttagtctcacagactatacgcttcctaacacctactcaatgctcttgccaggatggatcaaaattcttagggtttgagaaccaaacccaatccaaccttagcactcttttcaatggccttggtgtctacctcaccagatatggtaaagaacgatttgggacgccactcatgctggatcagagcacttgtcctgccaaagttgttcacacgtgccttcaatgtggtcaatggatccaattgatgttgggtaccaagagtgagagtgttctcattagttgagaatctatgggtcacttcagcaccaacagcagtgttggtcaaggggttaactacatggtaatatgcagcattcaaagcatcacctttgtcattcagagtcaatgaggcaatcaagtcatctttggtgaagctcagtccagcattggattttgttaactccccaattttggtgtcaaaagaaagatcagcaccaagagcaagaacattagttcctataacaccagagaagttgacaattgggtttgctgtcaacccaacactggtgcttattccagcatagtcatgcaagtactgaacttccacctttccagacctttggtcaggaactttgaagctaaaaatagccttcagaccaggagcaggttcattaacagtgatagttgtgaagagattagaatctgtatcaactttgatatcagtagtgatgtttttgttcttcaactgggtgttgacatcagccacaaacagttcacttttcctggttcctgatgctgttatagcaactccagtgggtgagtaggtggtgatggtgaacttctggtcactgtggtagtccttgaacagcagatccctggctttcttgccgatgtcagagtagagaccgggacccttagccatggcttttcttaggagaaaaaggggatctcgataatttttttgtgaaggcagaaaacgagtgtgcgtctgtctgtggccgatgtcagagtagagaccaggacccttagccatggctttgcttcggagaaaatggggatctcaagaatatttgagaaggaagaaccgaccgtcagagaaggcgtacacacagagaattggaaatggaagcacaaagcaagcaagaagcctcgcagccgaattaccgag

SEQ ID NO: 101980 - DNA, 1512 bp, Glycine max
  Clone ID: PAT_MRT3847_63103C.1
gacagacagacacacactcggttctgccttcacaaaaaaattatcgagatcccctttttctcctaagaaaagccatggctaagggtcccggtctctactctgacatcggcaagaaagccaggggtactctctctctaattatgttgaaattctattaaattgtggtttttttggggggtagaatttttccttactgttaaaaattggtgctttttgatgaatcctaaatgggtttttgtttgtttggtgtagatctgctgttcaaggactaccacagtgaccagaagttcaccatcaccacctactcacccactggagttaatgcagatacatgctataaactgatcctcaggaacacatctgataaaattgtgatatccatgatgccaattcccgttttgacttgcgtttagcaatatgtgatttggatttgtatcttctgcttcaggctataacagcatcaggaaccaggaaaagtgaactgtttgtggctgatgtcaacacccagttgaagaacaaaaacatcactactgatatcaaagttgatacagattctaatctcttcacaactatcactgttaatgaacctgctcctggtctgaaggctatttttagcttcaaagttcctgaccaaaggtctggaaaggtggaagttcagtacttgcatgactatgctggaataagcaccagtgttgggttgacagcaaacccaattgtcaacttctctggtgttataggaactaatgttcttgctcttggtgctgatctttcttttgacaccaaaattggggagttaacaaaatccaatgctggactgagcttcaccaaagatgacttgattgcctcattgactctgaatgacaaaggtgatgctttgaatgctgcatattaccatgtagttaaccccttgaccaacactgctgttggtgctgaagtgacccatagattctcaactaatgagaacactctcacccttggtacccagcatcagttggatccattgaccacattgaaggcacgtgtgaacaactttggaaggacaagtgctctgatccagcacgagtggcgtcccaaatcgttctttaccatttctggtgaggtagacaccaaggccattgaaaagagtgctaaggttggattgagtttggttctcaaaccctaagaattttgatccatcctggcaagagcattgagtaggtgttaggaaccgtatagtctgtcagactaaattatttccttgaagttggttctcttcatgggtaagaagttttcatggagttttcgttgcatttgagcaattcaaccttgtaaaaataaataggctttccataaaccaaatgttacttttaaatgcccaaagcttatcaagcctcttttcttgaatggggattggcactctttattgaggttttgacatgagaaattttatatcttctgatttgatttgatggatattttctgcaatattcccttaatattttctggtttaaaaaaaaaaaaaaaaaaaagaag

SEQ ID NO: 101981 - DNA, 224 bp, Glycine max
  Clone ID: PAT_MRT3847_63104C.1
aaacctaacctaaccctccaaacaatccaaccggtgccaaattccaacaattttccaagggcttcggcaaaggttaattcccgtgccttggttggtgggcttgcttgggtcaccggaaacaatgcccccaaaaaagccttttcaaccaacgggaaaatctttaaaccaaaggttaccaacaaccttaaaactggaaggtcaaaaggatccggatttgtaacctt

SEQ ID NO: 101982 - DNA, 445 bp, Glycine max
  unsure (1)..(445): unsure at all n locations
  Clone ID: PAT_MRT3847_63105C.1
gttggtcctttgttttttttttgttgtttacttctcggttttaatgtgccccccacaaggggaaatgggggattttatctggaaagaaaaaaaggagggaaatcccctttagaaaaaggaaattctcccaaaaaatccccggattgaagagagtaccccctttgacaatttccccgaagagaaatcccaggattgcattgcacccccattttttttagcgggttcgaataaaatttgtcttcaggagggcagggccgccttgttgcacctaaatttattcgctcgctggttgtgttggtatgtagacaaccatgggttcaaaaaagtcggggggggggggggaataaaaaatacccccgggtttttaaaaaggggggggtaaagatttttacctggggggtgttgntnttggatttgagggacgcccccaccctggggggggggg

SEQ ID NO: 101983 - DNA, 897 bp, Glycine max
  Clone ID: PAT_MRT3847_63106C.1
cgtccataattaaggatcaaccatactaatgtgaattgggtcaaagtaatttaccattttcttttgccacttatattgaatggatgctgtagctctgatgccataggaaagggtaagtttagggaagggatgaagaagaactccaagcttgtggcttatgctaaaaagcatggccatggaaactggcgcacagttcctgccaaagctcttcttcgaaacaagatgcttcaagtctagtgcaacaagttacgtatatatgagtgccatatatataggaaagaataagtttagggaaggatgaagatgaactcaaagctcgtggcttatgttgaaaattaaagcatggccatggaaactctggcgttcagttcatgcttaagagggtcttcaaagatgtagaaagagttgcagactcaggtcaattaacaacctcaaatcagagataaaacgaggaaacttcaggttgtcactcagaagatcccaccattattcaactcgatccatgctctccttggaaacaatgccaaaaagaaagaaaaaattggagatgcatcatgtacctcagagtttcatgctggtccatccttgagatgtctgtcagatagaaatgaaaggcttctgaccatgacagctgtctcagattggctcttcagaagctcatgtgaaattccatgattaacaacttgaaagaaaccccattctcttgcagcttctgcaatttccctcatgcattcttctctctcaagacttaaccggccaaggtcgatcaaaggtatatcacatctctctactatgaactcattccttgaatcccctaagtgttgttgcacaagggtcttgtaggtctcgaggaatggtggttcataagccatttgggagctatatgtgtatgaaaag

SEQ ID NO: 101984 - DNA, 432 bp, Glycine max
  Clone ID: PAT_MRT3847_63107C.1
cggacgcgtggggttacaacagggcaaaggggcttactggctgttcaagctaccattactctctctcactgttagtggctccatgccagaagataaaatggcctacgaagctttgctatgaacatcggaatcagtgaaccatgggcaccctggcatgctttgtgaccatatgatgctatgctagcctcgaggcaggctcgcagcatgacccctgaacccatggaggctgagaaacctgcgccaagaccaacgaggccatggatttcggtgagaccacaatcaaggcctgcgtggactatgagcaagattgtgctttccacatgacggaacattggattttgtgtctgatggggctggacattgatgctgacaacggctgggttctagaaaacattgtgcaacagaggcctgatattgctcaaggtgtgcacg

SEQ ID NO: 101985 - DNA, 501 bp, Glycine max
  Clone ID: PAT_MRT3847_63108C.1
agaaatgccccttctatgctatatgtgaatagcatacaggcaaaatcaaaagttggattcaatttgagagataaaaaacctagacaaggtagtacccaaaaccttaacctgctagcaagtttactctaccaagttattaactagtatacaatttcatccccaaagactaatgtacagaacaaaaactttcagaaactaaaccaacacaacttatcactctcagacaaaagtgtatacttactgtgacatcaataatacctgagaactagacatcttcatgaaatttcctatggggagtttagccgtttggatgccttgctcctcagctttcttcaacgttatccccttccatcggttcctatccaccaacccgccaataacataagccttcttcaaatcaagctcttcaagaacagtctccgaatccgccgtgagataaaccaaatcctccttacgattactcaaggcttcaatgtaagaactattctccttctcaattat

SEQ ID NO: 101986 - DNA, 793 bp, Glycine max
  Clone ID: PAT_MRT3847_63109C.1
ttttgaatcctgagcagtgcattacattgcttataatgaagttttggtcacaattttgaatagttgtcttggatttcttaattttttcacaaatgatttaaaatatgtcccgataaagaagcatctcgtgcggagaagttgatatcttgatgctaaattgtaattagaatatatataaataaatactaccacttttatttattacattattattattattattattattattattattattattattattattattattattattattattattattattattattatatgcatgcttcagctaacatgaagaaggtgaagcatttggtggagccgccagattccaagaccaaattgtctctgtggaaggctgatcttgctcaagagggaagctttgatgaagccattaaaggttgcactggtgttttccatgtggcaacccccatggattttgactccaaggacactgaggggaaaataaagcagacaatggacaaggccttttgggatggtatcatggaaaatgaagcaggtgaaaaaaggccttgcatcacattcttccaaagacatgggtggtcaattatgaaatttatcccttatggtacggtatatgtaggaatatgtgttgtataacttgatttgtaatattggagtagggaattaagtatatataaatgcggacaaaggtaataaaatcattgaatgtagctattagatcaaaactacatatatgtatatataccttgtatgtgtgaaatgacaaattattatttaattataagtttttttttgt

SEQ ID NO: 101987 - DNA, 716 bp, Glycine max
  Clone ID: PAT_MRT3847_6310C.1
aagcagcacaacactagttcccaacgccgtcacccccgtttgtgcagtgaagaagaagaagatggccgtaaaatcgaagaaagagaaagaacacctgaatcttctcctaggttcccaccttactactatccatgaaaccctccaggttttggatcaaacaccgccatcttcttcttccgccaaagtcacctgggacgatgtcattaagatggctgaacaagtctcaaaacaagctaccacgggtccaccttttctatttcgattgccctttctctattttctcttctatcactcccaaacttcattctttttatttgttttgtgttgtcatcaattcaatttattcataaatgaatgaaatcatttagactgccaaaggagaaacatttctattcgtttttttcttgccttttttgtattgtgaaatgcactattaggatattccgtgggatttttttttttcacttatgtaggcatgaatgcatggatttttttatgtaattaaatgtgtcttctttcttttctgcagtgggaatgctgtggactggagagaagccagatgccaaagcagttgaggaaaatatggcatcatatttcaacaccctgcaaggtttccttttactttcccatggcagtacagtaggtgcagggcctaccttgtcttctgctgttcatgcatccgtcaagcaagtcgttgattccagcttcagattgat

SEQ ID NO: 101988 - DNA, 320 bp, Glycine max
  Clone ID: PAT_MRT3847_63110C.1
attcgagcgggcgctttttttttttttttttttttttttttttcggccaaaaaccacccgaatcttatgccaacgttgattttatctttttaaaaaaatagtaaaataagaatgttagcgaatcattacggtttgaacaaggtttggctttggaggtacaaaataatattttatgcccagcgcctaggagagggaataatagggggaagatatcccaccttaattggtaattgggctaaattgcttattttgggcgcctagggggggggcattgggggggtggatttggggggtgtgggggggggggtgtggtgtggggg

SEQ ID NO: 101989 - DNA, 305 bp, Glycine max
  unsure (1)..(305): unsure at all n locations
  Clone ID: PAT_MRT3847_63111C.1
cattcaactttctttganngacccgacacacctgcgcatgggaagagcacatttcctcacagataagcagagtccatttttggtctacccaactccaaactatcatataatgaccaatgttttgttccccttgaaccaaagccgggaacataatatacaaacaagacctcttactgaacacatgcaccctaaacaaacaattattcgggagttagccctaactcacattatggaggaaagaagaagaaaaaacctccctagcaagagatacttacgcctagaggggagcggtgcaatatgcttac

SEQ ID NO: 101990 - DNA, 416 bp, Glycine max
  Clone ID: PAT_MRT3847_63112C.1
ttctttttttttttttttttttttttttttttttttttttttttttttttttggtttttgattttttttatttttatgtctaaaaaatttgctaccttacaaaaaccccaaaagaaagccaaacaagcagggccacataaaactaaaagaaaaggtagggaaaaaaaacatgaatcaaactgacccaaaaaatgacaaacaaaaaaaagaaaatagaataaaagaaaacaagaaatgctaaaaaaagaaatagattaacctaactgcatcacaccaaacgacgagcgaaaatcccttgaaacagcagacaagaagccataagaaaagggaaaagcaacggaaatcccaaccagcgaacataaaacccttacctgggaagcaaaaaaaaagggaggtgataaaaacaaccgccccac

SEQ ID NO: 101991 - DNA, 288 bp, Glycine max
  Clone ID: PAT_MRT3847_63113C.1
catgactagagatgatgagtataaatcttaatgtgatacctatattcatgaattaagatacctcagtttgattgctctcctcggagatccgcggtgactcggaattgtgcgaagtcaacaggaggaaacggtgtgccccagattagaggagcgtcagagcatccagggaaaaaattcgcggaccagcccctgcagtgcccccatgctaacgatatagcagctactgcttcaaactcgatgttctcatgcccaaatgcggattcctgggagaaacgaggattctgtaag

SEQ ID NO: 101992 - DNA, 370 bp, Glycine max
  Clone ID: PAT_MRT3847_63114C.1
gctgagtttggaattgtgactcagcaagattcttcttcttcgatggaccataaagatcagaatttttcctcgcaggaagcagacaaagaagaaactgaggagccccaggaagaagaagaatcttgctgagtttggaattgtgactcagtgtatagctccgacaagggtcaatgaccaatatttgactaatgttctgttgaaaatcaatgctaagcttggtggtctgaactcaatgttaggcgttgagcattcgccttctattcctattgtgtctagagcgcgaaccatcattattggcatggatgtgtctcatggttcgccagggcaaacagatattccttcaattgctgcggtggtcagctctagagaa

SEQ ID NO: 101993 - DNA, 257 bp, Glycine max
  Clone ID: PAT_MRT3847_63115C.1
atcctgtatagcgggcgcgacccacgcgttcggcttatggaaggcactccatgaatataacgatcccaaacctaagtgttctgtctatacggcagcgctggcatatgataggcagggagatgactggcggcgtatcctacgtcatggaggaaagcatgactagatgggatcatacgccacagagagaggatcatctaccgcccgacatacaatgagcgtccgtgcgccaggaaccttatcctaatatatcataagat

SEQ ID NO: 101994 - DNA, 246 bp, Glycine max
  Clone ID: PAT_MRT3847_63116C.1
tctcgagcgaatcggctcagagaaatttggtcaagttaattggtatatgtattgaaaacagcttccgcagccttgtacatgaacttgttccaaatggaagcgtggaatcctatttacatggggttgacaggggaaacagcccacttgattggggtgcccggatgaagatagcacttggtgcagctcgtggcctagcttacctgcatgaagattcaagtccccgtgttatacatagggacttcaagt

SEQ ID NO: 101995 - DNA, 500 bp, Glycine max
  Clone ID: PAT_MRT3847_63117C.1
gcccccccccaccacaaaattcattttttaatcacctaaagcccataataagggccttttacgaggcccggaccttttttaaaaacagtttccacctaaaaaggtcccctttggaaaaaaaaaggggccctaaaaaaaattttttgttacccctttacccaaaaaaacaaagttttttaaacggggttaaaaatatcttggaaaggctccacaaaaaatggaccggccaaccaattttgggaagggggggctaaaagtttttttttaaacggaaaaaaaaaagcctcccctcccagaacccgggggggaccccggggttcaccccggaaattcgggaccgggcccggggggggacccagttttccttaaagggggccttataaaagctgggggaaacaagggaaaaaggggttcccggggaaaaatggtaatccgttaacaattcccaaaaaaaaacaagcgggaaaaaaaaagggaaaacccgggggggccaaaggggg

SEQ ID NO: 101996 - DNA, 1009 bp, Glycine max
  Clone ID: PAT_MRT3847_63118C.1
agcggaatataaaagctgggtaactgccctttctaacggacgcgtgggcgcccacgggggtcacaatctagggttttagaatttacccaaaaccctcttccatggcagaagaagcagcactggaagtcgttgatcccaacaccgccgctgccgccgccgccgtggacatggacgtcgagaatgtcgaggccggcggcaacggcgccgagccgaaccagaagcgcgccagggaggaagaggagccccagggcggcgacgacgacgtttcgaagaagcagagggtggacgaggaaaacgaaaagtccgtagaggaacaacgcttggagaagcgcgatgaacaagaagaagaaaaaggagaagaaaaagaagcagaaaaagaagaggaagaagagaaggaagcaagtggttccgtgaacttgggattcaagagcttcggttcttcctcggagatgtttcattacttctacaactttcttcatacctggcctcaatatctcaatgttaacaagtatgaacatctgatgttgttggagttgcttaagaacggccatgcagagcctgacaaaaagattggtggaggggttcgtgctttccaagtccgcaagcatcctaccttcaaaagcaggtgctttttcctcatcagggaggatgactctgctgatgattttagcttcaggaagtgtgtggatcacattcttcccttgccggaagagatgcatttgaaattcgatgcaaacaaggcattgggtggtggtggtggaggaaagcattatggaggaggaaagggtggcagaggggggaggggtggaagaggaggaggtgggcgtggtggtcatgggagaggaggaaagtggagaaattaaatataatagttgctgctggtctgagttttattttgatatctaaaatgttttttgtatacttgccccgcatatttcatgtttcctgctaatttacatttcaagttttttgttacagtttttttataagttatgaagctttttgggcc

SEQ ID NO: 101997 - DNA, 254 bp, Glycine max
  Clone ID: PAT_MRT3847_63119C.1
aacaagtatagtttaaaattgtgcattattgatgaagtgataaatggcagataatgatgttggtagtggcggcctgactcgagacatctgttggtatgtcagtggaaacgaaatccgttaaatactatgtggtggctgcttctactgcgtcagcatttaaggggaaccgtgtatcagtgtctttcatatatgaatatagatattacgagtggattcatacatttttggcagaattttataatacttagaattgt

SEQ ID NO: 101998 - DNA, 373 bp, Glycine max
  Clone ID: PAT_MRT3847_6311C.1
ggttggggtttttttttttttttttttttttccccaaatttaggcccttttttaaaggagggttttttttttgtttgtggggagcaaataacaatagcaaatcaatgggggttggcaaagttttaacttagggggtcaaacaggggggtggtgaaaatctataacctgtttttgttttccaaagataaaaaaagacccaattgggcttttcttaaagggggtaaggactttggtttccaataaccaatataaaaatccaggtcccttttcggaaaattattttttaccttggccaagtttttctttgaaccctaaaggtcattttctgaaaccccccatttagtcttcaactttttaaattttttttttaaaa

SEQ ID NO: 101999 - DNA, 748 bp, Glycine max
  unsure (1)..(748): unsure at all n locations
  Clone ID: PAT_MRT3847_63120C.1
ctggtannngcctgcaggctannccggtccggnaatnntcccgggtncgaccacgcgtccgatcaatagtaacttcccgctcgctatcacaatctagggttttagaattttcacaaaaccctccatggcagaagaagcagcaccgaaagtcgtcgatcccaacaccgtcgtcgccgccgccgccgccgccgccgtggacatggacgtcgagaacatcgaggccggcgacaacggcgccgagccgaaccagaagcgcgccagggaggaagaggagcccctgggcgacgacgacgacgttttgaagaagcagaaggtggccgaggaaaaggaacagtccgtagaggaacagcggctggagaagcgcgatgaaaaagaagaaaaggaagcagaaaaagaagaggaagagaaggaagcaagtggttccgtgaacttgggattcaagagcttcgtttcttcctcggagatgtttcattacttctacaactttctccatacctggcctcaatatctcaatgttaacaagtatgaacatctgatgttgttggagttgcttaagaacggccatgcagagccagataaaaagattggtggaggggttcgggctttccaagtccgcaagcatcctaccttcaaaagcaggtgctttttcctcatcagggaggatgactctgctgatgattttagcttcaggaagtgtgtggatcacattcttcccttgccggaagagatgcatttgaaatttgatgcg

SEQ ID NO: 102000 - DNA, 1275 bp, Glycine max
  unsure (1)..(1275): unsure at all n locations
  Clone ID: PAT_MRT3847_63121C.1
atcaaattctgtttttttcattttctccaccccacgcgtccgcccacgcgtccgttccattgttatctcgctaaagtctcaaacctttctgtgctctgctctgctgaggaaattctgtaacttgatgattataaagatgaactgtttcttcttcaaaaacaagtcaaaatccgacccagaattaccaaagcgaaggaagaagagaaatcaggtgggcaataatggagcaagcaagtcctcccccagctcgctaccatcgccgagaagcataaaagaattgtacaaagaaaaagagcacaatttcagaatcttcactttgcaagagatggtaaatgcaacacatggtttcaataggatgctcaagattggagaagggggtttcgggaaggtatatagaggaacaattaaacctgaccctgaagatggagctgatcctattctggtcgcaataaaaaagcttaacacgcgtggcttacagggacataaagaatggcttgcagaagttcaatttctcagcgtcgttaaccacccgaatttggttaagcttctgggatactgcaatatagacagtgaaaaaggaaaacaacaggttatagagtgggtgaatacatgccctgctaacagtagcagattcagcaagatcattgatcctcgtctcaagaaccaatattcacttggtgctgctcgaaaagtagccaaattggcagataactgcttgaagaagaatcctgaagatagaccatccatgagtcagatagtggaaagcttgaagcaagcattgcaggattcagaaaccaatacacttagctcaatatgacttctaaatccactgaatctaaattggtcccgagtggtaaataggtgcagcttgagaataatttttgtaattagtttgattcatcaccacaaagccaagtcctatactgtcttcagtatggttttgtttggagaaacttttctataagcacttatagaagactataagaataaaatagattgagtttctcacaattgataaagtaaggtgtaagatgattttagcttttagagtaaactcaattcattttatttatttttccccctcttattaatgcttaaggaaaaatttatccaaataggtttgaatattggcttttacttttacaaaactaatcaatattagtggaagtgcagcgggtctatttgtatctgcaaatctatccggaagtttaacattgtagcctgttggaaacgtatgagcttctacttaatggagtctcaaaatctcttaaaagn

SEQ ID NO: 102001 - DNA, 727 bp, Glycine max
  Clone ID: PAT_MRT3847_63122C.1
acaggcaaagaaaagtttaattaattctttctccaaattgtacactttgatttgatacagacaatagattgtaataaaggctgaaaaaatgaagggtgaaaaaagaacccaggaatttcttttagaacaaaaaatagaattggagcttctattagtatcaatcacctatggaatctggttaacaaatacacttgaatacatggagaattgttccatgtttttgagtgcaacctaagtacccctcttgctttttccttcaaataggaagcacaatctgcttgcaacaccatgcaaagctttgacacagcaccaaccctcagcatctcttgcacgacctcattggaggccgagaacttcgaaaccaaggaaaatatatgaagagctcgatcatcagtggttggtgaaaccctaaggatcctctttgaaaccacagcaatgcctgcagcatgttgcagaaactgttctctcccatcagcacaagaacaaagatgagccaagagaataaatatgagttctgtcatattcttttctggtttttcaagtgcaagttcaatgagttccaccactgcacctgcttcaactatcttcattctgtttctccccaaaggacaggtttctataagcacgtgcaatgcagatttaacagcttgctgagtgagttctctatttttcctcgagcccacaacaactttaaagaattcaagcttcaagttccctaaaggggttg

SEQ ID NO: 102002 - DNA, 371 bp, Glycine max
  unsure (1)..(371): unsure at all n locations
  Clone ID: PAT_MRT3847_63123C.1
caaggaaatgtttattgactgtgatttaaccgtgtcctatctaaatgtgcactatccagcttttctttcacaatttccgtatctaatcaaattttggccccgattattaaccatgctataaccatatattttagcccaaaaatcttaatggctattaaagtgacataaatactgctactggtgtaagaatttgaaactcaattgcaggtagcattcttctaatcngcctgcacttgattccttatccactttgttgccacccacttctctccttttatgacggggcagcttccgtgggctgatgtctgatcaatagtaccattaggtaataatgaataaaatagaagcgcatcccccttgcgtggtcttac

SEQ ID NO: 102003 - DNA, 435 bp, Glycine max
  Clone ID: PAT_MRT3847_63124C.1
gaagagaatcccagcaagagaaaccagtatcagcctccaccaccatattcccattactgtcacaccacagcacagctaaacttcaagcgatggtttgtgattccaagttggtttggtttattgttctgctcattcataccaacctataaagccaaaagctcaacggaacccgcggctataagtttgactaacgtaaagaccactttcagtttttgtcgcacaaaccaagaccaatactccctccgtgtgatgttgtcatgtgtagaacccgtggggcccacaatgattcaagaaaatgcacactctgtgatttgcttatcgcgctcacaatatcttttgcctcgcccaatttattgcaccaacctatctcagtgaggaaatttgtatatatttcttaattgaaagaaggaaaaagtgttataatctttattctag

SEQ ID NO: 102004 - DNA, 389 bp, Glycine max
  Clone ID: PAT_MRT3847_63125C.1
ttataattttttttttttttttttttgatataagtgttgttttaaacagaaatcccaccataccccgaggtgtggggaaccccaacaacatttttgattgaaaggataatccaatccccagggaatattttacccaagggtggcaggaaaaccccgggaaattttgttttgcagggaaaacttttcctaccaaaatagctcctacattggaaaaacagggcaaccaattggaaaccttttccaaaaaattcctacccgggaaaggcaatggacttttggccgacccaaaccggtccacttaaaactgggtaacagggcattttttgaaaaacattcttgataaggaaaacaaggaaaacaagggcctaaacttttcaaattgctcattg

SEQ ID NO: 102005 - DNA, 363 bp, Glycine max
  Clone ID: PAT_MRT3847_63126C.1
tttttttttttttaatttcttttttttttcccttttttttttttttttttttttttctttttttttttattttgggggggccccaaaaaaccgggtttattttggaccctacctctcccggaactttttttggggggaaaaaaaacccttcccgggggtttttcattttaaacataaaaaaaaattggtttaccccatcaaaatcatttggtgccgggggacaaaaaccccctttttttcccgccatatttttcccctggggccgttccaaaaatcatacctttttagaggggggcgccatgtctaaaaaaaactctccttcaaaaattagtgggaaaaaaagctaacctctttcccccctgg

SEQ ID NO: 102006 - DNA, 343 bp, Glycine max
  Clone ID: PAT_MRT3847_63127C.1
actgggctggaattcccggccgaccacacccttccggtgaagccttctttcttaaaaccctttttttttttccatgggggttccaaccttggagggggtcaataaaaaagatgttttcccgccggtttttgccttttctccttgggaaggggtttttcttgaaattaagtgtgggatcaaaaaaacaaggtttcttaagagggcttttaatgaaaaattgttttccaaggtcttaaaattggaaggataggcctttgtttttaaggttcttatgcccaaaggtccacaccatggccgggggaggttgaaaaccctaccttttttttatggtttttattttagg

SEQ ID NO: 102007 - DNA, 339 bp, Glycine max
  Clone ID: PAT_MRT3847_63128C.1
atggcacttgtattgttgaacaaaggtttctccgtctgcttcgtcactttccctcgtttcaatcgaaaccaaaactaatcacatggacactaaattcctcgtcagtggcaactggaaatgcagtgggaccactgaggatgatttgaagattgttactaatttgactgaggctaaagtccctgtacgaatatgtcgtagcaaattgtgttgatgcccacctttcgtgttccttcctgttgtaaacagtttacagcgccctgatttccatgtttcaggacagcactgttcggttcgaaaaagtcgtgcttacaccggtgatgttattgctgatctgcatgt

SEQ ID NO: 102008 - DNA, 1720 bp, Glycine max
  Clone ID: PAT_MRT3847_63129C.1
aattcggctcgtccaacacaacacaaagactttctcaaacaaaaccagacggttatctagtcttccaatcttccccctattccctgttcctattcctattttatcaatcaataacataaataacacttcttcttgccttttaatatatttttctctcttcccctcttgttttcacctttcaacacttaattagagacgacccactttccttgcagatctttttccagggaaaagtttggattggtaagaggttttgtggtaagagttagatgttgagtgatagacggaaaggttgaggtggagctggattatatggatagtctttgttgcttcagctctgtcagtcaggtggtcggagggcgttcttcatgtaactctggcaaaggcaagagcagtcagtcctcagtcaagtatggctatagcctagttaaagggaaagcaaaccacccgatggaggactaccacgtagcaaaatttgtgcagttcaaagggcgagagcttgggctttttgctatatatgatggacacctgggtgacagtgtaccagcctatttacaaaagcatctgttttctaacatcttgaaggacgaggacttctggaatgatccattcatgtccatttctaatgcatatgagacaacagatcaggcaattctttctcacagtcctgatttggggcgaggaggatcaactgcagtaactgcaattctcataaataatcagaaattatgggtagccaatgttggagattcacgagctgttgtttcaaggggaggggtggctggacagatgtcaactgatcatgaacccaatactgagcggggcagcattgagaccagaggtggctttgtctcaaacatgccaggagatgttgcaagagtgaatgggcagctagcagtttctcgagctttcggagacaaaaacctcaaaacgcacttgcgatctgatcctgacattcagtatactgacattaccccagatgttgagcttttgatacttgctagtgatggtctatggaaggtaatggcaaaccaagaagctgttgatgttgcaagaaggataaaggatccacaaaaggcagcgaaacaactagccactgaggcattgaacagagacagtaaggatgatatttcctgcattgtagttcgtttcaagggttgaaaaagggaacatacatactctctaaattcagggtatatatattctacatatcaagatgcaattccatactcatgaaatccattatcattttggaatttcctgcaaaaataggttttgtcccatcccttcatatgtaaaaatataaaatttaagttcttgaatttaggtcgtgccgattagtatttattgatttcctcgttgtgtagaatcataccatcataatttttctttcaaatatgcattgttatgtcgtggagcagtgtgaagaagatggcagcagtttatacattgaacatgggatttgtgcatttgttttaaactgagtgtatgctatagttgaaaatgaccctagcttgagtttgcttgatctggctacaattcaagcgagtatagcaattgtttgagacatgaaactgtttaatgtttccagtttccatttttttcctcctcttttttgaggggtatatttgaaagctcaatcaattcaattgttcaagtattcagctacttgaattaaatctagatgatatgaacgttacttcttgaggtgtttgctggg

SEQ ID NO: 102009 - DNA, 966 bp, Glycine max
  Clone ID: PAT_MRT3847_6312C.1
cggactcttgggcggacgcgtgggcggacgcgtgggcggacgcgtgggttcacacaccaccaaactccaaacccaatcaattaacctcattgttccaaagcttcaaatttcaagtgactccaccccaatgggggatttcatcttctccttcaagacccaaccacaagaccatgctcaccaccaaagagcaaagcacaacaacaacaacaacaagaggctaaccgaggaccaggtcgcgattctcgagaagtgcttcgcctccaacatgaagctcgagccggagcagaagttccaccttgcaaaccaacttggtgtgcctccaagacaagttgcaatttggtatcaaaacaaaagggcacgctggaagacccagagcctcgaggtggaccatggtgtgcttcaggcaaggctagagaatgtagtggctgaaaagaagcagctagagaaagatgttgaaaggctcaaagctgagctgaagaaggctcaagagatgttgttaatcaccaataatgtcaaaagtggagaccaataataataataatgcttcttgtgaattttcaacttcttttgaagaaggagggagttctggggtggtgcttgatgatgccactcatcatcatcatcatgagtgttggcaaagtggtggtgaggttatgcaggttgaggagctctatgcttacttcgtgggtgcaaattatgggacaggcttgcatgagaaagggcataaaatataacaaacttttgctagtttgtacattttatttttgttatgtcattcagcagcagggtcaaaaaattggaatttgttaatttacaattttgtgtcatgaaatatattgtataaatccatgtccatatgtcacggtgatgagacaaaggagactggagagtaccctttaacgggaaaaaaaaaaaaaactaaaattgaataatgagcaattcgatgaccctgcattgcattttggt

SEQ ID NO: 102010 - DNA, 951 bp, Glycine max
  Clone ID: PAT_MRT3847_63130C.1
taagaccgagagatcccgtgaatcaattgctcctcgacgtaactaacaacatcaatcgcctctttcactgttcacgattttcgtgccaaaaccatgaagcttgactgctctaacggccaggctcctctcgccgccgatgtttctccgccgcaggaagacggctccgaggaggagatattcgtgccgccgctcaacttcgccatggtcgacaacggcatttttagggctggctttcccgattccgccaacttcggattcctgaaatcactccgtctccgttccgtaatgtgtttgtgccctgaaccgtatcccgaaacgacttcggaatttttgaaggccaacggaataaggctttatcagttcgggatcgatggctgtaaggaaccctttgtcaacatcccaaatgatacaattcgtgaagctttgaaagtagccctcgatgttaggaatcaccccctgctgattcattgtaaacgagggaagcatcgcactggttgtcttgtgggatgcataagaagattgcagaggtggtgtctatcatctgtttttgatgagtaccaaaggtttgcaggtgccaaagctagagtgtcagaccagaggttcatcgaattgtttgatatctcttgtttgaagcaccacccactgtcattttcatgctccaaaaaatagaatctgaaataatggtgtgttctagaaagttgctgcttcctcccatggaatatttccatgatgaagtgaagtataatgactagtcgtttatttttcttcaccgaaaattagagcaggaatagtagaatttttaatgagatattctgcttccttacgtatgctgtgtcgtggattggatagtagtgaaggtgaagggttggaaatgagcctgaggctttattcgtgaaaaataaaataaaaaattgcttacgtttggttcttttaaaaaaaaaaaaaaaaaga

SEQ ID NO: 102011 - DNA, 154 bp, Glycine max
  Clone ID: PAT_MRT3847_63131C.1
aacacgcgttcgtctacgcgttcgtatacacattctatcacgcgtgctaatattcacaggagttacaattaagattgagaagggagttataagactgatggaaatatgagcattattatacaatgctcatgaattttttatattaaatgatagt

SEQ ID NO: 102012 - DNA, 189 bp, Glycine max
  unsure (1)..(189): unsure at all n locations
  Clone ID: PAT_MRT3847_63132C.1
gaagatggctcacaggttgcanagctgcttccagagccgcgaggtccttttcgctccagagcctccatggacggcggtggggtgcaggtgttcatagtcnatgctcttcaggaaaacgttganggtcgtatctcacaaacngatcaganatgttctgcgagtangttcagaaggtggatactgagatca

SEQ ID NO: 102013 - DNA, 402 bp, Glycine max
  Clone ID: PAT_MRT3847_63133C.1
ggctcgagatatcatcaaggtttcttttgtgagtctgaaaagcacacgactaagcctaatttatatgctactgcaagggaactgtttgcactgttgcacagggaaggggcgttgatatctattgtccgccatagcttggactcatagatgatgccattaacgctcttacctaaggccaagagtggaagccttgtgagtgctacatgaccctaaaatgacgggcacttggcccaaagggtgactctatggcaaggttttgcgagagctgtaattaagtcttgcagtggttaacgtaagatggaacgacatcatttttagtgacaaactgtggggaaaacgatggccaaaagggaacattttttgatttaaaagcctgggtagactcaaattgtgacgatgatt

SEQ ID NO: 102014 - DNA, 370 bp, Glycine max
  Clone ID: PAT_MRT3847_63134C.1
aggattaaaaaaatggacggactacaacgggagaactctagtcaccaggctttggtggaggggacggaagccaggtcttcaacatggagaagacttttttacatatgctcaagcggaagatacaaaagtggataatccaccacatggctggggctgcaactgttgacacgggctgaaaataatgaccaccttatggacccaaattaaacccttgtatgtctaacactcagaacccctgcgtgaatgtaaaatcatatattgcacaatacgtgacatggaaaataaacagaccatgcattgcttacataaacacggatgatgccagccacacctagacctccgaataaggatatatgcttaactactggcc

SEQ ID NO: 102015 - DNA, 330 bp, Glycine max
  Clone ID: PAT_MRT3847_63135C.1
atcacgcgtacagtatacacattgatttcaaatgtacttcgtgacattttatgctggttcagggtggctagtggtccagcatcggcttttgagattggacaaagggcttaagagcgttcgatcatggattacaactctgttcacaagtctagcctgtcaaattcaatacttcactggaatggggcttatagcaaccggattgaagaaggatcaaatgttcgatggtgacatatgtacactctacatgagtgggtatactacaatggatgttaaagttgattcatattctcatatatctacaatagtgactcgtgaatgatatatttgcat

SEQ ID NO: 102016 - DNA, 348 bp, Glycine max
  Clone ID: PAT_MRT3847_63136C.1
gacccacacgtaagacggctgctatgatatgaaaaaaagtacagaaggggacatatcgtttgttctaagcttatcccaatttccgctatgcatgctgttcctcaacttcgagcaacacttttctctaaagtcaggggcacggtcaagtttggaatcagcggatttgtttcaattgggcttttgggtgcaagattcgctctgcaaagtaacgatgtgtaactccttgccgtttagaatcctttcgatactaccgattacacgacacaaatttttaaatacgagattgtgcacggccagtgaaaccatttcaatgtaatcgttaaggacaagattacccttctcttcagt

SEQ ID NO: 102017 - DNA, 464 bp, Glycine max
  Clone ID: PAT_MRT3847_63137C.1
aaataaaaaatttgtttttttttttttaaaattgaaactagtaataataaaaaaattaacttggtatttctgagggttcctaagggaaattataaaaaaaccgaaaacagggaaggacgggggggaagaacgggaaaatccggaacggtacaagaggaaaaccagctttacaaatagagagtaaaataaaagcttagaaaaaaaagggaaaaaaaggtaacctggggaaaatgggaaaacggttaaatttgcaaaaaatatacaaaccggaagaataaagaagaaaacctggggagcctaaggagagagataactgacataaattgcatggggctaactgcccgttttgcaggcggaaaaccggggaagccagctgcgttaatgaatttaccaaaacacaaaaagaggcggaataagtattgggcgcaaggggggttagggttttaaccatttaaacgggcaaa

SEQ ID NO: 102018 - DNA, 406 bp, Glycine max
  unsure (1)..(406): unsure at all n locations
  Clone ID: PAT_MRT3847_63138C.1
ccacgtttggctcggagaggacaccaaggcgctgatcggctcgaatcgcccaagcgggggggaagcaggcagggcgaagaggcagagncnngagaaaggagagaccnggngagaagaacaagccccnnactggngcagaaagggaagggggcttcangaggcgaagacaaaccgnagcagggggggggaaggactttttttttttaaggagaacagnggnngcaggcaagcaaccagcaaggcagagaccnnaaccccccccgaaagngagnnnaagacaaaggaacaaaggggagcaagcagggcacaaagagaaacaagggnacagccngaacaggcngaccctaagcacagaggaagcaagagacnngggggaggaggcaggcagaactgcggacgagggacc

SEQ ID NO: 102019 - DNA, 328 bp, Glycine max
  Clone ID: PAT_MRT3847_63139C.1
gccacgcgtgcgataaatataagcctcttctgcacatgtctaaagaagacgaggcatcacatgcagggttcaggactacgcacacggatacagtcacggttcatgaatagaataacacggctaatgctgatcaagtggcgcttgactttcagaagcacctgcatcactggcctaatttacacgcccttattaacttcctcacaaatatgggaagttggtgctttttcaactttaaaacatggttctcgcgacttggacaggcgtacaaatggggtgcaatataatggaaggtcactcgccaagaaagctttgtctacctccaaacaag

SEQ ID NO: 102020 - DNA, 566 bp, Glycine max
  unsure (1)..(566): unsure at all n locations
  Clone ID: PAT_MRT3847_6313C.1
atcgaacagctcggtcgagggcaccctgtctaggaatttgggtgatgagatcagtcggaggttgcaggatgtgcagcctgttgttgatgaagaggaagaaggggaaggggatagctatgtcaagaccgtggtgactactcagcggacacggaaggtgggcagccgcaagccgtccaatacgaatccgcaagcttcggggaccgcctcggtgccgaccatacatgtcgacgaagaggtccgagagtacgccgacgccggaacgatcacggacgccgtcaggatcttgccattactcgaagaggagtcggcagaggaacaagccgaggccggaccatcgacgacatcctcacctcagataccacaagagaaccctccggcatataccgccaagccagatccggtcaatgagcaggaagtcctggatcgacatcatccgcgcaagcatggtcaagatatcgacgcggatgacgagtacgaagcgctcgtncaggcaacgggagtgaggtgtactgtgctggaagaggaagtgaagttgcggaaaagcgagaggaccaagcgcgggatcg

SEQ ID NO: 102021 - DNA, 1079 bp, Glycine max
  Clone ID: PAT_MRT3847_63140C.1
cgcattcctctggatggagtactattacaaccaagggagtaacgaaaaaaagagcattgaaaatgtcaatgagagcgtttgtttccaaagttaaatcgataaagtgtagtaatttggtactaaagaaatttatttgaattaaaattgagccagtgaaacaaacaaaactactgcaacgtttctaaatacacagtctatgcatccctcatgagttggaaaaaggcaacactgcttctcaaatttaacacatctcaatctttttggaacgaagtaaaagagcacaagtcgtggttccaagccagagaaaaaagaagactagtatttacaacacgcgtgtctaataggtgactaagcagattgtttacagagcaattatacgcaacgtaacgcaacgcaacactgtttggattatagctatatatatgtaacatcatgtatgcataagcattggttggttcagacaaaaaggagcttaagatttagaatagagaggaaagcaacccatgccaaacaaggctttatcaaatcagcagcgatgggattgaaagggcgaaacaagcgcatgcagccaaactgggtgagaaataaggaaacacacaagattaagcctagccgtgttgccccaagggcaaagacaagggggtcccacagcaccgtgaagaggagctgagtgaagtaaagcaacagagccatggggtttctgtggaaacccccgtctgcccacaccatccaagcagagagacccatcaagaagcttgaagcaggacacgtcaagtgtagggcccacgagggtgggaaccagaaggggcttctcgaagcgtaatgggcactggaggaggaggagcctatgtaagctgataaggcggtgagagagagagggaggacaacggctatggcgagtgacttaaggccgcgtttggccatcagcattcgtttgcctctgctggtcctattgacgtcgttggtggttgctgtagtggtggtgacccgatgtttgagatcattagaaggcatggtggaatggaagtggaagcaagagaagcgagtgtggtccccttctgtcgtcttctcgcagccgt

SEQ ID NO: 102022 - DNA, 552 bp, Glycine max
  Clone ID: PAT_MRT3847_63141C.1
ggctcgagctctgctgctcaaaagaatttgatatgggaggatacttaggctgaatctgatatccctgaagcatctgatctgaggacaaaaaagaaaatacttcagactgtaggggagcggtggagacaatttaaagtctattttgacgtcgaaatgagcacttgcaactgacaaggaaagtgtcgatgacattgtatgcgaaaagtacgacattagcaaggagaagtgggcccaactttgtcagacccgcagagacccttcgtgggaggatgtgcgaaaaaagacacaggccatccagaaacaaaacattgtccctcacatgttgtctcgtgtgggttatgaatatctagaaaacaagttgataaatgagaagaaacaaaaaaaagtggaggaaactgctctatccagaagcactgacactgtgattaatcctccatctcccatcagacgacacatgaagtgaaagatggtccgcaccaagaaaactggacaaatgacatctaaggcagctaggaaattgctgacaagatgattttttgagaagcaagccta

SEQ ID NO: 102023 - DNA, 634 bp, Glycine max
  Clone ID: PAT_MRT3847_63142C.1
ccctccaaacacctggtatcaaatttatccacaaaaataaaaggcccaacttttatgactttaaggggttcttaattcatccaaaaaaggcaaaactaagggagctaaatcctagtctaacaagaggagttaaagggccaatataatccaaaataaaaccaaagacagaaggcttaaaacctcaatatttacagggaagggataacatgatttatataacaagcacaaaacctccaaaattgccctcccggagcttttatacattgaaaaacataaaaggcaaaatcccaaagcaggattcctaacaaaaaactgaaaatgaaagtaaaagtaaaaggaaccccacctgagtataggaatcaatctggcaatcatggccccttgcatgcatgtcttactgggttataacatagcaataaaaaaaacacctcagggtcaaaaccataccaaataacctccttaaaagtttaaaagccaaatctggggttgagttatctatgtctacaggtggattcacctcagaaaaactcaaatttgaacttccagccagtatgaaattctgatgactatcacctgcctaagcaacttgacgaaaactaccaggccacaacaaatctgactcatcatcctccaa

SEQ ID NO: 102024 - DNA, 464 bp, Glycine max
  unsure (1)..(464): unsure at all n locations
  Clone ID: PAT_MRT3847_63143C.1
cgtatatccggctacgaggggacgagactggantctacacttgtgaccaaaattcctagtgtcttngtctcacatctgtatgangagattggtnaggcacagggacatggagggatatgantcctttggcttggntgggaattcaaaaatanntgccactcccatgtatgcnnccctagatgaagaaattctttctaaggnttgcacanagatatnagttgaggaaatggggtttgatttgtgttgatgaggaggattncctttgaggaagntttcttntgagtgcagcanctcaattggtgttgaagggtttggactattatggaaagaattcctcttgccacatctgaaggttttcctcatgtgctttcacgcaaaaatggtgaaaaaggcaaaaggagatttgattctggggattgcgaacagatgacattgattccgggaaccagtgttgaagaggctta

SEQ ID NO: 102025 - DNA, 417 bp, Glycine max
  Clone ID: PAT_MRT3847_63144C.1
ttttttttttttgccgcccccaaacaaagctcttttttttttgttttttggcccccaaacaaaattaatcgctgccctgaatgacccttgagccacaccattcaattggcaaacatattcccaatggccccaacatagcaattggataacctatgagcacaaccccccgcaggaaatgtacctgaatcatgatcgacaacaactcctggaggtgcatttgggtttattactgaattcgccttttaaaaaatttccctttttgggaaaaagacgacccacccaagagggccaattttggggaagaagcaggccaccccctaaggtttctcattcctgaaacaggaattaacaaaaacaatttcttgggaccgacaattagaatgggagttttggttgttcttgaagcgagtgtaggat

SEQ ID NO: 102026 - DNA, 329 bp, Glycine max
  Clone ID: PAT_MRT3847_63145C.1
cttgggaaagataggaatagtatgtctagcattaatgagtgttatactttgcacaagccaaatcatctttagtttacagaatgtggaacgaatgggatcatctaaagcagttccaaaccaacagagaaattctgtctctggtccactagtgaaattttatcaaaaaaaatctaacatgagattggtaaccaaatgaaatggatcggtgtcactagtgggtacgaagagcagtacccacctttttgcgcaaacggctgtcccctgatctgcactgctggaggccttgcattgattgcaggttggcctgccattctatccttgctgggagc

SEQ ID NO: 102027 - DNA, 350 bp, Glycine max
  Clone ID: PAT_MRT3847_63146C.1
cctaccttagcctggaatctttaaaaccggccgccttttttttattttttttttaaaataccaaaaagccaaacccttattttattaattaattttggaatgggggttttgtaaccacccggagccaaattccttatggcttatcacaccaacaaacttagaattaagcttaacctcaccactattttttttccttggaggtgattgaattgaattcaaactacggactggataattccatcaacctaaaaagcttcaataaaaccaaggccaaaggcctaatgctcagggaaatcaaaccgtcttcctccttaacaatttttggaatcaaaccttccaatatctaaaca

SEQ ID NO: 102028 - DNA, 419 bp, Glycine max
  unsure (1)..(419): unsure at all n locations
  Clone ID: PAT_MRT3847_63147C.1
cgcaaggccnnanggncaaagagcggnncngaagnnngcncagnacacnggngcncangccanngcnggaaggcacacncccggnaccnncaccaancagggggggacggcgnncagngagccncgncnccnnanccncaccganccaagaacagancaccagccnannaaggaagcngcncnngggaananncccaccanngcnnncngngacacnganncgccnangagggangnggacannggaannccngccaacaacaagggaaaacacagcannggnngncncnnnnggcnccnngcaagganggnanngcagangaggggnacaanncgnccngnccnnaaangggangnnanggnngannngnnnngcnanagagaaccagaggaggcnaagcaacaagaggaggaggaag

SEQ ID NO: 102029 - DNA, 515 bp, Glycine max
  Clone ID: PAT_MRT3847_63149C.1
ggctcgagaatcagtagattggagctgaacccgagctggaggcgcgtatgggtgcggctaaccagcagttcgaggcacggcacctatctgtagaagggtcaatggaaacttcaagagacactgaacttgaccaatacgtggcagcatactatgacacgctggagaagtacagagaggaattaacagggcctattcacgaggctatggatggaatgcgactgatagaaactcagctaaatatgcttggctatggacccgagcggatcctatctgatgatgaatgtgaaggtgccaggtcatcagaataggatcaagacgacactggaggataaacagatgtcaccgagattgatccgcgtgcagatgaccgagaactctaaatccacttgctgaagaagttcagtgcttacttaaggagcctgaagcaagaactctccatgaagaatgagaagggcatgcttaccatagatgcatacgcatcagctacttaactggagggaattacattacaaatg

SEQ ID NO: 102030 - DNA, 325 bp, Glycine max
  Clone ID: PAT_MRT3847_6314C.1
atcttgatgctgaaaaagagatgatgtctcaatgtgtggctcttcttggaaaatttattgctgtccgtgaaccaaacattcgatatcttggcttggagaatatgacaagaatgttgatggttactgatgtacaagatatcattaaaagacatcaagctcagattattacctcattgaaggatcctgacatcagtattcggaggcgtgctctagatttgctttatggcatgtgtgatgtttcaaatgcaaaggatatagttgaagaactactgcagtatctcagcacagcggagtttgcaatgcgtgaggacttgtcactaaagca

SEQ ID NO: 102031 - DNA, 583 bp, Glycine max
  Clone ID: PAT_MRT3847_63150C.1
cgatctatcgttagaaatgtaccaggtacctgtcaccaaaatcacaacaaagcgagtacaaataggcttagtttgctacgatgttggcgaagatgtaggggcaggtgagttgtgcgtggcggttagtggtaacagcaaacaataaagttattaccgttgaaattttgtttaaggaggccgaattggtatagctgccccaaatgtttatagtcggtttggtaactttggcttaaaaaggagccatttagaagcggtagaaacggcccataacgtttaattcggcgacgggttgttttgcaaatgctacactgaggttgtaaaatttagcatatgagtgggctgactaccttaaaaatgtgactggtacaagatagcgtggagccaacgaacccttgactcggtgtgcacgagccatttgaggcctcgaatcgcaaaaacggcgctattatataatggtgcacgctagtaaaccgtcacagcggtctgttaggcaacaaccaacacggaccacgagggcgcaacgtatgtcaaaaactactacttgtattcgcagcgcacaagtgcaagcaataccggccccact

SEQ ID NO: 102032 - DNA, 506 bp, Glycine max
  Clone ID: PAT_MRT3847_63151C.1
tgcgagaagacgacagaagggtacgttgagaatatagcatgcataacttttgaagtgattaaaatcactggcgtattactatatatatgtctatactcattcatataagaattgatgcagttaagtcatggcctacaaatctatcattgattgatagtcatcacctacacgtcttaatttcataatacttaaatttaaaagtaaacatgcatgtaagccatgattaaatagctttcttttgtaataaaaaaatagcattctttattttattaaaaaaaatattattttttttatttttacaaaatgtcaaaaaagtatttcgtaaaaaagaataaattcagatcatttaataaataatgaattaaaatttctatattgataatgtcataatcgaaattgtgatgaaatgacgaaccaaaaaaacttaaaataaaaagtagaatcactaccaaaaaatttatttattctgaaaatatggaagaatctaataaaaatgtcttcgaaac

SEQ ID NO: 102033 - DNA, 837 bp, Glycine max
  unsure (1)..(837): unsure at all n locations
  Clone ID: PAT_MRT3847_63152C.1
atggacaacatatttcctctttacagtctctttggatactagtcttgcatatgatcatttactctgcaaatatatacctatggaggcgttataaaatcaacttcccctttatatttggcttcaaggaaggaacagaattgggatacagagaagtctttcttcttagctcaggcctcgcagtactctcattggctgctgtcctctcaaacttggatatggagatggaccagagaacaaaaagtttttcagcattgacagaattagtccctttatgccttgtcattgttctgctgctcataacattttgtcccttcaacatcatatataaatccagccgcttcttccttattcagtgtgcatttcattgtgtttgtgctcctctttacaaggtcaatttcccagaaaatttcttggcagaccagcttaccagccaggtgcaggcctttagaagtttggaattctatgtttgctactatttctggggaaacttcaagaccagatcaaacaactgcctcaaaagtgatgtctacaaagcattttacttaattgtagctattattccattctggatccgttgtctccagtgctttcgacgtttgcttgaagaaagaaatacaatgcatgggctcaatgggctaaaatacatctcaacagtagtagcacttgtcttgaggactactaatgagttccatagaggaatggtttgggaaatttctagctgcaacttcttcaagcattgcaacgattgttaatacatattgggataccgtcctagattggggtttcccgagaaaggaattcaagaaacccggnttagannaaaaccccngaacnnac

SEQ ID NO: 102034 - DNA, 443 bp, Glycine max
  Clone ID: PAT_MRT3847_63153C.1
acggctgcgagaagacgacagaaggggacactaaaaacttttcaagacaagatatcgttagtttacttgttggttctaactcctctctccctctacattaacttacattctatgtatgcgctggcttgcttctctggtactcaaacatgtgtgcttttttctccagcacttgcaggttagttggaagcagattgggagcatttaagaaatcagaatgaaagttgcgttacaaagtaccaaagctcgaagcttttgcatggtctaggttgcctcgctcgtggcccctctattaaccgtgcttttggtgggggatgtactaattcacaaggaaggtaggattgatgcttggcattgaaaagatgttctttttccagaggaacagaacagtggataccttttggaagctgttggaatctggtggaatgaagaacccttttttttaa

SEQ ID NO: 102035 - DNA, 319 bp, Glycine max
  Clone ID: PAT_MRT3847_63154C.1
aatacgactacactatagcggaaagctggcgcgcccgtaagtcatcggatcctgtatagcgggcgcgctccacgctttcggtgaaacactaactagggtattgggagctttagttgttcatgagttagggaccttacgcagacgtaggccactgctacgaagacctgcattttataatcatccgttagatacacagtctgaaggttcccttcttgagatcaccaccatgcttgccgaaattgccatgctttccatgcttgccaaactagccatgctttccatgcttgaagtaaccacgcttttcatgctgcttgaattt

SEQ ID NO: 102036 - DNA, 1758 bp, Glycine max
  Clone ID: PAT_MRT3847_63155C.1
gaaatttatttggaaataattcggcagtgagaagacgacagaagggggatcaggagaagaattaagcactcggttgcagaacagaacaaacttctttcactctttcgcttctgaatcttcaacaatggtgctcgaggcgacgatgatctgtatcgacaattctgaatggatgcgtaacggagattactctccttctcgatttcaagctcaagcagacgctgtcaatctcatatgcggtgctaaaacgcagtctaatccggaaaatacagtgggagttctcacaatggctgggaaaggcgttcgtgttttggttacccctaccagtgatctgggcaagatcttagcctgcatgcatggactagatataggtggtgagatgaacctagctgctggcaattcaggttgcacaattggctcttaagcatcggcaaaataaaaaacaacagcagaggattaattgtctttgctggaagtcctgtcaagcatgaaaagaagatgttggagatgatagggagaacagttgaaaaagaatagtgttgcacttgatattgttaattttggtgaagaagatgaggggaagacagagaaggctggaagcactccttgcagctgttaacaataatgataccagccacattgttcatgttccatctggtccaaatgctctttctgatgtacttataagtacgcctatttttactggtgatggggaaggtggaagtggttttgctgctgctgccgctaccgctgcagctggtggtgtatccggatttgagtttggcgtggatccaaacttggatccagaattggctcttgctctaagagtttcaatggaagaggagagagccaggcaggaagcagctgcaaaaaaggctgcagaggatgctgccaaacaagagaagggaggtgagcagcaagcaagctcacaagatgcaacaatgactgagcgtgccggtgcagcaacatctgaagctgagaataagacaagtgatttgatggatgatgagaatgccttactacagcgtaaacgatccagatatgtcagatgctcctgcaattgaccatgagttaaaagatacactatatgtctgaagcatctgcaagtgatccctgacttggctctggcacttcaaatgtcaataacagatagtgcaaaggatcaatcaagccagtcggctcggggcaaattgttagctgatcaatcctttgtatcttctatccttgcatcgcttcctggggttgacccaaatgacccttctgtcaaggatttgctggcgtccatgcaaaatcagtctgagcctcaacagaagaatgacgacaagccatcaaacgaggaggagaagaagtaatctttaagagccacttttccctgtatgatttttattttgttggtagcattcttcgcggctgttgctaatcggggaactattccaatatgtctctctgcagtttaattggaacccaatgcatgtctctcgattgaatattggatgatttttaacttaaaaaatgctcttgattgtcatgccttattcttggttagtgcttatcatctgacgagggcttttaaatgactgttttaatacctaagaaagtttcaactattaaaatgtatttcaatctcatctccatattttggtgagaatatgtttgtttattaattccggatcattgagtagagcccatttcaaaagccaattgtttatgtttatcaccaagggaaaacatggttttatggttaagaaaaatccatccttt

SEQ ID NO: 102037 - DNA, 640 bp, Glycine max
  Clone ID: PAT_MRT3847_63156C.1
ccacgcgtccggtttagtctttggggtggtggctttctctatggttggggggttatcgaaggttctggtggataagttattgatctttcctctggaattgctggtttcactgctgcttactggggttactatggatggggtggtcagggttcaatggtggagcaccatatgcagccaacattgactcttccattgctgtgctcaacactaacatttgtgctgccactagcctccttgtatggacttctcttgatgtaatcttcttcggcaagccttcggtgattggtgctgttcagggcatgatgactggactcgtttgcatcaccccaggagcagggcttgtgcaatcttgggcggctatagtgatggggaattctatcagggagcattccatgggtgaccatgatgatcctccacaagaagtcaagccttctacagaaggtagatgataccttaggagtgttccacacacacgctgtggctggcctattgggtggcctcctcacaggtctcttagcagaacctcagctttgtaggcttatattgccagtgaccaactcaaggggtggccttctatggtggcagtggtggcattcaactttttaagcaattagtggcagcatggtttaatagctggatg

SEQ ID NO: 102038 - DNA, 233 bp, Glycine max
  Clone ID: PAT_MRT3847_63157C.1
ggaaaggagaagcgcaagcttcctattcatacgggagtcaagccataacatgctgtgggcgctcttatcagggctactcggcaaagcttcataaagaaacaggaaatccgctactttctccaacggtttaattgtgcaacccaaccctttgatgtcccagtttaataatttgtctactgagtgtgagagatttctacactgcatccaatatttgtcagtgcgtcaaatataaa

SEQ ID NO: 102039 - DNA, 437 bp, Glycine max
  Clone ID: PAT_MRT3847_63158C.1
cttcgctagataccgtgtcttttgtactcattattgggtctgcaaacaaagacaaggagagagagaaagaattgatggaatagaaaaaggaaataaaagaatgaattggagaccacacactccaccgttctcatctaaaacttgcctctcactggttctctccatggaatagaaaaaatataaacgatacatccaaaggaagagagatagagaaaaaaaaacttgataagtgatttaataggaaagaaagagagaaagaagacattgaggagaaaatgatatggaagaaaaaataaataatgtttataagagttgaacgaaacaacaaggacaagtagttagtgtggagtgtacacttcaacttgttctaaaataaataaaattattttgttaattttgtttacacaatatgttaattattttctcaaatttttttt

SEQ ID NO: 102040 - DNA, 623 bp, Glycine max
  Clone ID: PAT_MRT3847_63159C.1
cttcctttgcaccttgactgctaaccccactcgaaccttagccttgttcttctttgttcttcctttgcacgtagcttgaccaacccaacttgaacctagccgcttcacgtgcttcttttaacaccaaccccaattgaagttctcagcaacattttcatcttctttcacggctcgaagctcgtgactcggacccgacgaaagagtgaagaagtatattgactcgaactagctcgaacttcacgactcgaagatcacttttgccaaaatcagggaagatgcaggtgacaaattagttgttgctgaacaacagctactggactgcaaacggatcagtgccaatttcttcatttgaaatattagcacgattgaggatatcgtctgatggatcaaacttctgtaaacataggacttcatcgagaaaattttgtgatatttaatgtaaatttcttgttaagattttccaaagaataatgggcagagacccaactacataattcatgaggtttatcaaggtttgttgctgtagtatttgtgttagcaacagtttcagctaaatatacccgactctttaaaactgatcgaattacgtatttgttagtctgaaattattgttattcttaaaa

SEQ ID NO: 102041 - DNA, 622 bp, Glycine max
  Clone ID: PAT_MRT3847_6315C.1
tgaaaacgttacttccttgattgagtttttccaatccaggggcatggctgtccttgacttggttgttctctcaggggctcatacaattggaaggacttcatgtgggtccattcaatacaggctctacaactaccaaggaacaggcaaaccagatccaaccctagatcctaagtatgttaacttcttgcaaaggaagtgtagatgggcctcagagtatgtggatcttgatgctacaacaccaaagacctttgacaatgtttactacattaatctcgaaaagaaaatggggttgttatctactgatcagttgttatactctgatgcaaggacttctccccttgtttctgcattggctgcctcgcactcagtttttgagcaccagtttgctgtgtcaatgggaaagcttggcattgttgatgttctcactggcctggaggaaggagaaatcaggaccaactgcaattttgtcaatgattattgatttactctatgttttgctttgaaagattttttttttttaattagtacttggaaaatgttaccacctaatttcttctttcgtgcatcctaatacttttgaaatcgttacatcaattaatctgcacttttggttatgttttcc

SEQ ID NO: 102042 - DNA, 297 bp, Glycine max
  Clone ID: PAT_MRT3847_63160C.1
ttttcttaagttcaatttattttcgtttcacacacacacaaaattctattacagaatcattacatcacatatatttaaataaaataattatatgttaacaatagaatataatggtagtacttatcttccatatttgattagttttatgtcgaaatcttttttgctgcttcctttatcatctcaagagaattctccaaacacgacttgtataattgcttgtcgataaagtacttttctagttactagggcattcttaggccacctatgaaacctataactggcaggtggcaaccttgg

SEQ ID NO: 102043 - DNA, 349 bp, Glycine max
  Clone ID: PAT_MRT3847_63161C.1
ttggcttggaacctttgggctgatttttgtgcttgcatggttgagaagatgatagacggggacggcggctacgaccctcatcatagagtccgcgctactcgtttaacgttccaagtaaccttaaaatcgtccacgccccgctctctcgcccagggtcggcctcgatctgactaagtccccgatcttccaaaaaagaaaaaaaaaaacacggagggcgatatacctctcggctccggtaatggcatttagaccgacagtaagactccgtagatacccaagaaaagtcccgcctaagcttagaatactccggactagaattgggcatctactaacgagacaaattagaact

SEQ ID NO: 102044 - DNA, 291 bp, Glycine max
  Clone ID: PAT_MRT3847_63162C.1
ggtgcagagtttgttgagcataatagccattttcttctgattcttccaaatctatggttagggattccatttcccaacttcctcgttctctcccgaatcgttttcccttttctttttcctcctgaaaaattttccctcaatttttctctctcttgcagattactataagcactcttcctcgatatacccttttccgagatatacattgttttattttcccgggaaaatactcctcacaattttctggtccaacctattcgtcctttatatcaatccatcatcgatttgttg

SEQ ID NO: 102045 - DNA, 437 bp, Glycine max
  Clone ID: PAT_MRT3847_63163C.1
cttaaatcgggaattgtggacacattacgacctatcttgcgtggtctgtcctctttttaaatttttcatcaacaaacccgaaattttcatttgaccccgttcatacatgagctcaagtagtgtcattctcaaaaggatctgttggtaaagtggaaaaaattgaaagaaaattaaataagataatatatatatatatatatatatatatatatatatataaatatgaacaccacgttattttactgtttattcctctattttttaccttctttttctaaagagagcggatttctgcacacacacagaaaggaaagcctacactttccacaggtcgaataatgttgcaacttcttctgccaccgccatcacattcgatcactggactcccataaatgttagctccgtatgtgtgacttgctcactctacacacacataa

SEQ ID NO: 102046 - DNA, 322 bp, Glycine max
  Clone ID: PAT_MRT3847_63164C.1
tcacttgcctcacgaagagaacgtttacatcgataaactcgccgtgcaagccgagtgctacgaatagatggtggagtgactggagagggtctctttcggcgccgacaacaacgaacttacctaggaggagatgaacctcttcttaccagcctgctggaacgtgatccgagcgcgccgcgcctggtggctcatcatctcttcgatcgagcaaaaggaggaaagcctgagccaccacgatcacgtctccggcatgctgcactaccgggtcatgatcgtgtccgagctctgcaacatatgcgacgtggtcctcaagctcctcgat

SEQ ID NO: 102047 - DNA, 663 bp, Glycine max
  unsure (1)..(663): unsure at all n locations
  Clone ID: PAT_MRT3847_63165C.1
ccacgcgtccgtagatggagcataattcatttggatttccaattttttttaaaaattagaatgtaccaacatgcatgtatggtatttattgacttttataataaatattttaagtcatacttatgattattttttattaattgattatttaaaaaagaattaacttttcgaattttggatacaagaattcaaatttaataggtaattttagtattcaaggaattttctttcaaaatcttataatgtaataactaaaattgtcattgataatgatgatcacataaaagaaatacataacccaatatcattgtaattacatgcatcattaaccaatgagacggtaaagcatgtactaatattacgaatttatgtgttttggttaaaagaccgaaagtagcaaagtcttgggtaaaaactacatttgatgtgatatatataaaaaatgcaaatagtccatgaaagaaatattaattattcatataaaccgctaaatggtaaatggtccgaaaatatttaacgagcaactagcaattccgttatacttaaaaaagttttttttagaggcttanaaaagttattatcatgtcttttttggacaaatcatataattttatgatttcataataatcagggtatgaatcacaacgtatagaaaataaactc

SEQ ID NO: 102048 - DNA, 512 bp, Glycine max
  Clone ID: PAT_MRT3847_63166C.1
ggggctgaaccaaacttacacattaatgcgactaatgagaacggtacatgttaactgaatcacaacagagttaacacgtacccgataattacttaacgggtcaaactgaatgttgcacaacctcaaactataattgaccgagccacttcaccctactaaaaatcagtaccagctactttctaaccggtttacacatcttttatgtgttgtgtctgagggaaaacacttgaacatgtacgatcttcatcaagtgcagggcctacctagctgcttttgaatgtggccgaaaaagacgctgcaaagagcgctagcgcatggggatattgatgaacatacacctgttagctgaggctagaggtgttgatggtactcaatccttagtggtgctttaaagaccataggtaacagtactatcaactgttgaattgacgccattgccaggactgaactctgatgggtaaaaataaggttaagcgttgcataagactgcttcactcttgattgaaagtgca

SEQ ID NO: 102049 - DNA, 278 bp, Glycine max
  Clone ID: PAT_MRT3847_63167C.1
aaactgcatactgtgaataatccaacctgggaaggcatattgacccacaatatgtcaaaactacaaagtctttactgtggaccaatcatatcttacatgatgaatgtaaaagtacaggccctataccttaaggtgaacgatgaactgttgctggtccagcatataatggatcgctaggtgcaacagatttatagacagacggatcgatctcaagacatcttaccattctcagctgtagaagtcatctcaacatattgttccttgttaggataactcat

SEQ ID NO: 102050 - DNA, 417 bp, Glycine max
  Clone ID: PAT_MRT3847_63168C.1
ttttggtttggttttttttttttttttttgggacaagaaaaggaaatattcttaggggagccatgacgagaaaaaactctcatagaaaggacaattacatattgggccattaacccccagtgcgtacactaaactcataaaacaggggtccctcccattagagaggagggaagcatacttaccacaaatgaaatatcaaccttttcatccaagagataatagctacaagaacaaaactaaaaggttccaccataaaaaagcaaaaagtagatgtgactggcttttacaccggctgcctaagcaggaacctggcctatggtatacccggggacagcataccaaacgattttgagcccagcgaacaaagagttgtctaagaaaatgactgggtccccggtcttgccagtagcaatgccc

SEQ ID NO: 102051 - DNA, 312 bp, Glycine max
  Clone ID: PAT_MRT3847_63169C.1
tgagaaggcagctgaatctgccgtggctgctatgcttgctgcctgtacatactttgcccttatgcttacatctgttctttcctctatggttgcagaggatgctgcctccatgaatggtagcttaaactctactggctctacttcatggacacctgctatccgtccatagaacatgaccgtacttggaaaacacatgcacgcttctgtggttaacaccactgatatggtgagctcttctttgctgagcactttacatcagccatcaggagtatacgtgccactggcacactcactcagattgcaacccatacc

SEQ ID NO: 102052 - DNA, 242 bp, Glycine max
  Clone ID: PAT_MRT3847_6316C.1
atgcgtttgcgcacgcgcacgcggaaaaccaggggtacggtgactgggactcaagcgcttgggtaggtgctttagagtaccacgagcacgagcgattgaagggaaggaaataaccctgctgtggataaagggaaggtacgaaagactggtgtggccatgcatgaagatacgctccacattgattgttgtgatataggtctcgaaaagacagagagactattgtgtgttgtctctcaaggagt

SEQ ID NO: 102053 - DNA, 176 bp, Glycine max
  Clone ID: PAT_MRT3847_63170C.1
atcgaaccgctcgagtcgcacgagtcgaaagagccgctcgaatcgcagagtctccggcgaaacgaaccacactcaccatgtcatcaacagcaatacggggagatccagacagacgaagggcgtacaagaacatcaacaacatatgcctacatggtgctccactacctatgttacga

SEQ ID NO: 102054 - DNA, 627 bp, Glycine max
  Clone ID: PAT_MRT3847_63171C.1
aattcggctcgagctcgagccggctcggcatcgactcttaattgaacaatggcagataactcaattagcttattttctccatacaacaagatgggcaaattcaacctctctcatagggtggtattggctcccatgaccagatgcagagccctcaatgggactccactggcagcacatgctgaatactacgctcagagatcaacaccgggtggatttctcatcactgaaggcaccttgatctctccaacttcttctggatttcctcatgttcccggaatatactcagatgaacaggtagaggcatggagaaatgtagtggacgccgtgcatgccaacggcagctttatcttctgtcaactctggcatgttggccgtgcatcacatccagtgtatcagcctggtggggctccacccatttcgtccaccagcaaacccatatcagacaagtggaaaattctgatgcccgatggctcccatggcatctacccagagcctcatgctcttaccacctctgagatatctgaaatagtgcaccattatcgccaagcagctattaatgcaattcgagcaggttttgatggaatcgagattcatggagcacatgggtatctcatgatcaattcttgg

SEQ ID NO: 102055 - DNA, 1151 bp, Glycine max
  Clone ID: PAT_MRT3847_63172C.1
acccgcgaccgtaggggaggcagagggtaggcaactgtgaccaagagagaatcgcgctttagctaatgcaataggctgccgcccactgttcagtgctactttacatgattttgttgaagatctagctcgagatcttatgcatgatgctgatcgcgtaattgttggcagaaacaacattgcttctgaaacaaaaaagttaaaattgatttttactcgaagtggagaaggaaaacttccagaaatacgtcaatgctttggattgggtcttaatcctgaactattggtttttctccaaagcaaggagcgtgccaaggagctgtacagtgaacttgcatttgacaaaagtagaattgatgttatccattctgatttgtctcaagcagagcgagaaaatgctgttgataacttcagagctggaaaaacatgggttttgattgctactgatgtagttgcccgtggcatggatttcaaaggtgtgaactgtgtgatcaattatgatttccccgattctgctgctgcttatgtccacagaattggtcgttctggcagagcagggaggactggagaagcaattactttttacacagaagatgacattcctttccttcggaatgttgctaatcttatggcagcatcgggctgtgaggttccttcctatctcatggagttgcgcaaaaagaagtggaagaagcacaggccaaaaagagattcaatctcaacaaaaccagacctatagcgctgtaacagcatagaatggcaacatgcttttaaccttgaaatttccagtagtgtttatttcttaaaataggccaggcagcctagtggcaagattttgttgttgcccattcccaaatgcaccccgatgaaaagggaagggagagggtaggcaattgtgaccaagagagaatcgcgttttagctaatgcaataggctgctggcagtgttgcctaaattttaaccatgattgtctgtcatatactcctcagccctcactgtaagccccctaaagtgattccgcttgcgaggcgggctctcttccccctctaatacgctcactgttcagtgctactttacctgattttgttgaagatcgagctcgagaacttatgcatgatgctgttcgtgtaattggtggcagaaaagatatggct

SEQ ID NO: 102056 - DNA, 553 bp, Glycine max
  Clone ID: PAT_MRT3847_63173C.1
acgagggctgatgttgacaaaagtggtactattgactatcaagaattcatcactgccaccattaaccggcataaactagagaaggaagagaatttgtttaaggcttttcaatactttgacaaggatagcagtggatatataacaagagatgagcttagacaagctttgactgagtatcaaatgggagagcgtgcgactatagatgaagtcatcgacgatgttgacactgataacgacgggaaaattaattaccaggagtttgtggctatgatgagaaaggggatcctggatattgatgagaaagagaaaccacaataattgtgtgatgtgacatgaagacaaaagtggtttctggatttttcttgctgatttctgctggggatgaattatcactcttgaatttgtcaacttgcatgtgtgtgcttaattcatgtaaaattttatggcattcaaaatgcctaactttgtatagctgttttaaataaactgcgatatgtgaacaataaataaaactatcatcattccaagacattcttacgttacaaaaaaaaaa

SEQ ID NO: 102057 - DNA, 512 bp, Glycine max
  Clone ID: PAT_MRT3847_63174C.1
acggctgcgagaagacgacagaagggacccctgatcacattgttgataaagttaataggatgggaattcctttgtccatagtgtgggtgatcatgcttctagtggttggtttggttcatggggttaacttgttcttgtgggtaaagaagtttgtaaagaagtggaagcagaagctgctgcatggctaaaagtcattgctcttgtgggtaaagaagtttgtaaagaagtggaagcagaagctgctgcatggctaaaagtcattgctcgcgagttagtccagtgaatgagaattacagttacccctttgaagtttgcaatataaaataataattcttgcatatccagttgttagttagagaaataggattgtgacaacaactaagataaaattattgtgattggatataatcatcacatggaatctaaaaaaattatgtgttaaaataatttcaactgcagcgagcagtttgtatgtaattaagcatgcttattattcaaccgctgctgtcagc

SEQ ID NO: 102058 - DNA, 769 bp, Glycine max
  unsure (1)..(769): unsure at all n locations
  Clone ID: PAT_MRT3847_63175C.1
gaaatactataattttcttttcccctgtctttgcaaagcttatggttcccgaaacggttacataattataccataacacagaaacataggcatcctacgactcctttctgtctcacacacaacataagctcgcttctgtaattttagcttttgcgaacttcgaagggaaacagcatggactatccgagtccaagtacaagttgaatcctttatcaattttgattggactggttgtgattctggacacagaaagtgggtttcttttcaaatttgaattcaaggtgtcaacctagtggtttgtgctgagaattgtttgaaaatattgaagaagctgctcaaacttttttcctttcattcatggacaagttatgctgttttaaggattcatactctcagcttgtagcagcacgttcttcgtccagcactggtaaggggaaaaatcatgaaggctcaataaagtatggtttcagccttgtaaaagggaaagctaatcacccaatggaggattatcatgttgccaagtttgcgcagatacaggataatgaattgggtttatttgcaatttatgatggtcacgtgggtgaccgtgtgcctgcctacttacagaaacatttgtttaccaacattntgagggaggaggaattttgggaggaccccactctttctatctcgaaagcatatgagagcacagatcaggaaattctatcacatagntctgatcttgggcgtggtggatcaacggcaggaactgctatattgatcaatgggc

SEQ ID NO: 102059 - DNA, 394 bp, Glycine max
  Clone ID: PAT_MRT3847_63176C.1
tcgagaagacgacagaaggggttcattgtttgaaactttgaagtttttgtactagttgtagagtggaagtgcgactcatttttgttttatgttacttttttttggcacggtttgaactttgagttcctggtgaggagacccaccttcattcttcattttatcatttagcatgtaactatcgcctcctatgaaaaggcaggtgagaaaaaaaaatgtttttttgatttaaaaatacttttattctttatttttattagtagctacaaaagaccattttaattttactttatttctcatttttagggattttatataatgtttttactaatttgacacgattatttaaaataatattaaaaagaacatgaagtgatattttataattattaatata

SEQ ID NO: 102060 - DNA, 499 bp, Glycine max
  Clone ID: PAT_MRT3847_63177C.1
ctcaagccgcagaactacatacacagcacgatccacataagcactcaccagagaaaatggctagtgcctattctgcatagttcacgtgctgctgaacacctatacagcagatactactttccctcgaaaaggatctttcattcacctacaagcgcctctctctgccaactgtggaacttctttgtggactgacgtatcaatgactccagcagaaaacactttctgccaggggcttagcgaatagggagtagtctctgccgagaccccagatgtcaccaatagtgatgccactatgtcgactattggcagcgctctatgacacttttaagatagtaggtgtcgactcatgatactaggatgctgggcaagagacatgatcctgtgatatgttcttatacataacctgtagtcaggctatactttactttgattatttgaagcatatcataatgcttcccttcgattacataaggatggctatgttccatactattctgcg

SEQ ID NO: 102061 - DNA, 426 bp, Glycine max
  unsure (1)..(426): unsure at all n locations
  Clone ID: PAT_MRT3847_63178C.1
actctagatcctnaaatgcggggagcatgagtgcctcttcttcaattgattgtccttttctattcactccccactccataaagtttccctctgcgggttgtcttcataaacgttgaatttcttttacaccgaatcatttttttcatgcccgtcatattccttattatgcggttcattttctattcttctacaaatcaaactactaactcacattacaccacactataattatttcttatgtattttatccacattacttatactaactccttatatgacagttcctagtctagattattagtgattgttgaattaatattctataattcctattggttcatacaatttcaatattttgctcctttcaatattttcatctacctaatttttaaaaaatattttcactgttctctacattatagtttt

SEQ ID NO: 102062 - DNA, 404 bp, Glycine max
  Clone ID: PAT_MRT3847_63179C.1
ggacgcgtggggaatgggcggtgggttttttattacattgcgacctcatttgtgacactggatggactgcctccccaatgcaggatgtggaagcaccaagtcagtgctttgtttactgtcaggattgggttcggatgccctggtgggttacttatccagcttgtgggcaagccgacagtgcactggtgacagagcatgtcgttaaaggaaagcgcccctctgttggacaatatctttcagtgaatcatgaagcgaagtgcttcttcgaaccacttatgggtgcgtattaaccaaaccgcttgaacaatgatgcagtcataagagattgcttcatatataacataccagttgttctgaatgaagtggattcccaatctttcgagagggcagcggctggagtgaaa

SEQ ID NO: 102063 - DNA, 142 bp, Glycine max
  unsure (1)..(142): unsure at all n locations
  Clone ID: PAT_MRT3847_6317C.1
ctcgagcccttaaactctggtganagcagttggngcctaacttttcatcntgggaggttgggtttgtngcnctggtggcgtaaggntgacatagggaagttggnatctaagttagtanacaaggtttntgctccggaggaag

SEQ ID NO: 102064 - DNA, 721 bp, Glycine max
  Clone ID: PAT_MRT3847_63180C.1
caaattttatttttataacatatttttgaagggtaatcaaacatgacttcaaacctattttaccgtcaaacatttgaaacactcccaccaaaaatcccaacataccctccttctgggcttaggcttacatttacaaacagtatttgtagacaagaactatatatttagaaacagataccagaatttcatgcaccgtggttatttcagtgacacttggctgaattcatgatatgctttggttgctactttttgatttaatttcgtatgattatttttctctctctttaaattaacattttaactgtactgactattgtttatggtgtttgcttattatattctgccaaaaaaatggtaacagttgtcttcactctaattatgagtaagaaagagatacgcaataatgtattgggtgtccaaacgttgtaacctgccttttctgacctttacagcatttattcctctttaactacatactatgtttctttctgttgagttggatctatatctattaactcaataaagctgaaataaacttgattgttggtgttgcaattagttgattatacagtgttaatgtctctgtgtattgtgattgagttcccagattatgttacagcatttattcctctttaactacatactaaggaattgaaatgactactttgtctttatgaattactgatcaatgaaggaagtgtttgggaacaagaatttgttt

SEQ ID NO: 102065 - DNA, 335 bp, Glycine max
  Clone ID: PAT_MRT3847_63181C.1
cgaccacgcgtgctacggatacaacaaaaaacagtttgggattttgcttctccttgaaaagcagcgatttttgttgaatttaaatgtgcacagggatcttctaatatataagagcagctaatttgctgataaactttctgaacaatctagtttgtcatgtctccaagttgatgactgagaggatgttgaaatatatgttgagactgttgggcttatttactgcaaagaaatgaaacatcatctaatgaaacaaagtgtttctcacattcttctaatactcaatgtaatagaattccttggcttcaactaatgtattcaatcatgtatggagtact

SEQ ID NO: 102066 - DNA, 257 bp, Glycine max
  Clone ID: PAT_MRT3847_63182C.1
ggggcccaccacctcttttatcaatctttgaaggaaagggttttcaaaaaattcaaataacaacctcgttacaacatgtttgctcttaaatctttatataacatgggtacaaattacaacttactttatcttaaaaaattagaaaccacatacaaagggattgcaatttttaaaaaatgaataacgagttacattcaaattttgtgaaagcaaattgttctacaaaacttggggggggtggactgtgtatttattga

SEQ ID NO: 102067 - DNA, 225 bp, Glycine max
  Clone ID: PAT_MRT3847_63183C.1
ctagctactagcatcttcttgcatcagcacattcatgttaatgaggattctctaggggtggtttccaatcaatatcccgtaattttgtctccagtgctttccggttcaatcaccaatgcatgagtgaatttgttaatttcgtaatccaataacagcatgatgacacatgacacatcctccgtttccggcgggggaatcgtgtgtgtgaacggtgccggcgggttc

SEQ ID NO: 102068 - DNA, 297 bp, Glycine max
  Clone ID: PAT_MRT3847_63184C.1
acactttacacattgtatctattatactatctagaggtattgcggaatctgatagaactttctaataatggtgaatgacgttgagcaggtcacagggcaaggtgaatactccctgagggactaccatgaccctcctcctagcaccgcagacgacccttactgagctcacaaggtggtccttgtgcacagacaccatatctgagttcatagccacactcctttgtctttacatgatcgtgttgaccattattggcttcaagaggctgggtgactccaaagtccttgggaacaccaaat

SEQ ID NO: 102069 - DNA, 181 bp, Glycine max
  Clone ID: PAT_MRT3847_63185C.1
cttcagaacagtagggcgaaaatcattactcgaatagagctttgtcttgcgggattcacaagattatgttccgaattgcatcagccctgataatggcatttggcgaataactgagtgtggttggaatcttatctccgtatagagacagaaccaggaaaatgctcagtggatggtgtgtgac

SEQ ID NO: 102070 - DNA, 849 bp, Glycine max
  Clone ID: PAT_MRT3847_63186C.1
atcttgcttgatgataaatggacgccaaagattgcagattttgggatggctcgtcttttcccggaagatcaaagccaggtccatacacgtgtggctggaaccaatgggtatatggctccggaatacgtgatgcatggaaatctttcggtgaaggcagatgtatttagctatggagttttggtattggagttgatcaccggccaacgaaactcttcttttaatttggacgtggatgcgcaaaatctgcttgattgggcatacaagatgtacaagaaagggaagagcttagaaattgtggattctgcattagcatctacgatagtagccgaagaagtagcaatgtgcgttcagctgggtctgttatgcactcaaggcgatcctcagctacgtcccacgatgaggcgcgtggttgtgatgctgtcgaggaagccagggaacatgcaagaacctacgagaccaggagtaccaggttcaagatacagaagacctcggagacactctgcattgtcttccacagtgggtacctctggtgcctctgattcacacacttctgattctagtaataattataataccacggttactactagtgccacggggactatctcagctactgcagaaacagacccaaaagggaaacgtccaattcgggagggttagttagcttagtctagcttcactatattgctgttattctttttgcaatgtaagtatgtgtggtgttgaactaagtagaatgtaaatagatcgaggctataggaatggcgatcgaggcttaagtgaattcttattctttaattaatgttacaagtgagaaattatgtaatctctcattttccatggtttaca

SEQ ID NO: 102071 - DNA, 750 bp, Glycine max
  Clone ID: PAT_MRT3847_63187C.1
aggtaagaacaatttttataaattcaaagaagaaactaacatactaacattcaaaactcaaagtccttttagaaacaattttatactaaatgattttaaacttatacattagaaaacctcacatgaaaagtgaatgacaaaatcaaacggtttacccaaaaaggaaccacttttgtatctctaatttttcaaaggcatggaatccacacacacaaatagaaaattacaaaaaaatcaaatattagtttttttgggaggcaaatcaaataataatttggtagaaaaaaagaaaaaaaaatgagaaagaagaaaaactctcttggcctaagatatttctgttatttacaaaagtctagtgaaacaaaaaagaaacacaaaaagtacaacatcactcgttagtagaaatgattcaacacaaaaccctcatttgttgtcaaacgaaacctgcaccgcaaaaaaaagatggagttgtcattaccatcagtgagggagccggaagaaggagatgagcgagttggagctgactcaggcgttgggcttggtggtgtactggtgtcggtttccgggggtttgttgatggagaatttgatggaagtaagaacaaaacgtttcaacagagaaaaaagataaaaaatttgaaattcaaaaagctgtaaaaaaaagaagattgacggttgcttttattttatttctgtgctcgaaggagtcctggcccgctctctctctcgctctcgctctcgctctctccct

SEQ ID NO: 102072 - DNA, 199 bp, Glycine max
  unsure (1)..(199): unsure at all n locations
  Clone ID: PAT_MRT3847_63188C.1
gggggggctcgaggcttctccnnttccctttccgtttgtgttcccgccccggcgatcatcttggcatagatgctttgaagggatggaggcgattcagctctcctagaaactgatgaatgcccgactagaagctgggtataaatttaatgaggaaaagttgctggagtataatcatatgaggtatgtagggtctgcctgt

SEQ ID NO: 102073 - DNA, 578 bp, Glycine max
  Clone ID: PAT_MRT3847_63189C.1
accacgcgggcatcataacataaataaatccttgtgttgtggtcatagtcctcaattcaacttttcagctatatctcttgaaagaagaagaagaagaagaagaagaaggagaaatgggatccaacggaacatcttgggctgaccagtgggataacgggcctgacccagtgactgtctccaacgaatcgaagaaaaagaataacgccctcggcaagaccaaggcagtggcttccactggcgtcaagaagttgaaggagggtacctccgttggcttccaatggatcaagaccaagtaccacaaaactacccagaaacattaaactaacctatctttggttccttcttgtacatatttataatatctatagtctccccttttgattattatgtgtgttttttcaattcatttattgttcaggtgttatataggtttactttgtactattgagtattgatggatatagtcttttttaatgttttatgttcgatggattaggttgtatacatttttatgcatagagaataatggatcttaattttattctttttatggatcttttattcttttaaaaaaaaaa

SEQ ID NO: 102074 - DNA, 413 bp, Glycine max
  Clone ID: PAT_MRT3847_6318C.1
tttaacacaaaaaatgaccttttagagtagggagaaaatcaaatccttggttattacgaccacaatattattttttaaatttgggggagatccatacctatgatagtactaaaaactaacaaattctaaaaaggcgaaatacttttttgctgatcagaacgccagaaacaagaactttggtatgcatacgcacttgtttctaacgtgaacataatatacacattgatggaaaatcataattctttttggtgacgaaatacttgctcctgtaaaggaacggtaatgacccggccgattcacgatgtatatcaatcgcatgaagccactatgggtacccaattaatgtggcatttcaccctgctttttgctaccgcttaatacacctgtttggccaatctcgttacgggggtaac

SEQ ID NO: 102075 - DNA, 436 bp, Glycine max
  Clone ID: PAT_MRT3847_63190C.1
acgagatcccaaatcaaatgttgtgtcacagaagcctccttaaaaatatgatacttaagatccaaccaaatgccattcgtgaagaattgttgcctcttaatcaaagccattaaaactaatcatcataaactgatctagggacctagggatgatacatccatcattcaccagaatttctgaataggaatttccataaagaaacagtagctgagctgtttaaagaacaagtatggagctgattgtgaggaaataacacataatatacatctgggaaagaaagatctatggcggctatcaacatgcaacgagttgctagaattaactctattaagaagcaatgcagtccaaatagtagactgtacctgtgagggagctttggacctttgaaggagtatatcaagaaggaaaggtgttcaaagaattagtgagattggag

SEQ ID NO: 102076 - DNA, 572 bp, Glycine max
  Clone ID: PAT_MRT3847_63191C.1
cacgcgtcccctctctacttttctcaatcaacactgtttgtttgtgtcaaacaccataaaccattgtatcttttttctttgttctttgtctaggtcttggcactgaacattattttccatcaaaaataaaaattcagagcagaataacaacaattcaggaaaacaaaaaaactcagccacataatttccttcaactcatggcttgtactgagcatggccatggctctgtgatgttgggtttggtgttgttgagtttatctgcttcacaaagttgttgttatggtttgagcacatttgggtttgacatacaccacaggttctcggatccggttaaggggatgcttggcattgatgatgttcctcaaaagggaactcctcaatactatgctgttatggcccacagagatcgcatattccggggccggagactcgccggcgctgatcaccactcgcctctcaccttcgccggcggcaatgacactcaccggattgcctccctttggattttgcaattttgccaatggtttcggttgggacaccaaccttatggttttttggtagcggtggataca

SEQ ID NO: 102077 - DNA, 253 bp, Glycine max
  unsure (1)..(253): unsure at all n locations
  Clone ID: PAT_MRT3847_63192C.1
tatttcaattaataaacttttgttcattttatctcatcataatcttcagggagattttttataaaatgccggtcggaaacatcntcctcttaattccttaataatctactcacccctacacgtttaattctacttcttcttttttcattctcaaccttcatcttctttttctcctgctcaatctccctcatctcctactacaatgctacctacaacttctcttccaccccatctctaccatattcttctcctt

SEQ ID NO: 102078 - DNA, 235 bp, Glycine max
  Clone ID: PAT_MRT3847_63193C.1
ctccagccctcttttttaatattaaaataatattttttagggtccaattgttaaatgggggtccccttttattataaaacttcccttccattttggtcccctaggaaggccaagattttccggcaattgcaagggctttttatttctttatttttcaaaaaaacaaaatttttttattccaaaaaaacaaagaaaattttgggggttttatttccccacatttattcctaatttc

SEQ ID NO: 102079 - DNA, 267 bp, Glycine max
  Clone ID: PAT_MRT3847_63194C.1
aagcaaagacactacatttcttttttttcgggacaattcataactcttctttttcaaactatgagggggggcgggggattacaaatattcaccaaacattgtattttttacatctgcatatagttctgctgttgattaccttttaccctcttccattaacacaaaatactttacttatatctactatgcctttatccaattataacctcatcttttttaccttaatttcaaccaatttagataaaaattgataccaaaattcattta

SEQ ID NO: 102080 - DNA, 162 bp, Glycine max
  Clone ID: PAT_MRT3847_63195C.1
aacggctgcgagaagacgacagaaggggttcattaaataaagacgtattaatgacgaaaaagaaaacattcataccgggttctatatctgacaactatagggctttaagccatggaggaccgctttcacatccaaaaaaagtcatgaaggtggaaatagaag

SEQ ID NO: 102081 - DNA, 267 bp, Glycine max
  Clone ID: PAT_MRT3847_63196C.1
gggactatgctccctattgactctctgcatatttcacttgcgatctatgagagatgccacccaccacacagaaagcgttgctgctactactgaaagaccttaccaccccgtttgatatcgtatagctgcaacgacacggaggattgctgcgggaggttctgctgcgataagtgtgaccagaaaacaaactctgtcttagcgttgactagcatcccctgttgcagacaaccatctatcaggccaaatacctgcctgtgggggtgacct

SEQ ID NO: 102082 - DNA, 242 bp, Glycine max
  Clone ID: PAT_MRT3847_63197C.1
agaatcactacgtcgtcgttggaatatctgtgcagaagccgagcatgtgaacgtgactctcggcaactccggacacagtatatcgatgtcgccatggaatatgcatatggagctcctcatttctgtctagtctcagagattatgctcgtagaattctgaaagtcacagttccagccagatgctagactcgaagatctgcgcgttgaaccatggcacggtgcagcttgggagttgaacatcct

SEQ ID NO: 102083 - DNA, 1214 bp, Glycine max
  unsure (1)..(1214): unsure at all n locations
  Clone ID: PAT_MRT3847_63198C.1
aaaaaaaaaaaaaaaaaaaaaaaanaaaaaaaaaaacaaaaaaaaaagacaaaaaaaaaggaaaaaaacaaaaaaaaaaaaaaaacaccccacccaggggggtttttttttttttttttttttttggggnnnnnngcttttggggggggggaaaattaaaaaatttaaaaaaanaaaaaaaaaaaaaaaaaaaaaaaaaaaataaataaaaaaaaaaaaaaaaaataaaaaaaaaaaaaaaaaaaaaaaaaaaaaaaaaaaaaagaacataaataaaaaaaataaaaaaaaaaaaaaataaaaaaaaaaaaataaaaaaaaaaaaaaaaaaaaaaaaattaaaaaaaaaaataattaaaaaaagaacaataaaaaataaatacaaaattatttaaaaaacatacaaataaacataaaacaacctccctatataaataaaaaaatgaaaaaacacaaacaatattaatctatttattgtcaaagattgctttcttggcctcatcttttctgttaagactttctaactttctctgacgacaatcgagacaatgagagataactcgaacatcaagacagatttcagagcttacattacacgtgctttgcaaacatacataaacttcttcttatagatgtaacaattaaattcaaattacacatagaacagtacgttttataacaaacagtacgtagacattagaaaaaaaaacatagaactattaacaacaactttaataagacttaaaaaaaaaaaaaaaaaaaaaanaaaaaaaaaanaaaannnnnnnnnnnnnnnnnnnnnnnnnnnnnnnnnnnnnnnnaanaaaaaaaaaaaanaaaaaaaaaaaagaaaannaaaataaaaaaaaaaaaaaaaaaanaaaacaaataaaaataaataaaaaaaaanaaaaaataaaaaaaagaaatacaaaaaaaataaaaaaaaaaaaaaaaaaataaaaaaaaaaaaaaaaaaaanaaaaaaaaaaaaanaanaanaaaaaaaaaaaaaaaaaaaaaaaaaaaaaaaaaaaaaaaaaaaaaaaaaaaaaaaannaaaaananaaaaaaaaaaanaanaaaaaaaaaaaaanaaaaaaaanaanaanaaaaaaaaaaaaaaaaaaaaaaataaaaaaaaaaaaaaaaaaaaaaannnaaaaaaaaaaaaaanaaaaaaaaaaanaaaaaaaaaaaaaaaaaaataaaaa

SEQ ID NO: 102084 - DNA, 155 bp, Glycine max
  unsure (1)..(155): unsure at all n locations
  Clone ID: PAT_MRT3847_63199C.1
gttccaattgatgcaacgttnaganagtatacaacacattttatagtgcntaagccaatnactccatcactggncatatgacaagctgatgagagtgntgtggggctganngcgnnagcgntcatgggnncaagtcaagagtctnctgattntcg

SEQ ID NO: 102085 - DNA, 499 bp, Glycine max
  Clone ID: PAT_MRT3847_6319C.1
aagaaatttggttttgattacaggtaaggtaaaggaggtgaagaatatgatggatgaggagaggtgtataaaatttcaagtgaattgggatttggaagagaaactgtgatcatgaaaaatgatgcatctagacattgaaaatttatttgttatgaaagacataattcttgcaaccattataactcactggaatgacggggataaccattaaactttgaaaatattcgggcgtgtgatcaatttaatatggtttcactattcaggaacttttgcagcataagccatgtaagcatctgaagacatgaaaattccaatttcatgttgattcttttcttagataatcaagacaaaatctagttaaacgatggattaggatagttcatcaatagaatttgacctctgttttggaaaaaaactcgttgagtgagagtgatagattgatataaattactctatcactactcctaagaaaacaccactaaaactataaataaaagct

SEQ ID NO: 102086 - DNA, 333 bp, Glycine max
  Clone ID: PAT_MRT3847_631C.1
aatcattcacttacttgtagaatacaaactttgctaaaaacgcattaattgaaagaaacaaatttcaagtcaagcaaaccacacaaaaaaccttacctacacattcaaattttgagggcttgggtaattagcttgaacatgaacacgaacacattttttcaaattctaacattaccatatatatttaaatctttacttttaattgaagtcaaaagatcattgttcttattatttttttacttcttttacatggtttttataatatttgaaagggtttggggacttattctcgttgtatgaagaactggtcatggtattgtacaaggtggatcc

SEQ ID NO: 102087 - DNA, 381 bp, Glycine max
  Clone ID: PAT_MRT3847_63200C.1
aaaaaaaattaaaaaaagctttaatttttggacacacttaatcttctttaaaaggagtaaaaatcattggcccccaaaatttttaatggaataccccaacatttttacaaaaccgggaagcgggggtttactttaaaaactttttatttaaaatttccgggtacaattttagggggggctttttccgccagtttcactggggattaaggggctagctaaaaacgggtcttccataaaagttacaaaaaatcacacttgggacaacccctggttttctaatggagtaaatactattgggtccccggaaaatttgaaaaccagtcactttagtcttaaaaaataaaaatgagttttctttttggaaaaaaaaaggctagaaaa

SEQ ID NO: 102088 - DNA, 242 bp, Glycine max
  Clone ID: PAT_MRT3847_63201C.1
atgaattccatagatgtagaggggcaatttagaaatgtctctggcgctgtggagtctcaatgtacagacaaatcccccaagtcttttccattgccaaatcatatgcctcaagaaacaaatggtgctggtggagcatctcttgttcagggtaaaaaccagaaatgtgagggaaaggacatacctactcctgtgtcttaccagcaaggactgcctgttgatgttcctcagatttctgtgaatga

SEQ ID NO: 102089 - DNA, 1864 bp, Glycine max
  Clone ID: PAT_MRT3847_63202C.1
cggcagcagttcccagtctgaggcgcccccatggctacgcgtccgtacggcagcgagaagaagacagaaaggggttcacaacaacccaatcatatgctgccactcctaggatccaacatggctcaaacactaaactgcagaacactacaaccaatggactcaactatgatcaagtcactgtcccacaatccaaaaaacgccaattccaccgcattcacaaggcactttgccaaaaaatctggtgtttttatcaagatcatggcttctgctacacccacagcagctcctatcacctttggattcaagaatttgttggaaacattcactgttgatgtgcatagagcagagaacaggccactgaatgtgcccttaatagccccttttaccattgctacctctagattggccaaggtggagaacgtggccataagggttgagttgagcaatggttctgtggggtggggcgaggcaccaattttgccttttgttactgcagaggaccagaccactgccatggccaaggcttctgaggcatgtgccttcttgaggagatgtcctgcactcactttgggttccatgttgggggagattgctggtattcttccagggcatcaatttgcttcagttagggctgggatggagatggcaataattgatgctgttgcaaatagtattcgtgtgccattgtggaggctttttggtggggcttcaaataccataaccactgatattacaatcccaattgtttctccagctgaagcagctgaattggcttctaagtactataaagaaggatttaagactttaaagctgaaagtgggcaagaatctgaatgcagatatagaagtgcttcaagctatacgtgttgcacaccctgagtgtcagtttattcttgatgctaatgaggggtataactctgaggaagcagttgaagttcttgagaaactacatgatatgaggttgactcctgttctatttgagcaaccagttcatagagatgattgggatggtcttcggtatgtcggtaatatagcaagagagagatatggagtatctgttgcagctgatgagagttgcagaagcatagttgatgtttacaaaattgtggaagggaatgttttagatgtcattaacataaagcttgccaaagttggggttatgggtgcccttgaaattattgagaaggcaaaagcagcaggtttagatttgatgattggtggtatggttgagactagacttgctatgggttttgctggccaacttgctgctggccttggctgttttaagttcattgacttagacacaccacttctgttgtcagatgatccagttcttgaaggctatgaagtttctggtgccacttataagttcacaaacgctaggggacatggtggattccttcactgggacaaccttgcttaatgtaaaagataattatgccaacacaagaatctggaaaagcataaatggacaagttggttaaaaattgcctaattaaggtgtgaaactgtggttacagtacaaccatacgtgaagatttcttgtccggaatgagtagccaatacttatccacaattgctatgtttttatttttatttttataagcaccccaattgctatgtatttaacttattcgattcctcacccttttctgtaaaagaaactgccttcgaggtcttgcaccaaatagtaactagttcctactttttctttttttttttgattggggaataactagttcctacttgctaaaagctaggaaccgcatatgatatatatgagatatggatgtaatatgatatgaacatggaaatacagcaaatttttaaaaataggtttaattattggcacacattttgagtaa

SEQ ID NO: 102090 - DNA, 573 bp, Glycine max
  Clone ID: PAT_MRT3847_63203C.1
tcgacccacgcgtccgcatgaatgagtattttagagtctcaaattgtaaaaatgcaaaagaaatgtgagatacattactagtaatccatgaaggcacaacggctgcgagaagacgacagaaggggcactctcacatatgaatatgaactgtttagaatgaatcaatatgagaccatacaagatatgcaaaaaatatttactcatatagttaatcatcttgcatcattgggaaaaatatttcctaatgaagatctcattaacaaagtgctgagatgtttaagcagacaatgacaaccaaaagtaacagcaattgcagaatcaaaagatctcaacaacatgtctcttgccactttctttgggaaacttcaagaacatgaaatggaacttataagactccatcaacatgaagagaatgataaaatgaagaaaggaatagcacccaaagcctcatcatcttctattcaagaagaaagtgacaaagaggacttgaatgaaatagaagaagatgacgatttcatattttttgtgaagagattcaataagtttctaagacacaaaaagaaaacaaccccc

SEQ ID NO: 102091 - DNA, 538 bp, Glycine max
  Clone ID: PAT_MRT3847_63204C.1
agatttgacgatggggggaaggggtgaaaccagacctgctatgggttttgccggccaacttgctgcgggccatggctgttttaagttcattgacttagacacaccacttctgctgtcagatgatccagttcttgaaggctatgaagtttcaggtgccacttataagttcacaaacgctaggggacatggtggatttcttcactgggacaaccttgcttaatgttagagatgtttatgacaacacaagaatctggaaaagcataaatggacaagttggttaaaaaattgcctaattaaggtgtgaaactgtggttacaacaacaaccatacgtgaagatttcttgtccggaatgagtagccagtacctatccacaattgctatgtatttaactttttcgattcctcaccatatattctgtaaaagaaactgccttcgaggtcttgcaccaaatagtaactagttgctacttgctaaaagctaggaaccgcatatgatatgagatatggatataatatgatatggacatggaaatatagc

SEQ ID NO: 102092 - DNA, 372 bp, Glycine max
  Clone ID: PAT_MRT3847_63205C.1
gaatgaaaaccagagtgaagcagtgaagaggggaacagtgatggagggcgggaacggaaagtgagcgcggaggcggtcacggatttccttcgaatcaatcgaaagtttcaactttttctgaaagggttactccttattctagtagtggcagcagaacttctacctctgttctcagtgacacggaagaagaggaagtacagccatcttccaattttgttggaacatgtccttacatgtgcccaggtaaacatattataataacaatatctaatgtatgaatatgaaatcaatttcataatttcatgttagcagagttgcaatgttggattttgtatgatggcatgtctcttttggtgagattggtaaagaatg

SEQ ID NO: 102093 - DNA, 197 bp, Glycine max
  Clone ID: PAT_MRT3847_63206C.1
gacccagcgtgcgtaaattgttttgcggttcgtaaatcttatggaagcgcatatttgggttgaaagcgaagtaccaggaaatcatggatctacaaactttgctgggctcaaagttcttgtcatggatgacaatggggttagcaggacagtaacaaaaggacttcttatgcatttaggatgtgatgtaacatttgcaa

SEQ ID NO: 102094 - DNA, 198 bp, Glycine max
  Clone ID: PAT_MRT3847_63207C.1
ctgctagggaagggaatcatcttctgctccaaatccaatggccggttacctcaagccgttcaatagacctttaccagcttcttctccccctggcaatctgatcgggcctatgtcgtaccttgccctttgtctacagatgacctttatgccttccccaattcttgttcagactttatagatgttatctaaccccatatt

SEQ ID NO: 102095 - DNA, 360 bp, Glycine max
  Clone ID: PAT_MRT3847_63208C.1
cttcattttcatctgaaacctcactttctcaccacatcatagttttcataataataacaagaagtagaaatttctcagtaaaagaatgcaagattcattgacttggctctccagtgaccagtcttctcccaagtttaaggcttgtgtggctggagaacctcactatctcaaaactgttgccgcctgcagcatttttctttgaaattgatgacccccacatgagattctagctagctccatattccaaagtaagaagtgacagaagaaaaggaggagaaattagaagaaaaaaaatccagaattcggttatggtgtaagtgtataactctaagttgactgctatttgttttggtcaacttg

SEQ ID NO: 102096 - DNA, 290 bp, Glycine max
  unsure (1)..(290): unsure at all n locations
  Clone ID: PAT_MRT3847_63209C.1
tgtgaggagagtcgatcgtcagagaanaaaagggaccagatctctccatcttccttctcttcagttctntctctttctctcaaattctcccattcgnttccgattcnggnaaacncgtgttcccgggggcccggtggatcntggannnacccggnanttcaaaggcgggtgttcncggttganggcccctnggcncttggccgggggnaaggcngaaanaaaacttaagggncgctttggggcgaaaaaatttcccggaggaaaatccccgcgggaatnaatgttaaaag

SEQ ID NO: 102097 - DNA, 378 bp, Glycine max
  Clone ID: PAT_MRT3847_6320C.1
ccaacaacccttccgtgcggctgcaaaaaaacaccaaaagggggtcctagtgtgtaattgcctgctgttgcaactcgtacttattcttttgttgatatccgcacgtgtttgaccattctctcacctgaaaatgtcttgctgccgatggaactgtggatgccgaaactcctgccagtgcagcaacgcctgcggacgctgcaagatgtacccagacttgaactacactgagtcaaccaccaccgagaccttctacatcgtagtgacacctattactgctcaatttgaggttgctgaaatgggtgtgcccactaacaacgatggctgctaacgtggaccaaactgctcctgcaacccctgcacttgcacgcgatgtgttgc

SEQ ID NO: 102098 - DNA, 189 bp, Glycine max
  unsure (1)..(189): unsure at all n locations
  Clone ID: PAT_MRT3847_63210C.1
acgtcgcangcacgcntacgtaangtcgganttcggctcgagntttctcgttcgcnntctcntnntcgnctnngtttngagcnntnacntgtcnntnccgaatgncngngananncncncntntngncnnngcgatnngtgtcataantnaatnctnngcnntntgtntatctntgngcagnagnntct

SEQ ID NO: 102099 - DNA, 352 bp, Glycine max
  Clone ID: PAT_MRT3847_63211C.1
aagttatgtgtgtcaggcatcactactttatctgatagagggatattaacatgcaagaagggataaaagtgaagcatgtctttgtcattggtgcttgttgcacagttgcaccttgcatcaagttaacaacacaaagtgacttgtgatagttgtattatttttcttcccattagcttaaggcctcaagtgataagagtcacttcctctttagctgtcttgtgaatttattttaatcacttccttttgttgacagactgaagctgtggctcttcattgcatatgttgtatcctttgtttctttagctggatcagcaggcctgctgatccaagattcacttgataaatccgcccc

SEQ ID NO: 102100 - DNA, 654 bp, Glycine max
  unsure (1)..(654): unsure at all n locations
  Clone ID: PAT_MRT3847_63212C.1
ctcttcttcatttcaataacacatatccattcacaacaaccaaagacagaaccaaaaaagaaaaaagaaataacttttccgattcaaatatcggaaaccctgagaatctccctcgcaagtgatcagaagagtaaaactagtaaaaaatttgctgctgaagctgggctccctgtgctgacaaatgtattacttccgaaaacaaaggggtttcatgcttgcttggaagctctgcgaggctcattggatgcagtatacgatgtgacaattgcatacaagaatcagtgtccttcctttctggacaatgtttttggtgttgacccttcagaagtgcacctgcatgtgcggcgtattccggtggaggagattccagcttctgaaaccaaagctgcttcttggttaatcgacacattccagatcaaggaccaattgctttcggatttcaagattcaaggccatttccctaaccaactaaatgaaaatgaaatttctagatttaagagcctactctcttttatggtgatagtttcttttactgccatgtttatttattttacatttttttctgtcatttggttcaaactgtatgtaggtctatcttgtgcatatcttactcttgcaacccgcttcaattntcaattgatgcctttaagtagc

SEQ ID NO: 102101 - DNA, 1570 bp, Glycine max
  unsure (1)..(1570): unsure at all n locations
  Clone ID: PAT_MRT3847_63213C.1
ctcttcgccatgccaagatcgctttccctttcccatctcccggggacccttccatcggaggcaagacaagtttctttgccggttctggtgtcggttacccggagtgccccccgcgcgaggcttctctacaatccgtccgctcgtctttaaatgaataacacatatctgtccaaaaccagcaaactaacaaccgttatagaaaaaagaaataacttttccgattcaaatatcggaaaccctgagaatctccctcgcaagaagggaagttttttcaacaggttcttgaagaagatggaagttttgcatccagtcaaatctgaaaacattagatgcagtagccccttgaccccatttaggttgttaaggggtctgatatgtttagtggtgtttctttctacagctcttatgtgtttagtctattttgtgccagtggcagttgtaggattgcggcttttcagcgtacgttgtagtaggaagacggtgtcattcatctttggactttggctgtctctgtggccctcactaattgaaaagagccataaacctaaccatctagttttcgggggatagtctacatatgagagcctagtctcttttatagtgatagtttcttttatggccatgtttacttgtacttgtgggatctcgcacatttggttcaaacgctgggatgcataaaatacatccttaagagcagcttgatgaaactacctatctttggttggggatttcacattctggagtttattgccagtggagaggaagtgggagatagatgagcaaatattgcaacaanaacttcaacctttaaggaccctcaagatcccttatggctaggtttcaatcccctgttattttttcagagtgatcagaagagtaaaactagtaaaaaatttgctgctgaagctgggctccctgtgctgacaaatgtattacttccgaaaacaaaggggtttcatgcttgcttggaagctctgcgaggctcattggatgcagtatacgatgtgacaattgcatacaagaatcagtgtccttcctttctggacaatgtttttggtgttgacccttcagaagtgcacctgcatgtgcggcgtattccggtggaggagattccagcttctgaaaccaaagctgcttcttggttaatcgacacattccagatcaaggaccaattgctttcggatttcaagattcaaggccatttccctaaccaactaaatgaaaatgaaatttctagatttaagagcctactctcttttatggtgatagtttcttttactgccatgtttatttattttacatttttttctgtcatttggttcaaactgtatgtaggtctatcttgtgcatatcttactcttgcaacccgcttcaattttcaattgatgcctttaagtagctatgtccatgccctccataacagcaagaatcaaaagagtgaatagtgttctcaatgtatgatcttggtcttgaacttgatattgaagtgtgaattatttgttgctgttttttaaaaaaagaaaaaaaaaaataataaaaaaaccaaaaaaaaaaaaaaaaaccaaccaaa

SEQ ID NO: 102102 - DNA, 230 bp, Glycine max
  Clone ID: PAT_MRT3847_63214C.1
caatgacactgtacacctccctgagctgcgccgcttctgatttctcccccagtttctgatttattcgttattcctattcctgtttcattcattcattcattcattcattcattactcttcttcatttcaataacacatatccattcacaacaaccaaagacagaaccagaaaagaaaaaagaaataacttttccgattcaaatatcggaaaccctgagaatctccctcgc

SEQ ID NO: 102103 - DNA, 259 bp, Glycine max
  Clone ID: PAT_MRT3847_63215C.1
ccaagctccctgcactagctgagcttctcaattgagagggtgcatcagacgatgtgcatgttagcattgcatgccacctgcttgcaacggaaacaatattttgagctctgtgagaaattcttgtcgcagcatgcagacaaataatgatgcccaccacctgaacaagtgtggatacctaaaagaaacaacatacaaaaagaaatggtgaaatgacaggaattagttccttcaatctaaatgcgtattaatactttgaaca

SEQ ID NO: 102104 - DNA, 413 bp, Glycine max
  Clone ID: PAT_MRT3847_63216C.1
accacattgtgattttttttttttttaagcaaacatattatagccttcttatgggattgaaaaaaaaggaaacccccgcgacacatgcaaattccaagggggaaatctctcctcattacctagcatgacttaaatcctttggaactaggttacttccttgcattggaccctatatacttataaattttttttactaaatattgagaaaaagggtgaacattttggcttatttcttcccaaagaaaattcccttggaaacacaagattaggtgggcagagccaattcgacacggacattggtgttggccccctttcttttgaagatgcttatgacaagccccgcttataggtatgggtggggcgcaaaatgaaccatcaaaaatttgccttgactcccatttgttagcaagctc

SEQ ID NO: 102105 - DNA, 694 bp, Glycine max
  unsure (1)..(694): unsure at all n locations
  Clone ID: PAT_MRT3847_63217C.1
gcatataaatctcttaatatatagtaagtggatggattcggttacattcatagatagatgaattgaatggataccaatggattcatgtacatcgttttagcaccccctaagtatgtacatgtacataacgttacagctgaaagtaaagagtaaaaatgcacggcatttcaacaaagccttcttaatattcattcatacataaaaaagcatacaaattattatacttgttcctggtgtagtgtgggtggtcctggtgctattgcaaactgtaaacctctacgctgaccagattgtagaacaaaagcaacttgggttgccgctagtgctgcagcctcctgtttcaccataatacaaaaatgtgagatatatgaacacaaacttagattccagcctaaaaccatatagcattgtaattctgaaaacgatggacaaactaagggcgtgttagaattgattctaaataaaattgattttggttagaattgatttagaatatcaagctgaacgatgaaagaaaaaagccctatatatatatttttttttgctcagctaaaaaaaaataaagccctatatatatatatatatattaggaagctaacgccctgncatcaaaaaacagcactaacgagcaagaaagggccccttactatagttagtatagataggcgaaggtttgagctcaaaccaaacaacg

SEQ ID NO: 102106 - DNA, 644 bp, Glycine max
  Clone ID: PAT_MRT3847_63218C.1
aattcggctcgagggctgcgagaagacgacagaagggaaccattcttccctcctcctttatccatctttcttcttttatccatatcaacccctaaattgtaggcaaaacccaagtgatgggagcctagcagccaatacatttgtaatgtaatattttcttactatctattgaatgtaatgccaatttttattgtttctttcccatgttttattttcattgctatgcatttgtttagggattagacattgaaaaatgtttaatttctaaagaactggaaaagacatctaaacaaatcattgctagagataaaatagtattatttagtctgtgcatacatctctaaacttcatgtaatttattattttatctctacaaagggatttgagagagagaatagataaattaagctctttaacgtgagtgattagggttgagtatcttaatagaagtgggtgaaaatctcttgcttatagattatgtatatatcaactcaagtacaaataaagtccatgtagattcgacactcggacttctaagtaaatcttactacttgaaacaaaatttgtgtacttgccaacaagttaacaaattttaaaagatataatgagaaattctaaatgaagttaaaattgagaagcttttt

SEQ ID NO: 102107 - DNA, 183 bp, Glycine max
  unsure (1)..(183): unsure at all n locations
  Clone ID: PAT_MRT3847_63219C.1
gtgattgaagaagatgccgatcagaacatcgccatcgaagcctgaagatgtatcacccgcacgtgangcgnttgngagtactcactgactcgttcgcgngcagtcgnangctananactacgcacggcgcatcgcgctactcgtcacgcanctcgcttgccgccgcgnaaaccggcagaccng

SEQ ID NO: 102108 - DNA, 1744 bp, Glycine max
  Clone ID: PAT_MRT3847_6321C.1
aagaaagcttttgaagctaaccagccatctggaaaaacaaactagaatacacatatatacaaaatttcatccacacgaggaaacactgtctcctaggatggtggtttaccgaggaggatggcaaaaagcgaccacagaagaatcccctctgtaaccagcaacaacaccaaaaaaaccttcaatcacttgcaagaaaacaccaccaattatggttccaccttcagctgtgtgaaggaaaatttctctaaattatggtgtgaaaagtgaaaacctttgggtgcatattcgtggttagcttgccttccacgtacttttttcatccttcatgaagatcttcagggcaaacagctgttctcgaaatgttatcatagtcaaaggaacttagaccagagtaaggacctgaagaaaacattgaagacgtcccatcagactcgtaagtggtagaggactgtctcaggttgggccgtgtattggatgaggctaacacaggatcatgagattctgtgatccgctgcaccattttaagtgattgtaccacttcacccattgtaggtcgttggcttgcttcaggagcaacacaggctgcagcaattgtgcaaacacgtacaaaatcttcctttgggtaccttcccccaagccttggatcggcaagttcttccaaccggtccttatctctaagaattggccctgccctattaacaaggttctattctccatatggctgtgatatatccacgtgtttcctcccgcttaacagtccttccaacaagtctccgttgctataaacctcgcatctaaccattaggtgtccggtcatggcatactcaggcgctacatacccaaatgtccccttgcctcgacaaatccgctgattacctctgcctacgcatgcctagctagccagccccatagctgcaaatgtcacttgtaagatgtaggtgtccagtcatggtgtagccttgagatctctgtgtataacacagggctgtgaatcttcatgcagatatgcaagtcctcttgcagcatcaagggcgatctccattctagtgtaccttagcatgaaaattgttctcaagcaatatgttggatgccttgaagtctctatgtattacacagggctgtgagtcttcatgcaggtatgaaagtccccttgcagcatcaagcgcaatcttcattctggtgtccccatccaaaggacaactcgcagccgagggaccatgaagccaagcctccaaacttccattagggacaagctcatagcaaagtacattttgtgatgagtcacgattaataaagtatcccactagttttacaaggttacgatgatgcaaccggctaagcatctcaacctcaaccaaaaactctttgtcaccctgttgccctccattggtaagcctcttaattgctacatgagtaccatcatttaagacacctttaaaaactctaccaaaccctccttctccaagaacactcgctggttcaaaattgtttgttgcttctttaagctcttcataagcaataaatcgtgtactagttgggtggggaagagaacccacagttgaaattgcactctctgtccttggcttttcagtttctatcggaggtgtctttgcttttgacagaaacgtacataaacagaatataagtacagatatgatagcaatgaagattatgccaatagcaattccaagaataagaaacaaatttgaatgccttcctcttttcggagaactcgatgatgatg

SEQ ID NO: 102109 - DNA, 295 bp, Glycine max
  Clone ID: PAT_MRT3847_63220C.1
ttttctgctgcagatcccatctgaacaggaccagctaagggctcgccaaataattgcacagaaaataaataaggtggaagagttgtggaagacaaatcctgatgcttcttttgatgaccttgataagcctggtgtagatgatgaacctcagtccgttgctttgaaatatgaaaatgcatatcagtatcaaaatgtatttgcacctcttattaagctcgaagccgactatgataagatgatgaaagaatcacaacgcaaggacaatgtccctatccgatgggatattggtcttaat

SEQ ID NO: 102110 - DNA, 350 bp, Glycine max
  Clone ID: PAT_MRT3847_63221C.1
tgagattcaacgtccaaaagccagtatagtaccaaagaaaaaggaggtatatatcttggtctttaatttctgaaacaggcacacacattaggtcaaaactcaccgacccaattgaagacccattccaaaattttcatctttgagcccctccattcacaagaagctcaaaacctcagaagggtaggggtggagtgacacaacacaaacattaacgcagccataaaaacagagaatgagaaagaacaacgaggtagtattcacgccgcagcaagaagagaatcacgaaatggtggggaattttcgtcatttcaaggacagcatctggtggccagtcgagaaatcattgccac

SEQ ID NO: 102111 - DNA, 458 bp, Glycine max
  Clone ID: PAT_MRT3847_63222C.1
ctgcttggggggggggggggggaggggggggggggggcctatcacagaattatgggggactgattggtaggggtgggaggaaggccagtgcactgtatacggccaacaggttggtgcgatgctgcacatcgtaagtgttgggttaagccgcggggttgtggctggataataaagtgcggtattttgggctctagacctaggaggcaaccaaaagtggtcgtgccaagtgcatgcactgtacaaagagttggaagtgcgctcatctcatccaattagtgtgtacttgggcttgttgtgcatagcgttaaaccagtgcccgttggtatgcttcattttggtaaatgtgggttgcgttatgtgctgtgattatgtgccggtgtacagctgccattgccccagcaatgggtgcgtaaaggtccaatatcagtggcgagcaaatgtgcttggcaagggttatg

SEQ ID NO: 102112 - DNA, 1463 bp, Glycine max
  Clone ID: PAT_MRT3847_63223C.1
aaataacactctctctctctcaattatttctgccgtaaatagacaagggttatctcaaataatcaatctaagctagctgaaagcaacaacaacaacatggggagggcaccttgctgtgacaaatcaaacgtgaagaaaggcccttggtcgccagatgaagatgccaaactcaaatcctacatcgaacagcacggaaccggagggaactggattgctttgccacaaaagattggcctcaaacgatgtggcaagagttgccgtctcaggtggctaaactacctccgccctaacatcagacacggtggtttctccgaagaagaagacaacatcatttgcagcctctacgttagcattggaagcaggtggtcggtcattgcagcacaattgccgggaagaactgataatgacataaagaactattggaacacgaggctgaagaagaagcttctagggaaacaccgtaaggaactacaggcacgcaacaaaggaaacggtggtatccttaaacaggagaacagttcctcgctcttgcttcagcaaaacagtgctcaacaattacatccatgttggccacagattccagtgctgccactttcatcaccgtacacaaaccaaagtccaagtttcaacgaccaagattccattagaaagcttctaatcaagcttggagggagattctccgatgattatcaacccatcctagatgggttgaatcttcagttcccacatggttcaaattctctctcatcaacacaacaaattcaagaggagcaagtccatgttggttcttctgcactagggtgcatgaactctattggccacaatcaagtacaatttggtcagagtaatgagtactgtgctgagttggtgcaaggacaagggagtttcattaccacagcaattggggaaatggtttcttctaatgattattctcgaaggttattaggtgggtcgttggagttcttctatggggaggaaatgattactgataataagataatgggtgcttgtgcttcttcaagttgtgggcaaagtactaattggggtgaaaccagtagttctctgatgtatccttctcttgttgcttcgaattacgagggtgtgcggcaagagatgccacgagaatgtgcttttcaagagttgagctacccgggggcgcaatagcatgtgtgtacattatttgttatcaattggtggaggttgggattatatgtatccaaattgaagctagcaaaagggaattaactttgtatttgattcccatatagataataaaaatcagcttgatttatatataactagagacttgtccgctatgtgagactttctcatgtgctgatcccttagtggcagtgcagtttaattatctgatttgtttgtgtattatttggttgtaatcttgagagtcatttaaatatatccttttatgttccaagctaaaaaaaaaaaaaaagaaaaccccc

SEQ ID NO: 102113 - DNA, 187 bp, Glycine max
  Clone ID: PAT_MRT3847_63224C.1
gcattattttcagaacactcacggtctcattttaattgttagtagctacgttagggatcgagaggttgaggcaagggatgagttgcacaggatgttgaatgaggttgaccttagagatgctgattcgcttgtttgtcccaacaagcaagatctttctactgctatgaatgctgaaaaattaactgac

SEQ ID NO: 102114 - DNA, 499 bp, Glycine max
  Clone ID: PAT_MRT3847_63225C.1
tttttttttttttttttttttttttttttttttttttttttttttttttttaaaaaaacaaaaccctttaaagagataaaataccacccctcagggggggagttggcggttaaaaaaaaattacggggcatggtgaaacccaacctaggaaaacccctcactactaaaaaacgggttttcaacatcgaccaaaaaggggattcaacaaccttgactaaccgttggtggatgaaacggtgtaaaaactacaaattttcaacaacagcccataattgacccggggaaaaaaaacatttatttttacatgggggcccaccccaaccccgatggagaaaacaaccctttaaacatcggttttcgccagcattaatataaaaaccggggctttaaaaaacgtttttagacaacactgatgtaaaaaccggggctttcaaaaatgttttttggcaacaccgaaggaaaaacccgggttttaaaaaacgtttcttgccttaacaac

SEQ ID NO: 102115 - DNA, 382 bp, Glycine max
  Clone ID: PAT_MRT3847_63226C.1
acttttcagcggccgccctttctttttttttttggaccattgaaactttcacggtttcttatacttttagaaacgcaagggggtgactttccttattttttgctaagcgccccgcaacttaaatcatgattaatgaaaaaaacacggtaaggcttgattccatgtgtgtctccatgagctggccacattcaacataaatgcatgtcctctttaggactgagctttcttagtgcttcctaaaaaaagtaaaaacgtcaccacggggagctagaaattttgcacttttaccgagtgatttcataaaaggccaccccatggtaaatcttatctacccgagaatcatatgatttactatgccaaccttcaattgcttttaaaataa

SEQ ID NO: 102116 - DNA, 604 bp, Glycine max
  Clone ID: PAT_MRT3847_63227C.1
aaaacatacagaaatgaattaagagagctttaggcaggcgcttatctatcccatccttcataataccgtctcctcagctataggagagtccaaattcaaagaagcaccagcaggtacttgactccttcacattcacattattaaaaatgaactcaaaaactcgaactctatgcgaagacatatcttaaatcttaggtatataaattagaaacttatttcaagcatctacaatttcctcattgtacccgaaagccaaaatagatgggggtattccccttccaacttcacacgctccatcaattgcatagttactaccccaagcctttaacgccaaacgcgccgcctactgccctgatataataactgtcccaaacgagggccccatactcggggagccatacattactgcaccctccatgccagccacaagaatgccaacctcaacctccctagtgagcctgaccaaagcgtgcccaacagtatgaatatacaaagccgtcattccagtaacgctaaccaaccttccaagactcttcactctcttactcccagcgggcgccaaggggaacccatagagcccacacagagctaaccacaaccttcg

SEQ ID NO: 102117 - DNA, 524 bp, Glycine max
  Clone ID: PAT_MRT3847_63228C.1
gggaaaccgccccctcggggactatggcccggtttttccctaaaaattacccccaaaaaccattgggtttcccagggcgagcaaaacggggggggccccccccccctttttggtttcccaacccccccccccgggtaaaccgggcccttggtttttattcgggggttacccccctttggaaaacaggaaacccgggttttttttgaaccccccccgggggggggggaaaatgggggacccctttttttttaaaacagtttttcccaggcccccaaataccaggggggtccctaccgggcccttttttggggaacccccctttgggggttttggtacctttttcacaatttcccaagccaaaaaacgggccctggttccttggggggtggggaaacaatttcagcaaaatcccaacggggaccccctttaattctggggatttaaaattgaaccagggggggaggaaacccccttttggccaccgagggtttgggtcaccaagttcatcaaaaaaaggggggggc

SEQ ID NO: 102118 - DNA, 555 bp, Glycine max
  Clone ID: PAT_MRT3847_63229C.1
actttttgcggtctccttttttggttgttttgtcttactgacaacataatactctgagaaatggcctcctcatcgaagaagcagaaaaaggccatggagagattaactctcgtctggccctggtcatgaagagtggtaagtacactctgggctacaagagcaccctcaagaccctccgtcagggcaaggcttggctggtgatcatctctgacaactgccctcccctgatgaagtctgagattgagtactatgctatgttggccaagtgcggtgtccaccactacgctggcagcaacatcgacctgggtactgcctgcggtaagtacttccgtgtcggtgtcctggccatcactgaccctggtgactctgatatcgtcaagcacgtccctgttgctggcgagtctgaggcccagtaaactatgggtcactctttcgacgtccccctgtccatctagtcaggcaatactttgtattgaattcttgtttctgccgctgtcggctcctgtgacagtgagcgagtttgatatgaagtaaagaggccgctcttccccatag

SEQ ID NO: 102119 - DNA, 475 bp, Glycine max
  Clone ID: PAT_MRT3847_6322C.1
ggctcgagagaaatccaccaatgtatggtggtaattctcagcaaggctaccaagctcgggcacccactagctggggtcccactgctgctcctatgccacaatccggttatggctatgcgcatacagcagcatactatggtccacactactataacatgcctcaccaacaatatgcaagctatcctcctcagccatctggacagatattctgccaccaactgggatcagtccactgacccacagcagcagtcaacccatgcatggtatgattactatagtcaacagcagtagcctaatcctgcaccttcatatgatgggactgctgacaattacagccatgccaccttactctggacataaccaacacgtacaggtctaatctcaggatggctatagaggatatcatgcaccaccacaattacgggatcgtcaggcaccatcatatgatcagcagcaaaggtatagctcatccccc

SEQ ID NO: 102120 - DNA, 355 bp, Glycine max
  Clone ID: PAT_MRT3847_63230C.1
gggtacggatagagaagactatagctcgagttggattgaaagatggacagagaacactttaagaaggagaagccttggaggggaactagaggcgtgcaaatatggatgggcaaatggtagtccatgaacatactcaacacactggaaaagaactccgcgaggatgggtgcgatattgttgaagctggggacagggagctaaaaactatttgggatgagcagaatctattaaaagctgaccacaatgtagaggaagcctaaggaccagacactagagcgtggaaaagaggacagaagaaaactagaactcgatatattgagcacatgacgtttggacgctgacctgaatgtcatat

SEQ ID NO: 102121 - DNA, 247 bp, Glycine max
  Clone ID: PAT_MRT3847_63231C.1
ctttctttttttttttttttttcaatggatcaactctactatgtagaggtattttatatgaatgttaggtcttttatctttttacaatctttttttttattcttccatcgaaaatcatttagacatatacccatgcgtacgcactgtttaccgtttttttttaatatttaatacacttgttacatttttgtgtcctaaggcttttaagtatgattatttctcttacaaaaatgtgtcacgaattaat

SEQ ID NO: 102122 - DNA, 321 bp, Glycine max
  Clone ID: PAT_MRT3847_63232C.1
gacatagcacatcataattcgtgcatttccttataaactatatcgtttctccttcgcgatcgcattacacacacctgtatctagcacattaagcctcaacaactagaaccattgctaaagaataatccgaaaccgatgatcttgcccaatgtgtataggcatggtctttccaaacacatgctttccatgacgtctgtgaacaatatgtctagctcaactcttagcattaaacttccatgtgccccactcatactcatcctttccaaacagcaagatactattccaggtaccaagctttacattctcatccctgccatttca

SEQ ID NO: 102123 - DNA, 1138 bp, Glycine max
  Clone ID: PAT_MRT3847_63233C.1
gaacctttcctgcaattgatccattgcgtctcactgtgggtttttggaaggttggtttatcaggttatgaagcagacgaaatcctatatggagattacggggtcgtctgtgaacttgttgggaataaatctattacttatgcattcaatcttggaacttgtagggaccatgtccaaaggcttttatcaggaataaagcatttggctgcaacatatgttaccattcagcaacctgaagagagagtgcttacagttcatgcaccctttgatgataaaatcacgagtttgatccctagagatgccttttttgcaagtaaaagaaaagtaacgataaaggagagcatcggtgagatttcaggggagcttatatgtccataccctccgggcataccagtattaatccccggcgaggttattaccaaaaaagctgttgattatcttcttcatgttaggagtaaaggtggtgatattactggagcatctgatcccttactttcttcaatagttgtttgcaatgtatagtaagtaaatcagctgggctgaagcatcttgaagttgaaacttcccaagttggactttggtctttctgcacaccatatggttagacaaagatttccacagttggaggaattctcaagttggtagcaactactaatggctgtactaaagtcggtaactattctctcattttaatgggtaaaagcaaaatagttttgaattttcgtctcttgaaaattctgctggattccccgagcgttaaatgtagttccaaaccattgggaaagaaatgtcatgacacagggcaatatagcgtcaatccttatcgaaggactgaaattatgggcaaagctcagaagcaaaccagcaactacctggaaaaagccataaatataaaaagaaaatgacaactaattgaatttttaagtttatatttagagaatgttatggaagaatagaaggattgatttatgtaaaattttcatgatttttatgtcattgtccatatggtgacaggaaaagtcaaatcttgagaagttaatgcttgataccagtctaatgtatatgctcgtcctggccctcagtaattgggtgggttctaaattttcaagattggatacacccaactgggtttccaacga

SEQ ID NO: 102124 - DNA, 477 bp, Glycine max
  Clone ID: PAT_MRT3847_63234C.1
catctttttttagtgtggaggatcgtcttgttcatccatcccacaccgagttcagtcagttagggtatctatcttataatggctaaaagatccgatccggatattgatgatgattcacatgagcttttttaggagtacactggccccccgcggtctgctactacaaacacgcaggagagggcataactaaattagaggtttcatgcacggtttgtatgaggaggaggaagccagtgaccctaatgcttgaccaaccgatttcaccatccgagaagcatatgctcgggaggctcagtcaatggctactgaaaggtattggtagaaaagtggagatgcggaatatgatcttcatgctttgaggaaaatcaggcgatttcacttaaggttgatcatcttctcttggagctaataccatgtttcacgatctctttgaaaggataccaccccgtatacaaaaatggaccgcctctttttacg

SEQ ID NO: 102125 - DNA, 524 bp, Glycine max
  Clone ID: PAT_MRT3847_63235C.1
tacgcatgcaggtatcggtcgtggaaataaaatgtaggccacgcgtccgatgagttttatttatttaatgagttttattataattaaaaaatattaatgaaaatatcttaacccttctccctaacaataataagaagaaaacgtaaacacacaaaatattcctcctaacccaaagatgtataaatgtatgtatcgtgttggcctctccaaaattaatttgccaaccaacccaaccagcagcatacggtttactgttggcattaagtactgagctactccacatgagttggcccacgacgacctactttcgtaaggagttttcctttaaattaaaaataaaataactaataataataaaaacattactattatttatttaaaaataaatcacacaccaagaaagtgtgtgatcattgaactcagctattaatataaaatgtgcttttattttataatgtctcaacaaatttctaacaacattctctacttagaaatgcattagtacacagaagacaatataaaag

SEQ ID NO: 102126 - DNA, 388 bp, Glycine max
  Clone ID: PAT_MRT3847_63236C.1
ggactctgagaatttgatagatataatagaccgtatccttatgctataggccctcgacaccactccagggacggatagctcaaatgaaagctcaaatgtggagaaacaacacctactgggcattatggaaacatgcttgaccactctccgacaatactgaatggcacactgcagggagatgcgaatcaaaacatgcattctattctgaccatgggccctcagaagtacagtctagggatactggccacaggtatcatctattatcactgtagagtctgatatcatatagtagttgcactccctttcaatgtactgtgattgcttcacctactaatacttatggttacaggggtttaaccccctgtaggtgctttatattgtacgttat

SEQ ID NO: 102127 - DNA, 659 bp, Glycine max
  Clone ID: PAT_MRT3847_63237C.1
cttttttttttttttttttttttttttttttttttttttttttttttttttttttttttttttttttttttttttttttgaggaaccaggtttggttaaaaaaaaaaaaaaggggaggaacaaaattcaatttactttttaaaaacaggacttttcccccccccattgggggaaaccggaaaaaaattaaaggcaaaccgcggccgctttcagggaaaaaaaaactgaaattttgggggaaaaaaaaccccgctgtatggagttgttagggccctaaaacatggcccggggggggacccccgaaaacacaaaaaaagttttgcaacccccattttggccaaacaaaaaataaggggcaaatctgcccccaaccaaacatatttgggacttcaaaaggccaaatttggttgccaaggaatccatcaaaaacgggggggggtttccaacaaccaaggggtcccggggggaaaaaccactggaagccccaaccattgggcccccccccgcccatttttgagcattggggaaaagaaaaacaaccccccggtttgtaacaaagaaaagacatccaggggtttcccgtaaacaaaggggcccaaaccggattttaaaggggggaaggggggaaaaaaaccaaaaacaaggggcccacaattttt

SEQ ID NO: 102128 - DNA, 574 bp, Glycine max
  Clone ID: PAT_MRT3847_63238C.1
aaaaaggccgaaggcaaaaaaaaaacccccaatggcaaaaccaggggttttaggggggattttttccccccccaaatggggatccacccaagtactgtgatccccgggaaaaaccccacccccccccccaaaaaggggggaacccaaaattgggaggggggagcccaaaaaaaaacccccctacgggcccacttttttttggccaaggggaaaaacagattccaacaacccaaacccagacccccccctacagttaatcctgggggacccaaacgggggacccgccggggggattttaatccccccccaaccctaaaaaaaacaaggttcaggaatcccccccccccccagggacgggaggaacagggggaagaaaaaacggccccttaacccgaggccggggttttgccaattttttccggttttaaaaaaaaacctttttttaaaagaatttttttttccggttaaggcaaaacttcactagcccgggttttttttgacgggggcgaaaaggaccggcccccctaaaccccccataattaggaccccccctttccctgaacccctggggggg

SEQ ID NO: 102129 - DNA, 2585 bp, Glycine max
  Clone ID: PAT_MRT3847_63239C.1
tagaaaaaataatagttaatagttaatagttaatagttaatagaaaaggatgagaggaatgcatataatatgattatgattatgcagtgctggattgagtcaaaggcaaagaaagagtgaagcagtaaatctatgatctagctatctacatgggtggtggaggaacactcgtgcaagggattcgacgcttgtttaaacgacgcgcttcttctcctgcttctgacgatcacaaccacaacaatgtcaatgccaataatagccgcgttttagtgagagatttgcgcgcgcaattggcttcaattcccaacactcttgaccccgtttccgatttcgatttctctaccttgaagcccatcaaagttcccacaccaatccccttcagaccctcttccatggatcatcacaaaaagggtgcacaagagacagagttttttaccgagtacggggaggcaagtcaatatcagatccaagaggttgttggaaaaggaagttatggtgttgtgggttctgctattgatactcacacaggtgaaaaggttgcaatcaagaaaatcaatgatgtttttgagcatgtatcggatgccacgcggatccttagagaaattaagctcttgcggttgcttaggcatcctgatatcgtggaaattaagcatattatgcttcctccttcacggagagagttcaaggatatctatgttgtgtttgagttgatggaatctgacctccatcaagtaatcaaggcaaatgacgatcttactcctgagcaccatcagtttttcttgtaccaacttcttaggggcctgaaatatatacatacagcaaatgtgtttcatcgtgatttgaagccaaaaaacattcttgctaacgctgattgcaaactaaaaatatgtgattttgggcttgctcgagtttcatttaatgatgctccatcagctatattctggactgactatgttgcaactcggtggtaccgtgcacctgaattatgtggttcttttttctcaaaatacacccctgcaattgatatttggagcattgggtgcatatttgcagaaatgctcactgggaagccattgtttcctgggaaaaatgttgtgcaccaattggatctcatgactgatttgcttgggactcctcctcctgagtccattgcaaggattcgaaatgaaaaggctaaaaggtatcttaatagcatgaggaaaaaacaaccaattccattctcccaaaaatttccaaatgcagatccattggctcttcgtttgtgaagaggcattatctgatccttacttcactggcttggcgaacatggaccgtgaaccatccactcaacccatttcaaaacttgagtttgaatttgagagaaggaaattgaccaaagatgatgtaagagagttgatttatcgagagattttggagtatcatccccaaatgctccaggaatatcttcgtggtggagatcaaactagcttcatgtatccaagtggggtcgatcggttcaagcgacagtttgcacatcttgaggagcattatggcaaaggtgaacgaagcactccaccattgcagagacagcatgcctccttacctagagagcgagtttgtgctcccaaggatgaaagtaaacaaaacaatgattctgaaaagccgagtggatcaaatcttcagcagagtcctccaggttctgatgagacaggtgctcaaaatggaacctccaaacaaaactacagtgcacgtagcttgttgaagagtgccagtattagtgcttccaagtgtgtagttttgaaacaaaaaaaagatccagagcaagagccaattacggaggtaaatgatgaggcagtggatggagtgacaggtgagattgctgccctccatgcttgattataactttggtggttggtttgaagcactacatgcaaatcctcctcgttgttagtgctaggactcatttagtcatgaactgccatcttgtattactcttgtaattatttattttgtgtacggaaatgcaatgtatactagtcatcatattttattatgaaactgaaaagggagagaatgttagcaaaacatgctcttcccctgtcgttggaggcctcggatacaacgcattcgactccgctaagaaactgcaggttgtgcagttgtaggtttattaaattttattttattttaaaatattaattgttatgcaataaattgaatgattgggattcatgcaaaaaaaaaaaaaaaaaaaaaaaaaaaaaaaaaaaaaaaaaaaaaaaaaaaaaaaaaaaaaaaaaaaggaagaataatttaaaagtgaaaaagatgaaattccctggcatgcggcgttataacattttcaattgggtggcctaatttcaataaggtgcccactgtttaaaaacgtgaaaaaatgggagattcttcgcctttaagcaaattaattttttttgcagctaagcgcccttttcgaaaaggtggcgaaataacggaaaatgcccaccaccgtgcgcccctttgaaacactagaggaaccctgaatggcaaaggggacttcgccctttaagggtggcataaaacacgccctttgtgacggttacact

SEQ ID NO: 102130 - DNA, 376 bp, Glycine max
  Clone ID: PAT_MRT3847_6323C.1
ggcggcgctgtggctgactctccggctaggttgaggagaagactgagttcgacttgttgatttataaaggtgccgagcgagcgctcgaatcgctgtgattaaggctgtgagggcattgactaacctagctctgaaggatgctaaggattttatcgaaggttttccgaataagttcaaggaatggatttcaaaggactaatcttaagattctaataatcaactctaataatctggttccaaggttaccattgcttaaacactgtttagctgcatcatatatgttcttcttcttcttttgttggttgtatcttaattcaccagttcactgtaatttcattttcattttgtcttgatttcaatcttttattttttaata

SEQ ID NO: 102131 - DNA, 1301 bp, Glycine max
  Clone ID: PAT_MRT3847_63240C.1
cccacgcgtccgtgcattatctgatccttacttcactggcttggcgaacatggaccgtgaaccatccactcaacccatttcaaaacttgagtttgaatttgagagaaggaaattgaccaaagatgatgttagagagttgatttatcgagaggtgtgatcatagtacatttatgttgttcctgcttcaatttattgtcttctttgtcctgtggtaagaattatgtaaatatttcaagtgaacagattttggagtatcatccccagatgctccaggagtatcttcgtggtggagatcaaactagcttcatgtatccaagtggggttgatcggttcaagcgacagtttgcacatcttgaggagcattatggcaaaggtgaacgaagcactccaccattgcagagacagcatgcctccttacctagagagcgagtttgtgctcccaaggatgaaagtaaacaaaacaacgattctgaaaagccaagtggatcaaatcttcagcagagtcctccaggttctgatgagacaggtgctcaaaatggaacctccaaaccaaactacagtgcacgtagcttgttgaagagtgccagcattagtgcttccaagtgtgtagttttgaaacaaaataaagatccagagcaagtgcaatttgctgagagaagttattatatggaaggtcatgtgatcccgaccaatctctagtaacccacgtaatcacaattttcaaaatggtgcctcccataaaatacagtgcacgtagtttaagaccagcattagtgcttccaagtgtgtagttttgaaacaaaaaaaagatccagagcaagagccaattacggaggtaaatgatgaggcagtggatggagtgacaggtgagattgctgccctccatgcttgattataactttggtggtttgaagcactacatgcaaatcctcctcgttgttagtgctaggactcatttagtcatgaactgccatcttgtattactgttgtaattatttattttgtgtacggaaatgcaatgtatactagtcacattttattatgaaactaaaaaggagacaatgttagcaaaacatgctcttcccctgtcgttggaggcctcggatacaacgcattacgttccgctaagaaactgcaggttgtgcagttgtaggtttgttaaagtttattttattttaaaatattaattgttatgcaataaattgaatgattgggattcatgcagttctctgagtaactctagaggatcgaaatccgttgattctcaagaaagattaagttgttgagagctgagactttat

SEQ ID NO: 102132 - DNA, 1429 bp, Glycine max
  Clone ID: PAT_MRT3847_63241C.1
cacaagtcggactggtctagctatctccctagttttctgaggctctagtggaaccgaacagagacaagaacaaccgcccaggaatattccatttcctttatcctcggtgcttctgtcccctttctcggatctcagattcattcattcacacattccacctcaatggccgctcccgcctccaacgctgtgctcctcggagacgttcacttcgacgacgtcgccgcaaagccttgcggcgttcacttccgcggcgaaacgcggcgaggcgcgctccgagccaccgtgaatctccgaaagccgaaaacgttgagcggtattctgaatttcgggtgttccacatcggatgcaagttggaggagctggaatccgagttcgctccacaggaactcgtccttcgcttgctgctccgccgagacaacgccgcatgttcagcacctcgcaacctccaccttctcgattgaccagactaattttggtggcgagaggttgaagctgttttcggggtcatgttacctaccacatccggataaggaggacacaggtggagaggatgcacattttatttgcacagatgaacaagcaattggtgttgcagatggtgtaggtggctgggcagatgttggtgttaatgctggactctttgctcgagaactcatgtctcattctgttagagcaattgaagaggaacccaaaaattctattaatccggctagggttttagagaaggctcactcatgtacaaaggccaagggttcatcaacagcttgtatcattacccttactgacacgggactacatgccattaatttgggtgacagtgggttcatcgtggttagagattgatgcaccattttcaggtcccctgttcaacagcatggcttcaattttacatatcaactggagagtggcaatggaggtgatctacccagctctggtgaggtaagttctcacatgaaattgctcacaggatttacttccaaggatatttcattagtgtttgagtaatctcaaaattaaggctctaatttgttgagacagtacgttcttacgtgtttttgatggcgccgatgccagggagtactggttgagacagtatactgctactcctactgtttctgacagtacagttctggttccatgaaacagagttcgcagcactttccttcaacctctggtgattaatatgtgaagccaacaactgttatgtcatacataaccggctcaacatgtgtgagtttttcgccatcttagctttgctacattttgtatattcatatttgtctacagggactgggttgccagccttgtctgtcatttttgacctgaatgcactactgcttcaaaattttatctcaaacttgaggtgcttacttgctatagtgatatatttgtatacaaaatcctgggccacgaagaggccggccccccc

SEQ ID NO: 102133 - DNA, 332 bp, Glycine max
  Clone ID: PAT_MRT3847_63242C.1
cggctcgagggaggaacactcgtggaagggattcgacgcttgtttcaacgacgcgcttcttcttcttcttcttctgaccatcacgaccacaacaatgtcaatgccaataatagtctcgtcttagtgagagatttgcgcgcgcaattggcttcaattccaaacacgcttcaccccgattccgattccgatttcgatttcgatttctctaccttgaagcccatcaaagttccctcacaaatccccttcagaccctcttccatggatcatcacaaaaagggtgcaccagagacagagttttttaccgagtatggagaggcaagtcaatatcagat

SEQ ID NO: 102134 - DNA, 723 bp, Glycine max
  Clone ID: PAT_MRT3847_63243C.1
agggtttaagagaaggctcactcatgtacaaaggccaagggttcatcaacagcttgtatcattacccttactgacacgggactacatgccattaatttgggtgacagtgggttcatcgtggttagagatggatgcaccattttcaggtcccctgttcaacagcatggcttcaattttacatatcaactggagagtggcaatggaggtgatctacccagctctggtgaggtctttacaatacctgttgccccaggagatgttgtcgttgctggaacagatggattgtttgacaatctgtacaatgatgaggtcactgaagttgttttacattcagttagagctggactagaaccccaagtaactgctcagaagatagcagtactggctcgtcaacgagcactggacaggaataggccgacaccattttctacggctgctcaagaggctgggttccgttattatggtggcaaacttgatgacataacagttgttgtgtcatacataaccggctcaacatgtgtgagtttttcgccatcttagctttgctacattttgtatattcatatttgtctacagggactgggttgccagccttgtctgtcatttttgacctgaatgcactactgcttcaaaattttatctcaaacttgaggtgcttacttgctatagtgatatatttgtatacaaaatcctgggccacgaagatgccttcatcttcttctc

SEQ ID NO: 102135 - DNA, 403 bp, Glycine max
  Clone ID: PAT_MRT3847_63244C.1
aacaaaatatgatgagtagtatacattgcatttccgtacacaaaataaataattacaagagtaatacaagatggcatttcatgactaaatgagtcctaaagtaagcttctagcactaacattttttaggatttgcacgcagtgcttcaaaccaccaccaccaccaaagttgtaatcaagcacggagggccgcaatctcacctgtcactccatccactgcctcatcatttgcctccgtaattggctcttgctctggatcttttttttgtttcaaaactacagtgcacgtagcttgttgaagagtgccagtattagtgcttccaagtgtgtagttgtgaaacaaaaaaaagatccactgcctcatcatttgcctccgtaattggctcttgctctcggacgcgtgg

SEQ ID NO: 102136 - DNA, 856 bp, Glycine max
  Clone ID: PAT_MRT3847_63245C.1
ctcgagccgattcggctcgagctcagcttcttcccaataagtagcaatattggcactggcaccataataccaggtcaattcaacaacataagtggtagtaaccaaggaacaacaacaacaacaacaacaacactctatggcaattcaatagaaaacgagtcatcccctcatgctggatcgagtttttcttctatctttggcaattcaatagaaaatgcgtcatcctctcatatgtctgccactgcgttgcttcaacaagctgctcaaatgggttcaaccacaaccacaaccaccaacaacggttcttctttacgtgtccgaatgtgtactaacaatagttccaaagctgaaaatgaccaccaccacaatcttcaagggttgatgaactctattgccaatggaaacacgtccttgtttgggagcatgcaagggaacgaaaacaacctttgtggctttcacaacgtggatgagtccaataacaataagttgccccagaatcttagtgtaaactttggaggttctgataagttgaccttagactttttgggtgttggaggaatgatgacaaacatgagtggtggattttcacaaagagaacaacaacaacatgtcacaggtactatgagctctttggaccatgacctaaagtcagcacagtcatatcgtcattttggaaagtcaacgttgcaataaggaaactcctcaagaaaatccttgttacaatgttacgtatgtatgaacttgtttaaaactgttatttggcttattttgttatcttttccccaaaagaactctaatttaccggtatattaactatgatttcgattctaaaaattgcaattcctatgtttttctt

SEQ ID NO: 102137 - DNA, 720 bp, Glycine max
  Clone ID: PAT_MRT3847_63246C.1
gttacattctttcgtcccttcctgtgtctgagcagaaggagttcgcaaccgcttcccttcttcctttttagcggcgtctctgttgtgcaacatggaggacaagatagagactgcagacaaaaaggtgctggttgatattgtaaaattagcacaaaaaagaggcttaaagggtaatctgggaggctggaaagaattcttgaacagtcatgataaaaagtttggggcaggtttgagtgatccatcaaagagatcccatgaggtattggctgcatttctaaagacattttcaaaggaggaagatttaaagttttttgataacatcatgcgacatcattcaaatcaatatatgttggagcgactgaaagataaatctcatgattcccctgagcagaggctagtccaagcaactctgcagcatccattatatccattggattattcatttccatcaattgatgaggggtggatagttgtaaacttcaaaaacaaacccaaggtgatgaagtctactgaaatggttgctgttgactgcgaaatggttctctgtgaagatgggactgaagcagtagttagagtctgtgtggtagaccataatttagaggtcaaactagataaacttgtaaaaccagacaaagaaattgcagactacagaacagagtttaatggtgtctcttctcaagatctagaggcagtgacttgctccttggctgatatacagaa

SEQ ID NO: 102138 - DNA, 297 bp, Glycine max
  Clone ID: PAT_MRT3847_63247C.1
tatcgagccgaatcggctcgagcggctcgagtacggctgcgagaagacgacagaagggtaatattgaatagtattatcatgtaatcaattggaaactaagtaaatgagaacaaacaaaaatgaatgtagactaaaaaatttatgatcaacacatttaaaatgatttgaaggttaagataaataaaacatatattatataataaactgtcaattaacaaagtatttaaatttagaaacattgtttgtaggaaattctgaccacataggagtgtctgttacaaaactgacactggcaca

SEQ ID NO: 102139 - DNA, 1123 bp, Glycine max
  Clone ID: PAT_MRT3847_63248C.1
cttgtttttttttttttttgccaaaaaacttaagaaactgtacattttgtagtttacacatcaattcacaaatttgaacacaagacaatcacagcgtactgttacacctctctttcccctttcacattcaacattgctgctgatagctagccaaactatacccccagagactctctcctattcctattaatttaactagaaatatgaaaagaaaaatgtgcatgtaatggataaacaaattgctatggtaacaaacaatgtgattccttaaatagatgcgttttgttgtacaatgtcatcgagtcgattgtgggttaaaacttcccttgctcgagcactcctatattgaagtctctgatgaagagtctcggacatctggttgaaaaattcagcatcccatctctgaatcaataaggggtcttctgcatagcagatatatatggatgtaacagcactttccaccacaaccatggccaatccaaccagtaccatccccatcagcatggttgtgtatccaatcataataactctgtctttccatttaacccatgcccaaacaccagagcaagttccagtaatcagcccaccaaaaacagtgcccattagaagaacagcaccagaacaatcatacgccacaagtgcttcaaccccagttgactgaaataactcccatgcatctctagctgaatggttaaagcttttaccataaacagcaatctgaacatatgcatacttgttaaaaaaacgaacaagagtctccacaagatgaaaaaggaaatcacccaagcaaagtaaacactcattattgccaatctttgaccgaaatccccgtatctcccaccgtagtgtcctaatagctgcagtaaataacgaaccataacaaatgctgccaaaagatgttgttaaagcatactgtagagatttcattaaacgggtgggtcgaatagaagctgcatctctaccaccatgaaaaagaacaagaaacaccatcccagacactacaacatgcacagtattacatagtactgcacctgtccaaaataagctcacagagagaaccagctcaccacaagaagccaccagcgtccaccatcacccatgcttgaagccaccggacgcgtgg

SEQ ID NO: 102140 - DNA, 203 bp, Glycine max
  Clone ID: PAT_MRT3847_63249C.1
gatttccgggtccgcccaacccgtccggttggaaaagaccaccgaagggccgattaacccatgcccaggggagagattggagtttgagggttttatggggccacctggttcctttaaaatccaaaaaaaacctaccgaatggtccaaggttattaaaaaaggtttcccctggtttatacctggggtatttggccatttccccc

SEQ ID NO: 102141 - DNA, 199 bp, Glycine max
  Clone ID: PAT_MRT3847_6324C.1
gcctaaccctaatgtcttcttcaacatgaccatgggcggtcaatctgctggccgcatcatgatggagctctacaccgacgtcactccccgcaccgtcgagaacttccgcgcgcttcgcaccgacgagaagggcgtaaggcggagcgtgaaaccactccactacaaggggctcgtccttccaccgcgtgatcccaagttt

SEQ ID NO: 102142 - DNA, 470 bp, Glycine max
  Clone ID: PAT_MRT3847_63250C.1
aggcgtactttggtgaccttggggtggactcggtgaagatgctagagtactttgcctcgatccctggcacggaagagattcgttcacagtacaacccagctacgtacatgctggaggtgatcggcgctggcatcggtcgcgatgtgaaggactactcggcggagtacaaaagcagcgacttgtgccagaagaatcgtgagcgtacgttggagctctgcaaagtgtcggaggagttcatacgccactcaacgctaaactatcagccgatcgcaacggatttttggaaccaattgcgcgagctaacgacgaagcagcgactaacgtactggcgcaacccgcagtacaacttcatgcgagtgttcctgttcccgatttttgccatcatctttggcacgacgttttatcagctctctgctgacagcgtgaagcgcattaattcgcacatcggtctcatttacaacagtatggac

SEQ ID NO: 102143 - DNA, 444 bp, Glycine max
  Clone ID: PAT_MRT3847_63251C.1
gttcatatcaatctcatcatattatatagagcaccaacttatcttcaaaactcattcataactaaaatccttccattccttccttccacaaaccctatcctattaccagacaaacctcattttcaggctttttctgttactctgcaccataccacttcactcatcacaattcacaaacccatagagaaaggaaaagcttttttttttttttttttttttatctgggtcaccctacacaaccttgctgaatggaaaactgtgtcttccaccaccaccaccatcaccttaggagcatgatcactcttccacaaccatcttcactgaaaccgaacttgagagtgtgccccaaagttatgagggtgagagcgagcgcgggaaggaggcactgcgagttcagcagccagaacgcgccccttgagccacggtccctggcggggaaagttt

SEQ ID NO: 102144 - DNA, 531 bp, Glycine max
  Clone ID: PAT_MRT3847_63252C.1
taacaagattaattgagtctacgttcatccgagcttcatatctgatatccattcttcaccgtaccaatgtctaattcttccatggccagcttgacttttgctgttggcattattggcactgtattatcccttttggtgtttgcctctcccatcaagactttttgtagagtggtaaagaagaaatcaacagagaattacaagggagctccatatataacgacgttcttgtgcacaagtttgtggacttcttatggagttcttaagcctggtggtttccaaatcgctatagtaaatggtgctggtgctgtctttcattgcacctacataattttgttcctcgtatattcacctcaagatcagaaggttaagacggcactttgggtggctattttggacgtcggttttctagggacagtcatttcagtaactcttttcgctcttcatggaacgatccagcttaatgttctgggaatgttttggtgcggttttactatgatgatgtgtgcttgacctgtattgtccttgaaaatg

SEQ ID NO: 102145 - DNA, 762 bp, Glycine max
  Clone ID: PAT_MRT3847_63253C.1
agaaacatactttttttgcttaaaaaaacaaacttaattacattttagtttcttttatatgactaactattaaattaacatcgcttaacggccattggccaattacaaaaccaagtgaatcaacttacataaaaaaaaaaggaacaaattaaaaaaaagaaaacctttgaagtctggacacacagttccagagccaacaaaaaaaaaccaaccatacaagcaaacatgtaccataatagtagagagatttcaaccactaattaactatttccacatcccaaagcttagtacatcatagcagcctcttatgcttattctattcagtatccactaataatcccattgtgcttccattcattctctcttcttcactctcggctaacttcacaatcttgttttctctcaacccttttgagaggcatttcacctaaaggcttaaaacctgggcctgagtcttcacgtttgtattggtaccttgaggcccaataaaggtagttaaagaagttaaggcaactaagggtggctaggaaccaatagaacaagttaaggttattttggttcaagtcgaacccatgcaaccacccttgtttgcttcgtgtgatccttttggtaacagcattgataacattgacaaagactgtgctcaagaagtaaccaagagatgttgacaaccacgtgagagaggttgaaagtgatttcatgctagcaggtgattccctgtagaaaaactccaatagtcccacaagggtgaacatatctgcc

SEQ ID NO: 102146 - DNA, 506 bp, Glycine max
  unsure (1)..(506): unsure at all n locations
  Clone ID: PAT_MRT3847_63254C.1
ggctcgagaatttttgaacttgggatttttatcctgtacagatggcaaagaggaatcattttttgattcaaaggcctggttagactcagattgtgacgatgatttctatagtgtaaagggtggtaaggatgccctgcaatgccttttccttagcagttttttactagagtatcttaatctgtttacttggcatgatcatcagattatgtgcttaacaatgaataggagatgaaacatttcatagttaatagtttatggaggaaagaattggaaggaaacacaaaattttcatggatgaaaggttcatgatatgaaagttaagttgtcatgcaaataataacttaatcagcagcattagcatttttatcaaaccacttttatgaagaatgcagaactcttattagaacttgngaatatattttccttttgctatagattctctttcttcttaatttttaccatgacctttctccatccaattgacttgnntatttctttggtttcat

SEQ ID NO: 102147 - DNA, 431 bp, Glycine max
  Clone ID: PAT_MRT3847_63255C.1
acgtagagaaggtaaaatgttgaagtacctataactgttgcctattgcactgttgcacataccaattacattcataaaaaaggagaacgaactcgacttttgatggctggaatttgaatattggaatctggggtgggggacaatctataaagagggtgtatagcccgatatgtaaagatcgagagtaaaaagccggctgagggcctttttattagagatgataaaagtctatgttgattaatagtgccttttgctgatgcagactatgctcaagctattataatgtgacaaacttttcctactttaaaatccctaacacacaagacataaggtactgttgcactttgacttctggacaccaacatggcgtaggcgcacgtcttaatccatttatgggatacctttgcgtacatcaaccctgagtttacaaa

SEQ ID NO: 102148 - DNA, 323 bp, Glycine max
  Clone ID: PAT_MRT3847_63256C.1
cccacgcgtccgttccagaacgccggcgaccgaacccgaattgaagtccagagaagacaacaatgccgcgagttacagcaataataatattaataacaacagcgacaggggtggcagtaacagtaatagtaattgtaacatggaacatcatcatcacagccaccatgtgaatagtgggttcttgccctgaaaatagtagttattgtatttatttattatagcttttttcttttcttttttttaactttgtacctttttatctcttcaagttgatcaaggagatcggaaattgggcaaaaaaaataataaataaattattatat

SEQ ID NO: 102149 - DNA, 366 bp, Glycine max
  Clone ID: PAT_MRT3847_63257C.1
cccacgcgtccgcccacgcgtccgcccacgcgtccgagagaaataaaacagagatggggagagggggtatataaaagagggaaatacaactccgaggcttggggggttgttacgggggctccctggggtccggcccggtcatggacggtgatagggctctcttggttggcgatgctttcactcgtggtgcttcgggctaccaggtcgtgactgggctaatgcttgctttatcggattgattgtccttggattcgttcccgctttagctggctggattaggtgcgatgaggcctcccgctgttgccgttggcaccggtggtgctgcttttatgccctcggggagcctcctcatagcgctcctttaag

SEQ ID NO: 102150 - DNA, 289 bp, Glycine max
  Clone ID: PAT_MRT3847_63258C.1
aaaaagaaaggcagcacgatttattgtatttggcaaataaaaaaaagaatcaggtgtcaatcatgcgaacaaaactaaacatgagctcaaggacaaacgaaacttattatttttgaatcgaaacaccgtggcaataaaccctatcactcccaggaaaggaagacacgtattttctttttctccatttctgcactggcgagtcggaacttgagtgacacaaatttaatagtaaagaggtatcgatgaacctaaaccttgttcttcatttcagatactaagaaacgaggct

SEQ ID NO: 102151 - DNA, 234 bp, Glycine max
  Clone ID: PAT_MRT3847_63259C.1
ctcggctgcgtgaagacgacagaagggcactccttctagatgtcctatgcacagtcacccaatgaagaatcagatgtcatatcaccatatttgcctagttccgagcacagattccagacagggctcagcagtttttatgcctcgtttcagagaaccagtgttattatatggttcacgtatacaattatctcgcacaggttttacccctagtgtccagataaagtacatttccag

SEQ ID NO: 102152 - DNA, 370 bp, Glycine max
  Clone ID: PAT_MRT3847_6325C.1
gctgctcgtgcctctagggttatcatatctccatttccatttcctctctctcagtttccaagaatcttaagctatgggaaagtcttacccaaccgtgatcgctgatttccagaaggccgttgacaaggcgaataagaatctcatatgcttcatcgctgagaagagatgcgctcctctaatgctccgtttggcatggcactctgctggaacttaccacttgagctccaagaccggcggttccttcttaaccataaataaccctttcttactccttgacggtgctaacaaccgtcttgacatgcttgcctcgcttttggagccactcaaagcgcacttgcctatttcgagctacaacaattactaccagttg

SEQ ID NO: 102153 - DNA, 449 bp, Glycine max
  Clone ID: PAT_MRT3847_63260C.1
attaaatcatatctatcattcagagtacatctaaaaaccttgagttgttcatttgctttgtaacattttggatggtatcaaaaaggcaatctggtcagaggcacgaaggcaggggcaaagttccaattcaggagcaaaaacaagcatcaatcagtggccttagaaatgtgatcaacgcgctatggatgagtgataaatcttcctatttggaaaattttctgcgaagagtggtaagagaggtggtggaacaaaaaatccaggaccaagctcatctattttcaagggaaagggttggtgaggctggcatatccggagccaaacatttaaagttgtgttttattaataagctgcctgaaacaatttttacccggtctagtataataacaaaagatgaatcatttcttcaaattgcgttatttgatgttagaactgagtctgtagtaaatgat

SEQ ID NO: 102154 - DNA, 402 bp, Glycine max
  Clone ID: PAT_MRT3847_63261C.1
ggatgcgaagaaaaactggtgaaaaaaagagagacaggaagagataactgtttgaatcagacttagactgtggtttgcaatttgcattgtgacatacatactcttatctattttggtttgcaatcactttgtgcgatcaccatggtcatcgatattgaaaccttggaagacaggtatattgattcttgcaggagacatgacgtttttcctaattcttctattttgtcaagccttttcaaggctgaggtaaaaaagtccaaccatgagctgtgcagcctggagattttaattgatgacctaaaggatgctgatattgctccactttttgacttgtgcatgaactttgacgcttctgaaatagaggctgttgatgtacgtaatgaatcatcatgtgatttaaat

SEQ ID NO: 102155 - DNA, 489 bp, Glycine max
  Clone ID: PAT_MRT3847_63262C.1
gaaaaattcattagcaaactaaatagtctacatgatttttttgtgttctagtggtcctcttatatgaatgtctttgtgttgctaaagtatattaatagaaacatggtatcttatcagaaaggataagagatttaaacttgtagaactttgagtgtttggacttcccaatacccaaaggccccagttctctcacaaatgacaagattaataggcaacatgccttatttgttaaaccaactaacctcactaatgggtatccatcatatatagacttaagtctggtgtggaggatttaatctaaattttgatttgtaagagtaacatgtacttttatatcataaattttaattgtttacaggcctagtgctatgtattttagccactgccttccctctcattcttttggttaattattcttattcagctgctaacgtctttgttcttctacctgtagatgccaacaaagcagtgttccttcaccaagtgcta

SEQ ID NO: 102156 - DNA, 252 bp, Glycine max
  Clone ID: PAT_MRT3847_63263C.1
aatataaggaacaaaatcaatctcagcctccaatacataactaaatgtgggtatgaaaattaaggtgcggactccaacttgttgcaagcgttttatgttccgatactgcccaatgactttgttctgcacccccaccgattttgacaacgacggcgacttccttcccagccgtgccaagtgccgcctcaggatgaggtcatgccggtcaatacgaagcgtctattgtttgctgactacgtgcagatttgcctt

SEQ ID NO: 102157 - DNA, 574 bp, Glycine max
  Clone ID: PAT_MRT3847_63264C.1
gtgactgtgacaactttcatcggcacttgtcaactttttactgatgatgatgatgataaatacatgtttgtaattgagaggagagaaaaaaaaatcctatagaaactgggttgttgtttttgttatgttagagatgctagaaaggggcatattgatgtctgtgcagacaatgaatcaccctccatttcttactggtgatgcctttagaaagaggactcagactcggtgcagagggagagcaaattcaagcacagctttgcagttatcttctgatgagagtggaaactatgcagaaccatgtacttcccttctaagccaaccaaacactattggtgttataggaggggtatcacttctatcaactctgattttcttggagaaacttgcttgttggggttcaagaaatggtaaagaatgtccaccttttgttgtttccagtgatcctgcgttgagcaaaatgctttcattacgcggtcccctcccttcagcaaggaccagatttgatcgtatcaaattgaatcaggaccttgtgattgagaatttgcggtgcaaaaagaactttcttcagcagtct

SEQ ID NO: 102158 - DNA, 312 bp, Glycine max
  Clone ID: PAT_MRT3847_63265C.1
ccacgcgtccgcttatcctcaatcacgtcctaaccttcacaaccgtaaagtttcccctcccctccttgtctttttgaaatttgtgtaaattatgttgaatcctttcttctttcctttgttatagagactatgaaaacaaaagcaattgatcgtggtttggaagaacaaaacccactttctttttgtcttctttgtcctttgtggtgttttggaacaaaacccagaaaaaaaggattttttttttatttgtggttgttgtgattgaaaatttgaaggtttgttttttgtgtgaggttgtggttgtggatggtg

SEQ ID NO: 102159 - DNA, 326 bp, Glycine max
  Clone ID: PAT_MRT3847_63266C.1
atttggtaagaataataatattaataatagtttgtgccgtttgtctggcactgaggacagaatagtgctttattgcactagtttgagagggatccgaaagacctatgaggattgttgttcggttaggatgattctgaggggcttcagagttgcggttgtttttagggacatctcaatggattcgtcctataggaaggagttgaaggatttgcttggtggaaaagcagcagtgacattgcctcaggtctttatcagagggaggtatgtggggaatgctgaggaaatgaagcatctgaatgagtctggggaattggcaaggcttttgg

SEQ ID NO: 102160 - DNA, 849 bp, Glycine max
  Clone ID: PAT_MRT3847_63267C.1
atgcgtccagttaaacagacaccggcgcaccatacagataaatttgctgaattggtatgttcaaattcattgagaggtaatgcacttacaaatgctgttggtgttcttaaagaggaaatgagacatttagactcgttaattatcacatcagcagataaagcacgtgtgccagcgggtggtgctttagcagtggatagacatgattttgctggctatattacagataccttaagaaaccaccctaacatcactgtattaaatgaagaagttaatcatataccagaaggttatacgattattgcaactggccctctaactactgagcatttagctcaagaaattgttgatattactggtaaagatcaattgtatttttacgatgctgccgcaccaataatagaaaaagattcaattaatatggataaagtatatttgaaatcacgttatgataaaggtgaagcagcgtatcttaattgtcctatgactgaagaagagtttaaccggttttatgatgcagtattagaagctgaagttgcaccagtcaatgagtttgaaaaagaaaaatattttgaagggtgtatgccttttgaagtcatggctgaaagagggcgaaaaactttgttatttggtccgatgaaacctgttggacttgaagatcctaagactgggaaacgcccttatgcagttgttcaattaagacaagatgatgcagctggaacattatataatattgttggctttcaaacacatttaaaatggggtgcgcaaaaagaagtcattcgtttaattccaggattagaaaatgttgatattgttatgttgaaagtgctgccagtggattatttgcag

SEQ ID NO: 102161 - DNA, 915 bp, Glycine max
  Clone ID: PAT_MRT3847_63268C.1
gctcgctccatcaccgccgatatttgttttccttgtgctttacgtgttcgttcttcaatacaaaccaaactctctcgtttcgcacacattatatataaacatatctccacttcgctcttctcaatcgatctccatcacctttaacgttatcttcgcttttatatctttcaaaaaccttcaagcccttttgattgtaagtatgaggaggaactgcaacttggaacttgccctttttcttccctctgattctggcccccgccaccaccactcaatggttgaagaagctagtgaaataagcccaatccaaaatttcttccatcaccaccaccgccaggaacagcaacagcaacagccgctcaccattttctatgatggaaatatttgtgttgcggatgtcacagagcttcaggtatgtgtatatatgtagattttttttttaatttctagtttttgacccttaatcattcgtgtgggccggcctttgtttgtggttatactaagtagctattacgttggtatgtgttatttttagtaactctaactcatttggataattacctgaaaagtcctagggttaggccaccgtagttaattatatatctgtatatagtattggttcttcctccaatgtaatcagatatagagaatgtgttgtcatgtttcggtaagagactatggattactgaacccattactcatctacaattactcaaaacaatattgaaagtcgttgttattggatttggctcctaactcctaaggagacgtataatatagccatcattgattcgttataaaaactcagaattagtgataaaatttagtgatggaaattgtaatattatgtttactaatttaggggtaaaaaaatttaatggcaaaatttttaaaatgtaaacaaaatattttgctatt

SEQ ID NO: 102162 - DNA, 503 bp, Glycine max
  Clone ID: PAT_MRT3847_63269C.1
aattaaactacctaaatattattgctcttatcatccccttaaaatccaaaattcattaatcattagcatataatattttatttatcatatatgagcatataaaactttcagtaacgtgttgcatgtgctacaagcaatacagcacttattttcttgtaaactacacctacactgaatgattagaaggtttacatcctccaccgcagaaaatgacaataatccacatagaagttctatgttgttttattttgttgtctaaacacgtacatactcttatcataacaagatttctacttaagatgttgagcaaaccagtttagcatgtcctgatgggcctactctgcagcctttacaggttgtgcatcttcagggttgtatctaacagtccaaccgtgtgaaactttaggaaatattttaacagagcaatcaaccccaggtttagcagttcggacttgttcaaactgtttacaagctctggaggtgacattttgtcaatctcagct

SEQ ID NO: 102163 - DNA, 331 bp, Glycine max
  Clone ID: PAT_MRT3847_6326C.1
atatggggaagtttaccatgttaaatgtcatgaaactcaactctcttccaaaaattttctatatcaaaatatctctaatcaattcctataagaattcaaaacttaactccaacttatcaataaactcagtcatccaaatttctgtctcttcataacatcactaactctacctccatatctttcatttatttctaaatttcttcctacatcaactttttgtacattaattcacctgcctaactatcaattatataatcgaacatcattgccaattacccttcatgctactcaactaatatactatctgcgcaactacactcctgcgattatg

SEQ ID NO: 102164 - DNA, 328 bp, Glycine max
  Clone ID: PAT_MRT3847_63270C.1
tcggggaattccaattccacattttcaagaattaaggaggcaaaaatgtgcagttttgattgggaataattggtttcctaattaggctattcttgaacccaagggaatgggatcgggatttcttggggaattccaatttcacatatttaaaaaataaggaggcgaaaatgttcatatatgaattgggattatttgtgttcttattatgcctatactgaaacccaaggaaatgagatcggaatttctcggggaattccaattccacattttcaagaaataaagaggcgaaaatgtgcatatatgaattgggattatttgggttcttatt

SEQ ID NO: 102165 - DNA, 648 bp, Glycine max
  Clone ID: PAT_MRT3847_63271C.1
tgttgatgaggctgctggtaaactgagagctaaaggaatcgaagtattggcggttgtttgccacgtttcaaatgcccaacaaaggaaaaatttgatagacaaaactttacaggatgcagctcctcacttgaagaagggttcttctgttgttctcattgcctcacttgttgcttataatccaccacctactatggctatgtatggagtgaccaaaacagcagttcttggacttaccaaagctatggctagtgaaatgggccctaatactcgggtgaattgtgttgttcctgggattgtgccaactcattttgttgcactttatacctcaaatgatgctacaagagaggaacttgaaagaaaggcattgcttggaaggcttggtacaactgaagacatggctgctgcgacagcgtttttggcgtctgatgatgcttcttacataacaggagaaaatctagtggtttctgggggaatgccttctaggttgtagcttccagtttcttcttctggtggttgaatggtgggcctaccccccaaaacgttttgtttcctgactcatctgatgccattcaatatagagtggtgcttcatgtacctggtactattggtaaataaaataaaaatgaaggaaaataaaatacgaagaag

SEQ ID NO: 102166 - DNA, 1127 bp, Glycine max
  Clone ID: PAT_MRT3847_63272C.1
tggtggagatttgaagggaaagtggcaattgtaaggacagcttccactcagggaattggctttgccgttgcatacaggcttaacgaggaggttgcttctgtaaattttataatctcgaaaacaagtcaaggtttatgggttctgttttaatggagagaaccaaatatggcaagagatttcaaggtaaggtagccattgtgacagcttccacccttggaattggctttagcatagcagagaggcttggtttggagggtgcatctgttgtcatctcttctcgcaaacagcaaaatgttgatgaggctgctggtaaactgagagctaaaggaatcgaagtattggcggttgtttgccacgtttcaaatgcgcaacaaaggaagaatttgatagacaaaactttacagaagtatggaaagatagatgttgttgtatccaatgctgccgtacatccttctgtagatcccattttgcaaacacaagaatcgatccttgacaagctgtgggagataaatgtcaaatccactatacttcttctcaaggatgcagctcctcacttgaagaagggttcttctgttgttctcattgcctcacttgttgcttataatccaccacctactatggctatgtatggagtgaccaaaaccgcagttcttggacttaccaaagctctggctagtgaaatgggccctaatactcgggtgaattgtgttgttcctgggattgtgccaactcactttgttgcactttatacgtcaaatgatgctacaagggaggaacttgaaagaaaggcattgcttggaaggcttggtacaactgaagacatggctgctgtgacagcatttttggcctctgatgatgcttcttacataacaggagaaaatctagtggtttctgggggaatgccttctaggttgtagcttccagtttcttcttctgctggtggtggaatggtggacctaccccaaaatgtattgtttctccattgaatatattgcacccattgaaaaaaataaatatgcagcatctagggtggacttttttcttatcaactaattgtatttgagtttcactttactgaaaggaaaatgataatcagtactaatctatacacgaatccacacaaacac

SEQ ID NO: 102167 - DNA, 3549 bp, Glycine max
  Clone ID: PAT_MRT3847_63273C.1
cacgcgtccgtgcacattagttggtgattggcttatctgcatgtgtgtgtgtgtgtgcacatgtgcataagcatctaccaaaggcatgatcaaggttccttgaccaaactgcacacttaaagaatatgtggagaagttgcagctactaaactctccggaggaacgtcaacgcaggctgcatgaaattccagatgtacactctgaccccaatttggattcaatgtttgagtccgatgaagatgatggagagtcagatgaaaggaagcaagatagcaacatattttcaaaatatcttgggtttgatagaaaagagaggggttctatttttccaagaatttcgaatggcatctccaacgacatgggaagcaaaacacaagacttgcctgctacccaagaaccggttgggaatacatgcacattgaagaataatatcaactctgatgatacagctattgatgatagcactaatgcagttgtgaaatcagaagtgtccagtgttgcagtggaagtttcatcatcgcttctgtctactgggatgcagcagtcatttaatgattttttgaatgatagatcatggcattatcaggatccaactgggaagatcggttcgagcagatgtcctgttcgagccattatttctattacaaaaacatcaccacataagctgtttgatttgcataatcctccttcccctccagcatgtaatacaacttctggactgacctggattcaccctaatgtaaatagttcttccaattgcttggttaacacatcaacccatgtttctgatacaaaaccatcaccacatgcttgggtttgatttgcaaaatcctctccccttctcaatacatcttctggacagacctacaccctgtaaatagcattgcttagttaccacatcaactcatgtttcttctacaaaaacatcagcataagctgggatttgattgcataatccacgcgtccgctcccacctcatgctccgcaatcattgatgtctcttctcttccttcgattcgtttctattttgttctcgctatggagcagccgcttcaaccgcagccagagactgccgcgggcggtgctagggattcggagggctcgcggttggttggagttcccgtcgcggtcgctcgcgatgctgacgtggcggagagagaggggaacagttgcgcgccgaatttgcaggtcaccgtcgtggacgtcggtccgtgtgcccactcacttcatcagaccgaccacgcctaaatcccaattcccaaattcctcccattagggtttctctctctctctctccaattcatgttctcttattcttgattgattctcttctattcgattcgattgttctatggaaccgcagcttcagcccaagctggaccccgcgccggaggttgttagcggtggcggtggggattcggagaagtcgcatgtcagtgatgtcaccgaggttcgcgacgttgacatggcggaggcaaacggcgcttgttgcccttccgttttgaaacggaagcgcggccgtccggccaagggaaaccgcgttccgaaagggatgacaccgccgtcgaggcagaaaaaggaagaagaggatgtttgcttcatatgcttcgacggtggaaagcctcgttctctgtgatcgccggggatgccctaaagcgtatcatccctggtgtattaagcgagacgaggccttttttcgctcaaatgcctaaattggaattgcggttggcatatatgtagcgctgtgtgggaagggatcacattatatgtgctatacttgtacctattctttaagtcaagtgatgcacaaaattctgattttgttgtgatgacagatggagtgtatgagaggattcgtgcaccagtagataatctattctttgacggggaagcagttagcatggatgaccgccagggatctgtgcatggagcttactcttctggggtgatggctgctgaaaattgtcagagacatcttctacagaaacaaggccacatggaaagtcttcctctagttccttctgttaggcatgaaatatttgaaactactatacctcctcaaatctctagaatttgattatgtacccttccttgttcttgaaaatgagaacaatgctcaaaagaatgagttgctgattagattaattaatgcacattgtagttcaacttaaaccatagtgactaaaatatttagggaagccaccataaaaaatcatattatccaagaaaaataaaaaaaaactgagacgggagatatgatcctgttgtaaaagctcttgcaaatgatcttgatatacgcttgaaccacagggtgaccaaaatatccgatggttacaacatggtaatggtcacagttgaggatggcagaaactttgttgctgatgctgttattgtaactgtccctattggaatccttaaggccaatttaattgaattttcaccaaaactgcctcattggaaggctgaagcaattaaagatattggtatgggaaatgaaaataagattgccctaagatttgatgcagtgttttggcctaatgtagaagttctgggcatagttgcacccacctcttatgcctgtggttattttctcaatctccacaaggcaacaggccatccaattcttgtgtatatggcagctggcaagtttgcctatgaccttgaaaagctgtctgatgaatcagctgcaaattttgcaatgcaacagctcaagaagatgtttcctgatgcttctaagcctgttcaatatcttgtgtcacattggggaacagacccaaactctcttggttgctatgcttgtgatttagttgggatgccagatgatgtgtatgagaggcttcgtgcaccagtaggtaatctattctttggcggggaagctgttagcatggatgaccaccagggatctgtgcatggagcttactcttctggggtgatggctgctgaaaattgtcagagacatcttctacagaaacaaggccacatggaaagtcttcctctagttccttctgttaggcatgaaatatttgaaactactatacctcctcaaatctctagaatttgattatgtacccttccttgttcttgaaaatgagaacaatgctcaaaagaatgagttgctgattagattaattaatgcacattgtagttcaacttaaaccatagtgactaaaatatttagggaagccaccataaaaaatcatattatccaagaactttattgccaaatcaatttttccttctttgcataaagcagaaataaaaggatcataagttaagcagtattccatataacaggcaaccgtcatatggtgttggaaatggaggatcatataggcctctgcccaaagggcagcgagtttgtaaattttatgaaagtgggtactgtaagaagggagcatcctgtgattactggcacccatgattttagattccattagcactggtcacacttgttttttttgtaatccttaacatatctgaagttggctctttccaattgttgtaatttaaccgacagtattagtctagttgcataattttttttatatg

SEQ ID NO: 102168 - DNA, 428 bp, Glycine max
  Clone ID: PAT_MRT3847_63274C.1
ggcatataacgattagaaaatctagtctgactcactctcacgaggttatgcaacaagacaacgcgacaggggtcccacttccagatctacttactacgcttctctgatctgacactcatcattctgatagtataactcctttttgggaaagcttaaaacttgaatgcaaaaccacaccaccccattagccatttggtgatcaaaatcgatcaatggagtttactgcatcttacaagcaaacgggatcctgttgtgtgtcttccaacgctcgattcattgccattggcgttgattatcgtgtcgtgattcaggagaccgtatctttcaaggtcgtgcagttgctttcatgcttagacaagattacctatattgaatggccccttgattctgaatatattctttgcggtctctacttaacgacgatgata

SEQ ID NO: 102169 - DNA, 327 bp, Glycine max
  Clone ID: PAT_MRT3847_63275C.1
atgtgatagaaataaaagcagatgccgtttccaaaaataaagaagaagtagtttcccaaacaaattcaagcaccaatacaaaggaaacaagggatccaaccaaataagggggcttaaaaaattgtaatggcggagaaaaattaacagtaaaatcaaccaaacaggacggttgatgcaaccccaaaggaaaaaggatccaaaatccaattttggaaactaaattttgataagtacctcaaggcaatgcaattagttcaaaggttcaacaagcgttttgggcgcaaaggtatatgccaaagccagaggcattttcaaagtcccttgcac

SEQ ID NO: 102170 - DNA, 376 bp, Glycine max
  Clone ID: PAT_MRT3847_63276C.1
attgacaacagggaaaggtcttctatagagtcacctacaatccataaaatattatcatgctttcattaaacctttaagccgtgccaggttaaaagtcaacgtaggtgactacagactgggaaaaattggcctatctaaattagtgaaacatcataaggaactttgcaagcccactagggatctaccttcactcctacaaaagcactcagacccaggggccttaaccagatgtaactgacttccaaaggttgacccactcttccatggcttaagcagactgtgaaagcactggatcaaccttacccatgtgctcctacacagcttaggccacctcaagcacgcaagcctacgctgatactgctgactggggcaacct

SEQ ID NO: 102171 - DNA, 489 bp, Glycine max
  Clone ID: PAT_MRT3847_63277C.1
atcttgggttgcatagcttgcaaactgagatggggttctagctgatggtaccttggatctgagcatccttctaattcagggagtattacttgtttggagaacacattgcgcattctcaagatcaaagctcaccttgttgaataggaaacaaggaatttggatcctggtatagagtttgcagtaggaccatgtggcgctgagttgaggctactgaagtcactagggagaatacttatgctgttcttactgaacagagcaaggctcctagaagcactaattattaagggaattgccagctggaatgttggacgatgacgaacatgatactggtggtcctgcacatcttgagggggaagacgataacgccctaaagaaaaatgctgagaatgatacacctcactggtctccttgactctatctttgacatgcgtagtttgcccgtccggcggaggaaggaatcaagacttctgattgcttctgtaccagggc

SEQ ID NO: 102172 - DNA, 265 bp, Glycine max
  unsure (1)..(265): unsure at all n locations
  Clone ID: PAT_MRT3847_63278C.1
tgccattgcagcaaggcacacacctcaggctccaactcatttcacgagggatcgnattngctcgccatcatngggaagnagangaagagagtttcctcgaaggtgtggtgttattactgcgatcgcgaattcgacgcgagaagatcttggtgcagcatcagaaagccaancactttaagtgccatgtctgccannagaagctctctacngctggcggnatggnatccacgtcctccangtccacaaggnatccgtcancaagtac

SEQ ID NO: 102173 - DNA, 550 bp, Glycine max
  Clone ID: PAT_MRT3847_63279C.1
ctaagggccaaacggacaagcgaacgaaaaaagagccggacaacaactaagcgcttacatattttatgcgcaaaaaatgatccacacactaaactctgctaaatcatcattacttaacacgaacagaaatttggtaactacgcgtctatttaaaaaccagaaggacaaaacatcgtttatggcgatgaactcacaaggaacacactgattccctattccaaaaaaaatccattaccatatcaccctatagtaagacattaacaatcttatacagacgcttggaacacttacgtaaaatccgcaaacataaaccctgtttacacacaaagcttgaacgaatcactaggggaaagctttatactatccagttaccaaaacaggactgcttaacatcatgcgtaggaaataaatataaagattagatatctacggaagctacgcactacatgaccttacacgccggactctaactgtatgctcatttacaggatgctataaaagacaaaaacggatccgttgttatatcccttataacacggacacagattac

SEQ ID NO: 102174 - DNA, 256 bp, Glycine max
  Clone ID: PAT_MRT3847_6327C.1
gctgatttgacgagtggaagttgatgctcagaattatactctctttcgttttctatgtgaatttgtcttcgtgccaaaccatgtttgccatttttggcgtctttgcgatcttccagacttccgcacacactctccgttaaaactgcactttaatccgtttctgcttttgagctaggatgtaataggaggagtgctggaaacaaatgtctgggttaagacagggttgggaacggtttgggcctaaactgaggtggaa

SEQ ID NO: 102175 - DNA, 209 bp, Glycine max
  Clone ID: PAT_MRT3847_63280C.1
ctcaccttttttttttaaaaaaagggaccaaaccaccataggcgggctacaataagttccttacacaatatactctaggaacaaaagcaaaatattaaaaactccaagcatgattttggctcaagaaaaaaaacactaataattggaaaacagaaccgaggcaaagcagcacctaaaatccaagcttgggcgacgccagagaggcgctc

SEQ ID NO: 102176 - DNA, 220 bp, Glycine max
  Clone ID: PAT_MRT3847_63281C.1
gagagaatatgcaaagcatgcaggcgctcaacgcatcatcagctggcctagggagtcatatgctctgttgggcgtcaggcgcgcccagctcgttaagccaaaattcccaaattcacgtatagcgcgagaatggcactatggaggccttcaggatcagaaagcccttttaaaggttgaagctggagcaaataaaagaagagcaacaagagcctacccatag

SEQ ID NO: 102177 - DNA, 481 bp, Glycine max
  Clone ID: PAT_MRT3847_63282C.1
aagcataaacccccaattggaataatgggaacatgaattacaaattttaacttttaatggtcagactcgttggaggcacagcacctgcaactggaagtccctttggaaatccgataaaattgggaatggccaaaataaccaccttgggttaaacttttccatggaaaaaacttccttaatattccaaaaacccccgtttatttaaggggaccaccaaaatgggcccacttgaaaaccaggtcaaaaaaattcttattggtaaaaaaaccccttttaaaggggaccggttaactacttacccttcccgggaggaggggggggacaccttcccccagaaattacggcacccgaacccaaaaaaaaaatactgggccaaaggggaaaaaatccctggcccaaaaatgaaccccggtttttttaaggcaacctttccaaactaattaaaaaacccccctcaaaaaggggatttttttcctttttt

SEQ ID NO: 102178 - DNA, 397 bp, Glycine max
  Clone ID: PAT_MRT3847_63283C.1
ggaccaaacccttgggtttattactattggaccaaaaaccattacagggacaggaaatttggttcattcttttcaaactataaaaaaaaaatggggaaaaattatgcctggccctttataaaaagcaagacaaaggaaacggacaacctggcatcggattaggggggctttaaaaaggggggcccaaacccctcctaacgggacacaaactaaggaatcacccacctttagagttaataaattgggaacaataaggaagggcacccggccccaccaccaaaaaaacccattttcaaaaacaaaaaaggctaactttttccgggacctattaggcccacctttaaaaaatttgggaccaaactgtgtctcccccccggggcccaaggaaaaacccccc

SEQ ID NO: 102179 - DNA, 343 bp, Glycine max
  Clone ID: PAT_MRT3847_63284C.1
gtatcctacaattacagctccaaataggacactgattgaagcaagtgaagagcagagaaagcatgctttaaccgtcgctattgcaactgcagcagctgctgaggctgcagttgctgctgcacatgctgctgctgaggttgtcaagctcactggcacttctcgctcttactcatatctttccaagggagacaaaagtttagctgccatcaagattcagagcacgtaccgtgcacatcttgctaggaaagcattaagagcattgaaaggagttataagacttcaagccataattcggggtcaagctgtgagacgtcaagtgtcaaacaacattttgcagaatttt

SEQ ID NO: 102180 - DNA, 411 bp, Glycine max
  Clone ID: PAT_MRT3847_63285C.1
ggcaagaaaaaacagggttctaaaaacctctatggaaaaggccctaaaagcttacaggcctaaaccataatcaggaaaaaaattggcctaaactttggcccggggaaatatgccaaaaaaaaacgggggccaaacatttttcccccaaaccaagggactttggggggggggaaacaaggggggaccctacccggaaaaaaaaggccccaattttgggaaacaaaccttttacaataacggggaacccacccaggaagccttatctcttaacaaaattcccaggcttttaaagggggcgccccaggcttttgtgctccaccatggccataactaaacattaacgggcaactacaaatggggacggggcatgccacgtcccctccctgggccattaaagccaaaccctccttt

SEQ ID NO: 102181 - DNA, 234 bp, Glycine max
  Clone ID: PAT_MRT3847_63286C.1
cccacgcgtccgcgcgtctctccttaccagtttcaccgcacgaatatcttgttggttggagcgatccgtgaaaaactctgtagacatgttggtttaccaggacctccttacaggtgatgagcttctctctgactccttatgttacaaggaaattgagaatgtaatgctgtggtaagttgaagagaagtgcgctggactacgaacttcgtctgttacactcatgtaaactttttt

SEQ ID NO: 102182 - DNA, 196 bp, Glycine max
  Clone ID: PAT_MRT3847_63287C.1
gcttatcttgtcaatctcgtaaatgtgctacgagaatagtcttagcacagtccagacgaagctcgccaatagagaaggagagctctctctcgtattgatatggctgcagcaagctgatgtgcctaccactagcacagattagaacagatgcattcgatgcagaagatagatgaatgctcctgattcacatgataat

SEQ ID NO: 102183 - DNA, 224 bp, Glycine max
  unsure (1)..(224): unsure at all n locations
  Clone ID: PAT_MRT3847_63288C.1
gtcttctctcagttgaactcatctgtgtacgttaaagaatggttcactaattttactatttntgaagaacatttcaccttctttcgagggaatctagcgtcgcgttaaatagcctcatttccttacgctgttcatgtcgctggatttttctctattttcattttggcaaacaaacaatcgcatttgtcctaaataatctttattttaagaatattgcggcatgc

SEQ ID NO: 102184 - DNA, 379 bp, Glycine max
  Clone ID: PAT_MRT3847_63289C.1
tttttgttttgtttttttttcttttttttgggcgggctttctttttttttttttttttctttttttcttgtgctttttcttttttttttttttttttgggggggggggaaaacatgcccccaaaattttttaccccccgaacccaaacatgtttaaacaggtcccaatgggaataatcttttggaaaccccccttctggcttccccacatttcgccccttaaggccaattacgggggcttgggggacccggggggggacggcccatcaaggaaaaaattgttttcggggaaaccccccccattccaaaaactgtaaattttaggatgtagcttcgcccaaaaaggcaaattcccccaaagggcccccttgcccccccaa

SEQ ID NO: 102185 - DNA, 268 bp, Glycine max
  unsure (1)..(268): unsure at all n locations
  Clone ID: PAT_MRT3847_6328C.1
cgtcatgctaccttccttcaaccanaaaccctctctccctctancacccattcttcttttctctctctttctttccccctccctctctcanctantcaatctcatcannannancatcancatcatgatcttctccaatctctataaccttcaatcantcaaaacctcancatnaaaccaaatgagttgacccatttgtgagaacaattctccctaagaaaaggtcaaaggctgcaactttttcttaaccaatctcanaacattttgc

SEQ ID NO: 102186 - DNA, 215 bp, Glycine max
  Clone ID: PAT_MRT3847_63290C.1
ttttattttttttttgtatttttcccggaggagggaaaacttttttttttgaggggggcaataaattgcagcaaataacattgttatagggtatgcttgtaacatttatcataaataaagaatcttatgtaacagttgaatccatacattttaggatggtgaaacatttttgaaaccagaatatgtatcatttttggttgtgagatactggtaat

SEQ ID NO: 102187 - DNA, 329 bp, Glycine max
  Clone ID: PAT_MRT3847_63291C.1
tgttttgtggtaacaatattgcacacgtttgtcactaaaacatgccactgtgaataggcatgaactgccaatcttatcaattataactgccttaaacaatccaaaaagaaatggttctgtttggaagctcgatctacatattctacgatggagctagtaggcacatgatcggaggaggaatgtcatattcgtgggcgaagctcttatatgctgttaggcggcgcatcttacaacgtgtagtccatgccatgggcgctcgtgattactgtggcataggcgactggcacaataccaggtatcctaaatgtacagattgatttctttgactt

SEQ ID NO: 102188 - DNA, 431 bp, Glycine max
  Clone ID: PAT_MRT3847_63292C.1
tgcatgacttggatgcaaaagcggattttccacgttatgcgttgatcgataatgcattgtagtatgagtctctccttggattgtcaaattaaggtccacgcatgttggcattgagcaaacaaccaagccatcctagtgcccatagcgtagcaccaggctttgatcttaccacttaaccctttacttttttagtatgcaattgcttaagctctctccatcagaaataccatattcactcaaatttcaataagaatgacttgttgcagtttgtacttaaccacaaaacaatctcacgaatcttctccgtggaacgcatgtgtgaattattcaattgcaactactgttatctgtattttctttttgcctaatcatataccataaacatgaagttgtgcttccttttattgagaatgctttagcatgcatgattt

SEQ ID NO: 102189 - DNA, 339 bp, Glycine max
  Clone ID: PAT_MRT3847_63293C.1
cccacgcgtccggagaaatttatcttgaccttgtatgataaatgggttggcatgggctatgcaccgggactgcccgagactcttaagaattacaacaagctggtgtctcttggcttcaagattatattctagtcaggtagaacactgtacaaacatgccgttacagaatctaacttactgaaggctggcttactactcacgggaaaaattaattcttaaggatccacaagatcctttcacttcaaatgtcagtgcattcaattcagcaactatagatatactgatatggcaggtatacatcattgatgggatcattggataccaatggagcgatctact

SEQ ID NO: 102190 - DNA, 332 bp, Glycine max
  unsure (1)..(332): unsure at all n locations
  Clone ID: PAT_MRT3847_63294C.1
gcgttagaacacntcagaaaggactccacattgacactgattaaagattacttcagagagcgacattttttatataaccacatacttgttcctccttttcattacgacagatacatacgcacgcatgaaaacgacctaattctaaagttatcagacatcaacttatgattacgattagtattcaaaaccatactgtgatctctgcatatgcacacactcaattccttcttaatgaagacgtcaatatattacgcttaatccatgacaatcaaattgtacgagctgtatatgcacacattcacatccaagacaatgtcgatgtctttacacca

SEQ ID NO: 102191 - DNA, 356 bp, Glycine max
  Clone ID: PAT_MRT3847_63295C.1
gtcctgtatgtgatgagtcaactgctctgaagtttcctgagactaccttaccatatatgcaaccatcggattcaaatttgtggccattgcctcagatggcaatgtctgctattccatcttttccggagaacaatgcggctagtacagtcatgcctctagatgatatttttcgtcatagtggtgaggatcatcgctatattcatgaggctgaagtaatattggaagcaccaaaggaccttaactcttcctttgtttcacctgtgataccgcaacccttcactagtgtgcccatgaatgaaaatgcgacacatgcacctcacggcattactattcctggatttatgaacagtgattac

SEQ ID NO: 102192 - DNA, 1605 bp, Glycine max
  Clone ID: PAT_MRT3847_63296C.1
aattcggcaccagccctagcaagtaaaaaccgtcccttttcgctgtgcttccaagtccctagctaaactcgcgtggtagctccaatggggggaaagaggaggaagagcgatgaaagcaattaccccttttcataaaaccctagcaagtaaaaaccgtcccttttcgtttctgttctctgtgcttcgaaaaccctaactaaactcgcgtggtagctccaatgggaggaaagaggaagaagagcgatgatgatgatgacgtggaagcagaagcagaagcttcaggttggaagaagaaaacgagaacgacgacggagagagagaaggagaagaaggagccattgcgtccttcgatgataaagaacaaggagaagcgatcggagctgcacgcgaaactgaagcaccagaagaagctcgagaagcgcgccaaggccaaggctcgggacgctgctctcaagaaagctctcgagctcggcgaggagcctccagagaagaaggtccctcgcactatcgagaacacgagggaactcgacgagaccgtttgcaagcccgatgacgaagagttatttgctggaaatgatgctgatgaatttggtccaattttgaatcagcaacaaactcccaagatattaatcaccacttgccgcttccattctactaggggacctgcttttatatcagagttgctttcagttataccaaatgcacattacttcaagagaggaacatatgatctgaaaaagattgtagaatatgcaaagaagaaggacttcacttctattatagttgttcacaccaatcgtagggaaccagatgctcttttaatcataggtgtacctgatgggcctactgctcatttcaagctctcgaaacttgttttgcgcaaggatatcaagaatcatggaaatccaaccggtcacaagcccgagcttgtattgaataacttcacaacacgtctagggcatcgagttggaaggttgatacagtcacttttcccacaagatccagaatttaaaggccggcgagtagtcactttccacaaccagagagacttcatattcttccggcatcatcggtatatttttgaaaccaaagaagttaaaaaagcagagtccaagggtaaaaaggacaaagatggcgagagtgagaatgttcctgaacagaaaacaattgcccgacttcaggagtgtggtcctcgtttcacattaaaattgattagcctgcagcatggaacatttgacaccaagggtggggaatatgagtgggttcacaagccggaaatggacacaagccgaaggaggttcttcctatgacttgtttgggaaggttgcattttggacatcttttttgctggaaataggttttatccggtgaagagggttaattatcttgaggttgttgggatctttcaacttaattctggtgtatcatttttttatttttttttattgggggctaaagtcctatcatctctgtaagccgtgagcaattttgaccttacatctattggtggttgaggaagagataacaaaggtttcttataagcaaatatataagcaattttgtattatggtcgaaaatatcaagtagcattagccttacaagttc

SEQ ID NO: 102193 - DNA, 996 bp, Glycine max
  Clone ID: PAT_MRT3847_63297C.1
gtctcagttttttttttttttttttaaagaagaacaggttcttttattaaactcaaacagtgtattaaaccaaattaatcaaactccaaaagaacaaatatgaaatataaaaataacccacatacattttatttattaggtctattgtatggggtgattgaaaccataaagtggtcaattatatccaataactagctagtgcgaaatgatcgtccattctcccaaattagttattgttgtcgtaccaagattgcttttgaagataatcaattatgctcttgtccacctggaaagctttggtgagaacctcagaagaaataggtggattagctttaaacaaagcatttgcaatagtgatagctcctggattttgactgctaagaccagcaatggcaacagcattgccatatcccacattcaattggaaatgaatgagaccaattgggaacacaaacacatcacccttgttcagcactttggtgaagaggcgatttccatcttgattggaagtcacaaatccaacataaagagtaccctcaaggactataaggatctcagtgccgcgagggtgagtgtggggagcgttcaaaccctttggagcaaaatctatgcgagccaaacctatgccgagcgtgtttagtcccggtagttgatcaacaaacacctgagtcacgtttgaacctagtgggttgtcagttttcccaggttccacatgtctgaagaaatcttctgctttgacaagcttggggtccttgcagaatttcccgttcacaaatacaccatctttttctttggctgccacacaaaaatcttgcagaggactagggtcataggcagagacaacagttgatgtcaaagccaagagggcaacaagcaagtagacaaccttcatattttttcttcttagcaatataatcttatctttaatgattctgatatatgtaatagcttgtgaaaattgcattacgcctctcgagcggccgatgtccgaggctt

SEQ ID NO: 102194 - DNA, 268 bp, Glycine max
  Clone ID: PAT_MRT3847_63298C.1
acaaatgtgtatcaatacttttactaccaacaccatcacgctcgaactctaatgctctgacgccattggtaatatctagaccaagatccgaaacgaagatggtatccctggggatcagggctaattaatgtgtggtgagaaacaacttaaagatgagagagcccttgctagttacaaggtgtggagaaaggctaccttacgcgtggttctgcgtttaagaggtggcatgcggattgtggtggggactgggacgaaagagaccaggacc

SEQ ID NO: 102195 - DNA, 257 bp, Glycine max
  Clone ID: PAT_MRT3847_63299C.1
ggagaacaaaattttgggctaaaaagcatacactaatggggggacacaagggggggaagcccccccccctttttgaaaagaaatttgtttttttatttacggggaaaaagaaaaaaaaaaaattaagggggggccccgtattggcattggaaaaaaaagcgggaaaatccgaaacccccccaaagccggggggggtattctacgagcttctggggggggaccaaggttcttttgccaagggggcaatttttaaccat

SEQ ID NO: 102196 - DNA, 189 bp, Glycine max
  Clone ID: PAT_MRT3847_6329C.1
atatggaggatcatcaaaatcgacctaaagtattgactgcttgaaactggtggccagtaagatcagttatcatacctaactggtgtggacgccttgggctaaggttcggggggagcgaaaaaagccggagactggtttgttgaaaaagaggctgggatcttgctcttttatactcaaaaggttactggt

SEQ ID NO: 102197 - DNA, 425 bp, Glycine max
  Clone ID: PAT_MRT3847_632C.1
gtgatgcgcacaatctgtgaagtcagatcaatctgcaaagcacaaggaaaagatggtaagaagaagaagcaaacacctgcaacgacaattattagatacagagaactgaacatttacagctacataagaaaataagcgagtctgattcctaaattcattagaatactgcacagaaaacatagaagcgagcaagtgaagtaattcatatatcgtgaatccttccgattcattccttttgattatatggtcgacattgaatagaatagaggcaagcgatatataaaaaatgtagatcggaggaaatccttgggagtgggtaatttaaacgggctcggtgtattgtaatgtgttgtgaagaaaagagatagagtaaaagatgagagatcgaaacccttaaacgtgaagaagaaaggaaagatgtgaga

SEQ ID NO: 102198 - DNA, 367 bp, Glycine max
  Clone ID: PAT_MRT3847_63300C.1
tagattatgtgagccaaggatatgtgtttaactacatatgggcccccaaaatattgagtagtgtgagggcttacaataaccttataatttcaaaatcttcaatcagctatctctacaaatagcacattttttaccataattggaaaaggatagaaacaatatatatatctggcacatctcttgcctaatatttatgttaaatgttaaatccaattctattaagattttgtcataaaaccaagaagaatgtggaatgcttgtgcaagtatatgaagcagtatattaatttcggttggctcaaggttccttccattcctttctttcggatcacaggggaaataaaaaacaatggagttggacttgacac

SEQ ID NO: 102199 - DNA, 239 bp, Glycine max
  Clone ID: PAT_MRT3847_63301C.1
tatattttcacccaacttttctctcttctttggcatattctatatttgattataaaaaaacagttaattaaatatgataatagggggggatcaggagtctaagccacgtttgactcttggagttgacatttgcttcttttttttttataaattttccccctttcgctgcagttggttgtgtggtggagctactggccgagagcatacttggtcaagtatagctggtcatagctgggtcg

SEQ ID NO: 102200 - DNA, 1385 bp, Glycine max
  Clone ID: PAT_MRT3847_63302C.1
gaggtcagccactatcgaggattaataactatgatcaaaagattgccatccataaaaattgtacttagaaataacaagtaaacaacataagcaaaataaacgatagaaactgttaacaaataaccaaggttgagacatggatttcaaattcaaaagccaacaaacttaactgcaacagtactccagttccgaaaaacatctccattaacatgagggcagcaaccatagtaacatctttggatgacaattgcatgagcacatatcagattacagcaaatcaaaactgccacaattactcaatgcttatttccacgaccctcaataccagtattgtgtgtcttgtttccctcatccattgagggttcttcactgggtattaatttctgtttctttgcattttgtttgattgttttaactatatccatggccatcttctggtgctcctttgtttgtgaatgcaagtccaaaccttctactgtttcacagtcaactttacatatccggcaccaccccatgctagaagccttccttctcctcaaattatcaaacaacctgatatctcctgttaaaaatctagcatcattaggaaatcctggaagtgaaaagctgctcctgaacccaggctcaccaagttgcggatgacctggccggccgcctttgccgaaagcggacgattcaaatcgacgaaaaccatcaagttcaactgctctcatatgaccagggtgggcaccaaaaccaataggctccccaagctgcaaatgtctggggaagttatgtggagccaaatgttcacccctccgaaaatggccaccaaactcatcttgaccaatgaaatcaccactccttggatgttcacccattcgaaagttaccaaaaccatcaaaatcatctctatgcaaatggctaggcaaatgaggaaaccgactatcatggaattcaccaaaacgacgtgcaactctgccctcaaaatcatctatacctgccttaccaacaagactgccagcgtgcggccccaatctccgggaggacatctcagcatattcactaacaggacttcttgaagctataccatccatatgatgtctcccatatccaggacctggttcaagataaccaggatgaagagcagaacctgatttcttaatgacatcgtcatgaataccaactggtctctttccagcatcatgtgcgcctaatgaataatttccaaatttagaaacaggctcagaattcgaaggcagactagagaatttcttaagatcatcatcaaactctcttctatcaatattttgttgatttagagcatgaaaaggtttgaacgtttcatcctgtaaaccaaaaccttcaggagcatgtcgtggtaagttggctgtcattcgaccatg

SEQ ID NO: 102201 - DNA, 264 bp, Glycine max
  Clone ID: PAT_MRT3847_63303C.1
ctcgagccggggtgagcaggaaagattccaaacagcaagaatcacccgtgctagaaggcgataatccaattggccgtctaaagcgggaagaggaagagaagcagcaacaaatcggcatgagtgtcgatgatggtagtctctcccaagctgatctaccggatgttgtcgaacatgcgcgaaagacgagtggtggtcccactaattttccaccaacaggcccgtttgcagtcgaaaccggcgatttgcgagtactaagggacgaaa

SEQ ID NO: 102202 - DNA, 352 bp, Glycine max
  unsure (1)..(352): unsure at all n locations
  Clone ID: PAT_MRT3847_63304C.1
ggaagaaaccctagccactctcccggcgtcacgatgcagatcttcgtgaaaaccctaacgagtaaaactatcacgttttaggttgaatcttcggacgcgatcgggaancctaacgccaatatccactacaaggaaggcatccctccggaccagcagcgcctcatcttcgccgggaagcaactggaggacggtcgcaccctcgccgactacaacatgcaaaaggagtccacgctttacctggtgctccgcctccggggcggcgccaagaagcgcaagaagaagacctacaccaagcccaataagatcaagcacaagcacaaaaaagtcaagctcggcattcttcagttctaca

SEQ ID NO: 102203 - DNA, 191 bp, Glycine max
  Clone ID: PAT_MRT3847_63305C.1
ccaaagaaaggccccctccgtaaggccaaatttggaatttcaaagggtaaagcatcgaaaacccccatgaaaaacccccgccccaagagggattctcccccccgctggagggaaatggcccttaagggcgtctggaggggctaacccgcctaaggggggtaacaaagggcccgtgctttgggggggcctaa

SEQ ID NO: 102204 - DNA, 1043 bp, Glycine max
  Clone ID: PAT_MRT3847_63306C.1
gggcgcggggaacggaacggctcgccggctcgagcggctcgagcggctcgagcgggaggggaagacatgggaaaagcttgggtaggcctggtggtattgctgtgtttgattgtcacggccatcgccgaacaatgcggtcgtcaagctggcgggcagacatgtcccaacaacctatgctgcagccagtacggttggtgtggaaacaccgaagaatactgttccccttctaagaactgccagagcaactgctggggaggcggcggcggtggcggtggcggcggcggcggtgaaagtgcttctaatgtccgcgccacatatcattactatgagccagagcaacacgggtgggacttgaacgccgtgagtgcttattgctcaacttgggacgctagcaaaccttactcatggcgcagtaaatatggctggaccgctttctgtggtcccgttggtcctcgtggccgtgattcttgtggaaagtgcttgcgggtgacaaatacaggaacaggagcaaacacaattgtgagaatcgtagatcagtgcagcaacggagggttggatttggacgtgggagtgttcaatcggatagacacagatggaagaggatatcaacaggggcatctcattgttaactatcagtttgtggattgtgggaatgagctcgacctcaccaaacctttactctccatcctcgatgctccctaattaatactagctctctgtaataaacaataaagtgaatgtgtgagttgcagatctagagtctttctattcggaaagacctatatatagaattcatactcacgtgctctgaataattaatattttgttgtctccatcactatttttcagaatctatatatcaaagattgcaggacatcgatcgtggtctttacctaagtaatcatcaataagtggggttcgggattttgtatatcttatccttattaatgacattaaaatccaactactttgtttattttttaaaaaaaaaaaaaaaaaaaaaaaaaaaaaaaaaagaaaaaaaaaaaaaaaaaactcaagac

SEQ ID NO: 102205 - DNA, 499 bp, Glycine max
  Clone ID: PAT_MRT3847_63307C.1
tcagctcgagagacgacagaaggggcctagggtgagtgtaagaggactttgtgcatgttctttttattggtatttgactattagttgacatttttttcatgatattttagctttttcaacaggagaaagcaagttgcaatattcagtaaatgttcaagagatgtcttcatatagaaaaattaacgtacattcaagagattagtctgttgattgccgggtgtggggaataaaaacataattatgttattaaatataagaaaatagatttttgctttaaattaaagtttacatatacaatgtttttctaaaagaaaaaaggaaggagggtagtgtggattcacactagacctgccaaaatctgtcctagttgtaatgacgcactccaagtaacagcaaataagccacgctagaaattagaattcttacataagaattattgtatggtacatcgggaggaactgagtattattaaaaatagttcctataattgcacaagctt

SEQ ID NO: 102206 - DNA, 224 bp, Glycine max
  Clone ID: PAT_MRT3847_63308C.1
gttgatttgaattgtgccaaattgcttgggttttgaccgaacttaaaggattgcctgacaacagcctaattagggaggaccgcctggtggaagggattttgatccaaaaggaaaaggtgccaatgagatcaggcgatttggccaaggtttcatgagggacatgtatcgctactgggggcctggcaaggaccttcggtctgaggaattggcagttggtactcggg

SEQ ID NO: 102207 - DNA, 989 bp, Glycine max
  Clone ID: PAT_MRT3847_63309C.1
ttttttttttttatttttcaatgaaaatagtaacaattgacaaattcttgttattgacaataacattgtattttgaggatacatcattatgacaaatgacaacacaatagtattgaacccaagtgttgattactttctctctctctctcattctctctctctaattaacatcttattctgttggaaattatgaactggaaactggacatatgacgcacataactcttttgcttgcttaagtatatagaaacatgaaatggtagatgtatagagatctcactgagatgatcccttaagcttcttagcaatgccagcaaagtacttcccttgatgaaaagcttgagccaattctaactcagttggttgtctggaaccatccccggcataggtacctgcaccataaggggatccacccttcacattctccatctcaaacatcccagcaccaaatgtgtaaccaatgggcacaaaaatcatcccatggtgaacaagctgagtaatagatgtcaacggagtagtctcttgtccacctccttgagaaccagtgctgtaaaagattcctgcaggctttccagctagtgcctgtgtgcgccacaggcctccagttgcatccatgaaagctttgaattgagcagccatcagtccaaatcttgtggggaaaccaagcaataagccatcagcctcaggtagctcgttgggtgtaataatcggtacatcactctttggaggtgcacccatcttcccaaggacctcttcagaaagtgtttcaggtacctgccatagctttgcttccacaccttcaacggaaccagctccctttttaatctcttcagctaacttctcaacatgtccgtacgtagaatagtaaacaatgtaaactttagtggtagccattgaagggtgtttattgctctgagactctctccgtgtgtctctatagaagaaaaagaaacaagcggacgctgggtcgagccgggaatcggcccaaa

SEQ ID NO: 102208 - DNA, 687 bp, Glycine max
  Clone ID: PAT_MRT3847_6330C.1
tgaaattataaacaacactaacatttcaatatttactaaaatcaggaaaaaataacaattcgttctttgaacgacttttagcatgtccagttgcctgaaaaagaggcaataaacaagaaacagattaagcgaagtttctatcctcctccactctttattctttacactccatgcctctattttgttagcatgtctataggacacctttttttgtacaagaaaaatcacctcatcagtcagagtctatctctcgaaatggtagtggaactgtcttcactgcccggtaatgaccaacgttatttagatgttcattttccaacctgtagaaattccaatgccctctccgaataacctcaagtgcagctaataaaaagtctagtagtcgtgactgaacaggccctactttgaagtgcatgatagtctccacccacgtcactcttaagacaatgtttaagacaatagacatatagtatatgcttttattctttagaattagatcatctctgagccatggatttatggattttggattaagaaatccccagtccttgataaaatcccagtacagttgatacattgtggccaccacagaagtgattaagactatagcaaaccatagattgtcattttgcctgctgtatgttactaaagcccctgctgccaccattgctgagacatactatacaa

SEQ ID NO: 102209 - DNA, 989 bp, Glycine max
  Clone ID: PAT_MRT3847_63310C.1
gatctcaatgaaaatagtaacaattgaaaaattattgttattgacaataacattgtatttgaggatacatcattatgacaaatgacaacacaacagtattgaacccaagtattaattattttctctctctctaattaacatcttattctgctggacattataggaactggaaactggatatatgatgcacataactcttttgcttaagtatatagaaacatcaaatggtagatgtataaagatctcactgagatgatcccttgagcttcttggcaatgcctgcaaagtacttcccctgatgaaaagcttgagctaattctaactcagtaggttgtctggaaccatccccagcataggtacctgcaccatatggggatccacccttcacattctccatctcaaacataccagccccaaatgtgtaaccaatgggcacaaaaatcatcccatggtgaacaagctgagtaatagatgtcaacggagtagtctcttgtccacctccttgagagccagtgctgtaaaagattcctgcaggctttccagctagtgcctgtgtgcgccatagacctccagttgcatccaggaaagctttgaattgagcagccatcagtccaaatcttgtggggaaaccaagcaataagccatcagcctcaggtagctcattgggtgtaataattggtacatcactctttggaggtgctcccattttcccaaggacctcttgaggcagtgtttcaggtacctgccatagctttgcttctactccttcaacagaagcagctccttttttaatctcttcagctagcttctcaacatgtccgtacatagaatagtaaacaatgtaaactttagtggtagtggtagccattgaagggtgtttattgctctctctgtgtgtctctatagaaaggaaaacaaggtgtgtgtgggtattgatgctggtggatgagaacgttgacagggtacctgtgtttatttagtctcgagcc

SEQ ID NO: 102210 - DNA, 570 bp, Glycine max
  Clone ID: PAT_MRT3847_63311C.1
ccacgcgtccggaagatgaataaaaaccacctcaagattcgaaatgtcaaccaacaacccaacatcaaaatcaattaaaaacaggttaatataaacttgacaggtaagaggtcactgctttcaactcctctactaatcatttaaaacgaattctacaatgcatagggaatttcagagggaactaaagagtttcaacttctatacttttaatatgaaaggcaatgaggtcactgctttcaacacctctactgatcatttaataaacccaaagggttggtgcaatagtgtaaggtcctgttgcattcacaagagtgaaaacaatatatttagggagagaactcgtgttcgatttcccttgggccaatggcagtcacgcaccgcgagcgggtttaatttctgacccagtgggctaagaaacacttgtggtctctgacccagaataaaaaaaaaaacacgactaatcaactatagcaatcaaaatgaagagaggaaataaaaaattatcaactcttcacatccaacatggaactaggaaagcatcagctacagatagggccaaccaacaacact

SEQ ID NO: 102211 - DNA, 435 bp, Glycine max
  unsure (1)..(435): unsure at all n locations
  Clone ID: PAT_MRT3847_63312C.1
agtaccggtccgnattcccggggcgacccacgcgtccgaaacgtgtgtgatcgttttggttttgttgccagatctcacccattatctctacaccagcaacatgctgcgttatattgagggatatgtgcaaaaggggaatccaggaaatgctcctctagttgtaggacagttgttagatgatgaatgccctgaggagttcattaaaggtgttattctttcagggggggctcttcttccaggtgagcctttaattgaagaatgtgagaagagaaatcggctccccttgcttactcaggttttggagcatcttntaagtgagggaagccacgatgtgcatgtgcataatgctctggggaaaattatcattgacagggataacaaggctggggattttcttacaaccaacccatattatgagtcctccgggggggggga

SEQ ID NO: 102212 - DNA, 517 bp, Glycine max
  Clone ID: PAT_MRT3847_63313C.1
atagataccaaagccacatatctcaaagtcctctagtttgctagttgacatataccaaagattacctttacgactttccacctcactaagaggaaatccactcaaaacataaaatgcataggtataattcagcccagactgcaatcctaccccattacattttttacgagcaggctgtgaaataacaaagtagaccgaacacctttggaccttccaagcggggatcattctcaaaggcattcagcggagtatgctcaaagggcccttatgtcagataaggtcgagactacttatcgagggagagatcccctactagatggctcgatacaccatagagcttgttgtgaatcgaggcagatcgtcggatgtgactgccaagggagaagacatgatctgaccattcacccattgaaagaggaaagccgcactatgtccaagggtttgccagggacccaacaagtgaggcctgactgctggcacaaaggggaggagaactaacattgatgaggttttggtg

SEQ ID NO: 102213 - DNA, 272 bp, Glycine max
  Clone ID: PAT_MRT3847_63314C.1
acgtaaggaggctcgtgcagctattagaagtaacagaagatcctacatttcaaaagaataaacaagtatatgaaagaaggcaattcgctacatcagtaattagattctaacattctcaatactcgactttggttattgtaaaagtgagaatacttgttgagttgagtagcatcactcgatagctaaatttaagttgagatacggagtgctatgtggtagagtcagtggaatctcgattagttggtaattctgtgtagcaagtcctaaggtgt

SEQ ID NO: 102214 - DNA, 287 bp, Glycine max
  Clone ID: PAT_MRT3847_63315C.1
gaattccggggtcgcaccacacccgtccgggtcaatgggccaactttcttctcctttaagggttccctttcggtgacccctttccagaccggaattttccattttttaggatataaccggcgagatccgggaatctgaaaaaggccggttcctcctcgggaggggaaggttcccttggcaaaatgggcggggcaggccgagcgttccaaggagagggtggagttcatgaaaaaggttccaaatcctgggtaggctttgtattggccggggtttgacccttttccttt

SEQ ID NO: 102215 - DNA, 255 bp, Glycine max
  Clone ID: PAT_MRT3847_63316C.1
acagagtaaagacataatgtaaagtagaaatgaccaactgtaaaaacacaaatagtcacaactaatgtgtctatagcggtttgtggaaaattgcggaaagcggaagtcatataatgaatgaaatatataatatacatcaaattatatatgtatacaaaaaaaaaaaaaaaaaaaaaaaaaaaaaaaaaaaaaaaaaaaaaaaaaaaaaaaaaaaaaaaaaaaaaaaaaaaaaaaaaaaaaaaaaaaaaaaaaaaa

SEQ ID NO: 102216 - DNA, 487 bp, Glycine max
  unsure (1)..(487): unsure at all n locations
  Clone ID: PAT_MRT3847_63317C.1
gtccggnaattcccgggnntcgacccacgcgtccggacactatcctttcggaactgtgttaattacgacacgcattctacgatataaacaacctcncagcttactgcataccagtatgcaatcacccttgtttcgttgctcctcgaagatcctatatctcggcgtaactcgtcgcttataacacagatgcacgtatagttaagctaaccttggcagctggtgcttaccgaactgacgaaggaaaacctcttgttttgaatgtaccgaggccagttaaacagctcctgataaatgacgcgtgacgcaacacggaatatgttccgatcgttggtcttgcctgcttttactaaccggagcgctaaccttatttttggggctgacagccctgctcttcacgacaacaggcttaccacttgttcttgcttcgtctggaactggctgtttaatacttgcgggtcgaatctttggctcagcactctctccaacg

SEQ ID NO: 102217 - DNA, 261 bp, Glycine max
  Clone ID: PAT_MRT3847_63318C.1
gggagtaatggatgcgctaaaattattgtgaagacaacaacacgcagtttcctatccattcacaagaaggtaaaatgctcaactttgaaacatgaaacttaattgggttataaaaggaaggtgatttcaaagcatgtacaagccctatcctacttgttagaggacttacctttttttttagggccttcaccattggtgagtgttccaggaagaattcccaatactactggatttcacattaatttcggccatgacccaatt

SEQ ID NO: 102218 - DNA, 409 bp, Glycine max
  Clone ID: PAT_MRT3847_63319C.1
atattgtttgttttttttttttttttttttttatgtatttttttttttttatgtttttatttattttcatttttatttttgatttatataattgggcaaaaaagaaggaatgtgttttgagcaagaaccataaaaaaacgaggccattcaaggtatgaaattaaaccgaaaagtacaagggggaaataaaaaaggaaggggatcctttttgataaaaaaaataaaaccccaatttaaacattttatttttttaaaacagacgaattgggggggggcatcaacaattaatgggggggggtttacccaagacgcaaaaaaaaactttgtgaaattaatgggtgaagaaaaggggacaaattctaaaaattgtcaatggcgcctaaaatcaatatgttccacacgctgtggg

SEQ ID NO: 102219 - DNA, 341 bp, Glycine max
  Clone ID: PAT_MRT3847_6331C.1
gtctttgaggagatgtcttcctttgtcaccaatggcaatgattctctcactgtccacgttatatctacaactatcgtgggcacatatggggatgccaagcagactattagggacaaggctgaacgggccgtaggaactgcagcattcggtattgcggtgcaggcaatacgtctggaaactgtggaagcactggccagtgaaatggttacactggagagaagagaccagaatcgagaactgcacttactgcgtgagttggatcatactactgtgataactgttaagcatggccacttgggaactacggggacagatcagctttatgctaatacggtgatgga

SEQ ID NO: 102220 - DNA, 197 bp, Glycine max
  Clone ID: PAT_MRT3847_63320C.1
gttcatcaataatggaacctattttttaggaagtaatgtaacttatttcctatgtgagccatacaaccatacctaaggggggaacattgtgacttgcaatgagcgaggtgctgcataaacagaggggctctgaatttgacattctgtattatgaaaaacacacccttaggcgcattgtggacgagagctcattcatg

SEQ ID NO: 102221 - DNA, 466 bp, Glycine max
  unsure (1)..(466): unsure at all n locations
  Clone ID: PAT_MRT3847_63321C.1
taccgattgccgttccaaggaaggtttcccgtcatcactgtatgacgtcctccttctttggggggggggggggggggggagtgaaaaggtgtcggagggcaggatgacgatgaaggtaacaatcacacttaggactttatggagagacaaacaaagacaaaagaaaccacgaaaacaaaatttgtacaaatgttaaggagagtgtttgaaatgcaagtggggatgacccttgaaaaatagttaacatagtttcgccgcgttatataccattgtaaacgtaatgggtggtagtggttagtaaagttgtacagcgtgttagtgcgaaaagggtangttgtgcgaaatgcaaacgtggcgccgggtccaccacatgtgtgggatagtagaccgtgcggggttacacgaaaatccgaaagagggcgagggaagtagagcacagagtgcgtgttgtagcgaacgcacaaga

SEQ ID NO: 102222 - DNA, 426 bp, Glycine max
  Clone ID: PAT_MRT3847_63322C.1
gcagcgatgcagatgcgaggtatcaaaggcgacggccggggtgttggagcaccccgaccgtctaaccaagttcgtgcaacaacctatcaggaaccgcacaaaaatggctaccaagactatagcccggccaactacgccggtagcttccgaagacagcgcccaagacccggcggatcttcttgaaaacaccctctctcaactcgaagctctcctgtgggtgtgccacggcgaagatatcgactggtgcagcggagatgggcctgggcggttggacaacctgctatggcttgcggccgaacttgcccgcaaggctggacacttattccagctgagcgagaaagcgcgacgcggggcgccgaccttttcgcgaaccccacagccgcagtcatagtgcacagggcgccgggtgctccccgcagcgaaata

SEQ ID NO: 102223 - DNA, 756 bp, Glycine max
  unsure (1)..(756): unsure at all n locations
  Clone ID: PAT_MRT3847_63323C.1
gaaaaatccatttggaaaaaggaaagataatcttcctgttgctgttcctagtgcaaatggagctccaccaacaatgacttatcagtagcttgaaggggatgtactctgttctttatgctccgacaaatattactacataataggatgcatcttgctgctgtcacatgcatccattgatcatcaagtcatcgccattagcatccttgctcatgtgaatgaatgcagtggcatcatatacatacatttggctatgttatactagtcggacatgcatatcttggcagcagggtctggagaaataaggatgtcataccaatggtcatgctgccctttccaccatcatattaccattgtcattacaacattgaattcttttcccccaattgaatccgtcattcatgactccatttaatcagagcattgatgtttgatgctttgaaattcagagctatttcaaagaaatcccgggagttatatgttgtctgatttatacaggatttcgaaacgacaaagcttcctttcataatgggagatccattactgctgctgccatatcattgcaggtaactntttgtttgcttgggtgaactaccgtcaaattaggttcgaacttctgtcgattgattatcaagggaaacagcctttcaattatatgatgcctgnagttctcattaaacagctgactgactattttttgtcaccgactagctaattctgtgctagttttcaaatctactattgtagcaaaagttaatc

SEQ ID NO: 102224 - DNA, 908 bp, Glycine max
  Clone ID: PAT_MRT3847_63324C.1
tgttcctgttcagaacacaaaagataaccctccctgcaacacccttgttattgggaacttgggagagaacataaacgaggaagaagtcaggggccttttcagtgtacaacctggttttaagcaaatgaagattttaagacaggagaggcatacagtttgcttcatcgagtttgaagatgtgaatagtgctacgaatgtgcaccataatctgcagggtgctgttatcccaagttctggttccattggcatgcggatacaatattcaaaaaatccatttggaaaaaggaaagataatcttcctattgctgttcctagtgcgaatggagctccaccaacaatgacttatcagtagcttgaaggggatgtactctgttctttatgctccgacaaatattactacataataggatgcatcttgcagctgtcacatgcatccattgatcatcaagtcatcgccattagcatccttgctcatgtgaatgaatgcagtggcatcatcatatacatacatttggctatgttaatactaatcggacatgcatatcttggcaacatgcgttggttcctggattactttcgtaggtgtttagattatgtatgttatcacctgtagaattgatgcatgggtctaagttttgtttaaattgcgggctttatggtcatatactttgtgtacattggcattaggaatgttattcaaacaggttttggcctatattttacaacttttaggttcatttggtgctttatttgacatgacatatttatggtgatgcttactttgaattcatgtcacgacttggttagggtctggagaaataaggatgtcatacctatggtcatgctgccctttccactatcatattaccattgtcattacaacatatttaactttttttccccaattg

SEQ ID NO: 102225 - DNA, 215 bp, Glycine max
  Clone ID: PAT_MRT3847_63325C.1
gaagtactgggtggatccacgcatgcgtccacccatgcgtacagtcagctgggagacgacgacggaagggggactaaccctaggtaattgcactgccactgaaatccttgaacccccttcaatactaaaccagagggaattcacaaaggaggttaccatgtcgtactacgagagagaggagatggagatggatcttacttctgcggagggggtca

SEQ ID NO: 102226 - DNA, 683 bp, Glycine max
  Clone ID: PAT_MRT3847_63326C.1
gccaatgttggcatagtatcccacctgtttggtgcatacaaagtttactgccaacccctcttctcattcgtggaatcacatgcagcagcaaggttcccaaatagtgattttatgagcagagagtttgaagtaccaatccctggctgcaaaccctacaggctcaacctcttcaggttggtttggaggacaatttttgtgattttgtcaactgtgatagccatgctcctaccattcttcaatgacattgtagggcttattggagccattggattttggcccctcactgtttatttaccagtggagatgtatataactcaaactaagataccaaagtggggcccaagatggatatgcctacaaatgcttagtgctgcatgctttgtagttactctattagctgcagcaggttccattgctggggttattgatgatcttaaagtttacaagccattcgtcaccagctactaattgaataggataattacttagtgatcatgatcaccattgtcaaagatttcattagcaacaagaaagaaaaaaaaagagaaaattcttgcagattgaaatctataggaatgtggtcttacttgtttattgcttagtaaccttgtagacatttttacctatataaaaaaattatatgttttcagagttaaaaaaaaaaaaaaaaaaaaacacaaaaa

SEQ ID NO: 102227 - DNA, 2309 bp, Glycine max
  unsure (1)..(2309): unsure at all n locations
  Clone ID: PAT_MRT3847_63327C.1
ggaagatctcggtgcgggaagagagggtgagcggagtgaggtgtgtatactaaagaatataagatagaagattggggttagggtttgatcggacgcaatggctggcaccggcatccacccataccaccagcaatgggctccggcggctgccgctcctcctcctcctccggcagccgcgggcggtcctcctcctcaccctggggaggaggttcgaacgatattcataactggtcttccggaagacgtgaaagagagagagctgcagaatctgctgagatggctgcccggtttcgaagcatctcaactgaatttcaaagctgagaagccaatgggttttgctctcttctccgcaccacaccaagcactcgccgccaaagacattcttcaggacatgctcttcgatccagacaccaagtccgtcctccacactgagatggcaaagaaaaatctattcgtcaaaagaggaatcggagctgctgatgcgggcggtgcttttgatcaaagtaagcgcttaaggacagccggagattatacacacagtggctatacaagtccatctccttttcatcctcccccgcctcccgtgtggggaccacatggatacatggctccgcctcctcctcctcctccatatgatccatatgctggctatcccgttgcgcctgtaccaatgcccactcctgctcccataccagcacctagcacttatgttcctgttcagaacacaaaagataaccctccttgcaacaccctgtttattgggaacttgggagagaacataaacgaggaagaagtgaggggccttttcagtgtacaacctggttttaagcaaatgaagactttaagacaggagaggcatacagtttgcttcatcgagtttgaagatgtgaatagtgctacgaatgtgcaccataatctgcagggtgctgttatcccaagttctggttccattggcatgcggatccaatattcaaaaaatccatttggaaaaaggaaagataatcttcctattgctgttcctagtgcgaatggagctccaccaacaatgacttatcagtagcttgaaggggatgtactctgttctttatgctccgacaaatattactacataataggatgcatcttgctgctgtcacatgcatccattgatcatcaagtcatcgccattagcatccttgctcatgtgaatgaatgcagtggcatcatatacatacatttggctatgttatactagtcggacatgcatatcttggcagcatgtgttggttcctggattactttcataggcgtttagatttgatgcatgggtctaaattttgttacaattgtgtgctttatgtcatatactttgtgtacattggcattaggaatgttattcaaacaggttttggcctatattttacaacttttaggttcatttggtgctttatttgacatgacatatttatggtgatgcttactttgaattcatgtcacgacttggttagggtctggagaaataaggatgtcatacctatggtcatgctgccctttccactatcatattaccattgtcattacaacatatttaactttttttccccaattgaatccgtcattcatgactccatttgatcagagcattgatgttgatgctttgaaattcagagttatttaaaggaaatcccgggagttatatgttgtctgatttatacaggatttcaaaacatgacaaagcttcctttcataatgggagatccattactgctgctgccatatcattgcaggtaatttttttgtttgcttgggtgaactaccgtcaaattaggttggaacttctgtcgattatcaagtgaagcagcctttcaattatatgatgccctgagtttctcattaaacagctagctgactagtcattttgtcaccgacgagctaattctgtgctagttttcaaaatctactattgtagcaaaagtttaatctgtgtaacagaagaaactgataggttaagaataaataccgtggaaaatagagtaatggttgtggaatagcaactttggattttcgatattgaaagctcctacacggttcataattatctatgaacggtagttcaagttttgccatgaaattgcaacttcatagttagtttttgggtataatattagagacatcaattgttttaccaaagtgaattctacacaacttagatgtagctaagtattggattcttgttttagaactaaagctaacaactgaggttttatttaatgggcattttgccgctgactacgtttccagacgaatnncaacttgtagctttataaatt

SEQ ID NO: 102228 - DNA, 127 bp, Glycine max
  Clone ID: PAT_MRT3847_63329C.1
gctgtgtcataactcgtaagaaaacaaagctcatcgaatcgaagtcctgcattttcactctcttccttgtcacttctcggcatgtacagagttgtcagcatcatcattcaggaaggcatctcaaggg

SEQ ID NO: 102229 - DNA, 401 bp, Glycine max
  Clone ID: PAT_MRT3847_6332C.1
ctcggggaatcgggcggaaattccccttcccccagaaagaaaactaaaccatcccaaccccccggaagaaccctaattcaacccaacccctaattacgtccccaaaaaactcttcactttagatcccgactattgacccccacccaatcggaaagggactatgggcagacccccaaaccaaattgaaaaacgggggtggcccccgttcaatttggcccacgggggaggcaaaatttcccatcggggaattttgaataccccccttaacatggggttttcaccccttcaaccagaaaaagggctctttaattgaccccccccaaaggagccccccctcgtcaccacaggaaattgttgccgaccctggccccccggggtcttttttgcccaaagggggaata

SEQ ID NO: 102230 - DNA, 272 bp, Glycine max
  Clone ID: PAT_MRT3847_63330C.1
aaaacgctgaatgaagtatttcttgatacatatggacatataaggggggattacaaagtaacccaacacaagggtgaacaacatttgttggtttgacatgccatcaatcatcaaagttctgaacatctagagattacagtaactcttttaattccagtcattcagtaacataatttacctcactaagcacgaggccagagggtgggaaaatgatcctgaaacaaaattacatgggataacttggagccaagcctttcataggggatattcta

SEQ ID NO: 102231 - DNA, 531 bp, Glycine max
  Clone ID: PAT_MRT3847_63331C.1
gaaactcaatccattttttatattagaaaatgcatggttcaattttcaagctttaatttggtatgtttgcccccaccaatagactacaatttttgtaacatagtatgacttgcaaaccaattgctacacaatgcgtgtgttcttgctatacttccatcagttgtctaagtcaataaaattgatcttaaaatctatgcaaaacttctaccaatcagtaccactgtcatggaaagtttttccagaacctcaagtttaggtccatagggaagaaaaaaaagtcaccaactccataattcaagtgctcactagcaatcttacaaacctggcaggaagtatttgcatgtcccaaaatgacaggtactttgaagttcatcagtggacccaaatttgctgcttcaacttgagagatggaaagaatgtgatgtgatctatgcaattgcatttgacaaacaagtgggccatttctccatctgaaaggcagcaaaactatcttggaccttgaccatattcaagtcagacaaaagatgtcat

SEQ ID NO: 102232 - DNA, 483 bp, Glycine max
  Clone ID: PAT_MRT3847_63332C.1
ctcgagccggctcgagtacggctgcgagaagacgacagaaggggggagcaagtaggaagaagaaagcgagtgacgagggaaacgtttaaaccatatatgttttgttgtttctagctccattctatagcaatggccacgtctgttcttagtcctcctttctttcatcctctgcatcaacttcaattctcgaaatgcccccgcctttcttctaaatcccactttcgccctcgcctcctccgctccatatcccaaagaaccattcgcgctatctccgcagttgccgcagaatcagagttaggtacacagcaggatcatgcaattgaagcagacatctttgcttgccctgtatgttatgaaccattgataagaaaaggtccttctggccttaacttacctgcaatctacaggtctggtttcatgtgtaagagatgtaagaagacatattctagcaaagataggtatctggatctgactgtaactgct

SEQ ID NO: 102233 - DNA, 737 bp, Glycine max
  Clone ID: PAT_MRT3847_63333C.1
agagatttcggcaagttcaagcccatgcacatgtatgacatagtggtgaagaacaagaacgcttttgaagttagggacatgtagggtagggtagggaagagacaagacaacatacatatagggaccaaacaaacaaccccttgcaaggccttcggccagggcaccctgcgtgctactactgtccagtgtcagtgtttgtgactttgtgtactactactcatgattcctttaattgtcccttttcattttcattagttagcttcgtccatgtgttggtttttgaatgtctgattttggacttgtggccatggagagggtggaagtctgtgtccatttcattgtgacattgacttgggtatttaattggactgtctaggtgagtgtgagtttatgttctgattataaattaatgtttatgtttaggtatatataggtagggtctgattcgtgattaatttgtgagactgggtgtcatttacgtgtgttctgtaaaattttagtcattctataatataaattttagtttttctctcaatactcggccttttgctcctatagagcgtgggaatgttgatcaccaatattgcagagcatattcatgagccggtgattgatactgcaattattcctattctaccaaaaattgtccaaaacaagtctgatttccctccgaggcagcggatatttctcctactagatgccccaccaacatccctttgtggtgctttggaacgttc

SEQ ID NO: 102234 - DNA, 735 bp, Glycine max
  Clone ID: PAT_MRT3847_63334C.1
cacgcctacgaatctcccattatattttgaagaagaatcagtaataaacatcttaatttgcatagtagtcgcagctccatattcccaaggtccctcacctctccatttgtccatggaacgacaggagattagacctcctgtgatgtctgtgccacaatttggtgggtgggaccaaaatgaaccaggagctatcgactatacagtgatgttcactcaagctcgtgaaaacaaaaagcatcaaaaggccaatctgattgaaataagaaggaaaagttttgggagtgaaagggactttgttaattccaatcatggtcgagcccctcgtcatcatgttcgcagtcatactcattctcatgctcatgaggatcatgttgtcatggggaaaaagaggattctaacctacataaattgttgtattaggcctaccatagccgctacttgattttcaaatcaatggcattctattaaagcactatggatccatgacatctaacatgtttatgtagatcagacaagtttgatagaaaccttaccaacaacttccatagctagtccgagtgtgctacatattgtacaatatcttattatagctactgtctctttttctctgagagctttagactattagcaatgtacataaatgagcggaaaaggtaatatgaatcatatcaattatctattgtaatatacgtatgatgctttccagaggaggtatatacgtattttactttattt

SEQ ID NO: 102235 - DNA, 286 bp, Glycine max
  Clone ID: PAT_MRT3847_63335C.1
ggctcgagcttgtttctgctgcaccaagtaaacaaagatttcgtttttgtgcaaaagggtttgcctttgggggtgtgttgttgtgagtcctgagagttcccgtcggatttttttttttttttccatgttaaatggtgtgtgttgagttgagttttgaggtgaagggttttgttttttttttttggggggggtggggggccgtcactactgatcctatccaggcgtcatcagaggcctcacaaacacccgcataggaataatgatacgtgcctccaactgacacatt

SEQ ID NO: 102236 - DNA, 228 bp, Glycine max
  Clone ID: PAT_MRT3847_63336C.1
aacgcttgactttatcgcatgtatcatgcgtgcatcaagtccaacaagtgtacatcatcaggcctcactattaccatacccgatattataccatgacaattacatagccccccatagcagtgttacacttcagttcacagcctaaaggatcactggttaactacacattcatccccttcatcctattcacactctacatctgattgcacctcaactgctatcactcag

SEQ ID NO: 102237 - DNA, 309 bp, Glycine max
  Clone ID: PAT_MRT3847_63337C.1
aattaacaccgagcacagggtaacaccccctccatgaaacctttgggtttaatggacccattaacaatgggcaaaaaaaagaatccctgggggaaaaataacaggggggggggaaaggaatttaatttaacgggtaagactaaaaccctgggggttttattgggggaaaaaaaaggtttcgtcaacaaaggggaaggattggaaaaagtttttaaagatcccttcagctgggaggagaagggggcaatcttcatttggaaaataggcattccagggggacatccatgcggaaaaaaagctgggggcaaa

SEQ ID NO: 102238 - DNA, 307 bp, Glycine max
  Clone ID: PAT_MRT3847_63338C.1
gttcaaatattctgtgtgctgagagcagtgaaagacctttgttgaaccgcttgatgttagaattgtacaagttggaaagtgatgttcttgttggacacaatatttctggatttgacctggatgttcttctccacagatcccaggcttgcaaagtagcaagcaacatgtggtctaaattatggcgcctcaaccgttctacaatgcctaaacttagaagaagcaacgtttttggttctggagcagaccctggtatcatgtcctgcaatgctggccgacttctttgggaaacatacttgtgttcccgtga

SEQ ID NO: 102239 - DNA, 2105 bp, Glycine max
  Clone ID: PAT_MRT3847_63339C.1
ccaaactcgaaacttttctgcatctcacactgtccgattcatcacaatcacatcatttattattattattattattattcggcaacaagaagcataagtctcttttgcgtgatgacgacgtgcgtatcgggcatcatcgtcggcgatccccctcatcgtcgccggtagtagcaatctccgtccccatggaaccgtaattccccaaaacggcaaaaaagtctcttcatgttcccgtcgtttacgtcctcccactgtcgttttcgcgttccgttgaattccccccacccttctcggaaaaatcaaaaaaattgggaaagcgtttttattccattccaatggggatgaagaaggcgacgatggatcacgtgctgctagcgtcgcaggagacgaaggaaacacgtgaggtgcggattcggagcctcttcgatttcttcgacagagagaatctcgggttcttggactactcccacattgaagcgggtctctcggcgcttcagattccgtcagagtataagtacgccaaagatttgttgaacgcttgcgatgccaacaaggatgggagagtggatttccaggagttcaggaagtatatggacgacaaggaacttgagcttgagcggggtttgcaggccattgatgttgcgcataatgggtgcattttgcccgaggagctttgggaggcgcttgtgagagcaggaattaagattgatgatgaagaactcgcccgttttgttgagcgtgttgataaggataataatggtgttataacatttgaagaatggagggattttctgctgctttaccctcatgaggcaaccattgagaacatttaccattatttggagcggatatgtgtggttgatataggggaacagactgttattccagcaggtattggtaagcacattcatgcaagcaggtatctgattgcaggaggagtagcaggtgcagcgtcacgcacagcaactgcaccccttgaccgtctaaaggtggtattgcaaatccaaacaacacaatctcatataatgcctgcaattaaagatatttggaaaaagggtggtttgttaggattttttcgaggcaatggcttaaatgttcttaaggtggcccctgagagtgccattagattttatagctatgagatgctgaagagcttcattacgagagccaaaggggatgaggcaaaggctgctaatattggagctatggggcggctgctagctggtggtattgctggcgctgtagctcaaactgcaatatatcccatggatcttgttaaaacaagactacaaacccatgcttgtaaaagtggaagaattcctagtcttggaaccctttcaaaagatatatgggttcaggaaggaccccgggcattttataggggattgattccttctcttcttgggattatcccttatgccggcatagatcttgctgcatatgaaaccttgaaggatatgtccaagcagtatattcttcatgatggagaacctggtcctctagtacaattaggatgtggaactgtatctggaactcttggagcaacatgtgtttacccgctgcaggtggttagaacaagaatgcaggctcaacgctcatataagggaatggctgatgtattcaggaaaacccttgaacatgaaggtttgagggggttctacaaaggaatatttcctaacttactcaaagttgtaccgtcagcaagcatcacctacatggtttatgagtctatgaaaaaaagtttggatttggagtgaagaaatttactgcttggtaattaatcttattgacatggctgaccgttggcacaactatacattggaaatggttttgcaatgtagacattgatgacaagaataaagtctacaaatacaattgattattgtgacaattgtctaaattcattcttatttaaatagcattaaattcttcaaaattcttgaggacaaaattggtttgtcccgcatggtgtttcattaaactgatatgaagcttcataccaattagctgaagttttgtatgatagagaagcacactatactcggttaggatccgattttgtagttgtactttgtcatatttagtggctcagattgatcgtctta

SEQ ID NO: 102240 - DNA, 207 bp, Glycine max
  unsure (1)..(207): unsure at all n locations
  Clone ID: PAT_MRT3847_6333C.1
ggctcgaggcattcaccccgcctttcttatgcanccctcacggcaacagcggcggggggaatcctagagatgaaagtatgttggccgcccgcacccagcagggcctccaagccaagctctaaagccgccccatatcggaagacggaaaaaccagacaagctcactctggctaagagccgacaggaacgcaggagaaaccgggccatc

SEQ ID NO: 102241 - DNA, 107 bp, Glycine max
  Clone ID: PAT_MRT3847_63340C.1
gcacttagtgctattcaataattacgataaaccaacaacgagtgtagttattgactggtccatgctggatcaggggatgaatagagatgagaggatttcggttgaag

SEQ ID NO: 102242 - DNA, 480 bp, Glycine max
  Clone ID: PAT_MRT3847_63341C.1
tacggctgcgagaagacgacagaagggggggacccaaatatggcctctaaaaactgtaaattccaagcatcatctttttgaaagggaccccattggagagggaagacaagattcatgtagctgccgagtacaaggttctgttgagtgtgtccggttccacattgctaagaaaagggctaaagttaagttggaattgggtgaggcatttcaccaatggaatttacataaggtaggtgaagaaattgggggttcatggacagagaaagaagagaagaagttcaaagatgtggtgaaatcaaaccctgcttcacttgagaaatgtttttgggatcatcttttcaaaacatttcctaagaagagcagagaagatttagtcagctactatttcaatgtctttcttttgcagcgcagagcatatcagaataggcatactcctgataacattgacagtgatgatgatgaatcagaatgcacaccatt

SEQ ID NO: 102243 - DNA, 298 bp, Glycine max
  unsure (1)..(298): unsure at all n locations
  Clone ID: PAT_MRT3847_63342C.1
acgctcaccagtttcaccggaccaatatcttgttttttttaactatccaagaaaaactctatctggatgtttttttaccagtacctccttacacgtcattagcttctctctaactccttccgctacaagngaaattacacaatgagaatcgcatatgaataaactttaccaacaaatcgaattattaaaacgagcacttgatctatacattggtacaaacccttctacttacattttacgataagattatggatttcatcatccaccttataaacttctttacattgattacacattc

SEQ ID NO: 102244 - DNA, 745 bp, Glycine max
  unsure (1)..(745): unsure at all n locations
  Clone ID: PAT_MRT3847_63343C.1
aacacaanataccattggatgaaaatgacacctgccctttggcatcataagaagctcaaaaacaaaaacaaaaaacagtttgattttccattaacacaaattcctgagcatgccgcgaacaaatagtaactagttgctttctgacaaacatacacgaggctctatctaagagggtgaatggaaaaccaaacatatactactaatgatagttctcaagtcttacaactgatgatttgatgtaaaaaaactcacatgtaccactcatgtgagtattgcaaactagtactagtacccatataacgaccatagttagaaggaggagcattagatggtgcagtgtatacagattggccaggaacttgataattgtatgggattgcgccagcatggggataccgatcaggatttgctgcatatggcgccctaacagggggaacctgcctacccaaaataacagctgaagcagcactaccagatgaatggagtgaaaagtgtctctcattcggccttggcctctttgattgagggcgtttaataaattctcctccacttctctttcgatctccttttgatttctctagttgaagaacccttttccgaagtgtatcaggagggtactcagattcaagcttgtattcttcaatacacttaattacagctctcagtgcggaaagctcttgcgcattggcatcattctttgcactagcaatgtcacgcacatttccagtcttaacttgtgagtttc

SEQ ID NO: 102245 - DNA, 175 bp, Glycine max
  Clone ID: PAT_MRT3847_63344C.1
ccacgcgtccgaatacgcgcggccgcttaactctattgattttgtttccttaacacgagcttgatgcatcgcgtcgatatgaacgcaccttcctcttggctcactgaaagatgggcattaaacgggcggtcttcggcgctgggatgagctcatgattccaaaaatgcactaccct

SEQ ID NO: 102246 - DNA, 306 bp, Glycine max
  Clone ID: PAT_MRT3847_63345C.1
gcaaccttccaattctcctgcaaattttagcataaattcctaatgaattgtcgccaccaacaatacatctatcaggcattacggtacaccgaatccacctggtataaacagtttgtgaatccgatactagtacaataccgggcttacatgaatggtaccgcgaacacacctcctttcttttatttcaatgagagcaatcccaagcgttacagcatgctggggcctcagtatcctggggaagaaactgggcactcataccacgctccttgacaattggatggaacaccgcttgcaggatctggtgct

SEQ ID NO: 102247 - DNA, 280 bp, Glycine max
  unsure (1)..(280): unsure at all n locations
  Clone ID: PAT_MRT3847_63346C.1
ctctctcctcagcgcgcgctcttttctcttctctctctctctatatcacagatctcgctctcccnaacgattcacctccgaaatntctcgcttttgttccgttcaaggttcaattttncagaactccctttaacccctttccccctctttcttccttcttttaattatntntttaaaaatattttgtttatgggtttttaatttgtaaaatcggacacgatcgctgttcgataatntcgattctctccacacnatggcantctctntccttagcnaccta

SEQ ID NO: 102248 - DNA, 319 bp, Glycine max
  Clone ID: PAT_MRT3847_63347C.1
gaaaaaaatgcttggggaaattaattgagggaagctagggattcaatgtggctgcaggagaaggcctaacctgaaaaagaagaagaactactccatttaacaacatggggtgcaacttcccttgctatcctaccttgagcgctggttggtgaaacacataattacattctcattcacccatttcttaacaagcctaatctaattaacacaaaatgggaaacgttcatgctctcttcccactaaaagttgcatttcgacacttcccattgcgccattgcttaacaacttcattgtacccttcagaagaatccaaagctaa

SEQ ID NO: 102249 - DNA, 243 bp, Glycine max
  unsure (1)..(243): unsure at all n locations
  Clone ID: PAT_MRT3847_63348C.1
agaacattnaccaagantnttgttgaagcttttnagccnanccgggancancgactggnactnnancttctgganccgcacatnccggtggtcccgcnatcctcgatnaagtcgagnagaagctccggatcaagcnggacaaactccagtcccacccggcatgtgntgagtgantacggaaacatgtcaanngcgtgtgtnttgttgattgtggatganatgagnaanangtctaaggacnaa

SEQ ID NO: 102250 - DNA, 105 bp, Glycine max
  Clone ID: PAT_MRT3847_63349C.1
ctcgagccggtcattttgatccaaatgacaaccacggggttcacccattatcgtatctgaatggctgttgagtgataaccagcacagcgtgggtcgcatatcttc

SEQ ID NO: 102251 - DNA, 199 bp, Glycine max
  Clone ID: PAT_MRT3847_6334C.1
cccacgcgtccgacggctgcgagaagacgacagaaggggagcgttgatttcaccatcgctgtggctatctttgtctctattgagggggccacttgcgagcactcaacctaaccattcaagttgggaagccacatcacaagagaattcaccagcgatggatccggatcttaaagaggtttctcagctcttggatcgcttt

SEQ ID NO: 102252 - DNA, 196 bp, Glycine max
  Clone ID: PAT_MRT3847_63350C.1
caagaaatatgtttatttccgacagatttttcccacagaaaaatttccataagaatttttcaaaaaaatgacggatcatacagacggtcaattatttcatcggaaagttcacatttctaacgaattataccgatggaatggggatcgttggaaaccaaaattccccaaaacataagacgataaccctagccatctg

SEQ ID NO: 102253 - DNA, 183 bp, Glycine max
  Clone ID: PAT_MRT3847_63351C.1
ctcgagccgggaggaccgagtgcatcccacgctcgggcgtactcatgaccgcatcaggtctacaaggtgaacagacctctggtcgatggaacaatgtaggcgagggaagtcgtgcaagatgtgatccgtaagctcgggaagagggttagctctgagggctgagcacgggggtcccagtcccga

SEQ ID NO: 102254 - DNA, 241 bp, Glycine max
  Clone ID: PAT_MRT3847_63352C.1
ggctcgagcactattccagattgactttgggaagaggcagtgcatcttagcctattggggtcgctgtggtttcactactgcgccttagggaacgagctaacgcagcggcttactcacgggggggacctgcgggatggacctctcccactactgctaggaccagtggaaagtgattcacagctggcgatatcctaatcttcaactatgactaagcgacccacaatgcggttgctgtggacag

SEQ ID NO: 102255 - DNA, 337 bp, Glycine max
  Clone ID: PAT_MRT3847_63353C.1
gccgtgtcgtctctttttttttttttttttaagaaactttaattctaaattaatgtatatacatgcgcactctaacaagtaaactaattgaaaggacaacaacaactaaaacctttgggtcacaatctggatatcgcagttccacatccatacgagccaacagtgccagtggcatgtataaacgctaaatattgcaacaactgagactcactcagtgtcaacaattgatctagcacaggctgcatcaactgcattaggccaatacacatgcagagaagcgcatatagctgcctttataggaccacacattcacttgctgtttcgactcgcatgtggc

SEQ ID NO: 102256 - DNA, 1325 bp, Glycine max
  Clone ID: PAT_MRT3847_63354C.1
gcaagatgtataactttccacttcgcagagataaaggatccctttcagaaaataatgtaagaggtcgaataatgcttgaaaagaatggaaaaaccacaaattcctttcctggggatgtgaccacagaaaggattgctgctcttcaggaagcatactggagtatggcatcagcactttctgaggcagatggaatcgattacactgatcctgaagagcttgagttgttggtcagaactcttatagatctggatgcaatggatggtaaacaaagtgtttctttgttggcagagtgttctagttcccctgatgtcagcactagacgggctttagcgaatgcattggggctcgaggcagcagcaccatccatgtggactcttggaaatgcagggatgggggcattacagagactggcagaagatagcaacccagccattgctgccgcagcatccaaagctatttatgaactgaaaaaacaatgggaaatagaggaaggcgatagctggaggttcatgatggatgaaaacaccatggaagaaaaaggaagcatagaatctgataatgaagataccaaatgagaaatattttaaacattgcactgtacagcatagttgcctcccaagtatactaactagtataggattaacccacgcaatccctagaaagaaactactgctagtgtaagatgccaatatgctgtttatgtgcatcataaaatgcagttctttgctcatattcatagatcttagatgcacatttgtgattatactcgtttgtacgaaagaactcatattgcttctgctacagcactttgggccgtttattgtcctaatatatatgatggaggcacctaaaatgctgcatagtttggtttgttggtagtactatagtaccaaggttgtttgagcattgcatacgtgcaagcaatagagcaatttcatcccttgatgttagattatttgaatattattagacaaaaggatttcattgttgaaataaacgtctactacaaagaaatgggattattttttttcctttgttgtgcccatcgtcttcttcttcttcccaaagcttgattgtgtctcggaaagggaagaagatcgaaattaacgggaaaaaaaactgaaattcaaagtgcaattaatgcaagtgtgatttgatcaaagggagaagacccagatgaggaaaatgagaagtgaggccaaaaaaagaggctttttgagtttgggtcagcagaagagtgatgcgtgagaaaggaaaaaagcatagaaatcttaaaggtgtcgaaatgatggaggagacgtgtgagttaagttcaactgtaaatt

SEQ ID NO: 102257 - DNA, 577 bp, Glycine max
  Clone ID: PAT_MRT3847_63355C.1
gcccttgcatgtcagcctcgtcgcgctacgttgtccgtccttcccggttggttctgccacccggcccaatggtccttgtctgtttcgggattcggcatgcgcctttaatttgctgcgcagccgtgtaccctgtccttctcggctctctggggtggtctgtgcctcgcgggtcaggtcccgggagcagtccgctttcttgacgaggtcgtagcgcagggcttccacccgaacctggttacctatgcgaccctgctcgatggactatgtaagataggagaaacgagatgcgccatcaagtttctgcgaatgattgaagacagttcaactgggcttaatgtggtaatgtacaacaccatcattgatggtttatgcaaagataaacttgtaaatgaggcttatgatttttattctggaaatgaatgctagaggaatttttcctaatgttatcacttacactactctaataggtggtttttgccttgcgggtcagttaacgggagcattcagtttattaaatgaaatgatattgaagaacatcaacccgaatgtttatacctatgctatattgattgatgca

SEQ ID NO: 102258 - DNA, 707 bp, Glycine max
  Clone ID: PAT_MRT3847_63356C.1
ggaaaatgtccatggactcagatgggctatggcaatttggtttttaattggtgcattgattgttatttatttggaataccatgaaaggcagcgaatagggcggcagatatctggaagaggcaattgggtgcttggtaatcttgaggaagatgattcagttgatctcttgaggccaaccagaacaagtgcagataaagagttacagccctctgcgagaatggaagtccagttagaacctttgaacagatgaatttacatgcattaagttctgatagacagtgagcccattttttgcaaacttcaggttattctgcgagctggcaggcttctttattggttatgaggtgttgttggaggtgaaaggggaggcacttatcgatctctttttttgacttatgttgctttctagtttccatgtagagtagttttcctgcagcatatagtgcgtatagttatacatcttcaacagaataggttatatagttacttctactgtagctgttactctgttttttttttttacttcttcccaaaatagaagaaatcaaactttataaggtgaatgcttttttgtggatccatgtaggttctgaatggttagtttgatagtatcttggatgatttgggacatggagttttatctgaccaaaggcattgttgtaaattatgagattcagaaaattaatacagcataattttttatcgtc

SEQ ID NO: 102259 - DNA, 320 bp, Glycine max
  Clone ID: PAT_MRT3847_63357C.1
gctacacgttcaaatctaaatatggttcaaatgcttccaaacagatgggaatggaaggactgtatagctgacagatcttaattatctttattataaatatgggcaaaatccatggaatgatagtctcagcagacctgttacagacctgcttactattatagcaggtgctgtaagaggcattactagcaacatatgcgatcttttagaaagctatctcatcatggaatgcttacaataatcaactcagggaacttgagcaaacatggaatgacattgaatgagcatattgagtacttgtagcgaaagatatgcaatatgct

SEQ ID NO: 102260 - DNA, 224 bp, Glycine max
  Clone ID: PAT_MRT3847_63358C.1
gctcgtaggagatcatgatgccaagtttttacagagacataaatgacacgtgattgtatcattagagtatatagactaaggaagcagtctggagagaatcgcagctcagagggttgcgtcttggattcagataataacaatagctatatcatgtatgccctactgcatgacatatgctaccatgatctagtatacttcttatacgatacagcaactgtgatata

SEQ ID NO: 102261 - DNA, 402 bp, Glycine max
  Clone ID: PAT_MRT3847_63359C.1
ctcaatataagaccttctaacttattcttctcccatctattttataagcaaccttggggctttccaaggtagtagcattctcacacaatggcctcgtgttgctctcttctattgctctccttaatattccttctttcatcatctgtctctcatgcactttccaatgccgaagtctctttcattgctcgtcgccaattgttgcacttacacgagaatgatgaattatctgacaactacgtagataattatgaaacaaatttaactttctccaaccccagactaaaacttgcatacattgcacttgaagcattgaaaaaagcaatatactcagacccatcaaatttcacagctaattgggagggccaaaatgtttgctcttataatggagttttttgtgaaaag

SEQ ID NO: 102262 - DNA, 255 bp, Glycine max
  Clone ID: PAT_MRT3847_6335C.1
gaagtttgcctagaaagggcttcccggtgctgatggagaggccgagacccttctgttggacaggctgccctgttcctgggtgaggatgggcttctgcctggcactgggggtggagggtgcacacgaatggcccgccttgaggggtcatggcacggaatatgaaagcctcctccacctccaacacccccaccttggaaggagataaggagggggccccagcaaaagccactggacacacagctctgcttgacgagg

SEQ ID NO: 102263 - DNA, 379 bp, Glycine max
  Clone ID: PAT_MRT3847_63360C.1
ctgatgcaacatttttaagaactgtagttgtgatcgatcaacgattcttctgcagaatgttggtctggttgttgcttcatttattattgccttcatgttgaactggaggataacgcttgttgtattggccacataccctttaatcattagtggtcacattagtgagaaactatttatgcaaggatttgggggcaacctgagcaaagcatatctaaaagccaacatgttggctggggaggctgtgagtaatatccgcactgtggctgcattttgtgctgaacaaaaggtccttgacctttatgctcatgagcttgtggagccttccaagcgttcattcaatcggggccaaattgctggcatattctatggcatttcccag

SEQ ID NO: 102264 - DNA, 3392 bp, Glycine max
  unsure (1)..(3392): unsure at all n locations
  Clone ID: PAT_MRT3847_63361C.1
gctcgagcggctcgaggtgcagcctggtaatacgctgttatgcacgagggttaaggcccaattaaatgaggtaaacactctcttcccttcacttctacattatgtctttcgtatctaagtttgttcttaaatgtgaatttggtgaagagggcaacttagagggaaaattgtggatttataatcattgattggaaaattaacaattgagactttgatacatttggactctgtttggataaacttcttcatacgtacttatagagaagaaaatgaacttagcttatcctgtaagctaaaatcaactctgcaatctaatttctccaaaacctgagatgcataagttgattttagtttaatccattttacctttttaatttcttcctcaagtgtttttgaagaagttcatccaaacatcactagaatgtgtaaacttgttaaaatcttctcctttgacacacatattggtctcatctttttggcttcaacaaggttgcccttgatagttcctccaatgctacttctcctcctatgaaagccaaatcaaaggaggaaccacccgcaaagcctttagcagaaccatcttcttcagtgttggcaactcaagaatcggtctctcagtttattactcaagttgcaagtcttgtcaagtaagcagatgcttaagtcttgtttccttctattagtaatagcaaatgtataagctttttgctgcatgattggagtggagcaatcaactatgaaaaacttcatgtccaattttctcctgcaggcttgttgattcaagagacattgtggagttgaagctgaagcagcatgacgttgaagtaacaatcaggaaaaaggaggctatgcctcagccaccacctgctcctcaaccttctgtttcatccaaaaacaaagctctccacttgtgttttgagacatggcatcctcgttggcacctgctaccaaagccgccactaatttgcgcctcacacactctatccgcttctctcctaaacccaacaacctacgctcggccacaaagcctggtaataccatgttatgcgcaagggttatggcccaattagatgaggatgccctacattgtccgtgatggaggagatagaccccagaagtggtttctgcagctccaattcaatcttctacagcaagcgtaagcccctcccactccctcccaacaacgccttagacgtcaccaccttcatctcctcccgcgcccaccgcgccaccacagccttcgtcgacgccgccaccgcccgccgcctcacctacacccagctatggcgttccgtggagggcgtggcagcctctctctccgtggacatggggatccgaaagggcaacgtggtcctcatcctctcccccaactccatccacttccccgttgtgtgcctggccgtcatgtccctcggcgccatcatcaccaccaccaaccccctcaacaccacccgcgaaatcgccaagcagatcgccgattccaagcctctcctcgccttcacgatctctgatttactccccaaaatcaccgcagctgcaccctctctaccaatcgttctcatggacaacgacggcgccaataataacaataacaataataatatcgtggccactcttgatgagatggcgaagaaggaaccggtggctcagcgcgtgaaagagcgcgtggagcaggacgacacggccacgctgctctactcctccggcaccacggggcccagcaagggcgtggtatcgtcccaccgcaacctcatagcaatggtccagatcgtgctgggtcggttccacatggaggagaacgaaaccttcatatgcacggtccccatgtttcacatatacggcctggtcgccttcgccacggggcttctggcttccggctccaccatcgtcgtgctctccaagttcgagatgcacgacatgctctcctcgatcgagaggttccgcgccacttacctcccgctcgtgccgcccattctggtggccatgctcaacaacgccgccgctatcaagggcaagtacgatatcacgtcgctgcattcggtgctctccggtggggctccgttgagcaaggaggtcatagagggctttgtggccaagtatcccaacgtcaccatccttcagggttatggtttgacggaatccaccggcgttggggcctccaccgactccttggaggagagtcgaaggtacggcacggcggggctcttgtctccggccacccaggctatgatcgtcgatcctgaatccggccaatcgcttccggttaaccgcaccggggagctctggctcaggggtcccaccatcatgaaaggttatttcagtaacgaagaagcaaccacatcaacccttgattcaaaaggatggttaagaacaggggatatttgttacattgacaatgatggattcatatttattgtggatcggttaaaggagctcatcaaatacaagggatatcaggttcctccagcagaactagaggccttgctactgactcatcctgctattttagatgccgctgttatcccgtatccagataaggaagctgggcagcatccaatggcatacgtggtgaggaaggctggaagtagcttatcagaaactcaagttatggattttgttgcaggacaggtggctccgtacaagcggattcgaaaagtggcatttatttcctccatacccaaaaatccatctggcaaaattcttcggaaggatctcatcaaactcgcaacgtctaaactctgaatagatgagctttttcgtaatatattttttctatcggagttggacaagtgaggaaataatctttagctccttttttgctgtaattttctggcttgtttacttttgctgctttcatattatctgttctttgttcaacagtctattgtaatttgtagagaacaaagtgctgtgagtacaccttataggcaataaaattgtctctttgtaatttcttttttcaattggaataacttctctatcagtttgtcatcagacttgtagaccaatatttaaaatagatttctcaaaaaacatagaaaaaggctccgtacaagcggattcgaaaagtggcatttatttcctccatacccaaaaatccatctggcaaaattcttcggaaggatctcatcaaactcgcaacgtttaaactctgaatagatgagctttttcgtaatatattttttctatcggagttggncaagtgaggaaataacnttagctccttttttgctgtaattttctggcttgtttacttttgctgctttcatattatctgttctttgttcaacagtctattgtaatttgtagagaacaaagtgctgtgagtacaccttataggcaataaaattgtctctttgtaatttcaaaaaaaaaaaaaaaaaaaagaaaaa

SEQ ID NO: 102265 - DNA, 397 bp, Glycine max
  Clone ID: PAT_MRT3847_63362C.1
gggacccggggggggacccggaaatcccgaaccggaaccgggagggggaccagtttcccctaaagggagggggataaaagctgggcgaaaccagggcaaaagccgttcccggggggaaaatgaaaaccgctcacaatcccacacaaaaaacaagccggaagcaaaaagggaaaagccgggggggcctaaagagggagctaacccacataaatgggggggggctcacggccccttttccaggggaaaaacctgaacgccacagggggaaaaaaaaaacggcaaaaccccggggagagggggatccccaatggggccccaggggggaatttctttcaaaaaaagggacgggaaaaaagggaaagagccaatcaaccctatctggccctgaaaaaaaaga

SEQ ID NO: 102266 - DNA, 349 bp, Glycine max
  unsure (1)..(349): unsure at all n locations
  Clone ID: PAT_MRT3847_63363C.1
ttnctacaatagcgatgcggatgaggcgccactctatcgtttccatttgcctgcatgcctttggtattgtggggtgtggttcgtttagtggtgtcaagtcttgcgaacgtgagggtgcatgagtggtaatcgggatgtttttgttgcacggctccatgcttgcgcatcacaattgataacaagccaatcaagttgcaaatatgggatacggctggccaagaatcattcagatctattacaaggtcttattatagaggggctgcaggtgcactgcttgcttatgatataaccaggacgtagacatttaatcacttggctagctgcctggaacatgcaacacagcatgcaa

SEQ ID NO: 102267 - DNA, 738 bp, Glycine max
  Clone ID: PAT_MRT3847_63364C.1
ggacgcgtgggtttgttccctattcgtgtgcgtacgttgttcgtgatcagtatataaagacaaatgagcagtggtggaagggctgtgaagcccaaagaggaggagcaagatggcatgtctgtccactctccttgcaaacctcctccttcctctgcttcctctctccccaaggagcagtcacaggttgaattggagctgagattgttggaagctcttgagatttaccctccaatgaaactacaaggagtacatcgtcactttgtcctttatggtctgatggaatttctaaggaggaagtttgacagacaattttcttctgaggaggtcctacaattgctggatcggttctacaacttagaaatgctgaaaacagatgatgacgagattgatttgcttactcacgaagaagaattttccttgcctcagagttactttgtcaaggaagaaccctgagcaacaatttttggagtatatacattgtttgtttcaatcgttattcatcttttgatgtgtacagctggttattctattattcctttcccctcttcccacgagggggagcaagagggcatggccgaccccgccccgtgcaaacctcctcattcctctgcttcctctctccccaagtcacaggttgtcttggagctgagattgttggaagctcttgagatttaccctccaatgaaactacaaggagtacatcgtcactttgtcctttatggtctgctgaatttctaa

SEQ ID NO: 102268 - DNA, 137 bp, Glycine max
  Clone ID: PAT_MRT3847_63365C.1
ttcggctcggaattttccgtcacctgtccgacgtcgttttggcattccgttagcggcgccagcatgtcgtccggcggcccctccacgaccttctccacaccagcccagggtaaccgtgcccaacacactgcgtcgcg

SEQ ID NO: 102269 - DNA, 1501 bp, Glycine max
  Clone ID: PAT_MRT3847_63366C.1
tcatgatgagcattttgtggatggttccgtggagcgtgcaagtgaagctgattcagggattcaggagggagatcagaatggttcgatgaagcctaggagatatctgccgaagaaaaaggagataaacatcgaggggaagatgatggtggctgatggaattgatgcgtcgcagggagaggttgatgatagtgctggtgattggatgccagctgtcagtcggagtactcataggagatatctaagaaggaaagctagacgcgagtatcatgagttgttgtcaagtaatcaagatcagcaacagttggaaggaaatgttgatggtagtgttggtgaagatgctagtgctttaaatcagcctgctcatcacaatgaagaacaacatattgaaaatgctgtgacagaggatgataacgtggtaaaagagaacaaagacaatgaaagtatctatgaaattatgcagcaaatgaggctgcaagaaggttcacttgaagttcttgatgaggaaagtaaaccaagttcatctcctgaagaactccagtcagacaatgctggattggtggaaaccgcatctgatggcaatgcaactgtggttaataaactatgtgacagtaggacagatacaattgatggccaatcaaatcaactggagattgcaagccagacaagtgaagctgctgatttttcatatgcagatgatgatgatagtgaccaaagttggatggttaggtctttgtctgaatcaagtgtagcctgtataactggtgactttgcgatgcaaaatgttcttctacaaatgggtttacgcttgctggcacctggaggaacacagatacaccagctgcacagatggatactcaagtgtcatgcctgtaacactgttactgctgagattgggaggattttttgtcccaaatgtggaaatggtggcaccttaaggaaggtagcagtcactgttaatgaaaatggaatagtattagctgcccgtcgaccaagagttacattacgtggcacaaagttttcattgcctttaccccaaggtgggagggatgcagtgacaaagaacctcattctccgtgaagatcaacttcctcaaagggtactttatcctaaaatgaagaaagccaataagcaggatgatgacttctttacaccagacagtgtcttcagccaccacatagacaagaaagctcctttccagcctcctgtaaggaaagcaatggcagttttcagtgggaggagaaatccaaatgacaatcactactcacgctctaaagcataagtagtggatctccaaaattttgactggcttctattcccccctcaattttgtttttcattgcttgactttgaaagttacctggaaatttgttttaagctatgacaaacatgattaaaaaagcgtgtctcattgtctctagatatctggaaatctacgatttattttaggtgatagtgaaagaattaatttcatgagattgggtttcagtttgcccaaagggag

SEQ ID NO: 102270 - DNA, 263 bp, Glycine max
  Clone ID: PAT_MRT3847_63367C.1
gataagacgacagatgggtacacaggtagcggagagacaagcaatagctgatacattcattaacgatacttcaatgttcgcatgcttactttacacaagagctgacggacagggctaaaattcaacaggagctgatagcactgaaatccatgttctggattctagcccacagatagacagacaagcctattatctccgacatcgaatgagtcaaacaaagccggaacccatacattgaatggagacaaaaggaaccggtgatg

SEQ ID NO: 102271 - DNA, 1075 bp, Glycine max
  Clone ID: PAT_MRT3847_63368C.1
atgagtcaacaattaacaagagaagaacaggaacgtaaatatcctgaatatacatgggatttaacaactatttttaaaagtgatgaagcatttgaagaagcttttaaaagtattgaagctaaaataggtgaagaagaaaaatttaaaggtcatcttggtgaaagtgctgaaacattatatgaagcgctaagtcttgaagacgagttaggtacaaaattagaaaaggtatatgtatacgcacatttaaaacaagatcaagatactgcaaatgataaatataccggtttagaagcgcgtgcacatcaacttgttattaaatatagctctgcatggagttttttagtacctgaaattttacaactagatgaagctactattcaatcttttatcgattctaatgatgatttaaaacgatatgaattcgatttgaaattgattaatgagaaacgtccacatatattagatgcgaatacagaaaagttattaacagaagcacaagacgcactttcaacgccttctaatgtatatggaatgttcagcaatgcagatttagaatttgaagatgctatagataaagatggtcaagcttatcctttaacacaaggtacatttatcaagtatttagagtctgatgatcgtgagttaagagcttctgcttttagaaatgtttataaagcatacggtgcgcataataacacgctaggtgctactttagctggtgaggttaagaaaaatgtatttaatgctagaactcatcattatcgttcagcacgtgaaagagctttaagtaataatcatattccagaagctgtttacgataacttaatcaaaacggtccataaatacttacctttattacacagatacacgaagcttagacaagagttactaggtttagacgatttaaaaatgtatgatctttatacacctcttgttaaagatgtcaaatttgaaatgccatatgaagaggcaaaatcctggatgttaaaagcacttgagccaatgggagaagaatacttaaacgtggttaaggaaggtctagataaccgttgggtcgatgtatatgaaaataaag

SEQ ID NO: 102272 - DNA, 3626 bp, Glycine max
  Clone ID: PAT_MRT3847_63369C.1
cggcaccaggcattatgcaacttacttagcattgtccactcatttcatgaaatagaagtaaagctgctcttcaatgtcatcttgaagatattaccctattccaaggttcatggatggatggaccaatccagtgaaaggatgaatgcctacagagagcttaaagcttaccctatctcgtggttctttgtacccctgagagcaacatgggggttgccaatttctctgtcttcctacttattatttctctaagtttcttccagttgctgagaatttctgaatcaaaattacccaaagaagaagttgatgctcttaaagaaattgtgagcacaatgggtgcgacatattggaagtttgatgctgattcctgcaatattgaaatggttggagtaacactagaaccaccagatgaatcagagagaagaattggttgtgattgcagttttgaagacggcactgtctgtcatgttgtgaacatgactctcaagcgccttagtctaccgggcatactcccacctcaactggccaagctaccttttctccgatttgtagatttggcttacaattgctttaccggcacgtgtcctgtgctgcgggctgctctggtccccactgcagtctctcttcttgtgtcccggcttcctggggtcaccccgaagcatctaggaaatattacttctctcacatacctgatgctcgaagcaaaccaattttctggtgatgttccaactgagcttgggaaactaatcaacttgcagaccttggttctgtcatccaatcaattgactgggagctttccaccttcacttgcaggactacaaaacttgaccgactttagaataagtaataacaattttactggaaccataccaaattttatacagaattggcaacaactcaaaagactagaaatgcatggaagtggactagagggacccattccatcaaatatctctctcttgaataacttagaacagctaagaatcagtgatatagaaagtcctagccaggactttccttttctggggaacatggcaggcttgattactttggttttaaggaattgtaacttatctggtgtgataccttcatatatctggacgatgatggctttggagaatttggatgtcagttttaacatgcttgttgggcaaattccagcagttataagtgcaaggcgtctaagatatatctacctaacaggtaatattcttagtggcaatataccaaattcagtcctgaaggacggaagtagcattgatctttcatacaacaactttacttggcaagatgatgaccagcctgcttgtcaggacagcatgaacttgaatctgaatttgttcagaagctcgattaaggagaataagttagaggagtatgttccttgctccaagaatttcatctgtccacggtattcaagttgtttacatgttaactgtggagggaaggatgtaaatgtaaaagatgataaaggagaaaacctttatgtgggagatgatgttcagggtggcactgcaacttatttctacagttccaatgatcactggggatttagtagcaccggagactttatggatgatttcgatggccagaacatacgttacacagtatcatctccatcttcaaatatgcctgaattatacaaaacagcacgtatatctccaattacacttacttatttccataattgcatggaaaatgggaactatactgtaaacctccattttgctgagatacagtttacaaatgataaaacatttagaagtcttgggaagcgcatatttgatatctatgttcagggaaaactgattcgcaaaaattttgatatagagaatgagacaaatgttgctgagaaaccactggtactgcctatatacaatatcagcattacaaataatgtcttggagattcggttctactgggctggaaaaggaactactagaattccggatgttggagtttatggtctccttgtatcagctttttctgtggtttcaaattctagagtttgctcaaatggagaaaagaaagtttctgtttctataataattgcaattgtagttggtgctctatgcttagtgctgtttacatctggattcatttggtggaagtggaaaggctttttcagagggaaactgcgaagggcaggtacaaaagatagagatactcaggcaggcaattttagcttggagcagatcagagttgctactgatgacttctcttctgctaataagattggggaaggtggttttggtcctgtatacaagggtcaattgctagatggtacttttatagcggtcaagcaactgtcatcaaaatcacggcagggaaatcgtgaatttataaatgaaataggcttgatatcttgtgtgcaacaccctaaccttgtaaagctttatggatactgtgctgaaggagaacaactcttgctggtatatgagtacttggaaaataacagccttgcccgagttttatttggtagtgaaaacaagcagcttaaattggactggcccacgaggtttaggatttgcattggcatagcaaaaggtttagcatttctacatgatgagtcaagattcaagatagttcacagagatatcaaggcttctaatgtgttactcgatgacaaattgaatccaaagatatctgactttggcttggctaagcttgatgaagcagagaagacgcatatcagcacccgagttgctgggactataggatatatggcaccagaatatgcattatggggctaccttactgacaaggctgatgtttacagttttggagttgtggcattagaaattgttagtgggaaaagcaataacaattatttaccagatgatggaagtgtttgtcttttggatcgggcatgtcagttaaaccaaactcggaacttgatggagctgattgatgaaaggttggggccagaccttaataaaatggaagtagaaaaggtggtcaaaataggtctcctgtgctcaaatgcttctccaacacttaggcctacaatgtctgaagtagtgaatatgcttgaaggacatgcagatattcctgatgtaatcccagaaccaagtacctacaatgatgatttaaggttcaaagccttaaggaatctccatcaatatcaatcaaaacagagtttgagtggaaaccagagccagagttcaatgacacatacattcacctcagcatctggtggtaatactcacactactagttatattgaggatcatagttcagttgacagtagttagttttctcctttcaccaacttgacgcactttaccagatagcagtggtagctccagatcttagggcttgaaaattttgaccagcatggaaccttctattttcacttgtgtagttttctgctttctgaagaggtctccaaaggagtatgagaagatttttcctttcttccttatgtcacccttatttgatttgattttactttttttgtttctttaatgtacaaatatattgctacaaataaagcaatctctaaatcataaatttaggttacttctttatttatttctatgtgtatccatataacggaagttcaattcatacctgatgtaaaatattataataaattataaattagattgtgtatgtttcaaacggat

SEQ ID NO: 102273 - DNA, 1936 bp, Glycine max
  Clone ID: PAT_MRT3847_6336C.1
cccgcccgctctgcctcccacgcgtcccatcccctgcacaaacagctgggcttcattattaaatcttcctcaaccagcaacttcaacttcctcgttccccccttcattaccctcgtaactcgtaacggcttcataccggacctttccttttctgtttttctctcaacttcaaagttagaatcttttgttcactcactgagccatggatggcgccgagttcgacgccgcgtttgggttcccatctgagtttccctacgagtttgactcggtcgggactgaaccggttgattccggttcgaccgggactgagagtagcgacgatgaggacttcttcgccggcttgactcgccggctgagtcacacctcgctcaatgaaacaaggaaggaacaacacttcactgttcccatcggcaacagtggccaagctgagagtcagaagatgatggctcgtggtttggccgggtcacctcagtctatactgagtgggatcggaagctggtcgggtcggagtggcggctccggcgacggaagccccaacgggtcttctcgcgttccgtcgccgacgacgacgccgtttaaatccactaacgacgcttgggatgttctgtacgcagctgcaggggaagttgcgaggttgaagatgaacgatttagtttcttcgaagtatgatttccagaaccgtggagtgctgggtggttttcctccacctgttgcggcggagaatgtatttttttccaaaccagggtgtttctcaggttcgataccagcaagtgagaccagagcagatgctgaagcagcagtgtggttcggtttggggcaggcaagagaaggctggttgggtatctcagcagcaccaccagccacaggttcagaacagggttcgtgatttgcgtgagtttgggtacgactatgaagctgtgaaatgcacgcgcgctttgcctcgtcctgcatggcaccctcttcaagtgaagaaccagaatacccaacacgtgcctcatttcggatccgggtcacgacccgggttacaagctggatccggtgctaccaaaaggggttgcgctggaacaggggttttcttgcctcgtcaatatggggcccctccggattctcgcaagaaaacatgctgtgccgcacctgttttggtcccagctaaggttattcatgctctgaacctcaacattgatgaactaaatgccgctggccaaccacgcttctcaagtgcttttggcgtgcttgtagatgctctgctggcgaggaggaatgctcttctactgcagcagaagttaagcatgcggcgagaagaggcagcaaattatgaagctcttcgcctgccgcaggaatggacgtactgactccttcgataatagttcgttcaaacaagattcaattaaaccttggtggagaaagaaagctagtgaaattagtaggattgtgatagggaagttggttttttttataatataaagatgagattcaagaatgtgtttgggtagtttagtggcaataaatcatccggtttttgtgagagatgcagcttttgggatctgttagttgaagaaacagtgaaagatagtagtttaggggaagctttttatttttttttttacttttatgaagaatatatttataatttgtaataagtggggttcgttttcttccatgctaatgttaaattaatgttgatggaagaagggtaaagaagggcttattgtgttggaagagggttcagagtctagctggcaaaagaaggagggtgaagggcttattcgatgaagattgctcataactctttgtaaaaaagctcttgctcgtaatagaacagtatgtaataagtaagttatactaaatgtagtaaatgcaagtcttgtgtaattcctcaaaatcctccatatctctattctcttactgttgaaagattgcattttaagcttttgtt

SEQ ID NO: 102274 - DNA, 2791 bp, Glycine max
  Clone ID: PAT_MRT3847_63370C.1
tcgcggacgcgtgggctgattcgcaaaaattttgatatagagaatgagacaaatgttgctgagaaaccactggtactgcctatatacaatatcagcattacaaataatgtcttggagattcggttctactgggctggaaaaggaactactagaattccggatgttggagtttatggtctccttgtatcagctttttctgtggtttcaagtgagtactaccccccattgcaagatgagtgtaaatttattttgttaaatttgaagtgtttcaccatcatgttactattaagtacagctgcatatacaaatacaactgctactattaaaaaaagaatgctcttaaagaaagagaacctcatgaaatagtagttctattctcattttctatttggtatgtttgtttttgtttcttgaatagcacttttcatatgcctttcttgatcttgttagcaggatcagatgcagtgtctatttcttatcactttttagttagcattccttatactcaatatcatttatacagatgttaattgcagatgagatttaatagttttgacgccaatctttattatggctggtgctgtataaaaatcagtgtgattccttgctgtgctttgtacagattctagagtttgctcaaatggagaaaagaaagtttctgtttctataataattgcaattgtagttggtgctctatgcttagtgctgtttacatctggattcatttggtggaagtggaaaggctttttcagagggaaactgcgaagggcaggtgaagtcattttattatactttgaaagttgtacacagcaaagtttccattcgggagtgagaataaaagtttgcactgcctaattatatcgttttcaagcaatattttctgcagatctgatcagatttgaggcttttgtttatagttggaacttagataactgttgattaatacaaatttctcttggcttacatggacaggtacaaaagatagagatactcaggcaggcaattttagcttggagcagatcagagttgctactgatgacttctcttctgctaataagattggggaaggtggttttggtcctgtatacaagggtcaattgctagatggtacttttatagcggtcaagcaactgtcatcaaaatcacggcagggaaatcgtgaatttataaatgaaataggcttgatatcttgtgtgcaacaccctaaccttgtaaagctttatggatactgtgctgaaggagaacaactcttgctggtatatgagtacttggaaaataacagccttgcccgagttttatttggtgcgtcattacttgtccatgaatttcttcatatctcatgtgtgaagtggtcatatgagaaactcaaaaagaataaatcagatattagtggtttaacttgattttttttttttgttaattttctcaaacaacttgacaagatgaaaatagtttttttatcctttttttaacaaccctataattgctctaaaatggattgccctggtataatcctctaaaatggattgtcaatgctcatgccctgatataatttcatttcttgattgttagaagggtgagtaaaagtttttaatatgatttgaatcaaataagcagctgtaatggcccttgatgtttataggtagtgaaaacaagcagcttaaattggactggcccacgaggtttaggatttgcattggcatagcaaaaggtttagcatttctacatgatgagtcaagattcaagatagttcacagagatatcaaggcttctaatgtgttactcgatgacaaattgaatccaaagatatctgactttggcttggctaagcttgatgaagcagagaagacgcatatcagcacccgagttgctgggactataggatatatggcaccagaatatgcattatggggctaccttactgacaaggctgatgtttacagttttggagttgtggcattagaaattgttagtgggaaaagcaataacaattatttaccagatgatggaagtgtttgtcttttggatcgggcatgtcagttaaaccaaactcggaacttgatggagctgattgatgaaaggttggggccagaccttaataaaatggaagtagaaaaggtggtcaaaataggtctcctgtgctcaaatgcttctccaacacttaggcctacaatgtctgaagtagtgaatatgcttgaaggacatgcagatattcctgatgtaatcccagaaccaagtacctacaatgatgatttaaggttcaaagccttaaggaatctccatcaatatcaatcaaaacagagtttgagtggaaaccagagccagagttcaatgacacatacattcacctcagcatctggtggtaatactcacactactagttatattgaggatcatagttcagttgacagtagttagttttctcctttcaccaacttgacgcactttaccagatagcagtggtagctccagatcttagggcttgaaaattttgaccagcatggaaccttctattttcacttgtgtagttttctgctttctgaagaggtctccaaaggagtatgagaagatttttcctttcttccttatgtcacccttatttgatttgattttactttttttgtttctttaatgtacaaatatattgctacaaataaagcaatctctaaatcataaatttaggttacttctttatttatttctatgtgtatccatataacggaagttcaattcatacctgatgtaaaatattataataaattataaattagattgtgtatgtttcaaacgg

SEQ ID NO: 102275 - DNA, 224 bp, Glycine max
  Clone ID: PAT_MRT3847_63371C.1
cagatttttgctacatacaagagattaactgtgcatcatgggactactgatacgagagcgacacctagtacccatgtgcccattacaaagcgttctatgggcgaggaccaatccaactatcatggacacttcaactaccgacctatcgggcagagcatcggatcagatggattgaacgctacagagacagcggccaatgaccctgttgtgtccttcatagacag

SEQ ID NO: 102276 - DNA, 458 bp, Glycine max
  Clone ID: PAT_MRT3847_63372C.1
ggctcgagcggccacaagtgcaaaggcaacccccatggcacatatagatgaaacgccaggggcgaacatggtattggatcatgcagctgcttccagaaactgtctataaaacacgggaaagcgaataactgctaccgtaccacgtgttgctgagttaatacacttcgatggtacgcatggaagtgaagactatgtgaactgaacccgagcaatcaaggagcctctgtcggaagcgcagagcgagcaacggggaccgccatcagcatccatgaagcgatacggtctgtggcggaggactatgagcctagctcatctgtatctcaacctcgtagatacgatcgaatacgtcatatacactcgctaacactatcactgtcgacggtcgacaagatttatctgacgcatgatagcattctacacatagggcagagactaatatgcaccagaacaggaaggtg

SEQ ID NO: 102277 - DNA, 184 bp, Glycine max
  Clone ID: PAT_MRT3847_63373C.1
gatacatatcatagatatatactgcgagcttatatatataatatgagaggagacatcaattgtctctaaaaagtaattgttttggagttacttctcttcgtcatttattatattccaagtaaatgaatgatgaagattaattccatagaataaaatcgtccagaaaaattatcccctaagctta

SEQ ID NO: 102278 - DNA, 239 bp, Glycine max
  unsure (1)..(239): unsure at all n locations
  Clone ID: PAT_MRT3847_63374C.1
tgacgttgatgcacactgtcacgcgatgacttgaatctctgtacagtcgtgacgccctcgcccttttttttttttttttttttttttttttttttttttttttttttttnacaaccaaagagcaggggcccccgtttcatcgggaattaaaacacaagggagggaaaccctttcccagaagaagattccggaaaaattcattattacacatttttttttttaataattaaattttcccg

SEQ ID NO: 102279 - DNA, 867 bp, Glycine max
  unsure (1)..(867): unsure at all n locations
  Clone ID: PAT_MRT3847_63375C.1
tcgggtaaattaggaaaatgaacaatacattattacagtgattcgattacaacggagcgttgcactgaatcggcaagaaaaagccaaacacaatgaattgagagaagaagaagaagaagattattaattacaataaataaataaatcgccgtgcaaataaaaccgttggatcgatcgagaatgagaatgagaatgagaatgaaagtgtgcgtttgatgagtatggaggaacctcagttccgcgaacatcccaaagccaaaatcgccaccattccgccgtcgcagcactccgacggcgccgccgccgaattgcgcggtgccgattgcaacctggcttccctctgcgagcatgtccaaatcgaaggcttcaattcgggttccttctctgatatcgtcgtcaatgccatgggttccacttatcacctccaccgtcttatcctctctcgcagttcgtatttcaggaacatgcttcatgggccttggaaagaagccggtgctcctgttgtggctcttcatgttgatgataagaatgttaatgatgaggcaattgcaatggctttggcatatctatacggacaccaccctaagcttaatgataataatgcttttcgngttcttgctgctgctgtctttcttgaccttcaggatttatgtggaatttggacggatttcattatttctgatctgtggactttaaacttcttggcttataaggtgtttgcggagaaccatgactatggcatgcatggggagcgtggtagaactggttgctggggctacctctggcaaagtggtggcatggaatttgaagagggggctcctaaacttttattttaaacatttcatgccattactgacttctaaggaa

SEQ ID NO: 102280 - DNA, 309 bp, Glycine max
  Clone ID: PAT_MRT3847_63376C.1
agcggtttgtttttgttttgttttgtttttgtttttgttttatgggccaagaaagacctcccagcatggatgatttgcttatgtggaaccaatgacgaatttactaaatggttgtactgcggaggaacttagcctgaacttccatcacagcactggcaaagggagaaaaaaaaacaagtgaaaaagtggtaaaacaagggtggtggtgtcgcaaaatgttggagatgctgataaaaggggacatggcttggatatatgcagaaggaggaggaaagatgggtggcacagggagaatgtacatgttggggg

SEQ ID NO: 102281 - DNA, 406 bp, Glycine max
  Clone ID: PAT_MRT3847_63377C.1
gactctagcaagcagagctatggtcaatattctattgaccttctcggcggaggaaaaaaagcggacaaaactggagattggatcacactcatgcaaaattctacaattagtaacttgctgagagctgctgctcggaagaaaggctgattaatggataagatcgagatgtctgggaatgcagcagtcaaaaggagtgactgggcctcattggtacaagtgttattaacatacagcaacagtacagagcatttcgatgcatgtaagcggacaaaatcggaaccacattcctgggaattgatctcaccaatagagggatgtggtcctaaaaacggccctgaaatgtggagttctgagcgggcaaataacactccatggcataagaccacccttaatgacaaccccaagc

SEQ ID NO: 102282 - DNA, 551 bp, Glycine max
  Clone ID: PAT_MRT3847_63378C.1
ggagggaggaatttatcacaattttttcattttcagaaacaaatttgaatttttatcatgaggaatttggcgggcctctacatattcagacagaaaaataattatttagtcttgttttggtgattagctcaaagacacaaacatctccacctcacaacttcatgaatgggggccaaaccacacacgatgttttaaagcttccatgccacaaatttctttccaactactttgacttttgaggacagcacgcatcctgggcttgttcaaatccttatcttgcctaaatgcattgtttgggaacaagctgggaagcacacaagtgagggagtctagtccgtgaacaactcaagcgaatcgattagtcacaacaaaagaaataatcgcccagatatgatatagacaggactactaaaataaaatggaaatgataaaattgtagaagaaataggtctaaacatgcccatctaacaaaatgtacatcctagagatataggaatgaaaccataaagaaagcctaatctaagagtcctcctggggctggtggggatcat

SEQ ID NO: 102283 - DNA, 395 bp, Glycine max
  unsure (1)..(395): unsure at all n locations
  Clone ID: PAT_MRT3847_63379C.1
ggatgacgtggcgaaactgtnggagcgcngagtctgggacttcgcgtgccatcggcgcgccggaatactgccacgcgaacttcaccaagtatttcacgggcggggtctggtctgagtccaagttgtcgggggactttccgccacggagggcttctacttcacacgggggggatgggaatgattctggggaatgggggaaaggaaggttcccccaaaaaaattggggctttgatggaattcccaaaaaggttagggtcctttactttggttccttcccccccctttttttgtggtttccgggaaacctggccccctttttgaccccggggaacccccccgttttggggggggttaaaaccaaaggggattttccccggaattttccccctggtgcg

SEQ ID NO: 102284 - DNA, 220 bp, Glycine max
  Clone ID: PAT_MRT3847_6337C.1
cactatcccctatcaactcagtcaacatgaaaaccattctcatccatcaaagaactaatttgtactatattaagaaccacaagcaaccctagttctcattgcggggggggggggggtatattaactccatggcgatataagattatccccaatacgagcaatggcatgcctacctagatgggagactagccgttgctccaagaacaccaagtgcagccat

SEQ ID NO: 102285 - DNA, 275 bp, Glycine max
  unsure (1)..(275): unsure at all n locations
  Clone ID: PAT_MRT3847_63380C.1
gatctatgaagctaatatgggtgctacataaatccncaagcagttattagatcgaaaaaagatgtacacattagacaatgtaagcctagggatctaatancntgcttgcggatctatgaagctaatatgggtgctacataaacatggaattttccttccaagtctaggttgatgccttgataaggcaatggataaagaaagatttcaannttccgatgttgtcaacttaggatttttttttatcattcttctcctttttttattttgttcttatc

SEQ ID NO: 102286 - DNA, 385 bp, Glycine max
  unsure (1)..(385): unsure at all n locations
  Clone ID: PAT_MRT3847_63381C.1
ttggaaacgtgganataattccatgcagcgatttcaatagtggagtcaatagcgataatgctgtgagctctatgactagcatgtggccttaattaacttgacgtaatttttatgggtgatgctaggtgcactcagtattttttgaaaatgtcaaaactgccctccgctatcttcttcttttaaaagctggttttttttgcgggtgccaaaatgctagcgcagtgtttctttcgtacgaatcaagttgatccacaaggccgatacggatcaagttgatccatatcttgatattaagcatacagattaacttgatccgtaaaagccttacggatcaacttgatccgtaagcttatagaaaatttcaacggtgcagcaccaacagaag

SEQ ID NO: 102287 - DNA, 1692 bp, Glycine max
  Clone ID: PAT_MRT3847_63382C.1
cttctctctctttagacacactcttctcttttctcttctcttctctctttttcagttgcaacatgagaagatgatgacagatatcacaaacctaagcacagacctcatagagctgatcctgtccctcctcccaatcccaaccttaatcagagcctcaacagtttgcaagctatggcactccataatctcctcctcttccttctcaaccctctccaaccacctcaagcagccatggttcttcctccatggcatccacaacatctcctcaaagaacaaccaatcctttgcctttgacccttcctccaacacctggttcctcctcccaaccccccaacaccaccaccaatcccaataccaatccaacacctccttcattggcaccagctccttcttcttcatcactgcccccaacttcctctacaccccaattctccacccttcatggcaccccacccctcccctccacttccctagaatcaaccctctattgggtgtcttccatgatgctaaagatcaaaactttggccaccacccaaaattcattgttgttggtggggtcaagttcattgggaaccttgttgacatagaggatcgtttggatgttgaaatctatgaccctcttgtggggtcttgggagcttggccctcctctccctcctgatttcagatcaggaaactcctcctcttccctctccagtgctctcttcagagggaaattctatgtctttgggatatactcttgctttgtttcctcctttgacctgcataaaagggtctggagtgacgttcacacccttaggcctcgtcatgagggtgtgttctccttcttggtggcttgtagggagatgcttgtgcttgctggggtgtgcaatttccctcatgggtcttcctcctttgtgctgtggaagggtgatgagaggaccatgtggttcacccagattgatgtgatgccacatgacttgctctgtagcctttttgacggggatgaggatgataaatttgcaagcttgaagtgtgtggggttgggggatttgatttatgttttcaatgaggattgccatcactgatgagcaggtttcacaaagttgttagcttctgttcaactgtttcactgtatagtattctcggtgaacgtcaactccctggtcttcagtactagaaaacaaagggaatacacaatcactagaataagaaagttcaggtagaagaatcatttgctgcagacggcaatatctagatgctgctgtaccacaaaagtttgttcattattcacatcaggcaagagcagaagctgacataatcctcgcttggttaatgacttaacgagttaatgttctttttcaagataaaattatttgctcaatcacctgcgggtactcttgttcgcatagatggaactcttcatgacagtcaatgcttaatcttacatgtttacattttcattaagactggttctggttcctcttcattatacttgtcatcacaaattagatgttcaatatagtatctaaataccagattttaggcaaagaatataaaacattctttacaaaatgttggggattttgatagttctccatttatgtatctcacaacttctacgaatcaattatatttcgacaatcagcttttatttctggtccaaatataaaagtgaaattatgaaaatgagaagagatttatttattttttc

SEQ ID NO: 102288 - DNA, 1210 bp, Glycine max
  Clone ID: PAT_MRT3847_63383C.1
ggctcgagcccaagttcattgttgttggtggggtctagttcattgggaaccttgttgacatagaggaccgtttggatgttgaaatctatgaccctcttctggggtcttgggaccttggccctcctctccctcctgatttcagatcaggaaactcttcctcttccctctcctctgctctcttccgagagaaattctatgtctttgggatatactcttgctttgtttcgtcctttgacttgcataaaagggtttggagtgaggtccacacccttaggcctcatcatgggattgtgttctccttcttggtggcttgtaaggagatgcttgtgcttgctggggtgtgcaatttccctcatggatcttcttcctttgtgctgtggaaggttgatgagaggaccatggggtttagccagattgctgtgatgccacatgatttgctctgtagcctttttgatggggatgaggatgataaatttgctagcttgaagtgtgttgggttgggggatttgatatatgttttcaatgaggattaccacaggatgtaccctgcttgtgtgtgtgagattgatggggagagtgggaggtgtgcgtggaggagagtgccccagttgccatcactgatgaacaggtttcacaaagttgttagcttctgttcaactgtttcactgcatagtattctcggtgaacgtcaaccttgtggtcttcagtactagaaaacgaagggaatactcaatcgctaaaagaagaaagttcagttagaagaatcatttgctgcagacagtagtatctagatgctgctgtaccaaaagtttgtgcatcattcacatcaggcaaaagcagaagctggcataaagtatgtaatagaataatcctatgtgttgtatgtctagtttagctgtcctaaagcttggaaattgacaatttttcccagcgacattggcaaactgtatgtggtattagtttttttttttcttttctgtaaatttaagtaataattatgtgaatgatttagtttcatgttgcatttctaagtactaatatcctcaactgtaaggtattaatcatttaatatgttactaaaagtagtgaaagtggtatacaaggattagatgtttgtatactggcttcatataattcagaaaacactagttttctagaagcttcttgttattaaagttacaagagtgatcctttttctaataacaaaaaa

SEQ ID NO: 102289 - DNA, 417 bp, Glycine max
  Clone ID: PAT_MRT3847_63384C.1
ggctcgagcagcggtcgctaactccagatgttttatgctcatacactcacaaaatgtgccaagtcggggccgatcgatgatctacgaacacgaggactaatatgcgtactaagatactcctgacccggctatgcaccagtcactgtgtctgcgtaggactcgaggtctctgaagaacaagatgatcactgatcgataccctgttactagacttcaaacaataccacgtcgacatagaatacaggaagacatagcgtccaacagcagatcggtcctcactactcgcttgactgtacacacgatctgctaccactagaataagcttgtccataacacaagcatacgaaaggccataaactctataaacgcaggaatctcagctcacccatgcgtggccttgtgagatattgaacttcag

SEQ ID NO: 102290 - DNA, 423 bp, Glycine max
  Clone ID: PAT_MRT3847_63385C.1
gccggctccgggccccgattccgggttcgtggcacgcgcccggcttccggttcattactgggaacaaggtgtgacgcgggatgatttcggatatgctggcgattgacacctgcatatgtcaacatcaccatcggtacttgcataattaccatcaacaaaatgaggagccggagatgatcatcggtccgattcgccgcatggacaccgtacgcgcccgtctggcgctaaccgaatcgcttgaacagctcctcatgcatctgagggagttgctgggccgcaccgtggagcaaatgaacaacaactactacaacaatgaagagtacagcaccgcggaatcggaccaggaacagatggaaactgcacaaaacggtgccagagttggcacggacaatgacgaactgttgcgcaactacatggactgcc

SEQ ID NO: 102291 - DNA, 1094 bp, Glycine max
  Clone ID: PAT_MRT3847_63386C.1
ccttccttctaagctttttctcccgttcctttgtccttctcctctccttgcgttcttcttcttcacgtttttccttttcttcttcttcaagaagcttcatctgcttttccaatgtaatgatttctttgcatgctacatgcactcgatcctccagcagttttagtgcaagacaaacaaatatgctgtgcgcattttggcgtgctgttccttctctgaaagccttttcaacctgttctttgaatataacagtagcagcatctagaagaaattctcgagcaagttcaggactctttgcatgcttttggggacgggagcattctccatcaagctcatttccatcttcatccatcaaatcatcatcctcttcttcttctgcctcttcagcatgctcaaagaatcttctgatactttccccttttgttattgtaacataaccatcccctacaattagcctgcaatgtacacaccgttgaccctttaatgcatgagctttaacagaaagttcagtacagcgtccatctaatctccaagctcggagggtaacaaaacatgcactcaagccaccaagatccaggccactggctcgaacacatccattcaatccaacattttcaaattccaaaatgtcagattttccttcagttgtccccacagcccactcaaagtgatgataggttcccgctgcatcagcaaatgtctgacgccaatcagcttgaactgagtcatcagatacctcatattgaaaggcagagtcagcaacacaaaaccagctggtgcaacgaggttctctgcgaatgcgcttcagttcttttagttccttgtattctcgaataacatttcttctacaatctctgcaaaatctcttgctatcaaacctgtacataagtctctcaataaaatcttcctccttcattcttagaagagaaagccgcatctcgtctcccagtgctgaccaaaaatccacaagtgtatcacatgaaagtctggcagtatgcagggcacaagtttctcttgtcccatgtcctctgccataactaactattccttggcttatccaaccacggcctcccccgccacaggcatcaggataaagc

SEQ ID NO: 102292 - DNA, 268 bp, Glycine max
  Clone ID: PAT_MRT3847_63387C.1
ggtacattctgctgtgtcccttatcaacaccaaagtacacggcatatataaaatctatcatcaatgctgcttggaagctccatttccaacaccaccaagaagttctttcaaagggctcttgagaacttcaagtcttgtttctctcctggttaccaaaagcttcccaaaacacctccacataatcaattctcttgttctctggacattaataataacccatgctacgaggaattggagaagttctacagtgacttcaccaagcaatggg

SEQ ID NO: 102293 - DNA, 250 bp, Glycine max
  Clone ID: PAT_MRT3847_63388C.1
ctgcgactggcaaatggtcgcaaatgctcgttttagaagatttccccgaatggcatactcgcaagaacaaggtcttttggcgtggatctactacaggtggaggcaacaatcctgctggacgtcaacttgattatcagcggcatcgctttgttcgtatgacttcggataattcgagtgaacccgttggcatcatattgccgccaaaaaacggcactagcgacctaacctacgtggaattgcctagtgcacg

SEQ ID NO: 102294 - DNA, 550 bp, Glycine max
  Clone ID: PAT_MRT3847_63389C.1
atgctttacctgaatcttcaatgttgcgaatcaagttttcagagcatgctcatttagtcagatatgtgcaacaatgcaaaacagaatttatagaagcagctccatctccttcctctgccccacgatttcatactggggcatcatcgtctgcttctaaaagtcattcaagttcaaagccgaagagtaagcccaaaagggagaaaacccaggaggagaaaaccttcaaaaggaaggcaaaatattttgtggtagcacagttggttgcagttgttgtgttcctcacacttatgacttcatttgatgatgctgaagtggagttagatgatgatggtggttatgatttcgatgaatgaaattgcattcatttgtttatcttcctcaattaaggctgcccccaacctaaataaaacaagtatctcctgttctttgttacgatgcaaaattggaagactatcattcattctgtaagattcatttttgtatagacgagttttaaacagattgatgttacgtgaggcaaatcatggaatgagttctttgaatcattttc

SEQ ID NO: 102295 - DNA, 273 bp, Glycine max
  unsure (1)..(273): unsure at all n locations
  Clone ID: PAT_MRT3847_6338C.1
tttcttttccatttataatttaccttttanacgggacagggaaaggggggtacatttagaaaggtcagccaagagaaccctggtcgtggcagcgaaggctagatgcaacctaaccacataaacgtaagtgtgcatataccaaccttagcgtacgctcttaattgtctcgtgcacatgaccctagcacataacaaagggagcggaaactactcaaactggagcgttgagcgaaggcaatgaccatcgtaacgcacaaaaatgggatatcaatgg

SEQ ID NO: 102296 - DNA, 303 bp, Glycine max
  Clone ID: PAT_MRT3847_63390C.1
aaattaccatgaatcatatgcactattggatcaacattgatgtggccagcgtgttatggattctacagggggttccttaagaattctgttgcttgtaccctccgtgggcggccccgcgaaagaggatcaccactcgaggccccctactggcgaagtgacacctaacattgtgaggatttcgactgaggcctttacaagaggctgggtcaattatcatctaaaccctacatggcgctgttggtgctgtggttgaaaacggggagagccacaatatctgctatataggcagggacactgcacagt

SEQ ID NO: 102297 - DNA, 305 bp, Glycine max
  unsure (1)..(305): unsure at all n locations
  Clone ID: PAT_MRT3847_63391C.1
tcgcangcacgcgtacgtaagctcgggaattcggctcgagncctctcannnttgctgantacttnaacattcccggnatcttcagtntgaatttannccacaantcgccctcanatgggncangatncataggcanctcagtgttgcnaacttctctccatgattnnattgnggttatntnccagnacaacganancaccatgcaatcttggcatctngatggntatgatntttgggtcattngtcatggnttcggncantggacanatgccagcaggtgaacatataatctngtggatgncctg

SEQ ID NO: 102298 - DNA, 352 bp, Glycine max
  unsure (1)..(352): unsure at all n locations
  Clone ID: PAT_MRT3847_63392C.1
ggttattctttttattcattagttctcatccattgaatttccatttgaaggtccgaaaaccagaaaccataaagatacacggatngatcgaaactctcattttagcaaaaacaaatgggaatgtagtttaagtacaaacaaacaaagnggggngccccctcccangctgtgtttannnncacactnagaagcctgggggcttgtacgccatgaagctgatgcactgcacttggcaatctttgtcgaatccgatgatacggatgaagccgctggggtatgcagtgttagcctcttgaagctccttcaacacctgagaagcatcagtgcaaccaaacataggcagcttccacat

SEQ ID NO: 102299 - DNA, 909 bp, Glycine max
  unsure (1)..(909): unsure at all n locations
  Clone ID: PAT_MRT3847_63393C.1
gttgatttgagcaaaacttcatgttcttgcaacttttggcagttggtgggaatcccctgcaggcatgctatagctgcaatcaattacaaaggagagcatgcagaagaccatgttgacaaatattaccatagggatacttacaagctatgttacagtcatagtattacaacaatcgatggtaggaaaaaatgttctaagactaatgatcctgacttattgcctcctaattacaaacgtgcagctggtagaccaaagaagttgaggcgaagagaagttgatgaagattagaatgaccataaactaagggggacaaatacaaccaactgatgttggagatgccataagcttggacataacaagaggacttgcaaaaattcccccattcatccaaaaccagcaaagactcgtgttgaaggtgagggagcacccagtgaagaacaacaaagtcatgttcaagttggaccaaatggaacacaagtgcaaactgaagcgaacaccaaaggtgataatggaacacatgaatggaaattgatgcagtgattaatctgctgacacaagctagccaaacaaatccaaataagataatcctggtattgcaaagaaagtgagttgtgcaacaacaaaaacgaaaaaagagaccttgaagaaacctcacctgtctgaacaaagtgcacaatgtagcaacactgtttcaggagaagacatggacactccgtagcttattgaactcttgaagaggaagatggggtagtcttttttttaggattaagaatatgttagatctgggtttttttggctggtcgtttggaatgtattttgatagcatttggttgttctagatgttgagcacaagttattgttttgagatgtatactttattattattgtcannacttcactgcatgacaa

SEQ ID NO: 102300 - DNA, 218 bp, Glycine max
  Clone ID: PAT_MRT3847_63394C.1
caaaggaagagttgagatagagaccgagcatccataccccacacacacgcatgcttcttctcttggcattttcccacactctcttttcctgcatgagcgccatggatttctcttacatgtatgggggcttacacaaacccttgcttacccttttacttattttccttgtacctattcattcttaatcttacaactattccaccttaacttaaattaac

SEQ ID NO: 102301 - DNA, 406 bp, Glycine max
  unsure (1)..(406): unsure at all n locations
  Clone ID: PAT_MRT3847_63395C.1
gctaaaaaaacaagaggggaacgagcagaagacggcacngcccagaggtatanatcaacccnacgagattgttcccgacaataaggatttacangatagcgaaccccccgaaaggttggaggcgcggacctcctaaatctttagacgaacatgagactgagtttcgtgacacttaagaaacaacatgaagggaatatgaacgacaagtggcagaagaggaagcccaacgaattcgaagactnaaagcagctggtggaagcacagcacaacgtacagcatgaagtagagggaaaaaactccatgacctgtcgtgcaggaacataagacatggtgggaaggaagaatccaaccgctggcccaattgggatgagtataaaggtcaagcctaaagcgtaaaaagccaagg

SEQ ID NO: 102302 - DNA, 594 bp, Glycine max
  Clone ID: PAT_MRT3847_63396C.1
cacgcttaccgctaaccggtgtggtacgtgaactatcatcacttcaccggataaatggtatctgacacatcgctatgggggctgcccaggcttattgctattatttaaatcggaatgccttattctctcattggccaatctctattagatttaggaaccttgttgctcccacctcaccttctttcctgctggcacctcatttatgaacggcaaatacaagatgggatgataccgataccatggggataatagccatttggcatacgtgaagaaatgtgttataacaaccgttactctatgataggtataccgtagaaaccctatctactccattaatgcgcatcatgaaaaatggataggaagccggtgagaggctatctctgcatacactgtgatctcttcgatattgactccattaaagaagctcttaacggctgccacggagctttccacaccggtaatccattcaccaccgacccttgagagatggccaagctctcctataatgagacgaataatgagatcacagcatcatcggaacaacagtgcgatgggtgaagttgacttccgctatcgtctcactctacatgcacc

SEQ ID NO: 102303 - DNA, 758 bp, Glycine max
  Clone ID: PAT_MRT3847_63397C.1
gagaaggcaacttttgtattattagagatagatgagggagacaaaatgaattattggagagagatagaaagaggctcaagagggagcttccaggaaggatacacagcaaatgactggcattcaagttagcttagccatgatgattgaagaggagtatacatggtcaacgtttttggtaagcaactagtaattaatcacaaattggaaccatgtttctcaaatgttttggcttcggcgctcagagacagtatccaacggtcatagaagagttgtgccatcgattttctctcgcagatctaaggaaatcaaccaacaatttcgatcaagacacagtaactggacatggaagatttagtagagtatataaaggttgtctccaacacaatgaagatgcttctgagtatacagtcgctgtaaagcgatttgttagagtgggagtggtagaaaaatggttcaggaatgaaatagagttactctgtcagcttcgtcaccctaatttggtctctcttataggattctgcaacgaccaaaatgagatgattattgtgtacgagtacatgtccaatggatctcttcttcaacttctacaaagtgggatactgtcatggaagaaaagactagagatatgcataggagcagcgcgtggactacactaccttcacgctggagccaaacgcaccatcattcaccgttatatcaattcaagaaatattctttttggatcacaacatgcagccaaaactcgcagagtttgtccc

SEQ ID NO: 102304 - DNA, 739 bp, Glycine max
  Clone ID: PAT_MRT3847_63398C.1
ctgtcgcgtgggcggacgcgtgggtgggtaccacagaatgagtttctcaatctgaaatattttttcaactagggacagccataaagcaagccaaacagactaatcactcatgtttcttcattgagaaggagaaaagaaagagaaagagacaccccatgaaagataaaataaaaagttgcaaagaggatcatatctgagaaaaagactggaccctctcttgtgccaacttacaacatagattagatattactttgacaagaaagccttgatctttctcccctctatgaccttctcaatatagacttgtatttatccctaaaacacacatagagcttcagggaagatgataatggtctaaaaataaaagctttgcatggcgagccacagaataggagaacttggtttgtctgagtcaggaccttcaagtcaccacatcccttatggagtgcttcacggaattaacactccagcatcaagcttaatcaatcaaggatctgcttttgattttggggagctggaggaagcaattgttctgcatggagttaagggtagaaatgatgagggcaaagcatctttattcacagccagacctgcagctacactggaaatgttcccttcatggccaatgagattccagcaaccccaagagttggttcaaagtcaggaggagaaagcactgattcaggtctctctagcaaaactgagcccccctttgagggcagaatctccatagtaaaaa

SEQ ID NO: 102305 - DNA, 532 bp, Glycine max
  unsure (1)..(532): unsure at all n locations
  Clone ID: PAT_MRT3847_63399C.1
attcggctcgagaaaatgaattattggagagagatagaaagaggctcaagagggagcttccaggaaggatacacagcgaatgactggcattcaagttagcttagctatgatgaatgaagaggagtatagatggtcaacgtttttggtaagcaagcaagaatcacaaattggaaccatgtttctcaaatgttttggcttcggcgctcggggacagtatccaacggtgatagaagacggcgctcggagacagtatccaacggtgatagaagagttgtgccatcgattttctctcgcagatctaaggaaatcaaccaacaatttcgatcaaaacacagcaattgatcgtggtagagtatataaaggttgtctccaacacaatgaagatgcttctgagtatacagtcgctgtaaagcgatataatgcggtagaggaagaagaagggttcaggaaagaatagagttactctgtcagcttcgtcaccctaatttggtctctcttataggattctgcaacgaccaanaagagaggatta

SEQ ID NO: 102306 - DNA, 709 bp, Glycine max
  Clone ID: PAT_MRT3847_6339C.1
aacagcaaattgtagttgttaatatttttagtttttatcatcaaagaagttgagttgttttctatgatttgataattattgataactgagattcgtatgatttgttatttccgttaatccatgcacatttttttttctctgttgtccttctagacttgtgcattcctaacattgcattttgtatatacagggaacagggaaaacaatagtaattagtgtaggagctgaacctattttgccagtaggtctttttgccattctgcatggtagaactttgaaaggtactctttttggagggctaaaagccgtatcagacctttcaattgtagctgagaaatgccagaaaaaggttatcctctagacatttaatcgtaacggattcacttgtctatgttttttaatcctggtgttcaagtgtctaataatgatgatggtggactttaacaggaatttcctcttcaagaactcttcacccatgaagtcacattggccgatataaacaaagcatttgagctagtaaaacaacccaattgtgtcaaagttgtcatcaatatgtcatagtagcaattgtttctagtgaaacaacccaatggtgtgtctcagtgggagtgttatttatttcattctattttctctggagcttttatttatatttaaaataaatgaggtgggtggtccccgtaatttcgagtgggcacacgtaagtttc

SEQ ID NO: 102307 - DNA, 191 bp, Glycine max
  Clone ID: PAT_MRT3847_633C.1
ggcaatgctaatcatatctataggcacggcgcgagcccgttgtgcggactcatgtataaacagctccagtgcgagtaaacactcggaacatggggcatagcactactgaatgaaccgccgctaaagctgcaatctcaaagagcgacccacacgccttactggatgcccatctctgacactcacatctatac

SEQ ID NO: 102308 - DNA, 522 bp, Glycine max
  Clone ID: PAT_MRT3847_63400C.1
ggggagcttccaggaaggatacacagcaaatgactggcattcaagttagcttagctatgatgaatgaagaggagtatagatggtcaacgtttttggtaagcaactagtaattaagcaagcaagaatcacaaattggaaccatgtttctcaaatgttttggcttcggcgctcagagacagtatccaacggtgatagaagagttgtgccatcgattttctctcgcagatctaaggaaatcaaccaacaatttcgatcaaaacacagtaattgatcgtggaggatgtggtagagtatataaaggttgtctccagcacaatgaacatgcttctgatacagtcgctgtaaagcgattgggaatgggaaatgaagagttgttcaggaatgaaatagagttactctgtcagcttcgtcaccctaatttggtctctcttataggattctgcacgaccaaaaagagaagattattgtgtacgagtacttgtccaatggatctcttgatcaacttctacaaagtggggtact

SEQ ID NO: 102309 - DNA, 109 bp, Glycine max
  Clone ID: PAT_MRT3847_63401C.1
ctgcgagaagcgaacgaatgggagagctcttggctttaccagtttccaattctcaattcacaattcgaaatacttattcctttcaaataaccacattcagtcatcgtga

SEQ ID NO: 102310 - DNA, 342 bp, Glycine max
  Clone ID: PAT_MRT3847_63402C.1
aatttcaccaccgaacgaaccaacacacgctcaaaccccaaaccctaacacaagccttgatcagatggcatcgaaacgaatcaacaaggagttgaaggacctgcagaaagatcctcctacgtcatgcagtgctggcccagtggctgatgacatgttccattggcaagctacaattatgggtcctgcagatagtccatttgctggaggtgtatttcttgggtcaattcactttcctcctgattatcctttcaaaccacccaaggtttcattctgcacaaaggtttttcaccctaacatcaacagtaatggaagtatctgccttgacatcctcaaagagcaatg

SEQ ID NO: 102311 - DNA, 569 bp, Glycine max
  Clone ID: PAT_MRT3847_63403C.1
ggcctccctgggagcgccgatcagtactggggacttcctcgggccgaacccggcaccccgggcttgtcaaaataaaatattgagcttgatgtttccattggaacggagaacagaacatggaacatagtctgacagaaccatttagggcaggatttaattcctacaagcaaaaatctgggtggcaaaaaaactcggaaactaagacaccctgttagttaaaataagttcaaaagaaagggagatacatgatgttctaagatccacgactacttaattaacagccaccggcaatttctgattatcaaaataaaaactgtcgacagctcttagctccaagttattggaagagaacgttgctttcatccttttaataaaatcttcacatttcttatttaactcttcagtgtcatgcttatcttcatcaatgatcacaaggacatttccctcttcttcttcttcttcttctttttcttcttcttcttcttcttcttcttcttcttcttcttcttcttcttcttcttcttcttcttcttctttttcttcttcttcttcttgggtatctgatagca

SEQ ID NO: 102312 - DNA, 284 bp, Glycine max
  unsure (1)..(284): unsure at all n locations
  Clone ID: PAT_MRT3847_63404C.1
ngtaaggcttgctacacncangaagangccaaaggccgggctaccattgaggagacanaccggcggagaccccgncncngaagcagcnaagaggaccgcccccnacannaaaagcacaggcncncncgncagagcaccgggaaagcnggcagaggacaccaacaagnccgaggctcnnccccacaagccggcgcagcncggagagaaccaggaaaaagccgcaccgaaacncccacaagaggaacaccccacagccgggacaacncaggngcggcccgcaacaa

SEQ ID NO: 102313 - DNA, 202 bp, Glycine max
  Clone ID: PAT_MRT3847_63405C.1
gtgcaaggaccaaaaggggccatggagcagtcaccagtgccataaatggtagagaaggaagcgatagcttggagcgtgaacgtaaagctatagacgaacagggcaaggcctagacagtgcatgttttggaggtgaacacataccacacgctcagattgcaatgcaattgcataaaacctggcctgggcacatgacaatgaca

SEQ ID NO: 102314 - DNA, 506 bp, Glycine max
  Clone ID: PAT_MRT3847_63406C.1
tgatacaataaattgagacagtccttatacatgaaaacattgacaggttaataatcgatgcacatactaaacctttattcctaactcatgtctactttagataacatcaaggaatgtttcaacatttagtactcacagcactcacatgacaggaaatatataaatagaaatatatatacaaaagataggtcatcactcattacaattcactgctgatacacttaaaaactatcatccattccaccttcaccttattgagtcatccattgacaccactactaatccatcaacattctggtgagcagattaatgcttggtcatgatcatccttggtctccacactttgaattgaagaacagttatccttttttaccttcttcatgcatggcttctcttcaagtgggtcctgttgtgttcccagttccctgagcaaagacttaatccacacaaacatggagctccccaagctaacccaagaaatagccttaccaacctcataactataa

SEQ ID NO: 102315 - DNA, 211 bp, Glycine max
  Clone ID: PAT_MRT3847_63407C.1
ctccacagaccattccatccatttacatgccctcttttcagattcaacctgcagctcacataagctctcctcatcacaaaagacatctacccctcggcgcctcactcttctctaatcaatccctatatcatactttgcatggacagactatgcaagctctacctgatcttcaatgcacactgaaaccacttatgacaacactgataatcta

SEQ ID NO: 102316 - DNA, 519 bp, Glycine max
  Clone ID: PAT_MRT3847_63408C.1
ctagtcccacaaaaggaggaaacgacttcacgatactaatgatcgactagaactaaatcttacaagtaaagtgaaattgccaaccgtaaaggggaaaagatgattacatacaaaataatagagaggagccataagggtatatggattatattcaactcttaagaaaagaaaagaaaaatgaagaagaactaaccagatgttgcacaaggtacaaggctagcaagagaagcgatgtagggaatgacccacggtcgcgattcagcggcgcctcggcttcgcttttcttcttctcttcctctacctacattttttcctctatcccaaacttgttgaacccctaaacccctcccctagcatggctatttataggaaaaagccattttggggcagggaaggctcgcccaagcgagctggtttcttaggcatgaagctatttcatggcccaggcgagccagatgctagcctaggcgagctaggatctagaaaaaccaaaaaaaagatccttttgcccccttccat

SEQ ID NO: 102317 - DNA, 994 bp, Glycine max
  Clone ID: PAT_MRT3847_63409C.1
tacggctgtgttttcattcaatggagttagaagtttaaagggtcaccttaagaaaaagcacataagtgtcccagttggccactcgtttttcgcttctttggtccttgtgatgcctgaatctgacttcaatagggagcttggcgtgtttcagttgactgcagaactcctatctgtgaatggaaatgtgatagaaaaatctagccagccatgcatgttgaggtttagaagctcaccgattcgactagtccgaacccttatgatgggagtgcctctggtgctgggaatctcaggggagactcagaatattaatgtggatatactgaagcacaaagaagactacagaagaagcaattctattagggtaactctgcatccaagagcaggaacatcttctcttccacagctatacgaagccaaaattgcgataaactcccatttgccttggactaaagagttggttcgaaattggaagtggacattttatgtttgggtgtccttgtatgtctacattgtactacttgtgtctctcctatgttgttataggccactcatctttctggtgacaccagagtatttcagtgatcatagggtgagtgaacttacaagagaagaacctggacaattacaagttgaggaattaggagatgaaagtgaggtttctgagttgttgaggaaatggagaagaagcagaagcaagagaaaaactgtactagcacatggtggtgtgccagaaaccattgttggttcatcaacatccagcattagcatgatgactactagagaagatgtaaccagtgtggctgtggaagatgaggttgaggactctgaatcagcgtccataggttagagagggttaattttacttgctctgaagagggataataaattggtcttgagtaagttttttatactatggttgagtattataattatgtgaacttttgtaagcttccattgcattttattatggtttgaacaagtaacattttgcact

SEQ ID NO: 102318 - DNA, 650 bp, Glycine max
  Clone ID: PAT_MRT3847_6340C.1
ttaactaaacaatctactcgttctaggccttttctcaatatattgaaattttgttcgagcagaacctggtagacacattcgtcaacacttcaagtacaaaaacactgtatttttgtatatgtggaaaagtttccatggaaatgaagaggctccacacaaccagcgtcgaacgcaagatatcaactaatatttgctattgggtccagacactagacccgctcgtggcttaagatgaagattgttgagtagtagatacttacaagcttggaaagtactttggacgtttctttttctcaggagtatcgtgcacttgttttttccttccaaatgtcttaagctgataattttcaaaagcattagaaacagcttccacctgctcacgttccctactgtatactctcactatcacatcttcgcaatatgctggtaacagatgactgatgcaatcgtttgggatgcggaatttttctttactaccgtactccttccaagaggatttgcccttcctcttgttaaatcaattttaacatagctcacaacaacatcctcttctttcagattggcaccattagtctgggaacaaacgatttcttgggggggtgatactttctgaagtgggcccagtctttccttggggaacacgaaaattc

SEQ ID NO: 102319 - DNA, 250 bp, Glycine max
  Clone ID: PAT_MRT3847_63410C.1
aaagaatgaatggagtggtggcagtggccataatccatttgatatcttgtcatctttctttggcaagagaagtccctttggatcaagtggaagtaggcggagtgagaaggataagcgcgaagaagacgtggttcaccctctcaaagtgtctttgaaggaccgttgtgttggaacttgcaggaagctgtccctctccggaaatgttgtatgctgcaaggtcaggctgcggagtgctgagtctggtgctgcg

SEQ ID NO: 102320 - DNA, 136 bp, Glycine max
  Clone ID: PAT_MRT3847_63411C.1
tatgaagcgtcttagaacgaaggtttctaatcgcgactctgatcgcaggtcaagacgaagaatacaagcgcgatggtctgaccttgagctgcacgtcgaacacctgtaagcggaaactgcaaccctatccaagcag

SEQ ID NO: 102321 - DNA, 146 bp, Glycine max
  Clone ID: PAT_MRT3847_63412C.1
gcgtatttggtcagcctaagtcctattgaatgaggcatcatggagggtgataatcccgtccggttgatcatttgcgttttacgatacgctttctaagagtcaagttgtttgggattgcagcttaaaatgggaggtaaatttctcct

SEQ ID NO: 102322 - DNA, 392 bp, Glycine max
  Clone ID: PAT_MRT3847_63413C.1
cgttcttcttattttgctgctgtgcgttagcgtaaggtgaatgtctcacctgaaaatgacatgctgtggtggtaactgtggtagcggaagctcctgcaagtgcagcaacatctgcagaggctgcacagatgtacccacgacttgagctacacatgactcaaccatcaccgagaccttgttcatgggagtggcacctagcaaggctgaatttgagggtgctgacatggatgtgtccgctgagaacgatggctgcaaatgtgaaccaaactgcttctgctaccgctgcactagctagtgatgctgagggagcacaagctctcagcacagatagaccttaattaggaacaacgataaactattcatgtgtagctggaaacttatgtattacgtct

SEQ ID NO: 102323 - DNA, 118 bp, Glycine max
  Clone ID: PAT_MRT3847_63414C.1
cttttgctcgtgaccaattccaaatccaattatttcaccctcaccaataaccagcttggttagcgacttatttacaacctgcctcatggaaggcgcttttctgcgacgggtcattcct

SEQ ID NO: 102324 - DNA, 1559 bp, Glycine max
  unsure (1)..(1559): unsure at all n locations
  Clone ID: PAT_MRT3847_63415C.1
cgacacgacacgacacttgtgttcaaaccatgacttgtatgcaaccaagacacccccaaattaaagtcactgtttcacaattcagttcataccaactcatcactataaaaattgcaagagcccctctgtctctgtagccattctttttcaccacaagataagaaaaaagaaaaaatgtttgcagggaaaggggctgtttggttctccagagcggtggcgttggcagcaatcgcggtggtagcttgcgttgggcttacacaggcccaacccgaggccaggttcaagtgcaacagcgcgaacatccccacgtgtcgcgcgctcataagctactctcacccgaacaccaccaccctcggcgacatccaaaagctcttcaacgtgaaacacatcctcgacatcgtgggagcgaacaacctcccaagcaacgccacaaaaacatacgcggtgggccccaacgaggttgtgaaggtccctttcccgtgcaggtgcagcaacaacacgggactctcggaccgtgttccgctgtacaggatcaagaagggggacacgctgtactacatcgcgacgacgacgttcgcgggtctgatgaagtggccgcagatccaggtggccaataacatagccaacgcgaataatatcaccaccggggacatgctttatattccgctgccgtgtagctgcgacgaggtgggtgggaagagtgtggtgcactatgcgcatcttgtggcgccgcagagcaccgtggaggggattgcggaggagtttggtaccactcagcagatactgctcaaccttaatggaatttctgaccccaaaaatcttcaggcagggcagattctcgatgttcccctccaagcttgttcctcgaatgtgaaaaatgattcattggactatcccttgcttgtcccaaatgctacttacgcctatactgcccatgaatgcgtcaaatgcaagtgtgactccagtaacaatttcatattacaatgtgagccatcccaactcaaaccaaccaactggtctgtttgcccctctatggaatgctcagccaacgtcttgattggcaaaaccatttcctcagattcctgcaatcgcacaacctgcgcctatactggttatagattccacaatatctctgcagaagctgtaactgagaacacttgtgctgtgccgccgactccgagtggttcaggaggatcaactggttctgattcaggagcgtcaaggagcaccttgcaaggcttgttttggagtaatcttttcattgtcattcactttgtcctctttcttgtctatgttttgtagtaaaatagaataccctgcacttccgcagctattttttataatagattagtccactctgtaatttgctgagttcagatagattggttcgtgttgtgagtgttgcaataactgaaccttttgtgtttttcctttgcaatatttgtatcttaaataaataaatatgttccgaagaataagagtgatgtctaatctattttaatgtgattaaaatagttcagatatgcttttcctgaaaaaaannaaaaaaaaaaaaaaaa

SEQ ID NO: 102325 - DNA, 375 bp, Glycine max
  Clone ID: PAT_MRT3847_63416C.1
gttatatgttcgctaagaaaggtcatctcttccggggagctttataaggttcatgggggaataccaaaccggtttttctgattgatcatcactctttgatttgattcgatcgggaccgatcagtggcttgggttaagctgttcggaagctatttcgacaccttcttgggcaatacccaaatgcgcattgtgttccttggtctagatgctgctagcaaaacacctatactggacaatttccacattggagaagcctcatctactgcgcccacaataggtaggaatgttgagaagcctcatgatacgaatgatgtttttacagtttcgactgttggtcggcaagaaaactaacggcactttggagggacttttttaa

SEQ ID NO: 102326 - DNA, 556 bp, Glycine max
  Clone ID: PAT_MRT3847_63417C.1
gcgcccacgcgtccgcccacgcgtccgggagtcataacagtgaagaataaaaaagatgaaacaacatttactgttcactttcctgctagtggagaaacgttggttgttagagcttggcatctccgtccatcccttatctggaaggatggaaaatggattgaatcttacaaagtggggacaaatgacagttctacccatgagggtgagagaccacaccttttcatacagtgcatggggagatatctcacgaccataagaaatgcattggtggcttttctcctattatcaatcaaaagagttcaaaaggaccaaagggccgcaaggtttctgatttagtcaataccattgatgtgcttcctaattctgagactgaaatacaggctacttccactgctggtaataaacctgaaaatctggaggataataacatcaaggagggctctattgtagaggttttcaaagatggagaaggatttacagcagcatggtacacagccagcatattaaatttgaaggatggtaaagcttatgtatgctatgttgtgcttcttgatga

SEQ ID NO: 102327 - DNA, 173 bp, Glycine max
  Clone ID: PAT_MRT3847_63418C.1
aggtttaactgccaaagtgattgaccccacaatgattatggatgatgtttatggtgatttttttgattttgcatctatgttggtatccaacgttgacaataactatcccaatgcatcaaatagatttatcaagctgctagctattgagaaaacttgcagacaatctggtctct

SEQ ID NO: 102328 - DNA, 409 bp, Glycine max
  Clone ID: PAT_MRT3847_63419C.1
gaagcctagtttatatgctaatcataattgcgaaaacgagggcgacggcagaaagatggggagcaagaagaaatgaggcggacgcctggcgcatattgtgttacaagcagatgtagcataaaggtgtgatggagactgatatgacccatccttctagacatttgatacaatcatccaatagcatctgggggtgatatttggttacaaagcccttgtcacacatctttgttgaggcccactagatatgcttgttcagcccatcttcatatttttgtttcacatcgaattttggacaatgaagatcgtaatgatcaccccatcctcttctaatgaattatatgaacttgcacactagatatttccactgatcgaggtgctttccatgcataaaatatgagctccacagaca

SEQ ID NO: 102329 - DNA, 1584 bp, Glycine max
  unsure (1)..(1584): unsure at all n locations
  Clone ID: PAT_MRT3847_6341C.1
gaacaatttcaaagacttcgtgatttgaaacaacttggcctaagttatatggtttaccctggagccgtccattctcgctttgagcattcactgggtgtttattggctggctggaaaagctattgatgccattaaaaaataccaaggccaagagcttggtattgaacatactgatgtattgacagtaaaacttgcaggattgctacatgatgttggtcatggtccattcagccacacttttgagcgtggattccttccgcttgttcttcagggctccacttggtcacacgaggaaatgtctgtgaagatgatagatcacattgttgatcaacacaaaattgatctggattctgaactcctaaagaaagtgaaggaaatgatcacttctagcccaggccattcttcacaaagagaaaagcggttcttgtatgatattgttgcaaatggtcgcaatggaattgatgttgacaagtttgactacattgttcgtgattcccgggcttgtggcctagggtgcaactttcagcatgagagattgatggagaccatgcatgttgtggatgatgaaatttgttaccgtgctaatgattatctaactgttcacaagttatttgcaactcgggcagatcttcatcaaacagtctatacacatgcaaaagtaaaagcaatagaattgatggtcatagatgcactggtcaaagcaaatccgtttcttcaaattacatccttaattcatcaaccatctgaattttggaagttagatgattcaattcttaaaacgattgaatcttcttctcaacaagagctgaaggaatccagggacttgatccaacgcattcgaagaagggatctataccagtactgcaatgaattttctgttcccaaggaaagactggaccacttcagaagtatcacaccccaagatatcgtttgttcccagactaatggtgccaatctgaaagaagaggatgttgttgtgagctatgttagaattgatttaacaagaggaagggcaaatcctcttggaaggtacttgctgaagaaacaattattaataaatttaggagtacggtagtaaagaaaaattccgcatcccaaacgattgcatcagtcatctgttaccagcatattgcgaagatgtgatagtgagagtatacagtagggaacgtgagcaggtggaagctgtttctaatgcttttgaaaattatcagcttaagacatttggaaggaaaaaacaagtgcacgatactcctgagaaaaagaaacgtccaaagtactttccaagcttgtaagtatctactactcaacaatcttcatcttaagccacgagcgggtctagtgtctggacccaatagcaaatattagttgatatcttgcgttcgacgctggttgtgtggagcctcttcatttccatggaaacttttccacatatacaaaaatacagtgtttttgtacttgaagtgttgacgaatgtgtctaccaggttctgctcgaacaaaatttcaatatattgagaaaaggcctagaacgagtagattgtttagttattaattttganngcaagaatataaagaatagtcggatg

SEQ ID NO: 102330 - DNA, 537 bp, Glycine max
  Clone ID: PAT_MRT3847_63420C.1
attcccgggtacgacccacgcgtccggttagttggtgtagatgacccctttttcttcggtgtgtgtcgagaaagaccagcagagtagagataacagaaagaaaaagaaaaggaaagcggattcagttttgaggtcactcactcccaccgatgactgatcattaacacctttttcttccctttctttctacaattatccctaaactttcttcttcttcttcttcttctttccctatcccaaaaacgcgtcaaccaaaacacaaaaaccctattatcaccaccacacacttccttttcttggatctgtagatctaacgctattgcgtcacataaccgttcctctgcaacctagtgctgttttcactgaaattcaacggttgaaattcttggattttagtgtttggactttgatttgaaactggttgttaacaaacaatagaataggtgtattattatttgttattagttattagttatataataatagtaataataggtgaggaagggtttgtggggggtggggttggagcatccattt

SEQ ID NO: 102331 - DNA, 278 bp, Glycine max
  Clone ID: PAT_MRT3847_63421C.1
aaagggtagaggggcttataatcattttaatattaaccttgaagaacatcattatctttggttatcgttaaagacaaagcttgatcatggtcctggacctgctggtgtttcgggagccattaaatccataaaagccatctcacctggctgtttgtatccaagcattaacctagatgtgaccggcccacccacagtttcttgctatactactcaacatttgtaacattgtgcaacatcagggacatttccacaagatcttagatgtaaaggcttaattt

SEQ ID NO: 102332 - DNA, 513 bp, Glycine max
  Clone ID: PAT_MRT3847_63422C.1
agctcggaattcggctcgagggaagaatatcatgatgggttttttgatgaggaagagttcctaagagagatccttaaggaggagcagcagccagaaaatttgtggcctcaaagagatcaaaagctctccaacaccagccccactgtgtcctttgatgaggcaattagcttttgtgggagtggcactctacataaaagcaacagctccaactccatcaagtctttgaaaagatcatcatcaagtgtctcaccagccaccactacataccttctttcttttgatacctcaagtgctaaaccaatcacacttaaaccttcccctaagcttgatttggcacttggatcatccaataaaaggagtactagtactgtaactgtggtgaaagatgggtgtgaatttgaaccattgatgatgccccaaagccaagcaaggaagaaggttagaaggtcatgtgagacacagcattacattattgctgagaggaaaaggagacaggaactgacagggagcatt

SEQ ID NO: 102333 - DNA, 381 bp, Glycine max
  Clone ID: PAT_MRT3847_63423C.1
gtcgcccacccgtccgaggaggtgaaggctgggatggtttcagagctgtttagagtgtgtctcgagaaacaccaagaaccgacatggtgccgtggggactgtgaacgtggtcgatagacaatgtacactagcacttgcagaggcacagagaggggaaccatccggggtacagatctatcagccaccaccgagacagtgggcatggtaagagcacgtgttgaggctcagcgcacggatgcgtgtaaagggaatgaccgaagtgagcgccacaggtggatgtgctcgaaacacatgctgatcatcgggctgtgctatgaatagtgctgtgagggcgggcgccagctctgatagcccaccatcggaatcaagacagcgaattat

SEQ ID NO: 102334 - DNA, 1180 bp, Glycine max
  unsure (1)..(1180): unsure at all n locations
  Clone ID: PAT_MRT3847_63424C.1
ggctcgaggcattttccttcttcagcgctgattcatttataaacttgaacagagatctcatctcacttctcagagattctcaccagtgattggtgatggctcagccgcttgtgaagaaagacgatgaccgcgacgacgaagctgactattccccctttcttggaattgaaaaggggtctgttcttcaggaggccagggtttttaatgaccctcaactagatgctaggagatgttcacaggttattacaaaactcctatacctactgaatcagggagagacgtttacaaaggttgaagccacagaagttttctttgctgtgactaagcttttccaggctaaagatactggattaaggagaatggtctacctgatgataaaggagatctctccctctgcagatgaggttatcaccggaactcgctctctcaacccacgcgtccgcagcaagattgatatgtaccgagcaaatgccattcgagtgctgtgtcgtatcactgacggaaccctcctttcacaaattgagaggtatttaaaacaagccattgtagataaaaatccagttgttgcaagtgctgctctagttagtggcattcatctactccagacaaatcctgaaattgtaaaaagatggagcaatgaggttcaggaagctgttcaatcaagagcagcccttgtacaatttcatgcactgggtttgctgcatcagatacgacagaatgaccggctagcagttagcaagctggttaccagcttgaccaggggaactgttcgctcacctttagcgcagtgccttttgatccgttacacaagtcaggttattcatgaatcaggccatacacagtcaggggaacgccccttctatgattatcttgagagttggccttgccacaagtcagacatggtgatttttgaagctgccagggcaataacagagctcaatggtgtaacaagccgagaattaacttcagcgattactgttcttcagctattcttaagntcgactaaaccagtcttgagatttgctgctgtccgcacccttgacaaggtgggaatgacgcattcaatggcagtcaccaactgcaacattgatatgggaaagtttaatcttctgaccagaaccagaagcatttgctacccttcgcttttactacacttttggaaaacaggnaatgaaatcta

SEQ ID NO: 102335 - DNA, 461 bp, Glycine max
  Clone ID: PAT_MRT3847_63425C.1
aaaggcaaaaaaatcatttctttgggtttaagttacattctttacattacaagctaacaaaccattggtttgctccttaaacaatcgctgaagtattcaattttataaaacacctaggccttttactttagggaaaatcaaaatgaaaaaaaaaaagaggttagttaaacaatgaatgaatatggggaggtcataaaggccctcagggcctatgtccataaatattttatgaccataaactatgttatctaatgttgcaacataggggctttcctttttgtggcaactggccccacatacaggtaatttgtcttgaaaattggtaatggccagggtataaatcttcaatgcccccaaattggcaaaacttgaagctgtgcacatactcaactggccttaaactgttaaattgctctacccacattcccatgctaacatcctccatttaaaataatttaaat

SEQ ID NO: 102336 - DNA, 1594 bp, Glycine max
  Clone ID: PAT_MRT3847_63426C.1
tacggctgcgagaagacgacagaagggggtgaacacttgtctttaattgaaaagggttttgagagagagagagagagaaaatggcggaagagaaggggatgagtccgtgggagcagcactcggctgttatcaagctgcctcggtttgattacaacgctccctcttctcttctccgtaactcccattccggttttctcatcacttgtactatcaagcgagagaaaagcgctacaaaagaagcaatctctatccttcacaagttccttgggtcgggtcattatcacactttaaacaaccctaatgaagaagatactacttctaagagaaggaagatatgcacacaagatgctgccgaggaatgtttcgacgagtctcccactgctaactctggagctgatggtaaactttcaagtcctgttaaagcagaggcagagaaagacggaatagctaatctttctttggttaagctcacgaggaatgggttgcttctccttacctttcccattaacacgcaccctgacactgttactattgtgtcgaatatcattcaagctttggagtccgggactgtaagtttgccggtttggtgccatcgcattttccctatccaagctacatgcaatttgaaactaaaagaactttatgaagtagtatcaatgcttgttaaaaagttcttggctgataaacaggacaaacttgaacgacctctaaagtttgctgttgggttcaaccgaagaggaattgaagagaccacgttagcaaaggaaaattcaaatgattctaaagcatttagtttgctggaccgtaataaatgctttggagtagtggcatctgcagttaatcatgttgtggaagattcagtggtggatctcaggtctccagagctctctgtgcttgttgagttgctacccctttctggagtacccgatgcgtccataatagttgctgtctctgtcctcccaaggaaccttgttagtacaaagcctcgattatgcatcaaagccttgaattctaataccaaggaagggtctggagcaacatgaagactggtgctaatgtcttactttagcttgcgtggacaatgttgctttgtatgatcctgcaaatgaaaattgaaagatgcagctagaaataagaaatcacccacctttctgaccctttctttctaacaagtaaaagctgttgccacccactctcgacccatttatatgttattggggctatcttaatattaaatgtcatatgcgaaatcaagttgagtacgtgtcgtacatgtgatgttgaactttttgagttttatgtcttcgtatattcactggtttctgaagctttatattagaggcccttgtatttttattttttttaaggaaaaaaaaaaaataattttgagatatatttgatgaaaaacgaaataatgtggattaattcgaattttatagtttacgtcgttttacaacgtcgtgactgggaaaaccctggcgttacccaacttaatcgccttgcagcacatccccctttcgccagctggcgtaatagcgaagaggcccgcaccgatcgcccttcccaacagttgcgcagcctgaatggcgaatgg

SEQ ID NO: 102337 - DNA, 544 bp, Glycine max
  unsure (1)..(544): unsure at all n locations
  Clone ID: PAT_MRT3847_63427C.1
aaaccccggcgggacccggaccggaaaacccgggacgacccacgcgcccggaatanccgacaaaccgcgaacacaggaagccgcaccaaaaaaccggaaacaaaagcaatcgcaacttgatgacaagaagcctccaaagacacccaacaccttggagaacgaaacccgaagggaaagaaaaccacacacagagccggccacagactacgcgaaacaccaactaccccacactcagctaaaaagctgaacactcccccaatggaaacaggactaccgcgccagattaaaacttaaccggggacaatcacagaccacagcaaaaagccaagcccaagccggcgaaaaccaggaaaagagcaaccactcaccaaacagggaaaggaacccgaggggagaaccacccaaaaagccggccatacaagcaccacgcacaacaaacggaaccgcaaagccggaaaaggggccccaactgaaaaaacaaccgggcgacggggcaaagggtggacacaaaaaataccacggggacaaacggcccaaggaaaaa

SEQ ID NO: 102338 - DNA, 575 bp, Glycine max
  Clone ID: PAT_MRT3847_63428C.1
tacgcctcgcggttccggcccggaattcccggggcgacccacgcgtccggagaaaatggcggaagagaaggggatgagtccgtgggagcagcactcggctgttatcaagctgcctcggtttgattacaacgctccctcttctcttctccgtaactcccattccgggtttctcatcacttgtactatcagttcagtttcttctctttcattctttctttaccttgcaccttcttgcttggcattgtttgcaatttctctttccagagcgagagaaaagcgctacaaaagaagcaatctctatccttcacaagttccttgggtcgggtcattatcacactttaaacaaccctaatgaagaagatactacttctaagagaaggaagatatgcacacaagatgctgccgaggaatgtttcgacgagtctgccactgctaactctggagctgatggtaaactttcaagtcctgttaaagcagaggcagagaaagacggaatagctaatgtttctttggataagctcacgaggaatgggtgggttctgcttacctttaccattaacacgcaccctggcact

SEQ ID NO: 102339 - DNA, 1718 bp, Glycine max
  Clone ID: PAT_MRT3847_63429C.1
tgaatgctactaaattttcattacatcttttgtacaaagtatggaagtctacatcatcaaagtttgacaaagatagttcaaactttaaagcatactaaattgactgttcaaaagaaaagagcaatggcaagaaaaaaggaaaatgttcaaaagaaaaagggctatagcaaaagaaaaaagatacactgggcagagattgttccgtactttacagtttaaccatgaggataacaatgacttgatgaagctttcaacattcctacagatatctaaaatggagattaaatcctacttttcttcccacacatatctcttgtaactattcacaagccagttttgtatcaaagctagtcaagcatatggcaaaggcctgaaatgcagagagggggtatcgatagtccattgtaaacatatccttgccaaccttgccaaactgaagaatgatcttgtcagggtcagaagaagattgtgttggctgagatggtgtaggtcctgttcctgtagtaacaatggctggtggtggtgtcgcagcaatcagctgaaaattcttgacagaggcaacagtgacccttcctctaaagttgaggcaccaacattgcagctgttcatgccaccttggagacttgttcttgagaactagtggtcttacctttccctcctcatcttcattgccaatccccatgatgtcggagaatctagagctgctaaactcagttgaattgtcaattgattttgagaaggatatactccggaaagaatcctcaaggtccctagtggcagctacaatattgcccatgtcacctatgagttgaatgtccttggtactagggggccacgaaggatgaattgcacaatgtactcaattcctgcatcatccatggagcctaatggcgttgtcccaggccagccagagctccttccccgtgcccttgaggattctttccggagtatatccttctcaaaatcaatcgacaattcaaccgagtttagcagctctaggttctctgacataatgggaactggcattgaagacgaggagggaaaggtgagaccactagttctcaagaacaagtctccaaggtggcatgaacagctgcaatgttggtgcctcaactttagaggaagggtcactgttgcctctgtcaagaattttcagctgattgcctcaacaccgccagcagccgttgctcctacaggaacaggacctacaccatctcagccaacacagtcttcttctgaccctgacaagattattcttcagtttggcaaggttggcaaggatatgtttacaatggactatcgataccccctttctgcatttcaggcttttgccatatgcttgactagttttgacacaaaactggcttgtgaatagtttcaagagatatgtggtaagaaaaataggatttaatctccattttagatatctgtaggatgttgaagctttcattaagtcattgttctccccatgtaaagtatgcaacaatctctgcccagtgcaccttttttcttttgcccattgccctttttcttttgaacatgttccttttttcttgccattgctcttttctttcggacagtcaatttagtatgctttaaagtttgaactatctttgtcaaactttgatgatgtagacttccatactttgtataaagatgtaatgaaaatttagtagcattcaattcctgtttgctctaatgcaaagaatcttaatttc

SEQ ID NO: 102340 - DNA, 659 bp, Glycine max
  unsure (1)..(659): unsure at all n locations
  Clone ID: PAT_MRT3847_6342C.1
cccacgcgtccggttctagatcgcgagcggcgccctctttttttttttttattttttttnttttttttttttttgaactcacaaaaggggggatatcttaaaaactttttccagagtacataaagagggagactaatgccaataagataagaaaaaaaaatgccatgcatgctccttcctatgattgggaagcatacattgggatcaacaatttctaacgaaggaagggaactttaatttcaagcaaaggcgcaagcaatggttattcatggaagagactaaacaaggtgttgctctccgagaaagattgaggatggtgtcttttgaaattgctgaaaaaggccattgcagtgaaagcaacaagcaaattcggagggcaacccttaaggataacgctgctggggtgcatgagatcaagcaatacaacgagcacttgaatccacccagagaagaaatcaacaccctttttggagaaaaagaaaatgcatatgaataatttgtttgtcaatggttctccaagtggcgtctatctttgtttctgcgcagatttgggcagaagagggatgattcatttgctggtggtgctgagaagcaaggtcttgtggctaaagatattgaacagaaactttacaaatgagagaaacttttgagcttctgag

SEQ ID NO: 102341 - DNA, 133 bp, Glycine max
  Clone ID: PAT_MRT3847_63430C.1
ttatggacaccaacaggctgcacccaaattagaaacatatccaagatcattctatgttctaactatgaggcttatcggatatgaaaatgtatttgtgaaaggacttgaagagttttgtgtgtgctgggagaag

SEQ ID NO: 102342 - DNA, 2001 bp, Glycine max
  Clone ID: PAT_MRT3847_63431C.1
cgtgcgtccgggcgaaagggcaaatttgttggatgaagacatataagcctttagatgattaattatgcggtctgaagctagtggcgactcagctgctttgtatgtgttgcggtgctcagcctcagcctcagcctcaggcagcaccgtttatgaggttcccattttggaattcagttcatccaaagaatccaacaagtgtagtaagggtgcaagcagaagcagcagatatgaatatgaattcaatcccacacgtgctgagtgttgctgggtctgattctgggggtggtgctggaatccaagctgatcttaagacttgtgcggctcgccgtgtctactgttccactgtcattactgctgttactgctcagaacactgctggggttcaaggactcaacattctacctgaggattttgtggcagaccagttgcactctgtgctctctgatatgcatgttcatgtcgtcaaaacaggcatgctgccctctcttaatatagtcaaggtcctttgtcagacccttaggaaatttcccatcaaagctcttgtggttgatcctgtcatgatatctaccagtggggatgtacttgttggtccttccgttcttgctggatttctggaggagctgcttcccatgactgacattgtaaccccaaatataaaagaggcatcagttttacttggtggtgtgccgctgaaatcagtttctgacatgcgcactgctgccaaattgatacatgatttgggtcctaggaatgtacttgtcaagggtggtgacctccctaattcgttagatgctattgatgtattctttgatggtgaggagttctacgagctgtgttcaccgcgtgtaaatactcgcaatagtcatggtactggttgtaccttggcatcatgcatagcagcagagctggcaaagggttcatcaatgctttctgcagttaagacagctaaacattttattgaggctgccttggattatagtagagatatgacaattggaaatggagctcaaggcccttttgaccattttttggcacttaatatcaatcagagttcttgtaggctgaataggttcaatccaaatgacttgctgttatatgctgtaacggattcggctatgaataggaagtggggccgttctattgctgaagctgttaaggctgctgtagaaggaggtgctaccattgttcaattaagggagaaggatgctgagacacgagattttcttgaagctgccaaagtgtgcctcgaaatatgccattcctatggagtacctttacttataaatgatcgtatagatgtggcccttgcttgtgatgctgatggtgttcatgttggtcagtctgacatgcctgcacgtcttgctagaactctccttggtcctgaaaagataattggtgtatcgtgcaagacgcctgagcaagcccaccaagcatggattgatggtgccgattacattggttgtggtggtgtttatccaactaatacaaaggcaaataatcgtactataggcttagaaggcttgaaggaagtatgcctggcctctacacttcctgtggttgcaattggtggcattggtctgtcaaatgcacgtgaagtcatgaaacttggtgcaccaaatctcaatggggttgctgttgtttctgctctatttgacagggaatgcattttgactgagacaagaaacttgcacgcattagtaagttaggcagcattgttgatacaatgaatatattagaatgtgggagcaattttgcttggttctttctagtcaaggaagtgattactaaagttgtagttgcttttgcctctaggatggaaatatataactgcatattcttttcggcaccgtgctaaacttacaaaacataccaattaagtagtttatgattgctcgatactggggcagaacaaaacatttggaggctcattcatttgcctatgttggatgttcgtacctgttgatttacaaataatggtttgattgttcgcgaaaaaaaaaa

SEQ ID NO: 102343 - DNA, 157 bp, Glycine max
  Clone ID: PAT_MRT3847_63432C.1
cgcgacgaagctcggaaccggctcgaggtatttctgagaaatatcgcggatttacaaagaatctggctatgtttcttctattcccaaaggagaatatttttttcttcttaacacaagcatagaacgatatttattcttgcatcaacctattcactat

SEQ ID NO: 102344 - DNA, 153 bp, Glycine max
  Clone ID: PAT_MRT3847_63433C.1
gaatgagcggacgtctaaactaaacggactagagcaatttggtttggacaaacttatacctaccactaaggtaaggtatctcaaaaatacaaataacgctaattgtcgaatatcatatcggcgatcggaggacgtatctaaagttgtgacaaa

SEQ ID NO: 102345 - DNA, 423 bp, Glycine max
  Clone ID: PAT_MRT3847_63434C.1
ggaaaaagaacacataagcgtagcacagagacacagcaatagataaacacacacacacacacacgagagagacgcatccattgttataagacgcaggcaagagataatagaaaacccagaatcttgacaactccattctttcgccttcatttattattatactgaaatagagatcttattcctatctcttcatcctacaatacaacctagtaactctctctttcaatatcacccctgccccttttcatccattcttattaacccatcaagttttcattcctcttcctcgctagattggaattagggttttctttctctccctggctatctacccagcttctttccgttactggattttctaggttttcattggatcgtactcgcggggtttgcatgaaatgggcatgagctctgttctcttca

SEQ ID NO: 102346 - DNA, 129 bp, Glycine max
  Clone ID: PAT_MRT3847_63435C.1
taagatttaggccgtttgctccccaagagaaagaatcaatagtggcctcttttagatatcagcctaaaacagatgtgcagggcggagcccatgggacatccatggacctgctctacagccttgtgcctg

SEQ ID NO: 102347 - DNA, 153 bp, Glycine max
  unsure (1)..(153): unsure at all n locations
  Clone ID: PAT_MRT3847_63436C.1
atatttctcgagccaggattagcccttatcaacacaaantattgtaatggggtgggttnagtgtgagaaacccaacaccaccgcctgaagtgttgtcctacccaaaagccatcacaaaccccatactgctattgaagtatgccaacccccaac

SEQ ID NO: 102348 - DNA, 378 bp, Glycine max
  Clone ID: PAT_MRT3847_63437C.1
ttttatggtaaaaagatgttaggcgagttgaatgtggaatcccttctggatttccgctcacagttatttgcaatagcattattaatgagatgctcattagatatagctatgaaaaattactgcgccaggctaaagctccaagagtgtttctacaatccttcaaaaattatgcttctttgagtgagtatggtgatgataacttaattagtgctcatgaatatgacaagccttacttcactggttctaaattgaaaagctttctagctcggtcattatatcaccattactgatggtcttgacacaactagagcgactctgcaattgagaaaagcagcagattgtgattttctcaagagaaactataagcacatgtttaat

SEQ ID NO: 102349 - DNA, 386 bp, Glycine max
  unsure (1)..(386): unsure at all n locations
  Clone ID: PAT_MRT3847_63438C.1
ttgggaatgattcctagtagacnagcaataattgcttatgacacctcactggctggggatcgccctttgtggctttttatttactccaactgggccttttttgctgctctcgctcctatgtcatgcgggttagggttcactcacgaagaaaacctcctcatcctcagtgaccatgacctcatccactattaggcataaaaatgctacgttactgtttaaggatacgctcgtgggtgagtacactgcatgaacctagatccgaagagcgctagatccggtcccgcgctcttaggaagaaggccccactgctaagcttacgctggttcactccactgctgaaaaggcttccggtgagccttaccgagtttagggtttcccgcctctta

SEQ ID NO: 102350 - DNA, 299 bp, Glycine max
  Clone ID: PAT_MRT3847_63439C.1
gactcgaccaaataccggggcgacccatcattcttaacacttctaaaagactacacaaggttttttgttttattctataatcatcccgagggggggtattaaaaatacaggtccgcttaaaaacttctaacatataatactataacccttatttgtcaaaatcaactcattccataaaacaatttcaagatcataatttaatataagttaatcatttctactaatcatcatcattctaattttttcataaaacatatcaaactaaaatataccctttgacttattacaacataccatta

SEQ ID NO: 102351 - DNA, 922 bp, Glycine max
  unsure (1)..(922): unsure at all n locations
  Clone ID: PAT_MRT3847_6343C.1
gtgaagctgctcagatttcacttttacgcgtcggagaaaaacccttaaagagagcgagcagtggcaaggaaaccccatggtcgatgctataaaagcatccgttgtttgagattccatgtttcgaatcgtccaacttgagatcctcacaaaaacttgaatcaactctcctccgaacaaaaaagagaaacacgaaattcataggaagcatccttggttttatatcaatttcaaaggaacgagagaaagaaaaaaaaagcgcttaaattggttattcatggaagagactaaacagcgtgttgctcttcaagagagattgaggatggtgtcttctgaaattgttgaaaaaggtcaaagcagtgaaagcaacaagcaaattctgaggtcaacccttaaggataacgctgctgtggtgcaagagatcaagcaatacaacgagcacttgtgggcggacgcgtgggggacagaagactgactgtgacaccttgaagttaataaattgacatttttcttgcattttgatttaaaaggtatggggcaagactgggtcaaaactctatggccctagtgctggagtagattatgaagacaaccaacttagattcagcttgttatgccaggcagcacttgaggcaccaagggttttgaacttaaacagcagcaaatatttctcaggaccatatggcgaagatgtaatttttattgccaatgattggcacactgcccttcttccatgctacttgaaatcaatgtaccagaccaaggggatttacaaaaacgcaaaggttgcatattgtattcataacatagcctaccagggtaggcattcctttgcagacttctctcttctcaatttacctaacaaattcaagagctcttttgactntactgatgggcatgttaagcctggcaagggaagggaact

SEQ ID NO: 102352 - DNA, 662 bp, Glycine max
  Clone ID: PAT_MRT3847_63440C.1
accacgcgtccgtctgaacagaacacttcccatggcggctttgtcttcgagctgtagcacatcccttcccaaaatttcctcccatcgattcaatttctatccacaccacctaaatttacctccttggcccccaaaatcaatgccaaacaatcccttatcactctcaacaacttgcaaacgccgcaacgtgttcagcgaagaattcaacggaagcgtggcagaagaggagagtttcagctccatggacgacaagcaattcgtgcgttggttccgcgagacgtggccttacttgtgggcccaccgtggcgctaccttcgttgtcattatttccggtgaaattgtcactagtcccttattggatcccattctcaaggatatagccttccttcatcacctgggaatccggtttgttcttgttccggggacccatgtgcaaattgacaatcttttgcgtgagagagggagacagcctaagtatgttggtccatataggataactgatgatgagtctctagcagctgcaatggaagcagctgggagaataagattgatgattgaagcaaagctttctcctggaccctccatttacaatattcgtcgacatggtgacaatagccgtttgcatgaagttggtgtcagtgttgcaagtgggaactttctgc

SEQ ID NO: 102353 - DNA, 298 bp, Glycine max
  unsure (1)..(298): unsure at all n locations
  Clone ID: PAT_MRT3847_63441C.1
cttcttttttttctgggggggcnatagattgaaccctccgttccccccccgcagtgaggacgcttttcatccttcctttgacccctgggcgaccgattttattggggctttcccggttcctcgccgtcaagggaatcctcgttgctctttcccccttattgattgttaaactcacggtagcccccctgcctttgttttagatacgccatcaccaagggcctcatgggccaaactgaccgctcccactatggctgtggtggtatcccctttatacggcaagttggctgacccattttaa

SEQ ID NO: 102354 - DNA, 489 bp, Glycine max
  unsure (1)..(489): unsure at all n locations
  Clone ID: PAT_MRT3847_63442C.1
atggtcagcgataatattttatatagaacgactctcaatttaatattaggctgaacaatagtatttctttgacataattattgttgtagacattatccatcataaaattggtcataaatattctgttttagtctcactatcctctgatgtgccgtgctctgcaaaaaatcaaaacgaaacctgaaaattgcctcatacagccatacattattttcattatatttgaaaaaaggaaaaaggatggaagcaagatgcatcctgataggaattttattcgacccatttattgggttcttcacttcttctatctatctctatctgactatctggntggattaccctagcaagtagcaacccttttgattntattttttttcccttttcattgtcaggtcagttggagggatttgatatgcttgactgtacaaaaaacaagttattttccacctcattttcgaatgataatcgaggcattccattgngcttttc

SEQ ID NO: 102355 - DNA, 417 bp, Glycine max
  Clone ID: PAT_MRT3847_63443C.1
aggaggttgacatgctagttgggaactgcgtgaccatttcccttgcttttggttagggtttccagagttttccaacttatcaatccacacaacttcattcattcagagaaagaacaaaaatgatcgagctgttcctgtcggaaccgaattggaacgacgtcgtaaacgacgacgattcaactcgttcgagaatctccattctcaacgacttggaaaccgttatttggtctacggtgggtcgctccgaggcgcggttgtggctctgcaacactgtcgcgggattgaactgcgtaacttccctcgatcagcgtgacctgtttcggaatttgctcagaaccagtggggtgaagcgggatttggcctctcagctcctgcatttgatgttcgacacggcgccgcacaaaccaagttccgttt

SEQ ID NO: 102356 - DNA, 320 bp, Glycine max
  Clone ID: PAT_MRT3847_63444C.1
aatcccaaaacaataacctactatttgctgcatgaacgcctacttgtagatgggagaataccatttgcttgaaatgtttgacacagtgagctccaaccgtaaaacttcgagcttaatcaatgaacagaatcgttctctgaaaagtaagcacatgtgttgaaaatgcctatcacatgcctgaaaccaaggctcacgaatcttggatggaacgcttttgttactgcgctaatctgaattataaaagccccctttgaagacatgacatggacgtctaaaggaccaagcaaaagtgcaagcacccggtaagtgacagctccgcc

SEQ ID NO: 102357 - DNA, 315 bp, Glycine max
  unsure (1)..(315): unsure at all n locations
  Clone ID: PAT_MRT3847_63445C.1
cattatttacccaccaaatgttatcgtagttaaatatgttcgagccgtagttggcgctaactaccacatcattgcgtgggtaaagacagtcaaatgcgccttcagagttattttccgcgtacatgctatgttatagcacttctattataaaaaaaaaataaaggtcgctgtccagtattgaactaatanatccttgaattaatttctgacccatacctaataagctgtccagcttttacatataaaagtcgtattatagttttgaataacaaggtcataactgtttcctgtgtcaaattgttattcagtcaaaat

SEQ ID NO: 102358 - DNA, 570 bp, Glycine max
  Clone ID: PAT_MRT3847_63446C.1
aaataaaaaccacacctttataacttgagggcgaactcgaactttgtttctttactgaataagaaggtggagcatattaaatacgagggacactcgcttaattccctttatggaaagaaaccaacgaacgagcaacagatgctttagctggcctcccaggtaaagaatgcaaatcttctccttatctggttttcttttcgttgtgatattaatagtccccttttttatttcttccttttaatccagattcccttattcttcttgaacaagttctttcttgttctttgtttgtgagtactgggacttaggacctcccacagtcatgaagaataggattgcccactcccttccccacttttaaggacccttatcaggacctattactttacaggggagccgcgattgccaccaatgtaggaaagattccgcttgactaacttcttcaaaccggtttgcaaagcggctgtgggctagaaccctagctctctacggggcgaactaattttttgggaggaaaaggaacgagaccgtttacaggcatgcacacaatattcctctttgccttcacct

SEQ ID NO: 102359 - DNA, 526 bp, Glycine max
  Clone ID: PAT_MRT3847_63447C.1
atttcgtccacatgagtgtgctattccttgtccatttttatttggtccacgtaagtgtgctattttcgttaatgaatccgaatccgatcaatcaactttcctccacgacttgtgttgtggtcacgaacgtgttttcaagatttcatattaaagttactgatccgtgagacttgtgttcatttaatgcagagtccctaggaccataagacatacaaaattgaaaccacaagtccctaatggctaaagattagccccacgtcttccctcaacttttgcccttttcacccactgccacgggcgatatataagtttttagaaaatgaaaatttaaacatctaaatgcattgagtttatctcattcgaaatatttgtaattttatgaaaaaaaaatgttttatttatcactttaaaaaattaacataatattatttggttttaagtatttttcaataaatatataagaagagcatttataaatgataattaattaaatacttttcaaaattaaaattattttgaaatataa

SEQ ID NO: 102360 - DNA, 450 bp, Glycine max
  Clone ID: PAT_MRT3847_63448C.1
ccgccccggaattcccttccgggttcgacccacgccggcagtcctctcgaccgagaagaaaaccaccctcgagggtgtttttctttcggactgtggcactgtctacccctcactacaacacgtctccaaattcttaatgtttatggaatggagtctcactctagactcctctcactctacctcctccaccactaaccacatcacgttccccactctaggagatccggtcaaccttagcccctcctccgatcacaatcggacggtactcggtgaagaagactcctactccggtgctagaaacatctcatcatctcacaccaacaacgaacatgtaaccccaattaagggtgatccacaagtaaagactgaattgcgacttcctaccgctaacgctggaagtgaccagtcaaccgtggatgaaggggctaaataggatgctgaaaataagcc

SEQ ID NO: 102361 - DNA, 184 bp, Glycine max
  Clone ID: PAT_MRT3847_63449C.1
atacaaataaaaaaaccaaaacacccggcattaatattaaagcacaacctcataaaaaccactaccataaaaagaaacctgggacaaaaacccaaaatccacagtaacagttacagactcagccaatcccatcctgcgaaaaacatatgaatgcaacgcctcacgataaatgggtcatccctta

SEQ ID NO: 102362 - DNA, 1088 bp, Glycine max
  Clone ID: PAT_MRT3847_6344C.1
aacacgttaaaatcatattttattatctacatgtaattcaacattaattattacaactttttaatactcaaataggagtatcagcggcacgagcctctccctagtttcattatggaaatgcactcaaaggaacttcatatccatgcttgaacatttgtcccaatgtttttaaaaccatggaaatctggccacggctcatgtaagctttgtacattatccataatgttttctttgagcatttaagcttgacattttccatctcttcaaggacattatgcatttcgagtaaggtcatctgtgacccatacatgactagcttacaatgatataaggatcggcagatactccacccagagatttccgcacgtctcacaaaattttctagcttttctactgcattacatcgataataagttgcaattatgcgtctcaaaatacccttggttgttatagaagtcccatgctcaaatgcctcatttatagcattctccattttcgctaaccagtcttccttggcatagagtttaatcaacaaaacatttaaccatggcctgtactctttttgtggaataaacttcaacaataactctatcttcttaagtctatctgcatgagaacttctacaataggcacatatcatacatctgattaatgaaatttcctttatattaacatgatcccttataaaggaatacatctcttccatcttttcaagattacctgaatttgcatacccacgaagcattagcatgtaggttttcatgttaggctcaacagagctcaacttcaacatttgaaacaccttttccatatcatcccacatccaagccgtgatatatccagcaatcatgtgattgtaagtgcagatgttcatggtgaaggttaacttttgtatctccctaaatgttgcttccatgtgatcaaccagcatcaagcgaccaaaaacagatagaagaatattgtacgtggcaatagaaggatcacaagtcagatccctcttcaaatcacaaaacaaggactggcagttatcagcaagaccattggacatacaagcacccataagcgcattgtaagtgctggcccgagcc

SEQ ID NO: 102363 - DNA, 237 bp, Glycine max
  unsure (1)..(237): unsure at all n locations
  Clone ID: PAT_MRT3847_63450C.1
gcgccaatcatanaaaaatatacaactgcagaacccagtggtataaatacacaacgcgttattcttcatagggcttcaagaataaaaaaagatgaccccagaatcagaaaaaaccatcgtcttcatcaccattcaaaacatgggcaccacaatatctgtgtgaattctcttcaacggaaactattcaacactatgttctatggcctgaacactatttcaaccctgtcataaacattt

SEQ ID NO: 102364 - DNA, 169 bp, Glycine max
  Clone ID: PAT_MRT3847_63451C.1
ctccatgtcaatattacccttgcacattccccattctctggccttctttttttatcgagataaacaatgaagatcttcaattgggtccacatgaggtggcatgatcacaacactctgattgatgggtttgctacaaacatgaaaaagactgaacctacattttacaaca

SEQ ID NO: 102365 - DNA, 522 bp, Glycine max
  Clone ID: PAT_MRT3847_63452C.1
cttgtatctacttattgtgaacaaaagtacaccagagaagtagggtgatttcaacaattaaaattgtttggttcccgtctttcttctcaaactcctgagtatttttgtcttgcaaatcagagttacaagttcctggtggacgcaccgaggcagaaattccaggtgccattccaatttcaaccaaagctaccattccaaccttaccaagagctacatcagtttcttctaatgatgcacctcctagtcacagagcaagtgtacttccagcaaatgaagaggatcaggatgagaagtgtttactgaagtggaaaggacacaggaagatcaaccgaatttatggtgactggcttgacgatttaccactcgttcacgacttgccagttgccaggtagagtggggacctgacttgaagtatgtgatcttgaaaagtctcaccaattggatggattaggaaattgcattcttccctgaagacaaaattttgaaaaatgtggtcactgattgatggtgatcagttcatag

SEQ ID NO: 102366 - DNA, 714 bp, Glycine max
  Clone ID: PAT_MRT3847_63453C.1
gatattaaaggttgatttataagaataaattaaaatgacacgtgatacaagacatgcattacatgttacggactaacaagtcaatttagatacttgcatcttcatctataaactcacaaacacttggttgattccaaacagcagagaaattggggtcacaagacacttaagatatggcaatgatagatcagctgctctctgaattcaaaaagagaaccagtaacattaagaattgactttaagtccaaaaattaagctgctacctgttcaaggacttctgattgctgttgatgagattcctcaaagtgaggaggggatgatgatgatgatgatgggtgatatggtccagtcacctgagaagatggtgctgcagatctatgatatggtggtgacattttagctgatgctccattccaaggaatagaggaccctgacattggaggagacaaccctgacgatggataccatcgttcttccatttgttggggcccatgtggtgttccataaggctgatgtccgtgtcctgccatttgaggtgaagatccagatggtgtataatgctgctctgtcatttgcggggctaccctgctcatgtgaggaggatgttcagatgtattagggtggtatgactgtcctgtcatatgaggtgacgatccaggatgaggcccagtcattggaggagataatccccatgaaggttgatgcattacagac

SEQ ID NO: 102367 - DNA, 362 bp, Glycine max
  unsure (1)..(362): unsure at all n locations
  Clone ID: PAT_MRT3847_63454C.1
tttcccacatcacattctacaaaatgtaccgtttcattcaacctatggcaaccatanaaaaattcttttcaatttcctacatctttcaaaccccctcacacatactattcaattcaacttactcactccacatcaaactttttcataatttaatctattaaatccacaaacacacctcattctcaaaaatttcctatataatctcatctacaattacaaacctactttttttttaacttcttataaaatatattattcaatttatctcttttaataattctatctttatcatgtctcctttaattttattttattcacaataaattatcaactttttatttacttttaataaataaaaattt

SEQ ID NO: 102368 - DNA, 667 bp, Glycine max
  Clone ID: PAT_MRT3847_63455C.1
aacaaattacaacttcaaataaaacagagcatctctctgctcttctctgttctgttctgttctgttctgtttctctctcctccccatatattcctcttcttcttcagaactcagaactcagaagggccacttcacttttagaaacccagttttgcatctgggtttttgcctgttgaagtgccaattttgaagataataataaattctattatgacttggaaaagcagaggagaattgccttctagaagcgtcatctcgcagagatgggtactgtttctctgcttaggaagtttctgtgctggaatgctcttcactaccaggttcatcacttttcctatttcctattgattcatttcgcgtttttttttattgattaatgataacttcttctcggttttcaagctttcattcatcgtagtttctttattcatcaaaccaatcttttcatatcttcatcttcatcacacctcattttttttataattaattattggtttccgtgtgtttaattcattgacttgcttatgcggtagtttttcccccccacctatcttgtgttcaccaaagctcatagaacaagtggatttagatctggattcaattgccatgaatgatttctaattatgccaatttcggtttaagatttcattatgattgactcctattg

SEQ ID NO: 102369 - DNA, 441 bp, Glycine max
  Clone ID: PAT_MRT3847_63456C.1
attcggacgcgtgggtatggctccatcatgtagaggttttttccttctgtggcaacatcattcatccgttagaaccagaaaaacatattgcagatggtgcgatatgtgtgggaggctgatggattaaaaggctattacaggggtgtaacacctggggttattggatctcttgctactggcgcaacatatcttggtgtcatagaggccacaaaaaagtggatggaggattcacattctatccttatgggccactgggcacattctattgctggagctgttggtgatactctagggtcttttgtgtatgttccatgtgaagcgatgaagcatcgcatgcagattcaagggccaattgcatcttggagactcggtgtagtgaatgatggcatcggaataagcctggcgcacagatatatggatattatacagggatgttacatg

SEQ ID NO: 102370 - DNA, 415 bp, Glycine max
  Clone ID: PAT_MRT3847_63457C.1
aaccaacaaaccaataaattttgtagggggggctggttcaacaacactatgcacaatccgctgtgcaaacccaagggtgccaggattccctgtaatgccctaacccttgttatattaaaccttttaccgatcttgggcgggcagattcacttgcacgaatattctcggtggggtgatgccctccccttttggagagtgcaaccgaacaccacgctggaacgactgaatgttgatgattgccattcatatgccagggaaaatcattaactttggtgttgaagatgaaactggttaacagctgtcactgatgtcctattgacgaggtagagccatgtgctccaagagttgtcgggtgtggaatgacaaatagccctccattcttctttgcgtattttatcacccctgtgcgcatcag

SEQ ID NO: 102371 - DNA, 454 bp, Glycine max
  Clone ID: PAT_MRT3847_63458C.1
ggctcgagcgacttgggacagagagacaaacaatcaatttcgaagggcaccaggggatggaaagagaggctggtctctcccaatagttctatgccagaacttggttcagaagctaacagagaattgcactgccatgattgcgaccgtgtcccgaccggcgcagcgccttgaagcacctagagaaaataatcgggctgcaggaccttgtctatcaaatccacatgctttcgtgcactgttccattgcactgactagcaaccaaaacagtgtggacgctcgtggagagaactttgtgcgtgacaatagtactccaactacattgtgtgcttgctcacatcccaaacgagtgtcaccttgcttgcgtgaacgcatctttgctcagcctatcatgcttgaaagttagccctgtgatcttagcgtagacctttgagcctcacaatcaaatcaatggaga

SEQ ID NO: 102372 - DNA, 388 bp, Glycine max
  Clone ID: PAT_MRT3847_63459C.1
ctctctctctctctctctgactctctttaagatgttcaccgaaggactcgacgagagcgcaatccaatggatcaagcagggatcaaaagcaccacctgatgttgatgtccaagagcctcctcttcctcaggtacgctctcctctggccgagaaaatcagctgcagcagcaatcgattcccacgatctcctctcttgagcagtgccaacactctcaattctcccgttctccctccgttgaagttccattcggctttattacaaccgcgcaacctcgcctttgccgatcacgatgacagttacgaaagcacggaggatgccaatttctccgatgacgaaatctctgctcccaacaaccttgatttctcggactcgccaataccacacaat

SEQ ID NO: 102373 - DNA, 350 bp, Glycine max
  unsure (1)..(350): unsure at all n locations
  Clone ID: PAT_MRT3847_6345C.1
cncgggggggtgaggtactataaaatattcttttttttttttatttttttttatttcagtaatatatatttctttttttttttttttttggagcccccatggcaacccaggggtttttttattcccaagatatttctttggggcaaaatcccccaaatttccctccgggtgtttacaaggggaaaattctaagcacaaaaaaaaaaatcttcccaccaaggaaaacatttgggctcctaaaaaaatctggagtttttaaataccccctaattttttttgggaacaaaattttcccacaaaccccttattatttgggagctggagaatcttaaaaaacaaaaaaatctttt

SEQ ID NO: 102374 - DNA, 624 bp, Glycine max
  Clone ID: PAT_MRT3847_63460C.1
gttggaaaacaagaatgattttgacctcggcctcaacgcgctcgattatgaggtctgctttggtgatgttagcattggtggtgcagaactcaccaagtctgctaaaattgaaaaaagtggaattagttatattgatattccaattaccttcaggcctaaggattttggctctgcactatgggacatgattagaggaagaggaactgcttacaccataaaaggacatattgatgttgacactccctttggagcaatgaagttgcccatcagcaaagaaggtggtactacccgtcttaagaaaaagaaggaagatcgtgattatgatgatgatgacgatgatgatgaggaatgaagaaatgtagcaggttattactagctataaataaagcgggcattactttctgagttctgatggcgaatttttatgtatcttgagagatcaagttgacattcaaattatgtgctaggataagaatcttgaaaatttctagttgtactttattgatgatcatgacaatctagtgctgttttaatgtgagataaaagatcatttgccttgaaactttgtgtgtggccggttttatttattttatctaagaggtggggtttgctttgtcattctgg

SEQ ID NO: 102375 - DNA, 1838 bp, Glycine max
  Clone ID: PAT_MRT3847_63461C.1
tcggctgcgagaagacgacagaagggtgtgtgatctgattggatcaagctcaagctaacctggtgtgtgcatttactatctgcgctttacatagtggcattgtcggttttttttggaaatctctccttctgataagcaatgattctcgctctctgctcctttggatcactgatctcatctcaaatttcatataatgtctacatctgataatccagtagaagtttatattttttttcaatgatgaaaagaattaggtagtcgctacaaaagcggggactgttggcttcagtggaggggtgtagtgttaatctcattcacacattcacagttatactctctctctctttgtcgcttggatcactgatctcatctcaattttcagatatgtcgacatctgataagccagaagtggtggaaaggggtagcaaggatgaaaaacacaaggaagatgatcaagaggaggggaagggtggattcattgagaaggtgaaggatttcattcatgacattggtgagaagattgaggaagctattgggtttgggaagccaactgctgacgttactgcgattcacattccatcgattaatcttcacaaggcagatcttgttgttgatgtgctcatcaagaacccgaatccggtgccaatccctctgattgacatagattacttggttgacagtgatgaaaggaagctagtttctggattgataccagatgcgggtaccatcggtgcacatggagagcagactgtcaaaattcctgtcactttgatttatgatgacatcaagcaaacatatgctgatattaaacctggaagcatcattccttatagggtgaaggttagtctcatttttgatgttcccatcttgggaaggctaactctacctttggagaaaactggagaaatccccataccatacaagcctgatattgatcttgagaagattcattttgaaaggttttctttttgcactacaagagacaattttcatttgaagttggaaaacaagaatgattttgaccttggcctcaatgcgctcgattatgaggtctggcttggtgatgttagcattggtggtgcagaactcaccaagtctgctaaaattgaaaaaagtggaattagttatattgatattccaattaccttcaggcctaaggattttggctctgcactatgggacatgattagaggaaggggaacaggttacaccatgaaaggacatattgatgttgacactccctttggagcaatgaagttgcccatcagcaaagaaggtggtactacccgtcttaagaaaaagaaggaagatcgtgattatgatgacgatgacgatgatgaggattgaagaattgtagcaggttattactagctattaataaaagcaggcattactttctgagttctgatgggcaatttttatgtatcttgagagttcaagtggacattcaaattatgtgctagtatcagtattttagtgaatatatgctgctgcagtccggcttgtgttttctcttgaaactttcttgttgtacttaattgatgatcatgacaatctagtgctgttttaatgtgagataaaagatcatttgccttggaactttgtgtgtggccggttttatttattttatctaaaaggtggggttttgctttgtcattccggaattgagaattgactatggcttcttttgagggttgtgtcatgtgtgtggtttctattaccctgctggtttaaatcaaaaaaagttttctattgatgtcctcttttaaaaaaaaaaaagtttgtttttgtaatacccccccatgtattttctgtagatgtttttccacccttttttt

SEQ ID NO: 102376 - DNA, 286 bp, Glycine max
  Clone ID: PAT_MRT3847_63462C.1
cacgcgtgactacagctgccatataaccacgcatggggagaccgcatttgcaaaatctagcgacccagactacattacgtcgccgtctacctcacccccaggttacgtccagacagatataccacggagatctgcaaatgacacatcgaatcaggagtttaccttgctaaacacgatgtcactttggcgagtcattctcacatgcatatcacatatccgcaagtgattaggctgatgcatacttttcactctccccagtacgtgacggacacttatgcatcgatgc

SEQ ID NO: 102377 - DNA, 285 bp, Glycine max
  Clone ID: PAT_MRT3847_63463C.1
ggctcgagcactctcatgcatggggcatacttattttctatgtcggatctagatgtgggacctggggccgtctggctaaacgtgatgacacaatggatggcctatcaggcggcctgtgtggcaagctaatgccttcttggcgccagcgtcttcttgcctgcgccttgcctcgatctggtacgcgaggttgagctctgaccacccacgcctgaattgaggccccaactgccgcccccgctgactcaggagagggggattgcgcgcttgtagctctaccagtgtgct

SEQ ID NO: 102378 - DNA, 1505 bp, Glycine max
  Clone ID: PAT_MRT3847_63464C.1
gtgagcttggttttgattacttgagagacaatcttgccacgagtgtcgaagatcttgtcataaggggtttcaattactgtatcattgatgaggttgattcaatccttattgatgaagctagaacgccgcttattatatcaggacctgcagagaaacccagtgatcgatattataaggctgcaaagattgcagaagcctttgaacgagacatacattacactgtagacgaaaaacaaaaatcagttctactttctgagcaaggttatgaagattctgaagaaattttagctgtcaaagatttatatgatcctcgagaacagtgggcttcatatatcctaaatgcaataaaagcaaaagaactatttcttcgagatgtaaactacataattcgtggaaaagaggtccttattgttgatgagtttactggtcgagtcatgcaggggagaaggtggagtgatggtcttcaccaagcagttgaggcaaaggaagggttgccaattcaaaatgaaactgtaacgctggcttctatcagttaccagaatttctttctgcagttccccaaactttgtggtatgactggcactgcagcaacagaaagcacagaatttgagagcatttacaaacttaaagttacaattgtgccaacaaacaaacctatgataagaaaggatgaatctgatgtagtttttagggcaacttcagggaaatggcgtgcagttgtagtagaaatctctaggatgcataaaaccggtcgcccagtgcttgttggcaccactagtgttgagcagagtgattcattatcagagcaattgaaagaagctggaattccgcacgaggttcttaatgcaaaaccagaaaatgttgagagggaagcagaaattgtacacagagtggtcgtcttggggcagtgacaattgctaccaatatggctggtcgtgggacagatataatccttggtggtaatgctgaatttatggcacgcttgaagcttcgtgagatattgatgcccagagttgttaagccatctgaagaaggctttgtatcaataaagaaacctcctccctccaagacatggaaggtgtatcagttgttttttccatgccttctttctgttaatactgttgtcgtggctgagaaggctgtgcaattagctgttgaaacatggggcaagagatccttaactgagcttgaagcagaggagcgcctatcctatacctgtgaaaagggtcctgctcaagatgaagtcattgccaagctgagaaatgcatttctggaaatcggaaaagaatataaagtcttcactgaggaagagaggaagaaggttgtggaagctggcggactacatgtagtaggcacagagcgtcatgaatcacgtcgaattgataatcagctgcgtggtcgaagtggcagacaaggagatccaggaagctcccgctttttcttaagtcttgaagataacatatttcgtatttttggtggagatcgaattcagggcctaatgcaag

SEQ ID NO: 102379 - DNA, 331 bp, Glycine max
  Clone ID: PAT_MRT3847_63465C.1
tttccttgtccaagttatgttttttaaaaacaaaagacataaccccgaggcccttcctctctctctgtgtggtcatatagttcatacatctaaattacagtgcctatcttgtatctcactcgctccctctcctactcgcctgagcttatcctttatcttctccacctatcaccttcacctttctcccagtctgattccatatattgtgtgaacactgatttctatgatccacttagaggaactaatattgtttcacattcctacccttctgatcatgacaactttaatgaatcttctgttcattatcctacatattagtttatctctttca

SEQ ID NO: 102380 - DNA, 202 bp, Glycine max
  Clone ID: PAT_MRT3847_63466C.1
tcttcacttcatctcatcataaccatcagcttctatttaaaaaaatgccgatcaaaaacatctccatcgtaatcccttaaaaaacatctaaccttaacactcttacactcatcttcctgacttcattataatcttcatatacacattccactactcaatcttcttcatcgtctacaacaatctcaccctcaacttccctaac

SEQ ID NO: 102381 - DNA, 409 bp, Glycine max
  Clone ID: PAT_MRT3847_63467C.1
tggatcctgtagagggcccgttttttttttttttttttttttttttttttgggcaggggagggtgaaattattccatgggggggggctaccaccgggggcccagcttataacattttaccatagattccaaatgagcttctttgcattcaaaaagagtttcaatttacgcctaaaatattccatacttttaatattggcaaaattctgtgacctgggaagaaaaacttcttaattaaaaatgccactccaaccaaaaatgattataatggttattccacattagcccaaaatgcataatttcatttaaaaaaaaaactttttcattttacccatatttaaataaaaggtgggtgagaattatttaaatcttacttctaagaaccaccttattttaaccacaaaccatta

SEQ ID NO: 102382 - DNA, 279 bp, Glycine max
  Clone ID: PAT_MRT3847_63468C.1
aatggatcctttgggggggataggaaaaggtggttggggcagttttaaaccccatttttgaacggccatggccatggttccggccttttttggaaacccagttggggggggactaaaaccaactgggccccgccgggttggttgcctaaaataaaggcgatgaaaacaatgcagggaaaaggggggtgttcaacgaacgacaagacggtggctggggaggtggtccggttgtcccttaacccaaggtccaataggccctttgggaaaaaaataaagttc

SEQ ID NO: 102383 - DNA, 343 bp, Glycine max
  Clone ID: PAT_MRT3847_63469C.1
ggtccgtgctaataccatattagctatataggctgttcaagatatgctcatttggactgctaccagtcacagatcttgtggacgatcgctttgagattgactcgacccaatgttccctggaggagcactggaccctgtgggtctggatggtaaccctgatgcatatgctgagttgactgctcctgagaccaacaccctgtcgatggctatgttcagagctacagggattgtcagacaagcttttgtcaattgctagggcactctatatatcctttacgaacacacagctgatgctgttgcttactctgcgtgtgctcatgattctatctatgcagctgcacat

SEQ ID NO: 102384 - DNA, 383 bp, Glycine max
  Clone ID: PAT_MRT3847_6346C.1
ctaaattatcaacacgcgatggtttcacatgtgggtgaagcgctacacttgctatttttcctactttagacagctgctctggagtggcgcatgcatatgctgagcaactacagcaagcactacatagttgtcgcaatcgaccagcctcaacgcgagaggacaatacgcaccaagcttgatctcactgtcggggccattcatacatgctaactatataccacgcctgagctggagcagtcacttgtgtgaaatagttcccaaactcaacgtcctcctctatgcctccactgaccatcttactcagctaacacacccatgatcatgagcgcccagcgtagaggagcacatgtagttgctgttccagtatgtcctgagacgtttga

SEQ ID NO: 102385 - DNA, 240 bp, Glycine max
  unsure (1)..(240): unsure at all n locations
  Clone ID: PAT_MRT3847_63470C.1
nncngnntcctctcgngncntnggaatgnntgantgagttgatncagaagctnncctgtcagtantnnnagtnngtnatgnngtntgnggntacttncngcnctcnncannnngtaanactngtgtacggncnacntntcaantgtcntgacnatntcagngngnttgtantcntggatggaagcacngtggtttctngggatgtagtgatacttatggcccangtgtgattatccttnc

SEQ ID NO: 102386 - DNA, 606 bp, Glycine max
  unsure (1)..(606): unsure at all n locations
  Clone ID: PAT_MRT3847_63471C.1
gaagtactcaaaactctcgagaaaaagaaaaacaaatgttctagggaaaatctaatcaatatatgacaatcaacattaataggcagtacatcctacaaaaaagaattacgaaattcactgatgaaaaaagtaaatgtgccattaataattcgtggcaatagaaaatatatgatacataattgtaactattctctcataaaaacaattgtgtacagcatgagttgtaagactcaatttaagaaagatataatgagatccttctatttgaccccattaaatccttgtcagcgtaaatagcactttaacagcctttatcaaagatgttgaatatgcaactacttttatcccttcaaataagcaacaaaatctgactttctggaagaatataatagacttgagcatannaaaaaaaaaaaaaaaaaaaaaaaaaaaaaaaaaaaaaaaaaaaaaaaaaaaaaaaaaaaaaaaaaaaaaaaaaaaaaaaaaaaaaaaaaaaaaaaaaaaaaaaaaaaaaaaaaaaagggggggggcccttttaagggacccaattttacgtcccggggctggaaaggaaaaatttttttattggggcccccaaattcaatt

SEQ ID NO: 102387 - DNA, 475 bp, Glycine max
  Clone ID: PAT_MRT3847_63472C.1
cccttcgtccggctcctttgactccccggaaccagagctgccatacgcccataaccgcttctccaacttccttaagcagttttccgacctctcttctcttctcttctcatctcatctcttatcttcaccagtcaccaccctctctccccaacttcacgtgatagtttcaaatccaaaacggtgcgtattatcaccgccgcaagagacccttttcgccgttctcattggatcctccaatttgattctgcaaagcgtctctgtgtgctctacaattacgaaacgaaacgaggttcttgatggggtttcataaagtctctcgctttttcttttaatttggtggtttaagctctgcataaagacccctttaattagaatccgattaaagagaaagaaaaggtggtggtggtggtgtcggtatcacaatgccagaggttaggatcattgcccagaatctcatggacatggtggctttcat

SEQ ID NO: 102388 - DNA, 455 bp, Glycine max
  Clone ID: PAT_MRT3847_63473C.1
tttttgcctttatttataagcatgccatgtcaattcatgagttataatttataaattcgcaagttccaaaataatatatcacaactctacctcgtacaacagcactaaggactctacctacaaagatgctttccttcataattggttcaaactgtgacctgaaacaaggggcaagacatgccatctaaaccttccatccccaactaaggctactgtcttttaactagatgttctccactgaaatatccctttaaaaaacttcctcaatctcagggctatgatttacgggattatcgcttcttattacactctccgattcccaatccctagcttggttaacttcttccctgaaatctgctttaacaaactgattgttgagggaatttaaaccttatgtacgctcatcccatagctttggtttgttcagggcgaaaacactgtgggcagtattaagg

SEQ ID NO: 102389 - DNA, 126 bp, Glycine max
  Clone ID: PAT_MRT3847_63474C.1
cgcgtacgtgagcgcgagcatcgggattcgagcgcgagccacagacacttggggtctcagcgcatcagtgctagttctacctcgtttactgttgcactaggaatccaagatgaatagcaactacga

SEQ ID NO: 102390 - DNA, 455 bp, Glycine max
  unsure (1)..(455): unsure at all n locations
  Clone ID: PAT_MRT3847_63475C.1
atgatgcatgcaaaatcatgttcggatctttataaagntattggggaggatcttcggtaggctacctggcgcaactgtactgcatttgaagggatgcagcttgattgaactagtattttcctcgtaaaaatgggagagcttggtttagactttgcaatcataacaccttgtacccctgcttgatgggaagattnagatattgcatccatgatcacctaaatctgtctctaaagccatggctagggtagctattgctacctccctatatataacgcggnngatatatatatatatatatatatatatatgnatatgaggactntctttttcatcctttcggcatctatatatataattgntttttctttttaaattaggataacttttagttataatctcttcgatcttcccaaaaggaaagacccttctgagtcgatcccaatgnttgctttcct

SEQ ID NO: 102391 - DNA, 322 bp, Glycine max
  unsure (1)..(322): unsure at all n locations
  Clone ID: PAT_MRT3847_63476C.1
gcttctccaaaccgccacctccaccacttctgcttcatccctctccctcttcagccctacctccgaacctctccattcagttcccactcataaattgatggttcacaccacaaaaagatccacaaaccaccacaccctaaccgacgtaatctttaaaccagtcgaagaagtgaagaaagaactcgatctcgttcccaccattccacaagcttctctcgcccaccaaaaatacattgacgaatccgaanccggcattaacgaacaaatcaatatagagtataacgtttgctacctttaccatactatatttacatactttaat

SEQ ID NO: 102392 - DNA, 495 bp, Glycine max
  Clone ID: PAT_MRT3847_63477C.1
ccggaattcccgggtcgacccacgcgtccgctttctctctccccaacccaaaaatggcatcaaaattgaccctcattgcgttggttctcgcggtggccctgtgcgccgttgatctaacccatagcgcatcagcatcctcccctcacgcgccagcgccctccgtggactgcaccaacctcgtcctcaccatggccgactgcttgtccttcgtcaccaacggtagcaccgtcaccaagccagagggcacatgctgctccggtttgaaatctgttctcaaaaactgctccggcgtgcctctgcgaggctttcaagagcagcgctcagttcggcgtcgttttgaatgtcaccaaggccacctctctccccgccgcctgcaaagtttctgctccttctgccaccaactgtggattgtctgaaacgcctgctgctgctcctgctggaggcctctctccacaagcttgtgcatctgctgggcaagcgcatgcttgaactaat

SEQ ID NO: 102393 - DNA, 819 bp, Glycine max
  unsure (1)..(819): unsure at all n locations
  Clone ID: PAT_MRT3847_63478C.1
ccacgcgtccggttatctagaggtgggtcccagctcccctaaccaaaaaccactgtcaatttgtcatatcatatgttacttatttagctcccaaatctttggcattgggtgtggattgatgcctatttaggataagcatctatgtttgaaaattatgttctatcctgcagaaaagatggacccttttctgcttatgtggtaactatacttgttaagaaggtggatttggttctgtttctgaatcattgtaactatacttgtctaaagatttgtggtgggttcttgcagatttgggtttaaactcatctgcaggaactgagcacaggtagagatcttggtttttgcccttgaagtgaaagggttttgaagtttgatttttggtttagctgtgccacaagagtatgaggaaaaatgtcggttctcattcaggaaggatgtttagtgataggaagtggattctccccttttttgcaagtttgattatatctatgagtctagttctgacagccattcttggattacttagttctgatggcgggggagaacagtcaccgtttgaaatcatttccttcaagagatcagaggattcaagtggatattttgtggaatcagatatacaaaggtccttaaatgttagtgtggtgaagagggaggcaccgaggtttgcatatcttatttcaggcaccaagggtgatagccgtangatgatgagaacactagaagctgtgtaccacccaaggaatcaatacatcttgcatttagatcttgaggcgccgccacgggaaagggtgggattggncaatgcagtgaaagctgatc

SEQ ID NO: 102394 - DNA, 445 bp, Glycine max
  Clone ID: PAT_MRT3847_63479C.1
ccagtggaggaaatatggacagaagatagcaaaaggaaatccatgtccaagagcatactatcgttgcacacttgctccagcatgcccggttaggaaacaggtgcaaagatgtgctgatgacatgtccatcttaatcaccacatatgaaggaactcacaaccacccaattccagcttcagccacagccatggcttccaccacttctgctgctgtttccatgttgttgtcaggctcttcaacatctcagcctacagatcacagttttgcctatcatgcaaattctcctacactgttcagtggtgtcaatttcagtcttttagaccaaccaagagcaaaccaagtcttgttaccaaccccttcctcacatttactcccaacaatcactctagaccttacttctactccatcctattcattaaatcaagggaattgtttaccatcaaac

SEQ ID NO: 102395 - DNA, 105 bp, Glycine max
  Clone ID: PAT_MRT3847_6347C.1
tcggctcgagctgtgattagcctgtaccaagttgcgcggagatcatggagaagcatctggagcagtcggtgctgtcgaagctcccgtacgggtatgactcggttt

SEQ ID NO: 102396 - DNA, 341 bp, Glycine max
  unsure (1)..(341): unsure at all n locations
  Clone ID: PAT_MRT3847_63480C.1
agcgcgagcctatttatctcgagcatattaaaaatgaacagtatattacacaacacaggcattgtaatcctgacgctctcaaccttctttcaaaggcggagaanaaataataaaacaatctcaacaaacacaaacaaacaaacaaacatcttttacaaactcatatacgtaactcttctcttactacaataaaacccttttgcttctactctctacaccaacaacaatatactcctgaacacataacatttaaattacattaatacccttcatacccattttatattacttccaacattacaataatatcaaccggctcatcttacccacgaccaattaca

SEQ ID NO: 102397 - DNA, 515 bp, Glycine max
  Clone ID: PAT_MRT3847_63481C.1
gtatggtattattttttttatggggtttgcattttcaatagacatgtccttgatactttgcctattggatacagatccccattagttttctttataataaatttatcataattccatgaaggtttccagttaaataactaaaatatcattctgaatgtgtaacatatttggccttgtggtcatgggaaagaaatagataaggaagctcttggtgatagattgaaaatcgcgattctctacgattttaaaatttaaatctatctaaacggccttctttttaacctcaaaaacaaattaaagattcgctgttagcatttgaatcaacattcgatataaatgagttgcttttcatgttttttgcccaacgaaaagaaagtatcaaagaaaaccaacaatatgaagaggatacaacagcctgcttttaattttcccaaggaatcaaacaaaccagtttagccacggccagtatatcatttttacaaggcagagggaaccccccatacagaacctaaaat

SEQ ID NO: 102398 - DNA, 403 bp, Glycine max
  Clone ID: PAT_MRT3847_63482C.1
gactctgcgaaggtgcaacctgacagcctccaaatccaatggcttcagagaagaaactttcgaacccaatgagggagataaaagtgcagaagctcgtcctcaatatctctgttggcgagagtggagatcgtctcaccagagccgccaaggtgttggaacaactgtatggccaaaccccagtgttgtccaaaggtatgatccgttaactggcatttatggaatggactgctttgatgttctggagcgttctggctatcgagtctgacgccgacgtatgtgcaagtcccgtgttggaattcagcaccgtgtcacaaacgaggatgctatgaagtgtgtccatgtgaaacatgatgcagagatccgtaacgagatccaggcgatcgttcagctagagcgagttcac

SEQ ID NO: 102399 - DNA, 314 bp, Glycine max
  Clone ID: PAT_MRT3847_63483C.1
gaagaaaaaagaagacatagacaagaaggagaagaagaaagttactggaaaggacaagaccaaggagcttagtgcgctgaagcagaagcttgaaaaaattaacggaaaaatacaaccactccttgaaaacaaaactgatgtagagaaggtcaaggggaaagaagacaaagagaagaagaaaaaggaaaagaaagtcaaggatgacaaaactgatgctgagaaggtcaaggggaaagaagatgatggggaggacaatgaagagaaggaggaaaagaaaaaaaagaaaaagaaggaaaaggatgacaaaattgatg

SEQ ID NO: 102400 - DNA, 466 bp, Glycine max
  Clone ID: PAT_MRT3847_63484C.1
caacgtcgaacgcgtcaatgcggagctgtatactttgacgtatggcgcaattgggcgtcaatagctcacggatctggaagaggatgaggaggttgacgagcatcttgatccaatggggtacaatattggaatccgattgattgatgaattgttagctaaggctaatgtctcaagatgcaacgatctcgtagagactactgatgtaattgcaaaggttgggcttaaaatgttccatggagtcactgcctctgtgaccacatgggatgctgatggaacatggcgtagtattgctcaggaggattatccataggtagatttggttgtgctgactgacaactgccaaagatcggactattgcgacgtgtggagttgagtcataagacgaggcttggatatggtgtcaatgaaaactgagggaacttgtctgagtgatgcacgtcgtagtgatgaggagattgagcagcga

SEQ ID NO: 102401 - DNA, 335 bp, Glycine max
  Clone ID: PAT_MRT3847_63485C.1
gacattcggaagaggggcactaatatcattcatgatggtgtaacaggctgaatctagatcaaatatataataaaattgtaactttgcctgtacaaaatgtttggatgggatacactgtacatgcacgttgtttcccaggcttgaagtaaatgataagaatgagcgtaacattcttcagagcattgccatccacatatggtcttgtacctacctagagtgagagatccttcacctcacaagaaaaatgtatccttgatgtcatacctctaggggaactggtaaaaaacttatggcgaatgtggaactggagatgaacattgaaacaaacttggtga

SEQ ID NO: 102402 - DNA, 620 bp, Glycine max
  unsure (1)..(620): unsure at all n locations
  Clone ID: PAT_MRT3847_63486C.1
ctttctttttttttttttttttttgcaaccattaacaataccgcaaggcttttgatttcatttctctcgtaaagtaaccttgtgaaaacaacatagcaacaactaaaggtgaaaatacagtacagaatagagttggcatatcgttacatgaagcgaatatgtgccacagggtgaggatcaaaaaacatcagatcgttcttgtattgagaaggatcacatcattcaactgctctgcacaattactaccttcttccgattgaagagtcgtcaaaaagtaaaatacatcatctagaatagcttgactgcatataccacaggcccaccgaaaggtccaacaaggcatactcatttttcaagtgcccagaagaaactgttgatccagatcaggcacagaacgctgataatgtccgttgctaatcatctctgaacaaaaaaagaagggatcaccaccgttgataaaggtagttattctgaggcagcagatcttaaaattttgtgtttcaacttcctattatgattttcctgctcaagaaccatagcagaactcttctncaccaaaccagtcaagttctcaattttcacaagcatcttctgatacaactccttcaaaccctcggtgc

SEQ ID NO: 102403 - DNA, 263 bp, Glycine max
  Clone ID: PAT_MRT3847_63487C.1
atatcttatttcatttttttttcggttcctattcctactctgcatctggaattctcaagcaggttcttacgcctgcttgctagttcaggtttgatggtcttgggatacatatagacatttttctcggtgtggtggtgctcttcgttgggttttcggtcctcccggagtcacgatcatcgctctgccgattcttcaagttgtgatgtttacgctcatctctatacgcgtactgacctcatatctgtccctttatcctttcctct

SEQ ID NO: 102404 - DNA, 592 bp, Glycine max
  Clone ID: PAT_MRT3847_63489C.1
gatacaggttacatatcactaaataatattaatgagaatgactgtttaaaaaaaagttctatccccgacaagaaacaaaaacaattgaaatgaaagaattaaaaacgtatttaagagtggacaatatataatcccatccaatccttttgtagttgagcctcaaaacctcctctgctgcagagggaaaaaaggcttagtccacaacattttccaaacataaacaagttagttcccaaatggattctacatcagttcacaaggacattgatgaacctttgctggtctcaaacgaaccttcacccgagccaccttcttgtactcaatcattcagctcaaagcatggatcagatggtgaacttgagcgaatactctcaaacactagcgtccctttcgcgaagcgtcttggaccggcaacatgggtggagttgaagctcttgtttcaccttgctgctcctgctgttatcgtctaccttatcaactatgtcatgtccatgtccacacaaatcttttcaggccacctcggtaaccttgaacttgctgctgcttctcttggaaacaccggcatccaagtcttcgcttatggcctcatgtt

SEQ ID NO: 102405 - DNA, 423 bp, Glycine max
  Clone ID: PAT_MRT3847_6348C.1
agcgcacaaagcaaagcagaaaaggcttttattgattctgaacatttaacaaaacaacgggttttattttattaaagccaaacatgaaggccctcaaaccccctaaattaccatgggcaggggggaagaaaaaaatcaaattccttctcttctatcttttattcaaagccacaaaacttaaggaaccacaaacctcttcaaaaaaaaatactggggggaattcctctgaaaggaaacccttccttactaaaaggcaaaagcagagtataaggcttttgaacgggcccacaacgggttctcagtttctcaacgggggttctctctgaaaggttattctcaattggggccagtttatttccaaacctttaaaaagcccctaaggcccttggatcaaaggcccaatttggatgggccctcccccca

SEQ ID NO: 102406 - DNA, 255 bp, Glycine max
  unsure (1)..(255): unsure at all n locations
  Clone ID: PAT_MRT3847_63490C.1
agcggcgagngggtagagcgacaagggttgttaagctttattaatataaaccaagatattaaatgctgggtgtacaacaaagtggcggggataacaatcctatatttcattcattgattgtggtgatttttttacaacttaaccaaacttaataacatattaatgtaattcttggtttttatttcttttgtattcaaaaaaattttttttttctttatttattttacaatattgatattttacttccttaatttt

SEQ ID NO: 102407 - DNA, 305 bp, Glycine max
  Clone ID: PAT_MRT3847_63491C.1
tacgtttgcgagaagacgacagaaggggacaggcgcgcggtatttcatcggtcattcgcggagttgccaatatacgctcaccgggaaatcattgtgaaggcctccattattgttacctatgagatggatcctcaagacaggcagactgtgaactcataaggggcggctctggtggcggactcgaccgcgaatactgtgaacgtagctgttgtgtatatcgatacctaccatatgcgaagccgtgaggctagggtgccttagcctggagcatcccaagggcaacttcacagcaggtgtggatcaca

SEQ ID NO: 102408 - DNA, 204 bp, Glycine max
  Clone ID: PAT_MRT3847_63492C.1
tcttgttgctcgcagtcattctggtagcatggcgatgccatggcgcaagattaccaaggtatcctctccgcatgaaaactggctatggtgagcgttcttcgagagtaacatgcgcaagttctagagctgctgtggaagcacacaacatccgagcgcttaaaaccattcctgaagcgtgcgttgctccaacaccggactacatta

SEQ ID NO: 102409 - DNA, 758 bp, Glycine max
  Clone ID: PAT_MRT3847_63493C.1
agcaacaaataatgagactaaaagaggtgcaaaagtaattgtgattttgtatttctgatgtgttgcctataaagaacaggagaggtctctcctctaaaggtttctccttcacaaagtgtttctcctttcacacactagccatccaattcacagaatgaatccctcttaccttattgatctaaccaatcctttctaactaactagctaacggataagtggttaattgctatcctaacagggaaggggatatagagtaggcatagatacaataataaatcatgcaagaaataatgttgatgatatctggcaccccatttgacttgaatgctaatgtgccattttcacagctacacttattgtatgaaaagataatatatcccacagttctgaaggacaaagaacagtggagacaagtgctcaccttccaaatataattgcagttattgcagttgtaccagaagaaagggaaggctcgtgagaggatgtttttagaaatgcagcatcagtctccacaaatgaccttttgaccaccttctcaagctccaaagtaaagttaacatcctcaacaataactcttggcagattatcacggtcaaattgtgcagcactcttccctccatgtccatcaaatacctgcacatttgaccattttcatattacatgtcaaaccctgattaaaggttgcaattgcatatcctcctatgcaaaatcactaaaagatgcttgtcctcttagatcattattttcccacatatata

SEQ ID NO: 102410 - DNA, 973 bp, Glycine max
  Clone ID: PAT_MRT3847_63494C.1
cttccgtacggttgcaagaagacgacagaaggggctttttgtgcgtagcgtagaaatgactccatctttgcgattctcaactttctctctctaaaaaacccatcagagcatgaggagagagaaacttccctgcccttccatttccctctcgattccttcgcctttgctttcgatcctttgctagaagagaaccttattcctctctgtctctcccccttcaaattcccttccttttcttccatattcactctctcttcctaaccgcccgatgcactttggttttgcaaactaattcgttggctaaattactccgattgtgaactggttctgttggaatatccaaaatggcaaaaggtagcaggggaagacacaggattgcttctcgtcaattcagagtgactccatacccactggcttcttgcaaaagggacatttgtgaggacatgtgccaaaagaaatgttctaaggctttggaaaagaaagagttggaagatgttacgtgttctgtgtgcatggaatatccacacaatgctgttcttcttctttgttcttctcatgacaagggttgccgtccctatatgtgtggaactagctttcgtcattctaactgtcttgatcagtacaagaaagcttatactaaagtaatttcacctaataggcaacctatgcaaggcactccaggtgtgctacaagattcaaacttgcctcttgagaagagtgaagccacagagcttgcatgtcctctatgcaggggtcaggtgaaaggttggactgttgtggaacctgttcgggactatctgaatgcaaagaaaagaggctgcatgcaggatgactgcttgtatgttgggagctataaggagttgaaaaagcatgtgcgggcagagcatccgtcggcacggccacggatggtggatcctgctgatgaacagaaatggagatggctcgagtgggagcgtgaaagaaaagatgatat

SEQ ID NO: 102411 - DNA, 645 bp, Glycine max
  Clone ID: PAT_MRT3847_63495C.1
cgcgtcgaagctggaatcggctcgaggaacccttctacatttcccgtcaaagagaaccttccagaacctcacttcaatggcgagcgtgttgagcctaagaatcccagaggtgtccttcacgggaagggtttggaggatgtcattcagtttttcaatagtggaagctataaccctagttataacacctctcttgaaggtcgtcggaagttgtttgctattactaaggaggaggtgttgttgttgaacaagcgaatgcccgacttggcaattgctacttcaggtaaatggcttcctctgcacactcttgctgcgggcggagaactttaccttttagattctttgttgaagcataatgttgatatcaatgctgtggataagatggtttgactgccttcacaaagcaattggcaaaaagcgggtcataaccaattatctcctaaaaaactcaactaatccctttgttcgggacatagaaggggccaccttgtagcactatgccgtacaaacagcttctattgagaccattgaattactattatttgtttaatgtggatataaagcttccagacaatgatgggttggacacccttttcattttgcttgttaaaaattagaaaccaaatttaatgaggctttttggtggtt

SEQ ID NO: 102412 - DNA, 502 bp, Glycine max
  Clone ID: PAT_MRT3847_63496C.1
aaaccatcagagcatgagagagaaacttccctgcccttccatttccctctcgattccttcgcctttgctttcgatcctttgctagaagagaaccttattcctctctctctctctctctctctctctctctctctctctctcccttcaaattcccttccttttcttccattttcactctctccctaaccgcccgatgcactttggttttgcaaactaattcgttggctaaattactccaatcgtgaactgattctgttggaatatcggaaatggcaaaaggtagcaggggaagacacaggattgcttctcgtcaattcagagtgactccatacccactggcttcttgcaaaagggacatttgtgaggacctctgccaaaacaaatgttctaaggctttggaaaagaaagagtgggaagatgttacatgttctgtgtgcatggaatatccacacaatgctgttcttcttctttgttcttctcatgacaagggttgccgtcccta

SEQ ID NO: 102413 - DNA, 1093 bp, Glycine max
  Clone ID: PAT_MRT3847_63497C.1
ccacgcgtccgcccacgcgtccgtacggctgcgagaagacgacagaaggggagggaggaagtggaacacaaaactgtaaacctataaccccacaagaaaaagaagaagaaagaaagttgaagtggtttgagttagctgagaagagggtgctccattaagggccactctcatcaaacactttgatcatcaaatccatttaagtgaattggttgaatctgccaaaacgggtctccctctgtggatgcttggtttgggtgcggacctcttgtgggccgacatgaaccgtctcctcgcctttctcttccaccagggagtgttggatgagcaattcttgcagcttcagcagctgcaggatgagacctccccaaacttcgtctccgaggttgtcaacatttatttccacgaatccgaaaagcttctcagaaatctcagagctttgctgatggagaaggagttttcggactataagaaaatggggatccatttgaatcagttcatgggtagcagttccagtattggcgccaagagagttagaaatgtttgcgttgcctttcgtgccgctactgaacagaataaccgtgctggttgcttgcgagcgttggagatgctggagcatgaatattgctatctcaagaacaaattgcacgaattgttccaaattgaacagcaacgtgctttggccgcaggagtaaggtacccggtgcagaattaacaaagcaatgcaatgcaaggaaatgaaatgatgatgaaaaaatatttttaggatttgtttgctattttgctttgtgttcatttctggtttcgtaaggctaagggcacgtatctccggttatagacaagccaagcgatacccagcttttgtgctttgttgtgtagggaatagaaaaaagggatcaacgcctctggctttgtggattctctagtgtactacgtagtgccatcatgctcttccttacagtatgcttcgctgtaaccctgttcactttttttaactaaagtggatcaaatctattaaaagttggtggtgtttcgatttttactattcgcaaaaaaaaaaaaaaaaaaattttttttaaagcggccgtttagagga

SEQ ID NO: 102414 - DNA, 245 bp, Glycine max
  Clone ID: PAT_MRT3847_63498C.1
gtttagatctactgattccttccttccattgagagtgcaatggagggaggagattggattattcccttacatggcagcttctgatgtaactaccgtttctgcaatgggaaataaaagtataaaaccacgcttgaaatccaaattgagaacaacaagttgtcacgtgttaagactttactcccttgtatattttggcttgtgcaacttcgttcaacttaagttgcattcttcagtgaaaattgccg

SEQ ID NO: 102415 - DNA, 350 bp, Glycine max
  Clone ID: PAT_MRT3847_63499C.1
aattcggctcgaggcagatcatcttgaagggtatcgtggagagtatgtgccattgacggctaaggatgttcagctggagcagtaccaagtttgatttataatatagcttaattagataaattaaattaatcatcatcatgtgtctagattgatgatgcggttaattatatctgctttggtttcttgatgtctttagaaatatcttttgtgtgtgaaattaaggcaggtgtgaagtgaatttcattactctctatatgattggttatatgtatttaattttctgtttaaaaataggactcttttgcaaaggtgtattaattaatgctatgagatgactttatttcacatca

SEQ ID NO: 102416 - DNA, 503 bp, Glycine max
  Clone ID: PAT_MRT3847_6349C.1
catgcaactggtgtttgcaccgaagcagttcgacgtgatcgtcaccgacaacctgttcggcgacatcctgtccgaccaggcctcgatgctcaccggttccatcggcatgctgccgtcggcgtccctggatgccaacaacaagggcatgtacgagccgtgccacggttcggcgccggacatcgccgggcagggcattgccaacccgttggcgaccattttgtcggtgtcgatgatgctgcgttacagcttcaacctgtttttttcggcggatgccatcgaaaaggctgtgagcctggtgctggaccaaggcctgcgcaccgacaacatctggtcccagggttgcaccaaggtcggtacgcaagaaatgggcgacgcagtagtcgccgcgctgcggaatctgtaatctctcgggcccgcttgcagatgttgctgcaaggcggcccacttttgaacaaggtgtagttgcgatgaaacgtgtaggtctgatcggttggcgcggtatg

SEQ ID NO: 102417 - DNA, 193 bp, Glycine max
  unsure (1)..(193): unsure at all n locations
  Clone ID: PAT_MRT3847_634C.1
taatgaacangttttttatttgttagcatttagcgtgtagcaaccgagaaggatttggtttaggggagaagaaagaaaagaaatggggaaaaggaagtgatttggtttggaaaatnaaatggaatnagttacgaatttgagggttagggatttnatagtaaaggaagtgggtgattgggangannaattgatt

SEQ ID NO: 102418 - DNA, 393 bp, Glycine max
  Clone ID: PAT_MRT3847_63500C.1
ttggggtattaaatccagaacctgggatctattacagagaggaatgaccgatctttgacgttgacatgatgccagttaaacttacttgcaaagggcccgtgcagaaggatgacgcaagataaggacattgatacattaatcacatcattcaaaaagtgcaaaccacatgaccatgcagcaaaggtagtgaaacactgccctcctataataagactggtgatactaaatgggacatggacataattgggctacaacatcttcagttactggtaaacaaaccaaaattaaggagcggcctttattaatcttgcactggatttattgaacacatggtgaccatcatacaataattcatcaatgctcccaatgttcaagtggtagtactaagatcta

SEQ ID NO: 102419 - DNA, 567 bp, Glycine max
  Clone ID: PAT_MRT3847_63501C.1
ataatagagatacttactggaacagcaacataaaataaattacactgaacatcttgcaggcctaataatctaaacctaggccatgtcaacattatcttttgaatcatcttgctcgttttccaccgttttatatctataccaagaagcacaaaccaagtaaaatccaaagtttacaacacttaacacagacaacaaccagtagaagtagttgaggttgtctctattcaagttgttattagccagccaccctccactcactttgttaaccacctcaacgaccaccgtgctcgtgaagtaaccgaatgcgacggaacaccacgagattgcagtgccaagtgacttcattccagctgaactttctgcatagaaaaactccaaaagccctatcagggtaaacatgtctgcagctccaaaaatagcatattggaaacccagccagaacacacttattggcaaaggctctctgctatccaccatgttgtgctttatggccacggacttgcggtgtgtttccacaaaaccagccactgccatggaaacagcagacagaaccaaaccaattccaat

SEQ ID NO: 102420 - DNA, 317 bp, Glycine max
  Clone ID: PAT_MRT3847_63502C.1
gggggaggcccccgggggcgccccggcggaaaatcgggggggcctccacaacgcgccttttcgtgccgagacaagcagaagggggggggccagggagagcattcaaacgaacttgtggggagttttagccagaacccacgactgccagtgcaggctgcgacggtgggggcctcccgagagccaggcgagtggggcgagatgcctcaggcgggcacgggcgcgttcaaagacccaaccaggcttatgagcagctgtaccccctactgggacgcgctcccgagccattgttgcagcacggggcaggagctcaaccacca

SEQ ID NO: 102421 - DNA, 251 bp, Glycine max
  unsure (1)..(251): unsure at all n locations
  Clone ID: PAT_MRT3847_63503C.1
ttaacttgcacaggagaggagagggacattgataaaaacctgtgttcggtactcagcatccgaagtttggcgggaagggaaatgaaaatgaacgggaaaatacgtctctccatccacatatgaaccaaattgctcattagtaaaataattatgtaaattgcttttgctgnaaacttgtatacaatgcatgtatacctatcttatgtctcattgcttctgccgaccttataatttattttattcccctcacc

SEQ ID NO: 102422 - DNA, 301 bp, Glycine max
  Clone ID: PAT_MRT3847_63504C.1
ccccgcaccattttttaaattgactgtccaacccccgggaaaaaggccccaaaggacccgttccaaatccgtcccccaaccggaacggaaaaacccgtttttgcgggggaagcagtttgagcattccacccacaccccagggtttgggaattggaacccccggccccacccttaaaagcaaatctttttcccggggtaacggaccaattttgccgacttcccttgccaaaattgtgccatcgaccaaagggtgttcaccttggaaacctgaggcggttataaaaacaaccgggcgggggag

SEQ ID NO: 102423 - DNA, 1361 bp, Glycine max
  Clone ID: PAT_MRT3847_63505C.1
cggaattcccgggtcgacccacgcgtccgcggacgcgtgggcggacgcgtgggcggacgcgtgggcggacgcgtgggaattgatagctagaaataataatatgggaggaaaagggtatgctctatggctcttcattattgaaatcttggtgcatttttccacatcaagaagtgccaaagttccttcaataatagtgtttggagactcctctgtggactcaggtaacaacaacttcattccaaccattgcaaggagcaactttgagccttatggtcgtgactttttcaatggaaaccctactgggagattctccaatggacgcattgcccctgacttcatctctgaggcctttggcattaagcaatcagttcctgcatacttggatccagcttataacatatctgattttgcctctggggtgtgctttgcttctgctggaactggatttgacaatgctactgcaagggttgctgatgtgatacctctatggaaagaaattgagtactacaaggagtaccaaaagaaactgagggcacatcttggggatgagaaggccaatgaaataataagagaggctttatatttggtcagcatagggaccaatgacttccttgagaactactacacactccctgaaagaaggtgtgaattccctattgttcagcaatatgaggactttctcatagggcttgctgaaagcttcttcaaggaaatttatggccttggggcaaggaaaatttctctgactgggttgcctcctatggggtgtctgccactggagagagcaacaaacattttggagtaccataattgtgttgaggaatacaataatttggccttggagttcaatggaaagttggggtggttggtgacaaagctcaacaaggacctccctggacttcaattggttgatgcaaatgcttatgatatcatactgcaaatcgttaaacacccttctcgttttggttttgaggtagcagatacgggatgctgtggaacagggagatttgagatgggtttcctgtgcgatccaaaatttacatgtgaagatgcaaataagtatgtattttgggatgcattccatccatcagaaaaaacaagtcagatagtctcaagtcatttaattgaaaaatatctagcaaagtttcgttgattgaatattatagtatagtaactctgctgtgtgattttatctagcaaatggcaaaacataatcatgtaaacattgatatactaagtatataacattgtatgtcgtcgaagtggcgtcaatacaacaatatatggaaaataataatggcatatgtacgtaattattttatatgattacataagagtgacttggaaaattttcttgggtg

SEQ ID NO: 102424 - DNA, 104 bp, Glycine max
  Clone ID: PAT_MRT3847_63506C.1
ggctcgaggtcgctggcagcacgtgctgcagccggaattactccgaacctggcggttgccagacgacccgtgaatcactatcacactcgactggcgaactgcct

SEQ ID NO: 102425 - DNA, 419 bp, Glycine max
  Clone ID: PAT_MRT3847_63507C.1
atcagccatcgctgtatggtgattgaactgcagcgattccctttcttgtggaagcgcatggatgaagctctagggaactttttacgagaaggccttgaagccttggagaacatgattgcacacttaatagcaatggagttgaactacataaacacttcccaccataattttattggtggaagcaaagcattagaaattgcctcgcaacagaccaagtcttctatggtttctatacctgtttctcggcagaaggaggttctggaatctgacaagggatcagtctctgaaagaagtgtgaagtctcgggccattcttgcgagacaagctaatggagtagttactgaaccgggtgtccatgctgcatcagatgctgaaaaagttgtatcctctggaaacaccgtggatcaaagtgggtatct

SEQ ID NO: 102426 - DNA, 285 bp, Glycine max
  Clone ID: PAT_MRT3847_63508C.1
gcatcttttgtgcattttgcttcaaattgttcataatggtctaactccagccaaagattttgctgattttaggcatactcactaatggatcggtctccttgtttggtagttgcgatcttcatctttatttcataaatttgagtagcatcaccaaccttggatagttttgtttacagctatcccatacatccttgtggtcttcatgaacatgcaagcatcgctcacctctggtaccatggaattccacaaccacgacatcactactgcatctgcttcatcccatgc

SEQ ID NO: 102427 - DNA, 267 bp, Glycine max
  Clone ID: PAT_MRT3847_63509C.1
tgaattcggctcgagatcaaacacatggtcattaacatcatgttttttaatttggacagaaaggcacagatgcatcccggcccttactcaggaaatgggctcctgcttagccacttatgcgtaggacaccataacttcatgaggcgtttgtggaggctgtcaaccaccttggagggagtgaaaaagctacttcaaacggcgtgctgaatctcatgaaagtagcaggattaactctatttaatgtcagaagccttctgcagctcattc

SEQ ID NO: 102428 - DNA, 237 bp, Glycine max
  Clone ID: PAT_MRT3847_6350C.1
aaaaaaaattgtgaaccttaaaatcattagaaccttttgtcagtgaagcctcaagggagtatggtaaaaaaattgacatactttactaagaaaaaaaggggtggccctttttaggggcctaaactttcacatccgtcctggcaacgcattactttttatatggggtaccctaaattaatttaaagggccgatattttaaaatttcccaactggaaaaaccctggggatacccaattt

SEQ ID NO: 102429 - DNA, 281 bp, Glycine max
  Clone ID: PAT_MRT3847_63510C.1
gggttccattgtctgattgtttgttgttgtgacacattcttcttcttttgttgttctgtgtttgtctatgttttttctctcacctggggatatcctgctgcggtgctaactgtggttgcggaagctcccgcaagtgccgcaaccgctgccgaggctgcaacatatacccacacttgagccacactgagtcaaccaccaccgacaacttgcgtattctagtcggaccttttaaagctcaatttgatggtgcttaaatcggtgttctcgctcagaaccatggc

SEQ ID NO: 102430 - DNA, 126 bp, Glycine max
  unsure (1)..(126): unsure at all n locations
  Clone ID: PAT_MRT3847_63511C.1
taagcntgcacttgtacgtannctacggaattnagctngagnannccgtcncaagcaaagtaccaanagagctctttgcntaancgnntaactaaaatggaatcngctactannngacnccagttt

SEQ ID NO: 102431 - DNA, 678 bp, Glycine max
  Clone ID: PAT_MRT3847_63512C.1
ggtccggaatcccgggtcgacccacgcgtccggtcatactacattgtatcagtaaaaacagaaactaaaggatggtgtattaccttttgcaaaatataataatatatatataataaaaaataaatataaaaaatatataataaaaataattaaaaggaaaaaataaacggtcggattttgtacagaaaccatgtttaattcagattccgatctagggcttacctttttttattccgcctccaaagaaaaacaaatgtcctggttggtacaacatggccactggaaaaaatctggcggatcaaaaaacaaatttgttacagaagatatcgttagaaactcatgccaaaacattgaagattcctgaacctaccaaaaatgccaaacaggaatcacaattgataagttaattgaagaaatgcctggaatggccaaataaactcgtatgatcggtctgtaactcccatgttgaacgatacatattgatactactatatgtcaccttccaaatggttactcatctactgtctatgataacggcggctattatgcaactgaaaactaaagggatgagtatttaagatatgtcaattcagaaggagtcgagatgactacacgaaaaatggggataaggggactgtacactatcagcatcaatatcgatatgcaccttattgcccc

SEQ ID NO: 102432 - DNA, 695 bp, Glycine max
  Clone ID: PAT_MRT3847_63513C.1
cggacgcgtgggttcaaaggaagaggaagcggtttgttgtattcaaaatgtacatggatttgttttggagggtagacctttaagggcttgttttggaaccacaaaatattgtcatgcatggctccgaaatgtgccttgcagcaatccggattgtctatatttgcatgagattggctcccaagaagatagttttaccaaggatgaaataatttcagcatacactagaagtcgagttcaacaaatcactggtgccacaaacaatatgcaacggcggtcagggaatgtattacctcctccactggatgataatatgaatagttcatctgtaaagcctattgttaaaaattcttcttgtaactctgttaacattgtaagaggttcacctccaaatggaatatatgggaaaaatatggcccttcctgctagtgctgcatggggtactcaggcctcaaattgtcagccccctgctggaggtctatcatatccaaatgggccatccaagccgaaacctgatacaggctgcagcacactagcattttctgctgctgttacaggctcaattcaggcttctgatgttacaaagaggccaccatcaagtgatgggtgccatagtatgacacctacagtgaaaagtgaattgttgaaacctgttaaacaatataacaatagcgtgggcagtctggttagtgcaggag

SEQ ID NO: 102433 - DNA, 518 bp, Glycine max
  Clone ID: PAT_MRT3847_63514C.1
aaaaaacaaaacccattttccataaatttattaaaaatctaaaaagggcaggggggcgttgaaatgggctacatgctaaacatacttccttcccatttacattcctaatctaatgggcccggctatcatggatgggactttttttcagggggccgggggggttttccaatccttgggcccgggtccaaaatcatttttaacttctggggggcaggcccatccaggttttttggccccgggggttccaattcctgcccctttggggtccccggggggcccaacccaatgtttctggggggctccggttggccttgcttttagaccagctttggttgtccctttttctgatttgccaacaccttcctgtaaaaccaagggttcttttgaatctcccgccgccgttaaagggttttgctttttttccacaggttccaatacaactgattgttgcctgtttttggagcctgggataccctgaagggggccaaattttttttttgttccaagaacaaaatttt

SEQ ID NO: 102434 - DNA, 507 bp, Glycine max
  Clone ID: PAT_MRT3847_63515C.1
aaccccccaaaaaattttgttaagaattttctttccttgttttgggttaccttgagtagaaacatcttttgattaataatcagtcaaaaccaacccactttcaagatcaacttcagcatcctcatcctttgcactcttatgatccatctcaaacccacaattgataaaaacaaaactaatccaacttttatcccttcttgttacctaccctgcaaaattatttcctctacagtgtttcccttaactaaatccttaaactcaatccacctcctcaacaaaagatatcacaaaataaaaaaagtgaacccaggaatggactgaccctgcatcataacaagagacatagttcaatcagtttcccaaaagaaaaattcttacttctaattagtaagccaaagaaaaatgaactgaagttaagtagatataactgggcacttatgaaaattggagaaagacataaagtttaaatttttaaactaggttgaggacggcattgcggaaaagtgg

SEQ ID NO: 102435 - DNA, 668 bp, Glycine max
  unsure (1)..(668): unsure at all n locations
  Clone ID: PAT_MRT3847_63516C.1
actaattactaaaggcttaagcagaggtacactccaaacagggccttaaatttgacgcaggtgaaggtgagtccggaaatcaccgtacatagccgctactttaggcaaacgcaagtgaaacagacggaacgcattcgatgtgaaactgaaaccgaaagaggcgtttgcgttgttgttgttgctgttcctctcgtttgctctgaaatctgaattcaataaataataataaaaaaaatggcccaagattctgagaagagattccattccatcatggacaagctctaccatcctcccaaacccccttccgcctccagttcatctggagtgcagttaccagggaatagcaagaaacgtccttatcagtcgggggtaatggagttgaatcggagaggtgatgttgctgagggacagcagtcctcctcagcctcggccacggcactgcagggatcgctctgccgaccatgggatcgtggtgattttacgaggagattagccacattcaaatctatgtcatggtttgctaaaccaaagaggttggatcaatgtggatattgacaccatagcttgtgaagcatgtggggtgcgtcttcttttctctactccagcatcttggaatcagcaacaggtggagaaggcagcattggtctttagcttanagttggataatg

SEQ ID NO: 102436 - DNA, 888 bp, Glycine max
  Clone ID: PAT_MRT3847_63517C.1
ggaaaaagcgaaatgctctctagctttcgcccctctcttgctttattagtgcaaactcaggtaacagaccaactcgtctaatttcactctctatcagtatccagattcttcaccaaaaaaatggctgcaaaaaggtttttcaatgattctgatcaagaccctgagaaccctggcgacaaacggatgaggaatactagaccttcttttgcttcggttattggagaagtggttatgataaaaaacatggaaaatcttttctcagccatggagcctttgctgaaaagagtgattggagaagaagttgaccaagttatgagacaatggccacactcctttgctaggtctccttcattgaggctccaagcaatggatcagcaacaaccttcaactttgcaactatgtttcagcaaaaggctttcccttccaatcttcacaggtagcagaattcttgatgttgatgggaaccccatcaacatagttctaatggacaaaagcaatggccaaggagtccccacaagtctctcaaatgccatcaagctagagattgtggttgttgatggagactttccccttaatgacaatgatgaggattggactagtgaggaattcaataggcacatagtgaaggagagaaatgggaagcgaccattgcttgcaggagaattgaatgtgatcatgcgtgatggaattgcaccaaccggagacattgagttcactgataattccagctggattcgctgccggaagttccgagttgcggtgagggtggtaccggggactaatccaggcggtgttcggattcgtgaagccatgactgaggcgtttgttgttaaggatcaccgtggagaattgtacaaaaaacaccaccctccaatgcttcatgacgaa

SEQ ID NO: 102437 - DNA, 226 bp, Glycine max
  Clone ID: PAT_MRT3847_63518C.1
ggaattcggcagaggtaccttccctccttcttgttaatatacagttgccaacatatgctgctagcatgttccctggtgatgctgatggggaaggcatgagccttgtattatattttaaattgtctgagaattttgccaattttcctctcctcactttcaggagagcatcaagagattagtagatgatgagatggaaaaggtgaaagggtttgcacaagaaagcttg

SEQ ID NO: 102438 - DNA, 263 bp, Glycine max
  Clone ID: PAT_MRT3847_63519C.1
aggcgtcagacgactacaaaaggccgacgcaaggtgttttcaattagattccttatgtgccgtaggcatcaactggcgtcctttcaaacttctcaagtgccatgattgttcattatgatgcttcgaaaatcataacaatggacataacaaatcttctatacgaaatacacagatgagcgaaaagttgaaacagcaaggtcttcccctatgtttcaacatgagataatcaacatttgctatgacctttataggattcattctta

SEQ ID NO: 102439 - DNA, 2652 bp, Glycine max
  Clone ID: PAT_MRT3847_6351C.1
ttctttctctctctctctcatctcttttatgtctcattctttgaatccgaaccagagcaattagtatataaagcaaaccaatgcctagcattggttgccattaccttcttctactttccctcctatttcttcaaactctgcatattttcggtgcaaacacagattctgtgttgtttgagctctctcttagaagagtgtgaaaaacaaaccaaaaaactaaaactagaacataagaaaccgttttccagtgttgagtgaaaaggttgttcttctctgtttgtcattgaagagagtgaagaaaaaaagaaggcatagagaagaaaaaaaaatgaagtacgtgctggtgactggtggagttgttagtggccttggcaaaggtgttactgcgagtagtattggtttgcttctcaaagcttgtggacttagagttactgccattaaaattgatccttacttaaacacagatgctggaacaatgtccccctttgagcatggagaagtgtttgtgttggatgatggtggtgaggtggacctggatcttggaaactatgagcgttttatggacatcaagttgacccgtgataataacataactactgggaagatttaccagtctgtcattgacaaagagaggagaggagactatttgggaaaaactgttcaggttgtccctcatatcactgatgctattcaagattggattgaaagagtggcccacatacctgtagatggaaagaccagtccagctgatgtatgtgtcatagaattgggtggaaccataggagatattgagtccatgccatttattcaggcattaggacaattctcatacagagtaggtgctggcaacttttgcctaattcatgtcagccttgttcctgttttgaatgttgttggtgaacagaaaacaaaaccaacccagcatagtgttcgtgcactgcgtggccaagggctgactccacatatcttagcatgccgcagcactatggtactggatgagaatgcaaagggaaaactctctcaattttgcctaattccggcagaaaacattgttaccctttatgatgttcccaacatctggcacattcctttgcttttaagagatcagaaggcacatgaagcaatgtttaaagtgctgaaccttcatggtgtaactaaagagccccaatttagaggaatggacttgcagagctgaatctagtgatttgctttatgaaccagttcgtatagccttagtagggaaatatacgtgcctttcagattcctacctctccgttctaaaggccttactgcatgcttctgttgattgccaaaagaaacttgttgtggactggattccagctagcaaccttgaaagtgcaactgcaaaagagaatcctgatgcttttaaggcagcatggaagttattaaagggtgcagatggtgttcttgttcctggagggtttggagatagaggagtgcaaggaaaaattattgcagccaaatatgcccgtgaaaacaggattccattccttggcatttgtcttggaatgcagattgctgtcatagagtttgcacgatctgttcttggtgtacaagatgctaacagcactgaatttgagccccataccaaaagtccatacatcatatttatgcctgagggatcaaaaacacatatgggaggcaccatgcgccttggatctaggaggacatatttccagaccaaggaatgcaaatctgcaaaattatatggctgcaaaagcttcattgatgagagacatcggcatagatatgaggtgaatccggatttagtggcacgccttgaaaatgctggtctttcttttactggaaaggatgaaacaggtcaacgcatggagattgttgaactacctaaccatccttattttatcggtgctcaattccatcctgaatttaaatcaagaccaggaaaaccttctcctttgttcttaggattcattggagcagcatgtggacaattggatgctgtcttacagcgctcttcaattgttgataatggtctctcaaaaggagtcattaatgatatctctgcagtcaaaacataccgaacaagaaccgctacaaggacaacttataggtctgctgaatatgtatatgggagttgcaatggattgcatttctaaatgttacttaagggtcttcttccatcatcttagagttttcaagttaaatgcgttgttggctttcagttatgtaggagagagcttgtgtgtacagtcaatttgaacaccttggtaggtatagagttttcagaggatacagagaagagcttagtcccggtctttttaatgggaaccagctcatttaagtttatattggtttgagtggggaactctgaagcttgtcttgtgtttcaggcaatggcaactcttggttttgcaaagatcttagtctatagagaaattcttgtgaacttcaactatattgtaatatgaattgtcttgtcgtaatgttttaggaggtgtttagtaaatgaaatcccaatcatttcttcttttgttgatatgtaggaattgaatacggtatcacgggtttacaatactcatacacctactcaatcaattgagttaaacccccttgttccaattatttcttcttgatcatagtaaatgaaatctcaattatttcttcatc

SEQ ID NO: 102440 - DNA, 1057 bp, Glycine max
  Clone ID: PAT_MRT3847_63520C.1
aaattaagccatttttatttattaagaaataattaagatatacatgatggttatgacttatatatgattaagattttgaagtttacaatccaatatttatatttgtactttaaacaaaatttagagtggtcgtgtattttgtggaatcaactaataattttacttaacattataaacatggtatgtgtaggagttaaaatggtgatttttaagtataagaactaagaaaataaaatttgtgcaagaattaaatgtgtaattaaattttgaatttaatttaaatttgacgttaaaatcaattgtgtcacatatgatatgtcctaaaaaaataaaaaaaatgaaaatattgatacaactcgaaacgaatgaatatatatatatatatatatatatatatatatatatatatatatatatatgtgtgtgtgtgtaaagagttatagtcctttaaaaaattgacaaaaactataattatttaatgacataattattataaattatggtgtttcttattacataagaaaagtagacaaagagtttaggtgagttgattgaataatgtatatgaattattataaattctttagtattaaatttgattcttgtatgtaaataaatgcaataataatgatagcattgacagtaattaaaaatgacactgaacgcaaaaaaaagacattgaagtacaaattaaaactcatcctttataagcaaaaattaaaatagatattttgaatgatagtgagcacaataaaaattcttctaataaaagaataatataaattttttattataaatttaaaataaaatttatattttaaaagtatttattatgaattttaattataatataaataaaaatattacagatatataattatattataacttttagttatatgaaataaagtttatcatgttcatgatataaatataatataaaagggttaaaaagacacttaattagtctaagggaacgttaggggaaaatttatttatgctcggaatcatgtttatgggaacaaagtaaaatacggcgccgcatgcgatcggacgc

SEQ ID NO: 102441 - DNA, 184 bp, Glycine max
  Clone ID: PAT_MRT3847_63521C.1
cactgcaccaagcagaaaatacaaggtgctagatgattaccatgctactttcgctgaaacaggtactttcaagacaataacggcatataccattttgcaaaccattaatctacttatatggtcagtactaacatgcatggctattgccgctgacatgctgcctatgaggatcattcatcttatt

SEQ ID NO: 102442 - DNA, 225 bp, Glycine max
  Clone ID: PAT_MRT3847_63522C.1
gccttccctcaaaatcccgctcaaaactgaccagcacagtgacaacctccccagccccgaacattgtacactgttccagacaccttattatgaccagatcaatattaaggaaccggttgccaaaacgccacttccaacaactgtgacccgactgcccacattcttgcctctctttttcctctctaaaacaaaccagtaatactcttccggtttcctggcattttt

SEQ ID NO: 102443 - DNA, 312 bp, Glycine max
  Clone ID: PAT_MRT3847_63523C.1
cgaaactggtgctgaccttctccagacccaaacgtccagcacagggacgcttgactctagactatccactatgcatgtaatcctgcagcttgatacattcatgaaatgcatgttcgctcagaccatgacctgcgccttaaaccatggaaaattcagttagctgaatctgaatttatgcatgagtaacggggatctaatgttgattgattgtgttcgaagactggctcgttttattctcgcggttatggttagttggataggctctcatctattagtactgcatcaacagcaaagcgtccacgatgatgacgc

SEQ ID NO: 102444 - DNA, 739 bp, Glycine max
  unsure (1)..(739): unsure at all n locations
  Clone ID: PAT_MRT3847_63524C.1
atttgcaaattgcaatctttgcttggcccttgagaacgcgctaactgctaagttacgcgagggatgcgcagtgcgcaccctctatcgtctcttctttttttcttcttcttcttcttcttcagagtttagccagttgaattgaactagtagctttcttttaaaattaaaattagaatcattatcgtttatcacactccaacaacgcctttcgctcttaccaccctcgcgggtcattttcttgggaaaactcgtttccaccaagaaaatcgatttccctggaaacaaacactcgcgaatctccgatgcgactcgtttcactttaattcgatgatgatcgccactatatgccgccctgtgcgttccccgtgggaggaaccaatggatcgctgcttccgattttttccatgcctcgccgatcctggtcgaaggtcttcgttgtgcttgaagttgtgcttagtgacgattcacctgatttatgctggcgtgctcttcttgttcgatggggatttgatagaaaggactaagaaggagccgtggtacactgctttatacttgctgctgttcgttggcactttgatacaatactttgctacctctctttcttctccagctatgtacttgaagccatgctgactgttaacgagagaagtgcagcgaacagaaaggcaccagaaacatcgaanaatgggaggctaccgtaatttccacagagggnaaatctgattgcagaaaatggttc

SEQ ID NO: 102445 - DNA, 245 bp, Glycine max
  Clone ID: PAT_MRT3847_63525C.1
agcgaagtaggaggaaggggagaaggagcgagaagggatgaggaggtaggcgaaggcgatagcgaggcttggtgaagtgtctgacagattcgaggcgcagcagctagggcagatggtggatttggagaaacggaggaatgagtttgctaggagacgagaagtgcacaggatggagatgcatatggacacacaggttcagctcgagaggatcaagcgcgcgaaaagatctggctctaacgatatgt

SEQ ID NO: 102446 - DNA, 372 bp, Glycine max
  Clone ID: PAT_MRT3847_63526C.1
tttactatattggttcatttgttttcccagccaaaatcaaccatttccttttccacaaagttttgggggccccgccaaaaacaggcattggtacgtaaagaatttgacatcatcctaagatgtttcgccacaaatttttttaatggacccacgggggaaacaggtggccggcttaccaaaaatttaattgaagacgggcaaactgggaggggtttgttgggtttagagtcctaaaaagcaagcactcctttctgatttaaggaaaaaaaacctgggttgggcccctcataaattcagggtcaacttggaaaattttttccaaaagactttcaattcttttaaaaaagaacctcctgatcggcgccccatttt

SEQ ID NO: 102447 - DNA, 143 bp, Glycine max
  Clone ID: PAT_MRT3847_63527C.1
atgcgtgccacacaacaacttaccataggttttcaggcagccttgactgaagaagagtccaagaatttggaaggggttcccgaagtctctttctgcctaccaaattcctttttggttccggggaccaaccatttgggggggat

SEQ ID NO: 102448 - DNA, 211 bp, Glycine max
  Clone ID: PAT_MRT3847_63528C.1
cgtcgatcccgagcacagatattaggcggaggtacctgacgtatgtgacgacaaggacaccggagcacacgtcggtccaatggtaacgctggaggaggatgctgtaaccacacgcgaggatgacgaagatgcaatactggatcgagagtcgaagctctactcgttcgacaatgacgggaaccagtggaaggagagcggcgtcgacgctgtg

SEQ ID NO: 102449 - DNA, 421 bp, Glycine max
  Clone ID: PAT_MRT3847_63529C.1
gctttactggtgctgctgtgttgtgtgaactatatgcttctcctgtgtgtcatatgtagtgtagtttgtggagaaatatagatgggtggatgtagtgaaattagttttgccacagggggaatagggacatgataggaagatggcatgtgaatgtgaaaacactattgtaatcgaccttgggtcttttgactttttcattgatgatatgaacttctcgttgccagtgagattcaactccacatagagtaggttgctgaatatattaatagaagttagggttgaacggggtgtagactattcaaaccatactcttgtgattccttaaaattaccttgcatcattttcaagaaacactgatgcatcttgaagaaaaatattaacaagttaaaatgtatttcattatgatggatttaaaaaatgc

SEQ ID NO: 102450 - DNA, 165 bp, Glycine max
  Clone ID: PAT_MRT3847_6352C.1
ggcagtcgtaccaagaagtccacattacgatatttcatcgtcgtgcaagtccactggcggcgaggatttaacacttcgggcaattctaacacatgtcttctcgacttctgactctactgtatcttctgaatctgcatccactaccagctgtcatattgtaagccc

SEQ ID NO: 102451 - DNA, 476 bp, Glycine max
  Clone ID: PAT_MRT3847_63530C.1
ccgggccgaccccacccgtccgcggcctcttggccaaaattacgacagaaggttagatttatgcgagcaagagcctttcacaggttggggccaaaaggcactggagatatgcttatcctcttcctagaggaaagaagtgatggggctcctcctctacttgatagttatagggatgcgaagagtaggattataccttttcttggtaaatggaaaggtcattccatcacaaaacgaagtggtgtgtatggatctacaattgctaatgctgatactgttgtgttgcacgatatggatgacaatggccaacttatgcaggatgttacttcaagttcaacttttgatggggaaaatgttactaccaatgtgcattggactggcacagtatcagactatttggttacatttgatggaggttatcagatgatactattacccggtggcatgtacatggggtgcccttgtgatgtagcaaaaag

SEQ ID NO: 102452 - DNA, 221 bp, Glycine max
  Clone ID: PAT_MRT3847_63531C.1
cccacggcgtccgtacaggtgcgagaggaccacagaagggggaagaaagttgagcctgatgacccatatgggtgcgtacatggacagggtaataggtgaactagcctttcatgaagctcatgaggcatagattgatcggtctctatgtggcatgttggataatatctccgtgaaaataaatgccgtaaaagatacaggcactggcgggagatattggcacc

SEQ ID NO: 102453 - DNA, 375 bp, Glycine max
  Clone ID: PAT_MRT3847_63532C.1
atcacgccttctccgtcccttgaagggacaggctgtgaggtctgtgataccggaaactacgctgagggtgtcctccgacaacataaatgttcgctctgatgtgcgagcccaactcggtgagattgatgaaaaagatgtatagaactattctcaggctgaacatcttacggcaggctctgctgaggagcggtctgcaacaacatttggagatgacgtgtggtcatctttgaaggctgatggacacgaatgtttattgacggccaagccagttacaatcagcgctgatggctcagttacaaccgactacagtgctggaccataactacgcaagactggtgaaaacggaaattgtatattgcgcacgattcctgagag

SEQ ID NO: 102454 - DNA, 278 bp, Glycine max
  Clone ID: PAT_MRT3847_63533C.1
gggatggactgtctccccaacgctcgatgttcagggtacattggattggtttatctcctgtcaggaatgccttcccaggacctattgtgttttaaatccacaaaatcctttcgtgtccaataggtggatgggaaatttgtctttcccgcagggcactacccggagagttaagagaatgcctctttttatagggggaggagctggcgcaaaaaatgctattctcatgagtatgcccaatgctgttctttcaatgtggagatattttgcaggagatctcg

SEQ ID NO: 102455 - DNA, 247 bp, Glycine max
  Clone ID: PAT_MRT3847_63534C.1
aaaatctttaggaaaatgtgaactggaaaacgcttcggtcagttttagtgacatagcctgtgatgatgggtctggtgactattattgcggaccgtggtacccagttttaggaatgtggagaaaggaattctgttgattccgttgaggaatctgtagtgtatgcattcgttctgttaagagcaaatctaggagaagtgcttcagctgccaagacgccgtaggggagtgttttaaaggatcgtgtcgca

SEQ ID NO: 102456 - DNA, 545 bp, Glycine max
  unsure (1)..(545): unsure at all n locations
  Clone ID: PAT_MRT3847_63535C.1
ggctcggctcgagcagacagctacacacaatactctctcctattcctccttcttcttctcttctagtctgagagagcaaaacgttaattactctctttctctctcatctaatcatcataatcatccatgttcctcttttctcagtcttcttcttcttcatagtctctcccttcttgtaatcactgatcatggtggcggctacgtttgatggattctccataagggactacacatccaagatgagatccatcgacgttttcaagtgctggccgtttgcatctacctcctcacgtgacgtatcagatgaggaggttcagtcgtggcttccgccgatgaacccgtgccctagatccgacgattctaccgaccaccgcgctcaaaatctggagattccgccttctgctgcggaaaccgatgaagacgacggcgatgtagattgcagcgaagaggaatctgcagaatctatggaatctgagaaatccgcgccttcttccgactcctccncggcgaacaacaacaacaacaatgaagacgagaaactggag

SEQ ID NO: 102457 - DNA, 388 bp, Glycine max
  Clone ID: PAT_MRT3847_63536C.1
gcctcttcgggttctgctttttcgttcaccacgtcttcggcaccgctgttctcgacggtgacgaccaccatggcttccaccgtggttactggtagcactaccttgtcgccttctctgcctgcatttggtgctactgccccatcttctgtcgccgcgagtgcttctgcgactcctgctgcttctactggtgctgctgcttctgccagcggaggatcatcttttgcaggatttggtgttggaagcacggcgtccgctgcttcttttgggactgggttttcctttgcgaataagtcgtcaacgccggcagtttctagtgttactgcttctgcatttggggttagcacttcaacttctactgctccagcaattttgagttccagcactagtg

SEQ ID NO: 102458 - DNA, 1505 bp, Glycine max
  Clone ID: PAT_MRT3847_63537C.1
cagaataaatcctaacccttaatttttaattggagaggatcctcccccggtgggtgacatgaacgacttgaggaagaagagaaaagccgcaggcgcagagtgagagccgaaacttctcatggaatcgcaaacggatctgcagaaccgacccggaatcttcattatcggatcctccaacgtcggcaaacgcaccctcctatcccgattgacctctgttgatgttgatgatgcttttgattcggcttctcaagtgaatgtccatgggtggactatcaacaataagtactacactgctgatgtttctctttggatggctcatcttcacgacgatttttctgctgccaacgtgaccctgtctcgacgaatgactgcactggtgatggtttttgacatgaatgaaccatcttccctagctgcacttcgagaatgggtatctcgcactgatattcagaactttgagatattactgtgtattggaaacaaagtggacctggttcctagtcacccagcccatgctgaatacaggagacggttgctgaaacttgaagactctgctgcagatttttattcggaagagtatggaatatctgaatcggagggaactagtttattgggggatgaagaaccgtcatgggacatcagaagatcctgcttggactggtgcactgatcacaatattgagttcattgaggcatgtgcttccaatgctgattttgacaaatgtttgtcgattgatggtgatttacaaggagttgagcgtctctacggtgcactttctgctcatatgtggcctggaatggtattgaaatctggcaataggataaatcaactgtcatttccagagaaagaagagttatcttcagaagaatctgattatgaacaagagtatgaagtcttatcagctggctcagccgattgggatgaaagtgaacaaggatggatttctgcatcgtccttagattcagggggatcagctcctcaaaacaatcctggcacagttggtcaacatgaggatggaattaaatctgataaagagtcacatcccacaacctcaagcactgcaattcaggatgagagtgaaaaggatatggtgcacaataccatggattccgaaggtgatgggaaggaaaacgagggtaaatgtctcgaattagaggatttggaacacttgatgtctgagattgggaatatgcgtgcaggcttgcgattgatgcctgattttcaaagaagggatatggctgcaaagctggccatgaaaatggcttccatatttgggggggagagtgatgaagaggaaatttagtagatgttggatgttagctcaattattcaattatagctgtaaggacagatagatgaatgtcattggttataattttgtatgagccattacatggaaggagatgaataatctctgtttgcccaaggatcaggggttccttcatgcttctactctttggtcactgctgatcatgattttatgtttaattactcctgtttttgtc

SEQ ID NO: 102459 - DNA, 330 bp, Glycine max
  Clone ID: PAT_MRT3847_63538C.1
tcacgactactcaaaccctatctatactttcgcttatctttccaatgcttatatcagggaagagtcctgatccattgaagcatgccatacaactatcaccaaagacaccgacagatacctacataaatcatgatactaaaataccttctacacctgctctacataatccaatcaagaaacacaatgaagagctctgacatgacctaagctagagccatgacattgaacatcatcataaatgcaaactctatatcccaaaggacatcctatgcttctcccataaaactttctcaaacattaacttaacacatacttaagcttgtactcaca

SEQ ID NO: 102460 - DNA, 894 bp, Glycine max
  Clone ID: PAT_MRT3847_63539C.1
gatcctctatacctctctctcccgtaagtggaggttcagccgttggatcatacaaaatggctctgataatctaaatgaattaaagtttcggtgtctcgcacgcacgcacgcttcatggatgacatgaacgagttgaggaagaagagaaaaaccgcagacgccgagtgagagccgaaacttctctcacggctcggcaaacggatctgcagaaccgacccggaatcttcattatcggatcctccaacgtcggcaaacgcaccctcctatcccattccggaattatttattcagtgctggaactggaatttgatttggctgatgttgagtgtaggattgacctctgttgatgttgatgatgcttttgattcggcttctcaagtgaatgtccatgggtggactatcaacaataagtactacactgctgatgtttctctttggatggctcatcttcacgacgatttttctgctgccaacgtgaccctgtctcgacgaatgactgcactggtgatggtttttgacatgaatgaaccatcttccctagctgcacttcgagaatgggtatctcgcactgatattcagaactttgagatattactgtgtattggaaacaaagtggacctgggtcctagtcacccagcccatgctgaatacaggagacggttgctgaaacttgaagactctgctgcagatctttattcggaagagttggactatctgaattggagggagccagttgattgggggatgaagaaccggcacgggacatcagacgagcgagcttggactggggcgctgaccacaaggacgagaacggggttcaggccggcgctccggcgcggaaattgaaaccctaaaaaagtataatgctggaggagatgaacgcctctacagtgc

SEQ ID NO: 102461 - DNA, 369 bp, Glycine max
  Clone ID: PAT_MRT3847_6353C.1
ggctcgagctttcttctaggttagggtagtgcctttgtgtgctatttcaacacttaacgccgacccaggcgttattcacaaacattctctatgttggatgttcttgattatatattcgcgcgtaccgagtactaattatgttaaggcatgtatgggaaccgcccaagccaatacgttgcccacggggtaaagctcaccttattgacgaagagctgcttcttcactacctaagggagaacgatggcttcattcctttggcaagggccatcattgttgtcgacgatatctacgaagcttgatgcatgggagctatccgcgaagggcctattaggcgagaaagagtggtacctcttcggtcctagagacccg

SEQ ID NO: 102462 - DNA, 1472 bp, Glycine max
  Clone ID: PAT_MRT3847_63540C.1
accaggtggattaatgccataaaatcactctctgtgacaactcctgagccacatgctgcaatagaatcctatcacctaaaattaaaatccatgcttttgaaggagaattatgccaatttctggccaagagttgactggttaatccatgctttaactactgaatttcactcattatactggctagatcaatacagtttagaaactgggtattttgagaatctacgggacaattctttctcctctaatgcttggtatcatgctcttcatattcctgatgttgatgtgatactggatgagcaaaatctccatcttgccaaagtcttatctcagactgacagaagcttggtgtacacagtttcgaatcctggttcagaattttcactttgtgattgttcctggtctaggctggggaacctctgtaaacatgtcatcaaggtggcaactttctgtagaagtcgacaggttgcaagaccatcattgtctgctcaagtttataaacaggctttgctcacccttctccataatcctcctgatgatcccttagttctggaccacacaattctacatgtggcccatttgcaacaagacattaaggccttggaagacttgtccaacaatggattgctccagcctatagctcctgatttaagttctcaaatggctgaaaatcctctgctttttcagcgcatccagtgactggcccattttgaaaacagattgaccgtgtttgggttaaaacttattttttgaggctaatgttgtgatccttgatcaatcaatttgcaagaatcaaaaaggatataattttgcttttaagaaggtccacaaccattggcttcatgaaaccacaacactcttttaagaattggtctgaaccttcatttgtcaatattcttttctttctttccatttattttccctttggagtttgttgggtggcagggacaatataccatcagatgctttcaccacttagaggggaggatgaactctagggtgccaaaagaaatgagaaggcaaggaacaaagcagtcaggatcatgttgaggatcataacatgcattgagacattgaagtgttttgcagatcaaaccatcatgcagccaatgtggtgattattgaaggaggggatattcatgtggttgccaggcatgccgcaaattcagttatggtgtcttctggtgtagggtacacaggttataaatcgttagatgtcacgtaataaaaagacgtgttgaggtacttaagttcaacaagagcatcattagaagggatattactatctcagaaggaaaaatagaattccacggttgaggtatcaaccatttgtacagtttgacatcggttgaaatttcaagattactggttttctctcgacctaaggggacatgctcatttggggctttttgactagtttaaggcaattttaaaacaatttatcaaaaagtaaaaaataaaaatactagttgagt

SEQ ID NO: 102463 - DNA, 335 bp, Glycine max
  Clone ID: PAT_MRT3847_63541C.1
gagggggaccgtagctccaggttctttttttggttctcccatcgcactgtcaatgcgagggcagatcgatccatggaggaaacccaaaaaattgggcggcacatggatgttctcagagtatatgctggcctatggcagagacctgcttgcaatgcatgctggaactgttgaaccgtgggcacgagccctaggtgtggataattagaccgcgactggaggatccctgtgggcagccctgtgtctactaaagcgacgaggatcatacggtaatggcttgccgttccgctatcgacttgccatacctaaaggccggagacggttggacgggaatccct

SEQ ID NO: 102464 - DNA, 227 bp, Glycine max
  Clone ID: PAT_MRT3847_63542C.1
atggggacaaataaaaaataatctcatgagactcattgatctcatagggcagatctgatgaactcagtgctagaattgctttgtattcttaagaatcctcctggtcataattcataccatctcgtatgactcaaaaatccggtagaaaatttctttaacggacctgcacatgaagcctaggaccccctctttcactccttatgcccaggcgatcctaaaacatcttt

SEQ ID NO: 102465 - DNA, 118 bp, Glycine max
  Clone ID: PAT_MRT3847_63543C.1
cgtacaatttttttatcggccgcccaaaaggacccaagctaacggggcgggcatgctaaaaaaaagacgcgtcaatagcgccacctaaaaccaatgaacgggccgtcgtttaaacaaa

SEQ ID NO: 102466 - DNA, 232 bp, Glycine max
  Clone ID: PAT_MRT3847_63544C.1
taaattgtgcaactgttgaacattccactgtgaaaatggagcatacacacattatttacgttctagaaagcgatgttcaatcacacggtggtgttccctctatgaaagggacctgcttaaagggccatcctcattctgcaaagctgccaatccatttttttcctgtggttgctttgggggaactgggcgaggaggttgtctcccatctgggacctgcactgggggcgcatga

SEQ ID NO: 102467 - DNA, 474 bp, Glycine max
  unsure (1)..(474): unsure at all n locations
  Clone ID: PAT_MRT3847_63545C.1
aaataaggggtttgcattaactcctttttttttctgttttcgtttccttgttcgaatttttccccagataaacaacataggaaatttgcctttcctttgggccaagccggagcccggaaccataaaaccagtggctcccaattaaaactccatcggggctggtgcccctttgggcctttgcccccagagaaaacagcccccaagaaccagaatgcgaaggatattttagtgggttttattgtttttgggggcctcaccaaacttgcaacccacttttttataaaccctcccaagggcggcgagggcctaaccggctttaaaaaattcacctttttccataccctcccccncggaccaggggacaaaagcccccttgggttacatgagatcaaacttgggatgaaggggggcaaacccttcctcccctcggggggggtttgaaagtttgcaaactgccctctgcaccttgggggg

SEQ ID NO: 102468 - DNA, 158 bp, Glycine max
  Clone ID: PAT_MRT3847_63546C.1
atcagtgcacaggtcacctaacacagtcacagtggatgactttgtgttctctggctttgtagactggacaatcaccacaacacacttgtcaactgctcgcatttaacctaccgcactttgttactgattttccaggtgtgaatggtcttgggtatctg

SEQ ID NO: 102469 - DNA, 486 bp, Glycine max
  Clone ID: PAT_MRT3847_63547C.1
tcgcccatcgcgtccgcccacgcgtccgcgcaatcccattacactctctttctctccattaccgtctatactctattattatatcctttactatgatttatttttgatatggcattctgtaagcctctaatctgtattgtgtacccattcatattcataccggtgtttgtgtgtcagtgacgcataacactgttggaaccaccggaactaaaataacaaccccatgtgctgaacctcacttttcttctcgccaaagcttccaattttcgattgttcccttgtgttcagagaaatatcagcaccccagaaaataaaattgagagaatagaagagaaccttttctgggttaatttggtaattacctttttcttgtttcatgggtaacataggaagcagcggctccaacagccgccggagacacggcggtggcggcagcagcggaaggcggattcacccgccttcgccgcaggtgatgccgtcgccgga

SEQ ID NO: 102470 - DNA, 310 bp, Glycine max
  Clone ID: PAT_MRT3847_63548C.1
ttgacgcgtgggagcactctctgggcgggccacaggctaagggaatcatgtacttttccactcttagtttatttgctgaacactctcctattggacatcggacttcgcgtaagatggcaactgcttgtgcctatttctcagctctgtggctaaattcaagatcaagttcgtgacattttggattagtactccgactctcctatctggtataggacctcgtgggaacgactgggctaataccttccttttttaggctctgtacttatgactgaccccgattgccgcacaaagtgggcctaatttgaaaaac

SEQ ID NO: 102471 - DNA, 159 bp, Glycine max
  Clone ID: PAT_MRT3847_63549C.1
ggagcataaccctaatccctacttttcttcctcactactgtcatttacgcttctcttctctgcagcaactattcctaaccctaaggtcttccttgacatgactatcggcggtcaatctgctggccgcatcgtgatggacctctacgctcacatgtctcc

SEQ ID NO: 102472 - DNA, 243 bp, Glycine max
  Clone ID: PAT_MRT3847_6354C.1
ctttctgacaacataaccatcacttgatagcatgtgcaaccaagaatgcctaccacaccaaagaccagtgaaccatttatcctcataacttctcaagtcaagccttccagaaaagtctcttcattgccagaacaacactctctcatacaaccatcattcttaacacatactaatacatgaacatcaccaatgcccttacaactacactcacttatactgcataaccctgtgatcttcactttt

SEQ ID NO: 102473 - DNA, 374 bp, Glycine max
  Clone ID: PAT_MRT3847_63550C.1
tccattcgtacggaccttgtgatcttgctcagggggaggaggggggcatccacacacggagaggacagtggcacttgccgtgggaggggtggcggctctgggattcttgattgtttgtttgttatttctcaagtcggcgttgaagagaagaggtgggaagcgctgataaagtttattattttattcgatctggattgctagtgtatatacccctccctcaggatccacagatgatcagtttttaacatcttaggtgaatatacctttgccttaattcgtatagattctgatcgaaagggattatcattactactattataggacaagattgttatgatgagtactgaatccggtttgcggtattgtatggtatg

SEQ ID NO: 102474 - DNA, 331 bp, Glycine max
  unsure (1)..(331): unsure at all n locations
  Clone ID: PAT_MRT3847_63551C.1
gccttataattttcaatagaattctctgcggaggttttacttgtaagaaagagttagtaaaaggtttatggattaattgtcgaatgttcattctgatttcttttggattgaacatgatgtgtccatagggcggtcaaaacgggtcagcccggcgccccccggttgggccccccccccccgggctatttgtgcgcggggcttccccggctcacttttgtgtggactaatgaaatgttagcccggtccggcccatcacgggttggtgggttatgtgggttgacccacttttttgtnnaaaanattaattatttcaaacaaaaaaaaaaaaaaa

SEQ ID NO: 102475 - DNA, 404 bp, Glycine max
  Clone ID: PAT_MRT3847_63552C.1
gatccaccgttgctgatctacacttgtagttgccaattctggaacgagaagttcccgggaacgctaatcctgcgaacattgacacatgtccttagttcacagctatggaaatgctgcatcgttcttgtctgttgattggaccaagcgtactactatccaccccggtgagaccgctcggcgctcttatccgcctccgtaccattactctggcacggcgcgtgccaatttatgatggggagttgcaacaccggtgactcctgacgaggactactcatggggccttctgagagttgggtttatcctcaacgataccttactcaggcatgcaaggaccgcctctacatggcgcctggcctgtgtgatatgttccagcacacgctgatacaactcacgctgatgggact

SEQ ID NO: 102476 - DNA, 377 bp, Glycine max
  Clone ID: PAT_MRT3847_63553C.1
ccggtttttattatatgcgcgatccgctctcaagactgtgaattgtggtagactgcttgcacaaaagcgatgactataagatcaaacctaccttgggtgcacatgcatggtacgggtgctgaaggtatcctaccgcttgtcattgagtatccatgtgagtatactgggtgggctgtcgctccaaggctgagatgtgcacgggacaaaggtttggtcaagactcatgacaagatagtgcatctaggaccgattgagaggtgacttcgcttattaccacagagccaaaaaggagagagggaaaagtgagtttaccacattgcacttactggattgtttagagaaggcctatgtctatacctggaggaacaggtgcaaag

SEQ ID NO: 102477 - DNA, 207 bp, Glycine max
  Clone ID: PAT_MRT3847_63554C.1
tttaatcgtctcgcctctattctctacgcgtttattggatttgaggaattcaactgtcagggtgatgttgaacctaatactatattatactcttcctatcatgaagtatagtctgaactaaaaagggcggccgtgctagaggatgcaagcttacgtacgcttgcatacgacgtcatagctcatctatagtgtaacctaaattcaatt

SEQ ID NO: 102478 - DNA, 1529 bp, Glycine max
  Clone ID: PAT_MRT3847_63555C.1
ccacgcgtccgtggtggtggacgcgattctggcatgagttctgagactatcaattcctccactcaaagaacttcaatgagcaacgagagcgtttgcagcaccagcttcagccgtctctccttcgatctccctcctccttcttcttcccctgagaccctcttcgtcaaaccccaccgctcctccgacttcgcctactccgccatcctccgccgcaagtccgccctcaccttccgcgacttccacctcctccgccgcatcggcgccggcgacatcggcaccgtctacctctgccgtctccgccacgacgccggcgacgaggacgacgacgaggacccctgtttctacgcgatgaaggtggtggacaaggaggcggtggcgctgaagaagaaggcgcagagagcggagatggagaggaagattctgaagatggtggaccatccgttcctccctacgctctacgcggagttcgaggcttcgaatttctcatgcattgtgatggagtattgctccggtggggacttgcactcccttcaacacaaccaccccaataaccgattctctctctcctctgccaggttttacgcggctgaagtactggttgcgttggagtatctccacatgctgggaatcatctacagggatctgaagcccgaaaacgtgttggtcagatcagacggtcacatcatgctttccgacttcgatctctctctatgctccgatgctatcccagccgttgaatcccctgactgttcactggaccccgcattcgcacccgcgttacgctacactcgccagtactccacccccttctcctgcctctcgaaccgcgtattccggtccaggaaggtccagaccctccaacccaaccgcctcttcgtggccgaaccggtcggggcccgctcgtgctccttcgttgggacccacgagtacgtgtcgccggaagtggcctccgggaactcacacggcaatgccgtcgactggtggtccttcgggatattcatctacgagatggtgtacggtcgaacacccttcgcgggatcatcgaacgaggctacgctgcgaagcatcatcaaaaagcccctcgcatttcccacctccacgccctccagtacgcttgaaatgcacgcgcgggacctcatatcagggttgctcaacaaggacccgaaccgcaggctcgggtccaaacgaggctctgcggacgtcaaaaaacaccccttcttcgcggggctcaatctcgcgctcatccggacggtcacgccgccggaggttccatcactcagaaggcataaaacgacgccgttttactaccccgccaacgtaaataacagtagacagcagctaacggcgtttgattacttttgattaaaatccgacgatggtcgccccctgcgccacgccacgtgttcagtcggtgccccccagttttataattggcggatgggtgacttatgtgtatattttttagttgtcctttcttttttgtaacccttttttttaatataaaataacatagtttgatacttacgtac

SEQ ID NO: 102479 - DNA, 113 bp, Glycine max
  unsure (1)..(113): unsure at all n locations
  Clone ID: PAT_MRT3847_63556C.1
ctgtcttcnntggngatngccttttgcnttttgcgttaggccttgccgaattaantnctngtntcatggttctctcgangtcaagaanaatgtgcatgcgagagtttcnaggt

SEQ ID NO: 102480 - DNA, 437 bp, Glycine max
  Clone ID: PAT_MRT3847_63557C.1
cagaagtgtcaaaccaaaagagcaactttgtttacagatgtgaagtttagaaagagttactagcatgaagtggaagtttatacctactgattgctttcttttacattaaagactctgtcatttcacatactaaaagacttgactttgtttaaaatgtgtttttggaccattgcagttactaataaatgaagttcagtcttctcataagatattatatgatggagaacttaaaattcgcaaataataggaaaaagtaattcccattttgaaaaaagatttgctcaatcttagaaacaatttaaccaaacaagtggtttggaatgctaaaagagaaaataatgggttattcattggtaggaactgatttttgttttacctaaaaacaattttgaaaatattctatattcacaattttcaaactaaattgctatgtgacc

SEQ ID NO: 102481 - DNA, 116 bp, Glycine max
  unsure (1)..(116): unsure at all n locations
  Clone ID: PAT_MRT3847_63558C.1
ggttgcagnaggccantctggaacacaccaanntggtggcangnncctngctgattaaagtgangcccttanaaactacttgctatcaggtacagatnangccattgccaccngga

SEQ ID NO: 102482 - DNA, 705 bp, Glycine max
  Clone ID: PAT_MRT3847_63559C.1
cccacgcgtccgcccacgcgtccgcttttaaactaatccgaatcaaagaaacatcctctgtcatattgtgaggtgtatcactgcagtttgagcccagccttgacatattcagagtttttgtcatcattcttcctcgttctctttagattgaaattgaattgaattaaggtttaaatatattgtccttataatagaaaaaatgtttgcttgtagtctctaaaaaaaccatctcttttggtcccttatttatggaaatgtttcaagtgggttccttgttattaacaccgttgactgaagtggaaaggaaggacaaaaactacaccttacacatttccataaacgagggatcgaaaagagatgattttttaggaaccaaaaatgaacatttccttatttgcaggcactaaaagcatatttaacccttgaattaatgtcaattgaaaaaatttactttattttcttgtattctggagttaatcacttatgtagattattttggtttcagttatcagctatggcatactatgcattcatggatatttatttcagtggacatgtgaaaaacgtgtatccttcaatccttgatgatccttacgttatattctctaggtgttttcttattcataatcatggaagtgtataatcctagttattgatgaatattacaccggaatttttttttcctgtaattccattttgagttct

SEQ ID NO: 102483 - DNA, 426 bp, Glycine max
  Clone ID: PAT_MRT3847_6355C.1
gatggaatggccctgaaactattttctgaacactggatttacaatatgctgctgccactgtaataatttttcagtggctcttgaaatattttttaaaaaggggtgatatgaaagtgaccatatgccattcaatattgccagtccttttttttagtgttgccttaatttcattctacatcatgtttcagttaaatgctgattgaaagtttgctaattttaatgattttcctttactatatgaatgcattttagtagttatttacaatatgattggtgtgtgagagagtgagattgagagatatccaaaactggcgtgctgcagcaatgcacacagacatgaaatgcacacaaataatttcaatccccttatcagtgacaccaaaaaaaggaatagtgatgaatgatgatagtgatagtaattgagtg

SEQ ID NO: 102484 - DNA, 1079 bp, Glycine max
  Clone ID: PAT_MRT3847_63560C.1
gtggttttgaaatatgtaactttcagaactatattccttaatatgataaattcatgtacacccccatggaatattcaaactttaactgtacaaagactaacaagaggaagagaagacaaagagatggttgctacaactacctttcgagagaaacacagaactccacatttgtcaactgagagaaggggaaccaattctggactcaacaataagataaccaatagtttattgtataggttaattcatctcaaactcaaatgaaaaggagactttaacatgtaattagaggccaaatttttcttaatcctagaagaaaggagaagatctgctaaatttggtctaatgagaaaccttattctttgttaccatatctctttgcaatgataggacggacatcatcagcatcagccaaggtctctagaaagggaagtaatgacatcagtgcacaatctaatggatcatcaaaccaactctttataggaataccattattcacttgcaatcggaaaacctgaggtgaattatcaattatggcaacttttgcaagatcaacacctaatatagtaagatcttttgtgtaatttccatctgaaaaaaggcatgattctcgatacatgcgacgagaaataaatcttccatcaggatctaatatatcaagtagttgctttgcatatatgctttggctggcagtaaaaattactacttcgaacatctctgatactctctccaagaatgtgtggagataaggcctctgttttacatatactgtgtactctttcaaattgaaaaagacagtaaaagtgaaatccgcatcatcacagggttccagtgtagaatgaacaagtgtctcatctaagtccagcaccagagttattgactttcttcttggagattgcttaggaattagggttggctgcccatttacttctatttctgatagttctggtaaattcttgataaatgactgaggatcaaagcactctgatttatccaagtcacttttaaccccacgcgtctggttgcaggatcttatctgacctattgctgaatacaaactagcactttctcgaaccatcacg

SEQ ID NO: 102485 - DNA, 377 bp, Glycine max
  Clone ID: PAT_MRT3847_63561C.1
agtggaatcaaatctttgctttttggaaagccgggaatttcattgcattcgaaggcaaggaccccccaaatgaaacccctaacaaataaaatattttatgaaaaccaaatgtagggggtagggaacggaaatgctgccctaatcgtaggttggggccaagatagcctgttcctccaatatccttttccttggggaaacaattccttttatttacaaaacttttgacggggaaatttttcaacggaatattgtttcctaataaaaccactcccatagaaagggactgttttatataaggaaacccctaaccaagcgagactaaaacttttggacttactgcaacaatggggccttttttttttggaactaatcaagcc

SEQ ID NO: 102486 - DNA, 254 bp, Glycine max
  unsure (1)..(254): unsure at all n locations
  Clone ID: PAT_MRT3847_63562C.1
aaacccaaagaacacggagttggcggcgaccctttctctctctgatttcgatcatggcagctgttgctccttcttctgacaaaactgcagatttattgcagatnttgactctggattctgagtcaaaagcaattggagttgctgagcctgcgaagaaggaacttaactgcttttaatttcattgcttcgggcctttttttggttggtttgtgaactatataaaacactggggaattggccgttgggcaattggg

SEQ ID NO: 102487 - DNA, 285 bp, Glycine max
  Clone ID: PAT_MRT3847_63563C.1
cggagaagacgacagaagggcatgcatgtctttgacaacacaagttctaagaagaggctcaaattcacggacaccaatggcttgccgcaaacctctagtataaactgcattcaagttataaatgtcatagacttcattgagtaatccctcatgcatcacgcaatctaccctctgctctacatatctgtccagtacagggagagatgcatccacacatataaaacaacaatcatatcttaagttatcaacttgaccccacttctgccctgccacaagcaagaccaa

SEQ ID NO: 102488 - DNA, 279 bp, Glycine max
  Clone ID: PAT_MRT3847_63564C.1
acggcgcgagaagacgacagaagggtacctccctggtgataaagtatgatcagaataatatcaatgctatgcattaacatctattccttttctatgtataaaatgtaatttattaaaatataaattactaataaacaaattaatgaaatataaagcatagaaaaatagtaattgatattactataagatgttactgtacactattgcacttcataattttccccctacaatattcattattttgtttaaatgtcgtttaacatattgtaagtaaagaaa

SEQ ID NO: 102489 - DNA, 264 bp, Glycine max
  Clone ID: PAT_MRT3847_63565C.1
tgcagatgttgaacgttaccctcgcctgtcttggccgtatgggggccaccattgtgctgcagatggtctgcctggtgaatgctgagctgtaccctacattcatcaggaatcttgggatgatggtatgctctgccctgtgtgacctgggtgggatcttcacccccttcatggtgttcaggctgacggaagtttggcaagccctgcccctcattttgtgtggggttttgggcctgactgctggggccatgactcttcttctcccag

SEQ ID NO: 102490 - DNA, 526 bp, Glycine max
  Clone ID: PAT_MRT3847_63566C.1
agaaaatcacataaccatcttctccattttaggtatggtgcaggtaaaactatttagaaaattctcatgcaaatttcatgcaaaattcaaagatttcaatatttttcatccaatcagtttcagtcagtttctcacttgtcacagcgttgacccgagctgccatctttttatgttgtggcagaagcagaagggtagtgctaaactaaatgcttagcaagtagcgacaaattctgaatttcctgtatgtcatgaatgaccttttacaaggacaaagattatgagaaagataccaaggattcacttataagcctcgtagagcttcagcatttcaattgcaacccagaccgaagatcaatttggtgttaaggtaattgttgaacaaacaaacttcttcagcaccgccattagacctgtccctatccctactcttccaaaggagaagctgcattttgataaccacaccttccccttgtctactcgcctatgcttcccccttctgtcgtcttctcgctactcgagccgaatt

SEQ ID NO: 102491 - DNA, 107 bp, Glycine max
  Clone ID: PAT_MRT3847_63567C.1
gagggaaaactgtttgatggctttcattgcttaaggacactttaacgggaatgaaacctaacgagggaaatttgattcatgtgcagtgaaaagacattttgttagaa

SEQ ID NO: 102492 - DNA, 756 bp, Glycine max
  Clone ID: PAT_MRT3847_63568C.1
cactcacccaaatcataatatgcattataatattgtggaaactttccaaaagcgccacctagggatgtttgtgtggcatctagtaggagaaatatccgctcccttacaggcaaatctgattttttcttcacaattttcacaagaataggaataattcctgtatcaatcaccagctggtgaacaagatctccaatattgttcatcaacatttccagcaacacacctgcataaagttgaatgttaggattcttgttacccagcctcttttttatagctttaataacatctctagcttgcctttgatcatgagctactaattcacagatttcaatatttttcatccaatcagtttcagccagtttctcacttgttgcagcgttgaccagagctgccatctttttatgttgtggcagaagcagaagggtagtgctaaactaaatgcttagcaagtagcgacaaattctgaattgcctgtatgtcatgaacgaccaagggttcacttataagcctcgtagagcttcagcatttcaattgcagcccagaccgaagatcaatttggttgctgctttttttctttcacagagagttattctttatggttaactttaaagtgggaagctttttggcatatgacgatgaaatagttaattgggcaagtaagtagtaaagttaaagtgtgtgacaaattgtcagttatgattatatgaatgcctgttgtgtgaagaattgaaaatggtcagagaagaaacgaagaat

SEQ ID NO: 102493 - DNA, 2417 bp, Glycine max
  Clone ID: PAT_MRT3847_63569C.1
tttgttttttagccaaataaaaaaagcatagacaaacaagggaaagtggtgtttgaaggttttacaaaggttgataagaacaaaaacagtagtttcaagaaatcaggaaaacaaaaataccataatcagttataacatttgcaactgaaacttacaaacctcaggtcatggcacataatctgagaacataattacaagtaatttataaactgaagcagatgtggcttcacttcttctctcccatctccacactaccaagactaaatgagaaatcaccaattcctcacagcttaaataataccaactccaaatttagacagaaatgaaaagaaaagctaaaagagatcctgttgtcaagagatcagtcactaaaatcaaagcttccactgcgagagctgctgccgttacgactatgtaaagagaggcccctcatgtggccagacaaattagaaccatccttgttttccagaaaaaacctctccctctcaatgtgttttgcaggtggtggtggaattgctacagggtgaggaacctgcccattctgttttggccgtggaggtggaatcacagcaggtggagatcgggtatcagcttctcgagatggtgggatcacaacaggtgggagatcgagtatcagcttctcgagttggaggttctatcgtagaggtcggtcgtattagaggacgattgagtctctctccaagcaaacccaagcaagggatgtcagtttcagtctcctcgtgttcaggccttgcacaagcctttcccttgcgtaatcttcggactaactgttcaggctcctcttcctcctctgcttcttcatggtcaaatcgactggcagttgttgtagctctgccagcaagaaggtcatcatgtcttgcaagaactttctgaagttgctcattcaattcaattgctcgagaaactatcctttcatctcgggaagccatcacaagatgcataaccctttgtttttgaaaagaacattgttctacaaggtcaagggtgaattcatcccttgctccctgaggattttgagcatcaacaacatcaaggacctcttttagtacttctaatgcattgccagccttttgaataatgctagattcagggacagtctgggactctgctggctgagcaactgcttcatgtttaggtgaggcttgctctctgtttggtacattactagtcctactaggttgtgaactaggattatttgattggaccacttgatccctttgagcaaactgcactccagcactcaccaaatcataatatgcattataatactgtggaaactttccagatgcaccacaagggatgtttgtgtggcatctagtaggagaaatatccgctccctcacaggcaaatcagactttttcttcacaatttttactagaataggaataattccagtatcaatcacctgctcatgaatatgctctccaatattgttcatcaacatttccagcaacatgacagcaaagagttgagtattggagtgtttgcttcctagtctcttttttatagctttaacaacatctcttgcttcccttttatcatgagcaactagctcacaaatttcaatattttttgtccaatcagtttcagccagcttctcgcttgttgcaccattgactagctcagccgccatctttttctagataacgatcttccagtaaattgacctcaggccaaagtaaaaaatgtcatcatgttacaatagcaatcgaaatcttaacagcatgtcatgaacaccctgtgaatacggacataaagatagagatgacgaggaacccacgcgtccgactttatgaatagcatgaacggagaccaagaaaaactcttcagatttatgagaagccagtatcacacatagttttagttaacagccagtctttaagcaagtataaagcaaaaaggattccatatcaatcagacaggtaaccatcatgtacaataatctatacgggttgtggcagaggcagaagggtagtgctaaactaaatgcttagcaagtagcgacaaattctgaattgcctgtatgtcatgaacgaccaagggttcacttataagcctcgtagagcttcagcatttcaattgcaacccagaccgaagatcaatttggttgctgttttttctttcggtattctttatggtaactttaaagtgagctttttggcatatgatgaaatagttaattgggcaagtaagtagtaagttaaaatgtcagttcctaggagtgattatatgaatgtgtgttaaggtaattgttgaacaaacaaacttcttcagcaccgccattagacctgtccctatccctactcttccaaaggagaagctgcattttgataaccacaccttccccttgtctactcgcatatgcttcccccttctgtcgtcttctcgctactcag

SEQ ID NO: 102494 - DNA, 616 bp, Glycine max
  Clone ID: PAT_MRT3847_6356C.1
gtgaccactaaagggatcttgagaacattgtgttcttcctctgacccacgtgtgaggcaagtgattcatgtgaatctccaactgttcgcggaactcggggttggaaatgggttggtcgtggccggtttcatctaagcggttgtagacactgatccagcggtcgtaattgttgtagctggtggaggcgcacgacggcgaggaactctctccgacgccttccaagtccatttgccacggcgctgcgttggttctccaagcccgcgacgaggccctcatgggcgtgtgcgatgcgtggcacgtattctccgaccccacacataaggcctgcttcgactgcaagacccaactggccaccgcgaccaccacgatgttattttggacattgtgggtttcttcaaatctgggaactttttttaacctgcagaatgagggtttcttcaaatctctctttttttttttttattctacttggtctctgttaaaaattcaagggggaatgatgggttttaaattttggggtgagtgtctgttctttgggattcaaattggttctcatgttgatgtatttgtggccaactcatgattgctgcatatgccaaatgtggtgacttgtgct

SEQ ID NO: 102495 - DNA, 356 bp, Glycine max
  Clone ID: PAT_MRT3847_63570C.1
ctagaattcctctatatggtgaatttacaagccagaatgctattattgctgagcggtttattgaaggaggtagcccgtatgtatccaaaaattgtacatgactattggccggtaattttataaattgaagttctaaactgcaacttattatatcattttcaaagcgctgaaaatatcttgtatagctttgcacagattgaaagtaaacaatttaattagcttaggaatataaactaacaactttgcatctctatctagcccttcctctaacttgctttataagtatattgctcctatacggctatactataaatcaaggaatgttcatactaggtttcagcaccaccttaagcaat

SEQ ID NO: 102496 - DNA, 214 bp, Glycine max
  Clone ID: PAT_MRT3847_63571C.1
aatggattggaggtggaggggggtggggtggggccaaacctaaaaaaagaaagagagaatggagaaaccgattttttattttaaaatttggagaagggatggaaaaaccccatcccctgggtgaaccattggatttggacctgatccggggccgtttcaatttttttaatcccacccctactgactcggccaaattcaagtaaccccttttttt

SEQ ID NO: 102497 - DNA, 157 bp, Glycine max
  Clone ID: PAT_MRT3847_63572C.1
tgaaattggtgtgtacatcgcctattggacctacctctcatacaactgagtcggcttcataattgctatgagatcagacattaacttcacgttccgaatcatctattcaaagagatccttcactgatatggacagtaccaatatctatgcctacatg

SEQ ID NO: 102498 - DNA, 751 bp, Glycine max
  unsure (1)..(751): unsure at all n locations
  Clone ID: PAT_MRT3847_63573C.1
ggccggattccgggtcgccccgcgtcgagaactacggaaagggaacttaggtcttaaggcctgcctctcaagttcgttcaagccgatcaaagcgcaaggaattggtggagaaagcttgatatcgtgcgtgatattatagctggaagtctgcaaggggaagatcgattggaggctctcctatactctgctatctatctcaagtggataaacacagggcaaatttcttgttttgaagatggaggtcaccaccggcccaataggcatgctgagatctcaaggcttatatttcgtgaactagagcgacacactagtcgcaaggatatatctccacaggaagttctagtcattcgtaagattcatccatgtttgccatctttcaaggctgaattcactgcatctgttcctcttactcgaattagagacattgctcatcggaatgacatcccacatgacctaaagttacaaattaagcatacaatacaaaacaagcttcaccgaaatgctggacctgaagatttggttgctacagaagctatgcttgctaaaatcacaaaaaaccctgcagaatatagtgaaccgttcgtgaaggaattcaagatatttcatcaagaactcanagacttcttcaatgctagcagtcttgctgaacagctagaatcaattcatgaatctatgggataatatggcattttcagcattagttcattcttggagtgcaaaagaatatgatgctgcagcagaatcaactgct

SEQ ID NO: 102499 - DNA, 412 bp, Glycine max
  Clone ID: PAT_MRT3847_63574C.1
gcttcttcaaaagtacgttgcattccacgaatttcttctctctcgaagagggtaaactcgtaatgttggttccgattttttcggaaaaacgccttcgtttctttcccagcgaatttttcttttgttcgacgaaccttggattcatttcagtagcatagttcaggttcgtagatctcgaatttcactcaatcgcgtgttgttttccacttttccttttttgaagagccgtgagcatgttgaattaagtgccgttttctgttgttaaaaactccgatggttttattgtaattttgacaccaatatttagggctttgattcttgctttatactgattctgaagttaatctcctcttaatttaaccctgagcttagttcagatgctgagaatttgtcaatagatcaagattgcagt

SEQ ID NO: 102500 - DNA, 260 bp, Glycine max
  unsure (1)..(260): unsure at all n locations
  Clone ID: PAT_MRT3847_63575C.1
ggggcgtcccttatggtctggccccggtcgttacgcctgggccaagaacgaaaacggagattccatggctgttgttaacctcatgaccctggaacaaaatacaaaatgctaattgggtgctttctncctatatgcaagactcgaaagtgtttttttgttataggatggcccaaagcatgtggaatgacaatctttaagtaccatggaacggagtcaagggggagcaaagctttgagctggggatggctgaccactctacc

SEQ ID NO: 102501 - DNA, 623 bp, Glycine max
  Clone ID: PAT_MRT3847_63576C.1
cccacgcgtccgtccagttgcaacttgcagcagttctcttcttccaaatgccaattctttctcaccattcttctaagcatttccttaaccaatagatagacacacaaacacaaacaaaactaaaaaaaaaaacacccaaaaaaattcaaaaaacacaaaacaacaccctcaacaacacaaaacacaacagagtggagaagaagatattgcttctgtttattttttcccttatgtaatgcatcagaagaaatccgaagttcagattggaaaagaaagcagcggcgtctcttccgatttcaaccagcacccgaaccacccactcccaaccctaactccgaacccaaaccacgaatcactgacctccatcgcaccttacaaaagaccctccctccccacccaaccctcaccccaacccctcctctccaaacctccaaccctaaaaccacgccatgtcaccaccaccaccgtaattcccacgtttctatccgccgcggtgtccctccgccggcgccttcggcaccggcttcggctttttctttttctctcgctccccttcttctacttcctcgggttccaccctacaaactccctcctcctcgatttcatcttcgcgttttccttct

SEQ ID NO: 102502 - DNA, 669 bp, Glycine max
  Clone ID: PAT_MRT3847_63577C.1
ggctcgagtgaagagactgcatagtttggggttggatctgctgagtctatcaatggaagatgctggaggttccaaattgcatggaattaagcagattgagagattgaaggaaatgtttcagaagtggcaaactgtaactctgggctcaaaagattccaacaatcattctgatgtgactcatcatcatggggtcttatcaccaatgattaacaaaaggctaactgatattgtgtattgtgactctgatgaggatggctgctacagccctcaaccaccacatgatgttcccaaagggtacttagccgtctatgttggtcctcagcttcggaggtttatcattcccacaagctaccttagccactctttgttcaaggcgttgctggaaaaggctgcagaggaatttgggtttgatcagagtggtggactcaccattccatgtgaaattgagacctttaaatacctcttgaattgcatagagaaccatgatgacagctccagtaagttaattatgttactttattatcatttagtgtagtctgtctcttgcaaatgaattccaattaggctgaattatcatgtcaatgttccagtgtgtcaccatcatcaataatatagattaagccaaaaaagcttatgaaatgcaatttttttaaaatagttttagaacgg

SEQ ID NO: 102503 - DNA, 626 bp, Glycine max
  Clone ID: PAT_MRT3847_63578C.1
atgtaatatcattgttccttctccctctgacatcccttttgattgcttcctccccggctcgagcaaggggatacatcatatcttggtcctactagtattcagaaacttttgaaggacacagctaatatgaagttcaaggattctgcagacaatcattgcctggcttctgaagacttatgtaaccaaaaagagaatctttttatggtacatagtaggaggggaggaagcaatcaaaagatgtatcataatgaatggttggatactattgacttggaacctgatgtaatatcattgttccttctccctctgacatcccttttgacaagtatccgcgggagtggatttgtgagccatgccataaatctgtatctccgttctaccaagacaatgggcacctgtacttagtgagattcgtcttggttcccgttggaagcatcaagtgaacacctggctaaaatttagtatcttgggtcccaagctttacataaatacaattccagtagatgtaggtaatagaccagtagttgggctaagattacaattggaagggagaacatgcaaccggttggccattcatctgcagcatctggcttctctacccaagtccttaccactttctgacaacg

SEQ ID NO: 102504 - DNA, 328 bp, Glycine max
  Clone ID: PAT_MRT3847_63579C.1
gggacaaaaaaacttttaaaattttattattgggggtgaacaatttaaatttttcaatggggggaaaaattgcccttttgacacattacccccaacaaccggggcgcccctgtaaattcggaacagaacccgaaggggtgaccacctttccctataaggagacctaataaaacctgggctaaacatgggcaaaacggttccctctgacaaaatgttatccgttcaaaaaaccacacaaaaaaccaccccgaaaaaaaaaaagctaaacccggggtgcccaaagagggagccaacacacataaattgcgatgcgccaactgcccccttt

SEQ ID NO: 102505 - DNA, 616 bp, Glycine max
  unsure (1)..(616): unsure at all n locations
  Clone ID: PAT_MRT3847_6357C.1
ccggacttaattgctcgttccacgcgtccgttcgtttatattggtgcgcctaaagtttccacatttggtgtggttcattatgaagaaaaggggcaagcttagatgtcaagtgggaatcaacccatctcatggatggctgggtggccattggttactgagcaagggcaacgatattctgagttgcgattatgctagttttgatggtttgattaccaagcaagctatgagcaagatggcagaaatgataaacagcctttgtggtggtgatgaaaaattgatgcgtgaaaggacacacctgctgttggctatgtgatcaaggatgtgcaattgaaagaaagatgtctggagagttgaatgtggaatcccttctggattaccgctcaccagctatttgcaatagcatttctaatgagatgctcattagatatagctatgaaaaataactgctccaggctaaagcttcaagcctggttttacaatctttcacaaattgggtttctttgngtgtgtatggtgatgataactcaaatagtgctcatgaatatgttaagccttactttaactggttttaaattgaaaagctttttagcttggcaataatatcaccattactgga

SEQ ID NO: 102506 - DNA, 360 bp, Glycine max
  Clone ID: PAT_MRT3847_63580C.1
cgcagagccgctttctttgtttttggtactgagagattaccaaaacaaacccacgaatttttggtgtggcagatcacgattcctcagaaaactgtaatggcttttatgtcggaggtcaacatgagcttctctcactacatggatgatgaatatgagaaactcttccggagaatgaaccctcccagggttgtaatcgataatgaagcctgcaagaatgccaccgttatacgggttgatagtgcaaacaagcatggaatacttcttgaagttgtacaaatcctcactgatctaaacctcatcataactaaggcttacatttcttctgatggtggatggttcatggatgtttttaatgttact

SEQ ID NO: 102507 - DNA, 619 bp, Glycine max
  Clone ID: PAT_MRT3847_63581C.1
ccacgcgtccgcgcggatacaagagagagtcgcagttgtttgtggttgttgttgtttttgtcgttttcctctgaaactctcttgtctcaaacggttgtgttgagttgagatcgagagaggaaagatgacagaggtgccgatgtgtatcgccagcgtctctgagctgagtccagatgaggagaggatcttgatcagagacattgctctcactgcccaagctaacagcaaagaaggcgacaccttcttcttaatcactcagagatggtggcaacattggattgaatatgtgaaccaggaacagacaaacacttcatatgatgcatcttccttatcagaacattgtgatttggccaattcaagtgtgttaaagaggccagctggtattgataattctgatttgatagatgatgctgtgtcagaggacactggtatgggtattgagattcatgatacacttttagaaggccgtgactatgtattacttccccaagaagtttggaaccaattatttagatggtatgggcggtggacctacattggcaaggaaagttattagttcaggtctttcccagactgaattggcagtagaggtgtatcctttacggcttcaattacttat

SEQ ID NO: 102508 - DNA, 265 bp, Glycine max
  Clone ID: PAT_MRT3847_63582C.1
tgcttagaagtttctttttcttttttgggaaagtggtcaccctgaagctgtttacccttgcaccctaaggtcacaataacgagctcccaattgttgacacaaatagtggtgctacaacagcgagacatatatctgtcacatactaatctcactttataaatgtgtcactgtgctttccatgtatgccaactacggagggacaatacaataagtttgtactgcagtcattaactagcttgctgcttcaatttgttatattgtgtag

SEQ ID NO: 102509 - DNA, 277 bp, Glycine max
  Clone ID: PAT_MRT3847_63583C.1
attcggtcgagctcgagccgccagttgatttacaccatagttaagactggaatatggaatctgttgccaaaacagcttgtataatccaaaccctgttgacatgggtttgaatttgagcgtccgatcattggattattggcactggatggactgccccaagcagagtcagtcatgatggtatttcttcagaggtcccagactatggttaaatccaaacctttggtaatggggtgggaaaactgacttcctaggacttccgaggtaagagagcctttta

SEQ ID NO: 102510 - DNA, 330 bp, Glycine max
  Clone ID: PAT_MRT3847_63584C.1
gcaagttacatttaaacttgacgagaacaaaaaataaacactccaagggcatggtggtaacaactatttacatcaagtggaaccgtttagtgtaatgaaaaaaaacagtactgcctataacggtaggagccgtgggggctataggttaacaattcctaaagcttacgagcccctaaccagaaagacgtatcacccttgatgtggcgcttggagcacaggaacaatggcatggcggagtaaatcccaaagtctccccatatggtgctagagtaactggtttcgaagagcatctcctgagcattgagagaatactaaggtccgagatccaaa

SEQ ID NO: 102511 - DNA, 582 bp, Glycine max
  unsure (1)..(582): unsure at all n locations
  Clone ID: PAT_MRT3847_63585C.1
attgcagttaaaaccccaacagacacactccatctattcgattttctttaattttcgtgaatgaattaattttggaatcccgcgcaatctgtcggaagcaagcaagcaagcaattccttttgttttgttatgtttcttctctctcgcgcgccctaattctcgaatctctgtatcggtgttccgatggcggaggagaagagggcgccgtcgtcgttcgtgaagaaaggcgaccggcaaatgttcacggtggagctctggccaggtgagaccaccatagtttcgtggaagaagctgttgaaggacgctaacaagcacaacggatccacttcggcgccacaacacgtcgcaatcgctccgggtcaacctgtggaggttgaagaaacagatccttctcagccaaaccgtttcagtgctgtaatagagaagattgagcgcctttacacgggtaaggacagtagtgatgatgaggatctgcttgatgttcctgatgatgatcagtatgatactgaagactctnttatagatgatgctgaactggatgaatatttttgagttgataattcttgcatcaaacatgatggg

SEQ ID NO: 102512 - DNA, 538 bp, Glycine max
  Clone ID: PAT_MRT3847_63586C.1
tgccaggtccgtcactgggatttataaagaatgatggttatcggttaaattcggcgtgtggtcagccagtgccgttaggggcgggaagaggcaccgtgtgactgcagtggaagctttgatggatctaagtgaaacgtagatagttagatagctgtccgttgaatgtgggttaacaagccaagcggggttgagggagtattaaattattatggatagtaaactgaagaatttattaattgtgatagattaggaggtgtattagacatatgttgaatagattaaaaaatatagagcggcgacatattagacacattatattaatagtgacgggcttttagcacttaatgacagcgaaagaagctaggggctagcacgtgtggacagaacaccgcggtagctattaattataacctaaccgatataaccgaagagagccgtgggaataaattttggccatataatagcatcgcgtcaaagttggtagtatagtagagcgtggtagtataacggaaactcatttagttggcggtagacgcgt

SEQ ID NO: 102513 - DNA, 355 bp, Glycine max
  Clone ID: PAT_MRT3847_63587C.1
atggtacatctacttgggtttgactgagaacaagagagggtacatctcttgtggatcagttctagtggagggtacatccactaggttcaaagagaacaagggagggtacatcccttgtggatctttgcttgtaaaaggatttttacaaggagaaaggcttagaagtcaagattaccttagagaagctacaaaagaaaggattgagggcttgttctccaccgaatccttgaggtggattctgaggattccgatccaattaaaacattcctctccgtgtggtggttcagcgataagcaacgacggctcgtgggggccactggtggtcatgggtggtggagaaggtgttagggtttga

SEQ ID NO: 102514 - DNA, 469 bp, Glycine max
  unsure (1)..(469): unsure at all n locations
  Clone ID: PAT_MRT3847_63588C.1
aaaaagtggaaaaagcatgtaaatgcttataagaaaattaacagactgctggatactggagggtatcncaacattatggatatgaatgctggattgnntagttttgctgctgctattcaatcatccaagttatgggtcatgaatgttgtgcctactatagctgagaaaagtacattgggtgtcatatatgagagaggacttattggcatctatcatgattggtatggttttctaacttcttcctcctatttttatttatggccagcatgtctttatcttatgtattttaatagtagtaactatactaatcttgtactgatagtcgagtcaaataaaattntcaaatttcaataaatatgatttgacttggagatgtagtctgccaattattatgatatcttgtattgaattgtgatgtgactagctatacaatttattataatcagcttacttcttcgtctcttgtttc

SEQ ID NO: 102515 - DNA, 216 bp, Glycine max
  Clone ID: PAT_MRT3847_63589C.1
agctatgtggttcgctatgtcgatcgaactgtccaaggtcctgtcactcggtccaggggtgttcctcacccaggcggccctagcgggattccgccaggattgtgccgcaaggcacgtggcccactcaatggtggctaggagctattgaaacgtggaccattgcgatggagatccgagcatgccgaggttacgcaggggcgaggagggagggtgtga

SEQ ID NO: 102516 - DNA, 331 bp, Glycine max
  Clone ID: PAT_MRT3847_6358C.1
gacatattgtagtaatgtgctgattttggtgggggggggattgttatatacacactatggggtctcaaaaattagaatgttcggaatcaaataacacaacactgctatgttgtccagtgtggacgaacatttgtgcaagggtttagagcctatgaatgctgaatggtaccagaatgtatgtgaagatgataaatgtcactatatgtactgctgcatgaatacatacaaaggatggttctatagtgtggggtattccctttcaggaatgggtgccacagagtcgtatgacttgggaatgcaaaaaattaaaaagtgggaaattggtgaatgg

SEQ ID NO: 102517 - DNA, 1783 bp, Glycine max
  Clone ID: PAT_MRT3847_63590C.1
ttttctaaccccacaattttatggccaccacacaatttcatttcatttttccttttcacttcactttcccccaattttctttctcaacaatggccgcagcaacacaactccacttaccccctggattccgattccaccccaccacaattcctacacatttctactctttagtttctccaattttctttctcaattctcaacaatggccactacaacacaacttcacttaccccctggattcagattccatccaacagatgaagaactcgtcatccactacctttgtcgcaaatgcgcttcgcaacatatcgcggttcccataatcgccgaaattgatctgtacaagtacgacccttgggaccttccaggaatggctttgtacggagagaaagagtggtattttttcacgccgagggaccgcaagtacccgaacggttcgcggccgaaccggtccgcgggaaccgggtactggaaggcaaccggagcggataaaccagttggtaaaccgaaaccggttgggatcaagaaagcgttggttttttacgctggaaaagcgcccaagggagagaaaactaactggatcatgcacgagtatcgtcttgcagacgtggatcgttccgttcgcaaaaagaacagcttaaggctggatgactgggtgctgtgccgaatttacaacaagaaaggtgcaattgaaaagcaacaactaccaccaccgagtggggtccgcaaaattgaatgttacgaaatggaggacgagaagccggagattctgccgcccgacatatacggcggcgacggtggcggattgcctgtacttcgaggcttccgactcggtgccccggctgcacacgacggactcgagctgctccgagcaggtggtgtcggcggagtttgcgagcgaggtgcagagcgagccgaagaggggcagcaacaacaacaacgagtttgcgtataattacgtggatgccactctcgggaataatcagatgtcgccgctgcaggatattttcatgtacctctccaagtccttctgcaattaacacgcaccaccacacgacgagacgacgtcgttctgtgttgtgtgtatgcattatgcatttttgcagtagctgctccacgcacatttgcacggaagcacgagactgagtgaagatccgtgagtgtgtccgtgctggttcgtgtagatgattattactataaaaaaacaaaaaagcaaaaaagagaagcattcttatatgaacatgatgaatccaactgtttacatgatctagtcgcaattaatagtttgatattaaaactgagtatgtgtcgccacaacaatggaggatgcatcatcggaaaatgcaactgccgttggatgaccgccggcaggcaaattaatccttagaaacttgaaacttttactcgaagcatcatccaacttgaatactctcacaactccatcagcgcaagcagttgccaaatttcgtccatcgcgggagaagcatacccctgtcactgcatcaccatgacccttcaaggtattcaaatccaacggatggtgacgcttgttttgatccttgtcggaggaatggggtttggagagaggcttcttgggagggggtttggaagacacgagtttgggattcgaatttgaatttggatttggatcggcgatggatcggatttcggattggcgcttgcagaagtaggtgttgaagatgaggaaggcgatgatggcacccaagagaagcgacagcgctacaatgggtaacgctggatccattgtcagagtgaaggcacc

SEQ ID NO: 102518 - DNA, 1245 bp, Glycine max
  Clone ID: PAT_MRT3847_63591C.1
atattattagagaacaaaagtttgatattattaaaagtgaaaattttgtatttgagaataacatactaaatgaaggtatgttgaatgctatacagagagaaaacaataaaaaatgacttatattttggtctaatttttttaacttgctaactcgttaactcggtggtaaactcaagagtttactgagtttacttagagtttatagagtttgcccagagtctacttaaaaaaaagagtttactcaagagttaactcgtagaggacaagtggactcgtagactcgtaagagttagtgagttaactcgagagtttgataatcatgctaaagattaaattagatactatttatttgtgctttcttgtatggtgtatgtatttatgcaggcaattcggaaacacaagtttgtcaaccttctagacaatcctggatcagcagatctcagtgcatatgttgactttgcttccattaggcattccgcggaggaagcttcaggagaagtgtctgttcatggaccaattactcaatctgaatttctcggtttgcttggaataaattttcgtgttgaggcactcctacaaaactgcacggaggaacaggctgaatctttgaggacaggatactggcgtcttgtaggtgatggtgaagcttccttttgggaaggacctgatgaaggtgttcccattggtatgggtactcgctacaaggcaatggctattgttaacaagaagcagggtgttccagttccttttcaataaaccaaagcttattcaaattaaaatgtcgaaccaattagtgtaccaggattgaactttccccaaacaatggttggtttttgggtgcaatcaatgattggcacttctaattgctacaattttttcttcttttatttatttgtttatggatgattgttcaatgtagcgttttgttttacctgtattgtaagatttacacgatataacgttctcgttacaataatcattgactatggcttgaatggagtaatctcggacagtcttcaggcaattcggaaacacaagtttgtcaaccttctagacaatcctggatcagcagatctcagtgcatatgttgactttgcttccattaggcattccgcggaggaagcttcaggagaagtgtctgttcatggaccaattactcaatctgaatttctcggtttgcttggaataaattgtcgtgttgaggcactcctacaaaactgcacggaggaacaggctgaatctttg

SEQ ID NO: 102519 - DNA, 2214 bp, Glycine max
  Clone ID: PAT_MRT3847_63592C.1
gatttcccggtcggcccacgccttccgattccaaagaagggtgtgggtgattccattcgaacaccagacaaccaccacaaatcttaagttggctttcttctcttttgttcgaccgtgtcacgtgcgagaacaatgagaattgccattttccactccctatctaaacctttgaatcttattcgattcaatttcatcacgacttaaataccatcgcatgttcattcattgatggccatgttcttcccttaaaccttcttcaaaaagtcaaaattgaaaacctttctctctcttaactccttctcgtcatcgccccaaagcttctcaacaacatgacggataatgaagaaccgatgatcgtacctggatcgatgtctgaattagcgtttaataaatataagcgatggcaatggtggtgtcttgtgacactcagcatagcctttcttatagttggccaatctgctgctgttatccttggaagattttattatgatcagggtggaaatagtaaatggatggctactctagttcaaactgctgccttcccgatcttgttcattccattatttacaattccttcacctccagaggcttcaacttctgcttcacctcccatcaaaattattcttttgatatattttggtctttggagtcttaattgctgctgacaatatgatgtactccactggactcttatacctctcggcttctacctattcgctgatttgtgcatcacagttagcttttaatgcagttttctcatattttatcaattctcaaaagttcactgccttgattataaactctacagtggttctcactttatctgctgcactccttgctgttaacgaagacacagatgaaccatctggtttctccaagggaaagtacattattggtttcctatgtacccttggagcttctgcagtgtactctcttttgctttccctcatgcagctgacctttgagaaggttctgaagaaggaaacattttctgttgttttggaaatgcaaatctacacatcattcgttgcctctggtgcttctgtcataggcctatttgcaagtggggaatggcgtactttgcatggagaaatggagggttttcagaaaggatatgttgcttatgttatgactttggtttggacttcaatagcctggcaggtatgctctgttggtgttgttggcttgatcttcctagtgtcttctctctactccaatgttataagcacagtttctttagccgtaactcctattgctgctgttatagtttttcatgataagatgaatggggtgaagataatttctatgcttttggctctatggggttttgcctcttatatttatcagaattatcttgatgattcaaagacaagacatgcacaagctgctactaagtcccaaaatgattcttcatgttgagaatattcaatttggtcatacctttgtcgaagtttccttttttctttttagatttaaatccttcagtacaccatttgctagctttagattttatttttccttcagtctcactgaacttgtgaggtagtatagttatgaagttattggtcattctagattattgttctctcatttaagaaatgaaaagtttattggtgtctcggactggttggaacttggaagtctccgatcttcgtattccaaatgtatttttatggcttttgtgaattgtaataagttgaataatctctgtatgattagtggaagtcttaagattgatataagttttctttgcaaacaaaaaaaaaaaaaaaaaaaaaaaaaaaaaaaaaaaaaaaaaaaaaaaaaaaaaaaaaaaaaaaaaaaaaaaaaaaaaaaaaaaaaaaagaagaaaaggggggggcccccctttttttttttttttttttttttttttttataaaacacctttggacccccggggaatccccgaaaattcccccccggcccccaaaggttcccaatttttcctttaataaagctttttaaaacttgggggaaaaaagggacaatgtggttacttggaaaaaatttaaatccccccaaaatcccccacacttaacaccccggggaaaaaaaggggaaacctggggggccaaaaaaggtaacttattctcttttttttgctgggcccaaatcccccttttaaaaatgggaaaaacctgtttgccaaattattttaaaaaaccccccaaaaccggggtaaaggctgttttc

SEQ ID NO: 102520 - DNA, 728 bp, Glycine max
  Clone ID: PAT_MRT3847_63593C.1
tttttgttttagcatagtctggtgacatttaaaactatttttgcttttacaagtaattttaatcctgatataaaattggaaacactccatagctaagtggtgcactaatcatcacatagaattatagaaagaaagaaaaaaaaatactaaacctgcttagccattcaacattcatctttggactatgacagataacttgatcactgggaaaaatagttcttgaaatgagattcttaaacctcatccattagtaatctcactctcactcacggtttaatgtcgctagtttcactacaaatacaacgaagtgaaatttcttgaaacattttcctgctatttaaacaaacccctttccaaaacccaatcttctatcattttttgagaattaactggctgatcagtaggcaaaagatgaccagcccccaaaaccacaacattggtgagagacttccaattttgaacataccctgcaagctctccattaaccttccatatttttctttcagaattcagaaattccacaatcccttcccatttcactgtcttcacccaaacctctgtttgaaccacaccatccctcaaatcatgctgaccttgatataacaacaccttgctcctactcaacaagtattccaccatatatttcacacttttcatcacatcaacatgtaatacatccccaacaacatcactgcatgactcatatgccaatgattcattgatcccca

SEQ ID NO: 102521 - DNA, 353 bp, Glycine max
  Clone ID: PAT_MRT3847_63594C.1
ttacctctccaataaatggatgggactcatagctaaggagacattgcttgagaattgcaggcgcagattccaatgctagggccatgaatacatgcgtgaaggtcaaatattacaggtaagtcttaagatctatatggatttacagtataaagcaatgctgactatattaatgtgttgaatgaaatctgagtttaggtgatgcaacagtgtcctgtctattgtacttatgaggctaccatatgcactaattgctactagcgaccctctgttcatgaacggattgcattcaaatcctgcctcaagctacagcgcattgctatgccaattctgctgctaagatgattagctatacg

SEQ ID NO: 102522 - DNA, 410 bp, Glycine max
  Clone ID: PAT_MRT3847_63595C.1
gcacttcatttcttgacgcatgggcagtcgctttacagggtgacaaaccgcgaacacaggtggccgcaccttatgaccggaagcaaaagccatcgttacttgatttcaagactctctcaaggtgtatctacataatttgtgtacgaccatcttagggcatagaaaatcactctctgtgctggccacacacttcatgaatcattgtatggttccactcttagtgtattggctgaacactctcctattggatataggacttcgtgtcagatttaaactgatgctgtctctttctcagatctatgtttaattgcaagatcaagctggtgaaatcttggattagtactcccactctgctatctgggctaggagttcgtgggtagacgttactatgtcttgactttctttcactc

SEQ ID NO: 102523 - DNA, 264 bp, Glycine max
  Clone ID: PAT_MRT3847_63596C.1
cattctctttcgaacccatactccaacaaccatggactctaatcaatgcaaatagctatcacttattcatgcagagtcaatcactcaatatgcttgcgtctcaagatctccaattatacacgttacctaattttttcaatatgatagtggattaagatttaacctaacgttcaaaaatatcaacaacagcgttgcttttgactgatccgattaaatggtgggatgacaagctgaagttccacaccaaagttttgtaaattacaa

SEQ ID NO: 102524 - DNA, 379 bp, Glycine max
  Clone ID: PAT_MRT3847_63597C.1
ggctcccttcagcggcgatgagaccgcgccccttttcaggttacttggggacgcaacacacgacggtctcactcgagggggagctgctctggggtcagtcgcgaacggtcgtgggttcggttccatgggtgtggcaagaccacacctggggatgaacatcttcggccctcctgttaatgctggagttcggggggatgaatgtcttcttattggggggttataaggcggggctgatgtcccagggcacagctgattccgcgttgatggggatgcccacccctcctctgggcttcctgagggcggggtgggctctctcgtggcaaggctattggtattattggtcgttgctgcggttaaacccattcaccgcagcccgaga

SEQ ID NO: 102525 - DNA, 1418 bp, Glycine max
  Clone ID: PAT_MRT3847_63598C.1
tacggctgcgagaagacgacagaagggggaagaaagtgtgaggtcaggtcgaacagcaagacgaggaaaacgcacgtagcgtcaccgccatcttccatctaaaaccccaaaacttaacatgcccaatctgtgtcgaaaaatgtttcaataatggttctgttccgcaagttcctaaaacaaatactcgtcgacaacacccaaaccaaaacaaaagcccgaacctttttcacctcaacctcaaccgcaaccgcattcccatggtgcgcgcctcaccataacaaccgcctcttccggtccccaggcccaggcccaggcccaggccctctcttcctcgctcggcctccatggaaactctctcagtccgccacccctctctattcgcacggaaacgccttcaatttgcttcgctccacagcccctctccagttccctgatccggttccctcccattccaacaaaccctcgattttccacagcttcgtcaatctccccaacttcatttccttcacccgattactttccggtcctctcctcgcatggatgatctccaacgagttttatacttctgcaatggtagggctggctctctccggtgccaccgattggctggatggatacgtggctaggaagatgaagatcgattccgtagtgggttcctaccttgatccccttgctgacaaggtccttattggttgcgttgctcttgctatggtgcatagagatctactgcatcctggacttgttagtcttgttgtgttccgggacgtcttcctcgttggtggcgcagtatttctaagagcaaatagcttgggttggaagtgggaaagctggtttgatttttttaaccttgatgggacctgccgccaaaaggttgaaccactctttctaagcaaggtgaatacagtgttccaattagcactagttgctgcagcttttcttcaaccagagtttggaacccaggaaactcaattatatgttacttatttgagctatttagtggcttcaacaactgtagcatctactgcagcatatggagcacaatattttaggagactggctgtagtatcaaactcggtctagttaagtttccattgagatgcagagggatcagggatcggcatgagcaaggacttattgcccagtaaattatggctagattgcccagtctttgttttcaaactttgccttctaacataagcattaatgtttcaaatgttttcaagtaggggctgacaaatgttagattatttttcctgcccttttttgttaaaggaacgtatgaaacgggtttttttttttcatgccctttgaatttttttggtcaagtcccccccccccatttttttaaaaaaaaaaaaaaaaaaaaaaaaaaaaaaaaaaaaaaaaaaaaaaaaaaaaaaaaaaaaaaaaaaaaaaaa

SEQ ID NO: 102526 - DNA, 595 bp, Glycine max
  Clone ID: PAT_MRT3847_63599C.1
cttggagacaatatcaaaactggaggagagaataaaagaagctgaggagaatgcaagaaggattaaggagcatgccgatatagcagaaaaagaaatcgaagctttggaattacaagttactaaacttaatgaagaaaaggaagatgctgctctccattatcagcaatgcatggagataatttccagtttggagtataagctctcttgtgctgaagaggaggtgcgtaggctaaattccaagatagttgatggggttgaaaagttacagagttctgagcagaagtgtcttctcttggagacatcaaatcacatgctgcagtctgaattacaatctttggcacaaaaaatggggtctcaaagtgaagaacttaacgagaagcagcaggaattgggtagactttggggttgcatacaagacgagagactgcgattcatggaggctgaaactgctttaaaaactcttcagcagttgcattctcagagtcaggaagagcttagatctcttgcttctgaacttaccagtaaagtggaaatactggggaatgtggaatcacgtaagcaggctttaaaggattaagtactcagggttagcgag

SEQ ID NO: 102527 - DNA, 441 bp, Glycine max
  Clone ID: PAT_MRT3847_6359C.1
aaggagttcatggagaggaaggataagttggtggattttgagcaccatcttagcaatgtttctcagcaggttttgtgtttcactggttttggctttagtgtttgttagttcaccatggtgcattttggcaatgagcttaactatgtgcatatttagtaagttcatcataagattaactatggtgcatttgggtaatcagcttaaccaagtgcttgcttattcaataagctcattaaaagtttaactgagtgcatttgggtaatgagcttaattaagtgcttattcagtaagttcattatgagcttttggcttccatgttcattagttgagtgtgatgtacttcctctagactcataaggaaacaatcggtcttgtatgttggacttaaatataagtaaatctaattaatttttatctaaaaaactaagtgcagttgggtaa

SEQ ID NO: 102528 - DNA, 348 bp, Glycine max
  Clone ID: PAT_MRT3847_635C.1
acacacaccccttctttaatttgtttaaaatatctgtgaataaaaaagctttgaaatattggatgcaaggactgtataaaatgaaagcttctgttcttacacttttaatacctcaagtccttactgtacttaacaccatcagaggttgaaggccaaactcatattaatctttttgtttatctatcaattactatttactttcatgaaatcctatttgtattactaaaactcacttttttattcaaataaactccttaatttaatttttagatgacttctttaattttaattttttgaaactttgtcggtgtgatttttcttcataaattcattttattgttttcaaaa

SEQ ID NO: 102529 - DNA, 112 bp, Glycine max
  unsure (1)..(112): unsure at all n locations
  Clone ID: PAT_MRT3847_63600C.1
ggttggctatttttgtcaacttgttttgaatgtttgtcactttgcncattnatattttgttattncncgaatatgcataaaatatncatttacagggcagtagatggccttt

SEQ ID NO: 102530 - DNA, 331 bp, Glycine max
  Clone ID: PAT_MRT3847_63601C.1
gcactcacaacaacaagagagggacattttgcagcaacggggtggagccatttccacgctatacctcagactggttcaccctaaaagggtagattcactccaccacaccccttccatcattgcactcatccacatccacagccactcctacaccataaaccccgccaccgactgcgtccgctctctctcccgccggcttttagaacgcggcggagtcccagatctcgaaggcggacgatcttataaactgggccccccgcggatccatctggcccatgaccttcgggctcccctgctgccccgtcaaaaagacgcacaccggctccccccg

SEQ ID NO: 102531 - DNA, 570 bp, Glycine max
  unsure (1)..(570): unsure at all n locations
  Clone ID: PAT_MRT3847_63602C.1
ggtggcggccgctctagaactagtggatcccccgggctgcaggaattcggcagaggcgaccacgatgccgcccttgtcgtcggacacgcccggaccataggcgcgtttttcatcggtgcgatacggccgggccttggcggtgccttccttgaacaccgtgtccatatgcgccagcaggagaattttcgccttgccgctgcccttgagcgtggccaccaggtgctggctcttgtccggcgcggtattgggcacctgttgcagcgtggcgccgagtgtcttcaattccgcgctgaccagcttgcccacctcgctcaggccgggctcgtagccggaacccgagtcgatgttgaccagttgctccagcagcttgagcgtcggcgccttggcctgctccgcagcggtctggatgcgcgcatcgagcgcggcactggcgggcaaggcgatgcagcaggcgagaacggcagcgagggtggtgcggaagaacggagcggacatcgggctttccttgttggcattgttggattagtcagacaactgtagtcgcaacaaggacatangggaaattcgggc

SEQ ID NO: 102532 - DNA, 2280 bp, Glycine max
  Clone ID: PAT_MRT3847_63603C.1
ctgattctggtccttcttctgggacaagctcgaatggagaacatgcagagagtactaagcactccaatcccattctcagatacattagtgacatcctcatggatgaagaagttgatttggagcgaaaaccctgcatgttgcaggattgtttgagacttcaggctgctgaaaaatcattctatgatgcattggttcgtagttacccttcatcaactggtcaatttaatgataatcctgacccagatgataattttggtggaactactagttctgagagttttagcagttataccactgataattcatgcgagtctgattggtttaacggtgctagtgacttggattcctctttcctacaaagatctctaattgattctccggaacacgcatatgtagctcctgatccgtttagagagacacaagctggggtccatttttcaaatggagcctggaatttgattcacccacagaacaagccgcgtgtgattgaggatggtgtgatgcggggttctgtaacagccacaggattgagggagaagaggagttatctcatgaatgatatgtcacatgaagaagagagaagcaacaagctttcttctgtctactccgatgattcggagccatctagcatgtttgatgaggtgctgctttgtaaggatggtaagagtgccatccattttttatgctggccgtgaaccatcaccatcgcagattgctgactcaagaggatctaatgggaagaaaacacgatcaaagagaggttccaataaggggacaagggcaagcgtgacgacggtggatttatggactttgctaattcaatgtgcacaggctgtggctagctttgaccaaaggactgcaaatgaaacactgaagcagattaggcagcactcttcaccttttggcgatggacttcagcgtttggctcattacttcgccgatggcctcgagaaacggttagctgctgggacaccaaagttcatttcctttcagtcagcatctgccgcagatatgttgaaagcataccgagtgtataggtaagtcacgaaccagatagcgatgtctaatttcttggcaatccgcactattctgaagctagcgctgaatgaaatggtgaagaaggaataccataatgggtttgtagttggtgaggatggcacgtgggttttccaacggctttcagagaggccaggcgggcctccaaagcttcttatgacaggaattgatcttccccagccgggatttaggccggcggaaagggttgaggagacggggcggtggctggagaagtactgcaagaggtttggagtcccatttgagtacaattgccttgcacagaaatgggagactataagacttgaggacctcaaaattgataggagtgaagtaactgtggttaactgtttgtacagattgaagaacctttccgatgaaaccgtgactgcaaactgtccaagagatgctttgctgaggttgatcaggaggatcaatccaaacatcttcatgcacggggtcgtcaatggcacttacaatgcaccatttttcgtgacaaggttcagggaagcactcttccacttctcatcattgtttgacatgtttgaagttaacgtgcctcgtgaaagaagacgacagaaggggattgagaaaggggtgttcggaagggatgcaatcaatgtgatagcatgtgagggggcagagagggttgaaaggccagaaacctacaagcagtggcaagttaggaaccagagagcagggttcaagcaacttccattggccccagagcatgtgaatagagtgaaggaaatggtgaagaaggaacatcataaagattttgtggttgatgaggatggcaagtgggttttgcaaggatggaaagggcgaattctttttgctgtttcctcttgggttcctgcttgaggaatgaccaactcctaacccactcattggcaaggaaaattgttttaggtgtaaggtgcactaagggtatatttatccttgaatagaagtgaatcatgatcatattttgtttctatttgaatagtgaaaataccctcttatatgtgcacttttatgaacaagagtagaagacttaaactcctctgaaatcactgattttagaaggatatctaatatccacattaatgtactagttttctagtgatgcctaggagcaacatagaaagaagttggtagttattataaatcttcatttgcttaatgctcactgctgtactctaaactttattttctcgtttatgttacaagtggtgaatcattccc

SEQ ID NO: 102533 - DNA, 217 bp, Glycine max
  Clone ID: PAT_MRT3847_63604C.1
tactttctcattaaagagatttcactgggtcaaatgtgttattctcaacatacctattcaatttccttaaatacttaacttctcaccttttcatcatctctactatatataaatcacccatattcatattctatatttctattcttcacttttatatcataaaaacatccttttctaattcactatttatactattttaacaatatccaaaacaaat

SEQ ID NO: 102534 - DNA, 184 bp, Glycine max
  Clone ID: PAT_MRT3847_63605C.1
caccatggagattgggggaggtttgggtgtaggacccctgacagatcacatctatctccacttgaattacttacccccctatgtgctcgcagagagacttgctggcatctctgaaactgctgctattcttgctggtgtggatgttacaaatgaacccattcctgtgttgccaaccggacctttt

SEQ ID NO: 102535 - DNA, 446 bp, Glycine max
  Clone ID: PAT_MRT3847_63606C.1
cctcgtgccgaatcggcacgaggctgcaacatcaaaagaagagtggcaagagcaatgcaaattttggccaacatcatatcaccccaggacttacaacattgatggcattactggatttagcgaggaggactcccaatcagttttgaagtttatgcaatcagctgttgagatggcaacatctgatggcatggtaaatgtgcaaattttttgcctttttcattcaatttgtgcacaagaaataatgtgttcacacctgcgacagtcttgactttcagttgcttttcttcttctgtgattatttttcacttaatgcgtaatagcttgagttatttttaaattggtccctctatcctttgctaaattagtaaaggctagctttggcaaaagtgtcctactagtaaatttcacattcaactgctgcatactaaaatttgatctgttttagg

SEQ ID NO: 102536 - DNA, 507 bp, Glycine max
  Clone ID: PAT_MRT3847_63607C.1
caccaacactcacctcggaaccattgcaagccaagattacacgacccttccgcgaccacttcactccagatccatgccctccaccgcacgcatgaccactcatcacgacttcaagccaaaacacctctgcatatgttacggattacatagtccgtaacctacttttttaggtgctttatttttcagcatggactccagcactgtcacacgccgttgtcctctccagatctgcgtgcgtgagaccacgaccacaccaccacaccaagaacatcatctacgcacgaactacctcggacaacccctcttgcgcgagccgccacctacaagaccaaaatccacgcgcgtgatttcggggcaccagatccgtgcgtgaaatcattttaagaagcactaaggactccaacaccaaggacgtcgtcgacgcctgaatctggaaacaacgctctgctccccgacgccaaggttcattcatgttgtttcactacctattcatgtgttaatttggtt

SEQ ID NO: 102537 - DNA, 434 bp, Glycine max
  Clone ID: PAT_MRT3847_63608C.1
ccgacgcattgcccatgcattcatttcacgtatgcgtaagggaaaaatcagattcatggctacactcgcttgacaaacgacagcgtcaagtcttcatcaattcttcctttcccatcctccctcccctcaacctgaagtcttctcaaacatcacgctccttgcagttcactttctgatccattgtccgtcacgaaaccatttttaagcttttcgattctgtccgttcatctccacgtcataagtgcctggtagttccggcggaggaggtccgtccttcttttccagtgcagcgagagccgtagcaggatctccgatacctgctcgcgtaccccatccagtcttgtggagcgtgaacaaggcgtacaacttcatgatggcgaagttattcccaaagagaatccacgccgggacataaatgatgtgtgccgggtgat

SEQ ID NO: 102538 - DNA, 739 bp, Glycine max
  unsure (1)..(739): unsure at all n locations
  Clone ID: PAT_MRT3847_63609C.1
ccacgcgtccgatctgaagtgagaagcacattacattctctctttatatatctcctccgacaccgttactcagatatacccacctccgaaaccaaatggatttgctctgagaaccaaaatgggtgacgaacaaccgtcgacaacctcagtctccggtctccggcgagtaatcgcgctcctctcttcattgatctccctctccctctcgatcagagtcttcgccggaaagtggcaactgattcggagcaggctggaggagctccactcggccctcgttgccggcgattccacgtcactctccggcgagctcccggcaataacgggcacggcggaggagtgcctcgagctggcgcggcggtgcgcggatctgtcctacagcgggaagcttctgatgcagagcgatttggacttgacattgggaaagttggaagctcacgtgaagaagctatctgagatattcaagaagggcgtgtcgatgcatggctactccgtagtagtttcaaggcctggttttggagcttgcaaagatgacatgaggttctacttaagggacttattgactcgaagaaggttggtgatttgggtatgaagaagcaagcattggtgaacttgcatgaggtgggttgtggaggatgacaaagtatgtgaagttgggttgttgagggttcttaagtttgttcacgtggnggggggattttctaggttctaacgagtttgagggtggtcgaagaggctgcta

SEQ ID NO: 102539 - DNA, 240 bp, Glycine max
  Clone ID: PAT_MRT3847_6360C.1
cctcaactgccaaagacatcgtcgagcaggaattggcagccactgggtgactataacaacgaaaggacacgcacaacaggcaggccactgggatagtgaagatgataggcggcgagccagagagtacatctgggaaagatgtccagagtgtggggccaggacgccgagctcatgaggactttgggtcgtggcagatgcgagcgggcaagaggccaccagatttggcggtttgggagcaca

SEQ ID NO: 102540 - DNA, 246 bp, Glycine max
  Clone ID: PAT_MRT3847_63610C.1
cactccaggctttagtgctaattatttcatttgtctgcaaatatgtatactctctacactgacagaagcccttctgtttctacgcacgtttttatttgtcagagcctgctcttttttttcttttttttcctagggactttcacgatccgatccaaactgataaagagcgtgaaaaacaccccaaaggaagaaagcgagccttgccccattgcgaggtcagatcaagggtcaaatgagtactaccct

SEQ ID NO: 102541 - DNA, 334 bp, Glycine max
  Clone ID: PAT_MRT3847_63611C.1
aaaagaaagaaaacagaaaaaaagggaaacaatggaaaaattaaagccaaaaacccaaaaacacaaagaaaaaaaaaaaaggggcgggcgcacaaaaggacccaagcaaacgaacgcgggcaagcgaggaaaaaccaccccaaaaggggaaccaaaaccaaacacacgggccgagggaaaacaacgagcagacggggaaaacccgggcggcacccaacaaaaaggaacggaaaaaaaagcccccaccgccaggaggcgaaaaaaacaaaaaggcccgaaccgaccgcccaaccaaacaagagcccaaccggaagggacaaggggacgcccccag

SEQ ID NO: 102542 - DNA, 297 bp, Glycine max
  Clone ID: PAT_MRT3847_63612C.1
gagcaagaagtgctcccggttgtaaagcaacaaaacctcttccattaataagagttagagatattccttttgctctcttttaaagagcaaggtattcccagacttttaagctataaaactactccctccggaagggtgaggataggtgagtcgccctgccccacatgtcttgctctacacgtaactagaatcaaacccttctcttgtccgcaagagggttgaaacggagcaaatcctcttgggcggaaaactccaattaactggacatggttgacaacttgctttggccccaaaagg

SEQ ID NO: 102543 - DNA, 487 bp, Glycine max
  Clone ID: PAT_MRT3847_63613C.1
gagaaagaagcaagtggaagaagaaatgggtttgatgggttcatttttcaagaggttggcgaagcgtgtgattaagcaccaggaggttcttcagaacaaattgctggaagctattgagagaatggagaaagagagagcggaatgggaagaaggttggagggttcgagaaagggaaattcacgacagagaagcgattgtgaaagcgcgtgagcgagatcttgcttctaagagagactcttccattgtttccaacttagagaagataacaggtcaaaaaagcttcgttcttgtttcttctgggaagagtagtcacgagcaattatctacaatacatgaatattgacatcaacgatatgaaaggtagacatttattttattctcggagcgattcagtaacgttatggtgaatcttgcaatttgaggtacaaagatgggattagttcagtgttcagtgagattgtgttgtacatggacagcgtcctataac

SEQ ID NO: 102544 - DNA, 483 bp, Glycine max
  Clone ID: PAT_MRT3847_63614C.1
aaaaaaaaaccccttataaatctccttggataaagggttaatttatgcacaactaccttacagtggatatacccctttatcctaaaacttttttttatatacagggcctggagttatgagtcttttgacacaataggctgctgccggattattgggttatgaagttcgaacacatttttgagaactctgctataaacaaaattgaaccccataaatgcctagggtgctggaaacaaaacataattccctgggctgggtctgtaaacggggggcaaactgtagttggccccaaaagccactggaatcgaatcaactagctttcgagaactcccggggcttccattaaggttggccagctgcaaccgggaaaccctcccaaaacacccagtatcagatccactttagagcgggcactgaccaaattttctaaattcccttttacatgaaaaaccgtaagagccattccccttcctccatgaattt

SEQ ID NO: 102545 - DNA, 452 bp, Glycine max
  Clone ID: PAT_MRT3847_63615C.1
ctgaatcaaaacatacattaacagcccaaactgtatcaaaaaagacattaatgctaactccatctctgattttgcactcatcacatgaagcgtactagaccctattcacgattcctgagaccttacatcatccctaaaacttacattatgagaccaaataacatgatcctaaccattgcttgcgagtcactcacatgcacaggcttagtcaacttctctaatcttaggtcccgcgccagaaccagtaccaccagcacgcagcatgtcatgatcacccgtaggaacatatccaccaggtctagcagctgcaccctggtacattttcgcattgatggggatgcaaataccttgcaactccctctgcttgtcctaaaactcatccgataaacggcaactgtgtcccctccaaccaatggctcgcatactccacagccgtctgaatcctctccttc

SEQ ID NO: 102546 - DNA, 203 bp, Glycine max
  Clone ID: PAT_MRT3847_63616C.1
caccaacactggcactgaagtcaccaaggatccggatgctggacttgaatatggaaaagtatcttccactgaactggtacaagctgtccatgatatgctttcagctgcaggagtaaggatggatgctgagaaggaaacactctttgaggctactctttccttgcaagatcatgcttaaaaatctcaagttgctctcttggagg

SEQ ID NO: 102547 - DNA, 390 bp, Glycine max
  Clone ID: PAT_MRT3847_63617C.1
cccacgcgtccagccacgcgtgcggggtaacgcgaccatgacactggctacgcaagcctatctcttatcctcacccttcttgagacgaaaagacagctgaccgcgcctgcgcgccatgctaatacaactctagctgtctcttctgcagcgtgaagccacttaaggtcttcagaactataagagcacaatgctgcgacgagtccacatacgctccagggaatgtagaggctgtaccggtctggatcaccctaccagagcttgacccaaacaccccgtgccagatcttcgggggctacaacgccgggctcctgcgcatggctcaggtggaggagttttatgtgattactcgggactcacccatagaacagatctgtgaactgagcactggcc

SEQ ID NO: 102548 - DNA, 351 bp, Glycine max
  Clone ID: PAT_MRT3847_63618C.1
aaaaaccccgccaacttgtttccattttttaaaaggaaaaaaaaaattgcctgtaaaaaacattaaatccctcacccatcactttttaattttcctccacacaattttttttgcattaaaatggccccttcctaaccaaatggtttgcttatcaaaaaaaagtttttactaagggcctttcccattatacccaacctcaaaaagcaaccaatgtttcccctggtggaataatgctcccagcccccaaaacctcctttttcctttccttgaaaggtttaaaaaaacccctcgggaagcccttgaaaagaaaacccctcttttttattttcttggggagctttttctcccttt

SEQ ID NO: 102549 - DNA, 924 bp, Glycine max
  Clone ID: PAT_MRT3847_63619C.1
cacgcgtccgggggcgaggtggcgagtgaactcagtgggttagaaaatagaattgggttttggattgggttgtcgtttcgttcgtctactctcctcttgttcatttcatcgcctctcagccacctccccttcgctcctctctctctctctctctcgcgcgcactacaatcaaagtcatgaaagcattttgttcatagaagaagaaattcctcttcctattagattagggtttttttcccattcaattcaatcatgcttccggcactgtctcaattcaaggttaaccatgtgggtgtggggttcaattcgtcccctaaccccattcccatgcttcccgcgctccgtcgcagccgctgtgttgtcctctttcgcctgcgatcctattcctccacagacttcaaaatcaccgcccacgtcgaaactgactccaccgttcacttggagcgttgctttaacgcgcccgtcgcttcccacctcccttccatttccatgaagggcggccagtatggtgccttcggtgccgttaccttggagaaatccaaactcgatatgtcgcaaaagcaaacaaggtctagccccgagctagacattgggggaggtggggggagatatcggaaagaaaatcaatcatggtggtggtgatggagatgatgatgatgagggagattagggattcttgttatgacgacggatactttttgaagagctatttgaccgaaaatttgtggatgctgtgttaaatgagtggcaaaagactatgatggatttgcctgctgggcttcggcaagcttatgaaatggggttggttagctcagctcaaatggtaaaatttcttgcaatcaatgccaggccaaccaccagtaggtttatttcccgaactctgcctcaagcactatcaaggtctttcattggcaggttgcttgc

SEQ ID NO: 102550 - DNA, 772 bp, Glycine max
  Clone ID: PAT_MRT3847_6361C.1
gttcaactccatcaagatgactgcactagttatgatgaagatgacaatagcaacgttataggaatagtggtgcttgttgctgctgcattctttggctatatgttggcattgctgcagtggagggtgagggctatgttttcttctccagatgatccaagagctccttcaaggaagaaaggagcaccatttgtagcacagcaaatgcaaaggcctcctcctactacaaagtcagtcaggcctcctttgattccaaatgaagatgaatttgagaaacaagatgagggcttctttgtttcccttggaagactattcctgaactctggcacatgcatgagtgaaattctggggggcttgttctcaggatccaaaagaaaatcactgcagtatcatcagtatcagcagcagtatcagtatgctaatagatatcccaatgcatggcccatgcaagagagttttgtcattccagatgaagatgaacctcctccttctttagaaactaaaacacccacacctagggaaacatatcctatcatgaccaaagagcttgaaaaaccacagcacttcaagccaagtaggggttacttgaaaaggtgggagggtggtgattatcaagaacaacatcaacaacttcaacaacatcatcagcaacatcaacaagagcatcccaagttgcaacatcaacagcaccaacaacaggtcaagctccaacatcagcaccaagttcacacacgttattcttccacccctcaaggttattatgaacagaactgcg

SEQ ID NO: 102551 - DNA, 780 bp, Glycine max
  Clone ID: PAT_MRT3847_63620C.1
aattaagggagggtgaaggcggccgagtgaactcagtgggttttggattgggttgtggttcgtttatctactctcctcttgttcgtttcatctctctcgcactacaatcaaagaaagccatgagagcattttgttgatagaataatttggtctttctattggattagggtttgtttttccatcgctctccattcaaagatgattcccgcactgtctcaattcaaggttaaccatgtgggtgtggggttcaattcgccgtcccctaaccccattcccatgcttcccacgctcagtcacagacgctgtgttctccgtgtcagcgtgcgatcgtattcctccgacgacttcaacactctcaaaatcaccgcccacgtcgaaactgactccaccgttcacttggagcgttgctttaacgcgcccgtctcttcccatcttccctccatctctatgaagggcggccagtacggtgccttcggtgccgttaccttggagaaatccaaactcgatttatcccaaaagcaaacaagctttagccccgagctagacattgggggaggtggaggagacattggaaagaaaatcaatcatggtggtggtgatggaggtgatgatgatggggatgatgacgattactttgatgacttcgatgatggtgatgagggagatgagggtggcttgtttaggagacggatactttttgaagagctatttgaccgaaaaatttggggatgctgtgttaaatgagtggcaaaagactatgatggaatttgcctgctgggc

SEQ ID NO: 102552 - DNA, 401 bp, Glycine max
  Clone ID: PAT_MRT3847_63621C.1
aaggatgggatttcctgagtcctatacaacgttactaatggagccaacgagctaaaagagctaaccaactatgcgtagaacattagatgctcaacgtcctgtaaaatcacatacggatgtttgaacagacctctctagacactacacttggatacgggagtcactagtgtcttcaaaagggactatatttaggatccctataacgggtaatgagatctggaatggcaagtcacatcggaatcactctgcctttacgagatgtgttctaatacctgtgtatccgacgtggatggttgaacgagacaacgttgtactaaggacggtggatagaggatttgaaatttgcatgccatgatcaaagtgcctgaaacccaatagagggttccctgtaacaaacgaaa

SEQ ID NO: 102553 - DNA, 460 bp, Glycine max
  Clone ID: PAT_MRT3847_63622C.1
cccacgcgtccgctgcagcagtgtcagtggcatcaagcagtttgactagttcaaacaccagtacagattctaatcgtgtcatgtcatcatcttcaacatcagcttttcttcacttatctaatcaagcacctaaagacacagtgccatcattacctaacccacctggcttgaagttaaccttagagtcacttaagtcagagattccaccagctgctgcacttaaatcagatatgcaaccagctgctgtgtctaattcaaagactgttttagatgcttctgcagaggtagtcactcggccaaatgaacctttaaatggtgcatctgaattgaagcttggaccctcaagaaatttcagtcctactattgaacaacctttcaacaatacaacaagttttgatctcaatgttgtctcagtttctcaagcagcacagccttctgatgctcctttgcagctttcaac

SEQ ID NO: 102554 - DNA, 797 bp, Glycine max
  Clone ID: PAT_MRT3847_63623C.1
gttcccatagcctcattttccatgctaacttgttgcttctgctgctaatagttggttgtcatgctcaacttcgagttgattactacgaaaacacatgtccaaatgttgaatcgattgtacgaagtgcggttgagaagaaacttcagcagacatttgtgacagctcctgctacacttaggctcttcttccatgattgttttgttaggggatgtgatgcatctgtgatgctagctacaagaaacaacacatcagagaaggataatcctataaatctttcactagctggtgatggatttgacactgtgatcaaagccaaggctgcggttgacagtgtacctggctgccagaataaggtttcatgtgctgacatattggcattggcaactagagacgtcatagcattggcaggaggaccatcttatgcagtagagttgggaaggctagatgggagagtctcagcaaaagccagtgttagacaccatctacctcatcctgaattcaaactagaacagctgaaccaaatgtttgcttcacatggcctcacccttacggatctagttgctctatcaggagcacatacaatctgggtctctcactgcagccagttctccaaacgggattacaacttcagaagaaggataagcattgatcacacactgaatgctacgtatgcaatacagctgcagccagtgtgtgcagatcatgttgaccccagattagccattgacatggacccagttactactaggacattcgatagctcatacttctagaatcgtcaatcacgtagaggactg

SEQ ID NO: 102555 - DNA, 458 bp, Glycine max
  Clone ID: PAT_MRT3847_63624C.1
ggaagccatttacaatacaaagtacaatttgattgggtgaatcaagaggatgacacagaggtaattcctatttttttaatgcacacatttcggctttgatttgaattatctattttctctctgctctgctttctttttttggtttgttggtgcgactgacatttttacaggaaacaaccatgtctaatgcctggtatgaagtattgtcagttttgcacttgatggcaatgctattactgtcacaggctaatttattacttcttcccagaacatccactgatagtcatcagccaaaagtatcagaagaaagcagacgagcttctgttgatatcttcttaaaggcagctgggtatcttgactgtgctgtaaggcatgttcttccacagttgcctggcgaactgaggagaaacttaccagtggatctcacagaaggagttcttcgagcactctgtctacaa

SEQ ID NO: 102556 - DNA, 489 bp, Glycine max
  Clone ID: PAT_MRT3847_63625C.1
atttcagatagtcagcttcaaataaaaaataatttgcaagccaaataacagaacgtgttgcacgtattaattacttatgggatgagacttgtctcactaaaatgcattgaaccacctaaattggatgctaataaaataaaaataaaaaaacaaaatcaacatatctgatacatatttaataaaccaaacttcattggagtaatgccaaacttttttattttgactactactctaacttgaccctattaaagatagtaaatgcatttttccaactatagtaaatgaaaatatggaagaatatgtcataccttagtcccagtatgacaattttatcttgttttttttttaattctatttttagtgctacccaagaaaacaaagttaaagtgaagcagtaactggtaaaagatgtgttctactggaaaatgtgtttttgtttacattttatttctttacctatttgggaaggggaaacttattttcatgttc

SEQ ID NO: 102557 - DNA, 142 bp, Glycine max
  unsure (1)..(142): unsure at all n locations
  Clone ID: PAT_MRT3847_63626C.1
aaagtgatgatccctgattgagtgggggaacccctcccatacataatgcanattaaggcgggacacggcctaatgcttcaaattggaaattgaccccaactagaaaagatgagaacacctcgccttaaataggactgacccc

SEQ ID NO: 102558 - DNA, 280 bp, Glycine max
  Clone ID: PAT_MRT3847_63627C.1
gaaacttcagagccctctattgcctctctttcttcgcttattgttgcactttcttcgtcctagatatttcctggtcggtactctttttagtctctttatctttattcttcttctattctcatgcgcccatcttatacctctcttcattcatcatctttctttctttgcattcttccttcactttcttcccttcttcgatcccaactcattcatgtccctctctatcttctcgcattgatcttatcgatcactctcatctagcactgcattttcattacca

SEQ ID NO: 102559 - DNA, 863 bp, Glycine max
  unsure (1)..(863): unsure at all n locations
  Clone ID: PAT_MRT3847_63628C.1
ctcttaattagcattgaattaacacttaacaaagagagaaaaaagggaaaagcccatttttaaaagagaaaaaaaaaaggcaaaattttactacatacaattgaagcaagaatcttgttccattctcagcataagccattacaagtttatccctctcattctttctcgttgactttttttttccctcctcatgaatgccataaaaatatactactatataagaatcttacaagaaaatctaaaaaggaaaatagaattagttaattaatagaaattattattattatcattactaatatatatttttttttgggggggggggggggggaggataataaaataaaaaagcaaaaagtctacaaaatgaattcataaaataactcactggatcagtttcagcaggtatgccaagtcgagactgcttatttgctatcatcaaaacaacattttcacgctggttccttacattatctttctggaaaccgaacacaaattccaaaagatcaaacatgtctgcatccctttgtccagatattctaagtccagcaggaagtctagggaactggtcagtatatctaattgcagatattgctgctttaacttcagggaaaattctgataggattggttaatgatggtgcttccagaggaataatattgtatggtgtcaactctccagataatgtcacacttgacttctttatttttctcaactcctccattatgagccctccaactccactgggatcagcatccttgctaagtgactncaggacctccactaaagcacgtagagtggcaattatctttctcatttctgacgatctaagtttcaactctcccaatgtggtggagctaaaagtt

SEQ ID NO: 102560 - DNA, 328 bp, Glycine max
  Clone ID: PAT_MRT3847_63629C.1
acaaaataacaacaacaacaataacagcaaagcctttatcccattaagtgaggttaaatacattgaactcacaacgtcatttggcaaggttaaaaaaaaaaataaaaaattatttccttttttttttagtgtggtttaaataaaaatcctgggaaaatgtacccaaaaaaataaaatgtacccaaaaactattctagagaaaagcattttcaaatgaagtaagaaaggaaactgaattgcatgaagaatggcccttaagccaatgcattttatgtaccacaaatttttacttttatggtaatgaatccctttgaaaattaaaaatttt

SEQ ID NO: 102561 - DNA, 120 bp, Glycine max
  unsure (1)..(120): unsure at all n locations
  Clone ID: PAT_MRT3847_6362C.1
agatcatccaaggtcttgcngactcctcagantccataaatncactgcttcctacagtggtgaggtgattgggtgcggcagccagcagacctggcctcaccactgtaggaagcagtggnt

SEQ ID NO: 102562 - DNA, 1822 bp, Glycine max
  Clone ID: PAT_MRT3847_63630C.1
gagaaattttcataaggaaaaaggaagcagaagtgaagatcgaaacggtgaagaagcctaacagcagcaaagagcgttagagctgatcgcttgagataaggtcaatttgcagttgcacgcttcccaattcgcacacccatatcacatcacatctttctccacacgcaacgcaacctttttataatcaatcatcctcactcgcatttgaagacgcagcaatctttcccgtgaaaagggaccatggaggcaaattcaggtgccagcgaccgaatttcgagaatcgccggccacctccgcccccagagagaggatgatgtttgtttgaagcgtagcgattgccgtgcaaaaggtggggtctccggattcaaggtggccatattgggtgccgcaggaggcatagggcaacctctggcgatgttgatgaagatgaatccactcgtttcacttctccacctctacgatgttgttaacacccctggcgtcacttctgatataagtcacatggacaccggcgctgttgttcgaggatttttggggcagcagcagcttgaggatgcacttataggcatggacttggtgatcatccctgctggtgttcctcgtaaacctggaatgacaagagatgatctcttcaatataaatgctggaattgttaaaacattgtgtgaagcaattgcaaagtgctgtcctaaagccattgtcaatgtgataagcaatccagttaactccacagtcccgattgcagccgaagttttcaaaagagctggtacttacgatcccaagagacttttgggagtcactatgcttgatgttgttagagccaatacgtttgtggcagaagttctgggtgttgatccaagggatgtggatgtcccagttgttgggggacatgctggaatcacaattttacctcttctttctcagattaaacctccttgctctttcaccccaaaagaaattgagtacctgactggtcgcatacaaaacggtggaactgaagttgttgaggccaaagctggagctggttctgcaacactatcaatggcatatgctgctgttaaatttgcagatgcatgccttcatgccctgagaggagatgctggcatcattgaatgtgcatatgttgcttcacaggtgactgaactcccattctttgcatcaaaagtacgacttggccgagttggggtggaggaaattcttcctcttggtcccctgaatgattatgagagggagagtttggaaaaggccaagaaagagttagcagcaagcattgagaagggcatttctttcatcagaaaatgagtagttgatgatagtacgtcccgaaaataaatggttagattgtgctgtgtccattgtgagatcatatagatttataattagttatgtgatatgtatgaatatcgagttctatctagaaacatgtaaatgtaataattggaataccgaattccatttattattccgtctcgagttatccccgtgaagtttgagtttgagtctaaaaatcaattcagatttttgtattatctatagacgaatataaacctgcccaattgagcatgatatttaagttcagtaataaaaatgttaattatcacttcattttcacctaaaaaaaaaaaaaaaaaagaaaaaaaaaaaaaaaaaaaaaaaataaaaacaaaaaagcaaaaaaaaaaataaaaaaaaagtttacacaaaacaaaataaaaataaaaaataaaaaaaaaaaaattggggggggccttttaaaggaccccagttttctttccctgtctttacaaaaaataattttttttttggggaccccaaatttaaa

SEQ ID NO: 102563 - DNA, 841 bp, Glycine max
  Clone ID: PAT_MRT3847_63631C.1
gtggtaccaacagtagtcatagatttagtggatcaattaaaagtaaaatattccatccaattgattctagaagtatttaacaatccttaattcaccatattcccaatggaaaaccaaaccctataaaaatgatcccgtaacacaaaaagtcattgaattatgtaaagctaaccactatacctacggttatcgtaagattacagcattgattaatcaatgttatacatcaccaattaatcataagagagtacagagaatgatgcagaagcatcatttgaactgccgagttagacctaaaaagacgacaagaataggtaaaccgtattataaaacggacaatttattacaaagacaatttaaagcgagttgtccaatggaagtattaacaaccgatatgacttatttaccatttggtcattctatgttgtatttatcttcgataatggacatttataacggagaaattatggcgtataaaatagatgataaacaagaccaacgtttagttaatgatacattaaatcaaatcgatatacctgagggttgtatattacatagtgatcaaggcagcgtttatacatcttatgcttattatcaattgtgcgaagaaaaaggcattatcagaaatatgtcccgaaagggaacacctgccgataacgccccgatagaaagtttttattcctcgctaaagtctgaaactttttacatcaataatcagcttaatagctctgattatattataatagatattgtcgaaaaatacattaaaaactataataataatcgaattcaacaaaaactaggctacttatccccagtaaaatacagagaattaatagcc

SEQ ID NO: 102564 - DNA, 1276 bp, Glycine max
  Clone ID: PAT_MRT3847_63632C.1
cttgtttattttctcaagctctttcgtgttgggatttttcttcccattttactaataacccacgaaaacgcgcacgcgtccggtcatttttccctcattttctcgagaaaataaatttccaatctttacactgagattctcttctcaaaatttcttcccactttaattttttccccttctcattgtttgtttccactgatttctccatatccccgtcgtggagaacgctttgacctttcttagatttgttcttccaatccaaagtttttatctttttttcagatttttaagttggagcatggtttttagtcaactgagtctcttccaaatctttaaattgttctaaatcttttctgggttgaaaatttttgcttttttgtgtctgtgtctgtttgtgtgtggttgttggtggatatggattctaaggatattaatggttgcctcatggataaacataaacctgtggtgacatcttctttggtttgtgaaaaggttgaagatcatgtcaacggagaagatgatagtgattccaattctttgttgcctcctcggagaggtggcatgtccagaaactgtgaaaagactcgccggaaagtgcagtggaatgataggaatggaaacaagcttgctgaggtgttggaatatgagccaagtgatgtcagtgattcagaagatgaggattcagattcttgcatctgtgcaataatgtagaaaccatcttcataattgtctcaagctctgctggatcaggggacattattgtggcttgccaaccctgattacaaccaaaacatgacaacttgacaggtttgatctgtgttttgaggtgggaccagcagtccaataaaccaagacaagcagtttctcatgtctaccaagccatggatccagttcatcatactgggttttgagatgatttcatagagggactttgggatcttggatgtagatcaaaatacacatgatagaaatatgatttggacagcggagatggctttcatgcttacccccatctactgatactgtaaaagctgtgctctcaatggctttgatcataatctttctaaattaaagaggagacacaactattaaatatttccttttgtttttttggttcctcaatatatggaacaagttttcatgatttgggtattcattctcaaataattatgctgaaacagtccttgtgtactgcttgcatctttgctgttgaataaacgtttatattcagttatactttttatgtgaatctactcttcatatcaatttatgttgt

SEQ ID NO: 102565 - DNA, 327 bp, Glycine max
  unsure (1)..(327): unsure at all n locations
  Clone ID: PAT_MRT3847_63633C.1
naantgngntgagccgtacgtaagctctgaattcgnctctggaggtgnngttcagtgngggangtaangncagntnnaggnggaatcgggtctcagttctggttgtgngnagtggttcaggcttcttttggcnntggccngggttgnncngtcnctctgngnaatggcngcnacagcggnagcancagcaggcntgaagagcannnttgcncancgccgctcnntcgggnatcagcagcatntctcactnntcancnttcantcncnttctnctcntgctnccctnnnnnnnnngggggcgggnntggcngggcncatcgagcgcan

SEQ ID NO: 102566 - DNA, 311 bp, Glycine max
  Clone ID: PAT_MRT3847_63634C.1
aaacaaaaaggaatttggcatttgaaaactttcaacctgcaacaataaaggtaaattttgttttttcagcttaggggcccataaagcttgaaaggcgttttgatgtttacattttacccccgttcaacacttgatacaaaccggaacatttaaaagggttttccccccattggtttttttacaatcagccccagggggaaccccagggggggggggaactttgatcacgtccccttattcttttttgcccacgaacattgttgagacccccacggggggggccttgtggaccgtttccaccggcaccaccg

SEQ ID NO: 102567 - DNA, 672 bp, Glycine max
  unsure (1)..(672): unsure at all n locations
  Clone ID: PAT_MRT3847_63635C.1
tccggtccaatcccttattttaaagctacattaatagggttgaacttataattttttctgtaagaatctgatttattaaaataggaatacaaagacaaggattactccaacctattacctatattacaaaagcaaacataatagttaagtctgtacaaatgaatttcatagtttgcattggatttgtgtgcaccatattgagaacaaggaatcaccttcaattccctgttcgaaataaaccagagccatgatctagatttgacgagatgtatcataaacattatatccggcattttttacttgaaagttattccattcttatgaatccaaatcatcccaaatatagtcatccatgacgataaataaatatagaattcatgggacttttcattttaataaaactctttatttgatgttcatcatattttaaggttgagtttattgaggctcaggagaggaacaaattaaaccctttctgtgttctttttttataacaaaatttaaataaaaagtttctacttaaataaaattgaatttgcttgtcagtacttactaatgctgcaacgcattacatgattcggtttcttcgtaaacagttatgtacattntgtaatgtaaacccacacctttctaatggattagaataaactatccgcataaagatgatttcat

SEQ ID NO: 102568 - DNA, 916 bp, Glycine max
  Clone ID: PAT_MRT3847_63636C.1
tacggctgcgagaagacgacagaaggcggggagtgggagagaaagatgccgaagaggacaacgcacacatactcaagcgaggatgcagctccggagggtcctcactccgatctctttgtatattactgcaaacattgcggatcccatgtcctcataacagatacccaattgcagaaaatgcctaaaaggaaaaccgacaaagcttatgtactggacaagagcaaacatctggccagattgaacatgaaggaaggcgggaaagtagtgttaaaacgaggggaggggaaaatggagaaacaattccgcatgaactgtatggggtgtggactgttcgtatgctaccgggcggaacaagagttggagttatcgtctttgatatatgtccttgatggtgccctcagtactgttgctgccgaaaccaacccacaggatgcccccgttccaccctgtatatcccaccttgaaggcggactcgttcaacttgctatagaagtcgaagatcgtgctcaacgttctgcaatcaccagagtcaatgctgatgatgttcgagtcactgttgctgctcctgctgcccgtggagaggctaacaacgaactcttggaatttatgggaaaagttttgggcttgagattgagtcagatgactcttcagcgaggatggaataacaagtcaaagctgcttgtggtagaggatttgactgctagacaagtttatgagaaacttttggaggctgtgcaaccttagctttagtatccatgctgtccttccatagcaagccaggttgaatctcattttttcctgtaaaaatgactttgcggtttaaatttcagctgtaatgttatttacttggatacaaaccaggccgttggttacgttgcaattgaaaaccttactatataactcatggttggatagc

SEQ ID NO: 102569 - DNA, 468 bp, Glycine max
  Clone ID: PAT_MRT3847_63637C.1
tgtctttatttttttttttttgtgtgtttgtgtcaagttacaagactgactcaaccagatgcaactttcaaccatgaaaaatgtttacagggaatcagcactgccaggagagagcaaagaaaatcctgtgggaaactttagaatacatatggcaaccagtctacacttaacttcacgcttgaggaaaggccaaaatttctgtaaatatctccgcttgcagctggtaactgacttctttgtttataaaaaaataaaaaagccgggaccatcagtgtcaacgaacatttttcatgttgcgggggcacaaaaactccaaaaagttcaacttgttcattacgagcccagatgacaccaaacggaacattctgaacacattgtagtttctgctgccccgcaatctaagcaacgaactttaacattgatgccccggatttccatattggagttaacatatggaccagaaccagc

SEQ ID NO: 102570 - DNA, 405 bp, Glycine max
  Clone ID: PAT_MRT3847_63638C.1
ggatttcactcagttgcctcagggaggtaggaatactctagaggaagctggatggaaggtggggcgctctcctattttcgaaactgtaactgcagctgatggaactgttaagttgttgttgaagttggaggacaatagattgattgaaactgttggcattccagttatggttgataaaggcttgactcgcctcacagcatgtgtctcatcacaggttggttgccctttacgctgctctttttgtgccactggaaaaggggggttttcaaggaatcttcagagacatgaaatagttgaacaggtcttggccattgaagaggtcttcaagaatagggtgacaaatgtagtgtttatgggaatgggtgaaccaatgttaaacctgaaggcagtacttgaagcacacca

SEQ ID NO: 102571 - DNA, 401 bp, Glycine max
  Clone ID: PAT_MRT3847_63639C.1
ctcggaattcggctcgagcttagctgtgaaatttaaaaaaactcatgcctcacgaccaggatgcaacataacacttaattcggggaaagttttaaccgcgcctaacagtgttcataacatgggctataaaattaacaacctggtgaggtaattaatacccatagagcagttcaaggccagcggaataggcagacgacgcgaggcaggagatcatcaagattgaggaacgcataatatccacatgaacacaacataaccggatacatagggaatataaagggagccaacgaatacattaataaccgccctcatctgatattaactgacagctgcgacttgcttacgcataattctactgcccatacaaatagagaagccatactgacgttatcgtcatggaa

SEQ ID NO: 102572 - DNA, 485 bp, Glycine max
  unsure (1)..(485): unsure at all n locations
  Clone ID: PAT_MRT3847_6363C.1
gttagcttggatcctctagagcggccagctgtttttttttttttttttttttttttttcgcgcaactaagaagcatcatagtcttaacatngggagaggacccaacatgattattcaattatttgacctactcaacagactcagcctccaggcttacaaaaaaacataaatcccatgacaacaatatttatttccaagccacaaatatttcttttgaaaacccacttccttattggaagtgcagttcctgcttagaatccaatcaacttccctaatataactattgtttttcagccaagtcccgtttatattttcatttcaccacattccatacttacacaaactatttttctccgtttataggctcctgtttccacaaaataattcttcctgacaaccaaaataccatcttccaactctctcccaaatacaacatgcttgttgtcaaaccagtctcatctttcacatcttataaacaaccgaca

SEQ ID NO: 102573 - DNA, 856 bp, Glycine max
  Clone ID: PAT_MRT3847_63640C.1
tttccggacgtacccttgaatcattcttcactcgtttcagtcaaacctttttctctctctttctttcttcaaattcaacttgcaattccaattcctcgtgagttggttctcttttccgacgaaccatctcaaatccgccaccacataatgtaaatgtactcgaatgcgaatgtgaatgtgaatgcgcttctgtgcggtttcgattcagatccagattcatggggatttgcttcagcattgaagacccaaacaacctctccatctccgattcgaacgccaagcctaataaacctgcaggtcatgaatctggcgctccattggcttccatgaatatcaaagatctccgcgaaggtgctggatacagcaatgtggatattttcacgtacgaagagcttaggctcgcgacgaagcactttcgtcccgatttcatcttgggagaaggaggcttcggagttgtatataaaggcgtcatagaccatagcgtgaggtcgggttacatgtccactgaagtcgccattaaggaacttaatcgcgaaggatttcaaggagatagagaatggctcgcggaagttaactatttaggtcaattcagtcacccaaatctggtgaagctcattggatattcctgtgaggatgaccaccggttattggtgtatgaatacatggcaagtgggagcttggagaaacatctttttcgcagagtgggctcaacattgacttggtcaaaaagaatgaagattgctttacatgctgcaagggggctcgcttttcttcatggtgcagaaaggcctattatatatcgtgacttcaagacttcaaatatcttgctagatgccgatttcaatgcgaagctttc

SEQ ID NO: 102574 - DNA, 554 bp, Glycine max
  unsure (1)..(554): unsure at all n locations
  Clone ID: PAT_MRT3847_63641C.1
tggggaacgccattgaactttgaatcattattcactcgtttcagtcaaacctttatctctctctttctttcttcaaattcaacttgcaattccaattcctggggagttggttccattttccgacgaaccatctcaaatccaccgccacataatgtaactgtatgcgaatgcgaatgtgaacgcggtttcgatttagatccagattcatggggatttgctttagcattgaagaccaaaaccacctttccatctccgattccaacgcgaagcctaaacctgcaggtcatgaatctggcgctccattggcttccatgaacatcaaagatctccgcgaaggtgctggatacagcaatgtggatatttttacctacgaggagcttaggctcgcgacgaagcactttcggcccgatttcatcttgggagaaggaggcttcggagttgtatataaaggcgtcatagaccatagcgtgaggtcgggttacaagttcactgaagtcgccattaaggaacttaatcgcgaaggatntcaaggcgatagggaatgggctcgcgag

SEQ ID NO: 102575 - DNA, 772 bp, Glycine max
  Clone ID: PAT_MRT3847_63642C.1
atccaactactcacaaagtaatggactacctcagagatgttttcatagataatcagagtttttcaattagaacgggagtatcttcattttctgaccaggtagccaggataatacaagtgttagacagcagtttggaagccaagtccaaaaactatacagaccctgcattgggccatgttttcatgataaataatctgatgcttttacaatatgagaaatatatatatagagtagtcatttttggtgaagattggtacaaatcaaagatcaaccaaaacattgaactctatcaaagaagctcattggataagatattggactttttaaatctagacagcaatgagttgttgctagcagagtcgatgaaaaagaagctcaaattgttcaaccagcacttcaacgagatatgcaaagctcagtctgaatggcttatctttgatgagcagctaaaggaacagatgataaaatccatagaaaacaaattgttgcccggcgtatggaacctttcttggaaggattcatgatgttcttggtaaggatgcttatgacttcattaggtatggaatacagaacattcaagacctactgagcggtttgtttcttgtaatccaacatgaaggctgaagagaaggaaaggatattgaagtttgggagggtttagattacaaaaaacttgttatcacaaacataattttaaacgatttgtgcccgtgtactatatatcattgtaaattgatttatacggctaaaattagggattgtatttttttct

SEQ ID NO: 102576 - DNA, 353 bp, Glycine max
  Clone ID: PAT_MRT3847_63643C.1
gaagctcggaatccggctcttgcccttctcgccaccccaaatagaaccccgcccggccgcgcgggaacgggggacctttttgaagagaaggcgaagccccacacacggaaccaaagaaagcaagggcggccggaacaccagacggcacccgcacacacgccaaaccaaacaagcgggagccggccaaacacacaaggacgcaggacgcacaaccacagacggccacgggaccgcggaacgccgacccacaagaaccaaagccccaccagccggaaccgcccgagacagccgccaaacacacgacaaaaacacgcagcaaaccagggcccgcaagcgagaacgacaagcaacaa

SEQ ID NO: 102577 - DNA, 171 bp, Glycine max
  unsure (1)..(171): unsure at all n locations
  Clone ID: PAT_MRT3847_63644C.1
cggctcgagtgaggatgaggtcaaagagagggaaaacaagcaagaatacaacctactctgtgattggataaacaacaacttggtgacaacgtggcantagtcacatctcagatcgcttgagatcatctcctngtgtgcatgtatcacggtagttaggtagtctgcaacatg

SEQ ID NO: 102578 - DNA, 503 bp, Glycine max
  unsure (1)..(503): unsure at all n locations
  Clone ID: PAT_MRT3847_63645C.1
cttacgcgtccgaatactcaaaggatttaaaatgacagaggccgacacagatgatgttggtacgaagtgtaacttctcgttcgcattcaacaacatcaatttctcagaccgaattctcaacattgaggttatacccgaccctcatttcatccgcgcccaatcccattctctctctaccctcgctccaaatcgtaagagacgcagactctctcttatgaaaggtaactttgagtctttcacacacacacacaaacacttcaattctgcttcttaaattaaatttgctaggtctaataatatactcaaatttaccacatgtattactatattctgttgtctttgtggtatcccaaccctagacgctctccaattggtttattgaatattcaaattcgggtgtgattcttgggaattgggaagcaaagtctttactaggttacaagttacaacttattaatttggtttgataagtgcagtattcttgtccctgacanattcaaatg

SEQ ID NO: 102579 - DNA, 163 bp, Glycine max
  Clone ID: PAT_MRT3847_63646C.1
cggacgctcaaccattgtgtcaaaagccttatctgactgtacttgctgtgtctctaagagcctcatccttatctgtctcaatttgcatgaactaactgctcttataacgtggagcttgatttctatcgagagagcacttagttttactatttcggactgactg

SEQ ID NO: 102580 - DNA, 2022 bp, Glycine max
  Clone ID: PAT_MRT3847_63647C.1
ccacgcgtcagtaaattcctggtaactcgtaagcctctccctacacttgcacttcaggtttctccttccaacttccataatttgtctcttcacacaagcacaagaagatgagttttgaggagaaacctgtatcagttggaccatggggtgggaatggaggataccattgggatgatggtgtatattcaacggttaggcaattggtgatagttcatggggaaggaattgactccatccagattgaatatgacaagcaagggagttctatctggtcattgaagtatggtggaagtggagggtataaaattgacaagatcaagcttgattacccagatgagttcctaacatcaattgatggatactatggtagcttaagtcaatggggaccaatcttcattcggtcactaagttttgagagtaacaagaaactctatggaccatttggagttgaacaagggacatatttttcgttgccaatgactggtggcaagattattgggttccatggcaggtacggttggcacctcgatgccattggagtcaatgtgaagtcctctcagcaacaaaagccttccaaagctttgtctttttcacagaactacatgactaacaccaatgacaatgctagttattctgtaatacaaggaagtgttggccaaggctatgatattgttcttgctttaaaacagaaagatgattttggaaaatctccaaccgtcaagatttctagcttcaaagaaccaaacaatgttgaaccaaaagaaaaggtagttttcgtggagaaggtaccaccaatggttgaaggtgtagtgacatatgggccttggggtggcacaggtggatatgtgtttgatgatggtccctacacaggagttaggcaaattgacatgtcccgcaatgttggaattgtctggattagagctttgtatgatctggatggagagcctgtatggggatacaaacatggtggggcaggaggattcaaacatgaaaagataatctttgattttccatatgaagttctcacacatatatctggctactatggatctctgatgtacatggggccagctgttataaggtcacttactttccacaccaccaaaaggtcctatggaccatttggagatgaatatggaacttatttcacaacaaagctgagagaagggaaggttgttggtattcatggtagattttgcttatttctagattctctcggtgtgcatgcaatagaaggaaaagtaattgtgccagtggcaacatctccttccatggaaatcatctcaagagaaccaagtatttcggaaatagacaatcctcaatggctagttgttgccaaaccagccccagttgaacaggcttcacgttgtgtgattaaagaaccagctccatgtggaccaggtccatggggtggggatggaggtagaccctgggatgatggagtcttttcagggattaagcagatttatttgacaaaagcacctgaaggcatttgctcgattcaaattgagtacgatagatataagcaatctgtatggtctgtaaagcatggtggtaatggaggaaataccatgcatcggataaaactggagtacccaaatgaggttctcacttgcatatctggctattatggttcagtcactgctgatgaacaacctataatcataaagtcactcacattccatactagtcgaggacagtatggtccttttggtgatgaagtagggaaatacttcacttcaaccacaacagagggcaaggtggtcggtttgcatgggaggagtagcatgtatttggatgccattggggtccatatgcaacattggctaggaggaattcagaaaacttcaaagttatcctttttcaagctattttgatttgtgaagaacaataatgaatgtgcagagtgctgagatgatatagcatgattacttgtatactatctaaataatgtttggtgaatgttctaaccaacttaagatttgttacacaatgtgaataatgttggtgttaatttctttc

SEQ ID NO: 102581 - DNA, 528 bp, Glycine max
  Clone ID: PAT_MRT3847_63648C.1
gcccagggctatggatccttgggaatgatgacatccgagcttatgacccccgatggtctgactatggagtctgaggccgcacacggcactgtcactagacactacaggcaataccagaaaggccaggagacgtccaccaaccccgtcgcctccatctttgcttggacaagaggtcttgccttccgagccaaacttgacgacacgcccgctttggccgaattcgccaaggatctggaggccgcttgtgtcgaggtcattgacaaggacagcgtgatgacgaaggatctcgctttggccatgaagggaaagaacatgcagagaggggactgggtcaccaccgacgagtacatgaaggcggtcaacaacaaactcatcgagaagatcaaggcgaggacatctgcatagtgttggctcgacatatcccctctgcgccctgaacggctggccctgaggaaccggggcttagctaagcctgtgcatagtgcacaaaaggtgcaagtgcgtgagtatgcatatcgtttttggttg

SEQ ID NO: 102582 - DNA, 203 bp, Glycine max
  Clone ID: PAT_MRT3847_63649C.1
gcgaacagcagactaggaaggcgggcgccttaggaggagggtgttggcgcgccagaacaattatatcattaagaaatgcaagctctttacccctaacgaaacctcttgtgaacgctataatctcatgcacattaggaatcagtaaacgttaagaaattgcatttcttatagaaaaaaatgttccgactcttaaaaaagagggt

SEQ ID NO: 102583 - DNA, 402 bp, Glycine max
  Clone ID: PAT_MRT3847_6364C.1
cgcacgcgtgcgcccattcttttctttgacacgaggggcatcttgcaaagaccattgctaaatgtcgcttaaacgcaagccggcttcacacacctcctcagaacatgatgactacagagattgagagagagaaagaagtgtccaataaagggcagccaggactgactactcaacacagtctcatgagcgacagggagctccatcgtcaaccacccccgagacgcagatggacttctgctaccgaaagctgggaatggtgtggaggatcagtatcactacccataaccggagtggaagaacctatgctatgacaggtgcagtgggtgactcccagacaccgtgcataggaaaggatgcatagtcgcggggtaggactagcaccttgctgaggtggctggcact

SEQ ID NO: 102584 - DNA, 414 bp, Glycine max
  Clone ID: PAT_MRT3847_63650C.1
ggatgctaaataggtaattcgagcaaggcgcaaccccaaagagggtgaccacaaccttgattcaatccattcccctttcttctccaacaaattagggtttcccttttcccaacattgccacgcattccctaattactctttctttcttttcttttccacttaaatttaatttcttgatatggaaggcggcgggtccactccggcggcgccgattccgaacgcgaacgcgccgccgccgtttctgagcaagacctacgacatggtggaggacccttccaccgacgcgatcgtgtcgtggagcgcaacgaacaacagcttcatcgtgtgggacccacccgagttcgccagagaccttttgcccaaatacttcaaacacaacaacttctccagcttcgttagacagttaaacactta

SEQ ID NO: 102585 - DNA, 346 bp, Glycine max
  Clone ID: PAT_MRT3847_63651C.1
cctgaattgcagaatcatctacaacatcaactgcttaaggtaagtgtcaatcttgcttgaatccctgcgcaggcagtggagcaggttataaaaagcaagattgacacttaccttaagctcctgaattgcagaatcatctacaacaacaactgctaagcccacattcatcctatccatttctgagatggttcttaatgatccattccctggcaaacttctctgagctttatagctttgtaatgcatgcttggctctaatgggtttcatcttaaataaaaacagactctgtagcgatgtcaaaaaaaaaaaaaaaacaaaaaaaaaaaaaaaaaaaaacaaacaaaaa

SEQ ID NO: 102586 - DNA, 1227 bp, Glycine max
  Clone ID: PAT_MRT3847_63652C.1
ttgtttggacgatgggtgctgcagatcatatgaggataaaatacatggtattttgtctaaagggttgaatgatagagcccaattcattcaagttacatgggagaaatacacattgccagtggagtgtcgatgatggcttgtcggtacttgataaagtgcccttgttcgtaggattttcggtgagttctttggagaaagcatttaggatggttgatattggccctaatgctgaaagtaaagaagaggctcttgaatttcgaaagttttggggagaaaaagcagagcttcccacgcgtccgcccacgcgtccggcagaaagcacggtgtgggaaagtgaacaatgggcaaggcatcttgttttaaaaagaataattgatcatgtacttagtcggcatctttctctatccaaggaaaatattgtagttgttgtggatcaacttgatttctctttgcttcacggagctggagatcctatatcatactctggaagtttgcttggggcatttgatgttttatcaaagcgtttgcgtcttattgaagacctccctttgaaggtgtctagtgtacagcctttagactctgctttcaggtttacatcagtcttccctcctgaacctcatcttctagcaaatgaaaaaaatgaatctctcagactgaataagttagttccgtcatgcattcaaccactggaagttatgattcagctggaaggttctgggaactggccaatggatgaaatcgcaattgaaaaaacaaaatctagtttccttgtccaaattggagtgagtcttcaaaagatgtgggggatgacatgtactgccactgaggataatgtggatgtgttggtgtctggatatgcatttcgtctaaaaattttgcatgagaggggtcttagtttgctcaacaaggaaattgggaatgatcaagctaagcggattccttctgctgacaagaaactttttatccgaagtcagcatgctaacatgatcaatgggttacaaagtcgttatgcaatatttggaccagtagttagacttgcaaaacgatgggctgcttcacatctattttcatcctgcttggtagaggaggctgttgagctattggttgcatatctttttcttaatcctttgccatatgatgttccctgctcacggatcactgggtttttgaggttcctgcggttactctcgcactatgattggactttctcttccctgatcgttgaca

SEQ ID NO: 102587 - DNA, 279 bp, Glycine max
  unsure (1)..(279): unsure at all n locations
  Clone ID: PAT_MRT3847_63653C.1
ttccgctcgacgttaatccatcatcacttcacttcactaatacatcatggcagacgcgtcncagaacaagtatgacagctctgacgttgacgtncaggatcgtcgtgtttttcactttctcggtaagacaaggatgaagaagataagcctcatcttcaggaggaggtcatcgctaccgagtttcaaaaagtcactgtctcagattaaggagagaacaagtacagtctcttagaaaagcttcactgatctgacagcagctctagctcttcaagtgaggag

SEQ ID NO: 102588 - DNA, 637 bp, Glycine max
  unsure (1)..(637): unsure at all n locations
  Clone ID: PAT_MRT3847_63654C.1
tacggctgcgagaagacgacagaaggggaaagtgcttgacgcaaaggcgatgaagcaacaaaagcaattgttaaggttgtaacttgtatcatcattcatttcatctgtgttgtgttgtacgtgtgatttccattgccgccaccgattacccaccaactgatatacataacctcttcacctttccctccttccctaatttatcactaaaaaaacaaacaaataaaaaaaaagtccactaagttggggcacgtcacccatctcgcccttcccctcgctcatctcaaatccatgcttcggaattagggtttccattcggatttcgtaagtctggtgcccaatttcgtgactccgagcgacgtaaaaggggaagggaaagggatgaggatttggggatcggagatcgtgttcgccatattgctctgtgggaccctttcatgcaccgctcaagctcatcacatcactgccagcacctgcccggctcgctccatcctcgatttcgtgttagggttttcagatttcacatgccaacttcccaattctcttggatccattgccgtcaccgagggagatgaggtttctttgcagaaggttctgaatatggttcacangaacaatcatgagcacgtggctgtgctct

SEQ ID NO: 102589 - DNA, 1221 bp, Glycine max
  Clone ID: PAT_MRT3847_63656C.1
ttcttttttttattgtccatcaagagagatatgtccaccttgggggttatcactaaaagcctagatagctctctcccttataggtcccttaaataggggcacggagcaaacacgctgcgtgccatctttcacactgccatgcataagtatcatatacccttatgcttatattttgggaatattggcatactatgttgcgcctttcacatatgcatcagcaatagtgagctcaagctccgaagaggtgaaaggaatcatcacgggtcaaaggcatgatctggaaggacgaaggcttgccttagaaaagaaatttgtcccaacagttaaagcgagactgaagggaatatgtgggccatcatcgataagtgcaaagagaaatctagcggcgactcacgagcaaaggatgagtacgatatcagtagaaagggaagcaagggaaagggtaattgattcattgcaccaagaggcaacaatgtggacggaccgatttgctcttactttgaacaggagtcaagaacttccccgattgctagccaaggccaaagcaatggcggacacctactccgcccccaagaagatccacggacttctcagctattgtcagcatatgatagacttaatggaccatatgattagaaaccgctaggaagtttgtattgtcgctcagatcttgactagttataactttttgaaaaaaatgagtttatcccacgtttttactccaaaaatcagtgtgaatcaagtcactcccacattttatctctagcatgcattgtatgttggtctcgtcctttgtcacgggaagccggaaggtccatatcaccttcttaattgtacacatggggcactgcgcccccaaatgcgcaagtaagaagagataattttccgggctctcgtgtccgtaaaatgcattcatatcatgcatcgcataagcatctcttcataacatcataatgaacatatcgttcctgcatttgtccgttatcatattccagcctcacattttgcatgagtcatggcatcatcatgcatatgcgttcaacaaactttttgatctgcaaaattgcataccatttgttttcatgtttgctcatccttgcgttttcctctacaaaacaaaaacaaaaaaagggaagcgtgaaacttcacactaccttcttagttgcatgtgttaggcaccatgagccaaccatgttgggatcataaacccatttctgccat

SEQ ID NO: 102590 - DNA, 776 bp, Glycine max
  Clone ID: PAT_MRT3847_63657C.1
ggtacaggctcttcaataattgcagtataccctagctagcccacgaagaaactttactttgttatgtcgccccctctcctctgttgtcttacgacgttagccatagaagtctcaaaagaagaagctcgagtggcacccgcaccggcagtagtggcgatgctgccatcccctagcatgggccacctaatcccaatgatcgagttcacaaagcgagtggtgtgctaccataacctggcggtgagcttcatgatccccagtgacgacccaccttcaaaagcccaagaggcagttctgaaggcccttccggactccatttcccacaccttccccaaacatgagtctgcatcaccgaagggaggaagagatgttggggagcagtgagagctcaccctactcccccaaatccatcaagcacactagatctctcccccagatccatcaactacctcctccgcgagcaacgcctcttgttcatcctcatcgactccaccttcttcatcatccagcccactctctcttgcatgggcccacccgagccggtccacacattcctccctcaaatcgggcttgctcgcttcagcggcacaaggctcacacgggccgcgttcctatctggattggcggcaggaggcaacgaatcatcgtcaccgacggctcgagcttcatcgagagccacctcattgacaaactcatcgctcgcggtgatgacatcatcgtgattgacaatgtcttcacgggaagaaaagagagcctgatgcatctgttcgggaacccta

SEQ ID NO: 102591 - DNA, 564 bp, Glycine max
  unsure (1)..(564): unsure at all n locations
  Clone ID: PAT_MRT3847_63658C.1
acgagaagggaaggaagaaagaataactatattattatctttattgtaatctatctttttattataattataattataattattgttgttattattccttaaatataaattcaccatatctctccaacaattccgtttctagattcaaagacaanagagtcaataattaacccctttttaatcgaaactctccaaaaccctcatcaccacctcaccattttaaagataaagctaaagatccagaagtttttaaataatactaatcagctacattttaaatttcatcatttcccttcttcctatctccgactaactacacaccatattactcaacactacaacatacaaacaataattcaagataataacttaaatgaccagagaagtgaaattctaattaggaagttacctaaaagcaaataccctatagttcgattatccgaagtacctactaagcagttagaggatgatagatctgagcaaagagagatgggtattagacctagacctagtgaaaacagtttgaataatgctgacgtagttgggaatagaataacccctgta

SEQ ID NO: 102592 - DNA, 600 bp, Glycine max
  unsure (1)..(600): unsure at all n locations
  Clone ID: PAT_MRT3847_63659C.1
cactgattttctttctcttagaggatatctcaaacttgattactagttatcaaggagattgcatacaaaggagcttttttgtagaatattccagtctttgttgttgagtgttggagttggagcattccgatagtaagagcattccccaagggcgttaggaatcagaatcaaacaattccactcatcgttagcttaaacctgtgcagcgtcgacacagctgctcatttatctctcgctggcacgcacgcacgcacccaaatcaacttaactagggcttgcctttctcatttctcactgcacccatcgtttcactctcccaactagcttcaatggactacagctctgaagaagattctgatatcagtgaatctgagattgaagagtacgcagagaaaccatatgaacagttaagggctgggaaatacaaggttaaaaatttgaatggaactcttagatgtccttactgtgctgngaagaaaaaacaagaattcaaatataaggatttattgcaacatgcatcaggagttggtaagggttctgctaacagaagtgcacaacanaaggcanaccaccttgctctagcaaagtatttggagaccg

SEQ ID NO: 102593 - DNA, 653 bp, Glycine max
  unsure (1)..(653): unsure at all n locations
  Clone ID: PAT_MRT3847_6365C.1
gaagaggaagataatggaatagaaactttgaggagtggggaggtagaacggcaaaaggaggagagtggttgcatggaagaagaaagtattgggttgggaaaaagtttggttgtagaaaaggagggagaaattgaatgcgaggaggagcaagaggaaggtgaagaaattgaagctttgaggaatgaggaggtggaagacaaagagggtgtgggaacaagttcggttgcggagaattgtttgatgaaagaggaaggaggggattatgaaagagcggaaggagatgggaagaagaaggacttgttggagaagatggtggaggacaatcagaagatggtggagatgatgacacaactgtttcagaggaatgagatgcagactacacttctcacctctctctcgcaaagggtggaacagcttgagagagccttggcttgtgagaagttgaggaggaagaaaaagagaaaggctgatgccaaaattaaacgaaataatcctaaaaatggcttcatctgacttttgccatactcaaaaggatcctccatctttgtgattttgatttttcttttcttttcttgaaactagttntgatgttgatgtcggttntttttgtgattaatcaatgtgatgctatccaatgaagtgaattgctttta

SEQ ID NO: 102594 - DNA, 204 bp, Glycine max
  Clone ID: PAT_MRT3847_63660C.1
ggctcgagcactatcatacatgaggcatacacattttctaggtcggaccttgatgggggccctggggccatacggctaatggtgatgactcaatgcattgcttatcattgggcctatatgggaagctattgaccttgtggcgctagtgtcttcttgcctgacattgcctcgatctggtgcgaggggttgaggtcgaacaacgac

SEQ ID NO: 102595 - DNA, 330 bp, Glycine max
  Clone ID: PAT_MRT3847_63661C.1
ggcaggggaaatcgtttttttccaaaactaccccccactggaaacaggggagaaacaggcgggggttatttggattaagcccatttttcatggctaaaactaaaagggggttttaaatttttacccattggaaatggccctttttaaactaagggggggtaatgggggggaaaaaaaagggaatagacattctaaactgaattaggctttagcgggactgggggtaaaaaaccttttaaaggaatacttttgtgggggggggagccttgatgggaacataacaaaaaacttgattttaaaggtttcttttttgcccgggtccttttaaaa

SEQ ID NO: 102596 - DNA, 1315 bp, Glycine max
  Clone ID: PAT_MRT3847_63662C.1
gcgtggtttgtatatcctcgaaaatgatgaatgaagcggctggtgaaccctaattagttgtcggtgtttgttggaagagctcatctctgttttcttcgtcatcttccccaaccagagatgcgccccacaacacatacttactaaagctttcaactttccaacaccctttcagatgttagccaaggcccataacaaaggggatggatctaagtccctggctaagatactggcaaaatggaaagaatataatgcccagattgattccagcagtgatgcggataagccaattcgcaaagttcctgccaaaggatcgaagaaggggtgcatgaaaggtaaaggggggccagagaactcacggtgtaactaccgaggtgtcaggcaaaggacttggggaaagtgggttgctgaaattcgagagccaaacagaggcaataggctttggctaggtactttccccactgccattggagctgcccttgcatatgatgaagcggccagggcaatgtacggttcctgtgcccgtctcaactttcccaatgtttcagtttccagtttctctgaagaatcttccaaagattctccgtctgcgaatcattgtggttcctcaatggcagtgtctgcaaacgagtccatgatttcacctagtaactctggggtagatgcagaagaggatgttgatatggagcccatttccttatccttaagtgtaaagcatgagaatggggaaggtgaatcggggataagttcatcccctccttcttcctcatgatgtacattgggacatggctaaattttttagcacatgtacttgttaatggttagcttagatttgatcacatttggtcctggagattagctgttgtaaaactaaaatgaactccgttgcaaaaatggtcaattcttttggccgcctaatttgcatggatatctgtctatttttaactcgttagggtgtgaatcatacttacctttgtcatgttacatgctctcttccctcacctctacatctccaaacccatttgttattgtctctatcttgcccggtttattttactgtgagaatgtggttttcttaattttaagagcttacatttctcatgtaagtttctatttacataacacttgacttgccatgcatgattgggttataggggatggaagcttttggaaataggaatagtctataggaaatctccatgggtctctagaggaacaaattaggaagtatttcagcacgtttggaaccgcgatgtgaactcatggtaactttaaagctagcctctggtgtggtgtagtaactttctgtaatcatgtt

SEQ ID NO: 102597 - DNA, 319 bp, Glycine max
  Clone ID: PAT_MRT3847_63663C.1
agtacaagaacaaccagttcacgaacttgtccgacattgtcgacttaaagtacatactctacatcgcccacttagacttctacgatgaagagctatctggctatagcgacaaagccttaactctcacgcgtaaagaatgcgggaacaaagggcttgttcaaccgaatacccccaggcatgaccatctgcccttggtcgacgtcgacaagctccagccgtacgagttaggctacttggaggaaatatagctccttcagcgactaaccgacgatggatactgacgctcaaccgattatcacgtttgaattcgatctcaaca

SEQ ID NO: 102598 - DNA, 457 bp, Glycine max
  Clone ID: PAT_MRT3847_63664C.1
aaaaactgcatgatgtatctggtgaaccaatctggatggtgccattctcagtggcttttgaaccataggaaccggatgaagagcccatcaaacatatgatctacagggaagcgttagcactggattctgaatctgcttaaagccgagtactcaaggtcttggaccatgcttataaggacctgtaacaatctgttcataatttttttattaattaagttccctgcttacaagcatgacacgatcaagttgaaggaacattcactcttgatgtcaatcaatctcccttaggtaattgattaaatctgtgtgactaagtaggagcagattactgctttatgagcgcccttttgttgaatagggccatgtaactatattaagtcacatatatactgtgtagccctgatatacttattatgtatacaaagctggatgctctttcatactgtacatgtattca

SEQ ID NO: 102599 - DNA, 256 bp, Glycine max
  Clone ID: PAT_MRT3847_63665C.1
tttagctcgtagtgcggctcgagctgttgtgggggtgagagattggggtgggtgtcatcagagagatggtggcacgcattgctgtttcttctccaaagtcgacactgttgtagaaccccatcgtgttgtgtgagtcaagttcaagttgggttggggggtcgttgaagggtctttgcttcagtctgaaacgaaggcaacagagaggagaattgaccaatttggttgttgcttcatccacctcaggtgttagaaatag

SEQ ID NO: 102600 - DNA, 189 bp, Glycine max
  Clone ID: PAT_MRT3847_63666C.1
ccggctgactgtacatttaatcatagttagggttcaattctcaatcttggtccttgcagttcccaattcccaataacgttaacctaaatccccgggttcctccggaccaaccaaaaggatttcaccatcggaaaccgaaccgttcggttaagggaattaattaaccagattgaaccaattcaagccccc

SEQ ID NO: 102601 - DNA, 478 bp, Glycine max
  Clone ID: PAT_MRT3847_63667C.1
gctatggactgcttttaatgcttcctttgctgatattttccacatggctgtcaaagtaaagattggggaaatattccgtaagtttgttagcagagcagacacatttctttgatgctgctagatggcaccgttgcttgaaatgcaatttcacccgaaaaagcagattatttggctgcataatatgtgggacgcaaactactggtagagcagcttcatagttgttgcctatcagctgtattctgttagctattgcttttgccttggtgcagtttattctggtagccattggtgatgttggcttgctgctgctgtcatgtttcgccttgtattttgatgatgattatgattatgattgcaaactgtaaaatttttgtaaaacctcgctctatttttagatattatgttgatgtccaacattagaacactgctcttttaagaactcggaaatgaaaatggcttgatcattttatctacttgt

SEQ ID NO: 102602 - DNA, 445 bp, Glycine max
  Clone ID: PAT_MRT3847_63668C.1
aattcgagcgggcgctttttttttttttttttttttttttttttggcacaagaataaattatatttctttgtagattatttaagtgatctcatgaattattttttaaaaatattatattgaacgtgagtatttttatgattgcttaaatttggtacttaaaattatttaaaaagtaaaatggaaattaaaattatgttgctcctattagtatttaagttgataacttgtaaagaaaataaaaaatatgatactaatttttatgataaaaaattaagattcattttcaaattaattagaaatagacaattaacacaacaaatattttcaaataatgataatatataaactgaaaagcttatgcattaagaatgcaaatcttcataagttagatatttcaataaattatatatttatttttctcttctatcactattcttaaaatat

SEQ ID NO: 102603 - DNA, 541 bp, Glycine max
  Clone ID: PAT_MRT3847_63669C.1
gcacgaggctatgttggactcacattgctaaggctaattctcttttcctatgactacatcagagaccctattctagatccatactctgataatggtgagttcaacagaatgaggtcaagtgggctatccaatttatggtatcactggtgcagcagttcccatcattatggttttagttgcaactgttgtccacattcaacaaagaagcaacattcagaaatcattctgacgctaaactccagcatttcaattgtgacttgtaaactatttctataatgttataattcccccccctcctgcagccatgaaggaaaccccctatcttgatgtttttccctgtgtaaaaatggcattgaccatctgaatcagtgagaattagatatgaatttggaaaattaattttacattactgttgcaattaatagttttaatttctaatgtcagtcactttagcagttagtttgtttcctgtaatttccgttaattcagttactttcagtgactgctagtggaactcattatatactggtatggtatataa

SEQ ID NO: 102604 - DNA, 528 bp, Glycine max
  Clone ID: PAT_MRT3847_6366C.1
aattcggctcgaggtagatctatgctacacagtggtagtgcccttattttctttgtcctaatctttaagatcctcagatgtcaaacaaaaaaaaaccaacaacctcttcctttgtgtttgtgagctcaagttgaagtttttagttcgaagacttttactctcttcactgttgttgtgttgtgcttcttctgggaaggttctggggttcaacggattcccccccccccccccaagacaagaccaacaagtttctaaatttagatagtgtcgagagatatcattgggattggataagtttctagaaatggaaagttccaagaacaatagagtggagaagagagggtacgagctagttgaggagggtgatgatgcacaacaccatcttacacaatcaaagaaaccaaaactacccgatttagctagtgtgagggtggaattcttaaaaatgtttagagtgaagaagtggagctcgctttggcaaaactcggccatgctaaactggctgaaagatctccaccaccaagatta

SEQ ID NO: 102605 - DNA, 162 bp, Glycine max
  unsure (1)..(162): unsure at all n locations
  Clone ID: PAT_MRT3847_63670C.1
tcggcttgctgaacacagatgaagctcttgcaatttacatctggcctcaactcaacagacatttttctttcatctactgtgttgaggatctnntgtntcaaaataagcttgaggaatgtgaatcttgttttgagaaactggatctagattttgaacccatta

SEQ ID NO: 102606 - DNA, 385 bp, Glycine max
  Clone ID: PAT_MRT3847_63671C.1
cccacgcgtccgattttttcctgagcagaatatacattcgtgcacaactgcacttcctggcaattattctgctttatcaaaaaataaagacactttagtggattcaagttgacctacgctttacaacccacgaaatagagataatattgtgttaactaaattcaataaactggccgcacttgcccactcttgccaactgggaaaaccgtgaaagagccgcgcttactcgccttgtaccacatccgcccatccccagttgcgaaagtagcgaagcatgtctaaaacgctctaccttcccaacatttgcgcagtttgcacgacgtgagggacacactctgcagcgcctctattaagcgcttctttcgcggtggttcctcgctttctc

SEQ ID NO: 102607 - DNA, 223 bp, Glycine max
  Clone ID: PAT_MRT3847_63672C.1
actgcaaaccaatcaacgacatgtttttataaaacttgggggcccacatgaacaacaacacgtgccgcatatggctaagctaccttcggaagtgcggaaatatagaacccaactggctgaacaagacatattagcaatcccagcaggttatacagttgcggacaacgctacctcaaatctgaattactttgctattggcattaatgcacaatcaaccaaaaaa

SEQ ID NO: 102608 - DNA, 464 bp, Glycine max
  Clone ID: PAT_MRT3847_63673C.1
cttcaaacacataggttccatgtgtaactatatcttggcacatactaaagtacttcattgtcattaaccaaaattttcccaaaaaaaacttccttgaaaaaaaatttggaacccgaaccatatgggatccctatttttcttgcgatacatatgtgaccactatgattagaggaaaaagatgaaaccaaggggtctttattccccaccccactctaacactaattatatattggcaatactaataaataattaatcttcaaaaccaacttttttacctatgaggtttctgacactgcgcccattttttcctttgagagagcttccgaccccttcatgcacggacagaggaaaaccccttgttctagccaaaaactcatggggggggaacattatattcctggacccatgggtggggggcatcaccgccccgggcgggattaaagttcccctccctcccccccccc

SEQ ID NO: 102609 - DNA, 291 bp, Glycine max
  Clone ID: PAT_MRT3847_63674C.1
cttaatttcaggacacttcgaagctaccttttccaattgttgttgttcttccctttttgtgctttttgattcagagatttttggttttcgttttttttttttcacatggagaaagttcggtgtctttaagtcgaataacttgttgggacatatctgatttggcgctttttcttttggtgcttgcctcatgggaaacagtgaggtagagataatctcgtaaatctggaagttcctcctcttcacctgcaccaactgagcataccataccaaccttatttttacgtttatcct

SEQ ID NO: 102610 - DNA, 968 bp, Glycine max
  Clone ID: PAT_MRT3847_63675C.1
tgagctatggagctgcgctgtttggagctatgtagattaggcagaaggcaaagcaaatgacctttctaactaatctttagtcaatcctctaataatctccgtttcaacaccaaactcagtcttaaacagcaagcgaaagctgaatcaagccttccaagttccaccaccaccgtcccaaccctcttcttcttcttcttcttcttcttcttaatcgaaacaacctcatccatactaaggaaacaaacgacagagactgcaaccatgtacgttgatcacgcgttttcgatttcggacgaggatgtcatgatgggaacctcgtacaccgtcaacaacaaaccccccatcaaggagatcgccctcgccgtttccctcctcgtttgcggcgtcctcggcatcgtcatcggttccctcatggcctacaaccatgtcggcggcgacactgctcacgggatcttctttgcaattctgggatttatcttgttcataccgggtttctactacacgcggattgcgtattatgcttacaaaggatacaaagggttctctttctctaacataccacccgtgtagctctactagctagccatgtctcatactttaggttcacatagcttcctcttgtacagatcttccatggttgtactctatgttctttctttcttgtgttgtgttttttgttttgtctgactaatgatgagtgtttagattgtaatttgtgattgctatatatcatatactggcactttctatggttgcaattttttttttttttaaaaagtgtcaattatccttctctgatccatttttttttttttgccctccattgatgaatgggaatagactggaggatacacataaggagacacgaaaacttagacagagccctaacgcccgctccattaccttacttcccttactttatgggcacgttcgacgagtttccccgttaagctttaaatcgggggggg

SEQ ID NO: 102611 - DNA, 649 bp, Glycine max
  Clone ID: PAT_MRT3847_63676C.1
acggctgcgagaagacgacagaagggggagctagatagatatagattaggcagaacgcaaacgaatgacctttctaactaatctacagtccatcctgtaataatctccgtttcaacaccaaacaccaagcgaaacctgaattaagcctcttcttcttcatcgaatcgaaacaacctcgtccgtgctaaggaaactcaacgacagagactgcaacaatgtacgtagatcacgcgttctcgatttcggacgaggatatcatgatgggaacctcgtacaccgtcaacaacaaaccccccatcaaggagattgccctcgccgtttccctcctcgtttgcggcgtcctcggcatcgtcatcggttctctcatggcctacaaccacgtcggcggcgacactgctcacggtaacaacaaaaaaaaagcgatttttttttctattctgaagaaaaaaaatgttaattttcagatttgagagcactgattgcaactgggtagctggggaattagaaattgctgctgaagtttaaaactttttggtagtatgtggtattttgaaaagggaaaagtttttgggctttttctttttgatttcttttacccattttgttgattttggtttttctttgaatggttgatagggatcttctttgc

SEQ ID NO: 102612 - DNA, 675 bp, Glycine max
  Clone ID: PAT_MRT3847_63677C.1
ccatcaataaaactttcatagtgattatgataaataaaaaattgcatggagcataaattccatccgaagatattaaagcatatgatcttcaccccaaatgaataaagatgcatccaaattcccaagaaactattttgctgagacctaaatggaatggaatgaatggcatgatgaaatgtacaaaaatatacatcctgtgtaaacttttaagattcttgttgtggggaaacgagtagaatatcccagtcccaaagtcgagctgcaatgttgtcaatgccttgcacgattaaaagacacagcagaaggcgcacatagccagttggtttgtaggtccatcgagtaatgtagtatacgtattatctcaactgttaagtatgttactatcatttcctcaaaaaaaaaaaaaaacaaagtatgttactatcgtgtagtatttcttttgtgaactactacatcatgatatcctcttgaacaccaatttggagggagtgacaagtattccatcttaagttacatgataatgataagagaccaacttggttagcagataccatatcttataagcacgtaattagaggtttaattcctacatagtcgcttaaatggtaagagagttttactatgccaaaagttcgccaaccggacgcgtgggtcgacccgggaatccggaccggt

SEQ ID NO: 102613 - DNA, 4462 bp, Glycine max
  Clone ID: PAT_MRT3847_63678C.1
agctcggaattcggctcgagcttacgtttccacactaaagttagatatatgattttattatttctccattttatgcccattggtgttccaagagtaccctttcgaagccctggggaagaagatgcatcttgggttgatatatacaatcgactttatcgagaaagattactttttttaggtcaagaggttgatagtgaaatatcgaatcaactaattagtcttatggtatatcttagtatagaagaagagaataaagatttgtatctgtttataaattctccgggggggtgggtaatacccggaatagctatttatgatactatgcaatttgtacaaccagatgtacagacagtatgtatgggattagccgcttcaatgggatcctttcttttggcaggaggagaaattaccaaacgtttagcattccctcacgctagggtaatgatccaccaacccgctagttctttttatgaggcacaaacgggagaatttatcctggaaggaaaagaaacagatttattctatacccgataagtaacaatacgcaatggtggggagacgagaggggtttacaattttctctatgaatatttaaataagtaaatgcagacatactcacttatcaccccaatgacccattcgtaacaactttactttatttagtattcctttttttatatttagtattcctaaaaaaaaaatgcaatataataaaaataaatcatttttaacacgataagctaattcttacgtttccacactaaagttagatatatgattttattatttctccattttatgcccattggtgttccaagagtaccctttcgaagccctggggaagaagatgcatcttgggttgatatatagctgcgagtagagacaatagtaggtcatatgggatttccccgttttctcccccgatcgagatatcctctctttcacccccaaaagaagaatgattgaatcataaaaaatttggagcgtgaagtgtaatgaaataaaattctatcgatttttttatttttagaggtggtatccagattattactcgaaattatgaataatttatggttggcttgattgaaccaataaaataaagtacccaggctctgtttagaaaaaaccaattggtaatatatctacgatcaccacttctatcatatccgtatattttacagaaaatattaaataagaaattcagaaaaggaagaagttttaacaaaaatacgtagtattgtaatatttgtcctatatgtgcaaatcaaaatcgggcagatctttactcagagtagaaaagaaacctaaaagaattgaaaaagtccattcagaaacaagaaaattacattgtgattgggcttcgatctcaatgaaagcaatacatcaatgagaagatagttcaataaattgagtatgtatattattctatttttctttaaaagttcgaagaagtccattatgaaaagagaaagaggtttaaaattgacacattgattccttttttgcttatatgatttttggtgaactgtatgcatcaaaaggtgcatgtacggctcttaaggaaaaaaatggaatcctaatcaatcgactttatcgagaaagattactttttttaggtcaagaggttgatagtgaaatatcgaatcaactaattagtcttatggtatatcttagtatagaagaagagataaagatttgtatctgtttataaattctccgggggggtgggtaatacccggaatagctatttatgatactatgcaatttgtacaaccagatgtacagacagtatgtatgggattagccgcttcaatgggatcctttcttttggcaggaggagaaattaccaaacgtttagcattccctcacgcttggcgccaatgattcttttatttgagaatatatataaagactataccttcgccataaaaacagttaataaaaacattttataagtaataatagcatggtattgtgaattccatatgcaaatttttgttttttaaatcattcgattatatatagaaagagtagtatgaaaaagagggtatttacaattttatctgatctatcaggaacctagtttaattttagtgtcacagactttttgttttttttttcataccagaaaacttttaacaatttttattttaattagaagaaaacataacatatgaaaaaaaaagaaactttcggattgttgaataacaaaatgatataaaaaacaacggaaccatcgtagtatttttaattaaagcgattcaaaaaataaaaaagaaagttggttattggattgtttattaattaaggatctggatccaaaagacccggtagattttgtacttcgtttttctttgatgaaaaaaaaataaattcgtaaacgtagaaaaaaattcatcaaagaaaatactctatccatagtagagtaggaaaatgaattgcagggatggaaaagccgtatgcatcaatacgcagaaaaatgcttgtacggttatttaatattattttttttgcccatttttttattttcttatttgtatttatcccttttacctttatttgggaataaggataatctttaccaatataggagaaatcattatcaaaatctttatcaagataagggaaatacttattaagttataaaatcagggtaatgatccaccaacccgctagttctttttatgaggcacaaacgggagaatttatcctggaagcggaagagctactgaaaatgcgtgaaactatcacaagggtttatgtacaaagaacgggcaaacctttatgggttatatccgaagacatggaaagggatgtttttatgtcagcagcagaagcccaagcttacggaattgtagatcttgtagccgttgaataaaaaataagtggcaaggattattctaaaaaaatacaggatttgaaatttcatttttgaatcttcttactttcattttaatataatatctctattagttaatctattaatatctattagttaatctattaatagaatataagtaatatagaatctaagtaattcacggttaggatagatctaaaccagctcattatatatatattacaacttactatgccaactatgaaacaacttattagaaacacaagacagccaatccgaaacgtcacaaaatccccagctcttcggggatgccctcagcgccgaggaacgtgtaccagggtgtatgtgcgactcgttcagatcatatactaagaagaaaaaaccaatttcattttttcagtattgttgatcggttaagatagtgtgaatgtagttttcccattcagactatcttaacttatatatatacattctttacattcttctatcttgtatcaaatttatggtttcgattggtgcaaacccaatagtcttaatttacaatttaagatgagaaggactttcccatcggtaacaaaacaaatataaagttacccgttaagcggagaaaatactatttcaattaaagataaagtatgtccttaatgaatgaattttgatggattttggacgaacggaataagaaggtcagctacccagcaaattttcataattaaataccgttactgtataactagatttcattgtgaaaaaatctacttactaaactaaatattggatgggtagagccaaagagtgtgaactgtacaagttaacaataacattaattaaattaataaaaatgaaaagaaagaaaggctccggtgtatagaaaggacctgcccgtttctaaaaaaaatcatagaaacgatggaacccacccattttttatatatgtcctaatttatttactattacttactatgttttttgatatctagtatcaatacaatttattattttgaggttgaatatttagaaaaaaaagtacggtatatagaagccgagtggagggggttatagtagcaagagccattggaattttttttttatacattggaagaatccatttttgttattaatagactagtaagaagaaaagaataactgaaaaatcaaatagttattcatcaaagtctcaattattcaatgaccagaattaaacgaggatatatagctcggaaacgaaggacaaaaattcgtttatttacatcaagttttcgaggagctcattcaagacttactcgaacgattactcaacagaaaataaaagctttggtttcggctcatcgggatagagatagcaaaaaaagagattttcgtagttaatggattagtcgaataaatgcagtaattcgcgggaatattaaagtatattatatttatagtaatttagtatatagtctatacacggggcaattgctttttaatggtaaaatagttgcacaaatagctatattaaaacagaattgtctttttatgattgccaatgatatcataaaaaccaaaaatccccttagactttactccgggaagctatcaaaataaacaaccacgctgaat

SEQ ID NO: 102614 - DNA, 406 bp, Glycine max
  Clone ID: PAT_MRT3847_63679C.1
cttattttcatggtatcagtagtttaggtttttcttttttttcaagcacattcccttttctcgggtgaacaaatacccacagactgtgcctacgtcgtttggccaacaccgtgacctccattgcatgcgaaccaacccgacaagagtcgccctccatcgtcgaccactgcgccaaagtcacgcccaagaccgccacctccttcccatcgcgtgacagccatgcacctgcatgaacttcatgcatggcacttttccggaaagcccacccttcgacgacaccatcaccgtactccgcatcctccggcgaccctgcttattgcatgtttggctctgcttggtaccgtttggccccgcttgttgctgtttggctcctacctttctcatggcttcttccgatcccgttttt

SEQ ID NO: 102615 - DNA, 822 bp, Glycine max
  unsure (1)..(822): unsure at all n locations
  Clone ID: PAT_MRT3847_6367C.1
gttgcacctcttaataacatcaactcattacttgcttccttcccttcctcttcttctgctcagttcatttcctcttcgtttgcggaacaagggagcctagccttggaatttggagaagttacaattaggagttcgtaagtaagttaagcatgataaaacggtcaccaagtaggaacaacagatccaaaggcataaaggtaaagcatgttctgcagattattctattgcttggtgtttgcttctggttgatctatcaggttaagcactcacatgataagaagaaggaatttgaggagaatgatgcaaaagtgtccgtgggaactcagacagcatatcagactctgaaacttggtagaaaagatcttcatccgggtaaggacgaagtgaatcaaaatgaaaagcatgaggaagaagaggaagatgataatgtagaggatgcatataagcatgaccacaatgaacatgaagaagaaggaaatgagcatgaatctgaagaaaaaggtgacaaacgtggagtgagaggaggaggaagtgaacaagaggaagatgaaaacaaaagcaatgaggtagaagatcaaaggggaggaggagatgatgagatagacgaaaatgaccaagagcaatcagcagtggatactgatcatgatgaggagttcacggatgaagagaaagaagaggagagtgatgagaaagagaaagaaaaatagtgggatgaggaaaaggatggttctgntgaaaaccacacagtcatgaaagctcggagggaaattacaggggggatgatgcttctagcgctgtcactcatgatactggtacaactag

SEQ ID NO: 102616 - DNA, 184 bp, Glycine max
  unsure (1)..(184): unsure at all n locations
  Clone ID: PAT_MRT3847_63680C.1
tgtttagctttgaatgactcgccacaattatttgtgcctatgctttnaaaagtccttaaagttactgaancacctttgtggatattttttgaatgaacattgcttaatattttgaggcctgaactttactacagttttcccctggggaaatttgacacccattgctttataggcgtggggttga

SEQ ID NO: 102617 - DNA, 407 bp, Glycine max
  Clone ID: PAT_MRT3847_63681C.1
tagacttttacaactggaggtggcaccgactgtgatggggttggcattttgggcatcacttgggcctttgatgacatgatcttcatcctagattactgcaccgccagtattttaagaggacacataaacccggcggcgacattccagttgttcctaggacacaaggtgtcgttgataaggagcttggattgacatgtagacacagtgtggccccgctatctcaggtactgcattggccaaggtgttccaataagcatactacaccaagtgtggaagaggcaccaactctcttgatgatggctacaacaaaagtactgctatgagagctgtaaatattattaccttaaaccttggatacactgattccattgccactgaccctaaaaggtactctctgtattccgatg

SEQ ID NO: 102618 - DNA, 120 bp, Glycine max
  unsure (1)..(120): unsure at all n locations
  Clone ID: PAT_MRT3847_63682C.1
cttccccattagaggctcataaatcccacacaatagactacacaancngnagcanagattgaggcaatgataacccaattaatgcagacatagaattggattacaccgaggctgaccagg

SEQ ID NO: 102619 - DNA, 381 bp, Glycine max
  Clone ID: PAT_MRT3847_63683C.1
caacaagctgagcaagctgccagacacaatagggtttgagctcataaacctaaagaagctctcagtgaactccaacaagcttgtgtttcttccaagctccactttacacttaacagctttgaaggttcttgatgcacgattgaattgcctaagggcacttcctgaggaccttgagaacctcatcaacctagagacccttaatgtgagccagaacttccagtatttggagaccatcccttactccataaggcttctctggtcacttgttgaacttgatgttagctacaataacatcaagaccttgcctgagtcaattgggtgcctcaagaatctccagaagctgagtgttgaagggaaccctcttacctgtccccctatgga

SEQ ID NO: 102620 - DNA, 276 bp, Glycine max
  unsure (1)..(276): unsure at all n locations
  Clone ID: PAT_MRT3847_63684C.1
gactcatttagacttttttttcctttcacataacnnggaccaaaagcgaaagatgattttaacggggcctgacccnctcaactctcgtagtgaacaaattggacttgatgctaatggtgaggtgttttttgcttgtcacgactattattttccaatttgctaagctatttttgaatattaaaccaattagtggctttaagtcttctttaaattttccactccctattctccataatcttacgattatattcacaccatagtttattatttccaatc

SEQ ID NO: 102621 - DNA, 749 bp, Glycine max
  Clone ID: PAT_MRT3847_63685C.1
gtttttggttttgatttttgcaccctctttctcagtctcactcgatccctctctttgcggcctctctcactctgtctctcttgactcttacaccctaaaacgcggtggtgtcgccgtcgaagctgtctccagtgccactgtcgaagttgccactctctacgtttctctctttctgtttcgctcaaccccgaaccttctctcactctatgcaaattttttggtttctgtgaatgtttcattttctagaaccctctgtgcacactgtctccggcgaactctcgtgctcacagtctctggcgaacggctaaagtgttttggagaacaaaacagagagagcaagacaccataaacttttcacaagttttggagggcaggcgcggaaagaatctgcagtgttgttttatgaagtactgggctagatcttggagaggagctgctccgtcgtggcacaatggtggtggatggtggcaggtattgttgcaaatggaagcaccaccatgcgatggaggtgtgctgagatgggaaaggggaagagagtcgcgtagaggcattgtcgatgcgacagctcatcccggcatatggacagaatgagagtgactaaagaagatcgtgctgtcgcgacacgacatcgattgatatcattttggggaatgcacgatgtaaagaatgggagatatctactgtgatgttgctgttgcggcaacttttcgtggtgacatacagagcgcgaggaagcgagagaacaaaaa

SEQ ID NO: 102622 - DNA, 511 bp, Glycine max
  Clone ID: PAT_MRT3847_63686C.1
ctcacgcgtccggtccaataaagaagacatattcactcgatcaaagaacggcttgacaaatatggaggttgaggtgaaacagcaagagggtttctatctgaaggcaattgtgaccgatgtgttggagaattcgctggacgttgtttatgaccgtggatgccgaaagccggaaactgtggaattcagccaatgtcgtgctgtcatcattgaaaatgcgcagcaaaagcgaccgtcaaaatgcggcgacattgttgatgcccttgttccgattgacaaaaacaacgatgacttccaggcctacaagaagatgaagattcgggagatcaagggcgattttgcggttgtgtgcagcgtggacaattccggagacggcaacgtgtcagcattgggcagtgaagtgatcccgttggaccaatgccgtcatccggcaatgtgtatgctaattgatgccagctcagtgaaacagtgcaccatttcggtgccggacgatttggtcaactattttgtgcat

SEQ ID NO: 102623 - DNA, 352 bp, Glycine max
  Clone ID: PAT_MRT3847_63687C.1
gaacccactggaaatattaatagcagtgaagatacattattgaaaatgctatctgaccattgtcatctcctttcattaccttagatgtaaatttcttaggattgcactgtgccacgaacaatgatggtgatggcggacatgacggtgacaatcgtcagtggtcgcaaggtaacaagcactggggagagaaagtcgcgaggagagaaaagggttttcgagactaagcgggaggagaaaagggtttggagtttttaatttaagtaaaaacacaacatcaattttttaaaaaaactgatgttaactagctcgtgttaacattagtttttttaaaaccaatgttaacattggtttt

SEQ ID NO: 102624 - DNA, 142 bp, Glycine max
  Clone ID: PAT_MRT3847_63688C.1
gggcagacgcagacgccgtgactagacgggggtcttactcgcgcccatctaagggtttctccttttgtttcccaacatggttgccgcttagaaaactaaaaagacccatggaagcatcaacaacaggctcgctcttgtcatg

SEQ ID NO: 102625 - DNA, 344 bp, Glycine max
  Clone ID: PAT_MRT3847_63689C.1
gggtcgagcgaaacttgggtgcgaatttttcactctcaacaacgacaaatgactatgggggttatgccataagcctcataacgctttcctcaaattgttttcccttaaagggtagatggcatccatagatctcaacggtgtctaggttgatactaattcacagtcacgcctacaccatatgccccgccaccgactccgcgcgattcctctaccgtcgactgtgtcaacgttgctacacccttgaacttgagagagggacatgtgatgaaatgggcccgaaggggctccatgaggcccttgacattccgccatagctgatactcatggccaaatgatgcacaccg

SEQ ID NO: 102626 - DNA, 346 bp, Glycine max
  Clone ID: PAT_MRT3847_6368C.1
acttacgcacactgaaatgtaatcttactacgggttcataatccaccgacggatttaagacccaatggaggacaagaaaaaacacatacgtaagggggaaaaaggccagaggcagggacaatattagcagggaaaaaaactgagactgacccagcgcagggacatgcaaagacgagggagaaaaaccccaagaatccaggaaaaaaaaaaaggtgctcctagctaacagggggccagaccagataaaaaattggaattagaaaatgattatgggaggcaccgatacagtgcctatatacgtacagagagaacaagggctgacaagggcagaaaacctctgcgggga

SEQ ID NO: 102627 - DNA, 470 bp, Glycine max
  Clone ID: PAT_MRT3847_63690C.1
aaaaaaaggggaaaacaaatggcccctggggttttgaaaaaagcaagaaacaaaaaggggggttcggacccccaaaaaaattcacattttgggggggccccccccaaacccaaaataaaaaaccctcaaaaggcttttcgtttttgggcccccactttccggggacaaaggggggggcaaagccccaggcgttgttggggacagggccaacaaggggaccgggggggttccccaagggcccctttccggggaaaagggcccgaacaaaaaaccccaacataaagaaccgggcccaccgcccggtttggggtcccttccccttaagcccaaaaaaagccctggggtcaaaaacaaggcccaagggggcaaaccccccccccgggaaaatggggccagggccccccccgggggggcccccaacaaaacgggaaccttaaacggcacccataaggaaacctgggggggcccaa

SEQ ID NO: 102628 - DNA, 462 bp, Glycine max
  Clone ID: PAT_MRT3847_63691C.1
cctgtttaataatattagctgcaaaatcacacgggggggttctaccacacgacggggaaaaaaacatttatgaatatattcaaatagaggtttaaatacagctttagtctttctagctgataattttatctaaaagagatccaaaattaatcataaccacaatatgacaaacatttatatacaaagaagcacatacccaggctttctgcatcttcattttccacgttcagtgagtgaaactctgattgctaaagtagttggaaccaaccctacatagacagtatattccatttatttccttactacaatatgttaataatattaaaaaataaataaataaccataacgaaaattgagagcataataaaaggaaggatatcacaccagatgacaaccaaatacacatagtgaatccattcaagagaagtaatatgaaatgcaacattctatgattttacattc

SEQ ID NO: 102629 - DNA, 591 bp, Glycine max
  unsure (1)..(591): unsure at all n locations
  Clone ID: PAT_MRT3847_63692C.1
ggctcgagctgcttttctttgtttcgcttacgcccttgcctcgttcatgctcagcgcgcgcttccgcggcagcatccaacgactccatcccttcccgcgccgtatgatgcacgtgagcggggccgctgcagcgccataccggaacgcggcgatcgctgcgcagacggaggggatccgcaagccggatctcgatgaccgcagctaccggcacctgctgctgcgcaacggcatggaggcgctcctggtcagcgatccgaccacggatctcgccgctgccgccgtggacgtgaatgtcggccacttctcggaccccgatgactttccgggccttgcgcactttctggagcacatgctctttatggggagcaaaacgtatccggacgaaaacgcgtacagcaagtacctgtcggagaacggcggtcactcgaacgccttcacctctatggagaacaccaactactactttgacgtgaagtgggacaagttcgagggcgcgctcgatcgctttgcgccctttntcacctgcccgctgctctcggagtccggcacggagcgcgagatgcaggcggtcgacagcgagaaccagaagaa

SEQ ID NO: 102630 - DNA, 131 bp, Glycine max
  unsure (1)..(131): unsure at all n locations
  Clone ID: PAT_MRT3847_63693C.1
ngncgnngcgtacgtaagcncggaattcggctcgaagngagtaaccaagcacgnaaaaacaagacgtcatgnnccngnctggcacnacggctggnncnngtnggttaccatcccgtcaannnanngggnag

SEQ ID NO: 102631 - DNA, 358 bp, Glycine max
  Clone ID: PAT_MRT3847_63694C.1
cccaagtccaaaggcaacacaccccactgctgcacgaaaaatcccacagccgtggaccttctccctggtgtaccttacaaccagcaatactcaaactgctgcaagggcggagtacgcggcagcatggggccaagatccttcacaagctatctaatcctcccaagcgagcgtaggccaagctggtacctcaaacaagacaggtaaactacccaagaaccccactctctttgctccaggaccagcctacacttgcggccctgcaaagactgttcctcccaccaactctcttacgcctgacaagcgccgcaagactcaagccctaatgacatggaatgccacccgcacaaactcacaggct

SEQ ID NO: 102632 - DNA, 552 bp, Glycine max
  Clone ID: PAT_MRT3847_63695C.1
ggtgagttattattttccgctcaaaacgatgtggcgctcgtttttctgcgctttggtcgccggtgttatccttcgttttgtcaacccgttcggaagtgatcagacttcgctgtttcacgtggactattccatgcgttggacattcatggaactgattccgttcgcaatgttgggcattttcggcggtgttcttggcagtttgttcatttgggccaacatcaaatggtgcgcttaccgaaaaaacagccgatggttgggcgcaaatccaatcaacgaagtgctcatcgtcagtgccatcaccggtgccatttccttcttcaacccttacactcggaagagtgcaagttcattgatcaaacagttgtttgaccgatgtggtcccgaggactacaccatggatttgtgcgattacaaccgaaacctgacgtacggagtttgttggggacaaagtggacgacaattaccacaccggtgatctccgcaacggattgcttaccgcttttcttaaatgatcatggcactttttgccaactgttgttaccattttacttt

SEQ ID NO: 102633 - DNA, 147 bp, Glycine max
  Clone ID: PAT_MRT3847_63696C.1
tgtttaacataacaactggagaattttgcagtgtaagcgcactaaccgaaaccccgccataagatgggctctgacataccctgaagacctaatatgttagtcggcaatatttgaaaggatcacccaacaatgttagaacaacaagct

SEQ ID NO: 102634 - DNA, 697 bp, Glycine max
  Clone ID: PAT_MRT3847_63697C.1
gaaagggagagaaattgatatgatgatgaagaagaaaagaagagaccaagaacacgaagggcttaacctcttcttcaaaagttttggtgttgttgaaggatttaagcttttcaattcaattcaattcaatttcatcagtatatatcatatacttataataataataataataataatagaccatcatagttttttcactcggtagatacagcgttccaattcacaccttcgttttcatcattctcaattccgaagatctttcgattttttcactggagctgtagcgcagcgagctagatccggaaccgccaagagattttcgatccgatcaatcttattgcaaatggctgccaccgccaatcctataattggttcccatgtttgggtggaggattctcaagtagcttggatagatggtgaggtcttggaggttaagggagaagaaatcaaagttctttgcacttcagggaagacggttgttgttaaagcttctagtgtttatcataaagataccgaagcccccccatgtggagtggatgatatgacaaaacttgcttatctacatgaacctggtgtcctggataatctgagatcaagatatgatatcaacgaaatttatacttacaccgggaatatattgattgctgtgaatcctttcataaggctttctcatttatacgatagccatatgatggca

SEQ ID NO: 102635 - DNA, 342 bp, Glycine max
  Clone ID: PAT_MRT3847_63698C.1
ctcgcattccacccacattaaagtcttcaacaactcttgacaatcaggctcaaaaaaacctttttttctgtcttctatggctgctactgcaaaaccaaccattaaatcttgcactcccaataaactccccaacgctctaatctaaggacccaaggagagggtccttgacagggtcagacccttgactcaacacaaaacctgtaccagaaacagccacctttctgagctgttcatactcgatcaagattccagatctccacaggacgaaattgccatttatctcaaagacccactaaccaacctgaactattgctaccaaaagaactctttcttatggcatga

SEQ ID NO: 102636 - DNA, 1427 bp, Glycine max
  Clone ID: PAT_MRT3847_63699C.1
aattcattttattgtgttgtcaaaaaaaaaaagtccattacatgcatgaaagaaaacaaaaaaaagagaaaacagcaattaaactgatcaaataaaactccggaagtcttgtgaatatcagaagcggctcgagggtaacctaaccaggaaaattattttcaatacaaggtactttgggaagggtagagaggatggagggccaggttttgaggaagtggaacatgttgattccatcttccatttgctcgagtatgttaatgccttttctgtttctgattatgtgccatgcttgaggggacttgacttggatggccatgaaaagaaggtgaaagaagctttaaagatcatcaagaagtatcatgatcccattgttcaagagagaattaaactgtggaatgatggattaaaggttgatgaagaagactggcttgatgttctggtctccttgaaagattccaacaataacccattattgacgttggaggagatcaatgcacaaattatagaattgatgcttgcaacaattgacaatccatcaaatgcttttgaatgggcacttgctgaaatgataaaccaaccggagttactccaccgagccgttgaagaattggatagtgtggtaggaaaagagagactggtccaagaatcagatatacctaaactcaactatgtgaaggcttgtgcaagagaagctcttcgccttcatcccattgcaccttttattcctccccatgtctctatgagtgacacaatggtgggaaattacttcatccctaagggtagccatgtaatgctaagcagacaagagcttgggaggaacccaaaagtgtggaatgaaacctacaagttcaaacctgaacgccacctcaagagtgatgggtctgatgtggatttgacagaaccaaatttgaagttcatatcatttagcacaggaaggcgtggctgtcccggagtgatgcttggcaccacaatgacagtgatgctatttgctagattgctccatggcttcacttggactgcaccacctaatgtttcatcaatcaaccttgctgagtccaacaatgatatccttcttgcagaaccacttgtggcagtggctaagccaagattagcatcagagctataccaactttaaattaagtattaatgaagatttaatttacctagctaggcaacccaatatatatgaacatgaagccacatatgctcaatcaaatactgcaagtattatctattagacataaaattaatttagttagttattagaagttatttgtataaattagttggttactcaagttatagttactagaagttatttgagtaagttagtgttggttactctagttagttattttctatctttgtataaatacatcaattttgtaatactttaatgaatgaatgaattgaatgaatcctaaaaa

SEQ ID NO: 102637 - DNA, 1344 bp, Glycine max
  Clone ID: PAT_MRT3847_6369C.1
taacttttattcccttttcattaatctctgcaacttttttttttttgccttcaaagaaaaatctgttttttgatttttctcgtcgcgatttttttgtcgaaatggggaaaatcgacgtgttgattagcacgtgaatcgcctgaagtggccggattttggtctaccacgcagcttcatcatcctcacaactccattcagaacgtgagaggatcggattgcgggtttcgtttgtgttgatgtgtgaaggttgcctttgagcttgtggagtcttaggtgacttctagtttggatatgcagatgggcggtgggagtaagatagatttgcaaacattagatgagggtatgcagcctttggcaaatgggactattgaagacaccttgcagagtgagctggagaagatactgcaagagcagcgtaatcagcagtttatcaatcgagagagggatttcaatattagtaggagtggaagtgcgcctccgacagtggagggatcgtttagtgcttttgggagcctaaggaactctgattttggatcgatcaatgataggagtaataacaatggacttttgactgaagatgacatccgatcgcatcctgcgtatctttcctattattactcacacgtccgcccacgcgtccgagagtataaatcctaggttgcctccacctttgttgtcgaaagaagactggcgtgttgcacaaaggtttcatggtggtgggtcttcttcaattgagggatttggggactggaggaagaatgtagctcccaatggcgatagttcgtctctattttcaatgcagccaggattttctgtgcaacaggtagagaatgatttgatggaactgagcaaagccagtggatggaatgtctctaggcagggttcaagtcagatgctcgacagacatatgggtggtttgacaagaatgtcaggagctggtcttggtgggaggagaacgagttatactgacattcttcagcaggaaggacttgagcaacctacaatgttgtctagcaccatgtcacgtccagcgagtcacaatgcatttggtgatattatgggttcaactggcattgttgatcgtgaatcctttgagggcttgcgttcttcagcttctacccctggtttggttggacttcagaaccatggtgtaaatctttctcatagttttgcaccctctgtgggcacttctctgtcaagggtgaaaacccctgaaccacaggttattgggagacctgttgggtctgcagcttccaaatgggtggtaaagttttctctgttgagaatagtggtatggggcgtgggcagccagcatggccattcttccatatgactgatctactg

SEQ ID NO: 102638 - DNA, 598 bp, Glycine max
  Clone ID: PAT_MRT3847_636C.1
ggctcgaggctccagagacgttcgatctctttgatgatatcatcttaatatcggagggtcagatggtttatcagggcccacgtgaccacatcgttgagttctttgaatcttgtggctttagatgtcctgaaagaaagggaaccgctgattttttacaggaggttactttaaggaaagatcaagaacattattgggcaaatagaagcttaccataccggtatattacagtgagcgagtttgcaaatagattcaagcaatttcatgttggaatgcagcttgagaatgagctttctgtgccatatgataaatcaaggggacatagagcagctcttgttttcaagaaatatacagtgcccacaatgggacttcttaaagcatgctgggacaaggaatggctactaataaagaggaatgcttttgtctatgtatttaagacaggtcagatagtcattattggtatcaaagctgcaactgtgttctttatgaccaatatgcatcaaaggaacgaggcttgtgcaacagtttacataagttcaaatttgttaccatgatctgaacatgttaatggcttggtgagttaccactacgatggcagact

SEQ ID NO: 102639 - DNA, 212 bp, Glycine max
  unsure (1)..(212): unsure at all n locations
  Clone ID: PAT_MRT3847_63700C.1
gcacacacacacgcacacacacacactttcacacgctccctccctccngcgctctaggccgcgcccgggcgcccgctcgccctccccccctcctcttacgcaccggcctcggctccccgcgcccagcgtcgagcgaagattttctaggatcggagcagctcatggagaaagtgcccggcgacatggagatagagcgcaaggagaggaacgag

SEQ ID NO: 102640 - DNA, 222 bp, Glycine max
  Clone ID: PAT_MRT3847_63701C.1
accagatcacgttagtttctccttgtttcattgatcatttattgtgtcatcatatcactcttaaattcttttttccatgttactagtatgttggaaatattcaagttctatattggttgttttaaaaaaaaaaaaaaaaaaaaaaaaaaaaaaaaaaaaaaaaaaaaaaagaaaaagaaaaaaaaaaaaaaaaaaaaaaaaaaaaaaaaaaaaaaaaaaaaa

SEQ ID NO: 102641 - DNA, 461 bp, Glycine max
  Clone ID: PAT_MRT3847_63702C.1
aaaaaccctccaactgggcataggattaaaagaacttgctgtcacccaaacaaaaagggggggaaaaaagcggacaaacaactgtggattcgtaaaatttttttcttgaggaacaaaaggaaaaacgttaaaacccgggttggttaatcccataaatttaagcccccgggttaaccctctcccccgaaaccttttactttaaacccccccccaacccagggggaggcttttccaaacggggaaacccaaaaaaagccctccctttaaacccgtggcctttccattcccttccaaaaaggggcttatgggggggctcccaacacagggacaaggggtgccccccattgtgacctccccatttttgcaactcatagggggcccttttttactgaaaatcacaatggcgcaaacattgggggagtccctttttttttttttccggacgcgtgggcggacccgtg

SEQ ID NO: 102642 - DNA, 199 bp, Glycine max
  Clone ID: PAT_MRT3847_63703C.1
ggcaaaaatattctactaattattattttacaatgcaccatttgttatctaaagaatgctaataagcaatctacgctattctatacatatataactaaaaataatttatacaatactcctaatctatttcaatttagaaacttttaactcatttataacaaacatacattctactcaaacatatataaatctatcaaat

SEQ ID NO: 102643 - DNA, 1367 bp, Glycine max
  unsure (1)..(1367): unsure at all n locations
  Clone ID: PAT_MRT3847_63704C.1
gattgatnnnncagannaagcagatgctgaggaaaagaattaagaatatacatccataaattgaaagaaaaaaatatagctatagtaaaatacttaaacacaaggaccttaagatagaattatacagcaaaaattatgtagtccaggctcccaaaatttccagactgttgcttgctattcgacatacatctttctctgctaccgactctcaccttagtgttgccattctgagtttaatattttcatagatataaggtagacaattattattcaccagttatgctttgagccagacacatttccttcttgacattacaactgtgcttaccatcaaatgtaagtcttggatagatatgggtggagacatacaattttcccacccacacacacgcatgattcctaccaaggcatgccattaccaagctagttccgttgaaatcaagtaatggaaagtgaagttatgaggggttaattcaatgcttttccagcttgtctttgattgaaactcttgaatgctcttcctttgagaatcgggtagataaggcttaaccatctccatcaaatcagatgctcctagacctgaagtttttgcaaaggaatcaaccatctttggaagaactattttctgttccttgcttatggtgatggtagactgaatgtattcctccttggcacattgtagctcctcaaagactcgcttggatgtgtacaaacgtaccgcaggatcagaatggcttcctgagcaaagagcaaatagtaataaaggctctggacgatgtatggcatatccttttcttgcatctctaacctttggttttgtcattgaaggaaaccacaaccgcaaccactgtcctgggcgaggcaatctgcatcccagaatgaagttctgtatcaggtctacacttatagtatgtcccccaatgttatatgcggccttcagtaccgaagacattcttttaacattgttggctgaaattccataaattaataaggcatgcattgccaaggaattgtgcacgttaatccaaaaggcaagcttttcttcatgcttcatatttctaggattaacatcttccagccgagaaacaagtgacctaaatcttcgtagcatgtactcaatttcttttaatttctggctatctgtgcataattgttgtatccttatcattgagcaataagttccactaaattctttggaccctctgacatggaaagggttagtggagtttaaattgaaggatgaatgcttcttccattgtgatccccacttactaccctgactctgtgaagataactcgttaccagaagatgggaatgaaataggggatgaagcatttttatgaccaagtgaagtaggcctcgtgccg

SEQ ID NO: 102644 - DNA, 180 bp, Glycine max
  Clone ID: PAT_MRT3847_63705C.1
ggggcagccaacatttcttagaaaacttagtatgagtgctaccattacgaaattaataaactcttgttgttttacataaggacaggaacccactaaaaaaaaaaaccacatgacaccattaaatccaattctgtcctatccaaagcctataaattactcatacactggggccttcaatat

SEQ ID NO: 102645 - DNA, 188 bp, Glycine max
  unsure (1)..(188): unsure at all n locations
  Clone ID: PAT_MRT3847_63706C.1
gcaacataagttaaatttatgaatagtcgtaatagggtatacatagtgaaatgctatatttactagccaattaagacacaccccttttcgagtgagaaaatgagcttgcttaacacatactccacgcgaaagttaacaccctattaacccttacantttaattcaaccttttgcttgccatgtgccca

SEQ ID NO: 102646 - DNA, 778 bp, Glycine max
  Clone ID: PAT_MRT3847_63707C.1
cggtttgttgggccaagtgtcagtaataactaacaggcaggacttaatagaatacggagtcgattcggagagatcaaccatgaagaacgaccacaacaacaacaacaacaacagcgccgagcatagcaaagacactaccgttggaatcctagattcccgattcaaccagaccctcagaaatgttcaagggttactcaagggtggctcgagacccggtaaaatattattgagccgtttggtagatcctcccgataactcaggctcgaagatatcctcaccaaattacaaaaggagcttttctcacaatgatgctggtacaagtgataacacatctggggcagtagagttcatcaagtgggacttctactcttgatgcaggaggagtttcagagtaaaagcaaaccaattagtattgccaatgccaataagctaaaagtgtcgacctcccttggagggagcccacccgaagaattccacaagtctaccatgggtgctagagctacagattctgcaagaattatgaagttcaccaaggtgctttctgggacggtggttatattagacaagttgcgggaattagcttggagtggtgttccagacaatatgcgtcctaaagtgtggagacttctgttgggatatgcaccacctaattcagatagaagggagggagttctaagaaggaagcgccttgagtatcttgactgtatttctcagtattatgatattcctgatacagaacgttcagatgatgaggtcaacatgcttcatcagaatggga

SEQ ID NO: 102647 - DNA, 736 bp, Glycine max
  Clone ID: PAT_MRT3847_63708C.1
tgaaggcttatccaatccgagtaggagacctttgaagcaaataatagtttgaaggtggttatctaagtctttgagcaaatcaaataaatagcatcttgctgcatccaatgtcaactgaagcataacagtttcattgacaattattattatttttatttctgttcaattagtaaaaatgctatttgtgcaggctcagaggacctggccctattgcgaaggtctttaaactgattaattcatgacatgctcgtggcaacccttatggctgaaggatatgtttgtaggatctttgtttttattatttatatatttccatcataaactataaactttatatgaagaaaaagtctttatcgctggcagattagaacttgcactgactttaatgctctcatttcagttctgcttctgaagatcatcactttgctgttgaacttgggagccgttgaagcttgaaatttgttagaattggaaagctcacttttttccccgatatattggaaaactcactttgagtatgtagatgaagttttacgattattttgattccgattgattattcagatcaagttgtattccaaaaatggaataagagtattcactatttcttattttaattaacattttgacatgtgcggtgcttgcttgtattcctttgatgaagtgatttaggattctgattgaatttttagatataaaataaatcatgttaaagctgtaggaaagaagagattgc

SEQ ID NO: 102648 - DNA, 334 bp, Glycine max
  Clone ID: PAT_MRT3847_63709C.1
tggaccacaccgcgcggattatgagacgggttactggggacggagaaaagatgacattggtaacgggaaccactggtgaagaggcttacaacaagctaatagttgaacttgagaaaagggttgctacatagggtgggattgaatgtcccaaggatgagaaacttcctcgtcgtaaaatgtttgacaaacctaagacgcgctgctttactattctccctatggagatgaatcttgtggtccgccagaagattttaaattatgtgaggttcattatgaagaaaagggacaagcttagatggaaggttggaatcaacccatactacatggaatggac

SEQ ID NO: 102649 - DNA, 712 bp, Glycine max
  Clone ID: PAT_MRT3847_6370C.1
ccacgcgtccgatctctgcaactttttttttttgccttcaaagaaaaatctgttttttttatttttctcgtcgtgatttttttgtcgaaatgtggaaaattgacgtgttgatttgcacgtgaattgtctgaagtggttggtcgtatctttttctcgataatgggtttctctattttggtttcagagaggatcagatttcgggtttcgtttgtgttgatgtgtgaaggttgcctttgagcttgtggagtcttaggtgacttctagtttggatatgcagatgggcggtgggagtaaggtagatttgcaaacattagatgagggtatgcagcctttggcaaatgggactattgaagacaccttgcagagtgagctggagaagatactgcaagagcagcgtaatcggcaatttatcaatcgagagagggatttcaatattagtaggagtggaagtgcacctccgacagtggagggatcgttgagtgcttttgggagcctaaggaactctgattttggatcgatcaatgataggagtaataacaatggacttttgactgaagatgacatccgatcgcatcctgcgtatctttcctattattactcacatgagagtataaatcctaggttgcctccaccgttgttgtcgaaagaagactggcgtgtgcacaaaggtttcatggtggtgggtcttcttcaattgaaggatttggggact

SEQ ID NO: 102650 - DNA, 266 bp, Glycine max
  unsure (1)..(266): unsure at all n locations
  Clone ID: PAT_MRT3847_63710C.1
agaggtccaatactccaatcctaaatgcgtgttcctgattatgtattacaaattgagagaaggtggtggaggagctgatccattgccgatancgtacccataatttatcatttcaatcccatcccaagcgtccacagctaacaattcagattatcatcatggcttcttttttccctcactctccttctcactggttaatatactgntgattaactaattngaagtgtgggatggtaggagtatcanatttcactggggggncatag

SEQ ID NO: 102651 - DNA, 1036 bp, Glycine max
  Clone ID: PAT_MRT3847_63711C.1
tatagcacacagaatcaccaaaacagccacaacacaacacaaaactctgctatattcctcttttgcatgaaagagaaaaccctctcaatggctcaccaatattcctcctctaatgaatctgatagccagatcattcctcctcaaccattcaaattgaagaaaccccaccaacccaaaggcaaacaaatggggcaagaacaagaaaacgagtctcagtatctcgaggaattagtctctgactctcgatatggagaggaattagtcttagattgtcagtcagggaagtatagcggcaaagataacaacatacttgggcaaatcccatctgcttcgaaaatccacaacaaggtggaaattgcattggatcacaatgctacaaaagaaggaatcacaagtgttgaaggtgatcatcaagatagtggacgtgagaagttgaagaggcatagagtggaagttgctggaagggtttggattcctgacatatggggacaagaggagatcttgaaggattggattgattgcacagcatttgatgctcctttggttccaagcagaatcgttatggcacgaacggctttggttgaagaaggtagaagagccacatcgggtggattgagaatcgagaacaggtgttgaatttttttcatcaatgttttattactatgtggattattcagtttattcggtgacaaaccatatattaattgttattggttatgttatgaagaatgttttgttaatcctatgatgatgttttcttttgggtatatatgtatacatttacatatccttcgttatttgatgattttggaagcgtttgatacctcaacaaaaataagaaaaaaatattagactacttccaaaatcttgaaccttaaacgagtgtacaagccacattagttcaattaattcacctatacttgtctttgttgtctcttttctgagtatatataatcgttgacttctttgctttgtgtggggactaatttgttcaaacaccagctttacctttggcaataataaggtatttttttgc

SEQ ID NO: 102652 - DNA, 280 bp, Glycine max
  unsure (1)..(280): unsure at all n locations
  Clone ID: PAT_MRT3847_63712C.1
ctcggtcgtgccctttacnctgccccaatccagatttggganagcgaaaccgggcaaggtagccaagtgggntaanatcctttaaattcnaacattttngnanccaacaaatccaaactcagctgacgagtttaccttcttcgttggcanccgtcgggtcttcnacccaatntgangatggatttcttggtcttttcaacagtncttaaaggngaatncntcnaaacngtggngattnanttcgacacnngncgaanaaanannngatcctgaaaacngc

SEQ ID NO: 102653 - DNA, 190 bp, Glycine max
  unsure (1)..(190): unsure at all n locations
  Clone ID: PAT_MRT3847_63713C.1
nggacaacgtactaatttcacatgaagccaagacacaacatgaactttggtcgaaacttccgttgttccaagtactctgaatttctgttcccggaagaagaagaccatacatgnnntgctcagtttgcctgtagtcagtcctagtggactgaagttgcagggtttcctcggcactcccttgagttcctca

SEQ ID NO: 102654 - DNA, 742 bp, Glycine max
  unsure (1)..(742): unsure at all n locations
  Clone ID: PAT_MRT3847_63714C.1
ccaccctctcatcatgactcatccctactgctccaatgacttcaatgcttggtttgacctcaattctccatgccttttttccacttcttcatcaccttgctccaataacccaccattttactttcctactagtaatactaattaccttcataactgcacaaataatgacatctcttttacgcagcgtattcaatcttctcccagctcctttccccttccaaaagaagaacttcctctccttaacctaagccctgcaagaggtgaagatcttgaatcttccttcagtgccatgaaagtcaacaaagagaaggagaaagaactaagcatgtcagctaataataactctttggatgatgaaactgctgtgacggtggctttgcacttagggcttccaagcactactactactactacttcatcagctgatttaacttcaaacgtgtactctgacaaagaagataaaaaagacacggttgcttctgagtattctcctaccagaattaacaagggtcagtattggatccctacccctgctcaaattctgatcggtcctacacagttctcatgccccctttgtttcaagacgttcaacagatacaacaacatgcagatgcatatgtgggggcacggatctcaatatagaaaggggccagagtctctaaggggaactcaaccaacagcaatgcttaagctcccttgctattgctgcgcaccgngatgcaagaacaccattgatcatcca

SEQ ID NO: 102655 - DNA, 229 bp, Glycine max
  Clone ID: PAT_MRT3847_63715C.1
catagaaattttttttttattgtgtggggacaaaacccaaaatcaaaaccaaaaaccaaaagcgcctaaagaacactgttctgagggcgaaaaacgtaagggtgaaaaaacaatactttaccccaaacccaaacggtttttttcccaagccggacctgggtactaagaccccacaccgtgttagggccccccacaatccccgcccggaaaaaaatatagtttttttgag

SEQ ID NO: 102656 - DNA, 317 bp, Glycine max
  unsure (1)..(317): unsure at all n locations
  Clone ID: PAT_MRT3847_63716C.1
cccactcatccgaaagatttttcaagaagattacacagcagaaacaccggaggaaaaaaagacgccattcaaaacngaaaggcaacctaacaaagatcagactgaccataagggacaaaatacagaaccacagacagacaaggaaccagccaggctcaaagcacaaagactaacctacatctgaaacccaacactactaataccgattcaaattaacagcacattacaccaaccaacaactagacaacacaaaagaacttgcaaatagtaatacacaaaaccacaaaatacatcaccaacaaccaatcaatcaatca

SEQ ID NO: 102657 - DNA, 264 bp, Glycine max
  Clone ID: PAT_MRT3847_63717C.1
ttctctcatgcgcatactctagcccttacgggggggatgaattaggatatgggggggataaacaaaagatataacggggttattataatagaccgaaacaaccttgatcagatgaatggaaattgatacacataaccgaattactgctgcacggtaggatcacactacctggcttgcaaagatgctccggataaagataaatgttataatcaatgtggaacctgaacctttaaacatcaaccaaaccgtggtataataaccaag

SEQ ID NO: 102658 - DNA, 256 bp, Glycine max
  Clone ID: PAT_MRT3847_63718C.1
tttggcgtcatgttggatgtccacacatccatatggggtcagttctattaggattccttcgggaagaggtagagggtaggaggggttaagccacgagacgaggcatgcagaggggtggcctggatgggtctgcactgctgtccatgctcacggggagcgttgcaaattgtgcttcccagcccatagtgcccccacagaggagcccgggagtccctggtgggcgtctgtgttcctgcaagagccagtggagatggcc

SEQ ID NO: 102659 - DNA, 344 bp, Glycine max
  Clone ID: PAT_MRT3847_63719C.1
gaagacacggagattgtggctctccatccttgatatgcgaatttgttccaaaaaaaaacaattttgcatggttcatagtgggggttcccattgatttaacgattccaaaagattatatgagacgaaagggaactcgatttttcctttcctgggaccattaggagtttaagcccacgctgacccgaggtaccagcaacctttttgccaaatttaatttatttttttgggacccgggaggctctttaccccccttggggagtttccagccttaacggtgggggttcttccaaaaatgaacttgggttttttatcacctgggttttatttttgggaagagcactttt

SEQ ID NO: 102660 - DNA, 379 bp, Glycine max
  Clone ID: PAT_MRT3847_6371C.1
agtaaaggaaaagggaaggccaagaagaagcaagaacaaaggccaagaggtacgtaacgaaagcttcgttagcttaaacaatgcaagaagccatgatcagattgagaaaagtgaggaatgtgacaagaacaagaacaacattggcctaacccatcatagcgagaaacagaaattgaattatatgaaggataggaagggaaatggaaatcgcatggtagaaaagaagcttagagaattggagatgttggacatgagcgatgtggattatgtactggacattgaagaggttcttcattactactctcgactcacttgcccggtgtatcttcaaattgtggataaattcttcatggaaatgtgctctgagttctttggtgct

SEQ ID NO: 102661 - DNA, 288 bp, Glycine max
  Clone ID: PAT_MRT3847_63720C.1
ctaaacattatgcgacattgaatcttcctatttcatatctcttactttatgagacttttaggattacccatcagggtattggggcctaatggctgtagctgcatacaaagtagccaccttcattggggtaaatgccaaacccatctgcgggggagctcagaaaaacccaacgtggtctggacctgtgagctttctgaatgagaaacgttgaatcataaaccttagggtttgagccttaagcgacgcctttcactggcttgatcgccgtaccgccggaagaagtctaga

SEQ ID NO: 102662 - DNA, 352 bp, Glycine max
  Clone ID: PAT_MRT3847_63721C.1
aagcaacggttctatactatcccttaactgaaatttggtaggacttaggacccacaaaaggaccgggggctcgatttttatttaactactatcactcggaatttcctgaggctcaacaaattttacccaaaagggaaaaggttgctaaaaaaaggagattaaaaaaaacgggggtggtatttctcatatgaccacaatttacatttactactatggggaaagccaaattactaggggcatctgagcgggggctcccttgaactggtgagggaaatatcaatattatgcctcattctcggctaacggaaatttgccacatcaaacccggatccggttgacatcactttttggg

SEQ ID NO: 102663 - DNA, 287 bp, Glycine max
  Clone ID: PAT_MRT3847_63722C.1
gcgcgcgcagagttattcatttactggatattatggtcgcaaaaaaacacatattcatactttaagcacatcaaaagatatccaccagtttttttacacaataccagacaccaaaaaaattgtaaaaaccattcaggccctgcgttagtggaaccaaataactgtctgagggcgtttgattttgacaatcagattcaaaagacggcggcggaccaataaacatcccataatgggggcccccaaacacaaataaaagatgctgacaatcccaaatcctcacagaaaaa

SEQ ID NO: 102664 - DNA, 990 bp, Glycine max
  Clone ID: PAT_MRT3847_63723C.1
acgaaagggatgccttccgcggcactgctccaatcaatctcactgataggcttcaccaggttcttcggtgggcaaccggttcagttgaaatcttcttttcgcgcaacaatgctcttttggccagctctagattgaaatttctgcagaggattgcttacctcaatgttggaatctatccattcacttccatcttccttattgtgtattgcttcgttcctgctctttcacttttcactggccagttcattgttcaaacccttgaagtcaccttcctagtttacctcttgggcataaccttgacccttgtcatcctcgctgctttggaaatcaagtggtctggcattgagcttgaagagtggtggaggaacgagcaattctggttgattggaggcacaagtgctcatcttgctgctgtgcttcagggtctactaaaggtgatggctggcattgagatttcattcactttgacatcaaaatctggcggcgacgacgaaaacgatgaatttgctgatctctatgtcatcaagtggacatctcttatgataccaccaatcacaatcatgatggttaatctgatagccattgctgttgctgttagcagaactatatacagcgaagatcgtgaatggagcagcttgcttggaggtgtgtttttcagcttttgggtcttatctcatttgtatccctttgcaaaagggctaatgggtagaaggggtaggacacccactattgtgtttgtttggtcagggctaatttcaattactatctcacttctttgggttgctattgaccctccctctggtagtagcctaattggagggtcattccaattcccttgatttttatggtgctcacttttcagggtagcacttgtaagtaattcagactggccttgtgggttgatgagattttgtagttaccattcattgttcgacaagcttttgctttaaaggaatgaatcatacatttttttttaccatgttctcattg

SEQ ID NO: 102665 - DNA, 455 bp, Glycine max
  Clone ID: PAT_MRT3847_63724C.1
caagatgttgttgatgcaagcaagcaactgaaagatttattgctgcaactgcttgaacggcaaaggttaaaccatggtgaagtgcaagcttttggcaccccacgtagattagtggttgctgttgaaaatctttgcaccaaacaggcagaaaaggaggttgaagttagaggtcctcctgtttcaaaagcatttgatcatgagggaaatccaacaaaggccattgagggtttttctcgtagatactctgttccacttgatctggtatacagaaaggttgatgggaaaacggaatatgtttatgcacgtataaaggagtcttcaagacatgctttggaggttttgtctgaagatttgcctgctactattgctaaaatttcatttccaaagacaatgcgttggaattctcacgctatgtttagcaagcctattcgctggattttagacctgcattgaga

SEQ ID NO: 102666 - DNA, 1834 bp, Glycine max
  Clone ID: PAT_MRT3847_63725C.1
gtgagacttcacttattcttttttcttccaatttcccttcactcctaaaaacttttttaggagggaaggggggcaatggaaccacataagaaacaccattttggaacctccaacgtccccatgctagtacaacattgttgtcttattagcatcttcatcttcaccttcttcactgccaccaccacccaagcttttgattatgctgatgccctttcaaagagtcttctctactttgaagcacaacgctctgggaggataccctataatcagcgtgtcacttggcgtgaccattccggcctcactgatggcctagaagaaggggtggacttggtgggagggtattatgatgcaggggatcatgtgaaattcggtttaccaatggcattcaccatcacaatgctctcatggagtgccatagagtataggcaacaaattgaagatgcaggtgaactagaacacacgttggaggcaatcaaatggggcactgattatttcatcaaagctcacactagcccaaatgtcctatgggctgaggtgggtgatggtgacactgatcattattgttggcaacggccagaggacatgacaacttcacggcgagcatttaagatagacgagaataaccctggttcagatctggccggagagactgcagcagccatggcagctgcttccattctgttcaggaaaacaaacccacattactctcacttgcttctacatcatgccctgcagttgtttgagttcggggacaagtataggggaaattatgatgctagtgtcggagtggtaaagagctactatgcgtcggtgagtggatacatggatgagttgctgtgggctgccacgtggctgtacaaggccaccgacaacaaaatgtatcttcagtacgttatttccaatgctcatacctttggtgggactggttggtccatttcagaattcatctgggatgttaagtatgctggccttcaactcatggtctctaagttattaagcgaagaaaaacacaagaagcatagggatatacttgaacaatacaaatcaaaagcagagtactatatttgttcatgtctcaacaaaaacaatgatagcaataacgtggaacgtaccccagctggattaatctatgtccggcagtggaacaacatgcagtacgtttcaacagcagcatttttgctctcaatatactctgatttccttcaaagcacaaatcaaaagctcaattgccatgggggcacagtggaccatgaagaaattcttaattttgctaagtcacaggctgattacattttggggtccaacccaatgaacatgagctatttagttgggtatggccctaactaccctaaaagggtgcaccatagaggggcatccattgtgtcatacaaaaagaataaagggttcatagggtgcactcaagggtatgataattggtatggtagccaggcacctaatcctaatgttctggttggggctttggttggagggcctgatgggaaagacaattttgaggacagaaggaacaattttatgcagactgaggcgtgcacatataatactgccccattagttggtgtttttgcaaagttcttgcatatagaaaaccaaaaactggttcatgattgtaattcacatttggttgcctccttcaaatgatatagtccttcaaataatatagtgaattaatacagtatatgtttctcataagccaaaagccaagtatttttcaatagttttttttatgtccttggtgagtgatttatggtttggctgaaattttctggcctcaaatgtactacttcaaatataaacaaatatatccattcagatt

SEQ ID NO: 102667 - DNA, 631 bp, Glycine max
  Clone ID: PAT_MRT3847_63726C.1
cacgcgtccgcccttcacttgcacgctcagcacacacacttatcctcttaacaaaacacaaaccagtgttcagtgttcagtgttcagtgttcagtgttacacttcacacagacaagaatccaagacaacaagggaaaccagacacatcattaacacacgacacaaacatcctcactactcttccatcttcattaagttaagtccttgtgggtcagggagcattcaagcagtgaggcccaactaattaacctgtttctctttactggatataaggcaattaaaccatgcaaacaccaaagacaagaaatggatcctctgatgtgcctcagaaggtgtctccacgtgctgtacgccaactcaagcctactactctggacattgattctgcatcttctttaagtcaggctactaaatcatcaaaagaaagaagccccaaagtcactgaccgcagatcacccagaagcccagttattgagaggaagcgccctagcaaaatatctgagttggaatctcaaatttctcaactccaaaatgatttgaagaaggtgagggaccagtttatcttgtccgaatatgcaagaagcaagctcagcaagaagctgaggagtccaaggagcaactattggcccta

SEQ ID NO: 102668 - DNA, 788 bp, Glycine max
  unsure (1)..(788): unsure at all n locations
  Clone ID: PAT_MRT3847_63727C.1
aagttcattggtggtttcttctgctccagcaatgcattaccccaaccctccaaatcctgaaaaggttctttacatcaacaaaaaggaagctcctgtcttgagagtggaaagaggggtgcctgtcaagtttttgatccaagccgggcatgatgttgcactttatattacttcggatccgcttggtggaaatgctaccacgaggaatctgactgagactatttatgctggaggtccagaggcccacggagttcaagccagccctactgaattagtttgggctcctgacaggaacactcctgatcacgtctactatcattccttgtatgaccagaaaatgggttggaaggtcgaggtggttgatgggggtttatcggacatgtataataacagtgttattttggatgatcaacaggttaccttcttttggacattgtcaaaggattccatatctatcgctgttcgtggcgagaaaaaaagtggttatattgccgtaggatttggaagtggaatggtgaacagctatgtgtatgtgggttggattgatgatactggtataggacatgtaaacagttattggattgatggaaaggatgcttcaagcatacatcgcacaaaggaaaatttgacacatgtgagatgtaaaacagaaaatggcatcattacttttgagtttactcgtcccttggacccatcttgtangctggaaaagagggtggaatgtaaaaatattattgatcccacaacttnactcaaagttgtttgggcaatgcgtgctaaatgggctaatg

SEQ ID NO: 102669 - DNA, 482 bp, Glycine max
  Clone ID: PAT_MRT3847_63728C.1
cttgggggggggggggggggggggggggggggggggggggggggggggggggggggggggggggggtatataagccttcgaaggataaggaataatcccctttaaattgataggggtagttaaccaactttgagggaattgccgatttaacgccgtaacagttacggccagtaatgccaggttaacagttaaatgtgccacgtgtaaagtaaaaaaggcaacgggcaactctaggatagttatttacggaggctagaaaaacgatgccctaggcaatatggcgtattgattcccccaggtggctgaatgcacaatcactagcggtgcaaaacttccgcaagttaacttcgccattacagcacccagctgaaatttgattagccaaaataaaaaatgggccttcgtaaaaaaatagccccctcaaaaatgccgctttacttggggggagccgcttccatttgaagaccaagggggcatgctaa

SEQ ID NO: 102670 - DNA, 195 bp, Glycine max
  unsure (1)..(195): unsure at all n locations
  Clone ID: PAT_MRT3847_63729C.1
ctaaccactctctctttttcccaattttcgaatctctctcctccatggacccaacttcgatcctccccctccggccaccaccgtcccttcatgtgaccagaatactgacccgcgcaaaacaaacaacactctagtggtgttcaagatgggntgagaaagtgtgganggctgaagatgacaggaagctcacacatt

SEQ ID NO: 102671 - DNA, 320 bp, Glycine max
  unsure (1)..(320): unsure at all n locations
  Clone ID: PAT_MRT3847_6372C.1
ngctcccacgcgtccgcccacgcgtccgcaaatggggttattattggctcttgatgatgttgaaactcctaaagggtccatgtgtggatcttaaaatttctcaatctaaaattgcacttcccaaaaacacagctggaggaaccattctgcgtagcgatctattgggaaattttttgacagagggcaattttagagcatgagtcgatttgtagtgcgctcatcgtattcaaggcatgattacaatggggggcacagatggtctttccagtgtcttctggctttttcattggcttctctctttactagatttttcttgggtg

SEQ ID NO: 102672 - DNA, 470 bp, Glycine max
  Clone ID: PAT_MRT3847_63730C.1
tcaacttctccaatgtcagccactgctcttttgcagaaagcagcacagatgggttccaccagaagcaccaacccttcaattttcagtggcagttttggagtaatgagctcatcttccacacaaagcactagtctcaacagcaatattgcaaaccaaagctgtgaccaacttaaccaagcctttcagaattttaatgcgacaagcagtagtagtgcaactatgctgggaagttctactaactttagctcattgacgcattcatcaaacggttttgaccagtttatgatgcaaaacaatgtggaaccaactcagttgaagctccaccatcctggctcaaactcagtggaacataacttgacaagagattttcttggcgtgagtggaaatggaggtggacaagtacatcatgcatttctaccccaagagctggcaaagtttgcttccttaggctcatcaatggggttgaatca

SEQ ID NO: 102673 - DNA, 252 bp, Glycine max
  Clone ID: PAT_MRT3847_63731C.1
gaacaattattgtatttggcttgtgtggcgttttcagaagttggttgatattctgaagcaaaattcattgcttatttaatttttgaaaaaaatgtctaaacgcacccccttcggttacaaaaaatattctctaaaagattttttaggggcagatggcttcccacatattgctcaaatatgatttttccctggggggggggggctttgggtctagcatcgccgaaatttggaaggacccgcccatcccggggg

SEQ ID NO: 102674 - DNA, 1840 bp, Glycine max
  Clone ID: PAT_MRT3847_63732C.1
ctcaaacgtctcttgttctgttctcagagttccattatcatgctatggttgtttttcgcccccaagttaagggtgttttatttcaaagctagtattaaagcctgactgtggagtttcaaagcctgaattgcagtttatttgtcttacttgtgatgggttggtttgactctctttcaaatcccaaatgtccaagtttgaattaaggggaactcactttacagtgatttctcatgggggtaaaccctctttgtgtgtgttaatcaagtactttttttcattctttattattatagttagtggttttgctcatacatagtgagaaggactattctatgcaagaggggaagaatattaaagggcatctcctttaccaactttttcatcactgtggagtctatccctattccatgatgttattccattatgatttgacttgattggttggtctgtgtttaaccacataaataccgagatagtattatgcagtctctctactttggggccgaaattattatgatgtctttaactgttaatgctcaagttaaaagtttaacgcatgccaaatattggagctccttcagtatctcttcagttatgtatcactagcctcaataagttgcctttgctcgtttggtttctcaaacaacacagtgaatttctctgcttcatagcatcgtacagcagaagccgcaacttttctattattttctcatatttagtgctatgttatggtataacgtatcctgagtctggtagtccccaggcaattctagcagatatgtttgataacagggaaatcaacgggtccacagaataggcttctcaaatcacacaaatgggtttgctgaaatgatgagaatttgcattcattattggaggagaattgcactttgatgccaaactagttacaaaagatgttaatgtagctcatatttaaagcagtcagtcttgctcgggaatttttagcatttgcatttcatggtgtcaactttggggcatctgattttgcatattcagccttctccatggttgtggtggcaattcttagcatcatttctctgcttattttgtcatccgctggtggtttcattggaatttgggttgctttgaccatctatatgggtcttagggcatttgctggcttcttgagaattggaacgggatcaggaccttgggagtttctaaggagctcatgagtgcacatggcagacaccataattatagcttcatattaggcctaggtttcagtggtgtttgctgattacattaaagtgagataagctacccctaggttgttaaatcgcttgaaaaattcttctgaaagactagacaattctccctgcttgattgtgcttggggtatttggttgaaaaatctacctctgcatcataatatgtacagaaaaatctaactctactctcagtctcatatagtgaaatgaaatgaaatatagaatcaagcttttgtttgtcatataattataaataggtccagtagagcttgctgctgtaggagtttccatagctctcttcaatcaagtatcaaggatcgcaatattcccacttgtcagtgtcacaacttcttttgtggctgaggaagatacccttagtggagcaaaccctcagacagaggagggtagatgcttggaagcaggtcaacctacggatactgaaaccaaagagttattaccacagaaaggtggaaatgttcacaattcagattttgttggcgaaagctttaatatagctaaggaggaacgtaagagaaggcatatcccttcagcttcatcagcaatatttataggtggcatccttggactcatccaggcaatatttcttat

SEQ ID NO: 102675 - DNA, 414 bp, Glycine max
  Clone ID: PAT_MRT3847_63733C.1
cggccccggggcttataacttagttaatcgggaggagaatataaagtggttggtttctttggtggttgaagaagtttgggtggcatggccatcccatggcccaggttacaaaaggttccttttccaaatgaaaactggttttggggagcgtttttgggaggtaaaaggcccaggttttaggttggttggggaagcacacaacatccaacctttaaaaaccattcttgaaaagggcgtggaaccaacaaaggactacattaagggcaaccaattaaaatcaaactttaaaccagttaaccaacaggctttttttattgctagtgaacgcaaagtccataacaccaccttattaatattcggattaaataacaccgacctttttaatatccaatactatgaaaaacatggttttgg

SEQ ID NO: 102676 - DNA, 162 bp, Glycine max
  Clone ID: PAT_MRT3847_63734C.1
gaccgacacagacagtgacttcagtgagtgatcagtgttcacttgatcgcagcataatcgtcagcgtcacttgcgtaagatgcccataagcaacatcgccgtcggaaggcccgaagacgtgactcatgcctacaagttgaaagcggctttggctgaattcat

SEQ ID NO: 102677 - DNA, 1092 bp, Glycine max
  Clone ID: PAT_MRT3847_63735C.1
gagataaaactcggagagaaagggtactagtacgtacctgcaggctgcagcaacctcgaagctagttcaaactagtgggaggttgtgtgcatagaagcacaaacaaattacagaaaaagtcatcatcatactcagaattaatacaaattaagcattgatcttgaattaatggctcgcggaaaggttcagctgaagcgaattgagaaccctgtgcacaggcaagttaccttctgcaagcgccgagctgggcttcttaagaaggctaaggagctctctgtgctgtgcgatgctgaaattggccttttcattttctccgcccatggaaagctctatgaactagccaccaaaggaaccatgcaagggctcattgagaggtacatgaagttcacacgaggggctcagcctgaagcagcagcacctgaagcacatcctcttctggttgctaaagaggaaactaacgcgctaaaacaagaaatccaaacattgcaaaagggtatcagttatttgtttgaaggaggaaataagactatggcaattgatgaattacaactgctagagaagaatctcgaaacttggatatatcatattcgttcaatgaagatgaacattatgttacaagaaattcaagctttgaaagataaggagggaacacttaaagcggcaaataaatatctccatgacaagattgtggagaatactgcgatttctaactttgctgaatttgctactgatacttcttacccactaattgtacaagatgggggttttcaactctattaaatgggttgtttctacaatgttttgtttacatgctttaataaaggaaataatggcgactgggctgtgtttcataacattaaatagtgaagtatgaagcatgaacgttgcacaagcctaatttgcaataatttgtaacattaatattgtgttattctaatatttttatagataagtttgtaatgtaaaagtcagaaaagtgtgatttctgaccattaaattttcttttgtcattaaccaataatgtaaaatattgtgtgagtaacaatgactcaatgatgaggatattatgtattgtatttaatatgtttgtat

SEQ ID NO: 102678 - DNA, 400 bp, Glycine max
  Clone ID: PAT_MRT3847_63736C.1
gggacaggaaatttttttttcaactttaaaaggcaaggggaaataataatccatttttttcccggcctttggaaaaactaaaaaaattcctcgtttttttcaacggaaagatacctttcccccagttttccaaggttccaacctggggtttgcccaattttttttttctttcaaaaaaaaaaactttttttattttggggataaaaccaattgaccccctttaagttttttttgggttagcaaaacaaccctttttgttcccagatgtccacaaaaaaatcaaccttttccgcagggggaattttttgggggaatggtttgtttctccccaaaaaactttattttggggctttccaactcaattggggttctcccaactgttaaatttgggcggccccgg

SEQ ID NO: 102679 - DNA, 694 bp, Glycine max
  Clone ID: PAT_MRT3847_63737C.1
agcacctgaagcacatcctcttctggatgctaaagaggaaactaacatgctaaaacaagaaatccaaacattgcaaaagggtatcaggcatttgtttggaggaggaataagactatgccaattgatgaattacaagtgctagagaagaatctcgaaacttggatatatcatattcgttcaatgaaaatgaacatcatgttacaagaaattcaagctttgaaagataaggagggaacacttaaagcggcaaataaatatctccatgataagattgtggagaatactgcaatttctaactttgctcaatttgctactgatacttcgaattcgtacccgctaatcatacaagatgaggtttttcaactctattaaatgagttgtttctacaatgctttgtttacatgctttaataagggaaagaatgacgactgggctatgcttcataacattaaaaagtgaagtatatatgaagcatgaacattgtgcctatcttacttaccaaatggtgtgcaagctttgcaataatttgtaacattaatattgtggcaacctaatatttttatagataagtttttaatgtaaaagacagaaaagtgtggtttctgactattaatttttctctgtcatgatcagtaatgtaatatgtttgtataatgttttctcttcgtggaaatcacaattatttaagcagaat

SEQ ID NO: 102680 - DNA, 297 bp, Glycine max
  Clone ID: PAT_MRT3847_63738C.1
tgacattgtcagcattgcaatgcagtacttgttttcttcctctaaagggattcaaactaccgtcttagcttactgaaaatacatgttggagcttatactagcactgcacctctattcaagctgactttaagcattttggaactgttcttccagtacaatagataaactgaaatagtatagtcttaagctctgtaatgagttctactcccccaccccccgaaatctgtaattaaatttatctcctctaaaaaagttaggtcattaaaataaaaaatccaccctcaatattaatatttc

SEQ ID NO: 102681 - DNA, 193 bp, Glycine max
  unsure (1)..(193): unsure at all n locations
  Clone ID: PAT_MRT3847_63739C.1
cggctcgagggaggaccaagggagggagaacaacgcngaatgggctcaaagatcggcaccagcaagggaacaggggggggaggaaccaagagacaaaagcagaccacngcccaaaacacgcgcagcccaaaagggcgcccaagagaacaagaacacaaccacncatccaggacccggagaaaacggacggggc

SEQ ID NO: 102682 - DNA, 152 bp, Glycine max
  Clone ID: PAT_MRT3847_6373C.1
gcgagtagtggatgagaacacgtagatctagtggctagtaatatagtaaaatcttcaatttttattcatttagatagtagccactctcacaggagaatatgtcgtgtaagtcatagacgagataaactaacaggaatagctcttcgtgggtt

SEQ ID NO: 102683 - DNA, 365 bp, Glycine max
  Clone ID: PAT_MRT3847_63740C.1
gttgttgcggaaaccttaggtgaccttcgcgattcatctgttggtggtgacttcatggtctccactggttgcagagctatgttgtcgacgtggaagtgaaacggggttgatttgggagataatggagtggttgtgagagctgataaccgatcaaggatgacgtcaagcttggcggtcatctgcaaagtctaggtgaggcggtctatagcctctttaaggcggtccatggtggtctggtggctgttgtgagcaggtatggttggagtcaggtgtaggggttctggcaggggaagaggacggtaaaggcagccatgggaggcaaccatgggcagaaggctggaccaaattgttaggaacaaaggcta

SEQ ID NO: 102684 - DNA, 930 bp, Glycine max
  Clone ID: PAT_MRT3847_63741C.1
cagccggcgcgaggcaaaaaacaccacctagtttggttaatcgatctccgaacgctacgaaacgaaacgcagcattgtctccactgcacgcatgccgtttactatataataataatctttcaaaacgttgattgtgttggttcaattattgcgtgtctggtaattttaatggttgatgcgtgtttgatgggatgggagctcagaagagcatccatgctggcaaaggtttagacataatatgcaaaaaaaattattttttgttttgtttttgcatgaccgtgttttttgatgtaagtgcttttttctctctgtttgggtggttttacagcaaagattgacgttaatgttgattttactcacaagctatgcgcttctttgatgcttcctacccttaggtttcatttttctcagcattgtctttgaaaacttaattagttagttagttaatttgttcacaaatatccttgtgtttgttatttttgcattttcccccaaataggagtactggcagtccattttcactggtaattgggagtctttgcatcaaacacccaaatttgtttggtggaagtgagaagcttgatgtttcgtgggacaagggtctgtatgattcaaatgtcttggttgcatatagaaggccacggccagaatggcttgctcagcagtcttttgtattgcagcattctctttcacctgagattggagtccatggtatcccagtgaacaatttctcccgctcaggaagtggaggtataaatttatctcgattgtcagtgggaatggacctgaaggaacctgctagttcaaaatggagcagcactaccagcataaagtttgagcatgttcgtccattgaatgatgatggtcgcgctatatgtagagattatgatggatttcctttgacttccagtttaatcttcaaatagaaca

SEQ ID NO: 102685 - DNA, 132 bp, Glycine max
  Clone ID: PAT_MRT3847_63742C.1
cttatctgtagggcatctcgactgtacctcatggttcctatcctagctttagcaacgatgggactgaacgtaactgatgtatctcaccttgatggatcagaacatgtccctacgataagctgctagatgaat

SEQ ID NO: 102686 - DNA, 296 bp, Glycine max
  Clone ID: PAT_MRT3847_63743C.1
agtgaggatacgacagaacggggtgttgagcagggacaaagatgtctggtatgggagatcggtacatgggcatcgcacattacacggtgatgattcgattgttggttaaacatagataatcggaacgtcgcagaatccaagtcctcaggatgaaatcgagctccgtcaacggctaaccaggtctgctccacttcagttcgatcacttcagagattcatgagactgcctttaagaatgaaagtgtgggtttggtcaccagagagcagtatgtagatacgagggttaacattcacatc

SEQ ID NO: 102687 - DNA, 406 bp, Glycine max
  Clone ID: PAT_MRT3847_63744C.1
tcgcccacgctttcggcaaaggatactacccaccgatagatgggaattgcgcttcaaggcgactcgtatggctaatccgcctcacgagggtcaccaacggtacgtgcctttggggggccaggactccttattgtaggtatgcactcagaggggagacgcaccggatgctacaatgactatgtcaaactcaaccgagctaacgtctaatgggttgaagatggtgttcgtgctagggggatctctggccatggcggcggccacagcagccaacctaatgaaagctggctaccacaacatgataacaagaggtacacatggatccagatgtgagaagttcaaatgcacgatcatagaaaagagcaatcataggaaatctgttggtgcgcgaacacagaagcgctggaat

SEQ ID NO: 102688 - DNA, 325 bp, Glycine max
  Clone ID: PAT_MRT3847_63745C.1
cctttttagtctcgctttccttccacctcgtatcgtattattatcctcctcagtttcgcagccataataataacatactcatatacgttgacttgtactttagttgttgcaaaggttgttcttgttccctcttttatatctcttgccagcttcttctgatcaaactccctcacagcttctggggggggtgcgttagattttttttttcaaccctgcggctatttcttgttcatatttattgaggtgaatatttgtgaaccagggttcggacgatagtgcctggtagggttggaagattgttggtgtgtgggggagtggttttggg

SEQ ID NO: 102689 - DNA, 459 bp, Glycine max
  Clone ID: PAT_MRT3847_63746C.1
cacaaatcatgaatatgtatggcttggatctctacccagcttgcaaatatttataagtcagcgaatggggatgtaatcaaatttcacactattgggctgatcaattgtggaaacccaaaattaaacgtaacactactctaccaatactattttagatcaattcgctcggacgattaaccgcacaaagcatgcagcagccggccttctggctaacagaccccgttatcaaaatcccacttgttttgaaattggggcaaactgggaagacatttgatatccctagaacccaaatcggggaattcattgtggctcataccttactcatgaacgcgcttatttggaacagagccatcgttaataagaaaggggtgtgccagtagcatttgtgagctacacctcttcttaggatccttaataaaacattgttcaataaaatcttttacatctttggacaaatta

SEQ ID NO: 102690 - DNA, 269 bp, Glycine max
  unsure (1)..(269): unsure at all n locations
  Clone ID: PAT_MRT3847_63747C.1
ctaacagtcattgtacatctctggattgantcagtacctganattaaatttagggaatgaaaatatgattagttacattacagctttccaccctctgtggtttgtcctgaaatcacttgtctcctaatgggtatataacttgaaagtttgccaccctgtacttcatactgctatcagttttcacattcttacctgaagttttgtttttccnctccatttggcaacagctaactgcgtgtaattggcaaatttgcactgagttgagtaca

SEQ ID NO: 102691 - DNA, 410 bp, Glycine max
  Clone ID: PAT_MRT3847_63748C.1
cttggggggggggggggggcagttaaccgaccgagggcaaggagggcgggggtgggcgggtggcgaaaaataaaaataaccctagcgccgcgcaccagaaggaacctggcccgatcgatcgaccgcaggaggtaggcgtaaccgcagaggttggggggacttgggctgccaccttcgaagaattcaccgattatggcatcaatggttgcacattccgcctcacagtccgccgcccaggcgaacacaaagtttgcgaccttaactgcataggcctcgcgcgcaacccaatcgtcttcgggcagcctagtggaagcatcgctggtggccttggccgctggactacattggttacaagccatattaaccgtttaattcctattgcgcaacgcggttttacaggcgagatgtgc

SEQ ID NO: 102692 - DNA, 360 bp, Glycine max
  Clone ID: PAT_MRT3847_63749C.1
aaaattttatttccacacgttccactatataaggtgcgtgagaatttcgatggcgaaactgtcacaaatgtgtacacttataatatatcactgatgcagtattgtgttaccatatagcccaaaaaaatgacgatacacatgcgtggactgactaagaataattttattgactaaaagaattctacattagacaaatttactgataagaacctgcagttgaacgaatacattccctcgccaacaccaaaacaaaatgagacatgaataactaaatctgatatgattgctaatgcataccatgacgacatatctactgaacgattatataggtatttgttcatctcaattagaagaactatt

SEQ ID NO: 102693 - DNA, 465 bp, Glycine max
  Clone ID: PAT_MRT3847_6374C.1
gctatgaaatcaatgccggccaaatgccacgcatatacaagtacctcatccgccggtgttgctggcgctgattcgccttcatacttagatgacgtggcggacttaaattcatagggagctgcttatgtagctgctttaaaaaaggcaatggatgatgctcatgtaagaatgaaggtcgcaaaagaagggatgagaagaaagaaagaaggttttcctgatcgggtcaaacaaaagtctaacattgaattgaaagctgagggaaaaaaagaggctaacgtcacatattatacatagatgatcgatacatggcaaacatttatagaaatggatgcttttcaaaatgcttcttctgaagtagggaagtcaacaatgagaatagagcaagtgaggccagatctgggggcaaaagaaacaagtgttgctaaagtagctgtacaaaaagcacagaagaaattgaaatcaact

SEQ ID NO: 102694 - DNA, 270 bp, Glycine max
  unsure (1)..(270): unsure at all n locations
  Clone ID: PAT_MRT3847_63750C.1
gcagacttnacaacagcacanagcgggttactgtctgttcaangctacgatctctgtctctgttatcttagtgcctaccttgccagaagnnannatggcccaatnaantttccnattcacatctgantcantgaacnatgggcaccctganaanctctgtgnccagatctccgatgctgtgctcgatgcatgcttggagcaggaccctganagcnaggttgcntgtnaaacctgnaccaagaccaacatggtgatggtnttcggagagat

SEQ ID NO: 102695 - DNA, 308 bp, Glycine max
  Clone ID: PAT_MRT3847_63751C.1
ctgacacgaaatgcttcattaccattatgattgacatatcataaagtcgtatattcagcatgtatgaccaaatcattggccctgttggctctgctactgtttacaaagcactcggtgctgatgccaataacatgatcgacatagctgttgattcctttaagagtgttgaaaacattgcaggaaattggggacctggaacaaataggacaataactttcggggatgatggaaaaaccaaatatgtactgcacaagatataagcaggtgataatgcaaacttgggatatagctacaacgtagtgggtgga

SEQ ID NO: 102696 - DNA, 225 bp, Glycine max
  unsure (1)..(225): unsure at all n locations
  Clone ID: PAT_MRT3847_63752C.1
cgacccacgcgtccgggggtgtgggggttnctttgctcagtagaaccgggtttcttgctttaatcactgtcttcaatcacagttactaattatctttttgggccacaaagatgaaagtcatgccttgatgcaaattaaggaaaggtcatgtacgatgacattaaacccagtttttttctaaatttttggaacaatgagtggggggagaaaacagttttttttttt

SEQ ID NO: 102697 - DNA, 471 bp, Glycine max
  Clone ID: PAT_MRT3847_63753C.1
aaaaatataaaaaaaaaaaggaaaaaaaaaaaaaaaaaaaaaaaaaaaaaaaaaaaaaaaaaaaaaaaaaaaaaaaaaaaaaaaaaaaaaaaaaaaaaaaaaaaaaaaaaaaaaaaaaaaaaaaaaaaaaagaaaaaaaaaaaaaaagagggggaaaaaaagttaaaaaaaatgaaaaaaaaaaggggggggggggggggggggaaaaagggttttttccgggggaaaccgggtttaacctttttttattggggacaattttaaaaagttgggggcgggtggaaaagagaccggatggggggaaaatggggggggtgacaaaattatgggacgaggggggaacccccttttaccccgcggtaaaagaggagaaaatgcggataaagacggtttttcaaggaagggtccgaacgctagttaagaggggctccctcccgggttgggcgttaatggtgggggggggggggggtt

SEQ ID NO: 102698 - DNA, 466 bp, Glycine max
  unsure (1)..(466): unsure at all n locations
  Clone ID: PAT_MRT3847_63754C.1
tggcttggaacctttgggctgatttatgtgcttgtttatgtgcttgcatggtcgtgagaagatgatagaaggggacctcgcaaaattaaactaagagggaatagagaaagagagaggagaggtaccgcaactgcgattctctaagtcctccctaaagatagagaagaaagaagaaaataactctaataaatataaataaataagtaaatactaacggtaaatctgcacatgcggtttccttctgtgaccctcgttatttctccgtcctcctcgctcctgctgttgatagtggatgtgggagtgtcgggtacggaaacgatacggacatttcttacgtttacggaagaggagccttagtcggatagtgagactagttggtgtactccagttatgattaagcatactagtcatggcgtgtcgtagaggaatatcgcttttcgtctctgttgtggagttcntcatcata

SEQ ID NO: 102699 - DNA, 420 bp, Glycine max
  Clone ID: PAT_MRT3847_63755C.1
aagggaacaggggcaaaaaattttttaaagccccgtaaaaaacaacaagtgggcccggggggggttttaggggttttccccccatagcataagggggctttaacaaacatagctaaggctcctttttgaaaagggcatttcagcctccctttttccttttagaggggggccaccttttccttttttgttgaaaggggggaaggccccccccaatggaccccctgggattaggaagcttaaaggccctgttttcccctttgggggctccaaacaaaacgctcctttggtccccaatgattccaacaattttgtttccctgcctaaacaaattttttttcattggtgatttgaaaaaaagggcttttggagggaaaaaatggggacccttgaaaattaactgcccccatggggggaaccccg

SEQ ID NO: 102700 - DNA, 328 bp, Glycine max
  Clone ID: PAT_MRT3847_63756C.1
gaagatcttatcatcgattgcatggcttatgggattactctgttctgaagtacgatgggcctaacttcgtcgacgctggcgcatacatagcatggagtattgcttcacactgtgcctgagcatcatgagaaatatgaagatcatgtccactctatcggcgagaaagcaagtgccgatactcagaaacggtatgcagcgctggatgcgaaggactggatcacgatgcccatagtacctctgacagataaaacgaaggattgactcgcacactagattctgacaaacatgtggtgcagagctgacaggaacccaataatctcataatgca

SEQ ID NO: 102701 - DNA, 341 bp, Glycine max
  unsure (1)..(341): unsure at all n locations
  Clone ID: PAT_MRT3847_63757C.1
cgagggcaattncaagctattgttttcgtttgtttctcctcaccctgaggngcaagagctgttgtcttaacaatgcttacaaacaataacaacggaagaagttaatggcccacaccgccaccgtctagattattgttagggttttaattttctccacacaacaacacacacttcctcactgcaaatcaatctctctgcttccgattttagatttcaatctcttccactcgcagctcccatggcaaaagctacttctcttaccgttaatcctcacagctctaccggagttcgtatcgtcgtctccggacaccattgcaccttaaaatctatcctattataac

SEQ ID NO: 102702 - DNA, 298 bp, Glycine max
  Clone ID: PAT_MRT3847_63758C.1
tttctctgtcccgaaacttcgggcgcaaattcttgatcattaataaaagttttgcttaattaaaatgcccgtgctggaggggcaattggttaactaactcatggtgaggattccataatatggagaggctggaagaaagattctttatgttcatggatgaacactattattgttgcaatatccaatgaatcaaaggtgcatatgcatactgatccctctgtgtctgtggtgaacaaatcgtgggaaaacaacaccgacttcgatgacgcacccgggagaacttagtattgggaatctc

SEQ ID NO: 102703 - DNA, 1610 bp, Glycine max
  unsure (1)..(1610): unsure at all n locations
  Clone ID: PAT_MRT3847_63759C.1
caaaaaaacccggcaaagcactatccattccattccacgttccaagctaagatctgggctttggcttaaaggaatattccgtggggtgatcatagtttttaccctgttcttatgatgggtgactcagaggtggcaaagttcggcttaaaagtcgggaagaatgagaaaaatgggttcccaaggggactagatcctgcaatatccaagttttttgtgcagctccaaagtgttgttaagtctcgacttagtagattagcaaaacaggatggaatgagtttgatgagttctgtccaaagaaaaggggataagtctttcagttactctgaagctgaactaaatgagcaactgcaagcatggagagaaaatccatcttgggttgacaagcctccactaataaaggtcactgctcccaaaggttctctttgcaaccttgatgtagaagttgatgttggcctaccccctgatgcagtatataatatagtgatagatcctgacaataggagagttttcaaaaatatcaaagaagtggtatccagaaaagtgttggttgatgagggtcataggcaagtggttgatcttgaccaagcagccatttggaaatttctttggtggtctgggactatatcaatcaatgttttggtagatcaaaacagaaaagaccattctatgaagttcaagcaaaccaaggctggattcatgaaaaaatttgagggctgctggagagtagagcctttatttgttgacgaagcaatgtgccatccctttaagccggtgacgaaggaagactataatgcatgtgcaagaggcaaaggaagaattggatctaaagttagcctggaacaaatacttcagccatccattgtccctccccctcccctatcatggtatttgaggggaattactgcccggacaactgagatgcttataaacgatatgcttgcagaaactgctagaatcagaggtggatatgaggctgaaaagtctaaggcagaggagcttcaggtaaaacctggtgaaaatgtggacctggtttctaacacaagtgacattaaagaaagctggaaattgcgtagaaaaaatgcaaagcagagtcacagaagccttctgaccaagtgatatttctatgtttgttttattttttaagcaatctatctagatggttacatgtagtccagttaaaggattctaatgtaagccttatattacacaacgttaaagtcgctaatttcagttcattgcacatttcagtgggatgagttgatgtacccaatagcatagcaagagagaaacattgcagttcttttcatttttttccttgttttttttttgaaggtggggaagggtgcttcttgattttagattacttaattcatttgaatatgaagttgtcaagggattaaaaaaaaaaaaaaaaaaaaaaaaaaaaaaaaaaaaaaaaaaaaaaaaaaaaaaaagaaaaaaaaaaaaaaaaaaaaaaactgaagaaaaacaaaagaaanaaaaaaaaaaaaaaaaagggggggggcctttttaaaggacccaatttaacgtccccgggcttgcaaggaaatagtttttttatggggcccccaaatttaaattcccgggcc

SEQ ID NO: 102704 - DNA, 256 bp, Glycine max
  Clone ID: PAT_MRT3847_6375C.1
cgtgaaactggagaagcggctcgcatccgtcttcctctagtgtggcataagaaaagtttgtcttgaccccaatgagagcaacgaaatctcgatatctaatgctggccaaaacataagaaagctagtggagaatagatttattatcaataagcccaccaaaattcactgtcactcacgtacccgccgaattaagaaaaccgatataaaaagacgtcactctagatatggtaagcggtaaaatacgaaaataacgaga

SEQ ID NO: 102705 - DNA, 460 bp, Glycine max
  unsure (1)..(460): unsure at all n locations
  Clone ID: PAT_MRT3847_63760C.1
ggaaaccctcacaattgggtttaaaaaaaaaattccaaggttaaaactttcagaaattttggtggggttataaccccctttttggggggggaaggaaaaacatgcctgccgaaactttttttaggaaagggcccccagttttttttgggacaaggaaaaaaaatgggattacaaaaaaagccctccgggggggtcaaaaacaatcgggttgggatataaaatccattggtcccttttttttggaaaggttaggggtaaatatttttttccaacccagggttggactccctggttttgggaaaaaaatttgaactgccttaaaaaaaaacgggcccaatataggtgtggcccacaggggggggggtcttaaagaggtttttatttcccagnggggctaacttattttggggtcctcccttaaggggccttaccaccccaagttgggggggttttttttggg

SEQ ID NO: 102706 - DNA, 1364 bp, Glycine max
  Clone ID: PAT_MRT3847_63761C.1
acctcgtcgccctattttccatagattgaacaactacacgatatatgcagtatctattactatccgtatagtgtttggcttcatgttcatcgcactgatctggaattttgacttctctccttgcatggtcttgattattgcttttctgattgaggggatagccatctccattgcaagggagatggcaaagccatgtcctttgccttacagctggaatgtgaagggaatatttgctactggtgttgggcttgtacgttacttggcactgatgactggttatattcttctgggcaatcaaagagacgacattcttccccgacaaatttggagttagaccaattcatgacaatccagatgaaatgactgctgctttgtatctacaagtcagtatagtcagccaggctttgatatttgtcacccgttcgcgcagctggtccttcatcgaacgccctggattgctgttagtgactgctttcgttattgctcagctgattgctacagtaatagcagtgtatgccaactggggctttgcaaggatccaaggaattggttggggttgggcaggagtgatttggctctacagtattgtcttctatttcccacttgacatcatgaagttcgccatccgctacattttgagtggcaaagcatggaacaatctcctagaaaacaagactgccttcaccaccaagaaagactatggtaaagaggagagggaagctcaatgggctcttgctcagaggaccctgcatggacttcaaccaccagaaacttctaatatcttcaatgaaaagagcagttatagagaactcactgagattgctgagcaggccaagaggagagctgaagttgcaaggcttcgtgagcttcacacacttaagggacatgttgagtctgtggtgaagctgaagggtctggacattgacacaatccagcagcattacaccgtgtaatagttacacaagaacgatgtagataacaaaagggccaaaattcaatgattaaaatgaacggagagacaaggagaaggcctaactctatttatgcttactcggttgggagaggaagcctgtgatatatctctctctcagtctgtttatctttctttcatgtcttttcagatgttttggtctaaatttttgctttgatgcttggggaaaagtggtgttagcttcaatccttgattttcatatgcttttgggtccttccctcaaccagggtggtgttaattgatgtatgtcactttgaagtggcaagtgactagacaatgagcttattgggaattttgtggttggagaataagagtttatggaaaagctttaacggcatcttgcaaacaaaaaaaaaaaaaaaaaaaacttagg

SEQ ID NO: 102707 - DNA, 159 bp, Glycine max
  unsure (1)..(159): unsure at all n locations
  Clone ID: PAT_MRT3847_63762C.1
cctatggttaacacggtcgctaccgacaaccacataactgtcagaggtagcgactggtacttcgctgtcactgcagtccatggctgttcagcaccatcgtcttcatgggtctgtcattcaagaagganagatacccaacgactattccacnncanntac

SEQ ID NO: 102708 - DNA, 311 bp, Glycine max
  unsure (1)..(311): unsure at all n locations
  Clone ID: PAT_MRT3847_63763C.1
ctggaaganntggggattggcttaactttgacttgtgttgcagnccgtggcggggaaagcttggtnaaagtttgtggtgaatctccccaatgggagtagtgtgtttcagaaggcggtgtttactgggggagtggagaattctaagtatgctgangaggttttgtgggagacggttacggcggtcacnggaagtgtgcagaggtgtgtggggattgtggcggataagtttaangccaaggcgttgaggaacttggaggtgcagtaccattggatggtgnacacttcgtgccacttcaggggtntgctanctt

SEQ ID NO: 102709 - DNA, 424 bp, Glycine max
  unsure (1)..(424): unsure at all n locations
  Clone ID: PAT_MRT3847_63764C.1
agcagttatagagaactgactgagattgctgagcaggccaagagaagagctgaagttgcaaggcttcgcgagcttcacacacttaagggacatgttgagtctgtggtgaagctgaagggtctggacattgacacaatccagcagcattacactgtgtaataaacaacacaagaacgttgtagatagtaaagggccaaaattcaatgttttaaatgatcggagagacaaggagaaggcctaactctatttatgcttactaggtagagagagaaagcctgtgatatatatatagctctctctctctctcagtctgtttatctttttttcatgtattttcagatgttttggtctaaatttttgctttgatgcttggggaaaagtggtgttagcttcaaaaaaaaaaaaaaaaaaaaaaaananaaaa

SEQ ID NO: 102710 - DNA, 187 bp, Glycine max
  Clone ID: PAT_MRT3847_63765C.1
tacggcagacgacagctcggagaccaaaaaagcacaagtctttaagttttagggagaaacaatgaaatttaggccacgacaaccatgatgtggtttaaaaagataacattaatatgcgagtaaaccttctagaatcatctgtcaaaagaacccggctagatgatatagccgacgattcgatagagct

SEQ ID NO: 102711 - DNA, 312 bp, Glycine max
  Clone ID: PAT_MRT3847_63766C.1
cctggtaaagaaatgcgtgggcgaccatgccatgtgtgttactatatgcgcatcactcgctctctactacgcaatgacaaaccctcgcgattctatatccctctaccagaagaaacctgagaaacacacccgaccacaccaaaaatctctctatctatgcgacaacgccgaacctcttccgtcctcacttcaacgcagaggcgaccgtaccgtctagaacttggcgctaggcagatcgaccactgtctacggacccggatcggctgacttacgagccctcgggccctaagcgaccgagccggcaaacgacac

SEQ ID NO: 102712 - DNA, 706 bp, Glycine max
  Clone ID: PAT_MRT3847_63767C.1
acggctgcgagaagacgacagaaggggagaggccaacgtctgtgacaccgcgaacagaattgcttcctctgatagacagctttccaagtcccccgcgggcactagtcccaactgcaattgcagcaagccttacattagttgccttcttcccttccaaacaccgcgttaagtagccattgtcttcaataccttgatcctcatccactgaggccatttcaacataaccggaagcagacccctcaatcatcttatcagacttgtgaatttcagctttgcagatactgctcatgagcataagccaccgcttagacacgtaggcacaagagctcctctctttgccactagagagccatctgaaaacctcaaaaaggcattcatcaggaaggacatcaatggtaggcttttgatcttgctctcgccctagaaattcgaacgcatccagggcattgattcgagctcgcttgctaggagtgtagtagtactcatccacaattgaaccataagtacacaggcgacccaaatcaatgggattttgacagaaggaacccccatgatagagctcatcatcacctgcaaaacccatccataaatgttaaaatcgctccaaattaacatacattatttctaagaaccaaaaaaactatccatcacacatgcaccacataaaagtcttcagtagaacattaattgcatatgtatttcccgc

SEQ ID NO: 102713 - DNA, 486 bp, Glycine max
  unsure (1)..(486): unsure at all n locations
  Clone ID: PAT_MRT3847_63768C.1
attttccgattcatcttcaatctcaatcgctcgatcgctctcgttattttttattcgtgttnctatcattagatttttgaagtacttgcttgatgcgtgtgtgattctgttttcagaaattttgaattggatgcttaggcctaccctccaccgtacgatcttgagcacttagccgcattgatccttctttgttcgttttatttaggattgtagctaattagctgtttgattttttctctctctctctctctaggnttggccgtcgactaatatctacgaatttttcactttagtttcgatttttttcatataaaaggatactaatcgtggagcatgagctctgtaatgaacactaagacatcaattacaagctcgactggtattcattcacctttgagaaacaaattagtatctagtgcctttattcgcagaaaatgactaatttgatgaatacaattggaatgatgttatatangaaattgttac

SEQ ID NO: 102714 - DNA, 270 bp, Glycine max
  Clone ID: PAT_MRT3847_63769C.1
aagcagtggtcgttctgagcaatatttgtcgatctggaatgaaccttctcgcatgctgcatgatttcatccccacaagttctgcacgttaatttgtttctgctacttctgctgcagggaagcaataaatgagtttgcacctgcgatgctagaagtatctagtgttgttggccagcattctagcacaaaacctgggctacccagaggatgcacttgaaaaactttgtgatgctggtgcatgctttctgagattaaatcactatccatgctg

SEQ ID NO: 102715 - DNA, 268 bp, Glycine max
  Clone ID: PAT_MRT3847_6376C.1
attcaacaaattaaagcgcaattcatataaattaaaattggaccaggtaaaaaaaagcatttttgctggtacttgcctaggattaaaacatacatgcaacaatctcaattaaaaacaaacggtttttcaaattatagcaaaacaaacaacagcagtttcaatcaggacagaagaaagattgtggggctcgacattctttcatggcgaatttgaccatattttcctcaaacccttcacttgttttaaaggaaccaggttgacccagaag

SEQ ID NO: 102716 - DNA, 1011 bp, Glycine max
  Clone ID: PAT_MRT3847_63770C.1
ccacgcgtccgcagaaattgccgagtctctatttctaatgttgaattgttaattattccttttgaacattttttttgcattttttccccttcctggccttcacaatcttttaagattcaatttctcacaaatgcatgcagaaaaatcgcaaatttccctcgacccatttaaattctccgcctcaatttcatgcatctcctctcacattgcttgcaatttccccccattttccatgaccaagatctagggtttctccctctgttcctccctcattcttccctttaagaagaacccattaattttgtgccacattgtttttccttccttaatgggtttcctataaagctttgaaatttaccgtttcaaccttctgggtcgccatgctcaagcaattcctcagcaaactccctcgcaaggcacccaaacccgactcggacgagtcatgccgagccgactcgtcgcgctcggacgattccccacgcgccgccagcagaaacatccgccctcccggcggcggaggctcctccgccgcgaagaaaacatcctcgtcggcggtttttccggcgagcacggtgtcgttgattgaacctttggttccttttaaggatgttccgagttcagagaagatgaaccttttcgtgagcaagctgagcctgtgttgcgtcacgttcgatttcacggaccctggtaagaacacggtggaaaaagaggtgaagagaagaaccctcgttgagctcgttgattttgtgtcctcttgtgggtcctcgaggttcagtgaacctgctattcttgctgtttgcagaatgtgtgctattaatctctttcgcgttttcccgccaaattacaggtccaatcgtggtggtgagaatgatgatgatgagccagcgtttgatcccgcttggcctcatttgcagctggtgtatgagttgctgcttaagtttataacctcaaattgtctcgatgctagggtggctaagaagtacattgaccatttcgttattttaaggttgt

SEQ ID NO: 102717 - DNA, 244 bp, Glycine max
  Clone ID: PAT_MRT3847_63771C.1
aggcaagaggcaggagaaagaagggaggcggccggaacaggagaggttgatcttgggggggaaacaggtggaagatgggcggaccgtgggtgaggataacagcgaaaaagagtttttttttgaaaggctgcgttaaggattagagggaggtattattgagccacctttgaagggaggggggaggaaatataaccaggataagatgatctggcggaagagggatgggagattaaatcgccggggg

SEQ ID NO: 102718 - DNA, 346 bp, Glycine max
  Clone ID: PAT_MRT3847_63772C.1
cttaccaacgaatattttttttgctttatcatcctacggccctagttacacttaatatctgcgatatttaatattcatctattcaaccaacacattcctcaaatgtcccttttcaagcgttacattctaagataaagcaaaattcaccaatcaaaatcctaaagcaacagttcttaacggtggctcatttaccaaaagtgatgcccttgggcggtcattcatacttgattctcatgcaacggataaacccgtcctgggcacgacatgttttactacaaccattaactagtccacaggaaacatacacgaaacaatccattctttaacaatggaccctttggttttt

SEQ ID NO: 102719 - DNA, 1162 bp, Glycine max
  Clone ID: PAT_MRT3847_63773C.1
cttcttcttcatcaccatcatcatcttcatcgatcatcctctattaattggttatctttttcttttctagattaactagctcaatctttctcatcatgtcatcaaatcaagcatcccttaaccttagccaagccaaatttgtccttccaaccaataatgaccttgagcaacagcaacaacaacaacaacaagcaacaacaactctagagattgaagctgatcatgaggatatctttgactactcaaaaagatctcaatggctccgcgctgcggttttgggagccaatgatgggttggtctcaacagcatcaatcatgatgggtgttggagcagtgaagcatgacatcaaggccatgatcttatcagggtttgcagggttggtggcaggggcatgtagcatggccataggtgagtttgtgtctgtttactcacaactagacattgaggttgctcaaaggaagagagaaaaggaaaggggacaaagtagagggagagatattcaagaggaagacaccaattatgaagagaaagatagtttgccaaaccctttgcaagcagcagcagcatcagctttggccttttctgttggtgcaatggtgccattgcttgcagcatcatttataagggaatataaggtgaggcttggagtgattgttgctgctgtgacttttgctttggtggtgtttggttggttaggggctctgtggggtaaggctccagtattgaggtctgctttgagggtcttgtttgggggttggatggccatggcaatgacttttgggctaaccaagttgattggatcaagtgcactttagtatagtttcctataatatgtaattaaggcttgttttaatttttattttcatatatgtcatgttaattagttaactgtgttaactatatgcagctatttagactctcttttcattttgtaacttaattgcacatgctctatctaccttcaaatattgaaggccctcattgtttttttgctaaaaatgatgagatgtgatgcatggggttgaagaaagttgtttaggtaattagcacaaagcgttttgtaatttgtacacatgcaatgctctttgtgtatgatgatattgataaagctttggagtttttcatttgatataatgggtgagatatcatatttgaatcggtg

SEQ ID NO: 102720 - DNA, 566 bp, Glycine max
  Clone ID: PAT_MRT3847_63774C.1
tgttcctgccccattccttgtcggaaatcaccggcccgaccatcggcgccgagcgggttaacgagaaggataacgacctcaccgcccagcaggatggcgagccccagggcgaacgcatcatcatccatggccgcgtgctggatgaaaacggtctgcccgtgccgggcattctggtggagatctggcaggccaacgccgccggtcgctacaaccacaagcgtgacctgcacgacgcgccgctggacccgaacttcaccggtaccggccgcaccgtcaccgacgccgatggctggtatcagttccagaccatcaagcctggcgcctacccatggggcaaccatcacaacgcgtggcgcccggcgcatatccatttttcgctgttcggcccgagtgtgctgacgcgtctggtgacgcagatgtacttccccggcgacccattgcttgaatatgacccgatctataactgtgtgccggacacctcggccaagcagcgcttgatcgcccgcttcgacctggaaaaaaccattccttcctatgccctcggctaccgctgggacatcgtcctg

SEQ ID NO: 102721 - DNA, 208 bp, Glycine max
  Clone ID: PAT_MRT3847_63775C.1
gggcatggacctgggagtagggcagctgaagagaaagaggtttttgatacgccaccttgctccattctacagaattgagcagcccatagtagcgactatccctgactctaattatggcaaaccgccaggcattataacagaggagagtattgaattggttttgccaaatacaggataaggttgcaggaattcggtgcaaattattctc

SEQ ID NO: 102722 - DNA, 221 bp, Glycine max
  unsure (1)..(221): unsure at all n locations
  Clone ID: PAT_MRT3847_63776C.1
ggctcgagcatatttttatantattttcaccactcttgtttacaccaacagaacccaaaaatagtgatttttaaaaacctgaggccaccaacacaacccatcatctaactctaaaggatattactcaataatatacatcctaagaagatatacacaaagtccactacctaaaaactctacatactctaatcttcaaaccaaccactctatcatcttattca

SEQ ID NO: 102723 - DNA, 261 bp, Glycine max
  Clone ID: PAT_MRT3847_63777C.1
agggatgttcgcggaggatcaagccaaggactaggcaagcctaatatgagcgaacgcgagaattcagaaatatgaaaaagaagagaagtaaaactgaactcgataatctcgttgaactcaggacaaattgaatacttaatttctcttctctctagaaacgtacatactaaacaatttctatgactatttctgcttctgcttcatatgcaaccttttagtttttgcagttgccacttcatgtcttcataccttcttctaatt

SEQ ID NO: 102724 - DNA, 597 bp, Glycine max
  Clone ID: PAT_MRT3847_63778C.1
aaaatatgatgcattttcaggttcccacatggaaacgaaggacgacagtgctgaaaaagaagaagcttggtcttctcatgaagacgaaattcttttgaactatgttcaagtccgtggagaaggaaattggagaaaccttcctaaaagagctggcttgaaacgatgtggtgagagttgcaaacaacgatggttgaactatcttaagccaaccatatctagaggaaacatttctttagatgaacatgaactcataatcagactgcataagctcttggggaatagatggtctatcattgctggacgattaccaggacgcaccgaagaagagatcaagaactactggaatacctatttgagaaaggaggcagaagagaaccaaaacaataagaacgaatttccaagcacaagtatgacaacaactagcatgtctagtgttcaatctccatggtacttccgaacattccgtaggtaccaatcccacggaatctccaaatcctgtgattagacctaaagttgtgaggttatctaagtttaatttgtcgtgccaagacaggtagcctatgaaatacacaatgaccgtgataattgtttttgcta

SEQ ID NO: 102725 - DNA, 378 bp, Glycine max
  Clone ID: PAT_MRT3847_63779C.1
actgatcataattagtgaaattttggctccaaatttggctccacaaattcaaattcaaattcaagtaaaatttgaatagaaattcaaatttccctccaattctgtgacatttaggctataaataaaggtcttgtgtgtgtattttggaactttgatgatttgagaaattagacttcaaatttcagacctcattctgcctcttctttctctctccttctcccttcactcatcttctcctaccttcaagctcttacccatgacttcttatggtggtgagcttgttcttgactcatcttctccttgaagtggcatctccaatcacctttcctccttctccattacgctacctttgatcttcaagaaacaaaagactttatt

SEQ ID NO: 102726 - DNA, 249 bp, Glycine max
  Clone ID: PAT_MRT3847_6377C.1
ggctcgagctcatacacagcttgcttcaaacatattgctaaacccacccatcgatctttggctatggggtccattgaacctaagccagctcctcctaatctcctgagctgttttaactgcaacacatcaacggctggcagaactgacggacgaagaatctttcacccaacaaatggttggcgtaaccaaagtatctccaccatcagcgaagggatgtcagtcagctgttaactatcagccaagaaactc

SEQ ID NO: 102727 - DNA, 849 bp, Glycine max
  Clone ID: PAT_MRT3847_63780C.1
cgccaatttcaataatccctggataaggtaacttttcttacaccctcctcctcctccttctctcgacccacgcgtccgcaaacaaaaaccaaaacacagagaaaagaagagacactaaccactctgtgaaatcaaaaccctaataataaaaaaatggccacacttcaagcttctcttctctccaaaccttcccttctctccaaaccttccctcccattcccattcccgttcctctctccgaaccactccccattctccctctccttcccccccatgcgccgcgtcctctccacaccgttatgctgcaccttctgcccctccgaacccaatctcagcccctccgaaccggaacacgaagccggttcagccaacaccgaagagccgggtataaattcaaccgaagaaggtgcagcttcggtttcagattcgggtttggaagaagaagaaggcgccgaggcagtgcttcggagtggcgcggattcggagaagattgttgttgcgagtggaaggctctcgatagtggtgttctttgtggggctgtgggtgaaggcgagggaccgcgtgaagaaggctttttcggagcttctcgattggtggccgttctggcgccaggagaagcgcctcgagcgattggtcgctgacgccgacgcgaatccccaggatgccgccaaacagagtgctctgcttgttgaactcaataaacacagtcctgaatctgtcatcaagtggtttgaacaaagggatcgagctgtagacagtaaaggggttgcggaatatcttcgagctcttgtggtcactaatgctattagcgaatatcttcctgatgaggattctggaaaagcttctagc

SEQ ID NO: 102728 - DNA, 187 bp, Glycine max
  Clone ID: PAT_MRT3847_63781C.1
gataaattggcttttttttttttatttttttaagaagtgtgctagcaagactcaagggcaaacaccctgaggtcccctctctatagagaatacgggcttgcacccccagagaaaaggggggactaaatgattctatcacccactaaaataaaataaaactcaacccccttctttgttcaaccgcccc

SEQ ID NO: 102729 - DNA, 235 bp, Glycine max
  Clone ID: PAT_MRT3847_63782C.1
ctcgcccctcgacaaaatgaaacactcaatgcggtctgacggctacatctccaacaatctcggtaatgggccaaacgcaacacaagccagatatgctgggtacgacgagcgaaagtcgacgtctgatcactctccgcctcctgcgaaccatgataccgcctacggcaccgtggaggaccactatgggggcaagaaactaggaatgactcgaacggcgttgatcttctttacgaat

SEQ ID NO: 102730 - DNA, 636 bp, Glycine max
  unsure (1)..(636): unsure at all n locations
  Clone ID: PAT_MRT3847_63783C.1
ctcctcctttaaaggatgatatggtttcatgtgttatggctttggaggctgctttgcttccctgtttgccagccagagaacttcaagcaatagaccgttctccccacccctcacatcaaagtgggtaactgcaagtatttcaaatttttgattttgcatttttcaaaactggctgctatgctctgctattcgagatcgataactatgcatcaaccgtgagcactaaatggcctttgaaagtttatttaattatctgacattctgatctcgtgtcaattaaagcttttaggaattacagttagaggtttctcttcatgcatacatagtgcttaaattaacaataaaatggcttaggaagatcaaggaaagatatgtctactactttatcttaagatttgaggaattgaaacaacaggaaaagcatattcattntgttgataaaaattgatggaaattggaaaatagtgttactcagaaaaacacacggaggtgaagtgtgacaaattttatggngacatatcttctaaagtgtgtcaaattntatattaagcatattcatttaattcagntgntgatggattattcaatgtgcaagtatgcgcacattgattatcttgngcaggaggcaaggtgggg

SEQ ID NO: 102731 - DNA, 1492 bp, Glycine max
  unsure (1)..(1492): unsure at all n locations
  Clone ID: PAT_MRT3847_63784C.1
atttgaagccaagaagttaaataccagattcgttgccacacccctaggttttctccctcttcatctctcccaatttctctcatcaaagtttcaacctttgataagattgaatcatggggaacgccctgagattcctctacagccattgctgcaagcccacagcagctggtgattctgaatcacttggaccacacggtgtttcctctgccaccgttggtgtttcaacacttgcccatgatctctttcactttgacatcacctcccaggtcccggaaggactcagcaagcatgttgtgtcttctaagaaggctcaggctaattggtatagaaagttagtagatgcttggaaagaggcaaaacctcctcctaagacacctgaagaagcagctagacttgtcattcagaccttgagaagacatcaaaaagcagatgttgagggattgttggctttctatggtcttcctctaccacacacactggttcaaggaactacccaacccctttcatccttgcctgatggagttcaatttgaaatgcacaccttgccggttgatgcaaaggcagtagcagatggagacactataactgtgtatgttagcacaacagaccccagggaatcagcatttgtccctggaaatgtgcatgcagcagccgtgcgaagatcagaagcgcgtgcacgaaggaactttacagaagcggatgcattgcacaaacagatcattgattcaggatatcgggtgattccggttcaaaacgaggaaattctagccaagaagtataggattcggttaaggggaattgatgcaccagaaagtgcaatgccatatggaaaggaagctaaaactgaactgaccaagattgttcaaggcaagcctttgaggatccttgtttatgaggaagatcgttatggtcgttctgtaggtgatatctattgtaatggcatttttgtacaggaaatgatgttaaagaaaggtttagcatggcactacgtagcatatgacaaacgaccggaactggaaacatgggaaaaacaagccagagcaaagcgtgttggattatgggcttcaaaaaatcctgagaagccatgggaatggagaaaggacagacgagaggctgcatgacaacacctaaaatcagactagcagcattattgccaaaagaaattgagtctagggcaaaacaaaagcccttcattcaatattagtgtatcattgttgtaacaaattgcatgtatataaaacaactgtcaaccaactagatctatttgtcaatggaatgcttggattattaaaaagtctgatattagacctcccaaacaagtttttatcaataggcttgaatacctgagataaggagagaatgaaaattaaggacattacatatattcaatatatgttcaattcattgcaatggcttaattactcagtctcaaccaataaaggttggtaaagtttgattctgttgtcgatgnnaaaccttgnnnatgggtaat

SEQ ID NO: 102732 - DNA, 758 bp, Glycine max
  Clone ID: PAT_MRT3847_63785C.1
ggatggtgacgaatctgattcagatacagaggactctggtagtgttgatgatgaatttaatgttgctgatacatgtagcagtggtgatgattttgaaagtgattcaataaactccagtaaaacaaaattgaagcgtgcaaacagtcataaaaataatatgctgaaagtatacactgaaattgatgagagccatccaggagaagcgtggttattaggactgatggagagtgaatattcacacttgaacattgaagaaagattgaatgcattggcatctttaactgatcttgtttcatctgcatctagcatcaggatgaaggattcagccagagttacagctcattgcagttctggcgtccaattacgagggtctggagctaaaataaagagatcagcagtaaagaaacctgggccactttggaaccagaaagtacacttgaattctgatccctgtgcagttgattcctcatcattaatctcaagattccatactcatgaagcttcctttggaaagggaaaagtttcctttatttcacaccccattcaatcagtgtttttgggatctgatcgtcggtacaatagatactggcttttcttgggtccttgtaatgtagatgatccaggccacaggaggatatactttgaatcttctgaagatggtcactgggaggttattgatactgaggaggtgaatttctttggttttcttattttgtgtaagagaagatatttagttacatatatggaaacatggaaga

SEQ ID NO: 102733 - DNA, 569 bp, Glycine max
  Clone ID: PAT_MRT3847_63786C.1
gaagattatttgcatcttagttgaagtagaagcgtgtaaattcaaaacactagtcatgtgactcacgggtggatggcaaccagtcaactcgcgttgactacatttcagatttctttttatgcatagtattattatatgcgccacgttcacacctcattcgactaatgataattttagagtttcaattaaagataggaaaatgctagctaacttgttaagaaatttaaaatataaatatttttattagaaaataaaaaaattatatttttattagagctgacaagcgaataaatttatagggaacaaaaatgaaaaaatattaacttatagaaataaaaaaaaaatcaaacctttaattaaatacatcaaaataccaattttacataatatctaacacacaaaaatacaaattatttggatttgtttgatggggttagcaggttaagtactgcaacctgcttaggtccctgagataagggagaaaagacactgaaggagataatttatttatttttaattaaaagaatcattaattttttttgcttaattaccgtttttattcctataat

SEQ ID NO: 102734 - DNA, 317 bp, Glycine max
  Clone ID: PAT_MRT3847_63787C.1
cagaatgcaatattatagggtagacataatcaacctttccgggttacactatattcccagggcacttacccaccttaacaaggggggaaaaactgtgcatatttaagcgtaaccaacagttctattttgaccacacgcaggccatgatgtatctcacactacttctctatatcacctgtctctatggtaaactatctatttacattaggggtcgggttcctgccgagccctggaaagcgcaacctctgtctcctctgacgtgctgtgggaggatgatttcaagcagtgcatggggcgctccatctaattccttttta

SEQ ID NO: 102735 - DNA, 289 bp, Glycine max
  Clone ID: PAT_MRT3847_63788C.1
tacggctgctagaagacgacagatggggggagaccgaaagaccggaacataaggcgggcgagagagtttgtttcttctctcttcaatggaaagcggcgaacaggttctccctttgggcaccaacgttggcggcggcgggtttcccaacgttttttcctcttcggttggttatcctgtcggggctttcggttctcgctgttgttgcctcggccaactttgttgcggaacctgaatttacccccctgtttcaaaccaagagagccgttaccatcaccatcaccagcctttg

SEQ ID NO: 102736 - DNA, 303 bp, Glycine max
  Clone ID: PAT_MRT3847_63789C.1
gtgaaggcgtggatatggaatgtgcgatgaacacgcaacacgactgccttcttccgtgcattcgccaccgtatgccgcgtcattcctgcagtcatacgatagggtgtcatgcagctcactaatacactcaacgaggagcatgagtgcaaaattcgcacagatgcccgtctggaagcattgttgatgagggaagtcaatgaatcgagactggcagactacctgagagagctacagcgtacagaggataagaaagaacgctatattgcagctctaaaacgagaaacgttaaccagggaaccttaa

SEQ ID NO: 102737 - DNA, 522 bp, Glycine max
  Clone ID: PAT_MRT3847_6378C.1
ggctcgagatcgattggacgtctcctgtttggttgacagtattggtagtagatgacaattaaattctaattatattactttgttttgctaaaacttatgaattttgtatacatgatggttacaggttcaagtgattactaggaaagtttgtgagccactagaggaagattccttcagaccaattcttcaccactacgacggccctaagttccgtcttgagctgagtgtgcctgaggtaagcatcaactttttgaatatgttactgatccttctttaattgtggatgtggtcaactaaattatgtcctcttttttttaattattatttcaggcactgtctcttctggatatttttgcaaaccagaacagtttcgatgacattttcaaagtcattccagcatagaagggtagaaattatacaagaagagaagttacgagcacaatggataatgaatgaatactgtggactcataatattagagtgtcagaagataattaagacaatgaacatatggtgggggac

SEQ ID NO: 102738 - DNA, 172 bp, Glycine max
  Clone ID: PAT_MRT3847_63790C.1
tgcggccgcgccctgatctggtgggtgctgcgaccaactccttatattcacagctaatgggggccgggggcatgtacatatgaatacctccggaggctgctatatggtcccatggtggcctgtacacgactcaaacaactacgtgggccagctgctctctctgcatctatga

SEQ ID NO: 102739 - DNA, 325 bp, Glycine max
  Clone ID: PAT_MRT3847_63791C.1
ataaggggatgctgggtaaaagaaagagaaatatgagaaggataaaaaggagaggagaaaggaaatgaaggacaaggatgacaaaactgctgtaaagaaggttttggggaaagaacatgacggtgaggatgcagaagagaagaaagatatgaacgaaaaaggataagaaagacaaggatgacaaaactgatgttgagaaggtcaagggtgaagaatacaactagaagtatataacggttaagaaagtcatggatgacaaaactgatgctgagaaggtcaaggcgtaagaagatgatgggttggacaatgaaaagaatgacgaaaa

SEQ ID NO: 102740 - DNA, 1449 bp, Glycine max
  Clone ID: PAT_MRT3847_63792C.1
tgattgggaccgaaaagatggcattctcatgattgaagctgatagacttttacgaccggggggctactttgtctggacttcaccacttacaaatgctcgtgacaaagacagtcagaaaagatggaagatcatacaaagttttgctgaaaacctttgctgggatatgctgtctcagcaagatgaaactgttgtatggaagaaaactattaaaaggaattgctatagttcaagaaagaatagttctccccctcctttatgtggcaaaggctatgatgtggagtctccgtattatcgagaactgcaaaactgcataggaggaacacatagcagccgctggatttctgtcaaagagaggcaaacttggccttccagagatcacttgaacaagaaggagcttgcaatctttgggttgcaatctgatgaatttgctgaagactctgaaagctggaaagcagcagttcgtaattattggtctcttctgtcacctttaatattttctgatcatcctaagagacctggtgatgaggaccctccaccaccttataacatgctaagaaatgtactagacatgaatgctcatgtcggtggttttaattctgcattgttgcaagctggaaaatccttatgggtaatgaatgtggtccctctgagtggactcaactatcttcccttgatccaggaccgagggtatgttggcgttttgcacgattggtgtgaggccttcccaacgtatcctagaacctatgacttggtgcatgcagctggacttttatcccttgaatttgctcagcagcgcagatgtaccatgcttgacatgttcattgaaattgacaggttactccgtccagagggttggattataattcgtgacatagttcctttaatagagtcagccagagctctaacaacaaggctaaaatgggatgcgcgagttgtagaaatagaaagtgacagcgatcaaagactcctgatctgtcaaaaacctttatttaagagacaggcaaattaattcattcatgcccagaagaaattagaccataatattcatatattcatttttcataatgttcatttattatcataatgctccgccatagaaagtggggattgaaaattttggacagaaaagaaagccggaaaaaaaaacaagaggaagaaagagtgaattctcgtcaatgataccaccacaactcctatgtagccgtaaggcatatacatgggaccttgcaattatcaaacgaggagcagagcagagcaacagaggaagaagtatactggtagatttcatttttcatgtgatgtctgattgcagttacacagacacatgatgattaagattgggaaagatggtgatagaataagttatatatttatgttttgtttgctgtagtgtataaaatgctcagcggttaatgccgccccccccccccccatattcgtatagaagaa

SEQ ID NO: 102741 - DNA, 276 bp, Glycine max
  Clone ID: PAT_MRT3847_63793C.1
tgcaaattcaaaccgggtcttggttttctgaaagatgggaaggggcaagggccaaccttattgataaatttaccaaaggaattttttaaaaccttgttaatggggaacctggtccacaccatgggggccatgggacccaacttggggctaaccaacaacaacttggggcttaccttcaaaaacagggttttcctccagctgggaatcctcaacaacaagggtttcctccagctgggtaccctcaaaatcaaggttatcctcctgctggttaccccc

SEQ ID NO: 102742 - DNA, 1108 bp, Glycine max
  Clone ID: PAT_MRT3847_63794C.1
ggcaatacaggtgctcaacccattcgatggcccacatggttttctaaaggctggcaaagccttatatgtgtttatgcacgtatttgataggttagcctctggtagagcatctattttcattctctgagcaaaccagaagactattatagaggtatccggtcgttctctccgttgaataaatacaggtgcttgacccaattgatggcccacgtggttttctaaaggctggcaaagccttatatgtggttggtttggctcttgtggttgaaggagagattgttgttggtgttatgggctgccctaactgggaggaagacttatctgagaaatcctctgctgagattgaggagggttgggattctcttggtggatcaggaactgtaatgattgctcataacggctgaggaacttggatgaaaagtttgaatagccaactcaaatcatctggtgtatggaccagatgttttgttgatggatctgacataatacataaagcacgcttctgtattccagatagtcaaacatgggaatcactgcccctgacttctttatttaatgccacaagcaatgctgacaatgtagggagcaaccaaattcttcttttgggggcatgttgtggaagtttatgcaagtatttgatggtggcctctggtagagcatctattttcattctccgagcaaaagagaagactattataaaggcatgggaccatgctgttggcattatatgtgttcatgaagctggtgggaaggtaacagactggaaaggcagcgacatagatcttgcagcggatcatgttggccggcggattatatttccctctggcggtgtccttgttgccaacggcaatttacataataagattttgcagattatcaatcagacttcaagagtttgatgttcggggaattgctcattcatcctcattattttgtgaaatgatttgtaccttttgattaattttgtttaacctttgtcacatgtattcttaaattttcatttatatgaaatataattgatatccgccattttgtagcaacatcaaacccactgcctaattcttcctgtttattaaataaaagaaaatgctagttttacattttaaaa

SEQ ID NO: 102743 - DNA, 3203 bp, Glycine max
  Clone ID: PAT_MRT3847_63795C.1
ccacgcgtccgggtaaataacatgggaaacgtgccaaatgtggttgtgttgtgtttctgtctctggaccctgttgtttcctcttgtgttctgtgcacccaacgatgggttgcgtaggattggacttaaaaaggtgaagttggacaccgatgacgttgtggggtttaaggaatttcggtcttcaattagaaagcatcaccttcagaacatccttggaggcgctgaggacaccgatgttgttgcgctgaagaattacttggatgctcagtattacggtgaaatagccattggtacccctcctcagaagttcactgtgatttttgacaccggtagctctaatttgtgggtgccatcatccaaatgttacttctcggttgcatgtttcatgcacgctaggtacaggtctagccagtccagtacctacagggaaaatggtacttctgctgcaattcaatatggtactggagcaatttctggtttctttagcaatgacgatgtcaaagttggtgacatagttgtaaaggaccaggaatttattgaagcaactagagaacctggagttacatttgtggctgctaagtttgatggtatactaggacttggatttcaagagatatcagttggatatgctgttccagtcaggtacaacatggttgaccaaggtcttcttaaggaaccagtattttcattttggttcaaccgcaatccagaggaagaggaagggggtgagattgttttcggtggtgttgatcctgctcactataagggaaagcacacttatgtgcctgtgaccagaaaaggatattggcaggttataatttttttaatacttaataatgctttctttttttacctttttctatatgttaatttttatttttgttttcagtttgatatgggagatgtacttattggcggtaaacccactggtatgtagagaatgtgttagcagaaattgataatttgttcttcctatgatgcatcattggcatttttgtaaatgggtcagagttttaatttatttggactgacctgatctatttgtctatcaggatattgtgctaatggctgttcagccattgcagactcagggacttctttgttggcaggtccaacggtatgaataaatgagtgtagatatagattgattaatgtttatgtagtattcaacaattatgggggtctttagacattgataattctcattgcgttgtttatattgcatgtgaaaaaagatctaacaaatgcttctaactagcttgtttctatgatcacatatgtggttttgttcttgtagactgtcataactatgataaaccatgcaattggagcatctggagttatgagccaagaatgcaagaccattgttgcagagtatggacaaacaatattggatttgcttttggctgaagtgagtaccatttgtaatttgttctccctgcatattttggttgattaatggtcatgagtgggtatgtttgaaagatatgattttctaataatttttcttatgtttttcgcttttgcaccttttagacacaaccgaagaagatctgttcccgaattggattgtgcgcatttgatgggactcatggtgttgagtgagtcccgaagatatttttattccttgaatctttggtcatttatttaaatagtttaatatatttatgtaaaatttccattttattatttgttccttctgcccttcagtgtggggatcaagagcgttgtagatgagaatgaaagaaaatcattgggtggtcatcatggtgctgcttgtcctgcatgtgagatggcggttgtttggatgcagaaccagctgagccgaaatcagacacaagatcagatactaagttacatcaaccaggtgagtcagttgtcttaattttgctattcaagcgtcctgctgcacctcttgatttatagcctcatgatgatagattgatattgcagctttgcgataaaatgcctagcccgatgggagaatcagctgttgactgtgggaatatctcttcattacctgtagtgtcctttactattggtggaagaactttcgaccttagcccagaggaggtatgatttcccccaaaggctcaaacctgattagttgcttttgcaatgactagtcactaaccagatttaatttaatggataaagctaaattcatgaagagcagcaggagttagagtaggggaggatcaggaaactttttatagaaaaataaaatcagaattcaagttaaagctagtacatcaatagctttacggtgtctttgcaattgcataactttacctaaagaaacacatcctataggtgccttattttccatagagtaatattatcctgacataataaatcgggttttctagttaagtggttttatcagattgacattgacatttagttaaatgtgattacgcgagtcttcttctctgttgtcctcactcagcttctattttatttattcagtacgtactcaaggtgggtgaaggtcctgtggctcagtgtattagtggctttactgctatagatattccacctccacgtggccctctctggtacttaaattgcttcaattagcgccattatatttgcctcactttttttcatcctatgttgtctttggattgtgactcaaatcactcaatggcatctccgttaatgtaggatccttggtgatgtcttcatggggcgttatcacacagtgtttgattttggtaaactcagagtgggatttgctgatgctgcatagagtgttagcgtttctcagactatggcgatccaattgctattattagtttatataaccgttgcagtcaaaatggacctaaagttctggcttgtacaggtttatattattaatgttaatactttgggtgttccataatactaaaagcttaacagatgtatctgcggctgcgaaatagtccataattggctccgtagactctatgcatgttttagttgaaagggtatagctatggttctcatgattccttgttagttccctctgttcgtcttcttttgcaagatgcgtgtatggggttatatgcgatgaccttccataatgatagtttgcttcatattaagataaaatagaaatcgaaggagtcagctttcaaatttcaagttacagatataatctatatctatatacagtattagggaaatttgtcaatcaactaaagatgtaaatagccgatc

SEQ ID NO: 102744 - DNA, 372 bp, Glycine max
  Clone ID: PAT_MRT3847_63796C.1
tcttcgcggacgcccacccggacggccacgccatcgatcacacgtgcgtgcacgcatacctctggaatgaagaaaacattgaagggagtgacatacatgggatgtgtactatgcaaaggatatgatatgtgaagaacactgcgcgggtgaatgtacataccttttcttctgatcagaggaaagatatgaagagcataggttagagggagaatatatatgataatgtataggagtcagaggcgatgttacagttttttagcattatgtcatgtgtcagagatgtaaatagtatcacgtgttgctgtagaacatgctctgcacacgtggagcattacttaatatattcagtatcactattatactgaagacatg

SEQ ID NO: 102745 - DNA, 343 bp, Glycine max
  Clone ID: PAT_MRT3847_63798C.1
agactttatctaaataaacctccaatagacatccttctcacatcctcatggcctccaagacgccttctccacgcgcgggggtcctcaccaaaacctacttcggctgctgctcctcccgagagcacacccccgtcaaaccttcatcaccctctttcttctcaggtgaaaaatatagattcaagacaaattatgattgttatacggcaaaaacgatttggaataagatttgcgtggatcgattttctgatgctttggctagagcaaggaaataggcctaacaattccctgtttaaaaaaatgttacctgttataaaatccacggaccatagatgaatgagaactg

SEQ ID NO: 102746 - DNA, 449 bp, Glycine max
  Clone ID: PAT_MRT3847_63799C.1
cactgagcatcgtctagctatctcgatcgaactgtccaaggtcctgtcactaagaatagactagacacgcacaacgcacaacacaaaaagcctaagtgttagatttacgacataatggggtagacagccacacgccaaacgtttgtggtgtaataagtccgggttcagtagtaattttgtgatgcaacatagtagaccctagaggttacttctgatgaaccaacagcggcattggctcgcccacgtggtgaaaacacttggggtttagaataaacgtaaacaggccgtggtagtgttccgtgtgcggtgcgtgtgtgagtggtcacttagcgtggtaaacagaatacacaaaaaccagcaatgaccaacgtggcaagtaaggcaggcgccaaaattatgagagcaactatgcctacattgccagcagcggaggccaacagggaatgatg

SEQ ID NO: 102747 - DNA, 1884 bp, Glycine max
  Clone ID: PAT_MRT3847_6379C.1
cacccatcatcaatctttatttaacacttgcctcctcttttttccaaccatctcttgccgcttcattcttttcttcttcaattcatatcatatcaattagatttgttttcagagtttgctagtgagataccatggacaactacaacagcaatgacttttggaaattcagtgaccagttgaggcttgaatctggtttggccaatctgtctctgaatgattattccatttggagcaacagctacagctccaagaggcctgatcagaggaggaactttgatgtcaagggcagtgatttcaacaactcatcaaagccttttgatgatgatttcaatgatggctggaagatcaccaattccaatggaccccttttctctatgcctcacaacaacaacactcacactcttgaagttggaggcttcaacaagggaggaatctatttcaacaccaacaccacttcctccttatatcctaaccttaacaacaacactcttggaggcttcaacaagggaatctattccaacaccacatcctcaccctatcttaaccttaacaacaacaacaacaacaacaaccacctcaggcacgaccctaacagaaataatctcaagggctacaagacatattttaagggtgaagatcagtttcacacacccaaaagtgccaagaagaagaacaccaccaacaacaccaacaacaagaagcatggggacaacactaataataatgatggcacaaagactggtgctgagaagaaattcaaaacacttccaccatcagagtctctgcctaagaatgaaaccattggaggctacatctttgtttgcaacaatgataccatggcagagaatctccaaagacagctctttggtgtgtcccctctccttttttttttcttcttgttttgctctctttatcaaatcttatttttcctttaatctaattcgcggttctctatattttcaataacaataagttgaatcctttgaggaattgatatgtcaagaaattcttcctttctaattctaaattgattttgctgacagatgtttcttgtgctttgtaggtctgcctccacgatacagagattcagtaagaacaataactccagggttgcccatttttctgtacaactactccactcaccaactccatggtatctttgaggtatgtgtgcgtatattttcttttttttagtctgttgttgcatcactttaatttgatgaaaatgcttttgtttttggacatcaagctatggattaggccatctcttttacctttagcagctatggtctaattaaaggcaataataatgattaaatgtttggtggggtttgttcaggctgcaagttttggaggatccaatattgatccaacggcttgggaggacaagaagtgccctggtgaatctcgtttccctgctcaggttcaagtgattactaggaaagtttgtgagccactagaggaagattccttcagaccaattcttcaccactacgacggccctaagttccgtcttgagctgagtgtgcctgaggcactgtctcttctggatatttttgcaaaccagaacagtttcgatgacattttcaaagtcattccagcatagaagggtagaaattatacaagaagagaagttacgagcacaatggataatgaatgaatactgtggactcataatattagagtgtcagaagataattaagacaatgaaaatatggtgggggacgattatattgaattccagcccttatatatttatttgttataattactataatgttattagtatagaggctgttatgcctggttgcccattttttcttgttatgggtgtatatgaacatcacataaaaacaatacaataagaaggaactaactttgctc

SEQ ID NO: 102748 - DNA, 475 bp, Glycine max
  Clone ID: PAT_MRT3847_637C.1
acgcgtacgagctcgaatcgctcccaccccataccaaccacacaatatgagcgacgaagtttacgacggtgccatcggcattgaccttggcaccacctactcttgcgttgccaactacgagggcaatggcgttgagatcatcgccaacgaccagggttccttcaccaccccttctttcgtctccttcaccgctgaggagcgtctgatcggtgaggccgccaagaaccaggctgccatgaaccccatcaacaccgtcttcgatgtcaagcgtcttatcggccgcagattcgatgaccccaccgtcaagaaggacatcgagtcctggcctttcaaggtcgttgacgacgatggatcccccaaggtccaggtcgagtacctcaacgagaccaagactttctctccccaggaagtctccgccatggtcctcgtcaagatgaaggagatcgctgagactaagctcggcaagaaggtcgag

SEQ ID NO: 102749 - DNA, 450 bp, Glycine max
  Clone ID: PAT_MRT3847_63800C.1
agggaaaccccctctttttttttcccaaggaacctattctcaatatcaaaacatgtccccctccccactacattttgttctcaccctaaataaatctcagggccatggggaacaaaagaaaaatgattaaaggggaaaaaaggaaaagtagtttttgtgacaaaataagtgctaaagcccaacctccaatacaaggagttgaaggtgcccttaatccctttaaaaaatatccttcccaaataaaaaatccttgtccccattgagttcaataaccgttggtttggttgttcacaaattcttaaaaaacactttttttttctgccactgttaaaaggaaatacccgttttgtgctccaaaaagtgtggttgtatgtttcaacaaaaggggtttagatgcctgctcctgatttccaaactgaaccaaagcctgttttttcccgttcatcctaa

SEQ ID NO: 102750 - DNA, 313 bp, Glycine max
  Clone ID: PAT_MRT3847_63801C.1
cgcaacccatcactctttctttcttcctcttccccccaccgcctcccttcaccaactctcccctcttcctccccccacacactctctccctcctgcctccgtccttcccccccctcacaggcttctccccaccgctccccgcagccgcggccctcaggggctccccagcccccagcctccaatccggccccccaccgtcgcccccgcacgcaccgtcgacaacggcgtccccaccagcctggccccccccggcatggccaacgcgatccccacctcctcggcccacgctccgtcgccaacgcggttcgcacca

SEQ ID NO: 102751 - DNA, 359 bp, Glycine max
  Clone ID: PAT_MRT3847_63802C.1
ggaaaaaggcgggccgccttttttattcccccggggaattgaaaaggggaattggcttagcggtctttaacataaaaaggcggaaagaaaaaaaaaggggacccccccccccaaatttggggtggccaccggggtccatatggaaaagcccccaccccaaaaaacccttttaagttttcttggaagaaaaaaaccgaaattttttcccccccgtttttaatttattggggggggggaaaccccctcccttcccttggggggaacaccggatttaatttggcccaggaaattttttggcttgtgcccaaccttttttggccttagcccgcccaggggggtctacctttaacaaaataaaa

SEQ ID NO: 102752 - DNA, 678 bp, Glycine max
  Clone ID: PAT_MRT3847_63803C.1
attctctgaaaaattaaatcccttgaagtatttatgaacttgtcataaagggactaattggtagttactaaaaaatgaaacaaactgtcttctttaaaattattcctaggggattaggtttttagctgcagaggtcctagcactatgtagaagaacatactttaaatgtttttcaaatgtccaagtactgtgcatattttgccaagggaaaagaaaataaaaaatgggctaagatgatctggtagcattatatatttatttgaacctgtttgtacgctcacttcctaatgtgtctgccaattttcagtttctgaaatggagtccacaattttcagttgtccttttaattgaaaacttgattgagacacaccaaatatgcatgcattgatattttattaaaaaaaatagaggaacactagataagtaataagatcttggatataagattaaggaaaatggaatcataaagtgggctgcatctgtcggaaatattttttaatcccattccttcctatttaatttattttctaaacatgccaacaaatatgacttattaggaaccttcaggactacaatagattgaaaacttccatagttatctttattagtagtatacaaatattggcttattggtcatgggttcgaatccggaaacagcttctttgcatatgcaagggt

SEQ ID NO: 102753 - DNA, 469 bp, Glycine max
  Clone ID: PAT_MRT3847_63804C.1
atttgtacttcgcattagaagggacataacagaggatcaacgccaagcttttctcgtagttgctgctcttattgcaaccgcaacttatcaatcagcactaagtccccctggtggagtttttcaggctaatgctggaaacaacgataataataatgttaatatcacttcccccaattctacgactattgctacgcaaggaattaatgctgggacttctgtcatttctgaaggtgatttcttgaccttatcaattctcaattcactttctcttttgatttcaaccgtaacaatctacattctcacgccaagtgggatagtgggtactatattgttcacgccaatgttttggtttgcctactgctatctctattctataagggtaatatccccgactaatgctaccaaaaatttcaatttggttatgctgtgtttattctcctccttgtactcgggggtagggtggacattt

SEQ ID NO: 102754 - DNA, 556 bp, Glycine max
  Clone ID: PAT_MRT3847_63805C.1
aggttaagagatgccctaattcccatgccctggtgccctcacacggcgataactctctactaccttaatcatatgatgtaattgacaatgaaccactcatttgctaacgtgcgaccctacgcgagaccatttacacgaaaatggaaagtccgtcaacatatcataagctccaagggcattgtccagttcttgacaactttcacacatttacaatccatcatacattatgcgaccatatgatactatttcaccaacccttgacaacgagcaaggactaataggacaacaaacctatcattgctaagagagtacgaaccatgcaccaacaaccccttgtggccaccctgataagatctagaacaccccactcccactggggcccacgatggccaccgaaaaccaggttaaactagaactattccatgctagtggctgcatgtctcatgcctcaacctcaccggaaaagaggccaccacccatgtgaccttggggggtaagatcaatttcccgaccatacacagacatgtgattgccatcagatggcactgccaaacac

SEQ ID NO: 102755 - DNA, 411 bp, Glycine max
  Clone ID: PAT_MRT3847_63806C.1
ggctcgagcttgcgatactacactacacatgctcttatcagaaggagaaaagaaaagaactggatgagtgatgtttcctacattcacctgggagctggagagcaccactcatgactaagctctgagacatggctgtccccgtgttgatatatcctagctctgcatactactcatatatagagtgtgctatgatgctctagaagcaccacaacagacccctattctgctttttgattaacgggagatgatgatgatgatgaatacggaagacggttaatactgcgtcattctaacactagctctaatggacgcactactgtccataaccgtgcgtggctgtctgctctgcgactgctcaacagtgtgcgtacagcaaccccagtttccgtacatgcaccacatgttcggata

SEQ ID NO: 102756 - DNA, 268 bp, Glycine max
  unsure (1)..(268): unsure at all n locations
  Clone ID: PAT_MRT3847_63807C.1
gaagattctggtgaatgcgtagaataggaaactgaagaaattagcgtgacaaatgtcgggtgtgtccagcatctccatagggtcagtcgncggaggagctcgttgacgtcagcagacgtacacacgtcgacgacgattaccgatgatgttctctctatgctgcatcaggagaagaacccgtacatggtgtcggcagacgcaggagagcattttcagacaccttgtattgagaacaacttagatggcaagcttgtctactgcctttata

SEQ ID NO: 102757 - DNA, 152 bp, Glycine max
  Clone ID: PAT_MRT3847_63808C.1
gccagtggtccggctcaagagtttgggtctctctcacttgagtgcttataagctttatttccctctccagtctgtctaagtgacccttctattccttatttataactggtgaccagcactatacacaatgatcatagttcggactatataat

SEQ ID NO: 102758 - DNA, 1797 bp, Glycine max
  unsure (1)..(1797): unsure at all n locations
  Clone ID: PAT_MRT3847_63809C.1
gccgaacatgacagaagaaactaatattggagaaccacttttaaagaaacagtactatgagaactgccctggttgcaaggttgatagagccaaggagctggaaaaggatgtctccattcgaaatctcgtccatatatggattgtggtgttgtgcggtgctcttcctgtttcttctctctatcctttcctttatttcatggtgaaggattttaatattgcagaaggggaggaagatatcagtgcctatgctggctatattgggtctgcattcatgcttggtagatgtttgacatctatgttgtggggaatgatagctgatcgctatggtagaaaacctgttgtgattataagtgttatttctgttgtcattttcaacatactattcggccttagtacaagtttttggatggctgttattacaagactttttcttggatgtttaaatggtgtgatgggcacaatcaaggctttttcttctgaaatatttcgagaagaatatcaacctctgggactctcaaccgtctctgctgcttggggagtaggtttagcacttggcccagcattgggaggttatttggctcagccagtagaaaaatacccatatttattttcaaagggttccttttgggataggtttccctacttcttgccctgcttggttatatcaacttttgcattttccgtagcaattgcttgcatttggcttccggagacaaatcataaccacaatcctgaagccttagaaatcagaagtagggcccccgacaaagacaaggtggtccaaaacaatgaaagtgtcttccgaaattggcctttaatgtcatctatcattgtttattgtgttttttcacttcatgacaatgcttattctgaggttttctcattatgggctgtcagtcctcgatggttgggaggtttaaactttacaaccaacagtgttggtaatgttttagtagtttcaggttttgctattataatcttccaacttggactataccaatcaatacaaaaaacttgtgggcctgttagccttgctcgtatctcaggggtgttatctatacccatcttgcaaagctaccccttcatgacaatgnnnttctgcttcacactgtatgcagcgatatatattgcttccattctaaacaatgtgattattgagataattacaacttgtttattaattttacaaaatagagcagtggaacaacaacaaaggggaatagctaatggcatttctatgactgctatgtcagcattcaaagttattggtccagctgcaggtggtgcaatattaacatcttcccaaaagcggttaaatgctactttcctcccaggaacacatttgatcttcttttctctcaatgttgttgaaggacttggagtgttgttgacattcaaaccattcctaacaataaagaaactgcccttagagctattaaaatgatattaataaaattagcataaagggtgaagcatctcaagttcaattttatgcataaaggctgagattagagtaattacggatgactgttgttaatggatgttaagaaattaagtgaaagatgtaataagcaaaatttgtcagacaaatctacagaaatactcaattgataccttttataaattttgggactaaattgcgctatgttggatatttatttcatgtgagtttgatttcaatgagcttttagtcaggtgaatgtatattgaaaaagaattttagtgtaagtttgagtgccaattgattgagtttgaaattttggggctaaatacccaaaaatagattataaacaacca

SEQ ID NO: 102759 - DNA, 488 bp, Glycine max
  Clone ID: PAT_MRT3847_6380C.1
cgcatcgcacgcgtacgtaagctcggaattcggctcgaggagccttctttctttttctgttttcatggcatcaagcaacaacaacattcaggcaatatctcgcagccgaaaacatcaaaactcagccgtgacgatcgcccttggccgcaggagggggacccacaagaaacactctggtggtggtgatggcaattgcagttccccagttgtgaattcttgggaaggtggttccaagaaaagtgaggtttctgcgaggaagctcgctgctgggttgtggcagatgcagtatattcaagtctcaagggatcatcatgctgctgttttggacacaagttcttttctttcctccatgtcccagctggctaatggaaatgcaagatcaaggtttcccattatgaccaacctggtggaaaggtttaagaaaaccagggtccagttaaggaggccattacccattttgcgttcaaaaaacggacttcgatctgagc

SEQ ID NO: 102760 - DNA, 107 bp, Glycine max
  Clone ID: PAT_MRT3847_63810C.1
cacgattacacggatgatgcgcttgaacatcgtctcgtagggctaagcttgctttacgagagtcaggtgcagcaattccttgagaggggctacaacaatgcactaac

SEQ ID NO: 102761 - DNA, 641 bp, Glycine max
  Clone ID: PAT_MRT3847_63811C.1
cgggggttgcaccctgcgggtcccgctgctccgaggcccttgaaagatcggttcgtgcttcgccccgcgtccgcgcacgcgtccggaaaaggagaagcttgctcccttatcaatacaataactagaaatctagaatggctttgaagcttgtaaatctagggtttcactcatcgattccgtgttctccgaggcccttgaaagatcggttcgtgcttcggtcttctaaagtggagcaaatatcgtttacggaatctgagaactcactcatcgaagcccttcttggcatccaaggacgcggacgttcttcttctcgtcagcagctcaatgctgttgagcgtgctgttcaagtcctggagcggttagggggtgtacctgatccgacaaaatcaaacttgatcgagggtcgctggcagctaattttcaccacaagaccaggaactgcatcgcccattcagagaacctttgttggggttgacttttttagtgtatttcaagaggtttatcttcgaacaaatgatccacgcgtatgcaatattgtgtcattttctgatgctattggtgagctcaaagtggaggcagcagcatcaattgaagatggaaaaagaatcctttttaggtttgacagagctgccttttctttt

SEQ ID NO: 102762 - DNA, 1676 bp, Glycine max
  Clone ID: PAT_MRT3847_63812C.1
cccacgcgtccgcccacgcgtccgcccacgcgtccgtgctatgtagctgccactagtactcattcttctctcatcctcatcctcaacctcaagtctctaagtaattagcacctcaactcaaattaaaacaacatcatcgctagtttgctagctgctaattaacacccattaattcttgttggtcaatactaaacagtactaaacatgggtgtctgctttgcttcgctcgctcgccaccaaacaccctctaaatccattccctacgcaggttcagggcgtgagtccttggggagcaaggatgagaatatggggattactgaaagcactagtagtgttaatggaggaagctgtagtagtcatagcagcaagaacattgtgtttcctagcgtggaagtgcggaacctgaaggagttcagttttgcgaatctgaaagcagccaccaagagtttcaaatcggatgcattgcttggagaaggaggtttcggaaaagtatacaaaggatggttggatgagaagacactggcaccgaccaaagctggatctggaatcatgggtgctattaagaagttgaactcagaaagtttgcagggctttcgtgagtggcagtcagaaatcaatttcttaggaaggatttctcacccaaacctggtcaagctattgggttactgttgtgacgatatcgaatttctccttgtgtacgagttcatgccaaagggaagcttggagaatcatctctttagaagaaatactaacagtgaaccactctcttgggacacccgaatcaaaatagctattggtgctgcacggggcttggctttcttacacacctcagaaaagcaaatcatatacagagatttcaaagcctccaatatactacttgatgaggattataatgcaaaaatttcagattttggcttggcaaaattaggcccttctggggaagattcacacgtgagtaccaggatcatgggaacatatggctatgctgctccagaatacattgcaacaggtcacctttatgtaaagagtgatgtttatggttttggtgtagtgctgcttgaaatgctgacagggttaagggcacttgacaaaaaccgccccatagagcagcagaatctgattgaatgggctaagccttctctctctgataaaagaaagttgaaaagcatcatggatgagaggatagagggtcagtattcaaccaaggcagcattaaaatcagcacatcttattctaaaatgccttcaatgtgaccgtaagaaacgtcctcacatgaaagatgttcttgacacattggaacacatcgaagctatcaaggacagaacgaagtaatccaagaaacattgtactaagtttgcaactatgtgcaatttccaatagccaatttatcatccttatgtgttgaatatgacaaggagctccaacatgtgtaggctgtagctagcatactagtcacagttcaagttcagtgtaactactaactaacttggcttacagttattataggtagttagacctgttactgcatgagtgtgtttgtggctgtatttgagtagtcgtacctctctcattctagctttgttcccttgtcaataaaaatgtgtagctcctacttggatcatcatcttttcatttaattcaataaaatgagttacttgaattcctctcttgttctt

SEQ ID NO: 102763 - DNA, 900 bp, Glycine max
  Clone ID: PAT_MRT3847_63813C.1
gtctcggccacgtcattgacaaactgtcagtgagctttggcctagagatccttaaggttgtgccgggctacgtgtcgaccgaggtcgacgctcgtctgagttttgacacagcagccacgatcgcacgcgctcatcgcattatcgatctgtacgagaaggctggcatcaagaaagatcgcgtcctcattaagattgccagcacatgggagggcattcaggcttgcaagcacctgcagaaggagggcatctcgtgcaacatgacgctacttttcggctttgcccaggccgtgggctgtgccgaggccggtgccactctgatctcgccctttgtgggccgtatcctggactggcacaaggccaaaactggcaagtcaagctacgaatctcacgaggatcctggtgtagtatccgtgaccaagatttaccagtattacaaaaaatacgactacaagaccattgtcatgggtgccagcttccgtaacactggtgagatcactgaacttgctggctgtgatcgtctgaccatctctcctggcctcttggaagagcttgccaagtctaccagcaaacttgacaagaagctggaccccgagacggctgccaaggcgtacacaggagagaaggtgtcgtacgatgagaagggtttccgtctaagcatgaatgaggacgccatggccacagagaagctcgctgagggaatccgtggctttagcgccgacatcgtcaagctcgagcagatcctcaaggctaagcttagcgcttgagcaagaaaagttctcgagctcctacgcgcggctgccagtactaagcgtagtgatggaaacgaattggtcaacttggataataggtggtttggatgcatctgtacacaagtaatgatcaaaatttaatgacaaaaac

SEQ ID NO: 102764 - DNA, 1310 bp, Glycine max
  unsure (1)..(1310): unsure at all n locations
  Clone ID: PAT_MRT3847_63814C.1
cccacgcgtccgtgttatgtagctagcacttgtgttgtgtcttttctcattcctcatcctcaaccttacgcagcagccattcttgtagaattcattttctcgaaattggttaattaagttaattaacactaaacactaaacatgggtctttgctttgcttccctcgctacccaccaaacaccctccaataattcccctcactattcaggttcagcgcgtgagatgggaattactgaaagcactagtgttaatggaggaagcagtagcattaatagcaataacatggtgtttccgagtgtggaaacgcggaacttgaagcagttcaatttcgcggatctgaaagcagcaaccaagagtttcaagtcggatgcattgcttggtgaaggaggttttggcaaagtttacaaaggatggttgcatgagaagacactgacacccaccaaagctggatctggaatggtggttgctgttaagaagttgaactcagaaagtttgcagggctttcgtgagtggcagtcagaaatcaatttcttaggaaggatttctcacccaaacctggtcaagctattgggttactgttgtgacgatatcgaatttctccttgtgtacgagttcatgccaaagggaagcttggagaatcatctctttagaggaaatactaacagtgaaccactctcttgggacacccgaatcaaaatagctattggtgctgcacggggcttggctttcttacacacctcagaaaagcaaatcatatacagagatttcaaagcctccaatatactacttgatgaggtctgttattttccttacttcctctctgttatatttgatgagtttatgaatttggaccccccatttgtgtttaattataaaccaaacttttgctagattttttttttatcgacaaagagtttgtttgaattttagttttgttgccacaggaatcgatcctgtgacctctttcctttttggttctttcttaaccatctaacgcactttatatcttcccaaacttttgctagagtgttagctgaaaaatgcaaattagagtaattatatactaacagtaactccacaaatctcactggtaaccaattaattggttatcttttggcaggattataatgcaaaaatttcagattttggcttggcaaaataggccccttctggggaagaatcacacgtgagtaccangatcatgggaacatatggctatgctgctccagaatacattgcaacaggtgataatcttatcttcacatgcatataaatggatgcntttcaaagaactactcattgaaacttgg

SEQ ID NO: 102765 - DNA, 653 bp, Glycine max
  Clone ID: PAT_MRT3847_63815C.1
aggaatttgagagtgtgatagaggaagcaaaaacacccatgttaaggttgttatctagtgggtttgggttagcattaatgatgaataagccaattgggttattaggtactgatgctaacgttaagagtccaaaatggtcagagaagttcaacgatgtggtcaattttaaggatgttgatacggtacaacatagtcatccactgccaccgaggccaaggcagcatggtagtattcataaaaaggctttcaatgcttatgaatactattggaggaccaagcctacgacaaaagttgctcctgcttctaacacgtttacctttcaacacaacaacaattactcttccttggagaacaatttgaagagttgcaaggattctaggaggtcttttctgatctgggaaccgtattgcattgccacctgatccgagtctcaaatttggtcacattgctaattaaaaactttttacttaactcaaatgcttttatcactgtggcattttctccctacccagttccactcattcagggagctgtagtcgaactcaaataataaaaaaatggagagggtgaaaagggatagtgagagagaatactttatttgtaattgcaatagtaagattagaaaatgagacaaattacttggacagtgtcaa

SEQ ID NO: 102766 - DNA, 406 bp, Glycine max
  Clone ID: PAT_MRT3847_63816C.1
ggtggggaaaccaatgaaaaggggcaaattgacaacccccaaaagggggtcagggagcgaaaaaacttaaaaaaacaggcgccaaaaaaaaaaaagtgccgcgccccccccaaaattttattgtggggggcatattaaggggaaagaaaaaagacgccaaaatgggcgccccgggggggaaggcccccccacccccttttgaaaagggggggggaagcctggtggcaaaaaacatttacaaccccacccttgggagaaaaggggctaatgttagggacagaaaaaggggggcggcgggccttaacaaaaagcggcaaaaaaaaaaaaggggggggcaaaattttttaaggggggagatatacccaggattcacaaggggggggggggataaaagtaagaagggggg

SEQ ID NO: 102767 - DNA, 305 bp, Glycine max
  Clone ID: PAT_MRT3847_63817C.1
aaaaacccaaataagaaacccttttaattccctggggggaactttaaattaaaatttttttccttggggggttcccgggggggaaacccaaaattaaccctttaaaatgggccggggaggggttaattgggcccgggtgtttttacccttttttttggtgggaaaattgggccctgttccctatttgatttccccaccttttgtttgtctgcccgaaattttgaggttctccaccatggggggggggttaaggaaattttttttccccgatcttttgtggggggaggggcccgctttaaagagag

SEQ ID NO: 102768 - DNA, 262 bp, Glycine max
  Clone ID: PAT_MRT3847_63818C.1
cgtagaatctacacattctgtcgaattcgagggcctaacaattttaactagctacctgatcctatcggcaacatgaaatttgatttttctcatcgcacccctaacaattggatgctatgactgatttggataaacactcttgattgtatcaagggattcagaaatcagaccttaaaggcaagctattgttttaaccatgcgcctaaattctacctccaaaccattttctatgcttatactgggattgataaaagcctccaat

SEQ ID NO: 102769 - DNA, 526 bp, Glycine max
  Clone ID: PAT_MRT3847_63819C.1
ggttcaagatgctgatgatgtccctcacaaagatggaaatacgcataggctcgcaccagagggaccagatcctcatcataattttgcaacaccaccaagaaactaaagtagctttgtttggagtagatttcgattgtgcatgcctcatatagttgtgtgagttaattatgagatcgatgcacggtttatttttagtatcttttcttcccttatttaaacttcgtggtatttttaaataaacctacttgttgctttcgaaacccagtgttctagagcatatatatgtaggtgaagtacgcatcatttttgtttgtgttatttgtcggcagtagtagttgtatggtatctctgtttctctcttttctacgttctttttcctccttttctgctgtatttttgccctttctactgttagaggaagtacaagttcagtgaggaggctaagtgtcaggatttgtcatgtatggcaataatatatatgtcacttttcttactcatatatggaatctgcctattttatttttaa

SEQ ID NO: 102770 - DNA, 913 bp, Glycine max
  unsure (1)..(913): unsure at all n locations
  Clone ID: PAT_MRT3847_6381C.1
ccacgcgtccgcctccacggtacagagattcagttagaacaataactccagggttgcccctttttctgtacaactactccactcaccaactccatggtatctttgaggtatgttgtgtgtattttcttttcttttcttttttttttagtttgttgcatcactttaatttnngatgaaaaatggcccttccgttttttttggggaaggaatanccaagaggttttttataggggggattttaaagggggccccccaatattccaaaacctttttttttaaaaaaatattttttaaagcccaagacgtttgttcaggctgcaagttttggaggatccaatattgatccaacggcttgggaggacaagaagtgccctggtgaatctcgtttccctgctcaggtatatatcatctcatctccaatcaaattaattttattatatctatgcacaaattatgctaatattaattttataaatttaattaaaatgtactgatgctgtaaaagtaaagttttatattgtccttcaaagtaaagttttatattgtccttcagtcaattgatatatcacatatcaattgaatgatttctgattaaatggcaatattgacggtacatgatgattaaactctaattgtattattacttgattttgttataaacttatgaattttgcatacatgatggttacaggttcaagtgattactaggaaagtttgtgagccaatagaggaagattcctttagaccaattcttcaccattatgatggccctaagttccgtcttgaactgagtgtgcctgaggtatgcatcaacttgtggaatatgttactgatccttatggtagatgatgtggtcaactaaattgcgtcctattttttttattatttcaggcactgtctcttctggatattt

SEQ ID NO: 102771 - DNA, 489 bp, Glycine max
  unsure (1)..(489): unsure at all n locations
  Clone ID: PAT_MRT3847_63820C.1
gaattcggcaccagctagagaggacaaaattgaaggagtgaagttgaacatacccattttccatggggaaaagtgatccaaaagcttatttggagtgcgagatgaagattgaggaactgattgcttgtcacaactatataaaagataaaaagatgaaggtggcagccatggagttcactaactatcctcttatttggtgggaccaactataaaaagagaggtcaagatttagagaacccttgatgaatagttgggaggagatgaaaagattaatgagaagaaggtttgtttcttctcattatcatagagaccttcacaacaagcttcaaaggctcacacaaggaaacaaaaatgtagatgaatattacaaagagatggaggtttccttgattagagctaatcttagtgaagattgagaagctactatggtgtgttttgataactgctaattatgagtctatttnnaggttaaattatagatgattttgt

SEQ ID NO: 102772 - DNA, 542 bp, Glycine max
  Clone ID: PAT_MRT3847_63821C.1
gggggttgttttttttttttttttttttttttttttttccgaaaataactcagttttaacaataacctccaaaaaggagttcagtttcaaaaatttaatctttgcaacctacaaaaagctaaaaatacagctccggatgcttattacattgaaatggggggggtggggatatttatatgtttaattagcataaaatttttgaggttgcttaggacaaggggatttccaaggaaaacattgtgggttattgcaagattctggccatttactagggggggggccttcaaccccatcacaacacttgcatacaactccagggggggaaaaaatttttgagtcccctgttttccatgggaagacaaacttttatgcatttcctttagagcagggattccagcggggggaatgttcaccaaatcgcagcaagtggaccaatttccacagaagcaaacggtactccaaagaatgctccagcgcatgcaagaaagtctattttatcaaccttccaaattttgaaagcttcactgaggtcaatgagtcct

SEQ ID NO: 102773 - DNA, 909 bp, Glycine max
  Clone ID: PAT_MRT3847_63822C.1
gaagaacgaccttttctcacccggaacgaagccggaaacgcgagtgtagttgtcgcctcggttgaacaagtttcgccgtcgtcgttgttcgatcgcaacctctcgaccatttctgccaccgtcaggtttccgtgcattgaattggtcatgattgtttaacaaatatttgagtctcaaaatggtgattctttcctcgttgccactgaactattcagctttccttcgtcaaggtactccttttctgccatcaaagtttccagcaagagttgattgtcacagaaatgtttctcagacatcacaaacgatttttagaataaaaataagagaaaaacatgcaaactatagttgcaccaaatttgtgacctctgctgcaaggaatgatcatcatctaagctatgatgatgatttacctcaggagccctttttgctaacattgatcaaggatgccatatgggggctaagatatatatttgtatttttggctgagcaaccaagccagtttaaatacatagagtggccaagctttagtagtacgctgaggaccgcaattctgactcttatacttgttgcaatgcttattgttgcattatcatctgttgattcggctctcagctatctattggcttttgctcttcggaaaagaccataaccgtgtggtgtgcctatgtcaccacgtgtaatatgttgatttctgatgcttgtaatctgtttagctctatcctcatatacatgtaaatcttgactcgtatgttgaactggaaaggattaagctattcaagaatttttttattaaatcagtgaattaaaaaaaaaaaaaacataggatcttgttaattacatggaaggcaactgggtatttcagtataacaatagtcaactataaatcaattatagataactaatgaaagc

SEQ ID NO: 102774 - DNA, 479 bp, Glycine max
  Clone ID: PAT_MRT3847_63823C.1
ccggaacgaaacgcgagtgtagttgtcgcctcggtagaacaagtttaaccgttgtggttgttcgccgtaggcgttcctagcatcctctcagccatttccgacaccgtcaggtttccatgcattgaattggtcatgattgtttaacaaatatttgagtctcaaaatggtgattctttgctcgttgccactgaactattcagctttcctttgtcaaggtactccttttctaccatcaaagtttccagcaagagttgattatcacagagatgtttctctgacatcacaaacgatttttagaataaaaataagagaaaaacatgcaaaccatagttgcaccaaatttgtgacatctgctgcaaggaatgatcatcatctaagctacgatgatgatttacctcaggagccctttttgctaacattgatcaaggatgtcatatgggggctaacatatatatttggattgttggttgagcaacctg

SEQ ID NO: 102775 - DNA, 583 bp, Glycine max
  Clone ID: PAT_MRT3847_63824C.1
ctattggttttcccttcgtggctacgcgggcatttgtgcaaccaatcaaccgtgtaccatcacctcgcttgtacgcctcatcctgatcagtcgccatgaaaattctgaccaaggaagaagcagaagccgcctaccatgaaacacttatgggtggtgcccaaggtgcagcttatggtttggtcggcgcaattgctctatcacttgtgctgcagcgtacttcacgcggttaccgccggctgactctgccattgaaagtattttttgtgacctctctcacttcggcaacttgtgtcatccaagcagagcgtcgaatgctccgtcacggacgaatcaagtaccaccacaaacgagcgatccttcctgagggacagcatcagcaagacacattagctcataaagagatcgcccccatcccttttcgacagcaagtgaccgattttgttaatgagcgccgatggctgatgattggtggaacttgtgtattagggatggcggcctcaggagcatacctctactcacgaaaatacatgaattggcaacaaaaacttgttcaggctcgaatgtatgctcaagcgatcacttt

SEQ ID NO: 102776 - DNA, 151 bp, Glycine max
  Clone ID: PAT_MRT3847_63825C.1
taccggtgccaaaagaccaccgaaaggtaccggttccagaagaccacagaaagataccggtgccaaaagaccacagaaaggtaccggtgccaaaagaccaccgaaagggtaacggttccggataccacccgaagggaattcttttcctccc

SEQ ID NO: 102777 - DNA, 544 bp, Glycine max
  Clone ID: PAT_MRT3847_63826C.1
ctcttaccgcatcgccgtttttttacttgttcttgctactctatccctgctttatgcatactgcatagtaattaaaggataatagcttatcatgggctgctttgttatgtgttcttccgactacagtaattggttctgccctgatcaatccttacctgatgaacttggaaccagatgattgactctcgcagagtcatcatcaccccatgcccttggcctcgagataattgactgccatgattcctgtgatggacttggaatgtgtgattctcttgtcacttgggctcctgaatatgcattcttgtattacccaccagatgcagcagctcactcagatactgacctgcctgcatggtagaaggacgctgagcataacggtcatggctactgaaaagaaacctcttgctgacctagattgctcacatctgattatctcatccattcatgctcctttatcgttggaacagtcctgctctccatgctgctgttcatctagtacaactatctctatggggcgttattgctgaactgtcccactctatct

SEQ ID NO: 102778 - DNA, 452 bp, Glycine max
  Clone ID: PAT_MRT3847_63827C.1
tcgaactgtccaaggtcctgtcactcctcactgacatcgccagctccgccatgttcaccccaccatcatcagttatcgccgccgcacccacccctatatcacccggagttccggtgctcgtatcaccccccaaatttgaagtctcgccaggtcaacccgccattttatgtgatgatctagtcccaacccctatcgcaactgctcacgcgggcgccaagcgtgttaatgcaacgctcgcacccatacccaaccacaacaataggggtcggcgtctcacacgcagtatcaataggtgctgccgtgttcgtgggggacgggggcgtgtgggtagcaagcccgacgtgtggagcagctaggagggagttatcagtgactgcgatggggagcagggacggagcataacgttcaacaaataacacttcctgccgacttgcggatgcgatagagagggg

SEQ ID NO: 102779 - DNA, 483 bp, Glycine max
  Clone ID: PAT_MRT3847_63828C.1
aaaattcattagaaaatttattcggcacttccggctccaatgttgacaccaaggaatgtttgaagtgaatcgtacaacaccaaaactaaggctgaaccaacggttcttagagcgttggcaccagctcccttgaacaaggcgttcataccctcgtccttgataaccttgtttaagcagtgagcagcacccttgtatacccattgttcctttggcttctcggactgcatttgtagacgacgacggacagtgtcgaatgggtatgaggcataacctgcggcgatggcggtggtttgggcaacagcgaatctggcggcgaaaccgattggtgacaagtcggacttgtatgggttcaactcacgaagagtatcgtatagaccaaagtagacaccacggtatggaatgatacccatgacggatacaccgaaaccattgtataaaccaagggttcctgatggacctctggcagtctttgacaagcacccc

SEQ ID NO: 102780 - DNA, 732 bp, Glycine max
  Clone ID: PAT_MRT3847_63829C.1
aatactttggagggtttgagcaagaagactacgaaccaactattcaatgctatggcggcgaattacaaggcatggtgctcagggtttgctccgatggccattggcggggatatggagtcggtggcggtgcaggaattcagccgaaccttgttcaacatgagacccgacattgcgctgagcgtgttgcagaccattttcccaagcgacatgaggcaaatcctgaacctcgtcagtgtcccatgccacatcatccaaagcatgaaggacttagcggttcctgttgtggttgcagagtacctccaccaacacattggtggcgactccatcgttgaggtcatgtccacggagggtcatttgccgcaattgagttcgcccgatatcgttgttcccatgttgcttaaacacattcgcctcgacattgcaactagacattgaaaaagttcttacaaatttaacttatgaatgaattaattttaattcttgaaaatgtttacgaatttcattattttcttcgaagtttaaacaaatagagtcatctatgattgatggtgtggtgtggggagtccaatattggggtttgagaaaaaaaaaaaaattggagcgtgtccatttcgaaaagaccaaaagaaatggggatgggggctcgtggtttcatcgatcttgtgtattgattgatgttagttggttgtatgccattgaattggggtaagtgatgcaatttattaatagtgg

SEQ ID NO: 102781 - DNA, 729 bp, Glycine max
  Clone ID: PAT_MRT3847_6382C.1
caagcctttgaggctgcaagttttggaggattcatctttgatccaacgggttgggaggacaagaggtgccctggtgaatctcgtttccctgctcaggttcaagtgattactaggaaagtttgtgagccactagaggaagattcctttagaccaattcttcaccattatgatggccctaagttccgtcttgaactgagtgtgcctgaggcactgtctcttctggatatattttgcaaaccagaacagtttcgatgacattttcaaagccattccagcatagaagggtagaaattatacaagaagagagaagttacaaggacaatggataatgaatgaatactgtggattcatattattagagtgtcagaagataattaagacaacgaatattgaatttcagccgtcatatatttgtgttataattactactataatgttatttgtatagaggctgttatgcctggttgcccatttttttcttgttatgggtgtatatgaacatcacataaaagaatacaataagaaggaactaactttgttcatgattttttttgcaaaattacaaattcaacggaatggcctgcattttgtagcttttagtaattgctgggattgaactctaggtgaaataaatagtgagtgcgagcctgtgaggccctgctttaaatgtttttcattcaaaggggagatttgatttattggttcagtttggggcatttaaaaaaatat

SEQ ID NO: 102782 - DNA, 187 bp, Glycine max
  unsure (1)..(187): unsure at all n locations
  Clone ID: PAT_MRT3847_63830C.1
gangcacgcggacgtaagnncggaattnggctcgagcaanagnaaaacnnnaagagaaaaanagnagacntcgaatgaaaggntcttagggntctttgcncttgtgntncntgttgcagagcttgacaagnnaaggaggatccgaggagcctgtgaacgaagntnagcangnagatntangacanaa

SEQ ID NO: 102783 - DNA, 465 bp, Glycine max
  Clone ID: PAT_MRT3847_63831C.1
aaaattggctcattgtgttgtgttatttattattatttttttctttttcgtgaggtggaaaatgatacggacggtgggtttttggtatccgttgaatgtgtatgggtggggaaagtggaggaaaagctgttagtgaactagtcttagctcttaggtatgtttggatacatttctccataaacactttaggtgaaaaaaaatagaaaataaaatgagttggacttctactataagctaatgttaaattttatataagctttcacttttaacaattgaacttatcctaaaactgagtggtatataggttggttttagtttatgggagaagctcaattcattttatcttcttattttcgcctatcatcagtacctattgagaagtttatcctaatagggccttgaaacaatttgtatattcctgcagtttaagaaaatgttaggtgtatttcttggatcatgggttgg

SEQ ID NO: 102784 - DNA, 249 bp, Glycine max
  Clone ID: PAT_MRT3847_63832C.1
tctcgagccgaatcggctcgaggcaattcaacaagaccccgaactataagcttggtggaagatattgtccaagtgggtcacggtgatttgcaggataagccatggtggcaaaagatgccaacttgcgaagacttgattgaagccacggcgacactcatatggatcgcttgaacccttcatgtccttgataactttggaaagtatccatatggagcattgatcgtacacaggcaaaacattagcaggaga

SEQ ID NO: 102785 - DNA, 349 bp, Glycine max
  unsure (1)..(349): unsure at all n locations
  Clone ID: PAT_MRT3847_63833C.1
gttgccttcccaccgganaaaaaaccagaccgggcaagggacgaaggagcanaccagaaccaccccacccaacgagaacgaaaacaagaaccaccaagagccgccggcaagagcacacagcagagaagaacaaacgcagggacccaagggaaacggccccgaagaagagaacaacaaggaaacggcgccacacaccgacccacacccagagcgaagaaacccacacgggaggcgagagagaagcgggacccgacgacggggaaccaacagcgcaaccaaccccgggaagaggaagagcgcccacacgaggcgagagaacgaaacaaacccgcaagaaaagaaccccccc

SEQ ID NO: 102786 - DNA, 211 bp, Glycine max
  Clone ID: PAT_MRT3847_63834C.1
ctctcctcctgtctctagaattctcagattaggaaggcgagttgattcattagggaggaccccgcttggcacctcccaccatgggccagctgccgtcgcaacagtaccagcagcctccgtcgcatcagcagcaaccctacgtcatgattccaccgcatgcccaggccccgcaggccatgtgggcccccttcgtccagccttcgccttagca

SEQ ID NO: 102787 - DNA, 1430 bp, Glycine max
  Clone ID: PAT_MRT3847_63835C.1
ctattaaggctattctcagaagctttgagttggtttctagccttagaattaattttgctaagagtcaatttggtgcaattggccaatctgaggagtggtgtactcttgcagcagatatcttgaattgtggtcctctgcagttcccatttatatacctagggatgcctataggtgttaaccctagaaggaaggtggtgtgggagcctctaatcaaaaaattagaggccaaactgaacaaatggaaccagagaagtctatctatggctggcagaattactttaattaatgttgtcttgacaactttgcctttgttctatatgtccttttttagggcccctacaacaatcattaagaggctcactgctattcaaagacaatttctttgggatggaaacttagaaggaaaaaagatagcttgggttgcttggaatcaagtgtgtgctcctaaagaaaagggagggttgggtgtcaaagatatcaaggcttttaatagagctctccttatcaagtggaagtggttgatgtttcagcagcaagatcatctatggagcaaaattcttacttcaaaatacaggggttggagaggcttggaagagggacctcctaagcagattttttcctcttggtggtctgatttaagatctgttactcagcacagcagcatggctgctgtcaataagcattttcgctggaatttgggcagtgatgatcaaatccttttttgggaagactcttgggtgggagaaggaattgctcttaaagataaatacccagatttatatcaggaagttagagctctgcacaacaatcctatggagaactttcttcagcactactccttggctgcctcgaggaactccaatagaaggaggaagtttattcagcatatttgtggtgcttctgcagggttgcagggaaaaagatggcagtggtggtggtttgctcttacttactcgatttggaagcataggaacaacattattttctccaatacgacattattttccctacgctgtatcaaatctctaaccaataacagcaacctatcatcctcttgggaagtcataaggaggaacgaggatgggactttctcgcatctgtggagacttaaaataccacctaaggcaaaggtatttacatggaggctcatcaaagaccgtttaccaaccaacatgaatttaagaggaagacaagtggagatagctgatccattgtgcccattctacaacaatttggatgaagatgcagcgcaccttttcttcaactgcagcaaggtacttcccttgtggtgggagacagtctcatgggtcaaatcagtgggtgctttcccaaaagaatcgaaagaccacttcatgcatcatagcagatcgaatgctacacaaacaaggctttttgtatcactagagggtagatttttattgaggctttag

SEQ ID NO: 102788 - DNA, 527 bp, Glycine max
  Clone ID: PAT_MRT3847_63836C.1
aaaccacgcaccactctactttaactcattatatatgctattaagtggggaacataaaagatcaaaagtaccaataggataaaccttgggtaccataagctgaaccgtgattactaataaaagaggagacacctctgaaattcttatatttgtgtcggtggagggtggggtggtaggctgacatctgtctgaatatgacttcatccatctaatttgtgtctaactggcacaattggcaccaaaacaactgttgactactgaaaacaaactgaattgactgggccggtctatgaccctaggattaaacaccaactgccctaggctatttaccacattacatgacatgacatgcaaaaatatgtgggctcagaaacaccgcatccttcaatacacgataagagactagcactcaagtggactggatactctacggggctaaaaaggtgattagcatacaggcattgaaagggatcacaggggcaagattaagtgacacaataataacatctgtgaacgaagcacatcct

SEQ ID NO: 102789 - DNA, 700 bp, Glycine max
  Clone ID: PAT_MRT3847_63837C.1
actttctcacaaaacccgcttttttctctctcttgcaaacctaattttcatttcttccctcacatttccaaatgcgtgagatcctctccatccaaggtgaggctatgacgacaaccagatcggcgacgagtctgcgacgtgcgttgcgcgtagcacgggatcgaccctaccggaaggttacgatggctcactcttcagctgcagctcgcagaggatcgatgtctactacaacgaggccagctcgctgtgccgggtcgtgccgacgcgcgggtctcatggacctccaacacgcctcatcatgcacacgtcgtccggttcgcgacgtacgggcagatgttcatgaccgacaactttgtgattgtgcacttcggcgcagggaacaacttgcggccaacgggcgttacactgagtgcgctgcggaattgcatatgattccgttctcaatgatgagctcaacgaggctgagaagtgccattgcttgcaaggttttcaagcgtgcctttccctggggtgaggaactgtatcaagaatgttaatcttgttgatgtctaacatccgggaagagtacccggatacaaggatgcttactatctctgatttcccatctccatagtattcagagactgtgtgtgcataccctacaatgctactctctctgttgacgctcttgctggatatgcagacgagcgcatgctgcttg

SEQ ID NO: 102790 - DNA, 1171 bp, Glycine max
  Clone ID: PAT_MRT3847_63838C.1
ggctcgggcaatctccaaaatagtggtagtaaccagaaggctgagagcaaagaaaaaaccaaacaatggggcacaagaacacaattttcttggcacttatagctaccttgattgcaaaggaagcctttgcagcacaacatgtagttggtggaagccaaggctgggatcaatccacagactttaagtcatggacttcaggccaaacattcaaggttggagataaacttgttttcaagtacagttcttttcatagtgtggttgagctaggcaacgagagtgcctacaagaattgtgatattagcagtccggtgcagtccttgagcactggcaacgatgttgtgaaactggacaagccaggtacaaggtacttcacttgtggtaccttgggccactgtagtcaaggaatgaaggtgaagattaccatacgaaaagggaatgctccttcccccgcattgtcaccggcaacatctccgtcactgtcaccatcactgtcaccattattgtcatcaacatcattatcatcaccaccatcatcttcttctcctacaaatactaatgcatcttcggcctcacaatgcttcacctcttttatgttcattgttgcattatcggtcaccataatggtgtcattgttttaatcgataatgtgaaagatggatttataaatgttaaaagtacgtatataaacttgtgggccatggtggcatggaattttaatttatctcggttgtattcacctaattcgaagcaagtttgtccctgattgagctggttacgaggcagaggaggggcatgcatatgcttttcgtgtaatattaaatgtacgtgtatatcaatgatatttttttttccttgtaaaaaaaaaaaaaaaaaaaaaaaaaaaaaaaaaaaaaaaaaaaaaaaaaaaaaaaaaaaaaaaaaaaaaaaaaaaaaaaaaaaaaaaaaaaaaaaaaaaaaggggggccccccaattatgaacctctcccccccggaaattatttcggacccggtccttgggggggaccaatttttccttatagggagcctattaaaacttgggggaaacaagggcaaaactttttcccggggaaaaatggtttcccgttaaaatttccaaaaaaaaaaaaacccgaaagaataaagggaaaacccggggggccctaaggaggga

SEQ ID NO: 102791 - DNA, 254 bp, Glycine max
  Clone ID: PAT_MRT3847_63839C.1
gtcaaatcagaaccacattcctgggaattgatcttcccaatagaggtatgtggacctaataatggtatcgaaatgtggagttctgagtgggcaaatcaaacttcatggtataaggagtagatcttattgacaatcccaaacagtctacagtagttgatattttctaggtaatctgtcaagatattgaaattgctggagatactcatatgccaggtttatctggtacacaggctactgtcagatcttcttaaaat

SEQ ID NO: 102792 - DNA, 1524 bp, Glycine max
  Clone ID: PAT_MRT3847_6383C.1
cttcgtggctcgcgctcttcttcaattcatatcatatcaattagatttagagctaaacataaaattgttttcacataccatggacaacaacaatgacttttggaaattcagtgaccagttgaggcttgaatctggtttggccaatctgtctctgaatgattattccatttggagcaacagctacagctccaagaggcctgatcagaggaggaactttgatgtcaagggcagtgatttcaacaacaacaacaactcatcaaaggcttttgatgatgatttcaatgatgggtggaagatcaccaattccaatggaccccttttctctatgcctcacaacaacaacaacaacactcttgaagttggaggcttcaacaagggaggaggaatctattccaacaccaacaccaccatttcctcctaccatcctaataaccttaacaacaacgcttttggaggcttcaacaagggaatctattccaacaccacatcctcaccctatcttaacaacaaccaccaccacctcgacgacaacaacaacctcaacagaaataatctcaagggctacaagacatattttaagggtgaagatcagtttcacacacccaaaagtgccaagaagaagaacaccaccaacaacaccaacaacaagaagcatggggacaacactaataataatgatggcacaaagactggtgctgagaagaaattcaaaacacttccaccatcagagtctctgcctaagaatgaaaccattggaggctacatctttgtttgcaacaatgataccatggcagagaatctccaaagacagctctttggtctgcctccacggtacagagattcagttagaacaataactccagggttgcccctttttctgtacaactactccactcaccaactccatggtatctttgaggctgcaagttttggaggatctaatattgatccaacggcttgggaggataagaagtgccctggtgaatctcgtttccctgctcaggttcaagtgattactaggaaagtttgtgagccactagaggaagattccttcagaccaattcttcaccactacgacggccctaagttccgtcttgagctgagtgtgcctgaggcactgtctcttctggatatttttgcaaaccagaacagtttcgatgacattttcaaagtcattccagcatagaagggtagaaattatacaagaagagaagttacgagcacaatggataatgaatgaatactgtggactcataatattagagtgtcagaagataattaagacaatgaaaatatggtgggggacgattatattgaattccagcccttatatatttatttgttataattactataatgttattagtatagaggctgttatgcctggttgcccattttttcttgttatgggtgtatatgaacatcacataaaaacaatacaataagaaggaactaactttgctcatggttttgtctgcaaaaaaaaaaaaaaaactcaaaagcatggattttaaaaaaattagt

SEQ ID NO: 102793 - DNA, 376 bp, Glycine max
  Clone ID: PAT_MRT3847_63840C.1
tttatctatatacagtggggagaaaatgaaggctcttgatttattcgctgctacaacagacgtagcatggacatgccatgcgtccgaaatgttcccgtctgcgagtgaacactgactatggggccggtactactgaggagaaatgcacaagtgggacgcttgctggggaagcacacaacatgatatggttttgagaccattctctgaagagcgcgttgtaacaacaagggaatacatccatggcgatctatatatatcggactccaagacagttaagcaacctgcttacttacatgacggagatctcttagatcctactcaggacacaattgtgttcagtatagatgacaccgtactctataatattggatactac

SEQ ID NO: 102794 - DNA, 294 bp, Glycine max
  Clone ID: PAT_MRT3847_63841C.1
aagaaaaaaaatcccaaaaatttgatttttaattgaggccaaccacattatgtgattcatacattttataaccggccttaataaaaacttttgcaacttctttttttattcaaagacttatttccattcacttaaatgccaaaaaaaaaaaaaaaataaatacccgaatatggttatttttggcctcgagtaactagcttccttttaaaagagtacaataaaatttttgaaccgggaatacttttcacccaaaaacatttttccttcagaacttttacaaattacaattccctt

SEQ ID NO: 102795 - DNA, 393 bp, Glycine max
  Clone ID: PAT_MRT3847_63842C.1
ttggaaccttggatgggcagtatagacgaacgatcttctgtgaaatgggggttcaccactcagtgactaacttactgcactgactcacaattcacagaggctcacgttgtctcactgaccaaaggctactgttgcgctgcgtgtggctgatatgtataggaatcactaatgcttataataaataaactctctgtgctagaagaagatggagaaacaggatagcactgatattgaaggtggcgacgaggaagcagctcaagagtggattgcaccgaagcgtcatacatgaatcataccgagggaccagcgaggcacgctgtatggtcgttctatgcactcgctaacatagactctgaagagaagccagcatatgtgacgttcttagattcaaac

SEQ ID NO: 102796 - DNA, 525 bp, Glycine max
  Clone ID: PAT_MRT3847_63843C.1
cggaccctgtccttcactcttaaagaaggagcgcacgatgataaacgaaggcgagctgatagatgcattattgcgcgtcaatgctaacaaacgatatgtaaccaagggcttgaacgctggagaagcaaccgacaagcggtaactccactctataagacccttcccctggtacattcataccacatgcgcaaccactggagagggtctttaagaaggctgggtacggatctacagccaccaagccaaacacgcttgaagcgatatgggagtcttcatgcataggggacaagccggatacacgggtgaagactatatagagcgtgataaaggcactcttaacaaacaaactggcgttgtgttaatgcacgatggaatgagacatgcatgacggcataactagaaaagcaaacccgtccatgaataaagaagatgggcctacgctctataggagggctaatcacgcactatggcattggacgaggtatggtctatatcctgacgactcaataccattgacagaccgtg

SEQ ID NO: 102797 - DNA, 793 bp, Glycine max
  Clone ID: PAT_MRT3847_63844C.1
caccaaaccattcaaaatcactaaaatatgccaacaaagtgatttttttttcggttccaatctctatttatttatattttctattttcaattttttacatttaataaaaaacattgtacttttaatctttcactagaaactaaaaccataccagctttaatttgtaaagattaaaagatatatgaactttaatcaggaataagttgttgagtagattatatagtttagattagtcacttaccactaaatgtggctagtcaagttttcttgcagagattaataagtaaaactgacatatttcataacaataacataattatccaaaagacgagtatgtgaaaacacaagtttccttcattgtacataacatgcaaagttcttctttagaatcataatttgaagaaccgaaaacatgttgaaacattattgtactaaacaagagatataagattggttcactggttgaaaaaaggaaaaagggaaaagaaaagaagagaaaggtgacagattcgaatccctacatgtgacatttttaacaaaaccaaccaactaatgtatggcgattgaagcatacccaggtgctgaaccatcaaggtaggggggtctaggctggccaggcatccagtcagcactcatggaaaagcgagaagaagaggcattggtgacaacaaagctggaaagaggaactgctgcggcaaatctggattttgaggaggaaaggagagatgggaaggctgagatggcagaactcatcaatgtgttggcagccattctttctttctcaagagttgtt

SEQ ID NO: 102798 - DNA, 269 bp, Glycine max
  Clone ID: PAT_MRT3847_63845C.1
tttagcggggaaaaaaaagggacacaaaaaaaaaaaaaaaaaaaaaaaaaaataaaaaaaaaaaacggggcgggcgacttaaaaagaaaaactgtaagtaccctggcatggaagaaagaaaagatgaagtcgtgaacgcaaatgcaagagaatgagcggaagaatacaaaagaggaactggaaaaacagctgagagacagaactgaaagggaggaaaacataaagcgcgaactacagatggcgtaatagagaaaaggcccggaccaaga

SEQ ID NO: 102799 - DNA, 484 bp, Glycine max
  Clone ID: PAT_MRT3847_63846C.1
tgatatgatgcctcgaattggtgtcaaagctgatgcaaatttactgataataatggcacgtgtatatgagagaaatgggcaaagagaagagctcaagaagctgcataggcacatggaggaagctccaaatctaaatgatttagagttccgacagttctataattgtttgttgacatgccatttgaaatttagggatctagattctgcatcaaacatggttttggaaatgcttaggaaagcaaaggaagcaagaaattctcttgcagctgccaaatttatgacaaatgctgctgaaattgatcatagccactctcctggactggcttctgtgcatagtttgaacaacagtaaagatttatatagtttacaaaataacaggccaattacaaatgctgtattatcttatgaggagttttctaaagatagaaatttcttaaagcttgaatcagagtcaaaagctatacttagttcattattagctaag

SEQ ID NO: 102800 - DNA, 657 bp, Glycine max
  Clone ID: PAT_MRT3847_63847C.1
catttccgccctcaatttcaacaggacattcatttgttcaggttctcacagcgtaaatgacttgaactacccttcaatcacattgccaaattttcgcttaaaacccgtaaccattgctcgcacagtcacaaatgttgggccaccaagcacatacactgtaagtacccgctcgccaaatggatatagcattgccgttgtgccaccttccttgactttcacgaaaattggtgaaaggaagacattcaaagtcattgtgcaagcaagcagtgcagctacgcggagaaagtatgaattcggggatttgcgttggacagacggaaagcatatagtaaggagtcctattacagttaagcgcagatgaaaattcccaaattggtcgagttggttgtgttgtattgtgtggatgcgtgtgtgcatgtttagatataaggtagttggactctatatagctaggattttcatgttatgacataactgtgttgttccttggttcctatgtggttgtttggttatcagtatcactgtataataatttattgcatgttttatgtgtactagtgtaataagagaaatggagatgtgggagggcaaagtccgcaatcttcaaatgtgggtgcaacggacatgctcctacatatagcattaaaatattgtcac

SEQ ID NO: 102801 - DNA, 141 bp, Glycine max
  unsure (1)..(141): unsure at all n locations
  Clone ID: PAT_MRT3847_63848C.1
gacccagaagggatagcccgtacgccagcaggccggatccccaattcgacccacgacgtcacgccacacgtacgnataaagctgttcgatgcaaagtccaagcaaagcctgagcgctgcagacgacctaatagctctttta

SEQ ID NO: 102802 - DNA, 278 bp, Glycine max
  Clone ID: PAT_MRT3847_63849C.1
aagcttggatgctctaaagagggcggcctctccttttttttttttttttttttaaatcaagcgactctttggcaatagcttgagtatgtccattacagcatagctccagccgcatacatagcgcggcccatgctagctcaattatattggcgcagttccaagacatctaattatatatagcaggcaccttcttggggatgcttaatatttgccctacagcttctttgagggctattgaaattccttggcgcgctgatatctcgccacctcccctgggg

SEQ ID NO: 102803 - DNA, 377 bp, Glycine max
  Clone ID: PAT_MRT3847_6384C.1
ggtgagagagtgggcacgcacctgcacctgtcttcatcttccactttgtctttctctctctacccgtgaattttccaatctcagtctcacgttttctctttcactttcaataccgtttcgccaatgtcgcttctctgcttcccctcaatactatctattttctgtttcttcagtttcgtaaccgccgccaccgagttcgacttcggaacgttaactttgggaagcctcaagctcctcggcgacgcccacttaaacaacgccaccgtcagcctcacgcgcgacctcgccgttccaacctccagcgccggcagagccctttactcccgtcctgtcagattccgccaacccggaaaccgttttccggcgagcttcaccac

SEQ ID NO: 102804 - DNA, 296 bp, Glycine max
  Clone ID: PAT_MRT3847_63850C.1
agggaaagtgcaggaggtagatgagagcaatcatcgaattaaacgtgaggagaatatgaagttgtctgttctcattgttgccgcatcacttatggtaccaaggtcatgtcatcgttcatgctatcattcgcttcctcgctgatcgataatcggctatggtgatcgtacatcggatgtcaaatgagatcgtttaaggcttgatgtaggttcacacaacatgcgagcatttataatgattcctgaacagtacgtagactgatcagcagactacattattggcgaacattttagatcag

SEQ ID NO: 102805 - DNA, 844 bp, Glycine max
  Clone ID: PAT_MRT3847_63851C.1
ttttagtactaatataaatcccacaaaacaaagaaaattataaatccttcaaaaggggaaaggtagctagaggaaaagtaactccacacaacacatcacagcctaagagaattggattctaagctctagagagagagagagagagagagagagagagagaagaaagaatcatgtggtgctggaaaggagacggaggctagaagaagaagaaaaaaagaagagctagagagagggtaccctcttgttaatttgcactgtttttgtgtctgttgctgcacttttaggagttcttctattctaacaacctctgccaaccaacacaaggaagaaacagtaatgctactgacatgggaaagaaggggagttggttttctgcaatcaagagagttttcacacaccactccaaggggaaggattcagataataacaaaggcacaaaagagaagaagaaaagtctaggaaaactaaagcatggagagaccaattcattcatccccctcttcagagagccaagcagcattgagaaaatcttcggggacttcgaaagggagcaacaattactggggttaaggcctgccactcctccggagagacctaaaacaccaccttatgtccctccaagagctccttctcctagacctccctctccgagggctccttctccaaggcctccgtctccaagggctgcttctccgagggtggcttctccacgagttacctctcccaaagccgcgtcttcccggattgctcatcaccacaaggaggttggctacagaccagagccaactttgaggcaacagcatgccacagctactaagatccagtctgtttacagaggctatat

SEQ ID NO: 102806 - DNA, 2569 bp, Glycine max
  Clone ID: PAT_MRT3847_63852C.1
ctcggaattcggctcgagcgcttctctcaccatccccatttcgcgttggtgcaaagcatccttcgtttcaatttctctctctcagcgctttctgcaatcgaacctttcatctccaaagggatccacaggccgaaggagaaatggggctgacattcacaacgcttttcagacggctcttcgcgaagaaggaaatgcgaattctgatgggtggcctagctgcctcacgggtcagcacacgcgtgcgtccacgcgcacgctagaggaaaagtaactccacacaacacaacacagcctaagagaattagattctaagctctatagagagagattatctgagaaatcttagccagccaaggaggaagaaagaatcatgtggtgctggcaaggagagggaggctagaaagaaagaaaaaaagaaagagctagagagagagggtaccctcttcttaatttgcactgtttttgtgtctgttgcagcacttttaggagttcttctattctagtaacctctgccaaccaacaaaacaagcctgaaaataaaatagagatgctgcctccttgctggcgatcgttcgggaagaaacagtaatgctactgacatgggaaagaagggggagttggttttctgcaatcaaaagagttttcacacaccactccaaagggaaggattcagataataacaaaggcacaaaagagaagaagaaaagtctaggaaaactaaagcatggagaggccaattcattcatccccctcttcagagagccaagtagcattgagaaaatctttggggactttgaaagggagcaacaactactggggttaaggcctgccactcctccggagagacctaaaacgccaccttatgcccctccaagagctccttctcctaggcctccctctccgagggctccttctccaaggcctccgtctcccaagggctgcttctccgagggtggcttctccgcgagttacctctcccaaagccgcgtcttcccggattgctcatcaccacaaggaggttggccacagaccagagccaactttgaggcaacagcatgccacagctactaagatccagtctgtttacagaggctatatggccaggaggagttttagagctctaaagggtctggtgaggcttcaaggagtggtaagaggacagaatgtgaagaggcagacagtgaatgccatgaaacacatgcagctgttagtgcgagttcaatgtcagattcagtctcgaaggatccagatgttggaaaaccaggcacgatatcaagctgatttcaagaatgataaggatgcagccagtatcttgggcaaactcacttctgaagcaggaaatgaagagtgggatgatagcttactgaccaaagaggaagtagaggcaagattgcagaggaaggtggaagcaatcatcaaaagagaaagagcaatggcatttgcatattcacatcagctatggaaagccactccaaaatcaactcacaccccagtgacggatacacgatcaggtggattcccttggtggtggaactggttggaaagacaaacaccagcagcaactccacaagaaagacaaagcttgaagaattttcaaatcacacctccaagaccatactcagagcaaaagactagtccaagacctggctccagcactcaaaggcagccgcagcagcagcagcctcattttgcctttgataacatggacactcccacaccaaagtccacaaaatcaaccatagtgacatcttcaaaaccggcgcgaacgcctccatttagaactcctcaggcaaacggctcaggctcaggctctagatatccgagaccaaggggtgtagggtccaattcaccctttgatgtgccattgaaggatgatgacagcctcacaagctgcccaccattttcagtgcctaactacatggctccaaccctttccgccagggccaaagtacgtgctagtagtaatccaagagaaaggcttggtggaactccaactagtactgattcaaagaggagactctcattccctttgtcacaaggaattgggtctttcaagtggtctaaagggttctcaaacaaggatcaaagagtcccagataaatttcagtcacttgaatctataggaaacgtgagtgtggattcaacggtgtctttgcccgcaagggtggtgggaagaaagccttttacaagatttgtgtgatttattttgttttattcttttttttaaccattttattttgtcaatgctggtggtgttatcagttacattatgattatgatttcagtgtattggtgatagtttgatgacaggtatacccgttgtaaactaataaaaacaaaataggaaatgatggtttggtaacttcaattggtccatgttggtggtgctatctgttacattatgattatgatttgagtgtattggtgatagtttgataacagtaatacctggtgttttttaaggaaaaattgatagaatgggatggtatggtaaaaatctttctaatcaaatccttgtcattcatgtttttggggtacaaaaaaaaaaaaaactaaaaaaaacccccca

SEQ ID NO: 102807 - DNA, 622 bp, Glycine max
  Clone ID: PAT_MRT3847_63853C.1
aactcgtgtggactggattggaaagataagcatctaaattgaaccttatgatggacgaatctttgtatcacataatataaagttctgttcaaggttgggaggagaggaatgcacaaagaggcttgcaagtttggggcttgagtatcttgggaagcatactcatgatagcttactattcaatcactatgagatatggtttgaatttagacggtcaaaggcataatatctggattgattctataaagaggcatcagaaacatctctaaatgtcctcatggaactaaatgtgctttgttcatcacgagaaatcttcagcaattcgatgatatccttgctttgagttctaagaggtggcattttttttactcagtggttcatctcgtgccagaaatcttaattctaaagagagaagaaccatatgtaattttgattgaggactctacaaaggcaaggagatttgtattattttttggggcccttttgtaatagtgctagcttgaagtttacattttcactctgtttctatgtagattctcatattatagttgtatttagcagtcttactatcttgcaaccgattgttgttttgacttttgaccattattacactagctgctatctt

SEQ ID NO: 102808 - DNA, 853 bp, Glycine max
  Clone ID: PAT_MRT3847_63854C.1
ccacgcgtccggtggccaactaagaagccttactctctttttctcatcagcatcatcatggaaccaaaagaaagaaagtaaaataagtattagtactaatataaatcccacaaaacaaagaaaattataaatccttcaaaaggggaaaggtaggagaggaaaagtaactccacacaacacatcacagcctaagagaattggattctaagctctagagagagagagagagagagagagagagagagaagaaagaatcatgtggtgctggaaaggagacggaggctagaagaagaagaaaaaaagaagagctagagagagggtaccctcttgttaatttgcactgtttttgtgtctgttgctgcacttttaggagttcttctattctaacaacctctgccaaccaacacaagcctgaaaataaaataaagatgctgcctccttgctggagatcgttcgggaagaaacagtaatgctactgacatgggaaagaaggggagttggttttctgcaatcaagagagttttcacacaccactccaaggggaagcaggattcagataataacaaaggcacaaaagagaagaagaaaagtctaggaaaactaaagcatggagagaccaattcattcatccccctcttcagagagccaagcagcattgagaaaatcttcggggacttcgaaagggagcaacaattactgggggtaaggcctgccactcctccggagagacctaaaacaccaccttatgtccctccaagagctccttctcctagacctccctctccgagggctccttctccaaggcctccgtctccaagggctgcttctccgagggtggcttctccacgagtta

SEQ ID NO: 102809 - DNA, 1806 bp, Glycine max
  unsure (1)..(1806): unsure at all n locations
  Clone ID: PAT_MRT3847_63855C.1
aaaattcgggtcgagacaaaacatgggttaacttctacccctgttcattgctcctcttttgttctttcttctctctttctctctttcaacgcatcccaaccctgtggcgctataccctcctagatctactctctaaccgctatacaggctggtactaagagctgtggttagtcatagatggcgctctcagcttcacgggcaatgtcaaagggtgtggtggtatctgtgcctgttctggttctatctgctttagtggctactgttttcctgttcttccttttgtcctctctttcatcctgctcctgccctactccttcagaaatctctgcctccaatgttaggagtgttggtgttggtattggtgttcctgagtctagcagcggtaatgttccgttagccacaaggaaggagtctagcagcagtaatattccgttatcaacgaggaaggaggatgttgagtgggtgaagaatcaaatccaagcaaatgggcttcatatgcatgacaatgtgcttcgcaagggtattaaccctcgcactcgggctcagcaacttgatgatcttaaaccacttctacccctgtatcttgctgttcttttgttctttcttctctctttctccctccttcaacgcattccaacctgtctctaccttttcatcttcagactttcatgatctatgctcaatgtctcggatttaagggcatatctcactatgagggacctgattcagataatcacacagccttgccatgccctggggaactactagttgaagagcaccatagcaactatggtgaaccttgggccgggggaagagatgtgtttgagtttcttgctgaagccagtcaacttagatcagactcacaggtgctagagataggctgtggcactcttcgagttggtttgcatttcattcgatacttaaatcctgaacacttccattgtcttgaaagagatgagctctctttgatggccgtatttaggtatgagcttcctgcccaaggcctcttatacaaacggccttcgattgttaagggggatgacatggatttcagcaggtttgattctggcataatgtatgatttgatttatgctagtgctgtatttcttcacatgcctgataaactcgtgtggactggattggaaagattagcatctaaattgaaaccttatgatggacgaatctttgtatcacataatataaagttctgttcaaggttgggaggagaggaatgcacaaagaggcttgcaagtttggggcttgagtatcttgggaagcatactcatgatagcttgctattcaatcactatgagatatggtttgaatttagacggtcaaaggcataatatctggattgattccataaagaggcatcataaacatctctaaatgtcctcatggaactaaatgtgctttgttcatcacaagaaatctgcagcaattcaatgatatccttgctttgagtcctaagaggtagcatttttatactcagtggttcatctcgtgccagaaatctgaatacactgttgaatttttataaagagaaaagaaccatatgtaattttgattgaggactctacaaaggctgggagatttgtattattttttggggtctttatgtaaaagtgctagcttaaagtttacattttcacactgcttctatgtagattctcatattatagttgtatttagcagtcttactatcttgcaaccgattgctgttttgaccattattacactagatgctatctaacatgtgcaatcatgtaacaatgtcttacagtgttgtttagatgttnnncaaaa

SEQ ID NO: 102810 - DNA, 424 bp, Glycine max
  Clone ID: PAT_MRT3847_63856C.1
agaagtcgcacctctggggagcaccagtcatatgtttataacgcccgtaatggtgatcttaaattctacaagagcgcctcctgcatcttcactgggcaggaaactgaataaactgctaatagcccttctgggaataaggtcatgctggcgacaaaatccttagaattgatcttcttatgctgctgccttacattgtagctaagctggcaagactgcaaataccttgggattctttagctgcggagtgaatatccgaatccaactcgatatgagctcctatcgcattttgcgcggacggccttcctagatccagaccatccttgagaccgagaataactactacaccctttgtattaagacagaacacacgcctacataggatcatgttgtatctcatccggcattaatgcgtgagctataactg

SEQ ID NO: 102811 - DNA, 163 bp, Glycine max
  Clone ID: PAT_MRT3847_63857C.1
gcaagttcaaccatgttgcatgaagttaacagtcaaagaagcaaatcaactgagaacttagtgagatacatgtgatcagtctatagacatgaagcatgacaacctggcagaaaacttggaaaaatcggatgttactcaaggcgtcgcagaagcatccatcacc

SEQ ID NO: 102812 - DNA, 499 bp, Glycine max
  Clone ID: PAT_MRT3847_63858C.1
ggctcggactgttctagatttttgcgaccgcccttttttttttttttttttgttttttttttttttttttttttttttttttttttttttttttttttttttttttttttccgaaaaacaggatcccaaccaaaagctttagaataagaaaatcatttgccccttttggggaaagggggaccagcaatccattcagttttttgttgctggaaatgcataaatgtccaacttgtttttttttttttaaaaagcaaaataaagccgggtaagcaggccacacccgttccttttacccggaccaaaagatttacaaagctcattttttccagcgataaggaattttgcaagacaaatggggtatttggattcatttttttgagaggggccttgaacttcccagaccccttggggggatttaaaagaacccttttttttttttccaaaagggttctttttgcccctggcttttcttggggcaaaaaaaaaattttttttcttt

SEQ ID NO: 102813 - DNA, 163 bp, Glycine max
  Clone ID: PAT_MRT3847_63859C.1
tcgttcacgcgttcgaattactacatattgcttgatcttagggagcgtcctctggttaatttgtagaacttgcttcaaggaaaattcaagataccaatggctcaactcaatcacagaaagcgactactcttctatggtcttttattcccttctctttctggtt

SEQ ID NO: 102814 - DNA, 373 bp, Glycine max
  unsure (1)..(373): unsure at all n locations
  Clone ID: PAT_MRT3847_6385C.1
aactttcgaggagtttctccaattaacattttaaaacccactcggatacacttaanaattaattattcagattcaataactaaacactttaatgtagttgcgccaatgtggtcaaaaaaatggggtgctaactcccattccttatttattattgagttaacccagcaacctgctttgtgatccaacatttcttttttagttcaaaaattttccggagaaaatcctagatctatttttatatgcgaatcaatcctactacttctgagccttaggtgtcttcgcttnagaaaaaaaatgtgagacctatctcccaaataatggtggcccgtgctaaatgtancttttcccccaagggacatgcctactatttaca

SEQ ID NO: 102815 - DNA, 154 bp, Glycine max
  Clone ID: PAT_MRT3847_63860C.1
atgttccaactgaaaattgtttctacttaatgattattggaatctttattacagaaactgaaacgaaacctttgcgaaaaacatttgagggggaaatatgactttacaaaggattgccgtacaacaaatgcctactggcatgccatgggaagaa

SEQ ID NO: 102816 - DNA, 477 bp, Glycine max
  Clone ID: PAT_MRT3847_63861C.1
ttaccaattatcataagttgcaggatctgcagaatatagttacaaattgattttacaaatttgagaagtttcaacctaactatgcaggttttttttcacacatttaacaaatctactgaaaattttacgccaatcttgcctggccccttaattcgagtcaacccgtatttccgaatctgtttatttgatcaataaggccttttttttttcatttacacctgaagttctgagcccgacgataggtcttccttgtcttcacctccttgtttgccaagaagaaatagggataattgcatattgcaatttgcattttgcaacacaaattggaaaaaaaggagtttgaaattgcaattacctataggtatagcagtttcaagattatatagtggaatgttgacccaggtagcaacttcatttccttttgcttgtaattctgcagttcaagaaaagctgcttaggacacatgacgactttgtc

SEQ ID NO: 102817 - DNA, 362 bp, Glycine max
  Clone ID: PAT_MRT3847_63862C.1
cgggttgagctcacactcatgtattacagcaaaaaaatacggagaccaatggtgcatcttacattgtataagcttgctcgagattctattcaaacactgtcttatcttcttcataggggacccaaaggcctagaccaccgaatcgatcaaaaggcagactagtggtagtgatatacacttacagacagcggagacgacgacaaagccttccgagtgatcgatctgcattgtgctaaaaatggcgagtggtacaccactctgacgcgagcctgacgaccggatcatggctcaggacgctacgaggcttagggtgatcatgaatgacatatcctagagagcgttgttgagaacgcgctccaatt

SEQ ID NO: 102818 - DNA, 469 bp, Glycine max
  Clone ID: PAT_MRT3847_63863C.1
gattgacatttatgtgcatgagtaatgccaaaaatatcattcaagaaggagaatgatgagagtacaaacaatatacaaaagaatgatgaaaaaggaaattagaaaaatacatggcaactggtcatctgatcttattccactctgagcatcttctcctttctttactctatgaaagccttgatttctcctccctttggcatatatacttctctttatatgtttctccttcctcattgtgcatatacttagtaattttctcaacacttgggtaggtcagttggaggtggtaataaagattcatttggtcctttaccgttgtccacaacaaaagccatcttcagtccccatgttgtatgaatttccaagtggcaatgcataaaccagacacctggattgtcagccctgaatctaataacagtccaccccccagccgggactccaactgtatttttttcacacgatctacaag

SEQ ID NO: 102819 - DNA, 513 bp, Glycine max
  Clone ID: PAT_MRT3847_63864C.1
ggctcgaggtttggagattcaatacattacattacccctcttatatataacatataacttgttacctaggttttcctaccttctttatctctcaaaagagagacacaacaaaaggaaccagagtggattaattagggacatgagaacaaggagaggagcgtgttactctggagtagtctcaaggatgtgttccgatgcgagggtttccaagaaaaaaaacaaggatctgcacatgcacatgcatatgcatatgcatgtccccgccggagactccattatttacagccggaaaaggcagaagaaaacgccggagaaaaccgccggcgctgattacgaatttttcgagtctttgccggacgaactcgtaatctccatcttctgcaaacttagttccaccgccactaaaccttccgatttcgtcaatattttaatcacgtgcaaaagattaaacagattagcacttcattcgcttgtattatccaaagcctcgcccgaaactttcactattaaagc

SEQ ID NO: 102820 - DNA, 368 bp, Glycine max
  Clone ID: PAT_MRT3847_63865C.1
aaagaaccgaaaagatgtcaaacgcgttctgcagcgactgcaataagcagacagaagtagtgtttcacgcgactctggcaaaacacggtggggtcggggtgcaaactaatactggacacccactctatctacaagacctatgactggcataccttacccaacgagtccggtgacaacaatcccaatcgtatctgagggccctccaaccccctcctcaccgacggcgggctatccaccgtcatcgacaaacccaacggctgcagaagtagcagcgagctcctcttctcctccctaaatcgctcacaaaacccaagctacaaccctgatcgcacactcatcatcgccttcaagaccatcaccaccatgtt

SEQ ID NO: 102821 - DNA, 409 bp, Glycine max
  Clone ID: PAT_MRT3847_63866C.1
aattcggctcgagcgaatcatgtgtgtttcataatcatatgaagctctgccggtttcacaattaacccgacaagtacataatgtactttttgatgtgatcttgacttgcgggacagagctgccctcgagaaaatattttcaaccgtaaagtttgatgccgtcatacattttgctgggcttaaagcagtgggtgaaagcgtgaagaaaccactgctctactttgacaacaatttgatagggacaatcgttctatttgaagtcatggctgcccacggatgcaagaagcttgtgttctcatcttcagcaactgtatatgggtggccaaaggaggtcccatgtaccgaagagttccctttgtcagcaacaaacccatatggacgaaccaagcttttcatcgaaaaaatttgtc

SEQ ID NO: 102822 - DNA, 128 bp, Glycine max
  Clone ID: PAT_MRT3847_63867C.1
cggggggggggggggagatatcacgcgagtctctaataagactctctatagggagtattggcgcgcctgcaggccgcgccccgaaagaataagcggggagcgatctcctactcggaggcgccctatct

SEQ ID NO: 102823 - DNA, 379 bp, Glycine max
  Clone ID: PAT_MRT3847_63868C.1
gttattcgaatgagtaaaacaagctttgctagccaacaagagaatggggctgtcgaagctgaagtaataccctcagatcttgattcatgcctgcagcagcattctgtttcatataatgcaagatctgcattcagtaacataactggtttggggtctcttggtcaatctggtctaagtgttgataatcttgcattaatggagcaacaaatcttatcaggcattgggaatcgagataatgttaacccttgtgtaaatgcctcaagttccttgaacatgtctcaactaaaaacagatggagaccatctacttggccacaatatgagttgtgacagtacttcactagtgggaggagtcccactacatggtgggatgagtactc

SEQ ID NO: 102824 - DNA, 199 bp, Glycine max
  unsure (1)..(199): unsure at all n locations
  Clone ID: PAT_MRT3847_63869C.1
cgcatgcacgcgtacgtnagctcggaattcggctcgaggggctacaacactcacttctnntgtgcttgcntgccacctganccanttaatctntcagtntctantgatncnacactanncnccagaggacctgccagccgtttcttctagngacatgtacnacaatgctacctttgactgggcctacttgtcanagaan

SEQ ID NO: 102825 - DNA, 238 bp, Glycine max
  Clone ID: PAT_MRT3847_6386C.1
catctccaaacatcacaagattctagcatcagtaataaagcgcacccagagggaaaccaatcgacaagaaaacgacacatacataccttgttccataggcatcatccaccactaagaatattctcaaacctctacaaaaaaactcacactctccaaagatcaaccaattatcctggaagagagcttcaaataacacaacactcttaaccccccaagtcaacacacacaccccaattaa

SEQ ID NO: 102826 - DNA, 1359 bp, Glycine max
  Clone ID: PAT_MRT3847_63870C.1
tgtccaagtgtagggataggaggacatataagtggagggggacagggtctgatgttgaggaagcatggcctagcagcagaccatgttgtcgatgcttacctcattgatgcaaatgggaagattcatgatagaaaatcaatgggagaagatgttttctgggccatcagaggaggtggtgcctctagttttggagtcatccttgcatggaagagctcgttggtcagagttccacctattgttaccgggttcaacgttcctagaacacctgaggaaggagtcaccgatctcattcacaggtggcaatacatagcacatgacttgcatgaggatcttgtcattagagtaattgctcaaattagtggccatgacaaatcaaaaaaattccgagcaaccttcaactctattttcctaggaggagtagacaggttgatcccactgatgaatgagagtttccctgaattgggattgcaggccaaagactgcactgaaatgagctggattcaatcagtgatgttcatagctggatatgacatagaggaccctctagaactcttgctcaacagaactaccatgtttaaaagatctttcaaggccaagtctgactttgtaaaggagccaataccaaaatctggtctagaaggagcttggaaactgcttctagaagaagaaatagcattcctgatattggaaccttatggtggtagaatgaatgaaatttcagaatctgaaatcccttttccccacagaaagggctacttgtacaacatacaatacctggtcaactgggaagtcaatagtgacgaagcatccaagaggcatctacaatgggctaaaatggtttataaatacatgactccttatgtctcaaaatctcaaaaagctgcctatttcaactataaggatcttgatttaggcaaaaccaagcatgacaacccaagctactcaaaagctagtgtttggggtgagaagtactttaagggaaactttaggagattggcacaaattaagacagagtttgacccccaagattttttcaagaatgaacagggtattcctctcctgaattcccaacattcttaacagaaaaagcatgatattatttggagcacctaagacatttgtgtagtgcttcaatattatgttaatcttcagctttgcgttattattatagacccaatctggaatggaatgctgcttttgcagacatttcaaaggtagcagatgcaatttcaaaatgtatatcatatgatatattttcataatgggtgtgaacatgtttaacaagtcatgaagttacaaaatctcataagaatgtactctaaatttgtcaatcatgttgtctaatgactcttcctatgg

SEQ ID NO: 102827 - DNA, 287 bp, Glycine max
  unsure (1)..(287): unsure at all n locations
  Clone ID: PAT_MRT3847_63871C.1
ctcttcttcncttgcggccagggttttagcgcagnttcttctangattnnggaagatgggtaaggcaaaggntcacatcagtattgtggtcatngccatgtcgactctgggaatccactaaccactggtcacctgatttacaagcttggaggcattgacaagcgtgttattgagaggtttgagaaggaagctgctgagatgancaagangtctntcaagtatgcctnggtgctggacaaacttaaggctgancgtgaaaganggatcaccattgatattgcttgtgg

SEQ ID NO: 102828 - DNA, 581 bp, Glycine max
  Clone ID: PAT_MRT3847_63872C.1
ccacgcgtccgggcacgttctctcaaggcccaaatccgagtcggcgatgttcactgggctcaaacgacgtatcaaccagccactcagccttattcatgatcacgatatatcattacgctaaccctgttgctcccgaactgcccacaaatgaaccaatcgcttactactggtattcgagcccactgtatctcctagacccaatagttagcccatatacattgttccctgggccatgtcctacatctctctcttccttaaggagcgcacctcgaacccaactgctgtctcatgtggtattgccattggtgatgccggtcctgcctctgattctaagggttggaatgacaacgaatggttcaacaatgacaaaggctcttccgactggattcgaacactgctgcgatcactggacataatgctgctggtgactatctatgaacgttgctggatcactttcaatggaagtggaggacacttagggacgcttaatccttatgtagctttgaaaaccctgtcgatgtccctgcggtgtttcaatactggtacaagctactaatttccgaccttaaggctccattgct

SEQ ID NO: 102829 - DNA, 325 bp, Glycine max
  Clone ID: PAT_MRT3847_63873C.1
gcatgcgtactctagatgatcctctcgatgtattccaattccttatcttcaagatataccgagcaaaggcgagcatatatgaattggaaggatgcgtaatcttattaggcctatcctgaagccaaaggaaatgagatcggaattcctcggcgaattccaattccacatattcaagaaataaggatgcaaaaatgtatcatatatgaataggaattataagatttcttattaggcctatcctgaagccaaaggatatgagatcggaattcctcgattaattacaattccacataatgaagacttattgacgtataccagaccatat

SEQ ID NO: 102830 - DNA, 636 bp, Glycine max
  Clone ID: PAT_MRT3847_63874C.1
tgttttttctcctattcgttcaactatatatatttctctcagtgttgcacttcccttattctcaactcttccaaacacatttttgcttcttagaacagaaccctgactcggtgattaattgttgttttcgttatgaaacgctccgaatttgagtttcccgcaattgatgtatccagtgcggttcccaacaacgtcgttttatttggcaaagtcataacgcgccgaaccgaaccggccggtccagcgtcggaaagcgaaaaccgggttctgtcgaaatccaggtcttcttcgggtcggaccaacgggttcgtgtcgtggctccggtcgccgtccgggagagaaggacgatgccggagaagtgagagtggccggagaagttataagacggtactgaagtttccgttgcaaatggaactgagtgacattaagaagaggcaggaccggagggaaccgcttccgccgcctccgctgccgataattacggcgaaggacgacagcgacagcgacggcggagagagttgctgggaactggtccggccgttgaggcgtcagggaacgcttaagaacgccttctttggatgctttcttcccattatttaggatttttttttctttaattttttatacactatgttt

SEQ ID NO: 102831 - DNA, 440 bp, Glycine max
  unsure (1)..(440): unsure at all n locations
  Clone ID: PAT_MRT3847_63875C.1
gggggttcactgnattaattttccgcctttcctccccccaagtatttttttttttttttttttcctcaaaagaataaatggggctttccctttggggaaatttaaaaattggcctaacccccggtggggcccccttgggaaaaaaaccaatctctggaaatattcccttgggccctttgggggggggggaaaaaaaaaccccctttccccatttattggaaaccaatttggccgggtttttttttttggtttttttttaaaccccccagggaaacccatttttttttttccccttgggcccttgggtttctttagttgagggccaaaaaaaaaacttttggttttgggccaatccccttggttgggggcccccctttttggggtttttgggggtcaacatttaggggctttaaggggggttttcccccgtgggtttcccc

SEQ ID NO: 102832 - DNA, 1350 bp, Glycine max
  Clone ID: PAT_MRT3847_63876C.1
ggctcgagctatttatgatggactggtttctggctggaggaaccctagcactaccctaaatggaaagctctatgccttagactgcaaggatggctgcaagattcgggtttatgatgaggttgctgattcatggagcaagcatattgacagtaaattgcatttggggagctcacgggctttggaggctgctgctcttgtccccctgaatgggaaactatgtatcatccgtaataacatgagcatttctctggttgatgtttcaaaacttgaagatttgaaaggatcatctgctgaacagttatgggaaactattgctgggaaaggacagttcaagaccttggtcacaaatctgtggtctagccttgctgggagaaccgactcaaaacccacatagttcactgtcaggttcttcaagcttagaggttgtatagttctaaaaaatcgacaatcagcatgtcacaagttacaatatctctcatcttgatggtatatgtgtgtgagaagctgggacaaatcttgccagaacaccatgatgcagtctattgttgcttttcatctcaaacccgtggcatcatgctcatcccaagaggtgaaacatagataagatgttttactaatcaagtaatcatatagtgttacagatattgatacatagttgttacatttgaaaaaattgagtaggctgcttaccagatcacatggtttatcattagcttgtcttttgttttgctgcaaccaatgtatgacttggagtgttggacgggggagaagaaatgaagaataatacttaaagagtcagtttggtattcttataaatttgagggtgaaaaattcaagaattacttttgaatataatttttcatattaaaactcatctatgaatttttcaccctcattttctgtggcaataccaactgactgtcaactcttaatattatataaaactctttgcattacatatttatatatgagcacaagtggagtcaagtttactggtgagacactaccagtctgttttgtactatgattgaagatacaacttttgacagcttggatatagcttctgtgtggttacaaattatttttatgacatgtcaaaagttacaaatgcgtcaagtaagctcttgtacacccctctccaattttttgagtagtgacagaaatgagagcaagatcattagaactttgagtcaaacctgaacagtgaggcgaattttgagtagctcaatagggtatatgtacatagggtagagctatgtaactgcatgttccaccagatgtcattaacccatgtaatgaagttttaggcaacaaaatgaaatgattaactcctagtttagtaaaaaaaaa

SEQ ID NO: 102833 - DNA, 547 bp, Glycine max
  Clone ID: PAT_MRT3847_63877C.1
cgtgtgcgtgttcgtcgcagcgccttcctgaacaaattccaaatcgaggcaatttactcgctgaaagccaacgcccaaaatgcgatcaaccgcgtgttggagctgttcaaatcggcctacttctggaacaccaaatcccaactgatgagcggacagagtgcacagaaagacggaaagatcgccgccacaattctaatcgacccggtgactcagaagagtgccaacattaccatccgaacgccggcgcaacagttgcgcatggagcagatcgaagtgccgtacaaagtgcgccctttcgctttgattcgccagcggagtgcgcaacagacgcattcgctggctcagctgttccaccaattcagcatcaaataccgcccccaatgcaccgttgacgggcgcaaagtgaacactttcgacgacttgatctacacggcccccctctccttcaattgttactccgtcgcggccaaagactgcggctcagaccaaccccaaattgtggtgctgatgaaagaggtcgcgcagcagcagcagcagcagacgaaca

SEQ ID NO: 102834 - DNA, 1002 bp, Glycine max
  Clone ID: PAT_MRT3847_63878C.1
taccacttactatagggcgaattgggtaccgggcccccccccgggacgtgcgtcgcaagcttaaagttatgtaaaaaaataagggggtgtgaggaaatggtgcacagcgcgtacgattgtctggaactggtgcgcgagtgcccagccaagatcgaatccatcgaatcctacggttcgaagcttctcgtgggctgctccgatggatcgctccgaatattcgcgccggaaacggaatcttcctccgacggctccaagtcctacgccttggagaagaacctcgccgggttcgcgaagaagcccgtgctctcaatgacggtggtggagtcgcgagacttcctcatctcgctctctgaatccatcgcgttccacagactccctttcttcgagaccatcgcggtcatcaccaaggccaagggcgctaacctcttttgctgggaccaccgccgtggattcctctgcttcgccaggcagaagcgcgtttgcatcttccgacacgacggtggcaggggatttgtggaggtgaaagattttggtgtggcggatacggtgaagtccatgtgttggtgcggtgagaatatatgtttagggattagaagagaatatgtgattctgaatgcttcaaatggagctttgtctgaggtttttacttctggaagactagcgcctcctctggttgtttctcttccctccggagagcttcttcttggaaaggagaatattggggtttttgtggaccaaaatgggaagcttcttcctgaacgtaggatttgttggtcataaactcctttggaagttgtaattcacaagccgtatgctatagctttgtagcccagatttgaggagattcggtccctccgagctccttatactctgatacagacagttgttcttcgaaatgttcgccacctttgccagagcaatgattccgggatacttgctttggataattctattcatgggctctaccctgttccccttggagcccagatagtccagttgaca

SEQ ID NO: 102835 - DNA, 785 bp, Glycine max
  Clone ID: PAT_MRT3847_63879C.1
ggctcgagcttaattgcctctagttctctcactttaactattttcacaaaccatagaaaaataataattttttttttcattgtaacatgtcttcctcagagggtgtctttgaacagggaattgagttctcagaagccaacaatgttcttctcatgtctctaatggaagaagaacaagaagaagagtactatggcgatgatagacttgtgagcatgattcaatcattggaggcagagatcactgacactgaaatgggtcaaatgtatgagatgggacacgtggatgatcaagatcgctccgcgtcagtcggtgtccctgatcattgggttgacttggaattgatctcttccttgccctttgatgagatgaatgcatggatcccttatggatatgggatgatggaacatgtagaaatggaatatgaagctggaaatggtattgatgatcttcaattgtgttatggagcattcttggatcaacaatatagagaaaatcattatttggcactagggccaagtgatgcagtattcggaaactaatttatacacttagtattatataaggaaccagaagagaatatccaccaaaaatacaggaaacagaagagaacatggactactttgtaattaatttgtgaaggagtccttaattaagtacatgttaatgtcaaaccttttaatttatcttaagctttaagttttatcatgtctttgcttaatctccctttactttcatgtaattgcctagctggaaattaatcagaatggattttccttggttcctct

SEQ ID NO: 102836 - DNA, 221 bp, Glycine max
  Clone ID: PAT_MRT3847_6387C.1
gcctgaaaatcaatataaatatttgaattattatatataaacatgttccaacatgcagcaatacttaacgattatttaagaatatggcactggcacgaattgtaaataggtacacatttacggaaagaaacctcattaactagatatggatctacaagacacaacttacctactctcttttaaataccggtttgaacaccattgacatcttaattttagat

SEQ ID NO: 102837 - DNA, 288 bp, Glycine max
  Clone ID: PAT_MRT3847_63880C.1
cttgagaccatgaggtttaagagccactctgttcgccgccgctgtctgcaacttgtcaactctacgttgttctccgtcgaccactaacacaaactagaatgatatcgtacgcgcataagctcttcacctctatgaagcgcgattctctcagtaactccgacggcccttgttcattgcaatccccaattagctagctccattgcactctcaccggacccacggtcgcggtccaccttcaaagttccactcttttgtccaatacccctcacacgcacttcgcgattcggc

SEQ ID NO: 102838 - DNA, 1997 bp, Glycine max
  Clone ID: PAT_MRT3847_63881C.1
ctaaaaaatgatgtaatcattgcaaagagcctgccagaaagtttgatggaaaggagaagaagaaatgaatttcctacatttaagcccacaagttcagcttctctaaacttttacattaaagaaattttaccaaagctaaagaaatcaaaggttatcggattaattattgccaatggtggagctctgcagtcaatactcccacctagcatggctgagattcagaggctaagatgcagggttgctttccatgccctgcaatttcgtccagaaattcaaatgcttggtcgtcggatggttcacaagttaagagcattaggccaaccattcttggcattccatcctggcttattgagagaaaccttggcatacaatggttgtgcagaactttttcaggatgtacacactgaactcattcaacatcggagatctcgtatgataaaggaaggagttcttaaggatgaactgaatgtggattcacacttgcgaagagaaaaaggtctatgtccgatcatgcctgaagaggttggcattctccttcgagtaatgggttatcctgccaaaacaatcatttatctggctggctctgaattatttggtggtcaacgtgctttaattcctttgcgatccatgttcatcaatactatggatcgcacttccttgtgcagtgagaaagagttttctgacttggttggacctgaaacacctcttcctgtaaatagttttcgaccacctcctgcaaaaagtgagaatgaactcaaagaagaatggaagaaggctggtcctcggcctcggccccttcccccacctccaggtagaccaatttaccagcatgaaaaagaaggttggtatgcttggatcactgagacccctacagaacctgatccttcccctatggatctgaggatggaagcacacaggttactttgggaatgcgcttgattacattgtttctttggaagcagatgccttctttcctgggtttaacaatgatggtagtggatgggcagatttttcaagccttgtcatagggcatcgactgtatgagaacggcttcttttagaacataccggccggacaggaaagttgttgcggaacttttcaacatgactcgtgaaaatctgtaccatcctaaacataattggacggttttagtacaggaacatcttaaccagaagtttggctgaagaaggcctcataaggcaatctcttttgtcaaaacctgcaatgttcctttcacatccacttcccgaatgctcctgtagaattgcttcaaccaaggccaccaatcgtttccgaggtgagaatggccaggttctatatggaggcgaagatatatgccccaaatggatgcaacatgctaatgacgaaggttcattggagaaagaaggtagcaaatccgaagatgaagggctggcagactatgaaagtaatgattttgttgatgaatctgaatctgaaaaaaatggtagcaaaaccaatcagactccactctgggatcaagatgaggaaatggatccaaatgactaaggggatgtgcatatatagtctacagttatacatcatccaagttttccataacttttgagaggcataggttataaaaacgtgacacagtcctatctttgctgagcttatatgggtattcaaatctattctttcattaaatttgggttattttttcaaggacaaagagaacatttttctttttcactttatacttaccccttccagcggaatttttgttgtaacatacccatacaaaaaaagaaagaaaaaatatcacccgtcgggtaaattggagcccaacaaatggaatttcgaagaaaattgtgtttaaagtttatgcatggttgtaggccaattgtttgttttgtacaaaactacaaatctacatatctccatttttaagttatgtggaaacaaattgtcgcggtttgctgacctgggacattttttgcccttcaacagcagacctgggacattccttgcccttcccc

SEQ ID NO: 102839 - DNA, 322 bp, Glycine max
  unsure (1)..(322): unsure at all n locations
  Clone ID: PAT_MRT3847_63882C.1
cctctaggagcggcgccgctttnnttttttttttnnttttttttttttttttnntaagcttctcacatatcttacagacacaaacaaccaaatccgtctcgaactgaacaaaatttactagggaataatactttttttatttctaacaacttattcattcctcacctccatcatttttagacccacctaaaagagaactcgtgaccgacaactttctttcaactacaaaattttgtctgagattttaacaaaccaaactcctttaaatttccataaatgccatttacttctttaaatattatttcactatcacctactaaat

SEQ ID NO: 102840 - DNA, 1057 bp, Glycine max
  Clone ID: PAT_MRT3847_63883C.1
cgagcgatggtcgagcggctcgagtacggctgcgagaagacgacagaagggggcacccagagaggaggaagctttgagagagagagagggaggagggagagtgttgacgctccatcaagatgggtatttctagggattccatgcacaagaggcgtgccactggtggcaagaagaaggcatggagaaagaagagaaagtatgagcttgggcgtcaggccgcaaacaccaagttatcaagcaacaaaaccatccggaggattcgtgttcgaggtggcaatgttaaatggagggcattgaggttggataccggcaattactcatggggtagtgaagcagttactcgcaagactcgtattctagatgttgtttacaatgcctcaaacaatgagcttgtgcgaactcagaccctggtcaagaatgctattgttcaggttgatgctgctcctttcaagcagtggtaccttcagcactatggtgttgaaattggtagaaaaaagaaagtggcatccaagaaggactctactgaggagggtgaggctgctgctgaagaaactaagaaaagtaaccatgtccagagaaaacttgagaaacgccagaaagatcggaaacttgactcccacattgaagagcaatttggtggtggccgattgttggcctgtatttcttctcgtcctggacaatgtggcagggctgatgggtacattctggaaggtaaggagctggagttttacatgaagaaactccagaggaagaagggaaagggtgctgcttaattttagtgttttatgaacttctatttggctttagttcttggaagttggtacaattcaagatgtacgctttttgactgttggtcgatctcctttagggtgatgccataggacatccttagtgtgaacgttttattagcgtacatcttgaatttgagacagggatgcatgagtattctacttgtcattaccatatcatcagataagagaacaaaactgcgctgattttgaaattactgattatcctatccataatattctctctcaaaaaaaaaaaaaaaaaaaaa

SEQ ID NO: 102841 - DNA, 1300 bp, Glycine max
  unsure (1)..(1300): unsure at all n locations
  Clone ID: PAT_MRT3847_63884C.1
ctagtctcgagttttttttttttttttttgctttttccaccttcaacagaaaccttcttatccttcttgcacttcttcaacacctcaccattaccagcaacctcagcaggccccagcggaaccaattccggcacttcctcctcctcctcatcaacaacaaagcagagaggaagcttagagagagagagagagagagagagagagaggagagagtattggcgcttcatcaagatgggtatttctagggattccatgcacaagaggcgtgccactggtggcaagaaaaaggcttggagaaagaagagaaagtatgagcttgggcgtcaggcagcaaacaccaagttatcaagcaacaagacaatcaggaggattcgtgttagaggtggcaatgttaaatggagggcattgaggctggatactggcaattactcatggggtagtgaagcagttactcgcaagactcgtattctagatgttgtttacaatgcctcaaacaacgagcttgtgcgaactcagaccctggtcaagagtgctattgtccaggttgatgctgctcctttcaggcagtggtaccttcagcactatggtgttgaaattggtagaaaaaagaaagtggcagccaagaaggattctactgaggaaggtgaggctgctgctgaagaaactaagaaaagtaaccatgtgcagagaaaacttgagaaacgccagaaagatcgtaatcttgactcccacattgaagagcaatttggtggtgggcgattgttggcctgtatttcttctcgtcccggacaatgtggcagggctgatgggtacattcttgaaggtaaggagctggagttttacatgaagaaactccagaggaagaagggaaagggtgctgcttaattttagtgttttctaaacttctatttggctttagttcttggaagttggtaccaattcaaatgtacgttttttatgactgtgggtcgaccacctctagggaattggacatcctttagggtgaacgttttattagtttatgccaatttcaaccaaattttgttttgtttgtttatgttactgataatttgaaaggcggggatgcatgagtattctacttactattaacatcattagataaagaaaattgcagttttttaaattactgattatcctatctgaccttctttctctcgatggttgtgaaagatattctttttttaatcaagttatttgaaacatggtagttatttcaggcctaaatgtgtttttggtttctgatagatgannnggattaagggaccaatannatatcgca

SEQ ID NO: 102842 - DNA, 1129 bp, Glycine max
  Clone ID: PAT_MRT3847_63885C.1
gaagctttgagagagagagagggaggagggagagtgttgacgctccatcaagatgggtattgttttcttttcatttcaccatcgtttcttctccttcgatctttcatagttcaattgcccaaaataactacgttttgcgtgtgtttgtggaatttcttttcttatgggctatgttattgcttttaaacaggtatttctagggattccatgcacaagaggcgtgccactggtggcaagaagaaggcatggagaaagaagagaaagtatgagcttgggcgtcaggccgcaaacaccaagttatcaagcaacaaaactatccggaggattcgtgttcgaggtggcaatgttaaatggagggcattgaggttggataccggcaattactcatggggtagtgaagcagttactcgcaagactcgtattctagatgttgtttacaatgcctcaaacaatgagcttgtgcgaactcagaccctggtcaagaatgctattgttcaggttgatgctgctcctttcaagcagtggtaccttcagcactatggtgttgaaattggtagaaaaaagaaagtggcatccaagaaggactctactgaggagggtgaggctgctgctgaagaaactaagaaaagtaaccatgtccagagaaaacttgagaaacgccagaaagatcggaaacttgactcccacattgaagagcaatttggtggtggccgattgttggcctgtatttcttctcgtcctggacaatgtggcagggctgatgggtacattctggaaggtaaggagctggagttttacatgaagaaactccagaggaagaagggaaagggtgctgcttaattttagtgttttatgaacttctatttggctttagttcttggaagttggtacaattcaagatgtacgctttttgactgttggtcgatctcctttagggtgatgccataggacatccttagtgtgaacgttttattagttttatgccaatttcaaccaaattttgttttacttgtttgttactgataatttgagacagggatgcatgagtattctacttgtcattaccatatcatcagataagagaacaaaactgcgctgattttgaaattactgattatcctatcaaaaa

SEQ ID NO: 102843 - DNA, 244 bp, Glycine max
  Clone ID: PAT_MRT3847_63886C.1
atcatgaactgcttccagcatttgatgtactggggaacaggactttcttactgtgtgaggttccaaatggtgcaaaaattaaacttgttgataacatgataatgtccagtttgattaatgctttctctgaggtactcacactaacttaaataagtggtttgaaccctataactcttctcaatatgctgtatcttcttgccatatgcaactgcatgtttaaattgaaatgacctacaatgcttta

SEQ ID NO: 102844 - DNA, 190 bp, Glycine max
  Clone ID: PAT_MRT3847_63887C.1
aagcagaggatggatgcttaagtgttagtacttgaaaccaactcaggtacacaaactttcttctgcgcaattgacaggacctatatacagaggggtgagccttgggcttgagacaaaatcaacctaaccctacctcctaggttgtaataaatttcgccaaaaaaaaaccaaatgcttggggaccaccaaa

SEQ ID NO: 102845 - DNA, 315 bp, Glycine max
  Clone ID: PAT_MRT3847_63888C.1
gttcagggtgaccactaacaggcggccatggataaagccataagctggcaccaatgggtaatgtacgtgcacatggtcaaaatggtgcgttaggaggataacccctttaactgacgagatgtaactttactatacacgaagctgatatgtaaccaatgggaaccctgcgtagagcattagatcgtgaaagtactatgccgattaatacaagggctctattgacctaggacaaaacagaatctcaatacataaaactcgaggtcgtaacacatgcatacgaaattcgacatgtacctactatgagggacttgtttc

SEQ ID NO: 102846 - DNA, 700 bp, Glycine max
  Clone ID: PAT_MRT3847_63889C.1
ggctcgagcttttgaagaaaacggagggaaacctgaaaccaacccttttggagcaagagctgtgaggctctaccttcgtgaggttcgtgaacttcagtccaaagctagaggaatcagttatgagaagaagaaacgaaagcgtccaccaccaccaccaccaccacaacaacaactacaacatcggctcgagttcatccctcactctcactcactcactctggtcactgtcttaggaaccctagaacaagaaccctgagacaaaaacaactttggatctgtaaagccaaagggtttcaagtactttctttgctagcttgtctccatggattcaattcaagaatttatggagtcgtgtaacactgacatcaccaccaccaccgcaacaaccaccagcaacagcttagttggtagctccaattccccttctgcttcctccaccaccagcagccgctacgagaaccaaaagcgccgtgactggaacacctttggccagtacctcaagaatcaccgaccccctctctccctctccaggtgcagcggtgcacacgtccttgaatttctcaggtacttggaccaatttggcaagaccaaagtgcacactccgatctgtcccttttatgggcaccctaaccctccagcaccatgtccatgtcctctaagacaagcctggggtagccttgatgcactcataggtcgtctt

SEQ ID NO: 102847 - DNA, 839 bp, Glycine max
  Clone ID: PAT_MRT3847_6388C.1
aacggctgcgagaagcgacagcagaggaaccattttacatttacagtaacagtattgaaatttcggaaaaaatggcgatggctttcaagatggcgacgactggaatgtgggttacagatgagtgcaagaactcgttcatggatatgaaatggaagaaggagcacagatacattgttttcaagatcgacgaaggatcaaggctcgtcaccgttgataaactcggtggccccaccgagggctatgatgatctcaccgcctccttgcccaccgatgattgccgatacgcggtttttgacttcgactttgtcaccgttgataactgccgcaagagcaagatcttcttcattgcatggtctccaacagcatcaaggattagagcaaagattctatacgcaacttcgaaggatgggctgagaagagcgctggatggaatcagctatgaactccaggccacagatccaactgagatgggattcgatgtaattagagacatagccaaatagacagatagagattcaaattaaatacgagagtccttttatcttcagttcagatgtggttccacgttgagtagttttaatttagcagctcccatgacatgtgctctcctttcttatcgttttgtatcatcacccagtactttggctggcatgttcaatgtgatatataatgtatgtggggcatgtaatcttaaatcacaataatatactaaatcaaaaaatgtggcggggtggtgtggttacaaaaaatatgccaatagctggctaaaaccaaaaaaaataaaactgttagtaaaaggatacgtagattagatcaactttttataaactaacttgatg

SEQ ID NO: 102848 - DNA, 396 bp, Glycine max
  Clone ID: PAT_MRT3847_63890C.1
atttcttacaccaacttcccatagaagagagaagagagaagagactctcccttccatcctgcaactcaaatcatcatgcaagacttcagctcaatgaagacttcccccttggatctcatgaccggcaccttcaagggcaagcctcgaccccaacaacgactcctcctccaccaacgccgccgccgccgactttctcctcgagaaccgcgactttcgcatgctcctcacaacctccgtggccgttcacatcggctgcgtcggcgactatatctggcgcaaatcatacttccacaaggccaagcctctagagccttccaaacgctgagttgagaagctttcctaaatcgaagtcgacgacggcaccaaaaaggccaccatcctcttaggtactcaaac

SEQ ID NO: 102849 - DNA, 322 bp, Glycine max
  unsure (1)..(322): unsure at all n locations
  Clone ID: PAT_MRT3847_63891C.1
ngnancnganctannacgtngctcggnattcggctcgcgnttagtgngtaantgnanacnanncacntaangnnacnnanttanantacactctacnntctcnatactgagnangnagagatnctntantngcatgtgtggaggtnctatncnctcagccttcgtnggtntgangcgtggcnganacctcgcagcgcaggntactgnggtccaaagcttgntcncnnnntctngacctcctnggcatcgatnncaccaaatccgccgacgagctacncgccccnnccaggcnaataaggtangtntctggctaaatcgnnct

SEQ ID NO: 102850 - DNA, 260 bp, Glycine max
  Clone ID: PAT_MRT3847_63892C.1
ctcaatttagaaaatttctaccgcattacattaggtgacatctgtatagcttgttgatctacaatctcccatcgtttctcactgctgaaattaaatatatgcgggatttgagtaatattcatatgaccggcttatgttacgacggcagatacaaattctggactacacacgaggcgaatctagattcgacagaagaggttaagctggacatgattacaaatagaggcattactgcaggtagacttgcaaagcgagctcat

SEQ ID NO: 102851 - DNA, 439 bp, Glycine max
  Clone ID: PAT_MRT3847_63893C.1
aaggaataataataataataataatcatcaagtcccttcacaggaagtcaatgcccgaaccatatacattttccatggagtgctagctaatctaggaatgtagagaataaaaacaccccccacgtatatatatatatatatggggcgttcttgactccctcttctaagacaacaactattactactactacttcttgttccaaagcaaaagtatgcaaaataacaaaccataaatttgttttggaaagaaaaaaaaaagatgcatctttcttaacctcacccttaaaaataaaagaaaataaatctggtagttggtgtgaaaggtaatgaaagttgaaccctttgaagcaaaatacagctctaccatcagctggagcaggaaataatgagggcttgtggtcttgatgagggggcattgaattgtcccaactaacccaaa

SEQ ID NO: 102852 - DNA, 679 bp, Glycine max
  Clone ID: PAT_MRT3847_63894C.1
ggactaaactcaaactcgaatttatatgacgaaaagcaaaaaaattaaaaatcaactaagaaaaaaaaagtccaaaaactaccaatcgtgacaaaagatgtgtgcctaatcccaattaaagagcaacaggttttgctagaagaaatagaggcaaagataacggcattttttttaaggctaacacatggccctaatcgtgtccctgttcttctcccttcgagttggatatgggatttttattagcggtgcccatttccatagcttcttctttttctgttctcggcttcttcttttgatccccttttttgtcacgggagataaaatacaatattagttgtgctgttcccaacgcagaaccaaccccattaggtacagccacaaatgggtcacggcctagtagcccgtagatgaaccaagaagtaccacagaggaacacaaagagtgagaggaagaagggcatgaactccacgctcttggttttgatcactagcctcataattgagagtggtgaaccatacatgatgatggaaaatatggcagcagcgaagccacagaagagttttcgggcattgccatgcaaagcaaacagtgacaccagaacaacaacagagaacactgccaccacgaaggagaaaaggccaagaatcttggccttctctttctttggtgcgaagctcgt

SEQ ID NO: 102853 - DNA, 450 bp, Glycine max
  Clone ID: PAT_MRT3847_63895C.1
gtgcactacatcatgttccgaacattcaaactgggtcatggttttctgaaagttgggacgcggccaggacaagcgccatgatgaatctgacgcaggaatggtggcacagcttgctcatgaggtagctgatgcagcacatggtggacatgggctacccatctggggcttaccaagcaccacctgaggcataccctccgcaccaagggtgcccttcacaacatgagcatactcccggtgagcaccgtccacatcacggttacagtactgctggatacccaccagctagttatactgggtcatatcatgcaccacattctcatggtcacggcggcacgtgagcaaggctcacagaatgtcgctgccgacaatgctgctgattatggcgctgacacatgtcataattgctgcgatggctcctatggcctagttgctacacatggtgctcacatg

SEQ ID NO: 102854 - DNA, 745 bp, Glycine max
  Clone ID: PAT_MRT3847_63896C.1
tttttagagaaatcttgtattattcaacccggttgaaaagttgttacaagacaatttatacagttatgctaactgtcaactaactctaacaaacttgagtcagttaacatacaatagaaagagaactcgctactaactatagtgatgatccagaatacaacaaaaagagttaaaaaacaaaagggataaagtatacacttatactccctcgcaagctcaagaggtgttggaagaaggtctttcaaccactttgagtttggacctaaaagaaatgaaggaagaaggagacaaagctttggtcagaacatctgcaatctgatccatagtaggaacatgaacaacatcaagcttcttgttcaaaactttctctcggacaaaaaacaaatccagttccatatgcttggttctagagtgtaaaataagattgtgagctagtgagacagtgctggtgttatcacagagaatgagaggagtagagtgagcaacttgaagttcagacaacaaggactgaatctaagtgacctttgctacaataagagtcatgcttctgtgttctgtctcaatggctggatctggccaccacagactgtttcttggaccactaacaaatgagattaggtccaagaaaggacctcctgtaatcaggatcagaggcccagtcagagccacagtaagcatgaagaggaatgggatgttgtagagatgttgcctgaaaatgtaatccccaagagatagtacccttgag

SEQ ID NO: 102855 - DNA, 478 bp, Glycine max
  Clone ID: PAT_MRT3847_63897C.1
cctactcgtgcgatcacaggaggccgaaccttaagaccggaagcaaaagcaatcggagcttgatttcacgaatcgtccaatttatgcctactccgtggcgaccgatttgtgaagggaaagaacatactgtctgcgctggccacagactgcgcgaatcatacaattccacactcttagtttattggctgaacactctcctatatgatacaggactgcgcgtcagatctaaactctggctgtttctgtctcaggtctctgctcactatcaagtccacgctggtgaaatcttgggttagtgctcccactgtactatctggaataggactgagtggggagacttgcctgtagcggtcctgtcaatcactctctgaccctcactgatccggattgccagtcaacgaggccttatatggaaaacacttgggccatggtgcaaatgttagctacgttaatagagtctggggacaacaggctcgct

SEQ ID NO: 102856 - DNA, 297 bp, Glycine max
  Clone ID: PAT_MRT3847_63898C.1
aaccaaaccttgcgaacccttataaattaaattcatgtgtcctcgggcatagaaaaaaatacataaaaattatttgttcacaacttggagaggagaccaaattgagtttcgggatttacaccatacgagattgtattatagcaattctgctcaccttagcagacgatgtcgtgcacacttgtggtgcaaagacctccaagaaagacaaatttttttggctagagatcagactggggggtgggtgaaagttctttttttaactctctttcaaataactgtttttccatagctagatgt

SEQ ID NO: 102857 - DNA, 179 bp, Glycine max
  Clone ID: PAT_MRT3847_63899C.1
cccacgcgttcgcgcaattcttttcaccatttttaacaaacgaatatccaagggaaaaaccgcgatccttaaaagacctcaaagacctattatttcatacacaaataccttcaaataataacgagccttatgaaatctaattatattaaagataacaaaagatcatataataaatgtac

SEQ ID NO: 102858 - DNA, 223 bp, Glycine max
  Clone ID: PAT_MRT3847_6389C.1
tcttaatcaacttcacaaataaagtgtcatcactttctcttcctttgctttgggcccatcactcatatgattgccttgcagtaaattaaatagtgcagtggtgaagataaagggacagattcataagtatgggaaagtgataatagttcagtctggagcacctcagttcaaggtaatcagatattcacttgtcacgtacattggtggtacgctgttcggtgta

SEQ ID NO: 102859 - DNA, 465 bp, Glycine max
  Clone ID: PAT_MRT3847_638C.1
ggagccccaaaaccagaaagggcccccaaaggaaaccaaaaccccaaaaaaaaaatccgggggagggggggaaaaaaaaaaaccccccgttaaacaggggttcacaacaaaacccccaaacaagaacccccggaaaaacaccaccacccgggttaaagccccaccccccgggggggccccccaaaataaaaaccaaaaacccccggaaaaaaaaggggaatttgggaatgggggggccccaaacccaagggcattgagggggccccaaacttaagggaaccccatttaaaccaaaccctccccagaaaaccaaagaaaaaaggccctttggggaaaaaaaaccgggaaagggccgcccaccccccagaacatttttggaaaagagggaaaaaggccaaaaaagggggacgcccttcccaaccccggggggggggggccacaaacagggggttccacatggggggg

SEQ ID NO: 102860 - DNA, 202 bp, Glycine max
  Clone ID: PAT_MRT3847_63900C.1
aggactccccaaccttgttatagctttctccatttcctttccctcagggtctttgcagtgatgcatgtgtgaagtagttaatttctagcatttgatattagctataataattaatgtaatgtgtataattattcttaatgaagttttatttgtattgatgatgtacgtccaagtaaatcatgttattgaaagtttaatttat

SEQ ID NO: 102861 - DNA, 418 bp, Glycine max
  Clone ID: PAT_MRT3847_63901C.1
caactcaagcgaagcataactctggccccaggttatatatatatatatatatatatgggcccgggagtcatcccatcataccttccctttcattttataggacatataatcatataccatggttggaaatggaaaaaaaattaagaaaatccgaagcctaaaattcaaattttacaaaaggtataggaaagaccaataccgtaattgacatcaaaagacaggagccgggaaccagtccctaattcttggggccggctatttggaaataaaaagaaaagccctattcaccaaagcccgatttccatgacctctggttctaaggaaaaaaagtcaagaatcctcattggtccatgggccacatgaaccagccagccccaaacccagtttagaccgggcaattccaatatttaacctttta

SEQ ID NO: 102862 - DNA, 211 bp, Glycine max
  Clone ID: PAT_MRT3847_63902C.1
gttatcataagctgccgtaccttaaaaccgggaacactagctcgaattacttgtttgaacgaatatcacaagagattgctacttgttcgagatcgatcactgaagggaacgaaatagacactctgggctggtgacatactgcctggatcattacctttggcactcttaggttaatggctgaagactatactattggatataggactgaggg

SEQ ID NO: 102863 - DNA, 418 bp, Glycine max
  unsure (1)..(418): unsure at all n locations
  Clone ID: PAT_MRT3847_63903C.1
anatannntttttttttttccccgcgaaaatctttttaaaaattttccaaactccaatcataaaaatgaactaggggaaatgtttttcatcaattaaattttacattcacactgataaacttcacacctcccaaaaagaatttgctgttttttacatttgctgatcgagggtaatctaccatttaccttgccaaacacaatgaaccaaaatcccaatccaaatgtggggaaaattttctccctccattcctaaattaaaactatcagttccagtttgcttttccatttaaattttcccctttactataaaaaaataaaccctgcccaaagtaccctaatcttttttttctacaatatttccaagaaaattatttctttttaaaacccccaacacttacatttttgtttttattttttt

SEQ ID NO: 102864 - DNA, 346 bp, Glycine max
  Clone ID: PAT_MRT3847_63904C.1
ggctgacctcgaggttgcgttcttggctgtattgctctgcatggttgcggtgactgctcctttggctcttgctggtttcccttgcgggcgcgtgacgagtagcctgatcattttcgtcggtttcctgcggcacggaggaactcctcctttcgcatgctgccacggatcgaatagcctcattgcctccgtcaagaccaccgccgaccgccgaacggcgtgcatctgcctgctgtccggcgtcgaccgcatctactgcttgcgagccaacctcgccgcctcgctccccggcgtgtgcgtagtttacatccgctacaagatcagtatctccatcaactgcgctcccatc

SEQ ID NO: 102865 - DNA, 292 bp, Glycine max
  Clone ID: PAT_MRT3847_63905C.1
ctaaaaacaatgccaacctaattgtaacttgtgatacgcttcaacaccctcggatcctgacaagtactagacatgccgttcataactcttgaccaacgtgtgacgatgccaccatggcttttttgcacgtcatgcgagactaagatcaatttctagataatgtaacacaagcacttatatatatggcactaggacgaccgatgccctattgtgcacatgttattggctgatagctcctgatatgaggcaactaggacaacgacatggagcaacatcacccggtcagctgccg

SEQ ID NO: 102866 - DNA, 384 bp, Glycine max
  Clone ID: PAT_MRT3847_63906C.1
acgcccacgcgttcggagtaatgtttctcgttcttgtatcatgaatgtattgggaagggctattcttagggtctgacttcgactctctctgcaatgcatcccgtatggactctctatggctcatgagcataatcgcgtctcgttgaactattcactatcagcccgtttcagatgcctcctttccgaaggctggctacccctcatgggagaaattgattctgaaggattcacaagatcctttcactctaaatgcatttttatacaaaacagcatcgagagataaactgattaggcagggatacaacattgttgggatcattggagaccaatggagcgatctcctcggaagccacatacgctaaagcaggacctttaagcttccta

SEQ ID NO: 102867 - DNA, 616 bp, Glycine max
  Clone ID: PAT_MRT3847_63907C.1
acttataagaatatttttcagccattacatgaaacatagatgaaggttagataagaagctcctgaactcgagccgcttcaacaatgctcaaaattttgatggctctgctccttttgtctctatcttttcaagcatatggacaatttgaggaatggtgcatagcagatgagcagaccccagatgacgagttacagagggccatggagtgggcttgtggaaagggtggagcagattgcagcaagatacaagtgaatcaaccctgttaccttccaaataccttgaaggaccatgcctcttatgctttcaacaactactatcagaggttcaaaaacaaaggaggctcttgctatttcaattctgctgcaatcaccactgatcttgacccaagtcatggctcatgcaagtatgagtttgttccttgaataaagtttgaagtaatatattttcttttatcaaagacaataagaccatattttgcggttgaacttcggagggagtaatgggtcggtccttctttttgtccgcgtttcttaaattctcattgagttattgttccatctcttgagtcttgatatcaaagtgaaactgtaccatggcgaaatgacgttgaattctt

SEQ ID NO: 102868 - DNA, 1457 bp, Glycine max
  unsure (1)..(1457): unsure at all n locations
  Clone ID: PAT_MRT3847_63908C.1
aaaccgcgtccggtgctggtagcagcagcagctgaagctcgcaggaaatggagatggagaaggagaaggagtcgctaacactgggaaagcgaagagaacccgatctcccagtaacagtaacagagaccacttcaatgccgaagaaagctcgcagttcggaacgcacgtgcgtgcacgaggtggccgttccgagcggctacgtctcgagcaaggacgaagatctccacggaactctctcgaatcctctccacaacggtcccatggcgaagtcctatcccttcactctcgaccccttccagcaggtctccatcgcctgcctggagcgcaacgagtccgtcctcgtctccgcccacacctccgccggcaagaccgccgtcgccgagtacgccatcgccatgtccttccgcgacaagcagcgcgtcatctacacctctcctctcaaggccctcagcaaccagaagtaccgcgagctcagccaggagttcaccgacgtcggcctcatcgcgtccgacgtcacgcccgctcccaacgccacgtgtctcgtcatgaccaccgagattctccgtggaatgctctacagaggatccgaggttttaaaagaagtggcctgggttatatttgatgagattcattacatgaaggatcgcgaacgaggcgttgtttgggaagagagtataatctttctgccaccggcgattaagatggttttcctttcggctactatgtccaacgccaccgagtttgctgagtggatttgtaatattcacaagcagccttgtcatgttgtgtacactgattttaggcccacgcctttgcagcactatgtgttccccatgggggggagtgggttgtatttggttgtggatgagaatgaacagttcagggaggataattttttgaagctgcaggatactttcacgaagcagaatttaggggatgggaagaggggtgggaaaggcgctggaagaggtggtaaaggtggcaatgcctctggtggttctgatatttacaagattgttaagatgatcatggaacggaaattccaacctgttatcatctttagcttcagtagaagagagtgtgaacaacatgcaatgtctatgtccaagcttgacttcaactctcaagaagaaaaggatacagtggagcatgtttttcaaaatgcagtgctctgtttgaatgaagaagacaggaacttacctgcttttgagctgatgttgccacttcttcagcgaggaattgctgtccatcattctggacttcttcctgtccatcaaagaattggtcgagcttcttttccaggaaggtcttggaaaaaccctcttcgctactgaaacataannacatttgcaatgggtnnttaaatatgccggcgaaaactgtcatattcactttgctgttaagaaatggtgatggttgatagtcacccgttatatttggatctggtggaatatata

SEQ ID NO: 102869 - DNA, 465 bp, Glycine max
  unsure (1)..(465): unsure at all n locations
  Clone ID: PAT_MRT3847_63909C.1
ggggggatcttgaaagggaactgcggtctaaaaaaacaacaatggcaggactactataagtaccgctggatgagcacatcactaacgacagatggagtacgaacacccactctgtgaaaagcaaaccaggtactgaggaggggtgtagtcctccgcggacctcttcaacctcaaccatccatggaataggtacgccaaacccaatagggcaaaatgcaggggctaaacccactaggccaagagggtaaaggcgaacaaacttggcagactccttagacagccgacaataaaacagatgttattccaaaacagccgaggcaacccaaacgctaaacangataggattcccatgcaccgaaaaataatgcacccccaccatttaaacaactttctaccgcacccacaaaaaaccattgtccaccttatttcaatagaatatgcaacaaacaaaaatctatttataag

SEQ ID NO: 102870 - DNA, 372 bp, Glycine max
  unsure (1)..(372): unsure at all n locations
  Clone ID: PAT_MRT3847_6390C.1
acggctgcgagaagacgacagaagggggtcgcgcgcaggtcgcaaggcatcgtagcggtagcgcgtgatcccatggccactctccttctacccctcaactcctattctcccacaccaattcgaaaccctaatctatcttctcttaaaatcaaagtcaaccagcgtcactctcctttccaaacccgacgacttcatcgcaccccattcgttcgtgcactggaggaagattcgaaccctgaaacagtccaagatggcgaagtgaacagtttaggagtcaaggttgcgctgtccatgttgagattctaccagagggaaatttcaccaattttgccaaagagntgtcgatacattccaacctgcagtgagtattcc

SEQ ID NO: 102871 - DNA, 441 bp, Glycine max
  Clone ID: PAT_MRT3847_63910C.1
acacgcaactctttggaatacagaaagaaatctcagatcacacacacaacgcagtgagagagaatggggggttttattttaacgttttggctgttattcctttacagctcaacctgcatttctctctcacacactcgcatctcagatcgaaatcgaggtcactgagtgagaagtgtttacgttattctgcgctggtgatgttcatacaaactagatagctacatggtggagagagacatttttctcatatgacttctattagctatattattattgagcggtgttgctatgggcatttgtctttggaaatggcaatggccgtggcttctttatgttctgctgatacatgttgtaatctataaaagcggagcaatcaacccccgatggtgaggtgcttctcagctttaggacatcaagttgtagttctgatggtatcctatt

SEQ ID NO: 102872 - DNA, 405 bp, Glycine max
  Clone ID: PAT_MRT3847_63911C.1
gaaaaaaaggggggttggttttccaaagaaaaaaaggggccgttgtttgaaccaaaaccggaaaacccgttgggggggttttttgccaggggaaaaaaaaaaaaggtttggggacccaaaaaaaaaaaaaagggggaattttgttttcaccccggttccaaaaattaatctccccagagggggttttggcttttaatagcccaaaaaactggctgtttttggggaaaccttaggggcctttgggggaccaaacccctttaaaaaccttttaaaccctttgggagcccaaattttttgggaggcccaaaagaacccaaaaaatttggggttttggggaccttctccttgaaccccccttttaaaaaccccaggggggaaaaccaaaaaccaaagggaagccccccc

SEQ ID NO: 102873 - DNA, 1151 bp, Glycine max
  Clone ID: PAT_MRT3847_63912C.1
gtgtatatggttgccgctgatactgcgtagtcttattctctctccatcaccactgtaaaccgttattaaaaaaatcttaaaatatcttccttctttctttcttcttctttgctcacactgatacagttactccatcgaattctctctcccctctcttcaaaacgcgctgattctgggaactccccgatttttggtttcgagtttttcgcttcttgcggagaaaaatcgcgtctttctcatcgaactcgtcttccacactgaaattctacttcgcttttgctcttttactacagatatacatcaaaactaagtttcatcagctttcaccctcatggctggattgttgcttggtgatgcctctcatcatggaacttctcaaggtgtttctcagagatactctgaagagaagctggaggatggttcgaggtggtactttgctaggaaggagattgaagaatactcaccatccaaacacgatggcatagatttgaagaaagaaacttacctacgcaaatcatactgtacatttctgcaagacttaggcatgagacttaaagtgcctcaggtaactattgcaactgcaataatattttgtcatcgattctttctccggcagtcccatgcaaagaatgaccggaggaccattgcaacagtatgcatgtttcttgctgggaaggttgaagaaactcctcgcccactaaaagatgtaattcttatttcatatgaaattatacataagaaaggatccagcggcaattatgagaataaaacaaaaggatgtgtatgaacagcataaagaattaattttactgggagagagggttgttcttgcaactcttggttttgatctgaatgtgcatcatccttataaacctcttgttgaggcaataaagaaattcaaagtagctcaaaatgccctagctcaagttgcgtggaattttgtaaatgatggacttcggacatcactttgcttgcaatttaagccccatcacattgcagctggagccatattccttgctgccaagtttctgaaggtgaagctaccatcagatggggagaaggtctggtggcaagagtttgatgtcactccacgccaattggaggaagttagtaatcaaatgttagagctgtatgaacaaaatcgaatgcca

SEQ ID NO: 102874 - DNA, 2258 bp, Glycine max
  unsure (1)..(2258): unsure at all n locations
  Clone ID: PAT_MRT3847_63913C.1
cggttacacgttaggttagtgagtggctgtcgtccccaaacccccccactaccttaaacgttccgatcacatcccctcaaaacaaaaccatatccttttaaaccttcagtcattgtctttcttaaatattttgttccttggaacgtacgagatgagcaagagcgtaacagcaacaaaggactcaggcgacaacaccgcgacccacttgaattttttcgagaaatttaaacgctttaaccctctcgagtcttcctggggagtactagccttcttcttcgtcgcttctctcttcattgcctgcttcttctacttggattacaagggcttccgctctagaggcaccactatcattgacttggatttttcatcatcatcatcttcttcttcttctgtttctgtttctggttgttgtaccacagtaaaatcaataagggactcaggcgataaatgtgatatctttgatgggaatttcgtttgggatgagagctatccccttttcgattctttatagtgagcactagtgcatcaactttgtcgcttctctcatcattgccagcttgttcctctctgcttcaagtggctatggcaacccgaggattgccactttccttcacttgaagcaagcattattttgttaaagctacggtacaagcgactagtgtttggtggtgattctattggaaggaatcaatgggaatcactcctttgtatgctctcttcgccatttgcaaattatgctagggattacgtcgttaatggggactcaatcagaaattttacaggctctgtggcatttaatattgaagattgccaaagtaccaatacatactacgataacgatcatctatctatttactatctttgaccatgcagtacatcctctatgtgcctgcaagactgtagtcattggtgcctacctggcgttcctgattcatggaacgaaattctttatgcacttcttctcaagcgggaggatttttttcgtaacggagacagcatacgaacaaaaagatgaatatgacttcagaatataatttcagaaaatcaacagagacagtagttgattggattaccaatgaagtaaacataaacaaaacttacgtcgttttccgaacttatgctcctgtccatttcaggggtggtgactggaatactggtggtggttgtcacttggaaacattacccgatttaggctccttgccagcagtatctgacatccatttcagaactgtcgttgatgtattgtcagaacgcacgaataaatcaaaagttttgaatctggacttgcttaatgtcacccaaatgtcaatacgcaggagagacggccatgcatctatttactatatcggaccagacagcacagcctctatgcagcggcaagactgtagccattggtgcctacctggtgtgcctgattcatggaacgagattctttatgcacttcttctcaagcgggaggatatttttgaacggagacagaatacaacaaaaatttctcaagttccaccataattggtctatacagtttgcagagaatgttctaagttatacaagtcctttcccaacccttgctgaatgaggtgaagttgcaagttgaatttgacatctttctggtcagtctctagttgatgatccatctaactatttgttagtttgcttaatgtttacagaattttattcttagcaatcaaagaagttaagctgttttaatttcctacaaaatgattgcttgaccatttttgtagtggtctgccattgtaggtgaacatatctagatgggaacttaatttttgaaggtgagtttcagtgatatcttgtacaaaaaagaaaaaaataaccaccgaaattcgaacttgattgatcagaaggcatacatcatcttttgttgtaaatttcatatgatggtcggagtccatgatgcagctgtttgttgtaaattgtatgtaaaaagagattgtttttttgtttttggttaattgtatttttatttatatagacaaataccctggagtaattgatatggatgatacttgttggagatacagaagattatcgtggctcagtcatcgattcatacatgcaatctggatcaagtttcgagatttatttgtattttcaagttccttagaataatactaatgaatcatatacgttatattgttgcttttcttgaaattgccattctgcactttgcgtgaaccatacttggcaatgcctttgactaatcgcgtttgagcttaacaatnngggttgaatac

SEQ ID NO: 102875 - DNA, 483 bp, Glycine max
  Clone ID: PAT_MRT3847_63914C.1
taaatctcttgttgccttctttcttacagattgttctctttcatgctagcatatcatccataaatgcatgcatgctttgcaatttgcaaaacagttttatgccaaattcaactaactttagtttttggttggtgatggggttttaggggactacagaacttctatggccaaaacgtagttacatgtgaaactattaggtgaaacattgatgtattaggaaaacaccataactaactgcgatattgacgattatgtccttgttggaaatgagttgcatttgcacctagagggctctctgaagtcaaaacctacaagtcatgtcccatttgaatcttataggtttcatcttgagatatataaatcttttagtttgaaataagaaactccttaccttttacttttccatatatcaaattgaatctgaatttgaaataagaaactccttaccttttacttttccatatatcaaattgaatctgaaat

SEQ ID NO: 102876 - DNA, 278 bp, Glycine max
  Clone ID: PAT_MRT3847_63915C.1
ctctagccttttcgtatccagctctacaaccactgcgtcggtcctgcactcagccaaccttttctcctactccaccgccacctatcaactcccaatcctcctagcgcgtacagctcacctcctacctccaagcccgccctctgcgccgcctgggcttcgctcactcgtaacccaatgctcacggccagtgtaacgtctctcgtggcagcagtgagacgacgaggaaagggccctaaccaaatggtctcgattacgaagaataacctatgtgacctgaa

SEQ ID NO: 102877 - DNA, 338 bp, Glycine max
  Clone ID: PAT_MRT3847_63916C.1
agcatcaaaacaggctttatagaatttttaccgcgtaacaatgtacacgatctggcgtaaaaaacttattgccttggaagattatagtaagtcctttcagctcccaatcaagagccaagataattatcatacagaaaaacgtataaaactggtgagacctgcgcctttggcataaaacgaggccacttctattctttattcgcttcaacactaatcttatccttttccagaatatcataaaaggcccgggttattctatggtcgctccagcgaggcatatgacagacactgcctgtagctaaaccaagtctctataggcgacacatatttccttgaca

SEQ ID NO: 102878 - DNA, 494 bp, Glycine max
  unsure (1)..(494): unsure at all n locations
  Clone ID: PAT_MRT3847_63917C.1
aagctggagcctccactcgcgggtgggcggccccgctctagtttctattgtggatctccccgggcctgcagggaatgtcggcatctgagccagncattgggtgtatttcattgtgtatcaagaaaaatgctgnngctgccagactcaactcattggcgttttctgttcgcactacatgtcttcaagtagcttattttctcttatactctttaccggtgctcttcgagaactcaggcattttgtgtgggggaaatggtgagaactatgaagcgcttcctagacattgctagttcctctatcatgaagcataaatttcaagggccaatacaaatctgaaatcaagcataatcatatcagtctcaataattcgcgtacaacgaaggcnttttcaattatctgagctacntatcctcgcttagatttatgtgtgagaacaatgatgaatgagatggtagtctatttgcattgtttcattaaaaaataaaacaatatca

SEQ ID NO: 102879 - DNA, 164 bp, Glycine max
  Clone ID: PAT_MRT3847_63918C.1
tgttcgatttttacggactcatactgctccttacagcatgggtcacagtaaatgtacttaaatatgcaataataatatgagattaacaagcttctaaatcccattttctaatagtcttcaaatgatctttatcgatataatcaaacgttattatgaaaaaatta

SEQ ID NO: 102880 - DNA, 1806 bp, Glycine max
  Clone ID: PAT_MRT3847_63919C.1
aaaatacatgtatgaaacgcctagcaatgattgaatcgaacagccaaaaaataaacaaatatggttctgttaatcaattttattaggttgggcctttttgaatagatagttggtacccttggggccaggcccaaccgtggcgcgtagggttgaaacccaatcccccaactccgcaaccatcgaccgaacgacgccaccagcagcgaagtgagtgagtctccgattctcaacaatggtagctgcaaaaccaaagtagacaactttagtagctgcaaatccgaaatagacaacctaagaagtaagaaccccttctttagtgtttgatgtcttgtttgttaatgcaatccctcaagtcacaccctgctcttttattttccctttccaatcacttctctttctcttctcactctgtcagatcctttctctcttctttctccacatgccaacactcaaaggaaagcacttccattattgattatctaaatgccaagttcgatttctcgagaactcaatccttctacatctcaaaacgtgtttcaagcagcagattcccccaaaaccccttgtctgtgctcagttttttcaaacaatttgggttttctgaagcccagattctctttttgattcgtcacaaaccccagatactgttcactgatgttgacaaaatcttgagacccaaaattgagctctttcagctgttgggtctcgagcgctcggagttgtgcaagttcatttccaagaattcctccattttgactttcagtttgaagaaaacattggtcccctctgtggaagctattgggaaaattctctgcagtgagaaagattttgttcatgttttgctcagatgtggccggatactcccaaattacaaaaaatttatggacaatgttgtcttcttggaaagttgtggcattgttgggtctcatcttgcaatgctactcaaactacagccaggtattttcatcacacggcagtctattataggagactatgtttcgcgcgctgtagacatgggtttcaatgaaaattcaagaatgcttgtccatgcaatccattcaataagtagtttgagctataaaacatttaggagaaaactgaagctaattatttgttttggtttttccaatgaggagggcctgcaaatgttcagaagatccccaactttgcttagaacatcagagaagaaggtgaaggttggactggaattcttcttgcatacagttatgctgcccaaatcagtcctggttcatcagccaagggttttaatgtatagcatggaggatcgcgtgcttcctcgatatagagtcttccagctcttgatagaaaaaaaactttgcaagaaggtcccgagttacattcatttgttatgcttgtctgaggaggtgttcttggacaagtatataccacatttcagagaaaatgcagaggaattattagtagcatacaagtgtatctgttttagcaacaaaaagtgtttactttacattggcattttctttacaagaagccttgggcaatttggggaccacaaaccatgttggtgcttatggtttttttttctgatgacaacatattcttctccctagttttctccattttgctctagacttctgaatctgcaatccattatcaaatgacaaaatggtggctaatatgtatttaatatttgaatagaagtgtatctgttttagcaacaaaaagtgtttactttacattggcattttgaaattgtccatttcccgggaaacaacagtaaatatgtatgagaataactcataaatgggtccttttgtttcatttggt

SEQ ID NO: 102881 - DNA, 314 bp, Glycine max
  Clone ID: PAT_MRT3847_6391C.1
tttacagaagcatggcgaagaggtggagcattatataaaggttcccttggaggacgtatatgaccgcacaacaaagaaactctttctttttagaaacgtattgtgctcaaaatgtcaagggaaaggttaaaaaagtggaacaacaaagaagagttgtggaggccaacgcactgggatgaaaaacacacgaacgatgattggactactgatgagtcaacaaaagcaacaggtgtctcctgactgaaaatgatatagtgaggtgattaacccgagacataactgggcactgggcgtaggaatccaacttttccact

SEQ ID NO: 102882 - DNA, 487 bp, Glycine max
  Clone ID: PAT_MRT3847_63920C.1
cgtctctctctcttttcttttgtttctcatcatcatatctcaattctcaacgagttttaaaggacaaaggaaaccacaaccaacaacaccagacgtaggagaagctagccaagagagaggaatcatagttccttttctgggaacgacggttcctcctttatgctaccttcaccacctctttcttcataccataccccccctcaggtgatctaatttcttctcagggggggattaatcatagacacactgcttaatcaatattttttgtggagatatacatcataaggaagaaaaaatgttgaccggattaatgaagaagatcgcatccaccacaatggggagctgtgcctcaaatccaagcagaaagagcagtggtcagaaaagaagaaaacaaaagtctgggaaacgcagaggaaacggccttccctctgcacttcctgaattgcctttgaaaagggttagcaatgccggaagccgtgtgggagac

SEQ ID NO: 102883 - DNA, 578 bp, Glycine max
  Clone ID: PAT_MRT3847_63921C.1
ggttaccgatatctctttatattctatttatttatacatatgtggggatagagggtgtcacagcaccaatgtagaaagcactgctttctacatcgttgctggcgtaagcacgacttcatttgtcacgtgttctacgacggtccttttacgaccgatgtagaaagctttgttaactgcagcagcactagatgatatccccacccaattgctccctcgtggtatagtcgtgcttgttcttcctgactcccttcatcaattgaccaccaacctaataatctagaaccatgatgcaagaacccaaagcaatcatgagctcttgaagaaaatataaaatatattcctccaccaactccacttcgtagcagtaaaagtgaaagagaatcaccttgattaatgcctaacatgcaatctgcaaatccttcaattagctgattacttaattcaattgactattgtatgtataatgagactagatacctaacagtaaaagtgtaacaatatactagtgacaagcattttcaaaacaatgcataaacaaacattatatgaagtgaatatttggtagataatttcctacc

SEQ ID NO: 102884 - DNA, 2793 bp, Glycine max
  Clone ID: PAT_MRT3847_63922C.1
ttccccacgcgtccgtacgcctgcgagatgcctctgcttgtggggttgctttcacttcttcctctctgcttcttcttcttccttgccctctctcgctattgagcttttctttttaacacggaatatgagtgacacaaaagggttttgaggctttctatcactctaaagctcttagctcattcacctcttgggtggtgtggtctattatgtaaattaccatttgtgcaattttttctcagatctatccaacttctcttttttatcctttattctgtttgcaaatcgccatcatcaccatttgatttgcaagaccataatttttctgctttggttttcccctcttccacatcatttttcaattttttttcctctgggtgttttcttcctgagaaaattttgttctttttggctaccctccaagcagatcctacttgggaaaagtaaaattttcagtttttttttttatcagtaccctcttttcagaccttaccctcatgttctagatttgaagatattgtcattacctcactcttatttgtgccaagatctgctccccctttttcttcttttagatcttggtctgttccatgatgtagtagtacttcaaagttgagagctttacctttctggggttttgttttatttttttttcatacctcccctttggagtatgaaaattttcctggaaaattggggagtttggatcactgagtgagagaaaagaagagagaaaaaaaagatgatgaattatttccccgacgaggtaatagagcacatatttgactatgtggtgtcacacagtgacagaaatgctttgtctttggtgtgcaaaagttggtacagaatagagaggtgtacgaggcaaagggtgttcatagggaactgttactccatcactccagagaggttgatccagaggtttcctggtctaaagtctttgactttgaagggaaagcctcattttgctgacttcagtttggtgccttatgattggggtggctttgtgcatccatggattgaggcactggccaagaacaaggttggtttggaggagcttaggctcaagaggatggtggtctcggatgagagcctggagctactttctcgttctttcacacacttcaagtctttggttcttgttagctgtgaagggttctccactgatggccttgctgctttagctgcaaattgcaggtttcttagggagctggatctgcaagaaaatgaggttgaagatcacaaaggccaatggctaagttgctttcctgacaactgcacatcacttgtttctcttaattttgcttgccttaaaggagaggttagtttgggagcactagagagatttgtggccagatctcctaacctgaagagtttaaagctgaatcgttcggtgcccgttgatgcactgcaaaggataatgatgcgagcacctcaactatcggatttgggtattggatcacttgtccatgatccagaatcggaggcctacataaagcttaagaataccattctcaagtgcaagtccataaccagtttgtctgggtttttggaagttgctcctcattgtcttgcagctatatatcctatttgcccgaacttaacatctttgaacttgagctatgcagcaggcattcagggaagtgatctggtaaaactaattcatcactgtgttaaacttcagcgcttatggataatggattgcattggagacaaaggactaggtgttgtagctacgacatgtaaagatttgcaagaattgagggtttttccatctgttccctttggggatccagcagctgtcacagaaaaagggctggttgcaatatcaatgggctgccctaagcttcactcgttactctacttctgccaccagatgacaaatgctgcactcataacagtggctaagaactgcccaaattttattcgattcaggttgtgtatccttgatgcaacaaaacctgaccctgatacaatgcagccactggacgaaggttttggcgcaattgtgcagtcttgcaggcgactcaggcgcctatctctctcggggaaattgactgaccaggttttcctttacataggaatgtatgctgagaaacttgaaatgctgtctattgcatttgctggggatggtgacaagggaatgctgtatgtgttgaatggatgcaagaagcttaggaagcttgagataagagactgcccttttggcaacatggcacttctgacggacgtagggaagtatgaaacaatgcgatccctttggatgtcgtcctgtgaagtgactgtcggagcctgcaagttgctagccaagaagatgccaaggttgaatgtggagatcttcaatgaaaacgagcaagaagattgtagtctggaagatgggcagaaggtagagaagatgtatttgtatcgtacattggctgggaaaaggaaagatgcaccagaatatgtatggactctgtaggtgcattttttaggtcatttaatttcttgttattcagaagtttgtacttgtttttaggctgactgaattaatgcaattttagccgggtgtagtgttttgtaacttccttgcatttgctagttttatacatatgttagtttgtcttttctcctagatattattattccataatgccactttttattacgtaaattattagagtattttgctttttatcttctaaaaaaaaaaaaaaaaaaaaaaaaaaaaaaaaaaaaaaaaaaaaaaaaaaaaaaaaaaaaaaaaaaagaaaaaaaaaaaaaaaaaaaaaaaaaaaaaaaaaaaaaaaaaaaaaa

SEQ ID NO: 102885 - DNA, 393 bp, Glycine max
  Clone ID: PAT_MRT3847_63923C.1
ctaacccaatccaaaatttttttcccttttcattatatgggggggaaccaaaattggaaggaaatttttccagaaaaatgggtccaggaaacaactttattaccctcctatagaccctattttaaccaacccttgagttaatttgtttttaaaaaaaaaaaaaaaaagttttttgaaaattcccttttttgaaattcaaaaaaatttttcccaatgatttttatgatcatcccccaggggctatccccctgtatcttggccttgttctgccaacctcaggggaaaggccctgtcccatggccctccctttgttattggggggggcttgttgaaaaattggtcgctgttgcccaatagggggtgggggatgggactctgattctgaccttggct

SEQ ID NO: 102886 - DNA, 207 bp, Glycine max
  unsure (1)..(207): unsure at all n locations
  Clone ID: PAT_MRT3847_63924C.1
caaagctctctccacctatattgctataacaaacaattcacanatgtaactctcttttgttgttgttcgatggaaagttgtttctttcggtacatgaccgagcgctgctcactctgccatcaattttgcacaaaccccacttcagattcttcacaaggcctgatcttggtggtggtggtgtggggggggtctactcccccggggtgc

SEQ ID NO: 102887 - DNA, 457 bp, Glycine max
  unsure (1)..(457): unsure at all n locations
  Clone ID: PAT_MRT3847_63925C.1
ccacgcgtccgagaacagtggtcacaaatcacatacatcaaattaataggaaagactcctgcatggtgtgctctttggaataggaaaggctcctgcatggacttggtgcatgcccccagttgatcactataaatttggtagttatttgttgggacccagattagcattttcaagccaacttttagtttcccattggtctggtgcacatgctggtgtcctgttactctttatttttaatcttcctgtttcttctattttgatatctcttatctaattcggtaattcctgtgagtaacattattgttttgccttattacaacaatgattgtcctgttggcttatttgtgattttgtcttctacaatatttcccctctttttacagatttctataggttattttctancanatctnncaatgattctttgnnatttcccanctttannnnntctgnaata

SEQ ID NO: 102888 - DNA, 308 bp, Glycine max
  Clone ID: PAT_MRT3847_63926C.1
tgaaaattgctaactactacaagttttgtcgagaagtcagtgaaacaatgatggtatctttttgaggcatttaactttcattatagttgtttgatgaagaacttgaggaatgaccaaaggtagtcaatgacaattgacaccacacctgtggtggcaacctgaaattataaatggcccagaccaacctcaggtctgaattattaccttgtccaaaggatataatttggcgcacaaaaattgagacaccggtaaaaaaacctaaaacgctatacaaagatttctctaggacacatttacagtgttttcac

SEQ ID NO: 102889 - DNA, 114 bp, Glycine max
  Clone ID: PAT_MRT3847_63927C.1
acaattaagaattaacaaaggagctaaaatgggagaaactactaaaaacaatactggatcaaaatttggggttctaaacatgatacaaatgcctcagggcagaggtctatgggg

SEQ ID NO: 102890 - DNA, 899 bp, Glycine max
  unsure (1)..(899): unsure at all n locations
  Clone ID: PAT_MRT3847_63928C.1
cgtacgactcgagcgattcggctcactcgcttcgaaggcaaacgggacgtggaactcggcacgggctgcggcgttgcgggtactgggcctctacctgctgggcctgacggacctgctcctcaccgtcatctttcccgtcatgccggccctgaaacgcaacctgaaagtcagcaagcccatcctccgcaagaccctgaaacactccgtgctctactggaacaacccgcagcagatcgcagccctaaaccctcccttcgatttcgccgtcgcgaccgacgtcgtttacattccgcgaatccgttccttcgcttggtttctgctatggaaaccctcgtctccgacgacggcgtcgttttgctcgggtaccggcttagggcacccgaggcgcacgagcttttctgggaactctgtgaacgagtcttccacgttgagaaagtcccgcacgagcatctgcatcccgattatgcttacgaggaaaccgatgtttatcttttggggaagaaaaacaagaaacagtgactgattttaggtaatttagaaatttatgttacattacagttcagtgactcaaaaaaataatatttttactttattgagatggttttagaataaattaatgcacaaaaaaaaaaaaatagaaattagaatagctagcagcatttgaagaatgttgtgctggttgtttaaacgtccgtgtcgttgtctgtttggtttggtgcacaagaataaaattggggtcagtcaccaaccgcaagttaaatccgtgatctctgttgactgaattttggatatcggaatcatggaaaaaggttaattttgtttcagggtgaaagatgttatttgtgttcctatagactgtaaacttatttgcaagttcacaactccttggatcatttnat

SEQ ID NO: 102891 - DNA, 637 bp, Glycine max
  Clone ID: PAT_MRT3847_63929C.1
atatctttccctttaacacccttctttcttgacaattccaaaaaccatcaccaccactaccatcttgacaacatttctaccgaatcatcatcatcatcatcaccatattcaaatcataccaatttggaaaatcccttttcattgatgtcaacagaaaaaggaggcaaagatgaatcatcaacgtggattcttgagggcattgatattgatcccattgtggagaggcctaaaagggatgatgaagcaccccctaatggaatcatggtgcttaaatctcccaatgatgctgatgtgaacaacaacaacaatagcaatgtgaggagcagggttggcattcaggggaataatggggggaggaaaatgatgagggctgaatcaggagcagctagagggattaagagtttacggtttcttgatagaacggtcacagggaaggaagctgatgcatggaagtccattgagaagcgctttactcaaaatgcagttgatggaaagctcacaaaagacaaatttggaacctgcatgggcatgggggcagaatcaaaggattttgctgtggagctgtatgaggccttggcaaggaggaagaaagtctgtgcataaaatgggataacctttggatgaagtcaaaagattt

SEQ ID NO: 102892 - DNA, 264 bp, Glycine max
  Clone ID: PAT_MRT3847_6392C.1
aaaaaaaaattcaaaaaaaaaaaaaaaaaaaaaggggaacgggtaaaattaacatcaaagccaaaactaataaaaacagcatagaaactttaaagatccatattgaaccatagccctagccaagtttaccacaacagaaacaggtgtctacactgctccaactatggaagagtgagcatggacgagtctaccatagccaccaggaagacgcaaataggcattggatgatctagaataactcgaacgatatcagggacatgaatg

SEQ ID NO: 102893 - DNA, 188 bp, Glycine max
  Clone ID: PAT_MRT3847_63930C.1
ttcgccacgcgttcgtctgatattggaaactcggaagattaaaggcggccagtccagaattgggaccctgaaaaataaagccattgattcctcctctaaattcactcattctctttaaaaaagagggaaaagggaaatttattatccggttccatcaatgtccctttgagattttagaaattccccgg

SEQ ID NO: 102894 - DNA, 623 bp, Glycine max
  Clone ID: PAT_MRT3847_63931C.1
cacgcgtccggagaaggtccttgcagccgatctcctctaacacttgccagttgccatatcactcaaaatttaacggataattcggacaaacagaactgttacttatcctcttaaacttaatttaaaaatttccctcctaatatccgttctctccgaaaccctagaaattcgtcaccaccgccatggatatcagatttcctttctctccggcggaggtagccaaagtccgcatggtccagttcggaatactcagccccgacgagatcaggcaaatgtctgttgtacaaatcgagcacggcgagacgacggagagagggaagccgaaggttggaggattgagtgaccctcggcttggaactattgaccgaaagttgaagtgtgagacttgtaccgcgagtatggccgagtgccctggccattttggccacttggagcttgctaagccaatgttccatattgggtttttgaaaactgtcttaaccataatgcgttgtgtttgcttcaactgctctaaaattctagctgatgagaacgatcacaagtttaagcaggcgttaagaatcaggaatccaaaaaaccggctgaaaaagattctggatgcttgcaaaaacaaaagcagtgtg

SEQ ID NO: 102895 - DNA, 461 bp, Glycine max
  unsure (1)..(461): unsure at all n locations
  Clone ID: PAT_MRT3847_63932C.1
ccggngtcgacccacgccgtccgaggcatacggtacagctacagactcttacgagatttacattgagagaccatagacatactaatggccagactggggagacgccttagatgcgaatcttatccaattttatggagctcaatacttcatggacctggcatagtctattctcacatctccatatgttaccgcgcggctcctgcttactttcctgaagtacggatactcattcaatacacttttattaaacaactcttacaccttccacttattgtataaccatatatctgctaacatactgtctttaaactaaaacgaataatcatgggctcatgagtgggcagtcatgcatcgagtagttatgtatgaatgagattgatctaacaaagtctagcctatctctcactacgtaagtcttatcataacaggaactcgtatttaagaatgctgccttgaatgca

SEQ ID NO: 102896 - DNA, 178 bp, Glycine max
  Clone ID: PAT_MRT3847_63933C.1
tttcctcgatttcggaaagccgttcctacttctgaaagaacacgacctaatcatcaaactccgaggattggatcgtcaggacgccactatctcctccggcatcgcccaggctcggttccttctaacctacctgggctccaaaggcttggtcaagatgctgcacatccccgacggcgac

SEQ ID NO: 102897 - DNA, 615 bp, Glycine max
  Clone ID: PAT_MRT3847_63934C.1
agaccatagtagatggttggtaatatggcttagcgtaatcgtttaggtttcttcttcttctagttctgacgcttttgtctgttgctcttcatcatttcggttacctctggttgattttttcgatctgctcccgtaatcgagttgtggtattggttttggtttgtggattgttatgcttcttccgatcttaatcgagtttgtgtagggtttttgccgattgatatgcttttaccggaatgaagatcttgaagaaattgatagtctagcgacttcttttacatcaattatttgaattaggatataattcacttcatttgatcatggataattatctatctagttgttgatgaaagttgaactgtttgcgtttgattggtttgcagcacgatgaaatctccgtgtccgattgaagattaaattcataaaagatgccatgcctcatacggtggatttaaaacggctaacactcgataaacctaatttcttctttgagtttcctctgttatttaatttccctggacttgatcacgaaacacacggattgaattgtaaacctgttttttatttttctccagcgtagtgttcggaatagtttcgcatcaagcctcgtccatg

SEQ ID NO: 102898 - DNA, 496 bp, Glycine max
  Clone ID: PAT_MRT3847_63935C.1
ggcgaccacgcgtccggactagttctagatctcgagggccagggcgtttgcttttttttttttgcgaaaacgtgggtcctagcaggagccaggcgattattctggctgctaccataggcgttttattatctttccatgcacatatatatacccttcacacttatacataggcgttttactctatggaatagaattagcaccgcgagagtttgttaaaaaaattaaaaattgagctggatgcactctccgtagagacatgaaacattattacatgtatatcatgtaccacacttcaaaatccgatccactaatacttggatcatcccgactgaagtactactaaactgatgatatttcatcagcacatcagacaatttagagaatatacattgtaaagtttgatcccgttttctttttaaagtgggatggcttttttatataaaacgtcggcaacggcctcagcatttgaaaataaaaagagagtagtagttggaga

SEQ ID NO: 102899 - DNA, 235 bp, Glycine max
  Clone ID: PAT_MRT3847_63936C.1
ccatccacccgtggtgatccacatggttaggaggctcatgcctcttgtatgttgtcgagcgagttggaacccggtacacttttctcattcgtgagccactctgtgcactaacacgtgatgcacgtgccgtcgactgggctacagtgtcgcttgagttacaccttggggttgagaaccttctggagcttcctctgctgataggagtagccacatctgctggcccatttgctcttac

SEQ ID NO: 102900 - DNA, 1204 bp, Glycine max
  Clone ID: PAT_MRT3847_63937C.1
cgtacagtatcgccggaaatgaggtctggctcgggcaacaacaactatctctcatccttcttctttctgtatccgtaacacttgcaacacacatggctacaatcaccaacactttcatattcaaaccccccatctctcatcacccaaagcagcttctttattcccaccgctcttctctacgctttctcaccaaatttaaaaccccctccggagcgaattctcggcggctggttccgaaagccacggcggctcccggggccaagaagacagaaaagccgcacgagagagtccagcgagtccacagcgtggaggagttcgagtcggcgctcgaatccgccaaagacaggcttgtggtggtggaatacgctgccagcgacagcgaggagagcagccagatataccctttcatggtggagctgagccgcagctgcaacgacgtggagttcatcctggtgatgggcgacgagtcggagaagacgaaggagctcctgaagcgggagaaggtggagaatgtgcctcacttcagcttctacaagagcaaggagaagatacacgaggaggaagggattggtcccgacatgctggtaggggatgtgctatactacggggacaaccactctggtgtggtgcagctgcacaacgtggaggacgtgcagaagctcatagaggaccacaagctggatcacaagctcatcgtgctcgatgtgggtctcaaacattgtgggccctgcgttaaggtttatcctacagtggttaagctctcgaggcagatggactcggtggtgttcgctcggatgaacggggacgagaacgagagctgcatgcagttcttgaaggacatggaagtcatccaggtccctacctttctcttcatcagagatggcaacattgaaggcaggtacgtcggttctggcaaaggggagctcattggggaaattctcaggtaccaaggtgttcgtgtcacttattaattttcttactacacatacttatttctacttctattaagttcagctcaacaaacacatgtttactaaactttctgagaaaggaacttgctttgctttatagtcaacccctggatgcgtaatattattttgtgttattttcaattaacttccgcttaattaagcttaaaaaaaaaaaaaaaaaaaaaaaaaaaaaaaaaaaaaaaaaaaaaaaaaaaaaaattataataaaaagg

SEQ ID NO: 102901 - DNA, 1998 bp, Glycine max
  Clone ID: PAT_MRT3847_63938C.1
aagcggtacggttgcgaagttaacatatcaaatgaaatctcattaacacttgtacaccatcacaataagcggtacctttagtaacaagtgtgtttgagatgtataactcagacttactaattatcttcaactagatacagtattgagggaatatattgatttctgaagtgaaaatatgccaagccaaatcatggaagaccaaattccaggacattgaacatggtgtcctataaagatttgcatgataaaaattgaaataccactgtcaaaatttcctgaaacaagctaatgtgacaacaccaagcacagctgctcagcatcactaacaaatgattttgtaaaattgcatttaattgacgcacctacataattcatgttacaaagacacagctccactacaatatacaacggccaagagggcaaatcatgaggtgaaataattgcaagtgtgataaccggacagcaactaatcctccgacgctctgcaacgtcacagttccatagtttgcaggcgataatagcttcgattgattattatacatatttctcatctatacccacccgtattgaaaattatgaccacgacatgcttgtatgccactgcatcaatgggaataatgtctctgactatagtaaggaatttttttctctttacctttacagaggttcaagagatccacttttcaatctttccatccgtgcttgaagcccagacaatgctttctcatccataggaagtaccccaccgtgcattgtattctcagtaccaacatgctctgatgcatgaggaatctggctaggaggaggaagtccatgattcaagttgtcatttgcacttgttaagtgcctaccaccagattctgtactcccagcagcagctgctaattgcatgctcttcatcctctctctgattgcatccaatgttccactggttactcctgtcataaatctatcatttctttggtcacctaatgtatagtcagaatttaatgctctagaagtaatggcattcacggccctattctcctcattgtatgatgatgggggtaaattaaaatttgtcggatcaggtttcacatttaatttagcatcacccagtggatttgtgtttacaggtgagagaggtgcaaaatccggagaagatatatttaaagatgccggtggaggggtaggcatcggtaaacttgaaggagttcttccagctgcagcattcttctccatctgagcaagaccatctctaatgtaggtgcgaaatgcctcactagcattttgaagctgagcaaatcggacgcgctttgggtacaattcggtaatgcgagtatagttcatatagaccaattgtgcaagtttgcttctccccaatcttcttaaatatagcagccagctcttgctttaactgggcatcagctgaatgggtgcccgaggctgaattattggttgctgaatcaccccaatggttttgtcccccaggaccagatgcagtcaacattcttgcagcagccaaagtctcaagattaagttcaatgtaggcaaggatgatgggttgaggtttagcatcgataggaaccattgaaagatgaccctttattgctgcaccacgaagcttgacaagttcatgcagtacagtttttaccattcgtaaaggtttgtcatcagcaccagcccttctcctaatttcctccattcccaagtcttgcaggtacaaatggatgctttgaagtatgcgatcaaggtcaacatcatagatagtgctctgaagaacctttgtaagcttgataaggcatttcacgactagatcagagaacttctgatttctggaagcaagtgactcatttaatgctggtgaaggccacctggatgaatctagtggccgtaaaagattgattaagacaacaaaggatgaagtccgatcagcattatccaaaatcttaagcatcaacacatttaaagctttcaacaattggcttccatcatccatatgaggcaccctatcatcca

SEQ ID NO: 102902 - DNA, 794 bp, Glycine max
  Clone ID: PAT_MRT3847_63939C.1
cgtattggccccgacgcacttccacgacccccacgcgtccgcccagcgtccgaattcctcaaccacacttgccatatcaaagaaaagagcatcaacatcagatcaaagatacaacatggaggcacttcaatcatgggtttcaaagcacaagctcgccagcattggggcactctgggcctctggaattggagcaacacttgtggcttattcatgcaaaaagtctccaatgaagccaagtctcaggcttatccatgctaggatgcatgctcaggctctaactttagcagtgctatccggtgcagctgcttatcattattatgagaaacgtgatgttcagccaaaaccagaggcagattatattattcctgctcccaatgtcacccagatggttgaatatgaacttcaatgtcctttctaaaaattaaaaataaaactgtaggggtcatgttattaagattaggagatattcctatcatcgagtttttgcttttgcctagaaagaatattaattgtttgtgtattttatcaatgatccgactccagaactagggggaatagctattgctatgcaatgttgcaatgcatctctatgtatgttctgagggtgcactatcttaattttctaatgtatatatacaagttttaagagaagtttcaattcaacaatcgagtttttgcttttgcctagaaagaatattaattgtttgtgtattttatcaatgatccgactccagaactagggggaatagctattgctatgcaatgttgcaatgcatctctatgtatgttctgag

SEQ ID NO: 102903 - DNA, 327 bp, Glycine max
  Clone ID: PAT_MRT3847_6393C.1
tgatgtttgagctatatgttctgtgtacttgattgtcggttcttactattttggaattggttaccttcccttgcgtcatttttaagggaaatgttcaatgcctcttcctccacctccccattaacttttaccaactatggatcaaatgtcaagaattttatgtaatagtgcacagacaacacattcagagtctgagaaaaagaagatgtttttctaattatttctttctgatattttaatgctgtaagaagttttttttcctggtgtgtgtgtctgttttatagtttgccgacactctttctctttcatccccttccattgacttct

SEQ ID NO: 102904 - DNA, 575 bp, Glycine max
  Clone ID: PAT_MRT3847_63940C.1
agttcaatcatgggtttcaaagcacaagctcgccagcattggggcactctgggcctctggaattggagcaacacttgtggcttattcatgcaaaaagtttccaatgaagccaagtctcaggcttatccatgctaggatgcatgctcaggctctaactttaccagtgctatcaggtgcagctgtttatcatttttatgagaaacgtgatgttcagccaaaaccagtggcagattatactattcctgctcccaatgtcactcaaatggttgaatatgaacttcaatgtcctttttaaattaaaaattaaactataggggtcatgttattaagatgaggagatattcccatctaggatcctgtcaccgagttagcttttgcctaaaaagaatattgtttgtgtattttatgaatgattggactccagaacaagtgggaaaagctattgctatgcaatgttgcaatgcatctctatctatgttctgagggtgcactatcttaattttctaatgtatacatacaagttttatgacaagtttcagcttgaattgcattgtttttctaataaagtttattgg

SEQ ID NO: 102905 - DNA, 378 bp, Glycine max
  Clone ID: PAT_MRT3847_63941C.1
ctgggaaggggaaaatttggggtttaggggaaaaaaaaaaacaaaaattttccaggcccgggaaccctttaggaaaaaaccccaaaccccgggggggggcaaaaaaaccccaaaattcccaaaaccccggggttaaaaaaaaaaaccggaaaatttttccccggggggaaaaaaatcccggggggaaaaagcgcccaaaaaaaagtatcagacccaccagctttgacaaccacagtttctgcaatgtccaaaaattgggaaaccagggggggcttggggaaacggcaagggatgaaaaaaccctcgctggcgcactgaaaacaccgcatgctgagaatgggacccccacccggaaaaatttcggaactgggggggccc

SEQ ID NO: 102906 - DNA, 826 bp, Glycine max
  Clone ID: PAT_MRT3847_63942C.1
agagctctccaccccaaccatctcgtgcccccggggcccacccctggcctgttccaagctctcgcagccatgacttcatcatctgtcaggtcgctgatgggatcggcctaggctcacagtcgtcgtctggccgagtgcctcatagttttccaccagaactaaatcatgcagatggaagtcatctcagtcctgtattaatatcagacaataattgtattgtaaactttgatatggcagatggtatcttccaagcttcagattacttgaatgtaaaagatcatctttccggtgaagatggtgcaaccattgacttactacaattgtcatcacagcttcagcgagttgagcatgagaggcaatccttgcaggtgaagcaagagaatgattcttcttgcactctgcggattacataaagtgcttttggaagaggaaacaaattgtgcaagcatgtgacagacacgcctacgcctatcatcttggacattgtagggcacagggaaatagaaacttcaaatggtgccattctcatctgttgctaactatttaaaatagcttgcttgtgctgattcggttcaagaacttgtctgcagaataactgatctactaaacacactaggctatatctatgatatttgttgggacacaaatgtccctctcagtgttcatatatccaaatggatgtaataaacaaaaagccttagatgtatcaaaatgtgttcttcatggcataaacacttcaaatcagggccattgtttactagaatttacgttcgattaagtgacaactttggtaatgactttttgtcgtactgaattattaattatt

SEQ ID NO: 102907 - DNA, 271 bp, Glycine max
  Clone ID: PAT_MRT3847_63943C.1
aaaggaaggaaaattttacttgagggtaaccctcttccaaaattccctgaacaggaaatatttttgaggcgtgatttacctttgacaattaaaagcaggttgtcctaccgacaaacaacttattttgggggaaacctctttctttaaaaaaaataatctccttaggaattataaacgaataaaaattcccattcccttttcaaccaacttggggttgagaggtcgaaaaagaaaaccactgaggtaagttgtagactcttgccccctccac

SEQ ID NO: 102908 - DNA, 460 bp, Glycine max
  Clone ID: PAT_MRT3847_63944C.1
ggctcgagggcgtgttgggtgagaaggaaagagatgagactaatctacgactaagagggaggacacacacacatcaaaagtgattgctcaccaaatgggaggggcccaaaacgacgcgcttacaatcagtctccatactctcaagaccgacatcagtggctctcaccctgatcaatattcactccaatccacgcggagactggatgaacctatgaatatgccatgcaaacgacacctgtaccgaactgcttttcccatgaatgaggagctcgacaggcaaaccctgttcagtgtgcaccggcctcctggaccaattgcttcttgaatgctggactgggagactgatgcaggaagtgctgaccactttggtcatgaggatggactaaccgacccccgtgagtctgagactttccgggcattagacacgcatcatgggatggaacatcagcttgctctatat

SEQ ID NO: 102909 - DNA, 306 bp, Glycine max
  Clone ID: PAT_MRT3847_63945C.1
tcggcataaaaagaaacacaaacacagacacaaacaaaaacagacattagttctccgttcagatttgcgaagtagccgggaaaaccaaggaattcattcagatctgatgaaatcgaacccaatcatggtgttgcgaaacagatttgactggattgcagtgttccaacgaaggtactcaaccgatgaaggtcgacggtggttgcaaaggactgacggaggggcagtggtggcgcgggtttgacggaggtgcggtggtcgcaaaggattggcgaaggtgcaacggtgacacggttttgaaagaggtgc

SEQ ID NO: 102910 - DNA, 500 bp, Glycine max
  Clone ID: PAT_MRT3847_63946C.1
acgggctgcgagaaacgacagaagggggtgacgagggacaacacaacagagaagaaaggggccaaaaccaaaagacaaatcagaaactgaaaaggagctgcacataagcattcacaaaagcaccaaccaacgtaacgcctcaacctcaatctcttcaaactcgcgcgttcttcccccttcgcctcgcagtatatgtattgcaatcctccaatttgattgagactccacatacgcgacaaggactgccttgtttccgtctctgcactctatcctggaactttgtttgaaattaaacgttttacattaactttggtcattgatgtggcccatttgcttgctattcaacaagattctcaaggcaggggatgaaggagaattaaaaggggataatttgaatgcgatagatccgtacctgtttcagcaaccatcaattaacatagattcccatcctccctccttgcgctgttcacacttcattgaagtaccacacataaaccaaa

SEQ ID NO: 102911 - DNA, 2556 bp, Glycine max
  Clone ID: PAT_MRT3847_63947C.1
ggctcgagctgattctacttctggccaagccgtccgaggaatggtacatggtggttcggatatgttgggaatgagaaggatggtagccacgtttgcagcggattccggaaatgtaccccacgaggcaaccagtaccagcgttggtggatcgatcgatttcggcacggcggcggccgttcaatacgtctgttccctcaccgacgttggcaccatgacgcgcctcctttacgaatgcagcgctcaccagacagcggtggccgttgaactctacgagcttccgccgaagcccaccaacctctaccccccgctgctccatatacatattccctccgtcgttccacctctggccgtctccaccaggtaatatacactgtgccagctcgggagccttcaccttcacgcagatgctagaggcttcgtaagccgtttgcctgtcatgacccagacaactgtcagaaacacgtttgcacgtctcactcaaatggcgacaattctcaactcggccgctacgtccagactttcctccagatcgacgcccagtacaaggattccggctccgatcagcttcagagggatcgcttgttggccgccaagaagcagttggaaggaattgtaaggaagaagctctccgccgccgtcgatcagcgcgaccaccccgccattctcaggttcattcggctcttcacaccgctgggtgtggaggaggagggtttgcaggtgtatgttggctacttgaagaaggtgattgcgatgaggtcgaggatggagtttgagcagttggttgagatgatggatcagcagaatgtgaattttgttgggtgtttgaccaatttgtttaaggacattgtgttggcgattgaggagaatagtgagatcttgagtggtctttgtggggaggatggtattgtgtatgccatctgtgagcttcaggaggagtgtgattctcgcggttctgtgattttgaacaagtatatggagtataggcagttggctaagttgtcctctgagataaatgcacacaacaccaatttgcttgctgttggaggaggtcctgagggtcctgatccacgggaggttgagttgtatttggaagagattctcaaccttatgcagcttggtgaggattacactgagttcatgatttccaagatcaaagcacttacttctgttgaccccgaattgctccctcgcgccaccaaggctttccggagtggcagtttcagcaaggtggcgcaggatttaacaggcttttatgtcattttggagggatttttcatggtggagaatgttaggaaggcgataaagatcgatgaacaggtgcctgacagccttaccacttctatggtggatgatgtgttttatgtattgcaaagttgcctgcggagggctatatccacttccaatatcagttctgttgtcgcagttttgagtggtgctagtagtttgcttggtaatgaatatcatgaagccttgcagcacaaaactagagagccaaaccttggtgcaaagttgttctttggtggtgttggcgtgcaaaagacggggacagaaattgcaacagctttgaataatatggatgttagcagtgaatatgttctgaagctaaaacatgaaattgaagaacagtgtgctgaggtatttcctgcaccggctgatcgagaaaaggtaaaatcttgtttgactgagttggcagatagcagcaatgctttcaagcaagctttgaatgctggcatagaacaacttgtggcaaccatcacacctcgcataagaccgttattagacagtgtaggaacaatcagctatgagctttcagaggctgagtatgcagataatgaggtgaatgacccatgggttcagagacttctccatgccgttgagtcaaatgtggcatggctgcagccactaatgactgctaacaattatgacacgtttgttcatttgattattgacttcattgtgaaaaggctagaagtcattatgatgcagaaaagatttagtcagctaggtggtcttcagcttgaccgagatgctagagctttggtaagccatttcagtgccatgacacagagaactgttagagacaagtttgcacgtcttactcaaatggcaacaattctaaatttagaaaaggtttctgagattctagatttctggggtgaaaactctggacctatgacctggagattaactccagcagaggttaggcgtgtattgggtctgcgagttgattttaaatcagaagcaatagctgctctgaagttgtaatatccgtttatatggtctcttcacattcttctttttattgggttattacatcttcattcttactatttttggtgtttgggaagtgaacatacagttccattatgcgatttgcataaacaaaagaataagcaagtgtattgttcagatttgtcaccctagaggccaagatagcacgcttatatacagagcatcatgtgcgaaacggtctttgttcctcattaaccactttctaatttttatttttgtaaatcgtttttgagaggttaatgtttgtttggtaagtttcgttcc

SEQ ID NO: 102912 - DNA, 465 bp, Glycine max
  Clone ID: PAT_MRT3847_63948C.1
gggtaacccatttctcaatttgtaccgagtcacgttttatcatcttccattgaggatcaatgtccattgctacactgatgaaacttttgtcaaggaatggaacacgagcctcaacaccccaggcagaagttgctttgttagctctcaagcagtcatacagatgtagtgcttttatcttccgacatgtttcctcatggaattctttcttgtttggtgccttgtgaaaataaaggtaaccaccaaaaatttcatctgaaccttcgccagaaataaccatcttcacacccaaagatttgattttgcgtgacatcaaaaacattggggtacttgctctgattgttgtaacatcatatgtctcaatatggtagatgacttctcccaaggcatcaatgcactcctgcactgtgaagtgcaactcatgatgtacagtgctgaggttatcatcaccttctctagcatctttaa

SEQ ID NO: 102913 - DNA, 784 bp, Glycine max
  Clone ID: PAT_MRT3847_63949C.1
ctgagtatgcagataatgaggtgaatgacccatgggttcagagacttctctatgccgttgagtcaaatgtggcatggctgcagccactaatgactgctaacaattatgacacgtttgttcatttgattattgacttcattgtgaaaaggctagaagtcattatgatgcagaaaagatttagtcagctaggtggtcttcagcttgaccgagatgctagagctttggtaagccgtttcagtgtcatgacacagagaactgttagagacaagtttgcacgtcttactcaaatggcaacaattctaaatttagaaaaggtttctgagattctagatttctggggtgagaactctggacctatgacctggagattaactccagcagaggttaggcgtgtattgggtctgcgagttgattttaaatcagaagcaatagttgctctgaagttgtaatatccgtttatatcgtctcttcacattctctttttttttttttgttctactttttttttaattttgtctgataagtattacatcttcattcttactatttttgcctttttggtgctcgggaagttaacatacagttccattgtgcgatttgcataaacaaaagaataagcaagtgtattattcagatttgccaccccaaaaaccaagatagcacgcttatataaaaaaaaaaaaaaaaaaaaaaaaaaaaaaaaaaaaaaaaaaaaaaaaaaaaaaaaaaaaaaaaaaaaaaaaaaaaaaaaaaaaaaaaaaaaaaaaaaaaaaaaaaagggggg

SEQ ID NO: 102914 - DNA, 150 bp, Glycine max
  Clone ID: PAT_MRT3847_6394C.1
tcatgatttaagccataatagacacacagagagagatacagacagcatgagaaaatgaatgaatgatctccatcatcattacacttcccctcgagatgtgccaatcctatctctatggatttcaataccccaatttctatcgcagacgaa

SEQ ID NO: 102915 - DNA, 609 bp, Glycine max
  Clone ID: PAT_MRT3847_63950C.1
cttttcctcccaaattgatgcctaccctggtgtctccgtctttcaccttttaatcatcttctctaaccgaactcgcatgttccccactcctccatgccatgtggaaatcctgttattttccacagttactattcccattagctaccctactgtccatattgtggtctagttactgcctctcggcccgtgctccaacattcctattcaatcgcatgttttgtttacatttctactgagaagtcttagagtgtaattctcccttgataataatagtgtaatacttgccaagttgtattcaacatgaatgtttaaatgtagttccatgttagaagttgaagaacaattttgaaaatattttttatgcacaattttgaaataaaattgctgtgaccaaatatttcaaatatgatttaaaatgttgatttgcaaataatgagttgtttatgacttcattgtgttatgatgcccatgaatgagttgaatttttgtttttttgcctggcacagcatctaatattcggtggtattgctgaaaacgatgatatatatatatatatatatatatatatatatatatatatatatatatatatatatatatatatatata

SEQ ID NO: 102916 - DNA, 282 bp, Glycine max
  Clone ID: PAT_MRT3847_63951C.1
atatcagttcagaagatgtataagataattcaacagaaggagttggaggtgcatctggggaaactgtatcacatatctgctgctcttgtagtaaatcttcatcttgcaagacaaataaatgcaaatgcagaactctgggtggcatttgtgggagttcttgtggttgcctagcatcgaagtgtgccaacagagcatcaggctcaaatgaatcaccagttgaagggactggtaatgattccagcattcaggaagcagacaaagatcaccttcttgctgctcaag

SEQ ID NO: 102917 - DNA, 1523 bp, Glycine max
  Clone ID: PAT_MRT3847_63952C.1
gcgtacggctgcgagaagacgacagaaggggatgttgtggttcaacgtgacttgtctccactctgggaaattgatatgaatggaaaagttaatggagctgtggaaacttgcagaggggacgatcagtgggtaatgtctaagcattttaggaactacttcaatttttcccatcctcttgttgcacaacatttggatcctgatgagtgtgcttgggcttatgggatgaatgtatttgatctgcgtgcatggtaatatgacaacagatgtgacctttagtttcttatgttctgtgacagaatctaaggtcaaacctgacgatgtggaagcttggaaccctaccccctgctttgattgcattcaaaggtcatgttcacccgattggcccctcttggcacatgcttggcttgggttatcagaacaaaactgacattgagagtgtgaggaaggctgctgttattcatttcaatggccagtcaaaaccgtggttgcaaattggctttgatcatcttaggccattttggaacaagtatgtcaattatacaaatgattttgttaggaactgtcacatcttggattcatagtctgccatgagatgcactatggtttgaaacaacagtgcatgcatactacgaaagggacgagtaaatacatgtttcatctaaatttctgcggattgagaaggcaatataaaattggttgagggcaaagtgtgggtggaaaatttgctgccaccccgtaacatttttccacacacagttactatcctggcatggccttgagaatcagtcttgtgagatacaaacacgtcctatatttttggttggtgaaaggatatactattattggtcttatgtggagctactatatcaaaaattctttagtgaaccttggagaataaactgaatgctgaagataaaaaaagggtcatgatcacacgcctgtgtcatcaaactagtttgttgttgagaacacaagtactaggacagataatttgtggggttccccccctaggccagcgttttcctcccatcattttttagtttgttaatttttgttagtaccaatttttacattcaccctgtcggatttgatatcatgatggtgaattctaggagcattagttcatgagattgctttgccaatgttggagaataaactgaatgctgaagataaaaaagggtcatggtcatgcacctgtgtcatcaaactagttcgttgttgagaacacaagtgctactaagatagtttaatttgtgaggttcccccactagtgcagtgttttccccccatccttttttagtttgttaatttttgttagcatcaatttttacgttcaccctattggatttgatatcatgatggtgaattgtaggagcagtagttcatatgagattgctttgttacaggtccattgaattgaggaactgtctgtaggatatatatatatatatatatatatattggtattcgttgggtacgattaccagacattggaaatgtgcagataattattttttttttcc

SEQ ID NO: 102918 - DNA, 419 bp, Glycine max
  Clone ID: PAT_MRT3847_63953C.1
taaaatctgtattttcagtatgcacaacagggataggcaatggttcatgcaaatgtaaaaaattgtcttcactcacattatcattctccccctgaagggaatttttttgaaaaaaaggttgatgttctagaaaggtaacatccatgctaacacaaagcttttttgtaataggattaaatactctgtatcccttgtggttggagaatatccaacaaagatgtacttttctgcccttgggtccagtttagaccgagatatggagggtgtatgcataaaaacagtacaaccaaacacttttaaaggcatttcagtatgtaatcgacatgctggaaaaattgttttgaaagtgtccaaaggtgtgcggtaatttaacacacgagtgggcattctatttataagataggttgctgttaggacag

SEQ ID NO: 102919 - DNA, 323 bp, Glycine max
  unsure (1)..(323): unsure at all n locations
  Clone ID: PAT_MRT3847_63954C.1
caatagtgatggcacttgccaaggagtgattgccttgaatatggaggatggancactacatcgttttcaaagctgctttcaacaattttgggncacanggggttatggtagagcatacttgctctgncaangctgcaggcagatcacttggcanctgcgangatggggcaattgnncatagggtntggcaacgttgncttgggggattcccctactntcgaagggattctcgggangtttttgttnacaaatttttncaacccccaaagcaagggtcattaanaattgggacggcaagggtttngcccttgaatcccaacaag

SEQ ID NO: 102920 - DNA, 425 bp, Glycine max
  Clone ID: PAT_MRT3847_63955C.1
gttttccactggtgcgacaccaacatgatccgaggcctggtccctggcatgagaacacgtcagtaaggcctactagacgagggcataaccgccattaacgtaaccactgctcactgtctggcaataatgctgctattgctaccaccaaagatgggcagggtcaggccctggtacccaaaggacgtgttgggcccaatgctgaagcctctgtgggagacgagaacacacttgatggagtacccttacacgtacttcgattacaacgataaaaacatgatctttattctgctcaagcacaacctacgcttgtacgacaggcacacgaagaggaggtacacgaaccacttcgtcgctcatatggacgcagcacactctgcgatgaatgctttgtagtgcagtgacttggacattgccgatagctaaac

SEQ ID NO: 102921 - DNA, 332 bp, Glycine max
  Clone ID: PAT_MRT3847_63956C.1
acccaaacgtcaggccaaattatgattatgattatggatatcactgccaggatcatcaggatttcgattctatggcatgcacattcgcacttgtacacggtctcggacccccatcctcttgagctctattctacagtctaaagctatctagtaatgttgcctttatgattctcgagtctagaactatcagacgccgtcctcttagagtggatagtggaagatttggcagtgcccatttgggaagcactgctgcagctgtggccatcatagctggaaggtcacctattaacaacaattccacctaaggtcagagaactaaggtcaccgtctct

SEQ ID NO: 102922 - DNA, 220 bp, Glycine max
  Clone ID: PAT_MRT3847_63957C.1
gatattctggatattcacaagacaccttgtatcctacggtagctgttaatgtaataaagtctccacaagcacaacaattacattaactacttattttcctttattgttattgtataaactatttttctcttgtgtgtaaaacctttggcagagttattataatgtctatggagttcagcagttttcttcaccttactacccatctgctggagcttctggg

SEQ ID NO: 102923 - DNA, 952 bp, Glycine max
  Clone ID: PAT_MRT3847_63958C.1
cggacacatttgaagttgatacttttaacaattaaatttagtcttagggaattttaactaggaagaagaaccatacactattgttgattacaaaacacagacaagtaatcaccagttcagttgaccaatagggaggttgtaacttcaaattcagagaaaacaagacaactattgaaaaataagtcactcttcgcttgacttttgaacgtaacatcgtataacaagaaaattaaattatgaaagaaaaaaaatgcctaatgccataaaccttaagctaagtgacacagttgtgatgttttgttaagccaagtatccaccctcgtaccacagttgagatgattagttaagccaaaatgctcatgcaaagccattaaaactctacaaggatagtgtatagaaaggtaatggcagtacaagtttcaacttgtctttagtgattattgtgtagatgtggcatttgcaacccaatattgcttgacagcaattagtatcttctcaggaacaagtggaccgtcctcatggtccaccattttagtattccatctcattccttcaactaatttctttaccttaattaagacatcgacctcgtcgcggattattacagcaccttctgggcgtaaaatccggtccatctccagaagaatgtcttctgtatcacatttatccttataaagactaaagagactatcactatgaatgaggtcatatgtccttgggtatgtagagaagccttcacaccaatcatgatagatgccaataagtcctctctcatatatgacacccaatgtacttttctcagctatagtaggcacaacattcatgacccataacttggatgattgaatagcagcagcaaaactacccaatccagcattcatatccataatgttgcgataccttccagtatccagcagtctgttaattttctaataagcatttacatgctttt

SEQ ID NO: 102924 - DNA, 437 bp, Glycine max
  Clone ID: PAT_MRT3847_63959C.1
tacggctgcgagaagacgacagaagggaatgcatgatattatatgaactgttattcctaaaaaaagttatataagtttttaaagtctttgatcatactttttaaacaatgtaaacagattcgaatttaaaaactgtaatatcatatcccatttcttcaaaaatccaacacatcaaatatagaattataaaccaaatattattctacaagaattaagattgagattaaaagtacgtgtttcaattctcgtgtctaatgaaatttccttttgctgataaaaaaatgtgtttcaattctaagttaacatctgaattgaccttgattatatatttctctctttttgagaaatagaaaaaaattgaagaaaaagcaacaaaaagaagtgaaacacacacactacactggatgaaaattgaactaagtagagcaactaaataa

SEQ ID NO: 102925 - DNA, 868 bp, Glycine max
  Clone ID: PAT_MRT3847_6395C.1
gttccctggttcatctatttaatgtgacccaaacaaaatcacaaagcgtttttgcgttcttcatcttcttctacctttcgccaattcaggaatccccaaaaccctagatcgaacgctgccactaccgtttcgcgattctcggtggtggaaaatttccggtctctgttccgaaattcgaatatctgcgatttttcctttctctcgctctgatttcgtttgcagtttctagggtttctgtgtttctgatttggtatttcggaaatgggaagcagaaaggaagaagagaggaacgagaaaattatcagaggtctcatgaagcttccgccgaatcgaagatgtatcaactgcaacagcttgggaccacaatatgtatgtacgagtttttggactttcatttgtatgacatgcagtggaatacatcgtgaatttactcatcgtgtgaagtctgtgtcaatggcaaagttcacttcacaagaagttgatgctcttcaaaatggaggtaaccagagtgcaagggaattatatttgaaaaattgggacttccagagacagcggttgccagatcacagcaatgttgataaaataagggaatttataaagagtgtgtatgtggatgttagaaactcaagagacgaagtcttcggaaaagccaccacgagatgcacataaacctggaattcatgaagatgagattaggagtgccagtacttatcattcatattctcaaattcatccctatgattatcaatatgagaataggctgtattcaatcctattctgtctactgacctaatagcctggatctttctggctggtattggctctcaagaagaaaaaaaaaaaaaaaaaaaaaaaaaaaaaaaaaaaa

SEQ ID NO: 102926 - DNA, 409 bp, Glycine max
  unsure (1)..(409): unsure at all n locations
  Clone ID: PAT_MRT3847_63960C.1
tttgtttttttttttttttgtcgcgaacttgggcgaactcaacgcttaactacacacaagagacggcgacgccgccttgtagcaacttaactatattgagccaagcctccacttagcaaagcccagccttgcgcccaaattatcaacgtgacgtcacaccatgggggcggcgaacgccctgtgggctgcgttgaaaccacaaacaaggggggcatgtataagccgggggggggtagccaacccccacccccaagccacagaanaccagcccaccccaagaaagggcaccacagcagccaaagagacaggaacaaaggggcccagagagaggccaagaacaaagcgccacacaaggggcgcgaccgcacggcaggggccacccacgcacaaaagcggctgaggcagcgag

SEQ ID NO: 102927 - DNA, 474 bp, Glycine max
  Clone ID: PAT_MRT3847_63961C.1
ggctcgagaatttatggcacctaatgaatttggattgagatgtcgttggactaggaaacctgagtatttgtatggaatatggtgttctccctgagcaaaaatgggaaactagatgaaaagatggaagggggtgctatgaaatgtgaaggaggagaatcagagggttgatgctttgagcaaggcggggaggcctccagctaatgttaaggctatgtcatttggggagagggctaagctgggaaataattcaatccggaggaggatggttgtgataatggcttgccacgcaagatatcagcgggtggctgatgatgttggaactgcggcggcattggtgggaactgatgggaaggatgggcctggcatatgctggctgaatactaatgtggaaatctgtccggacaatacacctgatgtaggctctatgcttctgtcagaggcagaaaaacataacgtcgccatggtgggggatcg

SEQ ID NO: 102928 - DNA, 239 bp, Glycine max
  Clone ID: PAT_MRT3847_63962C.1
cggggtcaaaaccattgggggctgggaatataatagctttagttatttcaggttttgccataatgttaatccaactgtcccctaaccaatctttagatattcttaaatcctccttgcacactttcatcagcatgcattcaccggtaaagtaaacttgagcactatcatcaccacagtcggcatttctagttactaccccctgccaccccccatgactccaccatgcatcaactgttttt

SEQ ID NO: 102929 - DNA, 272 bp, Glycine max
  Clone ID: PAT_MRT3847_63963C.1
catacaggactagagaagggggagtaagtaaagttttctctattgtgcaggcttctagaattgaatcataaaggaatctgggataggaatttgaggaaacatagaactgattcaaaagcttagcagggtagcaatagattccaaaagacctcgactcaaccaaccaattttatggaaacccctacaaagccaactgagtcaatggcaatgcttgggtgtgacccaaaaccaacaaactaggtcaatgaaaatatttggcgtgacccttaccc

SEQ ID NO: 102930 - DNA, 282 bp, Glycine max
  Clone ID: PAT_MRT3847_63964C.1
gtaaacattggtttatataaacatgttaaagcaaattgggatgggattattaagcagtcacattcttaaatgccacctccactgttacacacacactcatcgaaactgtcattattattacacaaagaaaaatttgaaccctcaccattatgcccatgatttgcatacaacataggttgaccaactcctacggccatccttctgtatagccttaaatcagcaggaaacaccactcacagggcagactcagggggcatctgaacaaccgtttttggtggatat

SEQ ID NO: 102931 - DNA, 274 bp, Glycine max
  Clone ID: PAT_MRT3847_63965C.1
tttgaacatgtgtaaccgacagtctgcctgggccacagccctctcaccctggtactgcatgcacgcaatgctagctgcccctttcccgtcctgggcaccccgagtctcccccgaccccgggtcccaggtatgctcccacctccacctgccccactcaccacctctgctagttccagacacctccacgcccacctggtcctctcccatcgcccacaaaagggggggcacgagggacgagcttagctgagctgggaggagcagggtgagggtgggc

SEQ ID NO: 102932 - DNA, 467 bp, Glycine max
  Clone ID: PAT_MRT3847_63966C.1
gcacaacatagtgaccgctctgagatgatatacattacgcgagtcatgcacgtaaattcctgagatattcgaacatctctgctggtggactgcttgacaactcacacactacagcactgctacacggggacacttaactcactgttcttttaggatacaatgctgtaccgtgcaaaactctttgtatgcagcctcttacgaaactgctacaattcgcttcgacagcttcacatgatcactgagtgccaccacaaatcatctagagacgtcctagcgtgccaagggctcattcacatgctgtccaagacacttgccagacagtgatgcatcacatagtcgctctaagacatacacgcttgattgcggagctcttagctgatatgctaccgaaaaatagatgcatctcgggggtataggccgatactaattaattattttaagccatcctcaactcggacagttctaca

SEQ ID NO: 102933 - DNA, 702 bp, Glycine max
  Clone ID: PAT_MRT3847_63967C.1
gaaaagccaaaacaggaaaaaaggggcataaatatatgtagaaaataatgtcacgaccactttggtttgaaatttacaaagctaaataatactaacaaagggaaaaaaatcccctacgagaggaagaggatgataatataaactgagcatccttatgattatcatttatctccctttagccataaagatctaaatattgggatggacttgattagagacatcaggttgactatccaaaggcatgtattgggccataattgtacgtatctccgaatccatatatctctggattctgtacttgtaaaatgcatatcctccagcaacagcaacaaccaaaacgaggataatcacccagatattcaacactgaagcagaatattcaccaaaacacgtgtcattttctcgtgagtagaacaaaccacttttgcatttgcactcgtaactcccccaggtgtttttgcatttgcaacctgggcattgacaggatgttttctcgttgcactcatcgatatcttcacatgactggactccatcacctctgaacccaggtggacatgtacaaccttttctatagtcatcaagacaagccgagtaagccctttcaccttgggctcccttaccaccattgttgacacaaaccactgttgcatttgcactagtaactccccccaggtgtttttggatttgcaaccctgggcattg

SEQ ID NO: 102934 - DNA, 1316 bp, Glycine max
  Clone ID: PAT_MRT3847_63968C.1
tgcaacttctagaagccgaaacaggagaaaaggatcataaatatatgtagaagataatgtcacgaccactttgggttaaaatttataaagctaaataatactaacaaaggaaaaaataaaataaaaaccccctacgagaggaagaggatgataatataaactgagcatgctgattttttttttttttatcagcaaactgagcatgctgatgattatcatttatctccatttagctgtagagatcattctagatattgtgatgaacttgattagagacctcaggttgattatccaaaggcatgtactgagccataattgcacgtatctccgaatccatatatctctgcacataatttatttttatttttttataaaaacagagaattttatgatgagaatgtataaaaatgttcaacaaatcaagacaaaaaaaaagccagagtcactttaactttatacaacaaaacatcaaacttgcttcatacctggattctgtacttgtaaaatgcatatcctcccgcaacagcaacaaccaatacgaggataatcacccagatattcagcactgaagcagaatattcaccaaaacacgtgtcattttctcgcgagtagaacaaaccacttttgcatttgcactcgtaacttccccaggtgtttttgcatttgcaacctgggcattgacaggctgttttctctttgcactcatcaatatcttcacatgactgaactccatctcctctgaacccaggtggacatgtacaaccttttctatagtcatcaagacaagccgagtaagccctgccaccttgtactcccttccaacaaccaccattgttgaattgacaactcaaggatcctgaagcttcacagtgggtatatccatctccaacaaatttcacattttgaacaattgggcattcacatactcttcctcggaaagtgtccctgcatgcagtaatgttagaagatttgtcctgccaacaaccaccattgttttccaaacactcatttgtttcgaggtctgaagttaagcaaattgatggttcagtggtctctaggaagcctgaacagattgccttgagaacagcaggtcttgacaacttacctctatactgtctgttgtttataacaagagtaggcagtatagtaacatcaccacgagagcctttaccaatctgtgcatcctgttcagcctttaggacaggattttctatatctgcgtggggatctccaacgcagtctttaatcttcttcaggtcaacaccaagagatttaataacttgcgccactgtgtctctagcagccccacgcgtccg

SEQ ID NO: 102935 - DNA, 344 bp, Glycine max
  Clone ID: PAT_MRT3847_63969C.1
ggatgcacaagtttgttgagatagctagaagcaatatgatgatgatgaaactgcttgtgttggttgctgcaacagttttggtatcatatgaatgccatggctcagactaccagaagttccctctccaaatgaaaactgggtttggtgggcactacagcaatgaggtagcatgtaccagttggatgcttgtcgtggaagcaaacatcgtcgtctagtggcaaactgttcctgcatcctgcggatagtacatagctgactaccttcgaggagaccaatattcatcatcttccacaatagttcaccaacatgcttacttcgatgctacatccctcatcatcaccaac

SEQ ID NO: 102936 - DNA, 606 bp, Glycine max
  unsure (1)..(606): unsure at all n locations
  Clone ID: PAT_MRT3847_6396C.1
ccacgcgtccgcggacgcgtgggcttcaacacaggtgtcatggtgcttgacctcgagcggtggcggcgagcgggctacacgcagcgcatcgagcgctggatggagatacagaagtcgccgccggggcgcatctacgagctggggtcgctgccgcccttcctgctagtgttcgcggggcacgtggcgccgatcgagcaccggtggaaccagcatggcctcggcggcgacaatgtcctgggcagctgccgcgacctacacccgggacccgtcagcctgctgcattggtccgggtccggcaagccatgggcgcgtctgggcgcggggcggccgtgcccgctcgatgcgctctgggcacccttcgacctgtacggccccgccggcgccggcgccggcggcgaggagtcccggtaaccataacacccgaaaaaaaagagagaaagattcttttccttctttggcccaccccgtacaaattctgagcttctttctaaatttcactccataaattactctacattaccatntaaagagtgatttacataaaaagaatcgttctctgtattcatttaaaaaaaanaaaagggcggccgctctagagatccaagc

SEQ ID NO: 102937 - DNA, 626 bp, Glycine max
  Clone ID: PAT_MRT3847_63970C.1
gacccaaaccacgattccgaccgctcgagaatacgacagaaggggagaagtaagaaaaagagagacatcgcgtttgttagctccgaattgatcaatggctcagtcatattcgtggctcttcctggcgacttgtgccaccctcttccttctgatttcgtcggcgacaacagcggacgcaggaggagcaggaacagcaccagggatggaaatgacgtggatgccctccatctccatggaaggagctgaagaagagttcatgttggacaacgagatcaaccggcgcatgttagcgagcacaaggtacataagctactgtgcgatccataggggcagtgtcccctgttctcaccgcggagcctcctactaccattgccaacctggcgctcaggccaacccttaccatcgtggctgcagtgccattacaaggtgcaggcactaagctaaattattctattctatttttattttttaaaaaaaaaaaattggcattgggataattgcattgtacacatcaagatattattgcatggttattaattaactccttattattatgtagtataatgtattggccgattgctgatatataattaaaataatgattcagaaaaaaaaaaacccacaaa

SEQ ID NO: 102938 - DNA, 311 bp, Glycine max
  unsure (1)..(311): unsure at all n locations
  Clone ID: PAT_MRT3847_63971C.1
attatctggtgtccgngngngggtgcggngtntgtgttnnccctcnnncattcngcgttcgtccnctngtggctntgcgtccccgcccgtgcgncatnntgnngtnnngtgnggtnctcacgntnttggcgtggncgnnnngtttgggtggtnnnantngtngcncttnggcttcttggtggtttctcgntttggttantggtttngtnggtgtgtntnttgntgttcggnggtggtgttgggntcattggtgcnnnagtgggtgtttttgnnagtgtcntttggnnnggtnttgnaggngtgtggtttgc

SEQ ID NO: 102939 - DNA, 352 bp, Glycine max
  Clone ID: PAT_MRT3847_63972C.1
caagtctgagatcaacttcgagctatatgggatatcacagtctgaagtcatttaacactgttttgctagcataatcttctaaagctggcatcatcctatctacttggcttgttcggcatgaatgattcgcagtcagctgctacactgatacattctactacttataagatacaacatctgtgcatggcattcgctaaactccaatgttatagctctgctactataaacttggaacggacagaactataggcacatacgaatcgcaatgacaaatcctagaataggcgctgttatgaatcggaagaccaagataaagagatagaattcaaaacgaggcaagctccttagatac

SEQ ID NO: 102940 - DNA, 688 bp, Glycine max
  Clone ID: PAT_MRT3847_63973C.1
atcagcttacagccttaggagaattgctatatcagtgccactacagctacagtacttgtggacttggatctgatggaacagataggcttgtaaacttagtgcaagagttgcagcacagtgcagcatctaaagctgaaggtgggacattatatggagccaagataactggtggtggttccggtggaacagtttgtgtagttggcagaaactgtctcaagagcagtgaacacatttttgaggttcagcagaggtacaagaatgctactggttatttgcccttcatttttgagggttcatccccaggtgctggaaaatttgggtacctaaaaatacgccgtcgagctaccccagaaaaggcgaactctagcgaggatgatggtgcactcaccccggaaaagcctaatgccagcgaggatgatggtgcagttgtggtggagaataagagttgatcatggcttgcatttaagcaccttaggaattcttacctatgtgatctttccccagaaatgtatagtatggttaaattttgtagcactttattttatgatttatttagtacaatttatggccaggatggaacttgctggcatgttagaatatctaaaatgtgaataaatagtgaaacaacaaatcgttatgcacgaataaatggatatgtgatattctaaatttgaacttttcttttaac

SEQ ID NO: 102941 - DNA, 487 bp, Glycine max
  Clone ID: PAT_MRT3847_63974C.1
gcaagcttgatccctcagtctatggtgatcaaacaagtaaaatgactatagatcacttggagattaaccttgaagggctcacagtagataaggcaatatatatcagatgtgtttcacttcaataaaacaccatatgggaatttctgctatcctaaagacaacaacacattttctaatatattctttcaaatgcatttttttgttattagttgacatttattaagactaataaaatcatgtaagagactcattagataagaaatgagacttccatgatgttgttatctaaatgaatttcaactaataagaatatgattaagaatgtgtcgttaacaattgtcttgctactactttgtattgagtcattttatgtgttatttgaatctatgaaactaaaggtgtttacattgcatttgtggagcaggcgattaaggatcagagattattcatattagatcaccatgacacatttatgccatttttgaga

SEQ ID NO: 102942 - DNA, 488 bp, Glycine max
  Clone ID: PAT_MRT3847_63975C.1
cagcgttgccaccaccacctgtaccagcatatactccagcacctaatatagctcgtgcaacccttacaccaacttcagcccttgctgtgaagtcagctaaatcatcacttccgcctcttaaaagccccatggcagggacattctaccgaagtcctgcacctggtgaaccttcctttgtgagggttggagacaaagtaaagaaggggcaagttgtatgcatcattgaggcaatgaaattgatgaatgaaattgaagctgatcagtcaggaactatagttgaaatcgttgcggaagatgccaagtctgtaagcgttgacactcccctatttgtgattcaaccatagagcacagagtatttgaatagtagaggaagtgtaggaagattttgttctaaattgggatgacacagcaagttaatgtgtatgatattaacctcaagtagtctgtttttacttcttgttttgaaatggtgagggagcatttgaagt

SEQ ID NO: 102943 - DNA, 311 bp, Glycine max
  Clone ID: PAT_MRT3847_63976C.1
tttgggttttttttttttttttttttttagcttaaaaacttgcctattttattaggggggaaaagtaagggctatgacttattgagtaggatgatctgtgaatcgcagtgactcttgtcctctacggttctccactgttcagctatgttttcagcgatcttggttgcctcacacgacgttccgtgaagacctcttcttgtgaaccccaccgtgtacattccctgctctcctttccacccatgaggaaagggcgctttcggcattccctctttcgtaaaaaaatcacctgcccgcattttaaaaaaaatgac

SEQ ID NO: 102944 - DNA, 1180 bp, Glycine max
  Clone ID: PAT_MRT3847_63977C.1
acgagcttcacttcctttcatccaaactcttttgcctctctctctctctctctctctctctctcttgtcgtgtttttgatttgagaattgagatcgagtcttttgagacatggcatcctcgttggcaccagctaccaaagccgccactaatttgcgcctcacacactctctccgcttctctcctaaacccaacaacctacgctttgccaccaagcctggtaatacgctgttatgcacgagggttaaggcccaattaaatgaggttgcccttgatagttcctccaatgctacttctcctcctatgaaagccaaatcaaaggaggaaccacccgcaaagcctttagcagaaccatcttcttcagtgttggcaactcaagaatcggtctctcagtttattactcaagttgcaagtcttgtcaagcttgttgattcaagagacattgtggagttgaagctgaagcagcatgacgttgaagtaacaatcaggaaaaaggaggctatgcctcagccaccacctgctcctcaaccttctgtggtgtattcaccccctccaccagcgttgccaccaccacctgtaccagcatctactccagcacctactctagctcgtgcaacccctacaccaacttcagcccctgctgtgaagtcagctaaatcatcacttccgcctcttaaaagccccatggcagggacattctaccgaagtcctgcacctggtgaaccttcctttgtgaaggttggagacaaagtaaagaaggggcaagttgtatgcatcattgaggcaatgaaattgatgaatgaaattgaagctgatcagtcaggaactatagttgaaatcgttgcggaagatgccaagtctgtaagcgttgacactcccctatttgtgattcaaccatagagctcagagtatttgaatagtagaggaagtgtaggaagattttgttctaaattgggatgacacagttgagaagaattcttgtttacaatggatttattccttattgttcgcttctacatgattgcactatgttctagtgaactttttttttgtttcaactttcaggcaagttaatgtgtatgatattaacctcaagtagtctgtttttacttcttgttttgaaatggtgagggagcatttgaaccaaattatcgtgtttggataaaaaaaaaaaaaaaaaaa

SEQ ID NO: 102945 - DNA, 356 bp, Glycine max
  Clone ID: PAT_MRT3847_63978C.1
gccaaccgacaaatgcttgtttaaggccatataaagatgatacagaatgaacagtgtatgttccgtacagacagtggacaaatgtgccacaggaaccaacgttcatgatcttcaaacagaacatagaattgcatcttttaccgcccacgtgccacctatgatccacagatttacgctcgtgtccgattttcgtacgccagccccatacatgcttggaataccaatgccacgacacatacgccgcaaatgtgactgtctgaacatcttctattacaagcctacctgttctcgcctacgaggaacgttatgcggcagcctttgaagcccacgctaccacatgagatatgactttctcc

SEQ ID NO: 102946 - DNA, 268 bp, Glycine max
  Clone ID: PAT_MRT3847_63979C.1
gcaaaaaacccacaattcattaactgagcaatgggcataaattccacaaagcctgaaaacctaaacacaaaaaaacttactgtcacctcacacatattatataccaattttctgcatagaaaattactactaaacaccaactttcacgcttatattcaaaacgtatatatctttctgggaattaaccaacttcataacattattacaccaaaaaactaaaaacaaatcattcaatcaaactcaaacactattaatgatgtaatattcc

SEQ ID NO: 102947 - DNA, 167 bp, Glycine max
  Clone ID: PAT_MRT3847_6397C.1
tatcctaatcgcctttcaatccgacgtcaaaaaaagacaaagagaacagcgaaaaagtctttgtgttgctaccacgcttgaacgggttgagaaaaacctcgtcattactgctccaatgcttccagacaattctataaaacttggattggatctcttcttagagctta

SEQ ID NO: 102948 - DNA, 347 bp, Glycine max
  Clone ID: PAT_MRT3847_63980C.1
ggctcgagctttatacaaaagttctgctcatccttaacccatggatgtatggtgctgatagactataccatagacgactggttgactccatctttcatttccgccttcaagaaattatcttacatgattcccatattcctggacattcgtatgtgcttgcttactaacacattacgcgctttctttggagaacacacggcctacgaccacgacgatcactcatggggacggtgactacgcggacgctgaccacgacggtagacacgtcgactaagaccctgagccctgaaccttcacggatgtcgcacgatgacgacgacgtctccggatacgacgtgtactacggc

SEQ ID NO: 102949 - DNA, 478 bp, Glycine max
  Clone ID: PAT_MRT3847_63981C.1
ctttcttggattccacagctcttactctccctgcagagaacagaagctcctcactgtaaacttgttcttctgaagattgcaacattgtatcctcaggctctgtattattggttgcgcacatacttactggaacgacgtgatgttgccaataaatctgaacttggtagaatagcaatggctcaacaaagaactcaacaaagtatttctggtactagtgttggttctcttggtgggttgactgatggaaatgcaagagtacaaggtcaagctggcagtaacttgccatctgatattcaagctcaccaaggctcccagccggcaggtggaattggatctcatgatggtggaaactcacatgggcaagaacccgaaaggtctacaagtgcagaaagcagcatgcacaacggaaatgaccaacctttgcagcaaggttcttgaaatgaagtggtcaaaatactttaagacgtcctggtgcttt

SEQ ID NO: 102950 - DNA, 524 bp, Glycine max
  unsure (1)..(524): unsure at all n locations
  Clone ID: PAT_MRT3847_63982C.1
aattcccgggtnnncgacccacgcgnntccggtcccatnntccaattcccaaaacaacaagacattacttgacgacgtcgttccccaacaagtaaaaaacgactcgtcgtacaatccatctcccagaaagaaagaaagcactctcgctcgcggccagtgtgaacattccgtacaattcgctctccaccccactgaagcaccaaacgacgccgttttcagcaagcacagtttccaaaccctagctcgttcttcctccaatgtcctccgaagacatcactctcgtccccgaccagaggatcgagaacggtctcaattcccctctcgtcttccaagacgaccctctccgcttcaattgccccaccccgcaccaccgccgggtcggagacccgcctccgaaaacccgcgaacttggctccttcatcgacgacaacaagatgttcatcgaccgcgaccgcttcttcgccgccgcccacaaccccgaattccgccgctacgctgactgctccgcccgccgcgaaccgcgc

SEQ ID NO: 102951 - DNA, 1786 bp, Glycine max
  Clone ID: PAT_MRT3847_63983C.1
ccaaaaacgactcgtcgtacaatccatctcccagcagcatctgggagaaagaaagaaagaaagaaagaaagaaagcactctttctcgctcgcggcgagtgtgaacaccaaacggcggcgttcgcagcaaacagagtctcgaaaccctagttccctattcctcccatgtcctccgaagacatcactctcgtacccgaccagaggatcgaggaacggtctcaattcccctctcgtcttccaagacgaccctctccgcttcaattgccccaccccgcaccagcgtcgggtcggggacccgcctccgaagacccgcgaacttggcgccttcatcgacgacaacaagatgttcatcgaccgcgaccgcttcttcgccgccgcccagaaccccgaattccgccgctacgccgactgctccgcccgccgcgacccgccccacgcccgcaattggagcgccacagacgatgacgaagagtctgacgacgacgacgaagatgacgacgacgatgaagcggatgacaccgaagtaggaggactcgttggtgatggaaccaaaagcgaacttaacaacaacaacaacaacaacggtggcgctaatttacctgctgttgcaaacgggaaagcccactcttacgtttctggaagagagctattggtgaaggatggtggtgatattgggcaattggtgcatagcaatgtgagtggtggtgatgaagatcatcgacaagagggcctaggtaattctagcgattcatctaccgtagctgaaactgactgtgaggagtactattcgctctatcttcacgtcggcgaaaaggcttctaggcaggattgtatgtatgatgatcgtggttgtgggtttgctgggaggatttaggctatgtattatcaggtggctggttaagaaactcagggcaatactataaaaacccgtctcgcgtgcccgtatggacgttgcttggtcaggaccttccgggctgtcatttggcggaggtggttgtgggctggcgctttctctgaaagcttgctgcacttgttctcaacccacaactgaggaatcaatatctccaaacctatcactccggattgctgtgcaggcatatcgtcgtgaagaggagtcacaattttaccggtcacctaaaagaagaagagagagatttgatcagggtggttttggagattcagttgttatggaaccatcaaggagtagaggtgttcagtttccatttgctgtgatggaccgggttatcataaagggaaataaaaggacaccacaacgctttgttgggcgcgaagctattgttacaacgcaatgcctgaatggatggtatgtggtgaagacattggacaatgcagagagtgtaaagttgcagtatcgatcccttgccaaggttatggatgatccttcaaaacctgcagcctccagcaagatgccacctaattggctttagatctgcacttctgcagcacagttccgtgatcaaatacttctacaccaagctgatgccactagatttttagcgttcaatgcttacatacctacaaaaattcttctttgtaattccattgttgtattccttgcgagaaaactctgctagctgctgagtttgtaaatatagaaaccttaccatgctttgtgctagtcaagattttagtatctgcgtaatcattttgttatagatacactgacagaatatatattctcttttttattttttctacatgaacagataaatgtttgagtggaaatggttgtgaccattattaaaccataaaaaaaagggcaggcg

SEQ ID NO: 102952 - DNA, 263 bp, Glycine max
  Clone ID: PAT_MRT3847_63984C.1
aatcttcacaccatatttgcattcgctctttctaatctatccccatgatctgctaatgcatcaaatatttgcaagtcattgatatgaaatcactgaagaagatgctgcccattcatgcattttcttaaccaattgaagtttatagcacacagtacatctgcatgaaagattcttattcaaggactcaaatttctgtggagtaacaggtacgttttttttttcttttttgtaagaggagtggtcatggatgccaatgatgacag

SEQ ID NO: 102953 - DNA, 216 bp, Glycine max
  Clone ID: PAT_MRT3847_63985C.1
ataataattgagtcaatttatggagatttgggcctccattaaaaaagtaaaatggatctaacccaaattattgatggtgtgcccattgtcattggtgacaaggcgagaaagatcaaatcataattgcacatctgaactggatgatgcagatgtccacctcggatctatgaggcattgtcaaagacacagaagcttggtagatttggcgtgacttat

SEQ ID NO: 102954 - DNA, 706 bp, Glycine max
  unsure (1)..(706): unsure at all n locations
  Clone ID: PAT_MRT3847_63986C.1
ccggnnaattcccgggctcgacccacgcgtccgcgtgtcttcatagcgctgtagatttcattttccggttgtaatgggtgtgagaatccgagagaaagaagcccctggattgtgattctttatctttgttcataggcctctgaaactggattgtgaggcaagcacaaaaacttactatgaaccccaatatagtactagctaagtataccccaaatgtgctgcatactttgcacattgacgcactgtgtaccaatatttgtaccacttatcagagtgcactgtgaacctggtaatgctgtgcaaggcacttgtttttttgcactaaatttctgtttacatgcatgcaattagagcttgtaactagtgtatgtaacatgtactgtgtagcacttgaaaagtctgtattgttggatagatttatgtagcttatgttgggctgaagatagctgatttttgttctttttctttttttatcttccctctctccaacctgcaaggggttgatgagaagaacacaagtgaagtattgtttcactttatatgtatagtataaggtagtcttgtaagggatgcaggatgctttagtcttgtgatcggtatgctgccaaaagttgttttgggtgatatgcatcaatttttatgttggtgagtcactgactggaggaatgtgtttaatcattccggctggaattagaaataatttcta

SEQ ID NO: 102955 - DNA, 1052 bp, Glycine max
  Clone ID: PAT_MRT3847_63987C.1
gtctctgactcactcttgttttcgcttcgctactcatcatcctaagtagtgctgtagcagattgttgctcttcctctttaggggtctatgatcaagatatgggagtgtcgggtggtggccgtcaagtaccacggaagaaacaaacaatgtttctcaaagtccagctgcactggaatgtcatcatcgctgctgaaaatctgcaaccggaaggtctgatgcttcatagggcaatcattgtccgccttctgagtgactttgctgtgaagaaggccaccaaagatctgggatactttcttgcagtgaccacactggagaaaataggggaaggaaaggtcagacaacatactggggatgtgctcttccctgtggtttttaatgccatcaccttcaagtttttcaagggtgagatattagagggtgttgtccacaaggttctgaagcatggagttttcatgagatgtggtccaattgagaatgtctatctctcaaatttgaagatgcctgattaccgatatgttcctggcgaaaacgcatgcttcatgaatgacaaaatgtcaaagattggaaaagatgtcacggtccgcttctcggtgataggtacaaagtggatggaagcagaaagggaatttcaggcattggtcagtttggaaggggattatctgggaccaatttcaactccggatatttagctacattttctttgttgccttgtcttctgaaatggatgaaatattttccatatgaagtcagttcttgtaattaatgataactctgtctgccttccttttagaactgtgatttccggcttgtgtacgggatacactagtgaaatctgggaccaatttcaactccggatatttagctacattttctttgttgccttgtcttctgaaatagatgaaatattttccatatgaagtcagttcttgtaattaatgataactctgtctgccttccttttagaactgtgatttctggcttgtgtacgggatacactagtgaaatcaatatgtgcgtatgtgtaatatgcattcttctgttaatggtttagt

SEQ ID NO: 102956 - DNA, 328 bp, Glycine max
  unsure (1)..(328): unsure at all n locations
  Clone ID: PAT_MRT3847_63988C.1
ctcccaaagaatgatggtaggagcaacaccgtcaagtcatgatcgcaaccttcgcttcgaccttcaaactncacacccgtcgccgccgccgccgccgccgcnnnnttgaccataacctttcatccattcgcaatgtcagaagtttcgccctatcctcacacacaacttctctcactctcaatctccctacgcctaggtaagctcttctctgggctgctcttttcgttcgtgctgtgattctactgctgcgacttcggtggactttgatgggctctcatctcttgcngagtgggcatgttgtanatanagaccttgtttcatttgnaac

SEQ ID NO: 102957 - DNA, 494 bp, Glycine max
  Clone ID: PAT_MRT3847_63989C.1
gttccttcaaaaggttttatggctttataattatgattccccattaagtttgtatggatgctcaaaaccccccatttgaccccatgaatttgattaaacagaaggggaatgaaatcagttttgattgccccaaacaatttgatttaacagaaggagaatgaacatggctcctaaacaatttttttatcccccaagcttttgaacccaacatccattcctaaataacctttaactacaaaccctactatacatcccaaatgtaaaaaagctcctatcatgttggggtggcccataaaaatcaattttaccccataaaatcgggggatcccctaaaaaaggaaaaaccacctttttgggggttttaccttccccatgaaaaattaattggttatgttttaccataaagctacctcactactcaagagacctttttatagggattcgaggaaaccattttttgaaagtaacagattcctcactttggtaaaaaccct

SEQ ID NO: 102958 - DNA, 236 bp, Glycine max
  Clone ID: PAT_MRT3847_6398C.1
gttgaataattaccccgggctttttttggttttgatagtggttacaaaaaaaatcaaaaaccggacacatagctccccacattaacggactcttgggttgacctggtaaaacgcaaacgcaacctgcaggcctgccagatcaccctatacggacttgtattagacccagaccaaaccagcgtcatcactcatgcttttaccaacattgaattgggtcactttaatatacaacagcc

SEQ ID NO: 102959 - DNA, 507 bp, Glycine max
  Clone ID: PAT_MRT3847_63990C.1
ccttagcctcacttttatttattcatatactgcgacgattcatacggacactatatgaatccccacagtcttagtccccactacagagccgcctggatccacttacaacataggaacattccttagaataacacatgccataaacaattaaaacactactagactaaccactctctatattcctgaactcaacaagtgcctctttcattttaaccactctgaatttctgagacataaacaactacaacttgccaattaccggagattacattcttggattgatcccactactgctgtgcatcaccacccaattgagacctcaactctatgtccccccttgccggctcctcagtatcaaacaccgtcccaaatgccctgcgcattcgactccactctcggcactcttcctgacacaacttaacatcggtaaacccctgagttccaccactttatagaatgacaatggctaacccgtgagggctcctgctctgtacctgaaccttaacc

SEQ ID NO: 102960 - DNA, 246 bp, Glycine max
  Clone ID: PAT_MRT3847_63991C.1
acacgggaaagcaggcacgcccgcaggcaccggcccgaaccacccggctcgacccacgccaccccacggcgagaacacgaccaaagggggagcagcaacgaaaatgtcacgcaaaggaccccgacatccccccagagaccagcaagacaggcacagacacccccaccaacgaccacaacgcccgatcaaaaacacaccatgcaccgccaacaccaaccccaaccaccacctgcaaggcaccaccgg

SEQ ID NO: 102961 - DNA, 271 bp, Glycine max
  Clone ID: PAT_MRT3847_63992C.1
aacaagaaatttcacactgacacagcagttgtgtgggcaaggtattagtatacaatcactttatattatttaccagagtaagccaaatggagagttattcccatcccaatgatgaatagagattttccttcgggcctataatgaatagtatttacaatatggagggcaaaaagagcaaagtcttaacatgtgactggaaatgaactgatccttgaaactaactgtcaacaatgctatgatccataccctattgatgaaccatgaaaacgta

SEQ ID NO: 102962 - DNA, 393 bp, Glycine max
  Clone ID: PAT_MRT3847_63993C.1
cggcggacgcgagggcgtgactcgttgttcttttaagatatctccgccctcatgccgcccgccacaatgctttaactctcacctgaaaatgccaagctgacacggtaactgacgatgctgaagcgccagcaagtgcggaaacggctgccgaggctgaaagatgtacccagacttgagctacaccgagtcaaccactaaaaagacctgggacatgggagcggccccactcaaggctcaaatcaagagtgctaaaatgggtgctcccgttgaaaacgatggctgaaaacgcggacctaactgcacctgcaacccctgtactcgcacagagggcaattagagagctaaagcttcaaccaaacaaggcccttagaaataatgccaaaaactacatac

SEQ ID NO: 102963 - DNA, 218 bp, Glycine max
  Clone ID: PAT_MRT3847_63994C.1
gcgctcgcacgcgagctctcggaatgatgctcgagctctagccgaggcggaatctcggtagaggcgagtgcattgctctgacctccgatgtgcgcttgcagccaaggaaaacctatagactgcagaggtatggaagggcgtgcttgcgcatgtagatgtcaatattaggtctatctgtgagaccatccatattctggatggatgatgatactataaag

SEQ ID NO: 102964 - DNA, 180 bp, Glycine max
  unsure (1)..(180): unsure at all n locations
  Clone ID: PAT_MRT3847_63995C.1
agagagtcgcggtccacacaacatacacatactnnnngtngngntngtcngnntgggngagngcggangggngccccctnnnagnnaatctcctctcgntctcgccccaaatataaaaccccaacacacagagacaaatgcctcaatatcttttgtgtcgcgtcattttgctctttcttc

SEQ ID NO: 102965 - DNA, 801 bp, Glycine max
  Clone ID: PAT_MRT3847_63996C.1
ctctcttgcacaaattatcccttccttcttatcatttacttcctaaattctctaattaatctcgatcctaatccttttacttaaacccttactcaccaaaactgttgggcgttttgtgattaatatttagaggagaaagtgtgtgatggagcttctaatggtggtggatgatttttttgtcacggcgtccctggcgcttcttcttaccttcatcgtcttaaagctcgtcgaggccatgaacgacactcacgccgcaccaaaacgtcacgtcgtccacctcgaaccggatcatccggtttctcgagccaagaccaaggtcggtctcattagtccggttcaggaggaaattgccacgtgtgcagtaggagccaaacacgggatagaaaaaaaggctgccgtcaaatcggttcgtcctcgtgggaaacggttcaccgttaaccccgctcaaagcaaggttaaggtcgaaccggttcctcccgctcaaagcgagagcacgatcggttttgttagtccggttcaatctgccatgtgtgtggagactgaacgcaaggtagaagaagctatggtcgaaccggaactggttcagctcgttaagaccgagggcacggttggttttattagtccgattcaagctgacacctgtgttggaacagaagacaagaaagaagaagctacggtcgaattcgattcccacgttgttgtggagtcaccggtgaaatcagacacagacattgtcgttacagaggaaatagctgagggcaatgaaggaacacaagaattggatgattcggcggagaagag

SEQ ID NO: 102966 - DNA, 417 bp, Glycine max
  Clone ID: PAT_MRT3847_63997C.1
ggttcttgaaaatctaatcccatgtcagtgaataataaagatggtgcagagcgagagcgatggataaactttcctttcttgaaggccaagttggctatgaggtgcatagaagtcttggcttcattggtgacatgatgagaactagattggaacagggatggggcaagggcaagagcaagatcatggatagatagttccccaggtgatgatctgtttggtgagtctgctttcctagagcaagatctcaggagggactcctgcatggtgcattcaaattgcagttgaggactggtgattacaagctagtatcacagcttctttcaactactagtcaaaccacagagaggaatgggggatacaatgatgttgtagctgagagtcataactcatatagcttctctcaactgagagctcatg

SEQ ID NO: 102967 - DNA, 1044 bp, Glycine max
  Clone ID: PAT_MRT3847_63998C.1
gtttctcacacctgaaggctgaggccacaacagatttgtgaccagccaatcaacattatcatcagatagtagacatctggaatggtggaaaagctattaatgcacaagcaattttggttcaaatgcttttttgcttattctaacattgctaatcataacgtccaagttgttgccacaataataaaacaaaacagaaaactaactcccaatatttgcttcatccagaactttcaggacattacagtttctgagcttcctctcttgtaaaagctctgacatatacttcgtaacagcatcctgcaacaacaacaattgtaagggcattcccaatttttctaagcttttttacactcttcttgtacgatttgaacggtttcagagttgcatcttcttgaaccaaactagaatcgcttcccattttcgatctcactctcagaagactgaagatttggcttcttttcctcgccgtcgattccacgtcgaaccaggggctcgtgaaaaagctctcttggcagaagatgcaactctgaaaccgttcaaatcgtacaagaagagtgtaaaaaagcttagaaaaattgggaatgccctgacaattgttgttgttgcaggatgctgttacgaagtatatgtcagagcttttacaagagaggaagctcagaaactgtaatgtcctgaaagttctggatgaagcaaatattgggagttagttttctgttttgttttattattgtggcaacaacttggacgttatgattagcaatgttagaataagcaaaaaagcatttgaaccaaaattgcttgtgcattaatagcttttccaccattccagatgtctactatctgatgataatgttgattggctggtcacaaatctgttgtggcctcagccttcaggtgtgagaaacagatctaattcgttcgaccaagtttgagggggagcagttatttgagggagttgttgtgattatctgtgagatgtttaatgcaattccataatcaagctttgcctgaaatgttaataaatctgataaccatgttaatggg

SEQ ID NO: 102968 - DNA, 319 bp, Glycine max
  Clone ID: PAT_MRT3847_63999C.1
cccgcattcctctccttctgtagcagtgttcagttgcagcgttttcaagatttctatttattaatttattcctttagttagaacgaaattagggcttaaattgagaaagagacaattttgttacaattttttttaaaattatttatcctatctattttttatgtttgtggtgcagtagataatgaatcttgctctgtattgttttttttttttttggaataattataactccgttttactctgttctaaatgttccggggattttttttgtccaaattttgcctgactaattattttgggctctttggtcacactttgg

SEQ ID NO: 102969 - DNA, 493 bp, Glycine max
  unsure (1)..(493): unsure at all n locations
  Clone ID: PAT_MRT3847_6399C.1
accgggcaaggttaattttatcatgcggacttcaaaaatccctactcaaaatccatacccaaaaaatacgaagggtatctcctaacggcagaaaaagaaacaatctacacaaaatgtgtccgtcagttaacgttgacaccttaacggacccacattagcgaaatagacaacttgctctctcatgcgccaaggtactaggtttgccaaaaaagaaaagcggggctgcgatcatcgtccgacgtggttccatcctgccggcggactcacatagctagagcgtcgccggaaggacacccgttcanaggccgccttcgccaaagttcacgacagaccgtgaattaacaaacgcgaccttcgcgtttgacagagcgacagaggcgtttctgtcgccgcggacctacggtgagcagccgaacagtcccgcgntcggcggtcggctccacgatacgagggatacgtctaattgcacagaaagcaatgtggcgatctgact

SEQ ID NO: 102970 - DNA, 231 bp, Glycine max
  Clone ID: PAT_MRT3847_639C.1
ggctcgagcgcccttcgctcgcaaagccaaagctctcgttgccgtgccaccatcttctccaaagttttcatattcgaagagaaaaaggagtgttgaaggaaatctgatttcaagccacattcctacagacattgggaagttgaccaatttagaaaaactcattcttgcattcaaaggattcccaaaagcgttgccacccacgctttccaagttaaccaagttgattgattt

SEQ ID NO: 102971 - DNA, 681 bp, Glycine max
  Clone ID: PAT_MRT3847_63C.1
ggcgtccgtgacaagaaatcccgtttgatcattctttctcctctgatcatttttttatttttgaataacatttctgcgatagttcgttcgtatgtctgcgtttctttcctatatatacattcgcaaggcttattcagttattctccattcagtttttcatagacaaaaatggtcaattcttctagaggaacaaactaaaccccatcaatcgaccaaactttaattataagtctcaagtctcgaacttgttcatttttcctaagcgcttactggtaccccaattccctgtcttcaacttcgggtgtctctgactctgtcaaacgcggtactcagaaaccaggcgcaggtttattggattctcgtaaaacgacagagtttcagcggagattgttgattcagtaggaatcggaaatgttgggggatttcatcattcgatgtcttatactgattctggggtatgcgtatcctggatttgaatgctacaaaagtgtggagcaaaacaggggtgacaatggggaacttcgattctggtgtcaatactgggtcattgtagcacttttcacagtactggagaaatttaccgatgcagttattggatggtggtttcccttatacggagagttgaagcttgcactctttatctacttgtggtatcccaaaactaaggggacgggatatgta

SEQ ID NO: 102972 - DNA, 733 bp, Glycine max
  unsure (1)..(733): unsure at all n locations
  Clone ID: PAT_MRT3847_64000C.1
cnccgcnccnccttnnnnctcgcgatgaaagaaaaaaaatccgagtactgtaattagtttgggatgcgaaaggaaaagaaaaggtggggtaaaagggatccaatccagtggtagatgagatgaggtgaaatgagactggatcatagcattgtgatagttgagagtgagtgagttaatatgttatcattgttatggtgaaagtgaaaccaaacaccgaagctgttgagtgattttcattgatccagatcgtgtctgttctacgtacgatgtacagcggctccagcgacggcgaaagccatgacgcccctcagagtcagaggaaaattccgccggcatcctccatgctttgggtccgcaatcttcgccgtttcatcggatccggcgccggcctcggatccgaagccttgatggagcttgaaactaagagaattttgctcgacatttttaaggaaaagcagaagaaaaccgccgaagctgctacaattcccactttctacaagaagaaacctgaagatggatcaatcagtcatagagttcagagattggcaaagtatcgctttctaaggaaacaatccgatcttttgctgaatgctgatgatttggatgcaatgtgggtgtgcttaaaagagaactgcgtcattgatgatgctactggtgcagaaaagatgaattatgaagacttttgccacattgcctctgtatgtacagaacaaataggtcctaaatgccgggg

SEQ ID NO: 102973 - DNA, 634 bp, Glycine max
  Clone ID: PAT_MRT3847_64001C.1
tggctcgagaaaaaaaagaatggtttgggatgcgaaaagaaaaggttggggtagaagggactgaatccagtggtagatgaggtgaaatgagagcattggtgagagttgagagagagtgagttatgttatcaatgttatggtgaaagtgaaaccacaagcaaagctgaaagagaagctattcagtgattttgattcagatcgtgtctgtgtctacaaccatgtacagcggctccagcgacggcgaaagccatgacgctcctcaaaatcagaggaaaattccgcctgcatcctccatgctatgggtccgcaatcttcgccgtttcatcggatccggcgccggtctcggatccgaagccctgatggagcttgaaactaagagaattttgctcgacatttttaaggaaaagcagaagaaaaccgccgaagctgctacaattcccactttctacaagaagaaacctgaagatggatcaatcagtcatagagttcagagattggcaaagtatcgctttctaggaaacaatccgatcttttgctgaatgctgatgatctagatgcaatgtggatctgcttaagagagaactgcgtcattgatgatgctactgtgccaaaaagatgattatgaagacttttg

SEQ ID NO: 102974 - DNA, 250 bp, Glycine max
  Clone ID: PAT_MRT3847_64002C.1
ctctctcatactttcacactcccggccaaaaaggggagaccttactaactactgggggtcatccatcccaatccttaacaaaacactcatcattactctatcccatgtaataatatgctctacaaataatcgatctctccaacttgtagctcaaattctacatcttcctattttacttatcacatgccctctaaaacactctactgccatcataatcaatacccaaaaaaacttaataagcactctactc

SEQ ID NO: 102975 - DNA, 338 bp, Glycine max
  Clone ID: PAT_MRT3847_64003C.1
tttttgggggtttttttttttttttatttaattttttgtgaatggttccaacattcaaaggggggccaaaaaaaagcaaaacaaggaagaagaaaacacgcagagggggaaagccagggaacaagaaagctacaaaaaaacaaaaagaggggggggggagcaacaaaaatgatggcttaacggaggacacgggaaaacaaaaaaaaaccacctagagccgaaaaccgagcaaacaaacccgcgcaggcgagggcaaaggtataatataggggcaccaaaaagcaaaaaacaggccgccggtagacaacgggggggcagggaaaacccaggggggaccc

SEQ ID NO: 102976 - DNA, 388 bp, Glycine max
  Clone ID: PAT_MRT3847_64004C.1
gcgcccacgcgtccgtgagtgaagagtttctcttagggaagaagacagggtgcagttgtgattaaagaggattacttttgagagtgtcactgtaaacagaatttgatgcgcagtggaactccagaagatagtgtagcaaattctgcttatgaggggttcgagagacttcatgagggctgtgatacaacaacatgattggatggtgggaatggtaccttgctataacacggttgagtaagtcagtaaactttctgatgaagttgacaagggaatgagaaaatctaactccgtggaagaggatacagatgccaggggacactttctgagagagcgggtgacttgtttcatcttatgtggagatggtgaggtctactttgaggaacaccat

SEQ ID NO: 102977 - DNA, 463 bp, Glycine max
  Clone ID: PAT_MRT3847_64005C.1
atgagaaacagagaatttcaaataaataaagggtcatagaatgagaacctagtggcaactaaaaaaaggcatttggaccctgaagaacatgtaccatagccaagtccaaacctaaaaaacctctagtgcgttgactgggggagtcaactgatcagaatagttggtatggtttttacacatttcttcaccagcgtgaatacattacactacaacttatccttatgttgatgaaaactctcataaatgtacatcttttacatggttgtcaacatcaaaaccgattctcaatgtagcataagaacgggactatatgcatattaacgatatagcatcatatactacatctgaccgaaaaataaaaaattgttcaaataattgagctaacggtgatttcacttaaaagacgcgtaacccacaaaaatcttccttgtgattcaaaagtattctaaatgactaacctatc

SEQ ID NO: 102978 - DNA, 345 bp, Glycine max
  Clone ID: PAT_MRT3847_64006C.1
ctccctcaaactttccaatatgtcccttctgtccatctcaatttattcaattagcatccatcgacgggggacgaatcacggctagggcattaaatcagactactggcatgccttgcgtactgagcagggcaaaggctcctgatgcatataggatcatgctcttctataagacctgtcaaattgaacatcacctcaccaatgcttgctacaacaatagtgatcaaccttcccataacgaacgtttagaacgttgcaagtgtatcacaagaccacgcaccgcttttacgttgaatccaaatcctatgttcaaaactggtacgcaggtattgcttaggttttacccat

SEQ ID NO: 102979 - DNA, 407 bp, Glycine max
  Clone ID: PAT_MRT3847_64007C.1
ggtgcacaagtgagtttggtgatcgagataactagaaacagtggtgtgaaaaataaaggccttggtttctttggtggttccattttgggtagattggaattgccttgctaccaaatggtcccttttcggatggacaattggttttggggccggacttccgaaggggaatggcccagtttgaaggttggttgtgaaacccaacacaatttttgcttttaaaacatttcttgaaaatgccttgaaaccaccaagggattcattcattgggaaccattttgatcagacttccaaacaggtaacccacaaggttacttttatggccgagaccttgaagttcattccaaggacacatttgtggtcaatatagattggaccgtactttttaatatttcatacttcaaaaaaca

SEQ ID NO: 102980 - DNA, 567 bp, Glycine max
  Clone ID: PAT_MRT3847_64008C.1
ctgatttctgagtcacacacacatgtatataccctatcttaatttcttttgagtgtcaattagctaggattcatgtgatgagtccatgcagtttgtacaattgtactatatatataatataattactatatagtatagtagaaatattaattatatcattattgttatggtcattgagaaatgaggatgggaagaaaatgttcctattgtggaaactttggtcacaattcaaggacttgcaacactcacaaaaggggactaaagctttttggagtgcaacttgacctttgttcttcttcttcttcatcatcattgcctttaacatctccatgcacctcttcttcttcatcaacaccctttgatatcatgaaaagaagtttgagcatggattaccttgtatcttcacgaatcatctcaccctcttataattttctgcttggtggtggtgcggatgaaaattcatcagataaaacaataactgatgggtacatacccagtgtcggcggtggtggactcacttcaacaactcatcatcaagaaaggaaaaaaggtgtgccatggagtgaa

SEQ ID NO: 102981 - DNA, 280 bp, Glycine max
  Clone ID: PAT_MRT3847_64009C.1
cgtccgacggtggagaagacacgagggggcccaccggaatgatagaaaagaacggcgtgttctctttctctgactctagggttcattattttcttgtagatcctctatcaccttcgagctcaaatggacgtccagcactgccttccggcaccgctatcatcctcgaagaccggcaacaagtctgcctaacttcggttcggtccacttttgggttttccagaaaggtaagtaaggttactgcgatggattgattactaaccacaaaaggagcgaaccctgg

SEQ ID NO: 102982 - DNA, 204 bp, Glycine max
  Clone ID: PAT_MRT3847_6400C.1
ggcaaaaaagggaatacatgtttaattattaaaaggaacaccttacagtaaaaatgtttggattagggaaaagattaaacccaattacttcccattgatggctttacaagacacccggtataaaaaaatgttcgtaacaatgaaatccgggtgcgtattattggggaaaaagggttaagaataaaaacagggacccccttttat

SEQ ID NO: 102983 - DNA, 379 bp, Glycine max
  Clone ID: PAT_MRT3847_64010C.1
cgggtgccaaaaaacgcacaaagggagagctgagacaagacgacaaaaaggtacagttttcagaacaccaaagcacgcgatctctatcccacgaaaattctcagtttgcagagaaaatctgaggcatctctagacgatcgtatctcaactatgagtgtctgtgacatcataactcgtcacacctcacatcatacattcaattaactggcagtactgtaacatttgcgcgcatggtaaagacttgccttaattcaaatctgacgacatgcatgacatcatcattgacctaactgaccctgtatcaattacgccaactgcaatgtatctccgtagcacttgctcaaccgtcatcgagagtgaaacccgtcctgtcactcca

SEQ ID NO: 102984 - DNA, 301 bp, Glycine max
  Clone ID: PAT_MRT3847_64011C.1
aactgaaaacttgataccaatagtttcgtgcatgttgccaaagtagaaatatcgatcaccgtttagcatacagtaacaacatattagtgattttagggcaaccccttcccagaattaaaaaaaaatagtgaaagacaaaaataagatttcaacaagtactaaaaaaacctaaataagaaatttgaaagagacccttataaacatttaaaaacggacgaacaattatgcccatttttggatgggggaatatttcaatctttggaaagcattgggggctaggggcctggctttttttacgggt

SEQ ID NO: 102985 - DNA, 2346 bp, Glycine max
  Clone ID: PAT_MRT3847_64012C.1
attacgtttatccaggttttcttcatgagcgcgaaccatataagtcaccagcagctgcacaacgtgctatagaaagatgattaaagagaataacaactccaggagtgcagaaagaaagaaaggaagagaggaaccctaagagatagagagagagacaaacaataaagctagatagacagatagaaagctgatggaaaagctgaaagataaaaagcaagttaaaagaaaggctgagcggaaaccgaaacggaaagaagaaaaaaaaaaagaaaaacgaaaaaactaaaaaaaagaggccttttatttgttccttctctatctagtgtcttcctcctatcggcctggtgtacctctctctccctctcttcacctcaatgaatggtctcttctctatctctttctcttcttccttcttacttaattctatcaccaacatagccacagacacaaacataggcactacttatttctcttcttaggccttattatcatcatataccacatcatcaaagcacttgccatcatagagtaccatgttagccaataacttatctccatcgtcagttcccacttctgagccttttccctgcactgaaaatggcactgccaccaataaaaggaagagaaggcccgcaggaacaccagatccggatgcagaagtggtgtccctctcgccgaaaacgttgctggaatcggatcgttatgtgtgtgagatctgcaaccaggggttccagagggaccagaaccttcagatgcataggaggaggcacaaggtgccatggaagctattgaagagggagacaccagtggtgaggaagagagtgtttgtgtgtcctgagccaacttgcttgcaccatgacccatgtcatgccttgggtgaccttgttgggataaagaagcatttcaggaggaagcacagcaatcacaagcaatgggtctgtgaaagatgctccaaaggctatgcagtgcagtctgattacaaagcacatctcaaaacgtgtggcacccggggccactcttgtgattgtggccgcgttttctcaagggttgagagtttcattgagcaccaagatgcttgcaacatggggaggctcagacctcatgaatctcgccaagaggataagacaacaagcacaagcggaactcgacaaagcctactccttgaaagaacatgcaatgaagcaaatcaactccaccatgctccaaatcacttgccatggttgcaaacaacagttccaagcttcatgaacaaccctattactgctatcaccactgctgaaacctcctccaagagcaacaacaaactactccaccccaacttggatcttcaactctccacccccaccaataacaacaactccaacacctccaacaccaacacatcaaatattgcaaaccccattgataatgctgcaatatcagctaagagggatcattatcatgagaaccattcaacccatttgcaactctcaattgggtcatcagatatgagtgagaagaatgatcaatcaaacaggaactcatcagagaagagcagcaataacagcaacaacattaatgatcagaataataagcagcagtccaacaacatggccttgttgagggttcaagagcaagcaagggagcacttgaggatagccatggcagagaaagcatatgctgaggaagcaaggaagcaagcaaagaggcagattgagcttgcggagaaagagttcacaaacgccaagaggataagacaacaagcacaagcggaactagacaaggcctacgctttgaaagaacatgcaatgaagcaaatcaactccaccatgctccaaatcacttgccacttttgcaaacaacagttccaagctcgaaatgcaaccaccaccagccccgacgataattctttggtgctgagctacgtttcttctgctattaccacggaaggaggagaagttgaaaacgataatattgcaaaagatcatgccaaagacaacaactaactctactacttagagagagatattaatcatcttcatcatcatctttctctctaaagttgtttattctgtattttatttttctatgtcctcctcctttatgggttaatacttaataccctttttttttccatttcaaggctaatatctttgtgcattggtataccaagtgaagtgaaggtgaaggtgatcgagtgacgttgattatgtaagtgggatattataatagcgcacgggatggagaacttattgaagagtgtaattcttcgtgtaacttgcagtttattgtgccatgtaatttgttaattaaatttggtataaatgcagactatgataaaagggttaatttctcgctggttcaatt

SEQ ID NO: 102986 - DNA, 1444 bp, Glycine max
  Clone ID: PAT_MRT3847_64013C.1
cttgcttgcaccatgacccatgtcatgccttgggtgaccttgttggaattaagaagcatttcaggaggaagcacagcaatcataagcaatgggtctgtgaaagatgctccaaaggctatgcagtgcagtctgattacaaagcacatctcaaaacgtgtggcacccggggccactcttgtgattgtggccgcgttttctcaagggttgagagtttcattgagcaccaagatgcttgcaacatggggaggctcaggcctgagtctcaacctcttcaaccatctgcatgcctttctagaacagcctcaagcccgagtccttcaagtgaaaccaatttcagcacagctccatggccaacaaggatgataataccaaagccatcagaaccaccaacaatcttcatgaataaccctattactgctatcaccactgctgaaacctcatccaagagcaacaacaaactactccaccccaacttggatcttcaactctccacccccaccaccaccaacaacacatcaaatgttgcaaaccgtattgatgctgcaatatcacctaagagggatcatcatcatcatcatgagaaccattcaacccatttgcaactctcaattgggtcatcagatatgagtgagaagaacgaatcaaacaggaactcatcagagaagagcagcaacagcaacattaatgatcagaataataataataagcagtccaacaacatggccttgttgagggttcaagagcaagcaagggagcacttgaggatagccatggcagagaaagcatatgctgaggaagcaaggaaacaagcaaagagacagattgagctggcggagcaagagttcacaaacgccaagaggataagacaacaagcacaagcggaactcgacaaagcctactccttgaaagaacatgcaatgaagcaaatcaactccaccatgctccaaatcacttgccatggttgcaaacaacagttccaagctcgaaatgcagcaaccacccccgatgagaattccttggtgttgagctacgtgtcttctgctattaccacggaaggaggaggagaagtagaaaatgataataatgcaaaagatcatggcaaagacaacaactaactccactacttagagagagataatcatcatcatcaccgtcatcatcatctttctctctaaagtttataattctgtattttattttcctatgtcctcctctatgggttaatacttactagtaatacccttttttccatttcaaggctaatatctttgtgcattggtataccaagtgaagtgaaggtgagtgatcgatgttgattatatgtaagtgggatattataatagcgctcgggatggagaaattaaagagtgtaattcttcgtgtatcttgcagtttattgttgtgccatgtaatttgttaattaaatttggtataaatgcagact

SEQ ID NO: 102987 - DNA, 850 bp, Glycine max
  Clone ID: PAT_MRT3847_64014C.1
gaccgcattcaatttatagactcacgttttatagtaaaaatttaaaacgacctagatgtaaagttatgaagacagaaaaatctaataagaaaaaacaaaattaataaaaaaagagaaggtgagatggacaaaattcactcaaatatttttaaaatgtttatatcgttgttgagcatcaattgaaaaaatataaaataaaaaattgagaaaaaatattcataagaacttacaattaaatcttgataattttttctcatgagaatcacaattgaatctacaattgcttagaaaattcatcctgggtgacaaatgggaaaggtggagtttttcttgaataatctcaggaagatagtcgattcaaatccggtttaataagggaaaggtggagtttttcttgaataatctcaggaagattttcgaaacaaatcccatctaataggggatgacgcgcggcgcctccaagagctcctccagtcctctgagctcgcgcggcgctgctgcccttgcagagcgaccacgtattcgaggatgggaggtcgtagaagctggttttgtgaaagacgcaaagacacgaggagaccaaacacgcgaagaagaaggagaaagaagcagcagtgcaagggagtaggcgaaacaatgctctcagctcaaactgcgatgacaacaatcaacatggcagctgaagcggcggtgacgatggacacgataactgaagcaacggtgacaacacacaggtgggtttttgagtggttggcttgacctccgattctgcccccttctgtcgtcttctcgcagccgtacccttctgcgtcttctcgcagccgtacggacgcgtgggcggacgcgtggg

SEQ ID NO: 102988 - DNA, 601 bp, Glycine max
  Clone ID: PAT_MRT3847_64015C.1
aataataatataaaaaatccattaatcctaaatgaacaggttgatttcaagatgtctattgataattgagacgagtataacctttaaaacttattctatgaacttttccagataaaagattgctagttgggtttacgagattatgagacaccatattttttttttccctttctggactcagtcaattgataaagttgtttatttctgaagaagttaacaaattccagaaggtaagaaccgacaagtggattgggtcttccaaagtttcatcaatcaattagaatcgctcctataagaatagcacaaatatggatcccgaacttctattctataacctgttgactctccaaaaatgaaatgagaggtttacctgatgccctctgcaaacaagatcaacgtcatttttatccaaaaactctgcaactacatcagctccaaaagtacatgaaactcctcggtcactctctgcccagccctcaatgctagcatcaggatcagaccaaagcagatcacataggagaccactatctggaatttcagtaggcctttgaatctctcttatctgatctaaattttctaattctggagagagtcccccatg

SEQ ID NO: 102989 - DNA, 1098 bp, Glycine max
  Clone ID: PAT_MRT3847_64016C.1
gtggcgccgctggcaccctctcgcttttccctccctagttaagatcttcctgttactctctttgcctttgctctagcttcagctactacctactacatagaatagaaatccaactttttctctcttgttcataagcttataactggccacaagcaaagataactaccaggacaaaaaccatgaaaggaattgatttgttctgttcttcctctggttccacagcagtaacttctagcatgcaccatcgttctacgttacaacgaagcaccaaaagcttcgaccatgatcgaaggaaaagccaacttcatgtcccttgttcatcccaattgcccattaatcctaagccttacttcgagaagcacagaaagagttcagctgataagcaaaactgggacatgcgtagaaaaagttctgctgatgttaacgacttttatactcatactcatgctagtgctgatggttcatccagaagatatctctttggtgatggaccattcattgaatgggtgtctgagtccaataaaatctcagcaatggttccttctcaacatgatgtcaaagtgaaagacaagctcgtggttaagaacagaaacgatcttcccactcttcggtcctcttcttcagctcgctccaaggatcaggttgtggttttgagggtgtcattgcattgcaaggcctgcgaaggaaaagttagaaaacatatttcaaaaatggaaggagtgacatcattcagcatagacatggagacaaagaaagtgatcatcgtcggagacgtgacaccactaggggtactggcaagtgtatccaaggtgaagaatgcacagctttggccatcttctacatcgtcatcctcattattactgtcatcatcttctaggccaacatctccatggtcgacataatcacttatatttaacataaataatatatatttattaatttcacccctgcttttttttctatcttcatctctcttctagactttaatttgatacacctaggaggtgtgcgtgtttctgtatgattagaaatttgatgacttgtgaagcactcaagcttaataatgtgtgtcgtgtaaatgaacaatgtttttcagtc

SEQ ID NO: 102990 - DNA, 360 bp, Glycine max
  Clone ID: PAT_MRT3847_64017C.1
gcagcatctcatccccttctcagagaggatgattaccctcaaagacgtggtgctttcaccaattacaatgtttgggttacaccttacaataagactgagaagtgggctggtggactttttgttgatcaaagtcatggagatgatactttggctgtttggactaagcagtaagcatgcatatcttaaccttggaaccaaatatgtttcactttaattctgtttatccaattgaaaactaacccattgttttttttttagcaaaataaatattttttaattagaaggattattataattgcttaaactattaattttgtcgctataagtattctgtttagccgctttaattgcaaacaccct

SEQ ID NO: 102991 - DNA, 452 bp, Glycine max
  Clone ID: PAT_MRT3847_64018C.1
tattactgctaatggctctgttgactatgattttatttaacacacgagcagaagaactctggaaaccacacctcgggctataaacttgatagtcagtcccttgtgctctctttaatccactctaaatatttaagattgcctccagtgatgggtaaggagatcacctctggcacatcgtattcatgattagttttgacatgctctgtcaatgcctccagaagggattgcctagtcttgataataagaagttcctcagaatcagtttggatctttccctccactgtgcctagtattgttgtctatgtcactgttcccaacaaagaagcaggcattaagttggctgaaagcattgccaaagagaagcttgctgcttgtgtcaacacggtaccgtatattgaatcgccgaaccacggggagggaaagatccaaactgattctcaggaactttttat

SEQ ID NO: 102992 - DNA, 289 bp, Glycine max
  Clone ID: PAT_MRT3847_64019C.1
ggctcgaggaaaaaggaaaagaaaaaaaaacattttagcacttaagacagcaaaaaacggaaagggggagggggagaaccgaaaagagaccgaccgcaaagaacaagagaaaaccaacaaagtcaaccactctcgaagagaggaggatatggacaagaacgagaggaacgctaaagcaacccaggcaggaacagacacccaagtggaggccgaagcccaaaacagacgaaacgcggacaaaagtgaagaagaacagcggtcatgcagattaggaacggatacaaaatta

SEQ ID NO: 102993 - DNA, 440 bp, Glycine max
  unsure (1)..(440): unsure at all n locations
  Clone ID: PAT_MRT3847_6401C.1
ggaattcggcacgaggattttaatatcttccactggttcaatgcttctttgggagaatcactattattgggtgaggacaaggtaatttgcatcccaggtttagagcaacattttagttgtttctagtctttgggatgcagattatggattcttcatcaccaatgcagaacgatntaatcaataaaatgtggatgtggttaatgttcttatttactgaacaattaccaatttattttcccaaatagaaacaacaatcactcccttccttattttatggtaaggcatttattttttaagaatatcattaaaaaaattaaatttttttactattctaaatgacaaatagtgtaaaatagagaaatatttcaaaagtgacaaataaaatgagagtagtataatatttctaattttaccattaccaatggatgtggatcatactc

SEQ ID NO: 102994 - DNA, 372 bp, Glycine max
  Clone ID: PAT_MRT3847_64020C.1
catggctgccctggacgcagcagaccgcgccaagaagaagtgacgctggagccccgggtgctggctggccacctgccctgggagtcttgctgtgccacacagctccccaccccctgctaggaggtcccagtctcacgccttcctcatgtgttgttctacctgctgggatgggggtcagcctctctttggtgacgtcacgttctctgggatcctgaggacccgggcctcaaatcagggaggatacgcgggaggccccctccatccaggcggtgctcctggggtgccgggaccgggcagtgtcacaccctgcctgctcagtcctggggtccgagatgctagggacgcttgaatgaaggatgtggtgttaaggcc

SEQ ID NO: 102995 - DNA, 484 bp, Glycine max
  Clone ID: PAT_MRT3847_64021C.1
agactcaaactacaaacttcctctaccccaaaacctacagctcaaatcttcaagcacaaaatggaaaattgaggccaaattcaatcatagcaacgtgatgaacaacaactgaacaattgaacagttaagagtcagcagaaacctttacaatctacagcaccgaatccaggtgatcaacgtgccctttatacacctccataagccccggtacacgatcctggaaccgccccacaaacttctccaaaaacaacttctcggtgatcaaaatagccgagctaagccgtgagtcactcttcaccagccccctctccttcaacaccttcataacgcgagaccgggggataattgtcttctccaagttggggctgagaacccccggagtccgaaaaatatcctgtggggggcgccgggtgaggttggcggggggccggggggaggaggaggcctagagctggggggagagggggcgagggggggggcgggg

SEQ ID NO: 102996 - DNA, 445 bp, Glycine max
  Clone ID: PAT_MRT3847_64022C.1
tgctgcagtggttttggtagcatggccatgccatggggcaggctaccaaaggttccctctccgaatgaaaactggctatggggagcattcttgggaggtgaaatgctcaagtattgggcttgctgtggaagcacacagcatccgagcctgaaaaaccattcctgaagagtgcgttgaaccaacggaggactacattactggcgaacaattcagatcacactctaaaacagtgaaccaagaagctttcttttgtgctaatgagcgcgaaatccatcacaacgacgtgtagatattcggcttagatagcaccgtactctgtaataatccatactatgagaagcatgaatatggggtgaacgattttagtgaaaccttgtatggagaatgggtgaacgcggtcaacacagcgagcatgccatagactatcaaaattgcaacgagattg

SEQ ID NO: 102997 - DNA, 512 bp, Glycine max
  Clone ID: PAT_MRT3847_64023C.1
tggaatggttaggactattgtttaattaatgacagaaagaaagtttgtttgtctgaatattttacaaattaagatcaacttgtattttgtctgctgttttcgtccttatcagatcatactttagaagatccccagcttaactttcttcttatgtggtatgtttgttttctttgattctggcttcctgatgggtgctcaagatgaatccatgtctaatgaagcattgacgttaaacttgattgagtttaaaatcaaacacaccatatttcagtgaactttatgatcgctctatttgttttaagggtgtataactatgctagtttttcccttatcatgaatgcttgctcattgttaattaccaaccttaattggcaggtgacttttgtttcttttttatgactctgttatagtttatgttgtttttgcttattttgaatggtattgcttttgatgtaaatcgtaaaatttgtctgatacactaaataagtagatgagttgattgattgcattgt

SEQ ID NO: 102998 - DNA, 497 bp, Glycine max
  Clone ID: PAT_MRT3847_64024C.1
acagagagatgcggattagtatgaaaacgatttggtcaaaattgtacgctgatgtttttttataaaataaaaattttaattaatatttacttttacaaaaaaaatttcatccacatatccaatcctgtacggtttagtgttcgcacaaaataacattaattgctcatgaaaaaataggttttagaagaactttgattagactccttatccttaagcatatctaaccatcagaatttaatatgacttccaatgcagtgaatatttgggaccaaaaatgtttaccaagacaatttcttttgttatataaagtctctaataccaagaattgcaaatagaactacacaaaaacgttccaccaataaaataactgaaggatatagaatttacgtgattggcactttttttttaccaacatccactttaaaccttcaacaaaaatattcaacacccattgcattttatttaaatcgaatctgctttccttataaaatctttta

SEQ ID NO: 102999 - DNA, 430 bp, Glycine max
  Clone ID: PAT_MRT3847_64025C.1
gaagctgtatatttgaacttgttagcaacattgtctacacatagttgtaacaaaaaagacattgtctgcacatctaatctcttctggtgtttctcttctcaaaagaaaattctgatggactaaaattaatgtcatgtttagtgctaataggtacttctgtagttgaatgaggccccagaacttgcattggggtctcatctgtttctggatggtagcttgtggaaggtgaaccatccacatcacattgttcattttcatagttggatgtccttggagaagtttgtgcactgtcacttcttccagcaaggtgtctgtgcagcaggtgaataggagacatgccaaatgttggggttgatgaccggctcgagaatggtgtgacattgttaccctctgaatgcttgcggtctttgacatgctttttggaagtatg

SEQ ID NO: 103000 - DNA, 338 bp, Glycine max
  Clone ID: PAT_MRT3847_64026C.1
gaattctaatgcaatttacgggtaacattttctggatttactagaggcatttgcatgtctaactcgtttgctgattgatttattcatcccttttgtcagatgctttgtaatataatatcatatcattcttgtccgatagggaattaaacgggatgacatacatgtgaagggttactttatgagcaaattatatcgtgtcattggagtagctatatcattaaaaattcactgaactgccatgagaactgatctttttatcgttgtaaattagattggatattagattctttcgaaggacccagtagggcgtgtccttacgctaattccatgagtttgcc

SEQ ID NO: 103001 - DNA, 304 bp, Glycine max
  Clone ID: PAT_MRT3847_64027C.1
tggtattctcttactaggaagatatatgcatatattatccggaaactccgtaaggagctgtctgaactatataattaacattcaccatggcctttcgtcatcattcaagggacgaaatccatgtaaacaaggctgtgaagcacgtgttaaattaatagaagcgacaagtcactttgtgactgaaaaacttgcctctggacctataattacacaaacggatgaaagagatgatgacacagataacctgcagagctatgtgcaaaaatcagaaaacctatacaaacaatgcctttccagaggagta

SEQ ID NO: 103002 - DNA, 460 bp, Glycine max
  Clone ID: PAT_MRT3847_64028C.1
ctggggttcttttttttttttttttttcttttttttggataaaagctgctacgtacttttggaagaattattagtgtgccagcataaacccgccgtttagggaggaaagatttctaaagccacgcaatatctttggtcaatgaataaacgcaagtataaattgaggatgatcaaaaacattgtgatgggcacttatcctggacctggttctcaggcttatcttattttccttatcggcaaggcccctccaaagaacttttttacttcaccggtttccattttgagcccatcaagaagctccatttcttcttttgacaacccctttaaaaaattctccttatctttttggaatactttaaacccttctgcccatttttgaaacaagggggcctgcgttttccccaccttgtccacctttttttttaactgatcaacttcccttacaagggggctttctcct

SEQ ID NO: 103003 - DNA, 360 bp, Glycine max
  Clone ID: PAT_MRT3847_64029C.1
attagcatgcatggaggaaaaaacccgcggccccggggaaataaaaaaacgccctaagcgtgcggaacacaaagcagaaaagggggctaggtgccagccctcctggacccctatacttcctgggaagccaaattccctaatttggacccctgggctgccaacggtgaaaaccccgccaccggagagggtggaaccatgaccaagccccaaccgcccataacaagtgggaaaggcacaataaagaggcccaccgttcgggactgtaaacttttcagggactctgccgggccgaaaaagcgcctaaaaagaaaaaattggcacaaatcaggctccccaccggagaaaattttttatatagcc

SEQ ID NO: 103004 - DNA, 409 bp, Glycine max
  Clone ID: PAT_MRT3847_6402C.1
tgcagcactcttattcgcagcctcatacctcacacatacgtgctgggtctcccctcgccgggctgaatagctctcccgacacttctcttccagacccgccagacacccgacgccgtccttcgctacctgaccgacaacctcggcctctccgaaacccaatccttaagaatcatccgatgcatccccagactcctccgcaccatcgttactggctacccctgcattcttgaacgaaaactacacagacagatcataccctcctttgatttcttcagcaacatgtttccctctcaccacaggtctacaagtcaaccagaaagtaatacttggaggacgaaattgatggtttattccaccaccacaggttaaccaaaactggtgtctgctactcgggcattctttgcagcat

SEQ ID NO: 103005 - DNA, 176 bp, Glycine max
  Clone ID: PAT_MRT3847_64030C.1
tgggggacccgtgggcagacgtgtcgggagtattcgatgtttcagctctagaaatgtgatgctgacaactgacccgtatatatatcaagttcacacgatgcgcgatgtagactacctgtagttgaactgcgatggtagtatatttttccagggcgattgaggatatcatatggcca

SEQ ID NO: 103006 - DNA, 364 bp, Glycine max
  Clone ID: PAT_MRT3847_64031C.1
cccacgctttcgataacacgacctttcaacatcagcttaaacctaactacaccttctctgtgctaattacaataaaacgtacaactcaaaatgctacatacaacaaagctcggcttatatctttagaaaacgatcaagctaattcatatgagagagactcaactaaaaacactatcgatgagaccgtttatagtaacctgcttgactgatcaaccaaggctaatcatcaaccacacattcatgtacatgaaaaacgcttacattactagcttataaacaatcatttttactattcactctccatgacattatccacttactatcaaacttaaggaaaaaacctcattgcactgcatcaatcaaa

SEQ ID NO: 103007 - DNA, 558 bp, Glycine max
  unsure (1)..(558): unsure at all n locations
  Clone ID: PAT_MRT3847_64032C.1
gaccttcctcacagacgagggtaggagttaaagaagtcactatgtctgcaaacatggccaaattgcctctcatgcgccacattgtcggctggctctcggtatgaaactccagacaacctcggttctgctcatgtcctgcgctctgcatgtggcttgacgacaagttcccattcaacctttgccatcactcgcttaattcaagagagaggcgcgaatctttatgctgtgaatgaccgagactccattctgtatactatggaatgcaacctccaagcattggaaccatgtttgaaagttttgcatgcagtgacttcaaatcaagtttttaagccatgggagctttcagataatattccgaggttgcagtatgagcttgctcttgtccctcctgaagctcgggttcttgacatgcttcatggcgctgcattccgcactggtcttggcaactccctctntattcccaagtaccttttgggaagtcagggaacggaaactctgcaacattttgttggcaatacttttctgngaaacaggacagttgttgccggctctggaata

SEQ ID NO: 103008 - DNA, 1094 bp, Glycine max
  Clone ID: PAT_MRT3847_64033C.1
gaaaggcagagttttactgatgaaatagagaagcttaaacacgataaagagcaactcctcgtggaattacagaaatatcagcatgagtggcaggcatatgagatacaaatgcattcctcaaaagatcggttggaaaagttggaacagaatcaacaaaagatggtttcttctgtttctcatgtattgcagaaacctgtgatttctgtaaatatcttgcctcttacagaaaccatggatagaaagcgaaggttgccgagaagtggccacttttatgatgaagctagcgttgaagatgctatggaaacttcccaaatgttaccaagagaaaatgcagacaataccactgtcttgacattaaatgtggagcgactggatcagcttgaatcatccatggcgttttgggaggctattgtacatgatattggtgacaccttcgttcaaattcagtcaagtatggatttggatgaatctacaagttgtgctgatagtccatctttatcttgtgcgcaattagatgttgaagttcggcataagtcaccgggaattgacatgaactctgagccaactacagctgctgttcctgagcctgttgcatcaaaagaacaacctgcgggaaccactgttgcagcaactggtgttaatgatgtattctgggagcagttcttgacagaggatcctggtgcatcagaaacacgggaagtgcagtcagaaagaaaggattatgaaggcagaaagaatgaaggaaaacccagcgaccttaacaaattttggtggaacaaacggaatgcaaataatcttccagaacagatggggcatgttggtcaagcagagaaaacttagtagcaattgattattcttcttgcttgtactgttctataatcacatgtaataaatataggtatgcacagttcttttttattttctctacaatagatacatattccatattttgagtgggatgaatgttgcatccttcattgattcattagttaagtatgccgctcttttgtctcttctagttctattatgccttgtacagaacggtcgtttggttcaagcttttaaattatagaccaaaagggggggggggggag

SEQ ID NO: 103009 - DNA, 181 bp, Glycine max
  Clone ID: PAT_MRT3847_64034C.1
attcgtgataaccctaccggataagacgatcaccctagacgtaaagtcatcggtcccaatcgacactgtgaaggcgaggattccggacatggagggcttcccgccggacctgcaccgcctggtcttcgccggaaatcatgtggtggacggactgaccctcgccgactacaacatgcctaaa

SEQ ID NO: 103010 - DNA, 416 bp, Glycine max
  Clone ID: PAT_MRT3847_64035C.1
aaaccccctcattgcacatagtaatgccctttatttaagggaataaaattttacctactagttcacaaatgccaaagggcacttattaacccgatatttgggacttttacagttttcaaaaagtcgcgttagcataggggtaggggcgttagaactcaaaatttcatttttaacgccaaaaagaacagcccgttaagctactggaaaagggtcaacttttgtaagaaaaacaatttttttacctttcccaagggctgggcgaatccttttgtggaaattctgaggggccattggtaactggtgaacttatccaagcaggggggggtaaacccccacgttcactaccacatgggacatttacaacgaccggttctgaagggaattgccttacagggttaagaccatttccaaaaatt

SEQ ID NO: 103011 - DNA, 437 bp, Glycine max
  Clone ID: PAT_MRT3847_64036C.1
caaacccaacaaaataaaaaggcgatcttgttaataaaccaaggactcactcaacgaagggggcaaaaagtaaaaacaaatttctcgacataaatgggaggaacaaacccccccttttcttgttgcccaccaccgggcgaaaggcaccaaaaaaaaataggggttaacctatccaataaaagctttaaatgtcaaccctgttaaaacccccacaatataacagccttgtcccaaagcttttttggtaatggaaaccaaaaggatcaaaaggaggctcaccttcccaacagttaaatacaatggggcaaacatttaatccttctcccaaaaaaagactaaaatcagatgggcctcaaaggcaaagcaaagcaaaatttaacgtgtgggacccactttaaacggcagcatctccttttcccggttgaaaggctcttgca

SEQ ID NO: 103012 - DNA, 287 bp, Glycine max
  Clone ID: PAT_MRT3847_64037C.1
aattctatatatgatacaccagataaggcttttctaactaaagattcaaattaaaatattaaattttcaacaatctttcttaaaacaaacattctctattcacatcagtaagaaaacctaactcaactacgagcataattatcaaaactaaaaaaaactacaacagagagccaaaagaaatctaaatttgataataaaaaaatcaaaaaaccaatccttttaaagtcatcgtagcaacatctcccttggatgaccaccttccttcttggaaggagaaaattttaatt

SEQ ID NO: 103013 - DNA, 113 bp, Glycine max
  Clone ID: PAT_MRT3847_64038C.1
gcggtaacatttggatatttggccccagagttctttattcattgagttgtgagatgttcaaaactgatgagtgggttttcggaggtggtgctgtcttagcttatatcatgtta

SEQ ID NO: 103014 - DNA, 300 bp, Glycine max
  Clone ID: PAT_MRT3847_64039C.1
aaaaaagggaagtcctcagcacttcaactctgctgatctctctgctcgaaactacatcgttttacacatctcgtcaagtcaaggttacactcattgagggtcgtgcttcaatagaactgcatttcacgtttgcgcctctatgtgtcacaaacactgaatgcctctcattagctcatatgtgaaggtctgcacaggacagtcgtgatgccgatcttcaatctcctaatggtcaattttaagttagagattaggatgtccccagatgacataggggctctgatattgagtcgtgtcatttga

SEQ ID NO: 103015 - DNA, 725 bp, Glycine max
  Clone ID: PAT_MRT3847_6403C.1
cgggcggaaaactaggaatttcttcttctttataaatttcgccgacgattaaacgttctttttttctctgcttttcctttctttcctcagtgagtagtactcatcaacggagagagaaaataaaaattaaaagtaaaatcccagagtgagagagaaaagaaaagaagagaataaaacaccaaacaagcttcgaaacgatcgtgagtgagatgaagaagtgcgaactgtgtaaagttccggcgaggatcttctgcgagtcggaccaggctagcttatgctgggactgcgacgctaaggttcacagcgccaacttcttggtcgcgaggcacgtgcgaaccctactctgccgcacgtgtcgttctcccacgccctggaaggcctccggcgcctcactcgcccacgccgcctccgtctgcgaccgctgcgccgccgcggaagagacggaagagagcgaagccggcaatgacgacgaaccagacaccgaggacgacgacgatgtcgacaaccaggtcgtgccgtggtcctccacgccgccgccgccgccgccgtcgagctcctccggcagcgaatgctcggagtgcaaaaacaacgttgcttctttttccgcctcggaacaggaaacgacaacatcctcgttgaaacgacagcgcgaggacgacgacgatgcttcttccgatcctgatccccaggtgttgagaagggttgggcgtctcacggaagttgcg

SEQ ID NO: 103016 - DNA, 1619 bp, Glycine max
  Clone ID: PAT_MRT3847_64040C.1
ggctcgagaatatggttggctgcttactatttggcttaatggatatttatagcaagcttgtaaatgccggtgtaagaaccgtgttttcattttgtgacaggatgttgtgatccttgagcatcaatcatttctttctggaatagctgatgttcatgatcgacacggggatatgcgacttgatgttgataacatgtcttatgaggtaaaatctcatttctgcatctggatgcaaatattaatatatctatacaaccataatgtcagtttatcccttgcttgtctttcaagatagtacttcattttagagagttagtttctcatgtgaagtttgactataacaggagttgttggctctggaagagcgcattggaaatgtgagtactggattgagtgaagaaaccctatcgaaactcttgaaacagagaaagcactatccacagttagagcttcaagttcaagtagtgaaaatttaagtattcccggaaatgttgcttcttcatcacggactggatcaaatccagctaccaatccctcatctgccacaactttttctcgttctaatcctccacagcatccacggaggttatctgaatatgttcgtctcgtttttctcccagttctgatgctattggaagtccaagccataattattcttccttgcgctctggtctttctacatctgaaccaagggcgttatcatctgggagtggggcaaacccgagatcagcttcatggttggagaggcaaggtgatagtgaatttggaattccttattcactacgtactttggctgttgcaagtgaaggaggaagtagtagacttgtatctgagctccgcaatgttttgggccttatgcgtagaggtgggaatgtgcgatttgaggatgttgtgatccttgatcatcaatcatttctttctggaatagctgatgttcgtgatcggcacagggatatgcgacttgatgttgataacatgtcttatgaggagttgttggctctggaagagcgcattggaaatgtgagtactggattgagtgaggaaaccctattgaaacacttgaaacagagaaagcactcggctgaaaaagggcctcagattgatgcagaaccctgttgtgtttgtcaggaggattatggtgatgaggatgatattggaacgcttgattgtggccatgatttccatagcagctgtatcaaacagtggttaatgcataagaatctttgtcccatttgtaagacaacgggtttggcaacatgatgtatgtgacgaatctgtcctcaggcaaataccatgaccatgaaggaaaaaaaattggcgcaatttacccaggaaattctggtgtttgttgccttgttataccttgttttctatctgtagcctagtaaattgtcgtacctgactgacaaaggtttcccctacccttctctcccgaattattaactcaagtttacaaggtttggtttacgtttatgaaatttttttatattgctcggattggatttatgctgaacggaaaactaggtacaaaaaatattattcaaatataatcgtaggttctggatttgcgcgtttaaaatggttttatttgtttattattaaactaagctctcgtaattgct

SEQ ID NO: 103017 - DNA, 329 bp, Glycine max
  Clone ID: PAT_MRT3847_64041C.1
accagcaacaatggtagttgaggagcctttgcgaacaacgtttcaggttagcattttgcattttcattgatctctatctttgactcaactcttactttctctctccttcatttggctactttgatctattatgtatggtacgggttgggttgggttccgggccgtccaatcccaaaccttcaatggattttttatactcttcctacatcttgggtcttattgactcccaacttgcactgctgctggatatttgtcacgtattgtataccacttgagcatctggtgattccatgctctttctcggattctttcaactatataatctaact

SEQ ID NO: 103018 - DNA, 697 bp, Glycine max
  unsure (1)..(697): unsure at all n locations
  Clone ID: PAT_MRT3847_64042C.1
ccacgcgtccgaggaaagaaagggaacaataaatcgaataaaagaagcaccccatatccacgatgggtgctttctttccctatttattctgagtcacgcataccttgattctcctattagatcggcccttttccatttccatttcattcgggggtgaacaaatttctgggactaatcaattgacaatgctgcattagtgggattggtactgccgggttctttagctgatgaaagaggattgagcggtgctgcttgtgacttgggtggtgcatacctgttctatacgctaattcagaagctctgccaaatttagtgtctgacttactgctttattgagggattcatttcatatatttaattatattgagttgggaaaaccaatagattccttcaatgcaagggcagagaggtacagttggttcaatgcctgaaaccttagaatttgattgtggatctgcatcaggcaattctaccgtggatcagcaaatttgctggaataatgtgaatcctgcagagaatcaaatacctgattatatactttctcctggtgatatgaactcatcttatgggaattctattattaatcatgaatggcnaaaattgagtggatggagcttaggggagccaagttccagtaatacaccaaatgaggttaacattaatgagcaaaaaagagaacttggatggtcatcaacca

SEQ ID NO: 103019 - DNA, 1245 bp, Glycine max
  Clone ID: PAT_MRT3847_64043C.1
ttttctcatcctatgagaattctattattaatcatgaatggcaaaatttgagtggatggagcttaggggagccaagttctagtaatacaccgaatgagatcaacaataatgagcaaaaaagagaacttggatggtcatcaaccattactgctggtgcattggctggtccaagactagaagaaaggcgccttgaaccaaccaatgctctttcactagacaatgtcaatacaggtcctatctacatctgtagccccaattctcatttgatgtcccagaatctcaacttaaatgcaggtttagcggacagtggcagtgatgatagtcaacatctggagctccctaacttaaacaagtctagtgggtcagcaaacgagtgtataccacctaatgttggatctggttcttttctgcttccttctggaaataatgccttcctggtagaagatactgatggtaggcctagttgttctcttgatactcggcgggtctcttgtaaacgaaaggctgttgaaggaaataatggacaatcgtcagatgctgggagttctagctacagtcagcatacagatggtagtgcatggcacaccattcctactcaggataatgctggaagcagttcgagaagatctattccctcagaagaggtaaacgcaagacttggcctgggtatcggggatgaagcatctgaaaatgtttctgattcaaaaactgcaggaagctcagaaagctttcacgggaatttccgtttgaggttaaatccttcgaacccaccaaattctgttcctcccactgcattctcaactgggagcatgattaggcattctggtgtccctccatcctctcaagtatcccaaaggcttcattttgttgataattctctgaacttgatgtcagcaccaccgatagataatgtggttcctcaaagccagccacttgtaatccatgttcctgctttgcctaggaatagacaatcatttagatggagtggtggttctagctccagaaacatccattcatcaaactcagttatatgcgcagacagggatcagcaggatgcaagctcaagaagaatgtctagaaatatgttagaacatccagtctttgtacctgcaactgatttaagaaatttagttcaaaatccaacagttagagcttcaagttcaagtagtgaaaatttaagtattcccggaaatgttgcttcttcatcacggactggatcaaatccagctaccaatccctcatctg

SEQ ID NO: 103020 - DNA, 1533 bp, Glycine max
  Clone ID: PAT_MRT3847_64044C.1
cccacgcgtccgcccacgcgtccgccaacgcgtctttcaactcgtccgaaaggccaaacctgggctgcgggtttgttttgatatctccaccatcctacgtcttcccttctcttctcaccttgttcttgcctttatcaccaggaggaaagaaagggaacaataaatcgaataaaaagcaccccatatccaagataggagctttctttccctgtttattctgagtcacgcataccgtgattctcctattagatcggcctttttccatttccatttcattcgggggtcgcaaatttctgggactaatcaattgacaatgctgcattagtgggattggtactgccgggttctttagctgatgaaagaggattgagcggtggtgcttgtggcttgggtggcttacctgttctatacgctaattcagaatggggagcgcattctatcgaaactcttgaaacagagaaagcactcggttgaaaaagggtctgagactgatgcagaaccctgttgtgtttgtcaggaggattatggtgatgggaatgatattggaacgcttgattgtggccatgatttccatagcagctgtatcaaacagtggctaatgcaaaagaatctgtgtcccatttgtaagacaacgggcttggcaacatgatgtatgtgactctctgtcctcaggcaaataccatgaccatgaaggaaaaaaaaaattggcacaatttacccaggaaattctggtgcttggtgccttgtcttctgtttctgtttagcggacagtggcagtgatgatagtcaacatctggagctccctaacttaaacaagtctagtgggtcagcaaacgagtgtataccacctaatgttggatctggttcttttctgcttccttctggaaataatgccttcctggtagaagatactgatggtaggcctagttgttctcttgatactcggcgggtctcttgtaaacgaaaggctgttgaaggaaataatggacaatcgtcagatgctgggagttctagctacagtcagcatacggatggtagtgcttggcacaccattcctactcaggataatgctggaagcagttcgagaagatctattccctcagaagaggtaaacgcaagacttggcctgggtatcggggatgaagcatctgaaaatgtttctgattcaaaaactgcaggatgctcagaaagctttcacaggaatttccgtttgaggttaaatccttcaaacccagcaaattctgttcctcccaccgcattctcaactgggagcatgattaggcattctggtgtctccatcctctcaagtatcccaaagacttcattttgttgataattctctgaacttgaggtcagcaccaccgatagataatgtggttcctcaaagccagccacttgtaatccatgttcctgctttgcctaggaatagacaatcatttagatgctctgtcaaatttagtgcctgacttactgctttattgacggattcatttcatatatttaattatattgagttgggaaaatcaatatatt

SEQ ID NO: 103021 - DNA, 775 bp, Glycine max
  Clone ID: PAT_MRT3847_64045C.1
ctcaggatcgtgcgactgctcattatggtgctgtgacagggttaaaagcgactgaggatggcatgtatctactaagtgcagggtctgattctagattgaggttgtgggatgttgaatctagctgcaacacacttgtgaactttgaaacagttcgtctgcaaataaacaaacctcttcaactagccaccactcaagattcagcccttgtttttgttccatgcatgagatctgtgaaagcatttgacatgtggtctgggaacacatacacgatattgcgtggtcactatgaatgtgtgaactcttgctggtttaatcaacatgatcaggaactgtacactggtggaaatgatagacaaattcttgtctggtcacctgctagatcaatcgctgatgaaatggaaggaactgctgaggatcaggataactggagtagctgagtcttgcctccctttgtgtgacaactttcccttgttcgtcttctgcttgccacttctgttagatgtttgtgggatatatgtaaatgtaggcttgttccggttttggagcttatgtgaaatgctataaagcacaaaaatgtatagtagtatcccattttttgtgtagaatagaactttttttttcgtcatcttttaacttttaatcagtgtaaattttgaattgattcctttccttgttgtaagttacatcataaacacattttgtatcccattttgcataatgttttgctaatataaagttgtgtacaatatattaaagaagtaaattttttaccatt

SEQ ID NO: 103022 - DNA, 261 bp, Glycine max
  Clone ID: PAT_MRT3847_64046C.1
gtctttgttacaaccatgaaatgagttctattcttgtcacactgtgatgactactatagagttacatacccctgttcacctggtgctgttttctatggtcttgcagctaatgcgattttcaagaactacaactatggtagctgtggaaaagctttgaagatcgacctactcagccatccataatacatagagctgaatgccacccttgtcttccaggctgctatgtgtagatggatgaaccctatgaaaaagtaagagtcc

SEQ ID NO: 103023 - DNA, 1218 bp, Glycine max
  Clone ID: PAT_MRT3847_64047C.1
tacggctgcgaaaagacgacagaaggggaatcgccgtttttctttatttgcatttctgaaatctgtgttgtttcagccggtttctatctaagtcccggctctttggtagtattttcaatcttcgaaaggtttagggttttacgatttctgaatctcaacgacgttttggcgcttagaatggaagaagaacaatctgtgaacggcacgatgtctgggtccaaaacgacgcaggagttggcgatggaagggcaggagtacttggaagaaaccatagagaacgctttccagatcctctcttccatgaacgacgagctctgcaaccccgttttatggtctacctctccctccacctcccccaatgccgacgccacttccgacaactccaaccaccacgccgacgccagtgccgcctctgccgccgccggaggcgccctcgaagaggcccgcgcccgatacaagaaggccgtcaccgcgcttcgcaccattctcactgccattcctacctcccagaaggaaaaaacatttgatgccggttcagctgctagccctgcagatgaagctgaaatcgataagttggaggagcgagcctcatctctaagaagggagcttgccaacaagaacttgcacttgaagacactcatagatcaattgcgtgatcttatcactgatatatcaacatggcagagtcctttttcaacctgaagttttggacgagtacttaaatttgtagagtggtaccaaaaaacggaaaacggatgcagagtacagtaaatggtaataatgcttgatattttccgcatgaagttgcatcagttgatctcaacacattcccatcctatggtttcagagatgtctctaatgatgagaggttgtaatggacttgtattttgtagatctttcacataaattttataaaatagcagcctgccaatctttaacaacaatttgatggaatcattgatttggtcgtcagaaattgtaacaaatagttttcttttgaagtttagagaagggtgcctgtatttggtctgaagatgaaaatagatcttgttcacctatttttgtttatagcttgctgcttagccgaatactctgtattattttatgtttcagatctatgtatttggttgaggaatatttggaatggaattggaaggtggttacaatggaaatgtgaaaagtattttcaaattctttatttccgctctagaggatcca

SEQ ID NO: 103024 - DNA, 566 bp, Glycine max
  unsure (1)..(566): unsure at all n locations
  Clone ID: PAT_MRT3847_64048C.1
tgtttcccccttctttgtcggcaaatgatggtgcacaaaaattggatgggaaaattaaaacaaagaatgcactaggagtctaggacaatagcttgtgtaagtatactattccaatttcttttcatttccattcaaatccactctactaattacaacatcgcttacaagaatcagcctcnnnttctgttctctgagcgatgttcatggatttttgggttacttgatcctcaatnnnnnnaagtcaaataattgtaaatggttaggagttgtcacaaaaaagaagctcccagaactgtgttagtaaagaagctgagttttttttgcctatcaaagttagtctagttgataaaaataaaacttttatctcacaacaatgcgagctcgaacttcattgctgatgtgatgaatttgttgatgaatagtttgtaagtatctttataaatgctctttgaaccttnnnncttccctgaccttaataagcctctaggantcacaactcaccaaaactttttagtcttcgancaaagannncatgtttttgggttttctaattgtaacaattgctc

SEQ ID NO: 103025 - DNA, 498 bp, Glycine max
  unsure (1)..(498): unsure at all n locations
  Clone ID: PAT_MRT3847_64049C.1
acagtaaatatttaatttggttccatcaactattccagtacattctcctggtatggtagcaaaaccatgctaagcagggggttcatgaggtatgggaggggtcattgaagagaccccagaatcactgaacccactccacaggcctactggttctgcaaaatgaaggtttggctgacaggatgtcaagttgggaaagaaagaattcaagatgggactctaggtctcagcctgtatttttgcctgtaggaaggaagatgtgcagaagagctggggcatatgcaagttctaaccgcgctgtgtggaaaacacggctaagcctctccacctgtctaggaacagggtcctcccttaagatcctctgtcactctgtgctagcttcctaattctgcgtttcaaattctgaatcctatgtgcccacttctgaaggattcctgcgtcaagcctgtcttatgtacccaaacccttcccattcctatccttntcccagccctttaagta

SEQ ID NO: 103026 - DNA, 292 bp, Glycine max
  Clone ID: PAT_MRT3847_6404C.1
atcttacccaactcgcattgcgtggcaccataaagccggtaaaaatagtaggagaaagctcaaaaacttggtgcataataaaaaatacacgcctctaatactccagttaacatatgtctcttctataacctttaactagaacaccaaaacggggggacccttcgaggccataaaacacgcagcgtaacggagtcacatggctaacaagcttctatacatcggtggtaatctttataagccctctaaaagggacatgcctggggtaaacttcaccggtgggtaccaggtatca

SEQ ID NO: 103027 - DNA, 313 bp, Glycine max
  Clone ID: PAT_MRT3847_64050C.1
gatacagactagaccgagctcggttactggttcggactcctctcccgccggcgatcaggatggaggttcgtgttggtgtgggggattcacagtatggggtatgggtagcggaagagatagggcttgaagtcgggtcggcccggaatagaactgcgctgtctgaagggtggtcggaggagatcctttcggaggatgtcggagatgctgacgacgccatcaatgacggcgacactcagccttcctgcttgccggaaccgccccatgggaaacggacaccgtccgatatccaaggggtagagggggagactaacgg

SEQ ID NO: 103028 - DNA, 311 bp, Glycine max
  Clone ID: PAT_MRT3847_64051C.1
taaaaacaaaagaaaaaaaaaaaattttattaaaacaacaaaaaaaaaaaaaaaaggagggaaaaaaaagaaaagaagaggaaaaagaaaaaaaaaaaaaaaaaaaaaaaaaaaattgtaatagagaaaaaaaaaaaaaaggggggggccctcttagaggacccaggtttacttcccgggccttgccaagtataatttttttttttgggcccccaaaatcaaattagtgggccccggtttaaaaacgggtggccgggaaaaccccgggctttccccatattattggcctgggagcaaatccccttttcccc

SEQ ID NO: 103029 - DNA, 274 bp, Glycine max
  Clone ID: PAT_MRT3847_64052C.1
aaaaaacgccaagaaatttatttaatcccgggggggaaaaatcccccttccaaataaaaatgggggggggggtctttttcacaaaatccacacaaacttaaataaaacgggggcaataataataataataataatgggggtgataaaaatgaaaaaagcttgaacctttaaacttggacctgaaccttctggaccgggtcgaaatcctacttaatgggggatttctttatggcccacgggtctgaaaaatcttttttcaattggggaggaaaaa

SEQ ID NO: 103030 - DNA, 479 bp, Glycine max
  Clone ID: PAT_MRT3847_64053C.1
cgtacagtctagactaggaattcggcctcgagctcttattctctttgaaaaatacaccatcgacattcagcttgaaccgattgggcagaacacagttttcatggggcccgaattgactgcgcatatcgagcgcgcttttcataaacagccgcacgttttccagaacaaaaatatttatgttgggaagaccaatatggttcgatagggtggctggagatgggtgaaagacatcggtctgggctccaggacttccaaaaccgtcattgagggcgactacattgaccagaagggcgccttcactggtggaggttgcatccgagggcgtttcctaaacggcaccgctgtgtccaccaaaatgcacccgcccctcgttatccgaagggaggacctacactttattcccaagtacttctcggtgcgagcgctgacacaagaaccttttcgtccacgggtagtcctctttacgggttgaggagggg

SEQ ID NO: 103031 - DNA, 130 bp, Glycine max
  Clone ID: PAT_MRT3847_64054C.1
tttattttttttattttgcattgtacgtgatccctcttacagccattttccagcgcaggggattctatgttattcgtgctaaagtgatatctaagaaaacaagcagcgttgccggtcccctatcccacaa

SEQ ID NO: 103032 - DNA, 192 bp, Glycine max
  Clone ID: PAT_MRT3847_64055C.1
agataaacaaacaaaccacgaccatgcaaacacaatagacctattttatccacatggaccataccaccattcccttaaccttgtccaaccacaattaggtggtgggacgcctacataaaatcatcttccccctccgatgatattctatacacttacaacacacgtaacccatggcattgaccctcataactc

SEQ ID NO: 103033 - DNA, 540 bp, Glycine max
  Clone ID: PAT_MRT3847_64056C.1
ggctcgagctcgagccgtatcggtttgagcgttcgaggggagatgcccgagagagatatcgagagagagagaaagacacttagccttgtatatctctcgatgtcctttgacgctcatgacccttgatgtgtgtgagaaatcgttcgatgtccattggttcatctgagtgtcgtaatggatatcgcacacctttcttgacgtcgaagctacgtgataccttgctatatctactactgtggctgccaagcgctctctgtacaccacatgactaataccgtctgcgctgacgccgtcatcggtctctgcgcgtcgccggtcaatagttcacgccgtatcgagtgggctcatgagacgctctcacgctgagtaacgcaagatcgagttgtactctcacggctttgacgcacgctgcaccggcgatggaatcactaggtgagggctcaatcacatgaccgtgactcaccttgacctagtcaagtgtctaaatgcagattgaccctgcttaggacaggagcttagcggctggcaccggaggaatga

SEQ ID NO: 103034 - DNA, 756 bp, Glycine max
  unsure (1)..(756): unsure at all n locations
  Clone ID: PAT_MRT3847_64057C.1
atgacccgtcgcatgcaccgccgtaccgtaagcccttggatccctctagnagccggcccgnnccctttnnttttttttattttattttatttttattttttattttatttttttttttattttttttttttttttttttttttttttttttttttttttttaaaaaaaaaagccccttttttcaagggaaaaggggaaaccattagccaaccaaggaggaccggcccaaaaccttgggggggcccccaaaaaataccaaaaaagccgcccaaccggggggggggaaaccccccggaaaaaacccccccgggcggaaaaaaccaaattaaaaaaaccggaacccaacccggggcaaagggaaagggatccggggggtttgggcctaaacccaaaagggggccccccggggaaaaactgggggggcccccagggaaaccggcccggaccaatgggaaaagggggggcccctgaacctggcccccctccccggggaccccccagagggggcgggttaaaaaaaaggaacaaacctggcccccctggaaaaattaaacctggggggccccaccggggaaaaagaaaacggcccccttgtggccggtttaaaggaaaaaccccggggggcccccaaaaccggggtcaaattccggggggaccccgaacccccaaccagggcacacgaaacccaggttttcggggggggaaaaaaccttttttaaaaacaagaaaaaaccatccttccccgccttttttttt

SEQ ID NO: 103035 - DNA, 387 bp, Glycine max
  Clone ID: PAT_MRT3847_64058C.1
cattcgttcgtccacgcgttcggtttgtttgtgttttacagagaaaaaaaaaaaaaatggtttctgtcgctgtgaaagtgatggtttactcctttgaacatatatcgctggcaatggatttgaaactcacactcgctttggtatataattttttcctcaaacaagttttgtacctgcggtacttactaatcaagagcttcacttatactcacatctgatgttgctcattctttgactgaaacaatagtagcttgctacaaactcaacaacttttttttatttacgcttgattcgattctactcaaagggatttattatttttctttcgcctccgtttagatcctcggtctgaacaaccatgaacactcgggcgtcaagggcgtttcc

SEQ ID NO: 103036 - DNA, 1533 bp, Glycine max
  unsure (1)..(1533): unsure at all n locations
  Clone ID: PAT_MRT3847_64059C.1
tccacgcgtccgcccacgcgtccggcatcatcatcggattccctctctctccccttttcccttctctccaaaccccatcattttctatcggaccctccgatcagtctctaacaccgcaaccaccattctctctctctctctctctctctctctctctctctctccaaggtgttgataatctgaagcctatgcgatggaaatatcaaatgattcgggtactaagaaacctaaaagtctgacatctgttgtctggaatcactttgaaaggattagaaaggcagacatctgctatgctgtttgtgtgcattgtaacaagaaacttagtggatcaagtaacagtggaactactcatctgagaaatcacttgatgcggtgtctgaaaagatcaaactttgatgtgtctcaactacttgcagcaaagagaaggaaaaaagataataccatcagcctagcaaacataggttttgatgaaggtcagaggaaagaagaatatataaagccaacaatcatcaagtttgaacctgagcataagaaagatgaaatcattaacttcggaagtagtaaatttgatcaggaaaggagtcaacttgatcttgcacgcatgatcatattacatggatacccactgagcttggttgaacaagtaggattcaaggtctttgtgaagaacctccagcctctctttgagttcacgccaaacagttctgtagagatttcttgtatagatatctacaggagggagaaagaaaaagtgtttgatatgataaacagactacatggtaggattaatctgtcaattgaaacatggtcttcaacagaaaattctttgtatttgtgtctatctgctcattacattgacgaggaatggacattacagaagaaactcctgaactttgtcacacttgattcttctcatactgaagacttacttccagaagtgattatcaaatgtctcaatgaatgggatattgactgcaagctttttgccttgacacttgatgattgttccatcaatgatgacatcactcttagaatcaaggagcgagtttctgacaaaaggccttttttaagtactcggcaattacttgatatacgctctgcagcacatctcataaaatccattgctcaagatgccatggacgcattacatgaggtgatccaaaagattcgagagagcatcaaatatattagaagttcacaagtagtgcaaggaaaatttaatgaaattgctcaacatgctaagattaacactcaaaacctcttatttcttgattttccagttcagtggaagtctacgtatctcatgcttgaaactgcactagaatacaggactgccttttctctcttccaagaacacgatccctcctattcatcaactctaactgatgaagagtgggaatgggctagttctgttactggctacttaaaacttttagttgaaattatgaatatattttcangcaacaaatttcctacagcgaatatatacttccctgagatgtgtgatgtccatattcaattaattgactggtg

SEQ ID NO: 103037 - DNA, 495 bp, Glycine max
  Clone ID: PAT_MRT3847_6405C.1
tagattttttttacctcttgacagatattgtatgctagttgactcaaatgttacatttttgaggagtaacattgatcatagaaaaggctgaatgacctcacactgaagcaagggatttttataaccgcagtttacaatgaccaattctagcgtgcttttccacaaaatagagagaatagccacctcactctgtaacaagcacaattatgagtaataagcaatctctatttctctgctgaaaaaaaaaaaaaaaaaaaaaaaaaaaaaaaaaagaggggggccgcgtatgaacgtccgatccccccgaccttaaattcaaccccgaaccgtgaccggccaccatttccctttaccgtgtggcaaatcagatttgggcttgcatgggcaaaggtctttcctgtgtgcaaagggaaactgctgtcagtttaccacaccacacaacatccgagcttaaagcgtaaagcgtcgggggtgccttgcgtgaggactaaccca

SEQ ID NO: 103038 - DNA, 120 bp, Glycine max
  Clone ID: PAT_MRT3847_64060C.1
gggactttgagctgatgcctccaccaggaagtcataaaaaggagtatgctacaccgatggatctcgatctatccatcttttggcttgaggagtctgaaatcggatctcttcatttggaga

SEQ ID NO: 103039 - DNA, 270 bp, Glycine max
  Clone ID: PAT_MRT3847_64061C.1
accgccgctagctgcacctctaccgaggtcatcgtcgccaccagcaccagcaccatccacccctccttctaggactagtcctcatctcagactaagttctcaaccatctccacctttaaattctacaccaatgtcatcaactctatcgccaccttcacttactaatttggacccatccccgccatcacgactcctgtcatcgccaccaccgccaccggctcagaacaggacagaacactcaagccctgatggacgtggagatgggattcg

SEQ ID NO: 103040 - DNA, 247 bp, Glycine max
  Clone ID: PAT_MRT3847_64062C.1
tttctcggggtgttatacgaggacagggaaactgtctttgccccgaggcacttgccgaaacgctaacagaatgcctatttctatatggggaggagctggtgcagagaatgatcttcatatgaataggccaaatgctgtcccttcaatgtcgagataatatgctggagatgtcgactctgaagctgctaagatgacttgtccctaccttaaaggtacagactgcttcatcatagcacatggaaaactg

SEQ ID NO: 103041 - DNA, 794 bp, Glycine max
  Clone ID: PAT_MRT3847_64063C.1
ggctcgaggatgaagaaacagagcctttttaaagagtcatgacgccaacgcacgtgatcctctgcgtgtcgaagcttcgtcgcgcagggattaaaattaatccaagcaaggaaagtgagagttttctgaacgtgaagttcaggcgcggcgtgattgaaatgccaagccttacggcggatgatttcatgagctcttttttgctgaactgcgttgcgttagagcagtgctacagcggttgctcgaagcacttcactgcctatattaccctcttggactgtctcgtaaacacgtatagggacgttgagtatttgtgcgatcggaacgtggttgagaaccaccttgggacggagggggaaagttgcaagcttcataaacaacgcgggaaaggatgtggcggttgatttggacttgtgttacttgtcactattgttcaatgatgttcacaaatattatataaatagttggcatgttcagtgggctagcttcaagcacacttactttgatacgccctggtccttcatctcgcttctcgccgcctccattttgctgcttcttaccgtggctcagacttacttttcggcttctcagtattttcatcagacttaattacaattcttcacgcactcctggaaaacaccagttttttattcaatgatgtttaacaattatcttaattgcttgcataacggatttgatatttttggcttattagtgaaactttgacatccggccacaccaatgtaatccatatagttgatgattaattaaataaactatttgacaacttttttttt

SEQ ID NO: 103042 - DNA, 420 bp, Glycine max
  Clone ID: PAT_MRT3847_64064C.1
gaaaaaaaaaacgagggggcgcacgcctccgaacggtttgaaaaaacaaaaaaattggtttatttttttttcaaaaaaaaaaagggcgctgggttgttttacttaaacctcttaacatatacccatatatatgaaaagatattttaaatattttacatatacatatcttttgtgttgagaggttctcataacaaacctctaatattttaactcttaaaaataatataaaatgtctcgcgcattttgatagtattgaataacacatctatatcatcctctaacaaaaaggaaaattttcaccacagacctcttttcacctctcatcattaatcaacaatgaatcccctcactgtgatactgatattgacaactcactcccttaatatttaccccttcacaaaaagaaaacttctttttttt

SEQ ID NO: 103043 - DNA, 305 bp, Glycine max
  unsure (1)..(305): unsure at all n locations
  Clone ID: PAT_MRT3847_64065C.1
gtccgaatcgagcggccgcttttttttgtatcttgtttttttatttttggcctcttcatttatctgtagattttcagtggganagccccactatattgacacaagtccctttccccttcagagacactctagaggcttactcacacgcaagggtgcttcatgccctggccataagacgccggctggcatacgctccggggataccagcaagggcagatccgttaattgttagtagatgggactcaactaatgaggatgaactattaccctccatgccctgaaccagataaggaccttgtgcctac

SEQ ID NO: 103044 - DNA, 454 bp, Glycine max
  Clone ID: PAT_MRT3847_64066C.1
gccttcgttctttttttttttttttgttgatagatgaggcctgccaggaattccattaaaaactttaggaacattgacaggcaaaacatactatgactatggtttaaacaaattatgttcattggattagcgaattaaccgtgttatacaggaagcgtatgtggcgaggattagggggctgcgatgttcccattgagcacaatgacattaccatcagaatcaaggttcactataacagagtccgcctccttgatctctctggcaagcatattgtaaaccatgctgcactgcaaaaggagaattatgggtgttcttagaggtctagcttcataactagggttataaccattctgcaccactctgtacatgaatgtttgtgtagcttgaagagcaatttgtttcacatgaagtctatcaaacagctgtatgagcattatgtcagcgatcttcttga

SEQ ID NO: 103045 - DNA, 383 bp, Glycine max
  Clone ID: PAT_MRT3847_64067C.1
cccactcatccctttaataactacacatccctcactctttcacaccaaccttacaccaagcacaatggccaagctcctaactcccaaaacctatctcgtctcatattctaccctctctactctccatccatatcaccaacatccacttcgaatagcttttctataactcacagtaaaatcgattacataaaccacactaaactaaagatcataacttctctattcactgaaactacacctaatccaacgaaaacacacactcttatcacaaacttattcacctactatacacttactcaacttatcctatttcagctgagtacccctaattcaatatcactacatatacacttatacatcaactcactcttaatctcaaacac

SEQ ID NO: 103046 - DNA, 297 bp, Glycine max
  Clone ID: PAT_MRT3847_64068C.1
tcttacttgctccattggggtactatggtgagagtttaattgtctgatcctttataattgtcctgcctagtaatttcttgtcattcccccattggtttctatgatttggaaaaaatgttatttatctgaataaatttccccttaaatttgttattggtacattatgaaatgtgattgcaatgagaagatatgatgatgtttatccatcaattctgcaattgaatgatgattactaacatgcactaccatctgatcccttaaaaaaaaaaaaaagaaaaaaaaaaaaaaaaaaaaaaa

SEQ ID NO: 103047 - DNA, 475 bp, Glycine max
  Clone ID: PAT_MRT3847_64069C.1
gatgggtggtgatggcagcgttactacaagcagcagctactttcatgcaccccacgaagttgagcatgagcaacactttgcagcaaatgtttactaagtccattttcaaggctttgggtttggaacctgttggagctaaaacggtcacatgctccattgatgctgatcttaaggacttggctcacatgtgtgttgatgctaccaatatctctggattcgaccttgccatctttgacctcgttgtctctggggcaagcgctgacggtgttgccaagaggctaaccttcgacgtacttcagagcaggacctacttggaagtgatggggaccggaacagtttaccaatgcccaacagttgacggtagattggactcatttgacttcaagaccaggaagtacattgccaagaagttgtggcttgatccaacttcattcacagtgaaggccgagggtgtggaccagattgctcccattga

SEQ ID NO: 103048 - DNA, 316 bp, Glycine max
  Clone ID: PAT_MRT3847_6406C.1
gggaaaaagttaaaaaaagaatggccggaaaaattaaaaaaaggtttgcgtgggatattatgaatggggatgatcctatccaaaagccacctgaaaaaccaattacctttttctttgagaaccttgttgttaaaaggaggaggagccctcaaattaaggagattgaggaccaaagccttgaaaagattgatggcctaaacaaagcaagcaaaaaggacctggaactgctccttgctgatgataaggggacagatcctgttgtcaaggaatataatctaaaatttaaaaaaggcaagggaaaaaaatggagaaagat

SEQ ID NO: 103049 - DNA, 432 bp, Glycine max
  Clone ID: PAT_MRT3847_64070C.1
ttttttttttttttttttttttttttttttgggtttggggtttttttttttttttttttttttttttttttttttttggggaaaggaggccccttttagcctcattaaaaaagggctttgccattttttttgggattacccaaaacccataaaccggggggggtcctcattttttaaaatataaacccccaaaatacccaaaaacccttttttaaaagggtttaaaaattggggggggggctttgccttctttaaaccccccaaatgttccgggtggacccaaaggaccaaaatttttttttttttggccccctcgagggtttatttgggggccccctggggtgaggtcaaccacagggtgttgacccttctgttttcgtcctcctttccaacccgcgggagggggggggggggggcccctcttgggaacat

SEQ ID NO: 103050 - DNA, 715 bp, Glycine max
  Clone ID: PAT_MRT3847_64071C.1
tctgagctcgcctcgagcaagcatccagtcagttgcaggtacaaatttcagctatgccagaaacgctggtgaaaagaaagggtgataatttcattcatacaggcaatgacccaggaaaagttttccccttggaagcaccatatcctattcctttgcagccatttgagggcaatttgcatgctaatatatcagatgcttcagctacagctgctatatcagaagggcttcatcctgcattaccatcaaagaacaagggtaagcaccagcagtctgaagatgcctcttcattaattagtagtatgaatcccacacagactcccaagtctgttgaagatgacttctttactacagccactgatgcattcagccatgctcatgttgatgccgagtccaatgtaattgatttcagttaccttgaaccacctccactttccaacagaggcctattattcaaggagaatccaagggaagcagccagatttgctgaaccgacttcaaagtcagatgatgctgctggttctcacttactcatcacgtctgagctttctgactccacacccaggaattcaattacagaatccagtgacatattacacagtgggaatatgtcaaatctgaacatgatgcccacctctacaggaaagcctttgaaagcagatggccatactattaatgatgccctgccacagacatacaaacagttgcctgattcgac

SEQ ID NO: 103051 - DNA, 284 bp, Glycine max
  Clone ID: PAT_MRT3847_64072C.1
tagctcgagccgtattttctcgagggctgaagcacaactactagaccgtcatatcaaccctgtcgcacgcaccgatcaatacagtaatcctgttatcttaactgactatcgctgtaatcccatccaactcactgatgtcactaccacctctaccttcacatcatattctgtatttattatcttatttatactctttcataactttatttattttttttttaatactttatataatttatatacaattttttattttatatttaatttaaattaaatatttattt

SEQ ID NO: 103052 - DNA, 754 bp, Glycine max
  Clone ID: PAT_MRT3847_64073C.1
ggcttgtgagtccagtgagtgagtgttagcggggcgggaaattgattgagtcgaaaagaaccctaacataaaatggattctcaggttgccgtagctcttgctctttcacttgttggtggtgtcagcacttctatcggtgcactttttgtaattgttaataaaacgccctgattttagatgcttgggcaaataccaggcattgctgttagcatgattttcagcatatcgtgaaccgatgggagttataattgtagcctatctattccctagcagcttaagtcctgagattctggaaggtttacttggatcagttggtggagttatggcttttctgacccttcatgaaatgcttccattggcttttgattatgcgggacagaagcaatctgtgaaggctgtctttttggggatggctttcatgtctgcaagcctgtattttttaagtatcagcttacctgaggacttaagcttcaaagttccttcagaaggggtctcacagagtgtccaaggacaataatgcaccaccatgtgtttaggatacctatcaatcagacatcaattttagggatgcattccacctatgattgtggttcccctatagactaatgtacaaaaaaaaaaaaaagaataagagtacagcccctttaattcttttactgacccaccttgtatactgtatcatcaacgtgattggactttaaattgcgcaatttgcagataatgtgttgtgttaatatatttcagccttggggat

SEQ ID NO: 103053 - DNA, 1258 bp, Glycine max
  Clone ID: PAT_MRT3847_64074C.1
cccacgcttttggtccagtgtgtgttagcggttctggttctggaaattgatcgagtcgaaaagaaccctaacaataacatggattctcaggttgccgtagctcttgctctttcccttgttggtggtgtcagcacttctatcggtgcactttttgtaattgttaataaagctcccagtttgaagatgcttgggctattacagggttttgctgctggtttgatgcttagcatatcgttctttgatttggctcacaatgctttgaactcattgggcttcttgaaaggcaacctttggttttttgctggggtaatattctttgctgttgttgccagttttatcccagagccaacacttacacccacttctgatgtgaagggcagaaagatgtaatcacatgcttgaaaatagaaaaatggggatgaaggaggcaaggatattatgaaaaagcatcgccggcaagttttgttcagtggaattgttacagccgtaggtatgattgtctgggtactttcaaacctaacatttttcttacaatgtggttctttttggaccaaaagattatgaacatattagagaactatgaatattaaatttcttttgaattttctaggagtttggtgttcatcttggatccttaaaggccgtgttgcatcaacttcgtcattgccatttctctgcacaatatcccagagggtgttgctgttgcacttcctgtttcttttgcgacacaaagtaaatggcaggcattcaaattagcatcactttctggctttgctgaacccctgggagttataattgtagcctatctattccctagcagcttaagtcctgagattctggaaggtttacttggatcagttggtggagttatggcttttctgacccttcatgaaatgcttccattggcttttgattatgcgggacagaagcaatctgtgaaggctgtctttttggggatggctttcatgtctgcaagcctgtattttctaagtatcagcttacctgaggacttaagcttgtagcaaagttccttcagaaggggtctcacagagtgtccaaggacaataatgcaccaccatgtgtttaggatacctatcaatcagacatcaattttagggatgcattccacctatgattgtggttcccctatagactaatgtccaaaaaaaaaaaaaagaaaaaagaataagagtacagcccctttaattcttttactgacccaccttgtatactgtatcatcaccgatgattggacttt

SEQ ID NO: 103054 - DNA, 1096 bp, Glycine max
  Clone ID: PAT_MRT3847_64075C.1
gcggttctggttctggaaattgatcgagtcgaaaagaaccctaacaataacatggagttctcaggcttgccgtatgctcttgctctttcactttgttggtggtgctacgcaccttctattcggtgcactcttttgtaatctgttaataaacgctcccacgtttgaagaatgcttgggctattacaagggttttggctgctggtttgatgcttagcatatcgttctttgatttggctcacaatgctttgaactcattgggcttcttgaaaggcaacctttggttttttgctggggtaatattctttgctgttgttgccagttttatcccagagccaacacttacacccacttctgatgtgaagggcagaaagaaaaatggggatgaaggaggcaaggatattatgaaaaagcatcgccggcaagttttgttcagtggaattgttacagccgtaggcataagtttgcacaatttcccagaaggaatggcggtgttccttggatccttaaagggcatccgtgttggcatcaactttgcattagccattgctctgcacaatatcccagagggcgttgctgttgcacttcctgtctattttgcgacacagagcaaatggcaggcattcaaattggcatcactttctggctttgctgagccactgggcgttgtaattgtagcctgtttattccctactagcctaaatgctgagattcttgaaggtatccttggatcagttggtggagttatggcttttctaacccttcatgagatgctgccacttgcttttgagtatgcgggacaaaaacaatctgttaaggccgtcttttgtggaatggctttcatgtctgcaagcttgtattttctacgtatcagcttaccagaggacatgtagatgggaactatctcttgcgtttctgaatgagatgcgtaaaacatgaaacttgcaaatttgcaattacattaatgtacaatagtcaatagaggataacagtaaaacatgaaggttggattcatttcacctgtgtaactagggtttccccctgtataagtatgtacaaacaaaaggaacttacagttaaatgttgttatgttatctat

SEQ ID NO: 103055 - DNA, 421 bp, Glycine max
  Clone ID: PAT_MRT3847_64076C.1
ttccaaggaaggtttcccgtcatcactgtatgacgtcctccttctttggggggggggggggggggggggggggggggggggggggggggggggattgatttaggaaaatgcgtaggagaaagaaaaaagtacgacccgatagcgtgtagacatgggtgttgatcctttggggtgtgcttaatgggcaacccccgagagctatcctggagccctcttatgagcccggttttgatgagcgagaagcccgaccggaaacttaggaatggtgatggatagggttgaatgcgaccgaaaaacgtgggaagacccagtgagtagtggtaaggcggcccgaaaaccgttggtatggtgatggatagggttgaatgagaccgaaaaagttggaagtgcaatagtatggcagattttaccaattgggggg

SEQ ID NO: 103056 - DNA, 509 bp, Glycine max
  Clone ID: PAT_MRT3847_64077C.1
aatgcccacttataaatcacatttactggatcgtacttcatattcggctcattcaatcatcatcagaggcagcaaattaggaaaacgcgagcgcctgcacgggcagattgcatctatgcgagcgacgccggtccggagaagagatcaaccctgctttcctcctcattgttgccacccccaacgggtccccatgaagatgatagattccgcccccctctgccaaccgaacattttccagggcactagaaggtagcattatctcctcggcaagttgatcactgtggtatgcccaacagaactcatccttcctataaacgggcatggacgatcctcctcccctctctcctgcctgccatgaaggaacagcccttccgactggcggtgagccaccggcttccggtgcggtccactgccttccgcgattcggtcccctctgaggcgtgacacgctcccgttctgaggcgccaatccgcccaccagtacctctggctggggataagccctcgagc

SEQ ID NO: 103057 - DNA, 5417 bp, Glycine max
  Clone ID: PAT_MRT3847_64078C.1
aaaggtaaggcgaaaaagtccagtgagtgttagcggttctggttctggaaattgatcgagtcgaaaagaaccctaacaataacatggattctcaggttgccgtagctcttgctctttcacttgttggtggtgtcagcacttctatcggtgcactttttgtaattgttaataaagctcccagtttgaagatgcttgggctattacagggttttgctgctggtttgatgcttagcatatcgttctttgatttggctcacaatgctttgaactcattgggcttcttgaaaggcaacctttggttttttgctggggtaatattctttgctgttgttgccagttttatcccagagccaacacttacacccacttttgatgtgaagggcagaaagaaaaatggggatgaaggaggcaaggatattatgaaaaagcatcgccggcaagttttggtcagtggaattgttacagccgtaggcataagtatgaagtgttctggggtgtccagtgagtgttagaggtccttgtttggttttttgagttattcgaaaagaactctatcgataagaagaaaaacctaaaattgatttgcggtcttccttttccattgctcttgcgctttcatgtgctgtcaatgcgctgatctttttcgtacttttttttgtaagtatgacgcgtatttagaatgcgaaggctattagactggttttggctgctggtttgatgcttatgatatcgttctttgatttggcttaagatcacattgctttccagggcttctggtattgtaacctgaatctatgtatggtggttgtgttcattttctttgttgacggtttttttctcgtcccaataccaacacccacttcgcttttgaatgtcagggacagaaaggggcagtaaggagattggaattatagaaatgggcatcgcctgcaagttttgtttatcaaaacggatctataagtattgccagttttgcacaattttccagaaggaatggcagtgttccttggatccttaaagggcctccgtgttggcatcaatttagcattagccattgctctgcacaatatcccagagggtgttgctgttgcacttcctgtttattttgcgacacaaagtaaatggcaggcattcaaattagcatcactttctggctttgctgaacccctgggagttataattgtagcctatctattccctagcagcttaagtcatgagattctggaaggtttacttggatcagttggtggagttatggcttttctgacccttcatgaaatgcttccattggcttttgattatgcgggacagaagcaatctgtgaaggctttctttttggggatggctttcatgtctgcaagcctgtattttctaagtatcagcttaccttagaactgaagtttaaatctgggaacaacctcgtctcttctctaaatgccatgaagatccaaaagaaggttaatggtgtacttattctagatcctcgtgcggcagaaaagatccttcgctccttaatcgctaaatttgattatgtgatttgtgctattgaagagtctaaggatttagactcaatgaccgtagaccaattgatgggttctctttaagcctatgaagaaaggttcaatagaagacatgatgagccattggagcaagtcctcaaagccaaagcttctttgaaagaaaatggaggagaaagtagtcaaaaagcacgtggacgtggaagaggacgtggtcgtggacgtggtcatggccaaggaagaggaggaagaggagatcgtgataattttgacaataatgaatggaggagccatcaatccactagaagtcatggaagaggaagaggaagaggtagaaacaattatgaaaaagcatatgaaaggaggtatgataaatctaatgttgaatgttttaattgtcataaatatggccattactcttgggagtgtagaaaaaatgttgaagagaaggtcaatcttgttgatgataaagaagaagttgaagagtcaacactactactatcacttaataatggtgagaaggaagacaaatgcttatggtatcttgacaatggagcaagcaatcacatgtgtggatgcaaagagaaatttgtggaacttgatgagaaggtgaaaggaaatgtttcttttggagattcttccaaggtgcaaatccaaggaaaatgtaccattttaatttctttaaaagatggtgctcacaaattaatcacggatgtttactatgttcctaaactaaaaagcaatattttgagtttgggacaacttgttgaaaaggggtatgaaattcatatgaaagattgttgtttatggcttcgagataaaaattctaatttgggggaacaaggcaccagcaatgaatagggtaaatgaatttctggcaggtgctggaacagaggccccagaagttgatgaagagaatatgatctctaggccttcagttagctatgatgatatgtgggcaaaaacacttctagaatcgtctgagctagaggaagatgatgcaaagtcattgggatcatcatctccagattcaacaggatcagttgaaacttcgatatcatcccactttggaggaatgagctacccttcgctgtttagttcccgaccacaaactacggataaggcaccagcaagccgaggctctacgtatgaaggttatggttctccaataagagaagagcctccgtcatactcatcctctgtcatgcaaagacacgagtcatttgagaaccccctagcagggaatggattgcacagttttgggtctcaagatgatgagcgagcttcatctggaaatcctcaacatggaagtgcactttatgacttcacagcaggaggagacgatgaattgagtttaaccgcaggagaagaagtcgacattgagtacgaagtagatggctggttttatgttaagaagaaacgccctggtagggatggcaagatggctggactggttcctgttttatatgttagtcaatcttgaatcatgtacgtaagctattgtaacttccgattcttgcaaaaaggctttttttgctttattttatccagtgttgctttcattcaaagtttccatgttcccatgtagcatgccattctggctgttctccttcaaagtatcttgtatcctggtccctacctaattcgtctagttgtatgctatcaaagtatcatttaccatgctaataaacatgtgttcattggctatgatgcaagctcaaaaggctacaaattgtacaatccaaacaatggaaagacaattgtgaaccgagatgtcgagttctatgaagaaggcacatggaattgggaggagaaagaagacacttatgattttttcccgtactttgaagaaatagatgaagaagccttgactccaaatgattcaactccagcactttcactaactccttcaaccaatgaagcctcatcatcttccgaagggagttcaagtgaaaggccaagaagaatgagaaatattcaagaattatatgatgaaactgaagttataaatgatttgttttgtctttttgttgatagtgaacccttaaactttgatgaagcaatgaaagacaaaaggtggagacaagccatggaagaagaaatcaaagccattgagaagaacaacacttgggagttatcaagccttcccaaaggtcatgaagcaattggagtcaaatgggtgttcaaaatcaagaagaatgcaaaaggagaggttgagagacacaaagcaagacttgtagctaaaggttataagcaacaatatggagttgattatgatgaagtgtttgcaccggttgcccgcatggaaaccattcgtcttcttatttccttggcagctcaaatgaagtggagaatttttcagcttgatgtaaaatcggcatttctaaatggctatcttgaagaaaatgtctatgttgaacaaccaatgggttttgtcatcgaaggtcaagaaggaaaagtcttgaaattgaacaaggcgttgtatggtctaaagcaagcaccgagggcatggaatactcgcattgacaagtacttccaagacaatgggtttgttcgttgtcaaaatgagtatgctctttatgttaaaacttttaataatggtgatgtcttatttatttgtctttatgtggatgaccttatctttaccggcaataacccaaatttgtttgaagacttcaaggagtccatgtctcgtgaatttgatatgacagatatgggactcatgtcatattacttgggaatggaagtgaagcaaacggagaatggtatctttgtctcacaagaaaggtacacaaaagaagtgttgaagaaatttaatatgcttgattgcaatcccgtgaacacacctatggaaggtggcttgaagttatcaaagtttgatcgtcgagagaaggtagactccacggtcttcaagagtcttgtggggagtttaaggtatctaaccaatacaaggcccgatattctatatgcggtgggagttgtgtgtcgctttacggaggctcctacctctcctcatctaaaagccgcaaaaagaatttttcgttacttgaaaggtacaattgattttggattgttttattctccctccaataactataagcttgtgggattttgtgatagtgattttgccggagatgttgatgatagaaaaagtactaccggatttgtattttttatgggtgattgtgtttttacatggagttctaagaagcaaggcattgtgacactttctacttgtgaagccgagtatgtagctgcaacttcttgcacatgtcatgccatttggctaagaagattgttggaggaacttcagttgttgcaaaaggaaagcacaaagatctatgttgataatagatctgcacaagagcttgccaagaatccggtgttccatgaacgaagtaagcatatagatacaaggtatcatttcattagagagtgcattgccaagaaagaagtagaattgactcatgtgaaaactcaagatcaagttgcggatattttcaccaagcctctcaaatttgaagattttcgaagattgcgagcaagacttggtgtgcaaaagaattttccaattaagggaggacttaagcttgtagcaaagttccttcagaaggggtctcacagagtgtccaaggacaataatgcaccaccatgtgtttaggatacctatcaatcagacatcaattttagggatgcattccacctatgattgtggttcccctatagactaatgtacaaaaaaaaaaaaagaataagagtacagcccctttaattcttttactgacccaccttgtatactgtatcatcaacgtgattggactttaaattgcgcaatttgcagataatgtgttgtgttaatatatttcagccttggggatataagagacaatcccataacat

SEQ ID NO: 103058 - DNA, 730 bp, Glycine max
  Clone ID: PAT_MRT3847_64079C.1
aaatatgccatgactcaaagattccactaatggaaaacataaaaaggtgcaggtgggcagttcttgaaactacgattgttcgtttttgttggaatgaatcagtggttaataaaattgtcacccttgttctggatagcaattattaggcaccattaaacccaatgagtatgtttgcatcctccaacattttcagtttacgatagtgaacagtatgcataagaaagaatgttgtgtttgaacccaggcttttgtttgatcatctttcactgtgagagttgcagttatggttaaaaatgaaagtgagaagaacatgggttgacattataaatagaattaagttgtgaaagatgaatctttgtatgatggtggatagggagttctggtggaaacagaaagaagttggactcaaaatctttttttgtaacatattatattataaaaatacctataaatctatgttgctttggatgtgtgtgtttattttctttaaaagtgttgcatgtttatgtgtgtgagtgtgggtgcacatactttttacagtaactgttttggaactccacgtatacggtatatcgtgattcaggtgaatgagaagttattcccatgccaactatcaaataaaaatgttgacatggctgataaggctgtgcaattggctgttgaaacatggggcaagagatccttaactgaacttgaagcatatgaacgcctatcctatacctgtgaaaag

SEQ ID NO: 103059 - DNA, 501 bp, Glycine max
  Clone ID: PAT_MRT3847_6407C.1
acttagttcaattcataaggatggactgccatcggtgccacaaaacctgggaagtgagctgccaacaggaaaaccagtactccttgtttgcgcagaaagattgagacttgcttaaaggacatcatcataatgaccacaggtacaattatgccacccaaaccaaagcgttttcccagtcacgttcaaggttaggtcccttgaccaccaaaactcaaatacattgactgagaccccaaacacatgtcattaccactcaaggttccaacacagagggccatggccatgaacaagggagaattcatagggagcacaatagagggatgctgcttgaacatcacggatcgcttatcaggtgacaccacccatgacagaatcgacagctttagctgtagctattcttgccacaagaggaacgactgaaattgtgcttctagctatttataataattgttcgttaggaatcaaatttcgaacctcaaactcagagaggccaattatata

SEQ ID NO: 103060 - DNA, 138 bp, Glycine max
  Clone ID: PAT_MRT3847_64080C.1
gctcagaatacggcgcgagcccgaaacaactcgcgctcatctgccagcgcacggcgtgcgcccgcgcgcagatcgacaatggcggagacagagagcgtggccatccaggcagagatcaaccagcgcctcaggcgcagc

SEQ ID NO: 103061 - DNA, 700 bp, Glycine max
  Clone ID: PAT_MRT3847_64081C.1
aattgaggatgtaaatcacaaatttaattatatgtatgaacaaatttactttccattatgtgaatgatgtgtactgagttactatccttatacacacacacacacatatatatatacacacatatttattcatttatgtaatggtgcgttgtttaggaatgtatattgtgaaaaaaatttctttcatttttcaaaagcaaattaatggagttttcatttaaaaattgaaattttcactgtttagagtgatgatatcgtagctacgaggtgggtcgttacaactacccctaatacaaaaactagtccaggtgccttaaaatacaagggctgaaaaatcttagatttctaggataccctacctacattatggagtcctaaatacaaggccaaaaaataatgaaactttaatctaatatgtacaaagataagtgggctcatacttagcccatgggcccaaaatctatcctaagactcatgagaaccctagggccttctcttgtatctctggcccaatcttcttggagtcttctatccaatgcccttgggggtaggattgcatcaacaaccaacatccaaatgatgtaattgagaactttgagaatgtgtactttagaatgatattttaaagatagactatgagataactacattagaataatgtattgaagttaagaatatgtaatatatatgcactgaactt

SEQ ID NO: 103062 - DNA, 417 bp, Glycine max
  Clone ID: PAT_MRT3847_64082C.1
caaccatcaaagatatcatctgaacctgacctgcggtccatgtgcaaactgcaccccagccgtttgataagattgggtgcgctgaccataatggtttaggctagagaaagagaagccaagaattgcctcattcttgtttcagctgatccgatactaaacctctctttgaccgatcggttgagtccagacacacatactttgggcaccataacattatggaccatgcgcactagacttcactctctacccgaagctccaggtagcggcttgcctttgagctaaacctgctggaggaagggcaaagatgatgtttgtcgttgctgatgcggattgcggtgtcggccgctctgctgcatcattaccaaccggggaaggccaattggagcccttagcttttgaaggcccgggagggttggg

SEQ ID NO: 103063 - DNA, 249 bp, Glycine max
  Clone ID: PAT_MRT3847_64083C.1
caaaaatttgggcggcagaattttaaggccttttttggtaagcaggcacaacacatcccggaaagggcttttgcttttgtgcccagggctttttggttgagctttgtaataaacaacaacaggcgttaatccgaggcctttttaaggccactacccctacgtgaaccaaaggggaccttttgtacaacaaaggcggtgccaaattccagggttcaaatcaattgcatttttgatggaaaagtgcttttc

SEQ ID NO: 103064 - DNA, 318 bp, Glycine max
  Clone ID: PAT_MRT3847_64084C.1
acgcattcgtggttgcgtggccaaacatgatagtttttgatgattggcttgtgttggctaacacacatgaattctctgggggcaagttaccagtggacactcgggatcgaatttttgggaatggtcgttatgctgtaagcaaattacctcttgaagctgaatttgccaatgtcacatggggtaccgaacttggtggattgcccatcactggttggattatttctgtcggaaacagtcgctgtttatatatcatcaggtggtttcccacagggcttacccaaggctggaagaatgagttcagtacttgagatgagcctt

SEQ ID NO: 103065 - DNA, 192 bp, Glycine max
  Clone ID: PAT_MRT3847_64085C.1
caggaaaaagttcatttttaaaaatgacccacccgttttttcacaaaggaaaaatctactaaggtttggaattacccatcacctttgaaaaacctcaaatttgattggggctgttaggatgctcaccgaccttattttacccatcataaagcacccccccaaaaggagcaatcaaaaatttgttttctactg

SEQ ID NO: 103066 - DNA, 365 bp, Glycine max
  Clone ID: PAT_MRT3847_64086C.1
ctcaagccgtaaggttttaatttttgagtaccactaccaatggtgagtttgttcaagggaaagatctcgcaatggctaaagttaatgttacatgtgctgctgttggatcgacatcaagttacactccaactccattgatacgaatctggtttgcaaaaagacagagggtataattgtggagtatttaggaaggatgtattaccttgctcataatcgttactagctcccaagagaaagatctgatagaggaagatctttccttcgatattaaagtatcgctctagataggaaaacggttcacttacacaaacacaattcggtagcggaaaaaccttactatatcatataattgatgctggctcaca

SEQ ID NO: 103067 - DNA, 852 bp, Glycine max
  unsure (1)..(852): unsure at all n locations
  Clone ID: PAT_MRT3847_64087C.1
acgaggcttgtagtcataagggtttggtagataaagcaagatggaattttgatcatatggcaaagcagtacaaaattctgcctgatatcaagcattatggttgcatagttgatcttttaagcagatttggattgttggaagaggcgcatcagatgattaagactgctcctttacaaaatagtgccattttatggagaacattgctgggtgcttgtaggacacaaggcagcgcggggttggctaaggtgtctttccaacaacttgccaaattgggacgcctaacagatggagattatgtgttgttatcaaacatttatgctgaagctgagagatgggatgaggtagagcgagtaaggagtgaaatgattggcttgcatgttcctaaacaagttgcgtacagccaaatcgatatgactgaatctgataagcttccctaaataaactattggtctcttttttaaactcgatatttttctccatagcgtgcacaaactcaaacgttagaagcatttttcaatttttaaactgcatactaagtatgtcaaccatgttcccgtgttaagtgaatattctttagttaggctaaaccatcggttgacatgacgacaatgaatgccacaactgttaactgaagcaacccagcaagtgcgccagtgttttgcggtgcatgcaaccaccacattggcctctaaggccaaatgcgcatccaccatatggcttcttcgcagaggattgcgttgtgttggttggttagttaaaatttggtgtaaactgattcttgtgagtcattagatttaccaagttcgatggttaagtttttggtcttacatatgaaagagnnnaatcccaaaa

SEQ ID NO: 103068 - DNA, 318 bp, Glycine max
  Clone ID: PAT_MRT3847_64088C.1
ggagttggttaatactgtaaactcgatttctgaatcttaagcttttctctctctttcatttttgaaatccttttaaatgctaaagtaaccctatatatgcttcctattttttttccacttctatgaatatcttctattgttgaactcaattatccatttaaattctttctctctttttccttcttcttatctctttttttgttgctcagatctccaatatatcattctatttcgtccattcttttgtgttggatagttaaacctctaagagaactacttgaatttgatctttagtatctgcatttcagtgttaccatt

SEQ ID NO: 103069 - DNA, 138 bp, Glycine max
  unsure (1)..(138): unsure at all n locations
  Clone ID: PAT_MRT3847_64089C.1
agcacaaaaggaaggggggttcaaacactcgagaaccatggatgaaaaatggagggnaaaatgtctggctatcagaatcnnaataaagcccgagtacatcttgcaagttatattaaggaattcccaaagaaaactcca

SEQ ID NO: 103070 - DNA, 258 bp, Glycine max
  Clone ID: PAT_MRT3847_6408C.1
gccacatggaagtgcaacgtttgttttttttgactcacaccgcacaaaaattacagggaagaacgagagggcggcggacatgcgaaagagccaaatacccgaccaaagaggctaacggactatctcggttaccacctaagctgatcctttagcactgcggacttggaaatgcgatagagcaggcagccttttgcttaatgtaaaattgtacagatacttcaacaacaacaacaacgccttatcccactaagtggggag

SEQ ID NO: 103071 - DNA, 424 bp, Glycine max
  Clone ID: PAT_MRT3847_64090C.1
gcaaccactcaagttttctgatttctgtccattaaaaaaagccaacttttcaaaaccatacaacgtttgatccagaagagacatggtttgcttctgttttctggtggatcagaggaggaaggtgcggcggagcaagccggcggcggggacgtgctcgcggtgcggcggcggagccagcgtggctgagatgatgacacaaaccagattttgctacgttcccttttactccaaatcgtggaaagctatcatatgcactttttgtggagccactcttaaatcttacagatgagcaccattttctacgtatatgatatataccttctaaatctacttttcagatgttaatttccttctaccctcgaatgtgataatattcacatattaagaatttagatactagcggggggatttacgtttataatta

SEQ ID NO: 103072 - DNA, 435 bp, Glycine max
  unsure (1)..(435): unsure at all n locations
  Clone ID: PAT_MRT3847_64091C.1
gggggggggggggggggnnnnnnnnnnnaaaggggcagcaggaggggcagggccagggctnaaaacnaaancnaacagcnacagaanacaaannaaacacttttaagagcnncnccggggcacagggagnncaagaagaacacagaagnagcacccggagggggagggggacagcnacagaanacaaannaaacactnnnaagagcnncnccgggncacagggagnncaagaagaacanagaagnagcaccggggggccccccgganaaacggcacnncgccggncaaaagcnnaagaancnnccggcncaggcncagcccaaaaccnncnggagncccccacccacgggganggaacaggnnnngaancaanncaggaggaagaccnncaccaggacanaccanncnaaanncagcagggagaagagngagccc

SEQ ID NO: 103073 - DNA, 629 bp, Glycine max
  Clone ID: PAT_MRT3847_64092C.1
gatctatactccgatttgagaaaattgctcttaaaggtatatttgaaggcttgtactcctatcatggaataccaaccacacttgcctaaggggggccttagtctttgtctgattactgaaagttacaattcagccactgattgtattcatgacacggacatatatacaggagtcagtactaattatcaactgcaggtaagctacattcccctgtcaacataacatttatcaatgactaaatgagtcacttcacaggagatattccactttgcagaaccattctaagcatatattgatgaattatggacatatcttacctgatttaccatgacctaaatagatctgacttccacttttggcctgatgaaagtcctacgctaccacaactctgatgctctctgaagagaggaacagacatcaccagattctaagaaacttccaactcttgaaagtcgaatgctctgctgatgctacacatgcagggagagaattgacctctctatctcttactccacaaggactctatgaaatgatcggcacccttgctccaaccagttatcgtcatggattacaggctgtacccatgtctgccacaagaactggcacgagatctctgatggcaaaacctt

SEQ ID NO: 103074 - DNA, 208 bp, Glycine max
  Clone ID: PAT_MRT3847_64093C.1
ccacatgtccgtcatacgatactaccgctccaagatcgttgccgtactctacaacgtctactacggaatcctctatctcgtcgacactctccttgtccacttcgtcgtctacggcgacttcaaagtcttgtatctcaagatgaagggagactaccacaggtacctcgtcgagttcaagaccgtcgctgacctcaacgatgccgccgag

SEQ ID NO: 103075 - DNA, 235 bp, Glycine max
  Clone ID: PAT_MRT3847_64094C.1
ttaatacgtacgcgggtaaggacaccactgtcgctaatattgactttagagagaatcccgtgttttacacaccccaaagggcacaggaggaaaatatagattctagtgcaagcaatatcagaactgaacaggcgagtaaaagtagcccgcctcacactacaagaatgcctatggcagctattccaatcctcaaggactagtgccagacgtcctgactgcaacatagaggccgcaa

SEQ ID NO: 103076 - DNA, 339 bp, Glycine max
  Clone ID: PAT_MRT3847_64095C.1
tctttatgtcctgctggatataacagggaccgagtgcttattcatccaccggacgtttactatatcagtcttgggctaattgatgaggatgcaatccccaaatatgaactcacaaaccatgatggtcggccacttgctaaataatacagcactgtactaatgctgcaacaccttgcaaagcaaacagcatactcaatgcttctaaccctaaaaaaagacgccgtttatgctctccctaataagctaccaactgctgctatagtacctgacatgacaccattccctgcaaacctttacatttctacactcacaccaccaatttaatgatatatttaaaaa

SEQ ID NO: 103077 - DNA, 231 bp, Glycine max
  Clone ID: PAT_MRT3847_64096C.1
gactttgtattagtgttgcatgacacaatcaggggcctgtgtgcttagaagagagacattgagtcataatgagggagatgaagaagcagaatttggagcgcgatacatgagtaagagaaagtggagatcgaataacaagaatcgacaagatggtgcatcatgtaactgagctgacgctagggctgagcctatgtatgattggtaatgtagcctcggtagcaagtaatgctg

SEQ ID NO: 103078 - DNA, 195 bp, Glycine max
  Clone ID: PAT_MRT3847_64097C.1
gaattagggtcgagctctatcctaatcttctacactgcctattttttttctcccaccatcccttcttcacaaggtgtctttatagctatgaaagaatctcttcacattcctcctactatcccataaacttataattattttacacaccctaaaactactaacaatctccattatactataaaagacattacaact

SEQ ID NO: 103079 - DNA, 979 bp, Glycine max
  Clone ID: PAT_MRT3847_64098C.1
tcattatctggctcgagttcattcccctgttctctctgtttctctgttccccagttcccgtcaaaacgcacactttcccatttcccatttcccatttctggttcaacccatggactcccaaccgggtctctctcttgggttaagcgtccctctctcttcacccgcggctccactctgtgatactacctctgttctgtggcgtttatttaacaaaagacaccccataaaggaggaagaagaagaagacgaagactatggtgaaacgattaacttcatggaccagagcgtgaagaggaagatagagggacaccaacaaccctgtttcccttcgaagcgcgtggcagtggattcctcagtggggtggtggaaccagccactgggcgttgcggaccccgagattttttatatcatggggaaggaaaaacaaagacagtttaagggaattgagttaattgcttcggaaaatttcgtgtgcagagcagtgatggaagctttgggaagccatctaagcaacaagtactctgagggaatgcctggtgctaagtactacactggtaatcaatacattgatgagattgagtttctctgttgccagcgtgcgttgttggcttttgatcttcaccccaacaattggggtgttaatgttcaaccttattcttgtacttctgctaatttcgctgtgtacactgggattttgcatcccggggataggattatgggtcttgattcgccttctggggggcatttgagtcatggttattatactttagggggaaagaaggtttcagctgcttctattttctttgagactttgccttataaggttaatccgcagagtggttacatagactatgataagcttgaggaaaaagcgctggattttaggcctaagatacttatctgtggtgggagttcgtatccaagggaatgggactatgcgagggtcagacaggttgctgataagtgtggggcaatgttg

SEQ ID NO: 103080 - DNA, 380 bp, Glycine max
  Clone ID: PAT_MRT3847_64099C.1
gttccgcccgggggggtgttccaccgtgaaaccgtagacccgactgcgagcgcggagccaagccatgtccctcaaccggcttctttacgcggaccggcgctgcgatcggcgaacctacggcatcttctccctacgatctctctacgcatgcaccgacgaggaccgtgccgactaatgcgctctgtcgtactatgtcgaaccactatggtctctctgcgagctgtcggggaacactaacctgtgttacgactgtttgaaaacagctaacgttccttattgaagcgcggacaatccaacacttgcttaattgtgcataagcacgttctgaagagccgccatacgcgggtgaaaacgctacctagccgcactacggtctacac

SEQ ID NO: 103081 - DNA, 357 bp, Glycine max
  unsure (1)..(357): unsure at all n locations
  Clone ID: PAT_MRT3847_6409C.1
ctcctcatacnnaaaacanaacaagtaccggnccaacaanncctaacatcccngaataagctgatgncaantgcnnntngncgaanattcnccagnntanactgacncgngnnangtcncngtactctcgtngnacntntgangncgcacgtgnnanctagncntganagatagnantaccgngncntnnaanaggnggngccnnatnaccngattcatnannaccgntcanannccnncancgcataagnngnncncgtgnnanntctatngacnnnnanncacaccggagcatcncgngnnanannnacgcnncnccnnnntnanctngannangntnncagnacngcancanna

SEQ ID NO: 103082 - DNA, 520 bp, Glycine max
  Clone ID: PAT_MRT3847_640C.1
ctgttaaaattgaaattatctatttatttagtagtttctatattgccccccagagtttttagatattcaatcaaacctctgaagtaaataattgggtgttctaaggttgtggcataacatgactttctgatctggcaaaagattatccatccaggttcaattgagttcatgaatggtctggatttcactacatcaatgccctctggctatcaagaggctggagagcctgtattgttgatcagttaatttggaaagtgaatttcgaaaaagttaattatttttgcgtatgaatttactttggaaaagagagaactattttctgattattttttcgtcttccagtaggactctttaaggggtggtggtaaatggagcaatggagctgagatgactgaggaagaagcattagcagagcagcaaaggatgtttgcagaggcgcgtgctaggatgaacggtggagccattgcttccaagcagccagatgctgcccaaaaaaaaaaaaaaaaaattaaaccaccaa

SEQ ID NO: 103083 - DNA, 320 bp, Glycine max
  unsure (1)..(320): unsure at all n locations
  Clone ID: PAT_MRT3847_64100C.1
gttccgngangnnccanccncagnatncncntcaagccnctcnnnaccntntngatcattgtnttgtcatatttccccnataaaattccacgattaacttcgtnctacccacgaantctatnnctcttcccattntnntctgagcatttagctgtcgcttctnnttgtntgtncntgtcatcctcggcagatcaggttcagtttntgcttctgctccagccttggaagatccacaatctctctctgactggatggtntagtgtatatncttaaganactgatataanagtagggnagcagtgaangngntanaactacnn

SEQ ID NO: 103084 - DNA, 612 bp, Glycine max
  unsure (1)..(612): unsure at all n locations
  Clone ID: PAT_MRT3847_64101C.1
ggaagttcccggggtgcgacccaccgcgctcccagtaaataaaaaggaaaaatgtgaagagagtgatgtagtgagtagtgagtgtaaacaaggtttggtctttgctgctgatgttcatcactgcaaggtttccgcatttgggtttctctccgattgaaaaaagtaggtggctttacactaaatttgtctgctttcacttctcaccaatctgatgcattcttggattttttttttctattttaagtttgcttctcctaatgtgtatgagtggtttcggagttcactgtataggaatgtgtaatgggtttttatgaaagaaatcttttctttttttgggtaaataatcagagacccttttcaagcttttgctagattgctcgatcagattttggtctgggtaataaccagatcatgtgtaagttgatctcactggtgaattttgagtggttgatgaatacttttaaaataaatcttttgcgatcgcaaccaagatattttattggggtgtgcttcttangagctttcaaactggatctatatctattacaggttcttcaacctttttttaaacttaatccgtgtggcaatcctgatcactggtcattcatttgg

SEQ ID NO: 103085 - DNA, 376 bp, Glycine max
  Clone ID: PAT_MRT3847_64102C.1
aggaaagggaaaggacaaacccccgcaggcaccgaaccgcaagacccggccagacccacgccctaaaatccccaacaaacaggaacaggacaaaggaaagggcagaaggaaagagcccaacccccccaccacccagaagggaagaagagaaaaaagagagggaggcggggaagaaaaagggacgcaaaaaaggagacaccagcgggcagaccaaaggccaaggaaggagagccgccaaaaagacaaccccaaagaggacacagaacacgataagggacagggaacaacagaagaagcagaaacagccggaaagacaaagacggcagaaaaagcggagaaaaaagacagggccagagcaaaggaaaaagcagaaacc

SEQ ID NO: 103086 - DNA, 225 bp, Glycine max
  Clone ID: PAT_MRT3847_64103C.1
ggaggagcgagggaccccaaggccaaaggcttaaattaaaccttttaattttaagcttttattcttatttggttacttggttaacctttaagggtttttgggatcaaaaaaccaaataagggtttaacgggaccaacattggacccgcttggggtttccgggccatccgccgcagaacggttattggcgggggcgggaaaaacgccgggaaaaaaaaaacccctt

SEQ ID NO: 103087 - DNA, 305 bp, Glycine max
  Clone ID: PAT_MRT3847_64104C.1
aaaacacaaaccacgcaaagcttacattaataaaattgggatattataacagccaatatcaccactccaaaaaacggggagaaaaaagggcataaagcttggggggcaaacacatgacctccccccttagcaaatcctacaatatttatacatttgaatcacaccatgaacaccaaggggtttacttagcaacattaacaaaagccttttccaacttggggaccaatggggttacttagggaaaaaaaaaaggggggcaagttttttaaagaaagcctaaagcctcagcagacactggcaaatgg

SEQ ID NO: 103088 - DNA, 660 bp, Glycine max
  Clone ID: PAT_MRT3847_64105C.1
ccacgcgtccgctcacaataccaaccactgtgtgtgtgtcttatggacactactactactcctagagagaagaagactcaccaagtaataatcaatcaaagtctcctactttttcttctttagttctctcttgcttcattcactctcctactattttcttttttgaaaaatatttcattttgttgcaatggagaacaagaacctgacctcgaaatgttttttttactacaacccaagtcattttttccggttgtttttctgtttgtggattctcatggtaccagtggcgagtgaagagcgttgggatggggtggttgtgacgcaatcaaacttcctagcacttcaagcgttcaagcaagagctggttgatcccaaaggcttcttgagaagctggaacgacagtggctatggagcttgttctggagcttgggttggcatcaagtgtgctcagggacaggtcattgtgatccagcttccatggaaggggttgaagggtcacataactgagaggattggccaacttagggggcttagaaagcttagccttcatgataaccaaattgctggttcaatcccttcagcacttggacttcttctcaatctaagaggggttcagctcttcaacaataggttcacagggaccatccctccttcggtagg

SEQ ID NO: 103089 - DNA, 1598 bp, Glycine max
  Clone ID: PAT_MRT3847_64106C.1
gtcaattgtgtggaaaatatcactgaattttcatataagtgaagtttcctaacatggggtttgcttagctgttgtttctgtcttttctctttctctaactgttgccccagttggaggctcttatggtttgaggcatctgttatggaggttttgggaaatgggtggtgggcggctccggttatgggtggctttggaagaaatgcaaaattaggacatttctatcacctaaagctacatgatagtcaggttaggactcatagttgctgcttcacttgcagcttttactgttaagcagctgaatgtcaaaagctcaaaaccagaacttaaagatgagggctcagaagaggagcatgtcacaagagttactgatcttctccaagagaatgaaagggtggaggaagaggagaaagaggaggttaagttaattagcagcataattaatcgagcgaatgactttgaagatgatattctaccagaatttgaagatcttctgtctggggagattgagtttccgataccacctgataaggatgagaaagacaaagtttatgaaattgagatggcacacaatgcaactgaactagaaagattgcgacagctagtgaaggaattggaggagagggaagtgaaacttgaaggagaattgcttgagtactatggtttgaaggagcaggaatcagacattgtggagttacaaaggcaactgaaaatcaagactgtggaaatagatatgcttaatattacaatcaattccttgcaggcagaaaggaagaagcttcaagaagagctcacacaaggagcttcagccaagagagaacttgaggtggctagaaacaagatcaaggagctacaaagacagatacagcttgaggctaaccaaacgaaaggccagttgttgttgcttaaacaacaagtttctactctactggtgaaagaagaagaggctgccagaaaagatgctgaagttgaaaagaaattgaaagctgtgaatgacttagaggttgcagtagtggagcttaagagaaaaaacaaagaacttcaacatgagaaacgagagttaacagttaaactcaatgttgctgaatctagagcagctgagctctccaatatgacagagagtgaaatggttgccaaggcaaaagaggaggttagtaacctgaggcatgcaaacgaagacctgctaaagcaagttgaagggctacagatgaataggttcagtgaagttgaagagcttgtataccttcgttgggttaatgcatgcttgaggtatgagctaaggaataaccaaacaccccaaggaaaagtatcggcccgtgatctcagcaagagtcttagcccgaaatctcaagagaaggctaagcagctgatgttagaatatgctggatcagaacgtggacaaggggacacagatcttgaaagcaacttctctcatccttcttcaccaggaagtgaagattttgacaatgcttccattgatagctctactagcaaatatagtagtcttagcaagaaaactagcctaatccaaaagtttaagaaatgggggtaaaagcaaagatgatttctagtggctctttcatcaccagcttagatccttt

SEQ ID NO: 103090 - DNA, 291 bp, Glycine max
  Clone ID: PAT_MRT3847_64107C.1
ttttactttacaagccagatatattttaaaaagatcatgtttacaataagtaaattacgtagtgaagaaatgtcaaaatgaagttgagtaaaaaggcacatttgaaagtttaagagtacaaagagtcccatggtttgttcttctaacataggaggaaagggagacagatatattaccattacattctcagggggagggtttttgtcctggggaagtgattaacactggcttcttttctcctctcttgggggaatcttttccttccttggcttcggacagacaggttaatct

SEQ ID NO: 103091 - DNA, 513 bp, Glycine max
  Clone ID: PAT_MRT3847_64108C.1
gttagtgattgggtatgtgagtgactacaatggtcacagcatagacaacgaactagacgactacttacaggaccacggggatgtgcaaagcgtcgtagaaatatgctttgtactgtatgttatgatgagcgtattgaggatcctcctagggggccaacgatctgtcgatggtgctctggacaatgtacagactgatcttgaaactgcttttggaattgcgctcaatgatgctgtcaatgtagcctatgctgtgcaccatgcgctggaattgacggttgtattctcagcggtgtgctttaccatagatgtgatcatatattgaaaactaaggtctctggctatggataaggttatatatagactcactaactgcatgacttactggtgccatcattgtgggagcatatctgatacctaacattatacataccttccaggatactggaccaactagtgcagcatgtgtaggattcagtataggagctattattactcttgacgactgtttcaacg

SEQ ID NO: 103092 - DNA, 765 bp, Glycine max
  unsure (1)..(765): unsure at all n locations
  Clone ID: PAT_MRT3847_64109C.1
ccacgcgtccgtaacaatgttcttttaaatgcgcaagagaaagtaaactgcagtaaaataactaagataagggaagagagaaatgcaaactcaatttattatggttcggccactttccgtacctatgtccagttctcaagcaacccacttgagattttccactatctctgtaaatcctttacagactttgaacacaccttgggatccctcacccttgtgttcaagattctcacaatccaagagacacactatctcttgattacaatttagatcaagagatgaacaaaaagatatctctcctttaaagtagatgatacaaattgaagatcctaaaagaattctcaatagatttgcaagtgtttgaccaatagttgttgagagaggatttgacaattaagttctctttcatactctttctcttacttttcgaagtgagacacacatatatataggcccattgtgccttttcaaaatggtttgaagaaatgtgtcttttcaaaactctttctctttcaaactgcagttatattttttaagggccatgacttttcaaagtgttttctgaagtgtcgttactagtaattgattataaacatttggtaatcgattacaagatttanaattcanatttcaaaacccttttgaaaagctcatttgaaatcttgtctctggtaatcgattataatgctcggtagtcgattaccggtagtcgattaccagtgcctttgattgtttgaaaatactgtttgagccaaaactatcatc

SEQ ID NO: 103093 - DNA, 2487 bp, Glycine max
  Clone ID: PAT_MRT3847_6410C.1
cagcactcaacctagatcagaatctaaaattgaggatagtaactagtgtctagttgatctctctaactcggttggataaattaatcaagttattggctctagattgaattcttcttcctgcaatgccaggatccatcatggtttcagtactggaattcatggatcttccattatcttcatcaacatccataagggcttccttggggaaaatagagtaccaagtgaatgacaagggaaacttatccttccccttaactagcctccgtgatgatttgatcttcaaaattcttgattctgaggggaatgaaatatcacgtacaggtgttcaaataaaattgatattggagaaaggtgttttggaagacaactttccccttggaggtggccatctgcgtttgaagttgcaattcatccttagtgatgaagagcgcgacagaattcgttcattgagacaatctgcattaaagaaaaaacatgatgagcttcttagttccagtagaagaggtgaagaaagcgatagtagaaccgtgattggaaatgctgcattgccctttcgcagaaatgatgagtgctccatcttctcaagaatcaccaaagaaacaacatcaacacgaagcagatccccaatcgcgaggtcctgctggttccggagacggcaaagaatctgaaactagaagtgtagttggagctcagcttgagcagaaaaagcagctaaccacagatcaatatagggagtcctcatacacaaaacctgtgtcacaaaatgttactctcactcaattacgacagaagggtaaggagcctttctatcagtcaccaaatctcaatcgatcgtcatctgagaaacatcctcagagggatattggttcagaagaaattgcaattttgtttggctcagaaaaaaaggaagccctgacaagtaatctgatacaacctaatctagagcaaggtggtatacagtattctgagaagaggacctcactggggagaattcccagtaatgtgaagaaaatgataagtgcctttgaaggtggattggctcagcaggataagagacctcagaatctctaaagcagcagctacaaccgggggcccaatttactggtcccgtcagttctcgcactcgcacagaatactaaaccaggttcttgggttggtcgcatccttcttactgcaatcacaccatccagcccagtcgctatagtgaactccatccaacaaccaccgtgtcactttcacttcctatgctcttatttctgagggattttgttaaagaattcttgctttatagcatattattgtggtcttggagcatcttttatatgacaattgtttctagttatgccagcatggtccaaattgttctgcttcttcttttatgtatgcaaggaaattctaataaaaactaagcaagaattatggacttaggtttaaaatcatcctacaaagctagatttagataatcacagcaaaaatcctagatgtttgaatcattcctttctaacatccatattggcaaaaagatctgtacagtaagttgttttaagaaagttgttccaattcacaaagaacttctaagtgcctgtatgtctgtattatgtagtaatggagacaggcaaaaggatgtatttaactttctgaatttaccagaatgaagaagaagagttcctgagaatcagttcaacaaatatcaattcccaaattcttcatttgatgaagcatgcacaagcatctgcatgtgacaatcaagtcaacaactttcaaatttcagataattggccaaattttaatgcaatcttatcctggttgttgaatatctttcatgagccgaatctctggcattgctgagacagttgcatccttagcaactaaatcttacaaatgtaacataaagattaatattcaattatgctgagaggcttaaggaaagttaggttgattttcaacttggatggagtaaaactttgtaagaatgttcttttattactcctatgagcaataaattggaaaaaatctgtaaagtttattaaaccacctccaacaaaacaacaagaaagttcaattgaaagaagagattcttccaagactcagcatttggagcaagataagtcagaggacatagacccagcagacttgcacgaaagggtgaaaagtgcctccctgaatgaagcaaatgctggaactggaactgaggagagcgagtatgaaaagatacaggaaactaaagaatcaaagcccaagacttctgataataatggagatgaaaattctggaggaccatttaatcaggtagtaaaagttgcaatcattataggatttggattacttgttctcctaaccagacaaagaaaaagaagaatgaagaagaagagttcctgagaatcagttcaacaaatatcaattcccaaattcttcatttgatgaagcatgcacaagcatctgcatgtgacaatcaagtcaacaactttcaaatttcagataattggc

SEQ ID NO: 103094 - DNA, 386 bp, Glycine max
  Clone ID: PAT_MRT3847_64110C.1
tattttttttgtggaatttttttttttttaggggaacttcaaaaataacacacaccatcaatttaaaccttaaattttaaacattgtaataggaggtcgttaatgtacacccatatgacagtcctctcattgttctaggaaagttagctaaaggtaccataatgcaacaccaacttggagttacaagaaaacaaaggcctgaaaaaaaaaaaaacaaaaaaaaacactcttttacttaagctgatcataccagataccctggatcttgacatcctttggagcctttgctcccaaattagtgtccgacgggtgaaaactctgaaacacacccttaaccttgccctttttaaacttggtcttggtgacactcaaagtaaatttcccct

SEQ ID NO: 103095 - DNA, 276 bp, Glycine max
  Clone ID: PAT_MRT3847_64111C.1
gaaattatatgaagcacttcagcgagactatgtagcggagtgttgttagtttgaatgtgtctggtgttatacgtttagtacgtatatagattattctactataaatgataaggagcctatcgattgagcatggatattgtacacgaaccgataaactgatacctatatagtcagtcttgattattatgtgatccgtccatgctgtcatgattggcgtgtgctaaataccttgaattctaatgcataccctattgccttaccaactttccctataat

SEQ ID NO: 103096 - DNA, 447 bp, Glycine max
  Clone ID: PAT_MRT3847_64112C.1
aaacaaaatttaattttatcataattctaaatgagttcattaaacaaaccagatcaaataattgaaatgtagcagtcagagatagtctcacgtagaagttataatttgtgaccttcaggagcagggaggtggccatgacaaaatcgcgctttcattagagaatgtttaatatgcaatacatacgatatgatacaaagcacgtcctttaactccaatcagtgatattcaatatttgccacattcaggattctgaaagcaacctcttgaaattccgtgttgatgaaaattaggaagctacatgcacagccactcttaatagatgcctctgcaggttcagaacgaccaactccaataaaatgacccccgctaaaacctttaggttagaacttgcattataaatcgaatcgaataatcccttcaacaagattttagttagcctttgggttc

SEQ ID NO: 103097 - DNA, 756 bp, Glycine max
  Clone ID: PAT_MRT3847_64113C.1
cggctcgagccagcacatgatggactcagtatacccaacttctctatctgcttcattaaatcctattcctatttcctagtactataaaaggtcgcattagcacggcaggttccctagctcaccaaagaaccaaaccaaaccaaagcatgccatcattcatggctttcctttcacatccttatttctttgcagctttgtctgcatctttgactcttttggtggtccaacttctgttcagaaaactgaacaaaaggcatagtagaaagaagtaccaccctgttgctggcaccatcttcaatcagatgctcaacttcaacaggctgcaccattatatgactgatcttgctgccaagcacaggacttacaggctgctcaaccctttcagatatgaggtttacaccactgagccaactaatgttgagtatatactcaaaaccaattttgagaattatggaaagggcttatacaactaccacaatttgaaggatttactaggtgatgggatcttcactgttgatggcgagaaatggcgggaacaaaggaagatatcaagtcatgaattctccaccaagatgttaagggacttcagcatttcaatatttagaaagaatgtagtaaagcttgtaaacatagtgtctgaagctgcaacttctaacagtacgttggaaatccaagaccttttaatgaaatcaacactggattcaattttccaagttgcatttgggactgaacttgacagcatgtgtggatcaagtc

SEQ ID NO: 103098 - DNA, 324 bp, Glycine max
  Clone ID: PAT_MRT3847_64114C.1
gcaaaatgtaatacctcataaacatttggggttgggggttattactaacacgaagaagaaagaatttaagtacccagttaagtctggttttgtcgcaaccactgacgtatacaatgcaaaaaaagggcacccgaaatggggcaaaaaaacggttacaacttttgcagagccatttttttaaaaatatgcctcactccttgatttatttagtgaagagtacaccgaatattacctgccctaccaaagagaatccttaagggtcggtttagaaacattttttggtgaaaaatagtctacaccacccattttgctggtactttctga

SEQ ID NO: 103099 - DNA, 309 bp, Glycine max
  unsure (1)..(309): unsure at all n locations
  Clone ID: PAT_MRT3847_64115C.1
cncgcnncggacngnagctcngtaangcgactcgacncgaanacnaagantantacnnnacnnnngccnaantnannanatatatanntcngnaancantcngcnnnnnnttncnaagggtnaggnagttgaagagtnatgnccggntttgccagaatancgcngngtacngnnagncnntncatnntgncnagcnngnagnatgtatgagancaacgctnatgttngcntgntnganngnnngccatcngnnatgaacctgtgngtgaccaccantgccncncagnggngtgctctgggtagncaggn

SEQ ID NO: 103100 - DNA, 267 bp, Glycine max
  unsure (1)..(267): unsure at all n locations
  Clone ID: PAT_MRT3847_64116C.1
ggaaaggtttcatctctaactggaagcttccattgtcatttgccgcaatctccatcacatcattaatcaatcgtgatagtgcattgctaactttcaaaattnaatcaataacaatcttctgttcaggtcattggtgatgaggcaaggactttccaagtaattttacatatgattggctatttattgncccatatatgataaagggaatctcatttttcaagtttatcttaaaagtgatagtggagatagagatgacagaagttttgg

SEQ ID NO: 103101 - DNA, 226 bp, Glycine max
  Clone ID: PAT_MRT3847_64117C.1
accaataatgacggtttctataagtgttaattccaccaatgaagtttttgttttcagtttttcgtgtcttttttccaccatcgccaataaacaccatgtgggtcatttcctttgtagcttcaacatactcttggtgaacgcccttcttgatatagatcaagaatgactttcggtttttctcaagtacttgcttcaatggctcattgatgggtgggaaatattcgct

SEQ ID NO: 103102 - DNA, 412 bp, Glycine max
  unsure (1)..(412): unsure at all n locations
  Clone ID: PAT_MRT3847_64118C.1
ctcgagccgattcggctcgagctcgagccgctcgagccgctcgagccgcaaagtcagtgaatagtgagtgagtgagtagcagctagcaatggaaaggactgccatggcttcttcagctactcctccacgaccttctcttccaactccttccacttctccacacacagtagtcaccagcacctttagcaaacctcaactcagacgctctcacatagcactaccaacttcaaccaccatttcattgctcgctctcttcgcccctccaaacgaagccaaagccgctgtcagcatcgccaaggaccagaatggcccttctctcaaccaagtggagaaaacgctggatcaggttcanganatgggttcgggtgtgctggacacggcacaacgtgttgctgaagtgatacggaacgct

SEQ ID NO: 103103 - DNA, 246 bp, Glycine max
  unsure (1)..(246): unsure at all n locations
  Clone ID: PAT_MRT3847_64119C.1
tatcgctgtggttttcatcgtcttccttctcttatattnctttttttttgtngtcttcgccgnangcngaaacaatgggccggaaaaggagagggncctgctatcggaatcgntctcggaaccacctactcttntgtcggtnngtggcaacatgaccgngttgaaatcatcgccaacgaccaagggaacagaacgacgccgtctnacgtcggnttcactgatccgagngtctcatcggtgatgcgg

SEQ ID NO: 103104 - DNA, 988 bp, Glycine max
  Clone ID: PAT_MRT3847_6411C.1
tatatccattctgcccgagattcattcttcaccaaaacttcgcaaagaaacactacacatccatggcaactgctggcgtgcaagaagttcgtgttccccctctaacttccacctctgagccaccttctctctttgacggaaccaccaggttgtacatcagttatatttgtccctatgcatagcgtgtttggatcactcggaactataagggactacaagacaagatcaaactggttcctattgacctacaaaacaggcctgcttggtattaggagaaagtctaccctgaaaacaaggtgccatcattggagcacaatggaaaggtcttgggtgaaagtctcgatttggtcaaatacatagatgacaactttgaagggccgtctctagttcccagtgatcctgccaagaaagagtttggtgaggagttgatttcccatgttgatacattcaccaaagagctgtattctgcattgaaaggagatccaatacatcaagccggtcctgcctttgattacttagagaatgctcttggtaaatttggtgacggaccattctttcttggtcaattcagctgggtggatattgcttatgttccatttgttgaaagattccagctcgtctttgctgatgtgttcaagcatgatataactgaaggaagacctaaacttgcaacatggattgaggaagtgaacaagattagtgcttatacacagacaagagctgatccaaaggaaatcgttgatcttttcaagaaacgttttttggtactgctcaacagtgaaaatttggttgcagtgggtatcctctaagttgtagattgttgtcaataaagtgttgtgtgtttatcggatgcttctttagtcacatgttgttttgtcactttgtctgccagagctgcaaataatttgatttctgggtcggtgatgtttatgtaccagcttgtctgatgtcagactaataaaatgatgattgtgtatcggcttttaat

SEQ ID NO: 103105 - DNA, 230 bp, Glycine max
  Clone ID: PAT_MRT3847_64120C.1
tttttttttttcatgggtccagagaaaatatccattaaggggaaagaagtgcaacggctcataaccttggcctttaaggacctggggatggtaccggaccccaatttccattgggggcggagtgaacccctttgggggggggccaaattaaaattccaaaacctattttttttaagggggggggggtggggaccactcctttgaaattttaaaccaacaacctcttttgg

SEQ ID NO: 103106 - DNA, 294 bp, Glycine max
  Clone ID: PAT_MRT3847_64121C.1
gacaccaccccccacacacacccactaatatgggtgacttggtgttcttactagtgctgcttcttgcagcccttatactcatgcctgaaggtctcgctacttactacaaaccaattaagaagcacccagagtacaacccttctatgctcaatccaccagcttacaaaccacctgcttataagccaaaaccacccgtttacaagccaaatccacctgtttacaagccaccgtctacgactacaccatacaagagaccaccttatggaaagatccctacaatggaggacaacaccc

SEQ ID NO: 103107 - DNA, 620 bp, Glycine max
  Clone ID: PAT_MRT3847_64122C.1
gagaagactagtccgagttttttttttttttttttaataaaccataaaaaacagttaacaaaacttccttataaattaaatgcaaatttaagacatccctcctcagcagcaaaggaaatggactaaaaccctatggctgcttgtgaatttgaaaatctcagacttttaccatcaaaaaaaaggaagggaagagaaaaaaactcgaagaggggccgaggggagcagaaggaacaatagcggagggtgttacgggcgcccattggccggagtattgcaacggattaagagggaggacgcgtggagttgcggaaagtaagagactggaaaagcagggggatgtgaggagtggaggagaggggaggggggccagggaagggcaagggaaagagcggtggggagcagggagaggaggacagagagcaacggtgagaaggaggggaagggaacagggaggaggggggagcacgaaacaacgcagcggggagtgcatacgacgggggagacaaacaacggggggcatacacaacaacggcgggggggcaacaagaagaaggagaggggaaatgaagagggaggggagcgagaacagggcgctgacgtaaaatccagaggcgcgcaaa

SEQ ID NO: 103108 - DNA, 250 bp, Glycine max
  Clone ID: PAT_MRT3847_64123C.1
agtaaacaaaacaataaaggtcgaaatatccataacagctacgcgaagcaaaatggaaggacgtaaaaaaatgatactagcgaaacccatattcgaacatcgctaaccgtgagatctttgaattctccgcatagctagttaagaaccacatgaacctcattggcccatgctatatccacacaagccggggacaatttacaggagaaaaacaattgctttttatagcataacatgggttctgaaactatca

SEQ ID NO: 103109 - DNA, 396 bp, Glycine max
  Clone ID: PAT_MRT3847_64124C.1
acacagcccatccaacggatacaattaattgaaagaaaaagcatggtcggtgatccttatggaaatggacattggcacctttattcccagacacacactaaattgaagctgaggaaacgacattggccactaaggtcctaatgccagtgaccacttgatgagaaccaccgatgctgccttggcaccaaggttattttttttcttcaaagcctgcttcctccggggatgatttttcatgcaggctgaatgatctttacagatcgcattcagcaaccccatgtcgaggccatcttcggtcataggctgattaaggagctctgctaccatatggaattttggagccgaacaaagttgatgggaccaaacgcaatagagttcaaatgattaaagaggatt

SEQ ID NO: 103110 - DNA, 339 bp, Glycine max
  Clone ID: PAT_MRT3847_64125C.1
ggtgatataagagatgatgttcacaacatgaaagtgtcttgtgttggcagaggcttgatgggatatcttggaaacaacggatcaatatcaattactatgtcattgcaccaaacaagcttttgcttcatttgtagtcatttgacttctggacaaaaggatggtgacgagttacggagaacttcagatgtaatggagattctcataaagacaaggtttccccctgtcctacacatcggtggtgagtcttctcctcacacaattctggaacatcaccgattagtttggctgagggatttaagtcatggcatcaccctggcttacacagcagacgggctcttg

SEQ ID NO: 103111 - DNA, 817 bp, Glycine max
  Clone ID: PAT_MRT3847_64126C.1
gtcggcccacgcgtccgagcttctggaccggtgcaagaggatgctcttaaggaagaacccgttgacaacagcccttcaaagccaacagcaacaggacctgctcgtggaacacgaccatcaaagtcttcgaataagaaggcatttgcagaggtccttaagagaatctctaagatacagaagactacaactggagccagttatgttatcctgagagataagtgacaatgtagaccccaatgattggctaaaactaaaatgcagccataaaatgaaaataagttcatataccatctatatttttcacattatgggcaccatcttcgagatttatactattaagctaatgcccattaagtgtacgacttttgcttttaaaactcgttgaaaatcagttttcatctgtttacaaatgcaagtggatatatgatacggaggtgatgtattacaccagtgtattgaataaacagcctgtaccaattaatgacatggtagatgcaaattgtacaagagcaacaaagaccccaatgattggttttgacggaaaatgcagcattaagaagaaaataagttcatataccatgtatatttttcacattttgggcccaatctttgagatttatactattaagttaatgcccattaagtttacgacttttgctttaaaactcgttgaagatcagttttcttctgggagatgcaaattgtacaagagtaacaatacttatttttcgtgttatgtggccattcataaatgttgtgaactgcaaaatgtagcttgagcaatttcatcaatcatgatatttcgaaatgctttagg

SEQ ID NO: 103112 - DNA, 284 bp, Glycine max
  Clone ID: PAT_MRT3847_64127C.1
cgttcgttttggatgaggcttcagagctcagacaggtcccataattcacaaaattcagagagagcacgtcaccaaggatgcttgcagtggatgatgaacaaaggcttcacagggagactaagagagggctcacaccatcgagaggcttgcagacgtgggtgggcacatactagcggagattgtacgatggcatacaattgctgttgcgtgcgtcacttctttatctgaccactgcccattgcccttaccgtcgggtgtgttcctaacatatctttcaaaattac

SEQ ID NO: 103113 - DNA, 266 bp, Glycine max
  unsure (1)..(266): unsure at all n locations
  Clone ID: PAT_MRT3847_64128C.1
agagaagtgcagagagagcgnangnngacnnctgcgtnanacagtgcggtaactctttcttttctnttctttctttctccgatcgcatcgctngcaancacaatcangcnttcacgaagaagaactctcttgaaggtntnatnctcggtganagcggggtggggaagacgtctttgatgaancagtatgtgaataagaagtttagtaatncagtacaagggcaaccattggagcggatttttaacnanagaagtgcaatttgaaga

SEQ ID NO: 103114 - DNA, 477 bp, Glycine max
  Clone ID: PAT_MRT3847_64129C.1
ggctcgagcttgttttcagaataacatgaacaaacattttgttatttcaaacactcttttaatgtatttttctgtttataaatcttatccgatctatatttatatttcctttttaggcgttaaaaagcacagcgagtgttcataacatttttcttccgttaaatgttctagtgagattcattcattcattcattcccattggcttgtcccaacaacatggaaaaccaacaaccagcgaacaagaccaccaatctcttgaaccacctcgtgaaggagctcctgtacgccatcctcgaccacctcgacgaaaacccttttgcccgaaagtccctctcccaatcctgcaagtgctttcacgcgctcgaagccacgcaccgtaccaacctcaagccacgccggctcgagtgcctcccacgaacccttcaccggtaccggtcagtctggcaccttgaactcacgctctgtccctgtgttgac

SEQ ID NO: 103115 - DNA, 1854 bp, Glycine max
  Clone ID: PAT_MRT3847_6412C.1
acaatgaagcgagaggcgttctatatattattgaattgacaatgaggcctgctcttgctttgcttcctcttctatttgctttcttgttagctgccactacagaatcaagaaaagatacaggggaatattggaaaatgatcatgaaagatcaggaaatgccagaaggacttcaaggtcttgtttcatttcaatctgaaaataaccctaagactcaagagcagcttggtaaaggttccaaaaaccattgtgaagagtctctagttacaaatacacaagttaatagtgacttcgaacccataccaagtgttaccaaatatgatgatttggaattcaagtcaagcattatcaagaacgatgattttgaatcgagaccaagtgttaccaagcatgatgattttgaactcaagtcaagcgttaccaagaacaatgattttgaaccgagaccaagtgttacaaagtatgataactttgaacccagaccaagtgttaccaaatatgatgattttgaactcaggtcaagcgttaccgagaatgatgattttgaaccgagaccaaatattagtaagtatgatgactttgaactcaggtcaagcgttaccgagaatgatgattttgaatcaagaccaagtgttaccaaatatgatgatttagaactcaaatcaagcattaccaaaagcgatgattttgaaccgagaccaaatattagcaagtatgatgactttgcatccaggtcaaataccaagtacgattctgaacctaaagcaagtgctaccaagtatagtgattaaatgaaaatcaagtaattgtataatacagtcgaagaaaatcgtgctccatatcaatgtatcctatgaataaatagggtgtgaagtattatagattttgaataacttcggctatgttggactaaaagttgattttcatttaatcactatacttgcctgctcttgctttgcttcctcttctatttgctttcttgttagctgccactacggaatcaagaaaagatccaggggaatattggaaaatgatcatgaaagatcaggaaatgccagaaggacttcaaggtcttgtttcatttcaatctgaaaataaccctaagactcaagagcagcttggtaagggttccaaaaaccattgtgaagagtctctagttacaaagtcactgttaacttgtgtatttgtaactagagactcttcacaagttaacagtgactttgaacccataccaagtgttaccaaatatgatgatttggaattcaagtcaagcattatcaagaacgatgattttgaatcgagaccaagtgttactaagtatgatgattttgaactcaagtcaagcgttaccaagaacaatgattttgaaccgagaccaagtgttaccaaatatgatgattttgaactcaggtcaagcgttaccgagaatgatgattttgaaccgagaccaaatattagcaagtatgatgactttgaactcaggtcaagcgttaccgagaatgatgattttgaatcgagaccaagtgttaccaaatatgatgatttagaactcaaatcaagcattaccaaaaacgatgattttgaaccgagaccaaatattagcaagtatgatgactttgcatccaggtcaaataccaagtacgattctgaacctaaagcaagtgctaccaagtatagtgattaaatgaaaatcaagtaattgtataatacagtcgaagaaaatcgtgctccatatcaatgtatcctatgaataaatagggtgtgaagtattatagattttgaataacttcggctatgttggactaaaagttgggaaaaaaaaaaaaaaaaaaaaaaaaaattaaaaaaaaattaacc

SEQ ID NO: 103116 - DNA, 405 bp, Glycine max
  Clone ID: PAT_MRT3847_64130C.1
ggctcgagctcctatagaatcctctggttattccatatccccgtttgccttcactctagaagcgcgattcatttctaccaacacaagaagcatggctgccatatcaataccttttgacatgaaagcttggacatactatgagtatggaagaaccaacgaagttcttaagaataatcagagagtggctatgcctgatgagaaggaagaccagcctctcgtgaaggacgatgatgctttccttaacgccattgatcataagataatggcaggctattttaagaacagggactgctatttacctactgctccgtgctatgatgctgctggagcggtggataaagtgggaagagaagtgaataaatgtaaaggtggagatgaagaatatggggatatcaatgagaaagc

SEQ ID NO: 103117 - DNA, 1038 bp, Glycine max
  Clone ID: PAT_MRT3847_64131C.1
aatccctcatttgcacgcagtttcatgcacttaaaaagatttcttttaaaagaataaattatagacaaagtatacataaccacgcaatttacaaattcactgtaacacatctcgccaccacatcaccggcaatggcgccacccatcgcggcacaaatcctggccttctccctccttgtcaccgtcgtctccgccgccgaaaccggttaccacaaccatactgtcggtggcgccgccggctggtccttcaactccaccaccaacacaaccgccaccaactactcttcttgggcttctactcaaaccttcgaccttggcgattatctcattttcaatacgaactcgaaccaaacggtggttcagacatacaacaagacgacctatctgaactgcaccgcctatgattccgacaacggaaccttcgtgtacaacggcggaagccgtggtttcggcgaagcgttgaccgttgctgtgccgttgaccatagttggaccgaattacttcttctccgacgccggcgacggcgtgcagtgccagcacggcttggcgttcgagattgccgtcctgcgcggtctcggcttgccgccgagtctcaaccagccgcctccgccgccgtaccaggagccgccgggtcccgatgccgctcagtctccgccgatcacggtggcacagtctcccagcggcagcgctttcgcgaacctcgcagacctgcgcgtggttgtttacggcatcgttacggggttgctgctgcagtttctgtgaggaggaataggttagcttacggtgggtgcgcaatattggatattttttgttacagctcagagtttccgcggacggcgaaatattggacttgttttttatcatttcctttcacatttcgttcatttgtgagtttttttttttttttttaattctttatagttaacagtattttggataagaagatcctatgctttttcttaggggaactgtagagaagtggaagttgttgtaatttttggttgttgcccgatacttggaataataatattttctgggc

SEQ ID NO: 103118 - DNA, 213 bp, Glycine max
  Clone ID: PAT_MRT3847_64132C.1
aaacttttatttgcaaaaccatgtatatattggggttatgtatcattgggtttagcaaaaggtctattgctggttagcatcttggttgtattattctgaaatctgaggttatcatatcttctcaatatttagaataaaatttccagggaatttgtgatcaaatcaattttccttctgtaggaagaagagctgtatgaaattgacattcctctc

SEQ ID NO: 103119 - DNA, 183 bp, Glycine max
  Clone ID: PAT_MRT3847_64133C.1
cgatggttcccccttttgtcttatctgaaggccacgatcaacctggcgctggagatgagggtatgtttggctagctgttgtgctgcctctaccctgacaaaatatcgcatctttatatctgatctcatctcatcctatcactgtgctcaactaaatctcttgtaagaagctaaattaaccttg

SEQ ID NO: 103120 - DNA, 183 bp, Glycine max
  unsure (1)..(183): unsure at all n locations
  Clone ID: PAT_MRT3847_64134C.1
gtcttattttgtgaattatntgtntccttgccttagcaaaatgattatgacttatgagatgaatgaccanaatcctgtgcngttttgatttaaggtattctacaaactcatcctgcattngcatatattcaagactgctcagttaacctatacacnattnctctgctcctatntatttcnntc

SEQ ID NO: 103121 - DNA, 416 bp, Glycine max
  Clone ID: PAT_MRT3847_64135C.1
ctcgagccgattcggctcgaggagaaagagaagtgtgtagttggtgaagtttttgagaagaatatggaacgaagtggcggaatggtaacggggtcgcatgaaaggaacgaacttgttagagttagacacggttctgacagtggggtcggtgtcttttggctttctttcaacactttttttgcttcatgggacttttgatgaagactatgttttgtgttttttctcaattggctctcagaattttggtctttcactgtgtgtgattgacttcaaagtttgaatttttatgcttgcaatggaaatgggtcatgcaaagtttattttttaaaaatattatgtaggggggggcttgtttttgttttttccttgctttaagggttggggtggggtaatttgtgcattctttttgtgggttg

SEQ ID NO: 103122 - DNA, 330 bp, Glycine max
  Clone ID: PAT_MRT3847_64136C.1
tcactgtatgacgtcctcctgtctttggggggggggggggggcagaagcagcgcatgagtaagttgcacataaaggtgccattagacagtggagatggaaatagagaggtctccaatgcaaaaatagagacaggagttaggaaaccagagtggagcaatggagttagctggctgtcccttcaaggttcactggatcgatctcgctagcatcacgtagaccgtggtgagccgcatcttgataggtaaggtacgcctatctctcgggataatcggtgcatcccgaaaatttgcatgggatttaatggacgcattggcgtagatagattatgg

SEQ ID NO: 103123 - DNA, 137 bp, Glycine max
  Clone ID: PAT_MRT3847_64137C.1
tttctgaaaaaaaatatactcaagtccttaacgcgtaatatttttttgtcgcgtaacatattggctaatcaatattgtatgctgcttaaggtaattcaagtcctactttcctttacgtttttgcctaaccttttttt

SEQ ID NO: 103124 - DNA, 284 bp, Glycine max
  Clone ID: PAT_MRT3847_64138C.1
atcttatatactataccattcataatattactacttcatacaacttactattcctctgagaatgcatacaacctgactgggacatgctttatataagatccaatcttacttactcttgtatattaattatttattaatctacctgatcttctatcaacaattatatattcgcttcatgacaacataagaactttgaaatcccagacattacacccattaatagactatcatgctataactctttcaacagctagcatgttctatatatatgtacatacactata

SEQ ID NO: 103125 - DNA, 325 bp, Glycine max
  unsure (1)..(325): unsure at all n locations
  Clone ID: PAT_MRT3847_64139C.1
ngtcgcangcacgcgtacgtaagctcggaattcggctcgagncncnatnnggnagccccanancgtcccgtgcaaggttacggggaagtgcggntccgttaccgttaggntngttcccgcnccgngagnttcgaggatcgtggcggtngggttcccangaaggtnntnnagntcccggggnttnatgatctttnaacctcctccatagggnccntcangaannncggnngnttngttaaggccacntttgaangcntaatgaaanttntggattcccnncagcaaattttgnnnganntcgcggtccngaggtccttncatacnn

SEQ ID NO: 103126 - DNA, 2030 bp, Glycine max
  Clone ID: PAT_MRT3847_6413C.1
taaacgcgatcgaggttcaatggaatattgaactaacgcgttctatatattattcttttgacaatgaggcctgctcttgctttgcatcctccttctatttgctttcacgttagttgccaccgagattcattcttcaccaaaacttcgcaaagaaacactacacatccatggcaactgctggcgtgcaagaagttcgtgttccccctctaacttccacctctgagccaccttctctctttgacggaaccaccaggttgtacatcagttatatttgtccctatgcgcagcgtgtttggatcactcggaactataagggactacaagacaagatcaaactggttcctattgacctacaaaacaggcctgcttggtataaggagaaagtctaccctgaaaacaaggtgccatcattggagcacaatggaaaggtcttgggtgaaagtctcgatttggtcaaatacatagatgacaactttgaagggccgtctctagttcccagtgatcctgccaagaaagagtttggtgaggagttgatttcccatgttgatacattcaccaaagagctgtattctgcattgaaaggagatccaatacatcaagccggtcctgcctttgattacttagagaatgctcttggtaaatttggtgatgggccattctttcttggtcaattcagctgggtggatattgcttatgttccatttgttgaaagattccagctcgtctttgctgatgtgttcaagcatgatataactgaaggaagacctaaacttgcaacatggattgaggaagtgaacagagcgaaaggcgttctatatattattgaattgacaatgaggcctgctcttgctttgcttcctcttctatttgctttcttgttagctgccactacggaatcaagaaaagatccaggggaatattggaaaatgatcatgaaagatcaggaaatgccagaaggacttcaaggtcttgtttcatttcaatctgaaaataaccctaagactcaagagcagcttggtaaaggttccaaaaaccattgtgaagagtctctagttacaaatacacaagttaacagtgacttcgaacccataccaagtgttaccaaatatgatgatttggaattcaagtcaagcattatcaagaacgatgattttgaatcgagaccaagtgttactaagtatgatgattttgaactcaagtcaagcgttaccaagaacaatgattttgaaccgagaccaagtgctaccaaatatgatgattttgaactcaggtcaagcgttaccgagaatgatgattttgaaccgagaccaaatattagcaagtatgatgactttgaactcaggtcaagcgttaccgagaatgatgattttgaatcgagaccaagtgttaccaaatatgatgatttagaactcaaatcaagcattaccaaaaacgatgattttgaaccgagaccaaatattagcaagtatgatgactttgcatccaggtcaaataccaagtacgattctgaacctaaagcaagtgctaccaagtatagtgattaaatgaaaatcaagtaattgtataatacagtcgaagaaaatcgtgctccatatcaatgtatcctatgaataaatagggtgtgaagtattatagattttgaataacttcggctatgttggactaaaagttggaaaaataaaaatatatatttgctttaattaaaaaaaaaaaaaaaaaaaaaaaaaaaaaattatatatatttgcttttttttacacagacaagagctgatccaaaggaaatcgttgatcttttcaagaaacgttttttggctcaacagtgaaaatttggttgcagtgggtatcctctaagttgtagattgttgtcaataaagtgttgtgtgtttatcggatgcttctttagtcacatgttgttttgtcactttgtctgctagagctgcaaataatttgatttcagggtcggtgatgtttatgtaccagcttgtctgatgtcagactaatccaatgatgcttgtgtatcggcttttaat

SEQ ID NO: 103127 - DNA, 519 bp, Glycine max
  unsure (1)..(519): unsure at all n locations
  Clone ID: PAT_MRT3847_64140C.1
gccgcccttttttttnttttttttttttatttttttttttttttcgacnngagaggatcccactgccaaagagggattttttatacgggaaacgaccccccaaaccaaaaaaccaacattacaactaaaataatagtttactcacaaaaaacaaagaatcctaaaaaaaacatatctgtctaaactaaaacacacaaacgtaaaagcccttcaaaaaccccttataaaaaaaaacgcaaaaacttcaaacatacaattagccctaagggttccccatcaaaatttaaaaaaaaaattgacataaccacccccacataatttgaaaaaagctttataaacatcttaccttttaacaaatgtaacaaacccaaacccttttttaaagcaaagtttttaataaaaagaaaaaaaaacttttaagacagaaccaaaaggaccgaacacctccaaaaaataaaagctttttatgagcctcaaaaaaagttgttaccctcaaaaaaaaataacatccctgcccca

SEQ ID NO: 103128 - DNA, 427 bp, Glycine max
  Clone ID: PAT_MRT3847_64141C.1
cttttgtcctactttggaaatggttatgagataatggagaaaaagttttcttgaatgtgaatccacaaaagtgagtctttagctatgaaaccgatataaaaaaaaattgaaccaattcagagttgatgaaaaccagtcaataatcagtatacaattggttaaaatcaaatcgatgttaaattagtctttttaatttttaatttttatttcatctaaaatatttttaaaaataaaaaaatacattcttaaatattcctcttgagtataaattatttttctcacctattcttaatttttatgttatgacacatataatttagtcatttattttgtgattctacattatttatcatttaaaatattatataatattaaaaatttaaaactaattcaattacaactaaaccattgtgttaatcattctatc

SEQ ID NO: 103129 - DNA, 245 bp, Glycine max
  Clone ID: PAT_MRT3847_64142C.1
gagttgcatacgttcaaccctacttctctacttacctttacatccgcactgtctcctctcctagagccataagggttcgcattctgacaccaaatggcggactaaaacgcatggaggagatcatcaagaaccattcggacccaactaaagacgcgtctcagatctggctctatcattcagcttgacccaagctacaagttggaaatgccaaaagagcttatcttagaagaaaggatgagctcatt

SEQ ID NO: 103130 - DNA, 383 bp, Glycine max
  unsure (1)..(383): unsure at all n locations
  Clone ID: PAT_MRT3847_64143C.1
ccctcgcgtccggcaggatgttcaggttacaataggtcctgggaacacattnctgagaggaaataaaccaattaattgaaacttgaacattctacattgttagggtgagaaaaaacctattaaagtaatgaaatttactaatttttgttggatacatacttcatgaactaatattttatccatttttatattatttgctgaacagttttctataaatataggactttataatcataatttatattcttctgtatatgttatcatctaattgtataatttcaaattttaattgttgaaaaaattgtataatgaattcactttttctaatttataataaaaatttatttaataaaaaagaaaaatatttttttttatttaaaggt

SEQ ID NO: 103131 - DNA, 546 bp, Glycine max
  Clone ID: PAT_MRT3847_64144C.1
gaagaagttcattgcgttttgtagaggctctgaacaaaaaataatatgagaagaggctcgaatcgtctctctaaatcgaaacaactcgctgcattcgcaagcctagaaaccaaacttcgcgccaatgcgcttcgctcttactgcgatcaatcgcaccttcgccgccaaaaccgtccagggccgcttgtgcagtacaggagtctagttgatcaagggaagttgcggcacgatccttcccatagagtgttgcatcggagcttgagaatttgcttgcaaggttggagcagtacgagaaagatagggcagaggttcgtgtgaatctagcgtattgggagaagcagcgggagaatgagcgtcggaggcttctcatggaggaagttgagctgcaccagaacgacgagtactggtggaagcggttgaacaataagcttaccggaaggtgggaatcccggaaaagacccaaaaatatggagtcaggggtagggaaatgggtatcatatctcacacgagagaagaagtgggatcactagttggtcaccgtccact

SEQ ID NO: 103132 - DNA, 298 bp, Glycine max
  unsure (1)..(298): unsure at all n locations
  Clone ID: PAT_MRT3847_64145C.1
cgcgtattctatacaccggttggttcggataccggaaagcatggctttgaagggggagaaaaccactagaggacgcaagcacaaacgcaaggacctttttctggaactgtctaactgtcaggcgagcgagctggacgctgatgacatgaccaagctgatgggcgctcgcactgaatgacgcnctaaactccggcgaatgggacgccgtattaaagatcgcctccacatgactatagagacggttgcatggatcgagactcacaacagtccttgatgcccatgctcactggtgattctg

SEQ ID NO: 103133 - DNA, 490 bp, Glycine max
  Clone ID: PAT_MRT3847_64146C.1
cccacgcgtccgtgcaaagaaaacattactccaattgtgcctacaagtaatattcaaacagatgttttggctgtgggaattatagcggggcaaaagactgatttacaggctgttgaagaaaattaccagtatagagagcatgtgcaaaggtcaccaagagctgatatggaacctaatgatcacaatatgaagaatgatttgcttgctcggcagaaccttatgtcttgtccagccagtagtgatgaagtcactacaagtaatttgaataacgaagtgattgaggatgtacctgatgcattatcagatatgttttctcaagggatggcatctgaagtaccggatcaaagggttttagaatttacagcaatcaacgatgaaaatatttgtggggttgaagaaaaatccagattacaacatatctattggtggacatggttctgacttaaatacttcatcaatacagcagactagaaaaaatatgaagtcaggt

SEQ ID NO: 103134 - DNA, 475 bp, Glycine max
  Clone ID: PAT_MRT3847_64147C.1
aaaaaaggggcaacatatcccctttttgttttggcgggccacaaatggtaccgcctttgaaaatttttccataaactttttccaaggttatacctattggtaggaaagacatcgttctgggacaaaaggaatccttcacattttaggaagggggacgggttaatttacaaaaattttaatcaaggcaatcatggttcacaattttagggggccagagggttttccaccttggaattttttccttggtatggagcttcctgattcctccataaaaaccatttatttcattggctttttttataagaagctttttggttaacaagggttggctccatttggacccaacaggggactgggggaaccccaaaatcactttttttttttagggacaaggggaaggggtcccatggccttgacattggtccaaatgaccaatgaccccctacccccacccctaggggaattctttgttttt

SEQ ID NO: 103135 - DNA, 1494 bp, Glycine max
  Clone ID: PAT_MRT3847_64148C.1
attattttatattattttttgtctatagtaagtttgaaaattaggtactacatcatatgcatgatcagcatttgtaactgctcctctgaatttgtctgagtctgagctgttgattctcccaacacaactaaaaaaaagaagaaaaacttagagtggtagttgtaggaaagcaagaacagtgaagtgttctcctaattcagtgagtgaggttctgaattcttcaacttgagatgatggcatcatttgcagggactactcagaagtgcaaagcatgtgagaagactgtgtatttggtggatcagctcactgctgacaacaagatctatcacaaatcatgtttcagatgctaccactgcaagggtacccttaagttgagtaactattgttcctttgagggtgtgttatactgtaagcctcattttgatcaactctttaagaagactggcagcttggacaaaagttttgaaggtattccaagaactgctagacttgaaagatctactgatcaggtccaaaccaatagcaaggtttcaaatttgtttgctggaactcaggaaaaatgtgttgcttgcaagaaaacagtttacccaattgaaaaggtagctgttgatggaacatcttaccataaggcttgtttcaggtgcactcatggggggtgtgtaattagcccctcaaattacgttgcccatgaacatcgtctttattgtaggcaccatcacactcagttgttcaagcagaaaggtaacttcagccaacttgacaagcaagaaaatgatgaaggggtgactgagaacacaataactgagtaatagcatgcatgcaactttcaagttactttggcaatacaagttcagttggtgactcattttaaggcatcaaatgcccttgtctcaatccacattaaattctgtttactgtgtatgtgaaaagttttgtgagacaaattttggggttgataattgagaagaattagtagatagtttggcttaattatacggctgaccagtctgcatttttctttgaagcttaatgaagtttgtatttttcattattgtgataaaatctggttttctctgtgtatttactgttgcttttggttattcgcataatatttcaaaaaaagctaaaaaaaaaaaaaattttacaatttgccaattgcaaattcttgatgtcagcactctacatgctgctctgccacattccactgctgttagaatcatctcaaattctcgtttgtatacacgtaaatcacttatctattagtaggattttaatgtatttcaaatatttgtataagtagaaatttctttctgtcatctgggttttggttcaattatgtatgtggtttaacattcatagctgcatgaccaccaagttctcaaatactgtaaatagctgccaaaaaatatatccaacaacaaaaataacaaaaataaattcgcattttacatcggttctagggaaaaaaaattccctctcttcttcaacgagtct

SEQ ID NO: 103136 - DNA, 364 bp, Glycine max
  Clone ID: PAT_MRT3847_64149C.1
tttccgtcatcactgtatgacgtcctccttctttggggggggggggggggggggggggggggggggggggaacctatatagttaagagagagcctaggaaagaataatagccaaaggtatatgtaacgtagacgggtgtagtcgggtaccgggaggggggggtttgtatgggttccccataaacgggcgcctgaggcgttttaataggcggcggcatgcccttgcgtaccgcattattacggggggtgaccccatttgggttctgcataaggcttcgaataaaaaatttaaataccggcaatagccttaattgattaggtgcccatgtgggtattggtaatgtacgtaaacattgtcccgtagt

SEQ ID NO: 103137 - DNA, 1046 bp, Glycine max
  unsure (1)..(1046): unsure at all n locations
  Clone ID: PAT_MRT3847_6414C.1
cgacactgaagctttgtntttagagatagggtcgatgaccacgttgctgcatcccgtgcgtggaagtcntggaaaaatcaggcacaacaatctaaaggcaaagtctggaatttgttcaagcttcgctttctcacacctccaactctgtttcttcccttgccagatcgctcctccccgcacctcgtcgtcttaagcttcatccttccaacaagctctacttcccttagccgggcaagcaggctaagagtgccgtcaggattaaaaacaccagcaaatccaatgtagctttcaagtttcaaacaaatgcacccaagagctgtttcatgcgacctcctgggggaattctagcacctggcgagagtataattgcaactgtgttcaagtttatagagcatccactgaataatgaaaagccacaaaaaactggagtcaaatttaaaatcacgagcttgaaggtcaaaggaccaattgattatgtccctgaaatgtttgatgagctgaaggatcaagtaacagtggagcagattttgcaggttgtttttctggatccagagcgtagctgtcctgctttggaaaaactgaagcttcagctggctgaggctgatgctgctgttgttgaggcacgtaagagagccccagaagatgcaggtcctaagattctcggcgaagggcttgtcatagatgaatggaaagagaggagggaaagatacctggccaagcagcagggtgaagtagtagtggactctatatagctaagtttgagtaggaaattgcgttactgcggggaagatgactttagggaaacaattatatttaatcacaaagtttggcttagagaaaattgtggtgaataagtgtgaagtctccttttgaggaaactatgattggatgagaacatcccctgttatgtacataagtgtcagtgtcatttggtttcatggaatgatattttgacggatgatttgctgtcatggcatggtttcatgtcaaatgataattgttgagattttcatccagaaaaagggttgattcatgatatacaagac

SEQ ID NO: 103138 - DNA, 658 bp, Glycine max
  Clone ID: PAT_MRT3847_64150C.1
atgaaagtttcaaaaatgaaattgagtttgacccttgtctgtatgataaagatcagtctagcagttcaagtgcatgtggaggattgcctgagcaatcgtttcaacaaacggaactttcgtgtgatcaccaagcttcaagaccaatcaactttagaacagaaggatgacattttcttgtacaagcgtaacttctgggactaagatacttggttttatgcctggattctgtacttgaagattttccatgtgtggaaggcttccccaatctttcttttaccctgaaaaccagtgcagcaacacaactggtggagtgcataaagatattgcagcttcagggtttggtccatgtaactcagactccaaggattgcctggatatagagttcaatgaagatgacatcatggttgagcagttatctcttgaggaatttacactgcagggttttgagatgttaattgcacagttcactgagaagactcgtatttgtttccgagatgccctttaccgtcttgctagaaatacaaaacaacatgtagtagaggacctggatggagatcttaacatgcatcaggaaatgccagactcagtttacaatgataccatgaggtctgaggacagtaaaccaatggaatcagagaccaacagtattgacagagca

SEQ ID NO: 103139 - DNA, 568 bp, Glycine max
  Clone ID: PAT_MRT3847_64151C.1
tgagagtgccactgagcttgtgttgcaatggcagcaggtggcgccgcacaccgatgacaggctcttcatgaggctgctgttgcagccagtgagttccaaggttgtgaagggccagaggaccatcagagccactgtcatggctttgtttcttggaggggctgatgaggttgccacattgatggggaaggagtttcctgctcttggcctcagcaaggagaattgcactgaattgagttggattgattctgtgctttggtggggtaatttcgacaataccactaagcctgatgcactgcttgatagggatctcaattcagcaagtttcctcaagaggaaatctgattatgtgcagaaaccaattcccaaaaaggggttggaggggatatgggagaagatgattgaattggggaaaactggatttgttttcaatccttatggagggaagatgagtgaggtttcgtctgatgcgacgccatttcctcaccgtgcagggaatctgttcaagattcagtactccgtgaatggggatgatcctggagttgaattggaaaaaattttactagtccag

SEQ ID NO: 103140 - DNA, 2084 bp, Glycine max
  Clone ID: PAT_MRT3847_64152C.1
ctcgagccgttcagctaacctcttatcaagttttgttcattactgactactgtgttctccaactgggtctgttttgttttcatcaatcaaaattcagaagctcggttctctcacttttctgtacaaaagccatagaaagactatttgggatggactggtactatggatgtgaaagtagtgatcttcttgtatcaaaagatcaagaaaatttgttggaaaggcatccttcaccagaaaattggtcagaatggggaataaatgcacctgaaggctttaattcaccccaggagtatttgatcatggacacagacgaaacagaagtagaattcaatttcattgatgaaagtttgaataatgtaattgagtttgaccattgtcagtatgataaagatctgtctagcagttcaagtgcatgtggaggatttgctgagcaatcgtttcaacaaatggcacttacgtgtgatcaccagcttcaagaccgatcaactttcaaacacacggatgacattttcttgtacaagcgtaacttctgggactaagatacttggttttatgcctgtatgataatgaaatcatgtagcatctgaaatgctttaaccttgtagcaagtccagtacaaattgaatggctctgtggtgtttttgcataccaaaattcaccatatttatcataatgattggagccaatagagactaacacaatcctacttatttgttatcggaactctataagcgtgaacctgctattgcatgggattctgtacttgaagattttccatgtgttgaaaacctacacaaatcattctcttaccttgaaaaccaatgcagtaacacaactggtggggttcagaaagatattgcagcttcagggtttgttccatgcaactcggactccaaggattgcctggatatagaggatcatgcagtcaaagtcttggacacttttgagcagtccaatggagatgacaccatgcttgagcagttatctcttgaggaatatacactgcaggcttttgagatgttaattgcacagttcactgagaagactcgtatttctttccgagatgccctgtaccgccttgctagaaatacaaaacaacatgtaatagaggaccttgatggaggtcttaacatgcaccaggaaatgccagactcagtttaccatgaaaccatgaggtctgaggacaataaaccaatggaatcagagagcaacagtgttgacagagcagttgcaaatctcatgttcaacaagatggaaattaacatactagatcttccccttacaacactagtaaacttgaagcaagaagtaattggaagtaaatgtctactaggaaaaagctcaaaatccttggatgtgacccaataatctcactctccacacccggaaaagttacccacctatgctgaggttccaaggtttgaaccagaggaccaacaagaagccccggaatcatatattgcctatggttgagtttggttaagtaatgttattgtgagctccttcctggtagctaaaccaaaaataagaaaaaatcaatttcctgtaattgtgcaaccctttaagataaaagaggtaaggatatctgacaattttggctcctgtgatcttacgtatatatatgcttttgtacttgaattatttgttctgtagcttctatccaaggtctagcagtatccatcaagctacatcttgattttgattggaatgtaaatgattgaattgatcaactagaagttagcaaagatagggtcagttcaggattcttaggttttgtacactttgatatttttcttggagtgcaaatgatggaattgatcaactgtagcaagtagcaaaactggggtcacttcaggattcttgtgtgttgtacttgtacccttgatatgttccttggagtgcaaatgattgaattgatcaaccagcaatttgcagaggtagggtcacttcagcattcttaggtgttgtaccccttgatattttgcttggaatttaagtgtgaatttatcaactagctactagaaaaactgggttcaggattctttttgatattttgtttgagtgtataaaagtgaatttatcag

SEQ ID NO: 103141 - DNA, 248 bp, Glycine max
  Clone ID: PAT_MRT3847_64153C.1
agacgacagaagggatagttttcattaccataggctatatgtttaaaaatgtgataagtgataacttctaagcttgtagttagactgagatttaattcaaagtccatttatatatataacctatagtttgttcattgctcattatttgttaagtttacctggtgaagctcaggttaccaaactgagtgttagaagtcttcatatttgtcccaggtgattctgtttgttctcatgaataaatgcttcag

SEQ ID NO: 103142 - DNA, 302 bp, Glycine max
  unsure (1)..(302): unsure at all n locations
  Clone ID: PAT_MRT3847_64154C.1
atttttgacgaggtcctgggtctcacagaaactgagagagggagggcggcgggccctgggaacgagagcccatttgctcatgtgtgttgcgacttacggccggcttatgcttccactatggaagccatttctgctcccacagaggctctaaaatcagaaacctgtgtctacacagggaccggattatagtaaccggactcttcgtcaacagctgacgtggatccaaactgtccaactgattcccatgncatgcatagggtttctcctccttgatttgggagacaatctgcatcacacatgct

SEQ ID NO: 103143 - DNA, 203 bp, Glycine max
  Clone ID: PAT_MRT3847_64155C.1
tttgtttctttttcttttggggtttataagaccaccacagaaaccttatcatatattgtaatctcgggaatgcactacaattcactattttataaatttggcaaaattgaagggcccaacggtttactataaccattagaactgaaacacaataggggtttttgagcagcatgacaaatgaacctaacatggaattttaaaaa

SEQ ID NO: 103144 - DNA, 422 bp, Glycine max
  Clone ID: PAT_MRT3847_64156C.1
aattcggctcgagcaaagataaacccaaaacctctgataactacaagtgaagatctaacccataaaaaattattttactggtattcaggggttctcactgtggggacatcccaagtaaattcaaacatgttgggtgaagcctactcataagtgaatcatgagaaggggatggcacagtatggtaaggtgtacaaggatgctggcgagaaggaaaaacgattccaaatatttaaaaacaatgtgcacttaattgagtctttgcatgctgatggggacaaacctttcaaccttagcattaaccaatttgatgaccttcataatgaaaaacttaaggctgtacttattaatgggcagaagaaggaacattacgtgcggacaggaacagcaacagaagcattgttaagtatgacagtgtgactagg

SEQ ID NO: 103145 - DNA, 1644 bp, Glycine max
  Clone ID: PAT_MRT3847_64157C.1
tgaaaccaaatatattgatatggtgaaacatgtgatcaacattagagtcctaggagtcctagaagagctaaggctgtctgagcgtagcatctacaaggttccttgcacactccgaaaggtgaaggaggaatcctatactcccctttgcatctcaataggcccaattcatctcggccatcatgaattcggaccagtgccagagtacaaacaaacataattccaattcttcttgaaacgtgtctcatatgaagccatgaagacttataaacactaccttgagaccaatgaaaaacagattcgacaatgctatgcagagaaattccctggcatggcccaagagaaattcgtggacatgatgttgttggatgctgtgttcatcatggaacttttgttgagaaactgtgaattgaaatcacaaagtttcaagcacgagcaaaaacacaaggaatccaaatcgtttcgagggagaaacagtgaagatctcatcatgacacagtcctggctcagcaggaacatcaccagggacttgatccttatagaaaatcaaatccctttctttgtgctacagaaactctatgatgacgttgtcacttgtgtcaaagagaaggaagaacaacacaccagctttgttgatctcaccattgagtactttgcattctatgacagtcagatgtcttctcttaatgaaaatgaaaccaagaaacactatttctgtggcttactccgcaagtcaaagagcaaagatgagagtccaaaacccttcactgttgttcgtagaagcggttctgaggaaccttgtatatcaaagagcgaagataatggttccaaggaaacttgtaagtcagaaaacaaaaatagttgttgtaaaccagaacacttcactgatctgataaggtggttttaccttcccactgagtgcaatattggtcatgctgatcaggttctaagaactgcaacaaagttacaagactcaggagtgagctttgagaaagatgatatggatggaaggttactagacataacctttgacaagacgcctattctgagctcatttctttgctttggttgctctccactgttgaaccaattcaaagcacgtgtgaggatcccccaattgaaggtggaccacaacactgaatgcattttcagaaatctcattgcctttgagcagtgtcactatcctgagaagccctacatttgcaactacgtttctcttattgactctctcatacacactcagcttgatgtggagttgctggttgagaaggaagtgattgtgcatgaattggggagtcacaaggacgtggcgtctcttgttaatggtctatgcaaacatgttgtcacaaactcgacgtgttactctgacactataaataagctcaacgaccattacatgaacgattggaaccacaccgtagcagcgttgaggttggtgtacttccgagacctttggagggcaagtggcactgtggtgggcattgttgtgctggttttcgctgtcttccaattcctccgtgtttggcgttatctcttctagaatgtacaaaatgtaactcagtttcgattattgtatatatggctttcatgcttcatcatgttactcttaatattaatactataaacctgtgttagttgttatgtcag

SEQ ID NO: 103146 - DNA, 508 bp, Glycine max
  Clone ID: PAT_MRT3847_64158C.1
taggaaacaagatgtggtctggataacacgcatgagaaattagccaacggccttcgaacttttcacaggttcagcttgcatgggtctttcaagaactatcaacgattattgcatatggagatgggacaatatacctctgactgatctcatgtgcgacactaatttcatatcgtcccctgaagggtactttcacactgacgtgcgtaatgctcaggagttcaagaacacaactgtgaacagcgatcttcacatcatcgcgtgggacaatcctcccaggcaacacccccactacctttctctcgatgacatgaacaggatggttgacatgcagcgcccccttcgcgagaaattccatggacatgatcctgtcttggacacaatcgacgcagagctattatctagaggtcctgggatagtcgctcactgtggctggtgcataggaagcaggctgaatcggattgacccttgtgctgtagtcggtaatactactgttctcaggcctgtgcca

SEQ ID NO: 103147 - DNA, 434 bp, Glycine max
  Clone ID: PAT_MRT3847_64159C.1
aaaccctcacctaaacttttttgaatttttatccatataaatgggcaaaaagttttatgtacatttttaagaccattggtggatttcaaataaaatccttactaaaatattgaagggccttaaaaagtttcctttaccttaagctgtacccaccctgagcagggggcttggaaaaaaaaaccccccgggaaaaacatcactgaaaaatttggccaggttcataaacattgaacaaaaattttttttccttttcccacgtttaaacgaataaaaaaaaaaagatttttttttttgacaaaaaaaaaaaaaaaaaccaaaaaacttcctattattttccggaaaaaaagcttttgattaattggaacccttttgaggacctggggattgctactactggggggggcgctgttattgtttggattaccccccccgat

SEQ ID NO: 103148 - DNA, 384 bp, Glycine max
  Clone ID: PAT_MRT3847_6415C.1
ggaaagccaaaatgaaaaattttttttatttagagggtaacctttccaaagggaaccccttttttgggtccctttgggggtttaaagttcagaccaccctaacccgaattttgaacattggctaaaaattccaaatgaaagggcgggttttcccacaataaaaaaaaatttcaactccctaatcacagattcctttaaaaaaaacctccaagtttttttttgggggaacgggggaaaaaacttcccccattccaaaaacctaggggcggttaatggaacggaatcaaccaaaaaaggaccccccttttggctggggttttggaggaatggcaaaaaaattgcccccacccaccaggggggcacttggggaatattttttttttt

SEQ ID NO: 103149 - DNA, 343 bp, Glycine max
  Clone ID: PAT_MRT3847_64160C.1
gcatcactctcttcatcttcgatttccattgcgacgcgtgactttttcatcttctttctcgtcattttcttcgctcttcgatcttcgtcaggggactgctccgactaccagcagtaccactcactggtggccacgatcggacgcttacacgattcccaaagctctcacaacagcgtctaaactgacaccctcgctcgattcgccgtagtcgatcacttcagatggcataattcgcttctggagtttgctacggtggttatggcacaggaacaggttgttgctggaaccctgcatcatcttaaccttgaggctatttacgctggtcacaacaagctctatgaag

SEQ ID NO: 103150 - DNA, 220 bp, Glycine max
  Clone ID: PAT_MRT3847_64161C.1
ttccaccttcactggaatgtacggctgcaagctctcctcctccgtcgccatctcctccttcccctcccgccgacgctacaacgccgccgttctggcataagtcacccacgccgccagggtctccgccatggccaaggagttgcacttaaaccaagacggcaccgcaattaaaaagctccaacatggtgtgaacagactacgagatctggatggggtcact

SEQ ID NO: 103151 - DNA, 336 bp, Glycine max
  Clone ID: PAT_MRT3847_64162C.1
gttcttgcaattcgagctcatgaatttgaaaaacatgatgctcatgaaaggcttatggttcaaagtcctgccgttgacaagctagattgtacgtatggctattgggtcgcagaatttatgatccttagacaaagggttagggtagatgttaaacttcttactgaaggtaagttttgtgagggtaagcatcttcctgggtttcatgttagtgcatgggaaatttatgtagttcaaatacccctaatggcacacaaggaaagtctgccttctagtgcaagagatttcagaactgctttggagagtaaaaatatctagactcaagctactgcattgcat

SEQ ID NO: 103152 - DNA, 384 bp, Glycine max
  Clone ID: PAT_MRT3847_64163C.1
tttgtttgcacctgcggcgtattcatatttacggctatttttacggctgctgatatgactgctggactaaacacgggactaatctcgctttgacagttgatgagacgatggaggtgatgatagatgggggcattcctgctggcgttcttgctgagggagctgatgaatgagctaatcatgttgctaatgaaggccttaatgatcagattactgctgatgacacggcggatgacactaaggttaatacttaggctaatatgatgaaccttatactgagcgttgttggtgatgttgaacttgatactgatgggaagactgatgaggggaagcacattgctgagtacaatactagagctagggaaaatgctggggaacaaattccct

SEQ ID NO: 103153 - DNA, 349 bp, Glycine max
  Clone ID: PAT_MRT3847_64164C.1
tgacatctgtgttatgtccggtgtgaggcgctcttattactattgtacagaatggggccatggcattcttgaagatatggattggctaggcatgaacttgaagttctgatctacttatgcgctggaagaatgaacgtgatgctgcgcttgcgatgcggtaagcctagcttatatgctttattattcatgtggtggagtgttcactgatctacaatcgatccaaggagcgctgcactggagaaaaacatcatggccaaagatattaatgcatcggagacgtagagaattctgcactgggactgaagctgctgctcgagaatgtgaccatctctgtaggacaccatatcca

SEQ ID NO: 103154 - DNA, 2038 bp, Glycine max
  Clone ID: PAT_MRT3847_64165C.1
tggtacgcctgcacctctggaccggacacccacgcgtccgcccacgcgtccgtagtattagtaagagagtgtgtattttcacgcgccaccgctatttatcatggtgcagcaccgcttcctcctcataacctaccccatacaaggccacataaacccctccatccagttcgccaagcgactcgtttccatgggcgtccacttcaccttcgccaccagcctctacctccaccgtcgcatgctcaaaaagcccaccatccccggcctctccttcgccaccttctccgacggctatgacgacggttacaaagccaccgacgactcctccctctcctcctacatgtccgagttgaagcgccgcggctcagagttcctcagaaacataattaccgccgctaaacaagaagggcaacctttcacatgcttagcctacaccatcctgcttccctgggctgcaaaggtggcgcgtgagcttcacattccgggggctcttctgtggattcaagccgccactgtttttgacatctactattactacttccacgaatacggggactcctttaactacaaatcagaccccaccatagagttaccgggtttgccattctctctcacagcacgtgacgttccttccttcctcttaccctccaatatctatagatttgctcttccaaccctccaagaacagtttcagggatcttgacgacgaaaccaacccgataatcctcgtgaacacctttcaggacttggaacccgatgccttgagagcggttgataagttcaccatgataccaattgggccgttgaatattccctctgctttcttggacggtaaagatcccgcggatacttcgtatggcggtgatctcttcgatgcttcaaatgattacgttgaatggttggactcacagcctgagttatctgcggtttatgtttcatttggtacccttgctgtgttggctgatagacagatgaaggagcttgcacgcgcgctgctagattccggatatctcttcttgtgggtcattagagatatgcaaggaatagaagataactgcagagaggaactggagcagaggggtgggggtgcggggagggtctgtcgcatggttccttgggttggtttgtaacgcattgtggatggaattcgactatggaaagtttgggttcgggggttcctatggtggcgtttccgcagtggacagaccaagggacgaatgcaaagatggtgcaagatgtgtggaagacgggggtgagggtggatgataaggtgaatgttgaggaagggatagtggaagccggggagatgaggaagtgtttggatgtggtcatggggagtggaggaaaaggacaggaattcagaaggaatgctgataaatggaaatgcttggccagggaagccgtcacggaaggaggctcttcggatagtaatatgaggacttttctccatgatgttgcaaaatttggacatgattgttttatgtaatgcaacactttaattcttgtttggtagttataaagaaaaaatgaatttggataagaaaactatatgcttcgtgtcagtgagtaaggcagaagaataaaagagtgaagtgtgctttagtctttttaggtatatttgaacatcctaaatagtaaataaaaaatataaatagtatacataatatgatggggaaaaaataaaaaataaaaagttgatgaaatattcaaaataacgagaagtctaaatatcattgttgtttgttgtttggccttttagcatattgaatattccaaatccaccttctatttaaactatcgtgttatgacgtcaaaaagaaaaattgaagaaccggtgggtctaattaggaatgtaaaatgtaaatgaattctgactcgttaaaagtttgattaagtttgtttattaaattcaagctttcggttggatttaattatttaaatgagttaaatttaaattttataagttcaacattaataacttgtgagtagcttatttacatggattctataaaatcatattgtttaacatatttatattagt

SEQ ID NO: 103155 - DNA, 1697 bp, Glycine max
  Clone ID: PAT_MRT3847_64166C.1
gagaactcaaaggcttttcttattcttaatgaaatcattctcacattaaaagatggaaaggatgaaaccaggaaggaagcatatgattacctcttaaatataagttctaccttgagagactcatcattcattggttctattgaaccgtatcacaaactagttagcatgataatgggatatctttctggttcatctccccatataaaaagcggagcagtgtctgcgctgtctgtattgttatacaaggatacaaatcttcctatctccgtttctgatcttgtcccttctcttttatctttgctgcaaacaaaagatgtggaaatcataaaagctgtcttgggttttgttaaagtgatggtatctagcttagaagcaagagaactgcagaatattctctcagaagttattactgaaatcctcccctggtcatctgtttcaagaaatcattttaaatcaaaggtcactgttatatttgaaatattattacggaagtgtggttctgctgctgtcaaactggttaccccagagaaatataaggtttttctcaagacagttctagagaatcgacatggcaaatcaagtgaagcagtcactaatgatacaaaaaatatgcctgaagattcatctgccaagagaccagagcggaggaagcctgaaaattcagataacctagagaaaaattcacttaaggacaacaagagaaagagggacaagaaatttgagacagacatgcctggccaaaaggggtcacttatgtctactagtaatgatggattaagattacccaagagaagtaggtattctaacgataaaaatcctaatgtaggaaggccagaagaaagtgaaaaaggcaagaaaagttggaacaagagtttcactggtggtggtgggaagagaaaggtgaaggtaacaagtacaggaaaggataaagcagcttctcatgtacctatacaaccttccaagtctcacaagctgcaaaggaaattcaaaagaaattgatagacgagtccaatactcaagctggcgatacacttctgagatgtcgtatcgccctgagtttggtggcattgataatgccatttttatacgtaactgcatatataagctgggggataacaaatcaagcattacaagcaggattgtctttcctgctgagcaaccactataatgaggaacttggcacattctttgagcttgatgcctcgagtagggctgagaaaatgaacagatacatactgtatgcatatttttggtgggagaaagatcgtggtgagaaaagctgttgtaatggatgtgtggtcatggttgattgtgtacatggctatgttttgccatcttttgccctcgggaggatttttaaccttgctgttaattcttaccaaatatagtatgtcttaactcttaacaaatgagttaatcttttattatttttacattattttccatatatttgtgaaatagtcaatcaaacataacgcaagaggaccaacaagtcgttggtctgagtgatattgaactcgattttcttaagtaaggtcttatgttcgagtcttgtggatagaaaaaacgtgattgagaggggataatttcattaaaggtgaccacttaggttttttgatgaagattaattatcagtaaagtcagtgaatattttgtaccaataatatggttaaaaaaaatgaggtgagaattccttc

SEQ ID NO: 103156 - DNA, 348 bp, Glycine max
  Clone ID: PAT_MRT3847_64167C.1
aggaaactggggatggatatctatatgacggaaggtgagaggggaatgcacaagagtcgagagatggcacatggacgccaaatgaaaattctattcatctacgtaacggatacagggggggacctatagggtaagaattttacgatataagatgaagcgcattcactgagcgattattccaacgaacatataatcaggctatacttattgctgtcctgcaccactagactatactgccgattcacctgcgccatgcttgaagtgatcaacattaatgagggcacccactatgaaccgcattttgcaataaccaccgatggtcccatcttatagatgagcaatagaacc

SEQ ID NO: 103157 - DNA, 337 bp, Glycine max
  Clone ID: PAT_MRT3847_64168C.1
gtactgccctattacaccatactatgctcttaaaatttgatccatggcctaacttgctcgacttatcagcttgaccactataccttagatatggtatcatgttacacgatcagattcatacgacaaatcttacagattgactgagatgccatagaccagattgatcagatgatcgctcagcgtcacgctcatgactatccttatcggatatggacatggctaatgatgactgagtccttgctataccatgatgacaccgatgatatagtgacagtcgtaagggctatagcaactgtcaaatataatgtggcaacaaacttcgcgactattactccag

SEQ ID NO: 103158 - DNA, 335 bp, Glycine max
  Clone ID: PAT_MRT3847_64169C.1
ccgacgcgtgcagacggctgaaaggggccttacaactgaaactgcttcattgcataattggggatgagaacaaaccttcttcctctagatacgcggaacgatggattgatttcatgctagtgtgacataagctgtttacaacagaggcaaccgatgtttgtcaatcgaaattcgaaagctattgcttattgtttggtatcgaaagaaggaggacgcgcttaaagtgctaggaagatggaacttgtcgcatcttccattaccttggtgtctagaacgaccctaacattgtatacctctacttccaattcatacataaccatatctaaataatacac

SEQ ID NO: 103159 - DNA, 1198 bp, Glycine max
  Clone ID: PAT_MRT3847_6416C.1
ctcgagccgattcggctcgagtgagacttgagttggaagtcatggcgattggtaatgagaatcagccacaacaatctgaaggcaaagtgtggaatttgttcaagcttccctttcgccattcaacttcaactcctcacaatcacaatcaagtttccacctccaattctgtttcttcctttgccaaatcgctcctcccctcaccacgtcgtcttaagcttgatccttccaacaagctctacttcccttatgagccgggcaagcagggtaggagtgccatcaggattaaaaacaccagcaaatccaacgtagctttcaagtttcaaacaaatgcacccaagagttgtttcatgcgccctcctgggggcattctggcaccgggcgagagtataattgcaactgtgttcaagtttatagaacatccattgaataatgaaaagccagaaaaaactggactcaaattcaaaatcacgagcttgaaggtcaaaggaccaattgattatgtccctgaaatgtttgatgagctgaaggatcaagtaacagtggagcagattttgcaggttgtttttcttgatccagagcgtaactgtcctgctttggaaaaactgaagcttcagctggttgaggctgatgctgctgttgaggcacgtaagagagccccagaagatgcaggtcctaagattctcggagaagggctcgtcgtagatgaatggaaagagaggagtgaaagatacctggccaaacagcagggtgaagtggtagtggactctatatagctaagttttgagtaggaaattgtgttactgcgggaaggtgactttagggaaacaattatatttaatcgcaacgtttggcttagcgaaaattaaagtggtgaatgactagcgtgaagtgttcttttgagaaacttatgattggatgagaacatcctctattatgtacataagtgtcagtgtcattgcatttgggtttcctggaatgatattttgatggattgatgtaaaatggtagtttttgtaagatggatgatttgctgtcatggcatggtttcatggtaaacttcaattgttgagattttcatccagaaaaagggttgatctttagcatggtgtgaaactctgaaatgtgaatgtaagtagaaaagttatatattacctctcatccttttttattaagattatatttttaaaatatttaacat

SEQ ID NO: 103160 - DNA, 263 bp, Glycine max
  Clone ID: PAT_MRT3847_64170C.1
gtctcaagtgagtatgatgatctatataactagacacagtgtgatgaaaatgaaggttcttgttttctgcgatgctacaaatttggtagcatggcattgccatgcgttcgatatgtttactctactaatgaacactggctatcgagcccgtactacgcatgtgaaatgcacacaatggaggctcgctgtggaagctcacaacatgtgtggctttgagaccattactgatgagcgcggtgaagcatcatacgaacacatacatg

SEQ ID NO: 103161 - DNA, 212 bp, Glycine max
  Clone ID: PAT_MRT3847_64171C.1
atcatcccttcatgttcttcttggccaagtccatccccatcaagcaccgacgtcgttttcagtaggtcccactcgttcgtgggcccctgtcctcagtttgtcgcttcatcgaggcctctcttcttcctcgaatagtaagaggacgagggagaaggaggagagttaccatttggtcgcgaccccccaagaattgggccttccgatttccatat

SEQ ID NO: 103162 - DNA, 254 bp, Glycine max
  Clone ID: PAT_MRT3847_64172C.1
tgagaaaccagaaggggattggagtgtgaggatcactttttgagcgtgtttttgggattcgcttggttttgttcaaatagaagagacaactgatgagtataatgaagtaacctaggaatctaaaggtgtccactcacactggtgcttatctcatttaactgcttacaattactaagcgtctgaggacgtcaatcaatacggattctgacgaggtccgctataccattctgtgacggattttttatatgtcaacg

SEQ ID NO: 103163 - DNA, 361 bp, Glycine max
  Clone ID: PAT_MRT3847_64173C.1
gcgttcgtcgggtcctctccgcgcctgacggtctcttgctgctgaatgcctattcgtggttgatggggctcgctaaatatcctctcagtcaccattcccgtggaatgtcacctttggcccatggtggtttgtttgtccacggcaaaatgggtcctttcgttgctacacgcgctgctcatccgttaagaagccatggccatggctactaccccacagatctgtgacctcaggagtgttgttcttcaaaggcacatcttgccacgcttctcagactcttcaagggtggataggtgtgggtcctccctccatcggtgaaaatccttatccgcttctttatccaaactctcgtagacttggaccg

SEQ ID NO: 103164 - DNA, 403 bp, Glycine max
  Clone ID: PAT_MRT3847_64174C.1
gacagattctttccttaactaaaccctataattacaacaaaacatttgggtacctagaaaagttaaaagcttatatgggatgttttattaacaatgtcactgactaactattttagagttagatcctgaccacttgcaatcttatggttaaatattaaaaggtcctttaaattgttgcgctttttctgcacttcaagctcagtggtctttcccttcttgagaaggaccgaaaaattgggatggcacagaacagtatgcaagggcattccatgatagccaggctatcagtatttaacaccatgaaacagcaaatctttaccagtattaactatggtgctagttacaaaccttcatctcttgtatattaagtcataaatatgtactgaaaaggtatcttcctatt

SEQ ID NO: 103165 - DNA, 429 bp, Glycine max
  Clone ID: PAT_MRT3847_64175C.1
cgtttcttctcttcactctgcccgctgcatcaatggcttcagagaagaaactttcgaacccaatgagggagataaaagtgcagaagctcgtcctcaatatctctgttggcgagagtggagatcgtctcaccagagcctccaaggtgttggaacaacttagtggccaaaccccagtgttttccaaaggttatttctcaataagtttctaaatgggtagtattcagggatgctggtaatgggcatagatctcaaatctgtgttcattgaaacgttttgttgatcattttttgtgattctatcattttcctaaaatatagattgctgctggtgaagtgattttgaagaattcctaaggtttacggtagtttattttagtgtttttaatggagagtttgttttgtttttttaattgtattgtcaacattcaaa

SEQ ID NO: 103166 - DNA, 626 bp, Glycine max
  Clone ID: PAT_MRT3847_64176C.1
ctactatgatccaaaatcaatttggctcctcaattaaaattttatgaattgataatgtaaaacaatattttcttcccaatttcagtcctttctaaactcgtagaggactcttcatcaaacaacatgcacccacacaccacaacaaaatggtgttaccaatgcttttctccttaaattcaaagatatatggtctattttttttccccaaaatataaagagacattgttaacatgaataaaaacactagtcgagtaagacatgaaataacattactccaaaatagaatctctaattagtcgacgatgtattatttacataaagtcataaagtaaattgtctggcgatgataattcaagtaattaaaaataaccataaaatgtactgaatgaaagatgataaaaggtattatatccaaaaagttatgcaagatctacccacccatgtacatattgggaaagtaaaaatctagtcataaggatgaaatcctactcactacccatcatcaactaaaacatgccacaagatctaagaagaatccttagatggatcttcctcgatcttatgatggctccctcggggttgctcacatcctcgaaagaatcctcttcctcatcactaacatcatc

SEQ ID NO: 103167 - DNA, 651 bp, Glycine max
  Clone ID: PAT_MRT3847_64177C.1
taacgtttcttctcttcactctgcccgctgcatcaatggcttcagagaagaaactttcgaacccaatgagggagataaaagtgcagaagctcgtcctcaatatctctgttggcgagagtggagatcgtctcaccagagcctccaaggttcacttcactccttattgctttgcttttttaatttttaatttttaatttctgtttctcttcttgcaggtgttggaacaacttagtggccaaaccccagtgttttccaaaggttatttctcaataagtttctaaatgggtagtattcagggatgctggtaatgggcatagatctcaaatctgtgttcattgaaacgttttgttgatcattttttgtgattctatcattttcctaaaatatagattgctgctggtgaagtgattttgaagaattcctaaggtttagggtagtttattctagtgtttttaatggagagtttgttttgtttttttaattgtattgtcaacattcaaaggtctgataacaggggtggaagtgttagtttgagttttgattttttttaattataatgattaagtgtggacctgttctggggttataatcacagtagtggtggggctaatagaagtgcatttaaatgtcaatttttcttcagaaactcga

SEQ ID NO: 103168 - DNA, 258 bp, Glycine max
  Clone ID: PAT_MRT3847_64178C.1
tagctgtagctccgcgctcgagaagaaagcggtggcggtgccacacctgttccggctgcggcagaggaaaccaaagctcttgttattgtggagaaggagaaggagaatgagaagataccagaacctgtaaaaaagaaaggcttaaggtgaatccctgataggaaaattgtcttggaggaattagagaaagagaaacgattgtctaatgtgaaggcttgggaagaaagtgaaaaatccaaagcagagattaaagcccaa

SEQ ID NO: 103169 - DNA, 643 bp, Glycine max
  Clone ID: PAT_MRT3847_64179C.1
cttgaaaattcattttcgagaacctgcacagtttctttcattttttcttgttacaaggtcatgacaaaagacaacttcggatacctcagtgccctacactggggcaataagaggcaccgtgcataagcctatttattacctaggggcatctcagaatcacactcgcatctttgcgaaattatgtaacattcacaggaatgtgaattgtacgtcgttggcttgtttgctcaagtgacttgcgctcctgagttgatctccaagtttgtttaatcagaaattgctcgttttacatgtttggtgagagtgccttaaacgatgagtaaagtttaaaaagaagaagaaaaatgtttgagagaaaagtgagttgtcaagaacgatagtcattcgatttaatctgtcaattgaaaatcctttaagtatttctcgtccttgaaaattcattttcgagaacctgcacaatttctttcatttttccttgctacaaggtcatgacaaaagacatgaatagatacctcagagccctacactggggcaatgataggccccatgcatgagcctcaagcaaacctaggggtagattagaagttctcatctggtaggttgaaaacccgaaaaggcggcctaagcaaaaattagggttagt

SEQ ID NO: 103170 - DNA, 388 bp, Glycine max
  unsure (1)..(388): unsure at all n locations
  Clone ID: PAT_MRT3847_6417C.1
tcttcccagcaaacaccagaaggggctttctaacctcctcagtgcttattccacttcaatcgcgattatttaatctaacaaataattnagatcgcgattgagtgcggtgagccagaggcgggggagnagnaggggggggtccnggcgtggggaggcgcgtgnggnggaactacgcgttcngggcctccgaggaggaggtgatcatcaaacacaggggttctcacgcgcgccaccagcggcgagggggagcctcccttgaggaagcgtcagaggagaggcaccacggtcggctccgagagggacaaagacgaggagagcaactacaacgagctggagaagcgtggtanagcgggtctgcgggagcggaggacattcgaaattccgcttc

SEQ ID NO: 103171 - DNA, 233 bp, Glycine max
  Clone ID: PAT_MRT3847_64180C.1
gttggcttcaccaaactgtatcttcgaacagggcagattggggcactggaggacaggagacaacatcttttgcagggaatacttggaattcaaaaaagctttcgtggttatcaagctcgttgtcattatcatgaacttaagaatggagtgactattttacaatcatttgttcgcggagaaattgcaagaaggaaatatggtgttatggtgaagtctcttataacttttacttt

SEQ ID NO: 103172 - DNA, 247 bp, Glycine max
  Clone ID: PAT_MRT3847_64181C.1
agatccgtccatacatatggatctttgattgcgtgcggccatgataacagaatgagtgttcatgaatgtgtcaagccttactttagtggtctaaatagacaagctctctagcaagtctaacatcaccatgactgatggtatggacaaaactagtgcagctttgtctattagaaagtgagctgattgtgatctgctcaagagaaactatgagcagatatcaaacgttatgtgtgcggctcctgaggac

SEQ ID NO: 103173 - DNA, 467 bp, Glycine max
  unsure (1)..(467): unsure at all n locations
  Clone ID: PAT_MRT3847_64182C.1
gccgaggcacagatgtagtgtgtttgcatgctcatcactgggttttttctttttttttnnnnnangacaacttttaattttttttggaaatgtgtggaaaattggccttcaacgctggatcagtgcgtgtttgtacggaattgaagttgttttatttggtttctgtgttgattttgagtctgaattctcaatttcaataaaaaaattggtctgtgtctaaaaatggagttagtttatgattgtgaatgcactagggtttatggatcggatcagagtccgatgttttataactttgttgaaaattgggttactccagtgtgaattgttgtgatttgttgaaaattgggttactccactgtgaattgttgaaaattgggtttctgcagtgtgaattgttgaaaattgggtttctgcagtgtgaattggagaattgtacactggttcttgtcccttttattgtgaattgg

SEQ ID NO: 103174 - DNA, 585 bp, Glycine max
  Clone ID: PAT_MRT3847_64183C.1
ccacgcgtccgttcttttgcaattgcatttctttgagtgccagcgagtaaacgagttggtatgacaagagattcttcatcatagatgagatggcagcccggcaccggcacaaatagacctgatggagcttggaaagatatatctatggattgagggccggactaaatcggaagggctctctgttctatttatattagtagtggtagacagacaaataggcccatttttgacctcttaaacatccttacattgctgcttcagttgctaccactttcctaaacaatattgggaagttgcatggagtgccagccactattgtatctgacagggacagggtgttcactagctccttttggaggggcaagctattggacactaagttgcagttgagctctgcctatcaccctcagactgaggggcagactgaaagagtgaatgaatcagtgtcttgagatgtatctcaggtgctcagtaagttctactccaaacagtgggttaagtggttgccattggcttggtacaattcggctcatcacttctgcaatcctctccagttaaagcactctatggtatggccatgaaccc

SEQ ID NO: 103175 - DNA, 638 bp, Glycine max
  Clone ID: PAT_MRT3847_64184C.1
tgcttgcttccagtttgcaattgtcatcctgtttgctcatgtgttttatactatagtaagattatctactttctgtcctgtcttatgtagtacttataaagttccttcacctcactttattgaacaaagtcatgtttggataaaattttcaataaaaatcgataacaaatgtcgaatcgttccaaaaacaaataaaactaggaatttgcagtacataattaacctaggtcgaactcagaaatatgatttaatatgcttcttaaattcattcacttataaacaaaaaggggaaaatttttatcaaacggtttgtaagcgactataaaggaatgtgaaaatacaaaaacagagttcaagaaacaagaaagaacaagaacagaatatagttcaagattagaaacatcaattcaattaaccaaacgaatgcaaatcgaattatcacagttactacgaatgatgttcagtgtgaaagttcactcaaatgcattagagaaagttcaatcgaatcaatctccctaaattgtttgagatcacaaattaggttggaaaatatccaaataatctgtgattaaattttgaaattaggaaatgaatccataacctaatccattttcaatcctaaacataattataatccc

SEQ ID NO: 103176 - DNA, 127 bp, Glycine max
  Clone ID: PAT_MRT3847_64185C.1
gcgaacgacacggagtgcctctgtttttagcattaggagggcttattcacagcgagccggctctgaactaaattccaagggcagccactggctaaacggattgtgatacacgctcacgagaagcata

SEQ ID NO: 103177 - DNA, 1664 bp, Glycine max
  unsure (1)..(1664): unsure at all n locations
  Clone ID: PAT_MRT3847_64186C.1
aactgcttctagagtaggttaaccgctttcctttgtttttggataaaatggttttgatagctattggcattccaacaatattatattgtggaacagtctgtgatgtcattgctgacttggcaactagctttccaagtttcaaataggtgaggttgattgtttgcaatcatgtttggaaattgaaagtatgagccgagcaatatgtataatatttaagtttacttttaatgtttgtcctccatagtaaaactcacatatgtggtataagaggttgatgattccattatttttgtggttcttattgatgtgtattgatatatgatttttctcaatgtttaatgcactgatgtgtgggattttgtgttgtgaacttaaatttcaggcatacactgagagagagataacatcgttgcagtggcgcgcccaatggctctgggaatctctaacatactgcactgccccaaattgagtttctcccacaataattttctcccaaaagttccaacctctatcagcctcaggtttccccagacagcagcatggagtgatagaaagattatctgtgctgctgcatctgcggcaggaagctctaatcccgatggtgaatttaatccttatgaggtgctaggtgtaagccctattgagaaatttgacatggtcaaggcagcatatgctaaaaaaaagaaggaggctgagatgaatggcgatgaagcaactgcttcaagactggaaaaggcatatgacaaactcatgatggctcaattgtctaatcggaaaaagggtgtgacttttggatcatttaaggtttcaaaggagatcaagtatgctgacaagcttccagttataccttgggggccaaggcttactaaatcaagtcaaaatgacatgcgcatcaacttggcaatatctgctgtttttacagcttggatccttgtcaagcgcagtgctgaatataaacctttgcaggttttagcctttgcctttgtttataggctttttgagaagttaaaagcctctgaatctcctgtaacccccaaatataatgaagagggtgaagacacaggagaaggactccgcatgggaaaacgactgctccgatcactagccttggtttttggatgtgtagctatttcatctttggcatacactttcattttgaacataattgagtttgcaggtggttttattcctactcttttgtacaacagtcaggagttgataatcaccacttcatcggcactcatgctttatatcatggcatcttattatagatagtggagtgtgtcttgaagacgaagaaaccatgcatctattcaccatccctttttttttttaagtctttttcctcccttctctttcttttgttcttattgtgaactaaagtgcttttcttacaaattttgtcaaaagagatgctttttccttgttttaatatactaaattagggatagtgtcaactttcttatggtacttttttcttttcttttttgggaagggaggggggtcatttatattgattttgactattcacatcatagtggtatataagtcttgtattcttgctcacancncacacacacaacaaaaaaaaacaaaaaaaaaaaaaaaaaaaaaaaaaaaaaaaaaaaaaaaaaaaaaaaaaaaaaaaaaaaaaaaaaaaaaaa

SEQ ID NO: 103178 - DNA, 343 bp, Glycine max
  Clone ID: PAT_MRT3847_64187C.1
tgagaagatcatttcagacgcggttcacagagcttccacatttgatccaaaagttccagctaggatcttaaggatgttcttccatgactgtttcattaggggatgtgatgcatcaatattgctggactcaacacccaaaaacctggcagagaaagatggccctcctaatctctctgttcatgcattctatgttattgatgaagccaaggccaagcttgagaaagcttgcccacacactgtttcctgtgctgatataatagccattgcggctagggatgtggtagcattgtctggaggaccatactggaatgtgctcaaaggaaagaaagatggaagagtctca

SEQ ID NO: 103179 - DNA, 148 bp, Glycine max
  Clone ID: PAT_MRT3847_64188C.1
tgatggatgaataggaagaaacaggtttccctttacgccatcacagtggcaagagctagaacaccaagctctcatttacaactgcatgcctttaggcgtgtccattccgcctgatcttctgttaaccataaaaaggagctattttttt

SEQ ID NO: 103180 - DNA, 347 bp, Glycine max
  Clone ID: PAT_MRT3847_64189C.1
agctcactaggctggggccgaccttaacctttttttaacatgaagctgatccaacctgttccatgaatttgatggacggatgcaggctggtcacacctcatcaaaaaataacaaaatgacaggcaacattcattgctcaagagaggagcgagcaatgccattaaacaaacgcttagcttgctatgatatgtggtcgtatatatcacacacatgaccctgccctggagactggggagactcaagcctctcatgaactgaaggaggcctagactttaaaccatgtatgctttgaagctgcgcaagccggtgtatcattccatcagccacacgatccctatcttgggcaa

SEQ ID NO: 103181 - DNA, 129 bp, Glycine max
  Clone ID: PAT_MRT3847_6418C.1
cagctcttacacacttttttttttaaataaacctcataccggggccgggaggcttaccagctttccttaatgtcacccatcttacaactagtcgctacaaagggcatacttgttccctgctagaaagca

SEQ ID NO: 103182 - DNA, 337 bp, Glycine max
  Clone ID: PAT_MRT3847_64190C.1
catgctcccggccgccatggccgtagctggaatttgatgagggcaagcttggtcgacagcctaggctggtaaaaaaccggcgggttgacgggtgtgggtactatatgaacaaactcgtggcaatgaacccggagggtgtagatttatgcccattaacaaacccatggatatgaaaatggatgcaaacccgtgccctaatagggttaaaacccatcgggtttcgggttgcgagtacccattgtcatctttaacaggaagtgagtgatgggcctattgtgcgtatgcgcttctcggttatggttcgcgactttagacgggtgcacatatgggccctacc

SEQ ID NO: 103183 - DNA, 1887 bp, Glycine max
  unsure (1)..(1887): unsure at all n locations
  Clone ID: PAT_MRT3847_64191C.1
gtaagctncgaattcggctcgagcaaccatgtcctccacacaaacaacaaccctaacaccttcacctacgaacccacctcggtcctcgacctatgccggagcccaagccccgaaaagaagctcactgttcccaagccagaaccacaacacaacaaccagctagacctggatgatcatgttttgcctaattctgattggtgggagtccatcatgaaggacttaaccctacccgaagactctcccactccccttttgaaaaccaatccatcatgcatccctgatttcccaccttcttctcaagacccatcctttgatcaccccactcctgacttcacctctctctccgaaatctacaaccaaaacatccccttcaattacccctccaacactttagaaccttcctttcatgaccttaaccatagcctccacccccacaacaacaactgggacttcatcgaagagtttatccgcgccgccgattgctacgacagcagccacttccagctggctcaagccatacttgagcggctcaacaaccggcttcttcgctcgcccatgggtaagccgctccaccgagccgcgtttcacttcaaagacgcccttcagtccattctatccggttcgaaccggaacggaaacggttcgaacctcctttcctccatggcggagattgttcagacaattaaaacgtacaaggccttttcgggaatttcacccatcccaatgttctccatcttcaccaccaatcaagccctacttgaaaccctaaatggatcttcatttgtccacgttatcgatttcgagattgggcttggaattcaatacgcttctcttatgaaagagattgctgagaaggccggtcccggaaccgcgccgctccttcgcatcaccgccgtcgtgccggaggagtacgccgtcgagagccgcctggtccgccagaatctcaaccagttcgcgcaggatctagggatcagcgcgcaggtggacttcgtgccgcttcggacctttgagacggtgtcgttcaaggccgtgaggttcatcgacggcgagaagatcgccgtgttgttgtcgccaacgattttcagccgcctcggaggcaacggaggcagtgtcggcgcgttcctcgccgacgtgaggaggatggctccaggagtggtggtgttcgtggacggtgaggggtggacggaggcggcggcggcggcttcgttccggcgtggcgtggtgagcagtctggagttttattccatgatgctggagtcgctggacgcgtcagtggcttctgggggaggcggcgagtgggtgagtaggatcgagatgctgctgctgcggccgaagatcttcgccgcggtggaaggcgcacggcggaggactccgccgtggagggaggcgttttacggcgccggaatgaggccggtgcagttgagccagttcgcggattatcaggcagagtgtttgcttgccaaggtgcaaatcagaggcttccacgtggacaaacgacatgctgagctggtgctctgctggcacgaacgagccatggtttccacgtcagcatggcggtgttagcatattatatagaagagaagacaagagaagtgatgtattaatctaatgacaccttaaacctgcttatgtgaactttattatcaagttcacttttgacaaagaatgtagtttaactttaatttagttttttttttaattattatggaaaattacaaaaagaaaaaaactggaaagtacataaaaacttgtattttttccagacttttttgttttatgtaatgtagataaattgtgggggtgtctgtatttaatttgtttgagaagagttaccatgtaatgctggatatatacatctggcttttcaatcaaagtatttgggaaaaa

SEQ ID NO: 103184 - DNA, 678 bp, Glycine max
  unsure (1)..(678): unsure at all n locations
  Clone ID: PAT_MRT3847_64192C.1
gaggaagttgaaatcaccatgagccgcaacatcaacaatttcacacctttgccagggtcatggcaaagaggttttagatcctttgatgaccacactttcaatcatcgtgaatccaatgaggtgcctgtgttttacggatctcacttctactcatgccaccgtaagtttattctacttattgttttagtgacattatttttaggacatgatgacacggaaaagaaaggcaaactaaatttatttttatggaagcagagaatggaactatcattgtttgaggatgatagtttgtatataatctcggttcataatattagcaggatggcagaagttcgggtgtattagctcgacaacgattttcggacttcagaaatcctttaggattccacagtataccaaagtaaggccaagttgcatactaatttgcttatgtgtttagacttcccaagaatggtaatcagtgtaagaagttgtcttcaatgaataatcaaatgatttgatgattgacatatgaatgcatgtttgaatttctataaatttcactgaattagatagtaacaattaggtttgatgcgagtatgaccattgaggagaaatctagttaaaaatatttcttacaaattcaggatttcacaaatttgttctcaattngntaaatgaattaacaatcaaatacta

SEQ ID NO: 103185 - DNA, 366 bp, Glycine max
  Clone ID: PAT_MRT3847_64193C.1
tgcatgaataaatctgatcttggtgggtggacacgtattgttgttgagaagccttttggtaaggatctggaatctgcagagcaactcagtacccagattggacagttgtttgaagaaccccagatttatcgaattgatcactacttaggaaaggaacttgtgcagaatatgttagtacttcgttttgcaaaccgattattcatgcctctatggaaccgtgacaacattgctaatgtgcagatcgttttcagagaaaattttggaactgaaggtcgaggtggatattttgaccagtatggaattattcgagatataattcaaaatcatctgctacaggttttttgcttggttgctatggaaaaacca

SEQ ID NO: 103186 - DNA, 302 bp, Glycine max
  Clone ID: PAT_MRT3847_64194C.1
ccgggaacgtaccggttcgacttacgcacgcggggcctcacttgttcggcaaaaatggcacctgcaacactgtgatttgtgtatcctactcctgctctcactcagcatcgacgtaaccgatagagcgagcgactacgactacgattgtgtgacactgcatacgtttgaacccggtcggctttccacccgtctaacggactatatgatcgcgctgatgcctttttattagatattatcagccatctacattaaaaaccttctagaatgcctgttgctatgatctttttttgttactaattact

SEQ ID NO: 103187 - DNA, 500 bp, Glycine max
  unsure (1)..(500): unsure at all n locations
  Clone ID: PAT_MRT3847_64195C.1
tnnnnnnnnnnnnnnnnnntnnnnnnnnggactaacttttaaggttcagtctaatttgcttgaagcttttactcatttgaaagtccaatgacatgaattgtcatatttgaaggtctaaccttagcaaatagtgtgatagactaagttaggttttaaaaatgattaaatcgtctaaaaaataatccatactagataataaatgatctttggtcttaaaatttttaaacaagtcagacttatttaagttaaatgtgacttgatgaagggtaatatgttaatatggtcttaaaattttatttttttggaattatagtaataagtgatgacatgatatggtggtttaaagatgacaccaaggattagtcttatagtaaaattaaaatttagagagactaaaaatcatgatttcaccattataaaaccttcaaattgaccaaattatgtaagtaagtttttagatcaggtaaaacctttaaaataacttatgcctttattcctaa

SEQ ID NO: 103188 - DNA, 271 bp, Glycine max
  Clone ID: PAT_MRT3847_64196C.1
agttctcttcgtgtttgtggccattttcacttctttttctcctaatttactgttgtttctgttttcagccaacaaaacaaagagagctctttatctccccgccctagaaccaaaacacccccacaggctgggttttgtgccgcataacagggggtccacctctcggcgacccaaaaggaaggcatgctcaagggtccccccccctttgtggggccccccccaaaaaaggcccccgccattttttttttagggggaaaaatttttacccaaa

SEQ ID NO: 103189 - DNA, 504 bp, Glycine max
  Clone ID: PAT_MRT3847_64197C.1
aattttctttcttccattgtctagttaatgtttcaatgtagtatttcttttgttcatgtgcgcacctctttattctagtaatcatccttgcttaaaattctgcatgagttccaccaaatgtatttggatctttttttcctgtgatccccagtatgaggctgtatagctttcgtacctctttgcatttggaccaggtggctgtttgactatggattctggatgaaatggaaatctatatgttgtctgctaaacactttacagtcatgattattcatttcttattttattttgttgggctaattatgtaaagtaaactaaacgagtttatgatctggagtcagctgtgtagcttcttaaattgcatagtagtaactagtttcccaggctgttcagtacccttcccttttgttggtagtataattgtataaagattatgttctatttagtggtatatatacacttgaattgctgtatatcaaagctctatattctgaaatggatgtc

SEQ ID NO: 103190 - DNA, 134 bp, Glycine max
  unsure (1)..(134): unsure at all n locations
  Clone ID: PAT_MRT3847_64198C.1
aggcggatnantcncgngtncgngcgtnntcgnnggttctggtacnttagtccnnaccacggttantgctatatgtacttcatgggccggcattcacatcngacacaaaactttctccactttaanggatgttg

SEQ ID NO: 103191 - DNA, 462 bp, Glycine max
  Clone ID: PAT_MRT3847_64199C.1
ccacgcgtccgcggacgcgtgggcgcgcatcgtcgtctgctccccgcccatcccgccgccgcatccgccccctccccaccgaaggaatccccgcaggctctgccccctcccccaccgaaggaatccccgcagactccgccccggctccccagaacgcgatccactctcctctctccctcaatccccgcttcctttcttggattgggatctcaagatgccggtctcctgggacctgcccgacctagagcacgacgccatgccgcccatctccgcggcttcccccgcggcggcgtcgggcattgccgccgtagctgccgcgccttcccccacgacggcgcgagccgggcggagtgctccgtcgacctcaagttcagcgggctaggcgagttcggggcggcagacggcacgcctcgacagccgcgcggtcgctgcgcctgatgcccaccccttccgagatcggaa

SEQ ID NO: 103192 - DNA, 228 bp, Glycine max
  unsure (1)..(228): unsure at all n locations
  Clone ID: PAT_MRT3847_6419C.1
gacctatggaaatacacattaaattaaaagagagtgggggtggtgaagaaaactcacggtctaactcaattggttgaacaaggtgcatgagttgttgaaaaacccctgacattgtcttcgattctcacggatanaaagaatctcacgtactgaaagcccattataggtgccactgtcaaccatgctcaagtgttggctgtggaaccaccataatccttgggacgagat

SEQ ID NO: 103193 - DNA, 367 bp, Glycine max
  Clone ID: PAT_MRT3847_641C.1
atttaatttagttcaaatacattaagcaaaaacactttctaaactcccccttaaatccttaatgcataatggcaatgcaatacgaccacaataaaaatcgaaccaaaattttttatagatctatcccaagccccactattaattcaatgttgcatctcaaattttgtaataaaagtacacatttattttacgtgccacgtgtttcgtcttattggaacattgttactttgagaatagatcaatgttgcttacaattggttagtacagtcaacgacgaacagtggctggggtaaacaaattcctcactacatgtacaaaattgtacacaagaaaatacagttaaatccgtaaagcgttactgtctacg

SEQ ID NO: 103194 - DNA, 482 bp, Glycine max
  Clone ID: PAT_MRT3847_64200C.1
agacgacagaagggggatgctcagattcagcttctatctttgagacgaggaggtcgttgattgatatgataagaccaaaagctcatgtttgataaagcaccgtcaagaacagcctgaatttagtggtcctacccctaaatcacagcgaaccaaaatgggcaaatccgaagacaacgataagaagaacttaggtaagaaactcaaagatgtggaaataagcattccaatagtgtatgggaacatagcaatttggcttggcaaaaaggctagcgagtatcagtcgcataaatggacagtaaatgttcgtggagcaaccaatgaggatcttgggacgataataaagcatgctgtttttcagctgcattctagtttcaataatcccacacgtgtggtggagtcgccgccttttgaattgtcagagtcaggatggggggaatttgaagttgccatcacactttatttccagtgatgtttgtgacaag

SEQ ID NO: 103195 - DNA, 262 bp, Glycine max
  Clone ID: PAT_MRT3847_64201C.1
cctctctctatgcctcaccacaacaacaacaacactcctgcaacgttaccggcttcaacaagggacgaggcatctattccaccaccaacaccagcctttcctcctaccatcctactaaccttaacaacaccgcttttcgaggcctcaacaacggaatccattccaacaccacatcctcaccctatcttaacaacaaccaccaccacctcgacgacaacaacaacctcaacagacctaatctcaagggctacaagacatattt

SEQ ID NO: 103196 - DNA, 662 bp, Glycine max
  unsure (1)..(662): unsure at all n locations
  Clone ID: PAT_MRT3847_64202C.1
acaaaccctagctagaacttgatgctcagattcagcttctatctttgagacgaggaggtcgttgattgatatgataagaccaaaagctcatgttcgataaagcaccgtcaagaacagcctgaatttagtggtcctacccctaaatcacagcgaaccaaaatgggcaaatccgaagacaacgataagaaggtaactttgtttgtttcgattcaaaaaattctgataaaaccccaaaataatgatttcccccaaaccctgcgcttttgggagtgtgtaaagattgcagcttgtttccgctattgattcaaattcgaaactttgatttggaaccctcatccatcctgcactacaaggatttcaaatatgattttagaatgtcgtacaatgtgaaaacaaattcctctatatgttttactaaagtaggttctttgtgttgattggtgtacaagtataataaccatttctgggttgggttttgtgtagaacttaggtaagaaactcaaagatgtggaaataagcattccaatagtgtatgggaacatagcaatttggcttggcaaaaaggctagcgagtaagtatcctacattgccaccaattggcctaacgtttagcttgaagtcactaaaatgttttttttttaaataatanaaaaaatagagag

SEQ ID NO: 103197 - DNA, 446 bp, Glycine max
  Clone ID: PAT_MRT3847_64203C.1
gtgctgtactacgatcaatggcctatatccgtgagcaactcttgggtcctggtgatgtacagacagaacctatgtcaaaaaggcctcggaagtgaagcggcaaatttttgtttcatacccagatggcttcgtgatggccatgtggtgaccactgaatacacaaatggcttagaaaacttagtgtgaagtcttttttttttgttttttttgtaagtttgttgtctaaaatatcaatgtgtacatgtatcatatcataggcaacagatttactttataggaaccgtttggaaaatcctttccagctcaccggggtggaggagcattctccaaacgaataacgagtagggtttaggaatttgggagtaaaaaaggcaaacaaaagcaggtattgtttagtgaaattttagaaatcatatcttagtttggtgactaaaaaaaaaaaaaaa

SEQ ID NO: 103198 - DNA, 449 bp, Glycine max
  Clone ID: PAT_MRT3847_64204C.1
cccacgcgtccgctacactacactcctgtgttgagcatagaagacattgctgggatgagggggtttctggatggtcattgagacgacgtcggatccgacgacacgtatcatacatactaatttcgtacgtaacaaacgtctttcctagaaagagagagagacggagaccatgagaaccaacttcgacttcatgaatttcaaaggattcggtaactctggttccgataatgagttagtccgagcctgaggcgcttacaaattccgaagttcatgttgggtggcagacattgcatgagtcggaaggtgttggagacaaagaacgtgctttcagttgccgtgttataccacatgcaccataataagccactcattgttagcgtatattaataaaggattgactgtgacatcatttaattattattggttgagtttatattattgctctcgtg

SEQ ID NO: 103199 - DNA, 311 bp, Glycine max
  Clone ID: PAT_MRT3847_64205C.1
gaagctattggaaaagtgagtgagagatctcaatatcctcagataatggagggatacgttgcgaaggttatgaatgtgcggactggagttgggcatggccatgattgggatggccaatggcaaatactcctgttgtcgcatgccctgctataggttggcggcatgcaagccgagtgtaagtcgggatcagcctgcgtataccaccactgattgttactcacccattgctatggccgatcttaaatgcctctgccgcatcgaggattccggccctctctcgctgtatggtgttgatctgacctcctgcatgg

SEQ ID NO: 103200 - DNA, 154 bp, Glycine max
  Clone ID: PAT_MRT3847_64206C.1
caaccatcgctatttgccatgtaagaaccaaaagcgccccatatgagtctatgaaccatggaatatgaagtccaccaaaccgcatgggaaggcgcataaatcaatatcgaaatgccaaagcctttataaaagcctatcgttgcatcaacacacc

SEQ ID NO: 103201 - DNA, 298 bp, Glycine max
  Clone ID: PAT_MRT3847_64207C.1
acgcgcagacggctgccaagacgacagattgagaggtgctagtgccaatggagctacacgcactatttgacattattatacagcacagaatgaacataatgtcttagtctgaatgatggaccatcgtgaagctatcatattccacttaacttgaactatcctaattatggcgtaccatactctagcactcaatgtccataatgatgacacgcttgattttggcacttccgcgatgcaaatgttgatacagactatatttgcccatttgatacaactcagctcatggtgaaacttacta

SEQ ID NO: 103202 - DNA, 260 bp, Glycine max
  Clone ID: PAT_MRT3847_64208C.1
ccacgcgtccgaaaaaaaaaactttttacaagaatcattttacaaggaccaaaaaagaattttacaagaaccattttcaaaagacattttttacggacccgaaaaaataaaataaagaaacaaaaatatacctaaatcaattataaatagttaactgtcatcatggatttgttataactgcaggtggataaaagtccataccaactacagcatttaagcaaataaacaagtagggcaacattgtcacccccttccctccg

SEQ ID NO: 103203 - DNA, 262 bp, Glycine max
  unsure (1)..(262): unsure at all n locations
  Clone ID: PAT_MRT3847_64209C.1
ccccccctccccttcctaaaccccaacaccatctagggtttattttcctctttctctttaaaatttaaacacagcttttgccctcttcaaagaaaatangatgggaaaattnaagacactgaggcttaccaggaagagctcactccactaccaanaaaaagaaaaaaaagctccccattcccctaaaccccttactgaatctgacaagaaggcttatcttggcctccactactctcggatttccaaacttcctgttaaaacc

SEQ ID NO: 103204 - DNA, 385 bp, Glycine max
  Clone ID: PAT_MRT3847_6420C.1
ttgttcttacggtctcgcaagcgaccgactgcgggactattacaactacatgcatgtgctggtatgggcgcgagctggacgcgaagggaatctgtgaggagatgacaggcgctgtgacgacagcacgcacagaaagaggcggcaggatgaactaaggcgtgcaccgttgctgtggaatctgacagggcataaacgcgatgtggaccggatttcaacaacacaagcatgtgtggcatgactcagaagctggcgcggagactaaagagagtgtgatacagaacgagcatgctggtgaggaattctgaacaaaaggagatggaccatcaggattgcagaccggaaataggacagacctgacaggaggtggctgaaaccaggatgctgg

SEQ ID NO: 103205 - DNA, 188 bp, Glycine max
  Clone ID: PAT_MRT3847_64210C.1
cccaaaaaaaaaccttacaaccaacttttgtttagttaaaaaactactccaaatgtcgtgcttaagctcatcaaagtttaaagattaactatatatcatgttaaaagccatttgcagaaatacatgacagctagatatatactctaatcatcttaactagttattgaaaaaaaaacaatttcctttta

SEQ ID NO: 103206 - DNA, 661 bp, Glycine max
  Clone ID: PAT_MRT3847_64211C.1
ggaattcggcagaaaagggaactctcacgaaactcaactctctctctctctctctgcctcaccctcttcgctcgcaccccatcccccatttcatttcagatcgaacccttctccctcctcgcactccctttcccattcgctgcggagttactcacacccacaccttgttaggctcacattcagactatagtcgtgaatgctgcggtggttcgtgttttctcagaactatggctagtccaactggagaattgacaagccataacgacagtaccgctgagccgatggcaactgaacaatgtgaattgtctgaaaaaacgcctcagataggatctgaaggtttagagagggaacaaaaggagcttcttaccgagttaaccagttttgttattgacgaaaaatcaaatcaagtttctgctgatgtgacggagaattctgttattcaactgcctgcaccgcctcaacatgactttgaaaagaattgccagactgtagaatagtcatgccttgaacacaataccgtcgaacaagtctctgttgatttatctaatgataaatctgaaaacaaatgcaagccattgtctgaaaatgttcaaagtgaacccgtagaatccattcctgccttcgtcggtgacaggcaaatgccatcccagccaactcaagc

SEQ ID NO: 103207 - DNA, 1287 bp, Glycine max
  Clone ID: PAT_MRT3847_64212C.1
gtgatgttgtgaatctgagtgaacaggttggggagcttatatcgaatattgggtgtggaatgatacttggccgcagtaaggatgatagattcgacctaaaggggcttgctcgtgaggttctgcgtttgactggagtgttcaatattgcagattatgttccttggacaggcttcttggatcttcagggactaaaaggaaaaatgaagaaaatgagtaaggcatttgacgaagtgtttgaacaaatcataaaagaccatgaagatccttctgcaagcaacaagaatagtgtgcactctgaagattttgtggacatactgctatcacatatgcaccaagctgtgaatcagcaagagcagaaatatgtcattggtagaactaatatcaaggcaattatattagatatgattgcagggtcatttgacacatcagctgttgcagttgaatgggctatgtcggaactcttaaggaacccaagtgatatgaagaaacttcaagaagagttaaataatgtagtgggggaaaataaactagtggaggagtctgacttgtcaaagttgccttatttgaacatggtagtaaaggagaccttaaggttatatccggctggacccttgctagtgcctcgcgagtccctagaagatataactattaatggttatcacataaagaagaagacaagaattttagtcaatgcatgggccattggacgagaccctaaagtttggtcagataatgctgatatgttttgtccagagaggtttgtgaatagcaatgtagacattagaggacatgactttcaacttttaccatttggttctggtcgaagaggatgtcctgggattcaattgggtctgaccacatttggccttgttttggctcaattagtgcattgcttcaattgggagcttccatttggcatgtctcctgatgacatagatatgactgagaattttggcctttcattaccaagaagtaagcacttgctagctgtaccaactcatcgcctatttaataaaacataagtaagggttcgaaccttagaaataaagtgggaagaagttattttagtgaaatttttcatatcaaaattgtctgatggtcaggattgatgatgtgtgcgcgcactcagcttctttgttgcaggaatttggatgattttcatgtttatgtctgaatcattgtaatatatattgatattgattttattaggctaatgtaaattaatgttaattttttatgttttcacatgatatttataataatattttctattttaatatattacac

SEQ ID NO: 103208 - DNA, 820 bp, Glycine max
  Clone ID: PAT_MRT3847_64213C.1
aaaagattttttttttttaaattattccctggttttctttccccatgtttgtctttcgtttcttttagttttagcgtgtctttgtttctggccttcgttgtgtcggtaaggatgaagggattggagggagctccaataatgcatcaaagatggctttgaaggagaggttcaagagtttcaatgcttgttttgaagaaatttacagggttcagacagcttggaaggtaccggatgaccagcttcgggaggagctgcggatatctatatcagaaaaggtgattcctgcataccgctcgtttgtgggaagatttaggtgtcagttagagggaaggcatgttgggaagtacattaagtatacaccagaggatctagagacctatctattagatttatttgaaggatcccctgctgtattgcatcacataaggaggaaaagtacatagtatatcataagatgcttttagcaggtgaactcattttatgagaattacttgaaaatggtttcctgtgtcatgtgtatttctacttggataggtgtttattttacaggtgttaatgttagaatgggattttgtgacattcgactcttcctccaagccccttccccaaatccaaaaaagatttatttttttcatgttccttcgaatactgtaatatcttttgtatatagtgttctgatacaggttatctatgttgtttatacttgttgaaacagtacactcattagctatcatatattcagatcctgtgtatttactgcagtttgcccagtttgcataattgttagctttctttataatcaaaggacattgattttctt

SEQ ID NO: 103209 - DNA, 2610 bp, Glycine max
  unsure (1)..(2610): unsure at all n locations
  Clone ID: PAT_MRT3847_64214C.1
gaaatgggagcggagggcatcgttgggtctggttgtgtgagtgagtgtcgtcatcattttaacaattaccctagtgcgtttctagacgaatctttgatcaaggtcatttcttaggcgtattgttgtataagtctcaagcgctccaatcgtcccatgaagcaaacgataagaaatgttatcagaaacattggccatccctgcagtactccttgtaatactcattttgattctatcctctgtcttgttccatcttcaagatgaaagaacaaatccaccaggtcctaaacccctcccaattattggtaaccttcacatgctggggaaactcccacatcgttcccttcaagcccttgccaaaaattatggacccataatgttcataaagttgggacaagtcccaaccgttgtagtttcctcccctgaaactgcagagctattcctcaaaacccatgacactatctttgctagcaggccaaaaactctagcttcagaatacatgtcttatggaagtaagggcctagtgttttctgagtatggaccctattggcgtaacgtgaaaaagttgtgcaccacacaacttctgagtgcatcaaaagttgagatgttcgctccattgaggaggagaggagttaggagtatttttgtgaagtacacttgaaaaagctgcaacctcacgtgtatgttgtgaatctgagcgagcaggttggggagcttatatcgaatattgtgtatacaatgatacttggtccgaattaaggacgatagattcgacctaaaggggcttgctcgtgtggctctacgtttgactggagtgttcaatattgcagattatgttccttggacaggcttctttggatcttcagggactaaaaggaaaaataaagaaaatgagtaaggcatttgacgaagtgtttgaacaaatcataaaagacaatgaagatccttccacgagattcaggaatatacctggttgtagcaaacgtaggggacataatcatgtcattaatgcactcagggggatctcagcaagcggttcaatgagtggagggttgatcgatcttgagttccattcacgttgtccaatggggagacacttgtcaagtattaggttccttacctctatgcgattcggagtttcaccagcgacactttcaggctattaagtgctttaaggtagagttacagaatgtagtgggggaaaataaactagtggaggagtctgacttgtcaaagttgccttatttgaacatggtagtaaaggagaccttaaggttatatccggctggacccttgctagtgcctcgcgagtccctagaagatataactattaatggttatcacataaagaagaagacaagaattttagtcaatgcatgggccattggacgagaccctaaagtttggtcagataatgctgatatgttttgtccagagaggtttgtgaatagcaatgtagacattagaggacatgactttcaacttttaccatttggttctggtcgaagaggatgtcctgggattcaattgggtctgaccacatttggccttgttttggctcaattagtgcattgcttcaattgggagcttccatttggtgtgtctcctgatgacttagatatgagtgagatatttggcctttcactaccaagaagcaagcccttgctagctataccaacttatcgcctatttatcaaagcttaactaagggtcctttcgattgagtagaaaaaaataaaataaagatcaaatggttcatttatctttagaaaaattcattttagttctttatctttttaaattgcctgcttaggattggtgagcttcttattgcaggaattaggatggatctagatgtttatgtctgagtcattgtaaaatcaataatgtatttatatattgattctactcagatcttcaaatcagaggttttgactttttaagatcttctctctggaggcttcttcatatttacttctctacatgtttagagtttctcatgtatgttggcatacgaccaagtctatagcttttactttttatcttttaataatatgaaatggaagtgggccggcattcggtaagttaaaaaaaaaaatctagagacctatctattagatttatttgaaggatcccctgctgtattgcatcacatgcttgcacatcaaagatcctaccgatagcgacaatgtgcacaacgagacgtaatactactatcacttatggaggaaaagtacatagtatatcataagatgcttttagcaggtgaactcattttatgagaattacttgaaaatggtttcctgtgtcatgtgtatttctacttggataggtgttatattttacaggtgttaatgttagaatgggattttgtgacattcgactttttttccaagccccttccccaaatccaaaaaagattttttttttcatgtttcttcgaatactgtaatatcttttgtatatagtgtctgatacaggttatctatgttgtttaaacttgttgaaacagtacactcattagctatcataaattcagatcctgtgtatttactgcaggcataaaataaaaaaaaaaaaaaacaaaanccccnncaacaaaataaaaaaata

SEQ ID NO: 103210 - DNA, 753 bp, Glycine max
  Clone ID: PAT_MRT3847_64215C.1
tcttccttccgagaactctagagctttactcatgcaacatgaaaaatatagccatggctattattggccagatgggaaaagctttgaagatagaagaaatggaaataagagaattatttgaagatgagatacaaaagatgaggatgaactattaccctccgtgtccacaaccagagaaggttatcggcctcacaaaccattcagatggagtaggtctcactatcctcctacatgtcaacgaagtagaagggctccagataaagaaagatggtgtgtgggttcctattaagcccctacctaatgccttcgttgtcaacattggagaaatacttgagattgtaaccaatgggatataccaaagtattgagcacagagcaacagtgaactctgaaatagaaaggctttcaattgcaacattccacagccctgaactagatgtggtggtaggtcctgtggctagcttaatcactgaacaaacaccagcacggttcaaaagaattaaaatggaggactacttcaggggtcgatttgctcgtaaacttgatggaaagtgttacttagataccataagaatttaatagagcattgcaatcgaagatttgaagttgatagaaactagccattggttttacggtactgtcatgaatggatcgatcgccttatatttttctaacatatttttatcttcaagatttattttatgtaataattaaaatgtcatgaatggatctcagccacttattattgttgccg

SEQ ID NO: 103211 - DNA, 483 bp, Glycine max
  Clone ID: PAT_MRT3847_64216C.1
atatgagtataatgtggcagatggtctacacattactctacagaacgcatatttttccttgataatagtgaacgagtcagagtaaaaacgccacaaacagatttgattgccgagattgacgacaaaagaatagattcctcaatataatgaggttcaggctcagatggaaacaaatttgcttaaattgtctcttgatgatagttgaaactactaaaggttccatgttggatcttaaaattattaaatctaaaattgcacttcccaaaaacacagttggtggaaccattctgcgtagggatctattggcaaatttgttgacagagggcaattttagagcatgtgttgatttgcagcgcactaagttgattaaaggaatgagtaaaatggcggccacagatggtattactgacaatacaggtatagcattggcctgtgctattaatagttcttttagggggcgtgccaggtatgatctgtacacta

SEQ ID NO: 103212 - DNA, 190 bp, Glycine max
  unsure (1)..(190): unsure at all n locations
  Clone ID: PAT_MRT3847_64217C.1
gagccgccntcttagggtaaaattggaggtaaaaaaagccccttaataagggaaaatacaaggggacaaaaaattattttcttaccaattaaattttatggcacactttggccgaagttttgaactggttttccaagaaatggcccgcctttaaataactttttgtgcctaattaaaccttttttttttt

SEQ ID NO: 103213 - DNA, 464 bp, Glycine max
  Clone ID: PAT_MRT3847_64218C.1
tcgttgacgcgtgggcggacgcgtgggccagttcattaaacttggttcttggtagaagcaggatgagaagcgaaacagacaaacaacacaatatttaattgtaccacttaccatctgattttgatcttccaacagatagtttgtcaaaattgacaagtacccttttgaggatcaaggaatagaatcaagaaccaccaaaaggaggtagtctttgttgtagtaggtgtgaacctgagcaccatgaagatggctataaagatggttgtggagaggcttgtgttggacatatctgtgatgagctctgtccttgggacaagctcttcacagacagaatgttggggccaggccttcaccgaaaacaaggttttctatctatgccgtgatcttcctcacctattctggttccttcactggaactctaagcagaacgcagggacgttgatcatagcattcagacacacatg

SEQ ID NO: 103214 - DNA, 671 bp, Glycine max
  Clone ID: PAT_MRT3847_64219C.1
ccacgcgtccgggggcttggaagcagcacaagggtcccctggtaggacagagatgttttccatttgcatccctaatgtgttgaatcatagtggatttatggacagcaagagtgaatatgttcgatgtttgcgcttttcctgtcaggattctctttatgttgctaccaatcatggttatctctaccttgctaaattatgtgatactggtggtgctcagtggaatcaacttgtccaggtcagcaatggagcaccaattatctgcatggatttattgtccaaggactcttttgaacttgactgtggtgctgaggattggattgctattggagatggtaaaggaaatatgacagttattggagtttctaacgatgattgtactcctactgtgagattgtgctttacttggcctgctgaaatggagagacagctcttgggtacttattggtgtaaatctctgggatgtaggtatgtcttcacagctgatcctagaggaacattgaaactctggaggttgcctgacccttcacaatctgatcttccgagctccatgaggagtaacaacgtatcatgtatagcagagttcacatcaaattatggaatgcggataatgtgtttggatgcatgcatgggagaagaggtcctagcatgtggagatgtacgtggcaatatgg

SEQ ID NO: 103215 - DNA, 332 bp, Glycine max
  Clone ID: PAT_MRT3847_6421C.1
cggccgggtttatataccttttaccacgacacttcgcgccaccatggaacgggcgcgtgcgggaccagatcatctagacgaaaccaaccgaggcgagattggagagggctatggcactacctgaaaaacaccttcggcctgacggggttaatgaactctagaagctcaacagcgtgatgaacaaggactgtgaaaaggttggaagatggaagagcaacctcttatcaacccaacagcgggaaaatccactgatgggctacacatccacaggggacccctactcttatgtcggcgatactgccctgactttggatagcaagcaagcagcaaaa

SEQ ID NO: 103216 - DNA, 390 bp, Glycine max
  Clone ID: PAT_MRT3847_64220C.1
tgatgtactctctagcataagttatgtgggctgatacgttgcagttgtcaatgcatgaatactagttgagagaacagatttgtcataacgtagacggtcacgatatagacctatatatgctgatggtgaatgtacaggagcttgccttgcactggctgatgcagcacttgatcctgatattgctctagttctagatacggctaacccagctgcatacttgctgaggtccagcttgcaagtactaacagcattattggaagcgtatgccctttcactagtatgtgacctgactaacattctgatgacgctgaaggtgaatctctgaagatgctgatggataatgagggtccaggactatctctacagcatacagtgctagagctggctaag

SEQ ID NO: 103217 - DNA, 1112 bp, Glycine max
  Clone ID: PAT_MRT3847_64221C.1
aattcggctcgagctcgagccgctcgagccgaattcggctcgagcacaataaatcactatttgtgccttaaagcttgctagcaaaatggcccccttgttacgtaccctcttctttgttgcactctccattctttctctccttgcttgttttaccaatgcacaactttctaccaacttttatgataaaacttgtcctaaccttcaaaccattgtgaaaaatgcaatgcagcaagctatcaatggagaagccaggcttggagcctctatacttcgattgttcttccacgactgtttcgtgaacggctgcgatgcatcaatcttattggatgacactgccacgtttgtgggtgagaaaaatgcattacctaaccgaaattcagtgaggggttacgaagtgattgacaccattaaaaccaacgttgaagctgcttgcaatggcacggtctcttgtgcagatattctagcacttgcagcaagagatggagtagttctggttggaggaccttcatgggcagtagcactaggcagaagggatgcaagaacagcaagcgagagtgcagccaacaacgaaatcccttcaccattcttggaccttcccacactcgtgtccatgttcgccgccaaagggttaagcgcacgtgacctcacggtgctctccggtggccacaccataggccaagcacagtgccaatttttcagaagtcgcatatacaacgagaccaacattgaccccaactttgccgcatcaagaagagccatttgccctgcctctgctggggacaccaacttgtcccctcttgagtctctcactcccaatcgctttgacaacagctactactctgagcttgcggctaagcgtggccttctcaactcggaccaagtgcttttcaatgaccctttggtcacaacatatagtaccaataatgctgcatttttcactgactttgctgatgctatggttaagatgagcaatattagtcctctcactgggactagtggtgagattcgaaggaattgcagagttctgaattgatcatcgagagttatttattccactttaacatgtattattaatagtatcaaatttattttactttaataaatttatcatc

SEQ ID NO: 103218 - DNA, 186 bp, Glycine max
  Clone ID: PAT_MRT3847_64222C.1
cttctctttacacccccctctctattttgcgttcattctgtattccagttgaagtcttatcctctagccacatggccactcgatcgttatgacccgggcttcacagtactcacgtgagcaggcattgattgaaaacccttcacttgcacaatcatggcaacgatacatttatgagaccctatactg

SEQ ID NO: 103219 - DNA, 496 bp, Glycine max
  Clone ID: PAT_MRT3847_64223C.1
aaaggaccatggacggctgggtaaaaaaatttaacccccaaaatttttatatatttatttttaaacttaaaagggaaaaacggtttttttattcaaaacaaaaaacaagcttcctcataaggggaccggtctcaggcaagttgaaattggagcccgccccatagggcagaaaaataaggccaacccaccctccttgcaggtggtatgaccacatccaaaacccatgtccttcggatgggttaggcaaagggggcatactggttcggaagcagctgaacctgccaattctgctgatcccaaattgggcatgggcgaaatggccatgcgggctttatcaggaggaataacttctttagggggagggaaaggcctttaatgttgaaaaaaaactgattctctatcgtaaagtggaatatttgggcctgcccggtcctgcaagggatttcccatgagggcagaaaaaccaaaggtggcttccttcttcaaggcttcgggg

SEQ ID NO: 103220 - DNA, 575 bp, Glycine max
  Clone ID: PAT_MRT3847_64224C.1
acatatgatatagttactttttattctggtatggtttctaacgctggtttccacccatgaaaaccctcgtcatctcttctacacgcatctacaccaccaactattccctttccttgcaccaaagacaacacctcgttaacagaaatccctcctttttgcaccatatcctttagctcttgcttactaagaaccagcttaatcctaaccacacaacccttatcttccacttgatcatcctcatcaggttcagcaaacctcaccctctttttgttcactttttttgatgaagcctgtggcggcggcacgaggtagtataactggcccttgagcaatcttgtgtaggggttgagatggtgtaacactggtggtagtgactcggatattgcatggccccgaaactggttcagaacctggtggactctgatgggtgctttgtattcgaggattttgccgtcgcttttcatgactcttaccacgttccgttgtaggactatgcagttccccatggctttggtttgtttatttctcggtgattgcagagtttttttcggacgcgtgggtcgagcgccgggaat

SEQ ID NO: 103221 - DNA, 458 bp, Glycine max
  Clone ID: PAT_MRT3847_64225C.1
cggcaattttccacaatatgctattggcacattttagttgtgactaatcgtgtttttatagttggtcttttctactatacatttgtctttactttgtctctgaataggtaaaaatgcttaaagataatcatatataataacataatctagtatcacaacactcagctccgggatgtcacaactacaatgctgccgccatcaccatctccaactctgtaagaagactttttgccaacctcattcatggactagtcacagtatcaaatgggacattattgccatgacactgaattttgcacttgcatctctttgccataaaatggcaactggttgaaatgacctccaaactccatgattgttgggttgccaatctctctgatcaaaatccacgactgaacaagtgtctcctaccataagcataccgcacttttgagtaccatgacatcatgctcttgaaa

SEQ ID NO: 103222 - DNA, 175 bp, Glycine max
  Clone ID: PAT_MRT3847_64226C.1
cctttttatttttttttatacatcacatttatcatactttatagcttacagtatcataactcacagtgcactctcatcctgcatatcaatattctgcaatcaaacgcataattaagagatgctcaatgtttatatttttttagttgaaacattattacggggacaattttctagg

SEQ ID NO: 103223 - DNA, 426 bp, Glycine max
  Clone ID: PAT_MRT3847_64227C.1
tacggctgcgagaagatgacagaagggttttctaattaaatataaagagattttcagcagagatctaagagttaagactcaactctggtataaaattggttggactgttggcttggcataacaaaataaaaagttaaattaatgtcgtaacagtagttaagtacattatttcatttcttttaaaaaaatcacttattattaagtcaagagtactaatttgtcaatatttaaataatgattttaattatgatttgaaaatataacattaaaagctatatcatggaggctaggtgagagaatagagatctagtcttgtttatttatctatttaccaaactattatttcagttttcatttacttaatgaaaattgttaaaatatacttattatttagttgaaattgtagttatattttaagatgatttt

SEQ ID NO: 103224 - DNA, 623 bp, Glycine max
  Clone ID: PAT_MRT3847_64228C.1
atttcaaaaatggtgtagattcagaaaccctctctcgttgttggtgtggttgtgtttttgcatgcttcggacatgtcgatggcgatggtccacccttcggttcacccaatcgaagcccgtcatggctaccacctccgatttcccttctgttactgccttccgctaccttgttgctgctgtcagcctgcaaagcttgtggagcctctctttgggagttgctgatatgtatgccattttagtaaggcgtggctacagaaatgtgagaattgtccgcttattctctatcggtgatgggattacttcaacacttacattttctgcagcctgtgcttctgctggtattacagtcctcattggcaatgatttgaatgattgtgcacagaaccattgcagcaggtttgagacagcaacagcaatggcgtttatgagttggtttgctgcttcgccctcatttattttaaatttctggacgctggcctccaaatagaagcagcaagaaagggttttagctatgtatgtcatgtaactttgaggattgatggccctgattgttgcaaatcttaaccatgggcttttttgatcctttgaaatattgctgctcttcaattcaaggcatgagcttt

SEQ ID NO: 103225 - DNA, 949 bp, Glycine max
  Clone ID: PAT_MRT3847_64229C.1
ccacgagtagaggaaacaacgtgagagttccacaggagtaaagtaaaagcttttgtagattcagaaaccctcacttgttgttggtgtggttgtgtttttgcatgcttcggacatgtcgatggcgatggtccacccttcggttcacccaatcgaagccccacccatgactgagcatgcaattgcaattgcaatgcccagacacactctgaaggatacgcagggcatgcccggcaccctcggtggcttcctcttgcgcttcgcccagttctctttcgccctcgtttccctctccgtcatggctaccacctccgatttcccttctgttactgccttccgctaccttgttgctgctgtcagcctgcaaagcttgtggagcctctctttgggagttgctgatatgtatgccattttagtaaggcgtggctacagaaatgtgagaattgtccgcttattctctatcggtgatgggattacttcaacacttacattttctgcagcctgtgcttctgctggtattacagtcctcattggcaatgatttgaatgattgtgcacagaaccattgcagcaggtttgagacagcaacagcaatggcgtttatgagttggtttgctgcttcgccctcatttattttaaatttctggacgctggcctccaaatagaagcagcaagaaagggttttagctatgtatgtcatgtaactttgaggattgatggccctgattgttgcaaatcttaaccatgggcttttttgatcctttgaaatattgctgctcttcaattcaaggcatgagctttaaacttttagttgtgaggtttataatttctcaaacgatgatatggtaactttccaagtacatgtctacatggcacaatataaagtttatgctggtgtgaatgagtttgcacaagtatagcacccagagcggaaaaaaaaaaaaaaaaacgaa

SEQ ID NO: 103226 - DNA, 685 bp, Glycine max
  Clone ID: PAT_MRT3847_6422C.1
gggaccccaatttcactccctcctaggccatcaatattcctcgccaggttaatgtttgttaccgatgccggaggagctgttgttgcattttgtcctgaggggacttctcaagtgaagcttctcgaggacgaatgtcaaaaagaaggatttgtgatactacctattgaacctcttccttctcgtctaaatgaaattgacttgaaaaccttgcaaataaagtaatctatattgagggtttgaaaaaaaaaaaaaaaaaaaaaaaaaaaaaaaaaaaaaaaaaaaaaaaaaaaaaaaaaaaaaaaaaaaaaaaaaaaaaaacccgtcccaaaaaagttcccaaaagggaaaattattttttccctaaaaaaaccatttaagggaaaaaaggaaaggggaaaaaaaaacccaattggggttaaaaggggaaaaatttgaaaaaaaagttggaaagggaaaaattccaaaaaaccctgaaaaaaatgttagggagggcaaacccttaaatttttaaaaaaaaacggggggaattggggaggccataaccccggaaaaaggaaaacccctaaattttcaagggtatgagccactaaaattcaaaaagtttggaaacatttgaaactccaatgttgctcaaaaatggagggaaaaggaccctttgcttcttcaggaagggggccatgaaaaa

SEQ ID NO: 103227 - DNA, 689 bp, Glycine max
  Clone ID: PAT_MRT3847_64230C.1
gcatttgagatttttaaggagatggtttattcaggatatttcccagaatcccatgataaaaattactccattgtaatggatgcaattgacaaattttccaaggatcacagaacatcctctggtatacaagttttgatggaagagggaaaacttcctacacattgtccgtgaacagttggaagtgataggttaatcaaatgatgtgcgaaggctaaatgaggtagggagttcagttcctccgggctttgagaaagaaagactcaaaatgttttgtgaaccccatcgtgtaactttcagtattggtgaggatttttttgcatatcaaattgatggaattggcaaagaaacaaatgaacagacattggcaaagaaacaaatgaacagacagaacatgttaccgatagtttgcctacaaagagaacttgagctctggaatttttcaagatacatgctacttgtcaagttggttattctttatgtggatctagagagaatacaagaggaaaaaaaatgaagacaagaaaaaataaggttgcataacgtggtggtgtccatgtgttacctttgtccgagttgcagaaattgttgacaggggatccacatttgggctttgtatacgctgatttgttgtgtcattggttgtgggtggctatactcatgcttctaccgctccaagatgaggctgattt

SEQ ID NO: 103228 - DNA, 225 bp, Glycine max
  Clone ID: PAT_MRT3847_64231C.1
tttttaatttatgattgaggtcattgtagacgcggaaggtttattgcaattaattgtatattgcatgacacgtgtgaagaccaatcaagtacatgctgccccgtgggcaacaaaggggcttataacttgaagctgtgccttctagcaaaatctacgaagcaaataatatcggcacggtaattgtccctacaaacatgacgtaagaggacctgttatgggctacag

SEQ ID NO: 103229 - DNA, 205 bp, Glycine max
  Clone ID: PAT_MRT3847_64232C.1
cccacgcgtccgtccacgtgaaccaggacatcgggatagatgtctaggctgaatattgatactaaacttttgaacctagaagaagactggagaaatgagaggttacttatgaagaagttggactcgtttaatccgtatgctggaatacagccgtaccccatgtaaagctctggattggacaattggtgactgaacaggggcaaca

SEQ ID NO: 103230 - DNA, 250 bp, Glycine max
  unsure (1)..(250): unsure at all n locations
  Clone ID: PAT_MRT3847_64233C.1
aaaaaaaccgnggcgacccacccatacgaacaaanaaaatttttttaccagtttttcattttatttacaaaaatataaaactcgttggttctcaacaaattaaattggatctatcctcttcacttcaaaaaccatacctcttattacaaactaaacacattcacgtcacatatttaatattgatttctcaagttctctatgctctaacacacctttcacttctttatatatatttacaaaattttaatcc

SEQ ID NO: 103231 - DNA, 456 bp, Glycine max
  Clone ID: PAT_MRT3847_64234C.1
aggtggttcgacgtgcttcttcttcgcgtttgctctttctaaccctaatcaaaacatgtctgcggtcctaaagcattttaggaagagcttatactaacgttggggcacggtcacgaaaaccaaactccgaacattctcaatggaatcaacttatacagatacccttcatgccgcgctctctgtaagaagctagaaaccacgaatgagaaagtggttataattttcaatggccatgatactacggctggtattgataaagaagcagcctatgctgagaagaacccccaacaattctgtctataactaccaagggtcatttccttggtgaagaaatattttaaaccacagagataatgttttggagtatcttgtcacccattgtagatggcacatacaccagtccgaaccaaagactggaccctgctttccatgcaaaaatgtccactgatgaccatg

SEQ ID NO: 103232 - DNA, 674 bp, Glycine max
  Clone ID: PAT_MRT3847_64235C.1
taataaatgaaaaattctttttttgcgagatgaagcactcatatctttttcaacaaatttcgcttttgaaagtgtataatagttccatttcgtccatttccttcttgagcatgacttctttcttccaactgttggactacacaatgaaaggctgcactctcctcatcatttctaaactggattgtgactcccctggaatacaatgtctttttaccaacatcagatccttccaccacgcaaaccgattgaacaggactcaccttgaatagctgaacagttcgaggatcgacattgaatggaatctggtgagattgatgatgaatttggagaccgtcagagtcgaagcgagcaattcccggcgaagccgaagaagggagccgaagagaggtcggaaactgatgccaaagcgaactctcgctgcttccatttctgccctaacgattcctccattactttactactttctccaccgagccacaacccactactctctctttacttaacttctttcaaaccaatacgttcatgaatgataacactacgcgtgaaactatgtgtgagtgtaattattagagaagaaatcgaaatgaaactagggtttggggttcgaaaaattgagagccgccaaaggaggtgagggtttccggacgcgtgggtcgaccgagcttccggac

SEQ ID NO: 103233 - DNA, 469 bp, Glycine max
  Clone ID: PAT_MRT3847_64236C.1
accacctcgtaagaaaccttacaaatacccatcaccaccaccaccagttcacaaatacaagtcaccaccaccaccctacaagtacccttttcctccaccaccacctaaaaagccctacaaatacccatcacccccacctccagtttacaaatacaagtcaccaccaccaccagtttacaagtacaagtccccaccaccactactagatagtgattttagtatagcgccccatggatctgaagaacttgtgcaaataaaggagagggaagaagcaccatgcagtttatacagtgaagagtggaacttgtgaaagcagtagtgtttatttggtttccctttattatttttattttgtactttatatattcaaagttttaaggcactgttcagatctgatccatgtcttgttactccagttatattactatataataaataaataccatgattttttttccaaaaaaaaaaa

SEQ ID NO: 103234 - DNA, 1658 bp, Glycine max
  Clone ID: PAT_MRT3847_64237C.1
acgaggcacagaagagtgtttgtaaaacgtcatatctatccactcactcactgtctagtgtgtgatatgacatgatatgatattgatattacttggggggtaaattctgaggaagaagaaaccctaacaaacctaaactccgattaaatttgaatcgttaaaccctaaacccccaaattgattcattccgttggtcatggcttcttcatcgagtagcggattgacgttcaagctgcaccctctggtgatcgtaaacatctcggaccactacaccagggtcaagtctcagatgaacccaacccacgcgccaccgcacaacaacaacaacgccaacggcggcgacggcgtcgtttcgccgctctccccgcgggtctatggctgcgtcataggggtccagaagggccgcaccgtggagatcttcaacagcttcgaactcctctacgatccttcctcccactccctcgatcgcaccttcctcgagaagaagcaagaactctataagaaggtgttcccgcacttctatatactggggtggtattcgactgggagtgatgcagaggaatcagacatgcatattcacaaagctttgatggatatcaatgaaagtccagtttatgttcttctcaatccttctatcaatcattctcagaaggatctacctgtcagtatttttgaaagtgaactgcatgtcatagatgggattccacaacttatctttgttcgctcaagctatactattgagactgttgaagcagaacgaatatcagttgatcatgttgctcatcttaagccatcagatgatggtggtagctgctacacaaattggctgctcaccttactggaatacacagtgccaatcaaaatgcttcatagcagaataaaggtgctacatcactatcttcttgcaatgcaatatgctgttggcccttctgccaatgctcttgttgctctgggggcagctctccggactgggttgcctgctattgaatctgggaaatttcaagatgatttcttgatggagtacaatgacaccgtattgattagttacctggcaatgctgaccaactgttcaagttcaatgaatgagctggtggacaaatttaatattgcgtacgataggcaagagagcaggggaaaaatttttgcttttatgagactcatgcttggttgctcatttctggtggacatcctcaaagctcttttccaactttgtaggcatagatgtttttttttaaactctttttgctggttaggagttgattattgaagcatagtattgctttgatttgaagagaatagggagaggaaaaaaaatggagaaaaaggtatttgttttttattttctataacaagtctgcgatgtagaggggacaaaagagttcaaggacaagatgtgaagtttcattgtgattctttgttgagtcaccatccttcatgttcgtgctttgtggccaaattcttttgcatgtcttggaggaatagaacttttactgggttaagtggagtgtatggtaaaaaaatttaagtcactgcattgagtcaattgtatggtttacaaagaaggccattaatgtgctatatggcacagaacatgagcatatgatcattcaatgagcagatagtacttttaagattcttaaaaaaaaaaaaaaactcgc

SEQ ID NO: 103235 - DNA, 772 bp, Glycine max
  Clone ID: PAT_MRT3847_64238C.1
ttttgctttcaaaagatgagatagtacaaaagtgcttgtgagtatcgtatctatccagtgtgtttcttcttcttctctttcaagggtagatttctgaagaagaagaaaacccttacaaatctaactccgattgaaatttgaaagcgttaaaccctaaacccccaaattgattcattccgctcgttggtgtcatggcttcttcatcgagtagcggattgacgttcaagctgcaccctctggtgatcgtgaacatctccgaccactacaccagggtcaagtctcagatgaacccaacccacgcgccaccgcacaccaccaccaacaacaacaacgccaacggcggcgacggcgtcgtttcgccgccgctccacccgcgggtctatggttgcgtcataggggtccagaagggtcgcaccgttgagatcttcaacagcttcgaactcctctacgatccttccacccactccctcgatcgcacctttctcgagaagaagcaagaactctataagaaggtgttcccgcacttctacatactgggctggtattcgactgggagtgatgcagaggaatcagatatgcatattcacaaagctttgatggatatcaatgaaagtccagtttatgttcttctcaatccttctatcaaccattctcagaaggatctacctgtcagtatttttgaaagtgaactgcatgtcatagatgggattccacaacttatctttgttcgctcaagttatactattgagactgttgaagcagaacggatatc

SEQ ID NO: 103236 - DNA, 240 bp, Glycine max
  unsure (1)..(240): unsure at all n locations
  Clone ID: PAT_MRT3847_64239C.1
cctatggntcgtacactccttgctctcagccctccctcctcttcgccgcagtggccacccgcngngatggnggtggncgcgtccgacgccgacgacatcctgatccgtcaggtggtgncagatgttggcgaagcgaagaggaggacaacctgctgaangccgagcaacanttcgcgagttcaaggccanttcacnaagactnacnccancnaaggaggaccnngatnatcccntncggcc

SEQ ID NO: 103237 - DNA, 347 bp, Glycine max
  Clone ID: PAT_MRT3847_6423C.1
ctgatagcggagtatcctccagatttagacttttcagatattggagatgctcaaatgcaaacatagacatcaacttctcggaatttacttaactgcgaataaaacctgccataagataaaatttattttttttgtggccaaaagtaaattaatgttatcaaggaaacaaacaaaattagtttgccagaactctttctttgtaggtgtctggcttaaatctatcgttctcagcaaagatatcatgccaatatatgcttgagcagaatcatcaatttttgtatttgctaaagacagtgaggggagggttgaaactgtccctgcccaaatacatagtgcctgagaagtta

SEQ ID NO: 103238 - DNA, 282 bp, Glycine max
  Clone ID: PAT_MRT3847_64240C.1
ctcacgcgtgctgaatcctacacactacttattcacttctagctacttactcaaccacacggaccatgttcagactttactctaactacactttacacacacctattaaactaatgcacacgcaatgcatgtcaaccaccatggatctgttttctgatgacacctatttctcaatcgctgcttctatgtgctaatcccatcttgtctacatgtacatctttatgttgtatttcaggtcctggagtatcactctttgtctgttgaacgctgctgcttctgaga

SEQ ID NO: 103239 - DNA, 270 bp, Glycine max
  Clone ID: PAT_MRT3847_64241C.1
tatacttccggggaacccgacacggagagcgggagggggatatttaccagatctacgggctgttactaaccggactgcgcggcttcaccgtgtacgggacatgggggagacccgacagggctcactctatggtgaccagggacatgctgcaggggagcacaagtggcaggctcgatacgcaagaagacaagaaggtgggctgtgacaccacctacatcgagcgcatcgatgaaggatgtctgggagccctggacacacaccagaagagca

SEQ ID NO: 103240 - DNA, 608 bp, Glycine max
  Clone ID: PAT_MRT3847_64242C.1
agagtggtaaacaagccattgaaacaaactattttttacaagcatgatccataaaaaacctgatgcatcaacttttttacataatcctatagatgccacctttcctatatattgaaaagttacagtcaaggcaatttagcagttcaaccacggaatcttcactggatccgttgaagtgttccaaaacatcgctcaatgtagccccttcatcaaagttcttcaactactctacaacagaactctctgtagccttcaatttagttgaatttacttcctttgtttcactgactttgtgtcgtttgtttgtgaatcccccctcactggtcaatgaaagcttctgtacctcggaaccattgacgggtagagtaggtacctcgttaatttctaagttgcatttttcagttgaacttatggcagaaatgccgtcttcacaatgcctttccacgtggcatgtttctaaagtaggacctgacaaatttgaagcattgtgtgcaggttcaccatctttctcagtctggatacttccagattgaattgcttctaaggatattccacagtttcgcattgtcaaataagtctttgatgtgctgataagttatcttccaata

SEQ ID NO: 103241 - DNA, 498 bp, Glycine max
  Clone ID: PAT_MRT3847_64243C.1
ttaggcacaatgtatcataatgtcgaagcttatgtacttgagagttttatcattttgtgacttccaaagtctggattctttgcctgactcaatagttgcagaaagctgactaagttgcctagtgacatgtgcaatcttgttaacttgcgtcatcttgagatacttggaactcctataaaagagatgccgagaggaatgagtaaattaaatcatttacaacatctggatttctttgctgtgggcaagcacgaagagaatggaatcaaagaattgggagcactttcaaatcttcgtggtcaacttgaaattaggaacttggagaatgtttcccaaagtgatgaagcgttggaggcaaggatgatggataaaaaacacattaatagtttacagttggaatggtctggatgtaacaacaacagtaccaacttccaacttgaaatagatgttgcttgcaagttacagcctcactataacattgaatcgttgtatataaaaggc

SEQ ID NO: 103242 - DNA, 483 bp, Glycine max
  unsure (1)..(483): unsure at all n locations
  Clone ID: PAT_MRT3847_64244C.1
cccacgcgtccgattggatcgaccccagaaatatcaaagggaagctgcagctgctgcattgtcagaatttgttcgatatagtggtggacttggttcacttttggagcaaatggttgaggttttatgtcggcatcggatgagtcttcaactgttcggcgattatgtttgcgaggattagtacagatcccattgattcatattctgaagtatacggctcaagtcttgggtgttatattagctctactagatgatttagatgaatctgtacaattaactgctgtatcatgcttactgatgattctcaattcttcacctgatgatgcagttgagcccattctgcttaatctttcaatacggcttcgaaatcttcaaacaagcatgaatgcaaagatgcgagccacttcttttgcagtattttgggcgctaagcanatatggaattggggtactaagtgaggcatttgtcgagcaggtacatgctgct

SEQ ID NO: 103243 - DNA, 366 bp, Glycine max
  unsure (1)..(366): unsure at all n locations
  Clone ID: PAT_MRT3847_64245C.1
atggtggataaatttatttttggaagttttttttggttttttttttcaattttttttttctgttttttttttgtttttttatttttctttttttatttttttttcaacaccagggggaaaaaaacattttttgagggggagaaaaaacaaaaggcgggggaattttatgtaagagcaaaaaaatagtggcacaaaaaaacaacccacccgccgtagtcctacagcgtcctgactgggagagctgattttcttcccaaaccaaggggcaaacaccaaattcctcaaggggctcccggcgggccccagaaaaagaccnatcagcaatttctttttaccaaataaaaaaaaagaaaacggggggggcct

SEQ ID NO: 103244 - DNA, 394 bp, Glycine max
  Clone ID: PAT_MRT3847_64246C.1
tccgtggaagtagcttggcacttgtgttgtgaaaaagcaattaattttgggtcggttaatcttatcttaggtggataatgaattactgttttttctaactaaaatcgattctgatttgccttgacgaggcgctattatgggaatcccacgtaaatttccaaaattgctcaaccaccatacttaaccaaacaggttataagggcatttttgagatttcacctaactagttcgctaatgccaatctgtcgtcctgtcacttttgccaaaacctgttacagtactttaatatgtgcagtaaaatgttaaccatattaatagaggtaaattatacctcatttccctactaggatttatattaatatgatgcattatgttgtgtgacgactatgccccc

SEQ ID NO: 103245 - DNA, 519 bp, Glycine max
  Clone ID: PAT_MRT3847_64247C.1
cggacgcgtgggcggacgcgtgggaaaaatagaaaataaatcactttaatgttttgagattaataatcaactacaacatagctgtcagttgatgttattgcttctaatcttcccctttgaatattactactaatgctagctgctgctactacatcatttttttttctaataagacgccggattaatttaattcttccatccttttctttttcctgttcttagacgtatatgaattgactgacaattgatgtgttcgaccactttttttctgctcaaactaaaatgaattcaaatgaaatggctgttttagtctaaacccatcttgtatcttacatcaaaccaaatatattcatcgccaactctgatctttggtgattacacttcaagattttatccttcttctaagtctaatctttggtaacaacattcttaagcttttcatcgttttatacagaactaggatggtttgatttgcaatgtcattcataattggcagatcatcagcaacagtgatgagct

SEQ ID NO: 103246 - DNA, 502 bp, Glycine max
  Clone ID: PAT_MRT3847_64248C.1
gataacaaacatttgtaacattaatgggacattacagcccaacacaaaccaaacttattttgaaaggttattcctgacccatctacacatagcatttcttattaaaacgtgagaggaaaaccagcatcgaacatcacacagaaatgaccttcagcttaagaacccaccattattacacaacaccacgtgcatagtccactacttctaggatgtataggccgcgagtatccttacatcctgtagctcattgccagcggagataaccctctgctggaactgtgggatttcttacttgtcctgaatcttagccttcacattgagaacggggcctgagctgtccacctggcgccttatagacggaccgcgtcggctttggacgaaccaatagataccagcacgattgactcagcaccgagaggagaggcgactccatccgtatgaaggagtcaatatggtcacccccgtgctttagctgctcttcggtgaagagcactctctgatg

SEQ ID NO: 103247 - DNA, 334 bp, Glycine max
  Clone ID: PAT_MRT3847_64249C.1
aaacaatatgccgggtttcaatgtgatgagccctggccccactctaacgccttatgaaaggggagatttctaattgggattattgttgcccgaaaaatatccaatggcggttctccaggggaaggttctgtgaaaaaaatatcattccaacatttataagcttgtgacggtatgtgttgacactttcggaagaaagtggagtcctgtcctttagattcgcactgtgcttttgagtatttaagctcttctaaatgcgccacacccacataataccgcttttgagaacattgcccagcactttagatataatgaggggccagcggttgaaacagcc

SEQ ID NO: 103248 - DNA, 461 bp, Glycine max
  Clone ID: PAT_MRT3847_6424C.1
cttggttgtttttttttatcaccggattatagttatcttaaaacagaggcgttgtctaaaatcatacccttgggcctttccacaatcctgctactgtccactgtctatggggctgtatcaggcctagacatgccgattattgggctcgacaacgcacatgccgccatgtcaggcattgacggaggactgatgaccatgttctatcagcgtgagcataaagaccgccagtctgactgcgcccttcaccagacttagaacaggtttcagatcttgcatggtcaaactgcgattcatccacgaacacaactgccaacagtatcgaccctacaagctcggactgaactcggtttgcagagttgaccccctgaggagaacactgctaatggacttgggaaccaacatcgatgcccgaccgggtggtggacaagacctcgtgtaacacaaccgcgccaactgttgcc

SEQ ID NO: 103249 - DNA, 727 bp, Glycine max
  Clone ID: PAT_MRT3847_64250C.1
cacgcgtccggtctctattactctctaacaccatataaattcaacactcttccttctcctccttcctccaacaaagcaacttttttttttctcttcctttccatttcctaatttccatcatataaaatagtgccacccatcaccacaacaataacaaaatcagcagcatcagcagaagcagaagaagcaggtccaaacttcaattcatggaagtgtgatatcttatgtagttctaatctccacaaaaaacctaaccctaaaaagctaacctttttttttaatattgttttttttttttctttttttacttaccctagatgttagagccatggacataaccccaacaacaacgatcatcaacaccaccaccactcccagtgcagcaaaatccccggaacatgaaacagaaacaccgaccaggatcaccacccccatcactcccacaacgacaaaaaccttatctttctcgaatggtgtcctcaaacgccaccaccaccaccacctccaccaccctatgcctgcgtggttacctacaaagaatgcctcaaaaaccacgccaacttgggtggcacgctctacgctgcgagttcatgccctctccgaccgccacggcgaccccagctcataaaacgccgcctctacactcaccgcgtgaagatcctgctgaagatccgagtcgtaatcactatggtggggtgaatgttggtgctaacgggtcttcttctag

SEQ ID NO: 103250 - DNA, 1595 bp, Glycine max
  Clone ID: PAT_MRT3847_64251C.1
attcaacactcttccttctcctccttcctccaacaaagcaacttttttttttctcttcctttccatttcctaatttccatcatataaaatagtgccacccatcaccacaacaataacaaaatcagcggcatcagcaggagccgaagcggctcgaacttcaattcatggaagtgtgatatctctaatctccacaacaaacctaaccctaaaaagctaaccctttttttttttttttttaaatattggttctttttttacttaccctagatgttagagccatggacataaccccaacaacaacgatcaacaacaacaacactactcccagtgcaacaacaaaatccccagaaaatgaaacagaaacaccgaccaggatcaccacccccatcactcccacaacgacaaaaacctcatctttctcgaatggtgtcctcaaacgcacccaccaccaccaccacctccaccaccctatccctccggtggttacctacaaagaatgcctcaaaaatcacgccgccaacttgggtggccacgccttagatggctgcggcgagttcatgccctctccgaccgccaccgctgccgaccccagctccataaaatgcgccgcctgcggctgccaccgcaacttccaccgccgcgagccggaggagccccccatcgcctccaccaccacgcacgtcatcgagtatcagccccaccaccgccaccaccctcccccgccgctgcacgcggcggcggtagcaacccgcagccccaattctgcttccccgccgccgatctcctcctcttactatccctccgcgccgcacatgctcctcgccctctccgccgggctagcggctccgccggagagcaccgcagcgccttccgccgcgctcagcagaaagcgtttccgaacgaagttcagtcaggagcagaaggagaagatgcacaagttcgcggagaaagtggggtggaagattcagaagcgggacgaggatttgattcacgagttctgcaacgaggttggggtcgatagaagcgttctcaaggtttggatgcataacaacaaaaacaccttcgccaaaaaagataacaatattgttattagtaatgatattaatattactactagtaataatattaataccagtattattgatgataatgatgcaaatgggggtgatgtcaaggtttttgaaaaccctaacaacaaccatggtagtggtagtggtggtggtgaagatcctgctgaagatccgagtcgtaatcactatggtggggtgaatgttggtgctaacgggtcttcttctagttcttgatctaaggggaagagaagaagaataatgtgatagataggttaatgatgatgatgctgctactactggttaattaattagtagtttttaatttcttttctttttttgtttttaattgtttagtttttatattgtgaatgagaccaagatgatggatgatctatcagcttaattggagagaatgatatatccaaagggaaatttattttgatttttatggttttaatggtattgttctgaattaattggggagttagttgttactacttgttatgaatgtgtatatgtttgttt

SEQ ID NO: 103251 - DNA, 358 bp, Glycine max
  unsure (1)..(358): unsure at all n locations
  Clone ID: PAT_MRT3847_64252C.1
tttttnttttttttttttttaatnntntntttttttttttttttttttttttttttttttttaaatgccaaccgttttttttattccaaacaattttactaaagaggcataaccttggaacaatttggttcataattaagagaccattttttttttttaaaatccaaggtaaccctttaggaaaaaccccgcttaataaaattccccctgccacctataaaaaatccaagagcaacaaacttttgggggaaaaatttctagcaaattttcctattaaaaagggttttttttttttttggtttaaggcccgacatcaaagggggccttgttttcccaaccttgttttttgatcttaaaa

SEQ ID NO: 103252 - DNA, 187 bp, Glycine max
  Clone ID: PAT_MRT3847_64253C.1
ggttcggtccatgataatagccttttttttgtggatcagaggaaaggaaagctgccctttaattaacaagcaacatttggcaagaacggcagtaatgtttcgctttttttttgcctggattcaaaaaaatgaggaactatataagacgctttttttgaagcggtgtgcctcccggaagtcacaggac

SEQ ID NO: 103253 - DNA, 621 bp, Glycine max
  Clone ID: PAT_MRT3847_64254C.1
aaatatataatcatgctattaataattataaaaatatacataacatggtgggtacgagggcaggagtcacataccttgcccttgcttccacaagtcaaaaaaaattcgaccctagtcaaagcaagttttcccgttaaactcaagataggatcgaatgggtatctactgttagatctatcacttccaatgcttcataaacgtacaaatgttctgtcgcttcaaagacttgccaatttttctatacttagaagaattccagaatgtttccttcttctttttccttaaatctatttttctctgatacctccggtttctatatacttctcggccattcaaccacttggaataatttttccccgtcttacactcaaggaaatctgcaagatcatcataatcagatacctttttggggtcttctaatatgcaattaaggaacacttccccattgcaggttttctctgttccatcctgtaagttataggaggtgaaggaaaccgttcttaaattacatgcttgaattctacgaaactctgcggcaactttatagacaggtcgcttatctctagacccctttccattcttatcagatggaatttcagacgagcaaggttgcaatgacag

SEQ ID NO: 103254 - DNA, 390 bp, Glycine max
  Clone ID: PAT_MRT3847_64255C.1
cttcttcatatttatgctaccaaatcaattagatacagtgcagatcaaatatgactacaacagacaaacaatgaggagagttacaaatcagaccatgtcagggaacaattctcatagaagttgacacttatcctgctctaaaatcaatagtgacatggcaaaggatctggagatttgttttccatctagtactagattataagagccaaagcccagaggttcattgtggccagctgttgcagcacttgtttggcatcttgtttacacacttttttgcttgatcacacactcagactcaggaagaaaaaattagcaggtctagtttagtgcttggatcaattttaaattgggaatgactacaaagatgacacttgaatgttttccatattt

SEQ ID NO: 103255 - DNA, 225 bp, Glycine max
  Clone ID: PAT_MRT3847_64256C.1
tggagctcttgagggggttgaaggagtttaatgagtttgtgtccaaaccgaaactgttctacttcaagcccttggagaaaggattaagcctgttttgactgaaaataacatggataagtgctttcattgaacttcaggtctaacggagaggaaggcttaccagacattccaaagagttattgacaatgctaatgtgattatggttagctataagaatacactttt

SEQ ID NO: 103256 - DNA, 367 bp, Glycine max
  Clone ID: PAT_MRT3847_64257C.1
catcatcttcatcactatcaacaacaaagtcgatagccgccacgcgtgcaatctactgaggcttgctttcctgataagtcagctgcttcatgttgtacctcttgtgctccttcgggggctcattatcaaatttcctgagagtacgatcatcgcggatggtatcatgaacctcttgtgcaagggcctggacaccatcatcctatataccacgggtgatgtattctctgaagtgtgactggtattgctctggatcatcttgtgccgagatcttcatatacgcagcaacatgggcaccacacacatatttgcgatgaacctcagcatgcagctccttcttcttcttatcaaacccagcaaacctcttgtt

SEQ ID NO: 103257 - DNA, 382 bp, Glycine max
  unsure (1)..(382): unsure at all n locations
  Clone ID: PAT_MRT3847_64258C.1
gatagagaaaannactttgtgatgtctcttacatnnnntcgaanncacgatggaccatcagagactgcctgcgttaagaatatgttccagccaactcagannaagcgctatacacataacttggacatgttatgttagtttaccgttttaatttacatcttcttctgctgaccatttcagattttccttcgtgtgnnnngttgcatttaatattaatgttatatttgtattttttattatgatatgaataaactagctgttacctacttaaaaaaaaaaaaaaaaaaactcgagggggggcccggtacccaattcgccctatagtgagtcgtattacgcgcgctcactggccgtcgttttacaacgtcgtgactgggaaaac

SEQ ID NO: 103258 - DNA, 674 bp, Glycine max
  Clone ID: PAT_MRT3847_64259C.1
gtccatcctttggatgaagaaaacaatatttgtgatggaacattcatgggtgaaactgtgaatacaaatttattagcttctgatgctgctgatattgcaaactccggcttgccagttaaaactgatttacagaggcagttttcttttccaaagatgtttgataagcaacacagtttttcagaaaacatggtcacgccatttgcccaccaggccactaaactaactcgaatgcttagtgggtctgaaaggatgggtttgagctggccagagcctccactgcatctgctatctcagcgagttttggacagaccaacttcttttaaatcactcaaatcctttaaatcatctaagtcgttcaaaacattcaactctttcaagtcaattatggatgaaatgccggggattgtaggtcttcctgaaattgaccttgaagctttgataaagagaaaaagaagatcaccatatgtgaggattgtgagcaagcaaatggttgggattttcatcaccgattgggttcgtcggagcttgcgtaaacaaattcagaatttaaaggtttcaactgttggagttggtgttatgggctatattgacaacaagggatcaatctctgacagcatgtccatacatcagacgtttgtttgactcatatgtactcaccttacgtcaggttaaaa

SEQ ID NO: 103259 - DNA, 208 bp, Glycine max
  Clone ID: PAT_MRT3847_6425C.1
cagggaagagaacacgatacagtttagtccggtaagcagaaatgagttccctctctaccacgaccgctaccaccatgaattccatgcctcagtcgagtgccactaactacaagatcaagttcagacaaaagataagcattttagaccttgagtctcattcaccatgtagcacgttaactgacacgatcacctcatcgacgattcgtgc

SEQ ID NO: 103260 - DNA, 784 bp, Glycine max
  Clone ID: PAT_MRT3847_64260C.1
atggaatgagattgcaacatggtagacaagagaatctgtcaaacagagaaataaagatttttagcttagctcaaattacaacctcggtgggttcatatcactcggtgtgccgtttcttctttccctcaatttcttgccatatctccaaaaccttcacgaaccacacacccaaatccaacatcctaggaactttcacgcttgtctcgagccatgaagaattcgtgttctttttgtacttgtttctcagcatctgtcaaagaacaaaccaagcacgaattatggattgcatctgtaattacccaacagaggagccagatgaagataataatgatggcaactttcgcttattcacgtatagagaattgaattctgccacacgtggttttcacccatcggaaaagattggagaaggaggctttggcactgtctacaaggggcagcttcgggatggaactttggtggcagtgaaagtgctttcaattgagctagattccttgagaggagagagggagtttgtggcagaattgaatacactaacaaatatcaaacaccacaatcttgtcaatctccgagggtgttgtgtagaaggagcccacagatacatagtctacgactacatggaaaacaatagccttcgttacactttcttaggttcagagcaaaaaaggatggaattcagctggggaaactcggagggatgtatccaaaggtgtggccagagggcttgcctttctccatgagaacatcacccccatattgtgctagagatatcaattcagcaatg

SEQ ID NO: 103261 - DNA, 283 bp, Glycine max
  Clone ID: PAT_MRT3847_64261C.1
ggcggacagcagatatgactatgtcaagtgttttgaagttgaggatgaggccatgttccccaatatcatccttgtttggatcaacgcttgtaaactccataaacctcatgattcatataccttgcaattgatgaactcttgcgctgttgcagttcttgagcagtatgcacatgtattctttgcatatgggtccagcgatgagtatacttttgttttcaagaagaccttcaagttccacgtaaggcgtgcaagccaaatgctatccatcattacttcatttttt

SEQ ID NO: 103262 - DNA, 528 bp, Glycine max
  Clone ID: PAT_MRT3847_64262C.1
cacggattatagcgccctacgagtagtttgtgactcggataaatgatagcaaatgcgggtaagctattttaagcagttaagaagcttgacgctgtaagctggctaggaaagaagacgttgaagccgttgatcagtgctaggacaataaagaagacgaggccaaaccatgcgccgtatggctgcagccaactgcgatacggcagttcatgcacaccttgacgcttgcaggccgctcgaaaacgcaggtacacgatacagcaacaaatccaggagacgaatccggaggtgttagtgatggtgacaaaccaagggaatacaggagaactgctattacccgcagttcaggtaagctagaaagccaaacaagccacatgcgagcactgctgcataaggaactccgcctttagtacagcgcagaaagactctaggtgcttgaccggaaatcgctagtgcatatagagcgcgagagctcatatagaggtacgcattgccagcagaccacgcaattgtaagatttgacgcattgac

SEQ ID NO: 103263 - DNA, 637 bp, Glycine max
  Clone ID: PAT_MRT3847_64263C.1
aagagtgcggaggcgttcgatccggccacagaagctggagtgaagtgaaggacttcttggattgcgccacgtgtccgagaaccttcgtggacggtggcgatgacgagggggtgttcttgtgcagcggcgaggacttgattgcccttcgtggggacacgtggcagaagatggcgtccctcccgggggagatacgaaacgtgtcgtacgttggggcgtttgatgggacgctggtgttgattggatccagcggctatggtgaagtccacgtggcttatgcgttcgatgtgaagagttgcaatgggaggaaactggagagcccagaggggttcaggggccatgtccaaactgggtgtgttttggagatttaggaaattggctttttgatttttccatataaacatatagagtataatttttgttttgtaaattagcccttttcttacacattagagtttaattgatgaaaatattgtgagtgaaaaatgtttttgcctcattctataatagtataaggtggagataagatcactttttaaagatttgggtatgtttagccattcgcgttgtgtggctgactctcaaggcaaagacctaataactaagtaagcaaggattgattcgattgcggtgaagcgat

SEQ ID NO: 103264 - DNA, 805 bp, Glycine max
  Clone ID: PAT_MRT3847_64264C.1
ctaacacacataacaataacttagcaacattttttccttccttctttctttctttctatactttttgttgttaattctaagttctaagagaagaaaaatggagggtggaagatcatcagtttcaaatgggaatgttgaggttcgttatagagggattagaagaaggccatggggaaagtttgcagcagagattcgtgaccctacaaggaaaggaacaaggatatggcttggaacatttgacactgctgaacaagctgcacgagcttatgatgctgctgcttttcattttcgtggccacagagcaattctcaacttcccaaatgagtatcaatctcataatccaaactcttctttgcctatgcctctagctgtgtcagctcctccttcttattcttcttcttcttccacttctaattattccggtgatgataataataaccaccttgtgagaccagctttttctggagaaataatgcaaggtggtgatcatgatgatgatacttttgagttggagtacttcgataataagttgctcgaggaactccttcagatgcaagataacagacacttctaaaagtaaaatataacacaagccagctatgttgtgttagtcactggcatgaaataaaatgcaaagaaatattgttgattttatttaatatattttgtttgatttttttttttttttttgtagctgatcaaagttcttcgaaatgagattggacatttgttgttattgtaaggattcagttatgagaataataagcgacatgcaaatttaatattaaaaaaaaaaaaaaaaaaa

SEQ ID NO: 103265 - DNA, 2219 bp, Glycine max
  unsure (1)..(2219): unsure at all n locations
  Clone ID: PAT_MRT3847_64265C.1
ctctactcctcgcttcaacggttcaatcaatcaactctccttccttcccttatacccccccttctgtgtgttatccctcgcgtccactcaatgaaatgctgtgacgtgatttgcagaggagaagagggaatggcggcttacatgtgtgcagacagtggcaacctcatggcgattgcgcagcaagtcattaagcagaagcagcagcaagagcagcagcagcagcagcagcagcagcaacagcagcagcaacacttgctacaccaccaacagaaccctctctcccttcacactccaattccatggaacaacactcctcctctcggctaccctctacctcccaccaccgatttcccccccgaccccttccaacccgatccccctttccacttccaacccgacccccactccttccgcttctccgacttcgactccgacgactggatggactccctcatcgccgccgccgacaccactgatttcccncttccccccctccgatctcaacccgctccctctccaacccactccccccttcccctccccctccaccggcccagtcccccgtggactccgactccgactcctccgtacatcccctcctcanagccctggccgagtgcgcctccctggccgaaacggagccggatcaggccgcggaatccctaagccgtttgcgaaaatccgtttcccagcacggaaaccccactcagcgagtgggcttttacttctggcaggccctctcccgcagagaagaaaagggccataatagcacttgggatgaggagttaacactctcttacaaagccctgaacgacgcctgcccttactccaagttcgctcacttaaccgccaaccaagccatccttgaagccacccaaaccgcctccaacatccacatcgtcgacttcggtatcgtccaagggattcaatgggccgcactcttgcaagctttcgccactcgtccttctggaaagcccaataagatcagaatctccggaatccccgccgtctcccttggtccctctcccggcccttctctctccgccaccggcaaccgcctctctgacttcgccaggctcctcgacttgaacttcgtgttcacgcccattctcactcccattcaccagctcgaccacaacagcttctgcattgacccaaacgaggtcttggccgttaacttcatgcttcagttgtataacctcttggacgagcctccctccgcggttgacactgcgctcaggttggccaagtctctcaaccctagaattgtcacccttggcgagtatgaagcaagtgtcacacgtgtcgggtttgtcaaccggttcaggactgcgttcaagtacttctctgctgtgtttgagtctctggagcctaatttggccgcggactcgccggagaggtttcaggtggagagtcttcttctcgggcggcgaatcgcggcggtcattggggggcccgggtcggtgaggagggagagtatggaggacaaagagcagtggagggttctgatggagcgtgctggttttgaatcagtgagtctaagccattatgcaattagtcaagctaagatacttctctggaattacagttacagttctctgttttcgctggtggaatctacaccaccggggtttttgtctctggcttggaaggatgttcctctcttgaccgtctcctcttggcgttagttaatgggttcgacttggttgattgttattggaaagggtttccacctggtccttttttccctggtgtggaacaactaattattattattattattattatttgtcgatatgccatggatgatcgatcatgttgtgctatgctagcctcttcaattactgaagttatgcagaagatttgatatgtgaattggctggcactacaagaaattgaggtttttgggagaattgccacctttagcagcagtttggtcctctactagttccacacctccttacttttgtttttttagttgatttttctatttcttatcagcgttttttttttcttctagtggcaatgatgttattattagcttcaagaattggctaggcaaactgtgacaatgaaaatagggagaaatgggatggagaaaagctttctttctcattgcttctagtcattgtgatttgtgactctgtaaattggattttgttgtatggatttaaattggtctgaatgaatgaaatgaatatcaaaggatttttatcttt

SEQ ID NO: 103266 - DNA, 234 bp, Glycine max
  Clone ID: PAT_MRT3847_64266C.1
aactaaaaacatgaaatcagtgggggcccggagaaagaaaacagattatgatttacaggttttctttttcattcttttttacgtatcaaattcaaaaacaccacggaaaccactacagcgtggcttcaaaaatacttgcccatggtgccctttaacacccaaaaaaaaaaaaaaaaaacattccaaaagcgcaatggtaaaaattccaacaaagccgtaacaaaatgaaaaatt

SEQ ID NO: 103267 - DNA, 328 bp, Glycine max
  Clone ID: PAT_MRT3847_64267C.1
ccccttccttagcttggattcttttgagccggctgcctttttttttttttttttagaaaccattcctgccttattttccccaaattgggccttttccgggggaaaaaaccacctggttgcagaagtggtccggagccaaaaaccccagcctttttccagaattttggcttaggattggcaaaaaaaatggaacccttttaacctaaaccccggccacccttaccaaccagaattgggagaaaaagaaaaatgggtttgtccaggtttaggggtcaccttttgtcccagaatccaaaggttttacggtttttggaaattctgtttttgg

SEQ ID NO: 103268 - DNA, 503 bp, Glycine max
  Clone ID: PAT_MRT3847_64268C.1
gtcacccgcgaacaacccacaagatggcaactaaatacccgcttgacgaaaaagtagatagctcagcagatcatattgatgatgttgagactcagcaagagcgtgtcctcagcacgcaagagaatgaagcacatcaggagcatgtattcgatccgaaggagacgaaacgcattctccgaaaggtggactttcgcttgatccctgtactagcagtgttatatctgcttgcgttcctggaccgcagcaatattgcaaatgcacgcgttgcaggaatgaatgcagagctggagttgaccggaccgcagtataacatggcgttgactgttttcttcttcccatacgcaatattcgaagtgccttcaaacgtcgtgctcaaactcatgaaaccaagcgtgtggatctcgatcttgatggtaacttggggcatcgtcatgactttgcaaggcattgtcgagacttatgaacatctcattgtcaccagagtgcttctcgggctattcgaa

SEQ ID NO: 103269 - DNA, 292 bp, Glycine max
  Clone ID: PAT_MRT3847_64269C.1
gtgttgcctcccttgttgtgtttctctgttgttttttttgttttttttttgaaagggggggacgaatccctctcagggtaaaatccgtggcaagccctgccccattggagctgtatgtggaattgctttccttcttttgaagttctgcctaaaccgctggaaaagaaaaaaaaaacgtcccaaagctatggcttttgcttctggaacttgccttgattattatgcaattaacaagattctttaccttgagacccataaacctggataaacattttcttgttgcggaactttt

SEQ ID NO: 103270 - DNA, 1312 bp, Glycine max
  Clone ID: PAT_MRT3847_6426C.1
ccacgcgtccgattttctcctcgagccctatctctgtcaggaaaattctattgaacccaaaaagagagaactttttttcttggtttgtgttttcattttgttgtggttttctaaagcgaagtgaaaaattcaatggcggaggttttaaccaaggcgagtttggtttcatcttcttggcatggggttagtcaacggcatcatcatcgaagggtttcaacggttctttcaaataatacatgtagcttccgttccggcgtgggaaagttctcttctttgaagatgaattctcaggttctcagatcttggtcctcttcttctgagtttcagggtaaaaagcttgtctttcatgtaaatataggattacccaatagggtcaattcgcggttgagagcttctactgggactcagatgaaccttagactagggaaagttcagaaatggtgggaaaaggggcttcaacccaacatgaaagaggtgacttcagcacaagactttgtggattcactgttaaacgcaggggacaagttggtggtggttgatttcttctctcctggttgtggtggctgcaaagcccttcatcctaagatatgccaatttgcagagatgaatcctgatgttcagttccttcaggtgaactatgaggagcataagtccatgtgttatagccttaatgtccatgttcttcccttcttccgattctatagaggcgctcacggtcgattatgtagctttagctgcaccaatgccacgatcaagaagttcaaagatgcattagccaaacacaccccagacagatgcagcttaggcccaaccaaagggttagaggagaaagaactcgaagctcttgctgccaacaaagatctttccttcacctactcaccaaaaccattacaaccttcacatgaaaacgaagagttggcaaccgaaactgcttctgctcctgctcttggttcaggatctcttccttcaccttcaatgaccctcaatgctgtggcctctaatgagagaaccttgaccacttctgggagatgatgtggtcagtttgtgagcaaaacgcattttctgaccctatcccttgtacagtgtagattttggtttggtgaagatgtcatattgatagtgtgtattcctcaaaggcatgtttattttaatccatgccttgctgaggttagagaaaattagaagctgtaggaaattattagttaatggtatttttttttttatgtatgagggaatcgtttcctatcctattgttgtaaaatgaatgccattttattcaccaatggatattttgtttctttttctaagccaa

SEQ ID NO: 103271 - DNA, 294 bp, Glycine max
  Clone ID: PAT_MRT3847_64270C.1
gtggtatgagaagagagagaagggtttggttcttgttgcgctctctttctctttggggtgggtcttctgtttttgacacaaaaaaaaaaaaaaacaaaactttggtgggatttgagggtatttaggttgcggattgagttggattgttggggttggaagaattcattcccttcaatgtgatgccatgggtgaaaagcctaacttctgggaggacttccatttcatcagcacctggaggggattgtcccaaaaaaggtgaaacgttcgttcacgacaccattaagaaaggtccat

SEQ ID NO: 103272 - DNA, 183 bp, Glycine max
  Clone ID: PAT_MRT3847_64271C.1
ctctgatgtgcgatagacgaaactaaatttacactgaggcattggttgagatgcgcagattataatccaaactccaagagcaaatgctactcaccaagctgacgtgaatgaccatgagcaggttctagcttacataagttaccattaccaggcaccacattcgtctcttcattttccctcagc

SEQ ID NO: 103273 - DNA, 437 bp, Glycine max
  unsure (1)..(437): unsure at all n locations
  Clone ID: PAT_MRT3847_64272C.1
atttactcttccttgaaaaatacaacaagggttgaaggggattatgccagctggatgcattctattgataaaatgcaggctttctacaacgttgaactgtacatttattggcaatagctatgctacctactggagcaaactagacccaattacttgagaacaacaagcataaggtacatgattaaccaatgtatgagggcatgtatcaaaatacagatacaatggaaaccctaatatctaacgtggttacaaatatctgtaccttgaaagcagcttatatgcaagacaaagctgctcatactccctacgaccctgataaaattcacactgatgataaacttgngatgagtgagctgaaaaatctgaatgaactgaagcatttctacagggagaacaacccgaaaccagtgtgtgtgtgttcccaagactcacgttta

SEQ ID NO: 103274 - DNA, 479 bp, Glycine max
  Clone ID: PAT_MRT3847_64273C.1
ggctcgagggacgaaaagattcctcatcggcaagcaggggttggtttccttctttcttctcttgggcgggcacatcacttccctctacaagtcaagaatattcattcctctcttcctctttccaccacctatttcttcctttgcttctgtttcgctccactccgagatctacacactattccagtgcagtattgggcaaatgcaactgctggtgaaaattgggtagttaatttgtaaggtgacacacctggaacttgggaagctgcagtaatggatcttgacggagggtgttcgtcaacagttagcacaggagcacaggcaatttcaggacgttcaacacgacatggtgcgttctatcggtttacacagcagaaccttccagcatgtaaacctgtgcttacacctgcagcagacattgctacatctctattgatgggtatcaatttcattcctgatggacttgttacacttcgtgcctc

SEQ ID NO: 103275 - DNA, 132 bp, Glycine max
  Clone ID: PAT_MRT3847_64274C.1
tctgagtccagttactgtgtgttgaattcaatatgagtcttaagggatgtttcgagggtggtgtcgcttccatcgtcataggctggagcactcagcgactcgacttcatcactgttcgaatgcaacttcaag

SEQ ID NO: 103276 - DNA, 729 bp, Glycine max
  Clone ID: PAT_MRT3847_64275C.1
ggaggctgatgggcttgagtgcttgcacttgaaagattgtgcactcgagttttttgaactcattggcaaggggaccttgaagcattttaagattgatgatgttagtgttatacatcttgatattggtgagacagttgagaatcttgagactgtggatatcagcaacttcccaattatatggccaaagttttaccagatgatttcaagatcgtcgaatttgaagaggcttcggctttgggatgtaatgtttgatgatgaggatgaggttgtggatttggaaacaatcgcgacttgctttccctacctgagccatttatctctgagttatgatgtgagggatggagtgctttactatggtttacaaggctcttcctatctggagagtgttgttgtcttggagcttggctggactgtgatcaatgatcttttctcccactgggttgagggtctgctcaagcgttgccccaatctgaagaagttggtcattcatgggattgtttctgaggctaagtctcatgaagaatgccagatgttagccaatttcactacatccatggttgagctgatgaggagatacacacatgtagatccatattttaagtatgaataagattttgttaaataccttgttatagctcatgctttcttttaagtctaattgtgtagccacctttgtgggtagcttattgaattcaagagtttatgcacaacttttaacttattgtttgg

SEQ ID NO: 103277 - DNA, 298 bp, Glycine max
  unsure (1)..(298): unsure at all n locations
  Clone ID: PAT_MRT3847_64276C.1
gactaacaccctttccttctttcgtcggatagatcttggaattctgaatcaaaatctcaaaaaggagagatagcatttcnagacagcntagagtcggnncagcggngatgnngcnttgggntnnnttggnngnggggggttggnnggngtgggggggggggggggggtggggggggggggggtggggggggggggggggggggggggggggggggggtcgggggggggggtgtggtggggggggggggggggggggggtggtggtgggggtgggggggggggcgtttgggggggggcg

SEQ ID NO: 103278 - DNA, 315 bp, Glycine max
  unsure (1)..(315): unsure at all n locations
  Clone ID: PAT_MRT3847_64277C.1
gtcgnttgcacgcgtacgtnnagctcggaattcggctcgaggtanaaaaaaaaanaaaananaagaaaaanganagagannnacaantnaannngacannnnngntcgancgaaanagnacaaggtnagaagnaattngnngacnatctggtggtgtgacnacnagtgnngnccngtgtagngtgnanaggnttgnggttcgggcctngctttcctgngtgncgacnantgtgtcttgnnnngtngntgnnnngntncgtnnnngnnnnccncntntgnngncnnctncnnnncncnntncgtgcncnntttcnc

SEQ ID NO: 103279 - DNA, 507 bp, Glycine max
  Clone ID: PAT_MRT3847_64278C.1
tgaaaaacaaccttcattacaatgagtccaaaggcatctccatcagcaagccttatcaaaataggttcggatggctttgatctgatagagaggcactatggtcgattcagaagaaatcaagttcctccttttgaagtgcctatcattgtgaatagcaataaccctggtgcttcatttggtggggctaatattgacaacaaagaaaacccaaagccaccacgtcgtaattgggctggtagatcattggtctcactaagtagtatcaactagtgtaagttcaagtatacaaatacttaggtttttgttctgattttttccccttttagtgttacatacttgcaccaagtatgaaagtactgatttatcagaaagccttatcaacaatatgatggttctgaaagagcttgtgcatatggtagtgtgtataaggtttgcagctgaatgcttatatgttatgattgccttgtagtgtgtgttctatatctcgatctagtggatgtgttatat

SEQ ID NO: 103280 - DNA, 285 bp, Glycine max
  Clone ID: PAT_MRT3847_64279C.1
ccacgcgtccgcccacgcgtgctgacacccgagaggacgacttaaggggacggctgaaatctaataatcatcgacattcgtcagattatcaacgctgtcacggttgcatccttgaatttgatcatacacgattataagaagatgtacaagcagatcactgagcttaaactactattcaaaaacatgccctcatgtggaatgcattgctgacaaagcagtgaatgacgccactgctagagacaaaactgttccacctgcactgctgcgaatgcacttacatgactg

SEQ ID NO: 103281 - DNA, 517 bp, Glycine max
  Clone ID: PAT_MRT3847_64280C.1
atggatgggacaccatctcgtctggttcgaaatcacgatcaagctggtgcttggatttggccatgagaagtgccagagcgtagcgcaacgagttgtcccatcgagcttcatcgacgccttcctcgtcatgatgaatctgtgccttcaccagctgctcaaatatatccatttgatccttcttcaggaacccccaggatttaccgtagtataagactgtgtcccgggaatgaaagagaaagcgcgtttctcgagcagaacgggtcacactcaacatccgcttcttcagcacgtcgttttcaagagtgaagcgtcggatgttctgctttcttatgtcctccactgtgaagtccagtgagtgtgttgagagtggtctgcgcattctcagactgggaaacaaagggcccacctcgcgcaagaagtcgtcaagtgcgcgagtggatgaagcctggcctgcgccaactgtcattcgaactgtctgcgtagtccttgtctccaacaggatcttcctcttttcctc

SEQ ID NO: 103282 - DNA, 485 bp, Glycine max
  unsure (1)..(485): unsure at all n locations
  Clone ID: PAT_MRT3847_64281C.1
gtttttattgtgttgtgttgtttttggttggtgggggtnnnnnnnnnnnntngnnnntgnnnngtggnntntgtnntngttntnttttaattttntnttttttgtnttttttttttttnttttntnttggtttgtggggggggngangttgtnnnttttttttnnnttttnnnnntttttgggnntntggntgattngatatgtntgtgnntnnanttgtttaangtnngttggttttgagggnagnggttgaagnattggattnttaatttttanaantanaagnattataatttagaantanagaaatttttaggtgaananangganaatattnattttaagagnatttaaanagatntagattaagtgtgttgaaatganaggtgnatntttagtatgaatattananaanagtaatggattgtaattgtanagtatattggatattaatttaaatgttattatangttgtgaaagtttat

SEQ ID NO: 103283 - DNA, 377 bp, Glycine max
  Clone ID: PAT_MRT3847_64282C.1
attgggagggctggtgcgcctgctggtgctgctgcggcattcctggcgggacccacgcgtccgcctttttttacctaatggtttggtcctgggtgcagcgatttcataaatgggagagcctcggtttggaaatggtgagcttccattctcaggtttgttaccacgtggcaactgctccgcgcggtatcacttaactcggagaccatccgggcggggactgggtgcggagttttttactaatgtcagagacaacaagatctttagcttgtatgtgcgagattggaactatgggctggtggacgattaggttacaatgcaagtgaaacaatgagttgaacttgatattgtcatcttggggacatagactgctgtgtttc

SEQ ID NO: 103284 - DNA, 1004 bp, Glycine max
  Clone ID: PAT_MRT3847_64283C.1
taaagaaaaagtattgactaatcgatttattttctttacagtgttgcactcaaaatttggctagcacatcatacataatctatatatatccatcttacaagctttcaacccccctttatggtggaactttttgcatgcgttttttcaaaatacaattctcaatgttctcggccatgtggatttctttggagaccacctttgccttttgcactccatactaagatgcacaattaaagaaaaaagattttctgtacacacatttgcattgaacatcaacacaaggtttcctcttcccaacatcatcaaagatgccttgaaaacacaaaaaaaaacagaaattgacgtatgaatcaacggcgaatgcagttgttaggtgcagttaatgaggcacataatatccacaccgctatgtttatattatatctaccgcgagaataattttgtagggttcgatggcgtgaggcccatcacatactcgaccccgttgccccaggtcaggattaccccggtttggccattcggttcctgcatagacaaaagagtcagaaaatatgctcttctgggtaacaagtttcttccgtgacacacggaagccgaaacttgttccagagcataatgtcacgcaccaccacgcgcgcgtggcggcgagtgagaatgaagaactgcgaccccacgcggaaggaggagaaggggaattctgggggcatcgcgtgttcgccacgcgcggtgtagcggtcgaaggggttggggtcgttagagagaatctccatgaagcttttctgtgggtctgtgtggctgaagatgtgagagatgtgagtggattggagagcgaaacgggtgcagaggcgtacggagatctagtagctgtaggaggtaggagtaaccagggagatagtgacttatatgacaataccgaatatatctgtagggttctcttattattatgttaagatctacattactgtgagacaacttgtcccatgttccaactagctgaaagaaac

SEQ ID NO: 103285 - DNA, 1332 bp, Glycine max
  Clone ID: PAT_MRT3847_64284C.1
cggctgcgagaagacgacagaaggggatacaactcaactctacatccacttccccactctctctcctctttccatcgtccatggcctccctcatcgaatctggctggcagtacttgatcacacatttcagtgattttcaactggcgtgtttgggaagtttctttctgcatgaaggtgttttcttcttgtctggacttcccttcatatggcttgagagggcagggtggatgagcaagtacaaaattcaggccaaaaataacacccctgctgctcaggagaaatgtattgttcgcctgttgctttaccattttggtgtcaatctacctgttatggttttttcatatcccgtcttcagatacatgggcatgcggagtagtcttcccctaccgtcctggaaagtagttctaattcaaataatcttttacttcattttggaggactttatattctactggggacatagaatactgcacacaaaatggctatacaagcatgtgcacagtgttcatcatgagtatgctacaccgtttggtcttacttctgaatatgctcatcctgctgagatacttttccttgggtttgctaccatttttggtcccgccattactgggccccacttgataactctctggttatggatggttctgagagtcctagagacagttgaggctcactgtggttaccatttcccatggagtctttcgaacttccttccattgtatggaggagctgatttccacgactatcatcaccgtttattgtacaccaagtctgggaactattcatcaacttttacttacatggaccggatatttgggactgatataggctacagaaagttgaaagcattgaagagcataggagttgaagacaatagtgaacaaaagaaacaataagaacaagtttttgggaatatccaggaatgattagagagttgatatgcaacttgagggtatatttgaaaaatttcctatcaactccttatgtgttcttgtgtttgtgtagtggccggtgttgtctacaatgtgctgatggctttttctggacattcatgccctgttaattagaaaaacttcattagtgacagtgatttcaatttttggatgtttacctttgctgatctaatattcttgataataccctgttttttccttgttgcccgtgaatgttatttgtttgatgataaaatcatttgaattgtatggagccaaatgacagttgtgattgaattggaacttatttttaagtatcacttttaaaataaaaaaaaaaaaaaaaaaaaaaaaaaaaaaaaaaaaaaaaaaaaaaaaaaaaaaaaaaaaaaaaagggag

SEQ ID NO: 103286 - DNA, 1834 bp, Glycine max
  unsure (1)..(1834): unsure at all n locations
  Clone ID: PAT_MRT3847_64285C.1
gcgtggcaaaacggcaatgcgtttgttgcgaagagtgggcaaagtaaaaaggaaggaggaagatgacttgagttgagctgttaagacagaaagctaaaacagaagaagcaaagatgatattgcagttcttcgtgctttcacagagaggcgataacatcgtctaccgcgactatcgtggtgaagctcaaaaaggaagcgctgagacatttttccgaaaagtaaagttctggaaagaagatgctgagggagatgctccacctgtttttaatatagacggtgtgaactacttccacgtaaaggttgctggattgctatttgttgctactactagagtcaatgtctccccttctcttgttttggaacttttacaaagaattgcacgtgtcatcaaagattaccttggtgttctcaatgaagattcctttagaaagaacttcgtgctcgtttatgaattactggatgaagtcattgattttggttatgtgcaaacaacatccactgaggatttgaagtcatatgttttcaatgagccaatagtgattgatgctgcacggatgcctccacttggccctgcttccatttttatgcaagggaccaaacgaatgccaggtacagctattacaaagtctgtggttgctaatgaacccggtggaaggaagagggatgagatctttgttgatgtaattgagaaaataagtgttacattcaactctagtggatttatacttactagtgagatagatggaaccattcaaatgaagagttatcttactggtaacccagagattcgacttgctctcaacgaggacctgagtataggaacaagtgattatagaggttcaggtgctgtcattttagatgattgtaacttccatgagtctgtacaccttgatagttttgatgttgatagaactttgtcattggtaccaccagaaggtgaatttccagtcatgaattatcgtatgactcaaccatttaagccaccctttcgtattaatgcattaattgaagaaacaggatccctaaaggctgaagtgaccattaaagtgcgagctgaattcaactcaagtatcaatgctaatactgttcttgtgcagatgcctctgccatcatttacatctcgtgttacttttgagttagaacctggagcagttggacacaccactgattttaaggaagcaaataaaagactggaatggggtctgaaaaaggttgttggtggatctgaacatactttacgagcaaagctgacattttcacaggagttacatggaaatatcatgaaagaagcagggcctgtcagcatgactttcaccgtacctatgtacaatgcttcaaggcttcaggtgaagtatttgcaaatagcaaagaaatcaaaagcacataatccttatcgctgggttagatatgtaacccaagcaaactcatacgtagcacggttataattggaatctctgcaagtccaaattccgagttaaatttggggggatggcagcatatcaggtgaaaaaatggcgggctctctgcctctacaagtgaagataattttctctagataatgaatggctaaatggaactagagttcttaaaatttttcattttaaatgaaaatgaagatgtacacgacaaatcttaaaattgtgtaatgtggagggcagacatctaaatcttaaaattattaaagacttgatgtaatatcaaatatcaatagtcttatgatgtgtttagcctcctcagtaatgtgttggactagagatattcgtttgaatgtatatgccattgaacctgagctggctttgacgagaaaaaaaanaaagaaaaaaagggcggcccc

SEQ ID NO: 103287 - DNA, 775 bp, Glycine max
  unsure (1)..(775): unsure at all n locations
  Clone ID: PAT_MRT3847_64286C.1
aaacgagtttcgaagcttaaacgttgggaaacatcatcgtcaccgtggtcggaactggggttctgggattgcccttcgcttttcggatcgctggatgggtcgctggatcgctcggggttgccatcgtcggcatatccacctactattgcatgctactgcttgtgggccatctctcatctctctttgctcaatcattgcatcttttttttttattagaatgcaagaatcttttctttttcctttctctttaagaatttaaaaacaacacactatattgtcatctaattacacgtagttagtacgtatggtttctgattagttgattttttttatttattggttcacacttgacactgtaagaatttatcaaaacacactatcatcttattagtttactcagaagtgttatccaggatgatgtctgattagttgacaatgatggtgcgtgagatggtttcggattggatgacagtagttgatttttttttttaatccagatgagaaaatatgcatagaatttgaacatactattggaattttgtagcttaaatcaatttggttttttcttctctgttttgtgacatgggcaaggcaaccatgaatgatcgcaaattagcaattgatagttgctttcttgccgtactttcacaaatattatagactcatcttttaatgttttttctatgtcactgagttgttcgacttaaatgacttcatttacganaagaaaagaaataaaggacatagattaaagctgcatggtacatattttttt

SEQ ID NO: 103288 - DNA, 429 bp, Glycine max
  Clone ID: PAT_MRT3847_64287C.1
gggggagaataaaaccgatggatttttataaagaaaaccgcaggcccccaaagggggagcccaccccaaagaccggggtttttacatttaactaaggaacttaaaggcttagcaaaaaaaaccttaagggggtactaccctgggggggaaggggcattcataaccctaaaaacagttcctagctcaaggaacagaattctcatcactggcaattttagggccatgggccataggggacacaagaccccccacaaacctttttggggaaggaaaagggggaccttttggaaaaggggaaagcttttccaagggtgggggcctaacccccccaggggaggcagcaccccacccaattctagggcccgccccgggggaccatttatgcaaaagggggggccccaattggggggattttggacccttcttgga

SEQ ID NO: 103289 - DNA, 408 bp, Glycine max
  Clone ID: PAT_MRT3847_64288C.1
gtcaaaaaaaacaaagttccttcccctccccgggggccagggtttgccccaaaccccggggatttgtaaacttggccaaaagggacccctgggaacccaacaggccaatgcccaaccctttttggggggaggggtccccccccattttttcttttcacggagaatttggggggggggcccaaaaaagccggttcctccccggcctaatttttaaaaacaacccccccctgatttgtcccggtcgtggccttcaaaaaatgggggggttttggggccccatcagggccgggggggttccccttgggggctcccaaagttgcctagggaataacctgggttttaacgaaagggggctccggggcctttttgaaacttttttttttccccccccatgccttaggggggcct

SEQ ID NO: 103290 - DNA, 417 bp, Glycine max
  unsure (1)..(417): unsure at all n locations
  Clone ID: PAT_MRT3847_64289C.1
cccacgcgtnagtacttctgagagtgtatgattgtgcatttgtacttggaggaagaaacaccaaacgagaactgaaaaagaaataagaaatacacaaatggcagagcttctgttattcttgaagccgttctgagtcctcaagtgcctaaacttttggttttttttaatcctgggactaacatgtaatggctcccagatcaattcaaccaagcatgggtaaatgtaaaagtccacaatcaacaatcaaagtcaattatggtgatgtggcaagtgatgtttgggtagttgatgtggccagtgttgacatggtagtaatgtggtaggtgacgtggcaaagctgtggtagatgattggatgtgactcaagttttgacttgcatgtgtaagcatgtacgcaaaaagaaaagagaagataaaa

SEQ ID NO: 103291 - DNA, 499 bp, Glycine max
  Clone ID: PAT_MRT3847_6428C.1
tcacatacaaacagagatcctgcgtggagttcctataaatcaatatgtaaacaaatacatcccaccatttgaggaatttgagattgattgttgtattcttcctcaaggggaaaaggtagtgttcccagcagttccaggtccttccatctttttggtcacagttggggaaggaatgatgactacagaatcaccaaaagggtatccaatcactgaagggcatgttctttttgtagcggccaacactgagataactgtttctagtgcacctcagttgcatctgttcaggactggggttaacagtagattctttcaagattcctaaggtaattaataacatgctttttgagagccaatcatgcagttatgtgttacagtacatgtattagcagcaatagtgtacatgcgagaataattgaaacacattttatatatagaggaaaagtgcattatagagttggattgtcttatattttgcttatatatcataaaagcttttttc

SEQ ID NO: 103292 - DNA, 519 bp, Glycine max
  Clone ID: PAT_MRT3847_64290C.1
gcttttctccacatgtaatctttcattttttgaagaaggaaatatccacacctctcgttgtgatatataagcagatgatatcataggctggctgcaactgctgaccaatgtaaatggcactttctttgagtaccctcaagataatactaaaggatctaccaaatcttgttacaatcagaactcaaccgtcgtgctttgttagataggagtcattaaaggtgaaaatatcctcccatacaaatatcttctgcacaagtaaacaccgcatcgtactctttacttcacagcttcccactacccacagtggctgtcacaaattgctgaaagcatgccactgctccttgctacaccttacccccatctccctacccaccatccccctctttcagcctccctttcactctacctccctcttttcccccactatcgtactccctctactgttgccccttcacccttccttcggctcattcccctcccccgccttcccccccccaccatccaaaacctctccacacc

SEQ ID NO: 103293 - DNA, 180 bp, Glycine max
  Clone ID: PAT_MRT3847_64291C.1
gggggacctaatgggctacattgattgaggaggccctcctgaggatcttgtgagagaggtcaatgcaacgttgaaagacaagaacttggagaagatgttgctagagttcacaattttgaggtccctgccagagcacacatttttgttcctgcgggtgttcctcccatgaggaggccacaa

SEQ ID NO: 103294 - DNA, 515 bp, Glycine max
  Clone ID: PAT_MRT3847_64292C.1
ggctcgagcaatgctcacttagcagggtgtgaattttgacttggtcatcaacacaggctcattgaggttgttctgtgccttcgctgatgaatgagattctacttattgtgcctgaccctgcgacgcactgaatgcgagcaatctagccaccgtcacttgctgtgattcgatcggaggaaaatggacgagcagtcatcgtaagctgaggaaatccagaaaaaggctgagaacaagctcagcggttggggctagtactggctccaagtacgacaatgccggcgatctcttccataaagacgccaatcgcttcaatctggccaaatgatcggacaaggctggagcgagatacctgaagttggcaggttgagagaggaagacggaaagctcgcatgaagctgcacaggcccatggctatgctggacagggttgcaaaaagactaatatcaacgagtctgtatcgagcttaaaccgagctgggaatcatttttgggacgttggaagactccatatggctg

SEQ ID NO: 103295 - DNA, 546 bp, Glycine max
  Clone ID: PAT_MRT3847_64293C.1
gcaccaggagagagagggcggacgcgtgggcggacgcgtgggcggacgcgtgggatttttagtgtttgtacatttcagcttgaaatattactacaagggtttagatgcttcaaaatatcatctagtaattttatgatcatgggtttttttattttagtctatttgtcctccttcaatttttagaatatggattgttttgagaattgaagtttgattgctttttataagtaagttgtcttggaatcgtatgaaataaggagctcagttcgttcccatctttatatctgaagttttataattttgtgtttatttttttatgttaaaaataagcgttacatcaaaatggtgaggcaaacttttaattgagttataaacaatttaaattttaagtgggagagtttggagttcataaaataattaaagtggaagatttggctttgtttttctgtgattatgtggattgggggttgaaatcatgaaattgagttataactaaagtaaattgctgctgtgtgtgatgcacaaagtttgattttttgttaaaaa

SEQ ID NO: 103296 - DNA, 685 bp, Glycine max
  unsure (1)..(685): unsure at all n locations
  Clone ID: PAT_MRT3847_64294C.1
tatgctttctgacgtcatcttggatcctgtatactcgtacagccttcgttcttttttttttttttttatatatttttaattttataaatttttttttttttttttttttttttttttttttttttttaaaaaaaacttgggtggaccaaaaagcctaacccatttttggggggaaagattttcttccaaggacaacccctttttttttaaagggggccaaaatttttcccatttattttaaaaaaaaaaaaataccgggggtgttgggggtttccttttttaaaaaaattattataccttccttttcaaacctttttaaaggggccccccaaaagaaaaaaaaaaattttttgggtaacctttaatgaaaaaaaaactttttttcccctttgaaagggtaaaatggggaaaaaaaaaaaaacacaaattttacaattccttttttgggaaaaaaccaaaatttaatttttgcaaaaaagtagtttggttttcccaaaagaaagaaatcatctttgtgccttcccctaacacgtaaagtgccttcctttataaaaaaaaaaaaattggggcccaaataaaanaaaaanttttttaaaccattaaaaaaaaaaaaggttttccacaattttttcataatattttaaacacccaaaaatgccccattttggggaggattttttttttt

SEQ ID NO: 103297 - DNA, 514 bp, Glycine max
  Clone ID: PAT_MRT3847_64295C.1
tctcattctctaccccgctaagccttattattgcagtagccctgaatcgtgagaactgctgcttctccgacaaccgtggcactgccgccgtgagagaggagatatgtttctgcttcttcggtgacgactggcgcctgtaactcgtctccttccttcatctgtctctttcaaacgagcctatcacttatttccgtcttttatactttatacccgaccatagccatatatagggagactcatatctctcacactgtgttgggttagtaggtcagaaaaaacatgcaagataatctattattgtcatcaccaaaacaaggtgcaacagagagttacgtaggatggttatgcagaagaaatgaagaggatcatttcaggccctccttgaactggagctcataatctaacaatcttgtgagattttgtaaattaacatgattgtgctaatcctttgtcatttttctacagtctcaacaccattgcaactctctttgcaatacctcttggaatttcttct

SEQ ID NO: 103298 - DNA, 397 bp, Glycine max
  Clone ID: PAT_MRT3847_64296C.1
aaagaggttctgttctggaattgcttgaagttgaatcaacaatctcttgaggccattgcattgaatgcacagatcaatgtgatgaaatttgcaaaccgacgcctctctgtatcaaatcacgatgatgttgaaaattacaatgattatgataaaaaatatcatttttatcaagttgtttacgtgtatccaggaagtagtgttctagagtggttggagtataagacaagaaataattatataattattgatatgtcttcagctccaccttctctcccagtgggcttcattttctgcttcgcccttggtatgtatggagacacatccctggaaagaattgaagctaacattactataagtgatcgtgagggtgaaggtaagaaggacagtgttggaatgt

SEQ ID NO: 103299 - DNA, 273 bp, Glycine max
  unsure (1)..(273): unsure at all n locations
  Clone ID: PAT_MRT3847_64297C.1
cgacccacgcaaactacggcttctataatactacatatagtttatagctaaacaganaatggtttcantgagagatcgtgttttaacttgatccttcataacccntcatcatcatcatcatcatcacctttaattgaaaaaaatgccgaccaaaaacatcgccttcgaaaggcctaaatattctactcacccctacactttaaaggcggagttggctaaattcatctccaccttgatcttcttgttcgccggttcaagttccggcatcgccta

SEQ ID NO: 103300 - DNA, 304 bp, Glycine max
  Clone ID: PAT_MRT3847_64298C.1
atctggcttgtttcacaaactcactcttttgcacagattgatccttacatcaatctccggctttcccgctggaggaccacatcgctgggtgggcgccagaagggtcacaatctggggctcgttaatgtgatggtaacatgaacgagttacttgtagctgttgggcaacactttatctactttgtatgactaaggtttggaaagctacgatgctttgatattgcaatataaccttatgaggggtatctatgcttatgacgttgagaagccctatgagattgatcagagggagggagatccttttc

SEQ ID NO: 103301 - DNA, 457 bp, Glycine max
  Clone ID: PAT_MRT3847_64299C.1
aagctagtggcgagctgtgcttaaaatatatattttcatttggaggactcccgaggtcacctcttcttcacaggtttggtgatccatcctcctgctatattgattattgaattaacatttcatttctgcacttctacgtcaaaatacaatgtctttaacaggatggttgtaatttgtaaaacaatgttactcagacaacatttgtgggttgattcaatatggaactcctgtaaaaaattgtaaacgaggctatgaggtttgaaaatccaatgtaaacatccaaaattttgaactattaaaggttttaccacataattttctactgctgtgccatatggccatggtctttagccgaagtcgcatcaagacttcatttctctattgcttcaaattaaccactcctcttgatacttaatttattacatgtactccacttggcgggtgtggtgtttttaac

SEQ ID NO: 103302 - DNA, 347 bp, Glycine max
  Clone ID: PAT_MRT3847_6429C.1
ctatcatgtgccttgttctagctggatgtaactcctgcgtggcctgaataattatctccgtgtctgttgtgttggctcaagactcatagcttccgaattaagacatatgtgtgagatgtaaaatgcttgaaaggtcaagctcccctgatttttgcttagaaaaaacatccacattaaccttcattgctgcatggactaactatactttcaatataataattgcatctgaaatggatcttaagggtgctaatatagggcaagtcaagcttgcaagctatgggttggcaaatgtacgccactacaaccttgaatttatctattcaagctcacatcatacacaagcataa

SEQ ID NO: 103303 - DNA, 185 bp, Glycine max
  unsure (1)..(185): unsure at all n locations
  Clone ID: PAT_MRT3847_642C.1
aaaacagnaaaactcgtctccattagatcactttttagagcgaacattgtagatcacttaattttttccattctacactacacaactttcaacaagattgtgccccatggttcacactttcacccacacccacaccttttcatatctacatatatatgaaatagttcccactcctcttgacaaat

SEQ ID NO: 103304 - DNA, 362 bp, Glycine max
  Clone ID: PAT_MRT3847_64300C.1
tacggctgcgagaagacaacagaaggggggctttcccttcatacataacctacaaagcagggactggagatttctaagaccctctctctatattacttcaccggaaccgtaaccctacgtcgcaaaaaatgcctcccaaatctgccaaatccaagggagctacatctgagctacccatcctcaggtgttttcttttttcatctcagaattggcattggtggcttgtcaaatgtaacatagtatactacttcttatcctcatcaccaagtgggcgatacctgcttagaacttcttctcttgcaccatttaaccgaatgaggcacggagcaatgttcccgatgaacggctcttgtggctttttt

SEQ ID NO: 103305 - DNA, 1584 bp, Glycine max
  Clone ID: PAT_MRT3847_64301C.1
attctcaaaccctaaaataaattcagcaaatcacaaaagagaactatttattcctattccttgtatgcaatcttcctgaatataccagaattgttttcattattactactcaacaatttctttctttctttctttcttttggttttgcagcaacaaaatcaacaccggctcgagatacaaggaataggaataaatagttctcttttgtgcaatcttcctgaatataccagaattgttgtgattattactactcaacaatttctttctttctttctttcttttggttttgcagcaacaaaatcaacaccaagcaaatggaagtaacagtcctcatgagctgcttccgccgctgcctcagccgccacaggcccctcacgtgggggttgaatccgagcaaatccggtccggtctgatggcggatcgggccaagattccggcaccggaaggagttctgaagtgtcctcggtgtgaatccaccaacacaaagttttgctacttcaacaattacagcctctctcagccaaggcacttctgcaagacatgtaggcgttattggacaagaggtggtgctctcaggaacgttcctgttggtggaggatgccgtaggaacaaaaagaacaaaaggtctcgctccaaatctccggtttctactgagaaaccatcacttcccaataatacaagtgcaatccctgagcttattggtcgtttcccacaacctttcatggcctctcttcagagtatgaaccgctatggtgtagggattaacacaggtgttaacttgcgtgagattcaagcacagaacgcttctcaaatggagtttcaaattggaggtcttggcaatggttcaagcgttgctactgcaggaggaggaggaggaggaggagtggagcagtggcggtttcagcagtttcctttcttgaatggttttgagtcaacttcagctgcttctaattcctacccttttcaaagtgaaattgttgaaggtttggttggagatattaatgccacaagttctaggattactcagctgccagcacgggttaaaatggaatataacggtggcttgaatttgtcaagatctcctttgaatgtctcagaaaatagtaaccatttctattcatggacggatttatctggtcttgcatcttcttcagcgagtcatctcttgtaactttgacctctcatatgggttagtagccacaaaaatttaagggttttggtgctgttattttttgatcaataattgaatgagtttccattttatgaagctctctctctccctttctcttggcatgtttaaactcatttatttatcgatccaaaaaatatttgtaccaataaactcttagatttatatatccgggttagaatgacagctctccaatgtcgttccaccgtcttcacgcgtcagtgttgttaacagaaatccaatcaggctggtagaatttaatcttcaattgtatatttttcttatcattggtttgtttatgtttctccatcgagtcaagtttcttttgtgttctttttggctttctttgaacaacagtgtgtgcatgtatatgttttgtttgtttatgcgatatc

SEQ ID NO: 103306 - DNA, 294 bp, Glycine max
  Clone ID: PAT_MRT3847_64302C.1
cggatgaaaacatgcagccggattcgttcggtcgtatagtgtgggctttcaggtggtgaatggattccattggtacgagaacggacttgacacttgtgacatttggggtagcactttgcatgatgtgaaccatgcattgcttgctgggtcgtatggagtctaaaatggcgtgccatattgtgtgataacttgttcatggagagatagatgatgtgagaatggctactatagagtggacttgacgaagaacatgagtgatgtagcatcttgtgcgtcttatgcagttgtgagcat

SEQ ID NO: 103307 - DNA, 283 bp, Glycine max
  unsure (1)..(283): unsure at all n locations
  Clone ID: PAT_MRT3847_64303C.1
gcccacgcgaacganaaaaaaaaaaattaaaaaacaatgttgatttctccttctacttcatcatcatcagggtcgattttttaatactgtgtctctcccccaancaaaacccancccctnnnctctcnattccnanaaacactaatcctaactccttcaacataacaactacaanccactctccnacttcccctccctcaccnccncctcttccaatcccaaaaaaaaaaantcccatacctactccctcnccnaattcacctccaaaccctacacctccttt

SEQ ID NO: 103308 - DNA, 391 bp, Glycine max
  Clone ID: PAT_MRT3847_64304C.1
tttttttttttttttttttttttttttttttttttttttttttttttttttttttttttccgggggggcaaaattcaaaccaattttgatttcaaccctaaaagggggggggaaaaaaaaatccccaattccccatttttggccccccaaaaaaaacccccggccccaaaaacggggttattggggaaaacaatagattattgggaaggcgggatcccccccaggggaaaggaaaagcctcacctacaacaaaccaatcccaccccaaaagcacaggggttaaaacgaccctaaaaaaccccctcaaaagcctttttcccccaaaatatggaaaaaacaaatattttcccggaaaattaccggccccagaaagggaaacttttttaatacc

SEQ ID NO: 103309 - DNA, 1411 bp, Glycine max
  Clone ID: PAT_MRT3847_64306C.1
gttttcttttcctttggtttgcatctcatacacgacatcacgtgcgaacaccacacaacgttaacttcctcgatttgctttctttctttctcacacaccataccaacactctttataatagctatttcgcatcccaaagcttttgaagattccagaacaaaagcacatatagtgtctgaaagagtttttattattagctttgcggttctgcttttcaaggttcgtcctttctgcatcaatgctcgaatttctcgccgcaatttgcgtgctgtagtttctgcttgagtctgctttagaatcacgaggtttatttggagaggaaaatattggtggagatttgaagaggagcatttacaactctggccaactctatagagatatcttcccaaaccggaagaggcttaggtctttatatttccggttttcagatttgttcagaaagtatcttgtctcttgttctgcgccttcctattgattatggctaacatttgattcaatgtgatagctactcaactactagtgtgtttctattgtcatactcctactttttttcaatgcaatttgttgtgaaaggaaaaaaattgttggatctatgttcaaagctgtttaggattgcttagaaagtgaaacggattgaaaagcggcaaaggggattgaattgaaaggttttggaacaagctttatcttctgggatggccatggttaggtgcttctctcttttgcctgtgaggaaggacaaacacaaggggaatgaaaggtcttcaaaagaggactttaacactctacttgccaaactacaatctacaaaaaaaataacatcagagtcaaccacttttgatgccattggtattcagaaaaattcaaggttcaatgcgacgaggattatgacccttgagagtcctgtgaaggatgaagcacatgaaacttataaagatgaagattcaccattgatcaagagagaactctctgattttgatctccaagatcatgaagctgttgcaagcaacgcatatgatacaacagataaaaaggtagagtaccccattttatatgaaaaccaagtcaacaatgaattggaagacaaaaatgatagatacagccaaaagagtgtcgatacaactgaaagcggacacatcactgatcctggaattggcaaggctgattcctgggcttctccaaagttcaagagacacttctccaaccttgaaaaatttgatgagcatgggaagataactcgtcacttgccggcttcaaagtcgaagtcttttgagaattttcaggagttatcagcaatggttaatcttgaaagccctaggtcttcaatgagtcactacactactgatagagtattcaccacaaggcacatagagagttgttggaaaggcactcttcaattcaggtactcccttcc

SEQ ID NO: 103310 - DNA, 1823 bp, Glycine max
  Clone ID: PAT_MRT3847_64307C.1
tatgtttgcgagaagacgacagaaggggaacaaagggagatacatatacattaaattacatagatcaatgcttgcttagttaacgctatgaagttgcgttccaactactctttttagtctctttatctttattcttcttctattctcatgcccccaccttatacccctcttcccccatcaaccttctttctttgcattctttcttcactttcttcccttcttcaaccccaactcatgcatgtccctctctatcttctcccaatgaaatgaaccatcaaaaaacccaccaccccaattgcaccaccatcaaccaccatgtcctcctagccaccaaagtccgcaaacccaaaaaccctcatagagttagctagaaacaccccaaaagattcattttgttttaaagcgcaacttatggcatccattgccaccttcttcaacaagttcctctacttctttatcctcttagtccacctcggctgcttcatcttcaccaccgccgggaaacaatcgccgccgtcaaagaaacgcaaaacctcacctttatcccaaccctcctccccttcccacaccaaattcaaaacccacaaagccctctcctcttcttggcatttcatcaaacatctcttctccaccaagtcctgcaaaaccccaaacaccgccaccacccaatcctcccctcaatccaccgccaccaccactaccaccaccgcctccgccgccgcagcaagttctttaatttccttatcgcaacccgacccggataggaatcaacccgtttcgtgccccgaatccggcatctctaccgacaccaacctcttcttccctctccgcaacgacatcttcccctgcactgcgtgcggcgagattttccagaagccccacctcttagaagcccatcaaaccctcaaacacgcggtttcggatctacccggatccgacccgggtcacaacatcgtccaaatcatcttcaaatcgggttggcccgaatccaagccattcccaaccataacccgcattctcaagatccacaacagccccaagatcctctccaaattcgaagagtaccgcgaggccgtgaagtccaaggcggcgcgtcacggcgcccatacgcgccgccgcgacgagcgctgcatcgccgacggaaacgagctcatgcgcttccactgctcgacctttttatgcgacttgggacacaacggggattccgcgatttgttcgcagcagttttgtaacatttgcggaattattaagtccgggttttccccgaaactcgacgggatcgccacgctgtccactagttggcgggcacacgtggcgatccccgaggacatagagcgggagttccgcttcatgaatgtgaagcgggcaatgcttgtttgtcgggtgattgcgggtcgggtcggatcggattcggatgaggtggaaaaagaggacggagggtttgattcggtgatggcgagtggagagagtggggtctacacccgccttgatgaggaggagcttttggtgtttaatcctagggctgtgcttccttgctttgtgattgtgtatagtgtgtgatgaatttgacggttgtgatgatgatgtgagcttcatgatggcttgtaattttaattttgttaagtattttgtagctatgagatgcttctttttgcataatccgggttcttggacccttgtgcacgaaattatgtgcattaaattgacacattatagtatagaaactgaatgtgctgtatgtaagactgttttttagataaatttctgtttatctgtgttgcttgaaaaaaaaaaaaaaaaagaaaaaaaaaaaaaaaaaaata

SEQ ID NO: 103311 - DNA, 358 bp, Glycine max
  Clone ID: PAT_MRT3847_64308C.1
cccatgttcaacactgatcaaacgcccatggacgtgatacccataattctgatactcaggtgtcgatgcattagtgaaaagagcagcttacacttcggaccagccaatagtacgacaacagcgtattgcatgaaggcttatcccattgttcactgtcaagcgaaattgcataggaccatgctttgaagcaaacaggaacacaaccattgacctcaaagtccttgaactggccattgactgagcgaccgactgatatacaagccaaatagctatacagtaccaacataccttgttcagagtatgctagccttcaactcctccctggcatgacggccactcctcaaaccacgaggggaat

SEQ ID NO: 103312 - DNA, 801 bp, Glycine max
  Clone ID: PAT_MRT3847_64309C.1
atacggcctggttgtgtggtcctatcaatttatgcttcaatgtcttctgctgactgggagaaactagaagaaaacttgcttcaacatgttcatgctttaatgtcaaaattcagattccgatttttggagaaatggaaggtttctagttcattctggcagtcagtttgtttcacacaaagatgggaagatacgcatatgcaaaccatggagaacatggaagtcaccagagttgatatctgtgtcccctttggcaattgttagtggacaggaaacctctatttcattgaaggctcgagtagaaacttgtcaactcttggcacaaagattcactgtacaggtactggctcttatgcatcagcagaagtcataggttctgcacattctggtgtgatgtatgataagataaagttgagtggttttaaagttcaggatgtatcgcctggtgttctgggtcgctgttttattgaggttgaaaatggtttcaagggtaacagttttccagtgataatagctgatgagaccatttgcaaggaattgagaccacttgagtctgaatttgatgaggaggaaaaaatatgtgatgccatttcagaggagcatgaacatcattttggaaggccgagatcaagggaggaggctttgcacttcttgaatgagcttggctggctgttccaaagagaaagattctcttatgtgcatgaggttccatgttattcacttgacaggttcaaatttgtactcatatttgctgtggaaagaaactgttgcatgctaatcaaaacccttctggatgtgctggtt

SEQ ID NO: 103313 - DNA, 489 bp, Glycine max
  Clone ID: PAT_MRT3847_6430C.1
ctatagggaaagctggcacgcgtgcgggccccgccgcggtttccggggcgccccacacgtgcgttttagctcattggggaggaaaccacacatgctggtggcaatgcagaacttacagatgaacccacgtggatagttgatcctctcgatggaactactaattttgtgcatgggtaaatcaaatatccatctaatgttttcattgatacattcatattttcatatcatatggattgactcttgggctgcctttttaaggttccctttggttgtgtgttcatagggcttacaaatgggaaagatcctacagatgggggttgtttacaatccaataattaatgagggggagaatctttccttttgcatgactggggtgacccccaaactattccaaattccctgacgttttaattatttttggttaccatgcaaattcagattgtttgtgaaagcggtcaattgatttattctcttcttttatcaacatta

SEQ ID NO: 103314 - DNA, 235 bp, Glycine max
  Clone ID: PAT_MRT3847_64310C.1
aagacatcatattagacatttctatttacctaatattcattgatctaactacaccctgacaagctctgttaccaaatctctgatgctgttctctacacttgcctaaacattacccatacagtaacttttcctgcgaaacatgcaccaaaaccaacttcgtcatgctcttctgataaatcaccaccaaagttcatgttcactacgacaatatatatcgtgacacctgcaataacat

SEQ ID NO: 103315 - DNA, 313 bp, Glycine max
  Clone ID: PAT_MRT3847_64311C.1
cccacgcgtccgcgttccgcgactgaacccagactgctttgctgtggtgcgaatgcaaccggcagatacgcttattgggcagctacatactcggaagagaacgcactctttctggatatactacacgaagctcctgttttctattatataaaagccgcgagggacataaggagcgaacactactgtatactactggttatactactatggccattggagctcactggatatttaaaccagttcaaggactcatgtataccgtgctatgtagttatgatattctgcttttgctgtatacaagaatctatcaaca

SEQ ID NO: 103316 - DNA, 275 bp, Glycine max
  Clone ID: PAT_MRT3847_64312C.1
gaaaacaaaacggctggtcggtgttattaaaatatatgttggttcgtgatcacaattttaaacaagctgggcacttcacactatccgaaagaaccggttacttggatgttcaaaacccactcctactttctagacggggacgtgcaccatcttctaattgcaccgccctgaccgttggggcttaacccttctacttgtgaacgccctcgactatacctaaccagacatagggtgtagtaaattcttccttagtcttccctataacctgtacacgg

SEQ ID NO: 103317 - DNA, 3248 bp, Glycine max
  Clone ID: PAT_MRT3847_64313C.1
attttctccgttatttatattctatatggatatgtatgttataaaggttacagctgactgggagaaactagaagaaaacttccttcaacatgttcattctttaattcaaaattcagattccgatttttggagaaatggaaggtttctagttcattctggcagtcagtttgtttcacacaaagatgggaagatacgcatatgcaaaccatggagaacatggaagtcaccagagttgatatctgtgtcccctttggcaattgttagtggacaggaaacctctatttcattgaagggtagaaacctgtcaactcttggcacaaagtcagtatcgatttcccattttggatgttgtgacatgcttatttctggtctgttttcctaatatttgtccctcatttttgcaggattcactgtacaggtaccggctcttacgcatcggcagaagtcataggttctgcatattctggtgtgatgtatgataagataaagttgagtgcttttaaagttcaggatgtatcgcatggtgttctgggtcgctgttttattgaggtagatttctatattgtataatcttgcattttataaccatagctaactgtgtgcttgcagacacatgtatgtctagaacaattttaatgtgttaatgtgacatatgctaataagatgtgtgacttatttttatgatcaggttgaaaatggtttcaagggtaacagttttccagtgataatagctgatgagaccatttgcaaggaattgagaccacttgagtctgaatttgatggggaggaaaaattatgtgatgccttttcagagcatgaacaacattttggaaggccaagatcaagggaggaggctttgcatttcttgactgagcttggctggctgttccaaagagaaagattctcatatgtgcatgaggttccatattattcgcttgacaggttcaaatttgtactcacatttgctgtggaaagaaactgttgcatgctagtcaaaacccttctggatcggctggttggtaaacacttgcaaggggaatggttgtcaacagggtcagtggagatgttgaatgcaatccaactcttaaatagagcagtgaaaggaaagtacgttggcatggttgatttgctcatccactattctataccaagcaacaatggtacatccaggaaatacgtatttccaccgaatcttgagggtcctggtggtattacacccttgcacttggcagcatgcacatctggttctgagagtgtcgttgactctttaacaagtgacccacaggagattgggttgaagtgttgggaatcccttgtggatgcaaacggacagagtccacatgcctatgccatgatgaggaataatgactcttataatgcgctggtcgcccataaacttgctgacagacaaaggggtgaaatttcggtaacaattgcaaatgcaatagagcaacagtcactgagagtggagcttaagcaaaagcaaagttacttagtcaaacgaggtcagagttcttgtgccaagtgtgcgaatgcagaaattcgctacaacagaagagttccaggttcacatggtttgcttcaccgcccctttatttattcaatgctagctgttgcagctgtttgtgtatgtgtttgtgtgttcttccgtggtcgccctttcgtaggctcagttgctcccttcagttgggaaaatctggattatggcacaatgtaatgctgctggtgggatacccaattgttcgtttttttcccctcatatggaaaaactgcttctgtgggaaaatggggaattttgtgtcaagagcccaatgtaaacatatcatgtggtgatgtagagttgtggagagatgttaggcagatccgggagaaacaacaaagtatggctgccttgtgtatagagattctgacttgaatgctgcatattttctttaatgcctgagtttaaggatataacaagctatgacctgaatgtttatcgattggtgttgcaagttctgagtagggaaaatcttcagcttttttggcctgattaaacttgactttccaaatttaagttggaatggaatgtggaattgtggccacaaagcactagatattatcggacagacacgacttgcctataacatgaagtgtggtgagtaaatgttggttattgctggtgaaggtcaatacctgggttcgttgcctccttcccaacccgataaaccaataaaagttccatgctttatttttccggttaattgttctgttattttaagtcaaagttacaagtccaaggtgttctgatgcattagttttcgacactgtaaagtttgatttgaggttactgatcatagggtagaccatattattatatgattaaaaagtgtaatatatttcaagttatatctgatttaattaacgtttcagattctgttcttccgtggacgcccttttgttggctcagttgctcccttcagttgggaaaatctggattatggcacaatgtaatactattggattaggagagattcgcattttggataaagataatggaaggcattaaccaggcgggaaacccaattgttgctttttttaccattacatggcaaaactgcttctgtgggaaaatggggcattttgtcacaagagccctatgtaaacatatcatgtggtgatatagagttgtggagatgtttggcagatccgggggaaacaacaaagtatggctgccttgtgtatagagattctgacttgaatgctgcatattttctttaattccggagtttaaggatataacaagctatacctgaatgtttatcgattggtgttggaagttctgagtttaatgtttcagcttttttggccagattaaacttgacatcccaatataagttggaatggaagggtgaattgtggccacaaacacaaacaattatgaaagcagtaagcattcggaataaagagaactgtggtgagtaaatgttggttatttttggtgaaggtcaatacttgggctcgttgcctccttcccaacacgataaaccaataaaagttccatgctttatttttccctttaattgttatgttattttatttaagtcaaaattacaagtccaaggtgttctgatgcataagttttcgacactgtaaagtttgatgtgaggtgactgatcatacatagggttgaccatattattatatgattaaaaagtgtaatatatttcaagttatatctaatttaattcacgttccagattcgtttt

SEQ ID NO: 103318 - DNA, 158 bp, Glycine max
  Clone ID: PAT_MRT3847_64314C.1
aatacataaacaaattaccttaaagttgttgtggatattgggggcgaagatctggtaaaacaacttgtttccttttccagacaaaaaagggagccgggcccctcaccttggagacgcttacccggctgtgtttttttttaaaaaaggggaagggggac

SEQ ID NO: 103319 - DNA, 126 bp, Glycine max
  Clone ID: PAT_MRT3847_64315C.1
cctcagaggaagacccactgtcctcaaggaaaagagagcacccacaactaaaagggattaagtaccagtactgaacaagatctcggggacaagagtgccacagcggctagagtccaaccccgtcca

SEQ ID NO: 103320 - DNA, 370 bp, Glycine max
  Clone ID: PAT_MRT3847_64316C.1
cctctcttgcgctctttaactatgattcaataaagtatattatatgacactttgaatgattatacagggcttagcatacaaactggagagaggggtgttactgatcacaacattcataccacatcaagttacatccgcggcacaaatagtacatatcatggtattgatccactgctcattttcttcaatcatactaccctctatatagatcaatgtgaacgcatgattaaacgtgcatttactagtaacctgaacccataccattctgataaaattcaaattctataattcaacgattaaccatttaaaggaatatcattgatctcgaaattaaacttatgctttatggtagtcccatttttttatataa

SEQ ID NO: 103321 - DNA, 323 bp, Glycine max
  Clone ID: PAT_MRT3847_64317C.1
catttactaaacgaaagattatattattagactgggtaagagtggcagcgtttgcctcataccatcattataagattattgcctctgcagactggatatgagcacgcgaacttacatagagcaaagagagggacagcctgcgatgttctaacacaccgaatagtgccttagatatgaggcaccaaacaaacactgtactatttatatatctagcatgctgacaataattagatgctcccctgactctagagtgaaactctagagtgcagagacatgcaattaatgcatgctgcactaatatatataggacatgctcatttggg

SEQ ID NO: 103322 - DNA, 643 bp, Glycine max
  unsure (1)..(643): unsure at all n locations
  Clone ID: PAT_MRT3847_64318C.1
ttgtaattgacggcccagcgccgttaccgtttgctcgtaggcctcaaccttaggggccaaagcccggtagtggtggtcgccaatcgccgccagggtgtgggctagccagtatgccttggtcgggtcgtactgaccgctcgtgtcccggtaggcactcggggtgtcggtaacgttggcatagaagggaaccagggcgttaaaggtgttgggaccaaaggccagccaatggaccgccgccactcccgcccggatttctaagacgtgtagttctaggttacggttcaaggcgattgaacggacctggccccccttctcaccaccataggggtcatacggggtaccttggtaatgtgatgacatggcctgtttgatgtcttcaaccgccaaccggtgcttggggtggcagataaagggtaggtccatttgggttgggtccgcccctgtttccaccccgaatagcttctgaacgtaccacgcccgcgggttattatagcgcatgtcccggtaagtgcgggaaccacaaatttgccgtaggttgtagccatcatcggctgngtttaagtcgtgttggttaatccagtccttgaggtcggggctagccaaggtggtcgcactctcaaagtcaaagtcggtgatgttaaac

SEQ ID NO: 103323 - DNA, 2163 bp, Glycine max
  Clone ID: PAT_MRT3847_64319C.1
caacatgcgactgtgttagcctagcggatgaaaacaaaaaaaaataaaaaaaattacatctaagcacagagaaagaggaagagatggaggcagaggcagaaggtgaagaaggtgcgaagctaagcatttacaaggcggcgagaagcataaagcgaagagagaacagtttgtacaacgcactgagatccatctaccaagactccatcttcgtctccgagatctctcttctatggcctcagctccctctcctcgccaacctccgctgcggcctctggtactcccgccccgccgccttccactccacctgctacttcaagtccaccgacggccacaccaacaactgctccttcaccaccgcccgcctcaacctccacgtcgccctactcgccggacagaaaggaggctgcatcatcgtcgattccactcgaagaggaaagcgcttccctgatagcatgtctaaaactatacccatctggacctctgttctcaatcgtgccattaaagactttcgtgattctaatggctgtcctcttgaatgggattgttccttgcaccttcccctgtgggtttcccaaactgaaagagcttccattgagaggcggttagatgagtggactctgttactgaaagcaagtggggctgatattgcctcccttgctgcttgcttgaggaaacccctgcgccctctctggatttcgcagaaaactgtcatctggttgaatgaagtgcctcaccatgaatcttgggatttcacacccatcattcttctctccgcgtcgtcttcttcatcggtcgttggcgcgagccaacacaggactacctctgagttcagctggaattacattcccggtgctggagacgacgaagaaagctgggctaggggtttaactcctgctttcttctggaaacatgtttatgatcttattaactcagctcctgaagtctgtaaccagaaggttgcagatatagttgaaaagagtagagtatcccgtgcttatagaggagaaagtgcaccacagatcacagttaaaccgctcaagtcagcctccctttcattgcatgaagaaccatcagtagcttgtgatttttcaaacattaaaattgactccgagtcttcggaagattttggaatatcttggttgggctcaactaatttggcagttggcacggctcaagctgctgcagatgctgctgatgttgattgcatattgaattgtgatcaggagtcaatctctgtctgtcttcccagtgctgaatcatatttgcatcttccaatggtgacttcaaagtttgatcggttttcattattaaacaatcttcctaaagcggttagctttgcaaagttcaatctcagcctgggaaaaagacttctagtctgttgtaataacggggaagatattagtgtatgcgtttgtttagcaatcttgatgtcattatttgatgaaaaaggtatgtttgatggtgggaaatccttcagtgcagcacaagtcactaaatgggatatgagacgtaggcttgtatttgtctgcaagtttgcaacagatgctcgaccatccagaggaaatttgaggcaagtttttaactttctaattggtggaaaattcaatcatcctctggacacgggaagagatgagtaattggaattgcgagggcagatgattgaatgaatatttttggccattcctaaaactttccgagcttaataccttggaatcttggattttgcattgcgcagatgtgaaactattccaaagtcagttttcagagaattgttgtatgcctaagtttatgcgaaatttgacatctctcgaacctatgattcttttcatgttctggtctgaatacacaaatactgagatgtctatgactaggttatagagtatagacccatgtgatgcacgtgttagacattcaattttatggatgaataattaatatagaacaattaaagtataaaaaaaaaaaaaaaaaaaaaaaaaaacaaaaaaaaaaaaaaaaaaaaaaaaaaaaaaaggggagcggttataaaaattacttggtcttaaatccggttatgagggggggtggttctagggattaaacatggcacatgcggggttgcaaactttgtgttcgtattaagcggcaactgaactgattcttgggcgggggtattaaacgccc

SEQ ID NO: 103324 - DNA, 469 bp, Glycine max
  unsure (1)..(469): unsure at all n locations
  Clone ID: PAT_MRT3847_6431C.1
gtgaagtgaaaatgatactttaatattgcacttgtgtagttaagcttgatcacactacttangcttagttgtatgtttttttcttttattttttaagtgggtttttaagattcttcagatttcttcactttttttttagtatttatattaaattaaaggagagaatgagcgttttgtgtcttcttctgaattatgaagcagaaaccgtttctgggtgtttgtgattccgaggaaactgtttctggttagtagtattagtaatgttttttgagcatgcaggacgcggtttttcggaaagatagggctttctctgattgctgactctggaagcgttacatttacatgagttaatatttattgagaagttgtcaaagcanagttttggggttgttggtttggtgatcctttctctgagcctgangcattttctctgtcactacattagtgtgtgtctgagtcgtagaataaa

SEQ ID NO: 103325 - DNA, 535 bp, Glycine max
  Clone ID: PAT_MRT3847_64320C.1
tttttcgcttctaatcttatggttcggttaccacaatttctgcataaggatacgcccgcaacaaccataatggtgagataacagacgtaatcatggacgcaggggccaaagcctctgcctgcgatcccctcatgcccgcggcccccgtcaccaccagcgatcgctattctacgctccaccgtctggacgatggcttttgcgcttgtaccgttgatctcatacgcacaccagaactcttcgcaccaccgccgactctgtgccctctctaaccacttctggaatcatctacctgttcctacggggcgcacactcgtgcccgattattggtcaactgccgcgaatactcatctgtccccatagatgttaggctggtctgcactgccgtggtgatatatgatgtacacaccctgcttgatgggactgcttctgccacgacactctcggttgtatacaggattctgcgtccactcggagcctaatttcatggtggagaaagacaactagactctatactatgtggggataccatgctgtg

SEQ ID NO: 103326 - DNA, 413 bp, Glycine max
  Clone ID: PAT_MRT3847_64321C.1
gtcacttcagtcctgtcacggggaagagacagagatgctataacaccacaaatggccaccaaaggccaaaaaagtagattgaagtaccataataagcgacttgaaagattgagaggagcgatgaacaagaataccagagagagatactaagaaacaaagaggtggatagaagccggacttgagagtaagtcgccccgcaattgccgcggcaatttagcacaaagaaaagttgagacaaatacggtgttgtataaacaccacgggcggtaagtcagtttgcaaaggcatacaccaaaccgtgcagcacgcgcaagcctatgcctactcacgtgtagccaccgcgtttgaccacaccctgcagggctccggtgcaattgacccgttaagcaacccataaggaccaagccaaagtc

SEQ ID NO: 103327 - DNA, 2471 bp, Glycine max
  Clone ID: PAT_MRT3847_64322C.1
gttcatgattatttcaatggcaattcaacaacattctgtggcccattattgttaccttggactttttgggaagaccgccttgctactgaccggagtttcaaatctcagtttaaagcatatctgaaagcaatctggacgtgtccaactgttgtaacaaaagtcgatgatgtgggtgatgttgtttggtgccatgattaccatcttatgtttcttccacaatgcttaaagaattataaccgcaaaatgaaagttggctggtttctgcataccccgtttccatcttctgaaattcacaggacattgccatctcgctcagagctcttgcatgctgttcttgcagctgatttggttggttttcacacctacgactatgcacgacattttgttagtgcatgtacacgcattcttggacttgagggcacacctgaaggggttgagaatcaggggaagctgactcgagttgcagcatttccaataggtatagactcagaacgattcatacgtgcgcttgaccttcctcaagtgaaggaacacatcaaagaattacaagagagatttaaaggaagaaaggtaatgttaggtgttgatcgccttgatatgattaaaggaatccctcaaaaaattctagcatttgaaaaatttttgaaaaaaaatcgtgattggcgtgataaagttgttctgcttcaaattgccgtgccgacaagaacagatgttcctgagtatcaaaagcttactagccaggtccatgaaattgttggtcgcatcaatggcagatttggagaactgactactgttcccatacatcacctggatcgctctcttgattttcatgcactatgtgctttgtatgctgttacggatgtagcacttgtcacatctttgagggatggaatgaatcttgtaagttatgaatttgtggcctgccaagataaaaagaaaggggttctcattctcagcgaatttgctggtgctgcacagtcacttggtgctggggctattctggtcaacccttggaacatcacagaagttgctactgcaattgccaaggctctgaatatgccatcggcagaacgagagaagagacataagcataactatgaacatgtaaaaactcacactgctcaggaatgggcagaaacttttgtaagtgaactaaatgatactgttgtcgaggcacagataaggacaaaacaagttccaccacggctcccaacagagactgcagttgaacgttatttgcagtcaaataatcggctgctcattttgggattcagtggaactttaacagaaccagttgagaaaacaggtgatcaaattaaagaaatggaactgaaggttcatccaaaattgagacaacctttgacagcactatgcagtgatccaaataccacagttgttgtgctcagtggaagcggtagacaagtcctagatgataacttcaaagaatatgacatctggctggcagcagagaatgggatgtttttaaacccttcaaagggagaatggatgacaacaatgccagagcaactgaatatggaatgggttgacagtgtgaagcatgtttttgattacttcacggacagaacacctcgatcatattttgaagaaagggaagcttcacttgtatggagttacagacatgcagatgctgagtttggaagattgcaagcgagggacatgctgcagcatctctggacaggtccaatttctaatgcatctgttgacgttgttcaagggagccgatctgttgaggtgcgagctgctaatgttacaaagggagcagctattgaccgcattctaggtgagatagtccacagtaaattcatgacaacaccaattgattacgttctgtgtataggacattttctgacaaaggatgaagatatatacgccttttttgagccagagctaccttcaataggtgtgggtcttcaaagaagcaagggaacagaaggagtaaagtttccagttgagagggtatcgtcattgaagaacccagcaagtagaaatggagcagcaaagtcgtcatcccaaaaaaagggacaacgccctgtgtcaaataatgagaagaaaagaaacaatcatgtctgccgcgggccacgtcggctggctcccgaaaagatatcttggaatgtccttgacctgaagaaggagaattacttctcgtgtgccgttggacgaacacagaccaatgctcggtatacgcttggatcaccagatgaagttgttgcatttctcaaggaactagccaatgtctgagacttacccagcttcagaaattccctatattgccaacattgcaacttgccaaatttactctcttgtacacgatttgcttttattctacgggggcaccccataatcataacttcacatcctaacctttttagacaatataataatcaaattaattatcgtaaaaatatttttttttaaattaggtatgaaataacttattttttttaacctcc

SEQ ID NO: 103328 - DNA, 288 bp, Glycine max
  Clone ID: PAT_MRT3847_64323C.1
cccacgcgtacgtcaactttcaaacgcccaatcgatgttagctgcaaacgccaccttaaaaatccaagctttatcatcaccaccctagtgtactgttgatcatgaatcctactaacagcttgtgtacttctatgttcatgttcatcaccttcttattgcttcatgtgtactctgcttcgctgaaactttaacactacttaagacgtataccgctcatcgacgacactctcttcgaccctcacgctgctcattccacgtgaactttcaacaacacaacctctcttttca

SEQ ID NO: 103329 - DNA, 369 bp, Glycine max
  unsure (1)..(369): unsure at all n locations
  Clone ID: PAT_MRT3847_64324C.1
gtngngcaggttgggagangcgtaattgtgctcaaggtgnnatttngngntggggtatggtgttgnggatatgttggttggtgggggtggtntggtggtagggnagtgggtggtggngnntgtgtgggggngggaggtcngtnngntgtttgggtagttgggctggagtgaggttngnatgnnggggggngtggnttggtngngaganccnagtgntggtgggtgtgtttttttgtgtgttnagntgtgnngggtnggncctggggtgtgntggtgttngtggtgatgtntgtgtgttagtgggtgttgtgggggtagtnnggttganagnagngtggtgngaggtgtgtgtgtgggtggngggtgnnn

SEQ ID NO: 103330 - DNA, 408 bp, Glycine max
  Clone ID: PAT_MRT3847_64325C.1
gttcagtaaacgaaaaaaacggtgcgtgtgaagttattaaattttcaggaaaggaccctgtgaattggatattatactttgttgtttgttcgtcacgataaacttatgttgatgtattcagagaaaaaaaaaaaaacttatgtttatgcttcgtttgatttagaggatgaataattttttttttatcaataaaaatttaacatcaatatcaatgagtttattatatatatattttttataaaaaaggaatttataatatttagacacttttattatatataatttaatcaattaaactaaacggttaaagtgaaaataaagagaataaaaatataattttctaaaaattaaaataaagtataaaagttataagttacaaaagtacaaaattccaatattattttcatc

SEQ ID NO: 103331 - DNA, 462 bp, Glycine max
  Clone ID: PAT_MRT3847_64326C.1
cacacatctactacaagtacttacttacgatcatcaccgacatcaactctgtgtagatatagaagcactaccctgattagggtctcaaggaagacgagtttggaaacgattgataatctatcggacgaatacgagaaccctgttgatgctctagtgtacctatctagccaccacaactgttgatggcggactacagacgatgacatcaatcaacatcatgatacacccagtgcctacagagcacacactggtaaacagcattgtagtggcggctgcgatggtgacactcgttcacatcatggaactactgctggctctgatgatgacaccgatagacatgatggaactaccggtgactatggttacacaccgagaggcgagctcatggcactactggcggctatgcaagtgacactgctaggtaacatgtgaacatcgcaggccattactatagaaccaaca

SEQ ID NO: 103332 - DNA, 777 bp, Glycine max
  unsure (1)..(777): unsure at all n locations
  Clone ID: PAT_MRT3847_64327C.1
ttatttaaccttaccactactaaagtaaggggattctaggggcaaaaacaagttaaaaaatatagacatttagtacactacaatttcaagcactaatagcaaattttcactgattagcctactactaatttttatgtgaaagtaggcataacaattaaatcagaaccagtaggtaccgtctaaccccaacccaactttaatgggttcgagttttcccagtttttctaacctctaacatgattttgatggggggaaaactgatttgattgcgtttgggttttcccgctttacaaatgcgaggtcaaggatatgaacacaagccctaccccggattcacccagacataatagtgaaataattgaagttataatgataataattaaatactaaacttgacataacaaaatttaccaaaactatagtttagtttctaagtttcttttcttttaatattctcgttatttattattttttttatattattagcattaaaacgtagttaataatttaacctatgatttatttaaaaatatatatgagtaaatcttgatagagatgggttaagtttaaagttttcatctttgcctctcntnnncccgaaccgcttcatccttggcaggggcggggagagtcaaacccgttccctaccctcaaagttgtcatgcctatttgaaannnnngcaagtttacaatgctatggagataaaaaaaaacaatcgtaagtannnnnnctcaagttgnnnngnnnaaaaaggcattttatttnnntngannaaa

SEQ ID NO: 103333 - DNA, 311 bp, Glycine max
  Clone ID: PAT_MRT3847_64328C.1
attaccttccaaagatacatggtcctaccaggcaccatttattatttgatttgaacaaacgaaaaatttaaccttaggatacacactgaatagcttggtacaaattccggtatcactttttctgacttaaaattacaatcccttgcataactaaggatgagctatgtcgcattgctcgatcatcttatgcaagttgccggtaggggcataaccccggggagattctcggcttttagaactaggggacggtttatgacaatgtgagactactatttttcaacccatggatccttgaggcctaggggaccctc

SEQ ID NO: 103334 - DNA, 812 bp, Glycine max
  Clone ID: PAT_MRT3847_64329C.1
aattcggctcgaggtaggatgtctgagatccttgccccaatcaaaacggtgcggttaactagaaaccgcgacgaggatgcgaaaatgatgaaaaatttgctggggcaaggggacctggtggtttgtcctgaagggaccacatgtagagaaccttatttattgaggttcagccctctgttctcagagatgtgcgatgagattgtccccgttgcagttgattcccacgttagtatgttccacggaaccactgctggtggacttaagtgcttggacccattcttctttctcatgaaccccgagcctgtttacacggttcagctgctcaaccatgttttcccttcccaattactatcatctcacaccagtaacaccagcgttcttgaccatcaaacttcgaggtttcatgtggctaatagggtccaaacacagattggtaccgcgttggggtttgagtgcactaaactcacacgaaaggacaagtacttgatgttagctggtaatgaaggcattgttaattccaacaccaaatgcaaaagcaagtccaagttgtagtggatcgaaatccagatcgagagctagctagtacgtttccctctgtaaagtcatccaacaaccgttagctgtgacgaaaatgaccaattatgtatttatatatataggatccatgaaaaagatacaaggccaagcaatggggcctccagtaaaattaattaaattcgtactcctattcctttctattatttcaaactttgtaataattcaattccttgtgtagtacgttcaaaagcaattttaataattaattctcatct

SEQ ID NO: 103335 - DNA, 159 bp, Glycine max
  Clone ID: PAT_MRT3847_6432C.1
taaagcttgttttgggtttccgagaattgggtaattaggttgctcctcacttttggtgacaaaatgaatttcgtgtgaattcaaattgagacgcacatagtttctgtgctgacagaggtggatttgtgattgtgaaatatgcctttattatgttcgtag

SEQ ID NO: 103336 - DNA, 314 bp, Glycine max
  Clone ID: PAT_MRT3847_64330C.1
gcgcatactgacaccttttcctttttctccaatggggacaaatttttgactggccggatcatatttacaactatagggagatgaattggggaacccaagcgcactatttattacacgggtgaccagctggtaagaactacatcattggaaactgtgctacagcctaaaagtttgacaagagcgcatgcgagtatcataaaacgcgtcttacgtgacagaagatccataagatcagagctgccattaatgcgtgatttggagtcattctacgtcagtcctatgagacacggtctgttctcaactacaggcacaga

SEQ ID NO: 103337 - DNA, 471 bp, Glycine max
  Clone ID: PAT_MRT3847_64331C.1
ggcttcaaaaacaatgatgattttgggatttgtatgttcatattcattcattcctatttacaaaaagaaagaatagatgataaagaataaatgattgtgttttaaacaactcctccgaagaccacacatgcttttcacaaaaacgtgttgttttcccttccttttttttttatctcccacttcaagtgttttgcatttcaattttgggcttaatggcgtgatgttggactcctcatacctcccaatgtctcaagggaggacacctttttgtctgtcactacgtttggaagtttttgaggctttccattatcaatgtttttgtcgaagtcatctgaatctgcaaaatggtctttcttagcgtctgagtcaccttgatcattgttccaacccatgaaatctgatagtgtcattgcttctgagccactcttgtctacctcttctttaggagttggagttggagacttctctggc

SEQ ID NO: 103338 - DNA, 440 bp, Glycine max
  Clone ID: PAT_MRT3847_64332C.1
ccctctcggtctactacgcgtacggccacgcgtgcggccccttgaacctcagtagcctaccgatccataaatacacacacataagcgttatcatacaacaaatacattttctagtgataggtgtccgtgcaatagccacacatttacatttttcacattaaaatatgtgaagacacgcattattatactaaatgtacacattcgggtgcagatagaattcccttgaggaagagatttgtggggaatgggtccaaacgctgcgggggcgaaacatgaggaaaagctgggaattgacggcatcacttacttcaaaaaagaccgtctcggtggcgccatcggcgctgacaccgaggcgaatacgctgcggcctaatgttacgggttattgaacgaatcgcgcgctgtgccatcttaagcacgcagattgggagagagttgagg

SEQ ID NO: 103339 - DNA, 423 bp, Glycine max
  Clone ID: PAT_MRT3847_64333C.1
aattcggctcgaggccgaacttcgattccaaataatctttcactcttagtgatttgagctcaagcaacatccaaaaaatgcttttggacaagaatgatattcaagaaacccattatgaggttctccatgtcaaggaacatgcaaattatgaagaaattcgggctagttaccgaagtgttgtactcagcttacatcctgataagctattgaagacttccaagacatccagcagtaatcaaacaaccagagagatttctcaaagtacagaaggcgtgggagattctgtgtaattcaagctcccgctcattttatgataatgagctgcgaagttcaaggaaagatgtcttggctgctgacattgctgaagatttgagcttaaagaaagatgtcttggctgctgatgttgccgaaaatttgagctta

SEQ ID NO: 103340 - DNA, 1221 bp, Glycine max
  Clone ID: PAT_MRT3847_64334C.1
agctggagctccaccgcggtggcggccgctctagaactagtggatcccccgggctgcaggaattcggcacgagggcgaagaaggaatgaaggagcacgacaatgacgtcatcaccaatgccgtttcggggagcgggttccggcgcacgcgctcgcaggcggagccggactggagcgtgacggaatcgctgattctggtgaacgaggtcgcggcggtgcgggcggactgctccgtcgcgctctccttgtaccagcagtggaacatcatcgccgagaactgcgccgccctcgacgtgccgcggagcctcccgcagtgccgccgaaagtggcgcgcgctgctcgcggcctacgacggcgccaggggagcgaggggcgcgatgccgccgccgggcttcgaccgcgagctgtttgaggccatcgaacgcgttgtgagggcgcgtgaggagcgggggatggtggatcctgggagcgatgatgaagatgggaacgaggcgcgcgacgcaaccgtggaaattgggtccaaaagaaaacggcaacgaagtaaatcgagatgccaagttcaaaagcctaagaaatttcatgaacaaaggcctgaggacagctatgaagaagggctcgaggatgataatttagaggacgagtatttgaaagacttcctagaatcaagacctaagttgaaaggtactgcagaaagacctccaaagcacttggtgatgccaccaaagagtccgggcagagtagagctgaatgaaaaccaccatatcaaaaggccaaagccgattggcacagaaaatataacatttaacagggaagaaaatgaggaaacattgactctgaaattgcaagtgttggctgtagaaatcggaacaattgctagtgaatcagcagcagactataaggggggtgtctcacaaaatttagaggactcccattttgactttacaagatgccaaggggacaagctcatagcaagcctgggaaatttcttcaacacccttaagcatctacgtgatactccccaagagtgtaactgaacattacgatgttcttttataactattttatattcttgttagtgatagaatgcagcataggagaatgttgtttctttatagtgtagactctctagttgtgttcaatcactgatgctgcttatgtgaaagtaatttattacagctttaactagacgcatttgtttactattctaattatgagttttacg

SEQ ID NO: 103341 - DNA, 268 bp, Glycine max
  Clone ID: PAT_MRT3847_64335C.1
atcgtatcctatcgtcgcattgaatgaatgaaagacaaccgtaacttaccttgtgaactatcatgatgcagatctttgctaagacacatagtgctttgacaatgacgctatgatgtggacagtttatgtacgattgatactgtgaagaccatgagataggacaatggagggataccacaccaccatgagcgaatgctttacggtgtgaggctgatgaactgtggacggtcacttgctgattacgacatccataaggagttcactgtac

SEQ ID NO: 103342 - DNA, 1880 bp, Glycine max
  Clone ID: PAT_MRT3847_64336C.1
ggtcgaggaaaggcaacgttcaaaagaacatagggtgtttgacactatgcactgctttactctctctcatcacaatcttcattattcccttttgtgagtccttcaactacggccaagccctgtcccagagcctcctctattttgagtcacaacgttcaggtcgcttaccctacaatcaaagggtcacttggcgacaccattctgccctcactgatggcctagaacaaggggtggacttggtgggagggtactatgatgcaggggacaatgtgaaatttgggctaccaatggctttcaccataacactcctctcgtggggtgccatagaatacggcgaacaaatcgccgctgccggcgagtatgctcacgctctggaggccatcaagtggggaaccgattatttcatcaaggcacacacacaaccaaatgttctttgggttgaggtgggtgacggcgacactgatcactactgttggcagcggccggaggacatgactacgtcacggcaagcttacaaggttgactcgaacaaccccggctcggatgtcgccggcgagaccgcggcagcgttggcagcggcgtccattttgtttaggagaacaaatccacattactctcaactacttttgcatcatgcacaacagttgtttgagtttggtgacaagtacaagggcaagtatgatgagagtgttggagtggttaaagggtattatgcttcggttagtggctacatggatgagttgctgtgggcagcagtttggctatatagggccacccaaaaggaggaatatttaacctattttttggacaaggcttatgactttggtgggaccacttgggccatgactgaattcagttgggacgttaagtacgttggtgttcaagccattgcttccatgtttcttatggaagaaaagaagcacaagaaacaccaagtcatactcaaacagtatcgttcaaaagccgagcactacctatgcgcgtgtctcaacctcaacaacattactaacgtggagcgcaccccaggagggttactatacatccgccaatggaacaacatgcaatacgtagcaacggcatcgtttcttctcacggtgtattctgatcatctcctagccacagatcagaagctgcattgccagaaaggagaggtgggtccccatgaaatgttggcctttgcaaaatcacaagttgattatattttgggcactaatccaatggctatgagctacttggtaggatacggtccaaaattcccgcagaaggtgcaccataggggcgcatccattgaatcatatggggaaaataagggttttattgggtgcactcagggctacgataactggtatgggcgcgttgaacccaatccaaatgtactcattggagcactcgttggtgggcctgatatcaaagaccaatttaaagatgagagacgaaattacattcaaacagaggcatgcacctacaatacggcagcactagtaggggtttttgctagattgcatcaatcacatgcacatgctgaaacccctttagtagcttctagctaattggggttatacgttatagagataaatttttggttcattgttccgggcaaagaatatttcttactagtgcttactgttgtactgccattgtaattgtaatttgagtatagtatatcgtaagatacaaactatacaaccaatgttgactcaaaaatgcgtctagagacattaggtggaatagcaaattgtaccacttatacttagtctagcaattggaaagagttgcattaggagttaaagtagaaggttctgttcttttgggttagtagtcaaagacttgtattcatagttaaaacttggataatttagcatgcacttttatttttggtc

SEQ ID NO: 103343 - DNA, 1034 bp, Glycine max
  Clone ID: PAT_MRT3847_64337C.1
ggacggctgcgagaagacgacagaggcgggagtagaagaaggatatagtcatagagtcacagaagaggcggcgagtgttgggttgagaatcctatcttgttcgtctttctcgtcttctttcttttcttttgtttttcttgtggatgtgaaacagaatctatgacgagtcaatcggcgaagaacctattggttttgttggggctgggtttagctggaatagttctaatcaccagaaagctcaagaagtctgtcagaaaggatttgggggctttcattgagaagcttcagctgcttcctcctccccagcctgctcctcccaaggctccccatcccctcaccgcactcaccttcgcactttccgacctatttgacatcgaaggacacgtgtcgactttcgggcatccggagtgggctcggactcacgaacccgcttcttccactgctcctgctgtttccgctctcgtcgaaggaggtgctacctgcgttgcaactaccgttctcgatgacttagctctaggtattggcggtgaaaataagcattatggaacgcccaccaaccctgctgttcctgctcgagtacctggtggctcctctagtggtgctgctgtcgccgttgctgttatttcgttgactttgcactgggtattgatacatcgtgtaggccaagaatttttgcaagcaccatttgtaatgcaacgcagccctcggcaaatagttattgctgatgattgttttcagcatataaatgttcctcttgacaggagttctcaagtggtggtcaaagccactgagaagctttttggaaggcaagtattgaagcatataaatcttggggactatttaagttctagagttccaagcttgaaggggtgctctggacagaaaacaaacggtgaagtgaaagcttcctcattaaaattacttgccaacattatgcaatccctacaaaggcatgaattcagacttaaacatgatgagtggatgaacacagtaaaacctgaacttcatcctggtgtttcggcacaattgcatga

SEQ ID NO: 103344 - DNA, 270 bp, Glycine max
  Clone ID: PAT_MRT3847_64338C.1
cggagcgattccacttctggtgagcctcctgaagagtggagggttctgcgcgaagaacgacgcatcgacagcgctgtactcgcggtgcacggcgacagagaataagactcacggcgctaaagcagggatcagaaacgtacatgaggagctcaagggggacttccagtcaatcactgtagacaactctgggtacgtggaaaccctactggaggtcgtagacgatgcaatcgctcgacaagcagttcatggagatgtacgtccacccctagt

SEQ ID NO: 103345 - DNA, 937 bp, Glycine max
  Clone ID: PAT_MRT3847_64339C.1
ccacgcgtccggtggatggcgaagaacctattggttttgttggggctgggtttagctggaatagttctcatcaccagaaagctcaataagtccgtcagagaggatttcggcgctttcattcataagcttcagctgcttcctcctccccagccttctcctcccaaggctcctcatcccctcacctcactcaccttcgcactttccgacctatttcacatccatggacacgtgccctcgttcgggcatcctgactgggctaggactcacgaaccctcttcttccactgctcccgctgtttccgctctcgtcgagggcggtgcaacctgcgttgcaactactgttctcgacgacttaactctaggtattggcggtgaaaataagcattttggaacgcctactaatcctgctgttcctgctcgagtaccgggtggctcctcaagtggtgctgctgtcgccgttgctgccaatttcgttgactttgcattgggtattgatacaactggcggggtgagagtaattcggctcgagtgtggcattctaggatttcgaccttcacatggtgctgtttcgcatatgggaatcatacctatttcaacaagtctggacactgttggttggtttgcaaaggatcccaatatattgcgtcgtgttggccatatacttttacaagcaccatttgtaatgcaacgcagtcctcggcaaatagttatagctgatgattgttttcagcatataaatgttcctcttgacaggagttctcaagtggtggtcaaagccactgagaagctttttggaaggcaagtattgaagcatataaatcttggggactatttaagttctagagttccaagcttgaaggggtgctctggacagaaaccaaacggcgaagtgaaagcttcctcattaaaattacttgcccacattatgcaattcctac

SEQ ID NO: 103346 - DNA, 358 bp, Glycine max
  Clone ID: PAT_MRT3847_6433C.1
gactggaatgatcgtattcactgctggcattgatcatgctgatgcatactactaggatgctactatgatcctgcgcaatgtcttctctgatgctgatacacgatcgctcaggcttgctccggactatctgcgccttgctgatcttgctcacacttgtgctcaccatgacaatgatgatgatggcttgatgattatcgttcacaaggatgaggatgttgatgactaacctccaatgtgtgatcctgttcgtcatgcagagactttccccattcctgctgctatctgcagtggatggcgtgagaggtgtgtgatcgagaacgacaactactccttgcatgccggatagagattccgatct

SEQ ID NO: 103347 - DNA, 369 bp, Glycine max
  Clone ID: PAT_MRT3847_64340C.1
tcgtttcgcgtgggctgacatttacaccatgtggtctcatgactgcgaattatggaatcctgcttgcacaaaagcaatgactatgccatttaatccaaatccgtgttctgctgcatggagtggggaataatagaagtgtaccggatgtcatcgtgatatcatttgcgtcactggatggactgccaccccaatgcatgaagttcaggctacaattgataggattatgtgctctaatgaaagtgttcccaggacctattgagatctaaagacacacaatcctttagtgtgaaataagtggatggggaaactgactttcccccattgcactttccgaagggtaaaaagaatgcctttttttataggtggagg

SEQ ID NO: 103348 - DNA, 490 bp, Glycine max
  Clone ID: PAT_MRT3847_64341C.1
ggatatgtgcagaatcccagcacactggcggcctttactagtggatctcttccgtcgcgacctcggcggggaagtcggggcctatcatgaagtggcgcgccgccttgccctgttcccggatggcgacgcctccgacttgctctacctcgagacacaccgcaggaagcgggggaagtaaacttcggttcgcgcagcacggaattgaaggggctcgccaccagcgtgcccctatcctatccgccttccatgcacttccaacgcccttcccgaacgatttccgattgctagttcgcccccgccgcgccataagcgcgcccatgatactgcccatcatcgtcaccttgaagaacggattgctcgatccgcatggcaaggccattcacaacgcgctcggaggacttgttttcgatggcgattaggatatccgcgccgtcaggatcttagagctggacgttgatgattcaaccagcgacgcctgcatcgacgagat

SEQ ID NO: 103349 - DNA, 151 bp, Glycine max
  Clone ID: PAT_MRT3847_64342C.1
agcatttgagctcgggagagcctacgttgtcaggcctgagggttagcaccacgcatctatagtatggttgcatggccttcgagataatggctacagttggtcccaggtattatagacccttactctaccaaatatcaaatggatatgtagc

SEQ ID NO: 103350 - DNA, 310 bp, Glycine max
  Clone ID: PAT_MRT3847_64343C.1
gcccaacctccattctacaaaggtgagggcttgttgatgttctttagaccatgttaatatatacaaggaaagagggatttttttgcattatcttagttgcgattcttatccacaatggaagctacatatgaacttcataattggcaacttttgaatttaagcagatgagatgaagacccttagctaccattcgatggaacaacactgtgcggaggcatgttttaaatttcactagattggaaacgctccaaaaatcaattgtaatggcttcaaaactatttgctgatgatactgataattctgaggagtt

SEQ ID NO: 103351 - DNA, 432 bp, Glycine max
  Clone ID: PAT_MRT3847_64344C.1
ccctcgcgtccggcgtttttcctccatttccttcttcgctagattacccagatctacgacgagtctctgctatgaattaattctcatatctcaaaatcattcaccgttttcatttcattctaactaatctttccagaaccctcgaatctcttctttcgaacgtgcaaagatttttgacttgaccgaatgctgttgcggttgaaatcggtgtgagaaatagggtttcgacgatgccttcgcttccctttggactccttctacgccatttggtcccttccttggccctattccacggtggatcctcctctcatcgtctcaaacatcttgaaaaaagtgatcggcgttgtagtcttagttaacattacgagcttttctttcttctgtttttttttcccggcgttcgtggttatgttgttttgaaaacaaatacct

SEQ ID NO: 103352 - DNA, 117 bp, Glycine max
  Clone ID: PAT_MRT3847_64345C.1
ctgcacgtgtgtcaattgacaagggaagctctctgtggaggagaactaatgtataaacctgaaaagcgtgccatagggcatgggtcataagcctcatagcatgaaagtgacaagagt

SEQ ID NO: 103353 - DNA, 747 bp, Glycine max
  unsure (1)..(747): unsure at all n locations
  Clone ID: PAT_MRT3847_64346C.1
gtaagaatgaggggcaacgttctaaactcttatccatttctagaggcagaaaaaaagtcgaatgctaaaaccactcgtgaatttcccaatccatgccactttgattccttcttgttctgtgatgcttggaaaaactgaataatggaagtagagatcaagcttcgtctcccagactcagccactcaccagaaactatccaacttgcttgcacctttccacaccaaaaccttaatccaagaaaacatcttcttcgatggcatgaacaaagagctcacttcaaacctcgccgttctccgaatccgcttctacgacttggaacactgcgtcctttccttgaaggccaagccagtgatctcggccggtataagctgcatggaggagcacgaggagccgttcgacgtcgcacttggccgtgcatgcattgctgagccatggaggctcttatccgtggagtcctcagagatactcaagagggtgagggatgagtaccgtgttggagaaaatgggtggtgtgcttaggtgggtttaggaatgtgagggctgtgcatcagtggaaaggcttgaaactggaacttgatgagaccaactatgatttcgggacaaactacgagttagaatgtgagagtgacgacccagagagacacaagagattgcttggagagtttcttcaggggaatggaatcaattattcttattccanactttccaaaatttgctgtttttcagtccaaggaagttgccctgatg

SEQ ID NO: 103354 - DNA, 282 bp, Glycine max
  Clone ID: PAT_MRT3847_64347C.1
caccatgcttttttcttcttcttatgaccacaatggtgggtctgagcacaatgcaataagggcttaccgttaaatgtaggaacatgccacactgtccttatagccccacatgttccctttattttcttggggggccttgatataaattttaataaaatgaaaacaaaaaaaaatgaactggttgagcgaaacttgcgcgtctagttaaatagtagtagtgagatgccacgcgtgagcggaaatcatgggccttgtgtgcccttccaacttgggacaaccatt

SEQ ID NO: 103355 - DNA, 748 bp, Glycine max
  Clone ID: PAT_MRT3847_64348C.1
aaacttctaattcggcacaaaacagaacaacacaaactcaaatctcttctcttcttctctctctctatctctcagacacaagcacacaaatgaaaaaaagctaacaataataatatctctgcaaaccattaaggccatggcttttcttctccccaacctccaaccttcacttttagctcaatccaaatccaacaaagacaaagcaaaccttcaccaaactctctcacctcaaaaacccacttctcagtttcctatatcttccaccacatgctcctcttcttctctccaaactgcacaagctgcacaggtcagcacaccacaagacaagcagcagcaacagccaaaggatgaattctacctcaaccttggccttgctgtcaggaccatccgtgaggaccttcctttggtcttcgtcaaagacctcaattatgacatttatagggatgacataacattcatggatcccttgaacacatttactgggattgagaagtacaaattgatcttctgggcgttgaggtttcatggcaaaatcttgttccgagagattgcacttgatgtgtacagggtgtggcagccttcagagaatgtgatattggtcaggtggaaccttaggggtgtgccgcggggttccctgggaggctaaagggagagtttcagggcacttcaaggtacaaattggacagaaatggcaaaatttatgaacacaaagttgataacttggcattcaatttcccacagatattaa

SEQ ID NO: 103356 - DNA, 580 bp, Glycine max
  Clone ID: PAT_MRT3847_64349C.1
tacggctgcgagaagacgacagaaggggctagcaatactaatagcaaaaactcattcgcgatctcgttctgtacgtgcagccgcagcaagtgatcgaagcgaaaagagagaaattcatcgtcgcagtaatcatgggtaaggttcatggatcacttgcacgtgctggtaaggttagagggcaaaccccgaaggtggccaagcaggataagaagaagaagccacgtggccgcgcccacaagaggatgcagtacaatcgccgattcgtcaccgccgtggtgggattcggcaagaagaggggacccaactcgtctgagaagtgaggccgaggcttgaggaatatgttgctactctatttgatttatctttgttgttttttatttatttttaatttgtatgttttgattgtgttctgtgaacggtttttgttagctttatatcaaacttgaaattttgcatacaatatctaactatctaagttcattgctcctttcaactgggaaaggatttggtatttctgtgttggttttaacaatctatctatcctattgatgctctcttcaaagaaagcctttgtgtaaaa

SEQ ID NO: 103357 - DNA, 356 bp, Glycine max
  Clone ID: PAT_MRT3847_6434C.1
aaattcccttcccttgttgctctagaaaagaaagcaaagaaaaccaagacacaccctctcctccaaatatagcccattgatgagaattagaaaagactcactacagagacattaaactataacactcattgatcacagtctgtcccataaaaacaactaccatacagatacacgccccaacacaaattacaaaaaacacaaacaaaaacaacttttaacaccttcaattcccatgcgatcatgaagggaggtagtgatgacttccaccaccaccatcaccaccatgaccataaccaccaccgacaaaactttccattccaactccttgagaagaaagaagaccaacaagacccttc

SEQ ID NO: 103358 - DNA, 1318 bp, Glycine max
  Clone ID: PAT_MRT3847_64350C.1
tttgagcattaaaggctaaaatcatggcttttcttctatccaacctgaaaccctcactgctaccccaaaccaaatcaaaacccattcctcaaacgccttcaccatcatcagcaaaacccacttctcaaagtcggcttttcttctacttcacttcaaaccctcacttttaccccaacccaaatcaaaacccattcctcaaacgccttcaccatcatcaaaaacccacttctcaaattcttcactacatctagctccactttccgcactccaaagttccactgcacaggttgctcaggggcacacaccaacaacaggtgccagagacgagcttcagcagcagtgaaggatgaattttacctcaatcttggccttgctgtcaggaccctccgtgaggacatgcccttcatcttcgtcaaagacctcaattatgacatttatagggatgatataacattcaaggatcctttgaatacatttactgggattgagaagtacaaattggtcttctgggcgttgaggtttcatggcaaaattttgttccgtgagatagcacttgatgtgtacagggtgtggcagccatcagagaatgtgatattggtcaggtggaaccttaggggtgtgccacgggttccttgggaggctaaaggagagtttcagggcacctcaaggtacaaattggacagaaatggaaaaatttatgaacacaaagttgataatttggcattcaatttccctcagaatattaaaccagtttcagttttggatttggttactgcatgccctgcaagtccaaatcctacctttttgtggggtcctgttgatgcatactcttcttcatggatagccttttacaaggcagttagggacacattggatcaagaaaggagtttgctaccacaagatggtctagctacatgttcatagctatgtatgagctagcacttaatgtttcataggttattatgtatacattagtgtttaataggttaggtataaatataaagaatttgatccatagcataaaatggtttttcttcaaggacaagagtgtatatagaaaggcagggatgcaaaattgttcaagttgcacactttgttgttggaggaaatggggattcctatgtttggtaagcttatagccaaatacagatgatctatatgcggtaatcttctgaaattaattttaatagttgttgaacagaattgaatcttgtctttcttttttctcatataatggttggaccttattatggatcacccttatttaaaggggacattctataatctcttctagacttgtactatattggttttgtaa

SEQ ID NO: 103359 - DNA, 265 bp, Glycine max
  Clone ID: PAT_MRT3847_64351C.1
gcccaacagtccctttaatttatccccgtcagcacaccaagtcaccaacaatcacacagagccagtcccatcacttgacacaacaaactctactaagaaataagacatagcatcaactaaaccttatatcccaatcccctcatggcttcaatctcaggcatatgctcatcctcgccaactctcaaccactccacaccaaaacgacgccgcgcaccactcctcccttactcctcattcccctctaaaccctaaccgcctcgctacc

SEQ ID NO: 103360 - DNA, 471 bp, Glycine max
  Clone ID: PAT_MRT3847_64352C.1
tgtggtgtgcagaaactttagaagcagcacaattgtatttcagatgaacactatgtgcagacattgcttgcaatgcatgaccttgaaggtgaacttgaacgtagaacactgacctataccctatggaaccagtctacaacaaaaatggagaataaaggctggcatcctattactttcggctattcaaatgctagccctcaaaggataaaggaaataaaggtcatcaaccatgtttcttatgatgcctcatacttgacttgagcatagatttaaccatttgtgggttggataaatgagaagggtcaagattttttcccccttttggagaggggggaagacaaaaaggaggattcagttaatgaaatcctaacgtctttcattgttctgccacaaactgtggattggaattgggatggttgaaaactggtattgaagtaaatagaactttcttgaaaataatcttggaaatgc

SEQ ID NO: 103361 - DNA, 137 bp, Glycine max
  Clone ID: PAT_MRT3847_64353C.1
agaatgaaaataatggactttgataaatattatgtaatgtaataatgctacaaaaggcatttgttcactgggggagggggcatgcttgggatcccttgtggcagcagagaataatatataagagagtggaaacaaaa

SEQ ID NO: 103362 - DNA, 410 bp, Glycine max
  Clone ID: PAT_MRT3847_64354C.1
aatagtacaatttaaagggcgtctccatttaataaatgccagattatttggtctgaattcgggaaacaattagagccttaaaacttccgcttaaagaccattattccaccacgagctggtaattttacctcccatcatttattgagcatttattggataatttgattgaaaaattcattttttcttaccattattaccatgcctgaccagaagtatggacctttgcttactggaattggttttaagaatccccaaggttggctgaaaaattattggccaaattttcacaggccccacttccttcttttttaacttattttttgcgagggattgggaaaccttagaattaccggaaattgggtggcggattccattggaaaggcaattccaaaaggccgaattgggttcct

SEQ ID NO: 103363 - DNA, 1749 bp, Glycine max
  unsure (1)..(1749): unsure at all n locations
  Clone ID: PAT_MRT3847_64355C.1
ttttttttttttttttttttttttttttttttttttttttttttttttttttttttttttttttttttttttttttttttttttttttttttttttttttttttttttnntaattcgaatggagaagcaattagccaaatgttgaaagattgtttcttttttgccttttataattacagtccctgttgcgtcacgtttagacaacaactcttttttttgttgttcaaaagtagtaacactgtagagctttcaaacaatgtttacacaactcgtatgtacaaaaaccatcccacaaaaggaaagaaatctacataatcctgtatgacaaataggcaattacttagcacttgcatcccaactaaatacacttgaatagagcacccgcatttccatttcaactcacgcaggtgttttacctatttctttgctttgaattccctcaatttgtgtaatcccaagtctctcaatttgagagttcccggtatgtatataggatgtgggctgttcctgcctcttcaaactatacaccaccatcaagctacagccacagcaacagcaagctcttcacaggccttttccacctgcatgttttcaatttcaatccctgaagatgaccgatttggcaatgcgcatcaagggctccaagcaatccggggtgaatttcctggcgaagaggtaagactcggaatggttggacttccggaggcggagaatgagttccggcgagacctccgtgggccggtaagtgtaaggatgaccgttgacggtgccggtccaattaaccctggtgagcgtgtatttggtgcagccatcaggatccgccatggacaacagggtcggaaaataatgctcctcagggtagcattcatcgtcacggtaacacgggatcttgaatttctgccacagggtcctatccttgacgacgaccagcgcgtggcggcgcgtgagcgtgaagaactgagagcccacgcggaaagcttcgaaggggatctccggcatcatggcgtagcgaccccgggaggtgtagcgcttccagagcttgggagcgtgggagaggatctcgacgaaggacttgtatttgaggcggaggccgaagcgggtggaagaagaagattcggggtcttgggagtcgaaggtgggggagaggaagagggacttgtaggtgtaggagaaggagtggagagggatgcagtgctgggagaggagggcgaagtaggcgttggaggggtcgtcgaggagggcggtggcgaggagattagggtaggggaggagcggaaggtgcgtttggaggagatgaatttgttgatgaaaagaggggacaaagggcgggtgaggttgacggaggggtcggcgtggatgtagatgttgaaaaggttggagggggtgttggagaagaactggtcccataaggaggagaagtggagatcggagttagtgaggaagagaaaggcgattttaagagaggggtttttggaggagaggtggaagtgggaatggggggaggaaagggagatggcgcggttgaagagcttgatgtcatcgacttcgtcggagggggagatgtggaaggactgaggaggaggaggaggagggaggatgcgtggggccaccaagaacaggattggtagggatatcaagagagacaaggttaacacgaatgggcttgagaacattatcttcgattcactcctactaccaccaccaccaccaccaccaccactgctctgcaattctgattctatttccaat

SEQ ID NO: 103364 - DNA, 251 bp, Glycine max
  Clone ID: PAT_MRT3847_64356C.1
ggcacaagtgagtttgttgatcgagatgattaaaaacagtgtgatgaatatgaatgtccttgatcacttcgatcgcaatcattctggtaccatggaaatgcaaagcataggacatgttaccactctcaacgaagactcattatcgcacgcgtaatacgtgatgtcaaatgcacatcttcgacgctacatgtgcaagcacaacacagctttcgccttgagcaggatcatcaaccatgagtgtactgttcaga

SEQ ID NO: 103365 - DNA, 471 bp, Glycine max
  Clone ID: PAT_MRT3847_64357C.1
gttccgcaatgtttacttatatgtcggcgtattacaatggtatcccacttatactacagacataatgcatgatttacacatacaaaatcatggtgctttttattttggatagcacagtgcacaaccacgaaaagtttaatagtggcacccaataattccaataacccccacatggcacatagcatgaatagtagtgaatcattctcactgtaggagtatgacacagaaaggaatattagaattatggtccagaaaacagaaattttgaggtaaaaaactactactgataaactaagtaattttctaatccactaaacagatattaaatcactgataaaaaaacatataattcaagcttggtcaattagtctaagacctataagatttcactagaacatccaaaccaaataatcccatgatgacttgtaaaaaataaataaaataaaaacattttcagaaccaagttgaata

SEQ ID NO: 103366 - DNA, 187 bp, Glycine max
  Clone ID: PAT_MRT3847_64358C.1
tggtcttgttggaattgatcaaaacattgcacggattcagtccttattgttaatggaatcaagtgaagtcctttttgttggaatttggggcatgggtggcataggtaaaacaaccattgcccgtgctgtttttgataaattttctcttcaatacgatggttaatgctttttgaatgtaaaagacgag

SEQ ID NO: 103367 - DNA, 848 bp, Glycine max
  Clone ID: PAT_MRT3847_64359C.1
attaatttgtaagaacaaaattagatggcttgcgaagtgccaataaaatccatgatgtccagcgcagtcacactcctgacgccgcgccacgtggcagtgatcggcgcgggcgccgccggcctagtggcggctcgggagctccggcgagaagggcatcgcgtggtggttttcgagaaaggggaggaagtgggtggcatgtgggtgtacagtccggaggtggattcggatccgctgggtttggaggcgaagcggagattagtccactcgagcctctacgattcgctccgaacgaatctgtctcgggagagcatgagtttccgagattaccctttcaggaggagggaggggaaagggagggattctcgaaggttcccgggtcacagagaggtgttactgtacttgcaggatttcgctgctgaatttgaaatcggagaattggtgaggtttggaacggaggttttgtttgctggattggatcagtgtggaaagtggaggctgacttcaacatcaccccatactcatcctgtggatgagatttacgacgcccttatcatttgcaacggccattacgttcagcctcgtcttcctcatatccccgggattaatgcatggccagggaagcagatgcatagccataattatagaacacctgagccctttcaagatcaagttgtagttctaattggtagttctgctagtgcggttgatatctctcgagatatcgcaacagttgctaaagaagtccacattgcagctaggtcagttgaagaagataagctaggaaagtgcctggccatgagaatatgtggcttcattctatgattgacagcgttcatgaagatggtaca

SEQ ID NO: 103368 - DNA, 595 bp, Glycine max
  Clone ID: PAT_MRT3847_6435C.1
gggtggttgggggttttttttttttttttttttttttttttttttttttttttttttttttttttttttaaacccttttataaagggggggttttaacccaaatttaataaaaaaattacaggggaaaaaaaacgggaagtaacccaaaaaataaggggggggaaaaaaattccctcccttggcgctataaaaaaaccccacttaaaaaaaaaaggggactggaacaccttcacttaacttaacttaactggggaaaccaattcaaaaaaatattacccttgaaagggaaaaaaagggggtttaagttttaccccatagggggggggggcctaaaaaaataaaacccagaaaaaacccctttaaagaaaaagaggaggaagaaaaagataaaaatccctctcaaaaaaaaaaaaaaaggggggggctttggaaagaccttttgaaaaattaagggttaaaacttcccccccttccgggggaaaagcaaaaaaaacggaccccaaccccaaaaaattatccccgggcctggggggggttccatttcgagctggaaactggggtttgcaaaaggggcaagggatttggaacaggggg

SEQ ID NO: 103369 - DNA, 447 bp, Glycine max
  unsure (1)..(447): unsure at all n locations
  Clone ID: PAT_MRT3847_64360C.1
gctgatcacctgaccccaggtccttgcaaaagagaattattttgttatgctgatagcgtcaaacatataacttcatcgaattttttatgtcatgggtcaagaatgagattgtgctaaaactgatgtttctgaaatttagactggtttttttctacttttacatatctccctagcattagtgttgcattgcatgtctttaccatgtcaccagtttatatcctggtgtagcttttttaccagcatatcatacttttgcaatttcattttgcttactattttataccttaatctttaaaggctcttgaatttaaattgttttctactcactgttaaacaactactgaattcaaaattatattatgagtttatacttcatccgtatgttaatgcaaaactgtntacactactggtaaacaagacaagtgcatttattgtagcaattgagat

SEQ ID NO: 103370 - DNA, 242 bp, Glycine max
  Clone ID: PAT_MRT3847_64361C.1
caccaaataaaaaacatgtctaattattgtttcaaacctgatttatatatttattcatttatacatgagtcaacttcttgtattcattaaaactatatatttttcaagttcatttataaatatgtagtcaagatatcaggacatgttgaccattcgttgaaaaagtaaaaaaaaattatgaatgcctatcgcattcaataaaaagacaaggaattatgtatgatggaaaaaaaaaactaaat

SEQ ID NO: 103371 - DNA, 952 bp, Glycine max
  Clone ID: PAT_MRT3847_64362C.1
tttaaatccccataggaatcaatgcaatcagtattgaattgatacaccaataatccaacaagtgccctttattataatcagtttgtcacacatcctagcctagatacatcttcattagcacagcaacaacaggttggctgattttttttttctgatattttaatataaattacattttgtacataacgtgctctaaagcatgtacaaaggaaattcaacaggaaaaaaaactagatgttaggatgcctcactaactcagtttacgggccaatacatgctaggttaaactgttagacaaaaaccttacttccattattgtgacagtgactgtgaatggagtaatctcaatgttgtgcctgaagatggtttaaggttgcaggactgcgaccagaagctaccctttgccttgttttaggaattattataggcgtacaacacacaagagcaaaaagtaactccgcgaagaacgccatcatcgcgatccatataaatatgctcatcttccaaagccaaatcatcctcttgaataagggaagttcagattcaatgatcagagatgcatcatatatttcaggaatgcctgcacctggttgatattctgctcgttgctcaagggtcactttcaaacacgaagtaggtacatctccttctacgaaacctctcatcttcacattcagagtctgtgtttcggatatatagccagtaagaagaggagcaatcttgaggaaagtcgtgattaggcggataggctcacttctgaatcttaacatgcaaggttgacttgagcttgctatagctttaccattagacaataagaaatctaccctggtctgaaagatcccaaggtttctgttatatcctgactctggcacccttaactcaacagtgacctgcaccttatgcttagaaggtataacccgttcacccgcccacttccttgcatcaaccttac

SEQ ID NO: 103372 - DNA, 217 bp, Glycine max
  Clone ID: PAT_MRT3847_64363C.1
gttggtgacaccattaagtaagggatagcactgcgttctccagtcctggttgatggaggtgctataagtgtggttatcctgaccttagaagctgtatattgttgtctacatcataatgtgtgctctttgttctgtagctaccaaagataaaaccattcaaaaagcatcttccattgaaatccatcatatgaatattcaacattcttctacatgtaac

SEQ ID NO: 103373 - DNA, 319 bp, Glycine max
  Clone ID: PAT_MRT3847_64364C.1
aaaaactgattggatattctttaattatagttacaatattttttctttcttgatgaccgggtttttgttgagaaaaactttattttgttggaactctgggtctaattatgaagtaaatttaaacttgacaaagcaatggtccaaaaaaatactgatccctttttcttatcaaagactaccaaccactgcttcttgtgtctgtgtacattgactattctttgggtactggtccttgggatgctatgcttgttgatctttgcatgctcactggatgctgcaacttatgtactcatgagtgattttgtgacccttctacctt

SEQ ID NO: 103374 - DNA, 359 bp, Glycine max
  unsure (1)..(359): unsure at all n locations
  Clone ID: PAT_MRT3847_64365C.1
aattatattataaaatgttgcgtttttttttatttatttttatattaaaataatttttaaatatatttaaatttttataatataattttataaaaaaagggcgtgccccccctttttttgagtttttttacacccggaatatttatttttgngaccgtgttcttttgaggcgtttcacaattttttttttttttgaggttttatttataagctttggcgtatttatttgtcttaactttttttttttttaagaattttttttctttttacatattttacacaaaatttagatccggaagcttttaattttaaagacctttgtttcctatttatgtgagcttatttacattttttttttt

SEQ ID NO: 103375 - DNA, 495 bp, Glycine max
  Clone ID: PAT_MRT3847_64366C.1
cggaagagtcctccaaggcggttgaggttgagcaggaagcaagtgaagcaaaggctcctcacgaggctttgtttcttgtcttgtcatatcttcctgtgtacgaggttgtggtcatgtctcaagtctgcacatcactaagggatgcagtgaacaatgacatattactatggttgaatgttattgttcaaaggcccctcagttggcgactcaacgatgagattctaatcaaaatcacctcaaaggccaatggtaggctcaaaactctcgctctcatcaactgcatgcacgttaccgaccacggcctccaaagggtcgttcaacaaaatcctctcattaacaagttgcatataccagcatgcactggcataacccctgaaggagttctaggagccgtgaaaacactatgccaaagaaagcattgcttaaagacctttagtataaacggcatctaccacatacagaaagagcattttgacactcttatattaacccttg

SEQ ID NO: 103376 - DNA, 1228 bp, Glycine max
  Clone ID: PAT_MRT3847_64367C.1
ggctcgagattgcaagaaccattcacattcttccagaatcatcaaagccatcaacgggcttgacttggcaactagctggaagatgaagcaagcaactcttttcttcttctcactcttcctactcctttcctccaccaccatggccatttcaccagcacctgcagcagcaccaaaagccacagcaaaaactcctcctaccccaaaggcaacagcaccatcaccaaaaccattagttcccacaatacctcagtctccagactctcctgactcggtccccgacgacatcaccagaatcctgaaaaaggccaaaatgttctcagtcctaatccgcctcctcaaaaccaccgaaatcatgaacaacatcaactcacagctcataacagccaagagtggcggcataaccatccttgcaccagatgattctgccttttccaacctcaaagcaggcttcctcaactccctaaacgaaggccagaaaatcgaacttgtgcagttccacatattgcccgagtttgtgtccagctcaaactttgattctctaagcaaccctgtgcagacagtggccggtaaagatcccgcaaggcttccattgaacgtgaatgcattaggaaacagtgtcaacatttcaaccggggtcgtcaatgccaccgttctcggggtagtatactcagataacaaacttgggatttatcacgtggacaaggtgcttcttcctctagatttctttataaccaataaggctccagcttcagctccatcaactcttgcaaagtctcccaaagctgctaaggataactcttctgatgacgatcaagaagaaacaaatcagcatcagaataaatctggggcagtgagtgtggttagcattggtggagcaacgttgatgtcgcttgggatagctttggttgcaaccatgttgagttgatccatttggcagctgcattttcaattttatttgtcaaacacgccattaatttctttctttttaccttttttgtttaaattttggtatgtgtttctgttttcttgtgtattggtgttatatatgaaaaggacgtgaatacttcaatgattaatgattcagttgttaagccataattgttccttaataaaaaataaaattatatttattgattataaagacagacgcaaagcacttcagaggaaagtgcaagaatctcaagtatcggctgaggagcaggaggaaatgatgaggaactgggcgcgc

SEQ ID NO: 103377 - DNA, 181 bp, Glycine max
  Clone ID: PAT_MRT3847_64368C.1
tgaaggactaatttaaaataaactaagtatttggctacaacggggattaaaggctgaaactaaaatatagaccttgtgatacatagcatatgttgcgcttgacactgatgcatgtgcttcatgagacacatgaagatcatgtagactcttttgttgagaacgcaattatcgtaattaaaaa

SEQ ID NO: 103378 - DNA, 348 bp, Glycine max
  Clone ID: PAT_MRT3847_64369C.1
aggttatcctctttgttctcttttgtttttttttttttttttttttgtgttttttttagtttttgagaaaaagaaactcaatatgggcaggacaacaaccccccatgaacaagataaattatccggggaaaacgccccaaagcttctccccccgaggagagggggagggaaaaaaaggagcaaaaagccgcgaacaccccgacttcttgcaaaaagggcgccgccccacgcaaggggttcggcccccccaaaaggagcggggggccccaccgggagggccgttttgccccgggggatcccccggggagggcccccgttggggaaaaaaaggggggggcccaaaagggg

SEQ ID NO: 103379 - DNA, 126 bp, Glycine max
  Clone ID: PAT_MRT3847_6436C.1
aaaaaaaatttggataccgggcttgctatagccataaaaaataatgggtaacaaaatcaagccttaagtttcagggttgaaaatcccaacccaaaccgtttttacaaaaattggcggacccctggg

SEQ ID NO: 103380 - DNA, 305 bp, Glycine max
  Clone ID: PAT_MRT3847_64370C.1
tgtttctacaagccttcaaaaactgcgttactgagtgcgtggatggagacggtaccttagtctgtgcggacgtgtatgtcatgccctactgcagtgcatgtacattggaaaggtctctcactgtccgtaatctaacctttactggagctagtgcctgaactagtgcgactgcgctgtctaaaaagtatgcccataggagttgactcaaaagagccgtctgacgaaggcatcaaggtctgtgggagggtcctgaggacaacgcgagtgtatcgtctcaacatactgatggataaactgagaataca

SEQ ID NO: 103381 - DNA, 1056 bp, Glycine max
  Clone ID: PAT_MRT3847_64371C.1
cgcagcacgcgacgaattttgtttggaaataattgaggactacgttgttacggtcccaaagaacaacccttctagcaagtaaacccgagttcccttctctctctttacgattacattgctctctctctctctgttcgcattcaatctttcgcttctgaatctccaacaatggtgctcgaggcgactatgatctgtatagacaattcggaatggatgcgtaacggggattactctccttctcgatttcaagcccaagcagacgccgccaatctcatttgcggtgctaaaacccagtctaatccagaaaatacggtgggagttctcacgatggcggggaagggcgttcgtgttttggtgacccctaccagtgatttgggcaagatcttagcttgcatgcatggactagaaataggtggtgagatgaacctagctgctggcattcaggttgcgcaattggctcttaagcatcggcagaacaagaagcagcagcaaaggattattgtctttgctggaggtcctgttaatcatgagaagaaaatgttggagatgattgggaggaaattgaaaaagaatagtgtagcacttgacgttgtcaattttggtgaaagaatcagagggatcctctgtatatttgtatacactcctttcagctgatttttataatgataccagtttgctcgttcatgtaagatcttttatgcatactcccctatcttactattcagtttttttttcttttcctttagggggtgggggtaagtggtattttgctccatttcctgtaatgctatcaattttctgattgtattgtttatccagcctcaacagaagaatgatgccaagcctatcaaacgaggaggagaagaagtaatctttgagaccccctttgccctgtagggttttattttcttggtagcattcttcgcggctgttactaatcgggggaactatttacgcatgtttcaatgtgtctctctgcactttaattggaaccaatgctatgtctctctgattgaatattggatgatttttaacttacaatgttcttgatttctc

SEQ ID NO: 103382 - DNA, 295 bp, Glycine max
  Clone ID: PAT_MRT3847_64372C.1
ctagatttcaacttgatacacaacttcaatatatatctgtcttataacccatactagcgacggactatttcaacttatctacaagctctacaaacactccaattcccaatcctaccctctattaccatattaaactgcactctcccacatatatcatcctcaaccactcaactaacatcatttacttaatcaccaaacttccactctactacaatcatcactctcatacctaccacaataccacatttctcaaatcataaaaccacacctgatcacataataccattatctcata

SEQ ID NO: 103383 - DNA, 234 bp, Glycine max
  unsure (1)..(234): unsure at all n locations
  Clone ID: PAT_MRT3847_64373C.1
cgattccgtccattcaaagagctgtcgacactgaacccagccgaagacctgcagcaacaactagtagtacttatccagctagcaactgtctacacacagctacagcaacttcagccatatcaccaattggcagcactgaagagctctgcncatntgcagcagcaaatactactggcatttagcgagctagctgcagcaagtcgtgcttccttcttgacacagcaacagttgctg

SEQ ID NO: 103384 - DNA, 672 bp, Glycine max
  Clone ID: PAT_MRT3847_64374C.1
aattgacgttgttcctttgttttctttgtatttcagatatatgcagtatctattactatccgtatagtgtttggcttcatgttcatagcactgatatggaaatttgacttctctccttttatggttttgatcattgctattctgaatgatggaacaatcatgacaatttcaaaggacagggtgaagccatctcccttgcctgatagctggaaactgcaagaaatatttgctactgggattgtacttggaagttacttggcgctgatgactgtcatattcttctgggcaatgaaagaaaccgatttcttccctgacaaatttggagttagacacttgagtcatgatgagatgatgtctgctttgtatttacaagtcagtatagtcagccaggctttgatatttgtaacccgttctcgaagctggtcctttattgaacgccctggaatgctgttagtttgcgctttcgttattgctcagctgattgctacaatcatagcagtatatgctgactggggctttgcaaaggtgaaaggaattggttggggttgggcaggagtcatctggctctacagtattgtcttctatattccacttgatgtcatgaagtttgccacccgttatgtattgagtggcaaggcttgggtaaacatgctagaaaacaagactgccttc

SEQ ID NO: 103385 - DNA, 292 bp, Glycine max
  Clone ID: PAT_MRT3847_64375C.1
ataaaacttcataaaaaaaaaagaaaaaaaaataagtcatgggttgagaacttataagctgacatatcagtttctcattgctaaataaaattaaaaatcaaacccctcctacttaacatattctaaggttcagaaaatgtgcccctcaaataagaagtcgaatacacaatgtaccaatgtacttgcactcccattagactgaggaatacacaactaggaaattaagttccaaacaaacgcatgtttttcaatgctagatgtcatctctagaacagaacagaactacttgtgt

SEQ ID NO: 103386 - DNA, 289 bp, Glycine max
  Clone ID: PAT_MRT3847_64376C.1
aacccaaaatgaggatgtatctctctctataaccttaaccatggcactggtgctactgaccagcaaggcaaactcagcgtaaactgtaactttcagctggaacaagtttctgccgaagcaaccaaacatgatcctgcaaggagacgctatggtgacctactcgggaaagttcaactcaattaggttgacgaaaacggcaccccaaaaccctcgtgtgattggtcgcgccctgtactccacccccatccatatttgggacaaagaaaccgatagcgctgccagctatgct

SEQ ID NO: 103387 - DNA, 442 bp, Glycine max
  Clone ID: PAT_MRT3847_64377C.1
ggccgggccgggattttctaaacaacctgaacgaatgcgctactcttccctcaacgatctgtgcgagagttcttggagaaacacaggaatcctataccccttgtgctgtgaaattttctttttgtgcctcaaaatagaaccgatggactcgcggtaaccatttactccgtggcttcccaccctctttttcatgcaaccaatagcaaatctctctggataagaagctcactgacgaggagaatccgcgcgacctagtgatagagaacggccagaacctcgatgagaactcccataacgtgggatcgaaccagctccagaacattcgcgaggggctccgagacgactacggcgacctcaagggaaacaacaccatgatgaggtgctcagccaggatgagcgctgaatacacccgacacacgcctatctcaaccttatcccactc

SEQ ID NO: 103388 - DNA, 647 bp, Glycine max
  Clone ID: PAT_MRT3847_64378C.1
ctggagctcggtggattgtctaaagagtttctgactgacatatcaaaaggagcattttctcccgaatatggactcttttcccaaaaactcgacttcagacagacttctaattccaactgcatctgccagatatttggagaatggtcttcagatgattgaattccttggaagagtagtgggtaaagctctatatgaaggaatattacttgattactctttctcccatgtctttgtacaaaagctattgggacgatatagctttcttgatgaattatcaacacttgatccagagctatacaggaaccttatgtatgtcaagaattatgacggtgatgtcaaggagctctctcttgatttcacagttactgaagaatcattgggcaaaaggtatgtggtggaacttaaatctggtggcaaagatatttctgtgacaaatgagaacaagatgcagtacatacatgcaatggcagactacaaactcaaccaacagatattgcccttttcaaatgcattttatagagggttaactgatcttatatctccagcctggttgaagttattcaatgctagtgaatttaatcagttgctttcaggtggcaattatgatattgacattgatgatttgaaaaacaacacacgatacactg

SEQ ID NO: 103389 - DNA, 2434 bp, Glycine max
  Clone ID: PAT_MRT3847_64379C.1
ggcatgttttcacagaatggtactggtaatggtggtagtagtaatagagctcaagtgggtaaggaagatggaccctcttgcacccattgcttgcagtttgctgtgacttggtctttgttggttaatgggttccttcagtctctgccacttcctttcaaatctgggaagaagaagtgtcagaaagtgtgtgatgaagacaagctgtgttcttgcacgaagcctactgtttcatcatgtgaagtgaagcaaaatgaatccaaggggggtcagtttggtagagcagttagggagaagggtgtgaggaggaaggatgggaaaaatgtttcacttgagtgccttataggttttatctttgatcagctatctcagacatctcgagcgtctggattatggggtgcatgaaaacaatgatgaccttgacaatgggaaaactagtctgccccaaccttctttttctcattttggtcatgtgaatgcactcgcaggtttcttggaggagcacaaagtatatgtgaatagcttcttggggaatttgaggtttgcaaaggtgggtggtgtgccatcaagtgtgcctggagaagaaagcccttcaacaaacggagagggagatattagtagtaacaatggtaataatggtaatggtaataatgaaaacaaggatgaaaacggaggaaattcgccgcagaaggttgccaacaacatattcagtattcctctctctaacgtggagcgtctaaagtctacactttccacagtttcattgacagaattgattgaactgctaccgcagctggggagaacatccaaagaccatcctgataagaagaaactaatctcggtacaagatttctttagatatacagagactgaagggaggaggttctttgaggagttggatagagatggggatggccaagtaactctggaagatctagaagttgcaatgagaaaaagaaagctgccacgaagatatgctaaagaatttatgagccgtgctagaagtcacttattttccaggtcttttggttggaagcagttcttatcattaatggaacagaaggagccaacaattcttcgtgcatatacttctctatgtctaagcaagtctgggacactgaagaagagtgaaatattggaatcactaaagaatgcaggactccctgcaaatgaagacaatgctgttgctatgatgcgatttctgaaagcagacacagaagaatctatttcatatggacatttccgcaatttcatgcttctgcttccctctgatcgtcttcaagaagatcctaggagtatctggtttgaagctgcgacagtagttgctgttccaccagctgttgaaattcctgctggaagtgtgctgagatctgcattggcaggtggcctttcttgtgccctgtcatgtgcattactgcatccagttgatacaattaagactcgagtacaagcatcaacaatgtccttccctgaaataatttctaagctgccagagattggaaggcggggtttatacaggggctctatccctgcaattcttggacagttttcaagccatggcttgcgaactgggatatttgaagcaagtaaattggtgttgataaatattgctcctacactgccagaactccaggtacaatctgtggcatcattctgtagcacatttttgggaacagctgtacggatcccctgcgaagtgttgaagcagaggttacaggcgggtctttttgacaacgtgggcgaggcttttgttgcgacttgggagcaggatggtcttaggggtttctttcgtggaaccggagctaccttgtgccgcgaggttccattttatgttgctggcatggggctttatgctgaatctaaaaaggttgccgaacgactactagagcgggaactcggtcccttggaaacaattgctgttggagctttatctggtggcttggcggctgttgttacaacgccgtttgatgtcatgaaaactagaatgatgactgcacagggccgatctgtgtcaatgactttgatagccttctccatactaaaacatgagggaccccttggcttgttcaaaggagcagtacccaggttcttttggattgctcctctaggtgctatgaactttgcaggttatgagttagcaaagaaggccatgaataaaaatgaggagggcaaggcaggcagttcagagtaatatatctagttacctgggattttgtgtcacacagcaaccaaatgtttggttgaatttttgagtttattgcagtaatcattggaataaggccattgatgctgctctgaaaatacacattttgtttcctttgttcattttctacttctatgatattgccctttgtagcagcagaattaaaaaatatattacatcatatatttgcaaactaaaggttcaatttatttctttatctattgtacagatttt

SEQ ID NO: 103390 - DNA, 679 bp, Glycine max
  Clone ID: PAT_MRT3847_6437C.1
cgggaaatacaaaaaaaagttttaagatactgattctcctatatctatgctcagcttcttggtcctgctctattctgtggttcctgaggagacaaatcattgaaattatgcttcattgtagcaatatttgcaagcctagccaacttgtacctttcacacacatgtacgcttcatacatgcttaagttcttataaaaggagcatgcattgtgcttcctctctgcccatatcatcaagagtactctttcttggactctagtagttctcttaatttccactacatttgaaaccttagaccatatactcttaatatcaatcgagtcaccttatataaccattagatatggcatcaagctcaatgtcagctactggatcatggagtgctaaggacaacaaggcctttgaaagggctttagctgtttatgacaaggacaccccggaccgttggaaagatgttgcccgtgctgttggcgggaaaactcctgatgaagtgaagagccactatgagctcctcctcagagacattagccaaattgaatcaggcaaagtgccatacccaaattacaagaaaagtgcagagcatgatgaagaggagaaaaggatgagaaacctgaagatccagtgaccggccaataggaatcaacaacaaatattaatttgtgattgtcaccatccaacaa

SEQ ID NO: 103391 - DNA, 562 bp, Glycine max
  Clone ID: PAT_MRT3847_64380C.1
ccaggacgcaatcaacaagaaagaggagtttctaaaagaggttgagattcttagtcaactacatcatcctaatatggtattgttacttggagcctgtcctgagagtggctgtcttgtttatgaatacatggaaaatggaagtctagaagactatcttctaaaaaaaaatggaaaaccaccacttccttggttttttcgatttcgtatagtttttgaaatggcttgtgggctctcattcttgcataattcaaagccagagcctattgtccatcgagatataaaacctggcaatgtcttgttagacagaaattatgtgagcaaaattgcagatgttgggctggctaaactccttgtagaagtcgtgcctgacaatgtcacagagtacagagaatcaattcttgccggtactctgcattacatggacccagagtatcagagaactggcactgtcagaccaaaatcagatgtatatgcttttggagttataactctccaattgataactggtcgacatgcgcgtggactcattgtgactgttgaagatgcaatacaaatggcttct

SEQ ID NO: 103392 - DNA, 530 bp, Glycine max
  Clone ID: PAT_MRT3847_64381C.1
ttttaaaagttgctttaactgccataagtgtagtcctgtctctaaatccaacttcaactattgctcacatatctggtattggtataaaagccatcccttctatttcacacttatccagtctccgtgctgtcaacttgtcaaacaatttcatagttcacatctcaccaggagttctaccaaagggtattcaaacacttaacttgtcaaaaaacaaaatcagcacccttgagggcctcagagaattggccaagctgcggatacttgacctaagctacaaccgcatttcgagaattggacaaggcttgtcaagttgtacactaatcaaagagctgtatcttgctgggaacaagataagtgatgctgaagggctacacaggctattgaagctaacagatgtagacttgagcttcaacaagatcacaccagcaaaagcattaggccagcctgtggctaacttcactcacttaggcccttaatctcttggaattcaattaaagcaacatcagcgatgaccgctaagcaagcagtct

SEQ ID NO: 103393 - DNA, 280 bp, Glycine max
  unsure (1)..(280): unsure at all n locations
  Clone ID: PAT_MRT3847_64382C.1
ganngcanaatccctgtcattcagatgngcttcctgtgtctctttagtntcantgtctgtnctacccttcnagnggttctcttggtgggtctctgtactcgttggttctagtgcttgcntggntcnactgttaatgattgcntggccatgcntattanggtctataagagggtgatncgtgtatgacaggttcgtnggccactagaaanaccatcattcatcanatcactattgtcatatgacccagtgttgtnacgnntggaattcagntngctnccna

SEQ ID NO: 103394 - DNA, 515 bp, Glycine max
  Clone ID: PAT_MRT3847_64383C.1
agaccttatccataaacgggtatatctggattgattgtgcagatcggagccaccctcatgcgaggcctactgcacacccatctgctcgctccatatgagacgactctagggaattgcatttgacttgatcaactagtgatatgctccaacaactaatggtgttcttcatgatagggacgacgaccacacttgaacttgtctcctcttccgacacagctattgcctatgccttggcttatgctggttattagcaccccaaacccaaaacctattagatgttttaactttctttggtgttgggggctcgctacggccacctattcatcatcatattactgactgagaaagcgagatagagctgccgatctcagtcatatattgatggaagatgctcttgctgtgattgtggatgcactgtatgatcgtcttcatgcgactgagggaagacatactgacctcatctactgattattcagagtggttgcttgaatgccttgtgcatgatgtatgcactt

SEQ ID NO: 103395 - DNA, 393 bp, Glycine max
  Clone ID: PAT_MRT3847_64384C.1
acccacgcgtccggattcccttagttttgaaagtgttcctttcatttgtgtttttagttgaactatggcttttaacagccaaatacttgtgtgacaccacaagtcttaattctgctgttgttagaatgtgttttctcgcatatcggcatatgtggtcgggataattaccgattttttattacacagattgacaagcagagaaaaaaatgctatgcaatcagtttggattcaacaagtcaattttctttttctttttctagtccggcaagtacctgaatgtcatttgttttgtaatttgtcaaaggatacgccacatttatttacactgctttttctatattgggaacttttacatatccaaacacatggtggtgggcctctgtgccggagatg

SEQ ID NO: 103396 - DNA, 319 bp, Glycine max
  Clone ID: PAT_MRT3847_64385C.1
ttctgctcattcgaggatggctaagtgctcctacattcgaattcagtgaatgctcgggaaactagaattccatatccatgggtagtttttcaatgagaagataaaagtgaactctgtatttcttcgtgactcaacagctgtgcctgattcagtggtgcttcttttgggtggaagcatctcaataggagatacggatggtcacttgagaatgtcaggaggatatttggagttttttatgaaacctgctgttgctaacatgtaccagagtataaggaaagaacttgacaaccttattcggagtaaactacagtttccgctg

SEQ ID NO: 103397 - DNA, 168 bp, Glycine max
  unsure (1)..(168): unsure at all n locations
  Clone ID: PAT_MRT3847_64386C.1
gcgccccacgcgtccgnacgagcgcgagaactccacagaaggagcaaaggccggnatcaacaccagaggggcccagacgccaagcagaggaagcngaanngagcgacagaccccacaaggaggacgagggaaatcaggccaaaacaggaacaaccgaaacccgcaaaa

SEQ ID NO: 103398 - DNA, 256 bp, Glycine max
  Clone ID: PAT_MRT3847_64387C.1
tgaaaactaagttaaaagaactaaaaatctctcgcaacacaccctaaactattttgtaattcaaaatcaatttagaattaatttgtaaaaattccaaactgatcttccaaaaaatgttatttttaagtaatcaatcgagtattaagattagttttggtttaaatcttttaaaaaatcaagccatgcctttctttttacagcttctttaattccatggacttgcacaaccctctctgagcatgcatgttagcctatc

SEQ ID NO: 103399 - DNA, 1063 bp, Glycine max
  Clone ID: PAT_MRT3847_64388C.1
ttctttttgccttgccttgtctaccgtctcggtgccttccgttctccctgtgctccggtttgtggattctttcgcagccgttcccaccgcttaactaatttagtcagcgcgcggccccatccaggttctcagccgcccacccagcaccgcggccgtcccggaccttccaggtcgtgagttgcctcccggccctctgggttctctataactcgtttgcacgttcctttttttgcttgcagatcttttgaatatgctatcgccgcaattataatgggtccgaattcgtagtcacatccatatgccttgactttactacaatgtcatataataacattctttgtatgctataaatattggattctttcgcaagagaaaaaaatgcttaactaatttagttagcactagtacataactagtttgtcagccgtcaatccagaaccgcgggtgtaaaggattttcaaggacgtgagtttcctccctaagctattattactctataagacataagcacattccttaataagcatgcagatcccatgaatccacacttgttttggtgaaaaatgcttcataaaaaatgcaggtcacactcacaaccaatgccgcacatattgccctctgctgctgtaaacatagacaacataagcttacccagaattctttgtacagacaaggtaagacaacactttagtcttcagctgagtcacaagtttaggccatcacaaatacaagggaaagtagtcaccgttgggaggagtcttcagataaaaaacagtggttccataggctctgttctcattgcagggcgctgttgatgattcaggtctgtgctttcattgaccatcgttttgcttgcatctcttcttttcttcatctttgaggcgctcagggagccttctacttgattcacccttcaccaactttggatagcgatctatagagtatggggtaagaaaacaatataattagtaattcttatgacagtccagcatgttagctgataatactgctgccagcagttcattaaaattttatcagtatattaaattgctcgaattactgg

SEQ ID NO: 103400 - DNA, 308 bp, Glycine max
  unsure (1)..(308): unsure at all n locations
  Clone ID: PAT_MRT3847_64389C.1
tttatgcataagttgattgctgagcacacatgatccgttgcttttccttcaaaacctgcttagcggagcagactttcatttggttgagtgctcattttcttctcgttacgcaactctctaatttgtgccgtatgtccgtgaatcctgatggctgacccctttagaacattgcagcttttaatcttcttgccggctgctttctcgtcagttgcctatcagcacctgttgcgggcnttcgccctctgtttgcttcggcccttctcagagggtggggcttttccctgtgtgccgggccgggtggcgtgtgc

SEQ ID NO: 103401 - DNA, 341 bp, Glycine max
  Clone ID: PAT_MRT3847_6438C.1
cccactcgtccgctcaaacgtcccatgcattcatgttatttgaaccttgtgactgttagggctacattgtatctctggcacatactatcaaatccctactgcctacgatccttattctgatgcaaatgctgatgactcacttgctgagtcaataggagtatgtgcatattcgtgattctcagctaaatcttaattttagcctgacaaccgttcttgaatccaaatacaaattcatttctaacaccatacttatagacacatataatgagttctgaacaaatggtacagttattcacttcccataactatctcatgctattcaacttctatgttatcatgac

SEQ ID NO: 103402 - DNA, 1572 bp, Glycine max
  Clone ID: PAT_MRT3847_64390C.1
aaggcaggctataccagtacttttacaaggtcgtgaatgctttgcttgtgcaccaactggctctgggaaaacccgtgcgtttgtgtggccaatgcttatgaagcttaaggatccggaaaaaggcagctccggagctgtgatcctttgtcatactcgtgaattatctgttcaaacatatcgagagtgcaaaaagcttgctaaaagaaaaaaatttcgcattaagttgatgactaagaatcttttaagaaatgctgatttttcaaaatttccatgtgatgtactaatatccacaccacttcgattacgtttggctatcaagaggaagaagattgatctcagcagagttgagtatcttgtcctggatgaatcggataagctatttgagcctgaattattcaagcagattgattctgttatcaaggcatgctcaaatccctcaataatacgctcactgttcagtgctactttacctgattttgttgaagatcgagctcgagaacttatgcatgatgctgttcgtgtaattgttggcagaaagaatatggcttctgaaacaataaagcaaaaattggtttttactggaagtgaagaaggaaaacttctagcaattcgtcaaagctttgccgagagtctaaatcctccggtattggttttcctccaaagcaaggagcgtgccaaggagctgtgcagtgaacttgcatttgacagcattagagttgatgttatccattctgatttgtctcaagcagagcgagaaaatgctgttgataacttcagagctggaaaacatgggttttgattgctactgatgtagttgcccggggcatggatttcaaaggtgtgaactgtgtgatcaattatgatttccctgattctgctgctgcatatgtccacagaattggtcgttctggcagagcagggaggactggagaagcgattactttttacacggaagatgacattccattccttcggaatgttgctaatcttatggcagcatcaggctgtgaggttccttcctatctcatgaagttgcgcaaaaagaagtggaagaagcaccgacccaaaagagattcaatctccacaaaaccagacctatagccctgtaatagcatagaatgacaacatgcttttaaccttgaaatttccagtggtgtttagtatttcttaaataggccgggcagcctagtgtcatgattgcccattcccaaaaatgcaacacgatggaaagggaagggtgaggctaggcaattgcgaccaagagagaatcacgttttatagctaatgcaaggcagtgttgcctaaatttaaaccatgattgtcgtcatatactcctcagccctcactgtaagccccctaaagtgtaatctcatgtgaaatgggaatttttgtgcctctagaaactagaatgtttatttgaacaacatttagaaatttttgtgcccccattattattttcttttattgcagggggtgatacggatcactttattttgcttatcaactgctgtaagaatttttattatattttgtaagttagtttttgcccaaaacggttaatttgatatgctt

SEQ ID NO: 103403 - DNA, 695 bp, Glycine max
  unsure (1)..(695): unsure at all n locations
  Clone ID: PAT_MRT3847_64391C.1
gagacactaactcctctgtgaaatctaaagcgtaatattattaaaacaatggccacactccaagcttcccttctctccaaaccttccctcccattcccgttcctgtctccgaaccactccccattctccctctccttcccccccacgcgccgcgtcccttccacgctcctatgttgcaccttccgccccgaacccaacccctctgaactggaacccgaacccggttcagccaacaccgaagaagaaccgggtataaattcacccgaagaagaaaaagaaggtgcagcttcggtttcagatttgggtttggaagaagaaggcgccgaggctctcgatagtggcgctgattcggagaagattgcgaatggaaggcggctctcgatagtggcgttctttgtggggctgtgggtgaaggcgagggagagtctgaagagggccttttcggagcttcttgattggtggccgttctggcgccaggagaagcgcctcgagcggttggtcgccgacgccgacgcgaatccgcaggatgctgccaagcagagtgctctgctcgttgaactcaataagcagagtcctgaatctgtcatcaagtggtttgaacanagggatcgagctgtggacagtagaagggttgcggaatatcttcgagctcttgtggtcactaatgctattagtgaatatcttcctgatgagga

SEQ ID NO: 103404 - DNA, 253 bp, Glycine max
  Clone ID: PAT_MRT3847_64392C.1
agagagcgcgtcttaataaacgctcttctctgaaaacccccatttcttttcttctttcttcttctctttcgcttcttcgatcttcgatcttcgtcgctgaaaatgagagagtgcatttcaatccacatcggatacgatataaagaaagttggacacgcctgctgggatctttactgccttcgttacggcatgcagcctgatgggcagctgccaagtgatcaggtcgcttgtggatgtgatggtgctttcaaca

SEQ ID NO: 103405 - DNA, 255 bp, Glycine max
  Clone ID: PAT_MRT3847_64393C.1
tacatacaaccccacacccacttcgtcacaatgccaaccagacccttctacaccgacgacctgtcccccccgctgcgcaccgcccaagtgctcggcctcacggctgccgctgctctagctggcaagaccttcggcgccagttacggcaccatccccgccttcctccaagccccagcgcccttgctggcccgccaatggtagacgctgtccgactcggacacactgctcgctccagtcatcagtctcctatccagt

SEQ ID NO: 103406 - DNA, 1380 bp, Glycine max
  Clone ID: PAT_MRT3847_64394C.1
ccacgcgtccgcatcccctctccctcttgtggcaatcttccaaaagatcaattccaatggaagtttcatgcaagattctcagaagatcaactcacacttttctccaaaactatcatcacttcacctcaacagcagcttttctagcttttcctttctcggcttcaatactcctctctcaagcattagtcccttcaccttcatccctcttgccccaaatctatagccgcctaaggactctctttgatgctgcaggcttcccttcttcacacttgtttaccattctcaacctcaaggtctctcaaacaatcacttcttcaatcctcgcccttcctttcaccctcacttttcttctcattgcaaaagcatccataatccaggctctcaatcaccacaagccaacttttccaccttccttcaaatcaatactatccctttacaagcctctcctccacacctatttttgcaactgtttcttgattctctcagcaaatgcaactgcttttggtctcatgtttttggccttcagcttcattgaaagacttggctactcttcccctactggcctcaccctcttcatatcagtaactggggcaattctcttttctgtgattcttgccaatgctcgcgtcctatgcagcatggcactggctctatctggcatggagggacatggtggatacttggcaattctgaaagcttgtcttctcttaaggggaaggacatcaatggctttgttcctggcacttcctgtcaacgtggccttggctgccattgaggccttgttccaatttcgggtcgtaaggccctatcatattgctggaatagcaaggccttgtgtggctttggaggggattttcattgcttacctctactcaatcttcatcatccttgacacaattgtgagctgcatcttctacaaaagccttaagacaggatcatggatcagtcaagaggacaaacattcgttaaggattgaattcccagaggaaggcaagtacggttacatgggcaccaaggatctaccttaagtaacataaggcggcaaatcattaatttggtcaaggcttttctcatatttcataaaggagaaggagcttccagttattttatatgaatatagaagaaatttacaaaattcattcatgttgcttgaaggaaatcgagcaactttgaagacataaaagattttcaattgagcaacctcagctcagctatgtgcaaagccaaagaagctagagatagtacaccatttaatataaatgcaattctgctatattcttggactccatcttttgtttttgtctattttactttgtagattggcaaatggcaatattttacagtgtggataatacaaatgcttccctttaattgcctttt

SEQ ID NO: 103407 - DNA, 1224 bp, Glycine max
  Clone ID: PAT_MRT3847_64395C.1
atggaatcaccgtcaccaccttccccgttccgagaccttcttctccgtttatcgaccggaatcgcggagtctctggccaccgttccctacactccacaccaatcctccaacgtctccgtcaaagcctttctcgaacccctcctcgttcccaccgccaccgtcagagacttcgctctcgcgtgcgctctcatttcctcttccaccgccgtcgactcctccggcattctctcatggatccccagcaacctctcctctctcgcaacctcgtccttctccgacctctcccgcgcttacctcggaaatcgcgacctcgctgttccgccggagaagaggctcgtgctggaattgatgccagaggttttgccttttctgaaagagaggattaaggagagctcgattgatgtgtcggatgagaccgacgagttctccgcggcgacggcgagagtccccgttgggttcgccattctcgctgcttttcagtttagatggtttgttacgcaagttgattatcctcatttgggcaagttgtgtggattggtgattccttgtgcactgactgctgttgatcattggtctccggtagttaagggacagggcatgattagccttatgcatgttggaaaaaatgtggatgctgctcagcttggtgggtatgtggatgtgattctggatgcctgctgccagaacacggcttctgatgatgagatatggcaccatgttgttgaggcatctgtagtgcttgtgactcttactcagagaagtaatccacgtagtccatggtttgaaagaatgctaaatgagatgttaagtcacttggagcgccagcctagaaacaaagagcgccgcatcgcatggcttaaatctgctgattcactatttaatggagttggtatcatgcttttagctcacttcaggcgcattttcccattattttttcagtggatgcatgctgacgacaatgagactattattttggtgaataaacttgctcttgtgtataaggaggctgcattaagaacagctcgggaagagattagagcaaatatatgtcagatactgatcctacttcaagaaagcaaaggactgtattttaatgcagcctgggacaagcatcgatccgatccagacttgaccactcttgatttttcattaagtggaagaagtaatactaatactgtgccttcagaggattgtcctcagcagggtttagtacccgttcaatga

SEQ ID NO: 103408 - DNA, 615 bp, Glycine max
  unsure (1)..(615): unsure at all n locations
  Clone ID: PAT_MRT3847_64396C.1
ctagttctagatcgcgagcgccgccctttttttttttttttctcgacaaccaatccttctattgcagggaagcagagaaatccttggtgggaaggaaagtaagtcttgcacaagcgatgctaaacttaaacaagattataagcttaatcataaatccaaaacctcaacacaattgggattgctgcaagtatccgtatgcatgccccaagagacacttggatctatataaaacagggatcctacatgattgttgagtgagtggatgtctaccaacaaaaatcctgacagcttataaaaagaatgtaaattgaactcttacgctagctgttcaagagtttgcattatttgtcatcatttttgctgacattctagctagtactttgtttctgacctaaatcagaacttggcaaactgaatctatgagctagttcatccatcatcaagtttactgcttcaattccctcttgccctttgtttgtaactttgaaattgtgaacaatatttttcaagtccacaagactgcttccaggtattatctcnnnccttctttccttcaccagtttttgcacttcagaaacattctcccattgagcagacacggcatatatgatcagc

SEQ ID NO: 103409 - DNA, 452 bp, Glycine max
  Clone ID: PAT_MRT3847_64397C.1
gggcaagtttatataatgttttctttgttgcatggaatattcatgactggatgcttcagaagggtttaggtgggtcaatgtttccagtggcttgaccccgtacgtttggtttgaccattgatatgatttggaagagtaggaatcacactgttttcagaaaccaaacatggagcatagaggagagcattgcaagaattcagcgcatggagctttttgcttgtaacttgggtcgtagttcagttcttcaagctggattatgggccatttttcatggcattcaactagccagggagcgtgttctcttcaaactggagtttcaatcagactctagagaagcaatagatttggtgaacgaaggctgggatgattctaatgaagcctttccaatggttaaggctatcaaggaggctattctaccgtatctgcaggtgatctttaagcacattctaaga

SEQ ID NO: 103410 - DNA, 1603 bp, Glycine max
  Clone ID: PAT_MRT3847_64398C.1
ctcgagccgcgtcaagcctattacggtgtcgtttttaagaaaaccggcagtattgccgttagcgacgcagccaaaaccctaatcagtgccaaacgatggaatcaccgtcaccaccttccccgttccgagaccttcttctccgtttatcgaccggaatcgcggagtctctggccaccgttccctacactccacaccaatcctccaacgtctccgtcaaagcctttctcgaacccctcctcgttcccaccgccaccgtcagagacttcgctctcgcgtgcgctctcatttcctcttccaccgccgtcgactcctccggcattctctcatggatccccagcaacctctcctctctcgcaacctcgtccttctccgacctctcccgcgcttacctcggaaatcgcgacctcgctgttccgccggagaagaggctcgtgctggaattgatgccagaggttttgccttttctgaaagagaggattaaggagagctcgattgatgtgtcggatgagaccgacgagttctccgcggcgacggcgagagtccccgttgggttcgccattctcgctgcttttcagtttagatggtttgttacgcaagttgattatcctcatttgggcaagttgtgtggattggtgattccttgtgcactgactgctgttgatcattggtctccggtagttaaggaatcattccaactgtatgtatggaaggaactggagtctcgaaatagtgttataattcagtcggtgggacagggcatgattagccttatgcatgttggaaaaaatgtggatgctgctcagcttggtgggtatgtggatgtgattctggatgcctgctgccagaacacggcttctgatgatgagatatggcaccatgttgttgaggcatctgtagtgcttgtgactcttactcagagaagtaatccacgtagtccatggtttgaaagaatgctaaatgagatgttaagtcacttggagcgccagcctagaaacaaagagcgccgcatcgcatggcttaaatctgctgattcactatttaatggagttggtatcatgcttttagctcacttcaggcgcattttcccattattttttcagtggatgcatgctgacgacaatgagactattattttggttctaaaatgtacatatgtaattttgagactgacgtggataaggaactcaccatttgttgcaaaattggtagataaacttgctcttgtgtataaggaggctgcattaagaacagctcgggaagagattagagcaaatatatgtcagatactgatcctacttcaagaaagcaaaggactgtattttaatgcagcctgggacaagcatcgatccgatccagacttgaccactcttgatttttcattaagtggaagaagtaatactaatactgtgccttcagaggattgtcctcagcagggtttagtacccgttcaatgataagttaattgcatttctgattatttcaatgtaccacaattttgagttgatataggttaatgtaattaaaaagtagaattgttggaacgagaataacaatatgcaaagtttgaatttgttttgtattcaaaaaaaaaaaaaaaaactcg

SEQ ID NO: 103411 - DNA, 263 bp, Glycine max
  Clone ID: PAT_MRT3847_64399C.1
gatattaatggcagggggactcaacagagttctaatgggcacatttggtgttagcggttcatccttgacagacaatgttaaaccatcattgactattcaatcttcacaaccagtgcttccaatctcctctaatgcttatgaaacccatccattgttttatgatgacccggtcattcgccatggggaggctagtcaatatccactacagcatggtcttggtccttctaacaactctgctcacaatatccaagagattccagttt

SEQ ID NO: 103412 - DNA, 483 bp, Glycine max
  Clone ID: PAT_MRT3847_6439C.1
acggctgcgagaagacgacagaagggatgtcagtgtttagtacatatgatacatcactaacctacatgtacaagctccttcttcgcccgttactgagggaacaaggttcctttgttcattcctgcctgtcaccattatgtttaatttgttggggaggtgtggggtacttattaatatgttaaaattactaagatatatataacctcatctttggttcgattttaacttagaaaatacctgcatcctaatagaagaagccatataaagttacagcctcttaattagcccacccatcaatctaagaatttgttaattatgctctaaacaaggataggatcgattgttaggtgcatcgtacgtagatgtaaaccaatgtacactacaatcaattttgctattgaatcccttggtagttatatttaaacattccaattatacaaataccgcattaaccctcatcatttttctgcctctttttctttg

SEQ ID NO: 103413 - DNA, 4397 bp, Glycine max
  Clone ID: PAT_MRT3847_643C.1
ggcgcgtccggttcttgatacagcaaattaaaacggccaacagctatggatgaattaatttctttgatgagtttcctttgtattatctttttcatctggacttgatcacgaaacataaggattgaattgtgaacctttgttttctgcagtgtaatgtttggaattgttttgtgtaaggtcttgcgttgcattgagccccgtgcatgatttggcgatgcctctctgggtttttgaattcttatattttcttttcgtttttatcttttgatgtttattatgagcatttaggattttagattttattctccatgacttccccttgggtcttactgggcagataagcaaatggatttgttcagcaggctgtggaaggcagtggctggaaattattgagggacttcctgtacagtcttaggttttattaccctcacattcgttattttcttatgtgtttgctctgcgtttgatggtgtacggtaacctggtagtgtcagagttattgtgtgtgattctaacaggcactataagagtattgggaggcactggagtttttgtggacaatttgtttgcttcatttgggtttttggagaactctgcgacgatgttcagcaggctgtggaaggcagtggccggagattactgatggacttcctgtgaagccttaggttttattaccctcacattaattattttcttatgtgtttgttctgcatttattggtgtacggtcacctggtagtgtctgttattgtgtgagatcctaacaggaactataagtattgggaggcactggagtttttgcggacaatttgtttgtttcatttgggtttggagaactctgatttcacaattttttttttaccaatttttaatatgaaagatatttctaggtgtttaactgtttgtgttcattcttatgcagcatgccaagtcctgatatgagatttctgttgccgattgttgaagaataaatcataaaattagaacagataacagctctggatgaattaatgtcattgatgagtttcttctttctgtattatttatttctctggatttgatcacgaaacattgaattgaattgtgagcctgttttctctgcagcatagtgttttgaataattttgtgtagtgcccttcatctcatcgagcctcatgcgtaatttggtgatgtttctcactgtttttgaattcttggattttctttttgtttctatcattctttgtttatagttatgagccattagtttttcaattttattctccttcatttccaattggggccttacagggaagattgacaatggatgttggtaggatgtggaagcagtggagattattgacgtactcactgtgaagccttaggttttattatccttacgttatctttgttttcttaattgttgtttctaacaggaaccataaagagagagtaatagggagccaagagaatttgtatattactttgtttcttctacaggaggaatatgggtagcgttaatttcttcatagatgaacaccaagtttcctggaactgacctacccaattatatcagcaagaattgaggaacatttgatatatcatctcacatgagtttgttttcttgtttcttagatgagggttgctggtttgtcttgtgtttccatgcgttgagtctgaaaatgatttttatgtcctttggttttaccagatgatatctgcaagagatccaggatttctttcatgagcttgatctatctagtttcttagttgatgactatttatctaggtaacctgtgttctgtagtttggaaaaatgattttccccccaggtgtagccaaattgaagacgggatctttgagaatggcatttgattttaccatgtgctgaagtatgttcacaagattttggtgtgtcaagttgccatccgttctgcaagcagcagcaaattagaatggctagcaagtctagatgaatttggtttttcttcaatgggatattcattattgttagtttctgaatttgatcatgaggcatatggattgagttttaaaactgttgcaatgtagagtagaagttttgtgttgcgttctgctaagcgttgagcctcagcatgatttggtgatgtctactctggattccaacctctcagatatgtcttcattttgcttttagtgtatgcgcttttcttgatttcttctccatgatttctgctttgggtctcacagggaagtcaagtagcggaaatcaggaagtgtggttggttgtgaaagcgcagtggctatcttatttaaatgatttggtgatctctaccctgaatttagaattcttggattgttcttttgcttctacttttcgatggtctagtatgagagcatttcttaaattacttctccgttgtttcgtcttgggtctcgtgatgtgggatggctgttgaaggcttgaagcagtggctatcttattgctagttataccactcgatttaatcatctactttcatttattcgtatgctagattccagatgagttttatttcctgatgttgctgattgaagattgaatcaataaattattatgcctttcttttgaaaccgtggattagaatctggctacagataaacttaatgtcttagatgtttcattttctggatttgatcacagggaatatggattgaattgtgtgcctgtttgttctgcagcggtgggagagtactatttaggttctggtttttattacccttgattatctcatgttcattatggactggctttccttattgtgggttttggatttattgtttttgacagtgtagggttctgtcagagttagacttgacttgatgtttctttttgggaaatgtacgaggataactggttctttataggattggccccgtatgatttggtggatgttggatttataagtgtttagttacttatttacttctcaattgattctctgtgtcatgaattgtggctataagacgttgttatttgacttctcaatggactactatattggagagagaatattagacagtctttgtcaggtcaatttttgttatctgcaactttggtggtctgaagaactatgctgctcttttataatgatctttaaatatatcctcttaaaattggatatcatttgtcagttcagaacagtacattgaggacagtgaaaagtagaagcagattttaggattcttgatcctaggtgtttgctccagacctcattagtcaaaggcatgtaaaagtttgaattgacattaatggtgatatttcctaggaatataatttttatttgaaggatcaaattagtttaatacttgtactgaaatatatagatattattttgtttatcatgatagctgtctttttactagaattgcagcgtgttttgaaatttttggtataccttcgattatttcctaaaaaatccttaaaaatgttcgatagtgaaatatttacgacctctgactagaatgctgataatgttaaaatgaccatgctgaattgttgatactttgattctaatcatgttgataagttattggtttttaattattattgtagaaattatatttttgggcgacttctatgataatgtaattggtaatagtttgtggtttttttagtaatttttgggtaatgtattaaattttaagttattcttattgttcttttgaacaattcttgtaagtaattttgtactgttttgaaatttaaaaatattacttctacttgaatgtgaagatgaattttaactctgtattataattttggtaaatttttagatgaaaataattttaataaacctaaaaacctgttagactctttattaaaacttccatttgctaatgatttgaggaataatgtgttgtcacaatttgtattgcaagagttaatttgtaaattgaattattaaattatgagtttagctgtgcacaagtacaaagatcaggtcagccaatttaggtgtgaaatgtatacaggtactttagctaagcttagagaaatggagcaattttacgctggaagatcattcatcaggttacaaagtcgaatccagaaggaacaacaaatcagcagcagctataatcacatgcctttttgcttttgctttacttgttacttgttatttcgttcattatttttctttacttggttatgtttttctaaattgtaagtagttgtactcaattttgatcatagtgaaatttgtttgttactatgcccgtggatgtaggtctatatgaccgaaccacgtaaattctcgtctctattttttttttctttcttattgggttgctttcttattgggattacaaaaatctttatcaagtaaataaataaaaaaattcgcttattgaattggaattatgaatataaaaaataacgaaaattgttgatttctctct

SEQ ID NO: 103414 - DNA, 569 bp, Glycine max
  Clone ID: PAT_MRT3847_64400C.1
atctggaagaatccgagcagcatccgaagctgacacgtcatccttctccaagtcgaagaccgccgtcgatcgccaacctccgcccaatgctgccgctgacaaggcggcgcagatcccaaaagccgccgaacaagacgtacttcacaccgatgatcgtcctagagttaatacggacaacatcctggaagaaagagatcccaaatttgatgctatgcttggtcaaatggttggtagaattacatcaaagcctgggggaaaacctgagatgggtgaggcctttgtggttgagaagtttaataggcccatgcccaaattgcgaaacacaaaaccagattttggccgtaatgaggagaggccagttcctgctggcactttgaatgtagcacagttgcgtcatatcatccttttgcatgaaggcaaggctgatgattacaatgggccgtatggatgcccaccagattgctgaaaaatttcgggtcaatgttgttcagattcagacaatcttgcaattcttatcgctacctccagaaaatagcagtaaagacaagaacaaagcaccaagatgaata

SEQ ID NO: 103415 - DNA, 374 bp, Glycine max
  Clone ID: PAT_MRT3847_64401C.1
gagaaaacagcaggaatatacagaggaaggcgggttttaaagtgaggaccggccaaaatgtacgattattgggcacaaaatcaaaaacatggcttataggcagctttttcagtacacgaggacctcaacactaatgactaccaggtgatgtagccctgattgacacaactgatttccatgatgttaagtttctgaaacgacaatttatgagctggaggggggtcacacaaccaatagcctgttattactgcccgtgcagactgttcattaactttggcacgacatacaatacttaaattttgccaagctttacttgccaaaggtggagggggccttttgtgggaaccttgtagaaacgtggattttttcctggc

SEQ ID NO: 103416 - DNA, 294 bp, Glycine max
  unsure (1)..(294): unsure at all n locations
  Clone ID: PAT_MRT3847_64402C.1
tgttnttgttntatntgtgangagggatatggnntngagaggagtggtattgttggttatgtgtgtgnttnnggnnatggttgtggttattngnnnagnaaagaagggtgggggggtgaagggtngngtntantgtgannnttgnngtgntggttttgagaaattagnaannanntanattgggggtgntgagattatgttgnaatggaagagnagggttagnaangaggttgtgtanannaagaaggggtanantgantnaantggaggatananaatgtangtggaggagga

SEQ ID NO: 103417 - DNA, 275 bp, Glycine max
  Clone ID: PAT_MRT3847_64403C.1
gatgagccaacgatgacacgaaggtgaaccagttcaggaggtctacatatgtgctacatgggctagttgataggctgctggatttgtaacagatgctataggaatacatgccatgtttgatgctattgcagaccgaattaaggacccaagtgatggacacgcatgccaatgcttttgtggtgaaagtagatgatctagggcctggactatttgtaacacttgatttagggacaagtggatcgaagactaatgtaaccaccatcaagcaagcacag

SEQ ID NO: 103418 - DNA, 418 bp, Glycine max
  Clone ID: PAT_MRT3847_64404C.1
cattgcgatatcatttgtgtcactggatggactgccaccccaatgcatgatgtgcatgctacaattgattggtttgtttcctacttatgaatggggtcccaggacctattgagttgtgaattcacaaaatccttttgggttaaataggtggttgggtaaactgactttccctcagtgcactatccgaagtgttaaaagaatgcctttttctatagggggaggagctggtgcaaagaatgctattctcatgaatatgccaaatgctttttttttaatgtggagatattttggtggagatctcgactttgaagcttctaagaagacttttccctacattaaatgtacaggctgtttattgatagcatttggaaatttggctgatgacaccatcaattttgaggccttttcccacaagctg

SEQ ID NO: 103419 - DNA, 192 bp, Glycine max
  unsure (1)..(192): unsure at all n locations
  Clone ID: PAT_MRT3847_64405C.1
actggaggtacagcgagtccgcacggcacccggcggccatgccgncgncggccgtcggccctgtgaagcgcccgcgggccgattattccgatatgcctgttggtccggaaatgcatggctactattgagatgatggaagaggatctggacaacatgcaattagggacactgattctatcaatgcgtcttatg

SEQ ID NO: 103420 - DNA, 404 bp, Glycine max
  Clone ID: PAT_MRT3847_64406C.1
atattattattgcttgacatagattgttacgattgaggtcagctgaagcaccaagcatttttgccagggcatgtaaaatagtgcataataagactgaacactccgctcttggaatcacactgaagagaacaaaacgcgaacacttccgaaaactgattttgctggtgctttcacaaggactgtcacttgtgactccttgggagacattgtgcctcgtgaggacttgaaagactgaaaacattgcactcaatccaagatgatccattcctgtagcacagccagccgatggccttcaatactggtacctgacgcatcaacatacgaccctagctggagcctctgtgcatgtaatgggtaaacccgtgatggacccaaacatgtttgctcagcaggctgaccctttc

SEQ ID NO: 103421 - DNA, 1740 bp, Glycine max
  Clone ID: PAT_MRT3847_64407C.1
acgcctgccaaagtgccttttcttaggatgaagcgcttttgtaattagcacggggacctaaaattccgaagttctttttcttataatggggctcttgtggaaaactcacacgaggatacacgtgattagaacattttttgcaatccttttggttgcactgctgagttcagagagagtagagagcagaaaagccaaagttgtgaccacttccttggagtacaatgctataaactgcagagctcacagtgctgcattgacagattttggtggtgttggggatggaaaaacatccaacacaaaggcatttcagtctgcaataagtcacctgagtcagtatgcttctgaaggtggctctcagctctatgttcctgcaggaaaatggctcactggtagcttcagcctcactagtcacttcaccctctatcttgacaaagatgctgttctccttgcttctcaggatataactgagtggcctgtgcttgaacccctcccatcatacggtagaggaagagacgcaccagcaggaagattcacaagcctcatatttggaacaaacctcactgatgttattgtcacaggtgaaaatggcaccatagatggtcagggtgagttttggtggcagcaatttcacaggaaaaagttgaagtacactcgcccatacctgattgaattaatgttctcagacaacattcaaatctcaaatctaactctcctcaattccccatcatggaatgttcatccagtttacagcagcaatattattgtgcaaggcatcaccatttatgctcctgtcacatctccaaacactgatggcatcaacccagattcttgcacaaatgtaagaattgaagattgctatatagtttctggggatgactgtgtggcggttaagagtggatgggatgagtatggcataaaatttgggtggcccaccaaacagctagtgataagaaggctaacatgcatctcaccatacagtgcaaccattgccttgggaagtgagatgtcaggtggaatccaagatgtgagagctgaggacatcacagcaatccaaacagaatcaggtgtcagaatcaagacagcagtagggagaggagggtatgtgaaggacatatatgtgaagagaatgaccttgcatactatgaaatgggcatttaagatgactggtgattataactcacatgctgatggccactatgaccctaatgccttgcctgagatcaaaaacatcaactatagagatgttgtggctgaaaatgtgaccatagctgctaggtttcaaggaatctccaatgatccctttacaggaatctgcattgcaaatgtgacactaaggatggcagccaaggccaagaagcagccttggacctgcactgatattgaagggatgacgagtggggtgacccctccaccttgtggtctgttacctgatcaagggccggagaagatcacagcatgtgatttcccagcagataatctacctattgacatagtggagcttaagaaatgtactaccaccatgacatatgttgaagtgtagtagtttatgtaagttattgttttaggaatagtccttctcagattatcaaaaaaacatttctcaagttaagaaatgaatggtgtttcaaattatagaaatggaacggttgtcttttcttctctcgtttatggaacttggtggcttgatgctgctacaagtttcatagctaatattaatcaaaatttactggttaaaaaaaa

SEQ ID NO: 103422 - DNA, 633 bp, Glycine max
  unsure (1)..(633): unsure at all n locations
  Clone ID: PAT_MRT3847_64408C.1
ccacgcgtccgggccgcccttttttttatgctgctagaacggcccccattcaagagcgaagacaaaacggattacgagcagaacggagaaaaactgtatttctcattgcgatgaaatggagacattcctacttcataataacttctttttttaaacataatattgtgaaatatttattgacgattttttgtcagatactacttttaatttttttaggcattatatactatttttaatgaactttttttttttctagtcaattttttttttctttcaaaagattaactttacttaatgaaactgaattcaattttattcaaatcaaagacttactgtctacttaatactatcttttaaaagcaagtgttgataattggattggattaattaatattagttcaacaatgttttcattaaaagtattattactttactttcatgatgagcttcaatacatcgatcattgatgtaattttaataaaaatgataattttttaacgttttaattgcactattagaatattagagcttgttggagtaaatttatcccaaaggacttttannnaaaaaaaanaaaaaaaaaaaanaaaaaaaaaaaaaaaaaaaananaaaaaaaaaaaaagggggcggcc

SEQ ID NO: 103423 - DNA, 262 bp, Glycine max
  Clone ID: PAT_MRT3847_64409C.1
gttgggagctctccaaagaaactggttggttttaagaaaatagtttcaagaagttcaactatattcttttagatattatgtattgttttactctgattaggttactgtgataggcatttattcatattctttctataccactgtcattaatatattaaaaagatgtatgtgttagactatcgaaagggccttattctctctttctcatagactgaccttcttttggaatttctgagtcatttattttccttagctttttcca

SEQ ID NO: 103424 - DNA, 349 bp, Glycine max
  Clone ID: PAT_MRT3847_6440C.1
ggaattcggcacgaggcttcatatataaatcttaaaatcaggtcaagtagggaagaaaatttaggaattacattcctttgaaatttcatgtcattctcactttttagtctcaaatataggtttttaaaattttcgccctcttttttttttatcattatgtcttgggggtaatggtttgtgtcaccttttgtcaataattaatatttatcaaaaaaattcaattgatcaccatgatgataagactctcttaatcatattttttttatttataaaactcaagttctaacattttgtttaagcttgagagatcaatgatctacaatcataataatatattactcctactatt

SEQ ID NO: 103425 - DNA, 369 bp, Glycine max
  Clone ID: PAT_MRT3847_64410C.1
agccactcctgtccttcagccacgtcacgcgcccccccagctacggctttgtccgcatgacatcgttcacgcgaaaccgctcttgccccttgcacactaagaagaacctgtcgcgcagatataagaaataaaaaagaaaagaagaagaagaactttggtaccctcttctgcggcctctttctctctctctctcgggttagtttttcctcactcttttccgttattttctttgctccttacggatcacgtcttttcttttttctcacgcctttcaattcaatttatccatcacacaaaatctacaatttttttttatttttatcttttttactagggctggtatgaagaaaaaaagccctttttcaagtg

SEQ ID NO: 103426 - DNA, 569 bp, Glycine max
  Clone ID: PAT_MRT3847_64411C.1
ggctaattcgcaaacatcataaacataaatagtactaaatccttgtgttgtgttctaagtcctcaatccaacttttcagctatctatcttgaaagaagaagaaatgggatccaacggaacatcttgggctgaccagtgggataacgggcctgacccagtgactgtctccaatgaatcaaagaaaaagaacaacaaggccttcggcaagaccaaggcagttgcttccaccggcgtgaagaagttgaaggagggtacctctgttggcctccattggatcaagaccaagtatcacaacaccacccagaagcattaaactacttcttacttatcttaatttgattccttctgtacatatttataataatctttgtcttcatatgtttttctttttttctttctgttgattatctatgtttgtagtattttttttctattcatttattgttgaggtgttaggtttactttgtactattgatggatatagtctttcttatgttttatgttttgatggattaggattgttgtatagtttttttatatagagaataatatggatcttttattctttt

SEQ ID NO: 103427 - DNA, 661 bp, Glycine max
  unsure (1)..(661): unsure at all n locations
  Clone ID: PAT_MRT3847_64412C.1
tttctctttctgctttgctagttcatgtcatggcgtttctgaaccctttctctctccacattcccatgtccttgttgctcttcctcctcttctttttttgcttctgcaaagccagtactactactaccacctctactacaacaaagtcactgtccccttcttcttcaccctccaccactacttcctcctctgatgttcaacttctcttgggaaagatcaaagcttcactgcaaggtagtaactctgacaaccttgttttgtcttcatggaactcctccaccccactttgtcagtggagtggcctcaaatgggtcttctccaatggcactcctctctcatgcactgacttgtcctctcctcaatggaccaatctcactctcctcaaagacccttctcttcacttgctttccctccggctcccttctgcaaacctctctggttccctccctagagagcttggagggttccctatgctccaaagtctctaccttaacattaactcattggagggtaccatccctcttgagcttggttatagctcctctctctctgagatcgatttgggtgacaatatgctaggtggtgttctttcaccttctatttggaactngtgtgagaggcttgttcccttaggctccaccggtattctttatctgggtta

SEQ ID NO: 103428 - DNA, 226 bp, Glycine max
  Clone ID: PAT_MRT3847_64413C.1
caagtgggggagaacaatagagggataaaccgattaccgagccaggattctcgttgattaatcaggacatgaacaaatgtatcactccgaaattccgatttgtggttcgctttagcaacaaggacattgatgtacaattaatatctgctaacattgcccgccatttagatcttgctactgcatattcacatgagctgtcacgatattgtcttgaagtaagactttc

SEQ ID NO: 103429 - DNA, 170 bp, Glycine max
  Clone ID: PAT_MRT3847_64414C.1
gggtttcttgtttattttctttttttttttttgtgtttttttttgtacggaaaataggggacctccagattctcattcttggcccgttggccttttatttataacgcgcaccatcaaaacgttggtggctttaaatgaaaaatttaaactttttttgggataaaaggtcc

SEQ ID NO: 103430 - DNA, 146 bp, Glycine max
  Clone ID: PAT_MRT3847_64415C.1
ccacgcgtccggtctcacacatggaggggcaaccggcaaccccctcgaccgccccgacgactccgccggaggaccttagctaccacgaatccgtggaatccttacacaggctctggtattaccgaatcttggaacgagcccttctc

SEQ ID NO: 103431 - DNA, 109 bp, Glycine max
  Clone ID: PAT_MRT3847_64416C.1
tctcgtcagaaccagtcgtcaaacacaggcgtcaaacagagtcgtcaaaacacagtcgtcaaaacacagcgtcagaaacgaggtcgtcaaaacacaggtcgtcaaacac

SEQ ID NO: 103432 - DNA, 145 bp, Glycine max
  unsure (1)..(145): unsure at all n locations
  Clone ID: PAT_MRT3847_64417C.1
acttantaacacttnccttagttcannatggggaagccctttcntcactctctcnctatcttccctagtgctgcnacngcnngtcgagtgacatgnttggctatgtaggtccagnaagttcaacgagnggcaactcannaaccnc

SEQ ID NO: 103433 - DNA, 494 bp, Glycine max
  Clone ID: PAT_MRT3847_64418C.1
aaaagggagggacaaccatgaaagaaaattacgggggaggggaatgcccataagttacagtattaatatttgtgcagcaacaagaattttgtaaaggtaaaggcccatccgctggtttcttacagttctatcctttcagcaacaaaatggagttgtggaacacaagaatgtatcaatttttaacacgccaaggagcatgtgctaaaaaaagcaagaattaatatacctaaagagttttaaaggttgaagcctccatttatactgcatgtgtacttttccaacttataccctagctacttgatgtgttcatgaaatccttaagaagtttggattgacaagaagctcagtgtttctcatttgtgagtcttggaagcatagcatatacatgctcatattcttaaagagacaaaatcatagttagataacaaaaagtgaaaatgtatgtctacattggctattacacaaattctaagagctataggtagttaatctta

SEQ ID NO: 103434 - DNA, 1094 bp, Glycine max
  unsure (1)..(1094): unsure at all n locations
  Clone ID: PAT_MRT3847_64419C.1
cagatatgaaccggtcaatgaacccactttggacaactgctttgtatcaacaagttatgatgctactactcactttgagtcgaccgtggatgacgttctcaacatgtatacattgataactggaaaggtaagtgttatgccttggttaccacttgtttccacttcttgaattaatttttgagccacagatagtgactcagattgttctacagtaatactgtattttataatatcatatcacatatttataagtctacatactgtaggaatcggttattcttagggccctaattcctatatgggaaaatagttgcttagctacaactaaatgctattagttgaaccatgttggccattagtttcacactggctttggattttgatatggcttttggttcttgtaaatcaattttctgcaaaaaaaaaatgttttttgtatttcagttaataaaatgagaacaaagtgacattttggtaattgaaagtgaaaataagaaatgaaaacagaacattttctcaaagtagaaacatccttagattcccttcttccccactcccaaaagctaaaaatggcttagatcaattttatttattcattttagaatgagttggatttcttatgggtggactagcaacctgtttgggcatgggaaatcttgattgacgattgatgatattctctgataactttcttcttggtaattgggtaatattgtactcataattttgaacaggttattgacctgagtgtggatcttagtgctgctagtgctgcagaagagtaaagaaaactcggtgatgtccttccttcatgatctgttgctgatgggatccgtaatggacttgataatgaatgttattaacgtttataataaattgatataaaatatttcttttttttaaaacaagatttgtgtggctggggaactttttcccgtccagaagctctgttgtgcgtaacatttttatatgtagacatacattgccttctgatgcagtggatttagtttggtaatgtagtgttcttttcatattgttaattgcacggcccttcaaccatttcatccccctggcnaaaaaaaaaaaaaaaaaaa

SEQ ID NO: 103435 - DNA, 360 bp, Glycine max
  Clone ID: PAT_MRT3847_6441C.1
attcccttctgttgcttagagtttcccatgaactcattttcattcactttcctagctttctcttccatagttttctcatatttttctcacaccttgatttttcttctatcaaactcagatccaagctatctttcttacaatttacccaagcttcactgcaaattttctctctcttgcccttctctaaaactcctgattctgatattgccacaaagtagtctgaggttatggttctcaagactctttggtggctttttcgctccaatttcagcaacgagaatttctgtttttcattgagacctggatgtgcggtttcttggagcttagtgcatagttccttaaaggattttggtttgagtt

SEQ ID NO: 103436 - DNA, 536 bp, Glycine max
  Clone ID: PAT_MRT3847_64420C.1
ggtcttgggacatgcctaaaagcagcaagctgctttcaaattttttattggtttagggaacagggaacaaacagcgaacaccacttattgctcattgcgcaatccaaaatccaaatacacatgatacacttagaacggcttagggcatctattaactcatgatgcatcttgctactttgaccgtccaaggcaccggacatattccctatgcccttagcacattagaaatgaaaaatcaaaatttactattgaagaaggcaaaatctgttttatgtgtttttcaaatttcagaggggaggtggaaagtgcataacagcccacaatctttcgttttctgagaactaagaactgtgcgaattgacacttgaaaccattaccaaatatttccgctttttgatactctaaaaacgtgtaaaggggtgctgcctattgactattgacttaaaccttatcggagattggaacttgaaccttgagccttgagcaaacaaaattctgaaattgttcactggttcctggccaccgaacagcaaact

SEQ ID NO: 103437 - DNA, 361 bp, Glycine max
  Clone ID: PAT_MRT3847_64421C.1
ggctcgagcgaccctagctcgaagcatcggcatttgaggaacgcgctcgagtcggcgcgccgcgcggtggagctcatgccgaattccgtcgagtacgcgcatttccgtgccacggtgatgttggaggccgcgagtgaagggaaggattatgaggaggtggtgcatgagtgtgagagggggcttgccattgagaaccctagcgatcctgctaaggagacattgcaggatgagagcgagcataaagcattatctcttgaggaacggattgggcacgtgcagaatgagttgaggcagcttattcagaagtcaaatatagcttcattgtcgtcttggatgaagaatttgagcaatggggaggaga

SEQ ID NO: 103438 - DNA, 175 bp, Glycine max
  unsure (1)..(175): unsure at all n locations
  Clone ID: PAT_MRT3847_64422C.1
gtttattattattatacttanattgtancattcctccttgagcctagtantcaatagtgaatggagtgatggtcaagtgngttgtgtgtcagtgtcncagggaccaatngtngagagtnagttttctgagttaagatataaganatntgctatctaatgcctngtggganatang

SEQ ID NO: 103439 - DNA, 230 bp, Glycine max
  Clone ID: PAT_MRT3847_64423C.1
gattgccgtaggttgcgagagtgagatagacttgaaatcgcacatggactcatgcctaatgctatggaggacgtgatcagtcacatcgctaggcgatgcaatctctgcatcactctctaccaccacacatcggttcggcactgatgctagcaccatcggtgcgcatgccttaggcgctgggaagccaccggcagcacacgcggatgcttcagcttcgctgttccctgcag

SEQ ID NO: 103440 - DNA, 340 bp, Glycine max
  Clone ID: PAT_MRT3847_64424C.1
atagaacttatagaaacaaaaggcgcgcgttaattcaggatgttggcactatattcccacgggtgacccacagaacttgttgaccccaaaagaaaaaattggccgaaatgcatcgtattaagtctttttaattactaaaggaggcagactttaacaactcttttttttttgacacaagcaatacttcttattaaacacattcaataaatcgccttcctacagctaaaacgctagaactatgctgtactttcttctttctcttccccctattgatatgctgaagcttattcaactaacaaatgcaattctttcaaggcttgtatgtatgtcaataatcggg

SEQ ID NO: 103441 - DNA, 1277 bp, Glycine max
  Clone ID: PAT_MRT3847_64425C.1
ggctcgagattagagagagaaagagtgggagaaagccttagagagaatttttttcaaaaaagaaaaatattccttcttaattctacgtacgtgaggtgttagaagacacaacaatgaatttggcaaagggtgttggcggaaacattgacaaatcccaagttctgtccgctgttgaaaagtacgagaagtatcatgcttcttatggaggtcaggaggaggagaggaaagctaattatgttgatatggttaataaattctatgatcttgctactagcttttatgagtatggctgggggcaatctttccattttgcacctagatggaaaggggaatctgttcgagaaggcattaaaagacacgagcacttcattgctttacaactttgcctaaagcctggacaaaaggttttggatgttggatgtggaattgggggaccacttagagaaatatcccgattcagctcaacatcaataacaggattgaacaataatgagtatcagataacaagagcaaaggctgactttatgaagatgcctttcccggacaataattttgatgcagtatatgcaattgaagccacctgtcatgcaccagatgtttatgcatgctacaaagagatctttagagtgttaaagcctggccaactttttgcggcatatgaatggtgcatgactgaagctttcgatcccaacaatgaagaacaccaaaagataaaggaagaaattgaggttggtgatggacttcctgacattagattgaccacaaagtgtgttgaagctctaaagcaagcaggttttgaggtaatctgggagaaagatcttgcagttaattctccagttccttggtactttcatttggatgcaagtcacttctcacttagtacctttcctctaacatctattggacgatttttcacaagaagtctgataagggctttagaatttgttcgactagctccaaggggaagtctaaaagttcaagaaatcttacaaagggcagcagatggactacttgaaggtggaaagaaagagattttcacaccaatgtacttctttttggctcgaaagcctaattttggtggtcaataaggtggtgctgcaaatgagttattgcaattcaaggagaaaagttgtaaaatttattgccttcaattagcctttccaatgtgacttcagttgttttgagtttctttttttacatctataattttatattaccaaggctttattgtactttttattcttcatagttattttacccctcttatttgttggtaa

SEQ ID NO: 103442 - DNA, 527 bp, Glycine max
  Clone ID: PAT_MRT3847_64426C.1
ggaaacaaactgggtaaaaaacccatatataagggactagataaaaaaacccatatttcccaaaaaatcgacaccctaaaaaaagaaacattttctggtttaaaactaggggaaaaagcaggggcttaaatttaaaacttaattcccacccaaataaaagcacttaatcttccaggatggccaaataaattaaggagcccaggggggccttaaaaaacctgggaaaaaaaatttttctttttttattttggaaagaagaaaaaaaaaaaaaaggggctaaaagctttcacagcctatttaatcctcaaaaagcaacgggttacagttagccgggggaagaaaaaactcctaaaaaacataatcaaaagccaatttccgagcatggggggggagcctataagccacacaattcgccttgggggaaaaaaaaacaaacctcacttcccagaaaaaacgacgccgtttggtccttataagttccacgacaccataggcagggggatggggcttaaccccattttccacca

SEQ ID NO: 103443 - DNA, 722 bp, Glycine max
  unsure (1)..(722): unsure at all n locations
  Clone ID: PAT_MRT3847_64427C.1
gagtgggagaaagccttagagagaatttttttcaaaaagaaaaatattccttcttaattctacgtacgtgaggtgttagaagacacaacaatgaatttggcaaagggtgttggcggaaacattgacaaatcccaagttctgtccgctgttgaaaagtacgagaagtatcatgcttcttatggaggtcaggaggaggagaggaaagctaattatgttgatatggttaataaattctatgatcttgctactagcttttatgagtatggctgggggcaatctttccattttgcacctagatggaaaggggaatctgttcgagaaggcattaaaagacacgagcacttcattgctttacaactttgcctaaagcctggacaaaaggttttggatgttggatgtggaattgggggaccacttagagaaatatcccgattcagctcaacatcaataacaggattgaacaataatgagtatcagataacaagagcaaaggaacttaaccgtaatactggagtggacaagacttgcaattttgtcaaggctgactttatgaagatgcctttcccggacaataattttgatgcagtatatgcaattgaagccacctgtcatgcaccagatgtttatgcatgctacanagagatctttagagtggtaaagcctggccaactttttgcggcatatgaatggtgcatgactgaaagctttcgatcccaacatga

SEQ ID NO: 103444 - DNA, 280 bp, Glycine max
  Clone ID: PAT_MRT3847_64428C.1
acagaaataccgagtgggaaaatatggagggggaaccacacctgaagaagggaaaaaggctgacaagaaagaaacaggggagatgcttgacaatcttgatggcacaagtgggatgcggattactgaagaaggaaagctaaaaaaggagggccagaagcgactacaggaacaaggggaggcgcagagacagcgacgatcacggagagaggcccagggtattttttttgcgccccacaacgggggaggggagcggctcaggggcggtgctatgggagaatcc

SEQ ID NO: 103445 - DNA, 473 bp, Glycine max
  Clone ID: PAT_MRT3847_64429C.1
aaaaaaaattttcggccccccctttttccttcctatatcaaaccaactcacatccaggggcaaccaaaacaaccattacaggtcatcatgacaaaggggacactttttgagggaaaaacccagggggggataagctacaagggaagagggggacctgggttttttttatcatcagggggcacaacagaaagggattttttataggggacaaaccctttcccacagggttaaggggccactctcacctttaggtggggggggggggggggttcacttggtctagaggggccaacaaggtccaatttgccatcctccaggggggaggaaaggggttcccccccaatgtttaaagggatctttagcattcctcgagtgggggaaaggggttgcaggggtctgttacaaaaaggggcattccaaagaggttgaaaggcccaccggaaaaatcttcgggggggggggcttctttgggg

SEQ ID NO: 103446 - DNA, 478 bp, Glycine max
  Clone ID: PAT_MRT3847_6442C.1
ggaaaaaaataagggtctaccttcatttttcatttattcccaacccacccacaaaaaaaaggcccctccaacaaaaattggaaaaaaagggaaaaaaaaaaagggctttaaaaagggtaaaaatgggggaaaggggtcaaaatttaaccatactatacctggtcgggggaaagacaacaaagggaaaacccttaaagggggtaaaaaaaagccaggataaactattattcttcatggggacggccccatcatccttgctaggggtagccttttctgaggggagggccccatcatccttgagggggttagccttttttgggggagcccgacaacgtatttttagggccccaaattttccagccccgggggaagaaccttcaaaaaggaagggcaaataaccaggagctttcttggccctatggtgaaccccaaaaaggggttcactgctcttgaaacagtttctgccaactacacaaac

SEQ ID NO: 103447 - DNA, 753 bp, Glycine max
  Clone ID: PAT_MRT3847_64430C.1
ctcaagttctcattcctctggagtctccttctctcagtttcactcttgggtttcaagtcacaacatggtcaccaaaatggtgggagaagaacaattcctctaacatgcaagcgcattgagttccccacccatgatgtgattgaagtgggtgatggctatgaaatccgacgctataataataattcaactgtgtggatgattcctccaaccatcaaagacatttatcggcttgaccctacagggactgaagtcagtggtctatttgattatatccgacccaataataactccacgctaaaaattgggatgacagcgccaaagatcacagaagcttcccctcctgatgcaccctttctccatgtccaatgatggaacagcttctttgtggcagcatggcaccaagctggccacgtaaacgattcaaatgttgcggtggaagccgggaacttgcgagctagtattgatggcacaaaatggtctggtgccattgacaaaaaccagaaagctggtcatgcttctgtttacactgtggcacaatacaatgacccttttgaatatcagaatagggtgaatgagatattgttcttgtttgaaatggaaagtgaaaggcatgcaatttgaaatttatgagaaaactatttacatcactttacatagcttgtaaactttctgcaagaaaactgagcagatcatggtttgaagtattagagcatctgaaattgataaaataaagtgtttaacattcagcttaaa

SEQ ID NO: 103448 - DNA, 2866 bp, Glycine max
  Clone ID: PAT_MRT3847_64431C.1
ccacgcgtccgatccgccatcatcgatcagacaggaatcacaagtgtgaccacaaatcaagggacagggaaagggagagggcttatgacagagaaggagtaaaagataggaatagggcttatgacagagaaggaagcagggatagggatagggcttatgacagagaaggaagcaaggatagggaaagggcttatgaaagggaagaaagcaaggatcgggatagggaatacgtaagagtaagtaggaaagttaggttgaaggggatgcatgatgaggggagggaagatttggtggtgccacgactctcgtcacattctcataagcggaaagagagggagcacagtgaggacagggactacgaggataagaaaattaggatttccgaggagaggaaggaagggagaagggaacggaggaaatttggggataaagtcaagaatgcggaagatgaagaataatgggacgtagaagaagaagaagtagatggtaatgataattttagagtcattcatgatcccgatatcggccaggtggtctcaggtcttctccattgtgcgcggtcttccatcgtactgtatttagtgaaaaagttagtcttgtaaaacgaactgctgctactatttgccttgcttccaatggccaatctcatctactacctgttccattataaattttctagaccattacgtggtgtgaacattgtcatgtcgggtttactagcgtcagagatgctacggattgcaggtgatacaccacatttgtttaaaattttgtcctttgggattttactttcgaggatgccctagctaaggctaagaaagctttacaaatgcagaaagagttgtcagaaaagctaaagaaaattcctcagttgaataagagttctacccaaaattcacaaggaagctctaacttgggctcaatgaatgaatctgcagtaccctcttctgctgctggagtggcatcaaaaagttccacgtcagcttctttggtccatgctgcaaatatgtcaattttcccctcaactgcttttgctgcttctgctaatactccagtaattggcactagtgctgctggtattccaaatgcaactctgcccaactgggaagctgtcaggcgtgctcaagagcttgctgccaggatgggatttcgtcaagatccacaatttgctcctctgataaacatgtttcctggtcagatggtaacagatgttactctcctgcagaaacccatgaaggcccctgttcttcgtcttgatgctcagggacgggaaatagatgagcatggaaatgttattaatgtgactaagcccatcaaccttagcacattaaaggtcaacattaacaaacaaaagaaagaagcatttgaaatactacaacctgtattggatgtcgatcctgaatctaatcctcattttgatgcaagcatgggtatcaacaaaacaaagctcctgcggcccaagaggatgaatttccaatttgtggaggaaggaaaatggtcaaaagatgctgaaacaataaaattgaagagtaaatttggagaagctcaagcaaaagagcacaaggccaaacaagcacagttggcaaaggcaaaggctgctcctgatataaatcctaacttaatagaaataacagagagagttgtaattaaagaaaagcccaaggaccaaattccagagattgagtggtgggatgtgcctcttctgcattctggaaattatggtgatgttgataatggaatcataggcgaagataaactgaaaatagaaaaaatcaatttttatgtggagcatcctcgtccaattgagccacctgctgagcctgctcccccaccacctcaaccactcaagctaactaagcaagaacagaagaaactccgaacacaaagacgtatagctaaggagaaagagcgacaggagatgataagacagggtgtaatagaaccaccaaaaccaaaggtcaagattagcaacttaatgaaagtacttggcactgaagcaactcaagatcctactcggctcgaaaaggaaatacgtaccgcagctgcagagcgtgagcaggctcacatagataggaacattgcacgcaagcttactcctgccgagctgcgggagaagaaggagaggaagctgtttgatgacccaaatacactggagacacttgtctctctttacaggataaatgacctctcacatccgaaggcccgattcagagttgatgttaatgctcaagagaaccgtttgactggatgtgctgtgatttgtgatggtattagtgttgttgttgttgaaggtggaagcaagtcaattaagaggtatgggaaacttatgcttagacgtattaattggagtgaagtttcaaaagagaaagaagaaaatgaagattcagatgatgacaagcctgccaataagtgtgttctggtgtggcaaggaagtgttgccaaacccagcttcaataggttcagtgtccatgattgcatcaccgaagcagctgcccgaaaagtttttgtggatgctggtgttcctcattattgggaccaagccgtgaactacaaagaagatgaagctgtttaacttgtcttctagtgtttttgttcttctttattggcctgccttgactaaagtcttgtggtgagtgagcagatttacaatttgcatcaagcagtgttttaaacaaaataataaaccggatagctgctaagtgttcccatgtttcctatgatcaatgatatctacaatcattatgaattttctagaccatttcgtggtgcatacattgtcatgtcgggtttgatagcgtcagagatgctacggattgcaggtgatacaccacatttgtttaaaattttgtcctttgggattttactt

SEQ ID NO: 103449 - DNA, 214 bp, Glycine max
  Clone ID: PAT_MRT3847_64432C.1
atcaaacgggcccttttataaactttttgcaaccatacccttctttcttcttcttttacactttacccttaaaggaaacccccctatacgcacctttataaaaactcccccatacttccgttctcataaacccccccttttttttctatatcatacccccaacccttccaaattcttctacaaacagcccccttatatctttttttcaaaaccc

SEQ ID NO: 103450 - DNA, 360 bp, Glycine max
  Clone ID: PAT_MRT3847_64433C.1
caatgattcaacttcacagaaccttcttctccaccaccacctcctccgttccttgctcataccctctctctcttggccacttcatgttgcagttcagggcgctccaggctccaccaattgctctcgcgccgcacgccacgtcatccctcatcggcgccaccgtccaatgccgaacgcgtcttctcttccctcgaagggttaccgcgaaatgccacgcgacgtcgtttagcaatttccgtttcccgtttgctttgaactccacgacgtcgtttgggggcagcgttttctcgagggggtttgcgacgcgcgcggcggagaacggtaagcagaagaaacgggcgagggctgctgtcgttcgcg

SEQ ID NO: 103451 - DNA, 2748 bp, Glycine max
  Clone ID: PAT_MRT3847_64434C.1
catatactggagtggtgctctgaataatccctgtcgcgtaaagactattcctcgtcccattcctgaaaagaagtggtaccttacaccctctgtggtttctctgatgggaggactgctaccctttggcagcatattcattgaaatgtattttgtattcgcttctttcgggtattacaagttcgtactatgtgtatggctttatgctgctagactttgttcattcttatcatcgttaccatttgtgtgacaattgtggggacatactttttgttaaatgctgagaactaccactggcaatggacttttttcttttcagctgcctcaacagctgtttatgtttatttgtactcaatatactacttctatgtgaagacgaagatgtctggcttcttccagaccagcttttattttggatacactttgatgttttctcttggactaggaattcttatgtggaggtgtgggtttatttaggttcaaatttgtttgtgaggatgatctatagaaatatcaagtgcgattaaggttttgagtcagacctgagcacttctctaagtctgttactgaagagtacaaatttttggagaaaacctctgttcatgtatggggaaacctaacaatgctttcaggtggatccaaagggttttgacgatgatgatgtattatttttctatatttgggaggacacgaaatttttattccccgtccgaaatagattgtctttatgattttatttgatgtgttctatattcatctctagtttttacggttttatgggttttcatctttcgtattggattgttgtaaagaatgtcaaatccaacatttctgactcactgtgttgaagttgtctatattgatgagaattcggaaaaatggctatgcaatgtatgttatggaagatgctgattaggagagtatggagagggattttagtgtagtatcaggttggaaatttgtgcatgttgatgtttttcaggtgcttcgcatctatgttagtctttcagttgttgttggctcaggtgctcagcgtgggtttctgttgcttcttgtggtctagttgcatcctttagtgttgtgggatctctcacaactatcagttatgcctatgtgagtggggctctttgctcccttatcgggggttaaaattggattaaatccatgggccttacagcatcactgttcccattcatgtgctttggaattggttttattttaaacacaattgctatattctatggatctctagctgcaatcccctttggtactatggttgttgtctttgttatatgggcttttatctctttccctctagcacttcttggcacagttgttggaagaaactggagtggtgctccaaataatccatgccgtgtgaagaccattcctcgtcccattcctgagaagaaatggtacctcacaccatctgtagtttcgctgatgggaggactgcttccctttggcagcatattcatcgagatgtattttgtattcacttccttctggaattacaaggtgtactatgtctatggcttcatgctactggtttttctgattcttaccattgttactgtttgtgtgacaattgtggggacatactttttgttaaatgctgagaactaccactggcaatggacttctttcttttcagctgcctcaacagctgtttacgtgtatttgtattcagtatactactactatgtgaagacgaagatgtcaggcttcttccaaaccagcttctattttggatacactttgatgttttgtcttgggctgggaattctgtgtggagctgtgggttatcttggttcgaatttgtttgtgaggaggatctacagaaacatcaagtgtgactaaggcttttgtaggagtctgagaccagagcacttccatatgtttgttgctggagacaataaatttcttagaggaagcctctggtcatgtgtggggaccaaacaatgtttgcaggtagtaagtatcacagggttgaggatggatggggatgcattttttctctatgtctaggggatgtattcttttctctatactagggaggccctgaggttttttccctgactgtttgaaagcctagattagaatgcagggattgatctttataatttagatagttagcaaaatatcagactcgttgcttttttttttttttttataaataggtgccctattgacggactgatgtctgattcccctacgcggtttagctattgtacgtaaaggggatgaagtctcggaaatgaattttgtgcttctgaattttgtatcaaatctgaatatcctctcttaactacttcctgcacatctctccctctttgagttttaaaaaaaaaaaaaaaaaaaaaaaaaaaaaaaaaaaaaaaaaaaaaaaaaaaaaaaaaaaaaaaaaaaacgaaaaactaaaaaaaaaaaaaagaagaaaataaaaaaaaaattataaaaaaggggggggccccctcttttaatcaagttttttcccccgggtttggcaacaaatttttttttgtgccggtccccaaataaatttggggcgccttttttcctcttgtgtctttgggaaaacctggggtttcccaaattttatggcttggaaggaactccctttttaacaactgggttaaaatggaaaaaggcccgacctgttggccttcccaaaagtgtccccccccaaattggaaaagggaaccccccttttacggggcatttaaccgcggggggtggggggtttccccc

SEQ ID NO: 103452 - DNA, 269 bp, Glycine max
  Clone ID: PAT_MRT3847_64435C.1
agcgacgctgtctctcctgctattctccgccggcggtaaatgcaacacttcctttactctttcatttccctgcaaatacaaagagacacaccatcgaattcgcatgtttttattattaattaattcaattaggtgcacataaattccattttcattcttttccgcttgcatttcaatatattaccacattctctgtgctccgcttcgcctgtgtgcgtgtctagagtttccttaacaattcataattcaattccgtaatgtatagttgt

SEQ ID NO: 103453 - DNA, 346 bp, Glycine max
  unsure (1)..(346): unsure at all n locations
  Clone ID: PAT_MRT3847_64436C.1
cagtaactcacctcaccatttncnatttattacattgtccaanctcnnntcttccaccagaacctcttactatatcttcccacccataacccctccttccaaactctcctctctccgactccccacccgccgccaccccaagccaatcacattctacttctccaccatcaccgacaccatctacgtcctcaacaaactccacaaagccaccttctcctacctttactcctaccaccaagtgcacactactacaaagtctgaactgacgataaataagaaggctttgctactcccttaccccatcgctttcacccccacatactcacataaacacattccaaacttc

SEQ ID NO: 103454 - DNA, 469 bp, Glycine max
  Clone ID: PAT_MRT3847_64437C.1
ctggaattggatggatgacagcctttctctttgtgaccagctttgttggattgttggcgttggttcccattcgaaagattatgataatagactacaaattaacttatccaagtggaactgctactgctgttcttattaacgggttccatactcctaaaggagatgtgatggccaagaagcaggttcaatgtcctctcttccgagattctcaatctctttgagttcttcgtcgcttacggtactagttcccattggattcatcaaatcctaacccctgagttaagttgtgtctcaaatttcaatgatggagaagaattgaatctcggtgacagggacaaaggcttcaattcaagaattcaattctccaccgctgagagaatggactaaagtgtgcttgcaggttcgagcgacaaaaaacgatgacgtaacggagatgataaaaagaggtaaagattgtgatatcggaaat

SEQ ID NO: 103455 - DNA, 705 bp, Glycine max
  Clone ID: PAT_MRT3847_64438C.1
gccaagcaattgggacagcaataggttgtgtagttgctcctctcacattcttccttttttacaaggcttttgatgtggggaacccagatggggactacaaggctccatatgccatcatatatagaaacatggcaattcttggtgtggaaggattttctgcccttccacatcattgcttgcagctttgttacggattttttgcatttgccatagcagccaacttggtcagagatctagcccccaaaaacattgggaaatggattccacttccaatggcaatggctgtccctttcctagttggtggttactttgccattgacatgtgcatgggtagtttggttgtgtttttgtggcacaaactaaacagaaatgaggctggtttaatggttcctgcagttgcttctggtttgatttgtggagatggattatggattctcccttcatctattcttgctttgttcaaaattcgtcccccaatctgcatgagcttcctgtcagccagtgccagttagaagttcacaataacattcaaatatatgcagtcaacaacttagtacctacggtcattatgggcataatgtcgtaggatgcttgcttattagcaatttcattcacaaagattctgctcttggagaatcttgagcgatatgtaaatatttttacatactttattagagaaactaatcaattcgagcggaccttccc

SEQ ID NO: 103456 - DNA, 2563 bp, Glycine max
  Clone ID: PAT_MRT3847_64439C.1
tttgcgtttggtcgcaacaatgccaaatataaattccccctttcgctgcgtagaatctttgcctcactcctctgcgttctccgctagatttccgatatcacaatctttacctctttttatcatctccgttacgtcatcgttttttgtcgctcgaacctgcaagcacactttagtccattctctcagcggtggagaattgaattcttgaattgaagcctttgtccctgtcaccgagattcaattcttctccatcattgaaatttgagacacaacttaactcaggggttaggatttgatgaatccaatgggaactagtaccgtaagcgacgaagaactcaaagagattgagaatctcggaagagaggacattgaagaggctccaattgtgcctgaggatgtgagcagaatagcaccatggataagacagattacacttcgggggctagtagctagcttcctgattgggataatttatagtgtgattgtgatgaagctgaacctcacaactgggttagtccccaatctcaatgtctcagctgctctccttggctttgtgctcattagagcttggactaaggttcttgcaaaggccaagattgtttcgactccgttcactagacaggagaacaccatcatccagacttgcgcggtcgcttgctatagcatcgcggtaggaggtggtttcggtttttggattgtgcgctcaaattgattactttctctaatcaacaagtatgtcaaaatatttacatgtcgttcaagattctctaagagcagaatctttatgaatgaaattgctaataagcaagcctcctacgacattatgcccataataatgaacgtaggtactaagttgactgcatctatctatatatttgaatgttattgtgaacttctaagttctaactggcactggctgacaggaagctcatgcagatcgggggacgaattttcaacaaagcaagaatggatgaagggagaatccataatccatctccacaaatcaaaccagaagcaactgcagggaccatcaaaccagcctcatttctgttaagtgtgtgccacaaaaacacaaccaaactacccatgcacatgtcaatggcaaagtaaccaccaactaggaaggggacagccattgccattggaagtggaatccatttcccaatctttttggggccaagatctctgaccaagttggccgctatggcaaatgtgaaaaatccgtaacaaagctgcaagcaatgatggggaagggcagaaaagccttccacaccaagaattgccatgtttctatatatgatggcatacggagccttgtagtccccctgggttccccacatcaaaagccttgtaaaaaagagaatgtgagaggagcaactacacaacctattgctgtcccaattgcttggcttagaagcatcgagcgaggggaagtgaaagtgagatggccagtcttgaaatcatgcatcaaatcagatgaaatggaaacaatggattttatcaggccacaccccacaagtccagcaactacaccatcattttttccggccaaggctgaaagcacaaagagagccactttcccatagttataggccatgttcatgtcggttaaacctgcaccgtaagcattgcagaagccaagagagggtgcgaaaagataggcaaacaccacgtaataccacttcaactgtgggaacatcaaagggattacaatgatagaaacgatggagaataatatgtatccagtacatgccaaccatataggaatgctttctcttgcaaacacttcattccgtctaagatcatcaagagggagtggtttctggttatctgaaaatgtttcggggttcttccttttcacggtggcatgaatattcgtggcagtgaaatagaggactttgacaaaattgtaaagcccatcaccaagaatcaaagcaatagaaataaaaaccttataaccattaagactcttcatgctactttctggtatgcttgcaggaaaccattccccttttagtcccctgattaagggccacataatgccccatgaaatcacagcaccaagaagcaatgataaatttacaagatgggaacaaatcattcctgctccgacataagtcatgctgaaatcaaaataaaatgagtttttccatgctttcaatccaaaagtgggaaactgaacaaatccacagttatctccacccgaataaaaccattgaaagaaagcccagaggaaactggctgagaagaatttcaagaaaccatgaacctgcttcttggccatcacatctcctttaggagtatggaacccgttaataagaacagcagtagcagttccacttggataagttaatttgtagtctattatcataatctttcgaatgggaaccaacgccaacaatccaacaaagctggtcacaaagagaaaggctgtcatccatccaattccaggctccttggtactacccggattattcccctctgtgccaacccctgcttgctcataagtcctcctattcaaacccaggagataagaaccgaaaccacctacaattacacaagc

SEQ ID NO: 103457 - DNA, 1003 bp, Glycine max
  Clone ID: PAT_MRT3847_6443C.1
ctttctgggtctttacttcttcaggtcaaggtcaccaattcatggaaggtctgaacctacaaatcctggtgacacactttatgtaactggtctatcttcgagggtcaccgaaagagacctagaggagcatttctccaaggaaggaaaggtttcttcatgttttcttgtggtggagccccgtacacggatttctcgtggttttgcttttgttacaatggaatctgctgaagatgcggagcgctgtatcaagtattttttttaatcagttttagagggtcgttacatcactgttgagcggtcacgaagaaaacgtgcaagaactccaaccccagggcactatcttggactgaaaaacacaagggagtatggctttcgtggtgaccgaggtggtgaccggggaaggtatcgcgatggtcctgaccgtgacaattactcacgtcgtaggtctccgaggcgttcaccgtacagaggtggccaagattattctccccagcgctcaccctatgggggaaggtctaggagggatagctctaggtcgcttccttattctccacatggtagcccagacaggaagtatgctcgtggatctaggtgatgtttatcttagcattctactaaaatatacctgaacagggtttacaaaaatttgttgactattatggtgctgtgactatcagtttgcgccctatatacaatgtataaagcttattggtggaagctgctgtttctgtgtgactatatgagtgtgccttttctcgaagtcactggaagttagaggggacaaaagtgtgaaaatttcaatttgaagcatgtaagaatttgctttagggaattgagacttcggcaagaattttccgtggctgcgtatgccccaaacgtttatgcatgtgatgctgcctacgatttcaacacccatttttacccaaaccataactctattgtaaacgttacccttgagccattatctgctggtgaatttagcgttgaaaaatgttatcatttc

SEQ ID NO: 103458 - DNA, 347 bp, Glycine max
  Clone ID: PAT_MRT3847_64440C.1
tccaccaggtcttaagctgcatggtccgaaatccgaaccagtcgcaattcatccgcaaccatccctacaatgagttgattgagaaactcgcgagcatgggattcaggggggatcatgttgcaagtgtgacccagcaggatggaggacagcggacaggccattgattgcaagtcgggacttgacagggtgaaggcgcatagctcggcgggccctcacagaggaggatggccggggggaggaagaaccgcgctgcacagcggccccggcgcacccgccccgcggccggggggggggggcgcccgcccggcgccccgcgccgcccggggggggggggggcgggggggggg

SEQ ID NO: 103459 - DNA, 480 bp, Glycine max
  Clone ID: PAT_MRT3847_64441C.1
tttttcaattaaagatctagataacaattcattaaagtaatcttcacctattgattccattgctttctctccgtggatttgtggaagaaagccttcagccatccataacagaatcaattccttcctatccaacaaatattgtcttggaaaaattgagcaataggcaaaacatcttttcagatgtggtggaagatgaagataacttatgcataaagctgctaaaacttcattatttgcccacatgttgctgttcagaattccattccaatactctgcatcaacatttgatcgcaaaagacctcccaatgttttggctgctaatggtagacccttgcattttgttgcaatttgtctaccaatttctgctaggatgggatatttgtcatatccttgatttccaaatgcatgtttagcaagtatacaccaacagttgtcatcccgaagaatcttcagctcatgaatgggaaatgtaccagtgat

SEQ ID NO: 103460 - DNA, 272 bp, Glycine max
  Clone ID: PAT_MRT3847_64442C.1
aattttaatgaaaatttggtttgggcttagttttccttgttggggtgaaataaaagtttttttagttggttctcgtgacttcttttgtttctttgccttttctaaattgcaaccaaaatattgatttttttttctacagagtgaacttagcaccaaacacatcctaaattaaaaaaaaaatagttataggcatagtatgtacacgatacataatacaaagtattttaaaatttaaatataaaattacaaatataaatcaacataaataatta

SEQ ID NO: 103461 - DNA, 351 bp, Glycine max
  Clone ID: PAT_MRT3847_64443C.1
cacaaaaaggtggccccaacattaccaaggtttaatccttgctaaacatcagggaaagaaaacaccaacagaactttacctgcacaattgattcaacaaggtgcttaaggggtgccaactctgctcttgagatcactcggaatttccaagcagtcaaacaagttgcttgaaaaccggttaaggtgactcttttacacaaactcactattttctgaaaatgtgagtgtgtaatgtgagcatatacatccaataaccttttgaaaattgtcttgacaacatctaggtaattggttggaaagggagccctcattcttggagggaaaaccgtttcatcatctagctgagatccaa

SEQ ID NO: 103462 - DNA, 390 bp, Glycine max
  unsure (1)..(390): unsure at all n locations
  Clone ID: PAT_MRT3847_64444C.1
ccttgtctagtcaatagtacaacacaagcacttgatcaagggtcaatacaacacaagcaacaaatagttgattctgtgctcgaaatgaagatattagttcttcacttatttcatcttgctcttcagagacataatttctaagaattttatctccatggatgtactttatcataagcttcaatccacgaacctttatcttggaaactagcatgcgctaaccttgttggaacaaaaaaatacaagcctttttcttttcttatttttggttgttttgcgtcatttcacgtgaccttatgcatcnnngttccaactataacattccaacagaaggtcaatctctacccgtcaaagtttaatgatttgtaaaataattaaagaaatatgtgaata

SEQ ID NO: 103463 - DNA, 346 bp, Glycine max
  Clone ID: PAT_MRT3847_64445C.1
atgcagacgaatgagttgagaccactgtatgttccgcataaacggcttgtctaatgtggggcgttttcttgtcaacaagggcagaacttttggccgacatctaacaaccattgtcaacaaaaatgaccgaatgccagctatgaaacaggttccccgatactaacccatgcgacataaacatggaggccgaaacacacgtacatctgcattatacccaccacaactagacgtccttttaggtaccaacctttgatttcaatgaatatacgtattgcttcttttagattaccctctacaattccacaaagctgaaacaacagcacttactgtactactgaatcaatca

SEQ ID NO: 103464 - DNA, 370 bp, Glycine max
  unsure (1)..(370): unsure at all n locations
  Clone ID: PAT_MRT3847_64446C.1
ggctcgagccgaagcaaaacaatttanactttacattctcacacaacaacattgactttttttcagaattcaccaactcttcacgcggctattctccacagctgtttgcctcaacataccactctttcatctctaatatataccatttctcttcattttcaaaacttcccaataaccctctncttctttaccttcttatttatatacaaaaaattccccaactaattcctttcaaccacttccccattacnttttcttttcaatcaacactctaactcttttnctttttaaaatcanaacttatttttaccttctctttactanaaatattcatattcaatactctaccctattattctactctcaccta

SEQ ID NO: 103465 - DNA, 254 bp, Glycine max
  Clone ID: PAT_MRT3847_64447C.1
ttctgatattcaaattggataaagaatatattcgaacaatgattttttcattttctttttaatactgatgcggtatagactccctaacactccttacctaatttgcatagaactctcccaccatttcctgagactcatctaagtgacggctatagtgatgataaacattaacattgaatttactccacgcctcaccctttgaggaaaaatatgctcatgccgaagatgttgcacaattattctagtgtgactta

SEQ ID NO: 103466 - DNA, 273 bp, Glycine max
  Clone ID: PAT_MRT3847_64448C.1
aatttgaggttgatacgaacaaacagtgcaatttggctacatgcctaattcacatgaacaagatcaaagaagcaaagtttctactccaggcagtacgtaccgctacaaaaaatagaaagatggatgattcatttgccaaatcattcgaacgcgcttctcagatgctaattgagatagagacatcatcatcacagaatgcagcattttcaatgacaacacagtgccctccacaaagctttgagaactcgattagaatgagctctgatagtgctc

SEQ ID NO: 103467 - DNA, 463 bp, Glycine max
  Clone ID: PAT_MRT3847_64449C.1
ttcttgctctcactctctgtgcctaaatagaagcctttctctttagggatccaagagcgtcttgaactactccacaaccctctctggatatggacaaatttgattctcagagagcaccgacccagaaaagaaggtcgaacacgtccctaagagaggggatagacagaaaaaaatagaaactggacgtttaacacacgaaacgaaacaagactatatggaaaaccggaaaatatttggagtaagcaagatctaaggcaatatataaaactatgaggattagatagtaagaaggtgtggaaatattatagggagaggaatcagctcgacgaccaacgatgtggaagcattagcaatttgttatctatttcagaaatgggcaacaccaaacgcgtcgtgaaggtatgggacaccatatggttcgggctagggtttggtctcgagcatatagaccgtacatatgaag

SEQ ID NO: 103468 - DNA, 418 bp, Glycine max
  Clone ID: PAT_MRT3847_6444C.1
tacggctgcgagaagacgacagaaggggattgttcccttacttcatgttggttgcttttgaagctggtggggtactacgatctctcatcttgtttctttcataccccttggtgtggttggtgggtgaaaaccaacttggtttgaagatcatggttttcttgagcttctttggcctcagaaaggacacattcagaacaggatcagctgttctggcaaagttcttcttagaagatgttggattggaaggctttgaggccgtaatatgttgtgagagaaaagtggcatctagtaagttgccaagggtcatggttgaaaatttcctcaaggactatttaggggttgatgctgttatagcaagagaattgaagtcctttagtggcttctttttgggagtttttgagagtaagaagccaattaa

SEQ ID NO: 103469 - DNA, 171 bp, Glycine max
  unsure (1)..(171): unsure at all n locations
  Clone ID: PAT_MRT3847_64450C.1
aattaggctcgagcgagatcactgcaggcgtgcgacctgtacatatgtntagtcgtatgatagcttgaagtgctcatggacggacttggctcctgtgtgaaagtgcacatcatctgaccatagctcacgacgtacaatgccctaggcataaattgatgagccatgagttga

SEQ ID NO: 103470 - DNA, 2578 bp, Glycine max
  Clone ID: PAT_MRT3847_64451C.1
ctcctaactaactatttaatgaaccattgttctctgtttggcatctgatttcttctagatttggcaaagttgcaaattgagccttttcatgttcacccgaaacaggatgaaggtaggctttaatggattaaggggtaaagaaatttcgcttatttccattgttctcatgtctgtaactatcattttatggtcatgggagaaaatgcctggtcttagtgcctttcttcctcctcaaacaccaccactgcaactgccttcagatcatttagctagtcgtcgttcagaccaggtgctagaaccagatccacatttgggtgaagatggctcgccgttggcaaaggcaaagactgccaatgaagcagaagaactacgtctcaagggagcatcatggacggtccctgcacaaagctcttctggaaagaacatgggtgaagagggctcatcattagcaacggagaagatcttcaatgaaacagaagaactaaatctcgagggagcatcgcgaacagttcctgcacaaagctcttttggaaagaacatgagtgaaagtaataccaaaacaacttcatataccgaacaaattctttcaagtgtgccagatgatgaagcaaaacacaagagaatcttggaaggtgagaaaaatcatgacgtacagactttttccagcccaacatcatctggggctaaaagaaatgaagctgagggggaaaaaagtttgagacaagaagaaaataagcatagaaatgaattttgtgactaaatctcctcaaataatctctttaactggtgggaaaagacaacaattggaataatgctacagaaaataaagtctgtaactacgcaaaaggaaaatgggtcccagacaacaaccggcctttgtattcaggttttggttgcaaacagtggctatcagggatgtgggcttgccgcttgatgcaacgtactgattttgaatatgagaagcttcggtggcaacccaaggattgtcaaatggaagaatttgaaggttctaaattcttgagaaggatgcaaaacaaaactctggcttttgttggagactcgttgggccggcagcagttccagtctttaatgtgcatgatcactggtggtaaggataagcttgaggttgaagatgtggggagggagtatggattggttatagctgagggctctgcccgccctagtgggtgggcattccgcttctcaagcactaatactaccatcctgtactactggtcggcaagcctctgtgatgttgaacctattgatgtaaacaacccaaacacggattatgcaatgcatcttgatcggccaccagcattcttgcgccaatatatccacaagttcaatgtcctggttctcaacacaggtcaccactggaatcggggaaagctcacagctaatagatgggtaatgcatgtcggtggtgtgccaaatactgataagaagatagcagtgatttggggtgccaagaatcttacaattcacagcgttgtaagttgggcgaattcacagcttccaaaatatccaggtttgaaggtattctatcgttccatctctcctaggcattttgttggtggggactggaacacaggaggcagttgtgacaataccaaacccatgtccgttggaaaggaaatattgggagaggagtctattgatgaaggtgctgcaagtgcggtaaagggaacaggggttaagctcctagacataacagctctttctcagcttagggatgagggtcatatatcacggttcagtcttacagcgaagcctggggtgcaggattgcttacactggtgtttgcctggtgttcctgatacatggaatgaaatactatttgctcaaatatagtttactcattatgttggctggagagtatttggttggcgttgaaaaagttacaaccattccttcgcttggaaatggtcattcactttaaaagaaaactatagttttgcagaggacgcagtcatggaggttgcaatgtgtcctagctgagtttgtacttcagagctgatctggtgagatatttgaagtcgtacgatgcagagatttgttatgtacattgtcttaaattaactttgactacgcaaattttgaggtcttctgtagtataacttacttaccatgtaaattaattactccttcatatggccggcacatagcaagttagttgaaaagagtgttgataggcaaatctgcagaataggagcatttgaagattgttaccgagtgagttcttcataatgtattgaattggaggttgaagtccatagaacaggaaaacacccttgctctccttttaaaaacaaatcgggcagggtggaacagaatagtgagttattagtcttggatttttcatatatcatagagtttcaaagcttcgatacatttcacgctgaatgtactatacgtatatactctacagaaaaccagggaccatattaatagtggctagtggggtctctgagtgcaatagttacgttgactactcttttatgtgctcatcgatctacttataggcccgacaatacgttgcaaacgtatttaatagcatgatgttagtttgtctgtt

SEQ ID NO: 103471 - DNA, 278 bp, Glycine max
  Clone ID: PAT_MRT3847_64452C.1
ttgttttttgcttggtgaatggatggggatgctctatttcctgtacatggcggtggtgcgcccattaggcatggtgaatagaggcccctgatggcacacgaaggctgtacttcatcgattaccagtgacaccacctctgactggttgtgtgctaataggatgacataagctactgcgttgcatgagaaagcggtgtaacacctgattgattgatagactggtaccgactgcaacagacacagagccatgcgtgtgtccgatgctcatcataccccatc

SEQ ID NO: 103472 - DNA, 571 bp, Glycine max
  Clone ID: PAT_MRT3847_64453C.1
ttacattgttgtctgctgaaataaaaaacagaagagtgaaatggagcttgcacctgtgaagtctgaactaagtccaaggagccataggttgctcatgatagatggtagtgaggttattggcactaagtgtgtcaaaaggcggcgaagagattcatctacggccgtgttaggtggctatggacaacaaggtgaacagttagaagaacagaagcaacttggtggccaatcaactgccaccactgtgaatagaagctcaaggttcaggggtgttagcagacacaggtggactggaaggtttgaagcacatctatgggataaagggacctggaatcccactcagaagaagaaaggaaagcaagtatatttgggagcttataatgatgaagaagctgcagctagagcttatgatttggctgcactcaagtactggggaatatcaactttcacagatattcctgtgtctgattatgagaaagaaattgagataatgaaaactgtaaccaaagaagaatatcttgcttcatagagaaggaggagcagtggtgtttccagaggtgtatcgtagtataga

SEQ ID NO: 103473 - DNA, 302 bp, Glycine max
  Clone ID: PAT_MRT3847_64454C.1
atggctgttttcttgaaatgtggcaacttgtttgtctatttggattctcttgctgcaacacccatcttctcagattcctgcttcagctcaaatgctatagccaccaccaatatccttgatttatccaaggatcctcgggtttttgaatggctggttggtatcaggaggaagattcatgagaattcagaactggggtatgaggaatttgtcaccagtctgctgattagagttgaattggttgaactgggtatcttatataaacaccccgttgcactcacggttgtagttggctttatagggac

SEQ ID NO: 103474 - DNA, 228 bp, Glycine max
  Clone ID: PAT_MRT3847_64455C.1
gtcaaaaataaaaaataaaataaaataaaatgtgaagtagcagttcatgaatacaaggcttccactgatgatcaattgaaacacactgaattgcaactgcctaatgccatgaatcgagaggtgattcattgctttcactctgaagagtaagatacatctctacaaaaaaagagatctacctataaagattacatttttcccctttaaagggggattgggaacaaatca

SEQ ID NO: 103475 - DNA, 223 bp, Glycine max
  unsure (1)..(223): unsure at all n locations
  Clone ID: PAT_MRT3847_64456C.1
cacagttctcaagctcaccttgacacgtcttatgaactcagngaagatataaatgagacccctgttactgatgatgttcctgtaaatgcaaatattaagggtggaactgtaaattcttggaggagagataatcaggcttataacgaggaaggtgtgaggtcaggcatagagaaatggcagggaaattcccagccttatccaaatgccggtattccacacaaca

SEQ ID NO: 103476 - DNA, 1164 bp, Glycine max
  Clone ID: PAT_MRT3847_64457C.1
aggtacctccttttgttttgtccaatctttcttctatatgcaaattttgcatccactctttattttcctggttgatagagagaaagcaaaacagtgagtgcaccaaaacccaatccaaaatctctatgaatctatagtcatttttgtttcttccaatttgacctcattttcgcgctaaatcttcgttcttcgccatgagaattggttctccttcttcttcttcctcttcctccggttgttcgcgtttctggtcctcggcgctccgatcaaagcgccttatgtcgccggcggagaaggccgcccgcgaaagctccgacctcggcctctcccgccgcctcggcgtcctcgacctcgtactcctcggaatcggcgcctccatcggcgccggcatcttcgtcgtcaccggcaccgtcgcccgcgacgccggacccggagtaacaataagttttatacttgcgggagcatcgtgcgttataaatgctctctgttatgctgaactagctacccgatttcctgctgttgttggaggagcatatctgtatgcgtacacagcttttaatgaacttacagcatttcttgtttttggacaattgatgcttgactatcacattggggcagctagtatagcgagaagcctagccagttatctaataaatattctagaactcttccctgttttcaaagataacattccaaaatggattgggcatggtgaagacattggagatgtgctatccatcaatgtcttggctccaattctgctagttcttctgacttttattctctgtcggggtgttcaagaatcgtctgttgtgaattctcttatgacagtgaccaagataatcatagttatcattgtcatttttgctggagcatttgagggtgacgtttccaactggtctccctttgctccaaatggtttaaaagccatatttacgggagctagtagtctcttctttgcttatgttgtttttgatgcttgcaaaaattctgctgaaatatctgaggcccctccgcgggattccaataggcatattaggaagcgcctttaaatatgtattattttgcattggggtttgtctggtgagtttagtggaatgggtgcatataatcttctaggagaagatgctcctttggctgaagctttttcgtctaaaggattaa

SEQ ID NO: 103477 - DNA, 346 bp, Glycine max
  Clone ID: PAT_MRT3847_64458C.1
gctttccttcactcgagcacgtaagttgaccgaggttgagatcacatgatgcttatgggtcttaagctatcgatcaagaacgcaaccgtctgttcctgatgtgtactctgaaaacactgatcatgtgaagagcgctgtgaggtacaggtcgggggatttgctggagagggatctaagctgggcacgatggaaggtgtatcctgctgtgggtgaccatagccacaaagatagctagacaaaagctcacagagtggaggaagcttcctgctgtgtgccaaactaggtgtgcactccgatccttgtactgtgaccatgtggagtatggcaaggatgaacatgtatggga

SEQ ID NO: 103478 - DNA, 265 bp, Glycine max
  Clone ID: PAT_MRT3847_64459C.1
cggaccaaccgaagaagcaggggagaccaccggggcacggagaccccaaaactcccgaaccgaccgaaaccaccaagcccagcaacaaaccccacagcaaagagaccaaaaccaaaaaaccgaaacaggacgaagaccccgcagcgcagaacgagccgaacacggagaacgaggcaacgcagcagacgaagaaggcaggccccgcgaaaaaaagcactcaaaagcaacaggccgaaggagaagcgagacccaacgaaagcggaga

SEQ ID NO: 103479 - DNA, 2637 bp, Glycine max
  unsure (1)..(2637): unsure at all n locations
  Clone ID: PAT_MRT3847_6445C.1
ggctcgagccaaaaccctaatccttcgtcttccaaggagatggctgattctcccctcgcaaggaactcaaggtcaccttccccatggaaagctcagtcgagatcgagatctaggtcaaggtcgagatctaggtcgaggtctaggcctagacaaaggccaagatcgcgttctagaagtcgtggcaggttagtgacaattgttgtttagtttgagagtattgaggcaggtgactatgccactcaaggttttaaattgtgcactatgattactgaaattatgaaaaaaattacggccaaatgtagatagtagataacattttttttattatatatatatatttgtcgttctgaaagtacctgaagcttattccttttgtgccttttgtttcttaccactttctgggtctgtacttcttcaggtcaaggtcaccaattcgtggaaggttggcctttttcaatttgtatatattctgtctttctgaaagtactgaaactaatccttttgtgtcttctgtttttaccactttctgggtctttacttcttcattgcttttcgacaaacccgttacccttcgtcgtctaatacctgattcttcatctccgagggtcaacccgtcccaacacttgaagatcttagctcgtggcaatggccgattctccaccgagaaggaattcaaggtccccttccccatggagggctgagtcaaggtctaggtcaaggtctagatctaggcctaggtctaggtcccggtcaagatcttttgagaaacaaaggccaagatcccggtcgagaagtcgtggaagatcaagatcaagaagtaacgaaaggtctgaggctaaaagcagtatttcattcatttcatcagtgctgattacccatggtcaattcatttgggcacactctctgttccaaaaccctaatccttcgtcttccaaggagatggctgattctcccctcgcaaggaactcaaggtcaccttccccatggaaagctcagtcgagatcgagatctaggtcaaggtggagatctaggtcgaggtctaggcctagacaaaggccaagatcgcgttctagaagtcgtggcaggtcaaggtcaccaattcgtggaaggtcaaggtcaccaattcatggaaggtctgaacctacaaatcctggtgacacactttatgtaactggtctatcttcgagggtcaccgaaagagacctagaggagcatttctccaaggaaggaaaggtttcttcatgttttcttgtggtggagccccgtacacggatttctcgtggttttgcttttgttacaatggaatctgctgaagatgcggagcgcctgtatcaagtatctcaatcaatcagttttagagggtcagatgtacatcactgattgagcaggtcacgaaagaaaacgtgtaagaactccaactcccatgacactatcttggactgaaaaacattagggagtattggtaatgtgttgagcaagtggatgtagtcatgatgtcatttgctatggtggtgaccgtggaaattcggcaatgtcgtggctttcctatggatacagtagagattgctgaccgtgggaatctctccatcatgtatctcaatcaatcagttttaaagggtcgttacatcactgttgagcggtcacgaagaaaacgtgcaagaactccaaccccagggcactatcttggactgaaaaacacaagggagtatggctatcgtggtgaccgaggtggtgaccggggaaggtatcgcgatggtcctgaccgtgacaattactcacgtcgtaggtctccgaggcgttcaccatacagaggtggccaagattattctccccagcgctcaccctatggtggaaggtctaggagggaaaggtctaggtcacttccttattctccacatggtagcccagacaggaagtatgctcgcggatctaggtgatgtttatcttagcattctactatttgaacaaggtaagcaaaaatttgttgactatatggtgctgtgactaccagtttgcgcctatatacaatgtatacgtttattggtggaagctgctgttcctgtgtgactatcagtgtgccttttctcgaagtcacacagaaagttagagtggacaaaagtgtggaaatctgaatttgaagtatgtaagcatttgctatagggaattgagactctggcttaaaaaaattttctgtgtgcgtatgcctcaaacgtttttgcatgtgatgctgtctacgatttaaacccgtatttttagccgaaaagcatttcctatagggaaaatcttcgctatattactgttgagcggaatacattgcatcaactattttggcagcaatcaaagatgatcagttcatccatgtcaactttagtgatacagcttgatcaatggcaagcttaaacagctaatcaaatgcttctgatcaactaaacatagcaactatattgtccaacaactttacaacctcagcattcactttcaactcaactaatcaacggacattatcaacaactntctaatcaggcttttatggtatctcatgcctagcattaatcgtgtgtggatacaactttnnttcttttttatatgctaggttgtttatgntgataaaactttcttttaaagacacccttaaat

SEQ ID NO: 103480 - DNA, 345 bp, Glycine max
  Clone ID: PAT_MRT3847_64460C.1
ctctctatgttctatcataccttttctttgtggatacaaatgttcgcgaagaccatcacagatatgatcatcataatttaggtaaaaagctctggcaccatacaataaaccatggcaaagacccatgacatgaaaagaattaccaagaatcagcaattgtgaatcttaacggctagcattttaaatacactcagaccctcgacaactacctcatacagaacgattaaacgcttgaacttatgattcgcgtactacatagcatgcagatcatggtaaacactgtcactgcgacaaacattactctatatttccaaagctcagagactatagacaacctcaaggaca

SEQ ID NO: 103481 - DNA, 1944 bp, Glycine max
  Clone ID: PAT_MRT3847_64461C.1
cttggcttttttttttttttttttttttttttttttttttttttttttgttgggtacagctgcgagaagacgacagaagggggcatttctcaaaggaacaaagaaacaaagaagtaaacacactgtttcatactttcgtttcgttcattcggcgtagaagcaaaagagagagatagagagagggaaaaaggttgctaccaacaacaaacaaaaacagtgttgcttgattccgcggtggcgagaaccgacgtgagcggcggaggagaggcgcggaacggtggtcttcagggttttctgacgtctctgttctcgaccctcggcggtgttttcgggtcaacgtttcaagaaccgcatcaaagtgttatcatggcttccagattggaacaacagcaacaacccaccaatgttggtggtgagaataagcagaaaaacatgggcggtgaaggaagaaacagaagggtgctgcaagatattgggaatctcgtgggtaaacaaggccatggaaatggaattaacgtgtctaaacctgtcacaaggaactttcgtgctcaactattggccaatgcacaagccgcaacagaaaagaataagaaatcaagcactgaagtgaacaacggagcagtggtggcaactgatggggttggtgttgggaattttgttcctgctagaaaggtgggagcagctaagaagcctaaagaagaacctgaagtgattgtgattagctctgatgatgaatcttccgaaaagcaagctgtgaagggaaaaaaggcaagggaaaaatctgccatgaagaatgccaaggccttcagttctgttctctctgctagaagcaaggctgcttgcggacttccaagggagtttgtgatgaacattgatgcaactgacatggacaatgaattggcagcagccgagtacatcgatgatatctacaaattttacaaagagactgaagaagatggttgtgtgcatgactacatgggttcgcagccagatattaatgccaagatgaggtcaatccttgtggactggttgatagaagtgcataggaagtttgagctcatgccagaaactctttatttgaccttgaacattgtcgatcggttcctgtctgtgaaggctgtgcctagaagggagcttcagctggttggcatcagctcaatgctgatagcctcaaaatatgaagagatatgggcaccagaggttaatgactttgtgtgcatatcagacaatgcttatgttagtgaacaagtgttgatgatggagaaaacaatccttaggaagcttgaatggtacttaacagttccaacaccctatcacttcttggttaggtataccaaagcctccactccgtctgacaaagagatggagaacatggtgtttttccttgctgaacttggattgatgcattatcctactgtaatcttgtaccgtccttctctgattgctgcttctgctgtgtttgcggctcgatgtacccttggaaggagccctttctggacaaacactttgatgcactacacaggctactctgaggagcaactaagggattgcgccaaaatcatggccaaccttcatgctgctgcaccaggaagtaagcttagggcagtttacaagaaattctctaactcggatctttctgctgttgctcttctttctccagcaaaggacttgtcagcactgtcttgagcaagcttaggatgggaagtttaggttattttaggccccgatcatgattgttatgatctatattatataggctttatattcgtttatattttttttcagtgtgatacacaaaagtgtttgtatttggaatttgctaggaattgcttgaagcctcaagctaagtttgatgattctttttgtgtaaagcagaatttgaaatattgctaggaaatattgagtgagctttgtcaattaaaaaaaagaaaaaaaaagaaagag

SEQ ID NO: 103482 - DNA, 866 bp, Glycine max
  Clone ID: PAT_MRT3847_64462C.1
tgcggctgctacttactgtacgagcttggttcttccacgcgtccgcccttctgttggattcaccggaatacttgtgcttcttgttttcctctctgcttgctgttcttctacacatgggagtttggaaacggagaaaacttttgccattataaaaccagacggattgcttggtaactacacagatgatatcaagagaacaattgtagaatatggtttcagaattttaaaggaaaagattgttcaactcgatgagggcactgtgaaaagtttttatgctgagcactcttcaaaaagcttcttttcaagccttataaaatacatgacaagtggaccagtgttaattatggtcttggagaaggacaatgctattgctgattggcgcgctttaatgggtcctactgatgcaagcaaggctaagattactcaccctcacagtatcagagcaaaatgtggattggatatggaaaaaaattgtgttcatggttcagactctcccaaatctgcgcaaagagagatatcatttttctttaaagagctctctgcagaatttctgttgaaactaatagttgtcttttaaaaaaaaatggaagaaagggcatctcgacgcactcattaacttgctgatgtggttgcagagcatgatgaattgtagctgctacaagttttaagctcaaacccaactttatttgcattttttttaggatctctatagttaattgtagcataatggattatataaggggaaagcttgtttattgggggaaaaaaattgtatgaaacgccccgaaaaatatctattcatgttttatcccatccctttatatattttcgccccccaaaggaaggtcctcaagttcaggttttcc

SEQ ID NO: 103483 - DNA, 446 bp, Glycine max
  unsure (1)..(446): unsure at all n locations
  Clone ID: PAT_MRT3847_64463C.1
gggaanggttccgccgccgtacatcatccanacgcacagcacagcaggctctcgtgctacgcttcacaatacccacctcgagctccctgagaatgtgcttaactttttcaaaacttccaaaggactccaaattccaaaacctggctgagctgcgtgacccaagaaaattataaaaacaccctattggtcaattaatgcaggaatgagatgctccacctttatcaaacaaccccagactacaatttatggcatttgccacaactcttcaaaacaaatttgaaataaattaaaaagaaaagaggaaaatctatataatttcaaaagctgaaaaaaaaaatagaagactcaataatcaaaattccgattctgctatagcatttttcctctcctgtccataacaatggcgaatgcaactattgtaccatcctctgtattttaccagggtt

SEQ ID NO: 103484 - DNA, 245 bp, Glycine max
  unsure (1)..(245): unsure at all n locations
  Clone ID: PAT_MRT3847_64464C.1
tactagtgaatgggagaaaagaaaggttaaagggaaggttgcaatacagaaaatggttgtggacttaatggtactctatctacataggctcaaacaaagaaggtctctatatccaaagagtcctgccatggccgaattcgcagccctgtttccttatgaacctaagccagatcagngacgggcacatattgatgttgtaacggatttgacagatagagaaactccatggacagattatttgtgga

SEQ ID NO: 103485 - DNA, 619 bp, Glycine max
  Clone ID: PAT_MRT3847_64465C.1
tcttggtttctttctagctttcttgcacgtattctttctcgttcgtgatactcaatagattcaattcaatctttattcatttctttctgtttttttttttatttcaatttctctcattccaatcttccaccatggctcccaccccttcttcgaaacaaaaccaccccactcaattgaagactccacagtccaagcaccgtctcaacttcaatgccctcaaatcagcgccacaaacacacccttctcccaaccctaattccgttgcaaacaaggaacccccaccagaacacccaattgaagtcattgccagaatccgtgactacccagatcgaaaggacaagcctttatccgttcttcaaaccagttccaactctagttccatacgggtacgcgcggatttcgggtaccgggactttaccctagatggggtttccgtgtctgaggaagaggacttggatgtgttttataagaaatttgtggagtcaaggatccatggggttaagctgggggacaagtgcaccatcatgatgtatgggccaactggttctgggaagagtcacaccatgttcgggtcctccaagcagcagggattgtgtataggtctctgaaggacattctt

SEQ ID NO: 103486 - DNA, 467 bp, Glycine max
  Clone ID: PAT_MRT3847_64466C.1
tttctttctagctttcttgcaagtattcttcctcgttcgtgatactaaattggggtcacagattcaacccccgagagattcaatccaatctttcttctcatttctttctggttttacaatttctcacattcaaattctccaccatggctcccaccccttcttcgaaacaaaaccaccccactcaattgaagactccacagtccaagcaccgtctcaacttcaatggcctcaaatcagcaccttctccgaaccctaattctgttgcaaacaaggaacccccacctgaacacccaattgaagtcattgccagaatccgtgactacccagatcgaaaggacaagcctttgtccgttcttcaaaccaattccaactctagttccattcgggttcgtgccgattttgggtaccgggacttcacccttgatggggtatccgtgtctgaggaggaggacttggatgtgttctat

SEQ ID NO: 103487 - DNA, 451 bp, Glycine max
  Clone ID: PAT_MRT3847_64467C.1
aaataatgtttcaacacgtggacattaatttggggcaaaaaggttaaatgaaacagttaataagttcaaactttgggttttctaccaataatatcgatgaaactgtaaccttttaaacataacaaggattgataagttgttttttttaacttggttagatagtaaaaggtcttgaaatgctgaatacctcacattcttcactcattttctcggttattaagtttccatccgagaataaatgattatgagctatcacaggcttgtcatccgaacataaaagatttatgccttgccaactgacttaaaatactcagagctgtcccaccccttttgtccaaattgctactcaaaactatccttttaaagacattgctaggaacttgaattaatcacatacctaacccttttcataactatggaatgcatccctctgtgggggagaacagacaag

SEQ ID NO: 103488 - DNA, 376 bp, Glycine max
  Clone ID: PAT_MRT3847_64468C.1
ctcctataaaattcttatgtattattgaagtcaaacatatggatcgtcctgaataggagatcaccagacaaaaaaaaaaaaaaactataatactatcaaattcgcagagcactgttacatagtatttttgttcttaatcaaatgtcatctgttcagcttcatgccgaatggattcaaacaatggtgaagataaataacgctccccgtaactaggaaataccacaacgatgagttttccggcattttctggtctcttccccaattttatggcagctgcagctgcggctcctgatgaaattcccatctgaataacttcatctaggagattaaaatccagtacacttggaatgagaccattaccaatcccttggattag

SEQ ID NO: 103489 - DNA, 948 bp, Glycine max
  Clone ID: PAT_MRT3847_64469C.1
aatacagatcgatgcttctgtgagtcttgagagaagctggcatagccactatgactttataccccttcaatgttgctacgaatgccagcttctgtgagtcttgagagaaaaattgttccgcgatccttttgagctgaagtctaactcacttatcttgcttcaataaacattgaatttctaatcaaggcggagcagttagtgtaaaattcgacacgttgttacaggcttcgacagatagtgaatcatgctaatccaagaaatcaattcgagaccactggtcctgagattaggagagactccggagggaaagatgatgctttggttgcaggggtaggaaccgggggtaccataacgggtgctggcagattaatcaaggagagaaactccaatgtcaagctgtacggcatagaaccagttgaaagtgcagtcctcagtggaggaccgccaggtgatcacctaatccaagggattggtaatggtctcattccaagtgtactggattttaatctcctagatgaagttattcagatatcaagtgaagaagctatagaaactgctaagcttcttgctttaaaagaagatgggaatttcatcaggagccgcagctgcagctgccataaaattggggaagagaccagaaaatgccggaaaactcatcgttgtggtatttcctagttacggggagcgttatttatcttcaccattgtttgaatccattcggcatgaagctgaacagatgacatttgattaagaacaaaaatactatgtaacagtgctctgcgaatttgatagtattatagtttttttttttttttgtctggtgatctcctattcaggacgatccatatgtttcacttcaataatacataagaattttataggaggaagaagaatatgatgggaggtgccgctagtgatcccttattcagaacgattagaaatctccgc

SEQ ID NO: 103490 - DNA, 791 bp, Glycine max
  Clone ID: PAT_MRT3847_6446C.1
ctgagaaccaaaagaggttgaaacgacgtcagagaaacctcgtttcgggccttcagaaagcaggcattagcacccttaagaccaacaatgcaggcttgttttgctgggttgacatgaggcaccttctccattccaacacattcgaagctgagatggacctttggaagaagatactctacgaggttcggttgaacatttcaccaggctcgtcctgccactgtaccgaacctggctggttccgaatgtgtttcgctaacatgtccgaagatactttaaacatagccatgaaacggttgaagaccttcgtggaagcagagtcaaatgacaacgggtgcgacaagaaaagagttcagtcttcaggaaattcttcaagaagaaagtcactctccaattgggttttccggctatcgtctcgcgaccaccgtgagcaggaagaacgatagccaggtcgtgacgtgaactgtgaacgcatgcagaattaactttattcattttttttcctccccgaatatttttggtggagttacaagttaattacaaccacttgttgttgttattaatcattattactattttttttaatggtgaaatcgtagctagagagagaaagacaagcactctgtccgtttggatgtgaagtgtggtctttaattagtcagctaccatcgtttgtataacttccatctcaatcatcaatatattaccctatgcatgaaaaatcttattagtagtgtacgatatatggatgtataatttatcaattatcaattactttctccatggtcccacag

SEQ ID NO: 103491 - DNA, 459 bp, Glycine max
  Clone ID: PAT_MRT3847_64470C.1
gacatacatagagagagagagcgagtctctaatactatcgaacctaaatgcaatacgtgtgtggcaaacttcactatactattgcacaaatccatattaggaaaaaattatcacattacaaatctatataattctctatactagagaatataaagtttgcagctagtccttttcaatcagctaatcataactttcactaggaacaatatcaagatcactccctcttgctacagaaacttatataaacagtatatgaaatattttaccaaaaaatactttataatacatacaatgacgcattgactaatattgattgaataaaactaagaacggattatcaaaaactttatatactttaacatcacttataacgagattcaacaaaaaaacataaaatctaattctctgactaaattcataatatgtatatgtttagatattacggattctcatttatat

SEQ ID NO: 103492 - DNA, 163 bp, Glycine max
  unsure (1)..(163): unsure at all n locations
  Clone ID: PAT_MRT3847_64471C.1
gcaaatattgantgaaaatgntgtcaagaggtattctcagcactgcncttcaattgaataaagtttaggnaagaatagnnnnnnnnnnnnnnnnnnnnnnnnatatntatatatagttgtnctntaatttctcagttgaatnaaaagtttgcctgtttntcta

SEQ ID NO: 103493 - DNA, 803 bp, Glycine max
  Clone ID: PAT_MRT3847_64472C.1
gaattcgagctcggtacccggggatcctctagagtcgacctgcagtgcaagatggagtggttgctggtttaggcctggggtcaatccttaaccaaagcttataggccttgtcagtcaggaaccaatactcttcagttgcagcatcaaagaaaacattgcctatggtaaggatggggcaacaaatgaagaaatcagagctgccactgaagttgctaatgcagcaaaattcattgatagatttccacatgtgagttcgcactttcatattttgaaatttccattgttctgcctttgcaacaatattaatttcaaatttcacaatacgaagactactacagcatcaggaaccaggaaaagtgaactgtttgtggctgatgtcaacacccagttgaagaacaaaaacatcactactgatatcaaataattattcaacagggaggataatagacagtgctaagattcttgcttggagttttagtgattaaaatttttcaattggtgatgcattagtgacagaaaatttgccttcatttgttcatcataaaaagtggtttcctggagcacaagctttcgcggtaggtgtcaccagtattgtgtttgtgttaatcattggttttggttatgtcgcatttttcgttctccgcagaagaaagacacaagaagaagttgaagattgggaaactggagtattggcctcacaggataggttttcatgagatcgatgcagcaacaatgggggttttctgaaaagaatgtggttgctgtaggaaggacccaggaagtatataaaggggttttgcatg

SEQ ID NO: 103494 - DNA, 520 bp, Glycine max
  Clone ID: PAT_MRT3847_64473C.1
acggctgcgagaagacgacagaaggggtctttgaatttcttattaattcttatcatcattatatatttgagttgtgacttctttgtaatataactttatacaaacctcagaaagagacagaatatcactaacagaattgaggtgaagagttatattattcaacccaatgagaaaaggttacacctcggtttatataggcagttacacaaaagtaactgtcaactgactctagtcagttaactataaaggcacactaaactgtagttaggcctatacatagaagctaagaaaggaaaacagtctatcgagtaaatatactcctatacccccccctcctcccgcaagctcatgagaggctggaagtaaacttttcagccactccgagcttggatctgtaagttgcaaaattggaaggagttaaagccttggtcaaaaaaatatatggaaccatttgtatggtatccctatcagtacctctggtactcctttctatatttatacaatattatctttgctgata

SEQ ID NO: 103495 - DNA, 135 bp, Glycine max
  unsure (1)..(135): unsure at all n locations
  Clone ID: PAT_MRT3847_64474C.1
cgaaaccctaaattcccgactcctcncaanccattcggttcactccctgcaacatcgaagagtaaagaatggggngacaaaaanaagcaggcttcagatggttagtnaagctaatgtcttgnggctgggaactgg

SEQ ID NO: 103496 - DNA, 224 bp, Glycine max
  Clone ID: PAT_MRT3847_64475C.1
gtattccattcgctcccaaaatcttttcgaagttgttcataactcaagagttctcagcatgggctccttgattgttgtaggtgaacatgatcataaacgatggcttgtattctcttccctttgtatgatttagtcatctcattctcgtactaggacatactaggctctttgcgactcatggtgttgatgtcactataatctacaccacatccactgtcgcaatt

SEQ ID NO: 103497 - DNA, 338 bp, Glycine max
  Clone ID: PAT_MRT3847_64476C.1
acataacggaatttatatgatggaagttgatcgagttctaaggccaggaaactatggtctgctctatggtgattgaatcagatccaaggcgtagctacaaacactagctgagacctaatctagaacttgcgaaatacctaatactgattgaagagacgtgtacatcatacattactgtttcactagagcatacttcaggagaatggccattatgcaaaaggtttcaaagccttgaagatagctattaacaaaaccttaacctaggttggaatgatccaaatgataatattgcgacctcaccaggattcagcaattggatccactgatatcactgattc

SEQ ID NO: 103498 - DNA, 814 bp, Glycine max
  Clone ID: PAT_MRT3847_64477C.1
ctccattccttcaacagttccaacttctcctttgaacaatggcttctcaaaaccctaatcagagaaattctctgtatccacaagtaatcgattctaaccccgatgctccgccgccactccttaatcccaatcgttcatcctcttcgcaacccagcctctacccttccgttgactacaacgacctcgtccaaaacctattccctgaggatgccaccgccgccggatccccctccgcgccactggaggccaccgaggaggccctcctccggatccccggcgcgatcctcaacctcatcgacaaggactacagcgtcgagctcgcgtgcggcgacttctccgtgatccgcctccggcagggcgacaacgccgtcgccgtgtacgcgcgcgtcgccgacgagatccaatggccgctcgcgaaggacgccaccaccgtgaaagtcgatgattcgcactacttcttctccttccgcgtccccaagggttccgatcccggcgaggaggaagaagatatgctcagctacggcttaacgatcgcgtcgaaggggcaggagggattactgaaggaactcgacgtggttttggagaactgcagttgtttctccgtgcagagtgtttcggagaatgtcaagaagaaaggggaggcgctggatggttccgtggcgagggaggtttcgccgaaggatatggagtcggggaagaagaaggagatgatggagggggcggtgcgcggcgtattggaccacgttggcgcccaatgtggaggattacagtggaaaaactgcgaagatgattgctgcagggtctggacatgtgg

SEQ ID NO: 103499 - DNA, 958 bp, Glycine max
  unsure (1)..(958): unsure at all n locations
  Clone ID: PAT_MRT3847_64478C.1
tttgaaaatttgattttatttacaaataagcaaaacaaacatgtgctatgtcaacttgcaaatgtattttggcttgatgtgtcgtacattttcaatttcaaatgaagattttgaaaatttccacattaacatttaggcgagtatgcccatccccaccctttctgtttttggatacatcatatatgcagcgctgatgtgtatattatgatgttcttgtatttttgttacttcttgactttgtttgttgcataattggaagtgtttatttaaattagcctattgagagaataaaataacactatttgaacaaattagtaattatgtggagttggatacatttatattccattttccctactttttactagtaaattaataatgtgatctgtttcttattgactttagaaatcctttggtgattcatatttcattttgatgtatttcttggatttgatttttaacagtactgaaatgcaagtcttgatgaataattgtctaaattcttgaagttaccttttcagcactacaataaacaagcacttgataggttgttgggttcatttactattatttgcaagcttgtcaaactcatgggtgtatgcaaatttgtggagcctttgtagactagtaaactattgttgctttatataaaaataatatttaaaatgcttataacctattgtaatatccaaacagattttaatgccatgtacataataaatattcacattagcaatcagtaaatcaacctcagtaccacacaaccaaccaaccattcattaagaaaacaatatctcataattaaccaatcaacatagagtacagtaccacccaggtaaccatactatgaaggacatgcaagcaagggcccatgggattgcgaagttacgtggctctgcccaattccttctgattctactcaccacattttctatcatacaattcnactttgttttcc

SEQ ID NO: 103500 - DNA, 606 bp, Glycine max
  unsure (1)..(606): unsure at all n locations
  Clone ID: PAT_MRT3847_64479C.1
ttttcctttcatttcatttctttctctctagacgttactttctctattctcaaagtcacacacagcactttctctctcatcttaactctctcccatgtttcctcagtttcatcgatggagagtgaagccttaactctgcttattccgtgtcccagatctcgttgttgcttccgattctttgattcttcgcttctttcttcttctcacttcacattccgattcgtcgcattcttttggtttctaaacatcatgatcgtcactgcctccatctgtaatcgagtggactagtgtcatgaaggtggtggttgggttttttattggggggattcnttcgttcgccccccccccccgccgtttatgggtgcacctacttgatgagccgtatcaacaactatatatgtatttttttatttatgcaggttagcaaattataaagggtgtgcttggatgtctggttatccctcaaaaatctgtgactgtaaattttaatctgcaaaccttaatctaaactggttgtaatttttcagtctatactgctgagaaattcaacttatccaactacncaaataattcaataaaaataatttctttagcagctattgaacg

SEQ ID NO: 103501 - DNA, 108 bp, Glycine max
  unsure (1)..(108): unsure at all n locations
  Clone ID: PAT_MRT3847_6447C.1
aggaatgccaatcagtgatctctactcaggtctgttcgagcaagatatcgttgggtttcagagtccncttaaatccaggtcccatcaatattgtgaataaanaacaca

SEQ ID NO: 103502 - DNA, 371 bp, Glycine max
  Clone ID: PAT_MRT3847_64480C.1
gtcaacaacataatctctaacagactttctattattgactaaaatttattaaaaattacaaaattttgtgggtctcactttttaattatttagtgagtcttaaggttgtttttgtaatttccaattacagagagtctgttaaaagaagtatgtaacaaaatgtgtggccaacacttctcttcagggaaaatgccatcctcttgattaagtattgcttcaatatttgaagtaatagtgatcttacctgatgcattacccataagctttgtgtctctaaaaccaatagttacagccaaacacaagagcatcaacaaccagttgatctcagggatatatacttgtccatggattttggatgaagtgtgaaccac

SEQ ID NO: 103503 - DNA, 367 bp, Glycine max
  Clone ID: PAT_MRT3847_64481C.1
cgatttatatctcgcgtgggtttgtttgggacttgcagaacggaacctgaaagtgcaccagctctatctataaagagagggattagtattagacatgaacgcagccatagccataacttgtgtcaaatcgaaattgacatgcaatatcaaacacccaccaaatacgagccggaaagtgtaattaaagagaaggctgaggcgcatgagtgcgcacacaaaaagagaagcgcttacagtgcgtgaaccctttggacaacgtgtagatccagtggcaataacctttctgagaaagcaaaagggggggcagaaaaaatatgggttgacagcgcttttatggttcaacctaacgagacggggaccatttgca

SEQ ID NO: 103504 - DNA, 151 bp, Glycine max
  Clone ID: PAT_MRT3847_64482C.1
ataaacaaagaaaagttgtttgccgtttttttctacctaaaaaaggaagcgtgcttcatcaaggggtattaatacgacctcatgcttatgcacaacggatccactttgaaatagatcaaaaagtcgtggaagtaattcccaataagaaaag

SEQ ID NO: 103505 - DNA, 336 bp, Glycine max
  Clone ID: PAT_MRT3847_64483C.1
cggtttcggaatcccgcggcgacccacgcgttcgcccacacttcctcccactcattcgtacggctttctagaagactacagaagggggcctagggggagaggaagcttcttctgcatgaagagttttctgctggagagacattttacagctcctaaagtcaattagctattcagggacttggttggtgggttgatagggtcagtccgtatgccgttcataggatatttaattgagtcatatcagagctaatatgactagcatctacgggaccctatataaacttgacacgaaaatttagggatatcgtcattcagtaagcgtagccagacatggac

SEQ ID NO: 103506 - DNA, 261 bp, Glycine max
  Clone ID: PAT_MRT3847_64484C.1
atctactccatgctccctttcagcaactcaaggctcctactttcttcactgttacgttccacgcgcccgcgcaaggcacccacggatcaagacatgtacaaagcaggttgggacggcaactactggggcgccatatcagcaaccgcagacgcttcaagccgcctctccgcatggctctccaaggcggcgaggctgcacaaacatacaatgctgccgacgccctccactggatctggaaccaacagcactacaccacatttt

SEQ ID NO: 103507 - DNA, 249 bp, Glycine max
  Clone ID: PAT_MRT3847_64485C.1
cttcattcaacttggcttccacacaacatacaactctgcttattacccttgcaatggtggcagagtactcttaaatatctattgcacccgaacatacaaatcacaatacaataataaagcatgaacccctattaaattctctccacacccatctttctcccttagaaaactcaatgactaaaaaaccatagttttcttcttcctagcacgtaaaaatgttcatgagtccaatcactccaatggaaaaga

SEQ ID NO: 103508 - DNA, 688 bp, Glycine max
  Clone ID: PAT_MRT3847_64486C.1
ctctccttctgtgtaaagcttgtagtaactctgagtgccgtgtgagagagtttctggcaaaaactccattcccaatttccaattctgatttgttcaagtaactaacttggtgttggtgtagtatcagtgcatcacacaacacaattcactcactagtcactacctttggtgaaacaattcaatgggtggagatagtcatagtgctctgaaatccagagaagtatcagcgatgataaagcagggtttcatacccgacccaacccactctttctcaccttccagaaccttttctcctcctccttcctcaactcgcccgagtcagactcagactcagactcagtcccatactcactctcaccctcacactcagactctcttcgacatgatgtcggaggagcacaaattctccgacgagaagcgccgcaaaacgcaagatcgagtctccaggctcctcgacgagcccgccctgcgcggcggcggcgacgtcaggctcacggtggtcgccagggacggtttcagggcctcgatggaagttcgcaagaccgttctcgccgacaagagccgcttcttcgccgacaagcttcgctgcgccggcggcgatctctcccactccgtcgagatcagcgactgcgacgacatcgaagtgtacgttgagggcatcgttttgatgcactgcgaagatctcaag

SEQ ID NO: 103509 - DNA, 544 bp, Glycine max
  Clone ID: PAT_MRT3847_64487C.1
ccacgcgtccgaaaaaaaaaaaaaaaaaaaaaaaaaaaaaaaaaaaaaaaaaaaaaaaaaaaaaaaaaaaaaaaaaaaaaaaaaaaaaaaaaaaaaaaaaaaaaaaaaaaaaaaaagggggacacgctttaaaggacccaaagcttccatacccgggcatgcagaaggaaataaattttatttagggggggggggcccctttaaggggccccgggttttcccccggggggtcgggaaaaaccctgttttttccggggcccctttctttgattcccgggccccttttttcaccggggggggtggggaaaacccccgggctgcccccctttaccggctttggccccccccccttttccccgggggggcgccttgaaaaggggcccttaccgcggcgcttttccaagttttggcgcaccgggacgggtaactgccccccccttaacgccccctctttcccggggggggggggggtttcccccccggggggccgtttttcttggtcaggcttttagccccgggcttttttttgggttccctttctttg

SEQ ID NO: 103510 - DNA, 298 bp, Glycine max
  Clone ID: PAT_MRT3847_64488C.1
ggaaagccggcacggagaccccccgctggagaagcaaaggcggaaagatgctgaggaagacgacgacgatgacgtggacctcgacggcgaagagacacaccaaaagacgaaggcggtaaacgaacgggaagctgcggagaagggatctcccaagaaccaagagcgcgggaaaccaaccgtttttttttatgcgaaaccaagggatgacgagcacgacatgaagacgccccaacaaatagggaaatcggcggagacggaaaggatgcggcggggggcagccacacccgaacgtgtaggg

SEQ ID NO: 103511 - DNA, 109 bp, Glycine max
  Clone ID: PAT_MRT3847_64489C.1
ggtcatcgttgggatctccataacgccggattctgctaaaatacgcttgatccatatgggccttcctcgacgcacttgtgggatcgaacaccgtcgcccggacccaagg

SEQ ID NO: 103512 - DNA, 1769 bp, Glycine max
  Clone ID: PAT_MRT3847_6448C.1
tacggctgcgagaagacgacagaaggggatcccataaaacgaagaacaaatggcatctatgtgacgggccttgcagataacaagtgataaaacaagtgacaacgtggcaccttagctacccgatttcttgttcacaatattcaaaattggaaaaaaaaaaaaaaaactccaccatttatactttcctcctttgcatatcacacctctggctcgagaatgcatccatccagagcactaaaaacaaatcccaacatctgaaaggggtagagtaggtatttcaatctattatccatattgtgatgaagaaggaacaagaagagggtctcaagattgaggttgctacactcacagttacagtagttgttgtgatgctgtcattgctatgcacatgtggggcaagcaacctcgaccctttgattctaataccaggtaacggagggaaccaactagaagcaaggttgaccaatcagtacaagccctctactttcatctgcgaatcatggtaccctctcatcaagaaaaagaatggatggttcagactttggtttgattccagtgtcatacttgctcctttcactcaatgctttgccgaacgcatgacccttcattaccaccaagaactcgatgattacttcaacactcctggggttgagacccgggtccctcactttggttccaccaactctcttctctatctcaatcctcgtctcaagcatatcaccggatacatggcacccctggtagattcattacaaaagcttggctacgctgatggtgagactctgtttggagccccttatgactttagatatggtctagctgctgaaggtcacccttcacaagtgggttccaagttcctcaaagatctaaagaatttgatagaagaagcaagcaattccaataatgggaagccagtgatacttctctcccacagtttaggaggcctatttgtcctacaactactaaatagaaaccccccctcttggcgcaaaaaattcatcaaacacttcattgctctttcagctccatggggtggtgctatagacgaaatgtacacctttgcatctggcaacactttgggagtgcccctagtggaccctttattagtgagggatgaacaaagaagctccgagagtaacctttggcttttgcctaacccaaaaatttttggtcctcaaaaaccaatagtgataactccaaataagacctattcagctcatgacatggttgattttctaaaagacattggttttcctgaaggggtttatccttatgaaacacgaattctacccttgatagggaacataaaagcaccacaagtgcctataacttgtattatgggaacgggagtgggaaccttggaaacattgttttatgggaaaggtgattttgatgaacggccagaaatatcatatggggatggtgatggaacggtgaacttggtgagcttgttggcgcttcaatcactatggaaagaggagaaaaatcaataccttaaagtggttaagatagatggggtgtctcatacttcaatacttaaggatgaagttgcactaaatgaaatagtaggtgagattacttcaattaattctcatgctgagctcggtttaagtaatttgttttcggggtaaatgatcagggtgtttgaacgacaattatagatccgttgtctgaaaattaaattttgtgtggggatttatattggcatgtttcttgttgatacgagaattaaaatgttatgatagggctaaagatcaaagtcgtaaaaa

SEQ ID NO: 103513 - DNA, 283 bp, Glycine max
  Clone ID: PAT_MRT3847_64490C.1
ggctcgaggcgggacctacgggattgtttgcggatgtagcgccagcggggggtaacctaggaagacactcagaccgcccatggcgtaccaaggttagcttggacacatagtgaaggccttgtgatgctaccctacaagcatgagaaagctaccacactgagttggaactagagaggcatgagatgttagagcgacgtctttcacagctgaggagatcgttgcgattgccaagatagctgcactgacggtggatgctgcacccgtggattttctgatacacaca

SEQ ID NO: 103514 - DNA, 584 bp, Glycine max
  unsure (1)..(584): unsure at all n locations
  Clone ID: PAT_MRT3847_64491C.1
gagccgttcaaatctgcaaattccttattattgttgagttaattacaactcaaaatttcctctcccggccctttcatcggtcgaaacaaaaaaaaaaatagtggaagtggtagaaacaagagcggaaatagcacaatattagttctatattttttttcaaataaagaatgtaacagaaaagatattacttgagatggactattttttttttctttttgttttgtatttagagatggactaatttgaaactgaagtaaatctgatatatacgttatagacgtttataatcatgggcactgtggattgttcccaggcccaccgtagtaaaagtaggtgccccattcgttgctgtagtagctcttaatgtcgtaacagtttgtattttcggctaaggttgagatgccctgcacagaactcagattgttatccgtgtctacggtctgaaggttccggaagtagcttgcttttccgaaaccatcttctgcgaagtgcccagagcccatttgggtaaaggtgtgttggccgttggttcgtgagttcacaaccttttctccccactccaccatcgnggcgtggtctgctaa

SEQ ID NO: 103515 - DNA, 154 bp, Glycine max
  Clone ID: PAT_MRT3847_64492C.1
tacggctgcgagaagacgacagaaggggaaggcacacttttctttttgggttgcaaacacgcacggaaacctttgatctcagtcaccagtaagcagtatcgcaactcatgctctgcgtctgtctccgatccatgcgttaagttaaccctttccg

SEQ ID NO: 103516 - DNA, 295 bp, Glycine max
  Clone ID: PAT_MRT3847_64493C.1
gggttcgcctcaggtactgttacgcaaaaacgggaacacaggcagacggagattagaacctggagcagaagcagagatgactcggtttccagaaaccatcaatgaataggtattcatcagggtacgatttgtaacgggaaagagaatcactatatgggctggccacaaacttcctgaataatagaatcttccactcttaaaaaatttggtgaacactatgatatgcgtgataagtattctcgctatagagaaaaaccttgtggtcctttataagttctttgattaagtgaaggtc

SEQ ID NO: 103517 - DNA, 3368 bp, Glycine max
  Clone ID: PAT_MRT3847_64494C.1
tgttcagccccacaatataaagctaggggatggaagattttatcgtgtaaatgcacttgtataaacttgcacacacacacacacacacactttagcagtaactcatttttaacttgcaaatatattttaccctctaataattaatgtattgttgtctactttccgaagttttatcaacggttttcagcttattgaaaccctttttattgtggtctttaatgcaacaagcctttggaaaaaatgatgcagcttgttaaagaaagaaaagtatgtatgttattgctaccccttgcaaatttcttgttgatgcatcaattgactataatttcaataaaatgtgattttgctgaagatcatgctgctgatccttgttgtttattataccttatgcgtttgttgtttttattaccccccaaagccaaatttattgtacctttccgattcccggtggacgcgtgcgcccacgcgtccgtacggctgcgagaagacgacagaagggggccttacaactttcgatatgaactttcaactatgaactttcaactcactcgaacaaaacaacaaaaagcttaaaaccagcaaattgaatcgctgcatcgcattcacatcactgtcaccatcatcaaccacaacaccaacaccaacaacaacgctaactgcttctctacgctccctctctcttctctctctcaacttccagattcaagaagtagcagttactgtgcctttggttcttctggtaaacagtagtaccttgattttcatgaatggtaaaatgggatccttgtttggcaaaacttttggtctttagtgtttggtgaagtagaaatataaaaacggcagcttaagaggtgaagaaataaaatggaaactacaaggcggtggtttagtaagttcaagtcaaatgataaaatgaattctgcaaaggacaaagaaactacaggcatgacaaaagaagggtcaaaacccccaacaagtgaagaagcaccttcaaatgtaaccaaacagagggttgaagctgcaaagcagtatatagaaaatcattataagaagcagatgcaaagcctgcaggagaggaaggaaagacgtaatatgctagaaaagaagttggctgatgccgaagtctctgaggaagagcaacacaacttgcttcagcatttggagaaaaaggagagggaaatcatgcgccttcagagacataagatgggggctgatgattttgagcccctgactatgatagggaagggtgcatttggagaggttagaatctgccgagagaaagcaaccggtcatgtatatgctatgaagaaacttaagaaatcagagatgctgcgcagaggccaggttgaacatgtaaaagctgagagaaatctacttgcagaagttgatagcaattgcattgtaaagctttatgattcctttcaagatgaagagtacttatatcttaatgtagagtatctacctggtggagatatgatgacattgcttatgcggaaggatatactgacagaagatgaggccaggttctatgttggggagactgtcctagctatagagtcaattcataaacataattatattcatagagatatgcgcaagcttgactattctagagtaggaacacctgacattatttccccagaatttgtattgtgtaaaatatgagtcgtggtctcttgttggtagaacgtgtgagctattaggtgtgaaatgatagtgggctttccgcgcttttattctgatgtgccaatgtagagtagcagaaagaaagaactttagagttgttataaaaaatttccagaagaagttgaccttgcagcagaagcaaaggatcttattagtagagtagtatgtaatgtgaaccaaaggcgcagatcatataggtgcttgccgatggaaattggttcatatgaaatgttagtggggtatccgcccttttattcagatgaaccaatgttgacttgtagaaagatagtaaattggagaaattatttaaaatttccagaagaagttaaactttcggcagaagcaaaggatcttattagtagactcctatgtaatgtggatcagaggcttggaaccaaaggggctgatgaaataaaggcgcacccatggtttaaaggtattgaatgggacaaattataccaaatgaaagctgcttttattcctgaggttaatgatgaattagatactcaaaattttgagaagtttgaagaggctgacaaccaaactgaaccttcctcaaaatcaggcccatggagaaagatgctgtcatctaaagatgtcaactttgtcggttacacatataagaactatgaaatcgtgaatgatgatgaactacctgaaattgctgaattgaagaagaagagcacaaaacctaagagaccatctattaagtcactatttgatgatgaatcagctacggctgccaatcaacctgtccaagggagcttcttaaacctcttacctactcaaacggaagttcctgaaaaaagtgaatctcaatgatccacaccagtaatatattacaggactttttcatggccatggaggtatgaccaaatgctgagttgaatactgattgttttagtctttcccacattcttttgttagtttggcgtggatagttgtgggagcaaaggctctgaaactttgtggttttggatagtgggttttggcttgactgggatatttgtctgtagaaaaatctttgaaggtatatattctttacatttttggttggtggtgtattcttttgttcaccatttatcaagctgcaatgtgttgagaatccaagttatttcttgtaattaagttactgctgaagtgctgacaaggatgtacaattctcacatgtagagattcattagtttgtaaggtaacattttcgttcttatcttacttcaaaaagtataatttttacaaattaaatccttatgatttacaaattaattacaggacttcttaatggccatggtcacaaccaaatgttaatgactactgattgttaaactttttctcacattcttttgttagattggagttgatggatttggaagccaggtccctgaaatttctggtttttggatgactgatttttttggctgactgggatattttccgtgtagaaaaatcttttaaggtgtatattcttcaattcaccttctatcaaactgcaatgtgttaaatatcatagttttttttcctcctgtaattgagttactgttgaagttgaaatgctgataaggatgtgcaattcacacatttttgtacagtatatagagattgatcggtttgtaggttaacattttctgttatgtgacattagggtccaaactttacaactgaaatccttgcctttaagtttc

SEQ ID NO: 103518 - DNA, 2003 bp, Glycine max
  Clone ID: PAT_MRT3847_64495C.1
gatgaattgttctttatagatattcttcattgtgtatatacatttggtaacctcttgtctgactttgttttgacaagttgctgacccctgtgttgacaaactacggcatttgaacttttttttcttttcaataccgcaggcctattctacagtcggaacacctgactatattgcccccgaagttcttctgaagaaaggatatggcatggaatgtgattggtggtccctgggagcgataatgtatgaaatgttagtggggtatccgcccttttattcagatgaaccaatgttgacttgtagaaagatagtaaattggagaaattatttaaaatttccagaagtagttaaaatttcggcagaagcaaaggatcttattagtagactcctatgtaatgtggatcagaggcttggaaccaaaggggctgatgaaataaaggtgttgtggcgcacccatggtttaaaggtattgaatgggacaaattgtaccaaattaaagctgcttttattcctgaggttaatgatgaattagatactcaaaattttgagaagtttgaagaggctgacaaccaaactcaaccttcctcaaaatcaggcccatggagaaagatgctgtcatctaaagatgtcaactttgttggttacacatataagaactatgaaatcgtgaatgatgatcaactacctgaaattggttcgtacattttcaattttatgtgtatatttgtttatgttttgtttaaacccttttatctcattttcatcatttttgttttgtaattagaaagttcctctttaatatattgcttctaataatcttagattcttttgctcctgtgacatttctgaatctaatggaaggtttggtgctctatcaattttattgcactaaaccttgtctatttgagcttcatattgtggggctgaacatgaggtttttattgctaggggatggaaaaatttatcaagtaatgcacttggataaacttgcacatactttgaatgttccagattgtgtacatactttgcatagtttgtgcaaatgtattttaccctctattaattaatgtactgttgtctactttcgtaagttttattgacagtttttggcttgtcgaaacccattttattgtggcctttaatgcaacaagcctttggaaaaaaatgatgcagcttgctaaagaaagaaaaagtatatatgttattgctagttgctgccccttgcaaatttctcgttgatgcattaattgactataatttcaataaaatgtgattttgctgaagatcatgctgctgattcttgctgtttattattgcttatgcgtttgttattttgattaccccccaacaccaaatttattgttcttttccaaatagatttatcattgtactaatcttaacaagcaatatgggtatgttgttatcagctgaattgaagaagaagagcacaaaacctaagcgaccatctattaagaccctatttgatgatgaatcagctacagctgccaatcaacctacccaagggagcttcttaaaactgttacctactcaaccagaagttcctgagaagagtgaatctcaatgatcccaactagtaatattttacaggactcttacatggccatggaggtatgaccaaatgctgagttgaatactgattgttttagtctttcccacattcttttgttagtttggcgtggatagttgtgggagcaaaggctctgaaactttgtggttttggatagctgggttttggcttgactgggatatttgtctgtagaaaaatctttgaaggtatatattctttacatttttggttggtggtgtattcttttgttcaccatttatcaagctgcaatgtgttgagaatccaagttatttcttgtaattaagttactgctgaagtgctgacaaggatgtacaattctcacatgtagagattcattagtttgtaaggtaacattttcgttcttatcttacttcaaaaagtataatttttacaaatt

SEQ ID NO: 103519 - DNA, 1653 bp, Glycine max
  Clone ID: PAT_MRT3847_64496C.1
gttgaacatgtcaaagctgagagaaatctacttgctgaagttgacagcaattgcattgttaaactttattgttcctttcaagatgaggagtatttatatctcataatggagtatctacctggtggagatatgatgacattgctgatgcggaaggatatactcacagaagatgaggccaggttctatgttggggagactgtcctagccatagagtcaattcataaacataattatatccacagagatatcaagcctgacaacttgctgctagatagaaatggccacatgaaattatcagattttggattatgtaaaccgctagactgcagtaatcttcaagaaaaggacttctctgttggaattaacagaagtggagccctccaaagtgatggacgtcctgcagctcctaatcgaacccaacaggaacaactgcagcattggcagaaaaatcgatgaattctttttatagatattcttcattgtgtatatacatttggtaacctcttgtctgactttgttttgacaagttgctgacccctgtgttgacaaactacggcatttgaacttttttttcttttcaataatgcaggcctattctacagttggaacacctgattatattgcccccgaagttcttctgaagaaaggatatggcatggaatgtgattggtggtccctgggagcgataatgtatgaaatgttagtggggtatccacccttttattcagatgaaccaatgttgacttgtagaaagatagtaaattggagaaattatttaaaatttccagaagtagttaaaatttcagcagaagcaaaggatcttattagtagactcctatgtaatgtggagcagagacttggaaccaaaggggctgatgaaataaaggctcacccatggttcaaaggtgttgaatgggacaaattgtaccaaatgaaggctgctttcatacctgaggtcaatgatgaattagatactcaaaattttgagaagtttgaggagggggacaagcaaactgtaccttcctcaaaggcagggccgtggagaaagatgctgccatctaaagatattaacttcgtcggatacacatacaagaattttgaaatcgtgaatgatcatgaaatacctggaattgctgaattgaagaagaagaacacaaaacctaaaagaccatctattaaggccctatttgatgatgaatcagctacggctgccaatcaacctgtcagagggagcttcttaaacctcttacctcctcaaatggaagttcctgaaaaaagtgaatcacaatgatttacaccaatattttgcaggatttctatatggccatggtcacaaccaaatgttgatgactactgattgttatacattttctcacattcttttgttagatgggagttgatggatttggaagccaggtccctgaaatttctggttttggatggctgaattttttggctgactgggatattttccgtgtagaaaaatcaattaaggtgtatattcttcaatccaccttctatcaaactgcaatgtgttaaatatcatagttttttctctctcctgtaattaagttactgttgaagttggaatgctgataaggatgtgcaattcacatttttgtacaatatatagagattgatcggtttgtaggc

SEQ ID NO: 103520 - DNA, 417 bp, Glycine max
  Clone ID: PAT_MRT3847_64497C.1
gaaacataggaccaaaaatgggtgaagcacagcctctacaacatgtaggccatggtgcagggtaagaggatcatgcttattgggctccaagtgctgcaccacccttaatgattgcaagaatcagagcagtaattccaaaacattgatgggagaagaacacattgggatatgtagaagctgtgactaagggatgagacgtacgggactgcattggaagctgatggaatatggttaaatagctggatcttatggccactctattggcctgcacagggcacaatgtgttgggcactttgtgttcttggacatgattggggtcatggaagtatttgaaacagtgctgtgctgaacagcatggtgggccacatgttgcactcttcaattcttgtgccataccatggatggagaatgagccac

SEQ ID NO: 103521 - DNA, 247 bp, Glycine max
  Clone ID: PAT_MRT3847_64498C.1
ggatgaagagcgaatagtgaatagaatggctggcaaaggtttaacctttgcggctgtgataatatgcgtttcagcactgtcactgagtacttctgtcgcggtggcagcggccaatgatggccttgtattaacttgtacaaggaatcatgccctcatgctgaagacatcatcacagaacaagtcaagcttctctacaagcgccacaagaacactgctatctactggctcatgaacaatgatcatgact

SEQ ID NO: 103522 - DNA, 771 bp, Glycine max
  Clone ID: PAT_MRT3847_64499C.1
aattcggctcgaggaaaaaaacaaaaccagagagaaaaacaggttcctttgaagtttgatcaatggcgtcaaggaggagctttctttcaaacccgaaccgttacatctttccgacaacctcagacacccatttgagcccatcccaagagggcaagggcatgttcgagttggacgaggccgagttatggaacaacaaccactcttcagccacaacggatcagagcaaaaaggggttaccctctccgggttcccgttccgttctgaagaaagcttcaaggaacaacaacaatggttggagaggcagaatcaccccagcgtcattgcctgtgaacatacccgattggtccaagatcttgaaggaggactacaaggagcaccccaagtgggagagtgaagaagaagaagaagaagaagaagaagacaacaacgttcgtgatgaacaaaaccatgggctcaggaatattaaggttcccccacatgagtatttggctaggacaagaggtgcttctctgtccgtgcatgaagggatcggaaggactctcaaaggaagagacttgcgcagtgtcagaaatgccatttggaagaaagttggttttgaagattaattaattattagtattgataatatataattagtgttatagtggggtggggattagagctagcttgggttcatctttttcctctaatcatagtagtaatatatatatcgcgagagagatagggataagatatggatcggattccatattttttttccaagattttttt

SEQ ID NO: 103523 - DNA, 486 bp, Glycine max
  Clone ID: PAT_MRT3847_6449C.1
tgattgcccattaatgaatttcgctccaatttcgtgtttcctttcgctccgttttgtagtgacggtttaactgatggctgaaagaaaatcttgcacaagatggcatttggggcgtttccatgtaagtgtcttttaccctacaatgcataaatttggttatgctcttttatggcaatgcagctgtcatcacccactattccatgttatttatcttttgttgatgctccattttttgggtaaaaaaatttgattcttattccatttcccattaggaactagagtttgtttaatgggtatttaaattttttgaattgtcaacctaaccagtaaggtttttcagataataaacttaccatatattataatttatgattgattttcttttctcagtgcataatctatttcttccagttagagtatcttgtatagttttaaaaaaatgcactgtggaaattagagttatttgctttgttctcggaccgacgc

SEQ ID NO: 103524 - DNA, 975 bp, Glycine max
  unsure (1)..(975): unsure at all n locations
  Clone ID: PAT_MRT3847_644C.1
gacaatagtattaatccaaccgcatattacagaggaaaagcaaacaacaaacactatcaaattcacaaaagaatcaaaaaatgcaccccaacacaatacactcccaaaaacaccatgttctaaacccctgtgacttcttcagcactcatcagcatggaagaaaatgcggagacaatatacagcagataaataagctccctttggagtacatacatgacaaattgacaatagtattaatccaaccgcatattacaaaagaaaagcaaacaacaaacactatcaaattcacaaaagaatcaaaaaatgcaccccaacacaatacactcccaaaatcacatcattggaaggtgaaacataccacaaggaacaactttctctaatactgtctctgatggggttgaaatgccaattccctctcttatttttcacaatcaaaattgaccctcaaccaatacttgatccaaatttcacttcaaatgtacccttttcttgatcttactcggtttgctgagccagaatcctcagcatagcccccacaattccagtagctcccaacactgcctataatgggcatcatctcatcccttggtgattttcttggcaaagaagaagccgaaaaatgtttgagctcttcaactgtcaatgcacctaaaataggcctatcttcatggctcaccactgaatttgagccttgtgaactgctgctgctcctctccggggtacccgcatacaaacccttgctaacaacaggtgtagtttctgatgaacccaaccaattcgaaaggctagcatcaactgcaatttcccggttcaacttctttggtgtttctgtttctgctccaaatgcagctctagactcttgattcnaaccaaattctccttctgagacaccaatgggggtgcccttttagctttaactgttttccattgagtgaggttctccacagggttcagcaaaggattaacatacacact

SEQ ID NO: 103525 - DNA, 256 bp, Glycine max
  Clone ID: PAT_MRT3847_64500C.1
tgccacaatccctctctctctccgacgtacatttccatctttttagggtttcatttcatggactccgattcctggatttccacgcgcctctcttcctcttcaaggcgccaccattatcgatctgatctgtaagccgaagagaattaaaggaacgatgaattcaaggccgaatttccaaggcccttctgcggcgaaggataagaaggcggttccctccggtggcaaaattgaggacaacaacctaatcaaagcaaaa

SEQ ID NO: 103526 - DNA, 261 bp, Glycine max
  Clone ID: PAT_MRT3847_64501C.1
gtttctatttactatgttatggcactatcttttatctgggtgaggggcacccgatgatgcaggcgagaatcttgacaaaacagatgggaagcgtaatgcacatggagtagatgaaagcaaatattgtcgtggtggctatggtggtgggcgtggaggctacagaggttggggtggtgcgcttggccctaactaacataatgaggctgggattgatgctagccctcacaacctaaaaggaatcttgctaaagcttatttagga

SEQ ID NO: 103527 - DNA, 1194 bp, Glycine max
  Clone ID: PAT_MRT3847_64502C.1
cccacgcgtccgtacggctgcgagaagacaagggtcggtggttggtagaagaaattgggcgtgtgggagttgttgaatcgggaagcaaaaaaaatgagaatccatcacatagcatgcctccaagacaattattcctatctgatcgtagacgagagcacgaaggaagccgcggcggtggacccggtcgaaccggagaaggttcttgaagttgccagctcgcacggcctcactctcaaattcgtcctcaccacccaccatcactgggatcatgctggtggaaacgacaagataaagcagctggtgccaggaatcaaagtctatggtggttccattgaaaacgtcaagggttgcactgacaaagttgaaaacggtgataaggtctctcttggagctgaaatcactatattggcccttcacactccttgccacacacaaggtcatataagttactatgttactggcaaagaggatgagcaaccggctgtttttactggagatacattgtttattgctagttgtgggaaattttttgaaggaactgcagaacagatgtatcagtcacttaatgtaacactcgcttcattaccaaagtcaactcgagtatactgtggccatgagtactcagtgaacaacttgcaatttgctctgacacttgagccagacaatttgaggatacaacaaaaattaacctgggctcggaatcaacgacaagctggccaagcaacaattccctcaaccattgaggatgagttggagaccaatccctttatgagggttgatctacctgagatccaggagagggtgggctgcaagtcacctgttgaagcattaggagagataaggaagcagaaagacaattggagaggctaatgaaactagcattctcatttgttgatatttcattttccttttctgttttattcatatgaataaggcctttatgtagatactgtaacaatatgttttgcctgaaacttaaatgacagagtcagaggcttgtcaagttaggggcatgggttgtgattggcattgtcgcctatatgcattttatgttggttttccaaatactaagatggtctatttcatacatgtcatttacttgtgaacttgtaatcaattattttctcctttctaaaaaaaaataaaacggtggcctgctattttatttaattttattgtttatgattggttttg

SEQ ID NO: 103528 - DNA, 358 bp, Glycine max
  Clone ID: PAT_MRT3847_64503C.1
agattgatagacataaatagaatgcattgatcacgtgtttggagagatgaggcatccactataccttactcatgacaattgagagggatccattacaggtcaatcatggggcatggtacaagtattagcatatatgctgataagccttacagtgaaacattgtagtatacaaaagctgtcaaggatacacactctatagtcaaaaaaatgcacgagagcgacgatatgaaccatgtcaaagcacttgcagacaatgtagaagaggctgagaccgtgcgcgacaagatagaaatacttgacaactataataattctcaaacataccgaaggtgcgtgcttcctgtttaacaagacctta

SEQ ID NO: 103529 - DNA, 323 bp, Glycine max
  Clone ID: PAT_MRT3847_64504C.1
ggtaaccttcattggtgttctctgtgcgtgtgctcgggcagagatgttggatgaggggaggtcttacttcaaacagatgactgatgtgtttggtgtgaagcccaattatgctcatttttggtgcatggcaaaccttcttgcaagtgtgaagcttgttggtgaggcagaagagtttctaaggagcatggcagagtttgatggggatatgtcatgtgagtcattggtatgggcaagtttgcttggtttgtgtcatttcaagagggatgtgtacttgggggaacggattgctaagcttctcgttgacatggatcctaagaacctca

SEQ ID NO: 103530 - DNA, 435 bp, Glycine max
  Clone ID: PAT_MRT3847_64505C.1
cctatgcgaccgttaatgagcagctatttttaagggatggacccatgggcacaagacaaatactgtgctgaatcctaggaaaccataatgacctttgtgatttccaagcttgacaagaacgcacatgcgttttcaagctccttctcgagtaatcacgaggaatacacaggggagggagtgcataatctcggaggcacagcatagatgagtcataggacgcatatccaaaaggctgcgcattactgccttgaagaccatgaatcatcagctgacatggacccatcgcttgtcagtgatggaaccacaactcaggctcttgctgattgacactgtgatactggtgacttgaactatcaattgttactgtcaaataatgacaattgatcctgaaactaaccctatttgacatttccttggaaacaacctcattttggg

SEQ ID NO: 103531 - DNA, 345 bp, Glycine max
  Clone ID: PAT_MRT3847_64506C.1
gtgtggagtggtgcttgtttgggggggggggggggctgtgaaatgccgaaaaggttacagtaagaaccaggctcctcaagttctaaacaggtaataggtaggacccaaaataccacgccccaaaaagaaccccccaccccggcaccaacaagtaaggctggattcacttggttgggcttgttgggagtgtgtttttttggtgtgggtgggtgttgttgttgggtggttagtgtgtgtggtgttgtgtgtgtttgggggtgtgggttggtgtgtattttctgacaggtgatgggtggaggttaggtatgggcttatggtcgtcttcagcacggtgctgggccttat

SEQ ID NO: 103532 - DNA, 1765 bp, Glycine max
  Clone ID: PAT_MRT3847_64507C.1
attcccggggtcgcacacacacaacacaaaattaaaattccccaaaagcaaaaaaaaaaaaaagaagaataagagaaagacaacactcgtagaagaagaaagcgtttccaagaagcgaaaggaaggaaaggggttttgtgatttttgaagaatcgcgtttgggagtagtcggagatggagctttcgactccgaattcttcctcgaagcacttgtccatcacgccgggttctagggttttgagaagccctctctccgacgaacagatctggaagcgcctccgtgacgctggcttcgacgaggaatcgattaagcacaaagacaaagctgcgcttattgcttacatcgccaagctcgaagctgagatatatgatcaccagcaccacatgggccttctcatattggagaaaaaggatttggcttcgaagtatgagcaagtaaaggccttggctgaatcatctgagttaatgcataaacatgactcaaccatgaataaatctgcattaactgaatcaaggaaacgtgaagaaagtttgaagaagacagtaagcatcaaagatgcatgcatagcaagtcttgagaaggccttgcatgagctgcgtacagaaagtgctgaaacaaaggttgcagctgagagtaaatttgttgaagcacgccaattaatagatgaagcacagaaaaaatttacagaggctgaagccaaggtgcgtgctgctgaatctttgcaggcagaggctaagcgatatcacaatgttgcagaaaggaagcttcatgatgttgaagcacgtgaagataatctcaggcggcaaatcatatctttcaagtccgattgtgatgaaaaagataaggagatgattattgagaggcaatccctttctgaaaggcaaaagggtttgcaacaagaacaggaaagattacttcaatcacaatccttgctgaaccagagagaggaacactttttgagtaggtctcaggaactgaatcgtcttcaaagagagttggaggacacaaaagtgaaatttgaaaaggaacatgaagccctatatgacgagaaaaccaccctaaaactgaaggaggcaaccttaatacaacaagaagaggaacttgctaaatggaaatctgagctgagcaagaaagaacaagagttacttgaatttcaagcgaaactttctaatagagaatctgataaaacacagaaagttgttgctagtcaggaagccgcactgagaaccaaaaaatataacttggaagttgagctgcaaatgcagcgcaaattggttgaaaatgaaattgaggaaaagagacgggcttgggagttgaaggaggttgatcttaaacattgtgaggatcaaatcctggaaaggcagcatgagttggaagttctgtcaaggtcgctgagtgagaaggagaaggatctgaaggacctgtcaagtgctcttgaagaaaaagatcaaaggttgagtgctgctgagaagaagtttgagttaaataaagtgcttttgcagaaggaaaaagatcatgttgaacaagcaaaccaagatctgcagaagtcattggcatcattggaagataaaataagacaagttgatattgaaaaggagaaactggaggccatgaaaagtgaaacgggtgacatgtcaattttggaagtgaaactaaaggaagagatcgaccttgtaagatctcagaagttggagcttttggctgaggcagataagctgaaaactgagaaggcaaagtttgaagctgattgggagctgcttgatg

SEQ ID NO: 103533 - DNA, 272 bp, Glycine max
  Clone ID: PAT_MRT3847_64508C.1
cggctcgggcttaaattctctcttgtgtatttgttgttataaataattggagactaacaagttattcatcatgataattaataaaaaaaatatgcttaaccagaggcagtgttgttaaatagctgctacagtgctattgcattgcagaatttcttggacctgcaattgtggttccctccgctatcatggctgccatcaatgttgtggttgtggcatgcatcctgcatccttgcgagtctccagccaattgaacttttgagatgatattatgc

SEQ ID NO: 103534 - DNA, 251 bp, Glycine max
  Clone ID: PAT_MRT3847_64509C.1
ccctgacttcacatgggaagtggtgaagccactcaagagggagaaaagtttgaatttgaagataaggtgaaagttttgagtaaaggacttgaaaggctgaaagaagttagtggtggagagataaaaccaattgttgatttggcagaggacaatgacaaagttttacagtgtgaaaagataagagccgagagtgaggttgaggtttggaaagacaagtacaagacattggaatcatgggccttcccatcccg

SEQ ID NO: 103535 - DNA, 250 bp, Glycine max
  unsure (1)..(250): unsure at all n locations
  Clone ID: PAT_MRT3847_6450C.1
ctganaagngttaatcatagtagcngtagagctcgagcaatagcaagcgaacangaggctaccggtatncctcaactggatttctgctgcagaatacttgnccttngnaaaactggagttggtnaaagngctaccatnaaatnccnntatttgntcangccaaaanccaccnctggngcttttcaaccngcnactagttncntcccgngntgttgtgggnaantnncatggggncttaactaaccattat

SEQ ID NO: 103536 - DNA, 422 bp, Glycine max
  Clone ID: PAT_MRT3847_64510C.1
caagtttagagagagaggaagagaaagagagagagaattggagaaacaaacgctgcctcactcactcactcctttgcagttttcttcttttctcccttggcttcctcatccatcaacgctatcattagcaattaagaaaccaagacatggggtttctcttcttcttcttcttctcctccttctttttcttctctccaaccacttccaagatgcgatgctgatctggagtgttgctgtttttcccttgtgatcgattctcttgtgttggtggtgatcaagaacaagaaagtgtggttaattttgctttctttgaaaaaatccaatggaagaagatcatcaagaagtgaaacacgtgtgcaagttctgctgcaagagcttcccttgtggaagatccttgggtggccacatgaggtcacatgtca

SEQ ID NO: 103537 - DNA, 349 bp, Glycine max
  Clone ID: PAT_MRT3847_64511C.1
gcttaagagctagtccttgatttataacagatagtttataaggggagttattcggggtgatgcaatgaggccgagtaaaccgagtcagcgtcctggccttgggttacgatggtgacttatggaatatatttgatgggagtcctgtgggaaaggaaatccttaatttattgacaatatattaattatacgcgatgtttgtgtcaaaaaaaaaaaaaaaaaaaaaaaaaaaaaaaaaaaaaaaaataaaaaaaaaaaaaaaaaaagttaaaatgaaaaataaaattctttattttaaaaaaaaaaaaaaaaaaaaaaaattttaagagttttcaagtgtatgaatatttta

SEQ ID NO: 103538 - DNA, 336 bp, Glycine max
  Clone ID: PAT_MRT3847_64512C.1
caataatgctattgatttttttgttccaatttctccccaaggtttaccatagcatctgcatgatgagacgaatgcaaaaagtcacaggctacatctttgtcactattttttggggctttggtctcaatctcatagcttattttattgcttctcatgttgctggagggtgctggtatgtccttgcaattcaacgtgttgcatcctgcctccggcagcagtgtgagagaactaatggatgcaatctttctgtgtcatgctcagaggagatatgctaccattctttgttaccagctagcgcgatacagattcatgtggtggtactcaacagtggtaaga

SEQ ID NO: 103539 - DNA, 555 bp, Glycine max
  Clone ID: PAT_MRT3847_64513C.1
gtgtttctaaaacacagaaaaagaacactttttgaactacacgatagactcagaaaacactgaattatgaggagtgaatgtgagataagattgtttgttaacaatacatgctaaagcctgaatattgggcttaaattccattcctagttgatccatttctatggaggttcttatcacctttgctcctattgctagacttgaagctataagagtcaagcttttcctttgcagctcataaaaacataaatctttttcaaatggatattaaaagtggttttttaaatgactttattgaagaggaagtgtatgtcagacaacctccaaactttgtagaccatacacttctagaccatattttcaaacttcaaaaggcttcatatggtctgaaacaggcaccttatgcttggtatgatagactgagcttttttcttttagaaaatggctttatgaaaggcaaagataaactctctttaaaagagaagttggcaaggatttcattatagtttagatatatattgatgatattatctttggagctactaatgaatctttgtg

SEQ ID NO: 103540 - DNA, 231 bp, Glycine max
  Clone ID: PAT_MRT3847_64514C.1
gacaaaaaaaggagcaaggaatgtttatatatacatttcataagtaaataaagaaatgaatgatttgtgagttacaagagagaaagaagcaatataaacaatattgagtttagctccttctcaccgtgtaacacgacgagtaaacattaatcctttaattttgtaatatatactacatccatacacataggcctgtatttacaaaagggaagaaaaatgggttaatatggc

SEQ ID NO: 103541 - DNA, 234 bp, Glycine max
  Clone ID: PAT_MRT3847_64515C.1
gggaggttcaagtggattatcgtgttcttcgcgctaccccttgatattctcgccataggattgatgatacacttccgtcagccaggtacggacgttgggttcatcatcatgacgcagatcttcaccgccgtggcaggaggtagcatcgttatcggcggcgaactggctatgatggctccgtcagaccatcaacacatggccgtcattacgcggtgcttaatctcttctgctcta

SEQ ID NO: 103542 - DNA, 251 bp, Glycine max
  Clone ID: PAT_MRT3847_64516C.1
cgttgcctccctcgttctctcccttttgatatccaatttcatcatcattcgtcggtaagccctaacaatctatctcttcttcttcgcctgatcctaattttctcgggtttcgtttctaatcccctattttattccccttcgtattttctcgattttatcttgttctttcatctccaatctccgtcagatctctcgcgcgttcttcaattttgaattctcggggattcgttttgttttgggtttagggctct

SEQ ID NO: 103543 - DNA, 235 bp, Glycine max
  Clone ID: PAT_MRT3847_64517C.1
gaacatttggtaatcacatgtgaactacttaaagcaaacttgtatgagaggtatacatttaatacagtatcacgtggagaagggtactttacaatgccaagattgcagtcaattaccattcagagtttggaagcctataagtgtttcgttagccatggactaatatactgcgacttgcaaccagagaatattctgggcaaaagctctaccatgtgttaggcgaaggccattgctc

SEQ ID NO: 103544 - DNA, 344 bp, Glycine max
  Clone ID: PAT_MRT3847_64518C.1
gtaaagaaaaaaaaaaattttatggtttgccactcataccaaaatataagggaagaaaggcggccttttttgaaatttgactacaaatttttcaaaaaactctaaaacggttttgcaaaaaatggaaccaaagaacaagccaactgaagttttgggggaactacattcaccactgggagcctggggataattcaaattaaaaagggggacgctgagactagaagatattgagcgatagacaaatatggccaacccatgtgctacaccaggaaacaaattttcttggtaaaaggcacccctgaaaattggttggaccaggaaattttctaaatgcccaaagaaaa

SEQ ID NO: 103545 - DNA, 705 bp, Glycine max
  Clone ID: PAT_MRT3847_64519C.1
ctttttgagttagttctctcttgattttggattagaattttgcgtttcttattttgacgaatactcctaaacttattaattgagttttgattgtgacctcgtttctatttctctctttgcctttttgatgttttttcacctttttggctccatttctttgattactgatgctgaatttgagattctagaagggatattcatcagtagggcaatcaataactgatttactgtagatcttttgaaagtggtccttggcagttcttcgaatttcatccatctcttcaaaccaattgttgcctgatttaagagctaaaatttgattttccgcctgcgcctattcttgagacatgtgaagaaggttgcatttgcattgccttctttcagccacaacgctcaaccttctatgaaattaggctttcctttatgctaaaccagtgccataattctaccgtaacgttcctcatccaatctaggtctaatggaggcaacattcctaaaaccaccactgcatccaatgaattaagctcatgaaacgcgccctgtagttatagtagaaacatcatcaaagctcttcttattttagcttttcaaatgatctttaaaaagctttagtttcttctctaaagcatcaagccatgaaccttttcaaccatccaccttaattgcattccatgtactgtcagtgcatggcttgtggtttacagc

SEQ ID NO: 103546 - DNA, 702 bp, Glycine max
  Clone ID: PAT_MRT3847_6451C.1
atttcacccttttttgttctggaatagattaaggttgcccttcagcttaattattactagttcgtgtgtttaattgccagatagaactgcagaagaagttaatgttagagttggaatagttttttgtgatatttcagtttctaatcttccgtagctgtaatgttagcaagcagaatatgatcatataattatttaatcctaagcttagggagttcaccggaatttttactgtaatactttgcgagataacaattgttagaaagttccacatcaccttgctcaactttcaggatgcaacttatatgtttgttggacaacttcacttgatcccatttggctttaagttcaaatctaatatgatatcaaagcctatagcccatcttggttctcgcctattgtaggaagtttgcctgttctaacaggcatctatgtagggggtgttaggaaataccacatcgcttgcttcaattctcggggtgcagtttatatatctgtcggatgacttcacttattgttaattgtttttaagctgaaatctaacgacaatggcttgggtgagacagtttataggacttcattatctttagatggcttgtcaaaatgttcttccattttccataggtggcatagtatttaaggagtatgctactaaagccgactagtgggagtgggcttcatgtttctgattcctgaatcttaaca

SEQ ID NO: 103547 - DNA, 489 bp, Glycine max
  Clone ID: PAT_MRT3847_64520C.1
tagctttggaactattgagatagattgggactctcacccagtgactctgaaattcaaagtcagggacaaggatagtgtcacagttacaggggttgatgtttcattaacggaattacaaccatcaaattcagagattttagacagggtaaaagcagagcataataattcaaagcattgcacccttgaagttagtctgccatggattgtaagatatcgcctggcaatcttgttcttttccaccttatttggtaagtcacttctaagttccacttgctagtgatcctttgtgtgtgcgcgtgcatgcgcgttatttactttggatatcaatcttaaagtttccatgcatagtatgattaaacctgaactgtttgtgtttttggtaatttgcttactatcatttggtttcaaggaatatttttcatttttttgctgcagtgatgtttgttgcattcctagtgctagtttacacttgcttcaaactttgcccac

SEQ ID NO: 103548 - DNA, 1127 bp, Glycine max
  unsure (1)..(1127): unsure at all n locations
  Clone ID: PAT_MRT3847_64521C.1
gctccgctccacctccctgtcgtgcttccggtcgtttcctccgccgtgtagtgttcccgttttcacggcgctctctcgctctctctcttcccttcgggccctcgtgaataattatatctttctttcaattcctatcctcttccttgtagtgtacccattttgaatgtgttctctctctctctctctttctttaggtccctggtgaatatctagaaccactctctagctagtttctctcttcttgctagctagctatcgccgatcactctcttggtttaaaccacctgaatgccggaaaacatgagcatatcagtgaatggtcaatctcaagtccctcctggcttcaggtttcatccaactgaagaagagcttcttcagtactacttgaggaagaaggtctcttacgagaagattgacctcgacgtgattcgtgacgttgatctcaacaagctcgagccatgggacatacaagagaaatgcaaaataggaaccactccgcagaatgattggtacttcttcagccacaaagacaagaagtaccccacaggaacgcgcaccaatcgcgcaactgctgcagggttctggaaggccactggccgcgacaaagtcatctacagcaatggaaagaggattggaatgagaaagactctggttttctacaaaggaagagcgccacatggccagaaatccgattggatcatgcatgaatacagactagacgacaacaacaccgcggacaccaatattgtgtccaatgtgatgggggatgctgctcaggaagaagggtgggtggtgtgcaggatattcaagaagaagaaccatctgaaaaccctagacagccccttggcttccggggaaggtagaaggagccacttgttcgactcgtgcgacgagggagctttggagcaaatacttcagcaaatgggaaggggttgcaaggaggagagcagctatgaaggcaactacaacagctatggaaggtttgcaatggggttgaacaatggcggcggcggtggatacaatgataggttcatgaagctcccgagcctcgagagcccaaaatccgcaagcatggagaaccaccacaacaccaacaacnnntgcaacaataacatgaagagtaataa

SEQ ID NO: 103549 - DNA, 1096 bp, Glycine max
  Clone ID: PAT_MRT3847_64522C.1
accgctgcgcgatgacgcccaacgctcctctttctttctttctatcgacaaatatctattaacaatacgccgcatgtcttctacaagccacactctttcattgatgcttaaactttctatttcgccaatcgtttttaataaactacactctttgtttgaagcttaaactccctctaagccccatccttaatttactcaatctcatcaatgtttcatcatctggagttcttcttttgagggctttagcagattccattccttgagtctcatgctggatatgccaatccttttatcctcatttctgatatccttgtttgcatgatcacatcttttccaaggattttaaaaccatgggtagaggtagaggaaagggtaaaaaactaactgttaccaattttgaggatcctgcaagtggtgaggatgaaaaagttcccacgcaaaagagaagagggaggccacaaaaaccactaaaggatgactttgatgaagaagaggtagagaaaatagaagatgacagtgacaatgttaagaatggagtctctaacaaagagatgaaaagtcccactgcaacagaaaatggaaggaaaagaaagcgaaactcacaggtaaaagagaaattagactcagttgaggaagaaaatggcattggcaatggatcaaacaccactgatgagttgacaaagaccaatggttttaggcataatggaagcaggcgcaaaagcacgccccgtcgagctgctgaagcaggtgttcagtgcaagtaaggatcataaaagttgtgcattagctttcttccttttccatattatcagttaaaatcatgagaagataggaagtgaggtgtagtatcatttattttatttacttgttttgtttctttgttcccacttttagtttcctttttcctcggtgagtctgatttgaggggttccatttggtgataccctatcattaattccttttttctttatttcaatcatgaatttgagagtttacaatgctggttgttgtcttataatgctgtaacacttcgaatttaatcttttctactttgactttcaatttaatttttatgctccctctcctttcatcatca

SEQ ID NO: 103550 - DNA, 347 bp, Glycine max
  Clone ID: PAT_MRT3847_64523C.1
gacagactcaggaaccaatagacaaatatctattaacaaaacaacgcaacgcttctctttctttctttctatccctacttcgcctctgtttcatttggcccattgtttctcacaagccacactctttgtttgaagcttaaactccctctaagccccatccttaatttactcaatctcatcaatgtttcatcatctggattccattccttgagtctcatgctggatatgccaatcctttcatcctcatttctgatatccttgtttgcatgatcacatcttttccaaggattttaaaaccatgggtagaggtagaggaaagggtaaaaactaactgttaccaattttga

SEQ ID NO: 103551 - DNA, 646 bp, Glycine max
  unsure (1)..(646): unsure at all n locations
  Clone ID: PAT_MRT3847_64524C.1
aacaagtatcatctatcatgattgatccaataatagaatccattgagttaagccaccaaggttcaattgaaccaattcaattgaccgacccaaatggtttcacaagtatcatctattatgattgatccaataataaaatccatctaagccaccaagattcaattgaacaattgacggacccgaatcagctttcgtatcatctatcatggcagattaattattactgtctcatgcatactacaatccagggaaatgaatgcgcatacatccacgtcagactccaaaggcgttcttcgttgagttctcgtcgaatggaaatgtgacacgtgtacacaaatcatgattcaccagtttgttgttgttggtagcgctgagaagcgcttctccagaacccggtcccgttgaactgggcccacatctccgcttgcaacctcgacgcctacagcttctcctccgcgacctccttcgcaagatgatcttccagtttgggcccaggcccagcattgtctgcggtgacgggcccgtgatccaagagcgcctcggttttcttcttttttttctgcagaaggcgtcgcttgcgtttgtgcattgccttcttgangaggcacgcngngagcttgtaggtggcgagtacgaccatgtccat

SEQ ID NO: 103552 - DNA, 143 bp, Glycine max
  Clone ID: PAT_MRT3847_64525C.1
gccctaaaacaactttcctgatgattatatctatcgaccaacatgaccccttcacctgctccgaactaaagttcagtatacaactcaaaccaaaccttttcaacactaccttgtttactacttagcccttaacgggaaccagg

SEQ ID NO: 103553 - DNA, 268 bp, Glycine max
  Clone ID: PAT_MRT3847_64526C.1
caaaatagctctgtactagttagctgtttgtccacttacatgcatcaaaatgctgtggactgttgctgtctgtcaaaaacacttgtacagagcattttgatgcatgttagtggtcaaaatgggacagtcctgagcatgaatggagatccgtattaacagcatatgtacgcgggactgcgtttgcatagcgtagatgtggaagggcaaatcaaactttatggggattgagttttacaaccgacaagctcgaacaatgctcaggcttgga

SEQ ID NO: 103554 - DNA, 2441 bp, Glycine max
  Clone ID: PAT_MRT3847_64527C.1
agaggcgttctttctttctcttctcattctctcacttcatctcatctcctacattttttttgtatcatcgtttgttttgatcaaatctctctttctctctctctctctctctctccaatcttcaacgtttctgttattctcattcccaaacctaaccccttttcccggaaaatttctttgctatttttctgggaaagaaaaaaaaaaggaaagaaaataaaagaagcatgaattcagctgaggaatgcgtgtaagcgaggttgcagtgctgagagcaacctccttctccataatgcagaatgcaatttcaacatttggagactctttcagcctcatttccaaaccctcaactctgacacagtgcaactaagcttaaaccctagctttgctcaaaagggtcaacaacttgatcctgttgtgtcagcagctcccatccccagcttcaacctttctgggttttgagcttatttgggaatctgggtctcagagagaatgccgttttggtgtcccaatgcctctcaaattgcaggctttggacgtggtttgagtgataccgagttcagtgcatatttgaggtgaaaatttgagatctgtttagaaacccacatcactgcacaccaggtgttcgccaaaagtttcgcaatggtcaagttttcttttgtatcttaagcttccaagagtggtgtttctgtgagttttctttctgggtagttgatggatagttagaagaaaaaaagacacaattctctgaaggggcaactggtgaagtaacaaacaaaaaaggaaattgaaccaaaaaaattgtgttaatgtcaggtcccagattgaggtctatgaatgttggtgactcagaggctgcaaggcctgtgtttggaccagctgggaacaagacggggccattgagttctcggaaaccagcttcaaagccactgaggaaagctgagaaattgtacaacgaggccaaagagaagaagtcctatgaagtgtctacggttgttgcttctcctcagtcatattctgcgagtgttctgcgccggcacgagcagttgctgcattgtaatttgtctctcaatgcttcgtgttcgtctgatgcatccactgactcgtttcatagccgggcttctaccggaagattgactcggtctaatagcttggggtgtacaaggaagcgctctgtgtcaaagcctagaagtgttgcttctgatggtgtgttggaatctcctcctcatggctcacaatccaagaagaggtgtgcttggatcactcccaatactgaaccatgttatgctaccttccatgacaaagaatggggagttccagtacacgatgacaagaaactatttgagcttcttgttctttctagtgcactgtctgaactcacttggccagctattctaagcaagaggcacattttaggggaagtttttgcggactttgatccagttgctatctcaaaatttaatgagaaaaagataatggcaccgggatccactgcaagctccttactttctgaccttaaattgcgtgctataatcgagaatgcacgtcaaatatcaaaggtcatagaagagtttgggtcatttgacaagtatatttggagttttgtgaaccataagcctataattagcagattccgatatcctcgacaggttcctgtaaaaacaccaaaagctgatgttattagcaaagacctggtgagaagaggtttccgaggcgtgggccctacagtcatatactccttcatgcaggttgtggggttaacaaatgaccacctcatcagttgcttcagattccaagattgtatggctgttgcagaagggaaggaagagaatgccgtcaaggatgatgctcaacaaaaggagggtgatcatgtggagtctgatctgtccattgccatcgacaatttgagtttatcctcagagtgaatgactgatgactcaacaattgtcttggctgatatagatcctggctctatttgcagttcatctagtagaccaattcatactacttaggccttagattgagtcatgatggaggagaacttgtgtacccatctcatgaaatcccggaaactgaaagcatagttagttgaattaaatcaattgagtacctaactacccatgctgttgtatgtggcttcttgagggaggcctagcaaattgttgtacaattttttgtacagtaaaaaatgtcggtgattagaaatatcttttattatattaagccagtggcagcaggtgatagatataaccttgctctttgttaccgtctcattctgattatagttacactcgttatgcatgcattgtgttggttagctagctagagtttgaactgattgatgagtcccacttgagatggatgacaatgatagaacagtggcgtttgtctatttgtcaccttggcagcaagactactcattcttgatagatatgtttgct

SEQ ID NO: 103555 - DNA, 377 bp, Glycine max
  Clone ID: PAT_MRT3847_64528C.1
ggctcgaggccggatgacatatacatactacttaattttcaaatcctaaacttgagtcacaacgggattcatgtagcaattccagcctcactggccacaataactagcctacaagtgcttgatctatcctacaacttatttagtggatcaatttcagaaagccttggacagttgacatcattacaaatactgaatcttaacagcaacctcctatctggaagggtcccatcaactgtatgaggaagactactctacagagctagcttcaattttactgacaatgcatgtctgtgtggtatacctggattacctacatgtggacctcatctttttgatggtggtaaagttggcattggattaagggcttcttttacatt

SEQ ID NO: 103556 - DNA, 264 bp, Glycine max
  unsure (1)..(264): unsure at all n locations
  Clone ID: PAT_MRT3847_64529C.1
ggtgaataataattttagatgttgtatgtagttaacgaaatgacatttagcgggtataatgtatatagtttggatatcttataccttgttgctatcttattaggtatattcgttattataagtaaaaaccctattgtatctgttttatttttaataggtttattctttatgtatatctgtntatttaattttnacaggattaaactttataggattatcttacttattggtatatataggggcagtatccatcctatttttatt

SEQ ID NO: 103557 - DNA, 198 bp, Glycine max
  Clone ID: PAT_MRT3847_6452C.1
aaatgtgacccaaccaaagatacatcaaaaagcataaagcaatacaagaagatcaaaacaagagcataaaagctaagtccttcaaaccctccaaaggggttaagcaaaaagcaccaactagcaaaggggaaaattgcagctgagttcattcttttagtatcctttttttgtatcttcgtattccttcttaattatagg

SEQ ID NO: 103558 - DNA, 216 bp, Glycine max
  Clone ID: PAT_MRT3847_64530C.1
aaaatgacaaaacacctccataaattatgagggccaaaaaatcttcaggctctgaattacaaatttggtccactcatccggatctaagaattactataagtgccctatcattaggcgtgaatatgattatacaaccaaacgaaagatccctatgatgcttacaccccaggtatgatatagccggaatacactattaactcactttgatcaaaacaa

SEQ ID NO: 103559 - DNA, 447 bp, Glycine max
  Clone ID: PAT_MRT3847_64531C.1
gaacctcatccaaatttgttaaggaggaccacaattggaaatggtctactttgtttccctacagcttgtgggcttgcaattactcctacagtctatatttaaacctttcctttcttgagatgcaggtcctccggaatcagtttttgactggacacgggaaatagactcagatttgtcaaatcagaatatcaataatcaagcattctcaagaaagcattggcgtcttttacaatgtcaagatggtttgctacatttatttacatgatagagcacattcctattttgattacataaaagaaaagttattctagtgatatattctagatttctagtgtttacatgatttgatatgtataaaccttataaactgcgatgattttatttcaggttagaatgggattgcagtttcctacatggtagcttagttgaggaggtggatgggcatac

SEQ ID NO: 103560 - DNA, 642 bp, Glycine max
  Clone ID: PAT_MRT3847_64532C.1
acgatttttgtggtaaagatgtcctctgccacgtaaacccctattgcttttcccagcagaagttaggccacgaagacatctagtcaacaaagttctcattgatttttttcatacgcgtaaaatctacatatctatagagatctggtaggaacgttcgactaatgtttttgatacggaattaaaatcaacatgtataaataagcaatccatataacatagaaaagtgtttgtaatatttaaaccgggtatcaacttgagctcaaaattacatgtatgaatggccttacaatgatcgaatcgaacaaaaaataaaaaaatatggttctgtcaaacagaataaagaattatgtcaatgctcctagccgccacggcctctttgactccgccggcgctggtggtggtggcaccagcgtggtagtggtggccgtggttgtcggagagggatggagggtggtagttcttgcggcccgtttgggggccattagagtgaaaccttgcagcaatcctgaccccttggtcaagaatctcgacgagcttccccatagtggcatttacgtatatatagctggtgctttgcattttccctttttctcacccactttcagtttcttagaatcttctacttgcccggttagaagttag

SEQ ID NO: 103561 - DNA, 493 bp, Glycine max
  unsure (1)..(493): unsure at all n locations
  Clone ID: PAT_MRT3847_64533C.1
ggctcgagtctctctcttcattttaggttaggaacccctcttctttttgtctctctctcttttcttttgtttctcatcatcatatctcaattctcaacgagttttaaaggacaaaggaaaccacaaccaacaacacggctcgagggagaagctagccaagagagaggaatcatagttccttttctgggaacgacggttcctcctttatgctaccttcaccacctctttcttcataccataccccccctcaggtgcttttcttcaaattgaggtggtgcgtggcagacaaagctatgtgatcgatcaccttgatggcttccatgtataatcaatcgtgatctattttcttctcagggggggatacatcattaacactatatgtgctcaatattgtacgttttgatatacatcatagggatctaatttcttctaacggggggatgaatcatagccacactacctaattaatatgctntgaggagatatacatcat

SEQ ID NO: 103562 - DNA, 1490 bp, Glycine max
  Clone ID: PAT_MRT3847_64534C.1
cccacgcgtccgctcagatgccacagatctgcatcttcttcttcttcctttccaaattgtgtgtgtgatttagaattggcaagatcagatctgctctgagagaattgcagatcagaaatggagaagtcatgcactctggtggtccacttcgacaagggaacgccggcgctggcgaacgagatcaaggaggccctagaaggaaacgacgtcgctgcgaagatcgacgcgcttaagaaggccatcatgatcctcctgaacggcgagaccattccgcagctcttcatcaccatcatccgctacgttctcccctccgaggaccacaccatccagaagctcctcctcctctacctcgagatcatcgacaagactgattctcgcggcaaggtcctccctgagatgatcctcatctgccagaatctccgcaacaacctccagcatcccaacgagtacatccgcggcgtcaccctccgattcctctgccgactcaacgagtccgagatcatcgagcctctcattccctccattctcttcaacctcgaacaccgccaccccttcgttcgccgcaacgccgtcctcgccgtcatgtccgtctacaagctcccccagggtgagcagctcctcgacagcgcgccggagatcgtggacaagttcttgtccaccgagcaggatccttctagtaagcgcaatgcctttcttatgctcttttcttgcgcgcaggatcgcgccatcaattatctgtttatgaatatcgatagaattattgactggggtgaacagcttcagatggtggtgttggagctgattaggaaggtttgtaggagcaataagggggaagaaggggaaagtacattaagatcattatatcccttttgaatgcctccttccactgctgttatttatgaattgtgctagcacccttgtgtcactcttttctgcacccactgccattagggctgctgctagtacttactgtcagcttttactttctcagagtgataacaatgttaaactcattgtgcttgatcgtttgaatgagctcaagacttccagtagggaaatcatggtggagatggtcatggatgtccttcgggcactttccactcccaatcatgatattaggcggaagactcttgatattgctctcgagctcataactcccaggaacattgatgaggttgttatgatgctcaagaaagaggttgtcaaaactcagagtggggagcatgagaagaatggggagtacaggcagatgctggtgcaggctattcatacttgtgccattaagttcccggaggtggctagcactgtcgtgcatctgttgatggacttcttgggggataccaatgtggcttctgccatggatgtggttgtttttgtgcgcgagatcatcgagaccaaccccaagttgcggatttctatcatcaccaggcttttggatactttctaccaaatccgtgctgcgaggggtgtgctcatgtgcgctctggata

SEQ ID NO: 103563 - DNA, 189 bp, Glycine max
  unsure (1)..(189): unsure at all n locations
  Clone ID: PAT_MRT3847_64535C.1
attaaaacttggtgatacctttatatttctacantggtgcatatcagaaacctatagttcggttgcacatgttcacactctttatgtgggagacgaatgaaggaataagaaatgatagtcaatcgaaatgtttaccttggctaccacacttatactctgaagctcacagccgcaaactctaaattccac

SEQ ID NO: 103564 - DNA, 170 bp, Glycine max
  Clone ID: PAT_MRT3847_64536C.1
cgcgtccggattctttaagcactaccacgggtcctgaggtctggcagtatatctcccaatgggagaatcaagcgtgttattaccgcgggtaattggcagaagggtgacctgttggggcggtgttcgtttttttgtgtctttgcctcagaaaaaaaaaaaaattttttttt

SEQ ID NO: 103565 - DNA, 735 bp, Glycine max
  Clone ID: PAT_MRT3847_64537C.1
agagcgcgtgctgcgattcgccatccatttcctcaagactatgcttgtattataaattgctgtgagcaagtaaaaatttacgttgatgcctattttaatgctacttttcaaactaatcttttttcccttataagtttgctgcaagtgctcgcagattatgtaaagactatgattctctcttcaagtaacccttaagattctaaatggtctctctacttatggttcaatgataactcaaattccttgctttgttcaattgaagtcattgaaattgaaaatgaaatcttcttcaagcatatctgatgagggagttagcaggatagtagagtacttacttaaaaaatgtccattggccaaagttgatgttataaattgcagagagtgatatgaacacttaaatcctcagaactgttgaagggggggaaatactactaaaagaccacttgatagactgatgaatctgaagtttctttgtttgctggtgttatatgttgcatcattgccaattcttaaagagagcctgtgtggtagtggtactagccttatggaaattctgtgtatcatgcagttacgcccctaccgatgttttaaatgtaactgaattattagactatggagttgttgtatgaactcatgtctttcattttttaagaagtcaatatcaacgtcttcccttatgtatcgtatcctgtcatcatagactggctgcaagttttggtcaatgtaaaaagatat

SEQ ID NO: 103566 - DNA, 343 bp, Glycine max
  Clone ID: PAT_MRT3847_64538C.1
ccgcttcaatcgtttctttattctctcatttattcatttcatttaaataatccatatctgttccttggaatctttctataacgctattcctgacccaatctctctgaaaacaatataattttatacgtcaacctcctctttcaccaaaacaatcctctatacatacacaacttcactcaaacctattatacttttaagcttcaccacatttaccattgctctctcaaatttgtccaccaacgagttaacaatcctaaaaaatcttgaccaattcttaatgaaacgttttttgtactgctttaacctatttaaaactacaaagtatattgatatctgactaata

SEQ ID NO: 103567 - DNA, 111 bp, Glycine max
  Clone ID: PAT_MRT3847_64539C.1
ttttaaccacaaatactgggctcatctcgcgtgtagctcgtgtacacagagctatttgtgctgtgcacgaaacatataccagtgtgtgttaacacgaagttatgagacaac

SEQ ID NO: 103568 - DNA, 812 bp, Glycine max
  unsure (1)..(812): unsure at all n locations
  Clone ID: PAT_MRT3847_6453C.1
tgcatgcctgcagctgtggtggtggtgttatttagccagtgtgattgtgtggcagaatttcaatgatagggaagaaaggtgcatgaggcattggcatgggtggtatttggtttggggaaccaaacatctgaataagtctgttgtctgtgatagcagaaagtggtggaataggtagctgtggtggcctgaatcccatcatgagtggccataacccacttcccattgacattatctgcatcatttcatttcatatatttaacacattcattcattcaaattctaatatttgtaaattaaggccaagtctaggaaaacatatataatttgtacaacagaaatgttggacctgaaaatttgcctgtaactgaagctttagggtcttcagatagtcgatggcatcgtctagcattgatgctttgtccacctagagacatgtacaagacactacttagtgaaaaacaagtgcaagaaagtttaactagaaaaactagatatactgcttaattacaaagttggtaataacgagaacttattagatagtctgagactattatatattcatctatcttcttggctaatctctacaaatatgtacgtagtcgcgttttttaatttataagaaattaagaatcaacttgactacatatcaaagtagagattagtcagaatcatgataataaaaaatcatataataatttaatttctagctggtaacacagtagcattcactcaaattaacgcacataccttattacagttgggaatgaggtctttcaatgtacgcatcttcttgntgattttttctcttcgct

SEQ ID NO: 103569 - DNA, 356 bp, Glycine max
  Clone ID: PAT_MRT3847_64540C.1
cgatctacagcgattgttcggtgaaaccggtcccgcattgatacaacaaacttccacagaacagcgtcacaaatttcactggacagaccaatgaaaactctatccatggttacctctacataatctattgtgctggtttgagtcttgagcacacttctcactttatagagttactcagtgcataggaccccgtggcgcaacttttgaagtctgggtttgaagattgtagtcctggtagttggcgcatgccattttccaaggaacgagggcatctgaacctaagtttccaccaaaggctacttactaatagctggttacatgtgcatgccgatgcatgacacaagaatatactctgt

SEQ ID NO: 103570 - DNA, 187 bp, Glycine max
  Clone ID: PAT_MRT3847_64541C.1
gtgatgcttccgcacacccgggcagccaggcctgtgaaggatgcactgccacagcgcctgcccccactggccaaaccaccccggttcacactcacagcataagcgaggaacagcgcagcatctcaaggcaccaacctcgacccaaatcgaacgctgccgggggaacttgatgatcttagtggtctga

SEQ ID NO: 103571 - DNA, 301 bp, Glycine max
  Clone ID: PAT_MRT3847_64542C.1
gaccaaacaagattcaagagagagagggtttcctacgttggcctttgaacagccaccccggaggactgaattttccaaaccctaaattcaaactttttttttttttaataaatcattcaatccagttccctttcggttgggattgggattttttctcagcactccaaaaactgaaaagttttttgaagatggggaaaatgcctgccttagttttggttattcatccattcaagggtggcgtgcaccattggaagatgctcatgctgaatatactgtcctggttaagtccacttaatttttt

SEQ ID NO: 103572 - DNA, 256 bp, Glycine max
  Clone ID: PAT_MRT3847_64543C.1
gtactgtttgtatcatcaacttgagggtcaggagcataggtttgttttgtttatttgtttcgtgcaaaggaattaagcgatactttcagactacatgaagatcagattcagaagccattgactggcttcatgaataacccttcttgtgtttgtatttgtcagctgatcaatcttctgatttattttggatgctttgggagttggactacttgtgtgaaattggtggtgcatgtaaaaccttaactgattcaggctg

SEQ ID NO: 103573 - DNA, 316 bp, Glycine max
  Clone ID: PAT_MRT3847_64544C.1
ggctcgagctcaagcgcagctccatatctttctttgagattgagaaacatgaaactgctgtttctcgttggtccagagctagaactagagctgctaaggttggaaaaggtttattaaaagacgataaagctcaaaaacttgctttacagcactggcttgaagcgattgacccacgccatcgctatggacataatctacacttctattacgataggtggcttcagtgtcagagcagagaacccttcttctactggctagatataggagaaggaaaggaagtaaatcttgagaaatgccctggttccaaacttcaaca

SEQ ID NO: 103574 - DNA, 200 bp, Glycine max
  Clone ID: PAT_MRT3847_64545C.1
cattgattgataatcaagggaatggttctgctagagtgcttggcgatagttccgaaaggatgacgtagaaaatggaatatactgttgctcaacatccatgggattggcagtgttcctaatgtcatggaatgtgagcacgctgcaccaagatggccctcatggctggcagcagtgtctgtagaggctatcaagggatggct

SEQ ID NO: 103575 - DNA, 365 bp, Glycine max
  Clone ID: PAT_MRT3847_64546C.1
aatgtacatttgataaaagaccttatgataaagttgctcccccaaagaatctgacattgccaccacccggtgttccagaaagtgtggtgactctcgtaaaaatggtgaatgaagctactgcaaatattccaaattggtggtcatagggaaggttaaaggtgttgcaaattacgatagttggagaatgcgttggacctatggccattttaaatggaagggcattgtacacgtcattgcttatgtatttatgcattcttcgaatatagtttgaccagtgagtgagacaaacctgtggaattgatatcactggtgcttctacaaaatgctttggttcaacttgcttcaccttaattttcattaatccc

SEQ ID NO: 103576 - DNA, 466 bp, Glycine max
  Clone ID: PAT_MRT3847_64547C.1
agagagtgagataactgttgagctcgacgatcacgagttcacgacgatccgctctccgccgccggctcctccgacgccgccgcagcctccgtcggtgaagacacgatcggagcgcaagagtgatcgaaggaagagcaccgtgaagagagagatggcgatgatttgggcttcagttctctccaatcagagaaagaaaaagaagaaacaaaagacaaagaataatgaaaatcaggatccgcaatacgatgataatgccgatgaattaacgaataacacgacagtgccaccacctccaccgccacctccgcctctgccttcagtgtttcacagtctattccgaaaaggactaggcaagagcaagaaaatccactcggtgtcggcgccacctccgccgccgcctcctccgccgtctaaacgcaagagccagacccctccaccgccggagcctcctcagcggagaaactcc

SEQ ID NO: 103577 - DNA, 151 bp, Glycine max
  Clone ID: PAT_MRT3847_64548C.1
atgttaacataattacctgccacatgggggccagaaacttggaaaacgcttggaaagaaaaaaatttcccgggaaaaaaacgctgacaatgatgatctgatttcaaactaggggaaaaaacaggctgtaaaccaaccaacctgggaataaa

SEQ ID NO: 103578 - DNA, 1411 bp, Glycine max
  Clone ID: PAT_MRT3847_64549C.1
gctcatgttttcccttcagaaacgtgaagttggtgatgcattcaatgattctgatcctcagtggttggtaccgggtctccctgatccagttccttctagtgttttgcctgatgctttttttaacaaacaaggtggatatgctacttattataaacttgctcagaggttcaaggactccaaagggatcattgttaactctttttcagagttggagcagtatgctattgatgcattatgtgatggtcaaattcaaacaccccctatctatgctgttggtccattgattaatctgaagggtcaacctaaccaaaatttggatcaagcccaacatgataggatattaaaatggctggatgagcagccagattcttcggttgtttttctatgttttgggagtaggggaagctttgagccatctcaaacaagggagatagcactagcacttcaggatagtggggttaggttcttgtgggctatgcgttctcccccaacctcagacaatgcagacagaaccttaccagaaggtttcttggaatggatggaggaaggtaaaggaatggtatgtggatgggcaccccaagtggaggttttggcacacaaagccattggggggttcgtgtctcattgtggatggaactctattttggaaagcttgtggtttggggtaccaatattgacatggcctatctatgcagaacaacagctgaatgcttataggatggtgagggaatttggattggcagtggagctgaaagtggattatagaaggggtagtgatcttgtaatggaagaggagatagagaaagggctgaaacaattgatggatagagataatgcagtgcacaagaaggtgaaacagatgaaagagatggctaggaaagctattcttaatggtgggtcttctttcatttctgttggagaactaattgatgttatgacaggtagcatttgatgactattgtcgaatttcataatggggttggttgtccattttctttgaatcaaagaaaaagtcaaattatttcagtaactatgtattctaagaaattgattgcacaaggaagctgatcattctaataagaaagtgtttgctgaatattagttgaaaattaaaattgttttagtttgtgtttcatagatgtagttaagcaattgtgttattctttctatcctgttctattttattgtctggactatagaaggggtagtgatcttgtaatggcagaggagatagagaaagggctgaaacaactgatggatgtagctaatatggtgcacaagaaggtgaaaaagatgaaagaggtagctaggaaagttgtccttaatggagggtcttctttcgtttctgttggagaactcattgatgttatgactgatagcaagtgatgactattgtttaatttcatagatg

SEQ ID NO: 103579 - DNA, 240 bp, Glycine max
  Clone ID: PAT_MRT3847_6454C.1
gccattcgtgcagcaccggatcctctcatttctccggcgataactctcccttttccggcgaattcaccgcttcctcgatatgaatcccgagtagtacgttcaatttcccccttttcgatcgcgttaacaattccattcattttcgcgattgtcgttcctgtttttcaaaagggtgtctgtggatttgcccaatttgttcggattggttgttttccgggggtgggggtgggggggtgcctt

SEQ ID NO: 103580 - DNA, 681 bp, Glycine max
  Clone ID: PAT_MRT3847_64550C.1
aaggttcttgtgggctatgcgttctccccaaacttcagacaatgcagacagaaccttaccagaaggtttcttggaatggatggaggaaggtaaaggaatggtatgtggatgggcaccccaagtgaaggttttggcacacaaagccattggggggttcgtgtctcattgtggatggaactctattttggaaagcttgtggtttggggtaccaatattgacatggcctatctatgcagaacaacagctgaatgctttttggatggtgaggggatatgaattggcagtggagcttaaagtggattatagaaggggtagtgatcttgtgatggcagaggagatagagaaaggcttgaaacaattgatggatggagataatgtggtgcacaagaatgtgaaggagatgaaagagaaggctaggaatgctgtccttactggtgggtcttcttacattgctgttgggaaactaattgataatatgttgggaagcaactgataacatagttgttgtgttttattagatggagttgctcctttcctgttagatgaataatcaaatggttgcagtttgtgtatgttagatggagttgctcctttcctgttagatgaataatcaaatggttgcagtttgtgtatgacgaatttgcttgagcaattatgaatattcttctgttctgcgttttc

SEQ ID NO: 103581 - DNA, 296 bp, Glycine max
  unsure (1)..(296): unsure at all n locations
  Clone ID: PAT_MRT3847_64551C.1
attgtnataaaccgcganacacaggttgnngnaccttaaaaccggaaacaaaagcaatcgttacttggnttcaagaattncctgcaatttcttcctatttctntgtgtangatttcttaagggaaaganaatncantntctgtggntggnnacaganttngtgaatcattntctgtnncantcttagtttattnaactgaanactctcctatttgatataggacttcgtgtcagatntaaactttcatctggttncttgtctcagttctctgtttaatttcaagttcaagctggtg

SEQ ID NO: 103582 - DNA, 752 bp, Glycine max
  unsure (1)..(752): unsure at all n locations
  Clone ID: PAT_MRT3847_64552C.1
cccacgcgtccgcccactggtccggtcagggatgggtccctgtatctgctcctcccatgctcagcgtctcccctatgcagcaaatctaaaccctaattcttctattctccgtcgacgcgcacaattcatcagcttcgcctcgaattcttctccacctcaagacgaggaggccactgccaagaaatcgtttgccgtggcgaccggcgagctgtttctagggctggcgacgcgcctgattaagagccgaaacaagggaagcagcagcctcgcagaagattcgggttcggtgggcatgtttgagaataattctgaggagagaatcggagcggtggtggaggacgagattgatcccgacgtggtttgggagcaaagagtgaaagacgtggaggcggagcgcaataggtatagccgcctcgtcaccagccctggctttagtttctctgccgctggacttctcttcccttnaccatcttggtgtcgctcaatttctcattcaaaatggttacattaaggaaacaacaccgttagccggttcctcagctggagctatagtttgtgctgtgattgcttccggagctagtatggaagaagccttgaatgctactaaaatattggctgaagattgccgcaatcggnggactgcattccggcttggggctgttctacgtgatattcttgacaagtttttgccagatgatgttcatataagatctaatggggagagttcgagttgctgtgacacagcttctttg

SEQ ID NO: 103583 - DNA, 1928 bp, Glycine max
  Clone ID: PAT_MRT3847_64553C.1
gtttgaatgtgcttcaaatacttgaaaccccatgatctctattcaatataactaatttgaggagttaagataacatgatggctaagaaaatggattctgactttctctgatcatctgagaagatacaaaaagttaaaagagcattctggataggtgaacttaggccggtttgagtggatgacataatttaaaataattatgcactctgttatgtttcaattcagatgtgactaaatagatatgatttatcatgtttatatattgtctcatttcaaccgggtcagggtcaaggatgggtcccagtatcttttcctcccatgctcattctcaccgtctcccctatgcagcaaatcttaaccctaattcctctcttctccgtcgacgcgcacaattcatcagcttcgcctccaattcttctccacctcagcctcggcctcagggagggttcaaagacgacgaggccaccgccaagaaatcgtttgcggtgtcgaccggcgagctgtttctagggctggcggcgcggctgattaagagccgaaacaggggaagcagcctcgcagaagaagattcgcgttcagtggccatgtttgaggagagaatcgaggcggcggcggtggtggtggaggacgagattgatcccgacgtggtttgggagcaaagagtgaaagatgtcgaggcggagcgcaataggtaccgccgcgtcgtcaccacccctggcttcagcttctctgccgctggacttctcttcccttaccatctcggtgtcgcacaatttctcattcaaaatggttacattaaggaaacaacaccgttagccggttcctcagctggagctatagtttgtgctgtgattgcttccggagctagtatggaagaagccttgaatgctactaaaatattggctgaagattgccgcaatcaggggactgcatttcggcttggggctgttctacgtgatattcttgacaagtttttgcctgatgatgttcatataagatctaatggaagagttcgagttgctgtgacacagcttctttggagacccaggggtttgttggtagatcagtttgattccaaggaagatctcatcaatgagtttttacctcttcctttattccaggatatcttgcaccaaggccagcaacgatgtttcgtaatcgactatgcattgatgggggtttgacattgtttatgccaccgacatctgctgcacaaacggttcgtgtttgtgcttttccagcaagtcgattgggattgcaagggataggaattagtccagactgcaatcctgaaaacgtgtgtagcccacgacagcttttcaactgggcacttgaaccagccgaagatgcaattcttgaccgattctttgagcttggatatctagatgcttctgtctgggcaaaggaaaacccagttgaagtaatagttcaagatgatagtcctgcgtttggaagtagcagtgcgacatagattgatgatataatgaactacgtaaagatagttcattatgcagattgaagatgcatgaggaaactacagaccattgaatcaacgatgtttccttgaaatggagcatcaaattaggaaaaattcacggggagaagtccataattaatctcgtttattcatatttattgtacattgcaatagaattagaggaaaggaaagaaagaaaatagttgagaggtaatatatttaaaatttactagccagaaggttcatgttgttggaaatttatagtgaatcataaatagaatttattgctagtttccctgtgcatgacaaagttatggtaatttagtttctcgactgtgacatcttttgtttactggagagagtggggttgatcagttaaatgagatcattaaagtcttgggaacactcaccaaacaagaattaaggtgcatgagatcaaactacaatgaatt

SEQ ID NO: 103584 - DNA, 149 bp, Glycine max
  Clone ID: PAT_MRT3847_64554C.1
ctaaatcctacactattatttcaagatgctctttatttttattaccttactctcatagagcaagtttttcacaggcgcagagaccttccacagaatgcattttaatgtttccaacatttactctaatcatctcaatccaattttgctcc

SEQ ID NO: 103585 - DNA, 538 bp, Glycine max
  Clone ID: PAT_MRT3847_64555C.1
cccacgcgtccgcccacgcgtccggcctatctgaacaggaattcacatattgaaatagcgaaagaaaaaaaaagggggggtttcggattaaggtgcaaaggaagcagcgatggaatttgccaagcccgcaacgattgggcgcaacaatgagacaccggcgattcatacggcggtgagaatggcatgcgatggccgtgaatggcgatgtcatttttgtggcctcgacagaggagaagaattgtacggtggtgaagacggaataacagaaaggttagtgtggatgggttttgtctgatggatagcggattcgcgatttgattttcgcggtggtagttcagagagagtttgtctatggcgacgtggtgcgccggtggctcactaactacagactaggtcctcttttttctctcaattctctactttttgctaatggaagagttctcttacaccaacaaaccaggttttaccaaattttgttacttttgcgtgatgggtctttgttaacattttgttgctgtgcaagtttcaatcctttttg

SEQ ID NO: 103586 - DNA, 421 bp, Glycine max
  Clone ID: PAT_MRT3847_64556C.1
gaggggagcaaccaaataaagggaaacttgaattaaatatgggaggaatgcatatactttgaacagccctatgaaacttaaatagacaggtgttcctgatggacaaagaggttggttatcctatcagcatccacactcataaaggtagctcaacaaaaaaaaaataaaagtggggactcattggcccttaaactaaatgggcaaaccaatacttgggggggggggctgacatctaatatgaccaatgaaagccctctcgaacaaattgaacgaacaagatgtggaactcaagttgaataaggcccaaagggaacaaggggaaaaatggtctacattagagtaagtggaacttgaacaaaacatccatattgcaagggcaagggactttggaactgcctttgggtctggaatatacaaaggc

SEQ ID NO: 103587 - DNA, 674 bp, Glycine max
  Clone ID: PAT_MRT3847_64557C.1
cttttgccaactcaacttcgaactcaaatcaagcaatcaatttcaaatccaaaaatggggagctccacaaccttctgtgccttcttcctcgtgtgtacgatcttgtccgtccacgtggcgcaatcctcatcctccaccctcgacctggacacctttttcctccctctcaaatccggctgccgcggatccgtcgccgagtgcagcctcctcgccggcgacgacgacaccgagtttctgatggagtcggagagcaaccggcgcattctagcaggaaggagctacataagctacggtgcgctgagaaggaacactgtcccttgctcccgacgtggcgcctcctactacaattgccgccctggcgctcaggccaacccctacagccgtggatgcagtgctatcacccgatgcaggcgttgaaaaagttattcttctcttttaatttcatttttttttatatatatatatttttgtaattgatgaaaattgtcatgccactacatatatacaagtagagaagagaaagaagacaagtagagatgaataaaatccaattgccgccgtttgtatctgtatctgtattgtaatttaatttaatcttaggtacacataatattattattattattatgatttggttgtgccaaaattattatcatggattgatttgttttttt

SEQ ID NO: 103588 - DNA, 306 bp, Glycine max
  Clone ID: PAT_MRT3847_64558C.1
aaaaaaaaaaaaaaaaaaaaaaaaaaaaaaaaaaaaaaaaaaaaaaaaaaaaaagggaaaagggtataaataaaaaaaagataaaaaaaacataaatacaaaaaaaataaaataaaatatggtctcaccttttataaattcaatgttcagttcctttacaatgccatgacttagattacctttagggtacccaaatttaaatcaattgtaccacattttaacaatatccagattggaaaaaccctaacattccctaacttattgacttttcaaaaaattcccctttctcaatgtggaatattaccc

SEQ ID NO: 103589 - DNA, 747 bp, Glycine max
  Clone ID: PAT_MRT3847_64559C.1
cgtggatcgcgtccgcattaaaatcttcaaccactctcgtcaatctgtctcaataatacctttctttgattcttctatggcattaaaatcttcagcaattctcatcaatctgtctcaaaatctgaacctttttttctgtcttcaatggctgctactcaaaagcccagtcagggtcagacccccaagaaactacgaaacctctgcaagacacggcgacgtttcgggcatctccgtcctcgatcaagattccgcgcctccgaaacctcatcaggaagcggcgttgtttcgtgcatctccgtcctggaccaagatttcgaatctccgcaggacgaggttaccgtttatctcaaagacccactaaccagccggaacgagtgctacctgttggactctttctttgggcaagaagataacaatgtgggccagatattctgcggagaagtgagccccttgattccgggaatgttcagcggatgcaattccacggtgtttgcttatggggctactggcagtgggaagacatacaccatgcagggaaccgaggaacaacctggcttgatgccactggcaatgtccatgatcctgtctatttgccagaggactggcagcacagcacagatctcatactatgaggtctacatggaccgatgctatgacctcttggaggtcaaagcgaaggagatttcagtttggggatgacaaagacgggaaaattcacctccggggactatctcaggttcctataaa

SEQ ID NO: 103590 - DNA, 372 bp, Glycine max
  Clone ID: PAT_MRT3847_6455C.1
gagagacgtagaagtgttggaatttagaaccccacaacacccatctttgggaacaaataattggggtggttcatctcctttgctagcaaggaacgtacccaaggaatcacttgaacaaaagtattcaagactcaactcagttcggaccaaagatgagatctttccagctgattatgagtactatgttgtgaacccttcgaatgagaccggtgcaagtgcaagtagtgccaagagatggaacaaagttagaggagttctgttgaagctaatatttgtgaggaaagagaacaaaacaacagttacattaggttcacgtttaaggaagagaagatggataccgagaatggatcctacaactaggtggccacaagc

SEQ ID NO: 103591 - DNA, 307 bp, Glycine max
  unsure (1)..(307): unsure at all n locations
  Clone ID: PAT_MRT3847_64560C.1
gtcnnnggngtacgnnngctcgtgcattcnggcnngngnggatngtacnaaagaacgcncnaacnttttggnccaatttattngngnacncctctnnntnnnngancatctncgntttgtcatacatatnnntnngntatcngtnggaatgaaagnctnntcanacntanatacattncataacngcttcggttcgctgcttntcttgntctttgcattctctcacgatggntttgatcttacaaatgtataagtgactcganacatnnnttacaataatttctcctannntttctcatcggagaga

SEQ ID NO: 103592 - DNA, 243 bp, Glycine max
  Clone ID: PAT_MRT3847_64561C.1
atgcaattagagctggatgatatctgggcgagtcttgacggttcaaggtttcatctctaatcctctgcatcaggaggatggtcacactcaatgcatcagagaaaaattatttggggatatttctagaaatggcattagagaaatccttggaagatcaaattcaatcgatggctgtcattcaattcccagagatgaccaagaatatgcggaggaacttttggttggcctcccggaaagccatct

SEQ ID NO: 103593 - DNA, 322 bp, Glycine max
  unsure (1)..(322): unsure at all n locations
  Clone ID: PAT_MRT3847_64562C.1
gtcgcaggcncgngtcncgnacgannntnntangtcacnntcnaanngancntattgctgccgntacgnaaaagttggancacggtcnncttnctgntnnnntntnangngcgtngccgtnnccgtannttccnagnggaggtgatgntgntgcngcgncctnctnttgccccaaagatangancccaagggactantccccaaagaagtttgatgatgatattgcgaagcaanacctcgnattacttgangggntccattcagnnnntgaattcaanacatcatcttgnttancnctanngcacgngtttgccacngtccn

SEQ ID NO: 103594 - DNA, 326 bp, Glycine max
  unsure (1)..(326): unsure at all n locations
  Clone ID: PAT_MRT3847_64563C.1
ctatgacggctcacgcacgcataccttagaacccgtgaaacatcgacaggccctcgcccttnnnttnttttttgggatttgtctcttactgccaaataatactcaaaaaaaaaaaatgggtatacctaccaacatgaaaaaaagtccacataatttttataagggaagaacccccgtttaaagggggacacaatctcaatacagctaaggaaagaaaaattggcctgccacaccctttatatggagagcctccaaaggtacaacttcaaaaagccgtaactttttggcattctttacctggtaatttgggaagataatcaggcccc

SEQ ID NO: 103595 - DNA, 1146 bp, Glycine max
  unsure (1)..(1146): unsure at all n locations
  Clone ID: PAT_MRT3847_64564C.1
ccacgcgtccgggtggctggaatatttaaaagtgaaggcagcacagatatgcctgaacttccggatcagcctctgaagagaggcaaagaatctcattcatgtttgctgacacatgagatccatcatcccgcccatcagcccagaagttgatagagcatccctttattcgagatcagtcagcaacaaaagctacaaatgtcagaataaccagggatgctttcccctacatgtttgatggaagtcggacgcctccgccagttttagatcattccaatagaacaagtttaacttcattcgatggagattatgcaacaaagccaattcccgtaacttcacgtacagtaaggagcccaagagataacacaagaatgatcacatctttaccagtatctccctgttcaagtcctttgcgacagtatgggccagcacacaagagctgtttcctttctcctcctcacccaacttacactttgatggggcaaaataccctcccctcatatccagtgagatcaaatgccacattcactcttgacccttttcatgaaactgctttctacaaagcccacacacccggtggatccccaagaagactcatttaagttgccgattgtatatacctcaaaaaccttttggtttccgtggcatgccttgtggtctgtggttgaacttcaatctgcactcttacgagtacaaactctatctaaaggattctggtcgattctttatgcatgagaaactagaccacgtgaggtacaagtgaggtgtaggagctctcgatgcaggcattggactggggacaccgtgctgtttgtaacaacaatttattgattactgtaaatccatggtgtttactgtctgtagtaacgtttatgttgtatattgttagttcatggcaggagaaaaaaagagagtaatttttcataaatactctttctctttttttaaattatgtatccatacttgagaaatgatacgtcatacgtgtatggtgtggaacttggttgccaaccatatccagaatgatgggcttcaaagtttaaagagccagagtcttgaatgtccaaaatattagttggaagttttattattacgcatttgggcccgnaaaaaaaaaaaaaaaaaaaaacaaattcagcggccgctcta

SEQ ID NO: 103596 - DNA, 512 bp, Glycine max
  Clone ID: PAT_MRT3847_64565C.1
agtcctgtttcagttgtagagacctatgactatcttttcctgcatggagctgatattttagatggttcaagatcccttacgtcaaagtgggaatctccatcactattgtccttgggcgatgatgttgaagccaatgcaagtcctaatgaaggttataccttcattgatgtcaacaaggaagcagagtattactcagaattgatgttgaagcttcgtactttgactgaacaggatataagagaatcagattgtccctcaaaacgtgtacgcgagactgaaaactttggggatatttgtttgatgtttgagcataaaattttcgaccatttattatatgaagttgtcaatgaagttttagaactttattattgagaattttgtcatcttgatgtgtaaagtatcaatatatagatgtaggatattacgtgatgattttgcaaatgaactcttctgtttgctacatgatacataaaactaacttcaagcgttgaatgaaggatgttatttttctc

SEQ ID NO: 103597 - DNA, 858 bp, Glycine max
  Clone ID: PAT_MRT3847_64566C.1
actcggcctcaatgtcacttttctttcttacctcttgggcatcactgtgactctgtgcatgcttgctgtgcttgaaattaaatggtctggcattgagctggaagaatggtggagaaatgagcagttttggctgattggagggaccagtgcccatctagctgcggtgcttcaaggtttgctcaaagtcatagcagggattgaaatatcattcaccttgacttcaaaatctggtggtgatgatgtagatgatgagtttgctgatctctatattgtgaaatggacatcccttatgataccacctatcacaattatgatggttaacttaatagctatagcagttggagttagcagaaccatatacagtgtcataccacagtggagccgtctactaggtggtgttttcttcagtttttgggtcttggctcatctctatccctttgcaaaaggtttgatgggaagaagagggaggacacctaccatagtttttgtgtggtcaggcctcatagcaatcacaatttctctcctctgggtggctatcaacccccctgctggtactgaccaaattgggggttcattccagttcccttgacaggtcattcttttttgtcagatgaatgaatctgtcagctatttttttatttaaaattagtttcttttttctcttgattctacatattggtggttctactaatgaatggacttaaattatgttgtctattgtgcttatgaattttgtttagtacttaattccagaaatgtgatcatatttagcattctgctgattaatggaaaaaaagggctgccgccgactattattcccgtcgccccggaatttaattcggttccggtccctcaagg

SEQ ID NO: 103598 - DNA, 208 bp, Glycine max
  Clone ID: PAT_MRT3847_64567C.1
cgcctacgctcatttcactcattcatctttgttcactcaatctcatcataatccttatggtcggtttaataagatgccgatcagaaacatcctcgtctcaaggcctgaaaaggccactcaccccaacacattgaaagcctctttggctgacttcatctcaaccttcatctatatattctccgactcacactcccgcatcgcctacaac

SEQ ID NO: 103599 - DNA, 178 bp, Glycine max
  Clone ID: PAT_MRT3847_64568C.1
ttctttctatatttttactcgcatgggcccggacatactgaattcccataggagcgcgccatgagaacatcagcgaaggcgaacggatcgaacatctgtgagtgcctcatggacatactagagagcttctgtagatacgaggttctccacctgaccccaaaggaaatctgcaaaacta

SEQ ID NO: 103600 - DNA, 145 bp, Glycine max
  Clone ID: PAT_MRT3847_64569C.1
ctctccatgctctgtccaatatggagcagccacatttaccaggactgggaaggctgcacaggtgactatccagtcttcagggacatttaccagcaaattccaagtggacaacaacaaccgcctgttactgcagcaggtctcattg

SEQ ID NO: 103601 - DNA, 521 bp, Glycine max
  Clone ID: PAT_MRT3847_6456C.1
cggaaaaaaaagaaaatacttactcccaccccatacaaaccatccgtgtgggagaccatacctatctctctccaacgaaattgaacgatccattggcgggagccaataaacaaacaatcaattggttggatcactcactacactctcttttccatcctaactcaatagcaggcaaaactctctttaatcagacccacccccttctatttaatggtcggtctctccccccaccttttctttcttttaccaagcggggggggcacaattggctgcggaccacccgcctgcgcgggcggctgaaacacaccccccactacctcgaataattgctgacccactctctattgcatgaaacacaggggaggaaacacacacgagaaagaagaatgacctacccccaccgaatgaaccaacagagagagcggctcgaactacctttcgatatagatcgaaggagcaatcgagggctgcctgtatgccgacggaaggttggtggtcccttcattggctgacggattggc

SEQ ID NO: 103602 - DNA, 655 bp, Glycine max
  unsure (1)..(655): unsure at all n locations
  Clone ID: PAT_MRT3847_64570C.1
atcttccaacaacaacgcttcgctcgcatccattctcactgcctcacacgacgtgccaaccacacccatcgacgtcacatctccaacgaattcaggcttctcattgacctcaacgccattgtgacctccattaacctcatcaatcccccgccccgcatctgtcccgactgccactatgaaggccgccctcctcctctccgccgtcgcctctgccgccgttggcgttgtcgccgaggacctcaagattgacgttactcttcctgtcgtctgcgaccgcaagacacagaagggtgacagggtccaaatgcactaccgtggcacccttaaggattcggggaaacaatttgacgccagctacgaccgtggcactcctcttgacttcgtcgttggctctggtcaggtcatcaggggatgggacgagggtcttcttgacatgtgtattggcgagaagcgacttttgactattccgcctgagtacggctacggccagcgagccattggccctattcctgccggttctaccctggttttcgagacagagctggtgngaattcaaggcgtccccaagcccgagaagatcgagacaaaggttgtcgagggtgccgagactgccgccgaaactatcagtgaagctgttgagtctgccgcatctgcc

SEQ ID NO: 103603 - DNA, 195 bp, Glycine max
  Clone ID: PAT_MRT3847_64571C.1
agagagagtaccattaagttagtcatggaaatacctataatctttccttacagaatgagcaacgaacatgaaaagccatcaggtgtgtattaaagaatttggaatgggatcgacataaagaaactatagttttttttagagggggccgatcgataaacaaaaccggtgattctaagcccacgaaaagaagcccag

SEQ ID NO: 103604 - DNA, 372 bp, Glycine max
  Clone ID: PAT_MRT3847_64572C.1
aggcgagagttgcacctgcagtaccctccggaaaatttttccggggctacacgcgctctcttctgggggcgcgctctttttttttttttttgaacgaaatttcaaaatgtctatgaggagcgaaatctacgggctagaacaattctggggccttaccacatttcaatagacaacatagttgggtttttcactagagaacatcaacggatacaggatgcttcagcttatcatataccattgtaagggcatcctgacaagatggtgcataaacatatcatcgtattgaacactacccatcttgacgggtacatgttcttatgtatattggaagtataacacatctgatctaatttccgagacaccaaccttttg

SEQ ID NO: 103605 - DNA, 196 bp, Glycine max
  Clone ID: PAT_MRT3847_64573C.1
cggctcaagcggctcgagacggctgcgctatgacgtctgctggggatcgaagctaggactgatgacccacagtgcttctctcgtctgtctttatctctctcttgctatccttttggctagtggcactgctgctagtgcaactccaagaagcgtagtgacatgccatcatgtttcatcaggcatcagaagccttctt

SEQ ID NO: 103606 - DNA, 675 bp, Glycine max
  unsure (1)..(675): unsure at all n locations
  Clone ID: PAT_MRT3847_64574C.1
gtcgcangcacgcgtacgtaagctcggaattcggctcgagtttgcgtcctaggcagcatagccggatcggtgctccgtgcatcggctacttggacgtgcgtggcaggcagagcaggccggaaaggagcaggttgggagtgtggtggggcccgcagcttcagcagtgccgcggtgactatggccccgatcaaggtgggagacaccattccctcagtggaggtatttgaaggggaacctggaaagaaggtgaacttggcagagctgttcaaggacaagaaaggtgttttgtttggagtccctggggcatttacacctggctgttccaagacccatctgcctgggtttgtggagcaagccggagctctgaatgccatagggagcacaagtggtggcctgtctgagtgttaatgatgtcttcgtgactgcagattggggtcgagcccaccaggcataatgcaaggttcagctcctggctgaccccactggagcttttggaaaggagacagatttactactagatgattctttggtgtctctctttgggaatcgtcggctaaaaaggttctccatggtgatagacaagggcgtagtaaaggcactgaacgtggagccggatggcacatgcctcacctgcagcctggcccccaacatcctctcacaactcttgagccctga

SEQ ID NO: 103607 - DNA, 1047 bp, Glycine max
  Clone ID: PAT_MRT3847_64575C.1
catcatgtcaacttcccattccctcacgttttctagtcttttcaaacaaattaaactacaagagctaatttaaaatttaataataaaaaaaaggataggactttgcagcttgatgatgacaaaagctgaaatatccaaggaaccaaaaaaagttgactgcagataatgtattgggcagttataacctaagaaccagctatgattattttttttggtttttttgaatttaaattatatacagggttggtgattatggaatgtttgtgaaggcacaaaaatgaattaactattgacatctaccattacctccaaatgatgctctctacctttaagaaaaatataatcagtaactcaaatgttgccttgaacaaaactcagctttgtcagctgctgccactgctatttgcttttggatgatatcttaccatttatttctgtacagaaagtcaggaacccctccacctccacatccttcggatgtgatgataaaagtcgagcattaaactgcctcaaacaaaaagcatctccccttgagttatccaacgttcaaagctttcactgtatttgctatctttgttgagttcttctccactcggccttcccttaatgctggatccagattcacttgcagatgtctcagtagttattagttcattcgcaatattctctgaggagatgctggttgacctttcaagcaattcctcttcacaagaatttccagaagaagaaagccagtccacatcaaggaaattggagcagtcacatgcatctccatgttcatcataacaaatatgatcactctcacaaatttggcccttgacatatatctgcctgcaatgacaaatatcacttccacaggtaaagatatctggagtagaccccgaaaggaaacgcttatcaggtttttcagacgagttctgaccatttgtaacattcaagttcctaattgtagtgtcactttcactgagaatgttaccatctgatagtgatcttttaatagttgacctaacgctgcggacgcgtgggtcgacgcgggaattccggacc

SEQ ID NO: 103608 - DNA, 1240 bp, Glycine max
  Clone ID: PAT_MRT3847_64576C.1
atgacgtctgatgcacgcgtactgaatgccgtccgcccacgcgtccgctcaatgtcctactggggctgtttttccatttctagctgctgttttacatctatgaacgtgactaaaaaagtaaaataagttttttgtgttctctcatgtttgagtacactgccctctctggtccagttgaaaatgaggatggggaagatattcctgaagaagaagccgtctgcagaatttgtttgattgaattgggagaaggttctgatacacttaaaatggagtgcagctgcaaaggtgaacttgcactggcacaccaagagtgtgcagttaaatggtttagcattaaaggcaacagaacatgcgatgtgtgcaagcaggaagttcagaacctacccgtcactcttctacgagttctaaatggccagacactttacttgacaaggagtagaagccaacaatacagggtttggcaaaatgtccccattcttgtgatcatcaacatgctggcatacttttgttttcttgagcagctacttgtttcaagtatgggatctggtgccgttgccatttctctccctttttcatgtatactatgtctacttgcaagcatgacatccacaattatggtgacgtgtgaacatgtttgggtttatgcaattgcccagtttgttatggtggttctggctggacgtcttttctattcactgcttaataagcaagccgttctatccatcctacttgctacatttactgggtttggagctgtgatgtgtggagcttatattcttattgagtttttgaagtggagaagacgatggcttggttcccaagaggtggtgctgcctcattaatcatattcatctgcgaccactcaccaagctttgaccgattctcaacatcatgaaaataatgtgagagacactgcagtgcatgtgagctgatgtagaatatactttgatattgatggtgtttagctgtacataaaaatataatgtatggactagttaatttaagcccattacacccttttttgactccgtggtactcgcgagaatacccaagtatcccattccttgagagttgagaccgctgactcaaagccagttgtaactgtgaggccaagaaacttttgagcaaatcctgtaggtgaaaagataaagaaagatggtttgtgtacaattttaggggaacccaaaggattttgtactataaagatggttgaaaagatgaatacatatgtgatatgttt

SEQ ID NO: 103609 - DNA, 692 bp, Glycine max
  Clone ID: PAT_MRT3847_64577C.1
gaagatttcctgaagaagaagccgtctgcagaatttgtttgatagaattgggagaaggttctgatacccttaaaatggagtgcagctgcaaaggtgaacttgcactggcacaccaagaatgtgcagttaaatggtttagcattaaaggcaacagaacatgcgatgtgtgcaagcaggaagttcagaacctacccgtcactcttctacgagttctaaatggccagacactttacttgacaaggagtagaagccaacaatacagggtttggcaaaatgtccccattcttgtgatcatcaacatgctggcatacttttgttttcttgagcagctacttgtttcaagtatgggatctggtgccgttgccatttctctccctttttcatgtatactaggtctacttgcaagcatgacatccacaattatgggtaggactttctctacttttagacaacactagacatttgaattctgcctttggtattgcactgattcccccaaatttgttcttagtgacgtgtgaacatgtttgggtttatgcaattgcccagtttgttatgagtagttctggctgggacgtcttttctattcactgcttaataaggaagccgttctatccatcctacttgctacatttactgggtttggagctgtgatgtgtggagcttatattcttattgagtttttgaagtgg

SEQ ID NO: 103610 - DNA, 367 bp, Glycine max
  Clone ID: PAT_MRT3847_64578C.1
gattgttggcttgtgcactgctcgtgcttctacggttatcacatctcctcttccatcttcatctcactcagtttccaagaatcataggctgaggggacagtcttagtcatccgtgagtgctgattacgagatggtcgttgagaaggcgatcaacaagctcacatgcttcatcactgtgaagagatccacacctttacagtcccgttcggcatggcactctgtaggatctgacgacgtgagatcgaagagctgtcgtcccttcgtgacacataaatcaccgctgcgaacgttctcacgggtcttacagcagtcttgacatcgctgtgaggcgtttggagccacttagagctgactttcccagtttgag

SEQ ID NO: 103611 - DNA, 331 bp, Glycine max
  Clone ID: PAT_MRT3847_64579C.1
gttaaacatataggtggcgcactgagtgtagcaggtgcacaacaaatgactgtgatggataggttaatggtggtatgcaaatcaagcaagaatgcactctgcatgttctatacactgtggtacaagctacaccatgagctgctgaggttgggatttttcttcgatttccacaggagtgcacaaatcactgtaacagtttcatcaatcaataaaatgctgaagcggcatgcaacatgatgaggccgtgccactaacacctcatatacaaatggttgaagtaacagcacctgcaactgctgaaacctacgctgcagtcgcttctgctgtgtca

SEQ ID NO: 103612 - DNA, 220 bp, Glycine max
  Clone ID: PAT_MRT3847_6457C.1
tttcatgtgtacgcacaccccagggtatgaatcttccgcatagtgttgtggggcaccaccaatttcttacaaatgggcagttctgagagggtaaactaaactccgtggctcttgttattccaagttagcatcaccaagctgtcatccctctatggcatcacgtggaaagtctgccatgaaatgcaagtgactggaaaaacgcaattgccagctaatattg

SEQ ID NO: 103613 - DNA, 325 bp, Glycine max
  Clone ID: PAT_MRT3847_64580C.1
tatagactaaggctagtgattgtgcttttgtcaattcatgaggaccttgcgggtcatggacattcgattgctgcaacggcgctgaccagacctactgcccgaatggaaatctttatcgtgttgttgctgagaccagtaatagctacttcgagagtgcaggcatggactgttcatgagctcactatgatgggtagtgctagagtggcactaactgaacttgtacggtctggactagcgtacattacggtatatgtatgggactacgatacccatgtggttgtcggttctaatgtccggagaatgggacacacacttgaataagtgt

SEQ ID NO: 103614 - DNA, 616 bp, Glycine max
  unsure (1)..(616): unsure at all n locations
  Clone ID: PAT_MRT3847_64581C.1
ctagcaagccgaagcatcaattcaacgtcagtaattgctatacagtgatatttttcattttcggtcaaagataaggtgcagaagaatgaattatgccaaaagatatgaatatatatatgatttttttctttttctttccagtcaccttgtgcttcctttagtgtgatatttaagataagattgcagagacaaagaacaacccagaaattgttcgaattaatgggaaattcctcttccagcggagcttcttgaatgaaatttgttctttatctttttctcctatttatttccggattgatggatgtagcatcaaagcaaatgccggcagataacattcctcagataaagtatgatgtctttataaactttaggagcaggacattcgtcacggttttcttggttatttgaccgaggctttccatcaaaagcaaatacatgcctttatttgtaaatggtaaacttgagaaaggagatgaaatatgaccatcacttgttggagcaattcaggcagggatcattgatttcgttggccatattctccgaaaactatacttcacgttggtatacgtatcactacaaggaaagntacctatagtgatagagaaaaaaatatcac

SEQ ID NO: 103615 - DNA, 311 bp, Glycine max
  unsure (1)..(311): unsure at all n locations
  Clone ID: PAT_MRT3847_64582C.1
accaatttcaaatgcacatcttcgctctgcactcaattccgttctgcgggatgctcctcatccacagatgcatcatgcatatttgacgtcatatatgcatgatgcatctgtgacgtcaaatacggtgacaattccatctcccgcggcttcttgagtcaggagcgccttaccatcaccgccaccgacatcgtccacgacttcctctttggctgtggccaagacaacgagggcctcttcaggggcaccgccggcctcatgggcctcagccgccaccccatttnctttgtccaacaaacctnctcaatttacaa

SEQ ID NO: 103616 - DNA, 1544 bp, Glycine max
  Clone ID: PAT_MRT3847_64583C.1
gtaagctcggaattcggctcgagaacaagttcacttgtgcacattcaagctggctgaaaggagagcatattacatatatgttatctcaacaaacaagaaaatcaatacgaacttgattaagataccatatatatagtactagatataaatacacatatttcccagaagatcgacaacctaataatagatacatcatacatgcatcaaactagttgaagaagcagtggcttcaatttcatacttaattcccacccaaattaaagcacttaatcttccatgattgccaaattaattaagtagcccatggtgtccttcaaaaaccaagacatagcaaacgatccaaactcttttttcatttgcagcatcaaaatgagtggtagcaacgatggtagcggcagctggagctctaggtttttgaaggtggctagtgcagctgccgctacagccgccgttgccggcggtttatatgccattctttcatcctcaacctctgctagctctgagatggaagtgccgtttggcagcgcacggcgtgagagcaaagaacgtgacgatggtggctccgggtctcatcctcgcgagggtgccaccacggtcagtcgttggaagaaacctgagattggttgggtgaagctgaacgtggatggttcacgcgacccatacaaaagttcctccgctggttgtggtggtgttctgagggacgcatcagcaaagtggctccgtggctttgctaaaaaaactgaaccctacttatgcagtgcaccagacagagttagaagccattctcacgggcttgaaggtggcttcagagatgaatgttaagaaactaattgtggagtcagacagtgactctgtggtgagcatggtggagaatggggttaagcccaatcaccctgactatggtgtcgtggaacttataaggacgaagcggcgtcgttttgactgggaagtgaggtttgtttctgtctccaacaaggcgaatcgtgtggctgataggctcgccaacgatgctcggaaattggcttgtgatgatgtttgtgaggagtatcttcatcccccggctaactgtaaccagttgctcttggaggatgagataggctgtgagagcttttagtcctttttttttttttcttcttctttcaaaaataagaaaagaaaaattactatgacaaggtttttgaaggacaccatgggctacttaattaatttggcaatcatggaagattaagtgctttaatttgggtgggaattaagtatgaaattgaagccactgcttcttcaactagtttgatgcatgtatgatgtatctattattaggttgtcgatcttctgggaaatatgtgtatttatatctagtactatatatatggtatcttaatcaagtttgtattgattttcttgtttgttgagataacatatatgtaatatgctctcctttcagccagcttgaatgtgcacaagtgaacttgttacgctatataatgaaatgatgtattgctcgatcgcttggtgagttaatgaactgagactagttctctcctcgt

SEQ ID NO: 103617 - DNA, 389 bp, Glycine max
  Clone ID: PAT_MRT3847_64584C.1
cggacgcgtgggcggacgcttgggcggacgcatgggaaaataattgctcaatcggtttggaatgactaattctaattagttttatgtgtttatgctgtcttctgatcaatcttcgctttttctatgcaggcaatgttatttcctttggattgttcttgtcgccagcgtaattatatactctgtctctatttattttttttgtataaaaaaaataaattgttgcgtgattatcatatgtatgcatggctgcatggctcgttgcggttctctttaatgcatctaagattcataattaaagtcaaagagtaattcaatctactatattatattttaatgtataaattgtggagtggtataaatagtaatgtataacatcttaatttctatga

SEQ ID NO: 103618 - DNA, 322 bp, Glycine max
  Clone ID: PAT_MRT3847_64585C.1
gggcttattccgagggaaaacaaccaaagggccccttttttttcccggtcccctaacttcccccaacaaaaggcggccaataaacccaaagttgaggccctccccttttattccctcacccccccaggggaaacccggggggccccttttcgggggtttggcccgggaccaaagggaaaaatctcgcccctaaaaacttgttttggcccttctataagaaaagccctttcttttaaccccttttttttttccccccccaaatgggcgggcgcttggaaaaggttgcttttcgggaataatttggggaccccggggccccttt

SEQ ID NO: 103619 - DNA, 909 bp, Glycine max
  Clone ID: PAT_MRT3847_64586C.1
actccaaacactaccctcttatctttctcttgttaactaattaaaatggcggctctcagaaaagccgtgttctttgtaatcgctcaatgcttcaccttttccgcatatgctgcaaggtttgaaatcacaaaccgatgcacatacactgtctgggctgcgtctgtgcctgttggcggtggcgtgcaattaaacccgggccagtcatggtccgtggacgtgcctgcaggaacgaaaggggcccgcgtttgggcccgaaccggctgcaacttcgacggttcgggccgcggtggatgccagaccggtgactgcgggggtgtcctcgactgcaaagcttacggtgcgcctcccaacaccctggctgaatacggcctgaacgggttcaacaatttggacttcttcgacatctccctcgtcgacggttttaacgtgcccatggactttagtccaacctcgaatggatgcacacgtggcataagctgcactgcggacattaacggacagtgccctagtgagctaaagactcaaggaggttgcaacaacccttgcactgtcttcaaaaccgaccagtactgttgcaattccggtagctgtgggcccactgattattccagattcttcaagcaaaggtgccccgatgcttatagttaccccaaggatgatccaactagcaccttcacttgtaatggtgggactgactatagggttgtcttttgtccttgaacccaataaccttacataatatataatatatgcactaaaataaagatcaataaaattacataaggcgtgtgcactttgcgtgcccctcctcgtctatgatgtgtgtacttctattctaaatgaaatggggtacttatgaataatatattaaactctttgggcaatgaaattccatttcaatacccaacc

SEQ ID NO: 103620 - DNA, 490 bp, Glycine max
  Clone ID: PAT_MRT3847_64587C.1
tacgtgcgagaagacgacagaagggaaggaaagtaataatgatagtgttagtgttggtggtttgcttggggaatgtgacatctttgatgggaaatgggtgagggatgaattcaagccttactatccattggggtcttgtccaaatgttgatagggattttgattgccatcttaatggaaggcctgatagtgattatgtcaagtggaaatggcagccaaatgggtgtgacattccaagtttgaatgcaactgattttctggaaaagttgcgagggcagaagctggtttttgtgggggattcactgaacagaaacatgtgggagtccatggtgtgtatcctacgtcaaagtgtcaaggacaaggaacgtgtttttgaaatttcaggaaaaacagaatttaagaagaaaggtgtctatgcttttagatttgaggattataattgttcagtagattttgttaggtcaccattcattgttcaagagtcaactttc

SEQ ID NO: 103621 - DNA, 1547 bp, Glycine max
  Clone ID: PAT_MRT3847_64588C.1
gtacgcctgcggtatcggtccggattccgggtcgacccacgcgtccggttgggttcaccgttcaccctcaccaggctcgagcaccattccaatttccatggcactctcctttcgccccgtcatccacccccgcgtcaccgaccggtcactctttcagttcctcccacccaagcctccccctcttccaacttcgccacctccctccgttctcctccccctcacgcgtcgccgcggcggcttccttccctcctgcctctccgacgacgccgtctccacccgcaacttcgaccgcggcttcaccgtgatcgccgccatgctccgccgcatcgagcccctcgacaactccgccatctccaaaggcgtgtcccccgccgccagagactccatgaagcagaccatctccaccatgctcggattgctaccctccgatcacttcgctgtcaccatcaccgtctccaaacaccccctccaccgcctcctcttctcctccatcgtcacagggtacactctatggaatgcggagtacaggatgtctctggcgaggaatctggatatgtcgggttctaggaatgaggggtcagattgtgaaacatgttcagaggttttggaggtgaaggatgtagcaaaaacagtgggtgatgagaaaatcgatgttgttaatgatttggaaagttgcagcagcagtggtagcttgaaagaatttggagatttgccttctcaggctctgagttacattcagcagttggagtctgagttgacaagtgtgatggaggaactgaatgcccagaagcaggaaatgatgcaattagaatatgacaagggaaaatggaacaatttgttggaatatcttcggtctctggatcctaatatggtgactgaactgtcccggccttcatcattagaagtggaggatataattcaccaacttgttcagaacatattgagaagattctttgtggatgatggtagctctagttttatggaacaatcagtggaaggaaatgtagacaatcgcgcgggcagtggtgatgagcttagtaatacgatagccacttctcgtgattacctagcaaagttgcttttctggtgtatgttattgggtcatcacttgagagggttggaaaatagattgcatctgagctgtgttgttggactattgtagagaaggtgataggcatgtatattcttttcttcctcttttttcttttcaccccttctcccttctcccttctcatataaatttttctgttcaatgaaaaactgagtgtgaaataatcacatgctctccttgcttctggcactctttcacttgattcatcataccaagcattgaagcatacctgtcatataatatttatgcttgcatgaataatgaagataacagtacgtcttagaagcaagattggttgtgaatagagcaccatactcattatacacaagatgttatgctacacatccaataaatcaatgtgaatcgcctgtggcgccgaccgcttcgttgtccctccctcccccgactataatagcggaccgcggcctaccggggg

SEQ ID NO: 103622 - DNA, 404 bp, Glycine max
  Clone ID: PAT_MRT3847_64589C.1
aaaaaaagggggggttcttaaaaaaggaagcccccaaaaaaaacataaaccccaacccctatgcggaaacccccccccaaactataaaaaaggacggagaaacattacccttggggaaaaaagaagaataaccaaacaatgcccactaaacaagcaaggccaaaaaaaatttatattgggaaaaaacggaaaaagggaaaaccccaaaaggaagccaaaagccccacggccaccggggaggcaaaggcaatttggtggcaaaaaccttaacaaggggggaaacaaaaaccccgggagaaccccggacgggggaaaaactcatcctttccccccggggaggccccccccaacgggaagagcaattataaaaacccgggcgatttggataccccaaacgattgggt

SEQ ID NO: 103623 - DNA, 382 bp, Glycine max
  unsure (1)..(382): unsure at all n locations
  Clone ID: PAT_MRT3847_6458C.1
cctctttcttgcagaagaagaagaaaaaccatcactctgtaaaattggtgagcaacactgacacacattacattagattgcaaacactcaaagaccaaaaatctctgggcaaagtagtaaaaccataatgctgaaatgcatctccttcaaatcctccacctcttcctcaacaatcccaaacccctctcaagagggcactcccagcatctctcgcgagtacaacctcgccgttcacaccacctcctacaccgagattcgctccaacgtcgaagcccaactccaccaccttaaccctaaccgcgaccgcgtccaagatgccctaaccctaattcccacgcgcctcacgcgcctnnatttaacgttctttgaccacaccgaaacc

SEQ ID NO: 103624 - DNA, 390 bp, Glycine max
  Clone ID: PAT_MRT3847_64590C.1
caaatattatccattacatttacatctgataatttcctcacaaaaatggacggacagagtttgtactcactagtgtttcttgtgcttgctctggccattgtgaacacagtgcatgggcaagggacgcgtgtaggggtctattcgagcacatgcccacgggctgagttcattgttaggtccacaggtcaatcccacgttaggtctgatcctaccttgggtgctgggacgcttccgatgcacttacatgattgctatgtgcaaggttgcgatgcttattgtctcattgtcggtgatggaactgatagaacagcatttgcaaaccttgctttacgaggatttgatgttactgataatgcatagacacagctagaggcttcgtgcccacgaggt

SEQ ID NO: 103625 - DNA, 495 bp, Glycine max
  unsure (1)..(495): unsure at all n locations
  Clone ID: PAT_MRT3847_64591C.1
gtgccggnattcccgggtcgacccacgcgtccgccccccccccccccccccaacctttttcttattggcatgagcctgtctctctatcctgtgtaatctgaagttttttttttttaaagtgacaagcttttgcttgttttggtgttccagttccagttagagccatgtccatgtcctttctctttacctttaccatcatcatcagctttggcttgtgcattctttatgcatctgcagaactccagaaattatcacactcttccaaacatgatggtgctcttagcttcttggtgcttgctgactggggaagaagaggcgcttacaaccaatcacaagtttctttccagatggaaaaggttgnagagaagcntgatatcgactttggagtttccactggagacaactctttgacaagggactaacttgtgaccatgacaacccgtttcaaggagtaattcactcaaatttacacangcaaaaaactttgcaaaaagc

SEQ ID NO: 103626 - DNA, 686 bp, Glycine max
  Clone ID: PAT_MRT3847_64592C.1
tgttgaaaaggtggtgagatatgattatttgttatattagaaatcggatttatctatttcttttttgttttataatctcaaactaatctttcttatttcagctttaaagcccactcagagtctattgcacttttttttcctttacaggaattgattggtctaggcgctcgcacgctcatggttcctgggaatttaccaataggatgtagtgtaatttatttaacgatttatgaaaccatagataaaacccagtatgaccaatttgggtgtttgaagtggttaaacgagtttggtgaatattacaaccataaatcacaccgattcggcgctaagcttcgagtatttcatcctcgtgctaatatcatttatgcagattattacaatgctgcattgcctttatatcgtgatcccacaaagtttggttttactgatcttaaaatctgttgtggaatgggaggaccatacaatttcaataaattaacaaattgtggcaatccaagcgtgattgcttgtgatgatccttctaagcatattggatgggatggtgttcatttaactgaggctgcatatagatttattgccaaaggtttaataaaaggaccatattctctccctcaatttagtaccctgtgtttcaggaatgtaagctttggctatttcaatagctaaattgtgcttctttttaa

SEQ ID NO: 103627 - DNA, 460 bp, Glycine max
  Clone ID: PAT_MRT3847_64593C.1
cttgaacgtaacgtttgtcgagatgcaaaagaaagtcaggtattaatttgtttgacttgatttcgagcatgattggtcaattatagtaagaatcaaattgtcacggtttggtgtgtcatgtgtgtccttttaagtttaattgtctatctcagggcttaactctgaagtgccaaatccttattatatatatcctcattcctcaaacgctgtattttatcgatggaattagtgttaaatgctggttatatgaaaatatattacattggcgttagattctctgctttgttagagtttctgtaggaagacaagaatgatcttttataagttataactattactcttggttcatcaagtttgaactgtcttgttaattttcaattccaaattttctttacaggaaagctggaacacctagacctctttggaatgcatcatctcagcttctaatggctgtaggtta

SEQ ID NO: 103628 - DNA, 178 bp, Glycine max
  unsure (1)..(178): unsure at all n locations
  Clone ID: PAT_MRT3847_64594C.1
caatgcacaacaagaacatgctctagctgttgaacacctgacaccaancttagctgctcttagaatggatctataccccaaatacataagtaatagtaacttttagaaaatatactttattctcatacaccctaaacttancaaaactaatactactattttatccactccacaagta

SEQ ID NO: 103629 - DNA, 429 bp, Glycine max
  Clone ID: PAT_MRT3847_64595C.1
cgaatattgacggcatcggcttgcaccatggggtgttccgtccttagcgagcttcctagactgctaagggctatgtgcgtgcagcgactaaggtgatgcctacagagatgatgatcaagaccgtgaggtctacgaaggctattgccggtgaacacgagccattgtgaggtacgactgggacgtttccgttgatggcaaatcggtcaatcacactgatgggatgtggcattgtccccagtgttgatgcatatcaggatggcaactgtgatgaggaagacgctattgatgaaggctactttggtacacttagtgcaagaagccatgctcctatggtgagtggtctagatggagctcaaatctgtaagggctaatgtgctgatgcagagtctgtgacgcaatgtgacaatgtatggactctagagatgcgca

SEQ ID NO: 103630 - DNA, 292 bp, Glycine max
  Clone ID: PAT_MRT3847_64596C.1
gtggactcggatgtttgcatgagaaaaatatatcaaacgagcgagaaagaatgaactagcttagcttgtcgtagaaattgagcgtgagattaatttcagagaaaaagaagagggaagaaaatgaaaaaaaaatctcttctgactgagccgttaaagtgtctattgttgtttagcttcgtacccttgattagtgttgaattaacgatcaaataaatattggtgcaatttattccctgattaatatgtatgcactatgcttaattccagagtgacggcctctttgtaatttctt

SEQ ID NO: 103631 - DNA, 202 bp, Glycine max
  Clone ID: PAT_MRT3847_64597C.1
cggctagagcttgattcctctatatagatcttcctaatctgtggtcaggaacactatgcataatatagactagtgctttgctattgaaacatagatagccatggatacaagagttgtttatatattgtaagggtctgtctgatgctagagaagatgattatgggaacaggattgatcctcaaggattgctatcttactggtg

SEQ ID NO: 103632 - DNA, 379 bp, Glycine max
  Clone ID: PAT_MRT3847_64598C.1
gggggggttttttttaagagatgcggggtttttttcacgccttgccggacaggttgctgtcattattcacatctttgagagtgcttgaagaccaagtgtatagagtgtaaccgttttgaagcattccattccggttctcaggatgttgccataaagtgcaaagcaggggttgacggccgatgtctttagatcagacttgccttagcaatgttgtctagttgcatagcctgcctgagattgggaaacactgatgctcagattttgatgggtccagggcgcatattcatagctcatggtcattttttcaaaaatttgattcagaaagtggcagttcaaattgttacatccgaaaagagtttcctggggtgtgtttgatcct

SEQ ID NO: 103633 - DNA, 315 bp, Glycine max
  Clone ID: PAT_MRT3847_64599C.1
aggcgttcgaacacgtccgagagggctgcttaatggggcccaggctggtgaggactgtgcattgagactgttgacaatcacggacgtttgttgcaaatggtctacttgatggaacaaatcagttggaagaacttgtaggtggccgctctactggattatcggataggggcgcatccttgccacgccttaggagttggataagcgtgacctgattgagatcaatggctgtggtttaacaactctgtgtctggtaaaaccgtgtgtttacccaactaaatctcactagtaaactgccctggcactccagttggatgt

SEQ ID NO: 103634 - DNA, 403 bp, Glycine max
  Clone ID: PAT_MRT3847_6459C.1
tttgcagcctatgaattcaagatgagcttctttggctttttctctcatgttctgtaaatgtgaagaatttaaacctgtcagcgagtaaattcacagttattcccgaatgcatcaaagactgccgctttttaactacccttactttggattattgcgatcgtcttcaagaaattagagggattcctccaaacttgaaatatttctctgcattaggatgcctagccttgacttcctcaagtataagcatgttacagaatcaggaactacatgaggttggagacaccttctttattttgccaagtggaaagattccagggtggtttgagccatagtcggggaccgtcaatttttttctggttccgtaacaaattcccagccatagttgtttgctttgtaaggaaga

SEQ ID NO: 103635 - DNA, 244 bp, Glycine max
  Clone ID: PAT_MRT3847_645C.1
atcctcgatggtaaataatacttttctccacagcaatcaatttatatgagtattcaaagctagactgcgttcttggaacttcttatgggtatgtggaatataactagttactctgcagtgtaatggatcgggaaggaggatctatcgtcggatcttgatactactcggagctcgggattcgtaaggatggctcttactatgatattcgcactgactagcgcaaaatcgatatgaggtggtaccc

SEQ ID NO: 103636 - DNA, 591 bp, Glycine max
  Clone ID: PAT_MRT3847_64600C.1
ggctcgaggtggcatttacagattgcccaggtcctcagtctgaatctgctggaaaatccgatgcatgtgaagggtgcccgaatcagcaaatttgtgccactgcccccaaaggccctgaccctggtactcttcatctttatcttattattttatgcttcttcccagaaaccatcaacttcttcaaaatggcattatttatctatgtgaaatatatgatttgatatgttttaattacaacagtttagtatggaattattttccttattactcattatttagtttccttattttgtaaacctccttcattataaataagagtatttcatgtggtctgatatgacaacacacaacagtaaataatccttacgatctatataagcatgctgtgatgccacagctaatgattctagaatttgggactgtttctcagtatgttgtgaccctagcgtgcctatttagtagacaatgctagtagtatgatttctccccagctttgtttatgtggtttgattagcccaggaagtgagcaaatcatttcctccacagtcaagatgtttgcagcactgcattgagagcattcttgcactgctc

SEQ ID NO: 103637 - DNA, 338 bp, Glycine max
  Clone ID: PAT_MRT3847_64601C.1
gtgcggcgctcgagccggccgggttcggatattttgcttgttatctagtttatctttgtaaacatgcactatagaaagtgttgagatttgagaggagagaatgtgaaaagcatgggagatgaacttgctcatgctctcagcaatgtgatctcctccatttttttctgtttagatcatgaattgttgatttaagatggtcccacagaaacaccttttatatattggtattgtgtgtgtttgctgaattttgtaattgtcctaatattctagggctgaaatctgtttgctagattttatatggaattatcgttagcttctgtgagaatgctaggtttcgt

SEQ ID NO: 103638 - DNA, 245 bp, Glycine max
  unsure (1)..(245): unsure at all n locations
  Clone ID: PAT_MRT3847_64602C.1
anaaactttcgaaagattttatncaattgaaatcttaaaaatnactgggataaacntnaganntttcnatgatnggcatngactaggtnaacaatttaattggnttggtcgaatggtatcangnaaatggagtantaactcccatttnttattnattntngaattanccgatcanctgcttggttagcgnacattntcttttggnttncaaaaatttnccgganaaaatttgaatctatgtgtnt

SEQ ID NO: 103639 - DNA, 450 bp, Glycine max
  Clone ID: PAT_MRT3847_64603C.1
ctatgctatatttttttctcctccatttattccgacgactcctattaccccgcgttaaaacaacaaggcgccccccccgagaagcggcgtaaagacaaagccaaacagagcacccctcgtcaaggagaggaagtcgtattcccgccgccagtgccccaaaaaaaaaagcggggtttgccacaaaaaaaaacaatgggggacaaaaaaaaaaaaagcgaagcccgcccggggggatgccccggccaccctacaaagagcaaaaggcccaggccaccctgtgggacaaatactgaacccccccccttattatggcggaccccctcccaggatattatgcccccccccacgcccagggctgcacacagaattcaatggggggggcgggggcccaacttccgacatgctcaaccaaaaaaaacccccagaggggggggagagaaggaatttctt

SEQ ID NO: 103640 - DNA, 2697 bp, Glycine max
  Clone ID: PAT_MRT3847_64604C.1
catcacatccaccactacgagtttctctctctagaaccgccgaagcgaagaagagagacgagagaagagagaagagaatcacggttggctccgccttgtacgagatgtcgcagaccaatacgagtttctctctctagaaccaccgaagcgaagaagaagagagaagagaatcacggtttcgccatggacgcggcatcgcagctcgtctcctgcggaatcgatcccttccatcgcgcctcctctccttccccgcgccaccgccgccacagcaacctcctcctcctacgccgtcgctccagccgtgtcttcgccgtctccgccgagccgaaacccgccgtcaacggagcaaactcgaggccgcctccgaccagagccgtcaatggcggcgtctccacgagaattggagatgtttcgaaggagattaagagagtgagggcgcaaatggaagaggatgaacagttagcgacgctcatgaggggtcttcgaggccagaatttgagggactcgctcttcgctgaggacgatgttgaacttcgtcttgttgaggtagacgagagtagtgagtttttgccattggtgtatgatcctgccagcatttctgcatattggggaaaacgtccacgcgcggttgcaacgcgcattgtgcagttgctatcagttgcaggaggttttctttctcgcattgccggggatgtgattaacaagaaggttaaagagaatgaagttgctagggccattgagttacgtgaaattgtgacatctttgggtccagcgtacataaaactcgggcaagcattgagcattcgacctgatatactgtcacccgtagcaatgacggagctgcagaagctatgtgataaagttccttcatttgcagatgatgtggctatggctctaattgaggaggagcttggtcagccatggcaaaacatctattctgaactatcatcttctcccattgcagctgcatctcttggacaggtatataagggtcgcctaatggaaaatggggatttggtagctgttaaagtgcaaagacctttcgttcttgagacagttacaattgatttatttattattaggaacctgggtttggctcttcgaaagtttcctcaggtctccattgatgtggttgggttggttgatgagtgggctgctcgattttttgaggagttagactatgtgaatgaaggtgaaaatggaaaccgttttgcagaaatgatgaggaaagacctaccacaggttgtcataccaagaacctaccataaatatacatcaaggagggttcttacgacagaatggattgatggagagaagctgtcacagagcacagaaagtgatgttggagaattggttaatgttggagtcatctgctatctaaaacagcttctagatactggattttttcatgctgatccacacccgggaaatttgatccgcactcctgatggaaaacttgccatacttgactttgggcttgttacaaaactgactgatgatcaaaagtatggaatgatcgaagcaattgctcatctcatccatcgggattatccagccatagtaaaagactttgttaaacttggttttattcccgatggagtcaatttggagcctatcttaccagttcttgccaaggtttttgatcaggccttagaaggtggaggggcaaaaaacatcaattttcaggagctggcatcagatttagctcaaattacctttgattatccttttaggatacccccatactttgcccttataattagagctattggggttctggaagggatagctttagtaggaaattctgaatttgccattgttgacgaggcttatccttatattgcacagaggctcctcacagatgaatctcctcggctaagggatgctctgcgttacactatatatgggaaatctggggtttttgatgctgaaagatttattgatgtcatgcaagcctttgagaattttattactgctgccaaaagtggcggtggagagaacatgaatgggaatatggctgaacttgggattctttctactagtcagtcagaatatttgttgccaggattccaatctgtcattcctctatcacagcagccagtgcaaacaagggcagctttagcgtttttgttgtctgacagggggaattttttccgagaatttcttttggacgagatcgtcaagggcatcgatgcagtaacaagggaacaactggtgagagtaatgtccttgctaggagttcagaatgtaacccctgttttcagcatggtacctacagtgggaccctttaagcctgcggctcttatacccaccataactgaagaggatgaagttatattgaacaatgtccagatggtggtggagttcttgactgctggaagttccctatcaagaacatctggtcaggcactgaatattcctcagattatccaagagcttctcccagtgttaccaggcatctctgttaaagtgcttccggaggttgttagcagattatcttctcgggttttagcacgattaattcgtgatacatttttgtaagagaattctgtctaccttactgcacacaattgtgtatattttgacagttgttcaaaaattgtatatatgaccattattttacatattttcatgttgcagaaaattcttaattacatattttacatattttcaaaaaaaaaaaaaaactccgacaag

SEQ ID NO: 103641 - DNA, 715 bp, Glycine max
  Clone ID: PAT_MRT3847_64605C.1
gattgttaagggcattgatgcagtaacaagggaacaactggtaagaacaatgtccttactaggagttcagaatgcaacccctgttttcagtatggtacctactgtgggaccctttaagcctgcggctcttatacccaccataactgaagaagatgaagttatattgaacaatgtccggatggtggtggagttcttgaccgcaggaagttccctatcaagaacatctgatcaggcgctgaatattcctcagattatccaagagcttctcccagtgttaccaggcatctctgttaaagtgcttcctgaggttgttagcagattatcttctcgggttttagcccgattaattcgtgacacatttttgtaagagaaatcatcctactttactgccttaggccacacaattgttacacgtgtattatatatttaaactaatcggtaacccgtgcgtacgcacgggtctttgtctaaaaaaaaaaaaaaaaaaaaaaaaaaaaaaaaaaaaaaaaaaaaaaaaaaaaaaaaaaaaaaaaaaaaaaaaaaaaaaaatctgggaatgcaacaatcaaaaaggagagattgggcctaattggtacaagaaaaaaaaataataaaaaaaaaataaagaaaataaaaatggggggggccctcccttttttgattatttctcccaagaataaattctgggccgggaccttggggggttacaattttt

SEQ ID NO: 103642 - DNA, 413 bp, Glycine max
  Clone ID: PAT_MRT3847_64606C.1
gggcgtcttatggctcatgtccgtcgataaagaatattcttcttctagactcagagggaaagcgtgtggcagtcaagtatttttcagacgactggccaaccaacaactcaaagatcgcttttgagaagtttgtgtttagtaagactgttaagacaaatgctcgaacagaagctgagatcacattactcgacaacaatatcattatttacaaatttgtacaagatctccatttctttgtcactggtggcgatgatgcaaatgagatcattttagcttcagttcttcagggtttctttggtgcaatcacgcttctgttgaggaacaatgttgacaaaagagaggcgctggaaaacttgcacctcattctattatgccttgatgagattgatgatggagggatcatactcgaaaca

SEQ ID NO: 103643 - DNA, 548 bp, Glycine max
  Clone ID: PAT_MRT3847_64607C.1
cagttattagattataaaattaatcatgacattttgtatttggcaagaatgagaatgtacgaacaatggaaaatagttagctgttgtgattgttatggcaaataaggttggagatggttacgtcatacattgggaaattgccaaaagactgcctcgcccatcagttagttgatgtagccagatagcagttcagtaagggaagggatctgcattagctttggatccttcaaaactatataatgtatggattgtgtttatgtatattgtgattagataatttctatggtctttttatcaacctgtaataataatatcctggaggtcatgtcagatagatgatacgtattaggctatgctttgtgagacccacaaatacgagtcatgtctgttatgatttcatatcccttgacttgtctcttattgattggtatgcctaattaaggctataatatcaatgatgccaagtgagacgcccatgcatttggatttggttgttacagaccatgctttgtgagaaccactaatcaatgctaaattgaacatatttg

SEQ ID NO: 103644 - DNA, 4613 bp, Glycine max
  Clone ID: PAT_MRT3847_64608C.1
gggtagatgaggtgaaatgagagcattggtgagagttgagagtgagtgagttatgttatcattgttatggtgaaagtgaaaccacacgcaaagctgaaagagaagctattcagtgattttgattcagatcgtgtctgtgtctacaaccatgtacagcggctccagcgacggcgaaagccatgacgctcctcaaaatcagaggaaaattccgcctgcatcctccatgctatgggtccgcaatcttcgccgtttcatcggatccggcgccggtctcggatccgaagccctgatggagcttgaaactaagagaattttgctcgacatttttaaggaaaagcagaagaaaaccgccgaagctgctacaattcccactttctacaagaagaaacctgaagatggatcaatcagtcatagagttcagagattggcaaagtatcgctttctaaggaaacaatccgatcttttgctgaatgctgatgatttggatgcaatgtgggtgtgcttaagagagaactgcgtcattgatgatgctactggtgcagaaaagatgaattatgaagacttttgccacattgcctctgtatgtacagaacaaataggtcctaaatgccggcggtttttcagtccttcaaactttatgaagtttgagaaagatgagcagggaagaattgccattctacccttttacctttatgtgatgcgaacggtttcacttacgcaggcaagaattgatatgagtgagcttgatgaggattctgatggtttccttcagccacatgaaatggaggcctatatacgaggtctgatacccaacttggcacagttacgtgacatgccagctgcctttgttcaaatgtattgtcgtattgctgcacacaaattcttcttcttttgcgatcctcatagacgaggaaaagcttgcatcaagaaagttttgcttagtaattgtctccaggaactcatggagcttcaccaggaaagtgaagaagaagtcacggacacagagcaagccgaaaactggttctctttgacttctgctcaacgcatatgtgacatgtttcttgctcttgataaagatacaaatgggacattaagcaagcaggagctgcgagaatatgcagatgcgactctggctgatatttttattgagagagtatatgatgaacatgttcgacgtggaaagagtggtggtgggaacgcccgagagatggatttcgagagtttcctggactttgttttggctttagaaaacaaaggctcgagcaagcgtggctatgattttataattggtacctctgagcatggtcagattattaagtcttctgatcttgaaataccttctttcagacatttattgattgcctttggtggactggctgggttggaagagagtattgaagaagatgataacttaaagggaaaaaaggcacaggatgcattcaatttatatttaaatacatacggcgaacaattcgaacagaggaagctattttgatctctctccaaccgatcaggagcattgacagtcttaaaattcatatacattccccaaattctggctgaaactaaacaaagattatggtgatctttaacatacattccgaaaacgtctctaactccatcgaaggcaaggccggttctaggaatggcgaagaagaacaagaagcagacaagagatgccgaggtggaacctgaactcaacaccaaaaatggcgaaaacgatgattctcacaataagaagaaacttaagaaaaagagaatgaggaagaaaatacccacagttagcatagccgtgcctgcttccatcattgacaacgttccaactctcgagctcgctacccggttggctggtcaaatcgctcgtgccgcaaccattttccgaatcaacgaggtggttgtgtttgacaataaaagtaacccagataatgattccgtgctggataatgtgggtgatgaaagtggtgctgcttttctgatgagaatcctgcagtatcttgagacacctcagtatttgaggaaggctctctttccaatgcataacagcctaagatttgtgggcctgttgccaccccttgatgctccacaccatttgcgcaaacatgaatggtttccatatcgagaaggtgtcacagtaaaagaaagagactcaaactctggggcaacgctagttgatgttgggttagtgaagaatgtaatagttgaccaaatatttgaaccaggaagaagagttactgttgccatgggaactgaccgcaatttggattctgatttaccacgccaggtcatctcatcatctaagcctagggaagaaggaacatattggggataccaagtgcgttatgcacataatatcagcgcagtatttaaggattgtgcatataagcgtggatatgattttataattggtacctctgagcatggtcagattattaagtcatctgatcttgaaataccttctttcacacatttattgattgcagttggtctgtgacaaaaaaaagtttaacatgaactttttccatccagcatgttgaagttttaaaattcgtcccaaattttggctgaaaggcattagtattaatccttccccatcccaaagtggccggattttttttcccagatgagtgttccccaagtaaggaatgttgaaatcgacccttttctttgtttggagccttataaaaattaaatagggtaatcatgatacccgcatgcgtatcatcatatcatgaactatgacatgtatctctacaattttttgatatatcattatgaatttcatacaagcattgatgttgcttttcacaccacgcgtcaatttcattatttccattaacacccgattctgcttaaattggcacaccaccaattttcgtgggaacccgaaccaaaacaaaaaaagagtccaattttgtgaaaattattaccattcattcttattcatcaacgaccccccttctgtgcccacttccaaatcttctcctctcgctatgggttgtggctcctcccttccagatagggattcaaggcagttgggtcgacccaattcagagaatggtggagggcaggacgccaagaatctaagggtcaagcttgttctcttaggtgattctggtgttggcaaaagctgtattgttctacgatttgttcgtggtcagtttgatccaacatctaaggtaactgttggagcttcttttttgtcacaaacaatagctctgcaagactctacaacagtcaagtttgaaatatgggatactgctggtcaagagaggtacgctgcgttagcaccactctattaccgtggtgcagcagttgcagttattgtttatgatataacaagcccagaatctttcagcaaagcacagtactgggttaaggagctacaaaaacatggaagccctgatatagtgatggcactggtcggtaataaagctgatcttctcgagaagcgggaagttgctgtccaggatggcactgactatgcagagaagaatgatatgtttttcatagagacatctgcaaagacagcagataatataaatgaactgtttgaggaaattgccaaaagattgcctcgcccatcagttagttgatgtagccagatagcagatcaggaagggatctgcattagctttggatccttcaaaactatatagtgtatggattgtgttttatgtaaattgtgattagatatttatgtggtctttttttatcaacctgtaataataatatcatgtagaccatgtcacatagatgatacatattaggctatgctttgtgagacccacaaatacgagtcgtgtctgttatgatttcataacccttgacttgtctcttattgattggtatgcctaattaaggctataatatcaatgatgccaagtgagacacccatgcatttgaatttggttgttgtagaccatgctttgtgagacccactaatcaacgctaaattgaacatatttggatgttggtgattgtataaaatttacattgcgtcttgacacccctgaaggcttgacatacttgtttcgatgccttgatcttcaaggaaggggttacctcactactgctgatgttcactcccttttcagagatgtacaccataaatggattgagggtggcaactatgaactttgtatcgaagatgtaagggatgaaatctgggatatggttaagccagaagatccactcaaaataacattggcagacctactggcctgcaaacagggtggaactgtagccagcatgctcatagatgtacgtggtttctgggctcatgacaatagagaaactcttctccaggaggaggaaccggaggaagaataactctgatcggagacttgctaacataaaactgctgatacaacttttcaacttaggattcctcacaagatgtaacaccgctcatatgtttgaattattaaatgtggaattagttgtgtttgtcggcattttaactgtaaaatcatcataaattagtgtgtatgtagtatagccatgggttcgaagttcgatcgtaaactttagccaaatgcttatgattgaatacaaagtgatgatattgctttgttatctatgctaaaaaaggggggggggggggggggggaggg

SEQ ID NO: 103645 - DNA, 467 bp, Glycine max
  Clone ID: PAT_MRT3847_64609C.1
ccgccagactgctggaattaggcttaccgaggtcgcttccgaggtacttgagccctggcttgatgaggatcatctgcagcagcctgtggttgaagtcggacaccccgatggacttggccaatcctgcatctttacactactccatggcctcccatgtggcacagagatccactgtgtcaaatagtatttttccattttcatcttttgggatcacttactcacctggctttatagacactggaaaatgaataagatagaggtcaacatagtccaattgaagatttttcagtgacctttccaaggctggtcggaccaactctggtcgatgggaattgctccaaagctttgaagtgtagaatatgtcttctctcttcacactgccatctgcaatcttgcttcggatggccagtccaacctgctcctcattattgtaaacatgtgcagaatcaatatggtggaacccggct

SEQ ID NO: 103646 - DNA, 331 bp, Glycine max
  Clone ID: PAT_MRT3847_6460C.1
gagcgagcagtgtcttacacactcagaggggtgcgggacattaggtagtgacgccacaattctttgtgtttgctgaaaatgcatccgtcaatcgtaatgctagaaactaaccacctataactaccactcacatgtacgcataattgaacgcatagggatcattctatagctcctaagcgcctactctgcgacctgagggacttaccgagagacccaacaactaaatgcatcgcttatccaatatctgaggacatgccacattgatacgtaacactgatgagtcctgctcataggacgtacgctctacgcgtattgctaatgactaatcact

SEQ ID NO: 103647 - DNA, 649 bp, Glycine max
  unsure (1)..(649): unsure at all n locations
  Clone ID: PAT_MRT3847_64610C.1
gcggctgcctttgttcaaatgtattgtcgtattgctgcacacaaattcttcttcttttgcgatcctcatagacgaggaaaagcttgcatcaagaaagttttgcttagtaattgtctccaggaactcatggagcttcaccaggaaagtgaagaagaagtcacggacacagagcaagccgaaaactggttctctttgacttctgctcacgcatcgcgacatgtttcttgctcttgataaagatacaaatgggacattaagcaagcaggagctgcgagaatatgcagatgcgactctggctgatatttttattgagagagtatatgatgaacatgttcgacgtggaaagagtggtggtgggaacgcccgagagatggatttcgagagtttttcctggactttgttttggctttagaaaacaaagacacccctgaaggcttgacatacttgtttcgatgccttgatcttcaaggaaggggttacctcactactgctgatgttcactcccttttcagagatgtacaccatanatggattgagggtggcaactatgaactttgtatcgaagatgtaagggatgaaatctgggatatggttaagccagaagatccactcaaaataacattgacagacctactggcctgcaaacagg

SEQ ID NO: 103648 - DNA, 1136 bp, Glycine max
  Clone ID: PAT_MRT3847_64611C.1
agataatataaatgaactgtttgatctaattgtaggctatgctacgagcatattggcccttgctagtgcggcatgcacataatagcagccagtattaaggattgtgcatataagcttatgattatattggtactgagcatggtcagattattaagtcatctgatcttgaaatactttcagacatttattgattgcctttggtggactggctggcttggaagagagtattgaagaagatgacaacttaaagggaaaaaaggcacaggatgcattcaatttatatttaaatacatgtccacatcaggggagccgaacaattcgaacagaggaagctatttttatctctcttcagtacttccaagaaccaatcagccgagcattccagtgttgaacattgttgaagtcttaaaattcatatggcattgattctccaaattctggctgaaactgagacgaaggcattagttcaaaacaaattagaaattgttcttctgcctcattccaaagtggccattatgtggcaggattcttttccagactcttttggaagttgtaacactatctgttgtttaccttggttgtaaaacatgcaaatagagtagtgttccatcaatacatgttacatcggaaggaatagatgtcaacgttttgtacgattgtgttaagcttcacgatcactctgcgttttccttatgtttggagccttataaagatagttcctatggaggggctaaagatgatcttggaataggaacaaaaattccaagattgcatcttttctaacaaaggaaattgccaaaagattgcctcgcccatcagtcagttgatgtagccagatagcagatcaggaagggatctgcattagctttggatccttcaaaactatatagtgtatggattgtgttttatgtaaattgtgattagatatttatgtggtctttttttatcaacctgtaataataatatcatgtagaccatgtcacatagatgatacatattaggctatgctttgtgagacccacaaatacgagtcgtgtctgttatgatttcataacccttgacttgtctcttattgattggtatgcctaattaaggctataatatcaatgatgccaagtgagacacccatgcatttg

SEQ ID NO: 103649 - DNA, 382 bp, Glycine max
  Clone ID: PAT_MRT3847_64612C.1
cccacgcgtccgaccacgcgtccgcccacgcgtacggtttaagacctgttgtttgcgacctctgtcatgttttcagaattgtccatgtcaaaagctgatttcttatgttaaaaaaaaataaacaaaaaaatgaacaattccgtcattagagcagcataaagaacccaaaaaaaaaatataaacaaaaaagtagggtcggcaattttaaaaaaccaaagctaacatacgacgggtaaggcaaggtatattgttttttatagagtcccctaaattcaatcaccggaccggggttttaaaaggattagaatggaaaaaccttgtttgtaccaaaattaatgccttaagaacaaatccctttttcaccctttgagttaatataaaa

SEQ ID NO: 103650 - DNA, 314 bp, Glycine max
  unsure (1)..(314): unsure at all n locations
  Clone ID: PAT_MRT3847_64613C.1
ccgcgaagaagagaccccaagagatncacaactccaaagcaggagctataaattcattgttaacggtatattttaatatcaccaaagggaaaataatgctaaggggagactgagacatgtgctcaaacaactcactttttgggagagacgctctatgctattgcatggatgaccacaaaggacaataaattggctatgaggggtttcctcatacttcagagaatgcccctcctacttaaaaaaaggcgggagtctaacacccaatataagaggaggagaaacctgggttggatggttatggccccccctttgta

SEQ ID NO: 103651 - DNA, 155 bp, Glycine max
  Clone ID: PAT_MRT3847_64614C.1
gggagccagagtaataataatgggtataatgctgcagcaacgggtattggaaaaaaaattattccaaaaggaaaagggggattccaaattactattgtggatgccttggatgggccttaaatgaatgatattatacctctccgaccagaactttt

SEQ ID NO: 103652 - DNA, 537 bp, Glycine max
  Clone ID: PAT_MRT3847_64615C.1
aagaaaagaaaatattttgttaacatttttttcccataaaaatatgtttggtaatacggggtttccgctaagaaaatagggtaagatgaccttataaacaacaattggtcatatagatatgctggtgggaattccacgaccggttacccctggccctgacgagggaagcaacagttcatagggggggacaccagcaccacttttgtttttaaaacggggggccttggttcttgcatttattatttcctctatttcctccaggctagcagaaaatttattaaataattccatgatttcatgaacattgatccaaagattctgcagaggtttaaggtgacccaagtactcttcatcaggggaatgagtggacagtgtgtcctgaacagccataactttggtagcttgaagttgaatagggagggatgataggaaaacaagctgggggttttgaataaacttctcataatctggatcattctcctgagggatgagttttctcatgggggtagggcgggtaggcccatattctccaaaggg

SEQ ID NO: 103653 - DNA, 178 bp, Glycine max
  Clone ID: PAT_MRT3847_64616C.1
aattaaatggattttggaactgacagtttcacagattgggtactgtccgttccaatcctactttcaaaaagctaaaggaagttttcctaggggaaacattccccccctgaaatcctttgaagatccaatgggtagcatgtactgttaatgcatgtgcctccactattccaatgaaaac

SEQ ID NO: 103654 - DNA, 280 bp, Glycine max
  unsure (1)..(280): unsure at all n locations
  Clone ID: PAT_MRT3847_64617C.1
gaaaagcgggcagacaatgtcaaggaaaatacaagaaagtggttggaagcctangtggttccgaaganaaggtgaaaatggnacatttcnatacgttggtggggantgggnaaccncaaaacnntggannntggnacggntgcccnantanatttggngaatttaatgangactctaccgatccgtnaggtgnatctnaatttggttcaggtaacctttacatattttcccagatagagcngcttgattannttaaagttgaactacatacggatnttnc

SEQ ID NO: 103655 - DNA, 373 bp, Glycine max
  Clone ID: PAT_MRT3847_64618C.1
gtaaaaagcaagtaacattaagttggattcggacacacaagataagtcacattatatgaagaacttcaccaaacacaaatgtaaaaactcttagaagtcatttcgttctttgacgctcacttgccggggacgaagatggaggcataggcccaggcgttgttgtcgacagggtcagtaaggtgatcggcgaggttttccaatggaccctagtcggtgacaatggcctgaacaaagaagccacccatagagaacatggccaatacggcgtgcttgagctccttgaccttaagctcagcttaagcctttggatcatcagcaaggcccaatgggtcgaagctgccacctgagtagattgagtcagtgacctcaccga

SEQ ID NO: 103656 - DNA, 315 bp, Glycine max
  Clone ID: PAT_MRT3847_64619C.1
ctctcattctctagcttactgtgaatttctgttgcaataaatttcgctacagaaagataccctaagagagcttccacaatggtaagcgcagcaactgctcatagcttcgtcagcgtaagatgcactatgaacgccattggcttattcgtttcaccagcgcgaacattctatggaatcgtcacatagaaatcagtgtaagagttcaagacatatccttaaagatcaacggtgttgaaatgtgcatgttgggtattccatggaaagccttttgtgcacgcacagagtattttaattgtcattatcaacagcgttggg

SEQ ID NO: 103657 - DNA, 247 bp, Glycine max
  Clone ID: PAT_MRT3847_6461C.1
agaacaccatttcgaatccaaagccgatgctggagcctccaatacctatcctcaacaagccacaaccatccacaaaaacggttacatcctcatcaaaggtcatccctacaaagttattaaattttctacttccaaaactgttaaacacagtcataccaagtttcactttattatgattaatatttccactgccaataaacttaaagatattataccctcttctcacaactataatgttccccatgta

SEQ ID NO: 103658 - DNA, 345 bp, Glycine max
  Clone ID: PAT_MRT3847_64620C.1
attattctttttttttttttttttttaatttttttttgggttattttataaaaaactgcaaaaatggcaaaggactcgaattgccaaaaaggcttatatccaaaccaataccctacgggctatactttaaccggggaaaaaagaaaccaaaaaacggggggggacgaaaatgatccaacctgggatattttttttttaacagggaaaagctaaaaacaaaaccccctttgggggggggggctcccacggatgcccgaaaaatttccaaaaaaaaatcccccctagggggcgggcggccttttgaaactctaaacctgcccctcgaaattttaaacactttttgga

SEQ ID NO: 103659 - DNA, 1913 bp, Glycine max
  Clone ID: PAT_MRT3847_64621C.1
ggggtcaatgaaacaacaaagcaagaaagctcgtggcaaagaaaaagctagccccaaaaaaaagccttaaagaaagctgattacataaagcaataccttttctctctctctctttttctatctttctttctttctttcccccgtcagtgcccacgcgtccgttcctcctcatcatcatctttccatacgagtaaagctgaaaaacccgctattccaacctctcaccacttgtactagttttgagaatttgatcgtgtgctaacatatagtcctcaaattaaagcacaaatatttttccacccatgttagacaacaacaattgcagtgcttctaattctggtgcaccatcttcttctgatgccgcctttgcattatctgaaaatggggtggctaacaacaaaaggaaaagaagacccgcaggcacacccgatccagatgctgaggttgtgtctctctcaccaaccaccttgctggaatctgacagatacgtgtgtgagatctgcaaccaagggttccagagggaccagaatcttcaaatgcacaggaggaggcacaaggtgccatggaagctgctaaagagggaaacagcacaaggggggcatcagaagaagagggtgtttgtgtgccctgagccaacttgtttgcaccatgacccttgccatgcccttggggaccttgtgggaatcaagaagcacttcagaaggaagcacagcaatcacaagcagtgggtctgtgacaagtgttccaaagggtatgctgttcaatctgattacaaggctcacatcaaaacctgtggcaccaggggccattcctgtgactgtggccgtgtcttttccagggtggagagtttcatagaacaccaagatgcatgcactgtccggcagcaccggccagagttacaagcacttcaaccagcatgctcttcaagaacagcttcaagcgcaagtccctctagtgaggcaaattttagcatagccccaccattgcaaggacttccagtactgccaaaaccagctgaacaacaacaacaaccagcaacaacaacagtcttattaacttcagagatacacggtaacaagtccactacctcgcataacttagaacttcagctcttaccctcctcaacaaactctcaagcaaaacgaaatacaaaggaaaactatggcttgaaactttcaataggctcatgtagtaacgacaaagggaatagtagtgaaccaccagagagagcatgttcagaagcacataggagcccacctgaaaggaataataataataataataacaatgtgagtgactattccacgttggaagtggcaaggttgcaggagtttgcaggagaggaactcaagttggccattgcagaaaaggcttatgcagaagaggctagaagagaggccaaacgtcaaattgagatagctgaacttgagtttgagaatgccaaaaggataaggaaacaagcacaagctgaactttcaagggctgaagagctgagaaagcaagccatcaagaagataggttccactgttatggaaatagcatgtcatacttgcaagcaacagtttcagtcttcaactgttggggtgccatcatcagaagaaacctccattgtgatgagttacatgtcctcagccaccacagaaggagaagcagaatgaatgacatatactgtgaccagaacacattgtgctaagaaaagaaagaaaagacaagctttattctgcctaagggaaagatatgatatgatgtgatgatgatattgcaggagtttacatgaagttatattgttcttttttcttattcatttttttctttaatgttttcttctctcttagactaggtgaaatttgttttattttaaagaaagttcatattctttattataatatttttatcgagatgcagtgtttatg

SEQ ID NO: 103660 - DNA, 1241 bp, Glycine max
  Clone ID: PAT_MRT3847_64622C.1
tcctgttctcaccgcaatgtcagcaggccatgttctccatgttttcattaatgatcaacttgcaggaactgtgtgggggggattggcaaatcctaaattaacatttagtgacaatgtgaaactgagggttggcaataacaagctttctttacttagtgttgctgtcggtctcccgaatgttggtgtgcactttgaaacatggaatgcgggggtgttaggcccagtcactctgaagggtctaaatgaggggactcgggacttgtccagtcagaaatggtcttacaaggttggactgaaaggtgaatcgttgagccttcacactgaaagtgggagtagctctgttgaatggatacgaggatcattagtggctaaaaaacaacctttgacatggtacaagacaacttttagcgcaccggctggcaatgatccattggctctagatttgggaagcatgggaaagggtgaagtatgggtaaacggtcgcagcattggtcgccattggcctggatatatagcacatggtagttgcaatgcttgggattatgctggattctatactgatacaaaatgccggacgaattgtggacaaccttcttagagatggtaccatgttcctcgctcatggctgagctcaggtggtaactccatggttgtgtttgaaggatggggaggtgaccctaatggaattgctttggtgaaaagaacatgaaatgtgatgttttatgatgctcccttaaaaggagcagcattgacaagaaatgtatgtctaataacaaatgtctaggaaatgcaaagaagctgtcaagtgagtcctatgcggttaggaccctatgatgcagcaatttaccaaatacgtgtggttcagatcttattaggttcagtattaaaaaatgtttgaagttaaatcattggtgctccatgtcttctggttgttcaagtatacctcaaaagatttccaaggcctaatcatgcatcgcctggccaaaaacaaagaggatgcaaatatactgtacatagtcaagtcaggctattgtgctgaatattgctccatgtattacagggcttgtatcaatgaagattcagcccgtacacattttatttactatgatacaaaggaaagaattgtggacacgcaaaaatgtgtcagagagtatattgctacattctgccaaaagaaaataactgtttttccattaaaattattatgtaagaacagattgaaagtaataaaatatcctttg

SEQ ID NO: 103661 - DNA, 382 bp, Glycine max
  Clone ID: PAT_MRT3847_64623C.1
atcaagatgagcttcaaggcattgctatgaaaagaatttccatgtttaagtttgctgggaacttagaccccacatatcaaaaaacacttgttaatgccatgataagtttttttgagtggtacaataaattgcatccagggagaatgcttacagtgagagatctcatttcttgggttgacttttttattgcaatggaagaaagcttaggacctaaacatgcacttcttcatggagtatttcttattttgcttgatgggttaagtctaggtatcatctttttgttaatgattttcatttattcaacttctctcgtttcttatgtaatatctttattttttgattttatatttattacatactgatatatcctgggtaaaagaaa

SEQ ID NO: 103662 - DNA, 227 bp, Glycine max
  Clone ID: PAT_MRT3847_64624C.1
agatcctaacacttttttttgcccccacacccaggttctctgccttaatttccaagcttcaaggctggttgaaaattttgggattaggtgcttcccacatcttcctattctggtctatggatcttcgtgtggtagcactctcgctatttactgtccctttcctttcacctcttcttcattttcacttgatctcgcatttgcccgatcaaaaggtgggccttattttg

SEQ ID NO: 103663 - DNA, 275 bp, Glycine max
  Clone ID: PAT_MRT3847_64625C.1
ggatctaaggataacgttagaaaaatagacaggtattgttagtcatatgatagaaattgcactatgatagttgtatttgtattatgacttcaaaaataccaaaataagtcatggtggtatttatttcatgaagttttgctgaagtaaattccagggtacaagtgttaactgttaactagagatacctgaaggctgatgctcaaaaaggcaaatatattcatttttttaattttttcataaaattatattttacagctcaacaaaattaaatatca

SEQ ID NO: 103664 - DNA, 884 bp, Glycine max
  Clone ID: PAT_MRT3847_64626C.1
cggatgcgtggggacaacttttagcgcaccggccagcaatgatccattggctctagaggtgggaagcatgggaaagggtgaagtgtgggtaaacggtcgaagcattggtcgccattggcctggatatatagcacatggtagttgcaatgcttgtaattatgctggatattatactgatacaaaatgccggacgaattgtggacaaccttctcagagatggtatcatgttcctcgctcatggctgagctcaggtggtaactccttggttgtgtttgaagaatggggaggtgaccctaatggaattgctttggtgaaaagaacatgaagtgtgatattttatgatgctctcttaaaaggcattgacaggcaatatatatcttgtaacaaatgtctaggaaatgcaaagaagctgtcaagtgagtcctatgcggttaggaccctatgatgcagcaatttaccaaatacgtgtggttcagatcatattaggttcagtattaaaaaatatttgaagttaaatcattggtgctccatgtcttctggttgttcaagtatacctcaaaagatttccaaggcctaatcatgcatcgcctggccaaaaacaaagatgtatataagagaatttggatgcaaatatactgtacatagtcaagtcaggctattgtgctgaatattgctccatgtattacagggcttgtatcaatgaagattcagcccgtacacattttatttactatgatacaaaggaaagaattgtggacacgcaaaaatgtgtcagagagtatattgctacattctgccaaaagaaaataattgtttttcccattaaaattattatgtaagaacagattgaaagtaataaaatatcctttgaaatatttgtctta

SEQ ID NO: 103665 - DNA, 4632 bp, Glycine max
  Clone ID: PAT_MRT3847_64627C.1
aattcggctcgagggacgccattggcctggatatatagcacgcggtaactgtggggattgttattatgctggaacttacactgataaaaaatgccggacaaattgtggagaaccctcccagagatggtaccatattcctcggtcgtggctgaacccaagtgggaactatctggttgtgtttgaagaatggggaggtgatcctactggaattactttggtgaaaagaacaacagcaagtgtgtgtgctgatatataccaagggcaaccaactcttaagaacagacagatgctagactctggcaaagttattagacccaaggctcacttgtggtgtccacctgggcaaaagatctctaagattaaatttgcaagttatggattgccacatggaacttgtggaaacttcagagaaggaagttgtcatgctcacaaatcatatgatgctcctcaaaagaactgcattggcaagcaatcttgcttggtgactgtagctcctgaagtttttgggggagacccgtgtccgggaattgcaaagaagttctcacttgaggcactatgcagctaggatcatgtgatgcaacaatttacctgataaacatggagcagatttattaagctcaatatagaaaataacgataccccttcactttgtgtagttgaattccatacatacagaatgcaaacatgcaccggctgcgagaaatcgaatgtaaataaaagaaattggctgcaaatgtagtggatagtcagattattctgctgattattactccatacactagggggctttcagttttcaacacagcgaggcttggtgctcaaagctctctgatgaagatgactgccgtaaacagtgcatttgattggcagtcatacaatgaagaggctgcatcgtccaatgaggatgattccttgacagcatatgcactctgggagcagattaatgtcacccgagattctacagattatttgtggtatatgacagatgtcaacattgatgcaaatgaaggttttataaagaatggacaatctcctgttcttaccgtaatgtcagcaggccatgctttgcatgttttcattaatggtcaactttcaggtactgtgtacgggggactggactctcataagttaacatttagtgacagtgttaagctgagggttggcaataacaagatttctttgctaagtattaccgtgggtctcccgaatgttgggccatactttgagacatggaatgctggggttttaggcccagtcacacttaagggtctaaatgaggggactcgggacttgtctaaacagaaatggtcttacaagattggtctcaaaggtgaagccttaaaccttcacactgtaagtgggagtagctctgttgaatggatacgaggatcattagtggctaaaaaacaacctttgacatggtacaagacaacttttagcgcaccggctggcaatgatccattggctctagatttgggaagcatgggaaagggtgaagtatgggtaaacggtcgcagcattggtcgccattggcctggatatatagcacatggtagttgcaatgcttgtaattatgctggattttatactgatacaaaatgccggacgaattgtggacaaccttctcagagatggtaccatgttcctcgctcatggctgagctcaggtggtaactccttggttgtgtttgaagaatggggaggtgaccctaatggaattgctttggtgaaaagaacatgaaatgtgatgttttatgatgctcccttaaaaggagcagcattgacaagaaatgtatgtctaataacaaatgtctaggaaatgcaaagaagctgtcaagtgagtcctatgcggttaggaccctatgatgcagcaatttaccaaatacgtgtggttcagatcttattaggttcagtattaaaaaatatttgaagttaaatcattggtgctccatgtcttctggttgttcaagtatacctcaaaagatttccaaggcctaatcatgcatcgcctggccaaaaacaaagatgtatataagagaatttggatgcaaatatactgtacatagtcaagtcaggcttctgcacgcgccgccccctcgtgtattagctcgtccagaccaagcgcaagcccaacctcgacaacaacgacgagtacggcgagttcctccacctccccggccggaaattccacgatttctccgagattcgcagggaaattcaggctgaaactgatagggaagcgggtgggaacaaaggtgtatcagacaagcagatccgacttaagattttttcaccaaatgttcttgatatcacactggtagatctcccaggcattacaaaggttcctgtgggtgaccagccttctgatattgaagctcgcatcagaacaatgatcatgtcatatatcaaaactcccacctgtctcattctagctgtcacaccagctaattcagatttggctaattcagatgctcttcagatggcagggattgctgatcgcgatctctctagtctgtgcgatgtaactgactgtgacactatatattgacacctgctgatgattctactgtgaaaacttcaagcccaacaagaacaccaaacccaaaatgtggactgagaattggactggctggatacactgattttggcggttgcagtccctcgtagaccagcagaagacttggcgttctcaagttgcaagattcatacagaatggtggttcattcgttaacttctatatgtaccatggagggaacgaactttggccggacatcaggtggcctcttcattgccactagctatgactatgatgcgccgcttgatgaatacggacttgaaaatgaaccaaagtatgagcatttgagagctttgcataaagcaataaaacaaagtgaacctgctttagtggctacagatcccaaagtgcaatcgcttggatataaccttgaggcccacgtgttctcggccccaggtgcttgtgctgcattcattgctaattatgacaccaaatcttatgcaaaagctaaatttggaaatgggcaatatgatctaccgccttggtctatcagtattcttcctgattgcaaaactgttgtttacaacacagcaaaggttggttacggctggctgaaaaagatgactcctgtaaacagtgcatttgcttggcagtcatacaatgaagaacctgcctcatccagtcaagctgattccattgcagcatatgcactttgggagcaggtcaacgtgacccgcgattcttcagattatttgtggtatatgacagatgtcaacgttaatgctaatgaaggatttctaaagaatggacaatctcctcttctaactgtaatgtcagctggccatgttctccatgtgttcattaacggtcaacttgcaggaactgtgtgggggggattgggaaatcctaaattgacatttagtgacaatgtgaagctgagggctggcaataacaagctttctttacttagcgttgcagttggtctcccgaatgttggtgtgcactttgaaacatggaatgcgggggtgttaggcccagtcactctgaagggtctaaatgaggggactcgagacttgtcccggcagaaatggtcttacaaggttggactgaaaggtgaatccttgagccttcacaccgaaagtgggagtagctctgtggaatggatacaaggatcattagtggctaaaaaacaacctttgacatggtacaagacaacttttagcgcaccggccggcaatgatccattggctctagatttgggaagcatgggaaagggtgaagtgtgggtaaacggtcgaagcattggtcgccattggcctggatatatagcacatggtagttgcaatgcttgtaattatgctggatattatactgatacaaaatgccggacgaattgtggacaaccttctcagagatggtatcatgttcctcgctcatggctgagctcaggtggtaactccttggttgtgtttgaagaatggggaggtgaccctaatggagagtgctttggtgaaaagaacatgaagtgtgatattttatgatgctctcttaaaaggagcagcattgacaggcaatatatatcttgtaacaaatgtctaggaaatgcaaagaagctgtcaagtgagtcctatgcggttaggaccctatgatgcagcaatttaccaaatacgtgtggtttagatcatattaggttcagtatataaaaaatatttgaagttcataattggtgctccttgtcttctggttgttcaagtatacctcaaaagattgccaaggcctaatcatgcattgcctggccaaaaacaaagatttatataagagaatttggatgcgcaaagactgtgtatactgtacatagtcaagtcaggctattgtgctgaatattgccccatgtattacagggcttgtatcaatgaagattgagcccttacacatttatttaatttactatgatacaatggaaagaattgtagacacgcaaaatgtgtcggagagtatatttgctatattctgccagaaataattgtgttttcccattataattattatgtaagaacagattgaaagtaataaaatatcctttgaaataaaaaaaaaaaaaaaaaaaaaaaaaaaaaa

SEQ ID NO: 103666 - DNA, 547 bp, Glycine max
  Clone ID: PAT_MRT3847_64628C.1
ctttacgcgtgggcggacgcgtgggcggacgcgtgggcgattaattactaccaaccgtctatcttatccaaagagatactggaatcgtgtggcaccctataccccccggtagaattaattcgtccacccaactttacaacgtatcttgggctattacaacaaactatgacgtctacagcaactcttgaggcgcgcataaagtcgtataagggtaggaaaaacaagtggccttacaaacgtaaagacactgttcccctagacaagctggcaattgcggggttcatacacaaacccttgtctaatcacacagataacgttgagtgttttttatgtgaaaccgccgtcaatggctgggattcgcacgacaacgatccgtttcgaaggcacatccaacatgcgcccgcatgtgcctgggcaatgcttatttgcgtcaggcgtgggcgtgttccgagcttggatagctctggcgaaaatgtccaaaacaatcaattcgattcaacagtagatgcagagctgatgcaatacctaaagggacagctgatagaga

SEQ ID NO: 103667 - DNA, 1007 bp, Glycine max
  Clone ID: PAT_MRT3847_64629C.1
gagtgagagaactagtctcgagttcttggggttcattttttaactgcacctatgaagtttgaatataatctaattgctctttttaactatgcacataagtatttgatatttggctaaaatatgtttccagtccctgcaaaattttgggtatgttttttgtcatcgcaaaatttaattatgttatttttggtccgaagctaggcttgggttgtccgaacctacatgataatttttttcgacgttttataataaaaaagggtttgtttcttttggttcatcttctttgccatctttgaccttcatgttcatgttgttcaaactcttcgaccttcacgtttatgttaatcgacctcttcgacctttttcttcatcttctctcttgtgaaccttcacctgtgacgtgacctgccaatggacaaatttggagcttgtcagcgatggggtggtccaagtacattgtcatcttcatttgcaagggatgacgagtccatgttgttccaaacttcaaggagtgccgacaaccccagaagacatttttagagatgtctaaattggacggtaagtgctctaattgctgcatttttatgttctccatgttccctttttatgtttttcatgatcttgcaactttttaagagtccaagtacctgcaatttttttgactgggataagggtcctgtgaatgttataggagcaaatgttgatggaaggcaaatggctgttgctgatccaagtcaaggcatattttttaggacaaaacaacaattggagcaacaattaaaaaaggctcaaaggaagattattaaattatagaagaaagttgttggtgaaagaagaaatgcatatttgttgatgggtcttttggtgatgtgtttgtctatgttaagggcattgattttcatttttctattgaaatgtaactattgaatgtaatggattgatgttgttgctagcaataaagaagaatgtaatggtttgatgttgttgttagcaatgaacaagaatgt

SEQ ID NO: 103668 - DNA, 103 bp, Glycine max
  Clone ID: PAT_MRT3847_6462C.1
cttgtggcaagtcacttgcttctttccctcaaggatgtatctagtctgcagctgtagcgggatttgtgagatatgaggctcctgaacatccgattagtgcagt

SEQ ID NO: 103669 - DNA, 144 bp, Glycine max
  Clone ID: PAT_MRT3847_64630C.1
ctgagcccggccgaattcggtcgacccgggcggcgtcaccatgctgatggaacgccaggtcagcgaccctttaccattctgtctcctcgttagctgagagagcctcccatcgcgctcctgggaagatattgggaagcggtttgg

SEQ ID NO: 103670 - DNA, 455 bp, Glycine max
  Clone ID: PAT_MRT3847_64631C.1
tcctatagaagaaatattagaagcgcgaaagaataagggtgaagtatgcaaagacagcgatgcttgcaagatgtaaatttccttaatatctgactccaaaaggctcattatgtgatttcctcttcctccgaagcaggtctttttatatatgatctcatttacaaaaagaagccaacatagtttagtgtcacaacattttacgtcttcttcatcagcatatgcatttgtttaccgttttcaaaagttttgttgcagtgcatctggcataaaaatgggagtgtaaataaaataattttgtattcaagttatttcatattatttcaccctgtagtctccattagtccattaagtcttagcagactcttcaagattgtacgagttacatgacaccagcatctatgctttggtacttattttgcaaatacatatatataaacatacaaatccaataaaaa

SEQ ID NO: 103671 - DNA, 479 bp, Glycine max
  Clone ID: PAT_MRT3847_64632C.1
gagggtctggtgggtggcacttacatggtctgtgtggcagatgagaaataacattatattctcaaatgggatcttcaatggaaacaaactgatggaggatgccatttgagaaataacattatattctcaaatgggatcttcaatggaaacaaactgatggaggatgctatatttttgtttttgacatggctaagaaactatgagaaggattttgtaactaattataatcaatggtcatctaaccttatagaggcttttgctgttagataaggatagagctatagggtcttcatacatgtatatttctttttccagtttggttcccttcgagactgccctagtctgcccttgggaaccatcttactggtctctttgtatcggtacctctggtactaagtttcttatataaaattatatctttgttgataaaaaagaaaaaacgaagtaaggccgactgtcggtggtagctaggatgaaaa

SEQ ID NO: 103672 - DNA, 553 bp, Glycine max
  Clone ID: PAT_MRT3847_64633C.1
accaaaaggatgccggttaatttgaaaaccatttgggcaaaattggcccccggtggttttttattaaaaaaaaattttaattaatatttacctttaccaaaaaaatttccttccccttttccatcctggaccggttaatggtccccccaaataacctttattggccctgaaaaaattgggtttaaaaaaaccttggttaaacccccttttccttaaccttttttacccttaaaatttaatttggcctcccatggcggggatttttgggacccaaaatggttacccaaaccattttttttggtatataaaggctcttattcccagaattggcaattgaacctccccaaaaccgtccccccattaaataaccggagggttttaaatttaccgggttgggcctttttttttacccaccttcccttttaacccttcaccaaaatattcaaccccccttggcttttatttaaatcggatccggcttccctattaaaacttttattggctaacctattaaaccgggaccgtttttccggggaaatttggttatgggttt

SEQ ID NO: 103673 - DNA, 363 bp, Glycine max
  unsure (1)..(363): unsure at all n locations
  Clone ID: PAT_MRT3847_64634C.1
ngcgccgagcgacgtnactcggcatcngccgagcagnagctcccgcttcccanntnngnacnngnggcgnnnngtcccatgnatgngtnttcccntccacngngnngtcccncaacgnggcgtntgcttcanntgnncggnccacancncgcagngggtgcncggtacganggngtgnnctgngcnggnnggcngngtcnttcctacanngtnngnctgtcgcagaagtccncnggcnggtctngcccncnagggnntgcngantnctgngngtnngtgttncntgntngcntgtnggntncgcgnggntccnggatgntggcgtcnccatgnggctngtnngnnccntnagccngtatcang

SEQ ID NO: 103674 - DNA, 333 bp, Glycine max
  Clone ID: PAT_MRT3847_64635C.1
tttttcagaatcctctcaatggagggaacaataattggttgcttaaactataagttgttgcataactgaaaacaacattttgtcaaatgaagattacaaatggataaagtgtggcctctcaagataaagaactgcaagattatctcacgcagatggaggacatagggaaaaatgaaacggtgttgctgcgagacctaaccataacaaacaacctaactttttgcaggcgaaatcttgaaaagtgtgcgccgaattatccaactttctgggctacataattattcagaatcccaaaactcctgaagcgtcaattctatggccagaacatggaat

SEQ ID NO: 103675 - DNA, 531 bp, Glycine max
  Clone ID: PAT_MRT3847_64636C.1
ggttttgcttcttctcctcctcttttccctccatcgtcttcctcgtcgccaacttctttgaagcagttttcgcattcgatttctcataaactacatgtgacaaattatcttctatggcttcaacaagttgagcttgtgatcaagagtcgtcatcttcatcactttcttgttaatcctttgattccaaaaaaatatgcccttgtcaaagattgcgattctgatacaactactgaggtgtatcatggttggaaagaacaggaccaattctttcttgcttggctccgatcgaccatttatggtgatatgcttacgcatgttattggttgcaaatcgtcgtggcagctatgggatcgtcttcaattgcattttcaatctcttactcgggctcgtgttcgtcagcttcgcaatgaactccgatgtctctcccatggtaatcgctccaccaccggttatcttctttatgttcagaatccggtttatgaaatcacttggattagtgaatcgatgtcttcatctaataagcatttgaat

SEQ ID NO: 103676 - DNA, 354 bp, Glycine max
  Clone ID: PAT_MRT3847_64637C.1
tccacgcgcgctgctcacccacggaagcgggcgaccgctcacaaggcacggttccagcaaaccaaagccgcacacaccacgcaaaaagggagagcaccgggacccaagaaccccaccaaacaaggccgcacgcgcgcccacacacagacaccacgcacgcaggagccccggaaagagcaggcaagggaccgcacgcggggacagcggggggacaaaaaaaggcggcgacgaaaaggggcgacaggggacgcccgaagagaaacgcactaaaggacaaataagcacgatatcagcggaaaaagagacaaggaagcaaaagacaacacggcggcaccctcccgccgaaaccaagaa

SEQ ID NO: 103677 - DNA, 379 bp, Glycine max
  Clone ID: PAT_MRT3847_64638C.1
ttttgtctttttttttttttttttttttttggttttttttcaacgttgacgttcttttttataatatgcaaaaaacaatgtgggacccaaaaaacaacaaggctgaaaatggcgaaggaaaatgacgccctaaaacccccacccccccaaagaatgaaagcttcgcaaaaccgcccaaaacacaaaaaaacggtcacggagagaacaatcggggataggcccaagatctccttaattgcccgtccccgccccaaaaattgggcgaatacacttggaccattgaaaagcgaaccaagttaagacaaccttaagactaggccgggcgtagcaaacaaaaaggcctttcagccagcgggacaatgggaccgaaccagcccat

SEQ ID NO: 103678 - DNA, 406 bp, Glycine max
  Clone ID: PAT_MRT3847_64639C.1
agtaacggacgccagtgtgctggaattcgtccttccagccgtcctcccgacctgtctctggtcagaaagcaaatgatgtaacatattggtgagagtttgaagtgccagaggattttataacaatcggggcaattaagatagaaaaccaacaccgcatagaggtattcgttgaatccgttgttatagaaagcgcacctatcgttcctattaccgtaccatgtgagtcatgggttcattccaagttcaccaaccctgagagtcgtgttttcttcgatgacaaggtatcatgcctaccatcgcaaacacccagcggcctctaatattaaccctatagaaggaattagcggctctttggggcgaaggtgcaccatacaaacctagacaaaagcaagacattatttattat

SEQ ID NO: 103679 - DNA, 407 bp, Glycine max
  Clone ID: PAT_MRT3847_6463C.1
ttagatagagatcacaagtttgttatgatttgaactgagaatggtgcatcacatatcattgttgcgctctccgattatgatggatcaattatttcatgctgaaccgcgcatctaggaggaataataaactaacccccatgtcagtggatacacagagatcaaatgaatgacatacaaccgaatggagttaaaacacgaagttctcacccagtgcgactattttaaattgtagaatgcagtccaatgctctattcgattcatgttcttcgagtgcaatattgaaccgacagtatccaggaattacagttcatgacccactattgatgcatactcccggggattagacaatgaccgtgctgatattagagtcatcgagctgtatcaactgattggctctcccgtggttt

SEQ ID NO: 103680 - DNA, 191 bp, Glycine max
  Clone ID: PAT_MRT3847_64640C.1
gtcgagctccatctgctccatctgctccccatgatgggtgtgctgtcgaaccaatcgaccaacaagagagatataaaggaccctgagcatccatattccttggaagagcttaaggtgattactgaggaagcagttgaagttgatgatcagcgtaactatgtgagggttacatttactccaacagtggaaca

SEQ ID NO: 103681 - DNA, 467 bp, Glycine max
  unsure (1)..(467): unsure at all n locations
  Clone ID: PAT_MRT3847_64641C.1
cccaggcgtncgaagacgcctgagcgggtgccaaaagacgacagatgggggagcaagactgaagagcgaacataatggctcccaggggttgaatctgtttggctgtgatatgcttctcagcactggcactgagtcctggtcttgcggaggatactggacttgctatgaacttctacaaagactcatgccctcacgctgactgacatcatcatagaacaagccccgcttctctacatgcgccacaggaacactgctgtctactgtctcatagacatctcccatgactgtgctgcccatagttgcgatgcttcactgttgctggactccacatgatggagcttgtctgtgacggatacagatggaagctgtgcgttgagaaatttcaagtacattgagaccatgatagaagctctggatagggaatgcccatgagtcgtatcctgtgctgatatcctggttctctctgc

SEQ ID NO: 103682 - DNA, 480 bp, Glycine max
  unsure (1)..(480): unsure at all n locations
  Clone ID: PAT_MRT3847_64642C.1
caatgattgtgattagtggcaatatgagaagtatctgtcctgtgctgctgttcagtttgtctaagaagatagaatgtttaactgcaagaggtatgtggaagtctaagcttgtatggttcttgagaaggtggatttgttaatatttggggttagcaaattgatgttcttggaggatttccagtactcctgtgtaacactattataggaaaacatataatatagtattccaattggtacctgtcattttctataaaagtagttgagatctgctagtgctaatgatattcactttgtattgaattttattaatgatggattgaccagaagttctcaccttgaaactgtcaatgtaatttgcttcagtggttatttatatgttcttttgtgccactgccagcctgttatacttgattaccttgccagcaagactatttgttcagatgatntggtagttgtctcaccagatgttggtggtgttgc

SEQ ID NO: 103683 - DNA, 521 bp, Glycine max
  Clone ID: PAT_MRT3847_64643C.1
accggtccggaaattccccgggtcgacccacgccgtccggaatgtgcctgaacatagccttagtaaacaagtgaggatactacctatgagagccacggctaccagtactggtgctgggactggatactctggcttcagatttgtgtcttattgggcagtgcttactgtgaaaaaggcaaccccaaacacaacatgtgactccaggagttgcaataaccagagaggatggtacaggaaaccaagcatgccatgctcgttgcaacctccttaaggtggagaaagaagaatgcgaataaggtgaaattccaccagcacgaccacgaccacaacacccggagagggaacctcagcaacccggggagaaggaggaagaggaagatgagcaaccacgtccaatcccattcccacgcccacaacctcgtcaagaagaagagcacgagcagagagaggaacatgaatggcctcacaagggaggaaaaacgcggagaaaagggaactgcaacaggaagatgaggatgagg

SEQ ID NO: 103684 - DNA, 1180 bp, Glycine max
  unsure (1)..(1180): unsure at all n locations
  Clone ID: PAT_MRT3847_64644C.1
ggtccggaattccccggtcgaccacgcgtccgctttcatcatcctcgacacttttctcaaacaaaagtgactgattaattaacgtctttaaattgtcaaatcctcggcatgcctaccttttgttggatttaccatgtatccttggggatgcattgcatgatgaaatgtatgatggatgacatgtagaatgggcacttgtggaaattaacgaaattttgggtccatttttattttattttatttcttttatacgttcatcatcatcatcaaattgggacgttgttcccaggaaggtccaaaaagtcagtgcagcgaaaacggacgatccgaagaatacccttttcatctctctctacaataatcatcctcttcctcttcagtaaattattgtacctgacgatcttctcggtttgatcttatatcaatggaaaatttttagacagaactcggattcacagggaaatctaattgcataggaacaaaaaagacaacacctttttatctctacacaagtgattatggcggttgctgagaatgttggggccaaaatcggttcttccagtcaaaatttggaaaacaatgtagtgtcatcgaactcaggcgaggttgagcaatcaaaacccagaagtgggtccatcaacgacgatcagaagctgaacaacggtgtcttcaaccaccaagatagagttcctggcactatgccagtgcccaatagcaattataactacgaggcccaaatgggtcagatgcacacaaatggggtgaacaatgatgggtatggaatgaatggggtcatttgtggggagaatgggggtgagagtttcaagcgtgatatgagggatttggaagagcttttgtcaaagttgaatcccatggctgaggaatttgtgcccccatcactaaccaatactcatggctacctacctggacctggtgccggtgctggtgccgggtttggttaccctaaaattttatactgctcaataactttggtgatgctaacggtcaaactaacagaaggaggaagaatggctataatcatgggaagcgaagagtgaatcataaaatggatatggagaagagagaagagatgattaggaggactgtttatgtgtcagacattgatcaactggttactgaagagcagttggcggngctctttcttaactgtggccaggtc

SEQ ID NO: 103685 - DNA, 601 bp, Glycine max
  Clone ID: PAT_MRT3847_64645C.1
tggtcttggtcctaaaaagagcttggcggaagctgtaaacactgttatcaacctacttggcttggagccttgtgagggcacagaggaggttccacccaattcaagatcacacacatgcttattgtcaggtgtattcatagggaatgtgaaggtgcttgtacggctgtcttttggacttgatggtccaaaggatgttgcaatgaaactgtctgtcagatcagaggatgaaacagtcagcgatgccattcatgagattgtggcaagcggctagtccattgagtcaagaaatgttgactcaaatcagccccttttttggttaatgagattggagtttagcaggcatatagatattgacgtttgtaaagaatttcaaaattgtaattgtttgtccttcactcactgcattcttgttagactagcaagtatcgcgtcgggtttattgcgatacaccttcctcataatgatacttcatttttcggtgtagtcaatgtaagatgaattttggggatttacctaatcaacttttgtgtcctcaatgagatggatatttgttgaacaacaatagataattacagaagacaactttcttaaaaaagaaaaa

SEQ ID NO: 103686 - DNA, 494 bp, Glycine max
  Clone ID: PAT_MRT3847_64646C.1
tcgtcctcaggccgccgcaccttaaaaccggaaacaaaagctatcgttacttgattgcaagaatctctcaagttcggcctacttctgtgcgtacgattacttaagggaaagaaaaccactctctgtgctggccacagactccgtgaatgatgtccttgtccactcttggtttatttgctgaacactaccctatgcgatataggacttcgaggcagacttaaactactacggtctctctctcagttctctgcgtaaacacaagtgcaagctggagaaatcttggattagagctgccactctcctatctggtataggacttcgagggtagactattctattgctctcctttctttcactctctgcttctcactgatccgcattgccgctcaaagtggtcttaattgaaaaacacttgggcgttggtgcaaaagactgcttcgccaattgtctctggagacaacggctcactgagaaaacaattttacttgagagat

SEQ ID NO: 103687 - DNA, 1398 bp, Glycine max
  Clone ID: PAT_MRT3847_64647C.1
agggaaaatcccaatttcctcctccttcgtttttcctctacggcgtttctcttctccagcttctgtgggtgaagcgagttttggcgatggagaaaggaggaaagggcgcttcgctgttcagcaaagggggactaggatccctaaaagggaaagatgacattgcaacaaaatcagcaaagggaaggagggttcagttttctactgatggtccattatttgaatctggagtaagtagtaactcagccacttcactaaaatctggtggaaaaggaggaatgggagacaatgttgcaaaaggtggaaagaattctcagtcaaaagactcccatccatcagattacagagttgatcaaaagcttccagaaaatatcaaatgcctgatggactgtgaggctgtggatattttacaaggaattcaagagcggatggtcatgttatctagagattcaactgtcaaaatgcctatatcatttgacaagggactgcaatatgccaaaagcaatagcaagtatttagatctgcagtctattagacacattcttgatcgtcttgcaaaatgtggtgtcactgatagtgagatatgtgtgattggtaatgtgtgcccagaaactattgatgaagtttttgctcttctcccatccttgaaggataggagaaacattgacagtcaagttcttaaggattcactgagtgagcttgctaagtttagacagacaatgtaaagcctcatactgaaagagcttattgagtgcaggtttggcgtgtaggagacatgtagcacatgtgaaaacagttttcaaagttacatagacactaatgtaaaactttaatccatgtgttatattgggttttagattctattcatatcctacttggctgtacagattgtggatgacaatttgatgaattttgcatgcacaagaccgtggttggatcttgtatatggtaatggtacaggaaaacttggtgaatgcaagagaagatacatgtgattataaatacttcatgattaaggaattttagatttacaagctatcccacttggctgttcagagttgtggatgacaattggatgaattttgcatgcacaagaccatggttggatcttgtacatggtaatggtatcaggaaaacttggtgacagcaagaggcgatacatgtgattaaaaaaaaaatcttgattaaggaatacaccctttacaagtgagttatgcgccccaaactaccttgtgtacatcatactccgttctcgaattggagcgtttaaattataggaaaatgggtaatgttcactcattttgatgtggatgggttggatagaagagagattactattccttctgttccaaaactatatatattttacaaatccaaggttaaattcacaattttctttac

SEQ ID NO: 103688 - DNA, 240 bp, Glycine max
  unsure (1)..(240): unsure at all n locations
  Clone ID: PAT_MRT3847_64648C.1
tagattcttgnnggaattgaaattaaagtacagaaaaactctcatatttggataacgtgactaaattggataacgtggtaccaaaaatattatggatcacaagaaaatcgtatgcacaacatagcaggcatacaaagaccaatgttggaccccaaaaaaaaggttactgcataaatcctaatacaaataaaggtataggcatgaatctctaaatgaaattatagtcacgnnnnnnnaaca

SEQ ID NO: 103689 - DNA, 1037 bp, Glycine max
  unsure (1)..(1037): unsure at all n locations
  Clone ID: PAT_MRT3847_64649C.1
tacggctgcgagaagacgacagaagggggcggtctttctattgtccagcttctgtgcggctttctctgtgggtgaagcgagttttggcgatggagaaaggaggaaagggcgcttcgctgttcagcaaagggggactaggatcccaaaaagggaaagatgacagtgcaacaaaatcagcaaagaagaggatggttcagttttcttctgatggtccatcatttgaatctggagtaagcagtagttcactcccttcacaaaaatctggtggaaaaggtaagaatgtattcccaaagttcttattgtgttcatcagtttggtaacattgcatttgagcgcatcttgattacaatctttaaattgattgctcataattttcttgctttcttagtcaagttactttttactggactgctgtttttttttcatggtgattttattgaaggaggaaagggagacaatgttgcaaatggtggaaagagttctcagtcaaaagactcccactcatcagatcacagagttgatcaaaagcttccagaaaatatcaaatgcctgatagactgtgaggctgtggatattttacaaggaattcaagagcggatggtcatgttatctagagattcaactatcaaaatgcctatatcctttgacaagggactgcaatatgccaaaagcagtacgaagtatacagatctgcattctattagacgcattcttgatcctcttgcaaaatgtggtctcactgatagtgagatatgtgtgattggtaatgtgtgcccagaaactattgatgaagtttttgctcttctcccatccttgaaggataagagaaacattgacagacaggttcttaaggattcactgagtcagcttgctaagtttagacaatcaatgtaaagcctcatattgaaagagcttattgtgcaggtttggcgtgtaggagacatgtagcacattggaaaacagttttcanagttacattgacactaatgtaaaactttaattcatgagttatattggcttttagattctagtcatat

SEQ ID NO: 103690 - DNA, 792 bp, Glycine max
  Clone ID: PAT_MRT3847_6464C.1
cccacgcgtccgcccacgcgtccgccaaagctctccacctcctccagcatctcctcttcccttttcataaacaaattatgcggctcgcggatgaacgcaagctcctcatggtccacatgccagccacgagacagccagttgtgtggcggcacaaggcgaaaaaggaaaaaagcaaaatcacttcgcaatcgattacggttttaacgccatcgttgccgccgcgaacgggtcgaagctcacgattctgaagtccccgacgggccgcgagatcgaggcccactatgagttgggccgcgaactggaccacagcgagttcgggataacctacctctgtacgaacaaggagttggggatttcatatggttgccgctgaaagattgaagcttttttgtgtaagaggaagaggggggcttagaattttgttgtgggttgcattttggtggtgcgtgattctactgttggttaatccagtggcaggtctcagacccttgagagaaaggactgggtcttggaatgatgaggggctatttacaagaaaggaggagagtaacttaggtccattttcacaatggaacataacaggaacttacaaagagcataacaaaggcaaagggacagagcataatgatcaaatacatatgatcagatgcagatgcagaaaagttcatagtgtatagacggcagcagaagcttattcagccccttctactgttctaacatcacattcacatgatggacttcatgtttttgacgattttagagagacttatgcttggctgagtcataatacag

SEQ ID NO: 103691 - DNA, 558 bp, Glycine max
  Clone ID: PAT_MRT3847_64650C.1
tactgtttgcgagaagacgacagaaggggggatgcagaactcaaaacctgtgaacgcaagagcgttgaaggaacgtccaacgtgggagtcggtgtcacacaggtgctatgaacattctcttcaactgacacaagttgaagaatttcagctaaatgggtttagaatttttatccttgtttcagctggaaacaaagagattgctatggcttattggcattacatttgcagtgatcttaactttccagtacctcgagtttccatatggaactgttctactctctctattctctgctgagaagataccaacaccaggaagtagtacattcaaggcttcagatgcaccgtctatttccgaattggttaacaatgttacgcttttcaatccagcaaactctactggtgaccatgcctttgagatagctaataaaacaaagtctggggaaaatgacaccattccaagaattggcttggtcttggaaccaggaagcacaccaaacaactctctaggattagatggctctgaccaaagttccaaaacgaaaagtattaatagatcaa

SEQ ID NO: 103692 - DNA, 302 bp, Glycine max
  Clone ID: PAT_MRT3847_64651C.1
ctctagccaggggccaaatcaatttgtctctctttctccaatctaggaagcttctgggagctaccctctcctgcaattagctcttgtgatgggagtggaaggacattactcgaacgtttgatttcagtagatgcagaatcaggcagaacccagggtaatgtttttgaggacggcggaacgaattgccaatttggctttagcaagtttaaccttagcaccgtttgttggaaagtaagatccaaatttgagttggatgttaacggggtgcctcactgtgttcaagggaagtctccgctgcgcta

SEQ ID NO: 103693 - DNA, 496 bp, Glycine max
  Clone ID: PAT_MRT3847_64652C.1
ttttggtgttttttttacctaatctcccctctattgcattggcagcggtgactgtaagacagtatgagctcatttcttattaagacctctgttttgccccagaggcaatgtgcagccccgttcctgaaaggacattaattggggcacctttctttggtcgtggggggcgggctcggaacgctcctgcaacggcattcctatttctacgctaacgttatgtgatcgttctgtcttccttcacacctcatgagagggaaaacataccatggggggaaaaactattctgaactattcccccaaaggaggctctttgcgtccaaaaaacacttggttgttcttagaacgatgcccttgtaatagccagggggacactatcatcgttgttaacctctccaccttggccactaggcttcaggggtagggtgtggacctgcacttgggggcttgctcaccagagtcttcctgctatggacgaaaccgtgctcaggccattcct

SEQ ID NO: 103694 - DNA, 925 bp, Glycine max
  unsure (1)..(925): unsure at all n locations
  Clone ID: PAT_MRT3847_64653C.1
ccacgcgtccggtgtttccaaagaggagagatatgaaaagaaatggtcgatgtggtgcctgtagtttggaattggacttgtgggttgaattgggatttgcatgctgaatgaggtgtcatgagaattgagccttttcttgtttgcatgtcgctgtaaactattagtttggtgtttgaggtgctatgaacattctcttcaactgacacaagttgaagaatttcagctaaatgggtttagaatttttatccttgtttcagctggaaacaaagagattgctatggcttattggcattacatttgcagtgatcttaactttccagtacctcgagtttccatatggaactgttctactctctctattctctgctgagaagataccaacaccaggaagtagtacattcaaggcttcagatgcaccgtctatttccgaattggttaacaatgttacgcttttcaatccagcaaactctactggtgaccatgcctttgagatagctaataaaacaaagtctggggaaaatgacaccattccaagaattggcttggtcttggaaccaggaagcacaccaaacaactctctaggattagatggctctgaccaaagttccaaaacgaaaagtattaatagatcagaaaatgtagctgaaacaccgcagggaggagatcctggaccaatcagttttaacaatactattgatttgagtttctctgcaaaccagttccaagaagacaacatttcatcaactgaacagaaatctggaagtcaatatgcttcttcgacaaatgtgagcacaaacattgtaactgcagtgttatcaaatgattcctccatatctttatttcagaaagaccacacaactaactccataaaggaagagagtattaggtcatcacanaatgatgccaaggtaagtgtgcctaatga

SEQ ID NO: 103695 - DNA, 578 bp, Glycine max
  unsure (1)..(578): unsure at all n locations
  Clone ID: PAT_MRT3847_64654C.1
aaagaataacttctgctaaggttaatccactatatcctcactaaatttctaaccggatcccactcttggttctagagaaaaattttgcaaagccatttctactcctctcagaactgacatgattttgcaaggctggtgatgaagttgatgaagacgacgaaagcggcgaggtttcctcatttttgtttaaggatggataagagctaccatcagccaaccttgaacaaatggaatctcttttaggcaaaaatgtgccatttgaatgcaacttccacaactccccaccagcctgaccaatgagtgatggacttgcaggaatgcttgcagtgtcaataaggaaatcttctagtgtagccagggattttagctgatttcccaaagatgctattgttttctggcactcggcaagctttccggctgccagtgctaggtcctcctgcttaatcttcttttctccatatgagctagctgtnganntgagcaattcttctaacaagnnnanctttgtggatttgctttctagctcttccttcaagtccttacacttcattgcaatttcatttggcatgtccttctta

SEQ ID NO: 103696 - DNA, 280 bp, Glycine max
  Clone ID: PAT_MRT3847_64655C.1
agggaatagagttgggaaaaataaaaagaatccatgagatattaatcaacactacacatatagtataaatacaacatctatgtagccacttaataatacactttccctcaatttttgtgccccgaatatgcctattatttccagctatttcaatggcttcgtgattcacatatgttcagcaacagtagactcttcagcatactcacacgagatagcattcagatgtatcttagtcaccaatcacaatatgactgtcactgcaaagatagtgatgattata

SEQ ID NO: 103697 - DNA, 835 bp, Glycine max
  Clone ID: PAT_MRT3847_64656C.1
aagattgcaattcgagtccagctctagcctaatcttctcgagggcaacattaccgttcacaagttcgtgggtaggttggacaacagtgcgatttctgccacaggtgcaaagttggcatttaagtccaatgaagagatagcttttcaagtaaggactgttcctcttgatgaagtgattccgaaatcagagcgtgtgcttctgcttaaaatagatgttcagggctgggaatatcacgttcttaaaggagcatcaaagttgctctcaaggaaaggaagccaagccccttatctcatatacgaagaagatgagcgcttgttacgggccagtaatagcagtgcaaaagagattcgagacttcctacgtagtgtgggttatcatgattgcacccaacatggcacagatgcacactgcgtcaagaaggattgatcataattttggtttttagtttttgctgctcctagatggaaaaccaagttattgccagttgactatgtcagctaattcttgagtggtggattgattgctgatggaaacgagttaagacgggtggcaactacatcgctaactgcaagctgcttcgtgatctctctatctgtccacgtagtttgaaatgcatgtgttattggacaagcatcacctatgattcttgggtaggtctgtttgggtttaggtcttgtatacatgcctttatttgtaggcatttgtttaatgagttccacaaatttccaattatatattgaaatctatttataaaatacttgtgtatcaatttctcatgtttgatatgtcaactaatatggagtcctgaagtatacagagaactacatcatctgcc

SEQ ID NO: 103698 - DNA, 276 bp, Glycine max
  Clone ID: PAT_MRT3847_64657C.1
gacgtttttagggtttacaccgatcagccagacctcccgcagcatccatggttctcacggctgaaggatgcctaatcagtggcgccaagatctacgcatgaaagggcaatcgctttgttcgtggtgattctcaagttttcctgtttgcaagctcaaagtgttcgaggtatttcgacaatcgtctgaagccttcaaatctcacctggactgcaatgtatatgcagcatgtcaacttcgacattgctcaagaagctgtgatgaagacgatatctgctg

SEQ ID NO: 103699 - DNA, 261 bp, Glycine max
  unsure (1)..(261): unsure at all n locations
  Clone ID: PAT_MRT3847_64658C.1
tttgagaggttcttccctcaganctcagccaggctgagtgttcctggaggaccaagtgttgcatgtagcacagccaaagctgtagagtgggatgctgcttggtctaacaaccttgatccatctngtagggcagcacttggagtgcatgcatcagcttatggaaatcaggtcaaagctgtagaaccagagaagtcatacacacgatggaagtttccccantaggagttgccatatagactagtatgagccatcgcaatacta

SEQ ID NO: 103700 - DNA, 270 bp, Glycine max
  Clone ID: PAT_MRT3847_64659C.1
gcatcggctggtgctataagggcaatacgaaaatagtgccaccctctcttcaagcgctgtgagaaagctctaaagggacaagcggaagtgatccgctcaatgccgcatggggctttcattctattgagggaattagacaacattcgagtgcttgacaacaaattggagggaggtttagaatgattattggagaaagctgattttgccatcaaaaaagaagatgttatggagttttgctacctaccaagatcgacaaaaaaatcgcacgcc

SEQ ID NO: 103701 - DNA, 174 bp, Glycine max
  Clone ID: PAT_MRT3847_6465C.1
atcaaacgtccgcctactcttccggcaattgttgtaactttttgagtcttaacgtcagtaaaagtcgaaattactttgtcgttaggggaaagagattgtgtgtgtctcagtcactatcgctggatcgagcgaaggtcttaccagctgaatcgatttgggaacgacttacttgtg

SEQ ID NO: 103702 - DNA, 314 bp, Glycine max
  Clone ID: PAT_MRT3847_64660C.1
ccgggtcgacccagcgtccgctacttcctcatttaccaagtttttgctttgtggtttgcagaagtaaacgaggaaaagggcatggaaaatcatagtattttgtaactaaatgcttttgttcttgtgaattaattttcattcactttcagatttgtgagttcaagtacatttattgagtttctctacttagatgttcttgtttttcttatgcttttgggtttttttagcctgaaagtctttctttttaaatcatgtagatcctttatcttcttctactactagatctttaagttattactttatttttgtgtata

SEQ ID NO: 103703 - DNA, 444 bp, Glycine max
  Clone ID: PAT_MRT3847_64661C.1
gtgctgcattcgcgaattgaacctcaatttcagtttctaatatttggctcactgtcttggcggtccagagaactgcatagagagagatggcctctgtgacatttgctgctgtgttaaatgggttgggatctatcttcttgcgtggacgcaacaggagccggaccctgctggccactgctgttggcggcaaagttggtgctgctgctgttactgttagaacctagaacacatattgcggccgctgctgctgctccactgaattcatgtctccctggtgtccgaggggggggacctctcgtagacccacaatcgcttgacgcctcactaccacgggactgtggctctcacccactatgacttggtaaggacccagcattcctcaaatgctagacacaacctcaacttattcatgcacgatgggcaatgcctgcacttcttagaatc

SEQ ID NO: 103704 - DNA, 454 bp, Glycine max
  unsure (1)..(454): unsure at all n locations
  Clone ID: PAT_MRT3847_64662C.1
aattcggctcgagtacggctgcgaaagacgacagaagggttctgctggaaggaagacaaaattgaagactcctgaggaagcaatggaactgattgagaacatggcagtcattgaccatgctatcttgcatgatagaacacacattcccacaaagagaagtttattggagctcacatcataggatgctttgctggcgtagaataagctattagctaaacaacttgaatcattcacagagattttaagcaaattgccaacacagttgccagcaactcaacctattcattcagcagttatgcaaattagagtttgcagtatatgtggagggactcatgaatctggtggctgtatgactcaagattatgcatccaaagaagttaactatatggaaaatcagaataggcaaggatttcatctangtggttgtgcaagatatcagtaaggaggaaacttt

SEQ ID NO: 103705 - DNA, 553 bp, Glycine max
  unsure (1)..(553): unsure at all n locations
  Clone ID: PAT_MRT3847_64663C.1
attcggcaccaaatttgtgttcattaaacaaagttaagtaaaaccacacgtgtgcaagagccatggcagcttcggggccaagaccacctagaacaagaacaactagaggtccttccattcgtcctgtgtatgaaaccttcgaacccaagtcagagatgaaggaaaaggaggaagcatattttcttcatatttaccttcctggtttcgtaaaggagaagataaagataaattttgtgggatcttcccgagtagtgagggttgcaggagaacgaccattaggaggcaatagaataagcaatttcgagcaagcatatccagttccagaaaattgtgaggtggggaaacttcaaggcaagtatgagctaggaactctcattattacaatgccaaagaagcctatcatttcacaagtttcaccaaaagcgaaagttgaaacaacaccaagaataggtccaactccattaattagtcctccaaagaaatctgttcctgatcaatcaccataattgacaaaggaaagagaaggactgaagaggatganatctacacaata

SEQ ID NO: 103706 - DNA, 817 bp, Glycine max
  Clone ID: PAT_MRT3847_64664C.1
cttgtttgtgaacatggcgaccattattctagaaaatgaccctcttaactggagccatgcagcagattcactcaagggtagccactttgaagaagtaaaacgcatggtggcagaataccggaagccacttatctctctgggtggcggggagacactaactatatcacaggtggctgctgttgctgttgccaatgccaaccataacttgcaggctaaggttgatctctcagagtctgcaagggcaggcgttgacgccagctgcgactggatcacccaaaacattaacaaaggcactcccatttatggtgttaccaccggctttggtgctgcctcccacaggcaaactcaacaaggccttgctcttcagaaggaaatggttaggtttttaaactgcgcaatatttggctaccagacagagttatctcacacactgcctaaatcagcaacaagagcagcaatgcttgtgagggttaatacccttcttcaaggctactcaggaatcagatttgaaatcctagaagctatcacgaaactactgaaccacaatgtcacccccatcttgccattacgtggtacagttactgcgtctggtgatctaattcctctgtcctacattgttgcattgctaactggtaggcgaaatagtaaagctgttggaccctctggagagtcacttaatgctaaggaagctttccatttagcaggtctacattctgggttctttgagttgaagcccaaggaaggtcttgccctcgtaaatggcacggccgttgggtctggcgtagcttctactgtgctttttgaggcaaacatatta

SEQ ID NO: 103707 - DNA, 200 bp, Glycine max
  Clone ID: PAT_MRT3847_64665C.1
aaaagtattgaaaactcccttaagagcgataaaggattggaaaagaagtagacattttcatggatgattaggggacccaatatgtgccaccaacaaaaattataaatgatgacccaaatgtaataaaaaaacggggacaggcattggagggggagaataaattgttccataaacccaaacatttccgggccacgatgaaa

SEQ ID NO: 103708 - DNA, 650 bp, Glycine max
  unsure (1)..(650): unsure at all n locations
  Clone ID: PAT_MRT3847_64666C.1
gttatcataaatgtggctgtactctcattaattctcttaatgtcttgtaacatattaagaaaaataacatttttaaaccttatcacaaaactgacttcactgtacaagtcgacacatgcatagatacaagtgcagcaccaaagttgcgttaagtcagtggcatcggggtccgtcatcttggtttaagcttccaagtcaattctgccatggaaaccatgttcgaagactctgatacgaggccaccttttcttactttaattactcggttatgctccaccacatcttaagctcacgttcaaccagtgtacaaaaccaagatgaagtggaagaacattttaccagaaatacagccaatgacagtgattagtataatagcactaatttattctgatttaggtaccgactatatatagataaatattctgatctgtagccaaattaattattaaaaactaaaaacaaaatctgcataaggggttaagatntaataatggttgagatacccatttgtcaattgaacgcaaatgatgtttaataagataaagttattcaaagcatcgatatcctcatgcaacaactacagagaacatgaaatttgaccagagtaaatccagcttttagtttttaacatgtcattattatcctctcgc

SEQ ID NO: 103709 - DNA, 502 bp, Glycine max
  Clone ID: PAT_MRT3847_64667C.1
tctcccatgcgtccgcccacgcgtccgaaaaagaaacatgaaagtgttgattgttttgaagtagcttgacaaagattccacatgatgttaaggagatatttgccaagctattgaagagtaaagaaaaaagaaccacattttgatttgttccagcaaaatgatgcttcattcttgcaattccaccacaacatgagaacagaacttacattgcacttgaagtctattaggggggacttatcacagtactgccatgtaatatcaactgccctatttttttcttgacccattcttcaaaaactgcatacaacacataaacagaggagaggagacaattcaacagcataaaaaagggatcaccacagcaacacagaagcatgaacaagggtgaagggaccagcattactgaaacagggaggttgcatgaacaatgaaccagcagcgagaagagatgaacgaagtgtcactctctttttgcaacccatgattagaggagaagagagga

SEQ ID NO: 103710 - DNA, 173 bp, Glycine max
  Clone ID: PAT_MRT3847_64668C.1
aatactctttgcctcaaggcgcaaacccgacacgtgtgtattcttctatttccatggcggggggactctccaccgccccactcttaaagccctacaatctcgtccaacccccaatccctctttctaaaccaaccacattactctttttcaacccccttaagatgtttccatca

SEQ ID NO: 103711 - DNA, 175 bp, Glycine max
  Clone ID: PAT_MRT3847_64669C.1
ggagtggcgctttttttttaacgagcagttactttggggtgaattttattggcaaggagccttttttatgaaagaacatctcatgcggagaaacaaaaattgtcgggtctccgcttgaaaaatataaaacccccctccgtgggatgaagttcataggaagcccccaaagttttat

SEQ ID NO: 103712 - DNA, 633 bp, Glycine max
  unsure (1)..(633): unsure at all n locations
  Clone ID: PAT_MRT3847_6466C.1
cccgggctcgnaccgatcctcaccctagtccaggcggcccgcccctcttttttttttgtttattcttttttgtttttttatttttttttatttttttttttttttttttttttttttttaaaaaaaaaaggcccccccctagtaaaaaaaaggggggggataataatagaaacacccccccccgggaaaaaaaaatataaaaaacctccccttacttgggcccttgcccaaccaactgccaaaaaaatgcttggggccggccaaatccaggggaacccctttctttggaaatttcgggggtttctaaaaaacccggaacaataccccaagttaacgggaaacttggggcctgggcggcaaattatccggccattttccaataaactaaacttctcgggctttcggaatacccgaaggccaaaaaattggaaaaacaactttgcaagaaaagcgggggacccctcccccaatttttttaaccaaaattgtttcccaatttgggggggcccctcccaaataaaaaataccccattattggggaaaaacaggtttaaaatccaatccccccctgcacccttttgtaatgatttttgccccccaaaagccccctgagtaattaatcccccccggggg

SEQ ID NO: 103713 - DNA, 399 bp, Glycine max
  Clone ID: PAT_MRT3847_64670C.1
ccagagtaaggggtttagaggtcgaaacaaaaacccttggagaaaattaaatctgttttggtttgatcaccttctgtatgtgtgacccggggaaggttgtgtggtgtgtgctagtctggtaccggtggtgcaaacagcgtgtctcgcgagcggccgaatgccaagtatcacgtattcacacacagtgtcaacatcaaggttcgcggggtccacggaggtccacgcgggcccggctatcgacattattgccggagctgggaaggcatgggcagcattctaaacagctataccagctgagttcgcaagcccagcctaacaagccggcaacccggcactgggtgtataatgtgaaaccgccaccgccgccgtcgccgccgtctgtgccgcgggtgcaggcaa

SEQ ID NO: 103714 - DNA, 437 bp, Glycine max
  Clone ID: PAT_MRT3847_64671C.1
ggttagagtctaatagtttcagggttgtcttaaatatttattatgttggtcctgtctctgtacaagattaatctacaaatgtttttatgctgtgtttggttgctaccctgacctttgaggttgtaggcccagcaaaaattgcatggtcagagcatgaaagactgacaaatgagtgcattaaattagctaaataagggctagccttgacatcatataatacgccattatggcttacgtactatggaataatgctgatggtgatgggtttccagatcttccattccaccatggttgcgtattattgctacggctgttaggaacctctttgaggtgtgatgcgggtttagaggtccaaaaatgtggccatagaataacgtgcaaaatatactttggtaaaaacttgagaaatgcactctagttctgaatcaatcaaatat

SEQ ID NO: 103715 - DNA, 199 bp, Glycine max
  Clone ID: PAT_MRT3847_64672C.1
accggtgggaaaagaacaccgaagggggcgagtggttctcaggacatgaagatcaatacgctcactgtcttgaagaagatagatcatgggcgagtcactgacttctatttactcactcttcactctagggcaaaagaactactccatccctattctaaggagggttcaaatgctttacactccaataatcgagcataat

SEQ ID NO: 103716 - DNA, 2075 bp, Glycine max
  unsure (1)..(2075): unsure at all n locations
  Clone ID: PAT_MRT3847_64673C.1
ccacgcgtccgctcttctcttcctctttgattgtttgtctggattttgagttctgatccaaactgttgaagctgaagaacctgagcccaattgaactctaacgtgccaaaattttttgagttgcatgtgattgtgaagataagatgagtattgtgtatagtcatgctgtgaagtactctcaaggggaaacaaggatgaacccagaaatggattcaaacattggtcaacattgtcaccaacaaaattctggactaatgagataccgttctgccccaagctcattgctcacaagccttgcgaacaacaacaacattaataataacaccaccaccaatggttgtgttaatggcaaagctttcagaagtgtgcataatcatcatcagcagcaacgttatcctccctccacaagttctgaaatggagaccatgttggccaagttgatttcttcaaacaattctgagcctttgcaagtgaaggaagaagcagtggcctctgtttcacagccaccacaacagcacaatggttactcctatgggtcttcacctcagatgatgtaccaaactcagcaaattcaaggcttgtctatgccaaatggttctttagggaatgcttttgatggctcattcagtgcagtgaattcccttgcttcacagaattccacacaacctagactgggtgcttccaccaattgcaacaatctcattaggcaaaagagttcccctgctgggtttttctccaattactcagttgataatgcaatgagagatgtggcaagttttaggggctgtgatgtctcaaatggacaagctattacatcctcaagtgggttgcatggtggtactttgaacttatcatctaggccatcctcttgctccacccgaatgccacagattgctgaaaatggaaatgaagatgtggaagcaaattatgttgaaagtagaaacctgagaaatgacaatatcaacaccactaaatgttacatgcctagtttcaccactgacttctgggatggttctgcattcagtgcctccagaacagctagtaacagaggtgaaatctcattttccacttcaaaggctatggatattcaggatgaagattttggataccaaaaagttggtttgacccaccatttgagtctgcctggctcttccagtaggatggctacaatggagaagctttatcaaattcaaggatctgttccatgtaaaattcgtgccaagagaggttttgccactcacccgagaagtattgctgaaagggaaaggagaacacgaattagcgcaagaatcaagaaattgcaagaccttttcccaaaatcagacaagcaaacaagcactgcagatatgttggatttggcagttgagtacattaaagacttgcagaaacaagttaagattctcagagatactagggcattcggcaccagtacaagcaatcagaagcactgatttatatatccttgtagataacaaaaagaaggagcatttttttttcttttcatgtatttatcctttggtgtaccaaaatttttggtcagtgtgattatgtagagtagcgctgatatttgctagtatctaagaatttaggtccaggtccgtgtgagtctcttcagttttgtttttcattttccctcatttgttttttctttctttcctttgcttgatttaagtatcacaatgtaataaaaagtttagaaagagccaattgtaactgttcattttactcataagaggtttgatggcatcacaaaataaaattgagtctcaactgtcacacgctaaagattgagttctatatggaagaaattaccggtgcaataagtagttaagatctttgtattcgtgttgcaaatatagggggtgtcctgattaggagttcagaaaagaggggtggaattgccttgatgttgaaccaatgccaagctatgcacactccagtgcttatcatcatttcagaagggtgatgaagacattagatgtgagaggagaggtctagcttatattagatgtagcaaagaagagtgctgggaatttattttccaatacaccgaatttgttagaacaacnngatca

SEQ ID NO: 103717 - DNA, 389 bp, Glycine max
  Clone ID: PAT_MRT3847_64674C.1
acgagagtttgtctcagggttgtgttacatatactgtatacactccctcatgttgcatcctttgggaaggcaattaaggagcatgagaagacattaggcgttgattgcaaaggtaaagttaattaattaatggccaagaaattaaggagacaaacaaaaatagtactatttggaatgcatattattatggcacccaatgaatctgcgacagctttgtagtatgtttcagcaactgaggacatatatggcacgtcctttatcattcgcatccagcaacaatattgagtgacacaatgaaagaatccacaatggtgcctaattttgacaggacaaaagtcagatatagatttagtttgtttaattatatatttttgatattatttttcaat

SEQ ID NO: 103718 - DNA, 426 bp, Glycine max
  Clone ID: PAT_MRT3847_64675C.1
aaataaaatgacttagattgcagatgtttagtgagcttgcgtaataatctattactgttgaatgactacgtttacgaatcagaaaaagataatgaccagtaccacaaccgtaatcaatatcagcaaaacatcacgtgtcatgcaaaagcaacaacatacgaatacggagaaagggaaaaggctactgcagcagcccctgctcgtggtcagaagcaaattcagaccttgaccgaaacacaagaagataactctcactcggattcttcaagttcaaacaaaaacaagattctggcccagacagctacagaacctaaaccaaatccaattctgtagcttcaaactgcaactgaagttgtaggcctagggcataatgatcagcctgaagttgtgaaattctaataagctgaacttgtgcttctgaaacag

SEQ ID NO: 103719 - DNA, 847 bp, Glycine max
  Clone ID: PAT_MRT3847_64676C.1
ccaccaccaccaccagccgccgcaacacgttccctctgtcatggcggattcccttaaccccgccactgcactcggcgtcggcgtcggcgtcattcctctcctcgcagccacgccgtgcctcgaatccgacaacatcatcctcggaagtaggacacgtggcggcgggggaattcagctatggcaagaccatcaacaacaccatcaaagccactacatgaagaagcagctgcagcagggtcttctcgaccattatagtaacaccagttcggggaatttgattcagaacagtggcgaggtaactgcttctggaactagtagcggcggaacaacgtgccaagattgtggaaaccaggcaaagaaagattgtgccaacagaaggtgtagaacctgttgcaaaagccgaggctttgattgtcctacccacgttaagagcacttgggtccccgccgcacgccggagagagcgccagctaatgacgtcggccaccgcagctgtcgccggttctagtggctccacttcgggcactaaaaaacctaggctcattgcttcacaaaccacaacaacttcccacacttccacttccaacaccacccctcctagaagctttgacactagctctagccatcaagatgcggggttcaaagagtcattacctgcgcaagtacgtgcaccagcggctctcaagtgtgtaagagtgacggcggtggatgatgggcaagatgagtatgcatatcaagctgtggtgaagattggtggccacgtgttcaaagggtttctctatgatcaaggggtggagaatacggatgtgtctcctatcctatctgagttgcatttgggtggtggaagt

SEQ ID NO: 103720 - DNA, 336 bp, Glycine max
  Clone ID: PAT_MRT3847_64677C.1
gcgctctctctctctgtctcctacgattcgttttgccccttttgttgccctaatttcaaccatgcctcgccgtagctccggtggaagatctgcccgtcctgctcctcgggcagctcctcgtcctgctccagttcaccatgctcctcctccagcattcatacaaaggcattccaggattgcctgaacggctatgggaatgacattagcaagtgccagttttacatggatatgcttgcagaatgcagaaagaactctggagccacgttgagcatgtaactgctacatttgcctgttttggagtttgcatcagtgccctgtctcctatggtttgaactg

SEQ ID NO: 103721 - DNA, 1522 bp, Glycine max
  Clone ID: PAT_MRT3847_64678C.1
gtgtggctgtaaccctagttgcacaggagcaccgtttggctctacaagtctttccttttctatttaattcctaaaatcccattcttcttcgctcattcctctgcactgccatcatccccaacttcctcacaaggttacaaggactaaagagttgtgccaccatgtcggacgatgaaagggaggagaaagagttggatctctcttctgccgaagttgtcaccaaatacaaaaccgctgctgagatcgttaacaaggccttgaagctagttatttcagaatgtaaaccaaaggcgaagattgtggatatttgtgagaaaggggattcatacattagagagcaaactggaaatgtgtacaagaatgtgaagaggaagattgagagaggtgttgctttcccaacatgtttatcaatcaacaacgttgtctgccatttctctccactagccagtgatgaggccgtgttggaagaaggtgatatattgaaaattgatatggcatgccatatagatgggttcattgctgtggtagctcacacccatgttcttcaggaaggtcctgttactggaagggcagctgatgtcattgctgctgctaatactgctgctgaggtggccttgaggcttgtcaggccgggaaagaagaacaaggatgtaagtgatgcaattcaaaaggttgctgctgcctatgactgtaaaattgttgagggtgttcttagccaccaaatgaagcagtttgttattgatgggaataaagttgtgcttagtttgtctaatccagacacaagggttgacgaagcagagtttgaggagaacgaagtttatgcaattgatatagtaacaagcactggggatggcaagcctaagctgttggatgagaagcagacaactatttataagagggctgttgacaagagttatcacttgaagatgaaagcgtctaggttcattttcagtgaaataagccaaaaatttccaatcatgccattctctgctagggctttggaagagaaaagagctcgacttggtttggtggaatgcgtcaaccatgagctcttgcagccatatcctgttttgcatgaaaagcctggtgattttgttgcacatatcaaattcacagtcttgttgatgccaaatggatcggatcgaatcacaactcatccactccaagaattgcagcccacaaaaacaatagatgatcctgatattaaggcctggctagccttgggcacaaagacaaagaagaaaggtggtggaaagaagaaaaaaggtaagaaaggggagaaggcagatgagtcagctgaagctgagcctatggactcaacaaacgaggccactcctcaagagtgacttaactctcctcccctctcctctcccccaaacaatgaaagaagttttttcatttcattttcgataccccttttcaattttggtacactgttcaccaaattgtattttgcttggatatcaattttagtatagtgttccgacattgattctaatagcaattttcatatgctcatttt

SEQ ID NO: 103722 - DNA, 831 bp, Glycine max
  Clone ID: PAT_MRT3847_64679C.1
cttcctacctagatacatgggtttctagggatatacaattttcctatattttttgggtacgtagtttgattcgctttgtgggtgcctattttggttgaaatttatgaaattcgaggctttattcttttttcaacatcaataattaagagggtagaactattctctttgttattttgattactttttctttggaatgttcttcataaaattgttcaaaaaacaaaattgctactttcagttttttttttttttttatatatttcttggataccttttttgttttcccacatgttttcacgaaccttacgtttgttgatttttcttgtgtttcagttgcaacaagtactcttttgacttgagctatgttgagaagacaaccacagagactcttgttttgggtgttgggtctgtgaaggcccaattggagggtgctgaaatgggtgttgcagctgagaacggtggctgcaactgtggatcaagctgcacctgcgacccatgcaactgcaagtgaggtcaagatttataaccttgaagcagagataactgtaatatatgtatcaacaaataataagaattacgtgttgtgtttaataaagtgatcatggctcgaatttgcaaattcaaatgttctaggatatttgttgcgagtgtttgaagtatggttgcttagtgtttggttggtctatcataaatatgtaaatttgaatcatcaatctctgcttataaatggactacttttggtgttatatgaataagaagtttgttgggttacttcaataaaaaaaaaaaaaaaaaaagaagaaaaaactgtaaaaaaagtcaagtaggtct

SEQ ID NO: 103723 - DNA, 222 bp, Glycine max
  unsure (1)..(222): unsure at all n locations
  Clone ID: PAT_MRT3847_6467C.1
acactttgattcacacgcacgcaagcttgaacccggtacatcggccgccctcgccctttttttttttactattcaaataaaaaaatccagtattgcccactaaacactggcagccaggattttcatacaaagagagcagaaatgttgcanccaccgcagctccaacaaacggcccaacccaggaaatacattgggacccccacgctttgatgctgttgaaga

SEQ ID NO: 103724 - DNA, 476 bp, Glycine max
  Clone ID: PAT_MRT3847_64680C.1
aagctatacttagtgaggatataataaacactgccactctcatagacatcggcattacgcgcttacttggacatcttgccttcgttcgtagcactcacatgcatacctagcatatgccttaacaccatgatcttgccctcttgcccagctcttaccgacttgcacagtacttattcgaacttaacaatcaagagtcacactggcagactagagtgccatgggaagattaactaacatagcgatgaacctgttgcatccccaagaacctgatggggccttgatcggatcctagaaccagaaaaacaccccatttaaagaaagacaccttaattacagattgcttacacacttacaaagggcttacacatcaaggacgggaagaaaatggaaggccctaatgatccgggaagcgcttgagggtccccatggagcttgttgggagcatagccctggtgtctgagataagcctttgtgcc

SEQ ID NO: 103725 - DNA, 348 bp, Glycine max
  Clone ID: PAT_MRT3847_64681C.1
gcgtccaaacaaaagcttcttgcacgcacgcctttacgaggcgtgctgctactaccggggcatcgtccgggtcatcggcggtgggcgctctataggctccatcgctactttcgcgtactggcgacctctttactcttctaaagtctcacccagggggatttcactgtcggtctttttagaacttcatgacggggaaacccctggcgtcgcccatcttattcgccttccggcatatccccgatttcgctagctcgcgtgatccccactaggttcgtcccgatcgccactcccaaactttccccagcttgagcggctatgggtaaccgccccgttgcggcccattacccc

SEQ ID NO: 103726 - DNA, 2005 bp, Glycine max
  Clone ID: PAT_MRT3847_64682C.1
tacggctgcgagaagacgacagaaggggattccattgtgtagtaaccaatcatctttagttcttcagtaatttattgtgggattctattctaagattttgagaatgtctagctgtgggtgtggaagcagctgcaactgtggcagcaactgcggttgcaacaagtactcttttgacttgagttacgttgagaagacaaccacagagactctagttttgggtgttgggcctgtgaaggcccaattggagggtgctgaaatgggtgttgcatctgagaacggtggctgcaactgtggatcaagctgcacctgtgacccatgcaactgcaagtaaggtcaagatgtataaccttgaagcagagatagctgtaatatatgtatcaacaaataataataatagcacaggtagcaccgattggctcttcaagacttgcttctttaccatttcattcctaaaaccctattcttcttcgctcattcatcagcactgccatcagccccaacctccccacaaggtcacagggactaaagaggtgtaccaccatgtcggacgatgaaagggaggagaaggagttggatctctcttctgcagaagttgtaaccaaatacaaaaccgcggctgagatcgttaacaaggccttgaagctagttatttcagaatgtaaaccaaaggcgaagattgtggatatttgtgagaaaggggattcatacattcgagagcaaactggaaatgtgtacaagaatgtgaagaggaagattgagagaggtgttgctttccctacatgtttgtctgtaaacaacgttgtctgccatttctctccactagccagtgacgaggcagtgttggaagaaggtgatatattgaaaattgatatggcatgtcatatagatggattcattgctgccgtagctcacacccatgttcttcaggaaggtcctgttacaggaagggcagctgatgtcattgctgccgcaaatactgctgctgaggtggccttgaggcttgtcaggccaggaaagaagaacaaggatgtaagtgatgcaattcaaaaggttgctgctgcctatgactgtaaaatcgttgagggtgtcttagccaccaaatgaagcagtttgttattgatgggaataaagttgtgcttagtttgtctaatccggacacaagggttgacgaagcagagtttgaggagaatgaagtttatgcaattgatatagtaacaagcactggggacggcaagcctaagctgttggatgagaagcagacaactatctataagagggctgttgacaagagttatcacttgaagatgaaagcgtctaggttcattttcagtgaaataagccaaaagtttcctatcatgccgttctctgctagggctttggaagagaaaagagctcgacttggtttggtggaatgcgtcaaccatgagctcttgcagccatatcctgttttgcatgaaaagcctggtgatttggttgcgcacatcaaattcacagtcttgttgatgccaaatggatcggatcgaatcacaactcatccactccaagaattgcagcctacaaaaacaatagatgatcctgatattaaggcctggctagccttgggcacaaagacaaagaagaaaggtggtgggaagaagaaaaaaggtaagaaaggggacaaggcagatgagacaactgaagctgaggctatggactcaacaaacggggccactcctcaagagtgacttaactacccttccctctcctctcctctcctctccccaaacaatgaaagaagctttttcgtttcattttcgacacctcttttcaattttggtacattgttcaccaaattgtattttgcttgcttggatgtcaattttagtatagtgttccgacattgattttaataggaatttatatatgcacattttagttggggtcctttttttcaaaaaaagaaaaaagacaaaccgaaccagttaaatggtttagttcttcatccaaactgtttgataataataaa

SEQ ID NO: 103727 - DNA, 244 bp, Glycine max
  Clone ID: PAT_MRT3847_64683C.1
cttgcatgacgctgttggtactagttgccgagagacatatataagttgtggaccaagcgctttctcagattaggcataaatctccactacacacgagctatacatctatcaaaaagaattctaattcatacgacaactttaataagagccgcactatcatatttacatgaatactcccacagatatacccatcaattatctattcaaaaaaactaattttacaccattggcgtgccatttcaaa

SEQ ID NO: 103728 - DNA, 432 bp, Glycine max
  Clone ID: PAT_MRT3847_64684C.1
caaccatcaaagagattattagatcatgccctgcgattaatgtacaaactacacccaaagagtttgataagaaagtgtgccatgccagtatggttaaagctagagaaagagaagccaataattgcctcattcttgtttcaacttttctgattctaagccttactttgaccgctcggttgagtccatacatacatactttggggtccttttcattaaggacgatgcagaccagcctaatctctctacccgaagttccatgaagcacggttgactttgtggtaaacctgctggaggaaagagcaatgatgattttgatgataactaatgcaggttgactgcgtcggtcggtcgatttgtatatatacaaaccgggcaggctcaattggagccctaattttttgcagcccctggaggcttaggcttggtggccct

SEQ ID NO: 103729 - DNA, 332 bp, Glycine max
  unsure (1)..(332): unsure at all n locations
  Clone ID: PAT_MRT3847_64685C.1
agagtgcngtagcnatggcgtcagcgnnnaagactacgncatattacggactncggagtcnncngcacnnncagcntnccttacnagtncatngcgcntnnnnnncagagtnntcaagntacatntnggtnctcnttangnanagaagtgcacatggaagccgggtgagtcgacngngccngcatcgagtttgntacgtggtncnngccacgnncctgcgnnaannctgcncnnacnttccannagtgttgctgagannagagancngnantntgnntnngnngttgtngatacngttngncaccaannacnncgatgagatcggnngtatn

SEQ ID NO: 103730 - DNA, 469 bp, Glycine max
  Clone ID: PAT_MRT3847_64686C.1
agcgacttaagataactttttttgatatacatgctgccaaggattacctggaaatcaaaaatgtcattggtaaaatactgatgaaacagaatccaaagtccatatattgttgctggaataactagcctaggagatgaaagtgatataccgctacccttgattgtcctctccaagaaatcttcaaggtcttcacttcttataccaattctggttaagaaatattgtttgaccaaaacaagggataagaaaatgtcaactacagagaatgctaactagcacaattagatcaaattcaaagcacaagttttcatttgtacttctttgacttctttttcttgaatatttgaggaacatcttcactggataggttgtctgcatgttgatacaagagttgaaggtacaagcaactgaaaaggactccaatcgcataacttatagcaacctgtacggacaaaataaccaagcaata

SEQ ID NO: 103731 - DNA, 252 bp, Glycine max
  Clone ID: PAT_MRT3847_64687C.1
atgtacaagtggtgatgaccctaatcataaaacgcacaattacaaaggggaagatgggctatgtactacatgggataatccaagtagactcagcacttatgaacaacctttcgtcgtggaagatgaagaagttattatcttcaggactctagcgaggcatcattcaacaccatcgtacgcactattttcccctcatgagcagatatcataaggcatagacatggatgacatagtcttacacttatgatgatt

SEQ ID NO: 103732 - DNA, 597 bp, Glycine max
  Clone ID: PAT_MRT3847_64688C.1
cattgttctcctcctgctgaatgccaccctgtacttccatagcatctacttctgggattcaccgctggcactttcgcattcacttgtttaccttcaattgtatacttaaccttggtgtgtttatccattctatcagcctaagagataggaacatctttcttatcctctactatttctttcaactcagcaccttttttatcttctactacttgtttcacaccatcaatttccttatcctccttgacttatttcacatcataaactaccttatcctctatgacttctttcacaccatcaactcccttatcctcttctacttcttccaccctatcttgcttcttatcctgatttactgcttccaccccattttttttatcctcctttacttgttcaaccccatattctttcgtatcctctttggctgcttccactccatcttcttgggtaacctttgttactacttccaccccttcttctatcttatcctatctagcttctttcacccaatcttgtttcttatcctctttagcgtcgttcacaacaacaattttcttgagctcttctaccttgacacaccatcagctttcttatcttaaa

SEQ ID NO: 103733 - DNA, 165 bp, Glycine max
  Clone ID: PAT_MRT3847_64689C.1
cccataatcgcgtttcccaagctctttttcaaacccgtcgctatggctacgctcggcgctcgcatggtggacgtctcacctaccgttacttcggcgggctcgctcgactatgaaaccttcgcttttagaaggagaagattaaccattccgtacacgactagttca

SEQ ID NO: 103734 - DNA, 455 bp, Glycine max
  Clone ID: PAT_MRT3847_6468C.1
ggaaagttggagaaagcaaggtccgggttaaccaagggtccagagtaaatatatctgtaacagatagaagccaattggaagtgtacaaaattcgagtcattagcttattaagtgtgatgatgttgggttctatgtatcgtgactgtaagaatggttccatatttggctttgctacccacctggaagaggatttaccgaaacatcatacatgacctgtaacggagtagttgtagtttttttttttagtgtacattggcagttgggaggtttcctcaccgctacgtcgatcctagtggggttaggtgtacatatagttgtcaccccttgtatgccttgggtgtgctgatttcttaggccgaataaagtttgtgggcatatgatgatgtcagcattgtacttttagaacgtctgaatatgtatagatgagattctaacttgcccttattgcattatcg

SEQ ID NO: 103735 - DNA, 479 bp, Glycine max
  unsure (1)..(479): unsure at all n locations
  Clone ID: PAT_MRT3847_64690C.1
catgatagttgcgtgattagagagttgctgcantctattccctgattgacactaacacagtacacgacggtccctctaatagatctacgctagctatgccgttgtgggcatatactcgatctgtactcacagattacaacagatacccactttttggaaatggtctagactcgattagttcgctggacaacccaggaccacgccctataggctcttaaggcacaccgtgcggtcttcatgctgatcagaaaaacctcaatctgtagactctctgagagacctgaaaatagcttgcctatatctctcatgttgaaggtaacgggctacccaataattgacccacccatgatatgtgtataagacaatagattactgtgaggacttatgactatccagcatagaatctcagagaaaatacttcgggtgaggccagctcatacacaacaaattatactcgattagatgcgaccacctttgcc

SEQ ID NO: 103736 - DNA, 111 bp, Glycine max
  Clone ID: PAT_MRT3847_64691C.1
ttttcctttccctccaaagttctgaaaattaccctccaagggaactatgctggagttcgttgggctagcccctaggctaaacctcatttactgttctgctctgatagcgaa

SEQ ID NO: 103737 - DNA, 204 bp, Glycine max
  Clone ID: PAT_MRT3847_64692C.1
cgttgcgtggatcaaactgactcacacacataaagtgtcttgctttgaataaatgaggcgacggctccggaggccggaatgaactcacatgcgttaatatagatcctgcccagcgtgaattgctaacgtaggctctcgtcaaggtcgatgagatcggggagctcgatattggtctttacgtgatggacaccatcactgagggaa

SEQ ID NO: 103738 - DNA, 377 bp, Glycine max
  Clone ID: PAT_MRT3847_64693C.1
tgcatgcaaaatcatgttctgatctttataatgttattggtgaggatttttggttggctacctggagctacagtactgcatttgaatggaagctgctagatagtacttggatataccttgtaaatatgggtgagcttggttttgtctttgcaatcataacaccttgttcccctgctagatgggatgattgtgacgaagatatgactgtggcatgggtaactctctgcaatgcttactgtggtgaatactattaggctactgactccgacacgcttgaaaacgtgcgagatgcaatttcatggatgacattttactggtataactgtatgccactgtctaggggatcggcaggggttggattcatagttatgctgggt

SEQ ID NO: 103739 - DNA, 307 bp, Glycine max
  Clone ID: PAT_MRT3847_64694C.1
cgggtcgagtttttattttttttaaccaagttgaagggcaataattaaatgtccaacattttttgggtggtgatgtttgaaattaagggttcccatttttagggaaatttttttttccgggggtttgagcaattccactggtaggggcaggacccattaaggtcaatccttttcaggtgccttcctctatatggtggctcaacgtcataggatctaaccctccctctgcttaaaaaacacctatctaaaaaataacataatctcttactcgctcaggttatttttatattaacacaaaaaactatat

SEQ ID NO: 103740 - DNA, 460 bp, Glycine max
  Clone ID: PAT_MRT3847_64695C.1
ccgttctatcccaagacgagagaattgaggcagcttggggtttgaatcgcatcgagtcgtaagcgagtcactcggtcgatcacatggctcttgtatgagttgaactgaaacatgcggcggagggcgtccctgaggagaattgttccgccaagcccaccaagcagggagagggccttccgcactactatgctctcaacattcacgagcatcagcttcttcttgggcaaatgactcatgacctcgaccgcgtcgaggctcagagaatcgacccccatcttagggtgcggatgcatgccgatgaattacaggttctgctagaacccggttttgatgtcggtgaagtcgtcatcgtactgggcaataacacagatcttggcaaggtccacccaccaggaacttatgctgtcggccttggccaaactattgacattacgatgactactccattcactagagatgc

SEQ ID NO: 103741 - DNA, 261 bp, Glycine max
  Clone ID: PAT_MRT3847_64696C.1
gggttagggtcgtggatccggggaggggttattccgaagaaggtggtgatgggtttgccgctatatgggaggacgtggcagttacttgaaccgaatgtgcatggaatcggggctccagctagtggaccgggtcctgggtcgaatggtgcaatggccttatttcaagtgttggagtttaacaacgaaacgggtgcaaatgttgtgtgtgacaaggaaacggcgtcggtttattcgtatagtgggagttactgggtcgggtac

SEQ ID NO: 103742 - DNA, 495 bp, Glycine max
  Clone ID: PAT_MRT3847_64697C.1
tcctctagagcggccgcttttgttttttttttttttttttttttgagagccaatctgtcaaagatatgagtcacacacactttatttacacacctaccaaatttcaccacttatgttacatgcgcggaaaatccaacgaatcactaaagcacggacagtacattgggctaacttgcaacgccttgattaaaaaacgatcttttctgaaacaaaccaagggatccctggtgcctctatataggtgactccatactctgattacaacctactcttgcgcgattaacttggaagcgactgctccactctaccagtgagagccctcaaatgtgccgacccgatctccacatagtgctcttgacacattccccgcggcaagcgcgttgaacactaccacaggaattccattctttttaaaatatgcctgggccgtaatatacgtggaggcgacgcccctataaacaactcccctactggaattaaaagcccgggcgatat

SEQ ID NO: 103743 - DNA, 897 bp, Glycine max
  unsure (1)..(897): unsure at all n locations
  Clone ID: PAT_MRT3847_64698C.1
cccacgctctctctctctcacttttgcaactcaaaagcttcaaacccaaagcaaagtagtacttagcttatagccagtgaggaacactaactgcattatgtaaggattgcatttttgctcccacaaggacaacctcatttgtcaaatatggattacgaaaggatccaaaagcctcagggtggtgggggattttcaccgggaaaattgaggagcatgctactgggtgtggagaagaagaggaaagaagaggaagagcttgattctactttcaccacgagatctcagaattcagacatggatgaatctggtggtagtagttccgatcattgcaaagatgtagatgttgtgagtgtccttcctgaatattcaacttctgctatagttcgcactagtagcgtagaggcagttggtggtgatcgttttgtgaaggctaatgcaggagtgaattcaaggagtagaatcttggaagacccttcttcagattatgatagtgggcacgataatatgagcatgtcctcgtcaatgtttgaatttcaaaaggccgagcgtgccccacagagggttcccgtggggccattctcaaaaccagcaccatctaaatgggatgatgcacagaagtggatagcaagtccaacttcaaacaggccaaagacagtgcagagccaggggcaaggtgggcaaagtgggcatgtaggaccgcgaaaggttggtagtcttggttatggaagccggcaatcttcaatgaaggttgttgttgaagttccagatcagaaagaaattgctttagatgaaccagataccaagcaaattgatacanatcagactaaaatggagactggaggacaganatntgtgagttgggaggctgatccctatgcaattgcaagttcttgtgtt

SEQ ID NO: 103744 - DNA, 529 bp, Glycine max
  Clone ID: PAT_MRT3847_64699C.1
gtcgccgttttgttgacacgcaaaacagatggtcttttgctgaccggctcgcaagatcgcaccgtcaagtgctgggatctgagcacagcagatctcgaagaaccagatgagaagcatcgcttcaagtcccattatacgatccaagcacacgacaaggacattaacgccatcgctattgcacccaacgacaagattttcgccactggctcccaggacaagttggccaagatttggaatttgcaggagggcacgttgatgggcacatgcaagggccacaagcgaggcgtgtggtcagtgcaattctagcctgtggatcaatgtctagccacaagttcaggtgatcgaacaatcaagctgtggtcgctcaatgatttcagctgtttgcggacgtttgagggccacaccaactcgattctcaaggtagatttcttgacatcaggcctgcagcttgtgtcgtgcggatcggacgggttggtcaagctgtggaccatacgcagtaacgagtgtgtggccacgctcgacaaccaca

SEQ ID NO: 103745 - DNA, 399 bp, Glycine max
  Clone ID: PAT_MRT3847_6469C.1
aatttccggtcgaccacgcgtgcgctgtgactgtacatgatgatacaacccatattatgatttaccaatatggtctctatatgagggctgagactatatcttacatgcgatatgcttgtcctcctatggatacattggcaatacgccacagtcttcatactgaatctcaagctcccgaacctgtatctgttagtcaatactctataagtgtacagtgctattatctctcatacaagcactacaatgatcaatgacaaaacaataatctattgaacttgcatccaattctacaggactacatactaatggtcaatcatctaatgacctatatgcgtcaactacctggatttgatgataacatcccaccctttgcaaacactaacagttcaaacacactta

SEQ ID NO: 103746 - DNA, 566 bp, Glycine max
  Clone ID: PAT_MRT3847_646C.1
ctcttccgttcaagtttgcaatttctcagcctcttttcctgtttcttcgtttctttctgaatatttaaatttttcgttttaaatcctcagcattgaaaccaaaaactgatcttcgaatagcatcgcaaagactcaaaaccaccccaaaataacaagaaaatccaattttttaggctctcacaaaaacgggtggagaaaaaaaaaacttgaacactgaacctacgttgaagctgaaagtggttgaaagggggttatggagagttccgttgggggagagaggagtggacgcgtggcactatcagaggtggtggcagattgtgtgaaacggtggttcagagatgcactgaaagaggccaaggcaggggacataaacatgcaagtgttggtgggtcagatgtacaacagtggctatggggttcctagagatgctcagaagggaagagtttgggttaccaaagcatctaaggctaggtcttcagtttggaaagtaggtgataagcacccaggttataatgcaagtgactctgattcggatgaattgaaggaggattcataagcaagcgtaa

SEQ ID NO: 103747 - DNA, 275 bp, Glycine max
  unsure (1)..(275): unsure at all n locations
  Clone ID: PAT_MRT3847_64700C.1
tcacataaccattttttttccccccacaccaaacccnnaaggccgcagaataaacaaaaaaggcccgccccacataatcttttcacacacccacccaaatactcctctttttttaccatcacccacatccttcaccctctttccaccctatattctctcacaaattcctccttctctcataccccccaaannnnnnaacataacaacacttcttcaatctatacatcactctccacaaccatacttatcctccataatacatctttaacaccaaa

SEQ ID NO: 103748 - DNA, 503 bp, Glycine max
  unsure (1)..(503): unsure at all n locations
  Clone ID: PAT_MRT3847_64701C.1
ctggatctcgnaattgggtaccgccctcgaggacgactcgtaggccgcccgtcgtctttttttttactcaccatctcatcttcactatcatcgtcatcactcgccaattcaggttccatcccagcctgccaacattctcatgcatatacctcacctcgcgaatcctccccttcttcttgttttttgtgtgcggccgtccctcaatcgaatcactaacctcaccatgcctctgcttcttattgtgcttctcctgaggcgtaaatagatcgatcttgaactcctcatttggatcaggctggttgaccggtatagccacgctctccagcgggtgcaaatggagtgaccgcacattgccccacttgttgggaggaggttcacaatccgctcaatcgcgggatcgacattttacacaatctcatcgctctgcatcctgaccttggcgagcgtgatcacactactggtacgcgtgcttatgagacagcatcgcggacgagcaggccctc

SEQ ID NO: 103749 - DNA, 538 bp, Glycine max
  Clone ID: PAT_MRT3847_64702C.1
attcccgggtacgacccacgcgtccggtttatttcattttttttgttttttttttatttttatctttttcttctatctgattctcaagagatgggaaggttacagagttgcctttaaatgcctgggttttctgctgaaacaaatggcaaggtgaacgtttttgaaaaaaacaggtatggtggtatgctgtattcttcggaatcagtgaactggttgcagagtttaattcttcctcaaagttaaattacagtccctctcgcagagacttacttgtatgaacggtggggcaccttctaatatacttcggggggaataaaaaaggccactggctacctaaacggatgaaatcgcgagatgatacaattttgaccccaactttttctgtctttgaaaaatgcgggacattgtatgtgaacaaacagggatctgcataacattgggggctacaacagggatgatgccttctaaagccatacgctgccttagatgacttcctgaattgaaggcagatgaaagtgccatcaaaaactaatgccgg

SEQ ID NO: 103750 - DNA, 410 bp, Glycine max
  Clone ID: PAT_MRT3847_64703C.1
cactgagcatcgtctagctatctcgatcgaactgtccaaggtcctgtcacataacctcacaaactaactgtagcttgacacggggaaaaagccgtactacttgttgttagcctgtgtgtggttttagttggcctgcctaccttcgcaactgccctttagtactttttcaacgtccacccgtactagcacaacattcgtattaactaccttggtgttcaactttaccgatcctttacattacgtaacgatgcccatttaggtgtcctcacttttcgttgattgtatcctcacggtttacgcatgatcatcccatatgctccctgggtccttatttcaaattggcttcaaattccactgtcaagcagttatgttacgcccttactgtcccttgccctgccgtggtttcaatg

SEQ ID NO: 103751 - DNA, 443 bp, Glycine max
  unsure (1)..(443): unsure at all n locations
  Clone ID: PAT_MRT3847_64704C.1
ttttggtggggcccttcccccattnctcctaacatttattgatctatggaaccatgactgacataccgccttctattaattaatnccatcatctgcttntcccacatcccacatcccatgagctataaatgcaaacaaaaaacgggtggtccccccggggttcatttccaaccccntattattcacatttctcnnnacaccctctctccccttaaattttcnccacctaccttancaccccccccttcccnaactatcccctttccctctcaaaaacccttcccctcattaaattaatcccttttttaaattcaaaacccaccccctttaacaaaacttacctcccaccaggtcttggtctattttttccaccaacctccctcttttctttcccttttaataaaccccccccaactccttaattaaaccccttcaccccccaa

SEQ ID NO: 103752 - DNA, 722 bp, Glycine max
  Clone ID: PAT_MRT3847_64705C.1
cctcatgcaatccatccaacaaaaaagcaagaagttcttaagagtcatgctggctataaccactaaattgaggagcaaatttagctagtttcatcttgaacgttcttggtgcaatgggcgctgctccaggaacccacagctttctaagcaagtctccaaaagctagagcaagttctccaaaacagaaaataaatagcatacattcattcccaacggattttcataatttatctctttacagtaatctccaaggaaaaaatcaacaagttttggggtatgagctaaacactgaatggcactattcataaaacatgtatttccaagattctgtaatcctgttaagcccaaagattgaattgctctacagctactgcctcaaaaatggttggtcgctgatatgcaggggatcacattgtcggggcttccattcattataacagagccactatgtgaacattccgtctgaaacctatctaaaatcatttcattgcccccattaccccctataaaatctggaagtccatgaacttgtaactccaaaactacctcttttccaagttgaccaggaaaatcgtttggcaatctaaatttgtcattcaaaaaaaactgggttgtctgtcctgaaaagccccaaatgtgcacagggttatatgtaaaattgaaaatgtcacaagctttatcataaaagtcagccacattttccttttggcttatctttgcta

SEQ ID NO: 103753 - DNA, 707 bp, Glycine max
  unsure (1)..(707): unsure at all n locations
  Clone ID: PAT_MRT3847_64706C.1
aaaaaataccctatgtactnntgtaaactaacttactacactacttcacttacttatactattaatactttttaataatcatattttaatttatagtttttagactttatttaaatcaataatgcatatatattgcatttcttttgtaatttttatttttaatcgatctgtatttttatatttttcttgaatttaaatattcatatgatagtcaaaatatttgcaacgtgattcttgtaaattcattatatttttacgtggccaaattttatcgggccttagtgctataaataatataatttgtgtgaaaatacttgcaatcaaagttagattaaatgattatattttacccaaaaaaagattacatgattatataaaaaaattaaagtagtcacacaaaaaaaaaaaagtcaaattatatgatgtttgaggaaacatgcaggtacgtattgttagactaatattaaaatgtcctaagttgttttttaatattatattaaatatttgattaaaattcaatttgaataaagttatagacaacggaaaaagaaaggtttaccaaattttaatacaattaactcaaattcaaatcgattttaaattaaaataggttcttaccaactcatttacacacgccttcaaacgtaaaatatcctaatctaatcctaattattgttaaaacaacacttgacagatgtggcggcagc

SEQ ID NO: 103754 - DNA, 187 bp, Glycine max
  Clone ID: PAT_MRT3847_64707C.1
caaggaaacaaggcacccggtctaccgaggattgcctcgcaggaacaccatcaagtggttgtgagagatgtgcgcacccaacaggcgcttacggttttgtctcgaaacatacccaacgtcctatatgggcggacgtgcgcacgacgatacggcgctcgggctgatgggatagtcatcaagcctgaac

SEQ ID NO: 103755 - DNA, 134 bp, Glycine max
  Clone ID: PAT_MRT3847_64708C.1
gcttcgctaattgcatcaccgagggggtaaagggcacctttgttgttataaaatctaatgtatttcaacaaaagtagggagaacactgcttaaaaatgaacaatcacatctagcgagatgggtccctatgttac

SEQ ID NO: 103756 - DNA, 148 bp, Glycine max
  Clone ID: PAT_MRT3847_64709C.1
gcgactcgttcgaaaaaacatacaaaatattaaaggaaaactctttcaaattaccacaaatcttcatacgactaaagagcggggtccgttcttgaggatgcaaactgaaactccccacccttctaagaggatcttttttcttaaggag

SEQ ID NO: 103757 - DNA, 444 bp, Glycine max
  Clone ID: PAT_MRT3847_6470C.1
gtaggattcctttgaggaagtttctttaagtgcagcacttaatggtgtccagggcttggactatatggaaagaattcctgttgccacatctgagggaaaaccacatgggctaccacgcaaaaatggagaaaaaggcaaaaggagactcgtttctggggatggagaagagatgacattgataccgggaaccactgatgaagaggcttacaacaagctaataactgaactcgagaaaagtgatcctacatgggttggcatagaatgtcccaaggatgagaaacctgctcgactcaaaattttggacaaaccttaaacgcgctgcttcactattctccctatggagtttaatcttgtggaccctcagaagtttttaaaatttgagaggcccaatatgaagaaaagggacatgcttaattgtcaagtttgaaatcacccattacttca

SEQ ID NO: 103758 - DNA, 1545 bp, Glycine max
  Clone ID: PAT_MRT3847_64710C.1
cccagccttccgtccggttgcaagaagacaacagaagggggatgttgtggtgcaacacaacagtacaatacaatacaatggtccgaaccgggttcgaaacgcagcacgagcagcaacaacagtcaaactcaaaacagtgggaatgcgaagacctataaatagcgaacacttgagccttgtcttccactgttagtttggaattggaactaccgaaagccgaaccttaaacacaaacgccaaatctagcaactattgagttttgttttctttgaaacatcgtgtgcacagtaccccagaagatcgaacaaggatctccacgaagacaaacctctgttctcaactgtgtttctttacctctcacctactttcagaccatacccagattgactaggctgagaagatgcagcagacaccgcctatgattcctatgatgccttcgttcccacctacgaacataaccaccgagcagattcaaaaataccttgatgagaacaagaagctgattctggcaatattggacaatcaaaatcttggaaaacttgcagaatgtgcccagtaccaagctcagcttcaaaagaatttgatgtatttagctgcaattgctgatgcccagcctcaaacaccagccatgcctccacagatggcaccacaccctgccatgcaaccaggattctatatgcaacatcctcaggctgcagcagcagcaatggctcagcagcagcagcaaggaatgttcccccagaaaatgccattgcaatttggcaatccacatcaaatgcaggaacaacagcagcagctacaccagcaagccatccaaggtcaaatgggactgagacctggaggaataaataatggcatgcatccaatgcacaatgagggcggcaacagcggtggtccaccctcggctaccggtccgaacgacgcacgtggtggaagcaagcaagatgcttctgaggctggaacagctggtggagatggccaaggcagctctgcagctgctcataacagtggagatggtgaagaggcaaagtgacatttttttatgtgcttttcatgagatacatatgactgttgatagtaggtttttctttaaaggtaggactagtgtgatctgatgacctttaataggtcgaccaaaggacaaaagggcttctcttgtttgatagattaggtagtttgtgttgttagaattttggcacaaagcaagtttgcatcaactgaaactgctggtgcctcaacatactgtactcgtcactggaaggtctaagcatgtgttatttatgatcacctaaatagcttgctggtttttaacaaaaaaaaaaaaaaaaaaaaacaagtaaaataaaaaaaaaaaaaaggatatttttctttaaattctgctggattctaggcgtcaattgaaacgtgaaatgcagtggatggattctctgtctgaatttagttcaggtctattcttcattaggccctgaacttgcaattcaggaacaagtactttgacctgctgctaaaggatatttgcctttattccgggcaaaaaaaaaaaaa

SEQ ID NO: 103759 - DNA, 383 bp, Glycine max
  Clone ID: PAT_MRT3847_64711C.1
ataaaaaaacggggtgttcttattaaaaaaaattaattgggataaggttgccggtaacgtttcctaaaaaaaatgacacccggttgacagtggtaaaatattcccccctcctattttgaaaaatgatgtctcttgttgttggaaaccccccccctgaaagggccttaaactgtctctttagcttgaaccgcgaattttaaaaaaaacaccccggctctgcgggattgcttggtcaaaaaaaaaaaaagaatggttaaatcagcagggtcgtgggcccttcccattcgagggaagggccccccaccgggggacaggctttcctcccccccaagtggcccccccctttgaagggctatgaacgggtttgctatttttttaatccc

SEQ ID NO: 103760 - DNA, 1521 bp, Glycine max
  Clone ID: PAT_MRT3847_64712C.1
ccgggctcaaaacgcagcagcagcagcagcagcagcaacagcagtcaaactcaaacagggggcaatgcgaagacctataaatagcgaacacttgagccttgtcgattgttagtttggatttggaactaccaaaagccgaacgtcgcacaaaaaccccaaacctagcaaccattgagttttgtttgctttgaaacatcgtgtgcacagtaccccagaagatcgaacaaggatctccacaaagacaaaccccagttctcaactgtgttttacctctctctcacctactttcagaccatacccagggtttttgctttttctttttaaattagtttcagtgacattaacgaggctgagaagatgcagcagacaccgccaatgattcctatgatgccttctttcccacctacgaacataaccaccgagcagattcaaaaataccttgatgagaacaagaagctgattctggcaatattggacaatcaaaatcttggaaaacttgcagaatgtgcccagtaccaagctcagcttcaaaagaatttgatgtatttagctgcaattgctgatgcccagcctcaaaccccggccatgcctccgcagatggcaccgcaccctgccatgcaaccaggattctatatgcaacatcctcaggctgctgcagcagcaatggctcagcagcagcaggggaatgttcccccagaaaatgccattgcaatttggcaatccacatcaaatgcaggaacaacaacagcagctacaccagcaggccatccaaggtcaaatgggacttagacctggagatataaataatggcatgcatccaatgcacagtgaggctgctcttggaggtggaaacaccggtggtccaccttcggctactggtccaaacgatgcacgtggtggaagcaagcaagatgcctctgaggctggaacagctggtggagacggccaaggcagctccgcggctgctcataacagtggagatggtgaagaggcaaagtgacatgtttttatgtgcttttcatgagatacatatgactgttgatagtaggttttcttaaaagggtaggactagtgtgatctgatgacctttgataggtcgaccaaaggacaaaagggcttctcttgtttgatagcttaggtagttgtgttgttagaattttggcacgaagcaagtttgcatcaactgaaacggctggtgccacaacatactgtacttgtcactggaaggtgtaagcatgtggtatttgtgatcacctaaattgcttctggtttttaacaatttttctttgcagtttgttgtggtcatataaacaaaaatgtttgcttttggtgcaattctactggattctaggcgtcaattgaaacatgaaatgccgtggatggattcacggtctgaatttagtttagggtctaatcttcattaggcccggaacttgcaattcaggaacaagtactttgagatgcttctaaaggatatttgcctttattacagttattattttgagattggagtttccttca

SEQ ID NO: 103761 - DNA, 249 bp, Glycine max
  Clone ID: PAT_MRT3847_64713C.1
taccggtccggaattccggggtcgaccaagccgtccgtacggtggcaaaagcaccacaaagggtttctctagaggatggtagcacgtgggcgcggctaaagcttgaggattagttggtcaaccgggggaagcagttgatctatactctgacagaggatgctgcaactagtaccggagctccttgctggtctggaccaaacagattccctcgtccactacaattctaagactcagatctggagcatctaa

SEQ ID NO: 103762 - DNA, 290 bp, Glycine max
  Clone ID: PAT_MRT3847_64714C.1
atgggcgggttgggtaagaccacccttgcccaacatgtatttaatgacccaaagatggaggatcaatttagtatccaagcttgggtatgtgtttcagatgaacctgatgtcttcaaggtaacaagaacaattcttgaggcaatcactaaatcaactgatgatagtagagacctagaaatggttcagggaaggttgaaagataaattggcaggaaagagatttcttcttgttttagacgacatttggaatgaaaatcgagagaactgggaagccgtgcaaactccgcttaa

SEQ ID NO: 103763 - DNA, 484 bp, Glycine max
  unsure (1)..(484): unsure at all n locations
  Clone ID: PAT_MRT3847_64715C.1
gaaggtttcccgtcatcactgtatgacgtcctccttctttgggggggggggggggggctcggcaccaagctgcgggaaaattagcagcagcagaagaagaagacgaacgtgaatgagataaaaaaccacaggtggcgtggtggcgtggtggtgtggtacttagcttagagggataaccatgcctggtgtatggaatacgtgttcacatttatttaacagttccacgtcaacttcacgtcgtncacgaaggtgttgcggcagtggtgtaaatagtggactttggaggttttgtttgccatgttatttgtggtagaattccggttgttgtaaaatgtgtagtttaaatagtaaaatatggtattttacattgaatttcggctggaaggcgtcggcggccaacctggaaaaaatttccgtccacgattcagttttgccgtcatttcattcatatcgggtgaggagcacgtagtcagggtaggggttt

SEQ ID NO: 103764 - DNA, 392 bp, Glycine max
  Clone ID: PAT_MRT3847_64716C.1
ccaaatatctttcaaaacctcaaaacttaaatcaaaccaaaatcattagtaaatcttgtctggtgtttgtgtttgtgtcagagtttgcgcgtcataggtattgacaaaaagtgttagtgtaatgtgtttggtgtttgtgtgcgacgaggaagaaagggtgttggggagacagacagcaccgggggcatgcccttattgtggagggatggttcaggccattgatgtagagagccaatggagattctgttttctacccttatgctttaagaccaaacgcatatactattgtaccatgtgcacaagaagactagaggtgatctaacaagtgattcatctacaaatataatcactatggagtaaccccattttatttttcctttgctaattttgtt

SEQ ID NO: 103765 - DNA, 1282 bp, Glycine max
  Clone ID: PAT_MRT3847_64717C.1
gataaatttatagaaaagagaagagtaggtattagtattttggtggttccatggatctctgagacggtgatgagaggagagaaggagggcgtcgtggcttgggatatttggaagcgcttattcccggcacgaagaagcaggtcgggttggctcccaaacataagaatgggaaacaacataaacctgtttaagctctgctctggcctcagagtccttggctacttgatgatcctcttgttcggtgctattgttgccctaacttactacgccgtcgttttcatcacatggggccctctcctcttcttcagctcccctctccgcatcccctccttcttcatcctcctcctcttccacaccctcctcctcctcttaacttggtcctacctcatggtccttctcaacgatcccggccccgttcctctcaattggatccatcttggctccgattcggatccaacatcctccccctcttattgttctcgttgccagaatgggaagcctcctcgttgccaccactgctctatttgccaaaggtgcgttctcaagatggaccatcattgcatctgggtcgtcaattgtgttggggcacgtaactacaagtactttctcctcttcttgctctatacattcctcgagactgtcctggattgcctagctctggttcctagttttatcaggttctttgctggatccaacaatcattctttgtctcctgggggctttgcagtcatctttttggcttctattcttaatttagccttcgccctcagtcttctttgtttcgttgtcatgcatgcatctcttctgttaagcaacacaacttcagttgaggttcatgaaaagaaaaaaggagttaggtggatgtacgacctgggctggaagaggaattttgagcaggtttttggcactaagaaggccctatggttgtttccattgttttcaaaagaggatttagacaacatacctgcactaaggggcattgagttccctacacgttcggatgttgatgtatgaaagctgggtagcttataggtttgaacatttttttcattaaatgatgtcatttatgcttacttcatgacagtgcagcgtagggcatgaaagtaatactctacttgattgctgatgttttaaattatagaattgtccagtagatgtatatatgtaatgttcgattcagattgttttgattattcttataatctaagaacctgtgatcttaaggggactaaatgtagatttgctttcgaagaacaaaattcattccaagtgtttgacccgt

SEQ ID NO: 103766 - DNA, 203 bp, Glycine max
  unsure (1)..(203): unsure at all n locations
  Clone ID: PAT_MRT3847_64718C.1
caaanaagaaagacaagggcgccaggaanaggaaacaanaaccgggacagcanaaagccggccaaagaaancacacaaaagggacaagggaaaacccgaccggccagncgcccacggaanaaaaacacacaggaggggcgaggggnnggcanacacgcaggagcccgcgccngggcacgagggaagancccaaagcaaggggg

SEQ ID NO: 103767 - DNA, 109 bp, Glycine max
  Clone ID: PAT_MRT3847_64719C.1
aggaagctcggaccactatgttcacgagactgtcatcagggctactgatgacttacaaataataacaggggagttctggcgaacctttgcaaacacaacacctctcact

SEQ ID NO: 103768 - DNA, 533 bp, Glycine max
  unsure (1)..(533): unsure at all n locations
  Clone ID: PAT_MRT3847_6471C.1
ttccgttccaaggaaggtttcccgtcatcactgtatgacgtcctccttcgtttggggggggggggggggagtataaattgagggtgggtatgataaaccccccacaaacggatacggcaaaagagcgccccaaaataagaaaaggaaaaaggggatccgaaggaaagcatccnagcagaccgtaaaccaagcgcgttaaacggtgagttttgaataaaccaccagagagttcagtgcgtggtgaattgatacaagcatggcctggaatgcgagcaagaatgaggagcatcccgtgagtaatgctactaaagggtgtgataaaagagataaataggtggggatagaacataatagaagacgagaattggatacaggaacgtgtgcgtggaatgtggcttgggacgaggttcccacaccaccgcagcggccaccttgcgggcatatagggacaaggcgaccgacttgctcgtggatataacttgcatagctgacaattggtattgctagacgaacaggagcgcgtagaggagtgg

SEQ ID NO: 103769 - DNA, 776 bp, Glycine max
  unsure (1)..(776): unsure at all n locations
  Clone ID: PAT_MRT3847_64720C.1
atcggagnntgcgnnntnnttctactgnntgttaaaatgttttacacttaacaatacataaaatttaatcttgaattataaacactagtcatttaactttacattgattcctcgttgaatatacttcaagttgagggcatgtccaaggcattcagcgaggagtccaagcaagttgagagcataagaatcaaagtcagcaatgccttagcctgacccaaaataaagaaagaaaagtatacctcagctattcattgggttgtattatacacatcatcatagctttcctcagtttttggtcttccttccaagtagctagtgaagtaacaaaattcttcgacaactgctgaacatcttcatttgataccctttctgaaatcttcctcctcacctttccagttaatcaatttttgtgtaaattccttaagttactattcaaactcaccttaatcctccccctctcccatccaatctttgaatttctcctttggcattcaaatatcttcctcaagttaattactggaagaaatgagagtcaaatgagaaattgagtgaaaaataaggaattttactgatgctgtcaagtcttagtagatgagatcgatgaacacccctcattaaacattaattcaatccctcgaatccacactgcttgtaagttagngattgctttcttggacttatcactattacacaattcactgagncctgtaaaattgagtttcattatcattgatctaatgctgaaacnnnnnnnnnnatgagaaaannnnnnnact

SEQ ID NO: 103770 - DNA, 243 bp, Glycine max
  Clone ID: PAT_MRT3847_64721C.1
ctcgagccgtcctacagggggataaaatcgaactttcggcagacaaattcattttacgttccccactccactatattcccatccccacacacctctcattgtactcttactgctttcaaaagttgtgacaaatccatgaccgtccatgcctcatctactgctacaccaccaaaaccctcacctactccgacgacaatctctacgatcgccgcatgtgcaccggcctgcacaaaatcatcatct

SEQ ID NO: 103771 - DNA, 402 bp, Glycine max
  Clone ID: PAT_MRT3847_64722C.1
ccacgcgtccgcaacaaacacaagtaggccacatcaaaatgaaaatggttcatggtgcattgtttttgctggctgcagtggccacgttccacgtgtcatcggaggcggaagctccgcccctggcaccggagctctccgcggaggctagagagttcttggaggcgcacaaccaagcgagggcggcggtgggggtggaaccgctgcggtggagcgagcagctggcgaacgtgacgagcaagctggcgcgggaccagcgggacaaactggggtgcgagttcgcgaacctgagcaccggcaagtacggcgcgaaccagctcttggcatggggcacgggggggacgccccgcatgggggttgaagaatgggtgaaaccaaaaacagtttttcaaccacgccggcaac

SEQ ID NO: 103772 - DNA, 586 bp, Glycine max
  Clone ID: PAT_MRT3847_64723C.1
tttatttattttatttatttattttatttattttattttatttttttttatttttttttttttttttttttttttgggccctccccgcccccattggggggaacagggaaacaaaaaaaaaggggtactaaaagggggggggaaagggaaaagctaaaactgggaaaatttaaaggggaaaaaccagggccgggggccatttccaaaaacgctaaaaaaaattaaacgggccattttattttaaggtggaaaccaggctttaaggttttgggaaaaaaccatttccgggccagtttttgggggaagggaaccctttttttaggggtttcctttttggaaagggttcctttgggctttttaccaagggagggggggggggaaaggccccaaaaaaaaccccccggaaaacttctagggaggggaaaaggggctttttaaaaaaggctggaagccaaaaacatagttttttcacaaaaccaaagccaggcataaaaaccccagggcacacctgaaacaggggtggccccgagaaggataaactcaggaggatcaccaccgggctcaacgccaccaaggggagaaaggg

SEQ ID NO: 103773 - DNA, 147 bp, Glycine max
  Clone ID: PAT_MRT3847_64724C.1
gagagatggaaacggaggaaaacggcggataccacggagatgacgatgccgtgccggtagtatgacttcgccggacagtgaaatcaccgcttcaggatccttaggatatgcgacccccccgtggatcaacaataacctatgttttac

SEQ ID NO: 103774 - DNA, 403 bp, Glycine max
  Clone ID: PAT_MRT3847_64725C.1
tcgtattttactgaaatgataactgtgcccctccgtttctgtctctgaatctcttgctcttcctcgccagtcgcgacgcctccgacaacattgcgatgcaactcgcaaatgttgtgccctttcaaggcacctttctcaatagaagaatgaggtattgtagttttgtaccttcgaaaatgtgttaccggctcaagcataagttagcagagaagaaggttgcgcgaggtgtgggaagcggttccaagttgcggaataaggtagctgctcttatggattataaccttcctgacctaattgggaatggaagccgtgaaaagaaatctaaaatgagtccaaaagatgcattagatgatctggacatcttcttgatatgtaagagatttccgtcaattactttgggtta

SEQ ID NO: 103775 - DNA, 242 bp, Glycine max
  Clone ID: PAT_MRT3847_64726C.1
ggaattggctatagaagcagtgagtcagggtggtacttcagacaacaacatcaatgaatttataaataatctgaaaagatcctaaactaaatatcccttttggtgtcaattaatattgattccataaattgtattagaattttattttcctcttgtctgtttagtagctattatatctttatgtcattctatgttaaatacttaaattattgtaaaaaaaaaaaaaaaaaaaggggggccgc

SEQ ID NO: 103776 - DNA, 902 bp, Glycine max
  Clone ID: PAT_MRT3847_64727C.1
ttttttttagtccacaaatgcccagaaattaattgagaattctttcagggccaaattcggcttagacataatttcgcatgttattcgacatagtttgggtggatgaggtattgtaaatgtaaataaagtccactcgatgaaagcaacattaaaataaaatctatgaaatgctcgagaaaagaagcaaaaaagagaagaagagaagagagcaaaaaagatgtggtcttgcccaaaacacgcgacgccgtttaacaaggctcttgtagttattccctccgtctcagccaccacatggcgacagcgccacggcgtctccgccaacgctaagcaacaaggtgagaaattgggttacacccttttggccactctcgaatccaattcgactccaattccgaaagcagcgcaagaagaaggcgagattagtgggtctgatgtactttgggcactgcagagagcaagtgctcgtaagaacaagaagaagaataagaaggagcatcggagagattcatcctctgtggtcactcccaccgaagaaactgctgtgaactacaccaatgttcgcccactccgcataaacgcaaattggggttctaaattggatgagttcgacaaacgccttcgtgagctttcaaataccatttgattaatcaccccttgttattttacacatctacacatttttattttattttattttcctttgataataatttaatatacaagttttttactttgtatcccttgattgttaaattgggaatgcgcactttgcttgaaacttcggtttcaatattatactaaatggatggagttgctatgcattagcaacttgcaagtttttttttttcaaggtttgaagcatatgatcatcatggtggcatgaacaaaagaacaaaaactcg

SEQ ID NO: 103777 - DNA, 457 bp, Glycine max
  Clone ID: PAT_MRT3847_64728C.1
ggctccgactcccgccggcaaagcccctgcaccgatccccgtcacccctctctgcccccttgatgcttacactagccccaacgacgctcccccaggactcttcccctggattctccaccaataatctgacaggattgagaagagggtactaaagtgcgtccctaatgtcctgcctgtccctcatatcattctcagtgatcagactgaatgacttgagtgtcagactagacaatcctgtgcgacaaagctctgcccgccagtgcagtccgccacttgatctgtgatcatgatcgacgattctcaaatactgggcacgctatatgtcaattcatgttatcatccactgtgaacctccactctgatgctacacacggtagtgcatctagtaatggcacctaagaaccacccgaaagcatctctctacaaagatggtctgcttcgactgggcgtgtcaact

SEQ ID NO: 103778 - DNA, 451 bp, Glycine max
  Clone ID: PAT_MRT3847_64729C.1
gtcaaaccctctcctcgccgtcatcgtcgcatcattggccaccatcagtttctccggctacggggtatgctgttagctttccttcacttacctgctcgtacttctgttctttttcatgaactgtgtactctattctagtgactgcaccacccaattataaatcacatggtttatgttttatggacctaattcaattttgtcaaattgttttggttcaaaactcgggaaacaacaaataatcaaacgtgtctgcgtaatttcttcgcatttttaaccattgaatttaatcattacctgactttgttttttgctaaaacctcgctgaaatccattgtaaacctactctttagcgtgttatacaaaattctcacctttaatcatatcaaaccattgttctttaataacatcaactctagatgacgatgatctaccactattataatcgctataa

SEQ ID NO: 103779 - DNA, 226 bp, Glycine max
  Clone ID: PAT_MRT3847_6472C.1
tgatagctaagattggtaaaaagatgcccattatcacaccggctggctattttgaggagctgggagaaaatgctattgccggcgcacaggctattgactctgtaaatgatgcgctcgaaaacgggtcgccattgacgaatggcttaaaaagaatgcacgtataccatgtacccgcaggctattatgaacaactgcctggccaggtattaaaaacaattagagcaca

SEQ ID NO: 103780 - DNA, 396 bp, Glycine max
  Clone ID: PAT_MRT3847_64730C.1
accttgctatgagaaaagaataagattttaattgggtgagaatgatatatatattataaattttatttacattgaaaaattctaaacatttttatattgatgaagacaaaaattatattttaactttttttttatcatactattgtactagctgacaatttcttttagttttttaaacagtgttcttaaagttagttgaccatgtaaaaactgtccggccatattcaatccaatttttaacataagtctgactacgtctaaggctttaattaacatattgagtctagcatataaaatctctttcccttgtcttctgtacaaagtgctttgtgttgttagtggccgggttcagtttccatggattcgatgcatgttattatgtcttcttctaatgct

SEQ ID NO: 103781 - DNA, 1287 bp, Glycine max
  Clone ID: PAT_MRT3847_64731C.1
cttgtgttgtgctggtgcattcttctacttcaattctcagccatgtcggtggttccttgcaattgcaaccacaccacagagaaagataaccttagtggtgaaagtgagagctttcacaagttttttgagtgctggatttctgagcaaaaacaacatctgaaggaccttttagctgctgaatcaacccagctaattagtgatgaggagcttcaggcactgaatgataaggtggttgagcattatgagtactactacaaggccaagtcaaggtgtgcaaagcaagatgtattggccatgctgtccccaacatggatgagttccttggaagaggcttttctttggattggtggatggagaccaagtatggcatttcacttgatatattcaaagtccggcttgcaattcgaggcccggctcgatgaagtcctccagggtctaagaacacatgatttgggggacctatcagcatcacaacttgctcagcttgatgagatgcaaaggaggactatcttggaggagagggagatcactgatttgatggcaaggcaccaggagacagtggctgatgcctcaatggtggagttgtctcatgtggtttctgagatgattagagccaatcaaagaggagaggttgatcagagtaaggaaatagagaacaaggttgaatcaactcttgtgcttaaggaggaaggtttggagaagattctgctgaaagctgatgagctaaggtttataacactcaaggatgttgttgatgttctgactccaaaacaggccattcatttcttgattgctgctgcagagctgcacctgaggctgcatgagtggggcaagaagatggatgcaagaaaatgcaatcaaggttttggtgaaggtaaaagccacaattcatcaagttgaagatagcagcacttggattggaatcaaatcaatcagaacaagttgaagaaaaaaaagagaacatgaacatggtattttttttttggggggggatcaaatcaaatcaaaccatactatgtattcacagcttttagaaaaaagaaaaaaaatgattagtttgaaaagcctagtccatatgaaacaaaccaggtctcgatgtgtaatttcatattggaccatcaaaagcctgcttagttggattggatcattcccatgtttgacaatgccaatctttatctttcaatccacccagaagggaatttaaatttgtaagcaaatatccagttacattgtccagttacattgatcaattgcaataaggaaagcgatgttataatttttcataaa

SEQ ID NO: 103782 - DNA, 1516 bp, Glycine max
  Clone ID: PAT_MRT3847_64732C.1
aaaacgaaaaaagtatttttaaaaatacggagttacgtacaactgtctgtccaaaaattaagagaattaattgtaattatttaacattttgttatatatattttataataatttacaatttaactttttaatcaatgataataactccgcaatttttttcatacaatatgcacatccttgtggcgatacgcagtagtgactagatatcactagcttgtaaaacgccactattttatttgcatgcaagttccagtgcggagttcatggagattaagcaagacagcttgtggatgtgtgatagatatcaacaacttgagttgctggcacacaaactgcatctttcaaagtgctatgggttgctgccaccatttttttctgacataaacaagtgcagccaagttcctgttaagagcacaatagttactggccttgttgcttcactcttagcattttctatggaagtctctgaactggctgggatggtcagtgtgggtacacttcttgcattcaccatggtggcaatatctgtgctaatactaagatatatcccaccagatgaggttctattgctcccttccctccaagaactaattgtttcagcgtcaacacaatatagttggtgcagcttggaagcaaatgaagaagatgcaaagacacatgttggtgcttctgggagcaagaagcctacagtttttaaagaggatgtaccaattgattgtcctcttattgctaaagatcctgtcataggcaaatatgtacatgagggtaacaggagaaaagtaattgggtgggtaatagcattcacatgcttgggggtgtttgtcctcacatttgcagcttcaaataaaactatgatcagttctgttcgttttgcattatgtggagttggtggctgtcttcttctgtctggttttgtcttcctaacctgtatggatcaagatgatgcaaggcacaactttgggcactctggaggttttacttgcccatttgtgcctctgcttcccgtagcttgcattcttatcaattcctatttacttgttaatcttggggctgctacttgggcacgtgtttctatatggctggctataggagttattgtttatgtattttatggccgaacccatagcactctgaaagatgcagtttgtgtgccagcaactcaagttgttgatatctatcacacatccacaagctgtcttgcttaatctccatgaactccgcactggaacttgcatgcaaataaaatagtggcgttttacaagctagtgatatctagtcactactgcgtatcgccacaaggatgtgcatattgtatgaaaaaaattgcggagttattatcattgattaaaaagttaaattgtaaattattataaaatatatataacaaaatgttaaataattacaattaattctcttaatttttggacagacagttgtacgtaactccgtatttttaaaaatacttttttcgttttaaaaatgtaaagttcatctaaaaatgcacctgctatgttgg

SEQ ID NO: 103783 - DNA, 548 bp, Glycine max
  Clone ID: PAT_MRT3847_64733C.1
cttttcgtgaattcttgctgaatgcagcagtaccaacaaattccagaatacgtcaagtggcagatcgttttgacgaaaatgatacctggcacagacatattcatggcaacactactacaagtgattcagcttccctgttaaccaactacaaggatgttctctccttcctgtcctttgatgctcgagaaggaagtaaacctggccaagatataagtaactttctaaacctgtgcatctcgagcaattgtcttctactactgcgggtgcttgatctagaaggtgtttacaaggccaaattgcctaaaaacattggaagacttactcgattgaggtatcttggcctaagatggacttatgtagagtcacttccatcatctataagcagcttgctgaaactccagactcttgatctgaaatacacttacatacatactctaaccagctccatctggaagatggaactgagacacttgttcttgagtgaaacttatcgcaccaaatttccacccaagccaaaaggtatacgcataggtagttctctatctgac

SEQ ID NO: 103784 - DNA, 314 bp, Glycine max
  Clone ID: PAT_MRT3847_64734C.1
aaaagggaaaaagagaaagcttcgtcacccgcctgaggaaaaaagaaacagaaaaagaaattaaacataaacaccattttttattttcataaatatggaatagaaaaacgaaagtcttgaaaaagaagaaaaaaaaaacaattcttttcccttagggtttgactgtgaattgctacatcgcgtgtggcccaaacagtggaatcaccgattccgtcaagttcggtcctctgcagggaaagatctgtccccaattgcccgaaagtttcggattctagagagagaaagtgggtgtcagtagacgcagctagagagag

SEQ ID NO: 103785 - DNA, 497 bp, Glycine max
  unsure (1)..(497): unsure at all n locations
  Clone ID: PAT_MRT3847_64735C.1
ccacgcgtccgagagagcctgctgaagcccattttgtcccccgacgaagtgtcagtttgtgtgcatggaacttacagaaaaaaccttgactcgattttgcaatttgggctaaagcgtatggcaaggttacacgtacatttctcaagtggcttaccatcagatggagaagtaaccagtggtgtacggcagaatgtaaacatcttgatacatctggacgttagtaaagcacttaaaggtgggatgaagctttatatttcagacaacaaagtgatcttgacagaaggttttgatggcgtcgtccctgtgaaatacttcgaaagagtcgaaacatggccaggacgagctccaataccgttccaaagataacagcccatgtttcagcattgctagttcgtacgtactgaaaaatgatttgccgtgctgtatcctcgagaaccattgngtaaatttgattgtgctgggacctctcagtgattcgattgatgattttccggact

SEQ ID NO: 103786 - DNA, 543 bp, Glycine max
  unsure (1)..(543): unsure at all n locations
  Clone ID: PAT_MRT3847_64736C.1
gttcaaaatgtgggatgggaatatggtctggtaaaaccacgtggagctattcgtccagatggctgggcttacagatttcccaagactaataccactatcttatattattggtcggctagcttatgtgatctgcagccttttaacatcacagacaaacagaccaatgtttccatgcatttagatcgccccccggctttcatgagacggttcctccatcgctttgatgttttggttcttaatacaggacaccactggaaccgggggaagcttaatgcgaacaggtgggtaatgcatgttaatggaaagccaaatgaagacaaaaagattgcagaaattgcaaatgccaaaaatttgacaatctacagtgtagccagatggcttgatttgcaacttgtgtcacatcctcggctcaaagctttcttcaggactatatcacctagacatttcttcatggggattggaacactggtggaagctgtgataacactatcccattaaccaatgggagtgagataatgcangaaggatctagtgatccaacta

SEQ ID NO: 103787 - DNA, 337 bp, Glycine max
  unsure (1)..(337): unsure at all n locations
  Clone ID: PAT_MRT3847_64737C.1
cctgncttcagatgacaaaagacgacagatcgaacatttacacatgccaattttggtaaggcaatggaactactatgaccagattcttctatacacatatcacatatctctccagtttgttgcattctaaattacttcactttacattaccatccttcactaccaatgacctgtatgatttataagatgcaacataagggaccacccctatgttgcgccatgagataataacataatctatcatcattataatcccattatatttatctacatatgctctgaggacactttattaactccacatattattttattgatcaacctctctttttttttt

SEQ ID NO: 103788 - DNA, 150 bp, Glycine max
  unsure (1)..(150): unsure at all n locations
  Clone ID: PAT_MRT3847_64738C.1
cagaggaaaggaagggcagcanacagaccaacaagagcgcacccgaggcccgccaagacagnaaagaganaaccaaacgagacggcagcccagaaaagcacacccagcggaccccagnagagagaaaggggcaaccaacggcccacagac

SEQ ID NO: 103789 - DNA, 338 bp, Glycine max
  Clone ID: PAT_MRT3847_64739C.1
gcaggacgcctgctgctaccgctccgcggaaggaaccgggtgcgacccacgcggccgtcctcgcgtttcgcttctaaatttgattccttaggtcagcattctattattatatatggcttcttcaccttcctcagaaaacaaaaacactacaggtgagttgcctggtggtgccggagagaaaacctttatctttggtgtgaacgttctgcagaaatatacttattttcattgacttgaataaagacggggtttctcttcccctgggagactttcaaagggttgcgcattaaatccgactctggattttgttgccaggtggaggtgctattttcatcaat

SEQ ID NO: 103790 - DNA, 1312 bp, Glycine max
  Clone ID: PAT_MRT3847_6473C.1
gctttttcatatgccaagtcagtacaagagggatatcttccactcgctccatattttgaaatgaccaagatgttaactttcttggggaattgaggcctatgtgagcaaagcagtctatagcttcagatggcgtagggggaagtcagacaacacaccatcaacagagaagtttccattgtcaatgaaattgaggtactcagcaacagggtcataactgtaattatagcttattggaatatcgttcagaatatctgaagcaaagacttcaagtcccactttgtgtgcatcagagaccaaagatgtatgtggtagtagataaagacctgttggatctacaggccatatgtatcctttgggaacaagtattcctgaagcaaatgtcttgatagatgctaggttttttaacagtgaaccataagtccggttggttgatggatctacttcatctttttccagaaacctgaagaccagttttgttattcttgggttgatgtgtgcttttatacttctcaggaaatcagcttcaggtgatgagatataactgacatttactgttctagaaacagaaagtacaaagtttttcatactcaaattgtgttgagcgtagaatgcatcatacctgaatattcaaccacggtccagatgcgggtgttattgtgatcatttcattcacagtaagaatttcaaaattgtcatcaaaatttggatttcgagcgaaatctccctgaatcaataagacattggaacgcagctctgttaaggtgtagtcaacagcaaaataggcactggtttgtacaccattaactgagtatgtcttacttctattttcaaaaattttatcaatgtcagtagcattttcaagcttgatgtttgagatgcagatcccctccccatctttcgttaattgcacatcacaccacacaatgagattttttaaactaatttgtgctgccaattcgtaggcatattcactggaatcaggaaatatccctgacgacccaccacgtgctatgaccaatggtggacttccactgagagtgttccaagtggttctgtgagatcctcgtgcagagaccaaagcgagcagcgaatgaagaagaagaagaagaagagagaacgcattgggaaaagcgcgtggcttcagcattccggcgaagtttcagtttccggaaaaaagcagagagtgttggcccccttctgtcgtcttctcgcagccgtacccttctgtcgtcttctcgcagccgtacccttctgtcgtcttctcgcagccgtacccttctgtcgtcttctcgcagccgtacggacgcgtggg

SEQ ID NO: 103791 - DNA, 130 bp, Glycine max
  Clone ID: PAT_MRT3847_64740C.1
cgagaagcacaacacagtttggctcaactgaaatctgtgcagatgaaatatcgactgaaactcggacctagatggttgcatgcgaccctacgttagtagagagtaaaaaagaagatcactatacatgctc

SEQ ID NO: 103792 - DNA, 488 bp, Glycine max
  Clone ID: PAT_MRT3847_64741C.1
gggggccaaaaggcccaattttttcgggaaagggaaccccccccttctaaaaaaaataaaattccccccatcggcccctttccaaacgggtcccaaaaaacaatttgttaaaaaaaaaaaggtttttttgtttcccaggggaaaaaaaaaaccccaagttctcccccccctttaaaaaccatagttaaaaaacccccccccagttccctggcccccaaaaggggggcccccccagggggggcaaaccccccaaacggggggtttgggggggcccccaattccaaacccccaatcataaaaggccaagccccccaacctccccccaaaaaagccccccggccccccctttcccccaaaagattcccttcttttcaaaaaaaaattcccccggggccccggattaaaaacagggggggcccaattttttgcccccgggggcccacaaatttcaagaaacccttgaaagacccgaactggggccccatttt

SEQ ID NO: 103793 - DNA, 3348 bp, Glycine max
  Clone ID: PAT_MRT3847_64742C.1
atcggctctctcgcgtcccaaaagcttcgccgtttcggttcgcgctttagggtttcgcgaaatgtcgtacgaatccgctacttcttcttcttcgctgttcgctctctccaattccaattcccctccgcgctcttcactaaccatgcattgatattcgtcttcctcttctcctcttcggtggtggcagttctggtatggaagtgtatgatgtttctgaaactagaaaccatgatgcagacatgattgaaggtgctgatttaaattcacacttcacgagcccaaatattgaacgaactgaggtcatgattaacgaaggagcccctgagttttttgttgaccagaacttgtattaccctgctgccaccaattatgggtattactgctcaggatttggaacacccggggaacaggaggaccagcataggatttttggtgtagatggtcccaatattcagttcacgggtgcacaaaatgaaagttttccgtatgtatattatagctatggatatgcacagtctccatacaatccatacaatccttacattcctggtgctatgattggagctgatggctcatttggaggaggacaacaatattataccctccccaattatcaaaaccctatttcttcacctgcttatattcctcttgttcaacctgacaatttccctaatagttctgttgactcattttttgataccagtgcttctgtcagcaaacctgatggaaaaggtttaaaacctaagttcaattcagcttctggttcctttactaggaactcttcaaaatcattatcaaatcccacaagttccttggccaggacatcagaaggtccgagagataatgatggggtgaagaaagatttgacaagtggcaggggttttcttaatatggcttcctcacctgtccatcaggccagaagcattgatgcctcgacccatgctgtagatatttccaatggaaatgttttgtcccatagtaatcaattaaaaatagcttcccctctgagtagtggattttctgattatggatctaatgctaatggacagtctgtggttgctaaacttcgaccaaaggttcatgtaggtaaaggactgagtgaagtaaatggaagttctgatgttttaggtgagcaaaatcggggcccgagaattagtaattataagtcaaaatttccactggctgtcaaagcctatgcaaataaaggagatgacaatacacaagagaatatcatcatttctactgatcaatataacagggaggatttccctgtcaattatgaaaatgcaaagttttttgttataaaatcccgcgtccagtgaagatgatgtgcacaaaagcattaaatataatgtgtggtcatcaacacctcatggaaacaagaagctgcagagtgctcatgaagatgctaagagaatagcttctggaaattttggaagctgccctatctttcttttcttttctgttaatgcaagtgggcaattttgtggggttgcagagatgattggtacagttgactttaataagaatatggacttttggcagcaagataaatggagtggaagctttcctgtgaagtggcacattataaaagatgtaccaaatccaaattttaggcacattatactggagaacaatgaaaataagccagtaactaatagcagagacgcacaagagataatgtatttgaaaggtttggaaatgctgaaaatattcaaaagtaatacactgaagacatctttgcttgatgactttatttactatgaaaaccgtcgaaagatcatgcaggatgacacagcctagttgctagtcatgagtattaatagtccaatattagtaccaatattagaagctccccaaaagttgaatttttttattgatgtacaaaaatacaataatgagaagaatttgaagcccaaggatgattctgatggcttgaaacatatttcattttcaagtcctgagcagattgttggtaattctgatgtcactggcatcaagcatgcgcatgatgaaaaagatgagaaaattgctgttgataaagaacatatttcttctatcttaaagattggttcagtcactattgcccccaaacaagttgaggctaagcaatccgtcagcaatggtaataaagaaccagttgatgttcttacagtaggctcaatgcaggtcaaagttaatgggtttccttcgtcttctggtttcttgaaggttggcagtaccccatttgatgcaagagcattgcaaccgggaaaaggagatgctgccgttaaaagtggatcacaacgttaaattttgctttgctttgcatttgaggcacatctgattttagtcttcttttggtagatggattaattgtttgcccaattgtattaaactgttgggaagttgagcttctttttgatctttttgttttcatttactaatgatgctttggtacaaggctgttatatcgtgggtgtttgagcagtgttgacatctaaagcttctattggatagtttaacccttatttttttttgttgcttttcgcctgttgttggtcaacatgaaaggggtgagtctgttcatccaatttatgtcgagaaatttgttttaacttcttgccacattcgttgagtgagtcattgttatattaacaagatcgcatttctattcagttgaattgtgtctattacatccctccagttggtggtgagaaaaatgcaaagatggatgacgaggttgatagcctaaaacagatttcaagtgctggacatattgttagtagttctgagatcaccagcactacatctgtggatgaaaaggctgagaaaggttcagttgataaagaagatattgcttctgtccttaagattggttcagttactattaccccaaaacaggtggagactaaaccatctggcattagtgttgctaataaggaaccgcttgatgttatcacagtaggctcaatgcaaatcagagttaatggatttgccgagtcatccggttttttgaagattgggactattccccttgatccaagaacactacagctggacggaggttctcgtgttaaaaatggatcttaaaatttgcatataaatgtcaaggcacgttttggatctttaggaaaagatggatttaatgcctgcctgattgtgccactgttgggaagttgggtttctattcaatcttcttttactgcttttttgtttgctactgattgatacaaagggtcatactgatgtcatggatattttgagcggtgttgattcaaaatacttttaatgaaagtgtaaccctccttttgtatttcggtcgtcagcaataaatatacaaaggttgtttttttgttgcagattttc

SEQ ID NO: 103794 - DNA, 324 bp, Glycine max
  Clone ID: PAT_MRT3847_64743C.1
ggaattcggctcgaggtgaagtgatcattgtccgttggatggatcataaaagcttgcttcttacttttaccctcccttttgttaccagcacttgtagctatgatattgatagcctttgtgtataaccctttctcttgtaaaagtggattttatgtccctgctaggtgcacttagcaataaaaagatacatttgccaggtttgcattggagcggttgtctgaaattgttgaacattttcttacaaccaaattctgatctcagtagggagagattcttggtaagtatggtgtatattgagtttgcacactgagccatttggatcat

SEQ ID NO: 103795 - DNA, 217 bp, Glycine max
  Clone ID: PAT_MRT3847_64744C.1
tttttcatgtgacaaaaaatctgttttattgccaagttctgttgaatgagttacaaaataactaacaaatttaaagttaggctaagtaggaacattaattccacaattcaaatgaaaccaagtttcattgaatatgctcaccctttctatgctttgacgtcataaattatacactcaaatgctttgcaaatccgaaatctttgggcttcattacttt

SEQ ID NO: 103796 - DNA, 404 bp, Glycine max
  Clone ID: PAT_MRT3847_64745C.1
gtgttttattattcacataccactctccttatcttggactatcagatcatttgcactctgttgtttctctatcgcccatgggtgtttttgcttacgatgaacaaacctcctgcaccgtggctaccggtactctcatacaaagctgtgacaaaagatgcccactccatcacgccaaagattattggcgccatccaaagtcttgacactgacgaagggaaaggaggaccccgcaccgtcaagaagataaccgctcatgaaggtgaccaacccagcttaccgcttcaaaaagtggatgcaatcgacgaggcttacttggtatacgaccacagcctcccggcagggactgtgccgcacgacagctgggagaaagctacattccagacagaggtggctcctggccctga

SEQ ID NO: 103797 - DNA, 425 bp, Glycine max
  Clone ID: PAT_MRT3847_64746C.1
gagagcagatgcatctgctaccccgcattgccactctttgttttgatattatctgagcttcgatcttgttcctcttgcgagaaaacatgggttcttttcatttgttccttctgctcccaactttcttttccctctttcttcacacctctccctcccctatcatccaagcagctatcgatcaaggtaccaaagcctactataactgcacaagaaacagcacttttgcttcctatagcgcttatcgttctaatgtcaaaatactcctagattttctctcctccaatggcaccaacaatgccaaattctacaacactacagtttatagtgaagacactgcagaccctgttcatgggaactttctttgtacaaaagacaccattccaaaacagtgtgcagaatgtgtgacacaacctgccaaactcata

SEQ ID NO: 103798 - DNA, 185 bp, Glycine max
  Clone ID: PAT_MRT3847_64747C.1
aaaactttatatttactattaacgtctttgttttaaagacaaatcacatgcacccgtgtagcattgtcatctctgcattggttgattgtttttacaaaagagaatggttaataagatcgtggattcgaacttcgcaagtttcaaatacgtgatgttgattgtttgcattctgtttggaaattggg

SEQ ID NO: 103799 - DNA, 164 bp, Glycine max
  Clone ID: PAT_MRT3847_64748C.1
ctcgagctcgagccgatttatttttgtgattaagattattgcgaatttatgtttctgtgtagaattagtagtaatgtaattgggctttgatctgtatattattgtacattctgtgattaaggatgattatcttatgggagtaatacttattttggtatgggaaa

SEQ ID NO: 103800 - DNA, 323 bp, Glycine max
  Clone ID: PAT_MRT3847_64749C.1
acaaggtggtactgggtgtgaattaactaacttacccacataacatagagtggcatttacaaacatagctaacgctcccatttgaattgagcacctgaccataccctgtttccaattggttggaaccaactctatgttaaatgaggcgagaggggaaggaactactaaatgatctacatgggatttggaagcttaaaggtccttctttaaactttggggggagcaaaaatatagttccattggcttccaatgattccaacggttcgacacatcctaggctgaacagattctttttcattgctacattgtatggaagtgcattt

SEQ ID NO: 103801 - DNA, 334 bp, Glycine max
  Clone ID: PAT_MRT3847_6474C.1
ggttatagacccaatcaggaacggaatgctgcttttgcagacatttcaaaggttggggatgcaatttcaaaatggatatgacgtattttcataatgggtgtggactggtgtaacacatcatgaagttacaaaatctcataagaatgtacccttaagttgcatattatgtcgtctaattacccttcgtatttctacatttcatttccttttcttccatgttacctttatatttttcttgatatcctaaattatcattgaacagaagaactgtaacggtctgtgtttgatacaattccactccaaagataattaagctcaagaattttgtacaaaa

SEQ ID NO: 103802 - DNA, 437 bp, Glycine max
  Clone ID: PAT_MRT3847_64750C.1
gccggacttcctgcctaggttttgccatgtggatttgttgaaggtgggcatgcaggccttcctgttggtctgcaaatgattggtgcagcatttaatgaggtattggcttttcctgtaggttctctatgttacctatagctttttttttcttttctttctagtctctattatttgtcaaatgagatatttgcgtaggaggtacaaatcacaatgatcttatgttatgatttgatgtctgccttttttctttcttggaaaggttcaagtattttgttccaaaattcttcttttctgtgagcatggatgttatgttatatgcaccaagttttgattgaaattcctctcattttttgtgatgcttgtcgcttgctggatgatgaagcaggaggcctaaaagttgagcagatgttgagttgaaagactataacaatttaaat

SEQ ID NO: 103803 - DNA, 1004 bp, Glycine max
  unsure (1)..(1004): unsure at all n locations
  Clone ID: PAT_MRT3847_64751C.1
atttttgagatatataagttcaaaaaacaaggcaaataaggcaaaacaccggatacatcatactactgggtcaaaatcctttctagcagtcagctatgatgcacgtgacccagtgaccggaaaggagcccgatttgcagactttttggcagttgacacacaaaagggaaaatggggaatggattgacgaagcatctaaggaaatcaatgacaaagttgctgaacaaattaatgagaagagatgtcaaatagaagattctcaggaagtggtggaaacaatggaacaagaaattattaatactgccttcaagacagtggttgggaaggaatcatttatgcaaggttttggagcagggctaaggtcatcatcatcaagctcaggtacaattcaacagctgcaggctgaactggatgcccaaaaaagggagacagagaatgctaggaaagaatgcaatgaaataagagctaaacttgttgaggttgagtcctgtctagagggggagcggctgaaatgcaaggagatagaagctcgtctattggatcatcaaagtgagatgcaggagatcagcagtcaggttcaaaccaccatccaggctgcattgtctcagtttcttcctcaaaaaaccgaagcaaggacctcatcctgttggatattcaattttatgtacattggtttaagttgactttaattatgtagtattcaaaaaatgtttattttttcaaatttcatatgaatgtttcatctgtaacgtgaaggatgcaattacaacctttctggttcatatattacaatcttagtagtaaatttcttttggactatgtttacattcgagtacatgctattgctaaacggtaaacagagttatttatatgtctgtgccttggctgtaaacatcttcgttntcacttaatgtgtgatttagcagaataganacgaatattctttagataaaaaaaaaaaaagaaacangaggagggtacaaagcgggtgctctagaagaggcc

SEQ ID NO: 103804 - DNA, 2946 bp, Glycine max
  Clone ID: PAT_MRT3847_64752C.1
cggaattcccgggtcgaaatagacatccggaaactgggtttgtgtttactttcactgttgttgttggtcacattcacagtggcctcatctgccaatgtcagctacgacggtcgctccctcattattgatgcccaacggaaacttcttatctctgcctccattcattacccacgcagcgttcccgcgatgtggcctggtcttgttcaaacagccaaggaaggaggagtagatgtgattgaaacctatgttttctggaatggccatgagctttctccaggcaattattactttggaggaaggtttgatctggtcaagtttgcccagactgttcagcaggctgggatgtacttgattcttcgaataggcccatttgttgctgcagaatggaattttggtggtgtaccggtatggctgcattatgttccaggcacggtattccggacttacaatcagccttttatgtatcatatgcagaagtttacaacttacatagtgaaccttatgaaacaagagaagctttttgcttcacaagggggtcccataatcttagcccagatagaaaatgaatatgggtactatgaaaatttttataaggaggatggtaagaaatatgccttgtgggctgcaaagatggctgtttctcaaaatacaggtgtcccttggataatgtgccaacaatgggatgctccagatcctgtgattgatacatgcaattcattctactgtgaccaatttacacccacttctccaaacaggcccaaaatttggactgagaactggcctggatggtttaaaacttttgggggcagagatcctcacaggccagcagaagatgttgcattttctgttgctcgtttcttccagaaaggtggaagtgtacataattactacatgtatcatggaggaacaaattttgggcgtacagcaggtggtccattcattactacaagttatgactatgatgccccagtggatgagtatgggttacctagacttcctaaatggggacatcttaaggaacttcacagagctatcaagttatgtgagcacgtattgcttaatggtaaatcagttaatatctcccttggtccttctgtggaggctgatgtctatactgactcatcaggagcatgtgctgcctttatttctaacgttgatgataaaaatgataagactgtggaatttcgaaatgcatcatatcacttgccagcttggtcggttagcattcttcctgattgcaagaatgtagtattcaacacagctaaggttacttcccagacaagtgtagttgcaatggttcccgagagtttgcagcaatcagataaagttgtaaattcttttaaatgggacatagtgaaggagaagccaggaatctgggggaaggcagactttgtcaaaaatggttttgttgatctcatcaatactaccaaagataccactgactacctgtggcatacaacaagtatatttgtaagtgaaaatgaagagttcttaaagaagggaaacaaaccagttcttctaattgaatccacgggtcatgctctccatgcttttgtgaatcaggaatatgaaggtactggtactggaaatggtacacatgcaccattcacttttaagaatcccatctccctcagggcagggaaaaatgaaattgctttgctatgcttgaccgttggcttacagacatctagcccattttatgacttcgtaggggcaggactaactagtgtgaagatcaagggactgaacaatgggacaatagacttgtcttcttatgcctggacttacaagattggagtccaaggagaatatctaaggttataccagggaaatgggttgaataatgtgaactggacatctacttcagaaccaccaaaaatgcagccattgacatggtacaaggctattgtagatgctccacctggggatgagccagttggattggatatgttgcatatgggaaagggtctagcctggttaaatggagaagaaataggaagatattggcctaggaaaagtgaattcaagagtgaagattgtgtgaaagaatgtgattacagaggcaaattcaatcctgacaaatgtgacactggttgtggagaacctacacagagatggtaccatgttccacgatcttggttcaagccatctggaaatattcttgttctttttgaggagaaaggtggagatccagaaaagatcaagtttgtgagacgtaaagtatctggagcttgtgcccttgttgctgaggattacccctctgttgcactcgtttctcagggtgaagataaaatacagagtaacaaaaacattccttttgcccgtttggcatgccccggtaacactcgtatatctgctgtgaagtttgctagctttggaagcccatctgggacatgtggatcttacctcaagggagattgccatgatcccaattctagcacaattgttgagaaggcgtgcctaaacaaaaacgactgtgtcataaaattaactgaagagaatttcaaaagcaacttgtgtcctggtttatcaaggaaacttgcagtggaagcagtctgtagttgaataataaactaacgaactccggtgcaagagactcgtcactttgtgactgctgttgattaatattattgtcgattccggaggaacattgcatctcaccatttattttaccagcttggctacatcaaaaaagcagaagaaaattttgcatatattaatattaatattatcagcaaggtctctaatgtacaaatataatttatggcagagaaatctgctgtaaatacgatatctattaatcaatttggctttcacatgggtgtgttagccactgagaatcaatgcattttattcacacgacgctctgaaacaacctttgtggtaacgttttgattcattattcatatgaggagttaactttcattttaaaaaaaacaaaaatgg

SEQ ID NO: 103805 - DNA, 339 bp, Glycine max
  Clone ID: PAT_MRT3847_64753C.1
ctagagccgaaattgcaataatccgggataacaggttggcgtaccttataaccgggaacaaaagcaaacgatgcttgctttcaagaatttctgaatttcttgctactactcagtgtacgatctctcaagggaaagaaaatcactctctgtgctggtcacagacttcacgaatcatgtacgtttccactcctagattatttgctgaacactcttccattggatgtaggacttcatgtcagatgtaaacgttagctgtttcttgctcagatgtctgattaatttcgaggtgcagctggtgaaattttggattagtgctcccactgtcctatctggtatagg

SEQ ID NO: 103806 - DNA, 417 bp, Glycine max
  Clone ID: PAT_MRT3847_64754C.1
tacggctgcgagaagacgacagaagggggtgcgagtgtttgatggtgtaactcggtctggtgctcttgttgttctgtggctgtgtttgcgttttctctcacctgaaaacgtctagctgccgtggtaactggggttccggaagctcctgcaagtgcggcaacggctgcacaggctgcaagatttacccatactccagctactctgtttcaaccaccacccaaaccttggtcacgggagtggcacctgttcacgctcaaagtgagggtgctgaaatgcttgtgcccgctgagaacgttggctccatatgtggaccaaactgctactgcaacccctgcacttgcaagttaggtggtgggagagcaagcttccagcctagatagccctttattcggaataatgataaactgttaatgtgta

SEQ ID NO: 103807 - DNA, 2109 bp, Glycine max
  Clone ID: PAT_MRT3847_64755C.1
ttggacttccacctcaccgttttcagccactttctttgcgccatggaaacaggtaatctgccagtttttccatatttgaagtaaggatattcatcttatgaccaagagtgtcaatctttcggattaagagttattgctttagttttatctagagtaaaggaccagctagtgagatgctatagatccttaattcaaatctcatcaaacctcactgcatggaaacagtacgttgtctggcatgtgtacttgttcaaggtgacatatgacctaaacaattattagaacttaatctgatcacaaggcagtttttttgagctgatctggatgggaaccggtgaagaaagcacagctaaagttcctaaaccatcttctacttcttcaattcagataccactggcaccttcatatcctgattggtcaagctcgatgcaggcttactatgctcctggagccactccacctgcattttttgcctcaaatattgcttctccaactccccattcttatatgtggggaagccagcaccctctaattccaccatatagtactcctgttccatatccagctatatatcctcctgggaatgtctatgctcatcctagcatggcaatgaccctgagcaccacacagaatggtacagagtttgtaggaaagggttctgatgaaaaagatcgggtttctgccaaaagttcaaaggctgtgtctgcaaacaatggttccaaagctggagacaatggaaaggcaagctcaggtcccagaaatgatggcacctcacaaagtgctgaaagtggttcagagggatcttcggatgctagtgatgagaatactgaccaacaggaatcagctacaaacaagaaagggagttttgaccaaatgcttgttgatggagccaatgcacggaagaattctgtgagcaccattcctcattcttcagtacctggaaatcccgctgtctcaatgtctccaactagtcttaatattggaatggacttgtgggacgcatctcctgctggtgccgaagctgcaaaaatgagacataatcagtcttctgcctcagaagctgttactcctccaaccataatgggacgtgaagtcccgcttggtgaacaatggatacaagacgatcgtgaactaaagaaacagaaaaggaaacagtctaatagggagtctgctaggaggtcaaggctacgcaagcaggctgagtgtgaagagttacaaaagagggtggagtctctgagaagtgagaatcgaactctcagagaagagcttcagagagtatctgaagaatgcaagaaacttacatctgaaaatgattccatcaaggttatacagtaaataaccttggcctacattatttatcgagacttcatgcaattcagtgataataaagattgtatcgaagagactgttccagtcacaatgtaactccagaagtaggtcttggaccaaggattgtgtgttgtgccttcttcagatatgacggtgcatatttctccaattcggggtttggtcaaaatcttgaaaaaatcgtaatcatgaatcatcccatgatcgtaagttgaggatagtgcttgccattgggtcgagcttctggaagggcattggcttggcatattcagaagccagatagtgttcaaagaaatcccatatttttagtatttacttgtgccgatgaatagatgattttatgctaattgggcacttctgttcggtgttcagtagtttcactttctcaacttctgctgatgtttacatgccgctttaatttccgagcaccttgtaagaggtaaccatggaaccatgtgtttgttctaccaatttatatttgagctttaaacaccaacacatttcagttcctcagtgtagtgtttgatggtaacggcaaaatttgatagattcttaattaagacgaatctgcagctggaattttcttatcaatggcccggccttcttaattgagaataggatataatgtttttttttttctttgtcatactaatttatatcattaaccctcaattgtaattgcccttgtgattttacatgtcatttgtttgtaatattaaccagtaccgtagaatagaaaatgtaggctacttgagcactttt

SEQ ID NO: 103808 - DNA, 395 bp, Glycine max
  Clone ID: PAT_MRT3847_64756C.1
ggaacttactttctgattttgagtgctttccctgtaaaatcgtaactatattgtagaaagtgattcctacgggctttatattaattaccacttgaacccctagtcccctacccacctttagcaatgttttttgcagatagatgaagaaagtaaatttgtaatatatatgagtgtctaataagaaagtagtgtataacaatgaagtataggtcatgaatcatgatgtgtagcacaaatccaatagatcgaagagtgtgaattgaaataggttggttatagtaaagtaataaatttagtgtcacaacgttatgtgttgacacaatgttcttttaaaacaatatatataaaagattggtggcatctatcagctgcactagtttttaaacgtagcgttg

SEQ ID NO: 103809 - DNA, 1803 bp, Glycine max
  Clone ID: PAT_MRT3847_64757C.1
aaacaaaacacacttacataaaaaatcatccttatctatgccacttccacttggacttccacctcacccactttctctgcgccatggaaacagtacgttgtctggcatgtgtacttgttcaaggtgacatatgacctaaacaattattagaacttaatctgatcacaaggcagtttttttgagctgatctggatgggaaccggtgaagaaagcacagctaaagttcctaaaccatcttctacttcttcaattcagataccactggcaccttcatatcctgattggtcaagctcgatgcaggcttactatgctcctggagccactccacctgcattttttgcctcaaatattgcttctccaactccccattcttatatgtggggaagccagcaccctctaattccaccatatagtactcctgttccatatccagctatatatcctcctgggaatgtctatgctcatcctagcatggcaatgaccctgagcaccacacagaatggtacagagtttgtaggaaagggttctgatggaaaagatcgggtttctgccaaaagttcaaaggctgtgtctgcaaacaatggttccaaagctggaaacaatggaaaggcaagctcaggtcccagaaatgatggcacctcaacaagtgctgaaagtgggtcagagggatcctcggatgctagtgatgagaatactaaccaacaggaatcggctacaaacaagaaagggagttttgaccaaatgcttgttgatggtgctaatgcacggaacaattctgtgagcatcattcctcaacctggaaatcccgctgtgtcaatgtctccaactagtcttaatattggaatgaacttgtggaatgcatctcctgctggtgacgaagctgcaaaaatgagacagaatcagtcttcaggagctgttactcctccaaccataatgggacgtgaagtcgcgctgggtgaacactggatacaagatgaacgtgaactaaagaaacagaaaaggaaacagtctaatagggagtctgctaggagatcaagactacgcaagcaggctgagtgtgaagagttacaaaagagggtggagtctctgggaagtgagaatcaaactctcagagaagagcttcagagagtatctgaagaatgcaaaaaacttacatctgaaaatgattccattcaaggaagagttagaacaattgtttggaccagaagcagttgctaatcttgaataaatcaacttcttattatcatgccaagcatcgggcggaaaatgtccaactcctaggaggaggatgatttgcagctgaaatttttatcaatggcgaaaatgaacataggatataatttttttcccttggtttactatttacaccattaacccttaattgccaccccccttatgttttgcccatttagtattgtaaaacaaatcatagcaaaatattattttcaacactttttttggacagatttttttttatgtaggtcatagtaaataaccttgacttacattatttattgagacttacgtgcaattcagtgataataaatattgtatcaaagagagtgttccagtcacaatgtaactccagaagttgatcttgaagctaaagtaaggctggaccaaggattgtgtgccttcttcagatgtcacggtgcttttgaggaagggtaatatccagaagggtccagattgtgttcaaagaaatgacatatttttagtatttgcttgtgccgatgaatagataattttatgctaattgggcacttctattcggtgttcagtagtttcacattcactttcaaa

SEQ ID NO: 103810 - DNA, 1280 bp, Glycine max
  Clone ID: PAT_MRT3847_64758C.1
ttgtccgtacgtttgttagaagacgacagacggggaggggttctggatgctgctagtttctgtctgaaagctattctccaccgtagccgcaagcttcgccgtttgaaacagtgcctcaaccatggcagaacaaacagagaaggcttttctgaagcaaccaaaagtgtttctatggtatactgattcacacaatattgcatcatttactctctgcttgattgtgtttatttattatgctttagttatgttggtgtctgtgttgatgtgtttttgaagctctaagaaaggtgggaagggaaagaggcctgggaaaggtgggaatcgcttttggaagtcaattgggcttggattcaagactcccagagatgccattgaaggaacctatattgacaagaagtgccccttcactggcaatgtttccattcggggtcgtatcctagccggtacttgtcacagtgctaagatgacaaggaccattattgtgaggaggaattatcttcattttattaagaaataccagagatatgaaaagcggcattcagatattccttcacacatatcaccttgtttccgtgttaaggaaggagatcatgttattattggccaatgcaggccaatctcaaagacagtgaggttcaatgtgttgaaagtgatccccgctggatcctctagcggtgcaaagaaggcttttactggaatgtgagatttgaattttcagttctcattgaagggtagtgttaccttacaaagttagtagaagcctctgttcaaatacatcaaggttgagttaaagattgaatcaattttttgatatcttgtaatgctttgagtggttatatgttacagactttaattgttgaatagtagttgcagttatttctgttttcaggtcatgcttactcttatcttcttgtctccattctctttatttatttttttccttcatcgttggattttttgctacaataaaatgctcaatgggattatctcaagtttgttggggctagtacacttaactcttcggttgaggaggattttgtgataagtttctccataacaaacctcccttatgttgtgaatgggaaggtttctgagtgaaaggttcctgggtcgggtgaaattttgttcaagaatttgtttctagactttggcaccgtacacaacttatttggactgttattcgatattgaactttaagtagggatgaagtggcaattgtggagacaaagggatgtgaaacagaagcaatcatagaaattgtttgaataacatctatagag

SEQ ID NO: 103811 - DNA, 224 bp, Glycine max
  Clone ID: PAT_MRT3847_64759C.1
ctgatcatggtgtgtgctacgggaatcataggacactgattgacttagaggttatgtgcttatgaacaatctacggtggattactttggcttacttgactgcagccatatactggtgggacgaccagcgtgaggtgcccatgtggtttagaggtgtatcctggataagaaggcagagatcaaggctagtaacatggactgatctaaaaacagagatactggaca

SEQ ID NO: 103812 - DNA, 311 bp, Glycine max
  Clone ID: PAT_MRT3847_6475C.1
cttattaacactttccttagttcaatatggggaagcccttcttcattctcgctctttcttccctttgcttgctactcgtgtcgagtgcatgcgttgctatgacctgcatgacgttcaacgagtgccaactcttgcacctcaacgcgttggaaaccgagcagcgcgttgagtccgagggtggtcttattgattcatggaactctcaagaccttgagctgcagtgcgccggtgtcactgtttccagactcaccgtcatgggaatcgggcctaagttgccagctttatgatcttagctcgatatggatcattgt

SEQ ID NO: 103813 - DNA, 1883 bp, Glycine max
  Clone ID: PAT_MRT3847_64760C.1
ctctcgaccccctgtttgccacgcggccggggcccagtctgcggtctctgctttcttcgtggcttcggcggggcttgcgccccccttgtgtctgatgccactcttcgattacacaccgaatgtagtcttagcagccattatcatcactgctgttgcagggcgtattgatgagccacctgcatataaattgtggatggtcgactagcttgatttcttggcctgctcgtgctcctttttcggtgttctgttcatttcagtgcctttacgccttgcaatagcggtgtgcaatatcagtctgcaggatctcgcttcatgtctctaggccagacacactggttggggggaatataccagggacgccaatattccacaacctaaaccaatatagagaagctttgaggatcccttcatttatcattttggctgttgagtctcccatctactttgctaattcaacgtacctacaagaaaggatactgagatgggttcgagaagaggaagagcgagtaaaagcaaacaatgagagtactttgaagtgcataattttggacatgacagctgttactgccatagacacaagtggaattgatactctatgtgaactcagaaaggtgctggaaaaaagatcacttcagcttgtgttgacaaatcctgttggaaatgtgatggcaaacaacaggatccttaactggatcagatgtcaaatataaggctggagcacatctctcagtttcaaatataatgatggctgcagctgttctagtgaccctcctgtttttcatgcctctgttctactatacaccaaatgttgtcttagcggccattatcatcactgctgtgattggtctaatagattatcaatctgcatacaaattatggaaggttgacaaacttgatttcttggcctgtttgtgctccttttttggggttctgttcatttcagtgcctttaggccttggtatagcggttatcatatcagtcttcaagatcctgcttcatgtcactcgaccaaacactttggttttggggaatataccaggaacacaaatattccacaacataaaccaatacatagaagctttaagagttccttcatttctcattttggctgttgagtctccaatctattttgctaactcaacttatcttcaagaaaggattctgagatgggttcgagaagaggaagagcatataaaagctaataatggagctccattgaagtgcataattttagacatgacagctgtcacagccatagacacaagtgggcttgacactttatgtgaacttagaaagatgctggagaagcgatcacttgagcttgtgttggcaaatcctgttggaaatgtgatggaaaaattgcataagtcaaatattttggattcttttggattaaaaggagtctatctcacagtgggagaagctgtggctgacatttcatcaatctggaaagctcagccttgatctcccatcaaggacgggaaagagaagttaaaggaaccataaaacttaaggggataaactttaaccttttgtttttgcctgcgatgaatacttgtttaaattccggagagtctaatttctgttagtagaaaccttcaaaacaatattaccccgtaaaaagaaaaaaggagtgccttgaaaatcaaggaccttgttcttttactagagtgtttcttatctcaggttgatcagctgatgcctgccgatgttactccttataatttctgctactttagcaattttgttaagagatgtttgataaccttattcatgtagaaaattttgagttgaaaatatgaatacaacctttaacgaaagaagaaagaatggaaaagggtcatctcttcttttaaaaaaaaaaaaaaaaaaaaaaaaagaaa

SEQ ID NO: 103814 - DNA, 267 bp, Glycine max
  unsure (1)..(267): unsure at all n locations
  Clone ID: PAT_MRT3847_64761C.1
gnnggcnangagtacgcngagcacggaatnngnnangagancagannnnggngtgtaanannaanggagggncanangangnagnannngtnnncccngnagcanacgaggngngnnagcnggcaaatnngtnntngcanntngncnagngngngnngagagancgnncngangngnnggaggnangaggnagggnngnccgngngngangtnanngcggnngaggcncannngggnnnntgnnancgaggcacncanannnnanan

SEQ ID NO: 103815 - DNA, 461 bp, Glycine max
  Clone ID: PAT_MRT3847_64762C.1
tgccccccttccttagcctggattctttaaaaccggccgcctttttttttttttttatggtgccaaatatggtttttaaaatggatttaaatgggaaggtttggtttttaacaaatggccccaattttattccccccaatcacattaaggagaaggttttaccctaattcattttaagggagggttccaaaatcaacttttttgaagggaaggaaaaccttgtaaaattttttagcaacagaacaccaggcaaaaagcgtgaggggaataatggacacctttttcccaacttaaagtggaaaaaaggccacgtcaatcacagtccacgttatcatggggttaaaagggggcaatggctgttttatcaaaaaccttggctaccatatggccgcttaatcaaaaacctactccaatcaacccaaatgtgcaaccctaaaatcgagaaggatgtccaagtccgg

SEQ ID NO: 103816 - DNA, 176 bp, Glycine max
  Clone ID: PAT_MRT3847_64763C.1
ttcggctaagagaggattacggagggttcctacgtgcacaaaaccgcggaagggcatgatgatcatcgtcatgcttcggggagttgaaaattagcgtagatacggtgattcctctatatgagccaagcttacgaactggtgcttgatacacggtcagtcttatatagtgtcaccta

SEQ ID NO: 103817 - DNA, 296 bp, Glycine max
  Clone ID: PAT_MRT3847_64764C.1
ctgacgcgtgggaaaaaatataagttacaaggaaattatcatgaatccaattattaatagctgctgctgatattgcatgctgagaaggccgaaaggcatagcttctattggacctgagagtagatcaaagcactgatggggggcaagctgtttaaaggattgcacgacaaccggatgcacagggaaaaatacgaggtactttattgcttagtatggcttttaaggaagctctaacactccatggactggttgtagcattagcacttatatccgctaatccttttgggaatcctaaa

SEQ ID NO: 103818 - DNA, 577 bp, Glycine max
  Clone ID: PAT_MRT3847_64765C.1
tccgcgggtcgagcacgaaagagaaccgtgagttgcaaccctagcttttccttttccgttcgtatcgattgaagaattaggatccaatagatggcattttgggggacgcgggtgatggagattgtgaagaagcatgattctggaggactagtttggaagagaataaaactcacaaccacccgaaaagccaacgctaagaagcgtcttctccgcgtttggcagaatgaagctgtcctgaaggcatgtgttgctcaagttccatctgccaccaccactaccgccaccaccgccgccaccaccagtaccagtaccagtacctagctaagttcatggccatctcaatttaaatacattacttgcaggtgaaactttgtaagaatcagcttctggaattatattaatttgtaatgtgattttttgggctatttttaagactgaaaattttaaattcaatagaaattaggtcatgctcttcaacgagtgactcacgggtttgattgattgatacttcgtgttttttaatattgggtcatagtataagttcgaccaatcctatcaatctaaatgtattctcatc

SEQ ID NO: 103819 - DNA, 311 bp, Glycine max
  unsure (1)..(311): unsure at all n locations
  Clone ID: PAT_MRT3847_64766C.1
tacgtaagatgtaaataaggtcggaattaggatcgagatagggttttactttacatctgtagcgggaaacatcactgtatcagacacaaccttcaaaacaaaacaataccatccacaccaacaacgttatagnnagattaagattaaaactaacataattattatagaaagtaaccaccaagtaggcgcaaacatgacagagaagaagcggaaggagagggacgaaggcaaccgtcaaagactgaagccgaagaagaagccaaacactcaatggaagaagagaggccctcgtttgcactcatctcttcaga

SEQ ID NO: 103820 - DNA, 145 bp, Glycine max
  Clone ID: PAT_MRT3847_64767C.1
ataacgaaaaacaaatgaggtggtgatgaactcggcgttaaccttcgggtttatcttatgagctgtgacagtctaatggactgctgtaccaatcaacatctgttaatcgggggatataatctacttctactccaaaagcccattt

SEQ ID NO: 103821 - DNA, 488 bp, Glycine max
  Clone ID: PAT_MRT3847_64768C.1
aaccccccccccaacccatttaaaaatatatccaaaaaaaaagggcacaaggatcagggccaaatttaagaccatggggggcattcaacaaaaacccttacaaaaaaatggaagggccctaaaaagaatccttcaccttaagcggaaacccccccgagcagggaccatggaaaaaaaaaccccccggaaaaaacaacactggaaaattgggccaggttcaaaaacattgaacaaaaattctttttccctttcccacgtttaaccgaataaaaaaaaaaagaattttttttttgccaaaaaaaaaaaaaaaaacccaaaaacttcctattagtttcctgaaaaaaagcttttgattaattggaccactattgaaaaaattgggattgcccccactggggggggccctgttattggtgggaatacccccccccatgatggaggaaaagggggaaacaaaccccccccgaaaattggaacgcgggggaagg

SEQ ID NO: 103822 - DNA, 136 bp, Glycine max
  Clone ID: PAT_MRT3847_64769C.1
gggaaccggtaaaaaccgattgtattatggggaagctccactgaaaatgggggacataattcaattccaaacccttatctgctgtgaaaccaactttccgtatagtgagtcgaatcagaaattgccgtcctcatcc

SEQ ID NO: 103823 - DNA, 290 bp, Glycine max
  Clone ID: PAT_MRT3847_6476C.1
acacggcggccagaactaaacaaaagagtaagagacagagatcctggggatcatgaattggtcttggcaaaatacaaagtagggcgtaacataagctaaaaaaaaaaaaagggcaggaagtttgaatggattggagcaccctaattggcgggaaaggtttattaaagggaaggaaaaacccgttgtgttccaagaaggtttaatgttgggggctattcttgggcttgaataaccaatggggtttttctgggaataacaccttaacccacccttcccgttttttttcccca

SEQ ID NO: 103824 - DNA, 132 bp, Glycine max
  Clone ID: PAT_MRT3847_64770C.1
tcgcgatctagaacccgccgcgtgcgtccacccaattatgcaccgccgcctcctgccggcccaccttctcctattatgaggcgtattatagcagctcgtcataatgatgataatagctgcctgctgggagaa

SEQ ID NO: 103825 - DNA, 1097 bp, Glycine max
  Clone ID: PAT_MRT3847_64771C.1
gcacgagcccaaataaaaaaggctctagacctaggttgagacggccctaacgagttcttcattcgtaataaaatgtctgaaaatatctaaatttttaaattaaataaaaaaatggcgttaatctcttcgttgtcatttgtctctcacaacctcatcaccaccaccactcccacattttcacaattccaatctgccaaatatagaaaaccaatacgccaccacattagtaaaattgcatgcagtgaaaacacactcgaaggagaaaagctcccacatcggaggaacgttctacttggcctaggaggattttgcggcgctgctgttatgtctctgaacaacaagaacataccttttgcctctgctgctcccacacccatgttccctctggtgttggattccgctgtgagcacggtggtgaagaggccaagcaagtcgaggagcaagaagcagaaggaagaggaggaggaggttctcgtgattgaagggatcgagtttgagggaaacacacatgccaagttcgatgtcatcattaacgccgatgattataacgaaatccgccccgatcacaccgagtttgcaggaagctttgcgagtctgcctcactcaaataacaaaaagatcgttacttccatgagtctgggattaacggatttgttggaagatttgggcgctgacgatgatgacagtgttgtcgtcacgctcgttcccagggatggacgtgtcaaaatcagagccatcaagacacggcttcttgcagagtgaaggaaatacttatgcatataaataaatttgtggggtgtaatacttgtattataggttaattttgttactgctttttaaattatggagacaatttataattgtgcttgtattttatattaagaaaaatttaaaagcttgtgaggtcagttgtcccaaaattcaccaagtacctaatcttatttgtgttggagaaacatatgttgaagtattggttaatattggttcagtattactgtattagttctggtttaggttcagggcagattttggttcatgttcagtattggctatttgattatgttactacttactagttcagtaatgttgattcagcc

SEQ ID NO: 103826 - DNA, 280 bp, Glycine max
  Clone ID: PAT_MRT3847_64772C.1
cgcgtgcgcttttccttctcacagtgaaaagcatacatttgaatgtgttacatccaccatccaacagcgtgacgtgggcacttatgtagattcataacacacaccgccgtgataaaaaactccgcgagatcctaattacgcactgcatttctatcccattcttcccctatcctagacaacaacgtgcttatttttctccacaggcgacaaattcctgaacgaaattactgtggatgtggataaagacaggcgcagggaacgaaacgagcgtatgcgcctc

SEQ ID NO: 103827 - DNA, 210 bp, Glycine max
  Clone ID: PAT_MRT3847_64773C.1
tatgttaatttgggaataccacagccatggggacggatgctacatgcattgaattacaacttgatgtaaaaaacatctttttatctatctttaaaaaaagaagggtattggcttttctctagaaatcagaatggttttagaaaccatcaaccctacccgttatgcattctccaatgctgctagctgccaactgatatgtatctgccgttc

SEQ ID NO: 103828 - DNA, 319 bp, Glycine max
  Clone ID: PAT_MRT3847_64774C.1
atctgtcttattcggacatcaacacaataccacggttctttttatctctgccaattatacatatgaatacattcttttatacgaagagctgtactgtcttgcttctaactatccagatcgattcaaaatatactatatgttaaatcaaccttctgaagtatgggatggtggtgaatgatttgtgtctaaggaaatgttttatacccattgcccttctccagcacaagatataaagatatttgtatgttatcccccacctatgaacatggccatggctgcacaccttaaagcccttggatatgcttctgaaatgccgttc

SEQ ID NO: 103829 - DNA, 431 bp, Glycine max
  Clone ID: PAT_MRT3847_64775C.1
cccaataattgatagttttaaatttatcaaactctcaagtacaacctttaaaagggaaggtagaagttgaagttagtttatgcgttgtactgcatcgtattgataaactaggtattttgaactctaagcaatcaagggtgttgaattcaagtttgaagagattactcagctgacacagggtagaatgtagatctgtacatgtattcatatcgagttattcttctatatagttgtgttccaccctgaagtgaaataaatttgtctgaatctttcagaagaacgtcatggcaatgaaccgtgccaggtatattagacacattcttaccaccaaagaggtagttggggttgcatgccaacgaacttttgccaccggtaaagcaaagaaaggatctaaagggggtgcagctgctgatgcgcccaaagcatcaact

SEQ ID NO: 103830 - DNA, 353 bp, Glycine max
  Clone ID: PAT_MRT3847_64776C.1
gggaaaaaccgcctttttttttttttcattctaaaacgggttattttgtaacccttttaaaatttttttttgcaattggcatagctttaaatggccattcccgggatacttccaagggggaacaggagcccttgttttttctcccaaatttgaaaaggcgggggaaataaaacatcaacccacccccaatttacctaattggaatggttcccgggtttttgaacaaaaaaaattttttttgtttggggacttggaaacctcaggccgcaatgaatttaagggccctggcaattgggggtttaaaaattccacggttttaagtaacgtttttttaaaatgatttacccgtttta

SEQ ID NO: 103831 - DNA, 249 bp, Glycine max
  Clone ID: PAT_MRT3847_64777C.1
gaggcatggcactgcgtggcatggcgcttggctgatccagacattgacatttcgatgtggagaggccatggctctccgacaactgatgtccaatgaatgctggatgttctaacacttttatgataagaagattgcaaggtttggtatactctgaacgtataagtgggggacattgtgaacgcactatgctggatgttgaaccacactgatgcataaccttctagtatggagacgaccttcatacacgct

SEQ ID NO: 103832 - DNA, 469 bp, Glycine max
  Clone ID: PAT_MRT3847_64778C.1
cagggcccccaaattataaaatttatttttaaacaaaataaaaaaggccctggtaaaaaccgctttttttgggggcccggccccacttaaatccttttttttcaccccggggaaaaaggaacaaaaaggggggaataaaaaaggggggaaagaaaggccaggctttattttaaaaaaggagggggtaaaagggaattaacttgggccattgggggaaaaaacatcctggaaacaccgggggggaaaagggggccaaaaaaaggggcaaggggggcaaccccccctggggggaagagggcttaaaattggcaaaaaatttaaccccccctgggggggaaataaccattctttcaaaatttggcaagaaaggggggggaacaatcccaagtgggggtaaaagccatgcgaaaaaggttaaaattggaaatcagccaaaaagaagatttttggaaaaaaaaggggggcccaa

SEQ ID NO: 103833 - DNA, 338 bp, Glycine max
  unsure (1)..(338): unsure at all n locations
  Clone ID: PAT_MRT3847_64779C.1
aagggttctactaaccattgtgtactctagagagtcgtggaagaagggtcaatccccaggactcttggtaagctacggggcatatggagaagatctggataagagctggtgttcagatcaccttagtttactggaccgtggttgggtagtggcattcgctgatgttagaggtggtggtggtggaggtnctttatggcataaatntgggagtggattaaacaaacttaatttaatatttgaatttgtatactgtggcaactaccgggggaaggggggttatgttcagagtgatcttgtttagtgctatggaatggagtgcaggctgcctttttgttggt

SEQ ID NO: 103834 - DNA, 490 bp, Glycine max
  Clone ID: PAT_MRT3847_6477C.1
gagaaaaaaaaaaaaggattattttacaaaattacgttgaaaaaaaaaaggaccgggttttttcctgggaacattcgaaattcaaggggggggaaaaaaaaaggggggaccccctggtttatgagaaacccgggggggcccttgctatagggagggggaaaaaaaaaatcagcggttctgaccgtatacggaaggtccatcattggccaacctgaaattggcctgaagcggctcaaagaagttttcattgcctggaaagggtgtgcaatccagaaaggaggggtttgaaccggtgggtgttccccaaaggccctctagttttaatggggtgggtttttacaagggttaccccccgggttggaggaagttacacccccgccaccattatcgcgggcggggttattataaccgccatttaaaaagggggccccggtcttatagccgctaccccgggcataaacgcctgcccccccatgggtttcacccccat

SEQ ID NO: 103835 - DNA, 515 bp, Glycine max
  Clone ID: PAT_MRT3847_64780C.1
acgagcacgtcttctcctctcagaatttagcccacgctatgatcatttaaagagcaaagacttgttctttcccacagatctaggattcgccatggatgtagaaggaagagcgagcaagggcaagtctctcactttgaacctcgagcaaggtcaacaagaaaagggtacccaaaatgatgattatggtctcgcttctgctcatgctattgaccaagattcgtggcaacaagtggggctgatgctggtgacaagcttcaattgcgggtggatattaagtttttctaatttggtcatgtggccactgggttggacatggggtatcatatgccttattgttgtcggattctacactgtctatgcaaactggattttggtagcatggcaactgggcgatgactggagattcatttgacatagagttctcgtacgatatactgaccatgcgagtatgtaccattcatttcatcgatgaccgtagattcattagatacagagatcttatgggatatgtttac

SEQ ID NO: 103836 - DNA, 453 bp, Glycine max
  Clone ID: PAT_MRT3847_64781C.1
aaatgtcaatcaaaactttattaagatgatcttttgatgtatattaatggggaagaggggaataacaaggaggtgcgtatacaactatcgcatacaaactaatactttactacaaaaatagctaatattacttgatgtttacatcttaaaaaaagggtagtaccacgagaccaacaacacacgcggtatttggttacaaccaacaggaatgcaactccagcaataaacaacaatctgcaagaagtttatgatcctcttgttaaactggtatcataggaaatacggcacaaaatccatgtagtgccaaaacaaaaaatataccattggtcactttaccttggagaaggcgaccaagtggaagcaccaggaaagcctctaaacacatttgactaggacttggtcaaatattaaaaattgtgtatcggatgcataaaaagtattctttctcctttc

SEQ ID NO: 103837 - DNA, 787 bp, Glycine max
  Clone ID: PAT_MRT3847_64782C.1
cggaatacccgcgtcgacccatttccttacacacttgttgtatttttcctcctcccttctttctttcctcacccattgctctctcttctctcgtccaaaaaaaaaaacacaaaccattcttattaagaatcacgcaagaatcgcacaacagaaagttaaacaacaacaacaacaacaacatcatatatatctcagatatatcatcatggccgttgaggcgcgccatctcaatctctttccctctcaattcatacccaaccgggaagtgatgaattctgttgaggcgaatatgaacatgtacaacaacaccactccgatgggtggttactcttcgtttctgccgttatctggcgccgtcacggagacggtgcttccgtcctcggttttcaacaaccattctctcggtaacgccgtgaaatccgaaagcggcgttacctataacaataacaacaaccaccaccaccaccacattaacaacgttgttatgactcccacgtcgagaaagcgttcccgagataacagcaacaattacggttacaacaacaacatcaacaacgattcattctcgtttctcggccaagacgtttctctccagatccaacagcagcaactcgacatcgagcacttaatcatgcaacgcatggagaaggtgagaatggagattgatgaaaagaggaagaggcaagcgagggaggttcatcgaggctatttgaagttggagtgatgaaagaagctgaggcgaaggaagaggaaatagagaaaatcggaaactgatttgggcgttgga

SEQ ID NO: 103838 - DNA, 1452 bp, Glycine max
  Clone ID: PAT_MRT3847_64783C.1
tgactctcttcctagctgaagatgctgttatacttggcattgatgatgaaaaatattggccattgatgcctccattgccttcatacgtccgtgggagggagcatcctgggcctcgatatggcagtttgattcatggtccaaaatcttgaagatgttgtcataacagggcataacggtaccataaatggacagggacaaacatggtggaaaaaatatcgccagaagcgtctgaaccacactagggggccacttgttcagatattgttttctagtgacattgtgattacaaatattactttgcgtgactctcccttttggacacttcatccatatgactgcaaaaatgttacaataaaaaaggttactatattggctcctgtttttcatgctccaaatactgatggcatagatcctgattcttttgaggatatgttgatagaggactgttacataagtgtgggggatgatgcaattgcaataaaaagtggctgggatcaataccgaagttcttatggaaggccttccaagaatatagtaattcgaaaccttgttgttcgctctaacgtcagtgctggcatctcaataggcagtgagatgtctggtggggtatccaatgtcctggtggagaacattcttgtatgggaatcaaggcgtgccatgagaatcaagactgctccaggaagaggcggatatgtgcggcaaataacatacaaaaatctaatgttaaaaaatgtgcgcgttggaattgtgatcaagacagattacaatgaacaccctggtgctggatatgatcctagagcacttccaatactcagagacataagcttcatgaatatccgcggccagggtgttcgcgtgccggttcgaattcaaggcagtgaacagattccagttagaaatgtgactttccaggatatgaaagttggcataacctacaagaagaaacatatcttccagtgtgcctttgtccaaggtcaggcaatagggaccatatttccttctccctgtgacagctttgatcggtacaatgagcaaggacagcttgttaagcatgctgcttcacagaatgtcacagatatagattatgaaatttgagtagtcttgttttccaaactttgtgtgtgtatgcgcgcgtgtatataagtggcatgtttaatgaaagcatgagaggaactaatcttggtcatgaaggatcaaggttgttacctttcttagggttatgagttgtatataggtaaaattttctgatgctaatataaattttccaggattactttatgtctgtactagatcattttttgtgaaagttgaagaagtcccgtcacgattttcgttttttaaatctgtaagctcacttgtaaacattttatatctttcttaaatggacttggaaacacaaaaaattttcacaggtgtacgtaagaatactagataagttggcttatcgccagc

SEQ ID NO: 103839 - DNA, 510 bp, Glycine max
  Clone ID: PAT_MRT3847_64784C.1
ctttttttttttttttttttttttttttttttttttttttttttttttttttttgggcccaaacaaaagtattatatataattttcgtcccaaactaaactattacaaaaactttgggtagttaacagaatcattgaactataaaaaacgaaattttgggggacaggtattgggggccccacccaaaaaaataaaagaaatactacaggttctggttctggaaaaaaaaaatacccaactttggcagcattaaggcttaaaagggttcttaataaaccttctgccaagggaggctcaaaactacaagggtaattctcacccacctttattttgggaataggagtaaaacaaaatctcccaaaaaaatattccaattaaaactgagttgttgatagggaaactatccttgcaaacaatttggctcacacaggggtggcagcttaacatcttttatgttgggaattggcaagcaaaaaaaaagttcaagcttgcaaggggttggttattttt

SEQ ID NO: 103840 - DNA, 664 bp, Glycine max
  unsure (1)..(664): unsure at all n locations
  Clone ID: PAT_MRT3847_64785C.1
aatcaaggcgtggcatgagaatcaagactgcaccaggaagaggtggatatgtgcgtcaaataacttacaaaaatctaatgttcaaaaacgttcgcgttggaanttgtgatcaagacagattacaatgaacacncctggtactggatatgatcctagagcacttccaatactcagagacataagcttcatcaacattcgcggtcaaggagttcgtgtgcctgttcgaattcaaggtagtgaacagattccagttagaaatgtgactttccaggatatgaagattggcataacttacaagaagaagcatatcttccagtgtgcctttgtccaaggtcaggcaatagggaccatctttccttctccctgtgacagctttgatcggtacaatgagcaaggacagcttgttaagcatgctgcttctcagaatgtaacagatatagattatgaaatttgaggtggtgtcatgttgtccaaacttgatgtttgcacgcgcgtgtatgtgcgtgcgtgtgggtatatataagtggcatgtttaatgcaagcattataggaaataatcttggtgatagatgatcaagattgttacctttcttagggttatgagttgtatataggaaaaattttctgatgcttatataaattttccaggattacaaaacccccc

SEQ ID NO: 103841 - DNA, 254 bp, Glycine max
  Clone ID: PAT_MRT3847_64786C.1
aaagtgcactatgtcccaccacacggctctattagcatcggatgacacccgccctatgtctataataaggcttttattatctccattgcgtcggagagacacgacctgcttggcgtggaccaacagaaagagagactcttcattcaatggccagcgctcagctctcagaaataccatcgtgcagctctaccgcgtcgcttgaagggcttcgaccttcacctgttcatggtgcttacgctgccagaattgtgatt

SEQ ID NO: 103842 - DNA, 249 bp, Glycine max
  Clone ID: PAT_MRT3847_64787C.1
gattagataatttttttttattccaatttacagggactacaagaagatcgaatcgtgggcatacaaatgtttttccaactaatgccccatcctagatgacctacattggtctatgggacgaaggagctatacattcttagtagttagtatgaatagctatcaacggctgcttcagacctagatattgacataccttatattaagatgcttgcaacacattgggttatacacttttcccgacccgtacca

SEQ ID NO: 103843 - DNA, 456 bp, Glycine max
  Clone ID: PAT_MRT3847_64788C.1
caaaaacacaccatgaagtccaatccaaaatcaaaaccaccaccccacttattatactttctaataatcctctccctatcgttctttttcccgtgtgtatcctcctctagaaaacaacaattcaaagaagcccctcaattctacaactccccaaactgcccctccatcgaacaccacgacatattaagctcctccgaggaagccgtccacgtggcaatgacactcgacacgacatacatccgaggttccatggcggcgatcctctccgtcctccaacactcttcgtgcccccaaaacaccttcttccacttcgtgtgctcctccaacgccaacgccaacgccaacgccaacgccaacaccaacgcgtccctcctacgcgccacaatctccaacgcattcccctacctgaatttccaactctacccctttgacgacgccgtcgtttcaaacctcatc

SEQ ID NO: 103844 - DNA, 523 bp, Glycine max
  Clone ID: PAT_MRT3847_64789C.1
gcttctgcaaataggttgtccagattgcaggaacaggctgaagaatatgcagctctaatcatggaagagttggaccccgaaggacttggctacatcgagctatggcaattggagacgcttcttttacaaaaggacacgtaccttaactacagccaagctcttagctacacaagccaagctttgagccagaacctacaggggctgaggaagaaaagtcctatacgtagaatgagccgcagattggtctactatttgcaagagaattggaggagactttgggttttaacactgtgggtttccataatgattgggctgttcacgtggaagtttattcagtacaagaacaaagatgcatttcagatcatgggttactgtcttctcacggctaaaggtgcggctgagactctaaagttcaacatggcacttatactcttgcccgtgtgcagaaacaccataacttggctcaagtcgaccaagctgggctatgttgtaccttttgatgacaacatcaactttcataaga

SEQ ID NO: 103845 - DNA, 1269 bp, Glycine max
  Clone ID: PAT_MRT3847_6478C.1
caaatccccattagttttcaaaataaagactttgcgtggcacccacaagaaggccacacagtcaccaccaccaccacccatttctcccggtgcgcgactcactttatttttattcatccttccttcctaacagatccgatccccgccacagcggcggaatgatgcccaaaacgattacttctctgtcgtttcgcaggggattgggaagttgtcttttgttgctgcctctgcggctaatgttgttcaggttggcacgaaggagttcacttccaaggtcaaggaaggtggttacgatcataaggtgaatgaaactgtcaatgttgtcactcagaagacatcagagattggacagaggacttggggcataatgaaaggagtcatggctatggcttcccagaagattgaggagtacactaaggatgatccaaactggaagaatgataactggcaacgaaatgagaatgatacaaatggttattatcaggattttaatcgagagaaaaaaggatggaattcttctactggaagagaacaatcttcatcaggggaatataaaactgaaagctctagctcttgggatgattgggaccacaaagatagcaggaaggaagaaccagctaaaggatcaactcattcatcaggtgggcagtttagtacctacaactcaagctcttgggatgattgggaacacaaagattctaggaaggaagaacctgctaaaggatcagctccccataataatgatgattgggctggctgggataatgccaaagatgatggattcgataatatttatgaaggtgctaataagaaaggtgttggtcataaggggaaatctgatggcacttggacagaggaaggctttctctaagatttcaaggtcataatttgaaacaaattattacttgttatacttcttggaccccaggggtgattggacttcattaccagtttcgtgatttgttcctcaagtgacaaaaaaatactgtagtttacgcactgatggcatgcaggccaagcaggggcgccaccaaccaaacatgatactcgattttcagctataacttttaatcccattgttcctttttaaacccagacccattcttctcctttccatcgtttcttcaatattcccttctcttttgtaatttttgggaatgttcgttggagagatagtatccaaaaatgggctaatctcccaaatatcaattcttaagagcattattgcctgcgtagtgcgatgaaacattaatggcagggaaatttcag

SEQ ID NO: 103846 - DNA, 323 bp, Glycine max
  unsure (1)..(323): unsure at all n locations
  Clone ID: PAT_MRT3847_64790C.1
gtgttcaaggaggctcaaaaacagattagagcaccaatgatanaatgataatgcgaacacagtgactgtcttgtatggggaaatgtctgaagtgactcctaacatttaattagctataatgtaatcacataaatattcttaatgaaagtgtaattcatatactcgtacttcgaaaaaaaaaaaaaaaaaaaaaaaaaaaaaaacaaaattaacaaccaagggtgcaccttatgaaatttttcgaattgataaaaaacaaaggatcaactgcaacccctgtttcttatgagggggggccccccaaatgggactctctcaccccg

SEQ ID NO: 103847 - DNA, 152 bp, Glycine max
  Clone ID: PAT_MRT3847_64791C.1
ccagacagcaggcagcagccatgtccaaggtcttcaccctcgacgcggtcgccaagcacaactccaaggaggattgctggtcatcatcggcggcaaggtgtatgatgtgacgaatttttggtagaccacccaggaggtgatgatgttctgtt

SEQ ID NO: 103848 - DNA, 289 bp, Glycine max
  Clone ID: PAT_MRT3847_64792C.1
attgaggcctagattattctgttcaccaaggtagcatatggcgtgccaaatcatgcttgcatccgtcattcctctatagtttgaatttatgattgaattctacccggtggtaacaaatatattcgaccgtactgagcaatgcgattccaatagtggtgtattcaatgggtcgtgccccgaataacgtggtatcagtcgaggcagcttacagagctgtagtactcattgttgaagtagtgattgatgtctatgagccagtctgatattctgatgctccatgatccgatga

SEQ ID NO: 103849 - DNA, 786 bp, Glycine max
  Clone ID: PAT_MRT3847_64793C.1
tgttaatccaacattccaacccatttgatcactcttcacagaaacatcgagcagcagaagaaagaaactacagaaaaaagaaaaaagacatggcttccacttctgcagtttcattggctatgccagtaacttatgccagccagaagagggtactggtgcctagctctgatgcattattcctcaagccactgcctctacgttcttattcttccaaggcaatggcagcatcaaaagtacccaatggaaggtttcaggtgagggcttccatgaaggagaaagttgtgacaggcctcacagcagctgcattcacagcctcaatgatggctcctgatgtggccgaggccgccgtttcgccttctctcaagaacttcttgctcagcatcgccgccggtggtgttgttgttgctgccattatcggtgcggtggtcggggtttccaatttcgatcccgtcaagcgaagctgatcgatatatcaagttctcaggcactactgtgttttttctttttttttttttgttacctcttgtcataatatttgtaatgttcttcagaaatgaagtgaaccctctctcttgtgtgtactaatatgctactcttatgctacacttggagcagaagcttttcagttcttaaatatgtaattttcgtttcgacacatcatagaaatagttaaattacgtgtttatgctgctgcatgggaacacaattatgtagcagaccaatgatagattacattttgaaataatccaattctagggaacgttctacaatattaaatataaacac

SEQ ID NO: 103850 - DNA, 477 bp, Glycine max
  Clone ID: PAT_MRT3847_64794C.1
atactttaattctgaattggagaaatattttatgtatacatcattatatttattgtccatgtgaacatatccaacattttaaagttttatatatatgatgaaattaggggtttaggttttcttgctaaataaccaaccgaagtaatggtgtcaataaaacgatatgttttgtaattaactttaatatggtcaatcctctaacaactaattataattctaacggaatgtatcttctttgttgttaatgcttgtttgattggatttgcttgagcaggaggttttggtagctacttgtttggaatgagttcagatattgctaaacaatctccagaagctactgcacaggatattaaggacccaggtttaggatggatgatagcatttgcatttgttgttagctttcttggcctcttttcattggttccactacgaaaggtacattaattaatctaatgtcctcaaatgaacaacgtattc

SEQ ID NO: 103851 - DNA, 645 bp, Glycine max
  Clone ID: PAT_MRT3847_64795C.1
atgtgcttcagctgttggtttgcttcatgtctacctatacgaaatggtcttgaacaaggttgaagaagcaagtttagcaaaaacaattgtctcactaatattgttggcgctgtttatagaactgagtgctgacctctacaaagccggaatatcgaacaacattgaagcctacattttatttgctgctgcagaatttatatggtttttcttggataggacatggccaggtttcaccttggcatgcattgttgggcttggttgcccactagctgaggttccaattatgaagttgttccacctttggtactatcctcaagcgaatattgaaatatttggccagggactagttacttggacactcacttgctacttcgtgtatacgccattcttgatcaatttgtcacggtggctgagaacagtttatgctcctcaaacagaggactctgcctagaaaattatgtacctgtgctgtctattccattatgtagtacttataaatagcatcaatttgcagcctttgacaaacacattgtggcaaggcattgtaataaggcattctagcttaaatatatgatactcgtgcatattcacaatgacttagcgacttgaatcaattctctattttaaatttcccaaaaaaaaaaa

SEQ ID NO: 103852 - DNA, 635 bp, Glycine max
  Clone ID: PAT_MRT3847_64796C.1
gcggaaccgatcgtagcagcacatacctaaaagatggcgtctcacggcgtgctggagaactcccccaatgcggccatcaacaaggccgtcatcgggcggctcatggagctgcccctgccgcccaacaaggtgctggccacctacgtctggatcgacggcaccggcgagaacctgcgtgccaagagccggaccctggacttcatccccaaggcagtgagcgacctccccgagtggaactacgatggtagctcgacctaccagtcggagggcagcaactccgacacgtacctcaggcccgtcgccatgtaccgggatccgttccgcggcggcgagaacaagctggtgctgtgcgacacctacaagtacaacaagaagcccaccgagaccaaccgtcgcgcggcctgcgccgccgccatggaggccgccaaggagcacgtcccatggttcggcattgagcaggagtacacgctccttgacatggacggcagaccgtttggctggcccaagaacggtttccccggccctcagggcccgtactactgcggcgtgggcgccaacaaggtgtacgcccgcgacatcgtagaggcccactaccgcgcctgcctgtccgccggcatcaacatttccggcgagaa

SEQ ID NO: 103853 - DNA, 216 bp, Glycine max
  Clone ID: PAT_MRT3847_64797C.1
catactccaaaacgttatttgccattccatgcactcaacttaaatacaagatctccttcacgctcgaatttcaagctctgaattaatgaatttatctactcacttctaaatgctttaatcatattctccgctcttactcttcctcaatcactgactatctgatatagatcattcgcatactattacactattcatctcactcaaaatccaacaata

SEQ ID NO: 103854 - DNA, 151 bp, Glycine max
  Clone ID: PAT_MRT3847_64798C.1
gatcattcctgagaagacccgaagggagatctgcagatacctcttccaagaaggagtttgctttgcgaagaaggacttcaatatggtcagagcccctatgatagacgagcccaatgtgcaggtgatcgagctaatgcagagttttaagtca

SEQ ID NO: 103855 - DNA, 1018 bp, Glycine max
  Clone ID: PAT_MRT3847_64799C.1
aattcggctcgagctcgtcatcacaagcttgaagactcaacaaatttcagtaccaaaatccaaccaagtctctactattatccattattgtctgccacatcttcccttagtactagaaatgaggctgccacaactaaacttgttcttagtgtcatttttgttgctctttgttgccagagcaaatggttctctgctcccattcatagatcctcccaccactctcttggctgatctctggtccgatcgcttcccggacccgtttcgagtgctggaacagattccatttggtgttgacaaagatgaaccctccatggctatgtcacctgctagagtggactggaaggagacaccagaggggcatgttataatgctggacgtgccggggctgaagagagaagagataaagatagaggtggaggagaatagggtgctgagagtgagtggtgagaggaagaaggaagaggagaagaaaggggatcactggcatagagtggagaggtcctatggcaagttctggaggcagttcaggttgccacaaaatgtagacttggattctgtcaaggccaagctggagaatggggtgctcactttgacacttgacaagttgtcacctggtaagatcaaaggtcccagggtggtcagcattgctggggaggatcagcaacaaggtaacctcaacagtgatggggtcaagcaggagctttgaattgctgttaaatgatcatgttatgttagtccttctgagtaatgtcattaaatgatctgtgataaaaaatgtatgtttaatttgtgaataaaaagggttccattccaccaagacctttggtggaaggggttacttattgatctttgctggtgatgagtgtgtgtgtgtccagtaatgtacaggctttcctatatcctaatgaatgaggagttttcttgttctaaaaaaaaaaaaaaaaaaaaaaaaaaaaaaaaaaaaaaaaaaaaaaaaaaaaaaaaaaaaaaaaaaaaaaaaaaaaaaaaaaaaaaaaaa

SEQ ID NO: 103856 - DNA, 2795 bp, Glycine max
  Clone ID: PAT_MRT3847_6479C.1
aaacacagtgttgattcccaaatccccattagttttcaaaataaagactttgcgtggcacccacaagaaggccacacagtcaccaccaccaccacccttttctcccggtgcgcgactccatctattattcatccctccctcccttccagatccgatcctcgatggcggcggcgtcgcggaggctccgggacctgcagtccgaggccgggaacaagatctgcgttgactgctcccagaagaacccgcagtgggcctccgtctcctacggcgtcttcatgtgcctcgaatgctccggcaagcaccgtggcctcggcgtccacatctccttcgtccgatcggtcaccatggactcctggtccgacatccagatcaagaaaatggaagccggcggcaacgacaagctcaacgcattcctcgcacagtactccatccccaaagaaaccgacatcgttacgaagtacaacaccaacgccgcttctgtttaccgcgaccggatccaggccatcgccgagggccgcccctggcgcgatccgccggtgttgaaggaaaacctctccgccggaaaggggaagccgccgctgacgcaaacgcggaggaataatgaaggtggatgggatgattggggtaacgaggcgagtccccggagcaagagcaagtcgaccggggattttaggaatttgaacggcggcggcggagcgccggcgaggtcgaggtcgacggaggatatctacacgcggacgcagctggaggcgtcggctgcgaaaaaggaggacttcttcgcgaggaagattgcggagaacgagtcgcggccggaggggctgcctctcagggagggaagtatgtcgggtttggatccagtcctcagccctcagcggcggaatgaagcgcaaaacgattacttctctgtcggttcgcacgggattcggaagttgtctttgtttgcttcctctgcggccagtgtcttcctgtgtggcacgaggtccttcactcaccgtgtcatcggcgttggcaatcttcattaggcgaatgaaactccaaaggactcctggtccgacatccagatcaagaaaatggaagctggcggcaacaacaagcgaaacacattcatggctccgtagtccattgccaaatacaccgacgttgatccgaactgcaacaccaatgccgctcaacgaaatgagaatgatacaaatggtatttaccaggattttcctcgacagaataaaggatggaattcttctactggaagagaacaatcttcatcaggggaatctaaaactgaaagctctagctcttgggatgattgggaccacaaagatagcaggaaggaagaaccagctaaaggatcaactcattcatcaggtgggcagtttagtacctacaactcaagctcttgggatgattgggaacacaaagattctaggaaggaagaacctgctaaaggatcagctccccataataatgatgattgggctggctgggataatgccaaagatgatggattcgataatatttatgaaggtgctaataagaaaggtgttggtcataaggggaaatctgatggcacttggacagaggaaggctttctctaagatttcaaggtcataatttgaaacaaattattacttgttatacttcttggaccccaggggtgattggacttcattaccagtttcgtgatttgttcctcaagtgacaaaaaaatactgtagtttacgcactgatggcatgcaggccaagcaggggcgccaccaaccaaacatgatactcgattttcagctataacttttaatcccattgttcctttttaaacccagacccattcttctcctttccatcgtttcttcaatattcccttctcttttgtaatttttgggaatgttcgttggagagatagtatccaaaaatgggctaatctcccaaatatcaattcttaagagcattattgcctgcgtagtgcgatgaaacattaatggcagggaaatttcagaaatgtagcctcttaatttgactgcttataattttatgagtgcccttccctcgcctgtttctcataatttaacgttgttatttgtcaaagaatcacaactcaagctgttggtttgattgggaaacttaacgttctacgttctgttgatccagctaaaggatcagcttcccataataacaaggattgggctggctgggataatgccaaagatgatggattcgataattattatgaaggtgcatctaataagaaaggtgttggtcataatgggaaatcagatggcacttggacagagggaggctttctctaagatttcaagtacataatttgaaacaagttatcacttgttatacttcttggaccagggttgattggacttcattaccagtttcatgatttcttccttaagtgacaaaaaaacactgtagtttacgcactgatggcatgcaggccaagcaaggatgccactaaccaaacatgatactttattgttggctataacttttaatcccattgttcctttttaaactcagacccaatgtgcaagaagaaagattttgttaaggttaaatatattttcagcaagtcatttttcttattttcctttctttcttcaatattcccttctcttttgtaattttttgggaaagttcgttggagagatagtatccaaagaacgggctaatcgtccaaatatcaattcttcacagcattattgcctgcgaagtgtgatgattagtgacagggaaatttcagaaatgttttgaatttgtagcctcttaatttgactgcttataattttatg

SEQ ID NO: 103857 - DNA, 165 bp, Glycine max
  Clone ID: PAT_MRT3847_647C.1
acgaaagggaataccaataagttatcctccaatagttttccaggtacctcacggtttcaacctcaggagtttggaatccaggcaacgtcccttatgggaaccaccagttctggcactcctaaagcaactcccttcctaagccaatgcaacggtgccaatgccaat

SEQ ID NO: 103858 - DNA, 461 bp, Glycine max
  Clone ID: PAT_MRT3847_64800C.1
ttggaaccgggtttcatgtgcagaatctaattagttttggtggaggatttacgtgtcttttcagattaatgcttcttggtgttggaggtgatatattcattaaagagtgtctagaatttatgagagattcaaacatgctattgatcatgtggtgaaccaaaaaagtaacttagttggtgctcctgtgggaaaggagataactaatgtagaatcttggcagtagtcagattgatgactttaagttctcgagaggcagttgatcaaacacaattagagctggatgatgtgagggtgagtattgacagttcaaggtctatctccaatcctctgcctcaagagaaaagttatttggggttgtttctagaaatggcaataaacaaatccttggaagatcaaattcaatcaatggcagtcattcagttccaagagatgaccaagaatatggggaggaacttttttgt

SEQ ID NO: 103859 - DNA, 353 bp, Glycine max
  Clone ID: PAT_MRT3847_64801C.1
aacactcttacccaaaatcttacttgaattttatatttttaagcccaactatattagcggggtctaaacaaccttgaagtggggtgtgcttctctctctatgtatatattgcctagctctgttaataacaacaacaatcctttatcctaagccacctttatgcttcttctttttcttgaacctaatacgattctcttttccacattatgcagttgttaaactctatagtttattataatgcattttttttatgataatgctttgtataatattttattgtttttttatgtctttcttttattgttgattcttttttttttttttttctttcttttaatattttcttttattat

SEQ ID NO: 103860 - DNA, 174 bp, Glycine max
  Clone ID: PAT_MRT3847_64802C.1
acaagttcatcaattggatctcaagaatttgctgcaaaatgatgtcaattatgcttctagaaatgtttttctcttcttgattatttgtaaagggaaattaaactagacggaattagtgtatcaacaggtaaaaaatgtgttggtgtttttttttttaattattataatgattgt

SEQ ID NO: 103861 - DNA, 470 bp, Glycine max
  Clone ID: PAT_MRT3847_64803C.1
gacgggtcatgcacccgaccataaggtgggcgtcctgctcgaggtccttccggaccgtgtaccagggcgatttgtgcatgtagtcctgcgtgccccttgggcttgggaccattttcactggccagggcgcccgccacgcgcataagacagggcctccgtcgaggaacaactaacgacgtcgcaggtaagcccacctctagcaagacgcacgacccagtctctcatcctgagattgctgctctagagatatcagctccccccccaccgtcattctaatcatcgactgggcctgcactggcgcgccctctgtgacacgagcaacgggcctgagcggcatcctcctatgataaaaaatggtcgaaggggccagcctgaagactatgttgatactggacgcagctctgctcgctgactatgttgtgggcagcggccaggacatgcccgttgaggatgtgcagttctgttggggg

SEQ ID NO: 103862 - DNA, 563 bp, Glycine max
  Clone ID: PAT_MRT3847_64804C.1
aaaaaaggaaaaaaaaaacccccccttatttataaaaaaaattttcacggaaacaaagggaaaacaaaaaacggatttggaccgcataaaaaaccttccaaagggttaaaaacccattatttgggcggagggaaaaaggcccaaaatggggaccaaaaaaaaaaaggccagtttgggaaaaaaagggggggccgggaactcccaaggaaaggaaaaaagggaggggccgaccacaaaagcccctttttttaaaaggtaaaaggggaccaaaaaacccgggggcaggggggaaaccccggggcattaaattttaaaaaaagctttttggccccaaaaaaaaatttttaccggggtaaaacattccggggaagggaacccccccattgggggggggggaaaccaccccggcccacccacaattaaaattattcaatttggcaaaaaaaaaaggaaccccaacgggttggggaaaccccaacgagcagtaagccccaggggaatctacccccaaagggtaggattaaaaattggcccttaaaaaaaaactacccaagcagggccct

SEQ ID NO: 103863 - DNA, 472 bp, Glycine max
  Clone ID: PAT_MRT3847_64805C.1
cgctcctacgcgtgcgatcctcagatgcatcaaggggaatattgtaaacggcggtggtggactcgtagcagacatctcgtgcaggggatacatgaacagagagagcaattacgatagcaacagctacgcaccatcaaacgactacaacacaaggaccaactacaatcaggacagtgcatacagtcgtcatacaaatggatacgacattggaggaatgtcaatgttcgacttgctcagccacttcgacaggtacaacaacgataacggatatagaaagggaagctccagctccgaatcgtacagctcgtcaggcagccatgagaggaagagaaaatgctaacgatgccgtcgcgtgaagactacgacgttcacttcagcatcagcaggcattacttcaattactccaccgtttcagcaaaccacgccagaaattgagtaccttttcgacaaaggatgtaaaagagcgatcatc

SEQ ID NO: 103864 - DNA, 237 bp, Glycine max
  unsure (1)..(237): unsure at all n locations
  Clone ID: PAT_MRT3847_64806C.1
ctcgctccgatttgtttcaattacgacatagtcgcgataattgcctctttttttttttttgngttatcaggannccctctgaatcnggggattaagagaggattntgcancagagggtaaagttgtcagcaacaacnggcccncatgcagcaanctttgcttcancagnngcagatgaaccacccnggnatgctcgccgctgctatgcctcanatggagcctgttccaatggaaatg

SEQ ID NO: 103865 - DNA, 307 bp, Glycine max
  Clone ID: PAT_MRT3847_64807C.1
tttcccttgcgttcggaggggcgggcggtctatacctccgttggagcaaaagaagagcctccgtttggactccgatccggactggctgtggagccattgttgtgcctggcaaacgcgaaccaaggcagacggtgaactgcgaatataagaatgtgctcacaagatgcagaacagccagggacgatgaaaaacacaagggatatcacaaggcgggtatcaagaactatccagataacggaggagcacccgacaagactgaggagttaggtcaaacctatgaggggaagagagatcctgaaatgcaaga

SEQ ID NO: 103866 - DNA, 713 bp, Glycine max
  Clone ID: PAT_MRT3847_64808C.1
ggctcgagaacacaacaaaacacacataataaacatattacaacttcttcttcttcttccattgaccattgttgttgttgttgcttttgttcgttctcgccatgccaatgttgtcttcgagaggcttcatcgcttatctcgtatctgctttctcttgtgctgttctgtctgcgctttttctcaccaaccacatccatcatgatgataacaagccaattactttgttagcctctcgtgtgtctgaaactcttaaagtttggccagacttggagccaagttggagacttgtgttggcaacggttattgggtttcttggatcagcatgtggaaccgttggtggggttggaggtggaggcattttcgttcccatgctcaatctgcttcttggctttgatactaagtctgctgctgctctttctaaatgtatgataatgggggcatcagcatcatcggtttggtataatgtgagagtgccgcatccaacgaaagaggtgcccatattagactatgatctggctcttctgttccagcctatgctcatgcttggaatcactgttggtgttgctctcatgttgtcttcccctactggcttatcactgtctcatcatcattctcttcatagggacttcttcaaggtctttcttcaaaggaatccagatgtggagggaagagaccattttcaagagagaaaagaccatgcagcgagcgacttt

SEQ ID NO: 103867 - DNA, 336 bp, Glycine max
  Clone ID: PAT_MRT3847_64809C.1
gggaaaggcccaaattccaagggtttgaaaaaaccttaaataaacccggaatggccaaaaaaaaccctaaaaatccaaaagggtccaaaacccccccaaaaaaaaaacccccaagggttaagggcccaaggggttttcaaaaaccccaatctcccccccctcgaaaaatcctgaaaatgggggcccaacaaaaccggtgccccctgggagggaaccctgacccaaccgaaaaaccctggccctttcgctaacgggggaaccctttccaaacccgggaaaaacctcaaatcccggttcccaaaaaaaaacccccccaaaggcgaacccgcctttctt

SEQ ID NO: 103868 - DNA, 759 bp, Glycine max
  unsure (1)..(759): unsure at all n locations
  Clone ID: PAT_MRT3847_6480C.1
aaatgctaagaacaaagatgcgccgccagtgcagatagatagacacctatcaatattcaatctatcaaaacgctctttgttccgaaggcaaacacagatctatatgaaagagcaaaaccagtacactctctattttttctttcactaaattggattcctagaatctcagtggagccaattaaggctctgcgatatgcaccatacgttattcggtgttgttgtgcttttgggcggcgagattgagtgggagaaggagagataattcctcactcaaatttacatatcatcattgtaatttattgttttccattctgctccccttttgattgcattgcctaaatatccagcaacacgtaactttgaaatttttgatgcgttgccttgggagaattttaaacactcttaacaccctaattactaattatttctgcgttgcatccttagttattaccagtattactatgctttccgttcttgggtttcgttactcctaacgttggttgtgtttttttgaaaattgactagtatcagggtgatggcagcgacggcggtgacggagacggaggcggtgtggtccgttaagtgctattgctgtgggttaacggaggagtgcacgccgcgttacattgacggcgttagggagaagtatcagggtcgttggatttgtgngttgtgtgctgaggcagtgaaggaagagggtttgaaattgaaagaatgatgatgttgatgtgatgttgatgttagcaccgatgaagcact

SEQ ID NO: 103869 - DNA, 309 bp, Glycine max
  Clone ID: PAT_MRT3847_64810C.1
aaaaaaaccccttgctgcctcgctggctcgctcactgactcactgacttactggggcattgattcaccccactcgaacaagttcaaccaaaccattttttattttttaccccccctccaggacccaattaatctacagtttacagggcaagccgttcggggggggaagcttccaggcggaggttgcaattagtggcccattttgccctccaaacatgaggcacccgttttttttctcaaccctataacccgcaccccctgcaaatagaacaagtaacatactcctttttttgaaccccttggaccccaa

SEQ ID NO: 103870 - DNA, 126 bp, Glycine max
  Clone ID: PAT_MRT3847_64811C.1
ataaaagaaatgaattgaatttcattttaataagaattccattttgtaatatttaggttcaaatcggaatttatgaccacaagttccaaactggacttattatttacaggccttgaatgtcatcta

SEQ ID NO: 103871 - DNA, 252 bp, Glycine max
  Clone ID: PAT_MRT3847_64812C.1
tggggttcatgaggtggaggcggtagcagaggtgtttaccgtggaacttcccagacttatgcagctgcagcatcaactgaacatcctgcgtgttacacatacttgggtgcgatctgatgccttgcgataatcctgtcgtcacacccgcatccgatgttcactattatgttctcatctttgacattagtctcgctaagatctatcgacattgcatttcacggactgtaaggttcattccatcttatgccttga

SEQ ID NO: 103872 - DNA, 256 bp, Glycine max
  unsure (1)..(256): unsure at all n locations
  Clone ID: PAT_MRT3847_64813C.1
ctctcntctctctntctctctttctctctgtcnagaatgcctctattctcctctgncggtcanacacagcgatagatagataatagagannagaaggattcanaggcgccaattgtagagtgagagannagtttctgtnttttctacttttccatttttttgggagacactagagagagagagatctgattcttcaccatnactgtcantgcnttgcttntctcactcagcacaagttgacaagaagggcattgcc

SEQ ID NO: 103873 - DNA, 129 bp, Glycine max
  Clone ID: PAT_MRT3847_64814C.1
caatgggaccattcacgaatacaactcaacgagagcaacaggttaaatttctacaatacccggataacaacctacttccaatagtgttataaatgacaagactacaccagactacggaagacgacataa

SEQ ID NO: 103874 - DNA, 431 bp, Glycine max
  Clone ID: PAT_MRT3847_64815C.1
acttaatcaaattgacatactaaaaattggcataactgcgactcaaagagcaatcgttaaagctcaggctcctgctaaagaaccgttgcttaatttcaactgtgaaattgcctgacactataagaaaccctaatccacgacgcaatgtaaaaatcggaaattttctagccgccgaaaccgctgagggggctgccctgcctgttgagggcgtaaacaacgttcatggcagtgacggtattgcggggagcgtgctcagtgttggcgacagcgtcgcaaatgacgttctcaaggaagattttgtgaacaccgagggtttttttgcagatgagaccactgatactcttgaggccgccacttgtggggagacggataattgggggcttagttatgccctgaatgttatgcctcagaaccttacggtgtcggtgagc

SEQ ID NO: 103875 - DNA, 254 bp, Glycine max
  Clone ID: PAT_MRT3847_64816C.1
tggggaacaaactcccttgtttgggagtttgaaaataggtaggatggaaaaggaattcaagagcatctattcaccctttgttccgctgaaaattggttggaattggaagaaattaaaggtttcttgcccttattaatcttacgaacaaagggaaagttagctttgttccattccttaccctggcctgtccaatttatccctaattgtcccattccattctataatcaaacactgttagagttagccatcccatt

SEQ ID NO: 103876 - DNA, 227 bp, Glycine max
  Clone ID: PAT_MRT3847_64817C.1
cacggctgcgaaaacaccacagagggggacgtacatgtatattcactctaccgatactgatgcccgttgcattcatcctggacttcattggatggaacatgtcctaatgcttgtgataaagctcgcttgtgaggagtgtggctaacatggccacaccttactttcttttggcaccttggttacgttcctagtttgaccactggacttgggtcatccttaacaaatac

SEQ ID NO: 103877 - DNA, 505 bp, Glycine max
  Clone ID: PAT_MRT3847_64818C.1
ttttaggaatccaacgtgattgccagttgagaggctttcgccaagtttttggtgaagaacgaacttcctccaagtctataagagaaggtcttttcaaaaagagcttgggccctttgacaaccgaagaggtcaagcaaatggttcaaaaattgcacgttactttaacaactttaaaaaacagaaagcattcaagcagaaggagtagcagaatcaagcttcagagtattcaactttcttaccaagaaccgattacaaaaaccggagaatgtcgatcctttgaaatcaaaagacccccaaaaaattactaggaccaccatttcccagaagggatgttaaaaatgtcaatggaagaaagaaaatgaagtcatctaacaagaaaaaaaccaccagaaattcctccacctccaggagaaaaatggcaagaaggactttatggagatcagtgatgatgtgagcttgaaaaactgttgaagaaaaaaagaagaagttgataaattttacgttt

SEQ ID NO: 103878 - DNA, 2041 bp, Glycine max
  Clone ID: PAT_MRT3847_64819C.1
ccacgcgtccgccctccgttcgaaaacctcggttcgactcatctgacaaacgaaactcataacagtgaaagaaagaaaaaaaaacactgcacaaaacaatggctttgaatttgattcatcgaccagccactaaaccaccatcttcctcctcctctttcgtcacccctcgccctttgcggaccacacagagcatccctgtgaggaactcgcggcgctccatcgccgtgcgcgccgccgccacggaggctcctgtggctactattacggcggcaagggagtgcagggtgaagtcggtgaaggcccggcagatcgtggacagccgcgggaacccgacggtggaggtggatctggtgacggacgggcttttccgagcggcggtgccgagcggcgcgtcgacggggatttacgaggcgttggagctgagggacggggacaagagcgtttacggcgggaagggtgttcttaacgccgttaggaacatcaacgaggtcttggctcccatactcgttggcgtcgacgttaggaatcaagctgatgttgatgctattatgctggaaattgatggaactcctaacaaatcaaaactaggggctaatgcaatattgggagtttcgctgagtgtatgtagagctggtgcaggggcaaagggagtgcccttgtacaggcacatccaggagatttcaggaacaaaagaacttgttatgccagttccagctttcaatgttataaatgggggcagtcacgctgggaataatctggctatgcaagagtttatgatactaccagttggagcaacttcatttgctgaggcactccgcatgggcagtgaagtttatcatgtattaaagggaataatcaaggcaaaatatggacaagatgcatgtaatgttggagatgaaggaggatttgctcccaatgttcaagataacagggaggggcttgttttactcatggatgccattgacaaggctggttatactggcaagattaaaataggtatggatgttgcagcttcagagttttacactaaggatgggaagtatgatttgaacttcaagaaaccgaatcggctcgaggctcatgttcactctgctcagagtcttggtcaactatataaagattttgttaaagaatttcccattgtgtcaattgaggatccgtttgatcaagatgattggggttcgtgggcttcattgctcgcttcagttgatattcaacttgtaggagatgatttgttagttacaaatcctaagagaatagctgaggccatcaaaaagaaggcttgtaatggtttgcttctaaaggttaaccagattggtacagtgaccgaatctattcaggctgcacttgactcaaaggctgcaggttggggtgtcatggttagtcatcggagtggcgagactgaggataacttcatcgcggatctctctgttggcttggccagtggacagataaagactggtgctccttgccgaggtgagcgattggcaaagtataatcagcttcttcggattgaagaggaacttggaagcgtgcgatatgctggtgaaactttcagatcaccttagagtgaactcaattgatccaaaaaatcttattctggaaaagattctgcatcagaatcattgtcatcattgaatttaccaaggaaaatcctgagttttgatatagttgctagccttctggggttttcagatctacttgattagccttaagatatgttttgaactgaaattaccatgtgattggatgataacttggtgcagtaacatggtttcgtcggtgtaactttttttctttttttgaaagaaccctgcttgtgaattagtccccctgcttacgacaataagattttatagtgtgtcatcctttgaagaagggagaggtttagacgttgttgtttggtagttcagtgtttgtaatggtatttctctacataacttatgaacaattcccgtttgttactaccaagcattagtgatataggattgcaatttcttttgcctcaccttgcgcctagaaaggagatctgttaacttta

SEQ ID NO: 103879 - DNA, 803 bp, Glycine max
  unsure (1)..(803): unsure at all n locations
  Clone ID: PAT_MRT3847_6481C.1
catgcctgcagattaagaagacaatgtgcatgctatcacttgacaaaacagacgatggcatgatagtctgcggacgattcgctcgccgtatgcccaagagtaactggtttttttcattcctgataaagggaataagaagaatggttacaataatatcttatagttcctttgaatagattccagtcatgcagccatggcctatatagatgcaattactgacgatattgctttatggacaagctaacaagctaaaacatatttctcaggtcaaaaagctcccatggaagtagactagaatctcggaaccaagctcaacgcggcatgttccggtattgccaattcagtagacattatttttaaataatggagaactaatataaatataacatgacttctcagtttaaatatatctataactaaaactgtgcacacagatggagggagagaaaaggaattgaatttccaataggtcaatttaatgaaaatattaaaaattatatgtaccagatgaaaaggactgaatcaccagcaacaagcctcttggcactgacaaagacactccaccnctgtagtaagaagatgccttttgggctgacctgaaagcgaaaatataaagcagttagaagtgaaaacanttaagtaacaatttaagcagctttcatgacatcacatatcacgactgttgcttgttgatcattcccttggtttcactacagacaatttgtaaaacttgatatggaaaaggattttcaggaggaaaggaagagccaaagatacatgcaaatgattaaggactatacact

SEQ ID NO: 103880 - DNA, 1106 bp, Glycine max
  Clone ID: PAT_MRT3847_64820C.1
ggagggtcctagacctcgaatgctaggaaacattgagctgattttcagttcataacaaataatcaaggcaaaatatggacaagatgcatgtaatgttggagatgaaggaggatttgctcccagtgttcaagataacagggaggggtttgttttactcgtggatgccattgagaaggctggttatactggcaagattaaaattggtatggatgttgcagcttcagagttttacactaaggatgggaagtatgatttgaacttcatgaaacagccaaatgatggagctcatgttcactctactcagagtcttggtcaactatataaaaattatgttaaagaatttcccattgtgtcaattaaggatccgtttgatcaagatgattggggttcatgggcttcattgcttgcttcagttgatattcaacttgtagatgatttgttagttacaaatcctaagagaatagctgaggccatcaaaaagaaagcttgcaatggtttgcttctaaaggttaaccagattggtacagtgaccgaatctattcaggctgcacttgactcaaaggctgcaggttggggtgtagtggttagtcatcggagtggcgagactgaggataacttcattgctgatctctctgttggcttggccagtggacaggttctatatccttaatttttttttggtgaatttaatctttttagctaccatacattatactgtggtgttatcactttcatattgattatccaaattttgtcctctagacaaagactggtgctccttgccgaagtgagcgattggcaaagtataatcagcttcttcggattgaagaggaacttggaagtgtgcaatatgctggtgaaactttcagatcaccttagagtgaactcaattgatccaaaaaatcttattctggaaatgattctgcatcataatcattgtcatcattgatttaccaaggaaaatcctgatttttgatatagttgcttgccttctggggttttcagatctacttgatgagttagtcttaagatatgtgttttgaactgaaataattactatgtgattggatgataacttggggcagtaacatggtttcgtcggtgta

SEQ ID NO: 103881 - DNA, 1355 bp, Glycine max
  unsure (1)..(1355): unsure at all n locations
  Clone ID: PAT_MRT3847_64821C.1
ccacgcgtccgaaaacacaaaacattctttccatttcaacaaaccaaactcaaaacacttcacaaaacaatggctttgaatttgactcatcaaccagccattaaagcaccgtcttcctcctctttcgccgcctctcgccctttgcgggccccgcaaagcgtccccttgaggagcccgcagcgctcacttgccgtgcgcgccgccgccacggagtctccggcgccggcggttacggcggtgagggagtgtaaggtgaagtcagtgaaggcgcggcagatcgtggacagccgcgggaacccgacggtggaggtggacctggtggcgaacgggcttttccgatcggcggtgccgagcggcgcgtcgacggggatttacgaggcgttggagctgagggacggggacaagagcgtttacggcgggaagggagttcttaacgccgttaggaacatcaacgaggtcttggctcccaaactcgttggcgtcgacgttaggaatcaagctgatgtggatgctattatgctggaaattgatggaactcctaacaaatcaaaactaggggctaatgcaatattgggagtttcactgagtgtatgtagagctggtgcaggggccaagggagttcccttgtacaagcacatccaggagattgcaggaacaaaggaacttgttatgccagttccagctttcaatgttataaatgggggaagtcatgctgggaataatctggctatgcaagaatttatgatactaccagttggagccacttcatttgctgaggcattccgcatgggcagtgaagtttatcatgtattaaagggaataatcaaggcaaaatatggacaagatgcatgtaatgttggagatgaaggaggatttgctcccaatgttcaagataacagggaggggcttgtcttactcatggatgctattgagaaagctggttatactggcaagattaaaataggcatggatgttgcagcttcagagttttacactaaggatgggaagtatgatttgaacttcaagaaacaaccaaatgatggagctcatgttcactctgcccagagtcttggtcaactatataaagattttgtgaaagaatttcccattgtgtcaattgaggatccatttgatcaagatgattggggttcatgggcttcacttctctcttcagttgatattcaacttgtaggagatgatttgttagttacaaatcccaagagaatagctgaggccatccaaaagaaggcttgcaatggtttgcttctaaagttaaccaaattggtacagtgactgaatctattcangctgcacttgactcanagctgcnnagttgggtgtcatggttagtcatc

SEQ ID NO: 103882 - DNA, 661 bp, Glycine max
  Clone ID: PAT_MRT3847_64822C.1
cattctcgatcgtgtgagaactgtagaatcgttgcctccgttctgggctccctgagggtggacgcctacgctggccttccggactcctccgtgcaccctctgatcgcccatcacccgcgctccctctggccactctgaagacatcgctccactgcacgatgggagagcactcacactgcttcagcactgctactcgcccctatcttacacgaactatctgaaagtcatgctcgttacaggaacaactaccggctcgtattcctcatctaggacgcatgcacacgaccaatgacgaactcgtctgaacggaagaaaccttgtatccacttgacgaatgtcgcttccgacatagcctcgctcatgaatctatagaccattacttaactgcgccttctctcgtaccttattacaagagataacaattctgcttctctcgataatattcctgtgctgagcatgtagaatcatcgtatagactgtagtgttggtcacgtgactgctgcttcagagatttcagcagcaaaattgattcaccatcctgccagaaccccccctcccattactactcatgcgatgcatgtttctcagggctctccagctggtggcatcgaggcacttctgcgagaaccctaggggcactcccccactaacaacttgacgg

SEQ ID NO: 103883 - DNA, 300 bp, Glycine max
  Clone ID: PAT_MRT3847_64823C.1
gaacatagatgtaactttttttcacttggcaaatgggcaatgagtgtgggaaagtaccaaagacaccgcatatttgcaggggaagggactagagtggggtccagcaggtaagaaaaactgaataaaggagtcagggttacggtgctgacactgcaaataattgcacgcacgaataagccaccgacacacacacccccaaacctgctctctgcatctgcatctgttcccccaaaccataaataaataacactttccctcagtcaccacaatttcattttctttgtaaacatacccaccacc

SEQ ID NO: 103884 - DNA, 229 bp, Glycine max
  unsure (1)..(229): unsure at all n locations
  Clone ID: PAT_MRT3847_64824C.1
tcttttcctttgttaatcagcaaattctaccttttaccttaaagatattatttcttctcttagctccgcttcgataatttattgtagatntcatcctgaataattatgttaatgatcgtagcctgttatttgaattcaacttggctatttgtttctgtntgtgggtatttttatgtttttatgtggaattcttgatagtttcgtgatttgttaccaagaaatttgtgga

SEQ ID NO: 103885 - DNA, 359 bp, Glycine max
  unsure (1)..(359): unsure at all n locations
  Clone ID: PAT_MRT3847_64825C.1
caaaaccagtgtcattgcttcaccagatttccactttattgcatcatttacaaaattagttaattcgatcctcttcagcttcaccttccttgggggcaggttttcaaggactctgaacatttgatccatcaccatctcttcttagcagtgaggtgaggtgaggtcactacaatggcttctgcttgtgtgaccctgaaagccaatacccatttagcaaactctgagaaaggctttcttggagaaagaataaaaagtggcttcaacaacagtgccttggtgatgaatcagatggctatacgttctagaagccacaagagggtgaaacatggngttggtgttgtatcttctagtctcacatc

SEQ ID NO: 103886 - DNA, 454 bp, Glycine max
  Clone ID: PAT_MRT3847_64826C.1
caaacacgttccaaaacactatttagaaaagggacagatacatgtgcattaacaaattcccctacgccttatcatacaaagtaacccacctcccatgcaatggcttacatactgacgactcctcatattgcgtatgatgaacttgaactaacataacgaaggattataaccccgtttggctgtccatgcatggccactcgagtccggaccattttatatgtaaccaactcccatgggcttacataggcacccccacagacttgaattacttccttttaaagttcaaaccctacaaacctgcctaatgtgcgtgaactcgagagaaaagcctttgacttgaatgtgaaccacatttgtagattaaggctgggaagatttgcttgccaccctgaaacttctcttctcaagaaatgtttgaacagattgcctttcagccaggggagattcatcttgc

SEQ ID NO: 103887 - DNA, 371 bp, Glycine max
  unsure (1)..(371): unsure at all n locations
  Clone ID: PAT_MRT3847_64827C.1
ggctcgagctgaaataaatgaaatgtcaactttaattttgaagatttaattactcacttggtttttatacttatgtaatctttatcttttagtatacacctagaaaccactcattttagttctctgagagcaaaaactcaagtttatggcaatgacacaacattgaccatgtctgtgctttatgttttatagccgttaatatttgtgctatttttacttgttggtctttatatctaaacaatgtacattttggtctttacgcctaaaaatatacatctgttccctacacttaaaaataatgtacgttttagtacttnnnaaaacaacagaagcaaagggaataagataaaaaaaaagataaaaaaaacagg

SEQ ID NO: 103888 - DNA, 404 bp, Glycine max
  Clone ID: PAT_MRT3847_64828C.1
ggctcgagagaagaccaagtctttgttaactgagaaggggaagcaatgggctcactaactgatctcttgcccagctgctaccactgtgaaccgtgccgaggccggcatggttgctccattcactgtcctcaagaccatggctggcttccccaccaggaagaccaacaatgacattacctccattgctagcaacggtggaagagagcaatgcatgcaggtgtggccaccaggtggcaagacgaagtctgagactctttgctacctgccagaccttgatgatgcacaactggcaacggtagtggaacaccttctcaggcagggacggattccttgcctggaattcgagtcggagcacgggttcgcgcaccgtgagcacagcaggtcaccatgattctacgatggac

SEQ ID NO: 103889 - DNA, 430 bp, Glycine max
  Clone ID: PAT_MRT3847_64829C.1
gggggggtcaaaatctgaattggttttcgttgcaaccgattttggtattttggaaatttggggtagttaatgataggaagaaaaagaggtgagaatgagtgggtggagagatttttgagtatgtaactatcaagtgcttctttaagagatttggcgatttattatctacaaatggggtttggaatatgcagcttcatatagaaaaactgaagggtgattggtggggactttttttctttttcctgattgtacgatgacttaaatatatttattgaaagggggaaatttaaaatttagcttgatcttgagagttgagacaactgtgtagctaattgtatttactaaattgaaagcttagcttttacaattggccatgctaccataaaaaagtgattgatttgctagagtggttttgatttcgtgaatctga

SEQ ID NO: 103890 - DNA, 545 bp, Glycine max
  Clone ID: PAT_MRT3847_6482C.1
cccacgcgtccgacggctgcgagaagacgacagaagggttatgtccacatgtcttcgccccacgtttcatactagaaataaacaaatcaattatagtagtaatcaagttttaatgtctccatattttgccttcaagattttaaaaagattatgacagtagtacgttcttgttaacaaagtactactagtagtataaacatttaaagtatttttcaattaattaatcacatatgaaatggaataaaatgaatttagtgtaggattaagtcaaactatttattctagtcttaaaacagactactaataaccttatccagtcagtcataactcgtactaacaattaaagtacagtaaaagctagtcaaatttaaagagatcatttataatcctattctatgagctataacgattaatagccaaactatataagcagactattcctgtactccaaattttattttgtcataagcaattggagcgggttgacccacgcccaacatgtgggcaaaaatatatagtctagcccatttatgggtagtatgccc

SEQ ID NO: 103891 - DNA, 406 bp, Glycine max
  Clone ID: PAT_MRT3847_64830C.1
gtgtaatcgttcctacaattaatccctcctctcccgccaagttttattgccgtcgattactcccttctcatccccacaccaaaagaaagttaccttgcggacctttggcttcggacggcgggaggcgactaacccctgacaaatgataggactacccccccccccccttagcgagcaacggcctttttcggcacgctttcttcggatttttttttaagggttttgcctttcacttaaacaatgattggctacgttattgaaaatctttccaaccgaaaattattcttcattctctccctccttttgcttctccaatcacttttctttctcctcggcgcacttttcgctcccggcccttcttcttgcatggaatttgtacttagcgcatgtgtggacaaacgttcgg

SEQ ID NO: 103892 - DNA, 476 bp, Glycine max
  Clone ID: PAT_MRT3847_64831C.1
ggtttttctttttttttttttttttttttttttttttttttttaaggaaaaaggatagttactttattatgggtattttttcccgtctatttgggcaagcctacactccgtccatggggcatcaagagggcggcaaatttgatcaaattgggttaattttaaaaattattttttaaaacgggcttttttcaaactatttttgaaggggatttattttttcaaagcgttccgccctcattacgaatgaaacatcacgtggcaacatgacatgcgttttgccattggtgttggcaaaacatgctgtaacttttttccagcggggcatggatcttgccactggtgctggcaaatttccgaagtaaccctccaaaaatagtttgaaaagtaacccgttttggaaatagtttctaaaactaatcgagtttgatcaatttgcctcaagagtgcaagttgaaaggactattattatggggaag

SEQ ID NO: 103893 - DNA, 327 bp, Glycine max
  unsure (1)..(327): unsure at all n locations
  Clone ID: PAT_MRT3847_64832C.1
aannaacaaagnaacaccnacaacccaacanccancacatntanctcncanacnnanacancanacnacacnacaaaannnaaaaaanactcnacacaaacnaancaannncanacaaaaanagcacaaaaagacaancaatnagnnacacanaanannngtnacnaaaacannannnnnanaagaacannaananaacaaaanagacannncntgcaanacgnatnacncgtnagaaagncanacanaaacncaangnaaacagacacnanananaannannncacnncnganccacaaacnaacaancaaacntaacnancagtc

SEQ ID NO: 103894 - DNA, 796 bp, Glycine max
  unsure (1)..(796): unsure at all n locations
  Clone ID: PAT_MRT3847_64833C.1
gtggaaggttgcatccgaatgtacgaattggcgcacagaatgagaggaacagagggcctgaggcaatggcaggaggagcaagagaggaaggtgcgagccctctcagagatggcatcggagcagctaaagaggtttgacgagctgaaggagctgaagctgcataaggagttccaggacttacaggaagtgatggagaagagtaccagggaggccctgggccatcaggagaagctgaaagaggagcaccgccacagagccaagattctcaacctaaagcttcgagaggcagagcagcagcgtgtgaagcaggcagagcaggagcagcttcggaaggaggaaggtcaggtccgtctgcgcagcctgtactccctgcaagaggaggtcctgcagctcaaccagcagttggatgcctccagtcagcacaaagagctgctgagtgtggacctggctgccttccagacccggggcaaccagctgtgtggcctcatctccagcatcatccgcaccaccttggagagtggttatcccacagcagagaaccaagctgaggcagagcgagccctgcaggaaatgcgggacctcctctcagatttggagcaggagatcaccagagcctctcaagtgaagaagaagcacgaagaggaggccaaggtcaagcggcaggagtcacaggtgcagcaggggccagcgcctnccacccagacctctgcacccagcccaagcccagtaggagcacagaatgaagcccctgcagtgaaggtgcaagatagtacgatgccagtgggtaccagcaact

SEQ ID NO: 103895 - DNA, 479 bp, Glycine max
  Clone ID: PAT_MRT3847_64834C.1
tctcgagccgattcggctcgagacggctgcgagaagacgacagaagggttaggtaaacatttgttatatatcattattgtgataaaaccactgatgacttgtgtgatgtgtttttcttacatattgtcactgttttttttttattaatatatagccactgttgttattgtgattatcatgattgttgtattaatattattaaaaaacattggagtaagtttcatctattttatgatagttttattagtcagtaataacaactaatttattgaatgcatattttaaaattaattatttgagaagtacgagtgtaggattgaaattgatttacctattaataaagtaccttatacaatgtttacactgttggagtgtgttatgaagaagcgtgactcaattactaattattgagccgttacgttagtagttggccaaccatttagcaaatattggttgtaagtcacgtgcgtgcatgatct

SEQ ID NO: 103896 - DNA, 272 bp, Glycine max
  unsure (1)..(272): unsure at all n locations
  Clone ID: PAT_MRT3847_64835C.1
caagaaaaaataagcttgtctctggggaagaacatggtgatggtgttcaaaggcaaggtaggacaggacgcaattttcctgctgcaaggtcaccaacgccagtcacatctgagaagcttggaaatatagggactgtaaagcagcttagaagttcaagactgggacttgagaagagtgaaagggcaggtcgtccaccaaccaggaaactttctgatcgtaaggcatatgcacgccaganacattcagcattagtgctcagcagattttctgtt

SEQ ID NO: 103897 - DNA, 604 bp, Glycine max
  unsure (1)..(604): unsure at all n locations
  Clone ID: PAT_MRT3847_64836C.1
gcgagaagacgacagaagggtatgctacgaaacattcctggaattggagagtacacttctggagccattgcttctattgcattcaaagaggtgggcagtttctgtgttttggttccggaaaagtaactattggcttttgctcatgcattaaattatcaggttgtacctgttgttgacggaaatgtggtaagggtgattgctagactgagggctatttctgcaaatccaaaagactcagccactattaagaaattttgattaaggaaattagcagctcagttggttgatcctgttcgtcctggggacttcaatcaggctctcatggaacttggggcaactgtatgcacccctttgaacccaagctgcctttcattaattgcatctgaactttgtcacgcgctatcaaatgcgttacatgaaattacactagtttcttattggcacaatctatttattttaaaatcaagcttgtatttcttttcatttactttcttttgtgggttgcaatggagattaaggaaattagcagctcagttggttgatcctgttcgtcctgcggacttcaatcangctctcatggaacttggggcaactgtatgcaccc

SEQ ID NO: 103898 - DNA, 676 bp, Glycine max
  Clone ID: PAT_MRT3847_64837C.1
ccctagctagccacaatgcagatattcgtgaaaaccctaacggggaagacgataaccctagaggtagagtcttcggacacgatcgacaatgtgaaggcgaagatccaggacaaggagggcatcccgccggatcagcagcgcctgatcttcgccggaaagcagctggaggacgggcgcacccttgccgactacaacatccagaaggagtccaccctccacctcgtcctccgcctccgcggcggcgccaagaagcgcaagaagaagacctacaccaagcccaagaagatcaagcacaagcacaagaaggtcaagctcgccctcctccagttctacaaggtcgacgactccggcaagctccagaggctccgcaaggagtgccccaatgccgaatgtggcgccgggaccttcatggccaaccacttcgaccgccactactgtggcaagtgcggattgacctatgtttaccagaaatctgaagcttaggattgttttccatttgtttctgaattttggaattttattttagtataatactgtttttttttggggtcgcatatttattattatgactgcctaaatgatctgccttttcatattattatgactgcttaaatcttgatgcatcattttttgaatttgattttaattttgaaatgaagtgaatgatttatgactg

SEQ ID NO: 103899 - DNA, 1019 bp, Glycine max
  Clone ID: PAT_MRT3847_64838C.1
agaaaccctagctagccacaatgcagatattcgtgaaaaccctaacggggaagacgataaccctagaggtagagtcatcggacacaatcgacaatgtgaaggcgaagatccaggacaaggagggcatcccgccggaccagcagcgcctgatcttcgccggtaagcagctggaggacggccgcaccctcgccgactacaacatccagaaggagtccacgcttcacctcgtcctccgcctccgcggcggcgccaagaagcgcaagaagaagacctacaccaagcccaagaagatcaagcacaagcacaagaaagtcaagctcgccctcctccagttctacaaggtcgacgactccggcaaggtccagaggctccgcaaggaatgccccaacgccgagtgcggcgccgggactttcatggccaaccacttcgatcgccactattgcggcaagtgtggtttgacctatgtttaccagaaggctgaggcttagggttacatttcgttttttctagtttctggattttggaattttattattagtataatactctgtttttttgtctgtattttggtcgcatattattatgactgcctgaatgttctgccttttcataatttagtttcaatgttttatgaaaaaaaaaaaaaaaaaaaaaaaaaaaaaaaaataaaaaaaaaagcgtccttcaaatttccagtttttgttccttttagctaggcttattggcgccctaggcttattcctgggcaaaatttgtttcctgttcaaaattgcattcccccctacaatcccacacaatatactatccggactcataagcttaaagactggggtagctaacagagagagctaactgccatttgttgggttgcccttattgacacttttccagccggaaaccctgttgtgccagctaactaactgaatgagccaactcgcgtatagagcggttttccgttttggcggttattcactttcttcgctcactaattcgtttgcctcgatcgttagcttgtggct

SEQ ID NO: 103900 - DNA, 723 bp, Glycine max
  Clone ID: PAT_MRT3847_64839C.1
tggaatcttgtggattcatccctgaaattaagacttggaccatcttgatccaagggcattgtgttgcaaatgaagtagatagggcattactttgtttaaataggatgattgaaaagggctgcaatgcagatgctgctgttttaggtgttctaataggcagttttcttggtcaaaagagaatagatgatgcatacaagttgcttgtagagattgttagtaagcatggtacatctccgaggcacggtacatatgcgaaactgattgataacctactgggaattgggaaacttgaggaggcacttgatcttcattgtctgatgaggaatcacgaattcactccaatcattgaaccctttgtgcagtatatttctaagtttgggtctatagaagatgctataaaattcctgaagagtaacggaactccccggtcccattcggtctactttcgtgtttttatatctttactcggaaatggtagactctctgatgccatagatctattgagcaagatcccctatataagtaaacgtaaaaaaatccctgagctctttagttcaatggagaattgcacggtgcacggcctcagtcatatcagccagtaatgccatcattttagaaggcttatccttgttagcttccttatttatctaacagagatggatacgtacatgcttgacaattcataatatggatttttttaaatgggattgtttttacttccaa

SEQ ID NO: 103901 - DNA, 383 bp, Glycine max
  Clone ID: PAT_MRT3847_6483C.1
cccaccataaaaaaccgagggaaaaaaggggggaccaaaaaagggggaaaaacccaattttacaacttttccctccaaaaataatggacaaaaggtcctcatttttcccaccccgggtaagggaaaaagcctttttttatggaatttttgtttggggggcttttttggaatgaaccttggttaaaccaacaaaaaactctttaaaggaggccgggcgggggggaaaaaaaagggttttttatagcaaaaaaacttgggattcggaccactagcgggctaaaaaattttcccttaaaaaattttggggttaacgggccaaaaccaaaaactaaaggtggaaatgggggggtataacaaaggggggtcctttaattgaacccaac

SEQ ID NO: 103902 - DNA, 283 bp, Glycine max
  Clone ID: PAT_MRT3847_64840C.1
ggttggggggccaaaacgaacctaatatatttatcccattccaaacttgctttaaaaagttgaaaattcacaaaaacctttttttttgcctatgtcctcatttcaaccattttacaaatccctttatttaagggaaatattttcccctttttttaaaaccctttttttgaagaacatcccccccccttatttcttattttattggcaaaaaattgacctttattcttatttccaaattccacaaaaaagtttgggttgattttataaccaccttttttaattt

SEQ ID NO: 103903 - DNA, 538 bp, Glycine max
  Clone ID: PAT_MRT3847_64841C.1
gctgcaatgaaagatctgcataacatacctgacgcaccaccttctacacaaaaaaccagctgcatacgaatactttagatactaccatatgcttcaaaccataacaaagtcctgccatttaacgagacagctccttacaccaatccaacagcatcaattctactcccataataaaacttctctacatgaataaattaaaaacaaaaccaagactgttgggttctgttctgataatttttggccgtagccacatttcagtacattctacaatctaccagcatctcccaagctcgccacatgattaaaaaacccgtgacaaaaccaccatcaacattcaaccttctcctgcaaaattggagctttttcataaatttctacacccgaaacaatcgggttctgcatccaatctgtcaacgaatagcagaaaccttcttttttgctttaagtcacttccaagcttgcagtaaagcattatcaaaaatatccttagggtgaaggcttttcatgtctaaaaataatctgattcctgccaatccac

SEQ ID NO: 103904 - DNA, 708 bp, Glycine max
  Clone ID: PAT_MRT3847_64842C.1
cccacgcgtccgcccacgcgtccggagaaattcctccatcatttaacaacctcacattcttgtcaaagttcagtgtggcacataatcgcttagagggaccaattccaactggagggcagtttttaagcttccctagttcaagttttgagggcaacctggggctttgtagggaaattgattctccttgcaaaattgtcaacaatacaagtcccaacaattcttctggttcttccaaaaaacgtggtagaagcaatgtccttggcataacaatcagtatagggatagggcttgcactgcttcttgcaattattctgctaaaaatgtcaaagagggatgatgataagcctatggataactttgatgaggaactcaatggtaggccacgcaggttatccgaagcacttgcttcctcaaagttggtgctttttcagaattcagattgcaaggatcttacagttgcagatttgttaaaatccacaaacaatttcaaccaggcaaatattattggttgtggtgggtttggtcttgtctacaaggcatatcttccaaatggtgcaaaagcagctgtcaagagactttctggggactgtggtcagatggaacgtgaattccaagctgaagtagaggccctctcaagagctcaacacaagaaccttgtttctctgaaaggttattgtcggcacggcaatgacagattgctaatatact

SEQ ID NO: 103905 - DNA, 337 bp, Glycine max
  Clone ID: PAT_MRT3847_64843C.1
ataatttcctttaccatatccaccttcccactaactcgaatgtgatccttacaagatgggatccccattacaattttatatcactctttcatgatcacactgataagtctctacactcaatattaacctactgactcctctccacatatatacccatacctctctcaatctcctacatttcatccatctcctgtaacactttttccactcatgaccactacaccatactcatctactttaacaaccccgaaaccttctcataaaatacacatacttactatgatacatcgtataacattactcgcttcacattctccaccctaaaatgactctctta

SEQ ID NO: 103906 - DNA, 319 bp, Glycine max
  Clone ID: PAT_MRT3847_64844C.1
aaaaccccgaaaaggaagccccagaggaaccccgaccccaaacccgaaggcaccaggacaggccaaacaagaaaacaaacacacccaacccacacaagaacacaaccgccacccaagcccaagaaaaggcggaacaggaacaccccgaggaaacccgaccacaccacccacggaaccaggaacggcccaaacaagaaaacaaaccaccccaacccaaacacgaacagccacagcccccccacaccagaaaaagaggaaaaggaaccccccgaggggaccccacagagccgacccgcaagaaggcaaacacgcacccccc

SEQ ID NO: 103907 - DNA, 392 bp, Glycine max
  Clone ID: PAT_MRT3847_64845C.1
tttcttttttttttatttttcttttcatttttgttttgctgtttttcctcatgtatccaacctttttttggttttaaaaaaaaaacggaaaaatcccttgggggcggtccacgaatattgatttcctcgcatttcatactaaaacccctaattggacccccccagccttttgtaacaccaattctactgaaatttaccctttggggtcttccccttttgtgcggaaccccttgacttggaagattctactttcttataaccatgcactagaaaagttatgcgcggccgaaaatggcagcgtcaaccatcttagggagggctgtttctcacccccgtcttcttacgggcttggaagccccagtaccggagccgcctaaagatgcaattttcga

SEQ ID NO: 103908 - DNA, 667 bp, Glycine max
  Clone ID: PAT_MRT3847_64846C.1
tgatcgtactgtgactatttatgatcctcgcagatggtcggcattgtctagattggtgcactgttcaaaatatgagataacaggactggctttctcaacaattgaccctgactgtatctatattcaaggggttgattatgaggtcttttgtggacaatggaaagagaacaacaaaatattttcatttagaggagactcaaattggcttggctttagtaagtgctccgacaaagatgttttggctggatggtgtgattcaggcagcatatttatagctgatgttgcaagtgcaagttgataaagtggtgtctgtccagtaatttccccatctctgtagaaaattgtcacctcacatgtatgtatgtaaccatggttgagtttcatgtttgaagggaaaaagaaaagaggtggatttattatgattaaacttcatatgcagtacatgttataatgcatttctaaccacagaatgtgacttaagattacggaatgcattatttttgtgcactgtattgattttgtgatgttcattttaagttcctattttgacaaattaattattgaaatatcaaggctaattgtatggtttacaaagaaggccattaatgtgctatatggcacagaacatgagcatatgatcattcaatgagcagatagtacttttaag

SEQ ID NO: 103909 - DNA, 105 bp, Glycine max
  Clone ID: PAT_MRT3847_64847C.1
tcgatagtcgagacatgtcttccttcgatgccttcggcgacgacttgaacgtccactcttcttccacttcgcagcacgaagatgacgaggacaacttctctggct

SEQ ID NO: 103910 - DNA, 481 bp, Glycine max
  unsure (1)..(481): unsure at all n locations
  Clone ID: PAT_MRT3847_64848C.1
aaagtgagaacacaagatgggtatatatggagaaaacaattataactgcttataataaattaaattggcaatgtaatcgattatttcaagaaagtaatcgatgagatttcccatttaatcgattaaagtgttcttccccaaacctggaaagttttcgataacaatgtaatcagttacaattttgatttaatcgattaaaatgttcttgatcacttatgggaacactttcaagaacgatgtaattgattaaactagagactccacaaaatagacatggtcttaaaagaactatgtaatcgattatggatatatggtaatcgattaaactagaactatgatctttctgcaagtttctcaaagacttgtgcaatcgattatagatatcggtaattgattaaaacatagagtaatataacactaaagatgtttcttatctaaaatactatncttctacttttatatgatgatgcatgatgtacac

SEQ ID NO: 103911 - DNA, 262 bp, Glycine max
  Clone ID: PAT_MRT3847_64849C.1
gaccggccggaacccgggcgccacgcgccgataagcgcccgccccgcgggcccgggggggcaccaaaaggccggcggcgggccccccacccaaacgggccgaggacgcgccggccggccgcaagcaaccggcgaagggacaacccagagcgcaaagcaagccgacgcccagcagacaccagcaggggagaacaccacaggaggcagagcccaccgaggcggcccacgggacccgccgaaagagaaacaggggcagacggggg

SEQ ID NO: 103912 - DNA, 634 bp, Glycine max
  Clone ID: PAT_MRT3847_6484C.1
tttgctggtgcatgttgaaaatacctctggacaaagaaatgatattgatattggtgctgaggaggtactagcttcaacaatcttccatctccaactgcgtcttggtgtcaatcatgaagtgctaccatcagttgtatgtgctctctgtctcctgatgtttggtgcctctaaatttgcagtcagcagaactgatttattgaaagactacaacacattaatatcatcatacagttcaagggtacggtgtcctcctgaagctaatccaacttggagatggtcgttttatcagccatggaaggatgattctctggagctcactgactcgcagaagatggaggaatatcatgcttgcctaactttgttagttattatctctaatgttcttggtgcaaagaaattagagtcggctagtttatcccctgtagatttagagagatctggcttattccaatgggaaataagtttactaagaaactaagtttatacaagagtcgttagctttttatttttattttttgtacgttagtaagtgtacagctagtgtcaaagtatcgatatatttgaaaatgcaaattttgccaatgaaaacaggccatcttttatgtatttgatggcattatataagtttaattgg

SEQ ID NO: 103913 - DNA, 654 bp, Glycine max
  Clone ID: PAT_MRT3847_64850C.1
ttaaaaaaaaatctatgtataaacagaggaacaaattagcgtttggacgatcctattggagtgatcacaaattcacagcacaccataacacataaaatagatacaattccgacacaactaaccttagaaaatattttaagctataactacgattcatccatgaaatagaaaaacaaactaaaataaatccgtgaaataaaaaaaaaaaaagaggattagagagtacaaccacaggagaggaagaagtagcaaagcatggcgagcaaggctatggactcaaggcccgtaactaaggcccataagatgtcatccaccaacgacaagttccactgaataacactctctacgttccaactcgggttcaaatacgaaaagtccaacgccggccaccggaacaccggccacggcaccgttagatgcaactccggccaccggaaacttgacgtgtaccaccacctccaggacatcctcgtttgtttgttcctctattctttttcaacctttcttttaatttttcttttttcttttctcttagctgtttttcctttgattttgcctttggaatttcactttcaattgtgatggtgaagcatttattagtcttctttagaaatgagggtcatggaaatgggcatatcaatatctgtgaatgtg

SEQ ID NO: 103914 - DNA, 263 bp, Glycine max
  Clone ID: PAT_MRT3847_64851C.1
ggtaatgcggctcgagcaagaatttggacagaggaattttattattagctattaaggtgagatgatgtcatatgatagatagagtacaggtcattgagaagacgagcaacgacagggtacttagcttggaatttgttctcccagtcgttgagaacgccgatctccttgtaggataggccgtcgagggagggggagatgtcgtcgtagttcttgctcatgctggcgagggcgcctggtggcgtatgtgccggcgaacatggtgt

SEQ ID NO: 103915 - DNA, 325 bp, Glycine max
  Clone ID: PAT_MRT3847_64852C.1
cttgtgatttttatttttttgaaacatgacattttcatatatcattagggagctacacaggcagcgtgttcttttttcaatactgataataaccattaaatcattgacaatgaaccaatactgagaactagggaaaggaacataataaaacgatgaacaacccttgccagttggttgcaccaaccaactaggtagcacccttggaacgaatccaaaggtataaaaagagacagaccaagtcctactaggaaaagtatggctgttccttaccatacaaagggagaagacgctcatgttctgctaatggctttcacagagtggttgg

SEQ ID NO: 103916 - DNA, 183 bp, Glycine max
  Clone ID: PAT_MRT3847_64853C.1
ccgtgatgttttttaattgctttagttgttgtaattaaatgaaagacttgagcaaaattttaaatgttgaatgaatgcccaaaggacttagacaatggatagaacaaaacacatgagacattcgaagagaggccacctaaagatgaaacaaatcccgttcggactggtgagagacagcaaaca

SEQ ID NO: 103917 - DNA, 491 bp, Glycine max
  Clone ID: PAT_MRT3847_64854C.1
ccacgcgtccgcccacgcgtccgaaaaaaaaaaaaaaaaaaaaaaaaaaaaaaaaaaaaaaaaaaaaaaaaaaaaaaaaaaaaaaaaaaaaaaaaaaaaaaaaaaaaaaaaaaaaaaaaaaaaaaaaaaaaaaaggggcggcccgtttaaaaggacccaagttaacatccccgggcatgcaaggtaaaaattttttaatagggccccctaatttaaattcatggcccgccgtttaaaaacggggggacgggaaaaaccctggggttacccaatttaatccctttggaaaaaacccccttttccccagggggggaaaaaggaaagaggcccgccccgatcccctttccaaaaagttgcccaccctaaagggcaaagggaaccgccctttaacgggcccataaacccgggcgggggggggggttacccccaaggtgcccgttacatttgccagggccttagcgcccgcccttttcgtttttttcccttctttt

SEQ ID NO: 103918 - DNA, 397 bp, Glycine max
  Clone ID: PAT_MRT3847_64855C.1
tttttttttttttttttttttttttttttttttttttttttttttttttttgttttgggttattttttttttttttttttactttttttatttgtttaacttttttttttggttacaccccaaaaagaattttattaaaaaaaacctaaaaactctgttcctgctaataaaaaacgggggggggaacaataaaccactaaaaaactgaacaaaactaagtcgattggagccctcggggaaaaaacctggaaacttccaaaagactaacacgcccccagaagaaactttatgtgaaacagggaccgccaccgctaaagggtgttccagagaagaccaaaaggagcaaaaaaaggagcccgtgataaaacacccaagatggccgtgacggatatccagc

SEQ ID NO: 103919 - DNA, 461 bp, Glycine max
  Clone ID: PAT_MRT3847_64856C.1
ttaccgtgctacatgtgtgcagtgcctccttcttggggggggggggggggggggggggggggggggaaaacccaacacgaggagggttagcagaagtgcagggacaacgatgttctaagagaaatacacgggattaaaaaatatggcagtgatactgacgaatgaaagttgctaggggagcagatccagaaataccacaaacaaacaaagcaatcctaaaatagaatttgctaggacggcctcctatcggcacggcactagctaggagggcatgagctacagtgggagcatacacctactgttaagatcagctagcctaataatgcaagtattacctggataaaccctttgggtgcggctccatggaacactactggtcacaagcattgtgcaccaggtgctagtccgacttgggctacagtttgtctttacgagagcaagtaacttttgcgagagtaact

SEQ ID NO: 103920 - DNA, 395 bp, Glycine max
  Clone ID: PAT_MRT3847_64857C.1
ggtaacaacctcatagtcttgcactttgcgcagcgccaagactcgagtttcagccacacccgctgcgggagactcagattaggtgtttcctaagaagaatagtttccatcgagtctcaattgtgggtggaacttcaaagatttgtacacatcatggtgcggcatcagagaagaaggtgccaccaattggagatggagtatcgaacaattcttaagtttcatgaacaaggaagaaactactgttcagttttctcatccttggcccaaatgggccaactttatgaagagcttgctttgacaatggattcttaagtcatgaagagggaaaaatgtttcgcaatgttggtattaacatgaaaggttgcaacgtcattagaatcatgagccttaatttct

SEQ ID NO: 103921 - DNA, 1486 bp, Glycine max
  Clone ID: PAT_MRT3847_64858C.1
ccccactatctagcggctccattaggtaacataatgtagcacagagagagagagagagagagagagagatcacatttcctgagctataggctatagccttccataatcatataacaatggaggggaccaccagccaaagcacttcttgcatctattatcttataacagagagagagagagagagagagagagagagggagagatcacatttcctgaactataagctatatagcacttccataatcttacaacaatggaggggaccagcagccaaagcacgtttgccttcatccctagcacaattgagacaccaagtccaagcatccctgagatatcatcatcatcttcccctggctctcttgcaagaattgcacaaagttaccctcccggctttcccagaaaggtgttagcggagattatagggacatttttgttggtgtttgtgggaagtggttctgctgggctaagcaagattgatgagaggatggtgtcaaagcttggagcatcacttgcaggaggactcatagtgacggtcatgatatactcaattggacacatatcaggggcacacatgaatcccgcggtttctcttgctttcaccgccgtcaggcatcttccttggccacagctcccattttatatagcagctcaactcactggtgccatttctgcttcatacacattgcgagagctgttacgaccatcaaatgagattggaggaacatcacctgctggatcacacattcaagccctaatcatggaaatggtgaccacatataccatggtgttcatttccatggccgtggccactgactcaaacgcgacaggacagctatcaggagtagcagtaggttcttctgtttgcatagcaagcattgtagccggaccaatatcagggggatcaatgaatccagcaaggacattaggtcctgcaattgcgacatcatactacaagggactttgggtatattttgttggacctattactggggcggttttagcagcatggtcttacaatgtgattagggacactgaacaccctggttttcccatttcactatcctccatttcatccaaggtgcgccaaagcattggtggaaccgaacaaaaaagcgaccaaagatgcttggtgtgaatgaaaataataaacaacaatgttttttctgacaccacacccttgaatgtcttgtcttggaggatctcaagtttccacatgtattatcatgtatatcaataataccatgccgagatcatatggtattattagctaggccatgtatcgagttagtttcagggctatgagctagccatgtataatgcaaaagtgtgtagtgtgattttcctacattaatgaaatgtcagcttcatatgaaaaaaaaaaaaaaaaaaaaaaaaaatgctattaatgaaaaaaaaataaaaaaaaaaaaccaaaaaaaaaaaaaaaaaaaaagaaaaaaaaaaggggggggccgttcaattttag

SEQ ID NO: 103922 - DNA, 1268 bp, Glycine max
  Clone ID: PAT_MRT3847_64859C.1
cccacgcgtccgcccacgcgtacagagagagatcacatttcctgagctataggctatagccttccataatcttataacaatggaggggaccaccagccaaagcacgtttaccttcatccctagcacaattgagacacctagtccaagcatccctgagatttcatcatcatcaccttcccctggcggctctcttgcaagagttgcacaaagttaccctcctggatttcccagaaaggtatttgcggaggttatagggacatttctgttagtgtttgtggggagtggttctgctgggcttagcaagattgatgaaagcatggtgtcaaagcttggagcttcacttgcaggaggactcatagtgacggtcatgatttactcaattggacacatctcaggggcacacatgaacccagctgtttcgcttgcttttaccgccgtgaggcatcttccgtggccacagctcccattttatgtagcagctcaactcactggagccatttctgcttcatacacattgcgagagcttgtacggccatcagatgagattgggggaacttcacctgctggatcacacattcaagccctaatcatggaaatggtgagcacatacaccatggtgttcatttccatggccgtggccactgactcaaacgcgacaggacagctatcaggagtagcagtaggttcttctgtttgcatagcaagcattgtagccggaccaatatcagggggatcaatgaatccagcaaggacattaggtcctgcaattgcgacatcatactacaagggactttgggtatattttgttggacctattactggggcggttttagcagcttggtcttacaatgtgattagggacactgaacaccctggttttcccatttcactatcctccatttcatccaaggtgcgccaaagcattggtggaactgaacaaaaaagcgaccaaagatgcttggtgtgaatgaaataataaacaacaatgttttttctgacaccacaccaccgcccaaatcaacatcaccttcaatttcttgtcttggaggatctcaagtttccacatgtattatcatgtatatgatcaaaaataccatgcctagatcatatggtattattagcttggccatgtatcgagttaatttcagggctatgagctagccatgtgtaatgcaaaagtgtgtagtgtgattttcctacattaatgaaatgtcagcttcatatgaaattcaatatagacagcaacccggatgctattaatgatgatt

SEQ ID NO: 103923 - DNA, 1372 bp, Glycine max
  Clone ID: PAT_MRT3847_6485C.1
ggaagaagaaggctgcgagaagacgacagaaggggtcaactaagcagagcaaaagaaagaaagaaactgcaacttcctctgttttgctcccctgtttaggccttttcaaaaggacagcagcagagcaaaagaaagaaagaaagaaagtgcaacttcctctgttttgctcccctgtttaagccttatcataagcttagaatggcacacaaggaattttccattgccctagtgactctcattgttctctttgtcaacacgaacctccaaggtgccacggctgactatggtggtggttggcagagtgctcatgccactttctatggtgggggtgatgcttctggcacaatgggtggagcatgtgggtatggaaatttgtatagccagggatatggaactgacactgtggctctaagcactgctttgttcaacaatggcttaagctgtggatcttgctatgaaatgagatgtgatgatgacccaagatggtgcaaacctggctctattaccgtcactgctactaacttctgcccaccaaacccatctttgcctaacaacaatggtggttggtgcaaccctcctttgcaacactttgatatggctgaacctgccttccttcaaattgctgaatatagagctggaattgtgcctgtggccttcaggagggttccttgtgtgaaaaagggaggaataaggttcacaatcaatggccactcttacttcaacctagttttgatcaccaatgtggctggagctggtgatgtgaattcagtgtccattaaagggtccaaaactgggtggcagcccatgtcaagaaactgggggcaaaactggcagagcaactcatacctcaatggacaatccctctcttttcaagtcaccaccagtgatggcagaactgtgacaagcttcaatgtggcaccagccaattggcaatttggccagaccttccaaggaggccaattctagagacattattgcaatgagggatagaaaatagtgcaaaaaaaaaaaaaatgtttgtatacctattattaatcacctcattggaagaaccattaagtgtcattaataggtattgattcttgtaactgtgattctgaaaggccagtgttttttattttattggtctaaaaagtagctgaggtgtttatatggcacccgctggtcacttcgcatataatatacatatatggagagttatgtgttatcttgtgtgtggtggtgctacttttcttcaattcaagttaattaataattatattcaagagagaaatcttttttgcgtgaaatatttgtttcacatttcccataaattatgagttgttaaatgattaaatcaatttgattagtatttactatgttgattgttatt

SEQ ID NO: 103924 - DNA, 922 bp, Glycine max
  Clone ID: PAT_MRT3847_64860C.1
cagtaaaaaaagttcttgccttgactccaccacccctctccccttctctttccctctattattctttctcttctctcctcttttcttcttcttacccaattccacttctattaatcatcatgcaatcatatatagccttttctgttttcccttcttttctcttcatcatccatatgtcatagacatatctatctatcttcctcctatgacataaaaatatacaaacataacacacataactagcaagaagaaaataaaacttgcatatgggtggtaatagtagtactactagtagtagtagtagtagtagtagtagttttttcctttcaaggttccttcgagcacttcttgtgatggggcttgttagtcttcttgttttgggaagcttaggtagtggtgaaggaacaatacatccaactacacaatggtctcaagaaagggtcaagcatgaacgagtggttggtagagataagccggtggaccgtgcagaattggacttcaactacatgagcaaaagaagagttcccaatggaccagatcctattcacaacaggagagctggaaattctggccgaccccctggccaagcttagaagtaacaagggaagctagacaagcttcagcaaccatgcaaaagatgacacaaaaatgttaattagccatgtacttgtgagagaactgagagtagcttcatatatataaaaatcccctgactctgaccttcttagaattctgtagcttgcaagcaagggctaatctctaacttgcggaaattaaatttgttatgggaagagttgtttgaggcctaacgaggtaagaaaaaaaggaaaggaagcttgtccacatgcaaataaccctcaaagtaggttgacagttcttacaaactgaattaaggcggtgtgtttttttttttttttgacta

SEQ ID NO: 103925 - DNA, 146 bp, Glycine max
  Clone ID: PAT_MRT3847_64861C.1
ctaattctcatttcttccctcaaatttcatgatccgtgagatgcttcatatccacggtggccaatgcggcaaccagatcggcgccaagttctgggaggtggtttgcgcgtagatcgggatcgactctatcggaatgtacggtgggg

SEQ ID NO: 103926 - DNA, 461 bp, Glycine max
  Clone ID: PAT_MRT3847_64862C.1
acgagagcataccagccgaactcggccgcattgagactctagaaattgctcttaatcttagttgcaattcactcagtggaataatcccagctcagatgtttgctcttaacaagctttccatattggacatctcacacaaccaattggaaggagatttgcaacctcttgcagagttagacaaccttgtctccctcaatgtttcttacaacaaattttctggctgtcttccagataacaaacttttcaggcagttggcatcaaaagactacagtgaaaatcaagggctctcatgctttatgaaggattctggcaagactggtgagacattgaatggaaatgatgtaaggaactcgcgaaggattaagctagccattggattgctgatagccttgacagtaataatgattgctatggggataactgctgtgatcaaagcaagaagaaccattagagatgatgat

SEQ ID NO: 103927 - DNA, 699 bp, Glycine max
  Clone ID: PAT_MRT3847_64863C.1
ccacgcgtccgcggacgcgtgggtaacagcacacatcaaatccaatctaacccgagaaagaacaagccctagtcctcacggcatttcccacacacaaatcgtgacaagtaatagcaattttcctcttccaatccgcatttcccttttcatgcacctcctcactcaactcagattgattcctccgctttcctccatcatcataacgctctttttttttttttttttttttcaagatcttcaatgacccattagccccaacaatctcaaaccccagaatttagccacacccacttctcaaaatcgttcctttttgtaccacccatatgcctcaacaccacaaacttcacattttccactctaactgctgccatcactactattagttaccactgttactattaatgggcgttgagagaaaatggctcttcaccctcttcactgcagcatttctctccttcatcattctcatgttctcttccctctcttgcttcaattcccctgtgccctttccctctagtgtccactatggtcctcactaccctcctgcttttgcttacttcatatctggtggcaatagagacggtgaccgaatcttccggttgctgctggcggtgtaccaccccaggaaccgctacttgctccaccttgggttggatgccagggatgaagagaggcagaagctggctgcggccgcgatgt

SEQ ID NO: 103928 - DNA, 151 bp, Glycine max
  unsure (1)..(151): unsure at all n locations
  Clone ID: PAT_MRT3847_64864C.1
cacacaagncacacggcacactgccactttttcggcgttgtcaaactcacacaaacgtagcaggtaaaaccctagatcagcaccaccgacggaaaatggaggcggagggtttgagacacaaccacgcctacacccgctacggcgcccccac

SEQ ID NO: 103929 - DNA, 549 bp, Glycine max
  Clone ID: PAT_MRT3847_64865C.1
ctcccagaaggttcctcactttccgttgagaaacaaaacgacaccatcgtttcatccaacggcgatttctcagctggattcttccaagtcggcgacaacgccttctgcttctcggtatggttcacaaggtccgaacgacccaccgttttatggatggccaaccgcgacaagcccgtcaacggcagaggctcacacctctccctctggaaagacggtaacgtcgttttgaccgacgcaggcggaaccatcatctgggcaaccgccaccctctcctcctcacaacaactacacctaaagctaagaaacaacggaaacctcgttctcctcgcttccaaatccaccaataccaccatcatttggcaaagcttcgattccccaacggacacccttcttactctccaaccactcacggagcaagcgagcctcgtttcctcgagaagcacaacgaaccattcctcgggattctacaaactctacttcgacaacgacaacgttcttcgcttactctacaagggtcccacgttgtccagcgtgtactttccagagccg

SEQ ID NO: 103930 - DNA, 338 bp, Glycine max
  Clone ID: PAT_MRT3847_64866C.1
tcggccacgcgttcgggtttattcgaacattgttgtaggcatatgctgaacatgctttcttggactataccgaaaaaaggagggtgaacctttgacataaaaaaaaaaaaaagaacagaaaaaagaataatattaaaaaaatggggggggcgttttaaaggagccaattttactttcgcggggtggcaagctaaataattttctttaggggtacccaaaataaaattcattgcccggaattttacaactatattaatggggaaaacccgggctttcccaaatttattagcattggggtacatccccctttttccagggggatgattatccaaaaggcc

SEQ ID NO: 103931 - DNA, 407 bp, Glycine max
  Clone ID: PAT_MRT3847_64867C.1
aacctaatggaatgcagcaggcaaccttctatagattgttagttgagaacaacgtatcattgaaccacaagataattgatgtctaccttctgattgacacaaaaaagggattactattttatgaaagttgaattacctcctgcagggaaatgaatatatggttggctagggaaatgcaccgacttaaagctcagaaaacttattaacacagattagatttacactcattactagtttcctaggaattgaaagagacccaaagtatactaattcttaaaaagacatggagcctgacctttcaaataacagaatccttgcttaattccttagactcctgattttcctagttcagattacccacgtttttcccgcccaaaattggaaagcgatccttgatctttgacctg

SEQ ID NO: 103932 - DNA, 371 bp, Glycine max
  Clone ID: PAT_MRT3847_64868C.1
aacccccaacatttttattaaggaaaatactttacaatttcagcccatttacccgggcttgaatataattttgcgggctttaatcattttttgggaacccaaacaatggggttgggctcaccaaattaaagccccaccccccccccaataatcctagttttggttcccttagtttatacaaaaaagaaaatcaccgtaataggcctccccctgtcccgtttttggggacccttttttttttttttataaaaaaatgcccccttgaattgaataatgaacattttccaccaatggaacattttgggggggggccttttgggaaacctctaatatcagggcaataggtggaaaaaatgtaatttttttgcccc

SEQ ID NO: 103933 - DNA, 972 bp, Glycine max
  Clone ID: PAT_MRT3847_64869C.1
tcaaagttcagctaatggaaatacaaaacaggttattaattgtatatggaagcatcctgatgcacggacagtgtatctaacctgcaacatgctggtcaggaagagatccttgttaatgtttctgaaacctttggggcctaaatatatgttgataaagccaagtattcgtaatgttttgagaatctagcacttactgtgcctgaaatcctctgaagatccaacttctcgtttccgcttgtttgatggatctcaaaatttatatgaaagagcaagagcaaagctggttgaggcctaagcaactctccaacctgagcctctcgttgtgcgcccttctgcccagtggtatgcttgtgaagaaaagttctcggatattgaaaacactagaaagaaaaggatggatgaagcagttaaggagcagttaaggataagtttggtgtctggcatgtttgttactcaatgcactcatccaaggagaattggaatgggcacttcaagcacgtaggtgggttgtttcaacaacctccagctgcaggactatggagctggattatgtaaagacacacttatttaactctaaaggagctctcaataactctatgtggaagcttctggatatgactccagaaacttctgatcatgttgatgcatcagaaaaatctgcgagctttaatctttttcttgaagaaacccctcagtccttgtgcacaaactggtgtgcaaactaaatcacctgtcaaacagttcactgagactaaaacactgaaagcattgcttcttaataatggcaaagacttgcccatctcgttatttggaagagcaaggttcactctccaagatagtggcttttcaataggaggatgtaatacattgcctgttaatgtccttcgccaaacagtctcaaatgatgcacgacacgaatctatgtcagatgctgcagcgaaggagagcttaccagtaaatagaatgattttc

SEQ ID NO: 103934 - DNA, 270 bp, Glycine max
  Clone ID: PAT_MRT3847_6486C.1
tcggaatgctcgaggcctaccaaaaagtcatgtgacatgttgaaggagaaattgacagcccttcttgttgtcggattgcactggatgaacagcactttttcttttaaaaacaaaatcacattttcaccattaaaagcgatttacttatgcacgcaacaaattacaatgatataatatttaaagatatggaaactgactaccaggaaaaacactatttggctttgcatttactgatccaattaattttgactttaacttatgttgcatcta

SEQ ID NO: 103935 - DNA, 331 bp, Glycine max
  Clone ID: PAT_MRT3847_64870C.1
cccacgcgtaccgtacggcttgcgagtaagcgacagaaaggggcctatcgtctttgatttgaggtccaggcaagcgcccagtctaaccaccacactctgtgctcgttcacgctacctcctttctgctcttcttctacctttcaagttttaaaagtataattatggcagacacattcctatttacctcagagtcggtgaacgagggacaccctgacatgctctgcgaccaaatctccaatgctgttctagacgcttgtcttgagcaggacccagacagcaaagttgcctgcgaaacatgcaccaaaaccaacttttggtatggtctttcgga

SEQ ID NO: 103936 - DNA, 1868 bp, Glycine max
  Clone ID: PAT_MRT3847_64871C.1
ctcttcttcgggtcgcccccgccgcgccgcctctttcgctaacagcggcgaccctgggcgactgtgagggtgcgaacaagaagagctcttaggttttcaaaaccattaatcgttgctgcttatttgatttgtttgagcaattatgaacaatgttgctgaaagaccgcttaacggagacgtagaggatgatgatgaggatgatggtggaggccttgaagcctgggagagaacttatgctgaggatagatcctgggtagctttgcaataggatgaatctggacttcttcgccccatgggcttatacgatacttgtacatccctattgaccagtccaaggcagcttcttggagagactttcgaccaagtaggatggttgtgatggggaaacaagttcctgcatttatctgggaattctttgatcagagtccacttagtcatgttggtctggtgactataaaagatgggattgctcattgcataacagaacttggtggaagtcctgagtctcacattaaagctttgatgggtaaactggaatgctcaggtgatgcctccttacaaaacgcactagggcttgtgcatggatatctcacacaaatccgatcatatggttatccagaagttctgatcttatattcggctctcagtacatgtgatcctggtgatctcatggaaaccatccatcccatcaaaaagagtaaaataaggtgcgcagtcattggtcttgcacctgaaatgtttgtgtgcaaacatctctgcgaggaaactggagggacttattctgttgcactagatgagtgccactttaaagagttgatcctagagcatgcccctccacctccagcaatagcagagtattctactgctaatttaattaagatgggcccactataaagagttgatgctagagcatgcaccttcacctccagcaatagcggagtatgctactgctaatgaaactattgtcgaagacgcacaacgagcagctgtgggctctgtcccaatatgcacatgtcatgaagaggccaagaccggagggggatacacttgtccaagatgcaaagttcgtgtctgtgagcttcccactgaatgtcgtgtgtgtggattgacccttatttcttcaccccatttggcaaggtcatatcatcatctatttcctatagtgatgtttgatgaggtcactccatcatctcaaaatgattcaaaccacagttttcccaatacttgttttggttgtcaacaaagtcttcttagtcagggaaacaagcctggactttctgttatttgcccaaaatgcaagcaacaattctgcctcgattgtgacatctacgttcatgagagcttacataactgcccaggctgtgagagttccaggcactctaagtctgtaactgcttcccaatgattgccaatcttctgcctgtgacttaaaatttccataaaaatggcgttctacattgtctccttcatattgctatactgcatccacccactggacccatgaataagttccggtgccaagtgactgactaacattatcatctgctcattgatcacaatattttggtgcttgatcagtaaatgctttgcaggacagacaacagaagtgatattacttatacaagggtgagattaaaccaacaacttctgatcattttccttcttttgtttttttgctggaaattaaggcacatgtaaaatgtctccattgtgtttttttcaatcagtgggctgacaccattcttgctggcgataaatattgatcattaaattatttgtatgagatatttacgcgtgttttgcttttaacaatcgcagttgtgaacttctgacttcgctaacatatttcattactgtggcaggatcgt

SEQ ID NO: 103937 - DNA, 523 bp, Glycine max
  Clone ID: PAT_MRT3847_64872C.1
aaggaaggttggccgtcatcactgtatgacgtcctccttctttggggggggggggggggaagaaagagaaagagagcagcgagaattcaaggagcacccacagtttgtagttagagcgaattaaagagacacccatggtgccaaggatagggtataaagttaggtatcaatgacaatgcgagagatagtacatatgagggagtatagtatgcagctacaattgacaagtcgaaataccaagagacggtggcaacatgcctagatagcccggcagtacttgggccgtgcgttattaggtttacgacaagagtacagcgccgcaccgaaccgagtattagacaagtgtaaagccgtagttagttccggctaatgagagggttggttaccaaatgtttataacgtattgggatgcgtaatcgaacgcgaatatacgttacacttgtgcgtattagtatcaagagtgctggtacgtatgtgtttaatacgtttggtgctagtatgataattcgtatctacacaaaaa

SEQ ID NO: 103938 - DNA, 920 bp, Glycine max
  unsure (1)..(920): unsure at all n locations
  Clone ID: PAT_MRT3847_64873C.1
agcacagtctgtggagggagaaggcgaagaatctctggttttaaccatggatagatttgagcaccttgggtttctaattcagtttggtgataagggatctgaaggaaattcttttagtcaatcttctcccttttttgcaaactcagaccctgatatgcctgctgttcctgttcctgctgcacaagttcatgattggcttctgcagaatatagtgtctgctttggaatatatttctgaacgaacttcttctaaggagaatggcccagctagtgcctctgatcaggatgttgctatgactgatgcatgcactgcctcagttaaaaggtctcaacaagtactagaagtgcaagtttcattgaagggatctccaaatcgtcatatgtgaagcatgcatctgacattaaaggttcctctgttaaggttctaaattgccatgagtctgccatatacatcttagcacctttgagatatgcaactgtctatggatgttcagatgcaacaatagttataggagcagttggcaaggctgtgagagtagaacactgcgaacgagttcatgtaatcgtagcagcaaagcgtatttgtattgctaattgtcgtgaatgtgttttctttttgggagtgaaccagcaacctcttattcttggtgataatcataaactgcaggtggctccctataatacattttactcccaattggaaaagcatatgaatgaagttggaattgtgcccacagttaaccgatgggatgagcctctagcattgggcatggttgatccccatgattcattatctcatccagcangtgtctctgatgttcaagctgagtctgctacacgggtggaccctgatcagttcactgattntgtgattccaaactggtttggaggagagtccactgnggctacaaaaggcaccca

SEQ ID NO: 103939 - DNA, 2645 bp, Glycine max
  Clone ID: PAT_MRT3847_64874C.1
cgcacccgcatgtctctcttctccctctactttgttcccgaatcaaagatctgcaactctctctcatgatttttctctcggtgttgccatgacggaaccgacagagccatccacgtcatcttcattggcgagggacccaaccaccgtggttcacccaaggcgcgagccattcgagcacggcctcttgccaatcccgcgcctcatcttctccgacccgacgcaaaccctaatctcgttgaagcagaagcttctcgagttatcctctaaccagcgagtcgactcggcggcaatctccgagtcactgcagatccccattgagcacgccaggctcgtccttgataccctcgcctcgattctgcactccgactccgaacctctcgtcgccgccaagctcgaagaaatcgattccgtcggcgtcgacgtccatgatctggttttgttcctctacattcaatcctacaagaggctcctcccgcgcacgcacaaggactccgccgccgtcgccgatgtctggccttccacctccgccttcgatggctacttgtccgctctctcgccgcttcagctcgtacgcagcaacagtcggcggtttatgccgtcccaggctgatgaagaggcgcatcagttgtcgtatctgcaaaagcacttggctaacattgtgtctcttctagcagagcctgtggagggagaaggcgatgagtccctggttttaaccatggatagatttgagcatcttgggttcctaattcagtttggtgataagggatcagaaggaaattcgtttagtcaatgttctcctttttttgcaaactcagaccctgacatgcctgctgttcctgctcatgaggcacaagttcatgatatatttctgcaaaagaacttcttttatgtagaatatatctcctagtggctctgatcagaaggttgcggtgactgttgtatgcattatcaccttcaagaaggtagtaatgcgtccactgagtgcaattagatctgaagggatcttagaggcgccagatttattgcatgcatctctaaatcgtcgttcgcgaattatggttctaactttaaaggttcctctcttaaagttctaaattgctacgaatctgccatctacatcttagcaccattgagatatgccactgtctatggatgctcagatgcaacaatagttctaggagcagttggcaaggctgtgagagtagaacactgtgaacgagttcatgtaattgtagcagcaaaacgtatttgtattgctaattgtcgtgaatgtgttttctttttgggggtgaatcagcaacctcttattgttggtgataaccataaactgcaggtggctccctataatacattttactcccaattggaggagcatatgaatgaagttggaattgtgcccacagtgaaccgatggaatgaacctctagcattaggcatggttgatccccatgattcattatctcatccagctggtgtctctgatgttcaagctgagtctgctacactggtggaccctgatcagttcactaattttgtgattccaagctggcttgtagcagagtccactgggtctacaaaagacaatccattcacgttaccagatgcgtatatggcatctcagcataaaaatcacaaaaatttagaggagataaggcaactcttacgagaagcatctttagaagaaagtcgcaaacgagaattgtcatctgcgctccatgtctacttcaaggactggttatatgcttcgggaaacattcgtcagctttattgtctacaaggtgattgatctttgtcaggcaatgcaatggctcagtgaatgatggtacaggaacgaggtttctggcttcctttttgaacttcctcttcaattcctctcgacaattctattggccgcataggtagctgagatcattatcagatgacgtgaattagagtgcccacatatttatgccgtgacatcaccggtgcacagaatccaatgaaaaatacagttgctaatctgattgtaatatttttttgtgaaaataattactgtaatgtagtagtattttgttagcctaaattaatggtctttgtgaaaaattccagctgccagcatctggtgtactgcttttcatgtcttccaacttcgagttgttccatttaattaaacttcccgagtgtctgttgggtcctctcgctttgcgaatttaccttgtagcattctgaatgagtttttttttttgagaatgggttggagattgctctaggactataaatgatctaacttcggttcaatgtaaataactaatctctgtatttctgaactttatacgcagtaaatttttgcccgtagaagtacagtttgtctccaccataatttcggtgtatatggtgactaatgagatggaagtggcagcatagtggacgttgtatgatgttcaagtgttcttcacgatatcaatgtcaccatatgattgttatataacatgttagaacgtctggatggcctactgaatggttggatggaagacggcttgttgggtgcgatacccctacatggtatgcatggtgtgtatcgtgagaaacttattttagccgaaggatcttgagatagatatggggttaaatagaactgcccacactagatttttttttttttttat

SEQ ID NO: 103940 - DNA, 417 bp, Glycine max
  Clone ID: PAT_MRT3847_64875C.1
gtaaaagataacgagaaattgcacgatttgaaacatacaaaaccgcggttacggatcatctacaatggaaaatctcctggcggtgagatataaccgctggccggaactcaaatttcactgggagagtgatactatacaggctcacatttcataattgcgagataaatctccttgtgagcacgcatttgggcagactgaggcttcacatacactcagagtctcccctgcatgcttctcctgcataattaaccattctctggaatatcatgttttggtgcaagcttatgtgcagaatttttattaaaacctagggcgttctacttcacttgttattggtcagctgtaaccacacccacatctggcgccgtttctacactcgtgattgtgagaagatttttcttaacacgggagacaagc

SEQ ID NO: 103941 - DNA, 334 bp, Glycine max
  Clone ID: PAT_MRT3847_64876C.1
ctgtttactttgtttttttgtattatttttttccttttttgatacatccattctttgttctttattttttctattttttcggggccaacaaaaactcgaccaaaacgggggacatacaaaaattgacctgcccaaatttccaaaaacccccctactttcatttttcacccgccccacctttaaaattcccaaccctttgaatccgttgccaaaatcttgattttcttttccaaaaaaaaaaaacccctccctgttagactaagccttggtgggggggaaaggagtattcccctatacatccccttttcgtcgtgggaaatggcacatcctttgg

SEQ ID NO: 103942 - DNA, 1162 bp, Glycine max
  Clone ID: PAT_MRT3847_64877C.1
gcctgcacgtcgactctagacaccatgaagagagatatgactaccttgggggttatcactaaaagcctagttagctctctcccttataggtcccttaaataggggcacggagcaaacacgctgcgtgccatttttcacactgccatgcataagtatcatatacccttttgcttatattctatgaatattggcatactatgtactgcgcctttcgcatatgcattgcacatgggttctgtcttgatcccctttgtaaacaaaccaacgaagggtccgtgtcaccgttttaaatacatacattggggcactttgctacccctagacgttgtatctaagaaggagacagtttctcgggctcccgtattcgtaaattgcatctgtgccatatgcatttcttcatgcattcatccattccacccatgatagatgttaggagtttgattcgcactaaattttatttcactttagtaaaacaatgggatcaaagccttcgtttaaaaagaggttctatcaagtcaaaatcaagagcttagaggtcactagtttacgagaggttgggcaattaatgggtcaacttcaacggcaagccttccgcaaagcctatggtaagatttgggacctagctagggtagaagtctccatggaaccgattgcatccctttcccagtattatgaccagcccctaaggtgcttcacatttgaggacttccagctagtgccgactgtgaaagagtttgaagaaatcctgggatgcccactgggaggaaggaagccatatcttttctgtgggttctatccctccacgacaagagttgccaaggtagtgaaaatctcagcacaagagttggaccgtgtaaagcaaaacagaaatggagtagtcggagtaccaaggaagtgtttggaggaaagggcaaaggccttggaaaatcaaggcgaatgggctttcttttattgacatcttggcgcttttgatctttggagttgtcctctttccgaatatggaagggttagtggacctagcagcgattgacgctttcctcgcctttcatcatggcaaggaaagcccgacagtcgccattttggccatgtatgacacgttcgaccggagatgtgaaaagagcggcgcaagaatttgttgttgtgcaccaactcttggctatca

SEQ ID NO: 103943 - DNA, 392 bp, Glycine max
  Clone ID: PAT_MRT3847_64878C.1
ttcgggggtactaggctgggaatagtatgtgacttattgactgttactggcaacctgattactctcactggaccctacttcatcctcaaaatgctgctggtgatacttcttgatccggatgtgctatggaatcatagactgtcatcttaacaaaagctcactcgatagatgcagttggatagtactgtagtgtaatccatcggactgcactgtttatcgtaaaccctgagacagaagaacctgctatatatattggtgtaacataggaccacccctgtaaacccttccggcaaggtccaacctgtactgcgtgaattgctagtgatttcgtttgtaatagatatcatatcactataatgcattagcacgaattgtttcgttgcttgcaaaaa

SEQ ID NO: 103944 - DNA, 367 bp, Glycine max
  Clone ID: PAT_MRT3847_64879C.1
ctcaaggctctctttcaacgatcgttctcttatcctcagcaatgcttacagtatggtaattcaatgcgtaatgggttggcaatggatttaaaccaaatccagttagctttacgctcttgtggacgctttcaagctatcaaacatgccaaatcactccattctcttataataaaactttgccttttcaatcacgtttttctcctaaacaacatcatctctgtctacgccaaatgttcccatttcaatgatgcacgaacccttttcgacgatatgcctcagaggaacataattttctagacaacaatggtctctgcaatcaccaattctgggagaccccacgaggctcttaccctctacaaccacatgc

SEQ ID NO: 103945 - DNA, 1079 bp, Glycine max
  Clone ID: PAT_MRT3847_6487C.1
tacggctgcgagaagacgacagaaggggacagccgagcaaaagaaagaaagaaactgcaacttcctctgttttgctcccctgtttaggccttttcataagcttagaatgacacacaaggaattttccattgctctagtgactctcattgctgttctctttgtcaacatgaacatccaaggtgccactgctgactatggtagttggcagagtgctcatgccactttttatggcgggggtgatgcttctggcacaatgggtggagcatgtgggtatggaaatttgtatagccagggctatggaactgacactgtggctctaagcactgctttgttcaacaatggcttaagctgtggatcttgctatgaaatgagatgtgatgatgacccaagatggtgcaaacctggctccattactgtaactgccactaacttctgccccccaaacccttctttgcctaacaacaatgggggttggtgcaaccctcctttgcaacactttgatatggctgaacctgccttcttgcaaattgctgaatatagagctggaattgtgcctgttgcctttaggagggttccttgtgtgaaaaaggggggaataaggttcacaatcaatggccactcatacttcaacctggttttgatcaccaatgtgggtggagctggtgatgtgaattcagtgtccatcaaagggtccaaaactgggtggcaacccatgtcaaggaattgggggcaaaattggcagagcaactcatacctcaatggacaaagcctctcttttcaagtcaccgccagtgacggtagaactgtcccaagcttcaacgtggccccatttgattggcagttcggtcagaccttccaagggggtcagttttaggaggaaaaggaaataggaatgttagctacccacattttattttgaaaaaaaaaaattgtgatggattaaaatttgttaaagattacgaatttgggaagtctcatatttaaataaaaaaaattattaaataagatgtaaaatttattaaaattggtaatttttaatcaattttaataaatcatataaaaaaaaaaaaaacacccac

SEQ ID NO: 103946 - DNA, 232 bp, Glycine max
  Clone ID: PAT_MRT3847_64880C.1
ttttttttaaaaaaatggttttttattatgaattaacggtggtccccccttggaccggggtaaattacccgggggccacatttttacaaggaatggaccccagttattattaatttggggtcccgggcaatgtcttggaaggtatttttttacggggagggggttctaccctatggcaaagaaggataattgaaccccattttatggattaacaatggggttccattataat

SEQ ID NO: 103947 - DNA, 277 bp, Glycine max
  Clone ID: PAT_MRT3847_64881C.1
agacaagacgacagaagggatatcatcatatataatagataattaaaaaatcatttaatatgaatttataatattaacacattagaaaaccgatacataaaactaattaaaaaagtaatatttttgaatcacatatcacattttaatataaataaaaaataatacataaaataaaataaaatgataagttcaattatttataaaaacaatatggagtatcacaaaattataaaatgaaccccttttaattcagagtcattgcacttccagatggatt

SEQ ID NO: 103948 - DNA, 406 bp, Glycine max
  Clone ID: PAT_MRT3847_64882C.1
tgtatgggtttaatacatacttaaaagtaacgcttaacttttattttaatgttatgaaatgaatattatgttattttgttatatattgcttaatatatattatattaaattttaaaaagtagaagtattagttagttttggcttacttttcgtacttggaggaatatacggttcttaatgttgaactctaggaatcctccatggaattcatattgcttgccagccggtttttataacattattgttgaatcagatttcctttgaattcaggcaattatatatacttcttagacaagggtgtttcaaatctcatacgtgctacgttttagtcccgaatatatatatatatatatatatatatatatatatatatatatatatatatatatatatatatatatataac

SEQ ID NO: 103949 - DNA, 351 bp, Glycine max
  Clone ID: PAT_MRT3847_64883C.1
gtctgttttgaaagctaaaatcatgtttttttgtttatgactgcggaacccttcactattttccttggaaaaaaagcctagattaggggttcttccacaaaagggcctctaaaactcccttttttttacttctgaaaggggataggctactacaaaaaaatacctctgaatggggtttgaaaaccccccataaggggtggccccaaataccctatttggggcaaaaaaactccccaaagttaaagattatgagggcgtggactttgtgaaaacaaaacaatgtgagtgtcggccccctttcagggggggccctatttttttttcggtggtattcgtggagccccctcgcct

SEQ ID NO: 103950 - DNA, 367 bp, Glycine max
  unsure (1)..(367): unsure at all n locations
  Clone ID: PAT_MRT3847_64884C.1
ctcgggccgccctttttncacgagaaacacggggacattttggggattttgcgggttttaaacaaacagcccacaggcagagcattgtggtgcctgtaaggggacaaaatcggaaccacattccggggaatggatccccccaaaaggggggggggggcccaacaaaggggttgaaaagggggggcctgggggggcaaaccaaacctcagggggcttgagttttcctattggcaaacccaaacagggtacaggttttgacaatctctggggaaatccccaagaattcgaaaaaggggggaaaactccaaagccaagcttttttggtccacagggtactggcagaacctctgaaaaagggggaaccccc

SEQ ID NO: 103951 - DNA, 130 bp, Glycine max
  Clone ID: PAT_MRT3847_64885C.1
gaccgcggcagctagcgaggcagcaagcacagagatcgagccaaagcgaggccatgccctcatgtgcttgccacgtgtttcactcttcctctgcgctctaaccccgtccgcgcctcagggaagcaccacg

SEQ ID NO: 103952 - DNA, 161 bp, Glycine max
  Clone ID: PAT_MRT3847_64886C.1
aaattttattcaaattcttccatacataaaggtcgtattgattgattaaattaaagagaatcacacatgtttggccatatattattatgtattggttattataaaaacaaaacacaaaaaactcaccgaattcctatcttatataaaaagaacgaatattt

SEQ ID NO: 103953 - DNA, 836 bp, Glycine max
  Clone ID: PAT_MRT3847_64887C.1
ccacgcgtccgatgataggcagtactcatcttcaatgagatgctggctttcttgagcaactccttccaaaagaggctcatacaaaagcttgggtctatcagagactatcgaggcaggaaacccatgcagactcaccacttcttaaatgaataactcagctacttccttagctgtctaaggatgacttaatgcacaaaaaatgagcatgtttagtgcagcctaaccactaccactaagatagtgtctttcccttgagcctttggtaaacctccaatgaaatccattgagatatcagtccataccttagttggaatagggaggagctacaacaaccctgcaggagctattgtattgtttctttgacaaatttcacataaagcaacataatcccttatagttttcttcattcctttccaaaacaccacattagccaccctcttgaaggttctaaaaaaccctgaatatcctcccaaaggggaattatgcaattctttcaaaagtagagggattctagtggaatttcttgacaaaactagtctatccttgaagtatagtttacctccatgaatggtatatccaggcttctcttctgttttagttagaatcccttaataaattccatataattaaggatcagcttgtatttcttcctcccaatcagcccattcctcctcttgcaccaacgaaattgctgaaaatgaaaactgtttggatagtgcatcagccaataaattctccttgcctggtctttaatgaatatcaaaatcataaccaatcaatttagtagctcacttgaactgttcttcactcataagcctctgctcatttaggaactt

SEQ ID NO: 103954 - DNA, 415 bp, Glycine max
  Clone ID: PAT_MRT3847_64888C.1
aggtctgattgcagatgtttgatatagtgctagctccaactcccaatcatctgcattcacttcttcacaatacacctatcactaatccaacgattaacatcatcgaatgttttatctaaggtaagctgcacaatctctgcctcactgccgtttgcgcatctatcaccgccagctcgcaacggttgtcatcgtgtcagagacacacgatcacagtcgcggtgcgtatggaaacctcgacatacagaggatctccactcttccatatgtatatgataagcactcacagtacatcatcaactgagtgtcaatcacacgagtaataccatcattagcagttactccactaatcacagtgcacaatgttcctacggatgaagggacacaatagcagtagatatgcttcatgccatcggag

SEQ ID NO: 103955 - DNA, 232 bp, Glycine max
  unsure (1)..(232): unsure at all n locations
  Clone ID: PAT_MRT3847_64889C.1
cgcccgcaagacttttgtctccatgtttcaagcactcataatgatgcccacgtcactcaagttgcgattaacaatctcgacaaggcaacacattgaggggcatttcattactgtaaggacagctcttggctcaacatatgtagtgagaaacctgcgccattggacaacagcgctatttagnacatccagcattgcttacactagatagctacccaacagagccccggcacca

SEQ ID NO: 103956 - DNA, 1382 bp, Glycine max
  Clone ID: PAT_MRT3847_6488C.1
gccaaagaaaggtgtgcactgtgcaggcgaaggcaagtccaaagaatgactagcccacatgtccttggcactttcctgaacattacttgtggggacatcagaattactagtgaaaaatatatagttagctctatacagttcatcaattccaccaaaaactaggagacaatggacgcccgcattacaaaaattttgaacataatctctagtgattatgaaagagtcaaggccaattttgcctatgaccctctctcacaacattatttacagagacaatatcaattcaaccattgcgagtaattgtacatatttaaagtatcaattcttggtgaagcacccagaaaacatgaaggatccccattaaaataccttggggagagggttgtccctcctaagctctggttaactgccatccagcaatagcaacaaatattagatgccaaagctacagccacgaacaacaaaaacaagctcagttagttcagatggtgcatcaatcaacaaacttcagcattaccatcatggtttgaacttgcaaaaagttaatcatatttgcacttcatttgccagaaaatttcaatcaagattgccatcatggctcgacttttcaacaggcaatcctatttgaaccccatttgccttcattactttaatcaaccattttcatgattaccatcacggctttgatctttcaacagtcaatcctatatttaaatttgcatttgatttgctagaacgcttcctgagttttcgtggagtggtagacacatgaggacctacacttagctgttgtatcatgtctacagtatgtctctcctctctgacagctttaccaattgaaaagtttttggaagcagaagcttcaccaagcgtactctgttgaagtatggcctttgaaagcacaggattatctgccgtacatgagtctaaacttagccatgaagaactacttctgtcatcctgtccatcattagtcaaagcaatatttagtgtagtactatttgtaaggaggccaccatcaacttcagtaccataatttccccttggttcacacggttttttcatacaatccatatacttcacaacattttcttcagaagaaattgggacctccttattttgaacctcaagagcttgttcacagccagaaccatcctctccttcggaatctgtcatttcctcacactcaaactctacatgttcttcaatatcttcctcagaatcacttaactcttcctgctccatcactatctcaggatgagactgatcaccaatatcatctacatcatatctggtaatgttatcattgggaacaaccaaaggagcacttgaagcaagctcgcaactgccagctgaaagattttcaacaccggacgcgtggg

SEQ ID NO: 103957 - DNA, 687 bp, Glycine max
  Clone ID: PAT_MRT3847_64890C.1
atgtttagattgcaaattcacatattttattagtatgaatacatgaaaactaatcaaattgagctcaaattaaataaggtgaaaaatagtacaattcacggctagaaaaatcaactgtataatggagaaaatgggagtgatgctaattactctattcctctttatagctgcaacagttgcagaagatgctgataatattggtgaagccattattcccgagaaccctaaattcaaaaagtttgtgacagattgcacatcgcatgttgctgaaagatgtagtagtggaagcgaagcattgcatggcgagggagggttggctctttgccttttcgattctatggaaaattgcttggtagagcatggagcggccaaagttaaccaacgatcattattcgtgctaccaaaaggatccatccatgaatcaatgtgtctatcccagtggagctgaatccggtactggtagcctacctattaaggcgtaaaattatcttgtgcataaaggcaaatatactggaagtacttgcaatagtagaagaataactgagttagatcagcctattggcttccaggctagctagcttgttttatgaataaagctacatcactgaatgtcatgatccatattggcgttcctacgtactaataaataaaaagtaataagacatgctttacttcttttttttacag

SEQ ID NO: 103958 - DNA, 466 bp, Glycine max
  Clone ID: PAT_MRT3847_64891C.1
ccacgcgtccgtagtcctgttgtttctcagtgcgcataacatggatttggtgccggagaaaaccacgagtgggcgggagtacaaggtcaaggacgcttttccaggccgacttcggacggctttagagcgagctgggcctggttgagatgcccgggctgatggcctgacggaccgagttctgactctgccagtcctttaagggggcccggattaccgactccctacacataatcatgcataccgccggtgtcattgagaccctaaccgaccttcgatccgagatcagatggagctactacaacatcctgttcatcaataaccacttcaactgcctgatttgtatgatacagagacgataaatatcacagtgaagattatgactggctattaatgcggagctgcatctggtgaagcctagagagtccagccaagctgtggtatcttgctcataaaattgaaccgtgaa

SEQ ID NO: 103959 - DNA, 118 bp, Glycine max
  Clone ID: PAT_MRT3847_64892C.1
taaatgtagacatcatcatcattgaaacttccggtagtttaatggcaacacgcgtgatccctccaagaatcctcaaggagctccgttacaacacatcaaccaggccactcaacgctgc

SEQ ID NO: 103960 - DNA, 756 bp, Glycine max
  Clone ID: PAT_MRT3847_64893C.1
atgtttagattgcaaattcacatattttattagtatgaatacatgaaaactaatcaaattgagctcaaattaaataaggtgaaaaatagtacaattcacggctagaaaaatcaactgtataatggagaaaatgggagtgatgctaattactccattcctctttatagctgcaacagttgcagaagatgctgataatattggtgaagccattattcccgagaaccctaaattcaaaaagtttgtgacagattgcacatcgcatgttgctgaaagtttaatatcttgtgtgtgtacttggacgtccatggtgccgagtacaaggttattaaataaccaacaattaggtcaaggtttctattatttccaatatgagccactcctacaattcagaaccgtcttgagaacatgttctctggaaagtgcaaggacttgtctcaatgctcctaatgttgctacatcacctttagccgcttgtctcattccatccatgaatcaatgtgtctatcccagtggagctgaatccggtactggtagcctacctattaaggcgtaaaattatcttgtgcataaaggcaaatatactggaagtacttgcaatagcagaagaataactgagttagatcagcctattggcttccagctagctagcttgttttatgaataaagctacatcactgaatggcatgatccatattggcggtcctacgtactattaaacaaaaagtatacgaccggctttacttcctttttttaccg

SEQ ID NO: 103961 - DNA, 1053 bp, Glycine max
  Clone ID: PAT_MRT3847_64894C.1
ccgctcaggcggcgggcgggatcagattctcttatgtttagattgcaaaattcacatattttattagtatgaatacatgaaaactaatcaaattgagctcaaattaaataaggtgaaaaatagtacaattcacggctagaaaaatcaactgtataatggagaaaatgggagtgatgctaattactctattcctctttatagctgcaacagttgcagaagatgctgataatattggtgaagccattattcccgagaaccctaaattcaaaaagtttgtgacagattgcacatcgcatgttgctgaaagatgtagtagtggaagcgaagcattgcatggcgagggagggttggctctttgccttttcgattctatggaaaattgcttggtagagcatggagcggccaaagttaaccaacgatcattattcgtgctaccaaaaggatccacacccattgaaccaaaagattcattaccttcatttattccatcaccacccatacctcccaagtccaaatttgaatgttggtgtgaaagtttaatatcttgtgtgtgtacttggacgtccatggtgccgagtacaaggttattaaataaccaacaattaggtcaaggtttctattatttccaatatgagccactcctacaattcagaaccgtcttgagaacatgttctctggaaagtgcaaggacttgtctcaatgctcctaatgttgctacatcacctttagccgcttgtctcattccatccatgaatcaatgtgtctatcccagtggagctgaatccggtactggtagcctacctattaaggcgtaaaattatcttgtgcataaaggcaaatatactggaagtacttgcaatagtagaagaataactgagttagatcagcctattggcttccaggctagctagcttgttttatgaataaagctacatcactgaatgtcatgatccatattggcgttcctacgtactaataaataaaaagtaataagacatgctttacttcttttttttacagaaaaaatatgatttacttctatttctcatgttt

SEQ ID NO: 103962 - DNA, 298 bp, Glycine max
  Clone ID: PAT_MRT3847_64895C.1
cacgagaatggttgttgtgtggccaaaaaataaaatgtgtacgtaatatgggccatatggcctatcgctgctagctgatgatgattgtatatattgttaaaaaaaaaaacatcattttaagacggttcttgccacgaccgtcttagaatatacttaattctaagacgatcctgcatctacgaccgtcttataatgacatacggtctatgacggtcatgcgccgggatcgtcttagtatgtacgccatgctacaacggtcctcacgccgcaatcgtcttagaatgaatgttattcctaa

SEQ ID NO: 103963 - DNA, 493 bp, Glycine max
  Clone ID: PAT_MRT3847_64896C.1
ggctcgagccacttgccaaggttatcaatgacagttttggcgtttttgagggtttgatgaccactggtcattccatcaccgcttcccatatgactgacgatgggccatcatccatggactggagaggcggaagagctgctttatttaacatcattcctagctgcactggagctgccaaggctgttgggaaagatctccctgctttgaatggaacactgactgggatggcagtccaagtgcccaccgtggatgtttctttggtgacctcacagtgaggctggagaaagaagcttcctacgatgaaattagagatgctatctaggaaggatcagagggccaagatgagggcattctcggctacactgaagatgatgtggtctccactgactgtatgggcgatagcagatcaagtgtttttgatgcaaaggctggaattgcattgaataatagctttgcgatgctcgttgttggtacgacaacgagtggggataca

SEQ ID NO: 103964 - DNA, 199 bp, Glycine max
  Clone ID: PAT_MRT3847_64897C.1
tacggctgcgagaagacgacagaagggtacggctgcgtatagactacagaagggtgcagctgcgactggtcgtcagatcgattacgatggtgtgtgcgggcttacagaagacggcattgattctattcctcaaaaccgctgatcttcccttctcgggcgagcacccatttaagactttcggtcttgtcgataaagctgc

SEQ ID NO: 103965 - DNA, 275 bp, Glycine max
  unsure (1)..(275): unsure at all n locations
  Clone ID: PAT_MRT3847_64898C.1
caaagtgcagtgactgtgactcgccacagactacgcaaaggcaaagggtttctttccaatcattcaaaggttcactcttccctctcattttctcttctgcttcggttttgtgttttttgttgcagaatattattcactgatttcccacatctttagggttaggtgatctgtaatacgctatactcatgttctttgtttgtgcaccttcaacgntngttntnngtggnannaaatnccctnnctcagaacctanttccgtgnntgggccatttagt

SEQ ID NO: 103966 - DNA, 876 bp, Glycine max
  Clone ID: PAT_MRT3847_64899C.1
agaaggggcaacaatgcatcatatattccacaccaaagcatatatagaaatgcatgaaagattactaattccagagaatattcaacaccaaagcatatataaaaataattttttttttaaaaaatcccaaaaggaaaagtttgacaacacaaattgtaaaatcatatctcaacaagttaacaaaaagggtctccaaaccaaaaaccaacacaaatgttttcatcctctactcttccaatattgttcccttctcgctgacataaataccatcaagaaacttccggatatccttattcttaacatgacatttctggttaatgagagcacatgacctagaaacaagttcaatgtcgtttccatccaagaccaattcatctttgaccttttcagatctaacaaccgacacgccctcaagcatgtctactttcctcaccttcttctcgccgaggaaatttctgatctcgatggacttgctgttgttgccaatgctagcgttgatcggaaaatgagcgtacacgaatctcattttgtatcggtatcccttggtgacgccggtgatcaaattctcaacgtggctgagggcggtgcggatggcggcggaggttttacgagaaccaaaccaagaatcaatcttgagcttccttttaccgccatcgtcggtaataagttggaagtccaagttcagatggtggaagtctcgcacgagttttccacgagggccctcaacctcgataaccttagcgtgaaccttgatgctcacgccgtcgggaatattcatggtctcggacgatagaatcgtcttcattttgcgtctctgttttacactcctaagacttctgccacagtgcctcccccacgcgtccgcccacgcgtccg

SEQ ID NO: 103967 - DNA, 482 bp, Glycine max
  Clone ID: PAT_MRT3847_6489C.1
agttcactcctcatctaccccttgctcatctcatggctgttcttatgtgttcgacttggcttcctggtcttcttctcgtttcacatacattcctcctgccttacgccaccccacgaccagtccttctgccttaggccattccacgacttgtagccgtcctaataatctgaaacagagatgatccaacgacaacaaagacgaagaacccaagcacgatggggcccacaggataggcatatcccttcttagagctttctgaacctttcttgctaatattcttttcaaaccttgctattttcctgtccgctaggcgctttgaagtagtcataggagcgacccgggcaggaacccaccccacaaccctcttgaggcagttggacgtccatggagcactttcttgggttgttgtgtccatttggttgtaaactagctgcaaaaaattgaatgcagagttgcacacgtccacatttcggacgcgtggg

SEQ ID NO: 103968 - DNA, 1031 bp, Glycine max
  Clone ID: PAT_MRT3847_648C.1
ctcccacgcgtccgcccacgcttccgatttagtgtggctcaagattgtggaaaaccaacaacaagaaaaagatataatcataattatatttcttgatcggtgctccgagtctggccgaggacaacagggaggcctgcatgagctcccccgacctctcctccctgtggctgtcaacgccgcaatccgccactccgggacccgacacgagcagagctccgccgcctccgccgccgcaatctcagtctcctctacaaaggcggttgcagacgctactagaaggagctagagaaagctggacctatgcaattttctgggagtcttctcacgacaacttctccggcgctacccttctccgttggggcgacggctattaccagggcgaggaagaggacaaagccaaaggcaaagctcccaaaacgacgacgtctgcagaacaggctcgccgcaagaaggttcttctcgagctcaactccttaatttcggggccctcggtctccgccgatgacgtggacgaagaggtcaccgacaccgtgtggttctttctgctgtccatgactcagtcttttgctaacggcaccaccctcccgggccaggcttttttcaactcgaccccggtctgggtcgccgggtccgaccggttatctgaattggcctgcgaacgggcccggcaggggcggatgtatgggcttcggactctggtttgcataccttccgcaaacggcgtcgttgaactcgcttccaccgaggtgattttccagaaccctgatctcatgaacaaagtgctcgatttgttcaacttcaacgcagtggacggccatcccactctaccaccacgacaacggtaactaacccaattaattaattactttcattttttactgaaataatattaaatgatattgttcatgtgttatttagttactatacattattaaactgcatgattttactcggtgatggatatttcggtcctgaaaatttctctaatgaaaactaaaattcagcggattttaattcacgcgtcaaagatc

SEQ ID NO: 103969 - DNA, 1092 bp, Glycine max
  Clone ID: PAT_MRT3847_64900C.1
gccaaagctaatgaactcacaacatttcttgcaaatatagcatcttattacaacttcaacgtcccatataaaaacatatttaaggtaattcaaaagacttatttgttatcgatcgttgtataattcttgaataagacaggtggaagtaaagttcctataagtttcatggatctaactaaaaaataagcattccacgttcacaaaaacacatgtggagacactaaacatcagaaacacctgagagattgtcatgtaaacttggattattgggtcatgttttattgccacagctttataaaaattagaccccaaaggcaacagggcttagttgggtatggcagcctccctcccttccctggccttccatcaaaaaagggtctccaaaccaaaaaccaacacaaatgttttcatcctctactcttccaatattgttcccttctcgcttacataaataccatcaagaaacttccggatatccttgttcttaacatgacatttctggttaatgagagcacatgacctagaaacaagttcaatgtcgtttccatccaagaccaattcatctttgaccttttcagatctaacaaccgacacgccctcaagcatgtccactttcctcaccttcttctcgccgaggaaatttctgatctcgatggacttgctgttgttgccaatgctagcgttgataggaaaatgagcgtacacgaatctcattttgtatcggtatcccttggtgacgccggtgatcaaattctcaacgtggctgagggcggtgcggatggcggcggaggttttacgagaaccaaaccaagaatcaatcttgagcttccttttaccgccatcgtcggtaataagttggaagtccaagttcagatggtggaagtctcgcacgagttttccacgagggccctcaacctcgataaccttagcgtgaaccttgatgctcacgccgtcgggaatattcatggtctcagacgacaagatcgtcttcattttgcgtctctgttttacactcctaggacttctgccacagtgcctcctctcaactgctgcccccttctgtcgtcttctcgcagccgtcggacgcgtggg

SEQ ID NO: 103970 - DNA, 739 bp, Glycine max
  Clone ID: PAT_MRT3847_64901C.1
tacggctgcgagaagacgacagaaggggacacaaaaacggctaaaaccataacaagaatggtgtttggctcaaaaaaaaagaagaagaagaaatgttagggttaggatgcttaaacctcaatcgattctctcacttcccatcccctccctctctaccatcctctcgttccgatttacttaaggttgcgtctcgtagattcgctttatcagtgactaaaacgcagcaatctccagtcactaagccacaatccacctccaccgctataattgcaagttcattaataagttctcgttcctatttatttgatttgatttgatttcattgtttttttattttattttatttttttagctgcaaatgttagttgttagcttgttagtttttgttatcgggggattcaaacccatgccgtatccctccctcccttcaccctttatcaccaagccaaccttatatctccctcattgttttctttgtgataaaatggagttgtgttgtgttctgtttggaatgatattaggaaatagataacccggccagtgtcaaaaggcaattggcgcaactgtttgacttgtctctgagggcaactgtgcccgatgagccagatgttgtgccgttaattgatgcttgtgctggtaaaaggtggcgtaaaaatttggtgattattcaatgtaataatgccattgggtatttggtcttaagatgaagggaaagccggccaggattttaggggtcccc

SEQ ID NO: 103971 - DNA, 1079 bp, Glycine max
  Clone ID: PAT_MRT3847_64902C.1
acaaacaaataattacattattgcatagttattatggcttggttaaaacttaagtggccatgacacttttcctcgttacattgtataatttcgtcatcatttgttttttgagtccagacttgtcattgttgactaagcttttgaagaggatgtgccgtaaatccaaaagctaaccaaatagggtggaagtaattaagttaatataaggacttgatcaaatgcaacatgtgctaaacatctgagcacgaagaacctagttaactaaccgttagtacagttagggtgttctgccagcttccctgcgtaaattctgtggttaccagctgaactagtcattcatgaatgatgaatcatgaggagtggagggaggacttcattcgtcaaagttgtcttgcagattaatgatataacccaaaagttgcttcatcagtcagccatttgctttgattatgtttgagatgccaattctgagttacatgttcaatcactcgtctgtagcaggaacatgtgcgaagaatgacaattagttgctttgtcagtttacaacctaactctcacatgcagaatccaagtaaattgcaaaattcacacgtaagcagtgatatttcaaaatagaaagaataaaatagcagcatcagtgtagagtgaagctcctgatcactgttccatgtgaatgccagctaccaaccatattcacaacctttaggcaatcatttcatcacttttgcagccaaagctttgtgccgatcaataagtatttcattcatttgtgcaatctggtgcaagagtttggcaattttccgatctttgttgttgatgatgttgatgagacgagcttcattgggagtgagggttctcttgttcttcctgaaggcgatgaggatccagcaggacatgaggagcgccgcagcgggaagaccaaatgaccaaattgggcctctcaggcgaaaagatgaaagcttggaatgcaaaatgtggagggggatactaatccaggcgaagggtgagggttgaggtggaggaggtgagagaggggcgtggtattctgatgacaacccacgcgtccgcggacgcgtggg

SEQ ID NO: 103972 - DNA, 328 bp, Glycine max
  Clone ID: PAT_MRT3847_64903C.1
ggctcgagcaagtcagtttcaatgacttgtttcctactgtcagttttccctgtgctgtacaccaggttccttgtgcgcctattccagtggagatacacacaggatgtctagactattaaacttatgatcttagaagatcacattacgatcagcggcttcatccacaacagttcacaccctgtgcatagcgtttctctcctttgccccaccaattgtaaggcctgtcaatgtggacaggaagttactttgcgtgaggtctgtctgagagtttcaatggcatatcccgaatgctctgcatccttttgtgtctcaaacccactttcaacat

SEQ ID NO: 103973 - DNA, 1845 bp, Glycine max
  Clone ID: PAT_MRT3847_64904C.1
tccatccagtacacttggttcaaaagaatatgatccaaataagcaagccaacatttacaaaccgaaggccaaattgaaggaagaaaaaaaattgccgaacacctgactatggaaagcttaatctacacaaatgctgggttattccccaattagttcaggaaaatgaaaaatgatggggaaaccgattgcagcgtgaggacagtagaaatgaaaaaaaaatacatctttaagagtacaaaaatcttctagcaatttgaagatagacttaatttacaaggatgaaactatggctcacgaactactatgagatcttacagatgaaattgactgtgcagagacagatgcggtcgggctgttaaggtccctctccccatttatttctttgggttttccgctaagtctttccatagcatcttgacatatgtcgttaaaccattcgtcttcaggcagttctccatatggatccatccctgttgcagaaaatgctgccattgcttttgttataatctcattgacaattcgttgcaaattcctagacaagtaccgaccatgggaggcaaaacatacgacaaacttcatatccaaatagaactgttgaagaccaaggggacctaaaggccttggcccttcctcaatatcatcccaaaagctctggtcttctgaaagccacaacacaacagtttctgtaagtctcatcaagagcagcgtagcaaatctttccctccccacaaacatatctgctgctatattggccattcggttcagttttacaaaaagctcctgaaaaatcaaagatggaatccattcaacttcttctgcatttccatccatatttatatacatgtcagcagtaagatggctatcaccttcctctgtaaaaattaggtccaatgcatgttgacgacaaaatgtatctttcaatctgtcaactgaaccaacaagtcttctcctccattctctttgttcaggatgacgattttgcctttctgaggttcttcttcgattatcatccttgtatgcagcctgatttatgggggaaagcttcatagctgcacgaggaagtagttcatcagctagtaatgaggcattagctagcaacgcaatttgctgggcctcagtctcagccatgcgtacaattttgtttccagaatcttcaaggcttgcttcttcctccatagatccaggcaatgcttttatgagcatgttcacataggagttaaatacttgaaacaatccttcgagagcttggcctcccaactgcatgctaagcagtggtccaacatcctcaaagaagtcctggaccatcaaattgaagcgatgggcactgcttgtaagtttatgttgaaatgctgttgtattactaatggatatacttgaaggcctactagtctggcgattagatgtaggagggtatgtaagtacccaatcatcagccgcagccaaagcagcagtactctcttgaattcgtttcaaattagcatctagtgcttgctcaacactaggcctaaaaagtttcaatagcacaggacaaagagccaggccacgagcttccaacaatgagcaatgacccaatgctatttgaacacactctgcagcagctcttaaacctcctgcagctgctgacgaggctaatgcatgccttttcaccagaagagcaaatgcctctgtttgcttcgtagcccacatcacaagttcagaagtataagctggctcctcgccaaaaatagccaatgaatcacttgcagcttgtgcaactgcagagaataccagttgggcaagagctgcagtatatgctccaccatatgaggtgcttgatggccgaagactttgcatgttatactgata

SEQ ID NO: 103974 - DNA, 2584 bp, Glycine max
  unsure (1)..(2584): unsure at all n locations
  Clone ID: PAT_MRT3847_64905C.1
gacacaaaaacggctaaaaccataacaagaatggggtttggctcaaaaaaaaagaagaagaagaaatgttagggttaggatgcttaaacctcaatcgattctctcacttcccatcccctccctctctaccatcctctcgttccgatttacttaaggttgcgtctcgtagattcgctttatcagtgactaaaacgcagcaatctccagtcactaagccacaatccaccttcaccgctataattgaaatagataaccacacgcgtccgggctaaggctgttttggaatcctaaaaaaaaacggagaaagttgcgccgttatcgcgctcccatcatttctttttcttctccctcaacacaacacactcactcttctctgcttctgattcaccgaacgttgctatttaagaaccacaatccgtttccatttccatttccatggcgtatgttgaagtatattgtccagctagtgttaagaagcagttggcgaaggtgtttgaggagtctctccggataaccgtgcctgatgaacccgatgttgtgccttctattgatgcttgtgctgtcaacaaagctggtgttaaattcgctgattatcaatgtaataatgcaatgggtatatgttctaagatgaagggaaagcagacaggatttaggggtccccaagcaattggtcaggccatacttaacaatcttccgcaatctgaaatgatagattcatgctctgtagctggtcctgggtttgtgaatattgtcttgtcgaagaagtggatagcgcagaggttagagaggttgctgattgatggtattgataagtgggcacctcgacttcccgtgaagacagttctggttgatttttcctcacctaacatagcaaaggaaatgcatgttggacacctgagatctaccattattggggacacattagctcgtatgtttgaattttcacgtgtggaaactcttatccgtagaaatcatcttggtgactgggggacacagtttgggatgcttatagcacacctctttgacacatatccaaacccaggaggatttaatgaagcaacaattggggatcttcaggcattctataaagcctctaaagtgaggtttgagaatgatcatgagtttaagatgagggcacaacagtcagtggtccggctccagagtggagaagaaaagtatcacagggcatggcagcaaatttgtgatattagtcaggctgaatttgaaaaggtctatcaacgtcttggagttcgattggaggcaaggggagagagctactataatgatttaatccctcaaactttggagagattggataatttaggactgattgaagaaggtgatggtgctcgtgtgatatttgttgagggtgtaaatataccaattattgctgtgaaaagagatggtggctacaactattcttcaactgatctagcagcactttggaatcgtctaaatgtggaaaatgttgagtggaatatatacgttacagatgttgggcagtggcaacactttgatatggtttttaaggcctttaggcgtgcaggatggctgccaaatcatgaaaatgagttccccaaatgtactcatattggttttggtcttgttcttggggaagatggaaaacgatttcggacacgcagcagtgaaactgttagattggttgagttgcttgatgaagccaaaaggcgttgtaaagcttccctcctcgagcgtgatgctgttaaagattggtctgaggaagagatcgaaaagacagcagaagcagttggttacggggctgttaagtatgctgacttgaggatcaacagattaacgaattacacattcagctttgatcagatgcttaatgataagggaaatactgctgtttatttgcagtatgcgcatgctaggatctgttctattatgaggaaatctggtaaagatatagaagaaataaagaaaaatgggaatatagtgttgaatcatgaagatgaacgtgcattggggcttcatttgatacaatttcctgaggtttttgaggagtcgttgaccaatttgttgcccaatgtgctgtgtgaatacctctataatttgacagaaatctttacaaaaaaattttatactaattgccaggttgtggggtcgcctgaggagactagtagactcttgctatgtgaagcaacagtgactgtgatgagacaatgcttttatctccttggaattgaacctgtatacaggctatgacctacctgaagagcttcaaatgcaaatttttgcaacagatattatttttgtctgcgctggtgtaggaaacttgttcttgctaattagctgttccctagtgtttatgaagggaaagtaggaaaatagtgaacgagatgattgtaattttactcaaaaggctctttaaaatttaatttgatgctataccgacggtttcctccaattttgaggctttgtatcagtgatattattggactttcatttattttacatcattttgttatttatttcgttgattttaaannntattcggctgaaatttttgtaataagaaggctaaaataaattgcccagnntcctttaagnnnntattaaa

SEQ ID NO: 103975 - DNA, 390 bp, Glycine max
  Clone ID: PAT_MRT3847_64906C.1
tcttgaaggggggctgaaatttgctacaaaagcccaaaggctgtttcctgaagattcatatcattcgttacatccttgctggctcggagggtcacagtgctgcacacattacatcctgcggacaccacgtgcaccgttttgcgcttctagacactgaaaattccaacgcatcaagcaaccatttccgaaccaggctacgacgactgtgattataacttcatgcatactaaaataaatcggcctgaacataccttgttttccagaggatggctgaatcatgcagagagttgtgtgaccaaaccaagcatgctttgtatgacttaataagcgtagtgcctgtgctactaaccatatctaatgagccacgtgctcacccagatgcaaatgctt

SEQ ID NO: 103976 - DNA, 531 bp, Glycine max
  Clone ID: PAT_MRT3847_64907C.1
ctttttaaattaacttataaataaattattcacttgtttaatatttgagtttgacgatttaattagttttgaaaagaataatatatactttatatggatataaaataatactcattggctagaattttgggggccacatattatatactgggaaacgtatatggaccactttaataaaagtggaaaacccattaatgggataatgggtattacagggtcaattgatgaaaattaaggaccttatggcagtactgtccgattcaaatcaattgatgaggtaaaaagcaaggaaggatcccttgaatattgtgccttaaacaaagatgatccagcagcatctttaagttcctgaccagctatttatcagctgttaggctaactctaacggaaaaagcttttccatattgatgctaattaagatggttagatttgacggaagaaattattctttcccaattggtgaatcaagatttgaatttgctaaagataatttgtttcttcatattcatatgtgtaaaaaaatattcatat

SEQ ID NO: 103977 - DNA, 467 bp, Glycine max
  Clone ID: PAT_MRT3847_64908C.1
attcacaaagctctctgttttttacaactacgaggaaagcagccatcgttgggtaatccctttttggttttctaaggaattctggttcatgattcacactaccaaatgttcatcatgagattttctttcacttattttttactttatttatctagtttaaagataggcccatgttaaaattatgtttgtgtttaggaaataaatcatggatggggcttgtggtagtaaaagaaagaggggaggttgaccgaaaagtaaatactggaatgaagcttgaaaaaataggataagatatgtgtgagtgcaaccacttgaaagagaagtttagtggaggtgctacatggattgaagaacatattactggcaaaggaaatagtatcagaaaatgcttcaagtatcctggttatgaaggaggtcaacaacataattgcttccggtcaaccagtccacgtgaagtctacatacat

SEQ ID NO: 103978 - DNA, 120 bp, Glycine max
  Clone ID: PAT_MRT3847_64909C.1
agaaaacttatagttcttttggatctgatgcattgctcattagagtaaaccatgatcttggttagggtaatgggacttttcgaccactgagctgtgggcctgctgtggaccctgatcaac

SEQ ID NO: 103979 - DNA, 412 bp, Glycine max
  Clone ID: PAT_MRT3847_6490C.1
ggctcgagggctgaaacaacgcacatgggttttgaatcaaaggctgacgagcgacgggtgaagattctggcactacgggctaacattgactctcaaagtgatgaggactccgcatcattaaatgcagatactgcatatgaaactgaaaacatgatccagccggagtatgactataaaagtcactattaccacacgctgaaaaaggaaattgaactccacaaacaaacgaatatatgtgatccaaacgaaaccagatgaggctgcctgactgtatagagactgtgttcgaacaagaaccaatctacatactgaagattcaagatgatcccaggaacatggacgaatgctgtcatgcctaccatccaacattggacggaggggttgttaaaggggagcaaaatgtttgacacac

SEQ ID NO: 103980 - DNA, 606 bp, Glycine max
  Clone ID: PAT_MRT3847_64910C.1
gcatttttcggtggttgggcattcgcaacacgtgcccggtttgtcggtttgagctgcccacagatgatccggactatgagcaggggaaggtcaatagggctgctcgtggtctgttggagcttgcggcagcacggatgcaattttgacttgtctgttgttgcttcaggttatacactcggtcttatgtatatagcagtttgctttgtctcatacaactgatgatgatgatgagaacaaatcttttgtaagtagttttcgtgttgtggtggttttggaataagtttcataccatgttgcatgctctggatatacccaaaatgaatgcctgtcaatactcagtttatattcaaataattaaagtgtacagcaagaaggaccatgttaatggtttactgttccttttaatgaaattctgttataatttttggatttatgaagttctgtgttcagaatcatgctgtatataaagtgttggttatctcatatttgtatatatctacagttttgtttacctttagctgatcctttctcgaaagagttgcttttctaaggaaatggaaaatcttgtattattattccttagttgaatgttactgtattttttac

SEQ ID NO: 103981 - DNA, 256 bp, Glycine max
  unsure (1)..(256): unsure at all n locations
  Clone ID: PAT_MRT3847_64911C.1
gatggatcaatcaaagaaataacaactccaaatacaaatgataactttgaacgtccannnnnnnnnnnnnnnnnnnnntttggtgattcggagaagataaataataataggccgatgattcataaactatcagaaaatcttacacctccattaatagatagaccaatgtcaagaccatcaaatgcatatcaaaggccacctcaatatttccacacaacataannnnntgaaaaancgttngnnnncncanatccgc

SEQ ID NO: 103982 - DNA, 467 bp, Glycine max
  unsure (1)..(467): unsure at all n locations
  Clone ID: PAT_MRT3847_64912C.1
aattcggctcgagcgggtcgagcggctcgagcggctcgagtacggctgcgagatgacgacagaagggtatgaaaatctaattcccaaagcacccagaacattaaaaaaaagctgagagtgaaactttataaattggagtggcaaagtaacttttgatagcttaacattgaaatttgtgcttctggataaattactttagaattatttatttttgaaattattgatttaattgttatatgattgttgagataaacagcaaactctaatgattgatgcatgttctgaaattgtgatgattctttattgataaaattacttaaatgcatgcacgtatatttattattgttgttgntgaatggtaagaccgacaaagtgtgaactctaacaattatatctatggcatgtgaatttattttatatcatatatatgtctacatattaccatttttatttgtacgcgttgtagt

SEQ ID NO: 103983 - DNA, 1044 bp, Glycine max
  unsure (1)..(1044): unsure at all n locations
  Clone ID: PAT_MRT3847_64913C.1
atttacaaataataatttgtgattaacaatataaaaatgagtgcatcaaaggaatatgcgggaatttcttccaacatgcaagctagcctttcttcttattgccacctgcgcagaagatcatgctgacatatatactaataataagtaataactgagtctggaaattaaaatgttacttttcactcatactgtcatacactcatacaccaaaggaaatacttgaagtttcataattatctttattcatatctgatctcctaagccaccgtctccacccagttaggcgttgagcttttgaagtttgagtgacttgagctcctcaattagatctttcaaactgttgtgagaagacccaccaacctgaattgctttctttgcagcatcacttagcgctttcactctcttcctcatttcttcagactcttctccaccgcccatcaacaaagcaattgcctttcctatgtcctccctcttcactatctcatccccaaagtcattccaattgttccattttttggctccaattgccactccgattttcagcacatccaccagcaacctttcattgaaaaactgctctgcaaaaagtggccaagtcaccaatggcaagcctgcatccacgctttcaataacggtgttcatcccacaatgagtcaccacagctccaatggaagggtgctccagtatgagaagttgtggtgcccaaccgcatattagataccctttgttgcttgcttgcaccctcttctcaaattcctccacaaaacctttagtttcaccttcatcagttttcccaaccacccagatgaaatcatgaccagaatcttcaagggcatgagctatttccccaagctgggtggtagggaagttgttcatgctcccaaaacacacatagagaacagagccctctttcttagaatcaagccatgcaagccaagaaccatcttttccttcttctacttgntcttctttagctntgttgncacgtgatccccttngagccttatccgaagcatcttgattcacccacgacgaaatgggtcc

SEQ ID NO: 103984 - DNA, 468 bp, Glycine max
  Clone ID: PAT_MRT3847_64914C.1
gaaccagaagctggttctgagcttcgtgtgcctctcatgtgtgcttgtcctgacagttacaatttcacaaggagcatgaaggtgaagtaccttgtcacataccccctaatactaggagatgatcctgtctaattgagtgaaaaatttggcatctcaactgaagaattctatgcagttaatagcttgaatcccttttcaacggtttatcctgatacagttgtttttgttccaataaaggatggtccaatcagaatacatgatattcctgattctccttctccacctcctggttttctttccacaaatccagtggttacgaccgaggaatccacacaatcatcgaatttgtacattgcaggatcggttataggattctttttgttgataacattgcttgctagtggattgtacatgaagagaatcaggaaaagtgatgatgtccattccattagtcaaacaaactccctc

SEQ ID NO: 103985 - DNA, 284 bp, Glycine max
  Clone ID: PAT_MRT3847_64915C.1
atgagtaaaaagtcattttttactggataatccaacatttaaaagtttaaaccgcttattgcttacatgtagattctaaaaataatggccgcttagaacatccctcactgaaaacaatttaaaagctgcctttccctgtcaaaaaacctatcattggtccttaggatagctcctaaacgattaaccaatgaaaggtgagggaaaaaaattacaaaatgtgcggcgttttataaaatagcttttaaacaaacattatctagtacggatccaaacttggagataat

SEQ ID NO: 103986 - DNA, 361 bp, Glycine max
  Clone ID: PAT_MRT3847_64916C.1
cggccgctcaagccggcgggcgggaatcaaggtcatgtcttctcgtcttcatcatctatggcgacgccgaattctgacgcaaccactcagactcaagattccgacactgttccctattccaattctcccaatgccctcgtccccgccgctcccgccgtttgtctcctccgcttcgccaccgactccgccgccggcgctctcatgggctccgtctttggatacggtgctggattgtttaagaagaaaggttttaaaggatcctttgtagaagcaggatcttatgcaaagacatttgcagttttgtctggagtacatagtctgattgtttgcttcccgaaaagactctgcggcccggatgacg

SEQ ID NO: 103987 - DNA, 195 bp, Glycine max
  Clone ID: PAT_MRT3847_64917C.1
tacggctgcgagaagacgacagaaggagttggataacatgttttgttggctatgcttcatgatgtatttttgggccatactgatgtacattgtatatgggttaaatgttggacatgctgctgaatgatatgctagttctcaaatgctactgttaaaaataaattgcaaaaaaaaaattcaagttgaatcaattcg

SEQ ID NO: 103988 - DNA, 181 bp, Glycine max
  Clone ID: PAT_MRT3847_64918C.1
agattggaagaagacaaggaagtgaacagaaaggtcttcagaccagacaatatctgaacaaaatacagaaatgtcacgagcaagaaaggaaagaaaggaaattgtgacttacgacacatgaggcggaccccttcttgattaccaaccagaatctctcgcgttggcgactttttcgccccgc

SEQ ID NO: 103989 - DNA, 761 bp, Glycine max
  Clone ID: PAT_MRT3847_64919C.1
cccactcgtccgaaacaaccccttcttcactttcattcaaaaccaaagtcccacaccgaaaaaaaccataaaattttagctctccacgtgtatttgaatcaaagtcttttctaatggtttatctgctattattgaaagtgttgggatacaagtcccaagcagaactttatcaagacagctgcttttagctgaggccatcatcataggatggacttgaatcagttttcaagtttcaacgtaattagttcagcaggattcccttgcgcatcatcttgtactcctatttcaccaatatccaaccggttgcttggatccttgaaacttgatataggaaactcacctaattcggccctttctactcattttgattctgatactgtttcttctgcattaagtgacagccaggagcagcacaactgcggggaaattcactctggtgtcaactcctgtaactctttgcaggaaagcaatcattatttgcataggccggtctcatctgtagaccatctcgaagacggattgcatctatctactaggagcttttttccacaggatgcaagttatgaccatgaaaccagacatgcattgctggaattagaaacttctttgatggcacctgatgatgaagatcaagtcaccacatcaagcacttctttgggtgatagcagtaggccaacagcatctgaccaaagaaataggtcttggagccatgagggccaatcaagtgatgttgcatatgtagagaagcgtcacaaatcaat

SEQ ID NO: 103990 - DNA, 745 bp, Glycine max
  unsure (1)..(745): unsure at all n locations
  Clone ID: PAT_MRT3847_6491C.1
ccacgcgtccgcggacgcgtgggttttcatagctcagagtgagaccatttatactagaacagtgttgtcaatggtggatggcagaaagcataaattccgccatataaacaagccattgtggcctatggcaccgccatggcaggtcacccttcacaaatttcctatggcagtaggcaaaaatttcgccacaccattcctccatggcatcaccatttaacaacattgtaatagaaagaagagaagggaaggacatggaaatcagcattcttcagaaaataagaaaaacaatattcaaattggcagagcttcatgtcatgcagcttacctgtacagttttttaatattgttgaaagataagatccacatgcatcagtaagacggtttccagaaatgttaagcacttctagtcgatcaaatagcagtgaacattcacaaatctgacaggaacaagttaatatattagcaaatttgagattcatcgtgcaaaaatagataagcattcttttattctattaatcaagaattgtataaatagattacccttgtgtacatactagatagtttatagtttgaaagttattgaaaaaatgctttggttgggacaaggcaggtgaacttagctgatattttggtgatttaagacctgatanttcattttctttttcagaaaatatcacaattaacatcaaatgtatgcatccattatatttatgattttatttttgagatattttttgggaataga

SEQ ID NO: 103991 - DNA, 510 bp, Glycine max
  Clone ID: PAT_MRT3847_64920C.1
tcccctgtttggggatccccttttttttttttttttttttctctcaaaccgcggggaacccctggaaaaacccgggggaaacccgcggaatctgcgccgcgggaaaaagagaaaaacccgcgggcaccaccggattaaaacacggggaaacgaagctcgggatttcctccttaaaaaggaggaaaaaaccggggggggtattaaaagagccccccccccccccctggaaaaggacgggggccaccttttgtttaaaaaaaaaatgtgggggacccccccccccccaaaaatgaaaaaaaaaaaaaggccggaaaattccggccccccccgaaaaagccccgaagttcccaaaatttgtctcttttttcaacaccccccgtggggtgcccccgggggggtaaaaaagtccccccctccgtgaggggacaagggggggggcgtgggaaaaaaaaccgggcccccttgtggggggggcgttccctaaagggccccccagatttcttggggggg

SEQ ID NO: 103992 - DNA, 459 bp, Glycine max
  Clone ID: PAT_MRT3847_64921C.1
ataataacaaccccttcttcactttcattcaaaaccaaagtcccacaccgaaaaaaaccataaaagtttagctctccacgtgtatttgaatcaaagtcttttctaatggtaggtgttgaatttggttaaccagtcttggaggtttatctgctattattgaaagtgttgggatacaagtcccaagcagaactttatcaagacagctgcttttagctgaggccatcatcataggatggacttgaatcagttttcaagtttcaacgtaattagttcagcaggattcccttgcgcatcatcttgtactcctatttcaccaatatccaaccggttgcttggatccttgaaacttgatataggaaactcacctaattcggccctttctactcattttgattctgatactgtttcttctgcattaagtgacagccaggagcagcacaactgcggggaaattcactc

SEQ ID NO: 103993 - DNA, 288 bp, Glycine max
  unsure (1)..(288): unsure at all n locations
  Clone ID: PAT_MRT3847_64922C.1
aaaaaaattaaaaaacaaattttttttactcctaacaactacatcatcatcccgctcgtttgttttaaactgnctctcctcccaaaacaaaacccancacatnaactctcaattcctaacaacacnaanccnaactccttcaacataacaacnacaatccactctcctacttcccctccctacaccccccctcttccaatcccaaaaataataatncccacacctactccctctccaaattcacctccaaaccctacaccttcttttcctaccaatatcccatcatcc

SEQ ID NO: 103994 - DNA, 628 bp, Glycine max
  Clone ID: PAT_MRT3847_64923C.1
atcagtaaaagtattattatattatatataatattaagttcagtacaagtggtgtactattgtatataagccatgttcagcggaagaacaaagcatcctccatcaatttgtgtgacctttgaagctgtcatttgagaaaacaatcctttttctatgatgccaaatacaccatgccagggagatccaccaagtctgccatcgctgtaacctaatacccaccagattgaagtatgagtgttggaggaaatggtccctcggtttctgggaatacacccacaatgtttaactaagacatcgattcccaccatagtggcatgattttaacgcggctgaaaaaaaagatgagatgtgtcctcgtcatgatttctacagaatggacaactggcatcgttgattccacattcctagatctcaagttactctttgttggcaatctgtcccagattaatctcccatgcaaagaatgagactttacttgggatttttaacttccatagtgtagtaaacactccatcctgattctcatatgacgaatcccaatcaagcagcctgtagcagtccccactatatatcccccacttggatctccctcccactccaagtgtcttgtcgctgcagttgtactcac

SEQ ID NO: 103995 - DNA, 348 bp, Glycine max
  Clone ID: PAT_MRT3847_64924C.1
agcgagaaactactaagtaaattgcttgtccgaagcagtgggacccgcggatcatgatacagttcgaatcgacaatctcattcgagcacagtatgatgtacagagacgtataccatgtcatggtagttcataatcacgcactggatttcattacgagaatgctccttcacattgccagacgcctgctctgagatgtggtcatgccgctgttcctgaatataaatctgctgaatggcagattctccaaccatcaactgcatctacctgcctcaagaagctatgttactgctcctagcatagcacctgtccaagcaactaccattaccagacctcagcatgtggacaatg

SEQ ID NO: 103996 - DNA, 2545 bp, Glycine max
  Clone ID: PAT_MRT3847_64925C.1
gggaaattagacataagaaatgcgattatagagagcgaatagactgatattgttgtacttcagaactctataggtgaggaactcctttgtatacggttcataggtaatccttcctttcaagatcggtgtcgggtctcctttagtcctttgtctccgttccagtagacatctctacctgtggatctgtgtttggtctcttcaggtattggaagtcctgaaggccggtcatcttagtggttccttacgtcagtataatgtattcgttctggctcacccgtttgtgtttgctttttttccgtcccgtgtgcttatttacaatgccaatcagtattgaaaataaggttttgtcccataactctggtaatcagagcttattcaatttgtgaaaaaagagacttgcattcagggtcatccctgcaaacttaggtgctccaattttcttccggcaattgagttaagtttgatgttgtggttcctcctttggttgaatttatctcttaaggaaaactggtcaattttttgaagaaggcaagtgttcgggatagagctgatgaaacattttctgaaagtgaaacagacaggtgatcagttgatgtttcaattcctgagtcaggcgtgattcttaagcttctagcggcacgaaggtgatactgttgagctaggtaacaagatagcaatcatttcaaggtctgctgatgcaactcacgttgccccatctgagactatatctgagaaaggtgctcctcagccaacccaaaaggttagcgaggagaagaaagctcccaaagttgaaactgctcctgctaaagagaagcccaaagcacctcctgccattctgaagtctcccaccgagccccagcttcctcctaaagaaagagaaagacgagttcctatgacaaggcttcggaaacgagttgctacacggctgaaagattcccaaaacacatttgctatgctgacaaccttcaatgaagttgatatgactaatttgatgaagctccgttctgattataaggatgcttttgttgaaaagcatggagtcaaattggggcttatgtctggctttgtgaaagctgctgtcaatgcactccaacatcagccgattgtcaatgcagtcattgatggtgatgatattatatacagagattatatagatatcagcatagctgttggtacttcgaagggccttgttgtaccggttatccgcaatgctgataccatgaactttgctgatatagaaaagcagattaatgcttttgcaaagaaggcaaatgatggaactttatcaattgatgagatggctggaggcactcttacaatatcaaatggtggtgtttatggaagccttttgagtacccctattatcaaccctcctcagtctgcaatcttgggtatgcattccatagtgagccgtccaacggttgttggaggaaatattgtcccaagaccattgatgtacgtggctctaacatatgaccacagaattattgatggaagagaggctgtgttctttctgcgacgcatcaaagatattgtggaggatcctcgcaggcttctgctcgacatatgaagtgaacctctaattttaaatggagtaaattaaacctcaaaattcaaataccataatgggtacccttttgtttaggttttgaattgcggctgcccgtaatttataatctgtaatgagcaaactctttaggatcatatcccaatttccgttcgatattaattcagcatggttgtgttttttctacctactattcctctcatttaatatgaagagggtcacagtttttggctccaaaattgtatgaaacgactatgaactatactgtaaggattgcccctggagtaataatacgatttcttttcatggcactgctattcctctcatttaatatgaagagggtcacagtttttggctacaaaattgttgtatgaaacgactatgaactatactgtagggattgcccccgaagtaataatgcgatctcttttcatagcattatattctacactattttttagcggaaaattttcagatacatctcatcatgggtccaagcacgtggggcagaggtaatcagtgttgttaaaaagcggttatggcggcgccatagtgatatggcatcacgggtttttgaaaaaacgccaccaaatagcagtggcattgcgggtttcatatggcagtcgttgcggaatggcggaatagcactttttttaaaaaaatttgcgcaacaccggttgggctgacccgacccaatccaaccctacctgaatgtcacctgcaaaaggagactccagcccgacgcacagcggcgcgacgacagcagcggcaccaccacgcacgcgagcaccacggaagcgagcacatgacaaacggacggcgacggcaacggcaacggcggctgcggtggcaacggcaaaagtgtgcacatgttctgggtttttttttctgtttgacaccctctttttatatctagttctgtttttttttttttttttctgtttgacccgcttttagaactcttgaatgagtttattt

SEQ ID NO: 103997 - DNA, 265 bp, Glycine max
  Clone ID: PAT_MRT3847_64926C.1
tacggctgcgagaagacgacagaaggggaccccaaaataaaataaaataaatctatcatctcctctttctccgggccttgttgccatcctggatacatatggacggcgaaaggttgagggagatggaggagatggggtgtggtcattatgtgggtcatggctacgtgagcaattggggcatgcaatgcaacagcatgcgtcgtcgtcaccatacgggtgaagcaccactgtcgacgacggcggtttccagctacagaaaatattt

SEQ ID NO: 103998 - DNA, 233 bp, Glycine max
  Clone ID: PAT_MRT3847_64927C.1
aatcagagtaatattcagattaccggcttattttacgatggcagatacaaattcgagactaaatacgagagaaatcttgcaatgacagaagacgaaaagatggaagtgattagtaatagaggcattcctgctgatggtcttgaaaagcgagctcatgaatttgacatacatgtcgctcatgaaagcctcaaggatcgaattcctgctgttgacacgttgtattctagtaatgt

SEQ ID NO: 103999 - DNA, 1169 bp, Glycine max
  Clone ID: PAT_MRT3847_64928C.1
ctacatgtggagaagagatgagaaagtgggattctcttcttcttgataagaaccgtaaaatggaacatgaactaacacagttgaaggtcacactttctgagaaaacatccttactggaaacagctgaacagaagatagcagagcttacagcaaaggttaatgaacaacaaaaattggtacagaagttggaagatcatattttgaagggatatagttcgaattcaaaagaccgtaaagggaacttccttgatgattgggatctttcagaagctggtgggggtgaggtttctgagaatacagaccaaaggcaagtatccttagaccaagatcagagctcaatgcttaaagtgatttgtaatcaaagagatcgatttaggacccgcttgcgagagacagaagaggaaataaggcagttgaaggagaagattggggtattaacagtggaactggaaaagagcaaagctgataatgtcaaactatatgggaagattcgttatgtacaagactataatcatgagaaagtgatttctaggggttctaaaaagtatgctgaagatcttgaaagtggtttcgcgtcagatgttgaatctaaatacaagaagatatatgaggatgatataaatccttttgctgcattctcaaaaaaggaaagggatcaaagatacaaggagttgggattcagggacagaattacacttagcagtggacgttttctccttggcaacaagtatgcccgaactttcgcattcttttataccattggattgcatatcttggtcttcacctgtctctaccgaatgtctgctctcagttatcttagcaatggcccagaggaattccttgttggagagaaaaacgttgatcttccgcgtggaccctagtggatatgcaactcagttttcagctgttgatttctcaaattgaacattacatgtggtcgaaatgcaacctcttttcaatggtcattttcaactcaattttcagtgatcgatttctcaaattgaacggtgcacatggtcggtgtgcatcctcttttcagtggtcttttttaacagatggaacgatagcatattgtcaatattaaaatatcaaatgtgttgtacatatatgactgttgttttactctaacaatgttgcaatgaaatataaaggcatttttttttttttgg

SEQ ID NO: 104000 - DNA, 514 bp, Glycine max
  Clone ID: PAT_MRT3847_64929C.1
aaacaaggaaaaaaaaggcagcccattaagcccccccccaggacagggggcggggggggaaagggtttaaaaggggggcccccccattactttggcccccccgggttaaaaaaaaccaaaaggggcaaaacccccgggggcaaaaaaaaaaaccacaataaaacagggggggaaacccaaattggggggggggatcattaacatctaaaaaaaaaaaagggggggataaaaaggaaaaatctaaagcaaaaccgggaaacccgggaggggaggagtggaaacgggcccccaaggaagcacgaaaagcattttggaaccctttttaagaaagaaaccagccggtcccctcaaaggtaaacaaaaaaaacgggggggggcaaaagccgggggggccccccccgggcaaagggaaaaagggggggggttaaattttaaaagccccaagggtcttgggtttttcttaaaggggttctggaccactgggccctatttggaaaaaaaagggggcaaaggg

SEQ ID NO: 104001 - DNA, 338 bp, Glycine max
  Clone ID: PAT_MRT3847_6492C.1
tggaatggggctcgagggaataccaacacaaagcgcttttctaatttttgtttcatatacacaatgtaaagaggggaaaagggggacactgtatcatatcactgccatccatgccgttaaagcacagatagaatggattccttggtggcttgttacttaacccaaccacacgctcttgccttttgacattcatatactcttgaggggtatcactacttgctaaaagaattattggtaggagcacctgaaacttccctcttttgacatcatctccgatgcttacacattatatcgattcctgatttatttttcgccaatcgctctgagacgaaccatgg

SEQ ID NO: 104002 - DNA, 330 bp, Glycine max
  Clone ID: PAT_MRT3847_64930C.1
ccccgccccagaaatcccgcgggtcgacaccacgcgcgcgcccattcttacgacacacgcggcctgaagaaacgagagagagtctttgaggctggtgaagaaaaaatgaagcgtgaaaggacacaccgactgcagactagttgatcaaagacggcaggttgatacgaagataccgaggagatgaatgcggaacccctactggatgtgcgctcacagagagtgcgcaatggccattccaatgagaacctcatcagataccactatgaaaaatgactgcgccaggcaaaagatgcaaaaatgtttgaacaccactaccaaaagtgagtttct

SEQ ID NO: 104003 - DNA, 378 bp, Glycine max
  Clone ID: PAT_MRT3847_64931C.1
tcctctatagcggccgacctcggtttttgtacatgccatctgtgttgaaaagaaagatgagtatcatcctttataaatccacctagctacaaatggggaacttgcatccccaaatccaagagaactatgtgcgtttctttgcatccaccagctctatatatcacaactcattacaatattttgggacccattgtggaccttaaaagtgaaaattccttcaggatttaaccttcctctacaaattcctttgcgaatctctcgccaacatgaagggcggctttgtttactgtaggcctttcggtacaaagtaccttgtgaaaatctgtcctggtaatagggccccgaaggatcttaaaaccgagtcctttggcagcaagc

SEQ ID NO: 104004 - DNA, 174 bp, Glycine max
  Clone ID: PAT_MRT3847_64932C.1
ttcaaaccttgctctatactacacagtacacacactagaagaataatggcttccatcctccactactttttagccctctctctttcttgctcttgtctgggcttcttatccgactcagtcacccctacaagaccaataaaccttgttgatctacccgttcacaatgatggctcc

SEQ ID NO: 104005 - DNA, 226 bp, Glycine max
  Clone ID: PAT_MRT3847_64933C.1
ccgactgcccaatctccctatcctccaccatccctctgtccatcacaaacaccattgtatcactgatggaaccattgcttttccatggccttcaagaaaacaacaaacaatgaaggaccaacatagaacaaataatccaatacagatatagagctttcaagataatattcaatttttttcagatctgagaaattgatacaaaacccaaaaacagaaattcacaatt

SEQ ID NO: 104006 - DNA, 270 bp, Glycine max
  unsure (1)..(270): unsure at all n locations
  Clone ID: PAT_MRT3847_64934C.1
angagattntcatcntctnttccataaaacatacgaagggaagtgaagcttcacggatantgtagcgacccgagggggcttcatttagtntaantttacatccctaacggaancctagcggaacactgnataaccgtaagggctcgttgacgttttcaggtgaggctnganatngcgttgnaaanggttttaggatggagtatnttcattgtgggtggtnccgccgattgtgaaaggganataagtcgtngaatatttcgtggagaggga

SEQ ID NO: 104007 - DNA, 249 bp, Glycine max
  Clone ID: PAT_MRT3847_64935C.1
gcttactctcttccatgaaagatcataacatacaggttatatttgacactcatacctaaacacctgtgattggcacatcatccggagggggggggcttacatttcacaacattccaccctcattaagttacatccgtaacacaaatttgacatcaaaatcaattgttccaatgctaattttgttcaactatactgttcaatatacaaatcacgtgttagacaaaacaaaatctgcattaactttatacc

SEQ ID NO: 104008 - DNA, 574 bp, Glycine max
  Clone ID: PAT_MRT3847_64936C.1
gcaaaacatacaattctatattattttatttcataattgatacattacctattgcctgaaataaactgtatcacattgtttattacatttatcactttttttatttccctctgtccctcttatttaatttccactaaactcccttaaaattaaaaaataggatttacaatttcataactcttttcaagcttgtgtaacttgataatagtttcctcctcttccttggtgtagtttcctcttttgaggtttggccttaggtaattaagccaccttagtctgcaactctttccacatctcgcaagacctggcaaattaataacaacaacaacaaagtaaaaccaattacaatggattcatatatgatttagctataatttgtgcatgtgtataattaaacattgaatatatggttcctacaaattcatgtagaagttaaaccaaaccttgaaaacagagaagaagaaaaattgaaagccacattggcgactatattgatggtacatactctcacatacttaatttgtttctaaccaaactatttggtaagttccatttccacctggattgcatgaaa

SEQ ID NO: 104009 - DNA, 755 bp, Glycine max
  unsure (1)..(755): unsure at all n locations
  Clone ID: PAT_MRT3847_64937C.1
attcgagctctgtacccggggatcctctagagtcgacctgcagacatgaagtaggtgagtattcattttaacaaaaatgcatgtatggctggacccaagtgttggttggctgaatgaagaaaattgttcttttaattgtcaggaattgttattctcacctctcaattgttattttcatcccccacatgtgtcaaaaaaatatattccaaaaatacccttttaacaaaattataattgtattgttaaaattgtacaacagaattatatttacgttaaaaatgaggtgaggcatttgataattaaagcaagagactagttaatatgagaaaatgaagtgagccatttgataattgtcacataagaatggatcaagtaattcccttaattagcatgtggtttagttagaaacttcaactcctaagcatttttttattatcgctaataacaatttgtaacatgtttgtgtagaggtgtcaaatgtttgtgatagcattttttattattattgtttttgagctgagaccgtaaaagatccatttttattttcgtctaagtttcattcctcttcatttttttcaagactagactgaataggttaggaatgattntttcgtggaccctaaaaaatgctttgctaacagataggcccaatttagattcagtgtggggcatgaatngtttcttggtggttggctctgtacatcatccctctttttttttaaataggtagtttaaaataacttttatttagacta

SEQ ID NO: 104010 - DNA, 780 bp, Glycine max
  Clone ID: PAT_MRT3847_64938C.1
acttcgagtctaccattgcttctttttcttgtctttctctcttttctctctctcttttttttctctctctctgtgcaaaactatgcttgatattaatgaataatgttgattcttatctgccagtttgctactactacttgggacaattttgatatgtaaagctgggtttgcttctattaattattttttattattattaataatttcatttttccatagccgcctaatgtgattctcgcgttctttcttcagcagctcctcctagctgcttcttcttttgcacaccccagattccgagaaacccacctttccttggttctcagtgaaaagttttgttcttttgtcttttcttctgtttgggtgaattgggtaatctgaattttcaacaacaacaattgttaagttccaaggtcctgtcttggattccttgccagctggctccttgaggtgttttgtccgattggatggtgttcgaggttttggcgaaattaaggaaacactgcatacaacacaactgtaacttcatccaaggcaaactcctctttcacgttgatcttttgttctcactgtcagaaattgaaccttaccttttttttattcagaatctcaattcaattttcatggtggaccaatttgctgaattgggctaacacctttgattgatcgttgtgggggtcttttggtcatatttttggactgtgaagatttttgtttagactgagctgggtttgtttgctaatttatgcactagggtgcttctgtgttactacaaggaaatgc

SEQ ID NO: 104011 - DNA, 532 bp, Glycine max
  Clone ID: PAT_MRT3847_64939C.1
aaaaaaaaaaatttttaaaaaaaattttataaaaaaaaaaaaaaaaaaaaaaagtaaaaaaatttaaaaaaaataaagattatttaaagcttaataacaaaatattaaatatttttataatgtaaatataatttcaatttaattgtggcgtgcgttttataacattggtgattggttaaaaacctgtagtattccaaattaattgccttgagggacattcctttttttccatttggcgcattattcgaagaggcccgtttggattaattttgttaacccttattcaacttttttggcgtttgttaccctctttgaagcggggtattaacccccgtggtccccttttttaaccgtggttaaacctgtttttttcacggggccctatttgccccctcctttcactttcttccgtttttttttttttactttttttccttttttcccgtttagctttaaattgggggcccctttttaggtttcgttttattgttttttagcccctttacccctttaaactttattaagcctcaaa

SEQ ID NO: 104012 - DNA, 630 bp, Glycine max
  Clone ID: PAT_MRT3847_6493C.1
caaaacgtcaacctgtcttcgtagagagaaaactcatgattttcaaagttttaaaattcagaatcattgtcattgcactcactgtattcgtcgtcattgaaattaccgtcagtgtcatctccatcagagtattcctcctcactttgggtgaactctgatatatggtctatttggttgtggtcctctacgttccacctatctttagtccccaaatcctgagacaaaccaagtttttttttcatttcttctattttttcccccaattcagttacatgctgactcagagcctcgtgccgttgcatgactactgaacgctgcaatgcctttgccttcgttagaaggtttctaggcctcaatgtcataggtcgcctataattctttccacggtagtaaataagagaaaatcctttaggaactttatctattgctactaggattccaccactttcatattccaataacctagctgtgtcttcaacaaaagcaagggtcttttgttttgttattaatttaacgtgtttctgatgattccaatgcaaatgcatatttttaataacaccattaaaaacaccacttataccaagtgtgcaagattgccttcttcttaaacacaactgaacggaacataac

SEQ ID NO: 104013 - DNA, 1663 bp, Glycine max
  Clone ID: PAT_MRT3847_64940C.1
ctcgtttcagctgtcgcggtggtcccggtgattttaggtgttgcagtgaaggtgacactgagcaacacttacccatcccatggaatccgcaacatcatggagtaaccctctcccactttccagtctcccttccccttcgcattcacgccacccctccgccttcaaatttatggctttttcaactcttcacactttctcactcccttccctttcttctccctcttctttccacccatttcccctttcctctctctctccaaaacccacttctttcaaccctcgccctctcttccctcgcaccatgcacgcctcgcgcatccaagatgccgttggaggggcactggccctcgtccaatcgtcccccgctacgtggcagtccgcgcttctcagcaacgcgctgatctttttcttggggtctccgattttggtcagcgggttgtctctttccgggatcggtgctgcgtttctgctcggaacgctcacttggcgcgcttttgggccttctgggttcttccttgttgccacgtactttgttattggtacagctgctacaaaggtcaaaatggcacagaaagtggctcagggggttgctgagaaaagaagaggaagaaggggtccgggcagtgttattggatccagtgctgctggttgcatttgtgctttcctcacaatttttggtgttgggggagaggcattttctcggctatggagacttgggtttgttgccagtttctgtaccaagttgagtgacactgtctcaagtgagatcgggaaggcatatggaaaaacaacgtacctagttacaactttcaagatagtcccaagaggcacagaaggggctgttagtgttgaaggaacattggcaggaattttagcatccatagttcttgcacttgtcagttttctcatgggtgaggttggttcacatgaagcaattatatgtgtactagctgctcagattgctaatcttggcgagagcataattggtgctgcacttcaagagaaggaaggatttaaatggcttaacaatgatgcagtcaatgtcatcaacatatcaatgggcagtatcatagcaatcttcatgcagcaagcactccagatctgtggttcctaaacttgatgccaaggttttcacggagctcaatcatattaacgtagtgaccatcttcataagtgcttatctagaacacgggtttgagcaatggagcagtgcagataaaatgattattcatttatttgtccttgaaaaccgactcagatgtttatacttatttaaacatggatagaaacccattcttctgatcgtactcaaagcatgttggtagttacagaaattaatagaagtggcaatggaaaccacaaaactcagtaagctgtaaccatgattcaagtgtcttgtatgggaagcagtggttctttcaaaatgtagatgtgaacttccctttccttgatccaacttacttttaagaaatagaacagtttctcctaagcatttctgtctatcattttatcccatttattttctggctgttgtgcactaacagaagagcatctgaaatgcagtctttgaaagaattgttgaaaagtctaggtacacttccattattggatagttaataatccgatattgacttttctactttaaaaaaaaaaaaaaaaaact

SEQ ID NO: 104014 - DNA, 1713 bp, Glycine max
  Clone ID: PAT_MRT3847_64941C.1
ctcgagccgctcgagccgctcgagccggtagtgagggtgacactcatgccatggaatcggcaacatggaggaaccctctccccctttccacactcacttccccttcccatttacgccacccctcgccctacaaattttcaactctccaccctttcccactctcttccctttcttcttctttttctttccacccttttccccttcacctcacaccctccctttcccctttctctccaaaacccatttctttcaaccctcttcgccctctccctcgcaccatgcacgccacgcgcatccaagacgccgttggaggggcactggccctcgtccaatcgtctcccgccacgtggcagtctgcgcttctcagcaacgcgcttatattcctcttggggtctccgattttggtctctggtttgtctctctccgggatcggtgctgcgtttctgcttgggacgctcacttggcgcgcttttgggccctctgggttcttcctcgttgccacctactttgttattggctcgagagctgctacaaaggtcaaaatggcacagaaagtggctcagggggttgctgagaaaagaagaggaagaaggggtccgggcagtgttattggatccagtgctgctggttgcatttgtgctttcctcacaatttttggtgttgggggagaggcattttctcggctatggagacttgggtttgttgccagtttctgtaccaagttgagtgacactgtctcaagtgagatcgggaaggcatatggaaaaacaacgtgagtggtgaattcaggtacctagttacaactttcaagatagtcccaagaggcacagaaggggctgttagtgttgaaggaacattggcaggaattttagcatccatagttctagcatttgtcagttttctcatcggtgaggttggttcacatgaagcaattatatgtgtactagctgctcagattgctaatcttggtgagagcataattggtgctgcacttcaagagaaggaaggatttaaatggcttaacaatgatgcagtcaatgtcatcaacatatcaatgggcagtatcatagcagtcttcatgcagcaagcactccagatctggggttcctaaacttgatgcagggttttcgaggagctcaatcatattaacatagtgaccatcttgataagtgcttatctagggcacggatttgaacaatggagcagtttggataaaatgattattcgtttatttgtcattgaaaactgacttggatatttatactcctggatgtttgagtgccatatgagaagcagccttctctgacacaagattcatctgcaaatttaaaatggctagaaacccgtccttctgatcatacccaaaccatgttggttgttacaaaggtgtggcaatggaaaccacaaaactcagtaagctgtagccatgattcaactcttgtatgggaagtagtggttctttcaaaatgtagatgtgaacttcttcttcttgatctagaacagtttcaaccaagcatttctgtctatcgttcttgtttgtcccttttattttctggctgttgggagggtaagattgggggggaggggtctttgtttctggccttgatccgtttttttaaatgcatgcactcactgaaatacagtcatttaaagaatagttgaagatattggtcatacaataaaaaaaaaaaccccaaaaaaaaacaccaaccc

SEQ ID NO: 104015 - DNA, 325 bp, Glycine max
  Clone ID: PAT_MRT3847_64942C.1
caaaagcaggaaccccacattagaaagggaaaaccaacacttaattgtaattgttctaattccccctccaactatttgtgaaagggggggggatggaaaaggaaagggttcgtacttctaacaaaaagaaaaaagaggacgaggtcctctcccttaaccgaatccctttggaccgggtctatgtttttcatcattatgagttcgaacctcagacacgaaagcaccaaggcggaattgtgtcttaggcttgagccttgcctcattgctcataaaaatgaggttaaagacaggtcctgtgcggctaaaacgccaagctctatctacc

SEQ ID NO: 104016 - DNA, 355 bp, Glycine max
  Clone ID: PAT_MRT3847_64943C.1
atcttaggattttgaaaaatttgattaagcttgattacacacaacttatttgtttttttcggccccactgtaaagggcttcgaaaaggcctttaagtgctgaattttttcaaagtgaaacttttttgaaaggcacgggaacaagcctaaaatgggcattttgagcccaaattggataattgggtctgtaaatgggatcctgaaacatgcaatgtcccatgaatggggttttaaaaaaactggggggaaaatttaaaatctcccaactgagaataattgattatggggggaggaggtttaatagggggggagaggggttccgccagtcaacaaagaataagggggtatttagccaa

SEQ ID NO: 104017 - DNA, 434 bp, Glycine max
  Clone ID: PAT_MRT3847_64944C.1
gttctgagctataagctagtttatcgtgaggagaatatgaagttctttgttcctttcctcgtgagtatttttaaagcataaacaagccatggcgcactctaccaaaggttccctctcccaatgaaaacttcctatggctagcttacctctgaagtaaaatgcgcgagttatatgcttgcttaggaatcacacaacattcgtgcctttaaaaccattcctgaagagtgcgttgaaccaacaaacgattacattaatggccaacatattaaatcatactctaaaacagttaaccaaccatctttcttttatgcctattgaaccccaattccatcacaactacatatttatattccccatatattacaccctaactccctaaatattccatacctttaaacaacattcatcttcacttggcatttttaataccttaa

SEQ ID NO: 104018 - DNA, 527 bp, Glycine max
  Clone ID: PAT_MRT3847_64945C.1
ccgaatcgctgacggaaaacgaaccggagtgtcttgcgtggctcgataaccaacccgccggttcggttctgtttgtcacgttcgggagcgggggcgttttgagttcggagcaacaaaatgagctggcgtggggtttggaactcagtggcgtgaggttcgtgtgggtggttcgggtgccgaacgacgctagtgcatttgctgcgttttttaatgcgggtggcgatgatgatgcgacgtcgtatttgccggaagggtttgtttcaaggactcgggagaggggtttggtggtgaggtcgtgggccccgcaggtggcgattctgcggcacgcatctacgggagcgtttgtgtcgcactgcgggtggaactcgacgttggagagcgtagcaaacggggttccggtgatcgcgtggccgttgtacgcggagcagaggatgaacgggacgacggtagaggaggatgtgggagtgggtgtgagagtgagagcgaagagcactgaaaaaggtgtggtggggagggaggagatagag

SEQ ID NO: 104019 - DNA, 471 bp, Glycine max
  Clone ID: PAT_MRT3847_64946C.1
gtaaaatcatatatgaaaaaaataaaccaacttcaatagaagctgcaaagtctgggccctgaacagatatgcctatggacctgacaaagtgctttacagtttacacagattggagctatggtctgttttttcatttgttgcactggatgttattctcaacttcttgcttttcttttaagttataattttccaatgaatgaaaattgactaaagagggaaataaaaacttctggttcaaataaatggggaaatcatacaatatgttgtgttcagtctatagaaaaatttctactgagaggaagaatttggaaatatttttggcatattgttcttctgtttgtcttggtgaaactgaagtatagtcaatgccataaatacatgtttactatttttaagaaaatggtttgaagtggtggtctggaccctaggaggttgtactaattcatcatctaaggatatatacatataaat

SEQ ID NO: 104020 - DNA, 491 bp, Glycine max
  Clone ID: PAT_MRT3847_64947C.1
tgagcatcgtctagctatctcgatcgaagctgtccaaggtcgctgtcagctttgtaggcaggggacgggacctaacgcatgaaagaggggcggggtgaaggggccgggatgggggaatagcgccgcgaccccatggtggtaccgcgagccgccaaagtgaccagccacgtgggaggcaacaccgttgaggataacgtgttgatgccaccgtttgatggactaaataataaccggtggtacaagagaaccacccaaagccaatggattaaagacgggccgaagtggccaatgccatacccatggcaaagccggctgcttgggcaaaaacgtggttcgtaacaaaaggttaggaaaaagcgctgtttacaactgtttcccgacgtgatgctgcgagacgtagtgagcgataacgtgcacaaacaatggccggccaactaaaagatccgagacaccaaagcggtatccagggagccaaggccataagtaaaaag

SEQ ID NO: 104021 - DNA, 257 bp, Glycine max
  unsure (1)..(257): unsure at all n locations
  Clone ID: PAT_MRT3847_64948C.1
caacaacaganttnccatnctcnatattncttcaatcttctntnncttctacttctagggtttcgcttnctncaacggacgaccttnttcaantcatcaaanttgactttgtnagnnaattcaatcaggcttgagaaggtatcctagtgttgtctgtncaccttccatctncatgatggccatactgtaaagangtgntcncctgtcttgattcggatacggnctcttaagatattcagtgnctggnatgtctggct

SEQ ID NO: 104022 - DNA, 490 bp, Glycine max
  unsure (1)..(490): unsure at all n locations
  Clone ID: PAT_MRT3847_64949C.1
ccacgcgtccgaactttaccacaatggatgtctaggcactctcataatatacagcttgcttcaagctatagaaaagtgaaaggtgcttacnactctcggtggagctgaaactaccttttttaaagaatctaaaagtgaaatacatgattaatgaaaaagcacataccatgagcgctataatggttgaacgattttcatggctctagaatttatcaatgtaaaaactaccacacctaatatagttatcaagggaggatatacataacatgtattacacatacgctccacactatgaaattactaaatgccctaaaatgatgactttgcaacaaaggttacacactctcaaaaaattacatatatgaggatagcggacaggactatatgtggataggcattcacatcctaacttgtcgtgagaaatacggagattacaagatgcagaaaggtggaatgatcatctaaggctttacacatatgattaccctaa

SEQ ID NO: 104023 - DNA, 308 bp, Glycine max
  Clone ID: PAT_MRT3847_6494C.1
cctcgtgccgaatcggcacgagggcagagtacagtaaattcccagaggaaagtgaagtacttctttctgctttctctttctacatgataaaatcagttgaagttgtaaataattgtacaatcatcacaatggactatctcgatgtcgttcgttaccatcgaccaaaattaatttattaatttgtttcgtttttgcgaattcctctctatttatcaatattaatattaatatcaatataggggatatcaaatatattgtgaatagtattttatttgttttaatcaataaaggctaaatgatttcttatt

SEQ ID NO: 104024 - DNA, 246 bp, Glycine max
  Clone ID: PAT_MRT3847_64950C.1
cataaaagggatttttgttatggcaagcaataaacaacactggaagatgtattcccatgctaaacaaacgatcttagggaagcatttttttagagggagaaaaatcaaaccgattttactggaaagttgaaaaaatctatagatccaaagggcgagccaatttttcataaccaaataatttttcgcaagatattgaaacggatcatggagaggttatgatgaaaggcacagtcgaataggacaaac

SEQ ID NO: 104025 - DNA, 262 bp, Glycine max
  unsure (1)..(262): unsure at all n locations
  Clone ID: PAT_MRT3847_64951C.1
gaagacctctcggacttggaacgcagaacgantgattcancaaccntaggagagntttggccgccaaatanacactcgcantatnaactccaaantcccaacgctaaacnanaccaaaactanaacatgttgtcgntctgagtgtacattgngagtgcccatgttngaattcgaatgcnaaaacatttttgnggcgngncccatttnccggggtnttnntgggggtgttnnntcnttncaaggnttttccgnggtctggggt

SEQ ID NO: 104026 - DNA, 113 bp, Glycine max
  Clone ID: PAT_MRT3847_64952C.1
gtctctatatatacgatccatacctcatcatcatccaactcactcgttgctctctccaaagtcccagcacacccatttccggtctttgtgcttgatgggttgagcctctggca

SEQ ID NO: 104027 - DNA, 349 bp, Glycine max
  Clone ID: PAT_MRT3847_64953C.1
ggctcgagctacaagaccgccatttgtgtgaagacaccttgtcatacagtgcacagcgtgctctcacaggaccttctgaggggcatagggggcttttctcatatccgcagtcgagctactctacccggaccgatgggcctcggggacccggatcaaggccagaccattggaggaccaactccacttgagactgatacacaggcgacttccacagttgggaattaactccactaacacacaggcctattacattaatgagggctctatagtgaaggctatcaaacatgggcactgacttacagtcaggagtgccacacaccgagaatctaatacgtaggatgggtaagca

SEQ ID NO: 104028 - DNA, 220 bp, Glycine max
  Clone ID: PAT_MRT3847_64954C.1
ttttgggctgaaaagtggacgacgtggtcgtgtcacttgcatggcctcggacaaggtgaagctcataaccccaaaaggataagtggagtttgaatgcccagatgatgatttcattgatgacaaggcacaggaccaaaggattgaacttccctactcacgcaaggtcggatcttgcgattcctgtgttgtcttaattgtggaaggtaacgccggaccaaac

SEQ ID NO: 104029 - DNA, 373 bp, Glycine max
  Clone ID: PAT_MRT3847_64955C.1
aggcacgtaggtggacttggtgggagggtactatgatgcaggggacaatgtgaaatttgggttgccaatggctttcaccataacactcctctcatggggtgctatagaatacggcgaacaaatcgctgctgccggcgagtacgctcacgctctggaggccatcaagtggggaaccgattatttcatcaaggcacacactcaaccaaatgttctttggcttgaggtattaatttccattccagtgaatattcttttctaaattttatttttgaacattgattatcccacgcgccgccgttgaaaatgggacgaatgaatacttcttccaagctaaccggaggaatagcccttctgtcgtcttctcgcagccgta

SEQ ID NO: 104030 - DNA, 384 bp, Glycine max
  Clone ID: PAT_MRT3847_64956C.1
aattctgcacctgcccaacttttgtattgatatcatttttttatttcctctatattttccatatttatatattaattctatcactttcctgcaccccaataagtcatgctccaaatattattgttttggataagtatattgcacaatctattcttggcttcttcatgaccatgacacggcaatggagacgaacgataatgaaaggcgcgtaaatcatttgaaaggttgaattatgtaccaaatgctattatattagcatttcatacgtcattctaacaataatgagaacgagttgccccacaattgatcaatatttgtatccttgcacggcacaaacttgttagatatggccccaacttcgtcaccccatcaagttgatttcat

SEQ ID NO: 104031 - DNA, 567 bp, Glycine max
  Clone ID: PAT_MRT3847_64957C.1
gatgattgggaagagggtgacattcttgaagtcttcaacacagttcagaagaggaggacccttgaagaggcctcagcatcaatggcagctgctgtggagggagtaggagttgcattgtagaatgaaccatgatgtattccactatgagattggttcctatcttgtgtttgagcacagtgcaaatgcattccaggttccagttgaaaaaacaatgtattctctccaattgatgttatgaaagtttcaatgccttgacccaaaaatacttgtaacaaccacatataagacaagggaagaattgcatttttttttcttcattttttgtatgatgctctataatggatgcatcatcttatttttgataaaaaggaggtaaaaaataggtgcatcatcttacactggggtctggaaatttgtatttctattgtgttttgctcctagatgaaatatagttagatgatccaaggttatggaccgatgtaaatactttggttaaaaaatatttgcagtttaaaaaaaaaaaaaaaaaaaaaaaaaaaaactcgagactagtactctctctctctc

SEQ ID NO: 104032 - DNA, 288 bp, Glycine max
  Clone ID: PAT_MRT3847_64958C.1
aaagtaaaacaccggaagtcacacctcacaatttacgaaccagaagggaaaattttaatgacttcggcacccctaaagactaaaattctggtaaactgtcaagctcgatttgaaaaacgtgtccttattcacggtaagcactattcactacaacatggaaagatctaaaaagtgggacaagctaaattgcatgcaaactaatgccacaatccaggacattaaccaaaaggtcgaagaggaggtgcacgataccgcccattgagcttccatgagacgggctcgtacacc

SEQ ID NO: 104033 - DNA, 1892 bp, Glycine max
  Clone ID: PAT_MRT3847_64959C.1
cataatcattgcaataaacaagatagataaagatggagcaaatccagaaagagtcatgcaagagctttcttcaattggtttaatgccagaagactggggcggtgacatcccaatggttccgataagtgctctcaaaggaaagaacatagatgatcttttggaaactgttatgcttgttgccgagttgcaagaactgaaagctaatcctgatagaagtgcgaagggaactgttgttgaggcggggctagataaatcaaagggaccattcgcttcatttattgtgcagaatggcaccctcagacggggagatatagtagtttgtggagaagcttttggaaaggtgcgggctttatttgatgatggtggaaagcgggttgatgaagctacaccctctatacctgtacaggttattggattgaataatgttccaattgctggtgatgaatttgaggttattgaatcccttgatactgcacgtgaaagggcagaaactcgtgctgagtcattgcgtaatgagcgtatttcagcaaaggcaggggatggaaaggtcaccctttcttctttagcttcagcagtttcgtcaggaaagctgtctggactagatttgcatcaactaaatattattttgaaggttgatcttcacggatctattgaagctgtcagaaaagctctggagattctaccacaagacaatgtcactctgaagtttttgttggaggcaacaggtgatgtaagcacaagtgatgtggaccttgcagttgcaagcaaggccatcattttgggatttaatgtgaaagcaccaggctctgtgaaaagctatgctgagaacaaagctgttgagattagattatataaagttatttatgaattgattgatgatgtacgaaatgcaatggaaggactcctggaacctgttgaggaacatgtaacaattggttcagcagtagtacgggccgtatttagcagcggtagtggtcgtgttgctggatgtatggttacagagggaaaaatactacaagactgtggtattcgagtcaagcggaagggaaaagtagttcatgttggtattcttgattctttgagacgggtgaaggagattgttaaagaggtaaatgccggtctcgagtgtggacttgggttagaagactttgatgattgggaagagggtgacattcttgaagtcttcaacacagttcagaagaggaggacccttgaagaggcctcagcatcaatggcagctgctgtggagggagtaggagttgcattgtagaatgaaccatgatgtattccactatgagattggttcctatcttgtgtttgagcacagtgcaaatgcattccaggttccagttgaaaaaacaatgtattctctccaattgatgttatgaaagtggaaaggtaacaattccctcatcattatattgatattgagggtaccactgctgaagatctgagttcaaaatgatttgttccttgttggctgtaaaagtgtatataacaaagtatatcagtttcagctccttgtagagagggaaaaagtttcaatgccttgacccaaaaatacttgtaacaaccacatataagacaagggaagaattgcatttttttttcttcattttttgtatgatgctctataatggatgcatcatcttatttttgataaaaaggaggtaaaaaataggtgcatcatcttacactggggtctggaaatttgtatttctattgtgttttgctcctagatgaaatatagttagatgatccaaggttatggaccgatgtaaatactttggttaaaaaatatttgcagtttgatttgtctcctaatgattagattaaatgaaattgagaaagcatattggttgatgttttaccaaaaaaaaaaaaaaaaaaaa

SEQ ID NO: 104034 - DNA, 499 bp, Glycine max
  Clone ID: PAT_MRT3847_6495C.1
gttgttggggggaaaaaaaaaaccccagaatgctttttttgtgtttggggggggggaatctgcctaacataaaaagccccgggggaaaaagcccacctttttttttaacgaaaaggaccctgggaaaaaaacggggggtttccccccaggaaccgggggggctggtttttaccttttggaggccctaaataaccccctagttgggggggggcctctcaaacaagggggaactttggccccccctgagagaaaaaccagaacttcccccaaaaagggggtaaaaaaaccgtttttggccccccttcttttgccccaaaaagggggggggcaaggggccccaaaacccattggggggggcaaattcccccttttaaaaaccaaaaaggggcctttgggttttgggggggccccccaaccggaaagggggcgggagcctttctccccaccggggtgggggttcctgggaaaaaaaaattccccccagggggggtcttttttt

SEQ ID NO: 104035 - DNA, 2125 bp, Glycine max
  unsure (1)..(2125): unsure at all n locations
  Clone ID: PAT_MRT3847_64960C.1
caaggtagctgcttctgaagctggtgggatcacacagggaattggggcctataaagtggaagtacctgtggatgggaaaaagttgccgtgtgttttccttgacactcctgggcatgaggcatttggagcaatgagagctcgcggagcaagtgttacagacatggctattattgttgtggctgccgatgatgggattcgtcctcaaacaaatgaagctatagctcatgccaaagcagcgggagtacccataatcattgcaataaacaagatagataaagatggagcaaatccagaacgagtcatgcaagagctttcttcaattggtttaatgccagaagactggggtggtgacatcccaatggttccgataagtgctcttaaagggaagaatatagatgatcttttggaaactgttatgcttgttgctgagttgcaagagctgaaagctaatcctgatagaagtgcgaagggaacagtcgttgaggcagggctagataaatcgaagggaccatttgcttcatttattgtgcagaatggcacccttagacggggagatatagtagtttgtggagaagcttctggaaaggtgcgggctttatttgatgatggtggaaagcgggttgatgaagcttcaccttctatgcctgtacaggttattgggttgaataatgttccaattgctggtgattgaatttgaggttgttgaatccctcgatactgcacgtgaaagggcagaggctcgtggttgagtcattgcgtaatgagcgtatttcagcaaaggcaggggatggaaaggtcaccctttcttccttagcttcagccgtgtcatcaggaaagctgtctggactagatttgcatcaactaaatattattttgaaggttgatcttcagggatctattgaagctgtcagaaaagcgctggagattctaccacaagacaatgtcacactgaagttcttgttggaggcgacaggtgatgtaaacacaagtgatgtggacctttcagttgcaagcaaggccatcattttgggatttaatgtgaaagcaccaggctctgtggaaaagctatggagagaacaaagctgttgagattagattatacagagtcatttatgaattaattgatgatgtacgaaaagcaatggaagggctactagaacctgttgaggaacaagtaacaattggttcagcagtagtacgagccgtattcagcagtggtagtggtcgtgttgctggatgcatggttacagaggggaaaatactaaatgactgtggtattcgagtcaagcggaaggggaaagtagttcatgttggtattcttgattctttgagacgggtgaaggagattgttaaagaggtaaatgccggtctcgagtgtggacttgggttagaagactttgatgattgggaagagggtgacattcttgaagccttcaacacatttcagaagaagaggacccttgaagaggcctcagcctcaatggcatctgccgtggagggagtaggagttgcattgtagaatgaacaatgatgtgttccactatgagattgattcctatcttgtgtttgaacacagtgcaaatgcattccaagttccagttgaaaaaaacatagtatttctctccagttggtattattacattggagagaggtaccaattccctcatcatttatattgacattgagggtgccactgctgaggatctgagttcaaaatgatttgttccattgttggctgtaaaagtgtatataacaaagtagagagggaaaaagtttcaatgccttgacccaaaaatacttgtaacaaccacataagacaagggaagaattgcattttttttcattttttgtatgatgctctataatggatgcatcatcttatttttgataaaaaaaaagagaaaaaaatggatgcatcatcttacactcaggcctggaaatttgtattttttactgtgttttgctcctagatgcaatagttagatgatcaaaggttatccaccgatgtaaatactttggttaaaaaatatttgcagtttgttttatcctctaatgattagatttaaaaaaaaaaaaaaaaaaaaaaaaaaaanccctaaaaaaaaaaaaaaaaccttcaccaaaa

SEQ ID NO: 104036 - DNA, 786 bp, Glycine max
  Clone ID: PAT_MRT3847_64961C.1
gcatgacctgcaggttctctcttttctatctcatcttcgtcccatggcacttaattcctgaactaaagaaattactcttaaaaggatatttacttctatcttgtctgtacaatagggcaattgatcactggtagttgggacaaaaccctaaaatgttgggaccctagaggtgcaagtggccaagagcgcacacttgttgggacatatccacaacctgagcgtgtctactctctctcactggttggacatcgcctggttgtagcaacagctggaagacatgttaatatctatgatttgagaaacatgtctcaaccggaacaaagaagagaatcctcactgaaataccaaaccagatgtgtgcgctgttacccaaatggaacaggtgaactttaactaatagttataactcaaccattgattttccaaggatgagactctgaacttcaactataatgattaacaaggcattctatcatgtttcttagccaagatttcccttcatacttgtataactactttatgcaggatatgcacttagttctgttgaagggcgggttgctatggaattcttcgacctctcagaggctagccaagcaaaaaagtaaaaatttctgtctatcactatctctatgttttccattcttaatactactggtgatgtggatatttgaacttctcgtccatgcatataaacagtgtttcagtccatatgaaaatagcatatattcatcgacttctagctgttaatgatttctgacctttgtgcagatatgctttttagtgtca

SEQ ID NO: 104037 - DNA, 390 bp, Glycine max
  Clone ID: PAT_MRT3847_64962C.1
aaggggcaaaaatcagaagggctttttcataatttttttttaaaacaaagggggcataatacaaaacaaatcattgcagggccccccctacaaggaaatccctggaaaaaaaacaaaggcaaaacccccccctttaaaaaaaacttatcacccaaaagcttttttcaaccattttcttgatggccccctggatccgcccttataagccaacccctaaatttttttttgcagcaggggaacccagctaacatagctttttgaacaaaggccccttcaggaaaaggaagggctgggtttttcctaaaactttccttatccaaaagctccaacaatgaccccccaaccaaagaatcccctgggtaaaatatgtaatcaaaaaagcccataaaa

SEQ ID NO: 104038 - DNA, 630 bp, Glycine max
  Clone ID: PAT_MRT3847_64963C.1
aggtcaagtatgggacgttcagtaaacaatcccttagctcaagtcctcggagatacccaactgggagcgcagaaggcggaggcggagacggagccgctttggaagcgtcaacgcaagaaaaagataagccaaaaacgtgaagtagagggaccccatcctgacgctcgagcgcctccctcccccggtgctcctcccccccccggtcttccctttgaattgatagcttccgctggagcacttgccttcgtgatgaatcccttgagctttgactatctttttgcttcttcttgctagccttcgattgtatggtttcctgtatcgctcttgtcaagctccaccagcccgatccctgtgatctcgtacttggccttccccctctctttctcttcgtcccgggatagagcctttcactaaagggaaggttcccgagcttggccggaaaacatcctggaattagcactgttttggcgattggcaagacatattgggatagaactcgttaaaaaaggagtgggcgcatagcagcaagtgcagtcgccggatggttaccccagggggggatcttcaacccaaaggtgtgatgtttcgccttgacggaaatcctgtgcttcagcggagctggcaggctca

SEQ ID NO: 104039 - DNA, 288 bp, Glycine max
  unsure (1)..(288): unsure at all n locations
  Clone ID: PAT_MRT3847_64964C.1
agcggncgcttttttttttattatttttcccttttataataacgccgccccggaaggatgcgagaacgttttttgcagaacctcttacaatgtattgatgggaaaaggcagccaccccaacttcaacaaacggtccaacccagttaatccaaaggttcggccaggctttggcggtgttgaagatcacagatggtccgaaactccgtgcaaggataatgccggtcccagtgacagggattgtagccaagtgaacctttaaaaccgcaaaccccatgggaaggggttctt

SEQ ID NO: 104040 - DNA, 1238 bp, Glycine max
  Clone ID: PAT_MRT3847_64965C.1
cctttcctttgggacatggtaaagtccacatttgaaggtttgaagaaaggaaatcaccccgttaggtcctctgagggcactggagggacatacttcatgcatgattcaacaggccacgagcatgtttcggttttcaagcccatggatgaggaaccaatggctgtgaacaacccaaaaggtcttccgaattcatccaatggtgaaggtttgaaaagagggacaaaggttggagaaggagcctttagggaagttgcagcttatttattggatcatcccaagagtggaccgcgtttggcgtcaggtgaagctgtaggattctctggtgttccccctactgttatggtgcagtgcttgcaccaagaatttaaccacccaaatgggtttgcttcctcctcaaaacatgttaagattgggtcactgcagaagttcattagtaatgatggtaattgtgaggactatggaccctcggctttcccagtggaggaggtgcataagattgctgtacttgatataagattggctaatgcagacaggcatgctgggaatatattgatcaaaaaggaggcagatggccagataaagctcattcctattgatcatggctattgtctaccagataaatttgaagattgcacatttgattggctttactggccacaagtacgtcagccttactctcctgagactgtgaattatataaattctctggatgctgaaaaagacttggaacttttgaaatgttatggatgggatattccacttgagtgtgcaagaacacttcgcatttccacaatgttgctgaagaaaggggttgaaagaggccttacaccctatgcaattggaagcattatgtgtcgggaaaatttgaacaaggaatctgtcattgaagaaattattggggaagcccaagattccttgcttcctggcatggaggaatcagcatttcttgaagccatctcccaaatcatggattaccaccttgataagcttgcaaactagacactatttttttttttttttgagtcatagatgtatttgtatgtatgtattcagtgagtgaactagtccattttgggatggactgcaggtttgcataaattatgagatatcattctatatatatatatcggcttgatgtgttctggacataggcctctatttctagcttctctaaactgtttcttcaggattgtattgcaatgttgaacagaaatcaaaaagtctgaataagatgtatt

SEQ ID NO: 104041 - DNA, 456 bp, Glycine max
  Clone ID: PAT_MRT3847_64966C.1
cctgacccttgtgtatcaaaaaaaaaaaaatttaaaataaaaataaaaaataaaaaaaaaaatggataagaaaaacacaaaaaaaagactaaaataacatatcaataaactcctcttcatataaaatatatttccaattgtttcaataaaatcactattgacaatccttattgtattaatttttccatttttttaaatcaaagtgtttattcatttttcagtaaacgaatatttaaagtcttttaccaatttttatacttttactgttctcatttcatttcttacagttctatttataacacctatgacttgtctttaaccctttatttctacttctttcttttctactttctttttttatattatcttttactatactttttcttttatctttttatgtcacttttttttacttctctatatctcttttttatttaattttttataatttttttt

SEQ ID NO: 104042 - DNA, 1043 bp, Glycine max
  Clone ID: PAT_MRT3847_64967C.1
aaacaccttaacacgatgtactatacatcatgtataatgcatccactagaaatcttttgcccctgcaactctttgaatttgacctttccataatccattgttacaatttctaccaaatatcttcaaggagcatattcatcctatcagtagttagtcaagttcatgatttgcttcattggcctaattcactcttcttaagaggcccgtgaattctaactatttcctatcaaaactctagtaaacaaaataaaaaatggggtgagcatcatttttacaactatacctttatattttaattttgcttgtgcttatatatagatccttgatttctttatcagcattgttggacaaggaatatggaggagttgaagctctagttttgagcctcctacactgcacactttggttggacctatgatgttatgtagaattaatctgatttgtggtcagcatctgttgtggcttggacttgagctgcatactgtaagttccataggacatcctcaaaagagggacgaaatgaagattctggagatatgcatttagttgttattgagattgcaattgataatgactcttgagagcaagtggtcaacactataggatccacaatctttcttcgaccatcttgactgccaaaggatgcctgtgtggttcaccaatcatcacataaggtcttaaattcaaaaattaaccatttataataagtaaaaggtttaaatgtgtacgtagtagctagtatagtaccaacaaatatgtattttatatcgttttttaagatataaaaaaccgttcatttttatctttataactttcttcaaacaatatctatcattatttagtgataatgtcacatacatttaaacatgtcacattaataatcatcttaaaatgatgagtaacatgtctctaatgcatatctctttataataaagattattttcacacttttaaaatatataaaaaccaaaattaataaaaaaaattgaaagacttaaattaaaagtcttcatgtttataaaaagtaacatatatattaagcc

SEQ ID NO: 104043 - DNA, 699 bp, Glycine max
  unsure (1)..(699): unsure at all n locations
  Clone ID: PAT_MRT3847_64968C.1
gccagtgcaataatgtttaaggattggtccggtcaggatgtcagcagcatagcctctgagatatgtggattcatcactgttcttacaggaacaatcatattgcacatgactagagaacaggaagaatctaatatgcaaaagacctcaacatggtttataggtgaggatttgatgaagggtgttgagaatgaacacctgatccgtatacatgattcagattacctcgaacgttgaattttccttggaggttaggttgatgttcgagaacattttccatctgtgctgatacaatggcgtgagcctgcccatggtcacatgatgttttgcactgttgactggagccatctcagatttcaaacggaaatgagattgctgtctcattacaacaaatggaatttttggagcgatcttatgccctgttctattgtccatcttagccagtgtaacttttcttaacacacacacacacgtatcttttggtaggaagtgagcaattgtttatacagttccgtctgtatttctcatttaattaactattagatttatagtttattttcttgaaatggtaaatgatagatccgttgacttccgcggaaaatgttgaggatatttattctccgatcttctgcagtnaaaagtgaattattatctatttttttatcctccagacctgaggatattagcaagcaaagatgactt

SEQ ID NO: 104044 - DNA, 307 bp, Glycine max
  unsure (1)..(307): unsure at all n locations
  Clone ID: PAT_MRT3847_64969C.1
gcggccgccctttttttttttttttttttttattnaaggtaggaccgacccatcgaactaaaatgctagaaactacttgaaagtacgcaaaaaaacctgttcatcaccttagcatttaaccttacaagaacttttaacatctattggcaaattacaatgggattttggcctttcaacctaacgagtggatccaaacctttggcatgttcaaggggtggctttaacctttctggaccaactgaattggtcagagagcccctaatttacttttgttcaaatttcgtttgtttaatggccaccacgccaa

SEQ ID NO: 104045 - DNA, 273 bp, Glycine max
  Clone ID: PAT_MRT3847_6496C.1
ctcactcatacgcccacgcatccctaaatcttgagctccacctcatccgatatttaaaaccttggcatccagagtgtcatgacagtcacactctgcctttgaaggtcaaatgttccgtcttgagtaaacgggcatcagtaagagataggaccagtgttcctccacttaaatgtcgtgctcggcaactggagcatcatgtagctgatggtaatgcatatatgaatactcagctgatgaatcgcgaaacctccacttgctagagcaaaaaaacat

SEQ ID NO: 104046 - DNA, 597 bp, Glycine max
  Clone ID: PAT_MRT3847_64970C.1
aaatatcctgaacattttcagcggaagccaacaagaaaagaaacgataaacctaataattaattaaatgagaaatacagacggaactatatgaacaattgctcacttcctaccaaaaaaaatatatatgagaagaaaagttacactggctaagatggacaatggaccagggcataagatcgttccaaaaatttcatttgttgtaatgagacagcaatctcatttccgttggaaaacgattcggcacttgatcacaattagcatatcacacgtattctgagatggctccagttaacaaattgcaaatgcaccacatcatgtgaccatggacacgctcacgtcattgtattggcactgatggaagatgttctcgcacatcaacctaacctccaaggaaaactcaacgttctaggtaatccgaatcgtgtataagaatcaggtgttcattctcaacatccttcatcaaatcctcacctataaaccatgtaaaggtcttttgcatattggattcttcctgttctctagtcatgtgcaatatgattgttcctgtaagaacagtgatgaatccacatatctcagaggctatgctgctgatatc

SEQ ID NO: 104047 - DNA, 360 bp, Glycine max
  Clone ID: PAT_MRT3847_64971C.1
aagacacttattttgcattcccctaagttggtgcattagaagtaaccagtccctagtagagcctagtcgtgtcccagacgggccagagtcagtttccaacaccaacacatcagctaccctcaaacgccacctagggttagggtttctgcaattccccaatctctatcttccaaaaattagggttttttcaagccatggcggacggctactggaaccggctacatgcgtttctgcctcactccggcatgctcaaactgtcgcgttccgactacgatatgcctgcttacggtctgtctttcaggtaatgagatgcataatcatattgctcgtgatgatgaccgtactggtcaccgaatgcta

SEQ ID NO: 104048 - DNA, 1836 bp, Glycine max
  Clone ID: PAT_MRT3847_64972C.1
ggtgcgagaagacgacagaagggggaccaacacctgtgcagcaattctctgtcaccaaatttgatctttctttctttctttctttggcgggaatgacagaaacgggggtttctgataatttcaagggcttaatactggcgatgggttctagtgcattcatcggttccagtttcatcttgaagaagaagggtcttaagcgtgctgctgcacgcggtactcgtgcaggagttggtggctatacttatctactagagccgctttggtgggctggcatggtgacaatgattattggggagattgcaaactttgttgcttatatctatgctccggcagttctggttactccccttggtgcacttagtattattgtcagtgctgttttgtctcacttcttgttgaaggaacggcttccgaagatgggggtattggggtgtgtatcctgcattgtgggatcaattgttacattgttccatgcaccacaagagcaaactccgagttctgtccaagaaatatgggatctggccactcaaccagacctcctgttttatgtgatggcaatggtttcggtagttttggccttgatcgtacactttgaacctcgctatggacagactaatatgctggtctacttgggaatttgttcattagttggctcacttacggttgtgagcataaaggccattggaattgcaataaagcttacacttgatggaataagtcaaatagtttatcctcagacttggttttttcttaccgtggccacaatctgtgtcattacacagttgaattaccttaatagggctctggatacattcaatgccacaattgtttctcctgtatattatgtaatgttcaccactcttactattattgccagtgcaataatgtttaaggattggtccggtcaggatgtcagcagcatagcctctgagatatgtggattcatcactgttcttacaggaacaatcatattgcacatgactagagaacaggaagaatctaatatgcaaaagacctcaacatggtttataggtgaggatttgatgaagggtgttgagaatgaacacctgatccgtatacatgattcagattacctcgaacgttgaattttccttggaggttaggttgatgttcgagaacattttccatctgtgctgatacaatggcgtgagcctgcccatggtcacatgatgttttgcagtgtggattgcttgtccttgagcttaatgaattcaagcatccatggtgctatagctttctaaccatttctccgcatgctatttgcatgcagctgttgactggagccatctcagatttcaaacggaaatgagattgctgtctcattacaacaaatggaatttttggagcgatcttatgccctgttctattgtccatcttagccagtgtaacttttcttaacacacacacacacgtatcttttggtaggaagtgagcaattgtttatacagttccgtctgtatttctcatttaattaactattagatttatagtttattttcttgaaataggtaaatgatagatccgttgacttccgcggaaaatgttgaggatatttattctccgatcttctgcagtaaaaagtgaattattatctatttttttatcctccagacctgaggatattagcaagcaaagatgacttgatacagttattcgcatcaaagaacctgctagtggagtagtggtagcgagtttagcgtacttttgcatggcatctatctttgttctatcctcattcattcctcacttatttataatacaattcgttaaattgttgcttcgattcgaagcgaactacgtgtttaaaaaaaaaaa

SEQ ID NO: 104049 - DNA, 235 bp, Glycine max
  Clone ID: PAT_MRT3847_64973C.1
ccaagggcccaccaactttgattaaagaattgcttttaatatgctaacaccgtttttaaacgggagtgaggaactccccagttgggttgattttttcaagtttccccaaccagttttttttaagggggaatttatgacaaaattccttcttggtcttgcggggcgtaaaaagaacctttttaaacgggcatcattgggggggttcccgggaggttgccaaagaaaacctttttca

SEQ ID NO: 104050 - DNA, 514 bp, Glycine max
  Clone ID: PAT_MRT3847_64974C.1
ggacagaaagggcatcaaccatgtttattatgagactgagtacttgatagaatggcgtcataccaattccacattcgttccgtgctttttgtttgctaggaaattctctcagggagctgctatgcgcttgctgagccaggaagttgttaaccactttgaagtttctgcactgttagccactcccacatgactttgaagctcctctctttagcctatactgattactcactaacctacgtagacatatacttcagacggcaaatgggattactacaaagcttcaatcggcatactccacacaaagattttgatgggattattatacagcatactccacacaaacagattttgaagacaaaaattgggcaagtttctgcagatcgaatgttatgagctgataggaccattttatctggcttagtgagagaggtcttatacattaccccacaattttacacccctcctcacaggaaatagtaagttataatataaaaagaataattttttcagtaac

SEQ ID NO: 104051 - DNA, 264 bp, Glycine max
  Clone ID: PAT_MRT3847_64975C.1
aggccgcattcacagcaaactccacaagataattttagaaaaaaaatgcaaaaagtcaaacaaagaaatctagctaaaacaaaatctaagccccaatctggattttaaaaaatcaattatgccctataaacaatgttcccaccaaaatgctatttacaccatagactcaacttagaaccccaaattaacatttggcgtgtcaagctttacattgcaaaactcataggtcttgagcgaaaggcaggctgatagaaaaagaaagat

SEQ ID NO: 104052 - DNA, 210 bp, Glycine max
  Clone ID: PAT_MRT3847_64976C.1
tacccaccgtgacgcgccctataaagcgccattaatgggggggttactggcagttacacccatacactcgccatcactttacagccccctacttccggtttcttccgtttctttccctccatttttggcgactttccccggctagccctaaaaaggtggaaaccttgaggtcccttaaggattgctatacagggctttaacgcccaaaaa

SEQ ID NO: 104053 - DNA, 294 bp, Glycine max
  Clone ID: PAT_MRT3847_64977C.1
agtacgatctcggtgacgagatcggcggcaaaccgggggattgtagtgcggaggctggactggcggaaggctctgtgagcgacgcgcgataactgagagaatgttcagcttaatggacgggtatctgaagaacgatcctctcaatctgcaaaaggatatactgaatcatgttgagtacacacgtgcaaggtcacgctttaactttgacaattttaaagcgtatcaggctttgtcacacagtgtaggatacaggttgattggacgcatgcatgatactcatgtttacgtcaagag

SEQ ID NO: 104054 - DNA, 280 bp, Glycine max
  unsure (1)..(280): unsure at all n locations
  Clone ID: PAT_MRT3847_64978C.1
gttgatttgtcttcttcgcttcccaatcccaatccagggtaactccgattgatactttgctcaatagaaagataganaacagaataaggtctcccccaacaccaagcaacaacaacagcaaccatcttccacganactcactctcnctcttcttctcaaaatcactggtcattaccatttgaccatcatcatcnncacatcgtgaaactctatnaaccccatatggatnanatggctttcnactcgtaacatatntatattcattcttctccctgntttt

SEQ ID NO: 104055 - DNA, 313 bp, Glycine max
  Clone ID: PAT_MRT3847_64979C.1
ataactatgatgtgaaacacaccggtggtcaacgcataggatgtccgcatatgacacttacattcactgccatgtcaattggcatgccttctcagaacactcccaaattacacaaaaaattgcgacctgaaaattcacatgcatacaggctttgccgatgtgaaaaataaagaagtggagtctaaataacaatcacccccatgatatatccattatataacaaaatccaccttctgaggctatgatcaaccatgcatggcgatctaccttggggctggttccttcactttcttactacacattctatacattt

SEQ ID NO: 104056 - DNA, 339 bp, Glycine max
  Clone ID: PAT_MRT3847_6497C.1
gttagaaatttagctgtacattctttataacacacaaaaatgacagatattcgttcatgtgtttgcacacataaaaccaaagtctaaaacaaactacaataaccatcttccaagctatcaagtagaacctctgcatcattgaaggactttcaaagcctctttagctgggaagttggtcatccctaaatcagatgtgtatcttttacatggccaacgccatttgaatttcatgaccttcaccatattgctgggagcctgatcgaacactagctagacataaatcagaatgggcgcattcagactcttagatcgtgtgcatgctattatcatcataattct

SEQ ID NO: 104057 - DNA, 289 bp, Glycine max
  Clone ID: PAT_MRT3847_64980C.1
tttttactataaatatcttccatggggttatttatgttaaccttcactgttgataaagatacatacacagcttacattatgtgtgacaaaaattttaattctctgcacatattaattgtacaagaaacccagaaacctagtcatgcatactgccgatgctataaaataaaatacatcataaataatagcacgcatactatgttgtaagcaacaagaaggtttatacaaaaaaaaaaaaaactttttctatatgtgatggggtggtgtgctaatgattaatttgcatata

SEQ ID NO: 104058 - DNA, 2059 bp, Glycine max
  Clone ID: PAT_MRT3847_64981C.1
aacacgttgcatatggaagcctgcttttatgaatggaactgattggcctagccctgctgcaaatttatctattgttgagcaacaaatcaagaaaattctagcggccacaggtgttgatgttcctagcctcgctatagatgggaatgctccagctacacttcctttgccattggcggctcttttgagtctcacaataacatataaactggataaatcttgtgagcgctttgttattttggctggcccatctttgattgccctttcttctggttgcccctggccatgcatgcccattgtaggtgctttgtgggctcagaaggtgaagcgctggagtgacttttttgtattctctgcttctgcaactgtattccaccacagcagggatgccgtagttcagcttttaagaagttgcttcgcctccacccttgggcttggttctgcctgcatttataacaatggtggtgttggcaccctccttggtcatggctttggttctcactactcgggagggttcactccggttgctcctgggtttctctacttaagagtttacaggtctattagagatgtgatgttcttgacagatgaaattgtatctcttttaatgctttcagttagagatatagcaaatggtgggttgcccaagggtgaagtggagaagctaaagaagactaagtatggaataagatatggacaggtttctctttctggatcgatgactcgtgttaagcacgccgctcttcttggggcttcgtttctttggatatctggtggtccttgtttggttcaatctttgattacagaaactatttcttcatggtttttatcagcccaagggttagagcaggaagggggagaatctggagttgtggttgctatgctgagaggttatgcacttgcatgttttgcggtacttggtgggacatttgcctggggtatcgactcttcgtcaccagcatcaaaacgacggccaaaggtccttgagattcatttagaatttcttgcaaatgcactagatggaaaaatatctcttcgctgtgattgtgctacttggcgtgcgtatgtgtctggggttatgagcttgatggtgagttgcacaccactgtggatccaggaacttgatgtgggtatattgaagagaatgagcaacggattaagacagttgaacgaagaagacttggctctgcacctattagaaattagagggacaagcgtcatgggtgaggtagctgaaatgatctgccaaactagattataaccgggcagaacttgggagcatggtgcatatgtgatgataccaagaccttatggaaaatgacacttgttttgctagctaccttctaccatttctgtacatagcaatgtaaatttcataattttgtattacccccattgaatttagatcagttacgtttaggtaatagtataaacctttgatcataataagtattatagcagatattgtcttcatgtgtacttgtagcgttaacagatttcctaaactgtgagcagttggtttacttggcgtgcatatgtgtctggggttatcggcttgatggtgagttgcacgccactgtggattcaggaacttgatgtgggtatattgaagagaatgagcagcggattaagacagttgaacgaagaagacttggctctgcgcctattagaaattagagggacaagcgtcatgggtgaggcagctgaaatgatctgccaaactagattataaccgagcagaacttgggagcatggtgcatatgtgatgataccaaagaccttatgaaaaatgacatgacttattttgctacctgctaccatttccgtacatagcaatgtaaatttcataattttgtattacccgttgaattcagatcagttacgtttaggtaatagtataaacctttgatcataataagtattatagcattagcagatattgtctccatgtgtacttgtagcgttaacagatttcatcgtgggtcatatgaggattttgttttaatatttttttccttcaaaaatattttgaactcctaatctgtgagcacttggttataca

SEQ ID NO: 104059 - DNA, 651 bp, Glycine max
  Clone ID: PAT_MRT3847_64982C.1
ttgcatgcctgcagatggactattatccatttcttttgtttcttcctttctaaatagagatattcttgtaaacagtaacatacactatacatatcttctttaggaaattgttttttgcttgtcaaccttaattttgtagaaggtaggcagcttgatttactaactatttgtttcatctaacacttaccatatacactggtcattattttatcacataagctggtggttcagtgctgttataatatgagcatgatgagatccagaagaatgaaaagtaaaccccatgtacaattggaggaagaaaaaggacaagaaaagtgagacaaattggaataattaaagaattagttaggctgctgatagaactggaccagaacagggaaattccttttatttgaattagaatgctacaactcaaggattacacactttgatggatttgaggtctcatcaccctcctattctcttctcaatttctgttcaatccacaactaaccccttctacagctatttatagcctcttatctaacaacaattggttataactaactaactaacaggtatcagctgtcctacaattgacaggtctctaactaactcttccaagggtattttctaacatacacctttccccatctatttccccctcta

SEQ ID NO: 104060 - DNA, 657 bp, Glycine max
  Clone ID: PAT_MRT3847_64983C.1
atgagattgactcggtcctgcaattctgtcattcttccgcaccaagtggccatcttggcatacagaggacaactcgcaagatgcttgattgcggtttctattggcccactatcttcaaggatgcgtggagaatctgtagcccttgtgagccttgttggagagtttggagtccctagagccatcgttagtgatcaaggcacccatttttgtaaaaaatccatgtatgccttgctcaaaaagtatggggttgtgcacagaatttccacaccttatcacccccaaactaatgggcaggttgagaattcaaacagggagataaaaaggatcttggagaagattgtgcagccaaacaaaaaggattggagcaccaggctggatgatgctctttgggcgcataggactgcctacaaagcacccataggaatgtcgccttatcgagttgtctttggcaaggcatgtcatcttcttgctggagaggaaaggaagttgcaactaagtgagctagatgagatccggttagaagcctatgagaattccaaattctataaggagaagaccaagaagttccatgacagcttgatagctaagaaggacttcgtgttgagatcaacagtgaatccgcagataagagcttcaaggtcaatggacaccggctga

SEQ ID NO: 104061 - DNA, 521 bp, Glycine max
  Clone ID: PAT_MRT3847_64984C.1
gatgcctcccgtcttaatccttcacttaaagttttttcttctttgcgtgaggtacgatttcttctcagttttcatccaccttagtaataattaaattaatacatgttaaactttttttctctttcatttttttttttttgtgagtgggtgtgtggttttagaaaattggttcttattttggtggaggctaacaaaattccaaaatattttattttatcatcacatgaattatgatgtttaataaggattgaatatttttttttatgataaatattaactgttagtttattagtaggttaaactctataatttttttttcactttttactatcaagtcaacctttatgtttatcaaaagtataaagattaaaaatacttttttttctttattttatcgatcatctcatgatgaattgtgatgtttgaagtatatattgtatattctttgttgattttaaattgattttggttttgagaattggcatgtttgaattgaaggatgttgcagctacaaaggaaga

SEQ ID NO: 104062 - DNA, 444 bp, Glycine max
  Clone ID: PAT_MRT3847_64985C.1
aacattaaaacggggccctggcactttcaaattggttcctttctttttaaaaaagccccttatcccctgggaaataaaaaaatccgttttttcccttcccttggagaactggccccagggaggggaccttttttggccttgggggacctggggataaaaaaatcccagatcctttttccttgggggcaaaaaaaaaaaaaaaaccttgggcgggggttccaaacccaaaaaaacctggagggccccttggtttgggggatggacccatttttttttcctccggaaaaaggatagggttccgggcctggggcaaatcctttggcaaaaaaaggttttaagtttgatgacccccctttaattccaaaaagatgcccgaaccaggcccctttttaaaaaccggaattgtttggttacattaatggaaaaacttctgaattttttttc

SEQ ID NO: 104063 - DNA, 203 bp, Glycine max
  Clone ID: PAT_MRT3847_64986C.1
gcttatggtacttttatctggtggccagagattgccacataatttaataattcatagtttatacaaaacatatgactggccaccggccgctcaagcccatgcacagagacagaacccccgacacagcgcaccgtgcggacgctcatcatcctaactgcgtgggctgcaccatgacccagaggaggtgcatgcgaacggcagca

SEQ ID NO: 104064 - DNA, 396 bp, Glycine max
  Clone ID: PAT_MRT3847_64987C.1
ggaacctttgggctgatttatgtgcttgcatggtcgtgagaagatcatagacgggcatcgtcgtcagaagatgataggcttgcatggtcgtgaagatgatagaagggcatggtcgtgagaagatgatagaagggggagggaaagacgacgagactaacggatccgcctggagagacggatgagtaggcactgctgacggtaacggatgcggatgatgctgatttctctgagactcctgttgagggtgctactgttgttgataataaatctgttgatgttgaccctcctaataacccttaagatgaccctgacgatctcgacactaatcaaaattttccctcctcctacgggcacctctggggccaaacaaccctctggccagggccctggcacccc

SEQ ID NO: 104065 - DNA, 252 bp, Glycine max
  Clone ID: PAT_MRT3847_64988C.1
ctttctctttagcaatgactatgtcatataatccaaacccgtgttctgatgcatggagtgcggaattaatgcagcgtgccgaagttacaagtgatatcattagtgccactgaagagggctgccaccccaacccatggtgttcaaaatacaaaaagatcgtttgtgtactataagcaaatggggaaacggacctatcgccatggcactccccaaaatgcttaaagaggtaatatgttgattggggaaacagct

SEQ ID NO: 104066 - DNA, 483 bp, Glycine max
  Clone ID: PAT_MRT3847_64989C.1
aattcggctcgaggcccccagggatttggttggagatatgttatagttatactacacagatatactcaaattataaacattagtattgtctttataggttgtacagaactcgataatgttatcttttagtattttctgggacatgtatctacttgttatgttaatgatgtaaacaggaaaatttttgagatgataatgatcataaatatgtacacacataataaaacatccaaggatacttgaggaatgagtgttgttatagaattaggtttcgtttctaaagcgtgtaaaatcgattttggttaaagcaaaaatattacaagttcttctagcatgtgtcaaaagtaaagcatctatgatgctgagtaaccaacatatctgcaccatagtgaatacttgtttccgtatagttcatcaagcaggaaccaaaagtgagttgttgcagcggatagcacgttacacaatgcatgaacttgttcggtg

SEQ ID NO: 104067 - DNA, 745 bp, Glycine max
  unsure (1)..(745): unsure at all n locations
  Clone ID: PAT_MRT3847_6498C.1
gatctcattggatgcgtagnnntagatcatgacttttannnntttcgatcaaattacttnnnaactcattaaaataattaagannnnngtgtttgatttaaaagttaacatttgttattccaatagtacgatacagtacaatgtaaaattctcttgattagcattgttgggattcactgttaagatttagttaaaagctaaaaaaaaacataaaaaaaattggaaaaatgagagatgaaaacaaaaagttgagaaatttatatatttagaagcgtgtgataaaactaattaataactattcaatatatataaaataatgtgaaaaaaattatgtacagtaattgaaatttttaataaaatgtatatacacatttaaattttttattactatataaagtataaagtatatttttcgaacagcaagattttcagattcaacagatcttggaagtggctacgtgcaacaaaagaaagagttttacttattctttatcggctaaatgacctgtttcatcctttattttataaagaaaagtagtatgaattcctcattttggggctttaagcaaccagaaattgccataaaatagtatttaaggcccnnatctgaaccaattcacaagacagcataaaccgagatttgaaaaacacaacaagtggtcgacggagaaacgaggaagaaacacaacaaatggtcgnnnaactcgngttcgtgatccaagnnnnnnnncattttgcgttcctc

SEQ ID NO: 104068 - DNA, 350 bp, Glycine max
  Clone ID: PAT_MRT3847_64990C.1
tttttttttttttttttttttttaaaagaacactggctattgttaattagtgaaggtttgaaaacactttttgcataacctaaaaacccgaacctgtggttactaaaagccaacccgacccgagacataactctggtttatacagccctctcattcgatttatgcacaagtgttagccaaacctgcattacatcttaagcaataaattagggggaaatacaaacaaagactcccatgagaaaccaaacaaacgccccaaaatgagaaagaattaaacactaggcacaacattagaagccttgggcttgactttcaaaaaactaacagaaccgttggagatcctgcaatcg

SEQ ID NO: 104069 - DNA, 529 bp, Glycine max
  Clone ID: PAT_MRT3847_64991C.1
cagatatcgtgccacatttattccttttctcatttctgaacgccacacagacaccgttgataaagctatctatgagtttttcggcttgaacagtttttctgatcagtaagaatggaggttgctgtccccagacaacatcagccaaaaaatcagcacaatgaggataagatagagttctcaagatactcaaaacattccagaactgttcagaggaaagctgacaaaatccctgagtatggtcacaataaacaagaactaaaaggggaagaaactatgagatgtttaaagaaaaataacgctgtaggattggagactacaattacacaaggagaacaagtaaatcagcctactaaggacaaaatcctaaaaagctcgaaaagtcttggaactacaaagacgagaaaggctgaagaaatttaatagtgtgatgatacaaaacttgagttatgcaagaaaggacatgagacacatgagcttactgtttcaaacaagaaaaggaatatttgaagtgatctcttgaatgacgatt

SEQ ID NO: 104070 - DNA, 441 bp, Glycine max
  Clone ID: PAT_MRT3847_64992C.1
gactgagctatacaaaaaccacccaactaaccctgattcaactatgccgatctgatcacttggagtaaaaattccaaatgagtcgggcacaggatgcagaccaatcattcttccctttgggaaatccttttttgatgatatcacctaaaagccctaaaattggttcacagctgttgataattctacatgctggagaagcatctttggaagagaggaggcgaacacagaatgcccaagaccatcctgtaataactgacatcttggattgtaccgaaagatcttgtggtgctgaggaggttgtcctacgaactccctacagagggaggcccagcatagctccctggttacacaggggatcaaccactgagccttcttggtggcacccaaagggccgaggctgagaaaccggcggcggcctcaaatgggtgggatggggggaac

SEQ ID NO: 104071 - DNA, 973 bp, Glycine max
  Clone ID: PAT_MRT3847_64993C.1
cagacatgtttgcatgcatagcaaggggaagaggtattcccttatgatgcaaatgcaatacattgcacaacaattttcatgacaatacatatttcattcagacaaaataaacagccctcttctcccgccctatgggttattatggccaagaggagaaaaaagagaataatggtctcgttagttaattggaatacattctttttaaagcagccctcataatcacccaaggtaccagtcattgggaagccataacaatttcagccaaagataagatttattggaaatgtggagcaaacactgctaagacttccttgtagacaggtttctcgaaatccactgcaagctcaattacttgttcaggtgatatccatgaccattccccaaactcagctttctcagtaccatcacccaaaagattaatttcttgatcttgcccagtgaacttaaaaagaaaccatttctgtgcctgacccttccaatcagatccccactgaatatttaatttctccctcacttttggtgggaagtcataagttaaccaatatggtacctcagcgatcacttctactgaattaactcctgtctcttctcgtaactccctgatagctgcatttcttggatcctcaccttcatcaataccaccctgaggcatttgccaagcattgggaatgtcgagcctcgaagccgcgaaaatctttttgtgattgttcatgagacagataccaacgttcctacgataaccttctggaggagcttccatcgttgagaatgagagtggtagcaaggagaatttagtgtgtttcgaagggtatttcgggaaacgaaaaatggtggaagcagaagcaggagaataagagtaagcgaatcggcataaagccattacatcaagggaacggaaagagagagacaaagtgcaaattagaaggctttataatgggccatttaacagaaaagtaagcgaatcggtataaag

SEQ ID NO: 104072 - DNA, 129 bp, Glycine max
  Clone ID: PAT_MRT3847_64994C.1
ccaaagctgcttccacttccaactccaaccattctgatcagtttctagcacatgactacactgcaaccctcttcccctattttgaacactggaggaaacaatatggtctactgtacacttactccacag

SEQ ID NO: 104073 - DNA, 564 bp, Glycine max
  unsure (1)..(564): unsure at all n locations
  Clone ID: PAT_MRT3847_64995C.1
ggccttttgagttttagccttgttgtttattcagttcatgcatggctactaaattttctcacagtcatgcctagttaatctttagaaacattccttcttgaagtgttttactttttttttatctcttaatgtcactttctgccgctcgctactaaagaaaatgacagcatgcagatcttatacaacttgtgattactatttttatttttctaagaacaataatgtggctatttagtatatatggagaggaacggaagagtggagggtaaactttgtattttcaataaaatatcagacatgcaactcaacaaaattagggaaacttcatgaacagatatatcaataacttactgaatatagaggaatatattaataatgatttaggaatactacagataatttgtttcgtaagcttcagtttttggtgttgatttggtgtttctagttttgtttttaaacatacataggaatgataatgagaatcagattgcagcctagtgcccagagcttccttaaggagcattttaaattacattanatctattaattgaacaagccttattg

SEQ ID NO: 104074 - DNA, 376 bp, Glycine max
  Clone ID: PAT_MRT3847_64996C.1
cgcagccacgcgatcagctgctgaagatacttatcatattatccaaaagggtaagcaagcatttcacaaattctccaccccatttatttttcatgctattttccttttttctcggagcctaaagaggtaaaatttgattcttataacgttttttatttttactttccttgtttaaattcgggttatacaccaacgtgcaagtataaaataggttttattgtagtaccgtattttactttgcttctgtggtggcatcggttcaatgttcctggttgttttgatttgaattattgttattatctgcgaaggcctttgttgtcagactaattcaacatgtctgttccagggaatatctcaagtcatgatttcgagaaaa

SEQ ID NO: 104075 - DNA, 983 bp, Glycine max
  unsure (1)..(983): unsure at all n locations
  Clone ID: PAT_MRT3847_64997C.1
cacgcgtccggttcgaaataccggggagtgacacttaccaaatgtggccgttgggaagctcgaatgggacaattccttggcaagaaggcttatgacaaggcagctatcaagtgcaatagaagagaggctgtcactaactttgagccaagtatatatgagagcgagatgaaacctgaagctattaatgaaggtggcagtcacgaccttgacctcaatctgggcatagcaaccccaggacatggtcccaaagaaaataggggccatcttcagttccagtccatcccttacaacatgcatcccggaagaagttcaaggatggagactaatgttaattcggttattggtgatccttctttgaaaaggctggttgtaactgaagagcgtccttctgtatattccactttctttcccaatctggaaagagcagagagaatgggcatagatccttcaaaaggagttccaaactgggcgtggcagacaaatggccaggttaatgccaccccagtaccaccgttctctactgcagcatcatcaggattctcaatttcagctacttttccatcaactgccatctttccaacaaaatccatgaacccaattccccagagcttctgtttcacttcacacagcacaccaggtagcaatgcacctcaattctattacgaggtcaagtcctcgcaggcaccatcccagcctctatcttgtaatacaagtataaatggtagccccccacacaagttctgaagttcaattctcaaaacgacagttaaaactttttttttttttttcctgtttgcatgatttagggatcggtacaatgttgttgctcatggtatgtttgtatgtgatgaaaagatttttttcttcagagagaaagtgaaaagaaaaaatgcatgatgtgttttaaaaaaaaaaaaaaaaaaaaagggcgcgccgctnctagaggactcccaaggcttagcgtacgcgtgccatgcgacgtc

SEQ ID NO: 104076 - DNA, 965 bp, Glycine max
  Clone ID: PAT_MRT3847_64998C.1
cggacgcgtgggcggacgcgtgggtgctaccgcagctggggagaacatctaaagaccatcctgataagaaaaaactaatctcggtacaagatttctttagatacacagaagctgaaggtatgggcatcttatataggataggaagaacaattttaaatttgcttgcatgaaatagaagcaaactcttcttaataacttaaattattgatttttaaaacgtagagtcctttggattatggtgtacttttgttatttaaaactgtgaactcatttataagcatatacctgcacgtaggaataggaaataaatgtagttatgcttgacatggaaggatctgtgaaaatatcaattcaatttgcctttaagggaggaatctgcctcaacaaatatacaagtataggttaggtacatttttaattgttaaatgatattggcaattagcttataatttctgttcctagaggtatgataggggatgtaatattattgaggcatataatagaatttgagtaaacagtaatgtaggtttttttaataaatctgcttatggttctcaaatgcacggctttggttccctgagaacaatttgttttagagtttgattttggaaatgtgaaggagtgaagaataaattaggctgcttgaggactgataggaatgtaaaatgtgaatgttagtagtttcccagttttatcagtgttaaggaaggtaggagatgaaatagtttcttctggatctctttgctgctaaatatcactagtatttcttctatgttgagatgcacaaaatcataacatttgctaagttccctggcttattttacatcagtaaactactccatagtttaaatgtttttgttggtcttgatggtttccaaaccaatgtaaccttttaccctagttcttgatgttttcattgagtttttttcgctgtcttagcagagcatagcaaacatttgaagtcc

SEQ ID NO: 104077 - DNA, 281 bp, Glycine max
  Clone ID: PAT_MRT3847_64999C.1
actacttaaaaataacccactaagttatataaattagaaaacatagattttacataatatctacatacacgtcttcaaaataaccacgaggatcagcttaatgatatcagaaatcaagtaatatacattaggtcataagttaaaacatgatcattatataaaaaaagtacacgtcttcaacccaaagaagaaaaaaaaaactgtagtgcagaaattaaaacctcttatatatatggatcataggaacttaggaaaataaatagccccttcctgcacctttg

SEQ ID NO: 104078 - DNA, 181 bp, Glycine max
  Clone ID: PAT_MRT3847_6499C.1
aagtgattaggtaactctcactcacatcactgcaatgtgcaacttatttgagaagaagaaagaataaagaatcaccaaagctctttattacaaacaaattgtgtgtcaaggggatctagcttagttgattgactaaccataggaaccatgaaacaagagccactggcatcaccaacgacat

SEQ ID NO: 104079 - DNA, 235 bp, Glycine max
  Clone ID: PAT_MRT3847_649C.1
cttatgattcagaaactgtgaggcattacacattctcaaccgcgaaccctactagcagggcgaacatgacatccaccttgcgcaccgtcagaagactcggagggacattactgtcatccacctcatctcgactcacctgagggttagtgaaatccacagtgattgctatgaattcattgagggaggctgtggcaatgggagatgggaagatcacatgctttgataggaattgggt

SEQ ID NO: 104080 - DNA, 398 bp, Glycine max
  Clone ID: PAT_MRT3847_64C.1
accattgaaacttggttaaaattttaacaaatattgacgacttaatgctcaaaaccaaaaaaaccgggaccaaggaaaaacaaaaggggggggcccaagaaaaaaaagcaaaaaaaagggcacccccaaaaaaaaaaaaccggggggacaaaaaaggaccaaaccaaaatcgcaactcttaaaccggaaaaaagggggcaccaaaaaagcggacacccgggcccacccggaaaacccgggccggtaccaacaggcttaccaccgtccccgggggtgacccgaaaaaagcgggccggaaccaaggggaaacccgtttcccccgtagaaaggttctccgcccacagggccaaacaaaaaaccagccgggcccctggagagaaaagcctggcgggcccaat

SEQ ID NO: 104081 - DNA, 589 bp, Glycine max
  unsure (1)..(589): unsure at all n locations
  Clone ID: PAT_MRT3847_65000C.1
tnnnngnnnnnnnnnnnnnnnnnnnntttgggagaaattattccgtagtcatgcatggtattgcagtcatcaattttcaaacaatcaaattgttattgaatacaaagatattttaacttcttttcatatatagtaattcatattttgaaagccttaaatctcactataagtttcgttcttattcatgcaataattcatacagtggggctacaataaggggttggatgttctccactgctacaacactactcttactgtggtcttacaagctttgctatgatgcaggtgttactgttaaggcgtgtggcgactgttaaggatagcaatatagttgatacacttccatttagcatattgtcatctcattgaaagttgcatccccgacaacaaagatttccttactatcatcgttcaaggtatgtatgtgattctcacacttatgtgcttaagtattataggcaatggttgacatgttactattctttagtagtacattgtaattcattgagtgagccatagttccccgtttaatattgaatacaacgattaatacggacagtttggattaattgttgtattcaatcttgaa

SEQ ID NO: 104082 - DNA, 283 bp, Glycine max
  Clone ID: PAT_MRT3847_65001C.1
aagctgggaattcgtctcgatgcaaaatatgaggctgaaccagaaggctgtatgcaaagtaaaaaccaaacaatggggcacagggacacaattttcttggcacttatagctacctcgattgcaaaggatgcctatgcagcacaacatgtagttggtggtagccatggctgtgatcaaaacacagactctaaggcatggacttcaggccaaacattcagaggtgctgtattactctgtgccaaacacagttctcatataaggtggtggaagcttgctccttgag

SEQ ID NO: 104083 - DNA, 202 bp, Glycine max
  Clone ID: PAT_MRT3847_65002C.1
gcaattagctcatcgactccagataggagaactcgacaccatgaaggtgctgatcgttgcccttgctctcctggcgctcgctgcgagcgccgcctgcagtacaagcggcggctgtggctgccagacaccaccgtttcatctaccgcctccgttctatatgccggctccgttctatctgcgcgcccagcagcagccgcagcat

SEQ ID NO: 104084 - DNA, 247 bp, Glycine max
  Clone ID: PAT_MRT3847_65003C.1
gcagatcttagagaaaaccctaacgggtgaaacgatcacgtcggaggtggagacttcctacattatcaataacgcgaaggcctgaatccatgacaaggaacgcattcctccggacctgcagtgcctcatatatgccgggaagcatctggatgacggccgcaccctagtcgactacaccatgcaaaatgagtccactctttacctcgtgctacgactccgtggtggtgccaagaaccgcaggaagaag

SEQ ID NO: 104085 - DNA, 293 bp, Glycine max
  Clone ID: PAT_MRT3847_65004C.1
ggttaggcgggaaccaaacgaaaaaaccatccaactgcttaaacatttcataaactacatagagcatgcccaaaaaggtaactggttaaagattaagcctaacttgcacgtatcttcaagaaaagaaatcaaataaacaaaaaccctcccccggccggtgggaaagccgattctaccttaccgatgtaacaaactgggggacatagctggtgaaacttcaggactgtatacctggccttggtaacgatccaacatgtcccccccactaaccaaccccttagttgttccaggca

SEQ ID NO: 104086 - DNA, 279 bp, Glycine max
  unsure (1)..(279): unsure at all n locations
  Clone ID: PAT_MRT3847_65005C.1
gcactatagtaaaaaanggacattcattcatctatggctacccttattgctcccagcaaccactctcccnaagaagntgctgangctctcagaaaggcttntgnaggatngggaatgatncgaatactgtcatagtnattnngggtcatagaactgtgtatcagaggcagnaaattcngaagagttnatgaggaantttnccaggnngatcttgtgaagcgcntagatctgagatcaaangagactttgagaaagccgtgtaccgctggntaatggtcc

SEQ ID NO: 104087 - DNA, 608 bp, Glycine max
  Clone ID: PAT_MRT3847_65006C.1
acgcgtccgctgggtgtataaatgttgagtgagagagaatacgatacccacgcgtccggtgaaattaagatgagaaaaacaatgtgtagatcaatccaccatgtttccctcttgtttcttctaaccatgtgtttattaatcaatgcagattgttctgaatcttcttctctgaataggtctgcaattccaagcaattaccacctttcatcaaacgacacaaacatcaacatattgtttctttccattgctagtggtatgtcccctaacgacccaccagtgttcttcttttacaactacggagaaactcgaatctatttgcatcccggaaagcctttcactaaactcgccaattttgatcacaaagtcattctaatgtattgggatgtattgtgtgtgattttctatgcatatgatcctaccatggaaggaggtcatcaaaagatctattggttagtcaaaccagatggtgtgtttcatagttgggataacaacaactgggagaaaaggaaaacttggaataaccaagcttgtaattaattagttcaaataatgctttcagcttctgtattaccaataaatatataagatatttccttctccctattgca

SEQ ID NO: 104088 - DNA, 167 bp, Glycine max
  Clone ID: PAT_MRT3847_65007C.1
tcgtttacgcgtacgctatgtcaaaggtgcagcatgcattagataaaaaacagtgtgatcggccagacctggtgcaatctttgacagaagcacaatagactccactaatataagctgcagacaatgtacacattatggatagattaccggttcacgcagatgaagga

SEQ ID NO: 104089 - DNA, 538 bp, Glycine max
  unsure (1)..(538): unsure at all n locations
  Clone ID: PAT_MRT3847_65008C.1
aggacccgttttaaacatggtgacgcgcggaggccaggncnccaggggcggggggggaagaagatgaaacccaagggcacaaccccacacaancgctggccgaatccatgcaaggacgaagtgccccacccccaaggccctcgccaagggactcaagagcaagcccaaccctcgcaattgccaagccacacactccgccacatagacgaacaggcggcggcacgccgccaaacacgtgtgccgcggtatgatgcgccaaaactgacaccccccaaggcggcaagcacgctcccacggcgccgctgtcccccccaaaagggaggtttagccgcccagcggggcaaaactaaactggagagcccggggcgaattgcagttgcagtgaggcgccaaagggcaatccggcgtagccgaggcggagaacaccacagatgaggaagaagaacggaggacagccgacgatgaaaaacaccaacttttaaggcaggagaggaaagacgaagtggagagtcaaccgggggaggaagagggcgcccca

SEQ ID NO: 104090 - DNA, 231 bp, Glycine max
  Clone ID: PAT_MRT3847_65009C.1
atcaatcctaagctcagactttcaaagtttcttcgatcgtcactgtgccatggatcgctccaaaactgcctcagaatccgacgtctctgtccacgcaatattcggttctcgctatgtcagaacttcgctgcccaagttcaagatggcggaggaatcgattgcgaccgaggcagcataccagatcataaatcacgagttgatgttgggttggaactcaaagttgagtttggt

SEQ ID NO: 104091 - DNA, 518 bp, Glycine max
  unsure (1)..(518): unsure at all n locations
  Clone ID: PAT_MRT3847_6500C.1
gataatggatgttggcgcgagcagctgggagggcgaagctttgaaatgaagacagggtgaaaggacagcaaagaaagctatgcaatggaggtggaagacttgattccaaaccacaatgattccatgtcctcagtgctgtctcgttttcaagccattggcattgacgttgaagccacagtcgctcttttaggtatataaaacatgctctgtgtgacacataaatttgaagtctttctcattatagttaacatttatttcccaaagtcaaaacataaatctaagtatcttttattacttaaacgaaactaatactcccttaagcaatatatggacagatgcctaaccattaggcagaaacccagacacgatatcaaattgttgcagctgtcaagatcaagttcatactaggccactaatataaaacttattcgtataatttatactttttttgctaattaaattaatatactggctttattatataatatatacagntntaatctcaataaaanaaaata

SEQ ID NO: 104092 - DNA, 566 bp, Glycine max
  Clone ID: PAT_MRT3847_65010C.1
ggggggttgacccggaaacccaaaaccgaaaccgggaaggggaaccagaaccccaaaaaagaaaccgaaaaaaagggggaaaaaaaaagggaaaaaaaaaaaaccggggggaaaaggaaacccccaaaaaaacccaaaaaaaaaaaaaacggaaagaaaaaggggaaaaagggggggggccaaaggagaaaaaaaaaaaaaaaaaaaaggaaggggccaagggcccgctcccaagccgaaaaaccgggggggaaaggggaaaaaaaaaaaaaaaaaacgcccgggaaaaggggggccgggaatgggccccaaaaggggattcccttttccccagggaaaaggaaaaaaacggagggccctgcaccggggggccctggaaaagggaaaaaaaggggcccaccccggggggccccggggggaaaaaaaccggacggagggggggaaagggggggaaaaaaaaaaaacagaccccggaacggggggaacccacccccaaaaaaaccacacaaaacccaaaccggggaccgaaaagggaaccgaaggggcccaggccaaccgaaccgggg

SEQ ID NO: 104093 - DNA, 127 bp, Glycine max
  Clone ID: PAT_MRT3847_65011C.1
gccttctgccaagggagatgaatgctatgtcagtctgctttctttctatgttgctatgggccgcaggttatctcgtgacagcggttgcttgcatacttgttttggaaatgaggatggccctgttttt

SEQ ID NO: 104094 - DNA, 282 bp, Glycine max
  Clone ID: PAT_MRT3847_65012C.1
tatttttaattttttttagacacataaatttgattttttaaaagcgaaccaggcaaaaattgaacacaaatataaagttgacattgaaaaggcaaaccaacaacgcagcggcacagccctaaaactcgctgcgcttaacacatatgtaatgaggggttctcacacacacaatacattaaaacagaatgataaacggagtcttgccatcgtggaacaagaacccaattctgggaacaaaagttgctagaagatggaggaaactttaaactaatgcttaaaaac

SEQ ID NO: 104095 - DNA, 279 bp, Glycine max
  unsure (1)..(279): unsure at all n locations
  Clone ID: PAT_MRT3847_65013C.1
acaaacatattcttctccccactctaaccnccccaccaatagcaactttttaaatatttatcacgccccccacaaccccnatttcctcaacaaaaaacaaccacttctttatttctaccaatatctatattaaccacaaaaaaacccaccaagctacctccctttattaatacttcacaattccatccattattaacttcctaaaatacttaacacatcacatcaacaacatcaccctccattctcaaatatacattcttaattcctaccaaacccctt

SEQ ID NO: 104096 - DNA, 150 bp, Glycine max
  Clone ID: PAT_MRT3847_65014C.1
gattcaaacccttatcaataaaaccctgaagccaaattaaaatttttctaggccacacccaaaaatttttcaaaagaaacttccgggaatttagcccgaccaagggtggggaattaatgaaattctaacccatcggtaattaaatttgat

SEQ ID NO: 104097 - DNA, 586 bp, Glycine max
  Clone ID: PAT_MRT3847_65015C.1
cctggggagattaacagtagcatcttattaaattcaagtaccaacattaacattatccgagcgaatggaccattctctcggatagcgctggacccacaaccttcctgtatctccgcaatcgtgactccaagtaactccgctgctcaggatcaaagacaacccacagatccttgtatttcacatgagatccctttatccctagcaaaaccttgctgacatcaacaatttctggatcatcatctgaagtggttttcatcagagcattcagatttcttcatcaagcattggaacatcatttgcatcttcttggccaacatcatcaaaatcccttcccattacatcgtcagtaatttgaggtagggatgactctccattttgtaaaatggaagaatctgataagacaacataaggttttctgtcaagcagaggccttgcaatgtcaaatggaacccactgatagcgaagagggcataaaagctctgaagggtgatatgcagctttgtatctcatcttgttgcaagagtgaatataatagccaagataatagtattgtagactaggacaataaacctgtttttctttcacc

SEQ ID NO: 104098 - DNA, 187 bp, Glycine max
  Clone ID: PAT_MRT3847_65016C.1
tgatgatgagcttctccagactgaaaccagaaccataatgacatctgatgatgcagaactctgcatccaggcactaaatacatgcgaggctagattcaacgcatgtgacttagcatctaaacctgtaggagcaggtgcagctaccaaagattacaaggctttattttcccagatcaccactcgcttt

SEQ ID NO: 104099 - DNA, 685 bp, Glycine max
  Clone ID: PAT_MRT3847_65017C.1
atatgttattaattttttaataatggcttgagatactagttactaagatccttataataaaaaaattaaatcgttaaatataatatgggaattaatagtacataatttattattattattattgataaattttagccaataaataaaaatgtgttaaaaagattgtgcactctccttaattaatgttactatctatatttactgagcccggcgagaccacacttggtcaacatctaaccaagatcgctgctctctttcttcacaggactggaccctctccattgaccctatgttggctgggcttggtcagttgaaatttcaaatgacaaacaattgttcactcgttattggatgtcaataataaaaactacaaaaaaaaaaaaaaaaaaaaaacctgtgctggtctattaaaacaatcttttttctttgagaaaataatcattatacgtatagttttcatataatatattactttgtctcgaccatgtagtaaataaagaactaaatattttttttttacaataatctaaggaatgatttttttgttcattaagggctgtcaattggttatgtttgaaaaaaaaatagttaaaaaattagccaatacctataaaagtaaataaaaattaaaaaattaactaaaagctaatagctaaaagttattaattaacttattaaattataa

SEQ ID NO: 104100 - DNA, 1649 bp, Glycine max
  Clone ID: PAT_MRT3847_65018C.1
cggctcgagactctatatatcggcatcgatggataaccaatgatacgtcgtcgttttgccccccagaacctctgaagaagaagaaatggcgagtagcagcagcaacactccgaaggaaagcgttgttgtcgactgcggaaggcgtcgaacctcttgcggctattgcagatcctctcgtcacaatagcatctctcatggcatgtgggcacatagccttactgtggatgactaccaagatcttcttgatcgtggctggagaaggtctggatgttttctttataaaccagagatggaaaggacatgctgcccttcttatacaattcgcttgaaagcaagtgactttgttccttctaaggagcaacttcgtgtatctagacgaatgcaaaggtaaaaaggcaaaagcttgagatacgtttaaacagttccagttttgatccagaagaatttgctttgtacagaagatatcagctcaaagtacataatgataaaccacaaaatgtcacagagaactcatatcgtaggtttttggttgatactccattaatacaagtttctcccactggtgatagcacagttcctccttgtggttttggctctttccatcaacaatatctaatagacggccagttagtggcagttggtgttatagatatccttcctaaatgtttgtcaagtaaatatttgttctgggatccagactttgcctttctatcactaggcaagtactcggcttttcaagaaataggttgggtgaaagaaaaccaggtttattgtcctagtctacaatactattatcttggctactatattcactcttgcagcaagatgagatacaaagctgcatatcgtccttcagagcttttatgccctcttcgctatcagtgggttccatttgacattgcaaggcctctgcttgacagaaaaccttatgttgtcttatcagattcttccattttacaaaatggagagtcatccctacctcaaactacggaagatgtaatgagaaggggttttgatgatgttggccaagaagatgcaaatgatgttccaatgcttgatgatgaagaaatggttgagtctgaatcagaatgctctgatgatgaacctgacctagaaaccacttcagatgatgatccagaaattgctgatgtcagcaaggttttgctagggataaagggatctcatgtgaaatacaaggatctgcgggttgtctttggtcctgagcagcagagttacttggagtcacaattgcggagatacaggaaggttgtgggtccattgctatccgagcgaatcgtctattcgctcggataatataaatattagtacttgagtagttgagtttaataagatgctactgctaatcttcccagaaaaaaaaaaaaaaaaaccctgcaaataagattcatgtattcttctgttggatggtctgatgttggcaatagcaattgtgtgaaccttgaagtttttttataatcaactttcccatgcatttgcatatatggaattcagtgttgtatttcttttctggcgttagttgcttaaatgaggaacacaatggatgtcttgaggtgttagtaacttctaaatttcagcagtttttagtttccttaatcaatgttatgcttcatgaaagcagaggcataaga

SEQ ID NO: 104101 - DNA, 484 bp, Glycine max
  Clone ID: PAT_MRT3847_65019C.1
tacggctgcgagaagacgacagaaggggttacattggtcttactatgattttttcccttgaactttgatcactttttttctgctccccatttattatataacgctgactgcaatgcacgatctccaggtgggttccatttgacattgcaaggcctctgcttgacaggaaaccttatgttgtcttatcagattcttccattttacaaaatggagagtcatccctacctcaaattactgacgatgtaatgggaagggattttgatgatgttggccaagaagatgcaaatgatgttccaatgcttgatgaagaagaaatggttgattctgaatctgaatgctctgatgatgaacctgacctagaaaccacttcagatgatgatccagaaattgttgatgtcagcaagggtttgctaaggattaaaggatctcatgtgaaatacaaggtatgcttaaatggtggtgaataagtactattattacttac

SEQ ID NO: 104102 - DNA, 137 bp, Glycine max
  Clone ID: PAT_MRT3847_6501C.1
tcctgaggtaaagataccagctttgctcttctgctcaactgatcggttccaggattccaagggtaagttccaaaagggttgtgttgatctgcaccaagatgcttaatttgcgttgaaaaatccatcatttgcgagac

SEQ ID NO: 104103 - DNA, 654 bp, Glycine max
  Clone ID: PAT_MRT3847_65020C.1
ccatcatctccctaccaccctctttacaatgctggaattgaagctgctgcactctcttaacaacacccattaatgaaaatgcatcataacaagtctcaccgttggatcgaaaagtgtgtttgatactaaagtcataatcatcgtattcattagatgccccacacttctaatggaaaagtgacacttccggacggcggcgatatccaaacacacgacaatggcgatggagcttctctcactgggccacgagcacaatgcattggcgctggccattgtgaattgcttgttgtcatcgcgggtatcgttccttcgtcgttgttggaaacaatgtcatttccaaaaatgatgtctccttccttcataggtttaggaaatttgtgctcttcttctttttcaatgaaacatagccatggacaacaccaaagcttcatgcaagttgaagttggggtgtcaatctagcgcatttgggaaagtaatggggtttagggaaagtgaaaaaaaagatggaaaattgaaaagaaagagagagaatttgaggagagagaaagcaaagagagggggttgaatggatctgatcggatcttcagaggtgtttggtttttcttgagatgttgttcttttctttcttcctctgggtcttggtctggacttggc

SEQ ID NO: 104104 - DNA, 102 bp, Glycine max
  unsure (1)..(102): unsure at all n locations
  Clone ID: PAT_MRT3847_65021C.1
cnagcaaatgggcgcaacgaagagtggacgagttaaacttggaacacaaggccttgaggatggcatatctattatccaagtatgcattccagtaaaggaatt

SEQ ID NO: 104105 - DNA, 1330 bp, Glycine max
  unsure (1)..(1330): unsure at all n locations
  Clone ID: PAT_MRT3847_65022C.1
caaggatgaagttgaaaaatctttgttttcactgccagcagctaaggattcttcgggcatatgactggagaacaatgattcgtcgtcgttttgccccccaaaacctctgagaagaaatggcgagtagcagcagcaacactccgaaggaaagcgtggttgtcgactggggaaggcgtcgaacctcttgtggctattgcagatcctctcgtgacaatagcatctctcatggcatgtgggcacatagccttactgtggatgactaccaagatcttcttgatcgtggctggagaaggtctggatgttttctttataaaccagagatggaaaggacatgctgcccttcttatacaattcgcttgaaagcaagtgactttgttccttctaaggagcaacttcgtgtatctagacgaatgcaaaggtttttagatggaaccttggatgtaaaaaaagttgatgttatggaggacccaaccaaatcgggaatcttcactagacctatgtcagaagaatccttagctgctggcagtgaaaacaaggatgaagttgaaaaatctttgcattatttatcaaaccaaattgataatgtcatacacatcctcattggggggaatttgcctctggtattcaattaccaaaagcttcagtgaaaagagtttcacagggaaaaaggaagttactagtcaatggatcagaagatctcttatatagtagcaatatagcctttcaaattgcagcatctataaaacgagcacaatcatgtgacaaggttgtcaatgattccaaaccatcaagagtttgtgaaaaggagaatgattcatctcctaaaattattgcagaaaagctagtagcttctttagatccaactgtgaaaaattctggtttgtctatcagggcttgcaatggacatatcaatttttatgcttctagtaagcaagtttccttgaacagaagtgttcaaaatgctccagttcctaaaaattctagaatgaagcattacagtggaggaaattgtttgattggtcaggtaaaaaggcaaaagcttgagatccgtttaaacagatccagttttgatccagaagaatttgctttgtacagaagatatcagctcaaagtacataatgataaaccacaaaatgtcacagagaactcatatcgtaggtttttggttgatactccattaatacaagtttctcccactggtgatagcacagttcctcctgtgggttttggctctttccatncaacatatctaatagacggccagttagtggcagttggtgttatagatatccttcctaaatgtttgtcaagtaaatatttgttctgggat

SEQ ID NO: 104106 - DNA, 256 bp, Glycine max
  Clone ID: PAT_MRT3847_65023C.1
tttaatacatgtactaacaatgtagaggttttatacattgtcatttacatagaatcaactatgtataggaagtttttttacttttataataattatgttaaaagttatataaaaaattattttggattggttgccagtaattttacatgaacaatatatgtttattaaactcccttttattcgttacatcatgcactcaatagtttttctaatatcgagattctaattctacatttgaagggtcaattgttttttt

SEQ ID NO: 104107 - DNA, 404 bp, Glycine max
  Clone ID: PAT_MRT3847_65024C.1
gggggccgctttttattttttttttttttttttattttaagtttttttaaaaaacaatatatctataacgggggggatttacaaaaaattgggggcattatttttctttatatcaaacctgataaaagagatataggaaattataactttcaaattttaaaatccaaaatattactagaaaaattttaattattcggagcattttcaaactaatactactaacccagtttaattttaatgactaccacattttttgaaatcgggaatcagtcatgctatacgtgtgccatcataaccattccaatattataaagaccatcaaccttctatccttgtccttttttacttaacttccctaaaaggcacccctggtaaacaaaaactttcacttgaagctaccttaa

SEQ ID NO: 104108 - DNA, 267 bp, Glycine max
  Clone ID: PAT_MRT3847_65025C.1
ggattgaatggcgattaccatcatgacagtgataccgttgtgaacgccaatgacatgactcaaggtagcatcagtttcgcagaggtactgctgattcagatcgcgcaacgcatctgaaactactgagttcaacaatgcgattcgggcaagtagtaggtgttgactctactgaagtaaagctcttgcatatatattgatgtcggataggcgatattgctgacagatagctctgtgcagagtgacctgtacgtgcgttgctggtaggtc

SEQ ID NO: 104109 - DNA, 383 bp, Glycine max
  Clone ID: PAT_MRT3847_65026C.1
ggattaatgggattcacatttaattaattttaggaagggcttggcaaacaaccaaaaatagaaaaggaagcctgttttggaaaattgaaacttatatttctttgccttgctagaatacaactttttaacattggcaccctggtcctgcattaacctaaccaaactttgtttggggttggccctgaagggacaatttgaagccaaaaacccatccacaaggggcaagtaagcctccaagtcatgacaacatgccatgtcagcatcaggtttaaaaaatggggacatttttgtgtccacgcggagctccgttccagtgggggagtactcatcgaaaatgtcaagtacaccagcaccaagcttggagtttctaagtttttttttta

SEQ ID NO: 104110 - DNA, 354 bp, Glycine max
  Clone ID: PAT_MRT3847_65027C.1
ccttgaccgggcgcagatgctagtgtcttctctttatcctgctttggttagcctccatcgttgataggattgcatcgccttgaattagaaaatgcagatcagaggatcgagtcacagagtgtgcattagtgggcaataatcgataccgaattgccacgctcctcatgtacatgatcgataatgtggcttctatctacgctgctgcaacgatgtgactggacccagataatccgcggcatctcatgatggagcttgataggatcaccaggcagggacagtctgctatatctgtagatgatacattgaagatcataaccctgcaggaacaacttgagaagcttgatgcccttgaga

SEQ ID NO: 104111 - DNA, 370 bp, Glycine max
  Clone ID: PAT_MRT3847_65028C.1
agaaggccagatcagcatgtccatgtgtcatcttctttgatgagtttgattctcttgcaccagctcggggtgcttctggagattctgggagcgttatggacagagtggtttctcagatgcttgcagagattgatggcttaagtgattcaacacaggttttttatctgcttgaaataattatcttttagcaaaatatattatcctattttacttctaacaagtggtgtctctgttgttggcttactattacctgtttattattggtgcaagtaatagaccagatttgatagacccggcgtcgatttgataaactgctatatgttggagttaactctgatgcatcttacagggagcagttttgagtgaaaat

SEQ ID NO: 104112 - DNA, 466 bp, Glycine max
  Clone ID: PAT_MRT3847_65029C.1
gaaatacaggtgctcaacccaatcgatggcccacatggttttctaaaggctggcaaagccttatatgtgtttatgcaagtatttgatggttgcctctggtagagcatctattttcattctctgagcaaacgagaagactattatagaggtatcctatcaatttttaagtttataattggatggataatttacgtagtgatactttttttatttggtcttgtgtaggtatgggaccatgctgttggcattatatgcgttcatgaagctggtggaaaggtaacagactggcaaggcagcgacatagatcttgcagtgggtcatgttggccggcggattatatttccctatggcggtgtccttgttaccaacagcaatttacatgataagattttgcagattatcgatcagacttcaagagtttgatgttttgtggaattgctcatcctcattattttgcgaaatgatt

SEQ ID NO: 104113 - DNA, 283 bp, Glycine max
  Clone ID: PAT_MRT3847_6502C.1
gttaaaagggttaaaacccaaacattctcgggaatttctaatccgggaatcactccaaaaactacttctacaatcatgtctaaagaccatttaacgttcgaaacaatttacaagcattttcccaaacacgcatgttcaaatttaagctaaaatacgggcaaaccccgatttagggatcacaattcacaaacacagcaacactgaggggttaggcgaaggtggcacgtaaggcttcatcaagattatagttattcctcaattgattatctttctaattacatta

SEQ ID NO: 104114 - DNA, 874 bp, Glycine max
  Clone ID: PAT_MRT3847_65030C.1
cggccgcgcgcacacatatactaatcatgtgtttttgttgaaacaagtgaatatgagccacaatttttagattcattatgtttgctccaagcactgctccttaagatagaattcagaagctaactcctttcacttgtctcattttaagcaaaccaccatactaaagctccaattcattaacaggtcggctgacagctaaaagtgatgtatacagctttggggttgtgttgcttgaactattgtccggtagacgtgcccttgacagatcaaaagccggtgaagagcagaatctagtagaatgggcaaaaccatatttgggtgacaaaataagactatttcagattatggacaccaagttgggtagccaatacccacaaaatggagcctacatggctgccactcttgctctaaaatgccttaatagcgaagctaaggcaaggcctccaatgacagaggttttagaaacccttgaacagattgcagagtgctaaaagggtcccatttgaatcatacccctactgcattcccataatctgcttgcgtactctaaattttgaacatctgtaaatatattccttatttttataaggttggtttttacaaggagaaatgctaggaacacactattttgaacacttcctctcttgttagttgaaatttattgaagatgacaaaattttgttggtcctacatgatgtttaatgatcttttctcttgattttgttgtttttaatggattttaaccaattagagataatgcatttgaaggagtgggatagaaagtgtgttcctagcagtcctctttgacaagatataatgtggcatgtacatgtacttagatgaaatttcaactgaatattagcacattatttcc

SEQ ID NO: 104115 - DNA, 1172 bp, Glycine max
  Clone ID: PAT_MRT3847_65031C.1
cacgggtacagcaaactcaccagctaatatttccttgcaacaaccaaccaacaaacatctcttcctgctgaagctgaacctagcgatgcccagagctcggtcccagaaaatcattcatgagatgatgatgtcctcccagaagaatggcccctggtggaatggcctggtgcctggttcgcttggaaatgacatgaagaatgtaaacgggattctaccagggagtaaccaatacagggctcaacagtggcagtgtcagtggcctggtgggtaatgtggctgtgaacagtaattcaggtgttggggttggtggttatggcacaattggtcttggtccagctggtatgactaatggaatgagacctgtaatgggacataattcaatcatgaatggaaggggaggaatggcatctcttgcgcgtgatcaagttatgaatcatcagcaggatctgtcaagccaactacttagtgggctaggaggagtaaatggcttcagtaatcttcaatttgattggaaaccgtctccatgagagcctttgtagtcttattggatgttgtggttcttgggcagctgcttgtgcagcatgagaaatgctagaattgcctttggccccctggagatggcagaacgcaatcgggtagtgttaggtctttgtactaatctgttattttagatatataaaaaatgaaaatttgttggctggttgtttggctgatggggctgattttccttttgaattcaaatgtaacttttaatttttgtattttttaaatgtcttgatggcattcacaaacttatcctttacacatgcaagaaagttattgctttggactgcaaacttcaagtgattaggaccatgtgcgtcggcagttgacaagtctggcacccatgtttggcttttcagtcccctgtagagtttatgccgtgagctagaaaggccatgaagacattggaatttcagtttactcccaaacctggagtaatggtgccaaattaacttggcatgagaatttggcgaagtgaactgtaatgtatggcagaaggaacagcagagaagagaagagggaatttatacaatgtaatctttaacaaatgttgtaaaagatgtggatacaaagtactttttgaagtgttgaaaaccattaaaagcaagatggtccataatttatgatca

SEQ ID NO: 104116 - DNA, 2394 bp, Glycine max
  Clone ID: PAT_MRT3847_65032C.1
tttaaaaatactattcttaaacgatttatgtttacttacaatttttcttctcgctgcatcggaatttcaaaaactagtccttcatctgttccttccaacttatctattctgtcatatagtgaagcaagtgatttctcaaatcttccaacaccaaggtctgagggcgaaatcttgtcttccccaaatcttaaggcctttaccttcaatgagctaaagaatgccaccaggaactttcgcccggacagtcttcttggtgaagggggatttggttatgtttacaaggggtggattgatgaacacacatttacagcttcaaaacctggatcaggaatggttgttgctgttaagaaactcaaacctgaagggttacaaggtcataaggagtggttggtaggtgttttgtttccatttccaagcctaagatggcttaagcatactttacattaaatttaaacccccctaagaaggtacttagatcttttttggatattattcatggtgcaattagtgaagttttttaatcattttctagactgaagtggactaccttggacaactacaccatcagaatctggtaaaattgattggatactgtgcagatggagagaaccggttgttggtatacgagtttatgtccaaagggagcttagagaatcatctgtttagaagtaagttaccataaccattacactttgttttgtaactttagtttacttagctattaccttgatggttatgtcatcaaagaaactcacagaataatagagatatcaacaaagataaatggttccttaagagtgaccttctttgttattaacatgtttgactatgatttggtaactaatccacttaggaaaatgacatattactacattaaagtcgtttgatgggcttattatatgtgacaggaggaccacaacctctttcttggtcagtgaggatgaaagtggccattggtgctgctagaggactttcttttcttcataatgccaaatcacaagtcatataccgtgattttaaagcatccaatatcctactagacgcagtaagatcaatgagggtaaaaataatgtagtaatttattgttgtatcatgaaaaataatttcttatcattcgtttggttacaggagttcaatgctaagctctctgattttggcttagcaaaggctgggcctacgggtgatagaactcatgtctccactcaagtcatgggaactcaaggatatgcagcacctgaatatgttgcaacaggtataccttagctttgtgtaaacagtaaactgttgttacttttcattgtttcttgtaaatggttaatggtctgtaatcatttatgtccatttgaacatgctattgttctagtcaattgtatgagactctatacattgaactgatctacacttcagtttcttcccatattgtaaaccataaatgtctgatattgcttgtcacgcatactaatcatgtgtttttgtctaaacaagtgaatatgtgccacaatttttagattcattatgtttgctccaagcactgctcctcaggatagaattcagaagctaactcctttcacttgtctcattttaagcaaaccaccatactaaagctccaattcattaacaggtcggctgacggctaaaagtgatgtatacagctttggagttgtgttgcttgaactattgtccggtagacgagccgttgacagatcaaaagccggtgtagagcagaatctagtagaatgggcaaaaccatatttgggtgacaaaagaagactatttcggatcatggacaccaaattgggtggccaatacccacaaaaaggagcctatatggctgccactcttgctctaaaatgccttaatcgtgaagccaaggcaaggcctccaatgacagaggttttagaaactcttgaacagattgcagcctcaaaaactgcaggaagaaactcccaattagaacaaaagagagtccatgctcctgtcagaaagtctagtgtgcaaaaagggtcccatttgaatcatactcctactgcattcccataatctgcttgtgtactctgaattttgaacatctgtatatacattccttatttttataaggttggttttgacaaggagaaatgctaggaacacactattttgaacacttcctctcttgttagttgaaatttattgaagatgacaaaattttgttggtcctacatgatgtttaatgatcttttctcttgattttgttgtttttaatcaattttaaccaattagagataatgcatttgaaggagtgtggtagaaagtgtgttcctagcactcctctttgacaagatataatgtggcatgtacatgtacttagatgaaatttcaactgaatattagcacattatttccccccatagaagt

SEQ ID NO: 104117 - DNA, 1826 bp, Glycine max
  Clone ID: PAT_MRT3847_65033C.1
attcggtcgaggcatttcaattccaattttttttctgtaaagtttaaaccaaaccccacataagaaaatagaaaaaaagacattacttttttaatttctccttcttttaagcaaccatccacgcgtccggttgtgtatgactaggtttctgccagcattggggttaatgggtaattatctagattcttcagccaaagtagaagctgctcacagttccagaaccccttctggaatttcaaaaactagtccttcatctgttccttccaacttatctattctgtcatatagtgaagcaagtgatttctcaaatcttccaacaccaaggtctgagggcgaaatcttgtcttccccaaatcttaaggcctttaccttcaatgagctaaagaatgccaccaggaactttcgcccggacagtcttcttggtgaagggggatttggttatgtttacaaggggtggattgatgaacacacatttacagcttcaaaacctggatcaggaatggttgttgctgttaagaaactcaaacctgaagggttacaaggtcataaggagtggttgactgaggttgactacctcggacaactgtaccaccctaatctggttaaattaatcgggtactgcttggagggagagaaccggctattggtgtatgagtttatgcctaaagggagcttagagaaccatctatttagaagaggaccgcaaccactctcttggtcggtgaggatgaaagtggctattggtgctgccagaggactctcctttcttcataatgccaaatcacaagtcatataccgtgattttaaagcttctaacatcctgctggatgctgagtttaattcgaaactctctgactttggtttagctaaggcgggtcctactggtgatagaactcatgtgtctactcaagtcatgggtactcaaggatatgcagcacctgaatatgttgcaactggtcggttgacggccaaaagtgatgtctacagcttcggagttgtgttgcttgaacttctatcaggaagacgcgcagttgataaaaccataaccggaatggagcagaatctggtggactgggcaaaaccatatttgagcgataaacgaagactgttcaggattatggataccaagttggagggccagtacccacaaaagggggccttcacggctgccacacttgctctacaatgcctaaacagtgaggccaaggcaaggcctccaatgacagaggttttagcaactctggaacagatagaggcccccaagacagcaggcagaaactcccattcagaacaccatagacttcagactcctgtgagaaagtctcctgcgcgaaaccggtcaccgttaaatctaactcctactgcgtctcctctcccagctcaccggcaatcgcctcgtgtgcactaaagctgtgaacatagaacatctgtatatgtaaattccttaaatttatcaggttgtgttttggacagcatgcgttgaggcatgtgtacttaaatgcaattttgggtcatgcacggtagagtagttaacaccatttatccaaatgctatgcaagttattgcagagcagtattctgcatatatatctcctgttaccaatgtcttgttgataataacaacctgacacattgcttcccttctattatgggtgtccctttatttggttttggcctaaaacaattccaaaacatggagagagagagagggttgttgtatatacttaacatcttgtgtgcaaaatttgttgaattagtttttaataccttcttataatttggatttggattttgagtttaatttaactttattattttgtttgagtg

SEQ ID NO: 104118 - DNA, 853 bp, Glycine max
  Clone ID: PAT_MRT3847_65034C.1
gaatcgcgcaatgtcttatgtcattcacatgtactttctcctctctttccgttccctctttttttcctttcttgtcaaccaatatttaattcctttttcttcaagcatttcaattccaatttgcaaactgtaaagtttaaaccaaaccccacataagaaaatagaaaaaaagacattacttttttaatttctccttcttttaagcaaccataaataagtgtagtgtgttggtgtgtgactaggtttctgccagcttaggggctaatgggtaactgcctagattcttcagccaaagtagaagctgctcacagttccagaaccccttctggaatttcaaaaactagtccttcatctgttccttccaacttatctattctgtcatatagtgaagcaagtgatttctcaaatcttcccacaccaaggtctgagggcgaaatcttgtcttccccaaatcttaaggcctttaccttcaatgagctaaagaatgccaccaggaactttcgcccggacagtcttcttggtgaaggaggatttggttttgtttacaaggggtggattgatgaacacacacttacagcttcaaaacctggatcaggaatggttgttgctgttaagaaactcaagcctgaagggttacagggtcataaggagtggctgactgaagtggactaccttggacaacttcaccatcagaatctggtaaaattgattggatattgcgtggagggagagaatcggctgttggtatatgagtttatgtccaaagggagcttaaagaatcatctgtttagaatgaggatgaaagtagccattggtgctgccaaagacttttttttcttataatgcaaatcac

SEQ ID NO: 104119 - DNA, 702 bp, Glycine max
  Clone ID: PAT_MRT3847_65035C.1
atgctgtatgtttcttgctaagaaggtgctgataattccatttaacttacctatcttatcatctgattatccaccctaatctatgattagggatgtcttcttttaaaaaaaatccaataataactactgggggttgttcatcaccctgaactggtgtgtctttgttaaatctgttttaacaagaaatacattaatgggagatcatacaacagctctagcccacagaaataatgtcataccgcaatgttttgcatggcaagctttacaagtttataataattataatattatcaaacggatgttattctaccatgatgttctgtttagcgagaagcatactactttaaccacgcgctgcagacaatatttgattggaaacttgtttgctgtttgcagattgaaacaaaggatcccaagagactgtataatatgattgatgtcttgcgagagggtaatatgcgatgaaattttctttggaatctggatgcaggatgtctactgtagaacttgcaataaacgagatatgacattctggtttttgagaaccaaacaatttccattttctgttcgtgatcttttttgttaagttaggaaagtttagtgtgtgtatcattaatcgaccagaactatgtaagtactttttgttaatccgatcactttacaatcgcttttcctttacatattttttgttcttctaaaaaa

SEQ ID NO: 104120 - DNA, 172 bp, Glycine max
  Clone ID: PAT_MRT3847_65036C.1
ctcatttccggcaagcccagactgcaacacaattggggctatggttgcggacattacttctcagtccaagcctgagaatgccactaccaatactgctactgctcctggcacaggccgtaggccgaatcaagtgaatgcatctggcgctgccattggtccgacatgaccatac

SEQ ID NO: 104121 - DNA, 1922 bp, Glycine max
  Clone ID: PAT_MRT3847_65037C.1
tttcttggcaaccaatatttaattcctttttcttcaagcggttcaattgcaatttgcaaaccttaaaccaaaacccacataagaaaatataaaaaagagcattacttttttaatttctccttcttttatgcaaccagaagtgtagtgtgttgtgtatgactaggtttctgccagccctggggataatgggtaattatctagattcttcagctaaagtagaagcagctcacagttccagaaccccttcataattgtaattgtgataccgttgcggtcgtgacggaaagcatggaatttcaaaaactagtccttcatctgttccttccaacttatctattctgtcatatagtgaagcaagtgatttctcaaatcttcccacaccgaggtccgagggtgaaatcttgtcttccccaaatcttaaggcctttacctttaacgagctaaagaatgccaccaggaactttcgccccgacagccttcttggtgaaggaggatttggttttgtttacaaggggtggattgatgaacacacacttacagcttcaaaacctggatcaggaatggttgttgctgttaagaaactcaagcctgaagggttacagggtcataaggagtggctggtaagtattttgtttccatttcgaagcctaaggtggcttaagcatactttacattacaccccttcccctgcccctaagaaatgtatatacttttttggattttactgatggtctaattagtgaagctttaatcattttctagactgaagtggactaccttggacaacttcaccatcagaatctggtaaaattgattggatattgcgtggagggagagaatcggctgttggtatatgagtttatgtccaaagggagcttagagaatcatctgtttagaagaggaccacaacctctttcttggtcagtgaggatgaaagtagccattggtgctgccagaggactttcttttcttcataatgccaaatcacaagttatataccgtgattttaaagcatccaatatcctactagacgcagagttcaatgctaaactctctgattttggcttagcaaaggctggccctacgggtgatagaactcatgtctctactcaagtcatgggaactcaaggatacgcagcacctgaatatgttgcaacaggtcggctgacagctaaaagtgatgtatacagctttggggttgtgttgcttgaactattgtccggtagacgtgccgttgacagatcaaaagccggtgaagagcagaatctagtagaatgggcaaaagcatatttgggtgacaaaagaagactatttcggattatggacaccaagttgggtggccaatacccacaaaaaggagcctacatggctgccactcttgctctaaaatgccttaatcgcgaagctaaggcaaggcctccaatgacagaggttttagaaacccttgaactgattgcaacctcaaaacctgcaggaagaaactgccaattagaacaaaagagagtccatgctcctgacagaaagtctagtgtgcaaaaagggtcccatttgaatcatactcctactgcattcccataatctgcttgcgtactctaaattttgaacatctgtatatacattccttatttttataaggttggtttttacaaggagaaatgctaggaacacactattttgaacacttcctctcttgtttgttgaaatttattgaagatgacaaaattttgttggtcctacatgatgtttaatgatcttttctcttgattttgttgtttttaatcaattttaaccaattagagataatgcatttgaaggagtgtggtagaaagtgtgttcctagcactcctctttgacaagatataatgtggcatgtacatgtacttagatgaaatttcaactgaatattagcacattatttcccc

SEQ ID NO: 104122 - DNA, 2664 bp, Glycine max
  Clone ID: PAT_MRT3847_65038C.1
acgctgttatgtacacattgttagccaagagttgcattaaaactgttcacatcatttgtttttgcatggactgaacgccggtctgacggcgaagttttttgttaaagtgaatatgagcctttgtttgctccagctccttaagagaattcagatccttttttctcttaagcaaaaaagctccgattttaattcttgcttttgtgactcccccgcgactttcctcgcttcatctccccaactagtgcttcacataatccaattcatttgtattctaactccctccatgttatgttgcaaccccgcattaaaccctcaccttctttctttcttccttctcatcacaaagacacaagctttcttcctcaactaccctacccaacttcttattccactcatcacttcctttgaaattgaaaccaccaaaattgtatttttttttttctccttcactcgtagtaatattttgaaaagtgttgtgctttgggttgagaacttgtggcagggcctaatgggtaactgcctagattcttctgccaaggttgatgcagctcagagctccaaatccacttctgcatcaggaatctcaaaaactactccttccagtttatctattccatcatacagtgaaaaaagcaatgcctcaagtcttcccacaccaaggtctgagggtgaaatcttgtcttctcccaatcttaagcccttcacattcaatgagctaaagaatgccacccgaaattttcggcccgatagtcttctcggtgaagggggatttggatatgtctacaagggatggattgatgaacacacatttacggcttcaaaacccggatcaggaatggttgttgctgttaaagaggctgaaacctgaaggttttcaaggtcatcaaggagtggttgactgaggttaactaccttggacaactgtaccatcctaatctggttaaattaatcgggtactgcttggagggagagaaccggctattggtgtatgagtttatgcctaaagggagcttagagaaccatctatttagaagaggaccgcaaccactctcttggtcggtgaggatgaaagtggctattggtgctgccagaggactctcctttcttcataatgccaaatcacaagtcatataccgtgattttaaagcttctaacatcctgctggatgctgagtttaattcgaaactctctgactttggtttagctaaggcgggtcctactggtgatagaactcatgtgtccactcaagtaatgggtactcaaggatatgcagcacctgaatatgttgcaactggtcgtttgacggccaaaagtgatgtctacagctttggagttgtgttgcttgaactactatccggaagacgcgctgttgataaaaccataaccggcatggagcagaatctggtggactgggcaaaaccatatttgagcgataaacgaagactgttccggattatggataccaagttggagggccagtacccacaaaaagggggccttcacggctgccacacttgctctacaatgccttaacagtgaggccaaggcaaggcctccaatgacagaggttttagcaactctggcaacagattgaggcccccaaaactgcaggctgaaactcccattcagaacaccatagagttcagactcctgtgagaaagtctcctgcacgaaaccggtcaccgttaaatctaactcctactgcgtcccctctcccagctcaccggcaatcgcctcgtgttcactaagctgtgaacatagagcatctgcatgcatgtaaattccttaaatttatcaggttgtgttttggaccgcgtgcgttgaggcatgtgtacttgaatgcaattttgggtacttgaatgcaattttgggtcatgcacggtagaatagttaacaccacatttatccaaatgctatgcaagttattgcatcagtattctgcatgtatatttcctttttccccacgtagaatgtcttgttgataataacaaccagacacattgcttcccttctattatgggtgcctcataatttgggtttttggcctaaaacaattccaaaacatggagagggttgttatgtacttgtaagttgttctattcttgtatatattatttttatcatttgatagattttacatcttgttagttaaatttgttgaattaatgtttaatgatagtttctttggattttgaatttattttaacaattagagtagtgtgtgaaggagtgcattagtttctagtcctctttaacaagatataatgtggcatgtacttagatgaaatttcaatcgaataacattatttgttttttgcatgggaagttcataagaaatcaatccttagtaatatagtatgtgaagaccaagagggacactgtgaacgagccatgttaaaatcagtcagatgctcccatgtaatatatgattatgcagtcccaaatgatctggtagtggatcattattaatttattatagaactataatatttatataaaaattttaattttcggtaaataaaattattataccagccgaagttaggataattccaactgttagtattacccgactttttttttagaataattaagacaaagctagtttgtaaaagaacatgattaagtgaaggccataccaaatgttggaacaaagtcagttgg

SEQ ID NO: 104123 - DNA, 346 bp, Glycine max
  Clone ID: PAT_MRT3847_65039C.1
gggaacacctaggaaaccactgactaacgttgaggtaggaaccatccatgtgaggcttgttatgcctaacacaaaagattatggtcgaattgatccatactcatctgatttgaaagcctactttcaagcttatacccaataaacgtaacgctcaatatgtgaatttgggaaggtgttattggcttaaggtaccatacataatcctgtgtgtatcttaatcttgtaatataatgtgtcaaatatagaaaacgaaatactgtccatgtttggtaccctaatacgatcagatcatgattatataaatcttaaaagatgtacgtacgcttgacaaaatactgatggttca

SEQ ID NO: 104124 - DNA, 413 bp, Glycine max
  Clone ID: PAT_MRT3847_6503C.1
acggcgcgcgatcaagcccctgccatgtactctaactcatcgcaattttttttgccttgtgcttctaagagtcccctcagggggagcattcaggacccgatgagctttcaagctgccgctggatttagagacatatgagttaaaagggaaccaaaaggacgctgatgtgctaaaaactgcccaaggacctataccttaacttctccagggaaaggactacaaacaaatgtgggcactgatcctccctcattctatgggcacaggattgaaccaactttcaaagaatgcatacaacccgaccctcaactgagattatacctacaggcgaatctaatgcaatattgatatgcctgaccaggaaaaaagccactgagtaactaatgacataccagccaactacaagaatggaatcc

SEQ ID NO: 104125 - DNA, 238 bp, Glycine max
  Clone ID: PAT_MRT3847_65040C.1
tacggctgcgagaagacgacagaaggggtaacttagtgcaacatgggaaattgaattgagaggaatcatctagaaatgcaagcacaaaaaaaagataaagcggcccccaaattgttggcccctggcacccggtgttatatccgggaaagttttttgggggggtcacagctgccccaatgggtgccccttttaggcctcgccttaaaaagggcgaaccgtatcccccggggaatttgtt

SEQ ID NO: 104126 - DNA, 944 bp, Glycine max
  Clone ID: PAT_MRT3847_65041C.1
atgccttgtagtattatatttaatattatctctctaattttgtttttttttggaatggattttgattattgaacgcatttcttttatttatttttttccctaggttttaaaatctacgagggattctgaacaacaatggcggaagactcttctcgcagaaacctcaattgcttcgcgatgaacgcttctatggcgcgttgaaactcctcattgctgagctcatcctgcgggtacaaaatttccggcgagctgtcgctccgcttctcggtctccgaccgcaggagctgttttcggcgcggcggctttccggcagcgtctacctttatcttctccgactgactccggcggtacttcgcggcagccgcggcgtcggcggaaggcgtgtcctgcaccatatcggcgatgatctgcttgtcgtggaacacgggctccggcggtgtcggtgacggcggcgcgtgaggttcggagacggcggtgcgcgtttggaggaactcgcggtagagtgcgtcggcggagtggggggacgagaggcggcgggactgagcgaggagggcggcgatgatggcgttggagacggcgaagacgaagagggggctggcggcgaaggcgaagaggcggcggaggaactcggcggagagcgcgagcgcgaaggggaggcgcgtgaggatccacgagaggaggaggagggcgaggcagagttcgagaatgcgaagggctttggaaacgaaggccaaaatattgttgttgttgtgtcttggaatggcgttggccttctcagctttcaagagaaactcgtccattgttagatacagaaagagacactaactaagtggtgtgaatggaaaagaaaacaaaagaaagggttatgttatgttctgttatgttgagaaaggttttacagagagagcatggttccttaaagatgaaacagatgccgcgtaagt

SEQ ID NO: 104127 - DNA, 468 bp, Glycine max
  Clone ID: PAT_MRT3847_65042C.1
aggtattttttttttttttttttttttttttttttttttttttttttttttttttttaaacacctgggaaaagatgctgcccataggattgttttaacgatggaggccaattaaatctatacatttttaaaacaaaaatatactcctaccaggtaccttttactaatgattcatagcaaaaggagggggggaaaaacaattaaattgccaaaataacttggggcttctcagggtacattctgaaatccaaaacacaaactgttttattggcaaaacaggcagggatcttggcaccctccttattccaacaaacctaaaaaatgcctccatcaccaggggagggtttaacgatcttgccttcctttaaggaccctatgagccttgatctgtgaggaaacccactgggtatgtaccccccattgggactgaatgccacaaaatatacccgatctttggggccattcaagc

SEQ ID NO: 104128 - DNA, 1030 bp, Glycine max
  unsure (1)..(1030): unsure at all n locations
  Clone ID: PAT_MRT3847_65043C.1
acatgcaaagctattgagtaccaaaatggtaaaaggaccaacagttaaacggtcatacagccaaggatgtaaagtgcagtgtcactatgctcaaaaatggagtgagcattttcccaaaatgccacagtaagagatcactaggttggcaagagaagttagctatacagtaggcaaagagaaactgaacaaaagaatcctcagctgcaagtaaacatacacgcattttcactgttgtaccaaaaataaaacatctgaattgcaccacactcatcactaagtacagtaaagaaaattttcctccactattttcctttgggtgaagggagggaggttttactagcatttttctggaaagttacaagatttcttccaactgtggttttttcccataattttgtatcctacctgtcaaatttggacaaagatccttgttaattttggaagaggtagaagggaaaagaatttactgtttctattgcgtcacagaagaaggatggtttttgcttcagggaacagattctcttgcattcaataaagcaactatattgtgccgctccaatattttggttccattttcagcccaccatttttcagcttgctcttctgtgaaatgccttcgactgaagcggacacgcttaagctcattaccaccacctggctgtgaggacaaacttacatacacacctggttcatcttgcactacccactctgcctttccactttgtgttttggtaccattagctaatatcagatttgttacaatgctgctgccttcatttttgggaatgacgnngtttcttatatggctctcatctaaggaattatgtannatgctactagtgttttcagcaaaaggctctgtactggagtcagtattatgtcnttctggcagtctttccaccatttcttncaactgtgcagttaatggctttatgacctcttttgctganttacactttnnnnctttanntnnagctactgcnnnnnnnttcnncnnttgcgttgatgttctcttatgnnnnncctctna

SEQ ID NO: 104129 - DNA, 779 bp, Glycine max
  Clone ID: PAT_MRT3847_65044C.1
ccacgcgtccggtcaagtataataatacatggaagcctctagtaagttagtcccttttctcctacaatgaagatttaagcagccaaatacaagtaaattatacctttagggtgtcatattggatattgaactacttgggcataaattccattgtatggccattttacttttatctttctgcttcaatacataacggttcatcatcaacgtggtctctgactatgctcatcttgtcactatggtcatcattattgacagttcttctgctaggcaagccaatactaaagctttttcacagttcctcctttttgactgctgaaaactttcctttattaccaacattgctgctgcaactgctgctatttttgttctaattgatttgcgaattgtctgtactgctggcattcaaaatctttgagtgcttctaaatctacaagagtcacaggtgcacagcatcagtcctcatgaatctcctggtttgaccatcagaacttcagaagtagagcaataaattaatggcattatcatacttttgcgagattttaaacttcaaaatgaaaaaaaaaacttctgctgtagtttaatatgatttcatttgtaaaatactgctttcagaaattcaggtttgatattggatattctctattggttttttagtctctatgaaacagaaactggtgggtaatatattatattgaactgctgattttgaaattcaagaaaacaaaagctgaattctttctgaacatttcttgctattctcaatctgatggggtaag

SEQ ID NO: 104130 - DNA, 659 bp, Glycine max
  unsure (1)..(659): unsure at all n locations
  Clone ID: PAT_MRT3847_65045C.1
agcagcattgactgtaatttaaataaactagttaatcaatattacattaatcaacgagtgtggcatnntaatggaccaattgctttcatctttagtttgttaagtatgtagtnnntagatgagacaataaccagaacttaagtaaatttctctgcattcccttaacttgaaaatttcaacccgtgttaaagcaggttgtgacatgaccaagattctcatggcaacaacactttccaggctggtgctcactgatcatagcaaacttacccttggacaagatggggcaattgagccccttgtgagaatgttcaattctgggaaacttgagtccaagttatcagctctaaatgcactgcaaaatctttccagcttgacagaaaatgtgcggcgtttggttggaactggaattgtaggatctctgctgcaacttcttttctctgtaacatctgtgctcatgactctacgggagcctgcatcagctattcttgcacagaattgcagagtcagaaactgttcttgtcaatctaggtgtggctcagcagattctctcacttttgaatctttccagccctgtgattcaaggtcatctattagaagctctaaatagcattgcttcccttccttgtgcttccaaagagagaagaaaaatgaaggaaaaa

SEQ ID NO: 104131 - DNA, 166 bp, Glycine max
  Clone ID: PAT_MRT3847_65046C.1
tattttttagtgagcaacatgaacgcatccaacgttctgaaccagaaagtaaaaaaggtacatcctcttgccctcttcccctaattaaatatcacaacttacaaacaggggggcaagttggccgcaaacattgaccgtagttcatttcacagttggccactttaaa

SEQ ID NO: 104132 - DNA, 349 bp, Glycine max
  Clone ID: PAT_MRT3847_65047C.1
ccttcgcgtggttcaacccatactccatgtaatggactggtttgggcaatactatactgtataagggcaaacatattatgagcagagactatgctagttttcatggaatgattaccaatcaagttatgagcaagatggcacctaagatcaataggctttgtgggggggatagaaaaaatggtgctggaaaagacacacctgctgttggcttgatgttcaaaaatggcaatttgtacgaatgatgttcggagagttctatgtggaatgccttctggaatgacgttcacagttaatttgcaatacgcattctcaatgagatgttcatttgatataggtatgaaaaattact

SEQ ID NO: 104133 - DNA, 395 bp, Glycine max
  Clone ID: PAT_MRT3847_65048C.1
ctcttttgtgatatacctccccctgaagggggagagaccccttatgttccaagctttaaagtgacagaaaagatgatggaggggttcccagaagaggtgaaggaaatacgaagagaaagggttaaagtatacatttacagctcctagtgctaataacgtctcctccatgagaggtagagggtgggaagatacctttgggaccgaagatcgcaaagaagccgagaaaagggcaaatgctctaggaatggacgtggagtggcttccaaatggtgggatcaagacaatactttgaccaagatgtttaaccaaggtattttcaggaaggataggaagaaaaattttgttcaacacaattttagggattcattgaaataagattagctcggccatgatgg

SEQ ID NO: 104134 - DNA, 467 bp, Glycine max
  Clone ID: PAT_MRT3847_65049C.1
attggattctcttatgatacattattgcatgaactagttttcagaagttgtccttgtgtctttttgcggttacatttgaaaattactgcctaaataaaataggatctgacaaaaaattgcacgtgaatgcaccccctttccaaaaaacatatttgatcccgaccctttttttttgttggggggtgacacagaccccacccctattttttggaatccccccaaaatttttcctccctaaaccccctccccctctggggggaaaaaatccaggggggctctcaacttcaatattttttgcgggccttcaagaaactattccacacttatactaaaccttttttaaaaaaacacaacccccccgggatacaagggtaaaaccctcaatttgggggtagggccaaaaaacccggtcgcttcctctgtcttttggggggacccaagggccaaaaattgtatttccttaaaaa

SEQ ID NO: 104135 - DNA, 744 bp, Glycine max
  unsure (1)..(744): unsure at all n locations
  Clone ID: PAT_MRT3847_6504C.1
aattcctacatgacgacgagaatcctcgatactccactctnttgcgaatagacaattcaactctatcggaggagattgcacggcatttctttcctgtcaattgtctgaccacagctccaactaaacattgcgaagtttgactgtccttctcctccggtcccaatcgcaattgtacttcgtcgattcgattattcgtcaagatggctgctcttcgctcttcttcccgactcgtcggagccttctcaaggacggctgctttccgacctggtgctgtcttcactcgctctatggcctcggtcagcgagcctcccaaggactctaatgccaacctcaagtctttccaaatctaccgatggaaccccgatacccccagcgagaagcctcgtcttcagacctacactctggaccttaacaagactggacctatgattctcgatgccctcatccgaatcaagaacgagctcgaccctactctgaccttccgacgaagttgccgtgagggtatctgcggtagctgcgccatgaatatcaacggacagaacactcttgcttgcttgtgccgaattcctactgaggctgcttccgacgtcaagatctaccctcttcctcacacctatggcgtcaaggaccttggtcctgatttgacacctttctacaagcagtacaagaggattcaggcctaccttcaacgcgatacccctggccgaaaacgccaaggaatcccgacagactaaggaagaccgc

SEQ ID NO: 104136 - DNA, 360 bp, Glycine max
  Clone ID: PAT_MRT3847_65050C.1
acgacctgtttaaagggcagggaggacccagggaaggacggggctcaaaaaaggccagaggaccacaagcagaggacgggaaaactgagaacccaccagggcaccagccgaaaagagaaaagaaaggccctatccaaagggggaggagctgacgcaaaccaagctcacggaaacaaaaaggccaaaggccgcactgtcaaaggggagaaatcacggaggagaacccggcttcgaaggccctaagaggacgaaacccaacaaaaaaaagacaggccagagcgaaaagcagcgggaaaaaaaggcaggagacaccaacaaatgggagggccggcccccacaaggccggggcaggtgggagag

SEQ ID NO: 104137 - DNA, 126 bp, Glycine max
  Clone ID: PAT_MRT3847_65051C.1
cttaactaatagaatatgggcttgggccaaagtcttcacaaattgcgaaccggttttacttaatgaaattgactacatatgctgccttttttttatcctttatttgagcagatctttccatttgca

SEQ ID NO: 104138 - DNA, 1168 bp, Glycine max
  Clone ID: PAT_MRT3847_65052C.1
ggctcgagccatgcctgtgtgtctctatcatatctttcatttctagtgcgcctttgaatattaattatatatgaatatatatcaggttcagcctcgctcgagccgccgtcacacctcaaacccatttccttgatatcttagttatctaattacctcaattaatcccttaattgcaagcatcatggctgaggagaagcaccaccaccacttccaccaccacaagggcgatgatgtgcctggcgaggttgattataagaaggaggagaagcaccacaagcatcttgagcaccttggggaacttggtgctgcggctgccggtgcttatgccttgcatgagaagcatgaggccaagaaagacccagagcatgctcacaggcacaaggtagaagaggagattgcggcagcagctactgttggtgctggtggttttgtcttgcatgaacaccatgagaaaaaggaagttaagaaagaagatgaggaagctcatggaaagaagcaccaccatctgtttggctgaacatgataaatattcatatataattaatattcaagctcctaagtatcaccatgcctgtgtatctctatcatatctcacatttctagggtcacggtggaaaaattctgtgcgagcttgaatactgttggtgctggtggttttgtcttgcatgaacaccatgagaaaaaggaagttaagaaagaagatgaggaagctcatggaaagaagcaccaccatctgtttggctgaacatgataaatattcatatataattaatattcaagctccaaagtatcaccatgcctgtgtatctctatcatatcttccatttctagtgtgcctttgaataaattctgtgcgagcttgaagagtgtttaattatgcctatggtgttacttcatatatatatttgcgtatatataatgtatgctatgttggctatattgataataagattgtaaagtaatttgagattgtattattatcctgataattttatgcaaggcgtatgtgttaagagtactcccggtcaattaataagttatcagtttcatcattgatatatgaacatataaatcatgtgcagcagctacagatgacgctggtggttcagattgccatgaacaccatgagagatatgtaatttatataaaagatgagggaacctatgga

SEQ ID NO: 104139 - DNA, 305 bp, Glycine max
  Clone ID: PAT_MRT3847_65053C.1
tctggttaagcttgtatcaatataattgacttatcatcccctttctgctgtatatagggtaaccaaaaataaaaaaaaaagaaaagaaaaaagaaacaggagcagaaaaagaaagatgctggagagtgaatcaagtaggatagaaggtggatcttaacagaagagatgctaaatgttataacagtacgatcctggcggagcagcttgatgtggccacgatgatcacctgcgttgcgctgtcaacacgtgttttattcgctccaataatagtattccgctgtacgcgctttactaaccgataggaa

SEQ ID NO: 104140 - DNA, 488 bp, Glycine max
  Clone ID: PAT_MRT3847_65054C.1
ggctcgagggacccatgcctgtgtatctctatcatatcttccatttctagtgtgcctttgaatattaattatatatgaatatttatcatgttcagcagctactgttggtgctggtggttttgtcttgcatgaacaccatgagaaaaaggaagttaagaaagaagatgaggaagctcatggaaagaagcaccaccatctgtttggctgaacatgataaatattcatatataattaatattcaagctccaaagtatcaccatgcctgtgtatctctatcatatcttccatttctagtgtgcctttgaagcttgaatattaattatatatgaatatttatcatgttcagcagctactgttggtgctggtggttttgtcttgcatgaacaccatgagaaaaaggaagttaagatagaagatgaggaagctcatggaatgaagcaccaccatgtgtctggctgaacatgataaatattcatatataattaata

SEQ ID NO: 104141 - DNA, 726 bp, Glycine max
  Clone ID: PAT_MRT3847_65055C.1
cggctcgagtacggctgcgagaagacgacagaaggggcccatccatcacacctcaaacccatttccttgatatcttagttatctaattacctcaattaatcccttaattgcaagcatcatggctgaggagaaacaccaccaccacttccaccaccacaagggcgatgatgtgcctggcgaggttgattataagaaggaggagaagcaccacaagcatcttgagcaccttggggaacttggtgctgcggctgccggtgcttatgccttgcatgagaagcatgaggccaagaaagacccagagcatgctcacaggcacaaggtagaagaggagattgcggcagcagctactgttggtgctggtggttttgtcttgcatgaacaccatgagaaaaaggaagttaagaaagaagatgaggaagctcatggaaagaagcaccaccatctgtttggctgaacatgataaatattcatatataattaatattcaagctccaaagtatcaccatgcctgtgtatctctatcatatcttccatttctagtgtgcctttgaataaattctgtgcgagcttgaagagtgtttaattatgcctatggtgttacttcatatatatatttgcgtatatataatgtatgctatgttggctatattgataataagattgtaaagtaatttgagattgtattattatcctgatcattttatgcaaggtgtatgtgttaagagt

SEQ ID NO: 104142 - DNA, 380 bp, Glycine max
  Clone ID: PAT_MRT3847_65056C.1
cccaaggggtaagtaagattttttcaaaaaaaaaccagtcattaaaaagtaaaatccttcctgtaaaaatataaaatttcgcagcattaataatcaacataactttttttgataaatatgcccaggttttgatgctaaaaccatcgctgttttgatatgtctgaaaaggccgttgttttttaaaattgctcacaaacaaagcttgcaaaaaatttttaattccccaattggtggctccgggattcttaaccacaattcctcattgcatgggactttttttttgtgggattaccatgtttgctcaaccctcaatgacggaaagttttcacaaccttttttatttgtccccggaaaaaaggacatttggtcaagtgtaaaaa

SEQ ID NO: 104143 - DNA, 245 bp, Glycine max
  Clone ID: PAT_MRT3847_65057C.1
atggatccgggtatggagggaggagtgagtatgaggagaaaccgagctatgggaggagcaactatgaaagccagggaggaggaggaggggttgagtatggttatgaggggcgtacacctcggcaggaggaggattgaggaggatgtgttctcgcaagccgctttttgataggatggttgatgatgatcttgataggtattgactcaaaggatatttatatacttaatatttaacacattcatttt

SEQ ID NO: 104144 - DNA, 318 bp, Glycine max
  Clone ID: PAT_MRT3847_65058C.1
aatattatagggccctttgtgatttttgaatccctgtttgctgggcaggcataataactgaaaaggggggggatcaaagggagcaagaccaccgggcctttttttttgatagcggcttgtcaaaaaatagatggtggggggacaaaatcagccaccaaaaggattttcccttttttggaaggagagaatgattgattttttacaaacccacccctgcagaaacttttttggcttctgtggaaaaggtaacaaaaagtgggggtgaaaaaaataattggtgtgattttcagaattgagacgaaaaacaccccttgtaac

SEQ ID NO: 104145 - DNA, 457 bp, Glycine max
  unsure (1)..(457): unsure at all n locations
  Clone ID: PAT_MRT3847_65059C.1
tcgagccttcttcttcctctgggcaactctctctttctcatcttgcnngtgtttatatgatcgtcacttcaaaccggcgcnncgtctcctctttccgattcctcagnccagcgtttattttcaggtttcnnttggtgcttgtnnttgagnnngtttgtgccattgtaccannntattatctcttacccatgttcnntggttgtnngaattatttgnncaaatctgnnattcaactacccagtgtcnttattttgaccttcccannagattgcaagggtggnncagttatttgggtcatttaggcaccttttacataacanncatcttcnnattgttcganntggtgagcctgacnncagaactggannatcatttgcattacttgatcnnaacaatatgtgccacctttggtaaggggactatacacttcagnnnagaataagttcatttaaattta

SEQ ID NO: 104146 - DNA, 808 bp, Glycine max
  Clone ID: PAT_MRT3847_6505C.1
gttggatgatggctacaagtggaggaagtacggacagaaagtggtaaagaacacacagcacccaagaagctactaccgttgcacccaagataactgtcgagtaaagaaacgcgtggagcgcttggcagaggatccaaggatggtgataaccacatatgaagggagacacgtgcactcgccatcaaatgaacttgaagactcgcaaaccccttttgaacttagtaatttcctgtggtagtagcatacaccatcataatgtttacatatatgtatattttaatatatcgtagagactagagatgaagaccgaataagtagagaggaatgagtaaaaattgccagtgtatcaaggaaatggtgcatgcatgctttggttcattgtcaattttcactcgtttccatctaatattcctcccattttcaccctttccaaaagcacaacatatatatgtggttgtgttttttagttttcaagcgtctagatcaacatttcagaagtgtacttaacagtcttggtggtgtttcataaaaactcaacagcaaattaaccagtaatatttgtaagttgcaaactgggttcaagcttttaattatttttttgcgcaccttggaaatgatgcatgcatgctttgtttggttcattgtcaattttcactcgtttccatccattcctcccattttcaccctttccaagagcacaataaatatacatatacagttgtgctttttttgcttctgtctgggtgtacggattaaaactaattaagaaactagtggcatttgtacgttgccctagttttatatattg

SEQ ID NO: 104147 - DNA, 139 bp, Glycine max
  Clone ID: PAT_MRT3847_65060C.1
gggcaaaaacatccaacacccttgtgtcatctgaggaccctaatcggacacgtggagcgacccggcatatacgcgccgcgaccggcaggcgtaccaccttttcgtaaagggagtcatatttgagcttggccaaataata

SEQ ID NO: 104148 - DNA, 341 bp, Glycine max
  Clone ID: PAT_MRT3847_65061C.1
ggggggggattttgatttgcatgcttaatctttttctcgtccttcatatcacaaaggggctgaattaaaaaaccggtgctcttgtttctgccccgttctgttctggtccggcgggggccggctccgccttaatttcctctgtcccattaaaggcccctccacctcccctttatttaaaagccgctggtttttttccccccccacccgtttcgcaaagtttacccagagccggatcccggcgttaaaaaacccccctccctgccagggctaccaaggcccccccctcaccccaacccccagggccaattgcctattgcccactaaaggagctgaaacccccc

SEQ ID NO: 104149 - DNA, 790 bp, Glycine max
  Clone ID: PAT_MRT3847_65062C.1
cagttcagatcttctggacaagtccaactcgtagtggggttaacgggacaacagaggcagagcaagagagtgttcggagaaaatgaacactgttctttcaccttcttcagcgtttcctacgttgtccaaaacctatgtttcttttggtcccttattttccagtttcgctgttccttcttcttcttcttcgcacattgaacttccccgcaaaaggggttctcaaaacactggacttcgctgcaactgtagcatctggccaggtggccctggctctggtgatagtgatagcagcaacagaagtatcctggatgcatttttcttgggaaaagctgtagctgaagctctaaatgagcgcattgaatccactgttggtgagattttgagcaccgttggaagattgcaagctgaacagcaaaagcaagtccaggactttcaggaagaagtgttggaaagagccaaaaaatcaaaggaaaacgcagcacgtgaagctatggaggcccaaggattcatttcaaaatctgcagttgagacaaaagtcacagattcaactacttccaaaacttcaaattctgcaacaggtccagtcacttctgttcagtccactgacgcatctgaaacagattccgaacctgccaaagaggaggaacctactagttcaacaagtgatgaatgatccatcctagtgaatttggtttcactgttggctgattttactgaatttccttaataccttatttccccaaactaaataatcatgtttatagatgcaaaaaaaaaaaaaaaggcccta

SEQ ID NO: 104150 - DNA, 417 bp, Glycine max
  unsure (1)..(417): unsure at all n locations
  Clone ID: PAT_MRT3847_65063C.1
gaacacagacgggggttacatatttattctatgcgtggaacaggcagtaagagcgttgtggaagcagagaccgagatacttaaaaatggtcacttcgaagcgaactgctctgtactcaactggatggaaaagctcccacgaagcagtttgaaaccaaggatgtacagtggtactgcaccaacaactgatggggtgaacaagcctcatcgttattggcctagatctgttgctctttgtgagattcagaaagagcagaggagtactgtgctcttaatcaggaagctatctttccagaggatgattcgtgtaattgcgcacaatatgaagactgatctgcgttttcagagtcatgccgtgcttgcattgcaaagaagctgntgaggcttaccttggtgagctctttgaggacactaactt

SEQ ID NO: 104151 - DNA, 3735 bp, Glycine max
  unsure (1)..(3735): unsure at all n locations
  Clone ID: PAT_MRT3847_65064C.1
aaagcctnttgggttttccaacccccgttgggaattggtaaccccaccttttcgaaccaacttcaagtggaaccattcttcttccccttccccaatcccaaattcatcaattcttggtgccacgcccccgaagnngggcctttaaaagaaaaccgcgcttgcgacacgcaggggtggtagggcaagtgaagagaaccttgctaaggagtgcgagcaaatcatgctcgcggagttcttccgaattgcaaggacagcttgaagttctttgtcaagagcgatctaatttgcttgatacaataaggcagctggaggcagctaatactgagcctgaggccactgccatacacgatggtgaataccaattaacaaagaatgagttttcaagtcttggacgtggaaaatatagtgaatgtagtacaactgaatcatctgatgatattgagaaacaagagatggaggaagtgtcacatgaagatgaaatctcatattatgacactagagagtgttttacagagcctganngcaagtgtgagtgagcgggagctatgaatcaagtggacaggtgtagggaacccaacacactatacactgatacagagaacattcatcctgagaaaatggtctgcaattataagcaccctcagttagcaagacgaaaaaagcttccagatcctgttgagaaagagaagggtgttagtctttggtcaatgatcaaggacaatgtgggaaaagatctaacgagagtttgtctcccggtatactttaatgagccgatatcatccctacaaaaatgttgtgaggacttggagtactcttatcttctggatcaagcttatgagtacggaaaatcaggaaacggtctccttcgggcactttatgttgctgcctttgcagtttccggatatgcgtcatctgaaggtcgtaattgtaaaccctttaatcctttattaggagaaacctacgaagctgattaccccgacaaaggaattcgcttcttttccgagaaggtcagtcaccatccaactctcattgcctgccactgcgaaggtagaggatggaagttttgggctgacagcaacatccattcaaagttttggggaaggtcaattcagcttgacccagtgggtgttctgaccctagagttcagtgatgtggaaatatttcagtggagcaaggattaggtcaccaccacgatctataatcttatccttgggaaaatatactgtgatcatcatgggaacatggatatacgtggtaatcgtacatattcatgcagactcaagttcaaagagcagacgatccttgatcgaaatcctcgccaggtaagagttattggttattagtggcaagtcacaattctttgcaacctgttctttatattattctatttatcttctctactccttaaatttcgcctgtctaaattccaaagtaacacattatctgctaagtcatttttttggttaacatctcattcattcagtgtgtatcccgcgttcaattaggtgcatggatttatcgaagatgtaacagggaaaaaagttgccacattatttggcaagtgggatgacagcatgtattatatgaatggcaatgtaaatgtcaagcctaaagatttcacttcatcaaacgcatccttgttgtggaaaaggactatgccatctcctaatctcacccggtataatttgacaccatttgccatcactctgaatgagcttactccgggactgaagctttttctgatcccgggtatttgatcacggattaaaggagaagctcccgcccacggattccaggctcagaccagatcaacgggatctagagaatggggaatacgagagggctaatttggagaaacaaaggttggaaaagcggcagagaatgtcaaggaaaatacaagaaagtggttggaagcctaggtggttccgaagagaaggtgaaaatggaacatttcgatacgttggtgggtattgggaagcgagagagcatggaagatgggacggatgccctaatacatttggtgaatttaatgaagactctaccgatccgttaggtgcatcttaatttggttcagataatgatcgtgatggtttatctttaatattgttgcatggggatatatctgttttgacagaatgggggattaagatttacgaaaccgctgtagtcggggatccttaaagcagtcatggtacaggctttgtgcatgggccgtgtgttggtgatataggaacaatgaacaattgaaagggtagcaaaattaacttccaacatttgtttctcgatgctgctttgtgaattgaaacgacttgcatggccatggctacttctgttgtaattttcttgaccttagggaccagggaccagggtttgcccggaagagagttgcgatcctttgataatcttaaattgaaattgttacttggtcttggatgtgcatatatatgagaaaaaaacccagctgaggaacagttgttggatcacggcgtcttagtcagtcaatttttacccttttactgtttgtatgtaattatttggggggtattagctgatttaaggatagatccccatatcctgttatagctatactcagcccgaaaggctattgatttattaggtaaattgattgaattttagtagtaataaatgataaatgacgagaggttttatcttaaatggactatgccaccttctaatctcacccgctacaatttgacatcattcttttctgatcccgggtaatttgatcacggattaaaggagaagcttccacccacggattccaggctgagaccagatcagcgggatctagagaatggggaatacgagaaggctaatatggaaaaacaaaggttggaaaagaggcaaagaatgtcaaggaaaatgcaagaaaatggatggcagcctaggtggttccacagacagagtgaaaatggaacgttccgatatactggcgggtattgggaagcgagagctcaaggaagatggaatggatgcccaaatatcttcggtgaaattcatgaaggcaattttgatcctttaggtgcatcttgatgttagttcagataatgataatgataatgataatgaatgcaaattactatgtggagggtttatcttgaaccttcttgcatggaggcaacttgttttactgaattgaaggggagagtactctttaaacgaggctcgttgcagttctggttgggcaggtttgtggattgtccttgtgttacgactttgacaaaaaaacaaaggaacttaaaaagcgattccatctcaaaatttctttctgaatttgaatgattttaatcgcctgcggctggtgaaagttgtaattaacctaatatggaacaagcattgcacgtacagagctcttcagcagagttgtggtctactgagaatatcaaaaaaactgaggctgttacttcatctagatgagaatatatttgagcaaagatttcagcttggcaacacttgttagctagattaggttttctagattgtcagttttttttcttcttttcccacttaaattttgttaatatgtaattatttggggtattagcctatgtataagattctctcccttgatcctgatattcttaaaaagctactgacttggccgaaaggctatcaatttgtttcatattgttttcgttttctaattaataaatcgataaataggcaaagatgtgttttctcccaaaaaaaaaaaaaaaaaaaaaaaagaaaaag

SEQ ID NO: 104152 - DNA, 718 bp, Glycine max
  Clone ID: PAT_MRT3847_65065C.1
attaggtcaccaccacgatctataatcttatccttgggaaaatatactgtgatcatcatgggaacatggatatacgtggtaatcgtacatattcatgcagactcaagttcaaagagcagacgatccttgatcgaaatcctcgccaggtaagagttattggttattagtggcaagtcacaattctttgcaacctgttctttatattattctatttatcttctctactccttaaatttcgcctgtctaaattccaaagtaacacattatctgctaagtcatttttttggttaacatctcattcattcagtgtgtatcccgcgttcaattaggtgcatggatttatcgaagatgtaacagggaaaaaagttgccacattatttggcaagtgggatgacagcatgtattatatgaatggcaatgtaaatgtcaagcctaaagatttcacttcatcaaacgcatccttgttgtggaaaaggactatgccatctcctaatctcacccggtataatttgacaccatttgccatcactctgaatgagcttactccgggactgaaggtatataatgatgtattagatcattatttgatagtacgcattccacttcttatatatgcgtctctaattgttggttatagctttttctgatcccgggtatttgatcacggattaaaggagaaagctccgcccacggattccaggctcagaccagatcaacg

SEQ ID NO: 104153 - DNA, 1228 bp, Glycine max
  Clone ID: PAT_MRT3847_65066C.1
gttcatagagagcaagctagacaatatacggttctatatattcacgggcacaaagactctacatttgagaactgattcaaggaatgaccgtgtggggtggatacaaactttggtttcaacccgtggattgtacccacttagaccactcagtgaccatttctccctggcgccaaatgatatatctgtgtcaaccgaggggataaagagacgcttgcttgaagagggcagcagggagagccttgccaaggattgcaagcaaatcatgctcgcggagaaaagcggcagagaatgtcaaggaaaataaattcggctcgagggaagcctagatggttccgaagagaaggtgaaaatggaacgtttcgatacgttggtgggtattgggaggcgagagagcatggaagatgggacgggtgccctaatatatttggtgaatttaatgaagactctaccgatccgttaggtgcatcttcttaatttggttcaggtaacctttacatattttccacagctgcttgatttagttgaactacatacggatattccattaaaaaaattaacaaatgcacgtctgctgtgtctcagacacatttgtaggtcttgagctgtaagcctgtaactcaatatgttcatgagtgataaaaaatcgtaacaatgacgtactcatttgatgcagataatgatcataaaggtttatctttaatattgttgcatggtgatgtgtttgttttgacagctttgcgaagacgctgatgtcgggatccttaaagcagtcatggtacaggctttttgtgcattgcccgtgtgttggtgttataggaacaatgaacaattgaaagggtagcaaaattaacttgcagcatttgtttctcgatgctgctttgtgaattgaaacgacttacatcgccatgtctactactgtagtaattttcttgaccttaggaaccggggtttgcgcggaatctgaaattgaaattgttacttggtcttggtttggatgtgcgtatatatgaggaaaaacccagccgaggaacagtcgttggatcacggcgtcataattttgcccttttatttttacattgttctgtttgtatgtaactatttgggggtattagctgatttaaggaaagatcccctaatcctgttatggctatactcagcccgaaaggctattgatttattagctattgccttttagtataaataaatgacgagaggatttcttaccttt

SEQ ID NO: 104154 - DNA, 433 bp, Glycine max
  Clone ID: PAT_MRT3847_65067C.1
ttcaaattaaatttgataaatttttgcattatttttgtgatcaaaaatgacagaagatgagacggaagacacatcaacatttggcagctcaagaatcgatggctatctttacaagttggaacagcgtccattcgtcggccaaattcgcagaaagtattggtttgtgctgcctcgcgatactcccgttttatattggtacaaatcgcccactgattttaattgtgcgggtcgcattcttctcacgggcgctgcgttcctttacaaccccagggagcaagggattttcgagattcacgtcgacaacaaatgttatcttttggaggcgcccgacagccgtgcccggttggattggctcagcgccatgcagcaaagtcggcgtcggcactaccgtccgcgagaaggaggacaccaaagagatatcatcatagaggga

SEQ ID NO: 104155 - DNA, 419 bp, Glycine max
  Clone ID: PAT_MRT3847_65068C.1
acggctgcgagaagacgacagaaggggaggcaacgatgatgatgatgcagtaatgagccagccacgacgatgacatagtgacgacgaacaggtagcgacaccgaggaggcagcaacgaggccgtagaacattttagggatttcgtggtatgaggcttttaggttttagggttaccataaaaaaattaccacactgattaaaaatcgtgaatcgtttgacgtgcctatttttatttaatttactgaattagaggaaaaaaaatttcatcttttaatttggttaattgatactcatttttttaattaaacattataaataattagatgtttttaatatcattagggaaaccatatcttttcgtctatcaaaccaaatttttgagatttttcataacaaagggttaaacatccatttttaga

SEQ ID NO: 104156 - DNA, 287 bp, Glycine max
  Clone ID: PAT_MRT3847_65069C.1
cttatcattgttttcccggggggagagagaaccttttaccccatataaaaagctaaaaacttggcccacgcattttaaaaaacagcctgagagtttttttcctgccaaaaagaccgcaaaaaaaatggtttttaaacccaccaatgttgattaaaggtccacaaaacaaaaaagggcgaagatttccatgtttaaggtgaaacccgatctgaaaaaagctattgtaaaaaaaaatggtttgggaacaccttttatggggggggcccccaaacgtaagactttaaagg

SEQ ID NO: 104157 - DNA, 259 bp, Glycine max
  Clone ID: PAT_MRT3847_6506C.1
ttataagaagcatattggatgttgtgtgcaagatactacaataacagaaatgcagaaaataacagaaaaggtataacagaaaggaaaatggcaaacaataggtagacgtcatcttctagctagccaatgctatcaagccagctcagcaaccaataattgaatctgttaaatgaaatcctttagatgccttggtggattgatcttccttttaggtctctcattcgtgcctatgcatgtagtatcttgttgagccattatt

SEQ ID NO: 104158 - DNA, 162 bp, Glycine max
  Clone ID: PAT_MRT3847_65070C.1
tctcgcgccgagttccaagccttcgacctattttcccatttaaataggtaagacggagcagctgctctgttgcaccgtgccatggaatcgagatctcccagtgggccatttttggcctgcagtttcggcgattacggggtccaaatgcagtcactgatgaat

SEQ ID NO: 104159 - DNA, 410 bp, Glycine max
  Clone ID: PAT_MRT3847_65071C.1
gtagagtggggcgaactacctccagaactcctggaatcaatctcgaaaaccttaaccatctacgtcgattacctcagattccgttccgtttgccgcagctggcgatcctccgttcccaaaatccctctccaccttcctccccaactcccatggctcatgctatctcgccgcgccttcttcgacctctccctcaacaaaacccatctcctcaaccctcaaccctctcaccgcacccgaatctgcggctcctcccacggctggctcgtcatgctcgacgaaaccccccaaattcgcctcctgaaccccctcacgcgcgccacgcgcccccttccttcggtttacgccttccccaacgtcgtcgccttcgatcacgccaacgtcggacgcggagtcctcattcaaaaccctta

SEQ ID NO: 104160 - DNA, 453 bp, Glycine max
  Clone ID: PAT_MRT3847_65072C.1
ggatccctctcttttcgtttacaagcaacaacagtacactgtttttcttttagtctatgtggatgacattaccatcactggcaattgtgtcttgcttattcagcagcttatctctcagctaaactctcagtttgcacttaagcaacttggccttttagactactttttgggaattgaagtcaaatatttacctgataaagggatctcctgcccaagactaaaatggcagaggcacaacctatctcctcacctatggtctcctcttgcaaactatcaaaatcagggagtgatttgtttcaagatcctactctttatggatcagttgtgggtgctcttcagtatgctactttgactaggccagaattcagttattctgttaacaaggtgtgtcagttcatgtcacaacccttggagtctcattggactgctgtcaaacagatactccgttacctt

SEQ ID NO: 104161 - DNA, 338 bp, Glycine max
  Clone ID: PAT_MRT3847_65073C.1
cggacacgtgggttttttttttttttttattgaaaactccatatgttgttaaaaaaatggttataaacaatgggcccaaatattttaacaaacaaactatcataaaaaataaaaacaaaactgaaaaacttgcaataaaatataataaccctaacatcgttttctttaagccttatcacccttggcagcacctgcaacaccttgtcctctaaaacgaccagttcttctagcagcaatgataccaaccttctgtccaggatgagcataactcctgacaatacttgcgttaccaatatgcttatgattacctcctgcgtggaattctcaacacggttcat

SEQ ID NO: 104162 - DNA, 383 bp, Glycine max
  Clone ID: PAT_MRT3847_65074C.1
caggtgtgagcttgagttatagagcgaagagaatggctcccaagggttgaatccttttggcttagatattcttcttatcaccttcactgagtcgttgtcttgctgtagatattgttctataaatcatcttttacaaggaatcttgctctttcatactcgtcttcagcttccttcaagatcagttttacttcattcttcatatgttcactgcttattaatgctttaacagcttttcctgatcttgaacttccacaaacaacaatcttgactacacggtggactccagttacatattttgagaagaaaatgtgcttgatgtttgtgttcggtgaagatgagaaggtggtgtctaggcagccagcaatttccccgtttgccttttc

SEQ ID NO: 104163 - DNA, 310 bp, Glycine max
  Clone ID: PAT_MRT3847_65075C.1
cccccaacccgtttggtaaattgggggacaccaaaaaagggctaaaaatggggtgggaaaaataacaggggaataaaaatttcccccccctttgggttttaaccctggggcccctttttttaaatttccttgggtattttttttttttcacccagaatttcctttttttaaaccccttttttattgggggtttctgggacttgggaaagggcttttctttagggaaggtgggaaaaaacgggggggctgtcttggggttaaaaaggggccctttggaaccggctactttccgtgggggaaaggtacccct

SEQ ID NO: 104164 - DNA, 149 bp, Glycine max
  Clone ID: PAT_MRT3847_65076C.1
gccgttcaaagtggtcttatatgaaaaacacttcgggcgttggtgcacatgtatgcttcgataatgctctctggatacaacaggtctattgagaatacaattgagacttgcagatatttggacatcttcgatgtgcattatccaatcgc

SEQ ID NO: 104165 - DNA, 370 bp, Glycine max
  Clone ID: PAT_MRT3847_65077C.1
cccattggtctctctcttttctctcagaatgcaaaccctagaaaattcccccttgcgaccgaaccctagagttgctcgctcaaatctatcacagcttcttcattatcggaattcggcgtacagatcgcatattccgttaatttgtttttttccgaattccccgatccggattggtttctgaagaagaacactcaattccgtacaaattctagacattgctgctgtcgctggtcccgttgatcatggagtaagattcggagagaatccctgtggccgttctcgaattgctcgtcaggggcgtctgcggcatcggcgccgccagcaacgacgtcgaccatgtcaataacggacacgtagagggggtctgacc

SEQ ID NO: 104166 - DNA, 348 bp, Glycine max
  Clone ID: PAT_MRT3847_65078C.1
atattcataaaacgatagttgtcaccgccgtttcccatagatatgcttctcaggttcagatgagcaagctccgggtttacggtaataccggaaagtgacggtggcaatggaacgacgccttcgcccaaaggggagtgacatctgttctccaacgacacatgaaggctccttccggtggcgttttcatcgctcagccacagtttcatcatctccaccttcttgaatgaaacgctccaacaacaattaaccaccctgtcgccgtctatgcctctctctccattgactcgtgtctatgatactcatttggcttatcaagaattaacgactgactttccaaaaaaagaaaat

SEQ ID NO: 104167 - DNA, 624 bp, Glycine max
  Clone ID: PAT_MRT3847_65079C.1
ggaatgaatcgcacctaggcctccgtcacagccacggtaccgcacgctcgctgcctttctcactcacccacgcgagcgcgcgtcctctcacccacatcattgcaccgccatcccagatgccgccgtgcacttgctgtcgtgcccacactgagattcgcacgtcctctgacccacatcatcgtgtcgccgctgtcgagcccacactaccattgcacacgctgccgcgcacttgccgtcatgcccacgccagctgtttcgtaatttttatttttttttatcttttgtctgcctcttttttatttgatatgatattttgacattcaggtttacgggttttgttggttggatgaaaaagtaaacactaaactttgaagtttagaatattttgattatgaataactggtgactggttgatgaggttttcttgagatgagattctctcttgagctcaaaagccaaaggaaattgaacatagaaattgggagaaatttctcgaaatcaagccaagtcaatcagataaaaaaacaatcacttggaggacttttgaacatgtctagtcttagattactgagatgatcccaaaaaaaaaaaaaaaaaaaaaaaccctttttgatacacaaatct

SEQ ID NO: 104168 - DNA, 374 bp, Glycine max
  Clone ID: PAT_MRT3847_6507C.1
gatgcacgcacgcgtacgctagctctggagttcgctcgagctaaattcatatcacaaaacttgtatttgttttccatgatgtttgagagacaccggggacgtgtacgacatgaatgacttttggaagctcagtgacgaattgatgattgactctggttcgtgcttaccttgtatatgactcgatcgcttggcatttatgagctacaggatacatgtatacaagaggcctgagctatggatggtcaaggatgtcgacgaccgtgatatatacaactcatcaatgccttatgatgacgatgcatcatgatgtgaggcacatcaccaatttcaatcgtactcatactctctatgcctaacatcaaccacacttacac

SEQ ID NO: 104169 - DNA, 137 bp, Glycine max
  Clone ID: PAT_MRT3847_65080C.1
tgtatgtttcgtagaagagactttttgttggccatttaaactggtgtcttccacatccaattacatatcggaaattcctaggctgcttcaccctgatttggctgaaaagcacatcttccattaggaccctggaatgg

SEQ ID NO: 104170 - DNA, 654 bp, Glycine max
  Clone ID: PAT_MRT3847_65081C.1
ggaattcggcacgaggacttcaagaagttcatgatttactctttaacccaaccaatccagaagctagtaggaatttcaacaaagcacaacaacatcaggaccctactggtcttgcatgcagccaaggaaggtacttacagttagttttactgaacctaacaaattgctgtatcgtatatatgctaggcacacagattttgaaaccaggttttacaataatagctgatcacgagatgaaatgccttttgttattcattcgtggcacacatagtatcaaggatactctaacagctgttacaggaaatgtgatagcagactgaagctggtggcaggatctgctgaaggatattctggacatgttgatggaaggtttagggaggcaaggatgaatcaccccaaagggataacggaaaaataaattccaatggtggctctgattttttgggcatgccgcagtttaaagctcaagaggctgtagcaaaagcattacagaggaaggtattgttattctattatttgtttcacatgagaaataaaaaatgtgctttattgaggactagttttggtgatatgcttacaaatagtggtggagcttgaaaaagaaaaattggagggaccagagtaattaagattataatatataaatataatatt

SEQ ID NO: 104171 - DNA, 273 bp, Glycine max
  Clone ID: PAT_MRT3847_65082C.1
acattgttgacggaaaagaacacgcaatggataagggtaatttagcatgtgctgcgggtttctcgacatcaagctacactccagcgccctagttggaatggggatggcaaacagacagagggctaattgcggacttcttggaacagttgctttaccactgctagcttactagctgaacactctcctacgcgatataggactacgtgccagactaaaacttattctgcccccttctcagtcctctgctcaatcccaagttcaagctggcgaaat

SEQ ID NO: 104172 - DNA, 183 bp, Glycine max
  Clone ID: PAT_MRT3847_65083C.1
tagtaataattctaacaccgatgtcgtatgatatatgatgaacaaataattatatttgataaatatgtgattagaagtttaattcttaaatttggatgtataacgaaacatttattaagggagatagctagactctttaaataaattttcttaattcaataaattagtctttaacccataacc

SEQ ID NO: 104173 - DNA, 372 bp, Glycine max
  Clone ID: PAT_MRT3847_65084C.1
agttcccggtacagacccacgcgtccgcccactcgtggcttctccctcttccttgaaagcagccccttaagagactcttcctccttttacgatagcaaaagggctgtacaatcccaaatgtcatgctacctaatcacatgatcatgatggatacactctcaaagtgttgcatgtatacatactatgtactccatatacgacctcagagccgatctcatggtaagagaacgtactatagctactagccagggatcaaaccaggatgaagcacctgactagcttgtcggctacaaagtccattacacctagagcctgagggaggcaaatcacataacgccgtacttacctattgaacgcccagaatgctacatc

SEQ ID NO: 104174 - DNA, 415 bp, Glycine max
  Clone ID: PAT_MRT3847_65085C.1
aaattcataaaccccacactatggatgtaacgtgtgagcaacaaaatgattacatgcacttccacgatgcaaattcttttaggtaagcagaccctattttataggagtgttttaacagacgacgctacatattagaacactgcttcaaaagtgttaacttaagaaccctctatggccgaaatagaatacttgcaaccctgaatcctcatgaatatggtggaactatgctgaaccagcatttaccttgtgcttttgagaacaaaaaatacttggctaatttggatggaaaggttcttatgactgcctactctaattaacaatggactaaagagtgatatatgtccccctccacagaaatgcataatccttgatttataaaacatgaaaccgttcaatactttaagacgcctttctt

SEQ ID NO: 104175 - DNA, 109 bp, Glycine max
  Clone ID: PAT_MRT3847_65086C.1
actaacaaatacaagcgggatttattgaaataggtcaactagtggcattcatggaggtatggcctcacacaacatagtattgccagaaaaggattagttctttccgggc

SEQ ID NO: 104176 - DNA, 171 bp, Glycine max
  unsure (1)..(171): unsure at all n locations
  Clone ID: PAT_MRT3847_65087C.1
cggtgccggagattcccgggatcgagncccacgcgatccgagctgttcccctgtgctcctacccactgaagtcgaacccctatttttcctctccctaatggcttgtcaagttcttcttgagcaggcactgtttgcccccaagctaagtttcccttgttcttgtgcgagcgg

SEQ ID NO: 104177 - DNA, 152 bp, Glycine max
  unsure (1)..(152): unsure at all n locations
  Clone ID: PAT_MRT3847_65088C.1
cnaccntcaccatcatcatctgntanctcctgaatntgtngttgaatgcaagactaatctagcgttgagttattttngtggantattagngccatagagacnangcctattgtacactanagatatggattctgcattccacacaacatang

SEQ ID NO: 104178 - DNA, 170 bp, Glycine max
  Clone ID: PAT_MRT3847_65089C.1
taaaattcttccaccaagttatgggtttccagtgttcttctttctacccttaggtctccttctagtgagatatcaatcatgtccaatgacctgacaccagttacagcgaaagggttctgtccattgaggtacatgcgtgtcacgacacgaagagcaaaattagttcagat

SEQ ID NO: 104179 - DNA, 871 bp, Glycine max
  Clone ID: PAT_MRT3847_6508C.1
atgttgattaaagaggggcgaacgaagcctttaattcaggggcgtttgtcgcgtttctgtgtgttgggcgaggaatctgggtacgcgcctgtctctttttctcttgacaccaacgagacgaaaatgtcatgttcccacaacgacaacgaggctgttcttgaaacaagaccgcacgtgcgaaagaaaaccaaccttattcaactttcgcatgaaatgactctgtggtcgatggcaaagtctccccttatgtatggaggggatgttcggaagattgatcctagcacatatgatgttatcacaaatcctacccttttggagattaattctttcagctcaaataacatggaggcatgtgaaccatctatcttttttgggatggagggaataatgtttctcaaattaatgtcatatttcttttgctgcattggcagtttccttatatcacaagtgtgaatagtgaagatcgggatcttggtaagcaaatgagaagaagcagcaaagaaataaaaacaacctatactcattcattaggcctcacaagctgcactgagtcaaaggcaagtggtttggctagtggaagtcttaaccaatatcctgaaagactatgttggaaaaggagtttaggaaacaagcatcttgcccccttctgtgtgcacaagagagaactttacttcccattgtaatcttgctttatctttctctgttttattttcctaactttgatttgagtattaaatgttgttgacaacagaaattgtgactttgataccgatacagtgggtgaagtgggtatgtatcaagagtatcatcactatcatttagttgcaactaacagaataaaattttgctatgctatgcttctccaaaacac

SEQ ID NO: 104180 - DNA, 634 bp, Glycine max
  Clone ID: PAT_MRT3847_65090C.1
ccacgcgtccgtacggctgcgaaaagacgacagaagggggtccaaattccattttcttcgaagccatacacttttcactaaaacaaaattgattaatgttagggttttggaaagccaatttcagagcagactcgaaaccctagattccacaaatccatgccagcttgatctcgcagcttccgtcaatggcgatcatcggcgacgcgcttcgccaggcgttcatgccgaagcgcgagtacgagagcctcagagaagaagacaaggcgtggggcaagcttcagaggcccgtgacggtggcttccgttgccgtcatcgtgctcgcaatcgccgtgtccactgttatcagtttgaaaatcgtgtttccgagtagcgatggaagaagagcgttttgcgtcgatcgaaggcttcaatccatacagttaggtatgaaaggtggtcccgattcggatctgttccctggcgctttttatcttacggaccaggagattgctgattattactggatggttgtgtttattccctccatgatcgttttcgcgctctccgttgtgtatctcgttgctggtaaggaagtgaatttcattgctgagttgtttggctatgtttttctatctgattattgttaagaggtaga

SEQ ID NO: 104181 - DNA, 175 bp, Glycine max
  Clone ID: PAT_MRT3847_65091C.1
ggctgccttcaacggtgatgaatcatttccgtatttcggcttccttggagccgaagatgccctcatgttctcctgtatggaagctgcctatggcacaactaatactggtgtggtcgtggtttgcatgagtgtgatgagacctgagctggacgatgaagacctattgtccctcgtg

SEQ ID NO: 104182 - DNA, 1555 bp, Glycine max
  Clone ID: PAT_MRT3847_65092C.1
ccaggcgtccgccttcacgtttaggttcagcttacaatctgttaagtgacgattcaaaccctaatcccgcagttacaagtttctatcactgtcactgttctcaagtttctttaccatctttcaaattccattttcttcgaagtcatacacttttcactaaaataaaaatcaattaatcggagcagcatgttagggtttcgaaaagccaatttcagagcaggcttgaaaccctagattccacaaatccatgccagcttgatctcgcggtgcttccgtcaatggcgatcatcggcgatgcgcttcgccaggcgttcatgccgaagcgcgagtacgagagcctcagagaagaagacaaggcgtggggtaagcttcagagacccgtaacggtggcttccgtggccgtcatcgtgctcgcaatcgtcgtgtccactgttatcagtttgaaaatcgtgtttccgagtagcgatggaagaagagcgttctgcgtcgatcgaaggcttcaatccatacagttaggtatgaaaggtggtcccgattcggatctgttccctggcgctttttatcttacggaccaggagattgctgattattactggatggttgtgtttattccctccatgatcgttttcgcgctctccgttgtgtatctcgttgctggcatggctgttgcatattctgctccaaataggcatggatgcttgaaggtggttgaaaataattattgtgcttcaagacggggcggtgttcgctgtctatccatcttaaaccttatctttgccatcgtctttggtggtcttgccttgtttcttggttcaagcctcttgacaatgatgagcaactgctctaaacctctgttttggtgctatgaaattgcatgttggggactggttgtactatatggtggtactgccttcttcttgaggagaaaggcagccacaattcttgacgagggaaattttagtggtcgaaatctagggttggaaatgctggaagcgagccccctggaagtcacaccagaggtggaaaggcgtgttaatgaagggtttaaggcatggatgggtccatcccttctttcttctgatgaagaagatgaacctgacagctatgatgaggcacctcattcaacacatactaacttaaacaggcaaagactctgaactggataaattcagtgtgaagagcctcgcatcatcttttccagccttcatgccttaaaagaatgctgtatggtatggaaatcagttttggacaaaaatgttgacatgtatcatatgacaaaagcaaatgttgattaaagaaggatggatttgatgctcaactttgaactacgatttcatctggtctggtccaataggtacagtttgtgtagtttagcttgtgaataataattaaattgggaatgaccattgaccaagctttgcctttcctaaggtggatgggttgccgaaccgcacttgctggtcttctctctatgggcctgccttttcttaattgcttttttagtcgcaaattattgggtatgtgcacttttatttaaatttagtatttattatgt

SEQ ID NO: 104183 - DNA, 141 bp, Glycine max
  Clone ID: PAT_MRT3847_65093C.1
gaccaaacttccttgttttcataccaattataaaggactacacaagggcaattttaaacctttggaacattggttcattaaacaacaccttcttaacaatttcatttgtattaaattaaacaagattaaatatctcacact

SEQ ID NO: 104184 - DNA, 478 bp, Glycine max
  unsure (1)..(478): unsure at all n locations
  Clone ID: PAT_MRT3847_65094C.1
ctgaaacgggcaaaaaatggaaactttgccttccaaagtgtgcggatcgtgatgtttgagtcatacatttgcttttatgctccggcaatgcatcatcatcatcagccataattgatcctcagtttctccgaataatttcgacagacacatgttgattctcccttttcgattgttccaaggatccgggttttttttttgtgacttagctgctccattattattggatttttaggttccttgcatatcgaaagaatcaacctttcctgcacgtatatacgaatcccacgcgttcagtaaagggttctgcaatctcgcgccactaccaccaccggcctctctcctgcatctgctactgctactgctactgctactgcaaatgggctatctccaggaggagctccatcatcagctcccaggaatgctgcatcagcattgatcaccttntcagatgaactgttctgtgtctgaatcttgggac

SEQ ID NO: 104185 - DNA, 195 bp, Glycine max
  Clone ID: PAT_MRT3847_65095C.1
gtcactgtctcgtcgcaaactatggataccatcaatcacccgagaaagacttatgacatattcatatatataactggatggaaagggcaaacgggacaaccgagagacacagccaaacttacagtggctttcgacctgcatactttcttactagcataaagtaagcttttacaagggtcttggagagtactggga

SEQ ID NO: 104186 - DNA, 317 bp, Glycine max
  Clone ID: PAT_MRT3847_65096C.1
ggggggaaaaccgctactttttactttttctaggatccattttgaatagcaaataggtgatattccttctcaagaaaaacaaggggttcacaagggttacatttgttttcatacaacaaaaaactgttttgaaaccccaatcaaagctttcacctattgtccaaaaactggacaaacaaattgagtcaagtgccaacaaatattgggagggcagattaaacccaattacctttttatttcttttttacaaaactgttagtcccaacacaaaatttccttaaaaaggtttatcccaaaaaaagccccccttttttttt

SEQ ID NO: 104187 - DNA, 360 bp, Glycine max
  Clone ID: PAT_MRT3847_65097C.1
aatatataacaaccatatctgtagaggggtcaatagggcgaacaagagactacttcgacaatcacagattgtgtctaaaagcaagccttgtctagcgatccaacatggctaaagctttaatatcacaccacctaaaacagttaaagcaaagcattgtctagcaagcaagccatttacacactaccacctgagttgtaaaactgttaaaacaaattctcgtgctagcctactgctgtgataattccaatgccacaaactagtctactggaggcacatgagttctgaaggccaaagagagctcactccttggcgggtttgttgatcaaagacttgagaatgagatgaatgactccaccacca

SEQ ID NO: 104188 - DNA, 756 bp, Glycine max
  Clone ID: PAT_MRT3847_65098C.1
caatgagcttggctgattcatcatctagaaaacagggatttgtggttgtggaaacaaattttagagtttatgcttactcaacttctaaattacattgtgagatattgcggctattctcaagggtagagtatcaacttccaaatcttattgttggggctattacgaaagaaagcttatatagtgcttatgaaaatggcattacagcagagcagatagtcactttccttcagcaaaatgctcatcctcgtgttgcagagagggtaccatctgtgcctgaaaatgtcacagaacagattaggctgtgggaagcagatctaaacagagttgagatgacagacacatattattacgatgagttcccttccagagatgtgtttgaaggagcatgtgactgtgctagagaatggaatggtttgttgtgggaagattcaaagaagatgcatatggttgttaagaccgaggtacatccgtatgtacgagattatttacgccgtcaaaagtaacagcaaaggcaacaccatctcatgcatcctggtcctgccaacatgcaaatggaaaaccggggggaaaatgcattttgagctccttttagaattttttttaaaaaagaatgtatttgccttcaaggtaattagttttgacttcctttttttttttggtgttgggaggggatccttttattacttgaatgctgtgaaaccttttatatatatataattaaaaatttaaaagttaaaaaaaaaaaaaaaaaggacg

SEQ ID NO: 104189 - DNA, 241 bp, Glycine max
  Clone ID: PAT_MRT3847_65099C.1
taataacataacccctacaagagttacaaaaaacaaaaacataaaaacggcagtttaatatttgacccagttgttccacacaacatacgagataaagaccgttcttcaattaactgttgcaagaagtcaatttttcctatactcaaagccttcatctagaaccagtcatcagttttgttttttgtttcgtccaggacgaggtcttagaaatatcatcgtgcttttttacgaggtccacaca

SEQ ID NO: 104190 - DNA, 1508 bp, Glycine max
  unsure (1)..(1508): unsure at all n locations
  Clone ID: PAT_MRT3847_6509C.1
aattcggctcgagctcgagccgaatcggctcgagtacggctgcgaagacgacagaaggggaaaccaaactcttgagaaaacgctgattagtgattcttcctctgaatgattcagaatgaagaaccgttgttatggttagttgtgtgacctaacatggagaacgaggaagccaaagaacacaaacggatctgccaagggaaatagatgataatgtaggttatgaatatgcagaatcttaaagggcagagatataatttgaactgacccatcatacctttttcatgcggacaccctttaaactcatctccagttggttttccagattttgtagttctttaatacccaaacccgtaagttcttcccccattaattgcctgcttttgcctgcagaaaaaaaactgaaatcccgggtcgacccacgcgtccggttttaccctactgatgacagtgtcgcaatagtaattttacctagtacgagaggaaccgttgattcgcacaattggtcatcgcgcttggttgaaaagccagtggcgcgaagctaccgtgcgttggattatgactgaacgcctctaagtcagaatccgggctagaagcgacgcgtgcgcccgccgtccgtttgccgaccagcagtagggggcctcggccccccaaaggcacgtgccgttggtgaccctcgtgaggcggattagccctacgagacgccttgaagcgcaattcccatcgagcggcgggtagcacgggtttccaaaaccctaatttatcgaaaggtagggttttgcagagcctcctcctccgttaccagtttcttcttctttatcctctctcctttcttcttccattcctctaacctaagatgggcaagtcaagcaagaaatcagctatcaaggttgacgctgctccagctgtggttccgccatccaagtctgccaagaagggaggcaagcgacaagctcaagatgaaattgagaagcaagtgagtgccaaaaaacagaagatagaggaggttgctcagaagcaaaagaaggaggccaaggtgcaaaagaaggaggccaaggtgcaaaagaagaaggaaagtagttcagatgattcttcggaatctgaagaggagaaacctgcacccaaacctgtactttcaaaaaaggtacctgctaagaatggtgctgccctgccaaagaaagacaagccagtctccagttcttctgaagatgactcctctgacgaggatgaagtgaatgcaaagaagccacacaaagtggttgctgagaaacaaaagaatggagcaaccgtgtaaaagaagcatatcgtataccactctaagaaggaaagtagttcagatgattcttcttcagactctgaagatgagaaacctgtagcanaagctgccgtaccttcaaaaaagacacctgctaaaagcagcaatataagtacccccaccaagaaagcaagccagctagcagctccagttcttctgattcatctgaagatgactcttctgatgaggatgaact

SEQ ID NO: 104191 - DNA, 438 bp, Glycine max
  Clone ID: PAT_MRT3847_650C.1
gtcaaaaacaatggaagtcatattgaattaaccatactatattgaacaaaatcatgatccttcaagggaaagttttcaaatgctgaccgaaagagattatgttttggtgatgaccttccaaatctgcatgcacctgcgttgagtatggctgggctacatttatatgaaggctgaacaggccccgacataagaggtacatggggaaccgtccgcttgaatccttgatcatgcaaaacggtatagatcattgaggggaggcacagacgttttattagctttatgaaccgattgagcatgaggctgtggaacagggcagttgactaccacgggtaaatgttatgagtttcccgccggtgaggaacacataagcgaacagttgaccatttaaccggagcgtggaacgattggttccgtagaagacccagtgttctggggttt

SEQ ID NO: 104192 - DNA, 171 bp, Glycine max
  Clone ID: PAT_MRT3847_65100C.1
cgcacagtgactctgacggctaagattgagtcatatctgaagccgtagaatgcgtttacctcacccggcggagaacggaaaccccaataagcctaataagtctaatatgtcgtccacttcccccaaaggtggaggctgtattaaggttagggcttcactcatattgataaa

SEQ ID NO: 104193 - DNA, 439 bp, Glycine max
  Clone ID: PAT_MRT3847_65101C.1
ggctcgagctcgagccgattcggctcgagggcataacctaaacttacccttcttctctctgggtgcgtgcgcattatacgcatccataagcagctatggccactgtaagaactgtgatgacgttctcctcatgagttcatcaaagcttactcttatgacctgaagcgatctgacgagatggagctgtgagagtggactgatattgagaaaactgggcgagttatggagttggctccttatgatcctgactggtactatctaagagatgcttgcatggcaggaaagatctactcgagaggatgacttggtgtctgagcctattagaggattgatggtggaagcaagatgaatggctgtcgccctgctgatttctgcaagagcagcggtgctgatgatagtcacagtcttaatcattgcagaacatgagcatgattgaact

SEQ ID NO: 104194 - DNA, 368 bp, Glycine max
  Clone ID: PAT_MRT3847_65102C.1
ctcgagccgcaaaacctagtgacacttcttgtgtgccagagttcgtgtactgaaccccaccctccgagtcccagaatggtcatgaagaaaggggactggggtctcgatctcaaactctcaattcctgtgtctgatcaatctaatcttgccaagttcctgactgtaagtgcgacttttcaggatggggatctgatggtcaacatggatacagttcgtattgcctctcagaatgatgtcatagctccagctgcattcacgcctacaaacaaccaagttgctttagcagacacagatgcaatcaaagtcgttggctaaggactaagagggggtgtacaactggtacaccaccattggactagacatttttt

SEQ ID NO: 104195 - DNA, 538 bp, Glycine max
  Clone ID: PAT_MRT3847_65103C.1
gtcgtcggccgcccttttttttttttttttgaattattgacatcctttactttctatattgagctttaagccattattgaatgtttgaatgagaacattcataacaactaattactctgttattgaataagagaagcattacaacacttacaaataaaaattacaatagcaagattaaggaaatggttatagagctactatacatcatgcatgcaattgactacagcttatcaattgttgtcacttaacacagattgttttttattaataatgccagcaaccttctctggatatgcactccatggcatccatcttgtattatgttgctctgctttcccatgcatttagagtgccataggtactatcaaaagatctcaagtcactgctacaaaccaaaactcacaaatatgaaagaaaccttccctttaaagggtttcccattcacaaagagcctgttcttactatacaaatggcagcttattccctttgctttgatcctacccccatttatctggaataaacctttccaactaactac

SEQ ID NO: 104196 - DNA, 513 bp, Glycine max
  Clone ID: PAT_MRT3847_65104C.1
tttgtttctatacgttgctggttttctggcaaattcaaagattctaggttgattgcttttgttgtttaaaaaagaaggagaataataaagaacatcaaaaactcttcataataacagagaagattgcttttacccttgccctttggaccttctcggacaccccacattagccaactatcactctcaaaacaaatggacggaatcagagtttgaactctctagaatgcaaccacaatggaggacgctccctcgcctcgagaaaaaaacgtgtacatggcaaatatcgcccaacaggccgagcgctacgaaaagaaggtggagctcatgaaaaaggtatcttctttcttttaacacccaccaccctaccggggaggaaagaaaccgcctctccgtagcctacaagaacgaaatggaagagcgccgcgcctcaggggaaatcttctcctctatctaacagaaggaggagagccacgctaagtaggatcacgacgccgtcatccgtgagtaccgata

SEQ ID NO: 104197 - DNA, 220 bp, Glycine max
  Clone ID: PAT_MRT3847_65105C.1
caaaaaacacagtaaatagtaaatataaataccaacgctggcgtgatggtagtttagggcggatgtactgctactctcgaggattggggtctcgagtctcgtatcactcttcagttctcgttgttatgcttcgcttgctgggactagggttttcagtttcgattcattcggtaataattagagatgtttgggagggcaccgaagaagagcgataatacga

SEQ ID NO: 104198 - DNA, 314 bp, Glycine max
  Clone ID: PAT_MRT3847_65106C.1
acgcctacgcgtccgcccacacgtacgacttaatcaaatcagggtgtaaatcaacttgcgtggaagagaaaaaagaaacagacgaacgagaagaaagaaaacagaacagacaaaacgagacgagaacaagctatacattatatgaatgaatctgatcactggaaggctgaaaacagacgacaggctgtagagtgcttgccatggatctggagctggcctagaacgaaaacactgatctgcgcaaaaagaagctcatggccgacaaggatcgaagtggaatgcagatgcgcatagaggaggggggagacatgtac

SEQ ID NO: 104199 - DNA, 677 bp, Glycine max
  unsure (1)..(677): unsure at all n locations
  Clone ID: PAT_MRT3847_65107C.1
cggaattcccgggtcgacccacgcgtccggaatagtacaaaacacacgacgtcctcaattattctcaaatatttttaactcgtcgccctttacaggtcttagcattaactcgtcgcccttaaagggtcttagcattaactcgtcgccctaaaagggacttagcattaactcgtcacccttgaagggacttcgtattaactcgtcgcccttaaagggtcttatagtcgtgtgattgtacaatctacagtttacaactcaatgcacataacatctcaatcacatgcatactcaatttatcacacacagtcgatttcaatcacaatattataatctcaaaataacatattatcatacctcatgaatcatattcactttacttatgaactatgcaatactcacaactactcaattattttcaaaatcattttaactcatcgcgcttgtgattaaactcgtcgggttcccacaatggatctcatcacaatactcgtcgcgcanaacttgtcacccttaaagggtcttacagttgtgtaattgtacaattcatagctcacaacacaatacacatctcaatatacatgtattccatcattcatcacatgttcaattcaccacatatactcacaatttggatcatcatttcatatcctcaatagtatagtttatacaaaagacta

SEQ ID NO: 104200 - DNA, 384 bp, Glycine max
  Clone ID: PAT_MRT3847_65108C.1
ccacgcgtccgctcattatatcgttattgtatcttttaagagaattttatgtatgtaactagttgttaagtttacatcattgtccttttctcaatacctacattgttgtaccaccaaatactttggacccccttgaatacttggatttgctcctcataagctgtgggttctaatctctagcagcaccattccaacaagctcttcaggctgatgttcattccatccaccctgccaatacctttttaaaaatgtttatctctgagatgctttcagctcagtaagcggctttagcttgtggggatagtttttgaatatctagaaatattttctttaagagtctagtactaatataaaattttattaatatatttatctttgctgatc

SEQ ID NO: 104201 - DNA, 1572 bp, Glycine max
  unsure (1)..(1572): unsure at all n locations
  Clone ID: PAT_MRT3847_65109C.1
ctttccggaattcccgcgtcgacccacacgtccgagagagactctaaaacctttcgttcttttttccctttatttttcccgttttgccattttgcttttctccttccttcatggctgcttggcttattcttcttctcctttgcatggcaatgattcaatccacgtttgcgtcttcttcttcctcttcgtgccttcccgagctgccttcatttcgctacaatcttcaatcacaatgcccaatctcgatcccatcgaatccacctcttcaggtggatggaaattttgttgaaggaattttctctgacataaagaggacagagtatacgtctatactcttttatgcatcttggtgcccattctctcgtaaaatgcttcctcaatttgaaattctaagttccacgtttctccaagtagaacatttggttcttgagaaatcatcagttttgccaagcttcttttcaaaatatggaattcacagcttgcctgcaatattactagtgaaccagacatcaaagttgagatatcacggtccaaacaatcttctctccctttttgaattttacgaaagaaagacagggtttgcaccaagtagtaatatagttattagtccatcaaccagcacgatgagtgatgagaattcaactacaaacctattcagtttgtctatgaaagaaacatggagtagggaaccctacttgctactctctgtattgtttctctgtttgaggttacttctttttgttctccccaagattaaatcacatctccgagcattttggatttcctgcattcctcatctgaacttgcaaatttttggtgagacctgccaaatgatggggcgcgtgcttcaggtgatcgatgtcaggagggtttggttcaagctaagactgtgcaagaccaggacttttcacgaaaaggcaaggagtgcccgcgtttgggcttcatctataacttctgtttcccttggtgagtcatcatcagctagatcatccacccaaagtttgaactaacaaccttattatgatgtcattttgagggtagttaagagtttatttttattagataatattatatcctcaagctttcagtgaagcttggcaacacatagtcttcttctctcttgcttattttgttgtagtattaaaagccaaatgttgatttatgttttaagccgggtttgggaggaagcgaacaagcatataaatttgagaattgttcctttcttgtaaattagtttttttctgaatgaaatcatccccacattgtgatataagcacgaagcatccttctcaacaacctttccccaacacccacattagccccacttaaaacattttgcagctcaagtgctcaaccaacttccattattttcaaagtctggaagaaagaataaatcaattcaggtattatctatcatccacttaacaaagtgtggctgacggtgactaaatagcattatagatttatcttgtatttattactaacacactttctaatactctattttgnncatattctctattcttgattggtatctatcggatatcacaaaacgttgtggatcacatatta

SEQ ID NO: 104202 - DNA, 397 bp, Glycine max
  Clone ID: PAT_MRT3847_6510C.1
agccttgcaattcttaaaagaaaacgattcatatcaccacaacccacgtgcgcttataatgtttcttctggagtctttttactgaacgggaaattcacaccacccagcatttgtcaagacgcaccccatatcaggcccacgcaccaccataggtttgacacactggttaatcggtcaggggataatgccataaaaatcaataatggtctcttatcacttaggaggggtgccacggcctaagctcccagttaggaaaaactataccttaacggtcggtggggaggaagaactggaatcactacctagactttttggggaggtctatagcttgggactaccggaggacgacgttctccttaacaacaaacctaatggtgatcattgaccagccacatct

SEQ ID NO: 104203 - DNA, 278 bp, Glycine max
  Clone ID: PAT_MRT3847_65110C.1
ttttttgatttttttcttttgtttttttttttttttttggggttttttttattgtgttaggccggaaatttccatccatcccaggggggccaaaaaacgtaaacaagcccccaaaaaaacaaaaacaccaaaccaaacagtaacaagtgacgcagacaattccaaccccaaaagaaaactccttctgttgcaaaagagaacgccttgttaaacaaaaaaggctcaaaaaaaacacgctgaccggaaaatagatttggaagccggtggaaatacaccat

SEQ ID NO: 104204 - DNA, 183 bp, Glycine max
  Clone ID: PAT_MRT3847_65111C.1
tttctccgcgtcgcagaaaaagaaaaaagcggtcagagttttactttggccttatccactttagcctttccgttctctaccctatctttcacgtatctaatccttaatttaaccaacatttctttcccttctcgttcaacttaccctttattcttatttcgtctagttttaattcttaatttt

SEQ ID NO: 104205 - DNA, 1318 bp, Glycine max
  unsure (1)..(1318): unsure at all n locations
  Clone ID: PAT_MRT3847_65112C.1
cttgccatgctgaaccactcgtccgttctatttgattcacaccttcgcactctctctatcaccaatcccttatatcccccctccacttagctgaacataattcaccacttcaccatcaatttcccctccaatttcccatttatgatccatttggcatttcatcatatttcaccacttgtcctactccacttggatgatttcctaacgtattgttttcacaaatccttgttcttcatcagctaatagtttgagtccaacgaattcagcaacactatagatatatgctatatcttcctttccctatacattttccttccaaagtatctctagttctctacaaatcaacgtggcacattttttagcctaagaaaagctttagctgcaactcaaattcaaagtgtaagcctttcttgtttttattagtttatcttcaccaatggaagagaactttaagtgtgaacaagttggtctcattgatgagctaatgcaagggaaggagctagcaaagcagctctgtgaccatcttctagtctcatcatcatcatcatcatcttctcatgaaacaaatgaagtcctaattgagaaaatactttccacctatgagaaagcacttgccatgctgaattgcaaggctgatgtaggagaaagtaaggccaagaatggcagcatgatggattcccattgtcctctcacaaatggtagccccaaaagtgaggtcttggagcctgaggttaagaacaaaaatgtctttaagaaaggctcgagccatgtcaacgtgcacagaacaagtgaaggtgtgcttgggaacggcgcatgaaggatctctggatgatggctatagttggagaaaatatggacagaaggatattctcggagctaagtttccaaggtaaaaatttgggtttttttgcctcaaatatgcataattgaagtttttttaccataagggaaaatttgcataatttggtatttgaatatgactgaaattaaagaaaggttcatctatatagcctttttgataaactattactggagttactgccaaaggccataggtaggcacccctcaaacaaaaataacaaaaaatcattggccaatggagtctaaagagggaaataaataataataacaaattttggcacgcctagctcatgttccctcgttgtaacttttatcacttttcagccaatggagtgagtgaggacaaaagtgctttttataaaaagacaagtaaaacttatctaaaggacaacgttagctagattgaattcactacaattgcagctttttataaatgcacangtgtcattaattctga

SEQ ID NO: 104206 - DNA, 902 bp, Glycine max
  Clone ID: PAT_MRT3847_65113C.1
tttataagggaaaaaaaaaaaatagattcatgaataaaataaaatatacagcatgcggtaagtattttggggaaaaaaataatatacttttaatatcgaatcaataaaacatgttctctgtgaaccccaaacccttctccgccgtagccgtagccatgtcagggtcacactcacagcaagcccaaccaaaatccccaatccccacagagaattacccagtcccactgtcccctcctctccccccaatctcgaaacaactggaactgagcagggccatgagcgccgcttcaaactccagcctcttctccctctcccccgccgatatcctctaccacgacgaccacctcatcgcagtcaacaagcaccccggaatctactgcgagaccctcctctcctccctcgcctcccaatcccaccagctccacctcgctaatcgactcgaccgcgacaccaccggcgtattgctcctaacaaagtcccacaaggtcgccgccaagctcgtcaaggccttcaccgatcacaaggttaagaaaacttacattgccctctgcactggtcctcctccaaattgggaacgggtcaccctcagatccggtcacggtaggtccaagttcggcgcctggcgagtctacgctgcctccgacgtcgggcgtgcgctaccgggcggctcggttgtccgctccatggagacttccttcgagttgttatcggtaaacagaaaggggaacttcagggaagtctctgattcagaattcgggaacgttgagggtgaaaatgtcttagtggttgaagaaaaggcggtgaaagaggatggtaacaacgagagcgagatagtggtgagagcgtatcctcggagtggaagaacgcatcagattcggttgcactgtcaatacctagggatt

SEQ ID NO: 104207 - DNA, 409 bp, Glycine max
  Clone ID: PAT_MRT3847_65114C.1
aaaaccccatttaacaaaaaaacaataacaaattgggaacccaaaaaaaaaacaacggttgggggggggggggggaaaaaaacccctaaataaagcaaaatttttacccaaaaaaacccaaattttggggggattttactaaattggaagccggccgccaaaaaaacaaaaaaaaaagggggggggggggccaaaacccacaacatattcaaaagggggcttaagttcctggaaattaacccggggggaattgggggggaaaaaaatttattttttttaaaaaaaaactatggaacattgggggtgacagaaaggaaggccccaacaacttcaacttgggatttggggagttctattcccccccaccggggggtacccaacaaccatttttagggcaattttggaccta

SEQ ID NO: 104208 - DNA, 217 bp, Glycine max
  Clone ID: PAT_MRT3847_65115C.1
tatcaatatcaataatcttgtgcgtgtgtaacaaaaaccatagctgtacgggatttatccatcccacaaaatctgaattctggctgttagagtaacaggcgctccacttctattgatctcccttacccgtgaattaattactcacctatactatcgcacataccaatttttcctattctgagtcatataatagcttggcctattatgctcataaact

SEQ ID NO: 104209 - DNA, 447 bp, Glycine max
  Clone ID: PAT_MRT3847_65116C.1
tcgcccacgcgttcgtacgggtgcgagaagaaacagaaggggatgtgttctaacaattgtcctgtgtcgtatcatcaaaacgacagatttggggggggggcgccttttggcatttggacattacacctcctaaaaacgacaactcgttttcacgggttggtattttaacacgcgaaacgcaaggacctgggcgaatggcgaaattggcatttccaccaaaaaggacccccacccttttttaagtttgaacctaccttttttttttcttgttcaacattgctctctgcattaaggtccccggatcggaatcgccaaaccggccttgaaccggttgaacaacaccggcttggggtcgccctttttgcccttcgaaacttttggagaatccaaaccgggttccggtgtttacccggcctttgttgcaccaacgtcggcttcccccgggga

SEQ ID NO: 104210 - DNA, 783 bp, Glycine max
  Clone ID: PAT_MRT3847_65117C.1
ggtgggaattctttccatttaacaaaaaaaataattaacattggtcgataaaaaaattataaaccttaagcataatgggtgagtgtcgagagtgattttcccaaatcgcaagacgctactgttgactacagaagagattaacattttcaagctgggaaagtattttgagcatgatgcccttctgtttctcacagtgggattatgatgagaacgtccctttctgtaacactctttactttgacctcgggaagaatttcatttggtccaccaaccagagtaataatcattggatgagttcacttcgcaagagctggtggcaccttcattgctagaaacgttggattgaacttcttgctctagctccctcacacgttgctgaagttgtttcacatagctactagcattggccaggattgaagtcttgtccgtcttggtgaagccaggtatggtggctgaaagtgcaaggaacctctctgcgagttctcgctttctcttctttcttggcggtctcgcccattccagaaaatgaacctccctcttcatcttcactaccaaattcatcgttgacctcatccagataagaattatcggaaggccaattttcccctgactcctccattatgagacggtttatttggagtataatatatttgtgcaaattaaacaagtgtgaggaagaagaatggatatatatggataagaggtggggttacatggaaagcaacaaagataatagaggaaattgaaactcgatcgatccagtgctcaggagcggacgcgtgg

SEQ ID NO: 104211 - DNA, 422 bp, Glycine max
  Clone ID: PAT_MRT3847_65118C.1
agttcctgcggataacccatcatagggtctaccatccaacaactcgcacccctgagcaacccaaccgagcctcacagggcttcccaaaatgggtgggcaaaactcaaccccttttcatcttgatggcctgaagccccagtatttgccacccaatgatcgctagactgtgggggtttattgtcaagggactgctatcttgcttagtatcaatcccaatctctggcatccattatcccttgaaatgaccgagccttcggcaggagtcttcgaggataacccggacctcacattgaggctgggacaggggctcctgtcgggcggcctacttgaactgagctcctaacaatgagcctgcttactggcaccgggtacagctcgcattgagaacggaccggccccttttttgaccgacaagtcccctt

SEQ ID NO: 104212 - DNA, 258 bp, Glycine max
  Clone ID: PAT_MRT3847_65119C.1
cttaacttaaattttgagaaagaagtaatgagtttttaagtgccaacctcccactcgattaacgtggcgcttcatctctgaattcacaaagctctaacaacggctacactgaagacgatctctgcagcactgaacctggtcgattccaagaaagagaatctcaagaaagccttcgacgatctccaatccctttctctcccctccctctctcatggtccgacctcgattcccacttcaccaccgtccaccactccctca

SEQ ID NO: 104213 - DNA, 481 bp, Glycine max
  Clone ID: PAT_MRT3847_6511C.1
ggattggctagtagagccgccacttcaagttaacacttgttcggtatttgtctcaattgtttagttatttttcttgatcattaaatgttgcaacataatgatgcagtagagatataagagaagtccttgaataaatataaatcataattcttctggaataattttatattggcttttggttttattttgttgtattactatcacactatgctatggaatgggagccccgcccatcaattttcatacaataaaggttaatggaatatagagagagagaaaaacgtatttagatactgtagcactttgctgactgcagggaaagcatgtgtataaatagttgtttttctacagttttattacttacaggtaatggcatttggttttaatttgtagtatcacaatgcttctatttattatgttacatatgaaaaatatgtagagtatcttccaaatggagtgtttttctaatgttttatcctaa

SEQ ID NO: 104214 - DNA, 366 bp, Glycine max
  unsure (1)..(366): unsure at all n locations
  Clone ID: PAT_MRT3847_65120C.1
cccacgcgtccgaaataattggtcctctttttttgtggaactcaattctattaggtgggtggaaagagaaaaaaaaacatggttgaatcgtagtataggtggatatatttttagaagagtattgatgtaaattcctttgctagaaattttaacaagtgttcttcttttgcncaaaaacaaagaaagttagacaatagaagaaatgtttcattataaaggtagaggcaaaagttatagtcaaaagcacctgaaagagtcataacatagggattatagtaaaaataacaaaaggggggcccgttttaaaggatcacaatttacttccgcgggcttgcaaagtaaaagtttttttttggggccccctaa

SEQ ID NO: 104215 - DNA, 315 bp, Glycine max
  Clone ID: PAT_MRT3847_65121C.1
ttacgggtgtgagaacacgtcagaggggacctcttaaattataaacgatggagtgagccattgagctatatcataaataagtccacttgaaaatgtccagaaaaacgaagtttcagaagtttttttttgatacatgtcaaagtgatggaaaagaaagaatatctgatatgtatccaccaaatgtatcagctcttgatataatgcacgaaaccaaatcttatgtatgaacaaaagataaaattttctatgaggaataggctcattattggagctatactaatgcagaaaaaggaaaccaattggacagtgaaattt

SEQ ID NO: 104216 - DNA, 136 bp, Glycine max
  Clone ID: PAT_MRT3847_65122C.1
cggcggagaccttggcgccaataacggaaccctagctatttttgccggaggggaagaaccgacagggaagcttctggataccgcgctttctcatttggggaaagtgaattacatgggagggagtgggaaggggcaa

SEQ ID NO: 104217 - DNA, 1511 bp, Glycine max
  Clone ID: PAT_MRT3847_65123C.1
gtccggttctaccacgcgtccgcttttggttcatattttaggattacagcgccattggaaggatcttctccgtatgtagatcctccttctttgcctccatttaatgctgatgaatttcttgcaattttatcagccagaggtccaaggaagttcattttgaagcaaatgaaatctaactggctcgacttctacaggcggttcctgaatggacccaacttcatgccttggtttcagaggaggcgtgctgtagctgaacagaaacaagatagattgtggaggcacgcaagaatgaaaactgatatacagaaacttatatctaaaatggccgagttggaagttgtggattcttttagtgttatagagagacttctacttggggaattactgctgcagcaacctggaaatggaggtattgattccacggtaacttgtcacaaacaaatgtaagatcttcaggcagtaaccagcgcacttacaaaagatatgcagcagctcatgttttcaaatccacaaagagcatccctcctgcaagatcgcccagatttgacaaaacttccagcactcgcacttgttcaagccaggggtgcatcttctacatcactcccttgaatggtaaaagcatgaaacacgctcacttcttctagccgggaaggcgacttctacttcacccacgagacctgtatcatttggataataggtggtcttcctatgaacgtgtttgccaagctttctttaagtaaacatttcattttgattttgagagtttggcacctcattccagccgcgcgatcagcggtcctgtggtttctgcggcctgttggttctatccgctttgtgctcctggccgcacagtacttgcctctgcacattctgacgcgggaaattgttatatgcgtaatacataggattgttttagctgtaaatcacacatacacagtgcttttatatctgtcaaatgcaattatcagctgcagcaacctggaaatggaggtattgattccacggtaacttgtcagaaactaatgggagatcttcaggcagtcttcagcgcacttacaaaagatatgcagcaactcatgctttcaaatccacaaagagcatcccttctgcgaggtagcccagaattgacaaaacttccagcactcgcacttgttcaagccgggggtgcatcttctacatcactcacttgaatggtaaaagcatgaaacaggtggtcttcttatggttccaaaaggcactcttccttaagtcaccacatctgtctgattgagagaatttctgcgacttttgacaagttatggggtaagacttatttttgcagacattctattttcctttggatgtcatgcaattcatttcaatagaatgtgtttgctgtttttttttgtatttttcttcgaataaacagctgtgttagctgcaatttgatttatcaatacactttgagaagcagacatgagagaacttgcctcttgacaaacatatatggaaaattgatttatttgaacctt

SEQ ID NO: 104218 - DNA, 1786 bp, Glycine max
  Clone ID: PAT_MRT3847_65124C.1
ggaatctttgaggaatcatatttggcagcttcaactccaaagatgctaaacatctggagcaaatggttcaataaagtatgagatgaggattctaaatgtcgactgccgtgattaacttcattttatcatatttggcttggaaacgattgtgaatatatatatgcccacagtgtaagtatgagtaaacttgacaacagattgatgagcaaaagtagtgttgatgacagattccagttcgcgtgtcatttgggtcaaggaaatgggatcttgctaatgccagaagtagagagctgctataatcgtggctactgtattgcgtggttctaaatttttggtatatgtctatagttgcataaattcaatcactttatttccactgcagagagtggtgttcatcaagtgtcagaaaaaggagtcttgcaggttttgttaaatttcaaatttgctactgatgttctctctggtggtgattcaaacatggttggggaattatctagtaacccaaaagcaaagctacctggcagaaggaagcaggaccaaagtttgacaacctcagccattagagaacgttcaaatcaattgttaaatcgtctttctcagaaactggatcccatagactggcttacgtatgagccatatctctgggagaatgagagacagtcttacctacgacatgctgttctctttggtttctttgtacaactcaaccgtatgtacacagatactgttcagaaactgcctactaattcagaatctaatattctgaggtgttctacagttccccggtttaaatacctccccatcagtgctccagcattgtcctctagagggacaaagaaggcctttactccatcatcaagtgaaatctcttcaagaagttcgtggaattcaattacaaatggagaactttctcaaaagataaatttggatgacagttcaagtctgggggtggcggcaccattactgaagtcttttatgcaggttggaagcaggttcggggagagtacttttaaactgggatccatactaactgatggtcaagttggcatttttaaggatagatctgctgctgccatgtcctcatttggagatattctacctgctcatgcagctggtcttctttcatcttttacagctcccagatcagattcataatggcccaatgatcgaaaggcatcccagttgctcttttcaaagtcttgttaccataaagtgtaatatctcatgaaaccttctcagccccccacaccttttattcatggcaccactcacatagagcaacattagaatcatatttggcagcttcaactccaaagatcctaaacatctggagcaaatggatcaataaagtatgagatgaggattctaaatgtcggctgctgtgattaatttcattttatcatatatggcttggaaacggttgtgaatataaatatgcccaaattgtaagtttgagtaaacttggcaacagattgatgagcaaaaatagggttgatggcagattcaagttcgcgtgtcatttgggtcaaggaaataggatcttgctaatgtcagttgagagctgctataattcgtggctactgtattgcgtggttctaaatttttggtgtatgtctatagttgcctaaattcaatcaaattatcttgttagattttttttttaatgttctgattacaatgtaacactgtattttaagatacttattcaatgaattgaattcacataaaaaaaaaaaaatttataataaaaaaaaaaaaaaaaaggcggccaacgactagtgagctc

SEQ ID NO: 104219 - DNA, 329 bp, Glycine max
  unsure (1)..(329): unsure at all n locations
  Clone ID: PAT_MRT3847_65125C.1
nntttacntcgcangcacgcgtacgtaagctcgggctccggctcgaggcggaatctagtgtggccttgatcccgctgaagatgcttcaaagctttattaagaaggtctgggtccccatgaaaccctactatacccaggtttaccaggaaatttgggtaggagtggggttgatgtccctcatcgtttataaaatcaggagtgctgataaaagaagtaaagctctgaaaggctgcagtcctgcgcatgcccatggccatcactaactgctcccccagtccactcaggatgaatacgtcagctgaacttaagcaagctgtgtagatgggaac

SEQ ID NO: 104220 - DNA, 361 bp, Glycine max
  Clone ID: PAT_MRT3847_65126C.1
cacgaggggccgtatggcctctgaggcaccagcccgtcctgagaccggtgtgtttgatcctggtacgctggagctttatgctccaactaaactgacagctcagatcaagcgctcggatactcaccacaaatgctttagatacacaaactgcagggacagtgtgggacccaatgttcagaatgagtgatgaaccatgacccataatgcgactgtattcactcaatctgagccgatgcaccatggcagaactgtactaagtgcacatcacagatgataatcctctgccaccatgacaaaatcgtgaagcggtctacacttactctgtagtgacacaatactgatatggcagtttaactggcta

SEQ ID NO: 104221 - DNA, 753 bp, Glycine max
  Clone ID: PAT_MRT3847_65127C.1
tattaattaaaagaaaaatatttgttcgtttgttctgattggttctgcagattggccataatgtagtaattgggaagaattgtttgctttgtggacaagttgggattgcaggttcagcaacgtatatcatcattcatttttctcctgcatagtgaattttggttttcacatttctggttcaattcatttgtatttgaactaaatttctagacgaggcttttgaatttctactgagttacatctttggtactctggtgtgttcagcataggagattatgtgactatgggaggaagggtagcaatacgagatcatgtatccatcatatcaaaggttcggcttgctgcagcaagttgtgtaaccaaggacatcaaagaacctggggactatggtggctttccagctatgcccctgcaccaatggcggagacaagttgccagtagatgccaggctctggtaagaagggatccttgaagtcagcaaaatatattttgatatgtagttagtagagtctgaatactcgtctcacgaagaactcttggtgcagtaatttctgatagattgttgtcggtagagaactgtaagcggttaacaccgaaaacttaaatactgaaatcaataggtagtgagcacaagtactgaaaaaaaaaaaaaaaaaaaaaaaaaaaaaaaaaaaaaaaaaaaaaaaaaaaaaaaaaaaaaaaaaaaaaaaaaaaaaaaaaaaaaagggggaaaaaaaaaaaaaaaaaaaaaaa

SEQ ID NO: 104222 - DNA, 806 bp, Glycine max
  unsure (1)..(806): unsure at all n locations
  Clone ID: PAT_MRT3847_65128C.1
ggaaattatggtgtcatatttttttaagagttttaaaacgttataatactagaatagttcactttttagcaatatcaacgtctaactcaattgattaaactaaacattatttcaaactcttgttacctttgtttaattcctatatataaataaaaattatatagattatttactcttttgtttatcttcaacttttatttatttgtcataaatggagacatttgctcttgtgtaaattaaaaagtttcttagtacaatttgtcttttttttttttgaggatgggtggtgttatgaaaaggtgagatgttcattaaatggacgtgcacaacgtattccttcacgatgagttgcaagaagtgttcatgaaattgcgtctcagtttccatgttttctaattaaccatgtatggtttacaagttgagtaagccattatacagattaaaacaacctccctattattttttgttcacattgcatcattctaatttaaagggacttctgtttcaacttagtatttcctatcattcctagaaatatcaagacgcactggaccgggtatactttattcctgggaaatgtgggtaactagtgttttttttcgaaaaaaanaatactttttgtcctgtgtgccacacaaaaataaatgatatttattaaagaataagattaattgttattttataatattaattaatatatacaccaaatcaccatcatcattgttattttataataaaaaatatttacacgccaacccttctgtcgtcttctcgcagccgtacgnacgcgtgggcggacgcgtggg

SEQ ID NO: 104223 - DNA, 338 bp, Glycine max
  Clone ID: PAT_MRT3847_65129C.1
ggcttggaacctttgggctgatttatgtgcttgtttatgtgcctgtttatgtgcttgtgggtcttgatgctattacttctaatgcgtgcgacgaattttatttgtattggttctacttcgatgtcgtaggaaacgggtgttgatactgaagctactaatttgtgttccgttggtggtgaagatgcggtggattcgtgtgcctgtcttcctatgtcgaaaggtgctatggcgttggaagattgtgtgttcctgacgactgatgaacacttgacctctgtcgctagttgttgtcctgtggaaggggtgattgcgacgaatggctcggaagaatcttgtgc

SEQ ID NO: 104224 - DNA, 243 bp, Glycine max
  Clone ID: PAT_MRT3847_6512C.1
acaggtgtgcgaacaggtgcgagaggacagcagatggttgttgtatattttggctgaagatgctttatactcatggtttctgtgtgtggacgatgtttatgtatcttgacactatatattggcactctacgtttgagtgatattaattgtacagtcaagtatttattatgtatgtttgaatacggcgtatacactggtatacatgtggcgttcaccgaattatgggtcttgagctatatacat

SEQ ID NO: 104225 - DNA, 257 bp, Glycine max
  Clone ID: PAT_MRT3847_65130C.1
tacggctgcgagaagacgacagaagggggtggtggtggtcgcggtggtggagggggatacgaccgtagcggtggcggtggaggctatggcggctgcggatgatatggcggtggcggtggcggtggctatggctgttgcagagaccgtggttattgtggtggtggtgaccgaagttacttctttggtgacgactgtggtgatttgaggcttgtgaaactatggcttggtgtcattgatttgggttttatgattatact

SEQ ID NO: 104226 - DNA, 613 bp, Glycine max
  Clone ID: PAT_MRT3847_65131C.1
attccaagtttctaattttgctcatggcatggctaccaactgctgtaactttcgttttcttaccagttatcaggcaccacaggggagttcaacagccaaatgattccaaggctttctataatttcctctacaccactcttgtccttgcagggttcctcatggtggtgatcatattgcaaaaaagtttcacctttacaaagagtgagtattatatcactactagtcttatgcttctcttgctcatcctgccacttgctgttgttatggttgaagaaaaaaagatatggaagaggaaacaagaacatatcaacagtgaaaaccctcttaaggctttgaatataaccacagagatgccaaatctggagaagtctacacaggctccacaaaagcaagcttcctgttggaaaagcatgttcaggccaccaagtagaggtgatgattacatatacttcaagcccttttcagccttgacatggtgattcttttcttagccacaatttgtggacttggtggtaccctcactgtgtcaaataacttaagccagattggcacatctttagggtattcggcacatagtataaccacatttgtgtcccttatgccatttggatct

SEQ ID NO: 104227 - DNA, 310 bp, Glycine max
  Clone ID: PAT_MRT3847_65132C.1
gggccattcttaacacaaaattggatgaactttccatataaaataaacattccacctgttttccggggggtgcgtgtatcattggcgcaccacagaacctgacctatccacgatatacagataccttgccaacaacacctaagattcatcactgctaagaaaccactcccaatatagccgggtctaacatgaatcccagaactcaagattgtaacagcctctgttattatgctagcttgccttattgctagcacacgatccacaccactgttccataggcgccgataatccatcctctactatctattac

SEQ ID NO: 104228 - DNA, 156 bp, Glycine max
  Clone ID: PAT_MRT3847_65133C.1
ggagtgatgcaggacgagaagaagatgaacgtgaagaaaggattccttggtgttcaagtgggtttagaagacgacgaagaaggtggctattcccctcaaagattcgtgatcccaatctcttacctttcccaccctctcttcaagcaccttctggac

SEQ ID NO: 104229 - DNA, 101 bp, Glycine max
  Clone ID: PAT_MRT3847_65134C.1
ataacgattgttaaacccatattaatggctttcatgggaactgcctacgacttcaatagatatacataagactagaaagattgaaagcttgtcatagggct

SEQ ID NO: 104230 - DNA, 372 bp, Glycine max
  unsure (1)..(372): unsure at all n locations
  Clone ID: PAT_MRT3847_65135C.1
ggggggaaaacacaatcattccgttctcttaacctaaccggagtagtgatagtattagtatcaattcccccactattccattctagtattctattttatctctttttctttcttcgttttcaaaactctttccgacaactcagaaaccaaagcactcgcttctccttctctctctctctctctcataggcgtgcaggtgcaatggcgggtgcgatgaatatgaaagtcgacaagattcgtcaaatcgtgcgtctcaaacagcttatgacgcgctggaagcacatcagcctccgccgccgctccgacgacgaaccctccgccgcgcgccgccctccccccggcttcatcttcgtctacgtgggcancgaacgc

SEQ ID NO: 104231 - DNA, 293 bp, Glycine max
  Clone ID: PAT_MRT3847_65136C.1
tttttctttttacaccaagatccaatccaaagcctaacttatttaaaccaaaggagaaaatttgtgacttataaccatatccattaaaacattctaagtctacattgcatttgacggatagatcacacctctgtgaacatgtgcacagaagggcgaactcttcttcaaaattgtcgtcaaatttttccaaaaacttttcctcggtgtatccaaataatggaactaatgtcacatgttctcgcagctcatgaacatgtgctgcaaggtcgagagcatgcccatatatttctgtt

SEQ ID NO: 104232 - DNA, 268 bp, Glycine max
  unsure (1)..(268): unsure at all n locations
  Clone ID: PAT_MRT3847_65137C.1
accattcaaaccgaactttttacccattttaccctccaaacccnaattgtaagtattgtatcatctgaatcgaccccaaaggcccatccaatttattaacccctccaattataggcactagtacttaatcaacgcgttccctgtacctacatatcatacacatctattcttatctttatctttacactctccatctttttaataatgtttatttttctcctcattttgcataattttatccttactctattctttcactttaactctt

SEQ ID NO: 104233 - DNA, 344 bp, Glycine max
  Clone ID: PAT_MRT3847_65138C.1
tgctcacttagcaaccaagagtatagtgcttaaaaatatgtttttgaaagagttgtttcgaggcacaaacaccagaattgataactatgactatgtgaaaaggcagttcaaatatcaaacaacaccatactccttagtcattgttgatcttccttcttcaaaatcagactttgtgggatttgttagaaatgatagtaattctgactttgtttgttaagcctttctaatataggaagttagttgattagttaataatgatgaaatcaagttgttattgaaagaacaatgagactgtatttatacaaaacgtacacggactgaattgtatcacgcctcttgggccc

SEQ ID NO: 104234 - DNA, 2341 bp, Glycine max
  Clone ID: PAT_MRT3847_65139C.1
ccacgcgtccgccgtccactcgattccgctcccatgtccctgcttcccaaaacagagcaaaacgacgtccccgtcgtcgacattgacagcgacgaaaacggcgtcgccgccgtagctcctgcaaaaaacgacgcgtcgtcgcacaagactccgtcgccacaagttgagcttgtgcagcaagaaacccctgcgtcgggttccgctctgtctgcctccgacggcctgtctcgaagcttctggaaagccggggactacgttgttggtccctcctcaaagcccactcccttccaaggtcacttggaacatgctcgggtgcaccccaagtttttgcattctaatgcaacttcccataaatgggcttttggagcaattgctgagcttgtggataatgctgttgacgagattcaaaatggtgcaactttcgtgaagattgataagtttgatgtcaagaaggataattcaccagcattatgttttctagatgatggtggtggaatgaaccctaatgcaattcgaaaatgcatgagcttgggttattcatcaaagaagtcaaagacaacgattggacagtatggcaatggattcaagactagtaccatgagactgggtgctgatgttattgttttcagtcgggcaatgcattcaggccgggcaacgcaaagtgtgggtctactatcctatacctttttgcgtagaactgggcaagatgatgtagttgttccaatgatagattttgacatatctggtcattgggctgagccaattatttatagctcacaggatgaatggtcagccaacttgaaaacaattcttgattggtctcccttcacatcaaaggaggagctcatgcttcagtttgatgatataggatcacatggtacagaagttataatatcctattggtggtttcatagtgacagggaggaagaattggattttgatgataatactgtggatatttagaagcaacatgtggttaaccatggagctgataaacatttgaggaaaaaaactgttcaacatcagtcacttatttcttaccgccttcgtttttctttacgggcatatgtttcgatgttgtaccttagaaaattttctaacttctcaatcatactaagggggaaacttgtggatcaatttaacattgcggacgatttaatatattcaaaagtaattccatataagcctcagctagccatggcaacaaatgaggctatagcggagacaaagacaaccattggatttataaaggaggctgcagaaattaaggttactggatttaatgtgtaccacaaaaatcgcctaatcaagcccttttggaaagtagtagctgatggttcttcaaaagggcgttgtgttgttggggttcttgaagccaatttcatagaaccagcgcatgacaagcaggattttgagagatcggtgctgttcattcggttggaaaacaagctgaaacaaatgacaatggattactggagagatcactgtcacttgattggatatcagccactaaatttcaagtcacaaaaatgtagtaaaagaagcccacattcgaaaatcagctcaacattcaattaatccacagaatcagttgcttgctgatcaacaggatactagcttggtagctgagcatcaaagcgacctgagtcagccaattgtgggtcttgcagtgattggcatgcaaggttcgagtcgtgagcagcttggtacgatgctagaaactccagtgtctgtatctcctgatgaaatctgtgcagaaaacataaaacttttcgagaggtgtgaggagtacagggaaaaggagacagaattgaaacagacggttgtggacttagaggaggaattgaaacaaatcaagaagaaatgtgatcttctatcttcactcttagagactaagaggaaggcgaagagtgttaagggatgataattacgttatgcaagcatcatatcatcaatgagagacaagttgattacctttcaagtaatgtccgagtgtaaaagcacctgttttttttttttttttggggtactcaggagggctaaacgaccaaactacaaccaaacatgtaggggcaaagttatgcccatagaatctttacaatgtaaatgaatgcacctaccagttagaacacctgttttgtatatgttcgttcacctctgttagaacaactcactctggctggttcggaagaaaaggcatactagactttgcacatatagtagaactgattcaagtaattagaggaaactctctatttaaagttgctattaactgaatctatggaaacttattttttcttttgatgttattaaaagctcttgaatttgtttatccccctct

SEQ ID NO: 104235 - DNA, 328 bp, Glycine max
  Clone ID: PAT_MRT3847_6513C.1
gagtaagttcaggaaggcgttggttctttgttggattggggcgtccttgaacctgatttacaaaagcatactcagacgataggatacatcagatttcgtgcgccaactatacaatgaagatcaattgcaaaaagatgatgtgaacttactcaattggagtgggctgccctcccaggggcaggagcaacaccatggccgtgattctataaatatcacttctctcttgccacgcattaaccccaacagttcaatcgcctgtctcactcgccgaccaaggtcagattttaggtctctgccctcgctgaatacgagcttctgtatcataatc

SEQ ID NO: 104236 - DNA, 245 bp, Glycine max
  Clone ID: PAT_MRT3847_65140C.1
aggcgtgcgaacacgtccgagaggtccacctgcgggaagaccacagactgccacggccgctacaggaccacaaactgggatggctacctcatacaacgccttgcattcaaacccttacaggaattccttgtgcatcgctgtcttccacacaaccaaacatgacctacacatgcgggaactgcgactggactgacaagactacctggacgaaagcaaacagctatggagatattggggagactggc

SEQ ID NO: 104237 - DNA, 447 bp, Glycine max
  Clone ID: PAT_MRT3847_65141C.1
ggactttggttggtgtggagatacaacttgttatgttttcatgtgctgcaaatgcagtggatacataatacatttcttagtgtttcaaaaagtagtatatggtggcactgtcttcctgccaagcttgaaattttgttggaagacatgaatttggaaacagtaagacctaagaagctacggatttgtcaaaatatccaactgttcaatcggaggagtaaatatattagagacccgatttcatttcttgagacatcaagtaaacgtggagaattgggagttggagtactgtcaaactttgaagaacaaatctcagttatattcacaaaaccattaaaggcagttatatttcaaaattataagtttgagagacaaagtgagtgtattatctttagcaaatctgaattaagggggagtgttgagagtgattctcttttttgttagttagtg

SEQ ID NO: 104238 - DNA, 491 bp, Glycine max
  unsure (1)..(491): unsure at all n locations
  Clone ID: PAT_MRT3847_65142C.1
attcttcagttttcaattcattttatcttatcttttatttcttcccacctactttccgtacacactttttcntccattaaaaaaatgcagaaatgtacataggaaaccagacaattgttgcatatatgatatactcttctatcaatttcgattgtttttgtccaattgatgaatgacagctatggaattctattttatacattatgtttagcaaagaaacaagtcagggtagacttttatgaaataacaagcattagactttacttttgaatcttgatttttcgtgttggttagaatgactaatattcaatactacttttttggggttgagtgttgttcaatattctttgataaggagtgcttgtatggaaataatatttgtataattgcttatttttttcaatagctgaagttccctgttactgctgcaaagttttgtttttcttttttggggtagttgtgagtttttgagatctatagggtgatttcaa

SEQ ID NO: 104239 - DNA, 584 bp, Glycine max
  Clone ID: PAT_MRT3847_65143C.1
cggacgcgtgggtggagctgcaagttgaatgaggagaatagaaaattacatgacttttagtctcatgaaaagaagaaaagggagaccaaaaaagatggaggaaatcatcaagggagattttaggctaaataatatatctgaaactttggtattaaactatatggaatgaaattgtatgatccatgaaatcgatctcacctaatgggataagattttgttgttgtatctggtcagtctcactagttgatgcatctaattctttgttagttttctttatgttataggattttattcttagcaaccaaagaaattaagttgtcttaatttcctaagaaatgattgtttgacctttgtagaattgtagtggcctgccgttgtaggtgaacatatctagatgggaacttagttttggatggtgagtttcagggatatcttgtacaaaaaagaaaaaaataaccagagatccaaacttgattagttagtctcagaaggaatacaacatttttttttttgttgttgtaaatttcaaatgatgatcggagtccatgatgttgctgtagattgtatataaagagattttttct

SEQ ID NO: 104240 - DNA, 424 bp, Glycine max
  Clone ID: PAT_MRT3847_65144C.1
gacggccctcgcttttgctctcgctctggtttatagatctttgcgaaggaagtttacagctctcaaccgaagatgcagaaggaggatggactgatcactgtgctttacattgctaggatgtgctgcgtcacaaacagatcgattaccgcttatgaccatgcttctgatcagatcaacatcgggcatgtggatgagaatggcggctacaatggccatctcttcacttttgccctttgcggatacatgcgcgctcagagtgatgcttacagtgctctagaccggttgtggcagaagacaaaagttgaattctagcaacagtggacacgcatgatagcatgctacttcggtatgtattaattgctactcttgctagacatattcgtgtactatgattgtcgctttgagcacaaatactcattctgta

SEQ ID NO: 104241 - DNA, 368 bp, Glycine max
  Clone ID: PAT_MRT3847_65145C.1
aaaaaacaaatttattagaaagtcttaaaaacaaaatattaaaagaaacacaataaagcaggctaacaaactgtaagtaactgtcaaacaaaaggagatggagaaggaaaggaagtttcagaagctgcagcctaaaaattttaagtaggaagtaaaaaataggtgagtttttcatatggttgaaaatatccaatttggatgtcttgacctgactgggggacggtcattttgtggcctacttgggataacagttgtgcaatttaccccgcaatgactaaatcacacagatttgagcaatgctcactgtaattttgggagttttgtgcactggctggtatcatctgtgtgaatgcaggatggctctgtgt

SEQ ID NO: 104242 - DNA, 427 bp, Glycine max
  Clone ID: PAT_MRT3847_65146C.1
ggagtgactacactgttgcatacaagttttgggtcgaggttgcccttgatacaagggccttcttttgtttatctggccccggtgttggcgatcatcaactcccccgagtttcaaggattaaatgcaaataaattcaaacatataatgaaggagctgcagggggctataattattggatcggcttttcaaacttttattggatattctggacttatgtcactgttagtaaggttgatcaatcctgtggttgtatccccaactattgctgcagtaggactttcattttacagctatggttttccactagttggtacatgtctggagattggtgccgtgcacatattaaaggatattgctttctctctatatcttcgcaaaatatctgttcttggacaccgcatatttctaatatatgcagtttctttgg

SEQ ID NO: 104243 - DNA, 464 bp, Glycine max
  Clone ID: PAT_MRT3847_65147C.1
gcttaaccgttgattttggtcgttgtgtacttttactatcaagatgcttttgaatgtctttcttaaaatgttgtttgttgctcgtgagtcattgttgacgtgggtttctttcttgctgtttaattggtaggctagcgtagctcaagaaacttgttaatatttgcgcgtttgatttattgcaaattatgtatgaaaattagtatatttcttagataaaacaacttactagttgcttgaaacagtggtgacgccaacgttaattatcactcttaaaatattcacaaggcgttgatagatgttggtcaaagttgtttttttggtttggtatattaccaactgccatttagaaagttatgagttgtcaagagtgtgatagtgatattagattttgatttggtagttatatctggaaaggagtagacgtaaagtatggaattaactagtattaaccatccatatcatga

SEQ ID NO: 104244 - DNA, 783 bp, Glycine max
  Clone ID: PAT_MRT3847_65148C.1
aatctttagcaactctcttctctgtttttgctactccattctgaaactttctgataccgacacaccgcaggaccatgatgcggtttgtgatgtcttcaagctccaaacgtgtgtctaagtgcttcatttttgtgttcctggcttccctacactttggatccaacgctcaactcttaccacaagatgaaggtacttaattattttccattttatttttatcttatgggtttttatgtgttaattatgtgtgtgttggaaatttcacttttgtaacttccaaaactataaactgaaactgtctttttggttttaacaccaacttcacaaagtttcaactttatccgttttagtgcaaacccatcttccagaatttagttcttcaacttgcattgttgcttctgtcacaagatccataaggaaatcgccaatgtcgttttttttttgttccctgcttcttccgtttacatttaattagtttttttaagaagttctgcatctaacttgctcaaaaataaaaataaataaaattttttctattttttttaaaattttctgggattattttggttcccagtgattggaatagagagtaaaatgaaagaaaattttgaatttcttttatctatacctcaaattatttttttattcaattaagactaattactcttgttttttcttctacttattctctttttataatagagtaaagggtactctcaccttatatgttctattttgacattatttttagtcaatgtgggaccttggattatttttttaatt

SEQ ID NO: 104245 - DNA, 414 bp, Glycine max
  Clone ID: PAT_MRT3847_65149C.1
gaatgtaacagtctgcacccttaattaattgcaataatttcgacatgtggaggtttcacaatgttgcttggaatcatgtgctgagagatgctcacaaaccatctttgatgttaatgttacgattttataaaaatcgccttggtatgtttacagcttactacggttttcttttaaccatggccattgaaattttggtatttaaatggcgactttatccttgggtcatacctccttcattccttcactccgccgcaaccttcactccaccgcaaccttgcctgtgtaagtctccatagccaggcacaactttgttgttcttcacgtccacattcgtgccgtaagtacattgttttgatgcgcaagtttgttgttgtttttgtcctcaataagcctctgtgttgattgatgcatgct

SEQ ID NO: 104246 - DNA, 481 bp, Glycine max
  Clone ID: PAT_MRT3847_6514C.1
acggctgcgagaagacgacagaagggccctcattcaattcttcaacttgatcctgaagtttaatatggtagatataaatgtttgaatggactagaattattcttgaggtcctatatttttgtaaagaaattgtttcttttgatgattacacttaaactttgatagttttgcctacatgatgcctagaaaattcatttcttgttacaaagttgatcccttcaggtctaagtgagtaaatgttattgttgactgttttcgttgtgaatcattaatacaaggtggacccttattgaagaaggagatgttatgcttgatagtgtttgtccattatttaaaatttgctttgtttgttgattcatatattatgtgtattttatttcttttttcatctacgtcatatgttttaatctgatatttcttttgtctatgcctagatatagagcttctagactgaagctgttattttagtttatcaatagtt

SEQ ID NO: 104247 - DNA, 964 bp, Glycine max
  Clone ID: PAT_MRT3847_65150C.1
tcgtggaaataggagaaagaaaaaggaggtttgagagactagaagaggattgggatttggcaagagatttagattagcatggaatcaagaatggagtgtagtagtcatcaacaacctcagtcactgtaaatttttttggttgttatttatctctctcaaatgcatatgcaatcgcaatcaattgcaaagcatttcggatccagagggagagaccctttgtgacagcctgtatcctctccatcgtctgatagattcttcatttttttttccatttctcgcggcaagatctcacactctgcacctagggttagggttttggttcttgcggcatggcgacttcttcgagttcttcgagctggcgcgagggcatgtcctccgacaacataaagggactgtgcctcgctctctcttctagcttcttcatcggcgccagcttcattgtcaaaaagaagggtttgaagaaggccggtgctagtggaatcagggccggtatcgttcattcttcgccaccgtcgatcacttttttgtttttactttgtattcagttcattttccgtgtttgctttaatttttctagggatctggacgttttttcttttacttctcttggccacgagtttttcaactgtctcaaatctctcaagtttacactcgatgcgttgctttgccagcctttttttttctttgttatatcttctcgtcgcattccacaagacaaatagttgtagaataagcatattaggtctcggcatgaggcggaagggaacatttttgtgttctcaattctcatccttaagattttcaccgaactgtttttttggcaattttaactatccttttcttgtgctccttggtatggaatgatgagagatctatacagtttgtgtgacttgagatcttgctttaaatgttagaaatttggtggataaactgtctgctagtttaattttttctttttgtagca

SEQ ID NO: 104248 - DNA, 635 bp, Glycine max
  Clone ID: PAT_MRT3847_65151C.1
gcacgagccacattggcatgcctagaagaagaggctgaggatgatgatgaagcagcagaggaataagtggcagcattagtggcaccaccagcagtcatagggtactcatcaggaaagttaaggattgcaaatggacctctcatggcataagcagctctatcataggctctggccgcttcctccgcagtgttgaaagtccccagccacaccctctgaccctgcctcgtggagtctcgaatctccgccgcgaacttcccccacggccgcctccgaaccccccggtaccggacatctccggcatcctccttagccctccccctcgacccttcttcatccatggttgcacttttggtaaggtactaatttttgtgttttttgcatgcatggtaaggtatgacaaggttggagtatatatatatggttgaaaaggcacaatctgattaggccacgcaagcattgttgccacgtgacgattagaagtttctgctattgaaaccaatgaccaatattgaaaagttcttgtgtccattgtatctggatggtcaaggtggtgggctttgcaaggtatagagattcttgtgccgcgctagcactcgctctttgaaacgccttctgcacatcgttgtttgggaatc

SEQ ID NO: 104249 - DNA, 1195 bp, Glycine max
  unsure (1)..(1195): unsure at all n locations
  Clone ID: PAT_MRT3847_65152C.1
cccacgcgtccgatattattttacgggagaggctacatatttttggaattctcggttgcctgctgtgtgttgtgggatctacgacaattgttttgcatgcacctcaagaacgggaaattgaatctgtttcagaagtgtgggatcttgctatggaagcagcatttctcttttatgcagctatggttataacagctacttttatccttatcttccacttcattcctctctatggccagacacacataatggtttatattggtgtttgttcccttgtaggttctctaacggttatgagtgttaaggctcttggaattgtcataaagttaacactgtctgggatgaatcagctaatttaccctcagacttgggcattcactctagttgtacttgtttgtgttcttacccaaatgaattatttaaataaggcactggatacttttaatacggcagtggtatctcctatatattatgttatgttcacaacatttaccattgtggctagtgttattatgtttaaggactgggatagacaaagtccaacacaagttatcacagaaatatgtgggtttgtgaccattctatcaggaacttttcttcttcacaaaactaaggatatggctgatggtttacaaacatctttatctattagacttcctaagcattcagaagaggatggctttgatggtggtgaaggcattcctcttagacggcaagaatccatgagattgccatgatatattctttgcatcacatcttgcatttctaaatgagcttgaggcgctggggagggattttgccaaggtcgtctgtaatttactgattatttccctccccatcatattttttacctgatacagctgggtcgaaggatgagagtttcctatcactgttcttttggcctcctgatgattatgctttctgatcttgccttgcatgcccatctacactccataccggagacaaaagctaatgtaattttctgcacattgattatatatagtgtacctcagttaaatgaaaatattcatcatcaaattttgaactggacagcattgcaatgttattatcagtgtctgctgccatttgaactcgagctgaccccaatattttgcgcatgttggagctaaatatggaaatcaggatgtgtagattccaggtcaaaaaaaaaccccccnnnnnnnnagggcggccgccg

SEQ ID NO: 104250 - DNA, 1889 bp, Glycine max
  Clone ID: PAT_MRT3847_65153C.1
gacctggaatctacacatcctaatttttatatttagctccaacaagcacaaaatattgaggtcagctcgagttcaaatggcagcagacactgataataacattgcaatgctgtccagttcaaaatttgatgatgaatattttcatttaactgaggtacactatatataatcaatgggcagaaaattacattggcctttgtctccgctatggagtgtagaggggcatgctaggcaagatcagaaagcataatcatcgggagaccaaaagaacagtgataggaaactcacatccttcgactccaactgtatcaggtaaaaaatatgatggggagggaaataatcagtaaattacagacgaccttggcaaaatccctccccagcgcctcaagctcatttagaaaagcaagatgtgatgcaaagaatatatcatggcgatctcatggcttcttgccgtctaagaggaatgccttcaccaccatcaaagccatcctcttctgaatgcttaggaagtctaacagataaagatggttgtaaaccatcagccatatccttagttttgtgaagaagaaaagttcctgatagaatggtcacaaacccacatatttctgtgataacttgtgttggactttgtctatcccagtccttaaacataataacactagccacaatggtaaatgtagtgaacataacataatatatgggagataccactgccgtattaaaagtatccagtgcctaaacccaagtttgtcaaactcgagagtctacgtaacccgggcaacatttgtagactcgattcgtaaactcgaaaaagtgctacaacatgcacaaaattcatttgggtaataacacaaaaaagtcagaagagagtgaatgcaacagtttgaggctgtattagctgaaatttcccggacagtattttcatttaactgaggtacactatatataaacaatgtgcagaaaattacattagcattttgtctccggtatggagtgtagatgggcatgcaaggcaagatcagaaagcataatcatcaggaggccaaaagaacagtgataggaaactctcatccttcgacccagctgtatcaggtaaaaaatatgatggggagggaaataatcagtaaattacagacgaccttaggagcatgcaaaccaattgttgtagatctcattacacacaaaacgcaaccaagaattccaaaaatatgtagcctctcccgtaaaataatatgagcaagagcagcactgataataatgctaagagcaccaagaggggtgaccaatatagctggggcaaatgcataagctgcaaaattggcaatctccccaacaatcattgttatcattcccacccaccaaagcggctcatacaagtaagaataacctccacttccggccctgattccactagcaccggccttcttcaaacccttctttttgacaatgaagctggcaccgatgaagaagctagaggagagagcgagacacagtccctttatgttgtcggaggacatgccctcgcgccagctcgaagtcgaagaagaagaagaagaagtcgccatgccaaaaccctaaccctaggtgcagagtgagatcttgccgcgagaaagaaaataaaaaatcaacaatcggagtggatacagctgtcacaaaagttctctccctcaggatcggaaatgctttgcaattgcatatgcatttgagattttgagagataagtaaccaaaaatttacagtgtgactgagactgctaacaaggttgatgactactatactccattcttcttcattcctgctaatctaaatctttacttgattgggaattactctctctcgtttggcaaattcccaatactctcttgtcttcctcctcacctccttttttc

SEQ ID NO: 104251 - DNA, 992 bp, Glycine max
  Clone ID: PAT_MRT3847_65154C.1
gcgagaagacgacagaaggggacagcaaatgccaaaagccaagttaattccctttctccactcttcacaaacacaaacacaacgtattctcttgcaaaactaagaatgaaggaggagttggtggttgaagaagggtaccttttcaaagaagagactcacttcacagtgctcaaaacctctctcttcttcaacggtgatggcttcgctgtctacgattgcaaaggccaactcgttttccgcttcgactcctacggtccccgcgcgcgtgacaaggacgagctcgttctcatggatccccatggccgttctcttctcactctccgccgaaagaaaccgagtcttcatcaacgctgggaaggcttcaaaggggagagaacggagggtcataaacccattttcagcgtcaagagatcgtcgatcatcggacggtcgaggaccagcgtggcggtggaggtgtacgatagccccggtgtggagtacctcatcgaaggttgcttcccgcagcgctgctgcaaggttttcaatgccgctaaggaacttgtggctgagattcgtcgcaaagtggaccccaccaccagcgttatgctcgggaaggaagtcttttggctctgcgtgaagcctggtttcgatgcggcctttgccatgggattggtattggtacttgatcagatcaacggtgagaattactttgatgatagaatcttggagccctcggtgcaccctgctgcagaagatctgggatttgtttcaccggttccagtttgagattatcagatttgtcttgttttctgattctgacgttttactcactgatcgttggagtgttccctctcaaagggttttctttctctctgcccttttttttttatggctcatctcgttttttttttgtaaaaaaaaaaaataatgatgatgttctggatcataatcactatgcgatcttgtacattctatatgcattgaaagttaaagataaacttatcttaatttcc

SEQ ID NO: 104252 - DNA, 670 bp, Glycine max
  Clone ID: PAT_MRT3847_65155C.1
tcggggttggctgcaggtgctcgcagattatgtaaagactatgatactctcttcaagtacccttaagattctaaatgtaagttacttaattttgcttcttccttttttacttttcatatttctaataacatgtcctgtttgccaaatttctgtccatcactcaatcttgcctttcaaattatccttcaaaatatgtctctaatccactctcattgtgtagggtctctctacttctggttcaatgataactcaaattccttgctttgttcaattgaagtcattgaaattgaaaatgaaatcttcttcaagcatatctgatgagggagttagcaggatagtagagtacttacttaaaaaatgtccattggccaaagttgatgttataaattgcagagagtgatatgaacacttaaatcctcaggtagtgtgttttacatattgttctgtttttgcttcatttttccttctcttcctgataatactaggttagtctcttctcaatactcagagtcacagcaagtaaaaggttgctatataatttccttgttgatcctcttgtagccttgtttttgctatattttgctttggcagatgacaatttttaagtattactggggacaatctgtatgacacatactttttcttactcttatatctcaaatatctttcc

SEQ ID NO: 104253 - DNA, 157 bp, Glycine max
  Clone ID: PAT_MRT3847_65156C.1
aacaaatcatgctggttagtatattatagtagaatctaacacagctctgaaccatttatatgggcgatgtcaaaaaccaaaatacggattgtacaaccttggtctattagctaaaccaacctatccctacatccttggctgtgacagatatagccta

SEQ ID NO: 104254 - DNA, 513 bp, Glycine max
  Clone ID: PAT_MRT3847_65157C.1
gttccctgaaaggtgtagactacacttagtattcaagttgcatgcagttttagggtataccattgtgtattgggttttgtttatatccatacattgctgattacttttttggtttttatgcagcggtcacagctactggaattatctggtctcgttacagcactgtaatcaccccagtaagtttgattttttctaaagacagatttcttttaactggtccatttagacgtgattgacatatttcttttaactagttcatttagacatgattatttatggacctccaaagaaagcaaaactttgttattaccttcatcacagtacatgatgtgtacataattctggtttgtagttgcataattctcttgtattgcaaaagtatgacctttgttacaactattttccatgttacagaaaaattggaacctgtttagtgtaaacattgcaatggcagggacaggcatataccaactatcacgcaaatggcggcatgattattcctcagaggcggag

SEQ ID NO: 104255 - DNA, 198 bp, Glycine max
  unsure (1)..(198): unsure at all n locations
  Clone ID: PAT_MRT3847_65158C.1
aatatanaancacagnnnncgnnaagcngtgaantngcagnnnaanngntncaatcanagnaacncantcgacatcgcggagtgnaacgtgcaagacntgnactntntncncgctnttnttcanngnanngagggctgtggctnatcnttgtgnctgntgntnnncacgtnntcngagnantgnntacanngnncatt

SEQ ID NO: 104256 - DNA, 560 bp, Glycine max
  Clone ID: PAT_MRT3847_65159C.1
tttttaaagacaatagaagagggtgggctaattccattccaattataataatatcaacattcctatgctttcctagcttatttacggcaacagagtatatatagtgcatgcttcacattaatatgcagcagcaattcaaaattgataaacttttcttcatcaattccttcatgaatgtgatcgagttccgtatccaaaagccactgaatgtagatcctccacttcatgaaaaccccacgtcctcctgtttgtttgcatgtcataggacatggagtagctattattagaactctcatcaaagctggagaaggagctgctttcttccatggctcctgaattttcattattaaccccaatagggtttagatcttccatcatgagagcattgttcccataatgttgtgttgataaattagtacacatgttaggaagaaattctggccccaggttggaattttccacctgaaaccaactttgaaggtcttggggtaaagcaacagaagatttttcattaattttcattagggtttcattgatggtgcattgagacaactttgagc

SEQ ID NO: 104257 - DNA, 456 bp, Glycine max
  unsure (1)..(456): unsure at all n locations
  Clone ID: PAT_MRT3847_6515C.1
gactaattccaccattagttgaaggggacatcctattatctgaaaagctcgcacgagacccctctcttttggatcaaagactaagaaaaattgtgacaggaataaaatgacaaataccaactgcgtacaattttgactgccaccgaaagaaaatattagatgacacccaataaaatgaataaaatgacgtaaaaagcgggtcctatttttgtcaattgtggcaagctaatgatacagataaaactgaaattgtgtaactatacgcgcaactcaaaaatctaaaggcaaacttctccagtggcaaaaaacatgcgggtacaccaaactgcaactggaaataaataggtcctatagacacagggagtaaaagcctaactagctggctttctgctcggacttgggcttaagtgcttgcaaaacaaagggagcatacaaacccttanatgcaatcataac

SEQ ID NO: 104258 - DNA, 556 bp, Glycine max
  unsure (1)..(556): unsure at all n locations
  Clone ID: PAT_MRT3847_65160C.1
atcaaatattctgaggtggctgatttctatgactattacaagggtcagatggaagcttgggatggaccagccttgcttttgttcagtgatgggaaaactgttggtgcatgccttgatcgtaatggacttcgacctgctaggtattggcgaacatcagacaatatggtctatgttgcctctngagtgggtgttgtgccagtggatgatcaaaggttgtcttgaaaggccgtttaggtccaggcatgatgataacggttgattacctggcggtcaggtctatgagaatacagaggttaaaaaacgagtagccttatcaagcccatatgggaactggatcaaggaaaatttgcggtctttgaagcctgggaacttcctttcagcctctgtgttggacaatgaggcagtattaagacaccaacatgcatttgggtactctagtgaagatgtccagatggtgatcgagagtatggctgctcaaggaaaggagcccacgttttgcatgggagatgatattccattggcagcattggctcagaaccctcacatgctttttgat

SEQ ID NO: 104259 - DNA, 791 bp, Glycine max
  Clone ID: PAT_MRT3847_65161C.1
accaggtagattttcataagaaaaagaatgggaaaagtgagaatggattacttggtcggtttctaggctttgggaaaaagagcaagaaaggagaattagaagaaacaacttataccaataagagcaagaaccaaaacagtggtgctgaaaataagaaaggcaaggaagggaaattggaggatcatggtaacaatgactttgattttcatgattacgatgatacccctcctcatcccaaaaatggcaaaagtggtaagggtagtaacaatgtcaaagaaggccagatgggcccgggcccaataatgggtaataatcttccaatgcgtcatcagatggagaatattcaagcagtacaaggacttccggcgatgaatggtgatggtggctattatcaaggggtgcaaatgcaacatgctccatacaataaccttcagcagcactacatgggtatgatgatgaaccagcatcaacatcagcaagcaaatatgaacaacaacatgtacccaacacccatgatgtatggtaggccgcatccatctatgaactacatgccaccacctcctatgccatctcacccaattgccgatcctattactcataccttcagtgatgagaatgttgagagctgcagtatcatgtaattaattaattaattactagtgacaacttgcttttctgctctatgattcggtctttagggagttcattaaattttgtgtaggacggaaaatgtgggatgtttaggattatattattatattatatataaataaatagtatattgtttgctc

SEQ ID NO: 104260 - DNA, 255 bp, Glycine max
  Clone ID: PAT_MRT3847_65162C.1
cggacgcgtgggaaaaaaaaacatggccgaataaaatttaatacaatgaacttagatatagattgctgataggagacgatgcgatggttcaatcttatccacaaggatcatgtgaattgggcggcctattttatgcatccaacttatttacgttacctgctagcgtgtagtcttaatactagagaccttatgttcagttgcataccctggctaaaacacaggtattcaggatttatcatgatgtttgccttgtta

SEQ ID NO: 104261 - DNA, 400 bp, Glycine max
  Clone ID: PAT_MRT3847_65163C.1
atcagatttttcatttttctgtacttggggcccgggcgaccttggggcccaaaaacgagggcccaaaaacgggggcccaaacgcccccgactctacaaacactcaactttattatataggattatgaattctgaatttatcatatcatatatactttcttaaccattattaatctagtaattgtaaagcttatggcgtcgaagttgttgtttcggcaagttggtccatgttctggtgaatgttttgccccaaaatgggttcagttcagttatttgaagcaaagtcattcacttacacctatttgctgggatgcacaaagacgagaccggctctggtcatcgatccagtgatcgaaacggttgagagggatgcctcattagtccacgagttgggactcgac

SEQ ID NO: 104262 - DNA, 875 bp, Glycine max
  Clone ID: PAT_MRT3847_65164C.1
ctttgccttgcaaaggagggtattcaaagtccaatctacaaaggattctattcgaaggaagaaaccaaaaaagctcttgagctaaacaaagacataaataaaataaaaaaggccctcaaaccacaaaacactaccatatttataaataccgaccaaaccaaggtcaaccacaaaaccaacaaagatatagtaagtccaactatccccaaaccaataaatggcctaaacctagagaatttcaagaagacacagagcctattgtttaaggtgcacaacagccaaatacattctgggtctctacataggcgtgcatgtctactctaaccaaagatttgtatgcaccaacaaaacttcttattggcaagacaaaaccaactgtccatgcaagataaaatttctctttagaaaagtcagattagacttggaccgaccagtttatgtcctttggatatgaggacctagcaatttctacaaaaagcctattagatcatggatgtttggaatcaatcttgattcctccatctgatagatggattcaacccctcaatcaatgagactataaacctgattcaggcagaaatgatggactacattaccatcaaaataacaacttgcccgagcagctttactgttcagaattacccatgtcatgttatgagactcttacctgaggatcatagaaactatctctgtctagactatctctattatgaatacgaaatttgagatgtacatggtaatacacagtaccaatacaacctcatgagggcataaatacaagggtaccaatggttcttgtaaggataagacaaacgagagtttgacttaataagagaaactcacaatacaaagcttttccagccatcttacaatgg

SEQ ID NO: 104263 - DNA, 668 bp, Glycine max
  Clone ID: PAT_MRT3847_65165C.1
ggaaaaaagtaagaagaaggataagaaggaagataaaattgagagtgatgagagttgttgtttgaaggagcagtagaagaagaagaagaagatgacatcgataccgaaagagccagaggaggtgatgaagcggagaggaggatccgtgttgggaaagaaaaccattctcaagagcgaccatttccccggttgccacaacaagcgcttgcatcctcacatcgatggcgctccaaattaccgtcaagctgagtcgttactcgtgcacggtgttgccatcccaaccaccgatggaattcgaaacgttctcaagcacattggtgctcgagctgagggcaagaaagcgcaagttctttggattaaccttcgtgaggaaccggttgtgtacattaatggacgtccctttgttttgcgtgacgtggagaggccattttccaaccttgaatacacgggaattaatagggaaagagttgaacaaatggaagccgattgaaagaagacattttgatggaagctgcaagatatgaaaataagatccttgtgactgatgaactgccagatggtcagatggtggaccaatgggaatcagtgtcatgtaattctgtgaaggcaccactagaggtgtatcctgaattgcaagtggagggatacctacttgactatgaacgcgt

SEQ ID NO: 104264 - DNA, 160 bp, Glycine max
  Clone ID: PAT_MRT3847_65166C.1
gaaatacaattttcttagtcaaccgggaaatgaaacaagtccttgtgcaatggcacaacccacccaagcctgaaacagatgcttacattcgctgtttttgtagagaccaaagctaccgagagcttgaccaaaatagagtatcaagttgactcaaaagaaa

SEQ ID NO: 104265 - DNA, 1007 bp, Glycine max
  unsure (1)..(1007): unsure at all n locations
  Clone ID: PAT_MRT3847_65167C.1
ttttcggtatgtttgagacaatttttaatttaaggattggatgtggaaataattcgattcagtttgagccatagattcatgacctttcttttttgccatgggttgaattaacattgagaccattagataacataccaaactggctctgtggttctattttgttctcgattagtttctggctgtgttcttcacctcattttattagcctcctgtaaaagctagtatcaacttaggcaacataaatagttgatacgggtttagatggtttctattgttttggtgacaactcaggagacatgtttctgtaaaagctagtatcaagctcaagcaacataaacagttgatagtttctgtaattctgtaaatattgacaacatgaaaagggcacaggaaacgttcttcttactttttttctattggcatgtttaatttatgttttgcaaattatagtttgatctaatggaaaagactttttatatggtttgagagataaaatcatattctaaacggctgcgagaagacgacagaagggcatattatttgataatatagtttattatcagcagactgagttttgaggtgcggaaactatgatccaagcatttcattaataattaataatccaaatgagtactgctatttatcccacttatccttcaatacacgttctaatttaactttattactgaacttaaaagcctggtgggatatgaggctaatgttttgattccacatatccctttgaaattgccactgtttttgtgtatgtaaaccattcattacccaatattctcttcatgagttctttaccatccaataatgaactccattttctgaaagcataccctactatcaataatgcacgattcaaagttgtccatgagagtgtttatttgttcataagcaacaagagcctttatgtttctcttatttggtttggaacagggataactcgatgctcttaccttcgntcattatttattttggntggttaaaagcatatacct

SEQ ID NO: 104266 - DNA, 1578 bp, Glycine max
  unsure (1)..(1578): unsure at all n locations
  Clone ID: PAT_MRT3847_65168C.1
gtattttcaaacattagcaaatagcaaccaaacatacaaagatgaaagaaacatgttgttgtgctagttttagttttggcaaggcaaagccttatttgttaacggtgggacttcaatttgggttcgccggtgcatacatcttctccgtcgctagtctcaaccatggaatgaatcgttacgtcttcgttgtctatcgcaatgccatcgctgcattggcccttgctccttttgcattgattttcgagaggaaaattaggccaaagataacactccctgtcttcttacagatagtggcactgggatttgtggagccagtgattgaccaagggttcactttcttgggcatgcaatatacatcggcttcatttgcctctgccataatgaatgccgtgccttctgtcacttttgtgctagccgtaattctaaggttagagcgtgtgaatgtaaaagaggtgcggagcctagcaaaggtgattgggacgttggtaaccttttcaggtgctttgttaatgacatttacaaaggtcctcaaattaagctatttttctctcctgacacaacccaccaccaagatggaagccactcccctcaggttatcaaacactggctctcagggactctctttctcctcctcggttgtgttgcttggtcatctttcttcattttacagttcgataacattgaaaaggtatccggcggaattgtcactatcttcattggtatgcttatcgggtgctttgcaagccagcgtggtggcaatagtagcgactcgtcattctgggcttgtggcatgggccttaggttgggacttcaggctctatggccctctctacacgggaatagttacctctggaattacatattatgcccaaggattgatattgcaaaccagaggcccagtatttttaactgccttcaatcccctttgcatggtcataacttctgctttaggctccttcctttttgcagagcagcttcatctgggaagtatcattggagctgtcattatcgcattgggtctgtactctgtggtatggggcaaaggcaaagactattcaaacccaacgccgtcatcacctacaacaaagcacacagagacaccacagcttccaattacctcatctgatatctaacacagatttcctaaggaatttgtgcatagttgcacttctgcttctgctgcctcacaaatctgcaatagttatgtgtgttaatttcttgctttcagtctccacgttgggaagggacagtatcagattgagacaagaggcagtgtcattggcattgctttaatatatcatcctaaaagaaaatatgtctaacgctctatgtgatgataagcttttaaccacttttgtcttgggtggttgatcatcctttagctcttatcaaatgataaacgtacttttaataatattattattaaatctcttaattgatatctttctgccttcttgtgcagctagattttaagttatttattattaatttaaaatgttttgtgatcttgatgcatgttaagtgtgactaaccactaccagaattgatgtcaccaaaattcatataagttatgntttg

SEQ ID NO: 104267 - DNA, 480 bp, Glycine max
  Clone ID: PAT_MRT3847_65169C.1
aagacaaaaaacttgagctcaaggcattcctaaacacaagggagtactctagtgaattcccagttgaaatgtgcacaatccatatgaggaaggtgggaatgtacatgtcaccgaaattacagccagagtttaatacaatatattgttgcccattattagaatcctctcatcagagggtgaaagcccgactattgtgaccattacgcctctacatggagctgaattttctcatctgatatgcactagaatcttgaggttctccaaggtagtatttacgcccgatcttcagtatctcctatcctcgtaagagcttctctacatcacgccttttacctgagaaagccgtgatcactctgccactgacatggccgggcagccgactcaactaagctgcagcacagtcatcattatgtacataggctcagccgaaattataaatgtattaatggaaaggatccagcaagcaacatgcattctgtc

SEQ ID NO: 104268 - DNA, 390 bp, Glycine max
  Clone ID: PAT_MRT3847_6516C.1
ccacacgcgtccgcttaacgcgtgcaatgttttatgggacccacccatgggccaaaaacccgcaaggtttaataggcaatttaggaccaacccatcccccaggtaacggttttgccttggtgttcctgatcccaagatcaggattaacgatgttggcatgaaaaaaaagggggttgataaatttccttttggggtcaatttgtttagttggttgaaggaatacgtttttatggagacttttaaattttttcgtttttttttgattaggttactttccaaattttttataaatgatatttttttattttggatgtttaattttcttcgattaaatttcctatgttttaaaagagtttatttcgattttttgttttttgtttgttattattt

SEQ ID NO: 104269 - DNA, 1400 bp, Glycine max
  Clone ID: PAT_MRT3847_65170C.1
agaagacgacagtaagctacggctacccttgtcggtcgtcggtcgcaaaggtgtgttcccaaaatcgcaatatcttcaactctatctgcaacagccaactttctcgttcgtcgatcacaaaaatggcggcgaaacttcaaatatttacgggattgccccccgcgccatttcaatcttcctcctccactctctgcgtactcaagaagcctctcactacctccttcttcggcactgcacgagtggaagttctgaaacttcgagtgatgaggattgcgaagcctgcgcgcggtggaggtgctctcggtgctcgcatgaacctctttgacaggttcgccagagttgtgaagtcgtacgcaaacgctgtcttaagctcgtttgaagatccggagaaaatattggagcaagctgtgcttgaaatgaacgacgacttgaccaaaatgcgtcaagctactgcacaagtgttggcatctcaaaagcggttggaaaataaatacaaggctgcacaacaagcttctgaagagtggtaccggaaagcacaacttgctcttcagaaaggtgaagaggatcttgctcgtgaagcacttaagaagccgtaaatcttatgcggataatgccagttctttgaaagctcaacttgatcaacaaaagactgttgttgagaatcttgtctctaatacaaggcttttggagagtaagatacaagaggcaaggtcgaaaaaagatactctcaaagcaagagctcaatcggcaaagactgcaaccaaggtgagtgagatgctgggaaatgtcaatacaagtagtgctctttcagcttttgaaaagatggaagagaaagtgttgacaatggagtcccaagctgaagctcttggccagttgacaagtgatgatcttgaaggaaagtttgctttgcttgagggctcatccgttgatgacgaccttgcgaatttgaaaaaagaattatctggtgcctcaaagaaaggggaccttcctcctggaagaagtaccaccagcgccaacactgggattccatttcgagatgctgagatcgagttggaacttgatcaattgaggcaaagagcaaaggaattttgaagcatggattcttttttgtttcttcatatcaaagcttcaatttagtttcttttatttctgatatcaacgttgtacagctcaaggccaatcacgatattgttcgactactggccaaaaattgattagaaaaatgaactgattagctgcatgctcatgttatatttaaatacctcaagtgtgatgatattgtaatatataatttgtaccatcagaagtcttttttattcctattaaatataaatgcatgatttgcacaaaaacttccaaaaaaaaaaaaaaaaaaaaaaaaaaaaaaaaaaaaaaaaaaa

SEQ ID NO: 104270 - DNA, 314 bp, Glycine max
  unsure (1)..(314): unsure at all n locations
  Clone ID: PAT_MRT3847_65171C.1
ggcgcacgcacgcgnacaanancgacggaagggggcgaggaggaagggcnncnagacggagcngncagcacggagngtggcngcnananagcaaangaganangnnanngnangaggncgncgaggngagncaacgccganggangnganagaagaggggacnganagcgaaacggnaagggggcngnagnngngggcancnnaancaanaannnnnngnacannggcncaggcancggnancgccgacaacaagatcacngacaanggcnctgcnannccagnngggacaacaccgntgaaganacatgaaat

SEQ ID NO: 104271 - DNA, 355 bp, Glycine max
  Clone ID: PAT_MRT3847_65172C.1
tacggctgcgagagacgacagaaggtgacagcatagcaattttactacacattcctcttgtttggctcgggtggtaaaccaagaaactttcgggggcaccccatgcatcttcttttgctcttggtcttggcatttttctctttggtgaaatgcactttcacggtgccactggttactattgcgggtggcaaggtgggcatgctaccttttatggggggggggaagcttttggcacaatgggagggggctggtgctattggaatttgtgcaggcaaggattttgaaccaacactggagctctgagcactgtgttggtcaacaatggcttgagttgtggggcctggtattaaatgag

SEQ ID NO: 104272 - DNA, 576 bp, Glycine max
  Clone ID: PAT_MRT3847_65173C.1
gccccagccactcttaatttctctctgccttgctcatttacacacctctccaacctttcactttcagctttatttgaatccctctctctcctttccaaatggccagcgttgagctttcttaagcttggcacgagactttgttaaatgcaattagcaatctcccaggttgcacatcaaacaccaacaacagttccagaaaatgaaacaaccgaggtaatcaagacccaggaaacaaccccggaaccagtaccagccactgaggctcctgcaacagaacaagcagcagctgaggttcctgctcaagaagaacaacaagcaactgaggttcctgccccagaatcaaccaccgaagcaccaaaggaagaaaccaccgaagcaccaacaacagaaacagtagaaacaacaactacagaagaagccaagccagaggagcctaaagaagttgcagttgagaccgagaggtggtgacaaaagagacagaggaagagaagccagctgcacaagagaaatcagaggagaaaactgaagaagtgaaagaagaagccgaagagcccaaagaacttcctgaaaccagaa

SEQ ID NO: 104273 - DNA, 142 bp, Glycine max
  Clone ID: PAT_MRT3847_65174C.1
cttggggtagagtacatagcggcgtggtctgactctatgcatatgaacaccttgatctacgactgcatgttactcgtgcaatattaagatactgttctgtgaaccgtacttacgcgctcatctctgacaaagctaatggaag

SEQ ID NO: 104274 - DNA, 414 bp, Glycine max
  Clone ID: PAT_MRT3847_65175C.1
atccttttgataataacccttgggcaaagcaaggacaagaagagggagattgcgaagaaacaccaccgcacggccaaacacaagcccaacaaaaaaaacgggaagaggcaaacaaaaaagcgaaagaccgcaacggttggatccgcgaggagggagcatacaaaaaatacagaggccccagacgacaggcagaaactgccaacctaaactaatgagaatgacaggaaaccaaaccggctacgggggacacgacgagaaaccaagcacggcacacgaagcaagcccagccatacaaaaaagaagaacgaagaaaacggaagaatgaaaaggccaaaaaggaagccagaggcacaacgtcgaccgttgaggaaatggcaaaacctgttagcaccaagtggataaagtgaggagaca

SEQ ID NO: 104275 - DNA, 220 bp, Glycine max
  Clone ID: PAT_MRT3847_65176C.1
aattcggctcgagggggctggcgggggcgacgcctctcttgatcttcttcagcccgctgctggtcccgggcgccttaggcataagaatggccgtgaccgctgcgctggcgtgagcgacgtgcggactcgcagctctcgaagggttctcgtgaatgatgaactatctgcggcggatgccacgatggacgacgataatgacggtgctgcctgagcaagcgaa

SEQ ID NO: 104276 - DNA, 142 bp, Glycine max
  Clone ID: PAT_MRT3847_65177C.1
accagctttgaactttgatgattttatgtttggtttgtggttttaatcgatttacttggaagaggtgggcaattaattaaatttgtacgagcaagggcccaaatgagagtaattggttgaaaaacaagaatagtctgtgaat

SEQ ID NO: 104277 - DNA, 222 bp, Glycine max
  Clone ID: PAT_MRT3847_65178C.1
taaataaaataaaaaactacatatgcgtgaaaatcattagaagcacaggatagattcatcccctattcccccacccccgcttccctttttgggtttggaaactaacagtttaaattgtaatggatttgggcctaaaagacgtttcaaaataaaatgaaagaatttaaatataatttgagccaatttacaacttggaaacctacaaaagatgaatggaagaag

SEQ ID NO: 104278 - DNA, 465 bp, Glycine max
  Clone ID: PAT_MRT3847_65179C.1
ggctcgaggttacattaacttggaatgcttttatttttgctcatgcacaccatggccgaggggaagaagccgtgtgctgtttggaggcattgcacacctaacgtggaatcaaaccagaccaagctacctgaacttcatttcttactgcttgcagccatgcacgtttggtagatgatggactccgaattttagatacactggtgaatgtttatggctttgtgccaagcgtggatcatattgctcgcatagatgatctgtggggccgcagtgaataccttgctgaggcagagagagtgattaaaagtggatcctatggaccacaattcaatatatgctggtcattgttcagagcttgcgcagctaatggaaaattaggacttggaagaacagcatgaaaacttatcctggaaagagagcataacaacccatcagtttctgtgctttaatcaaatatctgtgcatcag

SEQ ID NO: 104279 - DNA, 169 bp, Glycine max
  Clone ID: PAT_MRT3847_6517C.1
gtatatgaatgaggtggttatgccacatctgtaggcaaagggccattaccagctgtacccacaaggcgaacatgcagttggtagaggactaggagcaagattgatagatctggacccttaaccttgcgaagtcttgacagaacctgatgctctaggggcttcggtacca

SEQ ID NO: 104280 - DNA, 331 bp, Glycine max
  Clone ID: PAT_MRT3847_65180C.1
cccacgcgtccgcttcaacaaaaagcagatgattggtaattatggctcctctgattgctttcgttgttgccatgatagttcattagtttcatcttgtttatcttcgcttcacatcatggtgttgctacaaacgggtgacaatgtcgtgcagtatgcggaaaattcatattattatccactggataatgctacaatgagtttgagacaatgatttggttgaaaaaaaaaaaaaaaaaaaaaaaaaaaaaaaaaaaaaaaactaaaggaaaaaaaaaaataaaaggaacaagcttactgcacacaaaaaagcaaatgtataaagtcggctaga

SEQ ID NO: 104281 - DNA, 232 bp, Glycine max
  Clone ID: PAT_MRT3847_65181C.1
gtatgggtccttggctattccttttgaaaaaccttgctcatgcttatagtcgggcccctttgggggggttactatagaggccagtcagggtggagagttaccctttaatggccccatgtatgtctacatggagacatctgcatactatggtaagagacaggtttaaccttgacttaacacaccatatgtatgtatcaggacttctcttggtcgggagttagaattatataac

SEQ ID NO: 104282 - DNA, 386 bp, Glycine max
  Clone ID: PAT_MRT3847_65182C.1
agaaatgcttcctttgctaattcagattactgtcccaacattgttagcgaggccaaattttcatctacctttcggtccaagtaccagttcactaccaccagcagtgctaacctactaacccacccaatgcaactaacttacaaaaaagcataacaggaacatagagagggtggaccatgaaaaaattgacaatgaactgatatcctgatcaaagaaaaagaaaaaagcgcctatttattattatcactttccatcggcagcttctgtgggctggggtatacatacagctctctgcaaacttcactaaatcttcagcgctgacgaaggccagtggccaatcctgacaaaaacacagactaactttgataagacgctcttttaaaatt

SEQ ID NO: 104283 - DNA, 249 bp, Glycine max
  Clone ID: PAT_MRT3847_65183C.1
tgaatctctctcacatattattacatcaaggatattgctcattcatcattgcttgcgtgctcagcgcaaggacgacgaagaagcatttaaaacgtatcgtcgtctaccctcctccgggtaacatcgggaacaaccctccaccaacctactatggaggccatcagtcagaaaggcacgtgtccgatgtcttcaattacagcaactactccgcttacacgtctccaccagcttttcataatcactagcatg

SEQ ID NO: 104284 - DNA, 191 bp, Glycine max
  Clone ID: PAT_MRT3847_65184C.1
gtttgccaagctatccagtctactacaacattatggtttcacgaaggctcatgctgatcacaaccttttcacaaaggaaccaatgtcgatttcatcagggtctaattggatgcacagttcaatgtgacttggttttgtactaaaatttgtcgatgattttaccattgagtataggatatgctaatttagca

SEQ ID NO: 104285 - DNA, 452 bp, Glycine max
  Clone ID: PAT_MRT3847_65185C.1
gtttacccacgcgtccgattaacgaaaactatgcaatgttttgttaaattaaccgcgtaacatagaagttgacacgttccttgtttaacggagagattgcttctgcttccgctttcctgtgtggcgaggaacacggtttggatttgttttttaatgtaagaaaattaagtatacataaagaggtggtatttttttttgtgtatatttgaataaattgaaaattattaataaatttgttacggtgaatgaacatgtaaacaaattaaaaagtattttaatcacggattgctatgataaaaaattctttacctaacattataacaaaattaaactgtttgtggttgacaaaaacaaaattaaacttttattatttgtaaattatgcacgtaagcattgaaccatgacttcactgaaaaaggcctagcacgcctcgcaacacatagtaggctcaa

SEQ ID NO: 104286 - DNA, 921 bp, Glycine max
  Clone ID: PAT_MRT3847_65186C.1
agaaattagagagtctgcctgcaatttgaatacttcatctggaagagatatcatcgtccagtctaaatcttgacgcagcgcacgcgtttatgctcaaatgagaattcgcgacggtaaagactgatcatatggctcgtgccttgtccaagacatatagatcaccagtggtggatacaatacaatctctgccacatcatcagcagattgtactctgctcttctatgaaacattttcgtggagccaagaaagatgcaatccttggagagttgtataaatcgtatgtgggggtatgcaaatcttgtttaattcctccagcgggaatcttagaattttcaaacatgtgcagagtgctaaatgaccagggccttattaaacttggacaatctcgagaggataaattgagaagagtgtcacctaaaatagacgagggtgatattacgtttgcattgcagggaatacggttttttcaaaactgcctttaatgattctactgatagactggtagttttcactcagcttgacgtgagatcaaagactcttctttagattaagataagtttatttggttcaaaccggtgtcttcaactattcattgtatgaagcggtatactcgaagcatggagttgaaatcacttgtgcaaaattttcacccaataagcaaaagctgttggagaattttttttttttttttgctattttattttttcaagagctgagttgcattgtgtagtttatttagctgatcgcacttagtagtaataagttatagggataaggttttattggtttattttctcaggagcagaaaatagctatagatacatttatttatactaaaattaattctcaaatgtaaacatgaatatgtattattgaagttgggagattataagatattcctctgaatggttgtaatcaaaa

SEQ ID NO: 104287 - DNA, 343 bp, Glycine max
  Clone ID: PAT_MRT3847_65187C.1
gcggaatggagaagaagaggatttgagaggagacgccacttcaaggagaagatgagtcaagaagaagctcaccaccataggaagccatggataagagcttgaaggtagaagaagatgagtggaaggagaaggagagaaggagcacaaaattttatgcctcaaaagaggtctgaacattgaagtataattttcaaatgatcaaagttgaaaaaatgcacacccatgacctttatttatagcctaagtgtcacacaaaattggagggaaatttgaacttctattcaaatttcacttgaacttgtggagccaaaatttcacgaattatgactagtgaattttagct

SEQ ID NO: 104288 - DNA, 346 bp, Glycine max
  Clone ID: PAT_MRT3847_65188C.1
acgcgttcctcacctacgaattctgctaaagcgttatgagattttttgggctcctatttctaacttttgtttcaaaaaggctaacttggcaatgaccctttcctgtatgaccatcgcccttgaggtgggaagccttttcgacatatcaacgtattgccatgagccaggacctatgtatgaattcccccggaataacatgaatttttactgatcagagaggacatcaaagacacacggatcctaaccgagttcctcatcctgaaggggttgacccttcaccttatacttcgcttccttggtggcatgctacatgcttggaaaactctaactggcaaaaacattaccc

SEQ ID NO: 104289 - DNA, 235 bp, Glycine max
  Clone ID: PAT_MRT3847_65189C.1
ggcacctaaactaccttggttggttttggtgcccaaggaaatcaagcctaaaatcggcttccgaagacttcagccacgccctgaaccaggaacccatccatttcactggcacagattatgtcaaagatgatttcagaggggaacggaattaagaaaatgggtttaaaggtgatcaacttggtcctgaccgtaaaaggttaaattttgaaaaaggaggcttttaacattgaaaaca

SEQ ID NO: 104290 - DNA, 493 bp, Glycine max
  Clone ID: PAT_MRT3847_6518C.1
acggctgcgagaagacgacagaagggaccacttgtctgttttgcacatactttgttgagtttgttctattgaccacacatcctctacttcttttagttctcacggtagtcttcagaaaaaagtccatgcccttcatcatctccctttgttctgttactcacttggctcttttttctctttctctgtgtgtgtcttaaatccgcattctgttctaccgcaccctattattctatctttatgttcagttctcattgtcctttccttttatttttttttaccttcacttgtcacccttgaagcagttgttgttgacttgtttgtttagttgtagttgttaagagagaaaacatatgatggattatgtttgtcaatttcacagcggaaaatattatttatatattaagacttaagcgtcgtacatagaaggatttacaattaccataattacataataatacacaacatgaaatcagcacacgattaccctatttat

SEQ ID NO: 104291 - DNA, 3968 bp, Glycine max
  Clone ID: PAT_MRT3847_65190C.1
atggaggcaagtgttcttcttggaaacagttatggggtggtagctcgcgtggctgtggcgggtcttcgtggtggagtgatgggttcggccatatctcccttcgaggcatatttgtctcggtcatggcgagctgtggagctcataaaatttgagtctggaactacgaccctatattttgtagataatcaccatatgaccattaagaaaggctccttttcagacgttcgagttaggtcaaggaaagctactttatcagattgctcctttttacgaactgggattgacatatgtgttctctcagcctctcagggtaatgacaattcagatgaatctagtgctaatcatgtgtggcttgatgctaaaataaattccatacagagaaaaccacataatccagagtgctcatgtcagtattatgtaaacttctatgttaatcaaggttcacttggtacagagctgagaactcttaggaaggaggttaaagtagttggaataaatgaaattgccatcctccaaaagcttgaacgtaatacttgtcaacacaaatactatcgatgggaatcatctgaagactgctccaaagtgccacatactaaattgttaggaaaatttatatctgacctttcatggttggttgttgcatctgctataaggaaggtttcattctgtgcaagatctgtggaaaacaatattgtgtatcaaattttagggagtgatgctacaacctcttcattatacatggattctgaaataagtgttgtgaactttaaagtgaacgaagacggcatgcaaatgcctgttattcatctagttgatttatttgagactgacaccaatacaagcggcgataaacatgattcccactatgatgaagtgccatcatcttatggttttgagggcttacgacgatccaaacgtaggaacatacaacctgaacgttactctgattgtggtaatgtttctgagataaaggttggtaatgttcgaacctggccatacaagttaaacaaaaggaaagatgatgatggtggtggtgaagagtcattgccattagcacaagagaatagtgacaatagtcaaaaggtcaatgaactgagttcttgccgggagattatagtgtaccatgggaggaatgaaacgctggaattaaagtcaggtgaggccaatcaaactcaacttgctagtgttcctcttcttcaagaaggtgattcattagcccttgagcatcatcatctcaatgacaatgttactagaagaagtgatgcatattatagcacccctaagcttaagaggaagagattagttgatctggaagctgatgtagattttgatcctggaagggaaggcataaattccaataaaggagttagcgagaaaagacatggttcatcatggtattcaagaagcagaagccatgctgcagaacacagttataaagacagaagcttaaatgcaactgcctacaaggaaatgatagattcatacttgaaggatgtcaatagaacaccaactacagaagagccacctgtaatggaccagcggaaggaaataggcaactttgggcaaaagaaggaagcagaaatacctgaaagagaggacgaggaacaaatctctgagatcgatatgttgtggagagaaatggaaatggcactggcatcaagttatcttgaagaaacagagggttcaaatagtgccaattttgccaagactacggaagaatctaatcgcacttgtccgcatgattacagattgtctgaagaaattggaatttattgctacaaatgtggctttgtgaaaaccgagataaaatatattacgccacccttcattgaaatgcaacgctcagtgaggcaccaagaggaaaagcaatgcaatggaaaagatacaaaggaaaaggctagtaaagatgatgatttccatctgctctcaactcatgctcctacagatgaacataactctatggaacatgataacgtttggaagttaattccccaatttagagaaaagttgcatgaccaccaaaagaaggcttttgaatttctttggcaaaatattggagggtctatggagccaaaacttatggatgcagaatccaaaagaagagggggttgtgtgatatctcatgctcctggagctggtaaaacttttctcatcattgcatttctcgttagctatttaaagctattcccagggaagaagcctcttatccttgctccaaaaggcacactttacacttggtgcaaagaattcaacaagtgggaaatttctatgccagtgtatctgattcatgggcgtggtggaactcagaaagatactgagcaaaattcaattgttcttcctggttttccaaatccaaataaagatgtcaagcatgttttggactgcttgcaaaagataaaactgtggcaagagaaaccaagtgttttggtcatgagctatactgcatttttagcattaatgagagagggttcagagtttgcacacagaaaatatatggctaaagcattgagggaaggtcctgggatcttgatacttgatgaagggcacaatccaagaagcaccaagtcaaggttgaggaaagggttgatgaaactgaaaacagatctaagaatactactttccggtacattatttcagaacaatttttgtgaatacttcaacacactttgcttggcaagaccaaagtttatctccgaagtgcttgatacattagacccgattaccagaaggaaaagcaaaacagtagaaaaggcaggtcatttgctagaatcacgagctagaaaattgttcttagataaaattgctaagaaaattgactcgggtattggaaatgagaggatgcagggtctaaacatgttgagagaaaccacaaatggttttgtagatgtttatgagagtgaaaattttgatagtgctcctggtttacaaatctacacgttgctaatgaatacaactgacaagcagcgtgagattttgccaaaactacacacgagagtggacgagtgcaatggttaccctctagagctagagcttttggtaactcttggatcaatacatccatggttggttaaaacaacctcatgcgcaaataagtttttcactgcagaccaattgaagcagctagacaaatacaagtatgatatgaaagcaggatcaaaagttaaatttgttctgagccttgttttccgtgttatgcagagagagaaagtacttatcttctgccacaaccttgcacctgtgaagttattgatagagttatttgagatgttcttcaaatggaaaaaagatagagaaattctgctgcttagtggggaactagacctctttgaacgcgggaaagtgatagataagtttgaggagcatggaggagcatcaaaggtactccttgcttcaattacagcttgtgctgaaggcattagtttaacagcagcttctagagtgatttttttggactcagaatggaatccatcgaaaacaaaacaggctattgcacgggcttttcgtcctggtcaagaaaaaatggtttacgtttatcagctcttggtaacaggcacattggaggaagataagtacaaaagaaccacttggaaagagtgggtttctagcatgatttttagtgaggcttttgaggagaacctttcacattcgcgagcagtgaacattgaagatgatatactgagggaaatggttgaggaggacaagtctaaaacaattcatatgattctaaagaatgaaaaggcttcaacaaattgaagagaggagcttgcgcgatacttgaaacaggagcagggacagtggaaaataaaggagccatagcgccatctgcttgcttatgtaatgtaacccaatctgtctatatttcaatacacaccccattacgataaaattatgctagggcttaatttgaattgatttctattttatcggaaattttcaacagaaaaaagtatttgaatttaattttcaag

SEQ ID NO: 104292 - DNA, 462 bp, Glycine max
  unsure (1)..(462): unsure at all n locations
  Clone ID: PAT_MRT3847_65191C.1
cccaaactttgacatggaccccgggcacagacanttngacncgantaatgtttaaaatatagggcncagggatnccncncnttaaaaaaaaaagattntaattaaatgaaatatgagtaacatatancaaaatatttaaattaatggtatattcatctttttaaantanccttntatgttttttgaagtgtaatagttgtgtaaaggtnatgactgaagtgttcaagccancaaaaaatattttttgaatcagacccctaataagaagctatgaagcacggggatgcctgccggtggccttccccgtttttggtactgcaatggcacgggatgggaatggccaggggacggngttgacttattgggtacgantgatcaanacgggggcagtgccttcattttgtggggacgtattggggacggcagtggcctacangggcatccctatagtccaaaatttat

SEQ ID NO: 104293 - DNA, 864 bp, Glycine max
  unsure (1)..(864): unsure at all n locations
  Clone ID: PAT_MRT3847_65192C.1
gtgaagccaaaggaaggacgtgattgagtgagcaaaatggaacctgaaagcccagctttgttgcttattttgtttgcaaccctactttggttcttagccacaaccctttccagaggcaaatctccaccaccctctcccaccaccattcccaaagcatatcctgtcatcggttcggtgttctccatcgccgccaacaaccgccgccgcatccactggatctccgacatcctccacgcttccccctcctccaccttcgtcctccaccgcgccttcggctcccgccaggtcttcacggcgaaccccaccgttgtccagcacattctcaagaccaacttccctgtgtaccccaagggcctgactctgaatcgggcccttggagacttcctcggccagggtatcttcaactcagatggcgctggatggaaagttcagcgccaaatttccagccacgagttcaacactcgcgctctccgcaagttcgtcgaaaccgtggtcgacgccgaactctccggccgcctcctccccctcctcgccgccgccgccaaaaacaaaaccgtcatccccgaccttcaggacatcctccaacgcttcacgtttgacaacatctgcaagatcgcgttcggcttcgacccggagtatctcctcccctccctcccgttaacccccttcgccaccgccttcgacgacgccaccagaatcagcagcgagaggttcaacgccgccttcccctctcttctggaaaatcaaaagcctnctcaacctcggcttcgagaagcgcctcaagaaagcgatctccgaggtaagaggcttagcagggagaatcatcgtagaaaagaggaaagaatttcaagagaaagaaactct

SEQ ID NO: 104294 - DNA, 261 bp, Glycine max
  unsure (1)..(261): unsure at all n locations
  Clone ID: PAT_MRT3847_65193C.1
taaataacaaaataacagaagcaaaataaatttaattgacaacacntgaataatggattataacatacaataagcacaaggcaaaaataaattagaganngacagatatagcctgggttgangcgcgtaaacgctatccttagagagaaaaatgttttagagagaaaatgttttagactttcttcttgcatagtcttttctacagtaacatgatgttgtatcaaaatatctataatggatatgattganttccttttaagt

SEQ ID NO: 104295 - DNA, 549 bp, Glycine max
  Clone ID: PAT_MRT3847_65194C.1
aactagtctcgagttttttttttttttttttgataattaggctaaaaagccaccaaacacgtattattattttaatataaacgtacacaaacaaactctaaacgagttttttttttttttgggggttgttgttgttacaaaccccaagcaagtttgaaaagtgggtcacaataatgaaataatatatgaggcatttcagatggccacactatgcaaaacaacagtttaaatggtaaggtcaggtcccaaacccgacaaaacacccattaaagtccttcactgggggttaagtgtcattttaagaaaattgcttcctcttcttttccaggataaaaaaacacaagcccgtggcatgttccctttggcctaagccaattttggggggcgtacatttctcgggtggggaaccaactttggtcaaactgggttaaaatcgagggccacgaggggggcaatccaaaaatggatgtggattcaagaattttaatggggtggaaagctaaaaaagccccgtaaaattgttttggagacaatcgcgggaacattcct

SEQ ID NO: 104296 - DNA, 481 bp, Glycine max
  Clone ID: PAT_MRT3847_65195C.1
ggtagcgaatgcaaaattagttgatataaaaaaggtttcttatactatatagtacaatttaacgaaggcatctctaacatattacacaccagaaaaagatcatactatataaaaaaacattgcaactatcagatgattgattaacttcaaagaatttttgtaaatatactgttgcgctatattggatgaggtaatgctccttttactacctggcatctagcattgtgacagtgacttggttcacagtgcatgattcttcttgtttacttgaagaagaatcagtttccataggattccttcctagacaaaatccagggtttttgggttgtgacattgatgcagtgtcactactcagcatcaagaccacagaagccattgttggcctatcttccgcacgctcttgcacgcataagagaccgacttgtatgcatctaagaacttcagattctgaatatgaattgtcgatcgacggatcaatcag

SEQ ID NO: 104297 - DNA, 687 bp, Glycine max
  unsure (1)..(687): unsure at all n locations
  Clone ID: PAT_MRT3847_65196C.1
gttaaagctgtgtatatacacgagtttctgttggcatgcgatttaggatgctatttgagacagaagaatcaagtgttcgccggttggctgggatgagtccactgcaggggagaggcagccaagagtttccttgtgggagattgaacctttgacaacattcccaatgtatccatctccattccccttaaggttgaggcgcccttggccatcgggcttaccttctttatatggtctcaaggatggagacatgggcattggttctccattcatgtggctccaaggtgggcttggggatcaaggaatgcaatctttaaacttccagggngcttggtgttacaccatggatgcaacctagacttgatgcttctataccaggtctccaaccagagttataccaagcaatggcttcttctgcattccaggaaataaggacaatggatccttcaaaatcttcgcaatctctgntgcagtttcagcagacttcgaatgttcccagtgctcatgcttctgaggtacagaggncagtattaccacagtctcagcctcaaacacccttctacaaattatcaagaaaaccaggtgcctgctcagtcacaacttctgcaacaacagttgcatcgttaccacccatattatgatccgcggcaacagcagcagcaacttaaaaacttgcctgttcagcagcag

SEQ ID NO: 104298 - DNA, 445 bp, Glycine max
  Clone ID: PAT_MRT3847_65197C.1
tacggctgcgagaagacgacagaaggatacggctgcgagaagacgacagaaggggatcataaggtgccttcattgagatcaactctatccgccaagaatttgtttgcggggaggcctattctgaatcaaatcacggaattctgcaatgaattgaagaaattagcaataagagctaaggagagagagaatgctgaaaatttgagcccaaaagagagtgaagaggttgtggagaagaccccttgttctgttcaagctttggctgagtccgatcaaaaagagaaagaaaggaagccactgcttgaagtgagtaagactgagagattggaggggatgagtgttaaagggaagcaacagagaaaaaaaagacctgatgaggcagagaacaacaacatgtcaataactcttgacctggagaatctaaagcacaagagggaggggaccttac

SEQ ID NO: 104299 - DNA, 844 bp, Glycine max
  Clone ID: PAT_MRT3847_65198C.1
ataatcctagggcaagcccatctgaatttgtcattcctttggccaagtacgttaaagctgtgtatcatacacgagtttctgttggcatgcgatttaggatgctatttgagacagaagaatcaagtgttcgccgatacatgggtaccataactggtattagtgatttagatccagtccgctggccaaattcacactggcgttctgtgaaggttggctgggatgagtccactgcaggggagaggcagccaagagtttccttgtgggagattgaacctttgacaacattcccaatgtatccatctccattccccttaaggttgaggcgcccttggccatcgggcttaccttctttatatggtctcaaggatggagacatgggcattggttctccattcatgtggctccaaggtgggcttggggatcaaggaatgcaatctttaaacttccaggggcttggtgttacaccatggatgcaacctagacttgatgcttctataccaggtctccaaccagagttataccaagcaatggcttcttctgcattccaggaaataaggacaatggatccttcaaaatcttcgcaatctctgttgcagtttcagcagacttcgaatgttcccagtgctcatgcttctgaggtacagaggcaagtattaccacagtctcagcctcaaaacacccttctacacaattatcaagaaaaccaggtgcctgctcagtcacaacttctgcaacaacagttgcatcgttaccacccatatagtgatccgcggcaacagcagcagcaacttaaaaacttgcctgttcagcagcagttaccaaatgtcatctctcctttgtctaa

SEQ ID NO: 104300 - DNA, 298 bp, Glycine max
  Clone ID: PAT_MRT3847_65199C.1
agaagagcttggttgatgtttcttggtatggcctatgggatgaatgaacgatataatgcgtttctgtaattcatttacttctctcaaaaaaaaaaatatatgcctgtcatccattactgaacatgttgacatgtgaattaactccagacctttattttcatgtcttccatatttacacaaagctctaccaaatatatgcttcactagacatctgcattattgccattatgttcaaatatgataaccgttacactgattacacaatctatacttcatatacttaaaatttttaatccta

SEQ ID NO: 104301 - DNA, 251 bp, Glycine max
  unsure (1)..(251): unsure at all n locations
  Clone ID: PAT_MRT3847_6519C.1
ttaaaaaaaaagcangcagcatttgggggtttttaatggcttaaaatttacacaacaataagaccaccacttggaatggtggccccttttattaatgaacaaaaaaattacgacatgactgagggggggggactaccttctttaataaacaaccctgcaaaatttttttttggcttttggcagcaacctgcttttttattaggataagcacttataatttttttgaaaacagaaggatctttatacttttt

SEQ ID NO: 104302 - DNA, 448 bp, Glycine max
  Clone ID: PAT_MRT3847_651C.1
gcatggattttgctaccatgaggattctaatcttctcttgtatgaatacatggaaaatggaagccttggagaacaacttcattcaagtgcaaccactagtgcattggattggggtagtcgatataaaattgctctcggagcaccataaagcttatgctatcttcattatgattgtaagcctcagatcatccatcgcgatataaagtcaaacaacatattgcttgatgaggtgtttcaggctcatgttggatactttggcttggctaagttgatcgatttttcctactcaaaatccatgcctgctgtggcaggttcatatggctacattgccccagaatatgcttacaccatgaaggtgactgagaagtgtgacatctatagctttgtggtagttttgctggatctaattactgtgaggttacctgtccaacctttggcacaaggtgga

SEQ ID NO: 104303 - DNA, 498 bp, Glycine max
  Clone ID: PAT_MRT3847_65200C.1
ctctgcttctgtcgcggctaatgtaataagacactattactctagatttagcgaagagagttaatgaaaaggcacacataattattatagttataggccatgttgactctagataagtgcactaccagtggctatctgagctacaatcttggaggcattgacacacgtgatactgaaatattatagaaggatgctgacgagatgaactcaatgcttgtcaagattgcctgcatagctatgactatcttaacgctgagcgcgaaaaatgaataacaatcgatactgcctagtgcaagatgcaaaccaccatgctctattgctcagctcatggactccgatatacacagggacttgattaacaacatgatgactgtgacaactacagctgactgagccgcacttataattgagttcactactgtagagggagcatctgtaactatatacgactgacaaactcgcgaacatgctttgacctcattgacacttggtgtaaaa

SEQ ID NO: 104304 - DNA, 142 bp, Glycine max
  Clone ID: PAT_MRT3847_65201C.1
cggattcggctcgaggataaaccctaatagtcacaccgtctcttcaaatatgtgtataaagaaagtctctcaatctcacgaccccgaagaatgtcaagacgtaaagcatctcttgccagtggctactccaaccgatggctcc

SEQ ID NO: 104305 - DNA, 818 bp, Glycine max
  Clone ID: PAT_MRT3847_65202C.1
agctcggaattcggctcgaggtggtcgtggtcgaggttcttataacaatagaggagacaactccaataatgaaaggcaggactctggttatgggggcagatggggttctaataatacaaaggactcggatgatggtttaagcaattttccaggggccaaggttcagaattctcctggaagggaagcttttcctggtggttggggtggtggtggtggaagcggtggaggcagtagtggttggggagggggaggaggtggagctagtaacagtgacaatggtggctgggggggacaagcgagtggtggtgctggtccaagtgatggtgaacaaggaagctctggctggggatctgcccccaagaaagcagcatcagggaacggatggggatctggaaattctggcggccgtggttggtgaactcacctcacctgtgagaacttagtttagctttacccacaggcggtaggttggtcattatgtaatcctctttttcccactgaaatgaatggatgatgatatttgggtagtttatttttgcaatgtaatgaattctgactgtttctttgaacttggatccctgcatggtgggtggttgggggtttgtcatgtaaagccaccacatttgttcataactacatcagctgtgacgtccggaggattattgctttgaatttcaggggagcaatttccattcctgaaacctgagcacgtttgcatgcagttttaacgggatgcagttcacgttgagaacggtgttcttgcacctctcatattggaatataccaaatagtgtccgcattataaatgaattcaaaaa

SEQ ID NO: 104306 - DNA, 1159 bp, Glycine max
  Clone ID: PAT_MRT3847_65203C.1
acaggacggagcggcgcgggttctggatcggttttttgcgccgctacttcgaagcaccctgcccttttcctcctcctccgccaccctccgtcctcctccccctcacgtgccgccgtggcggcttcctcccttctccgctctcgcgtcacgctgtctccacgtgcaacttcgaccgtggcttcaccgtgatcgtcgccatcctccaccgcatcgagcccctcgacaactccgccatctcgaaaggtgtgtcccccgccgccagagactccgcgaagcagaccatttccaccatgcttggattgttcccctccgaccacttttctgtcatcgacactgtctccaaacaccccctccaccgcctcctcttctcctcccacaggacgaggtgaatacagaaacaatgggaatcaggacgaacatcctagtggagtgcctcgtccatatggtggtggacgaggacgtggtcgtggccgaggttcttataataatagaggagacaactccaataatgaaagacaggactctggttatgggggcagatggggttctaataatacaaaggattctgatgatggtttaagcaattttccaggggccaaggttcagaattctcctggaagagaagcttttcctggtggttggggtggtggtggaagcggtggaggtggagctagtaacagtgacaatggtggctgggaacaagcaagtggtggtgctggtccaagtgatggtgaacaaggaagctctggctggggatctgccacaaagaaagcagcatctgggaacggatgggggtctggaaattctggcggtggttggtgaactcacctcacctctgagaacttagattagctttacccgcagtaggttgatcctgaagtaatccttttttccccctgaaatgaatggattatgatacttgggtaatttctttttgcaatgaaatgaattctgactgtttctttgaacttgggtccccgcatggtggatggtggttagggtttgtcatgtaaagccccacatttgttcataactgtgacacacccggagaattaatgctttggatatcaggggagcaatttccattcctgaaacccgagcatatttgtatgcccccgccgagcgaccagataagttataaagggatgcagttcccgtt

SEQ ID NO: 104307 - DNA, 1268 bp, Glycine max
  Clone ID: PAT_MRT3847_65204C.1
agttgatgaacttttgaagatggagaaagccgagtatccgatgcgcatagtctatagttttggcatctcccatgaacatcctggcacatttatattaacttacataagaagtacaaatccacaccatgagtacattgggctttacccaaaaggattcaggtttaggaaaaagatgtttgaggacatcgataggcttgtagcatattttcagaggcatattgatgatccccagcatgattcagccccttcgattagatctgtgtctgctatggtaccaatgcgaagccctgcaactggtggctcatctggggcatctgggggtagtggttggggtggtggttcaaacagtgagggtggctggagaggtcactcttatgataggggggatcgatcatctactcctgcccaagacaggacgaggtgaatacagaaacaatgggaatcaggacgaacatcctgtggagtgcctcgtccatatggtggtggacgacggcgaggacgtggtcgtggtcgaggttcttataataatagaggagacaactccaataatgaaaggcaggactctggttatgggggcagatggggttctaataatacaaaggattctgatgatggtttaagcaattttccaggggccaaggttcagaattctcctggaagggaagcttttcctggtggttggggtggtggtggtggaagcggtggaggcggtactggttggcgacggggaggtggtggagctagtaacagtgacaatggtggctgggaaggtgcagctagtggtggtggtcatggtggctgggaacaagcaagtggtggtgctggtccaagtgatggtgaacaaggaagctctggctggggatctgcccccaagaaagcagcatcagggaacggatgggggtctggaaattctggcggtggttggtgaactcacctcacctgtgagaacttagattagctttacccacagtaggttgatcattaagtaatccttttttccccctgaaatgaatggattatgatatttgggtaatttctttttgcaatgaaatgaattctgactgtttctttgaacttgggtccctgcatggtggatggtggttagggtttgtcatgtaaagcgccacatttgttcataactgtgacacacccggagaattaatgctttggatatcaggggagcaatttccattcctgaaacccgagcatatttgtatgcacccgacgagcgaacagataagttatacagggacccagttcccgttgag

SEQ ID NO: 104308 - DNA, 110 bp, Glycine max
  Clone ID: PAT_MRT3847_65205C.1
gttggcaagtgtgttcattatttgaccatactcactctcactccccagattatactagctgcagcagcgacaagcgctgtctcagcagtccttctctttattttgggttc

SEQ ID NO: 104309 - DNA, 269 bp, Glycine max
  Clone ID: PAT_MRT3847_65206C.1
ataatacaaatcaatctgtatgagtaacattttcctatagcaggacaaaaagtagcatatcaatcggaactacttactacttacacagaatgatatgaacaaatgtattaattaaaacaaaatgtacgatttttgtatcatataatagagcagaaggaattcatcaaaacttcagtacaaagttgagcacacacttcatagatctggggatcgggcagattctgcatataatatcgactggattttccattgcttgagcatatcaagtt

SEQ ID NO: 104310 - DNA, 269 bp, Glycine max
  Clone ID: PAT_MRT3847_65207C.1
cgctcttggaacacagaaatgctagaaaatatctgaatgcacataaggaatgccgtaatacactttagcttcttctgctcagaactctaccgcttggaacatggcatcctacccgaatgattcatgcctagtgactcctacaccggagagtgcaccatgccttcaacaccttcttcagacgaaaccttatgccctagcacgtacatagggccgtataggtgcaactctatccacactcgccaacaactatgtccgctgtaggacttacc

SEQ ID NO: 104311 - DNA, 1771 bp, Glycine max
  Clone ID: PAT_MRT3847_65208C.1
cgaggatatcttttagttcatacaaatggcgggctcaaccaaatgcgttctgggatatgtgatatggtagcagtagctcgaatcataaatgccactcttgtaattccagaacttgataaaaggtcattttggcaagatactagcaatttctctgatatttttgacgaagagcattttatgaattctctagctaatgatgtaaaaatcattaagaaacttcccaaagaattggttaatgcaaccagagtggtcaagcaattcataagctggtctggcatggattactatgagaatgagattgctagcttgtgggaagattaccaagttattcgagcttccaaatctgattcacgattagcaaacaacaatctaccttcagacattcagaagcttcgctgccgggcttgttatgaagcacttcgcttctctcctcgcattgaacaaatgggaaaattattggtggagaggatgaggtcatttggtccttatattgcattgcatttgcgttacgagaaggatatgctcgcatttagtgggtgcactcatgatttatctcctgttgaagctgaagagctacgatcgatcagagagaacatttcctattggaaaataaaggcgatcggccccctggcgctgaggtccaaagggctttgctccttaactccaaaggaagttgggatttttcttaccgctctcggatacccatcaacaactccaatatatattgctgctggagagatatatgggggcgagtcccacatggctgaactgcattcccgatatccattgttgatgagcaaggaaaagttggcatccatagaagagcttgaacctttttctaatcatgcatcccaaatggctgctcttgactatattgtatctattgaaagtgatgtatttatacctttcttattccggaaatatggcaaaagctgttggtgatgtacatggcatgcgtctattttatcgaccggtagatttaaacaagaaagcccttggtcatctgatcgatcccttggatcagagaatgatcacataggggaagaaactattgaatagtattattttacatgtgtggcacagacatggttctcccaggaagagaaaagggccaatttctggaacaaagcacatggacaggtttcggtcagaagaagccttttatgctaatcccttgcctgattgtttatgccggacagaaacagaaccaccgcctctgaatgtctctcagattgtttgatagatcagatactactgaactttttccttggaaataatactccttggagaaaagatggcacatgtgtaatcaatatacacaaagtttgagcataagatctgatatgcagctggaaggtggtactgtggtggcagagtgtatataccggtatcgctgttacacgtacccttcaatttgggggaaaaaataaaggaaaagaaaacccttattcgggttttgacataaaaaattagagattgggatgagtagttcatgggtctagtagagggcaggatggagatttgagatgactggattcatttgttatgtggacatgccttagttatttatgaagaggtatagtgtagagcttccagatatggccagggatctcaatcacccgttattgaatttcttctagagcaattttacatagttccacattttgtaatctgttcttgttgaaagacaacaaaatgcaaaaatcttttattgttcccaaaaaaaaaaaaaaaaactcgagactaaaaaaaataaaaaaaaaaaaaaaaa

SEQ ID NO: 104312 - DNA, 602 bp, Glycine max
  unsure (1)..(602): unsure at all n locations
  Clone ID: PAT_MRT3847_65209C.1
attaggtagttttaaaccaccatttatttatagtctttactaatttttatgtgacacatccttaagttttctttctaacttatgagaaaaacaaatactacttaattatgtgtcatataaagaatggttaggaccacttgataattttttcacacacacaaaggcctaactaagcttttataagaccaatgtatggttgcaccgcagagcctatccacaaacttccttcatgttcttccacttcactaacagagtccagttgtcgtccatattctccatctaatacctcaatggccctccccttttcatcaaatttaattgccacaggatctgcattccaaggaagtgtggtttcgatttcattttccaatttctgaatcaatcccctgccactgttcagcgctacccaaaattctcctttggcgttcctctttatgttatctggngagcgtggaacctgtgcaaaaggttctatattgttgttgttggtcttggagtctctaacttgaatcttgagaattttaaaagtggttgattctgctactataatgaaggaattgtccttgctaagcgccacgccgttagggaatgctaaacctttg

SEQ ID NO: 104313 - DNA, 444 bp, Glycine max
  Clone ID: PAT_MRT3847_6520C.1
tggacgcctgcggaccggtccggaattccgggtcgcccacgcgtccgagaaggtttaacatttatggccgtgtttaattatagaagggaccatggaaggaatggagaggatgtttttggtgtgaattaaaagaaacaaatgaagcaatgtttttgtgcagaaaaagaaaaaaataattatttttttgtgaatttctcatttttcttatgattgtgtatgtgtggaactgttaagcatgaaagttttcttggatcttgcagaggacgacaagaggactcagggcgtgtggggcggagtttcagccttacttcgttctcggggatttgtgggaatcctttcgggaatggagtgcttatggcgcaggagtgccacttgtactgaatgacaaggatagtgttgttcagtactatgttccgtatctgtctgggatccaaatttattccc

SEQ ID NO: 104314 - DNA, 248 bp, Glycine max
  unsure (1)..(248): unsure at all n locations
  Clone ID: PAT_MRT3847_65210C.1
gatggataattaaaatttatgatattgacaaagtactatatcnngaccttttggngcaacaatgtcttgatnaggagttagaagaagaaatgnaaaattatataaatgaaaccgagaggacaaatatcgtcttttttgatggggaggacgatttgggtaggcctttggtgttgngatagaggaaagagaggagaaggagagaacaaggaaggagtcgggggagaaggtgangaatatgtatgagggaa

SEQ ID NO: 104315 - DNA, 257 bp, Glycine max
  Clone ID: PAT_MRT3847_65211C.1
atcaatcacttaccatcttttgcaatttccatttttcttgccttttgggtgtcattttgcgttccatttttatacattttcaagtgggcatggattagtgtcttgaggacatgaaaaggtggtaacttgaagttcccttcatactaatttgatactaacaccctgatggtatttctgcgttttcaattaacgtgattatgatccgttaatgttcatttctcaattccttttttgttgattttaattcaccataattg

SEQ ID NO: 104316 - DNA, 448 bp, Glycine max
  unsure (1)..(448): unsure at all n locations
  Clone ID: PAT_MRT3847_65212C.1
attttatgnnnnaccaggtcttctgacagttgaaggagcacgtggtgctggtctgggtgctggtttacgtgctnnnggagcaggacgtctaactggtgcagcacgtttagctggtgcaggacgtcttggagcgggtgcacgcttagcaggtgcagaacgtttgactggtgcacgtttaactggtgcggcacgtttaactggtgcagaacgtttgactggtgtacgtttagcaggtgtagaacgtttaactggtgcagaacgttttactggtgtacgttgtgcacgcttggcaggtgcagaacgtttgactggtgcacgtttagcaggtgctggcttacgaactggtgatttgatacctgatccaatcttcttaactttgtttacacctgattttgctttgttaccaatgttacgtacaatattttttgcactagtcttggtctcgtgc

SEQ ID NO: 104317 - DNA, 411 bp, Glycine max
  Clone ID: PAT_MRT3847_65213C.1
cttctttcatttttttcaacattttccacgagggaaaaagaagaaaaaacatcgtgagaagatagaggaatcattagcagcagaagggtgtgtggatttggaacaaaatggcgagagaagcattcattttcaaggaaagcgccttgttatctctcagagcgttgaagagcttgttgatgttgatatttgcggttgctatgctgctgctgctgccattcagagggcggaggagggtgccaccggccgagaaacccagcggcaaagaggagtgccaccggaaaggcgcggtggtgcgcatgccggccaagatggtgccagggaaaagtggtgctggtgcggtggcagcaaggagggagttggccataaggagggtggtggaggatgatgatgatcaaagatgtgtgagagagt

SEQ ID NO: 104318 - DNA, 195 bp, Glycine max
  Clone ID: PAT_MRT3847_65214C.1
ggggggagaaaagaattttttttttagccccttactttaaatctcccgccctgttttgtggatgaaacaaccccaggacccccggggtggattttgggcaggaatttcctttgtggaaaccacccgggggaaaaaaattaagatccgcttgaggccccttttcaatattttgttggaaacggaccgggggggagc

SEQ ID NO: 104319 - DNA, 395 bp, Glycine max
  unsure (1)..(395): unsure at all n locations
  Clone ID: PAT_MRT3847_65215C.1
ggtcctcccaagtataatgatncaanngnttattagttactcaanganncccgntatcgaatnnnnaaatcgngatattccattgcntggaagtcncgtacgncttggganatnaaatcggaaatcctcaaanganntaagngacgcatcganacaaacnattacctnccntaattggaaccnaggaagttgagtgangggtggacggaancatagatatccntaancgctggnttcaagntacctaggacatanctnggnnaaagcaggcatgatncaatgcccaaaaggccacattttattggtgcccggtcgggntcaaattaaaatgganantganantcccaccaggtnaagncccctgaattaattgggcaattggatgcacgatacct

SEQ ID NO: 104320 - DNA, 482 bp, Glycine max
  Clone ID: PAT_MRT3847_65216C.1
cttacatgaaactgtagattctaaaatgccacaaaacacgctgggctacacaatagcggactttaacaagacatctatatagggagaataaggcctttatgaactgatgattcggaatacctgaaaaaggtttttcttcttcaaaaagaacatcccccagctttaaccaaacgcaaatgctccttgtgttgatggaagcataccacagttttataaacctttgaggaacatttccttggcttgctgattggagacaccaggggatatgaaaacggggacccccggcttccacttcgctggggtagcaaccttgaaactttgaggccttgtgtgatgactataataaaacctaacaacctcatccatgtggctgcccgtggttgggagggtacccaaaagttacctagctcttcaggcctcgggctatcaatagcacaaacctttaaaggaaggtagccttcggaatctttgtcatcacgggc

SEQ ID NO: 104321 - DNA, 1759 bp, Glycine max
  Clone ID: PAT_MRT3847_65217C.1
ggcttaggcacaccagaagcaggccagagaaagaaagaaagaaaagacaaaaaaatctgttttatccaattttgcttcatcaactaccaaaaatgccttctcctgtacccaccttgctctccaaatgcaccgtcttcccagaccaaaagtccactctcggaaacctcaaactctccgtttcggaccttcccatgttgtcctgccactacatccaaaagggatgcctcttcacccaccccaatctcccactccactctttgatccctctccttaaatcctcactctctcgcactctttctctctttccacctctcgccggccgtttaatcaccgattccgacagttacgtctatatcgcttgcaacgacgccggcgtcgatttcattcacgccaatgccactgcccttcgcatctgtgacttactctcccaactcgatgttcctgaatcttttaaggaattcttcgccttcgataggaaagtcagctacaccggtcacttctctccgattctcgccgttcaggtcaccgaactcgccgacggcgttttcatcggctgcgccgtcaatcacgccgtcaccgacggcacctccttctggaatttcttcaacacctttcgctactactccagaggagccagcagttgcatgcacaatacaccggacttccgccgcgactcatttctcatctccgacgccgttatccgcctaccggaggacggtcctcaggtcacgttcgacgccaacgtgcctctgcgcgagagaatcttcagctttagccgcgaagcaattcagaagctgaaagccaaggccaacaaccgccgctggccagaaaacaacaacaacaacaacatcgccggcgagttgatgcggaagcaaagcaacgataatctactaaaggagaacaaggcgacgactattctcgagacttggttcagggtgaattcgaaaccgcaaacagttaccgaaacggtggagatttcttcgtttcaatcggtgtgcgcgcttctgtggcgcggggtaacgcgggcgaggaaactgccttcgtccaaaacgacgacgtttagaatggcggttaactgtcgtcaccggatagaaccgaaactggaagcgtactacttcgggaacgcgattcagagcgtgcctacttatgcttccgcgggtgaggtgttgtccagggatctacggtggtgcgcggagcagctgaacaaaaacgtgaaggcgcacgacgacgctatggtgcggcgcttcgtagaggattgggagcgcaacccgaggtgcttcccacttgggaaccctgacggtgcatccatcacaatgggtagttctccgaggtttccaatgtacgataacaatttcgggtggggaagaccactcgcggtgcgaagcggaagagcgaacaaatttgacggtaagatctcagcgtttcccggaaaagatggaacagggaccgttgatttggaggttgttctagcgcccgaaaccatggaggcgctagagtctgatcccgaattcatgaaatatgcaacgtgtcaattatgacacgtgtcgagctatggtgcatccagcgtattataactacttgctcgcatggtcacgtcatgctcgtgttctgttcggacggtggggatgactttattcgggagtgggggctgtatcattgtgacatagtcttatttttttttttttagcgtttctctctgtacttttttttataattttaatttgagtatgatgtttttccccttagaaaaaaaaagaga

SEQ ID NO: 104322 - DNA, 645 bp, Glycine max
  Clone ID: PAT_MRT3847_65218C.1
ggcgttttcatcggctgcgccgtcaatcacgccgtcaccgacggcacctccttctggaatttcttcaacacctgcgctcagctctctagaggagccagcaactgcatccgcaatataccggatttccaccgcgagtcggttctcatctccgacgccgttctccgtttgccggagggcggtcctcaggtcacgttcgacgccaacgcgcctctgcgcgagagaatattcagcttcagccgcgaagcgattcagaaactcaaagccatagcgaacaaccgccggtggccggaaaacaacaacttcgccggcgagttgttacggaagaaaagcaacgataatctactaaaggagaacaaggcgacgacaattcttgagaactggttcaaggtgaattcaaattcgatttcgaaaccgcaaacggtggaaatttcgtcgtttcaatcagtgtgcgcgcttctgtggcgcggggtgacgcgagcgaggaaatttccttcgtccaaaacgacgacgtttagaatggcggttaactgtcgccaccggttagaacccaaactggaagcgtattacttcgggaacgcgattcagagcgtgcctacttatgcttccgcgggtgaggtgttatccagggatctacggtggtgcgcg

SEQ ID NO: 104323 - DNA, 269 bp, Glycine max
  unsure (1)..(269): unsure at all n locations
  Clone ID: PAT_MRT3847_65219C.1
tcggatcnagagtcttcagtttctcctcgttgttcttcgctttcctgttttcnatttcgattcttcgttaatttaataagatgtttgggagggcaccgaagaagagcgataatacgaggtactacgaaatcctcggcgtctccaagaacgtttcgcagggatgatctgaaagaacggcttacaaganagccggccattaaggaatcaaccccgacanggncggtgatcccngagaaggtttaaagagtggggcnaacnttngnaggttc

SEQ ID NO: 104324 - DNA, 1723 bp, Glycine max
  Clone ID: PAT_MRT3847_6521C.1
cggctcgagcataccactttcctttccccattaattaagcacttagtaacagtctaattccacccgcaacaaaatgcgctagctttgtttgtttgttatatccaccctcaggctcgagtctcactctcactcacacacagccacacagggacgaaacgaaacgatccataacgatgatgatgcacactgtgcagtgcgcaccctcacttcgctaattaacactaatcgttacttaaatcagttaaaacgaggcatcggaataagtgccagtgcgccagatctcgatctcgatctcgatgcagtggcggttgctgcttttgttgcttttggagctaacggctcgcgcaatgccggttccgatcacgttttccgcctcgttcaccgcttcgccgacgaaatgaaaccggttcggcctccgaccggatactggccggaccggtggagcatgggctactaccggatgcttctcaccggcgacattctccggcgcaagatcaaagtcggaggcgcacgctaccagctactgtttccttctcacggtagcaaaacgatgtcgctcggcaacgacttcggctggttgcattacacgtggattgatataggaacaccgagcacttcgtttctcgtggcgttggacgcagggagtgatctcctttggattccgtgtgattgcgtacagtgtgctccattgtcatcgagttactattccaatctggatagagatctgaatgagtatagtccgtctcggtccttatccagtaagcatctatcttgcagtcatcagttgtgtgataagggttcgaattgtaaaagttcacagcagcagtgtccatacatggtcagttacttgtcggagaacacgtcgagttctggattgttggttgaggacatactgcatcttcagtcaggcggcagtttatcaaactcatctgttcaggctccagttgttcttgggtgtggtatgaagcaaagtggtggttatttggatggggttgctccagatggcctattaggtttggggcctggggagagttcagttccaaggaccaaccatccaacagtctacttcattcttgcctttggatggattatagttgatagcgggacatcatttacttttcttcctggtcatgtgtatggagcaatagctgaggagtttgatcaacaagtaaatggttcaagatctagctttgaaggatctccttgggagtattgttatgttcccagttcgcaagagttgccaaaggttcccagcttaactctcacgttccaacagaataacagttttgtggtctatgaccccgtatttgtattctatggcaatgagggagtcattggattttgtttagccatacagccaactgaaggagatatgggaacaatcggacagaacttcatgacaggataccgtttggtatttgataggggaaacaagaagctagcgtggtcacgctcaaattgtcaggatctgagtctaggcaagaggatgcccctttctccaaatgagacttcatcaaacccattgcctacagatgagcaacaaagaacgaacgggcatgcagttgctccagctgttgctggaagagctccccacaaaccttcggctgctccatctcggatgatttcatcgtgccggcatgttagattcctaacacgtactggaccattatctgttaaacccgcttttgctcgggggactgtgaaataccgtgttgactgttga

SEQ ID NO: 104325 - DNA, 766 bp, Glycine max
  Clone ID: PAT_MRT3847_65220C.1
tacggctgcgagaagacgacagaagggggagtaactaaacattgatcaaacctcaaaaaccttcttctattagatcattataagaccaagaagaagcaagagggtgtgaaaagcaaagtagagtagctagagagaatagaaatgactcaagtgatgagaggagaggtgattgagaaggcttatgctgggtcttggaaggctcacaagtccccagacaagccttaccttattgaaaagatcaacagaaacgaccctcaagaagttatcttttgttttccaggatcaggtgctgtcagggattggtactctcagaaaaactttggtgaaacaaaaatagatcttggtctgtttccctcactcagaagcattggtatcgatgaacaagcttttgtgaatgaggcctttcagaaaaaattccaagaaattttgtctgccaaaccatcacttgcggatgaggtattttatgacaacaacaactctcttaccctttatgatttggttatgcaaaccatcactttttggcttttttctttcctttttgccagtgccactatcataaatcatctgtatttgttagtaaaaagtaattgatattgatttgtcaactagtaataagatccaaagttgctaaaagttttggcccaattattgtttggggtaaatacttgattgaatgaatatgggtacacgtagagagaaagtgcttcattgaatagaacctcgttcaactattagggaaaaaaaaaaaaaaaaaaaaaaccccaaa

SEQ ID NO: 104326 - DNA, 251 bp, Glycine max
  Clone ID: PAT_MRT3847_65221C.1
acgaggcgtacaaacagccatgcgatcacaatctcaaccacacgacaatcgaggccaggcttctaagatacgtaggtcatcaccatacatagcgaatgatgacacgggggcaacatggaatagagtaatggaatctacaatgttcaagaatcgacctatggaccatatgctagatgctatattgacttgaaccaatagactgtcaagaactcacggatagagtgaaccttgccaagaaacgcctagctgca

SEQ ID NO: 104327 - DNA, 590 bp, Glycine max
  Clone ID: PAT_MRT3847_65222C.1
tttattttattttgaatgtgtgatgatttattaatttctttcctgtgacttggtttgttgtcattctgaatgctgttgctaatacatgcattgttggagttcaattggttgctttgctggctctttttttgcacttagtttttatttttatttccatcaacttgatttgtagttttctctttgagtttaattcccctcaaggtttgaattgtatttgcttttagagtttaattcaaattcactaactatgataaaaatctgatcataaattatcaattatgataagagtattgatttttataataattatttaaaaatcgtatctaaaataattttttagaataaataatacatagtaaataatttatgcactgaaattttataaaaactttttacacttttatttaattataaattatcatatatattaagactgttaacttttataataattaatttaataattttttatatgtcatcatttctagttagttgattgaaagtgtaaaaaacttttgcactattatttaatcacaaactgtcatatgtgtgataaatttattgatattcatgataattattattaaagt

SEQ ID NO: 104328 - DNA, 357 bp, Glycine max
  Clone ID: PAT_MRT3847_65223C.1
agcgataacacactatatcataagcaaaccgggggcattttgagacgctattgccattgcacaggcaaatattcctcatactcgtgtaacatgtcaatcttagagttcagaaccacatatatctggagaccactagcgataattcctgattgagctatcctgatacaaattattttttaggtgagacttcactaaatggaacaactgatattagtgaatgtgaccatgaccgtgatagatctgtgatatggactaggtttaacttgacattggttgctattagcataaatgacagtcacctggctgacttatgttgaggatgaatctaaggccgtcgtatcttgtgtcggacttgtg

SEQ ID NO: 104329 - DNA, 428 bp, Glycine max
  Clone ID: PAT_MRT3847_65224C.1
ttccaaaagaccacccaatggggtgtttaagtgagtttgttgatcgagggaacttgaaacattgtgattagaatgaaggtccttgccttcttcgttgctacaattctgagagcatgtcaatgccatgcttactatatgttccctctctgaatgaacactggctatggcgcccgttcttcgaaggtgaactgctcattttggaggcttgctgcataaacacacaacatctttggctttgagaccattcctgaagaatgcgtagaagcaacatatgaatacattcattgccaacagtatatatcatacttcagaacagttaaccaacactctcacttttatgcctgagacctagaactccattccaaggacacatttgtgttcaatatatatgtcaccgtactctttaatattccatactacctcataaa

SEQ ID NO: 104330 - DNA, 550 bp, Glycine max
  Clone ID: PAT_MRT3847_65225C.1
ccaataattttgcacacacacgataataattatatatatatatatatatagtccatcccacaaataacaactcgataaggccacaataaacccctttctctcacttttcattcaacaccatcgcaagaaaaaccaactccattatcttcaccttcttattatgctcttgggtggtggtagtagtagccaaagaggtggcaatagcaaaatccgaaagtgaatcattaagggaaccgggattagaaaaaagagaaacacttgaaatcatcactggtggtggaggtggaggtgggactcccccatctgttttctgccaactgtgccgagagatatgcaacgattcgatgaacgctaaccgctgtacctgttcgaacaagcgcgcatacggcttgacaagtgcaccgccctaagctacaacccatactgcttcaccatagactgcacccagaccacagtcacgcttgagtacaacggcgtcatgtgcgtcatatatccatacacacgacagctagccctggctatactcagcctcgacgacgcgggtgtcagc

SEQ ID NO: 104331 - DNA, 348 bp, Glycine max
  unsure (1)..(348): unsure at all n locations
  Clone ID: PAT_MRT3847_65226C.1
cctgatccatggcaaaaaaaacgacttttcttctacatgacccatcgtgtcgtgggggctttatacgagcgaagggagttaaattagcctccatacccataacggaaccttcgctcagccttgtaggtgtatgcggtaagatcaccgaggaaaaacgacactattctatttagatgcctgcgctttgcgacgcctattataacnacattatcactggtggtggcngnnncacactatttatgccggttcattcgaaatttctcgcgtttaccctctcttctctttagtattcactgctagatataaattcccacagaaaccgtcttaaaatttgtagtaacgcttcga

SEQ ID NO: 104332 - DNA, 485 bp, Glycine max
  Clone ID: PAT_MRT3847_65227C.1
ccacgcgtccgcggacgcgtgggctcttgtaacctcttggccgttgcttggggccctaggttttttcttcaggaaaaggttgagtaattctctgttatctaggaagctgaagaaatcgtgaacactgtgctaacacagatttatttggtatgtaagagcatgtacagtgatgtttaatatagaggctcttgagattatctaaagagagcatttgcaaaaaaaaaaaaaagaaaaaaaaaaaaaataaaaaaaaaaaaaaaaaaaaaaaaaaaaaaaaaaaaaaaaaaaaaaaaaaaaaaaaaaagaaaacaaaaaaaatgcaatgattaggaagaaaaataaaaacaataaaaagatttggggggggcccttttttgggagcaaaatttaaagacacggggctggaaaaggatgtacttttttttgggggacacaaaaaaaaatagtgtggccggtatttcaccaccgggaagggggaaaacccg

SEQ ID NO: 104333 - DNA, 237 bp, Glycine max
  Clone ID: PAT_MRT3847_65228C.1
tctggggttttttttttttttttttcttttgaaacacaagcccatatttcatgaaatccgttacaaaggataacaaaatttgtctgaactcctacaccattcacaaatataagaactgtaaaatttgtttagattttaaggccctaacttaaattttcccaaagggggcttactaatcccacaagggattaggcacaagagaaggcctgagccctgggatgcttcccaatataccat

SEQ ID NO: 104334 - DNA, 348 bp, Glycine max
  Clone ID: PAT_MRT3847_65229C.1
ggctcgagagagtgacgagttattctagagcgcctcaagcttctgcagtgtatgtgggagctctggactcaatgaacgatagctgatgatgtcctgactgcagcataattcgagcaatgctgagggttgatacttatcataccatgcctgaacacgcaagtcgacagatctctcgggcccatttcaaagtccaatggccatacagtggtgacagtttcgataccatcttgcagatcgaaccagacatgaagttcatatggattagctccagagtactaatggtgaatgtggtcccggaacagatttcgaaatggtcaaagttagtgtagcttgtacctgtgttagctt

SEQ ID NO: 104335 - DNA, 256 bp, Glycine max
  Clone ID: PAT_MRT3847_6522C.1
acctaccatgttctctgcacgtttgactactcgcctcgccgctcgcaccgcttccaacgctgggaaggctggcgccttctccactggtgctggtgcccccgctgctggtgctcgcaagtctctctttgctggtgctactggtgccgctgttgctgccaccgctggtttcgcttattatcaaaccacccagagccccatccttgctgattccaagggcgttgccggtgtcaagggtactgactccgaaaaggccccc

SEQ ID NO: 104336 - DNA, 2748 bp, Glycine max
  Clone ID: PAT_MRT3847_65230C.1
ttcaaacaacgcaaacgcttctctctctctctcactcactttctttctctgtacaacttggaagctttctctctctaaaagcaagcaaggtcctccaccaccacctccagtctccctctttcacacagagaaatactgtgtgtgagaccagttttcggttcatggattccttttctcttctacaattccaaacatctattcttggttcgaacaagttttgggcttttggtggtaatgtggtgggttgagtgattcctcttgttgcatagctatggctacagattcgtcttttgagggccttgcacttgatccttctaagtgcagtaaattgagtatggaggaaaaaagagaacttgtatatgaagtatctaactggtcgcatggtgcatctgagatgctgcagtcatggagtcgtcaagagattttgcaaatattgtgtgcagaaatggggaaagagagaaagtatactgggctgacaaagttgaaaattatagaaaatcttctaaaaattgtttctgaaaagaaatcaggcgggaatgaaactgcgacagaccctgaaccacaatcttctcctgcacctggtcagaagcctgccaaaaggcagagaaagtctgagaatccttcacacatccctgttcctgcgaccagcgttccagtcaataatggtggtgattctattaataccacattctgcaaaaactcagcttgcaaagctaccctgaatcaatcagatgcattttgcaaaagatgttcatgctgcatttgtcatcaatatgatgacaacaaagaccctagcctgtggttaatatgtagttctgagaatacatttcctggtgtttcttgtggcttgtcatgccaccttgagtgtgctttaaaacatgatgcctcacgaattggcaaggatggtgagcttcccaagctagatggaagctattactgtgtctcttggataaccgagcaggccattctccttcgcttcacaaggatagcgaccaacttgcttctgactatacgcccaatatatactctgactgttcctctccttaaagtgtgggccttcctcctgatgcagattctttgtcagacaagcagcatgctggaggaacgactgcctccatacctagttctgatgtgctaaagctcgaaaacaagcattcaccagaggaacaagtcactgaggacatgagcactgatgatgggttgaattccccagctctaacagggagggaatgtgtgccgttagtaggtagcgcaaaaggacttgcctttgtcacccaagccaacaaatcaagatgcatatttgctcgctccaaatatgttgaggtttgaagatgtcactgccactaccctcactattattttgggttctgaagaaccctctggtgaaattcttgctggttacaccttgtggcatcgcaaagttgatgatgtggactatcccatggacccaacttgcacctcgctcttaccaaatagaaggttcagtgtctcgggcctaattccaggtacagaatacagtttcaaagttgtttccaatgatttgagggagtcaggtatgtgcgaagttcaagtctcaacagagcatggtgaggaagaagtccctaattgctcagcaactgaaagaagtcagagcccggtaaccaactgtagcagcctttccaatccatcatccgtggaagatgaaactaataactgtaatccatatagtgacctgactgataaccgagcagaccattatccttcttatcacaaggatagcaacaaacttgcttctggaaatttatccaatgatgctattaactgttccaatctaggtggtgcgggacttcctcctgatgcagattctttgtcagacaaacagcatgctggaggaacgactgcctccatacctagttctgatgtgctaaagctcgaaaacaagcattcaccagaggaacaaatcactgaggacatgagcaccgatgatgggttgatttccccagctctaacagggagggaatgtgtgccgttagtgggtagctcggaaggaggcttgcctaatactccctgcaagttggaaacacttaaggatggacctggaaagaataaaagatctaagtccagtggcaaagatcaagaaaatgtatccgggaaaagggagggtccccaagatggaagcacatccaagaagagaagtggagaaaggcaagaggagggccgtgttgcaaatggcttttcggatcgtgattttgagtattatgtgaaggtgattaggtggttagagtgtgaaggtcacatagaaaagaacttcaggcagaaatttctgacttggtacagcttaagagccacccctcaagaagttaggattgtgaaaatatacattgatacatttcttgaagatcctgcatctcttgcagagcaacttgtggacaccttctcggaatgtttgtccagcaagagaacatcagttgtgccagcggggttctgcatgaagctttggcattgaccagattttgtaggtccagctactagccgcaagcttgccatgcagtaattctttagatttttaatatattcttcatttagacagttcaaatacatatatttatttcaacattatcattcatatgatgatgtaagaattttagatttacttttattatacaattactatttaaattgataatttttttccaatttgcaactcggtcatcgatacactttttggtaggtaacattgaagaatttatactaaattaatttatctat

SEQ ID NO: 104337 - DNA, 753 bp, Glycine max
  unsure (1)..(753): unsure at all n locations
  Clone ID: PAT_MRT3847_65231C.1
catgagcactgatgatggttgaattccncagctctaacagggagggaatgtgtgccgttagtaggtagctcaaaaggaggcttgcctaatactccctgcaagttggaaacacttaaggatggacctggaaagaataaaagatctaagtcgagtggcaaagatcaagaaaatgtatccgggaaaagggagggcccccaagatggaagcacatccaagaagagaagtggagaaaggcaagaggagggccgtgttgcaaatggcttttcggatcgggattttgagtattatgtgaaggtaattaggtggttagagtgtgaaggacacatagaaaagaacttcaggcagaaatttctgacttggtacagcttaagagccacatctcaagaagtaaggattgtgaaaatatacattgatacatttcttgaagatccagcatctcttgcagagcaacttgtggacaccttttcagaatgtatatccagcaagagaacatcagtggtgccagcggggttctgcatgaagctttggcattgaccagattttgtaggtccagctactagccccaagcttgaagcccctactggcttgtcatgcagtaattctttagatttttaatatattcttcatttagacagttgaaatacatatatttatttcaacattatcattcatatgatgatgtaagaattttagatttgcttttattatacaattactatttaaattgataattatattttcttttcaatttgc

SEQ ID NO: 104338 - DNA, 642 bp, Glycine max
  unsure (1)..(642): unsure at all n locations
  Clone ID: PAT_MRT3847_65232C.1
ccctcaagtaccaatatttgtttttattataaaagcatgtaccttttgttcttcctaccaatacaaggttctccacaacaaacacgctgatgaatcaatactgggacttcttcaatggcagatgaagctatctctccacattgaatttgaaaaagccagttagtgctacagccagattgtgcaaaaccttggtgtaaaatctgtgttcaatcctctgttttgttgctgacattgaagactcttaaacaattaatcaagaattgttctagtgttttggttctggcaccagttgatctactattgggaattggtaacaaggatcactttctactacaacattcaactagatttcttgtactttcattttcatcaaaaattacattcttctatggatggtcttagttgggatgcctcacaactgtggagtactattcagcaaccaccagactttgaaggaggctactccatgccccccaatgttctcaatcaaatacaagagatgcagaaagctcaaacaggtcatgcatattcaaattctgaaagaacgatttatcactcggcaggtgccactaccacttnctctgagatgatggatgtgatgcanaaacaagacacanatctatcacagcatgtgtcaatcat

SEQ ID NO: 104339 - DNA, 296 bp, Glycine max
  Clone ID: PAT_MRT3847_65233C.1
tgcggtataaattaacgtttacggacagggggcaacactaattatatggatcaactaaatctggcagatgagaacgccattctttacataaagacaaaacagacgatgacgaccctactaaagactaaaggaccaccctaggcaaaacatgcatccgtaacaaactactgtcatggtagaatccgggccttcaggatctcccttgaacactaggtggaggggctcatgcccagcgagaaccaaacgcctggctacgtaacccgggggggaaaccagccggccaatagcgaaacctg

SEQ ID NO: 104340 - DNA, 338 bp, Glycine max
  Clone ID: PAT_MRT3847_65234C.1
agccaaaaaaaaatcatgggagagagttttttataaaatagctaaaaacgggttactttttaataaaaaaagggcattaatacctgcccccaacttaaccattacattctttacccaaataaacttttttatcaagctaatgctttatttttgaactatatattatgctacagaggctgcataacggagcatccatagcaaataaagatagccgcttttttagtaaacatttttttttttataattaatatagggcttaaatttgaggcttaaaccgttgttttgggccctaaaataaaggtggatgactccggggcctttatagcttaaaaacttgg

SEQ ID NO: 104341 - DNA, 413 bp, Glycine max
  unsure (1)..(413): unsure at all n locations
  Clone ID: PAT_MRT3847_65235C.1
ggtgccattgcccaaatcatcagaacagttaccaacaaagtctacaacatcacattctcagttggagatgccaaaaatgggtgccatggatcaatgatggttgaagcatttgccgccaaagataccttcaaagctcccttcaaatctgaagggaagggaacattcaagttatagtgttccctgtggcctaaatatgagttccattccatctttactataatatgtagtaattgagatttttgcaaatcacttgagcttgtcttttttataattgcaagaagatgaaagatattctcaactattactgaatcttggtatatttctattttccttttctggggatgcatgcgagagaccagttttaatgtantttcatttcttcatcataaaatatggttgaggtcattagtaac

SEQ ID NO: 104342 - DNA, 516 bp, Glycine max
  Clone ID: PAT_MRT3847_65236C.1
caaacacgctgaatcagtactggggcttcttcaatgacagatgaagctatctccacattgaatttgaaaaatccagttagtgctacaacaagattatgcaaaaccttggtgtaaaatctatgttcaatcctctgttttgttgctgacattgaagactcttaaacaattaattaaggattactctatagtgttttggttctggcagcagttgatctacaactgggaattggtaaggccttaatgtcagtatttttttttttgtactcagataagtattggggtatgcttatttcatctcatatattataattgttattctcttcaacatattaggtaacaaggatcactttctcctacaagattcaactagatttcttgtactttcattttcataaaaaattacattcatctatggatggtcttagttgggatgcctcacaactgtggggtactattcagcaaccaccagtctttggaggaggttactccatgcccctcaatgttctcaatcaaata

SEQ ID NO: 104343 - DNA, 220 bp, Glycine max
  Clone ID: PAT_MRT3847_65237C.1
caactccgaaatatatcatggtcgtaacgtaaaatcctcggtttcaacgttcattcgctatgtcaaggtacagaactatggcatcactctcaggaatttgctcctcatcaccgattcgcataatcttcgcaaaccaagccccatcggtgacagatgctctccgcaaagattacatgtccttcaccgcacgcctcgccgatcgtgtccctcagtgtcgtgc

SEQ ID NO: 104344 - DNA, 265 bp, Glycine max
  Clone ID: PAT_MRT3847_65238C.1
gagaaagacattcaatacacaggataatgagtgctgatagattggatgcacactagcgctttgcgtgggaccattgaaacaccggctttacagaagaggcgggcatgcttttacataccaagctgtattggatgatcagcttgcgttggctaacacacaagacttctttgatggaaattgtccaggggatcctaggttaccaatctttgtgcatcgtatgtatactgtgagtcaatttgcttcaaaagctgtccatgcaatgtca

SEQ ID NO: 104345 - DNA, 235 bp, Glycine max
  Clone ID: PAT_MRT3847_65239C.1
ttctctctctctctctctccatgagcacagtaccgtaacgtaacgtaaccacgagatgcctctattctagcacttgggaccccaaatccgtgccaattcctccgctccttttcgcagacgaaggcacattctgacgttcagaggagtggaacgcaagactaaagattccaccacctgatacaagctaggaaaacagaggtttgaaatggctgtgtcactgtggagaagtcgcact

SEQ ID NO: 104346 - DNA, 631 bp, Glycine max
  Clone ID: PAT_MRT3847_6523C.1
gtccaacggtgagtcgtagattcatgccggagccaggtacccccagagtatgaggaacccaagtcagcccccgcgcaggcattccttaaaacaatcactgcagagttccaaactctccttggtgcgtcattgataccaagttctgtccaggccctcaactgaacaggttttccttggacaatgtgagaaccctgaatggactcttgatgctgaaccattggcagcatttgacaggttcagacacaagctgttggagattgagagcaatatcattgaaaggaacaaggccaagagattgaaaaacagaaatgggccagtgaagatgccttacacacttctctttcccaacacctcagattattttagggagggtggactcactggaaagggaatccccaacagcatatccatctaatacaatacaacactccttcctttctatcttcccattcaattctctttcaagccatgtataagtaatttgggtgtcaaataagcaatttgcgtgtcgtgattacttttgtagaaatttattactttgttatgccaagactatagagtgtgtataatttataacattgcttttgcgttcaaaaaaaaaaaaaaaagggcggccgctcagaggatcaag

SEQ ID NO: 104347 - DNA, 378 bp, Glycine max
  Clone ID: PAT_MRT3847_65240C.1
gagccaccagcccaattaaggggttaataaggaaaaaataggcctcaaatttacaacctttaaccaagagggggaaacaagggacaggggtgaactggcctttacaacggttacataaacgttagaagggccaaaaaaaatgcccatcacccaagggtctgatttaacccttacatctccatttgggggggggctttgggcctgggcctgacgtttaaactcaaaaggtggagcagcacgactttttttaaaaggttcaaccccatcaggggaggtttgctccaattcccccaaaagagggtggggcaaactttttaaagcaacagtttttcctttggggagctggttttttacaaaacagctttttataacattttt

SEQ ID NO: 104348 - DNA, 445 bp, Glycine max
  Clone ID: PAT_MRT3847_65241C.1
gaaactggagccaagtgggaatgttaaaattattgaaccaattttttggagaaaaccaaaagggggaccccaccccacattttaatttttaacaaaagaaaaacccgatgcccactccttgcccaaacaaaacatgcttattaaacccagatgggttctctatgtcagaaaccaacgggatgtttttccccttacccgttccacccactttaacagaaattcctcggcaatcaaaaataaaaaacgctaaacgggggcgaccccttatctgaaaagtttaacaacaaaacttccaaaaaatggataattccacactcaatccgattcataaacccgggggggggtttccctctctttcccgtgataatctcaactactgaggacctgtaatgaccaggcttgtattgaccctaaccaggcccactgacgtaaccagcctggggcg

SEQ ID NO: 104349 - DNA, 277 bp, Glycine max
  unsure (1)..(277): unsure at all n locations
  Clone ID: PAT_MRT3847_65242C.1
cctagattcagccacagtttcggggagaagaaaatagtcgttcganatggcccgtacgaagcaaactgctcgtaagtccacaggaggaaaggctccctaggaaggcagcttgcaaaccnaggctgcacgtaagtctgcaccaatactggtggtgtgaagaagccacatcgttaccgtcctgggaccgttgctcttcgtgagntttgggagataccngaggantaccgagcttttgatcnggaagctccccttncagaggnggttcgtgaantgntcc

SEQ ID NO: 104350 - DNA, 187 bp, Glycine max
  Clone ID: PAT_MRT3847_65243C.1
ctctcatccagatcttgcaggaagatcactggtcaatagcaattctaggatcgaattccacgcgagtattccgtgcaattggtaactctggtgaaaatagccattgcctacgggagttgagcaagctaatcggccacggactctcctgctgcctcttcatggctgcatacactggtgactgataact

SEQ ID NO: 104351 - DNA, 1464 bp, Glycine max
  unsure (1)..(1464): unsure at all n locations
  Clone ID: PAT_MRT3847_65244C.1
cctcggaattcggctgcgggcacctctcaaagctgaaaaaatatttgctgtatttttctttcttattactacgacccactatctcaaaaaccaaaacacatgctttccctcatcatcacctttacatctctcactcttgctcattccttgtccgtactcacaaagcacttgaagtgaaagaagcagaaaaatgataacgttaaccgacttttaccatgtgatgaccgcaatggtgccactgtacgtggccatgatactcgcctacggctccgtgaaatggtggaaaatcttctccccggaccaatgctctggcatcaaccggttcgttgctctgtttgcggtccctctgctctcgttccacttcatagcctccaacaacccctacgaaatgaacttccggttcatcgccgccgacacgctccagaagatgatcgtgttggttgtcctgggcatctgggcgaacgtgagcaagagagggtgcttggagtggaccataacgctgttctccatctccaccctcccaaacacgcttgtgatgggaatccccttgctcaaaggcatgtacggcgagttctcggggagtctgatggtccaaattgtggtcctccagtgcatcatctggtacaccttgatgctcttcatgttcgagtacagaggcgccagattgttgatctctgagcagttcccagacactgccgggaccattgtctccatccatgtcgactccgatgcgaccgctcttgacggacgacagcaccctctggaaaccgatgcccaaatcaaagaggacggcaagctccacgtcactgtcagaaaatccaacgcttccagatccgacatcttttctagaaggtcccagggcttctcttccaccacccctcgcccttccaatctcaccaatgctgagatttactctcttcagtcctctcgaaaccctactccacgtggctccagtttcaaccacaccgatttctactccatgatggctgctggtcgtaattctaactttggtgccaacgatgtttatggcctttctgcttccagaggaccaactcccagaccttccaattacgacgaggatgcttctaataataacaatgggaagccgaggtaccactaccctgctgctggaacaggaacaggaacaggaacaggaacgggaacgggaacagggcactaccctgctcctaaccctggcatgttctctcccactgcttctaaaaacgtcgccaagaagccagacgatccaaataaggaccttcatatgttcgtttggagttcaagtgcttccccggtttcggatgtgtttggtggtggacatgaatatgatcataaagaactcaagttaactgtatctncagnaaaagtggagggtaatattaatagagaccactcagaggagtaccagccagagaaagatgaatntagtttntggaacagagggattgaggatgagcatgaaag

SEQ ID NO: 104352 - DNA, 578 bp, Glycine max
  Clone ID: PAT_MRT3847_65245C.1
cgggaccccactgccttctctgagcctgaaagcttccagccccaccgctggctgagaaacagccagcctgctacccccaggatccagcacccatttggctctgtgccctttggctatggggtccgggcctgcctgggccgcaggattgcagagctggagatgcagctactcctcgcaaggctgatccagaagtacaaggtggtcctggccccggagacgggggagttgaagagtgtggcccgcattgtcctggttcccaataagaaagtgggcctgcagttcctgcagagacagtgctgagctgagtctccgccttgctggggcttgtcctagaggctccagctctggcacagtggttcctggctgctgccatgtctcatatgatgagggagagaaggaggccgccagactcgagaggtgggaagaactccttgcacacaccctgagcttttgccacttctatcatttttgagcaactccctctcagctaaaaggccacccctttatcgcattgctgtccttgggtagaatataaaataaagggactgttatttcttattggaaaaaaaaaaaaaata

SEQ ID NO: 104353 - DNA, 255 bp, Glycine max
  Clone ID: PAT_MRT3847_65246C.1
gtaatgggaagaaataaaagcctacgtgttggtaaatccaacagcaagggagatttttgaatcataataactcataaggtgctatctgttcagtgatgccctcagagctcttgctgttagctggcagctgacgctgctaggatagttagtttggaaatggtacttcataataaactacacaaggaaagtcagccaccgtgtcttatgaggaattggacctaataaattttagtgtgccttccaaacctgagaata

SEQ ID NO: 104354 - DNA, 220 bp, Glycine max
  Clone ID: PAT_MRT3847_65247C.1
tattgcgtacgggacgcctagctaccgtatcaccatcccgcgtgtaacaaggtcattttcatttgccggaattgcaattggcagggaaacctctggaggggtcgaaaatgtgctagcataacacattgacctgttcaacatggtagttggtattcacattatgaccaacagtgggcggggagggcctatacacaacaatacagtggctcatgtgtatgtg

SEQ ID NO: 104355 - DNA, 428 bp, Glycine max
  Clone ID: PAT_MRT3847_65248C.1
tcggctcgtgttctacggctgtttgaagttgacagaagggggaggaacataagggtgttgtttatatcgtgcttgagagttgatatttgagtggtctttcaatggggcatttgggtcagaatattttgaattatgaacttgaaaatggagtcaatatgtgttgtgatgaagactgttctaagaatgagatcaatacaactcttattcagtatgctgtgaaagacctattgacgggtcttggggaagacatcaacagggaaggcattataaagacacctcttcgtgttgccaaggcactttgtgatggcaccagaggttatagtcaaagtgcgatggaaattgtggaaggtgccctttttcctgccgctggcgtgggacacacaattggttggtatggctgtggagtatgtgggcttgttattgtgaga

SEQ ID NO: 104356 - DNA, 169 bp, Glycine max
  Clone ID: PAT_MRT3847_65249C.1
aaatattcagaccgatatcacgtccacaggaggaaaagcaccaatgaaccctatagcaaccgaagctgctctttcttctgcacctactactgttggggtgaagacaccccacctttatcggcttgtcaccatagctcgtcgcgaaattaagaaataccggaaaaatacc

SEQ ID NO: 104357 - DNA, 234 bp, Glycine max
  Clone ID: PAT_MRT3847_6524C.1
aagtttcaatggcgttgctctgaaatcgaagcgtacggtattgtaaacgcaggttatacatagatagatcatgatagagatagggttaaggccatggagcgcatcatcgactccaagttcaagctacgacgcacgatcgcaagcgtatccttcggcgaattctacctacacattcatattggttccttcaagatcgtcggcagtaagagtgtaaacggtctaacgaagcattcg

SEQ ID NO: 104358 - DNA, 493 bp, Glycine max
  Clone ID: PAT_MRT3847_65250C.1
gggggccctaaagggctgcaaaaagagaacgtgtggggctttttttttcattgtattttcttcgaatttgcatgtctacacgggtgaccaaagtgctaagcctacttgggtaagctggttattttaattaccacacaaggtgcagaccctctaggatggtcttaaattcaaagcattggaaccgtctatgccggggttggattttctggctttaaatgcgatcgcagtaagaaggtgtttgtcgtccggtacattgcgcgccgtggatgaactacctattaagcgtgattgcgaagaatacacaactgcagaatattttgaacatttgactccgtccactgaagggatttggagacggtacatccgatacgtaccgggcgttcatgccacgcgaagtggattttggtgataagatttttttagaagggcgttgaacatgcaatatactttgacctcaaaaaatggcaagaaataattgcgtcttgaaaagctc

SEQ ID NO: 104359 - DNA, 514 bp, Glycine max
  unsure (1)..(514): unsure at all n locations
  Clone ID: PAT_MRT3847_65251C.1
ccacgcgtccgcagtgctgtgctgtgcacgccaaccacaaccgaaagggagagccgaagagggaagggggagaagcgaccgcgccgccaaaccctagccccgcgcacgcgaccgcgggggagctccactccgccgctccgccccccgtccccgcttcgcgacatggtactcaaggtccccttcatacagcagggggcacccaaaagggaggtcaagatcacaatctccagctcggtctcagtctaggtcacctgtcccagatcctagatctcaggcgaggtcaaggtctagaagccaagagagggaggaggatgctgttaaccgtgggaatactctgtatgtgactgggctctcttcgagggttactgaaagggatgttaaggattatttttctaagcatggaagggtggtntggtgccatgttgttcttgaaccccatacacgtgtttnccgtggatttgcctttgtcagcatggacactgttgagaagcggagcgttgcataaagtatctta

SEQ ID NO: 104360 - DNA, 239 bp, Glycine max
  Clone ID: PAT_MRT3847_65252C.1
caagtttgagcagtgagtagtggagagaaaagaatatatgtgtggctttttgttgatagttttggtacacggttatagcatgcgcgcacctgcacattagacaagtgcggtggttagatctctgaaacgccgttacataaatagcactgccactcaagcagaagcagtaccagtaccatgctgcttcaatgcatttcaccaatttagtaatttcgctcgatcccgaaccaataccttgc

SEQ ID NO: 104361 - DNA, 223 bp, Glycine max
  Clone ID: PAT_MRT3847_65253C.1
ggagatgtatgatcaggatggggaagatgtgattaaagaaggagtgggtggtggcggtggacatgatccatttgatatattttgatatgactttgggggtgggagtacatttggataaggtggaagtagtctaggttagatgcagacgcaaggagaatacgtggttcaacgtactcaaggttggttggattttttttttgttggaacttcaagaagatttgcc

SEQ ID NO: 104362 - DNA, 230 bp, Glycine max
  Clone ID: PAT_MRT3847_65254C.1
ctttgccagagtttcccttcggaaaccactcttccgccgtgagccaccgcgaccattttgagctcgaaagtccggtttttttcccggttcaggaaaactggtttggtctttgacttggaaccgtgagtggagtttctgggattttgggttctgcgaagaggtgcggatccaggaaggttctagagagagaataacaagtgggctttgttggttttttttagagagagaga

SEQ ID NO: 104363 - DNA, 395 bp, Glycine max
  Clone ID: PAT_MRT3847_65255C.1
gtcggtcccgtgaaaccacaaccaacgcacatcacgggttgtaggggtttcacaaaacattctgtagggattgaatctgaaaccagctcaacatcaaaagacagcggctcaatggtagatgccaaggacagaaacaacacacaaactgctgcatcccatggggctgcaagcaaaagaagactggcatatgctccaaagataccatacgttgagcacacttgcgcaagctcaaagtgcctaagtttactttgacttcactacatctgcaggctgacagtcacgacgctgccactcatattgaggaaccaaaatcaggcatctatatttaactgcctacacaaactacgtgggtataaacttccaaggaatgtacactggatctaccttgagacaaa

SEQ ID NO: 104364 - DNA, 366 bp, Glycine max
  Clone ID: PAT_MRT3847_65256C.1
ccacgcgtccggcaaggggcaagagagagaaagcacagcgcatttctagagagagaaagacgaggacgaaaaaggtacaaggaaccgattctagagagagaaagcgtgttgaatttctagagagagagagcggagggcgcgcgggatggttcagatcgcaaggaggaggaagaagggacggccgtcgaaggcggatctggcgcgccgctcaggccagtctccggccgccgcatcgcagcctgattctcggcggagcctccggcgccgaagcgtgaggtacaacatcatcgactacgacggcgattacctctccgatgaggaggatgagaggaggcgcgagaagaacaagctgacgcttatgttgaa

SEQ ID NO: 104365 - DNA, 1779 bp, Glycine max
  Clone ID: PAT_MRT3847_65257C.1
caatcttaaaaaactgtgtggctccttgttctacttgcggggtaatcatggacgaaactaaaagcacagaaccaagtgaattttcaagtcctctgcttcccataggagcacaagggtatggtggcaaccatgactatgaggaaaagaggcagaaagaaacttggttgggatattcactctcctgctcagactggaatcatggatgatctcaatgttggtgtggccgagtattcactttttggatcaatactgacaattggagcaatgataggtgccattataagtggtagaatagcggattatgcaggtcgacgaacagttggttggtggctttatgttggaagattgtttgtgggatgtgggatgggccttctatcctatgtggtacctatttatatagctgaaataacacccaagaatcttcgagggggattcaccacggttcacagttaatgatttgttgcggggtatcattaacttatcttgttggaattcttgaattgattttggctggctccctgtgtcaatgctacctattatgttattccatgcagctcaaagcttagagggcagctgatattttgcaacttcattgggttcctgaggctggcaaaattctgggaaagaagtgaatctgctttacagcgccttagggggaaaaatgctgatgtttatcaagaggccactgaaattagagatcagaagcctttcaaaagcaaacagaatagcatcattggcttatttcaaatgcaatatttgaagtcacttaccgtaggagttggcttgatgatactgcaacagtttggagggattaatggcattgttttttatgcaaactctatatttatatcttctgggttttcagaaagtattggaacaatagcaattgttgccgttaagattccaatgacaactataggagtacttttaatggataaatctggaagacgaccacttttgctggtgtctgcagtgggaacatgcgtaggatgcttcctggcagccttgtcattcattttgcaggacttacataagtggaaaggaggtagtcccattttggcgctagtgggtgtactggtatatgtgggatctttctctataggcatgggagcaattccctgggttataatgtctgagatatttcccatcaacgtgaagggctctgctggaagtcttgtgactttggttagctggttgtgttcttggattgtatcatatgcttttaacttcctcatgagttggagttccgcgggaacctttttcatattctctagcatatgtggcttcaccattctattcgtggcaaaactagtaccagagacgaaggggcgaactctagaagaagttcaagcatctctgaatccatattcaacaaagacatgaaattggcatgaccctgtagcagaattgcatgaataattaatccattaacaaattcctaagtgccagatgatggatgatgaattaaagattttacggaacaagcttgatcgcgtttatgatgcagaatgtgtttagttgaacctgtgctcctagatttgatcattatggtccctcattcaagagcatttcaatatcagttccttgatgtagttgctaaaaataaattaaattggaagggggaatttggacaatttatattgattaaaaactgaattgccagaaattgcttgtgagcgatgaatttcgtcacgagagcaatacatgtgtgcaatgcgctagttggcacatcctttacccttacgtgcagaaatacatcctttttgaaagttttccttg

SEQ ID NO: 104366 - DNA, 522 bp, Glycine max
  Clone ID: PAT_MRT3847_65258C.1
ggctcgagatggacggtaccaaaagcacagaatcaagtgaattttcaagtcctctgcttcccgcagaagcacaagggtatcgttgcaacaatggtgttgactgtgaaagaaacttggtcggtaccagctattcttattcttaccacccttgttgctgtctctggttcttacgttttcgggtctgctgtgggatattcatctcctgctcagactggaatcatggatgatctaaatcttggtgtggccaagtattcactttttggatcaatactgacaattggagcaatgattggagccattataagtggtagaatagcggattatgcaggtcgacgaactgctatgggcttctctgaagtattctgcatattgggatggcttgtcatagcattctcaaaggttggttggtggctttatattggaagattgttggtgggatatgggatgggccttctatcctatgtggtacccgtttatatagctgaaatacacccaagaatcttcgagggggattcaccacag

SEQ ID NO: 104367 - DNA, 1166 bp, Glycine max
  Clone ID: PAT_MRT3847_65259C.1
ctctacacaatcttaaaaaactgtgtggctccttgttctacttgcggggtaatcatggacgaaactaaaagcacagaaccaagtgaattttcaagtcctctgcttcccataggagcacaagggtatggtggcaaccatgactatgaggaaaagaggcagaaagaaacttggtcggtaccacctattcttatacttaccactcttgttgctgtctctggttcttacgtttttgggtcggctgtgggatattcatctcctgctcagactggaatcatggatgatctcaatgttggtgtggccgaggtttgaactttgaaacacaacctttgtcatgtattaaacattgaactaatgagagaagcatttgaggcttttctattggccttgttttatgcagtattcactttttggatcaatactgacaattggagcaatgataggtgccattataagtggtagaatagcggattatgcaggtcgacgaacagctatggggttctctgaagtattctgcatcttgggatggcttgccatagcattcgcaaaggttggttggtggctttatgttggaagattgtttgtgggatgtgggatgggccttctatcctatgtggtacctatttatatagctgaaataacacccagatcttcgaggggattcaccacgggttcatcagggcatttttaaatccctatttgggagtttattgacagttaatgattgtgcgggggtatcatttaactagagccaaccgaaagctaccatcatgggctaagttcaaatacaatattggaagtcacttaccgtacgggtcggctggatgatactgcatcagtttgaagggatcaatgccattgttttttatgcaaactctatatgtatctcttctgggttttcagaaagcatcggaacaatagcaatcgttgccgttaagattccaatgacatactataggagtacttctaatggatcaatctggaagacgaccacttttgctggtacaaaagtatgaactattgttcctactctactattttgcagtgttttacaagttgagtctaaaaaattttgattctcatacaggtgtctgcagtgggaacatgcgtatgatgcttgctggcagcctagacattcattgtgcaggacttacataagtggataggag

SEQ ID NO: 104368 - DNA, 2087 bp, Glycine max
  unsure (1)..(2087): unsure at all n locations
  Clone ID: PAT_MRT3847_6525C.1
taaaggatccaggaggggaagagaganatgcccctggccaataagcttgacaataatgtaccgccanacagcaaagaactctgtgaccctgcaatggaatttgctgctgtttcttcaccccacgcgtccgcccacgcgtccgataatggaagcagtcatgatactgatcttaataaaacaccacaacaaaaaccaaggagaagaaagcaccgtcccaaggtcatcaaagaaggcaaacccaaaagaactcggaagccagctaccccaaagcctgttcaatcaaaagaaaagcaacctgtcaagaggaagtatgtgagaaagaatgcactgaacaagacttctactcctccaacagaagagactggggaattgactaaagaaatgtcttgtaaaaggtccttaaatttcgacataggaacaacatatgaaagttctgctgccatagaaaatacaagaacgctattgggaaaagaaaatggtgttcttgtacaagaaacaaatgtaggtcctgcatttgatctaaacacttccatgaagcaggcatcaaacagttacatgtcactaccagaagacacacaagccctaaatacatcttcgggaagaaaaagctcagggacaaagccagaggaaaacccacctccgaagaggaagtatgtgaaaaggaaaggagtgaacaagacttctgctcctccaatagaagttcctggaaatttgactgaagaaacaacgtctgcatctgcccaaacatcatgcacagggtccataaattttgatgaaagagcaagtgaacaaagttatgcagtcaaagagaatccaactgggcatccaggcagtgaaattggtgtagtaatgaaggaaatgaatgtgggccttgcctatgatttaaacacttccatgaagcaggcattaaatgatgacatgacattacctaaggacacacaagccccaagttcatcttcaaaaatcaaactcccggggacaaagagaaaagaaaacttgactggcaagaggaagaatgcgaggaaaaaaggatcgaatccgtctcctattcctccaacagaaatgacagaattgactgaagcaatgatacttgaatctaacatgtcatggagaagatccttaaattttgatatcggaaatgtaggcagagaaaatttagatttggacattgggaaggaaaatatggtgttggaggaaagaaaagtaggtcccacctataaagacacttggttgaaagaggcagtaaatatttgcatgtcattacctgaggaaacccaacacccaagtacgtctatttcaaaatgcacttcccctggggcaaagctgaatgccaactctgtagagaaaaaaaacaaaaaaggccgggcaactgcttggggtggaaacataagtaatagtcaaagttcatcaataaggttacaaatggttggctcaaagagaaaacattctgatacctttaatcgtgcagatgacagcagcatgaatctgattggagtgcaatataatggactgccctcataccaacacctaagtacgtctatttcaaaatgcacttcccctggggcaaagctgaatgccaactctgtagagaagaaaaacaaaaaaatccgggcaactgctcggggtggaaacatcagtaatagtcaaagttcatcaatagggttacaaatggttggttcaaagagaaaacattctggtacctttaatcgtgcagatgacagcagcttgaatctgattggagtgcaatataatggactgccctcataccacactagcctttgccttcagtttccaaaaatacagaagaaaaggagaaccgaaaaggggaatgcaacaaaagaagtccaactgacatgccctcaggaagatgctctaggacatccatatgcatcaagctccagctgctggacttatggttctggatataatacagctagagtcccagccacaagtaattgataatactcaaacattcaacgagtttctcttgtctttgaaaaggctggcagaaacatctcaaacctctacttgtgatcgtgggttctctaactagaattaggaactgttgatactgaaccaaattatac

SEQ ID NO: 104369 - DNA, 1885 bp, Glycine max
  Clone ID: PAT_MRT3847_65260C.1
attggttcctgtatattaaaatggtttctcatgaaaagttagaacttgaagtctaataaatgcattgttttggacaaggtgctatactaaccacctacaaaattggtagcagctctaaacgaaagcaaaatagaaataagaactttttctttatcgctcaattcaattgggatctcttgaactctctctctctggtgtctaaaacaaggtcttgatcttctctccactggggttccctccgtttcttgagccccttttttttcttttccgggcctttgccaattctcaatggaggttccagaaatggaaggcaagactgaaagtcatatgacatcagcagcagcctttgtggaagggggggttcaagaagcttgtgatgatgcttgcagcatatgccttgaggatttttgcaaaagtgatcctgccactgtcactaattgcaagcatgagttccacctgcagtgcattcttgaatggtgtcagagaagctcccagtgtcctatgtatttcctacctatcagcaaccgagatgcttgagggatagtacaagtcgagaactgcttgaggcagtagagctggaaaggatcttgaatgatgaaacacttcgaaatttcgtcattcttcatcatgcagattttgaatattaggatttaccccagggtgtgaaggaggccgatattgaagagcgaataaagccgaattaaactgctgcagccccaatgaggagatctcgtcacctcagccggagggaaggccatcgaactaggccatctgctcatggccgtccacacttcttagtatactcaactcagcctagtgcaccaccatcagctgcaggagggggaagtgaaccagctgcaattcctgtaggaagtccatctaccccacttacatttgatggaaatgagcaatcatcactacagcagatcccccatgttcaaactcagagttcttctttaacttctgcctctactgtctcaacaacaaatcttcaaggagttcactctgatgatagaagttttgcctctcattcttttcctgcaagccaagacagagcacagccatcagaacaatcattctctgattctctgcgctccagatttaatgcagtatccatgagatacaaagattcaatttcgaagggcacaaggggatggaaggagaggctcttctctcccaattcttctatgtcagaacttggttcagaagttaggagagaattgaatgctaaaattgctagcgtgtcccgattgatggagcgccttgaaacaagagaaaataatagtgctgcaggaacttctttatcaaatcatttggtgaaccgttccattgcagagacaagcaaccaaagcaatgtggaagctcgtggagagaactctttgcatggcaataatactccaactactttttctgcaagctcagattcaaaatgatctctagtttgcttctgtgaaggcatctttgctcaacgtatcatgtttgaaggctaactgtttgctcagacatgacatgatgaggaatatatgctcatggcagttgttggatttcaattaaaaaagtagaatctgacacccgtgtgtagagctaaaaactttttcttttgtgtatatattatatatgcggggaactgtagggagaaagtatttaaggagtaatccaagggagaaagtgttctgaaattccatcagacttgtgtccacaatctgtccctgtgatttactttttggagtcaatggaaatatagatcaaggtggcaactgtagttcttggtgtttctaagctaaaacttcaagcttgattaggctaaaactttgttttgaaattcacattagggaatatgtgaagctatctcactgttggaaattaaaagtaaaatcccgctagt

SEQ ID NO: 104370 - DNA, 316 bp, Glycine max
  Clone ID: PAT_MRT3847_65261C.1
cactgtgttactattgtgctcgcacgagtgaattatcattaatcagagcttggtcttgggtggtgccagtgtgccacactatgctcaagcagaatttggggttcgtttttgctgaaaaccatgctgagagagaagagataattgtaccctcagggaacttttggggtgtcagtacagtaaaagagtcaaaagtggcatagtttatgttagggatagggtaggtaggtaattaaaggggctatatgaagcaggtgttcctgctgaacatgtatattacaaattagcctttttataattcaagttgaagatacaactc

SEQ ID NO: 104371 - DNA, 222 bp, Glycine max
  Clone ID: PAT_MRT3847_65262C.1
atcatatccatactatttctcatactatcaaaggttcccttttaaaatgaaaactctctaatttcagccttcttaacacgtaaaatgctcaatttttaagcttgctttataagcacacaccatcctatcctttaaaaccattcctaaaaactgcttttaaccaacaaaagactacattaattacgaacaatttacatcatactctaaaacatttaaccaaca

SEQ ID NO: 104372 - DNA, 1619 bp, Glycine max
  Clone ID: PAT_MRT3847_65263C.1
ggctcgaggatttcagggttgatcttctcttcactgggttccctccgtttcttgagcccccccccccccccccgtttttttcttttctgggccttttccaattctcaatggaggttccagaaatggaaggcaagaccgaaagtcatgtgacatcggcagaagcctttgtggaagggggggttcaagaagcttgtgatgatgcttgcagcatatgccttgaggatttttgcaaaagtgatcctgccactgtcactaattgcaagcatgagttccacctgcagtgcattcttgaatggtgtcagagaagctcccaatgtcctatgtgttggcaacctatcagcttgagggatactacaagtcaagaactgcttgaggcagtagagctggaaaggagcttgagggataccccatctagaaatgctgcgatttttcatcatccagcacttggtgattttgaattgcagcatttacccatggctatgaatgaggctgatattgaagagcgaataattcaacatttgactgctgcagcagcaatgaggagatcacaccacctcggccagagggaaggccatcgaactaggtcatctgctcatggccgtccacacttcttagtatactcaactcagccaagtgcaccaccatttgctgcaggaggggaaagtgaaccagctgcaattcctgtaggaattccatctaccccacttacatttgacggaaatgagcaatcatctccacagcagatccccattccccaaactcggggttcttctttaacttctggctctactgtcgcaacaacaaatcttcaaggagttcactctaatgatagaaggtttgcctctcattcttttcctgcaagccaagacagagcacagccatcagaacaatcgttctctgattctctgcgttccagatttaatgcagtatccacgagatacaaagaatcaatttcgaagggcacaaggggatggaaagagaggctgttctctcccaattcttctatgtcagaacttggttcagaagttaagagagaattgaatgccaaaattgctagcgtgtcccgattgatggagcgccttgaaacaacaagagaaaataatagggctgcaggaacttctttatcaaatccaaatcatttggtgaactgttccattgcagagacaagcaaccaaaacaatgtggaagctcgtggagagaactctttgcgtgacaatagtactccaactacattttctgctagctcagattcaaaatgagttccagttttgcttctgtgaatgcatctttgctcagcatatcatgcttgaaggctaactgtttgctcaggcatgacatgatgaggaatatatgctcgaggcagttgttggattccaataaataaaaaaaagaatctgagacacctgtgtcctagagctaaaaactttttcttttgtgtatatattatataagccgagaaccgtagggagtatttaaggagtaatccaagggagaaagtgttgtgaaattccatcagacttgtgtccataatctgtccctgtgatttactttttggagtcaatggaaatatagatcaaggtggcaactgtaaaaaaaaaaaattacaaccaaaaagcaag

SEQ ID NO: 104373 - DNA, 428 bp, Glycine max
  Clone ID: PAT_MRT3847_65264C.1
atttcggctcgagtatcaatgacattctatatgaatcctctctaatgatttgaactctatgacgtttggtcccatcaagttaattgggctccaaattctgatatggtatcaaagttctctaatctgcctatggctgaagagagctttgacatggggttggaaatgcaagatgtagcgttgatccagcctgcatgaaaaaacaaccacgaaggaaacaggttttgaagaaaagaaataaccttggttccaatgcagcattggtgtttctcatcatgtggtcactggcatgaggaccttattggttattgtcttttcctcagcttcaatttagtgtgtgtttgggtataaggctgcaaatgtacatttgcagaagcatcaccgcccttgcttttactttcaattacttttatccgttggatttgcattgt

SEQ ID NO: 104374 - DNA, 563 bp, Glycine max
  unsure (1)..(563): unsure at all n locations
  Clone ID: PAT_MRT3847_65265C.1
gaaaaccgtcgtgaagtgctgcactgaaatccaacgcctcgacaataacaacacctattcccttcctcacagtccacttcaaacccatggactccacaccgacaacaacaacctcaatttccacgatgacgacttcaacagggagcataacagcgagagcgatgcggtggcggagatggtggtcgcgatcaaggtcctccacgacgggtttgtgaggatggagcagatgaagagggagatcgagagcatgctggtggagatggactgcaccaagatgatcctggacttcgcgcaaaagaatgtggaggacctgggtcttcactgtagaaaaatccaaagtttcatcgaaccactnntttgtgggtggtgggttccaacatgatccgatttgngtttggaagaaaggaattcctctagttctttttcttttcctataatttgtgacggtttttaattctcacgtaattaattggattntattatcttttattaattctcttatactntatgataacttttaatcctttgattgcatttgaatttatattaaaacaatataaata

SEQ ID NO: 104375 - DNA, 268 bp, Glycine max
  Clone ID: PAT_MRT3847_65266C.1
ttcgggattgaaagaatttaaaagaatttttcttttcttgtttgtaattagatataacagaacaaaagtgtgactagtgaggaatggattcttatcttgctttttctctcatctgggttcttacttctatgtcagcatggcatatataactgatagttcattatttcccccttatttattttcttggataaaagaagggtatctggatatgagatattttttaattattttttttccttctgccactgcgtgaaattgaacaaccttt

SEQ ID NO: 104376 - DNA, 1106 bp, Glycine max
  Clone ID: PAT_MRT3847_65267C.1
ctcgagccgattcggctcgagattcccattacctaccatataccatcaaccaatatcttctttgtcgcttttattatctgtttttccggcgatggattccggcgcgtggctcctgttcctggtggtcgtggctgtctcaacgtccggccacattcactctgaagcgatcctgagactcccgtccgagagcgaggagatctcgcgcgactactgcgacagctggatgctggcggtggagacgaacaacgccgggacgtggaaccgcgtgccggcgagttgcgtggacttcgtggcggaatacatcaccggagatcggtaccggcgggactgcgacgtgatccggaatttgtcggcggcgttcgcgaagagcgtgggattggccggagacggaagagacgcgtgggtgttcgacgtcgacgagacgcttctctccaatgtgccttactaccaaggcgtcggattcggatctgagatcttcaatgagacttcctttgataattgggtggacttagctgctgccccagctttgccagccattttgagtttgtataacgagcttaaggaattgggcttcaagatattcttcttaactgggagaagtgagtttcaaaggaatgccacagaaacaaaccttctgctttcagggtacagagattgggagaggctcatcttaagagggtcttctgatcaaggcaagccagccactacatacaagtctgagaagagagcagagttggagaatgaaggctacaggatccatgggaactctggggatcagtggagtgatttgtggggttatgcagtgtccgcacggtcttttaaactcccaaacccaatgtattatattccttaacatagaaatggcttctcagaaatctgtaatctttttcataattgcctgttctagtacttctgcccatgatttttcatggtactatgatacttgttacaacagggattcttagtgacactagtttctaatgtgttgtatgctacatttatacttattttgaggaataattattttttctgttgtgtgtgtaaaaaaaaaaaaaaaaaaaaaaaaaaaaaaaaaaagaaaaaaaaaaaaaaaaaaaaaaaaaaaa

SEQ ID NO: 104377 - DNA, 1251 bp, Glycine max
  Clone ID: PAT_MRT3847_65268C.1
cgggccttccgacagaccgcgaggactcgctcgatttggcgttgcggatcgaccagtgacttcttcattccatttcctctttctctttccattgttctactttttcagtcccaccaccaatggcactccatgatctacccttcacacccatgaccaccatttccctcttcatcattctattttctctattttccaccccttcccattctgccctcacttgtgcttcccagaagctcaaccgcacctacgccaactgcaccaacctccccaccctcggcgccaccctccacttcaccttcaacgccaccaaccgcaccctctccgtcgccttctccgcctctcctccctccccctccggctgggtcgcctggggcctcaaccttgccggcggcggaatggccggcgccgaagccctcctcgccctcccctccacctccggctccgccgtcaccctccgccgctacaacctcacctcctacaagagcatcgacgtagtcaaggccttcaccttcgaatcgtgggacctctccgccgaagagaccaacggcgccataacgatctacggcaccgtcaagatccccgattcggcggagaacgtcagccacgtgtggcaggtgggtcccgttgcggcgggggtgcccgcggtgcacggcttcaaggacgacaacattcacgccaaggccgctctccccgtcgcgcttgcggggagcagcggatcgtcagcagcgagtggcgaaaacgcgaccacacccgcgagtggggacaagaagaacggtgctgctgctgcggagaggcttgggttgggttttcacttttggttggttttcgcattgatggttggtgttgttgctctttgatgtgattttatttcaccttttacccttcgagaagggtcattcaataattttcactgtactgggacatttgcattttttaaaatatttattgtattgtagtttttttatcttttatttttctgtacgcgttgttttgggggttttatttggggagggtagatccgttgatgggttgtgcctgttcggttagaaattctgtttttagaatgaacgtgtagttattggactcagatttttcgttttatgggatattgtagttgttagattttcgagattttgatatgatgataacattgtaatttctgttagaatgctccaagggagcacagatttctgcaaggcacatggtggaggaaagcgatgtagttggggagatggaaagtgtgagaaattt

SEQ ID NO: 104378 - DNA, 386 bp, Glycine max
  Clone ID: PAT_MRT3847_6526C.1
ctctcacccatgcatgccacgttagaaacacatgcccttgctgctgacattcgctgcttgtccttcgaacggcagtcctccgaccgttccttagatcaaacggtctttggcgtcatcaagtcgaaagaagttaggcaggggctccggcttgttgcccaggatcttctagatcttctcaagcacctccggcgtaagcttgggcaggacgtcaagggccttcaagttgtcgacaatttgatccggcttgggtgcgccaagaatacagggggaaacgttcttgttgaccagcgtccaagccaaagccaagtgcgtagtcgtggcaccgagctcctccgcgaccttgggcaactgcctgaccttctcaatcttccccttgccctcgggcg

SEQ ID NO: 104379 - DNA, 1257 bp, Glycine max
  unsure (1)..(1257): unsure at all n locations
  Clone ID: PAT_MRT3847_65270C.1
ggccgctcgaggcggccgggcncgggactttcctcacctttctcatacgctatatatctaccccttgctccaattcactaccacggaccacaccatactgtgttttattcttctctccctccttcattttcatttacttctctggaggtatataactattattctttttttttttttaaacataaaaattgtttaaatcttttgccatgggaacccagattttgcggcctcaggactgtttcgtagaacgaatcatgtctcctcccgctgacttttcccggcggaggagttccggtaactactgtaattattattaccacagcaaccatgttgccacttccaggtcgtgccggaagccggttgcccgacccgataaaaagaaacgggttgttccggcttctggcatgccgctggtggcggagacctcggcggcggtgtttaggagaccgagcagtgatgattccagggtggcgaggagcaatggtttggagaaggtgacgattctacggaggggccagtcgctcgattcggctgtgaagagcgacgtgtacgccggatcggcgttcgctgtgtctccgtcgccggaagcgcttcctctgccgtctttttcgacgaagaagcaggcctcggcggcggttgatgactccgccacgcgagatctgaggcgtctgctccggctcgaatgaaaacgagtcgggttgctgtcccggatttggatcgggtcggaccccgacaaatgatccatattacagtctctctttctcaccttattattatccagaatattctctttctcgtcttctctccgtaaccgttaactttaagcccgtcccggtttgaagttctgacccgattgtgatttttttaaacgaaagggtggatgatctgaactagggggtgaaatgtttaaaggtttggagtagcgtttgaagccgtgaggctttgatgatgtaacatgtaacttgtaacatatttctagggttgcttattaaaacattaaaataaattttagtttttgtagttcaaaggggtgggaaaaaaaattgagtaagaaggggggataactagaggaggaactggaacgtagttttgtaaaatccagaaagtgtttgaattttgtgtgggttgggctttcagtttcagccatgaacagtgtgaagtgatcaacaagtgaatggttcttgttctgttgtgaatttgccagcttcttgtacgctatttttgtaaagtggagtaaattattaactcggggaaaaa

SEQ ID NO: 104380 - DNA, 209 bp, Glycine max
  Clone ID: PAT_MRT3847_65271C.1
gagaagcattagcaaaagcaggaagaactaggctaagcacgaatggcctcttcattgatggcatctgaggccctcaaacctgcccctttcactgttggagaagtcctacacttagaggccttccctccctttcaaggaaccgttcttcattgaaagttgtcgccagtggtgggtagaagaccaagactgaccagccctatggaattaaa

SEQ ID NO: 104381 - DNA, 809 bp, Glycine max
  Clone ID: PAT_MRT3847_65272C.1
cggctcgagagagtggtttgatgaagccgttaataaaaccgcgggcggggaaaacaaacgttaacgagaggcgtgttgtaatttgagggaaggtggaagggcaaatgaggaaacaagaaaagtggtgcataagacaaatcaaagaagtagtagtagtagtagaagaagaaaaaaaaaaaaacagcctcaaagaaggggaagatgaaagaagtgaggaatagcagatgttgttgttgatacaatacaactcatctgtcacaatccattctggcgccctcaaaacaccctctaactgaacaaccaaagaaaaagaaaaagaaaaaaacttgagcactcttcctcttgccagtttcagatctctctgagaaatgataataacaataatgggggtgtgagatgtgatgtgatgtgaaggtgtgtaaggtgtacacaaaagatggagtgttggaattcggtggacggggtggtggaggagataatgaggattcacagatctcttccagcacggcctgggattgatgaagttgaagcggcgagaggtttgatcgggaatgtggagaaggaagaccaggccaggctcgaagccatagcccggcagagcaagggcgttgatgtgccagaagagctcttcatggtgctccaagagatgcagaggaacgtcctttattaccagagcaaggagcagaaaagggaggccgtcaagctcctcgatctcgacaacgtccattctctgttcgatgaattgattcagagagcttccaagtgcgtcgcctctccctctgccaaaacagttactctaacggctctgc

SEQ ID NO: 104382 - DNA, 181 bp, Glycine max
  Clone ID: PAT_MRT3847_65273C.1
gtacacgaatatattacattaattataaactctccggtctgcgctacagtgttgcaatttatcctcatttcacaatccctcttattcacatcataaaaatgaatgaaaggggtgaaaaaaacagactaatatatactcacatctataatacaccattctgattttcttatataaggctaaa

SEQ ID NO: 104383 - DNA, 361 bp, Glycine max
  Clone ID: PAT_MRT3847_65274C.1
ttccttattgtctataccaaacagccttctaaattggataaagtctcgtgtaccactccacaatttgtaagtgcagaaaccactctaattccaacaattggtgctgcgcaagcttcttccaaatatttttctgaagcggaagaccatgaaagacccggaaagagtgatgccttactgtgacaaagactagacacctccctacaacagaggttcatgctcagatggaaacaaatttgttttaattgtctcttgatgatgttgacacttctaaaagttccatgttggatctgaaaatttcttcatcttaaaatgcactttccaagaacacaatttggtggaaccattctgcgtagtgatctat

SEQ ID NO: 104384 - DNA, 530 bp, Glycine max
  unsure (1)..(530): unsure at all n locations
  Clone ID: PAT_MRT3847_65275C.1
tatatcctttatgaagtaatcaggccccaaaattgtttacaacaatcaaaacttcttctcttacaatgactgagttaacatttttgtcaaccataccttggaagcaaagacaacagtagccatgacacatgatacaggatcttgttagttaatcgttaagaagatgccaacttatgccaacttatcagctgaagagtggcaatatacaacanacccaaatttggactgctagtagcaactgctgatgcaatctgagtatcttccgcacagtctaatcaatcatttacaactgaacgatcagtaatatctctctctccaatcagtaatcagtcagatccagagttcacacttagattacatcactagcaggcctgctccactgatatttagcacaatcacatggactttactcagaggccatcgtattccagtccgagctgaagaatggggataatatttgttctgaaagaacttcccaaattgaacgaggtcatattcagtatgattcattctttatttagacaaaaact

SEQ ID NO: 104385 - DNA, 534 bp, Glycine max
  Clone ID: PAT_MRT3847_65276C.1
atgaatgtcttgactacacaatcaaccacctgttaccggttaagtctattcatcgccatcaacttttttctggtcacttataaaaatgtggcttttttgaagcctccacaacaatctcttgccgttagttttattgttactgttgctgttaagttttatattccagagttttcctggttcattttccccattcttgcattgttcaattatggattcaatctattcaccaaatcaatcaacaggcgattcctaagctcgttttctcaatgtgaacttataattgtttcacaaggaatcctaacttttttggcgcaatcaaccctttgtgagttggttccttccgtacctgatctcgccttgtcttgttcaaatgatcctactactcgagttttacagatacttttctttggtttatcgatgacggtggccgctatgttatactcagctactcaaaatgacaatcttatttatgtttatacatcttttttcaccggcctgtttctaatatactctagaattgctgttattctgaac

SEQ ID NO: 104386 - DNA, 473 bp, Glycine max
  Clone ID: PAT_MRT3847_65277C.1
ttttggtttttttttttttttttttttttggcaaataaaaaggaacagtgatggactacattttatattaacgcaaaccaaggctcaaagtttacatgactagctcatcacattaatcatacaggcacaccctaaataaaaacactaacagttcctcaatatagccatagaagtgcacacaaatccatggctataataaacacaattgcaccccgcatagtggtacactcaaactttgatgcggaacgaacaaaacacaaaacggccaacctaaggaagcttcttgcttctctaagggcacttggtcttgaagccatgggtggtcatatcatggaagcaggttccacatacctccctatttacaggaaggccaggggggacaaacttggacctcatacagaacgtgccacacgccctagtgcacaaattggggctcccatgaacactgcccctacagttgcacaacccaccac

SEQ ID NO: 104387 - DNA, 326 bp, Glycine max
  Clone ID: PAT_MRT3847_65278C.1
aaaaggatgcatgggctggaaatgaaaaaaaagcccttgagagggtgggcgttttggatgctatgtaagatgaatcaggtcttgctgaatatgacagaattatacatggccttattgatggcgggttagagaacgtttcacaacacatttgagggagctttgggtgacatgattttaacacttatattgttgtttttcaactttcgatacctcgtttcctacaacaaactttgagacaactgagctgtcatcactgccggcctcatattcgccttcatcgaacatgcattcaaactctttgtcttagtatcgagcgtggaacattt

SEQ ID NO: 104388 - DNA, 375 bp, Glycine max
  unsure (1)..(375): unsure at all n locations
  Clone ID: PAT_MRT3847_65279C.1
ggatcaagagtgcttcatcaaggtaatgcatcaatacactgatgcatggtgttgaccattacaactctcaatgtgtgcttcttgactatgtagacatgtttatcttcacttgtagtcaaaccattgcatcttctaatgattcttaagtcatgtgcagcttccaatatctgccccttgacttaaactacctccaaaatgatacttctagtcatatacaacttctaatatatgcactttgacatagaaaacatgactgcccttcttcttttggtttcttgcttctaaagttggaacaagcttcagggttgggaaaccaagtctgtcggaaaaaagcttaacacctgntctctatgtttcttgataagtcacaatttt

SEQ ID NO: 104389 - DNA, 285 bp, Glycine max
  Clone ID: PAT_MRT3847_6527C.1
cggttggactgtatggtgaatcaaccgtattctccagccaccagacactgcatttggatggaacggtcaaactagggggcttggttctaatcctgaaagccacgatgaacagagcaaaatcaaggtcaacaaaccagctgggagcaaaaataacgtggaatatcttgctgatttaggcagtggcggtaaaataaaggtgagcacatttatttcttggagcccaataccagttacctgatttaggagttgcaacgcacatgaggaagaaacaagcaccaatacttg

SEQ ID NO: 104390 - DNA, 370 bp, Glycine max
  unsure (1)..(370): unsure at all n locations
  Clone ID: PAT_MRT3847_65280C.1
aaaaatataaattcccttgtttcatgtctttcctttatttgggttcttttggggtgatcttttgagttgaacggagattaatgttgaaatcttttttataaacctagatgatttccttgctgtcttggtaaatttaatctgtatattcgtttgtgtttgtaagtttaaaccccacacttgttaggataagggtgtgttgttggatcntttgtgttggttggcatcttattgtagcgttcgactattggttgatggaaaatgttggattcttgtggctatttatggtttttttaagttgttcttgtttgttttcctggccttaatgttactagactttaatttgaccaaacatcagctttgcccagttttt

SEQ ID NO: 104391 - DNA, 1559 bp, Glycine max
  Clone ID: PAT_MRT3847_65281C.1
tgagcgacaatatgataaggtgctcaagcttgggtgcacaccatccattgacactcaaataccttaacatcccaaaaaagtcaaacctcccattcgtgaatttgaccagcaattccttccttccagcaattccttccttcttccatctcttccccctaaagcacacaacaaccctcttcaaatcccttcacagaagcttgcaaaacccttaaactctacaccaccctcatcgatcatggcttcaactaccacagaagacgacagcgaaagtaacctacgacctttccccggtcctcaaagtctacaaaagcggtcgcatcgataggttggctggcacagcggttcttcctgcggccctcgaccccgaaaccaacgtggaaacgcacgacatgtcctcgttcgtgcgcgccccgttaccctcaaccctttccaccccaatggaagctcgcttcggccgcccccgctgcgagcgctccctccctctctttttggggcgcgaggtgagagcggtcgcatagagaggcttgctggcacagcggttcttcctgcgggcctcgaccccgaaaccaacgtggaatcgaaagacatcgtaatctccgaagaaaacggaatatacgcgcggcttttcgttcccaaaagaaccaccttttccccgccgccgcagcaaaagctccctctccttgtttacacccacggcggcgccttctgcatcgaaaccccgttttctccgaactaccacaacctcctcaacaaggttgtttccaaggctaatgttgtcgctgtctccgtccactaccggcgggcaccggagcacccggttcccaccggccacgaagattcgtggattgcactcaaatgggtggcttctcacgtgggtggaaacggcgttgatgagtggctgaacgaacacgtagattttgagaaagggttcctcgccggtgacagcgccggcgccaacattgcgagctatttgggtattcgggttggaacagaagggttgcttggtgtgaagcttgaaggggttgttttggtgcatccctttttctggggagaggaaccgtttgggtgtgaagcaaacaggcctgaacaagcgaagaagatacacgatttgtggcggtttgcgtgccctagtgagagtggatccgatgacccgattattaacccgagtaaggatccgaagctggggaagttagcttgtgaaagattgcttctttgtgttgcggagaaggatttggtgagggacaggggtttgtactataaggagttgcttgagaagaatgggtggtctggtgttgcggaagtggtggaaacgaaggatgaggaccatgtttttcatttgttcaaaccgaattgtgagaatgctcaggttttgatcgaccagattgtttcctttctcaaacaggattgaacattattatgtgtgtatgctttattttgtttgtgtttaaattgtcctttttagttctcagttgtatgatagtttatgcattctaccttttatatattatatattgtatcctattaaagaaaaaaatatttaactatttttttttgtcttg

SEQ ID NO: 104392 - DNA, 428 bp, Glycine max
  Clone ID: PAT_MRT3847_65282C.1
tttttgttttttaccatcctccagacttactagttgagtgttccgtccggtctgtaccaaagatcaaaacatccacttccaaaatgggataaaacttacaaactcaccacactagtcgcccacttagtatcatgcggggaactttaaacaacagcaaactatactatttgggctctcacttaatgtcaaaggatctcataaactccatcaaacacgtcatttaccaatataacccctttgacaagtttagatgcatgtcaaaatgagtaaaattgaacaaattcaacctgcttgtggttgtggataaagacaaacaacattgtgttttgtgacccgacaacagtttggtggaacaaagatggacatccaaaaatattgatggttcgtagaaggaaacatataggaattacttatttgtacaaaaacaa

SEQ ID NO: 104393 - DNA, 248 bp, Glycine max
  unsure (1)..(248): unsure at all n locations
  Clone ID: PAT_MRT3847_65283C.1
gcttttgcataagatggatggttctgggagtttctttgaaagttggtagaaagctnctagagtatatgaatcnattctacagnnccacattagaagaaagtataacnagtggaaccttggttanagaattnaagttcgaacttactctgttgtgtagttgnncttattaagttcctaaaaatanttccttactggcaagttgattttcanaataagctcatatantttgaaaacataaagataagtat

SEQ ID NO: 104394 - DNA, 180 bp, Glycine max
  Clone ID: PAT_MRT3847_65284C.1
tattcggctcgaggagaatacgacagaagggtatatcaattttgaagtatcctttattcaaatgagttagaaaatacgttataagttggtagtttattgtgtgatgatgttatacaaatttaacactattgtagtttgtggtaatagaagcagaatactcgcaatctgggatatattatt

SEQ ID NO: 104395 - DNA, 731 bp, Glycine max
  unsure (1)..(731): unsure at all n locations
  Clone ID: PAT_MRT3847_65285C.1
caaaagnagctcatgtcatcagtgagttggaagagattttggaaatgactagcatggctgagtttcagaagatcatggttcccactgttccgacgaatggctttcagcctcaatagttctcattatcaggtggctgaaagagcacatttgctatggaacaatgagcacattctgaatctgataacgcaaaacagacaggtgattctgcctctagtgttctcagcaattgtacataatggtcaaagtcattggaaccaagcagtgctgaacctgactcagaacataaggaagatgctgtctcagatggacgaggagctggtagctgcatgccaacgcaggattgaggaggaagattcaagtgcaagttctgcagctgagaggagaagagtaacatgggaaaggctagaagctgctgctgctaattgtgtcccagttcaatctactacttctgtaggtggagctggagatgttttagtcccagtaaaatctgctacatgctcagtggcatgctaagctaattaattggtttgagtaatgatgtaaggttaaggtggttctaattactgttactattacacaatagtggtgtggttattgagtttttatttgtatacaaatactagcctcaaaaagaaaatgaaattgtggtgacttgaggggtctttgtttgccaaaaaaaaaaaaaaaaaaaaaaaaaaaaaagaggcctagtgagaggaaatttatttttg

SEQ ID NO: 104396 - DNA, 833 bp, Glycine max
  Clone ID: PAT_MRT3847_65286C.1
cagtgccaaatacccaaaaggagctcatgtccattagtgagttggaagagattttggaaatggctagcatggctgagtttcagaagatcatggtcccactgttccgacgaatggcttgctgcctcaatagttctcattatcaggtggctgaaagagcacatttgctatggaacaatgagcacattctgaacctgataacgcaaaacagacaggtgattctgcctctggtgttctcagcacttgtacataatgctcgaagtcattggaaccaagcagtgctgaacctgactcagaacataaggaagatgctgtctcagatggatgaagagctggtagttgcatgccaacgcaggattgaggaggaagattctagtgcaagtgctgcagctgagaggagaagagtaacatgggaacgcatagaagctgctgctgctgctgcaagtactagttgtgtccaatcttcttctgtaggtggaggtggagatgttttagtcccagtaaaatctgctacatgctcagtggcatgctaagctctaattgctttgtaaggataaggttctaattactattaatattacataatagtggtgtggttcttgagtttttgtttgtggcaaaaatagggtggtgggtatgtatacaaagaaaatgaaattgtggtgactgagggaaagtgttatttatttatggtttggaggaacagatgcaaaaaaaaaaaaaaaaaaaacgggaaaaaaaaaaaaaaaaaaagaagggagggggcaaatattttggaggtggcagcacccggaaacccctggacttcctttttttttaagcttttttcttttacc

SEQ ID NO: 104397 - DNA, 478 bp, Glycine max
  Clone ID: PAT_MRT3847_65287C.1
gcgaggccaattataccagtttagcacccggcatctcttctcgtctgttttgaaaatctcgttcattcaacgcttaatttgggtattggatcggaaccctgacaattctaggtatgaagccaaggttctctctcttttactttttcttgtttttttcaagcgaattgcattttcgacagatctgggcttcgctttctctttcgaaatttaaccgacaaccttgggatttttttaaaccctaattttacccccaattgaacttcttattctattctgcaccgactgtatggctaattttgctcgctctattcatcccaactgttaaagaacatagccttcgtttttgtgtgatagaaaatttgttatctgtgctgatgattcaactttcaagtgttgtttctgctttgagtgtaaattacaaaaagttcacatattatttataggaatgcatacttgtgttgagggaagtaaacgtcag

SEQ ID NO: 104398 - DNA, 333 bp, Glycine max
  unsure (1)..(333): unsure at all n locations
  Clone ID: PAT_MRT3847_65288C.1
caaacaaaagggagggggtgattccaacgataataagaaaaggctggaattttagagaatatggaccaaaacttaaacgaantctatcccaaaagcctttcttccagggacaatcttcttgaacaggaatcgggtccacttggatccaagcgaaaagagtctcctcaagaaaggatttccaaacgagctccttgcactgcacctgggtaaacattttggacactttacctctaacaattatagcctttcggcgaccgaatacatgaaatccaccatcaaagtacctctcaacaacacggttggtgaataattcgaagatgttgggcttaatct

SEQ ID NO: 104399 - DNA, 256 bp, Glycine max
  Clone ID: PAT_MRT3847_65289C.1
aacaaaagctgtttccactggcagacatacattgggtttaagctacaaaggtccaaccggtagttaactactgtgcgtgctggatcgtcagcagcagtgctatcggcaacaagctcacctcgtgctggtaagcctctgcttccaatggatgcaaatgaagatgaagagaacgagaaagcacagccagttacatagtcacatgccatcttccacatgagattctctcttgctagcatgtactctgcaatgcttctga

SEQ ID NO: 104400 - DNA, 282 bp, Glycine max
  Clone ID: PAT_MRT3847_6528C.1
cgacattattgaaagagactcagccgcaggtcctaagacaaactttgttaaggatcttgatgcattaaaccaatttgataaaaaattcaagtgcctggcgaggaactttttccacttggttgtttccgcttaaaaatcaaagaacacattggtttccaaattttacaaaatgggaaggaactctattaaactctcgcgtttctgtctcatacacatataggagactttgtgtatatatatattttgaggggaaaaatgtgagagagaggaaatttttaaata

SEQ ID NO: 104401 - DNA, 788 bp, Glycine max
  Clone ID: PAT_MRT3847_65290C.1
ggctaaacttggttctgatgatctaaggacacaggatgcagctgcatggctagaatactttgaatcaaaggctctggagcaacaggaggctgcacggaatggtacacctaagccggatgcctcaatctccagcaaaggtcatttaagtgtgtcagacctcttggattacataacaccggatgctgatcagaaagtgcgggaagcacagaaaaaggcccgtgccaagttaaagggaaaaccaggccaaaactgggaaacagcttcagatgaaaatcagaaggatgaagacatgtgtcaaggttatttaattacagagactactagtgataaagaaaataaatctgaagctcaaattaaagaccacgggattgataaagttgagtccactcacttagaccaaacaatgctcaatgaaagtgataacctggcacaggatgacagctcagatgaaggatggcaggaggctgttcccaaaggtcgttcactcactgggcgcaagtcatcttcatcaaggaggcccaccctagcaaaactgaatactaacttcatgaatgtttcccaatcatcaagatatcgaggcaagcctactaatttttcctctccaagaacaaatttaaatgagactattgctgggccatccccatctgttgcaaaaaagtttattaagagtgcaagcttcagtccaaagctgaataacggtaatgccccagatgctggagcagagaagttagcagactcaaagtcagctccagccagcccagcttcaagtgatcaaattgctaaaccag

SEQ ID NO: 104402 - DNA, 511 bp, Glycine max
  Clone ID: PAT_MRT3847_65291C.1
cggatgatcatgtgctacaccgccatcacaggctgccgggggttataatcggaaacaaaagcggtcgttactcgctgtcatgaatcttccaatttctacctactcctgggtgatcgatttcttgagggtaagcatatcactctctgtgctggtcacaggcttcgtgaatcatttgctcacccactctcagtgtcttagctgaacactatcctcttggatttgcgactgcatgtaccatgtaacctatttctgagtgtctctcagtcctctgcttacatacaagctcacgctggccataacggggatgagcgctctcactgtggtatctagtataggacttcgcgggtggacttcactattactgcccttattttcactgtgtacaagacactgatgcgcattgccgttcaaagtggtcttatgtgaaaaacacttgggcagaggcgcaaacggctgctccgttaatactctctggggacaacaagctcacatggaaaacacctttacttgc

SEQ ID NO: 104403 - DNA, 1103 bp, Glycine max
  Clone ID: PAT_MRT3847_65292C.1
tttaaaatttaaactcaaatgtaatctatcaaggaatcattaaataatgtcaattggtgcttggccaagttttgtcaaattatttactttcaaacagtatgcattcatcgaatgttggggccgcctgatctagtcacgtatagccatgttttgtgccctgcaacactcttattgtacttgttgaagtccgaattttacaatgttaatatctgatttcactccgaagacaataacagagaaatgaattgaacattaacagaagcaaacatgtcttaaaaaggtgaccacaaggtattggataggcactggctacccatcattcgcagcgttaaaaataggaaaaatgtaaccttatcttcaagtgcaaccatgatgtatgcttcctaaactaaagtatagtgcatgagcatgaattcatcttttgattgttctccttattcttctctgttttctttttagttactcgaggttgtactacaacatgcattgtaacaacatccccagggatgtcaccaaacgttattctggaatcagcaagagttttgttgttttccaaaactttaccagcatgtataagttttaggtcacttacagacattggtgtaactggtttgccttgaggccactcagcaactagcttttgcttaagggtaccaactgtggtagatgaagaatatgtactatgtgctatatcagttccatcatatatgcggaatttaagctcaatacgtccctcgcctttagccatgatagcttgtgtccacctccgccaagcttatgcaatagcaaaacagtgcttccttggatcaaaggatttagtcttgccttgttcacctgtgtgactctgagggaaatttccttattatagcaaacttgcaaaaattgcacatctgaattggctgctagagaaccgatacaaccaagtgaacacctcatatgatccaattgcttctccaaacaatgtttacgagataattctcagcgtccttatagggaatttcaagaccaaaaacaaagagaaagatcggattcccacagatcacactgatcaagaagccatcaatggaagctcgagccgattcggctcgagctcgagccgaatt

SEQ ID NO: 104404 - DNA, 403 bp, Glycine max
  Clone ID: PAT_MRT3847_65293C.1
agggaaaataacgacctgcaaatttcacaagaaaatgtaattgagggaaaaaattcgagaggaaaaaacatgaaccgggctaaagaatataaatgagcaaacactcaatttttagccactggtttaatcaagaccttataggatccagtcataagtcacgggtcagggatgtgccagctgaatacaacagggctgctttcaggactttgatgcatatatccagctctaccctgaacgcgtgagggacaaaatataaaaaagaaaaagcgataatcgcttagcgaaattcttcacccactcagttattggcagttgaatccaacattgctgtaatggcaactttcgttcaaaaagacatcaatattgtgatgccctgtgacagtatgtgaacctttttaaacct

SEQ ID NO: 104405 - DNA, 541 bp, Glycine max
  Clone ID: PAT_MRT3847_65294C.1
ggaccccaaaagcctgggctttggagtcaaaatcacaatctcacacaaaggctgaaaaccatgactttgcagccaaattgcagccgcaaactgtcaattatggggcaaaaatcccaaaagccttgactttgcaaccgaaatcacagttgcccacagttcactaaaacctcatcaaaactacctaaagaactgcatttaaacttttggccagctaaaatcctactctcatttgcccaaaagttcctgcaacatcaaagatcacaacaaaactgggaccgcaatttaaaaccttgggggcacataaatcctaaaaaccttgacatattgcagcgcaaaaatcgcaaaaacctcgacattgcagctgaaataggagtcacagaccattttccaaaacctcatcaaaaccacctaaagaacaacatctaatttccatcctcactaaaaccctacacattaaaaaaaaaaaaacagaatcaacctggagcaagaaaaacacgcccatggcggccatgtgttcgccggactgaacatgctggaaccc

SEQ ID NO: 104406 - DNA, 431 bp, Glycine max
  Clone ID: PAT_MRT3847_65295C.1
gggtttcacattctgttaacattggccactgttcacacacacattctgtgcacaactttaagtacatttagtttgtttgtctgtgtgtgtgaacagtggccaatgttaacagaagatagaacaaactaaatgtacttaaagttgtgcattgggtttcacattctgtgctttttgccttttcatttaataggttgacatgaatggtgaactgtctgtcaagcataaattgtctggtcaccagaaacctgtttcttctgtttcatggagtcctaatgaccaagagctcctcacgtgtggtgtggaggaggctgttaggcgttgggatgtctctaccggtacgtgcctgcaagtttatgaaaaaaacggtcctggcctcatcccctgtgcatggtttccaagtgggaaatatatactttctggcctcagtgaca

SEQ ID NO: 104407 - DNA, 174 bp, Glycine max
  Clone ID: PAT_MRT3847_65296C.1
aaccagaacatttcttagcaattaagagagaataattaaaacaacaaaaagtgccctcctttatctacttgttttgaacctaacactttggtaaaccatgctgcatatgccatgaatctattgtatcaaacagctggacggaatccattgacttgtgatttctcgcaaacagcc

SEQ ID NO: 104408 - DNA, 379 bp, Glycine max
  unsure (1)..(379): unsure at all n locations
  Clone ID: PAT_MRT3847_65297C.1
gaganaggcggnccccaccaanaganaaccaaaannnccgggcgcagcagggaggcaaaggacaggaaaggacggaaagaaacacgccagcggggagagacgagacggcgagagagagaggagacggggganacacactttncctttgccgcggtaagagagaggancaaccccatgacctctcaggcctaaaaaaaacccaagacggggggggggggggggcgcacatatttattctcctaactagagaaaagcaaaggctagctcggaacccatatatatatatagatagatagagagggagggggggggggaggcgcgcacccgagcacgggggggggggggcgcgggggcgcgggagggggagaggcggaccccg

SEQ ID NO: 104409 - DNA, 339 bp, Glycine max
  Clone ID: PAT_MRT3847_65298C.1
aaggactttagatagagcttatgatgaaattaaatatttaagttttggccttggagttaatgatgaacgtatggctgaacaagctttgaccttttataaaataacagtactttctacatgtagtcgtagaaagactacaacttatgaatggttgctaatttttttacatcagtgctggcgtaagcaacgatgtagaaatcagatatttctacatcgttgctaaagagagaaacgatgttgaaagcataagttattacatcggtgctaacgagaaacgatgttgaaagcgccggttactacatcggtgctgactaaaacgatgttgaaacaggtactaca

SEQ ID NO: 104410 - DNA, 1209 bp, Glycine max
  Clone ID: PAT_MRT3847_65299C.1
acacataaactgcctttctttatttgcatgccaaaagaaacctctcacatcaaaccaaaaaaaaaaaaaaccctctgatatttgaagtataacatcacatatccacttaattaaatgattcaaagttcgaattctgatttataagtataaaataaattatgttaaaaaaaaaataatcatcttatgtgtggtttccaacaaaaatttgttactattttcaatagaagtacctccataccaatatataccatgattaaagaaaataaaataaagactacaacatcacacgtgcaatgtgtgtgtaacccctttcttctctatgctttgctttgatttcttctgcacacctcagggtcctctcaatgtggtaccctcctccaatgctaacttccctctctaaatggcagcaatagctctcaaaaacactcacgtttacatgcaatttgaaatccatcaagaaaaggaattccagctccaacttgttcagctcatcagttgttaacccaccaactcttccaaagtaggaatttctgtagttcatgtcttcaacatacttggaagcaagcatgatggttgtgatgagaagcctatgcacatttctagcattgattctgaatcctggattgttctggcaaaacctgtcaatgtagacataagctacaacatacactgaaggccctgcacgagtgtacctgaaaattctctctaaataagactggattgtcatgtcaaggatctctctgcagtcaaagatgtttgtgctaatggccttggacaaagacctcgaaccattcttcacgatcctttctgttctggccatgctcctctcaatcagtgaagccagaacattgatcaccaatggggtgctgtaatgatcctcttggtaggagtaggagtacaaatcagagcgaagctttcttggggaaattatgagagaagaagccatgatcagtgaaaggggaaagttggtttggtttcagttttctttttcaagcctttgaaagtgattttgtgttgtcaagaagcaccaaatgatgatggtggggttttgaatttgatcgcgtaggaaagttttagaagtaggctttatatgtaataaatagatggagtaatagagagagtcggcaatggaatgagtgaggaagcagtgggggacttgggtgagtggaagctcgaattgaaagataataaaaatgaaaacccataaag

SEQ ID NO: 104411 - DNA, 137 bp, Glycine max
  Clone ID: PAT_MRT3847_6529C.1
tgtgggcaccatcaacttatctattttctttctggtctcaaaactggctaaaacttgatagaacatctcgtccatgcataaaaaaacaatggcttcacttttttactacgaaagaaaacaagaaggtgggggaggaa

SEQ ID NO: 104412 - DNA, 273 bp, Glycine max
  unsure (1)..(273): unsure at all n locations
  Clone ID: PAT_MRT3847_652C.1
gttacagtgaagagattcatatgccattatccaactttcatatttcatttttgttttgaaattaaaggttcataatgacaaccacaccatgtttggttttgtagttatgctagcttgatgatttacccaagtgtgttgtatgttgatattgatattggttccctcaagactattattgtctgtctggattatgtttttagtcataatttgttttgtcactattatggcaaatgaaatataagtgataaatgttgttttgcctgtagatttnnc

SEQ ID NO: 104413 - DNA, 154 bp, Glycine max
  Clone ID: PAT_MRT3847_65300C.1
gaaaggattgcgtcatgcactgccctgcactgacgcttcaacactacaacagactactgacgttaaaatgtttttgaaactccgtttatattgattgaaaaaggaatatgaatgttgtttgatacccaggaaacggatggctgattgatttcct

SEQ ID NO: 104414 - DNA, 364 bp, Glycine max
  Clone ID: PAT_MRT3847_65301C.1
gatgtagtggtgcttaccgtggctccggcatcggtatgtgcctgtgactacctctttttgggctggatcaccatcaaatcccacaaaggtgctttgacgagtgacgagcgtgctcagcagaaccgtgatcggaatcgtaagcactcaaggtctactagacttcgcagaaaggcctacgtgcaaaagttgcgcgaactcgtctagggttctgattccgaacgtacggaagaagtactactaaggatatttgcaatacagcatcttgcggataagcaaaacgttctgaaaaaggttgtgcggaacttattacagtttggttccaactactaatcggactatcgcaagtttagtaccattttataag

SEQ ID NO: 104415 - DNA, 469 bp, Glycine max
  unsure (1)..(469): unsure at all n locations
  Clone ID: PAT_MRT3847_65302C.1
accagccaagatctaatcaatgattctgatcagacaggccagtttgtagctgggtacaagggagaagatgatgtttcacagataacccactggcttgcaaatattatttctgatggtgactccagggacttgccattctttacactacgaactcctaagcttgttccggatgacacagaacctatttggtccatgtctgcacaaaatattcctttgcaaaatctgaagcagagtgttctcggtgttcttagtggactctctgcataccgtgaggatccaagagttggtccgtttttgcttctaggtgcattaatttctttgggaactatctggctgcgaaggagccaacaagttcagtcacctgaattaaaccaacctagtttcaatcaaccatctgattcaaaccaaccaagtcaacctagttccatggatgaaaganaacaganaccgagcgaccgggttcggagac

SEQ ID NO: 104416 - DNA, 180 bp, Glycine max
  Clone ID: PAT_MRT3847_65303C.1
cgttgctttcactttacaaaaatgaatagcatgtaaaagtgttcagagacgctatgcttatcaatagcgttccttaaaagagccgcagcagatcaatgcggcgcacaatctgggggagcgttaatgccaaacagatgattgtgcatcaaattttggcggtgtggttacacatattgctac

SEQ ID NO: 104417 - DNA, 217 bp, Glycine max
  Clone ID: PAT_MRT3847_65304C.1
accagtggtaacaaaccttctattataatatttttctttaccccctcacaaaaaaaaaaaaaaaaatggaaccttgaagtgtctaattttcggaactgagttttatgtttgatgattttttccatgtgggttttgtgggaattaaggagataatgaatgttgtcgtcgtcgtggtggttgacattattaggaatacatatttgcttttgatttttta

SEQ ID NO: 104418 - DNA, 857 bp, Glycine max
  Clone ID: PAT_MRT3847_65305C.1
aatttctcttcatataaatactttattgctttgtcctaaataaataaaatcatcaaagctcaaacccccctctctctactcaaactaaccactctgtttctcttgctctacttttaccctgtttccagtggaacaaatcttcatccaaattaggttttgttttggagaaatgtatgcagagactggtcttttcttcccatatttgcacaacgtctctcacggccttcatcagcttgaggagtactgcaaaacccagaagtccaatgcttcaatggatgaccttgttcagtcttctgccatgtcagagtatgatttggcagctgagggagatctgttcaaagctcctgaacctattattgaagagccaatcatggacatgtcagcggccatctcaatgatgtcttgtggggaagatgtctcgtcacagggactaaagtccactgatattgatattcttcaaaatgatcagtttctgagtgaggtgttctatgaatgtgaaaaggatctcttagaaaaggcagcaatagagtcaccattctctgagattctggaaatcaaggttccttttctgaacattgatgagaacacaattcaagaaaacaagccatttactgacatgcaattagcaaagagtgtcagctcaggaagtttgagctcaatggactggatgcgtggagctgcaatgaagcctgctttcattgatatctctgcaatagatttcaatgcagattatggcatgcggagatcatttagtgaaggagatataaagactcttggtaatggtaacatgaacatcgtccaatcaccccttgagaggccccttcttatcagcaactgcaccagtgaggaacgcttcc

SEQ ID NO: 104419 - DNA, 390 bp, Glycine max
  Clone ID: PAT_MRT3847_65306C.1
attaccaatttacctatggcaactatgttggggaaaaaaagacgtgaaaagtgtccaacatgatgctaatagtaaaaatgataacgaataggagctcatcttatacatacatagatgttagacaacacacatttgagttaccccaccggatatatttggaacgtctacaaaggcctgactaaaatattgcatgtaacaaagtacttccatagtgaatgtacctgacatggctatccctatttaaaattgctccgtgactgcatgctttctatgcgccggacatacctggtactatcataagaacgcggtctggaaagatgcctatgtggctgtggttccacccttggctggtttctcagtgatctacggacgattatttccttcacaagt

SEQ ID NO: 104420 - DNA, 1408 bp, Glycine max
  Clone ID: PAT_MRT3847_65307C.1
acgagctataccataattattgccgtagttacttcccatttctcttcatataaatactttattgcccccctctctctactcaaactaaccaatgcgttaacccctctactcaaaccactctgtttctcttgctctgctattaccctgtttcctgtggaacaaatttccatctagctctcctccgaattaggttttgttctggagaaatgtatgcagagactggtcttctcttcccatatttgaacaacatctctcacggccttcatcagctcgaggagtactgcaaaacccagaagtccaatgcttcaatggatgaccttgttcagtcttctgtcatgtcagagtatgatttggcagcagagggagatctgttcaaagctcctgaacctattattgaagagccaatcatggatatggatcccatgacagccaccatctccatgatatcttgtggggaagatgtctcctcacagggactaaaatccactgatattgatattcttcaaaatgatcagtttctgcatgaggtgttctatgaatgtgaaaaggatctcttagaaaaggcagcaatagagccaccattctctgagattctggaaatcaaggttcctcttctgaacattgatgagaacacaattcaagaaaacaagctgcttcctgacatgcaattagcaaagagtgtcagctcaggaagtttgagctcaatggactggatgcgtggagctgcaatgaagcctgctttcattgatatccctgcaatagatttcaatgcagattatggcatgcggagatcatttagcgaaggagatataaagactcttggtaatggtaacatgaacatcgtccaatcaccccttgagaggccctttcttatcagcaactgcaccagtgaggaacgctttcaaaagctctcaagatacaggaataagaggacaaagaggaattttgggaggaaaatcaagtatgcttgcaggaaggctcttgctgacagtcagccaagaatccgtgggagatttgcaaggactgaagagtctgatgtcaagagggaatgaatgacttataactgatttagtaggaagaaagtagagttgagtagctatatctgatcaagctatatggaaaaactcagcagtaatatgtgattagaacttatgtggggattctctgtatgcttgagcagatatttgctgaataaaccaggccccaaacttcttggggtagttcatctcttatctattgtattaacgcccctatagacggaaataaccttccagatatgtatataggtttgttgaataatggaaagaaaaagaaaggattttactatgttcatatatatgatgaaatgacaaggtaacatcaataatttcgttctctaatgtcaattttagttttaatttagttaaaa

SEQ ID NO: 104421 - DNA, 250 bp, Glycine max
  unsure (1)..(250): unsure at all n locations
  Clone ID: PAT_MRT3847_65308C.1
atcactttcttccatgcatgtcaggcatatggagcagatctacttatacaccttctcatcttgtctgtttctccttacttctgccagaacgtcttgggacaggaatatgactacaggattaaaagggcaccgctagaatcagctcgaaacatatacgaaattagagatctggcaagaaaaccttcataggagagaaggaaagtacttataaaanaaatctgtgaatttagcagcttgtcgtggagtcaaa

SEQ ID NO: 104422 - DNA, 489 bp, Glycine max
  Clone ID: PAT_MRT3847_65309C.1
ggctcgagcggctcgagcggctcgagggatggtatttctaagataagaacccataatattggggtgtgtacagaaaaaaaaaaaaaaaaaaaaaaaaaaaaaaaaaaaaaaaaaaaaaaaaaaaaaaaaaaaaaaaaaaaaaaaacaaacctaaaaaaaaaaagatacacaaacggggcggcccccaaaaaccgaccatttaacccggaaaataaacccctaaccgaacccggaaggcacaccaccttccccaaaaaggagcctaataaaaactggaacaaacaatgccaaaacgaatccccagtgcaaaaaggttatccgccaaaaattccacccaaaatccgacccggaagcaaaagtggcaaccccaggggcccctaataaaggacccaacccccattaattaagcagggctcccggccccatttaaagacagaaaacctgccctgccaccaggtttaataaattgaccaccccccgagaaaaggc

SEQ ID NO: 104423 - DNA, 433 bp, Glycine max
  Clone ID: PAT_MRT3847_6530C.1
aaaatggcggaaccgccgagccccgtgcactgtgtcgctgtctttttcctcaccgacaccgtctcggagaaggaggggtttgtcaagctggaactgtggttccaggaccctccgggttctctgtccgccaagaaggttcggactgatgagaagaaggcaccgatgatagtgaacgtgtaatggggcagcggctttaacagcatgcagctgcatccgccggctgcaccttttcctcagagctatggcagcctcgcgtcttgtagctctgcccctatgtctgctgctccctccccgtcctcttatcggagcagtttctttttcttccgctggcacggcctgtcactccttagcctactgtttcttgtcttagccggtgccttgcaaactgctgggcccttctactctgtctttatgaattttatatttacttatt

SEQ ID NO: 104424 - DNA, 314 bp, Glycine max
  unsure (1)..(314): unsure at all n locations
  Clone ID: PAT_MRT3847_65310C.1
cagcgaangnaagctnggaatncggctcgagccggnacnngnnncgaccttcacancgnnccatcacgannccncncttgccggcaacnangtgatnnngcatcattgtgtcaggtcgtggntanacccnaggatccagcgccgccaagaaggtcacctcaaggancagnanngncgccnncaantccccgttcgttcgnagcgnncggtaccacaaggcnggaaaagangccgagcgtgtcggcgccggtgcacccgtatnacctcgncgttgtccncgtaatatctgnagccgnngtntgtggagttgtcgg

SEQ ID NO: 104425 - DNA, 312 bp, Glycine max
  Clone ID: PAT_MRT3847_65311C.1
ctcaaaaaaagcattccacggggcatactttttaatcctaggcttcctgcatacattttaaccagaacacaaaacacaacactttccatccctatacgttctaaacctcaaacatcacatttgaacctcttaccctttcacggtacaccatggtttcacccattataccctccccaagaacaaacgcaaccactcctaacttgaaactcacggaagaacctgcataataagcctcagcgggcaagctccttgttatcaccattgtcactatcatccccagagggaccggcacttatgttttacctcgtactt

SEQ ID NO: 104426 - DNA, 720 bp, Glycine max
  unsure (1)..(720): unsure at all n locations
  Clone ID: PAT_MRT3847_65312C.1
cacgcgtccggacaacagaacttcgatcactctcacgtaaaccaatcaaacacaatcgattcgattatattggggtcaccaacacacaacacaataatgtttatgtcaagaagattaaggtattgtctttctctttccattcccaattttcctcctttccttccaaatctttgcttccactctcactctctgccaccactcactcacaatgctgatgatgctgtttcccaattcaatcacatgttccatgtgcatccaaccccacacactttccattttaacaagattttaatttctcttgtgaatgttaagcgttaccccactgctatttctctttacaagcaaatggaactcagtgaagttgagccagactatttcactttgaacataattattaactgtttctgccactttggtcaagtggtcttagccttttctggagtgagcaagattctcaaacttgggtatcagccaaataccataactttgaacacactcatgaaaggcctgtgccttgagggtaaggtcaaggaagcgctgcgctttcatgacaaggtgttagcacaagggtttcggctcagcggaattagttatgggattntgattaatgggggtgtgtaaaataggagaaactagagctgccatcccgttgctaagaaaggatgaaaggtggtcgattaggcctaatgtgggtatatacagcatgatcattgatcgtct

SEQ ID NO: 104427 - DNA, 367 bp, Glycine max
  Clone ID: PAT_MRT3847_65313C.1
ggctcgagcattgttgtaagttgttgattactatggcctgtataattcgatattctaacctcatgagcggaatgagatcggccgtgtatgagcgatcttggctggtataggcatgggtgctgtcatcgaatgcatgttgacaactactgcctcttgcgatgatgagcggcaacacgatcgtgtcgagatcatggtcaacgatgcagatctacagaactactccatcctacgtggctctgaccgtcacactactgatgatcggtagatacggcgacataaccgactcgatatgaaccctgccaacaccgtaatgaatgctatgctgtaagactggaaggcgtattctcgtagcatcagtacacggtga

SEQ ID NO: 104428 - DNA, 250 bp, Glycine max
  Clone ID: PAT_MRT3847_65314C.1
ttcacgcgtccggcatcctgatcggaaaccgtcttctgcggctactgtcgagcatgcatgaacgacgtctttcagggatgggatggtcagaggaagcggctgtgatatagttcaagttgaaggcggtcacattgtgcgctccacaaggcataaggaccgtcacatcaaagtgtgcactctcaaaggccctattgaccgacgagtgaggttatcggcccacaccgccatccaattttacgacgtccaggac

SEQ ID NO: 104429 - DNA, 363 bp, Glycine max
  Clone ID: PAT_MRT3847_65315C.1
gcggtgggtttcttttgtttctcacctagattggggcttgattaaattttgttcaacttatatcacccatcaacatcaaattcaatttttaatcaacttaagcccataattaaggggttttacgatgcccggaacattttttaaaacggatttcccctaacaaaggccccttctggaaaaacaaagggccctaaaaacaattttttgtgagccacttaacccacaagacagagtgtttctaacatggtgtacaatatcattgggaggctccacataaattttgtcgtgcaaccaactttgggagggggattgcttaagctttttttttaacggtgtaggggcggcctcccctccctcaatttt

SEQ ID NO: 104430 - DNA, 291 bp, Glycine max
  Clone ID: PAT_MRT3847_65316C.1
agtactagcaacaatgggaaaactaacatcgatatcaggctacagagacccacaagggtggaggccgcgaaaaaggccatgaaaaaaggctcacagatagacaacctaccctaaacggatatgagggtggacagacaacaagacaaaggaagagagtgcaggaaaacagatgcaatgaaaccaaacacttgaaccagaatacaaagcagaaaggccagatcgggcacccattaaactagctgagaacgaccgcgagatcattcgcaggacaggcttgcggccaggaaacct

SEQ ID NO: 104431 - DNA, 1987 bp, Glycine max
  unsure (1)..(1987): unsure at all n locations
  Clone ID: PAT_MRT3847_65317C.1
tcttggctgcgagaagacgacagaaggggacagagacacatgcttcaaaggaatttggcaaaaagtagccatcgccccaacgatcccatttcccttgacttctctacgtgaagctccttgtttcgcatagagctagttaaaatgtcggagggaaatgcagggaaaggaaagagaatcgccatcattggtgtctcaaccttattgttggtggctatggttgtggcggtcacaattggggtcaatctcaatgagaatggttccaacaatgatatagaggacaacaagaaaaatcatgttgcttcttctataaaagccgtccaaaccctttgtcatcccacaaattatgagaaagaatgcgaggaaagccttatagctggggctggaaataccacagatccaaaagaacttatcaaaattttcttcaacatcaccattacaaaaattggtgataaactcaaagaaactaatattttgcatgaggttgaggaggaacccagagccaagatggcacttgacacatgcaagcaactcatggatctttctattggggaattaacaaggtcacttgatggaataaatgagtttaacctcataaatgttgacaaaatcctcatgaatttaaaagtttggcttagtggtgcggttacataccaagatacttgcttggatgggtttgagaacaccactagtgatgctggcaaaaagatgaaggatttgttgacgataggcatgcatatgagcagcaatgcccttgccattgtaacagatttggctgacactgttaatgattggaatatcacaaaatcatttgggcgtcgcctccttcaagattctgagcttccgtcatgggttgatcaacatagactccttaatgaaaatgcaagtccattaaaacgcaagcctaatgttactgtagccatagatggtagtggagatttcaaaagcatcaatgaggcattgaagcaagtgccggagaaaaaccgaaagccatttgtgatctacatcaaggaaggcgtttaccaagagtatgttgaagttacaaaaaaaatgacccatgtggtgtttattggtgaaggggggaaaaagacacgaatatctggtaacaaaaacttcatagatggaacgaacacttatagaactgccactgtcgctattcaaggagatcactttgtggccatcaatatgggcgacgtttgcgtcgcctccttcaagattctgagcttccgtcatgggttgatcaacatagactccttaatgaaaatgcaagtccattcaaacgcaagcctaatgttactgtagccatagatgctagtggagatttcaaaagcatcaatgaggcattgaagcaagtgcctgagaaaaaccgaaagccatttgtgatctacatcaaggagggcgtttaccaagagtatgttgaagttacaaaaaaaatgacccatgtggtgtttattggtgaaggggggaaaaagacacgaatatctggtaacaaaaacttcatagatggaacgaacacttatagaactgccactgtcgctattcaaggagatcactttgtggccatcaatatggggtttgagaattctgctggacctcataagcatcaagcggtggcattgagagtccaagcagacaagtccatcttttacaattgctcaatggatgggtatcaagacacactttatgcacacaccatgcgtcaattctatagagattgcaccatttcaggtaccatcgactttgtgttcggtaatgcactagctgtttttcaaaaagtggcttccccccccccaaatgcgccagaggagtattgtgtcttttttcctccgtctgctatcgcaacgccttgttggttctccattggctttcgaccacgagatcccaattgtctgaaactttgcactttcgtggtccgaaagccactggagaaccaacaatgcattgtgactgcacaaggtnganaagagatacaacaaccatcgggaatagt

SEQ ID NO: 104432 - DNA, 393 bp, Glycine max
  Clone ID: PAT_MRT3847_65318C.1
acgaggatccttgaaaaaaaaaacttttaatattcagttttttttaaacttagtttcttttttctaataataatgtgaatatttgtttttcctatatcactcgtttctttctattttagaataaaattgaagacgtctggttgcctaattaatgtatataatttgtttatagtttttttatccaaataaaaatgataattgaaaaagttcaaaaaaatatttgtttcaagagtttaactcattcatacatgatttcaaataaaaataaattttttaactcatggtttgtgacatgaatttgtgacataaattgagcagcaattctactttaaattatttgttatctaaaccttttgttcatgaagtttattttttgataaaaataaattaagt

SEQ ID NO: 104433 - DNA, 308 bp, Glycine max
  unsure (1)..(308): unsure at all n locations
  Clone ID: PAT_MRT3847_65319C.1
acattccgggtactactcgnnagtccgcccttttttttttttttttatgaaagaaagggagggtgacttttattaaatttcatgtagaaaatagtacattgtggactagtttaaattgactgggtggaacgacccaatatgggtttttatgattacttctggggttaaataattaaaaaattaaaaattcacttaacgggttttttctgcaaggaaataacttttttggttgagtaaaaaggatggtaagaaatattaatttttttattttttgggcttgggaaagaaaaaaaaagcttgtgaaaaag

SEQ ID NO: 104434 - DNA, 258 bp, Glycine max
  Clone ID: PAT_MRT3847_6531C.1
atttggggttgtccgctgtgcactgctctttggatttgccgcctagaattaatttacatatcttgaaactatttcctaacataaaatattcaagtttctatttttacttttattgggtatgttttgctaggtctattggagatgagagcctttgcaaggaagtatttgaggagtacattgcacagctaaaagaagaggcaaaagagaatgagcggaaacgaaaagaggaaagggcaaagaaggaaaaagacagggagg

SEQ ID NO: 104435 - DNA, 164 bp, Glycine max
  Clone ID: PAT_MRT3847_65320C.1
ccgcgtgacagcagccatgatatagcatccttcactccaccaacacagtgccgtcctgatcctagcaagtctgaggatgttcttgccggtttcgactgcctaccatccgagcccgcaatgccccgcgcatttccacccgtagagcaaaatgataaaacgaaacg

SEQ ID NO: 104436 - DNA, 394 bp, Glycine max
  unsure (1)..(394): unsure at all n locations
  Clone ID: PAT_MRT3847_65321C.1
atcacaaattttggtaccagttttagacaaaatgttgataataacttgcccattgcacaaccatgtatacaaaaatcagcttaaaaatagtaacaataaacttcaatagttgaattcaataaaacaaatagaaagaatatgtagagcatatattagctataagggtcattcattcataggttcttcaattcttcaatcaatggtgtgactgactagcattcagaaatcactgaactcaaaatgcatcatcattaatttctctaactcctcttgttctggactcaatcagattcagctgtgtgtttgtgatcaaaaccaacttcttcatcttgacttgaaggctcatgcaccatttctagacctccatcttttggacctctcanagcatgatcat

SEQ ID NO: 104437 - DNA, 420 bp, Glycine max
  Clone ID: PAT_MRT3847_65322C.1
ccgcccttctctttttttttttgtttttttatattctaacaaaatttattaattaatttttttttgggggcatttaattttctttcaatttttattctctttaaaacacctatatttcatgaattcaatattttacaccaaactaataaaaaaaaactcttataataaaacactaaccaacaaaacaacatgatctgaaaaactctaatctacttatacttactggcaaactcaacaaaaaaaccacaatctagtagatagaataattctcactagccccaagccaaaaatttttgtagatagccttggcaatcggaagaataacaataagggcaatctgaagctggtctgaactacttgttctcacagaaatctgtccactgagcttgttgttcaatccagcgcgaacagccaccttat

SEQ ID NO: 104438 - DNA, 1470 bp, Glycine max
  Clone ID: PAT_MRT3847_65323C.1
ccagatgcaagcagggcatcaagcaatggtgtctggactactactttatccgccgagcctgaagctgttagagaccatgtgccgagaacaagtcctcagaatgaaaaagggaaatcggagatgcttgaaccaactacaacttcatcatccggtggctcaggtagtagtcttggaaaaaattgttcgctatctacgagaaaccagggccaaaaaagaaaaggaatagatgtggaagaatctgaggagcaaagtgaggacacagaacttaaatcagcacttggaaacaagtcatctcaacgtgcagggttggctcgaaggaaccgcgctgctgaagtgcataatctatctgaaaggagaaggagagaccggatcaatgagaagatgaaggcattgcaacaactcatacctcacagtagcaagacagacaaagcatcaatgttggaagaggcaatcgaatacttgaaatcacttcagttacaacttcagctaatgtggatgggatctggcatggcaccaattatgtttccaggaattcagcactatatgtcacaaatgggtatgggaatggctacaccgcctttccctcctattcacaatccgatgcaattaccgagactgccgcttgatcagtctgtatctgcgtctcagacaccaaaccagacattaatgagccaaaatcctattttgggtgcctttaattaccacaatcagatgcaaaatccagctctttcagagcaatatgcgcgttacatgggctatcatcttatgcaaaatgcctctcagccaatgaatgtattcagatatggtccccagggggtacggcatagtcaaacaatgattacacccagcagcaacagcagtggaaacatgagtggagcagcaaatattgatgaggctgtgagtggcaaaatgggttaattagtttcaaagcacgcttttgagtacctatggcgtaactaacaagataattgcaagatgatagaagcccttgtaaggcttgtatgctttcacaatatgtctgcctgctcacactgtcgcggctccacggttacggctaaaagacctttttaaacaatcacttgttctttgactaggataagaaataagatatataacttactagaataagccttgctctataagcattctccactggcatatttaatgttattatgctaatgattttggctgttgcatagctctttatgaattggtctcatttttctctctatattcattttatatgccagatttataccatcattctatgtttcatattgcatagaacttctattgagtgtttaatttcagtacttcatcaacaaaaaattagtaacaccatttcatggcattctacagttttttatgttttattattcctacctttttatagaaaaaagattttgtatttaaaatccattttatcttgagaattctgatactataattttcattaacagtttttacttg

SEQ ID NO: 104439 - DNA, 442 bp, Glycine max
  Clone ID: PAT_MRT3847_65324C.1
aatatgaaaaacgccaagaaatggctgcagctgctttggcatataaatgcttggaggtggtatacatgagactggtttactgtaaacattctagcataaacagggatcggcatgagttgcaatcaactctacaaatggtttctcaaggtgaatctccttcgtcttctgcatctgatattgataatttaaataacctggcggtagcggacaaggctactttgacaaggggttctaatactcatgttcctagcaatcaagtcatatctgctcggaatcgcccaaatattgtcaggcttcttgattttactcaagacataaatcttgcaatggaggcttctagaaaatgcaagaccacttacatggctgctagtttgaacatggaagattcatggaatagggattgcataacttctattaggaaggcagttgatttcagcttcca

SEQ ID NO: 104440 - DNA, 812 bp, Glycine max
  unsure (1)..(812): unsure at all n locations
  Clone ID: PAT_MRT3847_65325C.1
tcctctatagcggccgcttttttttttttttttttttttttttttttttagagcacaagtcttctttacgtaattctattcgaatcgaataggattaacatgaatcacaaagtaaatattattttaatttgacagaatttaagatttaaattcttaagaaataattaaataataacatgctatcataattttgccgacttgggggggaattttaatagtgctaatagatagtattttaaaagggctattataattggatttattggtcaatctgactcacagttggactcttccaatctagaatctagagtaggcaacaaaagttttctgtcaactcttgctacttttggcaaacgacaaacacataacataacgcggtatgtaccgacctcggctaaggtgcgtaccccttatatgctatacgtcgtttttcaagggtgccaaattaattagaatctaactaataaaatagtgaagacatgagtaatggcacaatcaacacaagacaaagatgaaactggagtgttgttgttccaagttgccgccgccgcgttcatcctaggccagaatgaggcggttgcgttgcgttgttgttcctcctcggtgagtattcagtgttgttcgatctggaatggagaacgtgttttatcatgattttcattgttaataattttaaggaagcgtgccacatcatcgtcgacctcttctgaactagacaagaacacgcgtatgtgtttcatttcaaaaaatgtatacaatttttattttgaaaccaataattngattattcttattttcttttttaaaaaaaa

SEQ ID NO: 104441 - DNA, 367 bp, Glycine max
  Clone ID: PAT_MRT3847_65326C.1
tagcatgcctgcacgcctactttagctgatcctttcgctcaagatcaattccacattttcaagatataaagctgggacaatgttcatatatgaatcaggaattatttgtcttattattagtgcattatcctgtagcctaacgcacatagatccatatccctcgaactatcctaattccacaacacctacacatattcatgcattactgttcacatattgctatgcattaatctgcttttaacatcaggccaatcttgaactcatagcatatcactacttcttcaactcagacttctgcttcctcattgactaagcttccactagcatgtttggtaatatactatatatttcttatcctccatttact

SEQ ID NO: 104442 - DNA, 208 bp, Glycine max
  Clone ID: PAT_MRT3847_65327C.1
tgcactcgtgcgctagctcggaatccggctcgaggccgacctgaggctgacaactaccctctcgttaattgaccggcgagccccaacccagtataggcgtggccgtcacttctcagggacgactgcattgcttgctatcattacctttaacatgaagattgacttcacccctttcgaggcagagaaagtggtggacaccaaccaattg

SEQ ID NO: 104443 - DNA, 413 bp, Glycine max
  unsure (1)..(413): unsure at all n locations
  Clone ID: PAT_MRT3847_65328C.1
tttaagcgatacagcaaggataatgttcacagtttagtttactttggttttgcaatttgttttattgttggacttggagaggagaggagagggattttgataaaagcctgtgtttggtactttggttccgaagtttggcgggaagggaaatgaaaatgaaagggaaaatccctctctccttccacatatgaaccaaattgctcattagtaaaataattttgtaaattgtttttggtgtaaacttctatacaatgcatgtatacctatcttttttctcattggttcttctaaccttataatttattttattccccccccccccccccccccttttacttttggtgacaagcanattctgtanagagattccacatttcatcttttatcttattcgttttggctcaaaatattct

SEQ ID NO: 104444 - DNA, 406 bp, Glycine max
  Clone ID: PAT_MRT3847_65329C.1
cctacaatcaatcatttgacaacatttactatatttgagaagtattttgcttctttaatcaattacaacttcctctttgctctctgctccagttacaaaagaataatagcacattgtaatacacaactaagaaaggaaaagcagtgacaacaatagaagaaataatttctctgtagtatcaagtatgatcatatgcacaggtagttgaataatatttgcattaaggaatgctgcatctgtatctatcaactgcaaagttgagagcatagctgttgttgagcctccaatgagctaatatctgaaagaggaaacatgtgacttctcccattgctcaagcatgttatgttaagttggtttcgtatttgggttgactcacaataaagttgttgtgatttgcagctccatt

SEQ ID NO: 104445 - DNA, 449 bp, Glycine max
  Clone ID: PAT_MRT3847_6532C.1
aagcgtcaattcgagtggcagtagaccaccgaaagggacgccaaggtggaacccatctcgagcagctggtatagcattttgtgtgttccctcatcactccctcacaccttatcctatcgcattatcactttctccaaatggcgaacgaccaagaccagcaagactctccccaacaaaatgcccctttctccgattccgactccgactccgactccgactacgactccgactactcctacgacgaggcggaggacgaggccttccgccgcgcctttggccaacgcgacgatggtgacgactcgtcatcgccggagaacccgaagcgcgaagacccggaggcgaactttcgcgccttctcggaggcgctggagagtcccgcgatgaaggagctgcacgaggagctcgaccctttgattgcggagaagaaaaacccttacgacttccccaga

SEQ ID NO: 104446 - DNA, 379 bp, Glycine max
  Clone ID: PAT_MRT3847_65330C.1
caaaaaaaaaacttgaaacggccacaattcatcccaagagttttaaaatttcaggctcaacaggttttaaatttttaaattcacccccaacccaacagattttaaaactgcacccgttagtctttgttttctacagcataaatttcacccgggggattcctttacaaaatataaaaccccagaggccacctaaaaagaccccacagttttaaaagactcaggaacatgcctaaacatgtccttgtttttattccactcaggagggggggcattgacaaaaggggcataaagcttgtttttagcacaagtaactgaaatcaagctatgagtcccaactccatcaatctcatacacatagaacaggtgccccttataatcc

SEQ ID NO: 104447 - DNA, 394 bp, Glycine max
  Clone ID: PAT_MRT3847_65331C.1
ctcaaaccatgaataatacactggcggacactactgagcatcgaggtacgcctgattcagattctataacgcacgtaaagccaatcaacatctgtacccactagttcactcatctaatacattgaagactctctcgcctttccatcacactctatctgaccatattggtcaatctcattttacacacgaaccacgacaatatgagcgcacgctcatggaccatcagatcgtcatagcagctgcagaggttgttaacataattgggctactcgtaacatgtctactgtctgaagctaacagattagacgaaacatctcttctattgtttgccaccctagtatcttaagtgactagacttatcactttcatcctcaacagaccatatgggctatca

SEQ ID NO: 104448 - DNA, 286 bp, Glycine max
  Clone ID: PAT_MRT3847_65332C.1
tttttgcattcatgcacaacaccatttcaccttcattttcataactgtatagccataaggcactctatctgaaactcaatatctacacaaaccactataaaaaaaattctgcaagaaagtttaaagtcgacctagaatctgagaacacacatcaatacctatataaatggtcagctatcatggcttcggtcctcctatttttatattgccatatcgctatgtcgaagacttaaatgaattagatactcctgatcacaccgtactactgactgaagtgatccacact

SEQ ID NO: 104449 - DNA, 302 bp, Glycine max
  unsure (1)..(302): unsure at all n locations
  Clone ID: PAT_MRT3847_65333C.1
cccaaccaaacagccagaaagaaacacaaatatataaaacaaccaataaaacaaaaaagcaaccacaacaaaaaatatatatatattaatccaaacaacacacaacatacatagagcaagcccacctaacctaacacagacacacgagagaccaccccaatttagtagacccaaacccaaacccggctagcccaaaaaaccaacggcaccatagaaccttgtaccaccaatccagcacgaacataatcactctctcactcaaactntcacacagcgaccaccccggtagtccccacaacccc

SEQ ID NO: 104450 - DNA, 287 bp, Glycine max
  Clone ID: PAT_MRT3847_65334C.1
attgtattcactttttttttgacccaacggctcgccaaaaggaaagtcacaaaccgccaatgtgcaaatgggaaaacccaaacaacttttatgtattttgagaaaaagggggtttatcaaattgaataaaaaccctcccacaaaaaagactgaaaacaagtttggggaaaccaataaaacaggggcggtaaacgggccttcttttttccctgccatgtgcccaaaaaaaaggggtttcccttttgttaaaaagcttttactcaacttttgccaattttggccctggc

SEQ ID NO: 104451 - DNA, 246 bp, Glycine max
  Clone ID: PAT_MRT3847_65335C.1
gtggaaaacttaaataattacatccttatgcaaaataaaaaaacattgtacatttgaaaatcgctcagaatataggatccaacattacttaatcttgcatcctacattatatcacttttataatgtatcctaaattcaataaactgaccaacaaattacaacctcccgacttagaaaacccaagcttacccaaacttaattgccatgcaatacatcttctttactgcaacttaaataaaattaaat

SEQ ID NO: 104452 - DNA, 539 bp, Glycine max
  Clone ID: PAT_MRT3847_65336C.1
aattcgaattcggctccttcttctctttccttcaccagcaaaattcaaacccattcaacccaacaaacctaaaacaaacaaaaaacccctaatcccacgtaattataagcttaatcaaccccaatccgatccaaattaagccatgaaattatcctaattaacggttttccggtttatgtaaactacacaaagcgatgccgagcgtggccgtgaaactctacagcgtcttcttcaagtttcttttaaagcaccgtttgcagaaccggatccaaggccggcccgaagactccgacccgttcggcgtcacgacccgacccgacgaatcggtggctccggccaacccgtcattctccgatggtgttgccactaaagacatccacatcgaccccttaacatcttctctggattagaattttaccctcagattccgcgctcgaacctaattcccaacctagcttcaaacccgttcctggatctgaggcgcaacagctacgagccggcgattttcttgccgcgggaggaggagcggcggaacagcg

SEQ ID NO: 104453 - DNA, 324 bp, Glycine max
  Clone ID: PAT_MRT3847_65337C.1
tttttctggtttacagggagccggtcaagctttgccagacatgattgatttcgatgataggtttgaggtggatgccacacaaaacttggtgatggcaccacctgcgtattgggtagacacaatcgtggtgagacgtttctatcctggaacttaattacactcagtagttgtcactgatccggttgacgtcaaagtggcctgatttgaaaaccactcaggcgttggtgcaaatgttagctacgtaaatgttctttggggacaacaggctgactgagacaacaatttgtacttgcagagatttggacattttggctgcagattata

SEQ ID NO: 104454 - DNA, 817 bp, Glycine max
  Clone ID: PAT_MRT3847_65338C.1
ctctcgagccgaatcggctcgaggcgagaagacgacagaaaaggatgtggctgcagaaacaaaggcagttgagccagaacctccagtttatgcaaataagatggaggctaaagatgcattcaaagcactcttggagtctgtaaatgttggatctgactggacttgggatcggtccatgcgtttaataattaatgataaaaggtatggtgccttaaaaacacttgttgaaaggaagcaagctttcaatgagtacttaaatcagaggaaaaaacaagaagctgaagaaaagcgtatgaaacagaaaaaagcccgggaggattttaaaaaaatgttagaagaatccacggacttgacttcatccgctagatggagcaaagcagtgtccatatttgaaaatgatgaacgtttcaaggctgttgaacgtgacagagatcgcagggatatgtttgacagcttcttggaggaacttctaaacaaggaacgagcaaaggtacaggaggaaagaaagcgaaatataatggaatacaagaagtttttggaatcttgtgactttataaaggctagtacacagtggcgaaaagttcaagatcgcttagaggctgatgaaagatgttctcgtcttgaaaaaattgatcgcttggaaatattccaagactatttacatgatttagaaaaggaagaggaagagcagaagaagatacaaaaggaagaattgagaaagacagaacgtaaaaaccgtgaggaattccgcaaattgatggaagaacatatcgcttcaggcattcttacagcaaaaactcactggcgtgattattat

SEQ ID NO: 104455 - DNA, 488 bp, Glycine max
  Clone ID: PAT_MRT3847_65339C.1
cccacgcgtccgggtcctcccctcagcggcatcgttgtattgttcttacacatctttctctctctcactttcggtctctaaaccaaaaccctattcgagatcacaatcggatcgtacacaaacagagaccagccatggacggtgattcctcttggagtgctcgactctcttccgcttccaggcgctaccaatccgctcttcaatctcgatcagacatgttcatgggttttgatgaaaatgatggggacgatgatataagagaggagtttctctgcccattttgttctgagtattttgatatcgttggattatgctgccacattgatgaagagcatccaatggaggcaaaaaatggggtatgtccagtttgtgcattgagggtgggggttgatatggtagcacatataaccctacagcatgggagtatatttaagatgcagcgcataaggatagcacggaaaggtggagtcgattcaacactatcttta

SEQ ID NO: 104456 - DNA, 292 bp, Glycine max
  Clone ID: PAT_MRT3847_6533C.1
ccgaagtgttaaaagagtgcctctttctatagggggaggagctggtgcaaagaatgctatgctcatgaatatgccaaatgctgttctttcgatggggagatatgttggttggagacctcgactttgaaggtttgtaagatgactgcttgcctacatgaaatgtacagactcttacttgatagcatttggaaaattggctgaagacagccattaaatatgaggcgttttcccagagctaggggaaagtgggaaggaacaggaaaagagggatgtggaatggacacaagaggaa

SEQ ID NO: 104457 - DNA, 481 bp, Glycine max
  Clone ID: PAT_MRT3847_65340C.1
acggctgcgagacgacgacagaagggcctccaattcccggatgaatcattgagtgaggcacttgaaagattcaaaagtctattgcaaaaatgcctactcatggtttttctgaaccaatacagctcaacatatttatagatgggttaagaccacaatctaaatagctcttggatgcttcaactgggggtaaaatcaaaatgaagacccccgaggaagcaatggacttgattgaaagcatggctgctagtgacattgctattttgagagacagagcccacattcttactaaaaagatcttattggagctaacctcacaagatgctttgttggcacaaaacaagttactatccaagcaactagagaccttaacagaaacactcagtaagttgccaactcagcttcattctgcacatacttcacattcttctattttgcatgttgcagaatgtacaatttgtggtagagctcatgaatctggatg

SEQ ID NO: 104458 - DNA, 355 bp, Glycine max
  Clone ID: PAT_MRT3847_65341C.1
tgcaatctgcggtgctgggttggccaaagggttccagaaatcgttctacaacacgtacggaggtggggttaacactgacatcaatggctacaacaaaagtaccgcttttggtgctgacatcattgatacctttgttcttctctacaccgtcttctaatccactgatcctaaaatgaactctaagtactctcatgttactgtgtttacaccactctccattgggtttgccgttttcatggttcacttgcctacaatccttgtcactgtaacccttataatccatgcccggatttgtgaaccacatgtaatctttaacatccacatcatctgtgacaatcattggatttacctggtt

SEQ ID NO: 104459 - DNA, 1071 bp, Glycine max
  Clone ID: PAT_MRT3847_65342C.1
ctccttgcgtccgctgggtcctcccctcagcggcatcgttgtagggatcgttgttttgttccttcacatctttccctcactctctctctctctttctgtctctcatccaaaaccctattcgatatcacaatcggaggagcatactcaaacagagaccatccatggacggtgattcctcttggagtgctcgtctctcttccgcttccaggcgctaccaatccgctcttcaatctcgatcagacatgttcatgggttttgatgaaaatgatggggacgatgatataagggaggagtttctctgcccattttgttctgagtattttgatatcgttggattatgctgccacattgacgaagagcatccaatggaggcaagaaatggggtatgtcctgtttgtgcgttgagggtgggggttgatatggtagcacatataaccctacaacatgggagtatatttaagatgcagcgcaagaggaaatcacggaaaggtggatcttattcaacactatctttattgaggaaggaactgcgagaaggaaatttacaatccctttttggcggatcttcatgtatagtgtcctcatccaatgcagatccactgttgtcatcatttatattgcctttagcgaatgaacatgccagctctcagcctcacttacacactgagacaagatcatctaaaaaatgctcagatgagactgtatcaacaagaaatgtggagacatcaaccttgtcagttaaggataaggaggagaaggcaaaaagatgcgagtttgttcaagggctgttgctgtccaccatacttgatgataatttatgaaggaaattcatggaggtggctgcttcagtagtgggctaattcacacgcgatacctgctatgtatgatttgcctgatgaaattgtttatgtatttgatcagagtggaataataagtagtagaaaatgaatgtaatttatgttatatgtgaactgatgcttttagttcaagagtttcatcatctcctttaatctcagatcataaagcttaaaaggaaaaaaaaatcctttcctgaaaaaaaaaaaaaaaaaa

SEQ ID NO: 104460 - DNA, 472 bp, Glycine max
  Clone ID: PAT_MRT3847_65343C.1
ttttttttttttttttttttggtaaaaagggggtctggaaaaaacctatgggttttcactttggggctggtggagggatccattacattacctttggaactaacctgttcagggtaaaaaaggttcttttggttcttggcctgcccttggttggaattagcatttatccctgcccttccccttggattggatcctggatatgggtcaattcccacaaattggaggacccttagcaacccgaaaaaaggagccctcagaaaagcttggggcaaggtggcccacaaaactggggcacctttcttaaacaccgcctgaccaataaactggccaatccaacaaaacagctgggccacccacacaacctttcagctggacgtccacggcagggaattagcgatgaaactggaaatgaaccccctaaaaaaggcgagaaaagcggcgaaggaacccgcctctgaaatccaggccacct

SEQ ID NO: 104461 - DNA, 191 bp, Glycine max
  Clone ID: PAT_MRT3847_65344C.1
acggctgcgagaagacgacagaagggatggcaatcactgcacctcacacaaataaaaaaaaaaggtcattcacttaccacaattcttgtgtggttgctctccagtcaataaaatcttgaccaagtcctcccttcggttcttcccaattgttgtaaaattaataaaaattactaatctaccagaaaaattaa

SEQ ID NO: 104462 - DNA, 200 bp, Glycine max
  Clone ID: PAT_MRT3847_65345C.1
ccaaggctgggggccaccaatcggcgttaaaccttttcctaaatctcctaacatactttttccgtccacggggaaaaaaggacctttcttcccccaacctaatttcttcttttcaaccgggtcctccatagagaggaggcatttgcggattcaataacagtcgcccctgggaaaaaaatttactcctatttttcttaaaa

SEQ ID NO: 104463 - DNA, 475 bp, Glycine max
  Clone ID: PAT_MRT3847_65346C.1
agcttactaaatctacactgagtcaatatttattcttttctcgaacgatatgttcacacaaacatataatagacgtatcaaatgaaaactatttttttactatgagaaatgagatctataaatggtcaagattaaaagttagctagtagtcacatgatcacttaaaaatgagatctataaatggtcaagattaaaagttagctagtagtcacatgatcacttaaaagtcttgattattgtatcattgggagaaaagagaataattaaccacaatcattagaaaaattaatgatttagatttcatatttaattacaaatctaacatgatctttaattaaaaagaaagaaaatcaaacaaaaattataattaaatatgcaatcattactaaaattatcaattattggacataaccaaaaacttgtcaatcaatgttaatatagaaaagagatagtttcttaagtggttttgatactc

SEQ ID NO: 104464 - DNA, 155 bp, Glycine max
  Clone ID: PAT_MRT3847_65347C.1
ctttgatgcattattttactagcatagcttaaagatagttgaagatgctctatcttttggggctgtaattcaatagtaggagaaataacctggcgatgttatctatacttcttccaaaaccttcccgcttcacgatcttcgctcttgctattcta

SEQ ID NO: 104465 - DNA, 462 bp, Glycine max
  Clone ID: PAT_MRT3847_65348C.1
ggttcattaacatatacaaattctctgtgttgtgttgtgtacttgtgttaattgtgttgttgttgtaggaaatttaagtgaagagagaatgatgatgaagtctgctatgtgtgcattggtgcttgtggcactggctgcggttgaagtgctacccatgtctgttgctgtcgtgtcctctttcctcatacatgttttctttttccttctcctctatatcatctttcctctttctctttctctttcttatctcttttttctcttcgtctctttttttttctgtttcttgattttttttttctgtcttttttttcttattccttctctaccctctttcgttcttctttcttctacgttcttttctttcttcttcctttcctctttcttccgtcttttgttcttcacgttctttctatttattctcgtgtttcgttttatcctttctgtttcttttcttctattgat

SEQ ID NO: 104466 - DNA, 421 bp, Glycine max
  unsure (1)..(421): unsure at all n locations
  Clone ID: PAT_MRT3847_65349C.1
tctgtgcagctgcaacatctcattattgtttattcttgtgagaactgttcctcaaatgaatgatgtaactttagaacactagctggcagcaactaggatttcatcaatgttattagtgttaattctagtaggtactgttttttaaaaatgaatgacctaaccttagaaccctagctggcagcaatggcaagttcatcaaacccattcttgggttactttctcctcagggatgatgaccttggtaatgtttctcacaataaaccattacaaattactttcactgtttcacatgcactttatcattggaaaaagcataatttgaaacacttatatgcttttacaaactagtaatctgtcaacaatgattnttagttttttactattgatggtgaatttgaagatatttagttgtgataaaaga

SEQ ID NO: 104467 - DNA, 278 bp, Glycine max
  unsure (1)..(278): unsure at all n locations
  Clone ID: PAT_MRT3847_6534C.1
gaccacgcgtgcgccacgcgtncggaaatagcttttcaacttcttaagtttataactcaaatcagcactctatgaggctggggaggtttgttgagttttctcaaaaaacaaaaacctttatggagtcgctggtggtgccgtacaaaaacccatatcaattggagagaacgtccttcataaacattctgcattctttgacttgaataaagatagtgttatctacccaccggagactatgaaaagggcatagcttcatatatactttatacaatcggaat

SEQ ID NO: 104468 - DNA, 271 bp, Glycine max
  Clone ID: PAT_MRT3847_65350C.1
gatgagtgtgcggtttcctttgttggtgttctgggaactgttttcctggcatcagattgtgtctcattaaaggtgcgagaggatgaggataacccttgctacttgagaaactctaagagcttccagactctctttgagaacctacaacggtcgcattcgtctcctccacagattcgacgaacgctctgcagaacttgagaacattcgagactacaggattgtccggtttcagtcaatacccaacaccgtccttctccgcccacgatgctga

SEQ ID NO: 104469 - DNA, 285 bp, Glycine max
  Clone ID: PAT_MRT3847_65351C.1
ggaaagtaaatttttcatatcacgccccttctgcaagcaagtcatcattcatcccgttattttgttagcacccaaactcaccacattccttaattttaaccttctatttttaatggcagagttcccctaacattggggcttattaacactgcaagaaacgttttgttagcactaaattcacttgacaccagcctccgcgtgaaaagaacacacgccagagatgttcccttccctccccgcgaatattaagctcccccccgctggaaaaatggcggaaaatgaaaa

SEQ ID NO: 104470 - DNA, 286 bp, Glycine max
  Clone ID: PAT_MRT3847_65352C.1
acataattgcactttatagaataggtgtttactagtctaggccacattaaattaccgtctttaataatgtcatattacactaattgtaattatggaccctttatggtccacccaacaaatctgaaccaacatactgtttatagccgctaaaatgatttttgtaggcttgcaatggaacttatgtttggtgcaagcaaaaaataatgcaaataaaaaaaaaagtgtcaaaggtgtttgagtaaagataccctctctcgttcaaaccaattatttgatcagccccacc

SEQ ID NO: 104471 - DNA, 534 bp, Glycine max
  Clone ID: PAT_MRT3847_65353C.1
gctgcatccccaaaataatcacaccccccattgcaatggacccccagcaacaactcttctgcgtcttcaaactcccttttggcttttctaactgctgggattctttctttcatcttttctttcacgccctaaagcatacttgtgatttcctccattatttccttagaaatgtggacagcagtgggccatacacccaattctaaattaccgttgggatgtgtggaggagtattttgatacagcgatgcatcttcacaaatacttgagtaaggctatatgctgtggtgtagatccttactatggagttaaatgctagttacgacgtcaagcattcacattctacacaaagatacatcgtgagctgagggctctagatccaactgatccaaagaaggcactgtgtccatggtggtaggatcggaatccacttcctgtgctcccacgacttggctaccttcacagctcatgggcccgtttgcagcgagtatggagctgactaaccaccctctgcaacatatgttgcggaatgttgacg

SEQ ID NO: 104472 - DNA, 164 bp, Glycine max
  Clone ID: PAT_MRT3847_65354C.1
tttggcttcaggtataagcctactatgaaaacatatcatttccatttatatatgaacatttgtggctccttatttcttgaaaatgtggaattggaatgtcccgaagaattgcgatctcatttcctttggctttaagataggccttattagaaaacatatcattt

SEQ ID NO: 104473 - DNA, 1002 bp, Glycine max
  unsure (1)..(1002): unsure at all n locations
  Clone ID: PAT_MRT3847_65355C.1
gcaatgaaaaagaaattgccatggctgaggtatgatatgaagcaggcagaataccgggaagctaaggagcgtgagaatgatgccgcaaaggcattggaggaagctgcagagttattaaatgatcttaaagaacccattatgaaacaaaaagaagagaaggctgcattatatgcaaaatgcaaaaaggttagcaaccatgcaagtgagaatgcaaagaagcgaaccgaacttatggaggaggagaacaaattggatgtagaattaaaaggaaaatacaaagaaatggaagagttgaggaggcaggaagaaactcgacaacaaaaacttgtaaaagctagggaggaagttgctattgctgaacttgaacttgagaatctacccctttatgtacctcctaaggatgagcttaagactaacggccaaaattgcggaattggattattctgctaagcaaatgaggcagaagaagtcacaagcagaaaatgaaataaaccataagaagtcatccatgaatcggattaaagaaaggttgattgaaatgaataataaaagtacaaagtgtttgcatgcattgcaaagatcaggggctgaaaaaatttttgaagcttataaatgggtccaagatcatcggcatgaattcaataaggaggtttacggcccagtcttattagaggtgaatgtctcaaataaggatcatgctgcatatctagagggtcaagtggctcattacacttggaagtccttcataacacaagattctggtgatcgagatcttttggcgaaacacctacggttctttgatgtaaatgttctaaattatactggcggtgatggtccccaaagagagccttttgaaatttctgaagataagcgtgctcttggcatctactcccggctggatcaaatttttgatgctcctattgctgtgaaggaggttntgattagccagtttaatctagattattcatatattgggatccgaaaaatctgatcagaatggct

SEQ ID NO: 104474 - DNA, 219 bp, Glycine max
  Clone ID: PAT_MRT3847_65356C.1
accgacgcgtccgccgaggcttagtgtaccctagtcagctacgctagacacttagcaaataacaactcctgatcggcgaagggcatatttacaacagcccaactaactgcataatgtcattctaacatactcactacactgcacaacgagctctgataaacaccagtgaataatgcaacagattgttgactaaacaacaagaatatccatctagcagct

SEQ ID NO: 104475 - DNA, 583 bp, Glycine max
  Clone ID: PAT_MRT3847_65357C.1
agacgcgcgcatccacctcgtctttcactgttctctgctcaaacccttccatggtacaccggactcccacaactttgctgagttacccgacaaattcatcaatgaccaaccgttccttactccattagccatcttggattaccgccgctcttcatcagcagctaatgctccttgggaggtgctagtgcagtggcatgggctgtccccagatgaggacaaggtgatccttcaagggccgaaggatgatagcatatcagaagaagaagcagaaccacagacagaggtgataatagctaatatagaggtgcaggaatcagaaccagaaacaggagtagtaacaacagccaatacaggggtgcataaggaaaaagctaagagaaggaccatcaggcctccttcataccttagcgattacgtttgagaagctgagttggcaccaaagattcgctggatagtgctgaagaatgcttgtctgctacggaggagacattcctagccaaattccgttattggaagatctctagagtcaggaaattcacaaatctgttagcatcaagcattatatatagctatgtaaataacc

SEQ ID NO: 104476 - DNA, 245 bp, Glycine max
  Clone ID: PAT_MRT3847_65358C.1
ggagcaggatatggaagaaaaattgcattaagttgctggggttgagattctgtcttcgtgactagttagagatgaaaaaaactggtcacacttctctttccaaacacaatcagagccttttcgatcttcctactcccaagagcatttcttcatgtggcaagtaatattcttttttttttttgtggttatatatttaacaattgtaagattttattgagaaagaaaagatttattatacttttaaa

SEQ ID NO: 104477 - DNA, 132 bp, Glycine max
  Clone ID: PAT_MRT3847_65359C.1
caactcccaaataaaagtactccaattaaacgggtggggaagattggacactgttctgttaccaaactcatgttttgaacatctcagatccttttaataaacaattttttccctccgcgcactgtgctcatc

SEQ ID NO: 104478 - DNA, 1170 bp, Glycine max
  Clone ID: PAT_MRT3847_6535C.1
ggctcgagagacaaggctcgtttcattgggtttgagacgtgacctgatgaatccctcattccatgttttgattctccacaagatctcattcttaccacagatacaataatagccatcaagccaaatccagccgttggatgccaccacttgaaaacccgtgttgttcttttccgattgtcaataaaaatttcaagcatatcaatattctagtgcacacataatatcttctcggcttttgcaattcggctcgaactttgttcttgcttttgttgtgcctcatggctgcaactgcaaccaacaaccctcaaataacaagggaggaaatccaaactgccatagccaaagcagtggaattaagggcccttcatgctgcattaacacaaggaagtagtccaggcacaaacaatgctagatttccatcaccttcccctgcttctcacttctctgcccaagactaccctgttttcacaccaagttatgaagatgaggcacaccagaactcaacaaggagcagaacaatatcagaaagctgtgatgagaatggggtagaaggaggagagaacagcatgaccccctcagattacaaggagaaatcaaattcaagaaagggactaccttttggatttggcaaccttgactctcacatgtgtcctgctgatgatgataccaaatctgtgacgagttggagtgaggatcacattaagggactcaaaacatacagtgaagagtttagcaagttctgtgatcaaaaaatgagttgtatcaactctagtctaaaatggacaaggccttggcctgaacaggtccttcaagctttctttgtgacagataagtgcatgtggcttatacatttgcttgccttttctttcaatccaccattgggaattttaagggtcgaagagaataaaacctttgtccctcagtacatgtaaaatatgtgtctaaggtcacaaggtccaaccaaagttaagatcatggtgatgccggggttttatgttcaggatagggtcttgaggtgtaaggttctttgcaggttcaagtctgcagcctaagtaagagttggaataagttttatatgcacattttcttttgctttaggctcactcattttaagtctgtaactagccaaatgtatgtgataattaataatagttcaaagtgatttaatct

SEQ ID NO: 104479 - DNA, 483 bp, Glycine max
  Clone ID: PAT_MRT3847_65360C.1
ttctgttatatatttaaatggcaaactttccgcctaattctgacgaagagttcgaccgtggcaatttttcatcattgtcgggaatggtcggcatgaaccaacgacacttggactggttaatgaaaaacatatcccgcgaagacatggccgaactccaacaaaggacggggcaatgcgcccgaaagtgtgctgtgacgtatggaggtccgatcgtcgtcgttaccatcggtttcctcgagtttttgcgccgtaaacagaaccttccgatcacagcgccgcgctttttgatcggctaccccattatgtgtctcacttcggtggcccttggctcttccatcggcttcaaaaggtcgggttgcggtgcggaaatgcgactttttctcgacaagctctacgccaaagttagacatccaaagacaatttttttatgtttaaaacatacagatggatattttctcgttttttcagtacgacttccaaatg

SEQ ID NO: 104480 - DNA, 671 bp, Glycine max
  Clone ID: PAT_MRT3847_65361C.1
gagagaatcaagacatgaagcttcatgttcaagtccgtagatatagggaaatgttaggtggtagtcgaattaggatgaagataaagacgtggtttggagggtgttgattcatttgaatatgatggtggtgtccacgcgtgcggctgcttctctttgttgtaaagcgactcgccgctctcaagctttcatgtgcggtaacaagttgcatcagtgtgccccacagccaccatgcaggtcaaccccaccacacaacagaatacatctctttggttgaggattgcaccaaaggtgaagagctgttgggtgagagacactgctttctctcacgcagaagtgtgagttgctgagacatacagaaaccttcaaaagctagtggttgaattctctcttccttccatatactaaggctttacgatcaaacaaatttctactcaacattcgaactgatttttttttaatatacacgatcagaaagaggggtaactgtaaacggtttagatttggtttaaatttttattgtatgatatttagatttaatcaaatacgacgtgtgattatgttattccacacagtatatttttagtaaattaaatgtatttaaagttacacaagaactctgctgtgttgttataatttattatttaactcgaaaatcaattattacaatccct

SEQ ID NO: 104481 - DNA, 524 bp, Glycine max
  Clone ID: PAT_MRT3847_65362C.1
gaaaaggcagaaagaaacacaaattttagtgtttaataaagcaaaatgcacagcatcccccaaacaaaacaagccttattcaccccacattggtttcgtataccacaaaccaccaggatgcgagccttactgcttactggtccttcccactcctacaaaggtcgccttgaacagaaaggggtccacttcttataccacagatttgacgtgtcctgctccaatgatgcacctatggaagacttttactgtcggtgaaacggttgaaacctaatttgatacttccgtcactacttgtaacatagcccatctcaagctcttacaacctgcagtgagcagactcgattggacccttaacaggcacttggaactagggaacccgggacttgttaatgggtgcagactctttttcaacattgcctatgagaagggcatccaccttctccttactgagcttaccctgaacgcataccttcttcaaaaccttgctgacactattctccttgcacactttgaacagttcaatg

SEQ ID NO: 104482 - DNA, 757 bp, Glycine max
  Clone ID: PAT_MRT3847_65363C.1
gggggaaaaataatcccactataattgtataacatctaatttgtttttgcatatccccaaacagcagagagcatgaaccaatgcaaaattgtaccctttttgatgtctttgatatcccatttacagaattaaactaagcagcagcggactacttggagtccaaccaccgcaaattgaattccccctagcaccagcaccatgttcaggtaacacaacaacaacccaaaaataaaaaccctaaaaaagctgagctaaatggacatgtttgtgcccaaactgacctctccccctgaaagggagcacatgaactgatgatatccttccatgagaaatcccttgtctaggtccctcataattaagagatcgttccctcttttctaaattgagaagtgagcgcattctccctcctttttgtacttcgacagagcatacatctctgtttactttcagtcctcgagcttcatcttgcgttgagcttacagaagcagggaaattatttttatctgcaaaaccacttaattcactacccttagaagctgcagattcgattacaggagagaggggcttatccacatcatctctgttgttcggaaatttacgtacatctgctgcctttgactgtgaggggaatggcatcgttcttccagaaacaccaacttcttttctagaatcagccacaggctctgacctcatgctagttctggggacaattacgggtataatatctgatttattgataagtggagcactggaccta

SEQ ID NO: 104483 - DNA, 286 bp, Glycine max
  Clone ID: PAT_MRT3847_65364C.1
caaaaagccagttcacgatcacctcactgcagctgaagagcaaatcgctgatgctcttggccctatgattgctaagaaagtgatgctgggtcctgaccaggccaagagcctccacatgctagacattcctccagaaatagaggcattgaatgctgctaaaatggaattggaggatgctgcattccctcatcttaaaggtgatgttgccacaactgatgaggctgacgcatgcactgaggtcaatattgccgagatggttggtggattccctacaaaagaaggtatg

SEQ ID NO: 104484 - DNA, 693 bp, Glycine max
  Clone ID: PAT_MRT3847_65365C.1
aaagcatgtactgagatgggtagcctcaagttgggtagaagggttcatgattttgctctcaagaatggttttgagcttgagccattcttgggtaccgcgcttatagacatgtacagcaagtgtggctatttagatgatgcgaggacagtgtttgatatgatgcaggtgagaaccctggctacttggaataccatgatcactagcttgggtgtgcacgggtatagagatgaagccttatccctttttgatgaaatggagaaggcaaatgaggttcctgatgctatcacttttgttggtgtgctgagtgcttgcgtttatatgaatgacctggaactagctcagaagtatttcaatcttatgacggatcattatggtataacacctatcttggagcactatacatgcatggttgaaatccatactcgtgctattgagttggatgagatttacacgtcagggaacaccatggaagctaatcatgatgttgcagaattactccacaagaacaaactcactagtttcgacgacattaaaaaacttatacacaagaaatacggggatttggatttctcagaactagttttagaccattcctccacgagctcaagtgggatgcagattgatatcagcaaaataagatgataaattctgacgttgttctcattcactgtcacacaatgataaagattcacg

SEQ ID NO: 104485 - DNA, 1004 bp, Glycine max
  Clone ID: PAT_MRT3847_65366C.1
cctacgcgtccggttttggattctggctgcacattctgaaatgaatctgttggcggccggtcatgatagtgggatgattgtgtttaagttggagagggaaaggcctgcgtttgctgtgagtggtgatgctttgttctatactagggaccggtttttgaggttctatgagttttcgacacagagagagacacaggtgctgccaattcggcggcctggatctccaagtcttaatcagagtccaaggactctttcttatagtccgagtgaaaatgcagttctgctctgttcagatatagatggtggatcttatgagctgtattgcatatccaaggatggctatggcaggggtgatttgcaggatgccaagaaaggtgttggagtatgagcagttttcgtggctcggaataggtttgctgtgcttgacagaagcagcaaccaagtccttttgaaaaatctcaagaatgagattgttaaaaagactgttcttcctattgccactgatgctatattctatgcaggaacgggcaacttgatttgtaggtcagaggatagggttttcctgtttgatcttcagcagagaattgttcttggtgaacttcagaccccttttattaaatatattgtctggtctgatgatatggaacatgttgctttactcagcaaacatgccattataatagctagcaagaaacttgtgcaccaatgcactctccatgagactatccgtgtaaaaagtggagcttgggatgaaaatggtgttttcatttatacaacactaaatcacatcaaatactgtcttcccaatggagataatgggataataaagacattggacattccaatttatatcacaaaggtctctggcaacacaatcttctgcttggatagggatggctatgattgcttatcttcagcagaagggctttcctgaggttgcactgcattttgtgaaagatgagaaaattcggttcaatttggctttagagagtgggaacattcaaatt

SEQ ID NO: 104486 - DNA, 153 bp, Glycine max
  Clone ID: PAT_MRT3847_65367C.1
ctccactctatctaacttataaatggaaaagaatgtatctggacgggtcattttcatatactttcctccctctcacgatcaacaataatcattacatactcattatggttccagtaaaggtaagcttaccattacacttcttcaagactgcat

SEQ ID NO: 104487 - DNA, 2972 bp, Glycine max
  Clone ID: PAT_MRT3847_65368C.1
ccacgctcttcttctctcttttcttctgctttcagaggtggatgctagatcttaattgtaatatgatctctcaaaggtgagttgtttgcgggtggaggtataggttgtgcaaaaaggttacggaacgtacgacttggtagtggctcgttttccgtttgctgagctgtagatgaagagcaataaagtccttataaaaaatttgaatgaggattttcatcagaagaagttccgtccaatgtccatgaaagatgttggacatagacttctaggccacatgctagagggctgagaggctctggtttttatatttgatcttcagcagaggattgttcttggtgaactccagacaccgtttattaagtatattgactggtctgatgacatggaacgtgttgcttttctcagcaaacatgccattataattgcgagcaagaaacttgtacccatgagcactctccatgagactattcgtgtaaaaagtggagcttgggatgaaaatggtgttttcatttatacaacactaaatcacatcaaatattgtcttcccaatggagataatgggataataaagacattggacattccaatttatatcacaaaggtctctggcaacacaatcttctgcttggatagggatggaaagaacagatcaataattattgatgctactgaatatatttttaagctttccctcttgaagaaaagatatgatcatgtcatgaacatgataaggaactcacagctttgtgggcaggctatgattgcttatctacagcagaagggctttcctgaggttgcactgcattttgtgaaagatgagaaaattcggttcaatttggctttagagagtgggaacattcaaattgcagttgcttcagcaacagcaattgatgagaaagatcactggtaccgattaggggttgaggctcttcgccaaggcaatgctggtattgtagagtatgcataccagagaacaaaaaattttgagagattgtctttcctttatcttgtcactggtaacatggagaaactgtccaagatgttgaaaattgctgaagtcaagaatgatgtgatgggccagtttcacaatgccctatatatgggtgatgttcgagaacgtgtgaagatattggaaaatgtgggccatttgcctcttgcttacatcactgcatcagtccatgggctacatgatgttgcagaacggcttgcagctgaactgggagataatgttccatctttgcctgcaggaaaagtaccttctctcttgatgcctccatcacctgtcatatgtggtagtgattggccccttctcagggtcatgcgaggcatgtttgatggggtgcttgacaatacaggtcggggagtcgctgatgaagaagagtatgaggctgctgatggtgattggggtgaggagcttgacatagttgatgcagatggcttacaaaatggagatgttgctgcgattttggaggatggagaagtggctgaagaaaatgatgaagagggtggatgggagatggaggatttaggtctgggccctgaagctgacactcccaaagcttctatcagtacacaatcttcagtttttgtgaccccaacacctggcatgccagtaagtcatatatggactcagaaatcatctcttgcggctgatcatgcagctgctggaaattttgatactgcaatgaggttgctgaaccggcaacttgggataacaaattttgcccccctgaaaaccatgtttctggatcttcatactggcagtcattcctatctccgggcattttcttctgctccgatcatatcacttgcagttgaaagaggttggactgagtcatctagtgcaaatgtgagaggcccaccggcacttcctttcaaattgtctcaattggatgaaaaacttaaagctggttataagtttactactgctgggaaattcactgaggctcttaagacatttgttaatattcttcatacaattcctttgattgttgttgagtcaaggagggaagtggatgatgtgaaggaactaattatcatagtcaaagagtatgttttgggcttgcagatggagctgaagaggagggaagttaaggacaatatagtacgacagcaggagcttgcagcatatttcactcactgcaaccttcagacacctcacttgaggctagctttgcagaatgcaatgactgtctgcttcagggcgaagaaccttgccactgctgcaaactttgcccggaggctacttgagacaaatcctaccaatgaaaaccaagctagggcagcaaggcaagtggtagcagctgctgaaaaaaatatgactgatgctacccagttgaactatgatttccgcaacccatttgtaatttgtggtgcaacttacgtgccaatctatcgaggacagaaggatgtctcttgcccatattgttcttcacgttttgtgcctagccaggagggacaactctgtaatgtttgcgatcttgcagtgattggagcagatgcttctggtctggtttgttcaccttcccagatacgctgattgaactactggatcaggtccaatgttaaattttgttttgggtcagttttcagcactagttgaatccttattaattagtcaacatgctcatggtactgtgataaaagtgagagttagtcacgaggaattaatttttcgtctttttgcttgccgttctctttccttgaaaatgattttcaatgttagtttttcatacacaagaaagtgaaaggttgtacttagatcaaacgatgattataggctgtgcaagagttaaatttgcacagttttattggcaaagtacatatatgtctgtgtttagtcgggtttcagtcccttggttacaaaaataatgtttctttgtagttaagcgacactatgattgttcatttgattcagtccatgcaatttactcagatttgatttgattcgagctcgtcaacccgccaattat

SEQ ID NO: 104488 - DNA, 556 bp, Glycine max
  unsure (1)..(556): unsure at all n locations
  Clone ID: PAT_MRT3847_65369C.1
tttcgacttttgagcaatgttatttgtgcgatttcgctctgttttcggaacttatcgtgcgttttctgaatttccttctgcaaatcggacttgtctttatgacttccatgtgaaaaatggtgccaaaatggttgagttcgcagggttttcgatgcccattcagtacgatctttcggtcagtgcttcggtgcttcacacgcgatcgaatgtgagccttttcgatgtctctcatatgttacagactgaaatcaccggtgcccatagggtgcaattcattgaatcactgacgccaactgatgtgacgaatttgccggagaacagtggagctttgagtgtttttacaaattcagagggagggataattgacgacctgataatttcaaaaacggcccacgaatcactttatttggtgacgaacgccggaaggattggaattgatttgccatatttggaacaaaaagcctncgaatggcgtggcaatgggaaggaaatccaagtgaatgtgttacaaaaaaaagcattggtcgcaattcaaggtcctgagacgattaaactg

SEQ ID NO: 104489 - DNA, 383 bp, Glycine max
  unsure (1)..(383): unsure at all n locations
  Clone ID: PAT_MRT3847_6536C.1
cgaagcacgcgggnggggtcgagctcgagccaanacttttctaatctttatttatcaagccagaaaaaaaattgggttgtgtttttaacgagggtgcgacacaccaaaagaagcggcatgcttgtctaatcccgaagggcgaccacgacgacaaacgacgacgacgacctatacgcgccacatcttaatacagacaaacaaaaacctgcgtacgcaatcatacatagtgagcgagactctgatactaagaaggatcctccgcaaaggatggtcggcggtgcacgtggcagtctagtgattgttgctgacggccctgctaccgaacacgctgtaggtggcaatgaccgtctcaccaaacaagatcttgacgatatcctgtctat

SEQ ID NO: 104490 - DNA, 143 bp, Glycine max
  Clone ID: PAT_MRT3847_65370C.1
acaaacacctccaaaaaaattgctaaagccatcatggccttttttccaaaattcgagtcatcgagaaaatacccctttttaaactcagggagtatttaagatggattccagatattacattttcttccgtctgttcattaact

SEQ ID NO: 104491 - DNA, 418 bp, Glycine max
  Clone ID: PAT_MRT3847_65371C.1
ccacgcgtccgtacggctgcgagaagacgacagaagggggttcaagttctaaacagatgatttgagtaaaacgccgtcgttccttgtttcgttccctcctctctttcccgctccgcacactcttctctttgttcttccccaatccccaaccacattttggggtttagggttttcctctctcctctgcaatatccaatttctccctttctcccccactctctccgcaatccagtgacaatgatgtacaatgatcctcagcagcagcagcagcagcaccagtaccagcaacaacagcagcagcagcatttccaccaccagccgccgggtccggagttccaccgcggaccgctgccgccgtcgcttcctccgccggtgatgcggcaaggctccgcctcgtcgacgaacctcgcccctgaat

SEQ ID NO: 104492 - DNA, 1145 bp, Glycine max
  Clone ID: PAT_MRT3847_65372C.1
ttacgaattcgagctctgtacccggggatcctctagagtcgacctgcaggtatcattatatcttgacagttctctggtgtatgtcaatctgtacttcatgaatgcaaacttacctttttacaaataatatgtgatcacgatctttttgtggaaatgcctggaagggacccttcagataggtacttcatcgtgtttttatcttcggcacagatattaacttacaaatattgtaatgtatgcagttcgattttttaataagttttaaactactcctgtgcattatataatcaatattgtttactgatgataagtactcaatattgtttactgatgataactgttttagtttacctatgataacctatctgattggacatggttttcttttaatgacatgacactatgttatacattattgaagtagaaggtgctaataaacaaaactaattggaacaaatggaataacctcggttatgatttatgacttgcgatatttaatgtatcggtgtaagtgtgccagaaactctgtaattgtatattatcagtcaatcccacatgtttttgactgtattctattggtataggaactacctttcttctgtactaatacaagaactcgtctgggatcatgatgtctctaagtgagttagtagtagtttaattttcttctgcctgaaaagtatgctcatttcagattgcttgtccttgtttaaagtcttttttttatcagcaaatgttagttttagttttgttagaaatgtcagttggggaattcgaatccacgacctcccccctctcttcttctttcacctttccccgatcacttatccaaccttacatctcccttgtttaaagtctcttgatactgattttgtttcaattttgatgtgattcttgcactctttactgttgtgtagtaccttaaaacggtggaggaatgggcaatctgtagagtggtgggaggctcataaggcaccagttcaagcagttataaagctgccttcaggggagcttgttactggtaggtattgttacttgttgatgcatttttgtaaaaactttttattatgtcttactagtttatagtcatgtttctaagtaaggacccttctgtcgtcttctcgcagccgtactcgagccgaatt

SEQ ID NO: 104493 - DNA, 628 bp, Glycine max
  Clone ID: PAT_MRT3847_65373C.1
ggtgtgttcaaaaacctcgttgcttttgaccagtttcactatccagacaagcctaacttttgcaactatgtttctttcattgactctctgatacacattcagcttgatgtggagttgctggttaaaaagtaagtgattgtgcatgaacttgggagtgataaggaagtggcaactcttgttaatggtttatgcaaacatgttgtcacaaactcaacttgttaccatcacattataaataagctcaacgaccattacatgaacgattggaaccacactattgcggctttaaggttggtgtacttcagagatctttggagggcaagtggcactgtggtgggtattgctgtgctggtttttgctgtcttccaattcctccgtgtttgtcgttatctcttctagaatgaacaaaaatgtaactcagtttggattattattgcaaataacagctacaaccatggagtgcttattttcttcttgtttctaggggtttgatttgttgttgtttagatttcagattaggagttttgattctgtttttatataaatttaaaatatttaaaattatgttgttatacctacaaacaatggatgtatcagttatgttttgtgctctttatatatacagttg

SEQ ID NO: 104494 - DNA, 1257 bp, Glycine max
  Clone ID: PAT_MRT3847_65374C.1
cgtaaacctcctctaaaagcaaaataaaccaacccctcaactaccttaaccaccaccacaatctccctctccactcttcccccctttgcacactatttcctctttcactcactccttacccccttcacttctctcaaaatgcaacatcccccacttctccatctccttcgtcaatcaccaaaatccaaactttgaacaactaaatcttaccctttatcccaaactaactaacaaaacaaaatccaacaccccccacttctagttctttcttcctccaaaaaccccacctttccccttcaaactttttttaaagaaaaaacccaaaaataaaaaaaaacaacctttgttctattttagttcccattttcaatggtgcaaccttggaacaaacctcgttcttctccattctcatgttcttccttcaaagacattcaaaccctcttcttagatgaacccaccaccaccaaacccaaaccctctatcttccaccgagtcacactcgccaactcgctcctccgcgcctggtcaactaaccccaaaatctcctcacgcgcccacgacgaagccccacgcgccgaccaaccacaccctccgccgtccattctccgctcggagcagcgcgtggtggtctacttcacgagcctgcgcgtggtccgcgccacgttcgaggactgcaaaacggtgcgttccatcttgcgcgggttcgccggggcgctggacagaagccgacagaagggggactcgggttttctctcggagctccgtcgggtcacgggtcgcaaatccgggttgaccctgccacgtgtcttcattgacggaaggtacattggtggggccgaggagttgaggtggctgcacgagagtggcgagctcaagaagcttctcgagggcttgcccgcagtggattcccacctccgcgtgtgccacgtgtgcgacgatcataggttcgtgctatgcggggagtgttccggtgcgcgcaaggtgtacgcggagaaaggtgggttcaagacgtgtgcggcttgcaacgagagtggcctgatcagatattgctgaagttggaaaagcctttataatccttggtagcttcaatgttttggagcttaatggtgttctccgtgtttatcttgcagtttttttttataaaaaaaattgatataattaaaaaagtttccagttattaaatgttctaatccacgtattatctttaatctaaataatcttattgctaaaaaaaaaaaaaaaaaaaaaaaaagaaag

SEQ ID NO: 104495 - DNA, 327 bp, Glycine max
  Clone ID: PAT_MRT3847_65375C.1
gttttcttctcatccaactatttttaatgaacattaccagaagatcttatgtattttacaatactttatttgctcgacttgtcagataatgttttttcatgccacctcccttcctctctagggaatttaaaacttcttgcaccattggacctgtcaagcatcctttttgatggagaaattcccactcagcttgcgaatttaaatttcctctcgtacctacacctttcctctaatcgtctggtgggctaaatccccgtaggtatccagcttcaaacattttatgcatcttcctttgttggtaatgcatatttgtgtggatcacctttg

SEQ ID NO: 104496 - DNA, 769 bp, Glycine max
  Clone ID: PAT_MRT3847_65376C.1
gtcaaggactctgccaacaccgccttccaacaggcgacggtggagggtgtgctgtcttcggagacgatgcgcggcatccgcttcgacctgatggacgtcgtgctgcacgccgactccatccaccgcggcgcgggccagatcatgccgccgatgaagcgcgccatttacggctgtcagctcaagtcggagccggctctgctggagcccatgtacctgtgcgacattacggtgccgcagaacgccgtggccggtgtgtacaacaccctgaactcgcgccgcggtcaggtggagaacaaggaggatcgcgcgggcacgccgctgtcgaagatcactgccttcctgccggtgttggagtcgttcggtttcgccggtctgctgcgtcagaacacgggcggtcaggcgttcccgcagatgatcttctcgcactggtctctgatgaacggcgacccgctcgacccgaactcgcaggcgcaggagattatcatgaaaatccgcgaacgcaagggcatgaaacaggagatgcccgacttcgccgattactacgacaagctctaagcgtaccccttcgtcgggttcgcttacggtttgaccgtcgtgttgggtcgtgatcgttgcgtcatgtgcatgcgttcgcgcgcgcgccgccactcgcccgcgcgcagggcaacggacagaggcaaccacaatctctatctctgttggtccgctattgttgcttggagaaacttcgcttcgtaaaaaaaaaaaggaagagaaagggagagggagg

SEQ ID NO: 104497 - DNA, 224 bp, Glycine max
  Clone ID: PAT_MRT3847_65377C.1
cacgcggacgtaagcttgttgccgtagagcggccgccctttttctttttttttttttaacacaccccggatgggccgtgctactaataatgtcgtgccatccgaaaccctcccttggacaatctgcccaaggctcgctcgccacgcgctcactgtgccacagtcttcttctcagacacgactcgtctttggggcgcgggggggggggatacctttttttttccc

SEQ ID NO: 104498 - DNA, 914 bp, Glycine max
  Clone ID: PAT_MRT3847_65378C.1
cttctcggaggcttccgtgctgatggaactgcttcagatcacgggtcaccaggtgataactcagaagataatctctttgtgggggtaactattgcatcttgatatggatcatgatcagctgtacttgataaggattgttgtggtaattaaaaaaaaatgagtatcacactcccaacctattgatatccatataataagaaaacaacaacatttttgctcacttgaccaaactgtctggcatcttcaatttgggataactctagctgacttgcctaagttttataacatgatggctcgataatatcagctacaccctcttcagcatatatttgctctgtaatagttttaataatatcagcatcatttgacatcttcatcacagaagaggaattgaatttgcgctagtacttgcaccttaacgcaacagttagaccaagtattttatcaagagggtgaggaaagtgtttaggtccaccttctcccgtttgaaaaagatggtcacaatgaaagttaataaaaaattgtgaaattaaataaaagaaaaacatataatttctatttcaaaacttgcttgaatcataacgtttctcagatctgcagcagacattctaatgactctagttcaatcatgatcccaaaaaaaaaaagtggttgatccttttccgtggtaaaccatgatctccaccctatacctcataatagatttttcattaaattttccacatgaacatgtgtaagctacatcttcatgatcaacttggagctattcccaatagtattgaaattagtgccaccagcagcatcacgaatgtttgaaatactaaggaccttggacttgtacaaaaagcgatcaagctccgaaaagtcagaatcctgagaatattgccctatactgagggactgactgacatttg

SEQ ID NO: 104499 - DNA, 145 bp, Glycine max
  unsure (1)..(145): unsure at all n locations
  Clone ID: PAT_MRT3847_65379C.1
agaaaaaataatgttcaagnggcccaagaaacaaattgaagaggaaaagagttggattgattggataacaattngaattcttaatttttggggcctcttnttnatctaagaagcaggctagacccattcaatttattgggacnag

SEQ ID NO: 104500 - DNA, 1892 bp, Glycine max
  unsure (1)..(1892): unsure at all n locations
  Clone ID: PAT_MRT3847_6537C.1
tacaaaataatgttgttaccttcctctctctaacctgcaatttaacaactccttcgtttcttctttcttttttctaaaacctcaaaaccaaaaacacaacaccaactttcgtaacgtgtctctcccttcttcccctcctctctccggttccctaattctgccctcactgcacccaattccaattccccctcaccccccaattcggggaattagggtttcgccccattcattcatcgatgcaccaccaccatcgtcgctagggtttgcttcgatggcggaattggaggaggagcggatgggaggggatttcaagcatggcggaattggaggaggagcggatgggggatttcaagcccttctcggaaggttcttcgtgctcgcgttcgatcagcgaaaccgtgaacggctcgcaccaattcacaataaagggttactctttggccaaagggatgggtgctggaaagtacatcatgagcgacactttcaccgttggtggttacgattgggctatttacttctaccccgatgggaagaaccctgaggacaattccatgtacgttttcggtctttattgcgctcgctagcgacggaaccgatgttagggctttgttcaagttgacgctggtggatcagagtgagaaggggaatgataaagttcatagccatttcgatcgccctctcgagagtggaccttataccttgaagtataaaggcagcatgtggggttacaaacgcttcttcagaagaacacaactggaaacctcagagtatctaaaaaatgattgccttgtcatgcattgcactgttggtgttgttaaaactcgttttgagggatctaaacagggtgttattgtgccacagtcagacatgggccgggattttaaggacttgttggaatctgaggtcggttgtgacatacttttcaaggtcaaaagtgaaagcttcaaagctcataagttgatacttgcagcccgatctcctgtgtttagagcccagttttttgggcttgttggggatcctaccttagaggaagtagtggtagaggatattgagccctttatcttcaaggcaatgcttctctttgtttactctgacaaacttcctggcatatatgaggttatggactcaatgcccttgtgctcatacaccgtcatggtgcagcatctcttggctgctgctgatctctataatcttgatcggctcaaactgctttgcgaatcaaaattgtgtgaagaaatcaatactgacaatgtggccacaacacttgcgctggcagagcaacatcactgtccacagcttaaggcaatctgtttaaaatatattgcaaatcctgcaaacttgggagctgtaatgcagtcagaagcttttgtgcatttgaaagagagctgcccctcaatgctgttggaattgctggagacatttgcatcagtggatgataactcaggccagacattgagcagaaagagaagtggcagtagcatatatgggcaagatttagcagacggggcagctgctgaatcagttaatccaaatggcaggcgagtaaggaggcggacataagcatagtttacaatctgaatctgcaacctttaaaacttaaaagtgtgatatagttaaccccctagtcctgtcaatgtaagtgattcaccattttcatttccacctgatccctgagattttatatgtcaagttttctggccttcgcaccttgtctcaaggggctactttggacagcattttcaatggtagtttgacattagagcagttctaatgtagggtatatcatgtttgatgacgttaataaaaagtaaatagctgatatatttgttttttataagncgccnnggaagaaaacacacaagaaaagngaaaaaanagangaaggaaagaac

SEQ ID NO: 104501 - DNA, 326 bp, Glycine max
  Clone ID: PAT_MRT3847_65380C.1
cgatgagaagtcagtcattccaagcttgacatccttgaccttctgaactacgtactccatgtcttccttcttggcttgaccgaaatccttgacagtatcgacttatgaggacttgatgtcgcgagctagattcgtggggtcgatagtaaacttctgataactacataatctgtcactacacgctaacaacatggaatactctaacactatcgtttcaactgctttcgtatacctatcactctcgattacacttaacaatcctatatcaaattgttatgatctaataatttcattgcttacaagacaattactcatttcttaatgag

SEQ ID NO: 104502 - DNA, 241 bp, Glycine max
  Clone ID: PAT_MRT3847_65381C.1
ggtgtgccttcactgcatccgctgctcacatactcatgaaccgttgctttttccatccaccccttttcgctagctctgcctatgtggcgctgtattgcctccctgactcagactattgatctttcttactgcttctatcacctgcttaactacagctcccagtggaacttgcacaagcaaaaacaactcttctgtatcaagccgcctccaagagcgcatcacctggagaagatcgactcgc

SEQ ID NO: 104503 - DNA, 450 bp, Glycine max
  Clone ID: PAT_MRT3847_65382C.1
aagcaattcatcaacaaagagtcttaggtagagaacttggtttagtgattgatctgacaaatactactcgctactatcctgtatcagattggacaaaagaagggattggtcatgtcaagataagatgcacaggaagagatgctgtacctgatgatgaatccgtaaaattcttttgtgataagatattcattttaggttctggatttttgctcccaaagaacaaacacaaagaaatatatacttgtacattgcacacatgggcataatcgtacaggttatatgattgttcactttcttgtgcgcacggaatctctttctgttactgaggcgataaataaatttgcttgtgcacgtcacccaggaatttacaagcaagactacattgatggcctttacatggtttataatgaaaagaaacctgaagatcttggttggccctaaacttctgaa

SEQ ID NO: 104504 - DNA, 850 bp, Glycine max
  Clone ID: PAT_MRT3847_65383C.1
ataatgttacggtgattcaagattaatgtcaaaaaaaataattatgaaaagtatggccctgtaaccaacatctaaaaataactacgatacaataatcagtttgtaacgcaacataaccatgtacacaaaatattgccaaatagcataagaccaccagctcgaaatgtaaccacatttaaacgtacaaaataaaaaaataaaaatcatatgcccgatttgcataacaaatcatcagatagtctgcagttacaaacttgatgtgtgctatactgcattttcctcaaatcgacattgctcagttaagcttttacccactccaaatgttgaaatactaaacatcagaagtgtaaatctgaaagttaaaaagctatccaggaagcaggctggcataaccaatcagattgattaatctattcttccacaatcatgcaaaaatataatttggtgtttcatcatataaccacgagttgctgctttgaaatgctcattttgtaaatcttgatctgtataggctgagagcaacatatcccaccgtcacaattctgccatcaaagaatcgtccgtgcaaactatgtgctgccgaacaacatgcttcagctcttccatactcaacaagaacagaacctggtttaaatacatgaccataaatatcctcttccgtgtcaatgctcttttggggactaaccaattctgcactgatatcccattcagaaaagccttcctgaaatgcacaaactgtgtctttagattccatattattttcaatattcacatcaatatcgttagcaaccatcttatcataaaattctggcccatcattgcgtgtatcttgttgatcaggacattcttg

SEQ ID NO: 104505 - DNA, 193 bp, Glycine max
  Clone ID: PAT_MRT3847_65384C.1
actaatagtagttctttgattatttttacatatttttataaggggcagccaaagtaattcactatggcagattttagaccagatgaaatcacgaggctgaacgaatttctaaaaaaccaagtgcaagaaccatattgctagccttcacgaacgattcagctaatgacctagggtcagccctcaatggttaggg

SEQ ID NO: 104506 - DNA, 197 bp, Glycine max
  Clone ID: PAT_MRT3847_65385C.1
ttcaaaccgcttgggggatttaatcatttccaaataatcaaccttactataaataccggccatgtgcataagtcaaatgaacctttggcaacttttagaacctacaggaggttaaaagttgtccaacttgtttttaacaatatttcacttatttatttgatctattttaatgctattaaatattctaatataaatat

SEQ ID NO: 104507 - DNA, 366 bp, Glycine max
  Clone ID: PAT_MRT3847_65386C.1
agaaaacaacatatgggggtttaagatagcgaacccaaatcgagaacggggttattttcaaaggtgacaatcttttttcctatttcaaacaagggaataatatttcttatagatattcccaaaccatgactcattccaacactattactcctgttgtttgaatactagataaaaaatatcttcttttgttacatatctaccaccattaccaacatactatttactatttaagaaaaaaaccatctattgtttccaatcactttcttacgtggttgtacatctaactaaaatacttagtatatattatgcttacataaatactgtctaaatacttctcataaccattaacgcattctgttgtcatat

SEQ ID NO: 104508 - DNA, 444 bp, Glycine max
  Clone ID: PAT_MRT3847_65387C.1
atcgtgcctcgaggcgtacttatttatatttagaaagaaaaatagaatatggtgggctcattgtctcttactaagcgactatatcctaaggtcttgccaagcaccattgatgcactgcacctacggtacctagtttatctggcgactctgggggagaggatcgatatatatgactgaagttattcaccagaggcacattatggagaaacctaaagctaggtttgggttaatgagggcctcacactgctgaatggatgatgatgatgaggcactccagctctggcagcaaagaagaatttgttaagcaagcactagatgggcgtagctctcttgcgacttctcatacagcatatgtgcagccattaataagtgcatgaacaacttagagactttccttgatacctgaagccacaattgaatcttactgagacacttgcacctatg

SEQ ID NO: 104509 - DNA, 155 bp, Glycine max
  Clone ID: PAT_MRT3847_65388C.1
gcccacgcgaacgtcctgataatacaacacaacggagttcacttctatgttccaaacttacaccaagagctcggctataatactaacatcgctttctctaaacaaacaagagctaattcaactactccataaccctcttttttttttcacatatt

SEQ ID NO: 104510 - DNA, 250 bp, Glycine max
  unsure (1)..(250): unsure at all n locations
  Clone ID: PAT_MRT3847_65389C.1
cggctcgagcggctcgatctctagtacaccgtattaaagaatttaagatatactatgatgatagcgcggctcacattactgttgctggtangtgttttcctggcatcaggttctgtctcatttggcattgcgtattgggaaaagcagaaccccagtcacatcaagtgcctgcgaagttgcaatatcgagaaagactcctacaggaaccaagcatgctacgctcgttgctaactccttaaggtggatgaag

SEQ ID NO: 104511 - DNA, 709 bp, Glycine max
  unsure (1)..(709): unsure at all n locations
  Clone ID: PAT_MRT3847_6538C.1
cggctgcgagaagacgacagaagggatgaggaagaaggagaaggagatgaagaaaaggggaagatgaggaagtggagaaaggagtgatagaggaaaagagggtatgtagtgttgacaagcctagtgctgcaggtccggagttgtttgtgatctcaagttatctcatccgccacccatagccacggttccgttgggcacagggaataatctaccgtttgcatttggttgggggaagaagaacccagggacggatgaacaggcggtcaagtcagttctagatcaagtaatgaaagctaaggaaatgaaaatagacaactggcacattcttatgcggatgagagctccaaaacatggtccatgtgatccaattcctcctcttgagttaccacattctttgcatgccttccatcatatatctgaggcagatgaacttaatgtggggctgttgttgtttcttattgctcctcaggaaggttgccatacttttcgtgggggattttggaattacttcagcatgggaatggatgctcaagtctcatatgcatttcattctgaacgtaaaatgaatcctgaaaaattcaaaaatcagttggtcaatctgagtacttatgctaagcttggatgcacacaaggatggttntttgctcctctngtccttcctccttccagcaacatagcacatcttgcaaaagtaaaagtcatgaaacac

SEQ ID NO: 104512 - DNA, 3898 bp, Glycine max
  Clone ID: PAT_MRT3847_65390C.1
taaactttaattactctctttctctctcatctaatcatccatgttcctcttttctcagtcttcttcttcttcttcttcttcttcttcttcatagtctctcccttcttgtaatcactgatcatggtggcggctacgtttgatggattctccataagagtttccagcctcgaggctgattcggtttggttggagatggaaaattccaaatcgacgcagtgtgttcgagttgctgtcaaagtttggcctctgattacgtcggagcttatgcttggatgcaccgattgcatctccatggttcccggtgaacctcaggtgttggctatgtccaaggccgacatgataggaagtgcaaactaatcggagtttagttattatggatttcgttcgttcccgctctcaattatcaaacctcaaaatcggaggctgagctgagaatgagatgatactcggttacttgatcgactaaatgagaaatgtatacattgatgttttgctagtttcataaaaattggagaatcatctgggaaacatggctcattttgaaaaagatgaggtaccaatgatgtcagaaacacatgctcaactatctgatgaagttgtggattctaatttccgaaggcttgtatctaggacacgaagtgcttcaatttctattcctatggcctccttggaatcatatgagaaagaaactagtcttgtgggacatactggtccacttcatagtgtgagaaaaaccccctctgtgcagatcagtggtccactgtatgctaccaatggaactggaaatctttcacgacagaatatagttgccacaggaaccaaagtagtggagagcaagacagaaaagttttctactttcgatggcacgaatgaaaatcgttgggataacgactacgatagaaagaatgagcacttaatgaggtctgggcaactgggaatgtgcaatgatccttattgtactacttgccctacctacttcaatgcttctcagcaaagaaatccaaaaccttcgactagatgggatccaaagttccataatgctctttatggggatgccaagagttttgtgagaaaacttctttctttctgctattcgtatgttcctggagttatgaaccctcatgctaaagtcgtacaaaaatggaacaaatttttggccattttttgcttggttgctatttttgttgatccattatttttcttcttactctatgtggagaagaatgaaaaatgtattgctatcaactggcctttgacaacaacacttgttttatttagaagcattactgatttgatatatttctttaacattcttctccagtttaggttagcttatgtttctcgtgaatcgagggtggttggtgctggagatttggttgaccatccaaagaagattgctcttcattacctaaagggttatttccttattgacttatttgttgtatttcctcttcctcagtgaaatatgtgcagataatgatattgtttgtcctaccaaagtacctgggattatcaggagctaattatgctaaaaatcttctgcgtgctgccatccttgtgcagtattttcccagattattcagatttctgcctctgctaattggccagtctcctacaggattcatatttgagtcagcctgggcaaatttcattataaatcttctcatttttatgctatctggccatgttgttggttctggctggtacctctttggtctacagagggttaatcaatgcttgcgaaatgcctgccgtgattctaatattactggatgctcagcattcattgattgtggacgtggccatggaaacaatcagcctggcttaagatcagatcagtggatcaacaatacccaagctgtcgcttgtttggatccctctcctgatggtttctcttacgggatttatgagaatgctgtaccacttactatagaaactatgtgtggtccagaaatatgtatttgcactgttttgggggattgcagcaaatcagtaccctggactggtaatcaaaccccaagctatttttgtgttgggtggaagtacttttttacaatggccatcataaggattgggactcttgctttttgcacttctcattggaaatatacagaactttctgcaggctcttggacgcaggaggctagaaatgcaacttagaggtcgtgatgttgagcaatggatgagccaccgtcgcttacccgaagatctaagaaggagagtacgtcatgctgaacggtatagttgggcagcaacaagaggagtgaatgaagaaatacttctggagaatatgcaggaagatctccagacagacataagacgtcatctcttcaaatttgttaaaaaagttcgaatcttcgccctgatggatgagcctatcttagatgccatttgtgagagactaaaacaaaagacatacatcaaaggaagtaaagttttgagtcaggggagtcttgtagagaagatggtctttgttgtacgtgggacattggagagctttggggatgatggaactatggttcccttatctgaaggggatgcttgtggtgaagaacttctgacatggtatcttgagcattcttctgtaagcacagatggtaaaaaagtaagggttcaaggacagaggttgctgagcaacaggacagtaagatgcttaacaaacgtggaggcattttcacttcgagctgcagaccttgaggaactgacaattcttttcacaagattcttgcggaaccctcatgttcaaggagcactaaggtatgtatcaccttactggagatcccttgcagcaaaccgtattcaggttgcatggagatacaggaagaagcgtctaagtcgtgctaatacctcgcaatcagatcaaacattgattgcatagattgtccttaatatcttattagctaaactttgtcataggttgtacgattataaaatatctttgatagtttcacttatttccatgtacaaatgttccttctaaaaggcatgtattaagcgtcaagaacttaattaaaaaattgagaattggataactcgccaggaattcctctatctgaaggggattcttgtggtgaagagcttctgacatggtatcttgaacattcttcagttagcacagatggtagaaaagtaagacttccaggacagagattggttagcaacaggacagtaaggtgcttaacaaatgtggagtcattttcactctctgcttcagacattgaagaagttacaatccttttcacaagattcttgcggagtccatgcgttcaaggagccctaaggtacgagtcaccttattggagatcccttgctgcgacccgcattcaagttgcttggagatacaggaagaaacgtctaagtcgtgttaattcctccccgtcagattaaacattgaggtcgtgggttgcacttttaatatttgatttgtagagtgtttttgatcttcaacccaatataagagtagattcagtaggttgttaccacatacaaaggtgtccatttttaattaaaacaacaaagggtaaattaattccacccccaaaaatattgtgtctacactcaataccttgcattttgaaaatgagaaatgctatggcacatccccaattaagagggtgtatactaggaagcaaattaattaaagtgtgctaggaattatgggagtttggttgtcaatgctgtattgctgttgttgatgttgtcatgacagcaacaacagttagcattgagagatgattggtcaagctgtcagttactatcagttggcagagaagattttaataattgtgagatgaggagaattagccattcattaagtatttaaccttgcaacaataaacctgaaaaatatttcataatcaatcaaaatgttgcttatgagactcaaaaaaaaaaaaaa

SEQ ID NO: 104513 - DNA, 262 bp, Glycine max
  Clone ID: PAT_MRT3847_65391C.1
tttacgtgaaagacacatcctcattctccttaattttttaaataaaaaattacataaaaactcacgtcagtaatatccatcagaacaaacccattttaaaaataagtttgtaaacgatacccaaaaggagcgatcaatcactccaatagtttggtgacataattagtagtttattttgtgattgggattgtgacttgtgatgtgcacatatggtgtgactttagtcttggtgaaaatagaacgctgcttacaacaacacatt

SEQ ID NO: 104514 - DNA, 594 bp, Glycine max
  Clone ID: PAT_MRT3847_65392C.1
cgtccatctcctagtctgcggccggcggtttttttcttttttatgaaaagactgtgctggttttgtttgtagcgtgccgttttgttagcgtatcaatgccttggctcaaacgtaccgcctgttcccgtgtacaacatgcaattactgggttggccgggcattactgaattgtaggtgcgcatgtgccttattggaggcttggcgtggaaccactcaacaggcttcgattggcgagactgtttcctgcggccttggggattaggcatatctgactaccttctacgttaccagtttacatcaaagtccctacctgggaccacacacagcttatttgtatgctaaatccctcttactccccaacaaatatgtcttttggattggacgtagacgacacttctctctataacctccagggttccgctaacacatggatttggcgaggaaccacacactaccaccgtgaataagaactgggttcctgacggcaaagcattcggactgtctgatactattacaatgttcaacccactggcggctctcgggatgaacattgtattcttatctgacagaccactgtgtctaggggatgtaacc

SEQ ID NO: 104515 - DNA, 936 bp, Glycine max
  Clone ID: PAT_MRT3847_65393C.1
ctgtaagttccaattttgtgaagggaaagaaaaccataagagcttcagttgaggctttgtttctaggagaagctgatgaacttgtcaaattgttggggcaggagtttcctttgctgggactgaaaaaagagctttgtcatgaaatgaggtggattgattctgtggtttggtgggctaattacaacgatggatcctcagttaatgcacttcttgaccgaaatcattactcggtgcattccaacaaaaggaaatctgattatgttcagaccccaatttccaaagatgggtttacatggatatggaaaaagatgattgaattgggaaaagttagcattgttttcaacccttatggagggaaaatgaatgaggtcccttctgatgctactccatttcctcaccgtgcagggaatctttacaagattcagtacactgtgagttggcaagaaccaggtgctgctgtggaaaaaagttttttgagtcagattagagtgctacacaattacatgaccccttttgtgtccaagaatccaaggagtgcatactttaactacagggaccttgatattggtatcaatagccacgcgtccgataactttgaagatggaaaagtttatggtatcaagtacttcaataaaaattttgaaaggttggtgaaggttaagagtgccattgatccagaaaactttttctggaatgaacagagcattccaacatatccaagaagcaatgcgtaaggaacctaaccgacaaagggcaacaaaccgatttgttcatttagttgactttgttactttagcctctacgtgattggttgaattgttgtatcttgaatcttgctatttcgcagaaacttgtttttacagtacatatggaacttgtgtgtatttcgggaaattatatccttgtggacaaagatccttcgcttcttggattttc

SEQ ID NO: 104516 - DNA, 417 bp, Glycine max
  Clone ID: PAT_MRT3847_65394C.1
ggggagaagcagagaagagaagaagacaacataggatggccgaggttgctgtgtcaacggtcgttaccaagctgacggggctgctggtggaacaagcagtagtggcggcggtgtctgtttcacagctggcaggggtaagagagcaagtggagaatttgaagaacgaattggggtggatgcagagctttttgagggacgcagatgcaaaacaagaaggcaacgaccgcgttcgcatgtgggtgtcggaaatccgagacgtggctttcgaagcagaggaactcatagaaacctacgtgtacaagaccaccatgcagggaagcttagacaaggtcttcagaccctgtcatctctacaaggtcaggaccaggatcgacaagatcctctccaagatcaagagcatatccgacaggcgcgaga

SEQ ID NO: 104517 - DNA, 466 bp, Glycine max
  Clone ID: PAT_MRT3847_65395C.1
gagataagaataagttggtggtgaagaagacagaaatgtgcaggagattcaggaggggcgtgtccgttcacggacgcacctctcatttccttcattcatccacactactcccaaacccatacagactgaaagaagacaagcaagcttggtcacgtatggatggacttagtgaacaaaaatattttgatccaacaaaacacaaattctattgggtttgatttgatgctacattttaaaatattttgcatggcattttgtgattctatagaatattgaactgtccctgtaaataaattctgactcttgtttttgagaatgcagaagtagggaaacttcgctactcttctccagaatccaagagaatgcgaacttctgcagctgctccaagtgatggctgctggtatgcagaacaatggataatgcaaacttctgctgctacaaatgcctcaactagcactgtggcaac

SEQ ID NO: 104518 - DNA, 409 bp, Glycine max
  Clone ID: PAT_MRT3847_65396C.1
ctgtgttttcctttcgtttattaaggttgtttctttcgtttccatatgttctcttctccaaaatcctctctttgatatttcccctttgataatttagggtttggtattgtgatagagacacaataatttttgggaattcttgtgacacgggatagttggagaattttgttttgtattttgcttgtgaattagggttggttgattcttttttacagcattgaagttatctactctctcattaatattttttttattaatttttttttggtatatctagggttcaagggtattatgcttgctggattcattctcttgctgaaatgcagtctttctagtttgttcaactgtccctttattggcgttagctatgctacctactggagcaaaagagacccaattacgtgagaac

SEQ ID NO: 104519 - DNA, 325 bp, Glycine max
  Clone ID: PAT_MRT3847_65397C.1
gttattgtgggacggaggaaaaagaagaagaagaagacgaagcgagacgagcccaaatgagaaccccagagccggtcctcttctaagcgcaatcatgaagaacgaagagggtatttttttctagcagcaacaacaagcgagtagtgctatctactttctccttggaacgacaacaagaaccactctctcttgtggccacatatttaacagacaattactaaaactagctcttgcgtgatggagctggctttgcaggcaagagacacgctcaaggcctttacatttgtcaacgagggcggagactttaccccccaacaaggaccca

SEQ ID NO: 104520 - DNA, 404 bp, Glycine max
  unsure (1)..(404): unsure at all n locations
  Clone ID: PAT_MRT3847_65398C.1
aatgagacctagatttttctctccaccttcctccctgatggcagaccaaatcatgctggcggccttcattcctctattggttgccttcatcgatgaattgggttcgttggaaacaaatctattcgaccgatgtaagcaatgcattcggggaagtagtggaggttatcggccttgccccaaatgacgaggtataagtcgaggcaagggaatttgcggtggtggtcatcggcaaagttggttttggtgtcagggagccagacagagggtttgatgtagaaggagcggangaaggcagggtcganggcgttcggggtggcgatggcatgccaccgatctagggctcgaccttgacgacgacaatgctggcctagacatgcagcggtgtttgggttaatttttttcta

SEQ ID NO: 104521 - DNA, 1502 bp, Glycine max
  Clone ID: PAT_MRT3847_65399C.1
ccacgcgtccgcccacgcgggagctcggctaaccgcaattacacggttcaatgaaaagtcggtgataaacaaacgaagtctctgcaaaacgcgatcgattcttctgtcgagagatgaagctcactgcactgaattctacggttcgccgcgctctgctcaatggccggaaccaaaacggtaaccgcctcggttcagcggcgctgatgccgtatgcggcggcggaaacgaggctcctctgcgccggaggcgcgaacggatggttcttctactggaagaggacgatggtttcgccggcggaggcgaagctgccggagaaggagaaggagaaggagaaggccaaggccgagaagagcgtggtggagtccagttattgggggatttcgaggccgaaggttgtgagagaggacggaacggagtggccttggaactgcttcatgccgtgggagagttatcgttcaaacgtgtccatagatcttactaagcatcatgtgccaaagaatgttctggataaagttgcttacaggacagtgaagctcctgagaattccaacagatttgttttttaagagacggtatggttgccgtgcaatgatgctggaaacagttgcagctgtccctggcatggtaggagggatgctgttgcacctcaggtcactccgtaagtttcagcaaagtggtggttggatcaaagcattgctggaggaagcagagaatgagagaatgcacctaatgactatggtggaacttgtgaagcctaaatggtacgaaagactgctggttcttgctgtacagggagttttcttcaatgcgtttttcgtgctttacatactctccccgaaggtagctcatagaatagttgggtatcttgaggaggaggctatacattcttacactgagtacttgaaggatcttgaaagtggtgcaattgaaaatgttcctgcccctgccattgcaatagactattggaggcttcccaaggatgccagattgaaagatgttataacagtcattcgtgctgatgaggctcaccatcgagatgtgaaccattttgcttctgatatccactttcaaggtaaagaactacgggaagcaccggctcctattggttatcactagtctttattgccacggatatgaaattacccctttggtgtgaaattagaaacctagaagtacgattgtatgcttagtacagaattcctttaattcaatcttgctgttggatataacagttatactatataccaatgattctataatacaacctcatctgagaaccatgtttaatgtgatacgataacaatttagttaagtactttttccgcaaccggaaagtttgaggacaatgacatagaatgatgaattgctgttcattattatatttgatgaactgccaagtatggaatggaaacagtaatttaggtaactgaatgattgataaggtgtgattttgaagttctggaataaaactctgatgctggcaatgattttacaaaaaaaaaa

SEQ ID NO: 104522 - DNA, 622 bp, Glycine max
  unsure (1)..(622): unsure at all n locations
  Clone ID: PAT_MRT3847_6539C.1
cctgtagagcggcgccctccaccttcaaagacagaattttttttttttnaccgagggttgtttttctttgggggggggaaacataatttattttacctgggccatttttttttaccggacggaaaaagaacacccattccccccattttacattggccaacaaatcaaaaataaatcccttaaccgcgggaataatccacgagttattattgaccctggggggccctaaagtccaaccctctaagccccccaaaaggagggacccttgggaagaccccgtccctttggggaggggaggggaccccaaagggccccccaacgaggcccacccccctcgggattcttatatagggcccgggagaaatacccaacaaaatccccctcaatcggggaatatccttaaccgaaccctcaagggaaaagggtttcccattcaaaacatctttaaagggggggacctactgatctgaaatgaaccccggccccccccctgggtagattgcccccaccactctcggactggcccccccggccccactaggacaaagacaaaacccgctcttcctcagcatttaataaaaggacacacccttcggaaggaacttgggaacccgaatggcct

SEQ ID NO: 104523 - DNA, 1088 bp, Glycine max
  unsure (1)..(1088): unsure at all n locations
  Clone ID: PAT_MRT3847_653C.1
gtttaaggaggcattggttagtttcaagagggcttgtgagttgcagcctgtggatgtgaggcctcattttagaacagggaactgtttgtatgttcttggcaggtacaaggaggccaaggaggagttcctcttggctcttgagtctgctgaggctggagggaaccaatgggcttacttgctaccccagatttatgtcaacctcggcatcgcactcgagggtgaagggctggttttgagtgcctgtgagtattatagggaggctgcgattctttgtcccacacattttagagctttgaagctcttaggtagtgctctttttggtgttggggagtatagggccgcggtgaaggcattggaggaggcaatattcatgaagccggattatgctgatgcgcattgtgatttggcctcggcgttgccggccatgggtgaggatgagagggcgattgaggtgtttcagaaggctattgatttgaagcctggtcatgttgatgcgctttataatttaggtgggttacggctgcgagaagacgacagaaggggggcttctgaaatgtatactagggttttggctgtgtggccaaaccattggcgagcccagctgaacaaggcggtgtcgctgctaggagctggggagactgaagaggccaaaagagctttgaaagaagcattgaaaatgacgaatagggttgagctgcatgatgcaatatctcatttgaagcagctgcagaaaaagaagaccaaacctagtaatgggggtgcttccggggaggcatcctttgttattgttgaaccatctaagtttaaggtagttggagataagactacggggaggcaggagctagccactgccttgcaaatcagagcgcttcagagggttgctcggttgagtcgttgcagcgtggagcttttgaagaaggagatgagcgaacgtgatgtgccggtgtcctattctggtagtggagttcctgaaaagtccatccggaagccgagtttggaagaaattcttcacagattactcaantttctgaagcctgagacttttcagggggctgtaaagccatanatgagaggattctttctgtttt

SEQ ID NO: 104524 - DNA, 146 bp, Glycine max
  Clone ID: PAT_MRT3847_65400C.1
gctacgcttagctgctcactgctgcttctatcagctctccatgcatcttgatacggtcgtgcccactattatgattcatcagctatcaactgtaactatgatctaatctcaacacttaagccaagggcttacaaaactacccatta

SEQ ID NO: 104525 - DNA, 1367 bp, Glycine max
  Clone ID: PAT_MRT3847_65401C.1
tttgtcgttgaccccagcaaacagcaagagagaaatggaagcagcatcggccacaattctgctactgatactaattcttgctctgatatgctcatggaaggttctgaactggttatggctgagaccaaagagactagaaaaactgctaagagagcaaggttttcgtggcaatccatacacccttttctttggagactccaaggagtttctcaagatgagaaaggaagccgtatccaaacccatgaccctctctgatgacatagtgccacgtgtctctgcctatgtccaacatagtgttaacaagcatggtaagaattcttttatctggtttggaccaatgccaagggtgaccatcttagatccggagcaaatcaaagatgtatttaacaagaactatgactcggcaaagcctaatttgattttacacaagatgtaactagcaactaagcctaatatgaatccactagtcaagttactagcgaccggaagagcaggctatgaaggagaaaagtggagtaagcacagaaggataatcaaccctgcttttaatttagaaaaattgaagattatgttaccattgttcttcaaaagttgcaacgatctggttagcaaatgggaaggcatgttgtcttcagagggatcgtgtgaaatggatgcatggcctttccttcaaaatctggctagtgatgttatcgctcgatccgcatttggaagtagctatgaagaaggaagaagaatatttcaactccaaagagagcaagctgaacttttaattaaagttctattgaaaattcaaatccccggatggagatttctaccaactaatacccatagaagaatgaaggaaattgacagagatataaaggcttcactcaaggatatgattaacaagagggagaaggcactgaaggcgggtgaagccactaagaatgacctattaggtatacttttggagtccaatcacaaggaaattcaagaacacggaaacagaaacaataagaatgttggaatgagtcttgaagatgtaatcgaggaatgcaagctattctactttgcagggcaggaaaccacgtcagttttgcttgtttggacaatggtgttattgagtaggtaccctgattggcaagcacgtgcaagggaggaagcctttcaagtctttggataccaaaaaccagattttgatgggttaagtcgcctaaagattgtcaccatgattttgtacgaggttcttagattatacccaccgctaattgggatgaatcgattggttgaaaaggatgtgaaacttggaaacctaacattaccagctggagtgcaggttttcctcccaacagttttgattcaccatgacagtgaattatggggtg

SEQ ID NO: 104526 - DNA, 164 bp, Glycine max
  Clone ID: PAT_MRT3847_65402C.1
gattcatactattagattaccgagacatagtactgtgtcagatgtaattaatgatcttaaatcaaaggtagatctatcacatcctgatgcagaacttagattgcttgaagttttctatcacaagatttataagattttccgtgtcaatgaaaagattgagaaca

SEQ ID NO: 104527 - DNA, 390 bp, Glycine max
  Clone ID: PAT_MRT3847_65403C.1
gatatttcctttttttttttcacccatagtgtggtggcggtctatagagtacatcttatcgttaggtccccggccggtaaaagcatcggccccgaacgaccatgacggcggcagttgtacggccaccaactgcataaggattcagccagctgcatgactgggggcggagtgaaccaaagggaactgacgcgccggagcacagctggtaaccgagttcttcaggtgaagaccaaaggcgtcaatgcgatcactctgggcgtccgtgttcctgtaaagctcacgcctgtcgaaaacacgacttaaggtgatagctggggacggcattaaatagtcacaggctcacacttcctcagagcatgcgagccgaaagcataaaatgtaaagccaaag

SEQ ID NO: 104528 - DNA, 146 bp, Glycine max
  unsure (1)..(146): unsure at all n locations
  Clone ID: PAT_MRT3847_65404C.1
gttataaataatcccgaatcgaggtgtcggttttgaaaagagttaacagtctcttctcttctcttcgcncctccacttgtttgcccttcatggcggcatctcaggcaagccttctccttcaaaagcagctcaaagatctttgcaaa

SEQ ID NO: 104529 - DNA, 289 bp, Glycine max
  Clone ID: PAT_MRT3847_65405C.1
tttttatgcaaacaaaataaactttaaggtttacgggatcaagcatgccagactaattctccaaaaaacatacatgaaacacctccccatcggtaagcctgtgtaaaatcccactctagggacatgggacgacacatttcataaacatatgtccaactcgggctagtgattaaagcaagaaatttggtctattatgcctcccaagtcaagatcccaccaactccactaatcccacgtataatactattgttgtaccgcccataaaataccaacagggaatagcaaaaat

SEQ ID NO: 104530 - DNA, 634 bp, Glycine max
  Clone ID: PAT_MRT3847_65406C.1
acgcgctcggctcctttctccccttcccattttcccccgacgcgggagggagaccccagagaaattcaatacatctctttctctgggtctgatcccatttgtctctccagattcgcccacccttttgcttcaatttctcaaaaccgacacgcatttttttgtcttctaatttctggtggctgaatctcaaaaaccctagagagcaccgatttgggggctacgtttctgtttcggacggagaacgagaaagcgaggatttacgcccgacccatttcgattggaagggtccagattcaaagggatcgtttgatttcatcgaataatcacccgacacgaaagggggctagatgcgaagaaaccccctctgaaaactggaagcgttcttctaaaaatcgatggattcagcgttttcgtccttgggtttcgtgattttcggtatttcaactagtttttacgcgttaccaccaccgtccctgatgaatgccggtaacaatggcgctcttttagcaccaccaacgtaggggatcatgcgagttggcgtggttgggttcttggtactcttgtcaccacatcctccgccgccccccgcccgatccgagagttgttcttgaacgagattttccacggttttctt

SEQ ID NO: 104531 - DNA, 754 bp, Glycine max
  Clone ID: PAT_MRT3847_65407C.1
tacggccgcgagaagacgactggccgggatacaatctcaattcgaattccctctagctctaaaaaacacactagcttccaaagtcttctaatctcttgcaagttgcaactcatcaaccatggcctcatgcaaatccttcatcacagctttctttcttcttgcaaccttctcatcaagcatgagtttgagcctagcatcatctcgtcacctcttgcaaacaaccacaacaccaaatttgcccggcatcactcccactttgcctaaccctacaggattgccacctttgccttcaaacccaacactgcctcagggcaatgttcctcctttgcccactatgccaactcttccatcacttccttccatttttccaacactcccttccctcaccctccctccatttccagcctcttcattccccaaaatgccctcaatcccaaacagtatcccgtccttccctttcttctccccaccaccttcaacatctagcccttaaaccatgttcacaagtttgcattattatgtgcttagcataaattgcatgcaatacacattgcagcatttcgttagtctatgtgagaggattatattataaccttatgattgtatctttgttgtttaattagcgtgttttttttttatcttattttgtattcatgagtttggttgtaccttttttatattatggtctatatatggatgttgaattacacatttagttacgattataatgtcttctttctcctgttcaactcct

SEQ ID NO: 104532 - DNA, 162 bp, Glycine max
  Clone ID: PAT_MRT3847_65408C.1
ctataggcaaaatttactatgataaaaggattcaagcaagcatagcaggtgctgggagcagagcaccagaatctcccttgcttatctaactatctgcatgcatgtgaccataatccagggtgatgaagaaggctagaattctcgcatttggtgtatatgagg

SEQ ID NO: 104533 - DNA, 270 bp, Glycine max
  Clone ID: PAT_MRT3847_65409C.1
gataattcaacggttgacataaccgtaaccatagttcatcaaaatgcatatcaacgagaatatgactcgaacgcagcgtgggcgggaaacggagcatcccacgggcgagccattgagcattgtatggatcataagcgggatgtgcaacgtctaattcatgcggttatctaaaattttaggtgaaatgcgaggagattctcacattgacactagattccacacaaggtgccacacatgaagctgttgttagaggtctttaatgacttatca

SEQ ID NO: 104534 - DNA, 487 bp, Glycine max
  Clone ID: PAT_MRT3847_6540C.1
tgcggcacgagccgcattgaggatgaaatgcattatctgaatgagtcgtctcagattaaagaatccagatgaggataccaaacaaaagtttaactcgaaacttgataaattgaagcttgaaagagagagagtacgattaagtcatcaagaagctcaaagaaaattacaccaaaagtttcacgagccatggggccagctgatgaagactggttatcagaactctcgctttgcacatcaggttgagcgatttgcgtgcctttatactagccaagtatctaacttggcgttgttctcttcagacaagtactgcagacccagtgaagattttatgcagcatgaatttagcattttcgaaagctgagctcttctacttgtgtgttttgttctgcaccccttctcttttttgggtggcatatatggtgttggtgaatagtggtagtaacatctcgaggttttcaacgtctgttaataaggggaaaaatagatg

SEQ ID NO: 104535 - DNA, 492 bp, Glycine max
  Clone ID: PAT_MRT3847_65410C.1
gtgctaatactttcataacatgtgttatgttagatgatgggtgggtgggtgtttgggggggggctaagtagtgctataaagtttaggcaattctcactttataatctgttttttttttgtggagtttgaccctaagcccaaattctaattctgatatgttacatacaagattgtttgtcagtttcattgctatatgttaaatatcaataactttatatgttagcattattttatactgctgcaagagcttttaagttccattctctatctcttgggtttatttctatctacatttttgagagtggtacaacattgttgcttagaaatagaatcatcgatgcacctttccatgatgagctctggtttgctgttgctaatcaaccttgcttgcttcatgttcgaattgatgcaatgtatacaaagccttccaatcagagcaacttcatttgcagacatcaaattaaaaaagttatgccagagcctagaacgaaa

SEQ ID NO: 104536 - DNA, 478 bp, Glycine max
  Clone ID: PAT_MRT3847_65411C.1
ctgtctagcttgctaccttcatgtgacagcagttttgtccccaaggttaaggttataggggtaacaaagaaccaccgtaaaaagcggtagagagcaaggccaaggaggcggggtggaggccttgagtgcaattaccaaagcacagtccaaggttgccccaaggttaggctataggggtacaaagaacacctaaaaagcggtagagagctaaggcctaaggaggagcggggtggaggaccgttgagttgcaagttaaaccaaagcacagtccaaggttgtccacaaggttaaggttataggggtaacaaagaacacctaaaaagcggtagagagcaaggccaaggagggcaggcgtggaggacgttgagttgcacgttaaaccaaagcacagtccaaggttgtccctcgattcactgtcaaggtttgagcgcacgtcgaggaaaggtcgaagtagcgtagattgcggtgagcgcgcaaa

SEQ ID NO: 104537 - DNA, 268 bp, Glycine max
  unsure (1)..(268): unsure at all n locations
  Clone ID: PAT_MRT3847_65412C.1
tacacncntgccattntctccttctcttccctcccatggtgtaattgcnccaactatggncgtggatntcatgacgacgggttgcagccgaancgacaacatcagtagtttcancaactancacccgnggaanancangtacaaagangcngctncggggnnagagancatngagaagctcatnagactcntctcgcaaacccaaacccaaacccgccatcaaatcaacaanaatagctctaatgaaatcgccatcgccatggactgc

SEQ ID NO: 104538 - DNA, 488 bp, Glycine max
  Clone ID: PAT_MRT3847_65413C.1
tttttctttctttttcttttctttttcttttttttggggacaaactggatccatataaatttttttcatctaggggaaacttacctcgaaagggcaattgacaacataaaatttccaaaacaaattacaaggggacggattggtaccctcactggacacactttatcctcaatttcaatacaccctaaggaaaccgcttttgcaacccaaattggtttaccaaaacatttttaatttaaaaaaataaaaggaaaactaccctgggccccccaaatttaaaaataaaaatttaaaagcgggcccccaaacaaaccctgccctataaaaaaaattaaggccccccagttaacccataaaaaaaataaccctaaacattcaaacccttgtaaaaaaacggggaaagggggaaaacccccactttcccttcagaaaaaatttcttgggaacaaatccccctttcctaaaaaaaacactggtgcgggcccttt

SEQ ID NO: 104539 - DNA, 677 bp, Glycine max
  unsure (1)..(677): unsure at all n locations
  Clone ID: PAT_MRT3847_65414C.1
ccacgcgtccgcttccttacataccactcgtccgcgctcttgttcttcatcatgaatctctctctccgaaaatattatcctcttctgctcgcgcataacttcctcgaaacgctgtgtttctctatacacgcgctaattgcagctcgtgaccaattttgccccctcacatctcctcctccgaaaccatgtcgaattggatctcctccaaacttaaagccgcagagagcattctccaccagatcgatcagcaagcggctgaatcgcttcgcaagaacgagggttttcggtcggaggaaccgagcattgatgctcccgccaaatcagggagcggtgtgtctctgaaagatcaattgaagaagaagccactggagagcaatgagtatcgtggaaaattgcgcagtgatcttaattttaatgggcttaaagctacagcaagtgcacccaaactatctcccaaatctggccctaccctaacagatgatgattggactgaactcctaagtgcacctacacctactcagtctgtagcttctgcttctgggggcaaccacggtaatgggttacctgcaccacgtggtttgagcagaaatagtagtaggaagcagaaggggtttgtcttcagggtttgttggcgatggatgtanaaagaatccaagaaatggtnacagtggtcctag

SEQ ID NO: 104540 - DNA, 540 bp, Glycine max
  Clone ID: PAT_MRT3847_65415C.1
cctatttctaacatacgggggacctgatacaaactctctgcacgccctgacatcttgacatggaaactgacaggtggactagtgctgatgctcgttgccatccttccctgggtaaggcaattcctgggacatggatcttagataaaatagctacttccattagtggactgcctctactggagattgaatgcatctttctgagagatggcaacattctaaaatagtacaagaaccatctactgcttgcgggcgcttcctttggatagctgaagctacatgctcgccatgctaaggacttgcataacgaatcccgctggactgacccaagtgaagcctttatcctacccccagcccctacactaaagcttattgcatgaaatggggcgatggctattacttcaactgtgtcctctcaacgggactgctctacaaatccttcttaaagagcaccgttctctgtatcttcgaaggaagggcacctgaactgctgatgctactaagccacgctcattgaacggccacctatcacgaattactgct

SEQ ID NO: 104541 - DNA, 2861 bp, Glycine max
  unsure (1)..(2861): unsure at all n locations
  Clone ID: PAT_MRT3847_65416C.1
cttccttacatcacagctttcatggcgctcttcttcgtcatcatgatggatctctctctcagaaaatcattatcctcttctgcacgcgcataacttcctcgaaacgcttcgtttcgctatacacgcgccaattgccgctcacatctcgtcctctgaaaccatgtcgaattggatctcctccaaacttaaagccgcagagaacattctccaccagatcgatcagcaagcggctgaatcgcttcgcaagaacgaggattttcggttggaggaaccgagcattgatgctcccttcaaatcagggagcggtgtgtctctgaaggatcaattgaagaagaagccattagagagcaatgagtatcgtggaaaattgcgcagtgatcccaattttgatgggcttaaagctacagcaagtgcacccaaactatctcccaaatctggccctaccctaacagatgatgattggactggactcctaagtgcaccatcacctactcagtctatagcttctgcttctgggggcaatcacggtaatgggaagcctgcaccgcgtggtttgggcagaagcagtagtaggaagcagaagggtttgtcttcagggttcttgatgactgatgtaaaaaggaatccaagaactggtaacagtggtcaaaggtccttgcagaagtcggaccttgtcatcagggttatattgagtctccaagtcagtgatgatggctatgaaacaagccctttgacgtcgacggggaggaattcggtggttgaatcaaagattgatggtaaatggggtaaagggctggagtatgctgacaaggacagttctgcgaagcttgtggttgaggaaaagggaaatgaagaaaaccagcaccgttttaattatagggacatttctccaccagaattgttgcaggaagatggaaaaactttggctgcagaaacattaccagcatggggggtggatgaggaccaagaagctaagattgtggaagatgttgacggcaatcaattgagaagtgtggtactagggaggcatgagcttaattcaatatctgatgatttgaaaaggggttctcctgtggctagtgatggaagttctgattcagatacagattctggttcgacatctgattctgaaagtgaacatgagagggaggaaaggagaaagaggagggaaaggattctggctgagaaagtagcagctaaagcaataaatgctatcaaggagcgggagaatatagtggccaaattagagggggagaaggaaagtctagagaaaatacttgaggagcgagctaaacaacaagcactccaggcttcacagcttcagagcactatgatggaaacaatggaagctgttgagttagaaaagcagaaacataataatactagaatggaagttcttgcacgtttagctaaactggagactgtcaatgctgatcttgcaagatcccttgcagctgtgcagtggagccttgaagttgaggttaagcaagtatcagaactcagacagcaaatcagttcgaaagagttgtttcacgaagaactcagaaggcgaatgaagaatcctcgtcaaactggagcttcacaaaatcaactagtttcaaaaagcgttgagttggaacgggaaattcacgaggcagagcactctttaattaataataaagttgcacagttgcaggaaaaggcaaggaagctagaagctgatattgaaatgacaaggaaggagatagaagagccaacagaagtggaagttgagctcaagcgaaggcttcaacaaatgactgaccatttaatacaaacaagcaaaggttgagtcactctcttctgagaaggcaagtcttgtattcagaattgaggctgtctcaaggttgctggatgagaacatgtcagcatcaggtgcagcaaacatgaatcctgcctcttcatcaagtgacttagaatcaggattgtgggagctctccaattcaaagttgaagcctatgctaaaagccagaattcattctggcaagatacagcttggatcattgcttcaacaacttgattatatttttgtgactggagcactttttctgaaaaggaactcaacggcaaaattgtgggctttgatatatcttgtttgccttcatttctgggtgttttatattcttttatcacattctagcccatcaaatgagggtagatctggtgcccagatctcactggagaacattaataacactggtggagtatgattgtgttgcgatgtgtcttcacttatgtcattccccgcagtttttaggaggccctcaatacattggatatgttttgtgttacgccagagtatatcatatcatgcacctgcagtggacatgcaggaatgccagtaccagactatgaccagtaaaatacaggactgcatggctttctatatcaatgaattttacatttctttgacgttgtgaaacttcattggacaaggagagactccactaaagaggagcaatgtcctgccattttgtatttgacaaaatggcttatttgggattgagttttgaatgctgatctaatgagaagttttcgtagcctcgcagggattgcaagtttaagtagcaataagtattttgtatgtacagtatagcaacagatgtaaacacagaataagcctttaatcagtgagtgacttgaacagcattcataaccccaaagatgccccatgcagtttcaaaattattgtctcttgaatattgtagaaaaagaaagagaattcgtttttttttgttgttgtatacaattattaataaatatttattcatttgtgtccncccncnnnnngagggcggccgccgccttgagtctcgtcgncccggaaattaattccggnccgg

SEQ ID NO: 104542 - DNA, 409 bp, Glycine max
  Clone ID: PAT_MRT3847_65417C.1
atgcgtttgttgagtttgttctttacaaacttttgctcttcgaagaaacgatcctttttttggggttggtctttgaaaactttagtatttttttgtttgagtgggggaaaaaaaatattttttttttcaggacccgggggtagaaaatcaccaagggggggccgccaaataaaaaaaagttgtatctggaacaacaacatttccttttttggacattgcaaaaagttgtgttttattaggggccctctcccgctgagtaaaaaagattggggggggaaataaaacccgacgcgggggttgccaggaaaaattccgaccgcgccgggggggccggccatttctcccttttagggggaggtttaacagctgggcctacagtgggtcaaaagaggagctggggggaaaaatg

SEQ ID NO: 104543 - DNA, 810 bp, Glycine max
  unsure (1)..(810): unsure at all n locations
  Clone ID: PAT_MRT3847_65418C.1
cggctcgaggaagacgacagaagggggaaatccatcgcagcataaaatgtcaaatacaagtttgcttgatttccaatacagcctctcaaggaaaaaatacctgaggaagccatcacgtctgttctcctgggaccggcagaactcggggtcgaagaatgtatttcctcagcctaaggctgatgagatgaagcaggtgtttgacaagtttgattccaataaagatgggaaaatttctcaacaggagtacaaagccaccatgaaggctctaggcatgggggactcggttcatgaagtgccgaatattttcagggtggttgatttgaatggagatggattcatcaacttcaaggaatttatggaagctcagagtaagggtggcggggttaggatgatggatatacagagtgcatttcggacatttgataagaatggcgacggtagaataagtgctgaagaagttaaagaaatgctgggaaagctgggagaaaggtgcagcattgaggacagtcggcgaatggtgagagctgtagacactgatggagacggcatggttgacatggacgagttcacaaccatgatgacacagtccctgaggcatgtttgaatgtttatggctatcatgtttattgaggttgtatttagggtcatctcaatgaaagctatctctgttgtatttagatttgtgcatgtgtttaataaactggattttaaaatcagtggaacaatacaactgtactgttaaaacggacaactctattgcttgtaatgaataataatactaataatataaaaactttattgtgcttccna

SEQ ID NO: 104544 - DNA, 315 bp, Glycine max
  Clone ID: PAT_MRT3847_65419C.1
cccacgcgtccgcttaagtacactcctgttttaactatagaatacattgttgacatgagcgtgcttatgattggtgattgggacgacttcagttccgacgacacgtaacatgcattctaattccgtaagtaacaaaggtctaccagtgaaagagagagagactgataccatgagaaccaactacgacttcatgaattacaaaggattcatggactatgggttcaataatgatgaactacgagcctgaggcgcttccaaagtaccaagatcatgtagcgtggcgacattgcaagagtcggaaggtgttggcgacaa

SEQ ID NO: 104545 - DNA, 280 bp, Glycine max
  unsure (1)..(280): unsure at all n locations
  Clone ID: PAT_MRT3847_6541C.1
tgatgtaagtttagatgaagccacaattctaagttatccaacccttttatactctaaagccaagctcaagaaatctgattccactgctacatattgctccatatatctgacagattacaaagatacagatatgcttcggatgctaccagattataaacaccaattccacctcagatgcatgnatgcatggttaangttacatcctacttatccantttacagaacttgtccgattccaacaccactctcaactgctctgactnaagtagttcctttagct

SEQ ID NO: 104546 - DNA, 233 bp, Glycine max
  Clone ID: PAT_MRT3847_65420C.1
gttgaggagttgaggaggttaaagaagaggagggctactaaaaagaggattttgaaagagaatgaaccgaaacccgatccttattggttgagaacgttttttagttttgctcctgaggaggctgctaaactacctgattatggccattttgggattttgagtcctttgcttgctaatgtttgtcttaatgagttggatcactggatggaggaaaagattgttgagtttttcag

SEQ ID NO: 104547 - DNA, 218 bp, Glycine max
  Clone ID: PAT_MRT3847_65421C.1
atggatcacattcagtgaggattacagataaacaggcttaaaaaccaactgcataataacatctgtttgagcacacccaattttttaaacggggatcgctttcacattattgctgcctttaatggacagcaaaaactgcattcttgccggctcaacagttctcttgctcactattcggtatatctgagaaagaacctctgtaaatgcattttcaacat

SEQ ID NO: 104548 - DNA, 736 bp, Glycine max
  Clone ID: PAT_MRT3847_65422C.1
tacggctgcgagaagacgacagaagggaggtcagacacaactaaattgaacggtgggtgagtatatccttcctggaaaaagaaaatttcattcacaactcacaaggactatgcactaataggtatcttaaatatattcacacattaacatgacgtgattggtggtgacgttattagaatgaataaaaaataatagtagtatttaacaggtgtgaagaaggacatttgtttcttcgttctccctttccccacacacttcaataaactaattaaggctgtacaatagctagaaccacttatttcaccaaaataataaataaaaaactaggacacttaggctgcacaagtcttggccagtagacaaatgacaaataacttttaagaaatttagatgataaaaattaagcttaaaaaacttttaatctcaaaccatagaattaatttcgttttatcctctaaaagaaattccaaattatatgcctgcaaaaatattggtttacttgggttcttatcatgttaagtaatgatgtgtttggtggagaataaagaaataatattagagaaataaaattatacttttttatgaaacacattttttatggtctactttaattcaaaaagaattcttctatttccatccctttattttcatcctctaaaccaaacatacctaattgcgatacaaaacaaagctgatatttcctcaattacaaaaaactaaaatgaaaatctttccc

SEQ ID NO: 104549 - DNA, 120 bp, Glycine max
  Clone ID: PAT_MRT3847_65423C.1
ggaaaattaattaggactaattttcattaatattgccaatgatgattcttccccatcattcggggtttttgttttaaaacggagtactaattaatgcggacccgtgggcggacccgtggg

SEQ ID NO: 104550 - DNA, 311 bp, Glycine max
  Clone ID: PAT_MRT3847_65424C.1
gagatggtactggtggttggggtctgaatgcaataaacaaacaaaattttgtttctcctcccccaggtgctattctttctgctgggacaggaaatgaaccttctaaaggtctctccctgggagggggctttggtcccagggagaagccagggggtcctaattcattttttccacacataaaacatgcctgtggtaccggtctttacccgttggaaggtaccatttattattcaccagggaaggcacaagttgcacccacaaaaggtttggaccaatatttttggaatgggtgggatgccaaaggtggtttt

SEQ ID NO: 104551 - DNA, 2000 bp, Glycine max
  Clone ID: PAT_MRT3847_65425C.1
aacatgatcatttaaatcttcaatttaaacaactctctagagctgcgtgtctccctcgagagccggcttcttcctctgcgcaggaattaggaatattcgacaggtagagtttcttcaatggctcctaaagttgataagaagaatgatccaaaggcccaggccttgaagactgctaaggcagttaagtcaggtgctacctttaagaagaaggtaaagaagatccgaacttctgtcactttccacaggccgaagaccttgaagaaggacaggaaccccaagtaccctcgcattagcgccccgccgaggaacaagcttgatcattatcagatcctgaaataccccctcaccactgagtctgccatgaagaagattgaggacaacaacactttggttttcattgtcgacctgcgtgccgacaagaagaagatcaaggatgcggtgaagaaaatgtatgacatccaggccaaaaaagtgaacaccttgatcaggcctgatggcaccaagaaggcatatgtcaggttgacacctgattacgatgcattggatgtggcaaacaagattgggattatctagggtagtactagtacttaggcagctctatggttattcttgaagaaaacttttttaaaaagcatagattctatattttgtgttttgttattttgtatcttttgtctcagttgacactaagcagaccttgtgtttcaattttgactagagagttgtttaaattgaagatttaaatgatcatgttaaaattttctaattaataattatgatcgaagaaatatgcttctagattgcattaaggcaaaaaagtacataaaaaaaaaaaaaaaaaaaaaaaaaaaaaaatcaaaattgaaacacaaggtctgcttagtgtcaactgagacaaaagatacaaaataacaaaacacaaaatatagaatctatgctttttaaaaaagttttcttcaagaataaccatagagctgcctaagtactagtactaccctagataatcccaatcttgtttgccacatccaatgcatcgtaatcaggtgtcaacctgacatatgccttcttggtgccatcaggcctgatcaaggtgttcactttttttggcctggatgtcatacatttttcttcaccgcatccttgatcttcttcttgtcggcacgcaggtcgacaatgcaacccttttttttgttgttttttatttttttcatggctttatttgtgttgtttttttgtggggcgctctgatcatgctcagttcctcggcggggtgcattccgtgtagcataatcactaattagaaaattttaacatgatcattccaatcatcaatttaaacaactctctagtcaaaattgaaacacgaggtctgcttagtgtcaccggacccaaaacatacaaaataccaaaacacaaaatatagaacctatcatttttttaaaaagtttccgccaagaataaccatagaactgcctaggtactaccttagataatcccaatcttgtttgccacatccaatgcatcgtaatcaggggtcaaccggacataagccttcttggttccatcaggcctgatcaaggtgttaactttcttggcctggatgtcatacattttcttcacggcatccttgatcttcttcttgtcggcacgcaggtcgacaatgaaaaccaaagtgttgttgtcctcaatcttcttcatggcggattcagtggtcagagggtatttcaggatctgataatgatcaagcttatttcttggaggcgcgctaatgcgagggtacttggggttcctatccttcttcaatgtcctcggtctgtggaaagtgacagaagttcggatcttctttgccttcttcttaaaggtagcaccagacttaactgccttagcagtcttcaaggcctgtgcctttgggtcgttcttcttatcaactttaggagccattgaagaaactctacctgtcgaatgttcccaattcctgcgcagagggagaagccggctct

SEQ ID NO: 104552 - DNA, 260 bp, Glycine max
  Clone ID: PAT_MRT3847_65426C.1
cccgtttgaaaataatttgtgtttttttccattgtagattgaatggagagcctgagaaagatgatgcggtatggtgttctgtgctccgggaaccctcggcgtttgtacgccacgaaagtggacctgaaaaagctccggccgatgattctgaagagaatcgagaaacgggcacatacttacccggttcgcggcatggttccggttgccaatgaggtcctccaagtcaggaatgatctcatccatggcgtttccaccttctt

SEQ ID NO: 104553 - DNA, 223 bp, Glycine max
  Clone ID: PAT_MRT3847_65427C.1
gcgcagaccttaaaatgattcagtgaaaaacaaactgactgggatatctcggtgtgcatgcggtgcatccttcgggatgaagattcagctccgaaccatctcctgtattatatggctccaccaggatgcacatcaggtagtcgtggccctatgcacaacaaggatggatcggtcggtactgctagggactgaaacacaagatcaatctggtgcctataaacac

SEQ ID NO: 104554 - DNA, 229 bp, Glycine max
  Clone ID: PAT_MRT3847_65428C.1
tgccctttggtttttttctttgttttttttttttcttttctttgttttttggtttgtcatttgttattgggaaaaacttatgttccctaactgtgcgttgccgagggattccagcatgttgtttgttattggatgggttttgaatttgcaccgactggaaccctgaggccggggagtagccaacgatagctcctcaactggtcacttgttccttcctttgatgcaattc

SEQ ID NO: 104555 - DNA, 344 bp, Glycine max
  Clone ID: PAT_MRT3847_65429C.1
aagcctctaggtcagtttgggagaactcctatcttacactagcgccaatgtatcttatagaggagaatcatcgtgttactacaatagaaggtcctatactaggaaaccgttgccttactcaatgttaaggcacaaaaccagatacctctttcatgacagatgttgaagccgtgaattctaatccatcatcgatgctagatattgttcaggtgtatactcctatctcggaaaagctaggcatactaccgtattagctacctagtgtataaaatgtcatcttcctacctaaagaactataatgtgtatgaaatgtcgagtcctatcttcgaaagtagatctaggcc

SEQ ID NO: 104556 - DNA, 487 bp, Glycine max
  Clone ID: PAT_MRT3847_6542C.1
aaaaaaaaagaaaagggttgggggggcccctttaaaacgaatttttttttgggggaaaaattcagtttttaaacggggaagggccccccccacgggcccctttttaaaaccaaaggggggggggggtaaaaaaaacagttcaaaaaaataaggggcccgggggtttcacatttaaaaaaaaaaaaaaaaccttcaaacccccattagtaatcgcccccctttgaaaaaacttttttgcatggggggcggaaaaaaaatgtatgttcaaattgggaaacaaaacttcctttcccatcccataggggggggtaggggggtgcttccctttaggcaatctcagggggaaaagaccaacaaaaaaatttttcatgggggggggggattccagggtttttggacaaatcctttccccgggggggcaaagggttaaaaagaaaaaaaaccacccttttccatttttggctgctccccacccttaacaagggga

SEQ ID NO: 104557 - DNA, 358 bp, Glycine max
  Clone ID: PAT_MRT3847_65430C.1
tcgctcgtgcgcgagaacacttgcgagggagcccccgggagcacaacatccttgttttctgtgcagtcataacaactgtctcgctgactgtccatgatgctaagacttgctgacaaactctgactgatgtcactgacaagcgtatagggacaaacaccgtctagtgtgacatcgcaggtctccacctaactcactctgctatcatcggccaacacggcggcgttcgctctcagagtacacgacttcgctgatctgaacctgagggcatggctgctttcatgcctgaccttttcgagcctagagcgcttgctccaactggacaggatctcgctggccccccctgtgtgaacatccagag

SEQ ID NO: 104558 - DNA, 1771 bp, Glycine max
  Clone ID: PAT_MRT3847_65431C.1
gaagcggaagcacgggttcggttttcattatcttcttctgatgcgaaagtgaagactgaagagaagataagacaatgctagcgctactccagaactgctccatgcccctcgcacgtgcggtgcggtctccacctcgcacgcacgtgcgaccttgtttcacggccgtggcctacgcatccatttcctcacgtgctaactcccagtctcaggttctcctcggcttgtccgagaaggagctgcaacaactcgcccttgacctcaatcaggaaacctataggggcaaacaacttcatcattttttataccagaggaagctcagagaaattcaggatttcactcaattgcctcagggatttaggaatactcttgaggaaactggatggaaggtgggccggtctcctattttccaaactgtaactgcagctgatggaactgttaagttgttgtttgaagttggaggacaatagattggttgaaactgttggcattccggttatggttgataaaggcctgactcgcctcacagcatgtgtttcatctcagctcgtctcagcttgattgtcctttactttgctctttttgtgccacgggataagaggggttcttaagggatcttaagtcatttgaaaggtttgaacaggtcttgagcattgaaaaagtcttctaaaatagggtgacaaatgtagtgtttatgggaatgggtgaaccaatgttaaacctgaaggcagtacttgaagcacaccattgcttgaataaggatgtgcaaattgggcaaagaatgataaccatctccactgtgggcgttccaaatacaataaagaaacttgcttctcacaaacttcaatctactttagctgtgagcctacatgctcctaaccagaaacttagggagacaattggttccaagtgcaagatcctacccattggatgcacttatgagtgactgcagagaatactttcagcaaactagtaggcgggtttcctttgaatatgcacttttagctggagtgaatgactcagtaaaccatgcattagagcttgctgaattactccatcgatcgggcagcggatatcacgtcaacttgatacctttcaatccaatagaaggctccgagtatcagcgtccttccaagagagcagtgcttgcattttctggtgctttggagtcctctaaaataactgttagtgtacgtcaaaccagaggactggatgcaaatgcagcttgtggtcagctacggaataagttccagaaaactcctttagtcactgacccttttgatcttgcagtcacagacacttctatgccatacaataacaattttgcagtaagcagttgatgagaggcttgatgagccaacgagcatatatctattaccagttgtgaagtgatgaaggtgtttgctgttgctgtatcagttgtaatatcaacttgtcatctgagaaattgtggacagacacctaattgcttgttggcgattttgctggagcatgctgacctgggatattagttttgttggaatctatggcatctatatggactaagaaacagcttagagtagagagggttaggccaaaaataagtgattaggggtcaagtgggagagattttcttatgttttggacctcttgtgcttggtatatattgttgttgcaactattgatcccgcttgtaaaaatcctactgtttactctctgtataacactacgtcaatcaattagaaatcacgaacacatggtatttaaagtaaaaaaaaataaaaaaaaaatataa

SEQ ID NO: 104559 - DNA, 530 bp, Glycine max
  Clone ID: PAT_MRT3847_65432C.1
tctcgacaagcgatcttctgtagaaacgatccaaaagggggcagtcaaggagacctcgacaacgacaccccctctaaacaaagagggcgagcgagagagagaaggacacgagaaaggggagaacgagagcgaaagcgggacaccaccaaaaaccgaactgggaccagaacaagggagaacctgacgaggccagcaacccaaagacagatgcagaaccctaccaacaccacacgcaagagaccgacggggcagaaggctgcgaaccacgcaccaaagccacggggaacagggactctcgcggagtacacagcaatgagcggaaacaccaactccagagactgccagagccctgaaaaaccaccggccaccaacaacaagatgagggacaagggggaggcacacaccatgaactaccgcagagacaacggccacacacatggagtggtcgcagaggacacaatcgcaagacagcaacccatggctaatctagagcgggtcaaacatgaaacaggggcaaaaaaaggaggggg

SEQ ID NO: 104560 - DNA, 192 bp, Glycine max
  Clone ID: PAT_MRT3847_65433C.1
aaactcaagggttactggtcattcaagggggactcttgggaattcacaaatgggtcatttcttcataccagaagaatctttaacttttttttgagagggaaaggtttaggcaacaccccaaaccaagtatttccgggggggccgggattatttttggacctgttgccaaaggttggaggggggttaccgaaa

SEQ ID NO: 104561 - DNA, 542 bp, Glycine max
  Clone ID: PAT_MRT3847_65434C.1
acagttagtgacttagtaattagtataacatcaaaactcagggtattaaacccttggatgacactcaggatatcaacaattaaacccttggatgcaagatgcacaagtagcaaccagcaatgagaaaccttctgctatctggtctttcctagcaactataattccctctggctgtacacactagtgacactacacaaacaactcggggtcctttaatttatcgtaattctccagaaccagacaaaagtaatgataggtaactttcttaagaaacaatgaacttgtgagatccatttttttctctctctattttcaacaatcaatgtatcaacaaatgaatcccaaccaaacactgaaactaaagttaactaataaaactgattcatgttgcaacatatttgcttctaggcctgatgtagatttacttgacttaattcctgacaccagatgtcaaaataatgctaaaaagttactcatattggtcatctactaaactgctatcttgtgtatttaactttttctactttattttttaatttcca

SEQ ID NO: 104562 - DNA, 232 bp, Glycine max
  unsure (1)..(232): unsure at all n locations
  Clone ID: PAT_MRT3847_65435C.1
cagcgccgcactcaaccaccacacactattttaattcaccctacctctttatcctctccacttacctttcaanttgcaatcgcttaaacataacactatgctttgctatttacctaacaatctattaaccatccacaccctcacaacctctactaccaactctcctatacttacctcaactctctcctcaaccataacccanacaacaaattctccttctaaacattcacca

SEQ ID NO: 104563 - DNA, 522 bp, Glycine max
  Clone ID: PAT_MRT3847_65436C.1
gggaaaaataacacacccaaatatttttcaacgccctgggcaactgggaaaaaagcaaatttagctgggggtcccaaatacccaccaaaatttaaaatgggtttttgctcaaaaccacatttttagtactcaaatttcttttgcaagagtggaaattaatccctagccaagtaacaaactatcagggggggctactgggggtaaacttaaactttttttttttgccacaagcgatttaggggactgttagaataaccctgagcacgggtgaaccctcagagagcaaaaggggaaaaatggccattgtaaacccctttttcatccacatgcccaatgttaacctgaacccaagcatgggccttagcgggaatcaatcggtttgggggagagcacttcctaggaatggaaagcccggggaaccgcccttcctcgttctgcattttagggtgagggttataaagcgacttcacagagatctataaaccaaaaccaaagactagcggacccttgggtaaacccggg

SEQ ID NO: 104564 - DNA, 220 bp, Glycine max
  Clone ID: PAT_MRT3847_65437C.1
cgcgagccaaacgacgacaggacgggacgcgacaattgcagatcaagaaacaggtgctgtgtgcgatgtatatagagatgcgatttcaagaggacaggacggtgaagtacaacgaccatcgctcccgtcgcaacagaacgacgatcactatattgactcgtaggctgctaatcctgactacccaagtcgagaagggatcacctgttgacttccttatgat

SEQ ID NO: 104565 - DNA, 281 bp, Glycine max
  unsure (1)..(281): unsure at all n locations
  Clone ID: PAT_MRT3847_65438C.1
gaggaatcctcggagaaggagttcgnactcanattggatcactctaacnttnancgacacngtcagganggaacgatttcatcgtcgtcgagttctacgccccatggtgtgntcactnctaagaagcttgctacgggagtatgagaagctgcttactatcttgagtagtcatgatcctccnattgntttngctanagtagatgcnaatgaggagaagaacaaaagaccttgcatnacaatatggatgtcaagggatnccaacaattanaattgggaatggg

SEQ ID NO: 104566 - DNA, 374 bp, Glycine max
  Clone ID: PAT_MRT3847_65439C.1
tgcggctcccatccccacgacttcacgagtactcgccgtcatacgactatccaaggggaatcattccaattaccatgccactttcaagagactgcgaaagactaaagggtatgttgagttccatgagtcgccgccggacaatttcgatcccggacagccgtataacgacccagtggctactcagcagattacggagcctatcgttctggacaagctaattcaaatcgagattgccaggatcattagggagaaactccaatagtgctaccgcatctatggcgtcacacacctccactaatgccgccatctcgtcaaccactatcacaagtccagcctcgtcatcagatgaggcaacgactgtcttcatccttctc

SEQ ID NO: 104567 - DNA, 752 bp, Glycine max
  Clone ID: PAT_MRT3847_6543C.1
tccctcgcagacacccaacagactccatttcctctcttctcctcactctttctcccttgtttcagtttccactttccatggcacgctttggctctcaccttgttctattcttggttctctttgcttccctttgttcgtgtctagaagccagaaagcttcatcttggtgcacagaaacacaacaaaaacaaggttgacccatctttgttttttagttctcttcccaagggcaccgtcccaacttccacacccagcagaaaaggacactccaccgtggtcgatgagaagctcattgcgcgtcacctcataagcactgaacaaattcttctgcgatctgttcctagccccggtgccggccattgactaatgactaccttcagtagcataacttgttcctccttcatcaaatgttaaaacctttttttatttcttcatcagttttgtcatattcttatattctttctatgggacaagatattagcatagggatagtagaatacttgaatcaatgtatagttggtgtatatggttctgttttcctctgttatggattattcgcaacacttttagattcatctttattgggaggaaatatatatatgtatacacatagtgacaattttgtcttctcatgttcaacttctagttctgtacaatcaagttttacataaacatagtcttcattgaaaaaaaaaaaaaaaaaaaaaaaaaaaaaaaaaaaaaaaaaaaaaaaaaaaaaaaaaaaaaaaaaaa

SEQ ID NO: 104568 - DNA, 1958 bp, Glycine max
  Clone ID: PAT_MRT3847_65440C.1
ttcggcgcgtgctaccaggccttcaccatgtaatcctcattggtgatgataaacaacttcctgcggtagtcaaaatccaggtttctcaagaagctgaatatggaagaagtttgtttgagaggctggtatcgttgggacacaagaagcatctgcttaatgttcagtatagaatgcacccatccatcagcttattcccaaataaggagttctatgagaagcaactttctgattccccttttgtcagagaagtgagctacaacaggcatttccttgaaggaaaaatgtatgattcgtactcgtttataaacatagccaatgatgatagagaagatgcctattggtggacatggttggaagaacatggttgtggctgaggctgtttgcaattttatttctcgtctgtgaaagcactgtgtaccaaagatgaaccaaattgacatcaatatactatagacatataattctaaattctagtttaccgttgtatttatcatactgataaatttccttgctgtccagaacatcttcctccatctgctttgtttttacttcgattaaggcggaatatctgatatatagttcatctagcctgtgtaatctaaaacacactgttaaaacaattttatttacaataggcaatgacttaatgaagcccttaatctccctagatttttccaaggaatattggggaatgagaacattttcagcagttccaactctctatggagaaatctagtcaacgattctaaggaaagagggtgtttccataatgctgatgatgacaagaaactggcaaaggccattgaggaagaatccttgcttattgaactacttgatgaatatgagtccccatttaagaaactcagtctagggagcacttcacgaacaagaacaactgctaccaccttcagagggtctttcaggggcaggccaaggacaccaaggtggtgatggtgagggaagggattatatagatttgcaccggggaacaatgatacacgttgtaatagtttgcctgaagatgttgtaaaatgtgtccttttatattatattagagaaatgctagcactcctcttaaggcaaatccaaggctgtgtttacctgaagatggtgtaagatgtgccctcttatctcgagtatctgcactgtcgaagagtgaatgagaaagggcgtcagggtgtgccagttccaagtatgctaaatccacgagggagttaatatattgtatatactaattataatgccgttatgaacttctgaatttttggctgggctctctccttctctttcggtccatcaaggtcaccaatattgtcatgatactcctgaagtagatccttgatatgcttctcactaagtttgttctgcttgagaagtagctcaattctccctctcatttgtggatgccaatatttagatgtaaatacttgctctgaacaccaaagatgacccaaaatgacagcaatcaacagaatgtctaaaccaccataattttctttcaaccagtcagcaaattggttgatggatgaaggatccaatatgtcaagttgatgacaagccaccttcttgcaagaccttagctgattcaacaccaacactttcatctcttgaagtcagtacaacaatcactccatgaccagcaagttgcctacatatctcaaacccaattcctctgtttccacctgtaaccacagcaacagtttccttggaccaccacctgaagagtatatagcccagattctagtttacagttgtatttttcatcttcatctatctccaagtcatcaggctcaacttgatccaactgtttagtttctgctttgactctctgaatatctacgtgatatatagttccattagcctgtctatcttctcacactcattttcaacaaatttacttaatatagtctttctctcctagaacccctcaagcttccacagttccaccaaataataag

SEQ ID NO: 104569 - DNA, 413 bp, Glycine max
  Clone ID: PAT_MRT3847_65441C.1
tcaaaaactttgacatgtcaagtatatgttctcttactctagctgacaaagatccttcagaagggctgcggttggatattgaagcaatagatacatactttgaccgacgctttcttgagcttgagatgatgaggcaggaagccataaaaagtgcaaagaggaggagacattacgaggaagaacatacctgttatgtgatgcattagaatgatttcctttgtatttttttttctaaatatttttttttgtattcgtttaaatcatttgatttgatttctgacagccttgcttttctcgtttttcttgacggaatatgcttttgttggtatgggatatggcctgcaataggccgtgttattttaatagatactatatgtgaatgtcacgttacgaaatagagctagtttttgatt

SEQ ID NO: 104570 - DNA, 590 bp, Glycine max
  Clone ID: PAT_MRT3847_65442C.1
gtggcctctgtgcaaaaccccttatcatctctctctttatctctttgtctccaaaaatggcttctatcataggcgtttcctccatttaccaaacaccttctctcgaactataccagaggccaaatactgctgcctccacttcctccgttaggttgcaatgtttagactccaagtctcacttcaacaacgtcctccgagcccaccaacgccactccactgggccgggcctcaagcccacaccgactactttcgtcccctccgccgtcgccacgcccaattcctccctcctcagcgaagaagccttcaaaggacttggccgcgacttcgacgaattcgaccacgcctccgattccgactccgccgccgaatccgttcaccccgacgagcttgacatttccaagctcgacttgccctcgcgcctcgtcgagtctctccagagccgtggaattactcaacttttccccattcagagagcggtgttagtacctgcactagaaggtagagatatcattgcgcgagccaagaccggtaccggaaagacgttagcgttcggaattcctattattaaaggcctcactgaagatgaacac

SEQ ID NO: 104571 - DNA, 1605 bp, Glycine max
  Clone ID: PAT_MRT3847_65443C.1
ggtccggaattccggtttcgactgttccttcgtctgcaaccctagctttccgttgtttgcaaatctatggctggtgaatctgatgtaccggaaaacaccctctcttgtgctaactgtggcaaacctgcgaatcttcagtgtccaaaatgtatggaattgaagcttcctcgagaaggtgctgccttctgctctcaggattgtttcaagtcttcatggagctcgcacaaatcagtgcatctgaaggcaaaactatccccacctggcacacaaaattcagactcacttgatgaaggttggttatattgtttgaagagagggcaggctcgaacgccaaagcttcctcactttgattggacaggaccactgcaaccatatcccatttctagtaaacggattgtcccagatcaaattgataaacctgattgggctgatgatggaacccccaaaattgagcccaatagtagtctacagcataccattgaggtcaaaactccagatcaaatagagagaatgagggaaacttgtcggattgcaagggaggtgttggatgcagctgctcggattattcagcctggtgtgacgactgatgagattgacagagttgttcatgaggcaactattgctgcaggaggatatccatcacctctcaattaccttttcttccctaaatcttgctgcacgtcagttaatgaagtaatctgccatggaattcctgatgcaaggaagcttgaggatggtgacattgtaaatgttgatgtcactgtgtactataaaggtgttcatggtgatctcaatgaaacatactttgtgggaaatgttgatgaagagtctcgccaactagtaaaatgcacatatgagtgcctggagaaggcaatatccattgttaaacctggggtacgattccgtgaaattggtgaagttattaatcgtcatgcttcaatgtctggcttttcagtggtaaaatcatattgtggtcatggaattggagagctcttccattgtgcacctaacattcctcattattcaagaaataaagcagttggtgtgatgaaggccggacagacctttacaattgaacctatgatcaatgccggtgtctggcgggatcgaatgtggcctgatggatggactgctgttacagcagatggtaaacgaagtgctcaatttgagcagactcttttggtgacagagactggtgttgaagttttaacagggaggttgcagacatcacccaatgtttttccttggttaaattcataattgggtgaatcatggagacagaagctggtagtgtctgaataccatacaattaatagacaacatttctttgatctacatctctggttttctcttttgggtatcatgtttgtaagttatacaaaaaaacagaagcaaaattcaattgagttttgatgataagtatgattaatgattgtttgtgtaattgaagaaaatttaagaattttgtccttcgttctttttatggcttatgttggccaagtcaataatgtttgagcgaagttttgaacactggcttaatcattaatttagttcctttgtttattgaaaacatttatcagccaatcaggtccttttgttttaatt

SEQ ID NO: 104572 - DNA, 295 bp, Glycine max
  Clone ID: PAT_MRT3847_65444C.1
cctcgtgccgaattcggcagaggtcggcacgaggttttgctgtatggaagtactgaaagttgaagatttgagattggaatgaagagcaatttctgttgtctgttataatgccattcggtagttattactactatttgattcaggtaaagttgaaatgtgcactttatttctgccttccaatgatttggatcctctgatactcggaaagaggctggggcatgggttgaaacttgaaagacattgtttattcggattaattcaattattagtttatccgatatcacttttcaaaaaa

SEQ ID NO: 104573 - DNA, 109 bp, Glycine max
  Clone ID: PAT_MRT3847_65445C.1
gcaatcaccgcatttgtagaaatacatgtacaccaagcttcagatcaagctgaatgcgaatcgcatggttgttgagactatccgtggcttcaaccagcaaatgaatata

SEQ ID NO: 104574 - DNA, 324 bp, Glycine max
  unsure (1)..(324): unsure at all n locations
  Clone ID: PAT_MRT3847_65446C.1
ntgaaaatgaacgngnacgnaagctcggaattaggctagaggnagtnactggtganggngaaagganagcnattgangnnanactganggttngagacttagatcttagggttatngaatgagangtaaatntacggacnaatagnagaangcagctggggcntnttanaannntattnnncnancntntaggacnccggantcatnnagaagnggacaggtagtnacacctgcaaganatacanctaanaagagtgaanntnnnnannaaaantgaanntgaaggaggaggtnaaanatggtgtgtgnnaagtagatggtaan

SEQ ID NO: 104575 - DNA, 886 bp, Glycine max
  Clone ID: PAT_MRT3847_65447C.1
aattcggctcgaggtaatttgggagggtttaccaggactattgtgatgccatgagcaatctttctttggggataatggaacttttgggaatgagtcttggagttggtaaagcatgttttagagagttctttgaagagaataactcaataatgaggctcaattactaccctccttgtcaaaagcctgacctcactttgggcactggacctcactgtgacccaacatctttgaccattcttcaccaagaccaagtgggaggcctccaagtttttgttgacaatgagtggcattccattagcccaaatttcaatgcttttgttgtcaacataggtgacaccttcatggctctttcaaatggaaggtacaagagttgcttgcatagggcagtggtgaacagcaagaccacaagaaaatctcttgctttctttttgtgtccaaaaggtgataaggtggttagtccaccaagtgaattggtggatgatttgacaccaaggatataccctgattttacatggcctatgctgcttgagtttactcagaaacattatagagctgacatgaaaacccttgaggcattcaccaactggcttcttcaacggaaaatgagctgaaatgaaattttcaagcacatatgaatggcatattatctattagcctttgatagtctcctatgaatgaatagtgacaagtgtcaagtggaagaagtgtaattgatggcggagaaaagggcagcagcaaaaaggcactgagttggaaaaattgaaagaaaattcatgttttcttcatgaattgagtgttgcacgagtagtgattggagtagtattgaacaaaacaagggaaatgagataaaaatatttataaggcgtcaatgagaaataatcgccag

SEQ ID NO: 104576 - DNA, 202 bp, Glycine max
  Clone ID: PAT_MRT3847_65448C.1
ctggaattttcgtcattcttactttaccttccttcctcaccttctaattctgcaacaagttccaaactttctaatctcaccgctccaaaaattcttttatggttacccatttggctttagcctctgcaacagagtctcagatctctgcattccagttcccatggctggtcgctatgccaataaccccttcgttgaggaaaaa

SEQ ID NO: 104577 - DNA, 258 bp, Glycine max
  Clone ID: PAT_MRT3847_65449C.1
cgacgacgataggagacgacaagtgacgacgaaggaagatgatgtctcctgacggcaggtgacgacgacgacgacgatagatgactgaagaagaaaggtgaatgtccagcgtggtggtgagcactgacgatggacgatagacgactcagacgacgatctcagacgacgatcgaagatgaaagacgaggaaggacgtaggatgagcaaggtgaaaagtgaggatttgggaacagagtaccttatccgtcctttagaaac

SEQ ID NO: 104578 - DNA, 415 bp, Glycine max
  Clone ID: PAT_MRT3847_6544C.1
gtctgacaaattgacataaaaatcattgaaaagctggcctttagagtgcgtaagtgggttataacaaaaagttttaggcctcttcttcttacatcctctaaatatcatttttcaccccctttaactttaaaataaaccttaacttccaaaatatccctcactcgttaacatcatccttcctctctttgaacccttcttcttcttcctcctcttccgtcattcaatcattgtttcaatagaaaggatcaacaacagagcctgtaaatcaccacacatgtaattcaaaatgaaaattttacattttggattacttgatccaaaatttatcgcaacaaacaatctaaatattttaccggatgtgttacggattagaaaacttgtaaagtttgcaattctatggaggttttggattata

SEQ ID NO: 104579 - DNA, 302 bp, Glycine max
  Clone ID: PAT_MRT3847_65450C.1
cccacgcgttcgcctgagttcggacttttgtcttgtagctggatatctcgttttaagggcatatataaaattcttacaggccttgcgacacagttggttttcttttctataagccttctgttactattttcctgtttacatttcttcaatatatttttattggtcttataaagcattcatctaattatactttttgctttaccagaaaaattgtttgatctgcaatctgtgatgacatttcaataatgtgctgattgtctgtgattattatctaaatatcaccatctttcggctgagattaa

SEQ ID NO: 104580 - DNA, 630 bp, Glycine max
  unsure (1)..(630): unsure at all n locations
  Clone ID: PAT_MRT3847_65451C.1
tacnntacattagatataattaacggttaaaataactggagactacacagaaataaattaataaaaaaaaataatacatcaataaaaaaaattaaaatgcattgtcctctttcctttcgtcttctctgttgttttgccggcaccgtcggcacctctcacggtcaagtgtgaccttcccttgcagcttggtttttctcatcggaaaaccttcccccatcgcccaaaatccctaagctcgaacctatagacaaatggctttaacacccacacaccccaagaacaagaagaagaaccaaccacctttccaataaaagctcgaacctttcgcgttggcgtgtcaaagaccaccacctatcgtcatcctcgtactcgtgcctcagatctgaaaatgcacttcacgcttcagatctaaaaatgcattcgcaccttagatccagaaattcgcacctcatgttcagaatccatggccttgcacacacggatttgttgtgacaatctggcaaagagagtccaagctagccttcttgttgtgcatcctttcgcgaatgatggtgatgctgatgacgccaaggacattgatggcgcgcatgggctcgccaacactgcaacccatgttgaggattctgtggc

SEQ ID NO: 104581 - DNA, 407 bp, Glycine max
  Clone ID: PAT_MRT3847_65452C.1
aaatctttctggttgttctgaatttaaatatcttccagagtttggggaaagcatggaacaattgtcattgcttattttagaggaaactcctataacaaaactaccctcatcacttggatgtctagttggccttgctcatttgaatttgaagaattgcaagaatcttgtttgccttccagatacctttcataaattgaaatccctcaaatttttggatgttcgtggctgctcaaaattatgtagcttgccagatggtttagaggaaatgaagtgcttggaggaaatttgtttaagtgcagatgatagtgtagagctaccttcatctagctttaatctggaaaacctccagattagttttgaagtaagatcctccttttgcatttagttaccaccttctaaactgaatc

SEQ ID NO: 104582 - DNA, 825 bp, Glycine max
  unsure (1)..(825): unsure at all n locations
  Clone ID: PAT_MRT3847_65453C.1
aattcggctcgagacggctgcgagaagacgacagaaggggagaaatggaaaagtataagaaattaagaaacagctgtcactacacaacacaatccctaaaaacatgttcaaaatttgaaattctgaattgaaacccttaacacactcattcagacattgcttctttctctttctctctctctctcttcctgctgccaattgctacacacaattgcacaatacagctctacaatgggaaggagtctgagtccaatgctacggagagagatccaaaatcttgacaaagatacggatagccgcaaatccgcaatgagagcattgaagtcatatgtgaaagatttggacatgaagacaattcccatctttcttgcacaagtttctgagaccaaggaaactggttctttgtctggagagttcacaatttcactgtatgaggttcttgcccgtgttcatggagtcaagattgttcctatgatagacagcattatgcaatccatagttcagaccttagcttcaagtgcagggtctttccctcttcagcaggcttgctcanaaggtggttccagccatagcaaggtatggaattgaccccgcaacccctgaagagaagaagaggcaaataattcactctctttgtaagcccctttcggactctctcttgagttctaagagagtttgacatgtggcacggccctttgcttgaaggctcttgtggattcggacaactggcgttttgcggtcgttgagatggttaatagggtgtgccagaatgttgctgcagcattagaggggaaagtccacacaaaccaattacacatgggtctg

SEQ ID NO: 104583 - DNA, 205 bp, Glycine max
  Clone ID: PAT_MRT3847_65454C.1
agaccctgcaaaggaggctgcctacttcactgcccaattcatcatcatgaaccaccctggtcatattggaaatggctatgcccctgtccttgacagccacactgttcatattgctagcttgtctgctaaactcatgacctacattgacttgcgatccggcgaatatctcgataaggaccccaatttcttgaagaactgtgatgct

SEQ ID NO: 104584 - DNA, 351 bp, Glycine max
  Clone ID: PAT_MRT3847_65455C.1
aaaaaaaaaacaccctcattgcacatagaaatgcgctttatttaagggaataaaattttacatacttgttcacaaatgcaaaagggccctcttcaaccaaatttttgaaacttttacagttttaaaaaaatccggtccacatagggttaggggcattaaaactcaaaatttcttttttaacgccaaaaaaaacagcccgtaaagcttctggaaaagggtccactcttgtaaaaaaaacaattttttttcctttcccaagggctgggggaattttttttgtgatttctgtggagcgatttgttactggaaaactaattcaagcagggggggggaaaccaccccgtccccttc

SEQ ID NO: 104585 - DNA, 256 bp, Glycine max
  Clone ID: PAT_MRT3847_65456C.1
agggagaacccaatgtctcaggttatataactatggagcaactcatacagagaaagaacaacgcaacacaatttttagctttccagtacatctgtcgcatacatgatgcgaggggcttattaggaggagccctcatcaccctcgatcttattcttattaacaaccatgctactcatatactgccgagaagactccgggtggctgcttgcgtcactctctctccaaacctagaaggtaccgcacttgctggaggtcc

SEQ ID NO: 104586 - DNA, 336 bp, Glycine max
  unsure (1)..(336): unsure at all n locations
  Clone ID: PAT_MRT3847_65457C.1
ttatttttcgattttatttcaaccttcaccacctataaacttttgccctataacaccttttgttttgttacttttttaaccaccattttttcattgaataaagtttccttaaaccaaaagttattaaatcctccaaaaancnngacagngattttcaaaatcccatatctttcacagtttttgaactccttatatgatttccaatacaagtcttttttctcagcatttgcttgcctgaccgaacaaattaagtttgaccgctatcttcatccacacttccgttattacatgagggaggtcacaacacttttttattcccaattttttgaatcttac

SEQ ID NO: 104587 - DNA, 326 bp, Glycine max
  unsure (1)..(326): unsure at all n locations
  Clone ID: PAT_MRT3847_65458C.1
ncggtactatgncatttnatgntnngaanaannannannnannngtantttngncgcgngnncnngtnntcnaagnananncnngangtntgnngnnnngtanannttnngtttacacngnnnanananngnttgnagcanctagttnnntngngtnnntnaanngnantagnnatanatntatnacnggctnantttnnnnagnacnatcngnatnnngnacanngnnnngttttgnngnngnaaatgtntnttgacncnagcaggtttntnnggtnttncgnnnngaagggnnnnntttggngnnngncnnnngtctnntnnng

SEQ ID NO: 104588 - DNA, 472 bp, Glycine max
  Clone ID: PAT_MRT3847_65459C.1
cccaaaagccaaaaatcaagggcttgttattaaagccaaagggtacattttttacctttgatgcttgcaaagattggcttggaaacttaaattttggcccaaactaaaggggacgacaaaccccttaaaaaggttttttaaaacaaaatattttggacaaaaacaaaaccagggccctgatgtttggggccttctaacaaaaaaccccgctggggtttttttttcctttaatttggggggggctattcccagctacaaaaaatgggggcacaaacaatggtttgaattcatgcctttcctcccaagaaggggttttaatcttccaaaacggggggggggggtctggaattccctggcccaggtactgggaagaacattagggcaatgcctttggccttgataatggggaaaatgattgctgaggccccggaaaggaatttagcttcaatcctaatttttttcggaaaaggga

SEQ ID NO: 104589 - DNA, 287 bp, Glycine max
  Clone ID: PAT_MRT3847_6545C.1
ggcacacgtttgttgaggtaactagaaccactaacatgaaactgaaagtgcctgttttgtgcgttgccacactgctggtagcatatgaatgccatggctcagattaccagatgttccctctccaaatgaatactgcagtttgctgggcacgacggcaatgatgtggcatgtgccaattagacgcttgagcgtggaaccagacaccttagtcgagtaggacactgttcctgcagcttgcggagactacatagctgactacgttctatgagaccactatagatcagatt

SEQ ID NO: 104590 - DNA, 1413 bp, Glycine max
  Clone ID: PAT_MRT3847_65460C.1
cccacgcgtccggctgcgagaagacgacagaagggggtagttctaacttctaagcccttgcccagtgctcatcgaggcttaaaccctttcggcggcagcgaaaaaagtctccccgcccccaaacccaaacaatgaggaagaaaaaacaagggttcagaagacccgttgtcataaaaaagccgaagcaaccgcaagagcaacccagcgttgatcctattacgggaaagaaaatccccaaaagtttcgtgttttcgcgaggcaagttgccggctcctctcaaacagcttcagatggacctcagaaagttgatgcttccatacaccagatggacctcagaaagttgatgcttccatacactgctctcagccttagggaaaagaaacggaataatctgagggactttctgaatgttgctggacctatgggtgtcacgcatttcttcatattgtcaaaaactgctacttcatcttacttgagggttgcaacaacccctcaagggcccactcttacgtttaagatacatgaatactcattggccgctgacattgctcgatctcaattgcatcctcgatgccctaaggatctgtttaaaaattctgctttgattgtgctttctggatttgtaagtggagatccaccactacagcttacaactaacatgtttcagaatatttttccaacaattgatgtcaaaactgttaagctctccacttgccaaagaattgtgttgcttaattacaacaaagacactaagctcattgattttcggcattattccataagattacaacctgtaggcgtttcacgcagaataagaaaacttgtgcagagccatcaggttcctgatctaaggaatcttcaagacgtgagtgattttgtcacaaaagctggctatggatctgaaagtgaagctgatgaagaagcagcaacagttactttgtccagtgatattggtagagttaatcgtgcttctacaaaaagtgctgtcaaactgcaagaggttggacccaggatgactcttcaactagttaaaattgagaagggactgtgttcgggtgaagttctcttcagcgaatatggaaaagctggtggcaaaggaaaaagtgatgatgagatgcagggtgaagaagattcagatggtgatgaagatgaagaagatcaagatggagatcatccagaggatagtgaagacaaagatcaagatcttgattagtcacagtgttttcacgtggtggtgtagtattcaagttgtgtagtagatccataacactgcagaactgataggtgccactggaaaattttcttatcaagcattccagtgttgtggtacaattcatttgcttttgttaaaatacagatctagagcaatcaaacgttgttcattttgattaccaattttttagctttgctttt

SEQ ID NO: 104591 - DNA, 972 bp, Glycine max
  Clone ID: PAT_MRT3847_65461C.1
ccttcgcttcttgataactgtaggtaaggaccatttcgttgccctgggtcgaaccgcgtgggatttcatgcgcacagaaggtgggtccgacttcggagcaaacatcttccttaacctcccacctgtcctcaacatgtcggtgctaacagtcgaacgacaaccctggcgaggccacaaccagttcgccatcccctacccctcctacttccaccccaaaaccctagcccaaacgctgacgtggcagtcccatctccgccgacgcgccaggccccacctcttctccttcgtcggtggcacgcgcccggggttacaaaaggcaaaagtccgcgaccacatcgtctcgcagtgccaagcctcaaaacgttgcgttttggtccggtgcgcgagtggagacagcaaatgccacaaccccatgagcgtgctcgaggtgatggaaaaatccaccttctgcctccaggcgccgggggattccttcacgcgccggtcgacgtttgattccgtactggcggggtgtattcccgtatttttttcagagcatacggcgtatacgcaatataagtggtattttcctagggagagggatacgtattcggtgttcattgatgagagggaagtgattgaaggaaaggagaagatgatgattgaggaggtactgttgggatttggggagaaagaggttgagagaatgcgtgaggtgctcattgggctaatccccaccctcacctacgcccaccccaacgccactgccgcctttccggatgttgtcgatgtcatgctgcgccgcctctctcgccgagttacccaccatttcaatcctataatttaattatatccctcatcatcttatttcactcaaaatctcaagtataaaataaatataattttataaaaaaaaaattgagaaaattacttatttgtcaatgtataaatttgtttttgatttttttaggaataatgtgacttgtttacttt

SEQ ID NO: 104592 - DNA, 306 bp, Glycine max
  Clone ID: PAT_MRT3847_65462C.1
cccacgcgtccgtgcgtgtgagaagacaccacaggggggcagcgtggcactatcatcctagcagaagtagaatatgatctatgacataaatagacatcaatgatacacgaggtgtactctgatcctgactatccttgactactcacaaacgtatgatcctccttcagaatgcaaatggcgtcaattaccaatctgctggaccattcgctcggcaaaatcaatctcataaagactgtgagaaatctgtatgactgccaccaggtgttgaatgaaatatagtatcaggtcatgcatgtggtgcggaac

SEQ ID NO: 104593 - DNA, 504 bp, Glycine max
  Clone ID: PAT_MRT3847_65463C.1
cttgtgcattcattaagatggaccaaattttctactgtaaattgtgtctattgaccaaacattgatcttaaattcttttgtgtttttgcctatatttcttgtatcagtcttctcctcatgtagcctgtgccttttggacatccatcagtggtggccaagagttattcttttttaaggattacaagtatggataccttgcgagtgttggattatgaatatggattttctcatgagtgtattgtcataattgccatagaacagatacagattgtgttggtatattgtatttacctgatttttagggcatttgaagactttcatggccaattctacatgctgactcttctgtacttcaagctttgcagtatagcttttgcatatttctattgcaataatgaagtgatactttattaaatttggttatttggacaattggttggatatcacatcaggaaaccagttggaatctactttggtgaatgacttacaggagcaggaaaaaaa

SEQ ID NO: 104594 - DNA, 165 bp, Glycine max
  Clone ID: PAT_MRT3847_65464C.1
actgtgtgcatgcacatagtttgcctgggaaggagcggccgactaaaattccgggtatgggcaaagagacctacacgctgcctcttgcaaggctcgccggctaaaaggcacctgaatgaaggcgccaccaaacccaaccccacacccgtcgccgttgccacttct

SEQ ID NO: 104595 - DNA, 783 bp, Glycine max
  unsure (1)..(783): unsure at all n locations
  Clone ID: PAT_MRT3847_65465C.1
cggaattcccgggtcgacccacgcgtccggtattagcagcagcatatgttgttgtttgtggtcatcccttacagcagtgttgatcagaagaagactatataatagcctttgctccaatcacttcctcttgttcatgccataaactaaaccctttctacagttacaaatctatgctactccacaaagactctttttgcatgagacatcctctctcttaaaaaaccccttcttcagtcaaacctccccaatcatacttttaccatttcaccactcacacttttctctccctcttataataacaacaacttcctcatatatacacttactctccttcaatagggtaactttttcaatttggttgctacccttttgttctcttttggactatatattgtatattgaagcctaaaaggttttgaagaaaaaaaaaagtgatgagaaactctgaagcaccaacacatggtggcatgatggagatagaagcaacaacaaggccttcagggaatggttcgacaacaaccctaccagggttgagtcctctgagtgagaccctttggagggagaaggccaacactgcagagatcattggtgatgtctcagcaaggctcacatggaaggatctgactgtgatggtaactctcagcaacggtgagacacagaatgttttggagggtctaactggttatgctgaaccaggaaccttcactgctctcatgggaccctctggctcaggaaaatctactcttcttgatgcactntctagtcngttagctgcaaatgcct

SEQ ID NO: 104596 - DNA, 540 bp, Glycine max
  Clone ID: PAT_MRT3847_65466C.1
tgtatgattgaatcctgcttgcacaaaagcaatgactatgttatttaatatcaaacccgtgttctgatgcatggagtttgtgaatttctgaattgttccggatttcattgtgatatcatttgtggcactggatggactgccactccaatgcaggaagttcagatacaattgattgggttatttgctcttaggaatgtgttgccaggacctattgtgtttaaatatcacataactacttttgagtaaaatgggcgtagggggaaactgtctatgatataatgcactttccgaagcgttaaaagaatgcctatttctatagggggaggagctgaggcaaagaatgctattgtcatgaacatgccatatgctgttcttttaatgtggatacatttagatggagatctcaggtttgcagtttctatgatgacttgtgcctacattaaatgtgcagcatctgtcttgatagcacatgtaaattcggctgatgacaccatcaattctgaggcttatgcccacagttggtgcagttggagagattca

SEQ ID NO: 104597 - DNA, 254 bp, Glycine max
  Clone ID: PAT_MRT3847_65467C.1
gcttggaattacggctagcatcactaacgtattgtgttatattgtacacttgacatctgtaataaacgggcaatcgtcgtccaagtactaatgaaggacttcaacagacagaccactcagcaccagaaggcatgtcttgcaggaagtacactacaatgaacggtgagatgcgaccacgtcggatcaagctaagactcaagatcatcagcaccagcttagaaggcaggggatgcatcatgcaattgaactacaca

SEQ ID NO: 104598 - DNA, 455 bp, Glycine max
  Clone ID: PAT_MRT3847_65468C.1
ctcttctcacttctttgtaggtgactgtgtgcagcagaaaagaaagcagaaagaggaaaggtaagataaagcaagaatggcagcaacttcaacaaaccaaatcaaagaccaatctctttcactcaccaagagactctttccatggaccctctatgctctaatccccatagctcttctacacttctaccttaatcctctttcatttcctccttcaccagaatctgaactccctcattcgctcacttctcacttttctcccccctcagaagatgaaaaggctcatgatacaccttgtgactacttcaatggcaaatgggtcagtgacaagagaggccctttgtacaatggaacaacctgcggcacgatcaaggagaaccagaactgcatcaaacatggaaaacttgaccatggttatctctattggaggtggaagccttaaaatgagtgccaacttc

SEQ ID NO: 104599 - DNA, 105 bp, Glycine max
  Clone ID: PAT_MRT3847_65469C.1
gagctatgtggtgactgtggctggggacacccggaacctgacgatgggtccgtccggggcggtgttcgggtcgctgacatggaacgattggaaccacggggttcg

SEQ ID NO: 104600 - DNA, 368 bp, Glycine max
  unsure (1)..(368): unsure at all n locations
  Clone ID: PAT_MRT3847_6546C.1
nnnnngaagcgtttttttcttgcttaacagagattctctttatcttgaatacaaggacgggtaaccttacacaacattagcagcttcttccttcacaaacaataattcctttttcccaaatcaaagatgacaaacctttaacactttaacgatttcaatgttactgttcaaagttgggattcaatccaggaaggggaaggggaatatagtgctatcaccttcaatattaaaaaaacaatattcggtactctttgtttcacttggattagcttggtttgctcttttttctgtgacgattctacgttttttttatggcgagctacacattgaattggtgccattaattgagattcattcatcattggtcc

SEQ ID NO: 104601 - DNA, 292 bp, Glycine max
  Clone ID: PAT_MRT3847_65470C.1
acacattgcctcttacaattaaggaaatcaagagatcagctgaattgttttattcaaaaccgtctgagaaccccgatggccactgaatttgcctgagctgtacaatattatggccataagactatttatgagtgtttctgctaccatcgattacatatattacgggaagccgcactgtataccgctggattgacctatctaccaaagcgggtatccatttcgtgtgttctatgcatactgctggtactagttcggggaatcgacctttacagctctttgagaagtcatgggg

SEQ ID NO: 104602 - DNA, 142 bp, Glycine max
  Clone ID: PAT_MRT3847_65471C.1
ccaattctgggtcaacgaattacagtaagaattttttcttagctttcttcagtagtcattgttctttatttgattgttcaggtgactatgccatgtaatatttatatatataggtcattaaaagcaaagttgaggatgtttg

SEQ ID NO: 104603 - DNA, 805 bp, Glycine max
  Clone ID: PAT_MRT3847_65472C.1
tttagtcgatgatcggagggattaaaaaaaaaacctattctcctgatatggtctactcttgtgggtggtgggtaggaacaattcccagtgttctcagattggaatcccattgactctaccatggccacgccctctgatccttccaaccaagaagctgttgtaagaaggagaaacaacggaccccctattaagttcctccttcctctcatatatgcccctgttctccctctaattcgtctatcgctgcggcataaacccgtcttgagagatcgcttgtttactgctgtgttggctggggcctttgctcatggcttctatttggtaacagatctgtatgatattgagagcaagtgattaagcagagcatgtttcagacatttcttcggcatcatttacatcacaacctcaggtcttcaataaatttcttcgaccactatttacagctaaacattctggtaatgccttaaatagcattggtcgattttcaagatgtaagaatatttttttcaattatattgacagattattatgttatgtacgccttatagttgcatcttgtattgcggattttgctttctctagaataactatggaattcggaggctgttctttgatcttttttttctctcttgatatcaatgctatttcttgtcagcttgatgttgatttctgtaataattagatggtctaagtggattcagaggatcaatatgcatgtcctttatcgccatggataatcttgttcatattttatttgtagttggatctgatgtataccttcaatggggggaaaatgcttgattag

SEQ ID NO: 104604 - DNA, 458 bp, Glycine max
  Clone ID: PAT_MRT3847_65473C.1
aattcggctcgagtacggctgcgagaagacgacagaagggggatgatcggagggattaaaaaaaaaaacctattctcctgatatggtctactcttgtgggtggtgggtaggaacaattcccagtgttctcagattggaatcccattgactctaccatggccacgccctctgatccttccaaccagtaagttcctcccttcccctttctttaccctattaattgttattctcaacttcgtccccttctccacagagaagctgttgtaagaaggagaaacaacggaccccctattaagttcctccttcctctcatatatgcccctgttctccctctaattcgtctatcgctgcggcataaacccgtcttgagagatcgcttgtttactgctgtgttggctggggcctttgctcatggcttctatttggtaacagatctgtatgatattgagagcaagtga

SEQ ID NO: 104605 - DNA, 518 bp, Glycine max
  Clone ID: PAT_MRT3847_65474C.1
cggacgcgtgggcggacgcgtggggtgatttgcagaggagaagaggcaatggcttacatgtgtgcagacagtggcaacctgatggcgattgcgcaacaagtgattaagcagaagcagcagcaagagcagcagaagcagcagcagcagcagcagaccaatccaattccatggaacagcactcctcctctccctcccaccgatttccccgaccccttccaatccgatccccccttccacttccaacccttccgcttctccgacttcgactccgacgactggatggactccctcatcgccaccccctcctcctacaccaccgatttccccttcccctcctccgatctcaaccgcctcatcttcccgccccaatcccccgactcggactccccacagcagcctctcctaaaagccctgtcggagtgcgccttcctctccgaaaccgaaccggatcaagccgccgaatccctaagccgtttgcggaaatccgtctcccagcacggaaaccccaccgagcgggt

SEQ ID NO: 104606 - DNA, 178 bp, Glycine max
  unsure (1)..(178): unsure at all n locations
  Clone ID: PAT_MRT3847_65475C.1
aagtccgccanagccacnccgtgacagnaaagctncgggnacattgcgagctncggaagngcggtgttngnagcagnanaacnagcgcggcgnntnacccgcnggtnaccgtnatnctctccaaccggaaaacggaaaacacagncaatgacagngtcagnctntacagagncnccnc

SEQ ID NO: 104607 - DNA, 156 bp, Glycine max
  Clone ID: PAT_MRT3847_65476C.1
tccaatgctacctgtgggaagcggttgggtttaattgggcttgagaacactggaacttaacggccgggattcccggcccttcttgggacaagttccagaattggtgaagacattttttggggcattctttttgagggaaatctttttccattcaca

SEQ ID NO: 104608 - DNA, 617 bp, Glycine max
  Clone ID: PAT_MRT3847_65477C.1
attctctttctgcatatgctactcactcttgttctcttggctctccttctctatacccttcgtcatcctcgattccgcctctcttcaacgtcaaggaccatgatgccctaagccctcctgatgcgaacactgtgactgctgcaaaggatatcccttggtgctccacgactcagcagggaccatggtcaactgaattgaccaacatcagagtcaagaacattgaatccgatcgaggacgatcgttaaggagctgtttaacactgcaaccagcacgtgcttcaatatctcatggcagtcaaccccatgtgaggaaaccccctaccagaacacatctgtaagcaaccccattgatgattgtcttgatcggacgatgtggttcgttctagacatgcggatgacaactgcctgtctatcttgtgtcggcttaatggagaaaccaccaatcacgtactagatgcgctgggacagctctgcgccaagcactacaagaccgtagaacgttttagctatatggcacgcagagctgaaggttgttccaaatacccgtctgagctgactaatatgcagaacgatctatggcgtagtctagatacaatgacatatgtcaggaacatgta

SEQ ID NO: 104609 - DNA, 257 bp, Glycine max
  Clone ID: PAT_MRT3847_65478C.1
ataagcaccctcaggagaaagagacgccatcagtgcaagaaccagaaaaccttagaaaaacgatctgagaaatctgaccaacgagaggaaaagaatgctgttgattttgatgcactaatggcgacaccaaaacaggcatattagctgcatcaacaacaactaccaatggtgcggcgagcgaggaacatggggacgatttacacctacgcgactccaatgagggatgacactgaagaggacatgtcaagatcatcttt

SEQ ID NO: 104610 - DNA, 254 bp, Glycine max
  Clone ID: PAT_MRT3847_65479C.1
cgagcacccgcgttaagtggtccactccattccaacgtgtgtttggttaagatttttttttttataaatgtaagttgctaagtgatagaaaggaaaacattttccctttaaataaaaatgtataagaaaagtatacttacggcaatatttatcttaaacgaacatgctgttaaagaaggaagcagtcaccaaaaaaaaaaaaagaagaaggaagtcattatccaaatgttaattattattattattatgcaaaa

SEQ ID NO: 104611 - DNA, 190 bp, Glycine max
  Clone ID: PAT_MRT3847_6547C.1
ggctcgaggttattaccatcgcgccgactctagccgatacatatataggtactcagggactgggtctatgtctgggaccgcatcatttgcgccgggcacaaactccgttttaagatcggaggcgcatggtctcgccaaatatacctcgcgagctatatagatacctatcagacccccgccaacagcatcg

SEQ ID NO: 104612 - DNA, 574 bp, Glycine max
  Clone ID: PAT_MRT3847_65480C.1
ccctacgcgtccgatttttgttattagaaattccgaattccctttcaaaaaatgctttctctgctctccattttgccaattgttctcgccgcgttcgttgcgccttttgcaaatgcccgctttttcaacgcccagcgttacgctgagcttgaaccccaaagagattgaactgctgatggacacggcacaaaattgcaagaatctgtcggacgaccagcaagtggccgccttccaagtgttggcagaggagcagggtggcgatttgaaggcaaacattgacaacgtgctgatgaaagtgaatgtgtcggacgaccagttcaagcagaacattgaggaggcgaagcagaagctgagttcgtctaaggctaaggagaccgctgatcagctcgaagacctctttttggacggctccctcccattcattgacaaagtgaagaagtccgtcgaacttgttcaagaattgcccgaagaaatccgaacggaatgtgaacccgtgctgatggtgatcaattcgatcacgcgatgtcccttcaaagaacagtgcacaccgtcagaagaaattgtggcggaaaca

SEQ ID NO: 104613 - DNA, 426 bp, Glycine max
  Clone ID: PAT_MRT3847_65481C.1
gcacgagaaaattgattttcaaccataattaatgtgttcaaattgatctcagtcaggggttacttactttacttttttgctcgcttcgtaggagtcaaattccataattaaaatgggaccagactctttcaaacgaggcaattcttctcaactgaaattgggttaccttactagagttaaattccataattattttgggatcttactcttctaaatttagcaacttacttttactctattagagagtagataaagtaactcagattacattttagaagatgaagtaagtaagtagtcttagctgttgctgaaaaaaaaattgttaatattgtgtgtacatgaatgaaggtactggaatattaatggttaatatgttaatttttttcattaaagagataaagattattcatttacttttcctcactt

SEQ ID NO: 104614 - DNA, 515 bp, Glycine max
  Clone ID: PAT_MRT3847_65482C.1
ggctcgagaagttccgccgcaagctccaaactccacagctccagcaactcctctccgtcgtctgccgcagccaccacgtcagcatcatcaagctcctcggcgcctccgtctccggcgaccacatctacctcgtctacgacttcgtcaacaacggcgccaccctctccgactgcctccgcaacaaaaacaacgtgcacttcaccgtcctctccacgtggatgtcgcgaatgcaggtcgccacagatctcgctcacggcctcgattacattcacaacaagaccggtttgaacatcaatttcgtccataaccatatcaagagcagcagcatcatcgtcaccgagccttccttcaacgctagggtttgccacttcggcgccgcgcagctctgctgtgaaatcgaactcgataaccagaaattaggcgaacctagtggaatcgacgagaaattaacatcgtcgccggcgagatccaagcaattctagggagtgcggaggtacatggcgccagaatttcag

SEQ ID NO: 104615 - DNA, 360 bp, Glycine max
  Clone ID: PAT_MRT3847_65483C.1
tttgatttctgtgctacattacaagcaaaataattgatattgcacagacaaacctaactcaaaatgctcagccttcaaagggatcatcacctcccacacaaaaactgggatctaccctggctcatgcaatatcatcaaacaaaaggagcctgttacaaatgacaagaacgggctacctactacaaaatgcgacctacagcccaaactagccccaaaattaatgttcaatagagtgactttaaaactccaccctgtccgtgctaagaaaaactgactcccggaaccagccgtgaactctggaccagtaccggcccgcgtaccatcaatccatggagggagacatatacgggcttgacatac

SEQ ID NO: 104616 - DNA, 396 bp, Glycine max
  unsure (1)..(396): unsure at all n locations
  Clone ID: PAT_MRT3847_65484C.1
tcttgatcatttttacactaaatgttttttcattttcgtttcctaattaatatgttaagggcgagatattttttgtttcaataaaaaaaatcatgttattggtaaaatgttgaatgattttctgtggtaaggtgtatgaaagaggatttactgagattaaagaatatcataataacattattagtttttgacatctgccggaaatatatatcttattgccattgggctgaaaaaatgctggaagtatacctttttaaatatattttagtacttctcaattattttaataacttttattatagatatattcaaaagaaaatatttaactttttttgtttgagacttccagnagaaaaaattgtttatgagacaaattgacatttttaaaaatacatt

SEQ ID NO: 104617 - DNA, 365 bp, Glycine max
  Clone ID: PAT_MRT3847_65485C.1
tcgggaaatgtgagacttagttaggctacaacaatatcgaagacatgggatgtttttgctcccgaggtatgaattgaagaaaggagatgataacaaagacaggagcattgcaagaagccatggcagtgacatggtggtgttggttgtgctgctgcagcaccttctgttggaagttgtcatcatcatcatcatggagatggtggtggtggtggagggtgcggaggtggtagtggtggcggcggaggtttcaaattaaggttccaccatcaacattaattactacatagggaaataaatggtggatattcaacaagctagccagagagaaagagaaagaaatgtaagttcaataaattatatgaagg

SEQ ID NO: 104618 - DNA, 437 bp, Glycine max
  unsure (1)..(437): unsure at all n locations
  Clone ID: PAT_MRT3847_65486C.1
agaatttcctttggcaatttgaatcttgagatcatttccttggcttttcgattcaaactcatgggagtctctttaataggaacatcatggatttgccaagcaatctactagccagggcatttactcagtcaaagagatactaaggcacctacctatacttccctttttaggcaggcatggttcagctagggtggtcagcatttggtaggcatacaagtcgaaaacaggtcttgcagctataggttcccattttggtttatgggtgaatttttcattccaatgcctttccatctggcatcccaacagctgccaatgtgaccctactgtgaccctttagacccattaatcacttccagttgattcttaacttagattcactttgtgaactttcaatccgcctatttttacccataattcattcaagcanatcatgaacc

SEQ ID NO: 104619 - DNA, 341 bp, Glycine max
  Clone ID: PAT_MRT3847_65487C.1
acggacgtaaatgtagaagaccagattcaatctacaaacggtgctgttacagtagcttttgtgaaggctggccataaagaagctatacagcaaagggacgacaaatttttaataattgctgctgcagaagcgtataacggggtagactgcgaagattgcggtcattttggtgctatgaaacattgtaatgatgaaattgacgctcgatgtcacaacatggttctgaggaacacagacattactgctcatgcagaactcactgtagtaagaaaggcttgtgcaaagctaaaccagatagaactttcggactgtgaaatatatcctgcatgtgaaccttgccc

SEQ ID NO: 104620 - DNA, 223 bp, Glycine max
  Clone ID: PAT_MRT3847_65488C.1
gactaaccggaggaagccgtcttggagggagagggagaacaaccggagggagagagaaagaagagagacccgttacggcgaagatatactccgatcttaagcgctaggggactacagtgtgcgccaacactgtgacaacaacgagatcttgaaggctctctgctctgaagctggttgggccgtcgaagaagacagcaccacctatggagagggatgcagggca

SEQ ID NO: 104621 - DNA, 485 bp, Glycine max
  unsure (1)..(485): unsure at all n locations
  Clone ID: PAT_MRT3847_65489C.1
aaaaaaaannaaaagggggggggtatntttanacagtacactgatatgattcactctaagcctcacacatccatccatccatccatcactaacacattcatatggccccaccaaattacagtcaaacactatactagcttggtaaatggtaaatagaacttttaaggtcaaaccaccatccgttttttgttttttttttaaaataaaataaaaaacttttggctctacaacctatcattacattattgaacaactgctgctagtattgacatcactgaacatgtgagctgcagagtgatgatcatcacctcctgctgcagggtaaccaggcaagccatacgaggagtaggagtaatgtgcagggctgtagctactactgtggttgtagtaatagccagtgttagggggaacaaaaggtgacctgtgatacatcatctggggttgctgctgcatcatggctngccttgcctgctgctgcatgttca

SEQ ID NO: 104622 - DNA, 414 bp, Glycine max
  Clone ID: PAT_MRT3847_6548C.1
ggggtgggggtaaaaaaaaaatgctcaaaactcaaaattttttttcataatttatgccggcaacaattttggttacatttttcggagggatttcttttttttctgaataaattccttcaattttgtctgatcacttggccttgaaggtgacataatttttttattccaaacaaaaccagtttcctttttggggttgggttttttttgaagtttgtaaatggaattattttttactttcaaactgctctaattttccaagcccttgttttttttacgatccacttttatattgtgatcaccactcttccaccctttaatcttttgtggtccaccaacattttttgcgcaataattcttgtcttttcaacaagtttgaattttttttgaatgctttaccaaatttttttttgaatt

SEQ ID NO: 104623 - DNA, 448 bp, Glycine max
  Clone ID: PAT_MRT3847_65490C.1
ggaagcatttgagactaactcttagagagaaaaaaaatggctgatacaggtggaggagatgcagtgagaccagtggtaatatgtgataacaagtgtggctgcacacttccatgcactggtggttccacttgcaggtctcttaagttcatgatttcaacaaagtgcacaagtgctggcactgccacaggagggggtgatcacgtgacatgctcgtgcggagagcactgtggttgcaatccatgctcatgtcccaagattgcggctgctggaagtggttgcagatgtggcacagattgtgcatgtgcctactgccgcacttagtatcacaccttaaggcttaaacttcacgttttattttatgtcttcaaatcttgaatacgttttctatatattagtcttgtttaaagttcaaagtgtggacgtggtttctacttagtactcaaacgta

SEQ ID NO: 104624 - DNA, 612 bp, Glycine max
  Clone ID: PAT_MRT3847_65491C.1
ccacgcgtccgatggagtagtgtagtggacagacctaggcagccagaagaaattggtaggggaggtcaatgctcaaatctgtgtgtttcagctctttcagagtcagaggaacttttgtgttgcagtgaggtgcatggaacctctggtggctcccacaagttgtggttttgtgtaagcatacaagcaactgagattgctaaagacatccattctgatgccattcaggattggtgtttggtggtcaaatcacctctaataataagcaattttcttccccttgctgctgaatattctgttcttgaaatgcaatcaagtggccattttcttgcatgctcaagaggagtatttttatctggaaaaactgtacatatatacagtgctgatattaggaatcctttgtttttatctttgcttccacaaaggggttggcttcccatacatgaagctgttcttatatctcatcctcatgagaatccatcaaaaacaattagtttgagaagttcaatatctggaagggtgatccaaataattcttgagcagaactataacaaagagcacaccttgctggctaaaacaattagagtctatgctccttattgggttgaagtagct

SEQ ID NO: 104625 - DNA, 253 bp, Glycine max
  unsure (1)..(253): unsure at all n locations
  Clone ID: PAT_MRT3847_65492C.1
cggcttctggttgacgctcaatgccccgggcgtgatcaagagcgtcctctcgggcggcggcttcaactgggtctcatcgacgcggaacacggccagatcactgactcggactactatgtggccaacaatctcatcgcgtccgnnngcgcctcgccatcatccgggtgcccgtcgaacnagaattggaatcagcgggcgccgangcggtgcgacggtgtcttacggccattngcatacccttnaaaagcgttcg

SEQ ID NO: 104626 - DNA, 603 bp, Glycine max
  Clone ID: PAT_MRT3847_65493C.1
cttattattttataaaaaataatattaaatgaaaaaagtcttaaaaaaaagaggagagtagaccaatgcagaatttctgagatgaaagttcctatagtcatgaatgttttaggacttatatatatcctgcataattgtggtaagtaccaaaacagacaaagggttagagaagactgagaagtgaaaattaatttattttgcaactcgcatgcaggtgcacaagtgctggcactgccacaggagggggtgatcacgtgacatgctcgtgcggagagcactgtggttgcaatccatgctcatgtcccaagattgcggctgctggaagtggttgcagatgtggcacagattgtgcatgtgcctcctgccgcacttagtatcacaccttaaggcttaaactttcacgttttattttatgtcttcaaatcttgaatacgttttctatatattagtcttgtttaaagttcaaagtgtggacgtggtttctacttagtactcaaacgtattagtaattggtatcaaaactgtccaacaacagtctattgagaatggtactttctcttcgatttttaccaataaaaaaaatcttcgtttaacatattgacc

SEQ ID NO: 104627 - DNA, 651 bp, Glycine max
  Clone ID: PAT_MRT3847_65494C.1
tcggcccgaggacaatttcagagaacactgttttgctctcttgcaactatcagctcttccacgtatttcgccttcagcaatagactacatgcaaagccaaagcacacttctggaagactttcttggacaatctttaatgctggaatatggaaatggatctgctgaaaattctgggattggggatgttagtagtcaggaggaactgaaattgtattatcaggctcaaaagcttataagtttatgcggttggaaactacgtcctctaccttatgtagttgattggaaggatatgtcagatcagtctcttaataatacaactaatctagttgtccattctgctggaaccaatgaacatttgaaaacagatgaaagttccaaggattctatcggggaacaaatggatcccaattctgcagtattagattgctccctatgtggagccactattggattgtgggcattctgtacagttccgcgacccgtggagtcaatcagattacgtgggatatgctgaagtgaaacgtgaaaatgctgatcttgaaattaggcagggtgtaaataataccatgcctgatgttgcaaatcattaaaggatacttcttcaggtttaatatgacaattgcagggggtcctacccccacaaagcaaaac

SEQ ID NO: 104628 - DNA, 581 bp, Glycine max
  Clone ID: PAT_MRT3847_65495C.1
tttttcttttttttttttttttttttttttttttttttttttttttttttttttttttttttttttttttttaaacaaccactaaaaaaaaagggaaacgggttgggagcgaaggcgggggacaattcatttaaattaaaaaaaggggggaaaaaaaaacaagccaacagagggaccttttcggaaaaaattaggggattaagcaaaactcaaatttacgggtaacccgttaaaaaaaacgggggaaacaaaaaattcaaatagggtccacagcaggggccccggaaagaggaggcccccatacaaaactaaaagggcccctcggccttaaggaaatggaaaaattaaaggggggccatctcccccccggggggaaaaaaaaacggacctcgaaagaagcggccccccaggccaaaaataacaacgggtttttttggggggccaaaggcaacaacaaatgggaaacctttttgcaagggaaattggcccacagaccactctgggctaaaatacttaggccgcccacctttaaaaaaggaaaaaaataaacccgcaggggggctaaaaggatttgcctaaaa

SEQ ID NO: 104629 - DNA, 298 bp, Glycine max
  Clone ID: PAT_MRT3847_65496C.1
tttcatttgttttttcggttctcacaacaagcatgtgtggttaacagaagccattcatagagagaactggttgctgatatcatttggaacccccatgggccgtacaacagtccttatgaagagaccaccacttaaaccggagaggagacacgaattcatttacaaccccatagtgactcaggacattctgaacaaactagaacgccccttccattttgccgttctaatgacaagcactgcccaggctcccctgtacattgcaccaatccagaaggatctgcctgctgtaacagcagag

SEQ ID NO: 104630 - DNA, 559 bp, Glycine max
  Clone ID: PAT_MRT3847_65497C.1
agcagccacgtggaagtgttttgtttgtttccttcggaagcggtgggacactctcgagtgcacagatcaacgagctggctctcgggttggaaaaaagtgagcaacggtttctgtgggtggtgaagagcccaaacgaagaaatagccaacgcgacgtacttcagcgccgagagccaagcggatccctttcatagcctggcctctgttcgcggagcagaggaccaacgcctttatgctcacgcatgacgtcaaggtggcgctgaggcccaacgttgcagagagtggcttggtggagagacaggagatagccagcctagtcaagtgcctcatggaaggtgaacaagggaagaagcttcgttaccgaatcaaggatatcaaggaggctgcggctaaggctctcgctcaacatggttcctccaccaccaacatctccaatttggctctcaagtggacccacaaattcaactagtagcttcttcctttcaattatctgcacttaacttatcaaatgtcacttggcatacatgacattaataaaataattgggtaagtgtacgtaa

SEQ ID NO: 104631 - DNA, 304 bp, Glycine max
  Clone ID: PAT_MRT3847_65498C.1
gaatcatgccactgtatgctatgtgacatatccacatgcgtattcaaaacgtggtcccctactcatccatatcttctgttcaaaactcctttcttttatctcaatttctctaaatgttcccacattatatctttttatatcagttgcattaaactgtgtttctacaactaatgaatttaaaaaacctcaatgttatcagcctgcaacttatactatccaagcgatcatacacttccatacgatcacttaactcttatatagggacacctaaattcaaatcactgtccgtcatattacaacctat

SEQ ID NO: 104632 - DNA, 2192 bp, Glycine max
  Clone ID: PAT_MRT3847_65499C.1
gctttaaactttataaacaatacaagcacaaaatagtatattgaataaataattattgttttattaaattataaagatactagtaccactctctatttgtataaatgttgaccgaaattgaagctcaagagcaattaatagagcctcctttgtgcgtgtgtgtatatatataagctctctcttgttccttcatcatcacaagaaacaacaagggatttccatggaagtctcaaaagaagaagctcgagtggcacccgcaccggccctagtggcgatgctgccatcccctggcatgggccacctaatcccaatgatcgagttcgcaaagcgagtggtgtgctaccataacctggcggtgagcttcgtgatccccactgacggcccaccttcaaaagcccaaaaggcagttctggaggcccttccggactcaatttcccacaccttcctccctccggtcaatctctccgacttcccgccggacaccaaaatcgaaaccctgatctcccacaccgtcctccgctcccttccttccctccgccaagcattccactccctctccgccacaaacaccctctccgccgtcgtcgtagacctcttctccaccgacgccttcgacgtcgccgccgaattcaatgcctccccctacgtcttctatccctccactgccaccgtcctctccttgttcttccacctccccaccctcgaccagcaggtccagtgcgagttccgagacctcccagaaccggtcagcatccccggttgcattcctcttcccggcaaggacctgttggacccggttcaggaccgcaaaaacgaggcctacaagtggatcctacaccactgcaagcgatacaaagaagccgaggggataatcgggaacagcttcgaggagctcgaaccgggagcctggaacgagctgcagaaggaagaacaagggaggcctccggtttacgcggtgggaccgcttgtaagaatggaagcaggtcaggccgactcggagtgcttgaggtggctggacgagcagccacgtggaagtgttttgtttgtttccttcggaagcggtgggacactctcgagtgcacagatcaacgagctggctctcgggttggaaaaaagtgagcaacggtttctgtgggtggtgaagagcccaaacgaagaaatagccaacgcgacgtacttcagcgccgagagccaagcggatcccttgcagttcttaccggaagggttcgtggagagaacaaaaggaagagggtttttggttcagtcttgggctccgcagcctcaggtattgggccatccatccacgggtgggttcttgacccactgcggctggaactctattctggagagcgtggtgaacggtgtgcctttcatagcctggcctctgttcgcggagcagaggaccaacgcctttatgctcacgcatgacgtcaaggtggcgctgaggcccaacgttgcagagagtggcttggtggagagacaggagatagccagcctagtcaagtgcctcatggaaggtgaacaagggaagaagcttcgttaccgaatcaaggatatcaaggaggctgcggctaaggctctcgctcaacatggttcctccaccaccaacatctccaatttggctctcaagtggacccacaaattcaactagtagcttcttcctttcaattatctgcacttaacttatcaaatgtcacttggcatacatgacattaataaaataattgggtaagtgtacgtaaatttcaaatccacatcccgaggataccgagtgcgagtgagtgaactgaatgttcaatggctagacctctaacttgtagtatatgtttcaaaatgcctttcaaccttaaattactaagttctatggctgcctggctaattaattaacgtcaatttcttcagtttggtaaatgccttcaaccagaaaaggagtacggtatatcctttgatcaatcatcaaggattaagcactagtttttagaatctgctttatatttttttttcgtggtctaaaatttatgacattcttgtagagctgctaaatatataatatgcttgctgtcagtactcatgttcttttgtctctggccccgtcccatgcggatggcattttgcttggtgagccaccccatatatggtgctctcaccatctttatctcatgtacctcatattccactattttttggattga

SEQ ID NO: 104633 - DNA, 436 bp, Glycine max
  Clone ID: PAT_MRT3847_6549C.1
atgagggcgcttcgccggcagcgattcgctttatttattagtggacttggttgtcgtagttgttggactgttagccggttttctggctatgctgctccttctttattgtgtgtcggaggtgggggggcggttaggacgcagtgtcttggaggattgggcggttcggggggtggggttaccgcctttatggttggtccatttgggagtcctagtcccagtctctttgtatttagttcttggtgcgggactgagaaatattctgatagggatagggcggtggtcggtattacagtttcaggatcgtgctctgcagttgcagtagctgataagggtctgtggtcgaagagtttcctcgagggttgttctcctctctgtttctcaagggggatgagtgtatccgatgaaatgcgtgcctgttggtttcgttctctgtcag

SEQ ID NO: 104634 - DNA, 249 bp, Glycine max
  Clone ID: PAT_MRT3847_654C.1
gggggaccggataaaacttgtctactataaaaaataatttccgtcctgggttaaaatttttttcccgccagataaattaaaaagtagagcctgggggttttaaagggggggccggtggaaattaattgggtttcttttacttgccatttcccagaaggaaaatttttgtttctaaaaggattaaggggggtgtcaaattttttaaaaaaaatgttttaccttttggggcgcagggtttttttttttttt

SEQ ID NO: 104635 - DNA, 594 bp, Glycine max
  Clone ID: PAT_MRT3847_65500C.1
cctcgagccgattcggctcgagtctctcctttcctctcagactcattggtagtacgaacaagaagtaaccatgtcccgtcatcgacgccaaccctcccaagcccttccgccggacctcttcgccgccgccgacctcactaagccctttgacttcacacaaatcatcaccgaagaaaccggaaccgccgctgccgcccaagcctcacgcattcagacccaccaagagatcaaagactctcctctcgccgccacttctccggcgaagaacaaggcgccgctggcaaccaaatcggcttgaactaccgtatgcatcatgagtctgctcctgcctcctgctgctgcattttatgtctgtcattttctgtttttcttttttcttttcttttcttctttctttttgtttgaaataaaaatgttaagatgacagcagagaaaagctcaaggcattgtaacatggttttcttcttcttcttcttctgtgtttgagaaacttcctttttgttagagcttggaatgtgaggttttgttgtgatttgctgaccctgcctgattctattggaagtttctatcaagaatatttttatttatttattt

SEQ ID NO: 104636 - DNA, 316 bp, Glycine max
  Clone ID: PAT_MRT3847_65501C.1
gaattaaagaaagagaaaggtattcagacaaagatttcgggttctgggggccaatatggcataagggtcacaacaatttcaggggaaaataaatgtgcatgcatgcaaataaccaaatcccacaataaaccctatcccaaaatgacatctctgtatgctaacaacaatgtgcagtgcctgaacaactcaatggtgttgcacagtaatttaacacaccatgatccacgagtgtaccttgttatcccaaaaaagccattatgccaaggattccacctcaaggaacctgatggtactgctcaacgcaattgatttcatt

SEQ ID NO: 104637 - DNA, 420 bp, Glycine max
  Clone ID: PAT_MRT3847_65502C.1
ggcccttcagggtcctgttccttcgtttgagaaaggtgtgaagttcactctcgatgggatcaatagtttttgtctgaaagatgttggaccctgcgattctcgtatctccactttgcttgatattgctgcgggtttcgggtatccccttcagttggcgcgttcctggactgggaacgatccttgtgatgattggagttttgttgtgtgtgcaggggggaagattattacggtgaatttggcaaagcagaatttgacgggaaccatttcacctgcgtttgctaatttaactgatttgaggaacttgtttctcaatgataacaatttgggtggttcaataccagggagcttgactaatctggctcagcttgaggttcttaatgtgtctaataacaacttatctggtgatgttcccaagttccc

SEQ ID NO: 104638 - DNA, 577 bp, Glycine max
  Clone ID: PAT_MRT3847_65503C.1
tgagaagaaatggcaatttcctctcattatgatctcaattgtgttcttattctttcttgccacatgcttcaacatggggcttgtctctacaattcacagcttcaattcaatactattctttctcccatcacgcctagccgaaaaccaatctgctccagtttttgtggagacaaagatttctgctactgctccagctcctgctgctcctgcaattcctcgatttgcttatttgatttccggctcaaaaaacgatttggagaagctttggaggactcttcttgccctttaccatccactgaaccattatattgttcatttggaccttgagtcaccactagagatgaggttggagctagcttctagaattgagaaacagcctgtcttctctgaggtcggaaatgttttcatgattccgaaagctaacatggtcacttacagaggaccaaccatgattgctcacactcttcatgcttgtgccattctgctcaaaagaactaaagactgggattggtttattaaccttattgcttcaaattatccccttgtgactcacgatggttagtttcttatctatatg

SEQ ID NO: 104639 - DNA, 272 bp, Glycine max
  Clone ID: PAT_MRT3847_65504C.1
gaaaacgcaggtccatacttgataacaagttgcacccaatggctaccaactttattgatatgatgagaatgagcataccccaacatcattcgcgaaataaccaaaccatatgcgcacgctctggttgccattcaaaggaacatcaaacagaggtggcccagagagaccctacccctaaggctatttgcacattctcaagagatctattggaatattaaagattgagtgaccaaaggggctttacgagcttactccccatgctagctggcggt

SEQ ID NO: 104640 - DNA, 330 bp, Glycine max
  unsure (1)..(330): unsure at all n locations
  Clone ID: PAT_MRT3847_65505C.1
caaaccaaccacttttaattggccaaaccaaacctaattattggtttttcaatggaaaaggcttaaccaattcttttattttcaaccacccattttaattacttaacccccccccccccccgggngnnnntttttnnttgnaaattccaatttggtttattggccccccttttaccatggttcaaggaaacccgtttttggaaaaacaagattccttaatttgcctaaaaccctacccttggggggccttccaacacccttcaaaaccgaaaatgggggtttttgacttcttggaaggcttgttgccataaacctaatgggggggaggct

SEQ ID NO: 104641 - DNA, 369 bp, Glycine max
  Clone ID: PAT_MRT3847_65506C.1
aaaaaaaaaaaaaaaaaaaaaaaaaaaaaaaaaaaaaaaaaaaaaaaaaaaaaaaaaaaaaaaaaaaaaaaaaaaaaaaaaaaaaaaaaaaaaaaaaaaaaaaaaaaaaaaaaaaaaaggggggggccgttttaaagaatcaaattttacttacccgtgcttgcaaagaaaaattttttttatagggccaccaaaattaaattcacgggccggggtttaaaaacgtcggaattggaaaaaccctggggttaccaaattaaatcgctttgaaaaaaatccccttttcgccagttgggttaaaaaaaaaaaggcccgaaccaatggcctttccaaaaaattgccacacctaaatggaaaatggaacccccc

SEQ ID NO: 104642 - DNA, 423 bp, Glycine max
  Clone ID: PAT_MRT3847_65507C.1
ttttttttttttttttttttttttttttttttttttttaaatttaattggtttaggaaataattaatttttaatatttaaatttaaatccaaaaaaaaaagaagggaaataaaaaaaaaaaatgaagattatgaaacaaaataaaaaaaagggaaatgctaaaacgaacgcgtgaatccaaacccgaattcgggaccggaaccagaaaacctaccacctttccctaaaaagattccaattaaaccaaggcgaaaacaacgtcatatctgcttcactcagggaaattgctttccgatcacaataacacacagaacaccacccggaaaaataaaatcaaaagcctgaggagcaaaaagagagggcgcactaaaaaaaaatgcgttaaaaaaaaattcaagttgtcaaacccaaaatcttttttgc

SEQ ID NO: 104643 - DNA, 370 bp, Glycine max
  Clone ID: PAT_MRT3847_65508C.1
attaacgagcagtttttgaaagtcacggctgttattggggagggtaaaccacgacattggtcaggctaatggaacttatcaaccactgagctgtggccctactctgcacactagccaacagtgtaattataccaccacaaagttttgtgaggccaaagtattaccaatctataaactgacaataaaaaaccctatagtattgtccacaatcaagtcatgtttagcattaatactcacatgcctataaagttctaagatcatcagctacccgttcttctcatgccctgataactagcgtatttgcgaagaaactcatcatattgaaatattctaaacatttgaggtcattataactacaccaggattatgt

SEQ ID NO: 104644 - DNA, 310 bp, Glycine max
  Clone ID: PAT_MRT3847_65509C.1
agcagactatgttcttcctgaaattactggggcactgggtactgatgagccaatgttcaacatgcactcaggacggctacaagcatcactagatagagttgaggccatcttaacccacactgatgctccttgatttgggtaaagaagataatgttcatgaggtgtgaccccattcccttttgaaagaagttccaagtagtggttgcggacagtaacatcagcaaacagaatactggaataaatggagtaagtcaaattttgaagtatgtcctacctgcctgaaatgcattgcctcagaagtggagtcaag

SEQ ID NO: 104645 - DNA, 260 bp, Glycine max
  Clone ID: PAT_MRT3847_6550C.1
aaatgaagtgctaagctaaggctatgctattgctaaccgttccccagcactgcaatatgtcctccactaataagagaagagccttcctctccacgctactatgctctcacttctctttttgactccattcactttcctcccatcccctccaatgccaacaaatcctcatcacaaaaaacccaatgaaattctctttctttctcacaatatataaccccccaccttcattcttctcacaccccttctccccaaaccaacaa

SEQ ID NO: 104646 - DNA, 277 bp, Glycine max
  Clone ID: PAT_MRT3847_65510C.1
aaattaccgggccaggcttggggctccagtattgttttaccattcctccaaaaatttggttccttggggggggaatggcgaggatacctaattaggggtccatgattatgccaggcctaccttaaggggttttaaatggaaaggctttcaacctggtcatattatcaccatacctggtgggattggccaaacctggtgcaccttgccatttaaaaaggtaggagaatggggatttcttaagaggaaccttaagccgatggctaatggtttggggggg

SEQ ID NO: 104647 - DNA, 235 bp, Glycine max
  Clone ID: PAT_MRT3847_65511C.1
caattttacaataaggtctgttgttaatgttgatataattttctgaagctgtctagcacttcggaggaagtatttatatattgaactatattatgtctgccagttttggtggtgtaacacttgtcttaggaatgacctgtaagattgcagttgcaaactgggtgctagtgctactccttttgtgcatctcaaatctcataccttctattttatgagaagaattaatatggctgtc

SEQ ID NO: 104648 - DNA, 468 bp, Glycine max
  Clone ID: PAT_MRT3847_65512C.1
gtgttgagtaacgcggatgaaatacgccgaaaataccaaggggaaacattgactggcagtgctggggaatggaatcacaacctagaagtactttaacatagacacataatattttcgccaacaaacaattctaaaataagctgctgaattgccatgttgaattgggagtcactgtcatcaccaagccaactgtttgctgattatcaactttcatactttgttattaggcccgaaaccgaaacatatgtaatctccaacactaaaggcattgcctctcaaatattggaaccaaggatcaacaccacattggaggcctttacgagcatcgagcatgaggctactacttgcaagcccaagtctttcgccataaattcatcaaaatagggagggaaaacctggatactatgggcacttgcaatcaactattggcatcattgatcgggcgctttggtaagatttggatacatg

SEQ ID NO: 104649 - DNA, 364 bp, Glycine max
  unsure (1)..(364): unsure at all n locations
  Clone ID: PAT_MRT3847_65513C.1
ggctcgagcttctcctttactagttgacaacgcccataagtttttcgaagcttccaaaaaggggaactaattctttttttcggtggataattttcgaaaacctaattccggggctggcgaccgggtgcctgtttaaggaggacgagagagatgctccgagttttctctttgaatcggtcgacccaggccaaatttatagcatcgacacgggcaacagtggggtagggacacacaccctgtattgtgaaaagttgtggaaaggagaacacggtggantaataattgggaccacgtgaaagggcgcaagagtgaggaaattgaagaggatcctgtggtgattcctcgtatgatcatggaaaagtgg

SEQ ID NO: 104650 - DNA, 930 bp, Glycine max
  Clone ID: PAT_MRT3847_65514C.1
aggaacagaatataacgttggatcctagtgatgaaagaattacaaagtaaaaaattgtttacgaacaattcgaaaaacagagaactggaaaacagagaggctgattaagaagtcaaagtcaaaagctgttttaggtactcagcacccaaattcttgaacacaagcacattttgcgaagttctgctgaagtctaattgttccctctgatcaaccttggtcttcttcttagaattggactttgttctcatagtgtgttttctcttaagagccaaaacaggggaggaaccttcttcccatggcttacttggcatgtctttaagggactccctcaccacttcctctgggaaattcagcaccgcaagagaccctcttgtagaaaacgcggcttgatcataagccaaagccgcggcttcggccgtgtcaaaggttccgatccacactcgaacgccgtttcgagtggaatctcttatctcggccgcgaatttcccccacggcctcttcctcactcctctgtacatcctgggctccttggcaacttgttgtgaaggtagtggtggtgatggtggtggtggtcgtacttttttcacttccttgtaagtggtgttagatgagacttcttgtaactcaacgctaccaatacaactggaaacattggacgctgaggatgtttccttggtttgtgattgtgacgaattgtcgctcaagttgttgaagatatcatccaaaacaaagttgtagtcccaagaaaaagtgtctccaaaaatagaggagttttctgggaagaaactaaggttttggtttaggaaaaaagtggaatcaaaatctaaatccatctcaaggaatgccagtgcacacaacaattttgatgtttgaagaaatgtaaaggtagctagttaagtgtcactaaattctcgagccgaattccgggct

SEQ ID NO: 104651 - DNA, 324 bp, Glycine max
  Clone ID: PAT_MRT3847_65515C.1
gaagcagatgatgagaatatacccgccagtccagtaagcgactggaaaaatagggcccctaaaaaaaaggggaccacaccttttctttttgggacacaaaagaagaagaaaccggacacatttggtgtgaaaattataagatacattattcagggagggcgctagtataagtggcgctgcgaaacgcgctctccccttatataaaaaagaggggtgtgtgccccatcccccgcgcacaacaatattgttgaccaatatatcttccacaataaaacaccacgataatagatgataagagggggaaaatgatgctgcgggagaaaa

SEQ ID NO: 104652 - DNA, 306 bp, Glycine max
  Clone ID: PAT_MRT3847_65516C.1
ggtgtagggtgggagtggtaactggtgcagctcgttttgctgctttgggtgtgcggtggttgtgtctgtcacctgaataacctgaaaatgtgtggctactgtggttactgaagctgctgaaactgctgcaactgctgcaacggctgcagaagctacccaaacttcacctactctgactacactgagtccaccaccttcgacaccttagtgataccagtgaaacctgattatgctgaagctgaagtggctgaaccggctgagaacgatgacaacaattgttgaccatgctgaccatgctgcccctgc

SEQ ID NO: 104653 - DNA, 2443 bp, Glycine max
  Clone ID: PAT_MRT3847_65517C.1
ggtcaatatgaggtgcaattgataagcaataagcaacaaccactctctcgtatctcaccttcttcttcttcttcaaaaccaagttacatattatagaatccttaattttcctaaagttagaattcaatcaatcaggtggagatggtttgggtgaatgagaaactgaaggggttcgtggggcacagatgggtggtgtttgtgtgcgcgatgtgggacatgtcgtttgcggggacatcttacatgttcgggagcatatcgccggtgataaagagcagcatgggtttcaaccagaagcaggtggcgttcttgagcgtggctaaggatctgggtgacaacgttggtcttcttgcaggcaaaatctgccagtcttcccctatttgggctcttatacttgtcggagttgtccagaatgttgtcggctatggccttgtttggctcatcgtcactcaccagttccccgctttgcctttgtggctgctatgcattctaatctttgtgggacaaaacggttcaacatattacaacacagcagcactagtttcttgcgtgcaaagtttccccgagagcagaggccccgtggtggggatattgaagggcttcgttggcctaagtggcgcaatttggacgcaactaatagccatggcccaactccctgaccaggcctctctcattttcatcatagcagttggacctgcaatggtttcattagccttcatgttcatcataagaccggtcgagagttatcgacaatctagagcctccgatgggactggtttcacatttatctacagcatttgccttctcttggctgcttacttgatgggagttttgttgctagaaaacatgtttgatttggaccaaagcaccatcacattgtttgcagttattttgatcattctcatattgcttcctatcatagttcccattctcttggttttcttctctggaccccaaaaaagtgctgaccaagaagccctcttggagccaccaatgcttgaagcaactaagcctaataagcactttgttggggagagtagttctagcactaccaaagtaatcaaacacgtcgaaaacgagaagagtccttcgaagctagaggtgcttcctctgtcgtcagaagggccaagggatgtttttcagtgtcaagctagactgtggcaagctgttaccaaagctgtgaagaaaatcaagcgaagaaatgggccacatagaggagaggatttcaccttgtcacaagcaatggccaaggccgatttttgggtcatgttcttctctcttgtcatgggctgtggatcgggcttgacaatcataaataacatgggtcagatttgtcaatcattgggagacaacaatgtcaatgtttatgtgtcggttatcagcatatccaacttccttggtcgtgttggtggcggctacttctcagaggttatagtaaggagttttgggtacccaagacttgctgcattggcagtgattcaagcagggatgtctttgggactttgctactatgtatttggtttggctggtcaagtttatgcggtggccatatccaatggttttgggtatggtgcccactggtcaattgctttagcagcagcttcagagctatttggcctaaaaaactttggaactctctacaattttctcaccatggctagcccagcaggctctctctttctatctggatttgtagcaagcacaatatacgactattacgcggagcagcaagtgaaacaccgaatgctcactggaaataacaatgacttgcttctttgtgagggaaacatttgcttctccatcacatttggaattttagctgtagtttgcttatgtgcagcatctttgagcttgatcgttgctcacagaacaaggaaattctatgcacagctttatgaagagtctcaaacttaaaaagtgggagcaagcataggaaaacttatatcagttacatcttccagttatcaagggaatcaatggagactggagagtatcactacggtttgaatattgtgttgaattgttgtgtgcatatactctgcctctcttatctctcttttgggctcttaagtttaatatttgttagagaaatgctagtagtacaattttttattactttttttgttaggttaaattcatgtgtatcctattagatatatgagtttcatttttatttgataggtcctatttataaatgagtaagaatcacatgaattttaacggataaaagagggcatgagaaagacagtgctagaaaatttgttactagcacttctctgtttgtaatcttttttcatactccgctcccttgttgattttatacatgcttgggaaggaagacttgttatgaaatatgttatgtgtgttcccgtgtatgtaagggcatttgtttattggatcagctagatattcagctgcagataagtaagcatcatcatattagtgt

SEQ ID NO: 104654 - DNA, 337 bp, Glycine max
  Clone ID: PAT_MRT3847_65518C.1
aaactgatgtcatagaacaaaagaaggatacggatgtgacaggacaacagaaggatactgatgtgacaaaacagaagaaggatactgaatgtcataagacagactaaaggatatcggattcaagaagacaaccaaaggatacggctgaacgaagaagactaacgggtcctgattcaataagaagactaaaggatgcgaattcacgaaggcgacgaaaggagttgaactgacgaaagataagaaggtttcgacagtcacaatatattatggcactgaagatgtagtctcatttcactgacaatgcactcaaagtctcttctacctgcagacgctcatt

SEQ ID NO: 104655 - DNA, 217 bp, Glycine max
  Clone ID: PAT_MRT3847_65519C.1
tggagggtgtaaagtctttgaatttggaccaagttaaggacagtgattgtgaaggaaaaatgtgtggtgatgacaatagcaaggaaagttgttaagaagaaaattattgtaaaggttatgttaaaacaccattcctctggcattgcaaaccgttaagacaattgaagaccttggggggaatcctaaagaccaaggggaacttgcccttcaaggggtt

SEQ ID NO: 104656 - DNA, 743 bp, Glycine max
  Clone ID: PAT_MRT3847_6551C.1
ggagtactttgccagcaaatgtgaggatgttaataattcttatctccatgtttggtggaatcaaaatacaaaggccaggtgcagctgatgcttaagtatattgagaatggagatcttcgccgatggagcttgcctggcattagggtctttaatattggactgagtgaatggcggtcaagttgctggaattaagtgctgaaggtttgattgctaaaggaaattcatgtgtttcagctcgccagaatgctgcaaacaaattgctggaaaaggttttcagggttcgacctgggagttcgggcagatgggaactccaacttaagtgatgaaatcggcaagcttcttagtgtaaaaagtgctgctactggtcttagtgacaggcccataggggctgtgatattcatgcaacggaataatctcataatgtgcttgcgtagcactgatagttccactgatacctctgaagttgcaaaggcttatggaggaggtggttccccaagttcaagctccttcataataaggttggatgaatataaccaatggatttcaggaagagacagatgaggtgatgacacttgcatttcccaaatgatatccaaggtgatggcagtgttatcataacagatccatagactgtgctgatgttgatgcagctcatgatgagactaggaaaaataaggtgaagcctgagcaacatggaagcattgatcttgggagtaaacacgccactgttggagttgacttta

SEQ ID NO: 104657 - DNA, 405 bp, Glycine max
  Clone ID: PAT_MRT3847_65520C.1
ctcgagccgatacaaatttccaaaaaattgaccattttcaggaatcggattccattcttcctgctgatcaaaatcaccatattccaacaacttccaatcggtgcgctgaggaaattggtgaagaaataactaaagttcgggacttattgtccgagtatgactgtaaaattggtaagcttacactagcaagacttttgagtgctcttgattcgttatcatttcaatatgatggaagaaaatctaacactgaagaagttcttcaactttacactgatctgatgaagttggatccaacacattatctatactacaaagatgagcatagtctaatatcactaaagcggataacttcaactagggattctttactaccatactgccactactataaagatgcaacagaaa

SEQ ID NO: 104658 - DNA, 416 bp, Glycine max
  Clone ID: PAT_MRT3847_65521C.1
gtccatatgttaatttttttaattggctaaagaccccccccattgaaagaaaaaggcacccatggttgcaaaaacattgggaaaaaaaaccaaaccaaaaccaagggggtaaaaattgcccccctaactaaaaacggttaccaaagcaaaaacaggaaccacgcggatacggcttataccccaaaccatcgggcaaaagctaaacccaaaagaaggggtccttgcaataagacatgaccgaaacacgtggatgtggcggggggaaacacaaccaaatgaggagaaattaagcctgggaaaaacttggattcacatccataaaaaaaagggcttgccaaaagggacccaaaactttgatgggaaaacccgctaaaaataattgacgggaaaatgcggcccccgggggtcacaaaaag

SEQ ID NO: 104659 - DNA, 815 bp, Glycine max
  Clone ID: PAT_MRT3847_65522C.1
ggctcgaggtctcttatctcattcatccagggcacaaattggcattgcttcctccttctccaaagaaatggtggtgtattttattagttttgttggtatcaagtgagaccaactgtttctcaagaatattaacaccgaagtaaactatagcaaattcatggacctatcaagcatgtactctgtattggtttattaagataccattgagtaaagatggtttcttgttgatctttcttgggtgcttgtaatggttcatttttcatattgaaaaaatgtttatcttgtgccatattcaggtgtttgatctgttcgaaatgttaaagaaagaggagatgcttgctgctgtaaaggatagacaatcctaggtaataaaatgcttcgtgtgtagaatacttcatgaagcaattttgtacctagtcagctgtgggtttattgctactattttacattgatattattatcctggaaatcttattacctcattacattggtgtggtcatagacacagtaactctggtagattgtctaattattggatgttgcttagaaatagaccctcattcagccaaatgtaatgcagggcacatgcctattcacacatgacaggtttatgtacagaaaatgcatcacaacaccactagtatcgttgaaggatgaggtattctatatttcagatcctgtatcaccaaaagatctagatcacccggaaatgtctgatttttgttgttagataaaggggtctatgcctatatatatatatttcctcctctctagaaaaacacacacaagtatagaaacaatttgatttctttctc

SEQ ID NO: 104660 - DNA, 497 bp, Glycine max
  Clone ID: PAT_MRT3847_65523C.1
cctatctctcttttttaatatatcaatcggccttccacgctcacccgtttacaaaaaacgcacgaggctcaacgatggcctctcaggctctcattatacatggtactgatatgcgcttgcattactaccaacggacttgaaactgttatggggagactcggtcaccgcccctctgtagaacaagggccggatctgacaaacgaggttgctgctgatggcaacagaaccatcgatttcccaaagctcctaaacctgatgcttcgctaagagaaccacatccccctcagatgaggagctcacggaggctatacatgtgttatacaaagatcagaggcctgcacctctgcagttgatctgcgccaagaatgacgaatttgggggagaggctctcggtcgaccatgtggactataacatcctcgaggccgatgatgtgggcgatggccagatcaactgtcaggaggttgatataatccagatggtcaagcgaggaccattc

SEQ ID NO: 104661 - DNA, 248 bp, Glycine max
  Clone ID: PAT_MRT3847_65524C.1
taaaaacatggcgatggattagttcaactgtgaatcaaaatctcaaaggggcaccaacaaccagaggtaggctcctcactcaactaatctcaaacgcaagaatttgcgttaatactccggcttgggcacagacaccaaaagcaatactgttgagctcaatttaacgggcccgggtggatcttcctaggggaagatagaatattcatctgtctggaagaaagttgttaggttacccaagctccccagtt

SEQ ID NO: 104662 - DNA, 503 bp, Glycine max
  Clone ID: PAT_MRT3847_65525C.1
ctcgagccgtctattgattaattaattaattaattaatatatttattttcttcttataacccttcattgtatcatcaaatctctattgtttctctttctctggcttggtgcagctacaaccgtgtctacctctgctctatctcagttctcaagagttcagactgtggttacactcaggaaaatgattcaaaattttcagtatacttctgaagttcctacctttggtacacatgtatgtacatattcttcagctgtgattggaaggtcatatacacaaaaaggggatgctgagagatgtgctgtgtctctgaaatccataaggttatgtccttgctatcactgccctgcttaatacttggtaatagtggagcaaaaatctctagctcattctttcactattccttgatgcacaacacaagtttttttgttgtgcctgttgtgttagtacattacctgcgtgaagacggctgaatagcttatttgctatcatatagaaattttaa

SEQ ID NO: 104663 - DNA, 1751 bp, Glycine max
  Clone ID: PAT_MRT3847_65526C.1
ctctccgccacttcctgcacaaaccctcccttctccatgggacagtcaccgtccacctccgccgcgcctccgtcggacctcaaccgcctccaaattgctcagttacacccaaacaccgattctgattccaccgattacaccctgcgtctctccgacgattgcttggccgcaatctttcatttcctgaacaccgccgatcggaaacggtgctctctggtatgcctccggtggcgccttgtcgacggccagaggcggcaccggctctccctgaacgcacagccggaattactagacttcgtcccttccctatttaaccgcttcgactcggtcacgaaactcgctctacgatgcgaccgaaagtgcgcgagcataaacgacgaggctttggttctgatctcgctgcggtgcaggaacctcacgcgcctgaagctgcgcgggtgccgtgacataacggaactcggaatggccggcgtaggcgacaactgcaaggcgctgaagaagctatcatgcgcgtcgtgcatgttcggcgcgaagggaatcgcggcggtgctcgatcgatgctttactttggaagatctaacgctaaagcggctacgtggggtccaccacatcggcgacatggcggttggtgccgcggcttcgttgaaatctatatgcctgaaggagctcgttaacgggcaaagctttgcgccgcttttgattggctcgaagaagcttcaaacgttgaaggttattgggtgcacgggggattgggatgagactctggttagggttggatgttccaacaatgggttggttgaggttcacttggagaagcttcaggttaccgatgtagggcttgttgccgtgtctaaatgtttagggttggacactttgcacgttgtgaagaccgctgagtgctccgacgtggggctttgtgcggttgctgagaggtgtaagttattgaggaaggttcacattgatgggtggaggactaataggattggtgatgatgggttggttgcgattgccaaacactgtcttaacttgcaggagcttgtgttgatcggtgtttatcccactttttcgagcttggcggcgattgcgtctaattgcgggaatctggagaggttgaccctttgtgggattggaaccgttggtgatgcggagattgagtgcattgctgataagtgtgttgcactcaggaagctttgcattaaagggtgccctgtgtctaatgctgggattggggctctagcttcggggtgtcccaatttggttaagcttaaggtgaagaagtgcaaaaggattactggtaaaggggtagagtgggtgagagaacagagggtttctttggcgtttaattatgatgatagtgaatttgaagctttggatgggggtgcaagtgatggggttgggggagctcagcataatacggtagagtttctaccaaacatcatcaaccaaactaccgtggccgaggctgaggcttcttcaagtaataataacaaccgaatgacaatgttaagatcaaggtttgggttttcggctggtagaaatttagtaccgggtgccttcagaaggtggtctaacagtgataatgtctccagtagcagttttggatgatggttgctatgtgactttttgtttttgcctgagtagctgatagcagcagcatttcttttgttgactagatttgtcagtcaccctcattgatttgtcagcatttctggttatatcaccttagtaaaaagtctgttttatttcctatt

SEQ ID NO: 104664 - DNA, 393 bp, Glycine max
  Clone ID: PAT_MRT3847_65527C.1
gagggacctttctttggggtggttcaaatcctttgattccttcccataatttaataccgtgttaagcaaattaaatgttgctattcccacggaatccataaaaattgtgtttttcttttgggaataccccactcgagattacttattttcccgggaattacccggttccggggattcaaccatctaccctggtaacctcacccaggaattctttattttggggatttccaatacgaactcctatttgcacatttttatttaggttccatgaattttgaggcgaaaaattttcaaccatttatttttgttggcctataagtaacaccaaacgcttgtttttggggggaaaattggctgagccaatttttttaatccttttcaaaaaaggggccg

SEQ ID NO: 104665 - DNA, 104 bp, Glycine max
  Clone ID: PAT_MRT3847_65528C.1
agtctacatttatggggagtgagtactgacaatggactttgaagggttaccaaaaggttgcattcctaaaatactctctcgcactacgccacagacctttgtaa

SEQ ID NO: 104666 - DNA, 314 bp, Glycine max
  Clone ID: PAT_MRT3847_65529C.1
gaagaaatgagtctgaaagacacaagcctgcaggctttaaatcagcaggcagaaattaggttcttcagagaaaaactgaagaagctgcaatggccaccaagaagttaaaggagttgttagaagcacgtaaaacttccacccaataaaacttaagttcactgaatggaaggggaacaaatgggccgagcaatgataaatcttttcaacgggggcttggtcatgaactagaagtcacgggtaaaaaacatgaaattggttttgaggatgataaacaaagcccagtgccagctgcccttgctgaagaattggccctg

SEQ ID NO: 104667 - DNA, 804 bp, Glycine max
  unsure (1)..(804): unsure at all n locations
  Clone ID: PAT_MRT3847_6552C.1
ccacgcgtccggaacttctgcagatgcattttggtggatgagaatgaccgtgtggttggtcatgattcaaaatacaattgtaagtggacttctgcattttgaaatttttagtttgcaattgcaaggactcacattgtttcgtgttaaaataattgtttcaaatttttgttaattctataacttgtgaattgtgttttttttctttataatgtatgcttttctgatttaggtgtttgtaaaagttgatgttacaatatatctgggatgtactatcattaaaatttctgatttgagaaaaaaaatatactaacattgttgttcatcatgcaatcttgtaatgtccatgtttggaaacgtcttcctgtgattaaaaggagtaaaatctaaaccttatatttatactatatagattggtttgtaatgattatgccttactaaatatgggtttggattgaattactggctatgcagtattttttttccagttccctgccatgcgcacacatatggaagcatatcaagttaaagcatgctgtagttagagagactaatcttgaccacatagttatagagacatggttaagactagctcctctcatgcttttgtttgatatgctccctactgacataatgaatggtcattaatgagaaacataataaaattagtaatttatagtgtactagaggattaggctgttattttaatgcanacaaactactaaataccaatgatgcaagcctaaaagagcagcatattaaaaattttgtatgtaccatagattaatagtagaattttggctttct

SEQ ID NO: 104668 - DNA, 1954 bp, Glycine max
  Clone ID: PAT_MRT3847_65530C.1
ctctccgccacttcctgcacaaaccctcccccttctccatgggacagtcaccgtccaccaccgccgcgcctccgccagacctcaaccgccaccaaattcctcagatacatccaaacaccgattccgatttcaccgattacaccctccgtctctccgacgattgcctggccgcaatctttcatttcctgagcaccgccgatcggaaacgttgctctctggtctgccgccggtggctccgcgtcgacggccagaggcggcaccgtctctccctcaacgcacagccggaattactagacttcgtcccttccctattcaaccgcttcgactcggtgacgaaactcgctctacgatgcgaccgaaagtgcgcgagcataaacgacgacgctttggttctgatctctctgcggtgcaggaatctcacgcgcctgaagctgcgcggctgccgcgacataactgaactcggaatggccggcgtaggcgaaaactgcaaggccttgaagaagctatcgtgcgcgtcgtgcatgttcggagcgaagggaatcgcggcggtgctcgatcgatgcgttactttggaggatctcacgctgaagcggctccgtggggtccaccacatcaccgacgtggaggttggtgccgcggcttcgttgaaatctatatgccttaaggaactcgtcaacggtcaaagcttcgcgccgcttgtgattgattcgaagaagcttcgaacgttgaagattattgggtgcacgggggattgggatgagactctggttagggttgggtgtttcaacaatgggttggttgaggttcacttggagaagcttcaggttaccgatgtgggacttgttgccgtgtctaaatgttttggtttggacactttgcacgttgtgaaaaccgctgagtgctccgatgtggggctttgtgcggttgctgataggtgtaggttgttgaggaaggttcacattgatgggtggaggactaataggattggtgatgatgggttgcatgcgattgccaaacactgtcttaatttgcaggagctcgtgttgattggtgtttatcccactttttcgagcctagcggcgattgcgtccaattgcaggaatttggagaggttggctctttgtgggattggaaccgttggggatgcggagattgagtgcattgctgataagtgtgttgcactcaggaagctttgcattaaagggtgccctgtgtctaatgctgggattggagctctggcttctgggtgtcccaatttggttaaggttaaggtgaagaagtgcaaaaggattactggtaaaggggtggagtgggtgcgagaacagagggtttctttggcgtttaattatgatgatagtgaagttgaagctttggatgggagtgcaagtgatgggattggcggagctcgggataatactgtagagtttctaccaaccattaaccaaacaaccgtggctgtggctgaggctgatgctgaagcttcttcaagtaataataacaaccgattgacaatgttaagatcaaggtttgggtttttggctggtagaaatttagtaccgggtgccttcagaagatggtctaacggtgataatgtctccagtagcagcagttttggatgatgttagtaaaaaagcagcaagccagcaaccacattcttgccaagtttgcattcctccatatctataatagtagttctcatgtcgattgcctgttctttgcagtgttgctatgtgattttttgtttttcatgttagttgctgatagcagcagcatttcttttgttgactagatttgtcagttaccctcattgattgtccctttcctatttgttctggttatacacctttgtaaaaggtctgttttatttcctatcagtgcagttttttttttttgataaaaactgcagagttgacaaaaaagaagataaaaactgcagaaaatctcgttccctctt

SEQ ID NO: 104669 - DNA, 399 bp, Glycine max
  Clone ID: PAT_MRT3847_65531C.1
tttaccttgtaggaaatccatatttcaagttgggaaagaccatgaatcaccctcattcgtacctatgtcatggtggacgtatgcagtggcagcattagtatgaggactaggaagctcgtggcatcgtactcaatggcctcacacattcatttcttggcaaactccgtcttgagtacggaggtgatatctgtcaaacatcagtctctaaacaactagaggaaacatatcctgatagtagtatgacgtctcacagtttccagcgccatgtggtagaattaacatcattatcatcattatgaagaggaggtaatcatcggatcaacggattcgatcacatcctcttcgccgtccaggccatcctcagcattttgaggaccaagacgatgactaagatgaaga

SEQ ID NO: 104670 - DNA, 301 bp, Glycine max
  unsure (1)..(301): unsure at all n locations
  Clone ID: PAT_MRT3847_65532C.1
gtctcacgcacgcgtacgtnagctcggaattcggctcgagngannnctaangnangaaagantgaaggancagtaagcgtgaaacatgcngtngnngacgctntcacggtcaccaangctcnacncgnctattgacatnggcaatccatnnctcantctcacngttnatggtttccttaagatcgaagtgtcgcagccacgcgatcanctgctgaanatacttancatattatccgaaacgngaatatctcangtcatgntttcgaganaacgttgannaagatgtgtaaagnngtgtata

SEQ ID NO: 104671 - DNA, 337 bp, Glycine max
  Clone ID: PAT_MRT3847_65533C.1
gaagaagacgtacggacccacaaacattttcattgtttcataactaatgttctaagctatgaagcacacggatatcggatgcgaatatctggatacgaatatgtggacatctgtcaaatacatcaaactcaattcggacacgaacgtcgatatcatgatattgtgtcggataccggatagagattggggtgtccgtgctttataggtctaagttaagtaaatcctactactttgctacaaagatcagggtgcacaaggtgagtttcaattttttttctttctctttcccactttacccctgcacactcgtctctctcaccagtcaccactgtgaaca

SEQ ID NO: 104672 - DNA, 249 bp, Glycine max
  unsure (1)..(249): unsure at all n locations
  Clone ID: PAT_MRT3847_65534C.1
ttnnnnttngggagcaacatggaacttacaaagtggaatgcaaatgatgaaaacaaacatctgaattcacacaggcctgtacatgtcttcttagttttgaaccaaaaatcaagtgggcagaacatgggaacaagaagtaggggtggaggataaaagcagggccacaaaaataaatgatgctgacacaaatttactacagcctatggtacttaacactggtattcagaataactcttgttcctccagaaa

SEQ ID NO: 104673 - DNA, 871 bp, Glycine max
  Clone ID: PAT_MRT3847_65535C.1
ctcgagcccctcgggcggtgctgcttcatactttttctcgcctataaaatgtccgccactgcttcactctgcgccacttccagaacaactttctcatcatcgaagcccgtcgcgagaagaagctgcttcgtcgcggttcccaaaatcgcgtttcccaagctccgtttcaaacccgtcgctatggctacgctcggcgctcgcatggtggccgccgcacccaccgtcactccgccggcctcgctcgacttcgaaacctccgttttcaagaaggagaagattaacctcgctggacacgacgagtacatcgtgaaaggagggagggatttgttccctctgttgcagggtgctttcaaggggattaagcagattggcgtcattggatggggttcgcagggacctgctcaggcacagaatttgcgggactcgcttgctgatgcaaagtctgatattgtggtcaaggttgggctcaggaaaggttctcgctcctttaatgaggctcgcgcagctggttttagtgaggagaatggaactttgggtgacatatgggaaactatctcaggcagtgatcttgtgttgctcttgatttctgatgctgcacaggctgataattatgaaaaaatattttcccacatgaaaccaaatagcatactgggtctgtcccatggttttcttcttgggcatttacagtcaataggacttgattttcccaagcacttcagtgtaattgctgtctgcccgaaaggtatgggtccttctgtcaggaggctgtatgtccaaggcaaagagataaatggtgctggaattatttcgagttttgcagtccaccaggatgtggatggcagagctactgatgttgctttggcatggtctg

SEQ ID NO: 104674 - DNA, 477 bp, Glycine max
  Clone ID: PAT_MRT3847_65536C.1
gcgagaagacgacagaagggcatcaagctgctggagtttccatttatgagtaatagcaagagtcaaacgaattttgacagtaacaagtttgattacaggtgtgaaagtctcattgtaatcatacccaagtctttgatgaaagcctttggcaacaagcctggctttatatttgctaactgtaccatctgggttttttttaacccttaaaacccatttgcaaccaatgggagactcttgagagaggtaaatcaacaagtgtccaagtctgattgttaagaagagcatcatattctgctctcattgctgcatgccagatgggacatgcaagagctgactttgttgatttggtcagcatgagtaaggagtgtaggttgaattctgggtttgacaatcccagctttagctcttgtgcacatagagtgaatattttcaggcctgaccagaactgtagagggttgcacagatgtagaaacatca

SEQ ID NO: 104675 - DNA, 2959 bp, Glycine max
  Clone ID: PAT_MRT3847_65537C.1
gtcaccacagacattgaatctttgatgagtgccaatattggtagttctcatgttttcgagcgtgattcacatactagtcctggaagaattgtagatagaccaggtgggatgtctcggatggatcgccgtggggatgtggtaatggaggatgacagatggagtagagtttctggtgcttttcgttctggacgtggtttggatggcattggaggtaatgtgggattccgatctggccaaggaggcaattttggtttctagaggaaccctcgtgtacagagacctacacaagatgatggttgaactctttcaggccaagggaattcagggggagatcatggtggaagaaataatcctgatggggagaggtggcagcgttctgctagcttccagcagaggggtttaattccttctcctacccaaactcctttacagatgatgcacaaagctgagaataagtatgaagtgggtaaagcatcacatgtggaagaggtaaagcagaggcagttgaaagctatcttgaacaaactaactccgcagaattttgatagactttttgaacaggtgaaagcagttaatattgacaatgcagtcaccctcactggtgtcatctcacaaatctttgagaaggctctgatggaacctaccttttgtgaaatgtatgccaacttctgtttgcatctggcttctgtgttgcctgattttagtgaggacaatgaaaagataacgtttaaaaggttattattaaacaagtgccaggaggaatttgagaggggtgaaagagaagaagaagaagcaaataaggctgatgagggtgaggtcaagcagtctgctgaggaaagagaagagagaagaattaaggcaagaagacgcatgttgggaaacatcagattgattggagaactatataagaagaaaatgttgacagaaaggataatgcatgaatgcatcaagaagttattgggtcagtatcaggatccagatgaagaagatattgaagctttgtgcaagctgatgagtactattggggagatgattgaccatcccaaagccaaggaacatatggatgcatattttgaaatgatgagatcattatcaaacaacatgaatttatcttctaggttgaggttcatgttgaaagatgtcattgatttgagaaagaataaatggcaacaaaggaggaaagtagaaggtccaaagaagattgaggaggtgcacagggatgccgctcaggagaggcaggcccaagctggtaggccaggtcgtggtcttggcaacaatcaatcagctagacggaatcccatggattttggtccaagaggatcttctatgctgtcttctcccaattctcaaatgggtggactgcgtggtcttcctactcaagttcgtgggtatggtgcttttcaggatgctcgatttgaggaacgacaatcttatgaggctaggaccttggcagttccattgcctcaaagaccctcaggagatgattctataaacttggggccccaaggtggtcttgctaggggaatgtctacgagaggatcaacagcaatttccaatttaccaatatctgatgtgcttcctgtccatggagactctcatagaatgaatacaggtcttaatggtcacagcaatttatcagagcgcacaccatatagctcaagggaggatcatgtttcaagatatggtactgataggtcttcagggccatctgcttatgatcaatcaagtgctccagagcataatgtaaaccatggcaacagaggcttgaggagtgaagatcggaatcttgaacctcttgctcatttgcaagggtcaatagtctctcagaatgcttcttcagagaagatttggccagaagaacgactgagggacatgtccttgtcagcaataagggaatactacagtgctagagatgagaacgaacttgctttatgtgtcaaagatttgaactctccgagcttccatccttccatggtttctctatgggtcacggattcatttgagagaaaggatgcggaaagagatcttttggccaaactacttgtcaaccttgtgaaatctcagcatggaaccttgaatcaagttcagctcattaaagggtttgaatctgctctcagtacattggaggatgctgttaatgatgctcccagagcagcagagtttcttggccgaatttttgcaaaagccataacagagaatgtagtttctttgaaggagattgggcagttaatacatgatggtggagaggagccaggtagtctcttagaagttggacttgcagctgatgttcttggaagcactttggaggtaattcaaagcgagaagggggatgcggttctaaacgagatgcgttcaggctctaacttgaggttggaaactttccggccacctaatgctaaaacatcaaggaagttggaaaaatttatttagatggtagtgacgctcattgtattttttatttttttttgtagagggtaaaaattagttggctcgtgcttttttgggggtagtactcaattttgcagagaatggttttctctgtgagatgggtcggtagagttttatctatgggattttctttgttttaaattatttttcggacatcagaaattttaggcgtttttgctatgcctgcttgatgacctttacatatttctttgtagatataaaaggttcaatgagcgtcaagaatattattttcaaaacgtttttggttgtatttcattaatgcttgtaaaatgaaatgcaatagagaaaataagagaagtagttttataccatgtctgtcagaagggtttactttttcaccagtcttgtatcattaaaagttcaaccggcccatgaaaataacccggcatattgatctgcctcaggccaatgtgtatagggacatgcaatcaagcataaccccccatactaaattgttttaaaatatactagctgacgatgcttttttttt

SEQ ID NO: 104676 - DNA, 512 bp, Glycine max
  Clone ID: PAT_MRT3847_65538C.1
tcatctagagcgccctttctttttttttttggctttaatgaaaaggaccgaatcgaatcgaataaaaatcgtttacgtagcaaacataacacggggacatgttcttgccacacaagtctaaggcaaaacctgcatcataatgatctgcaccattcatcaatgaaaacaacatcatcatcatcatcaccatcttcaaaacatttcttcttcatgcttcttaaaagggcttacttcttcccccttattgtggatccaataaatagactttctctcctttctttccatcatataattcattgacaatcactttgcctgcttccaatagcctataaccctcttggtctctttttgttacttttcttctccctaacttcatatctatcttggcacatatcagccaaccacgccccgggactcaccaaaagtaagcttctttgaatgattttggccctctttttgggtcgctgaggaagcttgcaaccctttcatgggcaaaaaaattttcctttttt

SEQ ID NO: 104677 - DNA, 631 bp, Glycine max
  unsure (1)..(631): unsure at all n locations
  Clone ID: PAT_MRT3847_65539C.1
aggagattgggcagttaatacatgatggtggagaggagccaggtagtctcttagaagttggacttgcagctgatgttcttggaagcactttggaggtaattcaaagcgagaagggggacgcggttctaaacgagatgcgttcagactttaacttgaggttggaaactttccggcaacctaatgctaaaacatcaaggaagttggaaaaatttatttagatgccagtgatggttattgtatttttttttttttttttttgtgtagaggggaaaagttatttggctagtgcttttttggggtactcaattttgcagagaatggttttctccgtgagatgggtggatagggttttatatctgggattttctgtctttatattatttttccgacatcttcactgcaattgtaaaaaggttcaattgagcatcagaaattttaggcgtagctgctatgcctgcttgatgacctttacatatttctttgtagatataaaaggttcaatgagcatcaagaattttattttcgtatcgtttttggttgtatttcattaatgcttgtaaaatgaaatgcaatagagaaaataagagaagtagttttatgccaaaaaaaaaaaaaaaaaaaaagaacgnnn

SEQ ID NO: 104678 - DNA, 175 bp, Glycine max
  Clone ID: PAT_MRT3847_6553C.1
tttcgatttagctaccctcaatgagggtgtactctacccctccggcagcttttctgatttttaccaaacaaaattaataagggatcggcacttttcctttgctattatctgcttcattttttaggattaatccatgtcactccacctactaattaacccctgtatatcttcattc

SEQ ID NO: 104679 - DNA, 330 bp, Glycine max
  Clone ID: PAT_MRT3847_65540C.1
ggttattaacttgctgggccaaacggggaattggaattggacacataaattataaggaatccaaatgcaaatttgtaacaattggaatgtaatagataaaaaattttaagcctcggcttttgggaaataagttcccaacataaatatagacattttcgaaaatttttttgtatataatgactaaatctggtaaattttaaaacacattttgagagctcaaccccgggctggttttttgggggtccaccagtggacaaaataacaaaaaatggttccaccagtttggcggacttaaaaggggattttcctttttttgggggaccctttagc

SEQ ID NO: 104680 - DNA, 423 bp, Glycine max
  Clone ID: PAT_MRT3847_65541C.1
ggagagaactagtctcgagttttttttttttttttttttttttttaatcgaaaaattatatatgataccaaagccaacagaaaaatacaacaagattactaagaggggatatagtactatagtactacacaagagacaccttaaccctacttttgacgtgggaatttgaagcccataagatgcactctttgcctttttctctcatactttccatatactcaaaaatataattgaacaagctagttccaaaaccaacaaatatctcaaactagtgctaaatgtatagaagttttgaggcatgtggtgatgagtgagagttctgcagtggtgatggtgtggcataagcatgatgatgtccatgttttgcaccaaaatttcccagttttgtctctgaaggaaaccttgccaccatcgaggaactat

SEQ ID NO: 104681 - DNA, 234 bp, Glycine max
  Clone ID: PAT_MRT3847_65542C.1
aagcacgtctacgagatggccggtatgaagggctactctggtcacttcgatgacgagaccatcgaggccatcaggaaccaccctgatgtcgactacatcgagcgcgactcagaggtccacactctcggccacgacgaaccggagatcgagaagaactccccatggggtcttgctcgttctcgcaccgcgactccctgagcttcggcacctggaacaagtacctctacgccgccg

SEQ ID NO: 104682 - DNA, 536 bp, Glycine max
  unsure (1)..(536): unsure at all n locations
  Clone ID: PAT_MRT3847_65543C.1
cataacataattattataccttttatatattcagaaactaaattaaaatttccttctttcaaaagattaaattgccatgtctttaatacatattaagatactaaaatgatgatttattcatattaaaaatgttttttttaattatgagttaaatttatctgtagttaaattaaatagtggaatcttaacgttaacgtgataagaaatgattttttctttcccattgattaagatgtacttgaacactacattctactcacccacacatataattaaaatgaaactacaatatttttttgttaccagaattatcgtaaaatgtggtgtcattcatcattcacttaaataaatgactcacttactgaaagagagtgctactaccaccaccacctacgagcgagtcatcatcttcttaaactcttcaaaattgacgttgccgtcaccgtcggcatccacgtttccgatcatcctccggcagtcgctgagggagcacttctcccccaacctccgnatcacggagtgcagctccttcgccg

SEQ ID NO: 104683 - DNA, 394 bp, Glycine max
  Clone ID: PAT_MRT3847_65544C.1
aaatgttggctcgtgggctaaaactaatgtgccaaaagggctaaaatatatagccccaaaagtatatgttaggtggggtttatgtattgcccttagggatgttagttttattcagtcatccccagttttattaggttgaaagtgggcttttgtagtcagtgatccaatttttaagtttgaaagctgatatgtgcttagcccaatttttaagcttagttttaaaggggaaaggaggtgcagagtgtttgaaaggcttgtgttgggaatattacttagcattttgatccgtcattaatgttcatttgagcagtagtacgggccgtaaaacctattggacttcaaatttatcattcttgaaacccaggagatattaagtatggtaaatgtgaattcc

SEQ ID NO: 104684 - DNA, 262 bp, Glycine max
  Clone ID: PAT_MRT3847_65545C.1
atgtgaaatcaacatcttgaattgggcttgctctgtataacgggtgcgggtgcgagaaagcacttgtgttgtttttcgtacgaaatggacactaaacagagttcggtgacagttacgctcaattactgcgcgtttacgttcaccactgaatttctcgcgactatactagcttatgctgtcatcaaagcctcacttttagcccctgatctctatctgctgctattgatcaacactcctactgccaaaggatacagcaaaattc

SEQ ID NO: 104685 - DNA, 134 bp, Glycine max
  Clone ID: PAT_MRT3847_65546C.1
acgctcaccagtttcaccgcacgaatatcttgttgattgaagcgatccgagaaaagctctgtggacatgttggtttacgaggatctccatacaggtgatgagctgctctctgactatcttccgttacaaggaaa

SEQ ID NO: 104686 - DNA, 356 bp, Glycine max
  Clone ID: PAT_MRT3847_65547C.1
cgtattattgaatactctctataatttgggaggattacgtgtttctagcataaatcttgagagaacatttttttttgttccatcatataaaagatatatgttttgtaagaacacgtacaagttcccaaaggaaagggggacattcataaaaaaatgcagaaaaaaaaaaaacagacttgtgtacgaggggcggaaacatagagaaaattctcccaattagataataagaagccagttgttttgcacaagccccttgctaagagtgctggaaccccttttaactaaccaggtaccttctcccccatgagtggcttgaccacttcccatgtgaagtcaggggcaattctggcaaagtg

SEQ ID NO: 104687 - DNA, 577 bp, Glycine max
  Clone ID: PAT_MRT3847_65548C.1
cttccaaggaaggtttcccgtcatcactgtatgacgtcctccttctttgggggggggggggggcaattagaggggggagggagggaggctcgaactgctgcgctgaaggcggggggtgttggcaagggcagaaaagaaggaggcaggtggatacgcgataacgtacactcgaggggagacgataaatagaaggtgcgcatggctcgcgagcaggagctaatagagaaggtcctggggttagtaagcaagacatgtagcaatgtggtattagttatacgggtgggggtgagcacaacggcactaactggcgcaaccagagtaagcgcacggcacagaagagcgcggctttgacaagagctgtgtgtgattacggtttgtatggttctagttatgatagttctacggcttagccacgaagttggggctcagcatagtgcggcatttaacaagccagggttattaccgttattaagcctaatggcgttaagggggggctgcaagttaaagtgtgtaattagcgcttggcttatgtcgcaaatggctagcaacgtcgggcagctgttccgccgcatagggg

SEQ ID NO: 104688 - DNA, 292 bp, Glycine max
  Clone ID: PAT_MRT3847_65549C.1
ctaaggcttacaaaatttccctatattaaatcttatcaaaactatggcaataaatggtcatagtgtgaaactgtgaaaaattgacattcgctcacaataccccacaccaaaccatccggagtcaaaaatggtaaacctaagggggcctataaaaaaaattaattgacattaattgactggcccttactcaccctttaaaaatggggaaacctgttgttcaatttattttaaaaaacccgccaacacccggatagagaattgttccccattgagcgccatgtttttttttttt

SEQ ID NO: 104689 - DNA, 443 bp, Glycine max
  Clone ID: PAT_MRT3847_6554C.1
gacggattgtaaaattaaaaaaaaaaaaaaaaaaaaaaaaaaaaaataaaaaaaaaaaaaaaaaaaaaaaaaaaaaaaaaaaaaaaaaaaaaaaaaaaaaagaacataactaacaacaaatccaacactgttgtcggtaaaagctgatggtgacaaaatggaaataaaatatctgatgctgggaaaggttttaattaattgccactttccgaaaagaacaaacaagagtattattttttattttggcaccaaaaaaaaaatattaacaggcgagtatttaaaaatggcgaatgggaaaaaccctgtttttggcccttttttttgattttccaaactttcctttttttccatgcgaggtataatttataaaatcctggaacctaaattttttccaaaggtttggtttttttaaaggggaaattggaaaccccctgtttttaccc

SEQ ID NO: 104690 - DNA, 269 bp, Glycine max
  Clone ID: PAT_MRT3847_65550C.1
attgaagaattgatcaaaattaaatagctagcttagaacaaaataattttttttatagatttttttaaccagaattatctttaaagtaaactcttttcctataattgatttattcatcaattatattttttttccttgctttacttaactcgcaacatttgtttgatatgaaagtaatgcagtgatctatggttcaagttgaagaagtcagaccttaacatcatggctggactttgtggagtgtccaaaggttcaagcatgaaaaatgg

SEQ ID NO: 104691 - DNA, 469 bp, Glycine max
  Clone ID: PAT_MRT3847_65551C.1
tttttttttttattaggcagacaatttttattgggtctataaaaggaacgatataatcaacacaagaaattactcccccctctcaggtattgaatcacaattgcattaacttgatactagctattgaatatattgatataacacctacatcacaggttcaataaattaaaccttgtgcgatatattctttttactttattgttattatttttgtctctattgagtctgggactgtgactgacaacatattataactcccacttattgaaataaaaaaaatgataatataacatctgagaactagtatatatgtatgaataacgctcatacaatacatttgcaaccttagtgatcctttggtggacggctattaaaagccgcaaatatgcatcccaactgaagcaattccttgcttgtatcatctttgtgtacaatcacttcaatgaagcataggctattcttttctcgt

SEQ ID NO: 104692 - DNA, 313 bp, Glycine max
  Clone ID: PAT_MRT3847_65552C.1
accaaatgaaaactcacttggcataagtaatggatatctaactatctctacagagcggccagaggctctctgcaaagccacctattaatccgccggctatgaccactcaaccttcatttgtcgatatgtcagaactaagattgccaggatctaacatacccgaggagacgataccaaacgaggccgcgtatcaaataataaacaaagagacgatgctggatgtgaacccactgacgaacttggcatcattagagacaccctggatggagccagagtgtgctcaactcatcatggctgctacatatcagaactt

SEQ ID NO: 104693 - DNA, 329 bp, Glycine max
  Clone ID: PAT_MRT3847_65553C.1
gaaaaaatgaaataagtttttctcaggggctaaaagtggcttatgaaacttggataaaatacttattttaatttatgcataaactaattttattgggcggcaaaaactaatttctcttataattattgatacagaaacttttcctatgagaacttgcgatagagttgaaacaaacagtgacaacttaaaagggctagaatttcactccggaacttctgatattgcatatgatgatgacttttattagcgttcaagcaatgataataccttggcagcgtttctcctaagggggtcatccccatatatattcatgccagggggaccaatta

SEQ ID NO: 104694 - DNA, 399 bp, Glycine max
  Clone ID: PAT_MRT3847_65554C.1
acatatactgtgaaaaagatgaagctaaaacaaggcctttctgttaatttcacttcacacccaaaaacactgtttacctattcagactcgttcaaagaaccgcatgtatcacaccttaacccacggctctgcaattatgcgggaacctcaagtgctgcaagagctaaactctgtggcacagacctggggggtttacccactactggaggtgccacccatgactgtaacgactgagtgtactgaaaccaaattcgttgcctatgactaaatggcggttgcctggaggagtttcaacccttgttggcatctggatgcaatcctcttatagggaaggctgccctgaaccttttcatggatcattggcatgcttacctacctttgaacacaacctccaatttt

SEQ ID NO: 104695 - DNA, 315 bp, Glycine max
  Clone ID: PAT_MRT3847_65555C.1
ttttggtatattggtttttggggtttttggtttttttttttttttttaaaaaaaaaacaacaattttttcacttttccatgattggggggaatatttttgctagaatatatataaaccacggggggggggtatattaaaataaaacaccggcccaaactccacaggccaaatttacatagtttgggtgaaatcaaattaagccaattaaagacaaactaatttaaaccccccccctggtggatcataaaaggtgccttttctttaaaaaaaaaaagcccccgaattgggaaatggcttattaactcctggggggg

SEQ ID NO: 104696 - DNA, 2000 bp, Glycine max
  Clone ID: PAT_MRT3847_65556C.1
gcgccaacgcgagacgttccaaatttcactgccagcgaggcagagagagaaactagagagagagagagagcgaacacaccgttcatttctccttcgtcgtcgtcgtcgtttcgccgtcgcattttccggcgaggtttctctgttttgtttaaccgaaatggaggatccgtacgttctcggttggattctgtgctccgtcctgagcctcttggcgctctacagcctggccttcggcggagcgggccgtcgccgcgcttcgccggagaagaggaacgagttatcggagaccgtgacgacctccgccggagaatgcagatcggagaaacgaaacggcgacgctgacgtcatcattgtcggagccggcgtcgccggcgccgccctggcgcacactctcggaaaggatgggcgtcgagtacacgtcattgaaagagacctgagtgagcctgatcgaattgttggagagttgctacaacccggtggctatctcaaattaattgagctcggacttgaagattgtgtggacaaaattgatgctcagcaagtgtttggttatgcccttttcaaggatgggaaacatactcgtctctcttaccccttggagaagtttcactcagatgtctctggcagaagctttcacaatgggcgttttattcagaggatgagagagaaagctgcctccctttccaatgtacgactggagcaaggaacagtcacttccctacttgaagagaagggggttattaaaggtgtgcaatataaaacgaaagatagtcaagaattgtcagcatatgcacctcttaccattgtttgtgatggctgtttctcaaacttgcgccgttctctttgtaatcctaaggtagatgttccctctcatttcgttggcttagttttagagaactgtgaacttccttgtgcaaatcatggccatgtcatactgggagacccttcgccaattctattctatcgtataagtagtacagagattcgctgtctggtcgatgtacctggtcagaaggttccttctatttcaaacggtgaaatgggaaagtatttgaagacaatggtggctccacagattcccccccagctttatgatgccttcattgctgctgttgacaaaggcaacataaggacaatgccaaacagaagcatgccggcagatcctcatcctacacctggagcccttttgatgggagatgcattcaacatgcgacatccactaaccgggggcggaatgacggtggcattgtctgatattgtggtgctgagaaatcttctaaggcccttgtctgacctgaatgatgcacccacactctgtaaataccttgaatccttttataccttgcgtaagcctgtagcatccaccataaatacattggcaggtgctctttacaaagttttttgtgcatcccctgatctggcaaggaaggaaatgcggcaagcttgttttgattatctcagccttggaggcctattctcggaaggaccagtctctttactctctggattaaatcctcgtcccttgagcttggttctccatttctttgctgttgcaatatacggtgttggccgtttattgttaccatttccttcacctaagagagtatggattggagcccggttaatctctggtgcatctgcaatcatcctccccataattaaggctgaagggattcgtcagatgtttttccctgccactgttccagcttattacagaacacctccagttgcacaatagtgagtatatgtgaaattagtgaatatattttgaaaaatttaaggtgctgtcgataacatatggtagcttatcctgctttttgtcagaattgagggaaggttcagttcgtagttctgtaagcattttggcttctttattgtgtattctttgtagtctgtaactcaatgttataagtgaatgtatgatctctctttcctttttggtacaccagaaattaaatccatgatcttaaactaaaaaaaaaaaaaaaaaaaaaaaaaaa

SEQ ID NO: 104697 - DNA, 1921 bp, Glycine max
  unsure (1)..(1921): unsure at all n locations
  Clone ID: PAT_MRT3847_65557C.1
aatccacgcgtccggttccaaatttctatgccagcgaggcagagagagaaactagagcgagaaagagagagagcgccacgcaccgttcattccttcgtcctcgccgtttctaaccgtcgcagttttccggcgaagtttctccgatttgtttaaccgaaatggcggatctgtccgttctcggttggattctgtgctccgctctgagcctcttcgcgctctacagcctggccttcggcggagcgagccgtaaccgcgcttcgccggagaagaggaatgagttatcggagaccgtgacgacctccgccggagaatgtagatcagagaaacaccacggcgacgctgacgtcatcattgtcggagccggcgtcgccggcgcctctctggcgcacactctcggcaaggatgggcgtcgggtacacgtcattgaaagagacctgagtgagcctgatcgaattgttggagagttgcttcaacccggtggctatctcaaattaattgagctcggacttgaagattgtgtggacaaaattgatgctcagcaagtgtttggttatgcccttttcaaggatgggaaacatactcgtctctcttaccccttggagaagtttcactcggatgtctctggcagaagctttcacaatgggcgctttattcagaggttgcgggagaaagctgcctcacttgccaatgtacgattggagcaaggaacagtcacttccctggttgaaagagagggaacaattaaaggtgtgcaatataagaacaaagatggncaggagttgacaacatatgctcctcttaccattgtttgtgatggttgcttctcaaacttacgccgttctctttgtaatcctaaggtggatattccctcatgttttgttggtttagttttagagaactgtgaacttccatgtgcaaatcatggccatgtcatactgggagacccttcgccgattctattctatcctatcagtagtacagagattcgctgtctggtcgatgtacctggtcagaaggttccttctatatcaaacggtgaaatggaaaagtatttgaagacaatggtggctccacagatccccccccagctttatgatgccttcattgctgctgttgacaaaggcaacataaggacaatgccaaacagaagcatgccagcagatcctcatcctacacccggagcccttctgatgggagatgcattcaacatgcgacatccactaactgggggaggaatgactgtagcattgtctgatattgtggtgctgagaaatcttctaagccctttgtctgacctgaatgatgcacccacactctgtaaataccttgaatcattttataccttgcgtaagcctgtggcatccaccataaatacattggcaggtgctctttacaaagtattttgtgcatcccctgatctggcaaggaaggaaatgcgccaagcttgcttcgattatctcagccttggaggcctattctcggaaggaccagtctctttactttctggattaaaccctcgtcccttgagcttggttctccatttctttgctgttgcaatatacggtgttggccgtctattgttaccatttccttcacctaagagagtatggatcggagcccgattaatctcgggtgcatctgcaatcatccttcccataattaaggccgaagggattcgtcagatgtttttccctgccactgttccagcttattacagaactcctccagttgcacaataaattgagggaaggttgaagttcgtagttctgtaagcattttggcttcttttgtgtgtattctttgtagtctgtagcttgtaatgtttcaattgaatgtatcatctctgtctctctctctctctctcctttttggtacactagaaattaaatccatgatattaaactaaattacaatccaaacc

SEQ ID NO: 104698 - DNA, 722 bp, Glycine max
  unsure (1)..(722): unsure at all n locations
  Clone ID: PAT_MRT3847_65558C.1
aaacagaagcatgccggcagatcctcatcctacacctggagcctttntgatgggagatgcattcaacatgcggcatccactaaccgggggcggaatgacggttgcattgtctgatattgtggtgctgagaaatcttctaaggcccttgtctgacctgaatgatgcacccacactctgcaaataccttgaatccttttataccttgcgtaagcctgtagcatccaccataaatacattggcaggtgctctttacaaagttttttgtgcatcccctgatcaggcaaggaaggaaatgcggcaagcttgttttgattatctcagccttggaggcctattctcggaaggaccagtctctttactctctggattaaatcctcgtcccttgagcttggttctccatttctttgctgttgcaatatacggtgttggccgtttattgttaccatttccttcacctaagagagtatggattggagcccggctaatctctggtgcatctgcaatcatcctccccataattaaggctgaagggattcgtcagatgtttttccctgccactgttccagcttattacagaacacctccagttgcacaataaattgagggaaggttcagttcgtagttctgtaagcattttggcttctttattgtgtattctttgtagtctgtaactcaatgttataagtgaatgtatgatctctctttcctttttggtacaccag

SEQ ID NO: 104699 - DNA, 502 bp, Glycine max
  Clone ID: PAT_MRT3847_65559C.1
ttaaaattcgggatttccgtttctttccacgttcttcattttctccgcttcattcattacttcattttggaacataattgcttcatctttctggactgagaaaattctgtaagttgatgattagaagatgaattgtttcttcttgaaaaacaaatcaaaatccgacgcagaattaccaaagcgaaggaagaagaaaaatcaggtggggaataatggagcaagcaagtcctccaccagctcgccgctaccatcgccaaggagcataaaagaattgtacaaagagaacgaacacaatttcagaatcttcactttgcaagagctggtagatgcaacacatggcttcaataggatgctcaagattggagaagggggattcgggaaagtgtataggggaacaattaaacctcaccctgaagatggagctgatcctattgtcgtcgcaattaaaaaacttaacacgcgtggcttacaggggcataaagaatggcttgcagaagttcaa

SEQ ID NO: 104700 - DNA, 403 bp, Glycine max
  Clone ID: PAT_MRT3847_6555C.1
ttcacgcgttcgctgacgcgtggctggtgttgaaaaattgatgcttgaaaggacacacctgctgttggctcgttgatcaagaatggcacttagctagacagaggttcggatagtagaatgtgtaaccctttctggattcccgctcacagtgatttgcaatagcatttttaacgagatgctcattagatatacctataaaaaattactgcgccaggctaaagctccaagtatgtttttacaatccttcaaaaataatgtttctctgtgtgtgtatggtgatgattactaaatttgtgttcatgaatatggcaagaccaactttagtggttctaaattgaaaagctttatagctggtcataattcaaccattactgatggtgttgacaaaactagagcttctttg

SEQ ID NO: 104701 - DNA, 697 bp, Glycine max
  Clone ID: PAT_MRT3847_65560C.1
cctgaatgatgcacccacactctgtaaataccttgaatcattttataccttgcgtaagcctgtggcatccaccataaatacattggcaggtgctctttacaaagtattttgtgcatcccctgatctggcaaggaaggaaatgcgccaagcttgcttcgattatctcagccttggaggcctattctcggaaggaccagtctctttactttctggattaaaccctcgtcccttgagcttggttctccatttctttgctgttgcaatatacggtgttggccgtctattgttaccatttccttcacctaagagagtatggatcggagcccgattaatctcgggtgcatctgcaatcatccttcccataattaaggccgaagggattcgtcagatgtttttccctgccactgttccagcttattacagaactcctccagttgcacaatagtgagtatcactgaaattagtgaatacattttgaaaaatcaaggtgctctcaatagcacgagctaactttatcctgcttttttcagaattgagggaaggttgaagttcgtagttctgtaagcattttggcttcttttgtgtgtattctttgtagtctgtagcttgtaatgtttcaattgaatgtatcatctctgtctctctctctctctctcctttttggtacactagaaattaaatccatgatattaaactc

SEQ ID NO: 104702 - DNA, 993 bp, Glycine max
  Clone ID: PAT_MRT3847_65561C.1
ggttggagagaataggatgggaaggtccccttgctgtgagaaagcacacacaaacaaaggtgcatggaccaaagaagaagatcatcgcctcatttcttacattagagctcacggtgaaggctgctggcgctctctccccaaagccgccggccttctccgttgcggcaagagctgtcgtctccgctggatcaactatctccgccctgacctcaagcgcggcaatttctccctcgaagaagaccaactcatcatcaaactccacagcctccttggcaacaagtggtctctaattgctggtagattgcccggtagaactgacaatgagatcaagaattactggaatactcacatacgcaggaagcttctgagcagaggtattgaccctgccactcacaggcctctcaacgattcttctcatcaagaacctgctgctgtctctgcccctcctaaacatcaagagtcctttcaccatgaacgctgccctgacttgaaccttgagctaaccattagtcctccccatcatcctcaacctgatcatccgcacttgaagacccttgtgacaaactcaaacctttgctttccctgcagtctgggtttgcataatagcaaagattgtagctgtgccctccacactagtactgccaacgctactgctactggctatgatttcttggccttgaaaaccaccgtcgttttggattacagaaccttgcacatgaaatgaaatcatattactgaaatctctctctttctttctttctttcttttcttctctaatataatttcttacttacttacttacttacttacttacttgttaatggttgcaaatgataaaaaagttccagccagtacagttgaacatataacaaaagttcaattcatcacttcgatcgatggtagagagaattaccacaatcattcctcgtggaagcctttctaatattcccatgttcaagtaactgtgcgtaagaataaaaaattttcttgttt

SEQ ID NO: 104703 - DNA, 722 bp, Glycine max
  unsure (1)..(722): unsure at all n locations
  Clone ID: PAT_MRT3847_65562C.1
cggattccccgtcgacccacgcgtccggtacagctaccccttgtaccttcgtatacaaatatgagatgttttgttgctgatatttataaaaaaaaaactctaacatgtcttcataggccagaataccattcctgaatactcctggtcctatattattcctacacagctgcactgccacaaagaccatataatagccacccttaacagctgtcatgctcttgctgctttcttaattacgcgtaggaagactggagtgttgccaaaattgtagatccaaacaagaataacaaaatttccatattctattttgggtgttagtatgtctttagttcgccaatgcttttctcgtgttatttgtaatcacgagctaccaattaaagttatgattataactaaactttttagaattgcaaaaaagctgtgattataactgtcttgggtcaagacttatgcacttcagctggtattaaccctatcgtttattgttaagtagtgtgtgtttgacatttagaatgacttactttttgataattacatcaaatttacatagaattttaaagttntatagaacgattactagtggagaaaatcattataaaatttatagccatttcaattggattagagtgggcctagtgttggaggattatatagtatgaaatctgttataagtttaactttagtgtaatcattatattaaaagaatattattttagctatgg

SEQ ID NO: 104704 - DNA, 289 bp, Glycine max
  Clone ID: PAT_MRT3847_65563C.1
aacatatgatttatttttttactttcattgtttattggggggcggcggcctttaaaaaataatttataatggaaattgaacacaagggttggcctcactccgaattccccatccccaaaaaaaaaaaaaaccttattccttttacattccataagcccgggaccaaagaaatttcgttttcttacaaatagccagtgttttgcttgccccccaagggctcctacatggggagaatgaaaatgtctttccccctccctgggaaataccaaaaccagaaagtttccggaat

SEQ ID NO: 104705 - DNA, 1467 bp, Glycine max
  Clone ID: PAT_MRT3847_65564C.1
ctttatatgccactggtatgccttgacaaacttaaattttcattgatctaatgtcacaatatcctgctattatttgattctaggtaggctttttttgttgtatctagtgacaggagacctaagtaacgtatcacaagctttgtatttcatgtttgttttctttttgggtggcaggggttcacctagcgaccttgttttatttgagcatgtaattgggtgttcagtcattcagtagtatcttaaccatcggagcttgattgtcactttgcattttttgaccccagtcatcccttgatttcaaatcaactgcgtaggtacctaatttttgcgattctcctgtggaggtggttggaaaaagttgtccttgtacctccaagcataaagcatttgttatttgactgatatcttaaaaagggatttctattattaattccaggcatgactgtgctatgcttagtgacactggctgcatcactagctgcacggcagggaccaacatctatggctgcatttcatgcatgtttgcagatttggttggcagtgtctcttctttcggatggtctggctgttgctgggcaggcgattctaatgggtgcatggcttaagaaggacttcaacagggccacagcaactgcatctcgagttctacagatgggtttggttgtaggattggcacttgcattcattcttggaacaggattgcactttggtgctaaaatatttacacaagatgctaatgtcctccacctcattcaaattgggatcccgtttattgcagtcactcaacccctgaattctttagcatttgtatttgatggtgtcaactttggggcatctgattttgcatattcagccttctccatggttgtggtggcaattcttagcatcatttctctgcttattttgtcatccgctggtggtttcattggaatttgggttgctttgaccatctatatgggtcttagggcatttgctggcttcttgagaattggaacgggatcaggaccttgggagttcctaaggagctcatgagtgcacatggcagaccccgtagttatagcttcatattaggcctaggtttcagtggtgtttgctgattacattaaagtgagataagctttccctaggttgttaaatcgcttaaaaaattcttctgaaagactaggcaattttccctgcttgattgtgcttggggtatttggttgaaaaatctacctctgcatcataatatgtacagaaaaatctaactctactctcagtctcatatagtgaaatgaaatgaaatatagaatcaagcttttgtttgtaacctaaccatgcaacaaatataattaattacatggaataacgtgaaaatgaaagattgcatggaatggaacaatccctagtgctgaaaaaagatgcagaactcctttcgtttttaggaagtttgtatatggtaatcccatcaacttagtcctccttgcc

SEQ ID NO: 104706 - DNA, 868 bp, Glycine max
  Clone ID: PAT_MRT3847_65565C.1
cactgttttgccttttgtgtacattttgtgatattctctgatctcgtcttttgtatgtcaaagcaagctcgaaatgtttaggataaccgaaagtgacatggggtgcttgccttcaagcttcatgaatcttagaagacagcgatatctgagagttctagatccgagggagcttcgaatgatagaaagtggctctgtagatgtcatagattgcaaatcattgaagcacgcattggttcttgctgaacaattcaagtatatcagcagtggcgttggcattcagaattaccaaggattggttgaagaatcggtggtggtggcattagatgcaatttcatcaactgttgaaactgtgtttgaccattcagagcttatagatgacaagagatatattagtattgatgaaagaaaattgaagccattgaagagaattgatgaataatattcaaactgtggaaaaatatttaatgaaggtactaggtcctcaacaatgctttgaataatgttcaacatcaatgaaaagagagtaggaagttacatgtgacttgcaaatcaatatagagatgttgttactttattaattaaagtcttgtacccattaaaatttgagctttttattttatcttttaatattaaatgtttgtaaagcttttgtggtaacttgtaaagttggataagaggttgcttatgctaaaaaaagtaagttgcagctgtaggctaatggtgctttcccttttagcttagtcatgagtaccttttgctttgcccaacttggggcttcatagtttgtttatttatttaagaacttgttgtaactcttcatatgcattactgaagtatatcaagtcagtttgctctgtttcatttgtaa

SEQ ID NO: 104707 - DNA, 279 bp, Glycine max
  Clone ID: PAT_MRT3847_65566C.1
tattgggatggtgcaagagtttgttgcgagccattagctagtttatcgtgaggtgtatatcatatcggttgaactctttgttgcttcaatagtttttttatcaaggtcattccattgagcatgctaccaaattttctttgttcaaacgaaaactgtctttcgtgagcgttcttgttaaaaaaattcacaagtcctaaacttgctgaagaatcacacatcatatcttcctttaaaaccatttctgaaaaatgcgatgaaccaacctaatacttcattaac

SEQ ID NO: 104708 - DNA, 438 bp, Glycine max
  unsure (1)..(438): unsure at all n locations
  Clone ID: PAT_MRT3847_65567C.1
aattcggctcgagtgacccgagggttctggatcaatttgaccttaaagcttgggtctatgtttcacaagattttgatgttgttgctcttacaaaagcgattcttaaggcacttcggtccttagcagcagaagaaaaagacttgaatctgctccaacttgaattgaagcaaagactgatgggaaagaaatttttgcttgttttagatgatgtttggaacgaaaactattggagttgggaggcactacaaattcccttcatttatggatcttcaggaagtaggattcttattaccactcgtagtgagaaggtagcatcggtcatgaactcctcccaaatacttcatttaaagccactggagaaagaagattggtggaagctatntgtgaatcttgcatttcatgacaaggatgcctncaaatatccaaatcttgtatcag

SEQ ID NO: 104709 - DNA, 466 bp, Glycine max
  Clone ID: PAT_MRT3847_65568C.1
tctggctgaaaacaccacagagggggttcttaaacgagacaatgtgacttgattgacaagcttgaagagatagaccttgaaatgaaaagatcttactatggacatagcaatttgtagtctcatgatagtgttgttatgctgattattatgttcatagacagactgtgatcattattaggaatgtttgatcattttgatgaggattctaacggatctatagaacctaacgaactaacaaaggtcgtagatcatcttgtacttgctcttaaagagcaagagattgagcatggtcttcagtactgggatctgaatgctagcaagggcatacacttcaatgaatatactttaataatatgccaaatccatttgctattagaagctaaattctctgttatctcatccatagatgaaatctcactgtatggagatatttttaataccataaatgaagttatgttttctttga

SEQ ID NO: 104710 - DNA, 184 bp, Glycine max
  Clone ID: PAT_MRT3847_65569C.1
attaattgtttaaaacctttcgcacacaaaaaaaaatttccaaaacgggtttgccaaaatatctattgggaggatgacgaacatttaatacaccttctgtgggtaatttttttcactatactccatgaaagggttttcttctcacccgggtatacaaatggaagtttttgggtggttttcatag

SEQ ID NO: 104711 - DNA, 411 bp, Glycine max
  unsure (1)..(411): unsure at all n locations
  Clone ID: PAT_MRT3847_6556C.1
ggagcaaatacaatngatgccgctcctttttaaaatgcccaaaaaagttttttgtttttctaatatttctttttctaaattcccgtttggccaaaaatttttttccccttccccaatatcctttttttttttagtctttttctgtctggatctcacccattattatcctgtttctcacaactttgattcccaaaacttaagagctttccttttttcctttggtgccgccttttttttttccaacttttgaaaagagatccctcaggggaaccctgcccttgtacttctgtttttgcattaactttccgatctttttcgggttgaaaagctttttccaaaacatctgattgggggaggcccctttaatggaggaatttttcaaagaattcatgatcatgggctttttatccc

SEQ ID NO: 104712 - DNA, 262 bp, Glycine max
  Clone ID: PAT_MRT3847_65570C.1
gccgcacccaacaacgcaccatttcgtctgtttctgtgccttttgtcatgattcgctccaaacacaggggtgatctcatttgctagagacccatcacattcttgtatgatcacgaacctctcacaacgctcatggaatgcgaagtagtttgtcctctcacatacctaatcaaaaccgaatcatacatgcctgacgtgcatccgaagaacccccgctttttcacgacgatcatactgtcgactcactctgcgatatagaggac

SEQ ID NO: 104713 - DNA, 423 bp, Glycine max
  Clone ID: PAT_MRT3847_65571C.1
aaaagaagcacattcttatttattgctactgacacaaattcctttatttaacacattatacttcacaaatagggcaccataaattttacataccttccatgtgtacaaacaacaatgtctaactcaaacccctcattggatcattgccttttatgggggtccacctgcataaaaccctcctgcatcctgagccgctttctttgacggcttctactgtagcaccttcccttttctttccctgcgctgttcaagggtccacccatgatttttctgctagcctttaccaccctttctagcctgagccctttcgggatcaccatccctctgcataccgggagtcattatcctcaatcgatactcccattaacaaaactctacgcgtgggtcttacctgggaataccgcaccgacccctgcatgcgtg

SEQ ID NO: 104714 - DNA, 441 bp, Glycine max
  Clone ID: PAT_MRT3847_65572C.1
ggctgagaaaaaaaaaaatactaagacgggattcaaaggtgaaaccctttcactcggccaatttcaacaaactaccccaaatccctatgaaccgggtgtcgacaaactgggctgatcaggtggaatcatttgaggaagaaagacgtgaatatcaccaggatgatcgaagagaaagcggacattcccatagatcctgggacaggcatgtagctccctctgacagacctagaaggaattacgaagacagggaaccaagataacacatagagccaagggaaccacgtcctcctcgagaacaaaatgctttgcctacatcaccttcgtacacagcctatgtgggaaacctatcctatgatacaaatgatgaagaaattatttcattgtttagcgaaaaatgccatggcgagaattcaagaatcgtttatgacacagaaacccaca

SEQ ID NO: 104715 - DNA, 1223 bp, Glycine max
  Clone ID: PAT_MRT3847_65573C.1
atttgcgagctaatcccagaaggcacatcaagactcatagccctattcccagccatagggatcctccttctcctccctctaaggctcatctccgttcacctcggaggcccatctgctttcttccttggttggctttcaaccttcaaactcatcctctttgcctttggaaagggtcccttatcctccaaccctcccctctctttgcctcacttcgtccccatcgcatgcctccccatcaaattcgaacatgacccaaaacaccaaatcccccaaaagaaacacaaatctcccttcagttatgcttcaacctcaatggttattatattggctgctttaattcctctctacgggaaaaaagagtattttcacccaaagtttgtatttttcttgtacggcctccacatgtacatagggttagagttcattttcgccacggtctccgcagcaacgagaaaactcatcggggttcagctggaaccacagttcaaggagccatacctatgcacttcgttacaagatttctgggggagaaggtggaacatcatggtcaaccgtgttcttcaccccaccgtgtacgatcccgtgaagaatctctctgcacgagtccttgggagaaagtgggccccacttcctgcaattctcgcttcctttgccgtgtccgggatgatgcacgagctcgtgttttactacatcaagcgggaaaaacgcacgtgggaggtatgggagccctcgtgggacgccacgtgtttctttctcattcacggggtgtgtgtggccatggaggttggaatcaagaagagtctcagagggaaaaaacagtggcaggtgcccagggtgctgtcgtggatgctaacgttgctgtttgtgctctacacagcgatggccttctttctgcccgcgctagcgcggtgtcgcgtttatgagaaggcaaccagagagttgaccgctttgacccagtttttgaaacatctttacgctcttccgagtcttgttcgttagtgattagtttgcaaatctcacaccactaatgatccaaaattcttcatcaagttttttcctatactgcagaggattttttctccgcgctccatctaatttagtatatgtttgattcccttggttttttactttgcattccatctaacgcaaaggagataccttgtaaaataaaaattgagttacgttgatattgtctgattttaaacaaattaatgttgtcggtc

SEQ ID NO: 104716 - DNA, 689 bp, Glycine max
  unsure (1)..(689): unsure at all n locations
  Clone ID: PAT_MRT3847_65574C.1
aaaaacaggggaaaaagaagaaacggccgatcgttaaaaaatccaacccaaaatttgaacccaaattattgtaaaagtaaaccaagccaaaatttgaacggggggtataaaaaaaatgttttttagccaaaaatggaacactacaaatagaagggggggttttaataaaccaaagcaccccaacgcagaaaaggcctgaaattcgttgggcttaacaaaaaggtaatcgggggttccgacaaacccaacactttaaaacccagataaataaaaggaattttgccaccggggataaaaaacccagttttgggaacaacagttgcgaaaggaggggggaaacttaaaattttggccgaaaaacaggctcccttgaaaagaagaccccggagtccagaaaaaaaaccaacttttatgggaaccaaaatcccctgaggaaccagcccgaacgaatcattttttttttggggcagccttggggaccttggttcggggaggaacctttttttaaggtttgtggggagtcccaagagacggtgtggggcggtggttaaaggngacctccgggggggggttactgggagaaggggggcaacctggggggggggggaagtgtgggggggggcgggggggggggtggagaaggggggggtggggggggtttgggggggggggggggtggggggtggggg

SEQ ID NO: 104717 - DNA, 251 bp, Glycine max
  Clone ID: PAT_MRT3847_65575C.1
gtcgagtggacggaggacgagatggccgcgctcgaggagggcatgcgagagacgagccgcgtgctcccgaaccgctgggcaacgatcctgcgcatgttccggccgcgcttccacgagaagcgcacctcggtgcacatcaaggacaaggtgcgcaacgagacgaaccgccgccgcaaggtgggcgagccgctcggcgtctttgccgaccagtagtcgatggcacgcttgctaatataccgagtagtgtgctc

SEQ ID NO: 104718 - DNA, 380 bp, Glycine max
  Clone ID: PAT_MRT3847_65576C.1
ggaactatatgaagactctccaggcagttcggaatacagtacaggatcaactctcctgcctcattcagctggtgaggatttggaacactcactgcatcaggatattggaaccgaactgaatatacaaattgaagattcagaaggagttaggggatgtgaccaaggggttctttctagtgcaactctggatcaagatttattcccatcttgtgaggaacagataaacaatgatgcaattgtttctgccttatcaagttcagcggagttcagttcacctcttcaagttacccctctgtttagatccttagctgctggaattcctagcccacaattttcagaaagtgaaaggagcttccttatgaaaacactcggaatggagt

SEQ ID NO: 104719 - DNA, 163 bp, Glycine max
  Clone ID: PAT_MRT3847_65577C.1
gtcggatttaatcctgacattatcggatacttcattgggtaccgcccgctcgatcggagtgattgatgagttcatgtatgctcaccacatctgcgctggtagactcatgggtttctgacacaacgatgatgaggcatctcgctacaacaaaaaacaatccttc

SEQ ID NO: 104720 - DNA, 310 bp, Glycine max
  Clone ID: PAT_MRT3847_65578C.1
ggaattaaactgcaaagtgaaatccccatgctacaaagcgttatactcatctttctagatacgttgttgactggaaagttccctctcagaaacagaagaccttgccttcgtcaccgtctctagaaacatgactaccacgaaaaccatcaccaccagcagcgatgtctttgacaaacggttcggggaaactgtctgcctgagaaaagtatgctcagaatcacgataacttcaccatgcgagatcatgtctcaactgccttgaagaaagaaggtttatcaccatcaactcttgtccctggcattgaattcac

SEQ ID NO: 104721 - DNA, 312 bp, Glycine max
  Clone ID: PAT_MRT3847_65579C.1
attataattcttttgggttttggttaaattttagattcatttttaaaaacatacacatttatcactaatacttatagaataaagcatgcttgccaaacttaaaattctatacatgctagaccaacttgccatgctttgaatgataaaacttaccgtgcccgtgctgcatggttttcccaagcggcaaaaaaaaaaaaaaaggggattggccatacgagtcatggtaaccaagagagacatgatgagcacgataaacgatatactgtctctattgccaccccagaatgcaatggtctgataccacctttccca

SEQ ID NO: 104722 - DNA, 307 bp, Glycine max
  unsure (1)..(307): unsure at all n locations
  Clone ID: PAT_MRT3847_6557C.1
gnnttttgctagaagcaggacgagaagagaaacaagcaaacnacgaantaatccaattgagctacttactatagatttngatctcccagacagnggagtttcacnnnattgcccagtaccctttnacaggatcaaggaagagactcaanaaccaacannaggtgttgtncattgnngtanttgtttgtaactgtagcnacaggaagatggttggatagttggttntngtgaggctgtgnngaccatatctgtgttgagcnctctccntctgacaacctcggnacngncagntgnaanggcnangcct

SEQ ID NO: 104723 - DNA, 234 bp, Glycine max
  Clone ID: PAT_MRT3847_65580C.1
tttcctttcacgcgtacgactacgagcccggatgtgggtgattaaatggatcctacgctaataacccaagaacttgtactttcaatccagtgcgattgtagtcaccatgagtgccctaagtgacaaatggtcgtatggggaatctgggaaaaactcatggaactatgctcagactataaataactcactctttctatcggaggtggaattggtgctatgactgtttcttaaatc

SEQ ID NO: 104724 - DNA, 269 bp, Glycine max
  Clone ID: PAT_MRT3847_65581C.1
agaccagaggctgtgacacttttacattgctggaggtttgctgaaaaaggttatcccagggatcattcttggtccaaaacaccagccatctatgttaaagggggaatgacattccttaatagcactaaacgaaatattgctatgttaacgaaaaaaaactccctcctggctttaaattttattctaagaaggagcctttgatctttctcccttatcctactaccattcctcggggtgtctatcacccccactccaacttaatgttggcc

SEQ ID NO: 104725 - DNA, 498 bp, Glycine max
  unsure (1)..(498): unsure at all n locations
  Clone ID: PAT_MRT3847_65582C.1
ccccccccccccccccccctctctctttttttttttttttttttttttttttnnnttttaaatttgggaaatgaaatttccaattatttcctttctttttaaaaaagccccttttccccttgtattttaaaaaattcggttgaccccctccctttaagaacctgacccattgaagggaacttttttggcctttggtgaacggggggggaaaaaaatccaaatcctcttttccatgggggcaaaaaaaaaaaaaaaaactttggggggggttncnnnnccnnnnnnantttnnngggnnnttnnttttggggtttgnncccntttttttttctnntggaaaataatagtttttncgggctngggnaaatccttttgccaaaaaaggttttnagnttgatggactccctttaatttccaaaagatgctcgaaaaaagggggttttttaaaaactgaaattctttgatccattaatgaagaattctgaaatttttataaat

SEQ ID NO: 104726 - DNA, 660 bp, Glycine max
  Clone ID: PAT_MRT3847_65583C.1
tctttttttgccacaaactgatcggttcaattatataatagcacttatcctcttcacaatctctcacacaattgatagagcttcttttctttttgaaacttggtactagttttgtcattccttttgaatcaagctgcaaaattgaaaaatcccatgtgttttttgctttgtttgtagacacaatttgattttagttacttcactagcttaggacagcttgaagaatattagagcatctggaatttccatcttcacactctctcacacaacacacaaacattgctaaacagagtttctttctttttttttctttttgtaacttgctacaagttttctcaccccttttgaatcaagcttcaaaattgaaaaatccctttttttttcttttttgctttgtgtatagacacagttagactttagttacttctcactagctagttacaagatgaagaataatagagcatctgggattttgaagttgatagctgcactgaggtcaatggcaaagtcaaaatctttggctctaaagtccaaaacgaacgccatcaaggctcggttggttatattctcacttgtgatgaacaagaggtatgtgatgagcaccatttctgacaagttccaatctcttctggggcatcaccattcacatctcaaagaagt

SEQ ID NO: 104727 - DNA, 254 bp, Glycine max
  Clone ID: PAT_MRT3847_65584C.1
cagtgaggttgcgacaatcgtttgtgcaatcacgatatcaccggtctcaactctctcggctctgcggctcgtcggacgcaatgcgacgccctctccgtgcaagccgcgtgccgataaacccttaacggcacttactagcgcggggcggaggcagatgctgatttttcttacggcgacgaccgccttgaccgccagggaagccgcgtccgtagcgcacgacattccctcgttcgagatactgcatagtctgaaaa

SEQ ID NO: 104728 - DNA, 497 bp, Glycine max
  Clone ID: PAT_MRT3847_65585C.1
ggggaaaagaattctcaccttattcctttaacctttttttaaaatatcttatcccttgaaaccggcatatcaaggggccctccttaccgcaagcatgttttgttaaaaccaccctttgaacccctgtcagcccaactaacctttcggtatatataaaactcttttcaaactgcaaaatcccatttttcggggcccccccatttttagcccaaggttatggtcacttccctaattgaggggccctgtaaaaccccccatgtattgcttccatgagtcacttcccgcttcacggcccccccctgtcgccttttttccccccaaggccccccccatttcagctccctttggggggatgtttgcattccctttaccccaatccctacctcggggcccgacccatttgaatataattcccggtctttgggtaaagattgaactacttaatccttgggggaccaaattgttccaggccattgcttcttttagaggctgaaatt

SEQ ID NO: 104729 - DNA, 250 bp, Glycine max
  unsure (1)..(250): unsure at all n locations
  Clone ID: PAT_MRT3847_65586C.1
tttnnttnnnnggcgctatttttgggangggaacaagccctatttcggagattttcactactcatgaaactcgaccctagggaaacaatctgattactgtgcccctattaaaaaaaaaggtgtaagctcaatgtactggaaatgcccttattaagcccttctagctttgaagcaaacttattccttgagtctgcgccgccttaaaaaccaaaccctaatcttgctaggtcaactcctgtgttttaccgga

SEQ ID NO: 104730 - DNA, 186 bp, Glycine max
  Clone ID: PAT_MRT3847_65587C.1
ctgatgaaccacatcgaggaattgaagttcgcgtcgaaatcgctgcagcggcaatcgcgtaagtgcgaggaggaggagaaatcggacaagcagaagatgaagaaggcggtcacgaaaggctgcatggccggaacgcacatctacgcggcgaaagcgatccgtgagcgccacggagcagatgaacta

SEQ ID NO: 104731 - DNA, 223 bp, Glycine max
  Clone ID: PAT_MRT3847_65588C.1
gggaactgaaagctcatgcgttgccttggtactcaaccatacatcgacttactttgatgaaaaaagattcctgtcgaaatgatactttttcccgaattgtcgacaaaaaaattgaattctgcaggtcatggtgctgctgcagatcaaccacgtaacttttgttaatatgagtattgcaaaagaaacactggctgaatgcccctatgtgggcctgggcccctaa

SEQ ID NO: 104732 - DNA, 300 bp, Glycine max
  Clone ID: PAT_MRT3847_65589C.1
cacgcgtgcggtcttcaatcatatctcattccaagttatgaagatccctaccatactcatactctggggacttggggacatctacacggcactcctaccttcatccacctgttcaagtcgacggttgacatggaatgttacgatcctcaaaatggtgggaaacattttgtgttgccagtcatcaattcatcatatggtggaatcagattagccgtatctgtaatagaaaagatccccctcactgttttacaatctgtccatccgtttgttaacgagatttcatctattttttcaacccca

SEQ ID NO: 104733 - DNA, 170 bp, Glycine max
  unsure (1)..(170): unsure at all n locations
  Clone ID: PAT_MRT3847_6558C.1
tttatanttttcttttatgaggaaaaaatcaaggcaggcttttttcctaattcatcccgtccaaaacgcgcccaaacagccagagccagaattgcacttaacaacactagaaaagtggagctaaatagcaaggaattgggaccaatcaaatttctcgcacttcaaaccct

SEQ ID NO: 104734 - DNA, 607 bp, Glycine max
  Clone ID: PAT_MRT3847_65590C.1
tcataataggttggggatcttaattcaaggtttggatcagaattacaagagacaaaccaacatcccaatgatagaaattagaaacctaccattcctaccacactatcatccattaaacaaagtagacatttaggacaatttcaattccaaggacaaaagctagaaagcagatcacttttcaaaaaaactagctgccaacaacagaaagtgtcctaaaaacaaaaaacaaatccaccttagaatgaacttcccttcactttctcctccatgatggaacaaacagcacaaaagtccatcaatctcttcatactaatctttaaggttcgaacttatcatcgtctggccaccaccttgggcgaggaaaagttaccccatgagcctttgccacatccaacaaactgagatgatcatgattttcttcaacatcatcattgttctgtgagaaaactctcaacacatcaaaaacattccatttctcactattgttgccaccacgttccgttccagttgctgcttcattcttcgaacgacgactcttcagcattccagaagcttccacaaccccatcagcagtgcatgccactttcccagacagttattcttcact

SEQ ID NO: 104735 - DNA, 1721 bp, Glycine max
  Clone ID: PAT_MRT3847_65591C.1
ccagatggtctatcatcaaatgttatatattggatcagttgatggtcttttactctttttatttgtaaactttcatgaactggcgcagactgcctatccctgcagatatattaatatagtgagtgtcgctcgggtttctaaatgcaagttaaagatattcctatatcactatttaagtcattccatgatgtaccaatttaataaatgtagacgaaaccctatagcatgtttaccatttctctgaaatcctgatgatattttgcagtgcatgcgttcttaaacacaaaacattagccttctataagtattaaatgataagttgacggttgttggatcatgtgtaatgttaggacgtgatgatttgctttgaagcttctggttatattcagcattgtgaataaatcttttcttttggggcgccgttcctgtctctcctcacatttttcttctctcttctctctcctcggcgccccaccgcgcgacccctcctttccccctcccccttcgcctccgccgcgacacccaccttccccttccggacctccgtgcgacccccccccctccgccgtgttttagttgcaaagttttagagttggattggaagattgtgaacttagaaagatggtgaagttgactatgattgctcgtgttactgatggtcttcctctagctgaaggtctggatgatggtcgtgatcttaaagatgcggaattttacaaactgcaagtcaaggctttgtttaagaatctctcaagaggacattatgaagcatcaaggatgtcagttgaaactggcccttatgtttttcattatattatagaaggacgggtctgttacttgacaatgtgtgatcgtgcataccctaagaaactagcctttcaatatcttgaagagctcaggaacgagtttgagcgtgttaatgggtctcaaattgaaactgctgcaagaccttatgccttcattaagtttgatacatttatgcagaagacaaggaaactttaccaggatacacatactcagcgcaatattgcaaaattgaatgatgaactctatgaagttcaccagataatgactcggaatgtgcaggaagttcttggtgttggtgaacagttggaccaggtcagccaaatgtccagtcgcttatcatcagaatctcgcatatatgctgataaggctagagatttaaatcggcaggctttgattcggaagtgggcccctgttgctattgtttttggagttgtcttcgtacttttctggatcaaaaataaactatggtgatcgagctcagtatgacatttaaaacatggattgcgatgctgtggcttcttgcttttctcgcatgattgtccagatttgcacagattggtgggaaccctttatgcataagatgatgtcaaccttttcttgacaactttggtttagaaaaaacaaaaaagactatcctttgttacatctggatcagtctttctggaacaggaaccttttgacctttatagtaaggagccaggatatgagaaaactttatccccgtggggatgcatgtaggcatttcttctttatacttctcaattattttcaggattattgcgttaatgaattaaatatattacctcttggattttattgtttccgtttgagccgctgaatgagtataatgatagtgagtagtgtggaatacttgttctaaaacggggaaagtctatttcatttcatttttttac

SEQ ID NO: 104736 - DNA, 755 bp, Glycine max
  unsure (1)..(755): unsure at all n locations
  Clone ID: PAT_MRT3847_65592C.1
ctataagaagagactcacatgcccattcaccactgcacttctcttccacgcgtccgcgtttcaatttcatcatcgtgaagttctttgatcttccattcaagcaatgtctcaccaagccgaatcctccgactcgaaatcttggaagaaggatttttccactgcgattcttgaacggaagaaatcgccgaatcggttagtcgtggacgaagcggttaacgatgacaattcggtggttgccatgcaccctcaaacgttggaaaaactccaactttttcggggagacaccatcctcatcaaggggaagaaacggaaggacacggtttgcatagctcttgcagacgataattgtgaagaatcgaagataagaatgaataaagttgttaggtcgaatttgagggttcgtcttggagatgttgtttctgtgcatgcgtgccctgatgtcaagtatgggaagcgcgtccacattcttcccattgatgataccatcgaaggtgtcactggcaatctctttgatgcttacttgaaaccatatttcttggaggcttatcgtcctgtcagaagggggatttatttcttgtccgaggaggaatgagaggagtagagttcaaagtcattgaaactgatcctggggagtattggtgtggttgctccagacactgaaatattctgtgagggggaaacctgtgaaaagagaggacgaagaaagggctagatgaggttggctatgatgatgtggncnggtgtcaggaagcaat

SEQ ID NO: 104737 - DNA, 310 bp, Glycine max
  Clone ID: PAT_MRT3847_65593C.1
cgggataattgctatttattaaatactacaatttatattgcgaaaattaagaccgatattcacccctagatgcatcaaccataaaatgtattgcagaaccgtgagagagggtacttccagaagctccactgtgtaacccagccatcatcgatctttacatgtgaaaatcaaactatgcggtatgcacaacatatggctaatacagatatccggtggatatggaattgctcaccaaataccacacagataattacctcctagcatggagcataaaaaaagaggggcctaccaagtacgatcagcccattca

SEQ ID NO: 104738 - DNA, 308 bp, Glycine max
  Clone ID: PAT_MRT3847_65594C.1
tttaattcacagaacagttgaagtgaatggcataaaaacgatgggaggcacagagatagggagaagagggatcgtgagtcccgaagacctgagagagagaggagtactgattctgaagacaggtatgatagagacagggagaagcgcaaagataaagataaggatgtggaccgagaaagaagtcgagataagaaaagggaaagggataggacagacagagtaagggagaaagaaagagagagggaaagaaaagaagataaggagaggatcagagagagggaaagggaaagggaaaggagggatcatga

SEQ ID NO: 104739 - DNA, 1071 bp, Glycine max
  Clone ID: PAT_MRT3847_65595C.1
ttacacgaaaaactcgtggcaaacaacttctcttctctccgattcgggctactcatcttttcagacttcctctcttctcgcaacccaagctctccttcaatcacacgcctaatcatgcactccacttcatttctcctctgccggcaaaacgacatcgcacccgcaaccgccaccgtcgtcaaattctccggccaccgttctctgtttcgaactccttcggcaccgagattggctcgccggaattttctctccttcaaagcaggagagaggccaaagactcgccggttctgctcgacgtcaccggaatgatgtgcggcgcgtgcgtctcccgagtcaaaaacatcctctccgctgacgaccgagttgactcggtcgtggtcaacatgttgaccgagaccgccgccgtcaagctgcggcggatcgaggaggaaccggcgagcgtcgcggagagcctcgctctgagactgagcgattgcggatttccgacgaagaggagggcgtcgagctcgggagtgacggaaaacgtgaggaagtggaaggagttggtgaagaagaaggaggaattggtcgttaagagtcgaagccgcgtcgcgttcgcttggacattggtcgcattgtgctgcggatcgcacgcttcgcatattttccactccttggggattcacattgctcacggaccgcttatggagattcttcatagttcatacttgaaaggtggtttagctttggggtctctattgggaccaggacgagagttactctttgatggcctaaacgcatttaagaaggggtcgcctaatatgaactctctcgtgggatttggttctgtagctgctttcatcattagttcgatctcgctacttaaccccggcctggcatgggatgcatcattctttgatgaaccggtcatgcttcttggtttcgtgcttctgggacgctctctggaggaaaaggcaaggattcaggcatctagcgatatgaatgaactgctttcactgatatccactcagtcaagacttgtgattacttcaacagagggttcaccttctactgacactgtgctttgctctg

SEQ ID NO: 104740 - DNA, 1078 bp, Glycine max
  Clone ID: PAT_MRT3847_65596C.1
caggacgcgccagggcggctgctgcgtcttcagcctggggcggcggagcagggttcgtggaagcggaggcctccctggaggggaagtaggcgcaggaggtgggtgtcgggtcgacctgattcgtgggcgcagcccggctgcaactctacccgcagcttggaggtgcagcaacggcatctctcggcaccgcctggttcggttttcagcagctgccactgcgcttcagaccgcacttgcctctccgtcagggtttcccccgggtcccgcaccaccctgcctcccccctcgtggcgtggtcctagggcccccttctctctttgcaacgcctgtgggattcgacaaaggaaggcaagacgagccatggcagctgctgcggcttctgcatcgggaaatggaacagtaattgtggaagctaagaaatctgtgaagggacggaacaagttgcagaagaagaaagagaagaagacaagaactgagggtgcagcacagatgaaaaagaagcggaagcttggagttggatcagcaaaggcatctcaaagtagaaacaagtttggttttgaggatttgacgttgcgcttgagaaagaacttggctatgcatcaagttttccctcaggacgagaaggaggctgcgatccttctcatggctttatcttatggccttgttcattgatgaaccttaattaatagctagctagctagctagctagagctaccaccacttcacttaatttcagttcgttattaattaggttaacccacgcgtccgctgtcttatgactagctagtttttgttagattattattattgtgtgagatcaatggtttgagtacgttatatatgtgcgagaagagtatgtattgcagtactagtagtagttagtcaggaaatgggagggaaaataaagttacatgggtgtggggtgatcttatgtacttggtatgatattatgtctgatttgaacaagttgacgaccaaaaagtgtgggtctcttcttgatcttatgtacttttgtattaatcttttttttttatgtaaattttttaatatctttttttgtaaaaaaaaaaaaaaataa

SEQ ID NO: 104741 - DNA, 177 bp, Glycine max
  unsure (1)..(177): unsure at all n locations
  Clone ID: PAT_MRT3847_65597C.1
agatccactcttacaagtcaactaagtctcactctccacattcatttcacacaacatatgagcatgngataaggggatgtgctgtcactcgaagcagcaatgtactgcattatagagtcaagaagccccgctatatctcaaagagggacgctttccatctcaacgccgtaatggacg

SEQ ID NO: 104742 - DNA, 182 bp, Glycine max
  Clone ID: PAT_MRT3847_65598C.1
gaaatctctgatgatgcaaaccttttggcggattgtggatctaacaatcctgtggtagtaaaaattttacgaacccccatatgctttgcttccgggaatcatctgatgggtccttctgtcatacctctgtgcacaataattctgaatgctttgattggaatggacatcccaatatatgatca

SEQ ID NO: 104743 - DNA, 618 bp, Glycine max
  Clone ID: PAT_MRT3847_65599C.1
caaattctgtttatcctcctcgattccccgttcttcctctccatgctcgacgacgacgaaaccgttaacagagactcgcgtgctcaccgagtcgaagaagtgagtcagtctgactcggcggcgattctattctcctctggcaccacggggcgcgtgaagggcgtgctcctcacgcaccgcaacttcatcacgctgatcggagggttctatcacctcagaaacgtggcggatggtgaccctcacccggtgtcgctcttcacgctgccgctgttccacgtgttcgggttcttcatgctggtcagggccatcgccgtcggggagacgctcgtgttcatgcagaggttcgatttcgaagggatgctaaaggctgtggagaggtatggaatcacgtacatgccggtgtcgccgccgctcgtggtggcgctggcgaagtcggaactcgtgaagaagtatgatctcagctcgctacggtatttgggctgtggcggcgcgccgctcgggaaggaagtcgccgacgacttcagaggcaaattccctaacggggaaattgggcagggatatggtttgactgaaggtggaggacgggcagctagagtgttagggcctggtgagtctaag

SEQ ID NO: 104744 - DNA, 556 bp, Glycine max
  Clone ID: PAT_MRT3847_6559C.1
gggaaaacgggccggccccccaaaacccgaaattttaaaaaaaaaattttttaaattaaaacagccaaccgttttttgttctggctttcatcaaaaaacaaaaagaccaacaatttcctagggggccccggccccaaaaatttttccaaaaaaagggccagtttcgtttttagggggggggaaaacagccccccttttttataaaaggggggcgggagggcccccggggttttagggcaactggggaaggggcttaaggggagggccccccccaaaagccccccgctaaaaagggccccccctttggaacaaaaaatggcccccaaaaaggtggaaccaaggggaaagcttaaaaccttccccaccgggaaaaggtttcctaaaaggctccttaaagggggggggggtaaaaaatttgaaaacacccccttcgggaggagggggggtcacgttaaccccccggaaaaagaaaagcaaaaagcccagtttatgccccccccattggccaaaaaaaggggccctgaaaaaaaggcccacccagggggggaacgggaaa

SEQ ID NO: 104745 - DNA, 145 bp, Glycine max
  Clone ID: PAT_MRT3847_655C.1
aatggtgttctccaggactctattgtgcttaaaatcccaaaattcgtctgcgttaaataggaggatggggaaacctgactctccctgagggtactcccctgagtgttaaaagaatgtctcttaccattgggggaggagccgtagc

SEQ ID NO: 104746 - DNA, 330 bp, Glycine max
  unsure (1)..(330): unsure at all n locations
  Clone ID: PAT_MRT3847_65600C.1
cggaataaaacccgggttacgaggcacataaaggcggccgcccaaaaaaaaaaaanngggcaattagaaagatttgggggttaaccccccngacaaaagganaaaangggacccaaaancaagaaacaaccaagcacgaagacaagacagggcacacaccggcgcccaagcaaagaacaacgaagcaacaccaacacagcatgaaagagaacaagaacgggcacaggggggcacacccgccaaagacggccacccaaacagagggagaaaagggggcccacaagaacacaaactgaacaacagcgcaaagagcaacaacaaaaccccaaa

SEQ ID NO: 104747 - DNA, 189 bp, Glycine max
  Clone ID: PAT_MRT3847_65601C.1
aagatcaaaggagccttgcttccccattattacttctacacttttgccaacatcttaaaagaaggtacaactcacaacccttaaaccttgaaccccagaccacacaaaatttccccccaacactcattataccaattaccccccctggaccattccttttccattttttgatcctaaaaaacccaacca

SEQ ID NO: 104748 - DNA, 382 bp, Glycine max
  unsure (1)..(382): unsure at all n locations
  Clone ID: PAT_MRT3847_65602C.1
atttcccgtgacgacagctattagtcggcggccgccctccaaaaaancgggggaccctttacaaaggcaaggcgtgcaacacgaaaggacacacaagcgggacacaaanccaagncggagacacagagaaacaagcacggacaancaaagagcagaacaccagacnnacagaccggcgaacanganacgggagaacacgaaaggagcacaanacganacanaaaaacagacacaacacccnangagagangaaaaacnagacagcagccaaacacaaaancgaagcanacataagaaaaacacgcacacgacaaggggcagcgccaacngncaacgagaggcacgccggaaggaaagaaaaccacacaccacacaccacaca

SEQ ID NO: 104749 - DNA, 313 bp, Glycine max
  Clone ID: PAT_MRT3847_65603C.1
atattccacaacccttaatttccatttaccggcgccgggttacacgttaaaaaatatgagactactataacccagaatctacagtttatgaaaaacctattcaaattgtaggacagacacttgttgaacatgcactgcagtaacttggatcaaagacttggaaatgtttgacacaagacttattcaccactgaataatggctcacttacttataaggggcaccaaaccaacattttttagctgtgagagaagcgattagttttaacaaagcggttttctttctttgctaaacgtctgaatatttaaaaagtta

SEQ ID NO: 104750 - DNA, 453 bp, Glycine max
  Clone ID: PAT_MRT3847_65604C.1
acattaacatagtatgtatataataaaaagttatatatacataaatgagatgatgcatcataccatgtgaatgccacacgaacctaaaaaaaaatccaaatgcatccatagaccgatacttcgctgctggtatgctgctcgcaaccaaacaaaaaaaacaagacatcttctgtacgctcgcaaccaatacaaaactgaacatgctaggcttctcaaaatcggtgattacagagctatcaatcgaaagagaaaagctacactactcccagccctctgctttggtgctgtaatgctgctcctgtatagatgcacaatacaccaaccatacgctcctaatacgtccccatgaagggcttgcccggtacatactctgtgctgcccacgaaatacaatctttatgcatgccaatatcatatcgcataaatatataaaaactgaaatgtttggaagacc

SEQ ID NO: 104751 - DNA, 420 bp, Glycine max
  Clone ID: PAT_MRT3847_65605C.1
gactagttcgactatcgctgcaatgtccggtccgtcacagttccaaccaaaacacctgaaaaacgttagttgaactatgctacccacgccaaaaggtactacgcattccataaggctgtaagagcttaaccaaagggccaatagacaacacgcttctcgcttagaagggtgctgccagcgcgcgtgtggctatgtaacggatgcgagagactattaatacaagcagaacgaaaaacaacgcaagaagaaaaagcaaaaagaagggtgcaaaacacaaacgcaaccacaggggactgggtgagaagaggcactggcgtagagaacagggtactgcgaggtggagaggaaggctgggtgtaattagtgctggtgcatacagacactgggtgagagctaaagaaagtgagacgggtagaggtg

SEQ ID NO: 104752 - DNA, 263 bp, Glycine max
  Clone ID: PAT_MRT3847_65606C.1
tctcgagccgattcggctcgagagtaaaccacaaaaagcataactctttcagaaaaaagacaaagtctcaatcataaacttcaacaaatgacaatgagaatactaatttgtcaagtagaattgttattatgaagcctgggcagataggctttcaaaattttgaaactggaaacaaccttgcctcatcccaagatactcatgattctgtcaaatacaatggttctccagggagaggtagttcacatttttctcttacagagata

SEQ ID NO: 104753 - DNA, 1009 bp, Glycine max
  Clone ID: PAT_MRT3847_65607C.1
ccacgcgtccgtagggtggcttttctcctttccctgtcgtaactaaacctagttaaacaaactgcaaccttcacgctccaaacagaaatattcttcacttagtccaatgtagctataaacatcatcaatccttccttaaccaatttcactttcttcttcatcaatccattatatcttattccttcacgcttcttcttgtgcagtctccaccacttagatccttgagccagcaaacaagtcaaagcagtttggactgcaattgttgaagattccatctttatggaaatggttgaagagattgtctgtagttcttctccatcgttgatgtgcatcatccatctgtctcagatctgtctctctctgaggtggatgaatttttcgacgatcgtgattttcttgattaattgcaccataaggtctctgtcttaatggtgacatatttttattttattttaattcgtatacaattttttttaatagatcttagatagactttatgaaagtattcatcaaataagattatttcacatttggattcatattcatatgaaagaaagaatatgtacatgaaagaatttttccatgtttgtaaaacattcacataaaaatcttctttaatgattcaatgataatgtatttattttaatgattttgtattttttcgaatatattttcattacgtaaattatcaatacaactcaaatcattctaggcttagacttaagcattatttttatgaattttattatgacttatacaatatttatggtattttatgccattttttatgtttttttatcagtcagaaaaatatatcatgcttttgtgttctttgattcatggattgtattatatttaatttaattctattgatttggactttgcgaaaatatattatttgtgatgcggattaattaatattgtttatattaaatattattatgtatgtttgagattgattaataattataaaaaattaatattttcacttaattacatgttaattata

SEQ ID NO: 104754 - DNA, 708 bp, Glycine max
  Clone ID: PAT_MRT3847_65608C.1
acatgcctcttttcatttaatcttgacattttagtatgctagtgttcagattcattctatgctaatgtgtgcatggatggaatatggtatattaaactccttaagatagggatatgtggttttgtggcatgcacatttcgcaatgttaaattactggatttgttttatctttgtattatatgcatgcatgattgcagaattaaccttgaaatcacttataaaaagtagtttattgataagtttgtgaattgcgcaagaagaggaagaaatacaagcacataggcctacaagcaataaagagttggacttgccaaatcttacagggtcttgtttatctacatgaacatgatcatctagtaattcataggacctcaaatgtggtaacatttttgttaatggccatcttggacaagtgaaaattggtgacctgggtctagcagcaattctccatggttctgaacctgctcacagtgttataggtacccttctgtcgtcttctcgcagccgttatgaagaagaatacaatgaacttgttgatgtgtactcatttggcatgtgtgttctggaaatgcttacatctgattatccatatagtgaatgtgctaaccctgcacagatatacaagaaagtgacatcggggaagctaccggcatcatttttcaggattgaagacacagaagcaccaaggtttattggcaagtgtctaat

SEQ ID NO: 104755 - DNA, 685 bp, Glycine max
  unsure (1)..(685): unsure at all n locations
  Clone ID: PAT_MRT3847_65609C.1
aaaagatttcatctccctcactctataggcaccatgtctttgcgtgcaacacgcagcgtccgccaaaccatccccacggcagttgtggcgcctccggcgcgcaagctctgtgggatcgaatgggcaaggcgatcgaagcgcaaggcctcgacgatattggcttcgcgactgcgggctgccttggcttttgtaactctggtcctttgctggttgtctatcccgacggagtctggtatcgcgcgaccacgcctgaggatgtcgacgagatcgtcatatcccacctcaagcacggccaacgtgtcgaccggcttgtgatagtgctcaagcgaagctagaggcgtcgcttggcggccgcttgccgggttagctagcatggtcggctcgatgttggggggcggatcgtctgagattaaccgggcacttcgcggccaagattaggctgtcagcggcgtatcgccttcttatcaggcaaatgggaaaatggcttcggtcttaagcgtggcgaaacagacgtgtgatcatattctgagtcgacgtttgtgtaatgttactcacgtgctgcgcgattcgtaacttgcagcgcgagcaacgccagcggntccctctcttgcgagctgacgcgtcgatggcgcgtcagccggctttccgtgtcaggcnnagacnaaaangaaaaaaaacccctatg

SEQ ID NO: 104756 - DNA, 166 bp, Glycine max
  Clone ID: PAT_MRT3847_6560C.1
cacttccgacagtaacatgctacttaattatgtgacagtaaatgagaagctcccactcggagctatcaatgttgacaatgcatttgatgacccatatggccttatagaacaactacagcagcttctagcagttggcgtagacggggaaaaggataatgtatggtgg

SEQ ID NO: 104757 - DNA, 771 bp, Glycine max
  Clone ID: PAT_MRT3847_65610C.1
agcaaatagtgaagacaacattagaactgtgaatgattccaatacagcatctgatgcatcagaacataatggaataagccttgaccctgtaatttgtgtggacaaaaatgatgccttttcacctcataatgtcgatgtgcttcagaatgagggtgctgtatgtgaggatgcagagtgcttgaagccagctgttgttgagattggcacctcaaatgatatgcgtgatattgtgaaagaggtaaaatgtaaaggtccagagcaggatatgaattctgtctcaacatctgatgactgtttgggtgaaaagggaattttggacattcggtcaagtccatccttatcagacgggggagattgcgttccacaaagttcgcctcctactacgtctgtttgcaatgtttcgacatccgacagtagtaatatccttcacaatggaagttgtagccctgatgtacatttacaccagaaacaaactgtatgtggtcctgtcgatggtagtaaagattggggatgtggcaattcaacaatcaatatgtatgggtaagtcaactgaagcaggacgtgctgctttgttgtactttgaagcgatgcttgggacattgacaaggacaaaggaaagtattggtcgagcaacacgcatagctattgactgtgcaaagtttggtattgcagataaggtcatggaaattcttccccattgtcttgaaatggagtctagcgtgcatcggaggggggaaattggtttttcttggtgactctattgcacagttt

SEQ ID NO: 104758 - DNA, 387 bp, Glycine max
  Clone ID: PAT_MRT3847_65611C.1
aaaaacacaatatgccaccttacgggggataattttatatcagctccacaaattgataacaaacaggttgaactttaaggggccaatggaggttaaaacaaaccaattttattttgaagggtgtttacagaccctttacacattaaatttttttttaaaaggtttgggaaaatccaacattgaacattacaaaaaaattagctcctgtttaaaaccccccacgaagacgcaacaccaagggcaaagttgactctttttggatgttgaatacagggggggtccttccatcctttaactgtttgccaaaaaaaaaaaccctttgttggtccggggggattccttccttggccgggatcttcgcctctacattggaaagggggggggagc

SEQ ID NO: 104759 - DNA, 250 bp, Glycine max
  Clone ID: PAT_MRT3847_65612C.1
gtgactgtgtctcccgatggatcaatttgtgcttcgggtggtaaggacggtactgccaacctttgggacctaaacgatggcaagcgtctctatgcactcgtggctgatgatgtcattcacgcgctcgtgttctcacccaatcgctactggctatgtgctgccacgatcatcgggcattaagatctgggaccttgagtcgaagattatggtgcacgacctgcagccggacattgaagagcctaagggtcag

SEQ ID NO: 104760 - DNA, 443 bp, Glycine max
  Clone ID: PAT_MRT3847_65613C.1
tttattcggtttgaggttggtgcgttgatcagtgatttaataatgtggaaagatgtttcaaaatcgaccctttggtttggtttggggtgtctttgtttcttgtcttcttgcttcactaaaggggtcaactttagcattttctcggccatatcgcgattggcaattctcttgttgggtgtttcattcttctcaaactcagtttgtcaaagaaaccaggttgagaaaaggagttttgccaagctgaaagaagatgacattttacatctagcaaaattgattcttcctgcactaaattttgcaatttcaaagactagagaactgttttcaggagaaccgtgcatgaccctgaaagtggctcctttccttctactaggagcggagtatggtcatcttattacaatttggaggctttgtgccattggattttttgtcaacttcaatgt

SEQ ID NO: 104761 - DNA, 556 bp, Glycine max
  Clone ID: PAT_MRT3847_65614C.1
tgaaaagataacggaataattgtaatctaacgataacaaactgtaataacggattggatggtgttatactcccctatacagttggactgtgtggatgaagatatctaggaatcctatcttggacataagcagcctgaacaagctgcttagcagagcttttgaggatatctgcttattggtgttgggatttaatgtgaagtagttatagaaatctagagtaaacatgttgacagattaaatggcagtcagtatctgtgtttagagtgctgattgattatcatagaaaaccatgactatatatcagtaactaactcaaacgatctaagtagctactatagccataacaattcagtggtaacacacaccatggctcagtactcggtatttgctgaagagcgggacaccaagggttgctttttttttatttccaagagatcaatgcatccccaagaaaaatgcagaatcttgtggtctatttcttggtcacatggcagcttctcagtccacatctgctagtgcagataactttaaggaagaactggcttggagaaggaaa

SEQ ID NO: 104762 - DNA, 226 bp, Glycine max
  unsure (1)..(226): unsure at all n locations
  Clone ID: PAT_MRT3847_65616C.1
acttcctttctgctgcgngttcttnncactcgacaatgcanccanccncncaaccgcgaagacttctnccgcttcttcaaatccgccgtcgccggnttgaacgnaatcagtganagtgagaagaacggttcatcagcctcgtcagcngctatctcagtggcgaangcagnatgtggaatggagcangatccagacgctacggacgaatggttgtgccttagacatn

SEQ ID NO: 104763 - DNA, 513 bp, Glycine max
  Clone ID: PAT_MRT3847_65617C.1
ggaactaaaaaaaaataaacttcaggggggctgaaatttttttgggatacatagccttttgtttgggaaaggctatcaaaagacttcccaaaattatgggatccccattacaaatcatttcataaaggggggacaaaaggactaagctttgccctctttgggaaaaaatcttgggatttcaagggggggggttactatttcaaacaaaccaaaacccaatcccctaggaaaccccaaaaggacccgggcccaaaaaaaaaagggaaaggctaatcataagggccgaccaaacatatcctttggataaaacagttagcaggcaaaccttttttgagccgtttattaacacaaagcaacagttcctcagttttttacccgaattcgtggattgaaaaactgaaaaaaaaggacctcgaatttgcccaaggatcaaggaataaaaaacttttttatgaacagtttttacatgtctaaaggctgggtgggatatttctgctccgaacgtaagttaaa

SEQ ID NO: 104764 - DNA, 334 bp, Glycine max
  Clone ID: PAT_MRT3847_65618C.1
acatgaattttttggagcttacacatggaaaggataaattagtggtttcgaccgaacctatacattaactataaatttcattttagaagcctaaccaattgaggcaatgggtttgaaaaatcatacatattattaaagcgtgggaacagaatcctcccttggcaaaaacaagtgggttcaacatttgcccatagtgaacccagcattatgtgattgttggacaaaatggggccgctggatggattgcagagaatcctcgacacctgatgtaaagattggatcttctccacaacataccacacgggttggatttctgatttttaaccaacctatt

SEQ ID NO: 104765 - DNA, 784 bp, Glycine max
  Clone ID: PAT_MRT3847_65619C.1
ccacgccgtccgagaataaacaaaaagaaaaacccacatcaaacgttagcaaacggctcgaggccaggaggggagaatctctctctgattgtttgggtttgaagcttcccttctttcctctatgaacttcctcacaatcaaaacaaaaccaccacaaggtttcttttcttcctgtgcttgaactccacaaagccaaggaaggaaaacaaaccaaaccaatatcccttatatcccacttgttcaacctgtgcggtttatccttgaaatatggttcaaagaaaggtgcctagcaagcttggcatcgaagctgaacatgttaaatcagaaaagaggttggcaaactcgaagctatcttcatctcagcaccaagatggaaaaactagaggggctgatatgaagaagaaaatgaaaaaatcaaggtcaataaagctttctgatcttgaggctcttcaatcatcatcaccttcaaggagaagattgtcacaaccaggaaaaccactccctcttcatactccaacaactacagcatcaccacagaagcagcaacctttgttcagaacaacagatggttcacctaattacatgaagccaacaagcagttcacatgcaaaaaaggagcttttcccggtaagccacaggaacactcaacctggttctgattttaggagtcttcctagaaaattttccagtgattccaaagctgcatgtgctaagaagcctgcaaaagtcttgacaagaacatcctaatagtttgagtttggtgagaacattgaccaaaaccact

SEQ ID NO: 104766 - DNA, 229 bp, Glycine max
  Clone ID: PAT_MRT3847_6561C.1
atgggactgttcaacaaccttgacttggaggctgggcaggtggagctgagggtgaatccgcttgggatccgtaattgccagcgaggcccaacctgcaagtcaaggatatgggactgggcatcaacctagcccaaatgctgccaactatgcaccacaagctcaaccacactatggggtgatgtcaacctcactaacggatactaacgtcagtcaacctataggtgaatgc

SEQ ID NO: 104767 - DNA, 348 bp, Glycine max
  Clone ID: PAT_MRT3847_65620C.1
aattgccgggtcgaggagcttattaggcggccgccgtcctttttttttttttaacattaaaaatgtacactagacgttatcacctgctgaaaccgggatgaatatattgccgtggaagttcgttgaaaatatcctgacacaaatgtcatctagaagatcatacaaatgcggagggagagattccgttctcacttatgcatagtagaccgacaacattcaccggccatgtaggagcaaaaaaaattgttggggcacacggatgcaagataaagggcgctggcacacagcaatacaagtggaaaaacgctgtatgcccccgactaaaatgcattgactgacagtccctta

SEQ ID NO: 104768 - DNA, 302 bp, Glycine max
  Clone ID: PAT_MRT3847_65621C.1
acctgcttttccacccctcaaacctcaccgtacgggggggtcattaaataaattgcgggggggccaaaaacccacaatcgcgttcttgatacaggaaccgcaaggccaaaccgccaatgcatctgaccctatgattgctaggggagcgatgctgagtccctgccagcccgtgatcctccacaagctagacatacctccagcagaagacttccttgaacggggcaaaaaaggaactggagggtgcagcatcatctcttataaaaggtgttgcagctacaatcgataagtaagtggcaatgcac

SEQ ID NO: 104769 - DNA, 500 bp, Glycine max
  Clone ID: PAT_MRT3847_65622C.1
gtttgaccagatccacccagaccagtcaacagatgggtggacataccgaccctgggaacctgcatcttcaactttggctacaaagctctgtagggatgaagaagacaagggtaaattcaaggaaaatattttatttttcaccttctcacaaacgcctaaggtgacgaatatcatagaacgactatttgaacattgtggataccacgtacctgagtttataagcgatgaagatgcaattaaacggttggaaattttgctgcggaaaattgagggaagtccacttttgttggtcctggatgatgacaggcctggatcagaagccctcattgagagatttcaattgcagatgtctgattataaaatagaggagacttataggggtgcatttcctaaagtaggcaccccatatgtattaaaaccacttgctcatgaagatgcaatgaccctattccgacatcatgctctttttgaaaaaagcagattacatattcctgacaaag

SEQ ID NO: 104770 - DNA, 592 bp, Glycine max
  Clone ID: PAT_MRT3847_65623C.1
ggggattagaaatgaccctgtcattcttgatggttctggagttcagaacaataataattcggctcgagcaagtgataaaattggaatgtctgattcaaaaaataaaatcgatgaagatgagactaatcctatcagtgcaggtagattttgtgaaaccatgcagggtgagacatctgtggaaaatatagttcttcgaaggcatactaatcctgatgctgcagctagaaatgggaaatcactaccaccagtgtatttttatgccctagaaagtgatcagcctatactggatatattaaagccgtctatagtcattgtttaccatccagatatgacctttgttagggaaattgaagtctacaaagctgagaatccctcaaaaaggttgaaagtatattttattttctatgaagattcaagtgaggttcagaagtttgaagcaagtatacgtagagagaatggagcatttgaatctttaattaggcaaaaatctttgatgatgattccagttgaccaggtttgtttgaccgttgtctcctttccctcctatttctatttttatagatctcccccaaacgcgcgtacccggaaaagc

SEQ ID NO: 104771 - DNA, 409 bp, Glycine max
  unsure (1)..(409): unsure at all n locations
  Clone ID: PAT_MRT3847_65624C.1
ttcttantttttttttttttgctttaaactttttttggggattttttaatttttttggggttcttaaaatcaacccttggcaccactagcaaactaacatcatttgttttgtagcagagaaacaaaattgccaaaaaaaaacaaagtgcacaccccttaataaagcccccccggttgcccccgagaaaatagcgttcatctaaaactgaaagtatgccaaaacaattgtgggcaaaaccagggggcgaaccccacaataagggaacagccgccctaaatacaagccttttgaaacccttaagacaaccgcttaacaagcaaaaatgggggatcccccccccggacaaccaaaacggggggagaaacggggggtccaagagaccctcaacaagaggggggggcacacttg

SEQ ID NO: 104772 - DNA, 382 bp, Glycine max
  Clone ID: PAT_MRT3847_65625C.1
accactcgttcgcccacgcgtccgacaactccaactatatgtgcaactacttgtgcacgggaacctgtactacatgcttcgctgcacgctatcataccactaacatgaactaccacatgcactacgttattcactattgatgctactctaaagtcatccttaatattattatgatgcttatcactactcttatggacacttacttctacgccatttttcaaaacggactccacttctataggacgaatgctttcgttctcgtgaatgcaagtgcatatctcactatatgggtcacctatagcgaatgctatgaccgtctatgtacaacatgtatcctagataccctaacgtgctacccaacttattacccttcttaatcatc

SEQ ID NO: 104773 - DNA, 2066 bp, Glycine max
  Clone ID: PAT_MRT3847_65626C.1
tacggctgcgagaagacgacagaagggggtgtgtggctgtaaaacttctctagttggccctgacactgaaactctctctgtcacttcccattcccaaacgatgccgtacccgtggttaagcttaacccctaactcctccacacgccgtgaggatcgccgctagaggcagaggatccgacggcaatccgcaccttttggtgggtgtatgcggtttcagtttcagtttcagtgagagcgaaagagttaaaagctgctgggaaagcttcttgaaaagatgaatggtcctggtttgacaagagaaaatgttgctagttatttgcaggcttcaaatttatgctctatttatttctaatggatacacgagatcatagtaagagaatcacatgagctccaatatggaaaattaaaaacaacttatttgagaataatttatatgacaagaacaattgatacaacactatatattgcaacaaacatcaaaatcgatcaaatgaatgttggcttataaacgattcttcaagttctctaaaacctcggtagacatgttctgtttggttctgtggaagggctaacctccgcaattcagtcatatacctgtttgctgcacttgtgatcttgtcccgaattccttggctagcaatagtacgttccgatgagaatcctccacctagtattagggaatgcccagcggcactgctacccattctttgtgaatatacagacattgcccactctcgaagtaccactagaaccgatctcagcatacgtaatctaacacttgcggatggcaaaatagccccatttgataacaattggtcatatgcattcaatacaggttcagctgcacccttacaagcagaaacaagggctcttgcaacatcttcatctccaacagcttcaaccccagaatttaacctctccagtccagccttctctaagtgaagacaaataatgtcgagtggtaaaacagctccatcaccaggataaatgcggggcccgaccctctttagtactgagcaagcttcagcaataccccctcttgatatagcttgatctataagtctagcccatgtctctctgacaatgctgctgtcagtatcactggaaaaattggcaaagtacagcatctccaggcatatctcccagagcccaaagggaacagcatattcattatataactgggttatgctctttacatctgaagctagctctttagccttctctcgtgttgcatttgcaaaattagcatcagcagtagaacttccctcaggcactacaccattttcagcagaatctggtgtggcaggtaaaacatcagacctggaagccacagactctagttcttctttgatttttatctggaaccgaagaacagcaagcttcccttcaagcaaatctaggaacccactgtcaatggaacttcgaccagaacctactaacccatcactattagttgcatttttggcctgtagaactgcattacttaggtattgacacctcagttcaagagtaggaactccatcagtagaacgcctttcagctagtctaagcaacgcatgagctgcaagcatatgttggcgtttcaaaacataataccgtgccaaaagttcatagtacttgacttgattagatgacataggtgctcccgattgtcccactggagaaattgtggctgtcacagcacgaacctcgtgtagagaattacgaccggcactttgcaaaaatggcaacaggtcaggacccccatactctagcaattcattctcgagacctaaatcaatcatagcctggtaaagatactcgtggaaaattctgtcaggtgattggacacccagctgaacaatttgacatatatattttttccgagaggctggatcaagagcagattgtgaagcagttgatctaataggagtcccaaattccctctgtaaggtgtcacctttcagagaccgcaaagcaccgataattatttcataacactgcccccgctgagcaagtgcttgctctctgacagttgcatcaatttcatcattataagcatcgcctgcagggtcaatagcctgtgc

SEQ ID NO: 104774 - DNA, 198 bp, Glycine max
  Clone ID: PAT_MRT3847_65627C.1
ctctctcgtaatgcccggtaattggaccgtttagccccttcatcttctatgttgctgcgattgtcaatgcaactgcgtcaactaagcctctggcttccacagtttaaattacttagggcgattatccgttggaacttgatgccgccaccacagtctactcagctgctttggggactcggacagagcaggctattgcaa

SEQ ID NO: 104775 - DNA, 203 bp, Glycine max
  Clone ID: PAT_MRT3847_65628C.1
gcagtggggacttgatttcaagaatcttgcagtttcttactacttctaggagcacgatttcgctggggacagaaagtcactctctgaggtggccacagactccgtgaatcatttctctttgacactgtgaggttggtggctgaacactctcctctgagaggtaggactatgagggagatctaaactctgtctgtaactttctc

SEQ ID NO: 104776 - DNA, 277 bp, Glycine max
  unsure (1)..(277): unsure at all n locations
  Clone ID: PAT_MRT3847_65629C.1
tttttcccattatctatatccatggcggggcaaccgcgaggagggttgattctggtggggaccatctagattcacccattcacctgcaccaaaaactactcctacaagtacataaccnccgggaagttttacctcaacatctttcagctgcaactcaactacctagccaccgccagcgacatgggcaaagtcttcggctggtcctccagcctagctataatatactttcctaactgccttattttattcatacagtactacattgtattcatcaact

SEQ ID NO: 104777 - DNA, 887 bp, Glycine max
  Clone ID: PAT_MRT3847_6562C.1
ccgctcaggcggcgggcgggaatcgagaaaatggcaagaatatcaaattggtctcttgtcttcctcctcatgatctacactactacacatagcgcccagcctgtcaggcccaagcccaagcccaagcccaagcccaagcccgttcataaaatcctcctgcagcagcacccagtacccagccctctgcgtctcatccctctccgtctacgcctccagcatccaacaggaccctcaccaactggttcagacagcactctccctctccctgaaccgcacccaagccaccaaaaccttcgtggctaactgcaacaaattcagaggcctgaaacccagagagcacgctgcactcaaggactgcgccgaggaaatcagcgacagcgttgaccgcctcagccggtcgctgaaggagctcaagctatgtaaggttaagggtgaggacttcacgtggcacattagcaacgtggagacatgggtcagttctgctttgaccgatgagagcacttgcggcgatggattctccgggaaggcgctgaatgggaagatcaaggactctattagggctaggatgctcaatgttgctcaagttactagcaatgctctctcgcttattaaccactatgctgcacaacactagttgggaacaatgatcttggttgcttaatgctttacttttcttcttttatgtgctctatgtaattattatatatgtgagtctttatagatatatggatcttctcatgcttcttaaatgtgaaatatgacgttgtgtttttctatgattatattttcctctctacttctcattgatcgattatggacgaatgccaatcgaaattagtatatcaatgaagtcttctgtttacattaattatgattttgagatttag

SEQ ID NO: 104778 - DNA, 142 bp, Glycine max
  Clone ID: PAT_MRT3847_65630C.1
agtacaccttaatgatactatggcgactccgatcgacgtacggaagcttgacaggctgctgataccgtagcagcacgcggtaaagtacttcaccctgatctcgtctgcacctgagaaggatgtgttactgatttctgacgac

SEQ ID NO: 104779 - DNA, 437 bp, Glycine max
  Clone ID: PAT_MRT3847_65631C.1
tatttttttttttttatgagaggagtgtaaattgtcttattgattttgctagttatttacatacgtatatataatgtctactgctaatggatttatccaaatctcctaggaatatttgcataacagaattggttatggatgcatccttgcaggggacattcgaatctagcaaatccttccctgtgccagctcgactcctcttcatttgcattgtaatatcaggcataatccctgagatatgcgggcctggtaatctttctctttgcttttgctaattgcacaccctccttgctgattgattccccagattgcccttctgatgttgcatttgttgtcatactgctatcaacatttttgagtgcaacactgtacacattaaggctcttggagacatattaccctatttatgaacaactttcagaagtgtgtagtgcaag

SEQ ID NO: 104780 - DNA, 551 bp, Glycine max
  unsure (1)..(551): unsure at all n locations
  Clone ID: PAT_MRT3847_65632C.1
ccggaataacccgtcgacccacgcgtccggaagaactctcttagcaagcttctatcgtactactatccagtagctggcaggttaaggttgtcaaaaagtggtcgaatggaattggattgcaacgcaaagggagtgacattgcttgaagccgaaaccacaaacacatttgttgattatggagacgacttttcaccgtccgagttcaccgatgaactcattccaaaacttgatgatactcaacaacctatagaggagattcccctactgctggtgcaattaacaaggttccatagtggtggtgattgtgaaggccttgccattggagttcttctatctcatcctttgaccgatgccaccggcatcattgacttcatgaacagatgggcaaagctgtctcggggagaagaactagaccctaatgaaatcccgtttcttgatcgaacactactcaaattcccagacattntgttggagaaaccgagggaagtaaatactagagagattagtnaacttgacaccagtacacttcaacatattccaacatcaaaact

SEQ ID NO: 104781 - DNA, 317 bp, Glycine max
  unsure (1)..(317): unsure at all n locations
  Clone ID: PAT_MRT3847_65633C.1
cttgaagtgagggaaaggagaataaaccctgtcaaataaattttgaagaaccagtctatcagttgtagataccaagtggctaagaatataaatcatactggtaaagggggatacatgtatattgttttgtcactctctctctaacataactattttgttccacaagaaactgaatccagggtaaattgaagataaattgttgaagctcaatgtgttctaattctcaacttttccccttagcagcagtagcgacttcatatgtntgcgtacctatgcttacttgacaggtgcatagaatgagagagttctcaaatgat

SEQ ID NO: 104782 - DNA, 545 bp, Glycine max
  unsure (1)..(545): unsure at all n locations
  Clone ID: PAT_MRT3847_65634C.1
gggagtgatcatgcatcatgggaggtgtgcaagagatgcacgccgataanttttatatggttttttttttttttttataaccacctatgatgatattagaggactagtagtctagtaccatatatatttatatataacacccactagcttaaccttagatagctgcagcataattagcaaaatcacagaaacatgaagagaaaaaaaaagggagattctgagctctaatcatcatagctagaaattttgtccattatgttagccacgacttctttgctttctctcagaactttaatgctcctattgagtttgtcacgcttcattgaaactgaaggagcttcctccaacaacttctcaattccacctgcatatggagacatcatatccttcacaatctcatctcccagatccttgtcaacaaggttgaaaatgctgagttgcagatgcagggcggtgccgtcgatcagcctccgaagcacaatcttccagtatgctctcagtctcattttcaagtcaaatgcctgcggaagtaaagttgagtactg

SEQ ID NO: 104783 - DNA, 109 bp, Glycine max
  Clone ID: PAT_MRT3847_65635C.1
acccacgcgctctatccagccgtcagcaacgacgcactcgatgggaacgtcactacggcttctatacgacgacatacggacggtgaatcacctcatcacgatccttctc

SEQ ID NO: 104784 - DNA, 428 bp, Glycine max
  Clone ID: PAT_MRT3847_65636C.1
ctcttttttcatcctgcttgtatcctatttgtgacatcctcattaatttccccccatcatttcatagtattaatgcctgaatatttaaactttgaaagttgtggtatgacatcctcccccatttttactttaacatcagattcttcttgtctcttgcaataattgcaatgcatatattctgccttattcctagttaagtggaaatcatttgtttcaaaagtctgagtccaaaattcaagttgaatgttaactgcattcctaatttcttcaaccaaaattatatcatctgcaaagaagcatgcaattatacataattatgcgtaaaaattgaagtaaaagaagcaaaatatctaattttcattatggtttcattgtgcagtttgtgtttgaaagaataagatgtgttttaatgtgcattttatgaatgg

SEQ ID NO: 104785 - DNA, 510 bp, Glycine max
  unsure (1)..(510): unsure at all n locations
  Clone ID: PAT_MRT3847_65637C.1
ttttttttttttttaaagaaacaaatgaaaataaagcttgaataaaaagtaattcttctgatctctgaataatattacaataaattacacatttatggggggggggggggtggttaatatgcatgaattagcaaaacttgccaatggtatatgtcaattcaatttactctaaaattacaaatacaactgtataacacagcattagttgttttggttttcaagtcagaagtgtcactttgaaatttgaatacacgctatcagccagtttttgcaatagctccagctgcaaatagaagattccttcgacaaaactgangagagtaaactgaagcagatttggttggcaagcttttcaatgatctgagtctgntagtattcccacttttttcttcattccttggaacctttatacccgtagttacatcccaaaatttgactgngcaatctgcggatccagatgctagaagagaaccttcacaactgaaagcgagtgaccagacacntgaggtg

SEQ ID NO: 104786 - DNA, 203 bp, Glycine max
  Clone ID: PAT_MRT3847_65638C.1
ctagaatcgaagcgggtgatctctactcgactctcactagtacactctttcgtcttaataagccgagcatctttgcttactctactagctcacttcttgagtccatcttcaaaatggccggcggcgggcttcttgtcgttgcttaacccattgaaaatggctccggtggcaagaataggctactctcctttcattgcttgcat

SEQ ID NO: 104787 - DNA, 174 bp, Glycine max
  Clone ID: PAT_MRT3847_65639C.1
cacaatggaagatttctgtctccatgcaactcatcttcatctacctttcacactcatgaatagattgatgcatatatagccttatcttgcgtaagtatgctaaacggttcatttcaacccaagacgctaaggaaccaatttgagattgagagagaaacttcatcagatagctta

SEQ ID NO: 104788 - DNA, 750 bp, Glycine max
  Clone ID: PAT_MRT3847_6563C.1
cacttaaccaacagcaacacaaatcgtaattgatggctgtgcaagctttctatcacttagggtcaccgctgacgtcacagtcacactttccatcaccccctctccgactcacactcactgcttccgcgcccttcaagccccgacccctcgcttccatcggaatctcgccgctcccggagaggcgccggatgccggtggccggcgccgtggaggaaagccaagagagttccgaaccggaagcggaagcggatttggcatcggaactgaagaaggcgatggcggagaggaaagagaaagaagaggagaacatgttgagcggagtggcgcgtgagatcgacgagattgaatggcccgcgttcgggaaagtattgggtaccaccggcgttgtcctcagcgttatttttggttccagcgtcgttttgctcagcgtcaatgccgttttggccgagatttctgatcgggtttttgctggcaaagggatccaggatttcttcacctgaacctcgtgcaatttttgtgactaacctttcaattgctacaattttactcattatgttcccaaactgctttcaccaaaagcagctcctgctccttttctacgcattcatagaaatttttatttgcttgtctgtaacctataatgctagagttttgatcttattgcattatttttcaccaacaacaatgtaactagcttatgttaaaccccttgctgtaagaaatgttcacattatttacgttcctgcactg

SEQ ID NO: 104789 - DNA, 717 bp, Glycine max
  Clone ID: PAT_MRT3847_65640C.1
ccacgcgtccgcatgcagttgcaacttgaaacgcttgaaccttttatatttgcttgaaagaaatagctgatgagtcttagctatgttcttttttttttttttttttaaaaaaaaaaaacaaatctagtagtaaaaacattggatcctgtttctatttttaccatcatgttaaatcgaatttcttaaaattttcaatgtttgaaatcggtacgtcaaattttttcatcgtaaagaaaacaaaatagtgatcctatcttgctagactattcaaaagtaagtatcatatccccttgactcataaatactaagatccattccatattagtatagtaaatataatgaatttgattcacatacatattttttgagtcatttttttattcaatgcatatataattaaaacacataggtcatgtgattattgtaaacaatcctgggattttaaaaaaaaaatcaactattcatatttacttttataattcaaatttgtttgtcttactttcaaataaaaataatattcacgttaactagttgcataaatgcatcatgactaaagaaaagaaattaatgcatgaaatgaatcagtgtttattaaaatggtataaaaaatatgaatctcatgaaaaaataatttgggatgtcaataaccttggctcttctttaagaaaaagaccttaaaagagaattttgttggaggtgggtgggcaatactgaaat

SEQ ID NO: 104790 - DNA, 1047 bp, Glycine max
  Clone ID: PAT_MRT3847_65641C.1
ggctcgaggagcaaccaaggaacgcagggcaggggcataagtggtagttaacagcaagagagaggaaagcagaatgaagaaggcaagggcgttgagcgtggcagtgaacgtgttgtgtttggccatagtttgcagtgcgatcgagtcaccgcaacacacagtagtacactccgagtccgatttcgagatcaggctctatcgtacctctgtttggatgtccgctcctgccctcgacatttccttcgaaaaagccacctggaatggcttccacaggttgttccagttcacagaaggtgccaacttgaatttctctcgaattccaatgactattcccgtgttgacaaccgcggtccccggagcgggtcctcttcaatcccaaggctattacgttagtttgtacttacccgttaagttccaaggtgatcctccggtgcctcttccagaactcaatatcaagccctatgaattcagcagccactgcgttgcggttaggaagttctctggatttgccaaggatgagaggattgtcaaggaggctgaaaagctcgccacgagcctgagtaggtctccctgggctgagtccaagaccgggcgtggttactcgattgcgcagtacaatactccgatccggattgtcaagcgcaagaacgaggtgtgggtggacattgatgctcctgaattgggctgcaagtcggtcggtgttgccgcgcattgattgaagggagaatggcagggtgcattcctagttgtgattacctgccttcctgtacaggttctgtctaaatgtaacaatttgctctcttgatatgtttatattgtgtaactatcctggaacatcatagacttgttgtgtgtgtaaataataggattatgtgagcgtttccacagatcatgtcatggaaaagatattgactcacttgaaagtgtgcaaaataattggttcggattgaaccagattgtatctgaacctaattcaaattagttttatccgaactcattctaagaaaaaaggagtgtactattttataaaatcaattcagttaatcg

SEQ ID NO: 104791 - DNA, 1330 bp, Glycine max
  Clone ID: PAT_MRT3847_65642C.1
ccgaccttacagcacatcaatacatcttcaaatccacctctcatctctctcgccctctctctcacatcatcaccatttcacctatttttctctctctctctctctctctctcgcatcacaatttcatcaaaaccttttaagtcttcatagttttccttctttctttctttgtgaaaaaacaaaaagtccaaaccatggctcagaaaaccgagaaagaagaaaccgacttcaaggttcccgaaacgattacgctttgcgttaacaactgcggcgtcaccggaaaccctgctacgaataacatgtgtcagaagtgcttcaccgccttcaccacctctaccgccaccacgtccggcgccggaggtgccaattataaaaaacctctttttaagtttcttgcttctttctctctgaaagaaaattgaagtcctaaccagttggctcttttgttttatcgttctccatggctcagaaaaccgagaaagaagaaaccgacttcaaagttccggaaacgattacgctttgcgtcaacaactgcggcgtcaccggaaaccctgccacgaataacatgtgccagaagtgcttcactgcctctaccgccaccacttccggcgccggaggtgccggaatagcttctccggcgaccagatccggcgtctccgcgcgtcctcagaagagatcttttcctgaagagccctcgccggtggcggatcctccttcttcggaccagacgacgccgtcggaggcgaagcgcgtggtcaaccgctgctccggatgccggcggaaggtcggactcaccggattccggtgccggtgcggcgagctcttctgcgccgagcaccggtactccgaccgccacgactgcagctatgactacaaagccgccggaagagaagccatcgcgagggagaatccggtgatcagagctgcgaagatcgtcaaagtctgaaaaaaaacaaaaaagaaggaaaaaacccgaacggaacggaatctcaaaacgacgtcgttgacggttgacctttcgcgcgatcgggttcaggtcacgggtttcgctttttttcttttcagatttatatatagagagaagaaaaaaaaagtagcagataacaggtttgagagagagagagagagagtgtgaggttttagattgagagagagagcgagagagagagattgttgctgaaaagaagatgaagaagaatttatctgaatttctcttgtgttcatcgatcaaactctgatcgtttaatttttttttaaattttctcttctaattttatgtttaatttcttcctgatttgatcttgaaatgataaattattgttgtttacca

SEQ ID NO: 104792 - DNA, 795 bp, Glycine max
  unsure (1)..(795): unsure at all n locations
  Clone ID: PAT_MRT3847_65643C.1
ggctcgagcccacacacagaacaagaacaactacaggaagaaggagaaagaaaaaaaaaaattccgtgattgcattttcagaggagaggataacaattgaggtgtggtgaagaatttgttggagtgaggggggtcccacctacccttcacattcattatcttcttcatcagagtctctttttaatcctcttctctattctgcaccatcccaagtattgtcctttgccttggttccattgtttttgtgaatcttgagggtcttgtgtgggcctcttgctgcttaagttccaactagctagatctactttattctagctacacaccaattatatatacataagatttggagattctgcacaccaattatatacatcagaatctcttattatatagactcatcttccatctttttttttcttccatttttcaattccatttctaggtgctataaaacctgttatcagatcttggttgccccacttccatttcttgctgtgttgttgttcccctcctcataaggaccattgtataatacaaattcttcattcttcattgaatgacagctatttaggttgactacacggttgtgttgttgttctctcctctttattggaagccaataggagagagagagttagtattattaagctactgtgtgaggcttatttccatggttcattcgtgtggctgtctacctaatttgttctgatctaactntggcctaggaggcccaccattggtttttggtgggcttccattgacccaataaaaaacccatctttaaaaggggttttg

SEQ ID NO: 104793 - DNA, 1131 bp, Glycine max
  Clone ID: PAT_MRT3847_65644C.1
ccgctcgcggccggccgggccgcgatactacgccagaagagctcggccgtccccgcttcgacgtgaaaaaagagagaaaaacttttaccgacctcacagcacatcaatacatcttcaaattcccctcttctctctctcacatctcttcgtcctctctctcacatcacaatttcataaaaaacctctttttaagtttcttgcttctttctctctgaaagaaaattgaagtcctaaccagttggctcttttgttttatcgttctccatggctcagaaaaccgagaaagaagaaaccgacttcaaagttccggaaacgattacgctttgcgtcaacaactgcggcgtcaccggaaaccctgccacgaataacatgtgccagaagtgcttcactgcctctaccgccaccacttccggcgccggaggtgccggaatagcttctccggcgaccagatccggcgtctccgcgcgtcctcagaagagatcttttcctgaagagccctcgccggtggcggatcctccttcttcggaccagacgacgccgtcggaggcgaagcgcgtggtcaaccgctgctccggatgccggcggaaggtcggactcaccggattccggtgccggtgcggcgagctcttctgcgccgagcaccggtactccgaccgccacgactgcagctatgactacaaagccgccggaagagaagccatcgcgagggagaatccggtgatcagagctgcgaagatcgtcaaagtctgaaaaaagaaaaaagaaaaaaaaaaaaaaaaggaaaaacccgaacggaacggaatctcaaaacgacgtcgttgacggttgacgcggtttcgtgtttttttttttctcagatttatatatatagagaagaaggaaaaaaaaagtagcagatgacagatttaagagagagagagagagcgtgtgtgaggttttagattgagagagagagagagagagagagattgttgctgataaaagatgaagaagaatttatctgaatttctcttgtgtttcatcgatcaaactctgatcgttttttttatttatttaatttctcttctaatttttatgtttgatttcttcctgatttgatcttgaaatgataaattattgtgatttaccatt

SEQ ID NO: 104794 - DNA, 352 bp, Glycine max
  Clone ID: PAT_MRT3847_65645C.1
cgttttctttctctcgctgggaaatataaatcgcgcggatatttttcagaatgggtgcggccaatatatgtgcactaactcttttgtgggtagatttcaatttaccatgcccagttcatctgaatactctcaattttccttccataaacctgcgaggtcttcggaagaaataaagcttcttttagacttgtagcctgcttagtcaatacatcaaggagaatgtttgttttcgatatctttaccccccgtatgacatcataatatctcccctgtgacatattgtcaaaattctactactctttaactctttttcttaccttctgaaaacaacttctaactcaaaaaattcctt

SEQ ID NO: 104795 - DNA, 314 bp, Glycine max
  Clone ID: PAT_MRT3847_65646C.1
gaaaaccaaatcaaggctctctaaattaaacgggaaaaaagcatttttgaatagtagtctgtaagtatacttacacattaggcaaaccagaaaaaaaggaggtaaaagggaactcaaaagagggggttctgaaacaaatcaaattaaatcttgccaagaggaccgaactttggggggagttggggcccctttttgatggggaaaatgccaccggaggcaggtgccctgaagcatgcagggggggaaccacctcccaagaggaaaaacttgggtaagaatgcgctatttgggaagggagaaacaaatgtctcaaa

SEQ ID NO: 104796 - DNA, 720 bp, Glycine max
  unsure (1)..(720): unsure at all n locations
  Clone ID: PAT_MRT3847_65647C.1
cccgcgtccgcttctgagttctctcatttctcgtcttcactgagaaaaatccttctttgtgcatgctcctcgtttccatctaaaggggagagggggtgagtgagaaaaagtgagtgaggtttctagcttctactgttgagtaaacatgactatggaagagggcagggtagagaacgaggactacacacaagatggaactgtgaacattaaagggaaacctattcttagatccaaaagtggtggttggaaagcttgctcctttgttgttggtaaactttctctcttttcacacatgtcatcattttccttattaactataaagttattctctcaaacgtgtagtaatgctgttaacaaaccactcttgctagttaggagttagtatttagtaccctctccttcttccaccctttaaccagacacagacacagctcttagtttctttttcttgttccctagactgtggctgattcaagatttattagcttttttaatgcacatataatcttgtcccttttactttgaatttaataagtaatcattcaacgatattttgaatatcaaaaaaatcataaaccattttatcaagtctaagcacaggtttgctatatatataacttaacgatgatncttgagttggactaatggtcttgagtttcaagtcttgacttaagaagagtttgtttcacgtggtaattntatcagcttaaacatgattac

SEQ ID NO: 104797 - DNA, 142 bp, Glycine max
  Clone ID: PAT_MRT3847_65648C.1
ggctcgagatgctttttttgttatggtctttaatggtgataaccattactacgtcaacctcaacgatagcctcggcaacgcataggactaggacgacacatcttttggtggtcctccacgtatcatgcggagctaaatctat

SEQ ID NO: 104798 - DNA, 332 bp, Glycine max
  Clone ID: PAT_MRT3847_65649C.1
ataacaaactttttacgggaggggatcaaaaacagcaaatggacatgagtgacacaactagtaaccaagcagctcttgatagacatgtagcttaataataggtcaactttggcgacacgaaaaacatggcgagcatagcatatggggaggcacccctcttttggggtactattagtagaacattgcatgtgacttctgaaaaggtctactaactgctgacaacattgtatttagatagcccaggtgtactctagtctaaacaaaaccaggtctcaaatcctgattgtatgaccttcagaccgagatgaaaacacttaatgcccatggatact

SEQ ID NO: 104799 - DNA, 494 bp, Glycine max
  Clone ID: PAT_MRT3847_6564C.1
tacggctgcgagaagacgacagaaggggaaggacgaattgacatgtgcctattgaggagagcctcagatgatgaagagcattcttatatgacatagcgcattttattcatgctaaaagaacactctcagcgttggagctgactatatgagaattgatggcattaaagcttatgctgctacatatgtgactgcgaatatgatgctttatgctcgtgacatgtacctccacatacaccccatatgccactgatgcattttagtacacactgatctttgagaggttctttgctcagaactcacctatgctcactgatactggatgagcacgtgtggcatgtagcacatacaaagctggtgagtgggatgctgcttgctctacacccttgatacctgtggcctagcagcactttggagtgcacatttaaacctatgagaaccactacatcaggggttgatatactgataagatcatacctatggatgctgctcccctt

SEQ ID NO: 104800 - DNA, 164 bp, Glycine max
  Clone ID: PAT_MRT3847_65650C.1
ccggagccggaaactggagcgccttttggggggagggggattcaaacacaccttgcccgggggagctgatggtgatgagcaacggagagggcgtggcgtgcaaaaccgcatgctaagctatccacgatccacagtacttgtgtgatggcgcttacacgacacct

SEQ ID NO: 104801 - DNA, 142 bp, Glycine max
  unsure (1)..(142): unsure at all n locations
  Clone ID: PAT_MRT3847_65651C.1
ctcctgcgctcgcctaagccttagcaaccgtnggagaatgtggacattgactttcgtcctgtctttgctcataggctgataaaaaatgtggttaagcatgtgtcgaatgctttttaggatgtttaaagcctcttgagattga

SEQ ID NO: 104802 - DNA, 502 bp, Glycine max
  unsure (1)..(502): unsure at all n locations
  Clone ID: PAT_MRT3847_65652C.1
ggcnagtatctaggcangtgatgctatacaagaggtacgactacgtatgctcggtatcgtggttcggaattatgatagcgtctttctatacatatgaccggttgatgcaatggtactattacttacggactatagaatactctacaaaagtacacatgactcttgttttgttccactttttgctcacgtgtctctgccttctcttttctgacctatgttgaagaatggtgtcattacaaaaattgtgggcagagtgacataagagctggcccatctcgaaatggggttgtgatctcaagccagatggtgaatgtccttaaacgagccatcctgtcctggcccttttggttgtaaaattctgcagaacaaacctaggcctcactaattttttttacaacattgtggaccataactgtttctattgatcatctgatcttggatatcggtgcaaccaactacttgagtcattcttacgtcgctttgggcttcaacaatatgtctg

SEQ ID NO: 104803 - DNA, 478 bp, Glycine max
  Clone ID: PAT_MRT3847_65653C.1
agggcaaatttccaaatccaatcaataaaatttttcacgccacaaatttaaacttttttttccatctcctaaacataggggcaatagtaaggaagggcaaagtccataggaaattttttgtaaaaaaagaaagaaaacaacatttattatcctaaatcatatcacaatctggacatatagcctaacaaaacacaatggaacccgaatttgataaccgcaagcagatcaaatgaaactaaagaatcagaatcttttttcatccggcggctgaaaactttgggaaccaaaaatttggggaaatttgctttgaacaaaaacagccaaaccacatttggtggttttgaatccttcccataagggaaaggtaaccattcctgaaactggtttcttggcaaaaatgtttttgacagggcaaagcttttcgagctttctaacaacataatcgttggataggacacgccctttgttctcccctctt

SEQ ID NO: 104804 - DNA, 1938 bp, Glycine max
  Clone ID: PAT_MRT3847_65654C.1
gaaaatactataatatatatcattgtctgtcttttgttttgaaccattttctgcctataaatactcatacattcgacgtttttcaaaggtgagagccaccctttttctcttacaagctactagaacaccgtttgctttgctctcccttcattttgcaaaacctctgggtatctaactctgcagccatgggaagtttggaagttgaatcaacaaatggtcacacctcaagtcctcacaaaaaaactgaaaaatcggagagagagaggagaattgatgagtggcttccaattacttctaaaaggaatggaaaatggtggtattcagctttccacaatgttactgccatggttggagctggtgttctcggtcttccctatgccatgtcagagcttggatggggtccaggtgtaactatacttatcctctcatggatcatcaccctgtacacactatggcaaatggttgagatgcatgaaatggttccaggaaaacggtttgatagataccacgaactgggccagtatgcctttggtgaaaagctaggcctttatattgtggtgcctcaacagcttgtggttgaaattggggtgaacattgtgtacatggtcactgggggaacatcattgaagaagttccatgatactgtgtgttcaaactgcaaaaacatcaaattaacgtttttcattatgatctttgcctctgttcactttgtactgtcccatctccctgacttcaactccattactggtgtatccttggcagcagcagtcatgtccttaagttactctacaattgcttgggtagcttctgtacataagggtgttcaagaaaatgtacaatatggttacaaagctaagagtacttcagggacagtgtttaacttctttaatgcccttggcactgtggcttttgcctatgctgggcacaatgtggtgctagaaattcaagcaacaatcccatccacaccagagaagccatccaaggttcctatgtggagaggagtggttgttgcctacatagttgtggctatatgctacttccctgttgctcttattggctactggatgtttggcaatgaggttgattctgacatcctcatctctttggagaaaccaacttggcttattgcaatggctaacttgtttgttgttattcatgtaattggaagctatcagatttatgcaatgccagtgtttgacatgattgaaacggtgatggtcaagaaattgaatttcgaaccaagcagaatgcttcgttttgttgtacgtaatgtatatgtggcattcactatgttcattgctattaccttcccatttttcgatggtctcctaggattttttggagggtttgcttttgctccaacaacatactttctcccctgcatcatgtggcttgcaatccacaaaccaaagagatacagcttgtcttggttcattaactggatctgcattgtgcttggcctatgtttaatgattttatcacctattggaggattgaggacaatcataattaaagccaagacctacgaattttactcttgaactctttctcctcttgactcagtcatggaaagttaactatatggaaatgtgtgtgatttatcataggtcgctctttaatttactattgcaaaagattgcttgtatagtattgcgtgttggtggaaggggaaattattcccacggaatctcatgaaagaggaatttctagatgtttttttcctttggcattttcattataggaatgtaccattttctctttgctctacattattctcgtaatgatacctattttgtaaagcacatatagcatgtttggctttgattaatttttggaaacaagcaagatttgttttccttttaagcacattttgtataaacttttgatgtaaattattttgaacaaaataaatgaaaaatgagattttttttctgaata

SEQ ID NO: 104805 - DNA, 390 bp, Glycine max
  Clone ID: PAT_MRT3847_65655C.1
gggatttcttgggaatgaatacaagggcgcccacaccaggaagaagacactgaggggcaaacgccaagaccaagcaagcgacaaaagacgagccccgaaggccaggaccccaaaaggacgagaaaccgcgaggggggggccccccgaccccacggtgcggaaaagaggaacccggaggaaaagacacaagtatatactgaacaacccggagcgctaagcgtgctggctcaagcaaggaactgctgacgcgcggtcggccacaaaacactaaaccgacaggaccacagctactaggggcccatggcaaaggacgagaccggtgagctcacacaagggagggcactcaacgacgcgagaacaagacctcggaagggggagatggatcccaac

SEQ ID NO: 104806 - DNA, 274 bp, Glycine max
  Clone ID: PAT_MRT3847_65656C.1
ttacattttttttttaatgttcaataatttaatttttggttttttttgaatacacaaggggcacctgggggaaataaacacacaccggagcgggcccaagggcccacccggagagggataaaatggaacaaaaaagcgcacgctttaacaaataaaaccgaagactcatgcttgaaaaaaccaatccaacaaaatggaagaaacctgacatgaatgctatcatccaaagaaagaactgggcccaagctaaagacacaaaatgccaaccctgggg

SEQ ID NO: 104807 - DNA, 371 bp, Glycine max
  unsure (1)..(371): unsure at all n locations
  Clone ID: PAT_MRT3847_65657C.1
gacccacgcttccttccgctctttcttaccgnttctataagatttcagaaagggatgcaactgaataattaatagaagcctttttcatatcatcctactaaaatgaataccactaccttgttcgctatctttctactttgcgccttcacctcatacctaccttccgccaccgtccagtacgtgctctacgtggatgtcaatcctattcggaacggtttcatatactaccttcttccggcaataatatgaaactgtggcggaatataactagccgcactctctaaaaacacttgccctatcactgtaatgcaatcttccaatccaaaatttaaggtgttagaaattaactttgaattttcatacccctccta

SEQ ID NO: 104808 - DNA, 201 bp, Glycine max
  Clone ID: PAT_MRT3847_65658C.1
atatagatagataaacaaagataaaaggcaataatattaaagcacaagttcaaaaaaatcaaaaaaataaaaagaaacgagtgaaaaaaacccaaaagcacacagaaagagatgtaaactcacagaatccgatcctggtaaaaacgggtgaaggcaacgtataaagataacagagtaatccgttaagttgattgaagaatg

SEQ ID NO: 104809 - DNA, 504 bp, Glycine max
  Clone ID: PAT_MRT3847_65659C.1
ttttcggcggccgccctttttttttttttttaaaataagatttatccacctttgctttccattttgagttaataaaaccagtacataagaaactatttctttaacagttagaagatagtgatgcttccttgtcactgatgatctcatgcaatgacaagggccagattggggcgagagaaaaaatagaaactaaaatcaagttgaaaaatggcagaaagaaaagagtgacatatgcaataaagatacaaagcctagaagaaaatttaaagatttttaaactacaaggtacgtcatcagccccaagaagcccatctactaatatcttgcactcggaaagacacactttcagttcaattcattggattaccatatgctagtttaccccctaataacagatcacccgaagctatttaaacatcatgaagatccatcattggagaggacgatgaaaccccttttcttcccgcaccaccactttcaccattcccaccacccaaatgcaac

SEQ ID NO: 104810 - DNA, 365 bp, Glycine max
  Clone ID: PAT_MRT3847_6565C.1
cagcaccgaacgtaaggtggtgtcctgtgcatccccatgggtgcttatacatcctgaggaccgaatgcctctcacgcccgcacctacttatatacacatgatggctacaatgtgaacagtctatgctcgatggtacaatgatgacgatggacgacgtctaaatggctcctttaccatgcgcaaaggatctgatcttaggactcatcacggccgtcctagtccctaacccgacgcctgtctgatgactgatcaacctggtttcacagcaagagcgggtcatcgcgctcatttctactgacggatagacaaccagccctttttgaacttttactcgtgcgtttaacagcacacttaccactggtact

SEQ ID NO: 104811 - DNA, 392 bp, Glycine max
  unsure (1)..(392): unsure at all n locations
  Clone ID: PAT_MRT3847_65660C.1
aaccacaaacaacactactnaaagagaatcttttaattcggaaaggtcctctaaatctaatttacattttaaaaattcccttccaatacaatcaatcttccttaatttcaacaataccaccccatatatatttaacatcctatactctttccatatttatatatccttttctccataatcacattaaaatcatctcttctcctcccacctatttttattaacattcccctttttcccatttttttcccactccttaatatactcaaaaaatttataacttttcattacattttttttacctgtctccccttatctcaacccccaaatattatcccaatagaaagcctatctcccacccctttaaatcacactttccccctcctccaactttt

SEQ ID NO: 104812 - DNA, 1411 bp, Glycine max
  Clone ID: PAT_MRT3847_65661C.1
ccacgcgtccgcctcatagattgcaaacaccgacacgctcgtatataattgaaaacatcataaagaaaaaaaaatgaattcccttcgtctcagttttttctgtgtggtggtagttcttggagcattaccctacttctcatatgcacaactagatccctcgttttacgctagcacatgttcaaatttgagttcaatcgtacgtgaggtgctcacaaatgtttccctgtctgatccccgcatgcctgccagtctcatcaggctccactttcacgactgttttgttcaaggttgtgatgcatcaattctgttgaaccaaacggatgagatcgatagtgagcaaactgcttttccaaatgacaactccataagagggttggatgttgtgaacgagatcaagaccaggttggaaaatgcttgtcctggcatagtttcttgtgctgatattcttgctcttgcagctgaaatatcttctgagctggctggtggtcctgtttgggaagttccactgggaagaagggatggtttttcagcaaatcaaacacttgctaatgaaaatcttccagctcctagtcttagcattgatcaacttatatccgcatttgctaatcaaggcctcaacattactgatctagttgcactttcaggtgctcatacaattggtagagctcaatgcaagtttggcgttgatcgatcctacgattacaatggcaccggcaatccagatcctactctcaacacaacttacttacaatcattgcaagtaatatgtcccgatggtggacctggctctgatctcaccaatttggacttaaccactcctgaaacgttggactcaagttactactccaatcttcaactgcaaaatgccttgcttccgggtgtccttgcccttctcagcgctttcgttactgaccttgctcttttctttgaaagcttcacggcgtccctgacttttttcggcgacatcggtgcgccatcggggtctcaaggggccagccgtgcgctgcgtacggctgcggatggagattctcccgcactttgtaattttgtgaacggaaattcttctgctcttaccaccgaaggatcttcacaagatggcatggttagctcaatgtaaaataaatggacaaaggttatatatgctggaaaatgttggggttaaaggtgtcaataaagagttctgtatatgcatatatatatgccatgtgcatgtggtgaaccgttataaactgtattgtactttgtattctatacacctagctttgtattataccctgccgtgtggacaaactatatactactaaataattgctgtcacaagcaatcatgaactccatactgccttaaatttcaatatgtattaatgaagttgagttaaaagtatcacttcaataaaagggcccctgtttcc

SEQ ID NO: 104813 - DNA, 162 bp, Glycine max
  Clone ID: PAT_MRT3847_65662C.1
gccgaaccaagccttccgacaacgactgaaggggggtgggggaaggaaaaaacaagaggagttgccgcctttaaaatgccaaacttttggaaaaccttgaccgggaagacttttacccttccaggacagagcagcgacccccttggcgatggcaagggcaag

SEQ ID NO: 104814 - DNA, 373 bp, Glycine max
  Clone ID: PAT_MRT3847_65663C.1
gattactctataaaatatattaagaagacagttcctattgaaaatcaaagtgtgtgacgagtaaatcattattttgttaaatatttatttttgtaaatcctgaatcatcatcattgtcattatcatcgacttagtcttgcttgtgtagtgacacttttaatttcaacatgaaagggacagtatgaatgtaacgtcttgcaaatccaccacgtataattatgtttcattattatccattcattattatccattagaccatttgccaaacaactgtacttaaacaatataagtatgtaatatatatatataagggaatttaaaatattggttccaaattttttgaataaacatcataatgtgaaatatttattat

SEQ ID NO: 104815 - DNA, 520 bp, Glycine max
  Clone ID: PAT_MRT3847_65664C.1
gcaaagatggtgaatatatcctaataattgagaccacaacttgtagagtattaaggtattggctagaaacaccaaaaactggaaccttggaagtctttgctgatctaccaggtttcccagacaacatcaaacggagtccaagaggaggattttgggtgggaatttactcaagaagagaaaaaattatccaatggattctatcatatccttggattggaaaagttttgcttaggcttcctttggacatcccaaaagcttattcatatttggctaagctaaaaaggagtaatggaatggcaattagactaagtgagcagggtgatatattagaaattgttaacgaaaaaaatgggagcatagggaggtctattagtgaagtggaggaaagagatgggatattatgggtgggatccatagatgcaccttttgttggtaagtataatattcatgttgtagaagggcaagtcaaacggatttgaagatttttttatatataaattttagtgtttttcaacacacc

SEQ ID NO: 104816 - DNA, 457 bp, Glycine max
  Clone ID: PAT_MRT3847_65665C.1
cacattgtgatctattttccttttcctttttacttctgtcgctctatctggtggaaattgaacaacgaccatatggcggttccatattgcagttttttgagcgaacttagcgagttctaggagtccctcactgtcatggtccatgtcgaattaacgctccgaacaggttctgaggaggggcatgcgatggtagacctacgtgtgcaccaagctcatattaggcaccagccttctattcttaaggtgctacaagtcaccggccagagagtcacagagcagcagttgctcgatgatgatggggcctattatgttcgcgtgcttgatcgcgttttgcgtgacattttaagggaagataccgaggagtctgaactgtgacatgtagatgaaatgcttgctgcgaaccctaggagagcatgagtgttgtctgacagtgcccttgctgatgaagatgcttatg

SEQ ID NO: 104817 - DNA, 406 bp, Glycine max
  unsure (1)..(406): unsure at all n locations
  Clone ID: PAT_MRT3847_65666C.1
cgtttataaaccaccagtttacaagcgggtggtaaattttatctcanaaaacatccatggaaatccacgcacaggattaaaatggcgtaggcgacgagtcacaaacactttatcacaatgagaagcgaatggggaagctcgacaagcccaatccattttactacgacccaaacattgaccactggaagatctagaagttctacccttcatcgaacgaccgcggcatgctcaaagtgagctccttcttcactctctttcctcagtaccgccaaaagtacctccaataagcttatcccatggtcaaatcctctctcaaaaaatttcccgttgcttgcgaactcaacctccttgaacattctattacagtatcaacaaccataaagactacgcatccctattttatcat

SEQ ID NO: 104818 - DNA, 187 bp, Glycine max
  Clone ID: PAT_MRT3847_65667C.1
tgacgagcacactgagcgtgcaacgcacattcaagctgattccagatacaatggtctaattagcaccgcaaaggcaacaggcatccctcgaatgagccaaaccttcaagcattccacaacacttgctagagacacgggaaccaacaagaacattaacaacgtctagaacataagcacacaccattag

SEQ ID NO: 104819 - DNA, 1053 bp, Glycine max
  Clone ID: PAT_MRT3847_65668C.1
ttttttaaaactaataaatttaactgagtattttaaataaattaagaaaccggatagaatattgaacgatattattgttttacttctcctttcatcccttatccaaaaactccctttataaccacaacgtctatatatagagtcttccaacattgcttattgacacaactgaacaagatagataagccttccacagcctcacaaaaatgaagaacactacctcgttcgctctctttctactttgtgccttcttcacctcatacctaccttcagccaccggtgcttttgtgcttgacagtgatggaaaccctcttgaaaatggtggcacatactatgtgccagcaccaaataactgcggtggaatagaatacactacatcaggaaacgaaacttgccctatcactgttgtgcaacatcacgacccaacctgtaaggggtttccgataacgatttcgtccccggcccgaatccgttacatctccgaaggccttaatgtgaacatagggttcactttcagaccccctccgtgtgccccctcttctttgtggactgttctcaaggatcaatctgaacacccagacccctacgaaggagtaatattgcctgttaaacttaataatgaggacaacagcaacaatacagttcccggttggtttaaaattcagaaacttcccttggactttattacaacctactacattgtgttctgtccacttgaccaaagcccatgttggagtgttggctctaatttcgaccaatacggaaacaggcgtttggtggtggctcagtttgcgcggcgccaagacatagagtttcagaaactttcatacgcatcaagatcaactcattcttctgcatgaagaagtaccacttaattgccctcaagaatcatgtactttctcctagtgagtgatcttgtgtaaggctaaataaatgcttcattttgtaataaattattctatggctaaataaattaatcaaagcttattatgtccccagcgtagagtagtatataaactgtatatagtttttgattgaaaaaaaaaaaaaaaa

SEQ ID NO: 104820 - DNA, 584 bp, Glycine max
  Clone ID: PAT_MRT3847_65669C.1
ctcccctggcttgggcccaccgcccccgacacgcctccccaccatctatgtcgcgatttcccgcaccaagaaagcggtgacgtttccgttctccggggcgacgaggctgatgaaggaggtggctttgatgcacaaacgtgaatctttcaaggaagggccttaagatctcttttttggcagctgaacccctcctgtgacgacatcgtaagctagagcagaaacaaaaatatgcagtgtggaaagccgccgaaataagaaaagctttgaaagaaggaaggaagtccagtgctggcccccctgatggttgcagattttggtttatctgcacagttaacaagagctatatgaaggagaaaggtaaacatatttaattaatgataatattaattagtgcacttcattttggctggatatgctaattgtttgataactacagacctttggaggaacaccattttggatggctcctgaggttattcaaaattcagaaggaccaataatttatttattttaataaatttttagaataaaagcttgtatttttatattttattttttctatttttatatatttgcacccactt

SEQ ID NO: 104821 - DNA, 550 bp, Glycine max
  Clone ID: PAT_MRT3847_6566C.1
agccatatgatggaatcagggtcgacgagctgactagctcagctaggtcggctgtctttttttttttttatgtatctatataatacaattgaacttacgatatcatcaaatctatgtatcatacgttatttcttttagtgaagagggaaccgatgcgtgacataatatctataggtaagatatcatatcgtatgatagtgatcatatatagcagagtcgatatctctatgaacatgatctaaagagctatttgacccctacttgtcctgagatatggtggaatttattcgtaggaacttacccatgcctacttcaatgtggacgggtatccggacgaatcttgggggagggggccttgcgatttggagctcacacagatcgagcttcactgattgagagacttgtgactacccactagaaacactgatccaatccatactgacgccccgggaagcacaagaccgtggttattagaccaagctttaggagccgcgtttacaactgggacactattcaagacggtcactgagatagcccttaatgctaaaac

SEQ ID NO: 104822 - DNA, 1285 bp, Glycine max
  unsure (1)..(1285): unsure at all n locations
  Clone ID: PAT_MRT3847_65670C.1
tcgatgggtggcttnntgaaccattctggntgtnntagatggtatnngtgtttgggggatnngatgacaccatnntttcttcccttcagaatgttggtnncaaaactcttgtggctttgaaccattctggtgttagatggtatgtgtttggggatgatgacaccattttcttccctcagaatttggtcaaaactctttccaaatatgatcataggctttggtactacgttgggtcgtactcagagatttatgagggctcccaggtttttggttttggaatggcttttggtggaggtggttttgccatcagttcctctctagcacaagtcctagccaaggtttttgattcatgcatacaaaggtattctcatctatatggaagtgatgccagggtgtactcttgcataacagaactaggtgtgggattaacacatgaaccaggttttcatcaggttgatttgaggggagatatatttggcctattggctgcacatccattaactcccttggtgtccctacatcacccagatcacactgatcctatctttcctaacatgacaactacaaaatctctgcaacatttatttgaagccgttaatgttgattccgagaggatcctacaacaaacagtttgttatgaaaggaggttttcatggacaatttcagtgtcatggggctatggtgttcaagtgttccagaacaacatgcttttgccagatgttctaagagtggaaaaaacattcaagcaatggaaggaaggaaatgttttggcaggaatatatactttcaatacaagagaacttcacccagaccaatgtaaacgacccaccattttctatctagataaagtgtcttctggcaaagatggcatcataagcagttacaggaaatattctcaaaattgctcatacaaggaaccaatgaagaaattggaggtgatcaaagtgtttacaaataagttataccttgacaataaacagattccaagaaggcactgttgtgatgtgttgccctctaacgctggtgactcaatggaaattgcaatcagagaatgcaaatatgaagaaatgatttacatgcactagaacatatactttaaatctctttcaccttgctcaagcagcaggtatccttgatgagtgttgctactaggtagtgtatatagaaagcaagagattgtgtaagaaaattcccaatataaatttgaactttcatatatctaagatagcaatttacagaagcataaaagaatgcttctatcgaaaaacctcttgtgtattccaaa

SEQ ID NO: 104823 - DNA, 946 bp, Glycine max
  Clone ID: PAT_MRT3847_65671C.1
gcagttctctagaggattctattcggtgaaatagaatacgaactacgaggaagacaccgagcgacaaagatcgacgatgatggacgaaaccgaagaattagaaccgttgtttgattacagccgggttcagcctctgaaccccatcgacctcgatgatgatcttgatgattacgaggatgtgatttgcgttgatagtaaaaagaggaagaattcccaggctgttgggaatgagaagactaatgggaaaagagtaacagtggtggacattgaggatgatgattggttacctcctccaccaaagatcgcaagtaatgcacagaagacgattgacgaggactcaactttgaaaaaattgagattaaagaagcaggaacttgcatcgtttgccgaatcagcaaaagaattgttaaaagatgtcgaagagtcttcaaaattggaaattgataattcattgcagtcttccgtggttggtgtagatgagaaaagtacagagcattctgaaagagcaaagattggtgcaaagattgtcatttccgttggagacaaggatggaacaaagcagattggatgacaagtttgtaaaggattgtcaaaacatatcgcagagaaaatcaagtgtaacctgaaacagatagtattgatcctttgatggtgataaaataagttcgtctgaaacccctgctagccttgggatggaagacgatgatgatattgaagttcatgtcaaatcaagttgatcgaggtcttcaatcatggattcatggagcagctcctgacatttcgggggggcgtttgggagttacatataccctaagaggttttttttttttttgagcatctttattacaagaaaaacaatgccagttcataatgtatttgcaatagtgggcccaactgtacaacacttttttttttttttaagaattgtctagtattgctctttttg

SEQ ID NO: 104824 - DNA, 656 bp, Glycine max
  Clone ID: PAT_MRT3847_65672C.1
gagaagaacaagaacaagaacaccaagaaaaggggtgtgaagatgatgttgttgttgttgttgttgagaggaacaagaacaacaacattgaaagagttcaaagggctgtgagggaaatggacaatatcactgtcaatgctggatttgatgcagagaaggtttggaaggagctctatcagatcggtcatatggattttgggagggtttctagttcctcacatgatgattaattattttggagagccaatacacaatgatgaaagattgctcttgctcaactggtaaattttaatcttaggatttttaggatttaaaatttagggtttttttttttggattaaacataatttttagtctctataaatattaaatattcaattttagtctcttcaaaataatattgtctctttcttaattttttatttgaggatgagtcctgaggcaaaaaaaatgttttgccttggtgaccggtgcggtttaggttgaatatgaaaatagtctttttatgtatgtaaaaagacttcatacaattattctttccttacctttgtgaaacgagaagctttagatgtgaaggtatgttagttttagtttttttttttttttctaatcttttatttataaaaatatattaggtgtactcctgtgtttcacaa

SEQ ID NO: 104825 - DNA, 403 bp, Glycine max
  Clone ID: PAT_MRT3847_65673C.1
cccacgcgtccggatacacatatctagaatcttggtactcgatatgaatggcggtgatctggttcttgctacaattgtggtagcatggcaattccaagcgtacgatatgttgcctctgcgaatgaacactgtctatgatgcccgtactccgcaggtgaaatgcgcagattctacgctatgctactcatactcacaatatacttagctaagagaccatgacacattagtgctgtgaattcccccaggtatacgctaattgcagagaacatatatcagactcccaaacaggtaacctacaagcttacttttatgccacagaccttgaagtccatgctcttgtacacttatgtgttcaatatctatggccccttactctgtaatatttcatacttcatgatacatg

SEQ ID NO: 104826 - DNA, 711 bp, Glycine max
  Clone ID: PAT_MRT3847_65674C.1
gtttattttcatgtattaggcttgcgaagagtaaaaaaaagtgagtttgttctgagatacaatatagctctgtttgcaggtcatgccattggggcaaatcctgcaattcctagaatgtttccaaatatgtttccactggttataagtcagagaaagtcacatacagaaggctgattgcagtcatgaaattgtctcttgacaagtctgcccaaggagaaagaatttctgacataagcaagaatggtcatattgcttcctacaggtgaaggagttaaatttgtcatttttgtgccccatagatttgttttagctcatccgattagcggtccaagttgtgaattggtggtattcgtttgagtccaatccactttgcaaaaaaataacttattactattagtttgagtttgccagcagttccttgaagatttaagtttgttctcatctatgtgctctcttacgtttcaccttttctgtggatttttgttataattgcttgacattatgcaggtcaagtccctaggttcaccaaattttgtttatctttttaacacataacattgagtgaaatactgaatgaattagtcacggtggtgattagtttaacgcaaacttttaatatggtaaaacttaaacgggcaatttttttattccggagggcagtaatactcgtcaattgaaatttaatcaaaaggtcttggtctggggaaaaca

SEQ ID NO: 104827 - DNA, 341 bp, Glycine max
  unsure (1)..(341): unsure at all n locations
  Clone ID: PAT_MRT3847_65675C.1
tacatattatttgattgaaatgttaaattttaaaaaataaaaaagtaaatcttgacggaattcaaaagttttgccgtattatatagcttttgatatacatatatacaaattcttaacaacaagcatttccctttcaaaacatggttttagcatctctaatctctaatgcatacattgtaatgatgaaattcacgagagacattagaatgcgagaatttgagccacgacacgtgcgcatttgcggtgtcatcggaagggaaacggtgtgtgcttgagaagcgtgtgaagaggacaggggaaagaagcttacacgtgcangacttcggagatagaagttgaaa

SEQ ID NO: 104828 - DNA, 1649 bp, Glycine max
  Clone ID: PAT_MRT3847_65676C.1
aattcggctcgagaaaaagcctccaaagttgtggttcacactaaagatccatcttatccagaaaagatgattaaatttgcagttatggatagcaccaccggaagcttatcaacaaagacagggataagttctctgagcaacattagtggtgaaactgaaaactctcatgtaattgaggatagaaacattgccatctccattcaagatctacgcaaggtcaccaataactttgcttcagaaaatgagctaggccatggtgggtttggaactgtttacaagggtgagctagaaaatggtaaaaaaatagcagtgaagagaatggaatgtggagctgttagcagtagagcactggaggagtttcaagctgaaatagctgttctttccaaggtccggcaccggcatttggtatccctactaggctattccattgaaggaaatgaaagaattttggtttatgaatatatgcctatgggtgctctaagcaggcatctttttcattggaaaaacttgaaattggagccattgtcgctgtctcagaggcttacaatagcccttgatgttgctagagcgatggaataccttcatggtcttgcacgccaaaccttcatccatcgcgacctcaagtcttctaatattctactgggggatgattttcacgcaaaagtttctgattttggcctggtgaaacttgccccggatggccagaagtctgtggcaacaaagcttgcaggaacatttggttatcttgcccctgaatatgcagtgatggggaaaatcaccactaaagttgacgttttcagctacggtgtggtcttgatggaacttctgactggactaatggctcttgacgagagccggtcggaggaaagtcgatacctagctgaatggttttggcaaattaaatccagcaaagaaacacttatggcagccattgacccagctcttgaagcaagtgaagaggcttttgagagcatttctattgtggctgaactcgctggacactgcacttccagggatgcaagtcacaggcctgatatgagtcatgcagtcagtgtgctatccgcattagtggagaaatggcgacctgttgatgaagaatttgattatggctctggcattgacttcagtcaaccacttcctcagttgctgaaagattggaaggaatcagaaggcaaagaatcaagctatacaagtgcacacagtgaaggaagcataccagctaggcctactggttttgcagactcttttacctctgctgatgcaagatgatctggaggtaactccagtgcaatttgtggaacttgttactttgtcttaccaataaaattcactttatattggctatttctgtgttggcagcaaaagggtataatttatttgtttccaagtctttgtctttggacttttagagaatacaggtatggagatgtagataaagaaacattatttttattctttttatgtttgtgtctatatacaaattccaaaatctaaagtaacgaatcttggctacaaggtacgttaataatatttatcaataatgctacatgtgctattcatgttatacgtgttatccatgttgtacaggccaattattgtattaaaaatgtttgtcaatagcataaattacaaatgtactaccaagtacc

SEQ ID NO: 104829 - DNA, 399 bp, Glycine max
  Clone ID: PAT_MRT3847_65677C.1
tttccctatttctaaggtcagagaaacatgctagaacaccagattgcatttatatatattttaccttttgtaccttattttataattacccttatgtttagttgaatttcatcaaaaccctaagaatctaagttgttggcatatagatattgagtcttagatgtttaagtggtttttaccttttgtatcttattttacaattacccttatgtttagctgaattttatcaaataatgtttatttagtatctgacaaaacatacaaaagggtcccacattccgttgtgagacacatcagaattgatggtgcatgtagttacaaatcaagtagagagaacggagcctcctttaatttacccggttatatattggtagtagtgagctgtttgtggacactgca

SEQ ID NO: 104830 - DNA, 180 bp, Glycine max
  Clone ID: PAT_MRT3847_65678C.1
gcccagcggagctaggattcatacttgtaactcttccgtactaaggtgctctcgagtccattcaattcttctgacgccagaatacaggctcagatccaggccactggctactatgaaatcgtctcatcaagagctaatgagacagcccatatagattatcgagcacaagcacgcataaag

SEQ ID NO: 104831 - DNA, 627 bp, Glycine max
  unsure (1)..(627): unsure at all n locations
  Clone ID: PAT_MRT3847_65679C.1
ctctcttctgccagaganacagacggggggaaacacgccaatggctgctactgctccttggttttttagttgttgtgttgttgtcttcaactccacacagttccctcacttctcttccctttgaccatgcgtccgcaaccttcctcgcctttgcctccgtttcgtgagtccactcttcttcgattctagcgtgactgagatggctggaggtgttattcagcagatattgaggaggaaactccaccctcggtttactaactctcccttgttgtcacccatcgtagcaaaaaaagatgatgctggctctactggcagtcagtccttaagagcacttgcattaattggagctggtttgtcaggtcttttcagtttttcaacaatggcagcagctgatgaagctgaacatggcctggcatgtccaagctatccatggcctcacaagggaattcttagttcatatgatcacgcttcgattcgtcgtggtcatcaagtttatacagaagtctgtgcttcctgccattctatgtctttgatatcgtatcgtgatctggatggtgttgcttatacagaagaagaggtaaaggctatggcagctgagatgaggtggttgatggccctacgatgagg

SEQ ID NO: 104832 - DNA, 501 bp, Glycine max
  Clone ID: PAT_MRT3847_6567C.1
tgctttgtaacagctcaactcaccagatgaatgatttaacatgatttacaacaatcaaactctgcagaatgcttttttatattttcatgtaaacaattacaatatataagaataatttctagaatttcaaagagaacacatttccaaggaaatcttcctgtataacccaccgattgaatgcaaatccaacagaggtttgattaactccatttttttttccactgcaaacagctttgaaaccatcggtcttttatatcagtagttgcaaacaatcacagtttacttggtgccaacttaaagtggaattaaacaagtaatatattgttcatatatagggtacgagaaagtagtaaattagtttagatgctttctttctttgaataataacaaaggaaaccaaaatcatgtgaaaagaacaatagattgatgtagttggagcattttataggtcctaaatatttgaatattgaaaaacagagctgaaactgctgatctcatctt

SEQ ID NO: 104833 - DNA, 172 bp, Glycine max
  Clone ID: PAT_MRT3847_65680C.1
ataccctttttttttcttttgaagaacaaagaagagccataaagcgggcagggaaatacagtccaagcattgagaccccccacaagaaagggcggaacctctgtgaagtggtgggatccacatacacaaagagggtggtattggagaaaccaaggacagaaggacagtgaga

SEQ ID NO: 104834 - DNA, 1513 bp, Glycine max
  Clone ID: PAT_MRT3847_65681C.1
acggctgcgagaagacgacagaaggggggaaacacgcgaatggctgctactgctccttggttttttagttgttgtgttgttgtcttcaactccacacagttccctcacttctcttccctttgaccattcaaccttcctcgcctttgcctccgtttccgtgactgagatggctggaggtgttattcagcagatattgaggaggaaactccaccctcggtttactaactctcccttgttgtcacccatcgtagcaaaaaaagatgatgctggctctactggcagtcagtccttaagagcacttgcattaattggagctggtttgtcaggtcttttcagtttttcaacaatggcagcagctgatgaagctgaacatggcctggcatgtccaagctatccatggcctcacaaaggaattcttagttcatatgatcacgcttcgattcgtcgtggtcatcaagtttatacagaagtctgtgcttcctgccattctatgtctttgatatcgtatcgtgatttggttggtgttgcttatacagaagaagaggtaaaggctatggcagctgagattgaggtggttgatggccctaacgatgagggtgagatgtttacacgccctggtaaactcagcgatcgttttcctcagccatatgcaaatgaagcagctgctaggtttgctaatggaggagcttatcctccagatctaagtcttattaccaaagcccgtcacaatggtcagaactatgtttttgcccttctaactggttatcgtgaccccacctgctggtgtttcaataagagagggacttcattataatccttactttcctggtggagcaattgccatgcctaaaatgcttaatgatggtgctgtggaatatgaagatggtactcctgctacagaagctcagatggggaaggatgttgtgtcattcttaacttgggccgccgaacccgagatggaagagagaaaactgatgggatttaaatggatatttgtactgtcattggcactacttcaggctgcctattaccgccgcttgaggtggtcagttctaaagtctcgcaagctggttcttgatgttgtcaactagctctgcctcgagtttcattttcacttgaacaaagtttactgttggcaataatttgtcagatgattaagttgtttcatcatttcaaattctttcagctaagttaatgtttaatggaacaacaactagaagagtgttataattttgtttgagataaaaaaaaatgttccatgcacgtgatgcgtttgctttttctcatcatccatctcggacctctgtattgttgcattttccgagagctgttcctgtttcataaactattgaattttgtggaacttgcctatcattatgttggtcgttattcaagaaaaaagaatagataatatgcccacgtggacattagagaaaaaagaggaacaagccaaacaaaaaaaaaaaaaaaaaaaaaaaaaaaaaaaaaaaaaaaaaaaaaaaaaaagaaaaaa

SEQ ID NO: 104835 - DNA, 937 bp, Glycine max
  Clone ID: PAT_MRT3847_65682C.1
cacaaaggagcggctgggggaatcattcaccgtgatgtaaagtccacaaacatattgcttgatgagaaccgaatcggctcgattgctgattttggcctttcaaggtcaggtcctcttgatactcaatcctatgtcagcactggtgttaaaggcacttttgggtatcttgatcctgagtatttcaggtcacaacagctgacagaaaaatctgatgtatattcatttggggtggttcttttggaagtgttgtgtgcaagagcagtgattgacccatcacttccaagagaccagataaacttggctgagtggggaatgctttgcaaaaacaaggagatactccaagaaataattgatccttccatcaaggaccaaatagatcaaaactcactcaggaaatttagtgacacggtagagaaatgcttgcaagaagatggttctgataggccaagcatgggtgatgtgttgtgggacttggagtatgcgctgcagcttcagagaggtgcaaatgcaatacaaagagagccttacgaggatagttctagtagtgtttctgcatcacttcaattgcccaatgttaggcgccttccttcactctccacactaagtgaagcagatgactccattgtgatgggtgatgagtccgatagtgctgtggattctgttttctcccagttgaaaattgatgatgccaggtagagtatcgagcacttcaaggcacagtcatctattctgaaatgcattgagaagctgctagctgcttgtatgataccgtgcttagctttttcatccttgtttttgtctcttttttttcctagtttttgttgtctgtctattctggttgaaaaacagttatgaaggcaattgtaaaaccattgatgattaatcatttcctattcttgcaatagattttttataatagttccattacaaaaaaaaa

SEQ ID NO: 104836 - DNA, 420 bp, Glycine max
  Clone ID: PAT_MRT3847_65683C.1
ggaaatactaagaaacactctacttacggtgaaggggaactaacttttacaccatacacatttgtttcccactatccaaaaaaaaaaacacccccccaacccgaaaaaagaaaagaatgaatttctacccctactttaccccttatcttaacccctttaaaagtagaaaaattttaaaaactacttaaattcaagcccaatgaccaccccggggaactgaaacaccagggggttttgttctttacacaactatggcttcttttatcattggcaggttttggagaacctttttccctatatgatccactgcaccacccggaggggttgggcccatacccccgggatggcccttatcatatacaaagatgggctgcacccgatccatattttgggggaacctgcctttctgctctttagaaa

SEQ ID NO: 104837 - DNA, 798 bp, Glycine max
  unsure (1)..(798): unsure at all n locations
  Clone ID: PAT_MRT3847_65684C.1
cgaattcgagctcggtacccggggatcctctagagtcgacctgcagaattgttcttcttttacaacatggagggccagctttctgcactcttatccctatatattcttttactgttgtcttgttcctgttaacatcctccttacgtccacaccactgttcattgtctcggtaaccccaaattcaagtgtcttaatctttaaggttccatcgattttcttgatcactagaacccccataacatttacattgtgcatggtctctttccacatcagtgaaaatattttaacttctcataatggcttgtgcccttaatacagaaacgccaaagggtatcaaaataatctactttaattgtttgaacatgatagcaagttattatgaactcctgtacctatctgtcttcaattcggatgataaaaaaatcccaaacggtgtgaaacccacctttgatatgttgaaccttggtagatctcttcactacagaaattttcaaagctctaattaaatttgccttagtggacatagatatgttgatatgagtgtggatgtttttatgggggggcatggtctgggataagtcacatgtaataaagtgtgattaattgatgccaaagggaaaaaaggatcgaccagttatcttgtacctcaaactacagctcatgacanagagcaattgcaggttggcatgagcncaccttgtaaccacttttgcaggaatataaaacatgccaaaattcaaggttaaatgctcccaaattataacccttacgatcctacacaccaatcagcaatgcttt

SEQ ID NO: 104838 - DNA, 613 bp, Glycine max
  Clone ID: PAT_MRT3847_65685C.1
caaatcgccaaatgagctacacctccaggctaaaataatgaattggtctaaatagttatttaaaacacttaccgaaaaaaaaaaacgcctattctttaagggtgttgtttaatccgttgttcaaaccttagcatattttgttataggattaggtgtggaatagtcgagggtagagtggaaagtaagaagaaatcagcatattaaataacaaattgaatacacaagaaaaataaatgaatgaatcaacgggtggctcttttaagggatcaaagaaaaaaggaaggaaagaaccaaatatttcaccctttaaataaaaagaacgagtcaacggatagttgggtggactattgaaaaatctgtgtgaaatcagctagcagctattggagaaacattgtatgaatgtatatatctaagtcaaaaaaagaaaaacaattacgagttaaatgtcaacaatattgaattttggttggatcttcacccattttctgtgacttgtccctaaataattttaattcatgtcagggtggacaaaaatgccgacggaagaatcacccaagaagaagttcaagagattatcgccttaagcgctttcgctaataagctgtaaaaatac

SEQ ID NO: 104839 - DNA, 468 bp, Glycine max
  Clone ID: PAT_MRT3847_65686C.1
cgttcttgttcctatactcatatatatatgagcctacgcaaactcacttgtgagctctgtgcccaggcccagcatacccgcctttgtgtgcttctttagaaaagatacattaatgacgatctcccatggtgaaatccagcagcggagcttgagcgggagtacactagtatgacgtctgtccgtgtcaccgcggcgttaacactctgaatgaggacttagacgacgtactttcttctcctgaatgtgaagatccaactagagtgcctctattcctccttatggccattttcgagacccacgatcgtgtgattcatgggtcgactatacattgacacggtagcactggcgctggccctgcatcctgtccaacatgctgatctacaatgccgatctggagctgaacgaccgcgagaccatgctgattgcttatcataacaagcgcgcttacatacatgacatctatcagct

SEQ ID NO: 104840 - DNA, 169 bp, Glycine max
  Clone ID: PAT_MRT3847_65687C.1
gctaccaaggttaagagtaattttagcacggtagaggataacggctactagtgatgtagctatttccatcatactcgcacttttggtggatatgacacaatcatcaactgcgatcgatcacaacatgatcagaattactaggcagatagctattcgacactacttccct

SEQ ID NO: 104841 - DNA, 419 bp, Glycine max
  unsure (1)..(419): unsure at all n locations
  Clone ID: PAT_MRT3847_65688C.1
gtgntttcttggttctactttctttatgtaccaattcggtttctttcccaccgaaaatgtggcgcgggagcggcctgctgttgtttttaggaagacttacacacaagaagaattccgagacttgtgctgtagaagcgcaaaccgagctcggctaaaaaaactaccgataatgcgtgggggagaaaacccccccctcccgttgaagaatatttttgacgtgtgccacaaaaacccccgcaaaatcattgtggccaccgacacaggtgaccttctgtgcctccccgggcttgcgggggcccttcgaattttttgggacccccacgagagtccctcttacagaccgcacaacgtttgtaatcattcaatacacaaaatgcgcgggaacccctagactcccctgattggggcataattttttt

SEQ ID NO: 104842 - DNA, 378 bp, Glycine max
  Clone ID: PAT_MRT3847_65689C.1
gcgaaatgggacatttcatagtgatagtatcgctcttcctagggcgccagtcacttgtttgttagacggggaccccttaactatacctataaaccggatcatcgcataattgaactatacccgagctactaacctacgcctcgcttctgataatctaaacctaaccagctattgcaaccagattcaggcgtcgctggagatgtattatctcggcgtgaactatcgtgaagcataacagaccagaccagataggtggctgtaaagcaatctgaatgtgcctacaaccgaagacgggaaggaaagaaagaaacaaaggtcccggcatccaactgtgaactgatgagggacacgggccatctcacagaaggcactgtgatg

SEQ ID NO: 104843 - DNA, 187 bp, Glycine max
  Clone ID: PAT_MRT3847_6568C.1
aaatgtattcgaaaggaaaaaagcagaaggtagagggggggacataaatatggaacgaattatgtgatgataggtaacgagggggctttttgtgttccatgctcggagcgggagaggggggaaagtggggatgtgtggatacagaaacgcccactcagcttctggatagagaagctggaggggacct

SEQ ID NO: 104844 - DNA, 136 bp, Glycine max
  Clone ID: PAT_MRT3847_65690C.1
ttccggttccagaagaccaccgaaggggagcttcacagattcatagctagagatagactgcatggtgaatacgatcaaatgtatcaaatgctgagaagacgacagaggggtccggttgcaaaaagaccacagaagg

SEQ ID NO: 104845 - DNA, 380 bp, Glycine max
  Clone ID: PAT_MRT3847_65691C.1
cccacgcgtccgacaagtagttgagaactaagaagaaggaaatggcttcctcaatgatctggtccgcagctgttaccaccgtcaaccgtgccggtgccggcatggttgctccattcaccgggcctaaaatcattgcttggtttcccaacagggaggcccaccattgcctttacttcaatggttggcaccgttggaggagtccattgcttgcaggtttggccaccaattgccaggaagaagttcgggactctttcctacttgccagacctggatgatgcccaattggcaaaggaggtcgaataccttctaaggaagggatggattcctcgcttggaattcgagttggagcacggtttcgtgtaccgtgagcacaacaggtc

SEQ ID NO: 104846 - DNA, 263 bp, Glycine max
  Clone ID: PAT_MRT3847_65692C.1
cacaaagtcacaatggacctcctatatctcttctgcaccggagccctgctcgcccgccgcccgtactggttcgaaggcggtataggccccatccaaccaaaaggccaaccccccaaccatcttttcggcgggttcattttcggccagaaaagtcaagaccacttccaacaagaccggtccttctttcggcgcccaaaagagatccagaccgccgacaaaattcccgactttttcgacaccttctacaaactagtcacagacat

SEQ ID NO: 104847 - DNA, 1634 bp, Glycine max
  unsure (1)..(1634): unsure at all n locations
  Clone ID: PAT_MRT3847_65693C.1
ctgcggagagagagagagagagagacaagaaaactgtagaaagagtaagaaggatttggaattgagaatttccatggcggcggcgacgaacttgttagcaacactgggggatctggagagggactccttcgtggctcttctttcgaagctgatcgctgaatcgaagtacgtccagaacaacccgccggagctcattccccaagaggacagagtggtgaagcacgtcttggacgttctgttaccgttcagcaccaccaccggcggtggacccttgctcgtaaaccacgtcacctaccacgccggcagagggaacctcatcgtggagtaccccggcaccgttcccggcaaaatcctctcgttcgtcggatgccacatggacgtcgtgaccgccaatcccaacgattgggatttcgatccattttcgttgagcgttgacggtgataagcttcggggtcgtggaactactgactgtttgggacacgtggcgcttgtcacggaactcatgaggaagctcggggagaccaagcccaatttgaagtcaagtgttgttgctgtttttatcgccaatgaagagaattctgcgataactggtgttggtgtggatgcacttgtcaaagatggcctcctcaataaactcaaggatggccctctgtattggattgacacggcggataaacaaccatgcgttgggactggtggtatgataccttggaaacttcacgtcaccgggaggctctttcatagtggattagctcataaagctataaatgcgctagagctagccatggatgctctaaaggaaatccagttgcgattttactcagacttcccacctcatcctcaggaacaggtttatgggtttgcaaccccttcaaccctgaagccaacccaatggagttatccaggaggtggaatcaatcaaattccaggggaatgtacaatttcaggagatgtcagattaactccattctacaatgtaaaggatgttatgaaaaagctgcaagaatacgtggacgatattaatgagagtgcacagaagctagaatctaggggtccagtttcaaaatatgtcctacctgatgaaaacataagaggaagacttactttatcttttgatgaggcactgtctggagttgcttgtgatcttaattctagaggttttcatgttttatgcaaagcaactgaagaagtagttgggtatgtaaagccttactctattactgggagtttgcctctcattcgggaactacaggaagaaggttttgatgttcaaacttctggctacggcctaatggctacttaccatgcccagaatgagtactgcctctttacggatatgtcccaaggatatcgggtcttcgcgagaatcatctctcaattggaagagtgagaatagcagaggaactaataattctggtgtctcgtgggctatgaagatgttcgtgttcagatatatgaacataatttctgttatattgtgtagagggttcggtattactgacttttcttcagcatgataggcgaaactagttttttccacataaatttctccggggaaaagtacgtttttgataccatgaaaatttaatgctcctttcactttccgacaatcgaccactccccccgccgcccng

SEQ ID NO: 104848 - DNA, 435 bp, Glycine max
  Clone ID: PAT_MRT3847_65694C.1
tttccgttgctccaaagggaagtctaagggttcaagaattcctagaaaaggctgcagatggactagttgaaggaggaaagaaagagattttcacaccaatgtatttctttttggctcggaagcctgaatcaagtgactactaaggtggtgtagcaagttgctactgtattgaggagttattgggattcaaggacgggagcttgtaaaatttatattgtctttggccttgccaaagtgagtcctgctgatttgagtttcttttctacatttacattaccaagacctcagtttgcatcttgttattttccaaagaaaatttagcctcctgtttcattgcatatcattgaatttcttatttaattaggaagtaattttatgtttacatgattagtaaaaaaattaatttaaaattcagattggtacaagagtaataat

SEQ ID NO: 104849 - DNA, 391 bp, Glycine max
  Clone ID: PAT_MRT3847_65695C.1
acggtcaaattaattgcggcgctgtcttcctggagctgagatctatggagggtaacttgcaaagatctggcctgcggcgtcgccggagaattttgtgcgtctaggtttctcccgtcaagcgttttaccagcggtacgggactctgtgtttagaagtcgagtctcggaccggttttttgttgctgtgcccggaaggaaagatggaccacgcgtgccacaaacgttcccatgaaaagaagaagctctttctggtgcacaaccgtgttttggctcggccgaagaacgactgcccacgggtctggggtgtatctgatcttcttgacctaaagaacgggaatcaagtcgccgctttcgttgaagcaaagatcgaagagcttgatccaaaggcgaaa

SEQ ID NO: 104850 - DNA, 358 bp, Glycine max
  Clone ID: PAT_MRT3847_65696C.1
taccgacggagaatgttgctgagtaggcagtttatccatttaggggggcgttctagctacccatagtctgatagtgatatactgctacacatatcaatgggatcccacatggcatgatgggactctacccacatagatgctcaatcaaccacacttaaaaggtaccgatcactcaccacagatcaaatagatgcttactggcaatcaatgcagaagatagcataagaacaccttagagctatatccaacttgtcacagactattcacgctagcaaaagcacataacctgagaacaagttgcataactcaatgaccatgcctgagacctgttcacaggactaccataatatgttcatat

SEQ ID NO: 104851 - DNA, 353 bp, Glycine max
  Clone ID: PAT_MRT3847_65697C.1
aaaccccaaaccagggggttttattgcattttgatacttgatacaccatattgggcatgttttgttgcccaacctttaatgaactccaaactactttaaattccaaaacccaaagggggacttgacttgggagaaaaacaaccccctaaatagggggtaaaaaaaaaattgtttgaaaacccccaaggggaaaaaatggtcaatttgtcccaaaagaaaaattcccttccctaactttggggaacaaaaaaccatcaaggcgtggtgggtcagccaataatttttttgcaaggcttatggatgaaaatattctcgcatcatagggggaaagggagaaacaaaaacccccttta

SEQ ID NO: 104852 - DNA, 270 bp, Glycine max
  Clone ID: PAT_MRT3847_65698C.1
gggtggtgctggttctctgtggtggcttaaaggtctacaatacacctatcgaaagctgaggtattgtcaaagtacttgccttgggactcattttttaatccaattcggtggtcatcggtgtagcaagttcattctgacgtagttttttaagtgttacgttgaaatttgttttactgtagaaatggggttgttttttgttcagtgtactcgaatgttgtgcgtgattgggtcattggaagtgtaggtgggtttttggtttagtgtattgaa

SEQ ID NO: 104853 - DNA, 615 bp, Glycine max
  Clone ID: PAT_MRT3847_65699C.1
caaattggaaggggcatcaacattcaacatccgttgttattcagacaaaaccatattttcctttgagcaatcatacggggataatagttctgataattttatattttctatgaataatctatctatacattcaacacccgttgaaattcagtagtaaaatcatccaaatcaaccacatttctttcttccctcttcagttcagcgagctctaaattcaactcggcaagccgtttctgtagtttctcgcccttgtcaggtaatttagaagccatatttgagagtgtttgagagatactcttaattttatccttgatttctgactcggtcaatttaccagcactgctaggagaagaaccttttttgcttaacctgacatccttaggattaaatgcaaactccgggccataagcagcatgctcatttgaaggtgatctggaagttccaacatatttggccccatgattccttgtaacttcatcatcctcaggatcagttcgaactggcgctgtcttggaaaagagtaaactgtggtgactaactccagctatgctgtgacttttcaaaaactctagatgtgctctgaaagagtcatcaactgtatgttgacgatcgtgc

SEQ ID NO: 104854 - DNA, 419 bp, Glycine max
  Clone ID: PAT_MRT3847_6569C.1
gttgttacgccaaaaggggagggcaaaataacccctttttcccctatttttatagagagagaggatgcggacccccctgctccccaggggtcgctctctttaaaaacgggaggcgtttctgcaatccaacatagggggggggaaatgcattccttaacaaactcaataaaaaagggggtatctgcacaacacaccaaacatgatattttgttgttaaacaaaacacccattgttggggggggcaaaaaggcagggccagttcaaccaaaatggggggacgataagaacggcccccaaaaaaatcggggcccccataaaaggcccttgctcccagaaaatggcacacaggggtgggtcccggacccacccccagaaggggataaaacctctttgggacctgcccaccaaatttggggggg

SEQ ID NO: 104855 - DNA, 1111 bp, Glycine max
  Clone ID: PAT_MRT3847_656C.1
acacggagctcctccgagtgggcctgactgtacgcgtgcggaatccaaaccctccaaggtttctttcctgtgctcccgaccctttctttaatccatggttaagttggctcaagattcttagcttctccgagtgtctctgtctgtctgcggaatccaaaccctccaaggtttctttcctgtgctcctcctcgtgtggtgcacctacgcacgaggtttttgtagctaccaccgtgcccaattcacatcgcatgtttcgaacgctttgtgctgcaactgaaatcgaaaatcagagaaagcggagaagagagagagagcatggctgatctctttgcgtggctcatctccttcttcattcttattgccttaattgtactcgtcatttaccagttaatgtgcctggcagacctagaatttgattatataaatccatatgattcctcatctcgaataaacaaagtgatattgcctgaatatattatagtaggtgtcctattcggcttctaccttgtaacagggcattggataatgtcattgatctgtgctccttacctctactacaatgtgagattgtacagacaaggaaaacatctggttgatgtcacagagatattcaacttgctccctaaggaaaagaagcaaaggcttttcaaactcttctatattgtttttatccttttcctatccttattttggatgatctacacatctttggatgaccatgatgattgatggcttgttttgtgcagcagccgtgtgcggttgagggtagctaattacgtcccatattcaatgctattttggactaacgtgcaaaatttaggtttgggttgctggcttgtttccattgttggacatggacaatagtatatgtggttctgtatctgtataatacatttcaaagcagttttttgcctgtttgattcatgctgcttgtagcaaaggcaaattgcaaaattcttaaccttgtaatttacctgtacgcttaaatttaagttatttaaaaacacgtgattattataaaaaaacagttatttttttaatatgtcaggtaacttttgaatgttaatatacgaaatctagggcggctgccgcctcgttcgcgcctttcccg

SEQ ID NO: 104856 - DNA, 351 bp, Glycine max
  Clone ID: PAT_MRT3847_65700C.1
gcaaggacgagaaactatccgcgagagtcggccgcgagaaaagcacagatgggtagcaaagccctgagcgcagtgggtgggtttactctcactctcagtcccatcaatgtgaaactcctacttatgccttccaatcgcctctttaaccgcacttcctgtaaattttacattttcttctgcctacgcttcaacgacgagcaacaacccctaagcctggacatacccgcactaaagtcatctttcgcgatgctcattgatgggaatcacatcatggtcagaggtgtgtacaagactctggtccgctaaatggcccaggattcttaactcgacctggtgatcgtattcccagat

SEQ ID NO: 104857 - DNA, 460 bp, Glycine max
  Clone ID: PAT_MRT3847_65701C.1
cattgaggtaatacaaaaagctctgtttccaaatatctaagtcctttactttgtatgacagaggcatcaaaaaattgatcttaaatttttctgcattaggaagtgtccacaatgtgatcctattttccgcattagaattagatgtatctgaacattttccacaaaacgcattgacatttttgttgaactaacatgaaacttggcctattcttttctgttcaataattatctctttaaatgtccaacccaacctaaagtagttaccaagcagttactcgggtgctaacatacacaaaaagaatccttggactgggattattctttcctagtaattttgaagttcaattgaaggggtatagtgaccgtgattgggcagtgatcctgaaaactcatcacaaatttctcaatttaccttgtttcctctttgatgtctttgaagtcaaaaaagcaattgacaatt

SEQ ID NO: 104858 - DNA, 543 bp, Glycine max
  Clone ID: PAT_MRT3847_65702C.1
tggttttagtggatacaaagcagtgtcataaattttaggctaaaatatgtttgtgatctctaataaatacttgaattttgcatttgatccctaagaaattttttctttgtttttgctccctgatataacaaaattttgtttttggtccttagcatttttttagtccctgataaattaataattttgtgtttgttcctttgaaaaagactaataacaaatgatttttttttacagggaacaaacacaaactttgcttatttatcagggattaaaaaaatgtgtgaagaaccaaaaataaaattgttattttattaatgactcgatgcaaaataaaattcaagcatttattagggataaaaacatagattaccctaaattttaagggccacattatagagccttcatttaggaatattcttatccatgtaacttaacaatattcttctttcactatcattgtcttcattcttgaccaatgctattcttttggtctaactaaatgccacagcattggctgcttatattgattgcctaattccatcc

SEQ ID NO: 104859 - DNA, 540 bp, Glycine max
  unsure (1)..(540): unsure at all n locations
  Clone ID: PAT_MRT3847_65703C.1
ggaaagggcccactctattgacccagctcaaagcctcccaccaaagactcctagttcttgtgcaagagaacatgatgtggccgacgttttcctcttcaagatcacataaagggcatctataggaaggcaactccacctgtctccttctcagattagccttagtaggcaatctgtttttgaaaattctccaagagaaagcaattgtccttgggggaattttcagattccaaataatcttggaagcgctgtcttcattatcaaaactgccctcacccttcaagagattgtaggctgactttgtggaataagccccactaggatcagccctccaaataagagaatccaagctagagaggtggatctgaacatcatcaatgtcatccatgaaagctgctaccatattaatttcgtgatcaaagaaatttctcctccaatgcatcttccattcccatctattgtcaacgaagtggcccattaagctgatagtagaatcttgctgataactgacttgatacagggcangatatttgtcttggagag

SEQ ID NO: 104860 - DNA, 262 bp, Glycine max
  Clone ID: PAT_MRT3847_65704C.1
gttgcttctgcggctagcatttcagagtcttggtgtggtttatggagacttgggcacttcacccttgtatgttttctacaatacatttcctattggagtgaaagatgaggaggatgtaattggagcgctttctttgatttctactctcttaccttggtgccactcctcaaatatgtttttgttgtattaagagcaaatgacaatggtcaaggtggaacatttgcgctttagtccttgctttgccggcatgcaaagatgaaaa

SEQ ID NO: 104861 - DNA, 173 bp, Glycine max
  unsure (1)..(173): unsure at all n locations
  Clone ID: PAT_MRT3847_65705C.1
gttttatgacattaagggttcaaattttggattggaatgggatctacattctgaatttccgagttatcttgggtaacgatgccatgggatgtcgggatgaactcggtgattctgctgtagnactttttnttatctgtaaaaaagtactctgaattttcatatacccccttttg

SEQ ID NO: 104862 - DNA, 1379 bp, Glycine max
  Clone ID: PAT_MRT3847_65706C.1
ttgcaaattataagataccatattttttattatcattcccacataaaaaaaaatactcgtctcgcctcgccactgaacttgactgctatgcttgaagaacatattccacatcaagtctccttttcaccattacctatacctcaaccccaaatctacaaatgcaactcgaataccatgatgatgatgatataaatcagtaaaaaaaatgagttgaagcattttgactttaataatgagactacaattatttcttattctcttgcctatttagacaggagcaagagaaagaagagaactaactacttttcaaaacaaaaatattttgtttggttctgcctatgaccacctcaaaaattagaaagctaaagaaaatcacgcaactgttgggcaaaatatctcatcctaaaatcagcttaggggcatgtttgcagtctagcgcattggccaacttgatctgaactgaataaaataaggtacaactgcagatcaatttagccatgtgtaggtatgaaaccaccataacagatcaggcttcctggcagtttaacatttaatctctgaattccttcaatcctttccgcagcaccttttgtatctcttctttgaaccacatggacaaagtgcattcctgctaatttgtccagcttgggccaaattagacctagcaagatccaatggagttgaaccaactagcttttggacttcagcaaagctttttggcattggttttccttcttcttttagcttctctaacttcttctgtgcttccttggcccaagtaaacttggcaagtgcattctccacatcagcaatcgtgcaattacaatgttttgccgcttcttgtttctgagctgtcgggagattctctccagtggggtccaaagcaccgagaaatcgaattatggcttcgtatttgtcgaaggcggaggaaaaagtggcttcgctgcttcgcccaaccatgaactccttaaacgcgcctattctctttgcattcttcatttcatccgcaaaacggagcagactgaatgaatcggaggtgaagcgtctccctgggactggggcgtgctgttttggccggtgatgacgtttttgaccttttccatccatgaaccctgcaactgtgccgtggaggagattgttcggtactggcatttgcaattctggtttatcgaataacagattttgtttaggatgcgaagtgaaggcatcgaattgatcactctctctccaactcctacacttctatggctgctgcaagcctgaaactcagcaccaacggaaccaggttagaatttccttcgaaattgaaatgctgcgctaggctcaaaccgacgtcgttcatatgctcggaatagcgtgcactgcgcccggacgcgtgg

SEQ ID NO: 104863 - DNA, 778 bp, Glycine max
  Clone ID: PAT_MRT3847_65707C.1
cacgggcacaaaaaagcacgccccagtcccagggagacgcttcccaagtcacctccgattcattcactttgctccgttttgcggatgaaatgaagaatgcaaagagaataggcgcgtttaaggagttcatggttgggctaagtagttaagccactttttcctccgccttcgacaaatatgaagccataattcgatttctcggtgctttggaccccactggagagaatctcccgacagctcagaaacaagaagcggcaaaacattgtaattgcacgattgctgatgtggaggatgcacttgccaagtttacttgggccaaggaagcacagaagaagatacagaagctaaaagaagaaggaaaaccaatgcccaaaagctttgctgaagtaatgcttctcattgttactttaattcctaactacctagttgggttcaatttatcatcttgtgaagacattttagtttgctgaatgcttcattaaaaggtccaaaagctagttggttcaactccattggatcttgcaaggtctaatttggcccaagctggactaattagcaggaacgcactttgtccatgtggttcaaagaagagatacaaaaggtgctgcggaaaggactgaaggaattcagagattaaatgttaaactgcaaggaagcctgatctattatggtggttccatacctacgcatatgcacatagctgaattgatctgcagtcgtaccttgttttattcagttcaaatcaagttggcctatgcactaggactgcagcatgccc

SEQ ID NO: 104864 - DNA, 357 bp, Glycine max
  Clone ID: PAT_MRT3847_65708C.1
agcgaccacctgttctatttattactcacccctttctcgttgggaacacttacgggtttcttgaacttcagaggggccccatttttgtcccgaaaagccgggtttgaccctttttttaaaaaaggatcatctttttttcccccctttgggtaagcccccccctcatttgggtacgggtacaaattttgaaaaaaggggaaagaccccagggtgttggattttataaacttgtaatgggtgggggcacccataaacaaggactggtttttttttaccataaacgcccgtgtgtctgagtcaattttttaaaaaaaaacccttatgggcaattttttcttgcccctttggggttttttg

SEQ ID NO: 104865 - DNA, 404 bp, Glycine max
  Clone ID: PAT_MRT3847_65709C.1
ttcttttttttttttttttttttttttaggaaaaatggatactctcttttatttgggaatattacctttttcttgcctaaatcttgggagaacctttttttttggttcattatttaaaaaatttttggtctggaagaaccccttttttttccccaaaaaaaggggggaatttcttaaaaaattccggaaaaaaaaaaaaccggattgggttagaggggagggaaccttgaaaaaatttttgccattcaaatattagaagcccggtgttgggccaaaggtccttggccaaaagggtggaaccccttttaagttaaccaggacccttttccccttgggggggttcacccctttccaatggaaagcaggggccttttttgccaaggggtccttttgcagaagtttta

SEQ ID NO: 104866 - DNA, 302 bp, Glycine max
  Clone ID: PAT_MRT3847_6570C.1
tctaacatggagtgcatcggtcttgagggggggaaagcgttcatttgtcgtaggcgggcataacagcaatggctaacactaccgacgacctgaacactgtcttgactgcgattggaagatgatctttattggcgtgaggggccactcaaagccatgtgggcacacccctctatctgcaccatggtatcacccgtttccatgcctaagaaagcgctaaaagagacaataatctcgaagtccgacaaaccacgccggtgaccatccgtatcccattttgtcggccaatacacccgaaccaactg

SEQ ID NO: 104867 - DNA, 417 bp, Glycine max
  unsure (1)..(417): unsure at all n locations
  Clone ID: PAT_MRT3847_65710C.1
gacccacgcgaccngctccnntgaaaaannngacaaaccgcgagcagtggttgctttaccttaaaaccggaaacaaaagcaatcgccacttgatttcaagaatttctcaatctcttcctacttctttgtgtacgatctcctaagggaaagaaaatcactctctgtgctggtcacagacttcgtgaatcattctccttaccactcttagtttattcgctgaacactctcctatttgatataggacttcgcgtcagatttaaacttcctccgtcgctttcccaggtcttctgtcaacttcacagtcaagccggtgaaattttggaatagcgctcccactcctccatctggtataggaccttccgggtagacttttctattactttaccttctttcactcttctgttctcactgacccgc

SEQ ID NO: 104868 - DNA, 872 bp, Glycine max
  Clone ID: PAT_MRT3847_65711C.1
gcgccacaaacaaatcacaactaagcaacacaaactattgcaatggcttctgctcagtgtgagaaacccaacaccacagttgaagttagccaaccaaaaagccatcacaaacccaatactgcaattgaagtatgccaacccaaaacccagcacagctcgttcggccaaaaattatctgagataactagcaaggctttcaaagggcgtcatggcagcaaccaaaatcaacttcaatactatagccaaactcaggttgagtcccaaggccacaatggcaccaaaacagaggctcactactatggccaaactcagacccaaaatgacaaaaaacatggggtctccaaaacccagatcacagttactgtcgtccaagcacaaattacccacaccgagaagaaggacccttatccttatgataccactacaacatgctttggggctcatgcaaagaggaatggagagctcaacaacaataagaaggatatgaacttgttccggaggattaagaatggcttatcccgccataataacaatgaaggaggcaacagcagcagcagtgatagcgaaagtgatgatgagaagtgcccaaagacaaagaaaggaggaaactgcaagcaggacgcaactaagacaaagccagtttaactgacggaaagaacatcgccacaaagtgtgtttacgatttcatctgttcttgtacccaaatagttgggaaaaataaattccaatatttcacttggctgtgagtatcttatgataaataatatattttgaagtttaccccccaaaatgacaaaaagcatggagtctccaaaacccaatcacagttactgtggtccaagcacaaattaaaaacacggggggggaccttt

SEQ ID NO: 104869 - DNA, 405 bp, Glycine max
  Clone ID: PAT_MRT3847_65712C.1
ccccccatttctttcacacccacccacgcaacgcgccaccaaacactctataaaaaccaccaaagactaaattaaccaacccacataatgtacaagccacataccaaggatccccactaccacaagaccaaacaaagcacacaaaccaacagcataacactacatcctacatgctaaataacatccaacgaagggaaagacaagtcttaccaataaaaccaaacacccctaaatgcaccaacacgcaagaatgtgaaagtgcccacccccctcttcccaaaaacatccccaaaaaagacaatgaaaagctgccaccatacctggaggtgccccccccttccaaagaaaaaacccgcccaaccaagaggcatatcgacaccaccaccaagagaaaaaaaacccccc

SEQ ID NO: 104870 - DNA, 236 bp, Glycine max
  Clone ID: PAT_MRT3847_65713C.1
ccacacgtgcccaagcattaaaaggtcattctcaaattccaatctgacctcaaagatgttctttatgactttgcaaacagaggaggataatactccttgtttagcaaaggtagctcctagcaaaactatctttcggttggaattaaaaatttttggtaaacctaatttttggcctagttgttaaaagtaaaattttttaaaaggacgtttaattccctgccgataacttaaaaggg

SEQ ID NO: 104871 - DNA, 1422 bp, Glycine max
  Clone ID: PAT_MRT3847_65714C.1
caggatttggcttctgctgagaaaacaataagggagacaatccatcaagtgtcagtaaagcggggctgtctggttttgttaaatttgttttttgctactgatgttagttcccatggagtttcaaacaggaacggggaattatctatgaatcagaaaagcatacctacctggttgaggatgctattgttggcaggatgaaagcaatcattgacttgagatttagggagctaacaggtgctgttgatgtgctgaactcaatttctgctataggtgacttttgtaccaagctggaagatgttcaggggtatttgaacagaccttctacggctggtggtgtttggtttctagaatcaaatgccagaaaaactggagttgcttctgggtttaaagtccagcctgaagagagcgaatttcagtattgtcttaatgcctattttggtcctgaagtaagtcgaatcagggatgcagttgatgtttcttttcagagcatctttgaggatcttttaagtttcttagaatcttcaaaggctttccgaagattcaaggatctggcaccatatctgcaaagtaaatgttatgaatgtgtgtcttctatattgatgacactgaaaaaagagctggatagtttatatgccccaacagaaaatggcgaggtgccaacagcggttactgttgaaaaatctcttttcattggacgattattgtttgcattccaaaatcattctaaacatatacccttgatacttggttctcccagattttgggttaatgggaatgcatctgcagttgggaaattaccagctctggtaaaacaatctcgatttgggtctgattctgctatctgtgatagtccgggaagacaaacgagccttggctctaaaagacaaaattcatctgtcgtatccgctttgcttggcatgagagaaggtgcaagccatgaattggaagaactgaataagaccattggggatctttgcattagagcttacaacttgtggattttacggatctcaaatgaactttctgccattgtctctcaggatcttaaacaagatgatgctttatctttgagctcaccctggaggggctgggaggatatcattgtcaagcaagatcagtccgatgagaacccaccagagatgaaaatatctcttccatccatgccttctctgtatatcatctcatttctatttagagcctgtgaagaacttcatagaggtggaggtcatgtacttgacaagaagattttgcataaacttgcatcaaggctactggaaaaggttactggaatctttgaggactttctttccactgcagagagtggtgttcatcaagtgtcagaaaaaggagtcttgcaggttttgttagatgtcaaatttgctactgatgttctctctggtggtgattcaaacatgggtgggg

SEQ ID NO: 104872 - DNA, 256 bp, Glycine max
  Clone ID: PAT_MRT3847_65715C.1
gagcgtacacgagtttgttatgcactagccgctgatttatcatgcggagaatatgatgttgtttgttttctttgttgctgcagtagttttggtcacatggtcatgccatggcgcaggctatcatcagttcgctcaccgattgacaactggctatggtgaacgttcttcgggcgtataatgcacgttgttttatgcgtgctgtggacgcacacaagatccgagcctttagtagcattcctgaagcgtacgttgaacc

SEQ ID NO: 104873 - DNA, 317 bp, Glycine max
  Clone ID: PAT_MRT3847_65716C.1
caagatcttaatttctttcacaaatgacaagggatacatttgaccactacgagaaaaagttattggagcactttctcataaaatggatgccaaaaatatattatgcaggcccacatctctcctgcaaccatttgtgatgaaatagataagctttgctgacattttatctggggtagcacccaagatcaaagtaaagtgcatacgatatgtgggaactctaagctagctgaaaggaaatggaggacttggctatagaactcagaaagctaaacatgtcgctatgtcctgatactagcatggactatgattcactaact

SEQ ID NO: 104874 - DNA, 474 bp, Glycine max
  Clone ID: PAT_MRT3847_65717C.1
cgagacccacctaatacacacatttttattgcttataactgtgtattggacgaggttagaataggggggaccttccaaccagtacgggtgtgcctaacatttttttaaatggactgttattgaaaattatcttaagattattcctttcctttgagggcggaggcacacacggttcttcgtgcttttgaccgcccactcgatgatttggcaccgatatctctgactaagatcctggtccattggagttggctaaaatgctggcctagtaaggaatttgggtcgaaagagggatttatcggacgaactattcactctggcaggggtctgactatggctacgtaagcttgaatgagctatcattactcttcacgatatgcttccgagaagtgctcctcctttaaacctttatgatctcgatgggtgagagagttcctccttgaaactttcccctccggagattttcaagggcccatt

SEQ ID NO: 104875 - DNA, 412 bp, Glycine max
  Clone ID: PAT_MRT3847_65718C.1
atatcggcgaactgtccgcgcaggcgcgcgacggcaagctcaagccggcagacatgcagggtgcgacgttcacgatttcctcgttgggcggtatcggcggcacggcattcacgcctatcgtcaatgcgccggaagtcgcgatcctcggcctgtcgaagtcgggcatcaagccggtgtgggacggcaagcagttcgcgccgcgcctgatgctgccgctctcgctgtcctacgaccatcgcgtggtcgatggcgcgatgggtgcgcgtttcgcggcttacctggcggaagtgttggccgatatgcgcaagacattgctgtgattcggagtttggaaagcaagcaccgtacgatcgtgaaagcgagagaattcttcaccttttactgagcgcctgtacgctctgtttccatctta

SEQ ID NO: 104876 - DNA, 1974 bp, Glycine max
  Clone ID: PAT_MRT3847_65719C.1
agagaaaactaactatcttaattaagttgtaacctgaataatccactgctcaatgaaaattaaatgtctagcagagtttttggctgattgagcctagcatttaaatatttaattatccaaactctgatgtctatcaaaaagatcgtgactcatgaaacgtgaagtaacaaaaaacataagcaaaaatgtataaaattccgggatcatgatgctgcttaaaaattgtgttacctatgggtaaaaaggacctacaaaaagaaagatgactctcatgcaagctttggtatttcacatagaggccactaactataagtatagctaagttaataaatatctgggattgatttgctatattatgaatgaggtgcaattgcactctaacctcaaaaacttgtctctcttcaagtaggtgctggaatactaatgtatctggttataagaataaccttcatctatccaactcttccatctccaaccacaaaagtcctcaacaggatctatttacactgatcctcaccagatttagccttcaaagttagccccgcgacaaggcgatgaagcctttgagaccccggacccggtttgagtttataaatgttcccaatctcggagcatttgggtttgccggtgcaccaaccaccgagcgggaatagtccatttctcttacggagaatcattttatcaatccaatccaaggatggatcatcttgcttaaattttcttgcaaaggcagcaccactttcaaccattttgtctgtgtcattgatgttaaggacgtgagggtgctgtttaggagggacgtcccaggcaatgtaatgcaagtcactattgacaagggttttagcccattctggcgcattgcatgcaacagtctggaagtagccttcaggggaagacagaaaattagtgtagtacatgagaagggtccttggcagattgtcccatccccatacaatatattcaacaaagtcgtgtgataataccgtccatgctgaaccagtgaataatttaaatgctgttggcaaaggtctctttggattgacccaaaatacatcagatttggttgacatgtaaagcccagggtctacaattaaaggcattgctcgtttatcaaacttccacccctacccgacttgtgtgctcaatgaagttaaggcctctatctaaatctgaaaaagtatatagtagatcatcctgtgtcacaagaggatagtctgaagcactaagattaataaaccaatcccagtctttacttctcttgagaagaatggctcaagcatgaagagtattagcaaccatcgttggtcctcggtaagtgaccatgttagcctttgtgattacaaaaacgttcccaacctcagcgtatacatgttgtctatcaattctatgtgcaatctccatcctttcctctagcggtgattcaaggtccatatgaacaacataatggtttagggagccataaagtgcatgaagggttctccatagcttttccaaatcccctttggagccggaaatcaagtaggcaaaacgaggaagcgcaggcctagccggcgctggagcaggagaagccttcctctccacaataaccggggcagtttggtttgagcgtaaatgagaagggagaaagaaaaagagtgaattgatggagtgaattttagagacaagacccatgttgaaggatgaaactagtaagagcatgcatattgcaaaacacactatgaaaggatataaccatttcttctctacgtttaagaaccccataactgagaactatcacggatagtaatacttcacattctatgattccatcaatgactcaaaaataaattgccaattcaccatcaaacagccactacaacacacatatttgccatcctcttcatatatcttctcaacaatctctgtctctgaatagtgtcagtttgtgatggaggacgcgtccacgtctaagaaacacataagagagagagaggc

SEQ ID NO: 104877 - DNA, 514 bp, Glycine max
  Clone ID: PAT_MRT3847_6571C.1
ggggcgtgcgcccacgcgtccgtacggctgcgagaagacgacagaaggggataacagatctgagcacaatgaaggtgttggagataggcagggtctatgaggctgattgccacattataaacaaagatggaggagtctactgggacctcttcaatgagggaggaaaaactaattttaaacaatttttttttgaaaataaacagagctccattttttagggaacactaggtagcataataatggtgggacaaatcacataggatgatattactctgataccatgttggaattttgaaattttgggtatagaggtaaagaacagagtgaaaagagttttcgaaaaatatttacttgtgtgctgtgatgtattggaataagatgtaatgtgatgatcaaacgaaaaggatttacctttagttatttatactaataatcccaactaactagggaacaaatcataaaatattagaatacatgatggaataagaacatagggggaaaccaattgtcaagc

SEQ ID NO: 104878 - DNA, 164 bp, Glycine max
  Clone ID: PAT_MRT3847_65720C.1
aaaaagcaaaattttccaacaattttttaacagcctcgcgggttgggagaatccatgggtgaactaacaccatctgcccttctgggggggctccccttctgctgtgggaagctactgaaccaactccaattttagctcaaaaaacaatcccggtggtacgatct

SEQ ID NO: 104879 - DNA, 252 bp, Glycine max
  Clone ID: PAT_MRT3847_65721C.1
gaggcatgccaagtgggtcgaatttcttgagcaattcccctatgtgatcaggcacaaaaaaggtttgcctcggcctaagggaggaaaggactcgatttttgtggtggttgagaggttatctaagatggcttacttcatagcctacaagaagataagtttgggcaggttaaagcagaatatgtcaagaagttgcatgagaaaaccaaggcccaaattgagaagaaaatagaaaggtatacaaagtatgcaaac

SEQ ID NO: 104880 - DNA, 277 bp, Glycine max
  Clone ID: PAT_MRT3847_65722C.1
aaccgcagagttttgtatcctggttattcttataaggggcttaagctttacatgattattgcacagcccatcaaattatttaagagcatgccaccataccctggtacaacaaaatcagccatgttcagatcgtcctggtcataaatttcctctgctgcaacggcttgatcgggatcccctggtctttaggaataaaaacacatagggccctaaaacacctaaaggccttataggccaaaagattcaagctttttacagacaaacgagcccattgcta

SEQ ID NO: 104881 - DNA, 338 bp, Glycine max
  Clone ID: PAT_MRT3847_65723C.1
accagggatgatgaaattgaaaggttcatcaaagtatggatttcagcaatcttatgtctatgttattgttattacatagcttcaagaataccaaagggcttcttgagacttctctccctccttccaattctctacctcttcatcacccttcccttgaaactctcttcacccaccttagttggatacacttccttcttcatttcttggcttggcactttcaagctcttccttttctccttcaaccaaggccctcttgccctatcacccccaaacattgttcaattcatctccattgcttcccttcccatcacccccaaacaaaacccatcaaccaatga

SEQ ID NO: 104882 - DNA, 483 bp, Glycine max
  Clone ID: PAT_MRT3847_65724C.1
gaatgcttgccatgttaagcattggaggatttgccataaatatgaatgcgttgagaaagaagggtcacaagatcagcaggaatcaccgtttcatggaacccattgccttatcatggagcctgaaaatggtaagttctcattcagtgaagttattgagcagagatcatataagggagatgtttactatgtcgaaggaggagaaaacagtgctgaggtcagtgatgaaacagctctaaagtgtaacgatggctgtgcagtgtgtggcaatccaagctctaaagtatgctcaaggtgcaaagccataaaatattgctcacaaacatgccaacatttcgattggagatctgggcataagtttcaatgtcttgttgagaaggcaaatacaactgaaaaagcaattgtcaatcaaggaagacctgcaaacggaaatgttgtaaatctcacgaattcggatgaggtagaagataatgctcattcatctag

SEQ ID NO: 104883 - DNA, 327 bp, Glycine max
  Clone ID: PAT_MRT3847_65725C.1
atggggaagaagaaggtggagataaagcgaatcgagaacaaaagcactcggcagataacattctccaagaggcgcaatggattgatgaagaaagctcgcgagctatccattctctgcgatgcgaaggtggcgctgctcatcttctccagcaccggaaagctctacgagctctgcaacggtgacagactcaaaaatagcgttcatcctgacagtgtgggtgtttggacaagtatcaaaaaccttcatatcaactgcatggtcagggtacaggtgccaccatttcataccttgtaccatatccaggggagtggcagaagggttaattga

SEQ ID NO: 104884 - DNA, 117 bp, Glycine max
  Clone ID: PAT_MRT3847_65726C.1
atccggcgcgaggcatttcaagagaacagctctagagacatcaaactacctttatagacgaccgcccgactgccaaacgcaggggggagatcccgagggcacacgcggccccaccaa

SEQ ID NO: 104885 - DNA, 434 bp, Glycine max
  Clone ID: PAT_MRT3847_65727C.1
ggacatatggtaaacatccaggaattatccccagaaatgctcactcacctgaattacatgaaccattctacataacctcaccatccatggaatgggttaattattatgcccctaatcttaatctgcccacagtgaaagatgttctaatcactggccacacattgatggtgatattctgggatacttgcttgttgtatataacaccaacagcttaccatcgttacatctgtaataatagtgttcaaaagctcgatcatcattgtcatcgggtcagccaacgctttagatcacttaactacccattcgtgatattattcatatcatcatcaaccttcgtgtgatatacacacccaatttccttgattaacattcttagacttgaaggcacattatatatcaacatgccacacgatattatatcacgtactctcatc

SEQ ID NO: 104886 - DNA, 407 bp, Glycine max
  Clone ID: PAT_MRT3847_65728C.1
gttgttgtttttttttttttttttttttttttttttttttttttttggggggaaaaatgattcatttttgggggggttcccaaaaaggccaattcaaagagaaacatctttccctaaactcaattttttttttaaattaaaaagcccaattttttcgggggggaaaaaaaaaaatttttcctttttcaaggtttcatcccttccccttttcctggagggcaaaaaactgccccttataataccccccttttttttatcatcacattacaaatctttgggctttcctccgcttataatcagcatcatcgggggggaactcatagcgacaaacgggacaagggtttcttttcccccaccccgggccaatgccctccccttgggaacgatgcgaacacgggaaccccttt

SEQ ID NO: 104887 - DNA, 349 bp, Glycine max
  Clone ID: PAT_MRT3847_65729C.1
ctgtaacaaatttatcaagtctgatagtttctcctgatgatgtacgtagggatattaggtcaaaaacatttatggaaagcaagaagaaaaattgccaatcaacagagtgtgtttgcagtccaagtgtttgaattgcacagactgattaaggtccaacagctaattgctgcatcaccggatgttttgtttgaagatggagctttcatgggaaaatattctttgatgggttctcctcctaaaaataaaaatatctcattggaagtggtgtagagactcagcgacaaagacctacgcagaaaaacgattctgaaaagctaaaccatgatacatactgtgcagctgagaatgc

SEQ ID NO: 104888 - DNA, 453 bp, Glycine max
  Clone ID: PAT_MRT3847_6572C.1
acaagaaacaatatatattgccttttattttaacaattataacagccctgtttcataaaaaaaaattaaaaaaaaaattaacagccctgtttttctattaaaaaaataacagtcctattacaattcatcatgatgtttcccctctgcagacggtacatcctgcggatgttttagaagataactaacagctaatgaggcatgaagtgcagccccataaggaagcacatcttcattgatcttgaaatagggtgagtgtacttgctccagtttttcatgtgagggattctgtattccaataaaggcaaagtagccaggcataacctcttgatggaatgaaaagtcttcagctcccatcaatggtggcatgtcattaactttattgatgccaagcaaattcaccgtaacagtcccaaaatgttcatgcaagtcattgttgtttataggtgcaggaaa

SEQ ID NO: 104889 - DNA, 789 bp, Glycine max
  unsure (1)..(789): unsure at all n locations
  Clone ID: PAT_MRT3847_65730C.1
gttagcaccaggtatcgaatcgaacgcactaccttttctctttttcttctttcttaaccacccaactaaccttatatctcctttcacagttctaagtgtaggcatctatatggttgaaagtgcagcagcacatatatcctagttcccagactaacgtatggcagccctttatttttggttaaatataattttggtttcttgtatgaattgtttgtttcagtttcgttacgttggtttacaaggttttactttgatcctttgaagtgtctctagattatgttggtccttccatcagtttacaacactattttagtcaattgagatgtgccaaaccgtaagatatcacctcaacaaaaattgacactacaaatttttttgaaaggatcattttagtctaatagtaatgcccgaagggaccatatactattttaagacctaacnagaccaatactgaaacttaaaaattcaaaaacctggaccaaancttatattttatncctttatttttacttggggagaaaaggagttttagactaaaattgaaactaagaattcaacttatatttttacttggggagaaaaggaccaaactggaccaaacttatattttatcctttattcaaaaactgaaactaagaattcaacttattttttcgtaatgtcaatgactaaaattggccggaattgaaataacagaaaaagggatttaccttgaacaaagcttctcaagaacaaacaccacataccctgcattcagaaagagtacttgtcattattctgtaccaacta

SEQ ID NO: 104890 - DNA, 753 bp, Glycine max
  Clone ID: PAT_MRT3847_65731C.1
agattatgggaagtgatatttgatttgaagaaaatgtgacagtttctacagtttgaggaattaaagaataaaacaagctgcatgaattaatttaacaggacaaatttgccccagttcagacactactaagaccgagtaacattcaatcatcactgcacggtcgaaataaactaagcatagttgagtggtatcacttttctaattaaactgactatttacaaataggaacattggtgttcaagcagcattcatagaggttgaaatgagaacgtgagctaaaaattgcatcccgtcctggattttgcaagctgctgtggtttgatccgctcgaaggtgctcagagaaggcactggctttttcctgaactgatttctgggtaacaactgaaagagactcagaagtaacagctttaatggcagcttgataggcctcagttacatcagatatgcctgtaatgaaactgtgggaaactgctttcacatatccaatcatggtttgggcatttattcttatgatattagcttttgcggaaacatcttcgggccactcaacgtttgccttatcatcatcagcttcatcctcaggtgttgttggcacgagaaatgatggattttcccaacccagaagttgagacacggcaaaacagcacatttcagatagtctgtgaactccctcagaatgaagagattccaatcttgcattagttctctgaagtatatcattagcaactagtccaccaaggcgttagcaaaa

SEQ ID NO: 104891 - DNA, 269 bp, Glycine max
  unsure (1)..(269): unsure at all n locations
  Clone ID: PAT_MRT3847_65732C.1
atcaaaatccatccacacacaacacacaacacacaccttngcctctgctccgcataacttctgacacacacacacaaaacagtaacacaacacatacacatacacatgttgttgatgagcgcaggccccccttttgtgattttatnacacacaggaactattgaactttgttttttgcatattaaccgaatcccaatttttggcacttaaaaagagttatttttttgcttctgggaatgtactaatacttcaattcggggtatttgatt

SEQ ID NO: 104892 - DNA, 2200 bp, Glycine max
  unsure (1)..(2200): unsure at all n locations
  Clone ID: PAT_MRT3847_65733C.1
ccacgcgtccgcgacgtcgactcattccgtcgttcgtacgcttaaaacctctaaaaacgacgtttggcatagcatcgcattgcttttgccagcacacagttgcatccttcatccaacttcaaaacgaaattgacacaaactcaacagatcgaaaatccataatgttgttgcgtaaggaacaataaaaatctcccatttgtgttttcttctcttcacgcacaccaacaaaacctctctctcatcggaatctccaaaaagaatggacaacaaaacgcagcagtccgagagtaagcaaaacgacaacgacgaggaagttgcgccaaaacgacaagaccctaacccgtcgtctggcgggtggggcttttcaccgctctcgtttctctccgatcttcagaaggccgccgctgttgccgccgaagagatctctcgcaatgctgctgtagttgcagagactgcatcaaagagcattgcagagttgcaaaacgaagatgaagattcagaaaaagagtatgaaggagatgaaggatctgcagctgagaaggaaagtgacgatgagggttccaaactgcgtaaatctgctctggaaagattggagaaagctagtgaagagtcacttcttagccagggtttgaaggtttttgataactctgtggagacttttgcttctggggcatggagtgctttaggaaatgcatggagagggggcactgattttgttcagcggctcgagaattctgcaacaaatctttcaggatctccaaagcatgatgggccaggagctgcaggtgctaatgcatcttctctattagagacaggaaaagcttttactgcaaagggaatgcaagtgcttgaatatgttggtaaggagacaatggacttattaatcagtgaaactggaattgaagttgagaaagataaaaaagaaggtgaagaagaaaatgatgaggatcaattatcagaggaagtgacttttgatcgatgcttttacatttatggaggtccagaacaattggaggaactggaggctttgtctagtcattatgcattgttatttaaccgaagaaaagcaaagctatcagctgagcaaaagtctgtatatgatgggaagcttaaagaggtccaacaagtatttaatttgagtactgatattggtagaagcaatgctgattcaaacaagggaaagacaataaagaaaggaaatgagggaagcagtgatgagatgaagaatttacacgattctagtgttggcaaggctgctgaaatggccgcaggtttcactaatgccttggctggactggctgctaatgatatacatcagagaactactgcaagattggaatcgcttcattctgagggagttcatagactatctgaaatgtgctgttttgtggtgtctcaactgctagtgcttggcaaatccatcatttctcgtgccaacaacactgaggatgaagctgatgatgataaggcaaacatcgagtggcctgaagacgtttctgcaaaagctaatatcataagaataaatgcccaaaaaatgataggatatgtggaagccgtttccaacagttttattacaggcatatctgatgtaactgaggcctatcaagctgccattaaagctgttactgctgagtctcattcagttgttacccagaaatcagttcaggaaaaagccactgccttctctgagcaccttcgagctgaacaaaccacagcggtttgtaaaatccaggacgggatgcaatttttagctcacgttctcatttcaacctctatgaatgctgcttgaacaccaatattcctatttgtaaatagtcacacagtttaattagaaaagtgataccactcaactttgcttagtttatttcgaccgtgcagtgatgattgaacgttactccagatttagtagtgtctggtcaattggaatgaaaatgccttcaagatggattcatgcatcccatcttattcttttattcctcaaactgaactgtcacattttcgtcggacggcaactttttagaattctttgcgatcgggtttgtggcagccctccncgaaccacnagctgtcctttgcgaattctctcagcggatcgaacacagaatcaatggcgtccattctctttctctttctctgtctcccaagcttggatctgagaattaaaatgggattcccccttctgtcgtctctcgcagccgta

SEQ ID NO: 104893 - DNA, 509 bp, Glycine max
  Clone ID: PAT_MRT3847_65734C.1
tttgccgtgctagcatgtgtgcacgtcctccttcttgggggggggggggggggggggggggggggggggggggggggggggggggaaggaaactaaaagcaggaaagggtgcagatgtaaagttctagttaaaaaagcgtaataagatatttttttaaaagatagaggaggcctggtctgcgaatttcatgtacaaaaactttaaggggatgtaaaacaggtagtagtagtcgtaccaacccctgcatgactactgctaacaactgtactggtcgcggcggctgccctactgaaagtaagggcaatggtgcccccacttaagcttccacaggttataaacgctaacggaccagtattgctaacgggttgccttaaagacaccaaacctggtgtcaaaggccacagctgtggtctgcaaagtttagaagatgctaaaggtggtggttgcgccaacccaattgctgggcttggtatggcttgcggtggcatagtaattggcgggttttaaa

SEQ ID NO: 104894 - DNA, 857 bp, Glycine max
  Clone ID: PAT_MRT3847_65735C.1
ccacgcgtccggtgaattcgcggttacacgttaggttagtgagtggctgtcgtccccaaacccccccactaccttaaacgttccgatcacatcccctcaaaacaaaaccatatccttttaaaccttcattcattgtctttcttaaatattttgttccttggaacgtacgagatgagcaagagcgtaacagcaacaaaggactcaggcgacaacaccgcgacccacttgaattttttcgagaaatttaaacgctttaaccctctcgagtcttccttgggagtactagccttcttcttcgtcgcttctctcttcattgccagcttcttctacttggattacaaaggcttccgctccaggggcactgccactgtccttcacttggatttctcatcaccatcttcttctgccccagttcagtttctgagccaagacggtgataaatgtgatgtctttgatgggaaatgggtttgggatgagacttaccccctttaccattccgcaaattgttccttcccggatcaaggttttcgctgctcccagaatggcaggcctgacactttctacaccaaatggaggtggcaacccaaagattgcaacttgcccagatttgatgcaaggaagatgttggaaaagctgcgggacaagcgactagtttttgttggagattcgattggtaggaaccaatgggaatcactcatttgtatgctctcttcggcaattgcaaataaggctagggtctacgaggtacgaccttttggagcacctgatgggagccgaattacaaggcacatgggcttcttggcatttaagtttgaagatttcaactgtaccattgaatactacagatcacgatttct

SEQ ID NO: 104895 - DNA, 514 bp, Glycine max
  unsure (1)..(514): unsure at all n locations
  Clone ID: PAT_MRT3847_65736C.1
cggctcgagatagtgtcccactttagggtataacccctcccctctaaccagcgaaggaaatccgtggacaccggtctaagttttctgaatttgtttaaagccgcggngccccccnngccnccccccccccccncccccccccccccccccccccctccggcctcctctttttctcgcccgccccccgccccctccctcccccctcccctacacccctcccccccccctctcccccccccccccccccctcccccccccccgtccgcccccccctccctcccctcctccttcccccctccccccgccccctccccccccctcccccgtcccctcccccctccctccccccccccccctcctcccccccgctcccccccccgcccctctctccccccccccctctcctccccccccctcccctctctcctcccccccctcccgggccctctcccctctccccccccccctcccccgccccccccccccccccccttccctcccccccctccccccc

SEQ ID NO: 104896 - DNA, 254 bp, Glycine max
  Clone ID: PAT_MRT3847_65737C.1
gagcgcgggcgcccgcggggcccggcccgggattttccgggggagccccacgcgttcgcccacgtttgcgcccacgcgtgcgcccacgcgtccggaatattggtaattttaattgaatagatactttttaagaacagagctgaaagtttagaccccattttctcattcattgtgccagaaaaaaaactgcagttcccaaactaatattcacctgtattgaaataatcttgtgggcggacggttttgaggtggcg

SEQ ID NO: 104897 - DNA, 302 bp, Glycine max
  Clone ID: PAT_MRT3847_65738C.1
tttttgtaaaaaaacttctaagtgcttgaagcaggagaccaaaattggccttgagacttcaaatatccagtcggttcttcctgcccaaagataccatggcataagaccgggactccattagattcatataatatttaccaaatttcattgttatgggccggctgatattacaagacatccttgatgcatataggctttgaccacatacgggtgttccatgaatttttcttagacaaagctaattaattgttgttctcgaagacatttacaaaaacaatcctgccacaaagatcagtggatta

SEQ ID NO: 104898 - DNA, 488 bp, Glycine max
  unsure (1)..(488): unsure at all n locations
  Clone ID: PAT_MRT3847_65739C.1
atccttcataataatcttatcccatgacgggtaacaatantttttgagaaatttggttcttaaccaaatctaactcagataataatgtaaccatcccgtgtaatgaaataagaccattgttgttgtcaaaaaaaaaaaaaaaaaaaaaaaaaaaaaaaaaaaaaaaaagaaaaaaaaaaaaaaaaaaaaaaaaaacaaaaaaaaaaaaaaaaaaaaaaacccccggccccccccaaccccattttcccccccaaccccatttaaattcaccccgccttttcttccgccctcctcaaaacgccagcacccccccgctgggccccaaacacacccaacaccctctttagcccccgaaaattccccacaggaaaaaaggtttataaacccaagccgccaacacacggggggaccccggaatccaaaacggggcacttcccccccaaaacccggccatggaaaaaaacaaaacccggcaaaaaaaccataaa

SEQ ID NO: 104899 - DNA, 329 bp, Glycine max
  Clone ID: PAT_MRT3847_6573C.1
ctcgagccgcatcaaatgagttgtaaattaagagcatggctgtacaagctcttgtattatcatgatgtgttaccttctcagccgtggctactagacatagacttggaccaagattactccaatctccatttggcttgtcaagaaaagcctcctttcttgttaaggcagctgctactctctctgccaagcacggatcagacagacctttgtggtttgcatcaaagcaaagtttttcctacttggatggcaggtcttccggttgactatggatttgaccctgtgggactttcgtaccctgtaggtaacaggagggtctcattgtgccttac

SEQ ID NO: 104900 - DNA, 3170 bp, Glycine max
  Clone ID: PAT_MRT3847_65740C.1
acggctgcgagaagacgacagaagggggacctatacccgatgaatttggaaatttaactcgactagaaatacttgatctcacttggaataatttcaatggctcaattccaaaaagccttggacgcctctcatcagttgtcaatctgtcacttttgggaaatcgacttactggttcaattccctcagaaattggtgacatggctagtctgcaagaactgaatttggaagataatcaacttgagggacctcttccccagagccttggaaaaatgagcaacttgctgagattgtgagactatttgtttcatttttttaatttcatttgatttacatactcaatttaaatcattaatttgtctccatattatctacaatttcttactgttttctccacacatccctgactccttttttttcactttaactaaatgaatctacagacttctttctgcaaataatttcacagggataataccagatacatatggaaatctaaagaatctcactcagtttaggatagatgggagcagtttatctgggaaaatacccagttttattgggaactggaccaaacttgatagattggatttgcagggcacatccttggacggcccaattccttctgtcatatcttacttgacaaatttgacagaattgaggatatctgatttgaagggaccaactatgacatttcctaatctgaagaatttgaaaattttgctaagactggaattgaagaattgcttagtggcatgtgccattactacatcatagtcatttcctattttctctttcagagatctgagctccaacatgttaacaggttcaatcccagattcatttcaggatttgggaaatctaaattacttctttctgactaacaattctctaagtggaccaattcctgattggatactgagcataaaacagcaaattgatttatctttgaacaatttcacaaagacttctgcaaataattgccaaaggccggatctgaacttagcttcaagcctctctcgcacagcaagcacttcaatatcttgtttgaagatgggccaaccttgttcaggaaaaccccagtttcattcactgttcataaactgtggaggacctgaaacaaagtttgagggcaatgaatatgaagctgacctcagtccacttggcatttcaaactatgttcctggtaatagtggcaaatgggcttatagcagcactggagtatatctaggaaatgcaaaagctgattatatagcaacaaatcagctttctttggatattaatggccctgattactaccacacagcccgcatagctcctctgtatcttaattactatggcctttgtatgctgaacggcaattataaagtgaaacttcattttgctgagatagcattctctgatgaccaatcatattgcaaccttggaaagcgtgtattcgatgtatcaattcaaggttttaaatatctgaaagattttaacattgcgaaagaagctggtggagttggtaagggaatcactagggagtttaatgttaatgttacagaaagcaccttggaaatccacttatcctgggcaggaaaaggaactaatgccattcctataagaggtgtatatggacctctcatatctgctatcactgtgaccccaaactttaaagtttatgcacatgggttctctactggaacaattgttggaattgttgctggggcatgtgtgattgtcatattgatgctctttgctctttggaagatgggtttcctttgtcagaaagatcaaacagaccaagaacttctaggtctgaaaacaggttatttcagtttaagacaaattaaagctgctactaataactttgacccagcaaataagataggtgaaggaggctttggaccagtattcaagggtgtactatcagatggtgctgtgattgctgttaagcagctctcctccaaatcaaagcaagggaatcgtgaattcatcaatgaaataggcatgatatctgctttgcagcatccaaatcttgtgaaactttatggctgttgcattgaaggaaaccagctgctgctagtatatgagtacatggagaacaatagtcttgctcgtgcactttttggtaaagaacatgagaggatgcaattggactggcccagaagaatgcaaatttgtctgggtatagcaaagggcttagcttatcttcatgaggaatcaaggttgaaaatagtgcacagggatattaaggcaaccaatgtcttacttgataaacatctgcatgccaagatctctgactttggtttagccaaacttgatgaagaagagaatactcatatcagcacaagaatagctgggacaattggttacatggctcctgagtatgctatgaggggttacttgactgacaaagcagatgtctatagctttggaattgtagctttagagattgttagtggaaagagcaacacaaattataggccaaaggaggagtttgtatatcttttagattgggcctatgttctccaagagcaaggaaaccttctggagctggtggatccaagtcttggttcaaagtactcctcagaagaggccatgagaatgctgctgttagcactcttgtgcaccaacccttctcccactcttagaccatgtatgtcatcagtagtgagcatgcttgagggaaaaactccaattcaagcaccaataattaaacgcggtgacagtgcagaagatgtaagatttaaagcctttgagatgctatcacaagacagtcaaactcatgtctcttctgcattctcacaagatagtatagagcaaagaagcaaatcaatggggggaccatggcttgactcctccatatcacttccaagtagaattgattaggcttcaaccgatcaacttattagatattccaattatgtgtgatttgcaagtcggggaagttaactcattaaattttaattcatagttgcttgctatatgtatgtatggtggtttaaaggctattaatggaggtttccaacaaaaggggtaatttcatttggaattttattaaatggggatattttttaattaattttcaaatgtggtaagtcataaattattttactatttttaggtatgaaataataaaaaaattcatgactttgaatttttgtcctccctaccccgggttttttttc

SEQ ID NO: 104901 - DNA, 493 bp, Glycine max
  Clone ID: PAT_MRT3847_65741C.1
acacgttatctttactttttctcttcatcacagttcaatctttactcaaagagtatagaagatgaggaagaattgcaacttggagcttcgccttttccctccttccctctgcgatcttcgccccatgatggaagcagaagttagtgagagaccccaacaacaggtcgcccaccatcaacagcaacagcaaccacaaccacaacatccgctgaccattttctatgatggcaagatttcagtttcagatgtcacagagcttcaggccagatccatattaatgctagcaaataaagagatggagaaaagagtgatgacaccaacggggtcagaaccatcttcaccaatattactgctatcacctcataacatgtatagccccggcactggactttacatgaaaagatcactgcagaggtttctccagaagagaaagaatcgtgtgcaagaaacatgcccataccatcacgagctaattaatgttaaattatcaaaa

SEQ ID NO: 104902 - DNA, 667 bp, Glycine max
  Clone ID: PAT_MRT3847_65742C.1
tacggctgcgagaagacgacagaagggtccacttgtgggaatttagtaagttgaaaaatcatctccatcttgacgacgagacgacttacaacagatttgagttgcaccaatttagcattcattttttacgtacccatacctacatgtaatttctctttccattattattcacaccaaatttcccattgaaatagttattctcatttattttcttggatacacatttattatggttttgacgcttcatataaccaaccaattcccatgaactgactcattaatactatcaataaatgtagcatcattgttaagcaatgatgtcaccaaattgttagttgcaagtgttacatcactaatgagtctaggttgatcttgaatgaaattaaggcttgttgttgtttattgagaagtaaatctatggtgacagctcggtttggaaatgttttgcgaaatgattgtagcaaccacaagaaaaaatatggcaaagtccctcatattcaatatgataccaaaagaaccacaccttaccaaccatcagtttattgagattgacctcaacacacacctaagcaaatataactcgacaaacatccaacgtattactatccattttaacaggttatccaaattccaatgcggaaaaaaaaaaaaaaaaaaaaaaccaaaa

SEQ ID NO: 104903 - DNA, 391 bp, Glycine max
  Clone ID: PAT_MRT3847_65743C.1
acttttcttcggtgatttaccgagaacacgggcaggctcaccttaaaagcgggaacaaacgcattctccacgggatggactgaatcggtcaatagattgctgcttatgggcaacgatattctgaggtgaagaaatgcactctctgatggtttgactaccatgcaagatttaagcactatggcctatatgataatcagcctatcactctgctatgaaagataggagcgcgaagggacacaccacctgttgggttgctgttcaaggattgcgattaattagaaagacgtgcggagagaagaatgtattatcgcttctactttcctatttacagtaatactccatgcatagactatgagatgcttcattagatactgcactgaaaaattactag

SEQ ID NO: 104904 - DNA, 369 bp, Glycine max
  Clone ID: PAT_MRT3847_65744C.1
gcaacgcctactgtctatcaactacgcttaagcagaaggtccagtcaaggagttcttctctccaggcaatataaatggaggattcattggagaattggatttcacagttggaaatggaggaatatgatgatgtgttgaatgaaagtcatcatggctcatttgatgagcaagagttcctaagagagatccttgaggagcagccagaaaacttgtcacctcaaagagaaaacatctgcagcaccagccccaccaacagcactgtgtcctttgatgaggcaattagctttaattatgcgagtggcagcactctccacaaaagcaacagctccaactccatcaagtctttgaaaagatcatcatcatcaagtg

SEQ ID NO: 104905 - DNA, 405 bp, Glycine max
  Clone ID: PAT_MRT3847_65745C.1
ggttgctatataatttccttgtcgatcctcttgtaaccttgtttttgctatatttggctttggcacatgacaatttttaagtaactattactggggacagtctttttgttatacttgtaattttgatcatccttgaataacagaactattgaaggggggaaaagatcaaaagactactaaaagacacttgatagactgatgaatctgaagtttctttttttgttggtgtaatatgttgcatcattgcctagtcttaaggagagcctctgtggtagtggtgctagccttatggaaattatgtgtatcatgctcctaccgatgtaactaaattattatattagactatggagttgttgtatgaactcatgtcaaagttactatgatgagtatgtttattatttcttg

SEQ ID NO: 104906 - DNA, 393 bp, Glycine max
  Clone ID: PAT_MRT3847_65746C.1
agttccggttcttgggagttggtactgtacgcacattggcagtttcagttcttggtattgtgtggctgatttgattctttaacttccattgccacaagtaaataatattttacagcacttaattgatctgtgattctaatagtaactcaaaagatgagaattttggttgctttctctgctcaaactgcgaaacagtagcattaattactgaaatgagatagttgtgttcaatctagagtgaaatccagtgcttagcagatgtttgtggtgctctgcactgtgaccatgagatgaattctggatctaacacatcaacgtgtaatcctgctgctgctgcaaaacatacacatctatgtgaggtatgctttgttctgtctattcatttgctataat

SEQ ID NO: 104907 - DNA, 1770 bp, Glycine max
  Clone ID: PAT_MRT3847_65747C.1
acgggctcacagtttcagcaggaactataaattgggatggtcctttaaggattgaagcttcttcaactggctccaacactatgatatcgaagattgtacgcatggttgaggatgctcaatcacgtgaagcacctgtacaaaggcttgcagattcaatagcagggccatttgtatacagtgtaatgactttgtcagcagcaacatttgcattttggtattttgtaggatcacacatatttcctgatgttttgctcaacgatattgctggcccagaaggagatcctttgttgttgagtttaaaactatccgtagatgttttggttgtttcttgtccatgtgcactgggtcttgctacgcccacagcaatcttggttggcacctcacttggggcaagaaaaggacttcttattaggggaggggatgtgctggaacgcttggctggaataaattatattgctctagacaagacaggaacccttaccaaaggaaaaccagttgtgtcggccataagctctatcctttatggagaatctgaaattcttcggcttgctgctgcagtggagaaaacagcatctcacccaatagcaaaggctattgtcaataaagctgagtcatttgagttggtactttccggtaccaaaggacagttggttgtgcccggttttggaactttagcagaagttgatgggcatctgattgcagttgggtctttagaatgggttcatgaacgcttccagacaagagcgaacccatctgatttgacaaatctggagaatagtttgatgaatcattcattgaatacaacatcttcaaagtattcaaaaactgttgtctatgttggacgtgaaggagaaggcatcattggtgcgattgccatatctgacactgtgcgtgaagatgctgaatctactataacaaggctcaagcagaaggggattaaaacagtcctcttgtcaggagacagggaagaggcagttgcaactgtagcagatacagttggaattgaaaatgattttgtcaaagcatctttgtctccacaacagaaatctggatttatttcctctctgaaagctgctggacatcatgttgcaatggtaggtgatgggataaatgatgcaccctctttggctgtggctgatgttgggattgctctgcagaatgaagctcaagagaatgctgcctcggatgcagcatctatcatacttctggggaacaaaatttcacaagttgtcgatgcgctagacctagcacaggcaacaatgggaaaagtgtaccaaaatttgtgttgggcggtcgcatataatgttgttgccattcccattgctgctggtgttttacttccccattttgactttgccatgacaccgtcactttcaggaggactgatggctctgagctccatcttcgtggttggcaactcactgcttctacagcttcatgggtctcagatctctagaaaggttgggtcaactatagaaatcatatcttcccattcgaacacagatatgcttaatttaaaataaccatcggagttgtgtgcattatagagtaagccgtaatatacgttcgagcacagatacgctcaatgtaaaataatcatcggagctgtgcattattatatagaatattctactctcatgaagtatcctagcatgcatttagtatattttcttatacttttatcatgaacggtaactgtgacggaatattataaatcaattagtttcaactgaatgacaaattaattttaaatatatattttatctttag

SEQ ID NO: 104908 - DNA, 523 bp, Glycine max
  Clone ID: PAT_MRT3847_65748C.1
attttttttttttttttttttctttttattattttttttttacattttttttttttattgggggtattttggggttcttcccccccccaaagaacgggaaaatttctttatttaatatttacccccacaatccgcttttttttgttaagagagggtaaacacccttaaacttttggcttgggcacaaccggaaacacggggaagggaataaaaaaaaccttggacaccccctggcccgtttgtggcccccaccaacggggcccccccctttttcccatctaaagggtaaaaagggagggggccccatctccctcttaaaaaaagcatacctgtttctttccttccaaggggaaaaaaccggccggttttgctcaaggcttccacaaaagggggtggcttgcaacatggaaaacaccccccttggggcccattgtgagaggcggccccttggccaaaaaaaataccctcccggcttttcttggggtcccccaaccccaaaaaaagcctccggggtggcaccccc

SEQ ID NO: 104909 - DNA, 655 bp, Glycine max
  Clone ID: PAT_MRT3847_65749C.1
gttggccgctccactgcgaggggtgcgtccccgcgcagagtccgggccggtgcctccgacgagtgtgccgctgccgatcttcagggccgccgcaccctttggctccgcgacggggccggtcgcgggcggtggcggcggatgcggatcattgggcaggcgcttgtacgcgcgctgtttgccgcgtgggttgaggacgagcctgtgcgtgcggctggtgacgggcgcggcgtacagccgcccgtcagaaccgggttcaacgcgcaagccgcctgcattgccgcccgccaacaccgccgccgccgtcgcggaggtcgcgctgcggcccacatcgagggcgacggtggcaaagggcgggctgccatcccctccgctgacgtcctcgggctcggcctccggcaaagatcccggtggacgctctttcacgtcaccgcctgcgccgacgccgccgccgtacttctcgtcgtgcagcgcggacgacgacgacagctgcggcgtcagctgcagagggttcgcgtcgccgaccgctccggtgacagaggtcgggacgatagtgccggacagacgcggaggacggcgattggtccgcagcgcagcgatcgacgcggcggcagtggccgcggcggacggtgcatccgtagtgatggtgggcggagcg

SEQ ID NO: 104910 - DNA, 239 bp, Glycine max
  Clone ID: PAT_MRT3847_6574C.1
ttttgaaatagcgacactcactacttgatcataacaatgcgcttaggtgaggagatttaaatactacgtactgaatcatcaatgcgaggggcctgtcaaaaaccatatattggagactctaaccgactctgagagacagcgcccaaatacgaaatgatggcgatggatctcagattttcattctatgcgccggaaggaacaggcaacaaagctactggaaatgggtgaattactcggca

SEQ ID NO: 104911 - DNA, 174 bp, Glycine max
  unsure (1)..(174): unsure at all n locations
  Clone ID: PAT_MRT3847_65750C.1
catttctccatttcccaatctcgattctcagatccagcttcctcctccttctcatctccatggcctccattttcaccctcttcctcatcctcttcttccccgagaggctcacttcgccgtggntcagatctacaagcctggaaagccangcgnttccctctccaatgccactcc

SEQ ID NO: 104912 - DNA, 160 bp, Glycine max
  Clone ID: PAT_MRT3847_65751C.1
gcattgggacttgcctaggactagagaaggtttttataggttcaaaggttcagagactgcatcaggtgttagaggttgtgctttttctgcacatgctgatgtgatatggatggagactgcacccccaaatgtggatgagtgcacgagttacgcgaggggg

SEQ ID NO: 104913 - DNA, 385 bp, Glycine max
  unsure (1)..(385): unsure at all n locations
  Clone ID: PAT_MRT3847_65752C.1
tgtcggcggcggtggtgtcggcgaaggatggcgcggtggcgacccgggtggaggcggagtccgggacgctggcggaccggctgagggtggggagcttgacggttgctgggttgtcttacaaggagaagttccttgtgaggagctacgaagttgggatcatttagactgccactgttgaaaccattgctactctcttgctggaggttggctgttctcntgctcagagtgttggctcttctcctgntggttttgcntccaccccttcgctgagnaatttgcgtctcctctgggtttctgctcgcctgcccgttgtaatctncaaatcccctgcttgttgtgccgttgctgtgttngttcctggtgcccnggtgttggtagggttggg

SEQ ID NO: 104914 - DNA, 118 bp, Glycine max
  unsure (1)..(118): unsure at all n locations
  Clone ID: PAT_MRT3847_65753C.1
tccactccaaggaacatagcttcgatcaatctatcagatatntgacagtattcctctcacaatctgagtcnntgcaatgaagaaagattgtaagacatacaacactttttggttttca

SEQ ID NO: 104915 - DNA, 285 bp, Glycine max
  Clone ID: PAT_MRT3847_65754C.1
cacgtgcctcctggtctcagtatggcgctgtcctgggttcttacagtcctgagcctcctacctctgctggaagcccagatcccattgtgtgccaacctagtaccggtgcccatcaccaacgccaccctggaccggatcactggcaagtggttttatatcgcatcggcctttcgaaacgaggagtacaataagtcggttcaggagatccaagcaaccttcttttacttcacccccaacaagacagaggacacgatctttctcagagagtaccagacccgacaggac

SEQ ID NO: 104916 - DNA, 191 bp, Glycine max
  Clone ID: PAT_MRT3847_65755C.1
gttaacaaacttttctcaggtggggatcaataatagcacatggaccttagtaacacaacccgtcatcatgcttgtcttgcaagacatggggtttaataaatagggtaacttatgagatagggaatacatgggggtcacagcatcacggaaggcacaccgctcttgggcttatgttagatcaacatggtatg

SEQ ID NO: 104917 - DNA, 263 bp, Glycine max
  Clone ID: PAT_MRT3847_65756C.1
ctcaaaatcaattatattcactttaaaattaatttttaaaattttaaaacttatgcaaacaacaaatgtaaaagtttttgcccaataccaaaacaaaatgtaatgtagaaaaacaaatgtaaagttttcatcctgtatcaagattttgtgatatcccgtcgaatttattttaattcaataagagatattctcaattgttattcaaaggaacacttatttttaagacaaaactccaaagataacatgttcataaattaggtgaa

SEQ ID NO: 104918 - DNA, 286 bp, Glycine max
  Clone ID: PAT_MRT3847_65757C.1
tacggctgcaagaagacaacaaaggggggggcagtgatagttgtattgttggcgtatcaacaagcctacattattctaatcacctcctatgactatctttgtcttgtaggatcgacacacgccaacacgattatgaagagcccccaaaaactgttgttctcgatcactgaatgtccctcgggatgcatatgctacgcgattgtacgcgcctatattcctaaaaagtgcaggggggtaacctccaccatctcgcatttaaacagtgatatagtttgaacactaccaa

SEQ ID NO: 104919 - DNA, 560 bp, Glycine max
  Clone ID: PAT_MRT3847_65758C.1
tttcccctttttttttttttttttttttttttttttttatataaaactccatccagtttctaattttaatcattaatttggcatggggggggggaaaatattaaagtctaaagtattatgctcctctaccaataaaaagcacaaatacttaatagtatctaataagggtaactagctagagaaaaaaaggcttcataagaattgtaaaatgtctcataaaaactcaattccttctaaatggcgcctggtattactggagggagtaagttgatagcagttagctggcaccctgcatacacttgatttagtaaaatcatccccaaaatacgacttcatcttgatatgtgcaaacttctgtctacacttctttaataatactgctttgtttctttttcccttgctgggttctatagcacataaaagaggccaattcccctcctgcattcaagtgtgttaattgaaccaaaaggttcagagctagtgcctctttttcttcatacctttaatggatgattttccatctttccttggcttattatcaggagggtaactgaacttgc

SEQ ID NO: 104920 - DNA, 3132 bp, Glycine max
  Clone ID: PAT_MRT3847_65759C.1
ccacgcgtccggtgaaaaatttgaaattgagaaggaaaaagggaaccctattgctatttgctggtcctatttcaccacactctgcgccgttcttcttccccggtttcgtccctctgttctgctgagcgacgatttgttctctggcacaaccgttccagcacacaatcgagcggtgaaaagcgtgctgctgcctattcatgtgttcaacagtgtagcagttagctcattggtttttgggtgattcattcatttgaattggaagctgtgaaaaattcagtgttcaactagagcataatgggatccaaaaatgcaaacgggaagaaccacaaggacaaaaggaagaagtttaaggataatttgaattcaaatcattcatccactggtgatgccaaggttatcattatcagtgatcctcgatattcaaaggctcacacggatcctcggtttcgtgaggctccaaagcgtgaaacgaaggtggccattgactctcgcttcaaccgcatgttcagtccgaagagttttttgccctcttctgctcttattgacaagagaggcaagcccaagaacaacccaacctctcagcttggttctctgcgccattactacaaagttgatgaaaaggaagttgagcagagtagtgatgaggaagaagataatgaagaggaattggtgaaagccaatcgaatgaaaccggagagtgacaaaggaactgaattagaagagaccagtgaatctgagtcagaagaaaccagtgaatcagagtctgatgtggacacagatacagatgaaggtgcagatgaggaagtttacgaggaagaagcctctgatgtccatgaagacatagcaacgattgacaaagaaactcatagggttgcggttgttaacatggactggagatatgttaaggctgttgatttgtatgtattgttaagctcatttgtcccacctaatggtctgatcaaatcggtaagggtctatccatctgagtttggccttcaacgtatgaaagaggaggaagttcgtggacctattggtctatttgatgatgaagatagcagcaatgatgaccttgacaatgagaaactgcgtgcatatgagaagagcaggatgcggtactattttgctgtggtggaatgtgactcaagtgccacagcaaattacatttacaaagaatgtgatggtcttgagttaaaacaatcatctaatgcgctcgatttaaggtttattccagacaacatggaattcaaacacccgcctcgggatgttgctactgaggtgcctgcaaattatgagtgcaaagatttctattctcgagcacttcagcacagtgaggttaatcttacttgggatgatgatgaacctcttcgtgcaaagacattgaatcggaaactcactgatgagcagttagccgagtttgaagtgaaggaattcttgacttctgatgagagtgaaagtgatgatagcaaggataacaacgagacagatgatcagcctgataaaatggcaaaaaaaacgagccaagtaccgtgctttgctccagtctggtgatgattcagatggaggcaatgaacatgataatgcccagaatatggaggtcaccttcaatacaggtttggaagatttaagcaaatatattatggaaaagaaggataaaaaatcagaaacagtttgggatgcatatttgagtaaaaaaagtgagaaaaagaaggccgggaaaaataaaagaaagtattcatcagatgatgatgatagtgatgatactgatcaagaggcaactgaagaagcagatgacttcttcattgaggagcctgctgctaagaagaggaagaagccacaaaataaagaagatgaagaacaaaggcatgaagagattgatgggctagacaaagcgagcaaagaggagcttgaactgctacttgctgatgataaggggacagatactggtgtcaagggatataatctaaaatttaaaaaaggcaagggaaaaaaaaggagagagaatgatattgacgaggagaagataccaagtaatgcatacaatgatccacgtttttcagctcttttctcaccaaactatgcaattgatcctaccgatccacaatttaaaaggagtgcaacatatgccaggcagctagcacagaagcaacagaaggataatgcggatccaccagtggaaagggaacctacaaaactaaaaggaacacaattgtcttctgaagattctggtaggatgaaggatgaggaagaaggattagatgctttgaagtcaaagaaagataaatatgaattatcatctttggtaaaatcaattaagatgaaatcaaagcaagttcagttaccctctgataataagacaaggaaagatggaaaatcatacattaaaggtatgaagaaaaagaggcactagctctgaaccttttggttcaattaacacacttgaatgcaggaggggaattggcctcttttatgtgctatagaacccagcaagggaaaaagaaacaaagcagtattattaaagaagtgtagacagaaggtgagcaatggaggttcatgtagtttaatcttctgccaaaacgttgaatgtcttgttcctgttcaaatcatccttttgaaattttgaatccacataattgaaatgcttaattcatttttattttgttgcaactaaatgtagtacgacatcaattaatgagtttgatatagtcttgaaacttgcatccgttttatggttgtgccatgatcaccatcatgtttgtcaatctagatttgaaaatattcctttacaattaactgctgagagttttctcttctgggttgtataataagattatttttcttgtttagtttgcacatatcaagatgaagtcgtattttggggatgattttactaaatcaagtgtatgcagggtgccagctaactgctatacaacttactccctccagtaataccaggcgccatttagaaggaattgagtttttatgagacattttacaattcttatgaagcctttttttctctcgctagttacccttattagatactattaagtatttgtgctttttattggtagaggagcataatactctagactttaatattgtcacaccacccatgacaaattaatgattaaa

SEQ ID NO: 104921 - DNA, 821 bp, Glycine max
  unsure (1)..(821): unsure at all n locations
  Clone ID: PAT_MRT3847_6575C.1
gtacgacactgccaggttacccgggtnccggaaatctcccgggttcgaccccacgccgtccggcactcctactagtactactacagtacacatataataataaataagccttcgattttcgcttagggtgagagaacctaagagatataaataagccataataaggattcgattcggaaaagaagaaaagacattcaacaaacaacgcaatgggtattccgtcggaactgagggacatgttgttgcccaacaaaaagggcgtcctcgttgcctctcccgcagaggacaggaagactttgaggtccaagcaatgcactagggaaggtgtgcgagctggattcaaggctgcttccattgctggtgttgccagtgctgtgcctacattggctgcagttcgtatgattccatgggcaaaggcaaacctcaattatactgctcaggcacttatcatatctgctgcatccatcgcctcatacttcatcactgctgataaaactatcttggagtgtgcaaggaaaaatgccaagcttgaagatgctttgagacacaatcaacaatagttgtcttagaaactgaaagaagtacccatcattgttcttggtgcatgatggtgctactcgttgtaatacaatcaataagcctattgcaaagtgttaatttcttggtctgtatttcaaggtgcatattcttaaacaatatgtttgttttgtatgagtctgacagagtcgtttggaattgccactccctatggcttcagaagttgaaaatctaagggcccgtttggagtggttgagttttttgattttgggttttagagtttt

SEQ ID NO: 104922 - DNA, 235 bp, Glycine max
  Clone ID: PAT_MRT3847_65760C.1
ggaagacaaattggctttataagaggtaagtggatcaccgtgcgaaacgggattatccccggtcgtgaaaaaaagcacaattgtcggacaccggtccagtaaacaaatgcggaaagatcaattataacgcttctggctcccattaacgatggtattgggatagacaacgaatccgtcagctatagaacgcaacagccttatatgaataaatagaataaagaaaccccggctacta

SEQ ID NO: 104923 - DNA, 911 bp, Glycine max
  Clone ID: PAT_MRT3847_65761C.1
ctcttggctctagcatggcctctctttttcttagacaggctctgctcctccgcgtttgcttccacaactaccaacgcttcaccgccggaggcgtcgccgcacgtcaccggctgtggtgcagcgcagccgccaacctaccgtcagacgaagcggagaagaaaacaaactccggcggcatcagcaacagctcctttgcacggaaagctcagtatcctccgtcaagtgaagcgcggtgggaggacggccccgattaccgcaaatggaaggacaaagaaaaggagattctcagcgacattgaacctatcgttgttctcgccaaggatattctccactcacgaaggtacatggatggagcgcgattgaatgaggaggacgagaaggctatagttgagaagctccttgcataccatccacattctgaagataagattgggtgtggccttgaatccattatggttgaccgtcatccccaatatcgacaatcaaggtgtctttttgttgtaagaactgatggtggctggattgatttctcctatcagaagtgccttcgggaatacattagagataagtaccctactcatgcggaaaggtttattagagaacattttaagcgtgggagtggttgatgtatatatagtagaatttgtatactttggtgtgctgactgctttttacatctgctttccccccttattgttcagtgtcctgcctccattgtcaatggtagtggataatcattgactgggatatcaagcttattagttattatgaaagctacacaggaaattattgaagtgaacttcactttgttgacttgtaaattggtggttaggtaactggttggcagtaaggaacagaatcttgttgttgatccacctctaaaatattatataagatatttgctagaattc
